United States Patent Application Publication US 2021/0199660 A1 - sequence listing, part 2

SEQ ID NO: 13380 - DNA, 120 bp, Artificial Sequence
  ENSG00000011114_86 (sequence is synthesized)
gttccatgcaaagaaataggaatcagatggtattgagattttcagtagcaacaactgaataccacaatacagtgaagtagtgtcttccaaaagctgatggaaaattattttaaacacaaa

SEQ ID NO: 13381 - DNA, 120 bp, Artificial Sequence
  ENSG00000011114_87 (sequence is synthesized)
atcctatatttagccaaacagtcaatcaagtgtaaggctaaataaaggcatttttcagtcatacctcgaaaaactgcctgtgtagggatatttcccctgcttccccactcaggcagctgc

SEQ ID NO: 13382 - DNA, 120 bp, Artificial Sequence
  ENSG00000011114_88 (sequence is synthesized)
tgggaatgtattccaccaaatgacgaagcaaaccaagaacaaagaagtgaaggatctagaaaatgggctccaacacgggaaggaagcaaagggagatcccacgcatcagccacacagtag

SEQ ID NO: 13383 - DNA, 120 bp, Artificial Sequence
  ENSG00000011114_89 (sequence is synthesized)
gtcttgtgggcattcagtctagcccagaccgggagggtgaaagtctccaaggaaagaggtgtctcggaagaaatcaattactttcaatgtttgaacattaaatagcaaatgacaaagcaa

SEQ ID NO: 13384 - DNA, 120 bp, Artificial Sequence
  ENSG00000011132_0 (sequence is synthesized)
aatgggccagggctctgcgcggatagaggagcgggcgccgggaccgggaatccccgagctgcgccttctggggacgcggcccgggctacgtcggggccgtccgtggggagcggggtcctg

SEQ ID NO: 13385 - DNA, 120 bp, Artificial Sequence
  ENSG00000011132_1 (sequence is synthesized)
gaggctgcgcggggctgaggcggcctcgatttgggaactgcctgaagatgccggcctaagcctggagtccaggcatggacttccccacaatttcccgatccccttcggggcctccagcca

SEQ ID NO: 13386 - DNA, 120 bp, Artificial Sequence
  ENSG00000011132_2 (sequence is synthesized)
tggacttggaggggcccagggacattcttgtgccttcggaggacctcacccctgacagccagtgggaccctatgccaggaggccccggcagcctcagtcggatggaacttgatgagtcaa

SEQ ID NO: 13387 - DNA, 120 bp, Artificial Sequence
  ENSG00000011132_3 (sequence is synthesized)
gccttcaggagctggtgcagcagtttgaagctctgccaggcgatctggtgggcccatccccaggtggagccccctgtcccctacacattgccacaggccatggcctggcctcccaggaga

SEQ ID NO: 13388 - DNA, 120 bp, Artificial Sequence
  ENSG00000011132_4 (sequence is synthesized)
ttgctgatgcccacgggctcctgtctgccgaagctggccgggatgacctgctgggcctcttgcactgcgaggaatgcccgccttcccagactggtcctgaagagcctctagagcctgccc

SEQ ID NO: 13389 - DNA, 120 bp, Artificial Sequence
  ENSG00000011132_5 (sequence is synthesized)
cccgactgttgcagccccctgaggacccagatgaggattctgactccccagaatgggtggagggggcctctgctgagcaggagggcagcaggagctcaagcagttccccggaaccctggc

SEQ ID NO: 13390 - DNA, 120 bp, Artificial Sequence
  ENSG00000011132_6 (sequence is synthesized)
tggagacggtgcctctagtcacacctgaagagccacccgctggtgcccagagccccgagaccctggcttcctaccctgccccccaggaggtgcctggtccctgtgaccatgaagacctcc

SEQ ID NO: 13391 - DNA, 120 bp, Artificial Sequence
  ENSG00000011132_7 (sequence is synthesized)
tggacggtgtcatatttggggccaggtacctggggtccacccagctggtgtcggaacggaacccgcccaccagcacgcgcatggcccaggcccgggaggccatggaccgcgtcaaggccc

SEQ ID NO: 13392 - DNA, 120 bp, Artificial Sequence
  ENSG00000011132_8 (sequence is synthesized)
ccgatggggagacccagcccatgacggaggtggacctgttcgtctccaccaagaggatcaaggtcttgacagcggactcccaggaggccatgatggaccacgccctgcataccatctcct

SEQ ID NO: 13393 - DNA, 120 bp, Artificial Sequence
  ENSG00000011132_9 (sequence is synthesized)
ctgcgtgctggtgctgatggcgcggcggcggctggcacggaggccggcaccccaggaccacggccgccgcctctacaagatgctctgccacgtattctacgcggaggacgcccagctcat

SEQ ID NO: 13394 - DNA, 120 bp, Artificial Sequence
  ENSG00000011132_10 (sequence is synthesized)
cgcccaggccattggccaggccttcgccgccgcctacagccagttcctacgggaaagcggtattgaccccagccaggtgggcgtgcacccgagcccaggcgcctgccacctccataatgg

SEQ ID NO: 13395 - DNA, 120 bp, Artificial Sequence
  ENSG00000011132_11 (sequence is synthesized)
ggacctggaccacttctccaacagtgacaactgccgggaggtgcacctcgagaagcggcgaggggagggcctgggcgtggccctggtggagtcgggctggggctccctgctgcccacagc

SEQ ID NO: 13396 - DNA, 120 bp, Artificial Sequence
  ENSG00000011132_12 (sequence is synthesized)
cgtcatcgccaacctgctgcacggggggcctgctgagcgctcgggggccctcagcatcggggaccgcctgaccgccatcaacgggaccagcctggtggggctgcccctggctgcgtgcca

SEQ ID NO: 13397 - DNA, 120 bp, Artificial Sequence
  ENSG00000011132_13 (sequence is synthesized)
ggccgctgtccgcgagacgaagtcgcagacgtcggtgacactcagcatcgtccactgccctcccgtcaccaccgccatcatccaccggccccacgcccgcgagcagctgggcttctgcgt

SEQ ID NO: 13398 - DNA, 120 bp, Artificial Sequence
  ENSG00000011132_14 (sequence is synthesized)
ggaggacggcatcatctgcagcctcctccgtggtggcatcgccgagcgtgggggcatccgcgtcggccaccgcatcattgagatcaatgggcagagtgtggtggccacgccacacgcccg

SEQ ID NO: 13399 - DNA, 120 bp, Artificial Sequence
  ENSG00000011132_15 (sequence is synthesized)
catcatcgagctgctcaccgaggcctatggcgaggtgcatatcaagacgatgccagctgccacatatcgcctccttacaggccaggagcagcccgtgtacctgtgaccacctcatccctt

SEQ ID NO: 13400 - DNA, 120 bp, Artificial Sequence
  ENSG00000011132_16 (sequence is synthesized)
gcctgccactgtgccttcgcctccatggccccggagccccatcctgggcctgccctggctggccaggaccccagcggttcttggtcctgtatgatttcctaatataaaaacagtaaaagc

SEQ ID NO: 13401 - DNA, 120 bp, Artificial Sequence
  ENSG00000011132_17 (sequence is synthesized)
ttatgcatttggcaaagtctcggatcagggtctacgggaccgaggaccttgtccttcctggaagccactagaagccggtgctgtgaaaatactctgtttattaaagaccaggcggaggga

SEQ ID NO: 13402 - DNA, 80 bp, Artificial Sequence
  ENSG00000011132_18 (sequence is synthesized)
agctccagcctgggcgacagagcgagaccgtgtctcaaaaaagcaggagtgggactgtctggttccggcctgatcatgga

SEQ ID NO: 13403 - DNA, 120 bp, Artificial Sequence
  ENSG00000011132_19 (sequence is synthesized)
aagcaggagtgggactgtctggttccggcctgatcatggaattctggggacacggggtgaaggtatctgtgggtgctagatctggctttgaatccagccatggcctggactcactggttt

SEQ ID NO: 13404 - DNA, 120 bp, Artificial Sequence
  ENSG00000011132_20 (sequence is synthesized)
cccacctgcgagtccttgagggatggacagaaggttctagacctgtgagggccaggctgcttggatggttctagaacagtgggctgtgcttcctggctggagagtgctaagccaccagct

SEQ ID NO: 13405 - DNA, 120 bp, Artificial Sequence
  ENSG00000011132_21 (sequence is synthesized)
agaacactgtgtctcccggccatctcggagagcgtagccctggggcagagcctgtgggagtgggcccctgggggccgaccctcttcgctgtcgccctcagtgcctggtccctgtgaccat

SEQ ID NO: 13406 - DNA, 87 bp, Artificial Sequence
  ENSG00000011132_22 (sequence is synthesized)
accttaaattactttttttcataccaaatcttcaatatctagtgtgtattttctatttacatctctattcagtcgagccacatttca

SEQ ID NO: 13407 - DNA, 120 bp, Artificial Sequence
  ENSG00000011132_23 (sequence is synthesized)
attttctatttacatctctattcagtcgagccacatttcaagtctgtgatagatacatgtgcctggtggctaccacagtgaatgacgtatctctctagaaccccagagtggagctcttgt

SEQ ID NO: 13408 - DNA, 120 bp, Artificial Sequence
  ENSG00000011132_24 (sequence is synthesized)
tccagaatgcttagatcctgaaggatagtgggcagaaccgactgtggtgtagggtgaatttcacttagtggtgtccagaacggggccctacacccgtggttctaaaccaaagagccgtag

SEQ ID NO: 13409 - DNA, 120 bp, Artificial Sequence
  ENSG00000011132_25 (sequence is synthesized)
ttactggttagaatgttctagggccactggcagagctgtctggctctgggtagctcagggaattctagaaccatgagagtaaagcttttttttttttttcctttttgtttttggagatgg

SEQ ID NO: 13410 - DNA, 65 bp, Artificial Sequence
  ENSG00000011132_26 (sequence is synthesized)
atggaatcttgctctgtcacccaggctggtgtgcagtggtgcgatctctttcaagtagctgggat

SEQ ID NO: 13411 - DNA, 120 bp, Artificial Sequence
  ENSG00000011132_27 (sequence is synthesized)
taaagtgctggggttacagacgtgagccaccgcacccagccaggagtaaagctttatgtagttctgggctgggttgggagtattctggaactgtctagaattctcctggaacagaattgt

SEQ ID NO: 13412 - DNA, 120 bp, Artificial Sequence
  ENSG00000011132_28 (sequence is synthesized)
ttgttccttgactggtcaggtaattcttagaatccctggtgtagccaaaggtgtgaactactgaaggagattctagaaccacaggaagagctgcctgacgcgattgtgattaagatgttc

SEQ ID NO: 13413 - DNA, 120 bp, Artificial Sequence
  ENSG00000011132_29 (sequence is synthesized)
tggaatcacggagcagagaagtctgattctagagtgataataagattctaaaactcctgacagaattgctatgagacctgtcagagagttctggaatcaagggtcagaaccagctggggt

SEQ ID NO: 13414 - DNA, 120 bp, Artificial Sequence
  ENSG00000011132_30 (sequence is synthesized)
tctggagagtatgggaattttagacaggcagcagggtctgtctctgttctgagtggttctacaacccgggaacagagctgcctgctatcctgggctgactgcagacggttctagaacagt

SEQ ID NO: 13415 - DNA, 120 bp, Artificial Sequence
  ENSG00000011132_31 (sequence is synthesized)
gggcagagctggccagttctagattgatggagggaattccagaaccaagaagcaggggtccactgtggttctagaatgttgtggaggtttcgaaattggagtggggggtggagcgtcgtg

SEQ ID NO: 13416 - DNA, 61 bp, Artificial Sequence
  ENSG00000011132_32 (sequence is synthesized)
gtggaggtttcgaaattggagtggggggtggagcgtcgtggctcacgcctgtcatcccagt

SEQ ID NO: 13417 - DNA, 120 bp, Artificial Sequence
  ENSG00000011132_33 (sequence is synthesized)
gccctcctcactgcaactgtcgcctccctcagtgggccgtgcatttaacctccctcccataagcttatttttaaattctttttttgggacaaggtctccttctgtcacccaggctggagt

SEQ ID NO: 13418 - DNA, 120 bp, Artificial Sequence
  ENSG00000011132_34 (sequence is synthesized)
gcagtggcgcaatcatagttcactgcagcctcaaccttccaggctcaagcgatcctcccacttcagcctctctagtagctgggaccaccggggtatcaccatgcctggctaatttttgta

SEQ ID NO: 13419 - DNA, 68 bp, Artificial Sequence
  ENSG00000011132_35 (sequence is synthesized)
gcgtccagcctcctataagactccaagactctcggccgactccccgaaaccttgcccgctcctgggct

SEQ ID NO: 13420 - DNA, 120 bp, Artificial Sequence
  ENSG00000011132_36 (sequence is synthesized)
ctctcggccgactccccgaaaccttgcccgctcctgggctgtccctgccacccatgaggccccaggccccctggctgggtctttgatagcttttcccacagcccatgcgcagggagctgc

SEQ ID NO: 13421 - DNA, 120 bp, Artificial Sequence
  ENSG00000011132_37 (sequence is synthesized)
ctccctcatcgtccccccagcccagggctgcccctccccttccttctccccgtagattccccaagatgcggctgtctctccacctcccccaaagccccagggcagaaggctgtgtcctgg

SEQ ID NO: 13422 - DNA, 120 bp, Artificial Sequence
  ENSG00000011132_38 (sequence is synthesized)
gactctcaccccaggtggggacaggagggctcagctctgaggaccctggggactttggggacctggaggaggtgggtgggacaccccagggacgcgccactcctccccgcaggcccagct

SEQ ID NO: 13423 - DNA, 120 bp, Artificial Sequence
  ENSG00000011132_39 (sequence is synthesized)
ggggaaactgaggcccagagatagggagggacctgcccccgtcagaggaatgaggccacagtccgtgcagcctcttacagatgtttgcagcctgcctggagagcccggctgtcggcttgg

SEQ ID NO: 13424 - DNA, 120 bp, Artificial Sequence
  ENSG00000011132_40 (sequence is synthesized)
cttttggccataaggaagcgatatggctcgggtcagacagcttcgaccccatgcccaccgggcccgagtctgttctctatcacatctgagggggtcttccagaattgagcccctggactc

SEQ ID NO: 13425 - DNA, 120 bp, Artificial Sequence
  ENSG00000011132_41 (sequence is synthesized)
ggtgcctctagtcacacctgaagagccacccgctggtgcccaggtagtgcccgccccgccctccaggcatcctggactgcctggaaccaagcagggagactcagtcctgcccctcctcta

SEQ ID NO: 13426 - DNA, 120 bp, Artificial Sequence
  ENSG00000011143_0 (sequence is synthesized)
ccgatccagcgtctccgttgccaggaaaacagagcggcgcgctttccggcgcagtcgcggcgcgtcgcagctgtcatggcggagaccgtctggagcactgacaccggggaggcagtgtat

SEQ ID NO: 13427 - DNA, 120 bp, Artificial Sequence
  ENSG00000011143_1 (sequence is synthesized)
cgctcccgggaccccgtgcgcaacttgcgcctccgagtccacctgcaaagaatcacatcaagcaactttcttcattatcagcctgctgccgagctcgggaaggacctcatagacttggcc

SEQ ID NO: 13428 - DNA, 120 bp, Artificial Sequence
  ENSG00000011143_2 (sequence is synthesized)
acttttaggcctcagccaactgccagtggacaccgcccagaggaagacgaagaggaggagattgtgattgggtggcaggagaagctctttagccagtttgaagtagatctgtaccaaaat

SEQ ID NO: 13429 - DNA, 120 bp, Artificial Sequence
  ENSG00000011143_3 (sequence is synthesized)
gaaacagcctgtcagagtcctttggattatcagtaccgtcaggagatcctgaagctggagaattcgggtggcaagaaaaaccgacgaatctttacctacactgactctgatagatacacc

SEQ ID NO: 13430 - DNA, 120 bp, Artificial Sequence
  ENSG00000011143_4 (sequence is synthesized)
aatttggaggagcactgtcagagaatgaccactgcagccagcgaggtgccttcattcttggtcgagcgaatggcaaatgtcaggcgtcgccggcaggacaggcgagggatggagggcggc

SEQ ID NO: 13431 - DNA, 120 bp, Artificial Sequence
  ENSG00000011143_5 (sequence is synthesized)
atcctcaagtcacgcatcgtcacctgggagccctcagaagagtttgtcaggaacaaccacgtcattaacacccctcttcagacaatgcacatcatggcagacctggggccctataaaaag

SEQ ID NO: 13432 - DNA, 120 bp, Artificial Sequence
  ENSG00000011143_6 (sequence is synthesized)
cttggctataagaagtatgaacatgtcctgtgtactctgaaggtggatagcaatggtgtgatcacagtaaagcctgacttcacgggcctcaaaggaccctacaggattgagacggagggg

SEQ ID NO: 13433 - DNA, 120 bp, Artificial Sequence
  ENSG00000011143_7 (sequence is synthesized)
gagaagcaggagctgtggaaatatacgatcgacaatgtttccccccacgcacagccggaggaggaggagcgggaacggcgagtgttcaaggatctttatggccggcacaaggagtatctc

SEQ ID NO: 13434 - DNA, 120 bp, Artificial Sequence
  ENSG00000011143_8 (sequence is synthesized)
agcagcctcgtaggcaccgactttgagatgactgtcccaggtgccctccggctctttgtaaatggagaggtcgtttcagcccaaggctatgagtatgacaatctctacgtccacttcttt

SEQ ID NO: 13435 - DNA, 120 bp, Artificial Sequence
  ENSG00000011143_9 (sequence is synthesized)
ttcacgtttgaagccttcttcctccatgaggatgaatcttctgatgcactcccggagtggcctgtgctctactgtgaggtcctctcgctggacttctggcagaggtaccgtgtggaaggc

SEQ ID NO: 13436 - DNA, 120 bp, Artificial Sequence
  ENSG00000011143_10 (sequence is synthesized)
tatggggctgtggtgctgcctgccactccaggctcacacaccctgacagtctccacgtggagacctgtggagcttggcacggtggctgagctgaggaggtttttcattggcggttctctg

SEQ ID NO: 13437 - DNA, 120 bp, Artificial Sequence
  ENSG00000011143_11 (sequence is synthesized)
gaactggaggacctctcctatgtacggataccaggatccttcaagggggaacgcctgagccgctttggactccgcacagagaccacaggcactgtcaccttccgcttgcactgtctgcag

SEQ ID NO: 13438 - DNA, 120 bp, Artificial Sequence
  ENSG00000011143_12 (sequence is synthesized)
cagtccagggccttcatggaatcgagctcccttcagaaaaggatgcggagtgtgttggaccgtctggaagggttcagccagcagagttccattcacaatgtgctagaggccttccgtcga

SEQ ID NO: 13439 - DNA, 120 bp, Artificial Sequence
  ENSG00000011143_13 (sequence is synthesized)
gcccggcgccgcatgcaggaggcccgggaaagcctcccgcaggacctagtgagcccctctggaaccctggtctcctagctcacagcagccctggcccacagtgcaagaggacaagatggg

SEQ ID NO: 13440 - DNA, 120 bp, Artificial Sequence
  ENSG00000011143_14 (sequence is synthesized)
ggatatctgaggccagtgctctcctgcctcttcgtctttctgattagagaccacgttggtctgctgagaaccagaaaagctgggaaattcccggctggcccctctgcctagccttctgca

SEQ ID NO: 13441 - DNA, 120 bp, Artificial Sequence
  ENSG00000011143_15 (sequence is synthesized)
gggtcttctccctaccctgtggaaataaagccagagaccctgtggccccccctttatatttgcagccactgtcaatgggcatcacagcaaggcaggctttttgatctgaagctgtttggg

SEQ ID NO: 13442 - DNA, 120 bp, Artificial Sequence
  ENSG00000011143_16 (sequence is synthesized)
gtgaccccatagtgagtctggccttgactcacttttctggcttgtctcacagtagcaggggatctgctgttctccaccctttaaaaatggagcctttcatcttccaagaccaaagaagga

SEQ ID NO: 13443 - DNA, 120 bp, Artificial Sequence
  ENSG00000011143_17 (sequence is synthesized)
aggaaggtggacggtgagagggtcttaaatccccagcctgtgagtctcagcctctttccagggaagcctcattctactgcttggggcttgctgaggttgagatatgagttatttctgagt

SEQ ID NO: 13444 - DNA, 120 bp, Artificial Sequence
  ENSG00000011143_18 (sequence is synthesized)
tgctgaggttgagatatgagttatttctgagtaagtgaaggctgaaggcagtgctgagtcctttctgctagctgggtggtatcttttactgtgtttttttgtttgtttgtttttttgttt

SEQ ID NO: 13445 - DNA, 120 bp, Artificial Sequence
  ENSG00000011143_19 (sequence is synthesized)
agtgtggcatggtggaaaaggtagagggcgaagactcaggccacctggtccccgtcatcatttctgcatctatctgtctatatgaagtgggctgatggctgtgccagtttcctcatttgc

SEQ ID NO: 13446 - DNA, 120 bp, Artificial Sequence
  ENSG00000011143_20 (sequence is synthesized)
agataattgggaattggaaatgtttggcttgaaagagttcctgttcctctgaggactttctgcccccctccattagcgacaatgacgtggccttggcactgacttcctgacagtctctcc

SEQ ID NO: 13447 - DNA, 120 bp, Artificial Sequence
  ENSG00000011143_21 (sequence is synthesized)
atgtgcttcatgctcctctgattggactcagggtgagaagctgtatggcaaaattggctcatagcatatgtgtattgaatgaatcagcattcagtttggaataaaagcatctgtctttta

SEQ ID NO: 13448 - DNA, 120 bp, Artificial Sequence
  ENSG00000011143_22 (sequence is synthesized)
agtcgcggcgcgtcgcagctgtcatggcggagaccgtctggagcactgacaccggggaggcagtgtatcgctcccgggaccccgtgcgcaacttgcgcctccggtggacaccgcccagag

SEQ ID NO: 13449 - DNA, 120 bp, Artificial Sequence
  ENSG00000011143_23 (sequence is synthesized)
agcatataagaccgccgcttctcaaatgaggttggaatgttccctggtttagttgggggagcccaatagcccagtattagccttgaggtaatagagtctgggtgatggaataaggtttcc

SEQ ID NO: 13450 - DNA, 120 bp, Artificial Sequence
  ENSG00000011143_24 (sequence is synthesized)
ccaacagaactgcgcttcccaagaatgggaataagaatgggggtgaggccagcatggtgcgggggtgtctagagagagcagaaacctgaggctgtcccaatggcatgccacagggggaac

SEQ ID NO: 13451 - DNA, 120 bp, Artificial Sequence
  ENSG00000011143_25 (sequence is synthesized)
ctagtggcaggtcgtctgcagatttgtagatggggctggaggagaagtgccaattccctccaggcctgctgatcctttcccacttctcttcaccttagactgtcccaggtgccctccggc

SEQ ID NO: 13452 - DNA, 120 bp, Artificial Sequence
  ENSG00000011143_26 (sequence is synthesized)
tctttgtaaatggagaggtcggtaagtgtcttgctagcatagatctcttgatgcttaggcacgtgcctagatggagctgtgaatagtctcctccactctggtagaggccttgtctgctgt

SEQ ID NO: 13453 - DNA, 120 bp, Artificial Sequence
  ENSG00000011143_27 (sequence is synthesized)
tcaggattgggttgggtgctaagggtggtaggagaaaaagctaaaatagcttcctgttttctctcgtagtttcagcccaaggctatgagtatgacaatctctacgtccacttctttgtag

SEQ ID NO: 13454 - DNA, 120 bp, Artificial Sequence
  ENSG00000011143_28 (sequence is synthesized)
attgttctttctagggtctcatagcttccatctttgcttcctctagcttttttgcctcactgagttctgtgtgttatgtcagagcctagtaaggggagacaagtagcctgtctaggaact

SEQ ID NO: 13455 - DNA, 120 bp, Artificial Sequence
  ENSG00000011143_29 (sequence is synthesized)
gctgtgagctgctgctgctggcagccagcctggaatagaatgggcacagtctacaggtggtgaggctgctgctcccttctctgcctgctagagggcctgggggagctgccagtatctctg

SEQ ID NO: 13456 - DNA, 120 bp, Artificial Sequence
  ENSG00000011143_30 (sequence is synthesized)
attatatgcttgcagagtgcatactgggagaagtaaccactgggcttgacttcctccatgcatcatgaaaaaagacaggtagtggagtctggaacaatatagataaaattcatcagggga

SEQ ID NO: 13457 - DNA, 120 bp, Artificial Sequence
  ENSG00000011143_31 (sequence is synthesized)
ttcagcccaaactctgagtatatgggtttgaagaggaattcagtatagctatggaaaatggcttatgtcctcaatttgcctatgacaaaaatacccttgtgaccttgttttacattttct

SEQ ID NO: 13458 - DNA, 120 bp, Artificial Sequence
  ENSG00000011198_0 (sequence is synthesized)
agtcggcctgtcagccggcttcgagataagtcccggcgcttgcgcggcggcggctatggcggcggaggaggaggaggtggactctgccgacaccggagagaggtcaggatggctaactgg

SEQ ID NO: 13459 - DNA, 120 bp, Artificial Sequence
  ENSG00000011198_1 (sequence is synthesized)
ttggctccccacatggtgccctacgtctatatcacaccttaaagaagctgaagagaagatgttaaaatgtgtgccttgcacatacaaaaaagaacctgttcgtatatctaatggaaataa

SEQ ID NO: 13460 - DNA, 120 bp, Artificial Sequence
  ENSG00000011198_2 (sequence is synthesized)
aatatggacactgaagttctctcataatatttcaaataagactccacttgtccttctccatggttttggaggaggtcttgggctctgggcactgaattttggagatctttgcaccaacag

SEQ ID NO: 13461 - DNA, 120 bp, Artificial Sequence
  ENSG00000011198_3 (sequence is synthesized)
acctgtctatgcttttgacctattgggttttggacgaagtagtagacccaggtttgacagtgatgcagaagaagtggagaatcagtttgtggaatccattgaagagtggagatgtgccct

SEQ ID NO: 13462 - DNA, 120 bp, Artificial Sequence
  ENSG00000011198_4 (sequence is synthesized)
aggattggacaaaatgatcttgcttgggcacaacctaggtggattcttggctgctgcttactcgctgaagtacccatcaagggttaatcatctcattttagtggagccttggggtttccc

SEQ ID NO: 13463 - DNA, 120 bp, Artificial Sequence
  ENSG00000011198_5 (sequence is synthesized)
tgaacgaccagaccttgctgatcaagacagaccaattccagtttggatcagagccttgggagcagcattgactccctttaaccctttagctggcctaaggattgcaggaccctttggttt

SEQ ID NO: 13464 - DNA, 120 bp, Artificial Sequence
  ENSG00000011198_6 (sequence is synthesized)
aagtctagtgcagcgtttaaggcctgatttcaaacgaaagtattcttcaatgttcgaagacgatactgtgacagaatacatctaccactgtaatgtgcagactccaagtggtgagacagc

SEQ ID NO: 13465 - DNA, 120 bp, Artificial Sequence
  ENSG00000011198_7 (sequence is synthesized)
tttcaagaatatgactattccttatggatgggcaaaaaggccaatgctccagcgaattggtaaaatgcaccctgacattccagtttcagtgatctttggcgcccgatcctgcatagatgg

SEQ ID NO: 13466 - DNA, 120 bp, Artificial Sequence
  ENSG00000011198_8 (sequence is synthesized)
caattctggcaccagcatccagtccttacgaccacattcatatgtgaagacaatagctattcttggggcaggacattatgtatatgcagatcaaccagaagaattcaaccagaaagtaaa

SEQ ID NO: 13467 - DNA, 120 bp, Artificial Sequence
  ENSG00000011198_9 (sequence is synthesized)
ggagatctgcgacactgtggactgaacacactgaagctctgatgggaaaacctggtgactgatatagttgttcagcaataattcatagtctgtgatgaagagtagtgaatacaacacaca

SEQ ID NO: 13468 - DNA, 120 bp, Artificial Sequence
  ENSG00000011198_10 (sequence is synthesized)
accaggcagccttcttgactatactttgcacatgttttctttaggaattcactcacacatttaaaccagttagtgccttctagaagaatggctttcctttctcctacacaaaattgaaat

SEQ ID NO: 13469 - DNA, 120 bp, Artificial Sequence
  ENSG00000011198_11 (sequence is synthesized)
atacaagtctctaaatataatacctttaaataaaaggttatttgtccctctgatgtactgaaaaactgtaatttttcagctgaaaattttttaatctaactttgctagttatttttatat

SEQ ID NO: 13470 - DNA, 120 bp, Artificial Sequence
  ENSG00000011198_12 (sequence is synthesized)
tgcaatctatattaccaatttaggaagtgatttctgagtctcttacactgtaaaggtgcactttattttctttgtcttccccatcatgtatttattgtgtcttgataactgatattaatc

SEQ ID NO: 13471 - DNA, 120 bp, Artificial Sequence
  ENSG00000011198_13 (sequence is synthesized)
taaattcaatgtgtttttatgtaaaaatttgtcagttgtttagaatatttcactttgtttttgaaacggagtgacaaggcagatttttggttagaggacgggagttgatcactatcatta

SEQ ID NO: 13472 - DNA, 120 bp, Artificial Sequence
  ENSG00000011198_14 (sequence is synthesized)
ctttttctagtttacctgttttttatatttaaggctgctaagccatgttcagcattttaaatgtggtctatcctgacatacagtgtataacaacataactccttggaacctcctatgtgt

SEQ ID NO: 13473 - DNA, 120 bp, Artificial Sequence
  ENSG00000011198_15 (sequence is synthesized)
ggtataattctactcttccaaggaacatgacttcaatactttcagtgattcaggtactgaaaagccttacctaaaaggctgttctttgtttccccctttcatactattcttttccatgac

SEQ ID NO: 13474 - DNA, 120 bp, Artificial Sequence
  ENSG00000011198_16 (sequence is synthesized)
ccaggatgcagcaaatgaaacagatttcttctcttaaggggatattaagactgttacttcctagtaagccaagtaataccatatttttattaacatctaacttttgtagatgggtgctaa

SEQ ID NO: 13475 - DNA, 120 bp, Artificial Sequence
  ENSG00000011198_17 (sequence is synthesized)
aattgcatacattttaaccactaaaatagaaaaacaagtggtgctattatgtctcatggcaccagaaatgagctagcacttgggtttgttgttgctgttgtttattaagagtattgtgtt

SEQ ID NO: 13476 - DNA, 120 bp, Artificial Sequence
  ENSG00000011198_18 (sequence is synthesized)
aattaaatcattacatacttgaagttatattacaaaaattctagaaggttgattgaactatttttttaggaactaccatcaagtgtagcattttcttgcagttttaaaatgaggaaaact

SEQ ID NO: 13477 - DNA, 120 bp, Artificial Sequence
  ENSG00000011198_19 (sequence is synthesized)
tctttgaaactgtgaaatgctccatgtggtaactggctgctgagaaaacccttcaccaaaaaaataaataaaaattgaataggattgtcatcaagaaggcatctttcgctaacgttgctt

SEQ ID NO: 13478 - DNA, 120 bp, Artificial Sequence
  ENSG00000011198_20 (sequence is synthesized)
gtctaggagaaaggtagctatgtaaataaaaacagtgaactagagcaaatagtggtttaatggttttgttattgcatttttaaaatggttaattagggaatttgtagttgttaggaaatg

SEQ ID NO: 13479 - DNA, 120 bp, Artificial Sequence
  ENSG00000011198_21 (sequence is synthesized)
taaggttgtgtcactgttgattaactgccagaaagactgaatgttctattttcaacatttctcccctataaaagaatagacaaattatactgaagcatgatataaacatcttcccaatga

SEQ ID NO: 13480 - DNA, 120 bp, Artificial Sequence
  ENSG00000011198_22 (sequence is synthesized)
cagattaactaggttagtgcaggaagcaacatgagcgccaagatgtgttgtctgatttctctaccttaagaacaataatagtctttttagttagtattttggatggccaggtttcaaacc

SEQ ID NO: 13481 - DNA, 120 bp, Artificial Sequence
  ENSG00000011198_23 (sequence is synthesized)
tgtatgtggtacaaataatttgggtaatatttttgtatttttgttttacacactctctaatctcaattatcctttgctgggagaatgacaggtttcacttatacaggaaggtttttgcac

SEQ ID NO: 13482 - DNA, 120 bp, Artificial Sequence
  ENSG00000011198_24 (sequence is synthesized)
aggaaatttggtcccagcccttggaaggaagaagttccttcgtttacttagtgaatggagtttctggccgcagatgtgccaagtgattgaagaaagatataccccaatatcaagtgataa

SEQ ID NO: 13483 - DNA, 120 bp, Artificial Sequence
  ENSG00000011198_25 (sequence is synthesized)
tttattttcctacagactgaatttgctttatttgaaagatgttgtaactctttttaaagttagattttaccctgaggtatagtatatgtaattttgtgaagattgagctggaagggaagt

SEQ ID NO: 13484 - DNA, 120 bp, Artificial Sequence
  ENSG00000011198_26 (sequence is synthesized)
tcacaatcctcacatttaaaaaaatatagtgggtgctaaatgttttcttaaaaatctagtacagcatttgatctttgttatgcacagcatacttttattttacagaataaattttcctgt

SEQ ID NO: 13485 - DNA, 120 bp, Artificial Sequence
  ENSG00000011198_27 (sequence is synthesized)
gatagtcacaacaagacagctgtatagtttcttgagtcttttgtatggaccagtctctgtataatagttaactacaggactgtggatccagcaaatgttcagtaaatgctgctgttgttc

SEQ ID NO: 13486 - DNA, 120 bp, Artificial Sequence
  ENSG00000011198_28 (sequence is synthesized)
ttagggaaggctactctgggtgttgtggccgccatacatggctttacctgggtccatgcattcccttaagatgacttctgttttcttcttttttcttctgattttccaaaaaaaaaaaag

SEQ ID NO: 13487 - DNA, 120 bp, Artificial Sequence
  ENSG00000011198_29 (sequence is synthesized)
ccttgcctaaggttggttttagaatatgatttgcagaacacttttgaaatgtcttcattcatatatgtaatatatatttatacttaaagggccatacgcgatttcaataaaacaagaagt

SEQ ID NO: 13488 - DNA, 120 bp, Artificial Sequence
  ENSG00000011198_30 (sequence is synthesized)
actggaaagaataaacaaaaatagccagaagatgcctagaaaagaacaatgtggaaggagggataaccctattaaatattataacataatgtttacaatatgagaaagtctaggaattta

SEQ ID NO: 13489 - DNA, 120 bp, Artificial Sequence
  ENSG00000011198_31 (sequence is synthesized)
gtacatgataaagcatctcattcagagaaaaaggctttaaaaatggtgttgagagaagtgtggttaaccatttggaaaaaaaaataaaattgaatcgatttctcacaggatacacaggat

SEQ ID NO: 13490 - DNA, 120 bp, Artificial Sequence
  ENSG00000011198_32 (sequence is synthesized)
aaaatctgaatagaacaaagacccaatttttaaaatgaaaccctctttctaactagaagaaaacatagatgaattattgtataatctgacagtgagaaaaactttcctaggactgaaaat

SEQ ID NO: 13491 - DNA, 120 bp, Artificial Sequence
  ENSG00000011198_33 (sequence is synthesized)
acagtgagaaaaactttcctaggactgaaaattcagaagcaataaaaagagaagtctatagaagaattttcagccagatggaatggctcatggctgtaatcccagcattttgggaggctg

SEQ ID NO: 13492 - DNA, 120 bp, Artificial Sequence
  ENSG00000011198_34 (sequence is synthesized)
aaaccaacctgggcaacctagtaggactggctctaccaaaaaaaaaaaaaaaaaaaaattaagtacctggcctgggttccacctacttgggaggctgaggtaggaggactgtgagcccag

SEQ ID NO: 13493 - DNA, 120 bp, Artificial Sequence
  ENSG00000011198_35 (sequence is synthesized)
tgcactccagcctgggtgacagagaagaaaaaagatttttttggatagctgaaaatatttgcagcatttatcacagagggctaattgtagccctatatatgaagaattttaaactatgag

SEQ ID NO: 13494 - DNA, 120 bp, Artificial Sequence
  ENSG00000011198_36 (sequence is synthesized)
atatgaagaattttaaactatgagaagaacccgaagaataggcaaaaggatgtgaacagacagttaacagaaaatagaatgcaaatggtctttaaacatacaaggatatgcataaaaaga

SEQ ID NO: 13495 - DNA, 120 bp, Artificial Sequence
  ENSG00000011198_37 (sequence is synthesized)
caaatgcaaaataaaataaaataatggaaatacctttcttacctgtgagattggggaaaatccaagttaggcaatgcactctgttgagacaatagggaaacaggcactccaaaaattaca

SEQ ID NO: 13496 - DNA, 120 bp, Artificial Sequence
  ENSG00000011198_38 (sequence is synthesized)
aatccctgtggatggtatttgttaactagcaaagttaaatgagtatatccttcaacctggcagacccagttctaagaatccatatgagatgcacttgcaagaatatgaaatagtatatgc

SEQ ID NO: 13497 - DNA, 120 bp, Artificial Sequence
  ENSG00000011198_39 (sequence is synthesized)
acaaagatcttgattacagcactgtttctaatagctacagactggaagccagccaaatctccattgatagggaattgatggaaggaactagggtatatctatacaatgggatactacaca

SEQ ID NO: 13498 - DNA, 120 bp, Artificial Sequence
  ENSG00000011198_40 (sequence is synthesized)
gctgtagaaaggactgcgaactatttttgtagttctggtctggagaaatctccagaatataggaaatgaaaaatgtaaagcacagaagagaatgtatggtgtgctgtctgttgtataacg

SEQ ID NO: 13499 - DNA, 120 bp, Artificial Sequence
  ENSG00000011198_41 (sequence is synthesized)
aagagacaaatggaaaaaatatgtatttgctttttttgtaaagcaatagaagaattagttataccaataactaataaaatgatctccttgttagtggtggtagggagctagacaaggatg

SEQ ID NO: 13500 - DNA, 120 bp, Artificial Sequence
  ENSG00000011198_42 (sequence is synthesized)
gcaactatttctgtatcttacataccttttattttgaggccctgtcaatgttttatataataaacattttttgaaaaggcaactcttaaaactaaaacaaacttaacagtctgtcaagtt

SEQ ID NO: 13501 - DNA, 120 bp, Artificial Sequence
  ENSG00000011198_43 (sequence is synthesized)
ggtgatataaccccacagaagacttacttcaagtgacttgaaaacttagtattttgtctgtactttgctaatggaatatatcctacagaccaaacaaccacaaataaatcttaaactgca

SEQ ID NO: 13502 - DNA, 120 bp, Artificial Sequence
  ENSG00000011198_44 (sequence is synthesized)
ttgaccccgcgcggagggtccgccccgttgttgtataagccaccccgcgggccggcgacggagctggccgcggcggccgcaccggctcgggctctgccaagggacccggcctgccccaat

SEQ ID NO: 13503 - DNA, 120 bp, Artificial Sequence
  ENSG00000011198_45 (sequence is synthesized)
gctcgggctctgccaagggacccggcctgccccaatgccgccggcgggcggtgcccggtcgaccctgcacctgactgcgaggcgcgggaaatgaccgggtctgtcagcctcccatcgcgg

SEQ ID NO: 13504 - DNA, 120 bp, Artificial Sequence
  ENSG00000011198_46 (sequence is synthesized)
aatgagctgtgtactaagataggtccaatatatctcattgccctgaaactggaggtaagattctgtggtgtgttcattgttggcaaaataacttttttccttttccttgtcattagaaag

SEQ ID NO: 13505 - DNA, 120 bp, Artificial Sequence
  ENSG00000011198_47 (sequence is synthesized)
tacagaaatgaatgtcgggggctggcaggtaggagttctaaaactttttggtcttgggcccctgttatactcttaaattagtaaggaccccaaggagatttgtttatgggcttattatca

SEQ ID NO: 13506 - DNA, 80 bp, Artificial Sequence
  ENSG00000011198_48 (sequence is synthesized)
gtaaggaccccaaggagatttgtttatgggcttattatcaatatttatcatttctaatacaattagaaattaaaattgaa

SEQ ID NO: 13507 - DNA, 120 bp, Artificial Sequence
  ENSG00000011198_49 (sequence is synthesized)
cgcctcccgagttcaagcgattctcctacctcaggctcccgagtagctggaattacaggtatctagagagtcgagtgggagggaaattgctggctctggccactacagtaacatcagcac

SEQ ID NO: 13508 - DNA, 120 bp, Artificial Sequence
  ENSG00000011198_50 (sequence is synthesized)
gctggctctggccactacagtaacatcagcacctagagcagtgctcaactgactgaaggctcctgtgagtcgccctctccccctggccccccaacccgcggggaaaggctggcgggacgc

SEQ ID NO: 13509 - DNA, 120 bp, Artificial Sequence
  ENSG00000011198_51 (sequence is synthesized)
cacacagcacctcgattacgccatttcatttgccactgcaccatctatcggacactagctaggctcttccaggaccggacgcacctccgtccccaaggtgccacctgacagccaacaccg

SEQ ID NO: 13510 - DNA, 120 bp, Artificial Sequence
  ENSG00000011198_52 (sequence is synthesized)
tggattcttgtcccagtgccccaaccaatgagctgagtggccttgtgtgctttctggtgaccatgaatggatgctgtcagtagatgccttggtgctctttacggtgctggtgcaactacc

SEQ ID NO: 13511 - DNA, 120 bp, Artificial Sequence
  ENSG00000011198_53 (sequence is synthesized)
cccaactgtcaggaagatgtcccctagtggcttatagctgtctcctctgcagaattgcccttggccaaacagctgcttcctcacctgggagatcacacccctgcagccgatgattgactg

SEQ ID NO: 13512 - DNA, 120 bp, Artificial Sequence
  ENSG00000011198_54 (sequence is synthesized)
acacgtgggtgcagaaagcctgccctcttgcctccaggtgggacccagtctgtggtgcaatttgtgttcctgggcacctgtgggactggctgaagttaaacttcagattaaactacatcc

SEQ ID NO: 13513 - DNA, 120 bp, Artificial Sequence
  ENSG00000011198_55 (sequence is synthesized)
gggttagggcccagcgggcagcaccaaggagtcgccgcccgcctggcgacgacgggcggcttcctcgaccctccccggcatgagtccgcgcggcgcccagaggcgtcccggcgccgctct

SEQ ID NO: 13514 - DNA, 69 bp, Artificial Sequence
  ENSG00000011198_56 (sequence is synthesized)
cccggcgcttgcgcggcggcggctatggcggcggaggaggaggaggtggactctgccgacaccggagag

SEQ ID NO: 13515 - DNA, 120 bp, Artificial Sequence
  ENSG00000011198_57 (sequence is synthesized)
gcctcaacctcctgggctcaagcaatcctgccacctcagcaacttgccccccagcccctgtattccacccccccaaggttgctgggactataggcatgtgccaggcggctgggactacag

SEQ ID NO: 13516 - DNA, 80 bp, Artificial Sequence
  ENSG00000011201_0 (sequence is synthesized)
agtcgcggcgtctgcctggtcctcagcagtgcagccccggcgcggagcagggagcctcggcccgcgcccggcgccctcgc

SEQ ID NO: 13517 - DNA, 120 bp, Artificial Sequence
  ENSG00000011201_1 (sequence is synthesized)
ccagcggctgcctggcggccggccccggcgcggctgctgcgcggcggctggacgagtcgctgtctgccgggagcgtccagcgcgctcgctgcgcctccaggtgcctgagcctgcagatca

SEQ ID NO: 13518 - DNA, 120 bp, Artificial Sequence
  ENSG00000011201_2 (sequence is synthesized)
ctcgctgcgcctccaggtgcctgagcctgcagatcactcgcatctccgccttcttccagcacttccagaacaatggttccctggtttggtgccagaatcacaagcaatgttctaagtgcc

SEQ ID NO: 13519 - DNA, 120 bp, Artificial Sequence
  ENSG00000011201_3 (sequence is synthesized)
tggagccctgcaaggaatcaggggacctgaggaaacaccagtgccaaagcttttgtgagcctctcttccccaagaagagctacgaatgcttgaccagctgtgagttcctcaaatacatcc

SEQ ID NO: 13520 - DNA, 120 bp, Artificial Sequence
  ENSG00000011201_4 (sequence is synthesized)
tgttggtgaagcagggggactgtccggctcctgagaaagccagtggatttgcggccgcctgtgttgaaagctgcgaagttgacaatgagtgctctggggtgaagaaatgttgttcgaatg

SEQ ID NO: 13521 - DNA, 120 bp, Artificial Sequence
  ENSG00000011201_5 (sequence is synthesized)
ggtgtggacacacctgtcaagtacccaagactctgtacaaaggtgtccccctgaagcccagaaaagagttacgatttacagaactgcagtctggacagctggaggttaagtggtcctcga

SEQ ID NO: 13522 - DNA, 120 bp, Artificial Sequence
  ENSG00000011201_6 (sequence is synthesized)
aattcaatatttctattgagcctgtgatctatgtggtacaaagaagatggaattatggaatccatcctagcgaagatgacgccactcactggcagacagtggcccagaccacagacgagc

SEQ ID NO: 13523 - DNA, 120 bp, Artificial Sequence
  ENSG00000011201_7 (sequence is synthesized)
gagttcaactgactgacataagacccagccgatggtaccagtttcgagtggctgctgtgaatgtgcatggaactcgaggcttcactgcccccagcaaacacttccgttcttccaaagatc

SEQ ID NO: 13524 - DNA, 120 bp, Artificial Sequence
  ENSG00000011201_8 (sequence is synthesized)
catctgccccaccagcaccggctaacctccggctggccaactccaccgtcaacagtgatgggagtgtgaccgtcactatagtttgggatctccccgaggagccggacatccctgtgcatc

SEQ ID NO: 13525 - DNA, 120 bp, Artificial Sequence
  ENSG00000011201_9 (sequence is synthesized)
attacaaggtcttttggagctggatggtcagcagtaagtctcttgtcccaacaaagaagaagcggagaaagactacggatgggtttcaaaattctgtgatcctggagaaactccagccag

SEQ ID NO: 13526 - DNA, 120 bp, Artificial Sequence
  ENSG00000011201_10 (sequence is synthesized)
actgtgactatgttgtggaattgcaagccataacgtactggggacagacacggctgaagagtgcaaaggtgtcccttcacttcacatcgacacatgcaaccaacaacaaagaacagcttg

SEQ ID NO: 13527 - DNA, 120 bp, Artificial Sequence
  ENSG00000011201_11 (sequence is synthesized)
tgaaaactagaaaaggtggaattcaaacacaactcccttttcaaagacgacgacccactcgcccgctggaagtcggagctcccttctatcaggatggccaactgcaagttaaagtctact

SEQ ID NO: 13528 - DNA, 120 bp, Artificial Sequence
  ENSG00000011201_12 (sequence is synthesized)
ggaagaagacagaagatcccactgtcaaccgatatcatgtgcggtggtttcctgaagcgtgtgcccacaacagaacaaccggatcagaggcatcatctggcatgacccacgaaaattaca

SEQ ID NO: 13529 - DNA, 120 bp, Artificial Sequence
  ENSG00000011201_13 (sequence is synthesized)
taattcttcaagatctgtcattttcctgcaagtataaggtgactgtccaaccaatacggccaaaaagtcactccaaggcagaagctgttttcttcactactccaccatgctctgctctta

SEQ ID NO: 13530 - DNA, 120 bp, Artificial Sequence
  ENSG00000011201_14 (sequence is synthesized)
aggggaagagccacaagcctgttggctgcctgggcgaagcaggtcatgttctttctaaggtgctagctaagcctgagaacctttctgcttcattcatcgtccaggatgtgaacatcaccg

SEQ ID NO: 13531 - DNA, 120 bp, Artificial Sequence
  ENSG00000011201_15 (sequence is synthesized)
gtcacttttcttggaagatggccaaggccaatctctatcagcccatgactgggtttcaagtgacttgggctgaggtcactacggaaagcagacagaacagcctacccaacagcattattt

SEQ ID NO: 13532 - DNA, 120 bp, Artificial Sequence
  ENSG00000011201_16 (sequence is synthesized)
cacagtcccagatcctgccttccgatcattatgtcctaacagtgcccaatctgagaccatctactctttaccgactggaagtgcaagtgctgaccccaggaggggaggggccggccacca

SEQ ID NO: 13533 - DNA, 120 bp, Artificial Sequence
  ENSG00000011201_17 (sequence is synthesized)
tcaagacgttccggacgccggagctcccaccctcttcagcacacagatctcatcttaagcatcgtcatccacatcattacaagccttctccagaaagatactaaactgttcaaaaagatt

SEQ ID NO: 13534 - DNA, 120 bp, Artificial Sequence
  ENSG00000011201_18 (sequence is synthesized)
ttgtgaaattgcacagatgtgtaagcttgttgaacttcggccacgagacatgcacacttccagaggcagtgggaactgctcagaggcccggactctcctatgtgactttagtgcaggaag

SEQ ID NO: 13535 - DNA, 120 bp, Artificial Sequence
  ENSG00000011201_19 (sequence is synthesized)
aacttctgtcaatcatggacgcatctggagacaagtgagaaacagtagattggtgaagacagacaccagttccctacaagcatggagaaaatgaagaataggcctgtttaatgctaaatt

SEQ ID NO: 13536 - DNA, 120 bp, Artificial Sequence
  ENSG00000011201_20 (sequence is synthesized)
ttgttttcatgtatggtgtcgctcatttctattgaattacaacagaactcagttttccctgaatttggagcaccaaactccgccccaaaaaggagagtaacaaatacacaattcacacat

SEQ ID NO: 13537 - DNA, 120 bp, Artificial Sequence
  ENSG00000011201_21 (sequence is synthesized)
aacactaagcgtaaatctaatcaataaaatatatttttgactaaattattgattcgatatgaaaaatcaactaagattacacagctttgtttttttgaatctttcctaagatcattttta

SEQ ID NO: 13538 - DNA, 120 bp, Artificial Sequence
  ENSG00000011201_22 (sequence is synthesized)
tcctaggtgatttttaaatgaaaatgtgtaatctaaaatataccagcgaatttaaatctaaaaatgctcctactttaagtaccttgtgctgctctttatgcaaaggtaaatcaaagttcc

SEQ ID NO: 13539 - DNA, 120 bp, Artificial Sequence
  ENSG00000011201_23 (sequence is synthesized)
ctctataaattatgatttacaaaagacacccaagccagaggaactcaatgaaataagctgctaatcagattttaccttggagaaatgaaaattatttcttggggatgccttttaatattt

SEQ ID NO: 13540 - DNA, 120 bp, Artificial Sequence
  ENSG00000011201_24 (sequence is synthesized)
gatcctattatgtgagagattttcctgatatgttatcttatttatattttcccttattttcctcaatgcagataatagcttttggtgcacttttgtttcaccatctgaaaattcacaaaa

SEQ ID NO: 13541 - DNA, 120 bp, Artificial Sequence
  ENSG00000011201_25 (sequence is synthesized)
cttcttgcttcaaatgaaaaaatcccaactattgagcatgtttaaatctttgcagagatttgccttttcttaatcaaagaaaggtctttgtgtgctagaatattattggtaatgttttaa

SEQ ID NO: 13542 - DNA, 120 bp, Artificial Sequence
  ENSG00000011201_26 (sequence is synthesized)
acagttatttgcatttaattcacccatatgctttcaaatctagtatatcttactttttggaaatgttttatgctacaaattagtgccttgtagcatgaacttaagtcaaaacgtgttatc

SEQ ID NO: 13543 - DNA, 120 bp, Artificial Sequence
  ENSG00000011201_27 (sequence is synthesized)
aatatagagtgttgcagtgtatattgtaacaacctaaaacgcagagaagtttaatttaatactgttttttttcttgaaggaatactcacatacatggtttgaaatgtgcatagatatgca

SEQ ID NO: 13544 - DNA, 120 bp, Artificial Sequence
  ENSG00000011201_28 (sequence is synthesized)
tgtctatataattataaatgcatgtgtatatatatgcaaatatatgtacatatacatgtatatacacacagacacatgcatatacatgaatataccttgagcatgaatccctggagaaat

SEQ ID NO: 13545 - DNA, 120 bp, Artificial Sequence
  ENSG00000011201_29 (sequence is synthesized)
cgttttcgtagctcaccaatggtgagtaaagatacagctcttttaaaggtcataaggataatatattttccccatcaatgctgattctgagaaaagagcaatttatcaaaattaaacact

SEQ ID NO: 13546 - DNA, 120 bp, Artificial Sequence
  ENSG00000011201_30 (sequence is synthesized)
gtaaaagaaaggtgtccatatgtctttacctacctaagtaaaacaggaagaaaatcagtaacattatccttaggttttgacaatggtacttgcttcttgttgttttattgtttcctgaat

SEQ ID NO: 13547 - DNA, 120 bp, Artificial Sequence
  ENSG00000011201_31 (sequence is synthesized)
tcatgcagatgcctggccattcctgggaagagtggataactcagaagtcactgtactccacagagcctcactgcagtgtctaaaggtagatgcaaattaaaatgcagggaaaataacttt

SEQ ID NO: 13548 - DNA, 120 bp, Artificial Sequence
  ENSG00000011201_32 (sequence is synthesized)
tctgatgttgatgcatgtctttgggaaacacatttataaacatggatacctgataatagatattgaaacccatttcctgtgtgttaaaatatttaaaaagtggatattccaggaatgttt

SEQ ID NO: 13549 - DNA, 120 bp, Artificial Sequence
  ENSG00000011201_33 (sequence is synthesized)
tgcagctttgtacaagtaacataaattggacacctcagaatgaaagttcatgttggttctgaatggttcactgcagctcctgtcacaagctgggatggatttatcacattgagttatgaa

SEQ ID NO: 13550 - DNA, 120 bp, Artificial Sequence
  ENSG00000011201_34 (sequence is synthesized)
attacctggttctaagaatttttgagtggcaaaaatagaaaacaatcttcatttgaaaacatccctaagcttgaataaatggataccatagatagcttctcttttttattctggtgtcat

SEQ ID NO: 13551 - DNA, 120 bp, Artificial Sequence
  ENSG00000011201_35 (sequence is synthesized)
taccagcatctgaatttcaagttcttaaaatttcaaaaattaaaatttttcattattagctatccatttatcttttacatgaacttgtcatgaacaaattcaaatgtttatgccagcaaa

SEQ ID NO: 13552 - DNA, 120 bp, Artificial Sequence
  ENSG00000011201_36 (sequence is synthesized)
tttttgtactgttgcatagttaaaaatgctgggagtctctgcatagatacaaaatattattaaattattacataaatttaattttataaaatttaatcatgcttcttttgtctgggtaat

SEQ ID NO: 13553 - DNA, 120 bp, Artificial Sequence
  ENSG00000011201_37 (sequence is synthesized)
agacattggacagatatttttagttcagatggtgattctgaagcttacatctcccttaaaaaaatctaaagcagctcttatgggcttctaattttaatataaataaataatttaaatttt

SEQ ID NO: 13554 - DNA, 120 bp, Artificial Sequence
  ENSG00000011201_38 (sequence is synthesized)
attggtgttattggaagaaaaatgctattaatgggctaataaaaaacatgtgtttctcttatggattttaataagctccagtattattcaaatgatcaaaaatatagttataattttttg

SEQ ID NO: 13555 - DNA, 120 bp, Artificial Sequence
  ENSG00000011201_39 (sequence is synthesized)
aattttaaaaatgtgattgctctaataaagaataaaatctatgctttttaacaaacatagttttggtgcctaattctgtaatatgttttattgaaattagattcatttctctaatgtgag

SEQ ID NO: 13556 - DNA, 120 bp, Artificial Sequence
  ENSG00000011201_40 (sequence is synthesized)
aaaaatatatccagtaatagtattgactgtttaaaaaattgagctcatcaaaaatattgtcatcaaatacaggtggttaatctgacatacattgcagttacatgcattatttttatttac

SEQ ID NO: 13557 - DNA, 120 bp, Artificial Sequence
  ENSG00000011201_41 (sequence is synthesized)
aacatttgctccttaatgatgaatttatctgtgttaccctgtttttctacctggaactccatagaatgatgtttgcaaaccaacatgtgctcttttcagtcattcactgttttaatatga

SEQ ID NO: 13558 - DNA, 120 bp, Artificial Sequence
  ENSG00000011201_42 (sequence is synthesized)
catggtagagaagataaggtttatggcaggtaattttttgtaatgtgtattaaacgaagttcaaagattagaaatacatctgtgtcctgaaaaccttagatacatagccgactgtataca

SEQ ID NO: 13559 - DNA, 120 bp, Artificial Sequence
  ENSG00000011201_43 (sequence is synthesized)
gaggttcatctcaacctcaacactattgacttttggggctggatagttctctgttgtgggggtttgtcttgtgcactgtaggtttttagtagcatccacactttctcctcaccagatgcc

SEQ ID NO: 13560 - DNA, 120 bp, Artificial Sequence
  ENSG00000011201_44 (sequence is synthesized)
agttgcaccctcccccaagttgagacaaccaaaaatgtctccagatattgccagctaccccttgagggatggtacctctggttgagaaccattgctagagaatgatctttactgaatttg

SEQ ID NO: 13561 - DNA, 120 bp, Artificial Sequence
  ENSG00000011201_45 (sequence is synthesized)
ccctttataagaaacccagtgaatttctagagcaagtcccaaaaactaagggacagctaagaagttattatggttgacttcaaaggcctaaactgtgttttttatgtccactaaacaact

SEQ ID NO: 13562 - DNA, 120 bp, Artificial Sequence
  ENSG00000011201_46 (sequence is synthesized)
tgattaaaagacggaattttgactcgtgtctgtatcatacaagtacaaatactaattttgccctatgtatccgtaaatgtcatttgtgattttgacttatttatttaatgccctttctta

SEQ ID NO: 13563 - DNA, 120 bp, Artificial Sequence
  ENSG00000011201_47 (sequence is synthesized)
tgccgtgggttttcaagtttactcatttctatggttgcaaataactctaaaacttattatataaactttcatattataggcagaacacaatggctaaatatctgttgcatgtactttaaa

SEQ ID NO: 13564 - DNA, 120 bp, Artificial Sequence
  ENSG00000011201_48 (sequence is synthesized)
gtttattataaaatataaacagatatataaagatgttgactcttacctgtgattttgcatggtcagactcggtgtcaggtacggagaggattctcatgactgtcttacctctactgaata

SEQ ID NO: 13565 - DNA, 120 bp, Artificial Sequence
  ENSG00000011201_49 (sequence is synthesized)
ttctagtgagttatatgatttacggagtgattaacagaggtctatataaagttacttttcccctttacttaattatattgtagtgtgcagataacaaaactgctaccttctcatccaagt

SEQ ID NO: 13566 - DNA, 120 bp, Artificial Sequence
  ENSG00000011201_50 (sequence is synthesized)
ggtctgtagaattcatgtcccttacagtggtcatttaaagtcaatatttatttatgtatgtaataaaaaaagttggatttttgtgtatgtctgtcacattatttagagagaagtaatctt

SEQ ID NO: 13567 - DNA, 120 bp, Artificial Sequence
  ENSG00000011201_51 (sequence is synthesized)
gtaaaaatgttttgtaaaaaacaaaaaagtattgtaaatagtcttgatattctgtgactcattattttcatgttagagtttgtacatactggttcaataataaagtatccttaaaccaga

SEQ ID NO: 13568 - DNA, 120 bp, Artificial Sequence
  ENSG00000011201_52 (sequence is synthesized)
tttttactgaccttcagaggtggctacctctgtcattctgtgtgctgcactattgagtcttatttttgcattttcttcttctgagtgtatcttttgcaagcattaacacatcacaaatgt

SEQ ID NO: 13569 - DNA, 120 bp, Artificial Sequence
  ENSG00000011201_53 (sequence is synthesized)
gactgcatagctaagaagtagcataagctgccatctagataaagtttgatggctagagccaactcatgaaaagaccttaccctatcttgtatataagtgattgagccattttcttctatc

SEQ ID NO: 13570 - DNA, 120 bp, Artificial Sequence
  ENSG00000011201_54 (sequence is synthesized)
tttgttaacctcatgtctctctggtccaagtgaacatgccctgtttgaagtgttgaattggggagggcaggaatagctaaaagaagcttgttgtttgtccgtcttccccgcaacttcaaa

SEQ ID NO: 13571 - DNA, 120 bp, Artificial Sequence
  ENSG00000011201_55 (sequence is synthesized)
ggggaatgagagtcacatcatccctcatgaagtcctgaagagtgagcgatctgcaggcccacaaggaatggacatcattccacacaaacgcagcagcgtggatgagtgtagagagttaga

SEQ ID NO: 13572 - DNA, 120 bp, Artificial Sequence
  ENSG00000011201_56 (sequence is synthesized)
gaagcgcattgcatgggcagagaactcagcgtgaggaaagaatgaaggtggatgggccactggtctctcccctggaggtctcattgagttgcaaggatttaaccaccatctgtgtgctaa

SEQ ID NO: 13573 - DNA, 120 bp, Artificial Sequence
  ENSG00000011201_57 (sequence is synthesized)
tgactccctgccctcccaccctgaccactctttgaactccagagtcctgcattcagccacccacttagcacctccccttggatggcttgcagatatttcaaataaaacgttcaaacacaa

SEQ ID NO: 13574 - DNA, 120 bp, Artificial Sequence
  ENSG00000011243_0 (sequence is synthesized)
atcgcagcgtcggatgttcagagcagcagaagccggcgtcgtcggatgttgtgttgcccgccaccatgagctacacaggctttgtccagggatctgaaaccactttgcagtcgacatact

SEQ ID NO: 13575 - DNA, 120 bp, Artificial Sequence
  ENSG00000011243_1 (sequence is synthesized)
cggataccagcgctcagcccacctgtgattatggatatggaacttggaactctgggacaaatagaggctacgagggctatggctatggctatggctatggccaggataacaccaccaact

SEQ ID NO: 13576 - DNA, 120 bp, Artificial Sequence
  ENSG00000011243_2 (sequence is synthesized)
atgggtatggtatggccacttcacactcttgggaaatgcctagctctgacacaaatgcaaacactagtgcctcgggtagcgccagtgccgattccgttttatccagaattaaccagcgct

SEQ ID NO: 13577 - DNA, 120 bp, Artificial Sequence
  ENSG00000011243_3 (sequence is synthesized)
tagatatggtgccgcatttggagacagacatgatgcaaggaggcgtgtacggctcaggtggagaaaggtatgactcttatgagtcctgcgactcgagggccgtcctgagtgagcgcgacc

SEQ ID NO: 13578 - DNA, 120 bp, Artificial Sequence
  ENSG00000011243_4 (sequence is synthesized)
tgtaccggtcaggctatgactacagcgagcttgaccctgagatggaaatggcctatgagggccaatacgatgcctaccgcgaccagttccgcatgcgtggcaacgacaccttcggtccca

SEQ ID NO: 13579 - DNA, 120 bp, Artificial Sequence
  ENSG00000011243_5 (sequence is synthesized)
gggcacagggctgggcccgggatgcccggagcggccggccaatggcctcaggctatgggcgcatgtgggaagaccccatgggggcccggggccagtgcatgtctggtgcctctcggctgc

SEQ ID NO: 13580 - DNA, 120 bp, Artificial Sequence
  ENSG00000011243_6 (sequence is synthesized)
cctccctcttctcccagaacatcatccccgagtacggcatgttccagggcatgcgaggtgggggcgccttcccgggcggctcccgctttggtttcgggtttggcaatggcatgaagcaga

SEQ ID NO: 13581 - DNA, 120 bp, Artificial Sequence
  ENSG00000011243_7 (sequence is synthesized)
tgaggcggacctggaagacctggaccacagccgacttccgaaccaagaagaagaagagaaagcagggcggcagtcctgatgagccagatagcaaagccacccgcacggactgctcggaca

SEQ ID NO: 13582 - DNA, 120 bp, Artificial Sequence
  ENSG00000011243_8 (sequence is synthesized)
gccacagagggccttgaaggcaccgaggctgtggagaagggctccagagtggacggagaggatgaggagggaaaagaggatgggagagaagaaggcaaagaggatccagagaagggggcc

SEQ ID NO: 13583 - DNA, 120 bp, Artificial Sequence
  ENSG00000011243_9 (sequence is synthesized)
ctaaccacccaggatgaaaatggccagaccaagcgcaagttgcaggcaggcaagaagagtcaggacaagcagaaaaagcggcagcgagaccgcatggtggaaaggatccagtttgtgtgt

SEQ ID NO: 13584 - DNA, 120 bp, Artificial Sequence
  ENSG00000011243_10 (sequence is synthesized)
tctctgtgcaaataccggaccttctatgaggacgagatggccagccatcttgacagcaagttccacaaggaacactttaagtacgtaggcaccaagctccctaagcagacggctgacttt

SEQ ID NO: 13585 - DNA, 120 bp, Artificial Sequence
  ENSG00000011243_11 (sequence is synthesized)
ctgcaggagtacgtcactaacaagaccaagaagacagaggagctccgaaaaaccgtggaggaccttgatggcctcatccagcaaatctacagagaccaggatctgacccaggaaattgcc

SEQ ID NO: 13586 - DNA, 120 bp, Artificial Sequence
  ENSG00000011243_12 (sequence is synthesized)
atggagcattttgtgaagaaggtggaggcagcccattgtgcagcctgcgacctcttcattcccatgcagtttgggatcatccagaagcatctgaagaccatggatcacaaccggaaccgc

SEQ ID NO: 13587 - DNA, 120 bp, Artificial Sequence
  ENSG00000011243_13 (sequence is synthesized)
aggctcatgatggagcagtccaagaagtcctccctcatggtggcccgcagtattctcaacaacaagctcatcagcaagaagctggagcgctacctgaagggcgagaaccctttcaccgac

SEQ ID NO: 13588 - DNA, 120 bp, Artificial Sequence
  ENSG00000011243_14 (sequence is synthesized)
agccccgaggaggagaaggagcaggaggaggctgagggcggtgccctggacgagggggcgcagggcgaagcggcagggatctcggagggcgcagagggcgtgccggcgcagcctcccgtg

SEQ ID NO: 13589 - DNA, 120 bp, Artificial Sequence
  ENSG00000011243_15 (sequence is synthesized)
ggccgtgtcgccgccaccgccgccgcccccagaggaggaggaggagggcgccgtgcccttgctgggaggggcgctgcaacgccagatccgcggcatcccgggcctcgacgtggaggacga

SEQ ID NO: 13590 - DNA, 120 bp, Artificial Sequence
  ENSG00000011243_16 (sequence is synthesized)
ggcctcgacgtggaggacgacgaggagggcggcgggggcgccccgtgacccgagctcggggcgggcggagcccgcgtggccgaagctggaaaccaaacctaataaagttttcccatccca

SEQ ID NO: 13591 - DNA, 120 bp, Artificial Sequence
  ENSG00000011243_17 (sequence is synthesized)
tgctgtcctgtcccttggggttgtcctggctgtgtttctctgccactgccctgcttggccaaggttgggagtggggagggggcatgtttctggggttacctactccttaacaggaggccc

SEQ ID NO: 13592 - DNA, 120 bp, Artificial Sequence
  ENSG00000011243_18 (sequence is synthesized)
actgatatgaggaggcatagagatagacagcggttccttccaatagacgtgaagccgaggccggtatgagccaatgcggtcgggaggcggggctcgggtgtgtgtggaggggaccctgtg

SEQ ID NO: 13593 - DNA, 120 bp, Artificial Sequence
  ENSG00000011243_19 (sequence is synthesized)
agactcttgctcttgctggaccttcctcagcctcgccggcgcccggcccctgggctctccagacaaagctgaccccgtggcccagataaggacgtccggcagaggatccagtttgtgtgt

SEQ ID NO: 13594 - DNA, 120 bp, Artificial Sequence
  ENSG00000011243_20 (sequence is synthesized)
agttgagagtgttgggaacagaaggatccttaaataacagatgctcagagccacaggcagccaggcaccagggcagcaagtggcctgggtcatttgcgcagtgctcgcgagctcaaggct

SEQ ID NO: 13595 - DNA, 120 bp, Artificial Sequence
  ENSG00000011243_21 (sequence is synthesized)
gcccaggcctgctgcctcccatccctcccgacaccacccccaagcattctgagcagaggatgggctgggcctttgagtcccccagatcccagaaggaagatgcagcaccttttcgggccc

SEQ ID NO: 13596 - DNA, 120 bp, Artificial Sequence
  ENSG00000011243_22 (sequence is synthesized)
tgcctcgggactgcgtactccactctgcacctcagggccacctggctcacgccagggcatccttccttccggtccccacctgggccaagtgcacacgctcctgcccagccttggtagcga

SEQ ID NO: 13597 - DNA, 120 bp, Artificial Sequence
  ENSG00000011243_23 (sequence is synthesized)
ggccctccagcaactttccagcgactcgttgcctgttgcagcagctgctgtctcaggcttcagcctcctgcctgtgggaaggaagagctcctcccctgtcccctacgttgcagtaactgc

SEQ ID NO: 13598 - DNA, 120 bp, Artificial Sequence
  ENSG00000011243_24 (sequence is synthesized)
agaggcccgtgagcaaggcctgtttcagggcttgtgtctgggttgggtgaggcggcagcactatcccctgggacacttgcagcctcagcccctcgtttccttcctgtggcaggatccagt

SEQ ID NO: 13599 - DNA, 120 bp, Artificial Sequence
  ENSG00000011243_25 (sequence is synthesized)
ctgccagctcgccgccctctggcctcccttgggagccgccacctgctcggccgtgcatggaccctgcttcccgccaggcccagctcccaaggcctgactcatcccctgcccctctgcggc

SEQ ID NO: 13600 - DNA, 120 bp, Artificial Sequence
  ENSG00000011243_26 (sequence is synthesized)
ctggcgctaggtcactcggcgcacgaaccccaaggtgcactgggggcctgatgcccctgagggagggggccagctcatcagagactcaaggtccaaggcgcctgtgccgccccagctagc

SEQ ID NO: 13601 - DNA, 120 bp, Artificial Sequence
  ENSG00000011243_27 (sequence is synthesized)
tgccaagaggccaccgccgtgcccaggagagatggcagcacctgtgggctgtggcagcctcgggcctgccttctgccctgcccgccggccctgtcaggccgggcctgtctgcggctgagc

SEQ ID NO: 13602 - DNA, 120 bp, Artificial Sequence
  ENSG00000011243_28 (sequence is synthesized)
ggaccaggtcattgttttaacacaggtggaagaagcatgacttgcaaatgttctgcagttaattgggcactatcactttgaaaccaaacctggttagaatgaaaagcaccagcatggaag

SEQ ID NO: 13603 - DNA, 120 bp, Artificial Sequence
  ENSG00000011243_29 (sequence is synthesized)
gtgagttttcctggggtgcctggtgctagggcggctcttccaggggctcacagtgggagggacccagctgagggcagggttgcggcagacatgcggccagttggggacctcccttgtggg

SEQ ID NO: 13604 - DNA, 120 bp, Artificial Sequence
  ENSG00000011243_30 (sequence is synthesized)
cccgagtgtgtgctggcagggggctttcttttcgccgcctccacccccttcccactcttcctcctccttcccaggcggaggctgtggatggtggtgacccctgcctagcacactggtttt

SEQ ID NO: 13605 - DNA, 120 bp, Artificial Sequence
  ENSG00000011243_31 (sequence is synthesized)
gccttcagatgggggcagctagtaaaagtgtggggaaccccaggcacgccccctgccctcggtccctcagtaacgcgcagttccaagtcctcagtggctggtgtccgatctgggaccctc

SEQ ID NO: 13606 - DNA, 120 bp, Artificial Sequence
  ENSG00000011243_32 (sequence is synthesized)
attgccagcagcttccagccactgatatgaggaggcatagagatagacagcggttccttccaatagacgtgaagccgaggccggctttgtccagggatctgaaaccactttgcagtcgac

SEQ ID NO: 13607 - DNA, 120 bp, Artificial Sequence
  ENSG00000011243_33 (sequence is synthesized)
cggataccagcgctcagcccacctgtgattatgatacccttgtatctgtgtttgtctctgtctctgtctgcctcccctctgcctgcccccaccatctgtctgtctctgtctccctcactg

SEQ ID NO: 13608 - DNA, 120 bp, Artificial Sequence
  ENSG00000011243_34 (sequence is synthesized)
ggggcggctcctgcctgctgcccactgcgttttcctctctgagtgcccctctgtgtctgcttcctccccgctgcttggtgctgctgtggctcccagcagggtccgttgcacttcccgtct

SEQ ID NO: 13609 - DNA, 120 bp, Artificial Sequence
  ENSG00000011243_35 (sequence is synthesized)
ggcagggcgagctggcctaaagagtggtgctctccctgggggccagaggcaatgctgtgtcagctctgcgtgcatggtgaccagcatggggaggcagtgtggtctggcagaaagcacagg

SEQ ID NO: 13610 - DNA, 120 bp, Artificial Sequence
  ENSG00000011243_36 (sequence is synthesized)
ctgcctagctggaggcacagtttccttgttggaaaatgggatgagcccctgtgcaccaggtagtgggaggatgtgaggtttctggcacatagccgggccttgtcatttaaagccattgta

SEQ ID NO: 13611 - DNA, 120 bp, Artificial Sequence
  ENSG00000011243_37 (sequence is synthesized)
aataactgggctactctgggccaccctgcctataggatagccctgctctgtctatggagcaagcagctgttttactatataccgttgctctaataaacttggtttcttttaaaaaaaaaa

SEQ ID NO: 13612 - DNA, 120 bp, Artificial Sequence
  ENSG00000011258_0 (sequence is synthesized)
tctcttacttcaaagactgaacattcttcacgatctgaaaggaaaagaagagattctttcgggatgtttgacggttatgatagctgcagtgaggacacaagcagcagctccagctccgaa

SEQ ID NO: 13613 - DNA, 120 bp, Artificial Sequence
  ENSG00000011258_1 (sequence is synthesized)
gagagtgaggaagaagtcgctcctttaccttctaatctcccgattatcaaaaacaatgggcaagtctacacatacccagatggtaaatctggcatggctacctgtgagatgtgtgggatg

SEQ ID NO: 13614 - DNA, 120 bp, Artificial Sequence
  ENSG00000011258_2 (sequence is synthesized)
gttggcgtccgagatgctttttactctaaaacaaagcgtttctgtagcgtttcatgttcaagaagttactcgtcaaactccaagaaggcaagcattttggccagacttcagggtaagcct

SEQ ID NO: 13615 - DNA, 120 bp, Artificial Sequence
  ENSG00000011258_3 (sequence is synthesized)
ccaacaaagaaagcaaaagttcttcagaaacaacctttagttgctaagctagccgcatatgctcagtatcaagctaccttgcaaaatcaagcaaagacaaaagcagcagtctccatggaa

SEQ ID NO: 13616 - DNA, 120 bp, Artificial Sequence
  ENSG00000011258_4 (sequence is synthesized)
ggtttcagctggggtaactacatcaatagcaatagctttatagcagctccggttacctgttttaaacatgcacctatggggacctgctggggtgatatctcagaaaatgtgagagtagaa

SEQ ID NO: 13617 - DNA, 120 bp, Artificial Sequence
  ENSG00000011258_5 (sequence is synthesized)
gttcccaatacagactgcagcctacctaccaaagtcttctggattgctggaattgtaaaattagcaggttacaatgcccttttaagatatgaaggatttgaaaatgactctggtctggac

SEQ ID NO: 13618 - DNA, 120 bp, Artificial Sequence
  ENSG00000011258_6 (sequence is synthesized)
ttctggtgcaatatatgtggttctgatatccatccagttggttggtgtgcagccagcggaaaacctcttgttcctcctagaactattcagcataaatatacaaactggaaagcttttcta

SEQ ID NO: 13619 - DNA, 120 bp, Artificial Sequence
  ENSG00000011258_7 (sequence is synthesized)
gtgaaacgacttactggtgccaaaacactgcctcctgatttctcccaaaaggtttcagagagtatgcagtatcctttcaaaccttgcatgagagtagaagtggttgacaagaggcatttg

SEQ ID NO: 13620 - DNA, 120 bp, Artificial Sequence
  ENSG00000011258_8 (sequence is synthesized)
tgtcgaacacgagtagcagtggtggaaagtgtaattggaggaagattaagactagtgtatgaagaaagcgaagatagaacagatgacttctggtgccatatgcacagcccattaatacat

SEQ ID NO: 13621 - DNA, 120 bp, Artificial Sequence
  ENSG00000011258_9 (sequence is synthesized)
catattggttggtctcgaagcataggtcatcgattcaaaagatctgatattacaaagaaacaggatggacattttgatacaccaccacatttatttgctaaggtaaaagaagtagaccag

SEQ ID NO: 13622 - DNA, 120 bp, Artificial Sequence
  ENSG00000011258_10 (sequence is synthesized)
agtggggaatggttcaaggaaggaatgaaattggaagctatagacccattaaatctttctacaatatgtgtcgcaaccattagaaaggtgctagctgacggattcctgatgattgggatc

SEQ ID NO: 13623 - DNA, 120 bp, Artificial Sequence
  ENSG00000011258_11 (sequence is synthesized)
gatggctcagaagcagcagacggatctgactggttctgttaccatgcaacctctccttctattttccctgtcggtttctgtgaaattaacatgattgaacttactccacccagaggttac

SEQ ID NO: 13624 - DNA, 120 bp, Artificial Sequence
  ENSG00000011258_12 (sequence is synthesized)
acaaaacttccttttaaatggtttgactacctcagggaaactggctccattgcagcaccagtaaaactatttaataaggatgttccaaatcacggatttcgtgtaggaatgaaattagaa

SEQ ID NO: 13625 - DNA, 120 bp, Artificial Sequence
  ENSG00000011258_13 (sequence is synthesized)
gcagtagatctcatggagccacgtttaatatgtgtagccacagtaactcgaattattcatcgtctcttgaggatacattttgatggatgggaagaagagtatgatcagtgggtagactgt

SEQ ID NO: 13626 - DNA, 120 bp, Artificial Sequence
  ENSG00000011258_14 (sequence is synthesized)
gagtcacctgacctctatcctgtagggtggtgtcagttaactggatatcaactacagcctccagcatcacagtcatcaagagaaaaccaatcagcttcatcaaaacagaagaaaaaggct

SEQ ID NO: 13627 - DNA, 120 bp, Artificial Sequence
  ENSG00000011258_15 (sequence is synthesized)
aagtcccagcaatacaaaggacataagaaaatgacaacactgcagctgaaggaggagttgctggatggagaggattataatttccttcaaggagcgtctgatcaggaaagcaatggctct

SEQ ID NO: 13628 - DNA, 120 bp, Artificial Sequence
  ENSG00000011258_16 (sequence is synthesized)
gccaacttctacatcaaacaagagccatgaggtggcttagaaactgagggcgggtggggaaggattttacacaggactgatttataatcaatccagctgtacagggggctactctactgg

SEQ ID NO: 13629 - DNA, 120 bp, Artificial Sequence
  ENSG00000011258_17 (sequence is synthesized)
gacattttgctaaacatagaagatttcagttccagatttttcaggtgggtgggggagctattttagtcgggggggcaggggggtgggaaattttcaatttataaagatggacaatttttg

SEQ ID NO: 13630 - DNA, 120 bp, Artificial Sequence
  ENSG00000011258_18 (sequence is synthesized)
tgttgtatttgaagcttttgaaagaattttgtaatattttccaagtttggatttatgtgcattgttaacaagaactgaaattctaacttttttggtaacattaaagtttaggtagcagga

SEQ ID NO: 13631 - DNA, 120 bp, Artificial Sequence
  ENSG00000011258_19 (sequence is synthesized)
ttgaaggaaatgatttaagaaggatatagctgttaaatgcaaatgaactgtcattacaaatgaacctttttggtacctgttgggagattttgggatttttagaagttaggccagtcacat

SEQ ID NO: 13632 - DNA, 120 bp, Artificial Sequence
  ENSG00000011258_20 (sequence is synthesized)
ctccagcttcttttgctgcagaaatatgcaactgaactcctcatggaggggtcatcaccacaaaggtcatggaagggtcattatttctcttgttggcattttattgcagcccattttaaa

SEQ ID NO: 13633 - DNA, 120 bp, Artificial Sequence
  ENSG00000011258_21 (sequence is synthesized)
ggaagaactctggatacttttatatgttctcttttaattaaaaaaatgattagaattatcctaacactaaagtgttaaactggaatggttgacaagatattcaggatctcagtctacaca

SEQ ID NO: 13634 - DNA, 120 bp, Artificial Sequence
  ENSG00000011258_22 (sequence is synthesized)
ttgaggggttggggaaaatgtaatgttgtccttagtttattttcctttctaaaaaaaataccccacgaaagggattctgatcagttctctgccatttccctctatctgtgaaataacagc

SEQ ID NO: 13635 - DNA, 120 bp, Artificial Sequence
  ENSG00000011258_23 (sequence is synthesized)
ttcgtataaccacaaccaaaaacagatgttctgtattaggagaatcgaattgaaagttattcaaagccaaaataagtttagatttcaaaatcattccagctctgcttttatctatcctgg

SEQ ID NO: 13636 - DNA, 80 bp, Artificial Sequence
  ENSG00000011258_24 (sequence is synthesized)
cagctctgcttttatctatcctggatttggtagaaaactaatttgaaagagaatttaattttcttaaaattccatatata

SEQ ID NO: 13637 - DNA, 120 bp, Artificial Sequence
  ENSG00000011258_25 (sequence is synthesized)
ttcaggatttattttaataataaccgatttggaccattttgaacattccctgttttaaaattcatatgacttccttttaaaaaaaaaaaaaggatacaagggtaaactggtgaaaggttt

SEQ ID NO: 13638 - DNA, 120 bp, Artificial Sequence
  ENSG00000011258_26 (sequence is synthesized)
gctctctgcattttctaactttctactgagttgtgactgaatgagagcgctctagcgtttaccagtgaggttcataaactaaactctcaggaattaattgcatctgttctagaagtgctt

SEQ ID NO: 13639 - DNA, 120 bp, Artificial Sequence
  ENSG00000011258_27 (sequence is synthesized)
ctgggtcttagcctggcctcttcagagtggtaatattgaccatctcctctggaatataggtagggctaattagaaattaatcaaaatgattaacctctacagtccttcagcctatggaat

SEQ ID NO: 13640 - DNA, 120 bp, Artificial Sequence
  ENSG00000011258_28 (sequence is synthesized)
gctttaaaaaatgttaatggaaagccccaggagaccattttaggtaagacttttgtttgaattttaaaatgcatagaacgttaaaaaaaaccagcaatttattttctaaaatattgctct

SEQ ID NO: 13641 - DNA, 120 bp, Artificial Sequence
  ENSG00000011258_29 (sequence is synthesized)
acttttgggaataatagcattggtaatacgcacaggtttacctcattctatgcaagaggggttaataacataaggttttataatagctactggaagtaaaatttgttactttatagtgta

SEQ ID NO: 13642 - DNA, 120 bp, Artificial Sequence
  ENSG00000011258_30 (sequence is synthesized)
agaatgtatggaatcgcatgtcaccatttcttaatactgactctttaggggcataaatgcagatcacatcaacgcaagttgattctcatgtgtcaaatatatgtgaattcagctgttaaa

SEQ ID NO: 13643 - DNA, 120 bp, Artificial Sequence
  ENSG00000011258_31 (sequence is synthesized)
ttactggatatttatcttaacattgctgagagggacctactgtaaatgtgacatcctcacacttcccatatctttaactttgaaaaatcttcttgtaaacttaaagcctagaagtattcc

SEQ ID NO: 13644 - DNA, 120 bp, Artificial Sequence
  ENSG00000011258_32 (sequence is synthesized)
aaagcaagggttagagcagtctttattctcaggctcactgaattaaacccaggactaattccacagcacaggcacaagaagcctgttgtgtagtgtactctgccagtaccttggatttag

SEQ ID NO: 13645 - DNA, 120 bp, Artificial Sequence
  ENSG00000011258_33 (sequence is synthesized)
gagctccatggggaactgactaaaccaggagagagaggatttggagctagtcagtcctggtaatctatgaaatgctcatttatacccaggtttcataagcttccaattctatagcaaacc

SEQ ID NO: 13646 - DNA, 120 bp, Artificial Sequence
  ENSG00000011258_34 (sequence is synthesized)
caggctctgagtgttttagaatttcctaattcatgaagtgtttcttgtcttgatcccgtgaccaacagttgaaggttggtaaggacttttctacagtctgaacacaacctaaagccctct

SEQ ID NO: 13647 - DNA, 120 bp, Artificial Sequence
  ENSG00000011258_35 (sequence is synthesized)
ttcattgttcacacactaactcctactgccgacgaaccgaaaaataattaatgcagaggagatttatgtcttagccataactccagttgtacaactcaatcgccccattctcttttacgg

SEQ ID NO: 13648 - DNA, 120 bp, Artificial Sequence
  ENSG00000011258_36 (sequence is synthesized)
ttcaaaatgtactgctgaccttgggtttgtttttgttttgttttgtttttcctgttaggatttatttggggacttttggtagtttaaactctttaaccttttccttgccgtgtatgagga

SEQ ID NO: 13649 - DNA, 120 bp, Artificial Sequence
  ENSG00000011258_37 (sequence is synthesized)
aagctaaagctgttatcaacttcttattctacgatactaacacgggttttcagtgtttgtttgtttttattattattattaattttgcgtgatgtgaataccctctcccatcaatatttg

SEQ ID NO: 13650 - DNA, 120 bp, Artificial Sequence
  ENSG00000011258_38 (sequence is synthesized)
tattatggtgctatatattggtaatgatcctttaatattgggaagggattttaaaaatactgtgattaaactgggtttcttcctttgattttcatattttaaataaagccacagtcattt

SEQ ID NO: 13651 - DNA, 120 bp, Artificial Sequence
  ENSG00000011258_39 (sequence is synthesized)
atacaaaagaaaagcatctgtccctgggcaaatcttttgaggacagaggtcaaagtaaactgcataaggtttttacatcatttctgtatgtatttgatatatagatcaatatctgtacaa

SEQ ID NO: 13652 - DNA, 120 bp, Artificial Sequence
  ENSG00000011258_40 (sequence is synthesized)
atttaatcttttattttcttggtaactcgtgatcattgagaaagtgtttgaaactttctcatgaagtgtatatataatggcgtgaaaaattcctttggaaaaatttatgttcctttcatt

SEQ ID NO: 13653 - DNA, 120 bp, Artificial Sequence
  ENSG00000011258_41 (sequence is synthesized)
tttaccaaattgcaaattttcagcatggatgtgaaaagcattaaaattataactttgtgtacaagatgaaaataattcactaaatttgcccttttttacacaaaataaaatgttaaagtt

SEQ ID NO: 13654 - DNA, 120 bp, Artificial Sequence
  ENSG00000011258_42 (sequence is synthesized)
aatgttgttgatatcctggggccacccgagttaaaggggggaaatccgggggctgctgcacccgccaccggtctgggcccagccgggggccccctgtagtcgccgcagtcccggggagag

SEQ ID NO: 13655 - DNA, 120 bp, Artificial Sequence
  ENSG00000011258_43 (sequence is synthesized)
gcacctgcccccagcccggggagggggcgccgcgggctcggggagcacggacaacccctacccatgaggccctgatggaaaacacaaaggatctgagtcggaagagacattagaggtcat

SEQ ID NO: 13656 - DNA, 120 bp, Artificial Sequence
  ENSG00000011258_44 (sequence is synthesized)
cccagatagccctcacgagtggccctggagcaggaagtggtggagcagatcttccttgtttgggaggagcctgaggtggacctcgcgtcctgagtctggaaggcacctatggggacctgc

SEQ ID NO: 13657 - DNA, 120 bp, Artificial Sequence
  ENSG00000011258_45 (sequence is synthesized)
gtgtaagttggtatacagaaaaggtgtccttttgtaaaaatcagcaattctccagaggactatctcacataagtcatcttatgagctcacaggacaagaatatacctatgtctgattggt

SEQ ID NO: 13658 - DNA, 120 bp, Artificial Sequence
  ENSG00000011258_46 (sequence is synthesized)
tgccaggtaagacattaagactcaacaacaatatcacagaatcagaccatgtgtcccatggcaatgtgaatccaatagtcaattacataatgactatagaaacacaacagtcaccaaatt

SEQ ID NO: 13659 - DNA, 120 bp, Artificial Sequence
  ENSG00000011258_47 (sequence is synthesized)
aaactagacttactattttagtgagttaaaaattacatactaaaagtttattggtaggtaataaatgcttttgagtaaatagtggaaaatgtctcatgttgaggctatggttttgtagga

SEQ ID NO: 13660 - DNA, 120 bp, Artificial Sequence
  ENSG00000011258_48 (sequence is synthesized)
acaagtacccttattttcagagcatcatgtacttaagtataatggtcttggtaaagatagttcatataagttgtatctagacaactgtatcgtctaaattgtaaacaattatctagtacc

SEQ ID NO: 13661 - DNA, 120 bp, Artificial Sequence
  ENSG00000011258_49 (sequence is synthesized)
aattttccctttttatttttcagcatcaagagaaaaccaatcagcttcatcaaaacagaagaaaaaggctaagtcccagcaatacaaaggacataagaaaagtgggtcaccacgtggtgt

SEQ ID NO: 13662 - DNA, 120 bp, Artificial Sequence
  ENSG00000011258_50 (sequence is synthesized)
tcacatacattttctaattgttaactaattggagtcacagtattcttggacagaaaatgatatatcttgtgagaactgatgattgtgcattatgtattatgcttaaaggtgcagtatgcc

SEQ ID NO: 13663 - DNA, 120 bp, Artificial Sequence
  ENSG00000011258_51 (sequence is synthesized)
ataaaaggcaaacccttgcaataatgagaaacactgatattttactaacaggagaaattattaccacagtatttaaagtatacgtggtaaagaatagagtctgtgaatgattcttgaaat

SEQ ID NO: 13664 - DNA, 120 bp, Artificial Sequence
  ENSG00000011258_52 (sequence is synthesized)
aaagaatagagtctgtgaatgattcttgaaataatatgtaaaacctactgaaagttaatcctttttaaaaactttatttaaaaagaaaaattagcagccaggtgcagtggctcacgcctg

SEQ ID NO: 13665 - DNA, 120 bp, Artificial Sequence
  ENSG00000011258_53 (sequence is synthesized)
agttgaagggttagtctagtatcagcataatccaatagaagtttctgcaatgatggaaatttcctatatctttgctgtccagttacggtagccactagccacatgtggttgttgagcact

SEQ ID NO: 13666 - DNA, 120 bp, Artificial Sequence
  ENSG00000011258_54 (sequence is synthesized)
tgaaatgtaactagtggaactaaaaattgaagaactcaatttttaattttgctgttttaggcaatgtaaatttaagtagccaaatgtctggcatactggacatacacacatagaacactg

SEQ ID NO: 13667 - DNA, 120 bp, Artificial Sequence
  ENSG00000011258_55 (sequence is synthesized)
ataacttatttagtaggtctgcagtgggtcctgggaatgtgtttttaatgtataccccagaaagtttatcaggttggttagggaaacactccattaggagatttctgaggtcccttcgag

SEQ ID NO: 13668 - DNA, 120 bp, Artificial Sequence
  ENSG00000011258_56 (sequence is synthesized)
ttctcactttagcactgataatttagaatttagtctagtagaagtgagctctggacaaagtcagcaagctacctctctgaactgcgatcttagactgaacattcttcacgatctgaaagg

SEQ ID NO: 13669 - DNA, 120 bp, Artificial Sequence
  ENSG00000011260_0 (sequence is synthesized)
gttccacgtgagcgcctgcgtttctcctcaaacctaacgatgccgccggagcggaggagacgaatgaaactggaccggagaaccggagcgaagccgaagcggaagcccggaatgaggccg

SEQ ID NO: 13670 - DNA, 120 bp, Artificial Sequence
  ENSG00000011260_1 (sequence is synthesized)
gactggaaagccggagcggggccaggcgggcctccccaaaagcctgccccttcatcccagcggaaaccgccggcccggccgagcgcggcggccgctgcgattgcagtcgcggcggcggag

SEQ ID NO: 13671 - DNA, 120 bp, Artificial Sequence
  ENSG00000011260_2 (sequence is synthesized)
gaagagagacggctccggcagcggaaccgcctgaggctggaggaggacaaaccggccgtggagcggtgcttggaggagctggtcttcggcgacgtcgagaacgacgaggacgcgttgctg

SEQ ID NO: 13672 - DNA, 120 bp, Artificial Sequence
  ENSG00000011260_3 (sequence is synthesized)
cggcgtctgcgaggcccgagggttcaagaacatgaagactcgggtgactcagaagtggagaatgaagcaaaaggtaattttccacctcaaaagaagccagtttgggtggatgaagaagat

SEQ ID NO: 13673 - DNA, 120 bp, Artificial Sequence
  ENSG00000011260_4 (sequence is synthesized)
gaagatgaggaaatggttgacatgatgaacaatcggtttcggaaggatatgatgaaaaatgctagtgaaagtaaactttcgaaagacaaccttaaaaagagacttaaagaagaattccaa

SEQ ID NO: 13674 - DNA, 120 bp, Artificial Sequence
  ENSG00000011260_5 (sequence is synthesized)
catgccatgggaggagtacctgcctgggcagagactactaagcggaaaacatcttcagatgatgaaagtgaagaggatgaagatgatttgttgcaaaggactgggaatttcatatccaca

SEQ ID NO: 13675 - DNA, 120 bp, Artificial Sequence
  ENSG00000011260_6 (sequence is synthesized)
tcaacttctcttccaagaggaatcttgaagatgaagaactgccagcatgcgaatgctgaacgtcctactgttgctcggatctcatctgtgcagttccatcccggtgcacagattgtgatg

SEQ ID NO: 13676 - DNA, 120 bp, Artificial Sequence
  ENSG00000011260_7 (sequence is synthesized)
tggaaaggtttccaatctttaaggcttgttttagtgctaatggggaagaagttttagccacgagtacccacagcaaggttctttatgtctatgacatgctggctggaaagttaattcctg

SEQ ID NO: 13677 - DNA, 120 bp, Artificial Sequence
  ENSG00000011260_8 (sequence is synthesized)
tgcatcaagtgagaggtttgaaagagaagatagtgaggagctttgaagtctccccagatgggtccttcttgctcataaatggcattgctggatatttgcatttgctagcaatgaagacca

SEQ ID NO: 13678 - DNA, 120 bp, Artificial Sequence
  ENSG00000011260_9 (sequence is synthesized)
aagaactgattggaagcatgaaaattaatggaagggttgcagcatccacattctcttcagatagtaagaaagtatacgcctcttcgggggatggagaagtttatgtttgggatgtgaact

SEQ ID NO: 13679 - DNA, 120 bp, Artificial Sequence
  ENSG00000011260_10 (sequence is synthesized)
caaggaagtgccttaacagatttgttgatgaaggcagtttatatggattaagcattgccacatctaggaatggacagtatgttgcttgtggttctaattgtggagtggtaaatatataca

SEQ ID NO: 13680 - DNA, 120 bp, Artificial Sequence
  ENSG00000011260_11 (sequence is synthesized)
atcaagattcttgtctccaagaaacaaacccaaagccaataaaagctataatgaacttggttacaggtgttacttctctgaccttcaatcctactacagaaatcttggcaattgcttcag

SEQ ID NO: 13681 - DNA, 120 bp, Artificial Sequence
  ENSG00000011260_12 (sequence is synthesized)
aaaaaatgaaagaagcagtcagattggttcatcttccttcctgtacagtattttcaaacttcccagtcattaaaaataagaatatttctcatgttcataccatggatttttctccgagaa

SEQ ID NO: 13682 - DNA, 120 bp, Artificial Sequence
  ENSG00000011260_13 (sequence is synthesized)
gtggatactttgccttggggaatgaaaagggcaaggccctgatgtataggttgcaccattactcagacttctaaagagactatttgaagtccagttgagtcacaagagaagcctgtcttg

SEQ ID NO: 13683 - DNA, 120 bp, Artificial Sequence
  ENSG00000011260_14 (sequence is synthesized)
atatatcatctcagaaactttcctgaatatgtgataatatatggaaaatgatttatagatccagctgtgcttaagagccagtaatgtcttaataaacatgtggcagcttttgtttgaaaa

SEQ ID NO: 13684 - DNA, 120 bp, Artificial Sequence
  ENSG00000011260_15 (sequence is synthesized)
gtgttggtagtgaatgctacatagaaccctgtgtttatgtttgtatgctttagggaattcctgctttcaaaacggactaaaatctggagtgaagaaaaggaggaatgtaaattggttttg

SEQ ID NO: 13685 - DNA, 120 bp, Artificial Sequence
  ENSG00000011260_16 (sequence is synthesized)
aggaaatagttgtgaaaggagaatataccagacaataatgtggtttacagttctacttactttgaaaggaaaacaggttataccaggataatttcatcagtctcatttcagatcagattt

SEQ ID NO: 13686 - DNA, 120 bp, Artificial Sequence
  ENSG00000011260_17 (sequence is synthesized)
ggagtggttctgtttcagtttgtattttataaaaggatgcagattcttattgcacttagaattttcttccaaatcctttggtatttttataagtgaaatttttttttctctaagacccaa

SEQ ID NO: 13687 - DNA, 120 bp, Artificial Sequence
  ENSG00000011260_18 (sequence is synthesized)
taccagtgactggaattgactgatgacatttttattgtttatgtctgatcaggtatttcatagaccccccatgtgaaactttggagtaagcctactcatgttacctaaaatctgaggcgt

SEQ ID NO: 13688 - DNA, 120 bp, Artificial Sequence
  ENSG00000011260_19 (sequence is synthesized)
tcagatcctccagaatgtcagattgaggagtctgaacctaactgcctggtgtgaatgattgtgattacatatttttcccactaaaatcttcctaagtgcccttctgtgatctaattgaaa

SEQ ID NO: 13689 - DNA, 120 bp, Artificial Sequence
  ENSG00000011260_20 (sequence is synthesized)
ggttaaaactggggaaactgcttgtatatatatccctaccaccgtttgcaaattggagtttgggaggaaagttctaattgtggagtggtaaatatatacaatcaagattcttgtctccaa

SEQ ID NO: 13690 - DNA, 120 bp, Artificial Sequence
  ENSG00000011275_0 (sequence is synthesized)
agtacccggagtgcctctatggttcttcctgtccttagtcgggagggggcgctgtgcgcaggcgcgaggtgacgccgcggcagggccggaaggagtgcagcggctgccacggagctcgca

SEQ ID NO: 13691 - DNA, 120 bp, Artificial Sequence
  ENSG00000011275_1 (sequence is synthesized)
gctgcggcttctgaggagtaagcggcgcggtagcgaaggccgccgaacctgcctggctagccggcgacttgagtgacgattcttttgaaacagatggtcaccatgtttagatattagcag

SEQ ID NO: 13692 - DNA, 120 bp, Artificial Sequence
  ENSG00000011275_2 (sequence is synthesized)
tcccatatatgcatgtctgcatttgaaaatggaagagggaaacaacaatgaagaggtaattcacttgaacaactttcactgccatcggggacaagagtggatcaatctccgagatgggcc

SEQ ID NO: 13693 - DNA, 120 bp, Artificial Sequence
  ENSG00000011275_3 (sequence is synthesized)
catcaccatatctgactcctcagatgaggaaaggattccaatgctggtcaccccagctcctcagcagcatgaagaagaggacctggatgatgatgtcatcctgacagaaacaaataaacc

SEQ ID NO: 13694 - DNA, 120 bp, Artificial Sequence
  ENSG00000011275_4 (sequence is synthesized)
tcagagatcacgacccaatctcatcaaaccagctgcccagtggcaagatctgaaaaggttgggagaagaaaggcctaaaaagtctagagcagcatttgaatcagataagagcagctattt

SEQ ID NO: 13695 - DNA, 120 bp, Artificial Sequence
  ENSG00000011275_5 (sequence is synthesized)
ttcagtgtgtaacaacccattgtttgattctggggcacaggatgattctgaggatgactacggtgaatttctggatcttgggcctcctggaatctctgaattcactaagccaagtggcca

SEQ ID NO: 13696 - DNA, 120 bp, Artificial Sequence
  ENSG00000011275_6 (sequence is synthesized)
aacagaaagagaacccaagcctggaccgagtcataaccaagcagcaaatgacattgtcaaccccagatcagagcagaaagtcatcatcttggaagaaggtagccttctttacacagaaag

SEQ ID NO: 13697 - DNA, 120 bp, Artificial Sequence
  ENSG00000011275_7 (sequence is synthesized)
cgatcctttggaaactcagaaccagtcatccgaagactcagagacagagctgttatcaaatctaggagagtcagctgctctagcagatgatcaggccatcgaagaagactgctggttaga

SEQ ID NO: 13698 - DNA, 120 bp, Artificial Sequence
  ENSG00000011275_8 (sequence is synthesized)
tcatccttacttccagtctctgaaccaacagccccgtgaaataacaaaccaggtcgttcctcaggaacggcagcctgaagcagaactgggccgcttgttgtttcagcatgaattcccagg

SEQ ID NO: 13699 - DNA, 120 bp, Artificial Sequence
  ENSG00000011275_9 (sequence is synthesized)
gcccgcttttccaaggccggaaccccagcaaggtgggatttcaggcccctcttctcctcagcctgcccatcctctaggagagtttgaagaccagcagttagcaagtgatgatgaagagcc

SEQ ID NO: 13700 - DNA, 120 bp, Artificial Sequence
  ENSG00000011275_10 (sequence is synthesized)
aggtccagcctttccaatgcaagaatctcaagagcccaatttggaaaacatttgggggcaagaagctgcagaggtagatcaagagctcgttgaactactagtgaaagaaacggaagcaag

SEQ ID NO: 13701 - DNA, 120 bp, Artificial Sequence
  ENSG00000011275_11 (sequence is synthesized)
atttccagatgtagcaaatgggtttattgaggaaataattcattttaagaattattatgatctgaatgtactttgtaattttcttctggaaaacccagattatccaaagagagaagacag

SEQ ID NO: 13702 - DNA, 120 bp, Artificial Sequence
  ENSG00000011275_12 (sequence is synthesized)
aatcattataaatcccagtagcagtctgctggccagccaagatgagacaaagttgcctaaaatagacttttttgactattctaaattgacccctcttgaccagcgctgcttcatccaagc

SEQ ID NO: 13703 - DNA, 120 bp, Artificial Sequence
  ENSG00000011275_13 (sequence is synthesized)
gggccctgcacgagctcaaaggacactatgcaatcacccgaaaggccttgtctgatgccattaaaaaatggcaggagctgtcaccagaaaccagtggaaaaaggaagaagagaaaacaaa

SEQ ID NO: 13704 - DNA, 120 bp, Artificial Sequence
  ENSG00000011275_14 (sequence is synthesized)
tgaaccagtattcttacattgatttcaagtttgaacaaggtgacataaaaatagaaaagaggatgttctttcttgaaaataagcgacgacattgtaggtcctatgaccgacgtgctctcc

SEQ ID NO: 13705 - DNA, 120 bp, Artificial Sequence
  ENSG00000011275_15 (sequence is synthesized)
ttccagctgtgcaacaagagcaggagttctatgagcagaaaatcaaagagatggcagagcatgaagactttttgcttgccctacagatgaatgaagaacagtatcaaaaggatggccagc

SEQ ID NO: 13706 - DNA, 120 bp, Artificial Sequence
  ENSG00000011275_16 (sequence is synthesized)
tgattgagtgtcgctgctgctatggggaatttccattcgaggagctgacgcagtgcgcagatgctcacttgttctgcaaagagtgtctcatcagatatgcccaagaggcagtctttggat

SEQ ID NO: 13707 - DNA, 120 bp, Artificial Sequence
  ENSG00000011275_17 (sequence is synthesized)
ctggaaagttggagctcagctgcatggaaggcagctgcacgtgttcgttcccaaccagtgagctggagaaggtgctcccccagaccatcctgtataagtactatgagcgaaaagccgagg

SEQ ID NO: 13708 - DNA, 120 bp, Artificial Sequence
  ENSG00000011275_18 (sequence is synthesized)
aggaggttgcggcagcctacgccgacgagcttgtcaggtgcccgtcctgtagctttccggctctgttggacagtgatgtgaagaggttcagctgtcctaatcctcactgccgaaaggaaa

SEQ ID NO: 13709 - DNA, 120 bp, Artificial Sequence
  ENSG00000011275_19 (sequence is synthesized)
cctgtaggaagtgtcagggactctggaaagaacataatggcctcacctgtgaagagctggctgaaaaagacgacatcaagtaccgtacctctattgaagaaaaaatgactgctgcccgca

SEQ ID NO: 13710 - DNA, 120 bp, Artificial Sequence
  ENSG00000011275_20 (sequence is synthesized)
ttagaaaatgccacaagtgtgggactggcctcatcaaatctgaaggctgcaaccgcatgtcttgccgctgtggtgcccagatgtgctacctctgtcgagtttctattaatggatatgacc

SEQ ID NO: 13711 - DNA, 120 bp, Artificial Sequence
  ENSG00000011275_21 (sequence is synthesized)
atttctgccaacatccccgctcaccaggagccccttgccaggagtgttcaagatgctctctctggaccgatcccactgaagatgatgagaagcttattgaggaaatccagaaggaggctg

SEQ ID NO: 13712 - DNA, 120 bp, Artificial Sequence
  ENSG00000011275_22 (sequence is synthesized)
aagaggaacagaaaagaaagaatggagagaacaccttcaaacgcattggacccccgctggagaagcctgtggagaaggtgcagagggtggaggccctcccgaggcccgttccgcagaacc

SEQ ID NO: 13713 - DNA, 120 bp, Artificial Sequence
  ENSG00000011275_23 (sequence is synthesized)
tgccacagccacagatgccaccctatgccttcgcgcacccacccttccccctgcctcccgtgcggcctgtgttcaacaacttcccactcaacatggggcctatcccagccccgtacgtgc

SEQ ID NO: 13714 - DNA, 120 bp, Artificial Sequence
  ENSG00000011275_24 (sequence is synthesized)
cccctctgcccaacgtgcgggtcaactatgacttcggtcccatccacatgcccctggagcacaacctgcccatgcactttggcccccagccgcggcatcgcttctgatggccccgaatcc

SEQ ID NO: 13715 - DNA, 120 bp, Artificial Sequence
  ENSG00000011275_25 (sequence is synthesized)
ccattgagcagcacaaagcccgtttggggtaggagtgtggatggagaaccctcccccaaggctggtgtctgtaccattgcatcctaagtcagcttgaagggtaggctggttttcttccca

SEQ ID NO: 13716 - DNA, 120 bp, Artificial Sequence
  ENSG00000011275_26 (sequence is synthesized)
cccctttcctagaagggctactgctcctggaagagtggacggatccataataaagacgtcccaaatggtggagttcggagagagctgcgatgtgaactgcccctcccctcgcatccccca

SEQ ID NO: 13717 - DNA, 120 bp, Artificial Sequence
  ENSG00000011275_27 (sequence is synthesized)
gccatagaccaggtccctgctgctcacacctgggcctctcctcggagccgacccctgggtagcaaggcagccgagagcatctccctggaggggcccacggttgggccaagggcagagggg

SEQ ID NO: 13718 - DNA, 120 bp, Artificial Sequence
  ENSG00000011275_28 (sequence is synthesized)
gctgcacctgcgggcctgggaagcattgctcagggtggggggctgggaccatggcccgcagaggcactgccacagctgtgagggccaagatgctgtccccccatccaaaacccgtgcgcc

SEQ ID NO: 13719 - DNA, 120 bp, Artificial Sequence
  ENSG00000011275_29 (sequence is synthesized)
actgcagtgagtgttgagggcacctctcctcccctcttacacctactcagatgaggcagcagcagacccatctcgcggcgggggttttgttctgttgccgcctaactttctcatcctcgg

SEQ ID NO: 13720 - DNA, 120 bp, Artificial Sequence
  ENSG00000011275_30 (sequence is synthesized)
tctctggaaagtcaggctgagaaatcctttcccaggccaggccgctgcggtacactggatggttctgaagctggcccattgaaagagcctcttaaggcagctgggacagaggcctggtgg

SEQ ID NO: 13721 - DNA, 120 bp, Artificial Sequence
  ENSG00000011275_31 (sequence is synthesized)
ccctgctgggcagcccaactgctgggggagacgtttctgccaccctgggtgatgagcagcttttcccccctggctttctgggggaggagtgggcctccttagggagacaggtgaccctgg

SEQ ID NO: 13722 - DNA, 120 bp, Artificial Sequence
  ENSG00000011275_32 (sequence is synthesized)
gtgccacccctgccccgtgtgtgccccgggtgttctcagtggttgctgaaggcaggtagagggtgctgtccagtatcccccatgtgaaggtcacttcccttctcatggagtcagctgagc

SEQ ID NO: 13723 - DNA, 120 bp, Artificial Sequence
  ENSG00000011275_33 (sequence is synthesized)
atcagctcagccctgccatgtccccactcaccctcctcgcctcctgtccggccctgggtttctagcggtgcctgaggcatcactctggcccattgacagatgagaggtctgaagccttcc

SEQ ID NO: 13724 - DNA, 120 bp, Artificial Sequence
  ENSG00000011275_34 (sequence is synthesized)
tggccacaggcatcactttctcctcctcctcatgccctgccttgtccttgtcgtgttgccatggggttctgagaggctgggagttcacagacctcagacacagctgagtccgacaaccat

SEQ ID NO: 13725 - DNA, 120 bp, Artificial Sequence
  ENSG00000011275_35 (sequence is synthesized)
tggggtggggctgcatcagtctccggagtggcccgccacctcctgaagcagggcctggcccacccaaggtgcctggggcaggcgggcaccgtcattcgctgccattggcttctcagatgt

SEQ ID NO: 13726 - DNA, 80 bp, Artificial Sequence
  ENSG00000011275_36 (sequence is synthesized)
ggcgggcaccgtcattcgctgccattggcttctcagatgtatttcaaggactaaagtgggctctaagatctaagatggcc

SEQ ID NO: 13727 - DNA, 120 bp, Artificial Sequence
  ENSG00000011275_37 (sequence is synthesized)
ccactgcactccagcctgagcaacaaaagcaaaactctatctttaaaaaaaaaaaaaaaaaaactaagatacccattctttctgcctttgcccaggatggaggctttgaagacaggtggt

SEQ ID NO: 13728 - DNA, 120 bp, Artificial Sequence
  ENSG00000011275_38 (sequence is synthesized)
aagacaggtggtcacctggacctggggtaagggtgcgcagggaggccgggcttgggggcagcctgctgctatgtccttgctggcgcccatacctgttggactgcctgaactttgctacta

SEQ ID NO: 13729 - DNA, 120 bp, Artificial Sequence
  ENSG00000011275_39 (sequence is synthesized)
gcctgaacgacagtgccttggaaaggcaggctccatgcggcagcaacaggattgtcttcggtaccttaaatatgctccctgtgcttccccagggaggatctctgggagcagagggcggct

SEQ ID NO: 13730 - DNA, 120 bp, Artificial Sequence
  ENSG00000011275_40 (sequence is synthesized)
gtagacatcacagctgaagaggtgacctcaggccctgggagcctcagctccctctgccctgtaccctaggcacgtggctccagcaagagccccaggcaggacaaagggagcaggcagcag

SEQ ID NO: 13731 - DNA, 120 bp, Artificial Sequence
  ENSG00000011275_41 (sequence is synthesized)
ctgcagaaacagccctagacaggtgctggcctcaaccctggcaggggagggggagcccagagtgatgtttctcctaaggccaaaccccaggggtgggtcatttgagaggagttccagctg

SEQ ID NO: 13732 - DNA, 120 bp, Artificial Sequence
  ENSG00000011275_42 (sequence is synthesized)
ttctggccacactgggctggtggggaaggagcggcggcctctttccttggagggtccctgattcctgaggatcctccccgagccaggcacgggggaccacagggctgccgtgagcaccca

SEQ ID NO: 13733 - DNA, 120 bp, Artificial Sequence
  ENSG00000011275_43 (sequence is synthesized)
ccctggttctccaggcccctctgtccagaggcagggcctgaacctcgggctcctgcctggaccagtgacagcattggggagagaagcactgggggtcttcagaccagccagcaaggggcc

SEQ ID NO: 13734 - DNA, 120 bp, Artificial Sequence
  ENSG00000011275_44 (sequence is synthesized)
gtgccagtgcccagagagcaggtcagacaacaggcaaccctgaggcagctggctccctctctctgccctgcagggcttgccgcagggcgtgaggctccccagccacagccccctcttact

SEQ ID NO: 13735 - DNA, 120 bp, Artificial Sequence
  ENSG00000011275_45 (sequence is synthesized)
tgccttaaaactggagagaggaatctagtatttgcacttagcaaaatatttaaaaactgaaaaaaatgtgcatgatctgtcactttgtataaaaacaagaaacgattagttcattaaact

SEQ ID NO: 13736 - DNA, 120 bp, Artificial Sequence
  ENSG00000011275_46 (sequence is synthesized)
ttttctttaccttctggtagtaaaaatagataaaataattccgtttcaactactgtgtgtaaaaagcctgtatcatatgtaactgggacttttgtaaataaatgtttgtgcgctctgctc

SEQ ID NO: 13737 - DNA, 120 bp, Artificial Sequence
  ENSG00000011275_47 (sequence is synthesized)
atgcacctggctccagcctggccaggtcattttgccctggtgggcctgtgcctcaaaaatggggtttcttcccttgtgaggaagacccatgaattagtaacggaattgccaggaatgcta

SEQ ID NO: 13738 - DNA, 120 bp, Artificial Sequence
  ENSG00000011275_48 (sequence is synthesized)
aaaactatctaaatgccatgtattgttttcaagctgttactcctggaaggggctgggttggcattgttttagaggttaggagccaaacatcagctcatctattctccagctgttgtttgt

SEQ ID NO: 13739 - DNA, 120 bp, Artificial Sequence
  ENSG00000011275_49 (sequence is synthesized)
cgcatcaccatcctgtggtcacctgatctcagcgtctaggtcaactttgattcctttcttcttgccctgatggccagtgacatacacagatcccatcgactctaactctgcagtcagtgt

SEQ ID NO: 13740 - DNA, 120 bp, Artificial Sequence
  ENSG00000011275_50 (sequence is synthesized)
cttgtattcttctcctccccctagcctctggaacaggacccaaggacattatcattatacagctatctgttcttttgaaacagatggtcaccatgtttagatattagcagtcccatatat

SEQ ID NO: 13741 - DNA, 120 bp, Artificial Sequence
  ENSG00000011275_51 (sequence is synthesized)
atttcagactctgacttcaggccacccctcagctctgctctcctctatgagtggtttccagtccagagccgtgtggtccagctgttcaggagatcttcctcatttctctcagagtcagcc

SEQ ID NO: 13742 - DNA, 120 bp, Artificial Sequence
  ENSG00000011275_52 (sequence is synthesized)
gctacttcctgttcaccaggttctatctgcatgtcgttcaagtagaacggtgtgttatcctattgaacgacataatcaaggtcctcactggctgctggtgttctctgattatcgaacaga

SEQ ID NO: 13743 - DNA, 120 bp, Artificial Sequence
  ENSG00000011275_53 (sequence is synthesized)
caggaaaagcattttccaaatcattcgcagcataccagttgccaggggctgtttgttctggtgagagatgacatctaaaacagcagccacatttagtcagcatctgttgaggcttaaagt

SEQ ID NO: 13744 - DNA, 120 bp, Artificial Sequence
  ENSG00000011275_54 (sequence is synthesized)
aatacactgtcctccaagagccattcttctgtacaagccaaatgagaagtaaaaagagatgtgaaagaatcatcgcctctgcatcttagaagtctttgatggtggtgccagtctagaaga

SEQ ID NO: 13745 - DNA, 120 bp, Artificial Sequence
  ENSG00000011275_55 (sequence is synthesized)
gaaatacaactataagtaagaaaagaggccaggcacagtgacttacgactgtaatctcaccactttgcctctggaacaggacccaaggacattatcattatacagctatctgttcttttg

SEQ ID NO: 13746 - DNA, 120 bp, Artificial Sequence
  ENSG00000011275_56 (sequence is synthesized)
gaagcaatgaagaatggatctgtaaaatggggacagagaaccagatctctcaagacctttctagacctcatcttctatgtagacagatgaatctgggaactagtgttgaatttgaagaca

SEQ ID NO: 13747 - DNA, 120 bp, Artificial Sequence
  ENSG00000011275_57 (sequence is synthesized)
cacacagacctgcttcacagcccttttctagtctttagtcattttattatactttttgccatctgtcttgtattgccatttgaaaccattctagtgaatgaaatataaattatgttctta

SEQ ID NO: 13748 - DNA, 120 bp, Artificial Sequence
  ENSG00000011275_58 (sequence is synthesized)
aatggccttcagatggaaccgtctggccattttaagcaggaagcctattcattagagaaccacatggcagactttgtaattttcttctggaaaacccagattatccaaagagagaagaca

SEQ ID NO: 13749 - DNA, 80 bp, Artificial Sequence
  ENSG00000011295_0 (sequence is synthesized)
agtgcgcagaggacgcggcgggagcatgttccggctcctgagctggagcctgggccgaggcttcctgcgggccgcggggc

SEQ ID NO: 13750 - DNA, 120 bp, Artificial Sequence
  ENSG00000011295_1 (sequence is synthesized)
cccgaggtgcaggtgccgccatcccgagtcgcgccgcacggccggggcccaggcctgctgccgctgctggcagcgctcgcctggttctcgaggcccgctgcggcagaggaggaggagcag

SEQ ID NO: 13751 - DNA, 120 bp, Artificial Sequence
  ENSG00000011295_2 (sequence is synthesized)
agaggaggaggagcagcagggagccgacggggccgctgccgaggacggggcggacgaggccgaggcagagatcatccagctgctgaagcgagccaagttgagcattatgaaagatgagcc

SEQ ID NO: 13752 - DNA, 120 bp, Artificial Sequence
  ENSG00000011295_3 (sequence is synthesized)
agaagaggctgagttaattttgcatgacgctcttcgtctcgcctatcagactgataacaagaaggccatcacttacacttatgatttgatggccaacttagcatttatacggggtcagct

SEQ ID NO: 13753 - DNA, 120 bp, Artificial Sequence
  ENSG00000011295_4 (sequence is synthesized)
tgaaaatgctgaacaactttttaaagcaacaatgagttacctccttggagggggcatgaagcaggaggacaatgcaataattgaaatttccctaaagctggccagtatctatgctgcgca

SEQ ID NO: 13754 - DNA, 120 bp, Artificial Sequence
  ENSG00000011295_5 (sequence is synthesized)
gaacagacaggaatttgctgttgctggctatgaattctgcatttcaactctagaggaaaaaattgaaagagaaaaggaattagcagaagacattatgtcagtggaagagaaagccaatac

SEQ ID NO: 13755 - DNA, 120 bp, Artificial Sequence
  ENSG00000011295_6 (sequence is synthesized)
ccacctcctcttgggcatgtgcttagacgcctgtgctcgctaccttctgttctccaagcagccgtcacaggcacaaaggatgtatgaaaaagctctgcagatttctgaagaaatacaagg

SEQ ID NO: 13756 - DNA, 120 bp, Artificial Sequence
  ENSG00000011295_7 (sequence is synthesized)
agaaagacacccacagaccattgtgctgatgagtgacctggctactaccctggatgcacagggccgctttgatgaggcctatatttatatgcaaagggcatcagatctggcaagacagat

SEQ ID NO: 13757 - DNA, 120 bp, Artificial Sequence
  ENSG00000011295_8 (sequence is synthesized)
aaatcatcctgagctacacatggtactcagtaatctagctgcagttttgatgcacagagaacgatatacacaagcaaaagagatctaccaggaagcactgaagcaagcaaagctgaaaaa

SEQ ID NO: 13758 - DNA, 120 bp, Artificial Sequence
  ENSG00000011295_9 (sequence is synthesized)
agatgaaatttctgtacaacacatcagggaagagttggctgagctgtcaaagaaaagtagacctttgacaaattctgtcaagctctaaatccatttttgtgtagggagaataatgtctag

SEQ ID NO: 13759 - DNA, 120 bp, Artificial Sequence
  ENSG00000011295_10 (sequence is synthesized)
taatgtggaagaatagctatcattcctgtctctgtggcacccgatcaatggcttaaatctgtcgtttttgatattcaggtttcctcaatttagccttagtgaaggaggggttgtacacac

SEQ ID NO: 13760 - DNA, 120 bp, Artificial Sequence
  ENSG00000011295_11 (sequence is synthesized)
tgccatttttgtattttaaaggaaaaatgactttcattcccaactgattatgacctttcaggatgtcgtcaagtgatgctttcagttgtaacacgtgacttggtgctgtccctgctggtc

SEQ ID NO: 13761 - DNA, 120 bp, Artificial Sequence
  ENSG00000011295_12 (sequence is synthesized)
gtggtgattcagcctggcatttctaccataagtttttggtctgctgatttgctgccctgtcttctcttactttactttatcaatacctggcaaactgaccagaattaccttcctcatggc

SEQ ID NO: 13762 - DNA, 120 bp, Artificial Sequence
  ENSG00000011295_13 (sequence is synthesized)
aaagggggattatggtgaattgttgttcttatagtctgtttcatgaagcacaagtggaatttaatacataaaagagaaaaatatcttagtttgctaccagcatccagcatgaagttgtaa

SEQ ID NO: 13763 - DNA, 120 bp, Artificial Sequence
  ENSG00000011295_14 (sequence is synthesized)
agtggggattaggcacgtgacagtatagcacccatttgaatttaaataaaagtgaaccatatttatctggttatataaaactaaaaatgggggtgtttatataaaactaaaaactaagaa

SEQ ID NO: 13764 - DNA, 120 bp, Artificial Sequence
  ENSG00000011295_15 (sequence is synthesized)
tgatgtaaccttttgtctgtgttatctgaacactctacttcctttgcagccttagtcacacaactgagtcatctcaagtactctttaaggacacacagcccaggctgttctgagtcagaa

SEQ ID NO: 13765 - DNA, 120 bp, Artificial Sequence
  ENSG00000011295_16 (sequence is synthesized)
taggcccctacaggtatattttaaaactcttcgtaattctaatgtgtactgctggtatagctgaactactgacctggatcttagtcctagcctttttgcttttgcaatttcagtatcttc

SEQ ID NO: 13766 - DNA, 120 bp, Artificial Sequence
  ENSG00000011295_17 (sequence is synthesized)
atctctaaactagggaaacactgggattctttcttagctgtgggggaaggtatttggttagatgactttgaatgaatagactgctgtgctgaaagagctttatcacactgtctcaaagta

SEQ ID NO: 13767 - DNA, 120 bp, Artificial Sequence
  ENSG00000011295_18 (sequence is synthesized)
tgtaaagatacataggtggatgctcttactgcagcagtcatgaatacatttttagccatttacctaaggaaaaagacagtttttctaggtaccatgaaggaagattgaccctgttggtat

SEQ ID NO: 13768 - DNA, 120 bp, Artificial Sequence
  ENSG00000011295_19 (sequence is synthesized)
gcctgtgggggtgggatgtgagtgggactgataaactgatacttttggttcgtatgtacatactggaagaatcttcataataaatgagactacacaacaatattgtatgtatcccagtaa

SEQ ID NO: 13769 - DNA, 120 bp, Artificial Sequence
  ENSG00000011295_20 (sequence is synthesized)
aaaaaaaaaaaaaaaaaaaaaactttctgaagaaaataaaaacaccagaaaccttgaggtccaaatcctcagggattagactaaaactagagttttgtatgttgcagatgtaaatttctt

SEQ ID NO: 13770 - DNA, 120 bp, Artificial Sequence
  ENSG00000011295_21 (sequence is synthesized)
gttgcagatgtaaatttcttcctattttctgtctaatctcatattatttaccatgcagctaatgccgtttaccaagtctagctcagagagataagatacaatataaatcagactgtttca

SEQ ID NO: 13771 - DNA, 120 bp, Artificial Sequence
  ENSG00000011295_22 (sequence is synthesized)
gtagaaaccagtattaacgtatggtgatttcttaaaaaaattaatgtcaaccactcaccttttgcattgagaatgtttttaccttttcacaactgcaggggttactgaaaggtttttcat

SEQ ID NO: 13772 - DNA, 120 bp, Artificial Sequence
  ENSG00000011295_23 (sequence is synthesized)
tccaagttttatttatttattaattttaaatcatccacagtgactcagctcatggtctcgttgttggaaacactaggagttttcaggacagtctcttcatgtgggtgttttcattacagt

SEQ ID NO: 13773 - DNA, 120 bp, Artificial Sequence
  ENSG00000011295_24 (sequence is synthesized)
tcatttacactgttgtaaaataaggtactgaagcaaaaggaggactgatctcctttactgattggtctaaattcaaaagtgaattggttaaaatcgtgtcattaaaattttttaactgtc

SEQ ID NO: 13774 - DNA, 120 bp, Artificial Sequence
  ENSG00000011295_25 (sequence is synthesized)
ctgtagaaataactccaagaacacttttaatagtttattttcacattgaaaatcagatttgctccagcctcaaagagtatatttatgtaaaattaggtaagcgatatagaagcaagctgc

SEQ ID NO: 13775 - DNA, 120 bp, Artificial Sequence
  ENSG00000011295_26 (sequence is synthesized)
actttttttctaaatgggaaggtattaaaaaagaaaagtctcattttagtaacatagtcttccttaaactctatgccacttgtaagatttctgaaaactgaagacatagaagggaacggg

SEQ ID NO: 13776 - DNA, 120 bp, Artificial Sequence
  ENSG00000011295_27 (sequence is synthesized)
cttgatatgaacgacagctttgctggtaaataaacccaactgaacctaagattatctaaggtaacctctttttctagtcttttattgtgtgaacagttacctcctgctgagttgttggca

SEQ ID NO: 13777 - DNA, 120 bp, Artificial Sequence
  ENSG00000011295_28 (sequence is synthesized)
gaatttccatataatcttgcttatgaccatttctacattatttgtatcatcttttagaagtcttacccaggttgatataggttaccgttctctagatctgtgtctccaattcttcttaca

SEQ ID NO: 13778 - DNA, 120 bp, Artificial Sequence
  ENSG00000011295_29 (sequence is synthesized)
tggcattaggtattttaagcttgttttttttcagacatcgtatagtcaattcttgaatgtgttgagaggtgctatgtcattgtaagctttattcttcttctctgaatgattagcttgttt

SEQ ID NO: 13779 - DNA, 66 bp, Artificial Sequence
  ENSG00000011295_30 (sequence is synthesized)
tacgttgaattctttaaattcagcttgtgactttgcacttcaggattctgagtgttctctgtcttc

SEQ ID NO: 13780 - DNA, 120 bp, Artificial Sequence
  ENSG00000011295_31 (sequence is synthesized)
gtgactttgcacttcaggattctgagtgttctctgtcttcttcctgcattgtttttcttataccatacaggtttttcattggccttgactttttgttgttaactcattcttctttgggtt

SEQ ID NO: 13781 - DNA, 120 bp, Artificial Sequence
  ENSG00000011295_32 (sequence is synthesized)
tattttcatttgtttctgctgaatattatttgtttcaaactaaaaataacattccacattttaattgatgtgcggactcttaatctacttaaaatgtgggctgaagttccatgattccag

SEQ ID NO: 13782 - DNA, 120 bp, Artificial Sequence
  ENSG00000011295_33 (sequence is synthesized)
ctagtctggaataggtcatttaactggatgttaattcacctacattgttccctaagtgacatgtgggtcccattctgctgacatatttgtgggtcctggtaacaaccatttgggtagatt

SEQ ID NO: 13783 - DNA, 120 bp, Artificial Sequence
  ENSG00000011295_34 (sequence is synthesized)
aaaggaggtattgattaggttgaagtactattgtgttcaattcacgtaacttctacagacctgcactagcctgtcgaaccccatcaagctggagaaaaccttgcaatgatagtaccttac

SEQ ID NO: 13784 - DNA, 120 bp, Artificial Sequence
  ENSG00000011295_35 (sequence is synthesized)
gtcagtagtgctttacagatttctaaatgtgttcagttacaatgtgtttctcacagtgtgctggtgaagctttatgacaggaagtatcattttgtcagacatttcttagtgtcagcacac

SEQ ID NO: 13785 - DNA, 120 bp, Artificial Sequence
  ENSG00000011295_36 (sequence is synthesized)
ggtagcaatgtaaacttaactgacttgctttaagggagggatgtcactggattgatagatttgtgaagtggtatgtagggagggcaagggccaacgaataaacatgtaaattaaaagact

SEQ ID NO: 13786 - DNA, 120 bp, Artificial Sequence
  ENSG00000011295_37 (sequence is synthesized)
gttaggaatcccacagcattcagtggagttccagcctgtcagatggggatgaaatgaggcagcaccagcttgtcgcttcataagcacacagtaaattagccctatatctgcattcatgct

SEQ ID NO: 13787 - DNA, 120 bp, Artificial Sequence
  ENSG00000011295_38 (sequence is synthesized)
tttgagggtgaaagcaaaagggaattttaaagttttgaaataagtaggaacacagtattctaaactgaaaaacaatttgtaatttgctttcagatggccaacttagcatttatacggggt

SEQ ID NO: 13788 - DNA, 120 bp, Artificial Sequence
  ENSG00000011295_39 (sequence is synthesized)
agagtggatggaggctccgcgggtaaaattgccgagaatgaggtgggtcatccgagaggggattggaatccatccaggcttttccgactctaaggcctgcagtaaaacctctgcagtgtc

SEQ ID NO: 13789 - DNA, 120 bp, Artificial Sequence
  ENSG00000011295_40 (sequence is synthesized)
cacagagctgccaccacagtgcttggtccttccaaggaagctaaggccacgttgggatgaggccctcacttcatccggcaactaccaccacgtccggcagcgccagccccacacttgccc

SEQ ID NO: 13790 - DNA, 120 bp, Artificial Sequence
  ENSG00000011295_41 (sequence is synthesized)
agccctcactctgcatgacaatgaggtgaccatcacggaggataagatcaatgccctcgttaaagcagctggtgtaaatgttgaacctttttggtccagcttgtttgcaatggccctggc

SEQ ID NO: 13791 - DNA, 120 bp, Artificial Sequence
  ENSG00000011295_42 (sequence is synthesized)
caatgtcaacattgggagcctcatctacaatgtaggggctggtggacctgctccagcagctggtgctgcaccagtgggatcctgcccactccactgctgctgctccagctgagaagaaag

SEQ ID NO: 13792 - DNA, 120 bp, Artificial Sequence
  ENSG00000011295_43 (sequence is synthesized)
tggaagcaaacaaagaagaatctgaggagtctgatgatgacatgggcttttggttgttttgactaaatttcttataacgtgttcaatacaaagctgaacttaagaaaaaaaaaaaaagaa

SEQ ID NO: 13793 - DNA, 120 bp, Artificial Sequence
  ENSG00000011304_0 (sequence is synthesized)
ctcggagccgttgggtcggttcctgctattccggcgcctccactccgtcccccgcgggtctgctctgtgtgccatggacggcattgtcccagatatagccgttggtacaaagcggggatc

SEQ ID NO: 13794 - DNA, 120 bp, Artificial Sequence
  ENSG00000011304_1 (sequence is synthesized)
tgacgagcttttctctacttgtgtcactaacggaccgtttatcatgagcagcaactcggcttctgcagcaaacggaaatgacagcaagaagttcaaaggtgacagccgaagtgcaggcgt

SEQ ID NO: 13795 - DNA, 120 bp, Artificial Sequence
  ENSG00000011304_2 (sequence is synthesized)
cccctctagagtgatccacatccggaagctccccatcgacgtcacggagggggaagtcatctccctggggctgccctttgggaaggtcaccaacctcctgatgctgaaggggaaaaacca

SEQ ID NO: 13796 - DNA, 120 bp, Artificial Sequence
  ENSG00000011304_3 (sequence is synthesized)
ggccttcatcgagatgaacacggaggaggctgccaacaccatggtgaactactacacctcggtgacccctgtgctgcgcggccagcccatctacatccagttctccaaccacaaggagct

SEQ ID NO: 13797 - DNA, 120 bp, Artificial Sequence
  ENSG00000011304_4 (sequence is synthesized)
gaagaccgacagctctcccaaccaggcgcgggcccaggcggccctgcaggcggtgaactcggtccagtcggggaacctggccttggctgcctcggcggcggccgtggacgcagggatggc

SEQ ID NO: 13798 - DNA, 120 bp, Artificial Sequence
  ENSG00000011304_5 (sequence is synthesized)
gatggccgggcagagccccgtgctcaggatcatcgtggagaacctcttctaccctgtgaccctggatgtgctgcaccagattttctccaagttcggcacagtgttgaagatcatcacctt

SEQ ID NO: 13799 - DNA, 120 bp, Artificial Sequence
  ENSG00000011304_6 (sequence is synthesized)
caccaagaacaaccagttccaggccctgctgcagtatgcggaccccgtgagcgcccagcacgccaagctgtcgctggacgggcagaacatctacaacgcctgctgcacgctgcgcatcga

SEQ ID NO: 13800 - DNA, 120 bp, Artificial Sequence
  ENSG00000011304_7 (sequence is synthesized)
cttttccaagctcaccagcctcaacgtcaagtacaacaatgacaagagccgtgactacacacgcccagacctgccttccggggacagccagccctcgctggaccagaccatggccgcggc

SEQ ID NO: 13801 - DNA, 120 bp, Artificial Sequence
  ENSG00000011304_8 (sequence is synthesized)
cttcggcctttccgttccgaacgtccacggcgccctggcccccctggccatcccctcggcggcggcggcagctgcggcggcaggtcggatcgccatcccgggcctggcgggggcaggaaa

SEQ ID NO: 13802 - DNA, 120 bp, Artificial Sequence
  ENSG00000011304_9 (sequence is synthesized)
ttctgtattgctggtcagcaacctcaacccagagagagtcacaccccaaagcctctttattcttttcggcgtctacggtgacgtgcagcgcgtgaagatcctgttcaataagaaggagaa

SEQ ID NO: 13803 - DNA, 120 bp, Artificial Sequence
  ENSG00000011304_10 (sequence is synthesized)
cgccctagtgcagatggcggacggcaaccaggcccagctggccatgagccacctgaacgggcacaagctgcacgggaagcccatccgcatcacgctctcgaagcaccagaacgtgcagct

SEQ ID NO: 13804 - DNA, 120 bp, Artificial Sequence
  ENSG00000011304_11 (sequence is synthesized)
gccccgcgagggccaggaggaccagggcctgaccaaggactacggcaactcacccctgcaccgcttcaagaagccgggctccaagaacttccagaacatattcccgccctcggccacgct

SEQ ID NO: 13805 - DNA, 120 bp, Artificial Sequence
  ENSG00000011304_12 (sequence is synthesized)
gcacctctccaacatcccgccctcagtctccgaggaggatctcaaggtcctgttttccagcaatgggggcgtcgtcaaaggattcaagttcttccagaaggaccgcaagatggcactgat

SEQ ID NO: 13806 - DNA, 120 bp, Artificial Sequence
  ENSG00000011304_13 (sequence is synthesized)
tcattgacctgcacaaccacgacctcggggagaaccaccacctgcgggtctccttctccaagtccaccatctaggggcacaggcccccacggccgggccccctggcgacaacttccatca

SEQ ID NO: 13807 - DNA, 120 bp, Artificial Sequence
  ENSG00000011304_14 (sequence is synthesized)
ttccagagaaaagccactttaaaaacagctgaagtgaccttagcagaccagagattttatttttttaaagagaaatcagtttacctgtttttaaaaaaattaaatctagttcaccttgct

SEQ ID NO: 13808 - DNA, 120 bp, Artificial Sequence
  ENSG00000011304_15 (sequence is synthesized)
caccctgcggtgacagggacagctcaggctcttggtgactgtggcagcgggagttcccggccctccacacccggggccagaccctcggggccatgccttggtggggcctgtgtcgggcgt

SEQ ID NO: 13809 - DNA, 120 bp, Artificial Sequence
  ENSG00000011304_16 (sequence is synthesized)
ggggcctgcaggtgggcgccccgaccacgacttggcttccttgtgccttaaaaaacctgccttcctgcagccacacacccacccggggtgtcctggggacccaaggggtgggggggtcac

SEQ ID NO: 13810 - DNA, 120 bp, Artificial Sequence
  ENSG00000011304_17 (sequence is synthesized)
accagagagaggcagggggcctggccggctcctgcaggatcatgcagctggggcgcggcggccgcggctgcgacaccccaaccccagccctctaatcaagtcacgtgattctcccttcac

SEQ ID NO: 13811 - DNA, 120 bp, Artificial Sequence
  ENSG00000011304_18 (sequence is synthesized)
cccgcccccagggccttcccttctgcccccaggcgggctccccgctgctccagctgcggagctggtcgacataatctctgtattatatactttgcagttgcagacgtctgtgcctagcaa

SEQ ID NO: 13812 - DNA, 120 bp, Artificial Sequence
  ENSG00000011304_19 (sequence is synthesized)
tatttccagttgaccaaatattctaatcttttttcatttatatgcaaaagaaatagttttaagtaactttttatagcaagatgatacaatggtatgagtgtaatctaaacttccttgtgg

SEQ ID NO: 13813 - DNA, 120 bp, Artificial Sequence
  ENSG00000011304_20 (sequence is synthesized)
tattaccttgtatgctgttacttttattttattccttgtaattaagtcacaggcaggacccagtttccagagagcaggcggggccgcccagtgggtcaggcacagggagccccggtccta

SEQ ID NO: 13814 - DNA, 120 bp, Artificial Sequence
  ENSG00000011304_21 (sequence is synthesized)
tcttagagcccctgagcttcagggaaggggcgggcgtgtcgccgcctctggcatcgcctccggttgccttacaccacgccttcacctgcagtcgcctagaaaacttgctctcaaacttca

SEQ ID NO: 13815 - DNA, 120 bp, Artificial Sequence
  ENSG00000011304_22 (sequence is synthesized)
gggttttttcttccttcaaattttggaccaaagtctcatttctgtgttttgcctgcctctgatgctgggacccggaaggcgggcgctcctcctgtcttctctgtgctctttctaccgccc

SEQ ID NO: 13816 - DNA, 120 bp, Artificial Sequence
  ENSG00000011304_23 (sequence is synthesized)
ccgcgtcctgtcccgggggctctcctaggatcccctttccgtaaaagcgtgtaacaagggtgtaaatatttataattttttatacctgttgtgagacccgaggggcggcggcgcggtttt

SEQ ID NO: 13817 - DNA, 120 bp, Artificial Sequence
  ENSG00000011304_24 (sequence is synthesized)
ttatggtgacacaaatgtatattttgctaacagcaattccaggctcagtattgtgaccgcggagccacaggggaccccacgcacattccgttgccttacccgatggcttgtgacgcggag

SEQ ID NO: 13818 - DNA, 120 bp, Artificial Sequence
  ENSG00000011304_25 (sequence is synthesized)
agaaccgattaaaaccgtttgagaaactcctcccttgtctagccctgtgttcgctgtggacgctgtagaggcaggttggccagtctgtacctggacttcgaataaatcttctgtatcctc

SEQ ID NO: 13819 - DNA, 120 bp, Artificial Sequence
  ENSG00000011304_26 (sequence is synthesized)
gcaggtattcaaacgcttggtcttggttccccagcgactgcatgcccacaccaccttcccaggcagctccgcatccacggcggcagcctgggcggactgggcactcgagtgccaggtcag

SEQ ID NO: 13820 - DNA, 120 bp, Artificial Sequence
  ENSG00000011304_27 (sequence is synthesized)
gggcccttcccgggagaggggacgccacgtccacagagcaggcttggccagggcagtggtaggacagggctgtggaggcccacgtgtggacggcgccagccagaagccgctaatcgcaca

SEQ ID NO: 13821 - DNA, 120 bp, Artificial Sequence
  ENSG00000011304_28 (sequence is synthesized)
gtctttgtggtctggttcccttcaagcacctccgggcgagcgcgaggaccgccagtggttggagggatgtctctagtagttgaatttgagtggcctggtaagcgcgcggcccgaggctga

SEQ ID NO: 13822 - DNA, 120 bp, Artificial Sequence
  ENSG00000011304_29 (sequence is synthesized)
ctgagcagcatgaccggcggcgggacgtgtgtgcgtggccgtcctcccgcttcccttctgggaccggggcccggccgccccagtgctggccgtggacggagcagcgcgtgccgcccggcg

SEQ ID NO: 13823 - DNA, 120 bp, Artificial Sequence
  ENSG00000011304_30 (sequence is synthesized)
gtttttcttgggttcagtcacttttaaaagtctgttaaacgtggtccgtgcagtctgtggtgtcagaagaggcgcagccctagagtgggtctggaccccttagcatgcgtgcgggcagca

SEQ ID NO: 13824 - DNA, 120 bp, Artificial Sequence
  ENSG00000011304_31 (sequence is synthesized)
cggtaagaggctgcccgacgcggcgccagtgtgcagagtggtctattagggccgctcagtccggagccccggcggcacgggcccggccctgcaccagggtgatgcacctgctgctctctg

SEQ ID NO: 13825 - DNA, 120 bp, Artificial Sequence
  ENSG00000011304_32 (sequence is synthesized)
gctctctgcacggccagcacagcacggtccagtgtcccccacgtcgggaccacggccccccctggagcagcggatctgcccgcgaaggctctgccggggccgcccgccggccgggttggg

SEQ ID NO: 13826 - DNA, 120 bp, Artificial Sequence
  ENSG00000011304_33 (sequence is synthesized)
cgcagcacagcgcccgctcgcggtggaggttgtgggtgcgatgattagtgtctcatttatttctaggtgcacctggtataatctcagcctctccgtatgcaggagctggtttccctccca

SEQ ID NO: 13827 - DNA, 120 bp, Artificial Sequence
  ENSG00000011304_34 (sequence is synthesized)
ctgtgctgtgggcggggcgcatgcagatgagcccaggcccggcccggcccgtgctgtgaggagaggcgggcgctggtgcaggagccggcgggtggctgtgcgggggtcggacgaccccac

SEQ ID NO: 13828 - DNA, 120 bp, Artificial Sequence
  ENSG00000011304_35 (sequence is synthesized)
aggcacccagggtagggccagagccagggccgcctcccgcgcggctcggctcctcggtgcatgaggacggggagcgtcggcctctcccactctgcggtggagtcgggggcgccgccgctc

SEQ ID NO: 13829 - DNA, 120 bp, Artificial Sequence
  ENSG00000011304_36 (sequence is synthesized)
gggatgttgtgctcgggctcgggtcccggagcagcgccgcccctcgctgtgtctgcgcctctgccctggcagcccctctgctgcagcgctgagaccctccttttccaagatggcttgagt

SEQ ID NO: 13830 - DNA, 120 bp, Artificial Sequence
  ENSG00000011304_37 (sequence is synthesized)
tttcctcttttcctgaattcacatcttggttcgcgttttctcttgcatgatacgcagaatgaattattttttggttacccaaaggcaatctaaaaattacttggagctgagcagggcgcg

SEQ ID NO: 13831 - DNA, 120 bp, Artificial Sequence
  ENSG00000011304_38 (sequence is synthesized)
cagttcagagccccagcaggccgccctgctggtcagcgggacacacagggttagcgcggcggggtgtgggcagcccctgtggctcgagagcctgtcacttaactggtggatccgttattt

SEQ ID NO: 13832 - DNA, 120 bp, Artificial Sequence
  ENSG00000011304_39 (sequence is synthesized)
cccagaatggttaaattcccctcggggagagcttgggtgaaacaagaggcccaaaatatgtaactcttgatggatgggatcctcctggaatcagcatttcaggctgttctgtttcccggc

SEQ ID NO: 13833 - DNA, 120 bp, Artificial Sequence
  ENSG00000011304_40 (sequence is synthesized)
aactcctgtgacttcctcaaggcggtgcccagcctggccctccctcgcgggggcccaggacgcactccctgcctgtgcctcttaccacgagccgggtgctgtccctccagctcctcctga

SEQ ID NO: 13834 - DNA, 120 bp, Artificial Sequence
  ENSG00000011304_41 (sequence is synthesized)
gcgaggccgtgcactaacagactcgatctcccttcacgcctgtaatcgtccttagagactgacttgtgccacagctgcgggagacagcgctgctgcagggcttggctgaggtggccgcga

SEQ ID NO: 13835 - DNA, 120 bp, Artificial Sequence
  ENSG00000011304_42 (sequence is synthesized)
gcggagctgcacgcgcgctcctggggggcgtggttgggatcggcttctgggagcccctccagcagcgctgtctctgccggcatgtgagtgaaggtgcttctcttaccgtgtgcccgtcga

SEQ ID NO: 13836 - DNA, 120 bp, Artificial Sequence
  ENSG00000011304_43 (sequence is synthesized)
ggtaaacctgtaactggaatgtgtgtggagtgtgactgatagaacactacctgattcttatgtatttactgacctgtgtttttttgctactttttttcttttctccccttcccctttccc

SEQ ID NO: 13837 - DNA, 120 bp, Artificial Sequence
  ENSG00000011304_44 (sequence is synthesized)
tattttttttcttgccctgatccggaatttctttgccaactgactgcacggtacttctgcttcctgttgttgcttgaaacaaaacaaaaacataaacaaataaaaaacaaaaattccccc

SEQ ID NO: 13838 - DNA, 120 bp, Artificial Sequence
  ENSG00000011304_45 (sequence is synthesized)
tcaaaccctgctctccggaaaccaacctgcccttgaatattaacatcctgacaacttcatcatccatcaaccactgcacgcctgcggggactgtcttcctcgtgtggacgattggcaact

SEQ ID NO: 13839 - DNA, 120 bp, Artificial Sequence
  ENSG00000011304_46 (sequence is synthesized)
gatcatcaccttcaccaagaacaaccagttccaggccctgctgcagtatgcggaccccgtgagcgcccagcacgccaagctggtgagtggggctcccgggacggcgcccgccctggccct

SEQ ID NO: 13840 - DNA, 120 bp, Artificial Sequence
  ENSG00000011304_47 (sequence is synthesized)
gtctctaaagagagtcacaccccaaagcctctttattcttttcggtatgttatcgttcacacttttattaccttgttttcattaattgagatgattttgatgccctgagacgtattatga

SEQ ID NO: 13841 - DNA, 120 bp, Artificial Sequence
  ENSG00000011304_48 (sequence is synthesized)
gtttgcggtttggcactctgatgctccgtggcatccgcctcgttttatggtttgctttcggtttgcgaattttatttggtcccgtagatacgtacgcatggtttatcgccctgcatgctt

SEQ ID NO: 13842 - DNA, 120 bp, Artificial Sequence
  ENSG00000011304_49 (sequence is synthesized)
ttcagagttagacctgtcggtggcatatgccaccgtggccacccgctggcagcttacctgtcctggatgctatgactttgctgaacggagctgctcctgttagcgcgccctgtggctgcg

SEQ ID NO: 13843 - DNA, 120 bp, Artificial Sequence
  ENSG00000011304_50 (sequence is synthesized)
agacgcagctccgcagtggccgataaagcaaacccggccgggctgagccgggccttgtgggggtgcgcggggccggggctgacggggagatgggcggggcaggcagcaggagactcaggc

SEQ ID NO: 13844 - DNA, 120 bp, Artificial Sequence
  ENSG00000011304_51 (sequence is synthesized)
gggcaaagcacgcttcccgccgcctgactcgccacgtacccactctcaagatggcgtctcccgcaaagccacgcgccagctgactggctcagacgccgtcacgtgatcccattttctccc

SEQ ID NO: 13845 - DNA, 120 bp, Artificial Sequence
  ENSG00000011304_52 (sequence is synthesized)
cctcccccgactacacaagccgtttccgccttcggccttgaggaataaccgcctcccccaataggcgcctgcgatttctctgggtcccgcccccgggcggccttctggccagtgggaggt

SEQ ID NO: 13846 - DNA, 120 bp, Artificial Sequence
  ENSG00000011304_53 (sequence is synthesized)
ctgaagaccgacagctctcccaaccaggcggtgcgtggccccgcggcggaccccagcagcccggggacctcgggggtgggcccagccgcaggggccggggactcacggctgtgcctccca

SEQ ID NO: 13847 - DNA, 120 bp, Artificial Sequence
  ENSG00000011332_0 (sequence is synthesized)
gtgctcccgccccccgggaatgaatggatgggcggcctcagcgcccgcccgaccgctgggaggaccgacccggcggggacctgctgggggcaggacccggggagcaagatggccactgtc

SEQ ID NO: 13848 - DNA, 120 bp, Artificial Sequence
  ENSG00000011332_1 (sequence is synthesized)
atccctggccccctgagcctaggcgaggacttctaccgcgaggccatcgagcactgccgcagttacaacgcgcgcctgtgcgccgagcgcagcctgcgactgcccttcctcgactcgcag

SEQ ID NO: 13849 - DNA, 120 bp, Artificial Sequence
  ENSG00000011332_2 (sequence is synthesized)
accggcgtggcccagaacaactgctacatctggatggagaagacccaccgcgggccgggtttggccccgggacagatttacacgtaccccgcccgctgttggaggaagaaacggagactc

SEQ ID NO: 13850 - DNA, 120 bp, Artificial Sequence
  ENSG00000011332_3 (sequence is synthesized)
aacatcctggaggaccccagactcaggccctgcgagtacaagatcgactgtgaagcacccctgaagaaggagggtggcctcccggaagggccggtcctcgaggctctactgtgtgcagag

SEQ ID NO: 13851 - DNA, 120 bp, Artificial Sequence
  ENSG00000011332_4 (sequence is synthesized)
acgggggagaagaagattgagctgaaggaggaggagaccattatggactgtcagaaacagcagttgctggagtttccgcatgacctcgaggtggaagacttggaggatgacattcccagg

SEQ ID NO: 13852 - DNA, 120 bp, Artificial Sequence
  ENSG00000011332_5 (sequence is synthesized)
aggaagaacagggccaaaggaaaggcatatggcatcgggggtctccggaaacgccaggacaccgcttccctggaggaccgagacaagccgtatgtctgtgatatctgtgggaaacggtat

SEQ ID NO: 13853 - DNA, 120 bp, Artificial Sequence
  ENSG00000011332_6 (sequence is synthesized)
gaacgccacgccctgcccttccaccggaaaaacaaccataaacagttttacaaagaattggcctgggtccctgaggcacaaaggaaacacacagccaagaaggcgcccgacggcactgtc

SEQ ID NO: 13854 - DNA, 120 bp, Artificial Sequence
  ENSG00000011332_7 (sequence is synthesized)
atccccaacggctactgtgacttctgcctggggggctccaagaagacggggtgtcccgaggacctcatctcctgtgcggactgtgggcgatcaggacacccctcgtgtttacaattcacg

SEQ ID NO: 13855 - DNA, 120 bp, Artificial Sequence
  ENSG00000011332_8 (sequence is synthesized)
gtgaacatgacggcagccgtgcggacctaccgctggcagtgcatcgagtgcaaatcctgcagcctgtgcggaacctccgagaacgacgaccagctgctgttttgtgatgactgcgatcgg

SEQ ID NO: 13856 - DNA, 120 bp, Artificial Sequence
  ENSG00000011332_9 (sequence is synthesized)
ggttaccacatgtactgcctgagtccccccatggcggagcccccggaagggagctggagctgtcacctctgtctccggcacctgaaggaaaaggcttctgcttacatcaccctcacctag

SEQ ID NO: 13857 - DNA, 120 bp, Artificial Sequence
  ENSG00000011332_10 (sequence is synthesized)
gccggctcggctcgccgcgactctggggtggtgctcgcctacctgcctctccgagctcctcaattctcccccaccctgaacatcccgcagggggagggggagagggggaagccgagaggg

SEQ ID NO: 13858 - DNA, 120 bp, Artificial Sequence
  ENSG00000011332_11 (sequence is synthesized)
ggctgggccaccccctcccctctgtgcaagtggaatgtctgccctgtgggtgggtgggcccggccagggcctctccctccctccctccctctctgtcccttggcaaatggacaccagggg

SEQ ID NO: 13859 - DNA, 120 bp, Artificial Sequence
  ENSG00000011332_12 (sequence is synthesized)
ggggcttctcccctcaaagccataccccgcctctgggcgggcatggggggtggtgggtgccagccaggggcatggacagagcctttttctaaagaaaaagacaaaaagttaaaaaaaaaa

SEQ ID NO: 13860 - DNA, 120 bp, Artificial Sequence
  ENSG00000011332_13 (sequence is synthesized)
gggctgggcccgcgcgcggcggcagcggcgccccgggccggaggcggcccagccgagcgggccatggccaccgccattcagaacccgctcaagtccctaggcgaggacttctaccgcgag

SEQ ID NO: 13861 - DNA, 120 bp, Artificial Sequence
  ENSG00000011332_14 (sequence is synthesized)
tgggcccgcgcgcggcggcagcggcgccccgggccggaggcggcccagccgagcgggccatggccaccgccattcagaacccgctcaagtcgcgaggacttctaccgcgaggccatcgag

SEQ ID NO: 13862 - DNA, 120 bp, Artificial Sequence
  ENSG00000011332_15 (sequence is synthesized)
ctgccggccccccgccgggcgccccaaccccaatttctggagctgcagccgtcccgcgccccacccaaggtgggcgccttcccctcttgtgcccagggcggtgggcgtggtgtccacccg

SEQ ID NO: 13863 - DNA, 120 bp, Artificial Sequence
  ENSG00000011332_16 (sequence is synthesized)
cccctcctggtgcccacggtggatactgcatgatgtgaaccttggttttgaactctgttcctgcccctccccgaccgccccagcctgtgcccgccccgtgcctgccgtggctggtgggtg

SEQ ID NO: 13864 - DNA, 120 bp, Artificial Sequence
  ENSG00000011332_17 (sequence is synthesized)
gcggtggtggggccgggtgggcccccgcccagcgcctgctggaatgagaagcacagactccgccacggactccttttctctccctcctcccgccccgccaggcctggcggcccccgcccc

SEQ ID NO: 13865 - DNA, 120 bp, Artificial Sequence
  ENSG00000011332_18 (sequence is synthesized)
cctcgctggccattttgggggagtgagggggcgtggttgtttcttgtggttgtgtgtgtttgttgttcgggttttaaaaaagggaaactgagactgcaggtgggggaggtggtgggtttt

SEQ ID NO: 13866 - DNA, 120 bp, Artificial Sequence
  ENSG00000011332_19 (sequence is synthesized)
ggggggatgtcccctaatccaggagtgccccctcacttgtcaccgagtctcctctattgcctgcctctgctgtgaattaacttgttctgtgtattaaactgggcctgacccctctgccca

SEQ ID NO: 13867 - DNA, 120 bp, Artificial Sequence
  ENSG00000011332_20 (sequence is synthesized)
cagctccccacgcctggactaagaggtccatccttggggctgaggctgggggcagggtggagccttgcctgtggtgagagtccctctctctgtcccccctaccccagagttttacaaaga

SEQ ID NO: 13868 - DNA, 120 bp, Artificial Sequence
  ENSG00000011332_21 (sequence is synthesized)
tcttgcttcctcttcgggatcccggactccacgttggtggatctacaggcgatggggcccctcaccctgaccctggcccagacccctgggaggaggtgtgctacagccgtgagcaggggc

SEQ ID NO: 13869 - DNA, 120 bp, Artificial Sequence
  ENSG00000011332_22 (sequence is synthesized)
gacatgcttgtgtctttggatgcatgagggggtgtatgtgtgtgtggtgtgatgtttccatgttgtgtgtctttgtgtgggtgatgtgtttctggtgtgtgtctgtggatatgtgatgtg

SEQ ID NO: 13870 - DNA, 120 bp, Artificial Sequence
  ENSG00000011332_23 (sequence is synthesized)
tctttgtgcatggttatttgtgtgatttgtctccacactatggaacttgggatatttgtctttttcagtagatatttatgtgtgcacgtgtgtgaggtttgtctgtttctcctttgtgag

SEQ ID NO: 13871 - DNA, 120 bp, Artificial Sequence
  ENSG00000011332_24 (sequence is synthesized)
tattgggatttgtctctctttgtgtgtgaatcccgtgtgactgtgtgtgatttgtgttgtgtgtctgcatgtgttcaggtagggatacgtcccggtgtgtttttgtttgtttctgtatcg

SEQ ID NO: 13872 - DNA, 120 bp, Artificial Sequence
  ENSG00000011332_25 (sequence is synthesized)
agagtgtggttgccatggtggttgtggtaggagactgtggtggccgggggactgctgccggccacgtggttgctgggcaggtgtggggtcaggctgtggatcccggcagctcatcctggc

SEQ ID NO: 13873 - DNA, 120 bp, Artificial Sequence
  ENSG00000011332_26 (sequence is synthesized)
gtcatgagccaggggtaggggctgagctatggctcccctgccggtcagtgcccaccaggggcacggtgacctcctaactgcacccctgccccttggcccccaggacacccctcgtgttta

SEQ ID NO: 13874 - DNA, 120 bp, Artificial Sequence
  ENSG00000011332_27 (sequence is synthesized)
gggtggaggcggcaggggcccggaggggctgacaggccctcctggctcgctcgctccccagtctgtgggaaacggtataagaaccggccggggctcagctaccactacacccacacccac

SEQ ID NO: 13875 - DNA, 120 bp, Artificial Sequence
  ENSG00000011332_28 (sequence is synthesized)
aggcagagagaggggtgcccagagactccccacctcgtggccctctccctcccgttccagacccgggttgggaggctgctcaggtctctggctgaggggggaggtgtgatcctggaggcc

SEQ ID NO: 13876 - DNA, 120 bp, Artificial Sequence
  ENSG00000011332_29 (sequence is synthesized)
gtctctgacaagaatggtgtcggatgcaccgctccctggcggggtggagggcgtggggggcctccagattctttttggggaagggagacatcatcccttccctgcaaccctcgggtctgg

SEQ ID NO: 13877 - DNA, 120 bp, Artificial Sequence
  ENSG00000011332_30 (sequence is synthesized)
agtgttgggattacaggtgtgagccaacgcgcctggccagctaattgtctctgagcatttctgagtgtacccatgggtccagctatgtctcctccctgtgtctgggtgtctccaaggatc

SEQ ID NO: 13878 - DNA, 89 bp, Artificial Sequence
  ENSG00000011332_31 (sequence is synthesized)
gtccagctatgtctcctccctgtgtctgggtgtctccaaggatctggctatacctctttgagtctctaggctgtatctgagagtaaggc

SEQ ID NO: 13879 - DNA, 80 bp, Artificial Sequence
  ENSG00000011332_32 (sequence is synthesized)
aggagtttgagaccagcctgattaacacagtgtggtagcatgccagctactctgcctgtagtcccagctactcaggaggc

SEQ ID NO: 13880 - DNA, 73 bp, Artificial Sequence
  ENSG00000011332_33 (sequence is synthesized)
gaaaaaagacagcatggctgggcctcttccttcccgcatctgtctcagacgatctgtctggatgtcccctgcg

SEQ ID NO: 13881 - DNA, 120 bp, Artificial Sequence
  ENSG00000011332_34 (sequence is synthesized)
ccgcatctgtctcagacgatctgtctggatgtcccctgcgggtgtccctgtgtctcctctgcgagtgtctggatctgtccatatttgtctgggtatgtttgagagtcgctgtgtcttccc

SEQ ID NO: 13882 - DNA, 120 bp, Artificial Sequence
  ENSG00000011332_35 (sequence is synthesized)
tgagtaggtctgggtgtgcctgatggcctaactgtgtctttttctgaggctttctggtgtatccaaagttctgaccgtgtctcctgctgtgcatcccagggcatctgagggcgtgactgg

SEQ ID NO: 13883 - DNA, 120 bp, Artificial Sequence
  ENSG00000011332_36 (sequence is synthesized)
gtctccccagagtctgggcctccctcctagggcatgtggttaaatccttgcctctgcagcctcttccctcctgcaaagagcatggtccccccacctgcatagtttgaggagtcctccggg

SEQ ID NO: 13884 - DNA, 120 bp, Artificial Sequence
  ENSG00000011332_37 (sequence is synthesized)
agaacgccgaacgccacgccctgcccttccaccggaaaaacaaccataaacgtgagctggcaggccaggtgggggtggccaggggccctgggagtggggaagaggagcccagctgggggt

SEQ ID NO: 13885 - DNA, 120 bp, Artificial Sequence
  ENSG00000011347_0 (sequence is synthesized)
ccgggcgcgctcacacacgcgctcacacacacacatacacacggcctcgtacacacacacacgctccggcgcgcacacgcggcgcgcaggccggagggaggcggctcggcgctgttcggc

SEQ ID NO: 13886 - DNA, 120 bp, Artificial Sequence
  ENSG00000011347_1 (sequence is synthesized)
gcgcgcggccgcgggcggctctgaggagcccggagggaaccggcgacgaggggaccatgtaccgggacccggaggcggccagcccaggggcgccctcgcgcgacgtcctgctggtctctg

SEQ ID NO: 13887 - DNA, 120 bp, Artificial Sequence
  ENSG00000011347_2 (sequence is synthesized)
ggcgccctcgcgcgacgtcctgctggtctctgccatcatcaccgtcagccttagcgtcactgtcgtcctctgcggcctctgccactggtgtcagcgcaaactgggcaaacgctacaagaa

SEQ ID NO: 13888 - DNA, 120 bp, Artificial Sequence
  ENSG00000011347_3 (sequence is synthesized)
ttccttggagacggtgggcacgccagactcagggcgtgggcgcagtgagaagaaggctatcaagttgcctgcaggagggaaggcggtgaacacagcccccgtgccaggccagacacccca

SEQ ID NO: 13889 - DNA, 120 bp, Artificial Sequence
  ENSG00000011347_4 (sequence is synthesized)
cgatgagtccgaccgccggaccgagccacgttcctccgtctcagacctcgtcaactccctcaccagcgagatgctcatgctctccccaggctccgaggaggatgaggcccacgagggttg

SEQ ID NO: 13890 - DNA, 120 bp, Artificial Sequence
  ENSG00000011347_5 (sequence is synthesized)
cagccgagagaacctgggccggatccagttcagtgtcggctacaacttccaggagtccacgctcaccgtgaagatcatgaaggcccaggagctgccggccaaggacttcagcggcaccag

SEQ ID NO: 13891 - DNA, 120 bp, Artificial Sequence
  ENSG00000011347_6 (sequence is synthesized)
cgaccccttcgtcaagatctacctgctgcccgacaagaagcacaagctggagaccaaggtgaagcggaagaacctgaacccccactggaacgagaccttcctctttgaaggttttcccta

SEQ ID NO: 13892 - DNA, 120 bp, Artificial Sequence
  ENSG00000011347_7 (sequence is synthesized)
tgagaaggtggtgcagaggatcctctacctccaagtcctggactatgaccgcttcagccgcaacgaccccattggggaggtgtccatcccccttaacaaggtggacctgacccagatgca

SEQ ID NO: 13893 - DNA, 120 bp, Artificial Sequence
  ENSG00000011347_8 (sequence is synthesized)
gaccttctggaaggatctgaagccatgcagcgatgggagtgggagccgaggggagctgctcttgtctctctgctacaacccctctgccaactccatcatcgtgaacatcatcaaagcccg

SEQ ID NO: 13894 - DNA, 120 bp, Artificial Sequence
  ENSG00000011347_9 (sequence is synthesized)
gaacctcaaagccatggacatcgggggcacatcagacccctacgtgaaggtatggctgatgtacaaggacaagcgggtggagaagaagaagacggtgacgatgaagaggaacctgaaccc

SEQ ID NO: 13895 - DNA, 120 bp, Artificial Sequence
  ENSG00000011347_10 (sequence is synthesized)
catcttcaatgagtccttcgccttcgatatccccacggagaagctgagggagacgaccatcatcatcactgtcatggacaaggacaagctcagccgcaatgacgtcatcggcaagatcta

SEQ ID NO: 13896 - DNA, 120 bp, Artificial Sequence
  ENSG00000011347_11 (sequence is synthesized)
cctgtcctggaagagcgggccaggggaggtgaagcactggaaggacatgattgcccgtccccggcagcccgtggcccagtggcaccagctgaaggcctgagtggggccaagggaggccca

SEQ ID NO: 13897 - DNA, 120 bp, Artificial Sequence
  ENSG00000011347_12 (sequence is synthesized)
gggggccgagggcccaggtccccatcatgccctcaccactttatgcacaacgcccggcctgagccccctgccatagggaggggaggaccctgagggctcagccagggaggggtcccagga

SEQ ID NO: 13898 - DNA, 120 bp, Artificial Sequence
  ENSG00000011347_13 (sequence is synthesized)
ctcaactgggccccgtttctaggaagtaccagccccatcccccacagtccagctccggggaaggggctctgggaggcattttcctgctttgccccttttcttcctgacttactaatacta

SEQ ID NO: 13899 - DNA, 120 bp, Artificial Sequence
  ENSG00000011347_14 (sequence is synthesized)
aagaagttgggggagctcgagagccagacggccagacaggcagacccctccagaggcccgccaggtgggcatggtcccccattttctttaaggcagcacctggagtggagagaggccact

SEQ ID NO: 13900 - DNA, 120 bp, Artificial Sequence
  ENSG00000011347_15 (sequence is synthesized)
ccctctccagcccccgatgtggacccggggaggggaggctgaggcgtttggccccggcctggccaggagaggcccatccccagggcagtttcaggtgccggctgggccctgaatgtcgag

SEQ ID NO: 13901 - DNA, 120 bp, Artificial Sequence
  ENSG00000011347_16 (sequence is synthesized)
gatagtatatagcccgctcctgggtcctggagctgtggccctttgtactcgtgttgtgtccattgtgtgtgtgcgtggggacagaggcctggaaatgcggaggactatacagagaaggca

SEQ ID NO: 13902 - DNA, 120 bp, Artificial Sequence
  ENSG00000011347_17 (sequence is synthesized)
ggttttgtgaaggccaggcagggttggaggccgggggtgtgagaggagaggcccatagggctgagtggggtcgggtgaggcagaggtcagaaacagaagagctgcagttgctggagctgg

SEQ ID NO: 13903 - DNA, 120 bp, Artificial Sequence
  ENSG00000011347_18 (sequence is synthesized)
gctgagaactgggctgcctcctgccatccccccgtctcctccccttctccccttggtgcccccctctgctcagaatctgaagtagttccctcctcagcaatttcatctcttgaacactga

SEQ ID NO: 13904 - DNA, 120 bp, Artificial Sequence
  ENSG00000011347_19 (sequence is synthesized)
ccttccttctcagggggtcccgagccccgactagctttgccctaactccttcatcaaaagaccccccgccagcttcccacacctcatacgcagccacatctgccctattctccatgcttt

SEQ ID NO: 13905 - DNA, 120 bp, Artificial Sequence
  ENSG00000011347_20 (sequence is synthesized)
ccagcttgcctgcccttcctcatctctccctgcctgtgcagacctccacccttctttcctccacccctccatcccccaatgcttgtagaccttccattcattccgtctcatcgtgcgtgg

SEQ ID NO: 13906 - DNA, 120 bp, Artificial Sequence
  ENSG00000011347_21 (sequence is synthesized)
tctctgatcgtccatcacctgaccttctccaggactgtcttctcacccttccccactccctggtccccgggagcagctccttctgcccgactcactcacagtgcagggaaaggaggcagg

SEQ ID NO: 13907 - DNA, 120 bp, Artificial Sequence
  ENSG00000011347_22 (sequence is synthesized)
gaaaagaccaggattctgtgagttctgaggttgccacacacaaagaagctgtggtttctctgcctcggccactgatgagactaaaactggcttccccttggagacggcagatttcaggct

SEQ ID NO: 13908 - DNA, 120 bp, Artificial Sequence
  ENSG00000011347_23 (sequence is synthesized)
gatccctgcttaagccctctcatccccacgctggtcctggtattgatacaagacccagctggtgacaaagcctccaatcctgggggtccacgagcctgggcctgacattcccagaactac

SEQ ID NO: 13909 - DNA, 120 bp, Artificial Sequence
  ENSG00000011347_24 (sequence is synthesized)
cgccaggtggcgccaggcccccacagtctgtggccgtggtcttagcccccagttccactctggatgggcctgtgacaccccaaagagaagaaggggactctggatagggtccccacatcc

SEQ ID NO: 13910 - DNA, 120 bp, Artificial Sequence
  ENSG00000011347_25 (sequence is synthesized)
agggcgtggggagaccattggcatttgggaaccattttccttcgaacggcttccccttgagctgagcattctgcttgctgcagtagacgggtcgccttttgcccataccgaaattttctg

SEQ ID NO: 13911 - DNA, 120 bp, Artificial Sequence
  ENSG00000011347_26 (sequence is synthesized)
aaattaaatcgcacacccccaccatttcctctccctgggatctggaggaacatcatacatagtaggtgaatcgttttgtagagtgaagaatgctaatgtaaagcaaatagtcacccacgt

SEQ ID NO: 13912 - DNA, 120 bp, Artificial Sequence
  ENSG00000011347_27 (sequence is synthesized)
tccttgtaaatccaaatgtttctatattgtagctttgcttaaaatggggtcggccccaactgcatcctcctctttggcgggctggggagcggcccccagccgggacgggagggcagcgac

SEQ ID NO: 13913 - DNA, 120 bp, Artificial Sequence
  ENSG00000011347_28 (sequence is synthesized)
cccgaggcctcgtggacgtgggagagagtgtggtgggaagtcttgagcggaggaggggatctgcccttctccactcctctcttggatccgcctcggtttcctgtccccccaccacccgcc

SEQ ID NO: 13914 - DNA, 120 bp, Artificial Sequence
  ENSG00000011347_29 (sequence is synthesized)
tgccccgcggaagaccgcccagtgagccagcccccaccttccaggcgccttcgccctggggatccaaccaacttgtatcgagtgggcggggcaacggctccccatttttcccgagccccg

SEQ ID NO: 13915 - DNA, 120 bp, Artificial Sequence
  ENSG00000011347_30 (sequence is synthesized)
cccacagagctcttagccaatcctatgcagagagcatctcctggcaggggtctcttcccaaccagaccccacccaggcacattagcgaccaggcttgggcttccccagcgccccaccacc

SEQ ID NO: 13916 - DNA, 120 bp, Artificial Sequence
  ENSG00000011347_31 (sequence is synthesized)
accacgtgcaggtggagctctgggatgctatgttggggcggcaagcggtgggccgagggccgggtaggctagcacgggaggtaagggtggtatgggatggggcgggggcggtctagggca

SEQ ID NO: 13917 - DNA, 120 bp, Artificial Sequence
  ENSG00000011347_32 (sequence is synthesized)
ataggagagcagagaatgggggaacttgagggtggggggagggcaccggagccttgccaccatcccaggactttgggcaagtcacccgcactccctgggcctcggtttccccatctgtaa

SEQ ID NO: 13918 - DNA, 120 bp, Artificial Sequence
  ENSG00000011347_33 (sequence is synthesized)
aatgatggtaataatacttcacctacctcataggggaggttgtgaggccaccatcacctgacctgggggtcaaggcaggaggactccgaaggtgctacccgtgagcaaagtgtaattacc

SEQ ID NO: 13919 - DNA, 120 bp, Artificial Sequence
  ENSG00000011347_34 (sequence is synthesized)
gaatcctgactgcaaggcccacctgcccctcccccacagagcctccagagctagctgaggccaacgcaggcccatccgtctcttcactctgtcgcaggccctttcatgggcttcgtctgc

SEQ ID NO: 13920 - DNA, 120 bp, Artificial Sequence
  ENSG00000011347_35 (sequence is synthesized)
catctttgtgggtgccctagacttagtccttatcttgtcctggtttcctttcttgtgaccatctccccatgaaagtgctgtacaaattccacccgccccaggacccccgcacctgccctc

SEQ ID NO: 13921 - DNA, 120 bp, Artificial Sequence
  ENSG00000011347_36 (sequence is synthesized)
tggcaccagatgccagggaagggacagaggaaaacagccacaaacaagccaggggggctccccggagccccaggggtggggattggtggccactgtttgtatgttcttgagtgcaagtgt

SEQ ID NO: 13922 - DNA, 120 bp, Artificial Sequence
  ENSG00000011347_37 (sequence is synthesized)
tttataaaaaataaaacaaaaacccaccatcacaaaaaaaaaaattttgcagcgaagagaaatgaagaaaaactgaagaaaaaaaaaaaacaggaaaaaaagaaccatacaaaatttttc

SEQ ID NO: 13923 - DNA, 120 bp, Artificial Sequence
  ENSG00000011347_38 (sequence is synthesized)
caccacacataccctctaagccagcaagatttcctctttgcaaaatcatatttttgtgggaatgggccctgctttttgtggcaaggcctgttctgattaataaaggatcgtgaaaaagta

SEQ ID NO: 13924 - DNA, 120 bp, Artificial Sequence
  ENSG00000011347_39 (sequence is synthesized)
ctcctgtcgggcgccaaagtggccgccgcggcggggctggcggtggagcgggaaggccggctgggggagaagccggcaccggtgccgccacccggagaggacgccttgagaagcggcggg

SEQ ID NO: 13925 - DNA, 120 bp, Artificial Sequence
  ENSG00000011347_40 (sequence is synthesized)
gagccgggcagcggtggcaaggcggggagaggccgctggcggacggtgcagagccacctggccgcagggaagctcaacttgtccaagttgcctgcaggagggaaggcggtgaacacagcc

SEQ ID NO: 13926 - DNA, 120 bp, Artificial Sequence
  ENSG00000011347_41 (sequence is synthesized)
gacagagacttttggaataacaatgagagcacagtgcagcagaaatggagctcctaccctcccaaggagtttattctaaacatttcaccctacgccccttatggcgacccacgactgtcc

SEQ ID NO: 13927 - DNA, 120 bp, Artificial Sequence
  ENSG00000011347_42 (sequence is synthesized)
actacccttgagtctatccccagctccacgggagagccgaaatgccagcgaccccgcaccctgatgcggcagcagagcctgcaacagccgctgagccagcaccagcggggccggcagccc

SEQ ID NO: 13928 - DNA, 120 bp, Artificial Sequence
  ENSG00000011347_43 (sequence is synthesized)
caccaccagccagagcctgggccagctgcaggcccacatggcctcggcaccaggccccaacccccgggcctatggccggggccaggctcggcagggcacctcggccggctccaagtaccg

SEQ ID NO: 13929 - DNA, 120 bp, Artificial Sequence
  ENSG00000011347_44 (sequence is synthesized)
aagtaccgggcggcagggggccgcagccgctccaacccaggcagctgggaccacgtggtggggcagattcgaaaccgaggcttggacatgaaatccttcctggaaggccggatggtggtg

SEQ ID NO: 13930 - DNA, 120 bp, Artificial Sequence
  ENSG00000011347_45 (sequence is synthesized)
tcggaacaggatgactttgccaatatccctgacctgcaaaacccaggaacccagcagaaccagaacgctcagggggacaagaggttgcctgcaggagggaaggcggtgaacacagccccc

SEQ ID NO: 13931 - DNA, 120 bp, Artificial Sequence
  ENSG00000011347_46 (sequence is synthesized)
cgtcgttaacccttcgttgtcctgtgggatagagttggaggtggctgccctcccccaacccccgccgcccctgccccaggcggtggggaggggccccccctccgttgtcgtgtggcaccc

SEQ ID NO: 13932 - DNA, 120 bp, Artificial Sequence
  ENSG00000011376_0 (sequence is synthesized)
gagatctaggtcttcaggacctttgagccaccgaccccattgatagctctggactctttcccagaaaaatgcacatatacacgtagttttgtactcaagctcccctctccactactcccc

SEQ ID NO: 13933 - DNA, 120 bp, Artificial Sequence
  ENSG00000011376_1 (sequence is synthesized)
taccccagatctttgctccccggactaggggtttggacccagttgaaggtcatcccttgcctctctggggcccacaggtcgttttcacgttagggctcggaggtcctcagaaagatgagg

SEQ ID NO: 13934 - DNA, 120 bp, Artificial Sequence
  ENSG00000011376_2 (sequence is synthesized)
ttccagacgagaaatccgcctgaggtcacagatccagacctacagataaaaaacattatttaatctatctgggatttactccggcttatgatttgagggccttctcaccttctgaagaat

SEQ ID NO: 13935 - DNA, 120 bp, Artificial Sequence
  ENSG00000011376_3 (sequence is synthesized)
ggcttctgtttggcagagattgggtttttatgcctctcttctgaaaagacagctaaatggtgggccagatgtcatcaagtgggaaaggagagtaattcccggatgtaccagaagcatcta

SEQ ID NO: 13936 - DNA, 120 bp, Artificial Sequence
  ENSG00000011376_4 (sequence is synthesized)
cagtgccacgggaaagtggacaaaagagtatacattgcagacaagaaaggatgttgagaaatggtggcatcaacgaataaaagaacaggcctccaaaatttcagaagctgataaatcgaa

SEQ ID NO: 13937 - DNA, 120 bp, Artificial Sequence
  ENSG00000011376_5 (sequence is synthesized)
gccaaaattttacgtgctttccatgttcccttatccttctggtaagctgcacatgggccatgtgcgtgtctacaccatcagcgacaccatagcacggttccagaagatgagagggatgca

SEQ ID NO: 13938 - DNA, 120 bp, Artificial Sequence
  ENSG00000011376_6 (sequence is synthesized)
ggtcatcaaccccatgggatgggatgcttttggattgcctgctgaaaatgccgcagtcgagaggaatctacatccacaaagttggacacaaagtaatattaaacacatgaggaaacagct

SEQ ID NO: 13939 - DNA, 120 bp, Artificial Sequence
  ENSG00000011376_7 (sequence is synthesized)
tgatcgtctgggcctgtgtttcagctgggatagggaaataactacgtgtttgccagattactacaagtggactcagtatctctttattaaactgtatgaggctgggctggcctatcaaaa

SEQ ID NO: 13940 - DNA, 120 bp, Artificial Sequence
  ENSG00000011376_8 (sequence is synthesized)
ggaggccctggttaactgggacccagtggatcaaacagtgcttgccaatgagcaggtggatgaacatggctgttcatggcgttctggagcaaaggtggaacagaagtacctcagacaatg

SEQ ID NO: 13941 - DNA, 120 bp, Artificial Sequence
  ENSG00000011376_9 (sequence is synthesized)
gtttattaagacaaccgcttatgcaaaggccatgcaggacgcgttggcagaccttccagaatggtatggaataaaaggcatgcaagcccactggattggggactgtgtgggctgccacct

SEQ ID NO: 13942 - DNA, 120 bp, Artificial Sequence
  ENSG00000011376_10 (sequence is synthesized)
ggacttcacattaaaggttcatgggcaagccacgggcgaaaagctgactgcctatacggccacccctgaagccatttatggcacctcccacgtggccatctcgcccagccacagactcct

SEQ ID NO: 13943 - DNA, 120 bp, Artificial Sequence
  ENSG00000011376_11 (sequence is synthesized)
acatgggcacagctctctgaaggaagccttgaggatggcccttgtccctggcaaagattgcctcacgcctgtaatggctgtgaacatgcttacccagcaggaggtccctgtcgttatttt

SEQ ID NO: 13944 - DNA, 120 bp, Artificial Sequence
  ENSG00000011376_12 (sequence is synthesized)
ggccaaagctgacttggaaggctctctggattcaaaaataggaattcccagtactagctcagaggacaccatcttagcccaaaccctgggcctggcctactctgaagtcattgaaacttt

SEQ ID NO: 13945 - DNA, 120 bp, Artificial Sequence
  ENSG00000011376_13 (sequence is synthesized)
gccagatggcacagagagactgagcagctctgctgagttcacaggtatgacccggcaggatgcttttctagccctgactcagaaagcccgggggaagagagtgggtggagacgtgacaag

SEQ ID NO: 13946 - DNA, 120 bp, Artificial Sequence
  ENSG00000011376_14 (sequence is synthesized)
tgataaactgaaagactggctgatttcacggcagcggtactggggcacaccaatccccattgtccactgcccagtctgtggccccacacctgtgcccctggaggacttgcctgtgaccct

SEQ ID NO: 13947 - DNA, 120 bp, Artificial Sequence
  ENSG00000011376_15 (sequence is synthesized)
gcccaacatcgcgtctttcactggcaagggaggccccccactggccatggcttcagagtgggtgaactgctcctgcccaaggtgcaagggagcagccaagagagagacagacacgatgga

SEQ ID NO: 13948 - DNA, 120 bp, Artificial Sequence
  ENSG00000011376_16 (sequence is synthesized)
tacctttgttgattctgcttggtactacttcagatacactgaccctcataatccacacagcccttttaacacagcagtggccgattactggatgcctgtggatttgtacattggagggaa

SEQ ID NO: 13949 - DNA, 120 bp, Artificial Sequence
  ENSG00000011376_17 (sequence is synthesized)
aaaaaatggttaaacatagggagccttttcataagctgctggcccaaggccttatcaaggggcagacattccgcctaccatctggacagtatctacagagagaggaagtggatctcacag

SEQ ID NO: 13950 - DNA, 120 bp, Artificial Sequence
  ENSG00000011376_18 (sequence is synthesized)
gttccgttcctgttcatgcaaaaacgaaagagaagttagaggtgacgtgggagaagatgagtaagtccaaacacaacggggtggacccagaggaagttgtggagcagtatgggatcgaca

SEQ ID NO: 13951 - DNA, 120 bp, Artificial Sequence
  ENSG00000011376_19 (sequence is synthesized)
cgattcggctctacatcctttttgctgcccctcctgagaaggatatcttgtgggatgtgaaaactgatgctctccctggggtgctgagatggcaacaacgactgtggaccttgacaactc

SEQ ID NO: 13952 - DNA, 120 bp, Artificial Sequence
  ENSG00000011376_20 (sequence is synthesized)
ggtttattgaggccagggcttctgggaagtctccccagcctcagctgctgagtaacaaggagaaagctgaggccaggaagctctgggagtacaagaactccgtcatctctcaggtgacca

SEQ ID NO: 13953 - DNA, 120 bp, Artificial Sequence
  ENSG00000011376_21 (sequence is synthesized)
cccatttcacagaggacttctcactgaattctgcaatttctcagctgatgggactcagcaatgccctctcgcaagcctctcagagcgtcattctccacagccccgagtttgaggatgctt

SEQ ID NO: 13954 - DNA, 120 bp, Artificial Sequence
  ENSG00000011376_22 (sequence is synthesized)
tgtgtgccctgatggtaatggctgctccactggcccctcatgtaacctcagagatctgggcaggcctggcgctggtgccgaggaagctctgtgcccactacacttgggatgccagtgtgc

SEQ ID NO: 13955 - DNA, 120 bp, Artificial Sequence
  ENSG00000011376_23 (sequence is synthesized)
tgctccaggcatggcctgctgtggacccggagttcctgcagcagcctgaggttgtccagatggcagttctgatcaacaataaagcttgtggcaaaattcctgtgccccaacaagttgccc

SEQ ID NO: 13956 - DNA, 120 bp, Artificial Sequence
  ENSG00000011376_24 (sequence is synthesized)
gggaccaggacaaagtccacgaatttgttcttcaaagcgagctgggtgtcaggcttttgcaaggacgaagcatcaagaagtccttcctttccccgagaactgccctcatcaacttcctgg

SEQ ID NO: 13957 - DNA, 120 bp, Artificial Sequence
  ENSG00000011376_25 (sequence is synthesized)
tgcaagattgacagccaggaggctgcagctaccacgagggcctctgaggaacctccttccaggcctgggatgagggggcgatgtctgctggcccaggggaagggaaaagacaaatgtctt

SEQ ID NO: 13958 - DNA, 120 bp, Artificial Sequence
  ENSG00000011376_26 (sequence is synthesized)
gactgttgacctcggtcctgtggcagactgcagtcaacagtgtgcctctgtagtgtggcctggtgctggggtgaaggtgagctgggcaaaggagaaatatgagctactgaggagggggtt

SEQ ID NO: 13959 - DNA, 120 bp, Artificial Sequence
  ENSG00000011376_27 (sequence is synthesized)
ggacatcctgcccctcaccccccacccacactgcaggtagaggaggccatctgatcccatgggaagccatcagagacactgctggtgggagcaggaaggagcagtgcccctcgagcagcc

SEQ ID NO: 13960 - DNA, 120 bp, Artificial Sequence
  ENSG00000011376_28 (sequence is synthesized)
aggaagcctgcggatctgggaaatggctctgccttaggcacttctcgggaatttgaggccagcctgaggaactgcaggactcaggtgcaatgtgccagccacttggaactgctaactgag

SEQ ID NO: 13961 - DNA, 120 bp, Artificial Sequence
  ENSG00000011376_29 (sequence is synthesized)
cctccagatggtagtgaatggtctctttgccttcaggctggatgaggaagtcatttaggaaatgttcaaataaccaatatgtggaaatggacacagggatcttctgaagttgctttgaat

SEQ ID NO: 13962 - DNA, 120 bp, Artificial Sequence
  ENSG00000011376_30 (sequence is synthesized)
caaaaggcaggcagtgctggttcctctgcctgtgtccccaccactccccagctctgtcatgcaggcctgtcctccccaaccccagctggatgtgcctcccaggcctgctgtggttctgac

SEQ ID NO: 13963 - DNA, 120 bp, Artificial Sequence
  ENSG00000011376_31 (sequence is synthesized)
acacaggatcccaggcaaggcaccacttcctcacatgaatgaggagcagcaagtcataaccactcccttgggtatacaatttgctgtgtagtgaagtggaaccaggctcaggctgctggt

SEQ ID NO: 13964 - DNA, 120 bp, Artificial Sequence
  ENSG00000011376_32 (sequence is synthesized)
cccaacctcagagccccaccgcagcccagtagggatgcagcacgccccagagggctcatgtgggccccagatggcaatgccaccattgttgatgtgactccagagccagttattaggaag

SEQ ID NO: 13965 - DNA, 120 bp, Artificial Sequence
  ENSG00000011376_33 (sequence is synthesized)
agcaagctcaccacagaggagtggaactgaggccccccagatgttgcctccggtgtccaagccacagcggtctggctgttgggaagatggccaggaatggactcataccattggcacatt

SEQ ID NO: 13966 - DNA, 120 bp, Artificial Sequence
  ENSG00000011376_34 (sequence is synthesized)
gctgttttgacaacatggcggcgcccatggtccgtggcccggcagtgctcgcctaaaggtggagaacgaggagtagaggagccgcaggccagagcctgtgagcagatccagacctacaga

SEQ ID NO: 13967 - DNA, 120 bp, Artificial Sequence
  ENSG00000011376_35 (sequence is synthesized)
gtaggggagaatctagccattttataatgccagaaatctatatatgttatctgatgccatttttctgaagtagcctcacatgtggtccccctgcagttcagcagttaacagatgactttt

SEQ ID NO: 13968 - DNA, 120 bp, Artificial Sequence
  ENSG00000011376_36 (sequence is synthesized)
ttagtgtaataaaatgtttatcatctatgacttcaggacatatgtgtgatcctggaatacaccatattccaatttcagagttaattacaaacagattgaggtattccatcatcatcggaa

SEQ ID NO: 13969 - DNA, 120 bp, Artificial Sequence
  ENSG00000011376_37 (sequence is synthesized)
gcattggctgtgtgtctgactccacatggaatgctataaagtgggatacatgtggttcttcttgttccagaacttacagtccatggtagacaacactgatacaggcaaactagcaacagc

SEQ ID NO: 13970 - DNA, 120 bp, Artificial Sequence
  ENSG00000011376_38 (sequence is synthesized)
aattaagtcactggttctcagacttaatactctgcctggtcctcatgcccagatattccaatttaattggtccatggtgtggcttgaacaccaggaatctttaaaactccacaagtgatt

SEQ ID NO: 13971 - DNA, 120 bp, Artificial Sequence
  ENSG00000011376_39 (sequence is synthesized)
ctaatgggcagcaaagtttgagaatcactggacacattgatgcacttgagccatcatttctatctagttcttcctcttcctaatcttcaggttagcggggataagtttggtccaggacca

SEQ ID NO: 13972 - DNA, 120 bp, Artificial Sequence
  ENSG00000011376_40 (sequence is synthesized)
agagttggaccaaaagggaagacaggggccagaagtctagagtgctagagccgacttgaatgtactcagtctcattgcacatggcagtgaatatggattaaatataagcccatgaaaata

SEQ ID NO: 13973 - DNA, 120 bp, Artificial Sequence
  ENSG00000011376_41 (sequence is synthesized)
gctatcgataaagttgctgttttgacaacatggcggcgcccatggtccgtggcccggcagtgctcgcctaaaggtggagaacgaggagtagaggagccgcaggccagagcctgtgagcag

SEQ ID NO: 13974 - DNA, 120 bp, Artificial Sequence
  ENSG00000011376_42 (sequence is synthesized)
aagatgagggaagggagccctttatttgcatgtgatctgaccagagcaatgggccagtaaagcctcaaggctgctagactgaccagctggctgacaccagcatggctctgaagaaattgc

SEQ ID NO: 13975 - DNA, 120 bp, Artificial Sequence
  ENSG00000011376_43 (sequence is synthesized)
gacccctgggagtgaggtggtggggaataatctcagccatttattgactgtcttgttgaggtcagaaactggactcagcaggttcacaataattatcttatttaattcccacaaaaactc

SEQ ID NO: 13976 - DNA, 120 bp, Artificial Sequence
  ENSG00000011376_44 (sequence is synthesized)
tagagggaaggaattattctctcataaaagaagaaacccaggctctgaggttcaataattgtctcagttttcacagctaataagtaggagaactgggatccaagcccacatcttctgtcc

SEQ ID NO: 13977 - DNA, 120 bp, Artificial Sequence
  ENSG00000011376_45 (sequence is synthesized)
tccacgtttgcctccccgccatgtctaccagtcccctcacctaattgtccatgttacttggtgtacacagtcaggtgagatggctcccaaaaccactggcattttgagcagagtgtggct

SEQ ID NO: 13978 - DNA, 120 bp, Artificial Sequence
  ENSG00000011376_46 (sequence is synthesized)
ggggtttccctcctggaaagcctgtaaacctgggaaatcacagaggtggtgtcctctctgcaggggcagtggtgggtgagaggccaagagcatgtggttagttccagagagctgggaaag

SEQ ID NO: 13979 - DNA, 120 bp, Artificial Sequence
  ENSG00000011376_47 (sequence is synthesized)
gtcatccagcaagtggaagacgtagactcgtgggcgggtatcagggttatttctattggggcaataagagaacagagtttgtgcccagggaaagtggtgctccatggcaaatgctaccac

SEQ ID NO: 13980 - DNA, 120 bp, Artificial Sequence
  ENSG00000011376_48 (sequence is synthesized)
aataggagccagctgtctgcctaagaaaattgatctctaagaccctaaaacaattagtaagctgggaaacagcacaggcatatttcatcccagcctaaatgcacaccttcaggggattgg

SEQ ID NO: 13981 - DNA, 120 bp, Artificial Sequence
  ENSG00000011376_49 (sequence is synthesized)
ctaagaaaagcagggtacatccagtcaatggaaggcgaggcagccagcaacagatggtttttcaaaaacatgtagcttggaaattttctcatgaatgaaggaagatacatgcacaatgca

SEQ ID NO: 13982 - DNA, 120 bp, Artificial Sequence
  ENSG00000011376_50 (sequence is synthesized)
atcctgaccattttttttcaacgcttacaaagaaaattgagagcaggaaatttgcttgcatatcataggctgagactcctacaagtcatttttttccttctgtctacttttttgcatttt

SEQ ID NO: 13983 - DNA, 120 bp, Artificial Sequence
  ENSG00000011376_51 (sequence is synthesized)
ctcatttttattggccatgaagtatttcagtaatacttcatgaggcaaaacatcaaaatgtacaattttgtgaagctctaaatgagctaaaaacctgtttcccttgatttttcttttctt

SEQ ID NO: 13984 - DNA, 120 bp, Artificial Sequence
  ENSG00000011376_52 (sequence is synthesized)
ctcccaggcaggatatctagctgcctgtgaggatgtatcctagctaggaaaacatgctcctttccttgtatgaagtggaatccaaagaaacaaaaagcagcccccatgaagttcctgctc

SEQ ID NO: 13985 - DNA, 120 bp, Artificial Sequence
  ENSG00000011376_53 (sequence is synthesized)
acggagttgctcagtctgggcaggtgtggggagctccctttcttgtatctcagtcttaggctcttgcaaccttgcaacagaagaacggaaggcaacgttcccctaatggaactctcctgc

SEQ ID NO: 13986 - DNA, 120 bp, Artificial Sequence
  ENSG00000011376_54 (sequence is synthesized)
tcacttgctgtcagattcaaggttgtggataagaccgaaaaaggaggcattatcacctccttttgcagataacgaaacttgagaccatgacagtaagtgatgatgtatcttgacccccaa

SEQ ID NO: 13987 - DNA, 120 bp, Artificial Sequence
  ENSG00000011376_55 (sequence is synthesized)
gtgatgatgtatcttgacccccaatctgtgctcattccacttagagcaccccctccccgtactaccatcaggcaaagtgtagtgcaggaggtaaactttctttctttctttttttttttt

SEQ ID NO: 13988 - DNA, 83 bp, Artificial Sequence
  ENSG00000011376_56 (sequence is synthesized)
gtgccttagccacctgagtagttgggattacaggcatggaccaccacacccagctaatttaggaggtaaactttcttaactgg

SEQ ID NO: 13989 - DNA, 120 bp, Artificial Sequence
  ENSG00000011376_57 (sequence is synthesized)
ccacacccagctaatttaggaggtaaactttcttaactggcgggcccagctggactgtataagtcaaggaaaggcagaggggtagataaaaaggagagttttccctcgtctttcttcctg

SEQ ID NO: 13990 - DNA, 120 bp, Artificial Sequence
  ENSG00000011376_58 (sequence is synthesized)
tgagaagagcaagcagaaaacagctgtttcgtgggctgggtccctgcctgacactcagagcgtgggtggctaaaggctctcatccaagctgatgagcttggagaaaggaatctagggtga

SEQ ID NO: 13991 - DNA, 120 bp, Artificial Sequence
  ENSG00000011376_59 (sequence is synthesized)
ccaacaacgagcaagtagggaaatcccccgagggcgggtgggtggttggtgatggtgctggtagggaggggagagcctggagcagccagggaaaggccagtcctgtaggcagaggcctca

SEQ ID NO: 13992 - DNA, 120 bp, Artificial Sequence
  ENSG00000011376_60 (sequence is synthesized)
gatccaagggtgggcccaatgacctcactccaggcctccagtgccctccctcagcctgtccacatgaggggctggaggcagctgtgcagagataatgaggccctggaggggaggtggtga

SEQ ID NO: 13993 - DNA, 120 bp, Artificial Sequence
  ENSG00000011376_61 (sequence is synthesized)
ccaggactgctggaacccaatgccccatgactcatctccctgtgccttaagccctgaacttgaatttcagttcttattcagcctctggaagagcacacctaagacagacaccctgtatac

SEQ ID NO: 13994 - DNA, 120 bp, Artificial Sequence
  ENSG00000011376_62 (sequence is synthesized)
aggggccatgggctgcaatctcccgacattacaacaataatatctatcatttctgaggactaattatgggccaggccctgttctaagtgctttgccacataaggagccttgcccaagacc

SEQ ID NO: 13995 - DNA, 120 bp, Artificial Sequence
  ENSG00000011376_63 (sequence is synthesized)
acacacaagaaggtggcagagccgtgatcccactctgctccacctcgctggttcccaaagacctttatgcaaaccagcccttgaacctcctgaattttcccagatggtccttatttatag

SEQ ID NO: 13996 - DNA, 120 bp, Artificial Sequence
  ENSG00000011376_64 (sequence is synthesized)
ctttctctccagttgttccccaaatgccctagagcctgccaaaaccacacttcctcatgtgtatctgtgaacgttggctcgctgtgggcacacacctggttgaatgcatccctgaagttc

SEQ ID NO: 13997 - DNA, 120 bp, Artificial Sequence
  ENSG00000011376_65 (sequence is synthesized)
tgaggcacccaattcagcatgtggggtcggctctctctcagcctgggactgacggctcccagggagccatcacccctggcagacagagcctcctttggacaccatccctgggacctagaa

SEQ ID NO: 13998 - DNA, 120 bp, Artificial Sequence
  ENSG00000011376_66 (sequence is synthesized)
gccaggaagccatccttgctcaactccacctactgtgaggaaaatcccatggcagaggggagaggggagacctgttctagacctccccgatgataagcactccttggcatctcagcagcc

SEQ ID NO: 13999 - DNA, 120 bp, Artificial Sequence
  ENSG00000011376_67 (sequence is synthesized)
ccatctgtgtcttccgcagatcatcttttccacaaacaatagaagagccccatctgggattaattgaggagggttcagccctggtcccatccaagggaggcctcacctaccacatctgct

SEQ ID NO: 14000 - DNA, 120 bp, Artificial Sequence
  ENSG00000011376_68 (sequence is synthesized)
gctgcatactcatggctgccttcagaactcagaggagaactagatcttaggggaggggttccccttcctcaggcactgtcgcgggggtgtagaaaggaataatgtgtcctttacactgtg

SEQ ID NO: 14001 - DNA, 120 bp, Artificial Sequence
  ENSG00000011376_69 (sequence is synthesized)
agatccatagaggaagcaggcacccaaagattgatgccattcattgggtctggtttgtcaatcatcaaggccagactgggccagaggggctttgtcaggtggactcagagagagactcac

SEQ ID NO: 14002 - DNA, 120 bp, Artificial Sequence
  ENSG00000011376_70 (sequence is synthesized)
ttgtcagtgcacaagagggcagccactgcacagacataggctgagagctgcgaagagggaacctaaagcaagtgtcgccagatatccccattattagttatcagctaactcttagttttc

SEQ ID NO: 14003 - DNA, 120 bp, Artificial Sequence
  ENSG00000011376_71 (sequence is synthesized)
agttaacatcatagtttccaggaaatattttagttttctattaatattttaattaactactagcatcagagtcatcagcaaatatctaagtcatcagtaaacatcttaggtgtcagtttc

SEQ ID NO: 14004 - DNA, 120 bp, Artificial Sequence
  ENSG00000011376_72 (sequence is synthesized)
ctctgagtgaatgtagtagacctcttagtcatcatttacttcattattaccagttatgcactaataattagtggtctgctaatatctcgtctaccaatcatcttcagcaataaacatgct

SEQ ID NO: 14005 - DNA, 120 bp, Artificial Sequence
  ENSG00000011376_73 (sequence is synthesized)
ttaattatcagctgataattaatgtagccataacaaataaacccccaaatgtcagtggtctgacccagcaaactttatttctctttcccatgagtctaatcctctagagaagggaacagg

SEQ ID NO: 14006 - DNA, 120 bp, Artificial Sequence
  ENSG00000011376_74 (sequence is synthesized)
ggaggaggttctgttccgttcagttccagcttgacggagggttcgtgcagactacacagtcttcagctcttggctttcatggttgcccctgacatcaaatccagcccgcagataaggggg

SEQ ID NO: 14007 - DNA, 120 bp, Artificial Sequence
  ENSG00000011376_75 (sequence is synthesized)
agagaggtggagtgtcacagtggctttggccaggtctggaaacagtgtacatcacttctgcccacttcctcttggccagaattcagtcacgtgcctcagccaattgctaggggctgggta

SEQ ID NO: 14008 - DNA, 120 bp, Artificial Sequence
  ENSG00000011376_76 (sequence is synthesized)
gccacttcccagcagcaactctgcaggagggaaggggggcctgatcttggagggcagctggctgcctctgccacatggacaatctttgttttcgaattgttgcttgtcagtgtacaccta

SEQ ID NO: 14009 - DNA, 120 bp, Artificial Sequence
  ENSG00000011376_77 (sequence is synthesized)
agttaccttctaagtatctcaggtgtctgctaaccaccttgttttgcagctactcctgagtcacagctgtttggcttctaaatctgtgacagctgctgtgagtctaaaatagcagagcaa

SEQ ID NO: 14010 - DNA, 120 bp, Artificial Sequence
  ENSG00000011376_78 (sequence is synthesized)
tcacagactcttgttgcctgccaaactgggatggtgcctgccccttgctcgagactttgcatggagatgtgtgaagtcacggacgtgctttgtgccattttataaaataccgggtttact

SEQ ID NO: 14011 - DNA, 120 bp, Artificial Sequence
  ENSG00000011376_79 (sequence is synthesized)
ccgagggtttgtttattggtccccaattctccccaccttccttcttctgtgaggctaacacattggtttgtgagacagtttggagtattttgttttagggggtgtcaggacattttgaaa

SEQ ID NO: 14012 - DNA, 120 bp, Artificial Sequence
  ENSG00000011376_80 (sequence is synthesized)
ggtagagaaagtcaggcttcccagatgccctgcaggaaacctgggaaattctccagattcctgctcctaaaaggtcatggctgctcattcagggtggaaatgtgacacttccccagaagc

SEQ ID NO: 14013 - DNA, 120 bp, Artificial Sequence
  ENSG00000011376_81 (sequence is synthesized)
ctcactgtgctctggtctaggagactcacacctcaccccaacacacacacacaccccaccccaccccccccacacactacatacaccatacaccacctacaccacaccacacacatgcac

SEQ ID NO: 14014 - DNA, 120 bp, Artificial Sequence
  ENSG00000011376_82 (sequence is synthesized)
acgtatacaccacataccacacattcatacacaccacacagctgagggcctgctttgggggaaggtaatttatttttgcctgacagaagaacgtgcctcacaccatgtggctgtggaggt

SEQ ID NO: 14015 - DNA, 120 bp, Artificial Sequence
  ENSG00000011376_83 (sequence is synthesized)
ggagagggcaacgtagtcttgagagttcatcagagtcacagctgttagggaagtgcctgggcctggggccaaggtggacagtgaaacaggaaggctgcccccatttccacatgtgctcac

SEQ ID NO: 14016 - DNA, 120 bp, Artificial Sequence
  ENSG00000011376_84 (sequence is synthesized)
atggggctcccccacctgaggcctccaactacaggtgcacccctcccctgacagcacccacctctggtgggagtcttctgtatgattaataaaaagcgtagtaataataatcatatgtaa

SEQ ID NO: 14017 - DNA, 120 bp, Artificial Sequence
  ENSG00000011376_85 (sequence is synthesized)
taaaacctgaattgaactgatatttatctcactaaaaatgagtattcatatattttactgtaagaatagtaaaattaccaagtaatatcccagacctagttagataaatgcactattttc

SEQ ID NO: 14018 - DNA, 120 bp, Artificial Sequence
  ENSG00000011376_86 (sequence is synthesized)
atgatgtagataaatatcaccacttctactaccattgtctattactgaacacttaccatgggccaggtacagagtaggtatgaccttattatctctttggatccctagagagctctaaaa

SEQ ID NO: 14019 - DNA, 120 bp, Artificial Sequence
  ENSG00000011376_87 (sequence is synthesized)
ggcaggtacttttattgacgtcattttattgctggtcacccaagtggcaaggctgggctgatccattggtcaagttatgactgccgtgctcctcccccaaacttaaggcagaaatctcag

SEQ ID NO: 14020 - DNA, 120 bp, Artificial Sequence
  ENSG00000011376_88 (sequence is synthesized)
tgcagatgatcctggacttacaagggggttatcctaaattgaataagactgtcctaaattgaaaatattgtaggcatataatacatctaaccatcatagcttcacctaaactaccttaaa

SEQ ID NO: 14021 - DNA, 120 bp, Artificial Sequence
  ENSG00000011376_89 (sequence is synthesized)
tgtgctcaggacacttacattaacgtacagttgggcaaaatcatctgacaacacagtctcttgcagagtatcggttgtttaccctcatgactgtgtggctaactgggagccgaggctcag

SEQ ID NO: 14022 - DNA, 120 bp, Artificial Sequence
  ENSG00000011376_90 (sequence is synthesized)
ttttgctgcccagcatctcaagagtatcatactgctttctactgaatgcatatctctttcacatcattgtaccactgtaaagtcgaaaaattgttaaggcaagccgtcataagttgggaa

SEQ ID NO: 14023 - DNA, 120 bp, Artificial Sequence
  ENSG00000011376_91 (sequence is synthesized)
ccatctatacacatattttattatttccttaaaatgaattctcaaaaaatcaagaacaaattttggtatttattgccaaattaccctccataaaggctatacaaatttcctttctcaagt

SEQ ID NO: 14024 - DNA, 120 bp, Artificial Sequence
  ENSG00000011376_92 (sequence is synthesized)
tatacagttattttcatttgtatttcctttattattagtgattgtgaggttttttcatgtgtttaatgaatgtttgaatttgaacagggtatgtatgtgaatggtctaatcatgtgtttt

SEQ ID NO: 14025 - DNA, 120 bp, Artificial Sequence
  ENSG00000011376_93 (sequence is synthesized)
cccatatagataggaggtgtttgtcctttttttaatggtttttgttacaaataattttcctcagtctgtcatttgccttgcattttgtttatagttgaatattattagcatacagatatg

SEQ ID NO: 14026 - DNA, 120 bp, Artificial Sequence
  ENSG00000011376_94 (sequence is synthesized)
ttatccatccatctttacagctctgcgtgccatttgtgaaaaacaaaagctacccaacaacctgggattataaaccaggccaaagtggtgagcacccagcagccatggtctggcttccca

SEQ ID NO: 14027 - DNA, 120 bp, Artificial Sequence
  ENSG00000011376_95 (sequence is synthesized)
ccggctcctcacacagctccaagccaggctgtgttgggatggaagctttggtcctgctctcataagcctccctgttcttagagtgaccccacgcttctgtgcctcggcattgcaggcctg

SEQ ID NO: 14028 - DNA, 120 bp, Artificial Sequence
  ENSG00000011376_96 (sequence is synthesized)
ttattgaggccagggcttctgggaagtctccccagcctcagctgctgagtaacaaggagaaagctgaggccaggaagctctgggagtacaagaactccgtcatctctcaggctggagtgc

SEQ ID NO: 14029 - DNA, 120 bp, Artificial Sequence
  ENSG00000011376_97 (sequence is synthesized)
catcctgtacaactgccatacggaggttttggaaatcttcccgctgcagctgggtcacaggacaagccacacaggaccagctcactaaaagaagtgatgatctctcttctgtgacctccg

SEQ ID NO: 14030 - DNA, 120 bp, Artificial Sequence
  ENSG00000011376_98 (sequence is synthesized)
gtcatttttgccatgatcaaaaaatggttaaacataggcctgggttccaagtccagcagggcccttgatgtcctttgtccttcattcctgtgcaccttgcgcctccaaatcacatttggg

SEQ ID NO: 14031 - DNA, 120 bp, Artificial Sequence
  ENSG00000011405_0 (sequence is synthesized)
atggctcagatatctagcaacagcggatttaaagaatgtccatcttcacatccggaaccaacaagagcaaaagatgtggacaaagaagaagcattacagatggaagcagaggctttagca

SEQ ID NO: 14032 - DNA, 120 bp, Artificial Sequence
  ENSG00000011405_1 (sequence is synthesized)
aaactgcaaaaggatagacaagtgactgacaatcagagaggctttgagttgtcaagcagcaccagaaaaaaagcacaggtttataacaagcaggattatgatctcatggtgtttcctgaa

SEQ ID NO: 14033 - DNA, 120 bp, Artificial Sequence
  ENSG00000011405_2 (sequence is synthesized)
tcagattcccaaaaaagagcattagatattgatgtagaaaagctcacccaagctgaacttgagaaactattgctggatgacagtttcgagactaaaaaaacacctgtattaccagttact

SEQ ID NO: 14034 - DNA, 120 bp, Artificial Sequence
  ENSG00000011405_3 (sequence is synthesized)
cctattctgagcccttccttttcagcacagctctattttagacctactattcagagaggacagtggccacctggattacctgggccttccacttatgctttaccttctatttatccttct

SEQ ID NO: 14035 - DNA, 120 bp, Artificial Sequence
  ENSG00000011405_4 (sequence is synthesized)
acttacagtaaacaggctgcattccaaaatggcttcaatccaagaatgcccacttttccatctacagaacctatatatttaagtcttccgggacaatctccatatttctcatatcctttg

SEQ ID NO: 14036 - DNA, 120 bp, Artificial Sequence
  ENSG00000011405_5 (sequence is synthesized)
acacctgccacaccctttcatccacaaggaagcttacctatctatcgtccagtagtcagtactgacatggcaaaactatttgacaaaatagctagtacatcagaatttttaaaaaatggg

SEQ ID NO: 14037 - DNA, 120 bp, Artificial Sequence
  ENSG00000011405_6 (sequence is synthesized)
aaagcaaggactgatttggagataacagattcaaaagtcagcaatctacaggtatctccaaagtctgaggatatcagtaaatttgactggttagacttggatcctctaagtaagcctaag

SEQ ID NO: 14038 - DNA, 120 bp, Artificial Sequence
  ENSG00000011405_7 (sequence is synthesized)
gtggataatgtggaggtattagaccatgaggaagagaaaaatgtttcaagtttgctagcaaaggatccttgggatgctgttcttcttgaagagagatcgacagcaaattgtcatcttgaa

SEQ ID NO: 14039 - DNA, 120 bp, Artificial Sequence
  ENSG00000011405_8 (sequence is synthesized)
agaaaggtgaatggaaaatccctttctgtggcaactgttacaagaagccagtctttaaatattcgaacaactcagcttgcaaaagcccagggccatatatctcagaaagacccaaatggg

SEQ ID NO: 14040 - DNA, 120 bp, Artificial Sequence
  ENSG00000011405_9 (sequence is synthesized)
accagtagtttgccaactggaagttctcttcttcaagaagttgaagtacagaatgaggagatggcagctttttgtcgatccattacaaaattgaagaccaaatttccatataccaatcac

SEQ ID NO: 14041 - DNA, 120 bp, Artificial Sequence
  ENSG00000011405_10 (sequence is synthesized)
cgcacaaacccaggctatttgttaagtccagtcacagcacaaagaaacatatgcggagaaaatgctagtgtgaaggtctccattgacattgaaggatttcagctaccagttacttttacg

SEQ ID NO: 14042 - DNA, 120 bp, Artificial Sequence
  ENSG00000011405_11 (sequence is synthesized)
tgtgatgtgagttctactgtagaaatcattataatgcaagccctttgctgggtacatgatgacttgaatcaagtagatgttggcagctatgttctaaaagtttgtggtcaagaggaagtg

SEQ ID NO: 14043 - DNA, 120 bp, Artificial Sequence
  ENSG00000011405_12 (sequence is synthesized)
ctgcagaataatcattgccttggaagtcatgagcatattcaaaactgtcgaaaatgggacacagaaattagactacaactcttgaccttcagtgcaatgtgtcaaaatctggcccgaaca

SEQ ID NO: 14044 - DNA, 120 bp, Artificial Sequence
  ENSG00000011405_13 (sequence is synthesized)
gcagaagatgatgaaacacccgtggatttaaacaaacacctgtatcaaatagaaaaaccttgcaaagaagccatgacgagacaccctgttgaagaactcttagattcttatcacaaccaa

SEQ ID NO: 14045 - DNA, 120 bp, Artificial Sequence
  ENSG00000011405_14 (sequence is synthesized)
gtagaactggctcttcaaattgaaaaccaacaccgagcagtagatcaagtaattaaagctgtaagaaaaatctgtagtgctttagatggtgtcgagactcttgccattacagaatcagta

SEQ ID NO: 14046 - DNA, 120 bp, Artificial Sequence
  ENSG00000011405_15 (sequence is synthesized)
aagaagctaaagagagcagttaatcttccaaggagtaaaactgctgatgtgacttctttgtttggaggagaagacactagcaggagttcaactaggggctcacttaatcctgaaaatcct

SEQ ID NO: 14047 - DNA, 120 bp, Artificial Sequence
  ENSG00000011405_16 (sequence is synthesized)
gttcaagtaagcataaaccaattaactgcagcaatttatgatcttctcagactccatgcaaattctggtaggagtcctacagactgtgcccaaagtagcaagagtgtcaaggaagcatgg

SEQ ID NO: 14048 - DNA, 120 bp, Artificial Sequence
  ENSG00000011405_17 (sequence is synthesized)
actacaacagagcagctccagtttactatttttgctgctcatggaatttcaagtaattgggtatcaaattatgaaaaatactacttgatatgttcactgtctcacaatggaaaggatctt

SEQ ID NO: 14049 - DNA, 120 bp, Artificial Sequence
  ENSG00000011405_18 (sequence is synthesized)
tttaaacctattcaatcaaagaaggttggcacttacaagaatttcttctatcttattaaatgggatgaactaatcatttttcctatccagatatcacaattgccattagaatcagttctt

SEQ ID NO: 14050 - DNA, 120 bp, Artificial Sequence
  ENSG00000011405_19 (sequence is synthesized)
caccttactctttttggaattttaaatcagagcagtggaagttcccctgattctaataagcagagaaagggaccagaagctttgggcaaagtttctttacctctttttgactttaaacgg

SEQ ID NO: 14051 - DNA, 120 bp, Artificial Sequence
  ENSG00000011405_20 (sequence is synthesized)
tttttaacatgtggaactaaacttctatatctttggacttcatcacatacaaattctgttcctggaacagttaccaaaaaaggatatgtcatggaaagaatagtgctacaggttgatttt

SEQ ID NO: 14052 - DNA, 120 bp, Artificial Sequence
  ENSG00000011405_21 (sequence is synthesized)
ccttctcctgcatttgatattatttatacaactcctcaagttgacagaagcattatacagcaacataacttagaaacactagagaatgatataaaagggaaacttcttgatattcttcat

SEQ ID NO: 14053 - DNA, 120 bp, Artificial Sequence
  ENSG00000011405_22 (sequence is synthesized)
aaagactcatcacttggactttctaaagaagataaagcttttttatgggagaaacgttattattgcttcaaacacccaaattgtcttcctaaaatattagcaagcgccccaaactggaaa

SEQ ID NO: 14054 - DNA, 120 bp, Artificial Sequence
  ENSG00000011405_23 (sequence is synthesized)
tgggttaatcttgccaaaacttactcattgcttcaccagtggcctgcattgtacccactaattgcattggaacttcttgattcaaaatttgctgatcaggaagtaagatccctagctgtg

SEQ ID NO: 14055 - DNA, 120 bp, Artificial Sequence
  ENSG00000011405_24 (sequence is synthesized)
acctggattgaggccattagtgatgatgagctaacagatcttcttccacagtttgtacaagctttgaaatatgaaatttacttgaatagttcattagtgcaattccttttgtccagggca

SEQ ID NO: 14056 - DNA, 120 bp, Artificial Sequence
  ENSG00000011405_25 (sequence is synthesized)
ttgggaaatatccagatagcacacaatttatattggcttctcaaagatgccctgcatgatgtacagtttagtacccgatacgaacatgttttgggtgctctcctgtcagtaggaggaaaa

SEQ ID NO: 14057 - DNA, 120 bp, Artificial Sequence
  ENSG00000011405_26 (sequence is synthesized)
cgacttagagaagaacttctaaaacagacgaaacttgtacagcttttaggaggagtagcagaaaaagtaaggcaggctagtggatcagccagacaggttgttctccaaagaagtatggaa

SEQ ID NO: 14058 - DNA, 120 bp, Artificial Sequence
  ENSG00000011405_27 (sequence is synthesized)
cgagtacagtccttttttcagaaaaataaatgccgtctccctctcaagccaagtctagtggcaaaagaattaaatattaagtcgtgttccttcttcagttctaatgctgtccccctaaaa

SEQ ID NO: 14059 - DNA, 120 bp, Artificial Sequence
  ENSG00000011405_28 (sequence is synthesized)
gtcacaatggtgaatgctgaccctatgggagaagaaattaatgtcatgtttaaggttggtgaagatcttcggcaagatatgttagctttacagatgataaagattatggataagatctgg

SEQ ID NO: 14060 - DNA, 120 bp, Artificial Sequence
  ENSG00000011405_29 (sequence is synthesized)
cttaaagaaggactagatctgaggatggtaattttcaaatgtctctcaactggcagagatcgaggcatggtggagctggttcctgcttccgataccctcaggaaaatccaagtggaatat

SEQ ID NO: 14061 - DNA, 120 bp, Artificial Sequence
  ENSG00000011405_30 (sequence is synthesized)
ggtgtgacaggatcctttaaagataaaccacttgcagagtggctaaggaaatacaatccctctgaagaagaatatgaaaaggcttcagagaactttatctattcctgtgctggatgctgt

SEQ ID NO: 14062 - DNA, 120 bp, Artificial Sequence
  ENSG00000011405_31 (sequence is synthesized)
gtagccacctatgttttaggcatctgtgatcgacacaatgacaatataatgcttcgaagcacgggacacatgtttcacattgactttggaaagtttttgggacatgcacagatgtttggc

SEQ ID NO: 14063 - DNA, 120 bp, Artificial Sequence
  ENSG00000011405_32 (sequence is synthesized)
agcttcaaaagggatcgggctccttttgtgctgacctctgatatggcatatgtcattaatgggggtgaaaagcccaccattcgttttcagttgtttgtggacctctgctgtcaggcctac

SEQ ID NO: 14064 - DNA, 120 bp, Artificial Sequence
  ENSG00000011405_33 (sequence is synthesized)
aacttgataagaaagcagacaaacctttttcttaacctcctttcactgatgattccttcagggttaccagaacttacaagtattcaagatttgaaatacgttagagatgcacttcaaccc

SEQ ID NO: 14065 - DNA, 120 bp, Artificial Sequence
  ENSG00000011405_34 (sequence is synthesized)
ccacaaagtttaacttcttcattcacaaccttgctcagcttcgtttttctggtcttccttctaatgatgagcccatcctttcattttcacctaaaacatactcctttagacaagatggtc

SEQ ID NO: 14066 - DNA, 120 bp, Artificial Sequence
  ENSG00000011405_35 (sequence is synthesized)
gaatcaaggaagtctctgtttttacatatcataagaaatacaacccagataaacattatatttatgtagtccgaattttgagggaaggacagattgaaccatcatttgtcttccgaacat

SEQ ID NO: 14067 - DNA, 120 bp, Artificial Sequence
  ENSG00000011405_36 (sequence is synthesized)
ttgacgaatttcaggaacttcacaataagctcagtattatttttccactttggaagttaccaggctttcctaataggatggttctaggaagaacacacataaaagatgtagcagccaaaa

SEQ ID NO: 14068 - DNA, 120 bp, Artificial Sequence
  ENSG00000011405_37 (sequence is synthesized)
ggaaaattgagttaaacagttacttacagagtttgatgaatgcttcaacggatgtagcagagtgtgatcttgtttgtactttcttccaccctttacttcgtgatgagaaagctgaaggga

SEQ ID NO: 14069 - DNA, 120 bp, Artificial Sequence
  ENSG00000011405_38 (sequence is synthesized)
tagctaggtctgcagatgcaggttccttcagtcctactccaggccaaataggaggagctgtgaaattatccatctcttaccgaaatggtactcttttcatcatggtgatgcatatcaaag

SEQ ID NO: 14070 - DNA, 120 bp, Artificial Sequence
  ENSG00000011405_39 (sequence is synthesized)
atcttgttactgaagatggagctgacccaaatccatatgtcaaaacatacctacttccagataaccacaaaacatccaaacgtaaaaccaaaatttcacgaaaaacgaggaatccgacat

SEQ ID NO: 14071 - DNA, 120 bp, Artificial Sequence
  ENSG00000011405_40 (sequence is synthesized)
tcaatgaaatgcttgtatacagtggatatagcaaagaaaccctaagacagcgagaacttcaactaagtgtactcagtgcagaatctctgcgggagaattttttcttgggtggagtaaccc

SEQ ID NO: 14072 - DNA, 120 bp, Artificial Sequence
  ENSG00000011405_41 (sequence is synthesized)
tgcctttgaaagatttcaacttgagcaaagagacggttaaatggtatcagctgactgcggcaacatacttgtaaactagtgaatgtttgagctttggaagcatgaacagttataaacgtg

SEQ ID NO: 14073 - DNA, 120 bp, Artificial Sequence
  ENSG00000011405_42 (sequence is synthesized)
catgcatacatgcacacacacacagacacacacacacacacttgttaattttgtatagtatttttatacttggacagaacttataaagttaaatatacttgctgcatttcaacacatctg

SEQ ID NO: 14074 - DNA, 120 bp, Artificial Sequence
  ENSG00000011405_43 (sequence is synthesized)
ttggaccaacagtcacataactaacctttttgaatttttggaagccattgctgttttaaagtcattatgtagaatgctacaaaccctaaacttaatatatactaattcctgaaaaagact

SEQ ID NO: 14075 - DNA, 120 bp, Artificial Sequence
  ENSG00000011405_44 (sequence is synthesized)
ttgagacagtactatgtcagttcagccacctattttgcattgttttctataaggaggcaaagcatatgtgttttcctgttatgcaccttttatagcctttaccactgtgtaatgttcaca

SEQ ID NO: 14076 - DNA, 120 bp, Artificial Sequence
  ENSG00000011405_45 (sequence is synthesized)
aacaccaaagtaaaggaaaaatgcaggatgttaccgtaaaatccagctgctattcatggagctgaaaaacaaagcacaaataatagatagctaagttaagaactactaagtagtttatag

SEQ ID NO: 14077 - DNA, 120 bp, Artificial Sequence
  ENSG00000011405_46 (sequence is synthesized)
aagtagggaaaaacgtaatactgctttttattcatgtctttaaagcctttttcagaataagtgccaatcactgatgttgtaaataatggtgccttaactttatatgcttccctggcactt

SEQ ID NO: 14078 - DNA, 120 bp, Artificial Sequence
  ENSG00000011405_47 (sequence is synthesized)
cgtttctgatttttttcctgatttgataaataattagtacatagttttcactcacttgcagcttactaaagacaagaaattatgtacatgtactaatgtttttcccacaaaaaaatcctt

SEQ ID NO: 14079 - DNA, 120 bp, Artificial Sequence
  ENSG00000011405_48 (sequence is synthesized)
tacttctgatgtatgaattagttatctaaatagttaagcctaatacctgaataagactcaccaatgtgattgtacaataaattctatcattccattaaaatcctacatttattcccagga

SEQ ID NO: 14080 - DNA, 120 bp, Artificial Sequence
  ENSG00000011405_49 (sequence is synthesized)
atggtaatttcacctccctacatctatactccactccctcagtaaataagtgaaaattgttaacccatgtgcccattcctgagtagggcagactcttcacaagaggcccatgacaagaat

SEQ ID NO: 14081 - DNA, 120 bp, Artificial Sequence
  ENSG00000011405_50 (sequence is synthesized)
tctagggtccagattgaactttaatatagacctttgtctgtgtagaccagtttgtcttgtaaactgtcttacttatgtgtgtaaacattttacattcacatgaaaagttattttccttta

SEQ ID NO: 14082 - DNA, 120 bp, Artificial Sequence
  ENSG00000011405_51 (sequence is synthesized)
aagttattttcctttatataattggattcagaatcataagggacaggactgaaattattctacagtaaccagtaagaataagattcggccgggcacggtggctcctgcctgtaatcccaa

SEQ ID NO: 14083 - DNA, 120 bp, Artificial Sequence
  ENSG00000011405_52 (sequence is synthesized)
attagttactcaacttcagacacaattttgttaatttggatatatacatatatataataagaactcatggttagaatagaaatacagatactttaaaaatggtaatagaaattgtaccaa

SEQ ID NO: 14084 - DNA, 120 bp, Artificial Sequence
  ENSG00000011405_53 (sequence is synthesized)
ggtaatagaaattgtaccaatcaggttgctgtgagaaaactgacaaaatatgcaataaagaataccaagagagaaaggacaatcgccaattcagtttcccagaacagaatttttatgaac

SEQ ID NO: 14085 - DNA, 120 bp, Artificial Sequence
  ENSG00000011405_54 (sequence is synthesized)
tgcacaaatgtttaatgtaaatggtgatacctacagggaagaaatagaagagttgataatatatcactgggacggggtgggggaaagacttgaaatttttggtgcctaacactaatggtc

SEQ ID NO: 14086 - DNA, 120 bp, Artificial Sequence
  ENSG00000011405_55 (sequence is synthesized)
catatgtagttaaacccatgagtatggtatatgaatgtcttttttaaatgttaaaatgtgttgtctatttaatgttaattaaaatgcagatcaaagcaccaccatttgctttttccacag

SEQ ID NO: 14087 - DNA, 120 bp, Artificial Sequence
  ENSG00000011405_56 (sequence is synthesized)
atcattaacatttccttaaagtatgtaagtacctttgcaaatgcaaatgtactagtaattttcacttaagcttttgagaccgaattccattccaccagttatcacttagccactgtaatt

SEQ ID NO: 14088 - DNA, 120 bp, Artificial Sequence
  ENSG00000011405_57 (sequence is synthesized)
taaaaacaaacaaacaaacaaaaactgtcttggtagaggtcgttaattagactcaacatgtactgcctttttgcagtctattatgacagtgtcttttagcacaaataatagagctaaaaa

SEQ ID NO: 14089 - DNA, 120 bp, Artificial Sequence
  ENSG00000011405_58 (sequence is synthesized)
atgtcctgtcacttccattataagaaatctggattcatatctaagtgtatattataatactgtacagttaagagttcagaacaagtggtaatgttttctcttaatttaactcattttgtg

SEQ ID NO: 14090 - DNA, 120 bp, Artificial Sequence
  ENSG00000011405_59 (sequence is synthesized)
ccttctttactcattcaaacacacatacattttacatatagtttatttctttatgaaatgctaatcttcagcccgtaccaaaaagtagagtggagcctctttgcactactactatcaata

SEQ ID NO: 14091 - DNA, 120 bp, Artificial Sequence
  ENSG00000011405_60 (sequence is synthesized)
aattttaaatcagttggatttttaagcattttttaaaagctgacattaaagtaaatctaaaaaaagtttaacaaactggccaagacactaatttttatgtataatcacaatattttatac

SEQ ID NO: 14092 - DNA, 120 bp, Artificial Sequence
  ENSG00000011405_61 (sequence is synthesized)
tcacctttattgactaaaaataattatgctacatgttgtcctgcatcagaagaattatttcttcttgccagtgttttgggatttgaagataatggttcactcaaagaacctattattttc

SEQ ID NO: 14093 - DNA, 120 bp, Artificial Sequence
  ENSG00000011405_62 (sequence is synthesized)
tctactgaggaacccaatgtagaacttgcactgatatttttattactgcctttatatgaatctataggtatctaaatgttaaggcatgtatgatctttgatcatttcttttttcaaatta

SEQ ID NO: 14094 - DNA, 120 bp, Artificial Sequence
  ENSG00000011405_63 (sequence is synthesized)
aagttgtataaaagtttcaatatcttgccttaaattagttgcctattctttctaggattcaaatattgtgacatttaaaaaagaaaacattcacttttgaaacttagacttcagatcaaa

SEQ ID NO: 14095 - DNA, 120 bp, Artificial Sequence
  ENSG00000011405_64 (sequence is synthesized)
aaggactgaacccccactatcataatccatacattcatttccatgttgtttgactagcagtgcatatatgaatgaatatggtaattaatcttacctataagaaccaaatactttaattat

SEQ ID NO: 14096 - DNA, 120 bp, Artificial Sequence
  ENSG00000011405_65 (sequence is synthesized)
acctataagaaccaaatactttaattatattaagatagtgaataaagatgtataatatttttattaataccttgaatatattcagtggattgaatgtgacttcataactgtactacgatt

SEQ ID NO: 14097 - DNA, 120 bp, Artificial Sequence
  ENSG00000011405_66 (sequence is synthesized)
agctttcggcggcggctgagccagctgaggggaaaaatggctcggactgtggcggcttcggcggctcaggttgtggtagaggcggaggctcaggcagcttgaggtttatttgtacaaata

SEQ ID NO: 14098 - DNA, 120 bp, Artificial Sequence
  ENSG00000011405_67 (sequence is synthesized)
gccgggatgaggctggattgacgatctcttgcgacgctgaaatgcatttcgggagatgtagtcacacagacgggcggtggctgcgcagcgtagctccgcctcctgcgtgagaggaagcgg

SEQ ID NO: 14099 - DNA, 120 bp, Artificial Sequence
  ENSG00000011405_68 (sequence is synthesized)
tggtagaggcggaggctcaggcagcttgaggattcgactacatatataaagcagtgctgtacatgagaaatatgtgagccaaaaatgggagtcacataggtttatttgtacaaatagcac

SEQ ID NO: 14100 - DNA, 120 bp, Artificial Sequence
  ENSG00000011405_69 (sequence is synthesized)
tttcggcggcggctgagccagctgaggggaaaaatggctcggactgtggcggcttcggcggctcaggttgtggtagaggcggaggctcaggcagcttgaggccttgctattttggaagct

SEQ ID NO: 14101 - DNA, 120 bp, Artificial Sequence
  ENSG00000011405_70 (sequence is synthesized)
atttaactactgagcaacatccttggaaatttcatttttaatggtttaatctagaaaaatttcaagttaaatttataatgcagaaatacattggatcctattgaattgatttattgaatc

SEQ ID NO: 14102 - DNA, 120 bp, Artificial Sequence
  ENSG00000011405_71 (sequence is synthesized)
aataaacttttattgaaatatataatgtctaagatgtcatgtctaagacagtggtggggtttcagagataagtgagacattgtattcccttaaggagcttgtagtctttacaggaagagt

SEQ ID NO: 14103 - DNA, 120 bp, Artificial Sequence
  ENSG00000011405_72 (sequence is synthesized)
ttcaggcagttggttaataagtgatataatgggtctttcttactgtaaagagtcaatagtcacatcattatagactatattcctcttgcaacatgcactgttactttatgcacagtagtc

SEQ ID NO: 14104 - DNA, 120 bp, Artificial Sequence
  ENSG00000011405_73 (sequence is synthesized)
actgttactttatgcacagtagtcagctgtgatttccttttagttgcctgaaataatcattatatgaatctttttcttacccaggagaattggttgaaaccgggaggcagaggttgcagt

SEQ ID NO: 14105 - DNA, 120 bp, Artificial Sequence
  ENSG00000011422_0 (sequence is synthesized)
aggagagaagacgtgcagggaccccgcgcacaggagctgccctcgcgacatgggtcacccgccgctgctgccgctgctgctgctgctccacacctgcgtcccagcctcttggggcctgcg

SEQ ID NO: 14106 - DNA, 120 bp, Artificial Sequence
  ENSG00000011422_1 (sequence is synthesized)
gtgcatgcagtgtaagaccaacggggattgccgtgtggaagagtgcgccctgggacaggacctctgcaggaccacgatcgtgcgcttgtgggaagaaggagaagagctggagctggtgga

SEQ ID NO: 14107 - DNA, 120 bp, Artificial Sequence
  ENSG00000011422_2 (sequence is synthesized)
gaaaagctgtacccactcagagaagaccaacaggaccctgagctatcggactggcttgaagatcaccagccttaccgaggttgtgtgtgggttagacttgtgcaaccagggcaactctgg

SEQ ID NO: 14108 - DNA, 120 bp, Artificial Sequence
  ENSG00000011422_3 (sequence is synthesized)
ccgggctgtcacctattcccgaagccgttacctcgaatgcatttcctgtggctcatcagacatgagctgtgagaggggccggcaccagagcctgcagtgccgcagccctgaagaacagtg

SEQ ID NO: 14109 - DNA, 120 bp, Artificial Sequence
  ENSG00000011422_4 (sequence is synthesized)
cctggatgtggtgacccactggatccaggaaggtgaagaagggcgtccaaaggatgaccgccacctccgtggctgtggctaccttcccggctgcccgggctccaatggtttccacaacaa

SEQ ID NO: 14110 - DNA, 120 bp, Artificial Sequence
  ENSG00000011422_5 (sequence is synthesized)
gggcccaatcctggagcttgaaaatctgccgcagaatggccgccagtgttacagctgcaaggggaacagcacccatggatgctcctctgaagagactttcctcattgactgccgaggccc

SEQ ID NO: 14111 - DNA, 120 bp, Artificial Sequence
  ENSG00000011422_6 (sequence is synthesized)
catgaatcaatgtctggtagccaccggcactcacgaaccgaaaaaccaaagctatatggtaagaggctgtgcaaccgcctcaatgtgccaacatgcccacctgggtgacgccttcagcat

SEQ ID NO: 14112 - DNA, 120 bp, Artificial Sequence
  ENSG00000011422_7 (sequence is synthesized)
gaaccacattgatgtctcctgctgtactaaaagtggctgtaaccacccagacctggatgtccagtaccgcagtggggctgctcctcagcctggccctgcccatctcagcctcaccatcac

SEQ ID NO: 14113 - DNA, 120 bp, Artificial Sequence
  ENSG00000011422_8 (sequence is synthesized)
cctgctaatgactgccagactgtggggaggcactctcctctggacctaaacctgaaatccccctctctgccctggctggatccgggggacccctttgcccttccctcggctcccagccct

SEQ ID NO: 14114 - DNA, 120 bp, Artificial Sequence
  ENSG00000011422_9 (sequence is synthesized)
acagacttgctgtgtgacctcaggccagtgtgccgacctctctgggcctcagttttcccagctatgaaaacagctatctcacaaagttgtgtgaagcagaagagaaaagctggaggaagg

SEQ ID NO: 14115 - DNA, 120 bp, Artificial Sequence
  ENSG00000011422_10 (sequence is synthesized)
ccgtgggccaatgggagagctcttgttattattaatattgttgccgctgttgtgttgttgttattaattaatattcatattatttattttatacttacataaagattttgtaccagtgga

SEQ ID NO: 14116 - DNA, 120 bp, Artificial Sequence
  ENSG00000011422_11 (sequence is synthesized)
cacaggagctgccctcgcgacatgggtcacccgccgctgctgccgctgctgctgctgctccacacctgcgtcccagcctgggcgacagcgcgagactccatttcaaaaaaaaaaaaaaga

SEQ ID NO: 14117 - DNA, 120 bp, Artificial Sequence
  ENSG00000011422_12 (sequence is synthesized)
aaaaagaaagaaaggagaaacttgaggcgctacaatctctgaaataacagaagtgtagaatttgggttccacagacaacctggctttttcccggagcgcacttgccaatctgctgctgtg

SEQ ID NO: 14118 - DNA, 120 bp, Artificial Sequence
  ENSG00000011422_13 (sequence is synthesized)
gaagggaaatagagcccagacggaaagagagtcgctagactgagaagacggaggttggagtttggggctgccagaatgtctggaagatgagagttaaaatcctggaatggatgggaccac

SEQ ID NO: 14119 - DNA, 120 bp, Artificial Sequence
  ENSG00000011422_14 (sequence is synthesized)
aaaagggagttcccaacctgcaaacaaatctccctcaagtcattggcaagctctacatgcacagggtgagagtccaagaaacttggaagagaaaaatagcaactgggaagctacaaaagc

SEQ ID NO: 14120 - DNA, 120 bp, Artificial Sequence
  ENSG00000011422_15 (sequence is synthesized)
cagtatccctcctgacaaaactaacaaaaatcctgttagccaaataatcagccacattcatatttaccgtcaaagtttttatcctcattttacagcagtggagagcgattgccccgggtc

SEQ ID NO: 14121 - DNA, 120 bp, Artificial Sequence
  ENSG00000011422_16 (sequence is synthesized)
ccacgttaggaagagagagaactgggatttgcacccaggcaatctggggacagagctgtgatcacaactccatgagtcagggccgagccagccccttcaccaccagccggccgcgccccg

SEQ ID NO: 14122 - DNA, 120 bp, Artificial Sequence
  ENSG00000011422_17 (sequence is synthesized)
ggaagggaagtttgtggcggaggaggttcgtacgggaggagggggaggcgcccacgcatctggggctgactcgctctttcgcaaaacgtctgggaggagtccctggggccacaaaactgc

SEQ ID NO: 14123 - DNA, 120 bp, Artificial Sequence
  ENSG00000011422_18 (sequence is synthesized)
acccaccagattggcaagcatttaaaaatctgacaatacccgggttagtaaggatgtggagttgcagaccgtgtctgtggtgggggagtaaattggcacatcaaccacttagagcgattc

SEQ ID NO: 14124 - DNA, 120 bp, Artificial Sequence
  ENSG00000011422_19 (sequence is synthesized)
ggcaatatctagtccagatgaagattaacatatgctacagctcaactcctcgccatgcagaaatgccaaagaaccttggccacatatacccagggacacatgtatacgaatgttcttagc

SEQ ID NO: 14125 - DNA, 62 bp, Artificial Sequence
  ENSG00000011422_20 (sequence is synthesized)
catgcctgtggacagtgagccaagatcacacgactgcactccagcctgggcgacagcgcgag

SEQ ID NO: 14126 - DNA, 120 bp, Artificial Sequence
  ENSG00000011422_21 (sequence is synthesized)
ggcactcacggatgtggacatttttgccatggaaaagtggaattccggctgggtgcggtggctgaagcttgtactctcagcactttgggaggctgaggccggaggatctcttgaggccag

SEQ ID NO: 14127 - DNA, 69 bp, Artificial Sequence
  ENSG00000011422_22 (sequence is synthesized)
gaaaaatggaattctttggtggatttctcgtgggttgtggggatttgctgaagacatcttgggctttca

SEQ ID NO: 14128 - DNA, 120 bp, Artificial Sequence
  ENSG00000011422_23 (sequence is synthesized)
atcagctgaaccccaactccatgccttatccaagtcccaaccccaacccaacccatctctagctcagctccatccccaactcattcttgaccccatatccaaccccaactcaacttcacc

SEQ ID NO: 14129 - DNA, 120 bp, Artificial Sequence
  ENSG00000011422_24 (sequence is synthesized)
cggagacagaacttcgcgggaaactagagtatctaacaatagaaactccggagggctgatggggccgggcctagaatttgggaataaattagtgggccgggagaggctctggagccgggt

SEQ ID NO: 14130 - DNA, 120 bp, Artificial Sequence
  ENSG00000011422_25 (sequence is synthesized)
agaaccagggggagtgagtggagggatagttccattagggcactgggagtgacggtataacataaagatcgacgcgggtggggcaaggctagaacgtccccagcagaactggagaggcgt

SEQ ID NO: 14131 - DNA, 120 bp, Artificial Sequence
  ENSG00000011422_26 (sequence is synthesized)
aatcgaccgagggccggtgcggtgagaaagacctaataggagcaggaatagaacgtactgatagagagggcggggatacgactgtcaggatatacgcctcacgaggacagaatgaaagga

SEQ ID NO: 14132 - DNA, 120 bp, Artificial Sequence
  ENSG00000011422_27 (sequence is synthesized)
tttgggaaaggacttgtgggcagggatagaacgttcagttagtggggtggaggtagaacgtggacaacggacagactggaagtaccgccggccggaacccagcagaacatggacacgaat

SEQ ID NO: 14133 - DNA, 120 bp, Artificial Sequence
  ENSG00000011422_28 (sequence is synthesized)
agggggtggattctagaaagattcagcaggcagaataggcagggctcaatgactggctgcagggtgggataaggaggaattgattttgagtgagtccttgcagagctggggctccaggac

SEQ ID NO: 14134 - DNA, 120 bp, Artificial Sequence
  ENSG00000011422_29 (sequence is synthesized)
acttccagttaagctggagttaactgtggtgggtctccctgtggaaaaggtgggatttccttcaggtgggtgaatattattgtaaggaattaggacttgtccatcaggatgtggacattt

SEQ ID NO: 14135 - DNA, 120 bp, Artificial Sequence
  ENSG00000011422_30 (sequence is synthesized)
atgtctggtagccaccggcactcacgaacgctcactctggggaagctggttgccatgtaaaagtactactgccctgagaccaccatgctgtgaggaagcccaagctactcatgtataaat

SEQ ID NO: 14136 - DNA, 120 bp, Artificial Sequence
  ENSG00000011422_31 (sequence is synthesized)
gccatgtggagatagagccccagatgtttcagccatctcagcccaggcaccagacaagtgggtgaagaagccaccttggacatgtagccccagcagatgtgatatagagaagaaacagga

SEQ ID NO: 14137 - DNA, 120 bp, Artificial Sequence
  ENSG00000011422_32 (sequence is synthesized)
aacttggctatattagtttcctagggctgcctgtgataaattattacaaactttataaactaacacattgtgtgcctatatcaaaacatcatggaaggacaggcacagtggctcatgcct

SEQ ID NO: 14138 - DNA, 67 bp, Artificial Sequence
  ENSG00000011422_33 (sequence is synthesized)
gcctgtagtcctagcactttgggagggtgagaaaggaagatctcactaaaaataaaaaaaaattggc

SEQ ID NO: 14139 - DNA, 120 bp, Artificial Sequence
  ENSG00000011426_0 (sequence is synthesized)
gagtccgtcactggaagccgagaggagaggacagctggttgtgggagagttcccccgcctcagactcctggttttttccaggagacacactgagctgagactcacttttctcttcctgaa

SEQ ID NO: 14140 - DNA, 120 bp, Artificial Sequence
  ENSG00000011426_1 (sequence is synthesized)
tttgaaccaccgtttccatcgtctcgtagtccgacgcctggggcgatggatccgtttacggagaaactgctggagcgaacccgtgccaggcgagagaatcttcagagaaaaatggctgag

SEQ ID NO: 14141 - DNA, 120 bp, Artificial Sequence
  ENSG00000011426_2 (sequence is synthesized)
aggcccacagcagctccaaggtctatgactcatgctaagcgagctagacagccactttcagaagcaagtaaccagcagcccctctctggtggtgaagagaaatcttgtacaaaaccatcg

SEQ ID NO: 14142 - DNA, 120 bp, Artificial Sequence
  ENSG00000011426_3 (sequence is synthesized)
ccatcaaaaaaacgctgttctgacaacactgaagtagaagtttctaacttggaaaataaacaaccagttgagtcgacatctgcaaaatcttgttctccaagtcctgtgtctcctcaggtg

SEQ ID NO: 14143 - DNA, 120 bp, Artificial Sequence
  ENSG00000011426_4 (sequence is synthesized)
cagccacaagcagcagataccatcagtgattctgttgctgtcccggcatcactgctgggcatgaggagagggctgaactcaagattggaagcaactgcagcctcctcagttaaaacacgt

SEQ ID NO: 14144 - DNA, 120 bp, Artificial Sequence
  ENSG00000011426_5 (sequence is synthesized)
atgcaaaaacttgcagagcaacggcgccgttgggataatgatgatatgacagatgacattcctgaaagctcactcttctcaccaatgccatcagaggaaaaggctgcttcccctcccaga

SEQ ID NO: 14145 - DNA, 120 bp, Artificial Sequence
  ENSG00000011426_6 (sequence is synthesized)
cctctgctttcaaatgcctcggcaactccagttggcagaaggggccgtctggccaatcttgctgcaactatttgctcctgggaagatgatgtaaatcactcatttgcaaaacaaaacagt

SEQ ID NO: 14146 - DNA, 120 bp, Artificial Sequence
  ENSG00000011426_7 (sequence is synthesized)
gtacaagaacagcctggtaccgcttgtttatccaaattttcctctgcaagtggagcatctgctaggatcaatagcagcagtgttaagcaggaagctacattctgttcccaaagggatggc

SEQ ID NO: 14147 - DNA, 120 bp, Artificial Sequence
  ENSG00000011426_8 (sequence is synthesized)
gatgcctctttgaataaagccctatcctcaagtgctgatgatgcgtctttggttaatgcctcaatttccagctctgtgaaagctacttctccagtgaaatctactacatctatcactgat

SEQ ID NO: 14148 - DNA, 120 bp, Artificial Sequence
  ENSG00000011426_9 (sequence is synthesized)
gctaaaagttgtgagggacaaaatcctgagctacttccaaaaactcctattagtcctctgaaaacgggggtatcgaaaccaattgtgaagtcaactttatcccagacagttccatccaag

SEQ ID NO: 14149 - DNA, 120 bp, Artificial Sequence
  ENSG00000011426_10 (sequence is synthesized)
ggagaattaagtagagaaatttgtctgcaatctcaatctaaagacaaatctacgacaccaggaggaacaggaattaagcctttcctggaacgctttggagagcgttgtcaagaacatagc

SEQ ID NO: 14150 - DNA, 120 bp, Artificial Sequence
  ENSG00000011426_11 (sequence is synthesized)
aaagaaagtccagctcgtagcacaccccacagaacccccattattactccaaatacaaaggccatccaagaaagattattcaagcaagacacatcttcatctactacccatttagcacaa

SEQ ID NO: 14151 - DNA, 120 bp, Artificial Sequence
  ENSG00000011426_12 (sequence is synthesized)
cagctcaagcaggaacgtcaaaaagaactagcatgtcttcgtggccgatttgacaagggcaatatatggagtgcagaaaaaggcggaaactcaaaaagcaaacaactagaaaccaaacag

SEQ ID NO: 14152 - DNA, 120 bp, Artificial Sequence
  ENSG00000011426_13 (sequence is synthesized)
gaaactcactgtcagagcactcccctcaaaaaacaccaaggtgtttcaaaaactcagtcacttccagtaacagaaaaggtgaccgaaaaccagataccagccaaaaattctagtacagaa

SEQ ID NO: 14153 - DNA, 120 bp, Artificial Sequence
  ENSG00000011426_14 (sequence is synthesized)
cctaaaggtttcactgaatgcgaaatgacgaaatctagccctttgaaaataacattgtttttagaagaggacaaatccttaaaagtaacatcagacccaaaggttgagcagaaaattgaa

SEQ ID NO: 14154 - DNA, 120 bp, Artificial Sequence
  ENSG00000011426_15 (sequence is synthesized)
gtgatacgtgaaattgagatgagtgtggatgatgatgatatcaatagttcgaaagtaattaatgacctcttcagtgatgtcctagaggaaggtgaactagatatggagaagagccaagag

SEQ ID NO: 14155 - DNA, 120 bp, Artificial Sequence
  ENSG00000011426_16 (sequence is synthesized)
gagatggatcaagcattagcagaaagcagcgaagaacaggaagatgcactgaatatctcctcaatgtctttacttgcaccattggcacaaacagttggtgtggtaagtccagagagttta

SEQ ID NO: 14156 - DNA, 120 bp, Artificial Sequence
  ENSG00000011426_17 (sequence is synthesized)
gtgtccacacctagactggaattgaaagacaccagcagaagtgatgaaagtccaaaaccaggaaaattccaaagaactcgtgtccctcgagctgaatctggtgatagccttggttctgaa

SEQ ID NO: 14157 - DNA, 120 bp, Artificial Sequence
  ENSG00000011426_18 (sequence is synthesized)
gatcgtgatcttctttacagcattgatgcatatagatctcaaagattcaaagaaacagaacgtccatcaataaagcaggtgattgttcggaaggaagatgttacttcaaaactggatgaa

SEQ ID NO: 14158 - DNA, 120 bp, Artificial Sequence
  ENSG00000011426_19 (sequence is synthesized)
ctcaataacgaaataaatatgcaacagacagtgatctatcaagctagccaggctcttaactgctgtgttgatgaagaacatggaaaagggtccctagaagaagctgaagcagaaagactt

SEQ ID NO: 14159 - DNA, 120 bp, Artificial Sequence
  ENSG00000011426_20 (sequence is synthesized)
cttctaattgcaactgggaagagaacacttttgattgatgaattgaataaattgaagaacgaaggacctcagaggaagaataaggctagtccccaaagtgaatttatgccatccaaagga

SEQ ID NO: 14160 - DNA, 120 bp, Artificial Sequence
  ENSG00000011426_21 (sequence is synthesized)
tcagttactttgtcagaaatccgcttgcctctaaaagcagattttgtctgcagtacggttcagaaaccagatgcagcaaattactattacttaattatactaaaagcaggagctgaaaat

SEQ ID NO: 14161 - DNA, 120 bp, Artificial Sequence
  ENSG00000011426_22 (sequence is synthesized)
atggtagccacaccattagcaagtacttcaaactctcttaacggtgatgctctgacattcactactacatttactctgcaagatgtatccaatgactttgaaataaatattgaagtttac

SEQ ID NO: 14162 - DNA, 120 bp, Artificial Sequence
  ENSG00000011426_23 (sequence is synthesized)
agcttggtgcaaaagaaagatccctcaggccttgataagaagaaaaaaacatccaagtccaaggctattactccaaagcgactcctcacatctataaccacaaaaagcaacattcattct

SEQ ID NO: 14163 - DNA, 120 bp, Artificial Sequence
  ENSG00000011426_24 (sequence is synthesized)
tcagtcatggccagtccaggaggtcttagtgctgtgcgaaccagcaacttcgcccttgttggatcttacacattatcattgtcttcagtaggaaatactaagtttgttctggacaaggtc

SEQ ID NO: 14164 - DNA, 120 bp, Artificial Sequence
  ENSG00000011426_25 (sequence is synthesized)
ccctttttatcttctttggaaggtcatatttatttaaaaataaaatgtcaagtgaattccagtgttgaagaaagaggttttctaaccatatttgaagatgttagtggttttggtgcctgg

SEQ ID NO: 14165 - DNA, 120 bp, Artificial Sequence
  ENSG00000011426_26 (sequence is synthesized)
catcgaagatggtgtgttctttctggaaactgtatatcttattggacttatccagatgatgagaaacgcaagaatcccataggaaggataaatctggctaattgtaccagtcgtcagata

SEQ ID NO: 14166 - DNA, 120 bp, Artificial Sequence
  ENSG00000011426_27 (sequence is synthesized)
gaaccagccaacagagaattttgtgcaagacgcaacacttttgaattaattactgtccgaccacaaagagaagatgaccgagagactcttgtcagccaatgcagggacacactctgtgtt

SEQ ID NO: 14167 - DNA, 120 bp, Artificial Sequence
  ENSG00000011426_28 (sequence is synthesized)
accaagaactggctgtctgcagatactaaagaagagcgggatctctggatgcaaaaactcaatcaagttcttgttgatattcgcctctggcaacctgatgcttgctacaaacctattgga

SEQ ID NO: 14168 - DNA, 120 bp, Artificial Sequence
  ENSG00000011426_29 (sequence is synthesized)
aagccttaaaccgggaaatttccatgctatctagaggtttttgatgtcatcttaagaaacacacttaagagcatcagatttactgattgcattttatgctttaagtacgaaagggtttgt

SEQ ID NO: 14169 - DNA, 120 bp, Artificial Sequence
  ENSG00000011426_30 (sequence is synthesized)
gccaatattcactacgtattatgcagtatttatatcttttgtatgtaaaactttaactgatttctgtcattcatcaatgagtagaagtaaatacattatagttgattttgctaaatctta

SEQ ID NO: 14170 - DNA, 120 bp, Artificial Sequence
  ENSG00000011426_31 (sequence is synthesized)
atttaaaagcctcattttcctagaaatctaattattcagttattcatgacaatatttttttaaaagtaagaaattctgagttgtcttcttggagctgtaggtcttgaagcagcaacgtct

SEQ ID NO: 14171 - DNA, 120 bp, Artificial Sequence
  ENSG00000011426_32 (sequence is synthesized)
ttcaggggttggagacagaaacccattctccaatctcagtagttttttcgaaaggctgtgatcatttattgatcgtgatatgacttgttactagggtactgaaaaaaatgtctaaggcct

SEQ ID NO: 14172 - DNA, 120 bp, Artificial Sequence
  ENSG00000011426_33 (sequence is synthesized)
ttacagaaacatttttagtaatgaggatgagaactttttcaaatagcaaatatatattggcttaaagcatgaggctgtcttcagaaaagtgatgtggacataggaggcaatgtgtgagac

SEQ ID NO: 14173 - DNA, 120 bp, Artificial Sequence
  ENSG00000011426_34 (sequence is synthesized)
ttgggggttcaatattttatatagaagagttaataagcacatggtttacatttactcagctactatatatgcagtgtggtgcacattttcacagaattctggcttcattaagatcattat

SEQ ID NO: 14174 - DNA, 120 bp, Artificial Sequence
  ENSG00000011426_35 (sequence is synthesized)
ttttgctgcgtagcttacagacttagcatattagttttttctactcctacaagtgtaaattgaaaaatctttatattaaaaaagtaaactgttatgaagctgctatgtactaataatact

SEQ ID NO: 14175 - DNA, 120 bp, Artificial Sequence
  ENSG00000011426_36 (sequence is synthesized)
ttgcttgccaaagtgtttgggttttgttgttgtttgtttgtttgtttgtttttggttcatgaacaacagtgtctagaaacccattttgaaagtggaaaattattaagtcacctatcacct

SEQ ID NO: 14176 - DNA, 120 bp, Artificial Sequence
  ENSG00000011426_37 (sequence is synthesized)
ttaaacgcctttttttaaaattataaaatattgtaaagcagggtctcaacttttaaatacactttgaacttcttctctgaattattaaagttctttatgacctcatttataaacactaaa

SEQ ID NO: 14177 - DNA, 120 bp, Artificial Sequence
  ENSG00000011426_38 (sequence is synthesized)
ttctgtcacctcctgtcattttattttttattcattcaaatgtattttttcttgtgcatattataaaaatatattttatgagctcttactcaaataaatacctgtaaatgtctaaaggaa

SEQ ID NO: 14178 - DNA, 120 bp, Artificial Sequence
  ENSG00000011426_39 (sequence is synthesized)
ctttcaccagtgatgcataagaaactgtattactcactccctaaccaatcaacagaggttgttactgttttttccagacttagccaatctaaggttttaaattggtatgttctattttta

SEQ ID NO: 14179 - DNA, 120 bp, Artificial Sequence
  ENSG00000011426_40 (sequence is synthesized)
tttttaaaaattctaatagagttgacacacttattggctgttggctcatgtgtgcctatatgtgtttcttttcccattttcaggaccatttggtctcgtgaatgttttcctccactttga

SEQ ID NO: 14180 - DNA, 120 bp, Artificial Sequence
  ENSG00000011426_41 (sequence is synthesized)
ctcgtatcataggaattcatggctgccaacaatccagggcagttgtctgcccttatctttcatagatatataaagaaatatttacacatgaaatccaatgtctaggtttccttttataga

SEQ ID NO: 14181 - DNA, 120 bp, Artificial Sequence
  ENSG00000011426_42 (sequence is synthesized)
aaggggagaagtgggtaagttgtagataaaaggcacttgagtgtgtttctcattgttatagctggttttggtacctggggctcattatactgttgtttgtattttttatttgaagttcac

SEQ ID NO: 14182 - DNA, 120 bp, Artificial Sequence
  ENSG00000011426_43 (sequence is synthesized)
cataataaagagctttataggatagttggcaagagctaccagttgatatttttgggttttatttttatgtctagctaggaacaataataaatgttaaatatgtttctctaagcccagtgt

SEQ ID NO: 14183 - DNA, 120 bp, Artificial Sequence
  ENSG00000011426_44 (sequence is synthesized)
cccagtgtaactaaattttaacttttaaataatagctttttaatatttaatttgtaccaacttaaatgctgcttaatgcttactgacttaaatagtcttattttctactaatttctctta

SEQ ID NO: 14184 - DNA, 120 bp, Artificial Sequence
  ENSG00000011426_45 (sequence is synthesized)
tcaagaacatagcaaagaaagtccagctcgtagcacaccccacagaacccccattattactccaaatacaaaggccatccaagaaagattattcaagcaagatgtatccaatgactttga

SEQ ID NO: 14185 - DNA, 120 bp, Artificial Sequence
  ENSG00000011426_46 (sequence is synthesized)
gtttcggtcctacagataaaactcagggaggaaggctttgagtctgtcctaaaaggctgttgcgagaggtctttcagcccccgtttttaccatgtccctctgcagtcctggcgcagcaag

SEQ ID NO: 14186 - DNA, 120 bp, Artificial Sequence
  ENSG00000011426_47 (sequence is synthesized)
gcagtaggatgtgtgatttgcggagttcacgcagcccgcaggggagatgctaatgaaatgacagcaaaacgttaaaataagcagaaactgctggagcgaacccgtgccaggcgagagaat

SEQ ID NO: 14187 - DNA, 120 bp, Artificial Sequence
  ENSG00000011426_48 (sequence is synthesized)
gtccaaaaccaggaaaattccaaagaactcgtgtccctcgagctgaatctggtgatagccttggttctgaagatcgtgatcttctttacagatctcaaagattcaaagaaacagaacgtc

SEQ ID NO: 14188 - DNA, 120 bp, Artificial Sequence
  ENSG00000011426_49 (sequence is synthesized)
aaagcctgcaaagtgtgtactggcatctagtgacaatggcaaaaccaacttcagggcagtggtataggcagaagatgacattcctgaaagctcactcttctcaccaatgccatcagagga

SEQ ID NO: 14189 - DNA, 80 bp, Artificial Sequence
  ENSG00000011451_0 (sequence is synthesized)
aaagggacaatgtcccccgagcggtggaggcggcggcggctgcggaggccgcggcaccggcaccgggagcggcagcggcg

SEQ ID NO: 14190 - DNA, 120 bp, Artificial Sequence
  ENSG00000011451_1 (sequence is synthesized)
gccccggcacctggccggcggcgccgcctccccggcccacaatgccccgctgagccggtgcagcagctgagtggatccaagcagagaaaatccgatggaggggtctctggcaggcagcct

SEQ ID NO: 14191 - DNA, 120 bp, Artificial Sequence
  ENSG00000011451_2 (sequence is synthesized)
ggctgcaccagatcgtccccaaggcccagagagactgcctggcccggcgccaagggagaacatcgagggtggggccgaagctgctgagggggaaggtggcatcttccggtccacccgtta

SEQ ID NO: 14192 - DNA, 120 bp, Artificial Sequence
  ENSG00000011451_3 (sequence is synthesized)
cctgcctgtcaccaaggagggcccccgagacattctggatggcagaggtggcatctctgacgggcagccccatcccggcctcagcgaagccctcccccgtgtcacctccgccacccatcg

SEQ ID NO: 14193 - DNA, 120 bp, Artificial Sequence
  ENSG00000011451_4 (sequence is synthesized)
gatcagcagctgctgctgggatggaggcagcctggacttccggccgggctccccaccaccccatctcctgggccatttcccaggtacccctgatggccgggggccctgggagcaccccct

SEQ ID NO: 14194 - DNA, 120 bp, Artificial Sequence
  ENSG00000011451_5 (sequence is synthesized)
tgtccaggaggctggggagggcatcctatctgagcggagattcgaggactcagtcattgtgagaaccatgaaaccccacgctgagctagagggctctagaaggttcttacaccaccgggg

SEQ ID NO: 14195 - DNA, 120 bp, Artificial Sequence
  ENSG00000011451_6 (sequence is synthesized)
ggaaccaaggcttttggagaaacatgcccagggccgccccaggttcgactggctccaagatgaggacgagcagggatccccccaggacgcagggctgcacttggacctgcctgcccagcc

SEQ ID NO: 14196 - DNA, 120 bp, Artificial Sequence
  ENSG00000011451_7 (sequence is synthesized)
gccacccctcgcccccttcaggagggtgtttgtgccagtggaagacaccccgaagacgctggacatggcggtggtgggtggcagagaagatctggaggacctggaggggctggcccagcc

SEQ ID NO: 14197 - DNA, 120 bp, Artificial Sequence
  ENSG00000011451_8 (sequence is synthesized)
gtccgagtggggcctacccacgtcagcctcggaggtagccacacagacctggacagtgaactcggaggcttctgtggagcggctgcagccgctactgcccccgatccggaccgggcccta

SEQ ID NO: 14198 - DNA, 120 bp, Artificial Sequence
  ENSG00000011451_9 (sequence is synthesized)
cctgtgtgagctgctggaggaggtggccgaaggggtggccagcccagatgaggacgaggacgaggagccggccgtgttcccatgcatcgagtgcagcatctacttcaagcagaaggagca

SEQ ID NO: 14199 - DNA, 120 bp, Artificial Sequence
  ENSG00000011451_10 (sequence is synthesized)
cctcctggagcacatgagccagcaccgccgagccccgggccaggagccccctgcggacctggccccgctggcctgcggggagtgtggctgggcctttgctgaccccactgccctggagca

SEQ ID NO: 14200 - DNA, 120 bp, Artificial Sequence
  ENSG00000011451_11 (sequence is synthesized)
gcaccggcagctgcatcaggcctcccgggagaagatcattgaggagatccaaaagctgaagcaagttccaggagacgagggccgggaggcacggctgcagtgccctaagtgtgtctttgg

SEQ ID NO: 14201 - DNA, 120 bp, Artificial Sequence
  ENSG00000011451_12 (sequence is synthesized)
caccaattcatccagggcctatgtgcagcatgccaagctgcacatgcgtgagcccccaggccagaccaccaaagagccttttggaggcagcagcggggctggcagccccagccctgaggc

SEQ ID NO: 14202 - DNA, 120 bp, Artificial Sequence
  ENSG00000011451_13 (sequence is synthesized)
cagcgccctcctctatcagccctacggagctgccgttggcctcagcgcctgtgtcttctgtggtttccccgcgcccagcgagagcctgctcagggagcacgtgaggctggtgcatgccca

SEQ ID NO: 14203 - DNA, 120 bp, Artificial Sequence
  ENSG00000011451_14 (sequence is synthesized)
tccccactgggaggaggatggcgaggcttatgaggaagaccctgccagccagccaggcactagccaggatgctcacgcctgcttccctgacactgctgtggactactttggcaaagctga

SEQ ID NO: 14204 - DNA, 120 bp, Artificial Sequence
  ENSG00000011451_15 (sequence is synthesized)
gccgtccttggcccccatgtggcgggagaaccctgctggatacgaccccagcctggcctttggcccaggatgccagcagctgagcatcagagatttcccgctgtcaaagccactcctgca

SEQ ID NO: 14205 - DNA, 120 bp, Artificial Sequence
  ENSG00000011451_16 (sequence is synthesized)
tggcacgggccagaggcctctcggaaggctggcctttccctccacactagcatccaccccctactccttacagctcgggagaaacaaaagcaccgtccacccacaagggctgggggaacg

SEQ ID NO: 14206 - DNA, 120 bp, Artificial Sequence
  ENSG00000011451_17 (sequence is synthesized)
aggaggaggaggaggaggaggaggaggatgtagtgctgacctccgagatggatttttcccctgaaaatggggtcttttcacccctagccacccccagcctcatcccgcaggcggccctgg

SEQ ID NO: 14207 - DNA, 120 bp, Artificial Sequence
  ENSG00000011451_18 (sequence is synthesized)
catcccgcaggcggccctggagctgaagcaggcattccgagaggccctgcaggcagtagaggccacccaggggcagcagcagcagctccgagggatggtacccattgtgctcgtggcgaa

SEQ ID NO: 14208 - DNA, 120 bp, Artificial Sequence
  ENSG00000011451_19 (sequence is synthesized)
cgaagctggggccgcaggtcatggcggcagccagggtgcccccaaggttgcagcccgaggagctggggctggcaggcgcccaccccctggacttcctgctcctggacgcgccgctgggcg

SEQ ID NO: 14209 - DNA, 120 bp, Artificial Sequence
  ENSG00000011451_20 (sequence is synthesized)
gctggggctggacacactcctggatggggatccggccatggcactgaagcacgaggagcggaaatgcccctactgccccgatcgcttccacaacggcatcggcttggccaaccacgtccg

SEQ ID NO: 14210 - DNA, 120 bp, Artificial Sequence
  ENSG00000011451_21 (sequence is synthesized)
gggccacctgaaccgcgtgggcgtcagctacaatgtgcgccatttcatctccgctgaggaggtgaaggccattgagcgcaggttctccttccagaagaagaagaaaaaagtggccaactt

SEQ ID NO: 14211 - DNA, 120 bp, Artificial Sequence
  ENSG00000011451_22 (sequence is synthesized)
tgacccaggcaccttcagcctgatgcgctgtgacttctgcggggctggcttcgacacacgggccggcctctccagccacgcccgggcccacctacgtgacttcggtatcaccaactggga

SEQ ID NO: 14212 - DNA, 120 bp, Artificial Sequence
  ENSG00000011451_23 (sequence is synthesized)
gctcactgtctcacccatcaacatcctgcaggagctgctggccacctctgctgctgagcagccccccagccccctgggccgagagcctgggggtccgcctggcagcttcctgacctcccg

SEQ ID NO: 14213 - DNA, 120 bp, Artificial Sequence
  ENSG00000011451_24 (sequence is synthesized)
tcggccccgcttacctctcacggtgccctttccacccacctgggctgaggaccctgggccagcctatggagatgcccagagcctgaccacctgcgaggtctgcggtgcctgctttgagac

SEQ ID NO: 14214 - DNA, 120 bp, Artificial Sequence
  ENSG00000011451_25 (sequence is synthesized)
ccgaaagggcctgtccagccacgcgcgctcccacctgcggcagctgggagtggcagagtcggaaagcagcggcgcacccatcgacctcctctacgagcttgtgaagcagaagggtctgcc

SEQ ID NO: 14215 - DNA, 120 bp, Artificial Sequence
  ENSG00000011451_26 (sequence is synthesized)
tggtcgccggggccccccggcccggcttgctcagcctggccaagcccttggatgcccctgctgtcaacaaagccatcaagtcgcctcccggcttctcggccaagggcctgggccacccgc

SEQ ID NO: 14216 - DNA, 120 bp, Artificial Sequence
  ENSG00000011451_27 (sequence is synthesized)
ccagctctccactcctcaaaaagacaccactggccctggcgggctcccctacccctaagaatcctgaggacaagagcccccagctgtccctgagcccccggccggcctccccaaaggcac

SEQ ID NO: 14217 - DNA, 120 bp, Artificial Sequence
  ENSG00000011451_28 (sequence is synthesized)
agtggcctcagtctgaggatgaggggcccttgaacctcacctcaggcccagagccagcacgagacatccgctgcgagttctgtggtgagttcttcgagaaccgcaagggcctctcgagcc

SEQ ID NO: 14218 - DNA, 120 bp, Artificial Sequence
  ENSG00000011451_29 (sequence is synthesized)
acgcgcgctcccatctgcggcaaatgggcgtgaccgagtggtacgtcaatggctcgcccatcgacacgctgcgggagatcctgaagagacggacccagtctcggcctggtggacctccca

SEQ ID NO: 14219 - DNA, 120 bp, Artificial Sequence
  ENSG00000011451_30 (sequence is synthesized)
acccaccagggccaagcccaaaagccctggccaagatgatgggcggcgcaggtcctggcagctcactggaagcccgcagcccctcggaccttcacatctcacccttggccaagaagttgc

SEQ ID NO: 14220 - DNA, 120 bp, Artificial Sequence
  ENSG00000011451_31 (sequence is synthesized)
caccaccaccgggcagccccctgggccactcaccaactgcctctcctcctcctacggcccgaaagatgttcccaggcctggctgcaccctccttgcccaagaagctgaagcctgaacaaa

SEQ ID NO: 14221 - DNA, 120 bp, Artificial Sequence
  ENSG00000011451_32 (sequence is synthesized)
tacgggtggagatcaagcgggagatgctgccgggggcccttcatggggaactgcacccatctgagggtccctggggggcaccacgggaagacatgacacccctgaacctgtcgtcccggg

SEQ ID NO: 14222 - DNA, 120 bp, Artificial Sequence
  ENSG00000011451_33 (sequence is synthesized)
cagagccggtgcgcgacatccgctgtgagttctgcggcgagttcttcgagaaccgcaagggcctgtcgagtcacgcgcgctcacacctgcggcagatgggtgtgaccgagtggtccgtca

SEQ ID NO: 14223 - DNA, 120 bp, Artificial Sequence
  ENSG00000011451_34 (sequence is synthesized)
atggttcgcccatcgacacactgcgagagatcctcaagaagaagtccaagccgtgcctcatcaagaaggagccaccggctggagacctggcccctgccctggctgaggacgggcctccca

SEQ ID NO: 14224 - DNA, 120 bp, Artificial Sequence
  ENSG00000011451_35 (sequence is synthesized)
ccgtggcccctgggcccgtgcagtccccactgccgctgtcgcccctggctggccggccaggcaaaccaggtgcagggccggcccaggttcctcgtgagctcagcctgacgcccatcactg

SEQ ID NO: 14225 - DNA, 120 bp, Artificial Sequence
  ENSG00000011451_36 (sequence is synthesized)
gggccaagccctcagccactggctacctgggctcagtggcagccaagcggcccctgcaggaggaccgcctcctcccagcagaggtcaaggccaagacctacatccagactgaactgccct

SEQ ID NO: 14226 - DNA, 120 bp, Artificial Sequence
  ENSG00000011451_37 (sequence is synthesized)
tcaaggcaaagacccttcatgagaagacctcccactcctccaccgaggcctgctgcgagctgtgtggcctttactttgaaaaccgcaaggccctggccagccacgcacgggcacacctgc

SEQ ID NO: 14227 - DNA, 120 bp, Artificial Sequence
  ENSG00000011451_38 (sequence is synthesized)
ggcagttcggcgtgaccgagtggtgcgtcaatggctcgcccatcgagacactgagcgagtggatcaaacaccggccccagaaggtgggcgcctaccgcagctacatccagggcggccgcc

SEQ ID NO: 14228 - DNA, 120 bp, Artificial Sequence
  ENSG00000011451_39 (sequence is synthesized)
ccttcaccaagaagttccgcagtgccggccatggccgtgacagtgacaagcggccgtccctggggctggcacccgggggcctggccgtggtcggccgcagtgccggaggggagccagggc

SEQ ID NO: 14229 - DNA, 120 bp, Artificial Sequence
  ENSG00000011451_40 (sequence is synthesized)
ccgaggctggccgggcagccgacggtggtgagcggcctctggcagccagcccgccaggcaccgtgaaggctgaggagcaccagcggcagaacatcaacaaatttgaacgccgacaagccc

SEQ ID NO: 14230 - DNA, 120 bp, Artificial Sequence
  ENSG00000011451_41 (sequence is synthesized)
gccctccagatgcctccgcagcccggggaggcgaggacaccaatgacctacagcagaagctggaggaggtgcggcaacccccaccccgagtccggccagtcccctccctggtgccccggc

SEQ ID NO: 14231 - DNA, 120 bp, Artificial Sequence
  ENSG00000011451_42 (sequence is synthesized)
ccccccagacatcacttgtcaagttcgtgggcaacatctacaccctcaaatgcaggttctgtgaggtggaattccagggccccctctccatccaggaagagtgggtgcggcacttacagc

SEQ ID NO: 14232 - DNA, 120 bp, Artificial Sequence
  ENSG00000011451_43 (sequence is synthesized)
ggcacatcctggagatgaacttctccaaagcggaccccccacctgaggagtcccaggccccgcaggcacagacagcggcggcagaggctccctaacacaaaagcattccagatcccctct

SEQ ID NO: 14233 - DNA, 120 bp, Artificial Sequence
  ENSG00000011451_44 (sequence is synthesized)
cgtgccacctctgtctcctcttcttcctcctctgtgtccttgtccctcttcctctttctttccgtttccaaaggagcaagccaaaacctcaaaccggcgccccttgggggccgggcacac

SEQ ID NO: 14234 - DNA, 120 bp, Artificial Sequence
  ENSG00000011451_45 (sequence is synthesized)
tacagccagggcgccgggagccagctagctgcccttcccccagcccgaggactctggggccacagggtgtcttccttcagcccatgcccacctggtccagcaggggcagcagccaggtct

SEQ ID NO: 14235 - DNA, 120 bp, Artificial Sequence
  ENSG00000011451_46 (sequence is synthesized)
ctgatggcagccggtctggtcacaggggaggacagcactcccccgtctagcagccaggcagggcgatgtctgccatccgtggccatttgcaaagaccccaaagacccctgttctggttcc

SEQ ID NO: 14236 - DNA, 120 bp, Artificial Sequence
  ENSG00000011451_47 (sequence is synthesized)
ctctctcccccatgaatatcctctcacacacatgtacatgcgaacacacacaacacgcacctcgtgagacccgggacctgccccggacccccagttcctgggttgaacgaccacatcatg

SEQ ID NO: 14237 - DNA, 120 bp, Artificial Sequence
  ENSG00000011451_48 (sequence is synthesized)
ccacggtgcttgctcaggggaagccacgctccctctgtggggcctgctggggcctgggagccccccactgagcccacaatgccacggaaatccttgttggctgcccccgagaggggcctt

SEQ ID NO: 14238 - DNA, 120 bp, Artificial Sequence
  ENSG00000011451_49 (sequence is synthesized)
cccagctgggaagagctcagagctgacagctgcctcctgccatgtcaaggccccccaaagagcctcaggggctctggggccctggagggtggggttggggggtgggactctcctccccca

SEQ ID NO: 14239 - DNA, 120 bp, Artificial Sequence
  ENSG00000011451_50 (sequence is synthesized)
ctcctgctccctctcccttttcactgttgctttctatgtatagctccctagacctttcacttttttaaaaacgcgttttgtgtagagaataaggaacgtggatctttttattttgcaatc

SEQ ID NO: 14240 - DNA, 120 bp, Artificial Sequence
  ENSG00000011451_51 (sequence is synthesized)
ctgggccagctagaagccaggagctgattgaccttttaacttttttcagtggccacattttggttatcgatgtacctagaagtatgtaaattagattaaatttctcttctggaaacaccc

SEQ ID NO: 14241 - DNA, 120 bp, Artificial Sequence
  ENSG00000011451_52 (sequence is synthesized)
ggctgcccctgggggagggagggagaccacctgagtggaccttggtcacccggagccttggaacaggatagggtttggtggaagctgggaggtgtcgcctcagtggctgcccttgggtgt

SEQ ID NO: 14242 - DNA, 120 bp, Artificial Sequence
  ENSG00000011451_53 (sequence is synthesized)
atcggggcctcctctgtccagagcgccatggaggccctgggttttccagttggccgccaagccgaccagacgcagctggggatgagcccaagttcccagctgttggctctttaggccatg

SEQ ID NO: 14243 - DNA, 120 bp, Artificial Sequence
  ENSG00000011451_54 (sequence is synthesized)
gctgggagggggtctctggctggctggcaaagcggctccagtgagcagatgaaccagggttctgggcagcctgtctgggaagggagccaggatcaagaagcagttgaggctagaggagct

SEQ ID NO: 14244 - DNA, 120 bp, Artificial Sequence
  ENSG00000011451_55 (sequence is synthesized)
tatcaaaggcaggagctaccagcgagggtgtcagggacccgttgggagcatttgggtgggggccagtggggttgtagagagctggaactcacctgcttttaatacatgtgacttctagtg

SEQ ID NO: 14245 - DNA, 120 bp, Artificial Sequence
  ENSG00000011451_56 (sequence is synthesized)
agacacatgcacccctgacccaaggaacatgcggggaaaagaggagccactggctcctttgcgatgttatttattttctcgctctgcaaatgtttattgaacatttctgagattttaaga

SEQ ID NO: 14246 - DNA, 120 bp, Artificial Sequence
  ENSG00000011451_57 (sequence is synthesized)
gattttgttggctgctccttcttgtttattgcatgtggtttttcagctcatcgtttttactaaacggtcaagtgctggagagtgggaacgacctcatggcgtgtggacagaaggggccac

SEQ ID NO: 14247 - DNA, 120 bp, Artificial Sequence
  ENSG00000011451_58 (sequence is synthesized)
ctctacccccagccctgctttctgggccctcccaccataccccttcctgggaaggagggattaacaggctgcaataacgcccacaagggtggtcttggcccacacgtctgctcctgtggg

SEQ ID NO: 14248 - DNA, 120 bp, Artificial Sequence
  ENSG00000011451_59 (sequence is synthesized)
gtcaggacgcacatctcgcctggtggcagaaggccgcaaccacttctctccatcctgtgctgtgggtgggtggatgtatccaggacttaggaagcagggagagcatcttgtgagctgact

SEQ ID NO: 14249 - DNA, 90 bp, Artificial Sequence
  ENSG00000011451_60 (sequence is synthesized)
caggacttaggaagcagggagagcatcttgtgagctgactcaaaggtgtttcttcctctttcaacttttcataagtcagtttttattttt

SEQ ID NO: 14250 - DNA, 90 bp, Artificial Sequence
  ENSG00000011451_61 (sequence is synthesized)
caagtgattctcctgcctcagccatccagccctggcttatatctgtaatttttgtagagacgggggtttcaccatgttgcccgggctggt

SEQ ID NO: 14251 - DNA, 66 bp, Artificial Sequence
  ENSG00000011451_62 (sequence is synthesized)
caaggtaagtcagtttttgaaatataaaagtggtataggctagatgtgacaaaaaacagtcaaatg

SEQ ID NO: 14252 - DNA, 120 bp, Artificial Sequence
  ENSG00000011451_63 (sequence is synthesized)
aaagtggtataggctagatgtgacaaaaaacagtcaaatgatacaagagcttataaagtcatatggcaagttcctccccaccaatcatgcagtgaagtgagggtcatgtgtgtccttgga

SEQ ID NO: 14253 - DNA, 120 bp, Artificial Sequence
  ENSG00000011451_64 (sequence is synthesized)
agagtcacctccagttcttgcagggggatgttttcctaaaactttctgagcattgctcttctctgctcaagccacttcaatacacctcaggcagcaaagtctcagcttttgagccgtggt

SEQ ID NO: 14254 - DNA, 120 bp, Artificial Sequence
  ENSG00000011451_65 (sequence is synthesized)
ctctgagggtgttggatgtgaacgaaatcaaatcggtacaatgatgactgtggcaagtgcgatgaaggaacgaacctgcagggcgcagaagacgtgtcctggggccctgccttggtttgg

SEQ ID NO: 14255 - DNA, 120 bp, Artificial Sequence
  ENSG00000011451_66 (sequence is synthesized)
aagacaggcaggcatccctgaggctgatggggagatgaaccccgaagccagagtgcttatccgtcagatctctgcttcatgtttggagtttgctcacttaacacatcagaagtggctttg

SEQ ID NO: 14256 - DNA, 120 bp, Artificial Sequence
  ENSG00000011451_67 (sequence is synthesized)
ttccgtatggcagcaagttctgcagaagcctcatttgggtggggggagttttattaaaacagtttatcatggagaattccaactatacaaaagtagagcaaacagtaaaatggactctca

SEQ ID NO: 14257 - DNA, 120 bp, Artificial Sequence
  ENSG00000011451_68 (sequence is synthesized)
tctatccatcaccaacccatgaccaatgtcttcagctgtcagagatttatcttatagctccttgcttcctcctcctctctctacctgtctgaattgtgtgaagcacatcctggccataag

SEQ ID NO: 14258 - DNA, 120 bp, Artificial Sequence
  ENSG00000011451_69 (sequence is synthesized)
atcagttaacttcttagtatttcagtatgtttctctcaacgttgtaaatgccactattacacctaaagaaatcaacaatatcaaaaagaaacagcataccttaaaaaaagttttaaaaca

SEQ ID NO: 14259 - DNA, 80 bp, Artificial Sequence
  ENSG00000011451_70 (sequence is synthesized)
gtcccccctacctcggcgcgtcccgcggggtctcctgccccggggtgcacgggcggagggctcatcccccggaccctgga

SEQ ID NO: 14260 - DNA, 120 bp, Artificial Sequence
  ENSG00000011451_71 (sequence is synthesized)
atggacttgggctctccctcgctccctaagaagagcctgcctgtccctggggccctggagcaggtggccagtcggctgagcagcaaagtggctgcagaggttcctcatggcagcaaacag

SEQ ID NO: 14261 - DNA, 120 bp, Artificial Sequence
  ENSG00000011451_72 (sequence is synthesized)
agaagcaggcggtgattgaaatgtgttgccggccttgtggggttccctaggtctgcggaacggcaccgtcgggggacggttggataacaggatgatactggagggattcttgtggttgga

SEQ ID NO: 14262 - DNA, 120 bp, Artificial Sequence
  ENSG00000011451_73 (sequence is synthesized)
tgtgcggtgcctggtttgagacccgcaagggcctgtctagccacgcccgtgcccacctgcgccacctgggcgtcagcgatccggacgccaagggatcccccatagacgtgctccacgggc

SEQ ID NO: 14263 - DNA, 120 bp, Artificial Sequence
  ENSG00000011451_74 (sequence is synthesized)
gacgtgctccacgggctcatcaggagggacggcgtccagatccgcctcccacccaggcgcggcgccctggcccacccggggcggccgcctcccacctccgcggccctctccttgcttccc

SEQ ID NO: 14264 - DNA, 120 bp, Artificial Sequence
  ENSG00000011451_75 (sequence is synthesized)
agaaggccaagctgaaggccgcgggtatggccagcccctgggggaagcaggacctctcggccgccgcagccgccggcattttctgggcctctgatgtggagccgtctcctctcaacctct

SEQ ID NO: 14265 - DNA, 120 bp, Artificial Sequence
  ENSG00000011451_76 (sequence is synthesized)
tgaggaccctgggccagcctatggagatggtaaggggaggggacgggctgtgctggagccccatccttcccaggggcccagagcattggaggggcggggctggaggggcagccgctcagc

SEQ ID NO: 14266 - DNA, 120 bp, Artificial Sequence
  ENSG00000011451_77 (sequence is synthesized)
tttcctggaagcattttgagtcactttacaaagtatgttgatgactttccttacaaccaccctgctatttaggtgtcctttctgtttcactcaggatctgggccaggtctctttctggat

SEQ ID NO: 14267 - DNA, 120 bp, Artificial Sequence
  ENSG00000011451_78 (sequence is synthesized)
ccagtttttcactatctttcctgccagtgactttgacaaatgcttactgagcttttactgggagccaggcatcgttctaagcactttacaaacatgaactcatttacatcctcacaacaa

SEQ ID NO: 14268 - DNA, 80 bp, Artificial Sequence
  ENSG00000011451_79 (sequence is synthesized)
gggacgggcccaaggccgagccggagccggggcccgggcccgcgtccgctcccgcgcccggcctgggttctgaggaaaac

SEQ ID NO: 14269 - DNA, 120 bp, Artificial Sequence
  ENSG00000011454_0 (sequence is synthesized)
ggtttgggaggcccaggcggcggagcctccgggacggcgagcggcgggcggcggaggaggagacggcaggtcgggcattaaaaaatatttaatcattcatgtgttgagactcattcttga

SEQ ID NO: 14270 - DNA, 120 bp, Artificial Sequence
  ENSG00000011454_1 (sequence is synthesized)
gttatggatgacaaggcttctgttggaaaaatcagtgtctcttcagactcagtatctactcttaatagtgaagattttgtcttggtttccaggcaaggagatgagacaccatctacaaat

SEQ ID NO: 14271 - DNA, 120 bp, Artificial Sequence
  ENSG00000011454_2 (sequence is synthesized)
aatggaagtgatgatgagaaaacaggactcaagattgtagggaatggaagtgaacagcagctgcaaaaagagctagcagatgtactgatggatcctccaatggacgaccagccaggggaa

SEQ ID NO: 14272 - DNA, 120 bp, Artificial Sequence
  ENSG00000011454_3 (sequence is synthesized)
aaggagcttgtgaaaaggtcacaactggatggtgaaggagatgggcctctttctaatcagctctccgcttcatccaccattaaccctgtgccattagtagggctccaaaaaccagagatg

SEQ ID NO: 14273 - DNA, 120 bp, Artificial Sequence
  ENSG00000011454_4 (sequence is synthesized)
agcctaccagtgaaacctggacaaggagattctgaagcttcaagtcctttcacaccagtggccgatgaggacagcgtagttttcagtaaactgacttacttaggctgtgcctcggtaaat

SEQ ID NO: 14274 - DNA, 120 bp, Artificial Sequence
  ENSG00000011454_5 (sequence is synthesized)
gctcccaggagtgaagtggaagccttaaggatgatgtccatcttaagaagccagtgtcagatttcactagatgttaccctttcagtgccgaatgtgtctgaaggaattgtgagactctta

SEQ ID NO: 14275 - DNA, 120 bp, Artificial Sequence
  ENSG00000011454_6 (sequence is synthesized)
gatcctcagacaaacactgaaatagcaaactaccctatctacaaaatcctcttctgtgtcagagggcatgatggaactcctgagagtgactgttttgctttcactgaaagtcattacaat

SEQ ID NO: 14276 - DNA, 120 bp, Artificial Sequence
  ENSG00000011454_7 (sequence is synthesized)
gcagagctcttcagaatacacgtcttccggtgtgaaatacaagaagctgtaagccggatactttacagttttgccactgccttccgccgttctgccaagcagaccccactttcagccact

SEQ ID NO: 14277 - DNA, 120 bp, Artificial Sequence
  ENSG00000011454_8 (sequence is synthesized)
gctgcaccccagactcctgacagtgacatctttaccttctctgtgtctttagaaataaaagaagatgatggtaaaggttattttagtgcagttcccaaagataaggacagacagtgcttt

SEQ ID NO: 14278 - DNA, 120 bp, Artificial Sequence
  ENSG00000011454_9 (sequence is synthesized)
aaactacgccaaggaattgataagaagattgtcatctatgtgcagcaaacaactaataaagaacttgccattgaaaggtgttttggtcttctccttagtccaggaaaagatgtacgaaat

SEQ ID NO: 14279 - DNA, 120 bp, Artificial Sequence
  ENSG00000011454_10 (sequence is synthesized)
agtgacatgcacttattagatttggaatctatgggcaaaagttcagatggaaagtcgtatgttattacggggagctggaatccaaaatccccacattttcaagttgtaaatgaagaaact

SEQ ID NO: 14280 - DNA, 120 bp, Artificial Sequence
  ENSG00000011454_11 (sequence is synthesized)
cctaaagataaagtcctgtttatgaccacagctgtagatttggtaataacagaagtacaggagcctgttcgatttctcctggagacaaaagtccgcgtttgctcacctaatgaaagatta

SEQ ID NO: 14281 - DNA, 120 bp, Artificial Sequence
  ENSG00000011454_12 (sequence is synthesized)
ttctggcccttcagcaaacgtagtactactgaaaatttctttttgaaactaaaacagataaagcaaagggagagaaagaataatactgacactttatatgaagttgtatgcttggaaagt

SEQ ID NO: 14282 - DNA, 120 bp, Artificial Sequence
  ENSG00000011454_13 (sequence is synthesized)
gaatcagaaagagagaggaggaaaactacagccagtccttcagttcgcctgccacagtctggatcgcaaagttcagtgataccttctcctccagaagatgatgaagaggaagataatgat

SEQ ID NO: 14283 - DNA, 120 bp, Artificial Sequence
  ENSG00000011454_14 (sequence is synthesized)
gaacctctcctgagtggatctggtgatgtatccaaagaatgtgcagaaaaaattcttgaaacatggggagaactgttgtcaaaatggcatctcaacttgaatgtgagaccgaagcagttg

SEQ ID NO: 14284 - DNA, 120 bp, Artificial Sequence
  ENSG00000011454_15 (sequence is synthesized)
tcatccttagtaagaaacggtgtccctgaagctcttcgaggagaagtctggcagctgctagcaggctgtcataacaatgaccacctggtagagaaataccgcattcttatcacaaaggag

SEQ ID NO: 14285 - DNA, 120 bp, Artificial Sequence
  ENSG00000011454_16 (sequence is synthesized)
tctccccaggacagtgctatcacccgggatattaaccgaacattcccagcccatgactactttaaggacacaggaggagatggacaagattccttatataaaatatgcaaggcttattct

SEQ ID NO: 14286 - DNA, 120 bp, Artificial Sequence
  ENSG00000011454_17 (sequence is synthesized)
gtgtatgatgaagagattggttattgccagggccagtcatttcttgctgctgtgctccttctccatatgcctgaagaacaggcattcagtgttctggtcaagatcatgtttgactatggg

SEQ ID NO: 14287 - DNA, 120 bp, Artificial Sequence
  ENSG00000011454_18 (sequence is synthesized)
ctcagggaacttttcaagcaaaacttcgaagatttgcattgcaaattttaccagttggagcgcctcatgcaggaatacattcctgacctgtacaaccacttcctggatataagccttgaa

SEQ ID NO: 14288 - DNA, 120 bp, Artificial Sequence
  ENSG00000011454_19 (sequence is synthesized)
gcacacatgtatgcctcccagtggtttcttactcttttcactgcaaaattccctctctacatggtcttccatatcatcgacctgcttttatgtgagggaataagtgttatttttaatgtc

SEQ ID NO: 14289 - DNA, 120 bp, Artificial Sequence
  ENSG00000011454_20 (sequence is synthesized)
ttctttagggttcagcttcctaagagataccgctcagaagaaaatgcaaaaaaactaatggaattagcctgcaacatgaagattagtcagaagaagttgaaaaaatacgagaaagaatat

SEQ ID NO: 14290 - DNA, 120 bp, Artificial Sequence
  ENSG00000011454_21 (sequence is synthesized)
cacaccatgagggaacagcaggcccagcaagaagaccccatcgagcgatttgagcgggagaataggcgtctacaagaagctaacatgaggttggaacaggaaaacgatgacttagcccat

SEQ ID NO: 14291 - DNA, 120 bp, Artificial Sequence
  ENSG00000011454_22 (sequence is synthesized)
gagctggtgaccagcaagattgcactacggaaggacctggataacgctgaggaaaaggcagatgctctgaataaggagctgctgatgaccaaacagaagttgattgatgcagaagaagag

SEQ ID NO: 14292 - DNA, 120 bp, Artificial Sequence
  ENSG00000011454_23 (sequence is synthesized)
aaaagacggctggaagaagagtctgctcagttaaaagaaatgtgccgtcgggaactcgacaaggcagaatctgagattaaaaaaaacagttctatcattggtgactataagcagatttgt

SEQ ID NO: 14293 - DNA, 120 bp, Artificial Sequence
  ENSG00000011454_24 (sequence is synthesized)
tctcagttgagtgaaagattggagaagcagcagacagccaataaggtggaaattgagaaaattcggcaaaaagtggatgactgtgagcggtgccgggaatttttcaacaaagaagggcgt

SEQ ID NO: 14294 - DNA, 120 bp, Artificial Sequence
  ENSG00000011454_25 (sequence is synthesized)
gtaaaaggcataagctcaaccaaggaggttttagatgaggacacggatgaagagaaagagacgctcaagaaccagctgagagaaatggagctagaactggcacagaccaaactccagctg

SEQ ID NO: 14295 - DNA, 120 bp, Artificial Sequence
  ENSG00000011454_26 (sequence is synthesized)
gtggaggccgagtgtaagatacaggacttggaacaccatttagggcttgccctcaatgaggtgcaggcagccaagaagacgtggtttaaccgaacactgagctccataaagacagcaacc

SEQ ID NO: 14296 - DNA, 120 bp, Artificial Sequence
  ENSG00000011454_27 (sequence is synthesized)
ggggttcaagggaaagagacttgctgagagcagctgccgcctcccgacaccttcagaaaacacgacaccttttgttgccttctttggccagatgtgtgattctgtgacttgtcccaggac

SEQ ID NO: 14297 - DNA, 120 bp, Artificial Sequence
  ENSG00000011454_28 (sequence is synthesized)
cagaatgtacctaagtcagatccatagacgcatgttggtaggtcactggaccagagcttgtgaagcaggcaacctctggggtaagactactgatactaacaggcctgctagctcagccga

SEQ ID NO: 14298 - DNA, 120 bp, Artificial Sequence
  ENSG00000011454_29 (sequence is synthesized)
cgctctggacactctagaaatcactcctcagtgtgacctcccaggcctcttccccgtgtacgtcaacacctcacccagcctaaaggctgagtttacatgatcagagttaggggatccttc

SEQ ID NO: 14299 - DNA, 80 bp, Artificial Sequence
  ENSG00000011454_30 (sequence is synthesized)
atatatatatatatatatatatagtgggggtggggcaagggatcagaaattcaaataattcttttctgcttcaatgccag

SEQ ID NO: 14300 - DNA, 120 bp, Artificial Sequence
  ENSG00000011454_31 (sequence is synthesized)
aaataattcttttctgcttcaatgccagcagaaggtcccccaggtagacatggagaagcactttgttttaaataggagggtttcatagttgcatctgaagccacctggttctgttaaact

SEQ ID NO: 14301 - DNA, 120 bp, Artificial Sequence
  ENSG00000011454_32 (sequence is synthesized)
gtatggtgcaggttttgggtttggcattattcatgtttctgatcaattctatgcaactctcatagttcctgttactttttagcattagctgccaaatgacttcaaaaggctggggtgggt

SEQ ID NO: 14302 - DNA, 89 bp, Artificial Sequence
  ENSG00000011454_33 (sequence is synthesized)
agcattagctgccaaatgacttcaaaaggctggggtgggtgacttgactgtgagactggattataacatggacaaatcttattttgctt

SEQ ID NO: 14303 - DNA, 120 bp, Artificial Sequence
  ENSG00000011454_34 (sequence is synthesized)
atatgccccgttgacagtgtttaaattccagactaggactgctgatctgcacaatttaattatgtggttattcgagcacttaatttcactcaaggttcattgggctctgctctcctccct

SEQ ID NO: 14304 - DNA, 120 bp, Artificial Sequence
  ENSG00000011454_35 (sequence is synthesized)
gccattacgggagctgtggacagagctccctcacttcaagattcctagtgtttttgcacaacaggttgtccaagtgagaaagactgagttgcgtgtctgtaaatgtctgcgcagggtgca

SEQ ID NO: 14305 - DNA, 120 bp, Artificial Sequence
  ENSG00000011454_36 (sequence is synthesized)
catgctgcgaggtctccatcctccgggcctgtccctcccagatgggctgggcctttgggccctcctcagagtatgcctgggtacaaacctcactgttcagatgggctgtaagttctcact

SEQ ID NO: 14306 - DNA, 120 bp, Artificial Sequence
  ENSG00000011454_37 (sequence is synthesized)
tcaaagctatggaatggattttagcacctttaaaaaaaaaaaaaactttgacttttaatttatatagtgatatgctgacaggctgacacgcagatggttttgtcctcttttctgcgttca

SEQ ID NO: 14307 - DNA, 120 bp, Artificial Sequence
  ENSG00000011454_38 (sequence is synthesized)
gtgttgaggcggctgcttacaagaggcactggttttgtatataaagacactcgggttgttttgtagctctttttcttattggctgtactaacgcttgctgaggttatctgtaataaggga

SEQ ID NO: 14308 - DNA, 120 bp, Artificial Sequence
  ENSG00000011454_39 (sequence is synthesized)
ggtaacaagtggcaaccccctccccaccaaccatcccctttgctgctttctgtgtctttcttgttcagttaccaaaatagctgtaagcctatctaatgctaggtgtgtggacattgtgct

SEQ ID NO: 14309 - DNA, 120 bp, Artificial Sequence
  ENSG00000011454_40 (sequence is synthesized)
aaggtagtttcagtgtgtcaactttatgaattgaaatataaaccagtaaaattgtattactgtttcttttgttggttttattttaacagcatattgattaaatattttggtacaaacaaa

SEQ ID NO: 14310 - DNA, 120 bp, Artificial Sequence
  ENSG00000011454_41 (sequence is synthesized)
gcagagctcttcagaatacacgtcttccggtgtgaaatacaagaagctgtaagtcctcaagagaaaactctctgcaaatgaaacttcaccagtgccctcactaggttgaaatgattatgg

SEQ ID NO: 14311 - DNA, 120 bp, Artificial Sequence
  ENSG00000011454_42 (sequence is synthesized)
tatttattatgatcactcataagccagatgaaattctctgctattgttttagtgattctagcctcatgggccaaaatataaattaactaaaaatttgattaactagaactttgttactac

SEQ ID NO: 14312 - DNA, 120 bp, Artificial Sequence
  ENSG00000011454_43 (sequence is synthesized)
tggctacttttgattgggttaagtaggcattctggttctaacattgacagatttgcaaaccattcttttaaatcaaaacttgttaggactgttttcattgtaatatcttcagatagtttc

SEQ ID NO: 14313 - DNA, 120 bp, Artificial Sequence
  ENSG00000011454_44 (sequence is synthesized)
taacaatttaggaagtgatttttaaattggatttatagtgcttacaaccatttcttttttaaaaccccttgtctggacatttttagtgttgcttgctttataggcctaacaaattaggta

SEQ ID NO: 14314 - DNA, 120 bp, Artificial Sequence
  ENSG00000011454_45 (sequence is synthesized)
atttaccaaaagaaataagtgggataaagataattattgccctccaaagtaggtaatcttccagccttaataaaggtattttatatcttttgataacagcccatttcctaacatgtctgg

SEQ ID NO: 14315 - DNA, 120 bp, Artificial Sequence
  ENSG00000011454_46 (sequence is synthesized)
accataaaatgatggcttttaaagggagggcttttaaaaaaaatctggatgataaaggcatataaatacataaatttaacagaggcaaagtttgaagaattttaaagcaattaaaaaaat

SEQ ID NO: 14316 - DNA, 120 bp, Artificial Sequence
  ENSG00000011454_47 (sequence is synthesized)
aattaaaaaaattgtcatattgggaacatgttgctaccttcttttagtcagataccaagtggctaactgctcacaaaaatatggccaaaccgccaggcgctgtggctcacacctgtaatc

SEQ ID NO: 14317 - DNA, 120 bp, Artificial Sequence
  ENSG00000011454_48 (sequence is synthesized)
gctttctgctaaggatgtattgtggcttttgtttggattgcagcatgcagaattacagctgttcagaggagactcattacaactcctgctgaagctcctaatcttcttcccttctcttct

SEQ ID NO: 14318 - DNA, 120 bp, Artificial Sequence
  ENSG00000011454_49 (sequence is synthesized)
accctttccccctaccctcacttggcctgaagacgttctccccagagtttaccttgctcccctggtgctatgtgtatggtgaacctggcactatggccgcgtctgggactggccagacaa

SEQ ID NO: 14319 - DNA, 120 bp, Artificial Sequence
  ENSG00000011454_50 (sequence is synthesized)
taaggctcctctggcattattacacacatgcaaagctgaccgcaatgacagcagctgcttctttgaactgttggcagcagccaagcggcagcatgaagtgacagatcactcctgagctca

SEQ ID NO: 14320 - DNA, 120 bp, Artificial Sequence
  ENSG00000011454_51 (sequence is synthesized)
agatgaactccaccttggatggtaatcagagcagccaccctttttgcctcttggcatttggctatttggaaactgtcaatttttgccttttggaagtattgattattgtctttctaactg

SEQ ID NO: 14321 - DNA, 120 bp, Artificial Sequence
  ENSG00000011454_52 (sequence is synthesized)
ctccaacagaactctaaacgcattgagaatttggggtcctgggcttataccctactctgatgatttccctccaaaaaaataggaaataccacatccataatgactgagattgcccaggcc

SEQ ID NO: 14322 - DNA, 120 bp, Artificial Sequence
  ENSG00000011454_53 (sequence is synthesized)
gcctgcaacatgaaggtaaaataattttgcattagttaagattctgtttttcacttagtgtctcactattcctgatcatttataatacataattatttatgtattatatttataacattt

SEQ ID NO: 14323 - DNA, 120 bp, Artificial Sequence
  ENSG00000011454_54 (sequence is synthesized)
gatgatgagaaaacaggactcaagagccagtgaaattaaaagtgcagcagatatgttaaacagcaaattacacatggctgaagagagaatcaaatacctggaaaatggatctgaagaaat

SEQ ID NO: 14324 - DNA, 120 bp, Artificial Sequence
  ENSG00000011454_55 (sequence is synthesized)
tatccagaagatagcattgaaagatatgaaagaccacttaagagacatgaaaattaagatgagaaggaccaaccatcttaagtgttctataataagagaatggtgaagatggaagaaaat

SEQ ID NO: 14325 - DNA, 120 bp, Artificial Sequence
  ENSG00000011454_56 (sequence is synthesized)
tcaattctgagtggtggttctactttgaaattacataagaaacaactacaaagtgtaatttgtatttgatgttcaagaattccaaaaagagaaaagacattgcaaagtcaaaggcttatt

SEQ ID NO: 14326 - DNA, 120 bp, Artificial Sequence
  ENSG00000011454_57 (sequence is synthesized)
caggcggcggagcctccgggacggcgagcggcgggcggcggaggaggagacggcagactgaccaaatatggaagtgtgcaagtcttgaacacattagtttatacaatgtggcctgaaagt

SEQ ID NO: 14327 - DNA, 120 bp, Artificial Sequence
  ENSG00000011454_58 (sequence is synthesized)
aattagttgctaaagatgccagagtgtgtgcacgtacaggctttttctttcccctccccctttcttccttttcccaagccccctcttctccctgtttcccctcctactcctttatctcct

SEQ ID NO: 14328 - DNA, 120 bp, Artificial Sequence
  ENSG00000011454_59 (sequence is synthesized)
aatctaatggcatagttttacactgtattaaaaaatgtatttccaaagaattttgttccctaggaaattattttgtttactgaagtcagtgcttcattactttgaaatagctactataaa

SEQ ID NO: 14329 - DNA, 120 bp, Artificial Sequence
  ENSG00000011454_60 (sequence is synthesized)
tatcactcctccatcacccccttccagtagaggagtccttgacttgccagatatttggttttgtagtatcagttctgaagagcgtctccatggcttctctggcctgtatcagcattgata

SEQ ID NO: 14330 - DNA, 120 bp, Artificial Sequence
  ENSG00000011454_61 (sequence is synthesized)
gatacattgccattactaaacctttaacctataatactctggttacaccctggagactacgcctgtgtattttcctgatttggctatactcgaccctggtcttcctgccttcctttttcc

SEQ ID NO: 14331 - DNA, 120 bp, Artificial Sequence
  ENSG00000011454_62 (sequence is synthesized)
actggggcaaacctggatatcatggagatgtgtttcagtggtgtgcggagtcctggcacaccgactcctacttcaccctgttcatcgtgatgatgttatatgccccagcagcccttattg

SEQ ID NO: 14332 - DNA, 120 bp, Artificial Sequence
  ENSG00000011454_63 (sequence is synthesized)
tctgcttcacctatttcaacatcttccgcatctgccaacagcacacaaaggatatcagcgaaaggcaagcccgcttcagcagccagagtggggagactggggaagtgcaggcctgtcctg

SEQ ID NO: 14333 - DNA, 120 bp, Artificial Sequence
  ENSG00000011454_64 (sequence is synthesized)
ataagcgctatgccatggtcctgtttcgaatcactagtgtattttacatcctctggttgccatatatcatctacttcttgttggaaagctccactggccacagcaaccgcttcgcatcct

SEQ ID NO: 14334 - DNA, 120 bp, Artificial Sequence
  ENSG00000011454_65 (sequence is synthesized)
tcttgaccacctggcttgctattagtaacagtttctgcaactgtgtaatttatagtctctccaacagtgtattccaaagaggactaaagcgcctctcaggggctatgtgtacttcttgtg

SEQ ID NO: 14335 - DNA, 120 bp, Artificial Sequence
  ENSG00000011454_66 (sequence is synthesized)
tgtgcaagtcagactacagccaacgacccttacacagttagaagcaaaggccctcttaatggatgtcatatctgaagtggctcagttacggggttcccgtgtgtgtgtgtgtgtgtgtgt

SEQ ID NO: 14336 - DNA, 120 bp, Artificial Sequence
  ENSG00000011465_0 (sequence is synthesized)
aactgtgctatggagtagaagcaggaggttttcaacctagtcacagagcagcacctaccccctcctcctttccacacctgcaaactcttttacttgggctgaatatttagtgtaattaca

SEQ ID NO: 14337 - DNA, 120 bp, Artificial Sequence
  ENSG00000011465_1 (sequence is synthesized)
tctcagctttgagggctcctgtggcaaattcccggattaaaaggttccctggttgtgaaaatacatgagataaatcatgaaggccactatcatcctccttctgcttgcacaagtttcctg

SEQ ID NO: 14338 - DNA, 120 bp, Artificial Sequence
  ENSG00000011465_2 (sequence is synthesized)
ggctggaccgtttcaacagagaggcttatttgactttatgctagaagatgaggcttctgggataggcccagaagttcctgatgaccgcgacttcgagccctccctaggcccagtgtgccc

SEQ ID NO: 14339 - DNA, 120 bp, Artificial Sequence
  ENSG00000011465_3 (sequence is synthesized)
cttccgctgtcaatgccatcttcgagtggtccagtgttctgatttgggtctggacaaagtgccaaaggatcttccccctgacacaactctgctagacctgcaaaacaacaaaataaccga

SEQ ID NO: 14340 - DNA, 120 bp, Artificial Sequence
  ENSG00000011465_4 (sequence is synthesized)
aatcaaagatggagactttaagaacctgaagaaccttcacgcattgattcttgtcaacaataaaattagcaaagttagtcctggagcatttacacctttggtgaagttggaacgacttta

SEQ ID NO: 14341 - DNA, 120 bp, Artificial Sequence
  ENSG00000011465_5 (sequence is synthesized)
tctgtccaagaatcagctgaaggaattgccagaaaaaatgcccaaaactcttcaggagctgcgtgcccatgagaatgagatcaccaaagtgcgaaaagttactttcaatggactgaacca

SEQ ID NO: 14342 - DNA, 120 bp, Artificial Sequence
  ENSG00000011465_6 (sequence is synthesized)
gatgattgtcatagaactgggcaccaatccgctgaagagctcaggaattgaaaatggggctttccagggaatgaagaagctctcctacatccgcattgctgataccaatatcaccagcat

SEQ ID NO: 14343 - DNA, 120 bp, Artificial Sequence
  ENSG00000011465_7 (sequence is synthesized)
tcctcaaggtcttcctccttcccttacggaattacatcttgatggcaacaaaatcagcagagttgatgcagctagcctgaaaggactgaataatttggctaagttgggattgagtttcaa

SEQ ID NO: 14344 - DNA, 120 bp, Artificial Sequence
  ENSG00000011465_8 (sequence is synthesized)
cagcatctctgctgttgacaatggctctctggccaacacgcctcatctgagggagcttcacttggacaacaacaagcttaccagagtacctggtgggctggcagagcataagtacatcca

SEQ ID NO: 14345 - DNA, 120 bp, Artificial Sequence
  ENSG00000011465_9 (sequence is synthesized)
ggttgtctaccttcataacaacaatatctctgtagttggatcaagtgacttctgcccacctggacacaacaccaaaaaggcttcttattcgggtgtgagtcttttcagcaacccggtcca

SEQ ID NO: 14346 - DNA, 120 bp, Artificial Sequence
  ENSG00000011465_10 (sequence is synthesized)
gtactgggagatacagccatccaccttcagatgtgtctacgtgcgctctgccattcaactcggaaactataagtaattctcaagaaagccctcatttttataacctggcaaaatcttgtt

SEQ ID NO: 14347 - DNA, 120 bp, Artificial Sequence
  ENSG00000011465_11 (sequence is synthesized)
aatgtcattgctaaaaaataaataaaagctagatactggaaacctaactgcaatgtggatgttttacccacatgacttattatgcataaagccaaatttccagtttaagtaattgcctac

SEQ ID NO: 14348 - DNA, 120 bp, Artificial Sequence
  ENSG00000011465_12 (sequence is synthesized)
aataaaaagaaattttgcctgccattttcagaatcatcttttgaagctttctgttgatgttaactgagctactagagatattcttatttcactaaatgtaaaatttggagtaaatatata

SEQ ID NO: 14349 - DNA, 120 bp, Artificial Sequence
  ENSG00000011465_13 (sequence is synthesized)
tgtcaatatttagtaaagcttttcttttttaatttccaggaaaaaataaaaagagtatgagtcttctgtaattcattgagcagttagctcatttgagataaagtcaaatgccaaacacta

SEQ ID NO: 14350 - DNA, 120 bp, Artificial Sequence
  ENSG00000011465_14 (sequence is synthesized)
gctctgtattaatccccatcattactggtaaagcctcatttgaatgtgtgaattcaatacaggctatgtaaaatttttactaatgtcattattttgaaaaaataaatttaaaaatacatt

SEQ ID NO: 14351 - DNA, 120 bp, Artificial Sequence
  ENSG00000011465_15 (sequence is synthesized)
caaaattactattgtatacaagcttaattgttaatattccctaaacacaattttatgaagggagaagacattggtttgttgacaataacagtacatcttttcaagttctcagctatttct

SEQ ID NO: 14352 - DNA, 120 bp, Artificial Sequence
  ENSG00000011465_16 (sequence is synthesized)
tctacctctccctatcttacatttgagtatggtaacttatgtcatctatgttgaatgtaagcttataaagcacaaagcatacatttcctgactggtctagagaactgatgtttcaattta

SEQ ID NO: 14353 - DNA, 120 bp, Artificial Sequence
  ENSG00000011465_17 (sequence is synthesized)
cccctctgctaaataaatattaaaactatcatgtgacttcatgtaatcaggctgaacatttctacaattactagatgtattagacgtaagtattttctttagttaaaccacccatgttag

SEQ ID NO: 14354 - DNA, 120 bp, Artificial Sequence
  ENSG00000011465_18 (sequence is synthesized)
aaatgttttctgtagaatttataaacaactatcaatgcagacaatttaataagcctggggatgatttacttacagtaaacatttatcaaattgtacatttgtgctatcaacaattaataa

SEQ ID NO: 14355 - DNA, 120 bp, Artificial Sequence
  ENSG00000011465_19 (sequence is synthesized)
gcaaatatgtgaaaatagtttctgtcttctatgaagttagatatttgatggttaaaacccctataaatcatagtttcatatgggaaaaaataattgaaatacagtgtaaatttaaataat

SEQ ID NO: 14356 - DNA, 120 bp, Artificial Sequence
  ENSG00000011465_20 (sequence is synthesized)
ttattaagtatagcaaataattgaaatatggtggactaaattttgtcatagaaatatgtgcaagttatagtagtggctcacatgagaggtaatcaattctgctaatagtagcagaatgag

SEQ ID NO: 14357 - DNA, 120 bp, Artificial Sequence
  ENSG00000011465_21 (sequence is synthesized)
tgcagtggaacatgaaaaacttgaggagataacagttgaggtgggtttccatagatgcataatagttcaagagcaagatttggtggggaggcactattcaagacagggactaagttcaaa

SEQ ID NO: 14358 - DNA, 120 bp, Artificial Sequence
  ENSG00000011465_22 (sequence is synthesized)
atccaagacgtatgctgggacacacctctgacaggttggcataaaggaggcttaatcaaactatttttcttcttctgaaacagaagcaataattttcatttacatttgacatatcccgag

SEQ ID NO: 14359 - DNA, 120 bp, Artificial Sequence
  ENSG00000011465_23 (sequence is synthesized)
gtaatattaacattagggaaagttactcttttccatctttccacattcttgcaggaccataaaatctgaattttccagtatttttaataagagggaagaaacctctctttttcttctctt

SEQ ID NO: 14360 - DNA, 120 bp, Artificial Sequence
  ENSG00000011465_24 (sequence is synthesized)
tttcatctcccaagagatcctcctctcatgactacagttgaataggtggtttctattggaagacattcaggaattcaaggtgcatgtccataaatggactttttttgttgttgttcagag

SEQ ID NO: 14361 - DNA, 120 bp, Artificial Sequence
  ENSG00000011465_25 (sequence is synthesized)
ctggaccttgaatgatgcatccttctctctgttgtaaccatgaataatgcacccttcatgctatagcctttaacgattcacccttcttattgtaaccttgaatgattcaccctttatggt

SEQ ID NO: 14362 - DNA, 120 bp, Artificial Sequence
  ENSG00000011465_26 (sequence is synthesized)
gtagccttgagtgacgcacccttcatgttgtagccttcaatgatgcacactccatgttatagccttgaatgatataccctttatgctgcagcctttctcttatggggaaaagcctgcaga

SEQ ID NO: 14363 - DNA, 120 bp, Artificial Sequence
  ENSG00000011465_27 (sequence is synthesized)
tatcctgctgcttaactgacaagtgtggtgagaaataagtagaaatctaaagaggggaagaccattttggacacttatctgcaaggcagatccaacacacttttccagtagtcaagctac

SEQ ID NO: 14364 - DNA, 120 bp, Artificial Sequence
  ENSG00000011465_28 (sequence is synthesized)
gttcagtatcaaaatgagaaacaggcctgattctccagcactcttgtcaacacaacttccccccatatttatatatatacacacacatatatatctttatatatatacacacatatatat

SEQ ID NO: 14365 - DNA, 120 bp, Artificial Sequence
  ENSG00000011465_29 (sequence is synthesized)
atatttatatatatatctttttgcatatatacatatatatgtatctttatttcctttgaaataaagataaatatagctgatttctttggcttcgacacttactatttgcatgactaaggg

SEQ ID NO: 14366 - DNA, 120 bp, Artificial Sequence
  ENSG00000011465_30 (sequence is synthesized)
catgactaagggaagctagttaacctttctgtgactcatttccttgtccataaaatgggaatattaattgtacatgtcttatggattggtgtgtgaattcagttagcgagtgtagaatat

SEQ ID NO: 14367 - DNA, 120 bp, Artificial Sequence
  ENSG00000011465_31 (sequence is synthesized)
aacttatagatcaaagtagagtaaatggaaagggctcaactatggtgttgctactgccattgttattacaggcacacagttcgagctataatcatttcaagggaaattcttatgtgtcag

SEQ ID NO: 14368 - DNA, 120 bp, Artificial Sequence
  ENSG00000011465_32 (sequence is synthesized)
ttctggatcgaggtctgagattctgcatttcaaacaaacttccaggaatgctgctgcttcttggtccacacttggagaaataagtcagcagagagtcctctcgtttcctattgtaccatg

SEQ ID NO: 14369 - DNA, 120 bp, Artificial Sequence
  ENSG00000011465_33 (sequence is synthesized)
tctgtcttttgtctcctgcttattggcctctgtaaggaactcacagctgctataataaagtaccaaaaactgggtggcttaaaacaacagaaacttactttctcacaattctggaggcta

SEQ ID NO: 14370 - DNA, 120 bp, Artificial Sequence
  ENSG00000011465_34 (sequence is synthesized)
aaaattcaaaatcaaggtgtcagcagggtcagattccttccaaagcctttaggagaggacctttccttgctcctcctaggtttctggttaaatctaggtgttctttgccttatggcagcg

SEQ ID NO: 14371 - DNA, 120 bp, Artificial Sequence
  ENSG00000011465_35 (sequence is synthesized)
tgactctaatttatgcctccatcttcaccctcacatggccttctctctcatgtgtttgtgtcttttctcttcttcttctatgaacatgagttatattggattaaggctcaccctaattta

SEQ ID NO: 14372 - DNA, 120 bp, Artificial Sequence
  ENSG00000011465_36 (sequence is synthesized)
gtatgaacccatcttaacttgattatatctgcaaagactctatttccaaatgaagtcagactcacaggtattgggggtttgatattgaacatatcttctgggaggagacacaacttaatc

SEQ ID NO: 14373 - DNA, 120 bp, Artificial Sequence
  ENSG00000011465_37 (sequence is synthesized)
attaatatccactttcttttttccttattaaatgtttaatttttttgttttcattaaaactgttgttcgattatgggtgcttcacataaaaggttggaaacttaaaaatttgtctctgac

SEQ ID NO: 14374 - DNA, 120 bp, Artificial Sequence
  ENSG00000011465_38 (sequence is synthesized)
ccctcctggttggaaaggcctctgttgtacatttatgctagcctaggccataccactttctgtcttcagtacagccatcttagtttattcaagtgacacagattttccagaacacagtat

SEQ ID NO: 14375 - DNA, 120 bp, Artificial Sequence
  ENSG00000011465_39 (sequence is synthesized)
tcatgatcttttaaagcatttttcttcaaagactttgatctggcaataaatgttactatgtaattctcatgacataaattaggcataacttggatctcctcttcttctgctcattcattt

SEQ ID NO: 14376 - DNA, 120 bp, Artificial Sequence
  ENSG00000011465_40 (sequence is synthesized)
gtctgaatcatcactattatcttttttatattcctttaccgttctccataatgcttttccaagaaactggtttattccacaattttattgcagaggcagctgcaggatatcataatctta

SEQ ID NO: 14377 - DNA, 120 bp, Artificial Sequence
  ENSG00000011465_41 (sequence is synthesized)
tctttatacgaaggaagaattgcctaatccctcaagtaaactaaaaatgttttatacagtcatttctcattcatccaatgttccaggcagtcccagtccaagactgccccttcacacaca

SEQ ID NO: 14378 - DNA, 120 bp, Artificial Sequence
  ENSG00000011465_42 (sequence is synthesized)
caacaactcttcacaagacttcactgtccttcagactctcctgcagcacagacattcgaggttgctgagtcgacattgcagttatttcactcttgattttgctgctcaattttaagtttc

SEQ ID NO: 14379 - DNA, 120 bp, Artificial Sequence
  ENSG00000011465_43 (sequence is synthesized)
cacacttattgctaaaacattccttctagtggatctgtttatgtattcaagcacaccatctgtcacaattatttcaaatcacaggtctgtgacagactgtcaatttcacaccacaaagta

SEQ ID NO: 14380 - DNA, 120 bp, Artificial Sequence
  ENSG00000011465_44 (sequence is synthesized)
taatagtggaaaacaaagtaaaatcaagaaagggagaacactaaacttattaaaaccatatacaagcatacgcattcaggaaactaaaacaaccttcaaagaagttgaacaattttgagc

SEQ ID NO: 14381 - DNA, 120 bp, Artificial Sequence
  ENSG00000011465_45 (sequence is synthesized)
caaaagaaagggcatatgcacaccctaccccagtataagataaccagaaaaggactgggtgagttgcctcctgagtattatgactgccatcaatcacttaggcattggagatcaggagac

SEQ ID NO: 14382 - DNA, 120 bp, Artificial Sequence
  ENSG00000011465_46 (sequence is synthesized)
tcttcccaggccacacattctgcagtgactgtgagggctgaatgaatgcttccaggccatcaggaacaagcatagaaacacaaatcaattttaaaatacactcaaaaatgtcaaaataat

SEQ ID NO: 14383 - DNA, 120 bp, Artificial Sequence
  ENSG00000011465_47 (sequence is synthesized)
ccaacttttttgtcttgatcagatatatctactagcacatattacttcattttttcagccaatatttattaataacctactgtgtgcttgacagtgttctagtggcagagacacagcagt

SEQ ID NO: 14384 - DNA, 120 bp, Artificial Sequence
  ENSG00000011465_48 (sequence is synthesized)
gcataatgccttgccctctgaagcagatgttgcagcaggaggagacattccaggacatgacaattaaagtggaggaatgtcaagcagaactggggaataagggatgtgaagggggtgaga

SEQ ID NO: 14385 - DNA, 120 bp, Artificial Sequence
  ENSG00000011465_49 (sequence is synthesized)
cttgctattttatataggatggtcggaaaaaggacttatcaggagtgacatttgagcagggagatgaagaactgaagggagcaagccaagaaaagaggccctgaatttggaaaatacatg

SEQ ID NO: 14386 - DNA, 120 bp, Artificial Sequence
  ENSG00000011465_50 (sequence is synthesized)
gcacgttccaacaagagcagagaggacaaacgtgagcagagtaaagtgagcaagaagagataatatatgatacaaggtcagaaaggtaatgacaatcgcatcctgtaggactttttaggc

SEQ ID NO: 14387 - DNA, 120 bp, Artificial Sequence
  ENSG00000011465_51 (sequence is synthesized)
cattgtaaagatgagcttttactctgagtaagacagagagctattagaggggtctcggtagaggagtgacttgattcaactgtctttgagaggatccctttgcgtgtatagactgtaagg

SEQ ID NO: 14388 - DNA, 120 bp, Artificial Sequence
  ENSG00000011465_52 (sequence is synthesized)
taacaggaataggccaagagagaatatttcggatgctagtgcaataatcaggtgagagatgatgaagactttgacctggataatagtagaaaaattgttgagaagggatcaaaatatggg

SEQ ID NO: 14389 - DNA, 120 bp, Artificial Sequence
  ENSG00000011465_53 (sequence is synthesized)
gtttgttttgatggtagagaggccagggatggctgaatgatcagatggggcatgagagagaaagaaaagaaacagagatgacttcaggaattttggcctgggccactggaaggatgaagt

SEQ ID NO: 14390 - DNA, 120 bp, Artificial Sequence
  ENSG00000011465_54 (sequence is synthesized)
caccatttactgagatggtaatgactgggaggttgagctggaagaactgagaatcaaatatctggttttgaatctgttctttttgagatgcatattcaacttccatatggaggtgtcaag

SEQ ID NO: 14391 - DNA, 120 bp, Artificial Sequence
  ENSG00000011465_55 (sequence is synthesized)
gaggatttagatctagaattttggagctcaagggaaagggttgagctgtagacataaattctagagatgccggaatatagattgtgatccttctttatcagcacagaaatgacttgactt

SEQ ID NO: 14392 - DNA, 120 bp, Artificial Sequence
  ENSG00000011465_56 (sequence is synthesized)
tgtccaaactaagcaatcatactgtacatgttagcaacacattttacagggccaatttggccttttgcaatgttctgtggtttctaagataaataaacatattatatgtttccctctgga

SEQ ID NO: 14393 - DNA, 120 bp, Artificial Sequence
  ENSG00000011465_57 (sequence is synthesized)
ggaataataagacacgccctgaaggagtacatcgtctagtgagggacagaccaagcacgcaaaacaaattgcaatataatgtgataagttctttaaaagaggtaagagcaacgtgctttg

SEQ ID NO: 14394 - DNA, 120 bp, Artificial Sequence
  ENSG00000011465_58 (sequence is synthesized)
ggagcagagaagagggagaaagcagcatcttgcctggatgagccaggggacacagaagagaagcccactatctcatttaatctttacaactctcttgcaaggttccctggttgtgaaaat

SEQ ID NO: 14395 - DNA, 120 bp, Artificial Sequence
  ENSG00000011465_59 (sequence is synthesized)
ttgtagactctttacacatcactgaacgattgatgaatgaatacacgaacatatgcatggcttggttcttgaattaatgcttggatgaatattctacaatattcttgactctagcaagct

SEQ ID NO: 14396 - DNA, 120 bp, Artificial Sequence
  ENSG00000011465_60 (sequence is synthesized)
cctttaaggacaactgtaaaaccaggaagcttagaaattccttgagtttgactggaaagagaatagaattaaagagaagaatcatctatgtatgaagcctggtctaactgataacgcagt

SEQ ID NO: 14397 - DNA, 120 bp, Artificial Sequence
  ENSG00000011465_61 (sequence is synthesized)
cagattgccatttttaagatggaaaaaggggaacatgcttgccttgagcagaaaagtttttggtggggctggagctcctaaatattattttggtcatttgcccaaaaactgaagtacacc

SEQ ID NO: 14398 - DNA, 120 bp, Artificial Sequence
  ENSG00000011465_62 (sequence is synthesized)
accaatgtcccaattatgaagttgaatacagaattataaaaaaaaattgttgaaagtcaataagaataaatcttagaatttggactcctgccacatggcagaaaaaaagcatgatgtttt

SEQ ID NO: 14399 - DNA, 120 bp, Artificial Sequence
  ENSG00000011465_63 (sequence is synthesized)
aagacaacctggcctttgtccaacatgatgtttaccagattgctgacattttctagcataacaatactattcatcattgggataaccaaaagaagggaaataaaaaaaaaaagaagtcta

SEQ ID NO: 14400 - DNA, 120 bp, Artificial Sequence
  ENSG00000011465_64 (sequence is synthesized)
agaagaggaaccagaattgaaattcacataacagtcttataaaaaaatgttattataggagcatgtttaaatatgaaaattctgcagaataaaatgaccccattgggtacccaccacaga

SEQ ID NO: 14401 - DNA, 120 bp, Artificial Sequence
  ENSG00000011465_65 (sequence is synthesized)
aacattttctttttgtgggttgttagtgaaacaaccaggcatgttctgctctggagaaaagatttcaaagtgacatctgcattaactgtcgttgctatttattaaatctgcaatgacttt

SEQ ID NO: 14402 - DNA, 120 bp, Artificial Sequence
  ENSG00000011465_66 (sequence is synthesized)
gcttcatttttcttttaaacttgtaagacattaaatatgcaaggctagcaagcttgtggtaaaccataaacattgcatttttaatgggaaacagatacaaaaccactccctcagatacaa

SEQ ID NO: 14403 - DNA, 120 bp, Artificial Sequence
  ENSG00000011465_67 (sequence is synthesized)
tccaaaggaacaggctgccaaaacaaaagtcttctcttaaagggatactcagtaactgaatgagagtgggctgctagaagaagcttaatgttgaacttaaagtggcagtgtgaataataa

SEQ ID NO: 14404 - DNA, 120 bp, Artificial Sequence
  ENSG00000011465_68 (sequence is synthesized)
ataaactaagaacaaacatgtaagaaactgaaaaacatttgtttcttctctagagaatctaggcaaaaattcccagaagataccttaaggttccctggttgtgaaaatacatgagataaa

SEQ ID NO: 14405 - DNA, 120 bp, Artificial Sequence
  ENSG00000011465_69 (sequence is synthesized)
tttctttttctctttctttctttccttttctttcttccttctttctttctttcttccttccttctttctttcttcttttttttaatatgctacaattggataatgactcaaaacagctgt

SEQ ID NO: 14406 - DNA, 120 bp, Artificial Sequence
  ENSG00000011465_70 (sequence is synthesized)
ccccaccctgcttatgggatgctgggaagcaggaagctcttcttagaagttttttttccagagtgtcttagttagaatttctatgacaaaataccataaaaaaaattaaatcatgaagca

SEQ ID NO: 14407 - DNA, 120 bp, Artificial Sequence
  ENSG00000011465_71 (sequence is synthesized)
caatttacattagctagatttcaataaagtttttgatttagaagtatggagatgaaacttaaagtcttctgtaatgctgatatttttttcagtaggggtggtgatgttggtgccatagtg

SEQ ID NO: 14408 - DNA, 120 bp, Artificial Sequence
  ENSG00000011465_72 (sequence is synthesized)
tggtctagctcctgattctttttgacatggcctcatcatttttctttatttcctctaaaaaaaaaatgagatacgtttgcagaatgtgcaggtttgttatataggtatacgtgtgccatg

SEQ ID NO: 14409 - DNA, 120 bp, Artificial Sequence
  ENSG00000011465_73 (sequence is synthesized)
gtggtttgctggccctactgacccatcctctaagttcgcccgctcaccccctaccccctgttgtgtgttttgttaccctctctgtgtccgtgtgttctcagcattcaacttccatttatg

SEQ ID NO: 14410 - DNA, 69 bp, Artificial Sequence
  ENSG00000011465_74 (sequence is synthesized)
gttagtttgctgaggatgatggcttctagtttcatccatgtccttgtaaaggacatgatcccctttatc

SEQ ID NO: 14411 - DNA, 79 bp, Artificial Sequence
  ENSG00000011465_75 (sequence is synthesized)
tattccagatgtgcatttggattggttccatgtttttgctattgtaaaatagtgctgcaataaacattatgtgtgcata

SEQ ID NO: 14412 - DNA, 120 bp, Artificial Sequence
  ENSG00000011465_76 (sequence is synthesized)
aatctaggcaaaaattcccagaagataccttaagaaattcgatactgaaaaaaagctaattttgtgttttaaaaaatcagactgattgcttggaacaaatggaataaatcgtcttgtcaa

SEQ ID NO: 14413 - DNA, 120 bp, Artificial Sequence
  ENSG00000011465_77 (sequence is synthesized)
ggtgaggactgggaatggagtgacaatgaaaaggaatgtggctagagctattaattcataccaatttatgagtggtctgacatacagcacagggactgtggacagtattgataagccata

SEQ ID NO: 14414 - DNA, 120 bp, Artificial Sequence
  ENSG00000011465_78 (sequence is synthesized)
gctcagtggatgggccaaaggggaatgaactcagtttacatggcagctcattcacattcctccttttgaaggggtgtattttcttactggagatgaaaagaaaaaaaaatctttatatca

SEQ ID NO: 14415 - DNA, 120 bp, Artificial Sequence
  ENSG00000011465_79 (sequence is synthesized)
tgattccgccatgtgtacttccttctggaagaaattccatactatgatcaggcacttctttcagaagtcctatatttactcagaacatgctttctagcagtagtttgcagaagaaaaatg

SEQ ID NO: 14416 - DNA, 120 bp, Artificial Sequence
  ENSG00000011465_80 (sequence is synthesized)
caacttctacaattggaataaactgcctataggaacccagaaaaaatataaagtatattcagtagtaacgactgaaaaacacttgaaatagcttcttcaacacatatattgtatagctat

SEQ ID NO: 14417 - DNA, 120 bp, Artificial Sequence
  ENSG00000011465_81 (sequence is synthesized)
ttaaaacccaaatacaaatgttatatgaagactttcaaaaggccgcaggataattccaatggatctatttgttcagtcattcagaagctatatcgggaacccatcatggatgagctctgc

SEQ ID NO: 14418 - DNA, 120 bp, Artificial Sequence
  ENSG00000011465_82 (sequence is synthesized)
tctaggcatggggagaaaggatgaggaagacaaatatggccctagttcttgtggatcttatgttctagtggtggtgactattactttttgaattgtgtatttgccacaggggagattgga

SEQ ID NO: 14419 - DNA, 120 bp, Artificial Sequence
  ENSG00000011465_83 (sequence is synthesized)
ttactcttcagaaattttataagcatctagagatgacctgcattattgccttgggcaggaaaataacagggttgaaaaaaatctgaacaaagaaatcaccatttgatggatatacacagg

SEQ ID NO: 14420 - DNA, 120 bp, Artificial Sequence
  ENSG00000011465_84 (sequence is synthesized)
ataatcttttctgaagttactaaaatggcgaagttcccaaaaaatgtaatgcgaattaaatttcactttgcctctgagaaaaagttaaaagaatttattattactctcgctacatgtatt

SEQ ID NO: 14421 - DNA, 120 bp, Artificial Sequence
  ENSG00000011465_85 (sequence is synthesized)
atcaaaaatgaagggttgatatttttaaggaaagaagagttggccagtcactttagtgaagttttattttttcgtaaatatagtttgcctttgcttccatgaaaaaatagctcataaacc

SEQ ID NO: 14422 - DNA, 120 bp, Artificial Sequence
  ENSG00000011465_86 (sequence is synthesized)
atgtaaaaaggcataagtcaattgttcaaagtgaaacaacaacaacaacaacaaaatgtagtcttaggaagcagcaagttcactgacttgggatctttatgacagttttgttgttgccat

SEQ ID NO: 14423 - DNA, 120 bp, Artificial Sequence
  ENSG00000011465_87 (sequence is synthesized)
tgatattgttttgtttattttttgttttcagatgagaaagttttctacatgttatcttttttctaggagctcaaagtgtacatcattcctttattatagctaggtttactgactcatata

SEQ ID NO: 14424 - DNA, 120 bp, Artificial Sequence
  ENSG00000011465_88 (sequence is synthesized)
ctaaggaagtagctaaaattataaaaataatttgtttttaaaaccatatttaactaagggaactaagtaagttccaatgagcagtggtctcatgcaaggtattttcaatattttaaaatt

SEQ ID NO: 14425 - DNA, 120 bp, Artificial Sequence
  ENSG00000011465_89 (sequence is synthesized)
tattataaaagttttaatcagctatctctaagaaaatacatttcttaaagggaaatgaaattcacttgactttaaataaaacaaatgaactcatttcatgtttttaactattatctaact

SEQ ID NO: 14426 - DNA, 120 bp, Artificial Sequence
  ENSG00000011465_90 (sequence is synthesized)
tttttaactattatctaactcttccttactttatgatgctggcaagctgttgagagccttgacatctccatctgcagaaaaatcacagtcttagaaatcctattaatcgtgtgaggtacc

SEQ ID NO: 14427 - DNA, 120 bp, Artificial Sequence
  ENSG00000011465_91 (sequence is synthesized)
tgggtcatagtagcagcttcatgcagtgttaaaattatatgatgattatatgcagtaacagatgaagaaaaaaagaaagaaagcaggagaaatgcaccacctcattcattgtaaatgcag

SEQ ID NO: 14428 - DNA, 120 bp, Artificial Sequence
  ENSG00000011465_92 (sequence is synthesized)
tatagttgattttttaatttgttttatgtcctctagtgatctaagcatgaagcttgaattattataataaagaaaataaatgcaatgcagttggggatggcaaatgttaatgcttatctg

SEQ ID NO: 14429 - DNA, 120 bp, Artificial Sequence
  ENSG00000011465_93 (sequence is synthesized)
tatcaaagactaacactgtcttcaggattatccttggtggattatccttggcagacacttaatgagcagagagaagctacaatgttgaaggacaaaagtcctttgtcatcttattatcga

SEQ ID NO: 14430 - DNA, 120 bp, Artificial Sequence
  ENSG00000011465_94 (sequence is synthesized)
aataatgtttaatacaaataaactttttaaattaaaatgtttgactactttttaccactaagaaatattcttggcaaagttaaacaacatcaaaattttaaacaattctttcaaagctaa

SEQ ID NO: 14431 - DNA, 120 bp, Artificial Sequence
  ENSG00000011465_95 (sequence is synthesized)
gaagtaaaaacctatgaaattaaaattatgtaattactctgcaggataatttgatgcctctggaaaaatgcatggactgttttagtccctaattctaatttatcacagtagtattaacac

SEQ ID NO: 14432 - DNA, 120 bp, Artificial Sequence
  ENSG00000011465_96 (sequence is synthesized)
gtgcttttttttttttttaagaggatgagggattgagacagtaaacatgaattcctcatagatattggccaagttgtttcattgaacttgttgcaacttaccttgtaattggaaccacaa

SEQ ID NO: 14433 - DNA, 120 bp, Artificial Sequence
  ENSG00000011465_97 (sequence is synthesized)
ttttatgagacccatatcttgtcttcttttatctatcatgttaagaaataaaccagttccctcttaattatagcatttatttcaaaaagcaatgttaaaaataaatgtagagttagcaaa

SEQ ID NO: 14434 - DNA, 120 bp, Artificial Sequence
  ENSG00000011465_98 (sequence is synthesized)
atggttttcaataattgtcctgaactctgctacagactaataaaacttcggtcaagttgcgagcaaaagggattatttggttccctggttgtgaaaatacatgagataaatcatgaaggc

SEQ ID NO: 14435 - DNA, 120 bp, Artificial Sequence
  ENSG00000011478_0 (sequence is synthesized)
aatccgtggtctggtacaggtttcagggcaaagcggccatgcgttccgggggccgcgggcgaccccgcctgcggctgggggaacgtggcctcatggagccactcttgccgccgaagcgcc

SEQ ID NO: 14436 - DNA, 120 bp, Artificial Sequence
  ENSG00000011478_1 (sequence is synthesized)
gcctgctaccgcgggttcggctcttgcctctgttgctggcgctggccgtgggctcggcgttctacaccatttggagcggctggcaccgcaggactgaggagctgccgctgggccgggagc

SEQ ID NO: 14437 - DNA, 120 bp, Artificial Sequence
  ENSG00000011478_2 (sequence is synthesized)
tgcgggtcccattgatcggaagcctccccgaagcccggctgcggagggtggtgggacaactggatccacagcgtctctggagcacttatctgcgccccctgctggttgtgcgaaccccgg

SEQ ID NO: 14438 - DNA, 120 bp, Artificial Sequence
  ENSG00000011478_3 (sequence is synthesized)
gcagcccgggaaatctccaagtcagaaagttcctggaggccacgctgcggtccctgacagcaggttggcacgtggagctggatcccttcacagcctcaacacccctggggccagtggact

SEQ ID NO: 14439 - DNA, 120 bp, Artificial Sequence
  ENSG00000011478_4 (sequence is synthesized)
ttggcaatgtggtggccacactggacccaagggctgcccgtcacctcacccttgcctgccattatgactcgaagctcttcccacccggatcgaccccctttgtaggggccacggattcgg

SEQ ID NO: 14440 - DNA, 120 bp, Artificial Sequence
  ENSG00000011478_5 (sequence is synthesized)
ctgtgccctgtgccctgctgctggagctggcccaagcacttgacctggagctgagcagggccaaaaaacaggcagccccggtgaccctgcaactgctcttcttggatggtgaagaggcgc

SEQ ID NO: 14441 - DNA, 120 bp, Artificial Sequence
  ENSG00000011478_6 (sequence is synthesized)
tgaaggagtggggacccaaggactccctttacggttcccggcacctggcccagctcatggagtctatacctcacagccccggccccaccaggatccaggctattgagctctttatgcttc

SEQ ID NO: 14442 - DNA, 120 bp, Artificial Sequence
  ENSG00000011478_7 (sequence is synthesized)
ttgatctcctgggagcccccaatcccaccttctacagccacttccctcgcacggtccgctggttccatcggctgaggagcattgagaagcgtctgcaccgtttgaacctgctgcagtctc

SEQ ID NO: 14443 - DNA, 120 bp, Artificial Sequence
  ENSG00000011478_8 (sequence is synthesized)
acccgtgctccatctcatctccacgcccttccctgctgtctggcacacccctgcggacaccgaggtcaatctccacccacccacggtacacaacttgtgccgcattctcgctgtgttcct

SEQ ID NO: 14444 - DNA, 120 bp, Artificial Sequence
  ENSG00000011478_9 (sequence is synthesized)
ggctgaatacctggggctctagcgtgcttggccaatgactgtggagaggactgtgagagagaaggtcccagcgggggccagtgaagctcaggcaggatctgcctagggtgtgctggtttg

SEQ ID NO: 14445 - DNA, 120 bp, Artificial Sequence
  ENSG00000011478_10 (sequence is synthesized)
tccttttcatacctttgtctcctaattgtgctacaattggaagaccttctttcttttgattgtctcaagctgccacccttcaaggacagggaagagaccactgtgggatgacagccagag

SEQ ID NO: 14446 - DNA, 120 bp, Artificial Sequence
  ENSG00000011478_11 (sequence is synthesized)
accactgtgggatgacagccagaggaataagaacttgctccctccccagaggtaaacacttggtccaaaggtttgcagggaccaaatactgttctttttttttttgagacggagtctcac

SEQ ID NO: 14447 - DNA, 70 bp, Artificial Sequence
  ENSG00000011478_12 (sequence is synthesized)
attacaggtgtgagccaccgcacctggcaaaatgctgttctttaagtcagcgaactgaaaaagtaaaaga

SEQ ID NO: 14448 - DNA, 120 bp, Artificial Sequence
  ENSG00000011485_0 (sequence is synthesized)
gctttgcggcatggcgatggcggagggcgagaggactgagtgtgctgagcccccccgggacgaacccccggctgatggagctctgaagcgggcagaggagctcaagactcaggccaatga

SEQ ID NO: 14449 - DNA, 120 bp, Artificial Sequence
  ENSG00000011485_1 (sequence is synthesized)
ctacttcaaagccaaggactacgagaacgccatcaagttctacagccaggccatcgagctgaaccccagcaatgccatctactatggcaaccgcagcctggcctacctgcgcactgagtg

SEQ ID NO: 14450 - DNA, 120 bp, Artificial Sequence
  ENSG00000011485_2 (sequence is synthesized)
ctatggctacgcgctgggagacgccacgcgggccattgagctggacaagaagtacatcaagggttattaccgccgggctgccagcaacatggcactgggcaagttccgggccgcgctgcg

SEQ ID NO: 14451 - DNA, 120 bp, Artificial Sequence
  ENSG00000011485_3 (sequence is synthesized)
agactacgagacggtggtcaaggtgaagccccatgacaaggatgccaaaatgaaataccaggagtgcaacaagatcgtgaagcagaaggcctttgagcgggccatcgcgggcgacgagca

SEQ ID NO: 14452 - DNA, 120 bp, Artificial Sequence
  ENSG00000011485_4 (sequence is synthesized)
caagcgctccgtggtggactcgctggacatcgagagcatgaccattgaggatgagtacagcggacccaagcttgaagacggcaaagtgacaatcagtttcatgaaggagctcatgcagtg

SEQ ID NO: 14453 - DNA, 120 bp, Artificial Sequence
  ENSG00000011485_5 (sequence is synthesized)
gtacaaggaccagaagaaactgcaccggaaatgtgcctaccagattctggtacaggtcaaagaggtcctctccaagctgagcacgctcgtggaaaccacactcaaagagacagagaagat

SEQ ID NO: 14454 - DNA, 120 bp, Artificial Sequence
  ENSG00000011485_6 (sequence is synthesized)
tacagtatgtggggacacccatggccagttctatgacctcctcaacatattcgagctcaacggtttaccctcggagaccaacccctatatatttaatggtgactttgtggaccgaggctc

SEQ ID NO: 14455 - DNA, 120 bp, Artificial Sequence
  ENSG00000011485_7 (sequence is synthesized)
cttctctgtagaagtgatcctcacccttttcggcttcaagctcctgtacccagatcactttcacctccttcgaggcaaccacgagacagacaacatgaaccagatctacggtttcgaggg

SEQ ID NO: 14456 - DNA, 120 bp, Artificial Sequence
  ENSG00000011485_8 (sequence is synthesized)
catgcacggaggcctgttcagtgaagacggtgtcaccctggatgacatccggaaaattgagcggaatcgacaacccccagattcagggcccatgtgtgacctgctctggtcagatccaca

SEQ ID NO: 14457 - DNA, 120 bp, Artificial Sequence
  ENSG00000011485_9 (sequence is synthesized)
gccacagaacgggcgctcgatcagcaagcggggcgtgagctgtcagtttgggcctgacgtcaccaaggccttcttggaagagaacaacctggactatatcatccgcagccacgaagtcaa

SEQ ID NO: 14458 - DNA, 120 bp, Artificial Sequence
  ENSG00000011485_10 (sequence is synthesized)
ggccgagggctacgaggtggctcacggaggccgctgtgtcaccgtcttctctgcccccaactactgcgaccagatggggaacaaagcctcctacatccacctccagggctctgacctacg

SEQ ID NO: 14459 - DNA, 120 bp, Artificial Sequence
  ENSG00000011485_11 (sequence is synthesized)
gcctcagttccaccagttcacagcagtgcctcatcccaacgtcaagcccatggcctatgccaacacgctgctgcagctaggaatgatgtgaggtgacgggcggggcggcctgcatcccag

SEQ ID NO: 14460 - DNA, 120 bp, Artificial Sequence
  ENSG00000011485_12 (sequence is synthesized)
ggcccctccaatcccaccggacccaggccctgggctaggggcagagcaggccccgccccagggcaatgttggacccccttttactttgtaaagtttgtatttattcccctttaggtttgc

SEQ ID NO: 14461 - DNA, 120 bp, Artificial Sequence
  ENSG00000011485_13 (sequence is synthesized)
agagggggtaggggcagagtcaggggctggccagagggtctgctccctggacagagaggaaggaggtggagcagctggggctgggggcacagcctgggcattctgtggggaggccgtcct

SEQ ID NO: 14462 - DNA, 120 bp, Artificial Sequence
  ENSG00000011485_14 (sequence is synthesized)
cggggtggggtggggccgagtggctgccctgcccccctcatttgcatggctcctcccccactcaagcaatagggccccgccataggaagacccccagagagagggtcagcaggggggccc

SEQ ID NO: 14463 - DNA, 120 bp, Artificial Sequence
  ENSG00000011485_15 (sequence is synthesized)
cgcctgcgcctcccctcctatagccccatggtggggctaggctggggctcacccccctccccagctattttatgtctgtaattaaatatgttaaaataaagtcattatcggaagtcagct

SEQ ID NO: 14464 - DNA, 120 bp, Artificial Sequence
  ENSG00000011485_16 (sequence is synthesized)
tgtctctggatggtggagccgaaggagctgcccgggttgggttacgcctgctcaggagatccggagggtggggaggccgcaaagtcccgctggccgggcccacccagctctgggctgacc

SEQ ID NO: 14465 - DNA, 120 bp, Artificial Sequence
  ENSG00000011485_17 (sequence is synthesized)
cccggcctggggacaaggaggctgagaccctggtaaggggcaggggtaggttctgccggtgggtgctcaggggctctgttctgacttctgtccatcccacctgccctggtcccacagcct

SEQ ID NO: 14466 - DNA, 120 bp, Artificial Sequence
  ENSG00000011485_18 (sequence is synthesized)
tttaagataattcaagaatcaggttttcgtacaaaacaatcgcaatgcttcggcactgcacaggccacagaagcctgcggctgcctccggccccgcctgctcccgctcccccaggcctgc

SEQ ID NO: 14467 - DNA, 120 bp, Artificial Sequence
  ENSG00000011485_19 (sequence is synthesized)
cctgccctttttcttctctccctgcttctccctcgccctcagcccagcagcgtctcatgggcagtccaggctttcggggccaggttgggcagcagcccctgcagccggtcccactgagtc

SEQ ID NO: 14468 - DNA, 120 bp, Artificial Sequence
  ENSG00000011485_20 (sequence is synthesized)
gagcagcgcggggccaggtgtctccagcagaaaggggcagcctgggctgagctctcccctgcaacccagccctgcctcggaggatgggctttgtgcccttggcaagaaacagcgggtctg

SEQ ID NO: 14469 - DNA, 120 bp, Artificial Sequence
  ENSG00000011485_21 (sequence is synthesized)
agcctcagtttcctcacctgcgacttgggccagtgcacctccttcatggggctgtgatggcaagcacggtcgtgaccatggtgcggggtgaaggcacggtgaccgccgagcacacctgtc

SEQ ID NO: 14470 - DNA, 120 bp, Artificial Sequence
  ENSG00000011485_22 (sequence is synthesized)
cttatttatttgtgagttcagctgtggaaccctggaaggaggggaggtcttggggctcctgtgctagtgacgggcacacttcagagagttcacccacaggtgcacacgcacgtgcacact

SEQ ID NO: 14471 - DNA, 120 bp, Artificial Sequence
  ENSG00000011485_23 (sequence is synthesized)
gtgagtgctgcagaggacatggattgggtgggctggtgctgggtgctcaggaaggcctctccagggaggcgaggtttgagctgacactgcgggaagcagaggcatctgccgtgcacagag

SEQ ID NO: 14472 - DNA, 120 bp, Artificial Sequence
  ENSG00000011485_24 (sequence is synthesized)
caaatcctatggcgctttacaggccccagtgaggaactttgttcctagggcagtgcggagccaccaaaggctttgagtgggagaggggcctgatctgaatagtgacattgaaagctctat

SEQ ID NO: 14473 - DNA, 120 bp, Artificial Sequence
  ENSG00000011485_25 (sequence is synthesized)
ctggcttcggggccacaggggattgaatggggtctggagggcagatcagcagagagggtgggggtggctcagaatcacagtcacctgtcctgaatgtccatgtccatgctggatgtcccc

SEQ ID NO: 14474 - DNA, 120 bp, Artificial Sequence
  ENSG00000011485_26 (sequence is synthesized)
tgcccaacacccacccaggctgggctgtggggtcagcacctggccgggccaggaggtggcctgtgagtgaccacccccggggaggtggacgagtccctaatgtttccctcgctccccacc

SEQ ID NO: 14475 - DNA, 120 bp, Artificial Sequence
  ENSG00000011485_27 (sequence is synthesized)
agggcccatgtgtgacctgctctggtcagatccacagccacaggtgagtctagggtggggtgcagggccggcgggtgtgggctgtggcagcaggtggaggcagacagtcaccctgaaccc

SEQ ID NO: 14476 - DNA, 120 bp, Artificial Sequence
  ENSG00000011485_28 (sequence is synthesized)
gatgtgataatactgactaaggtagacagtccacaggccatccggaaaatctggaaacattgacaaatatgcatgtcattgtcaaggtcatatccaatctgtgaaaaataaatcatctgc

SEQ ID NO: 14477 - DNA, 120 bp, Artificial Sequence
  ENSG00000011485_29 (sequence is synthesized)
atttctagacatctattagtattttaattctccccagctctccccaaaacatcctttttagctgcttttaaaaaattcagcgtccgttgaaagcaccagtgttgcctatgacctgccttt

SEQ ID NO: 14478 - DNA, 120 bp, Artificial Sequence
  ENSG00000011485_30 (sequence is synthesized)
ttacctctttttacctagaaagtctcacttcttttttgggagactcttttatgacagtgacattgcgctgtgtccaggccagttcttttataaaatgttctacgatctggattcatgcat

SEQ ID NO: 14479 - DNA, 120 bp, Artificial Sequence
  ENSG00000011485_31 (sequence is synthesized)
cagtgcggggagggccagcgggggtgggctctctggctggggaggggccacagagctcaggaactcacggatccacctccctctctccctcacaccccacccctgtgcctttcctcctga

SEQ ID NO: 14480 - DNA, 120 bp, Artificial Sequence
  ENSG00000011485_32 (sequence is synthesized)
atatcccatttctctcctggcctcttggtcttcgtttgtgttccctgcttgtgtctcttgcatgattcttcttggtctactgtgaactcttacccttcccctcacctctgccccctcccc

SEQ ID NO: 14481 - DNA, 120 bp, Artificial Sequence
  ENSG00000011485_33 (sequence is synthesized)
cccgtgttatggtatctgctcgatgaacggccacttgtagggccactaggcctatgcattgttgagtgggagggcccgtgtcccatctcccccatggctccaggcctctctgaggagagc

SEQ ID NO: 14482 - DNA, 120 bp, Artificial Sequence
  ENSG00000011485_34 (sequence is synthesized)
tgaaggaggtggactgactagtccccgcacctccccgccactggctttccgggagacaggaggcagggtcctcagtgccatactactgaggctcagcggccaagctctggctggagccac

SEQ ID NO: 14483 - DNA, 120 bp, Artificial Sequence
  ENSG00000011485_35 (sequence is synthesized)
ggtgaggaaaggattagaaacccagatcccttgagccctgccaagtcctcactccctgggaggtgctgacaggaggcttgaggccaggcaggagcagcccatctggcccatcttctgcca

SEQ ID NO: 14484 - DNA, 120 bp, Artificial Sequence
  ENSG00000011485_36 (sequence is synthesized)
acgcaccaccatgcccagctaatttttaaaattgttttatagagaggtctcagtatattgcccaggctggtctcaaattgctgggctcaagcagttctgccttggcttcccaaagtgctg

SEQ ID NO: 14485 - DNA, 120 bp, Artificial Sequence
  ENSG00000011485_37 (sequence is synthesized)
aagtgctggaattataggcgtgagccatggtgcttagccatggacctactttttgtcaagattccccccttggtacctccagtctggaaggcaccgcagtggcaagtgcgaggcccatgg

SEQ ID NO: 14486 - DNA, 120 bp, Artificial Sequence
  ENSG00000011485_38 (sequence is synthesized)
aggcaccgcagtggcaagtgcgaggcccatgggggcaagggacgcatgcacagttctgggccttgagggtgccaggctggaggacactgatgtacctggaggctgagctttctcttctgt

SEQ ID NO: 14487 - DNA, 120 bp, Artificial Sequence
  ENSG00000011485_39 (sequence is synthesized)
gtgacagagtgagaccctgtcttaaaacaaataaacaaataagaaaatggcacacatttctcctgttgagccacaagagggaggggctgtgtgaacctcatctgtagtttaggggcagct

SEQ ID NO: 14488 - DNA, 120 bp, Artificial Sequence
  ENSG00000011485_40 (sequence is synthesized)
tttattggagtttctttaccaccggctttaaatgtgttcagagtagaattaggactttcccttcagcagagcttgggatcttagccctggcagaattccagggatgtctttatgttttaa

SEQ ID NO: 14489 - DNA, 120 bp, Artificial Sequence
  ENSG00000011485_41 (sequence is synthesized)
agtcgccagcttttggaactgtgggaggcctctggtattcagccctgccgccagactgtggggccactggggtgctctccgctctccagtctcgcccccacttctgtacctcaggaggtt

SEQ ID NO: 14490 - DNA, 120 bp, Artificial Sequence
  ENSG00000011485_42 (sequence is synthesized)
tctctgcacctcactccctcgcgcccaaccttccatgaagcccgtgtgagggagttggcagggggcagaggcgggctgtgctggggctccctggagtcctcatctgtcacgccagtcccc

SEQ ID NO: 14491 - DNA, 120 bp, Artificial Sequence
  ENSG00000011485_43 (sequence is synthesized)
acacggtcatgaacttccactcatttcccctcacgcagggcatcccgccctgctgcctcgcaccagggtgaaagctgtgggctccttccccaaggaagggctcgtcctgtctgcattttg

SEQ ID NO: 14492 - DNA, 120 bp, Artificial Sequence
  ENSG00000011485_44 (sequence is synthesized)
attaatttaggtccctttgcattgccagctctcagatggctttacctttgattttgttgcttgtttggcttgttttcatctttagggcgagacagtcttttgtaacttttctaccttctg

SEQ ID NO: 14493 - DNA, 120 bp, Artificial Sequence
  ENSG00000011485_45 (sequence is synthesized)
actagaagtggatgccgcctgcattttcttaacacctttttccccagcttattttggaaatcgtcagacctacagagagctgaaagaacagtacagttaacatctgtccacccttcacac

SEQ ID NO: 14494 - DNA, 120 bp, Artificial Sequence
  ENSG00000011485_46 (sequence is synthesized)
agattcaccacttgtgaacattttaatgcattaactttatgtgtctgtctacttatttatgcatttgtatgtgtatacttttttcttttttttcccctaacccatttgaaagtaagttgc

SEQ ID NO: 14495 - DNA, 120 bp, Artificial Sequence
  ENSG00000011485_47 (sequence is synthesized)
gtatccttctcagcagagccaccctctccccacctccacccccagccgcagcctcaggtctgcacagagtgggaggagcccttgccaggaaaagacgtgaccttggaaaggagaggcctg

SEQ ID NO: 14496 - DNA, 120 bp, Artificial Sequence
  ENSG00000011485_48 (sequence is synthesized)
cctcagttccaccagttcacagcagtgggtaggcccagcagtggttcttgacatcacacgatgaggcgcgcatctcccgtcatccagggagaccagaggacccttgtctcactcccagtt

SEQ ID NO: 14497 - DNA, 120 bp, Artificial Sequence
  ENSG00000011485_49 (sequence is synthesized)
ggctcttagtcacagccccgctttgtctttgacatggacgtttgtgatgatcacgttcctcccgctccccgtgtctgaagagtgctccctgactggctgccgtctcctccctgtcgggtc

SEQ ID NO: 14498 - DNA, 120 bp, Artificial Sequence
  ENSG00000011485_50 (sequence is synthesized)
tggctgggttctccagagggagtgctgcggaggggacacagcagaggccccatgctcgtgatgtatgttgcagatcattttcccccattctgtccttttttgttaaattgtggtaaaaag

SEQ ID NO: 14499 - DNA, 120 bp, Artificial Sequence
  ENSG00000011485_51 (sequence is synthesized)
cacataacataaactgtaccaccttaaccatttgaaagtatatatcccagactgtcttttatctttagacttcacttgtggtttgttgccacagtacaagtttatttttatgaagccaaa

SEQ ID NO: 14500 - DNA, 120 bp, Artificial Sequence
  ENSG00000011485_52 (sequence is synthesized)
ctgtcaggtactgggcacccgggaaccctgggatggcatcacagcactgccagccgcgggcactgagcaaaacgacaggagaagggcggccatgacagccaacaccaaacaggagtcgtg

SEQ ID NO: 14501 - DNA, 120 bp, Artificial Sequence
  ENSG00000011523_0 (sequence is synthesized)
gttttgggctgcggttggagggccgcagttgcagtcagggtccgccagctcggggccagcgcatggggctgctgagaccgctccggacgtgcgaagcgttcgcggtgcggtaggaagctg

SEQ ID NO: 14502 - DNA, 120 bp, Artificial Sequence
  ENSG00000011523_1 (sequence is synthesized)
aagtcttcagcagaaccctgacctaggtagggagtctcaatggccctgggtgaagaaaaggcagaagcggaagcatctgaagacacaaaggcccagtcctatgggagagggagctgcagg

SEQ ID NO: 14503 - DNA, 120 bp, Artificial Sequence
  ENSG00000011523_2 (sequence is synthesized)
gagcgggagctggacatcccagggcccatgagtggggagcagcccccacgcctggaagctgagggagggctcatctcccctgtatggggggcagaagggatacctgcccctacttgctgg

SEQ ID NO: 14504 - DNA, 120 bp, Artificial Sequence
  ENSG00000011523_3 (sequence is synthesized)
attgggactgaccctggcggcccctctagagcccaccagccacaggccagtgatgccaacagagagcccgtagctgagaggtctgagcctgcactcagtggcctgcctcctgccaccatg

SEQ ID NO: 14505 - DNA, 120 bp, Artificial Sequence
  ENSG00000011523_4 (sequence is synthesized)
gggtctggagaccttctgctctccggggaaagccaggtggagaagaccaagctttcttcctccgaggagttccctcagactctgagccttcccagaacaacaactatttgctcaggacat

SEQ ID NO: 14506 - DNA, 120 bp, Artificial Sequence
  ENSG00000011523_5 (sequence is synthesized)
gatgctgataccgaagatgatccatccctagcagatttgccccaggcactggacctcagccagcagcctcacagctcaggtctctcttgcctgtcacagtggaagtccgtgctgagccca

SEQ ID NO: 14507 - DNA, 120 bp, Artificial Sequence
  ENSG00000011523_6 (sequence is synthesized)
ggttccgcagctcagccttccagctgcagcatctctgcttcctccacaggcagcagtctccagggtcaccaggagagggcggagcctcgtggtggttctctggccaaggtctcctcctcc

SEQ ID NO: 14508 - DNA, 120 bp, Artificial Sequence
  ENSG00000011523_7 (sequence is synthesized)
ctggagccggtcgtcccccaggaaccttcctctgtggtggggctaggacctcggccccagtggtcaccacagcctgtgttctctgggggtgatgcttctgggctaggcaggagacgcctc

SEQ ID NO: 14509 - DNA, 120 bp, Artificial Sequence
  ENSG00000011523_8 (sequence is synthesized)
tccttccaggctgagtactgggcctgtgtgctgccagattccctgcctccatcacccgaccgccactcccctctctggaacccaaataaagagtatgaagatctgcttgactatacttac

SEQ ID NO: 14510 - DNA, 120 bp, Artificial Sequence
  ENSG00000011523_9 (sequence is synthesized)
ccactgaggcccgggcctcagctcccaaagcaccttgatagccgtgtgccagctgaccctgtcctgcaggactccggggtagacctggatagcttctctgtctctccagcaagcaccctc

SEQ ID NO: 14511 - DNA, 120 bp, Artificial Sequence
  ENSG00000011523_10 (sequence is synthesized)
aaatcacctactaatgtctcccccaactgcccaccagcagaggccactgccctgccattttctgggcccagagagccaagccttaagcagtggccctccagagtaccccagaaacagggt

SEQ ID NO: 14512 - DNA, 120 bp, Artificial Sequence
  ENSG00000011523_11 (sequence is synthesized)
ggcatgggcttggcatcttggagccaacttgcatctacccccagagccccaggcagtagggatgctcgttgggagcgcagagagccagccctgaggggtgcgaaggaccggctgactata

SEQ ID NO: 14513 - DNA, 120 bp, Artificial Sequence
  ENSG00000011523_12 (sequence is synthesized)
ggcaagcaccttgatatgggctctccccagctaaggacacgggacagagggtggccctcgcccaggccagagagggagaagaggaccagccagagtgcccggcgccctacctgcacagag

SEQ ID NO: 14514 - DNA, 120 bp, Artificial Sequence
  ENSG00000011523_13 (sequence is synthesized)
tctaggtggaaatcagaagaggaagtggaaagtgatgacgagtatcttgccctccccgctcggctgacacaggtttctagcctggtttcgtatctaggatccatttctaccttggttacc

SEQ ID NO: 14515 - DNA, 120 bp, Artificial Sequence
  ENSG00000011523_14 (sequence is synthesized)
ctgcccactggggatatcaaagggcagagccccttggaagtgtcagacagtgatgggccagcttccttcccttcaagctccagccaaagccagcttccccctggagctgccctccaagga

SEQ ID NO: 14516 - DNA, 120 bp, Artificial Sequence
  ENSG00000011523_15 (sequence is synthesized)
tctggggatcctgagggccagaatccctgtttcctgcgctccttcgtccgtgcccacgactccgcaggggaaggcagtctggggagcagccaggccctcggggtctcctctggactgctg

SEQ ID NO: 14517 - DNA, 120 bp, Artificial Sequence
  ENSG00000011523_16 (sequence is synthesized)
aaaacacgcccctccttgccagctaggttggaccggtggccattctcagacccagatgttgaagggcagcttcccaggaaaggaggagaacagggaaaagaatcactggtgcaatgtgtg

SEQ ID NO: 14518 - DNA, 120 bp, Artificial Sequence
  ENSG00000011523_17 (sequence is synthesized)
aagacattttgctgtcagctggaagagctgatctgctggctgtataatgttgcagatgttactgaccacgggactgcagccaggtccaatcttacaagtctcaagtcttctctgcagctt

SEQ ID NO: 14519 - DNA, 120 bp, Artificial Sequence
  ENSG00000011523_18 (sequence is synthesized)
taccggcaatttaagaaagatatagatgaacatcagtctctgacggagagtgtcttacagaagggggagattcttcttcagtgcctgttggagaacaccccagttttagaggatgtcctt

SEQ ID NO: 14520 - DNA, 120 bp, Artificial Sequence
  ENSG00000011523_19 (sequence is synthesized)
gggaggatcgcaaagcagtctggtgagctggagagccacgcagatcgcctgtatgactctatcttggcctctctggacatgctggctggctgcacccttatccctgacaaaaagcccatg

SEQ ID NO: 14521 - DNA, 120 bp, Artificial Sequence
  ENSG00000011523_20 (sequence is synthesized)
gcggcaatggagcacccatgtgaaggggtttaacctggcatcttctcaggcagaggtgcaacctgtcggccaaacactggctagtgagaaaaaaaaccttcaagaagtccttgcaagagc

SEQ ID NO: 14522 - DNA, 120 bp, Artificial Sequence
  ENSG00000011523_21 (sequence is synthesized)
cattcaacactgaagtcaagggggaaaccttcaatatactagctttaaaatgcctttctcctccctgaatggagggctgagttactatttttatttacaatgaatccttccaaactaagg

SEQ ID NO: 14523 - DNA, 120 bp, Artificial Sequence
  ENSG00000011523_22 (sequence is synthesized)
ttttccttttggtgcttctccacaaagagcgtgtagctttgcaatttttgataaaataagacgtgttgccttcccctctatcccattaaaaaagagcagataaagctcaaactattccac

SEQ ID NO: 14524 - DNA, 120 bp, Artificial Sequence
  ENSG00000011523_23 (sequence is synthesized)
ctggtagggtcatttaccaagggctggtaggagattccgaatactcaatattctcaggcatgcaagaggacctaagagactgaaaaaagtgaattgttggccagaaaccttgggtctttt

SEQ ID NO: 14525 - DNA, 120 bp, Artificial Sequence
  ENSG00000011523_24 (sequence is synthesized)
aggtagaaagaagagatttttaaccctttgtctgcaaaagaaaaagggttaaatgaagcatctatacagatgactttgggagattatgacaccttttgccatcttcagggcttacgtctt

SEQ ID NO: 14526 - DNA, 120 bp, Artificial Sequence
  ENSG00000011523_25 (sequence is synthesized)
tactttcttggctaaccagtttcttagaagaaaatgtgtcagggacttggggatctacagtcatgctttagcatggctatggagctaattatcaagcttaaagggtaactttgggaggac

SEQ ID NO: 14527 - DNA, 120 bp, Artificial Sequence
  ENSG00000011523_26 (sequence is synthesized)
tcctcccttcactcctagtctcccttggaagagcagtccaggctcagggaagggaacggataggatgacacagtaagtacagaaactgaagctgtcaatagtgaaggaaaaaggggaatt

SEQ ID NO: 14528 - DNA, 120 bp, Artificial Sequence
  ENSG00000011523_27 (sequence is synthesized)
cttcgttgctttggcattgacacataagtactttgattaaaaaaaaaaaaaactatggatcaaccattcaaagcatcaattctatagctttttgcagcaagatgatcagttattgctggt

SEQ ID NO: 14529 - DNA, 120 bp, Artificial Sequence
  ENSG00000011523_28 (sequence is synthesized)
aactgcagattctacagaaaagcacttttaaagttctgttgggccatgaatgaacctggaaggaggaaagcacagtaacaatggaaactaaagtcctattattaatgtgacttttctgct

SEQ ID NO: 14530 - DNA, 120 bp, Artificial Sequence
  ENSG00000011523_29 (sequence is synthesized)
tcagaatttctgagactttatagtcactggaaaatagccattaaattctttaaagattagctcttcaacagtagctacacataaaatgcagtatttcaagtgcctgatgctgctgtggta

SEQ ID NO: 14531 - DNA, 120 bp, Artificial Sequence
  ENSG00000011523_30 (sequence is synthesized)
tgctttatcataatgcttaagggcatgatcaaaattaaaatggcttatgagtttgccatattaatcatcttagttccatacacactgagactttaaaagggaaaaaccactctagcaaat

SEQ ID NO: 14532 - DNA, 120 bp, Artificial Sequence
  ENSG00000011523_31 (sequence is synthesized)
aattgtcaattataaacctgtatgtaaaacattcttgaaaacctagagttggttaaaaaggtagagatgtctgacggcctcttcttaaattgatatattttaccttctcttagatgtaca

SEQ ID NO: 14533 - DNA, 120 bp, Artificial Sequence
  ENSG00000011523_32 (sequence is synthesized)
tttataagtaggaacatgtccttccactgagtatgttactgaatagcccttaggaaattaaacccatttatttactaatatttgacaggcatagaagtgtattaattagcataaaagttg

SEQ ID NO: 14534 - DNA, 120 bp, Artificial Sequence
  ENSG00000011523_33 (sequence is synthesized)
gagatgaaaaccctatagaaacaaattggccaatattatactaattgaatgcagaatgtggcattctattcccattcaactaataatcagcttcaactgacaggaatttgcacagaatgt

SEQ ID NO: 14535 - DNA, 120 bp, Artificial Sequence
  ENSG00000011523_34 (sequence is synthesized)
tacacaataccctgtttcccaagaaagtactaccttacctagagatgatctaagatatttttgttcatcctctgaataaggtgagactaaagggtgctaactccctggacctggctgtga

SEQ ID NO: 14536 - DNA, 120 bp, Artificial Sequence
  ENSG00000011523_35 (sequence is synthesized)
ctggacctggctgtgaatgctactgaagagtatcaacacaactgttaattataccgccgtgctttaagtttaagacttaccttaaaactcaagctgaaggctgggcacggtggctcatgc

SEQ ID NO: 14537 - DNA, 120 bp, Artificial Sequence
  ENSG00000011523_36 (sequence is synthesized)
ttgtctcaaaaaaaaaaaatcaagctgaaattgtttcagcctagtaagatgctgccagcagcatttctatgagcaaacatggccaaattagagtcaagtagctgagcttgctaactgcac

SEQ ID NO: 14538 - DNA, 120 bp, Artificial Sequence
  ENSG00000011523_37 (sequence is synthesized)
tgtgatgccacactggaataacttagtagtcccttaaaattaatggaagttaaatccacagggaagtgatgatactcaaagctggatcagcagtttcaagatctgggttcttggagatcc

SEQ ID NO: 14539 - DNA, 120 bp, Artificial Sequence
  ENSG00000011523_38 (sequence is synthesized)
ataggtaagctcagcaaatggaagacgacgtcaacacggctattttgaagcttaggtgggaatggaacacaaagaaggtttgaggtaagatatgctggaaaggcaagatgtaggctaagg

SEQ ID NO: 14540 - DNA, 120 bp, Artificial Sequence
  ENSG00000011523_39 (sequence is synthesized)
gaaattcaatccaaggtcgaagaataggaaattactgctcagaccacaatgactatcattctgaaaggatttcacagagtgtgcagctgcttagatttaagaacactcttcttcactatg

SEQ ID NO: 14541 - DNA, 120 bp, Artificial Sequence
  ENSG00000011523_40 (sequence is synthesized)
taaactaatttatggcagcaccttatatttagaacaagtggtaattccctttactaagtgaacagattattaaaacctgtagtagctttgaaccgtttgtacttgaaaatgggggtataa

SEQ ID NO: 14542 - DNA, 120 bp, Artificial Sequence
  ENSG00000011523_41 (sequence is synthesized)
aggggtatatattttttccagaaccacatttattggcgtatacatagaagcaaatcttaaggcatgctgaaatttgttgtaaatcccaatctttactgccatggggaaaagaacgctgga

SEQ ID NO: 14543 - DNA, 120 bp, Artificial Sequence
  ENSG00000011523_42 (sequence is synthesized)
attttccaaacttaagtctgtaaatatgctcatcttaagttcatgtaatgtttccgctaactcaccaagaataagctgacaatttaaacaacttttactgtgtaaaaatgaagtgcacgg

SEQ ID NO: 14544 - DNA, 120 bp, Artificial Sequence
  ENSG00000011523_43 (sequence is synthesized)
catggcatcacagtatcttgacatttgttttgtgtcatttagctactttagaaaatagtttctgaactctttccccctttatactgtattaaggcaaaaacaaaacttctgaagcattaa

SEQ ID NO: 14545 - DNA, 120 bp, Artificial Sequence
  ENSG00000011523_44 (sequence is synthesized)
agatcttcaccaaaataactattggtaacttcaggaatttgtcagttgccttatgtgaggatgaatagatccaccaagcacgcctataatacaaagtaaactatgatttttattgtgaaa

SEQ ID NO: 14546 - DNA, 120 bp, Artificial Sequence
  ENSG00000011523_45 (sequence is synthesized)
ttttcatagatggaaaattgaatattctgtccatttcattttacaattatcttaccacttatttttgtaccatgtatttcaattgcctgtttagtgaaaaataaaaattaaaaaaaccta

SEQ ID NO: 14547 - DNA, 120 bp, Artificial Sequence
  ENSG00000011523_46 (sequence is synthesized)
tgttcatgttgaccaggcactttttatgtgccaggcattgtgctgtaccttatcttattcagtcctcacaacttttaccaggtaagcactgttctcattttactttttggaggaaagagc

SEQ ID NO: 14548 - DNA, 120 bp, Artificial Sequence
  ENSG00000011523_47 (sequence is synthesized)
ccaagaatgagacccaggtagactatttgcagaggctgagctcttagccactacccttggctgcttcctaactcagaggtattctgaacaaaaaaggttttgtgcacagatgcctttagg

SEQ ID NO: 14549 - DNA, 120 bp, Artificial Sequence
  ENSG00000011523_48 (sequence is synthesized)
aaacactgggctaaacaaaggtaagtggctttcttgactgcaggacttctagagcttcatttgccacagtggtttaagtgcaaagttaggggcattggatgtactgttgcctagactttg

SEQ ID NO: 14550 - DNA, 120 bp, Artificial Sequence
  ENSG00000011523_49 (sequence is synthesized)
tggccaccggaccatcttgtgaaccaaatgacttaatatctggaggtataaagaacactgcgtggaatagggttatcggtgtcaggcatctgaatttgaaacatggcactgctgtctttg

SEQ ID NO: 14551 - DNA, 120 bp, Artificial Sequence
  ENSG00000011523_50 (sequence is synthesized)
gaatgttggctcagcctcttgagtttgctcatttgtaaaatgtggagccctgccttcttaggatgttgtgtgcattaaataattcatgttgagggcttcggtgcattcccagacatgttg

SEQ ID NO: 14552 - DNA, 120 bp, Artificial Sequence
  ENSG00000011523_51 (sequence is synthesized)
aaggttcaggaatgtgcctgtccaggaacgtgtcctagcgcttgcggggggctttcaccttcccaggaggtgacgtggttattttgtcttgtgaggtaggtaggacacgttatcatggac

SEQ ID NO: 14553 - DNA, 120 bp, Artificial Sequence
  ENSG00000011523_52 (sequence is synthesized)
ccctctttactgataaaagattgagatgccatgaggtaaagttgttcttcgctatagcttcaggttagtcatgattttagtcatttattttacgttcacttttccagagaaacatggacg

SEQ ID NO: 14554 - DNA, 120 bp, Artificial Sequence
  ENSG00000011523_53 (sequence is synthesized)
tatctggctccaagatgctgattctagttagtaatggtgctgatccaagaattggtttccatggcaggcacgcctcttctgggctgctccattcctacctgcaaggctgggttttctcag

SEQ ID NO: 14555 - DNA, 120 bp, Artificial Sequence
  ENSG00000011523_54 (sequence is synthesized)
gcggtcctggctctggcttgttccctcacaagagtgtggctaaattactcgattacaaagtaaaatctcaaataaccaatgtctggtatgttatagctcagttgactattatacctgaaa

SEQ ID NO: 14556 - DNA, 120 bp, Artificial Sequence
  ENSG00000011523_55 (sequence is synthesized)
tctaattagagcttcacattcttaaagcggaacgctttgtaaaatgcatgaattatttcccaggccaaatggagcttgaagatacaatatatttatctcaaatcaaaaatactttaggtt

SEQ ID NO: 14557 - DNA, 120 bp, Artificial Sequence
  ENSG00000011523_56 (sequence is synthesized)
ttgggctggcaggtgcagtgggacaagtcttttatcccagctactctggaagctgagacaggaagattgcttgagcccaggagttcgagtacagcctgagcaacatagcaagaccccccc

SEQ ID NO: 14558 - DNA, 120 bp, Artificial Sequence
  ENSG00000011523_57 (sequence is synthesized)
ccctcaaaaaaaagttttttcttaattaaaaacaaaaatactttagggtgatttgcaatataattttccaaatgtctcagggattataaatacagacttgcactattatgacgcctctag

SEQ ID NO: 14559 - DNA, 120 bp, Artificial Sequence
  ENSG00000011523_58 (sequence is synthesized)
ttatgtatggctattgaagtaaaattaaagactcagatttttttatttgcactagccacattctgcatgttcaaccatcacatttgtctagtggctaccacgtagaacagtgcagatgta

SEQ ID NO: 14560 - DNA, 120 bp, Artificial Sequence
  ENSG00000011523_59 (sequence is synthesized)
gaacacttccatcaccacataaagtcctattggactgcaccactatttaaagatctgagctgaaattgtactgactccagaatctacaatagggcattttgatggtatttaaatagaaat

SEQ ID NO: 14561 - DNA, 120 bp, Artificial Sequence
  ENSG00000011523_60 (sequence is synthesized)
atagaaatctaggccaggcaccttggctcacactattaatcccagcactttgggatgctgaggctggaggatcgcttgagcccgggagttccagaccagcctgggcaatatagtgagacc

SEQ ID NO: 14562 - DNA, 120 bp, Artificial Sequence
  ENSG00000011523_61 (sequence is synthesized)
attagaattcctgttgttcgttaagctcttaccatgtgctttgcacacatgggtgtatttaatccttaccttctgaggagctggtgctatgaggggaggaaagtgaggctcgaagtcata

SEQ ID NO: 14563 - DNA, 120 bp, Artificial Sequence
  ENSG00000011523_62 (sequence is synthesized)
catctggaaggtggcaaagttaggggctggcctcaggtttgtctggctccaaaacccatgtccttcaacactgtgctgtcctgcttccctcgggggtgagttcttcatcaagcagataaa

SEQ ID NO: 14564 - DNA, 120 bp, Artificial Sequence
  ENSG00000011523_63 (sequence is synthesized)
aaattcagtgaagaagctgagatgaaccagtcattctgctagtgttcagttaccactggcgtgtgaactgagcaggatggggtctggggcgacctcctgggtttggacgtgtcctgttag

SEQ ID NO: 14565 - DNA, 120 bp, Artificial Sequence
  ENSG00000011523_64 (sequence is synthesized)
cgacagagtgattgagggtttcatctgccaggagacgcttctcagaggtaagggactgttttccagcttcagcatgacagagctgtctgagttctgcttgctcacaccctggatacctgt

SEQ ID NO: 14566 - DNA, 120 bp, Artificial Sequence
  ENSG00000011523_65 (sequence is synthesized)
ggaggaaggaagaaccttggagaggactggagatgggagtcatcttgcttcccagacaggcagggtctcagtgctgctgctggcagtgcatattgcctggttcttgcctcaggcagcaga

SEQ ID NO: 14567 - DNA, 120 bp, Artificial Sequence
  ENSG00000011523_66 (sequence is synthesized)
ctttgcattttaaggtctttcctaaatactgtctagacccacaaggaaactcctgggttgtcatctaagaaagaaattgggtttgatttttacccaagtgctttttgtccctttgatcat

SEQ ID NO: 14568 - DNA, 120 bp, Artificial Sequence
  ENSG00000011523_67 (sequence is synthesized)
gtggtcagcgcggccgaagggcgtggttggcgctcggtcctgccctgcgcgttttgggctgcggttggagggccgcagttgcagtcagggtccgccagctcggggccagcgcatggggct

SEQ ID NO: 14569 - DNA, 120 bp, Artificial Sequence
  ENSG00000011566_0 (sequence is synthesized)
ggaagccatgttggagtttcaccccgagcgaggggctgcgagggttctcctctccttgtgggtgtgaccaggttcggcgcggcggcgggccgcggggggcggggacgattggccgcttgt

SEQ ID NO: 14570 - DNA, 80 bp, Artificial Sequence
  ENSG00000011566_1 (sequence is synthesized)
cgtcgtccgcagcggcgtgaggggagcggcggcggcggcggcggccgcagcgtggagccgggtgattgtgaccgccgggg

SEQ ID NO: 14571 - DNA, 120 bp, Artificial Sequence
  ENSG00000011566_2 (sequence is synthesized)
ccctgagcggcccccctcccctgcccgggagggaggcggggggcacctggggcccgccatgaaccccggcttcgatttgtcccgccggaacccgcaggaggacttcgagctgattcagcg

SEQ ID NO: 14572 - DNA, 120 bp, Artificial Sequence
  ENSG00000011566_3 (sequence is synthesized)
catcggcagcggcacctacggcgacgtctacaaggcacggaatgttaacactggtgaattagcagcaattaaagtaataaaattggaaccaggagaagactttgcagttgtgcagcaaga

SEQ ID NO: 14573 - DNA, 120 bp, Artificial Sequence
  ENSG00000011566_4 (sequence is synthesized)
aattattatgatgaaagactgtaaacacccaaatattgttgcttattttggaagctatctcaggcgagataagctttggatttgcatggagttttgtggaggtggttctttacaggatat

SEQ ID NO: 14574 - DNA, 120 bp, Artificial Sequence
  ENSG00000011566_5 (sequence is synthesized)
ttatcacgtaactggacctctgtcagaactgcaaattgcatatgttagcagagaaacactgcagggattatattatcttcacagtaaaggaaaaatgcacagagatataaagggagctaa

SEQ ID NO: 14575 - DNA, 120 bp, Artificial Sequence
  ENSG00000011566_6 (sequence is synthesized)
cattctattaacggataatggtcatgtgaaattggctgattttggagtatctgcacagataacagctacaattgccaaacggaagtctttcattggcacaccatattggatggctccaga

SEQ ID NO: 14576 - DNA, 120 bp, Artificial Sequence
  ENSG00000011566_7 (sequence is synthesized)
agttgcagctgttgagaggaaggggggttacaatcaactctgtgatctctgggcagtgggaatcactgccatagaacttgcagagcttcagcctcctatgtttgacttacacccaatgag

SEQ ID NO: 14577 - DNA, 120 bp, Artificial Sequence
  ENSG00000011566_8 (sequence is synthesized)
agcattatttctaatgacaaaaagcaattttcagcctcctaaactaaaggataaaatgaaatggtcaaatagttttcatcactttgtgaaaatggcacttaccaaaaatccgaaaaaaag

SEQ ID NO: 14578 - DNA, 120 bp, Artificial Sequence
  ENSG00000011566_9 (sequence is synthesized)
acctactgctgaaaaattattacagcatccttttgtaacacaacatttgacacggtctttggcaatcgagctgttggataaagtaaataatccagatcattccacttaccatgatttcga

SEQ ID NO: 14579 - DNA, 120 bp, Artificial Sequence
  ENSG00000011566_10 (sequence is synthesized)
tgatgatgatcctgagcctcttgttgctgtaccacatagaattcactcaacaagtagaaacgtgagagaagaaaaaacacgctcagagataacctttggccaagtgaaatttgatccacc

SEQ ID NO: 14580 - DNA, 120 bp, Artificial Sequence
  ENSG00000011566_11 (sequence is synthesized)
cttaagaaaggagacagaaccacatcatgaacttcccgacagtgatggttttttggacagttcagaagaaatatactacactgcaagatctaatctggatctgcaactggaatatggaca

SEQ ID NO: 14581 - DNA, 120 bp, Artificial Sequence
  ENSG00000011566_12 (sequence is synthesized)
aggacaccaaggtggttactttttaggtgcaaacaagagtcttctcaagtctgttgaagaagaattgcatcagcgaggacacgtcgcacatttagaagatgatgaaggagatgatgatga

SEQ ID NO: 14582 - DNA, 120 bp, Artificial Sequence
  ENSG00000011566_13 (sequence is synthesized)
atctaaacactcaactctgaaagcaaaaattccacctcctttgccaccaaagcctaagtctatcttcataccacaggaaatgcattctactgaggatgaaaatcaaggaacaatcaagag

SEQ ID NO: 14583 - DNA, 120 bp, Artificial Sequence
  ENSG00000011566_14 (sequence is synthesized)
atgtcccatgtcagggagcccagcaaagccatcccaagttccacctagaccaccacctcccagattacccccacacaaacctgttgccttaggaaatggaatgagctccttccagttaaa

SEQ ID NO: 14584 - DNA, 120 bp, Artificial Sequence
  ENSG00000011566_15 (sequence is synthesized)
tggtgaacgagatggctcattatgtcaacaacagaatgaacatagaggcacaaacctttcaagaaaagaaaagaaagatgtaccaaagcctattagtaatggtcttcctccaacacctaa

SEQ ID NO: 14585 - DNA, 120 bp, Artificial Sequence
  ENSG00000011566_16 (sequence is synthesized)
agtgcatatgggtgcatgtttttcaaaagtttttaatgggtgtcccttgaaaattcactgtgcatcatcatggataaacccagatacaagagatcagtacttgatatttggtgccgaaga

SEQ ID NO: 14586 - DNA, 120 bp, Artificial Sequence
  ENSG00000011566_17 (sequence is synthesized)
agggatttataccctcaatcttaatgaacttcatgaaacatcaatggaacagctattccctcgaaggtgtacatggttgtatgtaatgaacaattgcttgctatcaatatctggtaaagc

SEQ ID NO: 14587 - DNA, 120 bp, Artificial Sequence
  ENSG00000011566_18 (sequence is synthesized)
ccataatttaccagggctttttgattatgcaagacaaatgcaaaagttacctgttgctattccagcacacaaactccctgacagaatactgccaaggaaattttctgtatcagcaaaaat

SEQ ID NO: 14588 - DNA, 120 bp, Artificial Sequence
  ENSG00000011566_19 (sequence is synthesized)
ccctgaaaccaaatggtgccagaagtgttgtgttgtaagaaatccttacacgggccataaatacctatgtggagcacttcagactagcattgttctattagaatgggttgaaccaatgca

SEQ ID NO: 14589 - DNA, 120 bp, Artificial Sequence
  ENSG00000011566_20 (sequence is synthesized)
gaaatttatgttaattaagcacatagattttcctataccatgtccacttagaatgtttgaaatgctggtagttcctgaacaggagtaccctttagtttgtgttggtgtcagtagaggtag

SEQ ID NO: 14590 - DNA, 120 bp, Artificial Sequence
  ENSG00000011566_21 (sequence is synthesized)
agacttcaaccaagtggttcgatttgagacggtcaatccaaattctacctcttcatggtttacagaatcagataccccacagacaaatgttactcatgtaacccaactggagagagatac

SEQ ID NO: 14591 - DNA, 120 bp, Artificial Sequence
  ENSG00000011566_22 (sequence is synthesized)
catccttgtatgcttggactgttgtataaaaatagtaaatctccaaggaagattaaaatctagcaggaaattgtcatcagaactcacctttgatttccagattgaatcaatagtgtgcct

SEQ ID NO: 14592 - DNA, 120 bp, Artificial Sequence
  ENSG00000011566_23 (sequence is synthesized)
acaagacagtgtgctagctttctggaaacatggaatgcaaggtagaagttttagatctaatgaggtaacacaagaaatttcagatagcacaagaattttcaggctgcttggatctgacag

SEQ ID NO: 14593 - DNA, 120 bp, Artificial Sequence
  ENSG00000011566_24 (sequence is synthesized)
ggtcgtggttttggaaagtaggccaactgataaccccacagcaaatagcaatttgtacatcctggcgggtcatgaaaacagttactgagaattgttgtgctttgacagttaactctagaa

SEQ ID NO: 14594 - DNA, 120 bp, Artificial Sequence
  ENSG00000011566_25 (sequence is synthesized)
agaaagaacactaccactgcaacattaatggatgcttgaagctgtacaaaagctgcagtaacctgtcttcagttactttgtaatttattgtggcatgagataagatggggaaaattttgt

SEQ ID NO: 14595 - DNA, 120 bp, Artificial Sequence
  ENSG00000011566_26 (sequence is synthesized)
tttaagtggtatggatatatttagcatattgaaccacacaagtgcttaattcattgttatgtaatctttgtacatataggcagtattttttctgtgaaacttcatattgctgaagacata

SEQ ID NO: 14596 - DNA, 120 bp, Artificial Sequence
  ENSG00000011566_27 (sequence is synthesized)
cactaagaatttatgtagataatgtacttttatgagatgtacaagtaagtgtcttatctgtacagatgtaaatgttgatgaaaatgcaattggggttaatattttaagaattctttagta

SEQ ID NO: 14597 - DNA, 120 bp, Artificial Sequence
  ENSG00000011566_28 (sequence is synthesized)
tattcttgggtgtggctatattacaaaatgggatgctggcaatgaaacaatacatttaacactattgtatttttattatatgtaatttagtaatatgaatataaatcttgtaacttttaa

SEQ ID NO: 14598 - DNA, 120 bp, Artificial Sequence
  ENSG00000011566_29 (sequence is synthesized)
aattgtaatggaggctgtaatcattttataatctttttaattttaatgcaagtacactggtgtttatatttgcacaaagtattgatatgtgatgtattaagtcacaaaagtaagctgtga

SEQ ID NO: 14599 - DNA, 120 bp, Artificial Sequence
  ENSG00000011566_30 (sequence is synthesized)
cattgtctataagcatttggctccacaaatgtatttggattgttttctatgtgaagcaaaccaattataattaaccacatgttgtagtaactggtctttttatatttaagcagaatcctg

SEQ ID NO: 14600 - DNA, 120 bp, Artificial Sequence
  ENSG00000011566_31 (sequence is synthesized)
taagattgcttgtctttgcttaaaaacaatacctttgaacatttttgaatcacagaatagcggtaccatgatagaatactgcaattgtggtcagaattacagtatgcacaaagaattaat

SEQ ID NO: 14601 - DNA, 120 bp, Artificial Sequence
  ENSG00000011566_32 (sequence is synthesized)
tagcattattaaagagtcctcactaaacatttcatatgatcacactgaagaactgtaacattccatagagtgaagtggttcaaatttctcttggaatttttacttttgttggccttattt

SEQ ID NO: 14602 - DNA, 120 bp, Artificial Sequence
  ENSG00000011566_33 (sequence is synthesized)
tatgatccttttcatatttcttttgacttagagtattaatacatggccaaaataatttagttactacctcatacaaacaatataatggttactacacatcacaggaacttagttttggtt

SEQ ID NO: 14603 - DNA, 120 bp, Artificial Sequence
  ENSG00000011566_34 (sequence is synthesized)
taagtcatttttgattgcttttttccaatggaatatgtatataccaggttttagcaaaatgcacacttttggctctttttggtatatgttctttatattttaatgtgagtatatacacta

SEQ ID NO: 14604 - DNA, 120 bp, Artificial Sequence
  ENSG00000011566_35 (sequence is synthesized)
agaacaaactaaattgtgatttatgatcttcatttattttaatgataatggttttaaaatatgttcctgattgtacatattgtaaaataaacatgttttttaacatgctgttgtatagta

SEQ ID NO: 14605 - DNA, 120 bp, Artificial Sequence
  ENSG00000011566_36 (sequence is synthesized)
tcaattctattgacttcctgctgctttctcatcaggatctgcaactggaatatggacaaggacaccaaggtggttactttttaggtgcaaacaagagtcttctcaagtctgttgaagaag

SEQ ID NO: 14606 - DNA, 120 bp, Artificial Sequence
  ENSG00000011566_37 (sequence is synthesized)
cctattctgttaattgcttacagtagataaccatacctttcagtttctctagttttatgttttgtaattttaagggcagtttttcctgatatgtattaggagggaaaataattaaaaggt

SEQ ID NO: 14607 - DNA, 120 bp, Artificial Sequence
  ENSG00000011566_38 (sequence is synthesized)
gctacctgataacttttagggagagtaaaacttttgctgactctcttttatcccagtagtatattagtaactatatttatctcccctattagctttgagaagtctatcgagtctttatgc

SEQ ID NO: 14608 - DNA, 120 bp, Artificial Sequence
  ENSG00000011566_39 (sequence is synthesized)
gttctctcttacattcctgaaaattaaagttttgtatactgctcctaatggtaaaatcctcgacctggtctgatacaggcttagtctcccaaaagtgtaaatgtgtttgcccgtgcacca

SEQ ID NO: 14609 - DNA, 120 bp, Artificial Sequence
  ENSG00000011566_40 (sequence is synthesized)
ctggagaacaaatccttcaggagtcttctcaagtctgttgaagaagaattgcatcagcgaggacacgtcgcacatttagaagatgatgaaggagatgatgatgaatctaaacactcaact

SEQ ID NO: 14610 - DNA, 120 bp, Artificial Sequence
  ENSG00000011566_41 (sequence is synthesized)
tttgcaaagtgctgttttgctttcatttttacttaaaatgaagtattttttcctatttgggtaattttgtggaccaaactatgacttgattatcaaatgctgcatatcattgattttgtt

SEQ ID NO: 14611 - DNA, 120 bp, Artificial Sequence
  ENSG00000011566_42 (sequence is synthesized)
taacaagtgcttagtgatcacactcttgttctaaaatttttctactttgtactttcaaattatatcagacattttctctctgaattttttattctttttctgcaagtttaaaactagttt

SEQ ID NO: 14612 - DNA, 120 bp, Artificial Sequence
  ENSG00000011566_43 (sequence is synthesized)
ttttcttgtactttgccataattttacattgcatttagtgcctttgcttttgacatatgtgttaactttataaaatttttctcaaagtttctatacctagaaaatcaaaatgatttattg

SEQ ID NO: 14613 - DNA, 120 bp, Artificial Sequence
  ENSG00000011566_44 (sequence is synthesized)
gctgggattacaggcaacgtgccatggcacccggcctttttattctaattttaatagatgagctagtatgtcagcaccagttttgaactcatcctttgtgcactgatctataacagtagc

SEQ ID NO: 14614 - DNA, 120 bp, Artificial Sequence
  ENSG00000011566_45 (sequence is synthesized)
cccaaatattgttgcttattttggaagctatctcaggtatactgtttgtttcccttttgaaaagcaataatgatttcatcacctaatgcattaaacaaaataaagttagttttaatacca

SEQ ID NO: 14615 - DNA, 120 bp, Artificial Sequence
  ENSG00000011566_46 (sequence is synthesized)
agacaggagactctgccacaaaggccgggggaccatgggctggtcacccagttcctgggccccaggttccaactctgaaaagagagggttggacacgtgacttataaattcccttccagc

SEQ ID NO: 14616 - DNA, 120 bp, Artificial Sequence
  ENSG00000011566_47 (sequence is synthesized)
cttaatgtcctaaaatcatgtaattataactttaaaatattttgcggtggtaaacctaaaatgtttataaaagagagtccataatttagatttttctgcattacctgaatttctgtgaca

SEQ ID NO: 14617 - DNA, 120 bp, Artificial Sequence
  ENSG00000011590_0 (sequence is synthesized)
gccgtcatctctaagaaacaaccataccactgaatgctactgtgtacttacaaaccacactcatattcgtcacgtcatttcatcttcacccccacctccaaatgaggcttgaaatgagat

SEQ ID NO: 14618 - DNA, 120 bp, Artificial Sequence
  ENSG00000011590_1 (sequence is synthesized)
gagatgttcctccctcccctttcaaccatggacctcacactgtggacttcctcttagagcctctgagttaggtacccaagccaaggcacaatgtccctgccccccataagactgcccagc

SEQ ID NO: 14619 - DNA, 120 bp, Artificial Sequence
  ENSG00000011590_2 (sequence is synthesized)
ccctatggctctgatcggctggtacagctagcagccaggctccggccagcactctgtgatactctgatcaccgtagggagccaggagttccccgcccacagcctggtgctagcaggtgtc

SEQ ID NO: 14620 - DNA, 120 bp, Artificial Sequence
  ENSG00000011590_3 (sequence is synthesized)
agccagcagctgggccgcaggggccagtgggctctgggagaaggcatcagcccttctacctttgcccagctcctgaactttgtgtatggggagagtgtagagctgcagcctggagagcta

SEQ ID NO: 14621 - DNA, 120 bp, Artificial Sequence
  ENSG00000011590_4 (sequence is synthesized)
aggccccttcaggaggcggccagggccttgggagtgcagtccctggaagaggcatgctggagggctcgaggggacagggctaaaaagccagatccaggcctgaagaaacatcaggaggag

SEQ ID NO: 14622 - DNA, 120 bp, Artificial Sequence
  ENSG00000011590_5 (sequence is synthesized)
ccagagaaaccctcaaggaatcctgagagagaactgggggaccctggagagaagcagaaaccagaacaggtttctagaactggtgggagagaacaggagatgttgcacaagcactcgcca

SEQ ID NO: 14623 - DNA, 120 bp, Artificial Sequence
  ENSG00000011590_6 (sequence is synthesized)
ccaagaggcagacccgagatggcaggagcaacgcaggaggctcagcaggaacagaccaggtcaaaggagaaacgcctccaagcccctgttggccaaaggggagcagatgggaagcatgga

SEQ ID NO: 14624 - DNA, 120 bp, Artificial Sequence
  ENSG00000011590_7 (sequence is synthesized)
gtgctcacgtggttgagggaaaatccagggggctctgaggaaagtctgcgcaagctccctggcccccttcccccagcaggctccctgcaaaccagcgtcacccctaggccctcgtgggct

SEQ ID NO: 14625 - DNA, 120 bp, Artificial Sequence
  ENSG00000011590_8 (sequence is synthesized)
gcatcctgctgatgccgcccagatatggcattcccttctaccatagcacccccaccactggagcctggcaggaggtctggcgggaacagaggatcccactgtccctaaatgcccccaaag

SEQ ID NO: 14626 - DNA, 120 bp, Artificial Sequence
  ENSG00000011590_9 (sequence is synthesized)
ggctctggagccagaaccagttggcctcctccagccctaccccaggttccctcccccagggccccgcacagctcagccctggggagatggaagagtctgatcaggggcacacaggcgcac

SEQ ID NO: 14627 - DNA, 120 bp, Artificial Sequence
  ENSG00000011590_10 (sequence is synthesized)
ttgcaacctgtgcgggtcatgaggacaaggcaggctgcccacctcgcccgcaccctcccccggcccctcctgctcggtctcggccctatgcgtgctctgtctgtggaaagaggttttcac

SEQ ID NO: 14628 - DNA, 120 bp, Artificial Sequence
  ENSG00000011590_11 (sequence is synthesized)
tcaagcatcagatggagacgcactaccgagtccacacaggagagaagcccttctcctgtagcctttgtcctcagcgctcccgggacttctcggccatgaccaagcacctgcggacacacg

SEQ ID NO: 14629 - DNA, 120 bp, Artificial Sequence
  ENSG00000011590_12 (sequence is synthesized)
gggccgctccgtaccgctgctccctgtgcggggccggctgtcccagcctggcctccatgcaggcgcacatgcgcggtcactcgcccagccaactcccgcccggatggaccatccgctcca

SEQ ID NO: 14630 - DNA, 120 bp, Artificial Sequence
  ENSG00000011590_13 (sequence is synthesized)
ccttcctctactcctcctcgaggccgtctcggccctcgacctctccctgttgtccttcttcctccaccacctgacggggtgtcggtagcgtcttagccaagagtccaattaaagaacgaa

SEQ ID NO: 14631 - DNA, 120 bp, Artificial Sequence
  ENSG00000011590_14 (sequence is synthesized)
aagcgggccggctcggcttctgacctggcaccgctgctacggcggcctagcaaattccgccccagaagcgccccaggaagggcgccgagtgccctctcctggacgatcgcgggtcgcaga

SEQ ID NO: 14632 - DNA, 120 bp, Artificial Sequence
  ENSG00000011590_15 (sequence is synthesized)
agcccaggccagcgagccctacagagtgaggacactgaagtgtgcaggagcgaaggttaacagtaggggagattgtcgatctcatcaccataataaagagtttcctgtgccctcccttca

SEQ ID NO: 14633 - DNA, 120 bp, Artificial Sequence
  ENSG00000011590_16 (sequence is synthesized)
tttgactctaggagttcacaaacgaagtgaggagacaggaggctaggggcagaatgtgtgcattctggaggtagagggggtggtctctcctgcaggcagaaggcagaggcagggttagaa

SEQ ID NO: 14634 - DNA, 120 bp, Artificial Sequence
  ENSG00000011590_17 (sequence is synthesized)
aaccacaccccttcggggggactgtggcagactgatacttgggacatccaatggaggcctgtgaggtcaggggcggggctagctccagggggggccccaggagccccaacagtagttcag

SEQ ID NO: 14635 - DNA, 120 bp, Artificial Sequence
  ENSG00000011590_18 (sequence is synthesized)
agcatgcggtgtcctggaagaagctacaagcggtgagtgatagcctctctccagctgaggccttcttcccatcacaactctttctgtctcctccctgccaacctagagccctctccctga

SEQ ID NO: 14636 - DNA, 120 bp, Artificial Sequence
  ENSG00000011590_19 (sequence is synthesized)
cctgcagaggggcttggagaagcagaagtggcagtatctgctatcttttacgtcagagactgccaactggcagacttcccgcacgcctgtcttaaacccactactagatatttctgttaa

SEQ ID NO: 14637 - DNA, 120 bp, Artificial Sequence
  ENSG00000011600_0 (sequence is synthesized)
acttgcctggacgctgcgccacatcccaccggcccttacactgtggtgtccagcagcatccggcttcatggggggacttgaaccctgcagcaggctcctgctcctgcctctcctgctggc

SEQ ID NO: 14638 - DNA, 120 bp, Artificial Sequence
  ENSG00000011600_1 (sequence is synthesized)
tgtaagtggtctccgtcctgtccaggcccaggcccagagcgattgcagttgctctacggtgagcccgggcgtgctggcagggatcgtgatgggagacctggtgctgacagtgctcattgc

SEQ ID NO: 14639 - DNA, 120 bp, Artificial Sequence
  ENSG00000011600_2 (sequence is synthesized)
gagtcgccttatcaggagctccagggtcagaggtcggatgtctacagcgacctcaacacacagaggccgtattacaaatgagcccgaatcatgacagtcagcaacatgatacctggatcc

SEQ ID NO: 14640 - DNA, 120 bp, Artificial Sequence
  ENSG00000011600_3 (sequence is synthesized)
agccattcctgaagcccaccctgcacctcattccaactcctaccgcgatacagacccacagagtgccatccctgagagaccagaccgctccccaatactctcctaaaataaacatgaagc

SEQ ID NO: 14641 - DNA, 120 bp, Artificial Sequence
  ENSG00000011600_4 (sequence is synthesized)
gggacttgaaccctgcagcaggctcctgctcctgcctctcctgctggctgtaagtggtctccgtcctgtccaggcccaggcccagagcggtaggcctagacccagcagtccctctctcta

SEQ ID NO: 14642 - DNA, 120 bp, Artificial Sequence
  ENSG00000011600_5 (sequence is synthesized)
cctcccagagacctccctgtctccgtctctcccacaccctttccaaacctccctgccgctgacccccctccccacagttcccagcacacactgacctcccctgacccctgtgctgcagat

SEQ ID NO: 14643 - DNA, 120 bp, Artificial Sequence
  ENSG00000011600_6 (sequence is synthesized)
cttgcctagatgggggtggggggctgggtaaactcccagatctcaaacatccaaagggatggtaatggaggtgctgatttggaatgacaaaacaccctcaactcaccactctgcctgtct

SEQ ID NO: 14644 - DNA, 120 bp, Artificial Sequence
  ENSG00000011638_0 (sequence is synthesized)
tgtcttgaaggtggtctgagctttctcactccaagccagtcgtgtgggaagggacactctctgagcctcagtttcctcagctgtcaacctctcagggcttgttctagtggctccgaaagc

SEQ ID NO: 14645 - DNA, 120 bp, Artificial Sequence
  ENSG00000011638_1 (sequence is synthesized)
cagtgggagcgagcgcgctttgcaaagccttgggcgccgggccttggcgcgcctttgccggatccttccggccacgggcggggcgagcccagaggagaagagccgaggggcggtgcccgg

SEQ ID NO: 14646 - DNA, 120 bp, Artificial Sequence
  ENSG00000011638_2 (sequence is synthesized)
gccagggggcggaggcaggcggctctggctccctctcgggacgctctttccttcttcctcttgttcctcctcctgcctctcttcgcttcgcctgcaaacgcggtgggggctgctcggcgg

SEQ ID NO: 14647 - DNA, 120 bp, Artificial Sequence
  ENSG00000011638_3 (sequence is synthesized)
tcaggagcagcaagagacagagcgacatgagagattggaccgcgggctgcactggagaatttactggtaggataattcatccctaaagagattgaagtgagcttcagaatggcaaaagag

SEQ ID NO: 14648 - DNA, 120 bp, Artificial Sequence
  ENSG00000011638_4 (sequence is synthesized)
gagccccagagtatctcaagggacttgcaggaactgcagaagaagctgtctctgctgatagactccttccagaataactcaaaggtggtggcctttatgaagtctccagtgggtcagtac

SEQ ID NO: 14649 - DNA, 120 bp, Artificial Sequence
  ENSG00000011638_5 (sequence is synthesized)
ttggacagccatccgtttctggccttcaccttgctggtgttcattgtcatgtcggccgttcctgttggattcttcctgctcatcgtggtgcttaccaccctggctgctctgctgggggtc

SEQ ID NO: 14650 - DNA, 120 bp, Artificial Sequence
  ENSG00000011638_6 (sequence is synthesized)
ataatattggaaggattggtcatctctgtgggtggcttctcactgctctgcatcctctgtggtttgggcttcgtatcactcgccatgtcggggatgatgatagcatcttatgtagtggtc

SEQ ID NO: 14651 - DNA, 120 bp, Artificial Sequence
  ENSG00000011638_7 (sequence is synthesized)
tccagcctcatcagctgctggttttctcccaggccactgacacagcaaaacaccagttgtgactttctgccagccatgaagtctgcagaattcgaggggctttaccaggaatgagtgact

SEQ ID NO: 14652 - DNA, 120 bp, Artificial Sequence
  ENSG00000011638_8 (sequence is synthesized)
cttggctgtgtcctctcgctttttcacttacttgtaggatcccgcagcagccaatttagggattgtgttgttcttgtgttggttcccatgtaaagaagcagcagagaaatgcgatggttc

SEQ ID NO: 14653 - DNA, 120 bp, Artificial Sequence
  ENSG00000011638_9 (sequence is synthesized)
aacagctcgccctgccccaagtatgcagacttgaccttggcggggtcctgggcttctagagtctagcccgttgaccccaaagcctcagggcttatgtccaacggtcccattgggagcaac

SEQ ID NO: 14654 - DNA, 120 bp, Artificial Sequence
  ENSG00000011638_10 (sequence is synthesized)
agtgattgtttatagttttttgttttcagaaatgagggcagctgttaattttttcactcatgtgaaacaaaatgaaaaaaaaaatccaaaacagaacaagcccttctgtggtatttgctt

SEQ ID NO: 14655 - DNA, 120 bp, Artificial Sequence
  ENSG00000011638_11 (sequence is synthesized)
tttatcagaaagaacagcaacatttggcctctccaagttggaaaatagagtccaaatgtaactttgtggccaagagtattttcaaaaaagtctaaaggtgtagtttccactgtaactgtt

SEQ ID NO: 14656 - DNA, 120 bp, Artificial Sequence
  ENSG00000011638_12 (sequence is synthesized)
actgtaactgttgagtactgttaagtactgttaatcttttacatatttgcacttggtactgttgtattgttctaaagagcttgtcctttaagtaatttctttcttttttttttttttttt

SEQ ID NO: 14657 - DNA, 74 bp, Artificial Sequence
  ENSG00000011638_13 (sequence is synthesized)
gccatttcttaaaataaaaatgctaaaggactagtaagtaaaaataaaacttcctatgggatttcccagtggaa

SEQ ID NO: 14658 - DNA, 120 bp, Artificial Sequence
  ENSG00000011638_14 (sequence is synthesized)
gttcctcctcctgcctctcttcgcttcgcctgcaaacgcggtgggggctgctcggcggtcaggagcaggttaccctccgtctgcatgcccaccatcaaggtatgaggatggtagaagctc

SEQ ID NO: 14659 - DNA, 120 bp, Artificial Sequence
  ENSG00000011638_15 (sequence is synthesized)
aataactcaaagctgccccaacacagcaggatctcactggactctgatgatggagtgtccaggctgggcagtgctggctccaaggtggtggcctttatgaagtctccagtgggtcagtac

SEQ ID NO: 14660 - DNA, 120 bp, Artificial Sequence
  ENSG00000011638_16 (sequence is synthesized)
ggagtatttgaagaagacctagcatcactaacatgcggttgggagagggaggcaaagcttttttaaacgattgtggatattctatgatagtccaccaaaactccgccactgacacagcaa

SEQ ID NO: 14661 - DNA, 120 bp, Artificial Sequence
  ENSG00000011677_0 (sequence is synthesized)
gagcgcgcgcaagctagcgagcaaaccagagagacagaccgagagagggaccaggagagagacccagagagagaagaagaagccagaagccgagctctgtcagggctcaacctccaactt

SEQ ID NO: 14662 - DNA, 120 bp, Artificial Sequence
  ENSG00000011677_1 (sequence is synthesized)
gtttcagttcattcatccttctctcctttccgctcagactgtagagctcggtctctccaagtttgtgcctaagaagatgataatcacacaaacaagtcactgttacatgaccagccttgg

SEQ ID NO: 14663 - DNA, 120 bp, Artificial Sequence
  ENSG00000011677_2 (sequence is synthesized)
gattcttttcctgattaatattctccctggaaccactggtcaaggggaatcaagacgacaagaacccggggactttgtgaagcaggacattggcgggctgtctcctaagcatgccccaga

SEQ ID NO: 14664 - DNA, 120 bp, Artificial Sequence
  ENSG00000011677_3 (sequence is synthesized)
tattcctgatgacagcactgacaacatcactatcttcaccagaatcttggatcgtcttctggacggctatgacaaccggctgcgacctgggcttggagatgcagtgactgaagtgaagac

SEQ ID NO: 14665 - DNA, 120 bp, Artificial Sequence
  ENSG00000011677_4 (sequence is synthesized)
tgacatctacgtgaccagttttggccctgtgtcagacactgacatggagtacactattgatgtattttttcggcagacatggcatgatgaaagactgaaatttgatggccccatgaagat

SEQ ID NO: 14666 - DNA, 120 bp, Artificial Sequence
  ENSG00000011677_5 (sequence is synthesized)
ccttccactgaacaatctcctggctagtaagatctggacaccggacaccttcttccacaatggcaagaaatcagtggctcataacatgaccacgcccaacaagctgctcagattggtgga

SEQ ID NO: 14667 - DNA, 120 bp, Artificial Sequence
  ENSG00000011677_6 (sequence is synthesized)
caacggaaccctcctctatacaatgaggttaacaattcatgctgagtgtcccatgcatttggaagattttcccatggatgtgcatgcctgcccactgaagtttggaagctatgcctatac

SEQ ID NO: 14668 - DNA, 120 bp, Artificial Sequence
  ENSG00000011677_7 (sequence is synthesized)
aacagctgaagtggtttattcttggactctcggaaagaacaaatccgtggaagtggcacaggatggttctcgcttgaaccagtatgaccttttgggccatgttgttgggacagagataat

SEQ ID NO: 14669 - DNA, 120 bp, Artificial Sequence
  ENSG00000011677_8 (sequence is synthesized)
ccggtctagtacaggagaatatgtcgtcatgacaacccacttccatctcaagcgaaaaattggctactttgtgatccagacctacttgccatgtatcatgactgtcattctgtcacaagt

SEQ ID NO: 14670 - DNA, 120 bp, Artificial Sequence
  ENSG00000011677_9 (sequence is synthesized)
gtcgttctggctcaacagagagtctgttcctgcccgtacagtctttggtgtcaccactgtgcttaccatgaccaccttgagtatcagtgccagaaattccttacctaaagtggcatatgc

SEQ ID NO: 14671 - DNA, 120 bp, Artificial Sequence
  ENSG00000011677_10 (sequence is synthesized)
gacggccatggactggttcatagccgtctgttatgcctttgtattttctgcactgattgaatttgccactgtcaactatttcaccaagcggagttgggcttgggaaggcaagaaggtgcc

SEQ ID NO: 14672 - DNA, 120 bp, Artificial Sequence
  ENSG00000011677_11 (sequence is synthesized)
agaggccctggagatgaagaagaaaacaccagcagccccagcaaagaaaaccagcactaccttcaacatcgtggggaccacctatcccatcaacctggccaaggacactgaattttccac

SEQ ID NO: 14673 - DNA, 120 bp, Artificial Sequence
  ENSG00000011677_12 (sequence is synthesized)
catctccaagggcgctgctcccagtgcctcctcaaccccaacaatcattgcttcacccaaggccacctacgtgcaggacagcccgactgagaccaagacctacaacagtgtcagcaaggt

SEQ ID NO: 14674 - DNA, 120 bp, Artificial Sequence
  ENSG00000011677_13 (sequence is synthesized)
tgacaaaatttcccgcatcatctttcctgtgctctttgccatattcaatctggtctattgggccacatatgtcaaccgggagtcagctatcaagggcatgatccgcaaacagtagatagt

SEQ ID NO: 14675 - DNA, 120 bp, Artificial Sequence
  ENSG00000011677_14 (sequence is synthesized)
ggtggcagtgcagcaaccagagcactgtataccccgtgaagcatccaggcacccaaaccccggggctccccttcgcgtatttcaggattctcctttttacccctctaccaagctgtgacc

SEQ ID NO: 14676 - DNA, 120 bp, Artificial Sequence
  ENSG00000011677_15 (sequence is synthesized)
cccagtataaccccatcaaagccaaacactgccatttgtccagttgctcatcttagtctgccaatctcccctagctgagggcactgcatgtattttattgcactctgcccgctgcaaaaa

SEQ ID NO: 14677 - DNA, 120 bp, Artificial Sequence
  ENSG00000011677_16 (sequence is synthesized)
gaacaagagattctactctccatagtggaagccttggctgtttgagaggcccagaacaaggagaattgttgactcccatctagatcagatgactctaacttactaggcagccaggttagg

SEQ ID NO: 14678 - DNA, 120 bp, Artificial Sequence
  ENSG00000011677_17 (sequence is synthesized)
ctaggccatgtgatcctgcgtgccacctcccctgccttcagcaaggcctactaggcataagtactgatagcaaaggtgggagccagttctacacccccaacccatttattggtttggaaa

SEQ ID NO: 14679 - DNA, 120 bp, Artificial Sequence
  ENSG00000011677_18 (sequence is synthesized)
ttagtggggacaattggtactaaccaccgtctaccatgtatggccaaaataaatagaactagctctgccagcctggcaccaagatggctggtgccctgccatgtccagcccctcgggaaa

SEQ ID NO: 14680 - DNA, 120 bp, Artificial Sequence
  ENSG00000011677_19 (sequence is synthesized)
atagtcccctccttggtacatctctcctccagaaaatcttcttcccccactgcctttggcacccttgtagccaactgagcactacttaatttggactcattaccacctgtaaacttttca

SEQ ID NO: 14681 - DNA, 120 bp, Artificial Sequence
  ENSG00000011677_20 (sequence is synthesized)
ggaaaaaatgatcaagcattttttatttatatcgaaaagttgcaaatagaaacaaagtgatctagatttaaaaaaaacatttttttaaaatatgggagagatacaaaagtcacctccctg

SEQ ID NO: 14682 - DNA, 120 bp, Artificial Sequence
  ENSG00000011677_21 (sequence is synthesized)
ccaaggcaactagcctatactggattgggtaagaggtttggagtggatggtagttgaggattgaagtctggctcaaaagagaaggctactggcagatgaaagtcaaattcttccttccat

SEQ ID NO: 14683 - DNA, 120 bp, Artificial Sequence
  ENSG00000011677_22 (sequence is synthesized)
acactccacattccacaccctggcccaggcacttttctcccaccatatcgggaacctccggtcctctgttgatgccgattctatgaggggtgaattggaaattcatacaaataaatatct

SEQ ID NO: 14684 - DNA, 120 bp, Artificial Sequence
  ENSG00000011677_23 (sequence is synthesized)
ctagtcaatattgagtcaactagatcattaactttattgccaattttataatatattatttagaggccatttgttcttaatcttaatgtgagtaaaagacacaggcataaatacgcaatt

SEQ ID NO: 14685 - DNA, 120 bp, Artificial Sequence
  ENSG00000011677_24 (sequence is synthesized)
tttataaggtagataaactgaatcccagaagtttgaatgatttgcctaggctccttacaagtgtctttaataaagagctatcgtgcgcccctttccaaaggccaaaataaaggactgaga

SEQ ID NO: 14686 - DNA, 120 bp, Artificial Sequence
  ENSG00000011677_25 (sequence is synthesized)
agccaggtccaccgtgacctcagaatcagcacaatctcagcgggccttctgggtcactagtggaacttggttgggcaccaaaaaggtttttagaaagtcacaatgtgtcacccaagaaga

SEQ ID NO: 14687 - DNA, 120 bp, Artificial Sequence
  ENSG00000011677_26 (sequence is synthesized)
tcacttttaatagtctcagcccaagagaatgagactgtttatgatggcagccccagccactttggctctgaatacctgcactagtccagagtatcctagaagcccagggtaaagccacag

SEQ ID NO: 14688 - DNA, 120 bp, Artificial Sequence
  ENSG00000011677_27 (sequence is synthesized)
agggcaccacaagcagattctccctgcccaccggctgaacaaagctcctaaggggtgtatcattagctgctggttgccttttcatccatcctttccccgtcccctgcttccttgccattg

SEQ ID NO: 14689 - DNA, 120 bp, Artificial Sequence
  ENSG00000011677_28 (sequence is synthesized)
ctgggataatgcatgcccgtcccattattcctaagactgtgtctgtaggtaaattcatgactagaagagtgtagtcttgtggatatgtggggatatggggggtgggagggcggggctgtt

SEQ ID NO: 14690 - DNA, 120 bp, Artificial Sequence
  ENSG00000011677_29 (sequence is synthesized)
aatggttgtcttaaggaacttagaatggaagcctgatctttgcctctctgtagaaattgtgtttccaaatgctttggtgcaatgtttagctgctgtttattaaaccctttctgaattgta

SEQ ID NO: 14691 - DNA, 120 bp, Artificial Sequence
  ENSG00000011677_30 (sequence is synthesized)
agtgccgcttcatcacgcagcatggttgtctgggaatgtgccgtgggatctccatttgcattaattccttcagctcctggaccaaagccatttttaaaaattcatgttctgtgtatcaca

SEQ ID NO: 14692 - DNA, 120 bp, Artificial Sequence
  ENSG00000011677_31 (sequence is synthesized)
taacacagtatttgtgattgcacctgtactatgtccatttatttctgcatcatggctacttcctcctgtttcgtctctccaagtttgtgcctaagaagatgataatcacacaaacaagtc

SEQ ID NO: 14693 - DNA, 120 bp, Artificial Sequence
  ENSG00000011677_32 (sequence is synthesized)
gagaatagaggaagtacagaagcacagaagcatgatgaagccatcggtttcctacacagtagcaccttggatccaggaaggtgggcctggagggagacataggctcaaaatggaaaaata

SEQ ID NO: 14694 - DNA, 120 bp, Artificial Sequence
  ENSG00000011677_33 (sequence is synthesized)
gcaggtatcctcagtgtcatcttcaccctgatctgattttcactgcgcttcactttcacttcacttccgagcccttacttcttgggattaaggttataaaagctgttaagtttcaccaaa

SEQ ID NO: 14695 - DNA, 120 bp, Artificial Sequence
  ENSG00000012048_0 (sequence is synthesized)
gtaccttgatttcgtattctgagaggctgctgcttagcggtagccccttggtttccgtggcaacggaaaagcgcgggaattacagataaattaaaactgcgactgcgcggcgtgagctcg

SEQ ID NO: 14696 - DNA, 120 bp, Artificial Sequence
  ENSG00000012048_1 (sequence is synthesized)
ctgagacttcctggacgggggacaggctgtggggtttctcagataactgggcccctgcgctcaggaggccttcaccctctgctctgggtaaagttcattggaacagaaagaaatggattt

SEQ ID NO: 14697 - DNA, 120 bp, Artificial Sequence
  ENSG00000012048_2 (sequence is synthesized)
atctgctcttcgcgttgaagaagtacaaaatgtcattaatgctatgcagaaaatcttagagtgtcccatctgtctggagttgatcaaggaacctgtctccacaaagtgtgaccacatatt

SEQ ID NO: 14698 - DNA, 120 bp, Artificial Sequence
  ENSG00000012048_3 (sequence is synthesized)
ttgcaaattttgcatgctgaaacttctcaaccagaagaaagggccttcacagtgtcctttatgtaagaatgatataaccaaaaggagcctacaagaaagtacgagatttagtcaacttgt

SEQ ID NO: 14699 - DNA, 120 bp, Artificial Sequence
  ENSG00000012048_4 (sequence is synthesized)
tgaagagctattgaaaatcatttgtgcttttcagcttgacacaggtttggagtatgcaaacagctataattttgcaaaaaaggaaaataactctcctgaacatctaaaagatgaagtttc

SEQ ID NO: 14700 - DNA, 120 bp, Artificial Sequence
  ENSG00000012048_5 (sequence is synthesized)
tatcatccaaagtatgggctacagaaaccgtgccaaaagacttctacagagtgaacccgaaaatccttccttgcaggaaaccagtctcagtgtccaactctctaaccttggaactgtgag

SEQ ID NO: 14701 - DNA, 120 bp, Artificial Sequence
  ENSG00000012048_6 (sequence is synthesized)
aactctgaggacaaagcagcggatacaacctcaaaagacgtctgtctacattgaattgggatctgattcttctgaagataccgttaataaggcaacttattgcagtgtgggagatcaaga

SEQ ID NO: 14702 - DNA, 120 bp, Artificial Sequence
  ENSG00000012048_7 (sequence is synthesized)
attgttacaaatcacccctcaaggaaccagggatgaaatcagtttggattctgcaaaaaaggctgcttgtgaattttctgagacggatgtaacaaatactgaacatcatcaacccagtaa

SEQ ID NO: 14703 - DNA, 120 bp, Artificial Sequence
  ENSG00000012048_8 (sequence is synthesized)
taatgatttgaacaccactgagaagcgtgcagctgagaggcatccagaaaagtatcagggtagttctgtttcaaacttgcatgtggagccatgtggcacaaatactcatgccagctcatt

SEQ ID NO: 14704 - DNA, 120 bp, Artificial Sequence
  ENSG00000012048_9 (sequence is synthesized)
acagcatgagaacagcagtttattactcactaaagacagaatgaatgtagaaaaggctgaattctgtaataaaagcaaacagcctggcttagcaaggagccaacataacagatgggctgg

SEQ ID NO: 14705 - DNA, 120 bp, Artificial Sequence
  ENSG00000012048_10 (sequence is synthesized)
aagtaaggaaacatgtaatgataggcggactcccagcacagaaaaaaaggtagatctgaatgctgatcccctgtgtgagagaaaagaatggaataagcagaaactgccatgctcagagaa

SEQ ID NO: 14706 - DNA, 120 bp, Artificial Sequence
  ENSG00000012048_11 (sequence is synthesized)
tcctagagatactgaagatgttccttggataacactaaatagcagcattcagaaagttaatgagtggttttccagaagtgatgaactgttaggttctgatgactcacatgatggggagtc

SEQ ID NO: 14707 - DNA, 120 bp, Artificial Sequence
  ENSG00000012048_12 (sequence is synthesized)
tgaatcaaatgccaaagtagctgatgtattggacgttctaaatgaggtagatgaatattctggttcttcagagaaaatagacttactggccagtgatcctcatgaggctttaatatgtaa

SEQ ID NO: 14708 - DNA, 120 bp, Artificial Sequence
  ENSG00000012048_13 (sequence is synthesized)
aagtgaaagagttcactccaaatcagtagagagtaatattgaagacaaaatatttgggaaaacctatcggaagaaggcaagcctccccaacttaagccatgtaactgaaaatctaattat

SEQ ID NO: 14709 - DNA, 120 bp, Artificial Sequence
  ENSG00000012048_14 (sequence is synthesized)
aggagcatttgttactgagccacagataatacaagagcgtcccctcacaaataaattaaagcgtaaaaggagacctacatcaggccttcatcctgaggattttatcaagaaagcagattt

SEQ ID NO: 14710 - DNA, 120 bp, Artificial Sequence
  ENSG00000012048_15 (sequence is synthesized)
ggcagttcaaaagactcctgaaatgataaatcagggaactaaccaaacggagcagaatggtcaagtgatgaatattactaatagtggtcatgagaataaaacaaaaggtgattctattca

SEQ ID NO: 14711 - DNA, 120 bp, Artificial Sequence
  ENSG00000012048_16 (sequence is synthesized)
gaatgagaaaaatcctaacccaatagaatcactcgaaaaagaatctgctttcaaaacgaaagctgaacctataagcagcagtataagcaatatggaactcgaattaaatatccacaattc

SEQ ID NO: 14712 - DNA, 120 bp, Artificial Sequence
  ENSG00000012048_17 (sequence is synthesized)
aaaagcacctaaaaagaataggctgaggaggaagtcttctaccaggcatattcatgcgcttgaactagtagtcagtagaaatctaagcccacctaattgtactgaattgcaaattgatag

SEQ ID NO: 14713 - DNA, 120 bp, Artificial Sequence
  ENSG00000012048_18 (sequence is synthesized)
ttgttctagcagtgaagagataaagaaaaaaaagtacaaccaaatgccagtcaggcacagcagaaacctacaactcatggaaggtaaagaacctgcaactggagccaagaagagtaacaa

SEQ ID NO: 14714 - DNA, 120 bp, Artificial Sequence
  ENSG00000012048_19 (sequence is synthesized)
gccaaatgaacagacaagtaaaagacatgacagcgatactttcccagagctgaagttaacaaatgcacctggttcttttactaagtgttcaaataccagtgaacttaaagaatttgtcaa

SEQ ID NO: 14715 - DNA, 120 bp, Artificial Sequence
  ENSG00000012048_20 (sequence is synthesized)
tcctagccttccaagagaagaaaaagaagagaaactagaaacagttaaagtgtctaataatgctgaagaccccaaagatctcatgttaagtggagaaagggttttgcaaactgaaagatc

SEQ ID NO: 14716 - DNA, 120 bp, Artificial Sequence
  ENSG00000012048_21 (sequence is synthesized)
tgtagagagtagcagtatttcattggtacctggtactgattatggcactcaggaaagtatctcgttactggaagttagcactctagggaaggcaaaaacagaaccaaataaatgtgtgag

SEQ ID NO: 14717 - DNA, 120 bp, Artificial Sequence
  ENSG00000012048_22 (sequence is synthesized)
tcagtgtgcagcatttgaaaaccccaagggactaattcatggttgttccaaagataatagaaatgacacagaaggctttaagtatccattgggacatgaagttaaccacagtcgggaaac

SEQ ID NO: 14718 - DNA, 120 bp, Artificial Sequence
  ENSG00000012048_23 (sequence is synthesized)
aagcatagaaatggaagaaagtgaacttgatgctcagtatttgcagaatacattcaaggtttcaaagcgccagtcatttgctccgttttcaaatccaggaaatgcagaagaggaatgtgc

SEQ ID NO: 14719 - DNA, 120 bp, Artificial Sequence
  ENSG00000012048_24 (sequence is synthesized)
aacattctctgcccactctgggtccttaaagaaacaaagtccaaaagtcacttttgaatgtgaacaaaaggaagaaaatcaaggaaagaatgagtctaatatcaagcctgtacagacagt

SEQ ID NO: 14720 - DNA, 120 bp, Artificial Sequence
  ENSG00000012048_25 (sequence is synthesized)
taatatcactgcaggctttcctgtggttggtcagaaagataagccagttgataatgccaaatgtagtatcaaaggaggctctaggttttgtctatcatctcagttcagaggcaacgaaac

SEQ ID NO: 14721 - DNA, 120 bp, Artificial Sequence
  ENSG00000012048_26 (sequence is synthesized)
tggactcattactccaaataaacatggacttttacaaaacccatatcgtataccaccactttttcccatcaagtcatttgttaaaactaaatgtaagaaaaatctgctagaggaaaactt

SEQ ID NO: 14722 - DNA, 120 bp, Artificial Sequence
  ENSG00000012048_27 (sequence is synthesized)
tgaggaacattcaatgtcacctgaaagagaaatgggaaatgagaacattccaagtacagtgagcacaattagccgtaataacattagagaaaatgtttttaaagaagccagctcaagcaa

SEQ ID NO: 14723 - DNA, 120 bp, Artificial Sequence
  ENSG00000012048_28 (sequence is synthesized)
tattaatgaagtaggttccagtactaatgaagtgggctccagtattaatgaaataggttccagtgatgaaaacattcaagcagaactaggtagaaacagagggccaaaattgaatgctat

SEQ ID NO: 14724 - DNA, 120 bp, Artificial Sequence
  ENSG00000012048_29 (sequence is synthesized)
gcttagattaggggttttgcaacctgaggtctataaacaaagtcttcctggaagtaattgtaagcatcctgaaataaaaaagcaagaatatgaagaagtagttcagactgttaatacaga

SEQ ID NO: 14725 - DNA, 120 bp, Artificial Sequence
  ENSG00000012048_30 (sequence is synthesized)
tctgagacacctgatgacctgttagatgatggtgaaataaaggaagatactagttttgctgaaaatgacattaaggaaagttctgctgtttttagcaaaagcgtccagaaaggagagctt

SEQ ID NO: 14726 - DNA, 120 bp, Artificial Sequence
  ENSG00000012048_31 (sequence is synthesized)
agcaggagtcctagccctttcacccatacacatttggctcagggttaccgaagaggggccaagaaattagagtcctcagaagagaacttatctagtgaggatgaagagcttccctgcttc

SEQ ID NO: 14727 - DNA, 120 bp, Artificial Sequence
  ENSG00000012048_32 (sequence is synthesized)
caacacttgttatttggtaaagtaaacaatataccttctcagtctactaggcatagcaccgttgctaccgagtgtctgtctaagaacacagaggagaatttattatcattgaagaatagc

SEQ ID NO: 14728 - DNA, 120 bp, Artificial Sequence
  ENSG00000012048_33 (sequence is synthesized)
ttaaatgactgcagtaaccaggtaatattggcaaaggcatctcaggaacatcaccttagtgaggaaacaaaatgttctgctagcttgttttcttcacagtgcagtgaattggaagacttg

SEQ ID NO: 14729 - DNA, 120 bp, Artificial Sequence
  ENSG00000012048_34 (sequence is synthesized)
actgcaaatacaaacacccaggatcctttcttgattggttcttccaaacaaatgaggcatcagtctgaaagccagggagttggtctgagtgacaaggaattggtttcagatgatgaagaa

SEQ ID NO: 14730 - DNA, 120 bp, Artificial Sequence
  ENSG00000012048_35 (sequence is synthesized)
agaggaacgggcttggaagaaaataatcaagaagagcaaagcatggattcaaacttaggtgaagcagcatctgggtgtgagagtgaaacaagcgtctctgaagactgctcagggctatcc

SEQ ID NO: 14731 - DNA, 120 bp, Artificial Sequence
  ENSG00000012048_36 (sequence is synthesized)
tctcagagtgacattttaaccactcagcagagggataccatgcaacataacctgataaagctccagcaggaaatggctgaactagaagctgtgttagaacagcatgggagccagccttct

SEQ ID NO: 14732 - DNA, 120 bp, Artificial Sequence
  ENSG00000012048_37 (sequence is synthesized)
aacagctacccttccatcataagtgactcttctgcccttgaggacctgcgaaatccagaacaaagcacatcagaaaaagattcgcatatacatggccaaaggaacaactccatgttttct

SEQ ID NO: 14733 - DNA, 120 bp, Artificial Sequence
  ENSG00000012048_38 (sequence is synthesized)
aaaaggcctagagaacatatatcagtattaacttcacagaaaagtagtgaataccctataagccagaatccagaaggcctttctgctgacaagtttgaggtgtctgcagatagttctacc

SEQ ID NO: 14734 - DNA, 120 bp, Artificial Sequence
  ENSG00000012048_39 (sequence is synthesized)
agtaaaaataaagaaccaggagtggaaaggtcatccccttctaaatgcccatcattagatgataggtggtacatgcacagttgctctgggagtcttcagaatagaaactacccatctcaa

SEQ ID NO: 14735 - DNA, 120 bp, Artificial Sequence
  ENSG00000012048_40 (sequence is synthesized)
gaggagctcattaaggttgttgatgtggaggagcaacagctggaagagtctgggccacacgatttgacggaaacatcttacttgccaaggcaagatctagagggaaccccttacctggaa

SEQ ID NO: 14736 - DNA, 120 bp, Artificial Sequence
  ENSG00000012048_41 (sequence is synthesized)
tctggaatcagcctcttctctgatgaccctgaatctgatccttctgaagacagagccccagagtcagctcgtgttggcaacataccatcttcaacctctgcattgaaagttccccaattg

SEQ ID NO: 14737 - DNA, 120 bp, Artificial Sequence
  ENSG00000012048_42 (sequence is synthesized)
aaagttgcagaatctgcccagagtccagctgctgctcatactactgatactgctgggtataatgcaatggaagaaagtgtgagcagggagaagccagaattgacagcttcaacagaaagg

SEQ ID NO: 14738 - DNA, 120 bp, Artificial Sequence
  ENSG00000012048_43 (sequence is synthesized)
gtcaacaaaagaatgtccatggtggtgtctggcctgaccccagaagaatttatgctcgtgtacaagtttgccagaaaacaccacatcactttaactaatctaattactgaagagactact

SEQ ID NO: 14739 - DNA, 120 bp, Artificial Sequence
  ENSG00000012048_44 (sequence is synthesized)
catgttgttatgaaaacagatgctgagtttgtgtgtgaacggacactgaaatattttctaggaattgcgggaggaaaatgggtagttagctatttctgggtgacccagtctattaaagaa

SEQ ID NO: 14740 - DNA, 120 bp, Artificial Sequence
  ENSG00000012048_45 (sequence is synthesized)
agaaaaatgctgaatgagcatgattttgaagtcagaggagatgtggtcaatggaagaaaccaccaaggtccaaagcgagcaagagaatcccaggacagaaagatcttcagggggctagaa

SEQ ID NO: 14741 - DNA, 120 bp, Artificial Sequence
  ENSG00000012048_46 (sequence is synthesized)
atctgttgctatgggcccttcaccaacatgcccacagatcaactggaatggatggtacagctgtgtggtgcttctgtggtgaaggagctttcatcattcacccttggcacaggtgtccac

SEQ ID NO: 14742 - DNA, 120 bp, Artificial Sequence
  ENSG00000012048_47 (sequence is synthesized)
ccaattgtggttgtgcagccagatgcctggacagaggacaatggcttccatgcaattgggcagatgtgtgaggcacctgtggtgacccgagagtgggtgttggacagtgtagcactctac

SEQ ID NO: 14743 - DNA, 120 bp, Artificial Sequence
  ENSG00000012048_48 (sequence is synthesized)
cagtgccaggagctggacacctacctgataccccagatcccccacagccactactgactgcagccagccacaggtacagagccacaggaccccaagaatgagcttacaaagtggcctttc

SEQ ID NO: 14744 - DNA, 120 bp, Artificial Sequence
  ENSG00000012048_49 (sequence is synthesized)
caggccctgggagctcctctcactcttcagtccttctactgtcctggctactaaatattttatgtacatcagcctgaaaaggacttctggctatgcaagggtcccttaaagattttctgc

SEQ ID NO: 14745 - DNA, 120 bp, Artificial Sequence
  ENSG00000012048_50 (sequence is synthesized)
ttgaagtctcccttggaaatctgccatgagcacaaaattatggtaatttttcacctgagaagattttaaaaccatttaaacgccaccaattgagcaagatgctgattcattatttatcag

SEQ ID NO: 14746 - DNA, 120 bp, Artificial Sequence
  ENSG00000012048_51 (sequence is synthesized)
ccctattctttctattcaggctgttgttggcttagggctggaagcacagagtggcttggcctcaagagaatagctggtttccctaagtttacttctctaaaaccctgtgttcacaaaggc

SEQ ID NO: 14747 - DNA, 120 bp, Artificial Sequence
  ENSG00000012048_52 (sequence is synthesized)
agagagtcagacccttcaatggaaggagagtgcttgggatcgattatgtgacttaaagtcagaatagtccttgggcagttctcaaatgttggagtggaacattggggaggaaattctgag

SEQ ID NO: 14748 - DNA, 71 bp, Artificial Sequence
  ENSG00000012048_53 (sequence is synthesized)
ctcaaatgttggagtggaacattggggaggaaattctgaggcaggtattagaaatgaaaaggaaacttgaa

SEQ ID NO: 14749 - DNA, 88 bp, Artificial Sequence
  ENSG00000012048_54 (sequence is synthesized)
ggttgcagtgagccaagatcataccacggcactccagcctgggtgacagtgagactgtggcttagaagagatttctaaaagtctgaga

SEQ ID NO: 14750 - DNA, 120 bp, Artificial Sequence
  ENSG00000012048_55 (sequence is synthesized)
gtctgagatatatttgctagatttctaaagaatgtgttctaaaacagcagaagattttcaagaaccggtttccaaagacagtcttctaattcctcattagtaataagtaaaatgtttatt

SEQ ID NO: 14751 - DNA, 120 bp, Artificial Sequence
  ENSG00000012048_56 (sequence is synthesized)
gttgtagctctggtatataatccattcctcttaaaatataagacctctggcatgaatatttcatatctataaaatgacagatcccaccaggaaggaagctgttgctttctttgaggtgat

SEQ ID NO: 14752 - DNA, 120 bp, Artificial Sequence
  ENSG00000012048_57 (sequence is synthesized)
ttttttcctttgctccctgttgctgaaaccatacagcttcataaataattttgcttgctgaaggaagaaaaagtgtttttcataaacccattatccaggactgtttatagctgttggaag

SEQ ID NO: 14753 - DNA, 120 bp, Artificial Sequence
  ENSG00000012048_58 (sequence is synthesized)
gactaggtcttccctagcccccccagtgtgcaagggcagtgaagacttgattgtacaaaatacgttttgtaaatgttgtgctgttaacactgcaaataaacttggtagcaaacacttcca

SEQ ID NO: 14754 - DNA, 120 bp, Artificial Sequence
  ENSG00000012048_59 (sequence is synthesized)
agataactgggcccctgcgctcaggaggccttcaccctctgctctgggtaaaggtagtagagtcccgggaaagggacagggggcccaagtgatgctctggggtactggcgtgggagagtg

SEQ ID NO: 14755 - DNA, 120 bp, Artificial Sequence
  ENSG00000012048_60 (sequence is synthesized)
tttctcagataactgggcccctgcgctcaggaggccttcaccctctgctctgggtaaagcaaaagctacccacctttgcctcctgtgcctgcttctgcccagggacttaggtcctcttac

SEQ ID NO: 14756 - DNA, 74 bp, Artificial Sequence
  ENSG00000012048_61 (sequence is synthesized)
cctcgtgataggaactggaatatgccttgagggggacactatgtctttaaaaacgtcggctggtccgtctctac

SEQ ID NO: 14757 - DNA, 120 bp, Artificial Sequence
  ENSG00000012048_62 (sequence is synthesized)
aaaacaaaacaaaacaaaaaacaccggctgttcattggaacagaaagaaatggatttatctgctcttcgcgttgaagaagtacaaaatgtcattaatgctatgcagaaaatcttagagtg

SEQ ID NO: 14758 - DNA, 120 bp, Artificial Sequence
  ENSG00000012048_63 (sequence is synthesized)
aaagcgtgggaattacagataaattaaaactgtggaacccctttcctcggctgccgccaaggtgttcggtccttccgaggaagctaaggccgcgttggggtgagaccctcacttcatccg

SEQ ID NO: 14759 - DNA, 120 bp, Artificial Sequence
  ENSG00000012048_64 (sequence is synthesized)
ctcttcgcgttgaagaagtacaaaatgtcattaatgctatgcagaaaatcttagagtgtcccatctgatggattctctgtcacccaggctggcccgccttggcctcccaaaatgctggga

SEQ ID NO: 14760 - DNA, 62 bp, Artificial Sequence
  ENSG00000012048_65 (sequence is synthesized)
tcacgagattaaaattagctgggtgtggtcgcgtgcgcctgtagtcccagctactcgtgagg

SEQ ID NO: 14761 - DNA, 120 bp, Artificial Sequence
  ENSG00000012048_66 (sequence is synthesized)
gcaaagcatggattcaaacttaggtattggaaccaggtttttgtgtttgccccagtctatttatagaagtgagctaaatgtttatgcttttggggagcacattttacaaatttccaagta

SEQ ID NO: 14762 - DNA, 120 bp, Artificial Sequence
  ENSG00000012048_67 (sequence is synthesized)
tagttaaaggaactgcttcttaaacttgaaacatgttcctcctaaggtgcttttcatagaaaaaagtccttcacacagctaggacgtcatctttgactgaatgagctttaacatcctaat

SEQ ID NO: 14763 - DNA, 120 bp, Artificial Sequence
  ENSG00000012048_68 (sequence is synthesized)
tactggtggacttacttctggtttcattttataaaagcaaatccaggtgtcccaaagcaaggaatttaatcattttgtgtgacatgaaagtaaatccagtcctgccaatgagaagaaaaa

SEQ ID NO: 14764 - DNA, 120 bp, Artificial Sequence
  ENSG00000012061_0 (sequence is synthesized)
gggaacgtgtctgtgtcccttactgaaccgtaagctccgggaggacaacacggggctgtcgttggtcactgctgtgtcaccagcacggactcgcacaggaccgggaagagaggaagcgcg

SEQ ID NO: 14765 - DNA, 120 bp, Artificial Sequence
  ENSG00000012061_1 (sequence is synthesized)
tggggggaataggtgtggaataaatgaatgaatgaggaaactgaagccaagtcaatgtctgagttggattcaaacttaagtctctccttactgagaggagggaccaagttggatctcctg

SEQ ID NO: 14766 - DNA, 120 bp, Artificial Sequence
  ENSG00000012061_2 (sequence is synthesized)
cgatctgttctccactgagccctgccaggattctgggcacacagaagcgctcagtaagggctttgaaacttaacagtttgggagccagatcctcaggccacatctctctcctcccacgac

SEQ ID NO: 14767 - DNA, 120 bp, Artificial Sequence
  ENSG00000012061_3 (sequence is synthesized)
ctccgcggtcctccagaaccatagagagttgtacagagatcgccctgctctatgctctactctcctggggagcggggccagagaggccggaagtgctgcgagccctgggccacgctggcc

SEQ ID NO: 14768 - DNA, 120 bp, Artificial Sequence
  ENSG00000012061_4 (sequence is synthesized)
gtgctggcagtgggccgcctcgatccctctgcagtctttcccttgaggctccaagaccagcaggtgaggcctcgcggcgctgaaaccgtgaggcccggaccacaggctccagatggaccc

SEQ ID NO: 14769 - DNA, 120 bp, Artificial Sequence
  ENSG00000012061_5 (sequence is synthesized)
tgggaaggacaaagagggggtgccccagccctcagggccgccagcaaggaagaaatttgtgatacccctcgacgaggatgaggtccctcctggagtggccaagcccttattccgatctac

SEQ ID NO: 14770 - DNA, 120 bp, Artificial Sequence
  ENSG00000012061_6 (sequence is synthesized)
acagagccttcccactgtggacacctcggcccaggcggcccctcagacctacgccgaatatgccatctcacagcctctggaaggggctggggccacgtgccccacagggtcagagcccct

SEQ ID NO: 14771 - DNA, 120 bp, Artificial Sequence
  ENSG00000012061_7 (sequence is synthesized)
ggcaggagagacgcccaaccaggccctgaaacccggggcaaaatccaacagcatcattgtgagccctcggcagaggggcaatcccgtactgaagttcgtgcgcaatgtgccctgggaatt

SEQ ID NO: 14772 - DNA, 120 bp, Artificial Sequence
  ENSG00000012061_8 (sequence is synthesized)
tggcgacgtaattcccgactatgtgctgggccagagcacctgtgccctgttcctcagcctccgctaccacaacctgcacccagactacatccatgggcggctgcagagcctggggaagaa

SEQ ID NO: 14773 - DNA, 120 bp, Artificial Sequence
  ENSG00000012061_9 (sequence is synthesized)
cttcgccttgcgggtcctgcttgtccaggtggatgtgaaagatccccagcaggccctcaaggagctggctaagatgtgtatcctggccgactgcacattgatcctcgcctggagccccga

SEQ ID NO: 14774 - DNA, 120 bp, Artificial Sequence
  ENSG00000012061_10 (sequence is synthesized)
ggaagctgggcggtacctggagacctacaaggcctatgagcagaaaccagcggacctcctgatggagaagctagagcaggacttcgtctcccgggtgactgaatgtctgaccaccgtgaa

SEQ ID NO: 14775 - DNA, 120 bp, Artificial Sequence
  ENSG00000012061_11 (sequence is synthesized)
gtcagtcaacaaaacggacagtcagaccctcctgaccacatttggatctctggaacagctcatcgccgcatcaagagaagatctggccttatgcccaggcctgggccctcagaaagcccg

SEQ ID NO: 14776 - DNA, 120 bp, Artificial Sequence
  ENSG00000012061_12 (sequence is synthesized)
gaggctgtttgatgtcctgcacgagcccttcttgaaagtaccctgatgaccccagctgccaaggaaacccccagtgtaataataaatcgtcctcccaggccaggctcctgctggctgcgc

SEQ ID NO: 14777 - DNA, 120 bp, Artificial Sequence
  ENSG00000012061_13 (sequence is synthesized)
tggtgcagtctctggggagggattctgggggtgtcaccttctggtggcccaggtgggcaccttcagctttctttagttcctcagtttcccgggggcagactacacaggctgctgctgctg

SEQ ID NO: 14778 - DNA, 120 bp, Artificial Sequence
  ENSG00000012061_14 (sequence is synthesized)
ctgcttccgcttcttgtcccggcctgtgggagcctcctccccagactctgaattcagtggcggccctggcatctcctcttggggcactgtctctggcatccggctttcctgactctgctt

SEQ ID NO: 14779 - DNA, 120 bp, Artificial Sequence
  ENSG00000012061_15 (sequence is synthesized)
tttcttcttcttcttcttcttggtggatgtgggagctgcctgaggctcaaggtcatccggcagctcaggccccaccacctctgtctctggctccactgtggcatcttgctgtttttcttt

SEQ ID NO: 14780 - DNA, 120 bp, Artificial Sequence
  ENSG00000012061_16 (sequence is synthesized)
cttcgtcttctttttgggagctgccagagctgcctgggcctgaggcttcgctccttctggctgttgaggcgccatggtcccccctggggactccagaggcttcatctccggctccactgg

SEQ ID NO: 14781 - DNA, 120 bp, Artificial Sequence
  ENSG00000012061_17 (sequence is synthesized)
ctccatcgcctccgtccctggctccatcattgccatctgtcccttttcttttttcctcttcttcgtagggggcagagggatggcttcctccagtggctccaccttcacctgtggctgaga

SEQ ID NO: 14782 - DNA, 120 bp, Artificial Sequence
  ENSG00000012061_18 (sequence is synthesized)
ctcaactgtcaccccctcctctggctccatcccttccgtccccttttgcctctttctctttttggtcggggacaggactgtgtcttctagaggctcagtgttaatctgttcctgcttcac

SEQ ID NO: 14783 - DNA, 120 bp, Artificial Sequence
  ENSG00000012061_19 (sequence is synthesized)
tgtcttgtcttctggctcgaaggtttctttccctttgggcttcttcctcttcttggtggtggacgggaacagcactcccagaggctccagtgtctccactgtgggctctgtccccacagg

SEQ ID NO: 14784 - DNA, 120 bp, Artificial Sequence
  ENSG00000012061_20 (sequence is synthesized)
ccctgctgcctctggttctttcagctgctgattttttttcttcttcttcttccgcacatccatttctggcgaccccaaagccatgtccacctccagggccccgtgcccattcactgcctc

SEQ ID NO: 14785 - DNA, 120 bp, Artificial Sequence
  ENSG00000012061_21 (sequence is synthesized)
ctgagtgactggggcctctgtcacctgcatctcctttttcttcttccctgaggtgagcaggttgggggccaaggctgacctaggccctgtgactggtgggttgcccccaaaggcacagaa

SEQ ID NO: 14786 - DNA, 120 bp, Artificial Sequence
  ENSG00000012061_22 (sequence is synthesized)
ccgaggcctcaggccaggagggatctgtggtgggggacttgctgggatgggctgcagagggctccctgacagggattgctggggaccctcaaggatccttagggtgccctggggggctga

SEQ ID NO: 14787 - DNA, 120 bp, Artificial Sequence
  ENSG00000012061_23 (sequence is synthesized)
ggcacaggtgagtccacctcctgcctccgttgagggggccagcagggtcgcttctccagcttggggacagctgctgaggactcgatagcggtgccgcttgcctgccaatttgcccttgac

SEQ ID NO: 14788 - DNA, 120 bp, Artificial Sequence
  ENSG00000012061_24 (sequence is synthesized)
gatctgggagccagagagaggcacatgccgcccattgaagctacagagagaaacagggagggcagaggcttaagtggaacaggagagggaaggttttttgattttttttttgtttttttt

SEQ ID NO: 14789 - DNA, 120 bp, Artificial Sequence
  ENSG00000012061_25 (sequence is synthesized)
aaggatgggattacaggcaccagccactgcgcctggctggcctctggtttttaataaaacatgactagagtgactccatcttaaagtgagtagctaggcacttacaaggttcatgcttat

SEQ ID NO: 14790 - DNA, 120 bp, Artificial Sequence
  ENSG00000012061_26 (sequence is synthesized)
ggcctgaaaataaccacatcccaggctgaccaccaattataattacagaatatttatggccatacagaacatgttccaccaagcctgcagaatgtccaaatgtcctaagaatgcagcccc

SEQ ID NO: 14791 - DNA, 120 bp, Artificial Sequence
  ENSG00000012061_27 (sequence is synthesized)
cattacttaaatataacataaatgagcaagcttaggttgcaggattaatggtcgtggataacaccaatagcccctacctttagtgagcttatctgcacactccaagtttaactatagttc

SEQ ID NO: 14792 - DNA, 120 bp, Artificial Sequence
  ENSG00000012061_28 (sequence is synthesized)
cttatagtttcttataagtagaaatactaacaaagggctgtgggtttctccccctgctttctgaggacactctactctgtaaaggagtagtttccaataaacttgtttctttcactgtgc

SEQ ID NO: 14793 - DNA, 120 bp, Artificial Sequence
  ENSG00000012061_29 (sequence is synthesized)
acatctctcacgataaatgagtggggagaacttatagcccttgaagtcaaccatctcacacctttccaaaggacgcgaccataactctaaaaggctccagatggaccctgggaaggacaa

SEQ ID NO: 14794 - DNA, 87 bp, Artificial Sequence
  ENSG00000012061_30 (sequence is synthesized)
ttgggattacaggatcacgtgataaggcactagcagatgtggttggaatccttgctgtgctgaatcctggctgtgtgaccccaagct

SEQ ID NO: 14795 - DNA, 120 bp, Artificial Sequence
  ENSG00000012061_31 (sequence is synthesized)
tttggcgacgtaattcccgactatgtgctgggccagagcacctgtgccctgttcctcagggcccctggcacctgttctccccttgaagcccaagtctcttcccctcttcatgaagaagcc

SEQ ID NO: 14796 - DNA, 120 bp, Artificial Sequence
  ENSG00000012061_32 (sequence is synthesized)
ttcctgtgtgggcctggtgcaggcactgcctctctctggccttcagtttcctcatctgtaaaacaaggtcttaatttttttttttttttttttgatacagagcctcactctgtcccctag

SEQ ID NO: 14797 - DNA, 120 bp, Artificial Sequence
  ENSG00000012061_33 (sequence is synthesized)
taagagctctgggaaagaacccaaggagttgggggaaggagagagccccaaataaacacaacctgagaccccaaagttttaaggtgaaaaaagaaccaaagaccagacacagtggcttcc

SEQ ID NO: 14798 - DNA, 71 bp, Artificial Sequence
  ENSG00000012061_34 (sequence is synthesized)
gccagaagttggagaccagcctgggcaagtggacacctcatttttactaaaaataaaaaaaactagctggg

SEQ ID NO: 14799 - DNA, 120 bp, Artificial Sequence
  ENSG00000012061_35 (sequence is synthesized)
aacaagggcccgtcaggctcagaagccccgtggcctccacttcacacttcacttctcccaggcctagctcgcttctccaagcacttgccccttctgttccctctgcccaattacctgcct

SEQ ID NO: 14800 - DNA, 120 bp, Artificial Sequence
  ENSG00000012061_36 (sequence is synthesized)
gacctgacgctatggagctctcggagttttgtgggggacggctgtgagtggggggttcctgctgcgggatgagaacgtagacgccagtggctcactcgctcctggcaccttccctttcag

SEQ ID NO: 14801 - DNA, 120 bp, Artificial Sequence
  ENSG00000012061_37 (sequence is synthesized)
gagattacaggcgggagccaccgcgcccggcccagttctggggttttttgtgtgtgtggaagtcccacttctgatccaacctcagtctctcatgctgcagatctttcctttgctgtacat

SEQ ID NO: 14802 - DNA, 120 bp, Artificial Sequence
  ENSG00000012061_38 (sequence is synthesized)
ccatccacagcctctccagcggagacttgggatgtcccaccaaaaaaggtgcccgggaggacgcggagtaggggctaggcgcctccactgccccccatccgggggcctccgcttggggcc

SEQ ID NO: 14803 - DNA, 120 bp, Artificial Sequence
  ENSG00000012061_39 (sequence is synthesized)
aggccacctcacctcccatccctgcctgggcctccccgcagctcctgggtggttgagcttcagttccaattttaaggcactgtccattcatccctgggcctcgtctttcctggcccatcc

SEQ ID NO: 14804 - DNA, 120 bp, Artificial Sequence
  ENSG00000012124_0 (sequence is synthesized)
agatgctgccagggtccctgaagagggaagacacgcggaaacaggcttgcacccagacacgacaccatgcatctcctcggcccctggctcctgctcctggttctagaatacttggctttc

SEQ ID NO: 14805 - DNA, 120 bp, Artificial Sequence
  ENSG00000012124_1 (sequence is synthesized)
tctgactcaagtaaatgggtttttgagcaccctgaaaccctctacgcctgggagggggcctgcgtctggatcccctgcacctacagagccctagatggtgacctggaaagcttcatcctg

SEQ ID NO: 14806 - DNA, 120 bp, Artificial Sequence
  ENSG00000012124_2 (sequence is synthesized)
ttccacaatcctgagtataacaagaacacctcgaagtttgatgggacaagactctatgaaagcacaaaggatgggaaggttccttctgagcagaaaagggtgcaattcctgggagacaag

SEQ ID NO: 14807 - DNA, 120 bp, Artificial Sequence
  ENSG00000012124_3 (sequence is synthesized)
aataagaactgcacactgagtatccacccggtgcacctcaatgacagtggtcagctggggctgaggatggagtccaagactgagaaatggatggaacgaatacacctcaatgtctctgaa

SEQ ID NO: 14808 - DNA, 120 bp, Artificial Sequence
  ENSG00000012124_4 (sequence is synthesized)
aggccttttccacctcatatccagctccctccagaaattcaagagtcccaggaagtcactctgacctgcttgctgaatttctcctgctatgggtatccgatccaattgcagtggctccta

SEQ ID NO: 14809 - DNA, 120 bp, Artificial Sequence
  ENSG00000012124_5 (sequence is synthesized)
gagggggttccaatgaggcaggctgctgtcacctcgacctccttgaccatcaagtctgtcttcacccggagcgagctcaagttctccccacagtggagtcaccatgggaagattgtgacc

SEQ ID NO: 14810 - DNA, 120 bp, Artificial Sequence
  ENSG00000012124_6 (sequence is synthesized)
tgccagcttcaggatgcagatgggaagttcctctccaatgacacggtgcagctgaacgtgaagcacaccccgaagttggagatcaaggtcactcccagtgatgccatagtgagggagggg

SEQ ID NO: 14811 - DNA, 120 bp, Artificial Sequence
  ENSG00000012124_7 (sequence is synthesized)
gactctgtgaccatgacctgcgaggtcagcagcagcaacccggagtacacgacggtatcctggctcaaggatgggacctcgctgaagaagcagaatacattcacgctaaacctgcgcgaa

SEQ ID NO: 14812 - DNA, 120 bp, Artificial Sequence
  ENSG00000012124_8 (sequence is synthesized)
gtgaccaaggaccagagtgggaagtactgctgtcaggtctccaatgacgtgggcccgggaaggtcggaagaagtgttcctgcaagtgcagtatgccccggaaccttccacggttcagatc

SEQ ID NO: 14813 - DNA, 120 bp, Artificial Sequence
  ENSG00000012124_9 (sequence is synthesized)
ctccactcaccggctgtggagggaagtcaagtcgagtttctttgcatgtcactggccaatcctcttccaacaaattacacgtggtaccacaatgggaaagaaatgcagggaaggacagag

SEQ ID NO: 14814 - DNA, 120 bp, Artificial Sequence
  ENSG00000012124_10 (sequence is synthesized)
gagaaagtccacatcccaaagatcctcccctggcacgctgggacttattcctgtgtggcagaaaacattcttggtactggacagaggggcccgggagctgagctggatgtccagtatcct

SEQ ID NO: 14815 - DNA, 120 bp, Artificial Sequence
  ENSG00000012124_11 (sequence is synthesized)
cccaagaaggtgaccacagtgattcaaaaccccatgccgattcgagaaggagacacagtgaccctttcctgtaactacaattccagtaaccccagtgttacccggtatgaatggaaaccc

SEQ ID NO: 14816 - DNA, 120 bp, Artificial Sequence
  ENSG00000012124_12 (sequence is synthesized)
catggcgcctgggaggagccatcgcttggggtgctgaagatccaaaacgttggctgggacaacacaaccatcgcctgcgcagcttgtaatagttggtgctcgtgggcctcccctgtcgcc

SEQ ID NO: 14817 - DNA, 120 bp, Artificial Sequence
  ENSG00000012124_13 (sequence is synthesized)
tccggaaaatcaagcccctttccgagattcactctggaaactcggtcagcctccaatgtgacttctcaagcagccaccccaaagaagtccagttcttctgggagaaaaatggcaggcttc

SEQ ID NO: 14818 - DNA, 120 bp, Artificial Sequence
  ENSG00000012124_14 (sequence is synthesized)
tggggaaagaaagccagctgaattttgactccatctccccagaagatgctgggagttacagctgctgggtgaacaactccataggacagacagcgtccaaggcctggacacttgaagtgc

SEQ ID NO: 14819 - DNA, 120 bp, Artificial Sequence
  ENSG00000012124_15 (sequence is synthesized)
tgtatgcacccaggaggctgcgtgtgtccatgagcccgggggaccaagtgatggaggggaagagtgcaaccctgacctgtgagagcgacgccaaccctcccgtctcccactacacctggt

SEQ ID NO: 14820 - DNA, 120 bp, Artificial Sequence
  ENSG00000012124_16 (sequence is synthesized)
ttgactggaataaccaaagcctcccctaccacagccagaagctgagattggagccggtgaaggtccagcactcgggtgcctactggtgccaggggaccaacagtgtgggcaagggccgtt

SEQ ID NO: 14821 - DNA, 120 bp, Artificial Sequence
  ENSG00000012124_17 (sequence is synthesized)
cgcctctcagcaccctcaccgtctactatagcccggagaccatcggcaggcgagtggctgtgggactcgggtcctgcctcgccatcctcatcctggcaatctgtgggctcaagctccagc

SEQ ID NO: 14822 - DNA, 120 bp, Artificial Sequence
  ENSG00000012124_18 (sequence is synthesized)
gacgttggaagaggacacagagccagcaggggcttcaggagaattccagcggccagagcttctttgtgaggaataaaaaggttagaagggcccccctctctgaaggcccccactccctgg

SEQ ID NO: 14823 - DNA, 120 bp, Artificial Sequence
  ENSG00000012124_19 (sequence is synthesized)
gatgctacaatccaatgatggaagatggcattagctacaccaccctgcgctttcccgagatgaacataccacgaactggagatgcagagtcctcagagatgcagagacctcccccggact

SEQ ID NO: 14824 - DNA, 120 bp, Artificial Sequence
  ENSG00000012124_20 (sequence is synthesized)
gcgatgacacggtcacttattcagcattgcacaagcgccaagtgggcgactatgagaacgtcattccagattttccagaagatgaggggattcattactcagagctgatccagtttgggg

SEQ ID NO: 14825 - DNA, 120 bp, Artificial Sequence
  ENSG00000012124_21 (sequence is synthesized)
tcggggagcggcctcaggcacaagaaaatgtggactatgtgatcctcaaacattgacactggatgggctgcagcagaggcactgggggcagcgggggccagggaagtccccgagtttccc

SEQ ID NO: 14826 - DNA, 84 bp, Artificial Sequence
  ENSG00000012124_22 (sequence is synthesized)
tcactgcggagaaccttgtgcctggctcagagccagtctttttggtgagggtaaccccaaacctccaaaactcctgcccctgtt

SEQ ID NO: 14827 - DNA, 120 bp, Artificial Sequence
  ENSG00000012124_23 (sequence is synthesized)
gtgagggtaaccccaaacctccaaaactcctgcccctgttctcttccactctccttgctacccagaaatccatctaaatacctgccctgacatgcacacctccccctgcccccaccacgg

SEQ ID NO: 14828 - DNA, 120 bp, Artificial Sequence
  ENSG00000012124_24 (sequence is synthesized)
ccactggccatctccacccccagctgcttgtgtccctcctgggatctgctcgtcatcatttttccttcccttctccatctctctggccctctacccctgatctgacatccccactcacga

SEQ ID NO: 14829 - DNA, 120 bp, Artificial Sequence
  ENSG00000012124_25 (sequence is synthesized)
atattatgcccagtttctgcctctgagggaaagcccagaaaaggacagaaacgaagtagaaaggggcccagtcctggcctggcttctcctttggaagtgaggcattgcacggggagacgt

SEQ ID NO: 14830 - DNA, 120 bp, Artificial Sequence
  ENSG00000012124_26 (sequence is synthesized)
acgtatcagcggccccttgactctggggactccgggtttgagatggacacactggtgtggattaacctgccagggagacagagctcacaataaaaatggctcagatgccacttcaaagaa

SEQ ID NO: 14831 - DNA, 120 bp, Artificial Sequence
  ENSG00000012124_27 (sequence is synthesized)
cgaggccggagcctgggccagtgtcttcaacagaattgagggacaggagcctggcgtcagggccaaggggaggggaggcctggggacagcaaaagggacagggagcggagaggtcagctt

SEQ ID NO: 14832 - DNA, 120 bp, Artificial Sequence
  ENSG00000012124_28 (sequence is synthesized)
aagttcctctccaatgacacggtgcagctgaacgtgaagcgtgagtctccccggcatgcctgtgggaagggcaaggtctgtgtcaccttctccccagccccgcagggggcatgcacccag

SEQ ID NO: 14833 - DNA, 120 bp, Artificial Sequence
  ENSG00000012124_29 (sequence is synthesized)
ggcagggggaagcctgcacagacggcggcatcctccagccctggtcacgccgccttgtcagccctggtgtttcgggaaaaagatttgctctagcctaacagaataaaatggtccatcctc

SEQ ID NO: 14834 - DNA, 120 bp, Artificial Sequence
  ENSG00000012124_30 (sequence is synthesized)
aagccatgacatgaattggggattatctggttaggtctttttgttcccctcttggtggggatttttttcgcatcattatcttgtgcctcattcattcaataaatacgtatcatgaaccta

SEQ ID NO: 14835 - DNA, 120 bp, Artificial Sequence
  ENSG00000012124_31 (sequence is synthesized)
gtctggctgcagagagaagtccaggatgccttccaggcaaaggctgccagggagagctggcccctcagttgattaaggtctctcctttctccacccagatagcccggagaccatcggcag

SEQ ID NO: 14836 - DNA, 120 bp, Artificial Sequence
  ENSG00000012124_32 (sequence is synthesized)
cttttgctctcagatgctgccagggtccctgaagagggaagacacgcggaaacaggggaagggtcggagctcagtgggtgagcaagaaaagccacgtggaagaagtaagcggccagatgg

SEQ ID NO: 14837 - DNA, 120 bp, Artificial Sequence
  ENSG00000012124_33 (sequence is synthesized)
gggaggcaggaaatacctgactcctggcacagagctcacaaaccgagcttcctgcagagctcaggcaggggacgccagcggatgacgatggcgatgcagcagcactagacagagctgcgg

SEQ ID NO: 14838 - DNA, 120 bp, Artificial Sequence
  ENSG00000012124_34 (sequence is synthesized)
gatgctgccagggtccctgaagagggaagacacgcggaaacaggcttgcacccagacacgacaccatgcatctcctcggcccctggctcctgctcctggcaccctgaaaccctctacgcc

SEQ ID NO: 14839 - DNA, 120 bp, Artificial Sequence
  ENSG00000012124_35 (sequence is synthesized)
gggattccaggcatgagccaccgcacccggccgagatatctttttcctcctcaatatctatgtgctcctccctcaacccttgggggcttcagtgtaggtggtcagattccccaccattta

SEQ ID NO: 14840 - DNA, 120 bp, Artificial Sequence
  ENSG00000012124_36 (sequence is synthesized)
gtccctcccggtctgccaacctcctgagtcactcctgacggagatgactgatccatccctggcccgcctcccaccctgtccctgggacagtgcctggggcaggcagctccattatcctcc

SEQ ID NO: 14841 - DNA, 120 bp, Artificial Sequence
  ENSG00000012124_37 (sequence is synthesized)
agatgctgccagggtccctgaagagggaagacacgcggaaacaggtaaaaatcattttgcttttattttgcattcaacaagcaagttattacggaacagcagttatgggccaggcatacc

SEQ ID NO: 14842 - DNA, 120 bp, Artificial Sequence
  ENSG00000012124_38 (sequence is synthesized)
tcccagagctgggaacacaggaggtcagccccaaggttctgcaaggccctcaacaggcctggactgaggaggtctggacagcatggccctgtcctgagcctctgtgcataataactgctg

SEQ ID NO: 14843 - DNA, 120 bp, Artificial Sequence
  ENSG00000012124_39 (sequence is synthesized)
ctgctctggaggcgcccatctcccactcatgctgggatgctccagcccgtcccagagcaggttgtggctggagggtgctggcagaggagggacaatggcccggctcctggaggcaagtgt

SEQ ID NO: 14844 - DNA, 120 bp, Artificial Sequence
  ENSG00000012124_40 (sequence is synthesized)
tggctgcagggaacggagtctagtccttgccacagcccttgttaccccttaggtaaccttaaggggatttcaaagaactctggctctgcaaccctgctaagttttttatggaacatgtaa

SEQ ID NO: 14845 - DNA, 120 bp, Artificial Sequence
  ENSG00000012124_41 (sequence is synthesized)
agatgctgccagggtccctgaagagggaagacacgcggaaacagatacccagcagcctttggcatgagccatgtggcccgaggagataaacagacagagagaggaacattgatgcgtgtg

SEQ ID NO: 14846 - DNA, 120 bp, Artificial Sequence
  ENSG00000012124_42 (sequence is synthesized)
gatgctgccagggtccctgaagagggaagacacgcggaaacaggttgtagacagacccctgtcttgagcatcctccttgccaggcctgctgagtcttctgagagtagggtaggttattgg

SEQ ID NO: 14847 - DNA, 120 bp, Artificial Sequence
  ENSG00000012124_43 (sequence is synthesized)
tgtacttctccttttgctctcagatgctgccagggtccctgaagagggaagacacgcggaaacaggcttgcacccagacacgacaccatgcatctcctcggcccctggctcctgctcctg

SEQ ID NO: 14848 - DNA, 120 bp, Artificial Sequence
  ENSG00000012124_44 (sequence is synthesized)
agatgctgccagggtccctgaagagggaagacacgcggaaacaggcttgcacccagacacgacaccatgcatctcctcggcccctggctcctgctcctgggtaaggactgtggcctgggc

SEQ ID NO: 14849 - DNA, 120 bp, Artificial Sequence
  ENSG00000012124_45 (sequence is synthesized)
tagtactggggttctgggatgtcagtgggcactggaggaggaggaaagacccaggcagagaggcgtcaacatagggtagggtgggggcagcggtgtgtatagataaatgtacatacaaat

SEQ ID NO: 14850 - DNA, 120 bp, Artificial Sequence
  ENSG00000012124_46 (sequence is synthesized)
atatatgtttcccatatatacatacacttctctcattgcatcctgctgtctttgtgtatctctgtatttctcccactatcttcagagggaattctttagtctttagaaagctctctgctg

SEQ ID NO: 14851 - DNA, 68 bp, Artificial Sequence
  ENSG00000012124_47 (sequence is synthesized)
ttcagagggaattctttagtctttagaaagctctctgctgggtgcagtggctcatgcctgaaatctgc

SEQ ID NO: 14852 - DNA, 120 bp, Artificial Sequence
  ENSG00000012171_0 (sequence is synthesized)
gactcctcttccagatcctggggcagagtccagggcagctcaaggctcctccacacacacacccgctgaaccctgagcaccctgagctgctgagatggggcgggccggggctgccgccgt

SEQ ID NO: 14853 - DNA, 120 bp, Artificial Sequence
  ENSG00000012171_1 (sequence is synthesized)
gatcccgggcctggccctgctctgggcagtggggctggggagtgccgcccccagccccccacgccttcggctctccttccaagagctccaggcctggcatggtctccagactttcagcct

SEQ ID NO: 14854 - DNA, 120 bp, Artificial Sequence
  ENSG00000012171_2 (sequence is synthesized)
ggagcgaacctgctgctaccaggccttgctggtggatgaggagcgtggacgcctgtttgtgggtgccgagaaccatgtggcctccctcaacctggacaacatcagcaagcgggccaagaa

SEQ ID NO: 14855 - DNA, 120 bp, Artificial Sequence
  ENSG00000012171_3 (sequence is synthesized)
gctggcctggccggcccctgtggaatggcgagaggagtgcaactgggcagggaaggacattggtactgagtgcatgaacttcgtgaagttgctgcatgcctacaaccgcacccatttgct

SEQ ID NO: 14856 - DNA, 120 bp, Artificial Sequence
  ENSG00000012171_4 (sequence is synthesized)
ggcctgtggcacgggagccttccacccaacctgtgcctttgtggaagtgggccaccgggcagaggagcccgtcctccggctggacccaggaaggatagaggatggcaaggggaagagtcc

SEQ ID NO: 14857 - DNA, 120 bp, Artificial Sequence
  ENSG00000012171_5 (sequence is synthesized)
ttatgaccccaggcatcgggctgcctccgtgctggtgggggaggagctatactcaggggtggcagcagacctcatgggacgagactttaccatctttcgcagcctagggcaacgtccaag

SEQ ID NO: 14858 - DNA, 120 bp, Artificial Sequence
  ENSG00000012171_6 (sequence is synthesized)
tctccgaacagagccacacgactcccgctggctcaatgagcccaagtttgtcaaggtattttggatcccggagagcgagaacccagacgacgacaaaatctacttcttctttcgtgagac

SEQ ID NO: 14859 - DNA, 120 bp, Artificial Sequence
  ENSG00000012171_7 (sequence is synthesized)
ggcggtagaggcggcgccggcactgggacgcctgtccgtgtcccgcgttggccagatctgccggaacgacgtgggcggccagcgcagcctggtcaacaagtggacgacgttcctgaaggc

SEQ ID NO: 14860 - DNA, 120 bp, Artificial Sequence
  ENSG00000012171_8 (sequence is synthesized)
gcggctggtgtgctcggtgcccggcgtcgagggcgacacccacttcgatcagctccaggatgtgtttctgttgtcctcgcgggaccaccggaccccgctgctctatgccgtcttctccac

SEQ ID NO: 14861 - DNA, 120 bp, Artificial Sequence
  ENSG00000012171_9 (sequence is synthesized)
gtccagcagcatcttccagggctctgcggtgtgcgtgtacagcatgaacgacgtgcgccgggccttcttgggaccctttgcacacaaggaggggcccatgcaccagtgggtgtcatacca

SEQ ID NO: 14862 - DNA, 120 bp, Artificial Sequence
  ENSG00000012171_10 (sequence is synthesized)
gggtcgcgtcccctacccgcggccaggcatgtgccccagcaagacctttggcaccttcagttccaccaaggacttcccagacgatgtcatccagtttgcgcggaaccaccccctcatgta

SEQ ID NO: 14863 - DNA, 120 bp, Artificial Sequence
  ENSG00000012171_11 (sequence is synthesized)
caactctgtcctgcccactggggggcgccctcttttcctacaagttggagccaattacaccttcactcaaattgccgcggaccgggttgcagccgctgacggacactatgacgtcctctt

SEQ ID NO: 14864 - DNA, 120 bp, Artificial Sequence
  ENSG00000012171_12 (sequence is synthesized)
cattggcacagacgttggcacggtgctgaaggtgatctcggtccccaagggcagtaggcccagcgcagaggggctgctcctggaggagctgcacgtgtttgaggactcggccgctgtcac

SEQ ID NO: 14865 - DNA, 120 bp, Artificial Sequence
  ENSG00000012171_13 (sequence is synthesized)
atcgcgttgcaccgctgcgctgcccacggccgcgtctgcaccgaatgctgtctggcgcgtgacccctactgcgcctgggacggggtcgcgtgcacgcgcttccagcccagtgccaagagg

SEQ ID NO: 14866 - DNA, 120 bp, Artificial Sequence
  ENSG00000012171_14 (sequence is synthesized)
cggttccggcggcaagacgtaaggaatggcgaccccagcacgttgtgctccggagactcgtctcgtcccgcgctgctggaacacaaggtgttcggcgtggagggcagcagcgcctttctg

SEQ ID NO: 14867 - DNA, 120 bp, Artificial Sequence
  ENSG00000012171_15 (sequence is synthesized)
gagtgtgagccccgctcgctgcaggcgcgcgtggagtggactttccagcgcgcaggggtgacagcccacacccaggtgctggcagaggagcgcaccgagcgcaccgcccggggactactg

SEQ ID NO: 14868 - DNA, 120 bp, Artificial Sequence
  ENSG00000012171_16 (sequence is synthesized)
ctgcgcaggctgcggcgccgggactcgggcgtgtacttgtgcgccgccgtcgagcagggctttacgcaaccgctgcgtcgcctgtcgctgcacgtgttgagtgctacgcaggccgaacga

SEQ ID NO: 14869 - DNA, 120 bp, Artificial Sequence
  ENSG00000012171_17 (sequence is synthesized)
ctggcgcgggccgaggaggctgcgcccgccgcgccgccgggccccaaactctggtaccgggactttctgcagctggtggagccgggcggaggtggcagcgcgaactccctgcgcatgtgc

SEQ ID NO: 14870 - DNA, 120 bp, Artificial Sequence
  ENSG00000012171_18 (sequence is synthesized)
cgcccgcagcctgcgctgcagtcactgcccctggagtcgcggagaaagggccgtaaccggaggacccacgcccctgagcctcgcgctgagcgggggccgcgcagcgcaacgcactggtga

SEQ ID NO: 14871 - DNA, 120 bp, Artificial Sequence
  ENSG00000012171_19 (sequence is synthesized)
ccagactgtccccacgccgggaaccaagcaggagacgacaggcgagagaggagccagacagaccctgaaaagaaggacgggttggggccgggcacattgggggtcaccggccgatggaga

SEQ ID NO: 14872 - DNA, 120 bp, Artificial Sequence
  ENSG00000012171_20 (sequence is synthesized)
caccaaccgacaggccctggctgagggcagctgcgcgggcttatttattaacaggataacccttgaatgtagcagccccgggagggcggcacaggtcgggcgcaggattcagccggaggg

SEQ ID NO: 14873 - DNA, 120 bp, Artificial Sequence
  ENSG00000012171_21 (sequence is synthesized)
aagggacggggaagccgagctccagagcaacgaccagggccgaggaggtgcctggagtgcccaccctgggagacagaccccacctccttgggtagtgagcagtgagcagaaagctgtgaa

SEQ ID NO: 14874 - DNA, 120 bp, Artificial Sequence
  ENSG00000012171_22 (sequence is synthesized)
caggctgggctgctggaggtggggcgaggcaggccgactgtactaaagtaacgcaataaacgcattatcagccaaagctggaatggccccagcagaaaaccccagtcctcggccttgcta

SEQ ID NO: 14875 - DNA, 120 bp, Artificial Sequence
  ENSG00000012171_23 (sequence is synthesized)
tcggccttgctatgtggtcttgggcaccttactagcggtgtcagggcccgagtttctcctgtccaaggttgcctggtgaggattaaaggtggttccggccaggcgcggtggctcacgcct

SEQ ID NO: 14876 - DNA, 120 bp, Artificial Sequence
  ENSG00000012171_24 (sequence is synthesized)
gggcgggggctgcttcttaaaggagccgtcagagggtccccagcggccccagggtgggaaggggccagagtggagagatgctgctgcggaagtcctcggtggagtgtgagaaggcagcca

SEQ ID NO: 14877 - DNA, 120 bp, Artificial Sequence
  ENSG00000012171_25 (sequence is synthesized)
gacatggtgctagaggttgggtggtcagacactgtgatcccgggtgctgtgcccgcactacgggaaggggaagcagcgcgtgggtctcgcatcaggaggcaaggccaggacccgctgacc

SEQ ID NO: 14878 - DNA, 120 bp, Artificial Sequence
  ENSG00000012171_26 (sequence is synthesized)
acgacgacaaaatctacttcttctttcgtgagacggcggtagaggcggcgccggcactgggacgcctgtccgtgtcccgcgttggccagatctgccgggtgaggagtccctgggccacac

SEQ ID NO: 14879 - DNA, 120 bp, Artificial Sequence
  ENSG00000012171_27 (sequence is synthesized)
ccggcgaccctgcccctacccctttgcctgccctggtctcgccctcatcccctttgatcgtcccggcagaacgacgtgggcggccagcgcagcctggtcaacaagtggacgacgttcctg

SEQ ID NO: 14880 - DNA, 120 bp, Artificial Sequence
  ENSG00000012171_28 (sequence is synthesized)
tcgcgtcccctacccgcggccaggcatggttcgtagcccagggacttctgctacaacccacttcaaagcctcaagggtttgagaacttggcctggggtcttcttggtgaatgtggtttct

SEQ ID NO: 14881 - DNA, 120 bp, Artificial Sequence
  ENSG00000012171_29 (sequence is synthesized)
tcctttagttatgggtgggaaaacgtttccatcataagacaaggcttgtttcccgcctctgacttcctagggcaaggctgatctcctctctaattctcagggcagggttctgtccccatc

SEQ ID NO: 14882 - DNA, 120 bp, Artificial Sequence
  ENSG00000012171_30 (sequence is synthesized)
cccctccatgttcccagaggctgggcatggagggctgcctatcaagcccccatatctatatccctgctgtgcctccctttcccccacccccagtgccccagcaagacctttggcaccttc

SEQ ID NO: 14883 - DNA, 120 bp, Artificial Sequence
  ENSG00000012171_31 (sequence is synthesized)
tggtagtttgcagtcccgggtttgagtacaggctctggctttgttagactgtgtgacctgaggcgtaagacctcagtgttcccatctgtcgagtggaagaagggatccctgaccgatggg

SEQ ID NO: 14884 - DNA, 120 bp, Artificial Sequence
  ENSG00000012171_32 (sequence is synthesized)
caggtgagccttactccgccctccccgccaggctcctgtcccaccccctgcatccaggagaggccccgccctacccaacgaagccccgtccaaccagacccactccccgccctgtccagt

SEQ ID NO: 14885 - DNA, 120 bp, Artificial Sequence
  ENSG00000012171_33 (sequence is synthesized)
ttggtccctcacctgcactccacaagctgctgaggccccattgcgtccaacggggctcccgacccgcctcccctgaatcaaggagaagacccgccctcgaccctcccattaaggtccctg

SEQ ID NO: 14886 - DNA, 120 bp, Artificial Sequence
  ENSG00000012171_34 (sequence is synthesized)
accaccccccaccaagttcatgtaaaccccgcctctttcggattctcccttgaagaccaccagctcccaaacactcagccttaaaatgtgcgcctgcgggcacccctttcccgctccacc

SEQ ID NO: 14887 - DNA, 120 bp, Artificial Sequence
  ENSG00000012171_35 (sequence is synthesized)
tcggctcccaatgactctttgcttcttccgtcgcgtgctagggcccggaagccctgttcccggcccgacacccccgcctcacgctgccctctgcccgcaggtgctggcagaggagcgcac

SEQ ID NO: 14888 - DNA, 120 bp, Artificial Sequence
  ENSG00000012171_36 (sequence is synthesized)
ccccagcactccccagggaaggagccctgggaccccactccagcctggagagacccagaggaatggctccctgagactgagtgcatgaacttcgtgaagttgctgcatgcctacaaccgc

SEQ ID NO: 14889 - DNA, 120 bp, Artificial Sequence
  ENSG00000012171_37 (sequence is synthesized)
tgctgatggaagctctccctgttcagtcccatctccacatcctttcctgggctgtgtctccaccctgtggatgctgcccaacccacactcttccagtccacactcttcacaacccaaaca

SEQ ID NO: 14890 - DNA, 120 bp, Artificial Sequence
  ENSG00000012171_38 (sequence is synthesized)
gtgggtggcacattgtgaattaatgtctgtgagtgtgtatacaagagaggagattactgggaagggtgacgtggtgaggcgggcttgccagtgcagggtgaccctgagggtgtgcccagt

SEQ ID NO: 14891 - DNA, 120 bp, Artificial Sequence
  ENSG00000012171_39 (sequence is synthesized)
ggcgtgggtgtgtctgtgattgtggccaggcggggcaccctcggaggggagggttcggaagtggaatgcgaccccccagcctctttcccctaggggctgtaatctgatccctggggactc

SEQ ID NO: 14892 - DNA, 120 bp, Artificial Sequence
  ENSG00000012171_40 (sequence is synthesized)
ggcagcggcgcagactccgggagcccccgccgcagcggggctgtgcgccctaccccagctaggccccttccccgcagaggatgtgtttctgttgtcctcgcgggaccaccggaccccgct

SEQ ID NO: 14893 - DNA, 120 bp, Artificial Sequence
  ENSG00000012171_41 (sequence is synthesized)
gctaaaacagaggcctgcctgttctggctgggatgagggcagggaggtcgaggtggctgaggtctgggggtggtgagtcagggtgggggctcgtgtaattcttctggggtgcctctgagt

SEQ ID NO: 14894 - DNA, 120 bp, Artificial Sequence
  ENSG00000012171_42 (sequence is synthesized)
catgggaggctttgcaggcctgtgcttccccagacacccaccctcgtgaggcctgggctggtcagcaagggcccccaggtccctgtagcccatgttagtacttgcctgggctgatgccga

SEQ ID NO: 14895 - DNA, 120 bp, Artificial Sequence
  ENSG00000012171_43 (sequence is synthesized)
agagagggaggggtgaggatgccactggtgagctgggacctcttaaggctacgtccctgggggaagcctcacacctccaaccctactagactgagtgcatgaacttcgtgaagttgctgc

SEQ ID NO: 14896 - DNA, 120 bp, Artificial Sequence
  ENSG00000012174_0 (sequence is synthesized)
ggcggtagcttggttcctgagcggatgctggggctgtaaggcgcgcgcggtcagctgttggcggtgcagggaggaggacgccggggctcgccttccctcctctgccgccgctgccgccat

SEQ ID NO: 14897 - DNA, 120 bp, Artificial Sequence
  ENSG00000012174_1 (sequence is synthesized)
gattccggtgtcgctggtggtggtggtggtgggtggctggactgtcgtctacctgaccgacttggtgctgaagtcatctgtctattttaaacattcttatgaagactggctggaaaacaa

SEQ ID NO: 14898 - DNA, 120 bp, Artificial Sequence
  ENSG00000012174_2 (sequence is synthesized)
cggactgagcatctcccctttccacataagatggcaaactgctgttttcaatcgtgccttttacagttggggacggcggaaagcaaggatgctttaccaatggttcaattttggaatggt

SEQ ID NO: 14899 - DNA, 120 bp, Artificial Sequence
  ENSG00000012174_3 (sequence is synthesized)
gtttggcgtaattgccatgtttagctcattttttctccttggaaaaacgctgatgcagactttggcacaaatgatggctgactctccctcttcttattcttcctcctcttcttcctcttc

SEQ ID NO: 14900 - DNA, 120 bp, Artificial Sequence
  ENSG00000012174_4 (sequence is synthesized)
ctcctcttcttcctcttcctcttcttcatcttcttcctcttcctcgcttcacaatgaacaggtgttacaagttgtggttcctggtataaatttacccgtcaatcaactgacctatttctt

SEQ ID NO: 14901 - DNA, 120 bp, Artificial Sequence
  ENSG00000012174_5 (sequence is synthesized)
cacggcagttctcattagtggtgttgtacatgaaattggacatgggatagcagctattagggaacaagttcgatttaatggctttgggatttttctcttcattatttatcctggagcatt

SEQ ID NO: 14902 - DNA, 120 bp, Artificial Sequence
  ENSG00000012174_6 (sequence is synthesized)
tgttgatctgttcaccactcatttgcaacttatatcgccagtccagcagctaaggatattttgtgcaggtatctggcataattttgtccttgcactcttgggtattttagctcttgttct

SEQ ID NO: 14903 - DNA, 120 bp, Artificial Sequence
  ENSG00000012174_7 (sequence is synthesized)
cctcccagtaattctcttgccattttactacactggagttggggtgctcatcactgaagttgctgaggactctcctgccattggacccagaggcctttttgtgggagaccttgtcaccca

SEQ ID NO: 14904 - DNA, 120 bp, Artificial Sequence
  ENSG00000012174_8 (sequence is synthesized)
tctacaggattgtcctgttactaatgtgcaagattggaatgaatgtttagataccatcgcctatgagccccaaattggttactgtataagtgcatcaactttacagcagttaagtttccc

SEQ ID NO: 14905 - DNA, 120 bp, Artificial Sequence
  ENSG00000012174_9 (sequence is synthesized)
agttagagcatacaaacgactagatggttcaactgaatgctgtaacaatcacagcctcacagatgtgtgcttttcctacagaaataattttaataagcgtttgcatacatgtcttcctgc

SEQ ID NO: 14906 - DNA, 120 bp, Artificial Sequence
  ENSG00000012174_10 (sequence is synthesized)
ccggaaagcagttgaagcaactcaagtttgcagaaccaataaagactgtaaaaaaagctcaagttcaagtttctgtataataccttctttggaaactcacactcgcttaataaaagtaaa

SEQ ID NO: 14907 - DNA, 120 bp, Artificial Sequence
  ENSG00000012174_11 (sequence is synthesized)
acacccacctcagattgatatgttatacgtaggacatcctctgcatcttcactacacagtgagcatcaccagttttatcccacgttttaactttctaagcatagatctgccagtggttgt

SEQ ID NO: 14908 - DNA, 120 bp, Artificial Sequence
  ENSG00000012174_12 (sequence is synthesized)
ggagacatttgtcaagtacctgatttccctctcaggagctctggctattgttaatgcagtaccctgctttgctttggatggacaatggattctaaactctttcttggatgccacccttac

SEQ ID NO: 14909 - DNA, 120 bp, Artificial Sequence
  ENSG00000012174_13 (sequence is synthesized)
ctcagtgattggagacaatgatgtcaaagatctaatagggtttttcatcttgctgggtggcagtgtacttttggctgccaatgtgaccctgggactctggatggttacagcacggtaatg

SEQ ID NO: 14910 - DNA, 120 bp, Artificial Sequence
  ENSG00000012174_14 (sequence is synthesized)
tttgcactcatctgacagaatccctgagttacagtatacagctatgtggtaatattcattgccattgaaattcttacttggtatgaaatataaagtgtttccttaaaattacatcttagc

SEQ ID NO: 14911 - DNA, 120 bp, Artificial Sequence
  ENSG00000012174_15 (sequence is synthesized)
caacaaccctgagctcctcccatatccagagtacccaaactctgtggtagaagataagcagaagaaatgaaaggcatagtccctgactatattctaatttaggactgaatgtacccagat

SEQ ID NO: 14912 - DNA, 120 bp, Artificial Sequence
  ENSG00000012174_16 (sequence is synthesized)
gcttgtggaataatatctaagcaagtgcaaattcatgtaataccgttttgtctgattacatattgtgttgaaatagtataaaggagaacagaactgggtggaattaattgggaaaaactt

SEQ ID NO: 14913 - DNA, 120 bp, Artificial Sequence
  ENSG00000012174_17 (sequence is synthesized)
cttacaaaagcatcattaatcaaaatttgaaggagaccagactttggccaagtggaaggatgaccattgtcttggcctgtatctcttgtcctttgtcttgtttgaaaagtattttaaaac

SEQ ID NO: 14914 - DNA, 120 bp, Artificial Sequence
  ENSG00000012174_18 (sequence is synthesized)
gtgtattattttgtgctctgaaagctgaggtctgattacaattagtaaaattctatagaagaatctgctgacgtgaaagggaaaaatctttgtcaaatgataccaaataaatgaacaaaa

SEQ ID NO: 14915 - DNA, 120 bp, Artificial Sequence
  ENSG00000012174_19 (sequence is synthesized)
caggaagtagggcctatgatatcgtgagacatgttttgccccacaagagttgcatcttttataaggtgtctctgccccctcataaagcagcactagctttgacatccacggtgagctgca

SEQ ID NO: 14916 - DNA, 120 bp, Artificial Sequence
  ENSG00000012174_20 (sequence is synthesized)
ggaagcatcacacaccagcagcatgtgagcagagggaggcagttggggttgaacttcggaactaggccgggtctcctgacagatcacaagacaccccagaggatcttcagcagtcctact

SEQ ID NO: 14917 - DNA, 120 bp, Artificial Sequence
  ENSG00000012174_21 (sequence is synthesized)
tcccattctctatagagctttgaagcttggaacccttccagggtaaacattttctcttgtgctgctcaggacatctggggcctagctcctgggttcctgtctccaagaagcaatgacctt

SEQ ID NO: 14918 - DNA, 120 bp, Artificial Sequence
  ENSG00000012174_22 (sequence is synthesized)
aaactctgagccatactctgtcctcaccagcggctcccatgtttttctgtgtcaggttattaagtacctagtccttgttttctgtctctctcctaagctacctctctgggtccacagaag

SEQ ID NO: 14919 - DNA, 120 bp, Artificial Sequence
  ENSG00000012174_23 (sequence is synthesized)
acttggtagtatagtgagaatggctatacgtgagtacaaacgtggattttccagggcttgggaactgattcttgagcccagaagagccacgcctgctttgaggtcttttggagtggagat

SEQ ID NO: 14920 - DNA, 120 bp, Artificial Sequence
  ENSG00000012174_24 (sequence is synthesized)
gcagccctgggaaatttggggagtcagcaggccagtgtgaagctattggtcctaggagtatatgagcttgctgtttctttgatggaaaatacatgcttctcttgtatactcagaagtgac

SEQ ID NO: 14921 - DNA, 120 bp, Artificial Sequence
  ENSG00000012174_25 (sequence is synthesized)
taagggcaataactcattaatagccatctatccaacttctttactgagtgatgtattccatggggttacctttttcagattattgagttgctctgtaagcactaaaactttttaatcatt

SEQ ID NO: 14922 - DNA, 120 bp, Artificial Sequence
  ENSG00000012174_26 (sequence is synthesized)
tttaagaaactttttagattgtattacaaatttgccttaacagtaattagatgttgaatataattttaacattttattaatgacttgggtcatcagttaataccagtactaaaaccatac

SEQ ID NO: 14923 - DNA, 120 bp, Artificial Sequence
  ENSG00000012174_27 (sequence is synthesized)
gaattattggtttattccagaaaatacagtatttgttctatttttaggtagacaatcatttgggatcagagtacattagcatagtaatgctcagtcagacctgttcaagtagtagagctt

SEQ ID NO: 14924 - DNA, 120 bp, Artificial Sequence
  ENSG00000012174_28 (sequence is synthesized)
ggagaatgccatgaaatacttatataattaatttgattgcatgaactaagcaattttactaatgaaaaggttgtatatgtgcaagtcacttttttaaaaaccaagaaaaaactttaatag

SEQ ID NO: 14925 - DNA, 120 bp, Artificial Sequence
  ENSG00000012174_29 (sequence is synthesized)
aggaaatcttattcattaatttatttttctgagtaaaaaaacgaaacccaaatctcattttatttcaactgttaaacattttgatctgttgacccataggatcaggatttgggaaccact

SEQ ID NO: 14926 - DNA, 120 bp, Artificial Sequence
  ENSG00000012174_30 (sequence is synthesized)
ttactaggaaagagcagatcagtaccatttgtataaaaccggcctcattatgtaagaaagaaaatgttacgtgttttcttctttagcttggttgtgggcacttctacagcaaggaccata

SEQ ID NO: 14927 - DNA, 120 bp, Artificial Sequence
  ENSG00000012174_31 (sequence is synthesized)
tcatattcatctttgcatccctggcacagtgcatgagacataagtacttaataaatgcagttgaatggataatgattagtgttatttatggattagaaaaagcatgtttctatttaagta

SEQ ID NO: 14928 - DNA, 120 bp, Artificial Sequence
  ENSG00000012174_32 (sequence is synthesized)
agctgtaaaaagtattattgaatatttactgtaaatatatgttcacataaaaaaataacttggagggtctttgtgtccctggcatattatcatcttcatggaaagaatccactgtggttt

SEQ ID NO: 14929 - DNA, 120 bp, Artificial Sequence
  ENSG00000012174_33 (sequence is synthesized)
ctgtagagtgattggaaaaatggattattttgaggattgaagaaagtgttctttctgcgttgtcactttgttcaacagtaaaactttattctcagtgttcctactctgcattgtttacat

SEQ ID NO: 14930 - DNA, 120 bp, Artificial Sequence
  ENSG00000012174_34 (sequence is synthesized)
ttttgacagttttttttaatcacctacaatctgtaaagaatgtatatattcttttcagcatctcagtttgaaaagacatgcagttaaacttgaccttttgataatcgctcttacaggtca

SEQ ID NO: 14931 - DNA, 120 bp, Artificial Sequence
  ENSG00000012174_35 (sequence is synthesized)
ttgtctgttctaacagcaaattgtaaacatgtgcttcatagatattgtggctctcagtcatcactttgtcctatggtatttattgaatgttcacatactaatggtgcacaggtgtttttt

SEQ ID NO: 14932 - DNA, 120 bp, Artificial Sequence
  ENSG00000012174_36 (sequence is synthesized)
tctataaatcttctgactgtcctgtaattcattcttaagctttaacttgaaggtatcgtaattgccggcatttgatgtttagcaataaaagaataaatgtgtaccagcattttatgttta

SEQ ID NO: 14933 - DNA, 120 bp, Artificial Sequence
  ENSG00000012174_37 (sequence is synthesized)
gcttcaagcaccagtacctgccattcactaatccttaaaccatgtctatacatttattctgttctaatctgtttaaagcaaatcagtaaagtaaatagattccaaccaatagacattttt

SEQ ID NO: 14934 - DNA, 120 bp, Artificial Sequence
  ENSG00000012174_38 (sequence is synthesized)
cttggtaagttggatgctaatatgtgtttcctttattatatattgttgaacttctaactattttcattatatcatatttaacttttaggactctaatattttctgctttcaaaacacttg

SEQ ID NO: 14935 - DNA, 120 bp, Artificial Sequence
  ENSG00000012174_39 (sequence is synthesized)
ctctgtctcaaaaaaaaaaaaaaaaatcagcattcaaggtcaatcataaccaattaactaattccaataatcaaataccccaatataatattatctttatgcatgtctgtagatatatta

SEQ ID NO: 14936 - DNA, 120 bp, Artificial Sequence
  ENSG00000012174_40 (sequence is synthesized)
ttatgcatgtctgtagatatattatagtactttaaacttttataattgaaaaagggaatataagtaataagaaccggttctactttgcataagcttatgtcagaacagataaacaacgat

SEQ ID NO: 14937 - DNA, 120 bp, Artificial Sequence
  ENSG00000012174_41 (sequence is synthesized)
agttaacaactaaatatataaaaatcaaagcataaacattctgtattaatatattgttagcccaacacagacatgcaataaggaaagattacaagaaataagaaggaacttggcaaacaa

SEQ ID NO: 14938 - DNA, 120 bp, Artificial Sequence
  ENSG00000012174_42 (sequence is synthesized)
aaaaccccatctgggatttagaaaaaattcccttacttcttaaaaattcccttaatacttaaacagttctagtggaatcagtgttggcatgtctgattctatctggggtagagttatttt

SEQ ID NO: 14939 - DNA, 120 bp, Artificial Sequence
  ENSG00000012174_43 (sequence is synthesized)
atgtattttatgtggcagccatcctaaagaagttgtcttggcttccaaaaataccatgtgaagtcagatatgttgctctgtgcagcagatgacagagctgaggcaagtttcttctcggat

SEQ ID NO: 14940 - DNA, 120 bp, Artificial Sequence
  ENSG00000012174_44 (sequence is synthesized)
gagttatttcagctctgaaaaatcagcttcccaattctttatacaaaatcagcttcccaattctttatacaaaattggaggtgttagaaaatagaaattatgctcacagactatatcttt

SEQ ID NO: 14941 - DNA, 120 bp, Artificial Sequence
  ENSG00000012174_45 (sequence is synthesized)
aagtaaaaaaatatcctgatacttgtccacatctattggtgtagggaaatatgattaataatcaagaatagttttagtaaagtactgtgtgcaacacaggcaaagtagtaagaactgatt

SEQ ID NO: 14942 - DNA, 120 bp, Artificial Sequence
  ENSG00000012174_46 (sequence is synthesized)
tttttaaaaaaactttttaaaatttactcatttgtaagaatttttttattatcaaaaatgtttagacacgatggagaatatatttcctcaatataatataatgcttcaagcaccagtacc

SEQ ID NO: 14943 - DNA, 120 bp, Artificial Sequence
  ENSG00000012174_47 (sequence is synthesized)
tgccattcactaatccttagaccatgtctatagatttattctgttctaatctgtttaaagtaaatcagtaaagtaaatagattcaaaccaatagacatttttcttggtaagttggatgct

SEQ ID NO: 14944 - DNA, 120 bp, Artificial Sequence
  ENSG00000012174_48 (sequence is synthesized)
aatatgtgtgtttcctttattatatattgttgaacttctaactattttcataatatcatatttaacttttaggactctaatattttctagtataaacgagcccacatgtatctttctgcc

SEQ ID NO: 14945 - DNA, 120 bp, Artificial Sequence
  ENSG00000012174_49 (sequence is synthesized)
agcttcggcagttattaacattttgccaattttttcatctaagcagtccacttttaggggaagtattttaaagtacatcccaggcatcctatcatttcatccataacctttcagcctgcc

SEQ ID NO: 14946 - DNA, 120 bp, Artificial Sequence
  ENSG00000012174_50 (sequence is synthesized)
tttaacggatgatgactcattaaacacgaccacaatactgttataattcctaacaaaataacactaatttctgatatctggttggtattcagttgtttctaattcttttcattatagttg

SEQ ID NO: 14947 - DNA, 120 bp, Artificial Sequence
  ENSG00000012174_51 (sequence is synthesized)
atttaaattagttaggatgtcttctaagactttttaaatttgtaacaattttccttgacctgtttttgaaatgttatttttttgttgaagaaactgaggcatttgttttgttgaatttcc

SEQ ID NO: 14948 - DNA, 120 bp, Artificial Sequence
  ENSG00000012174_52 (sequence is synthesized)
taaattctgggtttttctggttatatcttatcctcatgatgtcattaacttgttcagatgtcttccaattttctataaactgctaattaggtccatggcgttgattagattcagaatcct

SEQ ID NO: 14949 - DNA, 120 bp, Artificial Sequence
  ENSG00000012174_53 (sequence is synthesized)
ttttttttgtttgggttttttttttggcaaaaacacttcataaacagcgcttggtacttcctgtggcatcatattgcatccagtatctattgttctctgttttaatggtgttaagattgt

SEQ ID NO: 14950 - DNA, 120 bp, Artificial Sequence
  ENSG00000012174_54 (sequence is synthesized)
tcagtggagcaatctgattctttaaggttgaaatatttataaattttccccattctcaggagcctcttaccatcttccaaaacttttaagatgacagaagattaatatgtaatccacaat

SEQ ID NO: 14951 - DNA, 120 bp, Artificial Sequence
  ENSG00000012174_55 (sequence is synthesized)
gtgttcttctttaaagaaatgatccattattttccacttcttaagtcctttatccttttcttttggtttctctaaatttgatgtaatgtgtattgaattacaaaaaccaaagtgacacac

SEQ ID NO: 14952 - DNA, 120 bp, Artificial Sequence
  ENSG00000012174_56 (sequence is synthesized)
tagttaaataaagttctcttcagtaggattgttttacttaggatatctgcattttcagatgtttagggttttatccttttcctgacagacagactgtaaataaaaattttccctgaaaca

SEQ ID NO: 14953 - DNA, 120 bp, Artificial Sequence
  ENSG00000012174_57 (sequence is synthesized)
ctcagaaactctcttcttattaactgtttgagtatttcactgttgtggatcatgtgctacattttggaggtatttgtttaaatacctaaagcagatattactctttttatactacaatca

SEQ ID NO: 14954 - DNA, 120 bp, Artificial Sequence
  ENSG00000012174_58 (sequence is synthesized)
atccagaagtaattcttttttttttttttcaagccctgggctgtcccagcccaagagtaattcttcaatatctattttgtctcagtatacatgtttattttacatgattactatatctga

SEQ ID NO: 14955 - DNA, 120 bp, Artificial Sequence
  ENSG00000012174_59 (sequence is synthesized)
taaatctgtgcctctatttaagcttttgaaaatggagtatgtatacttagccagtttaaaggagtattaatgtctgtaaatatcacttaaaatacatactatggctggtccaaatgcagt

SEQ ID NO: 14956 - DNA, 120 bp, Artificial Sequence
  ENSG00000012174_60 (sequence is synthesized)
tgtgcttacaattaattgaacacaaccagttacagaattctttgttccttctctattcccactacatcacttgactagccttaaaaaaaaaatacatactagattaattttgatggcagg

SEQ ID NO: 14957 - DNA, 120 bp, Artificial Sequence
  ENSG00000012174_61 (sequence is synthesized)
cttagcccctgggtctgtggacatttaagaaagctatggattgatggtattttatatgtttctaggtaacttcgttatccttcattgtaagtaggagtgaaagatatggtcagatatact

SEQ ID NO: 14958 - DNA, 120 bp, Artificial Sequence
  ENSG00000012174_62 (sequence is synthesized)
attacagagtgtccaatgatccaaaagttattcatgttcaatttagagtagaattcagtacacataactaaattctaggaatttataccatttcagagcaataaagccacctaggaaaga

SEQ ID NO: 14959 - DNA, 120 bp, Artificial Sequence
  ENSG00000012174_63 (sequence is synthesized)
catttgcaacttatatcgccagtccagcagctaaggatattttgtgcagatttctccatcacacaagacctggagatcccggcagatattgtggagctccacgacatcaatgtggagccc

SEQ ID NO: 14960 - DNA, 120 bp, Artificial Sequence
  ENSG00000012174_64 (sequence is synthesized)
ctacggtggccacaaccatccgccattgatggtgttgcagccgctcttcacgaacacgggctatggcgaccacgaccaggaaatgcttatgttgcagacacaagaggaagtggtgggcta

SEQ ID NO: 14961 - DNA, 120 bp, Artificial Sequence
  ENSG00000012174_65 (sequence is synthesized)
ttgcgactcagacaaccagctaggcaacgacttggaggaccagttggccctcccggatagcattgaagacgagcacttccagatgaccctggcctctctgtcggcctcggcggcatcaac

SEQ ID NO: 14962 - DNA, 120 bp, Artificial Sequence
  ENSG00000012174_66 (sequence is synthesized)
atcaacatcaacccagagccgcagcaaaaagcccagcaaaaagcccagcggcaagagtgccaccagcactgaggccaacccggcaggcagcagctccagcctgggcacgaggaagtggga

SEQ ID NO: 14963 - DNA, 120 bp, Artificial Sequence
  ENSG00000012174_67 (sequence is synthesized)
gcagaagcaaatgcaggtcaaaacgctggagggtgagttttccgtgactatgtggtcccctaacgataacaatgaccaaggggcagtgggtgaaggccaggctgaaaacccacctgatta

SEQ ID NO: 14964 - DNA, 120 bp, Artificial Sequence
  ENSG00000012174_68 (sequence is synthesized)
ttccgagtacttgaaagggaagaaacttcctcctggggggttaccaggcattgatctctcagatcctaaacagctggcagaatttactaaagtgaagcccaaaaggtccaaaggagaacc

SEQ ID NO: 14965 - DNA, 120 bp, Artificial Sequence
  ENSG00000012174_69 (sequence is synthesized)
tcccaaaacagtcccttgctcttatagcggctgcgaaaagatgttccgggattacgccgccatgagaaaacatctccacatccacgggcccagagtccacgtatgtgcagaatgtggcaa

SEQ ID NO: 14966 - DNA, 120 bp, Artificial Sequence
  ENSG00000012174_70 (sequence is synthesized)
agcttttcttgagagctcaaagctgagacgacaccagctggtccacaccggcgagaagccctttcagtgcacattcgaaggctgcgggaaacgcttttcccttgatttcaatttgcgcac

SEQ ID NO: 14967 - DNA, 120 bp, Artificial Sequence
  ENSG00000012174_71 (sequence is synthesized)
acacttgcgcatccacaccggcgataagcccttcgtgtgccccttcgatgtttgcaacaggaagttcgctcagtcaaccaacctgaaaacccacatattaacgcatgtgaagaccaaaaa

SEQ ID NO: 14968 - DNA, 120 bp, Artificial Sequence
  ENSG00000012211_0 (sequence is synthesized)
ggacgcgcggtggcctgacggtcgcaaggattacattcgcctgacccggcccggcttgaccctgcccgggcgcgccatgttcgcgcgtgggtcccggaggcgccgctccgggcgtgcgcc

SEQ ID NO: 14969 - DNA, 120 bp, Artificial Sequence
  ENSG00000012211_1 (sequence is synthesized)
tccagaggcagaggacccagaccggggccagccctgcaactcctgtagggagcagtgccctggcttcctgctccacggctggagaaagatctgccagcattgcaaatgcccgcgggagga

SEQ ID NO: 14970 - DNA, 120 bp, Artificial Sequence
  ENSG00000012211_2 (sequence is synthesized)
gcatgcagtgcacgcggtgcctgtggacctggaacgcatcatgtgtcggctaatctcggacttccagcgccactccatctccgacgacgactcaggctgtgcatcggaggagtatgcctg

SEQ ID NO: 14971 - DNA, 120 bp, Artificial Sequence
  ENSG00000012211_3 (sequence is synthesized)
ggtgcccccaggccttaagccggagcaggtatatcaatttttcagctgcctcccagaggacaaggtcccctacgtcaacagtcctggggagaaatacaggatcaagcagctgctgcacca

SEQ ID NO: 14972 - DNA, 120 bp, Artificial Sequence
  ENSG00000012211_4 (sequence is synthesized)
gctgcccccacacgacagtgaggcacagtactgcacagcactggaagaggaggaaaagaaagagctccgagcctttagccagcagcggaagcgggagaatctggggcgtggcatcgtgcg

SEQ ID NO: 14973 - DNA, 120 bp, Artificial Sequence
  ENSG00000012211_5 (sequence is synthesized)
catcttcccggtgaccatcactggggccatctgtgaggagtgcggaaagcagattggaggtggggacatcgcagtgtttgccagccgtgcaggcctgggtgcctgctggcacccacagtg

SEQ ID NO: 14974 - DNA, 120 bp, Artificial Sequence
  ENSG00000012211_6 (sequence is synthesized)
cttcgtgtgtaccacgtgccaggaactgctggttgacctcatctacttctaccatgttggcaaggtctactgcgggcgtcaccatgccgaatgcctgcgtccacgctgccaagcctgtga

SEQ ID NO: 14975 - DNA, 120 bp, Artificial Sequence
  ENSG00000012211_7 (sequence is synthesized)
cgagatcatcttctcccctgagtgcacggaggctgagggccgccactggcacatggatcacttctgctgctttgagtgtgaagcttcactaggagggcagcgctatgtcatgcgtcagag

SEQ ID NO: 14976 - DNA, 120 bp, Artificial Sequence
  ENSG00000012211_8 (sequence is synthesized)
ccgcccccactgctgcgcctgctacgaggcccgccacgcggagtactgtgatggctgtggggagcacatcggcctggaccaaggccagatggcttacgagggccagcactggcatgcctc

SEQ ID NO: 14977 - DNA, 120 bp, Artificial Sequence
  ENSG00000012211_9 (sequence is synthesized)
agaccgctgcttctgctgtagtcgctgtgggcgggccctgctgggccgcccattcctgccacgccgaggcctaatcttctgctctcgagcctgcagccttgggtccgagcccacagctcc

SEQ ID NO: 14978 - DNA, 120 bp, Artificial Sequence
  ENSG00000012211_10 (sequence is synthesized)
agggccgagccgccgcagctggagtgccggccctgtcacagccccacttgcagcctccacagcctctttctctgctgtgaagggggcatcagagaccaccaccaaaggcaccagcacaga

SEQ ID NO: 14979 - DNA, 120 bp, Artificial Sequence
  ENSG00000012211_11 (sequence is synthesized)
gctttctgagaggggctccccaccgccactccatgccggaactggggctccgcagtgtccccgagccgcccccagagtcccccggccagcctaacctgcgcccagatgatagtgccttcg

SEQ ID NO: 14980 - DNA, 120 bp, Artificial Sequence
  ENSG00000012211_12 (sequence is synthesized)
gtcgtcagagcaccccacgcgtcagcttccgcgaccctctggtgtctgaaggaggcccgcgccggaccctgagtgcacccccggcccagcgccgcaggccacgcagtcccccacccaggg

SEQ ID NO: 14981 - DNA, 120 bp, Artificial Sequence
  ENSG00000012211_13 (sequence is synthesized)
cccccagccgtcgccgccaccatcatcataatcaccatcaccatcacaaccgccacccaagcagacgtcgccactatcaatgtgacgcgggatcagggtcagactcggaatcttgctcca

SEQ ID NO: 14982 - DNA, 120 bp, Artificial Sequence
  ENSG00000012211_14 (sequence is synthesized)
gctcgccctccagttccagttccgaatcatcagaggatgatggcttcttcctaggagagcgcatccctctgcccccgcatttgtgcaggcccatgcctgctcaggacactgcaatggaga

SEQ ID NO: 14983 - DNA, 120 bp, Artificial Sequence
  ENSG00000012211_15 (sequence is synthesized)
ccttcaactccccatctttatcgctccccagggactctcgcgcagggatgcctcgtcaggcccgagacaagaactgcatcgtggcttgaaggcaggccgtcctggagggggctccattct

SEQ ID NO: 14984 - DNA, 120 bp, Artificial Sequence
  ENSG00000012211_16 (sequence is synthesized)
ccagtcagagtagatgatgaggcccatgcccctcacccccacgccccgcccctacaacctaagtcataaatcctcttcctccctcctttatcagtttgtttctatttttgtttctgtttt

SEQ ID NO: 14985 - DNA, 70 bp, Artificial Sequence
  ENSG00000012211_17 (sequence is synthesized)
ccctcctttatcagtttgtttctatttttgtttctgttttagagacttggtctacccaaaagttttgggc

SEQ ID NO: 14986 - DNA, 120 bp, Artificial Sequence
  ENSG00000012211_18 (sequence is synthesized)
attacaggcatgagccaccgcaccgggcctctcgtttgtattattgaagtaatttaatatttgttgtaaaacaggcctggcttctttgcctccttgccccagctgtttccactccatttc

SEQ ID NO: 14987 - DNA, 120 bp, Artificial Sequence
  ENSG00000012211_19 (sequence is synthesized)
ccactccatttccccctcctgatgcttgaaatttacccacatttgatgaaaggattactttattcattatcgtatattttaacaatgtttattattcatttatccctctatagaaccacc

SEQ ID NO: 14988 - DNA, 120 bp, Artificial Sequence
  ENSG00000012211_20 (sequence is synthesized)
acccacaccgaggagattatttggagtgggtcccaacctagggcctggactctgaaatctaactccccacttccctcattttgtgacttaggtgggggcatggttcagtcagaactggtg

SEQ ID NO: 14989 - DNA, 120 bp, Artificial Sequence
  ENSG00000012211_21 (sequence is synthesized)
tctcctattggatcgtgcagaaggaggacctaggcacacacatatggtggccacacccaggagggttgattggcaggctggaagacaaaagtctcccaataaaggcacttttacctcaaa

SEQ ID NO: 14990 - DNA, 120 bp, Artificial Sequence
  ENSG00000012211_22 (sequence is synthesized)
cactcttgctgtccagtgggtgcacactaatgctcacacacacacacacacactcaggtgggaacctatttctggggctacgctagagtgtgcagtcagaccgagggtccttctggcccc

SEQ ID NO: 14991 - DNA, 120 bp, Artificial Sequence
  ENSG00000012211_23 (sequence is synthesized)
agaggcctttcccgcggggcactccgggctacgtgcagttcacctctaggcagggggcgccctggcagcggagagaccacatgcccgggggcgggccctgcggggcgcgctcctcccacg

SEQ ID NO: 14992 - DNA, 120 bp, Artificial Sequence
  ENSG00000012211_24 (sequence is synthesized)
tgggccaatgcagggcagggtcagaggaggaaaggtgagctgatctgaggtgagtggtccagacaggcaggggtcatcaggggacattccttggcaaaaccacagctgggccttggaaga

SEQ ID NO: 14993 - DNA, 120 bp, Artificial Sequence
  ENSG00000012211_25 (sequence is synthesized)
agaggtggttacttcaggcaggaggcaccatctatagaaagacctagaagtaaactttcggggcatggatgaagtctggaagaggggcagggacaggcatcaagggaggagcctgggaga

SEQ ID NO: 14994 - DNA, 120 bp, Artificial Sequence
  ENSG00000012223_0 (sequence is synthesized)
agagccttcgtttgccaagtcgcctccagaccgcagacatgaaacttgtcttcctcgtcctgctgttcctcggggccctcggactgtgtctggctggccgtaggaggagtgttcagtggt

SEQ ID NO: 14995 - DNA, 120 bp, Artificial Sequence
  ENSG00000012223_1 (sequence is synthesized)
gcgccgtatcccaacccgaggccacaaaatgcttccaatggcaaaggaatatgagaaaagtgcgtggccctcctgtcagctgcataaagagagactcccccatccagtgtatccaggcca

SEQ ID NO: 14996 - DNA, 120 bp, Artificial Sequence
  ENSG00000012223_2 (sequence is synthesized)
ttgcggaaaacagggccgatgctgtgacccttgatggtggtttcatatacgaggcaggcctggccccctacaaactgcgacctgtagcggcggaagtctacgggaccgaaagacagccac

SEQ ID NO: 14997 - DNA, 120 bp, Artificial Sequence
  ENSG00000012223_3 (sequence is synthesized)
gaactcactattatgccgtggctgtggtgaagaagggcggcagctttcagctgaacgaactgcaaggtctgaagtcctgccacacaggccttcgcaggaccgctggatggaatgtcccta

SEQ ID NO: 14998 - DNA, 120 bp, Artificial Sequence
  ENSG00000012223_4 (sequence is synthesized)
tagggacacttcgtccattcttgaattggacgggtccacctgagcccattgaggcagctgtggccaggttcttctcagccagctgtgttcccggtgcagataaaggacagttccccaacc

SEQ ID NO: 14999 - DNA, 120 bp, Artificial Sequence
  ENSG00000012223_5 (sequence is synthesized)
tgtgtcgcctgtgtgcggggacaggggaaaacaaatgtgccttctcctcccaggaaccgtacttcagctactctggtgccttcaagtgtctgagagacggggctggagacgtggctttta

SEQ ID NO: 15000 - DNA, 120 bp, Artificial Sequence
  ENSG00000012223_6 (sequence is synthesized)
tcagagagagcacagtgtttgaggacctgtcagacgaggctgaaagggacgagtatgagttactctgcccagacaacactcggaagccagtggacaagttcaaagactgccatctggccc

SEQ ID NO: 15001 - DNA, 120 bp, Artificial Sequence
  ENSG00000012223_7 (sequence is synthesized)
gggtcccttctcatgccgttgtggcacgaagtgtgaatggcaaggaggatgccatctggaatcttctccgccaggcacaggaaaagtttggaaaggacaagtcaccgaaattccagctct

SEQ ID NO: 15002 - DNA, 120 bp, Artificial Sequence
  ENSG00000012223_8 (sequence is synthesized)
ttggctcccctagtgggcagaaagatctgctgttcaaggactctgccattgggttttcgagggtgcccccgaggatagattctgggctgtaccttggctccggctacttcactgccatcc

SEQ ID NO: 15003 - DNA, 120 bp, Artificial Sequence
  ENSG00000012223_9 (sequence is synthesized)
agaacttgaggaaaagtgaggaggaagtggctgcccggcgtgcgcgggtcgtgtggtgtgcggtgggcgagcaggagctgcgcaagtgtaaccagtggagtggcttgagcgaaggcagcg

SEQ ID NO: 15004 - DNA, 120 bp, Artificial Sequence
  ENSG00000012223_10 (sequence is synthesized)
tgacctgctcctcggcctccaccacagaggactgcatcgccctggtgctgaaaggagaagctgatgccatgagtttggatggaggatatgtgtacactgcaggcaaatgtggtttggtgc

SEQ ID NO: 15005 - DNA, 120 bp, Artificial Sequence
  ENSG00000012223_11 (sequence is synthesized)
ttgctgtggcggtggttaggagatcagacactagccttacctggaactctgtgaaaggcaagaagtcctgccacaccgccgtggacaggactgcaggctggaatatccccatgggcctgc

SEQ ID NO: 15006 - DNA, 120 bp, Artificial Sequence
  ENSG00000012223_12 (sequence is synthesized)
tcttcaaccagacgggctcctgcaaatttgatgaatatttcagtcaaagctgtgcccctgggtctgacccgagatctaatctctgtgctctgtgtattggcgacgagcagggtgagaata

SEQ ID NO: 15007 - DNA, 120 bp, Artificial Sequence
  ENSG00000012223_13 (sequence is synthesized)
agtgcgtgcccaacagcaacgagagatactacggctacactggggctttccggtgcctggctgagaatgctggagacgttgcatttgtgaaagatgtcactgtcttgcagaacactgatg

SEQ ID NO: 15008 - DNA, 120 bp, Artificial Sequence
  ENSG00000012223_14 (sequence is synthesized)
gaaataacaatgaggcatgggctaaggatttgaagctggcagactttgcgctgctgtgcctcgatggcaaacggaagcctgtgactgaggctagaagctgccatcttgccatggccccga

SEQ ID NO: 15009 - DNA, 120 bp, Artificial Sequence
  ENSG00000012223_15 (sequence is synthesized)
atcatgccgtggtgtctcggatggataaggtggaacgcctgaaacaggtgttgctccaccaacaggctaaatttgggagaaatggatctgactgcccggacaagttttgcttattccagt

SEQ ID NO: 15010 - DNA, 120 bp, Artificial Sequence
  ENSG00000012223_16 (sequence is synthesized)
ctgaaaccaaaaaccttctgttcaatgacaacactgagtgtctggccagactccatggcaaaacaacatatgaaaaatatttgggaccacagtatgtcgcaggcattactaatctgaaaa

SEQ ID NO: 15011 - DNA, 120 bp, Artificial Sequence
  ENSG00000012223_17 (sequence is synthesized)
agtgctcaacctcccccctcctggaagcctgtgaattcctcaggaagtaaaaccgaagaagatggcccagctccccaagaaagcctcagccattcactgcccccagctcttctccccagg

SEQ ID NO: 15012 - DNA, 120 bp, Artificial Sequence
  ENSG00000012223_18 (sequence is synthesized)
tgtgttggggccttggcctcccctgctgaaggtggggattgcccatccatctgcttacaattccctgctgtcgtcttagcaagaagtaaaatgagaaattttgttgatattctctcctta

SEQ ID NO: 15013 - DNA, 120 bp, Artificial Sequence
  ENSG00000012223_19 (sequence is synthesized)
taaagtgtcactcatcttttctagaattttatactgaaatcacatgcctgacaaaatacctgtacagttggaccttcccttccaagtttttcaggtccagcccctcctctttcttgcagt

SEQ ID NO: 15014 - DNA, 120 bp, Artificial Sequence
  ENSG00000012223_20 (sequence is synthesized)
cttgggtatgatgcccaagggtctggaatttaaggccaggccaagcaccggttttcctaaggggatcttgttggttattcacatagctgtctcagtgcacgtgcatgtatgtgcctggga

SEQ ID NO: 15015 - DNA, 120 bp, Artificial Sequence
  ENSG00000012223_21 (sequence is synthesized)
gtgtgtgcgtgtccccaaggcagggcaggaagagcaagcataggaattataactgaaatgtaggttcagttgctcatcacttgcagagtctaattaacaagagctaggtttggtataaag

SEQ ID NO: 15016 - DNA, 120 bp, Artificial Sequence
  ENSG00000012223_22 (sequence is synthesized)
gtccaggattctggctcagagttgcaccactgggttttatattcacttggatctttagttgttttggcgcctactgaggtctgaagtttgaatcctgcagtcaattgggatggtggcttg

SEQ ID NO: 15017 - DNA, 120 bp, Artificial Sequence
  ENSG00000012223_23 (sequence is synthesized)
taccccaaagtgccattgcaacccttgtccttcctgaggaaagggtggcagttgccctgtggaattcctgccctgctccccgtgggtgtccaggctgacagaagttgggactgtgtctgg

SEQ ID NO: 15018 - DNA, 120 bp, Artificial Sequence
  ENSG00000012223_24 (sequence is synthesized)
ctctctgggtgctatcacagtttcatcatttacttggaagtgctgctccagaaggcatccatcttcctgctgcagtttggactggttgctgtgtaggccgcctgcacatctgtggtcctg

SEQ ID NO: 15019 - DNA, 120 bp, Artificial Sequence
  ENSG00000012223_25 (sequence is synthesized)
acgtggccttcacagctggcctgagtgagcacagcgggcactgaggggaacaaagcgtgggggccctccagcagcccttatcatcacctgccagccacctgcctcaggctgggcaggctg

SEQ ID NO: 15020 - DNA, 120 bp, Artificial Sequence
  ENSG00000012223_26 (sequence is synthesized)
caccctgggctttctgctattggcttcccagatccctggaactccagctggggccctgggctgtggtctgacttgatccagaatttaatgagtagaaggaatggaagaaggctcattccc

SEQ ID NO: 15021 - DNA, 120 bp, Artificial Sequence
  ENSG00000012223_27 (sequence is synthesized)
ccagccctggacacagacagcagacacagaggcctccagcacagtgaagcctgtggagcagtcccctccagaatgcaaccttgtaggagggcagcaccatgggccagcaactcagggtga

SEQ ID NO: 15022 - DNA, 120 bp, Artificial Sequence
  ENSG00000012223_28 (sequence is synthesized)
tcagcaaataaatgatcaatactaagacaccaaggccctaagaagtcactggatggggtcccgggtggatttctagctctactgtccactggctgtgagaccatgaacagggtgcattgc

SEQ ID NO: 15023 - DNA, 120 bp, Artificial Sequence
  ENSG00000012223_29 (sequence is synthesized)
ccaagtccactcagctggaaacaggctctttgagatctgacccaactcctggcacgttggagatgtcccatagaccagtgttgaatgaatgggactgtgtctggctggccgtaggaggag

SEQ ID NO: 15024 - DNA, 120 bp, Artificial Sequence
  ENSG00000012223_30 (sequence is synthesized)
tcatgactctgacctttgagctaattagattcctaagttcatggcagaccattttcaagattcctacagggcacagctctgattttatgatctttcatattttaaatgatcagttttctt

SEQ ID NO: 15025 - DNA, 120 bp, Artificial Sequence
  ENSG00000012223_31 (sequence is synthesized)
caaacctcctgtgcctactgcctttctcttcccctcatagacacccatgcctaggtgcttggcaatgcgtcctccagtcctccaagacacatgtgctcatgcagaacagattgtgctggt

SEQ ID NO: 15026 - DNA, 120 bp, Artificial Sequence
  ENSG00000012223_32 (sequence is synthesized)
agagccttcgtttgccaagtcgcctccagaccgcagacatgaaacttgtcttcctcgtcctgctgttcctcggggccctcggttttttgtggatgccttttatcaggcaaccaggactgt

SEQ ID NO: 15027 - DNA, 120 bp, Artificial Sequence
  ENSG00000012232_0 (sequence is synthesized)
ccgcagtcgcctgtcggaaatggctgccggccggcagggggagcggcggatcaggcgcggcctggaaggcgggcggccggcagccagaacggcttctgggacgccgactttcgcgcaggc

SEQ ID NO: 15028 - DNA, 120 bp, Artificial Sequence
  ENSG00000012232_1 (sequence is synthesized)
ggcggcggcggcggcggcgggtccctgagctggaagccggagagcaagccctggaggttcactctttcaagaagtcgtgtgctgaggtgtaatgctacacaagtcagaggaaggaagggt

SEQ ID NO: 15029 - DNA, 120 bp, Artificial Sequence
  ENSG00000012232_2 (sequence is synthesized)
cctgaaacacatggcctgattgttggcaaaggcatcataagaagctggcatttatttctgttctaacctattactgtataactgtgaatagacactatgcatatttgttggtcagcaaaa

SEQ ID NO: 15030 - DNA, 120 bp, Artificial Sequence
  ENSG00000012232_3 (sequence is synthesized)
ccaagaaacaagagctatggcatttgaaaaagtctgtctgattccagggtgtttttcctgggtttcatcatcaggtacctcctccctttcatctcagcaagaatgtggcaccttttatcg

SEQ ID NO: 15031 - DNA, 120 bp, Artificial Sequence
  ENSG00000012232_4 (sequence is synthesized)
tttgataaagattaaggacatgttctttggtcaacagccagaacttaaaatctgctggaatagggtcagagaccatttcagctgcagctgaggaaaatgaaatgttcattttatttggtg

SEQ ID NO: 15032 - DNA, 120 bp, Artificial Sequence
  ENSG00000012232_5 (sequence is synthesized)
ccttgtctggggagcacactaactcttctggaaacgtgtcagtgaaacagagatcgttttgtggaatagcaacccatggttatggcgagtgacccgacgtgatctggggggcaggctgca

SEQ ID NO: 15033 - DNA, 120 bp, Artificial Sequence
  ENSG00000012232_6 (sequence is synthesized)
gaggactcatgacaggctataccatgctgcggaatgggggcgcggggaacggaggtcagacctgcatgctgcgctggtccaaccgcatccgcctcacgtggctcagcttcacgctctttg

SEQ ID NO: 15034 - DNA, 120 bp, Artificial Sequence
  ENSG00000012232_7 (sequence is synthesized)
tcatcctggtcttcttcccgctcatcgcccactattacctcaccactctggatgaggctgatgaggcaggcaagcggatttttggtccccgggtggggaacgagctgtgcgaggtgaagc

SEQ ID NO: 15035 - DNA, 120 bp, Artificial Sequence
  ENSG00000012232_8 (sequence is synthesized)
acgtgctggatctgtgccgcatccgggagtcggtgagtgaagagctcctgcagctggaggccaagcgccaagagctgaacagcgagatcgccaagctgaatctgaagatcgaagcctgta

SEQ ID NO: 15036 - DNA, 120 bp, Artificial Sequence
  ENSG00000012232_9 (sequence is synthesized)
agaagagcattgagaacgccaagcaggacctgctccagctcaagaatgtcatcagccagaccgagcattcctacaaggagctcatggcccagaaccagcccaagctgtccctgcccatcc

SEQ ID NO: 15037 - DNA, 120 bp, Artificial Sequence
  ENSG00000012232_10 (sequence is synthesized)
gactgctcccagagaaggacgatgccggcctccctcccccgaaggccactcggggctgccggctacacaactgctttgattattctcgttgccctctcacctctggcttcccggtctacg

SEQ ID NO: 15038 - DNA, 120 bp, Artificial Sequence
  ENSG00000012232_11 (sequence is synthesized)
tctatgacagtgaccagtttgtctttggcagctacctggatcccttggtcaagcaggcttttcaggcgacagcacgagctaacgtttatgttacagaaaatgcagacatcgcctgccttt

SEQ ID NO: 15039 - DNA, 120 bp, Artificial Sequence
  ENSG00000012232_12 (sequence is synthesized)
acgtgatactagtgggagagatgcaggagccggtggtgctgcggcctgctgagctggagaagcagttgtattccctgccacactggcggacggatggacacaaccatgtcatcatcaatc

SEQ ID NO: 15040 - DNA, 120 bp, Artificial Sequence
  ENSG00000012232_13 (sequence is synthesized)
tgtcacgtaagtcagatacacagaaccttctctataacgtcagtactggccgtgccatggtggcccagtccaccttctacactgtccagtacagacctggctttgacttggtcgtatcac

SEQ ID NO: 15041 - DNA, 120 bp, Artificial Sequence
  ENSG00000012232_14 (sequence is synthesized)
cgctggtccatgccatgtctgagcccaacttcatggaaatcccaccacaggtgccggtgaagcggaaatatctcttcaccttccagggcgagaagattgagtctctgaggtctagccttc

SEQ ID NO: 15042 - DNA, 120 bp, Artificial Sequence
  ENSG00000012232_15 (sequence is synthesized)
aggaggcccgctccttcgaagaggaaatggagggcgaccctcccgccgactacgatgaccggatcattgccaccctgaaggcggtgcaggacagcaagctggatcaggtcctggtggaat

SEQ ID NO: 15043 - DNA, 120 bp, Artificial Sequence
  ENSG00000012232_16 (sequence is synthesized)
tcacctgcaaaaaccagcccaaacccagcctgccgactgagtgggcactgtgtggagagcgggaggaccgcttggaattgctgaagctctccaccttcgccctcatcattacccccgggg

SEQ ID NO: 15044 - DNA, 120 bp, Artificial Sequence
  ENSG00000012232_17 (sequence is synthesized)
accctcgcttggttatttcctctgggtgtgcaacacggctcttcgaagccctggaagtcggtgccgtcccggtggtgctgggggagcaggtccagcttccctaccaggacatgctgcagt

SEQ ID NO: 15045 - DNA, 120 bp, Artificial Sequence
  ENSG00000012232_18 (sequence is synthesized)
ggaacgaggcggccctggtggtgccaaagcctcgtgttaccgaggttcatttcctgctcagaagcctctccgatagtgacctcctggctatgaggcggcaaggccgctttctctgggaga

SEQ ID NO: 15046 - DNA, 120 bp, Artificial Sequence
  ENSG00000012232_19 (sequence is synthesized)
cttacttctccactgctgacagtatttttaataccgtgctggctatgattaggactcgcatccagatcccagccgctcccatccgggaagaggcggcagctgagatcccccaccgttcag

SEQ ID NO: 15047 - DNA, 120 bp, Artificial Sequence
  ENSG00000012232_20 (sequence is synthesized)
gcaaggcggctggaactgaccccaacatggctgacaacggggacctggacctggggccagtggagacggagccgccctacgcctcacccagatacctccgcaatttcactctgactgtca

SEQ ID NO: 15048 - DNA, 120 bp, Artificial Sequence
  ENSG00000012232_21 (sequence is synthesized)
ctgacttttaccgcagctggaactgtgctccagggcctttccatcttttcccccacactccctttgaccctgtgttgccctcagaggccaaattcttgggctcagggactggctttcggc

SEQ ID NO: 15049 - DNA, 120 bp, Artificial Sequence
  ENSG00000012232_22 (sequence is synthesized)
ctattggtggtggagctgggggttctggcaaggaatttcaggcagcgcttggaggcaatgttccccgagagcagttcacggtggtgatgttgacttatgagcgggaggaagtgcttatga

SEQ ID NO: 15050 - DNA, 120 bp, Artificial Sequence
  ENSG00000012232_23 (sequence is synthesized)
actctttagagaggctgaatggcctcccttacctgaacaaggtcgtggtggtgtggaattctcccaagctgccatcagaggaccttctgtggcctgacattggcgtccccatcatggtgg

SEQ ID NO: 15051 - DNA, 120 bp, Artificial Sequence
  ENSG00000012232_24 (sequence is synthesized)
tccgtactgagaagaacagtttgaacaaccgattcttaccctggaatgaaattgagacagaggccatcctgtccattgatgacgatgctcacctccgccatgacgaaatcatgtttgggt

SEQ ID NO: 15052 - DNA, 120 bp, Artificial Sequence
  ENSG00000012232_25 (sequence is synthesized)
tccgggtgtggagagaagctcgggaccgcatcgtgggcttccctggccgttaccacgcatgggacatcccccatcagtcctggctctacaactccaactactcctgtgagctgtccatgg

SEQ ID NO: 15053 - DNA, 120 bp, Artificial Sequence
  ENSG00000012232_26 (sequence is synthesized)
tgctgacaggtgctgccttctttcacaagtattatgcctacctgtattcttatgtgatgccccaggccatccgggacatggtggatgaatacatcaactgtgaggacattgccatgaact

SEQ ID NO: 15054 - DNA, 120 bp, Artificial Sequence
  ENSG00000012232_27 (sequence is synthesized)
tccttgtctcccacatcactcggaagccccccatcaaggtgacctcacggtggacattccgatgcccaggatgccctcaggccctgtctcatgatgactcccacttccacgagcggcaca

SEQ ID NO: 15055 - DNA, 120 bp, Artificial Sequence
  ENSG00000012232_28 (sequence is synthesized)
agtgcatcaacttcttcgtgaaggtgtacggctacatgcccctcctgtacacgcagttcagggtggattctgtgctcttcaagacacgcctgccccatgacaagaccaagtgcttcaagt

SEQ ID NO: 15056 - DNA, 120 bp, Artificial Sequence
  ENSG00000012232_29 (sequence is synthesized)
tcatctaggggcagcgcacggtctggggaagaggatgagcagagggaggaagatggctcccaaggttcctaggcattgcaggaccttgggcacatctgctggtgggtggcccagagcctc

SEQ ID NO: 15057 - DNA, 120 bp, Artificial Sequence
  ENSG00000012232_30 (sequence is synthesized)
tgctggaaggggcagcaggaggagtggaaggaaaccgctgcctttatcttgaagtcagccacactgggcctggagccctgggcggagtccccggggttccccacacagggcactgactga

SEQ ID NO: 15058 - DNA, 120 bp, Artificial Sequence
  ENSG00000012232_31 (sequence is synthesized)
tagcttacactgaggactgtggcgactctgcagagtcactcacaccgttcgtacgcccaggacagctggttcgtggtttttacattcaataacaactattatgattatttaaaaagagaa

SEQ ID NO: 15059 - DNA, 120 bp, Artificial Sequence
  ENSG00000012232_32 (sequence is synthesized)
agtttcagatttgccattcaaggcttatttatatatatgtgtgtgtatataaatacatgcacacacttgcatacatatatatttttggctgggggagtgtgagttttgcctttctaaggg

SEQ ID NO: 15060 - DNA, 120 bp, Artificial Sequence
  ENSG00000012232_33 (sequence is synthesized)
agggaccgcgcaggctcctttgttctgtattctggcggagatgggtcctggccttgtgtcactggcttatccttaaagatcatctcccatcctccccagcgccatctgtgtgcagcaacc

SEQ ID NO: 15061 - DNA, 120 bp, Artificial Sequence
  ENSG00000012232_34 (sequence is synthesized)
ttgccagtcagcaacctgtaactcacattctcttcccagtgaatccctgggagcgcctgaccctggtgggctgttcagcttcctgctgctggggccagcgatttttgaggatttatcttt

SEQ ID NO: 15062 - DNA, 120 bp, Artificial Sequence
  ENSG00000012232_35 (sequence is synthesized)
aggccaggcttgcctccgtacttatccctgctctcccatttctctcttgtttgagagagaatgaggaagcaaagagtgagaaagaataggggctgaagacgccactcccagatggctctt

SEQ ID NO: 15063 - DNA, 120 bp, Artificial Sequence
  ENSG00000012232_36 (sequence is synthesized)
tctatcctgctcttctgttgaaacacacgtgctgtgggcctcaggcgtttctgaagtgctctttcttggattggacaggagatcagcagcgtgcacatctgctgtggtctgaagtggttt

SEQ ID NO: 15064 - DNA, 120 bp, Artificial Sequence
  ENSG00000012232_37 (sequence is synthesized)
gcaggtcagcctcctctccctagtgtagagcaagccagtgtccttcgaggaacccacccggctggccgggaagttttacagcaaggcgcctgccttgggataattccttggtgaaattca

SEQ ID NO: 15065 - DNA, 120 bp, Artificial Sequence
  ENSG00000012232_38 (sequence is synthesized)
ccttccccccgcctctgtctggagccccatcctgtgttatctgtggtttttggacccctaatgtcagcttggctgtaggactccccgaggtttggtatgtgctagaacaatgggaggctg

SEQ ID NO: 15066 - DNA, 120 bp, Artificial Sequence
  ENSG00000012232_39 (sequence is synthesized)
tgatttgctgtgtaagctcacatccagccttggaatctaacgggcattcacaacccgagttaccactttccactccctgcttaggattctgttccctgggctgaaactgaaataagctaa

SEQ ID NO: 15067 - DNA, 120 bp, Artificial Sequence
  ENSG00000012232_40 (sequence is synthesized)
ttttttgggtcacggtggcagtaggggaacctaggagggtgtgagtggcatttgtcagggatttagcccatgacgtgtttcttgaaccctactttctggaagtggagttgactctggaag

SEQ ID NO: 15068 - DNA, 120 bp, Artificial Sequence
  ENSG00000012232_41 (sequence is synthesized)
ttttctagcaactgaacaaaagctcaggtttgtcctggtcatgcacatgccttaagccagttccgtcttccctagaccttggcatcctgtgcttctatttcttggaatacgttctcctct

SEQ ID NO: 15069 - DNA, 120 bp, Artificial Sequence
  ENSG00000012232_42 (sequence is synthesized)
gacctgcctgtaccacgtgggtcctcttcaagtactgttttgaagctgggctcttttgtgtagctcccacccacctgtagggctagctcggcttaagggaactctccccattggcaaacc

SEQ ID NO: 15070 - DNA, 120 bp, Artificial Sequence
  ENSG00000012232_43 (sequence is synthesized)
ggacccggccgccgccaggactgtgtttccaaaggttccccgcccccaaccccagcatcagcctgtagctcccctgctgaggcagtgtggttatgttcccagcagtgggggtcagacgcc

SEQ ID NO: 15071 - DNA, 120 bp, Artificial Sequence
  ENSG00000012232_44 (sequence is synthesized)
cttcctcagaactttctagttgccctctacctgactcctgacttgtattccttttagcagtagccttcttccctcggggagccaaagagtgtggtgtgtggcgctatattgtggctgcta

SEQ ID NO: 15072 - DNA, 120 bp, Artificial Sequence
  ENSG00000012232_45 (sequence is synthesized)
tttcatctggtttcttttaatgtgaggaactcacatactgacttcagtgggactcggtgagccggggccgtctgtgtggtgggaccccctttagcgggactcagtgagctggggccgtct

SEQ ID NO: 15073 - DNA, 120 bp, Artificial Sequence
  ENSG00000012232_46 (sequence is synthesized)
gtgtggtggagccagggcctctccctttagtggagccaggttgtcgggccccgaatgtcactggtggatctaagaagggctgagtggtctgacaccaaaacatgccgcagggagggctgt

SEQ ID NO: 15074 - DNA, 120 bp, Artificial Sequence
  ENSG00000012232_47 (sequence is synthesized)
ggtgccggtgcttccaacaaggacagccctccttgaccctgaaaggaacactggcttgaaggactgcagacaggctctgaggggcacgccctcctcagcgagaggcagcaaggtggccac

SEQ ID NO: 15075 - DNA, 120 bp, Artificial Sequence
  ENSG00000012232_48 (sequence is synthesized)
agtgtcactggtcaggtgcttctcaccacgggaaagccgccgacctgtgactcgcttgagatgggaaagcggcgccacagaccccgggtctccttggctgtctgtgggccgcccctggcc

SEQ ID NO: 15076 - DNA, 120 bp, Artificial Sequence
  ENSG00000012232_49 (sequence is synthesized)
accttgtcctggctcgcagggtgcaggagcgcctcgttctctgggtggccggcttgctgctccggtttgggctgtcttaccataacaccgtcccagggctctgcaggccactgtgagcgc

SEQ ID NO: 15077 - DNA, 120 bp, Artificial Sequence
  ENSG00000012232_50 (sequence is synthesized)
tggctccctgggcagtgctcctccgtgtggactgtgcctcaggccagggctcaccagctggggtcctgtccggaaggatgggatctttctgggagctgcgccggacagagtggggagctc

SEQ ID NO: 15078 - DNA, 120 bp, Artificial Sequence
  ENSG00000012232_51 (sequence is synthesized)
ctagtttgtggggggaagctttgatatccatgccacgtccatccaccccaccccttttcgtcacgagcacaatggtcttacattggatttttgtaaaaaaataaaaataaatggagactt

SEQ ID NO: 15079 - DNA, 120 bp, Artificial Sequence
  ENSG00000012232_52 (sequence is synthesized)
taactcaagcagcttggaggtcttttgtggttttcctcagcaagtatggaagagtgacctgagagaaggcacctgcttgattgcttgattccaggtcgccacctgtgtatgccagctggg

SEQ ID NO: 15080 - DNA, 120 bp, Artificial Sequence
  ENSG00000012232_53 (sequence is synthesized)
cctgctcgcagaagacgatgggaggcagcctgaccaggccctggtgtgggctgtggaccagagatgggtgaacagactcacactcacatgggcagccttgcctgtgcccggttccagggc

SEQ ID NO: 15081 - DNA, 120 bp, Artificial Sequence
  ENSG00000012232_54 (sequence is synthesized)
aagtcattttgacaaaacaggaacttaggggctgttgaggtgctttaagcaggatgtggaagggcatgtggcccatatatgcaaagttaattttttcatgggaatttaaaatgcgtgtgt

SEQ ID NO: 15082 - DNA, 120 bp, Artificial Sequence
  ENSG00000012232_55 (sequence is synthesized)
gtgtgtgtgtgtgtgtgtgtgtagtggttgtggggagctgtgtgtgcctgcgatcccaggacaggtgaggcctcactgtgaatggctcgattcggtccataggtcatgcccctgacctat

SEQ ID NO: 15083 - DNA, 120 bp, Artificial Sequence
  ENSG00000012232_56 (sequence is synthesized)
aggtcactaaggcacctgtacctgcaccgagctgacgctccctgactgcagagccccatcctgttggtgcccacaggcctagatcttgtgcttggctgtgggatcagaggcttcctcagg

SEQ ID NO: 15084 - DNA, 120 bp, Artificial Sequence
  ENSG00000012232_57 (sequence is synthesized)
agagggcactgagctgtgggcttcggggagaaggatggagatgggaaagggggtaaaggcgaggactcctctcctgggctctgcaggtggcagctttggtcacactgacagtcctaagaa

SEQ ID NO: 15085 - DNA, 120 bp, Artificial Sequence
  ENSG00000012232_58 (sequence is synthesized)
tgggtgagacttaacagtcggtgtccctcctcaagtggggttcacgactgatcaggcaagtttgcagcagctgatgggtgagatgtcatcgaggggcattcctctttgggtctggagttt

SEQ ID NO: 15086 - DNA, 120 bp, Artificial Sequence
  ENSG00000012232_59 (sequence is synthesized)
tggctgtcaagctcctgttcttccagccatccatctccatgttacgattgtcctgggaccagagagacttgagaaggtggcatgaggctgtagaaaatgtgtcttcctatacacagagat

SEQ ID NO: 15087 - DNA, 120 bp, Artificial Sequence
  ENSG00000012232_60 (sequence is synthesized)
atgatgtctgctttgagtctatacctgtcgagttgtgtcttggacttacggtctgccaaggtggtaaatgttagctgttgatgggatcatcactgaagtggaaggctccacaaggtttac

SEQ ID NO: 15088 - DNA, 120 bp, Artificial Sequence
  ENSG00000012232_61 (sequence is synthesized)
aaaatgtgttaagaagaatgttgatggtggtgtgtggtgcctaacatcttaatctcagcatttggtgaggcagaagtgggaggatcacatgaggccagttcaagaccagtctgggcaaca

SEQ ID NO: 15089 - DNA, 120 bp, Artificial Sequence
  ENSG00000012232_62 (sequence is synthesized)
tagcaagacccccatctctacaaaaaaattagaatgttatgaagatactgaaaagaagaaaggagaatgtagtgggtaaaggtctgggccctggaacagactgggtgcagatcttgggct

SEQ ID NO: 15090 - DNA, 120 bp, Artificial Sequence
  ENSG00000012232_63 (sequence is synthesized)
gcccatcacactggtggagagcaagttatctattactattttaggctctaatcccaccatacggtggcaaaagttgtgcccatctcttaagcatatgttaaaagttaaataatataatat

SEQ ID NO: 15091 - DNA, 120 bp, Artificial Sequence
  ENSG00000012232_64 (sequence is synthesized)
acgtagagtccactgtttgacacaataaaaatgaactattactggagtaaaatagtgtccacttcttcatggctctttctgccttccgctaggtttgagcgccagcgcctggctgagtgc

SEQ ID NO: 15092 - DNA, 120 bp, Artificial Sequence
  ENSG00000012232_65 (sequence is synthesized)
cctgctcacctcctattagagcccccacgctctgtcgcctcaccatgctgtgtgctggccactgctctgcctcccacaccggactgcagcctctcaagaacacaggagttccatagtttt

SEQ ID NO: 15093 - DNA, 120 bp, Artificial Sequence
  ENSG00000012232_66 (sequence is synthesized)
ctcatgaatgaatgctttgacaaagtgaagagggtcacttagaaatcacagcttaggcaaattgttttacctttcttcatctgtcttgacgtttatgaaagagtacaggctgggtgcggt

SEQ ID NO: 15094 - DNA, 120 bp, Artificial Sequence
  ENSG00000012232_67 (sequence is synthesized)
agctacatttggggagtggtgaaaaggggtcagagaaagagaagcaggagaggacatgggcaggaagtgtaaaatgcagactgacttaatatgaggtgcacagcatgggtgagaacgcaa

SEQ ID NO: 15095 - DNA, 120 bp, Artificial Sequence
  ENSG00000012232_68 (sequence is synthesized)
gtgtttttttcttggaggtattaacacatacactcagtgcacagaaagcctggttccacccacttcctgtcatctttgtgggctctgtcagcaagttagagcatgctggtgacctcacgg

SEQ ID NO: 15096 - DNA, 120 bp, Artificial Sequence
  ENSG00000012232_69 (sequence is synthesized)
aaccaagctggctctgcccatgttgggggagtgtctcttaattgccggccaagcagtctgaaataaacttagcaactcatcttgtttaaggggcgtggaacggggggagtgcgatgcgag

SEQ ID NO: 15097 - DNA, 120 bp, Artificial Sequence
  ENSG00000012232_70 (sequence is synthesized)
tgagaggagcgaccgcgactgcacacctgctgtataccaggcctcgtatctcatttagcctcaaaacaaccctgtgtgttaagtattctcaccctaatcttgaagatctgggaactgata

SEQ ID NO: 15098 - DNA, 120 bp, Artificial Sequence
  ENSG00000012232_71 (sequence is synthesized)
tctgtggcatagtcgccggaaactgctgtatctgctgctgagtggaggagagaagaaggcacgtggcctgtgggcagacatctacaaaagaggaattcaaaggcagcctgagtggagagc

SEQ ID NO: 15099 - DNA, 120 bp, Artificial Sequence
  ENSG00000012232_72 (sequence is synthesized)
aaaagttctcattgttctgagctcagttattttctctgtgctacagggcagaggatcccttggcatgaaataagagctaagtggtccaacaggcgttgaagtgttaaaacaagaatagaa

SEQ ID NO: 15100 - DNA, 120 bp, Artificial Sequence
  ENSG00000012232_73 (sequence is synthesized)
cgtgatccacctgcctgggcctcccaaaatgctgggattataggtatgagtcacggcgcctggccagcttcatcatctttaaaagcaagagagcaagccctggaggttcactctttcaag

SEQ ID NO: 15101 - DNA, 120 bp, Artificial Sequence
  ENSG00000012232_74 (sequence is synthesized)
agaacctggagaagtgagaagactggaaaagttctcattgttctgagctcagttattttctctgtgctacagggcagaggatcccttggcatgaaataagagctaagtggtccaacaggc

SEQ ID NO: 15102 - DNA, 120 bp, Artificial Sequence
  ENSG00000012232_75 (sequence is synthesized)
gttgaagtgttaaaacaagaatagagtaagtcctgtgctaatcctgacacaagatagcaggctctggggatgataatgcctgctgctgatgggcggaccagggattagcaaccatccagg

SEQ ID NO: 15103 - DNA, 120 bp, Artificial Sequence
  ENSG00000012232_76 (sequence is synthesized)
tactttatggagacaggagagactgtcagacagttcctgctgctgcccaggtgcatctgaacagagtcttgtcttgtcactcaagctggagtgcagtggcaccatctcgcctcacctaca

SEQ ID NO: 15104 - DNA, 120 bp, Artificial Sequence
  ENSG00000012232_77 (sequence is synthesized)
agagggcggggccgggccgctggcgctgtcgccggctgcagtggccgccgctggagaccgcgggacctggcgctgcagcgaggagagcaagccctggaggttcactctttcaagaagtcg

SEQ ID NO: 15105 - DNA, 120 bp, Artificial Sequence
  ENSG00000012232_78 (sequence is synthesized)
cggctgcagtggccgccgctggagaccgcgggacctggcgctgcagcgagattttcaaacaccgcattccccttaaacctcccaggctcccatcactcccagcaaagagccagcccgcta

SEQ ID NO: 15106 - DNA, 120 bp, Artificial Sequence
  ENSG00000012232_79 (sequence is synthesized)
tatcttctgaattgccttcccagattcagactgttctttaaaaccatgaatggtcaggtacctctactttcaagaaatcatttacttaatgaaatttagtatttttcctgtgtgaaaatc

SEQ ID NO: 15107 - DNA, 120 bp, Artificial Sequence
  ENSG00000012232_80 (sequence is synthesized)
tataaagaagattacagactagcagcgcccaaacctcagttggcttacagagagatttttgggccctctagtgttgtcctatgcactgacaacttctaaaaatcacaagatttcacaaaa

SEQ ID NO: 15108 - DNA, 120 bp, Artificial Sequence
  ENSG00000012232_81 (sequence is synthesized)
agacctgagctgcaatacaaatgaagatcaggtcctctgaggtcctgtctggggcgtcatggcggctgctcctgtagttgaggcccatgatggggccttcatgcgcttacctgcctgtgg

SEQ ID NO: 15109 - DNA, 120 bp, Artificial Sequence
  ENSG00000012232_82 (sequence is synthesized)
gatggggccttcatgcgcttacctgcctgtggctcctcgtttttcttacacctatttctttttttatttttatgagactgagttttgctgtgtggcccaggctggagtgcagtggcacca

SEQ ID NO: 15110 - DNA, 77 bp, Artificial Sequence
  ENSG00000012232_83 (sequence is synthesized)
cacccatttctttacactcatttgtcttacttgcttggtccacgaaagcagttagattggtcctctctgatcaacag

SEQ ID NO: 15111 - DNA, 120 bp, Artificial Sequence
  ENSG00000012232_84 (sequence is synthesized)
gtccacgaaagcagttagattggtcctctctgatcaacagctgtcaagtttttttctttttttttaaaatcataagtgcctgtcaataacactttttagacctgtacctaatatatatgt

SEQ ID NO: 15112 - DNA, 120 bp, Artificial Sequence
  ENSG00000012232_85 (sequence is synthesized)
atatttacttataaattttatgcatgtgtctattactgatagatattttttagaggttgaaataacgatgaaacaaaactttaaaataatgtgatcactcaattcttaaattttagtgaa

SEQ ID NO: 15113 - DNA, 120 bp, Artificial Sequence
  ENSG00000012232_86 (sequence is synthesized)
agcagtaggattgaatatgttttattatttttgaaaatcttgattggatactgtgtgttatagcaagtcaggtctgtttctaaattaaacttttttttttctcttctttttgagatggag

SEQ ID NO: 15114 - DNA, 85 bp, Artificial Sequence
  ENSG00000012232_87 (sequence is synthesized)
taaattaaacttttttttttctcttctttttgagatggagtcttctcgcttctttctccaggctggagtacagtagtgcaatctt

SEQ ID NO: 15115 - DNA, 63 bp, Artificial Sequence
  ENSG00000012232_88 (sequence is synthesized)
tcaacataaatcatttttgacagcaaaaccacatactgatggaaatacctctgaacagttatt

SEQ ID NO: 15116 - DNA, 120 bp, Artificial Sequence
  ENSG00000012232_89 (sequence is synthesized)
caaaaccacatactgatggaaatacctctgaacagttattctgataatgctttcatcagttttttttaaattattattaaaaggcagttcttattgttaaaatgtcatttctttcaagac

SEQ ID NO: 15117 - DNA, 120 bp, Artificial Sequence
  ENSG00000012232_90 (sequence is synthesized)
gtgttatgttaatatattctcatcagcatacgaaggacagtcactggccatttaaagggtcaataaatttgaattaccttttttaaaaagtgtatttattttattttatttattcttact

SEQ ID NO: 15118 - DNA, 120 bp, Artificial Sequence
  ENSG00000012232_91 (sequence is synthesized)
ctttttttttgagacggaatctcactgtcacccaggctggattgcagtggcacaaccatggctcagtgcagcctagaactcccaggctcaagtgatcttctcacctcagcctcctgagta

SEQ ID NO: 15119 - DNA, 120 bp, Artificial Sequence
  ENSG00000012232_92 (sequence is synthesized)
gcaggcagtacaggcacatgccactacatctggccaattttttatttttttgtagctatggggtcttctccctgtgttgcccaggctggccttgaacttctgggctcaagcatttcaccg

SEQ ID NO: 15120 - DNA, 120 bp, Artificial Sequence
  ENSG00000012232_93 (sequence is synthesized)
caggcatgagccaccatgcccagcctggatcacctttttgttaaaaaaaaaattacaattcatttttttaagttcaccaactcttaagtactttgctataagataattagcacatttatt

SEQ ID NO: 15121 - DNA, 120 bp, Artificial Sequence
  ENSG00000012232_94 (sequence is synthesized)
tactttgctataagataattagcacatttattctgtgttacaaaaaaattttatcattatttcactcaacatattatattgtaggtaatgcaatatgttcatcagttaatcagtttaact

SEQ ID NO: 15122 - DNA, 120 bp, Artificial Sequence
  ENSG00000012232_95 (sequence is synthesized)
gggcacctcacctattcatttgttcattacagcaaattgcaacatatagcagttaacatgtgccctgtcttgtagtatttgctgatttctatggtataaatactcttaccttggctgatt

SEQ ID NO: 15123 - DNA, 120 bp, Artificial Sequence
  ENSG00000012232_96 (sequence is synthesized)
tgaagttatcaacatgagtcactgaacacggatttgggaagagatacacagttgtacaccattacatagtaatttcaacatcaacagtagatataggtaacctcaagttaatagtaaaat

SEQ ID NO: 15124 - DNA, 120 bp, Artificial Sequence
  ENSG00000012232_97 (sequence is synthesized)
actaggaagtaatgagtttaaggtgtttattgcatggatttttaatataattttaatttatttaatttgaagtttatgtaattacatctttaataatggctatgtttaacaacaagctga

SEQ ID NO: 15125 - DNA, 120 bp, Artificial Sequence
  ENSG00000012232_98 (sequence is synthesized)
ctgacaacattctgaaaatgtagaaagcgccattcatgagcaggtgtgagtggctccaacacacccctctgtgggccttgtaggacagtctgagaactttgccttttactctgagtgaga

SEQ ID NO: 15126 - DNA, 120 bp, Artificial Sequence
  ENSG00000012232_99 (sequence is synthesized)
tgggaagtgttggaggctttggagcgaaggggtgatatgttcagttggtttgagtgttaacacaatcacctgctgcgctgggactagcacatggggaagagaatatggcagcagggagaa

SEQ ID NO: 15127 - DNA, 120 bp, Artificial Sequence
  ENSG00000012232_100 (sequence is synthesized)
tatttaggagctgatgtggagaatccaggcaagagacgaaggtggttggcagcagggagtagccagggccgatggcgagtactgaccagactcaagaatctgtacaggaggcagtgaggg

SEQ ID NO: 15128 - DNA, 120 bp, Artificial Sequence
  ENSG00000012232_101 (sequence is synthesized)
atcgtgtgtttcatggttctgtgatttattgaggtctgagaaaataaccaggcttttttctctcacttatctttttttttttttttggccattgttagagataaaatagtgttcaattga

SEQ ID NO: 15129 - DNA, 120 bp, Artificial Sequence
  ENSG00000012232_102 (sequence is synthesized)
accagcatctgacctagtttgacaaatctttgtattgatttcaaaatcactgcggtaccagggagatgatatgacattctgttactaaagggggtgatgatggcagtttgaatgggataa

SEQ ID NO: 15130 - DNA, 120 bp, Artificial Sequence
  ENSG00000012232_103 (sequence is synthesized)
ttcctcactgcagaagatccacacgacaggatgtctcgaatcccctgccccagtccctaagtgccagtaatacctcctagttactgccacacccaaacagcccctccatccatgcatatt

SEQ ID NO: 15131 - DNA, 120 bp, Artificial Sequence
  ENSG00000012504_0 (sequence is synthesized)
acattcctcattctggggctttgcggttttgtcttgggaatctcgaggctctcccaaggttcctttctatgtttatatcatttagcagggaaggattgttaatgactaatctgtgtccat

SEQ ID NO: 15132 - DNA, 120 bp, Artificial Sequence
  ENSG00000012504_1 (sequence is synthesized)
gaggcacagagccaaggaagagatgctgctgctagcccagaaggccgcctgtgatcatgcacagtacactggaactctctcctcctcctcacctcattgtctccccgacttatcctaatg

SEQ ID NO: 15133 - DNA, 120 bp, Artificial Sequence
  ENSG00000012504_2 (sequence is synthesized)
cgaaattggattctgagcatttgtagcaaaatcgctgggatctggagaggaagactcagtccagaatcctcccagggccttgaaagtccatctctgacccaaaacaatccaaggaggtag

SEQ ID NO: 15134 - DNA, 120 bp, Artificial Sequence
  ENSG00000012504_3 (sequence is synthesized)
aagacatcgtagaaggagtgaaagaagaaaagaagacttagaaacatagctcaaagtgaacactgcttctcttagtttcctggatttcttctggacatttcctcaagatgaaacttcaga

SEQ ID NO: 15135 - DNA, 120 bp, Artificial Sequence
  ENSG00000012504_4 (sequence is synthesized)
cactttggagttttttttgaagaccaccataaagaaagtgcatttcaattgaaaaatttggatgggatcaaaaatgaatctcattgaacattcccatttacctaccacagatgaattttc

SEQ ID NO: 15136 - DNA, 120 bp, Artificial Sequence
  ENSG00000012504_5 (sequence is synthesized)
tttttctgaaaatttatttggtgttttaacagaacaagtggcaggtcctctgggacagaacctggaagtggaaccatactcgcaatacagcaatgttcagtttccccaagttcaaccaca

SEQ ID NO: 15137 - DNA, 120 bp, Artificial Sequence
  ENSG00000012504_6 (sequence is synthesized)
gatttcctcgtcatcctattattccaacctgggtttctacccccagcagcctgaagagtggtactctcctggaatatatgaactcaggcgtatgccagctgagactctctaccagggaga

SEQ ID NO: 15138 - DNA, 120 bp, Artificial Sequence
  ENSG00000012504_7 (sequence is synthesized)
aactgaggtagcagagatgcctgtaacaaagaagccccgcatgggcgcgtcagcagggaggatcaaaggggatgagctgtgtgttgtttgtggagacagagcctctggataccactataa

SEQ ID NO: 15139 - DNA, 120 bp, Artificial Sequence
  ENSG00000012504_8 (sequence is synthesized)
tgcactgacctgtgaggggtgtaaaggtttcttcaggagaagcattaccaaaaacgctgtgtacaagtgtaaaaacgggggcaactgtgtgatggatatgtacatgcgaagaaagtgtca

SEQ ID NO: 15140 - DNA, 120 bp, Artificial Sequence
  ENSG00000012504_9 (sequence is synthesized)
agagtgtcgactaaggaaatgcaaagagatgggaatgttggctgaatgcttgttaactgaaattcagtgtaaatctaagcgactgagaaaaaatgtgaagcagcatgcagatcagaccgt

SEQ ID NO: 15141 - DNA, 120 bp, Artificial Sequence
  ENSG00000012504_10 (sequence is synthesized)
gaatgaagacagtgaaggtcgtgacttgcgacaagtgacctcgacaacaaagtcatgcagggagaaaactgaactcaccccagatcaacagactcttctacattttattatggattcata

SEQ ID NO: 15142 - DNA, 120 bp, Artificial Sequence
  ENSG00000012504_11 (sequence is synthesized)
taacaaacagaggatgcctcaggaaataacaaataaaattttaaaagaagaattcagtgcagaagaaaattttctcattttgacggaaatggcaaccaatcatgtacaggttcttgtaga

SEQ ID NO: 15143 - DNA, 120 bp, Artificial Sequence
  ENSG00000012504_12 (sequence is synthesized)
acaaaaaagctaccaggatttcagactttggaccatgaagaccagattgctttgctgaaagggtctgcggttgaagctatgttccttcgttcagctgagattttcaataagaaacttccg

SEQ ID NO: 15144 - DNA, 120 bp, Artificial Sequence
  ENSG00000012504_13 (sequence is synthesized)
tctgggcattctgacctattggaagaaagaattcgaaatagtggtatctctgatgaatatataacacctatgtttagtttttataaaagtattggggaactgaaaatgactcaagaggag

SEQ ID NO: 15145 - DNA, 120 bp, Artificial Sequence
  ENSG00000012504_14 (sequence is synthesized)
tatgctctgcttacagcaattgttatcctgtctccagatagacaatacataaaggatagagaggcagtagagaagcttcaggagccacttcttgatgtgctacaaaagttgtgtaagatt

SEQ ID NO: 15146 - DNA, 120 bp, Artificial Sequence
  ENSG00000012504_15 (sequence is synthesized)
caccagcctgaaaatcctcaacactttgcctgtctcctgggtcgcctgactgaattacggacattcaatcatcaccacgctgagatgctgatgtcatggagagtaaacgaccacaagttt

SEQ ID NO: 15147 - DNA, 120 bp, Artificial Sequence
  ENSG00000012504_16 (sequence is synthesized)
accccacttctctgtgaaatctgggacgtgcagtgatggggattacaggggaggggtctagctcctttttctctctcatattaatctgatgtataactttcctttatttcacttgtaccc

SEQ ID NO: 15148 - DNA, 120 bp, Artificial Sequence
  ENSG00000012504_17 (sequence is synthesized)
agtttcactcaagaaatcttgatgaatatttatgttgtaattacatgtgtaacttccacaactgtaaatattgggctagatagaacaactttctctacattgtgttttaaaaggctccag

SEQ ID NO: 15149 - DNA, 120 bp, Artificial Sequence
  ENSG00000012504_18 (sequence is synthesized)
ggaatcctgcattctaattggcaagccctgtttgcctaattaaattgattgttacttcaattctatctgttgaactagggaaaatctcattttgctcatcttaccatattgcatatattt

SEQ ID NO: 15150 - DNA, 120 bp, Artificial Sequence
  ENSG00000012504_19 (sequence is synthesized)
tattaaagagttgtattcaatcttggcaataaagcaaacataatggcaacaggattttctttgggaacaaaatttgataaatatacaaactcatttctttaaatgttgaaagacatccta

SEQ ID NO: 15151 - DNA, 120 bp, Artificial Sequence
  ENSG00000012504_20 (sequence is synthesized)
ttgaatctgagggggtaatttacagaaagatactgtctctcgcacttttgtcatctctggaaaagtcctggtgaatagtcattcatttgtaatagccctctgatcatttccttttctttg

SEQ ID NO: 15152 - DNA, 120 bp, Artificial Sequence
  ENSG00000012504_21 (sequence is synthesized)
aagttcaaagagaatagcaaacagaaaagttaacaattttcacataaaatattccctcaagcaatcctttcccccatagttagtcttgaggcaggattcacaaattcagagtatgcagct

SEQ ID NO: 15153 - DNA, 120 bp, Artificial Sequence
  ENSG00000012504_22 (sequence is synthesized)
aactgcagtgatgggaccttcgctttcctctcttaaaagtgaggaaatgattggcttcattgtatccaatcatctttctgttttgttttgcttttgaaaacattcctacagctgggagca

SEQ ID NO: 15154 - DNA, 120 bp, Artificial Sequence
  ENSG00000012504_23 (sequence is synthesized)
cagctgctgtatacttcccccaaagcaggaattagttcatttccttccttcattgttacactgttgcattcttctccctattatcctttggtgaatacaataaaacaccttctataagta

SEQ ID NO: 15155 - DNA, 120 bp, Artificial Sequence
  ENSG00000012504_24 (sequence is synthesized)
attttcagtggctgtgaataagctaagaatggtaatgcagtttcaggggttagaaaatccaattcaaattagtcctcactgcagctgtacgccgtcaggatttttcatggaaatgatgag

SEQ ID NO: 15156 - DNA, 75 bp, Artificial Sequence
  ENSG00000012504_25 (sequence is synthesized)
aagtccatctctgacccaaaacaatccaaactttagctctgtcgtccaggctggaatgcagtggcatgatcagtt

SEQ ID NO: 15157 - DNA, 120 bp, Artificial Sequence
  ENSG00000012504_26 (sequence is synthesized)
cctaattctcatactctttgataggctaattccaaaataaagattcctaaatctaaattttaatatgtattttcccttttaaattgtatcaaaatagaaataaatttaccttttcagaaa

SEQ ID NO: 15158 - DNA, 120 bp, Artificial Sequence
  ENSG00000012504_27 (sequence is synthesized)
taccctgtggtcttggacaaattccttaactttgcacaagttacttgccttatttaaataaggtgataagaagaatgcctggcacatcacaagtactctatttgccactaaaattcactc

SEQ ID NO: 15159 - DNA, 120 bp, Artificial Sequence
  ENSG00000012504_28 (sequence is synthesized)
gtcaggatttttcatggaaatgatgagtatgaagcccgcgaaagggcttctcagactcccctggagtccatccatgtgttctcatttaagaactcgtccctaaacttccatggagaaccg

SEQ ID NO: 15160 - DNA, 120 bp, Artificial Sequence
  ENSG00000012660_0 (sequence is synthesized)
ctcttcccatcgcgcgggtcctagccaccggtgtctccttctacatccgcctctgcgccggctgccacccgcgctccctccgccgccgccgccttgctgctgctcaaagctgctgccgcc

SEQ ID NO: 15161 - DNA, 120 bp, Artificial Sequence
  ENSG00000012660_1 (sequence is synthesized)
ccttgggctaaaaggttttcaaatggaacattttgatgcatcacttagtacctatttcaaggcattgctaggccctcgagatactagagtaaaaggatggtttcttctggacaattatat

SEQ ID NO: 15162 - DNA, 120 bp, Artificial Sequence
  ENSG00000012660_2 (sequence is synthesized)
acccacatttatctgctctgtcatatatttactaattgtatggctgggaccaaaatacatgaggaataaacagccattctcttgccgggggattttagtggtgtataaccttggactcac

SEQ ID NO: 15163 - DNA, 120 bp, Artificial Sequence
  ENSG00000012660_3 (sequence is synthesized)
actgctgtctctgtatatgttctgtgagttagtaacaggagtatgggaaggcaaatacaacttcttctgtcagggcacacgcaccgcaggagaatcagatatgaagattatccgtgtcct

SEQ ID NO: 15164 - DNA, 120 bp, Artificial Sequence
  ENSG00000012660_4 (sequence is synthesized)
ctggtggtactacttctccaaactcatagaatttatggacactttcttcttcatcctgcgcaagaacaaccaccagatcacggtcctgcacgtctaccaccatgcctcgatgctgaacat

SEQ ID NO: 15165 - DNA, 120 bp, Artificial Sequence
  ENSG00000012660_5 (sequence is synthesized)
ctggtggtttgtgatgaactgggtcccctgcggccactcttattttggtgccacacttaatagcttcatccacgtcctcatgtactcttactatggtttgtcgtcagtcccttccatgcg

SEQ ID NO: 15166 - DNA, 120 bp, Artificial Sequence
  ENSG00000012660_6 (sequence is synthesized)
tccatacctctggtggaagaagtacatcactcaggggcagctgcttcagtttgtgctgacaatcatccagaccagctgcggggtcatctggccgtgcacattccctcttggttggttgta

SEQ ID NO: 15167 - DNA, 120 bp, Artificial Sequence
  ENSG00000012660_7 (sequence is synthesized)
tttccagattggatacatgatttccctgattgctctcttcacaaacttctacattcagacctacaacaagaaaggggcctcccgaaggaaagaccacctgaaggaccaccagaatgggtc

SEQ ID NO: 15168 - DNA, 120 bp, Artificial Sequence
  ENSG00000012660_8 (sequence is synthesized)
catggctgctgtgaatggacacaccaacagcttttcacccctggaaaacaatgtgaagccaaggaagctgcggaaggattgaagtcaaagaattgaaaccctccaaaccacgtcatctga

SEQ ID NO: 15169 - DNA, 120 bp, Artificial Sequence
  ENSG00000012660_9 (sequence is synthesized)
ttgtaagcacaatatgagttgtgccccaatgctcgttaacagctgctgtaactagtctggcctacaatagtgtgattcatgtaggacttctttcatcaattcaaaacccctagaaaacgt

SEQ ID NO: 15170 - DNA, 120 bp, Artificial Sequence
  ENSG00000012660_10 (sequence is synthesized)
atacagattatataagtagggataagatttctaacatttctgggctctctgacccctgcgctagactgtggaaagggagtattattatagtatacaacactgctgttgccttattagtta

SEQ ID NO: 15171 - DNA, 120 bp, Artificial Sequence
  ENSG00000012660_11 (sequence is synthesized)
tgataggtgctgaattgtgattcacaatttaaaaacactgtaatccaaacttttttttttaactgtagatcatgcatgtgattgtaaatgtaaatttgtacaatgttgttatggtagaga

SEQ ID NO: 15172 - DNA, 120 bp, Artificial Sequence
  ENSG00000012660_12 (sequence is synthesized)
aacacacatgccttaaaatttaaaaagcagggcccaaagcttattagtttaaattagggtatgtttcaagtttgtattaatttgtaatagctctgtttagaaaaaatcaaagaccatgat

SEQ ID NO: 15173 - DNA, 120 bp, Artificial Sequence
  ENSG00000012660_13 (sequence is synthesized)
ttatgaaactaatgtgacataatttccagtgacttgttgatgtgaaatcagacacggcaccttcagttttgtactattggctttgaatcaagcaggctcaaatctagtggaacagtcagt

SEQ ID NO: 15174 - DNA, 120 bp, Artificial Sequence
  ENSG00000012660_14 (sequence is synthesized)
ttaactttttaacagatcttatttttttattttgagtgccactattaatgtaaaaaggggggggctctacagcagtcgtgatgaaacttaaatatatattctttgtcctcgagattttag

SEQ ID NO: 15175 - DNA, 120 bp, Artificial Sequence
  ENSG00000012660_15 (sequence is synthesized)
gaagggtgtagggtgagtaggccatttttaatttctgaagtgctaagtgtttttatacagcaaacaaaaagtcaattttgctttccaccagtgcgagagaggatgtatacttttcaagag

SEQ ID NO: 15176 - DNA, 120 bp, Artificial Sequence
  ENSG00000012660_16 (sequence is synthesized)
agatgattgcctatttaccgtttgacagagtcccgtagatgagcaatggggaactggttgccagggtctaaatttggattgatttatgcactgttatctgttttgacacagatttccttg

SEQ ID NO: 15177 - DNA, 120 bp, Artificial Sequence
  ENSG00000012660_17 (sequence is synthesized)
taaaatgtgcctagtttaccaaaattaacaaagggggggaaaggaccttagaactttttaaggtaaaatcaaatatagctacagcataagagaatcgagaaatttgatagaggtaacttg

SEQ ID NO: 15178 - DNA, 120 bp, Artificial Sequence
  ENSG00000012660_18 (sequence is synthesized)
tttaatgtaaatctaatagtacttgtaatttctttctgcttagaatctaaagatgtgtttagaacctcttgtttaaaaataatagactgcttatcataaaatcacatctcacacatttga

SEQ ID NO: 15179 - DNA, 120 bp, Artificial Sequence
  ENSG00000012660_19 (sequence is synthesized)
ggcagtggtcaaacaggtaaagcctatgatgtgtgtcattttaaagtgtcggaatttagcctctgaataccttctccattgggggaaagatattcttggaaccactcatgacatatctta

SEQ ID NO: 15180 - DNA, 120 bp, Artificial Sequence
  ENSG00000012660_20 (sequence is synthesized)
gaaggtcattgacaatgtataaactaattgttggtttgatatttatgtaaatatcagtttaccatgctttaattttgcacattcgtactatagggagcctattggttctctattagtctt

SEQ ID NO: 15181 - DNA, 120 bp, Artificial Sequence
  ENSG00000012660_21 (sequence is synthesized)
gtgggttttctgtttgaaaaggagtcatggcatctgtttacatttaccttatcaaacctagaatgtgtatatttataaatgtatgtcttcattgctaggtactaatttgcagatgtcttt

SEQ ID NO: 15182 - DNA, 120 bp, Artificial Sequence
  ENSG00000012660_22 (sequence is synthesized)
acatatttcaatacagaaactataacattcaatagtgtgctgtcaaagtgtgcttagctcacctggatatacctacattgttaaatgtctaaacagtaatcattaaaacatttttgatta

SEQ ID NO: 15183 - DNA, 120 bp, Artificial Sequence
  ENSG00000012660_23 (sequence is synthesized)
gttctgtgagaatgaagtcagtttaattagactccaagatggagagttcaggactggagccaggggaagtgcacaggagtgactcctggccccagcactatgcacatttctgtgttcaag

SEQ ID NO: 15184 - DNA, 120 bp, Artificial Sequence
  ENSG00000012660_24 (sequence is synthesized)
gtataaagtacagctgtgtgcatctgagtggatgtggggggttctgaacacattgtaatagaaggacttctgatcagcctgcatggatcctgcttgactggccatgactttagagagtag

SEQ ID NO: 15185 - DNA, 120 bp, Artificial Sequence
  ENSG00000012660_25 (sequence is synthesized)
tagaagacagaaaagttaatacaccttctaatgaattaccatttagtaacaggagtatgggaaggcaaatacaacttcttctgtcagggcacacgcaccgcaggagaatcagatatgaag

SEQ ID NO: 15186 - DNA, 120 bp, Artificial Sequence
  ENSG00000012660_26 (sequence is synthesized)
aaaaaaatttcccagagacacgtggaaccgaggggccaaccccggcctaggctctccaccgcatcggattctggaatttacgatcacgaaagttctattgtcccgcgattggctcccggg

SEQ ID NO: 15187 - DNA, 120 bp, Artificial Sequence
  ENSG00000012660_27 (sequence is synthesized)
tgtatatgttctgtgagtccaaaagggagcaaccccgtcgatctgcctgtgcctcacgaactgatccttcgactcagcagcagctgccagaaaacaggttagtaacaggagtatgggaag

SEQ ID NO: 15188 - DNA, 120 bp, Artificial Sequence
  ENSG00000012660_28 (sequence is synthesized)
tctgagtggatgtggggggttctgaacacattgtaatagaagttagtaacaggagtatgggaaggcaaatacaacttcttctgtcagggcacacgcaccgcaggagaatcagatatgaag

SEQ ID NO: 15189 - DNA, 120 bp, Artificial Sequence
  ENSG00000012660_29 (sequence is synthesized)
cctcaaaactcactggccacaattgcttcacatgcccctgcctgaaccagccaccagagggggttaggaccaccacagattgactagatcctaaggattctctacctggggctggagttc

SEQ ID NO: 15190 - DNA, 120 bp, Artificial Sequence
  ENSG00000012660_30 (sequence is synthesized)
gggtcaggtgcccgggaagcactgtgcggtgtgggaggatgaatatgtgccaatttggaaagatgagtatttgtgggaaaatgaataaagcaaagtgtaaatcagaggtttaagttaaaa

SEQ ID NO: 15191 - DNA, 120 bp, Artificial Sequence
  ENSG00000012779_0 (sequence is synthesized)
agatgcggacacctggaccgccgcgccgaggctcccggcgctcgctgctcccgcggcccgcgccatgccctcctacacggtcaccgtggccactggcagccagtggttcgccggcactga

SEQ ID NO: 15192 - DNA, 120 bp, Artificial Sequence
  ENSG00000012779_1 (sequence is synthesized)
cgactacatctacctcagcctcgtgggctcggcgggctgcagcgagaagcacctgctggacaagcccttctacaacgacttcgagcgtggcgcggtggattcatacgacgtgactgtgga

SEQ ID NO: 15193 - DNA, 120 bp, Artificial Sequence
  ENSG00000012779_2 (sequence is synthesized)
cgaggaactgggcgagatccagctggtcagaatcgagaagcgcaagtactggctgaatgacgactggtacctgaagtacatcacgctgaagacgccccacggggactacatcgagttccc

SEQ ID NO: 15194 - DNA, 120 bp, Artificial Sequence
  ENSG00000012779_3 (sequence is synthesized)
ctgctaccgctggatcaccggcgatgtcgaggttgtcctgagggatggacgcgcaaagttggcccgagatgaccaaattcacattctcaagcaacaccgacgtaaagaactggaaacacg

SEQ ID NO: 15195 - DNA, 120 bp, Artificial Sequence
  ENSG00000012779_4 (sequence is synthesized)
gcaaaaacaatatcgatggatggagtggaaccctggcttccccttgagcatcgatgccaaatgccacaaggatttaccccgtgatatccagtttgatagtgaaaaaggagtggactttgt

SEQ ID NO: 15196 - DNA, 120 bp, Artificial Sequence
  ENSG00000012779_5 (sequence is synthesized)
tctgaattactccaaagcgatggagaacctgttcatcaaccgcttcatgcacatgttccagtcttcttggaatgacttcgccgactttgagaaaatctttgtcaagatcagcaacactat

SEQ ID NO: 15197 - DNA, 120 bp, Artificial Sequence
  ENSG00000012779_6 (sequence is synthesized)
ttctgagcgggtcatgaatcactggcaggaagacctgatgtttggctaccagttcctgaatggctgcaaccctgtgttgatccggcgctgcacagagctgcccgagaagctcccggtgac

SEQ ID NO: 15198 - DNA, 120 bp, Artificial Sequence
  ENSG00000012779_7 (sequence is synthesized)
cacggagatggtagagtgcagcctggagcggcagctcagcttggagcaggaggtccagcaagggaacattttcatcgtggactttgagctgctggatggcatcgatgccaacaaaacaga

SEQ ID NO: 15199 - DNA, 120 bp, Artificial Sequence
  ENSG00000012779_8 (sequence is synthesized)
cccctgcacactccagttcctggccgctcccatctgcttgctgtataagaacctggccaacaagattgtccccattgccatccagctcaaccaaatcccgggagatgagaaccctatttt

SEQ ID NO: 15200 - DNA, 120 bp, Artificial Sequence
  ENSG00000012779_9 (sequence is synthesized)
cctcccttcggatgcaaaatacgactggcttttggccaaaatctgggtgcgttccagtgacttccacgtccaccagaccatcacccaccttctgcgaacacatctggtgtctgaggtttt

SEQ ID NO: 15201 - DNA, 120 bp, Artificial Sequence
  ENSG00000012779_10 (sequence is synthesized)
gtggcctctttgacaaggccaacgccacagggggcggtgggcacgtgcagatggtgcagagggccatgaaggacctgacctatgcctccctgtgctttcccgaggccatcaaggcccggg

SEQ ID NO: 15202 - DNA, 120 bp, Artificial Sequence
  ENSG00000012779_11 (sequence is synthesized)
gcatggagagcaaagaagacatcccctactacttctaccgggacgacgggctcctggtgtgggaagccatcaggacgttcacggccgaggtggtagacatctactacgagggcgaccagg

SEQ ID NO: 15203 - DNA, 120 bp, Artificial Sequence
  ENSG00000012779_12 (sequence is synthesized)
tggtggaggaggacccggagctgcaggacttcgtgaacgatgtctacgtgtacggcatgcggggccgcaagtcctcaggcttccccaagtcggtcaagagccgggagcagctgtcggagt

SEQ ID NO: 15204 - DNA, 120 bp, Artificial Sequence
  ENSG00000012779_13 (sequence is synthesized)
acctgaccgtggtgatcttcaccgcctccgcccagcacgccgcggtcaacttcggccagtacgactggtgctcctggatccccaatgcgcccccaaccatgcgagccccgccaccgactg

SEQ ID NO: 15205 - DNA, 120 bp, Artificial Sequence
  ENSG00000012779_14 (sequence is synthesized)
ccaagggcgtggtgaccattgagcagatcgtggacacgctgcccgaccgcggccgctcctgctggcatctgggtgcagtgtgggcgctgagccagttccaggaaaacgagctgttcctgg

SEQ ID NO: 15206 - DNA, 120 bp, Artificial Sequence
  ENSG00000012779_15 (sequence is synthesized)
gcatgtacccagaagagcattttatcgagaagcctgtgaaggaagccatggcccgattccgcaagaacctcgaggccattgtcagcgtgattgctgagcgcaacaagaagaagcagctgc

SEQ ID NO: 15207 - DNA, 120 bp, Artificial Sequence
  ENSG00000012779_16 (sequence is synthesized)
catattactacttgtccccagaccggattccgaacagtgtggccatctgagcacactgccagtctcactgtgggaaggccagctgccccagccagatggactccagcctgcctggcaggc

SEQ ID NO: 15208 - DNA, 120 bp, Artificial Sequence
  ENSG00000012779_17 (sequence is synthesized)
tgtctggccaggcctcttggcagtcacatctcttcctccgaggccagtacctttccatttattctttgatcttcagggaactgcatagattgatcaaagtgtaaacaccatagggaccca

SEQ ID NO: 15209 - DNA, 120 bp, Artificial Sequence
  ENSG00000012779_18 (sequence is synthesized)
ttctacacagagcaggactgcacagcgtcctgtccacacccagctcagcatttccacaccaagcagcaacagcaaatcacgaccactgatagatgtctattcttgttggagacatgggat

SEQ ID NO: 15210 - DNA, 120 bp, Artificial Sequence
  ENSG00000012779_19 (sequence is synthesized)
gattattttctgttctatttgtgcttagtccaattccttgcacatagtaggtacccaattcaattactattgaatgaattaagaattggttgccataaaaataaatcagttcatttaaaa

SEQ ID NO: 15211 - DNA, 120 bp, Artificial Sequence
  ENSG00000012779_20 (sequence is synthesized)
tgggggaggagccgggacccctgcctgactacctggggcgggcctggcccctccaccgctagcgctgaatggggacggggtgggggagtcccagcgtccgtgagggggttgccgccgggc

SEQ ID NO: 15212 - DNA, 120 bp, Artificial Sequence
  ENSG00000012779_21 (sequence is synthesized)
aggtttcagacaccacaaatgccgaatgagctgctgccattccttcatcttaccccgaactgccacaacctgtgaacaccttccatgtgaatcaatcagccttggagtcagaggagagaa

SEQ ID NO: 15213 - DNA, 120 bp, Artificial Sequence
  ENSG00000012779_22 (sequence is synthesized)
gggctcccttctcaaggccgctgcctcctcccccgccccggttctgcacgcgtactgcaccctcggacagcctcggggcctggcacgggacttgcaggatggattctgcccgctcagcca

SEQ ID NO: 15214 - DNA, 120 bp, Artificial Sequence
  ENSG00000012779_23 (sequence is synthesized)
gccaagggcgctggccgcggggaaagaggatggacggactgcagggcccgctggagttggggggcacggggaggacggggcccagggggcagctgggcagcagggcttcgggggtgccca

SEQ ID NO: 15215 - DNA, 120 bp, Artificial Sequence
  ENSG00000012779_24 (sequence is synthesized)
tgctggcggtcgtctccgcagtacgactggtgctcctggatccccaatgcgcccccaaccatgcgagccccgccaccgactgccaagggcgtggtgaccattgagcagatcgtggacacg

SEQ ID NO: 15216 - DNA, 120 bp, Artificial Sequence
  ENSG00000012779_25 (sequence is synthesized)
gctggtggcacacgtgagattcaccattgcaatcaacaccaaggcccgtgagcagctcatctgcgagtgtggcctctttgacaaggtgggtgccctcctaccctacttgttgcctggaag

SEQ ID NO: 15217 - DNA, 120 bp, Artificial Sequence
  ENSG00000012779_26 (sequence is synthesized)
agcccagcctggccgccttcactccctatctgagatctagacaccctttcaggaggcctggaagggtgaaggctggagtctgctcagagcactggctccagcatcctcctgatgtctcca

SEQ ID NO: 15218 - DNA, 120 bp, Artificial Sequence
  ENSG00000012779_27 (sequence is synthesized)
caggccctcaacagagttgcatgggtcctggaaactgagggtcactgagagcaatgactgagggtcgtgtgctcagcactagagcagacttcacagcccaggcccgctggtgctggggtc

SEQ ID NO: 15219 - DNA, 120 bp, Artificial Sequence
  ENSG00000012779_28 (sequence is synthesized)
ccccacacacctgcccacgcctgctgccctcctgtggctgggagcgcacccttccctcttgtactctgcagccccacggttcagtcccttgcattggattgggcgggaggctcctcccta

SEQ ID NO: 15220 - DNA, 120 bp, Artificial Sequence
  ENSG00000012779_29 (sequence is synthesized)
gttaaacatccctcccccatctcacaggacaagggcttgcacctctgcctgcctggcctcctcgcctcccctggcacatttcctcagggatgggtctggacagctgtgggaggagccacc

SEQ ID NO: 15221 - DNA, 120 bp, Artificial Sequence
  ENSG00000012817_0 (sequence is synthesized)
cggccatactatttttatcttgctttttcgttctgtcgcagtactgtttaatatgagtccagcgacggctctgtgactgttttcctctggtaaaatcgctcttgcgtcctcagcgtttat

SEQ ID NO: 15222 - DNA, 120 bp, Artificial Sequence
  ENSG00000012817_1 (sequence is synthesized)
ctcaggtgcggaaggtctcacaggtttggaaatagcgccggaaaaatcgatccgcggagtgagacggctcgtaccacactgcagggcccggaggtcaagatggtggctgtaaaactagga

SEQ ID NO: 15223 - DNA, 120 bp, Artificial Sequence
  ENSG00000012817_2 (sequence is synthesized)
tccctgacgattgcttagcattaaggcccgacatggaaccggggtgtgacgagttcctgccgccaccggagtgcccggtttttgagcctagctgggctgaattccaagacccgcttggct

SEQ ID NO: 15224 - DNA, 120 bp, Artificial Sequence
  ENSG00000012817_3 (sequence is synthesized)
acattgcgaaaataaggcccatagcagagaagtctggcatctgcaaaatccgcccacccgcggattggcagcctccttttgcagtagaagttgacaatttcagatttactcctcgcgtcc

SEQ ID NO: 15225 - DNA, 120 bp, Artificial Sequence
  ENSG00000012817_4 (sequence is synthesized)
aaaggctaaatgaactggaggcccaaactagagtgaaattgaactatttggatcagattgcaaaattctgggaaattcaaggctcctctttaaagattcccaatgtggagcggaagatct

SEQ ID NO: 15226 - DNA, 120 bp, Artificial Sequence
  ENSG00000012817_5 (sequence is synthesized)
tggacctctacagccttagtaagattgtgattgaggaaggtggctatgaagccatctgcaaggatcgtcggtgggctcgagttgcccagcgtctccactacccaccaggcaaaaacattg

SEQ ID NO: 15227 - DNA, 120 bp, Artificial Sequence
  ENSG00000012817_6 (sequence is synthesized)
gctccctgctacgatcacattacgaacgcattatttacccctatgaaatgtttcagtctggagccaaccatgtgcaatgtaacacacacccgtttgacaatgaggtaaaagataaggaat

SEQ ID NO: 15228 - DNA, 120 bp, Artificial Sequence
  ENSG00000012817_7 (sequence is synthesized)
acaagccccacagcatcccccttagacagtctgtgcagccttcaaagttcagcagctacagtcgacgggcaaaaaggctacagcctgatccagagcctacagaggaggacattgagaagc

SEQ ID NO: 15229 - DNA, 120 bp, Artificial Sequence
  ENSG00000012817_8 (sequence is synthesized)
atccagagctaaagaagttacagatatatgggccaggtcccaaaatgatgggcttgggccttatggctaaggataaggataagactgtgcataagaaagtcacatgccccccaactgtta

SEQ ID NO: 15230 - DNA, 120 bp, Artificial Sequence
  ENSG00000012817_9 (sequence is synthesized)
cggtgaaggatgagcaaagtggaggtgggaacgtgtcatcaacattgctcaagcagcacttgagcctagagccctgcactaagacaaccatgcaacttcgaaagaatcacagcagtgccc

SEQ ID NO: 15231 - DNA, 120 bp, Artificial Sequence
  ENSG00000012817_10 (sequence is synthesized)
agtttattgactcatatatttgccaagtatgctcccgtggggatgaagatgataagcttcttttctgtgatggctgtgatgacaattaccacatcttctgcttgttaccaccccttcctg

SEQ ID NO: 15232 - DNA, 120 bp, Artificial Sequence
  ENSG00000012817_11 (sequence is synthesized)
aaatccccagaggcatctggaggtgcccaaaatgtatcttggcggagtgtaaacagcctcctgaagcttttggatttgaacaggctacccaggagtacagtttgcagagttttggtgaaa

SEQ ID NO: 15233 - DNA, 120 bp, Artificial Sequence
  ENSG00000012817_12 (sequence is synthesized)
tggctgattccttcaagtccgactacttcaacatgcctgtacatatggtgcctacagaacttgtagagaaggaattctggaggctggtgagcagcattgaggaagacgtgacagttgaat

SEQ ID NO: 15234 - DNA, 120 bp, Artificial Sequence
  ENSG00000012817_13 (sequence is synthesized)
atggagctgatattcattccaaagaatttggcagtggctttcctgtcagcaatagcaaacaaaacttatctcctgaggagaaggagtatgcgaccagtggttggaacctgaatgtgatgc

SEQ ID NO: 15235 - DNA, 120 bp, Artificial Sequence
  ENSG00000012817_14 (sequence is synthesized)
cagtgctagatcagtctgttctctgtcacatcaatgcagacatctcaggcatgaaggtgccctggctgtacgtgggcatggttttctcagcattttgttggcatattgaggatcactgga

SEQ ID NO: 15236 - DNA, 120 bp, Artificial Sequence
  ENSG00000012817_15 (sequence is synthesized)
gttactctattaactatctgcattggggtgagccgaagacctggtatggtgtaccctccctggcagcagagcatttggaggaggtgatgaagatgctgacacctgagctgtttgatagcc

SEQ ID NO: 15237 - DNA, 120 bp, Artificial Sequence
  ENSG00000012817_16 (sequence is synthesized)
agcctgatctcctacaccagcttgtcactctcatgaatcccaacactttgatgtcccatggtgtgccagttgtccgcacaaaccagtgtgcaggggagtttgtcatcacttttcctcgtg

SEQ ID NO: 15238 - DNA, 120 bp, Artificial Sequence
  ENSG00000012817_17 (sequence is synthesized)
cttaccacagtggttttaaccaaggctacaattttgctgaagctgtcaacttttgtactgctgactggctacctgctggacgccagtgcattgaacactaccgccggctccggcgctatt

SEQ ID NO: 15239 - DNA, 120 bp, Artificial Sequence
  ENSG00000012817_18 (sequence is synthesized)
gtgtcttctcccacgaggagctcatctgcaagatggctgccttcccagagacgttggatctcaatctagcagtagctgtgcacaaggagatgttcattatggttcaggaggagcgacgtc

SEQ ID NO: 15240 - DNA, 120 bp, Artificial Sequence
  ENSG00000012817_19 (sequence is synthesized)
tacgaaaggcccttttggagaagggcgtcacggaggctgagcgagaggcttttgagctgctcccagatgatgaacgccagtgcatcaagtgcaagaccacgtgcttcttgtcagccctgg

SEQ ID NO: 15241 - DNA, 120 bp, Artificial Sequence
  ENSG00000012817_20 (sequence is synthesized)
cctgctacgactgcccagatggccttgtatgcctttcccacatcaatgacctctgcaagtgctctagtagccgacagtacctccggtatcggtacaccttggatgagctccccaccatgc

SEQ ID NO: 15242 - DNA, 120 bp, Artificial Sequence
  ENSG00000012817_21 (sequence is synthesized)
tgcataaactgaagattcgggctgagtcttttgacacctgggccaacaaagtgcgagtggccttggaggtggaggatggccgtaaacgcagctttgaagagctaagggcactggagtctg

SEQ ID NO: 15243 - DNA, 120 bp, Artificial Sequence
  ENSG00000012817_22 (sequence is synthesized)
cttgtattgctcaagtcctggggctggtcagtggtcaggtggccaggatggacactccacagctgaccttgactgaactccgggtccttcttgagcagatgggcagcctgccctgtgcca

SEQ ID NO: 15244 - DNA, 120 bp, Artificial Sequence
  ENSG00000012817_23 (sequence is synthesized)
tgcatcagattggggatgtcaaggatgtcctggaacaggtggaggcctatcaagctgaggctcgtgaggctctggccacactgccctctagtccagggctattgcggtccctgttggaga

SEQ ID NO: 15245 - DNA, 120 bp, Artificial Sequence
  ENSG00000012817_24 (sequence is synthesized)
gggggcagcagctgggtgtagaggtgcctgaagcccatcagcttcagcagcaggtggagcaggcgcaatggctagatgaagtgaagcaggccctggccccttctgctcacaggggctctc

SEQ ID NO: 15246 - DNA, 120 bp, Artificial Sequence
  ENSG00000012817_25 (sequence is synthesized)
tggtcatcatgcaggggcttttggttatgggtgccaagatagcctccagcccttctgtggacaaggcccgggctgagctgcaagaactactgaccattgcagagcgctgggaagaaaagg

SEQ ID NO: 15247 - DNA, 120 bp, Artificial Sequence
  ENSG00000012817_26 (sequence is synthesized)
ctcatttctgcctggaggccaggcagaagcatccaccagccacattggaagccataattcgtgagacagaaaacatccctgttcacctgcctaacatccaggctctcaaagaagctctga

SEQ ID NO: 15248 - DNA, 120 bp, Artificial Sequence
  ENSG00000012817_27 (sequence is synthesized)
ctaaggcacaagcttggattgctgatgtggatgagatccaaaatggtgaccactacccctgtctagatgacttggagggcctggtggctgtgggccgggacctgcctgtggggctggaag

SEQ ID NO: 15249 - DNA, 120 bp, Artificial Sequence
  ENSG00000012817_28 (sequence is synthesized)
agctgagacagctagagctgcaggtattgacagcacattcctggagagagaaggcctccaagacctttctcaagaagaattcttgctacacactgcttgaggtgctttgcccgtgtgcag

SEQ ID NO: 15250 - DNA, 120 bp, Artificial Sequence
  ENSG00000012817_29 (sequence is synthesized)
acgctggctcagacagcaccaagcgtagccggtggatggagaaggcgctggggttgtaccagtgtgacacagagctgctggggctgtctgcacaggacctcagagacccaggctctgtga

SEQ ID NO: 15251 - DNA, 120 bp, Artificial Sequence
  ENSG00000012817_30 (sequence is synthesized)
ttgtggccttcaaggaaggggaacagaaggagaaggagggtatcctgcagctgcgtcgcaccaactcagccaagcccagtccactggcaccatccctcatggcctcttctccgacttcta

SEQ ID NO: 15252 - DNA, 120 bp, Artificial Sequence
  ENSG00000012817_31 (sequence is synthesized)
tctgtgtgtgtgggcaggtgccagctggggtgggagttctgcagtgtgacctgtgtcaggactggttccatgggcagtgtgtgtcagtgccccatctcctcacctctccaaagcccagtc

SEQ ID NO: 15253 - DNA, 120 bp, Artificial Sequence
  ENSG00000012817_32 (sequence is synthesized)
tcacttcatctccactgctagcctggtgggaatgggacacaaaattcctgtgtccactgtgtatgcgctcacgacggccacgcctagagacaatcctagccttgctggttgccctgcaga

SEQ ID NO: 15254 - DNA, 120 bp, Artificial Sequence
  ENSG00000012817_33 (sequence is synthesized)
ggctgcccgtgcggctgcctgagggtgaggcccttcagtgtctcacagagagggccattggctggcaagaccgtgccagaaaggctctggcctctgaagatgtgactgctctgttgcgac

SEQ ID NO: 15255 - DNA, 120 bp, Artificial Sequence
  ENSG00000012817_34 (sequence is synthesized)
agctggctgagcttcgccaacagctacaggccaaacccagaccagaggaggcctcagtctacacttcagccactgcctgtgaccctatcagagaaggcagtggcaacaatatttctaagg

SEQ ID NO: 15256 - DNA, 120 bp, Artificial Sequence
  ENSG00000012817_35 (sequence is synthesized)
tccaagggctgctggagaatggagacagtgtgaccagtcctgagaacatggctccaggaaagggctctgacctggagctactgtcctcactgttgccgcagttgactggccctgtgttgg

SEQ ID NO: 15257 - DNA, 120 bp, Artificial Sequence
  ENSG00000012817_36 (sequence is synthesized)
agctgcctgaggcaatccgggctcccctggaggagctcatgatggaaggggacctgcttgaggtgaccctggatgagaaccacagcatctggcagctgctgcaggctggacagcctccag

SEQ ID NO: 15258 - DNA, 120 bp, Artificial Sequence
  ENSG00000012817_37 (sequence is synthesized)
acctggacagaattcgcacacttctggagctggaaaaatttgaacatcaagggagtcggacaaggagccgggctctggagaggcgacggcggcggcagaaggtggatcagggtagaaacg

SEQ ID NO: 15259 - DNA, 120 bp, Artificial Sequence
  ENSG00000012817_38 (sequence is synthesized)
ttgagaatcttgttcaacaggagcttcagtcaaaaagggctcggagctcagggattatgtctcaggtgggccgagaagaagaacattatcaggagaaagcagaccgtgaaaatatgttcc

SEQ ID NO: 15260 - DNA, 120 bp, Artificial Sequence
  ENSG00000012817_39 (sequence is synthesized)
tgacaccttccacagaccacagccctttcttgaaaggaaaccaaaatagcttacaacacaaggattcaggctcttcagctgcttgtccttctttaatgcctttgctacaactctcctact

SEQ ID NO: 15261 - DNA, 120 bp, Artificial Sequence
  ENSG00000012817_40 (sequence is synthesized)
ctgatgagcaacagttgtgacagtggcaccaaaggtcatttgtggttgtttttgtttgtttgtttcttaaatcctactatctcctggcctggacctcagaaggagctttttgcttatcta

SEQ ID NO: 15262 - DNA, 120 bp, Artificial Sequence
  ENSG00000012817_41 (sequence is synthesized)
taatttttcactgccaatttttgatatcctctctcctagagttactgttaaaaggttggttcgtaaagtccacaccccgatgctcagaagtgtcttgccagcaacattcctgctagcata

SEQ ID NO: 15263 - DNA, 120 bp, Artificial Sequence
  ENSG00000012817_42 (sequence is synthesized)
caggagtgatttcctaaaccagtttcattctagtctgaatagggacaaacaaatcttgaggaagcccaagtgcgtacctttatttttgcccccaccaccctctttctgtacttcaatttt

SEQ ID NO: 15264 - DNA, 120 bp, Artificial Sequence
  ENSG00000012817_43 (sequence is synthesized)
tgtttgttttttgtttttttgtccctgtcataaaatattttggtgcttcaaaacttgtaccttcattgtacatccttttcttttctccccttgggtcttattataaaagaagacaatgta

SEQ ID NO: 15265 - DNA, 120 bp, Artificial Sequence
  ENSG00000012817_44 (sequence is synthesized)
cgttgtaattaccaaaaagaatagggaaaaacaagaatttcatgactctacctgtggtctatctttaatttcatttcttttgttaaaaataaaacaatgagtatgtttggatactatgaa

SEQ ID NO: 15266 - DNA, 120 bp, Artificial Sequence
  ENSG00000012817_45 (sequence is synthesized)
agtgagtgacaggaaatggaaggaacccttgtgtaagccttatttctttcttttgggtattctcaaccttccttttctgctaacactgcctacctgttgcaacttacactctccaggctt

SEQ ID NO: 15267 - DNA, 120 bp, Artificial Sequence
  ENSG00000012817_46 (sequence is synthesized)
gctggtcagtggtcaggtggccaggtacgtgagaggagaaggcaaagaagggtgtcagtgtgtgaaaatgaataacaaaaatggatagactataaacacacaatcctgtttgaggctgag

SEQ ID NO: 15268 - DNA, 120 bp, Artificial Sequence
  ENSG00000012817_47 (sequence is synthesized)
atgtcatggagctttcctcttatgtcttcttttagtagtttgataattttggattttacatattttacatttaagtttttacttcctttggggttggtttttgtacatggtgaaagatgg

SEQ ID NO: 15269 - DNA, 120 bp, Artificial Sequence
  ENSG00000012817_48 (sequence is synthesized)
gtcaagtttcatccttttgcatgtggatatccaggttttccaacaatggatactgaagagactttcctttcctctctgtgtgttcttggtgtctttgtggaacttctgttggctgaaaat

SEQ ID NO: 15270 - DNA, 120 bp, Artificial Sequence
  ENSG00000012817_49 (sequence is synthesized)
gcagagatttatttctgggctattattttccatggagctgtgtgtttgtttttaatggcagtactaagcccttttagttactatagctttgtgatataatagtaaattagtgtgaatact

SEQ ID NO: 15271 - DNA, 120 bp, Artificial Sequence
  ENSG00000012817_50 (sequence is synthesized)
ctcagcttttttgtttgttggtttgttttgtttcacatattgctttgggtattttgagtctttggggttccatatcaatttaagggttgcttttttgaaaatttctgtgaaggatgctgt

SEQ ID NO: 15272 - DNA, 120 bp, Artificial Sequence
  ENSG00000012817_51 (sequence is synthesized)
tatttttgacagggattaaattgaatttctagatcagtttggatagtatggacattttagcaatattaattcttgtggtctgtgaggacaaggtgtcttaaaatttctttgtgtgttctt

SEQ ID NO: 15273 - DNA, 120 bp, Artificial Sequence
  ENSG00000012817_52 (sequence is synthesized)
cagtttacttcatcattatttgtatagtttgcagtgtagttatttttttacctctttaaatttattgctagagatttttttcagctgttacaaatgaagtttttattttgtttttttcag

SEQ ID NO: 15274 - DNA, 120 bp, Artificial Sequence
  ENSG00000012817_53 (sequence is synthesized)
ataattttctactaatgtatacaaacaccactgatttttatattgattttgtatcctgcaaatttactgaatttgttagttctaacaccatttttacggaggccttagcatcctcttaaa

SEQ ID NO: 15275 - DNA, 120 bp, Artificial Sequence
  ENSG00000012817_54 (sequence is synthesized)
aaagaagtgttttctttaagacttttttataaatcttcaaacagggataacataactttctcttttccaatttgaatgtttttttaatttcttttcctgcctcattgctctggctgggac

SEQ ID NO: 15276 - DNA, 120 bp, Artificial Sequence
  ENSG00000012817_55 (sequence is synthesized)
ctccggcactgtgttagttgacagtggcaaaacagggcattatttttgagtttacaatatggacctcttgtgaccaggaataccagaggcagcatgttctaagacacagttgtcttctta

SEQ ID NO: 15277 - DNA, 120 bp, Artificial Sequence
  ENSG00000012817_56 (sequence is synthesized)
ggcccttttggagaagctttccttacaaggttgagtccacatcagggctcagtgttggctgaggtggggtgtccacaaccctactcctagtctttacagtatatgtgggttgaacacccc

SEQ ID NO: 15278 - DNA, 120 bp, Artificial Sequence
  ENSG00000012817_57 (sequence is synthesized)
gacagtgtgaccagtcctgagaacatggctccaggaaagggctctggtaagacaggtgtggtttgggtaggctgttggctaaacataactgagtgacccatgtatttgtcacctctgttg

SEQ ID NO: 15279 - DNA, 120 bp, Artificial Sequence
  ENSG00000012817_58 (sequence is synthesized)
tggccatggaggataagaccaagagtggcctctaacccagtctgtccctgcacctttcaccgcaccaccttccgcccagacctggagctactgtcctcactgttgccgcagttgactggc

SEQ ID NO: 15280 - DNA, 120 bp, Artificial Sequence
  ENSG00000012817_59 (sequence is synthesized)
cagtgagtgacaggaaatggaaggaacccttgtgatggacactccacagctgaccttgactgaactccgggtccttcttgagcagatgggcagcctgccctgtgccatgcatcagattgg

SEQ ID NO: 15281 - DNA, 120 bp, Artificial Sequence
  ENSG00000012817_60 (sequence is synthesized)
ggatgtcaaggttctttcctggaagtggcggagatatgtgttcccataccatctctgtgtgtacagcatgcaaggaaatatccttccagactgaaataattaaaaactctaaactgggcc

SEQ ID NO: 15282 - DNA, 120 bp, Artificial Sequence
  ENSG00000012817_61 (sequence is synthesized)
tacataagacactggctcttgggaatggggtggagaggactgattggttggttggttgatttccctccagacaccagagtcttagaaagcttactagatggataagattgtattaaagtg

SEQ ID NO: 15283 - DNA, 120 bp, Artificial Sequence
  ENSG00000012817_62 (sequence is synthesized)
ggtttggaaaaagaaatttaggtaattaaaggagaaaaatgtcattctaggtaaacagagggcctttgttattatcagatagatcatgttttaggatgtggttgagaataagtattaagc

SEQ ID NO: 15284 - DNA, 120 bp, Artificial Sequence
  ENSG00000012817_63 (sequence is synthesized)
aataggaaatgcctataagagaagatgagaagtggagcaaatctaggtggttgagtatttatgtggctaaagaatctgcattttatcctatgtccttgcaggatgtcctggaacaggtgg

SEQ ID NO: 15285 - DNA, 120 bp, Artificial Sequence
  ENSG00000012817_64 (sequence is synthesized)
aaattttacttagaaaacatacatgagacttaggccaaggttaatgttttctcaaaggatgtccagttgacccagcaccagcaatagaaaacttacctgtcctacacttaattgctttgt

SEQ ID NO: 15286 - DNA, 120 bp, Artificial Sequence
  ENSG00000012817_65 (sequence is synthesized)
gctttttattgaaaatctgttggctggacttgcatgtgccaatatctgagttaacttgttgcattgcatcatttaactatgtgtctgtcccctgtggccagatcacaatgtcttggttac

SEQ ID NO: 15287 - DNA, 120 bp, Artificial Sequence
  ENSG00000012817_66 (sequence is synthesized)
agtcgctttataataagtcttacatcagggtagacagattcatctcacttttttgtttttcagattgttttagcaagttaagtcaccagctctctttttcattatgtagtagcttttgtg

SEQ ID NO: 15288 - DNA, 120 bp, Artificial Sequence
  ENSG00000012817_67 (sequence is synthesized)
tcctaaatctgattaagttgcactgacacaagttatctccctcaatattttctgttctttcaactggtgaatacaatagctaatctaaatcatttgttgtaagaattcagtaggattgat

SEQ ID NO: 15289 - DNA, 120 bp, Artificial Sequence
  ENSG00000012817_68 (sequence is synthesized)
gtgtaaatatttcaggtaaaaccactctattagtataccactaattcaattcacggttcttgttttgtgtgtctctgggtgatctaataatacagactgtattatacttcttttaatccc

SEQ ID NO: 15290 - DNA, 120 bp, Artificial Sequence
  ENSG00000012817_69 (sequence is synthesized)
tttaaaggtgaacgcattctgtcatcctggattgaatctctcgcttttccacctactccttgctgacttgagtcagtgtagaacacgttattacccatagcatttctcatgcctataatc

SEQ ID NO: 15291 - DNA, 120 bp, Artificial Sequence
  ENSG00000012817_70 (sequence is synthesized)
atacctaccttccttattgtctactcttttcacctctttctttctttgatactgtcatagggaactataattagctttcccagtaacaaagctatgcttggtgatgacctagtagagtag

SEQ ID NO: 15292 - DNA, 120 bp, Artificial Sequence
  ENSG00000012817_71 (sequence is synthesized)
aaattgcttcacctgtccaagtacagtgtactttaccttaccacaccatagggaccaggtaaaatatatagaaaatcctgagataatttatctaaatctgagaattgtcttcgaaatttc

SEQ ID NO: 15293 - DNA, 120 bp, Artificial Sequence
  ENSG00000012817_72 (sequence is synthesized)
ttttttctcctcttccataaataggaggaaagtcatgattctcaagccattacagattctctgacacttgttaacggaaaattctgatgaggcatgatgagaacttctgcctataaaaat

SEQ ID NO: 15294 - DNA, 120 bp, Artificial Sequence
  ENSG00000012817_73 (sequence is synthesized)
ctcactaaagttctgagtcacaaattgttcacatacttcacagtaagcaggcaatccaatgtcaggacagttgtacacctttcttaggttgcctcccctaattggggctgtatttgacat

SEQ ID NO: 15295 - DNA, 120 bp, Artificial Sequence
  ENSG00000012817_74 (sequence is synthesized)
gaggggccagttttgacactttttaaaaccatacacaaggatgcagcactaagtttttgcacataggcaagaatttatcttgtgattagaagttagttatatgttcattaagaaacatga

SEQ ID NO: 15296 - DNA, 120 bp, Artificial Sequence
  ENSG00000012817_75 (sequence is synthesized)
cgaaatctgcagcaaaaattgaatttcataggccattcagtgttctctgcgataattctaattcagaaaaaaattgaatcttggtttaaaaaaattgtaataaaactttaccactggtaa

SEQ ID NO: 15297 - DNA, 120 bp, Artificial Sequence
  ENSG00000012817_76 (sequence is synthesized)
aacttgtcagtatcgctgaacttagaaaaaaacctttgtgggtattactgaaatatgaaagggaaggaagtatattaaaagtctcaaattgtttgaaatgtgacattacgaggtgttcct

SEQ ID NO: 15298 - DNA, 120 bp, Artificial Sequence
  ENSG00000012822_0 (sequence is synthesized)
gtttttgttgttggtgaaaggtgaggggaacagctgatccgtctgttgggaggacagatatctcaaggccaggatggaagaatcaccactaagccgggcaccatcccgtggtggagtcaa

SEQ ID NO: 15299 - DNA, 120 bp, Artificial Sequence
  ENSG00000012822_1 (sequence is synthesized)
ctttctcaatgtagcccggacctacatccccaacaccaaggtggaatgtcactacacccttcccccaggcaccatgcccagtgccagtgactggattggcatcttcaaggtggaggctgc

SEQ ID NO: 15300 - DNA, 120 bp, Artificial Sequence
  ENSG00000012822_2 (sequence is synthesized)
ctgtgttcgggattaccacacatttgtgtggtcttccgtgcctgaaagtacaactgatggttcccccattcacaccagtgtccagttccaagccagctacctgcccaaaccaggagctca

SEQ ID NO: 15301 - DNA, 120 bp, Artificial Sequence
  ENSG00000012822_3 (sequence is synthesized)
gctctaccagttccgatatgtgaaccgccagggccaggtgtgtgggcagagcccccctttccagttccgagagccaaggcccatggatgaactggtgaccctggaggaggctgatggggg

SEQ ID NO: 15302 - DNA, 120 bp, Artificial Sequence
  ENSG00000012822_4 (sequence is synthesized)
ctctgacatcctgctggttgtccccaaggcaactgtgttacagaaccagctcgatgagagccagcaagaacggaatgacctgatgcagctgaagctacagctggagggacaggtgacaga

SEQ ID NO: 15303 - DNA, 120 bp, Artificial Sequence
  ENSG00000012822_5 (sequence is synthesized)
gctgaggagccgagtgcaggagctcgagagggctctggcaactgccaggcaggagcacacggagctgatggaacagtacaaggggatttcccggtcccatggggagatcacagaagagag

SEQ ID NO: 15304 - DNA, 120 bp, Artificial Sequence
  ENSG00000012822_6 (sequence is synthesized)
ggacatcctgagccggcaacagggagaccatgtggcacgcatcctggagctagaggatgacatccagaccatcagtgagaaagtgctgacgaaggaagtggagctggacaggcttagaga

SEQ ID NO: 15305 - DNA, 120 bp, Artificial Sequence
  ENSG00000012822_7 (sequence is synthesized)
cacagtgaaggccctgactcgggaacaagagaagctccttgggcaactgaaagaagtacaagcagacaaggagcaaagtgaggctgagctccaagtggcacaacaggagaaccatcactt

SEQ ID NO: 15306 - DNA, 120 bp, Artificial Sequence
  ENSG00000012822_8 (sequence is synthesized)
aaatttggacctgaaggaggcgaagagctggcaagaggagcagagtgctcaggctcagcgactgaaagacaaggtggcccagatgaaggacaccctaggccaggcccagcagcgggtggc

SEQ ID NO: 15307 - DNA, 120 bp, Artificial Sequence
  ENSG00000012822_9 (sequence is synthesized)
cgagctggagcccttgaaggagcagcttcgaggggcccaggagcttgcagcctcaagccagcagaaagccacccttcttggggaggagttggccagtgcagcagcagccagggaccgcac

SEQ ID NO: 15308 - DNA, 120 bp, Artificial Sequence
  ENSG00000012822_10 (sequence is synthesized)
catagccgaactacaccgcagccgcctggaagtggctgaagttaacggcaggctggctgagctcggtttgcacttgaaggaagaaaaatgccaatggagcaaggagcgggcagggctgct

SEQ ID NO: 15309 - DNA, 120 bp, Artificial Sequence
  ENSG00000012822_11 (sequence is synthesized)
gcagagtgtggaggcagagaaggacaagatcctgaagctgagtgcagagatacttcgattggagaaggcagttcaggaggagaggacccaaaaccaagtgttcaagactgagctggcccg

SEQ ID NO: 15310 - DNA, 120 bp, Artificial Sequence
  ENSG00000012822_12 (sequence is synthesized)
ggagaaggattctagcctggtacagttgtcagaaagtaagcgggagctgacagagctgcggtcagccctgcgtgtgctccagaaggaaaaggagcagttacaggaggagaaacaggaatt

SEQ ID NO: 15311 - DNA, 120 bp, Artificial Sequence
  ENSG00000012822_13 (sequence is synthesized)
gctagagtacatgagaaagctagaggcccgcctggagaaggtggcagatgagaagtggaatgaggatgccaccacagaggatgaggaggccgctgtggggctgagctgcccggcagctct

SEQ ID NO: 15312 - DNA, 120 bp, Artificial Sequence
  ENSG00000012822_14 (sequence is synthesized)
gacagactcagaggacgagtccccagaagacatgaggctcccaccctatggcctttgtgagcgtggagacccaggctcctctcctgctgggcctcgagaggcttctccccttgttgtcat

SEQ ID NO: 15313 - DNA, 120 bp, Artificial Sequence
  ENSG00000012822_15 (sequence is synthesized)
cagccagccggctcccatttctcctcacctctctgggccagctgaggacagtagctctgactcggaggctgaagatgagaagtcagtcctgatggcagctgtgcagagtgggggtgagga

SEQ ID NO: 15314 - DNA, 120 bp, Artificial Sequence
  ENSG00000012822_16 (sequence is synthesized)
ggccaacttactgcttcctgaactgggcagtgccttctatgacatggccagtggctttacagtgggtaccctgtcagaaaccagcactgggggccctgccacccccacatggaaggagtg

SEQ ID NO: 15315 - DNA, 120 bp, Artificial Sequence
  ENSG00000012822_17 (sequence is synthesized)
tcctatctgtaaggagcgctttcctgctgagagtgacaaggatgccctggaggaccacatggatggacacttctttttcagcacccaggaccccttcacctttgagtgatcttactccct

SEQ ID NO: 15316 - DNA, 120 bp, Artificial Sequence
  ENSG00000012822_18 (sequence is synthesized)
cgtacatgcacaaatacacactcatgcacacacacactcacacacatgcatacacttaggtttcatgcccattttctatcacactgggctccatgatattctgttccctaagaactgctt

SEQ ID NO: 15317 - DNA, 120 bp, Artificial Sequence
  ENSG00000012822_19 (sequence is synthesized)
ctgtgtgccctgttttcatcccaagatttctcacttcatcctctcctacctggctcttttgtcccagggaggggtcctgttcggaagcagtggctgaatttatcccctgaaagtggtttt

SEQ ID NO: 15318 - DNA, 120 bp, Artificial Sequence
  ENSG00000012822_20 (sequence is synthesized)
ggaggaaccgggatggaggaggccttcccctgtgggaatagaatcgtccactcctagccctggttgcttctgatacacagccactgcacacacacactcacactcacactcccttgtctg

SEQ ID NO: 15319 - DNA, 120 bp, Artificial Sequence
  ENSG00000012822_21 (sequence is synthesized)
atgccccaaagccaattcctggggcaccctaccctctcttatttggagtttccgttggtttacctgagttttctctggggtctgcacagaggcagcagcatggacatcatggcctctcag

SEQ ID NO: 15320 - DNA, 120 bp, Artificial Sequence
  ENSG00000012822_22 (sequence is synthesized)
gtcccttttggttctcagtttcattggttcctctttctgttcccccattgacttctgtgccccaccctagccttttccataaccttaggtattcagtttggaggggttttttgtattttt

SEQ ID NO: 15321 - DNA, 120 bp, Artificial Sequence
  ENSG00000012822_23 (sequence is synthesized)
tgtatttgtgccttctgtgaggaatggggggaacaagtggtcccaggtatccccatttccaaggcccccctccctctccaggtccccccacagcaataaaagcttccccctgatatccat

SEQ ID NO: 15322 - DNA, 120 bp, Artificial Sequence
  ENSG00000012822_24 (sequence is synthesized)
ccctttgtagtttgaacaaatatatttatatgatatgtatgactgttgtcacaaaatgtgttcttatcatgaggtgtgactggaacacagggcccagacctccagctcttagaccctggt

SEQ ID NO: 15323 - DNA, 120 bp, Artificial Sequence
  ENSG00000012822_25 (sequence is synthesized)
ggagggaggagggaaagaggggacgcatccctgcctcatggcaggggatgctgggcagttactgtcctgtcgtgcctcctggtgtgctggccatgagtgggttgtctcaagtgggagtct

SEQ ID NO: 15324 - DNA, 120 bp, Artificial Sequence
  ENSG00000012822_26 (sequence is synthesized)
ggcttggataatgcggcagttggggagggagcaaactcatgggtccctgtcacttctgctcagggtttagtcccagggtgggtgcatgccatggaaaagtgggacaagtttcccactgcc

SEQ ID NO: 15325 - DNA, 120 bp, Artificial Sequence
  ENSG00000012822_27 (sequence is synthesized)
gagaacttcacccttcatagcagccatcactgtaccttatgccaaaggacaggctttattcctgtcaagagcgtacacctttgagtatctacttagtaaaaaatgccctaagcctcatac

SEQ ID NO: 15326 - DNA, 120 bp, Artificial Sequence
  ENSG00000012822_28 (sequence is synthesized)
ctctaaaggcgattttatattcctcctgtttctgtttctgtttctttctctgttgccatcccctcatacctgtatgcacactctgcctcaacagtcacaaaaacacattcatccactcta

SEQ ID NO: 15327 - DNA, 120 bp, Artificial Sequence
  ENSG00000012822_29 (sequence is synthesized)
accagcttcacaggctagacagacacatacacagcatcgtaaagcatttgttaaggacctgcacgctcaccaaggctctcagcaatggcctgcacaagcacatgcctacaaccccctcgt

SEQ ID NO: 15328 - DNA, 120 bp, Artificial Sequence
  ENSG00000012822_30 (sequence is synthesized)
cctccaacccaatagctcccttctcagctgccctcctctcccttcagggcccctgtgtggaccacccccaccattccctttctccattcacctgaaatgctcctgtccaccccctttcca

SEQ ID NO: 15329 - DNA, 120 bp, Artificial Sequence
  ENSG00000012822_31 (sequence is synthesized)
gccccacctggatgacttcttacatcgttccttcttccctcacgtctccgtctcctagcaaccccatcccgttccctgaatcccttccaaggaaattagagataatggatctctcctctc

SEQ ID NO: 15330 - DNA, 120 bp, Artificial Sequence
  ENSG00000012822_32 (sequence is synthesized)
tccatcccaacccctctttattgatcctcctttaatgaaagttaattataacaatgatttaattaatagaatccctctcttcctttattgcttcccgtattaagactattaataaatacg

SEQ ID NO: 15331 - DNA, 120 bp, Artificial Sequence
  ENSG00000012822_33 (sequence is synthesized)
agctgggctgacagaggcatccatcacccgcctgggattccccccatccctccttttaccttcccccctctccctctccctctcttggcctataaacttgccggggtagtgggggttaat

SEQ ID NO: 15332 - DNA, 120 bp, Artificial Sequence
  ENSG00000012822_34 (sequence is synthesized)
cagagaggaattatgagccaacatccccagcaggaggtgcatttaatgaaatcatgtgtgatttattttctgggggaggttggggcgagaagaatctgggacccacacctcctggcttcc

SEQ ID NO: 15333 - DNA, 120 bp, Artificial Sequence
  ENSG00000012822_35 (sequence is synthesized)
agtgagtggctgccttgtgcaaaaaaggagaatagtagacaaacaggaacccaggcccctgctcccatgccacagcccctgccaagccgcacatacacccacaggagccacatggctagc

SEQ ID NO: 15334 - DNA, 120 bp, Artificial Sequence
  ENSG00000012822_36 (sequence is synthesized)
tgcacaaggccactgatacagacactgtcagactaaaagcacttaagaggactgcggtataggttttgttctttccaacctcgaaaacttcacatgggtccttctcacctccttcctttc

SEQ ID NO: 15335 - DNA, 120 bp, Artificial Sequence
  ENSG00000012822_37 (sequence is synthesized)
tctccagccctgttctgcttcactgtcccgaatctgcttcatactcccctcctccatgaagccccccaaccccccaccaggctcctcaacatggatatctagagtttctagctgctcctt

SEQ ID NO: 15336 - DNA, 120 bp, Artificial Sequence
  ENSG00000012822_38 (sequence is synthesized)
tctctgccctttgtgtgtctttctggcatgcaatttgcagtttcagactgggggtgccacaaaatgtggggccatttctcttccttactcatggtttgcctatcccagtatccaaagcat

SEQ ID NO: 15337 - DNA, 120 bp, Artificial Sequence
  ENSG00000012822_39 (sequence is synthesized)
ggtccccgacacagagggggctcaaggaagggtaattgacggcatgggctgggggaaacccaggggcagccagcttccaattctagttctctttcctactcactgaggggtatttggcaa

SEQ ID NO: 15338 - DNA, 120 bp, Artificial Sequence
  ENSG00000012822_40 (sequence is synthesized)
ctcagcctttctacttatttctcttctataatggatcatccctttcctccctgctccccagcatccatgcaaaagccgatagatctgaatgggcttgagactctaatgtgaaaggagatg

SEQ ID NO: 15339 - DNA, 120 bp, Artificial Sequence
  ENSG00000012822_41 (sequence is synthesized)
tcagccaagtagcagcaaataggaactcgcgtcagtatttggtggtgaaagaacgaatccaaacacaccactcccccacttatcgaacctcaatggccacctgttacctacaggaatgag

SEQ ID NO: 15340 - DNA, 120 bp, Artificial Sequence
  ENSG00000012822_42 (sequence is synthesized)
aaatgtagattgcttagtgtgccagtcagggtcttcaccatctgtcccaacttgcccttccatttcccatctaccctaaggaaccctgtactccagtataacagaaccattccacaaaaa

SEQ ID NO: 15341 - DNA, 120 bp, Artificial Sequence
  ENSG00000012822_43 (sequence is synthesized)
catacactactttcctcctagctcaaaggataccacctacatggagccttacttgactgccctcagttatcctttgacataccacgtagagcactttataaaaagatgctacatgtgttt

SEQ ID NO: 15342 - DNA, 120 bp, Artificial Sequence
  ENSG00000012822_44 (sequence is synthesized)
acaactttttattctccctaaactgtaagcaacttgaaggcagattctatgcttatacatcactgtgttcctaaaatctagtatagagactggaacataggaccagtcctccagaaataa

SEQ ID NO: 15343 - DNA, 120 bp, Artificial Sequence
  ENSG00000012822_45 (sequence is synthesized)
tctttaagttattttaatgaaatgttttatacatacaaaataatatatgtaatgaataataaagtgaacatcattgagctcaccaactagcttcaaataaatattaccaataccattaaa

SEQ ID NO: 15344 - DNA, 120 bp, Artificial Sequence
  ENSG00000012822_46 (sequence is synthesized)
aaaccagcagccacccctaatgcagccggccccctcctaagggatcatgggccttgaagtcctttgctggccacaccctcgttttctgtcataggagtgagaactacgcctcccaggatg

SEQ ID NO: 15345 - DNA, 120 bp, Artificial Sequence
  ENSG00000012822_47 (sequence is synthesized)
ccgcggtgaggccgccgtcacggacgccctcttccccgccctccttgcgcgcagccttctgggatgtatagtcctagatccgagcacgcagcggcaaaagggcgcagaagaaccacaaac

SEQ ID NO: 15346 - DNA, 120 bp, Artificial Sequence
  ENSG00000012822_48 (sequence is synthesized)
aggagggaggtgggaggaggtcagagggaaagggcatctgtgtggacagtcaccaggccctgctcccaacccctgcccttcttggcctcagccaagaaaaggagatacaggtatggttaa

SEQ ID NO: 15347 - DNA, 120 bp, Artificial Sequence
  ENSG00000012822_49 (sequence is synthesized)
caaggaaaatgactcactgctccaaatcccagatgccttcaggtaatccctacccctatcttatcaatgcactcagaggtcctgcctttaactggcttctatgttgttctagcaccatct

SEQ ID NO: 15348 - DNA, 120 bp, Artificial Sequence
  ENSG00000012822_50 (sequence is synthesized)
tctgcagagcccaaattgccctgcttcccctctctcctgcctctaccccttccccaaccaccaggtaggtacctagggtcctccggggaggaagggaggtgaccatggcccccagggata

SEQ ID NO: 15349 - DNA, 120 bp, Artificial Sequence
  ENSG00000012822_51 (sequence is synthesized)
ggagcagagagaagactgggatccagcatccatctggctacaactgaaatgctttccctcttccctgacttccctgggtaacccttagggaagggaacctatagaggtgggggtttcagg

SEQ ID NO: 15350 - DNA, 120 bp, Artificial Sequence
  ENSG00000012822_52 (sequence is synthesized)
tatcagattgtccccttctgccttcccttttattcccaggttcaagggggcaggcacagggaagagagatttgatcatctagtcccggttttgcctggatgtgagatgggctcagggcag

SEQ ID NO: 15351 - DNA, 120 bp, Artificial Sequence
  ENSG00000012822_53 (sequence is synthesized)
ggagggggtgatgctgtcatccttctcggctggagcaggaagatgaaggacgatgtcagactcattttcagcctcattaggcagcagacggagatggagggaggagagcaggaggctggg

SEQ ID NO: 15352 - DNA, 120 bp, Artificial Sequence
  ENSG00000012822_54 (sequence is synthesized)
ggatgggctctgcactgcagagaccagcagggactaaagaagagaggacatggggaactggaaaaataagccttccaggattgtggggagaaagacgctgtgggagaggccaggatgctg

SEQ ID NO: 15353 - DNA, 120 bp, Artificial Sequence
  ENSG00000012822_55 (sequence is synthesized)
cattaggcacaggataacctgggaacccaggcacatgggtcctgctctccgaagtctgcaagtcaagaagggaacagagcacgccgaccctctccctttcccctctgtctctcttagtgg

SEQ ID NO: 15354 - DNA, 120 bp, Artificial Sequence
  ENSG00000012822_56 (sequence is synthesized)
accccttttggcttaggtttatgggctgtgagttggttggaataaggggaatgattgggctcttggattctcaacctcaggttgatagagaagaagagagaaagatgtcacagatgacag

SEQ ID NO: 15355 - DNA, 120 bp, Artificial Sequence
  ENSG00000012822_57 (sequence is synthesized)
aaccaaagcacatattttctccatcttagccttgttctttactgacacattagtgtccctccactttccctttctcttgtcattgttgccactgtagctccatcctgccccccttattca

SEQ ID NO: 15356 - DNA, 120 bp, Artificial Sequence
  ENSG00000012822_58 (sequence is synthesized)
ctgtagtgtgtctccagctaccaatacaaacagatggaaggatggaggctgaggggagcagagagaaaatgaggagagaaatactaaagtgaaaccagtaggtttctagtcctgctgcag

SEQ ID NO: 15357 - DNA, 120 bp, Artificial Sequence
  ENSG00000012822_59 (sequence is synthesized)
gcacagtctggagagaagaatagattagttgctgctttctgatgtcataactcattcctggatacagctgggtcaacaagcttaggagtaggaggacagatatctcaaggccaggatgga

SEQ ID NO: 15358 - DNA, 120 bp, Artificial Sequence
  ENSG00000012822_60 (sequence is synthesized)
tacaagggaagatggaaaattgggagagaggagccaagggagtggaggtttgaaagaaggtagtgggctcagaaacattaaaagttaggcacaaaggacaaggaaaaataaacgaaaata

SEQ ID NO: 15359 - DNA, 120 bp, Artificial Sequence
  ENSG00000012822_61 (sequence is synthesized)
aatataatgagaatatatccaacagcgctcagcggatagagaatcacgggattatcgcagaatcagggacatagaaacagaaggaacttcagagggcatctagtcccctgtcctacccaa

SEQ ID NO: 15360 - DNA, 120 bp, Artificial Sequence
  ENSG00000012822_62 (sequence is synthesized)
gtaggggacagggcctggctgctcacccagcatccaaaatctgaacccagtgaagagggtgaaggagagatgttagtgggcttttacaatggttctggcatcaaggaaataggtttaagg

SEQ ID NO: 15361 - DNA, 120 bp, Artificial Sequence
  ENSG00000012822_63 (sequence is synthesized)
ggtagtggctgggattaaacttgatgtgacaagagacatgttccaaacgtgtaatgagactcagttctttgaacataggaatgctggggtaaggtggaggtggccacgttgataggtaag

SEQ ID NO: 15362 - DNA, 120 bp, Artificial Sequence
  ENSG00000012822_64 (sequence is synthesized)
ggaatgttcccttacagtttctttttcaaggaaggcaatgtgatagccaggtggaagcagtcagaccctggtgtgctcttcctaagcctttgttccaccacttgagagatgagtcccaac

SEQ ID NO: 15363 - DNA, 120 bp, Artificial Sequence
  ENSG00000012822_65 (sequence is synthesized)
tgtggggctgagtccgtgtagccccaatcttgtaacacctcttccccactctacctcccgctgttgaggaaggctccatgtaaccttgctgggagctgcctttgccttctatgtgttttg

SEQ ID NO: 15364 - DNA, 120 bp, Artificial Sequence
  ENSG00000012822_66 (sequence is synthesized)
ccttttctttcccagaccctggcccctgtttagtctaatgatacccctcatccagaggagacagctggtccaactcctcacaacacatccttttttcttctctgcctgcttcatctccta

SEQ ID NO: 15365 - DNA, 120 bp, Artificial Sequence
  ENSG00000012822_67 (sequence is synthesized)
gtgctgtttttgttgttggtgaaaggtgaggggaacagctgatccgtctgttggtgtgtctccagctaccaatacaaacagatggaaggatggaggctgaggggagcagagagaaaatga

SEQ ID NO: 15366 - DNA, 120 bp, Artificial Sequence
  ENSG00000012822_68 (sequence is synthesized)
tggcaagaggagcagagtgctcaggctcagcgactgaaagacaaggtggcccagatgaaggacaccctaggccaggcccagcagcgggtggtgagtgaggccccttggcaacaggaaacg

SEQ ID NO: 15367 - DNA, 120 bp, Artificial Sequence
  ENSG00000012822_69 (sequence is synthesized)
ggaaattccaagggcaagttgtagagaagcctgcgtgtctaaagagaaggggagagacatggctaaagactaaacaacacaaccccgagtcctaatgcagtggagtggagggagcgttta

SEQ ID NO: 15368 - DNA, 120 bp, Artificial Sequence
  ENSG00000012822_70 (sequence is synthesized)
aggtagagggatggggggtacctggcaatctgatggccactgcccccacctctgtggggactcctacatgtggtcagaccctctgggaggagagaagaggggttgagaaccttagaggac

SEQ ID NO: 15369 - DNA, 120 bp, Artificial Sequence
  ENSG00000012963_0 (sequence is synthesized)
gccggggccgagccgctgttcggctgacagttgaggatggccggagccgagggcgccgctgggcggcagtcggagctggagcccgtggtatcgttggtcgacgtccttgaggaggacgag

SEQ ID NO: 15370 - DNA, 120 bp, Artificial Sequence
  ENSG00000012963_1 (sequence is synthesized)
gagctggagaatgaggcgtgcgctgtcctgggcggcagcgactccgagaagtgctcctactctcagggctcagtaaagagacaagcactatatgcctgtagtacctgcaccccagaggga

SEQ ID NO: 15371 - DNA, 120 bp, Artificial Sequence
  ENSG00000012963_2 (sequence is synthesized)
gaagaaccagcaggaatttgtttagcttgcagttatgaatgtcatggaagtcacaaactatttgagctatacacaaaaagaaattttcgttgtgattgtggaaacagcaagtttaaaaat

SEQ ID NO: 15372 - DNA, 120 bp, Artificial Sequence
  ENSG00000012963_3 (sequence is synthesized)
ttggaatgcaaattacttcctgacaaagcaaaggtaaattctggcaataagtacaatgacaacttttttggattgtactgcatttgcaagagaccttatcctgatcctgaagacgagatt

SEQ ID NO: 15373 - DNA, 120 bp, Artificial Sequence
  ENSG00000012963_4 (sequence is synthesized)
ccagatgagatgatccagtgcgtagtctgtgaagactggttccatggaaggcatcttggtgccattccccctgagagtggggattttcaggagatggtatgccaggcctgcatgaaacgt

SEQ ID NO: 15374 - DNA, 120 bp, Artificial Sequence
  ENSG00000012963_5 (sequence is synthesized)
tgttcttttttgtgggcttatgctgcacaattggcagtaaccaaaatatccactgaggatgatggattggtgcggaacattgatggaataggtgatcaggaagttatcaaacctgaaaat

SEQ ID NO: 15375 - DNA, 120 bp, Artificial Sequence
  ENSG00000012963_6 (sequence is synthesized)
ggagagcatcaagatagtaccctcaaagaggatgttccagaacagggaaaggatgatgtccgggaggttaaagtagagcagaacagtgaaccatgtgccggctctagttctgaatctgat

SEQ ID NO: 15376 - DNA, 120 bp, Artificial Sequence
  ENSG00000012963_7 (sequence is synthesized)
ctccagacagtgtttaagaatgaaagcctcaacgcagaatcaaaatctggctgcaaacttcaggagcttaaagctaagcagcttataaagaaagacactgccacctattggcccctgaac

SEQ ID NO: 15377 - DNA, 120 bp, Artificial Sequence
  ENSG00000012963_8 (sequence is synthesized)
tggcgtagcaagttgtgtacctgccaagactgtatgaaaatgtatggagatctagatgtcttattcctgacagatgaatacgacacagttctggcttatgaaaacaaagggaagattgcc

SEQ ID NO: 15378 - DNA, 120 bp, Artificial Sequence
  ENSG00000012963_9 (sequence is synthesized)
caggccactgacaggagcgatcccctaatggatacccttagcagcatgaatagagtccagcaagtggaactcatttgtgaatacaatgatttgaagactgaacttaaagactatctcaag

SEQ ID NO: 15379 - DNA, 120 bp, Artificial Sequence
  ENSG00000012963_10 (sequence is synthesized)
agatttgctgatgaaggcacggttgttaagagagaggacattcagcagttctttgaagagtttcagtcaaaaaagagaagaagagtggatgggatgcagtattactgcagctagagtgga

SEQ ID NO: 15380 - DNA, 120 bp, Artificial Sequence
  ENSG00000012963_11 (sequence is synthesized)
gtatgaagctttctcattcaagccaatgaaaatgcgcttcccattcttggaataaaagaggtgtggttcacatttggccccctttccgtcctcctctgtttggagaggcctcgcgctccc

SEQ ID NO: 15381 - DNA, 120 bp, Artificial Sequence
  ENSG00000012963_12 (sequence is synthesized)
ttcattctctttagctgcagtagccaccgtgtggatgctgacttcacagccagcgtcctctgtgactcagctgatgcagctcattccacagacttctccagtgtactcctactccagtgc

SEQ ID NO: 15382 - DNA, 120 bp, Artificial Sequence
  ENSG00000012963_13 (sequence is synthesized)
acccagggttatttgcatagtttttaagtttgattttgttttgagaaagcaaattggtgtcttgtttaatgatctgttatttcactcccagatgtgtgtgttttgccacagagctgttgc

SEQ ID NO: 15383 - DNA, 120 bp, Artificial Sequence
  ENSG00000012963_14 (sequence is synthesized)
tccgcaggcatcacggaaggctctcttcccgtcacctagaacctctacaggtcccctcgcccctatgatcgtggtgccttgggtcaaagcttcctcaagcctggtctgctccttctttca

SEQ ID NO: 15384 - DNA, 120 bp, Artificial Sequence
  ENSG00000012963_15 (sequence is synthesized)
cgtccctgttttctgaggtttggtcatagcttagaaaggatcttggggcttgttttctctaggcccaacctccagagtagccaggactgatggttttctggtctggatgtctgtcacagg

SEQ ID NO: 15385 - DNA, 120 bp, Artificial Sequence
  ENSG00000012963_16 (sequence is synthesized)
cggagagattaacagatgacagggttgaggaagcaagcctttgttatgaattttactaatacagttcaagtgaaattttcgttcatgattctattggcactagaattagaatttcagtac

SEQ ID NO: 15386 - DNA, 120 bp, Artificial Sequence
  ENSG00000012963_17 (sequence is synthesized)
tgtagtgctcacagggcttcctggagaacatttgcccgtatactagtcccttctctgctgcctagaaaacagaccgggtctcacccctgtgaaatcttggtggtttacgaagtcctctgg

SEQ ID NO: 15387 - DNA, 120 bp, Artificial Sequence
  ENSG00000012963_18 (sequence is synthesized)
atttcttgatattatcagggatattcataagcatatatcaaaaatggacctattttgatattctgttatgaaaatgttattagaaccccaataaattattatttttcccccttgaatctg

SEQ ID NO: 15388 - DNA, 120 bp, Artificial Sequence
  ENSG00000012963_19 (sequence is synthesized)
ctaaagaaaacagatcctgacttagcttacttgaaataagcagggcagggagccctgttttggaagagacagactgtggaagagattacaaacaaggcccgaggctgcacgaatgatgag

SEQ ID NO: 15389 - DNA, 120 bp, Artificial Sequence
  ENSG00000012963_20 (sequence is synthesized)
ttttgtgtatataatgttaatgtccaccgccacttccctaacgactatgagatcttttttttgaagatcctcatggaaggttgtacagagccccacatttgaggggaagtcctttcagtt

SEQ ID NO: 15390 - DNA, 120 bp, Artificial Sequence
  ENSG00000012963_21 (sequence is synthesized)
gatatgagatctctttaacacccctcagtctatgtaggaaatgccttgtgatacatagagaaccctcagcttctctctgcctctggaggaccaaggtctttcctgacagtcggagacaca

SEQ ID NO: 15391 - DNA, 120 bp, Artificial Sequence
  ENSG00000012963_22 (sequence is synthesized)
ccttgatgtatgttaataaaagcatttcaggctgtggggccaccatgtatattaatactccttatgtgtccagcatctgtgtattcattcgagtgcccaatccctggatgagatgaacta

SEQ ID NO: 15392 - DNA, 120 bp, Artificial Sequence
  ENSG00000012963_23 (sequence is synthesized)
ggccttataaaaagtcaaagcctcaaagaaatggcacaaccatgttcttcggcactcaggctcctaattgcagatcctcacgaagggtggtatgtggagctggaaggtcttgtggccaca

SEQ ID NO: 15393 - DNA, 120 bp, Artificial Sequence
  ENSG00000012963_24 (sequence is synthesized)
ggacatgctggtgagccctgagctggccttgtgcagagggctccgttcaaaggctcggggtgtctttgaggttgtttatcaagctggggaactcttccaagtctgacaatgtttcgaacc

SEQ ID NO: 15394 - DNA, 120 bp, Artificial Sequence
  ENSG00000012963_25 (sequence is synthesized)
ctttttgcaaggttgcactattagtataccatcatgtccggaaaacttttaatcttctcaaatatctgatgtaactaccagaaagtcccttacttcctatgaccaatcaggaccaagtct

SEQ ID NO: 15395 - DNA, 120 bp, Artificial Sequence
  ENSG00000012963_26 (sequence is synthesized)
tggaggtgatgtgttacattacgtgcagcacaatagtaccgatcagttaactcagcgctgaagggcttgttttatgaaaggtactattccttctttcacattaactggaaacctcttttt

SEQ ID NO: 15396 - DNA, 120 bp, Artificial Sequence
  ENSG00000012963_27 (sequence is synthesized)
ttacctgttgttcacaactagttttcttattgactgtattggactgtctcttcttgtagagactgattttggccaacatattaatgcatgttttatgcaaaacacaaatatgatattagt

SEQ ID NO: 15397 - DNA, 120 bp, Artificial Sequence
  ENSG00000012963_28 (sequence is synthesized)
tgcttttaaggagttctggcattgtatgtgcatttttgtagaaattgttactggacttataattacatacttaactctgatcaggtttctgtaaaatttaaataaaaccaatacaaaata

SEQ ID NO: 15398 - DNA, 80 bp, Artificial Sequence
  ENSG00000012983_0 (sequence is synthesized)
gggtggggaacgtggtgcggcggcggcggcggcggcgactgtacgcgcctccgccgcccccgagaggacgcgccgtgcag

SEQ ID NO: 15399 - DNA, 120 bp, Artificial Sequence
  ENSG00000012983_1 (sequence is synthesized)
ccggccggcgcgcgggaggaggacgcgggtgcggtctaggaagtaggtcccgggctccgcgctcaacaaagacggggccgcccccattagacggagctgcgggcggaggctccatgttgg

SEQ ID NO: 15400 - DNA, 120 bp, Artificial Sequence
  ENSG00000012983_2 (sequence is synthesized)
gaagcggcgccgttcgtgcttgttagcgggaatccgggagccgcggggtgagctggcgggggccgggccctaagtgaagatggaggccccgctgcggcctgccgcggacatcctgaggcg

SEQ ID NO: 15401 - DNA, 120 bp, Artificial Sequence
  ENSG00000012983_3 (sequence is synthesized)
gaacccgcagcaggactacgaactcgtccagagggtcggcagcggcacctacggggacgtctataaggccagaaatgtacacacaggagagctggctgcagtaaaaatcattaaattgga

SEQ ID NO: 15402 - DNA, 120 bp, Artificial Sequence
  ENSG00000012983_4 (sequence is synthesized)
gcctggagatgatttttctttgattcaacaagaaatatttatggttaaagaatgtaaacattgtaacatcgttgcctactttgggagttatcttagtcgggaaaaactatggatttgtat

SEQ ID NO: 15403 - DNA, 120 bp, Artificial Sequence
  ENSG00000012983_5 (sequence is synthesized)
ggaatactgtggtggcggatcacttcaagatatttaccatgttactggaccattatcagaattgcaaatagcctatgtatgcagagaaaccttacagggtcttgcctatttgcatactaa

SEQ ID NO: 15404 - DNA, 120 bp, Artificial Sequence
  ENSG00000012983_6 (sequence is synthesized)
aggcaaaatgcatagagatatcaaaggtgctaatattttattgacagaccatggcgatgtaaaattagctgactttggtgtggctgcaaaaataacagctaccattgcaaaacgaaaatc

SEQ ID NO: 15405 - DNA, 120 bp, Artificial Sequence
  ENSG00000012983_7 (sequence is synthesized)
tttcattggcaccccttactggatggccccagaagttgcagcagtagagaagaatggtggctacaaccaactctgtgatatctgggcagtaggaataacagcaattgaacttggagaact

SEQ ID NO: 15406 - DNA, 120 bp, Artificial Sequence
  ENSG00000012983_8 (sequence is synthesized)
tcagccacctatgtttgatctccacccaatgagggctctcttcttaatgtcaaaaagtaattttcagcctccaaaactaaaggacaaaacaaaatggtcatcaacattccataattttgt

SEQ ID NO: 15407 - DNA, 120 bp, Artificial Sequence
  ENSG00000012983_9 (sequence is synthesized)
caaaatagcactaaccaaaaacccaaaaaaaagaccaactgctgaaagacttctgactcacacttttgttgcacagccaggtctctctagagccctagcagttgaactgttagacaaagt

SEQ ID NO: 15408 - DNA, 120 bp, Artificial Sequence
  ENSG00000012983_10 (sequence is synthesized)
gaacaatccagataaccacgcacattacactgaagcagatgacgatgactttgagccccatgcaatcattcgtcataccattagatctacaaacaggaatgccagagctgaacggacagc

SEQ ID NO: 15409 - DNA, 120 bp, Artificial Sequence
  ENSG00000012983_11 (sequence is synthesized)
ttcagaaataaattttgacaaattacaatttgaacctcctctgagaaaagaaacagaagcacgagatgaaatgggattgtcatcagacccaaatttcatgttacagtggaatccttttgt

SEQ ID NO: 15410 - DNA, 120 bp, Artificial Sequence
  ENSG00000012983_12 (sequence is synthesized)
tgatggtgcaaatactggcaaatcaacctcaaaacgtgcaataccacctcccctacctcctaagccaaggataagcagttaccctgaagacaactttccggatgaagaaaaagcatcaac

SEQ ID NO: 15411 - DNA, 120 bp, Artificial Sequence
  ENSG00000012983_13 (sequence is synthesized)
cataaaacattgtcctgattcagaaagcagagctccccaaattctcagaagacagagtagcccaagttgtgggcctgtggcagagacttcttctattggaaatggtgatggtatttcaaa

SEQ ID NO: 15412 - DNA, 120 bp, Artificial Sequence
  ENSG00000012983_14 (sequence is synthesized)
actgatgagtgaaaatacagaaggatcagcacaagcaccacagttaccacgaaaaaaggacaaacgagacttccctaaaccagccatcaatggccttccacccaccccaaaagttctgat

SEQ ID NO: 15413 - DNA, 120 bp, Artificial Sequence
  ENSG00000012983_15 (sequence is synthesized)
gggagcatgcttttcaaaagtttttgatggctgtcctttgaaaattaattgtgcaacatcctggatacatcctgatacaaaagatcagtacattatttttggaactgaagatggtattta

SEQ ID NO: 15414 - DNA, 120 bp, Artificial Sequence
  ENSG00000012983_16 (sequence is synthesized)
cacactgaatctcaatgagctacatgaggcaacgatggaacagttatttccacggaagtgtacttggctgtatgttatcaataatactttaatgtcattatcagtaggaaaaacctttca

SEQ ID NO: 15415 - DNA, 120 bp, Artificial Sequence
  ENSG00000012983_17 (sequence is synthesized)
gctctactctcacaatcttatagctttgtttgaacatgccaaaaaaccaggattagctgcccatattcaaactcacaggtttccagaccgaatactaccaagaaaattcgctttaacaac

SEQ ID NO: 15416 - DNA, 120 bp, Artificial Sequence
  ENSG00000012983_18 (sequence is synthesized)
tgcatagtcagaaacccttacacgggacataaatacctctgtggagctttacagtctggaattgttttacttcagtggtatgagccaatgcagaaattcatgttgataaagcactttgat

SEQ ID NO: 15417 - DNA, 120 bp, Artificial Sequence
  ENSG00000012983_19 (sequence is synthesized)
tttcctttgccaagtcctttgaatgtttttgaaatgctggtgatacctgaacaggaataccctatggtctgtgtagctattagcaaaggcactgaatcgaatcaggtagttcagtttgag

SEQ ID NO: 15418 - DNA, 120 bp, Artificial Sequence
  ENSG00000012983_20 (sequence is synthesized)
acaatcaatttgaactctgcatcttcatggtttacagaaattggtgcaggcagccagcagttagattccattcatgtaacacagttggagagagataccgttttagtgtgtttagacaaa

SEQ ID NO: 15419 - DNA, 120 bp, Artificial Sequence
  ENSG00000012983_21 (sequence is synthesized)
tttgtgaaaattgtaaatctacaaggaaaattaaaatcaagtaagaaactggcctctgagttaagttttgattttcgcattgaatctgtagtatgccttcaagacagtgtgttggctttc

SEQ ID NO: 15420 - DNA, 120 bp, Artificial Sequence
  ENSG00000012983_22 (sequence is synthesized)
tggaaacatgggatgcagggtaaaagcttcaagtcagatgaggttacccaggagatttcagatgaaacaagagttttccgcttattaggatcagacagggttgtcgttttggaaagtagg

SEQ ID NO: 15421 - DNA, 120 bp, Artificial Sequence
  ENSG00000012983_23 (sequence is synthesized)
ccaacagaaaatcctactgcacacagcaatctctacatcttggctggacatgaaaatagttactaagcaacagaaactgatctcaaatgacaggaaaatgaatatactccattgaaagga

SEQ ID NO: 15422 - DNA, 120 bp, Artificial Sequence
  ENSG00000012983_24 (sequence is synthesized)
aaaataaggaaattcaatacaaactgcactatgatttgctttaactattatgggttatattgcaaatgatctgtactttagggtagaattcaatattttctgcagctggaaacagctagt

SEQ ID NO: 15423 - DNA, 120 bp, Artificial Sequence
  ENSG00000012983_25 (sequence is synthesized)
ctatctcttgccactgtgtggtggttatatcaagtttgcttaataaaagctatgagacaaatagtcctctagttccaggaaacacagtctttttttaaaaaaaacaatgtttgtaacaag

SEQ ID NO: 15424 - DNA, 120 bp, Artificial Sequence
  ENSG00000012983_26 (sequence is synthesized)
ggtgccatggtatttttagataactcgtgattatcttaagagaggtaaatttagtgatcattttatatcatgtcttattccttcttaatgaacataatttgttaaattctcaagcaaggt

SEQ ID NO: 15425 - DNA, 120 bp, Artificial Sequence
  ENSG00000012983_27 (sequence is synthesized)
tttcacttttatattggccattctgtatgtttttgtaaaacagaatatttaatccttatttattaatctcttgctggagtggtgtaatgtatctaacttttagcaaaggagggttgcaga

SEQ ID NO: 15426 - DNA, 120 bp, Artificial Sequence
  ENSG00000012983_28 (sequence is synthesized)
gcagcttaaattttttttataatgtataagaattttgtttatcttttaagagtagtaaagtactttgagtgtttgggggttcaacacacacatgcaattttgcttaacaaaagtatttta

SEQ ID NO: 15427 - DNA, 120 bp, Artificial Sequence
  ENSG00000012983_29 (sequence is synthesized)
taatacagtttcatacagaattaccttaaaagggagtcttatgttttcaactacagatagttgtaagggatcatacagaagatattgatgatagttgaaatattcttagaaggggtgtgt

SEQ ID NO: 15428 - DNA, 120 bp, Artificial Sequence
  ENSG00000012983_30 (sequence is synthesized)
atgtctagctgtgtctaccatgtgtatgtattcttgacaagcagtataaaatacctgtgatttttctttacattagggataatgcataaggaattaatcttcatatatattatcatccct

SEQ ID NO: 15429 - DNA, 120 bp, Artificial Sequence
  ENSG00000012983_31 (sequence is synthesized)
aatgtagcagggggaagtatttaattgcccatgatatgtattttacttatactatgccagagaggaaactataaagtaattacacatgtaatcttgggtttttcacatatgtaggtattc

SEQ ID NO: 15430 - DNA, 120 bp, Artificial Sequence
  ENSG00000012983_32 (sequence is synthesized)
attttgagtaggttgaagaagaaaaaaaatatttaaatgaattgaattcctgatgggatagtatcaataagtatttaaaagccagtattctaaaaataataaagggtagggtcatttttg

SEQ ID NO: 15431 - DNA, 120 bp, Artificial Sequence
  ENSG00000012983_33 (sequence is synthesized)
agtttgtttttcttttgctattgttaatattcaaaattaaagtgttacattggtacctgttgtcttaatgcatttattgagaacagcattgagatgatgaacaaggggttagcaatagca

SEQ ID NO: 15432 - DNA, 120 bp, Artificial Sequence
  ENSG00000012983_34 (sequence is synthesized)
aactctataattattttgactaattacttaagaggaaaacagtataagtatctcattcagtatttagcaattctgtaaaataagtattatctctatttttcagatgaggaagtaagggtt

SEQ ID NO: 15433 - DNA, 120 bp, Artificial Sequence
  ENSG00000012983_35 (sequence is synthesized)
tagcaaggttaagagatctatccaatttacacagcaagttagtagttgagcctgaccatgagtcttctgactctgttcttttcactatgcaatacgcaaacaataaaatgttatacaaat

SEQ ID NO: 15434 - DNA, 120 bp, Artificial Sequence
  ENSG00000012983_36 (sequence is synthesized)
actcgcggtgtgaacatactgggtctcgcctctcctttcccctcccctcggcctggtgctgaatcatgagcccaatgtctccaaaagatcatctcaggccacctcagtgtatactcttcc

SEQ ID NO: 15435 - DNA, 120 bp, Artificial Sequence
  ENSG00000012983_37 (sequence is synthesized)
ttttggagttcatccttcatacagcttatttttgggactgtgccctctacctaagcagcgctaaattcaaatccttgttccgttcacctgttgagactgttactttctctgtgggctcca

SEQ ID NO: 15436 - DNA, 120 bp, Artificial Sequence
  ENSG00000012983_38 (sequence is synthesized)
ttttcttgtgtcctagtttggaaagtgcccccaggcagaaagtcagggtaaatatggctcttaccaccatgtattttccttcttttaagaatcacagacttacggtgtctgtggtgcatt

SEQ ID NO: 15437 - DNA, 120 bp, Artificial Sequence
  ENSG00000012983_39 (sequence is synthesized)
gcctccaaacagttgctttagtttgtacacacacaaacatgcagacatatatatgtttacatgtagatagctgtttatacagaagggtaagtccaatttctgttatttaaaaatggccag

SEQ ID NO: 15438 - DNA, 120 bp, Artificial Sequence
  ENSG00000012983_40 (sequence is synthesized)
ctgtaatcccagcaccttgggaggcttaggtgggcagatcacctggggtcaggaactcctgatgtcaggaaacctcatgagatggtgaaaccccatctctactgaaaatggaagaattag

SEQ ID NO: 15439 - DNA, 120 bp, Artificial Sequence
  ENSG00000012983_41 (sequence is synthesized)
gcactccagcctgggcgacagagtgtgagactccatctcaacaacaacaacaacaacaaaaaagtaatatattattttcacattttatgtaatgtgaaatgcagctctagacctgcttgc

SEQ ID NO: 15440 - DNA, 120 bp, Artificial Sequence
  ENSG00000012983_42 (sequence is synthesized)
ttgccagtgtttctggttgtcacaaaaacaaactttagctcatctctgtttcaaaagactaaagaggttctttatgaatagtagtagttcttgaattcagatgttttttaattacgttaa

SEQ ID NO: 15441 - DNA, 120 bp, Artificial Sequence
  ENSG00000012983_43 (sequence is synthesized)
gtcattaatgtcccaggactttttattttagattattttttaaagtagatactgtattttatggaatgtcttctaaacttttattgaaaaatttatgacatactgtttttgtttaatgtg

SEQ ID NO: 15442 - DNA, 120 bp, Artificial Sequence
  ENSG00000012983_44 (sequence is synthesized)
atgaattatgtcagtactttgtgtttgctttttacaaatcttgtttttaggaataaggacaactggatcctatttgaaagcgctttttaaaaatattttgtttcctaagattgtatttag

SEQ ID NO: 15443 - DNA, 120 bp, Artificial Sequence
  ENSG00000012983_45 (sequence is synthesized)
gaattttgcatctctatgatgcaagtatgagtgtttaaaaaaatttggggggcttttaatcacattagattttagaatttttaaattttaaatactttatgaggaagtaataaaccctcc

SEQ ID NO: 15444 - DNA, 120 bp, Artificial Sequence
  ENSG00000012983_46 (sequence is synthesized)
ttttctatgttttagaatattttatagaaaagaagttactctttgaatattttgaataactctgaagtcagtatgactaggccaaataaaatacatatttagcaaaatatatcagattcc

SEQ ID NO: 15445 - DNA, 120 bp, Artificial Sequence
  ENSG00000012983_47 (sequence is synthesized)
tgaatgccattgtgacatttaattgaacagaagtcatttgttctttttagataatttttaggtagtttttcttagttcatctctgccatgaagctgtagcttaaaccgtctcaaaacaga

SEQ ID NO: 15446 - DNA, 120 bp, Artificial Sequence
  ENSG00000012983_48 (sequence is synthesized)
gtctacagcatagagaaaattcttaaagtttttacttagtcatttatttttgatgaatttttaaaaatctcttttatacaaaaagaactgtttaatttcctgattccaaacaagaattaa

SEQ ID NO: 15447 - DNA, 120 bp, Artificial Sequence
  ENSG00000012983_49 (sequence is synthesized)
gtagagatgttaggaagatcccactttgttatttacttttggtaagcataacaaaggggtactcttgtagtcaaaaaataacatattttttgtcttctttcccctcttctttctccctcc

SEQ ID NO: 15448 - DNA, 120 bp, Artificial Sequence
  ENSG00000012983_50 (sequence is synthesized)
gagaaataataatatagctttatagaattttccatcttgtattaaaataatcacatgtacatcattgtaactcagtccataacataagattttgtacaacaatttctttttgtgtgctgg

SEQ ID NO: 15449 - DNA, 120 bp, Artificial Sequence
  ENSG00000012983_51 (sequence is synthesized)
catcattaaggtttagtctgcccagatcacctattagtacctaatttatatattctgaattaaaattatctgttaatttaaaaacattttatctattgtctttcaaaatagtattaactg

SEQ ID NO: 15450 - DNA, 120 bp, Artificial Sequence
  ENSG00000012983_52 (sequence is synthesized)
ctgaagaaaagccttggaggaagtagaccaaattttaaacaggagctgtttttgagtggtgggactattggtaattttttaaacacttttgtgtcttatctatatttttctttaatggga

SEQ ID NO: 15451 - DNA, 120 bp, Artificial Sequence
  ENSG00000012983_53 (sequence is synthesized)
aaatgagtttgctcagcattttattggaaatattttgttttttagttttgataaaagtatggttgataagcaattaacatagtaccaagtaattttaatgtaattaacaagcttttaatt

SEQ ID NO: 15452 - DNA, 120 bp, Artificial Sequence
  ENSG00000012983_54 (sequence is synthesized)
cactctctcccttgtatgtaagtgctactatatttgtatgtttttaaacactgcaaagttctaaattttttaaggttttcctatttctacggttttcccctattacatattaataatggt

SEQ ID NO: 15453 - DNA, 120 bp, Artificial Sequence
  ENSG00000012983_55 (sequence is synthesized)
gtatatgatgccttttaatatattggatagtcaatctctttatgattctctatttctctgtataattagttatatgtatttctttatttttgaaaaattgttcaggattgcattctatag

SEQ ID NO: 15454 - DNA, 120 bp, Artificial Sequence
  ENSG00000012983_56 (sequence is synthesized)
accttcctataatgcataccactatgctttgcacatgagtgcttaatattttcaaggaccacagttgttacggagttaaatcttttaaagtacatttgaaaaaattctcagtgttacctt

SEQ ID NO: 15455 - DNA, 120 bp, Artificial Sequence
  ENSG00000012983_57 (sequence is synthesized)
ttgtttttgattcttgttgacagaaataatatatgctcacaatcagaagagaaatcactcaactgtataaatagaaattgttttataatagttcgtctgtttttttgttttgttttgttt

SEQ ID NO: 15456 - DNA, 120 bp, Artificial Sequence
  ENSG00000013016_0 (sequence is synthesized)
gctgctgcggatgcagagctgtccgcgggctgggcagcgtcgccgtctcccctgagccgcctcggtccggcaggagcggagccgaagcatcccttgctgcacgcagggcagagcaggcga

SEQ ID NO: 15457 - DNA, 120 bp, Artificial Sequence
  ENSG00000013016_1 (sequence is synthesized)
gggctgggggccgatcggggaccccggcttgggaccccggcatctggcagtttccttgcaggttcaactttaattgccaagatttcacccctcctcctcaagcccagattatttatcctc

SEQ ID NO: 15458 - DNA, 120 bp, Artificial Sequence
  ENSG00000013016_2 (sequence is synthesized)
cctccggcctgggctgctggatgcagcagcggctgggcttggtcccaggagcagggagagtgcgctcccggccctcctagccgcgtgcccgggccatggtgcggctgagccccgcgcttg

SEQ ID NO: 15459 - DNA, 120 bp, Artificial Sequence
  ENSG00000013016_3 (sequence is synthesized)
ggtgaggcggcggcgcggctcggagcccggcggaccggtcctacgggacatcttcccctgaggaggagtcttcccctggggctgcgtgccgggggcgagcggcggccgcgatgttcagct

SEQ ID NO: 15460 - DNA, 120 bp, Artificial Sequence
  ENSG00000013016_4 (sequence is synthesized)
ggctgggtacggacgaccgccggaggaaggaccccgaggttttccagacggtgagtgaggggctcaagaaactctacaagagcaagctgctgcccttggaagagcattaccgcttccacg

SEQ ID NO: 15461 - DNA, 120 bp, Artificial Sequence
  ENSG00000013016_5 (sequence is synthesized)
agttccactcgcccgccctggaggatgccgacttcgacaacaagcccatggttctgctggtgggccagtactccactgggaagaccaccttcatcaggtacctgctggaacaggacttcc

SEQ ID NO: 15462 - DNA, 120 bp, Artificial Sequence
  ENSG00000013016_6 (sequence is synthesized)
caggcatgaggattgggcctgagcccaccacagactccttcattgcggtgatgcagggagacatggaggggatcatccctgggaacgccctggtggtggatcccaagaaacccttcagga

SEQ ID NO: 15463 - DNA, 120 bp, Artificial Sequence
  ENSG00000013016_7 (sequence is synthesized)
aactcaacgcctttggcaacgccttcttgaacaggttcgtgtgtgcccagctacctaaccctgtgctggagagcatcagcgtcatcgacacaccagggatcctctctggggagaagcaga

SEQ ID NO: 15464 - DNA, 120 bp, Artificial Sequence
  ENSG00000013016_8 (sequence is synthesized)
ggatcagccgggggtatgactttgcagctgtccttgagtggtttgccgagcgggttgaccgcatcattctgctcttcgatgcccacaaactggacatctctgatgagttctcagaagtca

SEQ ID NO: 15465 - DNA, 120 bp, Artificial Sequence
  ENSG00000013016_9 (sequence is synthesized)
tcaaagccctcaagaaccacgaggacaagatgcgagtggtgctgaacaaagctgaccagatcgagacgcagcagctgatgcgggtgtacggggccctcatgtggtccttggggaagatcg

SEQ ID NO: 15466 - DNA, 120 bp, Artificial Sequence
  ENSG00000013016_10 (sequence is synthesized)
tgaacaccccagaggtgatccgggtctacatcggctccttctggtcccaccccctcctcatccctgacaaccggaagctctttgaggctgaggaacaggacctattcagggacatccaga

SEQ ID NO: 15467 - DNA, 120 bp, Artificial Sequence
  ENSG00000013016_11 (sequence is synthesized)
gtctgccccgaaatgctgccctgcgcaagctcaacgacctcatcaaaagggccaggctggccaaggtccacgcctacatcatcagctctctgaagaaggagatgccctcggtgttcggga

SEQ ID NO: 15468 - DNA, 120 bp, Artificial Sequence
  ENSG00000013016_12 (sequence is synthesized)
aggacaacaagaagaaggagctggtcaacaacctggccgagatctatggccggatcgagcgggagcaccagatctcacctggggacttccccaatctgaagaggatgcaggaccagctgc

SEQ ID NO: 15469 - DNA, 120 bp, Artificial Sequence
  ENSG00000013016_13 (sequence is synthesized)
aggcccaggactttagcaagttccagccgctgaagagcaagctgctggaggtagtggacgacatgctggcccatgacattgcccagctcatggtgctagtgcgccaggaggagtcacagc

SEQ ID NO: 15470 - DNA, 120 bp, Artificial Sequence
  ENSG00000013016_14 (sequence is synthesized)
ggcccatccagatggtgaagggcggagcgttcgagggcaccctgcacggcccctttgggcatggctatggggagggggctggagaaggtatcgatgatgctgagtgggtggtggccaggg

SEQ ID NO: 15471 - DNA, 120 bp, Artificial Sequence
  ENSG00000013016_15 (sequence is synthesized)
acaagcccatgtacgacgagatcttctacaccctgtcaccggtggatggcaagatcacaggcgctaatgccaagaaggagatggtgcgctccaagctgcccaacagtgtgctgggcaaga

SEQ ID NO: 15472 - DNA, 120 bp, Artificial Sequence
  ENSG00000013016_16 (sequence is synthesized)
tctggaagctggccgacattgacaaggatggcatgctggacgacgacgagtttgcactggccaaccacctcatcaaagtcaagctggaggggcacgagctgcccaacgagctgcctgccc

SEQ ID NO: 15473 - DNA, 120 bp, Artificial Sequence
  ENSG00000013016_17 (sequence is synthesized)
acctcctgcccccgtccaagaggaaagttgccgagtgatggggtggggggacattcagacgggcagtgttagaggaggagatgggagcggtgactacacacacacacacacacacacaca

SEQ ID NO: 15474 - DNA, 120 bp, Artificial Sequence
  ENSG00000013016_18 (sequence is synthesized)
cacacacaaacatgcacacacacatatgcatatcttgacattgctctgtaggtgagagaggaccatgacgcccatgtttgcagctgatacttgtttgggcacacctccaagttctcggga

SEQ ID NO: 15475 - DNA, 120 bp, Artificial Sequence
  ENSG00000013016_19 (sequence is synthesized)
ttagaaggacaagagcactcccaggccccagagtctaagcctaagtctctatcgctcttcccctctcctcggccactccccagataccagacctgaggcaattcacttgccagcacagat

SEQ ID NO: 15476 - DNA, 120 bp, Artificial Sequence
  ENSG00000013016_20 (sequence is synthesized)
gtgcttccacacccgggctctgagcaaatggaaaagacttttcatttagtagacaattcacttctttttctgtgcttcccctatctgctttggcttcctaataagaaatccattcaagag

SEQ ID NO: 15477 - DNA, 120 bp, Artificial Sequence
  ENSG00000013016_21 (sequence is synthesized)
ctaggagatctgagggcaggcgggcagctgcagggaggagaggtgagaaaggaagcgtcttctagagacattggcccaggagctctgttctttcctaatctaagcctctgtcttcttcgg

SEQ ID NO: 15478 - DNA, 120 bp, Artificial Sequence
  ENSG00000013016_22 (sequence is synthesized)
caaaccttgctttgaactctgccagtatttcattttaaagaatcccagagcgggagagagaagagaaaaaaattgataagagtgaggaaattgtcctgtagtctattgaaaaccagtcaa

SEQ ID NO: 15479 - DNA, 120 bp, Artificial Sequence
  ENSG00000013016_23 (sequence is synthesized)
ggtggttttagttcatagattttgttagatgttctttccacctggcctatgatgtttagatgttcatacttgactcacatttacccagcccctcctgcgtaccaggagctgtgttaggca

SEQ ID NO: 15480 - DNA, 120 bp, Artificial Sequence
  ENSG00000013016_24 (sequence is synthesized)
ctttatatacattattctatgtggccctcactgatgccccagggaagtatgcattagccttcccattttgcagttgaggaggctgagtagcctcagaagggtttaggcgaccttctgaaa

SEQ ID NO: 15481 - DNA, 120 bp, Artificial Sequence
  ENSG00000013016_25 (sequence is synthesized)
ctcacagaagtcacgtgatggagagaggattcaaagccagggcctcagaccctcacacacttgtctgtgctatgatgtatgcaggatcccagcattgatacccaatgacaaactatggag

SEQ ID NO: 15482 - DNA, 120 bp, Artificial Sequence
  ENSG00000013016_26 (sequence is synthesized)
aacaagcaaagtatgcaggccccctgcagcctcccaggacaggctggcaagggaggagggccggccagcatttggtggcccatcagtctggccatctgtcacgtcacagaagcaaaccgt

SEQ ID NO: 15483 - DNA, 120 bp, Artificial Sequence
  ENSG00000013016_27 (sequence is synthesized)
gccttctggctctgcgccccatattcccagcatcatagacatccaacagcaccagcaggagagtgggctagcctgctggatgctgttcgtgcctgtccctgctctgcctcccacccagtt

SEQ ID NO: 15484 - DNA, 120 bp, Artificial Sequence
  ENSG00000013016_28 (sequence is synthesized)
gcctgaatcatcccagctcagatgcagccactgtctcttgtcaagtgggacctcatactattctcagaaggctaacttgagaggtttggggccttgttccccagagggtccccagggact

SEQ ID NO: 15485 - DNA, 120 bp, Artificial Sequence
  ENSG00000013016_29 (sequence is synthesized)
ctgcagtgtccttggcaaatccccactgtactcaatgccctacattctcttctgtggtctctcccctggcttgcttcatggccactgaaccaatcactttgtatgctatgctcctactgt

SEQ ID NO: 15486 - DNA, 120 bp, Artificial Sequence
  ENSG00000013016_30 (sequence is synthesized)
gatggaaaacaaaatgagtataacttattttatatccatattcagactatatagagaatattctatgcatctatgacgtgcttactactgcagtgcatttgtcattagtcttcatgttaa

SEQ ID NO: 15487 - DNA, 120 bp, Artificial Sequence
  ENSG00000013016_31 (sequence is synthesized)
tacagtacatttattctttggtacctgcctggccacagagcatcattcaatggaggctgagggagaagggctgggttcttacttggagttcctggtgaaatctttggctggaaagggctc

SEQ ID NO: 15488 - DNA, 120 bp, Artificial Sequence
  ENSG00000013016_32 (sequence is synthesized)
actggggccacccaatggccagcatccacaaccagcttcccagtgggctggagtttgtctaggctcagtgaccaacccaggcacagctggtggagccaccgctccctgctcctctggagt

SEQ ID NO: 15489 - DNA, 120 bp, Artificial Sequence
  ENSG00000013016_33 (sequence is synthesized)
gaagatgttccctaagcccctgggcttccttctgcaaatacacatttctctttcacatgaaatgaagggcagacaaaggccaggcaaagaggtctcacctgctctggagaaaacccttga

SEQ ID NO: 15490 - DNA, 120 bp, Artificial Sequence
  ENSG00000013016_34 (sequence is synthesized)
gtgccgagtgcaggttagggaccatttctcaactccacacctttcttcaagctgaaggagaaatgggaaggaaatagcagaggtaggtgaagttcctgtctttttattttataggaaagg

SEQ ID NO: 15491 - DNA, 120 bp, Artificial Sequence
  ENSG00000013016_35 (sequence is synthesized)
gagatgtctgttatcccctttcttcactgccactggacacacatgccactttcctgcccttctacatatgctgcctctcttccctctctccatcttgaagtctccacccaggagagacct

SEQ ID NO: 15492 - DNA, 120 bp, Artificial Sequence
  ENSG00000013016_36 (sequence is synthesized)
gtgaggtgtgggaattccatgtttgcacagctcccatctccctggaaagaggaactgatgtttgaggggacagatgtgggtcactttccctggcagtgccctctagccttgctgccttgg

SEQ ID NO: 15493 - DNA, 120 bp, Artificial Sequence
  ENSG00000013016_37 (sequence is synthesized)
ctttctgaccccttccaggcttcaggggcctgggagatctcatgcctcagcccaggaaacatttaatagggaaagcagagacatgtcatgtcagccccacagacaagaatttctagagca

SEQ ID NO: 15494 - DNA, 120 bp, Artificial Sequence
  ENSG00000013016_38 (sequence is synthesized)
cttgtcctgttgttccttgccccgacattactcagtctgggccatggaatccatccaataaacacagcaacaccctatgctactgaccaagcaaagcttgcccctggtaccaaagagcta

SEQ ID NO: 15495 - DNA, 120 bp, Artificial Sequence
  ENSG00000013016_39 (sequence is synthesized)
aatcatgaccaaagtgtgacatgaatgtaactgaaatgcgggttagttgctcaatgtatgcaaagtcccacggacaagagtaaagtctgataccaataaagtgaatgtattccaaagcta

SEQ ID NO: 15496 - DNA, 120 bp, Artificial Sequence
  ENSG00000013275_0 (sequence is synthesized)
agatcatcccaggccacacagaggccggcttggtcactatggaggagataggcatcttggtggagaaggctcaggatgagatcccagcactgtccgtgtcccggccccagaccggcctgt

SEQ ID NO: 15497 - DNA, 120 bp, Artificial Sequence
  ENSG00000013275_1 (sequence is synthesized)
ccttcctgggccctgagcctgaggacctggaggacctgtacagccgctacaagaagctgcagcaagagctggagttcctggaggtgcaggaggaatacatcaaagatgagcaaaagaacc

SEQ ID NO: 15498 - DNA, 120 bp, Artificial Sequence
  ENSG00000013275_2 (sequence is synthesized)
tgaaaaaggaatttctccatgcccaggaggaggtgaagcgaatccaaagcatcccgctggtcatcggacaatttctggaggctgtggatcagaatacagccatcgtgggctctaccacag

SEQ ID NO: 15499 - DNA, 120 bp, Artificial Sequence
  ENSG00000013275_3 (sequence is synthesized)
gctccaactattatgtgcgcatcctgagcaccatcgatcgggagctgctcaagcccaacgcctcagtggccctccacaagcacagcaatgcactggtggacgtgctgccccccgaagccg

SEQ ID NO: 15500 - DNA, 120 bp, Artificial Sequence
  ENSG00000013275_4 (sequence is synthesized)
acagcagcatcatgatgctcacctcagaccagaagccagatgtgatgtacgcggacatcggaggcatggacatccagaagcaggaggtgcgggaggccgtggagctcccgctcacgcatt

SEQ ID NO: 15501 - DNA, 120 bp, Artificial Sequence
  ENSG00000013275_5 (sequence is synthesized)
tcgagctctacaagcagatcggcatcgatcccccccgaggcgtcctcatgtatggcccacctggctgtgggaagaccatgttggcaaaggcggtggcacatcacacaacagctgcattca

SEQ ID NO: 15502 - DNA, 120 bp, Artificial Sequence
  ENSG00000013275_6 (sequence is synthesized)
tccgggtcgtgggctcggagtttgtacagaagtatctgggtgagggcccccgcatggtccgggatgtgttccgcctggccaaggagaatgcacctgccatcatcttcatagacgagattg

SEQ ID NO: 15503 - DNA, 120 bp, Artificial Sequence
  ENSG00000013275_7 (sequence is synthesized)
ctgaatcagatggatggatttgatcagaatgtcaatgtcaaggtaatcatggccacaaacagagcagacaccctggatccggccctgctacggccaggacggctggaccgtaaaattgaa

SEQ ID NO: 15504 - DNA, 120 bp, Artificial Sequence
  ENSG00000013275_8 (sequence is synthesized)
tttccacttcctgaccgccgccagaagagattgattttctccactatcactagcaagatgaacctctctgaggaggttgacttggaagactatgtggcccggccagataagatttcagga

SEQ ID NO: 15505 - DNA, 120 bp, Artificial Sequence
  ENSG00000013275_9 (sequence is synthesized)
gctgatattaactccatctgtcaggagagtggaatgttggctgtccgtgaaaaccgctacattgtcctggccaaggacttcgagaaagcatacaagactgtcatcaagaaggacgagcag

SEQ ID NO: 15506 - DNA, 120 bp, Artificial Sequence
  ENSG00000013275_10 (sequence is synthesized)
gagcatgagttttacaagtgacccttcccttccctccaccacaccactcaggggctggggcttctctcgcacccccagcacctctgtcccaaaacctcattcccttttttctttacccag

SEQ ID NO: 15507 - DNA, 120 bp, Artificial Sequence
  ENSG00000013275_11 (sequence is synthesized)
gattggtttcttcaataaatagataagatcgaatccatttaatttcttcttagaagtttaactcctttggagaatgtgggccttgaataggatcctctgggtccctcttaatctgacaga

SEQ ID NO: 15508 - DNA, 120 bp, Artificial Sequence
  ENSG00000013275_12 (sequence is synthesized)
tgagcagacgaggtgcatggcctgggttgcagcttgagagaaccaaaatattcaaaccagatgacttccaaaatgtggggaaagggatggaaaatgaacctgagatggagtccttaatca

SEQ ID NO: 15509 - DNA, 120 bp, Artificial Sequence
  ENSG00000013275_13 (sequence is synthesized)
cgggataaagccctgtgcatctccctcatttcctacaggtaaaagacagtaaagaaattcaggtcacaggccttgggagttcataggaaggagatgtccagtgctgtccagtagaacttt

SEQ ID NO: 15510 - DNA, 120 bp, Artificial Sequence
  ENSG00000013275_14 (sequence is synthesized)
gttgggaacggggattagatcttcagctcaacttctgccagcaccacagcccagactgtgcaggtgggaccaaggtccagggaggaggggaggtgacagagatggccaaagatgacttcc

SEQ ID NO: 15511 - DNA, 120 bp, Artificial Sequence
  ENSG00000013275_15 (sequence is synthesized)
tcagaatgtcaatgtcaaggtttggggtttgggatggacaaggggaggtgtggtgtaggaactggggaaagttgggggctggcacctaaggggtggttatcgtgacaggaaggaggtagg

SEQ ID NO: 15512 - DNA, 120 bp, Artificial Sequence
  ENSG00000013275_16 (sequence is synthesized)
aaaaaaaaaaaaagtgacacatttgtaaggatgattcatgatttaggccactgggtcactgtggggtacaagtagatggctattcctcagggctggatgtggggctcacccttgggcatg

SEQ ID NO: 15513 - DNA, 120 bp, Artificial Sequence
  ENSG00000013288_0 (sequence is synthesized)
accttcccggcctgccgcagggatggggcagctgtgctggctgccgctgctggcaccgctcctgttgctgcgaccgccaggggtccagtccgccggccccatccgggccttcgtggtgcc

SEQ ID NO: 15514 - DNA, 120 bp, Artificial Sequence
  ENSG00000013288_1 (sequence is synthesized)
ccacagccacatggacgtgggctgggtctacactgtgcaggaaagcatgcgggcgtacgccgccaatgtctacacctcagtggtggaagagctggcccgcggccagcagcgccggttcat

SEQ ID NO: 15515 - DNA, 120 bp, Artificial Sequence
  ENSG00000013288_2 (sequence is synthesized)
cgctgtggagcaggagtttttccggctgtggtgggatggcgtcgcctcggaccagcagaaataccaggtccgccagctcctggaggaaggacgcctggaatttgtcatcggaggccaggt

SEQ ID NO: 15516 - DNA, 120 bp, Artificial Sequence
  ENSG00000013288_3 (sequence is synthesized)
catgcatgacgaggctgtgacgcaccttgatgaccagatcctgcagctcacagaaggacacgggtttctctatgaaacatttgggatccggccacagttctcctggcacgttgacccgtt

SEQ ID NO: 15517 - DNA, 120 bp, Artificial Sequence
  ENSG00000013288_4 (sequence is synthesized)
tggcgcctctgccacgacgcccaccctatttgcgctggcgggcttcaatgcccacctcggctcccggatcgactacgacctgaaggcagccatgcaggaggcccgggggctgcagttcgt

SEQ ID NO: 15518 - DNA, 120 bp, Artificial Sequence
  ENSG00000013288_5 (sequence is synthesized)
gtggcgagggtccccatccctctcagagcggcaggaaatcttcacgcacatcatggaccagtacagctactgcaccccgtcccacatccctttctccaacaggtcaggattttactggaa

SEQ ID NO: 15519 - DNA, 120 bp, Artificial Sequence
  ENSG00000013288_6 (sequence is synthesized)
tggcgtggctgtcttccccaagcctccccaagatggggtgtaccccaacatgagtgagcctgtcaccccagccaacatcaacctctatgccgaggccctggtggccaacgtgaagcagag

SEQ ID NO: 15520 - DNA, 120 bp, Artificial Sequence
  ENSG00000013288_7 (sequence is synthesized)
ggccgcctggttccggacaccgcacgtcctctggccctggggatgtgacaagcagttcttcaatgcctcggtgcagtttgccaacatggacccgctgctggaccacatcaacagccatgc

SEQ ID NO: 15521 - DNA, 120 bp, Artificial Sequence
  ENSG00000013288_8 (sequence is synthesized)
tgccgagctcggtgtctcggtgcagtatgccacgctgggcgactacttccgtgccctgcacgctctcaatgtcacctggcgtgtccgcgaccaccacgacttcctgccctattccacaga

SEQ ID NO: 15522 - DNA, 120 bp, Artificial Sequence
  ENSG00000013288_9 (sequence is synthesized)
accattccaggcctggacgggcttctacacgtcccgcagctcactgaaggggctggcccggcgagccagcgccttgttgtatgccggggagtccatgttcacacgctacctgtggccggc

SEQ ID NO: 15523 - DNA, 120 bp, Artificial Sequence
  ENSG00000013288_10 (sequence is synthesized)
cccccgtgggcatctggaccccacctgggccctgcagcagctccagcagcttcgctgggccgtctccgaggtccagcaccatgatgccatcactgggactgagtcccccaaggtgagaga

SEQ ID NO: 15524 - DNA, 120 bp, Artificial Sequence
  ENSG00000013288_11 (sequence is synthesized)
catgtacgcaacgcacctggcctcggggatgctgggcatgcgcaagctgatggcctccatcgtcctagatgagctccagccccaggcacccatggcggccagctccgatgcaggacctgc

SEQ ID NO: 15525 - DNA, 120 bp, Artificial Sequence
  ENSG00000013288_12 (sequence is synthesized)
aggacattttgcctcggtctacaacccgctggcctggacggtcaccaccatcgtcaccctgactgttggtttccctggagtccgcgtcacagatgaggcgggccacccagtgccctcgca

SEQ ID NO: 15526 - DNA, 120 bp, Artificial Sequence
  ENSG00000013288_13 (sequence is synthesized)
gatccagaactcaacagagaccccatctgcgtatgacctgcttattctgaccacaatcccaggcctcagttaccggcactacaacatcagacccactgcaggggcccaagagggcaccca

SEQ ID NO: 15527 - DNA, 120 bp, Artificial Sequence
  ENSG00000013288_14 (sequence is synthesized)
ggagccggctgccactgtggcgagcacccttcaatttggccgcaggctgaggagacgcaccagccatgcgggcaggtacttggtgcctgtggcaaacgactgctacattgtgctgctcga

SEQ ID NO: 15528 - DNA, 120 bp, Artificial Sequence
  ENSG00000013288_15 (sequence is synthesized)
ccaggataccaacctgatgcacagcatctgggagagacagagtaaccgaacggtgcgcgtgacccaggaattcctggagtaccacgtcaacggggatgtgaaacagggccccatttccga

SEQ ID NO: 15529 - DNA, 120 bp, Artificial Sequence
  ENSG00000013288_16 (sequence is synthesized)
taactacctgttcacaccgggcaaggccgcggtgcctgcgtgggaagctgtggaaatggagattgtggcgggacagcttgtgactgagatccggcagtacttctacaggaacatgacagc

SEQ ID NO: 15530 - DNA, 120 bp, Artificial Sequence
  ENSG00000013288_17 (sequence is synthesized)
acagaattacacgtatgcaatccgctcccggctcacccatgtgccgcagggccatgacggggagctgctctgccaccggatagagcaggagtaccaagccggccccctggagctgaaccg

SEQ ID NO: 15531 - DNA, 120 bp, Artificial Sequence
  ENSG00000013288_18 (sequence is synthesized)
tgaggctgtcctgaggaccagcaccaacctaaacagccagcaggtcatctactcagacaacaacggctaccagatgcagcggaggccctacgtttcctatgtgaacaacagcatcgcccg

SEQ ID NO: 15532 - DNA, 120 bp, Artificial Sequence
  ENSG00000013288_19 (sequence is synthesized)
gaattactaccccatggttcagtcggccttcatggaggatggcaaaagcaggcttgtgttgctgtcggagcgggcacatggcatctccagccaagggaatgggcaggtggaggtcatgct

SEQ ID NO: 15533 - DNA, 120 bp, Artificial Sequence
  ENSG00000013288_20 (sequence is synthesized)
ccaccggcggctgtggaacaacttcgactgggacctgggctacaacctcacgctgaacgacacctcagtcgtccacccagtgctctggcttctgctgggatcctggtccctcaccactgc

SEQ ID NO: 15534 - DNA, 120 bp, Artificial Sequence
  ENSG00000013288_21 (sequence is synthesized)
cccagcagcaagaggccgtgacgctgcccccgaatcttcacctgcagatcctgagcatccctggctggcgctacagctccaaccacacggagcactctcagaatctccggaaaggccatc

SEQ ID NO: 15535 - DNA, 120 bp, Artificial Sequence
  ENSG00000013288_22 (sequence is synthesized)
gaggggaagcccaggctgacctccgccgtgtcctgctgcggctctaccacctatatgaagtgggcgaggacccagtcctgtctcagccagtgacagtgaatctggaggctgtgctgcagg

SEQ ID NO: 15536 - DNA, 120 bp, Artificial Sequence
  ENSG00000013288_23 (sequence is synthesized)
cgctggggtccgtggtggcagtggaggagcgctcgctcacagggacctgggatttgagcatgctgcaccgctggagctggaggacggggcctggccgccacagaggtgacaccacctctc

SEQ ID NO: 15537 - DNA, 120 bp, Artificial Sequence
  ENSG00000013288_24 (sequence is synthesized)
cctcgaggccaccaggaggccccatcatcaccgtccacccaaaggaaatccggacgttctttattcactttcaacagcagtgagccctgggcagatgccccggccccagggcttccccca

SEQ ID NO: 15538 - DNA, 120 bp, Artificial Sequence
  ENSG00000013288_25 (sequence is synthesized)
ggaactccatgtaacagaacagacccaggacagggaaaagcagtgcggagggatgggactggggagtcagctgctcatctgcaggctaatggcaggaaatggtcatatttggggtttttc

SEQ ID NO: 15539 - DNA, 120 bp, Artificial Sequence
  ENSG00000013288_26 (sequence is synthesized)
cctaatttttttaaacaaaaattacattacaagatccaggttcttcccccccacactcaatcaagccagccctctcctcttctgtcacgtaaaggatatttggcacactcatgcgtcatt

SEQ ID NO: 15540 - DNA, 120 bp, Artificial Sequence
  ENSG00000013288_27 (sequence is synthesized)
cattcacaaaacacaaacccaggactttctgcctaaggcagagcacaagactcacagcagcaccgaagcgcatctgccgtccgggccctgccaggcttgccaggctgccagtggtaactg

SEQ ID NO: 15541 - DNA, 120 bp, Artificial Sequence
  ENSG00000013288_28 (sequence is synthesized)
tggacctactgcgtgccacgtgttttcatagactcatcccatgctggcaacagccctgcaaggggcttggctctgccacagggcaggagaggaagttgtagcgcctagcgagagttccag

SEQ ID NO: 15542 - DNA, 120 bp, Artificial Sequence
  ENSG00000013288_29 (sequence is synthesized)
ccccagacgcccacctgtgcctcagggcaccgcctgccgagcagagaaggcacagcagccgtcagagtccatgagaggtgaaaccacacagcagggatgtccaatatcagaactattaat

SEQ ID NO: 15543 - DNA, 120 bp, Artificial Sequence
  ENSG00000013288_30 (sequence is synthesized)
atcaataaaagtataaccttcccaggtctatgcccaagagaattgaaaacatccatccacacaatacctgtgctcccgcgttcatagcagcattactcaaaagtcaaacggtagcaacaa

SEQ ID NO: 15544 - DNA, 120 bp, Artificial Sequence
  ENSG00000013288_31 (sequence is synthesized)
cccaaatgtccatccacagatgaattaagacatgaagtgtgttctgtccatacaatggaatattatttggccataaaaaggaaggaaattctgacgcatgccacagcctgagtgaatcct

SEQ ID NO: 15545 - DNA, 120 bp, Artificial Sequence
  ENSG00000013288_32 (sequence is synthesized)
acaaatattacgctaagtgaaagaagccaatcacgagtttatgtgaaatgtccagaataggcaaatctgtgtatcagagacaaagcacattggtggttgccaggtactggaggaagagag

SEQ ID NO: 15546 - DNA, 120 bp, Artificial Sequence
  ENSG00000013288_33 (sequence is synthesized)
aagaggcatgacagctaacagggacgggctttctttggaagatgatgaaattgtggaatgatggttgcacaactttgtgaatatactagaaaccaatgaattaaaaactttggaagatga

SEQ ID NO: 15547 - DNA, 120 bp, Artificial Sequence
  ENSG00000013288_34 (sequence is synthesized)
atatactagaaaccaatgaattaaaaactttggaagatgaattttatggtctgtgaattatatctcaattttaaaacttttttttttttttcccgagacagagtctcactctgtcgccca

SEQ ID NO: 15548 - DNA, 88 bp, Artificial Sequence
  ENSG00000013288_35 (sequence is synthesized)
atctcagctcactgcgacctgtgcctcccgagtagctgctactagagatgcaccactgcgtcagctaatttttgtatttttagtagag

SEQ ID NO: 15549 - DNA, 83 bp, Artificial Sequence
  ENSG00000013288_36 (sequence is synthesized)
gcccatgtgcccggcctaaaccgttttaaagagtaaactgtaagatgtaggaaattatttggtactctagggctgaaggaaag

SEQ ID NO: 15550 - DNA, 120 bp, Artificial Sequence
  ENSG00000013288_37 (sequence is synthesized)
gatgtaggaaattatttggtactctagggctgaaggaaagtacccagaaaggaccagcttggaaggagtcagacctctggacaacgtgcagtttggccaccagacagcaaagacagtctc

SEQ ID NO: 15551 - DNA, 120 bp, Artificial Sequence
  ENSG00000013288_38 (sequence is synthesized)
tggtttggccaggcaggagctgggctggagttgctgaccaagcaataggccacccctgtgaggtggggtcaggtgagcagccaccagaggcatggatgtgcagtgggaggttgaggcaca

SEQ ID NO: 15552 - DNA, 120 bp, Artificial Sequence
  ENSG00000013288_39 (sequence is synthesized)
aggagtgaggcaggagccctttagagcatgtgggctgcatgaggcttggtttctgtgtcaagaagactatggaggctgggcagtggttcatgccttaatcccagcactttgggaggccaa

SEQ ID NO: 15553 - DNA, 64 bp, Artificial Sequence
  ENSG00000013288_40 (sequence is synthesized)
cagtggttcatgccttaatcccagcactttgggaggccaaagcaaccggatcactggtggtcag

SEQ ID NO: 15554 - DNA, 63 bp, Artificial Sequence
  ENSG00000013288_41 (sequence is synthesized)
actcgggaggctgaggcaggagaatcaatcacttgaacctgggaggcggaggagacctccgcc

SEQ ID NO: 15555 - DNA, 120 bp, Artificial Sequence
  ENSG00000013288_42 (sequence is synthesized)
gaatccagagaagccccagtaccttttcgccatgatgtcttactgggccacccacctcctctttcatgatcctcgccacggaggatcctttcctcacggtccctggcctgcctgagagca

SEQ ID NO: 15556 - DNA, 120 bp, Artificial Sequence
  ENSG00000013288_43 (sequence is synthesized)
tggctgcgtttgcgtgtgctgtgtcacgttggttgggagctaagttcagagctgggagagagacccacagaccctggggcccacagagcacctgttcttccatgatcagagcagacgaac

SEQ ID NO: 15557 - DNA, 120 bp, Artificial Sequence
  ENSG00000013288_44 (sequence is synthesized)
ccttggcaaagagatccacgagggcttcctcccaaatggacgctggtatgggccccaccccgcccttcttcatggtcttctgggtttgtcaggtattacaactggcctggttttttaggg

SEQ ID NO: 15558 - DNA, 83 bp, Artificial Sequence
  ENSG00000013288_45 (sequence is synthesized)
tgggtttgtcaggtattacaactggcctggttttttagggttttttgtgtatatgtgagacaggatctcactctgttgcccag

SEQ ID NO: 15559 - DNA, 89 bp, Artificial Sequence
  ENSG00000013288_46 (sequence is synthesized)
tgatcctcccacctcaacctcccaagtaactgggatcacaggggcgcgccaccacgatggctaagttttcgtcccccaggctggagtgc

SEQ ID NO: 15560 - DNA, 120 bp, Artificial Sequence
  ENSG00000013288_47 (sequence is synthesized)
gcctagtttttttatttttagtagagacacggtcttgctgtgttgctcaggctggtctcgaacgtctggcctcaagcaatctgcctgtcttagcctcctgaagtgctgggattacaggcg

SEQ ID NO: 15561 - DNA, 120 bp, Artificial Sequence
  ENSG00000013288_48 (sequence is synthesized)
tctttcttatttattctgtggtaaaacttttaaaacacagacaacatctgtgtaatccaaaaacaaaacagattccccatagagttgctttgaaaggtgacttagagtcagacaatccag

SEQ ID NO: 15562 - DNA, 120 bp, Artificial Sequence
  ENSG00000013288_49 (sequence is synthesized)
ggtccacacccaggcccctctacgggggcatctccggcaccccatgcctctgggcctcagtttccccccatgtaaaatggggagaggtgagagttctttgcccagaaggttgctgagagg

SEQ ID NO: 15563 - DNA, 120 bp, Artificial Sequence
  ENSG00000013288_50 (sequence is synthesized)
aggcctcgtccccttccaggttcccctcttggctgatgttgccctctcagctctactatcaggcgaggcttccgccacctggcctgcccacgctccctccccagaaggcatgacctgagc

SEQ ID NO: 15564 - DNA, 120 bp, Artificial Sequence
  ENSG00000013288_51 (sequence is synthesized)
aggccatggcgggtaccagtgcccagcacagggccagcctgccctgggaagcaaggaggccagcgtgggacctggaagttggtcatctgatgctcccccgtttcacagatggaagcacca

SEQ ID NO: 15565 - DNA, 120 bp, Artificial Sequence
  ENSG00000013288_52 (sequence is synthesized)
aggccctgagacaaggagacggttgggatggacaccatgactccctgcccaacgtggacggtggtggggtggaaagaccattgagttaggaacgcagtgagtttggctgcaagtcacaaa

SEQ ID NO: 15566 - DNA, 120 bp, Artificial Sequence
  ENSG00000013288_53 (sequence is synthesized)
acacctaacagatgtgcttagaacagaggacagagtgttttctcaccgaacaggcatgtccgatggaccccaagcgctgtcaccgtgggcccgatcactgtcatcttcccgccatcgccg

SEQ ID NO: 15567 - DNA, 120 bp, Artificial Sequence
  ENSG00000013288_54 (sequence is synthesized)
gcagactggcttttgtcttttgccgtctgcttgtttgcggtcacaagatggcacaggcctccctcatgagcaaatttcaaggcagggtagggctcagcagtagtggccagaaaggccttg

SEQ ID NO: 15568 - DNA, 120 bp, Artificial Sequence
  ENSG00000013288_55 (sequence is synthesized)
ccctagcgtggctctctccctccgtcagcacacagaagcttctccaagagccacccccagccctcctgctccacagacttttccagacccctaagggcctcctgcctcccctaggtgtaa

SEQ ID NO: 15569 - DNA, 120 bp, Artificial Sequence
  ENSG00000013288_56 (sequence is synthesized)
gggaggctgggacaaggcctattgggaaagggggatggggtaactgtggctggcttcctccctggactgggcacggggccacctgagcaatgtggggagaggagaactccgcggtggggt

SEQ ID NO: 15570 - DNA, 120 bp, Artificial Sequence
  ENSG00000013288_57 (sequence is synthesized)
gggcagctcaaaatgccacacctcccgggctgctcctccagctcggccacctggtaaagcatgcacctcccgcttcagtgtcctcatctgtaaagtacacggccagtcctgtcctcgcag

SEQ ID NO: 15571 - DNA, 120 bp, Artificial Sequence
  ENSG00000013288_58 (sequence is synthesized)
atgtgctgtgagaagcagatgagggagctgtgtcaggcaccaggggaggacctgggctcctgaggacaccgagttcgtggtgtgtctgccctgctgctgtcttggttctctgctcagctc

SEQ ID NO: 15572 - DNA, 120 bp, Artificial Sequence
  ENSG00000013288_59 (sequence is synthesized)
caaccatctgcctgtcccggcctgtgcgaccttgcgaggctgctttcctactctgaacccgcagccctcccaaatctactacagtcggttaagaaaggctttgggttagtctctgcctgc

SEQ ID NO: 15573 - DNA, 120 bp, Artificial Sequence
  ENSG00000013288_60 (sequence is synthesized)
cagggctccacacaggcgtgtgtgtgcacttgtacgtgtgcacacgcagaccacacgccctgcctgtgccctgggtgacagctaggggcccaggggcttctgcccaccttggccctgctg

SEQ ID NO: 15574 - DNA, 120 bp, Artificial Sequence
  ENSG00000013288_61 (sequence is synthesized)
acctcagcccatcagccggtccctgcctcatacgacatgtgccaccgtgagctcctgcactacaggcagcttccaggctccactccctgtccgcaccatgccctctgcctgggacgcaca

SEQ ID NO: 15575 - DNA, 120 bp, Artificial Sequence
  ENSG00000013288_62 (sequence is synthesized)
ggtcccattcactctggccagcacctgctcaagctccccaggatgcctccccagagtcaccaaccaggccaagtgcctcctccactctcctggccccaggggtttcttctgtcctgtgca

SEQ ID NO: 15576 - DNA, 120 bp, Artificial Sequence
  ENSG00000013288_63 (sequence is synthesized)
gctcgttgtccactacacacagcatggtggcgggtgcatggtgcacgctcagttggtggtgggaggaaggaagggacggagggagggagggagggaagatgatgttggttggaaagaagg

SEQ ID NO: 15577 - DNA, 120 bp, Artificial Sequence
  ENSG00000013288_64 (sequence is synthesized)
aaggaagatggatgagtgatagataagtggacggctccctcccaagatcgaagcccaaccccagggcatgccttcaggggagcctggtgaggcaagggcagactcaccagatggtctcag

SEQ ID NO: 15578 - DNA, 120 bp, Artificial Sequence
  ENSG00000013288_65 (sequence is synthesized)
aaagctcttgggctttgagggcaacacccatgaggaattgaggccactagggccaggaccaacctatgaattgccctcagggtgggcagaaacgccaagaggcccacaggagtcctggca

SEQ ID NO: 15579 - DNA, 120 bp, Artificial Sequence
  ENSG00000013288_66 (sequence is synthesized)
gaaggggatgccataggccgttgccacggtgggagccacagcagactgtagccaggtgcagtgtggtgagaaggaggctgggagccacagcagattgtagacaggtgcaggagggtgaga

SEQ ID NO: 15580 - DNA, 120 bp, Artificial Sequence
  ENSG00000013288_67 (sequence is synthesized)
gggaggctgggagccacagcagactgtagacaggtgcagggggtgagagggaggctgggaggaggcatcccaggccacactggacagatcacctctgttcccctaggtgacaccacctct

SEQ ID NO: 15581 - DNA, 120 bp, Artificial Sequence
  ENSG00000013293_0 (sequence is synthesized)
aatctgaataattgaggagctgttcagcagcagcggctgcctcctgccttcctttgccgccaccaccacttcccatcccagctagagagacagctccgcgcagtaagtgcggactgccag

SEQ ID NO: 15582 - DNA, 120 bp, Artificial Sequence
  ENSG00000013293_1 (sequence is synthesized)
ccaccagccttggcagccagctcgtcgcctccagccccgaccccgacattcatgcccaggagaaggctgcactgggtccctctgggcctttcctaaaagggagatccctgttcactagat

SEQ ID NO: 15583 - DNA, 120 bp, Artificial Sequence
  ENSG00000013293_2 (sequence is synthesized)
gagttccagaaccatccactaaggctttgtagcccccttccatcagctgaccttcactgcatcccctatcgctcaagatgagtggcttcttcacctcgctggacccccggcgggtgcagt

SEQ ID NO: 15584 - DNA, 120 bp, Artificial Sequence
  ENSG00000013293_3 (sequence is synthesized)
ggggagctgcctggtatgcaatgcactccaggatcctacgcaccaaaccagtggagtccatgctagagggaactgggaccaccacggcacatggaactaagctagcccaggtactcacca

SEQ ID NO: 15585 - DNA, 120 bp, Artificial Sequence
  ENSG00000013293_4 (sequence is synthesized)
cagtggacctcatctctcttggcgttggcagctgtgtgggcactggcatgtatgtggtctctggcctggtggccaaggaaatggcaggacctggtgtcattgtgtccttcatcattgcag

SEQ ID NO: 15586 - DNA, 120 bp, Artificial Sequence
  ENSG00000013293_5 (sequence is synthesized)
ccgtcgcatccatattatcaggcgtctgctatgcagagtttggagttcgagtccccaagaccacaggatctgcctacacctacagctatgtcactgttggggaatttgtggcatttttca

SEQ ID NO: 15587 - DNA, 120 bp, Artificial Sequence
  ENSG00000013293_6 (sequence is synthesized)
ttggctggaacctgatcctggagtacctgattggcactgcggccggagccagtgctctgagcagcatgtttgactcactagccaaccacaccatcagccgctggatggcggacagcgtgg

SEQ ID NO: 15588 - DNA, 120 bp, Artificial Sequence
  ENSG00000013293_7 (sequence is synthesized)
gaaccctcaatggcctggggaaaggtgaagaatcatacccagaccttctggctctgttgatcgcggtcatcgtgaccatcattgttgctctgggggtgaagaattccataggcttcaaca

SEQ ID NO: 15589 - DNA, 120 bp, Artificial Sequence
  ENSG00000013293_8 (sequence is synthesized)
atgttctcaatgtgctgaacctggcagtatgggtgttcatcatgatcgcaggcctcttcttcatcaatgggaaatactgggcggagggccagttcttgccccacggctggtcaggggtgc

SEQ ID NO: 15590 - DNA, 120 bp, Artificial Sequence
  ENSG00000013293_9 (sequence is synthesized)
tgcaaggagcagcaacatgcttctacgctttcattggctttgacatcatcgccaccactggagaggaagccaagaatcccaacacgtccatcccttatgctatcactgcctccctggtca

SEQ ID NO: 15591 - DNA, 120 bp, Artificial Sequence
  ENSG00000013293_10 (sequence is synthesized)
tctgcctgacagcatatgtgtctgtgagcgtgatcttaactctgatggtgccatattataccattgacacggaatccccactcatggagatgtttgtggctcatgggttctatgctgcca

SEQ ID NO: 15592 - DNA, 120 bp, Artificial Sequence
  ENSG00000013293_11 (sequence is synthesized)
aattcgtagtggccattgggtcggttgcaggactgacagtcagcttgctggggtccctcttcccgatgccgagggtcatttatgccatggctggtgacgggctccttttcaggttcctgg

SEQ ID NO: 15593 - DNA, 120 bp, Artificial Sequence
  ENSG00000013293_12 (sequence is synthesized)
ctcacgtcagctcctacacagagacaccagtggtggcctgcatcgtgtcggggttcctggcagcgctcctcgcactgttggtcagcttgagagacctgatagagatgatgtctatcggca

SEQ ID NO: 15594 - DNA, 120 bp, Artificial Sequence
  ENSG00000013293_13 (sequence is synthesized)
cgctcctggcctacaccttggtctctgtctgtgtcttgctccttcgataccaacctgagagtgacattgatggttttgtcaagttcttgtctgaggagcacaccaagaagaaggagggca

SEQ ID NO: 15595 - DNA, 120 bp, Artificial Sequence
  ENSG00000013293_14 (sequence is synthesized)
ttctggctgactgtgagaaggaagcttgttctcctgtgagtgagggggatgagttttctggcccagccaccaacacatgtggggccaagaacttaccatccttgggagacaatgagatgc

SEQ ID NO: 15596 - DNA, 120 bp, Artificial Sequence
  ENSG00000013293_15 (sequence is synthesized)
tcatagggaaatcagacaagtcaacctacaacgtcaaccaccccaattacggcaccgtggacatgaccacaggcatagaagctgatgaatccgaaaatatttatctcatcaagttaaaga

SEQ ID NO: 15597 - DNA, 120 bp, Artificial Sequence
  ENSG00000013293_16 (sequence is synthesized)
agctgattgggcctcattattacaccatgagaatccggctgggccttccaggcaaaatggaccggcccacagcagcgacggggcacacggtgaccatctgcgtgctcctgctcttcatcc

SEQ ID NO: 15598 - DNA, 120 bp, Artificial Sequence
  ENSG00000013293_17 (sequence is synthesized)
tcatgttcatcttctgctccttcatcatctttggttctgactacatctcagagcagagctggtgggccatccttctggttgttctgatggtgctgctgatcagcaccctggtgtttgtga

SEQ ID NO: 15599 - DNA, 120 bp, Artificial Sequence
  ENSG00000013293_18 (sequence is synthesized)
tcctgcagcagccagagaaccccaagaagctgccctacatggccccttgcctcccctttgtgcctgcctttgccatgctggtgaacatctatctcatgctaaagctctccaccatcacat

SEQ ID NO: 15600 - DNA, 120 bp, Artificial Sequence
  ENSG00000013293_19 (sequence is synthesized)
ggatccggtttgcggtctggtgctttgtgggtctgctcatttattttggatatggcatctggaacagcaccctggaaatcagcgctcgagaagaggccctgcaccaaagcacgtaccaac

SEQ ID NO: 15601 - DNA, 120 bp, Artificial Sequence
  ENSG00000013293_20 (sequence is synthesized)
gctacgacgtggatgaccccttctcagtggaggagggtttctcctacgccacagagggcgagagccaggaggactggggcgggcccactgaagacaaaggcttctattaccaacagatgt

SEQ ID NO: 15602 - DNA, 120 bp, Artificial Sequence
  ENSG00000013293_21 (sequence is synthesized)
cagatgcgaaggcaaacggccggacaagtagcaaagcgaagagcaaaagcaaacacaaacagaactcagaggccctgattgcaaatgatgagttagattactctccagagtaggagaaac

SEQ ID NO: 15603 - DNA, 120 bp, Artificial Sequence
  ENSG00000013293_22 (sequence is synthesized)
acacaagtgggtagaaatggtgatgactgattttcagtaacttaacctgtgggctagaaggtgaaaacttttttggctctcatttcacaaatccagccttccccaaattcaatccctagt

SEQ ID NO: 15604 - DNA, 120 bp, Artificial Sequence
  ENSG00000013293_23 (sequence is synthesized)
catagcctgtcatttgctacttttgctcttcaggatagttctgttgaagggcttaacctgggtcccctaactggtcgccttgttaaataaaataaataaataaacaagaggctatatgaa

SEQ ID NO: 15605 - DNA, 120 bp, Artificial Sequence
  ENSG00000013293_24 (sequence is synthesized)
attccatcttaggtgcaaccaccagagctgatggtaccaaatgtttcctaggcctttgctttgctggttgaagcccaagcaggggctctgggcagaaggcagaatttcagtcacctgaga

SEQ ID NO: 15606 - DNA, 120 bp, Artificial Sequence
  ENSG00000013293_25 (sequence is synthesized)
catggggacaaagctctgttcttggcatgtcaggctgagtgctgctccccgaggtcagggtgggtagatgggcattggcacttcctgagcaagcatcattttatcctgcaatctcaccca

SEQ ID NO: 15607 - DNA, 120 bp, Artificial Sequence
  ENSG00000013293_26 (sequence is synthesized)
aaattaattcatggaaaagacacatgcttctttttattcaccaacattctcacagcttccaaactataattttaggatccagcaaagttcagggactctggaccattttcccaatggttt

SEQ ID NO: 15608 - DNA, 120 bp, Artificial Sequence
  ENSG00000013293_27 (sequence is synthesized)
cagattcaccataaagcagtcaggcagacccagtgatatggtaagaagcaccatcaaagctctatgtaaatgcccagaagaaaattaaataaccatatcttgcggtaaaagccagaaggg

SEQ ID NO: 15609 - DNA, 120 bp, Artificial Sequence
  ENSG00000013293_28 (sequence is synthesized)
cattggcagaaattaactctctgtcatggcctctcttatatcagactgcagctcctggtgatatgatgaaagcgggcaaaggtggagcatgatttcatggcactgatatgccttgaaaaa

SEQ ID NO: 15610 - DNA, 120 bp, Artificial Sequence
  ENSG00000013293_29 (sequence is synthesized)
gtaggttgtttgttttataatcagataaaaatttttacaaggagaagtgagccagccactgagatcacattgcaaattctctttcatatttctaaaattataaattctaaagtttttgag

SEQ ID NO: 15611 - DNA, 120 bp, Artificial Sequence
  ENSG00000013293_30 (sequence is synthesized)
ataggcaaccacttgattggtgtgtgctactctgaaaacaaaataggctgaagtatagcgacttaggtagttgcattccatgagatcacatttcacttctgaaccttattccttggggct

SEQ ID NO: 15612 - DNA, 120 bp, Artificial Sequence
  ENSG00000013293_31 (sequence is synthesized)
agctcactttcagaggtgtatttttttttcctgttatttcccagagtagtttcactgaagcccagagaaatatctacctggtaagatgtaaatttgggccataaaaggggctattaaaag

SEQ ID NO: 15613 - DNA, 120 bp, Artificial Sequence
  ENSG00000013293_32 (sequence is synthesized)
aattttctcagaaatagaatagatgagagaatttgcaaaggaaaaaaacacacatgggctacaatataaattctactcttgggttacaagaattcctgtggctgcactgagatacgtaca

SEQ ID NO: 15614 - DNA, 120 bp, Artificial Sequence
  ENSG00000013293_33 (sequence is synthesized)
aatgtatgtgaaggcacaatttgaatcaagctatcatagaattaaccaagctattaaaattaatcaagctattaataaaatctctgtgaggatttcctgaaagagggacaaaagaagaaa

SEQ ID NO: 15615 - DNA, 120 bp, Artificial Sequence
  ENSG00000013293_34 (sequence is synthesized)
ttccttgtcctttctctcctggatgtatcagtatgccaaacgttttccagaacatattcgctagcactcaagtctgttctttctgaaaggctgaggctcatgccatcttggcatgcttta

SEQ ID NO: 15616 - DNA, 120 bp, Artificial Sequence
  ENSG00000013293_35 (sequence is synthesized)
ggattatggcaaggaggtaaaagtccattttttcattcaactaacactggttgagaatagacccaatgctaagtgacaggaatgaatagaagcatggcacttgcccttgggggctacagt

SEQ ID NO: 15617 - DNA, 120 bp, Artificial Sequence
  ENSG00000013293_36 (sequence is synthesized)
ccatggatgagcagcactggagcctggtaaatgcagataaaacaacaaacttgacaagtctccaggctgatgcactgggttttaacatacatataaagatgaattgaaactagtttttaa

SEQ ID NO: 15618 - DNA, 120 bp, Artificial Sequence
  ENSG00000013293_37 (sequence is synthesized)
aaaatatgctttaaataaattacatatcgtaatcatagccaatgtataccattaaactaaaataactgcaattttctagatattttttattcttctgtagtcattgtttagaactctggt

SEQ ID NO: 15619 - DNA, 120 bp, Artificial Sequence
  ENSG00000013293_38 (sequence is synthesized)
ttcctgaggtcattttgtcattttaatatcatgcttgacaatgctatgttttctcttccctagagttaaccataaagatacagtgcctactctgtgaaatacagcattaggaattaatta

SEQ ID NO: 15620 - DNA, 120 bp, Artificial Sequence
  ENSG00000013293_39 (sequence is synthesized)
taaactaattatcagtcatcttttgaaaacaaagttttgaattggctataggactcaacaaatctgcctggtgtaaatagaatctgttaagcttgatacatatctagatagatgaggagg

SEQ ID NO: 15621 - DNA, 120 bp, Artificial Sequence
  ENSG00000013293_40 (sequence is synthesized)
ggttgtattcattaagcatgagaatagagaaataggagtgcaaaatggcaaaatcttaacgtgggtgaaagagcttccttttactagtgaggtttaagtattaaagtaacaatagcctgg

SEQ ID NO: 15622 - DNA, 120 bp, Artificial Sequence
  ENSG00000013293_41 (sequence is synthesized)
tggcagatgaatgcaatttctataggatgggaatggaaaatgtatgctttggttaacaccattgctgttgacttcatgcagattctattaagcactctcatttcaggagccatttttccc

SEQ ID NO: 15623 - DNA, 120 bp, Artificial Sequence
  ENSG00000013293_42 (sequence is synthesized)
acctccctagcaaccttagttttaaaaaaaaaatcactaagatagaaaaagtattttcaggtacatagacatgtttgtcctcaggtttacctgcttctgtgaacagtcccagattttaca

SEQ ID NO: 15624 - DNA, 120 bp, Artificial Sequence
  ENSG00000013293_43 (sequence is synthesized)
atgcagttttcaaataccatcaatcactacaatgacaatattactattttcttaacaggtttctaaacgatgtatgtgtgggatcacattaaaagtaagatcaccttataattatcttag

SEQ ID NO: 15625 - DNA, 120 bp, Artificial Sequence
  ENSG00000013293_44 (sequence is synthesized)
aaactttgccccttgaagggagtccaaggaagacctacattttattgaattctgaatagcaaaagctctccgagtgagatttcattgtgtggatttgtggtttggagccaattacttgat

SEQ ID NO: 15626 - DNA, 120 bp, Artificial Sequence
  ENSG00000013293_45 (sequence is synthesized)
tttcttcagattttattctacttatttattggtactctgcttcatttcaaaaggatttgaggcagctactaaaatatatataatacaaaacaaaaattaagtgaggaactcagagcaaac

SEQ ID NO: 15627 - DNA, 120 bp, Artificial Sequence
  ENSG00000013293_46 (sequence is synthesized)
aaaaatagaaacagaaaggataagacaaaactagacgtatatttagtacataaatgcagaaccctgacatgctttactaaatttgccaatgagtgacaccatgaaaaataatagaattag

SEQ ID NO: 15628 - DNA, 120 bp, Artificial Sequence
  ENSG00000013293_47 (sequence is synthesized)
tggtaatgacaagaagaagtacttctgcatgataagaacaaatctttccccatgcaggtagaggtttgaaatagcatagatcattaaaatccacaggtaagcttcaaacctagattttgc

SEQ ID NO: 15629 - DNA, 120 bp, Artificial Sequence
  ENSG00000013293_48 (sequence is synthesized)
tagctacatgtgcctggcatatagtgtgtattcaagaaatacctgatgattgacagaatgaatgaattggaggaaaatgaaatatttattcaacaattacttgtggagtgcctattatgt

SEQ ID NO: 15630 - DNA, 120 bp, Artificial Sequence
  ENSG00000013293_49 (sequence is synthesized)
actatggcagatattgatatcgtaagtcagataaaaatccagctcttaagaagtagaggaaatagagcttggtgtggtggcatgtgcctatgatcccagatagttgagagactgagggag

SEQ ID NO: 15631 - DNA, 89 bp, Artificial Sequence
  ENSG00000013293_50 (sequence is synthesized)
aacagaagaataccctgtctcttaaaaaggaaaatcaaataggggaaatgggatatataaataaagaacaatagtgaatgtgtcaggtg

SEQ ID NO: 15632 - DNA, 120 bp, Artificial Sequence
  ENSG00000013293_51 (sequence is synthesized)
gggatatataaataaagaacaatagtgaatgtgtcaggtgagatgacggacttgtaatgtgctgtggggggtcaaatatgaagaaggccttcttcctctggaaaggtcataaagaatgtc

SEQ ID NO: 15633 - DNA, 120 bp, Artificial Sequence
  ENSG00000013293_52 (sequence is synthesized)
acacttgtgttggaacttgtgaagtgggtagaattttatcaagtagaaatgagagaaaggcatgccaagcaaaggatcggcatgaataaggtctactagtttgtggtcctctggctaaga

SEQ ID NO: 15634 - DNA, 120 bp, Artificial Sequence
  ENSG00000013293_53 (sequence is synthesized)
atttgtgctgtgcctccattaagagaaagcaaggagctagtttgcctggagcacatgatttatgcatgacttatacatgcaacaataagaaataatgctaggaaggcaggtgagggatca

SEQ ID NO: 15635 - DNA, 120 bp, Artificial Sequence
  ENSG00000013293_54 (sequence is synthesized)
ctcacagagagacttgaatgtcacactgagctgactggctttcctcgggtgagagagtgggaaataattggggaactgacgaaagtgtgaatccaggaaggctgaactttaagaaagctg

SEQ ID NO: 15636 - DNA, 120 bp, Artificial Sequence
  ENSG00000013293_55 (sequence is synthesized)
agacggtggcttccttacctatgcaaggaactaacaagccacatatacactccaaattgatttaacaaattaaagagaaaaatagctgtactttgagtcctgtgtctgcattcatcatta

SEQ ID NO: 15637 - DNA, 120 bp, Artificial Sequence
  ENSG00000013293_56 (sequence is synthesized)
acctaagaaaatacagccatttaatacgtggacaagcaacacaatttaacagccactttaaagttttcaacaataggtttcaacaactaaacctaacaactttttatatctatctaatct

SEQ ID NO: 15638 - DNA, 120 bp, Artificial Sequence
  ENSG00000013293_57 (sequence is synthesized)
aactaaacctaacaactttttatatctatctaatctaaacagtaaaatctcagctccaggttttactgagcttgagtgctacttttttttttttagacagagtctcattctgtcacccag

SEQ ID NO: 15639 - DNA, 120 bp, Artificial Sequence
  ENSG00000013293_58 (sequence is synthesized)
agcctcccaagcagctgggattataggcgtgtgccagttctacttcttagtaacaaactagtagctaatcaaatgcctacataatggtcatgataaatctgtttaaataaatggcgggcg

SEQ ID NO: 15640 - DNA, 120 bp, Artificial Sequence
  ENSG00000013293_59 (sequence is synthesized)
tggtcatgataaatctgtttaaataaatggcgggcggaagggagttgttgaatttaacaatccatccttcttcagaatctataggtcagccagaatataaatctagtaattattgaaaaa

SEQ ID NO: 15641 - DNA, 120 bp, Artificial Sequence
  ENSG00000013293_60 (sequence is synthesized)
caaaacacaaactccttcaaagaaatctctctcctctattctgctgaaaagggttggtaaacctgacatcctttcttttattggaagacaaatccaacatttgttagacatccaacattt

SEQ ID NO: 15642 - DNA, 120 bp, Artificial Sequence
  ENSG00000013293_61 (sequence is synthesized)
gttggaagtctaccttacaagaaaccacctcttatctgcaacataaacagaagctacatcaggttgaaaatccacatagaagactggagaaaattgccgtcccctttcgcactaggtttt

SEQ ID NO: 15643 - DNA, 120 bp, Artificial Sequence
  ENSG00000013293_62 (sequence is synthesized)
accaggggcccaagatgtcagaggaaagtccgcggagggccaaacacaggtttacctaattatgaatctcagattagaatgtcttattgtgtggaaaagtcagaactcaggaaatgtgtc

SEQ ID NO: 15644 - DNA, 120 bp, Artificial Sequence
  ENSG00000013293_63 (sequence is synthesized)
tgaagccagagcgggggtctgcttacggagtctacgcagcgggtaggggtccactattggagtataaacctcaggtcagtgagtagtgcagaggtgtccctaacttccaatggagggaaa

SEQ ID NO: 15645 - DNA, 120 bp, Artificial Sequence
  ENSG00000013293_64 (sequence is synthesized)
gagaggagagcaaaggaaacacatccagaagtcgccacgagggctgtgtgccagcgctccattttcatgctgtttggaacaagacgtgtcaaggaagatgtttctatccaaagtcttcat

SEQ ID NO: 15646 - DNA, 120 bp, Artificial Sequence
  ENSG00000013293_65 (sequence is synthesized)
ggagcctctgcttcccctgtacctgtgtagctccctgaaactgaggacccacgtgtctgcaaagacctctggagatcctaagagagagaggcaccagcaggtaaccagtggtggcctggc

SEQ ID NO: 15647 - DNA, 120 bp, Artificial Sequence
  ENSG00000013293_66 (sequence is synthesized)
cacgaaagagtatttgaaattcaacagtgagcaagtgcagaaacagcatcccaaaccgcaggccccaccacacgcaggaaccagaaagctgaagtttcaccaaggagtttacttagtatt

SEQ ID NO: 15648 - DNA, 120 bp, Artificial Sequence
  ENSG00000013293_67 (sequence is synthesized)
tctcgctgggaatggggatgggtagcaaaaagcccctttcatgtacataatggttggtcctatgtcctacttttattttctctaagagttttagaagaaaggctgttttaattttttttt

SEQ ID NO: 15649 - DNA, 120 bp, Artificial Sequence
  ENSG00000013293_68 (sequence is synthesized)
ctccttaagagcaacttcctttttaaaatgctttcctcttcttgtcctgcttgagtaatgcaggcatcattctgaaatcattctgaaacagctaggcagtcgccttttgccaaaattact

SEQ ID NO: 15650 - DNA, 120 bp, Artificial Sequence
  ENSG00000013293_69 (sequence is synthesized)
tctctaagaaaatagagtgttcttttttttaggacttagaacccacaaggggtgagtggaagttttgtagcccatcaaaggtgaatatgtgttctgcagtatcaactaaaacagtgtaca

SEQ ID NO: 15651 - DNA, 89 bp, Artificial Sequence
  ENSG00000013293_70 (sequence is synthesized)
agcaaattaactgtgttctgcacacacagaattacaaaatccctataggactttcacagatagctttgggcttaaggtcttcggacaac

SEQ ID NO: 15652 - DNA, 120 bp, Artificial Sequence
  ENSG00000013293_71 (sequence is synthesized)
actttcacagatagctttgggcttaaggtcttcggacaacaggtagttctaatttcttactctttgggacatttagtacatgttggtacacataaggaaagaaaatggcttatattagag

SEQ ID NO: 15653 - DNA, 120 bp, Artificial Sequence
  ENSG00000013293_72 (sequence is synthesized)
ctaggaaacaggggcagcctggatttttatggtaggaactcactctgtgcttttttttttttctgttaagttttcttgacactgacttcggtaacattggctaaagggaattgtgagtca

SEQ ID NO: 15654 - DNA, 120 bp, Artificial Sequence
  ENSG00000013293_73 (sequence is synthesized)
tgtgaatttcacctgcagtgcagactttaaaggactgtgttcattctgatttggggatgaagagaatgttccatgcacatctattgattggtcttggcagttgctgatacgcttgtctca

SEQ ID NO: 15655 - DNA, 120 bp, Artificial Sequence
  ENSG00000013293_74 (sequence is synthesized)
ttcacactcccaaaggcgaggatttaccctagaaatcataaacccccactttccaaagcaaagatgctgttaatgttatgatggtgcataaatacctcaactgtctgggctgagagaggg

SEQ ID NO: 15656 - DNA, 120 bp, Artificial Sequence
  ENSG00000013293_75 (sequence is synthesized)
ggctgcaggtttttaagagagcagctatagtcctcattccatgtagtcacatcatctgatgacaggactccacattctagcttttctcactgtggaaaagaaacgttactgtttaattaa

SEQ ID NO: 15657 - DNA, 120 bp, Artificial Sequence
  ENSG00000013293_76 (sequence is synthesized)
tatccaaagttataaatacagcttgtaaattttactaacttgtttctttttcgtttcgtccttgagaagtacaacttgcatttacagatggtaattcctagtgttgttctctgctatctt

SEQ ID NO: 15658 - DNA, 120 bp, Artificial Sequence
  ENSG00000013293_77 (sequence is synthesized)
tttttggtatgaaattgctgtatttgttaaagtttgttcgttttgtggtttttaattcccattggtgtgctgtacaatgtagtgtatcatgaagaaagaaataatatgcagatgtattat

SEQ ID NO: 15659 - DNA, 120 bp, Artificial Sequence
  ENSG00000013293_78 (sequence is synthesized)
gaaatgtgttttattttcaaatgtgtggtgttgacaatatattgatttatcaagatactaagggaaaattctaaatttaacaaaatgtgtatattttaataaatgcataaagctttattg

SEQ ID NO: 15660 - DNA, 120 bp, Artificial Sequence
  ENSG00000013293_79 (sequence is synthesized)
tgtgcctttaaatttaaaaatgggtttataaagaaagtcagaaacaaaagtgtcttactataaaatatccatagtaatgtaaagcttttacacgagactaccaaaaaaaaagaaagaaaa

SEQ ID NO: 15661 - DNA, 120 bp, Artificial Sequence
  ENSG00000013293_80 (sequence is synthesized)
gaaaaaggagccttcccatattttgttaaccttaaccagtatctgaagtctgttactttttttccattcttaaatggagatgaataagtgaatttcgccttaagtgtttcaattgtcctt

SEQ ID NO: 15662 - DNA, 120 bp, Artificial Sequence
  ENSG00000013293_81 (sequence is synthesized)
tgtagaaaagccagataaatgagttcactttgaattgcattattgtggaaaattcattttcagaataaaacattttaaaaagtacagctaatcgactaataaaatttaaatttgaagaaa

SEQ ID NO: 15663 - DNA, 65 bp, Artificial Sequence
  ENSG00000013293_82 (sequence is synthesized)
ggctcaagcagtcatctgccttggcctcccaaagtgctggcatgaaccactgtgtctggcctact

SEQ ID NO: 15664 - DNA, 120 bp, Artificial Sequence
  ENSG00000013293_83 (sequence is synthesized)
ctcccaaagtgctggcatgaaccactgtgtctggcctactatttggacttttaaggtgattttctcctctttaggcaaggaacatcaagcctttcctagcataagaccaaaaacaaacca

SEQ ID NO: 15665 - DNA, 120 bp, Artificial Sequence
  ENSG00000013297_0 (sequence is synthesized)
agcagcgctgctgtccccgccgtgcgcccttcgccgctgagctcgcagcctccggcgcccacctccacctccagtgtcccgcctcgggccgtcgccctccagcggctcgcgagcgtggga

SEQ ID NO: 15666 - DNA, 120 bp, Artificial Sequence
  ENSG00000013297_1 (sequence is synthesized)
gacgtacctgggcaggcactgtccagcccaggcccaggcacagccgtgaggggcgaggcacggggacatcctggcggccaccatggtggccacgtgcctgcaggtggtgggcttcgtcac

SEQ ID NO: 15667 - DNA, 120 bp, Artificial Sequence
  ENSG00000013297_2 (sequence is synthesized)
gagcttcgtgggctggatcggggtcatcgtgaccacctccaccaatgactgggtggtgacctgcggctacaccatccccacctgccgcaagctggatgagctgggctccaaggggctgtg

SEQ ID NO: 15668 - DNA, 120 bp, Artificial Sequence
  ENSG00000013297_3 (sequence is synthesized)
ggccgactgcgtcatggccacggggctgtaccactgcaagcccctggtggacatcctcatcctgccgggctacgtgcaggcctgccgcgccctgatgattgctgcctcggtcctgggtct

SEQ ID NO: 15669 - DNA, 120 bp, Artificial Sequence
  ENSG00000013297_4 (sequence is synthesized)
gccggccattttactgctgctgactgttcttccctgcatccggatgggccaggagcccggtgtggctaagtacaggcgggcccagctggctggtgttttgctcattctgctggctctctg

SEQ ID NO: 15670 - DNA, 120 bp, Artificial Sequence
  ENSG00000013297_5 (sequence is synthesized)
cgcccttgttgccaccatctggttccctgtgtgcgcccaccgtgagaccaccatcgtgagctttggctactccctgtatgcaggctggattggtgctgtgctgtgcctcgtgggtggctg

SEQ ID NO: 15671 - DNA, 120 bp, Artificial Sequence
  ENSG00000013297_6 (sequence is synthesized)
tgtcatcctctgctgcgctggagatgcccaggcctttggtgaaaaccgtttctactacactgcgggctctagctccccgactcatgcgaagagtgcccacgtataagagggctgcccggc

SEQ ID NO: 15672 - DNA, 120 bp, Artificial Sequence
  ENSG00000013297_7 (sequence is synthesized)
tgcccacagaggtgctgtagatgctgggcccagggccctaggtttgctcgtcacagtgtggggaagcccattcctctgccaggctctaaagccaaaggtctagaaaagcatcctgtctgg

SEQ ID NO: 15673 - DNA, 120 bp, Artificial Sequence
  ENSG00000013297_8 (sequence is synthesized)
cattttgtagtcttaacttctccccatttcccccatcttttggttgccttaaaagaaatctctagctcagataatgcccagacatttttttcccttggtgttgcccctattagctctttt

SEQ ID NO: 15674 - DNA, 120 bp, Artificial Sequence
  ENSG00000013297_9 (sequence is synthesized)
tcttttgctgtttattaaaaatatattatatatattttgtttctttaaatttcaaatgttttgcaaacatcactgagttaggtgggggtggggaagagaaatacaagatacttttttttt

SEQ ID NO: 15675 - DNA, 87 bp, Artificial Sequence
  ENSG00000013297_10 (sequence is synthesized)
tttttttttttttttttaaatagggcctcactctgttgcttgtagcctcaacctccccggctcaagtgatcctcctgcctcagcctc

SEQ ID NO: 15676 - DNA, 88 bp, Artificial Sequence
  ENSG00000013297_11 (sequence is synthesized)
cctcccaagtagctgggactacaggcgttcactactacacccagctaatttttaagttttttatagagatgagggctccactcaaagt

SEQ ID NO: 15677 - DNA, 120 bp, Artificial Sequence
  ENSG00000013297_12 (sequence is synthesized)
cggcctcccaaagtgttgggattataggagtgagccaccacaccggccaagatgcttttcaaactgatacagatgacaatgggagcctcataaagatggcttttgtttcttcccttcaag

SEQ ID NO: 15678 - DNA, 120 bp, Artificial Sequence
  ENSG00000013297_13 (sequence is synthesized)
cttcccttcaaggtcatttacttgtacgagacagaaaaagatagcattggggacatgggatgggggagggagggcaatagtggaacgaactttccatgggaaactttcccttttgtaagt

SEQ ID NO: 15679 - DNA, 120 bp, Artificial Sequence
  ENSG00000013297_14 (sequence is synthesized)
tgagggccaggggtagggatattttttagtttgtgattttacatttatctgtacatactttttcaagattgatcatttttataaccatggttttcctgaaatcctcaattcatcaatatg

SEQ ID NO: 15680 - DNA, 120 bp, Artificial Sequence
  ENSG00000013297_15 (sequence is synthesized)
aaggaaatgaaccacatagactttatgcaataaataacagtgcaagtgagtataactctaactgatgttccacaaaacatttttgatttcaggtttgtatgatgtagtttttaatcgtac

SEQ ID NO: 15681 - DNA, 120 bp, Artificial Sequence
  ENSG00000013297_16 (sequence is synthesized)
attttcatatgcttcaaactaacacatttttaaagctttcccccacttttctctctatttgtattgttagccatcttgaagtgatgttgtttaacataaattgtactgttgaatttggct

SEQ ID NO: 15682 - DNA, 120 bp, Artificial Sequence
  ENSG00000013297_17 (sequence is synthesized)
ttacgggtgtaaacactgatggtatatcagtatctgagaccccaaactctccaaatactgatggtgcattttattcttgaagtgaaatctgtgcaataaaataacagactgtctgcaaaa

SEQ ID NO: 15683 - DNA, 120 bp, Artificial Sequence
  ENSG00000013297_18 (sequence is synthesized)
tagctgggactacaggacattcatgctcatgacatcacatgctgagaggacagggaggccagtgtggggctggcctcgaagagaggcggcatcagtgctaccattgagatgtccccacaa

SEQ ID NO: 15684 - DNA, 120 bp, Artificial Sequence
  ENSG00000013297_19 (sequence is synthesized)
aagagtgtgtgacagccagatgtgcagcttaatggagactgaaccaggattgtgggtggaacattggcacatgctgcttatggcttgaatagcagctcttgaggaatctatatttctcta

SEQ ID NO: 15685 - DNA, 120 bp, Artificial Sequence
  ENSG00000013297_20 (sequence is synthesized)
cctcatgcagaatcttagagctctggctttgtggctccatggctgggggagggagtggagacggaggaacttgtcactgctccatgccccattgttgaaatggaaaatgtggaaatgtta

SEQ ID NO: 15686 - DNA, 120 bp, Artificial Sequence
  ENSG00000013297_21 (sequence is synthesized)
agccgtttctagaggattgtggaaggtaagaattgcttccaaatataaaaatacaaatacaaaagatcacctgatcgtcacagttgggggctttcttgaataaaaatggttatatctcta

SEQ ID NO: 15687 - DNA, 120 bp, Artificial Sequence
  ENSG00000013297_22 (sequence is synthesized)
gcaggaacagtcctctgtccctatcttttggtgtccggacatggccttggcactgtagcatgtggacagccagtgccatggatttcagaacctgcattgccagttgactgcctgctttgt

SEQ ID NO: 15688 - DNA, 120 bp, Artificial Sequence
  ENSG00000013297_23 (sequence is synthesized)
gagagcagatagggcagaggtgctttcttctgcggctcctcaaggctcacagcttgctatggaagcatccttggaggacatctccttccctgccctttccatcaacgttggttaatccaa

SEQ ID NO: 15689 - DNA, 120 bp, Artificial Sequence
  ENSG00000013297_24 (sequence is synthesized)
tctccaccttctcttaaaagattgacatgacgagtgaggaagccaaggacattgcatccgcatcttaaacttaatctcagtacatgaaaggggctgctttggaaatagagcttcatgaaa

SEQ ID NO: 15690 - DNA, 120 bp, Artificial Sequence
  ENSG00000013297_25 (sequence is synthesized)
cagggaaatcccgtggccaggaaacccctcgctcctccccaccccaccctgtgaggagtgtctccactaggaaggaaattaaatcagtcttccagccaccagaattgaattgggatggac

SEQ ID NO: 15691 - DNA, 120 bp, Artificial Sequence
  ENSG00000013297_26 (sequence is synthesized)
atcttgtggttgctgccttctcaagttcaagagaaatgtgaaaggaagccaagtgaagccagtgggggatggactcccacaatctgtatccctttgtattttatgggcagtttacacaga

SEQ ID NO: 15692 - DNA, 120 bp, Artificial Sequence
  ENSG00000013297_27 (sequence is synthesized)
gggctaagtaatgtctctgggagtcactgaccatgaagataagtttaaaaagagaaagaggattttgaaggtaggaaatacctaagggaaagacctgaaagatggaagccttctcagtct

SEQ ID NO: 15693 - DNA, 120 bp, Artificial Sequence
  ENSG00000013297_28 (sequence is synthesized)
tcacagtggaatcctttttgaacacctatgcccaggtcccacagcagatcaattgaatcagaattttctgggcatcaggccaggcaaagatattttttgaaagcttcccaggtgatgctt

SEQ ID NO: 15694 - DNA, 120 bp, Artificial Sequence
  ENSG00000013306_0 (sequence is synthesized)
cctcgtggcgcggtgtaggggcggggcccccttggctgctttcggcgtcggcctaggtgcgctgcgagcgcgcgcggaccgcgcacaggcggcggagccggtatgggcccgcctgaccct

SEQ ID NO: 15695 - DNA, 120 bp, Artificial Sequence
  ENSG00000013306_1 (sequence is synthesized)
ccctgggcgccgcgccgcacgagcaccagcctagagccaggactgaagcttcaagatggctgaccaggaccctgcgggcatcagccccctccagcaaatggtggcctcaggcaccggggc

SEQ ID NO: 15696 - DNA, 120 bp, Artificial Sequence
  ENSG00000013306_2 (sequence is synthesized)
tgtggttacctctctcttcatgacacccctggacgtggtgaaggttcgcctgcagtctcagcggccctccatggccagcgagctgatgccttcctccagactgtggagcctctcctatac

SEQ ID NO: 15697 - DNA, 120 bp, Artificial Sequence
  ENSG00000013306_3 (sequence is synthesized)
caaatggaagtgcctcctgtattgcaatggtgtcctggagcctctgtacctgtgcccaaatggtgcccgctgtgccacctggtttcaagaccctacccgcttcactggcaccatggatgc

SEQ ID NO: 15698 - DNA, 120 bp, Artificial Sequence
  ENSG00000013306_4 (sequence is synthesized)
cttcgtgaagatcgtgaggcacgagggcaccaggaccctctggagcggcctccccgccaccctggtgatgactgtgccagctaccgccatctacttcactgcctatgaccaactgaaggc

SEQ ID NO: 15699 - DNA, 120 bp, Artificial Sequence
  ENSG00000013306_5 (sequence is synthesized)
cttcctgtgtggtcgagccctgacctctgacctctacgcacccatggtggctggcgcgctggcccgcctgggcaccgtgactgtgatcagccccctggagcttatgcggacaaagctgca

SEQ ID NO: 15700 - DNA, 120 bp, Artificial Sequence
  ENSG00000013306_6 (sequence is synthesized)
cagtggctcagggtggctggcgctcactgtggctgggctggggccccactgcccttcgagatgtgcccttctcagccctgtactggttcaactatgagctggtgaagagctggctcaatg

SEQ ID NO: 15701 - DNA, 120 bp, Artificial Sequence
  ENSG00000013306_7 (sequence is synthesized)
ggttcaggccgaaggaccagacttctgtgggcatgagctttgtggctggtggcatctcagggacggtggctgcagtgctgactctaccctttgacgtggtaaagacccaacgccaggtcg

SEQ ID NO: 15702 - DNA, 120 bp, Artificial Sequence
  ENSG00000013306_8 (sequence is synthesized)
ctctgggagcgatggaggctgtgagagtgaaccccctgcatgtggactccacctggctgctgctgcggaggatccgggccgagtcgggcaccaagggactctttgcaggcttccttcctc

SEQ ID NO: 15703 - DNA, 120 bp, Artificial Sequence
  ENSG00000013306_9 (sequence is synthesized)
ggatcatcaaggctgccccctcctgtgccatcatgatcagcacctatgagttcggcaaaagcttcttccagaggctgaaccaggaccggcttctgggcggctgaaaggggcaaggaggca

SEQ ID NO: 15704 - DNA, 120 bp, Artificial Sequence
  ENSG00000013306_10 (sequence is synthesized)
aggaccccgtctctcccacggatggggagagggcaggaggagacccagccaagtgccttttcctcagcactgagggagggggcttgtttcccttccctcccggcgacaagctccagggca

SEQ ID NO: 15705 - DNA, 120 bp, Artificial Sequence
  ENSG00000013306_11 (sequence is synthesized)
gggctgtccctctgggcggcccagcacttcctcagacacaacttcttcctgctgctccagtcgtggggatcatcacttacccaccccccaagttcaagaccaaatcttccagctgccccc

SEQ ID NO: 15706 - DNA, 120 bp, Artificial Sequence
  ENSG00000013306_12 (sequence is synthesized)
ttcgtgtttccctgtgtttgctgtagctgggcatgtctccaggaaccaagaagccctcagcctggtgtagtctccctgacccttgttaattccttaagtctaaagatgatgaacttctgc

SEQ ID NO: 15707 - DNA, 120 bp, Artificial Sequence
  ENSG00000013306_13 (sequence is synthesized)
tgcgctgcgagcgcgcgcggaccgcgcacaggcggcggagccggtatgggcccgcctgaccctgggcgccgcgccgcacgagcaccagcctagagccaggtttggttttcaggactgaag

SEQ ID NO: 15708 - DNA, 120 bp, Artificial Sequence
  ENSG00000013306_14 (sequence is synthesized)
gccagcctagggataggggggtgttctaggtccccagacctgggacagcaggtaggtgatgccatgtaagacctgtgatctcacttctccccattgtcacccccaatccccacacagtgg

SEQ ID NO: 15709 - DNA, 120 bp, Artificial Sequence
  ENSG00000013306_15 (sequence is synthesized)
tcccagctttgtgactagtgaccatgaagttacttagcttttctgagccatgggtttctcatctgtgaagtgggcctagcaggtagagtatttgcccaggcggtcaggagattaattcct

SEQ ID NO: 15710 - DNA, 120 bp, Artificial Sequence
  ENSG00000013306_16 (sequence is synthesized)
acagagtgcctgcttctgagcctgcatgtagcagacaagactcacagctgggagggagtggtggcagtgaaaggtggacggtctggggccacttccttgcccttcccgtctctaatcagt

SEQ ID NO: 15711 - DNA, 73 bp, Artificial Sequence
  ENSG00000013306_17 (sequence is synthesized)
aaccgcttgaacgggggtggattgcgcagagcgagacgccgtctcaaaacaaaagtctcacagtggcccagcc

SEQ ID NO: 15712 - DNA, 120 bp, Artificial Sequence
  ENSG00000013306_18 (sequence is synthesized)
agacgccgtctcaaaacaaaagtctcacagtggcccagcctcctttcctgccatccctggagttgtggtctgtttgaggtttggttttcaggactgaagcttcaagatggctgaccagga

SEQ ID NO: 15713 - DNA, 120 bp, Artificial Sequence
  ENSG00000013306_19 (sequence is synthesized)
cgccgcacgagcaccagcctagagccaggtaggcggcactgggccggggctgggggcggagacggaagcgggggtctccgggcggccgtgcgagccagggcaggtgctggggccgtcgag

SEQ ID NO: 15714 - DNA, 120 bp, Artificial Sequence
  ENSG00000013306_20 (sequence is synthesized)
tgcgagccagggcaggtgctggggccgtcgagctggcgtggtccccctcacctggcggctctccgccgttcggggccgggagtgtcgccgagggtcggggagacgtcctggtcctacgtt

SEQ ID NO: 15715 - DNA, 120 bp, Artificial Sequence
  ENSG00000013306_21 (sequence is synthesized)
cctacttcccgctctcccggctgcgccccgggcctgcattttggggcgggaacccagagactgctctttctctccgggccccgggtctggcccgtccggccgggcggggagggccgggca

SEQ ID NO: 15716 - DNA, 120 bp, Artificial Sequence
  ENSG00000013306_22 (sequence is synthesized)
actagcatatactcccaggtcctgccagccagtcctgtgacctgcaccagaacatccacacagggacctggcctttactggccttccagggataggggcccactgcctccctgcaaggtt

SEQ ID NO: 15717 - DNA, 120 bp, Artificial Sequence
  ENSG00000013306_23 (sequence is synthesized)
ctaggatcctgtcattataatgccccctgcctttccccagtgccctcctctctccaatccacagggaagtgcctcctgtattgcaatggtgtcctggagcctctgtacctgtgcccaaat

SEQ ID NO: 15718 - DNA, 120 bp, Artificial Sequence
  ENSG00000013306_24 (sequence is synthesized)
gcgtcggcctaggtgcgctgcgagcgcgcgcggaccgcgcacaggcggcggagccggtatgggcccgcctgaccctgggcgccgcgccgcacgagcaccagcctagagccagtgagccaa

SEQ ID NO: 15719 - DNA, 120 bp, Artificial Sequence
  ENSG00000013306_25 (sequence is synthesized)
actgcattcgagcgataggtctggcaccctagcttccttcggaaccactcctgagtgaccttgggcaggccacctcgtctccccgagccttagttttccccggcggaggggggcggacag

SEQ ID NO: 15720 - DNA, 120 bp, Artificial Sequence
  ENSG00000013306_26 (sequence is synthesized)
gcggacagtccctgctttagaggtcattgccagggttgttgaggcaacagatgtttcgagggcggtggatgagggttgggttaaagtctcacagtgggccgggtgcggtggctcacgcct

SEQ ID NO: 15721 - DNA, 120 bp, Artificial Sequence
  ENSG00000013364_0 (sequence is synthesized)
gagagttccccatctgaggcgtttgttgcagctacctgcacttctagattcatcttcttgtgagccctgggcttaggagtcaccatggcaactgaagagttcatcatccgcatcccccca

SEQ ID NO: 15722 - DNA, 120 bp, Artificial Sequence
  ENSG00000013364_1 (sequence is synthesized)
taccactatatccatgtgctggaccagaacagcaacgtgtcccgtgtggaggtcgggccaaagacctacatccggcaggacaatgagagggtactgtttgcccccatgcgcatggtgacc

SEQ ID NO: 15723 - DNA, 120 bp, Artificial Sequence
  ENSG00000013364_2 (sequence is synthesized)
gtccccccacgtcactactgcacagtggccaaccctgtgtctcgggatgcccagggcttggtgctgtttgatgtcacagggcaagttcggcttcgccacgctgacctcgagatccggctg

SEQ ID NO: 15724 - DNA, 120 bp, Artificial Sequence
  ENSG00000013364_3 (sequence is synthesized)
gcccaggaccccttccccctgtacccaggggaggtgctggaaaaggacatcacacccctgcaggtggttctgcccaacactgccctccatctaaaggcgctgcttgattttgaggataaa

SEQ ID NO: 15725 - DNA, 120 bp, Artificial Sequence
  ENSG00000013364_4 (sequence is synthesized)
gatggagacaaggtggtggcaggagatgagtggcttttcgagggacctggcacgtacatcccccggaaggaagtggaggtcgtggagatcattcaggccaccatcatcaggcagaaccag

SEQ ID NO: 15726 - DNA, 120 bp, Artificial Sequence
  ENSG00000013364_5 (sequence is synthesized)
gctctgcggctcagggcccgcaaggagtgctgggaccgggacggcaaggagagggtgacaggggaagaatggctggtcaccacagtaggggcgtacctcccagcggtgtttgaggaggtt

SEQ ID NO: 15727 - DNA, 120 bp, Artificial Sequence
  ENSG00000013364_6 (sequence is synthesized)
ctggatttggtggacgccgtcatccttacggaaaagacagccctgcacctccgggctcggcggaacttccgggacttcaggggagtgtcccgccgcactggggaggagtggctggtaaca

SEQ ID NO: 15728 - DNA, 120 bp, Artificial Sequence
  ENSG00000013364_7 (sequence is synthesized)
gtgcaggacacagaggcccacgtgccagatgtccacgaggaggtgctgggggttgtgcccatcaccaccctgggcccccacaactactgcgtgattctcgaccctgtcggaccggatggc

SEQ ID NO: 15729 - DNA, 120 bp, Artificial Sequence
  ENSG00000013364_8 (sequence is synthesized)
aagaatcagctggggcagaagcgcgtggtcaagggagagaagtcttttttcctccagccaggagagcagctggaacaaggcatccaggatgtgtatgtgctgtcggagcagcaggggctg

SEQ ID NO: 15730 - DNA, 120 bp, Artificial Sequence
  ENSG00000013364_9 (sequence is synthesized)
ctgctgagggccctgcagcccctggaggagggggaggatgaggagaaggtctcacaccaggctggggaccactggctcatccgcggacccctggagtatgtgccatctgccaaagtggag

SEQ ID NO: 15731 - DNA, 120 bp, Artificial Sequence
  ENSG00000013364_10 (sequence is synthesized)
gtggtggaggagcgccaggccatccctctagacgagaacgagggcatctatgtgcaggatgtcaagaccggaaaggtgcgcgctgtgattggaagcacctacatgctgacccaggacgaa

SEQ ID NO: 15732 - DNA, 120 bp, Artificial Sequence
  ENSG00000013364_11 (sequence is synthesized)
gctgctgaacaaggggcaggaccctctggcagacaggggtgagaaggacacagctaagagcctccagcccttggcgccccggaacaagacccgtgtggtcagctaccgcgtgccccacaa

SEQ ID NO: 15733 - DNA, 120 bp, Artificial Sequence
  ENSG00000013364_12 (sequence is synthesized)
cgctgcggtgcaggtgtacgactaccgagagaagcgagcccgcgtggtcttcgggcctgagctggtgtcgctgggtcctgaggagcagttcacagtgttgtccctctcagctgggcggcc

SEQ ID NO: 15734 - DNA, 120 bp, Artificial Sequence
  ENSG00000013364_13 (sequence is synthesized)
caagcgtccccatgcccgccgtgcgctctgcctgctgctggggcctgacttcttcacagacgtcatcaccatcgaaacggcggatcatgccaggctgcaactgcagctggcctacaactg

SEQ ID NO: 15735 - DNA, 120 bp, Artificial Sequence
  ENSG00000013364_14 (sequence is synthesized)
gcactttgaggtgaatgaccggaaggacccccaagagacggccaagctcttttcagtgccagactttgtaggtgatgcctgcaaagccatcgcatcccgggtgcggggggccgtggcctc

SEQ ID NO: 15736 - DNA, 120 bp, Artificial Sequence
  ENSG00000013364_15 (sequence is synthesized)
tgtcactttcgatgacttccataagaactcagcccgcatcattcgcactgctgtctttggctttgagacctcggaagcgaagggccccgatggcatggccctgcccaggccccgggacca

SEQ ID NO: 15737 - DNA, 120 bp, Artificial Sequence
  ENSG00000013364_16 (sequence is synthesized)
ggctgtcttcccccaaaacgggctggtggtcagcagtgtggacgtgcagtcagtggagcctgtggatcagaggacccgggacgccctgcaacgcagcgtccagctggccatcgagatcac

SEQ ID NO: 15738 - DNA, 120 bp, Artificial Sequence
  ENSG00000013364_17 (sequence is synthesized)
caccaactcccaggaagcggcggccaagcatgaggctcagagactggagcaggaagcccgcggccggcttgagcggcagaagatcctggaccagtcagaagccgagaaagctcgcaagga

SEQ ID NO: 15739 - DNA, 120 bp, Artificial Sequence
  ENSG00000013364_18 (sequence is synthesized)
acttttggagctggaggctctgagcatggccgtggagagcaccgggactgccaaggcggaggccgagtcccgtgcggaggcagcccggattgagggagaagggtccgtgctgcaggccaa

SEQ ID NO: 15740 - DNA, 120 bp, Artificial Sequence
  ENSG00000013364_19 (sequence is synthesized)
gctaaaagcacaggccttggccattgaaacggaggctgagctccagagggtccagaaggtccgagagctggaactggtctatgcccgggcccagctggagctggaggtgagcaaggctca

SEQ ID NO: 15741 - DNA, 120 bp, Artificial Sequence
  ENSG00000013364_20 (sequence is synthesized)
gcagctggctgaggtggaggtgaagaagttcaagcagatgacagaggccataggccccagcaccatcagggaccttgctgtggctgggcctgagatgcaggtaaaactgctccagtccct

SEQ ID NO: 15742 - DNA, 120 bp, Artificial Sequence
  ENSG00000013364_21 (sequence is synthesized)
gggcctgaaatcaaccctcatcaccgatggctccactcccatcaacctcttcaacacagcctttgggctgctggggatggggcccgagggtcagcccctgggcagaagggtggccagtgg

SEQ ID NO: 15743 - DNA, 120 bp, Artificial Sequence
  ENSG00000013364_22 (sequence is synthesized)
gcccagccctggggaggggatatccccccagtctgctcaggcccctcaagctcctggagacaaccacgtggtgcctgtactgcgctaactcctgattaatacaatggaagtttctgggca

SEQ ID NO: 15744 - DNA, 120 bp, Artificial Sequence
  ENSG00000013364_23 (sequence is synthesized)
aactcccaagccccacccctgggcttggcctgccttgccctgccgggaagtgatccccaaggcagggtgagagttccccatctgaggcgtttgttgcagctacctgcacttctagatgct

SEQ ID NO: 15745 - DNA, 120 bp, Artificial Sequence
  ENSG00000013364_24 (sequence is synthesized)
ttgaaagctgttgagggccacccactgctcttccttccccacccccgcttcatgctgtttccacttgggctggaaaatgtgaccatgaccatgcggatgtggcttttccttccctcacct

SEQ ID NO: 15746 - DNA, 120 bp, Artificial Sequence
  ENSG00000013364_25 (sequence is synthesized)
tcaccatgagctgtgggcagtggccatgacttacctgattctggatcaacaaagaagatgttcaaatacaattgacaaatgtaggccaataggtacagtggctcacacctgtcatcccag

SEQ ID NO: 15747 - DNA, 120 bp, Artificial Sequence
  ENSG00000013364_26 (sequence is synthesized)
ggaaaaggccatccctctagacgagaacgagggcatctatgtgcaggatgtcaagaccggaaaggtgcgcgctgtgattggaagcacctacatgctgacccaggacgaagtcctgtggga

SEQ ID NO: 15748 - DNA, 120 bp, Artificial Sequence
  ENSG00000013364_27 (sequence is synthesized)
caactgcaggagctgaggatgggagagaactggggacgagggggccagagtgatttgcagtgttagtaatgcagctggttctatggaaggctcagttccatctgggatccctttatgagc

SEQ ID NO: 15749 - DNA, 120 bp, Artificial Sequence
  ENSG00000013364_28 (sequence is synthesized)
agtggactaggtcttcacattcagcccaggattactaaagcataggaaagaggcagggaacatagacacagctcatgtaaacattccttttgtttatggccgaatcctagccactggact

SEQ ID NO: 15750 - DNA, 120 bp, Artificial Sequence
  ENSG00000013364_29 (sequence is synthesized)
acctgaggcatacagatattctttggctatgggctgacatttgaatacagctggggcctcaggattctctgaaataaagggctgcctccctctggaggagccaggcagctcctcagagca

SEQ ID NO: 15751 - DNA, 120 bp, Artificial Sequence
  ENSG00000013364_30 (sequence is synthesized)
ggagcaccttgatctgaagctctttgcagtgccggtggcagtgtagggggaagtagttgatgggagtgagggaaaggaattggcaaggaaccctgggcctctgtggctcactgcatcaag

SEQ ID NO: 15752 - DNA, 90 bp, Artificial Sequence
  ENSG00000013364_31 (sequence is synthesized)
cttgaatgtctgaggtcaagcaatcctcctacctcagtctcccaaagttctgggatgacaggtgtgagccactgtgcccggcctccaccc

SEQ ID NO: 15753 - DNA, 120 bp, Artificial Sequence
  ENSG00000013364_32 (sequence is synthesized)
tgggatgacaggtgtgagccactgtgcccggcctccaccccagtcttatttcaggacatacagagatggatgttgtggacccgcctccagagcatcaggcttggccctggggtcacagca

SEQ ID NO: 15754 - DNA, 120 bp, Artificial Sequence
  ENSG00000013364_33 (sequence is synthesized)
ctcagggcccgcaaggagtgctgggaccgggacggcaaggagagggtgacaggtggggtcaccaaggggcgatgatggtgggtgggcaggaggggtccccactgcaggggaagcagggga

SEQ ID NO: 15755 - DNA, 89 bp, Artificial Sequence
  ENSG00000013364_34 (sequence is synthesized)
atcgtctgagcccaggagcttatctctacagagaatttaaaaattagcctggccttggacacacacctgtggtcccagctactcagaag

SEQ ID NO: 15756 - DNA, 82 bp, Artificial Sequence
  ENSG00000013364_35 (sequence is synthesized)
tgagcccaggatgtgtcctgggccacagaggtactaccccgaggtgctaccattcccactttttttttttttttgagacgga

SEQ ID NO: 15757 - DNA, 84 bp, Artificial Sequence
  ENSG00000013364_36 (sequence is synthesized)
ccactgcactccatcctgggccacagaggtactaccccgaggtgctaccattcccttgctgttgcccaggttggagtgcagtgg

SEQ ID NO: 15758 - DNA, 68 bp, Artificial Sequence
  ENSG00000013364_37 (sequence is synthesized)
gatccaccaggttcccactttctatatatcaaaactgggatgcagaatgcaggttgcttgccctgggg

SEQ ID NO: 15759 - DNA, 120 bp, Artificial Sequence
  ENSG00000013364_38 (sequence is synthesized)
tcaaaactgggatgcagaatgcaggttgcttgccctggggtgtggccaggcagggcgaggctgggacctgcatccaggcactctggcttctccagtaaaccaaaggacatccacaactct

SEQ ID NO: 15760 - DNA, 120 bp, Artificial Sequence
  ENSG00000013364_39 (sequence is synthesized)
aacagaggcagttctgctgcctgttttagcagaaggacaaaagttggtctttggagcttagagaaggcagaacaggctgttggcatagcagcaacttgggcatcttaggaggccaaggtg

SEQ ID NO: 15761 - DNA, 78 bp, Artificial Sequence
  ENSG00000013364_40 (sequence is synthesized)
cagactagcttgggcaacatggtgaaacaccatctctacaaaaaatacaaatattagccgggcgtggtggcacgtgcc

SEQ ID NO: 15762 - DNA, 120 bp, Artificial Sequence
  ENSG00000013364_41 (sequence is synthesized)
agcactgggtcggccctcgggtgtggctgtttgggcaggacagccctctgtatgtagccttgagcagctgtgggaaggtctgggggcagggccgcatcaccgaccttacgtccaacctca

SEQ ID NO: 15763 - DNA, 120 bp, Artificial Sequence
  ENSG00000013364_42 (sequence is synthesized)
atgatggtccttatcctcctccctcttcccaagcaggagtggccctcgcttgggcgatagagaggtttctctctcatttggtgtcctctttggtagtggagacctggtcccaggtcctca

SEQ ID NO: 15764 - DNA, 120 bp, Artificial Sequence
  ENSG00000013364_43 (sequence is synthesized)
cacctcttctcatcttcctgcagggtactgtttgcccccatgcgcatggtgaccgtccccccacgtcactactgcacagtggccaaccctgtgtctcgggatgcccagggcttggtgctg

SEQ ID NO: 15765 - DNA, 120 bp, Artificial Sequence
  ENSG00000013364_44 (sequence is synthesized)
atctgaggcgtttgttgcagctacctgcacttctagatgtttcggccctgcggagaaccctccaagggagcagtggaaaaagcttcacttggcagtaaagcccctacttgctgttccatc

SEQ ID NO: 15766 - DNA, 120 bp, Artificial Sequence
  ENSG00000013364_45 (sequence is synthesized)
cctgcagctggggtgaaataagccactgaccagtaaacaactgaggcttaaaccagcatgccagctcaggctccccaggttcatcctgtgtcgtctcccccacctaccagtcatcttctt

SEQ ID NO: 15767 - DNA, 120 bp, Artificial Sequence
  ENSG00000013364_46 (sequence is synthesized)
gagcctaccagaagtgcccagccagtctggcattaaatgacatgtgccaaggttaagcagttcattcacccggtgccagacactggtgggcagtgccaaagcagcagtgacaagcccagg

SEQ ID NO: 15768 - DNA, 120 bp, Artificial Sequence
  ENSG00000013374_0 (sequence is synthesized)
actctgctggtcgcggcgggagtggcgtggcgcaggtgaggacacggcggccgagtgtcctcgaccccagcctcagcagcactgcttggcgccccggttcccggtccgactgggcacctc

SEQ ID NO: 15769 - DNA, 120 bp, Artificial Sequence
  ENSG00000013374_1 (sequence is synthesized)
tcctggccaggggtggagcggccgcggggcggggggatggcacaaaagaaatatcttcaagcaaaattgacccagtttttaagggaagacaggattcaactttggaaacctccatataca

SEQ ID NO: 15770 - DNA, 120 bp, Artificial Sequence
  ENSG00000013374_2 (sequence is synthesized)
gatgaaaataaaaaagttggtttggcattaaaggaccttgctaagcagtactctgacagactagaatgctgtgaaaatgaagtagaaaaggtaatagaagaaatacgttgcaaggcaatt

SEQ ID NO: 15771 - DNA, 120 bp, Artificial Sequence
  ENSG00000013374_3 (sequence is synthesized)
gagcgtggaacaggaaatgacaattatagaacaacgggaattgctacaatcgaggtgtttttaccaccaagactaaaaaaagataggaaaaacttgttggagacccgattgcacatcact

SEQ ID NO: 15772 - DNA, 120 bp, Artificial Sequence
  ENSG00000013374_4 (sequence is synthesized)
ggcagagaactgaggtccaaaatagctgaaacctttggacttcaagaaaattatatcaaaattgtcataaataagaagcaactacaactagggaaaacccttgaagaacaaggcgtggct

SEQ ID NO: 15773 - DNA, 120 bp, Artificial Sequence
  ENSG00000013374_5 (sequence is synthesized)
cacaatgtgaaagcgatggtgcttgaactaaaacaatctgaagaggacgcgaggaaaaacttccagttagaggaagaggagcaaaatgaggccaaactcaaagaaaaacaaattcagagg

SEQ ID NO: 15774 - DNA, 120 bp, Artificial Sequence
  ENSG00000013374_6 (sequence is synthesized)
accaagagaggactagaaatactggcaaagagagcagcagagacagtggtggatccagaaatgacaccgtacttagacatagctaaccagacaggcagatcaatcagaattcccccatca

SEQ ID NO: 15775 - DNA, 120 bp, Artificial Sequence
  ENSG00000013374_7 (sequence is synthesized)
gaaagaaaagcccttatgttagctatgggatatcatgagaagggcagagctttcctgaaaagaaaagaatatggaatagccttgccatgtctgttggacgctgacaaatatttctgtgag

SEQ ID NO: 15776 - DNA, 120 bp, Artificial Sequence
  ENSG00000013374_8 (sequence is synthesized)
tgttgcagagagctgctggacacagtggataactacgccgtcctccagctggatatagtgtggtgttacttccgcctggaacagctggaatgccttgatgatgcagaaaaaaaattaaac

SEQ ID NO: 15777 - DNA, 120 bp, Artificial Sequence
  ENSG00000013374_9 (sequence is synthesized)
ttggcccagaaatgctttaaaaattgttacggagaaaatcatcagagactggtccacataaaaggaaattgtgggaaagagaaggtactgtttctaagactctacttacttcaagggatc

SEQ ID NO: 15778 - DNA, 120 bp, Artificial Sequence
  ENSG00000013374_10 (sequence is synthesized)
cgaaactatcacagtggaaatgatgtagaggcttatgagtatcttaacaaggcacgtcagctctttaaagagctatatattgatccatcaaaagtggacaatttgttgcagttggggttt

SEQ ID NO: 15779 - DNA, 120 bp, Artificial Sequence
  ENSG00000013374_11 (sequence is synthesized)
actgcccaggaagcccggcttggcctgagggcgtgtgatgggaacgtggatcatgcggccactcatattaccaaccgcagagaggaactggcccaaataaggaaggaggaaaaagagaag

SEQ ID NO: 15780 - DNA, 120 bp, Artificial Sequence
  ENSG00000013374_12 (sequence is synthesized)
aaaagacgccgcctcgagaacatcaggtttctgaaagggatgggctactccacgcacgcggcccagcaggtactccacgcagccagcgggaacttggatgaggccctgaagattctgctc

SEQ ID NO: 15781 - DNA, 120 bp, Artificial Sequence
  ENSG00000013374_13 (sequence is synthesized)
gtgtacatgggttttgatgcactcgtggccgaagctgcgctgagagtgttcagaggcaacgtccagctggccgcccagacccttgctcacaacggaggaagcctgcctcccgagctgccg

SEQ ID NO: 15782 - DNA, 120 bp, Artificial Sequence
  ENSG00000013374_14 (sequence is synthesized)
ctgtcgccagaagactctttgtccccgccagccacgtccccttctgactccgcaggaacctctagtgcctcaacagacgaagacatggagacagaggccgtcaatgagatactggaagac

SEQ ID NO: 15783 - DNA, 120 bp, Artificial Sequence
  ENSG00000013374_15 (sequence is synthesized)
attccagagcatgaggaagactatcttgactcaactctggaagatgaagaaattattattgcagagtacctatcctatgtagaaaataggaagtcagcaacaaagaaaaactaaataatg

SEQ ID NO: 15784 - DNA, 120 bp, Artificial Sequence
  ENSG00000013374_16 (sequence is synthesized)
aacagaaatagcgctaattttctgcttataaatgctatcattatgaaaaggctaatgcagctctttctgttcttactttttatctgaattacaagtcctctttgggtgtaggagggggtg

SEQ ID NO: 15785 - DNA, 120 bp, Artificial Sequence
  ENSG00000013374_17 (sequence is synthesized)
ggcaggggacaagtccaggaggggtcccagggccttcatgcgtggtctcggggaagaagcttcctctggcctggcgcaggccgttccatctgcctcccaggtctgcgtccctaacccctt

SEQ ID NO: 15786 - DNA, 120 bp, Artificial Sequence
  ENSG00000013374_18 (sequence is synthesized)
ccccagcttggtgttttaccccgaaacaggaaggaacaggggtcctgtagaacaggggtcctggggaaggtgtccagggcagggtcctgggaagggtgtcccgaccgcttcctctccagc

SEQ ID NO: 15787 - DNA, 120 bp, Artificial Sequence
  ENSG00000013374_19 (sequence is synthesized)
tgtggctccatctgcccagcttgcctgcctcctgcacccactgccctgaccttcctgcttcccacgctgccatctctgccagggtgccacatgggttcctgtgccaccctttccccgccc

SEQ ID NO: 15788 - DNA, 120 bp, Artificial Sequence
  ENSG00000013374_20 (sequence is synthesized)
ctcaaatcgtcctttaagtcttccttccaagtgctgtggggcataacgatgaggcgctggccttgggggccacaccaggtcgcagcaaatggcttcagcctgggacgccagtgttttatg

SEQ ID NO: 15789 - DNA, 120 bp, Artificial Sequence
  ENSG00000013374_21 (sequence is synthesized)
ctcttagttcagtaaaatacgcccccgaaattcaagattgagtgtcaggctttatatatattcagcattcctcattacagaaatcttctattgaatgggaaaggtttaaatgctaaccaa

SEQ ID NO: 15790 - DNA, 120 bp, Artificial Sequence
  ENSG00000013374_22 (sequence is synthesized)
agcaatttatttttaattaatatttttagactctgtgctgtcatactgaactcactgctagctaagagacctatcagagatttagatatattttctccaggttttttgtgggttttcttt

SEQ ID NO: 15791 - DNA, 120 bp, Artificial Sequence
  ENSG00000013374_23 (sequence is synthesized)
gttgttgttgttgttctagccatgtgacagaggctctttctaaaagtatgtagttcgctgtgtgtcggctccagcagtaaccgtcctcactgcgccacgcactcctctgtagatgtgtgc

SEQ ID NO: 15792 - DNA, 120 bp, Artificial Sequence
  ENSG00000013374_24 (sequence is synthesized)
ccagtgggagttccttccagccccaggaccacagcagcagccaggtgccgagtggattgagtgccaggtgcatccaagactttccctcccttccagaaggcactgactgaagacaggatg

SEQ ID NO: 15793 - DNA, 120 bp, Artificial Sequence
  ENSG00000013374_25 (sequence is synthesized)
gatcatgcggagccggctgaaatgctccaactttttcaaagtgtgggtggtccagtttggactgatgggaatcttcttgtcattctttttaaacggatgataccgatggaaataaaaggt

SEQ ID NO: 15794 - DNA, 120 bp, Artificial Sequence
  ENSG00000013374_26 (sequence is synthesized)
ggtgaacaccagctttaaggaagatggcccagactatacagaacaccctgccatgcccttgagactgcagactttcatctacaacagtggttaatgtaaaagagtagttatggtgtaaac

SEQ ID NO: 15795 - DNA, 120 bp, Artificial Sequence
  ENSG00000013374_27 (sequence is synthesized)
tggtgaatttcttcttccctttgtatttctaattgacctttcctccctgtaaagaaaagaattttcaagcaggtaggatatcctctcttcttctgtacatgtgctatgttgctagtcgga

SEQ ID NO: 15796 - DNA, 120 bp, Artificial Sequence
  ENSG00000013374_28 (sequence is synthesized)
actttccattataaagtttcctgtcagcttttcacctaatggttttggggtagtattgatgattattcctcaaatccgttgtttaagagctgtataatggtgatattattccttctgtac

SEQ ID NO: 15797 - DNA, 120 bp, Artificial Sequence
  ENSG00000013374_29 (sequence is synthesized)
gtagctgggatcacaggtgcacatcaccacaggtgcacatcaccatgcccagataatttttttgtatttgttgtagagatgaggtttcactatgttgcccatactagtctcaaactcctg

SEQ ID NO: 15798 - DNA, 88 bp, Artificial Sequence
  ENSG00000013374_30 (sequence is synthesized)
gtcttctgcatttattgctggaattctgaaaaatttgtttttgctcatcagttattttatatgtggaggtacaatttgtataggaaag

SEQ ID NO: 15799 - DNA, 120 bp, Artificial Sequence
  ENSG00000013374_31 (sequence is synthesized)
cagttattttatatgtggaggtacaatttgtataggaaagttagaataaaatactttgtttctttctccttattttcttgttttcagaataaatgagttgcttcactatcaccctccaaa

SEQ ID NO: 15800 - DNA, 120 bp, Artificial Sequence
  ENSG00000013374_32 (sequence is synthesized)
cggcggcggcggcgcgaaggcgacagcggcggcgggggcggggctggcctcacccggaatgaaaacaaacggcggccgctgccgcatccgggcactctgctggtcgcggcgggagtggcg

SEQ ID NO: 15801 - DNA, 120 bp, Artificial Sequence
  ENSG00000013374_33 (sequence is synthesized)
aaaaagataatcccacaggagtgttaataaccaggaactctttattactccagattgggaaggaaggagaaacttgtccttttttttttcttgagacagagtctcactttgtcatccagg

SEQ ID NO: 15802 - DNA, 120 bp, Artificial Sequence
  ENSG00000013374_34 (sequence is synthesized)
atcatgcggccactcatattaccaaccgcagagagattctgctcagcaatcctcagatgtggtggttaaatgattccaatcctgaaaccgacaaccgtcaagaaagtccttcccaggaaa

SEQ ID NO: 15803 - DNA, 120 bp, Artificial Sequence
  ENSG00000013374_35 (sequence is synthesized)
ttatatcctctgccgtcagcttttctgatttcacagggtaatctctccaaaatgggttaaattcaagtacgttttactttgtcttatttttaacaggataggaaaaacttgttggagacc

SEQ ID NO: 15804 - DNA, 120 bp, Artificial Sequence
  ENSG00000013374_36 (sequence is synthesized)
ccatggtgtttctttgagggatggtggaaatgttctgaaatgttaaagacgtccagctgtgtgagacggcccctctgagcagccctgcctggtggtgccacgctgccgcccccttgagga

SEQ ID NO: 15805 - DNA, 120 bp, Artificial Sequence
  ENSG00000013374_37 (sequence is synthesized)
gcactgtggtctccactgcctgaggaaacaagcagtaaaacggaaagtttaaaaaggaccttgtctcctacagtttcaaatagccgtctagtaagatggctttattgtgatgtttaatag

SEQ ID NO: 15806 - DNA, 120 bp, Artificial Sequence
  ENSG00000013374_38 (sequence is synthesized)
gggctccagcccagacacaggctgcgtgaggccacgtgaggccccatgctcagtgcttggcccaggcctggctccaaaacgtggtgcctgtccacaccagcacagtccacaggccaggac

SEQ ID NO: 15807 - DNA, 120 bp, Artificial Sequence
  ENSG00000013374_39 (sequence is synthesized)
tttgtgtagggtttctgtgtgcagcagagtttagtgaaacaggcagtttccacggcagaaaaaagagaatgggaattcaacttgtagtataattgtttggcattaaaattttaaatgtaa

SEQ ID NO: 15808 - DNA, 120 bp, Artificial Sequence
  ENSG00000013375_0 (sequence is synthesized)
gcggttctgaggactgggtttgggtgcagacgttgttgcttgggcgcttctccgctgcgtgtaggtgaagggggcttcctgaccgagacatggatttaggtgctattacaaaatactcag

SEQ ID NO: 15809 - DNA, 120 bp, Artificial Sequence
  ENSG00000013375_1 (sequence is synthesized)
cattacacgccaagcccaatggactgatccttcaatacgggactgctggatttcgaacgaaggcagaacatcttgatcatgtcatgtttcgcatgggattattagctgtcctgaggtcaa

SEQ ID NO: 15810 - DNA, 120 bp, Artificial Sequence
  ENSG00000013375_2 (sequence is synthesized)
aacagacaaaatccactataggagtcatggtaacagcgtcccacaatcctgaggaagacaatggtgtaaaattggttgatcctttgggtgaaatgttggcaccatcctgggaggaacatg

SEQ ID NO: 15811 - DNA, 120 bp, Artificial Sequence
  ENSG00000013375_3 (sequence is synthesized)
ccacctgtttagcaaatgctgaggaacaagatatgcagagagtgcttattgacatcagcgagaaagaagctgtgaatctgcaacaagatgcctttgtagttattggtagagataccaggc

SEQ ID NO: 15812 - DNA, 120 bp, Artificial Sequence
  ENSG00000013375_4 (sequence is synthesized)
ccagcagtgagaaactttcacaatctgtaatagatggtgtgactgttctaggaggtcaattccatgattatggcttgttaacaacaccccagctgcactacatggtgtattgtcgaaaca

SEQ ID NO: 15813 - DNA, 120 bp, Artificial Sequence
  ENSG00000013375_5 (sequence is synthesized)
cgggtggccgatatggaaaggcaactatagaaggttactaccagaaactctctaaggcttttgtggaactcaccaaacaggcttcttgcagtggagatgaatacagatcacttaaggttg

SEQ ID NO: 15814 - DNA, 120 bp, Artificial Sequence
  ENSG00000013375_6 (sequence is synthesized)
actgtgcaaatggcataggggccctgaagctaagggaaatggaacactacttctcacagggcctgtcagttcagctgtttaatgatgggtccaagggcaaactcaatcatttatgtggag

SEQ ID NO: 15815 - DNA, 120 bp, Artificial Sequence
  ENSG00000013375_7 (sequence is synthesized)
ctgactttgtgaaaagtcatcagaaacctccacagggaatggaaattaagtccaatgaaagatgctgttcttttgatggagatgcagacagaattgtttattactaccatgatgcagatg

SEQ ID NO: 15816 - DNA, 120 bp, Artificial Sequence
  ENSG00000013375_8 (sequence is synthesized)
gccactttcatctcatagatggagacaagatagcaacgttaattagcagtttccttaaagagctcctggtggagattggagaaagtttgaatattggtgttgtacaaactgcatatgcaa

SEQ ID NO: 15817 - DNA, 120 bp, Artificial Sequence
  ENSG00000013375_9 (sequence is synthesized)
atggaagttcaacacggtatcttgaagaagttatgaaggtacctgtctattgcactaagactggtgtaaaacatttgcaccacaaggctcaagagtttgacattggagtttattttgaag

SEQ ID NO: 15818 - DNA, 120 bp, Artificial Sequence
  ENSG00000013375_10 (sequence is synthesized)
caaatgggcatggcactgcactgtttagtacagctgttgaaatgaagataaaacaatcagcagaacaactggaagataagaaaagaaaagctgctaagatgcttgaaaacattattgact

SEQ ID NO: 15819 - DNA, 120 bp, Artificial Sequence
  ENSG00000013375_11 (sequence is synthesized)
tgtttaaccaggcagctggtgatgctatttctgacatgctggtgattgaagcaatcttggctctgaagggcttgactgtacaacagtgggatgctctctatacagatcttccaaacagac

SEQ ID NO: 15820 - DNA, 120 bp, Artificial Sequence
  ENSG00000013375_12 (sequence is synthesized)
aacttaaagttcaggttgcagacaggagagttattagcactaccgatgctgaaagacaagcagttacacccccaggattacaggaggcaatcaatgacctggtgaagaagtacaagcttt

SEQ ID NO: 15821 - DNA, 120 bp, Artificial Sequence
  ENSG00000013375_13 (sequence is synthesized)
ctcgagcttttgtccggccctctggtacagaagatgtcgtccgagtatatgcagaagcagactcacaagaaagtgcagatcaccttgcacatgaagtgagcttggcagtatttcagctgg

SEQ ID NO: 15822 - DNA, 120 bp, Artificial Sequence
  ENSG00000013375_14 (sequence is synthesized)
ctggaggaattggagaaaggccccaaccaggtttctgaagataattttcatattcctgagaaactggactttttacaagtctttacaaaactgtcaataataatggcagtactaagagat

SEQ ID NO: 15823 - DNA, 120 bp, Artificial Sequence
  ENSG00000013375_15 (sequence is synthesized)
ttataatcataatgtttacaatgcagcctactggattgtctctagatctgtttttcttaaacactaacagaataattctttataaataggtaagccttacacttgttaaagaaatttacc

SEQ ID NO: 15824 - DNA, 120 bp, Artificial Sequence
  ENSG00000013375_16 (sequence is synthesized)
tctaatttcagtctcactaatgtaaaatactgggacttaagtatacaattcagtcactaactgtacagttttatgtggggaacaattcatgcaggctactggaaaattaaatcttattac

SEQ ID NO: 15825 - DNA, 120 bp, Artificial Sequence
  ENSG00000013375_17 (sequence is synthesized)
caactccttgtgatatctttgccatcaccatcacatgagcaagatgatgttttgcagcattccccattgctgatacaaatggagagggcagagaagactttatacaaccagtttttccat

SEQ ID NO: 15826 - DNA, 120 bp, Artificial Sequence
  ENSG00000013375_18 (sequence is synthesized)
tgcagagtcttaagaaagattattagatgacttacctatatgactaatgccatcaggaactcagaggtatgaatagggggttgtccatccctcttccatactgaggtggagatgctcatg

SEQ ID NO: 15827 - DNA, 120 bp, Artificial Sequence
  ENSG00000013375_19 (sequence is synthesized)
caatacttttaaggatgcatggtccagccttcagttattcttcactgctcttggtgaaggtatgtgggagaaaaactaattataatacgtttcccagcctctgatggagaaggaacacca

SEQ ID NO: 15828 - DNA, 120 bp, Artificial Sequence
  ENSG00000013375_20 (sequence is synthesized)
ttctgataccagaacatggttaataaggaaaagagaaaaatccccaaccaatcttaattgaaccaagtctgaaaccaatggaaaaaaaaaatgggtagtgtatattttgcaggtttaaga

SEQ ID NO: 15829 - DNA, 120 bp, Artificial Sequence
  ENSG00000013375_21 (sequence is synthesized)
caactcaggacaataaaaacaatggactttacatgtgtatatatatagctctcttaggcaccataatcagtatgagccaacaatatttaaacttgattcaggccacattcagacatttgc

SEQ ID NO: 15830 - DNA, 120 bp, Artificial Sequence
  ENSG00000013375_22 (sequence is synthesized)
tcttatatacaaatatttaaattaaatacaatctgaaatgtgttctgttacatacaaaaaaggaaaaactatacaacgcagagcagtgtgtgtgttttaaataattacatttacatgtaa

SEQ ID NO: 15831 - DNA, 120 bp, Artificial Sequence
  ENSG00000013375_23 (sequence is synthesized)
gctaaatggaaccagcaatggtgctcaagtttttatcatcccttccagaaaatctttttctaccatctcttctattttttgcctggctttgctggaacatggtttgtggttctccagttt

SEQ ID NO: 15832 - DNA, 120 bp, Artificial Sequence
  ENSG00000013375_24 (sequence is synthesized)
catgtccttattagggaaggcatttgagtagaggataggactccctgagtgtcctccacatcggcttgtgactttgctgttgaagacttgactgagcacattgaagaacggcaggagctg

SEQ ID NO: 15833 - DNA, 120 bp, Artificial Sequence
  ENSG00000013375_25 (sequence is synthesized)
tctggatttttctgcagaaaacaaaaagtgaactggtattaatacaacagacaatgtggtatgttagaaaaattaaaaatatataaactttggcaattggtcaagaaatgaatacaaatg

SEQ ID NO: 15834 - DNA, 120 bp, Artificial Sequence
  ENSG00000013375_26 (sequence is synthesized)
acattaagtttctaactcctgacctgatcaaaacccttggtgcttctgagaccttttactgccatttattagttttacatggagcagtctaacattgtagtaatagttcccaactagaat

SEQ ID NO: 15835 - DNA, 120 bp, Artificial Sequence
  ENSG00000013375_27 (sequence is synthesized)
gcgcagataagcttagttaacagaaatagctttgaacaggaatagagtcaaacataaaagttttatgttgtgctttgtatttactcaaaaagctcccaggtttctgaaccctcactactg

SEQ ID NO: 15836 - DNA, 120 bp, Artificial Sequence
  ENSG00000013375_28 (sequence is synthesized)
taaccaaggactaggtcacaaaattactacagaaaaaaggaacaaagtgctttatacatttcataatatatccccttttattataattagttaattcccttttatctaaatggcctaaat

SEQ ID NO: 15837 - DNA, 120 bp, Artificial Sequence
  ENSG00000013375_29 (sequence is synthesized)
ttgccatgatggtagcagtgtccaaagtgaataattactgtcagtactgcatcacagagaaaggaagggatccctcaggagacactgctgtctccttctgggttgtgctaaacaacatag

SEQ ID NO: 15838 - DNA, 120 bp, Artificial Sequence
  ENSG00000013375_30 (sequence is synthesized)
ggaggaaagctggacctggagtcaaaggaattgagttagtgtgctggctctgccatacttacggcacccttgggcaggatatacaaaggttcctcacttataaaatgggacagtctaaaa

SEQ ID NO: 15839 - DNA, 120 bp, Artificial Sequence
  ENSG00000013375_31 (sequence is synthesized)
ctaccttttagtagagaagtcaaatgagaaggtatgtgaaaactctgtcaactaaatataaagactaataatttgggtattaagaggctagtttgagaagccacctgaattacacaaaca

SEQ ID NO: 15840 - DNA, 120 bp, Artificial Sequence
  ENSG00000013375_32 (sequence is synthesized)
cagctacagacatcattctgtctagagaaagataagagagaacaggttggttgaacttgggcagaatcacagatacaattccacactaaagaatgaaaataagcaatgaactagacagaa

SEQ ID NO: 15841 - DNA, 120 bp, Artificial Sequence
  ENSG00000013375_33 (sequence is synthesized)
ggaagaaatcatgaagacttaggaagcagaattacaatctgtcatattaacaaatggagtttgccttctaagatcagatgttgctcagaaactttcattgtttacctaataatttaatat

SEQ ID NO: 15842 - DNA, 120 bp, Artificial Sequence
  ENSG00000013375_34 (sequence is synthesized)
cactagtttcctagtgggtcaagcagatgcaaaatccagcttattttcttctatgtgctctcaagcttattgcttattttaaagtaaaatcctgaaaaaggaaaatattaggttggtgca

SEQ ID NO: 15843 - DNA, 89 bp, Artificial Sequence
  ENSG00000013375_35 (sequence is synthesized)
aaagtaaaatcctgaaaaaggaaaatattaggttggtgcaaacgtaattgcggtttttgcattgttgaaatttgccgttttatattgga

SEQ ID NO: 15844 - DNA, 120 bp, Artificial Sequence
  ENSG00000013375_36 (sequence is synthesized)
actatggaaatgatgttagacaaaaatcaaatttagcgattttctgagttcaaaataggttataaagcagcagagacaacacacaacatcaacaatgcatttggcccaggaactgctaat

SEQ ID NO: 15845 - DNA, 120 bp, Artificial Sequence
  ENSG00000013375_37 (sequence is synthesized)
caatgcatttggcccaggaactgctaatgaacatacagtgccgtgatggctcaagaagttttgcaaaggagactagagccttgaagatgaggagtgcagtggccagtcatcggaaattga

SEQ ID NO: 15846 - DNA, 120 bp, Artificial Sequence
  ENSG00000013375_38 (sequence is synthesized)
taatgaccaattgagaacatcatcgaagctgatcctcttacaactataagagagctgcccaagaactcaatgttgaccattttatggtcgttcggcatttgaagcaaattgaaaaggtga

SEQ ID NO: 15847 - DNA, 120 bp, Artificial Sequence
  ENSG00000013375_39 (sequence is synthesized)
aaaagctcaataaatgggtgcctcatgagctgagtgaaaaataaaaaaattcgttgttttgaagtgtcattttctctattctatgcaacaataatgaatcatttctctatcggattgtga

SEQ ID NO: 15848 - DNA, 120 bp, Artificial Sequence
  ENSG00000013375_40 (sequence is synthesized)
caataatgaatcatttctctatcggattgtgatgtgtgccaaaaggtggattttatacgacaactggcgatgaccagctcagtggctggactgaaagaagctccaaagcacttcccaaag

SEQ ID NO: 15849 - DNA, 120 bp, Artificial Sequence
  ENSG00000013375_41 (sequence is synthesized)
tgtttggtggtttgctgccagtctgatccactacagctttctgaatccaggtgaaaccattacatctgataagtatgctcagcaaatcaatgagatgcaccaaaaactgcaatgcctgca

SEQ ID NO: 15850 - DNA, 120 bp, Artificial Sequence
  ENSG00000013375_42 (sequence is synthesized)
gccggcattggccaccagaaagggcccaattcttttcacgacaacactgggccgcacgttgcacaaccaacgcttcgaaaattgaactaattgggctatgaagttttgcctcatctgcca

SEQ ID NO: 15851 - DNA, 120 bp, Artificial Sequence
  ENSG00000013375_43 (sequence is synthesized)
tattcacctgacctcttgccaacaaactaccacttctttaggcatctcagcaacgttttgcagggaaattgcttccacaactagcaggacacagaaaatgctttccaagagttcgtcaaa

SEQ ID NO: 15852 - DNA, 72 bp, Artificial Sequence
  ENSG00000013375_44 (sequence is synthesized)
attaataaagatttgtgtgaacctagttataatgacttaaaattcatggtcccaaacagcaattacttttgc

SEQ ID NO: 15853 - DNA, 120 bp, Artificial Sequence
  ENSG00000013375_45 (sequence is synthesized)
tgacttaaaattcatggtcccaaacagcaattacttttgcaccaaactaaaaatataagttaaaatggaagagtctaggagcaaaccaagaaaagatcacctacttcatcatctctggtc

SEQ ID NO: 15854 - DNA, 120 bp, Artificial Sequence
  ENSG00000013375_46 (sequence is synthesized)
aaaaacaaaccaaaaaacttaacagctatcacttaagtttgcttcctagcaattatttagcttccagtctagattacaggatatataaaactttctttctttctttcttaactatgacac

SEQ ID NO: 15855 - DNA, 120 bp, Artificial Sequence
  ENSG00000013375_47 (sequence is synthesized)
tggcaccaatgagagtcctgtgactgactttcacatttccaccattactcaattactggtaccataccacctctaatcccctaaatcaaactgcaattcaacaataaagggcgtacagag

SEQ ID NO: 15856 - DNA, 120 bp, Artificial Sequence
  ENSG00000013375_48 (sequence is synthesized)
atgactttgtcctgaaggaaaatgaatatccttgtaccctctatatagctaacttccaaatgtaagagaactatggggtaaccttttgtttctattcctatcaagatgagcctttaagag

SEQ ID NO: 15857 - DNA, 120 bp, Artificial Sequence
  ENSG00000013375_49 (sequence is synthesized)
agggacttttattaagctcttgaccaagaagaatacacttgattcagagtttctgatgctcttaatcagaactatatgtattgtctcaatattaaataaagtcaaatgtttccatacaaa

SEQ ID NO: 15858 - DNA, 120 bp, Artificial Sequence
  ENSG00000013375_50 (sequence is synthesized)
gactcgcggaccgcccccccccaacaccgcggtggccttttcgcttgggccgcattccagggctccggacgtttacgattcactggcctctgccccgagggacccaggataaggacatgg

SEQ ID NO: 15859 - DNA, 120 bp, Artificial Sequence
  ENSG00000013375_51 (sequence is synthesized)
gttgttgcttgggcgcttctccgctgcgtgtaggtgaagggggcttcctgaccgagttgagagtggaccaatttaagtgtgcccggcgtccaggatagtcctggagctaaaatgggagga

SEQ ID NO: 15860 - DNA, 120 bp, Artificial Sequence
  ENSG00000013375_52 (sequence is synthesized)
gagtggggacaatctgctatctgccctgagtctgcccaggagtggacataccaagttggacaacatcttgtaggaagacaatggtgtaaaattggttgatcctttgggtgaaatgttggc

SEQ ID NO: 15861 - DNA, 120 bp, Artificial Sequence
  ENSG00000013375_53 (sequence is synthesized)
ggaagccacgcagggccacgtctgcggttctgaggactgggtttgggtgcagacgttgttgcttgggcgcttctccgctgcgtgtaggtgaagggggcttcctgaccgaggaagacaatg

SEQ ID NO: 15862 - DNA, 120 bp, Artificial Sequence
  ENSG00000013375_54 (sequence is synthesized)
gcggttctgaggactgggtttgggtgcagacgttgttgcttgggcgcttctccgctgcgtgtaggtgaagggggcttcctgaccgaggtaagccgggccccgaggctcggagttgagaag

SEQ ID NO: 15863 - DNA, 120 bp, Artificial Sequence
  ENSG00000013375_55 (sequence is synthesized)
actaacagaataattctttataaatagtaactaacatcttgacaaagaggataaactgattttggttcttgtcatggaagataaaaagtcagtatcatgagcatactatttcatgtccct

SEQ ID NO: 15864 - DNA, 120 bp, Artificial Sequence
  ENSG00000013375_56 (sequence is synthesized)
gaagatgtcgtccgagtatatgcagaagcagactcacaagggtcaagacttgtggtctggatttttattatttggcctcttcacatactccttaaagtgtgtgcaaagccagggcaaagt

SEQ ID NO: 15865 - DNA, 120 bp, Artificial Sequence
  ENSG00000013375_57 (sequence is synthesized)
acagtgagtgcgctgaatagggaatcaggaggagacatttggcagctttcctgcagaagcttaagccatctcagagtctaatgaatatccatgatggatgaggagatggcaacagaggca

SEQ ID NO: 15866 - DNA, 120 bp, Artificial Sequence
  ENSG00000013375_58 (sequence is synthesized)
ttagtacttacttactgttaggccaattgtggattaaagttttattgaattttttcagttgtggaatgatagctatttttataatctgaattgattaaaaacttaccttatttagaagaa

SEQ ID NO: 15867 - DNA, 120 bp, Artificial Sequence
  ENSG00000013375_59 (sequence is synthesized)
agataccaggtgatgataagagttactggtaaaaaaaaaaacctttgggaacgtgatataaacgattgtatcagttttaatccaagacaaatggaaagaagtaaagtggaactaccctga

SEQ ID NO: 15868 - DNA, 120 bp, Artificial Sequence
  ENSG00000013375_60 (sequence is synthesized)
aacaccgcggtggccttttcgcttgggccgcattccagggctccggacgtttacgattcactggcctctgccccgagggacccaggataaggttgagagtggaccaatttaagtgtgccc

SEQ ID NO: 15869 - DNA, 120 bp, Artificial Sequence
  ENSG00000013375_61 (sequence is synthesized)
ctgagcaaattgacctaaagtacaaattctaattctaggaatgtgccttctcatttatatgtgctttggatgtgaaacaactttttttttttaagagcatgatcattaagctcatgattc

SEQ ID NO: 15870 - DNA, 120 bp, Artificial Sequence
  ENSG00000013375_62 (sequence is synthesized)
ctaagggtgtggaaagaatgaaaagatactgtcattttttggagtgtccatattagagaaataacaatgtccttccaaatttattgatttaagacattttcagtaattgaaaattgtttc

SEQ ID NO: 15871 - DNA, 120 bp, Artificial Sequence
  ENSG00000013375_63 (sequence is synthesized)
gtgtaggtgaagggggcttcctgaccgaggtaagccgggccccgaggctcggagttgagaagggagactaccggtcggcaagggctcggtgggagcgggacaggtcagattctcggcccg

SEQ ID NO: 15872 - DNA, 120 bp, Artificial Sequence
  ENSG00000013375_64 (sequence is synthesized)
gctagtggtctggcgggcgactgaccgagcggcggagcgcgcgggacacacctacaggcccctgcgccccgcgggcgggctggtcgggacgggccgcgggtctcctgccggggctctgac

SEQ ID NO: 15873 - DNA, 120 bp, Artificial Sequence
  ENSG00000013392_0 (sequence is synthesized)
gcaggtcgcgcgcagctggcgcctgaggaactgcggctgcggttccgagcggggtctggggctgttaccattgagtgaccagaaaggctctcggtgcaaagcgttcctgcagaattgctt

SEQ ID NO: 15874 - DNA, 120 bp, Artificial Sequence
  ENSG00000013392_1 (sequence is synthesized)
ccacgtaaagggaccttcgggaaatttcgctggataccggctggcattgacaaacccagcgtccctgagccttgtgaggtttccaggcaggctgattgcgaggcaacatgtctgcttcgg

SEQ ID NO: 15875 - DNA, 120 bp, Artificial Sequence
  ENSG00000013392_2 (sequence is synthesized)
tgaaagaaagccttcagcttcagctactggagatggaaatgctgttttctatgtttcctaaccaaggagaagtaaaacttgaagatgtaaatgccctgacgaatataaagaggtatttgg

SEQ ID NO: 15876 - DNA, 120 bp, Artificial Sequence
  ENSG00000013392_3 (sequence is synthesized)
aaggcacaagggaggcgctgccaccaaaaatcgaatttgtaattacactccagattgaagagcccaaggtgaaaattgatttgcaagtgaccatgcctcacagctacccctatgtagcat

SEQ ID NO: 15877 - DNA, 120 bp, Artificial Sequence
  ENSG00000013392_4 (sequence is synthesized)
tgcagctgtttggacggtcatctgaacttgacagacatcagcagctacttctcaacaaaggtctcacttcttacatagggacttttgatccaggtgagctctgtgtatgtgcagcaatcc

SEQ ID NO: 15878 - DNA, 120 bp, Artificial Sequence
  ENSG00000013392_5 (sequence is synthesized)
agtggctacaggacaacagtgcatcttatttcctgaacagaaagcttgtatatgaaccatctacacaagcaaagccagtcaagaacacattcctccgaatgtggatctacagtcaccata

SEQ ID NO: 15879 - DNA, 120 bp, Artificial Sequence
  ENSG00000013392_6 (sequence is synthesized)
tatatcagcaggacctaaggaaaaagattttggatgttgggaaaaggttagatgtgactggattttgcatgacaggaaagcctggtataatctgtgtggagggtttcaaagagcactgtg

SEQ ID NO: 15880 - DNA, 120 bp, Artificial Sequence
  ENSG00000013392_7 (sequence is synthesized)
aggagttctggcacacaattaggtaccccaattggaagcacatttcctgtaagcatgctgaaagcgtggagacagaaggaaatggtgaggacctgcgccttttccattcttttgaagagt

SEQ ID NO: 15881 - DNA, 120 bp, Artificial Sequence
  ENSG00000013392_8 (sequence is synthesized)
tactccttgaggctcatggtgactatggattaaggaatgactatcacatgaatctgggccaattcttagaatttctcaagaagcacaaaagtgagcatgtttttcagatactatttggta

SEQ ID NO: 15882 - DNA, 120 bp, Artificial Sequence
  ENSG00000013392_9 (sequence is synthesized)
ttgaaagcaaaagttcagactcataaaaagcgattaagaggcctatgcctgtaatttcactaagtcagtatttctgttaataagaccaaattaaaaaggctagtggctgtgtagcatcct

SEQ ID NO: 15883 - DNA, 120 bp, Artificial Sequence
  ENSG00000013392_10 (sequence is synthesized)
cagtgcaaaacccagctccagaattttcacctggtaacgaatttcaactgacagtgaaatgaataggcctttaaactttataacattgcaattgtgatgttatctctaggtttttgtgtg

SEQ ID NO: 15884 - DNA, 120 bp, Artificial Sequence
  ENSG00000013392_11 (sequence is synthesized)
aagtcattcaaaaactatttcattgtaaattaataaaaacaatccatttaacttgtgaagctgatttgattgaagaggaatccaaagcccataactaacatcaaaaatcaaactgcaatt

SEQ ID NO: 15885 - DNA, 120 bp, Artificial Sequence
  ENSG00000013392_12 (sequence is synthesized)
atgaattgagaaatatgaatagcatttgtttcacattgctagcacacatgtgacacacccacttgtctttcattattggaaatctaaatcaagtttaaaatgagaacaggaaggacatgt

SEQ ID NO: 15886 - DNA, 87 bp, Artificial Sequence
  ENSG00000013392_13 (sequence is synthesized)
aatctaaatcaagtttaaaatgagaacaggaaggacatgtttacttccttttttgagacggtgcgatctcggctcactgcatcctca

SEQ ID NO: 15887 - DNA, 120 bp, Artificial Sequence
  ENSG00000013392_14 (sequence is synthesized)
atttcgagtgttttagtaaaactagatcctaatagcagtggcaaaggactcatagacatgaagtcccacgagttaaaagatgacacacaatgctatgtgttctggctgtttatatcagtt

SEQ ID NO: 15888 - DNA, 120 bp, Artificial Sequence
  ENSG00000013392_15 (sequence is synthesized)
catgatactagcaatcctgataccagtattagtttaattcttatccagaaaagataaacacatggttccttgtctacaaagtattcgcctgtttcaatccaacctttgcctgtgtgccag

SEQ ID NO: 15889 - DNA, 120 bp, Artificial Sequence
  ENSG00000013392_16 (sequence is synthesized)
tatgcattactataaagggcaagagactgttgaggggaccagtgtggatatctgcatcattaccttattgggaaaaaaaaaatctaattctacagtccgatgatgttactgccatctcct

SEQ ID NO: 15890 - DNA, 120 bp, Artificial Sequence
  ENSG00000013392_17 (sequence is synthesized)
ctgaaaattccaagctccacaggcttcaccaggcttttcaaaatgagagtttattttaatgattaaaaaccgctatttaagtagctcttgccaagccttttcattaccaggtctccatcc

SEQ ID NO: 15891 - DNA, 120 bp, Artificial Sequence
  ENSG00000013392_18 (sequence is synthesized)
ctccccaagtatttctgcgagtctcatgtgctaagagatgtcttgagcagcctctgcagctttccgtgtttctgtggtcagctactgctgccctttcccgggaggcattccattctccta

SEQ ID NO: 15892 - DNA, 120 bp, Artificial Sequence
  ENSG00000013392_19 (sequence is synthesized)
ctgggtcctctcaagatgccaaagcttggtgctgggatttaggaacacatcctgttagatgtcagacagtgctgcttgtgctggggagcctacagaacttctgatgaaactaccatctgg

SEQ ID NO: 15893 - DNA, 120 bp, Artificial Sequence
  ENSG00000013392_20 (sequence is synthesized)
ttttaccctctgtgccgtggatgcagacgtgtccttgggctacagagaggacatgatggagcaggaggccctatcccaaggaggtgttagaactgggtccactttgtactgcctctttct

SEQ ID NO: 15894 - DNA, 120 bp, Artificial Sequence
  ENSG00000013392_21 (sequence is synthesized)
tcttaggtcacaatgagtgtcctctcagggcacaactcagatcttcaacccatggctcgctgtaggcctgccccgccaggtcctccagcttgccattcatgtttccatcctagccttggt

SEQ ID NO: 15895 - DNA, 120 bp, Artificial Sequence
  ENSG00000013392_22 (sequence is synthesized)
tgtgctggaactcaggctggagcctgacactttgcctatatgcaaagggaagaaataggacttacattgccaaggaatcacttcttaatgtttgccagcactaaaaacaacaaagtatag

SEQ ID NO: 15896 - DNA, 120 bp, Artificial Sequence
  ENSG00000013392_23 (sequence is synthesized)
gaatctttttcccccacagtctccacaaagctatcaataagtataattcgcatttacaagttttaggccttcaacagatgtaactccatccaaatgaatcaatatgtgccatcaacctac

SEQ ID NO: 15897 - DNA, 120 bp, Artificial Sequence
  ENSG00000013392_24 (sequence is synthesized)
cttatagaggtgtttttcctgattacatgagcaaaagtagctacagaaagatgggtgtaaagaaaaggcaataaattctaggttatgaactctactgcttctggagctatttctgagatt

SEQ ID NO: 15898 - DNA, 120 bp, Artificial Sequence
  ENSG00000013392_25 (sequence is synthesized)
tttcagaacctacttttttataaataagtctaatttgagcattctgcaatactttttttcctatcaggaaaactaatgcagatagtattatggggacgtgtaggttttatagaaaaaaaa

SEQ ID NO: 15899 - DNA, 120 bp, Artificial Sequence
  ENSG00000013392_26 (sequence is synthesized)
agtacatgtataattcaaaactcaactttgtatgtataggagtctgctggttgtttgcacagcctgatatgagcacataataaaagtccgtcattccccaaccccctccccctacacaca

SEQ ID NO: 15900 - DNA, 120 bp, Artificial Sequence
  ENSG00000013392_27 (sequence is synthesized)
cagcttattttgggaaactgccccttccctgtgtgatttgggaagagaaagtgataggaatcaagttgtcctctggcagcctcctggagagatggctgtgagctcttgctgcttaaacct

SEQ ID NO: 15901 - DNA, 120 bp, Artificial Sequence
  ENSG00000013392_28 (sequence is synthesized)
ctagtgccaccctcatttctgacctactgaatgctcagctgtttggcatttcctttgaatgacccagcatcttcccttttgttgtcggaaatcagaatcagtctctattgcttgtaactt

SEQ ID NO: 15902 - DNA, 120 bp, Artificial Sequence
  ENSG00000013392_29 (sequence is synthesized)
aagaatctggatattctgtttattatattcttaaatggttatttggaaaatgtgctcatttataaaagttacagtgtctttttaaagtttgctgaagtaaatgaagcatatcgtcaagta

SEQ ID NO: 15903 - DNA, 120 bp, Artificial Sequence
  ENSG00000013441_0 (sequence is synthesized)
attttgttgttggtgcgcgacgcagtcagctgcgtgattcccgtgattgcgttacaagctttgtctccttcgacttggagtctttgtccaggacgatgagacactcaaagagaacttact

SEQ ID NO: 15904 - DNA, 120 bp, Artificial Sequence
  ENSG00000013441_1 (sequence is synthesized)
gtcctgattgggatgacaaggattgggattatggaaaatggaggagcagcagcagtcataaaagaaggaagagatcacatagcagtgcccaggagaacaagcgctgcaaatacaatcact

SEQ ID NO: 15905 - DNA, 120 bp, Artificial Sequence
  ENSG00000013441_2 (sequence is synthesized)
ctaaaatgtgtgatagccattatttggaaagcaggtctataaatgagaaagattatcatagtcgacgctacattgatgagtacagaaatgactacactcaaggatgtgaacctggacatc

SEQ ID NO: 15906 - DNA, 120 bp, Artificial Sequence
  ENSG00000013441_3 (sequence is synthesized)
gccaaagagaccatgaaagccggtatcagaaccatagtagcaagtcttctggtagaagtggaagaagtagttataaaagcaaacacaggattcaccacagtacttcacatcgtcgttcac

SEQ ID NO: 15907 - DNA, 120 bp, Artificial Sequence
  ENSG00000013441_4 (sequence is synthesized)
atgggaagagtcaccgaaggaaaagaaccaggagtgtagaggatgatgaggagggtcacctgatctgtcagagtggagacgtactaagtgcaagatatgaaattgttgatactttaggtg

SEQ ID NO: 15908 - DNA, 120 bp, Artificial Sequence
  ENSG00000013441_5 (sequence is synthesized)
aaggagcttttggaaaagttgtggagtgcatcgatcataaagcgggaggtagacatgtagcagtaaaaatagttaaaaatgtggatagatactgtgaagctgctcgctcagaaatacaag

SEQ ID NO: 15909 - DNA, 120 bp, Artificial Sequence
  ENSG00000013441_6 (sequence is synthesized)
ttctggaacatctgaatacaacagaccccaacagtactttccgctgtgtccagatgttggaatggtttgagcatcatggtcacatttgcattgtttttgaactattgggacttagtactt

SEQ ID NO: 15910 - DNA, 120 bp, Artificial Sequence
  ENSG00000013441_7 (sequence is synthesized)
atcagaaagatggcatatcagatatgcaagtctgtgaattttttgcacagtaataagttgactcacacagacttaaagcctgaaaacatcttatttgtgcagtctgactacacagaggcg

SEQ ID NO: 15911 - DNA, 120 bp, Artificial Sequence
  ENSG00000013441_8 (sequence is synthesized)
tataatcccaaaataaaacgtgatgaacgcaccttaataaatccagatattaaagttgtagactttggtagtgcaacatatgatgacgaacatcacagtacattggtatctacaagacat

SEQ ID NO: 15912 - DNA, 120 bp, Artificial Sequence
  ENSG00000013441_9 (sequence is synthesized)
tatagagcacctgaagttattttagccctagggtggtcccaaccatgtgatgtctggagcataggatgcattcttattgaatactatcttgggtttaccgtatttccaacacacgatagt

SEQ ID NO: 15913 - DNA, 120 bp, Artificial Sequence
  ENSG00000013441_10 (sequence is synthesized)
aaggagcatttagcaatgatggaaaggattcttggacctctaccaaaacatatgatacagaaaaccaggaaacgtaaatattttcaccacgatcgattagactgggatgaacacagttct

SEQ ID NO: 15914 - DNA, 120 bp, Artificial Sequence
  ENSG00000013441_11 (sequence is synthesized)
gccggcagatatgtttcaagacgctgtaaacctctgaaggaatttatgctttctcaagatgttgaacatgagcgtctctttgacctcattcagaaaatgttggagtatgatccagccaaa

SEQ ID NO: 15915 - DNA, 120 bp, Artificial Sequence
  ENSG00000013441_12 (sequence is synthesized)
agaattactctcagagaagccttaaagcatcctttctttgaccttctgaagaaaagtatatagatctgtaattggacagctctctcgaagagatcttacagactgtatcagtctaatttt

SEQ ID NO: 15916 - DNA, 120 bp, Artificial Sequence
  ENSG00000013441_13 (sequence is synthesized)
taaattttaagttattttgtacagctttgtaaattcttaacatttttatattgccatgtttattttgtttgggtaatttggttcattaagtacatagctaaggtaatgaacatctttttc

SEQ ID NO: 15917 - DNA, 120 bp, Artificial Sequence
  ENSG00000013441_14 (sequence is synthesized)
agtaattgtaaagtgatttattcagaataaattttttgtgcttatgaagttgatatgtatctgaacagtttgttctaagtaccatttttcttcctacttctattaaagaatggacataga

SEQ ID NO: 15918 - DNA, 120 bp, Artificial Sequence
  ENSG00000013441_15 (sequence is synthesized)
tacagtttgaagacagtaatacctggaattgagcatcatgtctgtcattcttaaatttgcatgcatctttctaacaggggaggtagacatgtagcagtaaaaatagttaaaaatgtggat

SEQ ID NO: 15919 - DNA, 120 bp, Artificial Sequence
  ENSG00000013441_16 (sequence is synthesized)
agaaagttttaagatgaaatcatctcagttttaacctgcaggattttttctgtgtttgtgcattggataggaaattccggaaataaagtacacatttagttctataatttaattattggt

SEQ ID NO: 15920 - DNA, 120 bp, Artificial Sequence
  ENSG00000013441_17 (sequence is synthesized)
tggctcctaattgacattccagtgaaatgatgggagttaattgatttaatttagattagttgaaaattattacaaaatattctaaaagggttttttgtggtacttcaagaaacctgatta

SEQ ID NO: 15921 - DNA, 120 bp, Artificial Sequence
  ENSG00000013441_18 (sequence is synthesized)
gttttgatctattgaaatcacaaaagtagaacagggcattttatttttgtataatttaggattaggtatgcttctttgttctaacaagtcatgttttctaacccttctttcactaagcaa

SEQ ID NO: 15922 - DNA, 120 bp, Artificial Sequence
  ENSG00000013441_19 (sequence is synthesized)
accagaacagatttgaactgttatgggttatatattagtatggagatcagctcagatgacattaaaaatgccgtagtgttattcttgtatgccaaatctttttttccccaaaattagcac

SEQ ID NO: 15923 - DNA, 120 bp, Artificial Sequence
  ENSG00000013441_20 (sequence is synthesized)
tttaattttatttactgttataatatttgttttcttagattaggtaggaaatcttaatttggccaccgcctactttgacaagtaaatattacatcatacgattttgcaacattaaattag

SEQ ID NO: 15924 - DNA, 120 bp, Artificial Sequence
  ENSG00000013441_21 (sequence is synthesized)
aacactagaaactaaaaaattatgtttcagtgaatgctacaactaagcattttttttttttaagaaaaacaattgtattatgttttgttgccttgccactttgagtatcttatctgaaaa

SEQ ID NO: 15925 - DNA, 120 bp, Artificial Sequence
  ENSG00000013441_22 (sequence is synthesized)
tctgttccttgccatgtttttctcctgttaacataaactatgtgccctgtgaatttctggggactgaatttgaaattgctcctgccaaccgtttgtggcctggcgtgtatctgaatgcct

SEQ ID NO: 15926 - DNA, 120 bp, Artificial Sequence
  ENSG00000013441_23 (sequence is synthesized)
gaatatctccccgctgaatgaatttcgtattctgccctgaattcactcgggtatattgattggctggatgatcttggtgccgcccacttgacgtttccagaagagtcaccgaaggaaaag

SEQ ID NO: 15927 - DNA, 120 bp, Artificial Sequence
  ENSG00000013441_24 (sequence is synthesized)
aagtgcaagatgtatagaatatttttcaacacttattaacttttcagataacataatctatatatagattaagctttcagggatttggaaatctttttttctttctcttttttgtttttg

SEQ ID NO: 15928 - DNA, 120 bp, Artificial Sequence
  ENSG00000013441_25 (sequence is synthesized)
gggattgtatttttgctttctttagaaatgtaatgtttgttatatagaacttccagaacagtaatcaaattaatgaaattagacctaataattatgttttttgatggtgttgaccaataa

SEQ ID NO: 15929 - DNA, 120 bp, Artificial Sequence
  ENSG00000013441_26 (sequence is synthesized)
aatatctagtgataaggaaatttgtagcatcaactagaataatctacattgatagcatttattgtgataagtacattgtttccacttcttgatatgactgagatttatttctctctttta

SEQ ID NO: 15930 - DNA, 120 bp, Artificial Sequence
  ENSG00000013441_27 (sequence is synthesized)
ctaattcatatttctttcataattgttttatttaaaacatctttcagtatataagcaattatccgtgtccatgtagggaatcattggcgagtttgttctgcaagccttaatgttagtttt

SEQ ID NO: 15931 - DNA, 120 bp, Artificial Sequence
  ENSG00000013441_28 (sequence is synthesized)
atttgctggttttatccattccacatatcaaaatgtgcatcctaagtgtgtacaatttttatttgattaaaaataaagggggaggaagaataggtatgaagagatttgattacaggctgt

SEQ ID NO: 15932 - DNA, 120 bp, Artificial Sequence
  ENSG00000013441_29 (sequence is synthesized)
tgatccagcagtgtacatttcattcagcaagtaggatatccaccatataacaacgtactttgttgcagactatgatttagacttttctgatgcgcaaaaatagtaacttcgaatgctggg

SEQ ID NO: 15933 - DNA, 120 bp, Artificial Sequence
  ENSG00000013441_30 (sequence is synthesized)
taaaaattaaggcgtgatatatctcataaaagaaagcttcataagaggtagtaagttttagttactggtgattttctagcagactggaatgttgaccattctttgggaaaggaatcagag

SEQ ID NO: 15934 - DNA, 120 bp, Artificial Sequence
  ENSG00000013441_31 (sequence is synthesized)
agaggttttttgttgggtttttttgttttttgaaatggagtctcgctttgttgttcaggctgaagtgcagtggcgcagtcttcactcactgcaaactctgcctccccagttcaagtgatt

SEQ ID NO: 15935 - DNA, 120 bp, Artificial Sequence
  ENSG00000013441_32 (sequence is synthesized)
caggcgtgagccactgcacccggcctgttgtggggttttgtgatttggtttggtttggtgttttctgattacagcaactttctctttattctcagttttgcacagtaataagttgactca

SEQ ID NO: 15936 - DNA, 120 bp, Artificial Sequence
  ENSG00000013441_33 (sequence is synthesized)
gtgaaccgcctcggcggagctgtaagatggcggctgggcggaggccggcttcggccctgtggccggaaaggcgaggctccccgttgaggggggatttgctggggttccagaatgtgcgtg

SEQ ID NO: 15937 - DNA, 120 bp, Artificial Sequence
  ENSG00000013441_34 (sequence is synthesized)
aagacgcaggagggagcggactaggtgacagggccgttcctgtgagcctcgcgggcgcctggcgatgcccccttttcctgcttgtttgctgcccgccgtccccggcgcgacgactgcctg

SEQ ID NO: 15938 - DNA, 120 bp, Artificial Sequence
  ENSG00000013441_35 (sequence is synthesized)
ctcccttcactcccaggctgcacagtggcggcgcgcccctctttcctgcgcggccgagcctgtcgccgccggatccggcctgcgggggtagttacggtgtttgctaggccggccgccctc

SEQ ID NO: 15939 - DNA, 120 bp, Artificial Sequence
  ENSG00000013441_36 (sequence is synthesized)
tacttaaaatgtctgaatataacaatacattactagacaaaactagtatcacttaaaataagtacctgattactaccattcgtttgtttccaatgagagattttgatggtttgtaatgtt

SEQ ID NO: 15940 - DNA, 120 bp, Artificial Sequence
  ENSG00000013441_37 (sequence is synthesized)
aaagcaggtaacatttctatcccatggctgccatttaaatctctagaaaagtgatctgggaaagcatagtaattgatacctttgctagctgttttaagttttcagtgttataaacatgaa

SEQ ID NO: 15941 - DNA, 120 bp, Artificial Sequence
  ENSG00000013503_0 (sequence is synthesized)
gtctctagctaacacgcacggcggggacagtttaggcctccgcgcaccgttcgccgggagtcttgcagtttgcttggtgcagggaaggcgggcgcggaggttctatctgtttcttcctcc

SEQ ID NO: 15942 - DNA, 120 bp, Artificial Sequence
  ENSG00000013503_1 (sequence is synthesized)
ttcgtgagcagcatggacgtgctagcggaggagtttgggaacctgactccggagcagctggcggcgccgatcccgactgtagaggaaaaatggaggctgcttccagcatttttaaaggtg

SEQ ID NO: 15943 - DNA, 120 bp, Artificial Sequence
  ENSG00000013503_2 (sequence is synthesized)
aaaggccttgtgaaacagcatatagattcatttaactatttcattaatgtagagataaagaagataatgaaagccaatgaaaaggttacaagtgacgctgaccctatgtggtacttaaaa

SEQ ID NO: 15944 - DNA, 120 bp, Artificial Sequence
  ENSG00000013503_3 (sequence is synthesized)
tatcttaatatctatgttgggcttcctgatgttgaagaaagcttcaatgtaactagaccagtgtcccctcatgagtgccgtttgagagacatgacatactctgcccctattacagtggat

SEQ ID NO: 15945 - DNA, 120 bp, Artificial Sequence
  ENSG00000013503_4 (sequence is synthesized)
attgaatatacccgaggcagccagaggatcatccgcaatgccttacctatcggcagaatgcccataatgctacgtagttcaaactgtgttcttacaggaaaaacgccagcagaatttgcc

SEQ ID NO: 15946 - DNA, 120 bp, Artificial Sequence
  ENSG00000013503_5 (sequence is synthesized)
aaactgaacgaatgtcccttagatccaggtggctacttcattgttaaaggagtagaaaaagttattcttatccaagagcagctgtctaagaacaggatcatcgtggaggctgatagaaaa

SEQ ID NO: 15947 - DNA, 120 bp, Artificial Sequence
  ENSG00000013503_6 (sequence is synthesized)
ggggctgttggagcttcagttaccagctctacccatgagaaaaaaagcagaaccaatatggctgtgaaacaaggacgattttatttgaggcataatactttgtcagaagatatacccatt

SEQ ID NO: 15948 - DNA, 120 bp, Artificial Sequence
  ENSG00000013503_7 (sequence is synthesized)
gtcatcatatttaaggccatgggtgttgagagtgaccaggaaattgtgcagatgattggaacagaggagcacgtgatggctgcatttgggcccagtctggaagagtgccagaaagctcag

SEQ ID NO: 15949 - DNA, 120 bp, Artificial Sequence
  ENSG00000013503_8 (sequence is synthesized)
attttcacacagatgcaggcattaaaatatatagggaacaaagtaagaaggcaaaggatgtggggaggtggaccaaagaaaaccaaaatagaagaagcaagagagctcctggcttccacc

SEQ ID NO: 15950 - DNA, 120 bp, Artificial Sequence
  ENSG00000013503_9 (sequence is synthesized)
attctgacccatgtcccagttaaggaattcaatttccgagccaaatgtatctatactgcagtgatggtgcgaagagttattctggcccaaggagataataaagttgacgacagagattat

SEQ ID NO: 15951 - DNA, 120 bp, Artificial Sequence
  ENSG00000013503_10 (sequence is synthesized)
tatggtaacaagcgactggaattggcaggacagcttttatctcttctttttgaagacttgttcaaaaaatttaattctgaaatgaaaaagattgccgaccaggtgattcctaagcaaaga

SEQ ID NO: 15952 - DNA, 120 bp, Artificial Sequence
  ENSG00000013503_11 (sequence is synthesized)
gcagcccagtttgatgttgtcaaacacatgcgccaagaccagatcaccaatggcatggtgaatgctatttctaccggaaattggtctttaaagagatttaaaatggaccgccagggtgta

SEQ ID NO: 15953 - DNA, 120 bp, Artificial Sequence
  ENSG00000013503_12 (sequence is synthesized)
acccaagtgctgtctcgcttgtcatatatatccgcactgggcatgatgacaagaatctcttcccagtttgaaaaaacgagaaaagtgagtggtcctcgctccctccagccatctcagtgg

SEQ ID NO: 15954 - DNA, 120 bp, Artificial Sequence
  ENSG00000013503_13 (sequence is synthesized)
ggaatgctgtgtccttcggacactcctgaaggagaggcatgtggtttggttaaaaacttggcccttatgacacacatcacaactgatatggaagatggacccattgttaaattagccagt

SEQ ID NO: 15955 - DNA, 120 bp, Artificial Sequence
  ENSG00000013503_14 (sequence is synthesized)
aacttgggagtagaagatgtgaatttattatgtggggaagagctctcttacccaaatgtgtttcttgtctttcttaatggtaacatcttaggtgtcattcgagaccacaaaaagctagtg

SEQ ID NO: 15956 - DNA, 120 bp, Artificial Sequence
  ENSG00000013503_15 (sequence is synthesized)
aatacatttcgactcatgagaagagcaggatatatcaatgaatttgtttccatctcaacaaatcttacagatcgatgtgtctatatttcttctgatgggggaaggctatgcagaccctac

SEQ ID NO: 15957 - DNA, 120 bp, Artificial Sequence
  ENSG00000013503_16 (sequence is synthesized)
ataattgtcaagaaacagaagccagcagtcacaaataaacatatggaagagctggcccaagggtacaggaattttgaagatttcttacatgagagtctggttgaatatttagatgtgaat

SEQ ID NO: 15958 - DNA, 120 bp, Artificial Sequence
  ENSG00000013503_17 (sequence is synthesized)
ttatcccataccctcaccataaccagtcaccgagaaacacttatcagtgtgccatggggaaacaagccatgggtactataggatacaaccagcgaaacagaattgatactctcatgtatc

SEQ ID NO: 15959 - DNA, 120 bp, Artificial Sequence
  ENSG00000013503_18 (sequence is synthesized)
tactagcatatccacaaaaacccatggttaagacaaaaaccattgaattgatagaatttgagaaactgccagctggacagaatgcaacagttgctgtgatgagctatagtggctatgata

SEQ ID NO: 15960 - DNA, 120 bp, Artificial Sequence
  ENSG00000013503_19 (sequence is synthesized)
ttgaagatgctcttgttttaaacaaggcctctttagacagaggctttgggcgttgccttgtatataaaaatgctaaatgtacgttgaaacgatacaccaatcagacttttgataaagtga

SEQ ID NO: 15961 - DNA, 120 bp, Artificial Sequence
  ENSG00000013503_20 (sequence is synthesized)
tggggcccatgttggatgctgctacaaggaaacctatctggcgacatgaaatcttagatgcagatggtatttgttctccaggtgagaaagtagaaaacaaacaagtgcttgtaaataagt

SEQ ID NO: 15962 - DNA, 120 bp, Artificial Sequence
  ENSG00000013503_21 (sequence is synthesized)
ccatgcccacagtgactcagattcctttggaaggaagtaatgtaccacagcaaccacagtacaaagatgtacccataacctacaaaggagcaacagactcatatattgaaaaagtgatga

SEQ ID NO: 15963 - DNA, 120 bp, Artificial Sequence
  ENSG00000013503_22 (sequence is synthesized)
tatcttcaaatgctgaagatgcttttctgatcaaaatgctgctgagacagacaaggcgtccagaaattggagacaaattcagcagtcgtcatgggcaaaaaggtgtttgtggcttgatcg

SEQ ID NO: 15964 - DNA, 120 bp, Artificial Sequence
  ENSG00000013503_23 (sequence is synthesized)
tcccccaggaagacatgccattttgtgattctggcatctgtccggacatcatcatgaacccacacggcttcccatcacgaatgacggtggggaagctcattgagctgctggctggcaagg

SEQ ID NO: 15965 - DNA, 120 bp, Artificial Sequence
  ENSG00000013503_24 (sequence is synthesized)
ccggtgtgctggacggcagattccactacggcactgcgtttggaggcagtaaagtgaaggatgtgtgtgaggacctcgttcgccatggttataactacttggggaaagactatgttacat

SEQ ID NO: 15966 - DNA, 120 bp, Artificial Sequence
  ENSG00000013503_25 (sequence is synthesized)
ccggcatcacaggtgagcccttagaagcatacatctattttggccccgtgtactatcagaagctgaaacacatggtgctagataaaatgcatgcccgggcccggggcccacgagccgtcc

SEQ ID NO: 15967 - DNA, 120 bp, Artificial Sequence
  ENSG00000013503_26 (sequence is synthesized)
ttaccaggcaacccactgaaggacggtctcgtgatggtggcttgcgtctcggggaaatggaacgtgactgtttaatcggttatggagccagtatgcttttgctagagagactaatgattt

SEQ ID NO: 15968 - DNA, 120 bp, Artificial Sequence
  ENSG00000013503_27 (sequence is synthesized)
caagtgatgcctttgaggttgatgtctgtgggcagtgtggacttctggggtattctggctggtgccattactgcaagtcatcctgccacgtgtcttccctccgtattccgtatgcctgca

SEQ ID NO: 15969 - DNA, 120 bp, Artificial Sequence
  ENSG00000013503_28 (sequence is synthesized)
agctgctcttccaggaactacagtctatgaacatcatccccaggttaaaactgtccaagtacaatgaatgaggatggaaaaaatgattattaaagagaacaagtgatacatccaatgcaa

SEQ ID NO: 15970 - DNA, 120 bp, Artificial Sequence
  ENSG00000013503_29 (sequence is synthesized)
cggaaagcagaagggatttaggactacgtctcctcctgtgaagaattcccttgcgtattctctctctaaaacaaccaaaaaaaaatggagaggctttttatatactctaagactggctaa

SEQ ID NO: 15971 - DNA, 120 bp, Artificial Sequence
  ENSG00000013503_30 (sequence is synthesized)
acaaccttgatcattgagcctcgagccatgggagagatgctgaccatgtggactgcaaggctgcttgattcacagatggatgtgacctaaaggataaataagctattacttatgtgctga

SEQ ID NO: 15972 - DNA, 120 bp, Artificial Sequence
  ENSG00000013503_31 (sequence is synthesized)
tctcttgacattcactcattagaagaccttactccttcaagcaaatgtttggggtcaaatttaccatatcttctggctaaccatattcaagattcttctgaaacttggaggatgtaaaga

SEQ ID NO: 15973 - DNA, 120 bp, Artificial Sequence
  ENSG00000013503_32 (sequence is synthesized)
atccatttgatttggtcagcctggcttttgtcgtggtggctggctcggataaattttcccaacaattaaatcttgcctttacacacccaaactttgtaattttagtcttggtgaaatata

SEQ ID NO: 15974 - DNA, 120 bp, Artificial Sequence
  ENSG00000013503_33 (sequence is synthesized)
atgaatttgttcctaccttgtcaagcaagaatgtcgtcttctcctatggactcaattgctattattttaaacctgcatgattgtaccatgcaatactattcgttaaatatctgaatctaa

SEQ ID NO: 15975 - DNA, 120 bp, Artificial Sequence
  ENSG00000013503_34 (sequence is synthesized)
agatagcagctgaggtttgagtcatctggaagctcacctgggctggacattcaagatggcatcttcactcatatctctggcccctccttgattttccatttcattgggattttactaaat

SEQ ID NO: 15976 - DNA, 120 bp, Artificial Sequence
  ENSG00000013503_35 (sequence is synthesized)
gaaatgtagcctctctctctgtgcaacagagcgttctggactttagtgtctcaggactctaagagaaaggaagaggaaactgccagttgacttaaagattaattctggaattggctggta

SEQ ID NO: 15977 - DNA, 120 bp, Artificial Sequence
  ENSG00000013503_36 (sequence is synthesized)
agagcgtcgcgcttgcgagtcttttttccagagccggcctccgcgtgcgcgagtgaaggctgatcccagaggagctgtcagccgctgcgggggccgagaagccccgctgctggctctagg

SEQ ID NO: 15978 - DNA, 120 bp, Artificial Sequence
  ENSG00000013523_0 (sequence is synthesized)
gagggaggacctgctggctgcagtgaggagcggaggcgggcgcgggcggccggccatgatcgcgtcgtgcttgtgttacctgctgctgccggccacgcgcctcttccgcgccctctcaga

SEQ ID NO: 15979 - DNA, 120 bp, Artificial Sequence
  ENSG00000013523_1 (sequence is synthesized)
tgctttcttcacatgtcgaaaaaatgtccttctggcgaacagctcatccccccaggtagagggcgactttgccatggcccctcggggccctgagcaggaggaatgtgagggcctgctgca

SEQ ID NO: 15980 - DNA, 120 bp, Artificial Sequence
  ENSG00000013523_2 (sequence is synthesized)
gcagtggcgagaagaagggttgagccaggtgctctcaactgcaagtgaggggccccttatagataaaggactagcccagagcagcctggcacttctgatggataatcctggagaagagaa

SEQ ID NO: 15981 - DNA, 120 bp, Artificial Sequence
  ENSG00000013523_3 (sequence is synthesized)
tgctgcttcagaggacaggtggtccagcaggcagctgagtgaccttcgggctgcagagaacctggatgagcctttccctgagatgctaggagaggagccactgctggaggtggagggggt

SEQ ID NO: 15982 - DNA, 120 bp, Artificial Sequence
  ENSG00000013523_4 (sequence is synthesized)
ggagggctccatgtgggcagctatccccatgcagtcggagccccagtatgcagactgtgctgccctcccagtgggtgccctggccacagagcagtgggaagaggacccagcggtgttggc

SEQ ID NO: 15983 - DNA, 120 bp, Artificial Sequence
  ENSG00000013523_5 (sequence is synthesized)
ctggagcatagcacctgagcctgtgccccaggaagaggcttccatctggccctttgagggcctggggcagttgcagcctcccgcagtggaaataccatatcatgaaattttgtggcgaga

SEQ ID NO: 15984 - DNA, 120 bp, Artificial Sequence
  ENSG00000013523_6 (sequence is synthesized)
atgggaggatttctccacccagccagatgctcagggcctgaaggcaggagatggccctcagttccagttcactctgatgtcttataacatcctggctcaggacctgatgcagcagagctc

SEQ ID NO: 15985 - DNA, 120 bp, Artificial Sequence
  ENSG00000013523_7 (sequence is synthesized)
agagctctatctacattgccatccagacatcctcaattggaactatcgcttcgtgaacctcatgcaggaattccagcactgggaccctgatatcctgtgtctccaggaagtccaggaaga

SEQ ID NO: 15986 - DNA, 120 bp, Artificial Sequence
  ENSG00000013523_8 (sequence is synthesized)
tcattactgggagcagctggaaccctctctgcgaatgatgggctttacctgtttctacaagaggaggactgggtgtaaaaccgatggctgtgctgtctgctacaagcctaccagattccg

SEQ ID NO: 15987 - DNA, 120 bp, Artificial Sequence
  ENSG00000013523_9 (sequence is synthesized)
cctgctctgtgctagccctgtggagtacttccggcctggcttggagctacttaatcgggataatgtgggcttagtgttgctactgcaaccactcgtcccagaaggcctgggacaagtctc

SEQ ID NO: 15988 - DNA, 120 bp, Artificial Sequence
  ENSG00000013523_10 (sequence is synthesized)
ggtggccccgctgtgtgtggcaaatacccatatcctttacaacccacgccggggcgatgtcaagctggcccagatggccattctcctggcggaagtggacaaggtggccagactgtcaga

SEQ ID NO: 15989 - DNA, 120 bp, Artificial Sequence
  ENSG00000013523_11 (sequence is synthesized)
tggcagccactgccccatcatcttgtgcggggacctaaattctgtccctgattcacctctctacaacttcatcagggatggagagctccagtaccatgggatgccagcctggaaggtatc

SEQ ID NO: 15990 - DNA, 120 bp, Artificial Sequence
  ENSG00000013523_12 (sequence is synthesized)
tggacaggaagacttctcccatcagctttaccagaggaagctgcaggccccactgtggcccagctccctgggcatcactgattgctgtcagtatgtcacctcctgtcaccccaagagatc

SEQ ID NO: 15991 - DNA, 120 bp, Artificial Sequence
  ENSG00000013523_13 (sequence is synthesized)
agagagacgcaagtatggccgagacttcctgctacgtttccgcttctgcagcatcgcttgtcagcgaccagtaggactggtccttatggaaggagtgacagatactaagccagagcgacc

SEQ ID NO: 15992 - DNA, 120 bp, Artificial Sequence
  ENSG00000013523_14 (sequence is synthesized)
tgcgggttgggctgagtctgtccttgaggaagatgcatcggagcttgagcctgccttctccaggactgtaggtaccatccagcactgcctccacctgacgtcagtatatacccacttcct

SEQ ID NO: 15993 - DNA, 120 bp, Artificial Sequence
  ENSG00000013523_15 (sequence is synthesized)
gccccagcgtggccgcccagaggtcactacaatgccattgggtcttggaatgacagtagattacatcttcttctcagctgagtcctgtgagaatgggaacagaactgatcacaggctgta

SEQ ID NO: 15994 - DNA, 120 bp, Artificial Sequence
  ENSG00000013523_16 (sequence is synthesized)
tcgagatggaactctcaagctcctgggtcgtctctcccttctctctgaagagatactctgggctgccaatggcttacccaaccccttctgctcttcagaccacctctgcctgctagccag

SEQ ID NO: 15995 - DNA, 120 bp, Artificial Sequence
  ENSG00000013523_17 (sequence is synthesized)
cttcgggatggaagtcaccgccccatgacagggctcccaggggaagagagcttctcttccagaagagctcactggatcagagactgtggaaaaatcccatgcatctagaaacttagatcc

SEQ ID NO: 15996 - DNA, 120 bp, Artificial Sequence
  ENSG00000013523_18 (sequence is synthesized)
aagaaacttacatcccctcccttccccctcctcgttccctttttcccacggttagactttctccaggcctggctgcgttctctgcctgtggtccttgccccaccccagcctcttcctaat

SEQ ID NO: 15997 - DNA, 120 bp, Artificial Sequence
  ENSG00000013523_19 (sequence is synthesized)
cctgtgccacacactcagtggccctgggagaggcagaaggggggctcccccttccttccatgtatccagcgctcccccttgatttttaattaccagggttatgggagttcttgatttcat

SEQ ID NO: 15998 - DNA, 120 bp, Artificial Sequence
  ENSG00000013523_20 (sequence is synthesized)
tggttatttgctttcaggccgtttcttgatgtaccttctgacctgaccttttccctgccttcaggacttctgggcccagccctcttgccaggcatgcatatgtgagatatgcatatcatg

SEQ ID NO: 15999 - DNA, 120 bp, Artificial Sequence
  ENSG00000013523_21 (sequence is synthesized)
ggttcagagtctacccaagtacctatgtatgagcaggcagcagcagggcatggccccatctctccttttagcctctgtgtttcattaggcattcatcctgccaaccagggcaggcccggc

SEQ ID NO: 16000 - DNA, 120 bp, Artificial Sequence
  ENSG00000013523_22 (sequence is synthesized)
gtctgggctctgggaacaaatggggcccacatcctggagtggcaaattttgggggatgcgctacctgtcccagctggccctgtgcctccaacccagagctccccacagacctggtgtaat

SEQ ID NO: 16001 - DNA, 120 bp, Artificial Sequence
  ENSG00000013523_23 (sequence is synthesized)
ttcacaagggccatccctttccccaggcttccctgagggaggcggaagtttgaacccttatgtggggttcattgggctagggtagtggtatgaggtttaaaactatttaaggattaggag

SEQ ID NO: 16002 - DNA, 120 bp, Artificial Sequence
  ENSG00000013523_24 (sequence is synthesized)
gagaaagagtcttcaggaaactcttgtttcactggactctgcagcctgcagaactggggcaagggtaggagttccagtaggggaaggagcaggtagactcttcagctgcctcagctggga

SEQ ID NO: 16003 - DNA, 120 bp, Artificial Sequence
  ENSG00000013523_25 (sequence is synthesized)
ctgaagacctaagctgattctctttcctctccactcctaagaagcaattttctgttcctctccttccaccactttttactttctgctatctcccatctcccgcttcccttccatttcctt

SEQ ID NO: 16004 - DNA, 120 bp, Artificial Sequence
  ENSG00000013523_26 (sequence is synthesized)
tctagaaaaccctggtatttagctcaggccaaactgcctcagcagaaaggtggccttggacaaaactggtccaagaatttgaagtggcagtacttgcggattggctctgtccagcaaggc

SEQ ID NO: 16005 - DNA, 120 bp, Artificial Sequence
  ENSG00000013523_27 (sequence is synthesized)
ctcagctgcttgttgcgtctgctttccctcccctaacagaagggtaccctggcttattcaggggactccttagtccacactgtgtcacctgcatgccttaatctttcattgctggggtgt

SEQ ID NO: 16006 - DNA, 120 bp, Artificial Sequence
  ENSG00000013523_28 (sequence is synthesized)
ggccttgggagatcctgggccagcccctccacacatctccctaagtcagagtggctgctggccctggtagatttgacttgctcttgcctcactcgacctccaaagtgggactgaagacag

SEQ ID NO: 16007 - DNA, 120 bp, Artificial Sequence
  ENSG00000013523_29 (sequence is synthesized)
tggtcaagagacttgagttcgggacagtaagccaggggttaaggttctttcctttttttgaaagccaaagacccagtttgcattgtgctgctgcattcatggttagaagctttccatgcc

SEQ ID NO: 16008 - DNA, 120 bp, Artificial Sequence
  ENSG00000013523_30 (sequence is synthesized)
taggttctagggaatttatttttctatgtgtatatattttcaaactttgtttcctgggtactgggcatgtgcctgtctgagccccaggtctgtctacaccccaccattcattctgtctgt

SEQ ID NO: 16009 - DNA, 120 bp, Artificial Sequence
  ENSG00000013523_31 (sequence is synthesized)
ctgttccctggacactgcctaaaagggtctcaagacagtgccctgtgggttcctaggactagggcccatcactgttctcttctgctgggaaatgcagctttaaaatggctaaccacagca

SEQ ID NO: 16010 - DNA, 120 bp, Artificial Sequence
  ENSG00000013523_32 (sequence is synthesized)
gagggcagatgcttgatagattatcttttccttgctttcttgtttctgttttgaaagtgaaatggggttttaaattgttatttaaactctttttccaaataaaggtttaccttttttccc

SEQ ID NO: 16011 - DNA, 120 bp, Artificial Sequence
  ENSG00000013523_33 (sequence is synthesized)
cccaatgttgttcattttattaggatcctgaagggattaggtccttgagagagggcctgaagaatgaggtgggcagaggaagagactaaggagcttttgatcttggggtggggtctcaag

SEQ ID NO: 16012 - DNA, 120 bp, Artificial Sequence
  ENSG00000013523_34 (sequence is synthesized)
acatgaatctagattgagaaatgtgttgtaagatctccctctattagctgaggtaaattcccactgctgtgaggcctgggaggaacagggcttgagtgaagcctcctgccttgacactgc

SEQ ID NO: 16013 - DNA, 120 bp, Artificial Sequence
  ENSG00000013523_35 (sequence is synthesized)
tggggtacagctttcttctgtccttcccaagtgagagaatgattctttggactgcttttcattcttcctccatctgctccccccatgcctcctcctagtatcttctgcacttcaggaggg

SEQ ID NO: 16014 - DNA, 120 bp, Artificial Sequence
  ENSG00000013523_36 (sequence is synthesized)
tctgtgcaaagtgggataagatgtgtgttttcctgattaaagctatggcagctgcatgagacatgatgcgggtggcacatgcctcttgctgagcatctatttctgatctcttttgcattc

SEQ ID NO: 16015 - DNA, 120 bp, Artificial Sequence
  ENSG00000013523_37 (sequence is synthesized)
tggagccagggctgagcagtgggccatctgtcgctggaaaaatgtctcttccttcctaggcctacctctgttggtgcttttgtcttccaacctccctatgtagtaagaccagccaagccc

SEQ ID NO: 16016 - DNA, 120 bp, Artificial Sequence
  ENSG00000013523_38 (sequence is synthesized)
acatgcccactgggagccctgaaaccagatctggttttctgtcttacctgaacaggttcccagaacccacaccaggcctctgaatcagtctctgagaatctgattgatttaaagccactt

SEQ ID NO: 16017 - DNA, 120 bp, Artificial Sequence
  ENSG00000013523_39 (sequence is synthesized)
tgagaatctgattgatttaaagccacttggttgcttccattgcactacctgggttgcgatcccctcaattgatttagtaaaaagaaaacttagcggccgggtgcggtggctcacacctgt

SEQ ID NO: 16018 - DNA, 120 bp, Artificial Sequence
  ENSG00000013523_40 (sequence is synthesized)
tacgttttgtccgttcccaggctgctcattggctttgaccgaggatggtgacgtagatacggtaaagtgctttggtgctttcccatttggtttgaccctgtggttacccagtaataggtt

SEQ ID NO: 16019 - DNA, 120 bp, Artificial Sequence
  ENSG00000013523_41 (sequence is synthesized)
caggatattagaccttgatccagaagatccaaagatgaggataaacctttaaccattgcaacttaaagcccctgagagttgatattccctgtggaggagaattgtattgatttttcagag

SEQ ID NO: 16020 - DNA, 120 bp, Artificial Sequence
  ENSG00000013523_42 (sequence is synthesized)
gtaaaatttagggaaccacatgttcatactattcgattccccttgattcagtctcttacccctcctcctgtttcatggacatttcagtgttgccagtgaaaaagtaatggttttaatttg

SEQ ID NO: 16021 - DNA, 120 bp, Artificial Sequence
  ENSG00000013523_43 (sequence is synthesized)
gtccttatttttaacctgcccctgagacttatatgcttgtttataccatgtacgtagtgtgtgattgtatgtgtttgtatttgtccacatgtcccaaaacatgggctgttacttcctttt

SEQ ID NO: 16022 - DNA, 120 bp, Artificial Sequence
  ENSG00000013523_44 (sequence is synthesized)
catcatcttgtgcggggacctaaattctgtccctgattcacctctctacaacttcatcagggatggagagctccagtaccatgggatgccagcctggaaggctgctcattggctttgacc

SEQ ID NO: 16023 - DNA, 120 bp, Artificial Sequence
  ENSG00000013523_45 (sequence is synthesized)
atgtctactggggccaagcccaggcttggctgtgagtgctcaggtgctgtggggggttcctctcagtggtgttgtatttccctctgagtcaggacccaacccaagccccttaattaggtg

SEQ ID NO: 16024 - DNA, 120 bp, Artificial Sequence
  ENSG00000013523_46 (sequence is synthesized)
actgtgaagagctgccatcatgttcttctcgcaagagagctgtgcttcagcctttcagtgttatgatgtacccagctggtccaggatctggtgactccccagaaggcttccctgaacaac

SEQ ID NO: 16025 - DNA, 120 bp, Artificial Sequence
  ENSG00000013523_47 (sequence is synthesized)
cgtccctcgtgggcggcccctcctcccgcctgttgtcagatggcgtccggccgcggttaaggtggagaggagctgtggacgggcagggccctttcctggccctgggggtgcagagaaatt

SEQ ID NO: 16026 - DNA, 120 bp, Artificial Sequence
  ENSG00000013523_48 (sequence is synthesized)
gtggggtcggccaagtcagcaccccggcgggtcgggaaggggtagtagctcggacctaggcgagtgcccaaattctcagcgggcgaggcgggtcggctctgggaggtttatggccgaagt

SEQ ID NO: 16027 - DNA, 120 bp, Artificial Sequence
  ENSG00000013523_49 (sequence is synthesized)
agtgaggagcggaggcgggcgcgggcggccggccatgatcgcgtcgtgcttgtgttacctgctgctgccggccacgcgcctcttccgcgccctctcagagatgaagtttcgttatgttgc

SEQ ID NO: 16028 - DNA, 120 bp, Artificial Sequence
  ENSG00000013523_50 (sequence is synthesized)
gtctctaactcctggcctcaagtgatcctgctgcctctgtctctgcctcccaaagtgctgggagccaccacgcctggcctcttgtccccattttacagtcaagagtaacttcatctgact

SEQ ID NO: 16029 - DNA, 120 bp, Artificial Sequence
  ENSG00000013561_0 (sequence is synthesized)
aaaaattcgaattctcgggccccatcagaactactgaaaagagcctcctgtgagcacagggctcgcagtaagtgggggtgacggtggtcgcgccggcagcgccgccttgggcctgcggga

SEQ ID NO: 16030 - DNA, 120 bp, Artificial Sequence
  ENSG00000013561_1 (sequence is synthesized)
ggcgcccgagaggcaggggcgaccacggcggctgcgcagagtcctccctatgccggcggtcgcgccagcgggatccgcctggctcagctgacagctcccgagaacggaagaggcggcgcg

SEQ ID NO: 16031 - DNA, 120 bp, Artificial Sequence
  ENSG00000013561_2 (sequence is synthesized)
ccggttgagcagggcgtctctaggcctggtcggctggcggcggtccttatgtcgtcagaagatcgagaagctcaggaggatgaattgctggccctggcaagtatttacgatggagatgaa

SEQ ID NO: 16032 - DNA, 120 bp, Artificial Sequence
  ENSG00000013561_3 (sequence is synthesized)
tttagaaaagcagagtctgtccaaggtggagaaaccaggatctatttggatttgccacagaatttcaagatatttgtgagcggcaattcaaatgagtgtctccagaatagtggctttgaa

SEQ ID NO: 16033 - DNA, 120 bp, Artificial Sequence
  ENSG00000013561_4 (sequence is synthesized)
tacaccatttgctttctgcctccacttgtgctgaactttgaactgccaccagattatccatcctcttccccaccttcattcacacttagtggcaaatggctgtcaccaactcagctatct

SEQ ID NO: 16034 - DNA, 120 bp, Artificial Sequence
  ENSG00000013561_5 (sequence is synthesized)
gctctatgcaagcacttagacaacctatgggaagaacaccgtggcagcgtggtcctgtttgcctggatgcaatttcttaaggaagagaccctagcatacttgaatattgtctctcctttt

SEQ ID NO: 16035 - DNA, 120 bp, Artificial Sequence
  ENSG00000013561_6 (sequence is synthesized)
gagctcaagattggttctcagaaaaaagtgcagagaaggacagctcaagcttctcccaacacagagctagattttggaggagctgctggatctgatgtagaccaagaggaaattgtggat

SEQ ID NO: 16036 - DNA, 120 bp, Artificial Sequence
  ENSG00000013561_7 (sequence is synthesized)
gagagagcagtgcaggatgtggaatcactgtcaaatctgatccaggaaatcttggactttgatcaagctcagcagataaaatgctttaatagtaaattgttcctgtgcagtatctgtttc

SEQ ID NO: 16037 - DNA, 120 bp, Artificial Sequence
  ENSG00000013561_8 (sequence is synthesized)
tgtgagaagctgggtagtgaatgcatgtacttcttggagtgcaggcatgtgtactgcaaagcctgtctgaaggactactttgaaatccagatcagagatggccaggttcaatgcctcaac

SEQ ID NO: 16038 - DNA, 120 bp, Artificial Sequence
  ENSG00000013561_9 (sequence is synthesized)
tgcccagaaccaaagtgcccttcggtggccactcctggtcaggtcaaagagttagtggaagcagagttatttgcccgttatgaccgccttctcctccagtcctccttggacctgatggca

SEQ ID NO: 16039 - DNA, 120 bp, Artificial Sequence
  ENSG00000013561_10 (sequence is synthesized)
gatgtggtgtactgcccccggccgtgctgccagctgcctgtgatgcaggaacctggctgcaccatgggtatctgctccagctgcaattttgccttctgtactttgtgcaggttgacctac

SEQ ID NO: 16040 - DNA, 120 bp, Artificial Sequence
  ENSG00000013561_11 (sequence is synthesized)
catggggtctccccatgtaaggtgactgcagagaaattaatggacttacgaaatgaatacctgcaagcggatgaggctaataaaagacttttggatcaaaggtatggtaagagagtgatt

SEQ ID NO: 16041 - DNA, 120 bp, Artificial Sequence
  ENSG00000013561_12 (sequence is synthesized)
cagaaggcactggaagagatggaaagtaaggagtggctagagaagaactcaaagagctgcccatgttgtggaactcccatagagaaattagacggatgtaacaagatgacatgtactggc

SEQ ID NO: 16042 - DNA, 120 bp, Artificial Sequence
  ENSG00000013561_13 (sequence is synthesized)
tgtatgcaatatttctgttggatttgcatgggttctctctctagagcaaacccttacaaacatttcaatgaccctggttcaccatgttttaaccggctgttttatgctgtggatgttgac

SEQ ID NO: 16043 - DNA, 120 bp, Artificial Sequence
  ENSG00000013561_14 (sequence is synthesized)
gacgatatttgggaagatgaggtagaagactagttaactactgctcaagatatggaagtggattgtttttccctaatcttccgtcaagtacacaaagtaactttgcgggatatttagggt

SEQ ID NO: 16044 - DNA, 120 bp, Artificial Sequence
  ENSG00000013561_15 (sequence is synthesized)
actattcattcactcttcctgcgtagaagatatggaagaacgaggtttatattttcatgtggtactactgaagaaggtgcattgatacatttttaaatgtaagttgagaaaaatttataa

SEQ ID NO: 16045 - DNA, 120 bp, Artificial Sequence
  ENSG00000013561_16 (sequence is synthesized)
gccaaaggttcagaaaattaaactacagaatattaaatattataatgtgcccaaagctctgaatagttaaaaattaaatatttattttcttccccaagctttaggtaaggagaagagggg

SEQ ID NO: 16046 - DNA, 120 bp, Artificial Sequence
  ENSG00000013561_17 (sequence is synthesized)
ttagagaccctttgtctctgagaagcatccttctaagacattctgttggagttccctcagtactattccttacaactggagtgggtagaagccttatgaaaattatactgagaacctgat

SEQ ID NO: 16047 - DNA, 120 bp, Artificial Sequence
  ENSG00000013561_18 (sequence is synthesized)
ctcgtttactccatgttaatcacattcctaccaacctaaatttctgccaagtcagttctctttggaggaagcccattactccgtaactgactggatggtccagtgtcattttgatctgct

SEQ ID NO: 16048 - DNA, 120 bp, Artificial Sequence
  ENSG00000013561_19 (sequence is synthesized)
tttcagaatggaaatttataatataaatatatgttttaataccacaaacactgtggggcacttgatatttattagtggtgtatatggtccactggtttcaggccaaatctagaatttagt

SEQ ID NO: 16049 - DNA, 120 bp, Artificial Sequence
  ENSG00000013561_20 (sequence is synthesized)
gatactggctcagaagaatttaagttctattcagccttcctgggtgttagaacctagattcaaaatggcttgtctttgctacttttgttccacattctctctctttacctttgccctacc

SEQ ID NO: 16050 - DNA, 120 bp, Artificial Sequence
  ENSG00000013561_21 (sequence is synthesized)
ttctgtttgtaaggatgattttaatattaattccaggaacacatgtttttatttcctctgctggaataggagaaagcttaatatattcccaagctgaatgttcttgaattatatctgcat

SEQ ID NO: 16051 - DNA, 120 bp, Artificial Sequence
  ENSG00000013561_22 (sequence is synthesized)
ttaccactgtatatgcatatagtgacagtataacctgtctatactacagtagttccagtcctaactttctgaattatttttaaagatcttctctaacaagctatgggaatttggcttcat

SEQ ID NO: 16052 - DNA, 120 bp, Artificial Sequence
  ENSG00000013561_23 (sequence is synthesized)
actctttctttgcaacagcagtgttctgggtgataattttgaattgatacctgttcctttttctgggttttgttggctttttgaaaaattgtctttccttatcattggtgggaggcttgg

SEQ ID NO: 16053 - DNA, 120 bp, Artificial Sequence
  ENSG00000013561_24 (sequence is synthesized)
tagcaaagtaacattttttggaaaagaggacagaaaaattgaactacagcttgagaacgtattctttttttcctactttgttattgcaaattgaggaatcacttttaactgttttaggtg

SEQ ID NO: 16054 - DNA, 120 bp, Artificial Sequence
  ENSG00000013561_25 (sequence is synthesized)
tgtgtgtccagagtgagcaaggattatgtttttggattgtcaaagaggatgcttagtcttaaaataaaaataaatttaaaaatcatcttataattagaacagagttgctgctatttgttc

SEQ ID NO: 16055 - DNA, 120 bp, Artificial Sequence
  ENSG00000013561_26 (sequence is synthesized)
tgtcaccaaggcaactaatcacattttaaaactgttcggcatataacatattcttaaagtaagaaaaaaaaggtcacagaatagcatctcttttacctgggcttgtgactgagcttaggt

SEQ ID NO: 16056 - DNA, 120 bp, Artificial Sequence
  ENSG00000013561_27 (sequence is synthesized)
ctgagcttaggttttagggcccatattttgtttaaaccagatagtttcatggtcttccattcaggacattttgtgtaaaaattgaggttaatttgctgggcacagtggctcacgcctgta

SEQ ID NO: 16057 - DNA, 120 bp, Artificial Sequence
  ENSG00000013561_28 (sequence is synthesized)
tcaaaaaaaaaaaaaaaaaaaattgaggttaaagaataaattaaagataagaaatggaaattaaaatgatttgttctacagtatatacctgagaagagtgatttctgtgatcaaagagtt

SEQ ID NO: 16058 - DNA, 120 bp, Artificial Sequence
  ENSG00000013561_29 (sequence is synthesized)
caattcagatttattcagaaagagctactcagaagctctatagttcgtgagctacttgatattttctagagatcattttatgttaagctgttatacattgttgatgatgtcatagaagta

SEQ ID NO: 16059 - DNA, 120 bp, Artificial Sequence
  ENSG00000013561_30 (sequence is synthesized)
ggaaagaagcctttataatacagttttatgaaagaaatgggagccttttttcccatttatgatattaaaaacaacacaggtatttggtgtttagtctcaaaaatttgtttggtcacctta

SEQ ID NO: 16060 - DNA, 120 bp, Artificial Sequence
  ENSG00000013561_31 (sequence is synthesized)
gtgattcttaggtacaaagtcttcatcactcaattttaacaaagaaaatagggcttataaagttatacttttgaagcatgagttatgagctaattttaagatgtatagttttggtagagt

SEQ ID NO: 16061 - DNA, 120 bp, Artificial Sequence
  ENSG00000013561_32 (sequence is synthesized)
acttttgtctcagtaaaatgaaagatttgggtaactccccaaatgccctgtaaaacaaatgggtttgtggaaggttgtggtgtcagcaaaatatatgatagaataaagagttttgtacct

SEQ ID NO: 16062 - DNA, 120 bp, Artificial Sequence
  ENSG00000013561_33 (sequence is synthesized)
gtgcatgggcttcctcacttttttcctcacgaagaggtctctggtctcccctctctgagcactctgagatggcaggattttcataatatatgtagtatgagttccacatcttggcctctt

SEQ ID NO: 16063 - DNA, 120 bp, Artificial Sequence
  ENSG00000013561_34 (sequence is synthesized)
acccagcttcagcagtctcagctccaccagttagagaataaatgggatttgcatgaactccactctgagctgaaatacagactgcggtgttaatatccttttcttctgattgttattaac

SEQ ID NO: 16064 - DNA, 120 bp, Artificial Sequence
  ENSG00000013561_35 (sequence is synthesized)
ggaggatgaggccggggctccggggacaggccagatgggaagctgctgtccacgcagcaaggcggctgctgagggaaagggagcctctgcatcaccaagtccttatgtcgtcagaagatc

SEQ ID NO: 16065 - DNA, 120 bp, Artificial Sequence
  ENSG00000013561_36 (sequence is synthesized)
ggctggcggcggtgagtgggccccaggcaagggcggagggcggaactttggggttcggcactgccgggcggccggaagatggcaggattttcataatatatgtagtatgagttccacatc

SEQ ID NO: 16066 - DNA, 120 bp, Artificial Sequence
  ENSG00000013561_37 (sequence is synthesized)
agagaaggggaccgggctgggactgtacactgggcctcagtccctcaaatccgggaccgggcgtccgcagctcggctggccgggactcccttcgggacgctgaggaggaaggggaaggtg

SEQ ID NO: 16067 - DNA, 120 bp, Artificial Sequence
  ENSG00000013561_38 (sequence is synthesized)
tgggccctgctccttcgggacgccccaggctggccagcagctcacacatccgcattgcgccctctgatcccagcgttggggcggatagctagcgttgggcctgcccctgttttggggcag

SEQ ID NO: 16068 - DNA, 120 bp, Artificial Sequence
  ENSG00000013561_39 (sequence is synthesized)
ggaccgggctgggactgtacactgggcctcagtccctcaaatccgggaccgggcgtccgcagctcggctggccgggactcccttcgggacgctgaggaggaaggggaagatggcaggatt

SEQ ID NO: 16069 - DNA, 120 bp, Artificial Sequence
  ENSG00000013561_40 (sequence is synthesized)
gacagctcccgagaacggaagaggcggcgcgccggttgagcagggcgtctctaggcctggtcggctggcggcgatggcaggattttcataatatatgtagtatgagttccacatcttggc

SEQ ID NO: 16070 - DNA, 120 bp, Artificial Sequence
  ENSG00000013561_41 (sequence is synthesized)
ggccggggctccggggacaggccagatgggaagctgctgtccacgcagcaaggcggctgctgagggaaagggagcctctgcatcaccaaatggcaggattttcataatatatgtagtatg

SEQ ID NO: 16071 - DNA, 77 bp, Artificial Sequence
  ENSG00000013563_0 (sequence is synthesized)
aatttattgattttttaaaatttgtccagccttctattaccacgtcgaatccattagctacagccatcccatgagaa

SEQ ID NO: 16072 - DNA, 120 bp, Artificial Sequence
  ENSG00000013563_1 (sequence is synthesized)
taccacgtcgaatccattagctacagccatcccatgagaagctgagtggattcagccccacctcctgctcacagaccctgtccgagcacctcatttgtcccaacagcattactgcaggac

SEQ ID NO: 16073 - DNA, 120 bp, Artificial Sequence
  ENSG00000013563_2 (sequence is synthesized)
ccccaggacgttggactgccagctccctgggtctcctcctctctggggcagatcctcagtcctcccttgacttcacgactgtggccagatcatgtgtggactgtccctctctttgggtct

SEQ ID NO: 16074 - DNA, 120 bp, Artificial Sequence
  ENSG00000013563_3 (sequence is synthesized)
ccagagcgcttgcatcaaacacccctaactcagaagtgtgcagccacactgggactcagaacccaacaacagggacagaagactcacgcccttggggtgcccggtctcgtggcatcaggc

SEQ ID NO: 16075 - DNA, 120 bp, Artificial Sequence
  ENSG00000013563_4 (sequence is synthesized)
atgacttccagctcctgcgccttccccagcaactgctgactggggacccagaccgggagctgagcgacgggcctggcgagcgaagctcggggtctcactcaggcaccagcccctccttgc

SEQ ID NO: 16076 - DNA, 120 bp, Artificial Sequence
  ENSG00000013563_5 (sequence is synthesized)
cccaggcttgagtgactcacagccctattcaggcaggagctgctcttctggggtatcgcgatccacttaaggatgaggcagacttggtgacaagctggtctgagcagcgcttccagagcc

SEQ ID NO: 16077 - DNA, 120 bp, Artificial Sequence
  ENSG00000013563_6 (sequence is synthesized)
agaactgagcccagtgagagcgcaccctggggcagcctggattcctggggtgtccccggcagccacacacagccatgcactacccaactgcactcctcttcctcatcctggccaatgggg

SEQ ID NO: 16078 - DNA, 120 bp, Artificial Sequence
  ENSG00000013563_7 (sequence is synthesized)
cccaggcctttcgcatctgcgccttcaatgcccagcggctgacactggccaaggtggccagggagcaggtgatggacaccttagttcggatactggctcgctgtgacatcatggtgctgc

SEQ ID NO: 16079 - DNA, 120 bp, Artificial Sequence
  ENSG00000013563_8 (sequence is synthesized)
aggaggtggtggactcttccggcagcgccatcccgctcctgcttcgagaactcaatcgatttgatggctctgggccctacagcaccctgagcagcccccagctggggcgcagcacctaca

SEQ ID NO: 16080 - DNA, 120 bp, Artificial Sequence
  ENSG00000013563_9 (sequence is synthesized)
tggagacgtatgtgtacttctatcggtcacacaaaacacaggtcctgagttcctacgtgtacaacgatgaggatgacgtctttgcccgggagccatttgtggcccagttctctttgccca

SEQ ID NO: 16081 - DNA, 120 bp, Artificial Sequence
  ENSG00000013563_10 (sequence is synthesized)
gcaatgtccttcccagcctggtgttggtcccgctgcacaccactcctaaggccgtagagaaggagctgaacgccctctacgatgtgtttctggaggtctcccagcactggcagagcaagg

SEQ ID NO: 16082 - DNA, 120 bp, Artificial Sequence
  ENSG00000013563_11 (sequence is synthesized)
ttggggacttcaatgctgactgcgcttcactgaccaaaaagcgcctggacaagctggagctgcggactgagccaggcttccactgggtgattgccgatggggaggacaccacagtgcggg

SEQ ID NO: 16083 - DNA, 120 bp, Artificial Sequence
  ENSG00000013563_12 (sequence is synthesized)
ccagcacccactgcacctatgaccgcgtcgtgctgcacggggagcgctgccggagtctgctgcacactgcggctgcctttgacttccccacgagcttccagctcaccgaggaggaggccc

SEQ ID NO: 16084 - DNA, 120 bp, Artificial Sequence
  ENSG00000013563_13 (sequence is synthesized)
tcaacatcagtgaccactaccccgtggaggtggagctgaagctgagccaggcgcacagcgtccagcctctcagcctcactgttctgttgctgctatcactcctgtcccctcagctgtgcc

SEQ ID NO: 16085 - DNA, 120 bp, Artificial Sequence
  ENSG00000013563_14 (sequence is synthesized)
ctgctgcctgagcgtccccctacccccccagggcctgctgccttttgggacttaaaccccagcctcccccgtccatccagccctggggctggggggcttcaactatagttgccctgtgac

SEQ ID NO: 16086 - DNA, 120 bp, Artificial Sequence
  ENSG00000013563_15 (sequence is synthesized)
tgtagtccacccctgcctgccttgtttgatttggctcttgttctttggttgggcttgtgcctagattaggagaggaagccaggggccctgcactcatgccacctgccaggtagtgtagta

SEQ ID NO: 16087 - DNA, 120 bp, Artificial Sequence
  ENSG00000013563_16 (sequence is synthesized)
tcaggagtggagacaaagtgggctctgggttggggtaggggaagggagggttcagaaagaggaatgaagatgttgtatgacaagaaggaaagttactgagaacaaaaacccagattggtg

SEQ ID NO: 16088 - DNA, 120 bp, Artificial Sequence
  ENSG00000013563_17 (sequence is synthesized)
agataggacacttgtgcagcagatatgccaatgggccatgtttattgtggattggtaagaatcaccaggaaaccattaagccccaatagctacaaggagggtggttaatctgctatatca

SEQ ID NO: 16089 - DNA, 120 bp, Artificial Sequence
  ENSG00000013563_18 (sequence is synthesized)
aactccttccctgaaaccagcaaacaccgggaaacattttggctcattataatccggtgaacaatgcagtcaggcctgttataaccgctgagcagccacactcgcacctcctgggtgctg

SEQ ID NO: 16090 - DNA, 120 bp, Artificial Sequence
  ENSG00000013563_19 (sequence is synthesized)
tagtctgtgttggtacaggcttctgcatgcctggtaaagtccagccaaggctggtcaaggcaacatctccacacagaaaatctgcaccagttatgtaagctaaaaagctgtgtgaaccca

SEQ ID NO: 16091 - DNA, 120 bp, Artificial Sequence
  ENSG00000013563_20 (sequence is synthesized)
ggtgtcccggaaaggggctgcaggacacagcaaaatgccagcagcatgccggacccctcccttccatcctcctctccaaagaagagaggtcaggaaaaacactggctgggacgctagaag

SEQ ID NO: 16092 - DNA, 120 bp, Artificial Sequence
  ENSG00000013563_21 (sequence is synthesized)
ggtcatgtgttaactataatcacatttatggtttggaaccatcaccccaaggtaaaaaaaaaataaaaggtattcccaggtatgtttggcaaaataaaataaaggtaattaaaaacctaa

SEQ ID NO: 16093 - DNA, 120 bp, Artificial Sequence
  ENSG00000013563_22 (sequence is synthesized)
tgtgcacggtcaggtggttcatgtactctggcggggaaggagaagtcaggcgctccgggctcgcccgctaggtcggggccgcggcgtcccccaccctaagtcccacctccggccgggcat

SEQ ID NO: 16094 - DNA, 120 bp, Artificial Sequence
  ENSG00000013563_23 (sequence is synthesized)
tgggagccacaggctgggggctggggccaacataccccagctctgggaccaaaagcctttggagtcctgtccctggatacagatgctcaggccacccacctagcactcctctcatttttg

SEQ ID NO: 16095 - DNA, 120 bp, Artificial Sequence
  ENSG00000013563_24 (sequence is synthesized)
ctgctcccccaaaagccagcgctgttctacaatagttcaggtcagacatctaagatccccaggccaaaccatgccacacacgtgtctgttccgaggtcttgttacaaatgaccaaaggtt

SEQ ID NO: 16096 - DNA, 120 bp, Artificial Sequence
  ENSG00000013563_25 (sequence is synthesized)
agcctagacctttggtcaggtggtgaaggccctgggaatgcaggttctagaaggggtgggggcatggggcccaggaggttgctagagataggaaatggggcaaatcgcaggtgacctcag

SEQ ID NO: 16097 - DNA, 120 bp, Artificial Sequence
  ENSG00000013563_26 (sequence is synthesized)
cagtacctggatgattcccaccaaggaggaatggccaaaccagatgggtgagaacaagcccaatgtgatgcacacctacccttgctaaataaacgctgctggtcagcctctagcccacaa

SEQ ID NO: 16098 - DNA, 120 bp, Artificial Sequence
  ENSG00000013563_27 (sequence is synthesized)
atccacttaaggatgaggcagacttggtgacaagctggtctgagcaggtatgggagccccctggggagacggaagaagggaggaagttgccttctgcctggggagggtttgagagggaga

SEQ ID NO: 16099 - DNA, 120 bp, Artificial Sequence
  ENSG00000013563_28 (sequence is synthesized)
gggaagcctagggctcccaccaaggctgatattgacagccagggtttggggctgaagccaggaaccgtcgctctctctggttcttactggtagccctcatgggggtccctgacgccagag

SEQ ID NO: 16100 - DNA, 120 bp, Artificial Sequence
  ENSG00000013563_29 (sequence is synthesized)
cctccaaggctgcatgtgccagcccagggctgcccacatacccatgtatatcccagaataggcaccagggtagggaacccaaactagcatgagtgacagagcaggtggtcagggagaaac

SEQ ID NO: 16101 - DNA, 120 bp, Artificial Sequence
  ENSG00000013563_30 (sequence is synthesized)
agacatcaaacccagccaggagagagacaccgcaacagagagacagagaagggaaaccagagacgagagggaaagtgagacagagacggacagagcctcagagaggtaggaagtgagccc

SEQ ID NO: 16102 - DNA, 120 bp, Artificial Sequence
  ENSG00000013563_31 (sequence is synthesized)
gaagggaaggtgacaggttgatagagaaaagcaggcagacagagcagaggaactcatgcctcaggatgcaaaagccacatggacagggcgtggagcaaggagccgagccctgcaaggtca

SEQ ID NO: 16103 - DNA, 120 bp, Artificial Sequence
  ENSG00000013573_0 (sequence is synthesized)
ttctaactcagtggcgtttgccctgattcccggggcctggctttcagcgtagcaattctgccggcgaagaaggtgagcgcagtgctgtgtggcagcagagctccttaggacgaggagcag

SEQ ID NO: 16104 - DNA, 120 bp, Artificial Sequence
  ENSG00000013573_1 (sequence is synthesized)
cgggacgaggaagggcagactggtgaaatcgcaaactgggcgtctgttccggcgccggacccctatttgcaaaggtccatggctaatgaaacacagaaggttggtgccatccattttcct

SEQ ID NO: 16105 - DNA, 120 bp, Artificial Sequence
  ENSG00000013573_2 (sequence is synthesized)
tttcccttcacaccctattccatccaggaagacttcatggcagagctgtaccgggttttggaggctggcaagattgggatatttgagagtccaactggcactgggaagtccttaagtctt

SEQ ID NO: 16106 - DNA, 120 bp, Artificial Sequence
  ENSG00000013573_3 (sequence is synthesized)
atttgtggggccctctcttggctccgtgactttgaacagaagaagcgtgaagaagaggcacgactccttgaaactggaactggccccttacatgatgagaaagatgaatccctgtgtctg

SEQ ID NO: 16107 - DNA, 120 bp, Artificial Sequence
  ENSG00000013573_4 (sequence is synthesized)
tcttcttcctgcgaaggggctgcaggcaccccgaggcctgctggagaaccggcctgggttactcagtttgtgcagaagaaagaagagagggacctggtggaccgactaaaggcggagcag

SEQ ID NO: 16108 - DNA, 120 bp, Artificial Sequence
  ENSG00000013573_5 (sequence is synthesized)
gccaggaggaagcagcgagaagaacgcctgcagcagctgcagcacagggtgcagctcaagtatgcagccaagcgcctgaggcaggaagaagaagaaagagagaatctcctccgcctcagc

SEQ ID NO: 16109 - DNA, 120 bp, Artificial Sequence
  ENSG00000013573_6 (sequence is synthesized)
agggagatgctagagacaggcccggaggctgagcggctggagcagctggagtctggggaggaggagctggtcctcgccgaatacgagagtgatgaggagaaaaaggtggcgagcagagtg

SEQ ID NO: 16110 - DNA, 120 bp, Artificial Sequence
  ENSG00000013573_7 (sequence is synthesized)
gatgaggatgaggatgacctggaggaagaacacataactaagatttattactgtagtcggacacactcccagctggcccagtttgtgcatgaggtgaagaagagcccctttggcaaggat

SEQ ID NO: 16111 - DNA, 120 bp, Artificial Sequence
  ENSG00000013573_8 (sequence is synthesized)
gttcggctggtctcccttggctcccggcagaacctttgtgtaaatgaagacgtgaaaagcctaggttctgtgcagcttatcaacgaccgctgtgtggacatgcagagaagcaggcacgag

SEQ ID NO: 16112 - DNA, 120 bp, Artificial Sequence
  ENSG00000013573_9 (sequence is synthesized)
aagaagaaaggagctgaggaggagaagccaaagaggaggaggcaggagaagcaggcagcctgccccttctacaaccacgagcagatgggccttctccgggatgaggccctggcagaggtg

SEQ ID NO: 16113 - DNA, 120 bp, Artificial Sequence
  ENSG00000013573_10 (sequence is synthesized)
aaggacatggagcagctgctggcccttgggaaggaggcccgggcctgtccctattacgggagccgccttgccatccctgcagcccagctggtggtgctgccctatcagatgctgctgcat

SEQ ID NO: 16114 - DNA, 120 bp, Artificial Sequence
  ENSG00000013573_11 (sequence is synthesized)
gcggccactcggcaggccgcgggcatccggctgcaggaccaggtggtgatcatcgacgaggcgcacaacctgatcgacaccatcacgggcatgcacagcgtggaggtcagcggctcccag

SEQ ID NO: 16115 - DNA, 120 bp, Artificial Sequence
  ENSG00000013573_12 (sequence is synthesized)
ctctgccaggcccattcccagctgctgcagtacgtggagcgatacgggaagcgtttgaaggccaagaacctgatgtacctgaagcagatcctgtatttgctggagaaattcgtggctgtg

SEQ ID NO: 16116 - DNA, 120 bp, Artificial Sequence
  ENSG00000013573_13 (sequence is synthesized)
ctaggggggaacattaagcaaaatcccaatacacagagtctgtcacagacagggacggagctgaagaccatcaacgactttctcttccagagccagatcgacaacatcaacctgttcaag

SEQ ID NO: 16117 - DNA, 120 bp, Artificial Sequence
  ENSG00000013573_14 (sequence is synthesized)
gtgcagcgatactgtgagaagagcatgatcagcagaaagctctttggattcactgaacggtacggagcagtgttctcatcccgggagcagcccaaactggctgggtttcagcaattcctg

SEQ ID NO: 16118 - DNA, 120 bp, Artificial Sequence
  ENSG00000013573_15 (sequence is synthesized)
gcctgcagcccaggacgactgaagctcttgcagcccctgcagacgagagtcaggccagcaccctgcgaccagcttctccactgatgcacatccaaggcttcctggcagctctcactacgg

SEQ ID NO: 16119 - DNA, 120 bp, Artificial Sequence
  ENSG00000013573_16 (sequence is synthesized)
ccaaccaggacggcagggtcatcctgagccgccaaggcagcctcagtcagagcaccctgaagtttttgctcctgaatccagctgtgcactttgcccaagtggtgaaggaatgccgggcag

SEQ ID NO: 16120 - DNA, 120 bp, Artificial Sequence
  ENSG00000013573_17 (sequence is synthesized)
tggtcattgcggggggtaccatgcagccggtgtctgacttccggcagcagctgctggcctgtgccggggtggaagctgagcgcgtggtggagttttcctgtggtcacgtgatccctccag

SEQ ID NO: 16121 - DNA, 120 bp, Artificial Sequence
  ENSG00000013573_18 (sequence is synthesized)
acaacatcctgcccctcgtcatctgcagcgggatctccaaccagccgctggaattcacgttccagaaaagagagctgcctcagatgatattccaggaacctaagagcgcacaccaggtgg

SEQ ID NO: 16122 - DNA, 120 bp, Artificial Sequence
  ENSG00000013573_19 (sequence is synthesized)
agcaggtgctgctggcatattccaggtgcatccaggcctgtggccaggagagaggccaggtgacaggggccctgctcctctctgtggttggaggaaagatgagtgaagggatcaacttct

SEQ ID NO: 16123 - DNA, 120 bp, Artificial Sequence
  ENSG00000013573_20 (sequence is synthesized)
ctgacaacctaggccggtgtgtggtgatggtgggcatgcccttccccaacatcaggtctgcagagctgcaggagaagatggcctacttggatcaaaccctccccagagcccccggccagg

SEQ ID NO: 16124 - DNA, 120 bp, Artificial Sequence
  ENSG00000013573_21 (sequence is synthesized)
cacccccagggaaggctctggtggagaacctgtgcatgaaggccgtcaaccagtccataggcagggccatcaggcaccagaaggattttgccagcgtagtgctcctggaccagcgatatg

SEQ ID NO: 16125 - DNA, 120 bp, Artificial Sequence
  ENSG00000013573_22 (sequence is synthesized)
cccggccccctgtcctggccaagctgccggcctggatccgagcccgtgtggaggtcaaagctacctttggccccgccattgctgctgtgcagaagtttcaccgggagaagtcggcctctt

SEQ ID NO: 16126 - DNA, 120 bp, Artificial Sequence
  ENSG00000013573_23 (sequence is synthesized)
cctgatgggcaaccacaccactgcctggcgccgtgcccttcctttgtcctgcccgctggagacagtgtttgtcgtgggcgtggtctgcggggatcctgttacaaaggtgaaacccaggag

SEQ ID NO: 16127 - DNA, 120 bp, Artificial Sequence
  ENSG00000013573_24 (sequence is synthesized)
gagagtgtggagtccagagtgctgccaggacccaggcacaggcgttagctcccgtaggagaaaatgggggaatcctgaatgaacagtgggtcctggctgtccttggggcgttccagggca

SEQ ID NO: 16128 - DNA, 120 bp, Artificial Sequence
  ENSG00000013573_25 (sequence is synthesized)
gctcccctcctggaatagaatctttctttccatcctgcatggctgagagccaggcttccttcctggtctccgcaggaggctgtggcagctgtggcatccactgtggcatctccgtcctgc

SEQ ID NO: 16129 - DNA, 120 bp, Artificial Sequence
  ENSG00000013573_26 (sequence is synthesized)
ccaccttcttaagaggcgagatggagcaggcccatctgcctctgccctttctagccaaggttatagctgccctggactgctcactctctggtctcaatttaaaatgatccatggccacag

SEQ ID NO: 16130 - DNA, 120 bp, Artificial Sequence
  ENSG00000013573_27 (sequence is synthesized)
ggctcctgcccaggggcttgtcaccttcccctcctccttcctgagtcactccttcagtagaaggccctgctccctatcctgtcccacagccctgcctggatttgtatccttggcttcgtg

SEQ ID NO: 16131 - DNA, 120 bp, Artificial Sequence
  ENSG00000013573_28 (sequence is synthesized)
ccagttcctccaagtctatggcacctccctccctctcaaccacttgagcaaactccaagacaccttctaccccaacaccagcaattatgccaagggccgttaggctctcaacatgactat

SEQ ID NO: 16132 - DNA, 120 bp, Artificial Sequence
  ENSG00000013573_29 (sequence is synthesized)
agagaccccgtgtcatcacggagacctttgttcctgtgggaaaatatccctcccacctgcaacagctgcccctgctgactgcgcctgtcttctccctctgaccccagagaaaggggctgt

SEQ ID NO: 16133 - DNA, 120 bp, Artificial Sequence
  ENSG00000013573_30 (sequence is synthesized)
ggtcagctgggatcttctgccaccatcagggacaaacgggggcaggaggaaagtcactgatgcccagatgtttgcatcctgcacagctataggtccttaaataaaagtgtgctgttggtt

SEQ ID NO: 16134 - DNA, 120 bp, Artificial Sequence
  ENSG00000013573_31 (sequence is synthesized)
tggggcaggctagaggtcaggttctggcccccgttttctgtgggtaatacctcatactgcgaccaggcacaggggcggaggagaccccggggtgggagcctcacccttcgtgcgctcgcc

SEQ ID NO: 16135 - DNA, 120 bp, Artificial Sequence
  ENSG00000013573_32 (sequence is synthesized)
gtgaaactcgaggagagcttgtccgttgccacaagctgtttttcgaatgtctctacacagtccaggcaggaaatagaagcactcacatcaggagctcagtgtcaggcaggcaaggctcct

SEQ ID NO: 16136 - DNA, 120 bp, Artificial Sequence
  ENSG00000013573_33 (sequence is synthesized)
gttgttccggctgcctttcactgaggggacccgccagtttctaactcagtggcgtttgccctgattcccggggcctggctttcagcgtagcaattctgccggcgaagaaggaagacttca

SEQ ID NO: 16137 - DNA, 120 bp, Artificial Sequence
  ENSG00000013573_34 (sequence is synthesized)
tcttcccctcctacgagtacctgcgccaggtccatgcccactgggagaagggtggcctgctgggccgtctggctgccaggaagaagatattccaggaacctaagagcgcacaccaggtgg

SEQ ID NO: 16138 - DNA, 120 bp, Artificial Sequence
  ENSG00000013573_35 (sequence is synthesized)
ccagatttgctggatttcctttgctgttcctgcacatagtttaaacgagactgccagcactgggtatcagtcaccatttttctttttgttagtttgccatcagccttttctttgacctct

SEQ ID NO: 16139 - DNA, 120 bp, Artificial Sequence
  ENSG00000013573_36 (sequence is synthesized)
tctttcagtttgtgtgtacttgctgtctcttagcccagacttctcgcttcctttctgctgggcctctgaggggtcatggggccgtgacgctgtggccttggtctacaggtgtctgacttc

SEQ ID NO: 16140 - DNA, 120 bp, Artificial Sequence
  ENSG00000013573_37 (sequence is synthesized)
gagctgcctcagatggtcagtcccagccagctcgccgcaccacagcctggcctcaggcagcaaagggttttctggggcaggggcgctctggcccaccctgagtgttttcagtgttgggga

SEQ ID NO: 16141 - DNA, 120 bp, Artificial Sequence
  ENSG00000013573_38 (sequence is synthesized)
aattgcacagggacacccgcttagagccacacagaatgagcggcgtcgatctagatgcttatggaggaaggtctgagcttccccgcccctcacgccttaggctgcgaaatatgtattcat

SEQ ID NO: 16142 - DNA, 120 bp, Artificial Sequence
  ENSG00000013573_39 (sequence is synthesized)
aaaacctccaggcatcctctgaggacgcctcacacaggagaaagctgctagttccctttggctctcttgccctttggttatatctgcccctgccgggggtagggatgtggggcttggggg

SEQ ID NO: 16143 - DNA, 120 bp, Artificial Sequence
  ENSG00000013573_40 (sequence is synthesized)
cagtatttccaccaggggccatcctgctcctttcgccacaactttgtcctgctcgtccaggccttgggagacgctgggtctgtgacaggctgaaccgtgtgaggagcagccccctccctg

SEQ ID NO: 16144 - DNA, 120 bp, Artificial Sequence
  ENSG00000013573_41 (sequence is synthesized)
acctggccggcccagcactggaaggcaaaggagaggtggcggggcaggtccacgtgtgttggtaggatgtcatttagctggcaccatctttttgcctctttctttctcctttgctgcaga

SEQ ID NO: 16145 - DNA, 120 bp, Artificial Sequence
  ENSG00000013573_42 (sequence is synthesized)
gtctggagagagtgaggcaggggtggcagtgactgaagaccattaagtgtctttcatagaaagaatggcagaggagaccccagttccttcctgagtcccctctccttgggaaaaagtgtt

SEQ ID NO: 16146 - DNA, 120 bp, Artificial Sequence
  ENSG00000013573_43 (sequence is synthesized)
cctactctctgggtcagtgtctggtccgaatccttggcttggagatgattttacgggctctttctggagaacagaagtaaaaccttacagtgttccgatgagaccacagtaggcagtact

SEQ ID NO: 16147 - DNA, 120 bp, Artificial Sequence
  ENSG00000013573_44 (sequence is synthesized)
tgggagggtcttatagaccctaccccatggaagtgggtctcaacattacacaaccccctcttgggcccgtggacagttgctgtcctctctgttttctctctttgtgcctgtgccaccctc

SEQ ID NO: 16148 - DNA, 120 bp, Artificial Sequence
  ENSG00000013573_45 (sequence is synthesized)
ctgcataccttggtctggctgctgtgtcccggcctcctggagaaggggtgaaaaacatgaacttacagggctttgggttccacgtgcaagcacgtgagtcagacatgggaggctcctgga

SEQ ID NO: 16149 - DNA, 120 bp, Artificial Sequence
  ENSG00000013573_46 (sequence is synthesized)
cccacctgccctctcagtgggtccgttgcatgctataaacagtgaaaagcaaaacaaagccatttaaatacagatgctcttcttacttgatgtgcagtgtggagggagagaagataggga

SEQ ID NO: 16150 - DNA, 120 bp, Artificial Sequence
  ENSG00000013573_47 (sequence is synthesized)
agccaggccttccccgctgcgctggcgtctcctgccccctccggaagcttggatgcccctccacaccctcttgatcttccctgtgatgtcacctggacccctgctgctggcattggccac

SEQ ID NO: 16151 - DNA, 120 bp, Artificial Sequence
  ENSG00000013573_48 (sequence is synthesized)
ggtgcgcagaagtgggcattaacagcagccgcgtgtctgggtcttagatttggcccagctgtgttgagcttttcatggattatcttacgtagataagacactgcaacagtccatggctaa

SEQ ID NO: 16152 - DNA, 120 bp, Artificial Sequence
  ENSG00000013573_49 (sequence is synthesized)
ggcctgagatgatgaagagcaaatatccgccctggggcctcagaggggtccagcttgctggagggagggcagagaggagagcagcctgccatgagtcccgaggcttccgactcaagactt

SEQ ID NO: 16153 - DNA, 120 bp, Artificial Sequence
  ENSG00000013573_50 (sequence is synthesized)
gggttgggggtgctgagcccctttctcctttttacatttccctacccacagacctgagcggccatgggaggttggggttggcatttgcctgggggagtttctgagcgagcagcacctgct

SEQ ID NO: 16154 - DNA, 120 bp, Artificial Sequence
  ENSG00000013573_51 (sequence is synthesized)
accttggtggaacccattgctgggaatggccagggctcagcaccagcgctcagcagatgctcagtgcgttttgctgagtttgctgagggaagactgttttctgttctctctcacacacac

SEQ ID NO: 16155 - DNA, 120 bp, Artificial Sequence
  ENSG00000013573_52 (sequence is synthesized)
cagtattccagtgaaattctgtgcatggggacactggagcccagaaaagttaagtgactcatattttctcaccaagcgtgggtgatggagccattcagttttccgatattttatttttta

SEQ ID NO: 16156 - DNA, 120 bp, Artificial Sequence
  ENSG00000013573_53 (sequence is synthesized)
tatgagtattcctttaactggaaactttcctaacaacaaacacctaaagatgtgcagagttgcttttatttttgttaccccagctccacgccttaaccctcactttgaaataggatgtat

SEQ ID NO: 16157 - DNA, 120 bp, Artificial Sequence
  ENSG00000013573_54 (sequence is synthesized)
tccccctgctgaccccgggcctgcaaaactcgctgggctgctttttccttggatgcccatcaggacacctcagttctctgtgtttttaagaagggtcggccgggtgcggtggctcacgcc

SEQ ID NO: 16158 - DNA, 79 bp, Artificial Sequence
  ENSG00000013573_55 (sequence is synthesized)
caaaaaaattagctgggagtgttgccgtggcctgtagtcccagctgctccagaggctgagacaagagaattgcttgctc

SEQ ID NO: 16159 - DNA, 120 bp, Artificial Sequence
  ENSG00000013573_56 (sequence is synthesized)
tagatttggcccagctgtgttgagcttttcatggattatcttacgtagataagacactgcaacagacttcacaacgggataaagtgaagtagcttcggcttgtgaatgtgcattgcagag

SEQ ID NO: 16160 - DNA, 120 bp, Artificial Sequence
  ENSG00000013573_57 (sequence is synthesized)
acgtgggagaagaaagctgcaaaagtcattataagcaacacccttgatcttaggggtgctggtctgtgagaagagagctctaagccttttgtagaggcattagaaaggtatcggagccac

SEQ ID NO: 16161 - DNA, 120 bp, Artificial Sequence
  ENSG00000013573_58 (sequence is synthesized)
ggtgaaatgcaggggagattgggtttaggggctttcctggtctgcattctgctacagccgttaaatgccgctagatggagtgcgtgattctggtatggcctcacgtggacctgctgcgaa

SEQ ID NO: 16162 - DNA, 120 bp, Artificial Sequence
  ENSG00000013573_59 (sequence is synthesized)
ttgtcgttgtggtgcccatcaggaccctggacagaagaagggaggactcagtgccagggcaatagggaggccccctagggacgctagtgctgtgacatgtgtcagaaaggcgcagtcagc

SEQ ID NO: 16163 - DNA, 120 bp, Artificial Sequence
  ENSG00000013573_60 (sequence is synthesized)
agcagcggctgggtgtgtttggtgggaggtggcacctaccaccccgtggttcccacccaggggagccaagtcctcttccttggctgtagtcctgccgagggtctctcctcagttttgagt

SEQ ID NO: 16164 - DNA, 120 bp, Artificial Sequence
  ENSG00000013573_61 (sequence is synthesized)
aagacgcggtttgtgggtggctgaggggttgctccatgggggctccctccctccctcctttccttccttagatggacgaggtgggtcgcattctctgtaacctgtgcggtgtggttcctg

SEQ ID NO: 16165 - DNA, 120 bp, Artificial Sequence
  ENSG00000013573_62 (sequence is synthesized)
tgctgccattagagcccacagctgggctgcgactgctcagaccagccagctggagggaggggctcagcagctctgggtttggtcctgggagagcagttggattttaggctacccattgct

SEQ ID NO: 16166 - DNA, 120 bp, Artificial Sequence
  ENSG00000013573_63 (sequence is synthesized)
ccattgctgctgtgcagaaggtcagtcctacctttttctttctgagagcctccccaccccgagatcacatttctcactgccttctgtctgcccagtttcaccgggagaagtcggcctctt

SEQ ID NO: 16167 - DNA, 120 bp, Artificial Sequence
  ENSG00000013573_64 (sequence is synthesized)
cagtttctaactcagtggcgtttgccctgattcccggggcctggctttcagcgtagcaattctgccggcgaagaaggtccatggctaatgaaacacagaaggttggtgccatccattttc

SEQ ID NO: 16168 - DNA, 120 bp, Artificial Sequence
  ENSG00000013583_0 (sequence is synthesized)
cctgccgccctgccgccctgccgccctgccgccctgccgccggtggtcgctgcccgtggtgctccgtcgcccccgccacctcacgtcctcccgtgcgtcgggagcgtctcggctacaaca

SEQ ID NO: 16169 - DNA, 120 bp, Artificial Sequence
  ENSG00000013583_1 (sequence is synthesized)
tcccgtgcgtcgggagcgtctcggctacaacatgttgggcatgatcaagaactcgctgttcggaagcgtagagacgtggccttggcaggtcctaagcaaaggggacaaggaagaagttgc

SEQ ID NO: 16170 - DNA, 120 bp, Artificial Sequence
  ENSG00000013583_2 (sequence is synthesized)
ctatgaagaaagggcctgtgaaggcggcaaatttgccacagtagaagtgacagataagcctgtggatgaggctctacgggaagcaatgcccaaggtcgcaaagtatgcggggggcaccaa

SEQ ID NO: 16171 - DNA, 120 bp, Artificial Sequence
  ENSG00000013583_3 (sequence is synthesized)
tgacaagggaattgggatggggatgacagtccctatttcctttgctgtgttccccaatgaagatggctctctgcagaagaaattaaaagtctggttccggattccaaaccaatttcaaag

SEQ ID NO: 16172 - DNA, 120 bp, Artificial Sequence
  ENSG00000013583_4 (sequence is synthesized)
ggttatgccaaggaagcagactacgtagcacaagccacccgtctgcgtgctgccctggagggcacagccacctaccggggggacatctacttctgcacgggttatgaccctcccatgaag

SEQ ID NO: 16173 - DNA, 120 bp, Artificial Sequence
  ENSG00000013583_5 (sequence is synthesized)
ccctacggacggcgcaatgagatctggctgttgaagacatgagtgacccactgaaccaagaacttactggaagtgtgcctctgtgtctccttcctcgggggtaaggaggggacagtgctt

SEQ ID NO: 16174 - DNA, 120 bp, Artificial Sequence
  ENSG00000013583_6 (sequence is synthesized)
cccaagttccagctgcaagtccaacttaaccaactttccttcaaagtcagttactgccaattttctgaaaaaagcatgttccatatactaagtctcttttctcacagtaggaaataatac

SEQ ID NO: 16175 - DNA, 120 bp, Artificial Sequence
  ENSG00000013583_7 (sequence is synthesized)
agccaagatatgcagcatccttctcattgatgtagaaaattctgcgatagaccagaaaaatcctggcagcttttctccaggcatctgggtcactaaaaactgattttctaaaattattgg

SEQ ID NO: 16176 - DNA, 120 bp, Artificial Sequence
  ENSG00000013583_8 (sequence is synthesized)
atttgtattttgttattaagggggaaaatgtgatttgtgcctgatctttcatctgtgattcttataagagctttgtcttcagaaaaactaaaaataaaaggcattgacttaaacagctga

SEQ ID NO: 16177 - DNA, 120 bp, Artificial Sequence
  ENSG00000013583_9 (sequence is synthesized)
aatactgagctctgacattgggtgagataaaacactgccctggaggagagcttctttcaagatgaggcgtttatagataaagacgtattcacaggcttacaaagataatgtatagacttc

SEQ ID NO: 16178 - DNA, 120 bp, Artificial Sequence
  ENSG00000013583_10 (sequence is synthesized)
acgtttctttcttttaggggctcaaagcactttatgagcatttcttaactcaccttcaagtgcgcgcaggaattcggagagcagtgggcccactgttattgtgctccatgtccagattgg

SEQ ID NO: 16179 - DNA, 120 bp, Artificial Sequence
  ENSG00000013583_11 (sequence is synthesized)
agccagagctaggctcccttcatacaccaggggattccgggatctcactatgttgtccaggctggaatgcagtggctattcacagatgtgatcatagcacagtgcagcctcaactcctgg

SEQ ID NO: 16180 - DNA, 120 bp, Artificial Sequence
  ENSG00000013583_12 (sequence is synthesized)
cgacccaccagctcccagtgacaaaagcgttaagattgaggaacgggaaggcatcactgtctattccatgtaaggagacaatccttcaggcatccatgggtggcgcttgattcccgtacc

SEQ ID NO: 16181 - DNA, 120 bp, Artificial Sequence
  ENSG00000013583_13 (sequence is synthesized)
actccttgcatcacctctggcaagcattcgcgtcaaatttttatggttgctgaattaatttaagtaggaaatgctgaatcctaacagtttctcattttaatttcttcaggctgcagcaca

SEQ ID NO: 16182 - DNA, 120 bp, Artificial Sequence
  ENSG00000013583_14 (sequence is synthesized)
cacacatttgcattttatcagaataaatgccttggccagttgccaaattgatgggacgagcttaagctttgcttaagcttacagtgaatgtctacattagccatagcagggttctaggag

SEQ ID NO: 16183 - DNA, 120 bp, Artificial Sequence
  ENSG00000013583_15 (sequence is synthesized)
actcagcaaatatcttaagtcaagccatggtctggattcgtggacacatgggaagcataaagggctgaggaatacctgatttctaccccacactccctttgaatgccagagagcagggag

SEQ ID NO: 16184 - DNA, 120 bp, Artificial Sequence
  ENSG00000013583_16 (sequence is synthesized)
gcttccatcctccttgttgttcctggatggtagtcctttgagcagagcacacatctattctcttgtcatcctggtcctgtttccaggacttcatgtggggtcattttcccttgactgtag

SEQ ID NO: 16185 - DNA, 120 bp, Artificial Sequence
  ENSG00000013583_17 (sequence is synthesized)
agaatagcaggtgcaaatggttactagtttctatcccttgtgctccaaactgccctcagaaaccaagtcttctagatcattgatgactcctcacatttgttaaaacactcccatgtgaca

SEQ ID NO: 16186 - DNA, 120 bp, Artificial Sequence
  ENSG00000013583_18 (sequence is synthesized)
ggcaccaaaccaggctcagggaaagaccaggatcttcaccagaagtaatcataggtggtttggctccgctcaggagcaacctcatgaaaaattcacatacatataatattgcactggact

SEQ ID NO: 16187 - DNA, 120 bp, Artificial Sequence
  ENSG00000013583_19 (sequence is synthesized)
gagtattggtccacttcagggacctccaaacttggctgccctgctgcaaccctgaacctgatggtgggaccattttccccggagctgtgtcaatgttctgagaatgtgagtttcaccgct

SEQ ID NO: 16188 - DNA, 120 bp, Artificial Sequence
  ENSG00000013583_20 (sequence is synthesized)
gtgtgtagtcctaggccaggtgactgcagggccctccagaggacagtgaatgtaatgcagctgggagctagcaccggagcctcagctcctgtgcttgtcctgcagtcctcattcagactt

SEQ ID NO: 16189 - DNA, 120 bp, Artificial Sequence
  ENSG00000013583_21 (sequence is synthesized)
cccagcttcccttcagagggtgtggagaaagcaaattaacttaacaatatcttttcctagggtggagatgcaccttgggtgcagcatttaaggaagcactcactctcacagctgtccaag

SEQ ID NO: 16190 - DNA, 120 bp, Artificial Sequence
  ENSG00000013583_22 (sequence is synthesized)
tgcaggatggggactgagagtgagcgcctccttaaatcttgtgccctgggttagatgtctgcttgtcttttccattctatttcctgtgtttgggaagcagcaggtataataaaatgaact

SEQ ID NO: 16191 - DNA, 120 bp, Artificial Sequence
  ENSG00000013583_23 (sequence is synthesized)
tgtattttatttgaattccagctctactgcttactagcagaatgatgcttgggaagttagccactttaagacttagcttttgcatttgttaagtgctgataatataacctcctatatatg

SEQ ID NO: 16192 - DNA, 120 bp, Artificial Sequence
  ENSG00000013583_24 (sequence is synthesized)
atgtgtgtgtgtgtgcatgtaatgtaaccttataggattattgttaaatatctttcagtatttactaagatactatttatgtattacctaatgtttatgacctgaagcaggttttggcaa

SEQ ID NO: 16193 - DNA, 120 bp, Artificial Sequence
  ENSG00000013583_25 (sequence is synthesized)
atggaatttttaacacggagttctcacacagcatatgatcattcctcaactcgccacttgatgtcactgcatagtcaaatgagcattcaaaattaccctgcagtggtttgtgttatttct

SEQ ID NO: 16194 - DNA, 120 bp, Artificial Sequence
  ENSG00000013583_26 (sequence is synthesized)
gattctgttgaaagcaatgttaatgagatggtagaaggcaaatgtactacttcaaatgcaaaagtactctatcaaataatgcagtgagtgcattcaatgacaaaattaattctaaaatga

SEQ ID NO: 16195 - DNA, 120 bp, Artificial Sequence
  ENSG00000013588_0 (sequence is synthesized)
aatttcatctggcgcccccgttcaatcagcctgcattgtcgaggctttaggagaggcagttaggaaaggagagatactgatctctcagccccagggcagcactaatggtgcctgtctaga

SEQ ID NO: 16196 - DNA, 120 bp, Artificial Sequence
  ENSG00000013588_1 (sequence is synthesized)
ctctgacaggtggagctgctgagctaactacggacctggtgggggaagttttccttggctttcacgtggctttggctggggagccctgagaaggtggctgcctcctttttctgaagcctg

SEQ ID NO: 16197 - DNA, 120 bp, Artificial Sequence
  ENSG00000013588_2 (sequence is synthesized)
gcttcccatacggcagtggctgggggagagtgatggagagaaaggctaagctaaggtcaaagaaagtggaggaaggctggcttgtcccgctggacttgacggcggagctgctgcaatctc

SEQ ID NO: 16198 - DNA, 120 bp, Artificial Sequence
  ENSG00000013588_3 (sequence is synthesized)
gcgggctgggcccttgccccgggtggacccgagtgcctgcggggaggcgggtgtggctcccccgggaggtgacagctggcggggcccgtaaggagctggtctgctccggctcccctctcg

SEQ ID NO: 16199 - DNA, 120 bp, Artificial Sequence
  ENSG00000013588_4 (sequence is synthesized)
tagccggcgccctgggaccagcgcgtgagcacgtctcggaggagtccgatgcgctgggcagggccgggtggtcacccccgcccagcttccaggggtgactgtgcctctgacgtcagacgg

SEQ ID NO: 16200 - DNA, 120 bp, Artificial Sequence
  ENSG00000013588_5 (sequence is synthesized)
tttttgggtcattccctggcacggggactttattttcataacagcatgaagtgccgtggaactggaataggcgtgtcctctccctcgaccctccccctccttgtccctctgctcacccct

SEQ ID NO: 16201 - DNA, 120 bp, Artificial Sequence
  ENSG00000013588_6 (sequence is synthesized)
cgctcgttccctccctccggcgagggccgcctttataacaactgctcagagtgcgagggcgggatagctgtccaaggtctcccccagcactgaggagctcgcctgctgccctcttgcgcg

SEQ ID NO: 16202 - DNA, 120 bp, Artificial Sequence
  ENSG00000013588_7 (sequence is synthesized)
cgggaagcagcaccaagttcacggccaacgccttggcactagggtccagaatggctacaacagtccctgatggttgccgcaatggcctgaaatccaagtactacagactttgtgataagg

SEQ ID NO: 16203 - DNA, 120 bp, Artificial Sequence
  ENSG00000013588_8 (sequence is synthesized)
ctgaagcttggggcatcgtcctagaaacggtggccacagccggggttgtgacctcggtggccttcatgctcactctcccgatcctcgtctgcaaggtgcaggactccaacaggcgaaaaa

SEQ ID NO: 16204 - DNA, 120 bp, Artificial Sequence
  ENSG00000013588_9 (sequence is synthesized)
tgctgcctactcagtttctcttcctcctgggtgtgttgggcatctttggcctcaccttcgccttcatcatcggactggacgggagcacagggcccacacgcttcttcctctttgggatcc

SEQ ID NO: 16205 - DNA, 120 bp, Artificial Sequence
  ENSG00000013588_10 (sequence is synthesized)
tcttttccatctgcttctcctgcctgctggctcatgctgtcagtctgaccaagctcgtccgggggaggaagcccctttccctgttggtgattctgggtctggccgtgggcttcagcctag

SEQ ID NO: 16206 - DNA, 120 bp, Artificial Sequence
  ENSG00000013588_11 (sequence is synthesized)
tccaggatgttatcgctattgaatatattgtcctgaccatgaataggaccaacgtcaatgtcttttctgagctttccgctcctcgtcgcaatgaagactttgtcctcctgctcacctacg

SEQ ID NO: 16207 - DNA, 120 bp, Artificial Sequence
  ENSG00000013588_12 (sequence is synthesized)
tcctcttcttgatggcgctgaccttcctcatgtcctccttcaccttctgtggttccttcacgggctggaagagacatggggcccacatctacctcacgatgctcctctccattgccatct

SEQ ID NO: 16208 - DNA, 120 bp, Artificial Sequence
  ENSG00000013588_13 (sequence is synthesized)
gggtggcctggatcaccctgctcatgcttcctgactttgaccgcaggtgggatgacaccatcctcagctccgccttggctgccaatggctgggtgttcctgttggcttatgttagtcccg

SEQ ID NO: 16209 - DNA, 120 bp, Artificial Sequence
  ENSG00000013588_14 (sequence is synthesized)
agttttggctgctcacaaagcaacgaaaccccatggattatcctgttgaggatgctttctgtaaacctcaactcgtgaagaagagctatggtgtggagaacagagcctactctcaagagg

SEQ ID NO: 16210 - DNA, 120 bp, Artificial Sequence
  ENSG00000013588_15 (sequence is synthesized)
aaatcactcaaggttttgaagagacaggggacacgctctatgccccctattccacacattttcagctgcagaaccagcctccccaaaaggaattctccatcccacgggcccacgcttggc

SEQ ID NO: 16211 - DNA, 120 bp, Artificial Sequence
  ENSG00000013588_16 (sequence is synthesized)
cgagcccttacaaagactatgaagtaaagaaagagggcagctaactctgtcctgaagagtgggacaaatgcagccgggcggcagatctagcgggagctcaaagggatgtgggcgaaatct

SEQ ID NO: 16212 - DNA, 120 bp, Artificial Sequence
  ENSG00000013588_17 (sequence is synthesized)
tgagtcttctgagaaaactgtacaagacactacgggaacagtttgcctccctcccagcctcaaccacaattcttccatgctggggctgatgtgggctagtaagactccagttcttagagg

SEQ ID NO: 16213 - DNA, 120 bp, Artificial Sequence
  ENSG00000013588_18 (sequence is synthesized)
cgctgtagtatttttttttttttgtctcatcctttggatacttcttttaagtgggagtctcaggcaactcaagtttagacccttactctttttgtttgttttttgaaacaggatcttgct

SEQ ID NO: 16214 - DNA, 86 bp, Artificial Sequence
  ENSG00000013588_19 (sequence is synthesized)
cacccaggcttgagtgcagtggtgcgatcacagcccagtgcagcctcgaccacctgtgctcaagcaatcctcccatctccatagct

SEQ ID NO: 16215 - DNA, 120 bp, Artificial Sequence
  ENSG00000013588_20 (sequence is synthesized)
agctcccagcctaggcccttaatcttgctgttattttccatggactaaaggtctggtcatctgagctcacgctggctcacacagctctaggggcctgctcctctaactcacagtgggttt

SEQ ID NO: 16216 - DNA, 120 bp, Artificial Sequence
  ENSG00000013588_21 (sequence is synthesized)
tgtgaggctctgtggcccagagcagacctgcatatctgagcaaaaatagcaaaagcctctctcagcccactggcctgaatctacactggaagccaacttgctggcacccccgctccccaa

SEQ ID NO: 16217 - DNA, 120 bp, Artificial Sequence
  ENSG00000013588_22 (sequence is synthesized)
cccttcttgcctgggtaggagaggctaaagatcaccctaaatttactcatctctctagtgctgcctcacattgggcctcagcagctccccagcaccaattcacaggtcacccctctcttc

SEQ ID NO: 16218 - DNA, 120 bp, Artificial Sequence
  ENSG00000013588_23 (sequence is synthesized)
ttgcactgtccccaaacttgctgtcaattccgagatctaatctccccctacgctctgccaggaattctttcagacctcactagcacaagcccggttgctccttgtcaggagaatttgtag

SEQ ID NO: 16219 - DNA, 120 bp, Artificial Sequence
  ENSG00000013588_24 (sequence is synthesized)
atcattctcacttcaaattcctggggctgatacttctctcatcttgcaccccaacctctgtaaatagatttaccgcatttacggctgcattctgtaagtgggcatggtctcctaatggag

SEQ ID NO: 16220 - DNA, 120 bp, Artificial Sequence
  ENSG00000013588_25 (sequence is synthesized)
gagtgttcattgtataataagttattcacctgagtatgcaataaagatgtggtggccactctttcatggtggtggcagcagttaccagtaatgagcattagactctgggggatagaacac

SEQ ID NO: 16221 - DNA, 120 bp, Artificial Sequence
  ENSG00000013588_26 (sequence is synthesized)
gggctgccctgagagcttcatgttggagctgaagttcaaggttcacttcctttgggtttgtacttgacccttcttcatgtgtctctcccgttccctctaaaacaagtgtgtttcccctca

SEQ ID NO: 16222 - DNA, 120 bp, Artificial Sequence
  ENSG00000013588_27 (sequence is synthesized)
tttttgaggctgtcaatggtgtgagagccaggatcatcacggggcctgaggttttactccagaaaagcagaggagtggcaaccttggcttggggtttggcagcccaggaaaggcagggag

SEQ ID NO: 16223 - DNA, 120 bp, Artificial Sequence
  ENSG00000013588_28 (sequence is synthesized)
gagagctcaaagccggtttcatgtttcacccaaggtctaattgtgggagaggacaaatccagatcccctgtttgacagaattagttcacaaatgtctcttggcaaaaacatgtgacacct

SEQ ID NO: 16224 - DNA, 120 bp, Artificial Sequence
  ENSG00000013588_29 (sequence is synthesized)
aaccatgataattgacttaatccaagaaagagctctgtagggcagagcaataggaaatctctctttcgttatggaaaaaaaataatccctctacatagaaactgagtgacatgtaaaaat

SEQ ID NO: 16225 - DNA, 120 bp, Artificial Sequence
  ENSG00000013588_30 (sequence is synthesized)
ctgcttttcatcaaaaggaaaaaccagcgtgaggcagaggcgagggaggtggaggtgagtggatgatgtgctgagttagggatgtttatatgccgcaaaggtttggttggtaggcttcgc

SEQ ID NO: 16226 - DNA, 120 bp, Artificial Sequence
  ENSG00000013588_31 (sequence is synthesized)
gctaagattagcctggctttgtactgaaaagggggaaggacacatagtgacacagatccttctggtctttcccaggaggtgtgacctaatgaggtttgttgtgagaataaagcaatgtgg

SEQ ID NO: 16227 - DNA, 120 bp, Artificial Sequence
  ENSG00000013588_32 (sequence is synthesized)
gtgagaataaagcaatgtggtttcacatatattatctatcataggctagggactcaagaaatgcatattccccccccactttctttctctctttccttccttccttcctttcttctttct

SEQ ID NO: 16228 - DNA, 86 bp, Artificial Sequence
  ENSG00000013588_33 (sequence is synthesized)
atcctgggttcaagcgattttcgtgcctcggccttctgagtagctgggattacaggcgtgcgtgcgccaccacgcctggctaattt

SEQ ID NO: 16229 - DNA, 77 bp, Artificial Sequence
  ENSG00000013588_34 (sequence is synthesized)
ggaatcaccatgcccagcctcctttccatcttttctttccttctctggtcttcatactaccaaccaagcaagggagg

SEQ ID NO: 16230 - DNA, 120 bp, Artificial Sequence
  ENSG00000013588_35 (sequence is synthesized)
ctttccatcttttctttccttctctggtcttcatactaccaaccaagcaagggaggaggagtaaaaggtaaaatcacaaaatactctggatcggcatttttttttttttttttttttgag

SEQ ID NO: 16231 - DNA, 77 bp, Artificial Sequence
  ENSG00000013588_36 (sequence is synthesized)
gcagcctcaactttctgtgctcgacgtgcactaccacacttggctaattttattttttcagagatcacatgtggttt

SEQ ID NO: 16232 - DNA, 120 bp, Artificial Sequence
  ENSG00000013588_37 (sequence is synthesized)
acttggctaattttattttttcagagatcacatgtggtttgagggaggatagagaggacagggtgtcaagaacagcatttttaccaagttgatataaaaatgaaacaggatccaggcatg

SEQ ID NO: 16233 - DNA, 120 bp, Artificial Sequence
  ENSG00000013588_38 (sequence is synthesized)
ggtctttacactgatagttacagtaagttttaaaatctgagcagcaatttgaatcacttgttgaaaaacacacaaaatatattttttgtagaggtgggggtcttgctctgttgcccaggc

SEQ ID NO: 16234 - DNA, 81 bp, Artificial Sequence
  ENSG00000013588_39 (sequence is synthesized)
gctttctttttagtgaaaaggatctgtgggagcttttattcccatggctgccttcctcaagtcaacctctttccccggaaa

SEQ ID NO: 16235 - DNA, 120 bp, Artificial Sequence
  ENSG00000013588_40 (sequence is synthesized)
ccatggctgccttcctcaagtcaacctctttccccggaaatggcatcatctctggactgttgtttctccttcttccttctcctccttctcctcctcctcctcctccaccatgcccggctg

SEQ ID NO: 16236 - DNA, 120 bp, Artificial Sequence
  ENSG00000013588_41 (sequence is synthesized)
ttagtagagacagggtttcactatatgggccaggcagatctcgaactccaaacctcgtgatccacctaccttggcctctgaaagtgctgggataccgtggcctctgaaagtgctgggatt

SEQ ID NO: 16237 - DNA, 120 bp, Artificial Sequence
  ENSG00000013588_42 (sequence is synthesized)
acaggcatgagccaccgcgcccggccccgttgtttcccttctaagaaacgcagtggtctctgaagcctgcaggggcaggccagccctgcactgaacgcctgttcttgccaggtggcagaa

SEQ ID NO: 16238 - DNA, 120 bp, Artificial Sequence
  ENSG00000013588_43 (sequence is synthesized)
caggtggcagaaggttgctgctcatttgagcagtacctgtcacccctcctcccactgctgcggctgttaactcatcttcaggtctcacaccttctgcacataaataagctatttttaaaa

SEQ ID NO: 16239 - DNA, 120 bp, Artificial Sequence
  ENSG00000013588_44 (sequence is synthesized)
gttattatttttttactctttcttttctttggagagggtaccaaaggatagctgttctgtttaagtagggacctctcatggcctacaggctttgacatctgagaatcaaactggagaaca

SEQ ID NO: 16240 - DNA, 120 bp, Artificial Sequence
  ENSG00000013588_45 (sequence is synthesized)
ttccgaagccgttcttataagtgtctccatctctacctgggctgaaatggaatgtgcaaatgtagcccagcctggtccttgggtgttgccagttgattgatgactgggagccaaagtggc

SEQ ID NO: 16241 - DNA, 120 bp, Artificial Sequence
  ENSG00000013588_46 (sequence is synthesized)
atctcctttgacctaaacgggcgatgatgaaataaaactcaacagcctttctctcatcttgcattgtgagatgcgaaatagagcgtgtctctctgcctctcattttaggctgaggccgtc

SEQ ID NO: 16242 - DNA, 120 bp, Artificial Sequence
  ENSG00000013588_47 (sequence is synthesized)
caaagcggccatgccccatgtttccactagatggcgctgacacttcaggcatcaaccctcatggcctctcagccttgcaaaggcagccacttaaagtcggtgtcctgtgtggggcaccaa

SEQ ID NO: 16243 - DNA, 120 bp, Artificial Sequence
  ENSG00000013588_48 (sequence is synthesized)
gctgagctgcagacacccagtaggcgcgaggcaaatgcgtcccattttaagaggcttgtatttatgagctctttgcttcctccctcccactaactttaaagaattgctctccatctcctt

SEQ ID NO: 16244 - DNA, 120 bp, Artificial Sequence
  ENSG00000013588_49 (sequence is synthesized)
tggcaaagttcctttgccctttgtcttatttttgtgaaaccctccaaggtatttccagtccatttgcatccaatctggcatctttacggagagcggtctcatatgctattgttgttaacg

SEQ ID NO: 16245 - DNA, 120 bp, Artificial Sequence
  ENSG00000013588_50 (sequence is synthesized)
tggactagtatttatgtgttgagaacactggctgtttgtcaggaaaagtgtgccaaaacaaagagtacggccggccctggaaatgcatcagcaaaacccatttcccccgtgcactcattc

SEQ ID NO: 16246 - DNA, 120 bp, Artificial Sequence
  ENSG00000013588_51 (sequence is synthesized)
tgagcttccttccttcatttctgtcattactgctgagaactggactgtgcccagctgacctttcccttccttgccctcatcttgctgccagggtctgcaggtttgccaccgtcccggccc

SEQ ID NO: 16247 - DNA, 120 bp, Artificial Sequence
  ENSG00000013588_52 (sequence is synthesized)
cagtctgaaacatgggattatttcagaattggaggtggcagcttcagaaaaaaatccttctcgtgtgttgactgctgagatccaggaactgggaaatcaacccccagtttgtagattgct

SEQ ID NO: 16248 - DNA, 120 bp, Artificial Sequence
  ENSG00000013588_53 (sequence is synthesized)
ctctttggaaattctgtggcccaacctcgtggctgttttctggaattccttctatcggggcagacagtgctgtgcctttcttgacttcaggatgttccaaggatgctgctggatctgtgt

SEQ ID NO: 16249 - DNA, 120 bp, Artificial Sequence
  ENSG00000013588_54 (sequence is synthesized)
gtgtgtgtgtgtgtgtgtgcgtgcgtgcgtgtatgtgcgcctgaccctgatttctgcaacctccagatttctttcttgacccttcaaagtggaacagtccagtgccaaaaattttagagt

SEQ ID NO: 16250 - DNA, 120 bp, Artificial Sequence
  ENSG00000013588_55 (sequence is synthesized)
ccaaaaattttagagtttgagaaggtcacagaaatcctctagttggtgcctccacagtcttcattttacagaggaactcagggctaatggagttaatgcaactagatcagggttttgggt

SEQ ID NO: 16251 - DNA, 120 bp, Artificial Sequence
  ENSG00000013588_56 (sequence is synthesized)
ctgtgttctttctaccgtcagcacctgtgtggtcaattctggacacttcccagagaagtctttgagtagagaatcctactcaaatttcactgtatattttaagcattcctctcctttccc

SEQ ID NO: 16252 - DNA, 120 bp, Artificial Sequence
  ENSG00000013588_57 (sequence is synthesized)
tttgcctcccctgttgccttttcttcccctgatttctcctctggtcatctcctctcccttctgcgtgtaagccatgggaaagggatgagggaggacagcttctggttaaacacaggtccc

SEQ ID NO: 16253 - DNA, 120 bp, Artificial Sequence
  ENSG00000013588_58 (sequence is synthesized)
tcttccacatcaaatgaacattggcttcctgggacagaaggccttcaaaggagggattgcaaagcaaggcaaagcgttctgtcttcattttccccatccccatgagacaagactgatgga

SEQ ID NO: 16254 - DNA, 120 bp, Artificial Sequence
  ENSG00000013588_59 (sequence is synthesized)
aagggtggtggggcaacactgcttaatggatgccttttcacatcatttcagtttttagccctcatgactgtattttctaatcagagacaataacattttaaataaaacaacgacaaagaa

SEQ ID NO: 16255 - DNA, 120 bp, Artificial Sequence
  ENSG00000013588_60 (sequence is synthesized)
tcaggaacactgatcctttggaaacagacgatgttacctttctcatggcccctagatggccacttgaaggaatgatgggtcttctttcctctaagcggcctcacggggttagtggaacca

SEQ ID NO: 16256 - DNA, 120 bp, Artificial Sequence
  ENSG00000013588_61 (sequence is synthesized)
cttgatagaatagataagttccttaaggctcagatcttgcttaaagtcgtccagcctgttagagacaagtagaacacgaagctggcctctggagtctttattgagtactttgtacaattg

SEQ ID NO: 16257 - DNA, 120 bp, Artificial Sequence
  ENSG00000013588_62 (sequence is synthesized)
gtgtagactgggagagccctcctcacttcccctttcttgtgctgtaatttcctgtggggcagaacacctcagaggtttctgtgcatcaaaataagatgcagcaaagacatggaaaaagga

SEQ ID NO: 16258 - DNA, 120 bp, Artificial Sequence
  ENSG00000013588_63 (sequence is synthesized)
taacgagacaaattcccagcaataagtagatgaggttgtgttttttataaaagataacgaggcattccttccagaaatgtggagcctttgtagatttcagtgcataaaaccaagccatga

SEQ ID NO: 16259 - DNA, 120 bp, Artificial Sequence
  ENSG00000013588_64 (sequence is synthesized)
tttcctgcagtgatcacagagcagagaagggagaaagcccttttatcacaaaccagcaggaagtctctgtaaaattggtaaggattctggtttagtgtgaagaaccacattttttgtgta

SEQ ID NO: 16260 - DNA, 120 bp, Artificial Sequence
  ENSG00000013588_65 (sequence is synthesized)
ggtttagtgtgaagaaccacattttttgtgtatgtttctgggcccatgggaaggaacagatcatatttgacatacaagaatcaaatgattcaggccaggcatggtggctcactcctgtaa

SEQ ID NO: 16261 - DNA, 120 bp, Artificial Sequence
  ENSG00000013588_66 (sequence is synthesized)
cctgttgaaatggcaggaactggagtgggtttcacgatatgactgtttccttttcagaaccagcctccccaaaaggaattctccatcccacgggcccacgcttggccgagcccttacaaa

SEQ ID NO: 16262 - DNA, 120 bp, Artificial Sequence
  ENSG00000013619_0 (sequence is synthesized)
ccctgtgtctaggtcgtttgggaaacgccttggagagtcaagaataaatttgcaggtcaaacaatggatgactggaaaagtcggcttgtaatcaagagcatgcttccccatttcgccatg

SEQ ID NO: 16263 - DNA, 120 bp, Artificial Sequence
  ENSG00000013619_1 (sequence is synthesized)
gtgggaaatcgtcaggagcccagaaagctccaggaatcgggaaagaagccctcgtggatggaggaagaagatttatcttttctctacaagagcagcccaggaagaaagcatcagggaact

SEQ ID NO: 16264 - DNA, 120 bp, Artificial Sequence
  ENSG00000013619_2 (sequence is synthesized)
gttaagaggagacaagaagaagaccacttccagtttccagacatggctgatgggggctaccctaataaaattaagaggccttgccttgaagatgtcacccttgcaatgggcccaggtgct

SEQ ID NO: 16265 - DNA, 120 bp, Artificial Sequence
  ENSG00000013619_3 (sequence is synthesized)
catcctagtactgcttgtgcagaactgcaggtccctccattgacaataaatcctagccctgcggctatgggagtggctggccagtcattactgctggagaataaccctatgaatggcaac

SEQ ID NO: 16266 - DNA, 120 bp, Artificial Sequence
  ENSG00000013619_4 (sequence is synthesized)
atcatgggctcaccatttgtagtaccacagactacagaagtgggactgaaagggcccactgttccttactatgagaaaatcaacagcgtgccggctgtagaccaggagcttcaagagctg

SEQ ID NO: 16267 - DNA, 120 bp, Artificial Sequence
  ENSG00000013619_5 (sequence is synthesized)
ctagaggagctcaccaaaattcaagacccttctccaaatgagctagatcttgagaagatactggggacgaagccagaagagccactggttttagatcatccccaggcaaccctaagcaca

SEQ ID NO: 16268 - DNA, 120 bp, Artificial Sequence
  ENSG00000013619_6 (sequence is synthesized)
actcccaagccttcggttcagatgtcacacttggagagcctggcttccagcaaggagtttgcttctagttgcagccaagttactggcatgtcacttcagatcccatcctcctccacaggg

SEQ ID NO: 16269 - DNA, 120 bp, Artificial Sequence
  ENSG00000013619_7 (sequence is synthesized)
atcagctattcgattccttccaccagtaagcagatagtgtcaccgagttcttcaatggcacagtccaagagccaggtccaggccatgctccctgtcgctctgccccccttaccagtgcct

SEQ ID NO: 16270 - DNA, 120 bp, Artificial Sequence
  ENSG00000013619_8 (sequence is synthesized)
cagtggcatcacgcccaccagctgaaggcgttggcagccagcaagcaggggtctgctacaaagcagcaagggcccacccccagttggtctggtctgcctcctccaggactctctccacct

SEQ ID NO: 16271 - DNA, 120 bp, Artificial Sequence
  ENSG00000013619_9 (sequence is synthesized)
taccgcccagtgccatcaccacacccaccaccgctgccactgccaccaccaccacccccattcagcccccagagcctcatggtgtcctgcatgtcgtccaataccttgtcgggtagcact

SEQ ID NO: 16272 - DNA, 120 bp, Artificial Sequence
  ENSG00000013619_10 (sequence is synthesized)
ctccgaggctctcccaatgccttactgtcaagcatgacgtccagcagcaatgctgccctggggcccgccatgccctatgctcctgagaagctccccagccctgctctcactcaacagccg

SEQ ID NO: 16273 - DNA, 120 bp, Artificial Sequence
  ENSG00000013619_11 (sequence is synthesized)
cagttcggccctcagagctccattcttgccaacctcatgtcctctaccatcaaaacccctcaaggacacctgatgtctgctctgcctgccagcaaccctgggccgtccccaccctatcgc

SEQ ID NO: 16274 - DNA, 120 bp, Artificial Sequence
  ENSG00000013619_12 (sequence is synthesized)
ccagagaagctctctagcccaggcttgccacagcagtccttcaccccacagtgttccctgatccgaagcctcactcccaccagtaatcttctaagccagcaacagcagcagcagcagcag

SEQ ID NO: 16275 - DNA, 120 bp, Artificial Sequence
  ENSG00000013619_13 (sequence is synthesized)
cagcagcaagcaaatgtgatctttaagcccataagcagcaactcatccaaaaccctgagcatgatcatgcagcaggggatggcaagctccagcccaggagccacggagccatttactttt

SEQ ID NO: 16276 - DNA, 120 bp, Artificial Sequence
  ENSG00000013619_14 (sequence is synthesized)
ggcaacaccaagcccttgtcccattttgtttctgagccgggtccccagaagatgccctccatgcctaccacctctaggcagccttccctgctccactacctgcagcagccgacaccaacg

SEQ ID NO: 16277 - DNA, 120 bp, Artificial Sequence
  ENSG00000013619_15 (sequence is synthesized)
caggcctcctcagccactgcctcctccacggccactgccaccttgcagctgcagcagcagcagcagcaacagcagcagcagcctgaccattcttcattccttctgcagcagatgatgcag

SEQ ID NO: 16278 - DNA, 120 bp, Artificial Sequence
  ENSG00000013619_16 (sequence is synthesized)
caaccccagcgttttcagcgatcagtggcctcagattccatgcctgctctgcccagacagggctgttgccatctgtttgcatggacttctgcagctagctcggtgaagccccagcatcaa

SEQ ID NO: 16279 - DNA, 120 bp, Artificial Sequence
  ENSG00000013619_17 (sequence is synthesized)
cacgggaactctttcactagcaggcaagatcctcagcctggagacgtgtcaccgtctaacattactcatgtagacaaagcctgcaagcttggggaagccaggcacccccaggtcagcctc

SEQ ID NO: 16280 - DNA, 120 bp, Artificial Sequence
  ENSG00000013619_18 (sequence is synthesized)
gggcgacagcccccgtcctgccaggccctggggagtgagtccttcctgcccggcagctcctttgctcatgagctggcccgagtcacctcctcgtacagcacctcagaggcagcgccctgg

SEQ ID NO: 16281 - DNA, 120 bp, Artificial Sequence
  ENSG00000013619_19 (sequence is synthesized)
gcctagctgcgacgccacagcaagaggaacagagatcaggtcttatggcaatgacccctgaacggcagaatgcatatatctcccaacagatgagtccatttgaagccgtccaagaacaag

SEQ ID NO: 16282 - DNA, 120 bp, Artificial Sequence
  ENSG00000013619_20 (sequence is synthesized)
tcacctccaagtgtagccggatcaaggcaagccccccatctagcaagcacttgatgccacccagaactgggcttcttcagaacaatctgagtccaggaatgatcccactcaccaggcacc

SEQ ID NO: 16283 - DNA, 120 bp, Artificial Sequence
  ENSG00000013619_21 (sequence is synthesized)
agagctgcgagggcatgggagtgatctcaccaactctggggaagcggcaaggaattttcacctccagcccccagtgtcccatcctctcacactcaggccagactcccctgggcagacttg

SEQ ID NO: 16284 - DNA, 120 bp, Artificial Sequence
  ENSG00000013619_22 (sequence is synthesized)
actctgtctgccagcatatgcagagtcccaaggccaccccaccagaagtgcccctgcctgggttctgtcccagctccctgggcacccagtccttgagtccccaccagctcagacggccta

SEQ ID NO: 16285 - DNA, 120 bp, Artificial Sequence
  ENSG00000013619_23 (sequence is synthesized)
gtgtgccaagaatgcccactgcgttcaacaatgctgcatgggtcacagcggcagcagctgtgaccacagcagtttcggggaaaacacccctcagccaagtggataatagcgttcagcagc

SEQ ID NO: 16286 - DNA, 120 bp, Artificial Sequence
  ENSG00000013619_24 (sequence is synthesized)
actcaccttctggccaggcctgccttcagaggccatctgattgggaggcacaagtgcccgctgcgatgggaacacaagtgcccctggccaacaaccccagcttcagcctgctgggcagcc

SEQ ID NO: 16287 - DNA, 120 bp, Artificial Sequence
  ENSG00000013619_25 (sequence is synthesized)
agagcctcaggcagagcccggtacagggcccggtgcctgtagcaaacaccaccaagttcctccagcagggtatggccagctttagtcccctgagccccatacagggcatcgagccaccaa

SEQ ID NO: 16288 - DNA, 120 bp, Artificial Sequence
  ENSG00000013619_26 (sequence is synthesized)
gctatgtggctgctgctgccaccgctgctgctgcttctgccgttgctgccagccagttcccaggtccgttcgacagaacggatattccccctgagctgccacctgccgactttttgcgcc

SEQ ID NO: 16289 - DNA, 120 bp, Artificial Sequence
  ENSG00000013619_27 (sequence is synthesized)
agccccaacccccactaaatgatctgatttcgtcacctgactgcaatgaggtagatttcattgaagctctcttgaaaggctcctgtgtgagcccagatgaagactgggtgtgcaacttga

SEQ ID NO: 16290 - DNA, 120 bp, Artificial Sequence
  ENSG00000013619_28 (sequence is synthesized)
ggctgatcgacgacattttggaacagcatgctgctgctcaaaatgccacagcccagaattctgggcaagtcacccaggatgctggggcactttaaatctgagcaggatgcccatagaaac

SEQ ID NO: 16291 - DNA, 120 bp, Artificial Sequence
  ENSG00000013619_29 (sequence is synthesized)
ccccatggtgacatcactctaggaagtggtgtcgatccatacccgcagttgtctcccgttacaatttgagtggtgttgtcagcccatgcttatccctctctctacctgtgacaaaatgga

SEQ ID NO: 16292 - DNA, 120 bp, Artificial Sequence
  ENSG00000013619_30 (sequence is synthesized)
aagctggtgatttttcaagctacgtgtacatatttgaaaattttgtaaatggttttcctaaacattaatgacagaagtatttatacttcattttgtgactttgtaaataaagcgacggct

SEQ ID NO: 16293 - DNA, 120 bp, Artificial Sequence
  ENSG00000013619_31 (sequence is synthesized)
tttgtttcagtagagttgtgtttactatgcattgttttgtgtttattatacaatgttacaaatatgcagaccgtgttgtttgctccagtgataccttgttaagctaggtggctgagtcgc

SEQ ID NO: 16294 - DNA, 120 bp, Artificial Sequence
  ENSG00000013619_32 (sequence is synthesized)
ttatggttttaatgcaatgagcaatgtggatatgaccaagagttgttgtgcaagttgacaaatgccaaatagaaaaccacttggccatttatttctatgttcactaaaaatcctattgcc

SEQ ID NO: 16295 - DNA, 120 bp, Artificial Sequence
  ENSG00000013619_33 (sequence is synthesized)
ttgtgtgattcttaatctcttttgcgaacctttcagtctccgctagctctttcctaatgagctttacagcagaagccgttttatcgttaagtgccccacagagacactttaccaggaggc

SEQ ID NO: 16296 - DNA, 120 bp, Artificial Sequence
  ENSG00000013619_34 (sequence is synthesized)
tgggagagttctccagatttgggagaggcgcagagacagtgtgtgagccgagccctgtctcagcaatccacctggaggagctagagtatcctcctccctttaccattcagaccgagagaa

SEQ ID NO: 16297 - DNA, 120 bp, Artificial Sequence
  ENSG00000013619_35 (sequence is synthesized)
aaagcccagcttgtgtgcaccctcgtggggttaaggcgagctgttcctggtttaaagcctttcagtatttgttttgatgtaaggctctgtggtttgggggggaacatctgtaaacattat

SEQ ID NO: 16298 - DNA, 120 bp, Artificial Sequence
  ENSG00000013619_36 (sequence is synthesized)
tagttgatttggggtttgtctttgatggtttctatctgcaattatcgtcatgtatatttaagtgtctgttatagaaaacccacacccactgtcctgtaaacttttctcagtgtccagact

SEQ ID NO: 16299 - DNA, 120 bp, Artificial Sequence
  ENSG00000013619_37 (sequence is synthesized)
ttctgtaatcacattttaattgccacctcgtatttcacctctacatttgaaatctggcgtctgtttcaagccagtgtgttttttcttcgttctgtaataaacagccaggagaaaagtgcc

SEQ ID NO: 16300 - DNA, 120 bp, Artificial Sequence
  ENSG00000013619_38 (sequence is synthesized)
gccgggcggtgggaatggagcgagcagattgaggccgccactgcagcgccgccagcatgaacttggccgcgagctgaagcggccggcggcgggcgggcgcgggggcaccggccgctagcc

SEQ ID NO: 16301 - DNA, 120 bp, Artificial Sequence
  ENSG00000013619_39 (sequence is synthesized)
cgctagccagggggtgatctgcaacagggctgggttccttggcggccgcctgagtccaggctgcccgcgccggcggccgcccgcccctcggacactgcccccgccgccgccggagctctg

SEQ ID NO: 16302 - DNA, 120 bp, Artificial Sequence
  ENSG00000013619_40 (sequence is synthesized)
acgtagcccacgaagggatcttgctgggttctcggaggtggccccagcgctttccgagggccgagagcgtgggcgtggagggaaggaggggcctagtgggcggcgggcccacccctttat

SEQ ID NO: 16303 - DNA, 120 bp, Artificial Sequence
  ENSG00000013619_41 (sequence is synthesized)
tcgtggcctgcggctccgctgagcgtgaccagatgtgttggtgacaggttgctactcagaggtgcggacaggagctgagcgctgctgctgtcggagcagacgcggcgttcccgggttgtg

SEQ ID NO: 16304 - DNA, 120 bp, Artificial Sequence
  ENSG00000013619_42 (sequence is synthesized)
ctatgacagccctgcagaggctaggtatccaccactacatagcccacagtctgctctgccccagccacagcatccttggcttgctcagccattctttgtctgggtagtttgaagtccaat

SEQ ID NO: 16305 - DNA, 120 bp, Artificial Sequence
  ENSG00000013619_43 (sequence is synthesized)
ccccactctcattacttaccatcctctgaatgcagccagtctgtctgggtctccctgagactggcatgcccagactcctgtgggtatagtctggccaaggcagagttagcataggactgt

SEQ ID NO: 16306 - DNA, 120 bp, Artificial Sequence
  ENSG00000013619_44 (sequence is synthesized)
cacctccctccttctacatactctgcttctattaatgcagcctaatgttacatttgttcttttggtgaccgcatctcactgctgacccatcctgagcagatggacatccaaaatgcctaa

SEQ ID NO: 16307 - DNA, 120 bp, Artificial Sequence
  ENSG00000013619_45 (sequence is synthesized)
aacttttttctgtgtgctcttgctattaagttctgtctctcctgccccattctatgctgttgcagttgtgtttttaacccaggtgcagaatcttactttatttatacctgtggaattttg

SEQ ID NO: 16308 - DNA, 120 bp, Artificial Sequence
  ENSG00000013619_46 (sequence is synthesized)
ctcgagagggtggggcatgcatgcgagtgtatgctggtgtgtttattcatgctttctgctgcaccaaagccaagtcctaggtccccacgcagcgatcctaaggctaattattaattggta

SEQ ID NO: 16309 - DNA, 120 bp, Artificial Sequence
  ENSG00000013725_0 (sequence is synthesized)
actcacaggttgggtttgatcgcatgcgtgtcggagaggagagagcagagagagacacaggaacaagaacagcaaagggtagagcagacctgcgccaggggcgcacaacggccgtgtcca

SEQ ID NO: 16310 - DNA, 120 bp, Artificial Sequence
  ENSG00000013725_1 (sequence is synthesized)
cctcccggccccaagatggtgcttcccacaggcagccacgcgtagcagccagagacagctccagacatgtggctcttcttcgggatcactggattgctgacggcagccctctcaggtcat

SEQ ID NO: 16311 - DNA, 120 bp, Artificial Sequence
  ENSG00000013725_2 (sequence is synthesized)
ccatctccagccccacctgaccagctcaacaccagcagtgcagagagtgagctctgggagccaggggagcggcttccggtccgtctgacaaacgggagcagcagctgcagcgggacggtg

SEQ ID NO: 16312 - DNA, 120 bp, Artificial Sequence
  ENSG00000013725_3 (sequence is synthesized)
cgggagcagcagctgcagcgggacggtggaggtgcggctcgaggcgtcctgggagcccgcgtgcggggcgctctgggacagccgcgccgccgaggccgtgtgccgagcactgggctgcgg

SEQ ID NO: 16313 - DNA, 120 bp, Artificial Sequence
  ENSG00000013725_4 (sequence is synthesized)
ccgccgacccctgagctgccgcccccgcctgcagccgggaacaccagcgtagcagctaatgccactctggccggggcgcccgccctcctgtgcagcggcgccgagtggcggctctgcgag

SEQ ID NO: 16314 - DNA, 120 bp, Artificial Sequence
  ENSG00000013725_5 (sequence is synthesized)
gtggtggagcacgcgtgccgcagcgacgggaggcgggcccgtgtcacctgtgcagagaaccgcgcgctgcgcctggtggacggtggcggcgcctgcgccggccgcgtggagatgctggag

SEQ ID NO: 16315 - DNA, 120 bp, Artificial Sequence
  ENSG00000013725_6 (sequence is synthesized)
catggcgagtggggatcagtgtgcgatgacacttgggacctggaggacgcccacgtggtgtgcaggcaactgggctgcggctgggcagtccaggccctgcccggcttgcacttcacgccc

SEQ ID NO: 16316 - DNA, 120 bp, Artificial Sequence
  ENSG00000013725_7 (sequence is synthesized)
ggccgcgggcctatccaccgggaccaggtgaactgctcgggggccgaagcttacctgtgggactgcccggggctgccaggacagcactactgcggccacaaagaggacgcgggcgcggtg

SEQ ID NO: 16317 - DNA, 120 bp, Artificial Sequence
  ENSG00000013725_8 (sequence is synthesized)
tgctcagagcaccagtcctggcgcctgacagggggcgctgaccgctgcgaggggcaggtggaggtacacttccgaggggtctggaacacagtgtgtgacagtgagtggtacccatcggag

SEQ ID NO: 16318 - DNA, 120 bp, Artificial Sequence
  ENSG00000013725_9 (sequence is synthesized)
gccaaggtgctctgccagtccttgggctgtggaactgcggttgagaggcccaaggggctgccccactccttgtccggcaggatgtactactcatgcaatggggaggagctcaccctctcc

SEQ ID NO: 16319 - DNA, 120 bp, Artificial Sequence
  ENSG00000013725_10 (sequence is synthesized)
aactgctcctggcggttcaacaactccaacctctgcagccagtcgctggcagccagggtcctctgctcagcttcccggagtttgcacaatctgtccactcccgaagtccctgcaagtgtt

SEQ ID NO: 16320 - DNA, 120 bp, Artificial Sequence
  ENSG00000013725_11 (sequence is synthesized)
cagacagtcactatagaatcttctgtgacagtgaaaatagagaacaaggaatctcgggagctaatgctcctcatcccctccatcgttctgggaattctcctccttggctccctcatcttc

SEQ ID NO: 16321 - DNA, 120 bp, Artificial Sequence
  ENSG00000013725_12 (sequence is synthesized)
atagccttcatcctcttgagaattaaaggaaaatatgccctccccgtaatggtgaaccaccagcacctacccaccaccatcccggcagggagcaatagctatcaaccggtccccatcacc

SEQ ID NO: 16322 - DNA, 120 bp, Artificial Sequence
  ENSG00000013725_13 (sequence is synthesized)
gttttcatgctgcccatccaggtccaggccccgccccctgaggactcagactctggctcggactcagactatgagcactatgacttcagcgcccagcctcctgtggccctgaccaccttc

SEQ ID NO: 16323 - DNA, 120 bp, Artificial Sequence
  ENSG00000013725_14 (sequence is synthesized)
tacaattcccagcggcatcgggtcacagatgaggaggtccagcaaagcaggttccagatgccacccttggaggaaggacttgaagagttgcatgcctcccacatcccaactgccaaccct

SEQ ID NO: 16324 - DNA, 120 bp, Artificial Sequence
  ENSG00000013725_15 (sequence is synthesized)
ggacactgcattacagacccgccatccctgggccctcagtatcacccgaggagcaacagtgagtcgagcacctcttcaggggaggattactgcaatagtcccaaaagcaagctgcctcca

SEQ ID NO: 16325 - DNA, 120 bp, Artificial Sequence
  ENSG00000013725_16 (sequence is synthesized)
tggaacccccaggtgttttcttcagagaggagttccttcctggagcagcccccaaacttggagctggccggcacccagccagccttttcagcagggcccccggctgatgacagctccagc

SEQ ID NO: 16326 - DNA, 120 bp, Artificial Sequence
  ENSG00000013725_17 (sequence is synthesized)
acctcatccggggagtggtaccagaacttccagccaccaccccagcccccttcggaggagcagtttggctgtccagggtcccccagccctcagcctgactccaccgacaacgatgactac

SEQ ID NO: 16327 - DNA, 120 bp, Artificial Sequence
  ENSG00000013725_18 (sequence is synthesized)
gatgacatcagcgcagcctaggccggggccagccgaggctcctggggtggctctgaccctctggcctcctgctctacctactccctttcccctttcccaccctcccagctcacctcccca

SEQ ID NO: 16328 - DNA, 120 bp, Artificial Sequence
  ENSG00000013725_19 (sequence is synthesized)
tggagctgagaggcctcccttggagagatggaaggaaacgttataccttgtacccctcggtctccatccatcaagccaaacctgctgccacagccctcccccggccccagatagcagccc

SEQ ID NO: 16329 - DNA, 120 bp, Artificial Sequence
  ENSG00000013725_20 (sequence is synthesized)
cagggaggatgctgcctccaagaggtgtgagccctctgtctcggggatgaacaagcagagtctgggctacctcttgacagctggtggaggggagttggggagctggactggatgactctg

SEQ ID NO: 16330 - DNA, 120 bp, Artificial Sequence
  ENSG00000013725_21 (sequence is synthesized)
gaggccccttccaaacctcaagtgtccggcgctttgattgcctgagtttctgacacttcagggcccagaggtcctgcgaggggcagaactggacccccatgccagtgctgctgcaggagg

SEQ ID NO: 16331 - DNA, 120 bp, Artificial Sequence
  ENSG00000013725_22 (sequence is synthesized)
gcccatatactagggtctgctgagctgttgtcactgatcggtgggcgctgggggggtagggtagcacaccagctgtcccaggctttgctccgggcggtaactgcacttgggcagggaata

SEQ ID NO: 16332 - DNA, 120 bp, Artificial Sequence
  ENSG00000013725_23 (sequence is synthesized)
tagccttcctgggcacaactagctgacaatgacaggttgactgtgtacccccaaccaaggagctggggcccaaggccagtcctgccccagagacactccaagtccgccaggggcacagac

SEQ ID NO: 16333 - DNA, 120 bp, Artificial Sequence
  ENSG00000013725_24 (sequence is synthesized)
cagttctgcagtgactgtccctggacaatgggtctttattctgagtttcctatggtttacaaagagggccccagcccagccccaccacagatcccagagataggggcccagtctccatgg

SEQ ID NO: 16334 - DNA, 120 bp, Artificial Sequence
  ENSG00000013725_25 (sequence is synthesized)
gggcaaggagcatagagatgttttccaggaaggggctcagaagctgcactaggccccgagtccccatgtgtctccttgaattgatgaggatgctcctgggagggatgcgtgactatgtgg

SEQ ID NO: 16335 - DNA, 120 bp, Artificial Sequence
  ENSG00000013725_26 (sequence is synthesized)
tgttgcacccggggctgcaaacgtctccgtgcagcccccagagagaggcccatgggctcagaccaggctttgttgtcctgctctgagtatcctgagattaaactgaattgctgaatgaaa

SEQ ID NO: 16336 - DNA, 120 bp, Artificial Sequence
  ENSG00000013725_27 (sequence is synthesized)
aacctgagattccgagcccaggcatataagatgcaagactgagagtccacagtgctataacattgaaattaaaagtcagtggtacccggttcaaaagagctgactccaagatcccagaca

SEQ ID NO: 16337 - DNA, 120 bp, Artificial Sequence
  ENSG00000013725_28 (sequence is synthesized)
ctcatatcctcaagactctataaatctctgattctgaaacgtgaaggtgccacagagcctgtgatgcagtgattccagaccatctgggtttcactctaggaaggcttcttgaaggagcaa

SEQ ID NO: 16338 - DNA, 120 bp, Artificial Sequence
  ENSG00000013725_29 (sequence is synthesized)
acatctgtccttctcctgcccagagctgccaggtcacaaggacagaaccaagactcttgatacctctctaagtagcaggagggacagctggggctgggggctggggggttgtagggcact

SEQ ID NO: 16339 - DNA, 120 bp, Artificial Sequence
  ENSG00000013725_30 (sequence is synthesized)
agagtttctgtccccaggctagattaaggcgaaggctctgctggattgggatatgaacctggaatttgatgggaaatgctaagccctctctgcctccggagttgtcctcccaccctattc

SEQ ID NO: 16340 - DNA, 120 bp, Artificial Sequence
  ENSG00000013725_31 (sequence is synthesized)
agcctacccaggccccgggaaatccagcctcttctccaggctcctaaatgatgaggttgagccttcacccctccccaccaccgcctctgcttgcagattcccagcggcatcgggtcacag

SEQ ID NO: 16341 - DNA, 120 bp, Artificial Sequence
  ENSG00000013725_32 (sequence is synthesized)
atgaggaggtccagcaaagcaggttccagatgccacccttggaggaaggtgagtcaggatgggaaggggtgtgaatggcagtcccacctccagagagtagctcagctcagcttgagacct

SEQ ID NO: 16342 - DNA, 120 bp, Artificial Sequence
  ENSG00000013725_33 (sequence is synthesized)
tccagcaggaacctccctcaatgagtctttcctgactttcacaaatcctataggcagtaagtgctttctgaagtctgacttaaagccctcttgctgcactgcttctttcgtcaccattct

SEQ ID NO: 16343 - DNA, 120 bp, Artificial Sequence
  ENSG00000013725_34 (sequence is synthesized)
cagtttggctgtccaggtgccaatatctggggaagggatgtgggagggggacagagagggactggggagtaaatgagtggggaactattggatgcattcgctcaaggggaaaaggagaaa

SEQ ID NO: 16344 - DNA, 120 bp, Artificial Sequence
  ENSG00000013725_35 (sequence is synthesized)
aggagaaaggaagggtaaaagaagagagggaaagtaactttttaaaaaacaaagcaaggccaggcatggtagctcaagcctgtaatcccagcacaaggcaggaggattgcttgaggccag

SEQ ID NO: 16345 - DNA, 120 bp, Artificial Sequence
  ENSG00000013725_36 (sequence is synthesized)
gactagccccgggaacatagcaagaccagtctctacaaaactaaaaactaaatattagccaagggtagcacgtgcctatagtcccagctcctcaggaggctgaggtgggaggatcgtgtg

SEQ ID NO: 16346 - DNA, 120 bp, Artificial Sequence
  ENSG00000013725_37 (sequence is synthesized)
ctctttctacaagaaaacaaacacaagcacaacaagaatatgaagaggtggggaaaatggatgtggacgggatggagaaatagtcaaacaggttgctttgataagaagtgagctccctgt

SEQ ID NO: 16347 - DNA, 120 bp, Artificial Sequence
  ENSG00000013725_38 (sequence is synthesized)
cagtggaggcattcaagcagaagcagctggttggctccttgggggagactgtggtagcagaggggcttccaacattcaatcgtccaccgtgtcgtgcagtgtgccattgtggagaccata

SEQ ID NO: 16348 - DNA, 120 bp, Artificial Sequence
  ENSG00000013725_39 (sequence is synthesized)
gccctgaaccagacagacgaggctattccctcagtgctgatgttctagtcagggacatggccggaagcaagatgatcagatggcttcatgcagcatcccacggggatagtgatgtggagc

SEQ ID NO: 16349 - DNA, 120 bp, Artificial Sequence
  ENSG00000013725_40 (sequence is synthesized)
cagaaccactcagctccgtcctgtggggcagcagggcaatgactgggtctcccactaatctgggcctctctgcccacagggtcccccagccctcagcctgactccaccgacaacgatgac

SEQ ID NO: 16350 - DNA, 120 bp, Artificial Sequence
  ENSG00000013725_41 (sequence is synthesized)
agcctggacaacagagtgagaccctgtcccagaaaagaaagaaaaaaaaagggggctacttggtgctcccctgctactctgcctctcacctctgccgttcatactctaccatccctccct

SEQ ID NO: 16351 - DNA, 120 bp, Artificial Sequence
  ENSG00000013725_42 (sequence is synthesized)
gcatggggcctggcccagagcctagctgagagaatggaatgaatgagtggcatctccctgaccaagggttaagatagatgggaactcagaaggactttgagccgcctcagaagcatcctg

SEQ ID NO: 16352 - DNA, 120 bp, Artificial Sequence
  ENSG00000013725_43 (sequence is synthesized)
tagccatgaggcaacgtctgtaaagcactcagcacagaggaagcactcggcacagaggaagtcctcgggaaatgtggatctgcttcccttgcctcagcgaaatgctccttgactttgaag

SEQ ID NO: 16353 - DNA, 120 bp, Artificial Sequence
  ENSG00000013725_44 (sequence is synthesized)
ccagcctgcggctctacctaacccatctgcagtcctggggggattcccagtcttgcctaccgggctacagccctctcactgggtccacaacacgctcacaactctccggccagtccaacc

SEQ ID NO: 16354 - DNA, 120 bp, Artificial Sequence
  ENSG00000013725_45 (sequence is synthesized)
agccacagagtttatgctctgaatttggagtcatttctcctccaggggctcaggctgggcagccagccagggagttagcgaggacggcaattagagggctgaagactttctgcctgatga

SEQ ID NO: 16355 - DNA, 120 bp, Artificial Sequence
  ENSG00000013810_0 (sequence is synthesized)
caagggctagaagcgcgacggcggtagcagctaggcttggcccccggcgtggagcagacgcggacccctccttcctggcggcggcggcgcgggctcagagcccggcaacgggcgggcggg

SEQ ID NO: 16356 - DNA, 120 bp, Artificial Sequence
  ENSG00000013810_1 (sequence is synthesized)
cagaatgagtctgcaggtcttaaacgacaaaaatgtcagcaatgaaaaaaatacagaaaattgcgacttcctgttttcgccaccagaagttaccggaagatcgtctgttcttcgtgtgtc

SEQ ID NO: 16357 - DNA, 120 bp, Artificial Sequence
  ENSG00000013810_2 (sequence is synthesized)
acagaaagaaaatgtgccacccaagaacctggccaaagctatgaaggtgacttttcagacacctctgcgggatccacagacgcacaggattctaagtcctagcatggccagcaaacttga

SEQ ID NO: 16358 - DNA, 120 bp, Artificial Sequence
  ENSG00000013810_3 (sequence is synthesized)
ggctcctttcactcaggatgacacccttggactggaaaactcacacccggtctggacacagaaagagaaccaacagctcatcaaggaagtggatgccaaaactactcatggaattctaca

SEQ ID NO: 16359 - DNA, 120 bp, Artificial Sequence
  ENSG00000013810_4 (sequence is synthesized)
gaaaccagtggaggctgacaccgacctcctgggggatgcaagcccagcctttgggagtggcagctccagcgagtctggcccaggtgccctggctgacctggactgctcaagctcttccca

SEQ ID NO: 16360 - DNA, 120 bp, Artificial Sequence
  ENSG00000013810_5 (sequence is synthesized)
gagcccaggaagttctgagaaccaaatggtgtctccaggaaaagtgtctggcagccctgagcaagccgtggaggaaaaccttagttcctattccttagacagaagagtgacacccgcctc

SEQ ID NO: 16361 - DNA, 120 bp, Artificial Sequence
  ENSG00000013810_6 (sequence is synthesized)
tgagaccctagaagacccttgcaggacagagtcccagcacaaagcggagactccgcacggagccgaggaagaatgcaaagcggagactccgcacggagccgaggaggaatgccggcacgg

SEQ ID NO: 16362 - DNA, 120 bp, Artificial Sequence
  ENSG00000013810_7 (sequence is synthesized)
tggggtctgtgctcccgcagcagtggccacttcgcctcctggtgcaatccctaaggaagcctgcggaggagcacccctgcagggtctgcctggcgaagccctgggctgccctgcgggtgt

SEQ ID NO: 16363 - DNA, 120 bp, Artificial Sequence
  ENSG00000013810_8 (sequence is synthesized)
gggcacccccgtgccagcagatggcactcagacccttacctgtgcacacacctctgctcctgagagcacagccccaaccaaccacctggtggctggcagggccatgaccctgagtcctca

SEQ ID NO: 16364 - DNA, 120 bp, Artificial Sequence
  ENSG00000013810_9 (sequence is synthesized)
ggaagaagtggctgcaggccaaatggccagctcctcgaggagcggacctgtaaaactagaatttgatgtatctgatggcgccaccagcaaaagggcacccccaccaaggagactgggaga

SEQ ID NO: 16365 - DNA, 120 bp, Artificial Sequence
  ENSG00000013810_10 (sequence is synthesized)
gaggtccggcctcaagcctcccttgaggaaagcagcagtgaggcagcaaaaggccccgcaggaggtggaggaggacgacggtaggagcggagcaggagaggacccccccatgccagcttc

SEQ ID NO: 16366 - DNA, 120 bp, Artificial Sequence
  ENSG00000013810_11 (sequence is synthesized)
cccaaacttcatcccgttcggaggtgacaccaagtctggttgcagtgaggcccagcccccagaaagccctgagaccaggctgggccagccagcggctgaacagttgcatgctgggcctgc

SEQ ID NO: 16367 - DNA, 120 bp, Artificial Sequence
  ENSG00000013810_12 (sequence is synthesized)
cacggaggagccaggtccctgtctgagccagcagctgcattcagcctcagcggaggacacgcctgtggtgcagttggcagccgagaccccaacagcagagagcaaggagagagccttgaa

SEQ ID NO: 16368 - DNA, 120 bp, Artificial Sequence
  ENSG00000013810_13 (sequence is synthesized)
ctctgccagcacctcgcttcccacaagctgtccaggcagtgagccagtgcccacccatcagcaggggcagcctgccttggagctgaaagaggagagcttcagagaccccgctgaggttct

SEQ ID NO: 16369 - DNA, 120 bp, Artificial Sequence
  ENSG00000013810_14 (sequence is synthesized)
aggcacgggcgcggaggtggattacctggagcagtttggaacttcctcgtttaaggagtcggccttgaggaagcagtccttatacctcaagttcgaccccctcctgagggacagtcctgg

SEQ ID NO: 16370 - DNA, 120 bp, Artificial Sequence
  ENSG00000013810_15 (sequence is synthesized)
tagaccagtgcccgtggccaccgagaccagcagcatgcacggtgcaaatgagactccctcaggacgtccgcgggaagccaagcttgtggagttcgatttcttgggagcactggacattcc

SEQ ID NO: 16371 - DNA, 120 bp, Artificial Sequence
  ENSG00000013810_16 (sequence is synthesized)
tgtgccaggcccacccccaggtgttcccgcgcctgggggcccacccctgtccaccggacctatagtggacctgctccagtacagccagaaggacctggatgcagtggtaaaggcgacaca

SEQ ID NO: 16372 - DNA, 120 bp, Artificial Sequence
  ENSG00000013810_17 (sequence is synthesized)
ggaggagaaccgggagctgaggagcaggtgtgaggagctccacgggaagaacctggaactggggaagatcatggacaggttcgaagaggttgtgtaccaggccatggaggaagttcagaa

SEQ ID NO: 16373 - DNA, 120 bp, Artificial Sequence
  ENSG00000013810_18 (sequence is synthesized)
gcagaaggaactttccaaagctgaaatccagaaagttctaaaagaaaaagaccaacttaccacagatctgaactccatggagaagtccttctccgacctcttcaagcgttttgagaaaca

SEQ ID NO: 16374 - DNA, 120 bp, Artificial Sequence
  ENSG00000013810_19 (sequence is synthesized)
gaaagaggtgatcgagggctaccgcaagaacgaagagtcactgaagaagtgcgtggaggattacctggcaaggatcacccaggagggccagaggtaccaagccctgaaggcccacgcgga

SEQ ID NO: 16375 - DNA, 120 bp, Artificial Sequence
  ENSG00000013810_20 (sequence is synthesized)
ggagaagctgcagctggcaaacgaggagatcgcccaggtccggagcaaggcccaggcggaagcgttggccctccaggccagcctgaggaaggagcagatgcgcatccagtcgctggagaa

SEQ ID NO: 16376 - DNA, 120 bp, Artificial Sequence
  ENSG00000013810_21 (sequence is synthesized)
gacagtggagcagaagactaaagagaacgaggagctgaccaggatctgcgacgacctcatctccaagatggagaagatctgacctccacggagccgctgtccccgcccccctgctcccgt

SEQ ID NO: 16377 - DNA, 120 bp, Artificial Sequence
  ENSG00000013810_22 (sequence is synthesized)
ctgtctgtcctgtctgattctcttaggtgtcatgttcttttttctgtcttgtcttcaacttttttaaaaactagattgctttgaaaacatgactcaataaaagtttcctttcaatttaaa

SEQ ID NO: 16378 - DNA, 120 bp, Artificial Sequence
  ENSG00000013810_23 (sequence is synthesized)
ggcactctagggcatggagtcccgccgctcggccgctcgcggggcgctctgggagatgcagtccccgtgcgggtgcggcctctcttctcggccggccctggaggcggcaccgcacctgtg

SEQ ID NO: 16379 - DNA, 120 bp, Artificial Sequence
  ENSG00000013810_24 (sequence is synthesized)
ctcctgactaaggctgggtctgctgctctcccgagctcctccaggccgccagaaggcttcctccgagtcactttctccctgagttcgaggcttgcgggtcccccagcgatccagcacccc

SEQ ID NO: 16380 - DNA, 120 bp, Artificial Sequence
  ENSG00000013810_25 (sequence is synthesized)
gggcttggccaacagtgggcaggggtccaacagcctgacccgccatccctgccatccctgcccctgctggttggggtggaattgcagagagctgccggcccctggcctgtcactactgcc

SEQ ID NO: 16381 - DNA, 120 bp, Artificial Sequence
  ENSG00000013810_26 (sequence is synthesized)
caggtcgctgagggtccaggcttccacccagtgtccccgcagtcagctgcccaccagcagcctccccgggactctccggcctgggcatggcgttggcctctggtggccttgcagcagtga

SEQ ID NO: 16382 - DNA, 120 bp, Artificial Sequence
  ENSG00000013810_27 (sequence is synthesized)
gtgtggttcttgctgccgtgagcccgagtgtcgcccctttcctcccgccctcccacgagtccagacgcatctcctggcagcttaggaagctccatcttcacccaccccacatctgagggt

SEQ ID NO: 16383 - DNA, 120 bp, Artificial Sequence
  ENSG00000013810_28 (sequence is synthesized)
cccgtgccttgtctccctccatcctcactgtacatgccaggcttcagcctgttctaactccgggcctaaattgtccctaagagagctgtaggcacacaaaggggctgggtgtctgcaggc

SEQ ID NO: 16384 - DNA, 120 bp, Artificial Sequence
  ENSG00000013810_29 (sequence is synthesized)
accactgtgagctaccgtcgccagatggtccccagggaggtgcagacagggtggttccggaggccggctggcagggctgggttcaagccccaacatccacaccagtgttgttcacagtgg

SEQ ID NO: 16385 - DNA, 120 bp, Artificial Sequence
  ENSG00000013810_30 (sequence is synthesized)
tgtgatgtggccctgaccccgtaccccaacaacctccttccctgtgtcagagcccgtgtgagtaacccaatagcaggcctggggaccacagtgtggctggccccctcctctgcaggcctg

SEQ ID NO: 16386 - DNA, 120 bp, Artificial Sequence
  ENSG00000013810_31 (sequence is synthesized)
ggctccgggggcaggtggcccctgcatgtaacttatgttagaaatgcacaatgcttgttctctggtgccacaaagaaatagtgctcgaacattaattttctcagcaaggcagtttttact

SEQ ID NO: 16387 - DNA, 120 bp, Artificial Sequence
  ENSG00000013810_32 (sequence is synthesized)
ttctgcagaaagggtgcccctcgcagatggagcaatggcaagagcacacctgaacaagggaggggaaggggttcttattcctgacacaggtagccctactgctgtgttgttcccctgttg

SEQ ID NO: 16388 - DNA, 120 bp, Artificial Sequence
  ENSG00000013810_33 (sequence is synthesized)
gctaaggttggaccacacagtctaagccaattccaattggctattttaaagagggcagggtaagagtcagagtggtggggtgagtagtttgacgggaaggacggttaggaacaggtaact

SEQ ID NO: 16389 - DNA, 120 bp, Artificial Sequence
  ENSG00000013810_34 (sequence is synthesized)
cagatgtgaactactgattaggactggcgggaaaattgtttactgaaactagaagcaaggggcgaagagaaccaggaattttaaatggagaatcaaagaagagatctggccgggtgcagt

SEQ ID NO: 16390 - DNA, 120 bp, Artificial Sequence
  ENSG00000013810_35 (sequence is synthesized)
agactcttgtctcaaaaaaaaaaaaagagatctgaacatactgacttactgattctttgaagacaaacttggagttcactatatttaacacttaggacccctagtatctgccactgggct

SEQ ID NO: 16391 - DNA, 120 bp, Artificial Sequence
  ENSG00000013810_36 (sequence is synthesized)
tatctgccactgggctgcgggggcagctgcagggacacacacctgttgggtgcctgctggttccacccaggagcacagccagcagcctcatgcctcctgccccctggcagtcgggtgcac

SEQ ID NO: 16392 - DNA, 120 bp, Artificial Sequence
  ENSG00000013810_37 (sequence is synthesized)
gtggagcaggtggccttggcctcgacagggttcccagggtcccactggaagccccacatggaactgtgcctctgggacattgctccagggacctcgggtgcgggctggccccatcctgtg

SEQ ID NO: 16393 - DNA, 120 bp, Artificial Sequence
  ENSG00000013810_38 (sequence is synthesized)
ctgcaggccccgtacgcgccgtctattgttttgagccgcttaaagttttggagtaaccttttaggtcgcaacagttgacaactacactgagtctttccggtcccactgccctggccgttg

SEQ ID NO: 16394 - DNA, 120 bp, Artificial Sequence
  ENSG00000013810_39 (sequence is synthesized)
accgcacaccggccaccgactgagccgctagtttcggttgccgctgcctccctgcccgtccatgacgtcctccactgtgtcgccggtgcatgacgctcccaccctctgcctggagttgac

SEQ ID NO: 16395 - DNA, 120 bp, Artificial Sequence
  ENSG00000013810_40 (sequence is synthesized)
gcttctggtgtgagaatgttaaacctatgttgagaatgaatgctgaggcccctaacctcaccaggtactcgctgcttcacgttgattaagtctcttttaaaagccaacagctcatcaagg

SEQ ID NO: 16396 - DNA, 120 bp, Artificial Sequence
  ENSG00000013810_41 (sequence is synthesized)
tacaagctgctgtctttgcaccttggtccttggccaagcctccccttgccacgggggcatgggatgacctgtgaacgagacagggtgcaggagtcacagcatagctggtttgcgaggcag

SEQ ID NO: 16397 - DNA, 120 bp, Artificial Sequence
  ENSG00000013810_42 (sequence is synthesized)
ctgagggcggcaggaggcagagtgagcagggaggccatctgagccgtccgctgttgtgtgacagacgactcggctatgatcaggcatctgtgagatttgagacagcgctggtgcaccggg

SEQ ID NO: 16398 - DNA, 120 bp, Artificial Sequence
  ENSG00000013810_43 (sequence is synthesized)
ccgccgccagaacctgtaccgcgccctgtcatgggacccggccctagaccgaccgccgggctgggccccctggatggtggccaggggcggctagagctgggccaagaccgacggcggagc

SEQ ID NO: 16399 - DNA, 120 bp, Artificial Sequence
  ENSG00000013810_44 (sequence is synthesized)
gtgcgggaagcccagctcaaggggccgtctggcagcaccttctagaaggcccttgggcctgctgctccctccaagcagggagaagccccgcaactcatcttcctcctccagactaaagag

SEQ ID NO: 16400 - DNA, 120 bp, Artificial Sequence
  ENSG00000013810_45 (sequence is synthesized)
tgtccccatccccctcgccatccttgtccccatccccctcgccatccctgtccccgtccccatccccacctggcctgggaccgctgggcacccgaggcaatggctgtgtgtctgttctcc

SEQ ID NO: 16401 - DNA, 120 bp, Artificial Sequence
  ENSG00000013810_46 (sequence is synthesized)
tcccacaggaagatcatggacaggttcgaagaggttgtgtaccaggccatgggtgagtgcccgggccaccgaggccacgtgcctccacgaggggctgcctatgccccaccctggccctgc

SEQ ID NO: 16402 - DNA, 120 bp, Artificial Sequence
  ENSG00000013810_47 (sequence is synthesized)
cctgcaccctgcctaggaccccaccctcctgaggccccttttcctaacacacgagtcccttcaacatgggcccggccgtggaagcactgaggcgagttgcggggaagctggtggtagtga

SEQ ID NO: 16403 - DNA, 120 bp, Artificial Sequence
  ENSG00000013810_48 (sequence is synthesized)
ggctggtggctcccacggagccagggcttggcaggccccacagttgtgcagatgctgagctagcagtggggctgtggtgggagcagagtctgtcccgccgtggcctaccccactccaccc

SEQ ID NO: 16404 - DNA, 120 bp, Artificial Sequence
  ENSG00000013810_49 (sequence is synthesized)
tgccctcgccgtgcggctatgtctagcagcagcctctgtaggtgtctggcaggacgggaacaccaggcctcatctggcctcccaaaagcttgggctcctggaggtgctactgtggggatc

SEQ ID NO: 16405 - DNA, 120 bp, Artificial Sequence
  ENSG00000013810_50 (sequence is synthesized)
tgtcttaggctgagtgtcagccggcggcaggtgaccgcctggcccttgcagtccctccaggaccaccacgaagcacgacgcacatcctggagctcgccataccggctcccaggcctcacc

SEQ ID NO: 16406 - DNA, 120 bp, Artificial Sequence
  ENSG00000013810_51 (sequence is synthesized)
ctaggctctagggtgttgggcgccgcctcttcagggacctctggcccaggctccagttccctgcggatctgatgtggaggaaacagctgtttcctgggctttgcatccggcctagaagat

SEQ ID NO: 16407 - DNA, 120 bp, Artificial Sequence
  ENSG00000013810_52 (sequence is synthesized)
ggacccatcaccctccgaggctcacacccactgcccacctctcctcctggcgctcgagtcccttgcctcattccttgggctgtctctggcacccatcgtttcggttgcctcctcatcctg

SEQ ID NO: 16408 - DNA, 120 bp, Artificial Sequence
  ENSG00000013810_53 (sequence is synthesized)
tcacggctgtgcaaggccaccctggtgtcctcctggccacgggactctgagcgccccccaccttctgtgctgggcaaggcccacatgcttgctggaaggagggatgtctgggccatccat

SEQ ID NO: 16409 - DNA, 120 bp, Artificial Sequence
  ENSG00000013810_54 (sequence is synthesized)
ctgcccagagcaggcctggaaggtgcctgcgaggccgccagagggttctgcccacagcagcaatgttggagcggaggtgctcaacgcctcctgtggaggagctggacctgcaggtgcagc

SEQ ID NO: 16410 - DNA, 120 bp, Artificial Sequence
  ENSG00000013810_55 (sequence is synthesized)
tggaagaggggctgtcactgttggtgcaagggggttggggacaccagatgggtcccctgggagtcagactaaactggaaaagcggcccttgcagggcctgctgagccacacctcatctga

SEQ ID NO: 16411 - DNA, 120 bp, Artificial Sequence
  ENSG00000013810_56 (sequence is synthesized)
gtcctgaagtcaggtgggtgtcagtggctggggcccagctgcctaacagaagcaagcctgaatactctagggaagaaggtatcttatgctttaaattgctgctgcagttttaaattagtg

SEQ ID NO: 16412 - DNA, 120 bp, Artificial Sequence
  ENSG00000013810_57 (sequence is synthesized)
aattagtgtctggcacagaataaccaagtgtgaaaggaacaggaaacatgagtgaaaatcagacccgttattagagtgaggcatggtgatgtacacctgtggtcccagctactagggagg

SEQ ID NO: 16413 - DNA, 120 bp, Artificial Sequence
  ENSG00000013810_58 (sequence is synthesized)
ggaggatcatttgagcccgggaggtcgaagctgcagtgagccatgattgtatcactgcacccccagcctgggcaatagaccaagacccccatctctaaaattaaaaaacaaaaacaaaaa

SEQ ID NO: 16414 - DNA, 120 bp, Artificial Sequence
  ENSG00000014123_0 (sequence is synthesized)
ctcttctcccaccgcctgtcggctgacgtgtctgcagttcctccgcgtctactgcgagtcaggccgtgatggcggacgcctgggaagagattaggcggttggcggccgacttccagcggg

SEQ ID NO: 16415 - DNA, 120 bp, Artificial Sequence
  ENSG00000014123_1 (sequence is synthesized)
cgcagttcgccgaggccacgcagaggttgtccgagcggaactgcattgagattgttaataaattgattgctcagaaacagctagaagtagttcatacactcgatggaaaggaatatatta

SEQ ID NO: 16416 - DNA, 120 bp, Artificial Sequence
  ENSG00000014123_2 (sequence is synthesized)
ctccagcccaaattagtaaagaaatgagagatgagctacatgtccgaggtggtcgagtaaacattgttgatctacaacaggtaattaatgtggacctgattcatattgaaaatagaattg

SEQ ID NO: 16417 - DNA, 120 bp, Artificial Sequence
  ENSG00000014123_3 (sequence is synthesized)
gtgacattattaaatcagaaaagcatgttcagttagtgttgggacaactgatagatgagaattatttggatcggttggcagaagaggtcaatgataaattgcaagaaagtggtcaggtca

SEQ ID NO: 16418 - DNA, 120 bp, Artificial Sequence
  ENSG00000014123_4 (sequence is synthesized)
ccatatcagaactgtgtaaaacttatgatcttcctgggaactttctgacacaggcactaactcagcgacttggtagaattatcagtggacatattgatcttgataatagaggagtaattt

SEQ ID NO: 16419 - DNA, 120 bp, Artificial Sequence
  ENSG00000014123_5 (sequence is synthesized)
ttacggaagcttttgtagctcgacataaagcacgtatccgtggactattcagtgctattacccggcctacagctgtgaattctttgatttcaaaatatggatttcaggagcagcttcttt

SEQ ID NO: 16420 - DNA, 120 bp, Artificial Sequence
  ENSG00000014123_6 (sequence is synthesized)
actctgtgcttgaggaacttgttaatagcggacgcttacgaggcactgtggttggtgggagacaggataaagctgtgtttgtccctgacatctactccaggacacagagtacttgggtgg

SEQ ID NO: 16421 - DNA, 120 bp, Artificial Sequence
  ENSG00000014123_7 (sequence is synthesized)
attcctttttcaggcagaatggctatctagaatttgatgctttgtccagacttggaatcccagatgctgtaagctacataaagaaaagatataagactacacaactcttgtttttgaaag

SEQ ID NO: 16422 - DNA, 120 bp, Artificial Sequence
  ENSG00000014123_8 (sequence is synthesized)
cagcttgtgttggtcaaggacttgtggatcaagtggaagcatcagtagaagaagccatcagctctggaacatgggttgatattgcacctctgctacccacttctttatcagttgaagatg

SEQ ID NO: 16423 - DNA, 120 bp, Artificial Sequence
  ENSG00000014123_9 (sequence is synthesized)
ctgccatattgcttcagcaggtgatgagggcattcagcaaacaggcctcaactgtagtctttagcgacactgttgtagtcagtgaaaaatttataaatgactgtacagaactgttccgtg

SEQ ID NO: 16424 - DNA, 120 bp, Artificial Sequence
  ENSG00000014123_10 (sequence is synthesized)
agctgatgcaccagaaagctgaaaaggaaatgaaaaataatcctgtgcatttaatcactgaagaagatctgaaacaaatctccactttagaaagcgttagtacaagtaaaaaggataaaa

SEQ ID NO: 16425 - DNA, 120 bp, Artificial Sequence
  ENSG00000014123_11 (sequence is synthesized)
aagatgagcgaagaaggaaagcaacagagggcagtggaagcatgagaggaggaggtgggggcaatgccagagagtacaaaattaaaaaagtcaagaagaaaggaagaaaagatgatgata

SEQ ID NO: 16426 - DNA, 120 bp, Artificial Sequence
  ENSG00000014123_12 (sequence is synthesized)
gtgatgatgaatctcaatcatcccacactggaaagaagaagccagagatcagttttatgttccaggatgagattgaagattttttaagaaaacacatacaagatgcccctgaggagttta

SEQ ID NO: 16427 - DNA, 120 bp, Artificial Sequence
  ENSG00000014123_13 (sequence is synthesized)
tttcggaacttgctgagtacttaataaaacctcttaataaaacttatctcgaggtggtacgttcagtattcatgtcttcaacaacttctgcttctgggacgggcagaaaacgcacaatca

SEQ ID NO: 16428 - DNA, 120 bp, Artificial Sequence
  ENSG00000014123_14 (sequence is synthesized)
aggacttgcaagaagaagtttcaaacctgtacaataacattaggttatttgaaaaagggatgaagttttttgcagatgacacacaggctgctcttaccaaacacttgctgaagtcagtgt

SEQ ID NO: 16429 - DNA, 120 bp, Artificial Sequence
  ENSG00000014123_15 (sequence is synthesized)
gtactgatatcactaacctcattttcaacttcttagcttcggatttaatgatggcagtagacgatcctgcagccattacaagtgaaataagaaagaaaattttaagtaaattatcagaag

SEQ ID NO: 16430 - DNA, 120 bp, Artificial Sequence
  ENSG00000014123_16 (sequence is synthesized)
aaaccaaagtagctcttacaaaactccataactctctgaatgaaaagagcatagaagactttatttcttgtctggattctgcagcagaagcttgtgatattatggtgaaaaggggagaca

SEQ ID NO: 16431 - DNA, 120 bp, Artificial Sequence
  ENSG00000014123_17 (sequence is synthesized)
caacatcgacaagcactggctgaacagctaaaggtcacagaagaccctgctcttattctgcacctcacatcagtcctgttgtttcagttttcaacccacagcatgctccatgcacctgga

SEQ ID NO: 16432 - DNA, 120 bp, Artificial Sequence
  ENSG00000014123_18 (sequence is synthesized)
agatgtgtcccacagatcattgcttttcttaatagtaaaattccagaggatcagcatgctcttttggtaaagtatcaaggtttggttgtaaagcagctagtcagtcaaagtaagaagact

SEQ ID NO: 16433 - DNA, 120 bp, Artificial Sequence
  ENSG00000014123_19 (sequence is synthesized)
gggcagggagattatcccttgaataatgaattagacaaagaacaagaagatgttgccagtactactcgtaaagagcttcaagaactttcttcatccattaaagaccttgttctcaaatct

SEQ ID NO: 16434 - DNA, 120 bp, Artificial Sequence
  ENSG00000014123_20 (sequence is synthesized)
aggaaatcatctgtgacggaagagtaatgatcttaatttacatttgtcatatagtaagcattttcccccaaggttgaaggtgagtggtcacaaaaaagtagtcactatacaactcccctc

SEQ ID NO: 16435 - DNA, 120 bp, Artificial Sequence
  ENSG00000014123_21 (sequence is synthesized)
tccctgcaaaaaccacctcatacacacacaattcagttaaaacagtagtattgtattaaatgtaaatcttaaaaagatgtgaatttttgtaaattgggttcttcatggaagtttttttcc

SEQ ID NO: 16436 - DNA, 120 bp, Artificial Sequence
  ENSG00000014123_22 (sequence is synthesized)
acctgattttcacacaaatactatatgaaatttttcacattattttcacataattttaaaaattacatatttcaggtttgttctctttccaaatgttgaatgaaaaacaaattttccaat

SEQ ID NO: 16437 - DNA, 120 bp, Artificial Sequence
  ENSG00000014123_23 (sequence is synthesized)
ccatttatccctggggaaggattcatttgttgcgagtgccagtatacttaaatgtatactttatatacatttaagcagaaatttaaaatgtggtcttttttttttaaaagaaacacttct

SEQ ID NO: 16438 - DNA, 120 bp, Artificial Sequence
  ENSG00000014123_24 (sequence is synthesized)
gtgtcagaaatgaaaataaatcatgttttttatttttaaatagaaagcacttcaaaactaaaatacagaaatttacaaaaaagaaaaattattactaagcccttgctcttatttttggca

SEQ ID NO: 16439 - DNA, 120 bp, Artificial Sequence
  ENSG00000014123_25 (sequence is synthesized)
gaataaacattgattttggttggggctgcaaggatgcctttacaggtgcacaagaacgctagagtggcccatgcattgctgtgttctcttctaaaacaagctactaacaagagagagaac

SEQ ID NO: 16440 - DNA, 120 bp, Artificial Sequence
  ENSG00000014123_26 (sequence is synthesized)
acatgcaatttattaccagtaagcataagtcatatttaacattggaataactaagcattttatacaaagatttttctttgacccagtttgcatttgtacattttatttttttagttcaac

SEQ ID NO: 16441 - DNA, 120 bp, Artificial Sequence
  ENSG00000014123_27 (sequence is synthesized)
agctgctctgtcacataatactttgtaaatactagtgtgaaaaacagataggatgccttttccagtggtaggagcatctgtaagtgcatttaaatcattagaagcttttttccaaaacta

SEQ ID NO: 16442 - DNA, 120 bp, Artificial Sequence
  ENSG00000014123_28 (sequence is synthesized)
gaaacccttattaaaaaatagacatttttttctaaagattattagttaaaaataactaaaagagttccttagagtaatcatttcaaccaaatgaatttcaagcaacaacttacttactat

SEQ ID NO: 16443 - DNA, 120 bp, Artificial Sequence
  ENSG00000014123_29 (sequence is synthesized)
tacgaaaagatcagtctacctctactccattctagacaaagtattaatccttagtgaaagtaattaattaaattgccaacttggcattattattaaacttgataggaacgcaacattaaa

SEQ ID NO: 16444 - DNA, 120 bp, Artificial Sequence
  ENSG00000014123_30 (sequence is synthesized)
tttaaaaatgttttcccgtgggtaattttctattatatattttcatatgggcaaagggaaaaaatgataaatcctctgtaatcacaaaccccaatttcgttttgtttattcagcttctaa

SEQ ID NO: 16445 - DNA, 120 bp, Artificial Sequence
  ENSG00000014123_31 (sequence is synthesized)
aatattgaacacccagacttttaattcaacctttaagaaccttatcatttatgtttcagtagatatcaaagtaatccatgtttgtgtcaaatgatcatagaaaataaatagaagagacag

SEQ ID NO: 16446 - DNA, 120 bp, Artificial Sequence
  ENSG00000014123_32 (sequence is synthesized)
tgaagcaagtaaaaagaaaagcattgttttaatttgtttgcattaatttttttcatttgtcaaaatgcttcttttgttgccacagtaaagaacagtttttattgttttgtaagtaaaatt

SEQ ID NO: 16447 - DNA, 120 bp, Artificial Sequence
  ENSG00000014123_33 (sequence is synthesized)
acgtagctgattttgtatgtaaagattaatttccataataaaaattattgtatgtttactgtgatcttaatgggcagggttaagaaagttatttaaaataaagttacctattctactaaa

SEQ ID NO: 16448 - DNA, 120 bp, Artificial Sequence
  ENSG00000014123_34 (sequence is synthesized)
tgagccctgcatcctgcccacgacccccccagaaacacctacgcaccactctcctagccgccgcagccccgccagtctcgccgggaggaacccccagcgccgcggtacaaccacggcact

SEQ ID NO: 16449 - DNA, 120 bp, Artificial Sequence
  ENSG00000014123_35 (sequence is synthesized)
cgccgaggccacgcagagatttgaagattggaagcaggcctgtaagagacaacagacttgaaatttgtgatgggatgatgtgtaccaattaaataaatgatttaagcatatgtaaaccta

SEQ ID NO: 16450 - DNA, 120 bp, Artificial Sequence
  ENSG00000014138_0 (sequence is synthesized)
agttctgccaccgtcactgagaagctcagcggtagcttttgggaagcaggacgttctcaccaggagagcgtcctctcgagatttctgctccctccattcagggcgtttgggagccacccc

SEQ ID NO: 16451 - DNA, 120 bp, Artificial Sequence
  ENSG00000014138_1 (sequence is synthesized)
ttcattttttaaaaaaagtatttctctgtgaccgacggccggggccttctgacggtctgaggtcttgcttgggccagtcacctcctgtcacggtccgcggaggggggaaggataagaggg

SEQ ID NO: 16452 - DNA, 120 bp, Artificial Sequence
  ENSG00000014138_2 (sequence is synthesized)
cgaggagctcatcgctcgccacccccgtgggcttcttgggcgcaggtcggagctgggtgggccggctccccggcccctggcttgggcgaccatgtccgcatccgcccagcagctggcgga

SEQ ID NO: 16453 - DNA, 120 bp, Artificial Sequence
  ENSG00000014138_3 (sequence is synthesized)
ggagctgcagatcttcggcctagactgcgaggaggctctaattgagaaattggtagagctttgtgttcagtatggacagaatgaggagggaatggtaggcgagcttatagccttctgcac

SEQ ID NO: 16454 - DNA, 120 bp, Artificial Sequence
  ENSG00000014138_4 (sequence is synthesized)
cagcacacataaagttggccttacctcagagatcctgaactcttttgagcatgagtttctgagcaaaagattatcgaaagccaggcatagtacctgcaaggacagtggccatgcaggagc

SEQ ID NO: 16455 - DNA, 120 bp, Artificial Sequence
  ENSG00000014138_5 (sequence is synthesized)
tagagacattgtttccattcaagagctaattgaagtggaagaagaagaggaaatcctcttgaactcttacaccacaccttcaaagggttctcagaagcgagctatctctaccccagaaac

SEQ ID NO: 16456 - DNA, 120 bp, Artificial Sequence
  ENSG00000014138_6 (sequence is synthesized)
ccccctaacaaaaaggagtgtgtcaactcgtagcccccatcagctactctcaccgtcaagtttctctccaagtgctactccctcccagaaatacaactcacgaagtaaccgaggagaagt

SEQ ID NO: 16457 - DNA, 120 bp, Artificial Sequence
  ENSG00000014138_7 (sequence is synthesized)
ggttacctccttcggcttagcacagggagtatcttggtctgggagaggaggagctggaaacatcagcctgaaggtcttgggatgtccagaggcactaactgggagctacaaatccatgtt

SEQ ID NO: 16458 - DNA, 120 bp, Artificial Sequence
  ENSG00000014138_8 (sequence is synthesized)
tcagaagctcccagacattcgagaagttctgacctgtaagatagaagaacttggcagcgaactcaaggaacattacaagattgaagctttcactcctttgctagccccagcacaggagcc

SEQ ID NO: 16459 - DNA, 120 bp, Artificial Sequence
  ENSG00000014138_9 (sequence is synthesized)
tgtcactctgctgggccagattggctgtgatagcaacgggaagctgaacaacaagtcagtgattctcgagggagaccgggaacattcctcgggtgctcaaattccagtggatttatctga

SEQ ID NO: 16460 - DNA, 120 bp, Artificial Sequence
  ENSG00000014138_10 (sequence is synthesized)
gcttaaggaatattctctgtttcctggacaggttgtaattatggaaggaatcaacaccactggtaggaaacttgttgccaccaaactctacgagggtgtgccacttccattttatcagcc

SEQ ID NO: 16461 - DNA, 120 bp, Artificial Sequence
  ENSG00000014138_11 (sequence is synthesized)
cactgaagaggatgcagactttgagcaaagcatggtcctggttgcctgtggaccatacaccacatctgacagcatcacgtatgaccccctgcttgacctgattgctgtcatcaaccatga

SEQ ID NO: 16462 - DNA, 120 bp, Artificial Sequence
  ENSG00000014138_12 (sequence is synthesized)
ccggccagatgtctgcatcctgtttggccctttcctggatgctaagcatgaacaggtggagaattgtctactgacaagtccatttgaagacattttcaagcagtgtctacgaacaattat

SEQ ID NO: 16463 - DNA, 120 bp, Artificial Sequence
  ENSG00000014138_13 (sequence is synthesized)
tgaaggcacaagaagctccggctcccaccttgtctttgtcccgtcattgagagatgtgcaccatgagcctgtgtacccccagccgcctttcagctactccgatctgtctcgagaggacaa

SEQ ID NO: 16464 - DNA, 120 bp, Artificial Sequence
  ENSG00000014138_14 (sequence is synthesized)
acatccacagatctgcttttccacctgggggccgaggagatcagtagttcttccggaacttcagacagattcagccgaatactcaagcacatcttgacccagaggagctactacccactc

SEQ ID NO: 16465 - DNA, 120 bp, Artificial Sequence
  ENSG00000014138_15 (sequence is synthesized)
tacccgccccaagaagacatggccattgactatgagtcgttctatgtttacgcacagctgcctgtcaccccagatgtcctcatcatcccgtcagagctgaggtacttcgtgaaggatgtc

SEQ ID NO: 16466 - DNA, 120 bp, Artificial Sequence
  ENSG00000014138_16 (sequence is synthesized)
ctcggctgtgtctgtgtgaaccctgggcgccttaccaaagggcaggtgggaggcaccttcgcccgactctaccttaggaggccggcagcggacggggcagagaggcagagcccatgcatt

SEQ ID NO: 16467 - DNA, 120 bp, Artificial Sequence
  ENSG00000014138_17 (sequence is synthesized)
gctgtgcaggtcgtcaggatctgaggcttctgtcctctgctgttctctgctgtgtgggcccttaaagtcttagccaagagccaagacatagccctgtgacaaggtgaacagttgggtggg

SEQ ID NO: 16468 - DNA, 120 bp, Artificial Sequence
  ENSG00000014138_18 (sequence is synthesized)
aaaggagagaggagccagccagggaggggcagctgcagtgaccaggcccagcagggaggacttgtgcagccgggcctgcctctgagtggtgcctctcctggaaggaagctcttgcttctc

SEQ ID NO: 16469 - DNA, 120 bp, Artificial Sequence
  ENSG00000014138_19 (sequence is synthesized)
agtccatgctccgtgtccagaagtaagccagctgtggatcccgcccactcagaaaaggcgagaaggctttgtgattttctacatgaatcaaacacagaaacaacttttggagaaattaaa

SEQ ID NO: 16470 - DNA, 120 bp, Artificial Sequence
  ENSG00000014138_20 (sequence is synthesized)
cacagaaacaacttttggagaaattaaattctgagtgtgacttctgagtttgacctttcttctattttcttttatttatttattttgtttttagacggagtctcgatctgtcgcccaggc

SEQ ID NO: 16471 - DNA, 120 bp, Artificial Sequence
  ENSG00000014138_21 (sequence is synthesized)
tttatcctggtagtagacaaagaatgttgcctatttgacctatgtccagagaaggcagagtgtcagtcacactgggtttctatccagccccagtcctgtccagtgggtaactctcagccc

SEQ ID NO: 16472 - DNA, 120 bp, Artificial Sequence
  ENSG00000014138_22 (sequence is synthesized)
cactcctcatcccccaaaggccccagtgacctctatgctgcagaggtgcactgggtgggccctagagctgggctgcagagcaagcaactggctgcatgcctgggcctccctgcgcagttc

SEQ ID NO: 16473 - DNA, 120 bp, Artificial Sequence
  ENSG00000014138_23 (sequence is synthesized)
ctcacatgcatgctgtggtcccagcctgacctctccatctggagggggccgcctcgctgggctgttccaaagctggagtcctggtggcagctgctttgccaagtcgcgcagtagccaggg

SEQ ID NO: 16474 - DNA, 120 bp, Artificial Sequence
  ENSG00000014138_24 (sequence is synthesized)
cttgcctgcagcccagaacactcagacagggtcaggccttccagggttcacagcacgtcccatgcccctatgtcctggcatctggggaaaagctgtcactggccagacgtggagtggctt

SEQ ID NO: 16475 - DNA, 120 bp, Artificial Sequence
  ENSG00000014138_25 (sequence is synthesized)
cctgccctaagctggcaggctgtcctgcctcacatgccagagccaagaccggcaaaccccagctgtcagggcagggaagtgggcaagggggcagcaagctgctggtgtctatgccttgac

SEQ ID NO: 16476 - DNA, 120 bp, Artificial Sequence
  ENSG00000014138_26 (sequence is synthesized)
tccgagataaatagatgacctaacagtggccaacttttgcctctcacctttctgacggtgaaatggaatcgagccccagacctgaccagggtacagtaaaaggtcttcctttaaacacaa

SEQ ID NO: 16477 - DNA, 120 bp, Artificial Sequence
  ENSG00000014138_27 (sequence is synthesized)
acctggcacagtctccaagaaggacaagctgacagagctgacaaaatgaccactgcaagctgggcacggtggtgcgtgcctgtagtcccagccacgcaggaggccaaggcgggaggatgg

SEQ ID NO: 16478 - DNA, 120 bp, Artificial Sequence
  ENSG00000014138_28 (sequence is synthesized)
aacaccagaacccagtctttgactttcccttctagaccacccggcactcacccctcatgggtcagctgatggggatggggcctctagcaccctgccctgtggccttgtttctttggggag

SEQ ID NO: 16479 - DNA, 120 bp, Artificial Sequence
  ENSG00000014138_29 (sequence is synthesized)
gtggtgggaccagaaaacaaacaactctgtcagtaaaatgcttgagtaaacagtgtcctctcctccctccccaagagaacgagagcccagatgactaggaaggccctcaaatgagggctt

SEQ ID NO: 16480 - DNA, 120 bp, Artificial Sequence
  ENSG00000014138_30 (sequence is synthesized)
tcaccaggccacatagaggtgacctggggaagatttcatatgtacacttgcctgtcctctgcctcccaaattctgatatgacctccaagtgggctcagctgggaataccttgaagaagct

SEQ ID NO: 16481 - DNA, 120 bp, Artificial Sequence
  ENSG00000014138_31 (sequence is synthesized)
attgggtcattttgatctctgccaccctttagccctgcctgccttggagttaggtcccttacaaggaatctgcctagaccagtccccctcttgccaaacaagagttagttcaatctcaag

SEQ ID NO: 16482 - DNA, 120 bp, Artificial Sequence
  ENSG00000014138_32 (sequence is synthesized)
ttgactaaattatctaacctttctgttgcttgttttcctcatctgtaaaatggatacagtaatatccacccgatggttgttgcaaggattaaatgagttaatacatataaaatgcctaag

SEQ ID NO: 16483 - DNA, 120 bp, Artificial Sequence
  ENSG00000014138_33 (sequence is synthesized)
aatacattttagaacagtgcatggtatttagtaagctcaagaaatgttagctattattaagtagttatagctgcccaaagatgcagtgggctgccctggggtggtgaggacagggtgggg

SEQ ID NO: 16484 - DNA, 120 bp, Artificial Sequence
  ENSG00000014138_34 (sequence is synthesized)
taggcatccaggggcaagttcccctacactagagatgctcacacttaggcagcctcctaggaaggctcaagtgctgggtggatgggtggacaagatgccctttcagagttcttccatcct

SEQ ID NO: 16485 - DNA, 120 bp, Artificial Sequence
  ENSG00000014138_35 (sequence is synthesized)
gagagtcagtgatgacgcggtagtcacctcagggtcaaagcaatgccctgccaagaaatgtatttgttgtttgcagtttgttttgctattcaccctatcgacttcagattttgagctcct

SEQ ID NO: 16486 - DNA, 120 bp, Artificial Sequence
  ENSG00000014138_36 (sequence is synthesized)
gaataaacattgatggagtaaaccaggattatttttgcttttctaggtgaaacttcgagaaatgaactaagtttttacttgtccaattttcctttctacagtggtagagctttgtgttca

SEQ ID NO: 16487 - DNA, 120 bp, Artificial Sequence
  ENSG00000014138_37 (sequence is synthesized)
cacataaaggactcaatgagttaaatcctgtggcatttcccatcattgtcctttctcctcccaccattctaatactagtcctcttctaatcaagacctataacctctgtcttagactttg

SEQ ID NO: 16488 - DNA, 120 bp, Artificial Sequence
  ENSG00000014138_38 (sequence is synthesized)
gaagtgtgttccaggccccaagcaggatgactggctttctggtcccagccctttctgcagccaagaaaatcaaggggctgcttaacggtcttgaccagagagagctgaaagcagcaagct

SEQ ID NO: 16489 - DNA, 120 bp, Artificial Sequence
  ENSG00000014138_39 (sequence is synthesized)
attacgtttttaaatcgatgaccaagaggcatccttcttgcttcctttttcacttcttgtctgtgttctagtttgaacatctgtcttggttgaatttgggaaaatgggcccttctgaaga

SEQ ID NO: 16490 - DNA, 120 bp, Artificial Sequence
  ENSG00000014138_40 (sequence is synthesized)
aagatttgtaagtgctgtctggttttgtggccagagagtgattttcttcccacttggattagagtcttgcacataagcagagactcaaggccttgtttcccttggtggtgagtcaggtag

SEQ ID NO: 16491 - DNA, 120 bp, Artificial Sequence
  ENSG00000014138_41 (sequence is synthesized)
ctccccggggatttcccacaaatagaagcattcacgtatcgagataaaaggacagcagcgacggtggggttttcagaatcttgttctctggacaatgactcacagtctctcccctggttt

SEQ ID NO: 16492 - DNA, 120 bp, Artificial Sequence
  ENSG00000014164_0 (sequence is synthesized)
ctggccggccgtcgcggactcgggagatggaggaaaaggagatattacggcggcagatccgcctactgcagggtctgattgatgactacaaaaccctccacggcaatgccccggcccctg

SEQ ID NO: 16493 - DNA, 120 bp, Artificial Sequence
  ENSG00000014164_1 (sequence is synthesized)
gtaccccagcagcttctgggtggcagccacccacttaccacagtggcagagcctttagtgcccgctaccctcgtccaagccggaggggctactcttcccaccatgggccttcgtggcgca

SEQ ID NO: 16494 - DNA, 120 bp, Artificial Sequence
  ENSG00000014164_2 (sequence is synthesized)
agaaatactccctcgtgaatcggcccccgggaccctcagaccctcctgccgaccatgctgtgcggccgttgcacggggcccgggggggccagcctcctgtcccgcagcagcatgtccttg

SEQ ID NO: 16495 - DNA, 120 bp, Artificial Sequence
  ENSG00000014164_3 (sequence is synthesized)
agagacaggtccagctcagtcagggtcagaacgtggtcatcaaagttaaaccgccatcaaagtctggctctgccagtgcctcaggggcccagcggggctctttggaagaatttgaggaaa

SEQ ID NO: 16496 - DNA, 120 bp, Artificial Sequence
  ENSG00000014164_4 (sequence is synthesized)
ccccctggagtgaccaaaggccccgggaaggtgaaggtgagccccctcggggacagctgcagccctcgaggccaacaagagccagggggacctgcagtgtggaagatcctcttctggtct

SEQ ID NO: 16497 - DNA, 120 bp, Artificial Sequence
  ENSG00000014164_5 (sequence is synthesized)
gccagaaggagcctggtaagcccaggatggtgaagtcagtgggcagtgtgggcgacagcccccgggagccccgccggacagtcagtgagagtgtgattgccgtcaaggcgagcttcccat

SEQ ID NO: 16498 - DNA, 120 bp, Artificial Sequence
  ENSG00000014164_6 (sequence is synthesized)
cctccgctctgcccccacgcactggcgtggccctgggccggaagctgggttctcattccgtggccagctgtgctccacagctccttggggacaggagagtagatgctggccacacagatc

SEQ ID NO: 16499 - DNA, 120 bp, Artificial Sequence
  ENSG00000014164_7 (sequence is synthesized)
agccagttccgtctggctcagtggggggccccgccagaccggcctcaggacccaggcaggcccgggaggcctcgctggttgtgacctgtcgaactaacaagttccggaaaaacaactaca

SEQ ID NO: 16500 - DNA, 120 bp, Artificial Sequence
  ENSG00000014164_8 (sequence is synthesized)
aatgggtggctgcctcctcgaagagtccccgggttgctcggagggccctcagtcccagagtggctgcagagaatgtgtgcaaggcctctgctggcatggcaaacaaggtggagaagccgc

SEQ ID NO: 16501 - DNA, 120 bp, Artificial Sequence
  ENSG00000014164_9 (sequence is synthesized)
agctcatagctgacccagagcccaagcccaggaagccagccacgtcctccaagccagggtctgcccccagcaagtacaagtggaaggcctccagcccctctgcctcctcctcttcctcct

SEQ ID NO: 16502 - DNA, 120 bp, Artificial Sequence
  ENSG00000014164_10 (sequence is synthesized)
tccgttggcagtcggaggccagcagcaaggaccatgcctcccagctctccccagtcctgtctaggtccccgtcgggggacagaccagcagtaggacacagtggcttgaagcccctctctg

SEQ ID NO: 16503 - DNA, 120 bp, Artificial Sequence
  ENSG00000014164_11 (sequence is synthesized)
gggagaccccgctctcggcttacaaagtgaagagccgcaccaagatcatccggagacgcagcagcacaagccttcctggagacaagaaaagcggcacctcacctgccgccaccgccaaga

SEQ ID NO: 16504 - DNA, 120 bp, Artificial Sequence
  ENSG00000014164_12 (sequence is synthesized)
gccacctcagcctccggcggagacaggccctcagggggaagagcagccctgtcctgaagaagacccccaacaagggcctggtacaggtcaccacgcaccgactatgtcgcctgccaccga

SEQ ID NO: 16505 - DNA, 120 bp, Artificial Sequence
  ENSG00000014164_13 (sequence is synthesized)
ccagcctgcatgccgtgcggactgcacccaccagcaaggtgatcaagacccgctaccgcattgtcaagaagacgccggcctcgcctctcagcgccccgcccttccccctgtctctgccct

SEQ ID NO: 16506 - DNA, 120 bp, Artificial Sequence
  ENSG00000014164_14 (sequence is synthesized)
cctggcgggcccggcggctctcactatccaggtccctggtgctgaaccgcctgcgtccagttgccagcgggggtgggaaagcccaaccgggctccccttggtggcggagcaaaggctacc

SEQ ID NO: 16507 - DNA, 120 bp, Artificial Sequence
  ENSG00000014164_15 (sequence is synthesized)
gctgcatcggaggggtcctctacaaagtatctgccaacaagctctccaagacctccggccagcccagtgatgcgggcagcaggcccctcctgcgcacaggccggctggatcctgcaggca

SEQ ID NO: 16508 - DNA, 120 bp, Artificial Sequence
  ENSG00000014164_16 (sequence is synthesized)
gctgtagccgttccctggccagccgggcagtgcagcgcagcctggccatcatccggcaggcgcggcagcgcagggagaagaggaaggagtactgcatgtactacaaccgcttcggcaggt

SEQ ID NO: 16509 - DNA, 120 bp, Artificial Sequence
  ENSG00000014164_17 (sequence is synthesized)
gcaaccgtggcgagcgctgcccctacatccacgatcccgagaaggtggccgtgtgcaccaggtttgtccggggcacctgcaagaaaacggatgggacctgccccttctcccaccatgtgt

SEQ ID NO: 16510 - DNA, 120 bp, Artificial Sequence
  ENSG00000014164_18 (sequence is synthesized)
ccaaggagaagatgccggtgtgctcctacttcctgaagggcatctgcagcaacagcaactgtccctatagccacgtgtacgtgtcccgcaaggccgaggtctgcagcgacttcctcaaag

SEQ ID NO: 16511 - DNA, 120 bp, Artificial Sequence
  ENSG00000014164_19 (sequence is synthesized)
gctactgccccctgggtgcaaagtgcaagaagaaacacacgctgctgtgccccgactttgcccgcaggggggcgtgtccccgcggcgcccagtgccagctgctccaccgtacccagaaac

SEQ ID NO: 16512 - DNA, 120 bp, Artificial Sequence
  ENSG00000014164_20 (sequence is synthesized)
gccacagtcggcgggcagccacgtcccccgccccagggcccagcgacgcaaccgccaggagcagggtctcggccagccacgggcccaggaagccttcagcatcccagcgccccaccaggc

SEQ ID NO: 16513 - DNA, 120 bp, Artificial Sequence
  ENSG00000014164_21 (sequence is synthesized)
agacgcccagctcggctgccctcactgcggctgccgtggctgcacctccccactgcccaggggggtcagcctctccctcatcctcgaaggcttcctcctcctcctcctcctcctcatccc

SEQ ID NO: 16514 - DNA, 120 bp, Artificial Sequence
  ENSG00000014164_22 (sequence is synthesized)
ctcccgcttccttggaccacgaggcaccatctctccaggaggctgccttagcagcagcgtgctccaacaggctctgcaagctgccttccttcatctccctgcagtcctcgccgagcccag

SEQ ID NO: 16515 - DNA, 120 bp, Artificial Sequence
  ENSG00000014164_23 (sequence is synthesized)
gagcccagcccagggtccgggcccctagggcccccctcaccaaggactcagggaagcctctgcacatcaaaccacgtctgtgaggaccccagggaccggcctgcacctacctcagaccct

SEQ ID NO: 16516 - DNA, 120 bp, Artificial Sequence
  ENSG00000014164_24 (sequence is synthesized)
catccttggagaggaaagaggctctgtccaccactctaccccacaggagggccgcccgccaccaagcctcacctgggggccacagggacactgctctgcctgcctggccctcaaccttcc

SEQ ID NO: 16517 - DNA, 120 bp, Artificial Sequence
  ENSG00000014164_25 (sequence is synthesized)
atgaccagcgtgtgcgcagggcctggtcttcctcccccaagccaggcccctgtccccaccccaccaccttccagggtgccaggcagggctggcctccaggcctgtccccgactgccattg

SEQ ID NO: 16518 - DNA, 120 bp, Artificial Sequence
  ENSG00000014164_26 (sequence is synthesized)
gcaacagtggccctgcagcccccagccctccccacccaggttttcggcccagtgaagaggccactggccaggcctcccaggcaggtgttttatgttcagcaataaaggttctatccgtaa

SEQ ID NO: 16519 - DNA, 120 bp, Artificial Sequence
  ENSG00000014164_27 (sequence is synthesized)
cgcattgtcaagaagacgccggcctcgcctctcagcgccccgcccttccccctgtctctgccctcctggcgggcccggcggctctcactatccagataccactgtccttgcaagggccgc

SEQ ID NO: 16520 - DNA, 120 bp, Artificial Sequence
  ENSG00000014164_28 (sequence is synthesized)
atgaagtttgctgaggtcaccacgcctttccagggagctgagccggatttgctgtgtggtcttcggaggggctgtcccagggcctgggagtggggggatgtctgctgtgagtctctttag

SEQ ID NO: 16521 - DNA, 120 bp, Artificial Sequence
  ENSG00000014164_29 (sequence is synthesized)
ctggcacagacagagtgggtcctgggccgatgacccagcccaaagggtggcacaggtgcagagggtcgcgggcccgccaaggacagctgcacctggccgcctggcacctctgccggacga

SEQ ID NO: 16522 - DNA, 120 bp, Artificial Sequence
  ENSG00000014164_30 (sequence is synthesized)
gctgaactcggcactccggggccatgaagtcccactaatacttgtttttttgcagctgacatacaaaacaccaatagcttcagctgaaatggatttttaaaagtgtcattttatggagaa

SEQ ID NO: 16523 - DNA, 120 bp, Artificial Sequence
  ENSG00000014216_0 (sequence is synthesized)
aaggagagagggagggcggagggcggaggggcggcgggaggagggcggggaggagcgctcttcctggttgggccctgccctgagctgccaccgggaagccagcctcagggactgcagcga

SEQ ID NO: 16524 - DNA, 120 bp, Artificial Sequence
  ENSG00000014216_1 (sequence is synthesized)
cccccaaacacccctcccccaggatgtcggaggagatcatcacgccggtgtactgcactggggtgtcagcccaagtgcagaagcagcgggccagggagctgggcctgggccgccatgaga

SEQ ID NO: 16525 - DNA, 120 bp, Artificial Sequence
  ENSG00000014216_2 (sequence is synthesized)
atgccatcaagtacctgggccaggattatgagcagctgcgggtgcgatgcctgcagagtgggaccctcttccgtgatgaggccttccccccggtaccccagagcctgggttacaaggacc

SEQ ID NO: 16526 - DNA, 120 bp, Artificial Sequence
  ENSG00000014216_3 (sequence is synthesized)
tgggtcccaattcctccaagacctatggcatcaagtggaagcgtcccacggaactgctgtcaaacccccagttcattgtggatggagctacccgcacagacatctgccagggagcactgg

SEQ ID NO: 16527 - DNA, 120 bp, Artificial Sequence
  ENSG00000014216_4 (sequence is synthesized)
gggactgctggctcttggcggccatcgcctccctcactctcaacgacaccctcctgcaccgagtggttccgcacggccagagcttccagaatggctatgccggcatcttccatttccagc

SEQ ID NO: 16528 - DNA, 120 bp, Artificial Sequence
  ENSG00000014216_5 (sequence is synthesized)
tgtggcaatttggggagtgggtggacgtggtcgtggatgacctgctgcccatcaaggacgggaagctagtgttcgtgcactctgccgaaggcaacgagttctggagcgccctgcttgaga

SEQ ID NO: 16529 - DNA, 120 bp, Artificial Sequence
  ENSG00000014216_6 (sequence is synthesized)
aggcctatgccaaggtaaatggcagctacgaggccctgtcagggggcagcacctcagagggctttgaggacttcacaggcggggttaccgagtggtacgagttgcgcaaggctcccagtg

SEQ ID NO: 16530 - DNA, 120 bp, Artificial Sequence
  ENSG00000014216_7 (sequence is synthesized)
acctctaccagatcatcctcaaggcgctggagcggggctccctgctgggctgctccatagacatctccagcgttctagacatggaggccatcactttcaagaagttggtgaagggccatg

SEQ ID NO: 16531 - DNA, 120 bp, Artificial Sequence
  ENSG00000014216_8 (sequence is synthesized)
cctactctgtgaccggggccaagcaggtgaactaccgaggccaggtggtgagcctgatccggatgcggaacccctggggcgaggtggagtggacgggagcctggagcgacagctcctcag

SEQ ID NO: 16532 - DNA, 120 bp, Artificial Sequence
  ENSG00000014216_9 (sequence is synthesized)
agtggaacaacgtggacccatatgaacgggaccagctccgggtcaagatggaggacggggagttctggatgtcattccgagacttcatgcgggagttcacccgcctggagatctgcaacc

SEQ ID NO: 16533 - DNA, 120 bp, Artificial Sequence
  ENSG00000014216_10 (sequence is synthesized)
tcacacccgacgccctcaagagccggaccatccgcaaatggaacaccacactctacgaaggcacctggcggcgggggagcaccgcggggggctgccgaaactacccagccaccttctggg

SEQ ID NO: 16534 - DNA, 120 bp, Artificial Sequence
  ENSG00000014216_11 (sequence is synthesized)
tgaaccctcagttcaagatccggctggatgagacggatgacccggacgactacggggaccgcgagtcaggctgcagcttcgtgctcgcccttatgcagaagcaccgtcgccgcgagcgcc

SEQ ID NO: 16535 - DNA, 120 bp, Artificial Sequence
  ENSG00000014216_12 (sequence is synthesized)
ccgcgacatggagactattggcttcgcggtctacgaggtccctccggagctggtgggccagccggccgtacacttgaagcgtgacttcttcctggccaatgcgtctcgggcgcgctcaga

SEQ ID NO: 16536 - DNA, 120 bp, Artificial Sequence
  ENSG00000014216_13 (sequence is synthesized)
gcagttcatcaacctgcgagaggtcagcacccgcttccgcctgccacccggggagtatgtggtggtgccctccaccttcgagcccaacaaggagggcgacttcgtgctgcgcttcttctc

SEQ ID NO: 16537 - DNA, 120 bp, Artificial Sequence
  ENSG00000014216_14 (sequence is synthesized)
agagaagagtgctgggactgtggagctggatgaccagatccaggccaatctccccgatgagcaagtgctctcagaagaggagattgacgagaacttcaaggccctcttcaggcagctggc

SEQ ID NO: 16538 - DNA, 120 bp, Artificial Sequence
  ENSG00000014216_15 (sequence is synthesized)
aggggaggacatggagatcagcgtgaaggagttgcggacaatcctcaataggatcatcagcaaacacaaagacctgcggaccaagggcttcagcctagagtcgtgccgcagcatggtgaa

SEQ ID NO: 16539 - DNA, 120 bp, Artificial Sequence
  ENSG00000014216_16 (sequence is synthesized)
cctcatggatcgtgatggcaatgggaagctgggcctggtggagttcaacatcctgtggaaccgcatccggaattacctgtccatcttccggaagtttgacctggacaagtcgggcagcat

SEQ ID NO: 16540 - DNA, 120 bp, Artificial Sequence
  ENSG00000014216_17 (sequence is synthesized)
gagtgcctacgagatgcggatggccattgagtcggcaggcttcaagctcaacaagaagctgtacgagctcatcatcacccgctactcggagcccgacctggcggtcgactttgacaattt

SEQ ID NO: 16541 - DNA, 120 bp, Artificial Sequence
  ENSG00000014216_18 (sequence is synthesized)
cgtttgctgcctggtgcggctagagaccatgttccgatttttcaaaactctggacacagatctggatggagttgtgacctttgacttgtttaagtggttgcagctgaccatgtttgcatg

SEQ ID NO: 16542 - DNA, 120 bp, Artificial Sequence
  ENSG00000014216_19 (sequence is synthesized)
aggcagggactcggtcccccttgccgtgctcccctccctcctcgtctgccaagcctcgcctcctaccacaccacaccaggccaccccagctgcaagtgccttccttggagcagagaggca

SEQ ID NO: 16543 - DNA, 120 bp, Artificial Sequence
  ENSG00000014216_20 (sequence is synthesized)
gcctcgtcctcctgtcccctctcctcccagccaccatcgttcatctgctccgggcagaactgtgtggcccctgcctgtgccagccatgggctcgggatggactccctgggccccacccat

SEQ ID NO: 16544 - DNA, 120 bp, Artificial Sequence
  ENSG00000014216_21 (sequence is synthesized)
tgccaagccaggaaggcagctttcgcttgttcctgcctcgggacagccccgggtttccccagcatcctgatgtgtcccctctccccacttcagaggccacccactcagcaccaccggcct

SEQ ID NO: 16545 - DNA, 120 bp, Artificial Sequence
  ENSG00000014216_22 (sequence is synthesized)
ggccttgcctgcagactataaactataaccactagctcgacacagtctgcagtccaggcgtgtggagccgcctcccggctcggggaggccccggggctgggaacgcctgtgccttcctgc

SEQ ID NO: 16546 - DNA, 120 bp, Artificial Sequence
  ENSG00000014216_23 (sequence is synthesized)
gccgaagccaacgccccctctgtccttccctggccctgctgccgaccaggagctgcccagcctgtgggcggtcggccttccctccttcgctccttttttatattagtgattttaaagggg

SEQ ID NO: 16547 - DNA, 120 bp, Artificial Sequence
  ENSG00000014216_24 (sequence is synthesized)
actcttcagggacttgtgtactggttatgggggtgccagaggcactaggcttggggtggggaggtcccgtgttccatatagaggaaccccaaataataaaaggccccacatctgtctgtg

SEQ ID NO: 16548 - DNA, 120 bp, Artificial Sequence
  ENSG00000014216_25 (sequence is synthesized)
gggatccgggaaaggagaggtggccggcacgcctgggaactgggaaatccctttcctggattcactgggagcaccgggaggtggctgagaaccctacttctgtgaggggagcagtgaggc

SEQ ID NO: 16549 - DNA, 120 bp, Artificial Sequence
  ENSG00000014216_26 (sequence is synthesized)
agggaaaccctaggtttggggatggataagcaggggcaggagagcagagcttgcaggcaggagcccaggttctagtcttgggaaggcctgggttctgagcaggcccatctgtccggcagg

SEQ ID NO: 16550 - DNA, 120 bp, Artificial Sequence
  ENSG00000014216_27 (sequence is synthesized)
gaaagtcgggccgaacggggcagggacttacccaaggtcacgcagcgagcccggtccccctgcgttccccggggagcgctgagccgggacgcggcggtggggtggggaaggggagtggcg

SEQ ID NO: 16551 - DNA, 120 bp, Artificial Sequence
  ENSG00000014216_28 (sequence is synthesized)
cagactggccctgatgagaccaccccctagaagcggaaccttggcgcttgaccttgaggaggccacctgggctgggccgggggaagacaggccagggtagacaggccccagggacagagg

SEQ ID NO: 16552 - DNA, 120 bp, Artificial Sequence
  ENSG00000014216_29 (sequence is synthesized)
cctgacaatgggatccgggaaaggagaggtggccggcacgcctgggaactgggaaatccctttcctggattcactgggagcaccgggaggtggctgagaaccctacttctgtgaggggag

SEQ ID NO: 16553 - DNA, 120 bp, Artificial Sequence
  ENSG00000014216_30 (sequence is synthesized)
agattcctgggtcttttctgcaagctgaggggagttaagtggcaccctggccaaggaaccccagattctccctagcacccgcttccccccccggggcaggttggtagagcaggctaatgt

SEQ ID NO: 16554 - DNA, 120 bp, Artificial Sequence
  ENSG00000014216_31 (sequence is synthesized)
aggcacagtggctcacacctgtagtcccaacactctgggaggccgaggcaggagtcgcttcagcccaggagttcaacaccagcctggacaatatggagagaccctgtctctgcaaaaaag

SEQ ID NO: 16555 - DNA, 75 bp, Artificial Sequence
  ENSG00000014216_32 (sequence is synthesized)
ttgggaggatggcttgagaccagggaggttaaggctgcagtgagctgtgatcacatcagtgcactccagcctggg

SEQ ID NO: 16556 - DNA, 87 bp, Artificial Sequence
  ENSG00000014216_33 (sequence is synthesized)
caggagcagcaccttagtgccaaagaaaagtctacctttcctcccagagcctcctgggccaggctgagtggcttggggaacaccacg

SEQ ID NO: 16557 - DNA, 120 bp, Artificial Sequence
  ENSG00000014216_34 (sequence is synthesized)
agcctcctgggccaggctgagtggcttggggaacaccacgtgactggcttcactccccagggcagacaactgctggcctctcatcccctcccctcccctttgctgccactgacctccatc

SEQ ID NO: 16558 - DNA, 120 bp, Artificial Sequence
  ENSG00000014216_35 (sequence is synthesized)
cacacggtttccttaagcagagcttttctcctcctcttctctgctagtgaagcactgcttaccctcctagcctacagcaagccctgccctgccccatctttctacccaatttctcgctct

SEQ ID NO: 16559 - DNA, 120 bp, Artificial Sequence
  ENSG00000014216_36 (sequence is synthesized)
tctgtttcacactcatttctttttactttggactaattgtggctgttgggactttggcttgattgctaaaatactttacttgtacttcctgatgatacaaacaatcctgcccacttcctc

SEQ ID NO: 16560 - DNA, 120 bp, Artificial Sequence
  ENSG00000014216_37 (sequence is synthesized)
tgccagatattgcacccactcgtcaggatttgtgcgtccttgactctgccccacccagtgctcccagcaggggcaggtgcaggaagctcactaggtggagatgttggaattggtttttct

SEQ ID NO: 16561 - DNA, 120 bp, Artificial Sequence
  ENSG00000014216_38 (sequence is synthesized)
tgcagacaaagacctgcggaccaagggcttcagcctagagtcgtgccgcagcatggtgaacctcatggatgtatccttccgtttgcttttgtctcctgagtggggttttgggtggaggta

SEQ ID NO: 16562 - DNA, 120 bp, Artificial Sequence
  ENSG00000014216_39 (sequence is synthesized)
tcggtgctgggagaactgtcccaggacagcacagagaacaggacagagccatgcggagtgtggacacacagtgccccatgctcagatgtctccctggacgtcttcctgttggttgggagg

SEQ ID NO: 16563 - DNA, 120 bp, Artificial Sequence
  ENSG00000014216_40 (sequence is synthesized)
gagaaactgaggcacagacctgtgtcaagtgaaaggtggagcaagacctgggtccccattgaccctgaggctggtgctatttctgacccctccccagcccactccactgcagcccagctc

SEQ ID NO: 16564 - DNA, 120 bp, Artificial Sequence
  ENSG00000014216_41 (sequence is synthesized)
agagaataaggcaagcccggctgtgggctgactgtacatggcttttgctgcttctcctcacccagccccaagtcgacttgccggctcggcggccatctccccttctgcacagttgcccac

SEQ ID NO: 16565 - DNA, 120 bp, Artificial Sequence
  ENSG00000014216_42 (sequence is synthesized)
tcttatctggccagtgttccctgtcctttcctggaaatgagcctgggcctcagagccaaccctgaagcccgggccacctgaatcctgaaaggctggggtgggggtgtctggattctggga

SEQ ID NO: 16566 - DNA, 120 bp, Artificial Sequence
  ENSG00000014216_43 (sequence is synthesized)
aaggagcaggaggggaggtccaggcccttggaggcccctatgggagcagcactctggtttcccaggggtggaggaggtaagaaagtaacccctccatgaggttcctgaggtggctcctga

SEQ ID NO: 16567 - DNA, 120 bp, Artificial Sequence
  ENSG00000014216_44 (sequence is synthesized)
gacgtggagttgggggctggacctggggtttgggtggggaagaagccagggagccatttctgcggccccagctgacctgcctgttctcccgcagtggttgcagctgaccatgtttgcatg

SEQ ID NO: 16568 - DNA, 120 bp, Artificial Sequence
  ENSG00000014216_45 (sequence is synthesized)
ctgcagtgagtagggttgttacattttacagatgaggaaactgaggcaaaatgtcttgttagggtcacacaggctgtgagtgagccatgccccagctctccagccccttggccaggacaa

SEQ ID NO: 16569 - DNA, 120 bp, Artificial Sequence
  ENSG00000014216_46 (sequence is synthesized)
ggagcctggagtctgggtctgggggtggcccctgagggtgggctgagtgggcagctgcagccctgctccctcctccctcccaccagctggtgggccagccggccgtacacttgaagcgtg

SEQ ID NO: 16570 - DNA, 120 bp, Artificial Sequence
  ENSG00000014216_47 (sequence is synthesized)
ccggaggtaggtgtggcaccatgacccacctgcagtcacacacccctgatggtgccagaggggagcaacccagtggcaaacccaccctggcctggagagctaagaagtcaccttgtttca

SEQ ID NO: 16571 - DNA, 120 bp, Artificial Sequence
  ENSG00000014216_48 (sequence is synthesized)
ctgcttgaaaaatgcttctccccacctgttcagtgggcagagcaaacattgctctcctgagggtcagcacaggtagtcagtgagggagctggatttgagccctggtcctcagagcccctg

SEQ ID NO: 16572 - DNA, 120 bp, Artificial Sequence
  ENSG00000014216_49 (sequence is synthesized)
tctgacatgtacacatgaggcttttcctgccttgccatctacaccaagtaagtgccaactagggcggtccagcaatgtcaggagcagggcattagacaggctgagagttctgtacccttg

SEQ ID NO: 16573 - DNA, 120 bp, Artificial Sequence
  ENSG00000014216_50 (sequence is synthesized)
cttcctggttgggccctgccctgagctgccaccgggaagccagcctcagggactgcagcgacccccaaacacccctcccccaggtaagaagctgggtagccgagccgggattccttgacc

SEQ ID NO: 16574 - DNA, 120 bp, Artificial Sequence
  ENSG00000014216_51 (sequence is synthesized)
ctggccactgctcctgggctgaggggctgccccagcacggtcccttctcgggggcctctgcgttcctggagcaggggtgggggctggcggagcggcacagcccaggcgcctgtcccagcc

SEQ ID NO: 16575 - DNA, 120 bp, Artificial Sequence
  ENSG00000014216_52 (sequence is synthesized)
tgagtagcggctgagggggcaactccagcttccagctccccctaggggtgggggctcatgactgtcttctcagagggtcctgcttgatgccagagtgctgacctggagctgcccacaggg

SEQ ID NO: 16576 - DNA, 120 bp, Artificial Sequence
  ENSG00000014216_53 (sequence is synthesized)
agggcggttcctgccccctggcctgtccttgcctctctggcacctgaccagggctgtggaaggtgctggctcctcctttcccctcctgcagcaccttatctctcttctggggacacccat

SEQ ID NO: 16577 - DNA, 120 bp, Artificial Sequence
  ENSG00000014216_54 (sequence is synthesized)
ctgagatgcctatcatgtcctgccctgactgactgtagttcatgtgtgcagctgcctgcctgggctgtgaattccaagaggacaggcttcatctgggtgctgagcagggcttggagagga

SEQ ID NO: 16578 - DNA, 85 bp, Artificial Sequence
  ENSG00000014216_55 (sequence is synthesized)
gacaggcttcatctgggtgctgagcagggcttggagaggatgagggtatgggaggcggagtgttaaagtgcgtgcatgggccagg

SEQ ID NO: 16579 - DNA, 120 bp, Artificial Sequence
  ENSG00000014216_56 (sequence is synthesized)
gttgggccctgccctgagctgccaccgggaagccagcctcagggactgcagcgacccccaaacacccctcccccagttccttgtgctgtctggaggctccgccctgccccacctgacctg

SEQ ID NO: 16580 - DNA, 120 bp, Artificial Sequence
  ENSG00000014216_57 (sequence is synthesized)
actacagagctgcaagcccctgacaatgggatccgggaaaggagaggtggccggcacgcctgggaactgggaaatccctttcctggattcactgggagcaccgggaggatgtcggaggag

SEQ ID NO: 16581 - DNA, 120 bp, Artificial Sequence
  ENSG00000014216_58 (sequence is synthesized)
actacagagctgcaagcccctgacaatgggatccgggaaaggagaggtggccggcacgcctgggaactgggaaatccctttcctggattcactgggagcaccgggaggtggctgagaacc

SEQ ID NO: 16582 - DNA, 120 bp, Artificial Sequence
  ENSG00000014257_0 (sequence is synthesized)
gaagtggtagcagttcctcctaactcctgccagaaacagctctcctcaacatgagagctgcacccctcctcctggccagggcagcaagccttagccttggcttcttgtttctgctttttt

SEQ ID NO: 16583 - DNA, 120 bp, Artificial Sequence
  ENSG00000014257_1 (sequence is synthesized)
tctggctagaccgaagtgtactagccaaggagttgaagtttgtgactttggtgtttcggcatggagaccgaagtcccattgacacctttcccactgaccccataaaggaatcctcatggc

SEQ ID NO: 16584 - DNA, 120 bp, Artificial Sequence
  ENSG00000014257_2 (sequence is synthesized)
cacaaggatttggccaactcacccagctgggcatggagcagcattatgaacttggagagtatataagaaagagatatagaaaattcttgaatgagtcctataaacatgaacaggtttata

SEQ ID NO: 16585 - DNA, 120 bp, Artificial Sequence
  ENSG00000014257_3 (sequence is synthesized)
ttcgaagcacagacgttgaccggactttgatgagtgctatgacaaacctggcagccctgtttcccccagaaggtgtcagcatctggaatcctatcctactctggcagcccatcccggtgc

SEQ ID NO: 16586 - DNA, 120 bp, Artificial Sequence
  ENSG00000014257_4 (sequence is synthesized)
acacagttcctctttctgaagatcagttgctatacctgcctttcaggaactgccctcgttttcaagaacttgagagtgagactttgaaatcagaggaattccagaagaggctgcaccctt

SEQ ID NO: 16587 - DNA, 120 bp, Artificial Sequence
  ENSG00000014257_5 (sequence is synthesized)
ataaggattttatagctaccttgggaaaactttcaggattacatggccaggacctttttggaatttggagtaaagtctacgaccctttatattgtgagagtgttcacaatttcactttac

SEQ ID NO: 16588 - DNA, 120 bp, Artificial Sequence
  ENSG00000014257_6 (sequence is synthesized)
cctcctgggccactgaggacaccatgactaagttgagagaattgtcagaattgtccctcctgtccctctatggaattcacaagcagaaagagaaatctaggctccaagggggtgtcctgg

SEQ ID NO: 16589 - DNA, 120 bp, Artificial Sequence
  ENSG00000014257_7 (sequence is synthesized)
tcaatgaaatcctcaatcacatgaagagagcaactcagataccaagctacaaaaaactcatcatgtattctgcgcatgacactactgtgagtggcctacagatggcgctagatgtttaca

SEQ ID NO: 16590 - DNA, 120 bp, Artificial Sequence
  ENSG00000014257_8 (sequence is synthesized)
acggactccttcctccctatgcttcttgccacttgacggaattgtactttgagaagggggagtactttgtggagatgtactatcggaatgagacgcagcacgagccgtatcccctcatgc

SEQ ID NO: 16591 - DNA, 120 bp, Artificial Sequence
  ENSG00000014257_9 (sequence is synthesized)
tacctggctgcagccccagctgtcctctggagaggtttgctgagctggttggccctgtgatccctcaagactggtccacggagtgtatgaccacaaacagccatcaaggtactgaagaca

SEQ ID NO: 16592 - DNA, 120 bp, Artificial Sequence
  ENSG00000014257_10 (sequence is synthesized)
gtacagattagtgtgcacagagatctctgtagaaggagtagctgccctttctcagggcagatgatgctttgagaacatactttggccattacccccagctttgaggaaaatgggctttgg

SEQ ID NO: 16593 - DNA, 120 bp, Artificial Sequence
  ENSG00000014257_11 (sequence is synthesized)
atgattattttatgttttagggacccccaacctcaggcaattcctacctcttcacctgaccctgcccccacttgccataaaacttagctaagttttgttttgtttttcagcgttaatgta

SEQ ID NO: 16594 - DNA, 120 bp, Artificial Sequence
  ENSG00000014257_12 (sequence is synthesized)
aaggggcagcagtgccaaaatataatcagagataaagcttaggtcaaagttcatagagttcccatgaactatatgactggccacacaggatcttttgtatttaaggattctgagattttg

SEQ ID NO: 16595 - DNA, 120 bp, Artificial Sequence
  ENSG00000014257_13 (sequence is synthesized)
caaaaaaaaaccccacaatctaggatgggaacaaggaaggaaagatgtgaataggctgatgggcaaaaaaccaatttacccatcagttccagccttctctcaaggagaggcaaagaaagg

SEQ ID NO: 16596 - DNA, 120 bp, Artificial Sequence
  ENSG00000014257_14 (sequence is synthesized)
agatacagtggagacatctggaaagttttctccactggaaaactgctactatctgtttttatatttctgttaaaatatatgaggctacagaactaaaaattaaaacctctttgtgtccct

SEQ ID NO: 16597 - DNA, 120 bp, Artificial Sequence
  ENSG00000014257_15 (sequence is synthesized)
tggtcctggaacatttatgttccttttaaagaaacaaaaatcaaactttacagaaagatttgatgtatgtaatacatatagcagctcttgaagtatatatatcatagcaaataagtcatc

SEQ ID NO: 16598 - DNA, 120 bp, Artificial Sequence
  ENSG00000014257_16 (sequence is synthesized)
tgatgagaacaagctatttgggcacaacacatcaggaaagagagcaccacgtgatggagtttctctagaagctccagtgataagagatgttgactctaaagttgatttaaggccaggcat

SEQ ID NO: 16599 - DNA, 89 bp, Artificial Sequence
  ENSG00000014257_17 (sequence is synthesized)
taagagatgttgactctaaagttgatttaaggccaggcatggtggtttacgcctataatcccagcattttgggagtgtcaagatcagcc

SEQ ID NO: 16600 - DNA, 120 bp, Artificial Sequence
  ENSG00000014257_18 (sequence is synthesized)
aaacttagatgggcatggtggtgtgtgcctatagtcccactacttgtggggctaaggcaggaggatcacttgagccccggaggtcgaggctacagtgagccaagagtgcactactgtact

SEQ ID NO: 16601 - DNA, 88 bp, Artificial Sequence
  ENSG00000014257_19 (sequence is synthesized)
gcacagtggctcacacctgtaatccttgcattttggaaggctgaggcaggaggatcactttaggcctggtgtactgtctctaccaaaa

SEQ ID NO: 16602 - DNA, 120 bp, Artificial Sequence
  ENSG00000014257_20 (sequence is synthesized)
gaagggacacatatcaaactgaaacaaaattagaaatgtaattatgttctaagtgcctccaagttcaaaacttattggaatgttgagagtgtggttacgaaatacgttaggaggacaaaa

SEQ ID NO: 16603 - DNA, 120 bp, Artificial Sequence
  ENSG00000014257_21 (sequence is synthesized)
ggaatgtgtaagtctttaatgccgatatcttcagaaaacctaagcaaacttacaggtcctgctgaaactgcccactctgcaagaagaaatcatgatatagctttgccatgtggcagatct

SEQ ID NO: 16604 - DNA, 120 bp, Artificial Sequence
  ENSG00000014257_22 (sequence is synthesized)
acatgtctagagaacactgtgctctattaccattatggataaagatgagatggtttctagagatggtttctactggctgccagaatctagagcaaagccatccccgctcctggttggtca

SEQ ID NO: 16605 - DNA, 120 bp, Artificial Sequence
  ENSG00000014257_23 (sequence is synthesized)
cagaatgactgacaaagacatcgattgatatgcttctttgtgttatttccctcccaagtaaatgtttgtccttgggtccattttctatgcttgtaactgtcttctagcagtgagccaaat

SEQ ID NO: 16606 - DNA, 120 bp, Artificial Sequence
  ENSG00000014257_24 (sequence is synthesized)
gtaaaatagtgaataaagtcattattaggaagttcaaaagcattgcttttataatgaacttagaaaaacgtatgtgtgtgtgtttaattagaataaaattcctctaggcagatttcagga

SEQ ID NO: 16607 - DNA, 120 bp, Artificial Sequence
  ENSG00000014257_25 (sequence is synthesized)
tcaagttctaaaggtcatctttgctgttgccttttgcctgatatctgctgtcctaatggtactactgtttatccacattcgccgtggactctgctggcagagagaatcctatgggaacat

SEQ ID NO: 16608 - DNA, 120 bp, Artificial Sequence
  ENSG00000014257_26 (sequence is synthesized)
ctgaacagacagctggataagccaggccaacctcctgtgacacagcatctctcagtggtgccgcatctaaaggacaggcttttgccatgtgggcattgccatcctcacaccctgcctttt

SEQ ID NO: 16609 - DNA, 120 bp, Artificial Sequence
  ENSG00000014257_27 (sequence is synthesized)
gaatctgcccagagcagggtctgaactcacagtgacccacaggctgctgctggatgaacactcaggctacctaggtcttctcataatggagtggtagtgcaggctgcttgttcagctaga

SEQ ID NO: 16610 - DNA, 120 bp, Artificial Sequence
  ENSG00000014257_28 (sequence is synthesized)
aagaggctgttatgcataggatggttgtattctctgccacagttgtccggagagaaataagaagccaaactccaatcagccttttacctgcaaagagtgaagggtgagaaggtggacaaa

SEQ ID NO: 16611 - DNA, 120 bp, Artificial Sequence
  ENSG00000014257_29 (sequence is synthesized)
gacatagattagaaaaatactggatattgggggaagttagactagaagtattattatacagggtgattcttacgaaagaagacccaatcataaattataaataaactttttatttagcta

SEQ ID NO: 16612 - DNA, 120 bp, Artificial Sequence
  ENSG00000014257_30 (sequence is synthesized)
attaaggttgctttgaacctaatgaggcttaaaatattgctgcagcatatttagcaaagtttttctgactcataacagttttatgatttttctcttatcctcagttgctatacctgcctt

SEQ ID NO: 16613 - DNA, 120 bp, Artificial Sequence
  ENSG00000014257_31 (sequence is synthesized)
aatgaggaaggcaggctactcaacagttgtggatttgggagtctggacactccttgagctgtgcagttttaattctttcttaaataaagatacaaaggacaatttaggacatggaaaacc

SEQ ID NO: 16614 - DNA, 120 bp, Artificial Sequence
  ENSG00000014257_32 (sequence is synthesized)
ctagctaagagagagtaggaaccaaatttctctttggatctgtatgatccactttgttttgccactcttgcaactcttggcaatttgccccctcatcgtcatacacagagagagagagag

SEQ ID NO: 16615 - DNA, 120 bp, Artificial Sequence
  ENSG00000014641_0 (sequence is synthesized)
gagtcagttccgcggtagaggtgacctgactctctgaggctcattttgcagttgttgaaattgtccccgcagttttcaatcatgtctgaaccaatcagagtccttgtgactggagcagct

SEQ ID NO: 16616 - DNA, 120 bp, Artificial Sequence
  ENSG00000014641_1 (sequence is synthesized)
ggtcaaattgcatattcactgctgtacagtattggaaatggatctgtctttggtaaagatcagcctataattcttgtgctgttggatatcacccccatgatgggtgtcctggacggtgtc

SEQ ID NO: 16617 - DNA, 120 bp, Artificial Sequence
  ENSG00000014641_2 (sequence is synthesized)
ctaatggaactgcaagactgtgcccttcccctcctgaaagatgtcatcgcaacagataaagaagacgttgccttcaaagacctggatgtggccattcttgtgggctccatgccaagaagg

SEQ ID NO: 16618 - DNA, 120 bp, Artificial Sequence
  ENSG00000014641_3 (sequence is synthesized)
gaaggcatggagagaaaagatttactgaaagcaaatgtgaaaatcttcaaatcccagggtgcagccttagataaatacgccaagaagtcagttaaggttattgttgtgggtaatccagcc

SEQ ID NO: 16619 - DNA, 120 bp, Artificial Sequence
  ENSG00000014641_4 (sequence is synthesized)
aataccaactgcctgactgcttccaagtcagctccatccatccccaaggagaacttcagttgcttgactcgtttggatcacaaccgagctaaagctcaaattgctcttaaacttggtgtg

SEQ ID NO: 16620 - DNA, 120 bp, Artificial Sequence
  ENSG00000014641_5 (sequence is synthesized)
gaagttggtgtttatgaagctctgaaagatgacagctggctcaagggagaatttgtcacgactgtgcagcagcgtggcgctgctgtcatcaaggctcgaaaactatccagtgccatgtct

SEQ ID NO: 16621 - DNA, 120 bp, Artificial Sequence
  ENSG00000014641_6 (sequence is synthesized)
gctgcaaaagccatctgtgaccacgtcagggacatctggtttggaaccccagagggagagtttgtgtccatgggtgttatctctgatggcaactcctatggtgttcctgatgatctgctc

SEQ ID NO: 16622 - DNA, 120 bp, Artificial Sequence
  ENSG00000014641_7 (sequence is synthesized)
tactcattccctgttgtaatcaagaataagacctggaagtttgttgaaggtctccctattaatgatttctcacgtgagaagatggatcttactgcaaaggaactgacagaagaaaaagaa

SEQ ID NO: 16623 - DNA, 120 bp, Artificial Sequence
  ENSG00000014641_8 (sequence is synthesized)
agtgcttttgaatttctttcctctgcctgactagacaatgatgttactaaatgcttcaaagctgaagaatctaaatgtcgtctttgactcaagtaccaaataataataatgctatactta

SEQ ID NO: 16624 - DNA, 120 bp, Artificial Sequence
  ENSG00000014641_9 (sequence is synthesized)
aattacttgtgaaaaacaacacattttaaagattacgtgcttcttggtacaggtttgtgaatgacagtttatcgtcatgctgttagtgtgcattctaaataaatatatattcaaatgaaa

SEQ ID NO: 16625 - DNA, 120 bp, Artificial Sequence
  ENSG00000014641_10 (sequence is synthesized)
ccttcgcgccctttggcaagctcggactcatcttctggggattgccgcagtgacccagtaatgggaagggattgatttccaccttgcggggtatggggcgctcttaggaggactctggag

SEQ ID NO: 16626 - DNA, 120 bp, Artificial Sequence
  ENSG00000014641_11 (sequence is synthesized)
aagtagttgtcctgggagaggagcgatcttaatcctgctgcatgacgggaggacaaaatgcgacgctgcagctattttccaaaggacgttacggtgtttgataaggacgataagtctgaa

SEQ ID NO: 16627 - DNA, 120 bp, Artificial Sequence
  ENSG00000014641_12 (sequence is synthesized)
agttttgcttgataagctctccctttctgggttttttcttacagtatagaaatctatattcagagtgctcaaaaatatttttcctattagtataacgtgaaaatttagtattagttctta

SEQ ID NO: 16628 - DNA, 120 bp, Artificial Sequence
  ENSG00000014641_13 (sequence is synthesized)
aacatatagagaaggcacaggatcttctggtgcatttttgctgcgtgggaatatttatttagacatttaaatttgtgtgtgattgtgaaaggagatagctagctgtaaggtaagtttatt

SEQ ID NO: 16629 - DNA, 120 bp, Artificial Sequence
  ENSG00000014641_14 (sequence is synthesized)
ctcaggaatagaagatagtggtttctgaatgctcagattttcttaatgcagaggaattttaatatgcttgtctcttgaagaattgagtcagtatgacttatagttctctctttgtgttca

SEQ ID NO: 16630 - DNA, 120 bp, Artificial Sequence
  ENSG00000014641_15 (sequence is synthesized)
tagttctctctttgtgttcaaactatttactttagattctaatatgtcttaatattacagtaagccttttttattttttattaatttttttaatttttttgagacggagtcttgctctgt

SEQ ID NO: 16631 - DNA, 120 bp, Artificial Sequence
  ENSG00000014641_16 (sequence is synthesized)
ggtgacctgactctctgaggctcattttgcagttgttgaaattgtccccgcagttttcaatcatgaatgtggagaaatgtttgaatgaattggaaatttcccagaacctgaaaagacacg

SEQ ID NO: 16632 - DNA, 120 bp, Artificial Sequence
  ENSG00000014641_17 (sequence is synthesized)
ttttcttgtttttgtttagtaggaacctattacttttattaaattaaaagtaaattattattcatttgttagggagtctttaaatgtattctcttaaaggaccagaggctggacttccta

SEQ ID NO: 16633 - DNA, 120 bp, Artificial Sequence
  ENSG00000014641_18 (sequence is synthesized)
acagtggttaaaaattagttatacatgatggtacataatttagtttaattttttcagatacatataatctcatataaacaaagacttgagctttgtgtgattgtgtggttctgcttctat

SEQ ID NO: 16634 - DNA, 120 bp, Artificial Sequence
  ENSG00000014641_19 (sequence is synthesized)
tttagctgcagctaagccatcaaattcagattttaatttttaattttatatttaattttcattttatgtctttttaatattctatgtgtatctgtaaaatttcctcctttcactacttag

SEQ ID NO: 16635 - DNA, 120 bp, Artificial Sequence
  ENSG00000014641_20 (sequence is synthesized)
gagctaaagtctgttgctaattttctttactcttagagccatagataagtatgccaaggagccagtgaccagggaattaacaatagcttttcaaaaaattagaagccaggcaactgatct

SEQ ID NO: 16636 - DNA, 120 bp, Artificial Sequence
  ENSG00000014641_21 (sequence is synthesized)
gagctagtttcctaggctttttcagatctaactggtcctggtgcccgttcttggacagaacctctttcctttgccctaatgcttttctggccatcccttcttgtctgtaggtcatcactg

SEQ ID NO: 16637 - DNA, 120 bp, Artificial Sequence
  ENSG00000014641_22 (sequence is synthesized)
tgatagttccttacacagtaatgatgttatgaacatagtaagaaagggtcacctggtttaattttattagttcatgtgtcagttgtgtaaactaatcatcatgagtatgtgaaacattgt

SEQ ID NO: 16638 - DNA, 120 bp, Artificial Sequence
  ENSG00000014641_23 (sequence is synthesized)
cactgctgtacagtattggaaatggatctgtctttggtaaagatcaggtaggaacaggtgtctataaatcttaagttattagagtaagaatatggttaataaaaatctgtatttagttgt

SEQ ID NO: 16639 - DNA, 120 bp, Artificial Sequence
  ENSG00000014641_24 (sequence is synthesized)
tacgcctccaggcactgaaaacactttgcaaatgagaactcttccatatattgtactcagttgacttggtgcaaccagcaggtgtcagtcaatgggagatatcactaatgacagtaactt

SEQ ID NO: 16640 - DNA, 120 bp, Artificial Sequence
  ENSG00000014641_25 (sequence is synthesized)
acagtcatgtgggagagagttactcagtaagcactcccttgttcataaatggcctttggaaccaaaagagtaaggaaatctgcttccccgctgaagcaggcactccgacttccagcaagc

SEQ ID NO: 16641 - DNA, 120 bp, Artificial Sequence
  ENSG00000014641_26 (sequence is synthesized)
gcgcgtgggggtgatgtcgctaaggggtgattctcccctccctagagttacacacgctatctctcccgccaattgccgggctccatcaggcaggtcctttcctcctgagcccaaaccatc

SEQ ID NO: 16642 - DNA, 120 bp, Artificial Sequence
  ENSG00000014641_27 (sequence is synthesized)
cgtttgttgtcgtcctccaatcacaggggctcatcctcagggactactttgcaatcggcgcagagcgcagtgagaagagcttgaaaaaaacctctggtatcgggaagtgtagttcaacac

SEQ ID NO: 16643 - DNA, 86 bp, Artificial Sequence
  ENSG00000014641_28 (sequence is synthesized)
gagtcagttccgcggtagaggtgacctgactctctgaggctcattttgcagttgttgaaattgtccccgcagttttcaatacaatg

SEQ ID NO: 16644 - DNA, 76 bp, Artificial Sequence
  ENSG00000014641_29 (sequence is synthesized)
gcacgatctccactcacttccaaatagctgggagatgcctgccaccacacccagctaattctgtatttttagtaga

SEQ ID NO: 16645 - DNA, 120 bp, Artificial Sequence
  ENSG00000014641_30 (sequence is synthesized)
taactttcagagcttagtgtcagaagcttgaaagaagccttcgaggctatccatccttgtttcgtctcagagacgtgactctcatctggaagaaggaactttaagtaaaaagaaaccaaa

SEQ ID NO: 16646 - DNA, 120 bp, Artificial Sequence
  ENSG00000014641_31 (sequence is synthesized)
tctccgagtcagttccgcggtagaggtgacctgactctctgaggctcattttgcagttgttgaaattgtccccgcagttttcaatcatgattgctcttaaacttggtgtgactgctaatg

SEQ ID NO: 16647 - DNA, 120 bp, Artificial Sequence
  ENSG00000014641_32 (sequence is synthesized)
gacctgactctctgaggctcattttgcagttgttgaaattgtccccgcagttttcaatcatgggaccaccgcagtgaggtctcgcagcgggggagagacagtgtactcaactccctgaaa

SEQ ID NO: 16648 - DNA, 120 bp, Artificial Sequence
  ENSG00000014641_33 (sequence is synthesized)
acttatttttactagctgagattccggatgaagttaccagttcatactgcatatacaaactcaaatatgttatcagcatgtagattacttgatagctttattccttgccattcaaaatac

SEQ ID NO: 16649 - DNA, 120 bp, Artificial Sequence
  ENSG00000014641_34 (sequence is synthesized)
atattatctactcttataatgtagtctggtgaggtcagataattttcccaaggtcacagagattttgggccccagattcttagctagtttccctagcaaggccccaccgttggaaggtca

SEQ ID NO: 16650 - DNA, 120 bp, Artificial Sequence
  ENSG00000014641_35 (sequence is synthesized)
ctggggtgccagataacacagagacagaacatgaggaagaatttgtctggcagtttgctggaactgacagcaaactcacacatgactcaatttccctgccccctcaggagggtgtgtgaa

SEQ ID NO: 16651 - DNA, 120 bp, Artificial Sequence
  ENSG00000014641_36 (sequence is synthesized)
tggacagagttagaaaagagccttcttctgtaagctcattcaaagcggaggattctttgcttgttgtctgtagggagtgacagcaaaataaactgtatgaaggaatctaaatggtactgc

SEQ ID NO: 16652 - DNA, 120 bp, Artificial Sequence
  ENSG00000014824_0 (sequence is synthesized)
aggcagcttgtggcggcgaagccatcggtgttcgctgatgtccagtctatggagtcagttggtaccggtggcggcgcggaggcagaaggcggtgtccgagtaggggcctctgccccacca

SEQ ID NO: 16653 - DNA, 120 bp, Artificial Sequence
  ENSG00000014824_1 (sequence is synthesized)
ggatgttacccggcttggccgccgccgcggcccacagatgtagctggtcctccctgtgccggctccgtctgcgatgcagggcggcggcctgtaatcccagcgaccgccaggagtggcaga

SEQ ID NO: 16654 - DNA, 120 bp, Artificial Sequence
  ENSG00000014824_2 (sequence is synthesized)
atttagtgacatttggaagcttttcaaacatggttccctgtagtcatccatatattggtaccctgagtcaagtaaagttgtactccacaaatgttcagaaagaaggacagggatcacaaa

SEQ ID NO: 16655 - DNA, 120 bp, Artificial Sequence
  ENSG00000014824_3 (sequence is synthesized)
cactcagagtggaaaaagtaccatcatttgaaacagcagaaggtataggcacagaactcaaagctccacttaagcaagaacctctccaagtaagagttaaagcagtccttaagaaaaggg

SEQ ID NO: 16656 - DNA, 120 bp, Artificial Sequence
  ENSG00000014824_4 (sequence is synthesized)
agtatggctcaaagtacactcagaataatttcatcactggagtcagagcgataaatgagttctgcctcaaatccagtgatctagaacaacttcgaaaaatcagacgacgaagtccccatg

SEQ ID NO: 16657 - DNA, 120 bp, Artificial Sequence
  ENSG00000014824_5 (sequence is synthesized)
aagatactgagtcttttactgtatacttgagatcagatgtggaagcaaaatctttggaagtttggggaagccctgaagctcttgccagagagaaaaaattgcgtaaggaagcagaaatag

SEQ ID NO: 16658 - DNA, 120 bp, Artificial Sequence
  ENSG00000014824_6 (sequence is synthesized)
aatacagagaaaggctatttagaaaccaaaaaatattaagagaatacagagatttcttgggaaataccaagccacgctccagaacagcatcagtgttttttaagggaccaggaaaagtgg

SEQ ID NO: 16659 - DNA, 120 bp, Artificial Sequence
  ENSG00000014824_7 (sequence is synthesized)
tgatggttgcaatttgcatcaatggattaaactgcttctttaaatttcttgcctggatttataccggttcagcaagtatgttctcagaagctatacactcattatctgatacttgtaatc

SEQ ID NO: 16660 - DNA, 120 bp, Artificial Sequence
  ENSG00000014824_8 (sequence is synthesized)
agggtttactagcattgggcatcagtaagtctgttcaaacaccagatccttctcatccgtacggattttcaaatatgcgctatatttcttcgctaattagtggtgttggtattttcatga

SEQ ID NO: 16661 - DNA, 120 bp, Artificial Sequence
  ENSG00000014824_9 (sequence is synthesized)
tgggtgcaggactatcttggtaccatggagtcatgggattgcttcatcctcaaccaatagaatcccttctatgggcatattgtattttagcaggatcattagtatctgaaggagcaacac

SEQ ID NO: 16662 - DNA, 120 bp, Artificial Sequence
  ENSG00000014824_10 (sequence is synthesized)
ttcttgttgctgtaaatgaacttcgtaggaatgctcgggctaaaggaatgtcattttacaagtatgtaatggaaagtcgtgatcctagtacaaatgtgatattattggaggatactgctg

SEQ ID NO: 16663 - DNA, 120 bp, Artificial Sequence
  ENSG00000014824_11 (sequence is synthesized)
cagtcttgggagttataatagcagccacttgcatgggccttacttctataacaggcaatccactgtatgacagcctaggttctttgggtgtgggcaccttattaggcatggtctcagcat

SEQ ID NO: 16664 - DNA, 120 bp, Artificial Sequence
  ENSG00000014824_12 (sequence is synthesized)
tcctcatctacactaacacagaagcactcttagggcggtccatccagccagaacaagtacaacggctcactgaactcctggagaatgacccatcagtaagggcaattcatgatgttaaag

SEQ ID NO: 16665 - DNA, 120 bp, Artificial Sequence
  ENSG00000014824_13 (sequence is synthesized)
ccacagatctgggattaggtaaagtaagatttaaggcagaagtagattttgatgggcgagttgttacaagatcatatttggaaaaacaagattttgaccaaatgttacaagaaattcaag

SEQ ID NO: 16666 - DNA, 120 bp, Artificial Sequence
  ENSG00000014824_14 (sequence is synthesized)
aagtgaaaactcctgaagaactagagacctttatgcttaaacatggagaaaatattattgatactttaggagctgaagtagatagacttgagaaggaactgaaaaaacgaaatcctgaag

SEQ ID NO: 16667 - DNA, 120 bp, Artificial Sequence
  ENSG00000014824_15 (sequence is synthesized)
ttcgacatgtagatttggagatactgtgagtttgatggaatgaatcacctgggtggggaccttggaaacaagtttgtccgtccactctacaaagtttcctcctctcctacactgaaagac

SEQ ID NO: 16668 - DNA, 120 bp, Artificial Sequence
  ENSG00000014824_16 (sequence is synthesized)
tcagtgccatgcagaagccttttttttaagatgaaggaaatattttatgtaaagagcaactcagcaggacacagaactaaaactactacttacatctaacagacacactacaagttgaat

SEQ ID NO: 16669 - DNA, 120 bp, Artificial Sequence
  ENSG00000014824_17 (sequence is synthesized)
caatttgaaaatcatgtttttatgcttccatagggaacattttggttatttaaattgttcataatgtcccatatttcacctgttcagtgtatactgtactttgcaatcatctttcctttt

SEQ ID NO: 16670 - DNA, 120 bp, Artificial Sequence
  ENSG00000014824_18 (sequence is synthesized)
ttcacattggtaaaaataagtggcatccataggatcatgatttttaatttgttgcctctgaagatttcactccatcaagatctgccaatcttcaatattctggctaaatcttggtatgtg

SEQ ID NO: 16671 - DNA, 120 bp, Artificial Sequence
  ENSG00000014824_19 (sequence is synthesized)
gtttttaaacagtcactccgtttcaaagtctgtctttccttatagaatgtggaaattatttctccataccttgtgattttgacctgagtgctaagagaatcactctccttacctagttat

SEQ ID NO: 16672 - DNA, 120 bp, Artificial Sequence
  ENSG00000014824_20 (sequence is synthesized)
ctacaaatgttcattccagaaatgtttagttactgaattgaatgaagacatctcagtacactcttttaggtcatagtagttgccattttgtaaaatttcttttttcttctttgctttttt

SEQ ID NO: 16673 - DNA, 120 bp, Artificial Sequence
  ENSG00000014824_21 (sequence is synthesized)
ccccttatttggtttaatttttctaatgttaggagatatagtcctagatatttccatgggccagtgtgatgacttttttttaaatgaggttcagtaccataatgtttatttactggaaga

SEQ ID NO: 16674 - DNA, 120 bp, Artificial Sequence
  ENSG00000014824_22 (sequence is synthesized)
taatgcatttataagcattttaaaattctgtaaagtgggttagaaatatttataattttacaggcaggacagcatttgacttttatttaaaaggcggcactacttatgtaaatctgagct

SEQ ID NO: 16675 - DNA, 120 bp, Artificial Sequence
  ENSG00000014824_23 (sequence is synthesized)
gtgggatatttcttgctttaagagagagacagaatctctcactgaaactcatggtcatgattttgtataatatagttcatactgtgtctgtgagtttcttcagttacaaatgggcattta

SEQ ID NO: 16676 - DNA, 120 bp, Artificial Sequence
  ENSG00000014824_24 (sequence is synthesized)
gtatagttatattgactataacatgtaagtaaatagctttctactgaccctaagttatcaaggtggaaaaaaaacatgcaattcagtaattgaaaatgtggtgaaaagctgcagctgtca

SEQ ID NO: 16677 - DNA, 120 bp, Artificial Sequence
  ENSG00000014824_25 (sequence is synthesized)
gtgagcattgttcatatgagaatggcggctgggtgatctctttgctgaattaatgagttcttaacatgtggacccaactgcctgtgtgagatctgtgtcttaaaacttactggaatggaa

SEQ ID NO: 16678 - DNA, 120 bp, Artificial Sequence
  ENSG00000014824_26 (sequence is synthesized)
atctatgaattattgcaaattgtaatgctggaaacaaaaaataaatccttggttaaagggtttgtaatggtgatttttgacccagaaatctcatttactggaaaattgtgagactttacg

SEQ ID NO: 16679 - DNA, 120 bp, Artificial Sequence
  ENSG00000014824_27 (sequence is synthesized)
tacgttggtgtatttttcttttttttttttttactattacagagtattttgcatgctgtacattttaagtgaaataacattccagttttatttttaagatagaaaattgttatatatata

SEQ ID NO: 16680 - DNA, 120 bp, Artificial Sequence
  ENSG00000014824_28 (sequence is synthesized)
atttgatactctattcttacagtttcaaattccttatcccttctttacaaaaaaaactttttttttacctgttatgatttattctatacttttttcttcttccttcccctttcccacttg

SEQ ID NO: 16681 - DNA, 120 bp, Artificial Sequence
  ENSG00000014824_29 (sequence is synthesized)
ccatttattacttcatgtcattgccatatgagaaagtaccaaattatatccagtttcctcctagtgatattactctgaaaaatttcacaaagccagacaagaataattactcattttttt

SEQ ID NO: 16682 - DNA, 120 bp, Artificial Sequence
  ENSG00000014824_30 (sequence is synthesized)
tcccaagacgaccctcaaagttaatgtgcagcaggtattccaaatggtaattttttttttttaggattccctaataaaaaaaaaaaaaattctgatatttctttttaaatctgattttgg

SEQ ID NO: 16683 - DNA, 120 bp, Artificial Sequence
  ENSG00000014824_31 (sequence is synthesized)
ttgaggtcataccattcttaaataataattgaaggtttatgttgccatcttttctaattctgttttgcactgataaacttacataaagtttgtttatgtaaaataagacataaaggagta

SEQ ID NO: 16684 - DNA, 120 bp, Artificial Sequence
  ENSG00000014824_32 (sequence is synthesized)
agtacaacatatcaaggaatttgagtatttatgtggaatcaggaaatttttctagagtcactgaattttcaaatcagagaatttgggctggatatggtggcttatgcctgtaatcccagc

SEQ ID NO: 16685 - DNA, 89 bp, Artificial Sequence
  ENSG00000014824_33 (sequence is synthesized)
cttgagctcaggaggtcatctctactaaaaaaagttagccgggtgtggtggtgctcacctgtgttagtccattctcacactgctataaa

SEQ ID NO: 16686 - DNA, 120 bp, Artificial Sequence
  ENSG00000014824_34 (sequence is synthesized)
taaagaaatacctgagactgagtaatcaaaaaaagagctttaattggctcatggttctgcagactgaacaggaaacatagcagcttctgcttctggggaggcctcgggaaacttcattca

SEQ ID NO: 16687 - DNA, 120 bp, Artificial Sequence
  ENSG00000014824_35 (sequence is synthesized)
gcctcgggaaacttcattcatggcagaatacgaaggggaagcagtcatagccagaggaagagcaagaggcggggattgggggtaggtgccacactcttgtaaacaaccagatctcatgag

SEQ ID NO: 16688 - DNA, 120 bp, Artificial Sequence
  ENSG00000014824_36 (sequence is synthesized)
aactcactatacagtaccaagaggggaaggtgctaaagtattcatgagaactccacccccgtgatccagtcatctcccaccaggccctacctccaacatgggattacaattcgacatgag

SEQ ID NO: 16689 - DNA, 84 bp, Artificial Sequence
  ENSG00000014824_37 (sequence is synthesized)
caggccctacctccaacatgggattacaattcgacatgagatttggtggggacaaagatccaaagcatatcagcatctgtagtc

SEQ ID NO: 16690 - DNA, 120 bp, Artificial Sequence
  ENSG00000014824_38 (sequence is synthesized)
cactccagcctgaatgacagagtgagatcctgtctcaaaaagagaatttgggtctctttctccaaaaataaggctatatttagtttttcaggtttcttgttattttaccaaattaatgtt

SEQ ID NO: 16691 - DNA, 120 bp, Artificial Sequence
  ENSG00000014824_39 (sequence is synthesized)
tcttactttgtatctactttggcatatagcatttgagtattaaagcatataaatcatttttaaggaaaatattctctgcaggagaataattacaaaaataatactggacagaggaggggc

SEQ ID NO: 16692 - DNA, 120 bp, Artificial Sequence
  ENSG00000014824_40 (sequence is synthesized)
agtcaagggtccatgattgattccttcttgcccaaaactaaaatctaggatttatcaaaggtgaggtatacagtggtccctgacttataatggttgcacttaagaatttttatgatgggt

SEQ ID NO: 16693 - DNA, 120 bp, Artificial Sequence
  ENSG00000014824_41 (sequence is synthesized)
ttattggcacataacccaataataagtaaaaagcatctgtacctacttttagctttggctgagaatggatctctaattcactgtaagtagcagtccccaaactatataaggtggcacagt

SEQ ID NO: 16694 - DNA, 90 bp, Artificial Sequence
  ENSG00000014824_42 (sequence is synthesized)
ctgtaagtagcagtccccaaactatataaggtggcacagttttcatcatggcagtgggaggatgaggggtggagtgtttttgtttttttt

SEQ ID NO: 16695 - DNA, 70 bp, Artificial Sequence
  ENSG00000014824_43 (sequence is synthesized)
ggtgatctgtttttaagtggagtatcctgggggcctatagtatccaactccaaagaggtaagttcctgaa

SEQ ID NO: 16696 - DNA, 120 bp, Artificial Sequence
  ENSG00000014824_44 (sequence is synthesized)
gggcctatagtatccaactccaaagaggtaagttcctgaacatacactaaagaacctgtgagataagatcagacggaaaaattttcaaattttttcaaaagcaaaggtaatccctgcata

SEQ ID NO: 16697 - DNA, 120 bp, Artificial Sequence
  ENSG00000014824_45 (sequence is synthesized)
catcctcctacacacacacacatagtgcaaagtgaataacaaaatgtcataaggcttgagtttttggtatatggctttcagtgttaccttatctcataatttaggtaatgatttttgcta

SEQ ID NO: 16698 - DNA, 120 bp, Artificial Sequence
  ENSG00000014824_46 (sequence is synthesized)
aaatgataaccatctaaagagtgcctaagttttaagtctcgtaactttttgaggaagaatgctgggaactacagaaaactgcataggcatttagaatttgtattatcttcttagactgca

SEQ ID NO: 16699 - DNA, 120 bp, Artificial Sequence
  ENSG00000014824_47 (sequence is synthesized)
tttgtcaagctttggcagcatttcttttaaatgtgatgaaccccaatttgccaaactgtcagaagtcagtgaagcaaagaatcgaaggtaaaatgttgattcaaagattgtctcccctaa

SEQ ID NO: 16700 - DNA, 120 bp, Artificial Sequence
  ENSG00000014824_48 (sequence is synthesized)
atccttcatttctttctctgaaatggaactttggaagccatttatatagattagtctgacagcctttatatttgcatgtaagtttacttgcatccttagacttggctttatgcaaaaaga

SEQ ID NO: 16701 - DNA, 120 bp, Artificial Sequence
  ENSG00000014824_49 (sequence is synthesized)
aaatttttattcgttatattgtatttcatctgtctgatttccctggcacattaagatggtcctggtccctcaggatactttttcccttaataaatgtcatatgtaaataaaggcaactca

SEQ ID NO: 16702 - DNA, 120 bp, Artificial Sequence
  ENSG00000014824_50 (sequence is synthesized)
agagcccaagaaaggaataatggcaaataagaatcatcaattgcattatcatttttagaagagtaaggcaattaaagaacaagaggcccacacttttcagctactgcttattcaaatcca

SEQ ID NO: 16703 - DNA, 120 bp, Artificial Sequence
  ENSG00000014824_51 (sequence is synthesized)
ttttgagtacttactctacagcagacactaagtgcatccatcacatgcatgctttaacccactcataactccacagtgtgtaggtatttataagcaagaaaatgactgggttagataagt

SEQ ID NO: 16704 - DNA, 120 bp, Artificial Sequence
  ENSG00000014824_52 (sequence is synthesized)
tgaataatttacccaaggaaatagggaaattgtgatttgaaccagattctttacttttaaacactattttatgcagcctgcttagtttctaaaatagtcaaagggggtttttttgtttgt

SEQ ID NO: 16705 - DNA, 120 bp, Artificial Sequence
  ENSG00000014824_53 (sequence is synthesized)
taataaataagcattttgaaagttcctagagaaagatgaaaaggaaactttagactgtggtcaaaagttagaaaaaatagaatgtatatcttgcttttagcccatttgaaattattttct

SEQ ID NO: 16706 - DNA, 120 bp, Artificial Sequence
  ENSG00000014824_54 (sequence is synthesized)
gtttttgtttgtttctattcagttggatgttattgtaatttattgattatgttactgaaatattacctgatcctgatcaggttgtcttttaaaatgtctcagtgttctcaaattgccatt

SEQ ID NO: 16707 - DNA, 120 bp, Artificial Sequence
  ENSG00000014824_55 (sequence is synthesized)
agccgtgtgtcatatctaaataatctaaataactattcctttcttagagtgtgttacctgctaccatccatatatggaaaatttgctactggctccttaaaatgaagagatatttttatt

SEQ ID NO: 16708 - DNA, 120 bp, Artificial Sequence
  ENSG00000014824_56 (sequence is synthesized)
cagtcaaaaatgttaaaaattgttagcaaactaaactgaatcctgccccagcattagcaattctagtctttcttagtttcttaaacccacaatggtaaattcttcaaaagctttccatca

SEQ ID NO: 16709 - DNA, 120 bp, Artificial Sequence
  ENSG00000014824_57 (sequence is synthesized)
tgctatggatatatctaaaagaaatggactcttcattatgtcatttttttgtattggtgtctctaatctaaatgtgctcagaaacttcacatatgtaatgacaggcaatccactgtatga

SEQ ID NO: 16710 - DNA, 120 bp, Artificial Sequence
  ENSG00000014914_0 (sequence is synthesized)
agagtcgactgaagtttccgaggagacttctcaggctgggctggacacacctttccaaggacccccaaactctgctccgtgcacgtcaaatgctcctttcccttgtgtccaaccccctac

SEQ ID NO: 16711 - DNA, 120 bp, Artificial Sequence
  ENSG00000014914_1 (sequence is synthesized)
ccctctccctaacacccctcttctcaacaagactcagcctctccccgaggtgggtgagcatccttgaggtttcccacccttaactgctgtgtccccggatggagccagagaaatgtggtg

SEQ ID NO: 16712 - DNA, 120 bp, Artificial Sequence
  ENSG00000014914_2 (sequence is synthesized)
ggggggccggggccagagtttcaacattgccccccagaaggaggagccagagatggggtctgtccaggaaaataggatgccggagcccaggagtcgtcagcctagcagttgcctggcctc

SEQ ID NO: 16713 - DNA, 120 bp, Artificial Sequence
  ENSG00000014914_3 (sequence is synthesized)
cagatgcctcccaggggagcagatcctagcatgggccccaggggtgaggaagggcctggaaccagaattgtctggaaccctgatctgtaccaactttagggtcaccttccagccctgtgg

SEQ ID NO: 16714 - DNA, 120 bp, Artificial Sequence
  ENSG00000014914_4 (sequence is synthesized)
atggcagtggaatcaggacactcccttgaacagtgaatacgattttgccctggtcaacattggacgattagaggctgtgagcggcttgtcccgagtccagctcctccgtccagggtccct

SEQ ID NO: 16715 - DNA, 120 bp, Artificial Sequence
  ENSG00000014914_5 (sequence is synthesized)
gcataaatttatccctgaggagattctgattcatggccgagacttccggctgctcagagttggttttgaggctggaggcctagagcctcaggcttttcaggtgaccatggccattgtcca

SEQ ID NO: 16716 - DNA, 120 bp, Artificial Sequence
  ENSG00000014914_6 (sequence is synthesized)
agccagagctcagagcaatcaagcccaacagtattcggggataaccctgagcaaggctggccagggttctggctccagaaaaccaccaattcctctcatggagacagcggaagactggga

SEQ ID NO: 16717 - DNA, 120 bp, Artificial Sequence
  ENSG00000014914_7 (sequence is synthesized)
gactgagcggaagaagcaggcagccagaggctggagggtcagcacggtcaacgagaggttcgacgtagccaccagcctcccccgttacttctgggtccctaaccgaattctggacagtga

SEQ ID NO: 16718 - DNA, 120 bp, Artificial Sequence
  ENSG00000014914_8 (sequence is synthesized)
ggtcaggagagcatttggccactttcatcagggccgtggaccgcgcttgtcctggcatcaccctgggggcagtgatcttctccgctgtggaggcttctatacagccagtgaccctaacaa

SEQ ID NO: 16719 - DNA, 120 bp, Artificial Sequence
  ENSG00000014914_9 (sequence is synthesized)
ggaggatatcagagcagtggagttgatgctccaggctgggcattcagatgttgtcctggtagacactatggatgagctgcccagccttgcagatgtccaacttgcccacctgaggctgag

SEQ ID NO: 16720 - DNA, 120 bp, Artificial Sequence
  ENSG00000014914_10 (sequence is synthesized)
ggccctctgcctgcctgattcatctgtagctgaggataaatggctttcagccctggaaggaacacgatggctggactatgtcagggcttgtcttcgaaaggccagtgacatttcagtatt

SEQ ID NO: 16721 - DNA, 120 bp, Artificial Sequence
  ENSG00000014914_11 (sequence is synthesized)
agctgctttcagcccccgaagcccgaacactgtttggcttccaatcactagtacagcgagagtgggtggcagctggacatcccttcctgactcggcttgggggaactggggccagtgaag

SEQ ID NO: 16722 - DNA, 120 bp, Artificial Sequence
  ENSG00000014914_12 (sequence is synthesized)
aggctccggtgtttctcctcttccttgattgtgtctggcagctcctccagcagtttccagctgattttgaattctctgagtttttccttcttgctcttcatgacagtgtcagggttcctg

SEQ ID NO: 16723 - DNA, 120 bp, Artificial Sequence
  ENSG00000014914_13 (sequence is synthesized)
acacccttaccttcctgagaaataccccctgggagcgcggaaagcagagcggacagttaaactcctatacacaagtctacaccccaggatactcccagcctccagctgggaactctttta

SEQ ID NO: 16724 - DNA, 120 bp, Artificial Sequence
  ENSG00000014914_14 (sequence is synthesized)
acctgcagctgtctgtctgggactgggatttacgttatagcaatgcacagatactacaattccagaatcctggctatgacccagaacactgtccagattcctggctccctagaccacagc

SEQ ID NO: 16725 - DNA, 120 bp, Artificial Sequence
  ENSG00000014914_15 (sequence is synthesized)
caagcttcatggttcctggaccccccagttctgtgtggctcttctctagaggagcattgacccccctgaatcagctctgtccttggcgggacagtccttccctgctggcagtctcttctc

SEQ ID NO: 16726 - DNA, 120 bp, Artificial Sequence
  ENSG00000014914_16 (sequence is synthesized)
gttggctccctcgacctgctatctcctctgaaagcctggctgaccaggaatggggtctcccctcacattggggagcttgccctttacctccagggctgctgctgcctgggtatctgggac

SEQ ID NO: 16727 - DNA, 120 bp, Artificial Sequence
  ENSG00000014914_17 (sequence is synthesized)
cccagatcaggctctggagacgctgctacctgaggggaaggcctgaggtccagatgggcctctcagctcccacaatctctggcctccaggatgagctatcccatcttcaggagttattac

SEQ ID NO: 16728 - DNA, 120 bp, Artificial Sequence
  ENSG00000014914_18 (sequence is synthesized)
ggaaatggacaccaagaatatctcctgaggatcactccaagaaaagagatccacataccattctcaatcccactgaaattgctggcattctcaaaggcagggcagagggggatctggggt

SEQ ID NO: 16729 - DNA, 120 bp, Artificial Sequence
  ENSG00000014914_19 (sequence is synthesized)
agaggagggttctgtctaatcttttttttttttttttgtatctgcacttgcagcctcagctttcacacttcagcccttaagttcactaagaaggtctgagtttctgctgcagatagtggt

SEQ ID NO: 16730 - DNA, 120 bp, Artificial Sequence
  ENSG00000014914_20 (sequence is synthesized)
gttaactgctccaactcttgtcttgcttagtttctacaaatatttttgcttcttgtcatttgaaggattaagaaacaaaaacaatccagaaattgatcggtttttttaggccaatcccat

SEQ ID NO: 16731 - DNA, 120 bp, Artificial Sequence
  ENSG00000014914_21 (sequence is synthesized)
cccttctggataaccagatgttaaatcatgagatcagagatgctgttcatcagtcccaacaagatggcctagaaatcgcattctcacctcgccttgctgctgctttaattccaagttcta

SEQ ID NO: 16732 - DNA, 120 bp, Artificial Sequence
  ENSG00000014914_22 (sequence is synthesized)
tttcttcccttatagttttctatgggaatgaggcggatacaggaaacaccctatctcctctgtatttttgtagtggaatttctatttaaggggctcattaaagcatagtatttatacaca

SEQ ID NO: 16733 - DNA, 120 bp, Artificial Sequence
  ENSG00000014914_23 (sequence is synthesized)
aggctgggacgaagatcctgatgagtgaggccttacaagcccctgctaccctcaattcagattttcattccctgacttccataagttccccctattccctgtgttccccattcccttatc

SEQ ID NO: 16734 - DNA, 120 bp, Artificial Sequence
  ENSG00000014914_24 (sequence is synthesized)
tgctactagacagtgagaagtgaaagacaaaatgtcttgagttccttagggaaagctactccactactcttctgcagctgtcacttatagtccctgggtgtccctaggaagacagaagac

SEQ ID NO: 16735 - DNA, 120 bp, Artificial Sequence
  ENSG00000014914_25 (sequence is synthesized)
ctagaatagcacagagggcaccctttttgtccttcctcaagtctgtttactcatcttcctgtctcgtgcacacataaggtgccctaaaatcaaccttaatcagtcccgaggcctagttga

SEQ ID NO: 16736 - DNA, 120 bp, Artificial Sequence
  ENSG00000014914_26 (sequence is synthesized)
aacacccctcttctcaacaagactcagcctctccccgagccctgttaggtctggagctccccacagacactgatctcagtttcccccgagagtgtgagtgtaggcctctacaggcagctg

SEQ ID NO: 16737 - DNA, 120 bp, Artificial Sequence
  ENSG00000014914_27 (sequence is synthesized)
acctctgtgaggtcagtgtgggggcaagggtagcgtggagctaggcatttctcccacaatgaccctcttctgccccatgtgaagcgcttgtcctggcatcaccctgggggcagtgatctt

SEQ ID NO: 16738 - DNA, 120 bp, Artificial Sequence
  ENSG00000014914_28 (sequence is synthesized)
tgaatgtatcattgataatcagtgggaactctctctagggttgttgccccctagaaggggttggggctgccagggtaggaaaatgagggcgatttcagatgtctacccagtcacgtgttt

SEQ ID NO: 16739 - DNA, 120 bp, Artificial Sequence
  ENSG00000014914_29 (sequence is synthesized)
ccattgagatgtactctctgaagtttggtcttgatttgttttatgagaagtgaggtctgtgagtggggagggggagatttattctcattttcaggacgagacttttgccctacatctttc

SEQ ID NO: 16740 - DNA, 120 bp, Artificial Sequence
  ENSG00000014914_30 (sequence is synthesized)
ctagaataagaggtgagaatctcatgatttgtctctagatgtgggaggattgtgtgtaaccatcctttttcttgcttcctctgtccagttaaactcctatacacaagtctacaccccagg

SEQ ID NO: 16741 - DNA, 120 bp, Artificial Sequence
  ENSG00000014914_31 (sequence is synthesized)
aaatagactgggagtgggacaagggacttgactctgctgaaccagatgaacaggagctggaaaggcaaggagctgaagcctctgggagtctgggaagtgaagttctactcctcttggcat

SEQ ID NO: 16742 - DNA, 120 bp, Artificial Sequence
  ENSG00000014914_32 (sequence is synthesized)
caaacaaggtttgggagtgtaggaggtgcgggaaagtgcttgtggcttagattaagtggaatttagggcatagctgaaaggggaaacagaattaaagacaccagaagtagcagagaagca

SEQ ID NO: 16743 - DNA, 120 bp, Artificial Sequence
  ENSG00000014914_33 (sequence is synthesized)
ccaaggacccccaaactctgctccgtgcacgtcaaatgctcctttcccttgtgtccaaccccctacccctctccctaacacccctcttctcaacaagactcagcctctccccgagtctgt

SEQ ID NO: 16744 - DNA, 120 bp, Artificial Sequence
  ENSG00000014914_34 (sequence is synthesized)
aggtctttgttttctcttcacttctatgtgctttctcaatcctcctaccccaaacctttcccctctgtgcctctcacttctccttgccgtatttctcttctcattctcttctgccctagt

SEQ ID NO: 16745 - DNA, 120 bp, Artificial Sequence
  ENSG00000014919_0 (sequence is synthesized)
agaccacagagccctgggttgtggaagaggtggctgttccctgtcatcagtatgcagcgattgctctttccgccgttgagggccttgaaggggaggcagtatctgccgctcctggctcct

SEQ ID NO: 16746 - DNA, 120 bp, Artificial Sequence
  ENSG00000014919_1 (sequence is synthesized)
agggcagcgcctagagcacagtgtgattgcatcaggcgccctttgaggccagggcaatacagcaccatctctgaagtagctttgcaatctggaaggggtacagtgtcccttccctcaaag

SEQ ID NO: 16747 - DNA, 120 bp, Artificial Sequence
  ENSG00000014919_2 (sequence is synthesized)
gctgctgagcgggtggtgggccgatggctcctggtctgcagtggaacagtggctggagcagttattcttggtggagtaactaggttgacagagtctggcctctcgatggtagattggcat

SEQ ID NO: 16748 - DNA, 120 bp, Artificial Sequence
  ENSG00000014919_3 (sequence is synthesized)
ttaataaaggagatgaagccacctacaagccaagaggaatgggaagcagaattccaaagataccagcaatttccagaatttaaaatcttgaatcatgatatgacactgacagaattcaag

SEQ ID NO: 16749 - DNA, 120 bp, Artificial Sequence
  ENSG00000014919_4 (sequence is synthesized)
ttcatctggtacatggagtactcacaccgaatgtggggtcgccttgtaggccttgtgtacatcctgcctgctgcctacttttggagaaagggctggctcagccgtggcatgaaaggacgt

SEQ ID NO: 16750 - DNA, 120 bp, Artificial Sequence
  ENSG00000014919_5 (sequence is synthesized)
gttcttgccctctgtggcctcgtctgcttccagggtctgttgggatggtatatggtgaaaagtggactagaagaaaaatcagactcccatgacatccctcgggtcagtcagtaccgcctt

SEQ ID NO: 16751 - DNA, 120 bp, Artificial Sequence
  ENSG00000014919_6 (sequence is synthesized)
gctgcccacctgggatcagccctggttctttattgtgccagcttgtggacctcactgtcactgctactccctccgcacaagttgcctgaaacccaccaactcctacagttgagacgattt

SEQ ID NO: 16752 - DNA, 120 bp, Artificial Sequence
  ENSG00000014919_7 (sequence is synthesized)
gctcatggaacagcaggtctggtgttccttacggccctctcaggggcttttgtggcagggctagatgctgggcttgtttataactcctttcccaaaatgggagaatcctggatcccggag

SEQ ID NO: 16753 - DNA, 120 bp, Artificial Sequence
  ENSG00000014919_8 (sequence is synthesized)
gacctctttaccttctcccccatcctgaggaatgtttttgagaatcccaccatggtgcagtttgatcaccggattctgggaatcacttcagtcactgccattacagtgctctacttcctc

SEQ ID NO: 16754 - DNA, 120 bp, Artificial Sequence
  ENSG00000014919_9 (sequence is synthesized)
gcttgggcatcagcacgctgctgatgtatgtcccaactcctctggccgccactcaccagtcaggctccttggctttgctcactggtgctctttggctgatgaatgaactccgaagagtcc

SEQ ID NO: 16755 - DNA, 120 bp, Artificial Sequence
  ENSG00000014919_10 (sequence is synthesized)
caaaatgattcttagaggaccagcctcctgggactgtgactgcttttgagagctcttcagagatcataagaacttgggcttttctacgagatgaccttgacataccaagtggtttccaaa

SEQ ID NO: 16756 - DNA, 120 bp, Artificial Sequence
  ENSG00000014919_11 (sequence is synthesized)
tggtcaacttacttaaaaatcttttcctgttttgagatagtcactggatcaagaatgcattaagtgtggttaccctaaatgttcccttttaaatctgcttttcatgttgaaaatcagttt

SEQ ID NO: 16757 - DNA, 120 bp, Artificial Sequence
  ENSG00000014919_12 (sequence is synthesized)
taatgtagagaaagaaatgtctgccatttgctgcttaacaggctttgtgtcaggtttttcagtgttggcaagctcttggttctacgtggatgatttctacgtggatgttctcctgagtcc

SEQ ID NO: 16758 - DNA, 120 bp, Artificial Sequence
  ENSG00000014919_13 (sequence is synthesized)
ttaattctgcctaaatagaatttctttatgatcttaacttcacttccattaggtgaagattgaaaggataggattgacatacccaaagtagccagctggtcttcagcaaaaaaaaaaaag

SEQ ID NO: 16759 - DNA, 120 bp, Artificial Sequence
  ENSG00000014919_14 (sequence is synthesized)
ctaatgtcttctaatatcctgattttcagaaatggggaaattgcagattttgacaagcttaatgtgtatatgtagcaaaatggtttttaagtacttggaaaaggaggtaatcgccaaata

SEQ ID NO: 16760 - DNA, 120 bp, Artificial Sequence
  ENSG00000014919_15 (sequence is synthesized)
cccaaagtgctgagattacaggcatgggccaccacgcccagctagttcctcttttgataaggctgttaacattacaaggtcagagagaggaatggaatcgacagtataaattggttcctg

SEQ ID NO: 16761 - DNA, 120 bp, Artificial Sequence
  ENSG00000014919_16 (sequence is synthesized)
atcgacagtataaattggttcctgagagggtttcctaacagctttgtaataagaaaaatatggccttgatggtgtagtgcatggacatctacccagataaacaaattgttgactgctgaa

SEQ ID NO: 16762 - DNA, 120 bp, Artificial Sequence
  ENSG00000014919_17 (sequence is synthesized)
cagaagaggatggtggaagagacagcctgtggaggagtgatcaggctgggactgcagggaggttctctgtgactggtacaggaaagtacttcatggttgctgagtggttctagaggagat

SEQ ID NO: 16763 - DNA, 120 bp, Artificial Sequence
  ENSG00000014919_18 (sequence is synthesized)
aaggtgagttagaaacctggcacttctatctaatgtgatagactctttcttccctgcagggaatcacttcagtcactgccattacagtgctctacttcctctctcggagaattccccttc

SEQ ID NO: 16764 - DNA, 120 bp, Artificial Sequence
  ENSG00000014919_19 (sequence is synthesized)
ggcatcagaaacatctgatttgaggatggagcaacccaatattgctaatataatagatgacagtggcaactgaaaacagtcccagaatgaccccatcgagatgaaattaaacagattaga

SEQ ID NO: 16765 - DNA, 120 bp, Artificial Sequence
  ENSG00000014919_20 (sequence is synthesized)
agttgtataagtttgggctgaagaaacctggccttatatcatttcatataaaaaagacgggattttagttgtcctcaggttcaatatgaaccaagtagtattcatgttgttattatatga

SEQ ID NO: 16766 - DNA, 120 bp, Artificial Sequence
  ENSG00000014919_21 (sequence is synthesized)
taacagaaaaattagtggtacttcaggttttatcagtagaagtgtcacagccatagtcaaaatacccctaacatactgcatttcactctgggtaccaaatttaagcaagatattgatggc

SEQ ID NO: 16767 - DNA, 120 bp, Artificial Sequence
  ENSG00000014919_22 (sequence is synthesized)
cactaagtgtgtatccagaagaagagatcagaatgatgagtccagaacccctgtcacacagggaataggtgaaggaactagggatatttaactggagcagagaacatctggagagagagc

SEQ ID NO: 16768 - DNA, 120 bp, Artificial Sequence
  ENSG00000014919_23 (sequence is synthesized)
aagattcctgtccttgagaagttgaagccgtctcatgcagaagagggaatgagcttccattatgctgcagagctggcagcaatggatgaaagttgcaggaagttagttttagttctgtag

SEQ ID NO: 16769 - DNA, 120 bp, Artificial Sequence
  ENSG00000014919_24 (sequence is synthesized)
aaggcaagagtagggtagaccaaatcaaatgctcactggggtcaggctgatggagacagtaacactggcgagcaggtgccccagctcggactatactgctgagttctggtctgttgctgc

SEQ ID NO: 16770 - DNA, 120 bp, Artificial Sequence
  ENSG00000014919_25 (sequence is synthesized)
cactctacaggtccagggttgttagatcttctgggtttttgttttgctttttgaaataaggaaaataagcttatcttaagtttatttttccttggatatacctagattccatacagtgac

SEQ ID NO: 16771 - DNA, 120 bp, Artificial Sequence
  ENSG00000014919_26 (sequence is synthesized)
aatacaaatacaaaggaagaacatctggatttcatccttgacctcatttacaaagcaaaaagagatgctggattcagatataaatgtttaattttgcagtgtttaagtcagcaaatcttc

SEQ ID NO: 16772 - DNA, 120 bp, Artificial Sequence
  ENSG00000014919_27 (sequence is synthesized)
tgttttttaaaaataagccacatatctagatttttctgtgaaagctctcaattaagtgttgggaactaatttcaagattttaaaaaatgttatgcaggcttaacgtgtctgagagccata

SEQ ID NO: 16773 - DNA, 120 bp, Artificial Sequence
  ENSG00000014919_28 (sequence is synthesized)
aatgacctaacgtttcccgttagtctctgaactaggtgatctcagttctctttcaactccagtactctgtaagtttctgtgacctgtagtgtaccattctcaggtggtgatatggtttgg

SEQ ID NO: 16774 - DNA, 120 bp, Artificial Sequence
  ENSG00000014919_29 (sequence is synthesized)
atgttttgtcccctccaaatctcatgttcaaagtgtgacattcagtgttagaggtgggcctagtaggaggtatttgggtcatgggggcggatcccttatgtatgactttgtgccatcccc

SEQ ID NO: 16775 - DNA, 120 bp, Artificial Sequence
  ENSG00000014919_30 (sequence is synthesized)
atagtaatgagtgagttctcactctggttgtttatgcaagagctggttgtttaaaagagcctggaacttcctcctctctcgcttgctctctctcaccatgtgacacactggctccccttc

SEQ ID NO: 16776 - DNA, 120 bp, Artificial Sequence
  ENSG00000014919_31 (sequence is synthesized)
accttctgccatgattgtaagcttcgtgaggccctcaccagaagcagatgccagcgccatgcttcctatacagttctatgcagaacagtgagccaaataaacctcttttctttctaaaaa

SEQ ID NO: 16777 - DNA, 120 bp, Artificial Sequence
  ENSG00000015133_0 (sequence is synthesized)
cgcccgctgctcgctgcggagccgttttgtgccgcggcgcgggggaacggggacgcggggcggggggcgcggagccggcgggcgcagcctcagcatggacgtgacagtctcggagctcct

SEQ ID NO: 16778 - DNA, 120 bp, Artificial Sequence
  ENSG00000015133_1 (sequence is synthesized)
cagcctcagcatggacgtgacagtctcggagctcctggagctcttcctgcagagcccgctggtgacctgggtgaaaacttttggcccgtttggaagcggcagccaggacaacctgactat

SEQ ID NO: 16779 - DNA, 120 bp, Artificial Sequence
  ENSG00000015133_2 (sequence is synthesized)
gtacatggatttagtggacggcatctttttgaaccaaattatgctgcaaatagatcccaggcccacaaatcaacgcatcaataagcacgtcaacaatgatgtgaaccttcgcattcagaa

SEQ ID NO: 16780 - DNA, 120 bp, Artificial Sequence
  ENSG00000015133_3 (sequence is synthesized)
tttgaccatcttggtgagaaacattaagacctactaccaggaagttctccagcagctgattgtaatgaatttgcccaatgttttgatgattggcagagacccactgtctgggaagagcat

SEQ ID NO: 16781 - DNA, 120 bp, Artificial Sequence
  ENSG00000015133_4 (sequence is synthesized)
ggaggaaatcaagaaggtgctgctgctggtgctgggctgtgctgtccagtgtgagaggaaagaggagttcattgaaagaatcaaacagctggacattgagacccaggctggcatcgtggc

SEQ ID NO: 16782 - DNA, 120 bp, Artificial Sequence
  ENSG00000015133_5 (sequence is synthesized)
ccatatccaggaggtgactcacaaccaagagaacgtgtttgacctgcagtggctggagctgcccgacgtggctccggaggagctggaggccctgtcgaggagcatggtgctccacctgcg

SEQ ID NO: 16783 - DNA, 120 bp, Artificial Sequence
  ENSG00000015133_6 (sequence is synthesized)
gaggctcatcgaccagcgggacgagtgcaccgagctgatcgtggacctcactcaggaacgggactacctgcaggcacagcatccacccagccccatcaagtcctccagcgccgactccac

SEQ ID NO: 16784 - DNA, 120 bp, Artificial Sequence
  ENSG00000015133_7 (sequence is synthesized)
tcccagccccaccagcagcctctctagcgaagacaagcagcacctggccgtagagctggccgacaccaaggccaggctgcggcgcgtcaggcaggagctggaggataagacagagcagct

SEQ ID NO: 16785 - DNA, 120 bp, Artificial Sequence
  ENSG00000015133_8 (sequence is synthesized)
tgtggacaccagacatgaggtggaccagctggtgctggaactgcagaaagttaagcaggagaacatccagctagcggcagacgcccggtctgctcgtgcctatcgagacgagctggattc

SEQ ID NO: 16786 - DNA, 120 bp, Artificial Sequence
  ENSG00000015133_9 (sequence is synthesized)
cctgcgggagaaggcgaaccgcgtggagaggctggagctggagctgacccgctgcaaggagaagctgcacgacgtggacttctacaaggcccgcatggaggagctgagagaagataatat

SEQ ID NO: 16787 - DNA, 120 bp, Artificial Sequence
  ENSG00000015133_10 (sequence is synthesized)
cattttaattgaaaccaaggccatgctggaggaacagctgactgctgctcgggcccggggcgataaagtccatgagctggaaaaggagaacctgcagctgaaatccaagcttcacgacct

SEQ ID NO: 16788 - DNA, 120 bp, Artificial Sequence
  ENSG00000015133_11 (sequence is synthesized)
ggaattggaccgggacacagataagaaacgaattgaggagctgctggaagaaaacatggtccttgagattgcacagaagcagagcatgaacgaatctgcccaccttggctgggagctgga

SEQ ID NO: 16789 - DNA, 120 bp, Artificial Sequence
  ENSG00000015133_12 (sequence is synthesized)
gcagctgtccaagaacgcagacttgtcagacgcctccaggaagtcgtttgtgtttgagctgaacgaatgtgcgtccagccgcatcctgaagctggagaaggagaatcagagcctccagag

SEQ ID NO: 16790 - DNA, 120 bp, Artificial Sequence
  ENSG00000015133_13 (sequence is synthesized)
caccatccaggggctgcgggacgcgtccctggtgttggaggagagcggcctcaagtgcggggagctggagaaggagaaccaccagctcagcaagaagattgaaaagttacaaacccagct

SEQ ID NO: 16791 - DNA, 120 bp, Artificial Sequence
  ENSG00000015133_14 (sequence is synthesized)
ggagagagaaaagcagagcaaccaagatctggagaccctcagtgaggagctgatcagagagaaggagcagctgcagagtgacatggagaccctgaaggctgacaaagccaggcagatcaa

SEQ ID NO: 16792 - DNA, 120 bp, Artificial Sequence
  ENSG00000015133_15 (sequence is synthesized)
ggaccttgagcaggaaaaggaccacctcaaccgagccatgtggtcgctgcgggagaggtcgcaggtcagcagtgaggcccgcatgaaagacgtggagaaggagaacaaagccctccacca

SEQ ID NO: 16793 - DNA, 120 bp, Artificial Sequence
  ENSG00000015133_16 (sequence is synthesized)
gacggtgacggaggccaatggcaagctcagccagttggagtttgagaagcggcagctgcacagggacttggagcaggccaaggagaagggggagcgggcagagaagctggagagggagct

SEQ ID NO: 16794 - DNA, 120 bp, Artificial Sequence
  ENSG00000015133_17 (sequence is synthesized)
acagcgactccaggaggagaacgggaggctggccaggaaggtgacctccctggagacagccaccgagaaagtcgaggccctggagcatgagagccagggcctgcagctggagaaccggac

SEQ ID NO: 16795 - DNA, 120 bp, Artificial Sequence
  ENSG00000015133_18 (sequence is synthesized)
tctgaggaagtctctggacaccttgcagaacgtgtccctgcagcttgagggcctggagcgtgacaacaagcagctggacgcagagaacctggagctgcgcaggctggtggagaccatgcg

SEQ ID NO: 16796 - DNA, 120 bp, Artificial Sequence
  ENSG00000015133_19 (sequence is synthesized)
cttcaccagcaccaagctggcacagatggagagggagaaccagcagctggagcgtgagaaggaggagctgaggaagaacgtggatctgctcaaggcgctgggcaagaagtcagagcgcct

SEQ ID NO: 16797 - DNA, 120 bp, Artificial Sequence
  ENSG00000015133_20 (sequence is synthesized)
ggagctcagctaccagagcgtgagcgctgagaacctccggctgcagcagagcctggagagcagcagccacaagacgcagaccttggagagtgagctgggcgagctggaggctgagcgcca

SEQ ID NO: 16798 - DNA, 120 bp, Artificial Sequence
  ENSG00000015133_21 (sequence is synthesized)
ggcgctgcggcgggacctggaggccctccggctggccaatgcacagttggagggggccgagaaggacaggaaggccctggagcaggaggtggcccagctcgagaaggataagaagctgct

SEQ ID NO: 16799 - DNA, 120 bp, Artificial Sequence
  ENSG00000015133_22 (sequence is synthesized)
ggagaaggaggccaagcggctgtggcagcaggtggagctcaaggatgcagtcttggacgatagcactgccaaactgtccgccgttgagaaggagagccgcgcgctggacaaggagctggc

SEQ ID NO: 16800 - DNA, 120 bp, Artificial Sequence
  ENSG00000015133_23 (sequence is synthesized)
ccgctgcagggacgcagccggcaagctgaaggagctggagaaggacaaccgggacctcaccaagcaagtcaccgtgcatgcaaggacactgacaactctgagggaggacctggtgctcga

SEQ ID NO: 16801 - DNA, 120 bp, Artificial Sequence
  ENSG00000015133_24 (sequence is synthesized)
gaagctgaagagccagcagctcagcagtgagctggacaagctgagccaggaactggagaaggtcggcctcaacagggagctgctgttgcaggaggacgacagcggcagtgacacaaaata

SEQ ID NO: 16802 - DNA, 120 bp, Artificial Sequence
  ENSG00000015133_25 (sequence is synthesized)
caagattttggagggcagaaatgaatcagcattaaaaacaacactagccatgaaagaagaaaagattgtgctcttagaagcacagatggaagagaaagcgagcctaaatcgccagttaga

SEQ ID NO: 16803 - DNA, 120 bp, Artificial Sequence
  ENSG00000015133_26 (sequence is synthesized)
gagtgagctgcagatgctaaagaaggagtgtgagaccctcaggcagaaccagggagaggggcagcacttgcagaactctttcaagcaccctgcggggaagacagccgccagtcaccaggg

SEQ ID NO: 16804 - DNA, 120 bp, Artificial Sequence
  ENSG00000015133_27 (sequence is synthesized)
gaaggaggcctgggggcccggccataaggaagccaccatggagcttctccgagtgaaggaccgggccatcgagctggagcggaataatgcagctctgcaggctgagaagcagctgctaaa

SEQ ID NO: 16805 - DNA, 120 bp, Artificial Sequence
  ENSG00000015133_28 (sequence is synthesized)
ggaacagctgcagcacctggagacccagaacgtgaccttcagcagccagatcttgacactgcagaaacagagcgccttcctgcaggagcacaacaccacactgcagacccagaccgccaa

SEQ ID NO: 16806 - DNA, 120 bp, Artificial Sequence
  ENSG00000015133_29 (sequence is synthesized)
gctgcaggtggagaactccacgctgagttcccagagcgcagcgctcaccgcgcagtacacgctgctgcagaaccaccacacggccaaggagacggagaacgaaagcctgcagaggcagca

SEQ ID NO: 16807 - DNA, 120 bp, Artificial Sequence
  ENSG00000015133_30 (sequence is synthesized)
ggagcaacttacagcggcctacgaggccctgctgcaggaccacgagcacctgggcacgctgcacgagcggcaatcggccgagtacgaggccctcatccgccagcacagctgcctaaagac

SEQ ID NO: 16808 - DNA, 120 bp, Artificial Sequence
  ENSG00000015133_31 (sequence is synthesized)
gaggagcgggagaaggtcttgaccactgagcgagaggcgctgcagcaggagcagaggacaaacgccctcgccatgggcgagaaccagaggctgcggggcgagctggacagggtcaatttc

SEQ ID NO: 16809 - DNA, 120 bp, Artificial Sequence
  ENSG00000015133_32 (sequence is synthesized)
ctgcaccaccagctgaagggggagtacgaggagctgcacgcccacaccaaggagctgaaaacctcactgaacaacgcgcagctggagctcaaccgctggcaggcccgcttcgacgagctg

SEQ ID NO: 16810 - DNA, 120 bp, Artificial Sequence
  ENSG00000015133_33 (sequence is synthesized)
aaggagcagcaccagaccatggacatctcgctgaccaagctggacaaccactgtgagctgctctcccgtctcaaggggaacttggaggaagaaaatcatcacctcctgagccagatccag

SEQ ID NO: 16811 - DNA, 120 bp, Artificial Sequence
  ENSG00000015133_34 (sequence is synthesized)
ctgttgagccagcagaaccagatgcttctggagcagaacatggagaacaaggagcagtaccatgaggagcagaagcagtacatagacaaattaaatgccttacgaagacataaggaaaag

SEQ ID NO: 16812 - DNA, 120 bp, Artificial Sequence
  ENSG00000015133_35 (sequence is synthesized)
ctggaagaaaaaatcatggatcaatacaagttctatgatcctcctccaaagaagaagaaccactggattggagccaaagccttagtcaaactcatcaaaccaaagaaagagggttcgagg

SEQ ID NO: 16813 - DNA, 120 bp, Artificial Sequence
  ENSG00000015133_36 (sequence is synthesized)
gaacgcttaaaatccaccgtggacagccctccctggcagctggagtcctcagaccccgcctcgccggcggcctctcagccgctcagatcacaggccgagaaccccgacacccccgcactg

SEQ ID NO: 16814 - DNA, 120 bp, Artificial Sequence
  ENSG00000015133_37 (sequence is synthesized)
ggctccaactgtgcagaagagcgcgacgcccacaacgggtctgtggggaaaggccctggggatctaaaaccaaagcgaggctccccacacagaggcagccttgaccgcacagatgcctcc

SEQ ID NO: 16815 - DNA, 120 bp, Artificial Sequence
  ENSG00000015133_38 (sequence is synthesized)
accgatctggccatgaggtcctggccctcggagctgggctcccggacttgctcaacttcagccaccactacagccccttccaactccacccccatcgcccggcacccaggccgcaccaaa

SEQ ID NO: 16816 - DNA, 120 bp, Artificial Sequence
  ENSG00000015133_39 (sequence is synthesized)
ggctataactcagatgacaacctctgtgagccatccctggagtttgaggtccccaaccacaggcagtacgtgtcgcggccaagtagcttagagagcagtagaaacacatccagcaacagc

SEQ ID NO: 16817 - DNA, 120 bp, Artificial Sequence
  ENSG00000015133_40 (sequence is synthesized)
tcacctcttaacctaaaaggctcctccgagcagctccatggccggtctgagagcttcagcagcgaagacctgatccccagcagggacctggccactttgccccgggaagccagcacaccg

SEQ ID NO: 16818 - DNA, 120 bp, Artificial Sequence
  ENSG00000015133_41 (sequence is synthesized)
ggacgcaacgccctcggccgccacgagtaccccttgcctcggaacgggcctctcccacaggagggtgcccagaagaggggcacagcccctccctacgtcggagtgcggccctgctcggcc

SEQ ID NO: 16819 - DNA, 120 bp, Artificial Sequence
  ENSG00000015133_42 (sequence is synthesized)
tcccccagcagtgagatggtcaccttggaggagttcctggaggagagcaaccgcagctcccccacccatgacactcccagttgccgggatgacctgctgagtgactacttccgaaaggcc

SEQ ID NO: 16820 - DNA, 120 bp, Artificial Sequence
  ENSG00000015133_43 (sequence is synthesized)
agcgatcccccagccatcggaggccaaccaggaccacctgccaagaaagaaggggccaagatgcccaccaactttgtggcccccaccgtcaaaatggccgcccccacctcggaggggagg

SEQ ID NO: 16821 - DNA, 120 bp, Artificial Sequence
  ENSG00000015133_44 (sequence is synthesized)
ccgctgaagcccgggcagtacgtaaagccaaacttcagactgactgaggccgaggccccacccagcgtggccccgagacaggcccagcctccccagagcctgtctctgggcagaccccgg

SEQ ID NO: 16822 - DNA, 120 bp, Artificial Sequence
  ENSG00000015133_45 (sequence is synthesized)
caggctccggtgcccccagcttcccatgcacctgccagccgcagtgcctccttgagccgggccttcagcctggcctcagctgaccttctccgggccagcgggccagaggcctgcaaacag

SEQ ID NO: 16823 - DNA, 120 bp, Artificial Sequence
  ENSG00000015133_46 (sequence is synthesized)
gagtcccctcagaagctgggggctcctgaggccttagggggcagagagacaggcagccacaccctgcaaagccccgcaccccccagctcccatagcctggcccgggagcggaccccactt

SEQ ID NO: 16824 - DNA, 120 bp, Artificial Sequence
  ENSG00000015133_47 (sequence is synthesized)
gtgggaaaggctggcagctcctgtcagggcccaggtccccgcagccggccgctggacacgaggcgcttctccctggctcccccaaaggaggagaggctggcccccctgcatcagtctgcc

SEQ ID NO: 16825 - DNA, 120 bp, Artificial Sequence
  ENSG00000015133_48 (sequence is synthesized)
acagcccccgccattgccactgcaggtgctggtgctgctgctgctggcagtggcagcaactcccagctcctgcacttctcacctgctgcagccccggctgccaggaccaagcccaaggcg

SEQ ID NO: 16826 - DNA, 120 bp, Artificial Sequence
  ENSG00000015133_49 (sequence is synthesized)
cccccacgctcaggggaggtggccaccatcacccctgtccgggcagggctcagcctctcagagggagacggggtcccggggcagggctgcagtgaggggcttccggccaagagcccaggt

SEQ ID NO: 16827 - DNA, 120 bp, Artificial Sequence
  ENSG00000015133_50 (sequence is synthesized)
cggtctcccgatttggctccccacctcggccgggccctggaggactgcagtcgagggagcgtctcaaagagcagtccggcctccccggagcccggcggggatccgcagaccgtgtggtat

SEQ ID NO: 16828 - DNA, 120 bp, Artificial Sequence
  ENSG00000015133_51 (sequence is synthesized)
gagtacggctgtgtgtgactgtctcgtggttgagctcgcaaacctgaaaactactgacgcgccttccgactctcacggccttttctcttgcttgcctgcggtgccaggagagggtttgga

SEQ ID NO: 16829 - DNA, 120 bp, Artificial Sequence
  ENSG00000015133_52 (sequence is synthesized)
atgaggaaaggggttcccacgcatttctgctgtttgttctgtgaatggaaacactgtgccaagccccaagaggattacgcttccaggtgtgtaacgtgttttctgtgtctgccgcttcca

SEQ ID NO: 16830 - DNA, 120 bp, Artificial Sequence
  ENSG00000015133_53 (sequence is synthesized)
gcagctgatatctttggaacaaataatccacgtcagcatggggaccaattaggatgcaatgacaaactgacttcccccaaagcagacactactccagtatgtcccagtagaacactcatt

SEQ ID NO: 16831 - DNA, 120 bp, Artificial Sequence
  ENSG00000015133_54 (sequence is synthesized)
tgcaatgtgttgagctccgttaagcacacacacactcacacaacaggcttacgaggctcaggcctggcgggtcagaaagcccactccctctcccaaggccactggatcccaggagaagcc

SEQ ID NO: 16832 - DNA, 120 bp, Artificial Sequence
  ENSG00000015133_55 (sequence is synthesized)
cagactggcgatactacaaaggtctccagggcctggcagaccccagagtcaggcctgctgttaaaaagtgagagtgctgctgttccattcctggggtcccaagcacttccctttacccca

SEQ ID NO: 16833 - DNA, 120 bp, Artificial Sequence
  ENSG00000015133_56 (sequence is synthesized)
ggacccagggcagcctgcagggcagctggcggtggccttggccatttgcccccagcctccagctggctcctgagctctgcaccagggggtttggggaccacacaggcacctgccttccta

SEQ ID NO: 16834 - DNA, 120 bp, Artificial Sequence
  ENSG00000015133_57 (sequence is synthesized)
gatttccctggctcacttttctgcaaacactggatctgccaggcctggggattggggggcaggaaagaggcccccatccagccccctccaggccagtgtgcacagtgcaccgaggggtca

SEQ ID NO: 16835 - DNA, 120 bp, Artificial Sequence
  ENSG00000015133_58 (sequence is synthesized)
tccgcacagagcgaggtgcaagctcgatgtgtaacctggctgcggcacccgacatccccggtctcggggtgttgatttatttctgaataactttttgggtatagaaaccaatttttttta

SEQ ID NO: 16836 - DNA, 120 bp, Artificial Sequence
  ENSG00000015133_59 (sequence is synthesized)
atatatgacatgtatatgtacacactcatgtgaaatatgtatactttggggggatctatttatgttccagtgggagtcactctcttctgtcgggaatcttatctgctgctttgtgtcttt

SEQ ID NO: 16837 - DNA, 120 bp, Artificial Sequence
  ENSG00000015133_60 (sequence is synthesized)
ggtcagattcctgacaatttagtttcctgttgtaaaggtgcttttcctggggtgaactaaacctattgattttttttttttaagatttttttttccttttgatttaatatactgagaaag

SEQ ID NO: 16838 - DNA, 120 bp, Artificial Sequence
  ENSG00000015133_61 (sequence is synthesized)
aaatgggagacttttgaatgttaacaagatccattttaggagtgtttggggttgtgtattaaatagccattcattctggaactcaaggacaggactgtaataaaatggaatggaaccgaa

SEQ ID NO: 16839 - DNA, 120 bp, Artificial Sequence
  ENSG00000015133_62 (sequence is synthesized)
aaagagtccctttttgaaaagcaaaaacaaggacaaagacaagtctccaacgacccacccagctctctctaaacgcctgcggttctggtcttcctccgacatcccatcctctcctaacga

SEQ ID NO: 16840 - DNA, 120 bp, Artificial Sequence
  ENSG00000015133_63 (sequence is synthesized)
gcctctctctttctccgacattggagatttctaatccctttcctttatcatgtgtctgtattgtgtaccctccttcatttccgaaattcaaacaaacaaaaaaagccagcgtctaaaagg

SEQ ID NO: 16841 - DNA, 120 bp, Artificial Sequence
  ENSG00000015133_64 (sequence is synthesized)
ccagatggccgatagcggacccctcctcctgcccccaatttcaagcttaaagtagccagcgtggattctgatttcaaaatagaagatgagttgtcacactccctggaccatttcttcagc

SEQ ID NO: 16842 - DNA, 120 bp, Artificial Sequence
  ENSG00000015133_65 (sequence is synthesized)
acaacacagttttagggggagcctcaggatatacgtgcacatgtccttgggccaggatgtccgtactaagccctggggatctaaaaccaaagcgaggctccccacacagaggcagccttg

SEQ ID NO: 16843 - DNA, 120 bp, Artificial Sequence
  ENSG00000015133_66 (sequence is synthesized)
ctgcctcggggcggaccgggtcccagtggtcactcctgtccctggggtttagccactcccgaaaaggaccccattcttcccaaccaaatatctcatgtagtttttctgaatccctgagac

SEQ ID NO: 16844 - DNA, 120 bp, Artificial Sequence
  ENSG00000015133_67 (sequence is synthesized)
accatcttggtgagaaacattaagacctactaccaggatagaccctttttccggtaactaaacttcttgcgggcagacacagcgtttgagttttcgcattggcttcaaacaaacccagtg

SEQ ID NO: 16845 - DNA, 120 bp, Artificial Sequence
  ENSG00000015133_68 (sequence is synthesized)
gaagtggacagtgaacaagacacccccgcaggaggcccgggcacggggtgtggctgccaggcctggccatggaaggccatcactgtgggctcttctgggagtggcactgacagccagcaa

SEQ ID NO: 16846 - DNA, 120 bp, Artificial Sequence
  ENSG00000015133_69 (sequence is synthesized)
ggagaatgggtgctggggcggagtggaagaaggtgagcttgaggccggagttcctaccccaggaggcaccgtcagcgtcccacttctgctcgtgtgatcccctggaggcacctgaatcag

SEQ ID NO: 16847 - DNA, 120 bp, Artificial Sequence
  ENSG00000015133_70 (sequence is synthesized)
gtggccaaggccacatcctgtacacacaggtctgggagtgtctgcatttcagcccttgaccgtgaacttgaccctctggaggtgtccatcttgatgtgatcctctgactgcaacctcatc

SEQ ID NO: 16848 - DNA, 120 bp, Artificial Sequence
  ENSG00000015133_71 (sequence is synthesized)
ctctgcctctcagagctgcctccccctgtggcttcttgccctgaggcatgggaggcgttggtgccaggagcttggggtttgagtcaggttggctcggggataagacccagcctttccaca

SEQ ID NO: 16849 - DNA, 120 bp, Artificial Sequence
  ENSG00000015133_72 (sequence is synthesized)
cattagtttgtgatgctgggtcatagtgcgtctgtttgctccctgtcaagggaccagtaacatgaggggtcagagaagggatcagaactctcgtgggcctccagtgtgtcgcaagttttt

SEQ ID NO: 16850 - DNA, 120 bp, Artificial Sequence
  ENSG00000015133_73 (sequence is synthesized)
gctgttctgcttttcctcagctgctggtgggaatgcaaattgctgtgctgactttggaaaaactctccggcagtaaagcctaaagttccacatccacacaccgtactgtggcccagctga

SEQ ID NO: 16851 - DNA, 120 bp, Artificial Sequence
  ENSG00000015133_74 (sequence is synthesized)
tttctctcctaagggtatcccggagtaacttctgcacatggatgcctgggactttacagcccttctgcacacaataacagaaacctggaagccacccagatgcccatcagtgggagaagg

SEQ ID NO: 16852 - DNA, 120 bp, Artificial Sequence
  ENSG00000015133_75 (sequence is synthesized)
gatgaatacacgaagacacgatcacacaatggaatattatacagctgtccaaacacattaactgcagcataacttcagtgatgtaggtggattctggcaatatcataaatattagtaaaa

SEQ ID NO: 16853 - DNA, 120 bp, Artificial Sequence
  ENSG00000015133_76 (sequence is synthesized)
atagcatgttcccaatgatgacttacagcactatgccttttaaaaataaagttaaaagcaactacaatgactgtactctctaggaaaatttacaggtgcaataaaactacataaaaaaga

SEQ ID NO: 16854 - DNA, 120 bp, Artificial Sequence
  ENSG00000015133_77 (sequence is synthesized)
ctgtggtcctcatgccctgctgccctgcttctaggccatggtgtggtttcccagcctgggtacaggacttggcagcctcatttctcaatgtcctcttctgcctcaggccctggggatcta

SEQ ID NO: 16855 - DNA, 120 bp, Artificial Sequence
  ENSG00000015133_78 (sequence is synthesized)
tacgggggctgagcgtgtagcttctacttacatacctccagtggtggggaattcgctacctcccaagcatcacagttctggaagcaccgacctctcctcttcatgccttcaagcaccctt

SEQ ID NO: 16856 - DNA, 120 bp, Artificial Sequence
  ENSG00000015133_79 (sequence is synthesized)
gttgtggccaggtgggcaggtgccctcagcaccataaaccttgatttttttcctttggggcagatgtaaatttgaggcaaatgacacaaagaagctgaagaatagcaaatgtccaggaga

SEQ ID NO: 16857 - DNA, 120 bp, Artificial Sequence
  ENSG00000015133_80 (sequence is synthesized)
agggagtgcccccttccttcccaggcccctggcacctgctccctgtgggtcccctgacgtgacaccttcaggtgcgtgcccttacatgtgcgcacacatggccctgaacggtcctcatct

SEQ ID NO: 16858 - DNA, 120 bp, Artificial Sequence
  ENSG00000015133_81 (sequence is synthesized)
ctcttcccgtggcctcggcctcggctgtccacatgtgttccagaaagctctgtgcagtaatagaggagggccccccgcaacctcaacctctggttcacccagcacagccttttttttgtc

SEQ ID NO: 16859 - DNA, 120 bp, Artificial Sequence
  ENSG00000015133_82 (sequence is synthesized)
atcatctgttgatggctgcttgtgctgtgcccagcactccgttggtgaagtgaggcttcctcactggagcgcagagggagtcccagagctcctccttcctgagggcgttgggcttagctt

SEQ ID NO: 16860 - DNA, 120 bp, Artificial Sequence
  ENSG00000015133_83 (sequence is synthesized)
tggcatgggattgttttgctgcatcgtttttcttagatggctcatctgggatatacctggtcattggctttttaattttaacactgccatttcctttcagtgtcgcggccaagtagctta

SEQ ID NO: 16861 - DNA, 120 bp, Artificial Sequence
  ENSG00000015133_84 (sequence is synthesized)
gaggtaggtgcgtggcctcgtggtgggctcagctgtggactgctgctcctgtggtggccgggaggcaaaacttctctatgagtggaaacgtttgaagaatacatcacccattacgatttt

SEQ ID NO: 16862 - DNA, 120 bp, Artificial Sequence
  ENSG00000015133_85 (sequence is synthesized)
gctaatcttaggtttcagacaccacagacacattgattctatttggaaagatagccatcaatcagccagctaaaataaaatgagggtaaaaataaaaattaaaaaaaaaaaacacctcaa

SEQ ID NO: 16863 - DNA, 120 bp, Artificial Sequence
  ENSG00000015133_86 (sequence is synthesized)
gaggaaggggaagaaggaggagatgaggaaaatgatccagactatgacccaaagaaggatcaaaacccaacagagtgcaagcagcagtgaagcaggatggtctaccttccgcttccctgg

SEQ ID NO: 16864 - DNA, 120 bp, Artificial Sequence
  ENSG00000015133_87 (sequence is synthesized)
gtgagaaacattaagacctactaccaggtaagggcagttctgctgtcgggaattctgatgtgtgtccatcagtatcgtcactgtcacggttttcccacaggaggccgggaggaaacggtg

SEQ ID NO: 16865 - DNA, 120 bp, Artificial Sequence
  ENSG00000015133_88 (sequence is synthesized)
agatggtgcgttgatttcctttgtttggtgaatgttctttgagctgtgtgtagcatcgtgctatatgctgtgaaggtcccagagaggagcctcagtttgcagcctctgccccgagaatgc

SEQ ID NO: 16866 - DNA, 120 bp, Artificial Sequence
  ENSG00000015133_89 (sequence is synthesized)
agttgagtggggactggctggaatgggcttcctgaaggtgaccctgaggtggttatccgcagcccctggctcagtggctctttatacaggagccattcaagggttgagggagaggaggaa

SEQ ID NO: 16867 - DNA, 120 bp, Artificial Sequence
  ENSG00000015133_90 (sequence is synthesized)
ccactggagggttatgaagatgggaccaagaatgtgattaacccacctctagctgcaagcaggagcactgggcttagggagcgtctgtctttcaagtgtttaccgcatctgatctgtgtg

SEQ ID NO: 16868 - DNA, 120 bp, Artificial Sequence
  ENSG00000015133_91 (sequence is synthesized)
tggtgtcgactcacatgtgtggtgctgccaatggcacagctctgacgtgtgccccggagtcagctggggtctgccctgagcttactctttgacctcggactagctgcctccccttctgag

SEQ ID NO: 16869 - DNA, 120 bp, Artificial Sequence
  ENSG00000015133_92 (sequence is synthesized)
gcctgcacagggatgggggcggggattcttcccggtcttcagggtttcctcccgtccagacggtgcaagttgtccacagaagcagcctccagtccacgctcagctccagcttggggccgg

SEQ ID NO: 16870 - DNA, 120 bp, Artificial Sequence
  ENSG00000015133_93 (sequence is synthesized)
gacgaccacacctgatgtgttttcttggctggagggatgaggtgcccctccttccctccaatctggtgagcctgttctcccaggtttcctgcagctgatggatgtcacctgtggagcctg

SEQ ID NO: 16871 - DNA, 120 bp, Artificial Sequence
  ENSG00000015133_94 (sequence is synthesized)
ggggtggtacagctgccgctggggtctccttacctgccccacacacagggagggagacctgagtggcggatggacatagtttaagggccggtgttgcaaacttatgaaaagaaaagaatt

SEQ ID NO: 16872 - DNA, 120 bp, Artificial Sequence
  ENSG00000015133_95 (sequence is synthesized)
tcctggccgtggtcgggtgaggaagggggtgtcctgaagggtcccgcaccggtggctgtgcacacgtgtgcaggaacgtgccaggggtgggtgactgcatgtgcgccttcgcttagatgt

SEQ ID NO: 16873 - DNA, 120 bp, Artificial Sequence
  ENSG00000015133_96 (sequence is synthesized)
tcgcttagatgtgttacgagccaagtagaaattcagcgtggcgaccgttttgtcccataatgcttttgttactttattttatattttattttaatttttttgagatggagtttcactctt

SEQ ID NO: 16874 - DNA, 120 bp, Artificial Sequence
  ENSG00000015153_0 (sequence is synthesized)
attatcctccttattgacaaacagagcggtcgcggcggcgactctcggcgtgcggtgatagccaagccatgggagacaagaagagccccaccaggccgaagcggcagccgaagccgtcct

SEQ ID NO: 16875 - DNA, 120 bp, Artificial Sequence
  ENSG00000015153_1 (sequence is synthesized)
cggatgagggttactgggactgtagcgtctgcaccttccggaacagcgccgaggccttcaagtgcatgatgtgcgatgtgcggaagggcacctccacccggaaacctcgacctgtctccc

SEQ ID NO: 16876 - DNA, 120 bp, Artificial Sequence
  ENSG00000015153_2 (sequence is synthesized)
agttggttgcacagcaggttactcagcagtttgtgcctcctacacagtcaaagaaagagaaaaaagataaagtagaaaaagaaaaaagtgaaaaggaaacaactagcaaaaagaatagcc

SEQ ID NO: 16877 - DNA, 120 bp, Artificial Sequence
  ENSG00000015153_3 (sequence is synthesized)
ataagaaaaccaggccaagattgaaaaatgtggatcggagtagtgctcagcatttggaagttactgttggagatctgacagtcattattacagactttaaggagaaaacaaagtcaccgc

SEQ ID NO: 16878 - DNA, 120 bp, Artificial Sequence
  ENSG00000015153_4 (sequence is synthesized)
ctgcatctagtgctgcttctgcagatcaacacagtcaaagcggctctagctctgataacacagagagaggaatgtccaggtcatcttcacccagaggagaagcctcatcattgaatggag

SEQ ID NO: 16879 - DNA, 120 bp, Artificial Sequence
  ENSG00000015153_5 (sequence is synthesized)
aatctcattaaagtttattttctccaatttcttagtcacttctgtcctaccatgcaaatacacagattatgccaagaggtaccacattttcatgacagatacattcatgcacaatccata

SEQ ID NO: 16880 - DNA, 120 bp, Artificial Sequence
  ENSG00000015153_6 (sequence is synthesized)
atttgagttttacataaaatagaaatttgttagaatttgttagattttattgcaatgatgcctaccaaacatttccagacttaacattttggtctctgcagttaagtgccatgaaaatgt

SEQ ID NO: 16881 - DNA, 120 bp, Artificial Sequence
  ENSG00000015153_7 (sequence is synthesized)
ggttgaattattcattatgcagtgttattggtaagtgtattttcacttttagtttagtgaattctaacacataattcttgaattctctactattggcatgtaacgaatttaaatttttta

SEQ ID NO: 16882 - DNA, 120 bp, Artificial Sequence
  ENSG00000015153_8 (sequence is synthesized)
agaattgtgaaacagatagttatatgtatacaagtcaaagaacaacttaactattgctgcaacaggtttttcttaatggttatcctcttaaatacacctgctggtacttggtgtggttaa

SEQ ID NO: 16883 - DNA, 120 bp, Artificial Sequence
  ENSG00000015153_9 (sequence is synthesized)
ataggaaaattgttattaaataaagaatttgtatgaacctttgccaatgtttttgacacgttttactaattattgttcctgaattatgtttctggttttatctattttttgaggtttttt

SEQ ID NO: 16884 - DNA, 120 bp, Artificial Sequence
  ENSG00000015153_10 (sequence is synthesized)
tgtttgcttatttttcaaaacattcatttattgtaatgtttactagcggactagtaaacaataaaacattgattatttagctttataattcaggtttagtgctattgtcattgaacactg

SEQ ID NO: 16885 - DNA, 120 bp, Artificial Sequence
  ENSG00000015153_11 (sequence is synthesized)
gtattttctgtatcatataaaacattaaaattcaaataattataagcatttggcaaaaacaagagaaaagaaacttgccatattttacaagctgcaattttagaaaagctttaacttaat

SEQ ID NO: 16886 - DNA, 120 bp, Artificial Sequence
  ENSG00000015153_12 (sequence is synthesized)
gatagttttatcattgttttcttgtcccaaacttatccagggccatagaagtatgaatctaattaaaacagaaatgggaattattgcacagaaatgggaaataactaattttaaatcagt

SEQ ID NO: 16887 - DNA, 120 bp, Artificial Sequence
  ENSG00000015153_13 (sequence is synthesized)
caaattggcttcttattaaatacaataattcttatgaaaatcatagtaccctattttcagacacagctgccagtttacacatttctcagtatcctgaaaggaaaaaagtatagccccact

SEQ ID NO: 16888 - DNA, 120 bp, Artificial Sequence
  ENSG00000015153_14 (sequence is synthesized)
tatactatgtaaaattaccaataaaatatttttatgactacagattttgcatttttgtttacaactatttaaagagttttatgttgtatttagaatttcaacctagaaaccacacagtac

SEQ ID NO: 16889 - DNA, 120 bp, Artificial Sequence
  ENSG00000015153_15 (sequence is synthesized)
ttaaattctcctggggtctcctgctttctcttaaccatttgcttaatatatatctacctaaaggagacttctgaattgtaaatgaacttaaaaatagaatgtggatgcaaaatatcacat

SEQ ID NO: 16890 - DNA, 120 bp, Artificial Sequence
  ENSG00000015153_16 (sequence is synthesized)
aagacatcatgataacatttgaagaaaaaataaaactgtagaccctaacagttgtgatatttggtggtttcatgtggtaatgtaattttctgtttaattacagtactttttacaggcaca

SEQ ID NO: 16891 - DNA, 120 bp, Artificial Sequence
  ENSG00000015153_17 (sequence is synthesized)
ttgttaaatgaaaaattaaaatttgtgtttattataagatactttcaatggaataccagctaaccagatatgttcctttaaaacatgaatttttttgtcttattctgtttttaacatgtt

SEQ ID NO: 16892 - DNA, 120 bp, Artificial Sequence
  ENSG00000015153_18 (sequence is synthesized)
aacatgtttcaaatgttttatacatttttggagatagtaaaaatttaaaaatgtaatagggaaaatatttaatttttaagtcaaaaactatgctttaaaggaattacatcttatgatcaa

SEQ ID NO: 16893 - DNA, 120 bp, Artificial Sequence
  ENSG00000015153_19 (sequence is synthesized)
caggatgtattttaaatgagctgcaagagagaaaaatctgacaggagatgggattttacctgaatggagcatactcatatttctacataggtgggaagatactcatctttctacatagac

SEQ ID NO: 16894 - DNA, 120 bp, Artificial Sequence
  ENSG00000015153_20 (sequence is synthesized)
gggaacacggtgtagcatggagattaagcgtgctaactgacacctcatgtttgaatcctgttgtagaatggaaatgagcttaaattacccaagcttactttccatctataaaacagggct

SEQ ID NO: 16895 - DNA, 120 bp, Artificial Sequence
  ENSG00000015153_21 (sequence is synthesized)
aataatggtaatcacatctaatttatagggtttttgggaggattaagtcaatccgtgtaaaattcttaattatctgacacatactggtcactcagtaaatgtgagcttttaccattgtta

SEQ ID NO: 16896 - DNA, 120 bp, Artificial Sequence
  ENSG00000015153_22 (sequence is synthesized)
taggtaaaatcccattacaaaaatacaaaaatattttttgtaacagttattttcctgccctcttggatgacctaaagtaatagtgttttatagatttcactaaattttcagtgtaatatc

SEQ ID NO: 16897 - DNA, 120 bp, Artificial Sequence
  ENSG00000015153_23 (sequence is synthesized)
agatgttttctctggatgcagaaagaccatctttccataattaaagaacctggtgggtgtgcactatgagattggagaaatgaattaagttgacttgaaattattttacttttattaatc

SEQ ID NO: 16898 - DNA, 120 bp, Artificial Sequence
  ENSG00000015153_24 (sequence is synthesized)
acaggtatctcaacctgcctttgtttcaccctacttcaagtacacttccacaccaggaaaacagacccaaattccataaacagaactgacgttaaaatatgcgaaagattcagaacctag

SEQ ID NO: 16899 - DNA, 120 bp, Artificial Sequence
  ENSG00000015153_25 (sequence is synthesized)
gtttagggtacatgtttttctctgtttcatgaacttacagtgtggtttgagcactgggttcttttagccaaattccatacaaaaagaatttggatgttttccagcatttattaccttact

SEQ ID NO: 16900 - DNA, 120 bp, Artificial Sequence
  ENSG00000015153_26 (sequence is synthesized)
tcatgccagtaatcccagcactttgggctgaagcaggcagatattttgagcccaggaccagcctgggcaacatggtgaaagctcatctctatgaaaaaatttgaatatacatatatatat

SEQ ID NO: 16901 - DNA, 120 bp, Artificial Sequence
  ENSG00000015153_27 (sequence is synthesized)
gggcaacatggtgaaagctcatctctatgaaaaaatttgaatatacatatatatatatatgtatatttaaaaagtgaatataatttgaggcacagaagaatattcttaaaaccttttgta

SEQ ID NO: 16902 - DNA, 120 bp, Artificial Sequence
  ENSG00000015153_28 (sequence is synthesized)
aaggttttatttttattaaatgctttcctaaaatgatagtggataatagacaaagtgaaaacatttaaaaaggaagagaaacttcagcctttctaagttgatagcatgtttattaacttt

SEQ ID NO: 16903 - DNA, 120 bp, Artificial Sequence
  ENSG00000015153_29 (sequence is synthesized)
tagataaagatccttatagactgaaagaatgtagcctctgcattaatggtaaatggtctagaagttttcgtttccactgaggcttccgccactcgcttttttaaacttcctgctatggtt

SEQ ID NO: 16904 - DNA, 120 bp, Artificial Sequence
  ENSG00000015153_30 (sequence is synthesized)
tggatatggtttgtcctcaccaaaactcatgctgaggcctgagtccccagtttgattgtgttggtaggtggtgcctttaagaggtgattaggtcattgagatggattaaaggctttctca

SEQ ID NO: 16905 - DNA, 120 bp, Artificial Sequence
  ENSG00000015153_31 (sequence is synthesized)
tgaggctcagttagttctggaatggattcgctcttgcaggaatggatgaattctcacaagagtgggttgttatgaagtgaggatgcttcttgtgttctgttctctttgccctcctcagtt

SEQ ID NO: 16906 - DNA, 120 bp, Artificial Sequence
  ENSG00000015153_32 (sequence is synthesized)
caccatctgctttccaccatgagttgaagcagcatgaggccctcatcagatgggctccctgatcttggactcctcagcctttggactcataagccaaaataaatctgttttctttataaa

SEQ ID NO: 16907 - DNA, 120 bp, Artificial Sequence
  ENSG00000015153_33 (sequence is synthesized)
gccataagaaaaccaggtaaatgtgaagagtgttttatgacatttttgaaataataaaaccatttaatttttttaaccttgacatactaatatacacaaagtggaagtaaaatatttggt

SEQ ID NO: 16908 - DNA, 120 bp, Artificial Sequence
  ENSG00000015153_34 (sequence is synthesized)
ctcctttattataaggtatcaggaaaggttttactgagtttgaaagatacataggaaattaaacacagaagccagaaatacaagcttaaatgtgatgatgcttttttctttttacgagat

SEQ ID NO: 16909 - DNA, 120 bp, Artificial Sequence
  ENSG00000015153_35 (sequence is synthesized)
tggaagacatttgtgtctggatttgttttgttttgttttgtttttcccttaagaagagctatttgaaccaggagtggttttcaacataccgaacagataattgcatgggttttaacctat

SEQ ID NO: 16910 - DNA, 120 bp, Artificial Sequence
  ENSG00000015153_36 (sequence is synthesized)
caaaatggtcatgcgttcagtcataacaatcatgatacccttattagtgtgtgtcagtggagtaacagtcttccttgcatatagctcaaccttagcttttatcaccttcctccatggtgc

SEQ ID NO: 16911 - DNA, 120 bp, Artificial Sequence
  ENSG00000015153_37 (sequence is synthesized)
aactatttcattgttgtctaaaacatctattttaataaaattaataagctgtctgcaaaattatgatacagctatagaagcacaagttctacttctaggctgtcacagttttttggttgc

SEQ ID NO: 16912 - DNA, 120 bp, Artificial Sequence
  ENSG00000015153_38 (sequence is synthesized)
attgaagaatgttcatgaatgattggtttgattaatgttaatgagttgaaacattttatgatgtttttgtggctagttacacataaattgccttaaatacatgtattcattttgttactt

SEQ ID NO: 16913 - DNA, 120 bp, Artificial Sequence
  ENSG00000015153_39 (sequence is synthesized)
acctggcacctggaagaagaaggaatatagtacacaggggagttggcccaggacagagaagtgggcctagtttaaaagaggcttgaggcccacatgggggcccctgacattttttttttt

SEQ ID NO: 16914 - DNA, 120 bp, Artificial Sequence
  ENSG00000015153_40 (sequence is synthesized)
taccagtacatctaagctcttgtagatccaatttttagtggtggaaacattacttgaggaggactcagagaagcattgtcatttggattgaaactgaagaggctctgggcaactcaccag

SEQ ID NO: 16915 - DNA, 120 bp, Artificial Sequence
  ENSG00000015153_41 (sequence is synthesized)
cacgaccctctcagcttcttccttcctctctctgaattctcttctcttttgattttggctctaagttaaacctaagagctctaatttctctgttatctgttattttcctagtggtttctg

SEQ ID NO: 16916 - DNA, 120 bp, Artificial Sequence
  ENSG00000015153_42 (sequence is synthesized)
aaattcagggtagaatctgtgtttgtatagaacagtgtggaacagggtattgttactagagaagatattgattgcatcacagaatattaatatttttcctctctggtaatgttaaaaaaa

SEQ ID NO: 16917 - DNA, 120 bp, Artificial Sequence
  ENSG00000015153_43 (sequence is synthesized)
caagattaaaggactgcagaacggtgttgagaagcaaaagtttcagtagttggaagaaataattctccataattgacttattaatgaacagggtaatttccagagtaaggttggcaagta

SEQ ID NO: 16918 - DNA, 120 bp, Artificial Sequence
  ENSG00000015153_44 (sequence is synthesized)
ctaaagccaagactggatagctgcagagcagaaggatgcagtttgctaatgatttgtttgtgtgacgcacagatgggatttgaatcctttgggtcagactgacctttgaactgattctgc

SEQ ID NO: 16919 - DNA, 120 bp, Artificial Sequence
  ENSG00000015153_45 (sequence is synthesized)
ctcattgccaaatgttaggccaagtctaagccattctagacatttgaaaaacttttttctttttagacctgcagagaagattgagtccttgttctacctttgaagtcttctttttttctt

SEQ ID NO: 16920 - DNA, 120 bp, Artificial Sequence
  ENSG00000015153_46 (sequence is synthesized)
ttttcttttttgagataagatctcattctgttgcccaggctgggttgcagtggcatcatccaggctcactgcagcctcgaactcccaggttcaaggaatcctcccacctcagcctcccaa

SEQ ID NO: 16921 - DNA, 120 bp, Artificial Sequence
  ENSG00000015153_47 (sequence is synthesized)
gtagctgaaactacagatgcacaccaccatgtgtggctaattttcttattttttgtagagatgggggatctctatgttgcctaggctagtctcaaactcttgagctcaagtgatcctcct

SEQ ID NO: 16922 - DNA, 120 bp, Artificial Sequence
  ENSG00000015153_48 (sequence is synthesized)
accttggcctcccaaagaactgggattataggaatgagccaccattcggcccctttaaagtctttattggcaatataattttttttctttaaataatattaagttcaaattctttatgca

SEQ ID NO: 16923 - DNA, 120 bp, Artificial Sequence
  ENSG00000015153_49 (sequence is synthesized)
acagaagcccatttcctttggctatatccatggtaggtcatgtctttctagagaacgaagttacattcatggcatgtatttcaaaataaaatgatttgttgtagcttcagttcctcaagt

SEQ ID NO: 16924 - DNA, 120 bp, Artificial Sequence
  ENSG00000015153_50 (sequence is synthesized)
tttaattttattttagattttggggtacatgtgcatgtttgttacttgggtatattgcagagtggtgggattgggattccagtgtacccattacccaaatggtgaacgttatacccaaca

SEQ ID NO: 16925 - DNA, 120 bp, Artificial Sequence
  ENSG00000015153_51 (sequence is synthesized)
ggtcatttttcagcccctcactccaaaattttttacattgtgcttttgtgagagaaacagtagtaaatgtcaaactgacaggaaattttttaaaaggaaacaaaatgccacggtgacaca

SEQ ID NO: 16926 - DNA, 78 bp, Artificial Sequence
  ENSG00000015153_52 (sequence is synthesized)
ggaaattttttaaaaggaaacaaaatgccacggtgacacattattttcaagatgctgcacagtctttatatctgaagt

SEQ ID NO: 16927 - DNA, 120 bp, Artificial Sequence
  ENSG00000015153_53 (sequence is synthesized)
gattacaggagtgagacactgtgcccagcctatctgaagattcttataaggcaagaaatgtcccaaatataaatgcaagaaactttaggaaattaaggatcattcttggctggcccagtg

SEQ ID NO: 16928 - DNA, 80 bp, Artificial Sequence
  ENSG00000015153_54 (sequence is synthesized)
gcaccttgggaggctgagacgcaacacagtgagatctcgtctctactaaaaattaaaaaaattagctgggtgtggtggtg

SEQ ID NO: 16929 - DNA, 120 bp, Artificial Sequence
  ENSG00000015153_55 (sequence is synthesized)
agaaaatgaaatattaaatattaaggatagtctgtatgagggtgataatcaatgtgtgatgattaatttaagactggtgtcttattggtacttcatctagtagtggacagttacttaata

SEQ ID NO: 16930 - DNA, 120 bp, Artificial Sequence
  ENSG00000015153_56 (sequence is synthesized)
ttgcttaattcagatagcaaatatttagaaatgaaaatgatagaattattggtttgggtttcaaactgtggtctaaatggttcataccaggctttcaaatgtaacaggtaatgttacatt

SEQ ID NO: 16931 - DNA, 120 bp, Artificial Sequence
  ENSG00000015153_57 (sequence is synthesized)
ttgttagaggatattataacagtcctttaggtttctcataggtgttattttagagagctataaaaaagatttcacatagtagaaagagtgctagatgttacactagtatgattttggtaa

SEQ ID NO: 16932 - DNA, 120 bp, Artificial Sequence
  ENSG00000015153_58 (sequence is synthesized)
cctgggttcatatctcatttcatatcaaccatttcaatattcagcattcagcaaatgtttattgagcatcttatttaagggctgagttggatactagacatacagtggtgagcaaaatgg

SEQ ID NO: 16933 - DNA, 120 bp, Artificial Sequence
  ENSG00000015153_59 (sequence is synthesized)
atttttttgtttctttaaaattttacagttttgcaaattagaaccgctttaactgtaccaagctctatatgtgaggtttagtgttagtagatctttcctttatgtgtaggctgaagaggt

SEQ ID NO: 16934 - DNA, 120 bp, Artificial Sequence
  ENSG00000015153_60 (sequence is synthesized)
ggaacttcttcattaaaaatatatgttgtttataactgaacacagtattattattatggttaggtaaaaagagtgagttatttcagcttcttttaaaagtaagctataaaatccacattc

SEQ ID NO: 16935 - DNA, 120 bp, Artificial Sequence
  ENSG00000015153_61 (sequence is synthesized)
tgaaagaagcttaaaccaactatcatctggtagaaatcttttcagcatcgttgttttcttgtcatacttgctttatgtcttcaaatttgaggtttggcactgattcttctagacttttgg

SEQ ID NO: 16936 - DNA, 120 bp, Artificial Sequence
  ENSG00000015153_62 (sequence is synthesized)
tgtaggaatgggagaaaaaaattgaggaccatctacataagtcctttttaaagaaatgcatggttcctgagccgcctcctgtctatctgaggagcctttctagcaaccatttagttgttc

SEQ ID NO: 16937 - DNA, 120 bp, Artificial Sequence
  ENSG00000015153_63 (sequence is synthesized)
agagactccttattctaggagatttcttacttgtttgttttttgtcctgtaagaggactcacactggttaattgtatatgggtaaattttacaagtgattattagtgtttgtgtagtctg

SEQ ID NO: 16938 - DNA, 120 bp, Artificial Sequence
  ENSG00000015153_64 (sequence is synthesized)
gatatcagagtggttttcaaagtgtagtctgagggacactgagagtccctgagatctttttagttgaagctttctatgaggttcacactgtttttataataatttgaagatgttatttgc

SEQ ID NO: 16939 - DNA, 120 bp, Artificial Sequence
  ENSG00000015153_65 (sequence is synthesized)
ctttttcactgtgatggtgcagaggcagtgatgggtaaaactgccagcaccttagcatgaatcaaagcagtggcaccaaattgctatcttcattgtaatattcaccaccatgtacatgca

SEQ ID NO: 16940 - DNA, 120 bp, Artificial Sequence
  ENSG00000015153_66 (sequence is synthesized)
tgcagtaagaataatgtcagtttgaattaagaatatccttgaagcagaaaaatttactaattttattacatctcatatttttaaaaatattctgtctgaccaaatgggaactacacataa

SEQ ID NO: 16941 - DNA, 120 bp, Artificial Sequence
  ENSG00000015153_67 (sequence is synthesized)
agcacttctactgtataccaaagtacagtggttaagggaaagcacatgtgtagtttgtcttgcaagcagagctagtctttttgtcatagagcatcatttttacttgaaagactacctgaa

SEQ ID NO: 16942 - DNA, 120 bp, Artificial Sequence
  ENSG00000015153_68 (sequence is synthesized)
ataccatagttattcagacttggatatttagcatatattttcttgaaaatgaatatattcaaaaaatatatcacttcaaggaaaacacttgatactatatgttgccagtgataatcattc

SEQ ID NO: 16943 - DNA, 120 bp, Artificial Sequence
  ENSG00000015153_69 (sequence is synthesized)
aagtgaaaattagaatttttgaaaatttgtagcaacaatgagctttagagtttctgtgtataaagacttttctgagaagattagtggtggtatcaatgaatataatttctgatatttcac

SEQ ID NO: 16944 - DNA, 120 bp, Artificial Sequence
  ENSG00000015153_70 (sequence is synthesized)
catgaaatgtgtcagcatttggaagctacgcataactcagcaaacaaatggttcctagttaccgatgtatgattttacaaaactgtaatgggtaatccatcaaagtacaaaataccaaca

SEQ ID NO: 16945 - DNA, 120 bp, Artificial Sequence
  ENSG00000015153_71 (sequence is synthesized)
gattttaagggaacactgaaaacttcattgatgtggtttcagatttcatattgcaactaacctttgagaaacaactgtgtttttatgtagtatcaaagaataacacctatagttatctga

SEQ ID NO: 16946 - DNA, 120 bp, Artificial Sequence
  ENSG00000015153_72 (sequence is synthesized)
aaatgctattcaactacttacctcttttcaactgtatatctgtgagagtccagattttcttaatatttttggaccaaaacaacatattgcaacaaattgaatgctgagatagatgtgaca

SEQ ID NO: 16947 - DNA, 120 bp, Artificial Sequence
  ENSG00000015153_73 (sequence is synthesized)
atccaggtgtcttctactaaccagatgttagaggtttgcaaaaatatacgatgccactcttcatacaaaatatctttgttttggaaaataataagtttttaaaataaaaatatgtcattt

SEQ ID NO: 16948 - DNA, 120 bp, Artificial Sequence
  ENSG00000015153_74 (sequence is synthesized)
cgttgaaatttccaatttcaggaagagataacaggaagagagcctggttaccatttggtggaacaatcctgctggctcaagcctctgcctagaaatttgggtcattctcttttttggaca

SEQ ID NO: 16949 - DNA, 120 bp, Artificial Sequence
  ENSG00000015153_75 (sequence is synthesized)
accgttgaaatttccaatttcaggaagttccagtggatgcccatcaggaagattctcatgctgaacagaagggcaagagaggtggatctgtgagggaaaagacccaataggataactcaa

SEQ ID NO: 16950 - DNA, 120 bp, Artificial Sequence
  ENSG00000015153_76 (sequence is synthesized)
gtgagaagtttccactgacattatatttagcaaattgtttccatatttactttgatacgtgtatatatagttatctagtgaatttatgctttcttctgtagttctacgtgtgataataat

SEQ ID NO: 16951 - DNA, 120 bp, Artificial Sequence
  ENSG00000015153_77 (sequence is synthesized)
ctcaaataaaatgaaataatcttcttattctgatagagaagaaaaagctggatcacttaccagtaactggagttctcctattgggtaatctccacagatccacattgtttgaagttattg

SEQ ID NO: 16952 - DNA, 120 bp, Artificial Sequence
  ENSG00000015153_78 (sequence is synthesized)
agtaatggtactatttcatttcatcctagtgagaaaggtgtgtggattttttggtggtaaattggagtcccatgtatgtgtgatcctcccaacagagtgaatttaaatatctaaagatta

SEQ ID NO: 16953 - DNA, 120 bp, Artificial Sequence
  ENSG00000015153_79 (sequence is synthesized)
ctgagaaaggataaagttgaataaatcatagtgaacaatgtttatgtcactttttaaagttttaacacttgtaattgagtaaatcctgaaacaaagtatattattatgtttgatggattt

SEQ ID NO: 16954 - DNA, 120 bp, Artificial Sequence
  ENSG00000015153_80 (sequence is synthesized)
atgtgtacatagtgtttctttcttactctgtaacccttttgccagagataacaggaagagagcctggttaccatttggtggaacaatcctgctggctcaagcctctgcctagaaatttgg

SEQ ID NO: 16955 - DNA, 120 bp, Artificial Sequence
  ENSG00000015171_0 (sequence is synthesized)
gccatgtgagcggctgccgcggcttcgcggggacccaactttcccgggcggcggcgcccaacttcccgccgcccgctccggccccgcaggcccgcggcgccaggggaagacgcgagtaag

SEQ ID NO: 16956 - DNA, 120 bp, Artificial Sequence
  ENSG00000015171_1 (sequence is synthesized)
caggggaagacgcgagtaagtgcgggcggcggtgccctcccggccctcaccccgcacgcggcgacccggccgcctagcctccctcgctcaggcgcgaccgcggcgttctctgagctaaag

SEQ ID NO: 16957 - DNA, 120 bp, Artificial Sequence
  ENSG00000015171_2 (sequence is synthesized)
aagtaaacaggtcatggcacgtttaacaaaaagacgacaggcggatacaaaagctatccagcatctttgggcagccattgagattatacggaaccagaagcagattgccaacattgaccg

SEQ ID NO: 16958 - DNA, 120 bp, Artificial Sequence
  ENSG00000015171_3 (sequence is synthesized)
tattacaaagtatatgtctcgagtccacggtatgcaccctaaagagaccacccgtcagctgagcttagctgtgaaagatggtcttattgtcgaaactctaacagtgggctgcaaaggttc

SEQ ID NO: 16959 - DNA, 120 bp, Artificial Sequence
  ENSG00000015171_4 (sequence is synthesized)
aaaagctggtattgaacaagaaggatattggttgccaggagatgagattgactgggaaacagaaaatcatgactggtattgttttgaatgccatttgcctggagaggtgttgatatgtga

SEQ ID NO: 16960 - DNA, 120 bp, Artificial Sequence
  ENSG00000015171_5 (sequence is synthesized)
cctgtgttttcgtgtgtatcattccaagtgtttgtctgatgagttcaggcttagagacagcagtagtccctggcagtgcccagtttgcaggagcattaagaagaagaatacaaacaaaca

SEQ ID NO: 16961 - DNA, 120 bp, Artificial Sequence
  ENSG00000015171_6 (sequence is synthesized)
ggagatgggcacatacctcagattcattgtctcccgcatgaaggagagggctatagatcttaataaaaaggggaaggacaataaacacccgatgtacaggaggctggtgcactcagctgt

SEQ ID NO: 16962 - DNA, 120 bp, Artificial Sequence
  ENSG00000015171_7 (sequence is synthesized)
ggacgttcccaccattcaagagaaagtgaatgaagggaaataccgaagttatgaagagttcaaagctgatgcccaattgcttctccacaataccgtgattttctatggagcagacagtga

SEQ ID NO: 16963 - DNA, 120 bp, Artificial Sequence
  ENSG00000015171_8 (sequence is synthesized)
gcaagctgacattgcgaggatgctatataaagacacatgtcatgagctggatgaactgcagctttgcaagaattgcttttacttgtcaaatgctcgtcctgacaactggttctgttatcc

SEQ ID NO: 16964 - DNA, 120 bp, Artificial Sequence
  ENSG00000015171_9 (sequence is synthesized)
ttgtatacctaatcatgagctggtttgggctaaaatgaaaggttttgggttttggccagccaaagtcatgcagaaagaagacaatcaagtcgacgttcgcttctttggccaccaccacca

SEQ ID NO: 16965 - DNA, 120 bp, Artificial Sequence
  ENSG00000015171_10 (sequence is synthesized)
gagggcctggattccttctgaaaacattcaagatatcacagtcaacattcatcggctgcacgtgaagcgcagtatgggttggaaaaaggcctgtgatgagctggagctgcatcagcgttt

SEQ ID NO: 16966 - DNA, 120 bp, Artificial Sequence
  ENSG00000015171_11 (sequence is synthesized)
cctacgagaagggagattttggaaatctaagaatgaggaccgaggtgaggaagaggcagaatccagtatctcctccaccagtaatgagcagctaaaggtcactcaagaaccaagagcaaa

SEQ ID NO: 16967 - DNA, 120 bp, Artificial Sequence
  ENSG00000015171_12 (sequence is synthesized)
gaaaggacgacgtaatcaaagtgtggagcccaaaaaggaagaaccagagcctgaaacagaagcagtaagttctagccaggaaatacccacgatgcctcagcccatcgaaaaagtctccgt

SEQ ID NO: 16968 - DNA, 120 bp, Artificial Sequence
  ENSG00000015171_13 (sequence is synthesized)
gtcaactcagacaaagaagttaagtgcctcttcaccaagaatgctgcatcggagcacccagaccacaaacgacggcgtgtgtcagagcatgtgccatgacaaatacaccaagatcttcaa

SEQ ID NO: 16969 - DNA, 120 bp, Artificial Sequence
  ENSG00000015171_14 (sequence is synthesized)
tgacttcaaagaccggatgaagtcggaccacaagcgggagacagagcgtgttgtccgagaagctctggagaagctgcgttctgaaatggaagaagaaaagagacaagctgtaaataaagc

SEQ ID NO: 16970 - DNA, 120 bp, Artificial Sequence
  ENSG00000015171_15 (sequence is synthesized)
tgtagccaacatgcagggtgagatggacagaaaatgtaagcaagtaaaggaaaagtgtaaggaagaatttgtagaagaaatcaagaagctggcaacacagcacaagcaactgatttctca

SEQ ID NO: 16971 - DNA, 120 bp, Artificial Sequence
  ENSG00000015171_16 (sequence is synthesized)
gaccaagaagaagcagtggtgctacaactgtgaggaggaggccatgtaccactgctgctggaacacatcctactgctccatcaagtgccagcaggagcactggcacgcggagcacaagcg

SEQ ID NO: 16972 - DNA, 120 bp, Artificial Sequence
  ENSG00000015171_17 (sequence is synthesized)
ccttcccggagtcaccccgatgattactcttttcagacacagcggtttttgtttccaagaagccaaaattgtttagaatttgcttcccattttgcaccagcctttaaacacttttcgtga

SEQ ID NO: 16973 - DNA, 120 bp, Artificial Sequence
  ENSG00000015171_18 (sequence is synthesized)
agaaattttgcacagtagtttaaatcttttgttaatgctcctccgaagtttttcagggggtaaaagtaacatcagtggagggtattattttaaataaattttaattgagaatttgttgca

SEQ ID NO: 16974 - DNA, 120 bp, Artificial Sequence
  ENSG00000015171_19 (sequence is synthesized)
ttttcagcaaattttaaaacatttttaggttttacagagattttaacctttaaacaacagatctttaaaaaacaggtgaatacaagtgagtttaacaaagaaacatttagaatagatctg

SEQ ID NO: 16975 - DNA, 120 bp, Artificial Sequence
  ENSG00000015171_20 (sequence is synthesized)
aatgtaagaactacagaactgtttcagaaataaaacatactaccttgatgtgacatttttttcttaaccttgttgagctggttttgttcagcttaatttactgttcaaaggcattatctg

SEQ ID NO: 16976 - DNA, 120 bp, Artificial Sequence
  ENSG00000015171_21 (sequence is synthesized)
ttggtcacaccagtgggtatatgattgaatttagggaacagggttgacacagcagggctagtcctgcatattttttcttaaatatttcccaattgtgtttttcattatttcttttcaata

SEQ ID NO: 16977 - DNA, 120 bp, Artificial Sequence
  ENSG00000015171_22 (sequence is synthesized)
tataacttttataacaaattattagctttgatcttgtagtttaaaattgcagggaactggggtaatcttttactgagctggatcttagagaaaatgaatatttaaattttaaagtttgca

SEQ ID NO: 16978 - DNA, 120 bp, Artificial Sequence
  ENSG00000015171_23 (sequence is synthesized)
catttcatctttgtcctaacatgagtgcttgtaacaaaataaacaacaaaaacaaagccaaaaactacctttatccatatgtgaaattatagatgaggcatacgaatttgtttaatgctt

SEQ ID NO: 16979 - DNA, 120 bp, Artificial Sequence
  ENSG00000015171_24 (sequence is synthesized)
cccttcccttcccacatatcatctcactgcctattatctggtgtcacctcatgtatcgtaagttaatactaaaagaagagaaagcacttaagtttcacagaagccgttatgtttgtagta

SEQ ID NO: 16980 - DNA, 120 bp, Artificial Sequence
  ENSG00000015171_25 (sequence is synthesized)
atgggtcattgcctactaatgaactccatcactgtacacagaatgaagaataatgcatgttaattttcttgtattaaagatgccgtgatttgtaaaaagtctgtattttgcggaatgtct

SEQ ID NO: 16981 - DNA, 120 bp, Artificial Sequence
  ENSG00000015171_26 (sequence is synthesized)
ggattaagaagcattaccaataggaatggatcgatagttgaataatgattttttatacatagatatataaaatacagccaggaaaacttaaattacttttcttttaaaatatctcacaat

SEQ ID NO: 16982 - DNA, 120 bp, Artificial Sequence
  ENSG00000015171_27 (sequence is synthesized)
ttatgtggtatttttaaagactgatcttagaccaagtcaaattcccatttatcatttagttattttttgaggttagagaataatttgtacatatttatttagacctttgatatttattaa

SEQ ID NO: 16983 - DNA, 120 bp, Artificial Sequence
  ENSG00000015171_28 (sequence is synthesized)
agcaattactcacaatggaagtgaaagaatcaggagaaaagccttttaaaaagtattctccaggtttgtcagggtcactctaaagataaaaatgtaactaagtcttctgtgaaatatcat

SEQ ID NO: 16984 - DNA, 120 bp, Artificial Sequence
  ENSG00000015171_29 (sequence is synthesized)
ccatctaatcttgatgctgttgcagatggtggtgacacaagttaattgacaaactactgccaaatggtgcacaatattttgtaaaaagtacccagtagccccatttcatacaatgtacct

SEQ ID NO: 16985 - DNA, 120 bp, Artificial Sequence
  ENSG00000015171_30 (sequence is synthesized)
aaattatgcagtaacttggcatcatcgttccctccttgttgctgtgtaattagtcagtgttgccacagtgtgtggcgctgatggagatgtcagaaccgagaacacttaaccttctttgat

SEQ ID NO: 16986 - DNA, 120 bp, Artificial Sequence
  ENSG00000015171_31 (sequence is synthesized)
tgtttttcaagttttaagacttcgatccacccctatgagagcaagtaattgtggaaatatttttggtgtaaaatcattccagagtatgtaatatttaactgatagctgcatgaaagtgag

SEQ ID NO: 16987 - DNA, 120 bp, Artificial Sequence
  ENSG00000015171_32 (sequence is synthesized)
attcgtgttactttggcttttctgtctctgttgacacggttgcacatttccaagttactacagcgtgaaaactgtgtgtttaaaaaaaaacaaaattaaaaaaagagattgtggcctggt

SEQ ID NO: 16988 - DNA, 120 bp, Artificial Sequence
  ENSG00000015171_33 (sequence is synthesized)
tttgtaaaagttttaggtaaaattacaattgattgttttaggaatcattattaaaaattttctgcaaatcataaagctatatcgaggtgttgagcttagccactatgcacattgtaatta

SEQ ID NO: 16989 - DNA, 120 bp, Artificial Sequence
  ENSG00000015171_34 (sequence is synthesized)
ttcattgtggctgtccagttctatgatgcattctggcattttgtaagctgctctgactagcaatatatagattcatttaatgtgttaacattggttaataaatgtatttaaaaaaaacta

SEQ ID NO: 16990 - DNA, 120 bp, Artificial Sequence
  ENSG00000015171_35 (sequence is synthesized)
acttctcgcgcaaatctgcagtgttcttgcagggctgctgatgggtggtcctgttcttttcgcggtcctgtttgcgcagagatgaaacggggaacttagcgtatccctaccgctcttttt

SEQ ID NO: 16991 - DNA, 120 bp, Artificial Sequence
  ENSG00000015171_36 (sequence is synthesized)
gatgacaggagtaaagggctgttcagactacctaaacaatgttgttaagagaagcactcgtacttctcagacttcgctgttccggaccccgcgagccaggggcaggcaccgggtccaccc

SEQ ID NO: 16992 - DNA, 120 bp, Artificial Sequence
  ENSG00000015171_37 (sequence is synthesized)
gcctgacaatgccccctcgcgccccggcctcggcgcccgctcccggctccagcgcgcctgcacgtacgtagccttcacgtgtgtgtggatacggagtgcatgtgtggagacagaggaata

SEQ ID NO: 16993 - DNA, 120 bp, Artificial Sequence
  ENSG00000015171_38 (sequence is synthesized)
gagctttttgtaggatttgcaagatttcgcctgccaaagaaaagtagctgataagacctgtcttaaggaggctagatctttctgctgcgagagtggctggtggatggcatggcccaggcc

SEQ ID NO: 16994 - DNA, 120 bp, Artificial Sequence
  ENSG00000015171_39 (sequence is synthesized)
atgcccgttaattcagaaggtagctgtggcacatgcagaagatgtttctgaaataagatcaaatgtgaaatggtcagctttagttttaaaaattttattaaaagtcctatgatctctcaa

SEQ ID NO: 16995 - DNA, 120 bp, Artificial Sequence
  ENSG00000015285_0 (sequence is synthesized)
gctgctcattgcggaagttcctcttcttaccctgcacccagagcctcgccagagaagacaagggcagaaagcaccatgagtgggggcccaatgggaggaaggcccgggggccgaggagca

SEQ ID NO: 16996 - DNA, 120 bp, Artificial Sequence
  ENSG00000015285_1 (sequence is synthesized)
ccagcggttcagcagaacataccctccaccctcctccaggaccacgagaaccagcgactctttgagatgcttggacgaaaatgcttgacgctggccactgcagttgttcagctgtacctg

SEQ ID NO: 16997 - DNA, 120 bp, Artificial Sequence
  ENSG00000015285_2 (sequence is synthesized)
gcgctgccccctggagctgagcactggaccaaggagcattgtggggctgtgtgcttcgtgaaggataacccccagaagtcctacttcatccgcctttacggccttcaggctggtcggctg

SEQ ID NO: 16998 - DNA, 120 bp, Artificial Sequence
  ENSG00000015285_3 (sequence is synthesized)
ctctgggaacaggagctgtactcacagcttgtctactccacccccacccccttcttccacaccttcgctggagatgactgccaagcggggctgaactttgcagacgaggacgaggcccag

SEQ ID NO: 16999 - DNA, 120 bp, Artificial Sequence
  ENSG00000015285_4 (sequence is synthesized)
gccttccgggccctcgtgcaggagaagatacaaaaaaggaatcagaggcaaagtggagacagacgccagctacccccaccaccaacaccagccaatgaagagagaagaggagggctccca

SEQ ID NO: 17000 - DNA, 120 bp, Artificial Sequence
  ENSG00000015285_5 (sequence is synthesized)
cccctgcccctgcatccaggtggagaccaaggaggccctccagtgggtccgctctccctggggctggcgacagtggacatccagaaccctgacatcacgagttcacgataccgtgggctc

SEQ ID NO: 17001 - DNA, 120 bp, Artificial Sequence
  ENSG00000015285_6 (sequence is synthesized)
ccagcacctggacctagcccagctgataagaaacgctcagggaagaagaagatcagcaaagctgatattggtgcacccagtggattcaagcatgtcagccacgtggggtgggacccccag

SEQ ID NO: 17002 - DNA, 120 bp, Artificial Sequence
  ENSG00000015285_7 (sequence is synthesized)
ccagggcaggaatcagcgaggcccagctcaccgacgccgagacctctaaacttatctacgacttcattgaggaccagggtgggctggaggctgtgcggcaggagatgaggcgccaggagc

SEQ ID NO: 17003 - DNA, 120 bp, Artificial Sequence
  ENSG00000015285_8 (sequence is synthesized)
cacttccgccgcccccaccgccatctcgaggagggaaccagctcccccggccccctattgtggggggtaacaagggtcgttctggtccactgccccctgtacctttggggattgccccac

SEQ ID NO: 17004 - DNA, 120 bp, Artificial Sequence
  ENSG00000015285_9 (sequence is synthesized)
ccccaccaacaccccggggacccccacccccaggccgagggggccctccaccaccaccccctccagctactggacgttctggaccactgccccctccaccccctggagctggtgggccac

SEQ ID NO: 17005 - DNA, 120 bp, Artificial Sequence
  ENSG00000015285_10 (sequence is synthesized)
ccatgccaccaccaccgccaccaccgccaccgccgcccagctccgggaatggaccagcccctcccccactccctcctgctctggtgcctgccgggggcctggcccctggtgggggtcggg

SEQ ID NO: 17006 - DNA, 120 bp, Artificial Sequence
  ENSG00000015285_11 (sequence is synthesized)
gagcgcttttggatcaaatccggcagggaattcagctgaacaagacccctggggccccagagagctcagcgctgcagccaccacctcagagctcagagggactggtgggggccctgatgc

SEQ ID NO: 17007 - DNA, 120 bp, Artificial Sequence
  ENSG00000015285_12 (sequence is synthesized)
acgtgatgcagaagagaagcagagccatccactcctccgacgaaggggaggaccaggctggcgatgaagatgaagatgatgaatgggatgactgagtggctgagttacttgctgccctgt

SEQ ID NO: 17008 - DNA, 120 bp, Artificial Sequence
  ENSG00000015285_13 (sequence is synthesized)
gctcctccccgcaggacatggctccccctccacctgctctgtgcccaccctccactctcctcttccaggcccccaaccccccatttcttccccaccaacccctccaatgctgttatccct

SEQ ID NO: 17009 - DNA, 120 bp, Artificial Sequence
  ENSG00000015285_14 (sequence is synthesized)
gcctggtcctcacactcacccaacaatcccaaggccctttttatacaaaaattctcagttctcttcactcaaggatttttaaagaaaaataaaagaattgtctttctgtctctctataaa

SEQ ID NO: 17010 - DNA, 120 bp, Artificial Sequence
  ENSG00000015285_15 (sequence is synthesized)
gctagcactggcctcaaaacaatcccagcagtcaccaccaatagtgacatcagccccatctgtttgacagcattaacatgaatcttgtgtcagcctcgtttttgacaatgttaacattaa

SEQ ID NO: 17011 - DNA, 120 bp, Artificial Sequence
  ENSG00000015285_16 (sequence is synthesized)
ccctgcatccaggtggagaccaaggaggcatgtcagccacgtggggtgggacccccagaatggatttgacgtgagtaacttcagagtctcttggactccactaaacttccacccaccctt

SEQ ID NO: 17012 - DNA, 120 bp, Artificial Sequence
  ENSG00000015285_17 (sequence is synthesized)
tcaagactaagtcaaaggaggagagggcaacgcggtgggcaggagagaggccaacggccgcccggggcgaggggagccggtaggacgggaccaggactggccgacccggccccgcgcggg

SEQ ID NO: 17013 - DNA, 90 bp, Artificial Sequence
  ENSG00000015285_18 (sequence is synthesized)
taggacgggaccaggactggccgacccggccccgcgcggggaagggggcgccttcctcccacaacacaaaacgtgcgtcttgaactcctg

SEQ ID NO: 17014 - DNA, 120 bp, Artificial Sequence
  ENSG00000015413_0 (sequence is synthesized)
gtgcctctcctggcaggcagagtggctcctcacagcctgaagctcatccttctgcacgggccagccaggccagcacagaggcaccagggcagcagtgcacacaggtccccggggacccca

SEQ ID NO: 17015 - DNA, 120 bp, Artificial Sequence
  ENSG00000015413_1 (sequence is synthesized)
ccatgtggagcggatggtggctgtggccccttgtggccgtctgcactgcagacttctttcgggacgaggcagagaggatcatgagggactcccctgtcattgatgggcacaatgacctcc

SEQ ID NO: 17016 - DNA, 120 bp, Artificial Sequence
  ENSG00000015413_2 (sequence is synthesized)
cctggcagctgctggatatgttcaacaaccggctgcaggacgagagggccaacctgaccaccttggccggcacacacaccaacatccccaagctgagggccggctttgtgggaggccagt

SEQ ID NO: 17017 - DNA, 120 bp, Artificial Sequence
  ENSG00000015413_3 (sequence is synthesized)
tctggtccgtgtacacgccctgcgacacccagaacaaagacgccgtgcggaggacgctggagcagatggacgtggtccaccgcatgtgccggatgtacccggagaccttcctgtatgtca

SEQ ID NO: 17018 - DNA, 120 bp, Artificial Sequence
  ENSG00000015413_4 (sequence is synthesized)
ccagcagtgcaggcattcggcaggccttccgggaagggaaggtggccagcctgatcggcgtggagggcggccactccattgacagcagtttgggcgtcctgcgggcactctatcagctgg

SEQ ID NO: 17019 - DNA, 120 bp, Artificial Sequence
  ENSG00000015413_5 (sequence is synthesized)
gcatgcggtacctgaccctcacccacagctgcaacacgccctgggctgacaactggctggtggacacgggagacagcgagccccagagccaaggcttgtcaccctttgggcagcgtgtgg

SEQ ID NO: 17020 - DNA, 120 bp, Artificial Sequence
  ENSG00000015413_6 (sequence is synthesized)
gacttggctcacgtgtctgtggccaccatgaaggccaccctgcagctgtccagagccccggtcatcttcagccactcctcggcctacagcgtgtgcgcaagccggcgcaacgtgcctgac

SEQ ID NO: 17021 - DNA, 120 bp, Artificial Sequence
  ENSG00000015413_7 (sequence is synthesized)
gacgtcctgaggctggtgaaacagacagacagcctggtgatggtgaacttctacaacaattacatttcctgcaccaacaaggccaacctgtcccaagtggccgaccatctggatcacatc

SEQ ID NO: 17022 - DNA, 120 bp, Artificial Sequence
  ENSG00000015413_8 (sequence is synthesized)
aaggaggtggcaggagccagagccgtgggttttggtggggactttgatggtgttccaagggtccctgaggggctggaggacgtctccaagtatccagacctgatcgctgagctgctcagg

SEQ ID NO: 17023 - DNA, 120 bp, Artificial Sequence
  ENSG00000015413_9 (sequence is synthesized)
aggaactggacggaggcggaggtcaagggcgcactggctgacaacctgctgagggtcttcgaggctgtggaacaggccagcaacctcacacaggctcccgaggaggagcccatcccgctg

SEQ ID NO: 17024 - DNA, 120 bp, Artificial Sequence
  ENSG00000015413_10 (sequence is synthesized)
gaccagctgggtggctcctgcaggacccattacggctactcctctggggcttccagcctccatcgccactgggggctcctgctggcctccctcgctcccctggtcctctgtctgtctctc

SEQ ID NO: 17025 - DNA, 120 bp, Artificial Sequence
  ENSG00000015413_11 (sequence is synthesized)
ctgtgaaacctgggagaccagagtcccctttagggttcccggagctccgggaagacccgcccatcccaggactccagatgccaggagccctgctgcccacatgcaaggaccagcatctcc

SEQ ID NO: 17026 - DNA, 120 bp, Artificial Sequence
  ENSG00000015413_12 (sequence is synthesized)
tgagaggacgcctgggcttacctggggggcaggatgcctggggacagttcaggacacacacacagtaggcccgcaataaaagcaacaccccttcacatcctggggtacgtgtcatcggca

SEQ ID NO: 17027 - DNA, 120 bp, Artificial Sequence
  ENSG00000015413_13 (sequence is synthesized)
ggggtactgtgcgagccctcaaggaggtggctgttctgtagctggagagctccgtgggtggcaggactgaacttgaacaccagaaacaacccccaagccttgtgacctgggaggcaggag

SEQ ID NO: 17028 - DNA, 120 bp, Artificial Sequence
  ENSG00000015413_14 (sequence is synthesized)
agagctctgtcctgtggatgagccgggaggttcatggcctcgtcagagggatgaggtggctggaggagggacctgtgtcctagtgtgggggcccaggttctcctggcctcaacacagggt

SEQ ID NO: 17029 - DNA, 120 bp, Artificial Sequence
  ENSG00000015413_15 (sequence is synthesized)
ctttcagagaacacagggttcctgcaggaaatggggcagtttcaccttcctgaggaggggcctgggaggggcagcaggtggccgggtagggccagcccagctgtgagcctggcgtgggag

SEQ ID NO: 17030 - DNA, 120 bp, Artificial Sequence
  ENSG00000015413_16 (sequence is synthesized)
ccccgaggagaaggcagaggccctggagggtgaccagaacaatgcatctcctcacgtgggacctcagtgtccttgtctgtaaaatggagctggcagccatccccccagggtgggtgctga

SEQ ID NO: 17031 - DNA, 120 bp, Artificial Sequence
  ENSG00000015413_17 (sequence is synthesized)
gccctgagtggccccggacttccagccacgaaggatgatgactcacatctggtccagcccgtccacctccgcagccccgaccctgggggctgtgagggtggacggagccctgtcttccca

SEQ ID NO: 17032 - DNA, 120 bp, Artificial Sequence
  ENSG00000015413_18 (sequence is synthesized)
gtgcttgccctgtgtggggtcatcccgtctcctacctcaggcctggctacagtgggaccatccctgtggtgttcctccagggtccctcggtgcccaggccgagggagggcttcccagcgg

SEQ ID NO: 17033 - DNA, 120 bp, Artificial Sequence
  ENSG00000015475_0 (sequence is synthesized)
gagaaaacccgcgggcctggccgggtgcaggccacccttgccggcggatcggaatccccgcccacaccgtggtctttccagcaccgcagacacctgccggctcctcccgagcggagctca

SEQ ID NO: 17034 - DNA, 120 bp, Artificial Sequence
  ENSG00000015475_1 (sequence is synthesized)
gggctgacaaagcgcggtcagagcggccgcttactggggctcgcccgctccttagagcactggcaatgatgtgcggatcctcgctgctgctgctgggaaactgttgagtggctgaatgac

SEQ ID NO: 17035 - DNA, 120 bp, Artificial Sequence
  ENSG00000015475_2 (sequence is synthesized)
cccaggggaccctgggagagctctgaagccctcagccaccaagtggctgggctggcaagggttcattcattcattcaacaaatacgaatgtgcagcggtgctggggtcatgatggctcgg

SEQ ID NO: 17036 - DNA, 120 bp, Artificial Sequence
  ENSG00000015475_3 (sequence is synthesized)
tgggcagcgaggggccgggccggctggaggagcacagtgcggattctgtcgccactgggacactgtgaaccaggagtgagtcggagctgccgcgctgcccaggccatggactgtgaggtc

SEQ ID NO: 17037 - DNA, 120 bp, Artificial Sequence
  ENSG00000015475_4 (sequence is synthesized)
aacaacggttccagcctcagggatgagtgcatcacaaacctactggtgtttggcttcctccaaagctgttctgacaacagcttccgcagagagctggacgcactgggccacgagctgcca

SEQ ID NO: 17038 - DNA, 120 bp, Artificial Sequence
  ENSG00000015475_5 (sequence is synthesized)
gtgctggctccccagtgggagggctacgatgagctgcagactgatggcaaccgcagcagccactcccgcttgggaagaatagaggcagattctgaaagtcaagaagacatcatccggaat

SEQ ID NO: 17039 - DNA, 120 bp, Artificial Sequence
  ENSG00000015475_6 (sequence is synthesized)
attgccaggcacctcgcccaggtcggggacagcatggaccgtagcatccctccgggcctggtgaacggcctggccctgcagctcaggaacaccagccggtcggaggaggaccggaacagg

SEQ ID NO: 17040 - DNA, 120 bp, Artificial Sequence
  ENSG00000015475_7 (sequence is synthesized)
gacctggccactgccctggagcagctgctgcaggcctaccctagagacatggagaaggagaagaccatgctggtgctggccctgctgctggccaagaaggtggccagtcacacgccgtcc

SEQ ID NO: 17041 - DNA, 120 bp, Artificial Sequence
  ENSG00000015475_8 (sequence is synthesized)
ttgctccgtgatgtctttcacacaacagtgaattttattaaccagaacctacgcacctacgtgaggagcttagccagaaatgggatggactgaacggacagttccagaagtgtgactggc

SEQ ID NO: 17042 - DNA, 120 bp, Artificial Sequence
  ENSG00000015475_9 (sequence is synthesized)
taaagctcgatgtggtcacagctgtatagctgcttccagtgtagacggagccctggcatgtcaacagcgttcctagagaagacaggctggaagatagctgtgacttctattttaaagaca

SEQ ID NO: 17043 - DNA, 120 bp, Artificial Sequence
  ENSG00000015475_10 (sequence is synthesized)
cacatgaatctgcacatctgtaaatctacacacggtgcctttatttccactgtgcaggttcccacttaaaaattaaattggaaagcaggtttcaaggaagtagaaacaaaatacaatttt

SEQ ID NO: 17044 - DNA, 120 bp, Artificial Sequence
  ENSG00000015475_11 (sequence is synthesized)
tttggtaaaaaaaaattactgtttattaaagtacaaccatagaggatggtcttacagcaggcagtatcctgtttgaggaaagcaagaatcagagaaggaacataccccttacaaatgaaa

SEQ ID NO: 17045 - DNA, 120 bp, Artificial Sequence
  ENSG00000015475_12 (sequence is synthesized)
aattccactcaaaatagggactatctatcttaatactaaggaaccaacaatcttcctgtttaaaaaaccacatggcacagagattctgaactaaagtgctgcactcaaatgatgggaagt

SEQ ID NO: 17046 - DNA, 120 bp, Artificial Sequence
  ENSG00000015475_13 (sequence is synthesized)
ccggccccagtacacaggggcttgactttttcaacttcgtttcctttgttggagtcaaaaagaaccacttgtggttctaaaaggtgtgaaggtgatttaagggcccaggtcagccactgt

SEQ ID NO: 17047 - DNA, 120 bp, Artificial Sequence
  ENSG00000015475_14 (sequence is synthesized)
ttgtttacaaaatcaggtaactaactgcatacactttttctctttccatgacatcaagactttgctaaagacatgaagccacgggtgccagaagctactgcgatgccccgggagttagcc

SEQ ID NO: 17048 - DNA, 120 bp, Artificial Sequence
  ENSG00000015475_15 (sequence is synthesized)
ccctggtaatagctgtaaacttccaatttctagccatacgctcagctcatccatgcctcagaagtgcatctggagagaacaggtttctaagcataaaagatgaaagagcagttggacttt

SEQ ID NO: 17049 - DNA, 120 bp, Artificial Sequence
  ENSG00000015475_16 (sequence is synthesized)
ttaaaaattcagcaaagtggttccctctcttagggacagtcaaaaccaagtcacttaggtagtaccaaaataaataaggaaaagcttagctttagaaacagtgcaacactggtctgctgt

SEQ ID NO: 17050 - DNA, 120 bp, Artificial Sequence
  ENSG00000015475_17 (sequence is synthesized)
tccagtggtaagctatgtcccaggaatcagtttaaaagcacgacagtggatgctgggtccatatcacacacattgctgtgaacaggaaactcctgtgaccacaacatgaggccactggag

SEQ ID NO: 17051 - DNA, 120 bp, Artificial Sequence
  ENSG00000015475_18 (sequence is synthesized)
acgcatatgagtaagggcactgacggactcatgatttcttcttaccagatgctttcctgttctttaagagtttaaaatcatcagaaaggaaaaacaaactctatattgttcagcatgcaa

SEQ ID NO: 17052 - DNA, 120 bp, Artificial Sequence
  ENSG00000015475_19 (sequence is synthesized)
tacataccacgctagggctggctcaattgaaagtgggcaaaagcttacaaatactaaaaagaagtgctgccgcgcagtgtggaggccactgtttggaaataaatcttcctaacactacga

SEQ ID NO: 17053 - DNA, 120 bp, Artificial Sequence
  ENSG00000015475_20 (sequence is synthesized)
ggaggaagcgcgcggggcgccataaggaggaagcgggtagtcgaccgtgtccgcgcgcctgggagacgctgcctcggcccggacgcgcccgcgcccccgcggctggagggtggtcgccac

SEQ ID NO: 17054 - DNA, 120 bp, Artificial Sequence
  ENSG00000015475_21 (sequence is synthesized)
gctgaggaagaaacggaggcggcagggagcgtggcagttgagcgtggccttcatggagctgcgacagtggtactcgggcaggggcagcacggaggctgtgcgccagaggaggaggactga

SEQ ID NO: 17055 - DNA, 120 bp, Artificial Sequence
  ENSG00000015475_22 (sequence is synthesized)
gactggacggcagggagtggggctgtcatcatcagatgagagctaaggggacccccaccagggtggcggcaatggcagagggtaggcaaaacgcttgtatttgcaacataaggtgagatt

SEQ ID NO: 17056 - DNA, 120 bp, Artificial Sequence
  ENSG00000015475_23 (sequence is synthesized)
tgacagctgaccgagggtgggagcagcagccaaaaccaaaaaagccagagggaagttgcaagcacagaaaaaatagaagatttaatgggagaaataacaatagctggcatctattgaaca

SEQ ID NO: 17057 - DNA, 120 bp, Artificial Sequence
  ENSG00000015475_24 (sequence is synthesized)
aataacaatagctggcatctattgaacacttactgggagctaggtacagggcccattcattcattcatgcaattaaaactttttttaagaaacggggtcttgctctgttgcccaggctgg

SEQ ID NO: 17058 - DNA, 83 bp, Artificial Sequence
  ENSG00000015475_25 (sequence is synthesized)
cctggcctcaaggagtctacgtgcggtacacctggctccctttaaaagttttttgtagaggcagggcacagtggctcacacct

SEQ ID NO: 17059 - DNA, 120 bp, Artificial Sequence
  ENSG00000015475_26 (sequence is synthesized)
ccgtctcaaaaaaaaaaaaaaagtttcttgtagaggcagggccttgctttgttgctggtgcaatcacggctcactgcatcctctaactcctggccttaagcaatcttctgtcctcagcct

SEQ ID NO: 17060 - DNA, 120 bp, Artificial Sequence
  ENSG00000015475_27 (sequence is synthesized)
cccaaagcactgggattacaggcatgcatgaccacacctggtccctgccattgtttattgagcacctactgagtgccatgtattaagtgctgggtatttgtcagtggacaaaacagatta

SEQ ID NO: 17061 - DNA, 120 bp, Artificial Sequence
  ENSG00000015475_28 (sequence is synthesized)
tgacaactggggttttcctgagacgggactgcgaggaatgggggctctcaggcttgagagggcaaaagtgggtctgggatgccgtctgcccacagagccccttccccaacggctgcccag

SEQ ID NO: 17062 - DNA, 120 bp, Artificial Sequence
  ENSG00000015475_29 (sequence is synthesized)
gccaaggccaaccctgttgggttgtgtggtgtgagccatgaagccgctgccaggcttgtacctcaggcgtggtcgtgatgccccagcttcaccggccctgcctgtggggacgtggtgcct

SEQ ID NO: 17063 - DNA, 120 bp, Artificial Sequence
  ENSG00000015475_30 (sequence is synthesized)
gtgtgcgggagcctgggcctcagccgaggccctgagctccggcactgcccagaacccagctcagcgctggtactcagcccgcccgctgtggccctggtggagtggagcacgtgcccagtg

SEQ ID NO: 17064 - DNA, 120 bp, Artificial Sequence
  ENSG00000015475_31 (sequence is synthesized)
ggggctggccttgtcccatcgcggacctgtcctttcccggggcagggtggtgtgggagagggtatcagggacattttctgagtctgctctgtctctgccgcccctgcctgaacacagatt

SEQ ID NO: 17065 - DNA, 120 bp, Artificial Sequence
  ENSG00000015475_32 (sequence is synthesized)
ggaagcgcgcggggcgccataaggaggaagcgggtagtcgaccgtgtccgcgcgcctgggagacgctgcctcggcccggacgcgcccgcgcccccgcggctggagggtgattctgaaagt

SEQ ID NO: 17066 - DNA, 120 bp, Artificial Sequence
  ENSG00000015479_0 (sequence is synthesized)
gggagtctccgcgtcccgctcgctgggagagaggtacctctccttttccctctccctttccctaagagttgtctgctggttctcagcttgaagaagattctgcagtccttattgatcctt

SEQ ID NO: 17067 - DNA, 120 bp, Artificial Sequence
  ENSG00000015479_1 (sequence is synthesized)
tttcttggcgttaccatttttgaagcaaagttaacctagctttctagtttgagctttctttttggccgtctttaaaaaaatttttttttttaatctataaaatagacaagagctagttct

SEQ ID NO: 17068 - DNA, 120 bp, Artificial Sequence
  ENSG00000015479_2 (sequence is synthesized)
acaatgtccaagtcattccagcagtcatctctcagtagggactcacagggtcatgggcgtgacctgtctgcggcaggaataggccttcttgctgctgctacccagtctttaagtatgcca

SEQ ID NO: 17069 - DNA, 120 bp, Artificial Sequence
  ENSG00000015479_3 (sequence is synthesized)
gcatctcttggaaggatgaaccagggtactgcacgccttgctagtttaatgaatcttggaatgagttcttcattgaatcaacaaggagctcatagtgcactgtcttctgctagtacttct

SEQ ID NO: 17070 - DNA, 120 bp, Artificial Sequence
  ENSG00000015479_4 (sequence is synthesized)
tcccataatttgcagtctatatttaacattggaagtagaggtccactccctttatcttctcaacaccgtggagatgcagaccaggccagtaacattttggccagctttggtctgtctgct

SEQ ID NO: 17071 - DNA, 120 bp, Artificial Sequence
  ENSG00000015479_5 (sequence is synthesized)
agagacttagatgaactgagtcgttatccagaggacaagattactcctgagaatttgccccaaatccttctacagcttaaaaggaggagaactgaagaaggccctaccttgagttatggt

SEQ ID NO: 17072 - DNA, 120 bp, Artificial Sequence
  ENSG00000015479_6 (sequence is synthesized)
agagatggcagatctgctacacgggagccaccatacagagtacctagggatgattgggaagaaaaaaggcactttagaagagatagttttgatgatcgtggtcctagtctcaacccagtg

SEQ ID NO: 17073 - DNA, 120 bp, Artificial Sequence
  ENSG00000015479_7 (sequence is synthesized)
cttgattatgaccatggaagtcgttctcaagaatctggttattatgacagaatggattatgaagatgacagattaagagatggagaaaggtgtagggatgattctttttttggtgagacc

SEQ ID NO: 17074 - DNA, 120 bp, Artificial Sequence
  ENSG00000015479_8 (sequence is synthesized)
tcgcataactatcataaatttgacagtgagtatgagagaatgggacgtggtcctggccccttacaagagagatctctctttgagaaaaagagaggcgctcctccaagtagcaatattgaa

SEQ ID NO: 17075 - DNA, 120 bp, Artificial Sequence
  ENSG00000015479_9 (sequence is synthesized)
gacttccatggactcttaccgaagggttatccccatctgtgctctatatgtgatttgccagttcattctaataaggagtggagtcaacatatcaatggagcaagtcacagtcgtcgatgc

SEQ ID NO: 17076 - DNA, 120 bp, Artificial Sequence
  ENSG00000015479_10 (sequence is synthesized)
cagcttcttcttgaaatctacccagaatggaatcctgacaatgatacaggacacacaatgggtgatccattcatgttgcagcagtctacaaatccagcaccaggaattctgggacctcca

SEQ ID NO: 17077 - DNA, 120 bp, Artificial Sequence
  ENSG00000015479_11 (sequence is synthesized)
cctccctcatttcatcttgggggaccagcagttggaccaagaggaaatctgggtgctggaaatggaaacctgcaaggacctagacacatgcagaaaggcagagtggaaactagcagagtt

SEQ ID NO: 17078 - DNA, 120 bp, Artificial Sequence
  ENSG00000015479_12 (sequence is synthesized)
gttcacatcatggattttcaacgagggaaaaacttgagataccagctattacagctggtagaaccatttggagtcatttcaaatcatctgattctaaataaaattaatgaggcatttatt

SEQ ID NO: 17079 - DNA, 120 bp, Artificial Sequence
  ENSG00000015479_13 (sequence is synthesized)
gaaatggcaaccacagaggatgctcaggccgcagtggattattacacaaccacaccagcgttagtatttggcaagccagtgagagttcatttatcccagaagtataaaagaataaagaaa

SEQ ID NO: 17080 - DNA, 120 bp, Artificial Sequence
  ENSG00000015479_14 (sequence is synthesized)
cctgaaggaaagccagatcagaagtttgatcaaaagcaagagcttggacgtgtgatacatctcagcaatttgccgcattctggctattctgatagtgctgttctcaagcttgctgagcct

SEQ ID NO: 17081 - DNA, 120 bp, Artificial Sequence
  ENSG00000015479_15 (sequence is synthesized)
tatgggaaaataaagaattacatattgatgaggatgaaaagtcaggcttttattgagatggagacaagagaagatgcaatggcaatggttgaccattgtttgaaaaaagccctttggttt

SEQ ID NO: 17082 - DNA, 120 bp, Artificial Sequence
  ENSG00000015479_16 (sequence is synthesized)
caggggagatgtgtgaaggttgacctgtctgagaaatataaaaaactggttctgaggattccaaacagaggcattgatttactgaaaaaagataaatcccgaaaaagatcttactctcca

SEQ ID NO: 17083 - DNA, 120 bp, Artificial Sequence
  ENSG00000015479_17 (sequence is synthesized)
gatggcaaagaatctccaagtgataagaaatccaaaactgatggttcccagaagactgagagttcaaccgaaggtaaagaacaagaagagaagtccggtgaagatggtgagaaagacaca

SEQ ID NO: 17084 - DNA, 120 bp, Artificial Sequence
  ENSG00000015479_18 (sequence is synthesized)
aaggatgaccagacagagcaggaacctaatatgcttcttgaatctgaagatgagctacttgtagatgaagaagaagcagcagcactgctagaaagtggcagttcagtgggagacgagacc

SEQ ID NO: 17085 - DNA, 120 bp, Artificial Sequence
  ENSG00000015479_19 (sequence is synthesized)
gatcttgctaatttaggtgatgtggcttctgatgggaaaaaggaaccatcagataaagctgtgaaaaaagatggaagtgcttcagcagcagcaaagaaaaagcttaaaaaggtggacaag

SEQ ID NO: 17086 - DNA, 120 bp, Artificial Sequence
  ENSG00000015479_20 (sequence is synthesized)
atcgaggaacttgatcaagaaaacgaagcagcgttggaaaatggaattaaaaatgaggaaaacacagaaccaggtgctgaatcttctgagaacgctgatgatcccaacaaagatacaagt

SEQ ID NO: 17087 - DNA, 120 bp, Artificial Sequence
  ENSG00000015479_21 (sequence is synthesized)
caaggacgactatacaatcccagatgagtatagaattggaccatatcagcccaatgttcctgttggtatagactatgtgatacctaaaacagggttttactgtaagctgtgttcactctt

SEQ ID NO: 17088 - DNA, 120 bp, Artificial Sequence
  ENSG00000015479_22 (sequence is synthesized)
ttatacaaatgaagaagttgcaaagaatactcattgcagcagccttcctcattatcagaaattaaagaaatttctgaataaattggcagaagaacgcagacagaagaaggaaacttaaga

SEQ ID NO: 17089 - DNA, 120 bp, Artificial Sequence
  ENSG00000015479_23 (sequence is synthesized)
tgtgcaaggagatttaatgatttcaaagaaaataatggttctttgtttttaatgttaaccttttttaaatacaatactgatagttagaagaaaactattgtactcttttgttttagtgga

SEQ ID NO: 17090 - DNA, 120 bp, Artificial Sequence
  ENSG00000015479_24 (sequence is synthesized)
gaaataatagatgtctgttcatgtgttaagtgttatagcaaaaaaaatacacatatggttaagttaatgaatagtttttgttttatcagaatggcaacagacagaagtactttgtagaga

SEQ ID NO: 17091 - DNA, 120 bp, Artificial Sequence
  ENSG00000015479_25 (sequence is synthesized)
ttgacttcctaagctacttaagacaacttgcaccactaagaaaaaaatgtagaaccatttggaaaaatgaaatttagtagttccaagtttcaaagaaatgtcaacattttattccattca

SEQ ID NO: 17092 - DNA, 120 bp, Artificial Sequence
  ENSG00000015479_26 (sequence is synthesized)
ataaagaacaaaaccaatagtgtttttattactttcatctgaaacattccatgttttaatctgagccttgcagactttcatttggagtttgaacccgttttggttgcatttcatttttgg

SEQ ID NO: 17093 - DNA, 120 bp, Artificial Sequence
  ENSG00000015479_27 (sequence is synthesized)
agaacttaattaacgtgagattggcaattgaaatgcaggtgcagttttctgttaatgtcatgctgttgtttaggtaataagaaatattaagtaattggctttagattttgtaattttttt

SEQ ID NO: 17094 - DNA, 120 bp, Artificial Sequence
  ENSG00000015479_28 (sequence is synthesized)
ccctgagttcctgctagatttcgtattctagtagtcaatgtattttcagtgaaatgcaaaaatattcccgttatctttgaccagtattaatttttgagatcttactgcttgtcacttgaa

SEQ ID NO: 17095 - DNA, 120 bp, Artificial Sequence
  ENSG00000015479_29 (sequence is synthesized)
tcccgtgattgtcatacatctctggtataagcaacatttgatttttgaagtgtgtagaccatctcttcatattttcaagatgtaattttacatttctgcatttttaaaacagtttggcca

SEQ ID NO: 17096 - DNA, 120 bp, Artificial Sequence
  ENSG00000015479_30 (sequence is synthesized)
taatcctagatgcacgcttctaattcatgtacctgcacatgtgacctttgtgaacagaaatttgcatgtataatttgtgtttacttgtaactttctggttatatactgcttatatctgtg

SEQ ID NO: 17097 - DNA, 120 bp, Artificial Sequence
  ENSG00000015479_31 (sequence is synthesized)
gattcaagttactgaagtgaataccaataaaaagaaaaccctaggccatgttaattggttatacatgtttggaatgttaaccaacgtatttgtcagttgtggtttttattcgctcttaaa

SEQ ID NO: 17098 - DNA, 120 bp, Artificial Sequence
  ENSG00000015479_32 (sequence is synthesized)
ctttgtgcatgctttaacaatttattacttttaaatctagagtgaattctaaagactgccgctaaagatctgagttttaaaaatgttgttgctggtggatttcttgttcctgttacataa

SEQ ID NO: 17099 - DNA, 120 bp, Artificial Sequence
  ENSG00000015479_33 (sequence is synthesized)
ctaaaagtgaggccatttgtggtttttaaaaaccttatgaattaaaaatgctacaggtgaacaaacagaagcttatgtttagagatattgatgacttaacagtacaattggaagtaatac

SEQ ID NO: 17100 - DNA, 120 bp, Artificial Sequence
  ENSG00000015479_34 (sequence is synthesized)
ggatgagcaagaattagttctgcagcttttcaaaataattacgtagagactcttggtatattggattatctgttgtaaacaatttttttttcttccctgacacagggtctcactctgtca

SEQ ID NO: 17101 - DNA, 78 bp, Artificial Sequence
  ENSG00000015479_35 (sequence is synthesized)
gtcacccagactggagtgcagtggcacagttctctgcaacctcagcctttgggctcaaatgaccctccttatacctgg

SEQ ID NO: 17102 - DNA, 120 bp, Artificial Sequence
  ENSG00000015479_36 (sequence is synthesized)
tttttggtttttttgtatagatggggctttgccatgttgcccaggttgatcttgaattcctgggcccaagtgatctgctcgcttcagcctcccaaagtgctgggactgtaggcatgagcc

SEQ ID NO: 17103 - DNA, 120 bp, Artificial Sequence
  ENSG00000015479_37 (sequence is synthesized)
accatccctggccaagaaacaaagttttaatttcaaaaaaatctacaaaaacaggataggcattgtctttcaaatgttcagaccccagtttattaaaggatacttcaaatagttggctaa

SEQ ID NO: 17104 - DNA, 120 bp, Artificial Sequence
  ENSG00000015479_38 (sequence is synthesized)
attttatgatctctcccgttgaaaagtaggtgatgattttaatgtgacatgcacaaaaaatccttgccagtttacttctgcaatttaattttagcctttactaattacccacttctgttt

SEQ ID NO: 17105 - DNA, 120 bp, Artificial Sequence
  ENSG00000015479_39 (sequence is synthesized)
aattccaatttttaacagcaggtacataaagcattatgtgcacaatggagttcttcagtgtttcctttcagtgatggctttttcatagcttcaactttgttggatttagcaagttgaagg

SEQ ID NO: 17106 - DNA, 120 bp, Artificial Sequence
  ENSG00000015479_40 (sequence is synthesized)
aaagaatgctatgtttttaatacctacatttgagagcatttagaaatcagaaattataataagctgttagtgataaatctgtaacagcccttcgattacgagaaaacctctttttagtag

SEQ ID NO: 17107 - DNA, 120 bp, Artificial Sequence
  ENSG00000015479_41 (sequence is synthesized)
gaatgtttccactcatgtttgctgtaaagtttaagaacatttttcctacggctatgtcagcccttagtttaatcttacattatcctacaaaagtgaatgaaacttctagaagtaccttga

SEQ ID NO: 17108 - DNA, 120 bp, Artificial Sequence
  ENSG00000015479_42 (sequence is synthesized)
tctccttttccctctccctttccctaaggtaggcgtgaagcgggtaagagtcggggtcgggtggctgggggttctccgtgtccgccgggaggggacaacgacggcgacaggggctgcggg

SEQ ID NO: 17109 - DNA, 120 bp, Artificial Sequence
  ENSG00000015479_43 (sequence is synthesized)
gagccggcggcgcgcctttcttgctcgctcccgctctgcctccctccgcgttgcgtatgtgagccgcctgatcggcggccgccatgttaggagcgcagtggcggcgcaaccagccttcta

SEQ ID NO: 17110 - DNA, 120 bp, Artificial Sequence
  ENSG00000015479_44 (sequence is synthesized)
atgtccaagtcattccagcagtcatctctcagtagggactcacagggtcatgggcgtgacctgtctgcggcaggaataggccttcttgctgctgctacccagtctttaagtatgcttctt

SEQ ID NO: 17111 - DNA, 120 bp, Artificial Sequence
  ENSG00000015479_45 (sequence is synthesized)
agtcaagtcacctcacatcctttttctctttatcaaaatagtattagtccaggttcctccagagaggatcgtgtggtgtgggaccttccggtttccagacaaagggttttggagtaccgt

SEQ ID NO: 17112 - DNA, 120 bp, Artificial Sequence
  ENSG00000015479_46 (sequence is synthesized)
ggtgtagtcgccgcatcgttctttgcatttcgagctctgtgccatgttctgtgttcggcatttaccgtggatgaatatcccctaggtgtttatcctgctctgtggccctgttctgtggaa

SEQ ID NO: 17113 - DNA, 120 bp, Artificial Sequence
  ENSG00000015479_47 (sequence is synthesized)
tattcctattggatcagttacagttttttagccagatatttctagaacggttatggtggttctgaaatggctagtctttcgggcgcgctggaataatgtgaagaatcgttgatttcgtag

SEQ ID NO: 17114 - DNA, 120 bp, Artificial Sequence
  ENSG00000015479_48 (sequence is synthesized)
ttttaagctaccatttgtaaaggagatcaatgtaaggaattcaggtttcactttcaacatttcataaacaaagtattttcagaatttctttactgaaaatgagactttgataaaattcac

SEQ ID NO: 17115 - DNA, 120 bp, Artificial Sequence
  ENSG00000015479_49 (sequence is synthesized)
tttggttaacaatttttagaatatatattatgtagtaatttgtattcttttattgttaatgtagactttgacctagttacttcacagatactctgaaagattgaagtggttgtggtcata

SEQ ID NO: 17116 - DNA, 120 bp, Artificial Sequence
  ENSG00000015479_50 (sequence is synthesized)
tattggggtgctttaacatttaatcttaattctttccaatggacctctttattatgatttatattttatgtcttcactttactaggggtgatccattcatgttgcagcagtctacaaatc

SEQ ID NO: 17117 - DNA, 120 bp, Artificial Sequence
  ENSG00000015479_51 (sequence is synthesized)
aatacctttaaaacatccttatcgtgaatcagaatcagccattattggtttttgggagttcatcatttacttgtaatatccacaatgttaatatcacatagtggtactgtatggacaata

SEQ ID NO: 17118 - DNA, 120 bp, Artificial Sequence
  ENSG00000015479_52 (sequence is synthesized)
tgtttagatctggaaatttcatattgaatattagatgcagtaataatattttgttatttaacatttctaggatacatatatattggtcattatacaaattggtgatttttactagacata

SEQ ID NO: 17119 - DNA, 120 bp, Artificial Sequence
  ENSG00000015479_53 (sequence is synthesized)
atttttactagacatagtgaaagatagtatttgatatgtagagtggattaaacagtagcatttttaataatacatgctctaaaaatgtaaaagatacggaaaagagggtaggttattaaa

SEQ ID NO: 17120 - DNA, 120 bp, Artificial Sequence
  ENSG00000015479_54 (sequence is synthesized)
agattctaattcattgtccagcaaaatccttggtgatgaattttttttttttttttgcttttgagatctttggttttgagttcaggctgctaccatgaaatggaattcctaaagaaactc

SEQ ID NO: 17121 - DNA, 120 bp, Artificial Sequence
  ENSG00000015479_55 (sequence is synthesized)
cctgcttaagcagcacacagtgcccattgttcactggagttggaattttcacatatgcctaactctgttggggctattctttctttctaatgtcacaactcaactgtgctcttggtatta

SEQ ID NO: 17122 - DNA, 120 bp, Artificial Sequence
  ENSG00000015479_56 (sequence is synthesized)
atattggagaaggaaaatctgtgctctgttcttgtttctatgtaacccacatttctaattctttgtgcggcacttcctccttacaatttaacaaatagaggaaaaacttaatttcaacat

SEQ ID NO: 17123 - DNA, 120 bp, Artificial Sequence
  ENSG00000015479_57 (sequence is synthesized)
tatctgcatttgcaagcaatacaaaacaagtttattctcgtggattattttgaagttctgaaatttttcttttgaaatatctattggaaatgctttaaaactatgtttctaacacttaga

SEQ ID NO: 17124 - DNA, 120 bp, Artificial Sequence
  ENSG00000015479_58 (sequence is synthesized)
ctctcagataactttactaataaatgatctctattttagaggccaaacaaggctgttttgtgaaaaggacagttttattttaaagttaattttctggtctttttaaagctacccagaatg

SEQ ID NO: 17125 - DNA, 120 bp, Artificial Sequence
  ENSG00000015479_59 (sequence is synthesized)
ctgatcggcggccgccatgttaggagcgcagtggcggcgcaaccagccttctagggcggcggaggtgagcggtccgggagggaaacacgcggccggccaagggcccagggtgcggcggga

SEQ ID NO: 17126 - DNA, 120 bp, Artificial Sequence
  ENSG00000015479_60 (sequence is synthesized)
atcgcgtaaaaatggccgaaaaatgaaacgttaacgcttgtttttcgtactgcgtcgtggaacaagccgcctgcagtacagtgcgagagttgtctgctggttctcagcttgaagaagatt

SEQ ID NO: 17127 - DNA, 120 bp, Artificial Sequence
  ENSG00000015479_61 (sequence is synthesized)
aattttctaaccagtaggtagaatacataataaggttttatacaattttgtaaaatataatgtgctttgtggtttcttttctttctttttaaggcttttattgagatggagacaagagaa

SEQ ID NO: 17128 - DNA, 120 bp, Artificial Sequence
  ENSG00000015479_62 (sequence is synthesized)
gttcttgggctgcagccgctgccgccgcttctcgccagcgccgttgctgcgggggattgtgggagtctccgcgtcccgctcgctgggagagaggtacctctccttttccctctccctttc

SEQ ID NO: 17129 - DNA, 120 bp, Artificial Sequence
  ENSG00000015479_63 (sequence is synthesized)
acaatggaaccatgagaggacttcgagaaaagtttctgtttttatgtatgattatgcttttttccttcaaattttgctactttctagttcctgaagaaggctaataacttaaatggatct

SEQ ID NO: 17130 - DNA, 120 bp, Artificial Sequence
  ENSG00000015479_64 (sequence is synthesized)
aaattaacaaaagagcagtttttacatattttgatgaaactatggattcaagagtaagatacactaccctagtgcaagaggtacttttagcctgtaaaaatgcttaggtcctagctagtt

SEQ ID NO: 17131 - DNA, 120 bp, Artificial Sequence
  ENSG00000015479_65 (sequence is synthesized)
ttggtattctgtcaaaatactgagtacatttgagaactattttagaggccttttgtttaattctgtggtttaaatgtgtaaattggaccaactttaagaagtttaaacacatggattatc

SEQ ID NO: 17132 - DNA, 120 bp, Artificial Sequence
  ENSG00000015479_66 (sequence is synthesized)
tgaatttctagttttctagttgctttactatgttttttacgtatatgcattatattgaaaaaatctttactcactttagcagtggaccctctataaccgctatagaaatgaccttagaga

SEQ ID NO: 17133 - DNA, 120 bp, Artificial Sequence
  ENSG00000015479_67 (sequence is synthesized)
aaatttctgtgatggaagtagataatgaaaaatttttaaacatttaatcctgctctctggtattgctgcataacttggaaaatctgttctttttacttagtggtattgttaaatagtcta

SEQ ID NO: 17134 - DNA, 120 bp, Artificial Sequence
  ENSG00000015479_68 (sequence is synthesized)
catgatcaaaaattcttactgtgaagtaagaaacttaagttgaaaataatttgtcatggagtgtcattatttttaggtgacttaaagtgatggtggtgtttttatttctttataggtcat

SEQ ID NO: 17135 - DNA, 70 bp, Artificial Sequence
  ENSG00000015479_69 (sequence is synthesized)
agtcatcagattgcttttctatgcaatctcaagctttctcagcttcctttcacttaaagaaaattaccca

SEQ ID NO: 17136 - DNA, 120 bp, Artificial Sequence
  ENSG00000015479_70 (sequence is synthesized)
aagctttctcagcttcctttcacttaaagaaaattacccactacagcactttggctgtcttgtcacttgagtttatattaagttatacttttttctgccattctgtaagtgcttcccaaa

SEQ ID NO: 17137 - DNA, 120 bp, Artificial Sequence
  ENSG00000015479_71 (sequence is synthesized)
ttcttttttttctctctataaggtatctcagatacatcaaggtgaatgtagttttcctacagaaatgtctgaatttaaaaagtgcacgaatcctttattaatctgattttacaggagtta

SEQ ID NO: 17138 - DNA, 120 bp, Artificial Sequence
  ENSG00000015479_72 (sequence is synthesized)
cctcagtgtagagtccagggatatatatttttataaaactctttcacttagtccccaccgtaaaccaaccagtaatagatcagtagtacagattagtcattggatgagtttgggaggtat

SEQ ID NO: 17139 - DNA, 120 bp, Artificial Sequence
  ENSG00000015479_73 (sequence is synthesized)
gtgattgattttttgatcttggccttccttttttcactttgaaagaccagacacacttttcccctaagtttgaacctttaaacaacgtggaggattggatataatttctgttcagctatg

SEQ ID NO: 17140 - DNA, 120 bp, Artificial Sequence
  ENSG00000015479_74 (sequence is synthesized)
taccctttctagctcctatgaaatagaagcatgcgtagtaggataacatttatttctctcccacaacttaagaatattttaagtaaaatctgaatatttttagttcagagaattgtaagt

SEQ ID NO: 17141 - DNA, 70 bp, Artificial Sequence
  ENSG00000015479_75 (sequence is synthesized)
aaaatctgaatatttttagttcagagaattgtaagtcgttaattggtatttgtttatttctcgctctgtg

SEQ ID NO: 17142 - DNA, 62 bp, Artificial Sequence
  ENSG00000015479_76 (sequence is synthesized)
gcccagccaaggcttctaaattttgtgaacttacctgtggctcctctgacttagagccattt

SEQ ID NO: 17143 - DNA, 120 bp, Artificial Sequence
  ENSG00000015479_77 (sequence is synthesized)
ttgtgaacttacctgtggctcctctgacttagagccatttttattttattttattttgttttatgtttttgagaaagggtcttttgctttgtagcccacgctgaagtgcgcttaggtgtt

SEQ ID NO: 17144 - DNA, 120 bp, Artificial Sequence
  ENSG00000015479_78 (sequence is synthesized)
taggtgttcgcagctcattgcactctctaccacccaggctcaagtgacgcatgtaccaccaccacatctggcgtttttttcttgatagagatcgggtttcactgtgttgcccaggctggt

SEQ ID NO: 17145 - DNA, 120 bp, Artificial Sequence
  ENSG00000015479_79 (sequence is synthesized)
cctgggctcaagtaatctgcctgctttggcctcccagagtgctgggatcgtatgcgtgagccactgcacccggcccttacaagccattttaaaactggtccccaagaaggcagtggtcca

SEQ ID NO: 17146 - DNA, 120 bp, Artificial Sequence
  ENSG00000015479_80 (sequence is synthesized)
ttactttccagttgaaactttagatatcccaaatagctgatgattagagagccagctggagagatcttgagttccttagctattagccattattttaaaaagataatctagctttgagag

SEQ ID NO: 17147 - DNA, 120 bp, Artificial Sequence
  ENSG00000015479_81 (sequence is synthesized)
tttgagagacctggaaatagtagtttatagcttccaacattttaaggaaggtaccattctatttggatgagttccattttagtttacaggattttatttttatttatttatttatttttg

SEQ ID NO: 17148 - DNA, 120 bp, Artificial Sequence
  ENSG00000015479_82 (sequence is synthesized)
actgcaggcctgagccaccgcacctggcctttcacaggattttagataattttactagagcataggaatgtacctaaactgttgtcaggtaaatataaaccagttttttttttttttttt

SEQ ID NO: 17149 - DNA, 120 bp, Artificial Sequence
  ENSG00000015479_83 (sequence is synthesized)
tttaggagctcatttataaaataccaatccgcagctttttgaaagcacgtatcttgtaatttggtaccttggtaccttactctaatttagttcagctctcagtgagacatccccctttaa

SEQ ID NO: 17150 - DNA, 120 bp, Artificial Sequence
  ENSG00000015479_84 (sequence is synthesized)
aaacacatcgcctgaccatgttttatattccaaatataattgtattgggtagtgtgggtgttacagaaattacctcaatttgtgggagtttgtgaaacatcaataatagttgtaaagcag

SEQ ID NO: 17151 - DNA, 120 bp, Artificial Sequence
  ENSG00000015479_85 (sequence is synthesized)
gaattgtaaaacaagactgctttataatcagtgtaataatagttctttttttttttttttttttagcacattccatgtgcctggcaagggtctgataagcagtttacctttattgactca

SEQ ID NO: 17152 - DNA, 120 bp, Artificial Sequence
  ENSG00000015479_86 (sequence is synthesized)
tttgcttttcacaacaaccctatgagactcttgtcccagtgaatttaaataacacggaccaaagattcacatctttgtaatttgggagtgaacctaggcagtctaatagcagagcccact

SEQ ID NO: 17153 - DNA, 120 bp, Artificial Sequence
  ENSG00000015479_87 (sequence is synthesized)
ttttgtaacttctctttcttacattgcctaaaaagttaactcatttatatctgcatttttttcctaaagaaatttatttgaataaaataagagttacttcaatttaaagtaaaccataaa

SEQ ID NO: 17154 - DNA, 120 bp, Artificial Sequence
  ENSG00000015479_88 (sequence is synthesized)
taaatgggattcgttttctagaaaagccattcctgttgaatcatgttagcattttatggtaatgctaatcatggtgtatttttcattcactgtgtatttagtaggtagtaaacctggaac

SEQ ID NO: 17155 - DNA, 73 bp, Artificial Sequence
  ENSG00000015479_89 (sequence is synthesized)
tttcattcactgtgtatttagtaggtagtaaacctggaacatcctcaaaagctggatgtgattaaagttttag

SEQ ID NO: 17156 - DNA, 63 bp, Artificial Sequence
  ENSG00000015479_90 (sequence is synthesized)
tgcagtggcgcagtctcagctcactggaatctccgccttttgggttcaagagattctgatttt

SEQ ID NO: 17157 - DNA, 68 bp, Artificial Sequence
  ENSG00000015479_91 (sequence is synthesized)
tggggtttcgccatgttggctaggctggtttcaaactcctggtctcaaatgatccatgcctaaaagat

SEQ ID NO: 17158 - DNA, 120 bp, Artificial Sequence
  ENSG00000015479_92 (sequence is synthesized)
ttttaactaattgttcacatttatagtatatagtttctagaaaagtagatataaacatggatgttttattcagagtgctataaagtagcatacaatgaatacttcagtttggtccacagt

SEQ ID NO: 17159 - DNA, 120 bp, Artificial Sequence
  ENSG00000015479_93 (sequence is synthesized)
aaaaattaataagccttgctgatctcaaggttagttactactcttgatctttattaactctatatcttttccctgtcaaatatcttaagtatgttgacaagttaatccagtttttccaag

SEQ ID NO: 17160 - DNA, 120 bp, Artificial Sequence
  ENSG00000015479_94 (sequence is synthesized)
aatgtgcatagcgtatttgagggcaggatcaagcctcaaggattcagagaaatggttttaaattaaatcaatgtgatttagtgaatgggcaggtgtttgtacagcctatgatactgcata

SEQ ID NO: 17161 - DNA, 120 bp, Artificial Sequence
  ENSG00000015479_95 (sequence is synthesized)
gacattaatatcctagagtttgaatggttcagatgaaaatatttcagctttatttttgttaattctactaatttactttgctgcaggagtggagtcaacatatcaatggagcaagtcaca

SEQ ID NO: 17162 - DNA, 120 bp, Artificial Sequence
  ENSG00000015479_96 (sequence is synthesized)
gggtttgttcttgggctgcagccgctgccgccgcttctcgccagcgccgttgctgcgggggattgtgggagtctccgcgtcccgctcgctgggagagaggagtggagtcaacatatcaat

SEQ ID NO: 17163 - DNA, 120 bp, Artificial Sequence
  ENSG00000015479_97 (sequence is synthesized)
agttggaccaagaggaaatctgggcttttattgagatggagacaagagaagatgcaatggcaatggttgaccattgtttgaaaaaagccctttggtttcaggggagatgtgtgaaggttg

SEQ ID NO: 17164 - DNA, 120 bp, Artificial Sequence
  ENSG00000015520_0 (sequence is synthesized)
cttggctgttcctgaggcctggcctggctccccgctgaccccttcccagacctgggatggcggaggccggcctgaggggctggctgctgtgggccctgctcctgcgcttggcccagagtg

SEQ ID NO: 17165 - DNA, 120 bp, Artificial Sequence
  ENSG00000015520_1 (sequence is synthesized)
agccttacacaaccatccaccagcctggctactgcgccttctatgacgaatgtgggaagaacccagagctgtctggaagcctcatgacactctccaacgtgtcctgcctgtccaacacgc

SEQ ID NO: 17166 - DNA, 120 bp, Artificial Sequence
  ENSG00000015520_2 (sequence is synthesized)
cggcccgcaagatcacaggtgatcacctgatcctattacagaagatctgcccccgcctctacaccggccccaacacccaagcctgctgctccgccaagcagctggtatcactggaagcga

SEQ ID NO: 17167 - DNA, 120 bp, Artificial Sequence
  ENSG00000015520_3 (sequence is synthesized)
gtctgtcgatcaccaaggccctcctcacccgctgcccagcctgctctgacaattttgtgaacctgcactgccacaacacgtgcagccccaatcagagcctcttcatcaatgtgacccgcg

SEQ ID NO: 17168 - DNA, 120 bp, Artificial Sequence
  ENSG00000015520_4 (sequence is synthesized)
tggcccagctaggggctggacaactcccagctgtggtggcctatgaggccttctaccagcatagctttgccgagcagagctatgactcctgcagccgtgtgcgcgtccctgcagctgcca

SEQ ID NO: 17169 - DNA, 120 bp, Artificial Sequence
  ENSG00000015520_5 (sequence is synthesized)
cgctggctgtgggcaccatgtgtggcgtgtatggctctgccctttgcaatgcccagcgctggctcaacttccagggagacacaggcaatggtctggccccactggacatcaccttccacc

SEQ ID NO: 17170 - DNA, 120 bp, Artificial Sequence
  ENSG00000015520_6 (sequence is synthesized)
tcttggagcctggccaggccgtggggagtgggattcagcctctgaatgagggggttgcacgttgcaatgagtcccaaggtgacgacgtggcgacctgctcctgccaagactgtgctgcat

SEQ ID NO: 17171 - DNA, 120 bp, Artificial Sequence
  ENSG00000015520_7 (sequence is synthesized)
cctgtcctgccatagcccgcccccaggccctcgactccaccttctacctgggccagatgccgggcagtctggtcctcatcatcatcctctgctctgtcttcgctgtggtcaccatcctgc

SEQ ID NO: 17172 - DNA, 120 bp, Artificial Sequence
  ENSG00000015520_8 (sequence is synthesized)
ttgtgggattccgtgtggcccccgccagggacaaaagcaagatggtggaccccaagaagggcaccagcctctctgacaagctcagcttctccacccacaccctccttggccagttcttcc

SEQ ID NO: 17173 - DNA, 120 bp, Artificial Sequence
  ENSG00000015520_9 (sequence is synthesized)
agggctggggcacgtgggtggcttcgtggcctctgaccatcttggtgctatctgtcatcccggtggtggccttggcagcgggcctggtctttacagaactcactacggaccccgtggagc

SEQ ID NO: 17174 - DNA, 120 bp, Artificial Sequence
  ENSG00000015520_10 (sequence is synthesized)
tgtggtcggcccccaacagccaagcccggagtgagaaagctttccatgaccagcatttcggccccttcttccgaaccaaccaggtgatcctgacggctcctaaccggtccagctacaggt

SEQ ID NO: 17175 - DNA, 120 bp, Artificial Sequence
  ENSG00000015520_11 (sequence is synthesized)
atgactctctgctgctggggcccaagaacttcagcggaatcctggacctggacttgctgctggagctgctagagctgcaggagaggctgcggcacctccaggtatggtcgcccgaagcac

SEQ ID NO: 17176 - DNA, 120 bp, Artificial Sequence
  ENSG00000015520_12 (sequence is synthesized)
agcgcaacatctccctgcaggacatctgctacgcccccctcaatccggacaataccagtctctacgactgctgcatcaacagcctcctgcagtatttccagaacaaccgcacgctcctgc

SEQ ID NO: 17177 - DNA, 120 bp, Artificial Sequence
  ENSG00000015520_13 (sequence is synthesized)
tgctcacagccaaccagacactgatggggcagacctcccaagtcgactggaaggaccattttctgtactgtgccaatgccccgctcaccttcaaggatggcacagccctggccctgagct

SEQ ID NO: 17178 - DNA, 120 bp, Artificial Sequence
  ENSG00000015520_14 (sequence is synthesized)
gcatggctgactacggggcccctgtcttccccttccttgccattggggggtacaaaggaaaggactattctgaggcagaggccctgatcatgacgttctccctcaacaattaccctgccg

SEQ ID NO: 17179 - DNA, 120 bp, Artificial Sequence
  ENSG00000015520_15 (sequence is synthesized)
gggacccccgtctggcccaggccaagctgtgggaggaggccttcttagaggaaatgcgagccttccagcgtcggatggctggcatgttccaggtcacgttcatggctgagcgctctctgg

SEQ ID NO: 17180 - DNA, 120 bp, Artificial Sequence
  ENSG00000015520_16 (sequence is synthesized)
aagacgagatcaatcgcaccacagctgaagacctgcccatctttgccaccagctacattgtcatattcctgtacatctctctggccctgggcagctattccagctggagccgagtgatgg

SEQ ID NO: 17181 - DNA, 120 bp, Artificial Sequence
  ENSG00000015520_17 (sequence is synthesized)
tggactccaaggccacgctgggcctcggcggggtggccgtggtcctgggagcagtcatggctgccatgggcttcttctcctacttgggtatccgctcctccctggtcatcctgcaagtgg

SEQ ID NO: 17182 - DNA, 120 bp, Artificial Sequence
  ENSG00000015520_18 (sequence is synthesized)
ttcctttcctggtgctgtccgtgggggctgataacatcttcatctttgttctcgagtaccagaggctgccccggaggcctggggagccacgagaggtccacattgggcgagccctaggca

SEQ ID NO: 17183 - DNA, 120 bp, Artificial Sequence
  ENSG00000015520_19 (sequence is synthesized)
gggtggctcccagcatgctgttgtgcagcctctctgaggccatctgcttcttcctaggggccctgacccccatgccagctgtgcggacctttgccctgacctctggccttgcagtgatcc

SEQ ID NO: 17184 - DNA, 120 bp, Artificial Sequence
  ENSG00000015520_20 (sequence is synthesized)
ttgacttcctcctgcagatgtcagcctttgtggccctgctctccctggacagcaagaggcaggaggcctcccggttggacgtctgctgctgtgtcaagccccaggagctgcccccgcctg

SEQ ID NO: 17185 - DNA, 120 bp, Artificial Sequence
  ENSG00000015520_21 (sequence is synthesized)
gaggggctcctgcttggcttcttccaaaaggcttatgcccccttcctgctgcactggatcactcgaggtgttgtgctgctgctgtttctcgccctgttcggagtgagcctctactccatg

SEQ ID NO: 17186 - DNA, 120 bp, Artificial Sequence
  ENSG00000015520_22 (sequence is synthesized)
tgccacatcagcgtgggactggaccaggagctggccctgcccaaggactcgtacctgcttgactatttcctctttctgaaccgctacttcgaggtgggggccccggtgtactttgttacc

SEQ ID NO: 17187 - DNA, 120 bp, Artificial Sequence
  ENSG00000015520_23 (sequence is synthesized)
accttgggctacaacttctccagcgaggctgggatgaatgccatctgctccagtgcaggctgcaacaacttctccttcacccagaagatccagtatgccacagagttccctgagcagtct

SEQ ID NO: 17188 - DNA, 120 bp, Artificial Sequence
  ENSG00000015520_24 (sequence is synthesized)
tacctggccatccctgcctcctcctgggtggatgacttcattgactggctgaccccgtcctcctgctgccgcctttatatatctggccccaataaggacaagttctgcccctcgaccgtc

SEQ ID NO: 17189 - DNA, 120 bp, Artificial Sequence
  ENSG00000015520_25 (sequence is synthesized)
aactctctgaactgcctaaagaactgcatgagcatcacgatgggctctgtgaggccctcggtggagcagttccataagtatcttccctggttcctgaacgaccggcccaacatcaaatgt

SEQ ID NO: 17190 - DNA, 120 bp, Artificial Sequence
  ENSG00000015520_26 (sequence is synthesized)
accggcccaacatcaaatgtcccaaaggcggcctggcagcatacagcacctctgtgaacttgacttcagatggccaggttttagacacagttgccattctgtcacccaggctggagtaca

SEQ ID NO: 17191 - DNA, 120 bp, Artificial Sequence
  ENSG00000015520_27 (sequence is synthesized)
tgcaacctctacctcctggattcaacctccaggttcatggcctatcacaagcccctgaaaaactcacaggattacacagaagctctgcgggcagctcgagagctggcagccaacatcact

SEQ ID NO: 17192 - DNA, 120 bp, Artificial Sequence
  ENSG00000015520_28 (sequence is synthesized)
gctgacctgcggaaagtgcctggaacagacccggcttttgaggtcttcccctacacgatcaccaatgtgttttatgagcagtacctgaccatcctccctgaggggctcttcatgctcagc

SEQ ID NO: 17193 - DNA, 120 bp, Artificial Sequence
  ENSG00000015520_29 (sequence is synthesized)
ctctgccttgtgcccaccttcgctgtctcctgcctcctgctgggcctggacctgcgctccggcctcctcaacctgctctccattgtcatgatcctcgtggacactgtcggcttcatggcc

SEQ ID NO: 17194 - DNA, 120 bp, Artificial Sequence
  ENSG00000015520_30 (sequence is synthesized)
ctgtggggcatcagttacaatgctgtgtccctcatcaacctggtctcggcggtgggcatgtctgtggagtttgtgtcccacattacccgctcctttgccatcagcaccaagcccacctgg

SEQ ID NO: 17195 - DNA, 120 bp, Artificial Sequence
  ENSG00000015520_31 (sequence is synthesized)
ctggagagggccaaagaggccaccatctctatgggaagtgcggtgtttgcaggtgtggccatgaccaacctgcctggcatccttgtcctgggcctcgccaaggcccagctcattcagatc

SEQ ID NO: 17196 - DNA, 120 bp, Artificial Sequence
  ENSG00000015520_32 (sequence is synthesized)
ttcttcttccgcctcaacctcctgatcactctgctgggcctgctgcatggcttggtcttcctgcccgtcatcctcagctacgtggggcctgacgttaacccggctctggcactggagcag

SEQ ID NO: 17197 - DNA, 120 bp, Artificial Sequence
  ENSG00000015520_33 (sequence is synthesized)
aagcgggctgaggaggcggtggcagcagtcatggtggcctcttgcccaaatcacccctcccgagtctccacagctgacaacatctatgtcaaccacagctttgaaggttctatcaaaggt

SEQ ID NO: 17198 - DNA, 120 bp, Artificial Sequence
  ENSG00000015520_34 (sequence is synthesized)
gctggtgccatcagcaacttcttgcccaacaatgggcggcagttctgatacagccagaggccctgtctaggctctatggccctgaaccaaagggttatggggatcttccttgtgactgcc

SEQ ID NO: 17199 - DNA, 120 bp, Artificial Sequence
  ENSG00000015520_35 (sequence is synthesized)
ccttgacacacgccctcctcaaatcctaggggaggccattcccatgagactgcctgtcactggaggatggcctgctcttgaggtatccaggcagcaccactgatggctcctctgctccca

SEQ ID NO: 17200 - DNA, 120 bp, Artificial Sequence
  ENSG00000015520_36 (sequence is synthesized)
tagtgggtccccagtttccaagtcacctaggccttgggcagtgcctcctcctgggcctgggtctggaagttggcaggaacagacacactccatgtttgtcccacactcactcactttcct

SEQ ID NO: 17201 - DNA, 120 bp, Artificial Sequence
  ENSG00000015520_37 (sequence is synthesized)
aggagcccacttctcatccaacttttcccttctcagttcctctctcgaaagtcttaattctgtgtcagtaagtctttaacacgtagcagtgtccctgagaacacagacaatgaccactac

SEQ ID NO: 17202 - DNA, 120 bp, Artificial Sequence
  ENSG00000015520_38 (sequence is synthesized)
cctgggtgtgatatcacaggaggccagagagaggcaaaggctcaggccaagagccaacgctgtgggaggccggtcggcagccactccctccagggcgcacctgcaggtctgccatccacg

SEQ ID NO: 17203 - DNA, 120 bp, Artificial Sequence
  ENSG00000015520_39 (sequence is synthesized)
gccttttctggcaagagaagggcccaggaaggatgctctcataaggcccaggaaggatgctctcataagcaccttggtcatggattagcccctcctggaaaatggtgttgggtttggtct

SEQ ID NO: 17204 - DNA, 120 bp, Artificial Sequence
  ENSG00000015520_40 (sequence is synthesized)
ccagctccaatacttattaaggctgttgctgccagtcaaggccacccaggagtctgaaggctgggagctcttggggctgggctggtcctcccatcttcacctcgggcctggatcccaggc

SEQ ID NO: 17205 - DNA, 120 bp, Artificial Sequence
  ENSG00000015520_41 (sequence is synthesized)
ctcaaaccagcccaacccgagcttttggacagctctccagaagcatgaactgcagtggagatgaagatcctggctctgtgctgtgcacataggtgtttaataaacatttgttggcagaaa

SEQ ID NO: 17206 - DNA, 120 bp, Artificial Sequence
  ENSG00000015520_42 (sequence is synthesized)
gtggccctgctctccctggacagcaagaggcaggaggtaggggcagctgggccagtactgagggacctgcccctgggttcccaccatggcagggagatggggtggctttaccaccacaga

SEQ ID NO: 17207 - DNA, 120 bp, Artificial Sequence
  ENSG00000015520_43 (sequence is synthesized)
gatggcccagagaatggggtgggggacaggggcattgtgccaggagagtaatatttaggccatgtattctccaatttcctacagaaaaataaatttgttttgacaattttttaaatataa

SEQ ID NO: 17208 - DNA, 120 bp, Artificial Sequence
  ENSG00000015532_0 (sequence is synthesized)
gtcccgggcaggaagatggtggcgagcgcgcgagtgcagaagctggtgcggcgctacaagctggcgattgccacggcgctggccatcctgctgctgcagggcctggtagtgtggagcttc

SEQ ID NO: 17209 - DNA, 120 bp, Artificial Sequence
  ENSG00000015532_1 (sequence is synthesized)
agcggcctggaggaggacgaggcgggcgagaaaggaaggcagaggaagccacggccactggaccctggcgagggttccaaggacacagacagttcagcagggcgacggggcagcacaggc

SEQ ID NO: 17210 - DNA, 120 bp, Artificial Sequence
  ENSG00000015532_2 (sequence is synthesized)
agaaggcatgggcgctggcggggccgtgctgagagcccaggagtgcccgtggccaaggtggtacgggcagtaaccagccggcagagagccagccggcgggtcccacctgccccacccccg

SEQ ID NO: 17211 - DNA, 120 bp, Artificial Sequence
  ENSG00000015532_3 (sequence is synthesized)
gaagccccaggccgccagaacctgagtggggcagcagctggggaggcgctggtaggggcagctggcttcccaccacacggagatacagggagcgtggagggcgccccccagcccacggac

SEQ ID NO: 17212 - DNA, 120 bp, Artificial Sequence
  ENSG00000015532_4 (sequence is synthesized)
aatggcttcacccccaagtgcgagatcgtgggcaaggacgcactgtctgcactggcccgggccagcaccaagcagtgccagcaggagatcgccaatgtggtgtgcctgcaccaggctggg

SEQ ID NO: 17213 - DNA, 120 bp, Artificial Sequence
  ENSG00000015532_5 (sequence is synthesized)
agcctcatgcccaaggctgtgccccggcactgtcagctgactgggaagatgagccccggcatccagtgggatgagagccaagcccagcagcccatggatggccccccggtgcgaatcgcc

SEQ ID NO: 17214 - DNA, 120 bp, Artificial Sequence
  ENSG00000015532_6 (sequence is synthesized)
tacatgctggtggttcacggccgcgccatccgccagctgaagcgtctcctcaaggccgtttatcacgagcagcacttcttttacatccatgtggacaagcgttccgactacctgcaccgg

SEQ ID NO: 17215 - DNA, 120 bp, Artificial Sequence
  ENSG00000015532_7 (sequence is synthesized)
gaggtggtggagctggcccagggctatgataacgtgcgggtgacgccctggcgcatggttaccatctggggcggggccagcctcctgaggatgtacctgcggagcatgcgggacctgcta

SEQ ID NO: 17216 - DNA, 120 bp, Artificial Sequence
  ENSG00000015532_8 (sequence is synthesized)
gaggtgcctggctgggcctgggacttcttcatcaacctcagtgccactgactatccaaccaggaccaatgaggagctggtggcattcctatccaagaaccgggacaagaatttcctcaag

SEQ ID NO: 17217 - DNA, 120 bp, Artificial Sequence
  ENSG00000015532_9 (sequence is synthesized)
tcacatggccgggacaactccaggttcatcaagaaacagggcctggaccggctcttccatgagtgcgactcacacatgtggcgcctgggcgagcggcagatcccagcaggcattgtggtg

SEQ ID NO: 17218 - DNA, 120 bp, Artificial Sequence
  ENSG00000015532_10 (sequence is synthesized)
gatggcggttctgactggttcgtgctgacacgcagctttgtggagtatgtggtgtacacagatgacccgcttgtggcccagctgcgccagttctacacatacacactgctcccagccgag

SEQ ID NO: 17219 - DNA, 120 bp, Artificial Sequence
  ENSG00000015532_11 (sequence is synthesized)
tccttcttccacacggtgctggagaacagcctggcctgtgagaccctcgtggacaacaacctgcgggtcaccaactggaaccgcaagctgggctgcaagtgccagtacaagcacattgtg

SEQ ID NO: 17220 - DNA, 120 bp, Artificial Sequence
  ENSG00000015532_12 (sequence is synthesized)
gactggtgtggctgctcccccaacgacttcaagccacaggacttcctccggctgcagcaagtctccagacccaccttcttcgcccggaagttcgagtcgactgtgaaccaggaggtgctg

SEQ ID NO: 17221 - DNA, 120 bp, Artificial Sequence
  ENSG00000015532_13 (sequence is synthesized)
gaaatcctggacttccacctgtatggcagctacccccccggcacgccagccctcaaggcctactgggagaacacctacgacgcggctgatggccccagtgggctcagtgatgtcatgctc

SEQ ID NO: 17222 - DNA, 120 bp, Artificial Sequence
  ENSG00000015532_14 (sequence is synthesized)
agcctgcaccatgccgccactgctgcacccccaatgggcaccccactctgcaggtttgagcccaggggcttgccgtccagcgtgcacctgtatttctatgacgaccatttccagggctac

SEQ ID NO: 17223 - DNA, 120 bp, Artificial Sequence
  ENSG00000015532_15 (sequence is synthesized)
ctggtgacgcaggcggtgcagccctcagcccaggggccggcagagacgcttgagatgtggctgatgccccaagggtcgctgaagctgttggggcgcagtgaccaggccagccggctccag

SEQ ID NO: 17224 - DNA, 120 bp, Artificial Sequence
  ENSG00000015532_16 (sequence is synthesized)
agtctggaggttggcactgattgggaccccaaagagcgtcttttccggaactttggggggttactggggccgctggacgagcctgtggccgtgcagcgctgggcccggggccccaacctc

SEQ ID NO: 17225 - DNA, 120 bp, Artificial Sequence
  ENSG00000015532_17 (sequence is synthesized)
acagccacagtggtctggatcgacccaacctatgtggtggccacatcttatgacatcacagtagatacggagactgaggtcacgcaatacaagcccccactgagccggcccctgcggcca

SEQ ID NO: 17226 - DNA, 120 bp, Artificial Sequence
  ENSG00000015532_18 (sequence is synthesized)
gggccctggactgttcgactccttcagttctgggaaccgctgggtgagacccgcttccttgtgctgcccttgaccttcaaccgcaaactacctctcaggaaagatgatgccagctggctg

SEQ ID NO: 17227 - DNA, 120 bp, Artificial Sequence
  ENSG00000015532_19 (sequence is synthesized)
cacgcagggccaccccacaacgagtacatggagcagagtttccagggcctgagtagcatcctgaacctgcctcagccggagctcgcggaggaggctgcccagcggcacacacagctcaca

SEQ ID NO: 17228 - DNA, 120 bp, Artificial Sequence
  ENSG00000015532_20 (sequence is synthesized)
ggccctgcgctcgaggcctggacagacagggaactgagcagcttctggtccgtggctggactgtgtgccataggcccctctccctgcccctccctggagccctgcagactgaccagctgg

SEQ ID NO: 17229 - DNA, 120 bp, Artificial Sequence
  ENSG00000015532_21 (sequence is synthesized)
agctctctgtcccccgaccccaaatcagagctggggcctgtcaaagcagacgggcgactcaggtagcagggccccagccagtacccgtggaggacccgggaaattgcaccttacagacag

SEQ ID NO: 17230 - DNA, 120 bp, Artificial Sequence
  ENSG00000015532_22 (sequence is synthesized)
tggaggggtgtcccctcccacaggcaagaaccagaggcccaggctgcacacccatttcagccatcaagaacccacacagacggcagggaaggtggacacagtatgaactactgctgatgt

SEQ ID NO: 17231 - DNA, 120 bp, Artificial Sequence
  ENSG00000015532_23 (sequence is synthesized)
atgtctctgttggggatcagagggctggcgggaacgcgagaagggcaccagcagcattccacacccagctcttcctcaccttcctgtctagtttgaatttcttttttttctttttttttt

SEQ ID NO: 17232 - DNA, 120 bp, Artificial Sequence
  ENSG00000015532_24 (sequence is synthesized)
tttttaatttaaaaaggaaaatgggtggttgggagagaaactagaacagaagatgtgcaatagggctcagagcagccccaggaagtgggccatgtctgtggggagcaggggcttgctgag

SEQ ID NO: 17233 - DNA, 120 bp, Artificial Sequence
  ENSG00000015532_25 (sequence is synthesized)
cccacctgctattgttctgcacgaggctgggcctgcctcactctccagggcctcatgccccattctgggcctgtggtgctcgtggctgaggctccacagggctgcaagtgccctgccagg

SEQ ID NO: 17234 - DNA, 120 bp, Artificial Sequence
  ENSG00000015532_26 (sequence is synthesized)
ctctaaggcccgaagaacaggtgatatcgggggcgctgcagagctgggctctagcaggacagttcttttgtagccaggggaccctagaagtggggtggggcggctccagggctttccagc

SEQ ID NO: 17235 - DNA, 120 bp, Artificial Sequence
  ENSG00000015532_27 (sequence is synthesized)
ataccctgcccctggatgggaaaggcagggtcagggcccactgagacccatgcagagtttccaggtgtgcactggaagtgaggtcacatgagcagcgtgggaagaagactctgtcaagac

SEQ ID NO: 17236 - DNA, 120 bp, Artificial Sequence
  ENSG00000015532_28 (sequence is synthesized)
tctcagaagaacctggagtaattgtgcctgaagctcagcgtgaagtctgaaatatgcaacagaagaaatatatctctatctctctactctgggctctgtgtttttcctcctgggtgtcag

SEQ ID NO: 17237 - DNA, 120 bp, Artificial Sequence
  ENSG00000015532_29 (sequence is synthesized)
cgagtgcagaagctggtgcggcgctacaagctggcgattgccacggcgctggccatcctgctgctgcagggcctgaaaggaaggcagaggaagccacggccactggaccctggcgagggt

SEQ ID NO: 17238 - DNA, 120 bp, Artificial Sequence
  ENSG00000015532_30 (sequence is synthesized)
gagacgcttgagatgtggctgatgccccaagggtcgctgaagctgttggggcgcagtgaccaggccagccggctccagagtctggaggtgggacaggtcccccacttgctttctcccaac

SEQ ID NO: 17239 - DNA, 120 bp, Artificial Sequence
  ENSG00000015532_31 (sequence is synthesized)
ccccacccagacttggggtagtgggaagagagggacagacaccaagggaggggtaaggttatttttcccagtcatggcagccatggtgatgcccccatgcagacatcctgtgtcaccccc

SEQ ID NO: 17240 - DNA, 120 bp, Artificial Sequence
  ENSG00000015532_32 (sequence is synthesized)
cagcctgtgcacactgaggagcacctcctggttggggtatgcagaggacatgcagggagcagggagggaattatcagttccactacaacacaagcccaatcttccagactacagagattt

SEQ ID NO: 17241 - DNA, 120 bp, Artificial Sequence
  ENSG00000015532_33 (sequence is synthesized)
gcctcggcctcccagagtgctgggaatacaagcgcaagccaccgcgcctggcccctcctcatagtctctttctcagaggctttggcttcatgtgggaatggtctctgggcaggactttga

SEQ ID NO: 17242 - DNA, 120 bp, Artificial Sequence
  ENSG00000015532_34 (sequence is synthesized)
acctcatccctgccgtattgtccccaataagggggactgacctccactgcctagcagtcagaatggaagcctagaacgaatctcagagctgggagagatattaaaggtctcctagtctga

SEQ ID NO: 17243 - DNA, 120 bp, Artificial Sequence
  ENSG00000015532_35 (sequence is synthesized)
cctggcctcaagcagtcctcccgctccaacctcccaaagcgttgggatgacaggcatcagccactactcctggcctcaaagtaccattaaaaaaaaaaaaaaatcttaggtaacacatgc

SEQ ID NO: 17244 - DNA, 120 bp, Artificial Sequence
  ENSG00000015532_36 (sequence is synthesized)
tgtgaaccagaggtgctttctccatctctctggggctatcttgttcctcatcctgtcctgtctctatgcattggcctcaggctctggctccccatccatggcctctcagtgcaacagaca

SEQ ID NO: 17245 - DNA, 120 bp, Artificial Sequence
  ENSG00000015532_37 (sequence is synthesized)
ctgaccagagacttttagtccccaggtttcacattcttgggacagcaaatctgattggctatcccagtccactgtctggccaggtgggcagggtcatgtggctctctgcccatttggctg

SEQ ID NO: 17246 - DNA, 120 bp, Artificial Sequence
  ENSG00000015532_38 (sequence is synthesized)
aggctaagggagcaggctctgaacagagacacaggctgggcaaatttcctgcaagggagggcctagtataagtaactccccctgggagctatgagggatgagcctctggagggaaagtgg

SEQ ID NO: 17247 - DNA, 120 bp, Artificial Sequence
  ENSG00000015532_39 (sequence is synthesized)
ccggtatgcaggaggtgatcaattggtaggtgtttccttcccccaccacgtcctatcacaagaaggtggttaagaggtggggtaccctagaggaggagggggtgctggtggggctgcagc

SEQ ID NO: 17248 - DNA, 120 bp, Artificial Sequence
  ENSG00000015532_40 (sequence is synthesized)
agatccagggcaggcaagctgtgtcccccgcacacctggacctcccagtcaagggaagaatggcaacaatgcacagcaggtagggacaggggctgcgcctcaaggacaaagtcagaggag

SEQ ID NO: 17249 - DNA, 120 bp, Artificial Sequence
  ENSG00000015532_41 (sequence is synthesized)
gtgctctaagccaaggggacaaagctggccattgtctgtgcatgaagagctgaagtgcccgagtacaggcttctgagggctctaggagccaccaatgatggtcaagaaagggtatgggac

SEQ ID NO: 17250 - DNA, 120 bp, Artificial Sequence
  ENSG00000015532_42 (sequence is synthesized)
acaaaccagactgttcccttttctaaagtgccttgaacccactgctttactgcatcctaaagttgggaatctaaggcttactgccttgattttataaaactcagttttataggcacagaa

SEQ ID NO: 17251 - DNA, 120 bp, Artificial Sequence
  ENSG00000015532_43 (sequence is synthesized)
agtcccttggattagcccaaggtcattcagcaagctgtgactcagaagtagggctgtgacaggaactggggtacccagacccaactcctgggtctggcctccacggagtctgttgcaggg

SEQ ID NO: 17252 - DNA, 120 bp, Artificial Sequence
  ENSG00000015568_0 (sequence is synthesized)
acagtgggcctccgtgggcggcgccgcacgctcgtcacagtgggcctccgccggctacgccgctgcttcagtggcttgcaggcactttcctcttggaagtggcgactgctgcggggctga

SEQ ID NO: 17253 - DNA, 120 bp, Artificial Sequence
  ENSG00000015568_1 (sequence is synthesized)
gcggtgctcgcacgcgtctcgggagccaggttggcggcgcgatgaggcgcagcaaggccgatgtggagcggtacgtcgcctcggtgctgggtctcaccccgtcgcctcgacagaagtcaa

SEQ ID NO: 17254 - DNA, 120 bp, Artificial Sequence
  ENSG00000015568_2 (sequence is synthesized)
tgaaaggattctattttgcaaagctgtattatgaagctaaagaatatgatcttgctaaaaaatacatatgtacttacattaatgtgcaagagagggatcccaaagctcacagatttctgg

SEQ ID NO: 17255 - DNA, 120 bp, Artificial Sequence
  ENSG00000015568_3 (sequence is synthesized)
gtcttctttatgaattggaagaaaacacagagaaagccgttgaatgttacaggcgttcagtggaattaaacccaacacaaaaagatcttgtgttgaagattgcagaattgctttgtaaaa

SEQ ID NO: 17256 - DNA, 120 bp, Artificial Sequence
  ENSG00000015568_4 (sequence is synthesized)
ttgtaaaaatgatgttactgatggaagagcaaaatactgggtcgaaagagcagcaaaacttttcccaggaagtcctgcaatttataaactaaaggaacagcttctagattgtgaaggtga

SEQ ID NO: 17257 - DNA, 120 bp, Artificial Sequence
  ENSG00000015568_5 (sequence is synthesized)
ggaataaactttttgacttgattcagtcagaactttatgtaagacctgatgacgtccatgtgaacatccggctagtggagttgtatcgctcaactaaaagattgaaggatgctgtggccc

SEQ ID NO: 17258 - DNA, 120 bp, Artificial Sequence
  ENSG00000015568_6 (sequence is synthesized)
actgccatgaggcagagaggaacatagctttgcgttcaagtttagagtggaattcgtgtgttgtacagacccttaaggaatatctggagtctttacagtgtttggagtctgataaaagtg

SEQ ID NO: 17259 - DNA, 120 bp, Artificial Sequence
  ENSG00000015568_7 (sequence is synthesized)
actggcaagcaaccaatacagacttactgctggcctatgctaatcttatgcttcttacgctttccactagagatgtgcaggaaaatagagaattactggaaagttttgatagtgctcttc

SEQ ID NO: 17260 - DNA, 120 bp, Artificial Sequence
  ENSG00000015568_8 (sequence is synthesized)
agtctgcgaaatcttctttgggtggaaatgatgaactgtcagctactttcttagaaatgaaaggacatttctatatgtatgctggttctctgctcttgaagatgggtcagcatggtaata

SEQ ID NO: 17261 - DNA, 120 bp, Artificial Sequence
  ENSG00000015568_9 (sequence is synthesized)
tgtgctatctcatagcatttcaggttccaagaccaaagattaaattaagagaaggtaaagctggacaaaatctgctggaaatgatggcctgtgaccgactgagccaatcagggcacatgt

SEQ ID NO: 17262 - DNA, 120 bp, Artificial Sequence
  ENSG00000015568_10 (sequence is synthesized)
tggcctgtgaccgactgagccaatcagggcacatgttgctaagcttaagtcgtggcaagcaagatttcttaaaagaggttgttgaaacttttgccaacaaaattgggcagtctgcgttat

SEQ ID NO: 17263 - DNA, 120 bp, Artificial Sequence
  ENSG00000015568_11 (sequence is synthesized)
agtctgcgttatatgatgctctgttttctagtcagtcacctaaggatacatcttttcttggtagcgatgatattggaaaaattgatgtacaagaaccagagcttgaagatttggctagat

SEQ ID NO: 17264 - DNA, 120 bp, Artificial Sequence
  ENSG00000015568_12 (sequence is synthesized)
ctattcgagcacataatggtagtcttcagcatcttacttggcttggcttacagtggaattcattgcctgctttacctggaatccgaaaatggctaaaacagcttttccatcgtttgcccc

SEQ ID NO: 17265 - DNA, 120 bp, Artificial Sequence
  ENSG00000015568_13 (sequence is synthesized)
atgaaacctcaaggcttgaaacaaatgcgcctgaatcaatatgtattttagatcttgaagtatttctccttggagtagtatataccagccacttacaattaaaggagaaatgtaattctc

SEQ ID NO: 17266 - DNA, 120 bp, Artificial Sequence
  ENSG00000015568_14 (sequence is synthesized)
accatagctcctatcagccgttatgcctgccctttcctgtgtgtaaacagctttgtacagaaagacaaaaatcttggtgggatgcggtttgtactctgattcacagaaaagcagtacctg

SEQ ID NO: 17267 - DNA, 120 bp, Artificial Sequence
  ENSG00000015568_15 (sequence is synthesized)
gaaacttggcaaaattgagacttctagttcagcatgaaataaacactctaagagcccaggaaaaacatggccttcaacctgctctgcttgtacattgggcaaaataccttcagaaaacgg

SEQ ID NO: 17268 - DNA, 120 bp, Artificial Sequence
  ENSG00000015568_16 (sequence is synthesized)
gcagcggtcttaattctttttatggtcaactagaatacatagggagaagtgttcattattggaagaaagttttgccattgttgaagataataaagaagaacagtattcctgaacctattg

SEQ ID NO: 17269 - DNA, 120 bp, Artificial Sequence
  ENSG00000015568_17 (sequence is synthesized)
atcctctgtttaaacattttcatagtgtagacattcaggcatcagaaattgttgaatatgaagaagacgcacacataacttttgctatgttggatgcagtaaatggaaatatagaagatg

SEQ ID NO: 17270 - DNA, 120 bp, Artificial Sequence
  ENSG00000015568_18 (sequence is synthesized)
ctgtgactgcttttgaatctataaaaagtgttgtttcttattggaatcttgcactgatttttcacaggaaggcagaagacattgaaaatgatgccctttctcctgaagaacaagaagaat

SEQ ID NO: 17271 - DNA, 120 bp, Artificial Sequence
  ENSG00000015568_19 (sequence is synthesized)
gcagaaattatctgacaaagaccagggactacctaataaagattatagatgacggtgattcaaatctttcagtggtcaagaaattgcctgtgcccctggagtctgtaaaacagatgctta

SEQ ID NO: 17272 - DNA, 120 bp, Artificial Sequence
  ENSG00000015568_20 (sequence is synthesized)
attcagtcatgcaggaactcgaagactatagtgaaggaggtcctctctataaaaatggttctttgcgaaatgcagattcagaaataaaacattctacaccgtctcctaccaaatattcac

SEQ ID NO: 17273 - DNA, 120 bp, Artificial Sequence
  ENSG00000015568_21 (sequence is synthesized)
tatcaccaagtaaaagttacaagtattctcccgaaacaccacctcgatggacagaagatcggaattctttactgaatatgatttgccaacaagtagaggccattaagaaagaaatgcagg

SEQ ID NO: 17274 - DNA, 120 bp, Artificial Sequence
  ENSG00000015568_22 (sequence is synthesized)
agttgaaactaaatagcagtaagtcagcatcccgtcatcgttggcccacagagaattatggaccagactcggtgcctgatggatatcaggggtcacagacatttcatggggctccactaa

SEQ ID NO: 17275 - DNA, 120 bp, Artificial Sequence
  ENSG00000015568_23 (sequence is synthesized)
ctggcccttcagtatattatagtcagtcaccagcatataattcccagtatcttctcagaccagcagctaatgttactcccacaaagggttcttctaatacagaatttaagtcaaccaaag

SEQ ID NO: 17276 - DNA, 120 bp, Artificial Sequence
  ENSG00000015568_24 (sequence is synthesized)
agtcaaccaaagaaggattttccatccctgtgtctgctgatggatttaaatttggcatttcggaaccaggaaatcaagaaaagaaaagggaaaagcctcttgaaaatgatactggcttcc

SEQ ID NO: 17277 - DNA, 120 bp, Artificial Sequence
  ENSG00000015568_25 (sequence is synthesized)
aggctcaggatattagtggccggaagaagggccgtggtgtgatttttggccaaacaagtagcacttttacatttgcagatgttgcaaaatcaacttcaggagaaggatttcagtttggca

SEQ ID NO: 17278 - DNA, 120 bp, Artificial Sequence
  ENSG00000015568_26 (sequence is synthesized)
aaaaagacctcaatttcaagggattttcaggtgctggagaaaaattattctcatcacgatacggtaaaatggccaataaagcaaacacttccggtgactttgagaaagatgatgatgcct

SEQ ID NO: 17279 - DNA, 120 bp, Artificial Sequence
  ENSG00000015568_27 (sequence is synthesized)
ataagactgaggacagcgatgacatccattttgaaccagtagttcaaatgcctgaaaaagtagaacttgtaacaggagaagaaggtgaaaaagttctgtattcacagggggtaaaactat

SEQ ID NO: 17280 - DNA, 120 bp, Artificial Sequence
  ENSG00000015568_28 (sequence is synthesized)
ttagatttgatgctgaggtaaggcagtggaaagaaaggggcttggggaacttaaaaattctcaaaaacgaggtcaatggcaaactaagaatgctgatgcgaagagaacaagtactaaaag

SEQ ID NO: 17281 - DNA, 120 bp, Artificial Sequence
  ENSG00000015568_29 (sequence is synthesized)
tgtgtgctaatcattggataacgactacaatgaacctgaagcccctctctggatcagatagagcatggatgtggtcagccagtgatttctctgacggtgatgccaaactagagcggttgg

SEQ ID NO: 17282 - DNA, 120 bp, Artificial Sequence
  ENSG00000015568_30 (sequence is synthesized)
ctgttagacataccacttcaaactccccataaacttgtagatactggcagagctgccaagttaatacagagagctgaagaaatgaagagtggactgaaagatttcaaaacatttttgaca

SEQ ID NO: 17283 - DNA, 120 bp, Artificial Sequence
  ENSG00000015568_31 (sequence is synthesized)
aatgatcaaacaaaagtcactgaggaagaaaataagggttcaggtacaggtgcggccggtgcctcagacacaacaataaaacccaatgctgaaaacactgggcccacattagaatgggat

SEQ ID NO: 17284 - DNA, 120 bp, Artificial Sequence
  ENSG00000015568_32 (sequence is synthesized)
aactatgacttaagggaagatgctttggatgatagtgtcagtagtagctcagtacatgcttctccattggcaagtagccctgtgagaaaaaatcttttccgctttgatgagtcaacaaca

SEQ ID NO: 17285 - DNA, 120 bp, Artificial Sequence
  ENSG00000015568_33 (sequence is synthesized)
ggatctaacttcagttttaaatctgctttgagtctatctaagtctcctgccaagttgaatcagagtgggacttcagttggcactgatgaagaatctgttgttactcaagaagaagagaga

SEQ ID NO: 17286 - DNA, 120 bp, Artificial Sequence
  ENSG00000015568_34 (sequence is synthesized)
gatggacagtactttgaacctgttgttcctttacctgatctagttgaagtatccagtggtgaggaaaatgaacaagttgtttttagtcacagggcagaaatctacagatatgataaagat

SEQ ID NO: 17287 - DNA, 120 bp, Artificial Sequence
  ENSG00000015568_35 (sequence is synthesized)
gttggtcaatggaaagaaaggggcattggtgatataaagattttacagaattatgataataagcaagttcgtatagtgatgagaagggaccaagtattaaaactttgtgccaatcacaga

SEQ ID NO: 17288 - DNA, 120 bp, Artificial Sequence
  ENSG00000015568_36 (sequence is synthesized)
ataactccagacatgagtttgcaaaatatgaaagggacagaaagagtatgggtgtggactgcatgtgattttgcagatggagaaagaaaagtagagcatttagctgttcgttttaaacta

SEQ ID NO: 17289 - DNA, 120 bp, Artificial Sequence
  ENSG00000015568_37 (sequence is synthesized)
caggatgttgcagactcgtttaagaaaatttttgatgaagcaaaaacagcccaggaaaaagattctttgataacacctcatgtttctcggtcaagcactcccagagagtcaccatgtggc

SEQ ID NO: 17290 - DNA, 120 bp, Artificial Sequence
  ENSG00000015568_38 (sequence is synthesized)
aaaattgctgtagctatattagaagaaaccacaagagagaggacagatgttattcagggtgatgatgtagcagatgcagcttcagaagttgaagtgtctagcacatctgaaacaacaaca

SEQ ID NO: 17291 - DNA, 120 bp, Artificial Sequence
  ENSG00000015568_39 (sequence is synthesized)
aaagcagtggtttctcctccaaagtttgtatttgtttcagagtctgttaaaagaatttttagtagtgaaaaatcaaaaccatttgtatttggcaacagttctgccactgggtctttgttt

SEQ ID NO: 17292 - DNA, 120 bp, Artificial Sequence
  ENSG00000015568_40 (sequence is synthesized)
ggatttagttttaatgcacctttgaaaagtaacaatagtgaaactagttcagtagcccagagtggatctgaaagcaaagtggaacctaaaaaatgtgaactgtcaaagaactctgatatc

SEQ ID NO: 17293 - DNA, 120 bp, Artificial Sequence
  ENSG00000015568_41 (sequence is synthesized)
gaacagtcttcagatagcaaagtcaaaaatctctctgcttcctttccaacggaagaatcttcaatcaactacacatttaaaacaccagaaaaggagcctccattatggcatgctgaattt

SEQ ID NO: 17294 - DNA, 120 bp, Artificial Sequence
  ENSG00000015568_42 (sequence is synthesized)
accaaagaagaattggttcagaagctccgttccaccacaaaaagtgcagatcacttaaacggcctgcttcgggaaatagaggcaaccaatgcagtccttatggagcaaattaagcttctc

SEQ ID NO: 17295 - DNA, 120 bp, Artificial Sequence
  ENSG00000015568_43 (sequence is synthesized)
gtgaaataagaagattggaaaggaatcaagagcgagagaagtctgcagctaacctggaatacttgaagaacgtcttgctgcagttcattttcttgaagccaggtagtgaaagagagagac

SEQ ID NO: 17296 - DNA, 120 bp, Artificial Sequence
  ENSG00000015568_44 (sequence is synthesized)
agacttcttcctgttataaatacgatgttgcagctcagccctgaagaaaagggaaaacttgctgcggttgctcaagatgaggaagaaaatgcttcccgttcttctggatgagcatcctat

SEQ ID NO: 17297 - DNA, 120 bp, Artificial Sequence
  ENSG00000015568_45 (sequence is synthesized)
cttcgtagttggtttggacttcgataggttgatggaaggaatacttctattaaccaaatagaatctgtttacaaaaatggttcgtgtgtgttaccattattcttttgtcaaaaagtgtgt

SEQ ID NO: 17298 - DNA, 120 bp, Artificial Sequence
  ENSG00000015568_46 (sequence is synthesized)
atatatgtttgcatttacatatatttgtacatctgtatgacagatgtattttaaaagtttcaacttgaagtaaaagtacaacagcttgaagtgttgataccaggccacagccctctaact

SEQ ID NO: 17299 - DNA, 120 bp, Artificial Sequence
  ENSG00000015568_47 (sequence is synthesized)
catgtgatctcccatgcatgctgccagaataaaaccaccaggaatgaattcactccccacttctctggaacctcaggacccgcccatttctcggcagtactgtgaattttgaagttaaac

SEQ ID NO: 17300 - DNA, 120 bp, Artificial Sequence
  ENSG00000015568_48 (sequence is synthesized)
taaattttggtaccataccaactggaatttaggctttaaaaataatgtttcaaggccaggtgtggtgattcatgcctgaaatcccactactttgggaggctgaggctggagaatcgcttg

SEQ ID NO: 17301 - DNA, 120 bp, Artificial Sequence
  ENSG00000015568_49 (sequence is synthesized)
gagctgtgattgtaccactgcactccagctcggggaacagagcgagaccttgtctctaaaaataataatagtaataaaaataacgttttatgactatttattgcaaggtcagatttacag

SEQ ID NO: 17302 - DNA, 120 bp, Artificial Sequence
  ENSG00000015568_50 (sequence is synthesized)
atttacagattgttataaattgttgagaaatttttgtgattagaatatgaaggaaaaagctttgttggtaaaagtgacatgttaaggggctatgaagtaaatatgctgcagttaattgtg

SEQ ID NO: 17303 - DNA, 120 bp, Artificial Sequence
  ENSG00000015568_51 (sequence is synthesized)
ctaagttaaaatacagtttagttatttgctttaaaataaactcttctttttttctttaaagtatactacctcaaaactcattatgttgtcagagccctagagctggctagtgtaacactg

SEQ ID NO: 17304 - DNA, 120 bp, Artificial Sequence
  ENSG00000015568_52 (sequence is synthesized)
actatgagtaggtgggcccaccacttgagttgaggtgatttcatggtgtctttccaggctcttgatagggtgtcactgcatgcaagccatgaatctgttttgagaatcctctccattttc

SEQ ID NO: 17305 - DNA, 120 bp, Artificial Sequence
  ENSG00000015568_53 (sequence is synthesized)
ccaaataaaaacctatcccaacagtgactatatcactcagcattggatctaaatataaaagtggtgctttcagtgtttttggcagatagtgttccataacctttccatcagaagggattt

SEQ ID NO: 17306 - DNA, 120 bp, Artificial Sequence
  ENSG00000015568_54 (sequence is synthesized)
tagacaccttagaggtccgtgctacatcttcacagttcctccgaataaccttaggtggtagtgttacttgcctttgacacctgtgcatatgttttaatgactagatccaaactgtgttgt

SEQ ID NO: 17307 - DNA, 120 bp, Artificial Sequence
  ENSG00000015568_55 (sequence is synthesized)
tcttaaatcaaaaattggataatttttaatatttatgtattaatcacacagtgtgctctctgaagttctcttaagccttcagtttatactcttaattttctttctgagctggggaactga

SEQ ID NO: 17308 - DNA, 120 bp, Artificial Sequence
  ENSG00000015568_56 (sequence is synthesized)
ctttgcactttggttacacagaacattggtttccaatttagtttaactgaaatttgctgctgatatgttgagtttgttctttaaaaaatatctcatatatctcgtctttcctccttagaa

SEQ ID NO: 17309 - DNA, 120 bp, Artificial Sequence
  ENSG00000015568_57 (sequence is synthesized)
gaacagacctaactagcgaatgtatgaatgaaaatgcatctatttcagagccgacatgaagagtttagtttttttactttataaactgtgaatatgagtatgccagctgcattagatgta

SEQ ID NO: 17310 - DNA, 120 bp, Artificial Sequence
  ENSG00000015568_58 (sequence is synthesized)
actaatcatatttaaatatatttcactttgactttagaccttttgaagtctgtataaacttgttttgaaatacagtctccacttacgaatgtcataacaaaatacttttttgcatgataa

SEQ ID NO: 17311 - DNA, 120 bp, Artificial Sequence
  ENSG00000015568_59 (sequence is synthesized)
aaaattactttgattacaaaaggcatattctttcatggtttctgcaatgagaggaagtgtaatgattattttaatatttctattaaaactgtatatttttatggctgctcttttatgtta

SEQ ID NO: 17312 - DNA, 120 bp, Artificial Sequence
  ENSG00000015568_60 (sequence is synthesized)
gttttgagtaacaatataaacgagtttagtggttgctttggtttaagatgtattcttcggttagcatttaaaagtacagttctaagtttaatttacttttgtattacttttaaaaaacag

SEQ ID NO: 17313 - DNA, 120 bp, Artificial Sequence
  ENSG00000015568_61 (sequence is synthesized)
tcccaggttcaagctatccttgtgcctcagcctcccgtgtagctggaattaataggtgtgtgccaccacgcctggctctttgtttttttttttattatttttagtagagactgggtttca

SEQ ID NO: 17314 - DNA, 73 bp, Artificial Sequence
  ENSG00000015568_62 (sequence is synthesized)
tacctggcctatctttcataggttatataaattccttggttcccagtttttgcagtcttttccaattcagttt

SEQ ID NO: 17315 - DNA, 120 bp, Artificial Sequence
  ENSG00000015568_63 (sequence is synthesized)
ccttggttcccagtttttgcagtcttttccaattcagtttaattaatggttaactgtttattcattatcaaaaaaagtacagtgtaatagataagaccatgttactattagaagtatggg

SEQ ID NO: 17316 - DNA, 120 bp, Artificial Sequence
  ENSG00000015568_64 (sequence is synthesized)
ctgttgaggcgccggccggctggcgcagtcctgtgggcggcgtggcgcttgcaagcgcaggaagagtcctggggggaccgcggcgggcgggagaccgttggcgccggcgcttcctcttaa

SEQ ID NO: 17317 - DNA, 120 bp, Artificial Sequence
  ENSG00000015568_65 (sequence is synthesized)
tcccggcttgttcccgacgcttgttcccgacggtgctcgctcctgggcccgtcctggcccgggctttctggccgatcgcgcaccccgtagtacccgcgcggcctagttctcgggggcttg

SEQ ID NO: 17318 - DNA, 120 bp, Artificial Sequence
  ENSG00000015568_66 (sequence is synthesized)
tcaggtaagtcttccacttgtaggagcaattgacatttcacggagtcttgatgtgttttaaatgaaggtgtgctctggtatgtaatgacaatatgtgaacaaacctgtggaattaaagtt

SEQ ID NO: 17319 - DNA, 120 bp, Artificial Sequence
  ENSG00000015568_67 (sequence is synthesized)
actttattgatagatttgatttaactcattatgtccaaaatatcattttaacttctaattaatataaaaattaacgatattttacattattgtttttcaccaagtcttcaaaatccagtg

SEQ ID NO: 17320 - DNA, 120 bp, Artificial Sequence
  ENSG00000015568_68 (sequence is synthesized)
caaaatccagtgtgtgtgtttacacttactgttagcatgtcttgatttggactagccaccttgtgaggttttaatagaatgtggctaggctaccatattggacaccatagctctcagaat

SEQ ID NO: 17321 - DNA, 120 bp, Artificial Sequence
  ENSG00000015568_69 (sequence is synthesized)
gtttccctgtcaccagttggtatacatggcatgcttcataactggcttactttattaaactcctttagccagaagttcttctttacattaatagatcagaacaggttgcatatagaagtt

SEQ ID NO: 17322 - DNA, 120 bp, Artificial Sequence
  ENSG00000015568_70 (sequence is synthesized)
ttttctgtttctaattttttgccctttgcattgatggtggctggggatgggttgttttcagccatatgaatggtcttagattttatagtattagctacccatagagtcacagtttttatt

SEQ ID NO: 17323 - DNA, 120 bp, Artificial Sequence
  ENSG00000015568_71 (sequence is synthesized)
taattttatctagtatcatgcttgaacacaggcaaactagatgcaactctagtcaccttccattcttggcaattgttaactttccttacaggaactaatcacagttggctttggattagt

SEQ ID NO: 17324 - DNA, 120 bp, Artificial Sequence
  ENSG00000015568_72 (sequence is synthesized)
ttcatatgtatactaatacttgcttatgttttaagatttttttcaattgctgcaaatgcgtggatattttggtaaactattgtatgctaagtatagttaggcaacactttaaaattttta

SEQ ID NO: 17325 - DNA, 120 bp, Artificial Sequence
  ENSG00000015568_73 (sequence is synthesized)
acctttttaaattctagaaattttgtagtaattcttttcaatgactattaagtaaacacaagattttttttgttttctttggttttaaatagattctgtgttcacttagggtttttggta

SEQ ID NO: 17326 - DNA, 120 bp, Artificial Sequence
  ENSG00000015568_74 (sequence is synthesized)
gaacactaaatcaggatgctaattctaattcatgattatcgtacatctctgcatcaaagtatatgtgttttttatcagtatgctgttttaacctatagataggttccatggtttttattt

SEQ ID NO: 17327 - DNA, 120 bp, Artificial Sequence
  ENSG00000015568_75 (sequence is synthesized)
tcaggtagagtattaacgtcaatacttaataccttatctttgtcaacttttttgactggtgttacagcaaaagagaagaaaaaacctgaagattctccctcagatagtctcggtctcctg

SEQ ID NO: 17328 - DNA, 87 bp, Artificial Sequence
  ENSG00000015568_76 (sequence is synthesized)
catgtcttaattctggtattcaccagatttgtttcgtgttctccgttgttagtcatcaaatttgtctactttttaaatagaaacatt

SEQ ID NO: 17329 - DNA, 120 bp, Artificial Sequence
  ENSG00000015568_77 (sequence is synthesized)
gttagtcatcaaatttgtctactttttaaatagaaacattagctagagcaaggaacttagaaacactcaagcggcactgaatgtgtagaattgcataaccaatatagcttctttgctttc

SEQ ID NO: 17330 - DNA, 120 bp, Artificial Sequence
  ENSG00000015568_78 (sequence is synthesized)
acatttacaattagttggagttttagttcagccgtacccagtatcttccattctgcttccaggaagaaatggaaaaatgtcagccatgatgatgcagtattttagtagcaagttgatggt

SEQ ID NO: 17331 - DNA, 120 bp, Artificial Sequence
  ENSG00000015568_79 (sequence is synthesized)
gttttggtttcccatgggaaatattgtcactggagcattagcagctatcggtcacttattagggtaaaaaagcaacttcagaagaatttaatatatgccaaagaatcaacaaaggaagta

SEQ ID NO: 17332 - DNA, 120 bp, Artificial Sequence
  ENSG00000015568_80 (sequence is synthesized)
atcagccagggcaaaggtcgcacaagagattgtaatctagcaatcagcagtggaataagcagtcagcttaccagaaacccaggaaaatgcttcagaaagggcagtcaggactaaggcaat

SEQ ID NO: 17333 - DNA, 120 bp, Artificial Sequence
  ENSG00000015568_81 (sequence is synthesized)
ttaatgaaatgcaaaataaatgaaatctgaagtttaaataaaaatctagattacaattctggtttctaactcagttatgagaccttgggcaaagtcattaaatttctctgaacttcagat

SEQ ID NO: 17334 - DNA, 120 bp, Artificial Sequence
  ENSG00000015568_82 (sequence is synthesized)
ttttgggagtcaataaaccaatacatgtcaaagggcctggtaaactttacagtttagaccaggcgtggtgtctcacccctgcaatctgagcactttgggagccaaagcagttggatcaca

SEQ ID NO: 17335 - DNA, 120 bp, Artificial Sequence
  ENSG00000015568_83 (sequence is synthesized)
tgaggccaggagtttgagaccagtctgaacaacatggtgaaatcccatctctattaaaagtacaaaaattatctgggcgggatggcatgcacctggaagtcccagctacttgtggggctg

SEQ ID NO: 17336 - DNA, 86 bp, Artificial Sequence
  ENSG00000015568_84 (sequence is synthesized)
tgtgacagagtgagaccctgtctcagaaaaaataacactttacagtttatcagcaaacaggaaagtcttgctaggcaatgtaattg

SEQ ID NO: 17337 - DNA, 120 bp, Artificial Sequence
  ENSG00000015568_85 (sequence is synthesized)
ttatcagcaaacaggaaagtcttgctaggcaatgtaattgattagttccgtgccctggattctgggctcttaactgtatgagcactgtaggtgtgagcagcaacaattaagaagctgcag

SEQ ID NO: 17338 - DNA, 120 bp, Artificial Sequence
  ENSG00000015568_86 (sequence is synthesized)
aggtaaaggtataagggcagtgattgaggatgtctaccaagcagatttcagcaagtgtgtttcaagaagtatgcagcaatctgaaatacctaatcctgaaaaatttctagaatctagtct

SEQ ID NO: 17339 - DNA, 120 bp, Artificial Sequence
  ENSG00000015568_87 (sequence is synthesized)
tttaattttggccagtatttagcagtagtttggccctctactctaaattaataaaaaataagtagtactatattatgagctgtgttatctaacagtttatcttagctagtagcaattaat

SEQ ID NO: 17340 - DNA, 120 bp, Artificial Sequence
  ENSG00000015568_88 (sequence is synthesized)
ttatagctgctattaaaatgactaacgtagttaaaagtttgatgagtaagtttttttttgttgttttttttttttgagctggcgtctcgctctgtcgccaggctggagtgcggtggcgtg

SEQ ID NO: 17341 - DNA, 120 bp, Artificial Sequence
  ENSG00000015568_89 (sequence is synthesized)
accatcttggccaggctggtcttgaacttgctgacctcgtgatccacccaccttagcctcccaaactgctaggattacagatttgagccaccacgcccggccttgatgactaaattttaa

SEQ ID NO: 17342 - DNA, 120 bp, Artificial Sequence
  ENSG00000015568_90 (sequence is synthesized)
actaaattttaagaaatgttttagcaattcttcatacacctttcacttatagttacttaattcctctactcttatcatttgatattttcattttattgtgtacctctgtaaggccgaatc

SEQ ID NO: 17343 - DNA, 120 bp, Artificial Sequence
  ENSG00000015568_91 (sequence is synthesized)
aatagattttgaacaatctcacacttaacctttaaaaaaaatctaataggcccagtttcctctcaacaatctttgaagaaccttcgagaaaggagaaacacagacctcccgcttctagac

SEQ ID NO: 17344 - DNA, 120 bp, Artificial Sequence
  ENSG00000015568_92 (sequence is synthesized)
atgcacactgtaacccaggaagagggagaaggcatggagacaactgatacggagtctgtgtcttccgccagcacatacacacagtctttagagcagctgcttaattctcccgaaactaaa

SEQ ID NO: 17345 - DNA, 120 bp, Artificial Sequence
  ENSG00000015568_93 (sequence is synthesized)
cttggtctgttactctgtctaaatatgttcttcttctttaatttcactgtcttatttaattactattactctaaggtacatatgcttttttgggctgctccaataaaatttctttcaata

SEQ ID NO: 17346 - DNA, 120 bp, Artificial Sequence
  ENSG00000015568_94 (sequence is synthesized)
atggttggatggatggatgggatggatggatggatgcttattaagtattaccttacacgatcactaggccatctgcagactgaggagcaatgagagccagtccaagttccaaaactgaag

SEQ ID NO: 17347 - DNA, 78 bp, Artificial Sequence
  ENSG00000015568_95 (sequence is synthesized)
aagcatccagcacaggagaaagatgtagcttgggaggctaggccagtctcgccttttcaggcacctaccagattaagg

SEQ ID NO: 17348 - DNA, 120 bp, Artificial Sequence
  ENSG00000015568_96 (sequence is synthesized)
tccccagcccactgactcaaatgttaatccctttggcaacaccctcacagacaacactcggattaatactttgcatcctttaatccaatcaggttgacacccagtattaaccatcacact

SEQ ID NO: 17349 - DNA, 120 bp, Artificial Sequence
  ENSG00000015568_97 (sequence is synthesized)
gttgacacccagtattaaccatcacactgtccaaatggaaaaattattaaacaaatcttttttaaaataaaatgctagctcttgccctaggcttgaaccataaataagtggtgggaagtt

SEQ ID NO: 17350 - DNA, 120 bp, Artificial Sequence
  ENSG00000015568_98 (sequence is synthesized)
tatagtcacaaataggtggtgggtattagaaagcaggataaactatcctctcacccttccaagaaactgacagtttcagtttattcctcttgatgaagtaatgctaaatttttgtagtga

SEQ ID NO: 17351 - DNA, 120 bp, Artificial Sequence
  ENSG00000015568_99 (sequence is synthesized)
tgttttggtatattttattacttgtaattaatattactgttcaaaatttagggggaatctgtcatcttcctgaaacttcagaatcacctggagtaagggtcatttgtattcatggtcact

SEQ ID NO: 17352 - DNA, 120 bp, Artificial Sequence
  ENSG00000015568_100 (sequence is synthesized)
gaccacgtggggtagaaactgcaagtcatggttccttcaggcaaagttaatagtggtgacacggaggcatcatgatagagcagcagactccagaagccaatttgactttgtgatttctga

SEQ ID NO: 17353 - DNA, 120 bp, Artificial Sequence
  ENSG00000015568_101 (sequence is synthesized)
aaaaattacctgtcaactgtgagcctgtttcatcatctgtaaagtttgaataatgatacctaccccgcctgatagaagattcttatgagggaacatgatacgtgaccagtaaatgttaat

SEQ ID NO: 17354 - DNA, 120 bp, Artificial Sequence
  ENSG00000015568_102 (sequence is synthesized)
gctttccttatacgtgaaatgacataaaatcttggaatattaatagatgggaagaagatgtgtaataaaactgtctataaacacaattctgacaaatttcagaactgggattcatagggc

SEQ ID NO: 17355 - DNA, 120 bp, Artificial Sequence
  ENSG00000015568_103 (sequence is synthesized)
tttattcagttagattacatgctttacaacagagatactgttttatttgtgtcacctacaacatataatctgttgattgaggtatgctgaatagatgaatggcaaagaaagcagacctat

SEQ ID NO: 17356 - DNA, 120 bp, Artificial Sequence
  ENSG00000015568_104 (sequence is synthesized)
aaaatatcacatagtaagatatttatatttagatttttcttatttagaatcttcatctgtaatgtatgattttgaaaattaattcttggaacaacatcttgcagagcctccattatggca

SEQ ID NO: 17357 - DNA, 120 bp, Artificial Sequence
  ENSG00000015568_105 (sequence is synthesized)
ataaaccccagggctcattcttgagctgctcctgcatagatctcgtcctgttcaacacaccaaagattgacagctgaactgagagaccatcacccacagacacaactggccactgggtgg

SEQ ID NO: 17358 - DNA, 120 bp, Artificial Sequence
  ENSG00000015568_106 (sequence is synthesized)
tgcacaagtcagacagaactgaatagtcctgtgaagactctggacactgaactgactttggaaccagactgcagaatggaggggtgggaacttgtggcttgaacctaatcaggtttcatt

SEQ ID NO: 17359 - DNA, 120 bp, Artificial Sequence
  ENSG00000015568_107 (sequence is synthesized)
aaggttttctatagataagatcatgtcaagacaccctcagaccacagggcggcgccacgagcccggccgagtgcagctggagcgccgacgtcgccgaggatacacagtgctgaggcagaa

SEQ ID NO: 17360 - DNA, 120 bp, Artificial Sequence
  ENSG00000015568_108 (sequence is synthesized)
gattatttacaggttcacaaaacagctttgtggcactgaaagggcgagagccaagatctcctgatttctgttcctgtgttcatagattctttttccttaataaaagtaaacatatatcaa

SEQ ID NO: 17361 - DNA, 120 bp, Artificial Sequence
  ENSG00000015568_109 (sequence is synthesized)
aattacttttcaatagcaaaccttaagctcaggtgtttgtgtttcctttaacatttttcttttaaaaagtgtattaaaacctttctgagcatctactgtcttattaggcattgttatact

SEQ ID NO: 17362 - DNA, 120 bp, Artificial Sequence
  ENSG00000015568_110 (sequence is synthesized)
ttataagtgacatctcatttacccttctggaataattaatattttagggattttacagtttagtagctgtaaactaagtagagctaagatttacattaagttctgtctgatatacaattt

SEQ ID NO: 17363 - DNA, 120 bp, Artificial Sequence
  ENSG00000015568_111 (sequence is synthesized)
ttgcttcattaagtgaaaattacctacaggatgacaatttagggatattttaaagaagagttttctgataactattgtctgaaagtagaagggattgtattttgagatagtaaggttttc

SEQ ID NO: 17364 - DNA, 120 bp, Artificial Sequence
  ENSG00000015592_0 (sequence is synthesized)
gaggaagagagcagctcgcttctaactggactgcacgttggtgacagcgtcccaagctggtgacagacccactctgtaactttcagctagattcagccaccagatcccagaaacatgacc

SEQ ID NO: 17365 - DNA, 120 bp, Artificial Sequence
  ENSG00000015592_1 (sequence is synthesized)
cttgctgcctacaaagagaagatgaaggagctcccgctggtgtccttgttctgctcctgcttcctggccgatcccctgaataagtcgtcctacaaatatgaaggctggtgtgggagacag

SEQ ID NO: 17366 - DNA, 120 bp, Artificial Sequence
  ENSG00000015592_2 (sequence is synthesized)
tgtaggaggaaggatgaaagccagcggaaagacagtgctgactggagagaaagaagagctcaggcagacacggtggacctgaattggtgcgtcatttccgacatggaagtcatcgagctg

SEQ ID NO: 17367 - DNA, 120 bp, Artificial Sequence
  ENSG00000015592_3 (sequence is synthesized)
aacaaatgcacctcgggccaatcctttgaagtcatcctgaagccaccctcctttgatggggttcccgagttcaacgcctccctgccaaggcggcgagacccatccctggaagagatccag

SEQ ID NO: 17368 - DNA, 120 bp, Artificial Sequence
  ENSG00000015592_4 (sequence is synthesized)
aagaaactagaagcggctgaggagcgaaggaagtaccaggaagcggagctcctgaaacacctagcagagaaacgggaacatgagagagaggtgatccaaaaggccattgaggaaaacaac

SEQ ID NO: 17369 - DNA, 120 bp, Artificial Sequence
  ENSG00000015592_5 (sequence is synthesized)
aacttcatcaagatggctaaggaaaaactggcccagaagatggaatccaacaaggagaacagggaggcccacctcgccgccatgttggaacggctgcaagagaaggacaagcacgccgag

SEQ ID NO: 17370 - DNA, 120 bp, Artificial Sequence
  ENSG00000015592_6 (sequence is synthesized)
gaggtgcggaaaaacaaggagctgaaggaagaggcctccaggtaaagcctagaggccaaagaactttccaggtcagccggacagctccagcagctccacgttccaggcagcctcgcccgc

SEQ ID NO: 17371 - DNA, 120 bp, Artificial Sequence
  ENSG00000015592_7 (sequence is synthesized)
cggctgcgctcccagcactggggtttggggggaggggggtggccaaggggcgtttcctctgcttttggtgtttgtacatgttaagaattgaccagtgaagccatcctatttgtttccggg

SEQ ID NO: 17372 - DNA, 120 bp, Artificial Sequence
  ENSG00000015592_8 (sequence is synthesized)
gaacaatgacggggtgggagaggggagaggagagagtttgggaaagggagatggagaagaactcaaggacattgcaaccctgcccggcgcagatctgattttcacatctctacctggaca

SEQ ID NO: 17373 - DNA, 120 bp, Artificial Sequence
  ENSG00000015592_9 (sequence is synthesized)
ccaggcaccatgttgaggagagatgaaaaccagggcggtagaacttcagggtgaaggacagagtcctgggtggggcagcggctgcagggcgcaccagagaacccagccagaggggttgtg

SEQ ID NO: 17374 - DNA, 120 bp, Artificial Sequence
  ENSG00000015592_10 (sequence is synthesized)
agtaccagtggtgttgcttccaccctgcagcaggtgggatgaggtctgtgtgtgtgtgtgaaccatcattttttgatcatcatgaccaatgaaacattgactccaagtgtccagttcttt

SEQ ID NO: 17375 - DNA, 120 bp, Artificial Sequence
  ENSG00000015592_11 (sequence is synthesized)
atttcccaaatgtgtcctttgggtaattgttaaaaagttctcgaaacctggctttcatccatctgatggcagatgcccctttgcttccttaattctgccattcaagcatctggagcctgg

SEQ ID NO: 17376 - DNA, 120 bp, Artificial Sequence
  ENSG00000015592_12 (sequence is synthesized)
gtgaggtgggttgaatcaggccagcctttggcataattgaaaggttttctcttctgttttttaaaatcccctctgtgggctaatctttattggatagcatgcactaaattgatgagaaaa

SEQ ID NO: 17377 - DNA, 120 bp, Artificial Sequence
  ENSG00000015592_13 (sequence is synthesized)
gaaactcaatcttcctttcaatgaactgacatcctaatatggtccccaagatgcactgtaagaaggaatttgtcttagtcacaaccgttcagactgctgtaacaaaataccttagactaa

SEQ ID NO: 17378 - DNA, 120 bp, Artificial Sequence
  ENSG00000015592_14 (sequence is synthesized)
gtaattgataacagaaattgattgctcacagttttggaggctgggaagtccaatatcaaggtgccagcagattcagtgtctggtgagggcttgccatctgcttcaaagatgatgcctttt

SEQ ID NO: 17379 - DNA, 120 bp, Artificial Sequence
  ENSG00000015592_15 (sequence is synthesized)
tgctgcatcctcacatggcagaagggaagggcaaaagggcttccttgagccttttctttaaggcactaatcccattcatgaaggtggagtcctcatgatctcacctcttaaggccctatc

SEQ ID NO: 17380 - DNA, 120 bp, Artificial Sequence
  ENSG00000015592_16 (sequence is synthesized)
tcttaattctgtagtgtcgggattaggattcaacctgtatattgggggagacagcaacattcacaccatagcagaagtcctccatgctttgggggtttgagattctaggtagattagaaa

SEQ ID NO: 17381 - DNA, 120 bp, Artificial Sequence
  ENSG00000015592_17 (sequence is synthesized)
atacgagcaaggaaataaagtgtttgctagtagaaggcaaaggaggcatccagacccagcagtcttggtctccaggacactgaaccatggctggaaaagaagctctcctcctcccttccc

SEQ ID NO: 17382 - DNA, 120 bp, Artificial Sequence
  ENSG00000015592_18 (sequence is synthesized)
ctgcaaacatgagtgcaggggctgcctgtgttaaccgggtcccaggacctcttcccactctgctctgcacactgtgtagttttttacagctttgcaaataaaccctttggtatagccttt

SEQ ID NO: 17383 - DNA, 120 bp, Artificial Sequence
  ENSG00000015592_19 (sequence is synthesized)
tgggacatgctgttttccttctgcagcaagtatgcggggacctgctgatcatctcagggaggaagcagcctcaggcaaaaatcaggatctttttcttaggcaggatctttagagagttcc

SEQ ID NO: 17384 - DNA, 120 bp, Artificial Sequence
  ENSG00000015592_20 (sequence is synthesized)
gaaggatgatcagggaagtcagaggcaagaaataggaaccagactcagggtttccttgggggatattctgcacagttacacaattaaaatccttcattgccttagggagcatatatgtct

SEQ ID NO: 17385 - DNA, 120 bp, Artificial Sequence
  ENSG00000015592_21 (sequence is synthesized)
gattttctagaagaagcctgtctaatacaaaggagtagagatagacaagcaggtatgcattcctagcttcatccctgaatggattgatttgatggaaggaaagatgctttcttgagctct

SEQ ID NO: 17386 - DNA, 120 bp, Artificial Sequence
  ENSG00000015592_22 (sequence is synthesized)
tggctctaagtcacgggtatgatgagctgagattcccactgagcaggaaacatgattctctctaaacctcttgacacagacccagtgagtcacaggtctttccaatatgttgccttttgt

SEQ ID NO: 17387 - DNA, 120 bp, Artificial Sequence
  ENSG00000015592_23 (sequence is synthesized)
caataaatggaacggtgtcacctaaatatgagaaacatgaggccggggttggttctgtgtgtcagcagaataccggcccgttctgctgagaacacgctggcctcatttcctgagtctcaa

SEQ ID NO: 17388 - DNA, 120 bp, Artificial Sequence
  ENSG00000015592_24 (sequence is synthesized)
gacagtttccttcccagtgccgatgaaatcacagcgggtgagcccgagggtctgagctgcagtggtccagcctgggcactagggggaggccatgaaggtctgcatcaggcgccccccaga

SEQ ID NO: 17389 - DNA, 120 bp, Artificial Sequence
  ENSG00000015676_0 (sequence is synthesized)
agtcggcaggtctgaggcggcgctgtgtgtgtgaagcgtacctagggcgggaggcgacatggagacaggggcggccgagctgtatgaccaggcccttttgggcatcctgcagcacgtggg

SEQ ID NO: 17390 - DNA, 120 bp, Artificial Sequence
  ENSG00000015676_1 (sequence is synthesized)
caacgtccaggatttcctgcgcgttctctttggcttcctctaccgcaagacagacttctatcgcttgctgcgccacccatcggaccgcatgggcttcccgcccggggccgcgcaggcctt

SEQ ID NO: 17391 - DNA, 120 bp, Artificial Sequence
  ENSG00000015676_2 (sequence is synthesized)
ggtgctgcaggtattcaaaacctttgaccacatggcccgtcaggatgatgagaagagaaggcaggaacttgaagagaaaatcagaagaaaggaagaggaagaggccaagactgtgtcagc

SEQ ID NO: 17392 - DNA, 120 bp, Artificial Sequence
  ENSG00000015676_3 (sequence is synthesized)
tgctgcagctgagaaggagccagtcccagttccagtccaggaaatagagattgactccaccacagaattggatgggcatcaggaagtagagaaagtgcagcctccaggccctgtgaagga

SEQ ID NO: 17393 - DNA, 120 bp, Artificial Sequence
  ENSG00000015676_4 (sequence is synthesized)
aatggcccatggttcacaggaggcagaagctccaggagcagttgctggtgctgctgaagtccctagggaaccaccaattcttcccaggattcaggagcagttccagaaaaatcccgacag

SEQ ID NO: 17394 - DNA, 120 bp, Artificial Sequence
  ENSG00000015676_5 (sequence is synthesized)
ttacaatggtgctgtccgagagaactacacctggtcacaggactatactgacctggaggtcagggtgccagtacccaagcacgtggtgaagggaaagcaggtctcagtggcccttagcag

SEQ ID NO: 17395 - DNA, 120 bp, Artificial Sequence
  ENSG00000015676_6 (sequence is synthesized)
cagctccattcgtgtggccatgctggaggaaaatggggagcgcgtcctcatggaagggaagctcacccacaagatcaacactgagagttctctctggagtctcgagcccgggaagtgcgt

SEQ ID NO: 17396 - DNA, 120 bp, Artificial Sequence
  ENSG00000015676_7 (sequence is synthesized)
tttggtgaacctgagcaaggtgggcgagtattggtggaacgccatcctggagggagaagagcccatcgacattgacaagatcaacaaggagcgctccatggccaccgtggatgaggagga

SEQ ID NO: 17397 - DNA, 120 bp, Artificial Sequence
  ENSG00000015676_8 (sequence is synthesized)
acaggcggtgttggacaggcttacctttgactaccaccagaagctgcagggcaagccacagagccatgagctgaaagtccatgagatgctgaagaaggggtgggatgctgaaggttctcc

SEQ ID NO: 17398 - DNA, 120 bp, Artificial Sequence
  ENSG00000015676_9 (sequence is synthesized)
cttccgaggccagcgattcgaccctgccatgttcaacatctccccgggggctgtgcagttttaatgaccagaaggaaaggaaaccctcgccggtggggaggcagagccttatcctcggct

SEQ ID NO: 17399 - DNA, 120 bp, Artificial Sequence
  ENSG00000015676_10 (sequence is synthesized)
gcccttcttggctccctgcattccagggacttgctcgtcttgtttacccctagccatcctttctttcaagggtgaaccaggccttccaccctgaccttgcatctccagactgttccagag

SEQ ID NO: 17400 - DNA, 120 bp, Artificial Sequence
  ENSG00000015676_11 (sequence is synthesized)
aaggtgcggggccagctgctatgtggtggccgctgtggctgacactgagtgaaggtgtttgaaatgcaggagaggatatcccagcaaattgggatcacatgcttttgtctccacagcaac

SEQ ID NO: 17401 - DNA, 120 bp, Artificial Sequence
  ENSG00000015676_12 (sequence is synthesized)
cagccactgcaggcagcatgtctttcctcccctgctctctgcttgctgttgttttgacgctattctgcttgcatgtcttctggttgggatgtggagttgttgctggactctcaggcgaag

SEQ ID NO: 17402 - DNA, 120 bp, Artificial Sequence
  ENSG00000015676_13 (sequence is synthesized)
ctgaagtcattgaagtgtgtgaagctctgtgcttgcatgagggcaagcaaggaatggctgtgcctgaggctgctctgggaaactccttgccccttgacctcttttgagagcattcacgtg

SEQ ID NO: 17403 - DNA, 120 bp, Artificial Sequence
  ENSG00000015676_14 (sequence is synthesized)
gtcttcttgctcatccccttataaatgtgctttgcctgcctcagcctcatggtcagagcagtggagactggagccctgtttgcacgttctagttgttcggagaaagcctaggttctgggc

SEQ ID NO: 17404 - DNA, 120 bp, Artificial Sequence
  ENSG00000015676_15 (sequence is synthesized)
tcaggtccagatgcagcggggattctgttctctgactgtggcgaccttgctttggttcttgttgaagtgaaccaagcccggccaccacgcatggcatgctgtgcttggctccccataaga

SEQ ID NO: 17405 - DNA, 120 bp, Artificial Sequence
  ENSG00000015676_16 (sequence is synthesized)
cgtcctctttgggtgcacggtgtcaaagtgtgggcaggagtggagagctggtgccctcaggaggagaccacagcatgtccatcagctcagcagagctcgacagccacaagtcctgagaag

SEQ ID NO: 17406 - DNA, 120 bp, Artificial Sequence
  ENSG00000015676_17 (sequence is synthesized)
ctttgaccttgaagggcttctgggagaggaggaatttctgcatggggcgtgaaggcacactgtcccaccacaactgaaccagaagagagtgaagactcccctcttcccatcctctgtgcc

SEQ ID NO: 17407 - DNA, 120 bp, Artificial Sequence
  ENSG00000015676_18 (sequence is synthesized)
aggtgccagactgtgctccttggaacttatggcccaatcttacctgttctccagggactggtcactgcctcaggacccccaagcctatgccctgagccatggctgctgactgactccagc

SEQ ID NO: 17408 - DNA, 120 bp, Artificial Sequence
  ENSG00000015676_19 (sequence is synthesized)
caaggtgcaaagacgagattatgagacaggtcctcaggcctgtgttccaagtactcacaggggctctgggtgcccatcgccgggagtatggttcagctgccaccggcactgtccatttgc

SEQ ID NO: 17409 - DNA, 120 bp, Artificial Sequence
  ENSG00000015676_20 (sequence is synthesized)
ctgtctgtcaagctcagagcatggataagccacacagcagggcagtgcaccctggcaccatgcacggccagcaagaatcaaggcccgcagatgctaagagggcctattgtcaggggaagg

SEQ ID NO: 17410 - DNA, 120 bp, Artificial Sequence
  ENSG00000015676_21 (sequence is synthesized)
tccccgctcctgcacactctctatggatacttgggttgtgggggctctcttggagagtaagtttgtggtttgtttctggtttacagtggtggctgacaccccttgtaagaaagcattcct

SEQ ID NO: 17411 - DNA, 120 bp, Artificial Sequence
  ENSG00000015676_22 (sequence is synthesized)
gggaagtcttctgtgggtccaaacatgttgctccgatcatcacaggagagcaaaaggccctagataccccctttggaatgtgagagtcttgttgtctgatatttgccactgagctggtga

SEQ ID NO: 17412 - DNA, 120 bp, Artificial Sequence
  ENSG00000015676_23 (sequence is synthesized)
agcccctctaaagagatctcgaccctggggagcagaattcttgtcatctatgaggggtcctgagaaagacttgtcattttttttcctggagttcttcccattgaggtcctaggatttgca

SEQ ID NO: 17413 - DNA, 120 bp, Artificial Sequence
  ENSG00000015676_24 (sequence is synthesized)
caccactgtcccacaagagctttcctgcctaatgaaaggaggtcttgtggtgtgtgtctcctctcttctctatagttcccgagttggcccccattgcagcccccaccctgtgggtagtct

SEQ ID NO: 17414 - DNA, 120 bp, Artificial Sequence
  ENSG00000015676_25 (sequence is synthesized)
tccagaagtgatgcagtggtgtgagatgccctacaccttgttatttgggagactttgagagtcattcacttccatggtgactagtgtttgttttgcctgattttatattctgtgttgcat

SEQ ID NO: 17415 - DNA, 120 bp, Artificial Sequence
  ENSG00000015676_26 (sequence is synthesized)
ttctccccactccctgccctgctttaataaacagcaaaccaatatctaggaagaatgactgagggatagtattgggtattggccccatggcaggaacagccacttgcatctggtcccggt

SEQ ID NO: 17416 - DNA, 120 bp, Artificial Sequence
  ENSG00000015676_27 (sequence is synthesized)
gccacactgcggtgcttggtgtggttgtggagcctgtccctgcgcgccttgctcccgttgagccacgctgtctggtgggtgattctctgccctgagccaccaccctggactggcccagtc

SEQ ID NO: 17417 - DNA, 120 bp, Artificial Sequence
  ENSG00000015676_28 (sequence is synthesized)
tccagagctggcacaccctgcctgttttctctttttagacacaacagccgcagtttggccagccactaagtcccaccagctgaggtccgaggaaagcggggtgactcatttcccttgtcc

SEQ ID NO: 17418 - DNA, 120 bp, Artificial Sequence
  ENSG00000015676_29 (sequence is synthesized)
agggcccgaggagagtgaggtgtccagcctgcaaagctattccagctccttggtgttggtttgcaataaattggtatttaagcagttctgggtctgcgtgtgacatttgctgctgagaca

SEQ ID NO: 17419 - DNA, 120 bp, Artificial Sequence
  ENSG00000015676_30 (sequence is synthesized)
gttctgtctgtgcatggtcattattgttgcattctagccttgaggtcccaggccaacgtacacagcaaacaccagcatggggaattcttaggggttgtttcccatctggtctgaatgcac

SEQ ID NO: 17420 - DNA, 120 bp, Artificial Sequence
  ENSG00000015676_31 (sequence is synthesized)
tgggcaagatctcaatacagctttagaaatcctgtaagattttgaccagtggggagaaaaagaatgtagctatagatcttacatcctttcaaacaggttctggaattctgtagttactgg

SEQ ID NO: 17421 - DNA, 120 bp, Artificial Sequence
  ENSG00000015676_32 (sequence is synthesized)
aaagcttagggtgagtgcagagttgggaatgattccactgaagggccacctttgcccaccaggctccaaggccctccttggtctccaggtgcatacctgctgttaactttgctgagccct

SEQ ID NO: 17422 - DNA, 120 bp, Artificial Sequence
  ENSG00000015676_33 (sequence is synthesized)
atctccagcctcctctgaccctgctcacccctggggacaggacctaggggtgtgagaagtacttggctgaataaagactgtttcaaaggcaatccttagaattgcctagcatactcccag

SEQ ID NO: 17423 - DNA, 120 bp, Artificial Sequence
  ENSG00000015676_34 (sequence is synthesized)
ggccagaaataacccgccagaaaggagaggcgtatttgcccctgaagagtgcaggagggagaacagttgagaagtgttttgtgtggaaatgtgtccaagaggcgtcagctgctgcacaga

SEQ ID NO: 17424 - DNA, 120 bp, Artificial Sequence
  ENSG00000015676_35 (sequence is synthesized)
gaactcactgcccagaacactgcgcttggggaacagacctcacccccacctcaaatctgctctccactgggcctgttggcagccagctcagctggggaagggacagcatgactcgctttg

SEQ ID NO: 17425 - DNA, 120 bp, Artificial Sequence
  ENSG00000015676_36 (sequence is synthesized)
tcgatgaaaagcacgaagttgtcagcacagaacctggccagtccttgagaaactccctccttggtggtcagaggtcaagcagcccatgtggcccacggtcctgaagaactgggctatgtc

SEQ ID NO: 17426 - DNA, 120 bp, Artificial Sequence
  ENSG00000015676_37 (sequence is synthesized)
cctgaggctcctctctaccgtctgactgtggggtctggggaacaggcatttaaaccaggctgctgccctggggagtgcccactggacgccagggtgccccatagggacagggtcacaaag

SEQ ID NO: 17427 - DNA, 120 bp, Artificial Sequence
  ENSG00000015676_38 (sequence is synthesized)
ccctggggcttcccctgccagtcctggtgaggacagtgtggtcactatctcagagagacgaaaaatgaatattctgtcatttcagactaaactactcacccagctcacactaatatggat

SEQ ID NO: 17428 - DNA, 120 bp, Artificial Sequence
  ENSG00000015676_39 (sequence is synthesized)
cagctcacactaatatggatttgttaattttacctttttttttctttccaactttaggttcaagggttgttacatgggtaaattggatcataggggtttggtgtacagataattttgtca

SEQ ID NO: 17429 - DNA, 120 bp, Artificial Sequence
  ENSG00000015676_40 (sequence is synthesized)
cctgatatgtagtttttcagtcctcaccttcctcccactcggttttattttttagtactgaaagtttaacagattggtcttacctcagagggagggaagaaacccccccatcgctgggct

SEQ ID NO: 17430 - DNA, 120 bp, Artificial Sequence
  ENSG00000015676_41 (sequence is synthesized)
ccttggtgtgacaggggtctggtaggggttttcaatcccaccacccattcctccacaccaaatgcctgaagtccccactttgcacagggagacagcatcgtgccagggaagagaggtcag

SEQ ID NO: 17431 - DNA, 120 bp, Artificial Sequence
  ENSG00000015676_42 (sequence is synthesized)
gcccggctacccctcacaacttcctgcttccccctcagagggtgatggggagaccagagcccatggcaggatgaactgtcactgaacccagctggcacaggtctgccagaacactctggg

SEQ ID NO: 17432 - DNA, 120 bp, Artificial Sequence
  ENSG00000015676_43 (sequence is synthesized)
ggtatgcgctgggctttctgggtaaacccctggcaagctggcgtttgctgtcttctcagtgctgatggagataggcacacatggggtgtgggaatgtggccaccctcaggcaggttcacg

SEQ ID NO: 17433 - DNA, 120 bp, Artificial Sequence
  ENSG00000015676_44 (sequence is synthesized)
agggtactgtcaggcgctcaggtgtatgccgcctcctgtcaggcagggctgaggctattctccctggagaaggacagcttaggaaacacttgcaggaaagctgcctggacctgggaggtg

SEQ ID NO: 17434 - DNA, 120 bp, Artificial Sequence
  ENSG00000015676_45 (sequence is synthesized)
accctggccagcctccctgctgcctctctcagtcctaggccttcttccccagagctggtcagggcctgagggactttgtagtctaacccctcattgtgctacaatcacaggagtaagtaa

SEQ ID NO: 17435 - DNA, 120 bp, Artificial Sequence
  ENSG00000015676_46 (sequence is synthesized)
cactcccaaggccatgtggctggtgactcggggggcccaggtccaggatcctgccccatctgcaggccagtggttccttgtctcctatttgcttcttggagcagcctcctcataagccaa

SEQ ID NO: 17436 - DNA, 120 bp, Artificial Sequence
  ENSG00000015676_47 (sequence is synthesized)
cagctccttcacctgagcccagtcactttgcgctcctccccagaaccaaagagcaagaccatctgccccaggtacagtcctggccatgccacactctctgtggcatcatgaccaaggtga

SEQ ID NO: 17437 - DNA, 120 bp, Artificial Sequence
  ENSG00000015676_48 (sequence is synthesized)
gtggcagatactgaaatcatccagggccactgcaggccccattcccagtggactgttcatcaagggaccctgtctcaggccatctcagccaaccttgttgcccagcacaggtctggcaca

SEQ ID NO: 17438 - DNA, 120 bp, Artificial Sequence
  ENSG00000015676_49 (sequence is synthesized)
ttggagatgatctgtgttggatggggaaggcagagggaggatcctccagcattgatcacccatcaaaaccctcaacaacccagacattgccgctgcactgaccccatgctatgaggaggt

SEQ ID NO: 17439 - DNA, 120 bp, Artificial Sequence
  ENSG00000015676_50 (sequence is synthesized)
cactcaggctgttaggagcctgctgactcaggcattgggctggggccctgcctgccttgtctgcctgccagcggagcactgccccaagcccttcttactgcagagacaggctcttgcctc

SEQ ID NO: 17440 - DNA, 120 bp, Artificial Sequence
  ENSG00000015676_51 (sequence is synthesized)
ccagtgtgcactttgtgcaagacacaggcaggtaagggtctaccagaggacaggaagtgttgttggggcactgtggggtttggaggaggcccctctagcagggaaagcgagccctaacct

SEQ ID NO: 17441 - DNA, 120 bp, Artificial Sequence
  ENSG00000015676_52 (sequence is synthesized)
ctgctggactagggagtttaggaagctgctctggttcagggaactggggatccagataactggggatcaaggccatcttgtgaccccagtggtggtccctagtgggactgctgagctcca

SEQ ID NO: 17442 - DNA, 120 bp, Artificial Sequence
  ENSG00000015676_53 (sequence is synthesized)
gcctgagagttcatgaactcaacagtgattgcttgtgggtactaatgacccagtgtgtggagacctcatttaccaggtgtgcctagcctgcaggcaaatcccaaggcagtgacccttagg

SEQ ID NO: 17443 - DNA, 120 bp, Artificial Sequence
  ENSG00000015676_54 (sequence is synthesized)
gaagagacagcgtttggggtcatcaaaggctgggaaacccaggtacctgtcagggaatgggctacagactggagctaagccttaaggtggggaagattccagcacccctgagtgaccacc

SEQ ID NO: 17444 - DNA, 120 bp, Artificial Sequence
  ENSG00000015676_55 (sequence is synthesized)
tcttttggtaatgcaaagaagggattttgtgactccagggtgacatttctaagcttggcatcatgcagggtgggcttgggctcaatatgggtgactgttagtctagggctgtctcaatga

SEQ ID NO: 17445 - DNA, 120 bp, Artificial Sequence
  ENSG00000015676_56 (sequence is synthesized)
ggctgtccaggcagaaaggcttacacacctggcaggcagagggtctagagaggaaggggcaacaggcctaaggaggggacagccaggcaaggaggtagaataggccttgtctggacagtg

SEQ ID NO: 17446 - DNA, 120 bp, Artificial Sequence
  ENSG00000015676_57 (sequence is synthesized)
gtcacctgttaggtccacagcttgtcctccctggcctgaccagccaggtgaggagagatccaaaccatccacctgaaagcattcagggtgcctgatgacaagaccccagccactgtgggc

SEQ ID NO: 17447 - DNA, 120 bp, Artificial Sequence
  ENSG00000015676_58 (sequence is synthesized)
tctcatgtcctggtaggaaggtatacctaaagcaggtggacctggtagtggtggacgctgtctgcctccccggggcttgtctgtttatgccagaccgttttcccatttgcttccacctcc

SEQ ID NO: 17448 - DNA, 120 bp, Artificial Sequence
  ENSG00000015676_59 (sequence is synthesized)
agctcagagaggaatcaccttcacacctctgctaaaactaacccagctctgcacccaccattccccactgtgcaacacctgctactggagaaccctgccccctcaaatacacgtcatcct

SEQ ID NO: 17449 - DNA, 120 bp, Artificial Sequence
  ENSG00000015676_60 (sequence is synthesized)
cagggccctgcgatgtgctgtggtctccctgccaccattcaaggggccacagccaggtccagcctgtcttccctggcaccaggctctatgcagtgggggaaactcgggcacccctaaact

SEQ ID NO: 17450 - DNA, 120 bp, Artificial Sequence
  ENSG00000015676_61 (sequence is synthesized)
attctccagtgttctcaccagaggtggtcagccatgtgatggcaagagtcacttcttaagcttttgctatccccagaaacttaaagcaacaccaaccacacccaaaagtcaagtgatatc

SEQ ID NO: 17451 - DNA, 120 bp, Artificial Sequence
  ENSG00000015676_62 (sequence is synthesized)
cagacagcaacagtagagcattaactgagtgcagggccgtggtgactcctcgacactccaggctctcctgctggtaacctcccattggcagagccaggcactcagcaaagccctggacag

SEQ ID NO: 17452 - DNA, 120 bp, Artificial Sequence
  ENSG00000015676_63 (sequence is synthesized)
tcagcagcctcctgaacaggctctgctgtccccactcacgacttcagagcagctaggactcctgtgaccacccctgtcccctgttcccccccaccccgccccgccccgccaactgcctca

SEQ ID NO: 17453 - DNA, 120 bp, Artificial Sequence
  ENSG00000015676_64 (sequence is synthesized)
tctctgtcccaagataactgctctccagaattttccatgatatggtcattttaaaagttttttttttttttgagacagagtttttcctgtgttgcccagactggactcaaacctctgggc

SEQ ID NO: 17454 - DNA, 78 bp, Artificial Sequence
  ENSG00000015676_65 (sequence is synthesized)
gtaagtgtgcaccactgtgcctggcttgatggtgtcatttttcactgtacgtgtatttgtaaaccgtataaatcagta

SEQ ID NO: 17455 - DNA, 120 bp, Artificial Sequence
  ENSG00000015676_66 (sequence is synthesized)
tttgaagcgcggattggatgtcagcttattccgctgaggtgttcgctccggacgtcctgaggtttcagaagtagtaagccgactgttaagagccctactcagcacccgccagcgcgtacc

SEQ ID NO: 17456 - DNA, 120 bp, Artificial Sequence
  ENSG00000015676_67 (sequence is synthesized)
cctcacggtgctgggggccgctagtcagggagcgaaatccatgcaggccagacagaaggaaggacatttacagcaacagaaacgtgcatgccccagaactaccaaagacttgagctggcg

SEQ ID NO: 17457 - DNA, 120 bp, Artificial Sequence
  ENSG00000015676_68 (sequence is synthesized)
cccaggtcaaagactgtcaatgtagtgcttattaaaatttctatttgagcttaattccgtaccctccaggttaagtttattgtatgttggaaacgctgtcaatactcattcagtgaagtt

SEQ ID NO: 17458 - DNA, 120 bp, Artificial Sequence
  ENSG00000015676_69 (sequence is synthesized)
tgccatctccatggactgagaggtcgtgatagccctgccttaaaacactggccttgactctcctgccttccgttgggtgaactcagtgcagatcatggagcaggtcacgatgctctcaag

SEQ ID NO: 17459 - DNA, 120 bp, Artificial Sequence
  ENSG00000015676_70 (sequence is synthesized)
attagcatttagatgcatttaaccatagactgggtaagatcaccaaggcagtgagggtggatggaggagacaaacctgagagcattccaggagcccttgtgaccggtgcagtaacccctc

SEQ ID NO: 17460 - DNA, 120 bp, Artificial Sequence
  ENSG00000015676_71 (sequence is synthesized)
gttttaggtgactggattcacatcctcgctatgccgcttcctgaatgtattaccttgaacaagcagtataacctttctgtgtctcagttttcttctctataaaatgtaggtgataataat

SEQ ID NO: 17461 - DNA, 120 bp, Artificial Sequence
  ENSG00000015676_72 (sequence is synthesized)
ggtgatctgagtgggcctgatctatcagctgaaagcctgaagagcgcagcagagctcccctgaagtagaagaaatttctccgatggacagcagctgcactcagtttctggagagttccac

SEQ ID NO: 17462 - DNA, 120 bp, Artificial Sequence
  ENSG00000015676_73 (sequence is synthesized)
cagcaacaaacacaaaatttatttttcttcagctacaaacacccggtcacccccctttaaactacatcaggtcatgggtgagacccattgaagccccatccagtcctgagaggcaaagca

SEQ ID NO: 17463 - DNA, 120 bp, Artificial Sequence
  ENSG00000015676_74 (sequence is synthesized)
aagaacccaggtcacagcgatgaagtggacggccaggcctgtgtgctgtggggctcttccatggagcagggagccatgtcctataagtaccgcatgctaaccgattgcgccactggagcc

SEQ ID NO: 17464 - DNA, 120 bp, Artificial Sequence
  ENSG00000015676_75 (sequence is synthesized)
acaccatgtcatgatgtacctgtaacattcgcaacttgagtttcaaacactaaagtttctgaaacctccatctaatgagtttaaaaatggagtctccctgtgttgttcaggctggtctta

SEQ ID NO: 17465 - DNA, 120 bp, Artificial Sequence
  ENSG00000015676_76 (sequence is synthesized)
cctggtcacaggactatactgacctggaggtcagggtgccagtacccaagcacgtggtgaagggaaagcaggtcatgggtgagacccattgaagccccatccagtcctgagaggcaaagc

SEQ ID NO: 17466 - DNA, 120 bp, Artificial Sequence
  ENSG00000015676_77 (sequence is synthesized)
acttgagcttcacgtggttgtggaggtatgagagcatgagtgatgcactagtagtactggggccggctagcttgccctctgaaggtgcagccctggccgcctgtattacactagtgagcc

SEQ ID NO: 17467 - DNA, 120 bp, Artificial Sequence
  ENSG00000016082_0 (sequence is synthesized)
gagtctgccgccgccgcagcgcctccgctccgccaactccgccggcttaaattggactcctagatccgcgagggcgcggcgcagccgagcagcggctctttcagcattggcaaccccagg

SEQ ID NO: 17468 - DNA, 120 bp, Artificial Sequence
  ENSG00000016082_1 (sequence is synthesized)
ggccaatatttcccacttagccacagctccagcatcctctctgtgggctgttcaccaactgtacaaccaccatttcactgtggacattactccctcttacagatatgggagacatgggag

SEQ ID NO: 17469 - DNA, 120 bp, Artificial Sequence
  ENSG00000016082_2 (sequence is synthesized)
atccaccaaaaaaaaaacgtctgatttccctatgtgttggttgcggcaatcagattcacgatcagtatattctgagggtttctccggatttggaatggcatgcggcatgtttgaaatgtg

SEQ ID NO: 17470 - DNA, 120 bp, Artificial Sequence
  ENSG00000016082_3 (sequence is synthesized)
cggagtgtaatcagtatttggacgagagctgtacatgctttgttagggatgggaaaacctactgtaaaagagattatatcaggttgtacgggatcaaatgcgccaagtgcagcatcggct

SEQ ID NO: 17471 - DNA, 120 bp, Artificial Sequence
  ENSG00000016082_4 (sequence is synthesized)
tcagcaagaacgacttcgtgatgcgtgcccgctccaaggtgtatcacatcgagtgtttccgctgtgtggcctgcagccgccagctcatccctggggacgaatttgcgcttcgggaggacg

SEQ ID NO: 17472 - DNA, 120 bp, Artificial Sequence
  ENSG00000016082_5 (sequence is synthesized)
gtctcttctgccgagcagaccacgatgtggtggagagggccagtctaggcgctggcgacccgctcagtcccctgcatccagcgcggccactgcaaatggcagcggagcccatctccgcca

SEQ ID NO: 17473 - DNA, 120 bp, Artificial Sequence
  ENSG00000016082_6 (sequence is synthesized)
ggcagccagccctgcggccccacgtccacaagcagccggagaagaccacccgcgtgcggactgtgctgaacgagaagcagctgcacaccttgcggacctgctacgccgcaaacccgcggc

SEQ ID NO: 17474 - DNA, 120 bp, Artificial Sequence
  ENSG00000016082_7 (sequence is synthesized)
cagatgcgctcatgaaggagcaactggtagagatgacgggcctcagtccccgtgtgatccgggtctggtttcaaaacaagcggtgcaaggacaagaagcgaagcatcatgatgaagcaac

SEQ ID NO: 17475 - DNA, 120 bp, Artificial Sequence
  ENSG00000016082_8 (sequence is synthesized)
tccagcagcagcagcccaatgacaaaactaatatccaggggatgacaggaactcccatggtggctgccagtccagagagacacgacggtggcttacaggctaacccagtggaagtacaaa

SEQ ID NO: 17476 - DNA, 120 bp, Artificial Sequence
  ENSG00000016082_9 (sequence is synthesized)
ctggcagtgaagtagcatcaatgtcctctcaacttccagatacacctaacagcatggtagccagtcctattgaggcatgaggaacattcattctgtattttttttccctgttggagaaag

SEQ ID NO: 17477 - DNA, 120 bp, Artificial Sequence
  ENSG00000016082_10 (sequence is synthesized)
tgggaaattataatgtcgaactctgaaacaaaagtatttaacgacccagtcaatgaaaactgaatcaagaaatgaatgctccatgaaatgcacgaagtctgttttaatgacaaggtgata

SEQ ID NO: 17478 - DNA, 120 bp, Artificial Sequence
  ENSG00000016082_11 (sequence is synthesized)
tggtagcaacactgtgaagacaatcatgggattttactagaattaaacaacaaacaaaacgcaaaacccagtatatgctattcaatgatcttagaagtactgaaaaaaaaagacgttttt

SEQ ID NO: 17479 - DNA, 120 bp, Artificial Sequence
  ENSG00000016082_12 (sequence is synthesized)
aaaacgtagaggatttatattcaaggatctcaaagaaagcattttcatttcactgcacatctagagaaaaacaaaaatagaaaattttctagtccatcctaatctgaatggtgctgtttc

SEQ ID NO: 17480 - DNA, 120 bp, Artificial Sequence
  ENSG00000016082_13 (sequence is synthesized)
tatattggtcattgccttgccaaacaggagctccagcaaaagcgcaggaagagagactggcctccttggctgaaagagtcctttcaggaaggtggagctgcattggtttgatatgtttaa

SEQ ID NO: 17481 - DNA, 120 bp, Artificial Sequence
  ENSG00000016082_14 (sequence is synthesized)
agttgactttaacaaggggttaattgaaatcctgggtctcttggcctgtcctgtagctggtttattttttactttgccccctccccactttttttgagatccatcctttatcaagaagtc

SEQ ID NO: 17482 - DNA, 120 bp, Artificial Sequence
  ENSG00000016082_15 (sequence is synthesized)
tgaagcgactataaaggtttttgaattcagatttaaaaaccaacttataaagcattgcaacaaggttacctctattttgccacaagcgtctcgggattgtgtttgacttgtgtctgtcca

SEQ ID NO: 17483 - DNA, 120 bp, Artificial Sequence
  ENSG00000016082_16 (sequence is synthesized)
agaacttttcccccaaagatgtgtatagttattggttaaaatgactgttttctctctctatggaaataaaaaggaaaaaaaaaaaggaaactttttttgtttgctcttgcattgcaaaaa

SEQ ID NO: 17484 - DNA, 120 bp, Artificial Sequence
  ENSG00000016082_17 (sequence is synthesized)
ttataaagtaatttattatttattgtcggaagacttgccacttttcatgtcatttgacattttttgtttgctgaagtgaaaaaaaaagataaaggttgtacggtggtctttgaattatat

SEQ ID NO: 17485 - DNA, 120 bp, Artificial Sequence
  ENSG00000016082_18 (sequence is synthesized)
gtctaattctatgtgttttgtctttttcttaaatattatgtgaaatcaaagcgccatatgtagaattatatcttcaggactatttcactaataaacatttggcatagataaataaataaa

SEQ ID NO: 17486 - DNA, 120 bp, Artificial Sequence
  ENSG00000016082_19 (sequence is synthesized)
cagcagcagcccaatgacaaaactgctaacccagtggaagtacaaagttaccagccaccttggaaagtactgagcgacttcgccttgcagagtgacatagatcagcctgcttttcagcaa

SEQ ID NO: 17487 - DNA, 120 bp, Artificial Sequence
  ENSG00000016082_20 (sequence is synthesized)
ggtgtgtaaacgcaagattctagagaaggagagcccacttcaggagtatctttactgctatggaaatagtattttgctcaattgcacacaggcttgcatgtgcctaattctggatacaca

SEQ ID NO: 17488 - DNA, 85 bp, Artificial Sequence
  ENSG00000016082_21 (sequence is synthesized)
attgcacacaggcttgcatgtgcctaattctggatacacacatgtgtagaaggaactaatcatttttaccttctcttcactctct

SEQ ID NO: 17489 - DNA, 120 bp, Artificial Sequence
  ENSG00000016082_22 (sequence is synthesized)
ggacagttagatttccacatctctccttggagaagcaggatgcctcctcctgttatgtggatcttttcctctctcttccattctttctgttcgtaggaatgccccagcttctgttattcc

SEQ ID NO: 17490 - DNA, 120 bp, Artificial Sequence
  ENSG00000016391_0 (sequence is synthesized)
ctcgcctgctggggctcggagggatgggccgtgtccgagcgctggcggagcacgggccgccgcggcgcgcgcctacccccgcgcacacgtgcatgcagtgagccaggtgcatcagctgca

SEQ ID NO: 17491 - DNA, 120 bp, Artificial Sequence
  ENSG00000016391_1 (sequence is synthesized)
tgcacccgccctcgggcttcgcgcgcctccgctggagcccagctagcctcgcggctccggggccgaccgggtcggaactgctgcgtccccattccggacgcagagagcgcgcggggcgcc

SEQ ID NO: 17492 - DNA, 120 bp, Artificial Sequence
  ENSG00000016391_2 (sequence is synthesized)
ccgccggttaaagtgccgcggggcaggggccgggccgcggccacccgctcctcccgctccggtcccgactgtcgggctctcggccgagtcgccccggacaatcacaaagagtgtgtaggc

SEQ ID NO: 17493 - DNA, 120 bp, Artificial Sequence
  ENSG00000016391_3 (sequence is synthesized)
cagccccggtcacagagtgcaccgtatcctgtcacttctggatgtgagggagaagtgagtcatctcattcccctccgtggatcagaggacttggactagatagaagcatgtggtgtctcc

SEQ ID NO: 17494 - DNA, 120 bp, Artificial Sequence
  ENSG00000016391_4 (sequence is synthesized)
tacgaggcctgggccggcctggagccctggcacggggagccctggggcagcagcaatccctgggtgcccgggccctggccagcgcaggctctgagagccgggacgagtacagctatgtgg

SEQ ID NO: 17495 - DNA, 120 bp, Artificial Sequence
  ENSG00000016391_5 (sequence is synthesized)
gtggtggtgggcgcgggctcggcgggctgcgtgctggctgggaggctcacggaggaccccgccgagcgcgtgctgctgctggaggccgggcccaaggacgtgctcgcggggagcaagcgg

SEQ ID NO: 17496 - DNA, 120 bp, Artificial Sequence
  ENSG00000016391_6 (sequence is synthesized)
cgtggaagatccacatgcccgcggccctggtggccaacctgtgcgacgacaggtacaactggtgctaccacacagaggtgcagcggggcctggacggccgcgtgctgtactggccacgcg

SEQ ID NO: 17497 - DNA, 120 bp, Artificial Sequence
  ENSG00000016391_7 (sequence is synthesized)
gccgcgtctggggtggctcctcatccctcaatgccatggtctacgtccgtgggcacgccgaggactacgagcgctggcagcgccagggcgcccgcggctgggactacgcgcactgcctgc

SEQ ID NO: 17498 - DNA, 120 bp, Artificial Sequence
  ENSG00000016391_8 (sequence is synthesized)
cctacttccgcaaggcgcagggccacgagctgggcgccagccggtaccggggcgccgatggcccgctgcgggtgtcccggggcaagaccaaccacccgctgcactgcgcattcctggagg

SEQ ID NO: 17499 - DNA, 120 bp, Artificial Sequence
  ENSG00000016391_9 (sequence is synthesized)
ccacgcagcaggccggctacccgctcaccgaggacatgaatggcttccagcaggagggcttcggctggatggacatgaccatccatgaaggcaaacggtggagcgcggcctgtgcctacc

SEQ ID NO: 17500 - DNA, 120 bp, Artificial Sequence
  ENSG00000016391_10 (sequence is synthesized)
tgcacccagcactgagccgcaccaacctcaaggccgaggccgagacgcttgtgagcagggtgctatttgagggcacccgtgcagtgggcgtggagtatgtcaagaatggccagagccaca

SEQ ID NO: 17501 - DNA, 120 bp, Artificial Sequence
  ENSG00000016391_11 (sequence is synthesized)
gggcttatgccagcaaggaggtgattctgagtggaggtgccatcaactctccacagctgctcatgctctctggcatcgggaatgctgatgacctcaagaaactgggcatccctgtggtgt

SEQ ID NO: 17502 - DNA, 120 bp, Artificial Sequence
  ENSG00000016391_12 (sequence is synthesized)
gccacctacctggggttggccagaacctgcaagaccacctggagatctacattcagcaggcatgcacccgccctatcaccctccattcagcacagaagcccctgcggaaggtctgcattg

SEQ ID NO: 17503 - DNA, 120 bp, Artificial Sequence
  ENSG00000016391_13 (sequence is synthesized)
gtctggagtggctctggaaattcacaggggagggagccactgcccatctggaaacaggtgggttcatccgcagccagcctggggtcccccacccggacatccagttccatttcctgccat

SEQ ID NO: 17504 - DNA, 120 bp, Artificial Sequence
  ENSG00000016391_14 (sequence is synthesized)
cccaagtgattgaccacgggcgggtccccacccagcaggaggcttaccaggtacatgtggggcccatgcggggcacgagtgtgggctggctcaaactgagaagtgccaatccccaagacc

SEQ ID NO: 17505 - DNA, 120 bp, Artificial Sequence
  ENSG00000016391_15 (sequence is synthesized)
accctgtgatccagcccaactacttgtcaacagaaactgatattgaggatttccgtctgtgtgtgaagctcaccagagaaatttttgcacaggaagccctggctccgttccgagggaaag

SEQ ID NO: 17506 - DNA, 120 bp, Artificial Sequence
  ENSG00000016391_16 (sequence is synthesized)
agctccagccaggaagccacattcagtcagataaagagatagatgcctttgtgcgggcaaaagccgacagcgcctaccacccctcgtgcacctgtaagatgggccagccctccgatccca

SEQ ID NO: 17507 - DNA, 120 bp, Artificial Sequence
  ENSG00000016391_17 (sequence is synthesized)
ctgccgtggtggatccgcagacaagggtcctcggggtggaaaacctcagggtcgtcgatgcctccatcatgcctagcatggtcagcggcaacctgaacgcccccacaatcatgatcgcag

SEQ ID NO: 17508 - DNA, 120 bp, Artificial Sequence
  ENSG00000016391_18 (sequence is synthesized)
agaaggcagctgacattatcaaggggcagcctgcactctgggacaaagatgtccctgtctacaagcccaggacgctggccacccagcgctaagacagttgctgctggaggatgaccaggg

SEQ ID NO: 17509 - DNA, 120 bp, Artificial Sequence
  ENSG00000016391_19 (sequence is synthesized)
aagccccctgataagccaagagggccagcacagcccttgctcccaggctcctgcctgaaactatctagcacactaggacccaggtggtaccctactcagtggctgagaattggataaagt

SEQ ID NO: 17510 - DNA, 120 bp, Artificial Sequence
  ENSG00000016391_20 (sequence is synthesized)
cttgggaaatgagacaagtactgggcagtgaatccagctccttttccccagcctttccctgtgggccatttggggaaggccagcattcagcctgagatgttcctccctgcctcctggagg

SEQ ID NO: 17511 - DNA, 120 bp, Artificial Sequence
  ENSG00000016391_21 (sequence is synthesized)
gacagaaggggaggatggttaactcctgccgcatcctttttcttgtgttcacgtggcattctctaacccagggcagtggttccttcccaggccatgcacagaggctgggtgcctgccaga

SEQ ID NO: 17512 - DNA, 120 bp, Artificial Sequence
  ENSG00000016391_22 (sequence is synthesized)
cccacggagggttcgcgaaggaaggggcatcctccttcttgagctgcaagctttagctgaggcagtaagtcacacagtagttagttcagcctgggctggcacataagtccccagtgtccc

SEQ ID NO: 17513 - DNA, 120 bp, Artificial Sequence
  ENSG00000016391_23 (sequence is synthesized)
tgttgagaggggaaagttgcctgctggttgaaaaactggcttttcctttctcgctgcctaatttcactctcagagtgaggcaggtaactggggctccactgggtcactctgagagggttg

SEQ ID NO: 17514 - DNA, 86 bp, Artificial Sequence
  ENSG00000016391_24 (sequence is synthesized)
caggtaactggggctccactgggtcactctgagagggttgtggctctggttcttattaaaccagggccaggtgcagtcacttgagc

SEQ ID NO: 17515 - DNA, 64 bp, Artificial Sequence
  ENSG00000016391_25 (sequence is synthesized)
gctttagcccaggaggttgaggctcctgtgaaccctgatggcaccactgcactccagcctgggt

SEQ ID NO: 17516 - DNA, 90 bp, Artificial Sequence
  ENSG00000016391_26 (sequence is synthesized)
gtctctttttttggaccttattcaaggggagaggagtctggagggaatgccgcttggcttcactaccaaaggttttatgacttagcattt

SEQ ID NO: 17517 - DNA, 120 bp, Artificial Sequence
  ENSG00000016391_27 (sequence is synthesized)
cgcttggcttcactaccaaaggttttatgacttagcattttaaaaggttttccttttaccaagaaatgcagaaaccaagagcaaaccccacgtaccagatcactgattcctactgaagca

SEQ ID NO: 17518 - DNA, 120 bp, Artificial Sequence
  ENSG00000016391_28 (sequence is synthesized)
gctagcccgagaaaggactctctcatactggtcttgggaaatgacttggcagcctgagccatcccagcagtggacaaggatggttaattcttattctgtagacgtccacaggaacagact

SEQ ID NO: 17519 - DNA, 120 bp, Artificial Sequence
  ENSG00000016391_29 (sequence is synthesized)
aggatggaaaacacagttaagcacagccatgcaccctgtggctgtagaaatgcccctgtgtgaaagaaaaataaattcaagactggagttttggaggaaaaaaaatacaagtagcattta

SEQ ID NO: 17520 - DNA, 120 bp, Artificial Sequence
  ENSG00000016391_30 (sequence is synthesized)
caacagctctttgctctttaaatttcttaccattcaataaagtgatccagtcactcacatttgaactgagatgccttctccagactgttctgacaaggtaatgaaaataaaatgcacttg

SEQ ID NO: 17521 - DNA, 120 bp, Artificial Sequence
  ENSG00000016391_31 (sequence is synthesized)
gatttttccagacatccacatccaccgtcaagggctgggaagaaaagcattgttgcgtggaaacctgcagctatactaggcccagaataaggacgggaggaaattgggggattccaggct

SEQ ID NO: 17522 - DNA, 120 bp, Artificial Sequence
  ENSG00000016391_32 (sequence is synthesized)
gaggattggggcggcttacagactggggcggggggggggggcgtccgacagccacaagttagttttctgagaaaaaccttcgagagaggcagcaggaagaaacccatcacacctctcctt

SEQ ID NO: 17523 - DNA, 120 bp, Artificial Sequence
  ENSG00000016391_33 (sequence is synthesized)
ttaaaaatcttaagcagctcttgtttaatcttacctgtattttttaaaatttttgttcgaagagagggtcaagaaagaaaattctaaaccggccaagagacttatttctcctacggaggg

SEQ ID NO: 17524 - DNA, 120 bp, Artificial Sequence
  ENSG00000016391_34 (sequence is synthesized)
tccccacctgccccacagcagcagtccatggccatcagtcacctgggtctcggggctgcctgcaagagtgcagaaacaggagttcaggtgccagccccgtaacttggagggcctcgtgca

SEQ ID NO: 17525 - DNA, 120 bp, Artificial Sequence
  ENSG00000016391_35 (sequence is synthesized)
gctttcctgctggagcgtgtgtggattcaggggcaggggatagtcctggaccaaccatgactgtgctgacccttcttctctggaacaggtatggatatggcagggtgacagtcacttagt

SEQ ID NO: 17526 - DNA, 120 bp, Artificial Sequence
  ENSG00000016391_36 (sequence is synthesized)
tctaccatctctgtgtcccatgggtgtgtcagtgtctgagaccatggtgggttcagtctggtggctgtattttaaaataagcaaaacgtcatatggtaagaggagcccattggtgatgct

SEQ ID NO: 17527 - DNA, 120 bp, Artificial Sequence
  ENSG00000016391_37 (sequence is synthesized)
gctcaattgcacccaggcccttctttcactctcaaatacttagccatgttctacacaatcgcacaatttggccataaacaggaatgaggtttaaaagaaaagatggtaagtgtcacatgt

SEQ ID NO: 17528 - DNA, 120 bp, Artificial Sequence
  ENSG00000016391_38 (sequence is synthesized)
ccagaacctgagcgttcccctgccatgaagggagtctttcattcaccccaggaggagaggctgtcacctgaggaagccagcatgggggagaaaggcacttgctacaaagtggggtgcaca

SEQ ID NO: 17529 - DNA, 120 bp, Artificial Sequence
  ENSG00000016391_39 (sequence is synthesized)
gagggtacccccccatcttcagtctcatagggaattgggccccttggccaaaagcttgcagtacctaaaaacagagaaacgtgctttgcaaaaatggctcaaagagcacaacagaatgcg

SEQ ID NO: 17530 - DNA, 120 bp, Artificial Sequence
  ENSG00000016391_40 (sequence is synthesized)
ctgtccatgtgcccagtgctctcaggagccctgacctattgcagaagcctgtgttgaagccgctgcactagtagaaggcagctcctgatggaataggggataggggtgggctgtgtggga

SEQ ID NO: 17531 - DNA, 120 bp, Artificial Sequence
  ENSG00000016391_41 (sequence is synthesized)
gccaagagcatctggcagcctgactggagatggtgagttcctgaagcaggagttgtaggcacccaaacatctagtctttctgcttgtagcgaaggttgcaggcatcatctccacgaattc

SEQ ID NO: 17532 - DNA, 75 bp, Artificial Sequence
  ENSG00000016391_42 (sequence is synthesized)
tgcttgtagcgaaggttgcaggcatcatctccacgaattcaaatagattcttcaggctgaggtgggtggatcact

SEQ ID NO: 17533 - DNA, 60 bp, Artificial Sequence
  ENSG00000016391_43 (sequence is synthesized)
tacaggagaatcgcttgaacctgggtggcgcaggctgcagtgagccaagattgcaccact

SEQ ID NO: 17534 - DNA, 120 bp, Artificial Sequence
  ENSG00000016391_44 (sequence is synthesized)
gacagagtgagactgtctcaaaaaaaaacaacaaaaaaacagattcttctccacccaaccatgtcccgccactcagaagtggtttcatgcttctactgataagccaacttaacatcagat

SEQ ID NO: 17535 - DNA, 120 bp, Artificial Sequence
  ENSG00000016391_45 (sequence is synthesized)
tcatgcttctactgataagccaacttaacatcagatccaatacagattttttaaagataaaataccatctctactggacctgtttagtggctcaggctgccctcacaggacatccctgag

SEQ ID NO: 17536 - DNA, 120 bp, Artificial Sequence
  ENSG00000016391_46 (sequence is synthesized)
accaccctgtcactcttgatgttggaaccagggcccaggcctgctcctcattgtctcctgccctcctagtccccaggagaggaaaagaaatactgttttagagaaataacattttcaaca

SEQ ID NO: 17537 - DNA, 120 bp, Artificial Sequence
  ENSG00000016391_47 (sequence is synthesized)
aaacatccctggagtcagattttgagttggggtgggctaatcagggagtcggggctctctgcgtgatgtcagttctatggctaactggtttttctaaaccagccagctgcctatcaaaac

SEQ ID NO: 17538 - DNA, 120 bp, Artificial Sequence
  ENSG00000016391_48 (sequence is synthesized)
agtacaacttttctaggaaatgcaattggcaaagacacttacgatgctgagaagtacacaaggtgaaactgctccagtttttctcatagcagggtcagcaggaaagcaagtggtgcccct

SEQ ID NO: 17539 - DNA, 120 bp, Artificial Sequence
  ENSG00000016391_49 (sequence is synthesized)
ggtcccatctcacacaggtgagactgcaccgagaggtaacgtggccctcacagcccaccacgcctggccttcgcccaattctgaaacttcgtaggatagagctggaaagtgccacatggt

SEQ ID NO: 17540 - DNA, 120 bp, Artificial Sequence
  ENSG00000016391_50 (sequence is synthesized)
gaagcgagatccagctgtctgggtggatgtcggagtccataggctgagcagagatggttcttagtgaggttctcgctgccagttgacggtgaaatcatagctgccatttacattttgtga

SEQ ID NO: 17541 - DNA, 120 bp, Artificial Sequence
  ENSG00000016391_51 (sequence is synthesized)
gattatgaaaaacataagactaaagaaactaaatgtgttattcctgtggacacaaaaatgtgtgtttttcagatggggaggggaccaaaaaggaaaaacatttcatcttaaaactttcct

SEQ ID NO: 17542 - DNA, 120 bp, Artificial Sequence
  ENSG00000016391_52 (sequence is synthesized)
aagacaagggaaaacaaaaaaccatgctctacaacttcaaatttttcttacaaagaaaaatttaatattcgatgagaggttgaaccaggcttaaagcagacatactaggaaatggtgcag

SEQ ID NO: 17543 - DNA, 120 bp, Artificial Sequence
  ENSG00000016391_53 (sequence is synthesized)
cctgtaagaatgccagtttgtaagtactgactttggaaaagatcatcgcctctatcagacacttagggtcctggtctggcaattttggcctgatgtgatgccacaagacccaacagagag

SEQ ID NO: 17544 - DNA, 120 bp, Artificial Sequence
  ENSG00000016391_54 (sequence is synthesized)
agacacagagtccaggataatgttgacagtggtgtagccctttaggagaaatggcgctccctgcggctggtattaggttaccattggcaccgaaggaaccaggaggataagaatatccat

SEQ ID NO: 17545 - DNA, 120 bp, Artificial Sequence
  ENSG00000016391_55 (sequence is synthesized)
aatttcagagctgccctggcacagtacctgccctgtcggaggctctcactggcaaatgacagctctgtgcaaggagcactcccaagtataaaaattattacacagttttattctgaagaa

SEQ ID NO: 17546 - DNA, 120 bp, Artificial Sequence
  ENSG00000016391_56 (sequence is synthesized)
cattttgcattttaataaaaaaggatttatgtcaggaaagagtcatttacaaaccttgaagtgtttttgcctggatcagagtaagaatgtcttaagaagaggtttgtaaggtcttcataa

SEQ ID NO: 17547 - DNA, 120 bp, Artificial Sequence
  ENSG00000016391_57 (sequence is synthesized)
aaaaaaaaaaaaaaaaaaaaattaacaggttgtctgtatactattaaaaattttggaccaaaattgctacctatcatctatctttttgattgcagggaatccctgccaaggtaacctgac

SEQ ID NO: 17548 - DNA, 120 bp, Artificial Sequence
  ENSG00000016391_58 (sequence is synthesized)
gaatccctgccaaggtaacctgacagtcggcctaattctgttgacagaaaatgaagccttgacggttctaattatccaaaagtgggttttcatcaggacgtacagtcagagtgtgagtgc

SEQ ID NO: 17549 - DNA, 120 bp, Artificial Sequence
  ENSG00000016391_59 (sequence is synthesized)
attctaatgaaaacttcagccctcattcaattgcatataaaagccctcaaagagaacatacagtacagcagttttgtaaaaggcaacaatacgatttgtacagaccccgacactccaatc

SEQ ID NO: 17550 - DNA, 120 bp, Artificial Sequence
  ENSG00000016391_60 (sequence is synthesized)
ctatagatcaccacgttgctcctctgtccccagcaccccttatttcttaagcagcaccaccagtccccagaggacaagagcagctatatctcatccacctatgcatttctgcaccagcga

SEQ ID NO: 17551 - DNA, 120 bp, Artificial Sequence
  ENSG00000016391_61 (sequence is synthesized)
tgcaaaaaacaccctgggtgggccacagagaaaaccgtaactatggatacccaaggggcagagcagccagctggacctgctctgtaattcacttacttacttaccagagggtggttcaag

SEQ ID NO: 17552 - DNA, 120 bp, Artificial Sequence
  ENSG00000016391_62 (sequence is synthesized)
tcaaacaaacaaaaccaaagacagttgcaacccatggtggatccaaaggtacagtatcaaaatcatggaactcttgcccaaagaaaagactgcaaatagtcatctggtatatcttgtgga

SEQ ID NO: 17553 - DNA, 120 bp, Artificial Sequence
  ENSG00000016391_63 (sequence is synthesized)
aagatgataggtttatagtgactcaaaatattttagaaaaatttctgtagtgtcaagttctttcaaacttaaaattttaaccccagaggattttcgctgaataaatgagaattggctcta

SEQ ID NO: 17554 - DNA, 120 bp, Artificial Sequence
  ENSG00000016402_0 (sequence is synthesized)
tccagctgggtagccgggggagcgcgcgtgggggctccgcgagtcgctcgcccttggtttctggggaagcctgggggacgcggctgtggcggaggcgccctgggactcaggtcgcctgga

SEQ ID NO: 17555 - DNA, 120 bp, Artificial Sequence
  ENSG00000016402_1 (sequence is synthesized)
cgcctggagcgtggcacgcagagccccaggcgcggagctgaggccgcgcggccgcgcttggccccagcgggcgtgggactgagcagtctgctgccccccgacatgtgacccagccccgcc

SEQ ID NO: 17556 - DNA, 120 bp, Artificial Sequence
  ENSG00000016402_2 (sequence is synthesized)
gggctcccggccgcccggccctgcggccgctgccgctgccgccgctgctgctgttgctcctggcggcgccttggggacgggcagttccctgtgtctctggtggtttgcctaaacctgcaa

SEQ ID NO: 17557 - DNA, 120 bp, Artificial Sequence
  ENSG00000016402_3 (sequence is synthesized)
acatcaccttcttatccatcaacatgaagaatgtcctacaatggactccaccagagggtcttcaaggagttaaagttacttacactgtgcagtatttcatatatgggcaaaagaaatggc

SEQ ID NO: 17558 - DNA, 120 bp, Artificial Sequence
  ENSG00000016402_4 (sequence is synthesized)
tgaataaatcagaatgcagaaatatcaatagaacctactgtgatctttctgctgaaacttctgactacgaacaccagtattatgccaaagttaaggccatttggggaacaaagtgttcca

SEQ ID NO: 17559 - DNA, 120 bp, Artificial Sequence
  ENSG00000016402_5 (sequence is synthesized)
aatgggctgaaagtggacggttctatccttttttagaaacacaaattggcccaccagaggtggcactgactacagatgagaagtccatttctgttgtcctgacagctccagagaagtgga

SEQ ID NO: 17560 - DNA, 120 bp, Artificial Sequence
  ENSG00000016402_6 (sequence is synthesized)
agagaaatccagaagaccttcctgtttccatgcaacaaatatactccaatctgaagtataacgtgtctgtgttgaatactaaatcaaacagaacgtggtcccagtgtgtgaccaaccaca

SEQ ID NO: 17561 - DNA, 120 bp, Artificial Sequence
  ENSG00000016402_7 (sequence is synthesized)
cgctggtgctcacctggctggagccgaacactctttactgcgtacacgtggagtccttcgtcccagggccccctcgccgtgctcagccttctgagaagcagtgtgccaggactttgaaag

SEQ ID NO: 17562 - DNA, 120 bp, Artificial Sequence
  ENSG00000016402_8 (sequence is synthesized)
atcaatcatcagagttcaaggctaaaatcatcttctggtatgttttgcccgtatctattaccgtgtttcttttttctgtgatgggctattccatctaccgatatatccacgttggcaaag

SEQ ID NO: 17563 - DNA, 120 bp, Artificial Sequence
  ENSG00000016402_9 (sequence is synthesized)
agaaacacccagcaaatttgattttgatttatggaaatgaatttgacaaaagattctttgtgcctgctgaaaaaatcgtgattaactttatcaccctcaatatctcggatgattctaaaa

SEQ ID NO: 17564 - DNA, 120 bp, Artificial Sequence
  ENSG00000016402_10 (sequence is synthesized)
tttctcatcaggatatgagtttactgggaaaaagcagtgatgtatccagccttaatgatcctcagcccagcgggaacctgaggccccctcaggaggaagaggaggtgaaacatttagggt

SEQ ID NO: 17565 - DNA, 120 bp, Artificial Sequence
  ENSG00000016402_11 (sequence is synthesized)
atgcttcgcatttgatggaaattttttgtgactctgaagaaaacacggaaggtacttctctcacccagcaagagtccctcagcagaacaatacccccggataaaacagtcattgaatatg

SEQ ID NO: 17566 - DNA, 120 bp, Artificial Sequence
  ENSG00000016402_12 (sequence is synthesized)
aatatgatgtcagaaccactgacatttgtgcggggcctgaagagcaggagctcagtttgcaggaggaggtgtccacacaaggaacattattggagtcgcaggcagcgttggcagtcttgg

SEQ ID NO: 17567 - DNA, 120 bp, Artificial Sequence
  ENSG00000016402_13 (sequence is synthesized)
gcccgcaaacgttacagtactcatacacccctcagctccaagacttagaccccctggcgcaggagcacacagactcggaggaggggccggaggaagagccatcgacgaccctggtcgact

SEQ ID NO: 17568 - DNA, 120 bp, Artificial Sequence
  ENSG00000016402_14 (sequence is synthesized)
ccccaaactggcaggctgtgtattccttcgctgtccagcttcgaccaggattcagagggctgcgagccttctgagggggatgggctcggagaggagggtcttctatctagactctatgag

SEQ ID NO: 17569 - DNA, 120 bp, Artificial Sequence
  ENSG00000016402_15 (sequence is synthesized)
gagccggctccagacaggccaccaggagaaaatgaaacctatctcatgcaattcatggaggaatgggggttatatgtgcagatggaaaactgatgccaacacttccttttgccttttgtt

SEQ ID NO: 17570 - DNA, 120 bp, Artificial Sequence
  ENSG00000016402_16 (sequence is synthesized)
tcctgtgcaaacaagtgagtcacccctttgatcccagccataaagtacctgggatgaaagaagttttttccagtttgtcagtgtctgtgagaattacttatttcttttctctattctcat

SEQ ID NO: 17571 - DNA, 120 bp, Artificial Sequence
  ENSG00000016402_17 (sequence is synthesized)
agcacgtgtgtgattggttcatgcatgtaggtctcttaacaatgatggtgggcctctggagtccaggggctggccggttgttctatgcagagaaagcagtcaataaatgtttgccagact

SEQ ID NO: 17572 - DNA, 120 bp, Artificial Sequence
  ENSG00000016402_18 (sequence is synthesized)
gggtgcagaatttattcaggtgggtgtactctggcctcttggttcattattttcaaacaagcacacttgtacaattattttctgggtacttcccatatgcacatagcactgtaaaaaata

SEQ ID NO: 17573 - DNA, 120 bp, Artificial Sequence
  ENSG00000016402_19 (sequence is synthesized)
tttcccaaagatcactcattttataaataccactttttcagaattgggtttattgcgagcaggaggagatacttaaaacatgcacatataccaggttggtggtaagttggtcgcatgtga

SEQ ID NO: 17574 - DNA, 120 bp, Artificial Sequence
  ENSG00000016402_20 (sequence is synthesized)
aaacctcaactatttaatcatcatgattcatattttgagtgaatacatcaggcacagaccttcatgatatcacacactcttggctactttaagaggccatctttaatactttatgagtag

SEQ ID NO: 17575 - DNA, 120 bp, Artificial Sequence
  ENSG00000016402_21 (sequence is synthesized)
ttctggagtgtaaacataaacgagtattcttttgtagtcagaaaagtgtcctctcaataatttagtaggggcttattgtctctcaaaactaacctaaaagaaaatgacacattttataat

SEQ ID NO: 17576 - DNA, 120 bp, Artificial Sequence
  ENSG00000016402_22 (sequence is synthesized)
agaatattacatttatttctggaagtgtgttttcaaaaagatatttacatagtctgtaaactagaaagtgttaggtaaagctctaggttactgtgttactattataatattaaacattcg

SEQ ID NO: 17577 - DNA, 120 bp, Artificial Sequence
  ENSG00000016402_23 (sequence is synthesized)
aataggcagtcgttcaaagactctttggaatatctatgaatgaatatcctctattcttataatattaaaacccataagtaaatataggacatacaagagaaatgagttaaatgactatgt

SEQ ID NO: 17578 - DNA, 120 bp, Artificial Sequence
  ENSG00000016402_24 (sequence is synthesized)
aagggagagtttattaaaatttgatgaaatttactgtaggaactaaactatgccataaaacaatagctttctagttcatttccagtaactgttcccatctcctttaccacttgttaagaa

SEQ ID NO: 17579 - DNA, 120 bp, Artificial Sequence
  ENSG00000016402_25 (sequence is synthesized)
aattaaattcttcagtcacgctgctttaaaatgggacaaaatctattaagttgaaccatatataattgtggatatttggctgtttttaatctgacaagcagtaacttcatatggtttgcc

SEQ ID NO: 17580 - DNA, 120 bp, Artificial Sequence
  ENSG00000016402_26 (sequence is synthesized)
ttaatatatatttgttttagtcatgaactcataatccattgatgctctttcatgagaagagatatcacccatatttccttattgatattattggtacaggcagacaaccctggtaggaga

SEQ ID NO: 17581 - DNA, 120 bp, Artificial Sequence
  ENSG00000016402_27 (sequence is synthesized)
gatggattctggggtcatgacctttcgtgattatccgcaaatgcaaacagtttcagatctaatggtttaatttagggagtaattatattaatcagagtgttctgttattctcaatcttta

SEQ ID NO: 17582 - DNA, 120 bp, Artificial Sequence
  ENSG00000016402_28 (sequence is synthesized)
tagaaacgattctgctggttttgaagaacagatgtattacactaactgtaaaagtagttcaagagtgagaaagaataaattgttattaagagcaaaagaaaaataaagtgattgatgata

SEQ ID NO: 17583 - DNA, 120 bp, Artificial Sequence
  ENSG00000016402_29 (sequence is synthesized)
tgatgcattgattctctgcatgtgaatctgggaagtcatgatgttcaaaagatacgccgcacaaaataaagttctatatacagaaattttacagaactaacttcagatcttctttacaga

SEQ ID NO: 17584 - DNA, 120 bp, Artificial Sequence
  ENSG00000016402_30 (sequence is synthesized)
aactctgttgacaggatatggtgttgttattggagtgtagagagattgtacacttcactttgatgaagagctttcacttgcacagtctttctctgagaagaagaaaaaaatgtgagcaag

SEQ ID NO: 17585 - DNA, 120 bp, Artificial Sequence
  ENSG00000016402_31 (sequence is synthesized)
gacccaggacaatgaataagaactctatccatgtgttgtttagaattgttctcagcattggtccagttcctgaccatgctctgctgagctaaaggaaaagagtatattgaaactgttgct

SEQ ID NO: 17586 - DNA, 120 bp, Artificial Sequence
  ENSG00000016402_32 (sequence is synthesized)
gctcctggcggcgccttggggacgggcagggtattcccgtcctctcctgggtctttgggctaaggtctaaggactgctgggaagaccaccttagaagatgtatgtagttacctggatact

SEQ ID NO: 17587 - DNA, 120 bp, Artificial Sequence
  ENSG00000016402_33 (sequence is synthesized)
acctgctcgtaattgaaggattatctacaatgtcttctgtacaacgtgggcttactaaggttctatgactttgccactctcagaattccttttgatgtagaaactcagagttgacaggac

SEQ ID NO: 17588 - DNA, 120 bp, Artificial Sequence
  ENSG00000016402_34 (sequence is synthesized)
cttaaaagtcaccccacccagctgccactctcttgattgtcctctgcagcatcacttccaagtaatgacctgtctgctgtgtgagcacctctcatcacaggatactcactaccctgcacc

SEQ ID NO: 17589 - DNA, 120 bp, Artificial Sequence
  ENSG00000016402_35 (sequence is synthesized)
agtcccaggttcccgccaccaccgccgcggccgcgcggaggggcccctgtggatgccgcgtctcggccgccgggccccgcagtcctgcaagccgcgcgtcgcgagatccgcgctttaaaa

SEQ ID NO: 17590 - DNA, 120 bp, Artificial Sequence
  ENSG00000016402_36 (sequence is synthesized)
ccgatattgaactttaactgaccatcagaccggcctgaataccagaatctctttgcaatgcactcgcctcgctcattaccagaaggaggttttacctgcctagtgacctggttggtctgg

SEQ ID NO: 17591 - DNA, 120 bp, Artificial Sequence
  ENSG00000016490_0 (sequence is synthesized)
tgctaatgcttttggtacaaatggatgtggaatataattgaatattttcttgtttaaggggagcatgaagaggtgttgaggttatgtcaagcatctggcacagctgaaggcagatggaaa

SEQ ID NO: 17592 - DNA, 120 bp, Artificial Sequence
  ENSG00000016490_1 (sequence is synthesized)
tatttacaagtacgcaatttgagactaagatattgttatcattctcctattgaagacaagagcaatagtaaaacacatcaggtcagggggttaaagacctgtgataaaccacttccgata

SEQ ID NO: 17593 - DNA, 120 bp, Artificial Sequence
  ENSG00000016490_2 (sequence is synthesized)
agttggaaacgtgtgtctatattttcatatctgtatatatataatggtaaagaaagacaccttcgtaacccgcattttccaaagagagaaatcacagggagatgtacagcaatggggcca

SEQ ID NO: 17594 - DNA, 120 bp, Artificial Sequence
  ENSG00000016490_3 (sequence is synthesized)
tttaagagttctgtgttcatcttgattcttcaccttctagaaggggccctgagtaattcactcattcagctgaacaacaatggctatgaaggcattgtcgttgcaatcgaccccaatgtg

SEQ ID NO: 17595 - DNA, 120 bp, Artificial Sequence
  ENSG00000016490_4 (sequence is synthesized)
ccagaagatgaaacactcattcaacaaataaaggacatggtgacccaggcatctctgtatctgcttgaagctacaggaaagcgattttatttcaaaaatgttgccattttgattcctgaa

SEQ ID NO: 17596 - DNA, 120 bp, Artificial Sequence
  ENSG00000016490_5 (sequence is synthesized)
acatggaagacaaaggctgactatgtgagaccaaaacttgagacctacaaaaatgctgatgttctggttgctgagtctactcctccaggtaatgatgaaccctacactgagcagatgggc

SEQ ID NO: 17597 - DNA, 120 bp, Artificial Sequence
  ENSG00000016490_6 (sequence is synthesized)
aactgtggagagaagggtgaaaggatccacctcactcctgatttcattgcaggaaaaaagttagctgaatatggaccacaaggtagggcatttgtccatgagtgggctcatctacgatgg

SEQ ID NO: 17598 - DNA, 120 bp, Artificial Sequence
  ENSG00000016490_7 (sequence is synthesized)
ggagtatttgacgagtacaataatgatgagaaattctacttatccaatggaagaatacaagcagtaagatgttcagcaggtattactggtacaaatgtagtaaagaagtgtcagggaggc

SEQ ID NO: 17599 - DNA, 120 bp, Artificial Sequence
  ENSG00000016490_8 (sequence is synthesized)
agctgttacaccaaaagatgcacattcaataaagtaacaggactctatgaaaaaggatgtgagtttgttctccaatcccgccagacggagaaggcttctataatgtttgcacaacatgtt

SEQ ID NO: 17600 - DNA, 120 bp, Artificial Sequence
  ENSG00000016490_9 (sequence is synthesized)
gattctatagttgaattctgtacagaacaaaaccacaacaaagaagctccaaacaagcaaaatcaaaaatgcaatctccgaagcacatgggaagtgatccgtgattctgaggactttaag

SEQ ID NO: 17601 - DNA, 120 bp, Artificial Sequence
  ENSG00000016490_10 (sequence is synthesized)
aaaaccactcctatgacaacacagccaccaaatcccaccttctcattgctgcagattggacaaagaattgtgtgtttagtccttgacaaatctggaagcatggcgactggtaaccgcctc

SEQ ID NO: 17602 - DNA, 120 bp, Artificial Sequence
  ENSG00000016490_11 (sequence is synthesized)
aatcgactgaatcaagcaggccagcttttcctgctgcagacagttgagctggggtcctgggttgggatggtgacatttgacagtgctgcccatgtacaaaatgaactcatacagataaac

SEQ ID NO: 17603 - DNA, 120 bp, Artificial Sequence
  ENSG00000016490_12 (sequence is synthesized)
agtggcagtgacagggacacactcgccaaaagattacctgcagcagcttcaggagggacgtccatctgcagcgggcttcgatcggcatttactgtgattaggaagaaatatccaactgat

SEQ ID NO: 17604 - DNA, 120 bp, Artificial Sequence
  ENSG00000016490_13 (sequence is synthesized)
aaagtggtgccatcatccacacagtcgctttggggccctctgcagctcaagaactagaggagctgtccaaaatgacaggaggtttacagacatatgcttcagatcaagttcagaacaatg

SEQ ID NO: 17605 - DNA, 120 bp, Artificial Sequence
  ENSG00000016490_14 (sequence is synthesized)
gcctcattgatgcttttggggccctttcatcaggaaatggagctgtctctcagcgctccatccagcttgagagtaagggattaaccctccagaacagccagtggatgaatggcacagtga

SEQ ID NO: 17606 - DNA, 120 bp, Artificial Sequence
  ENSG00000016490_15 (sequence is synthesized)
tcgtggacagcaccgtgggaaaggacactttgtttcttatcacctggacaatgcagcctccccaaatccttctctgggatcccagtggacagaagcaaggtggctttgtagtggacaaaa

SEQ ID NO: 17607 - DNA, 120 bp, Artificial Sequence
  ENSG00000016490_16 (sequence is synthesized)
acaccaaaatggcctacctccaaatcccaggcattgctaaggttggcacttggaaatacagtctgcaagcaagctcacaaaccttgaccctgactgtcacgtcccgtgcgtccaatgcta

SEQ ID NO: 17608 - DNA, 120 bp, Artificial Sequence
  ENSG00000016490_17 (sequence is synthesized)
ccctgcctccaattacagtgacttccaaaacgaacaaggacaccagcaaattccccagccctctggtagtttatgcaaatattcgccaaggagcctccccaattctcagggccagtgtca

SEQ ID NO: 17609 - DNA, 120 bp, Artificial Sequence
  ENSG00000016490_18 (sequence is synthesized)
cagccctgattgaatcagtgaatggaaaaacagttaccttggaactactggataatggagcaggtgctgatgctactaaggatgacggtgtctactcaaggtatttcacaacttatgaca

SEQ ID NO: 17610 - DNA, 120 bp, Artificial Sequence
  ENSG00000016490_19 (sequence is synthesized)
cgaatggtagatacagtgtaaaagtgcgggctctgggaggagttaacgcagccagacggagagtgataccccagcagagtggagcactgtacatacctggctggattgagaatgatgaaa

SEQ ID NO: 17611 - DNA, 120 bp, Artificial Sequence
  ENSG00000016490_20 (sequence is synthesized)
tacaatggaatccaccaagacctgaaattaataaggatgatgttcaacacaagcaagtgtgtttcagcagaacatcctcgggaggctcatttgtggcttctgatgtcccaaatgctccca

SEQ ID NO: 17612 - DNA, 120 bp, Artificial Sequence
  ENSG00000016490_21 (sequence is synthesized)
tacctgatctcttcccacctggccaaatcaccgacctgaaggcggaaattcacgggggcagtctcattaatctgacttggacagctcctggggatgattatgaccatggaacagctcaca

SEQ ID NO: 17613 - DNA, 120 bp, Artificial Sequence
  ENSG00000016490_22 (sequence is synthesized)
agtatatcattcgaataagtacaagtattcttgatctcagagacaagttcaatgaatctcttcaagtgaatactactgctctcatcccaaaggaagccaactctgaggaagtctttttgt

SEQ ID NO: 17614 - DNA, 120 bp, Artificial Sequence
  ENSG00000016490_23 (sequence is synthesized)
ttaaaccagaaaacattacttttgaaaatggcacagatcttttcattgctattcaggctgttgataaggtcgatctgaaatcagaaatatccaacattgcacgagtatctttgtttattc

SEQ ID NO: 17615 - DNA, 120 bp, Artificial Sequence
  ENSG00000016490_24 (sequence is synthesized)
ctccacagactccgccagagacacctagtcctgatgaaacgtctgctccttgtcctaatattcatatcaacagcaccattcctggcattcacattttaaaaattatgtggaagtggatag

SEQ ID NO: 17616 - DNA, 120 bp, Artificial Sequence
  ENSG00000016490_25 (sequence is synthesized)
gagaactgcagctgtcaatagcctagggctgaatttttgtcagataaataaaataaatcattcatccttttttttgattataaaattttctaaaatgtattttagacttcctgtaggggg

SEQ ID NO: 17617 - DNA, 120 bp, Artificial Sequence
  ENSG00000016490_26 (sequence is synthesized)
cgatatactaaatgtatatagtacatttatactaaatgtattcctgtagggggcgatatactaaatgtattttagacttcctgtagggggcgataaaataaaatgctaaacaactgggta

SEQ ID NO: 17618 - DNA, 120 bp, Artificial Sequence
  ENSG00000016602_0 (sequence is synthesized)
gaacaaaccaacatttgagccaggaataactagagaggaacaatggggttattcagaggttttgttttcctcttagttctgtgcctgctgcaccagtcaaatacttccttcattaagctg

SEQ ID NO: 17619 - DNA, 120 bp, Artificial Sequence
  ENSG00000016602_1 (sequence is synthesized)
aataataatggctttgaagatattgtcattgttatagatcctagtgtgccagaagatgaaaaaataattgaacaaatagaggatatggtgactacagcttctacgtacctgtttgaagcc

SEQ ID NO: 17620 - DNA, 120 bp, Artificial Sequence
  ENSG00000016602_2 (sequence is synthesized)
acagaaaaaagattttttttcaaaaatgtatctatattaattcctgagaattggaaggaaaatcctcagtacaaaaggccaaaacatgaaaaccataaacatgctgatgttatagttgca

SEQ ID NO: 17621 - DNA, 120 bp, Artificial Sequence
  ENSG00000016602_3 (sequence is synthesized)
ccacctacactcccaggtagagatgaaccatacaccaagcagttcacagaatgtggagagaaaggcgaatacattcacttcacccctgaccttctacttggaaaaaaacaaaatgaatat

SEQ ID NO: 17622 - DNA, 120 bp, Artificial Sequence
  ENSG00000016602_4 (sequence is synthesized)
ggaccaccaggcaaactgtttgtccatgagtgggctcacctccggtggggagtgtttgatgagtacaatgaagatcagcctttctaccgtgctaagtcaaaaaaaatcgaagcaacaagg

SEQ ID NO: 17623 - DNA, 120 bp, Artificial Sequence
  ENSG00000016602_5 (sequence is synthesized)
tgttccgcaggtatctctggtagaaatagagtttataagtgtcaaggaggcagctgtcttagtagagcatgcagaattgattctacaacaaaactgtatggaaaagattgtcaattcttt

SEQ ID NO: 17624 - DNA, 120 bp, Artificial Sequence
  ENSG00000016602_6 (sequence is synthesized)
cctgataaagtacaaacagaaaaagcatccataatgtttatgcaaagtattgattctgttgttgaattttgtaacgaaaaaacccataatcaagaagctccaagcctacaaaacataaag

SEQ ID NO: 17625 - DNA, 120 bp, Artificial Sequence
  ENSG00000016602_7 (sequence is synthesized)
tgcaattttagaagtacatgggaggtgattagcaattctgaggattttaaaaacaccatacccatggtgacaccacctcctccacctgtcttctcattgctgaagatcagtcaaagaatt

SEQ ID NO: 17626 - DNA, 120 bp, Artificial Sequence
  ENSG00000016602_8 (sequence is synthesized)
gtgtgcttagttcttgataagtctggaagcatggggggtaaggaccgcctaaatcgaatgaatcaagcagcaaaacatttcctgctgcagactgttgaaaatggatcctgggtggggatg

SEQ ID NO: 17627 - DNA, 120 bp, Artificial Sequence
  ENSG00000016602_9 (sequence is synthesized)
gttcactttgatagtactgccactattgtaaataagctaatccaaataaaaagcagtgatgaaagaaacacactcatggcaggattacctacatatcctctgggaggaacttccatctgc

SEQ ID NO: 17628 - DNA, 120 bp, Artificial Sequence
  ENSG00000016602_10 (sequence is synthesized)
tctggaattaaatatgcatttcaggtgattggagagctacattcccaactcgatggatccgaagtactgctgctgactgatggggaggataacactgcaagttcttgtattgatgaagtg

SEQ ID NO: 17629 - DNA, 120 bp, Artificial Sequence
  ENSG00000016602_11 (sequence is synthesized)
aaacaaagtggggccattgttcattttattgctttgggaagagctgctgatgaagcagtaatagagatgagcaagataacaggaggaagtcatttttatgtttcagatgaagctcagaac

SEQ ID NO: 17630 - DNA, 120 bp, Artificial Sequence
  ENSG00000016602_12 (sequence is synthesized)
aatggcctcattgatgcttttggggctcttacatcaggaaatactgatctctcccagaagtcccttcagctcgaaagtaagggattaacactgaatagtaatgcctggatgaacgacact

SEQ ID NO: 17631 - DNA, 120 bp, Artificial Sequence
  ENSG00000016602_13 (sequence is synthesized)
gaacaataatggaaaatttcacagtggatgcaacttccaaaatggcctatctcagtattccaggaactgcaaaggtgggcacttgggcatacaatcttcaagccaaagcgaacccagaaa

SEQ ID NO: 17632 - DNA, 120 bp, Artificial Sequence
  ENSG00000016602_14 (sequence is synthesized)
cattaactattacagtaacttctcgagcagcaaattcttctgtgcctccaatcacagtgaatgctaaaatgaataaggacgtaaacagtttccccagcccaatgattgtttacgcagaaa

SEQ ID NO: 17633 - DNA, 120 bp, Artificial Sequence
  ENSG00000016602_15 (sequence is synthesized)
ttctacaaggatatgtacctgttcttggagccaatgtgactgctttcattgaatcacagaatggacatacagaagttttggaacttttggataatggtgcaggcgctgattctttcaaga

SEQ ID NO: 17634 - DNA, 120 bp, Artificial Sequence
  ENSG00000016602_16 (sequence is synthesized)
atgatggagtctactccaggtattttacagcatatacagaaaatggcagatatagcttaaaagttcgggctcatggaggagcaaacactgccaggctaaaattacggcctccactgaata

SEQ ID NO: 17635 - DNA, 120 bp, Artificial Sequence
  ENSG00000016602_17 (sequence is synthesized)
gagccgcgtacataccaggctgggtagtgaacggggaaattgaagcaaacccgccaagacctgaaattgatgaggatactcagaccaccttggaggatttcagccgaacagcatccggag

SEQ ID NO: 17636 - DNA, 120 bp, Artificial Sequence
  ENSG00000016602_18 (sequence is synthesized)
gtgcatttgtggtatcacaagtcccaagccttcccttgcctgaccaatacccaccaagtcaaatcacagaccttgatgccacagttcatgaggataagattattcttacatggacagcac

SEQ ID NO: 17637 - DNA, 120 bp, Artificial Sequence
  ENSG00000016602_19 (sequence is synthesized)
caggagataattttgatgttggaaaagttcaacgttatatcataagaataagtgcaagtattcttgatctaagagacagttttgatgatgctcttcaagtaaatactactgatctgtcac

SEQ ID NO: 17638 - DNA, 120 bp, Artificial Sequence
  ENSG00000016602_20 (sequence is synthesized)
caaaggaggccaactccaaggaaagctttgcatttaaaccagaaaatatctcagaagaaaatgcaacccacatatttattgccattaaaagtatagataaaagcaatttgacatcaaaag

SEQ ID NO: 17639 - DNA, 120 bp, Artificial Sequence
  ENSG00000016602_21 (sequence is synthesized)
tatccaacattgcacaagtaactttgtttatccctcaagcaaatcctgatgacattgatcctacacctactcctactcctactcctactcctgataaaagtcataattctggagttaata

SEQ ID NO: 17640 - DNA, 120 bp, Artificial Sequence
  ENSG00000016602_22 (sequence is synthesized)
tttctacgctggtattgtctgtgattgggtctgttgtaattgttaactttattttaagtaccaccatttgaaccttaacgaagaaaaaaatcttcaagtagacctagaagagagttttaa

SEQ ID NO: 17641 - DNA, 120 bp, Artificial Sequence
  ENSG00000016602_23 (sequence is synthesized)
aaaacaaaacaatgtaagtaaaggatatttctgaatcttaaaattcatcccatgtgtgatcataaactcataaaaataattttaagatgtcggaaaaggatactttgattaaataaaaac

SEQ ID NO: 17642 - DNA, 120 bp, Artificial Sequence
  ENSG00000016602_24 (sequence is synthesized)
actcatggatatgtaaaaactgtcaagattaaaatttaatagtttcatttatttgttattttatttgtaagaaatagtgatgaacaaagatcctttttcatactgatacctggttgtata

SEQ ID NO: 17643 - DNA, 120 bp, Artificial Sequence
  ENSG00000016602_25 (sequence is synthesized)
ttatttgatgcaacagttttctgaaatgatatttcaaattgcatcaagaaattaaaatcatctatctgagtagtcaaaatacaagtaaaggagagcaaataaacaacatttggaaaaaaa

SEQ ID NO: 17644 - DNA, 120 bp, Artificial Sequence
  ENSG00000016602_26 (sequence is synthesized)
tcaggtcagagttctcattccttgggttttcatgttcacttttgccacaagaaaaaaccatttggtggttataagttttgagttccatatttttctcaaagtaaatttttaattaaaatc

SEQ ID NO: 17645 - DNA, 120 bp, Artificial Sequence
  ENSG00000016602_27 (sequence is synthesized)
taaactttaatcttaaatagaaattacccttagctatagccaaattaattggtgaaataagagtaaaataaatggtgaaacagcagacatactgtttcttttcctattgccatgggtttg

SEQ ID NO: 17646 - DNA, 120 bp, Artificial Sequence
  ENSG00000016864_0 (sequence is synthesized)
gcctgcttggcgcgacgctctagcggttaccgctgcgggctggctgggcgtagtggggctgcgcggctgccacggagctagagggcaagtgtgctcggcccagcgtgcagggaacgcggg

SEQ ID NO: 17647 - DNA, 120 bp, Artificial Sequence
  ENSG00000016864_1 (sequence is synthesized)
cagacaacgggctgggctccggggcctgcggcgcgggcgctgagctggcagggcgggtcggggcgcgggctgcatccgcatctcctccatcgcctgcagtaagggcggccgcggcgagcc

SEQ ID NO: 17648 - DNA, 120 bp, Artificial Sequence
  ENSG00000016864_2 (sequence is synthesized)
agcctttgaggggaacgacttgtcggagccctaaccaggggtatctctgagcctggtgggatccccggagcgtcacatcactttccgatcacttcaaagtggttaaaaactaatatttat

SEQ ID NO: 17649 - DNA, 120 bp, Artificial Sequence
  ENSG00000016864_3 (sequence is synthesized)
atgacagaagaaaaagatgtcattccgtaaagtaaacatcatcatcttggtcctggctgttgctctcttcttactggttttgcaccataacttcctcagcttgagcagtttgttaaggaa

SEQ ID NO: 17650 - DNA, 120 bp, Artificial Sequence
  ENSG00000016864_4 (sequence is synthesized)
tgaggttacagattcaggaattgtagggcctcaacctatagactttgtcccaaatgctctccgacatgcagtagatgggagacaagaggagattcctgtggtcatcgctgcatctgaaga

SEQ ID NO: 17651 - DNA, 120 bp, Artificial Sequence
  ENSG00000016864_5 (sequence is synthesized)
caggcttgggggggccattgcagctataaacagcattcagcacaacactcgctccaatgtgattttctacattgttactctcaacaatacagcagaccatctccggtcctggctcaacag

SEQ ID NO: 17652 - DNA, 120 bp, Artificial Sequence
  ENSG00000016864_6 (sequence is synthesized)
tgattccctgaaaagcatcagatacaaaattgtcaattttgaccctaaacttttggaaggaaaagtaaaggaggatcctgaccagggggaatccatgaaacctttaacctttgcaaggtt

SEQ ID NO: 17653 - DNA, 120 bp, Artificial Sequence
  ENSG00000016864_7 (sequence is synthesized)
gatgatgtaattgtgcaaggtgatattcttgccctttacaatacagcactgaagccaggacatgcagctgcattttcagaagattgtgattcagcctctactaaagttgtcatccgtgga

SEQ ID NO: 17654 - DNA, 120 bp, Artificial Sequence
  ENSG00000016864_8 (sequence is synthesized)
gcaggaaaccagtacaattacattggctatcttgactataaaaaggaaagaattcgtaagctttccatgaaagccagcacttgctcatttaatcctggagtttttgttgcaaacctgacg

SEQ ID NO: 17655 - DNA, 120 bp, Artificial Sequence
  ENSG00000016864_9 (sequence is synthesized)
gaatggaaacgacagaatataactaaccaactggaaaaatggatgaaactcaatgtagaagagggactgtatagcagaaccctggctggtagcatcacaacacctcctctgcttatcgta

SEQ ID NO: 17656 - DNA, 120 bp, Artificial Sequence
  ENSG00000016864_10 (sequence is synthesized)
ttttatcaacagcactctaccatcgatcctatgtggaatgtccgccaccttggttccagtgctggaaaacgatattcacctcagtttgtaaaggctgccaagttactccattggaatgga

SEQ ID NO: 17657 - DNA, 120 bp, Artificial Sequence
  ENSG00000016864_11 (sequence is synthesized)
catttgaagccatggggaaggactgcttcatatactgatgtttgggaaaaatggtatattccagacccaacaggcaaattcaacctaatccgaagatataccgagatctcaaacataaag

SEQ ID NO: 17658 - DNA, 120 bp, Artificial Sequence
  ENSG00000016864_12 (sequence is synthesized)
tgaaacagaatttgaactgtaagcaagcatttctcaggaagtcctggaagatagcatgcgtgggaagtaacagttgctaggcttcaatgcctatcggtagcaagccatggaaaaagatgt

SEQ ID NO: 17659 - DNA, 120 bp, Artificial Sequence
  ENSG00000016864_13 (sequence is synthesized)
gtcagctaggtaaagatgacaaactgccctgtctggcagtcagcttcccagacagactatagactataaatatgtctccatctgccttaccaagtgttttcttactacaatgctgaatga

SEQ ID NO: 17660 - DNA, 120 bp, Artificial Sequence
  ENSG00000016864_14 (sequence is synthesized)
ctggaaagaagaactgatatggctagttcagctagctggtacagataattcaaaactgctgttggttttaattttgtaacctgtggcctgatctgtaaataaaacttacatttttcaata

SEQ ID NO: 17661 - DNA, 120 bp, Artificial Sequence
  ENSG00000016864_15 (sequence is synthesized)
gtgggatttatttgagtgcaagatcgttttctcagtggtggtggaagttgcctcatcgcaggcagatgttggggctttgtccgaacagctcccctctgccagcttctgtagataagggtt

SEQ ID NO: 17662 - DNA, 120 bp, Artificial Sequence
  ENSG00000016864_16 (sequence is synthesized)
gcggcgcctgcttggcgcgacgctctagcggttaccgctgcgggctggctgggcgtagtggggctgcgcggctgccacggagctagaggacagcagaccgaggacacggttgttaccaag

SEQ ID NO: 17663 - DNA, 120 bp, Artificial Sequence
  ENSG00000016864_17 (sequence is synthesized)
accaggctgttgccttggaagagcccagagcgtgtcaagggagacagccacatcacgccagaaatacatgacagctggattagccctgggagagggaggcccagatgtgggagctcaggg

SEQ ID NO: 17664 - DNA, 120 bp, Artificial Sequence
  ENSG00000016864_18 (sequence is synthesized)
ctgccacggagctagaggttacaatggctagaaatgtactccacacttttgatatcgattggattttgtgaatttttgtagctttttctgtgctgtgggtttgtcaagtgaatttggata

SEQ ID NO: 17665 - DNA, 120 bp, Artificial Sequence
  ENSG00000016864_19 (sequence is synthesized)
gaatccatgaaacctgtgagttccatgcatccttctttgcacttggcagtattaggaaataatggaatacctgggtatctgtgggtatagtgcaagtagtttcctggggaccaagcctgg

SEQ ID NO: 17666 - DNA, 120 bp, Artificial Sequence
  ENSG00000016864_20 (sequence is synthesized)
gtggttctaagagtcctttcttctcctgaatgggtactgaaagcatcctaggagtttctgtgtaaataaaagcacagctagtgcggtatcctatgccaattattctttccttttccagtt

SEQ ID NO: 17667 - DNA, 120 bp, Artificial Sequence
  ENSG00000016864_21 (sequence is synthesized)
aacctttgcaaggttctacttgccaattctggttcccagcgcaaagaaggccatatacatggatgatgatgtaattgtgcaaggtatcaaaaatgtcaccatgagtgctgttctccaccc

SEQ ID NO: 17668 - DNA, 120 bp, Artificial Sequence
  ENSG00000016864_22 (sequence is synthesized)
tgctgggattacagacgtgagccacggcgccctgatgtatatgagaagaagttcactgacacgttgtacttcatatatactgctttggaaagggttaaaaactaatatttatatgacaga

SEQ ID NO: 17669 - DNA, 120 bp, Artificial Sequence
  ENSG00000016864_23 (sequence is synthesized)
caatattgtttaatgggaagaggttgcaaattcagggaactcttttgctgcaatttacactccccaatcatttcatcccaaaactcaagcctgcttttctgtagacttcttcatggactt

SEQ ID NO: 17670 - DNA, 120 bp, Artificial Sequence
  ENSG00000016864_24 (sequence is synthesized)
ctaacttggaatttcaaatatttattttctaatctgaagaagtcagtttaacagctcttctctctactggctataaaattgtatctattttgtttgaagcagtaagtacatatatcctat

SEQ ID NO: 17671 - DNA, 120 bp, Artificial Sequence
  ENSG00000016864_25 (sequence is synthesized)
gaatggaaacgacagaatataactaaccaactggaaaaatggatgaaactcaatgtagagtaagtatgtaactggcctagctgtgaaaaactgttgtatttcaattcctagagtcttgac

SEQ ID NO: 17672 - DNA, 120 bp, Artificial Sequence
  ENSG00000016864_26 (sequence is synthesized)
gcgcttttgccgcgccgtgctgcccgcgagggcagctgaggtggtggtggcggccgccttgtcgaggcatcgcgcgcccgtgaagtgttcgccgtcagtgctgttgggtgcctggagccg

SEQ ID NO: 17673 - DNA, 120 bp, Artificial Sequence
  ENSG00000016864_27 (sequence is synthesized)
cgtcccccgtcccgaaaactgtccttgacagtacttgcgcggcccaacggccgccggcgcccccgcgtctccatggcgacggcctttttccctgcgaggaccccggcggcagggctgccc

SEQ ID NO: 17674 - DNA, 120 bp, Artificial Sequence
  ENSG00000016864_28 (sequence is synthesized)
aaggatccagcgtctgtgtgcaatttcgttttgagaattccttctaaccagatcaggaaagctctcttaccaggaatagccccaggaaagacaatatggattagacgtactccatgataa

SEQ ID NO: 17675 - DNA, 120 bp, Artificial Sequence
  ENSG00000016864_29 (sequence is synthesized)
attgggttcttgggaactgtgaattcaaaatgagtttctggcggaatactgtatatgcctcttgtttcttcctgaattaaaaaaaaaaaaaaagtgttagggcattttgatgtcccttct

SEQ ID NO: 17676 - DNA, 120 bp, Artificial Sequence
  ENSG00000017260_0 (sequence is synthesized)
gggggtgacagcctgggattccgggggcttctcttccttgtcctcctcctctcctctctattcccagtgtggccgtggctgacactaaagactttgtagccatcaacccgagtgcagttt

SEQ ID NO: 17677 - DNA, 120 bp, Artificial Sequence
  ENSG00000017260_1 (sequence is synthesized)
cgatggaaaatgaaggttgcacgttttcaaaaaatacctaatggtgaaaatgagacaatgattcctgtattgacatcaaaaaaagcaagtgaattaccagtcagtgaagttgcaagcatt

SEQ ID NO: 17678 - DNA, 120 bp, Artificial Sequence
  ENSG00000017260_2 (sequence is synthesized)
ctccaagctgatcttcagaatggtctaaacaaatgtgaagttagtcataggcgagcctttcatggctggaatgagtttgatattagtgaagatgagccactgtggaagaagtatatttct

SEQ ID NO: 17679 - DNA, 120 bp, Artificial Sequence
  ENSG00000017260_3 (sequence is synthesized)
cagtttaaaaatccccttattatgctgcttctggcttctgcagtcatcagtgttttaatgcatcagtttgatgatgccgtcagtatcactgtggcaatacttatcgttgttacagttgcc

SEQ ID NO: 17680 - DNA, 120 bp, Artificial Sequence
  ENSG00000017260_4 (sequence is synthesized)
tttgttcaggaatatcgttcagaaaaatctcttgaagaattgagtaaacttgtgccaccagaatgccattgtgtgcgtgaaggaaaattggagcatacacttgcccgagacttggttcca

SEQ ID NO: 17681 - DNA, 120 bp, Artificial Sequence
  ENSG00000017260_5 (sequence is synthesized)
ggtgatacagtttgcctttctgttggggatagagttcctgctgacttacgcttgtttgaggctgtggatctttccattgatgagtccagcttgacaggtgagacaacgccttgttctaag

SEQ ID NO: 17682 - DNA, 120 bp, Artificial Sequence
  ENSG00000017260_6 (sequence is synthesized)
gtgacagctcctcagccagctgcaactaatggagatcttgcatcgagaagtaacattgcctttatgggaacactggtcagatgtggcaaagcaaagggtgttgtcattggaacaggagaa

SEQ ID NO: 17683 - DNA, 120 bp, Artificial Sequence
  ENSG00000017260_7 (sequence is synthesized)
aattctgaatttggggaggtttttaaaatgatgcaagcagaagaggcaccaaaaacccctctgcagaagagcatggacctcttaggaaaacaactttccttttactcctttggtataata

SEQ ID NO: 17684 - DNA, 120 bp, Artificial Sequence
  ENSG00000017260_8 (sequence is synthesized)
ggaatcatcatgttggttggctggttactgggaaaagatatcctggaaatgtttactattagtgtaagtttggctgtagcagcaattcctgaaggtctccccattgtggtcacagtgacg

SEQ ID NO: 17685 - DNA, 120 bp, Artificial Sequence
  ENSG00000017260_9 (sequence is synthesized)
ctagctcttggtgttatgagaatggtgaagaaaagggccattgtgaaaaagctgcctattgttgaaactctgggctgctgtaatgtgatttgttcagataaaactggaacactgacgaag

SEQ ID NO: 17686 - DNA, 120 bp, Artificial Sequence
  ENSG00000017260_10 (sequence is synthesized)
aatgaaatgactgttactcacatatttacttcagatggtctgcatgctgaggttactggagttggctataatcaatttggggaagtgattgttgatggtgatgttgttcatggattctat

SEQ ID NO: 17687 - DNA, 120 bp, Artificial Sequence
  ENSG00000017260_11 (sequence is synthesized)
aacccagctgttagcagaattgttgaggcgggctgtgtgtgcaatgatgctgtaattagaaacaatactctaatggggaagccaacagaaggggccttaattgctcttgcaatgaagatg

SEQ ID NO: 17688 - DNA, 120 bp, Artificial Sequence
  ENSG00000017260_12 (sequence is synthesized)
ggtcttgatggacttcaacaagactacatcagaaaagctgaatacccttttagctctgagcaaaagtggatggctgttaagtgtgtacaccgaacacagcaggacagaccagagatttgt

SEQ ID NO: 17689 - DNA, 120 bp, Artificial Sequence
  ENSG00000017260_13 (sequence is synthesized)
tttatgaaaggtgcttacgaacaagtaattaagtactgtactacataccagagcaaagggcagaccttgacacttactcagcagcagagagatgtgtaccaacaagagaaggcacgcatg

SEQ ID NO: 17690 - DNA, 120 bp, Artificial Sequence
  ENSG00000017260_14 (sequence is synthesized)
tgaactgggacagctgacatttcttggcttggtgggaatcattgatccacctagaactggtgtgaaagaagctgttacaacactcattgcctcaggagtatcaataaaaatgattactgg

SEQ ID NO: 17691 - DNA, 120 bp, Artificial Sequence
  ENSG00000017260_15 (sequence is synthesized)
agattcacaggagactgcagttgcaatcgccagtcgtctgggattgtattccaaaacttcccagtcagtctcaggagaagaaatagatgcaatggatgttcagcagctttcacaaatagt

SEQ ID NO: 17692 - DNA, 120 bp, Artificial Sequence
  ENSG00000017260_16 (sequence is synthesized)
accaaaggttgcagtattttacagagctagcccaaggcacaagatgaaaattattaagtcgctacagaagaacggttcagttgtagccatgacaggagatggagtaaatgatgcagttgc

SEQ ID NO: 17693 - DNA, 120 bp, Artificial Sequence
  ENSG00000017260_17 (sequence is synthesized)
tctgaaggctgcagacattggagttgcgatgggccagactggtacagatgtttgcaaagaggcagcagacatgatcctagtggatgatgattttcaaaccataatgtctgcaatcgaaga

SEQ ID NO: 17694 - DNA, 120 bp, Artificial Sequence
  ENSG00000017260_18 (sequence is synthesized)
gggtaaagggatttataataacattaaaaatttcgttagattccagctgagcacgagtatagcagcattaactttaatctcattggctacattaatgaactttcctaatcctctcaatgc

SEQ ID NO: 17695 - DNA, 120 bp, Artificial Sequence
  ENSG00000017260_19 (sequence is synthesized)
catgcagattttgtggatcaatattattatggatggacccccagctcagagccttggagtagaaccagtggataaagatgtcattcgtaaacctcctcgcaactggaaagacagcatttt

SEQ ID NO: 17696 - DNA, 120 bp, Artificial Sequence
  ENSG00000017260_20 (sequence is synthesized)
gactaaaaacttgatacttaaaatacttgtttcatcaataatcattgtttgtgggactttgtttgtcttctggcgtgagctacgagacaatgtgattacacctcgagacacaacaatgac

SEQ ID NO: 17697 - DNA, 120 bp, Artificial Sequence
  ENSG00000017260_21 (sequence is synthesized)
cttcacatgctttgtgttttttgacatgttcaatgcactaagttccagatcccagaccaagtctgtgtttgagattggactctgcagtaatagaatgttttgctatgcagttcttggatc

SEQ ID NO: 17698 - DNA, 120 bp, Artificial Sequence
  ENSG00000017260_22 (sequence is synthesized)
catcatgggacaattactagttatttactttcctccgcttcagaaggtttttcagactgagagcctaagcatactggatctgttgtttcttttgggtctcacctcatcagtgtgcatagt

SEQ ID NO: 17699 - DNA, 120 bp, Artificial Sequence
  ENSG00000017260_23 (sequence is synthesized)
ggcagaaattataaagaaggttgaaaggagcagggaaaagatccagaagcatgttagttcgacatcatcatcttttcttgaagtctggctctgggagaggagtggacagcagctggttga

SEQ ID NO: 17700 - DNA, 120 bp, Artificial Sequence
  ENSG00000017260_24 (sequence is synthesized)
gatacatccccatctggagacaggactgccactgacagaagatgtgagctgtgtctaagtccagtcttgtgcccagccgtgtctgcgccttcactctttggaactctgcatacaacatct

SEQ ID NO: 17701 - DNA, 120 bp, Artificial Sequence
  ENSG00000017260_25 (sequence is synthesized)
tagcaccatcttcctgcagctcttccttacctaaataaagaaacagcccaagggcagtatttctaaaagcactgtaacagcttttcattttctccacatatactacaaattctataaaga

SEQ ID NO: 17702 - DNA, 120 bp, Artificial Sequence
  ENSG00000017260_26 (sequence is synthesized)
aagaaattaatttaaaaaaactaagatgtttttctcttctggcttcataaatgccttgctgtataaattgaaatattgatactgaactgtctttttaatgatgacctaactttattcaac

SEQ ID NO: 17703 - DNA, 120 bp, Artificial Sequence
  ENSG00000017260_27 (sequence is synthesized)
ccatcggaatttactttttccctgaaataagatcttttccactggtctactacctgaccataaacatgtctgcatttgaattctctaaaccctaaatctgtgtctatgaaaaatacaaat

SEQ ID NO: 17704 - DNA, 120 bp, Artificial Sequence
  ENSG00000017260_28 (sequence is synthesized)
gctggcgtgagctggggacgttgcgggcacacgacggggcgggtgcgggatcttggggaggggggctcccgagatagtggctgggcggggaactccttcctcagcctctcgtcagcgccg

SEQ ID NO: 17705 - DNA, 120 bp, Artificial Sequence
  ENSG00000017260_29 (sequence is synthesized)
tgcatattgcattattttatttgcaaactaggaattgcagtctgaggatcatttagaagggcaagttcaagaggatatgaagatttgagaactttttaactattcattgactaaaaatga

SEQ ID NO: 17706 - DNA, 120 bp, Artificial Sequence
  ENSG00000017260_30 (sequence is synthesized)
acattaatgttaaagacttaagactttaacctgctggcagtcccaaatgaaattatgcaactttgatatcatattccttgatttaaattggcttttgtgattgagtgaaactttataaag

SEQ ID NO: 17707 - DNA, 120 bp, Artificial Sequence
  ENSG00000017260_31 (sequence is synthesized)
catatggtcagttatttaattaaaaaggcaaaacctgaaccaccttctgcacttaaagaagtctaacagtacaaatacactatctatcttagatagatatatttttttttatttttaaat

SEQ ID NO: 17708 - DNA, 120 bp, Artificial Sequence
  ENSG00000017260_32 (sequence is synthesized)
attgtactatttatggtggtggggctttcttactaatacacaaataaatttaatcatttcaaaggcattctatttggtttagaagttgattcccaggagtgccatatttcagctactgta

SEQ ID NO: 17709 - DNA, 120 bp, Artificial Sequence
  ENSG00000017260_33 (sequence is synthesized)
tttcctttttcttgtaatgtaagcagctcagataccatgtgctatcatttttgtatcaagttttttgcacaggatgtgaccactgtcagatcactgttcttttctttctttttgtgattg

SEQ ID NO: 17710 - DNA, 120 bp, Artificial Sequence
  ENSG00000017260_34 (sequence is synthesized)
aaaagcctatactacaatttgaagtaaatttttgtttttcttagtaagtgtaaatggttgctttatttttattttaaaaaggtatgtctttggtttggcagaattcatgcagggctatca

SEQ ID NO: 17711 - DNA, 120 bp, Artificial Sequence
  ENSG00000017260_35 (sequence is synthesized)
agtggtgttctagggtaacagtgtccataattaacgcttagtcatagagtcaaaaacatttaagactgattgggttgaagtttataataaattatattaacatgtcttcctttttgaggt

SEQ ID NO: 17712 - DNA, 120 bp, Artificial Sequence
  ENSG00000017260_36 (sequence is synthesized)
tttgaggtaaagatatatactttgtcaaatatcattttgtcatcctctaaatataaatccaaatacctcagctaagtaattctattttattatttttactgttatgtatgtttttaatca

SEQ ID NO: 17713 - DNA, 120 bp, Artificial Sequence
  ENSG00000017260_37 (sequence is synthesized)
aggaagtataggctactggacttagaataaaaagtccccaaacccaaacaaatggtttatgaaccagagtatatgtggaagattctttgctggtcttgctctgtgtgcatctgaagcttc

SEQ ID NO: 17714 - DNA, 120 bp, Artificial Sequence
  ENSG00000017260_38 (sequence is synthesized)
tttggcctagattttagcacaaacctgagtatatctcttctactttcatcatgtgttctgtaccttctttttgtttcattgggcatgctagggaaataggtggattttgtgtgtaatgcc

SEQ ID NO: 17715 - DNA, 120 bp, Artificial Sequence
  ENSG00000017260_39 (sequence is synthesized)
atcagtttttatgaaagcttgatgaggtataggtcatttgttttgagtatgtgggccagaaatttaaaattagaaatttgtttttctgttgagtatataaacaaaaattggtcccaattc

SEQ ID NO: 17716 - DNA, 120 bp, Artificial Sequence
  ENSG00000017260_40 (sequence is synthesized)
taacaggtttaatccttcttgaagccaataagttttatcttttataatctgtcaggatgaaccactccttagcttttatccaatattaaactgcaagtgttagcactgaaatattgtcat

SEQ ID NO: 17717 - DNA, 120 bp, Artificial Sequence
  ENSG00000017260_41 (sequence is synthesized)
tgatagggaaaatatctattctttgagtcattgttactgaggcagttgagtgtaaggagctggctgcagtttattctacttaaccctttaaggctgaattgtcaaatgtacattgttcca

SEQ ID NO: 17718 - DNA, 120 bp, Artificial Sequence
  ENSG00000017260_42 (sequence is synthesized)
tgtcgttagatggaacatggaagccattgtctaatcaactctatcattagtgacttgatgtctcataccttaattttgtaatgatttttattctctgttacaaagacttgaaatacgtat

SEQ ID NO: 17719 - DNA, 120 bp, Artificial Sequence
  ENSG00000017260_43 (sequence is synthesized)
taaatgcacgttaatgttttgctttgcattttaggttcagattatgacttgattgaaataaatgtgcctatacattcatttgctttgtactataaaaataaaaatgatttcttaagttaa

SEQ ID NO: 17720 - DNA, 120 bp, Artificial Sequence
  ENSG00000017260_44 (sequence is synthesized)
cttcctccctcccgctcgcttcttctcacgccgggagcaggctcccgcctcgcaccgctgccccgcgagcagctcctcttctcccgaggcgcgcggggcgcccccgcgagccccgcggct

SEQ ID NO: 17721 - DNA, 120 bp, Artificial Sequence
  ENSG00000017260_45 (sequence is synthesized)
attgcatttctggacgcttctagacagtgttcatacttggctgtctggtttcaccaggaactctacccaaaagaggaaacagcaaggagaacatttgctttgtttgtaggagggaagttg

SEQ ID NO: 17722 - DNA, 120 bp, Artificial Sequence
  ENSG00000017260_46 (sequence is synthesized)
tcgagctacaaacaaatctttaggcatctgaggaattgctaagtttctaatttcatatggttgctgacaaggaggtgcagacaaggaccctcttgctttcctcactatggatagtctgtt

SEQ ID NO: 17723 - DNA, 120 bp, Artificial Sequence
  ENSG00000017260_47 (sequence is synthesized)
cgcgactgggcggccggcggcggggaggggcggagcgcaggagtcggaggcgggagcagaccagcacggcctcgcggagccggcccggcggaccgtgacgggtcccctcacctcctcttc

SEQ ID NO: 17724 - DNA, 120 bp, Artificial Sequence
  ENSG00000017260_48 (sequence is synthesized)
gactgactaagaggagtagttaaaatggagaaagcttagctgtactttgtcttgcatgttaaacgtaatgagtttagaggattatgattatttgtaatcatcaggatctgctagacagga

SEQ ID NO: 17725 - DNA, 120 bp, Artificial Sequence
  ENSG00000017260_49 (sequence is synthesized)
catctgttttactttttactcttatgttggtggagaaatagcgtgcttttcattcaatgtgaaaattttgtgttctagctgggcaccgatggcttagtttttgaaatgtaatttcttgag

SEQ ID NO: 17726 - DNA, 120 bp, Artificial Sequence
  ENSG00000017260_50 (sequence is synthesized)
agtaaataaagcatgaaaaagtcaattacggttatagaaaaggatgctaatgtactagattatgcaaagaaaaagttggtaatggaaattaggaagtagaagcagcagagggaacagtgg

SEQ ID NO: 17727 - DNA, 120 bp, Artificial Sequence
  ENSG00000017260_51 (sequence is synthesized)
tagaatgaagggttaaattgcttatgtccttatttctagcagatcaagaaatagtatttggaatggcacaaagaaagacttgttattttttaattataaaaggcgagtgaaataattctt

SEQ ID NO: 17728 - DNA, 120 bp, Artificial Sequence
  ENSG00000017260_52 (sequence is synthesized)
taaactgtgataaaatacgcatattataaaatttacagttttaaagagttaatttggtggagttaagtatggtcgcaatgttttacaactgttaaccgctatctagattcagaacctttt

SEQ ID NO: 17729 - DNA, 120 bp, Artificial Sequence
  ENSG00000017260_53 (sequence is synthesized)
catcatgccagaagaaaaccctgtacacattaagcagtcactccccagttttcctcttcccctagtccctggcaaccactcactaatctgctatctctatggatttgcctattctagata

SEQ ID NO: 17730 - DNA, 120 bp, Artificial Sequence
  ENSG00000017260_54 (sequence is synthesized)
tttcatataaatgaaatgatataatatgggaccttttgtatctgtcttttttcacttagcataatgttttcaaggtttattcatgttgtagcatgtgttagtacttcattcctttttgtg

SEQ ID NO: 17731 - DNA, 120 bp, Artificial Sequence
  ENSG00000017260_55 (sequence is synthesized)
gctaaagtaatactccattgcatggatgtcacaattttacatttatcagttgatgaatatttggcctgtttccatcttttggctatcgtgaatagtgttgccgtgaacattcatgtatga

SEQ ID NO: 17732 - DNA, 120 bp, Artificial Sequence
  ENSG00000017260_56 (sequence is synthesized)
gtttttgtttgaacatttgtagttatctgtattttatagatgaggacagtaaactacagagctagattagtaagtagcccaggatcacacaagtaagagatggtgaagccagggatacaa

SEQ ID NO: 17733 - DNA, 120 bp, Artificial Sequence
  ENSG00000017260_57 (sequence is synthesized)
atccaggcaatttgatgtcagaacctacattttttaaccactgtgcttaacctggcagctactaggtatccagtaaatgttaactttctcttccttttgagaagtttattttttaggtat

SEQ ID NO: 17734 - DNA, 120 bp, Artificial Sequence
  ENSG00000017260_58 (sequence is synthesized)
tgactatattaattttgcgttttattaagctttaagtaacatccaatttaaattttgctgtgagtgctgtttaacctacattttaatactttgtatatgttggttatagtttggctgtag

SEQ ID NO: 17735 - DNA, 120 bp, Artificial Sequence
  ENSG00000017260_59 (sequence is synthesized)
aggttctgaaggaaggggaggttcgggtatcccctggatgggggggcatctctagggcgccgccccgctggcatgctgctgctaggggtggtgggagcagccgtgggacgcgtggccggg

SEQ ID NO: 17736 - DNA, 120 bp, Artificial Sequence
  ENSG00000017260_60 (sequence is synthesized)
gataccaaaagggaaaaattggaaaagcaagtgagagagcagctgatggtaatgaagtcctgcagtggttggtaggagggagaacagatttttcctcaaaaggaagcatagagagaacgg

SEQ ID NO: 17737 - DNA, 120 bp, Artificial Sequence
  ENSG00000017260_61 (sequence is synthesized)
tgagaaaccaaagagccgaagaacagattctcttgcagcaagtgtttcacaaagccaaatccccacatatgtagaagattaacagcattaatgagatgaagatgctgaaggaggaaagcc

SEQ ID NO: 17738 - DNA, 120 bp, Artificial Sequence
  ENSG00000017260_62 (sequence is synthesized)
ttttttcctgattgagaaataccattcaagggctgatctgacaagtcttgcctgtttaacagtgaatctgcttaaaatgaggagagtggtctttgggcccagggggcatgtactgtagct

SEQ ID NO: 17739 - DNA, 120 bp, Artificial Sequence
  ENSG00000017260_63 (sequence is synthesized)
acattttaattacagagtagaatcaaattttgttttggaagctgttctaaagtttcctttcaatggcttaagaaaatgtttctagttggaacgggatcactggaattttttttctttgct

SEQ ID NO: 17740 - DNA, 120 bp, Artificial Sequence
  ENSG00000017260_64 (sequence is synthesized)
gtaagtctcaatactttataattggagtctcttttgcctcttttatttctctaatggacatagcttacgttttattatggagatcagtattacatggagcccataagagtataacatcgc

SEQ ID NO: 17741 - DNA, 120 bp, Artificial Sequence
  ENSG00000017260_65 (sequence is synthesized)
tacataaatagttcagaagtcatatattaaaattatccttagaaaaatgaaaatgtatgtatatggtaatgaagaaaacccatactagatgtctggaattactaatgcattattgccttt

SEQ ID NO: 17742 - DNA, 120 bp, Artificial Sequence
  ENSG00000017260_66 (sequence is synthesized)
ataaattatatgaaaagtagaacttaagcagaatgcctagaaacttctctgccttatatttgtgagcattgttcatatgtcagttttccaaaaagaaaatttattgtattctgaaatttt

SEQ ID NO: 17743 - DNA, 120 bp, Artificial Sequence
  ENSG00000017427_0 (sequence is synthesized)
gaaggcaaatgttcccccagctgtttcctgtctacagtgtctgtgttttgtagataaatgtgaggattttctctaaatccctcttctgtttgctaaatctcactgtcactgctaaattca

SEQ ID NO: 17744 - DNA, 120 bp, Artificial Sequence
  ENSG00000017427_1 (sequence is synthesized)
gagcagatagagcctgcgcaatggaataaagtcctcaaaattgaaatgtgacattgctctcaacatctcccatctctctggatttctttttgcttcattattcctgctaaccaattcatt

SEQ ID NO: 17745 - DNA, 120 bp, Artificial Sequence
  ENSG00000017427_2 (sequence is synthesized)
ttcagactttgtacttcagaagcaatgggaaaaatcagcagtcttccaacccaattatttaagtgctgcttttgtgatttcttgaaggtgaagatgcacaccatgtcctcctcgcatctc

SEQ ID NO: 17746 - DNA, 120 bp, Artificial Sequence
  ENSG00000017427_3 (sequence is synthesized)
ttctacctggcgctgtgcctgctcaccttcaccagctctgccacggctggaccggagacgctctgcggggctgagctggtggatgctcttcagttcgtgtgtggagacaggggcttttat

SEQ ID NO: 17747 - DNA, 120 bp, Artificial Sequence
  ENSG00000017427_4 (sequence is synthesized)
ttcaacaagcccacagggtatggctccagcagtcggagggcgcctcagacaggcatcgtggatgagtgctgcttccggagctgtgatctaaggaggctggagatgtattgcgcacccctc

SEQ ID NO: 17748 - DNA, 120 bp, Artificial Sequence
  ENSG00000017427_5 (sequence is synthesized)
aagcctgccaagtcagctcgctctgtccgtgcccagcgccacaccgacatgcccaagacccagaaggaagtacatttgaagaacgcaagtagagggagtgcaggaaacaagaactacagg

SEQ ID NO: 17749 - DNA, 120 bp, Artificial Sequence
  ENSG00000017427_6 (sequence is synthesized)
atgtaggaagaccctcctgaggagtgaagagtgacatgccaccgcaggatcctttgctctgcacgagttacctgttaaactttggaacacctaccaaaaaataagtttgataacatttaa

SEQ ID NO: 17750 - DNA, 120 bp, Artificial Sequence
  ENSG00000017427_7 (sequence is synthesized)
aagatgggcgtttcccccaatgaaatacacaagtaaacattccaacattgtctttaggagtgatttgcaccttgcaaaaatggtcctggagttggtagattgctgttgatcttttatcaa

SEQ ID NO: 17751 - DNA, 120 bp, Artificial Sequence
  ENSG00000017427_8 (sequence is synthesized)
taatgttctatagaaaagaaaaaaaaaatatatatatatatatatcttagtccctgcctctcaagagccacaaatgcatgggtgttgtatagatccagttgcactaaattcctctctgaa

SEQ ID NO: 17752 - DNA, 120 bp, Artificial Sequence
  ENSG00000017427_9 (sequence is synthesized)
tcttggctgctggagccattcattcagcaaccttgtctaagtggtttatgaattgtttccttatttgcacttctttctacacaactcgggctgtttgttttacagtgtctgataatcttg

SEQ ID NO: 17753 - DNA, 120 bp, Artificial Sequence
  ENSG00000017427_10 (sequence is synthesized)
ttagtctatacccaccacctcccttcataacctttatatttgccgaatttggcctcctcaaaagcagcagcaagtcgtcaagaagcacaccaattctaacccacaagattccatctgtgg

SEQ ID NO: 17754 - DNA, 120 bp, Artificial Sequence
  ENSG00000017427_11 (sequence is synthesized)
catttgtaccaaatataagttggatgcattttattttagacacaaagctttatttttccacatcatgcttacaaaaaagaataatgcaaatagttgcaactttgaggccaatcattttta

SEQ ID NO: 17755 - DNA, 120 bp, Artificial Sequence
  ENSG00000017427_12 (sequence is synthesized)
ggcatatgttttaaacatagaaagtttcttcaactcaaaagagttccttcaaatgatgagttaatgtgcaacctaattagtaactttcctctttttattttttccatatagagcactatg

SEQ ID NO: 17756 - DNA, 120 bp, Artificial Sequence
  ENSG00000017427_13 (sequence is synthesized)
taaatttagcatatcaattatacaggatatatcaaacagtatgtaaaactctgttttttagtataatggtgctattttgtagtttgttatatgaaagagtctggccaaaacggtaatacg

SEQ ID NO: 17757 - DNA, 120 bp, Artificial Sequence
  ENSG00000017427_14 (sequence is synthesized)
tgaaagcaaaacaataggggaagcctggagccaaagatgacacaaggggaagggtactgaaaacaccatccatttgggaaagaaggcaaagtccccccagttatgccttccaagaggaac

SEQ ID NO: 17758 - DNA, 120 bp, Artificial Sequence
  ENSG00000017427_15 (sequence is synthesized)
ttcagacacaaaagtccactgatgcaaattggactggcgagtccagagaggaaactgtggaatggaaaaagcagaaggctaggaattttagcagtcctggtttctttttctcatggaaga

SEQ ID NO: 17759 - DNA, 120 bp, Artificial Sequence
  ENSG00000017427_16 (sequence is synthesized)
aatgaacatctgccagctgtgtcatggactcaccactgtgtgaccttgggcaagtcacttcacctctctgtgcctcagtttcctcatctgcaaaatgggggcaatatgtcatctacctac

SEQ ID NO: 17760 - DNA, 120 bp, Artificial Sequence
  ENSG00000017427_17 (sequence is synthesized)
ctcaaaggggtggtataaggtttaaaaagataaagattcagattttttttaccctgggttgctgtaagggtgcaacatcagggcgcttgagttgctgagatgcaaggaattctataaata

SEQ ID NO: 17761 - DNA, 120 bp, Artificial Sequence
  ENSG00000017427_18 (sequence is synthesized)
acccattcatagcatagctagagattggtgaattgaatgctcctgacatctcagttcttgtcagtgaagctatccaaataactggccaactagttgttaaaagctaacagctcaatctct

SEQ ID NO: 17762 - DNA, 120 bp, Artificial Sequence
  ENSG00000017427_19 (sequence is synthesized)
taaaacacttttcaaaatatgtgggaagcatttgattttcaatttgattttgaattctgcatttggttttatgaatacaaagataagtgaaaagagagaaaggaaaagaaaaaggagaaa

SEQ ID NO: 17763 - DNA, 120 bp, Artificial Sequence
  ENSG00000017427_20 (sequence is synthesized)
aacaaagagatttctaccagtgaaaggggaattaattactctttgttagcactcactgactcttctatgcagttactacatatctagtaaaacctcgtttaatactataaataatattct

SEQ ID NO: 17764 - DNA, 120 bp, Artificial Sequence
  ENSG00000017427_21 (sequence is synthesized)
attcattttgaaaaacacaatgattccttcttttctaggcaatataaggaaagtgatccaaaatttgaaatattaaaataatatctaataaaaagtcacaaagttatcttctttaacaaa

SEQ ID NO: 17765 - DNA, 120 bp, Artificial Sequence
  ENSG00000017427_22 (sequence is synthesized)
ctttactcttattcttagctgtatatacatttttttaaaagtttgttaaaatatgcttgactagagtttccagttgaaaggcaaaaacttccatcacaacaagaaatttcccatgcctgc

SEQ ID NO: 17766 - DNA, 120 bp, Artificial Sequence
  ENSG00000017427_23 (sequence is synthesized)
tcagaagggtagcccctagctctctgtgaatgtgttttatccattcaactgaaaattggtatcaagaaagtccactggttagtgtactagtccatcatagcctagaaaatgatccctatc

SEQ ID NO: 17767 - DNA, 120 bp, Artificial Sequence
  ENSG00000017427_24 (sequence is synthesized)
tgcagatcaagattttctcattagaacaatgaattatccagcattcagatctttctagtcaccttagaactttttggttaaaagtacccaggcttgattatttcatgcaaattctatatt

SEQ ID NO: 17768 - DNA, 120 bp, Artificial Sequence
  ENSG00000017427_25 (sequence is synthesized)
ttacattcttggaaagtctatatgaaaaacaaaaataacatcttcagtttttctcccactgggtcacctcaaggatcagaggccaggaaaaaaaaaaaaaagactccctggatctctgaa

SEQ ID NO: 17769 - DNA, 120 bp, Artificial Sequence
  ENSG00000017427_26 (sequence is synthesized)
tatatgcaaaaagaaggccccatttagtggagccagcaatcctgttcagtcaacaagtattttaactctcagtccaacattatttgaattgagcacctcaagcatgcttagcaatgttct

SEQ ID NO: 17770 - DNA, 120 bp, Artificial Sequence
  ENSG00000017427_27 (sequence is synthesized)
aatcactatggacagatgtaaaagaaactatacatcatttttgccctctgcctgttttccagacatacaggttctgtggaataagatactggactcctcttcccaagatggcacttcttt

SEQ ID NO: 17771 - DNA, 120 bp, Artificial Sequence
  ENSG00000017427_28 (sequence is synthesized)
ttatttcttgtccccagtgtgtaccttttaaaattattccctctcaacaaaactttataggcagtcttctgcagacttaacgtgttttctgtcatagttagatgtgataattctaagagt

SEQ ID NO: 17772 - DNA, 120 bp, Artificial Sequence
  ENSG00000017427_29 (sequence is synthesized)
gtctatgacttatttccttcacttaattctatccacagtcaaaaatcccccaaggaggaaagctgaaagatgcactgccatattatctttcttaactttttccaacacataatcctctcc

SEQ ID NO: 17773 - DNA, 120 bp, Artificial Sequence
  ENSG00000017427_30 (sequence is synthesized)
aattcactattttattttttaatgaattaaaactagaaaacaaattgatgcaaaccctggaagtcagttgattactatatactacagcagaatgactcagatttcatagaaaggagcaac

SEQ ID NO: 17774 - DNA, 120 bp, Artificial Sequence
  ENSG00000017427_31 (sequence is synthesized)
caaaatgtcacaacccaaaactttacaagctttgcttcagaattagattgctttataattcttgaatgaggcaatttcaagatatttgtaaaagaacagtaaacattggtaagaatgagc

SEQ ID NO: 17775 - DNA, 120 bp, Artificial Sequence
  ENSG00000017427_32 (sequence is synthesized)
tttcaactcataggcttatttccaatttaattgaccatactggatacttaggtcaaatttctgttctctcttccccaaataatattaaagtattatttgaactttttaagatgaggcagt

SEQ ID NO: 17776 - DNA, 120 bp, Artificial Sequence
  ENSG00000017427_33 (sequence is synthesized)
tttaagatgaggcagttcccctgaaaaagttaatgcagctctccatcagaatccactcttctagggatatgaaaatctcttaacacccaccctacatacacagacacacacacacacaca

SEQ ID NO: 17777 - DNA, 120 bp, Artificial Sequence
  ENSG00000017427_34 (sequence is synthesized)
cacacattcaccctaaggatccaatggaatactgaaaagaaatcacttccttgaaaattttattaaaaaacaaacaaacaaacaaaaagcctgtccacccttgagaatccttcctctcct

SEQ ID NO: 17778 - DNA, 120 bp, Artificial Sequence
  ENSG00000017427_35 (sequence is synthesized)
tggaacgtcaatgtttgtgtagatgaaaccatctcatgctctgtggctccagggtttctgttactattttatgcacttgggagaaggcttagaataaaagatgtagcacattttgctttc

SEQ ID NO: 17779 - DNA, 120 bp, Artificial Sequence
  ENSG00000017427_36 (sequence is synthesized)
ttagaataaaagatgtagcacattttgctttcccatttattgtttggccagctatgccaatgtggtgctattgtttctttaagaaagtacttgactaaaaaaaaaagaaaaaaagaaaaa

SEQ ID NO: 17780 - DNA, 120 bp, Artificial Sequence
  ENSG00000017427_37 (sequence is synthesized)
aaaaacaacaattctatagatagatggcttaataaaatagcattaggtctatctagccaccaccacctttcaactttttatcactcacaagtagtgtactgttcaccaaattgtgaattt

SEQ ID NO: 17781 - DNA, 120 bp, Artificial Sequence
  ENSG00000017427_38 (sequence is synthesized)
gggggtgcaggggcaggagttggaaattttttaaagttagaaggctccattgttttgttggctctcaaacttagcaaaattagcaatatattatccaatcttctgaacttgatcaagagc

SEQ ID NO: 17782 - DNA, 120 bp, Artificial Sequence
  ENSG00000017427_39 (sequence is synthesized)
atggagaataaacgcgggaaaaaagatcttataggcaaatagaagaatttaaaagataagtaagttccttattgatttttgtgcactctgctctaaaacagatattcagcaagtggagaa

SEQ ID NO: 17783 - DNA, 120 bp, Artificial Sequence
  ENSG00000017427_40 (sequence is synthesized)
aataagaacaaagagaaaaaatacatagatttacctgcaaaaaatagcttctgccaaatcccccttgggtattctttggcatttactggtttatagaagacattctcccttcacccagac

SEQ ID NO: 17784 - DNA, 120 bp, Artificial Sequence
  ENSG00000017427_41 (sequence is synthesized)
atctcaaagagcagtagctctcatgaaaagcaatcactgatctcatttgggaaatgttggaaagtatttccttatgagatgggggttatctactgataaagaaagaatttatgagaaatt

SEQ ID NO: 17785 - DNA, 75 bp, Artificial Sequence
  ENSG00000017427_42 (sequence is synthesized)
agcagtctttatgaatttcttaatgttcaaaatgacttggttcttttcttctttttttatatcagaatgaggaat

SEQ ID NO: 17786 - DNA, 120 bp, Artificial Sequence
  ENSG00000017427_43 (sequence is synthesized)
cttctttttttatatcagaatgaggaataataagttaaacccacatagactctttaaaactataggctagatagaaatgtatgtttgacttgttgaagctataatcagactatttaaaat

SEQ ID NO: 17787 - DNA, 120 bp, Artificial Sequence
  ENSG00000017427_44 (sequence is synthesized)
gttttgctatttttaatcttaaaagattgtgctaatttattagagcagaacctgtttggctctcctcagaagaaagaatctttccattcaaatcacatggctttccaccaatattttcaa

SEQ ID NO: 17788 - DNA, 120 bp, Artificial Sequence
  ENSG00000017427_45 (sequence is synthesized)
aagataaatctgatttatgcaatggcatcatttattttaaaacagaagaattgtgaaagtttatgcccctcccttgcaaagaccataaagtccagatctggtaggggggcaacaacaaaa

SEQ ID NO: 17789 - DNA, 120 bp, Artificial Sequence
  ENSG00000017427_46 (sequence is synthesized)
ggaaaatgttgttgattcttggttttggattttgttttgttttcaatgctagtgtttaatcctgtagtacatatttgcttattgctattttaatattttataagaccttcctgttaggta

SEQ ID NO: 17790 - DNA, 120 bp, Artificial Sequence
  ENSG00000017427_47 (sequence is synthesized)
ttagaaagtgatacatagatatcttttttgtgtaatttctatttaaaaaagagagaagactgtcagaagctttaagtgcatatggtacaggataaagatatcaatttaaataaccaattc

SEQ ID NO: 17791 - DNA, 120 bp, Artificial Sequence
  ENSG00000017427_48 (sequence is synthesized)
ctatctggaacaatgcttttgttttttaaagaaacctctcacagataagacagaggcccaggggatttttgaagctgtctttattctgcccccatcccaacccagcccttattattttag

SEQ ID NO: 17792 - DNA, 120 bp, Artificial Sequence
  ENSG00000017427_49 (sequence is synthesized)
tatctgcctcagaattttatagagggctgaccaagctgaaactctagaattaaaggaacctcactgaaaacatatatttcacgtgttccctctttttttttttcctttttgtgagatggg

SEQ ID NO: 17793 - DNA, 120 bp, Artificial Sequence
  ENSG00000017427_50 (sequence is synthesized)
attacaggcatgagccaccacaccctgcccatgtgttccctcttaatgtatgattacatggatcttaaacatgatccttctctcctcattcttcaactatctttgatggggtctttcaag

SEQ ID NO: 17794 - DNA, 120 bp, Artificial Sequence
  ENSG00000017427_51 (sequence is synthesized)
caaggggaaaaaaatccaagcttttttaaagtaaaaaaaaaaaaagagaggacacaaaaccaaatgttactgctcaactgaaatatgagttaagatggagacagagtttctcctaataac

SEQ ID NO: 17795 - DNA, 120 bp, Artificial Sequence
  ENSG00000017427_52 (sequence is synthesized)
cggagctgaattacctttcactttcaaaaacatgaccttccacaatccttagaatctgcctttttttatattactgaggcctaaaagtaaacattactcattttattttgcccaaaatgc

SEQ ID NO: 17796 - DNA, 120 bp, Artificial Sequence
  ENSG00000017427_53 (sequence is synthesized)
actgatgtaaagtaggaaaaataaaaacagagctctaaaatccctttcaagccacccattgaccccactcaccaactcatagcaaagtcacttctgttaatcccttaatctgattttgtt

SEQ ID NO: 17797 - DNA, 120 bp, Artificial Sequence
  ENSG00000017427_54 (sequence is synthesized)
tggatatttatcttgtacccgctgctaaacacactgcaggagggactctgaaacctcaagctgtctacttacatcttttatctgtgtctgtgtatcatgaaaatgtctattcaaaatatc

SEQ ID NO: 17798 - DNA, 120 bp, Artificial Sequence
  ENSG00000017427_55 (sequence is synthesized)
aaaacctttcaaatatcacgcagcttatattcagtttacataaaggccccaaataccatgtcagatctttttggtaaaagagttaatgaactatgagaattgggattacatcatgtattt

SEQ ID NO: 17799 - DNA, 120 bp, Artificial Sequence
  ENSG00000017427_56 (sequence is synthesized)
tgcctcatgtatttttatcacacttataggccaagtgtgataaataaacttacagacactgaattaatttcccctgctactttgaaaccagaaaataatgactggccattcgttacatct

SEQ ID NO: 17800 - DNA, 120 bp, Artificial Sequence
  ENSG00000017427_57 (sequence is synthesized)
gtcttagttgaaaagcatattttttattaaattaattctgattgtatttgaaattattattcaattcacttatggcagaggaatatcaatcctaatgacttctaaaaatgtaactaattg

SEQ ID NO: 17801 - DNA, 120 bp, Artificial Sequence
  ENSG00000017427_58 (sequence is synthesized)
attgaatcattatcttacatttactgtttaataagcatattttgaaaatgtatggctagagtgtcataataaaatggtatatctttctttagtaattacattaaaattagtcatgtttga

SEQ ID NO: 17802 - DNA, 120 bp, Artificial Sequence
  ENSG00000017427_59 (sequence is synthesized)
gcatacctgcctgggtgtccaaatgtaactagatgctttcacaaaccccacccacaaagcagcacatgtttttaagacttcagttttctattcacatcggcctcataatacccaccctga

SEQ ID NO: 17803 - DNA, 120 bp, Artificial Sequence
  ENSG00000017427_60 (sequence is synthesized)
tctcagagaaggaaaggttggccaaagacacatccaggaggggaacagaaggaggggacagaagcaagtctgcagatcagaggaaagaagaaagagcagaggagggagattggaagtaga

SEQ ID NO: 17804 - DNA, 120 bp, Artificial Sequence
  ENSG00000017427_61 (sequence is synthesized)
aatgctgaatgcagaggcaaaaaaggaaaatgaaggacaggaggattaaacagacagaggcaaggatgatgagagaggagcagacagcaagaatgaaaagcagaaaatacaatagaggaa

SEQ ID NO: 17805 - DNA, 120 bp, Artificial Sequence
  ENSG00000017427_62 (sequence is synthesized)
atgaagaaaagtaggcctgctggagctagatgatgatgtgatggaaatagaagtaaccttttagagaatctcgctaagaaacatggagaaaacggaaaagaaaaatgtaatgccctagaa

SEQ ID NO: 17806 - DNA, 120 bp, Artificial Sequence
  ENSG00000017427_63 (sequence is synthesized)
agcgcaaagaaagacagtggcaaaaatgaaaaaaaaaaataaaaattataaaagaggcaaaaaaagacacactattctctgcctctaaaacacaattaaataaaagaatttaaataaaaa

SEQ ID NO: 17807 - DNA, 120 bp, Artificial Sequence
  ENSG00000017427_64 (sequence is synthesized)
gacatgcccaagacccagaagtatcagcccccatctaccaacaagaacacgaagtctcagagaaggaaaggaagtacatttgaagaacgcaagtagagggagtgcaggaaacaagaacta

SEQ ID NO: 17808 - DNA, 120 bp, Artificial Sequence
  ENSG00000017483_0 (sequence is synthesized)
gcctggaatagcctggctactacccctgcacctgttcccctgctgtccccaggcctctctgcctgaatctgcctctctctgcctcttttctcctgtccctccaggagtctctctgcctca

SEQ ID NO: 17809 - DNA, 120 bp, Artificial Sequence
  ENSG00000017483_1 (sequence is synthesized)
accactctctctgccccttcatctctctgagctggtgtgtctggtcctaccctctgtttggggagctgtctggctctgtcccccacctcttggccagcctgtgtctcctgtctatgactg

SEQ ID NO: 17810 - DNA, 120 bp, Artificial Sequence
  ENSG00000017483_2 (sequence is synthesized)
agcccaattgcctgttgcctttctgcaggtgtttccacgagcctatccctacccacctgtttgtttctgagtctgcctgtgtgtccctttctccctgtctctgcctgtcttccaagctcc

SEQ ID NO: 17811 - DNA, 120 bp, Artificial Sequence
  ENSG00000017483_3 (sequence is synthesized)
cctagcatcccctcctcccgcccatctgtctttctgtcccttctgtggtctgtctgttcctgtgctgtttctcatgcctgctttctttgtaacttcagttctcctactctctctctgtct

SEQ ID NO: 17812 - DNA, 120 bp, Artificial Sequence
  ENSG00000017483_4 (sequence is synthesized)
cctctctgcacctttttctgccatccatcccatcctgctgtccgtctgctctgtgagtccatcccctctgtctgcctgtcactctctctagctgtgggtctacaccctcaatctttcagg

SEQ ID NO: 17813 - DNA, 120 bp, Artificial Sequence
  ENSG00000017483_5 (sequence is synthesized)
ccatttcccccaccatcaacacacaaacaaaccgctgtctccctccaagtgggtccagatagggggcgccccttctccacctcttcccccgcccagggccagaaggagggaaacgaaatt

SEQ ID NO: 17814 - DNA, 120 bp, Artificial Sequence
  ENSG00000017483_6 (sequence is synthesized)
aaaattaacatttcttctcaggaaaaaaaaaaaagtaccgctccagagcaggagcctaggcagccgagagggtgcccgaacctgagtctgagttgcggccacttcaggagctgagaggag

SEQ ID NO: 17815 - DNA, 120 bp, Artificial Sequence
  ENSG00000017483_7 (sequence is synthesized)
caggatggaactgcaggatccaaagatgaatggagccctcccttcggatgctgtgggctacaggcaagaacgtgagggcttcctgcccagtcgtggtcctgctcctgggagcaagccggt

SEQ ID NO: 17816 - DNA, 120 bp, Artificial Sequence
  ENSG00000017483_8 (sequence is synthesized)
ccagttcatggatttcgaggggaagacatcgtttggaatgtcagtgttcaacctcagcaacgccatcatgggcagcggcatcctggggctggcctatgccatggcccacacgggggtcat

SEQ ID NO: 17817 - DNA, 120 bp, Artificial Sequence
  ENSG00000017483_9 (sequence is synthesized)
cttcttcctggccctgctgctgtgcattgcgcttctgtcgtcctactccatccacctcctgctgacctgtgctggtattgcaggcatccgagcctatgagcagctgggacagagggcatt

SEQ ID NO: 17818 - DNA, 120 bp, Artificial Sequence
  ENSG00000017483_10 (sequence is synthesized)
cgggcctgcggggaaggtagtggtggccacagtcatctgtctgcacaatgttggggccatgtccagttacctgttcatcatcaaatctgagctccccctggttatcggcaccttcctgta

SEQ ID NO: 17819 - DNA, 120 bp, Artificial Sequence
  ENSG00000017483_11 (sequence is synthesized)
tggttcttgaagggaaacctcctcatcatcatcgtcagtgtgttaatcatcctgcccctcgccctcatgaaacacttgggctacctggggtacaccagtggtctctctctgacctgcatg

SEQ ID NO: 17820 - DNA, 120 bp, Artificial Sequence
  ENSG00000017483_12 (sequence is synthesized)
ctgtttttccttgtttcggtcatctacaagaagttccaacttggctgtgctataggccacaatgaaacagcaatggagagtgaagctctcgtgggactccccagccaaggactcaacagc

SEQ ID NO: 17821 - DNA, 120 bp, Artificial Sequence
  ENSG00000017483_13 (sequence is synthesized)
agctgtgaggcccagatgttcacagttgactcacagatgtcctacacagtgcccattatggcttttgcttttgtctgccaccctgaggtgctgcccatctatacggagctctgccggccc

SEQ ID NO: 17822 - DNA, 120 bp, Artificial Sequence
  ENSG00000017483_14 (sequence is synthesized)
tccaagcgcaggatgcaggccgtggccaacgtgtccattggggccatgttctgcatgtatgggctcacagcaacctttggatacctcaccttctacagcagtgtgaaggcggagatgctg

SEQ ID NO: 17823 - DNA, 120 bp, Artificial Sequence
  ENSG00000017483_15 (sequence is synthesized)
cacatgtacagccagaaggacccgctcatcctctgtgtgcgcctggccgtgctgctcgcggtgaccctcactgtgccagtcgtgctgttccctatccgccgggccctgcagcagctgctt

SEQ ID NO: 17824 - DNA, 120 bp, Artificial Sequence
  ENSG00000017483_16 (sequence is synthesized)
ttcccaggcaaggccttcagctggccacgacatgtggccatagctctgatcctgcttgttttggtcaatgtccttgtcatctgtgtgccaaccatccgggatatctttggagttatcggg

SEQ ID NO: 17825 - DNA, 120 bp, Artificial Sequence
  ENSG00000017483_17 (sequence is synthesized)
tccacctcagcccccagcctcatcttcatcctccccagcatcttctacctccgcattgtaccctctgaggtggagcctttcttatcctggcccaagatccaggccctgtgctttggagtc

SEQ ID NO: 17826 - DNA, 120 bp, Artificial Sequence
  ENSG00000017483_18 (sequence is synthesized)
ctgggagtcctcttcatggccgtcagtctaggctttatgtttgccaactgggccacaggccagagccgcatgtctggacactgatcaggccctgctggcccaggtccctgtgcgcatgca

SEQ ID NO: 17827 - DNA, 120 bp, Artificial Sequence
  ENSG00000017483_19 (sequence is synthesized)
catggaggggtcagggccgctccctagggtccctcctgcccaacatgtggaggtggctggttcccatgaacgtggttgtcagaggcgggggacagcagaggctgcagactggcccacttc

SEQ ID NO: 17828 - DNA, 120 bp, Artificial Sequence
  ENSG00000017483_20 (sequence is synthesized)
cagactggcccacttccctcctccccagggatgccaagcttggatcatggccctaatcccaaccccaaccccatgggaggaggaggaggaggaagaagaggaggaggaggaggaggagga

SEQ ID NO: 17829 - DNA, 120 bp, Artificial Sequence
  ENSG00000017483_21 (sequence is synthesized)
aggtcctggtggagcctttgcccagcccagtcctctctgcctcctcctggctgaagctgtttgtcaggattaccctcgggctaaagaggaaaaataaagatgttgagctaccactctgga

SEQ ID NO: 17830 - DNA, 120 bp, Artificial Sequence
  ENSG00000017483_22 (sequence is synthesized)
ccgctcttcggcccagtgactgccctccctggctgctcccctcccggcctgcctttctcctccagctgttcttcctcctccagcactccccatcctcagcctatccccacccgcagcgtc

SEQ ID NO: 17831 - DNA, 120 bp, Artificial Sequence
  ENSG00000017483_23 (sequence is synthesized)
tcccctccccagctgttttacctctggtggctgcttcaccctcccccggtcctctccacttccagctgctccctccaaagtttgtcctagtttcccccttcccagctctccccattcgca

SEQ ID NO: 17832 - DNA, 120 bp, Artificial Sequence
  ENSG00000017483_24 (sequence is synthesized)
gcctcttccatcttcaactcttcttccctgctagcctcttccctcctccgatggtctctccttggcttctctccaccccgcttgcttcttctctagtctttccctggccctggcattagt

SEQ ID NO: 17833 - DNA, 120 bp, Artificial Sequence
  ENSG00000017483_25 (sequence is synthesized)
ggctggggctagggctggggggagggggaaggcctggggcaggagcctctgagctctttccttctgtgaccacggacctgtcagtttccaaacagaaggtgtgcctcacttgtgtggatt

SEQ ID NO: 17834 - DNA, 120 bp, Artificial Sequence
  ENSG00000017483_26 (sequence is synthesized)
tgaaagggacatgcataggagggggctgggagagcatctgaaagaatggtctggaagaatgaaggtgattgtctaggaaggggcagaggagacagagcaccagcagggtccaggaagaca

SEQ ID NO: 17835 - DNA, 120 bp, Artificial Sequence
  ENSG00000017483_27 (sequence is synthesized)
gggagcactcaaacagaggctggcatagagggagcattctccagacagatggaaagagcactattgggaagagagctggaagcactttgaagaaggaggatggaggaacgtattctgtca

SEQ ID NO: 17836 - DNA, 120 bp, Artificial Sequence
  ENSG00000017483_28 (sequence is synthesized)
tttctgagatacctccttcccaaggagtaagcgcgggagggagctggggtttcttcagagacgctgtacctacaagacaggggctccaggctcgggtggggattgcagagacacccccac

SEQ ID NO: 17837 - DNA, 120 bp, Artificial Sequence
  ENSG00000017797_0 (sequence is synthesized)
agtctggtttaactggttggaacgactaaagcacgctggcgcaaggaaagctctcaacttcgggagctgaggcgcaggctggccagagcgtggagaggaaagccctttccatcctcaagg

SEQ ID NO: 17838 - DNA, 120 bp, Artificial Sequence
  ENSG00000017797_1 (sequence is synthesized)
ccgttgcaggagatgcccgcgagccaccttcgccagcaccacaccggggtgtaatggataggtaacagagaagacctcgtcccttcctagtcagggcatcagcatgactgagtgcttcct

SEQ ID NO: 17839 - DNA, 120 bp, Artificial Sequence
  ENSG00000017797_2 (sequence is synthesized)
gccccccaccagcagccccagtgaacaccgcagggtggagcatggcagcgggcttacccggacccccagctctgaagagatcagccctactaagtttcctggattgtaccgcactggcga

SEQ ID NO: 17840 - DNA, 120 bp, Artificial Sequence
  ENSG00000017797_3 (sequence is synthesized)
gccctcacctccccatgacatcctccatgagcctcctgatgtagtgtctgatgatgagaaagatcatgggaagaaaaaagggaaatttaagaaaaaggaaaagaggactgaaggctatgc

SEQ ID NO: 17841 - DNA, 120 bp, Artificial Sequence
  ENSG00000017797_4 (sequence is synthesized)
agcctttcaggaagatagctctggagatgaggcagaaagtccttctaaaatgaagaggtccaagggaatccatgttttcaagaagcccagcttttctaaaaagaaggaaaaggattttaa

SEQ ID NO: 17842 - DNA, 120 bp, Artificial Sequence
  ENSG00000017797_5 (sequence is synthesized)
aataaaagagaaacccaaagaagaaaagcataaagaagaaaagcacaaagaagaaaaacataaagagaagaagtcaaaagacttgacagcagctgatgttgttaaacagtggaaggaaaa

SEQ ID NO: 17843 - DNA, 120 bp, Artificial Sequence
  ENSG00000017797_6 (sequence is synthesized)
gaagaaaaagaaaaagccaattcaggagccagaggtgcctcagattgatgttccaaatctcaaacccatttttggaattcctttggctgatgcagtagagaggaccatgatgtatgatgg

SEQ ID NO: 17844 - DNA, 120 bp, Artificial Sequence
  ENSG00000017797_7 (sequence is synthesized)
cattcggctgccagccgttttccgtgaatgtatagattacgtagagaagtatggcatgaagtgtgaaggcatctacagagtatcaggaattaaatcaaaggtggatgagctaaaagcagc

SEQ ID NO: 17845 - DNA, 120 bp, Artificial Sequence
  ENSG00000017797_8 (sequence is synthesized)
ctatgaccgggaggagtctacaaacttggaagactatgagcctaacactgtagccagtttgctgaagcagtatttgcgagaccttccagagaatttgcttaccaaagagcttatgcccag

SEQ ID NO: 17846 - DNA, 120 bp, Artificial Sequence
  ENSG00000017797_9 (sequence is synthesized)
atttgaagaggcttgtgggaggaccacggagactgagaaagtgcaggaattccagcgtttactcaaagaactgccagaatgtaactatcttctgatttcttggctcattgtgcacatgga

SEQ ID NO: 17847 - DNA, 120 bp, Artificial Sequence
  ENSG00000017797_10 (sequence is synthesized)
ccatgtcattgcaaaggaactggaaacaaaaatgaatatacagaacatttctatagtgctcagcccaactgtgcagatcagcaatcgagtcctgtatgtgtttttcacacatgtgcaaga

SEQ ID NO: 17848 - DNA, 120 bp, Artificial Sequence
  ENSG00000017797_11 (sequence is synthesized)
actctttggaaatgtggtactaaagcaagtgatgaaacctctgcgatggtctaacatggccacgatgcccacgctgccagagacccaggcgggcatcaaggaggagatcaggagacagga

SEQ ID NO: 17849 - DNA, 120 bp, Artificial Sequence
  ENSG00000017797_12 (sequence is synthesized)
gtttcttttgaattgtttacatcgagatctgcagggtgggataaaggatttgtctaaagaagaaagattatgggaagtacaaagaattttgacagccctcaaaagaaaactgagagaagc

SEQ ID NO: 17850 - DNA, 120 bp, Artificial Sequence
  ENSG00000017797_13 (sequence is synthesized)
taaaagacaggagtgtgaaaccaagattgcacaagagatagccagtctttcaaaagaggatgtttccaaagaagagatgaatgaaaatgaagaagttataaatattctccttgctcagga

SEQ ID NO: 17851 - DNA, 120 bp, Artificial Sequence
  ENSG00000017797_14 (sequence is synthesized)
gaatgagatcctgactgaacaggaggagctcctggccatggagcagtttctgcgccggcagattgcctcagaaaaagaagagattgaacgcctcagagctgagattgctgaaattcagag

SEQ ID NO: 17852 - DNA, 120 bp, Artificial Sequence
  ENSG00000017797_15 (sequence is synthesized)
tcgccagcagcacggccgaagtgagactgaggagtactcctccgagagcgagagcgagagtgaggatgaggaggagctgcagatcattctggaagacttacagagacagaacgaagagct

SEQ ID NO: 17853 - DNA, 120 bp, Artificial Sequence
  ENSG00000017797_16 (sequence is synthesized)
ggaaataaagaacaatcatttgaatcaagcaattcatgaggagcgcgaggccatcatcgagctgcgcgtgcagctgcggctgctccagatgcagcgagccaaggccgagcagcaggcgca

SEQ ID NO: 17854 - DNA, 120 bp, Artificial Sequence
  ENSG00000017797_17 (sequence is synthesized)
ggaggacgaggagcctgagtggcgcgggggtgccgtccagccgcccagagacggcgtccttgagccaaaagcagctaaagagcagccaaaggcaggcaaggagccggcaaagccatcgcc

SEQ ID NO: 17855 - DNA, 120 bp, Artificial Sequence
  ENSG00000017797_18 (sequence is synthesized)
ctggagtccgtgagactgaaaggacccgtgcatcttactgtaacccgggggccaggccggctctctcgctgtacattctgtaaaggtgtcttctcttctcagactcttcctctgtcacac

SEQ ID NO: 17856 - DNA, 120 bp, Artificial Sequence
  ENSG00000017797_19 (sequence is synthesized)
gtctgactccttcacgtcaggctcaggttccatgggaggacgaagcagtggacgcattgtgggctttagggacagatgagttttccagatagtgtcagcttatttgaagattaattttct

SEQ ID NO: 17857 - DNA, 120 bp, Artificial Sequence
  ENSG00000017797_20 (sequence is synthesized)
ttgttaacttaaaataactattttaacccttgagtggcttctttttaaaccaaaaaccgtctttctttgcttttttatcacagcagaatcaggatctctttctcattcaaggggggaacc

SEQ ID NO: 17858 - DNA, 120 bp, Artificial Sequence
  ENSG00000017797_21 (sequence is synthesized)
accccaggtcagcgctgcgcctgctgtggccgccgcgagccacgccctctgggatctctggtaccgtcactcttgcttgtgccttccacaccttctcggtgcagatccctatgggggagc

SEQ ID NO: 17859 - DNA, 120 bp, Artificial Sequence
  ENSG00000017797_22 (sequence is synthesized)
tgcctcacgttctctgactggtcagagcagcgcctggtgggtgttccctggcccactctcctctctccttctgcagttctaaaccacagtctataagcccgagtcaccaggacggcctgt

SEQ ID NO: 17860 - DNA, 120 bp, Artificial Sequence
  ENSG00000017797_23 (sequence is synthesized)
ctggccacagacaggggctgcctgtggagcctgcccaccggcccccggcagtgcagtccagcggggaggaggctgcccgttcctgccagttcctcactgcggggaccagcaaaggccttc

SEQ ID NO: 17861 - DNA, 120 bp, Artificial Sequence
  ENSG00000017797_24 (sequence is synthesized)
tcactgggttggtcaaaggtagtcaccttggcctggtgcatccacagaggatgttgttcaaaccagaaatcttttaaacgactgaccttccttaaaaacagaatgactccgattgcttgc

SEQ ID NO: 17862 - DNA, 120 bp, Artificial Sequence
  ENSG00000017797_25 (sequence is synthesized)
ttgggctagaatgtacacgtctccttgcctgaataagccatatatatgctcttaaacaaaagtttgaaattatccatatcatctcagtgaacctactggtggactcccaattgacaagat

SEQ ID NO: 17863 - DNA, 120 bp, Artificial Sequence
  ENSG00000017797_26 (sequence is synthesized)
tgagcaatagaaaaaaattcctttcctttgaatgatagctgtgattcaccccaccccattttcttgtttctggtccatccgatgagacggatgctctgatgctctgaggcttctgggagg

SEQ ID NO: 17864 - DNA, 120 bp, Artificial Sequence
  ENSG00000017797_27 (sequence is synthesized)
ctgggccctggaggcaacgtgctgcaggcgcactctgtcagagtgaacagcaccgcgagacaggccaggctcgtggctcggaagacaaaccccacacacactcaaggggtcgaaaacaaa

SEQ ID NO: 17865 - DNA, 120 bp, Artificial Sequence
  ENSG00000017797_28 (sequence is synthesized)
ccccacacgagggctctcacctccttctcctaggtagtatttattttcagcacctgtttgatgcagtttttaatcctctacctattgcactgttgtgactcgttggccattatttgattt

SEQ ID NO: 17866 - DNA, 120 bp, Artificial Sequence
  ENSG00000017797_29 (sequence is synthesized)
ttgtacgaaaaaaagctttgttatagaaatcagcatactatttttttaaatctggagagaagatattctggtgactgaaagtatggtcgggtgtcagatataaatgtgcaaatgccttct

SEQ ID NO: 17867 - DNA, 120 bp, Artificial Sequence
  ENSG00000017797_30 (sequence is synthesized)
tgctgtcctgtcggtctcagtacgttcactttatagctgctggcaatatcgaaggttccttttttgtttgtgtaaactctaatttctatcaaggtgtcatggatttttaaaattagtatt

SEQ ID NO: 17868 - DNA, 120 bp, Artificial Sequence
  ENSG00000017797_31 (sequence is synthesized)
tcattacaaatgtctcagcattggttaactaatttttgccaggaccattattgatcaagcaaataaattcaacagccatttgggaaaaagaaaagcttctagtttttttgtacacattct

SEQ ID NO: 17869 - DNA, 120 bp, Artificial Sequence
  ENSG00000017797_32 (sequence is synthesized)
ttctgtgaggagattgagtactctgcagctggcgaggagttggttgaggcacttcttcaaggccaagggggaacacagtgttttgtttccagctcactttgtacccctcacctctgcaga

SEQ ID NO: 17870 - DNA, 120 bp, Artificial Sequence
  ENSG00000017797_33 (sequence is synthesized)
cacggggagaaccccggacccctggcatgcatgctggcggcggcatgcctcccttccacaagcccatgctgctgcagagggagcctgtgtttgcaaaacccagtggactgggctgggtct

SEQ ID NO: 17871 - DNA, 120 bp, Artificial Sequence
  ENSG00000017797_34 (sequence is synthesized)
gctgtctgagcagctcctggctccggtgggaactgcacacaagtccactggcctggcttggccccaggcattgcaattgacagacatttgcatttcatacggtaaatgaggactcagcac

SEQ ID NO: 17872 - DNA, 120 bp, Artificial Sequence
  ENSG00000017797_35 (sequence is synthesized)
agccaaccataatcagcatgtctgggatagactggtctagaataaaaatgaagtttccattgctttgtttgctttaaaaattccacaattaaaatatctgtcattgaaagcttagacaaa

SEQ ID NO: 17873 - DNA, 120 bp, Artificial Sequence
  ENSG00000017797_36 (sequence is synthesized)
ctcgtcccgttccgtcccaatcattgtaaacaggcagaggctgggcggggtgggaatggggcgcccgaggccggcctggggcgcagcgcaggaggcggctccggtggctgcggcggcagc

SEQ ID NO: 17874 - DNA, 120 bp, Artificial Sequence
  ENSG00000017797_37 (sequence is synthesized)
ctcctggtgtcgcccaccgctggcactgagcagtgggcgcctttgggtgctgcgatccttccttcaggtttcagtgggaatggacagacagatctgaagttgaaaattcttttcacaact

SEQ ID NO: 17875 - DNA, 120 bp, Artificial Sequence
  ENSG00000017797_38 (sequence is synthesized)
gggcggacggtcgcgcggcggcaggcacagagatggagttttgctgtgttgcccaggctggtcttaaactttgagctcaggcagtccaccctcctcggcctcctaaagtgctgggattac

SEQ ID NO: 17876 - DNA, 120 bp, Artificial Sequence
  ENSG00000017797_39 (sequence is synthesized)
aaggaagaaaaattattgtgaggaaaatttggcctggatcctaagccttattcatttccttgatcctaccagttgcacaaaaatccacccctctccccagcctttctttggtgttctggc

SEQ ID NO: 17877 - DNA, 120 bp, Artificial Sequence
  ENSG00000017797_40 (sequence is synthesized)
atttgtttttttaatatttccttccattaggaggatttcacgttagttgttcatagcttgcagcagccaggactaaaacaaagtgaagtatactggcagcattgcttaacagggctgcat

SEQ ID NO: 17878 - DNA, 80 bp, Artificial Sequence
  ENSG00000017797_41 (sequence is synthesized)
aggcgcctgcttttttttttttttttttctttcctctctaagcagaggctcagtggtatgagggccatcagcaagaaaag

SEQ ID NO: 17879 - DNA, 120 bp, Artificial Sequence
  ENSG00000017797_42 (sequence is synthesized)
agcagaggctcagtggtatgagggccatcagcaagaaaagaaaggttaactgtgtgaaggaagcttcttggccaagagacacgtttatggacacagtcatataatgcatttccttagctc

SEQ ID NO: 17880 - DNA, 120 bp, Artificial Sequence
  ENSG00000017797_43 (sequence is synthesized)
agctaagaggcatgacatggttttggttttggttttcttggtgcgcggttcttagagttagtgcagtacccggtcaatacatggagtggtccaagcaagcttctgttccatctccctgct

SEQ ID NO: 17881 - DNA, 120 bp, Artificial Sequence
  ENSG00000017797_44 (sequence is synthesized)
ccagaaatcctagaacagatactacacccaactttagccaaaagaccaagaagcagtaaatgtttaggccccacatgtgaatgctttggtcagctacatgcaactattacgtatattagc

SEQ ID NO: 17882 - DNA, 120 bp, Artificial Sequence
  ENSG00000017797_45 (sequence is synthesized)
tgggtatctaaatcaagcaatatgtatattatttaaaagtaaaaagatttcttagaaagcggtatgacttttataccaggataggatgaaagccctgacctgtagcagcatctgtgttcc

SEQ ID NO: 17883 - DNA, 120 bp, Artificial Sequence
  ENSG00000017797_46 (sequence is synthesized)
catctgtgttccaaattattacattcccattattcagtgtcttggtacctcatcagtttctgtttagagatttgttttataaagttaattgttggctgaggcaggaggatcacttgaacc

SEQ ID NO: 17884 - DNA, 120 bp, Artificial Sequence
  ENSG00000017797_47 (sequence is synthesized)
catgatcgtaccactgcactccagccagggcgagattgagaccttgtctcaaaaataataataataatacttgttggtcacaagtactttcatgatgagttgttaagtcatacacatgtg

SEQ ID NO: 17885 - DNA, 120 bp, Artificial Sequence
  ENSG00000017797_48 (sequence is synthesized)
catacacatgtggaatatatagagagatagacttagttttttcatttagttggttcatacgcaattctagaaggtagatttgatacttaagttttgctgagaaagggcagatatttttga

SEQ ID NO: 17886 - DNA, 120 bp, Artificial Sequence
  ENSG00000017797_49 (sequence is synthesized)
taattgggaaaaccgttacataatccactagattacatgccattatttaagagtatttttggtaaaatgttacttttttatagaaaattaaataaattaggcattgaatttgagtttata

SEQ ID NO: 17887 - DNA, 120 bp, Artificial Sequence
  ENSG00000017797_50 (sequence is synthesized)
ttaggcattgaatttgagtttataactccttagtattatataaatatatttaaacaaatatttgatttttatgaataattggctaggcatggtagctcacgcctgtaatcccggcacttt

SEQ ID NO: 17888 - DNA, 120 bp, Artificial Sequence
  ENSG00000017797_51 (sequence is synthesized)
taataataatatactgaattgagttttaaacatttaaacattaataacataagttgcttctctcacatggtcttaatagccatgaattagttttgttttaggtaaaagtttttctgaaaa

SEQ ID NO: 17889 - DNA, 120 bp, Artificial Sequence
  ENSG00000017797_52 (sequence is synthesized)
ttttccacagctttgttcaaaggattctttttgtctctgacctacttttaatgtctgcattttttttggaaattcagagtcatagaactcttctctgtgtgtaaaagcattcagacagag

SEQ ID NO: 17890 - DNA, 120 bp, Artificial Sequence
  ENSG00000017797_53 (sequence is synthesized)
ctgctgcccatccttgcaacagctaggggctgaactcctgctctgctgagttttgggtttattctctaacctgtggcaatgtgctgtagtcagcccgacttatgctactgtcatggacag

SEQ ID NO: 17891 - DNA, 120 bp, Artificial Sequence
  ENSG00000017797_54 (sequence is synthesized)
tgctaataataatactgccttttgctggagatgttagttctcacttatgcattttaagaccttttgctggaagtgttagttcttgcttatctaattttaaacgaatatgaaagacaattt

SEQ ID NO: 17892 - DNA, 120 bp, Artificial Sequence
  ENSG00000017797_55 (sequence is synthesized)
aagtgattttgtacattttaatttactcatctacattttcttgtattttttggattaaagtgtacctgtatgctctttctttctgtggaacacttcatttgtagtgtccaatttttaaaa

SEQ ID NO: 17893 - DNA, 120 bp, Artificial Sequence
  ENSG00000017797_56 (sequence is synthesized)
agaaaacattttgataacagtttcagagtaatgacaaaccaaacacacattctaattgtctacttgtacaatttgttgggtaggtactatagggggaagaattaaatatacatgaggaag

SEQ ID NO: 17894 - DNA, 120 bp, Artificial Sequence
  ENSG00000017797_57 (sequence is synthesized)
agaaaaaatctttgccaagaatttcagttattatcacttatggtttacccatattgtcataaaagtaagaaaatgggaattctaattttctgtcacaaaataaagattatataaaaataa

SEQ ID NO: 17895 - DNA, 83 bp, Artificial Sequence
  ENSG00000017797_58 (sequence is synthesized)
ttaatggcctctgcctcctgggttcaaacgattctgctgcctcagcctcctgaggggattacaggcatgcgccatcacgcccg

SEQ ID NO: 17896 - DNA, 120 bp, Artificial Sequence
  ENSG00000017797_59 (sequence is synthesized)
gccaccgcgccctgccaacagtagtagcttttgagaagtgactctttaaacaaggtgtaatggataggtaacagagaagacctcgtcccttcctagtcagggcatcagcatgactgagtg

SEQ ID NO: 17897 - DNA, 120 bp, Artificial Sequence
  ENSG00000018189_0 (sequence is synthesized)
agttcattagtcagccattttggtcaacaccctgcttactgcgcacggccaatcctatgagaactcagcatcccagctcatctgagcagatcctggaagtgatttctgcagctcaggatt

SEQ ID NO: 17898 - DNA, 120 bp, Artificial Sequence
  ENSG00000018189_1 (sequence is synthesized)
ttttttttaagctacattgaaaatataggtttattttttgttcaggtttttcttttatattttttttctgcacaaaggaggaggatttttcacttactcatatcgaggccagatttttaa

SEQ ID NO: 17899 - DNA, 120 bp, Artificial Sequence
  ENSG00000018189_2 (sequence is synthesized)
agccagctaaggcagcatcagctgtgcgggatttaaagcctatagctcagctgaaaaaaaaggtggggggcagggaagggaagataaaaggagaggaagctgggagaagacaagcatcat

SEQ ID NO: 17900 - DNA, 120 bp, Artificial Sequence
  ENSG00000018189_3 (sequence is synthesized)
cttattttgctatgtggtaggaactgtctataagatagtgtagaattgtttatcttgagcagtttgttcttaacctataaggtatttttccttttttttttttttaaacctcccccaccc

SEQ ID NO: 17901 - DNA, 120 bp, Artificial Sequence
  ENSG00000018189_4 (sequence is synthesized)
ttttcctgaaagctttgtttcagagctttgtattgggtttttttggtgaggaggttgtatttatttttttggtgtgtgtgtgtgagtgtgtgtgtgtctgtgtgtgtgttgtggtcccag

SEQ ID NO: 17902 - DNA, 120 bp, Artificial Sequence
  ENSG00000018189_5 (sequence is synthesized)
ctgagtcatcatgtctgctctgacgcctccgaccgatatgccaacccccaccactgacaagatcacacaggctgccatggagaccatctacctttgcaaattccgagtgtccatggatgg

SEQ ID NO: 17903 - DNA, 120 bp, Artificial Sequence
  ENSG00000018189_6 (sequence is synthesized)
agaatggctctgcctgcgagagctggatgacatctcacttacacctgacccagagcctacccatgaagatcctaattatctcatggctaatgaacgcatgaacctcatgaacatggccaa

SEQ ID NO: 17904 - DNA, 120 bp, Artificial Sequence
  ENSG00000018189_7 (sequence is synthesized)
gctgagtatcaagggcttgattgaatcagctctgaacctggggaggactcttgactctgactatgcacctctccagcaattctttgtggtgatggagcactgtctgaaacatggcttgaa

SEQ ID NO: 17905 - DNA, 120 bp, Artificial Sequence
  ENSG00000018189_8 (sequence is synthesized)
agctaaaaaaacttttctcggacaaaataaatccttctgggggcctctagaactggtagaaaagcttgttccagaagccgcagagataacagcaagtgttaaagatcttccaggacttaa

SEQ ID NO: 17906 - DNA, 120 bp, Artificial Sequence
  ENSG00000018189_9 (sequence is synthesized)
gacaccagtaggtagaggaagagcctggcttcgtttggcattaatgcaaaagaaactttcagaatatatgaaagctttgatcaataagaaagaacttctcagtgaattctacgaacccaa

SEQ ID NO: 17907 - DNA, 120 bp, Artificial Sequence
  ENSG00000018189_10 (sequence is synthesized)
tgccctcatgatggaagaagaaggagccataattgctggtctgttggtgggtctgaatgtcattgatgccaatttctgtatgaaaggagaagacttggactctcaggttggagttataga

SEQ ID NO: 17908 - DNA, 120 bp, Artificial Sequence
  ENSG00000018189_11 (sequence is synthesized)
tttttcaatgtatctcaaggacgggaacagcagtaaaggtactgaaggagacggtcagattactgcaattctggaccagaagaactatgtagaagaactgaacagacatttgaatgctac

SEQ ID NO: 17909 - DNA, 120 bp, Artificial Sequence
  ENSG00000018189_12 (sequence is synthesized)
tgtaaacaaccttcaggcaaaagtagatgcattagaaaaatccaacactaaactgacagaggagcttgcagttgcaaacaacaggatcattaccttacaagaagaaatggaacgagttaa

SEQ ID NO: 17910 - DNA, 120 bp, Artificial Sequence
  ENSG00000018189_13 (sequence is synthesized)
agaggaaagttcctacatactggaatccaatcggaagggtcccaagcaagacagaactgcagaagggcaagcactaagtgaagcaagaaagcatttaaaagaagagacacaattacgatt

SEQ ID NO: 17911 - DNA, 120 bp, Artificial Sequence
  ENSG00000018189_14 (sequence is synthesized)
ggatgttgagaaagaactggagatgcagatcagcatgaggcaggagatggaattggctatgaagatgctggagaaggatgtctgtgagaagcaggatgccctggtatctcttcggcagca

SEQ ID NO: 17912 - DNA, 120 bp, Artificial Sequence
  ENSG00000018189_15 (sequence is synthesized)
gctggatgacctcagagctctcaagcatgaacttgcctttaagctgcagagttcagacttaggagtaaaacagaaaagtgaactaaacagtcgcttggaagagaagactaatcagatggc

SEQ ID NO: 17913 - DNA, 120 bp, Artificial Sequence
  ENSG00000018189_16 (sequence is synthesized)
tgctaccattaaacaacttgaacaaagattgcgccaggctgagcgaagccgccaatctgctgagttggacaaccggctcttcaaacaggactttggagacaagatcaacagtctgcagct

SEQ ID NO: 17914 - DNA, 120 bp, Artificial Sequence
  ENSG00000018189_17 (sequence is synthesized)
ggaagtcgaggagctcaccaggcagcggaaccagcttgagttagaactaaaacaggaaaaagaaagaagattacaaaacgacaggagcatcccaggaaggggttcccagaagtcagaatc

SEQ ID NO: 17915 - DNA, 120 bp, Artificial Sequence
  ENSG00000018189_18 (sequence is synthesized)
tctctgaaaagccacagttgtgtcagctatgccaggaagacggcagcctaacaaagaatgtgtgtaagaactgcagcggaaccttctgtgatgcctgttcaacaaatgaactgcctcttc

SEQ ID NO: 17916 - DNA, 120 bp, Artificial Sequence
  ENSG00000018189_19 (sequence is synthesized)
cttcaagtatcaagcttgagcgagtttgcaatccctgtcacaagcatctgatgaagcaatattctaccagcccatcataagactggaggccaagacctggaccaaaacgtttatgcaggc

SEQ ID NO: 17917 - DNA, 120 bp, Artificial Sequence
  ENSG00000018189_20 (sequence is synthesized)
tcctctgtacctgtgttttagctgtcaggatctcatagagcccagttcttagagtcaactaaagagttgataggaatttactaggtccagggagaaaaggcagtggttggggttactgga

SEQ ID NO: 17918 - DNA, 120 bp, Artificial Sequence
  ENSG00000018189_21 (sequence is synthesized)
aattttgctcattttctctaatgactgtatgaataaaagtgaacttacttgagcctttctcttctaaatctaaacaacctgatattgaaggtttgctttatagcatatctttggaaaggc

SEQ ID NO: 17919 - DNA, 120 bp, Artificial Sequence
  ENSG00000018189_22 (sequence is synthesized)
aactcatttttatgattagtgatactggggtggatttaataggagagagaatccaggcagataagaataaaaaggaaaatgatcatctccttctatagcatttgcagattcaagggggag

SEQ ID NO: 17920 - DNA, 120 bp, Artificial Sequence
  ENSG00000018189_23 (sequence is synthesized)
aggtagatgctgagatcaaaatgacagttgttacttatttttccaggtgctgttagtataaacattgtttcctcttcacccctgctaactacctctttaaagtatttctaccaaactgtg

SEQ ID NO: 17921 - DNA, 120 bp, Artificial Sequence
  ENSG00000018189_24 (sequence is synthesized)
aacccaatctcagggaaaagaaattaaaaagtaatataaattctgcatatattaaaaacaatattgtaatatgttataatttcaggaccagaattttctggtctttacctacaagggttt

SEQ ID NO: 17922 - DNA, 120 bp, Artificial Sequence
  ENSG00000018189_25 (sequence is synthesized)
tcattatcaaaaaaaagaacatttgtttttctactttatgacttcaaagtaaataactgcccttttcagaatctccttccacaaaacaagccaactcttccccattccctccatcttcct

SEQ ID NO: 17923 - DNA, 120 bp, Artificial Sequence
  ENSG00000018189_26 (sequence is synthesized)
ttccaagtcataatggaaattgtaaggagttttaaaaatagggtttggcttttgcaaatagaagatattgattaaagcaaagtcaaatatagagtaaaataagtttaatttgttttctta

SEQ ID NO: 17924 - DNA, 120 bp, Artificial Sequence
  ENSG00000018189_27 (sequence is synthesized)
cttaagacagggtcttgctctgttgcacaagctggagggcagtagtgcaatcacagctcactgaatccctgttctcccgggcctcaagcaatcttcccaccttagcctcccaagtagctg

SEQ ID NO: 17925 - DNA, 120 bp, Artificial Sequence
  ENSG00000018189_28 (sequence is synthesized)
tggctttttttttttttttttggccggggagggggtctcattggttgctcagcctggtctcaaactcctgggcttaagcagtcctcccaccttgacttccacagtgccgagattacaggc

SEQ ID NO: 17926 - DNA, 120 bp, Artificial Sequence
  ENSG00000018189_29 (sequence is synthesized)
atgagccaccacacctggccaagtttaatttgttcatggctgagaacagttagctcggaatacttacattgttttttgaataaggaattccttattctgagtgagtcacgaatgagagct

SEQ ID NO: 17927 - DNA, 120 bp, Artificial Sequence
  ENSG00000018189_30 (sequence is synthesized)
gatagatgctttcttgaaaagggcaatacagtcatcccttggtatccatgggggattggttccaggaacccaacttgatatcagaatccatgggtgctcaagtcccattatagagaatgg

SEQ ID NO: 17928 - DNA, 120 bp, Artificial Sequence
  ENSG00000018189_31 (sequence is synthesized)
gttatatggtatttgcatataacctacatacatcctcctgtgtactttaaatcatctgaagatgattacttatacctaataaaatacctacacatcacttcatttgcatggattcaacat

SEQ ID NO: 17929 - DNA, 120 bp, Artificial Sequence
  ENSG00000018189_32 (sequence is synthesized)
agtgcttggtgttcagtaaattcaagttttgcttttttggaactttgtggaatttttctttttctgaatatttttgattggcagttggttgaagccatggatgcagaacccatggatatg

SEQ ID NO: 17930 - DNA, 120 bp, Artificial Sequence
  ENSG00000018189_33 (sequence is synthesized)
gagggctgactgtacttacttacatatctatctatctttgagtaacaaactctttgggggaaaagagggaagtgtattgagcaagagaaggcaaaaaacattacataatattttgattct

SEQ ID NO: 17931 - DNA, 120 bp, Artificial Sequence
  ENSG00000018189_34 (sequence is synthesized)
gttacgtgtgtctatagattgtttcattctaatcaagacctaagaaggtatgattctgtgactgatttagaattctggggtggaaatatcctggaaccatgttttttaataaattctgtc

SEQ ID NO: 17932 - DNA, 120 bp, Artificial Sequence
  ENSG00000018189_35 (sequence is synthesized)
tcttggaaagagttaacaacagcctgggaaagagttgttattccaaaagtcagcctgttacttggtgaagctgaagtttaagagttctggggaaaaataaaatctagtaattccagccta

SEQ ID NO: 17933 - DNA, 120 bp, Artificial Sequence
  ENSG00000018189_36 (sequence is synthesized)
aacttgaacaaaggatgggaagcacaaaatgcaagaggaaaatgttaaactaaaaaagcccctggaagaaagccacaggctgcaaccccaccctatggatgaacagaatgtgtgtaagaa

SEQ ID NO: 17934 - DNA, 120 bp, Artificial Sequence
  ENSG00000018189_37 (sequence is synthesized)
ccgagaagaaaggtggcggtggcggcggcggcgcagcggacgggacggggcggcggctcctcgccctgaccctctgctcccccgcccaggcccgggcgcgaatcggaggctgcggcgaag

SEQ ID NO: 17935 - DNA, 120 bp, Artificial Sequence
  ENSG00000018189_38 (sequence is synthesized)
gaaggaaggagtgagcatggctgagaccccgccgccgcccaccgctggtgccgaaagttgcagcgaggagccggcgaggggcggggagtggcggccggaggagccgcgccgcgctcccgc

SEQ ID NO: 17936 - DNA, 80 bp, Artificial Sequence
  ENSG00000018189_39 (sequence is synthesized)
gcctcccccgccgggcagtcggagcccgactcgccggtggccgcccccttcttcctgctgtaccccggcgatggaggcgc

SEQ ID NO: 17937 - DNA, 120 bp, Artificial Sequence
  ENSG00000018189_40 (sequence is synthesized)
cgatggaggcgccggcttcggagtgcgcccgccgccgcagcagcagcgctcctggaggaccccgccgtcccccggctcaccgctgcccttcctgctgctgagctacccgagcggcggcgg

SEQ ID NO: 17938 - DNA, 120 bp, Artificial Sequence
  ENSG00000018189_41 (sequence is synthesized)
tgtttctttaatgaaacactttggattgtcagtgctgaagtgaaaagaatgtgctgtacattcggcaaatagaaaatacatgaaattcttccaaattagcatcagacattctggtagaaa

SEQ ID NO: 17939 - DNA, 120 bp, Artificial Sequence
  ENSG00000018189_42 (sequence is synthesized)
aaagccagttgaatgttatgtgtgttttctaaggtatgactgaaatgtttttaggaaatgtcaatcacttgactagcctttaaaaaaaaaaaagaaaggtcagccttttatgactgtttt

SEQ ID NO: 17940 - DNA, 120 bp, Artificial Sequence
  ENSG00000018189_43 (sequence is synthesized)
gaacatcagaactcttaatccatgtcagagtcatgtgttagaggaaggatacttaaaagcatggaaggactcttaaatgtatgtatgtaattctgtgattttattgttcatcactgaagt

SEQ ID NO: 17941 - DNA, 120 bp, Artificial Sequence
  ENSG00000018189_44 (sequence is synthesized)
ctttgaatacttggatgctaggggatatagaggcactgagagataggtgtcctccaaggatctattctggatctttctctcccttctttaacccttttctcttatctcccttttctttct

SEQ ID NO: 17942 - DNA, 120 bp, Artificial Sequence
  ENSG00000018189_45 (sequence is synthesized)
gattatgtgttcagaaggcagtctcagtgaacttctcaaagtgagaaggttgtagcttttaatacagtctcagaagcctatgggacaaagttttctggacacggttcatcccttcttgtt

SEQ ID NO: 17943 - DNA, 120 bp, Artificial Sequence
  ENSG00000018189_46 (sequence is synthesized)
gctctgccctgaaaataacctggctagtcaccctttcaagactcttgggaggatttgacagatttggtggagcaaatgcgcgatgatacagaagatcctaattatctcatggctaatgaa

SEQ ID NO: 17944 - DNA, 120 bp, Artificial Sequence
  ENSG00000018189_47 (sequence is synthesized)
tgacagcaagcccttaaccattcgtaattactgcactttaagacaaggggttggcattctttagagaatatgtctgtatagaattccaatttttcatccttttcctctccaacttacctc

SEQ ID NO: 17945 - DNA, 120 bp, Artificial Sequence
  ENSG00000018189_48 (sequence is synthesized)
gacagagcgagactctgtctccaaaaagaaagaaaaatattgtggcactggggcatcaacttgattgaacgtccagaggattatagtctgctgtatatggccatccttggttttaccagt

SEQ ID NO: 17946 - DNA, 120 bp, Artificial Sequence
  ENSG00000018189_49 (sequence is synthesized)
gtttttcagagctcagtctggggaaaagaaaaaaaaaattatacttcccctaagaagtaactgatatctggagccaactttgcaagatgggaagcacaaaatgcaagaggaaaatgttaa

SEQ ID NO: 17947 - DNA, 120 bp, Artificial Sequence
  ENSG00000018189_50 (sequence is synthesized)
gagccaactttgcaagtaagtagaatacattctgaattttatttgaatctcaagaattaaaatattactttgaaaatcatttgtcacaaactgtcagaataattaagaaactacttagag

SEQ ID NO: 17948 - DNA, 120 bp, Artificial Sequence
  ENSG00000018189_51 (sequence is synthesized)
caaagaatgaggaaacatagcttgaaagttagatcccttccctaataaaaaaagctacttagctttatacccaaactaaggcattgcagaagaaaatatttgcaatatcattatttagca

SEQ ID NO: 17949 - DNA, 120 bp, Artificial Sequence
  ENSG00000018189_52 (sequence is synthesized)
ttctgaataattaataaattgggctgttttcttttggcaggatgggaagcacaaaatgcaagaggaaaatgttaaactaaaaaagcccctggaagaaagccacaggctgcaaccccaccc

SEQ ID NO: 17950 - DNA, 120 bp, Artificial Sequence
  ENSG00000018189_53 (sequence is synthesized)
aggcaaagaccttaaatagtgcagcaaataaactgatcccaaaacatcattaggcatttttaagttggtcacgtcgcaagtccgatatcacaacttaattgtaaaaggaagaaatctgaa

SEQ ID NO: 17951 - DNA, 120 bp, Artificial Sequence
  ENSG00000018189_54 (sequence is synthesized)
atgtcaccaaaaagttgactttgaatttgttggacttttaaaaaaccagttggaaatataggttgggtttttttcttattgttttctccccagggttagaaaaattggtataagttccta

SEQ ID NO: 17952 - DNA, 120 bp, Artificial Sequence
  ENSG00000018189_55 (sequence is synthesized)
attaaaagctgaataaactttgagaaattatttctgagttgaccaataaataaaaataccactttctttaaaaaagcctagggaattgaagctctgtacatatactaatgatgcctttac

SEQ ID NO: 17953 - DNA, 120 bp, Artificial Sequence
  ENSG00000018189_56 (sequence is synthesized)
aacccagtccttgataataccagattctcggtgcattgttcatgtctgtatctgcaagcctgttctgccattgcagtgtgatgaacctagaggtaactaccatgtgaacttgaactcttc

SEQ ID NO: 17954 - DNA, 120 bp, Artificial Sequence
  ENSG00000018189_57 (sequence is synthesized)
taaaatagttctgtgtctcttagaccatgaccccttttcacttttgttatataggtttaatccccaagccaaggatagtacttagtatttcactacacttctattctcagtaaccaagat

SEQ ID NO: 17955 - DNA, 120 bp, Artificial Sequence
  ENSG00000018189_58 (sequence is synthesized)
tgcttgcaactttttttgccttggtgacttttgaaaaaaaaagaaaagaaaaagcagcatccttatatttctttaaaatacatagaaataaagttagtaattaggtaacctatgataaca

SEQ ID NO: 17956 - DNA, 120 bp, Artificial Sequence
  ENSG00000018189_59 (sequence is synthesized)
taataatgtggacgcctggggaaaccctcctcatgtttgtcatcttctacctctgccgttttcctgcaattccgcttcctacttaggcagttcagagagaacaattctaataaaaacact

SEQ ID NO: 17957 - DNA, 120 bp, Artificial Sequence
  ENSG00000018189_60 (sequence is synthesized)
cctctcctattaacaaaaaatgatgcagtacccatttttcgtatcctgcttttcttatattggagtaaaaaggacagggtatagacatgaatgatgatattctgcctggcctgtcatttc

SEQ ID NO: 17958 - DNA, 120 bp, Artificial Sequence
  ENSG00000018189_61 (sequence is synthesized)
ttacctggaaacatttacttaagagtttctgttactttttgttcagatggggatttgctaaaggttctgggaagctaataattgaattattagaaaaacatttcagaataggaagtaaat

SEQ ID NO: 17959 - DNA, 120 bp, Artificial Sequence
  ENSG00000018189_62 (sequence is synthesized)
gataaacttatattctttattattatttagtacaaaaatagattcccagtagatatccacaagcaatattagcagggcttctgtttctaagtgaccacagactaaccctttctaggcttt

SEQ ID NO: 17960 - DNA, 120 bp, Artificial Sequence
  ENSG00000018189_63 (sequence is synthesized)
aacattgtaaataatcctataaacagtttgattttttaagatgatttttgatttgaagagacaggctttacataagccttcattccttcaaaaggtcctgacaaaatacttgggtttttt

SEQ ID NO: 17961 - DNA, 120 bp, Artificial Sequence
  ENSG00000018189_64 (sequence is synthesized)
tctctttttttcattctggtatgctttgcagcatttcagctgctttggtggggacacagataaccccttcgcttccagctcttaaaattctttatctttttcttggcaaaaccagaatta

SEQ ID NO: 17962 - DNA, 120 bp, Artificial Sequence
  ENSG00000018189_65 (sequence is synthesized)
agagtgtaagatagattccatgtgtgcttatataggtccctgcacagattggacttgaaccaaaattaagtccaaagaacatatgtttagaccaacttcatggaagtggaagatcctgtg

SEQ ID NO: 17963 - DNA, 120 bp, Artificial Sequence
  ENSG00000018189_66 (sequence is synthesized)
ctcttgaacttattttaattcttataatttgcacctatataaacaaagctcctactgtattcttctcttcatcaaccttttgtggtgatgggttgccttttctacgagcatttggaagga

SEQ ID NO: 17964 - DNA, 120 bp, Artificial Sequence
  ENSG00000018189_67 (sequence is synthesized)
gtgatcaaataccgaaattgaactttctaaaacctacacatagcatgcgtttaaattctattatataaagccccaagtgctttaccttctaaaacatgcttctctataggtgcaaagtta

SEQ ID NO: 17965 - DNA, 120 bp, Artificial Sequence
  ENSG00000018189_68 (sequence is synthesized)
taagatatgtagaagaaaacatccatcagaatcttctggagaatatggtcagagtcttaaacaggcccagtgctgagttctttgtccacttagtcacacatcttttgtgggaatgggaaa

SEQ ID NO: 17966 - DNA, 120 bp, Artificial Sequence
  ENSG00000018189_69 (sequence is synthesized)
ggaaggagacagccaaactctgacaaaggcttttccttatagaataacccaaagcctaggtgagggttgatatataatgtcccatgatttaatatatgtggtttgggggaaaggacaaga

SEQ ID NO: 17967 - DNA, 120 bp, Artificial Sequence
  ENSG00000018189_70 (sequence is synthesized)
aaaaactataattccacatataagaaggtagttgcccatttacaagttccagttatgtgtgtaaaacagaaaaattaagtaccaaacctattaggaaatttttttaaaaagtggatttaa

SEQ ID NO: 17968 - DNA, 120 bp, Artificial Sequence
  ENSG00000018189_71 (sequence is synthesized)
cttaaattactgtgtacttgaggttggctttggatatggattttctaaaaagtgatgttttattgtttatcatctaatggctgtaaactgtagtactagaataaaaaaaatggaaaatca

SEQ ID NO: 17969 - DNA, 120 bp, Artificial Sequence
  ENSG00000018189_72 (sequence is synthesized)
tgtattctgagctttttattgaaatgatataaatgaaaatacatgaagttcctatttgtcacaattttttacttctccattgtaggctgcaaccccaccctatggatgaacaggtaacag

SEQ ID NO: 17970 - DNA, 120 bp, Artificial Sequence
  ENSG00000018189_73 (sequence is synthesized)
aaatacaggatttcagtacagcgcacaagacgggaacaaaagaggtggtggaaggaagacacccacctttggtttctcacataaagagctcaatactccaaacagtgaatcaacggttga

SEQ ID NO: 17971 - DNA, 120 bp, Artificial Sequence
  ENSG00000018189_74 (sequence is synthesized)
ggtaacagagcctcctgtttcaaaacatcttgtatgaattatgaagttggttgtaccgtgcctagccagcaaataagaatgtgtgtaagaactgcagcggaaccttctgtgatgcctgtt

SEQ ID NO: 17972 - DNA, 120 bp, Artificial Sequence
  ENSG00000018236_0 (sequence is synthesized)
caggtgtttaaaattatccaactgccatagagctaaattcttttttggaaaattgaaccgaacttctactgaatacaagatgaaaatgtggttgctggtcagtcatcttgtgataatatc

SEQ ID NO: 17973 - DNA, 120 bp, Artificial Sequence
  ENSG00000018236_1 (sequence is synthesized)
tattactacctgtttagcagagtttacatggtatagaagatatggtcatggagtttctgaggaagacaaaggatttggaccaatttttgaagagcagccaatcaataccatttatccaga

SEQ ID NO: 17974 - DNA, 120 bp, Artificial Sequence
  ENSG00000018236_2 (sequence is synthesized)
ggaatcactggaaggaaaagtctcactcaactgtagggcacgagccagccctttcccggtttacaaatggagaatgaataatggggacgttgatctcacaagtgatcgatacagtatggt

SEQ ID NO: 17975 - DNA, 120 bp, Artificial Sequence
  ENSG00000018236_3 (sequence is synthesized)
aggaggaaaccttgttatcaacaaccctgacaaacagaaagatgctggaatatactactgtttagcatctaataactacgggatggtcagaagcactgaagcaaccctgagctttggata

SEQ ID NO: 17976 - DNA, 120 bp, Artificial Sequence
  ENSG00000018236_4 (sequence is synthesized)
tcttgatcctttcccacctgaggaacgtcctgaggtcagagtaaaagaagggaaaggaatggtgcttctctgtgaccccccataccattttccagatgatcttagctatcgctggcttct

SEQ ID NO: 17977 - DNA, 120 bp, Artificial Sequence
  ENSG00000018236_5 (sequence is synthesized)
aaatgaatttcctgtatttatcacaatggataaacggcgatttgtgtctcagacaaatggcaatctctacattgcaaatgttgaggcttccgacaaaggcaattattcctgctttgtttc

SEQ ID NO: 17978 - DNA, 120 bp, Artificial Sequence
  ENSG00000018236_6 (sequence is synthesized)
cagtccttctattacaaagagcgtgttcagcaaattcatcccactcattccaatacctgaacgaacaacaaaaccatatcctgctgatattgtagttcagttcaaggatgtatatgcatt

SEQ ID NO: 17979 - DNA, 120 bp, Artificial Sequence
  ENSG00000018236_7 (sequence is synthesized)
gatgggccaaaatgtgaccttagaatgttttgcacttggaaatcctgttccggatatccgatggcggaaggttctagaaccaatgccaagcactgctgagattagcacctctggggctgt

SEQ ID NO: 17980 - DNA, 120 bp, Artificial Sequence
  ENSG00000018236_8 (sequence is synthesized)
tcttaagatcttcaatattcagctagaagatgaaggcatctatgaatgtgaggctgagaacattagaggaaaggataaacatcaagcaagaatttatgttcaagcattccctgagtgggt

SEQ ID NO: 17981 - DNA, 120 bp, Artificial Sequence
  ENSG00000018236_9 (sequence is synthesized)
agaacacatcaatgacacagaggtggacataggcagtgatctctactggccttgtgtggccacaggaaagcccatccctacaatccgatggttgaaaaatggatatgcgtatcataaagg

SEQ ID NO: 17982 - DNA, 120 bp, Artificial Sequence
  ENSG00000018236_10 (sequence is synthesized)
ggaattaagactgtatgatgtgacttttgaaaatgccggaatgtatcagtgcatagctgaaaacacatatggagccatttatgcaaatgctgagttgaagatcttggcgttggctccaac

SEQ ID NO: 17983 - DNA, 120 bp, Artificial Sequence
  ENSG00000018236_11 (sequence is synthesized)
ttttgaaatgaatcctatgaagaaaaagatcctggctgctaaaggtggaagggtgataattgaatgcaaacctaaagctgcaccgaaaccaaagttttcatggagtaaagggacagagtg

SEQ ID NO: 17984 - DNA, 120 bp, Artificial Sequence
  ENSG00000018236_12 (sequence is synthesized)
gcttgtcaatagcagcagaatactcatttgggaagatggtagcttggaaatcaacaacattacaaggaatgatggaggtatctatacatgctttgcagaaaataacagagggaaagctaa

SEQ ID NO: 17985 - DNA, 120 bp, Artificial Sequence
  ENSG00000018236_13 (sequence is synthesized)
tagcactggaacccttgttatcacagatcctacgcgaattatattggccccaattaatgccgatatcacagttggagaaaacgccaccatgcagtgtgctgcgtcctttgatcctgcctt

SEQ ID NO: 17986 - DNA, 120 bp, Artificial Sequence
  ENSG00000018236_14 (sequence is synthesized)
ggatctcacatttgtttggtccttcaatggctatgtgatcgattttaacaaagagaatattcactaccagaggaattttatgctggattccaatggggaattactaatccgaaatgcgca

SEQ ID NO: 17987 - DNA, 120 bp, Artificial Sequence
  ENSG00000018236_15 (sequence is synthesized)
gctgaaacatgctggaagatacacatgcactgcccagacaattgtggacaattcttcagcttcagctgaccttgtagtgagaggccctccaggccctccaggtggtctgagaatagaaga

SEQ ID NO: 17988 - DNA, 120 bp, Artificial Sequence
  ENSG00000018236_16 (sequence is synthesized)
cattagagccacttctgtggcacttacttggagccgtggttcagacaatcatagtcctatttctaaatacactatccagaccaagactattctttcagatgactggaaagatgcaaagac

SEQ ID NO: 17989 - DNA, 120 bp, Artificial Sequence
  ENSG00000018236_17 (sequence is synthesized)
agatcccccaattattgaaggaaatatggaggcagcaagagcagtggacttaatcccatggatggagtatgaattccgcgtggtagcaaccaatacactgggtagaggagagcccagtat

SEQ ID NO: 17990 - DNA, 120 bp, Artificial Sequence
  ENSG00000018236_18 (sequence is synthesized)
accatctaacagaattaaaacagacggtgctgcaccaaatgtggctccttcagatgtaggaggtggaggtggaagaaacagagagctgaccataacatgggcgcctttgtcaagagaata

SEQ ID NO: 17991 - DNA, 120 bp, Artificial Sequence
  ENSG00000018236_19 (sequence is synthesized)
ccactatggcaacaattttggttacatagtggcatttaagccatttgatggagaagaatggaaaaaagtcacagttactaatcctgatactggccgatatgtccataaagatgaaaccat

SEQ ID NO: 17992 - DNA, 120 bp, Artificial Sequence
  ENSG00000018236_20 (sequence is synthesized)
gagcccttccactgcatttcaagttaaagtcaaggccttcaacaacaaaggagatggaccttacagcctagtagcagtcattaattcagcacaagacgctcccagtgaagccccaacaga

SEQ ID NO: 17993 - DNA, 120 bp, Artificial Sequence
  ENSG00000018236_21 (sequence is synthesized)
agtaggtgtaaaagtcttatcatcttctgagatatctgttcattgggaacatgttttagaaaaaatagtggaaagctatcagattcggtattgggctgcccatgacaaagaagaagctgc

SEQ ID NO: 17994 - DNA, 120 bp, Artificial Sequence
  ENSG00000018236_22 (sequence is synthesized)
gacctccaagtgacatgattgaggctttcaccaagaaagcacctcctagccagcctccaaggatcatcagttcagtaaggtctggttcacgctatataatcacctgggatcatgtcgttg

SEQ ID NO: 17995 - DNA, 120 bp, Artificial Sequence
  ENSG00000018236_23 (sequence is synthesized)
cactatcaaatgaatctacagtgacgggatataaggtactctacagacctgatggccagcatgatggcaagctgtattcaactcacaaacactccatagaagtcccaatccccagagatg

SEQ ID NO: 17996 - DNA, 120 bp, Artificial Sequence
  ENSG00000018236_24 (sequence is synthesized)
gagaatacgttgtggaggttcgcgcgcacagtgatggaggagatggagtggtgtctcaagtcaaaatttcaggtgcacccaccctatccccaagtcttctcggcttactgctgcctgcct

SEQ ID NO: 17997 - DNA, 120 bp, Artificial Sequence
  ENSG00000018236_25 (sequence is synthesized)
ttggcatccttgtctacttggaattctgaatgtgttgtgacagctgctgttcccatcccagctcagaagacacccttcaaccctgggatgaccacaattccttccaatttctgcggctcc

SEQ ID NO: 17998 - DNA, 120 bp, Artificial Sequence
  ENSG00000018236_26 (sequence is synthesized)
atcctaagccaaataaattatactttaacaaactattcaactgatttacaacacacatgatgactgaggcattcgggaaccccttcatccaaaagaataaacttttaaatggatataaat

SEQ ID NO: 17999 - DNA, 120 bp, Artificial Sequence
  ENSG00000018236_27 (sequence is synthesized)
gatttttaactcgttccaatatgccttataaaccacttaacctgattctgtgacagttgcatgatttaacccaatgggacaagttacagtgttcaattcaatactataggctgtagagtg

SEQ ID NO: 18000 - DNA, 120 bp, Artificial Sequence
  ENSG00000018236_28 (sequence is synthesized)
aaagtcaaatcaccatatacaggtgctttaaatttaataacaagttgtgaaatataatagagattgaaatgttggttgtatgtggtaaatgtaagagtaatacagtctcttgtactttcc

SEQ ID NO: 18001 - DNA, 120 bp, Artificial Sequence
  ENSG00000018236_29 (sequence is synthesized)
tcactgttttgggtactgcatattattgaatggcccctatcattcatgacatcttgagttttcttgaaaagacaatagagtgtaacaaatattttgtcagaaatcccattatcaaatcat

SEQ ID NO: 18002 - DNA, 120 bp, Artificial Sequence
  ENSG00000018236_30 (sequence is synthesized)
gagttgaaagattttgactattgaaaaccaaattctagaacttactatcagtattcttattttcaaaggaaataattttctaaatatttgattttcagaatcagttttttaatagtaaag

SEQ ID NO: 18003 - DNA, 120 bp, Artificial Sequence
  ENSG00000018236_31 (sequence is synthesized)
ttaacataccatatagatttttttttacttttatattctactctgaagttattttatgcttttcttatcaatttcaaatctcaaaaatcacagctcttatctagagtatcataatattgc

SEQ ID NO: 18004 - DNA, 120 bp, Artificial Sequence
  ENSG00000018236_32 (sequence is synthesized)
tatatttgttcatatgtggagtgacaaattttgaaaagtagagtgcttccttttttattgagatgtgacagtctttacatggttaggaataagtgacagttaagtgaatatcacaattac

SEQ ID NO: 18005 - DNA, 120 bp, Artificial Sequence
  ENSG00000018236_33 (sequence is synthesized)
tagtatgttggtttttctgcttcattcctaagtattacgtttctttattgcagatgtcagatcaaaaagtcacctgtaggttgaaaaagctaccgtattccattttgtaaaaataacaat

SEQ ID NO: 18006 - DNA, 120 bp, Artificial Sequence
  ENSG00000018236_34 (sequence is synthesized)
aataataataataataattagttttaagctcatttcccacttcaatgcaatactgaaaactggctaaaaataccaaatcaatatactgctaatggtactttgaagagtatgcaaaactgg

SEQ ID NO: 18007 - DNA, 120 bp, Artificial Sequence
  ENSG00000018236_35 (sequence is synthesized)
aaggccaggaggaggcaaataatatgtctttccgatggtgtctcccaagtgttggtgctttgggtttttataagttgtgaaaaggaagatgcacatttcttcattctccatggtgtgcat

SEQ ID NO: 18008 - DNA, 120 bp, Artificial Sequence
  ENSG00000018236_36 (sequence is synthesized)
ggaaatgtgtttgagtgtggatgtaaaagaaatcgagtaataaagaattagctggcttgtgaaatagtgcagtgttggatgcttcaagaggtataatcctattttattagcacaaacttg

SEQ ID NO: 18009 - DNA, 120 bp, Artificial Sequence
  ENSG00000018236_37 (sequence is synthesized)
ctagctaattagagtttatctttttagaaaggacaccgtataggttcgtaaaaaatatttacaggaagcaaaatagatctattactactttaccgactttaccccctttctttaatttgt

SEQ ID NO: 18010 - DNA, 120 bp, Artificial Sequence
  ENSG00000018236_38 (sequence is synthesized)
atatcgatgtgtaaatgtttagagtcttcattatgaaaatatcaataaatatttcattagtttacatttaactctggtataaaatgaaacttttaaaaataagtgaaatggatgatttcc

SEQ ID NO: 18011 - DNA, 120 bp, Artificial Sequence
  ENSG00000018236_39 (sequence is synthesized)
gaaatggatgatttcccagtggaagtatgtcaacagtcttaagatcattgccagatttcataaaatatttaagtatttgaaaaagaaacaaaatgtcttcatactttagggaaacgaata

SEQ ID NO: 18012 - DNA, 120 bp, Artificial Sequence
  ENSG00000018236_40 (sequence is synthesized)
ccctgtataccttctgtacaaatgtttgtgttttcattgttacactttggggttttacttttgcaatgtgacccatgttgggcatttttatataatcaacaactaaatcttttgccaaat

SEQ ID NO: 18013 - DNA, 120 bp, Artificial Sequence
  ENSG00000018236_41 (sequence is synthesized)
gcatgcttgccttttattttctaatatatgataataacgagcaaaactggttagattttgcatgaaatggttctgaaaggtaagaggaaaacagactttggaggttgtttagttttgaat

SEQ ID NO: 18014 - DNA, 120 bp, Artificial Sequence
  ENSG00000018236_42 (sequence is synthesized)
ttctgacagagataaagtagtttaaaatctctcgtacactgataactcaagcttttcattttctcatacagttgtacagatttaactgggaccatcagttttaaactgttgtcaagctaa

SEQ ID NO: 18015 - DNA, 120 bp, Artificial Sequence
  ENSG00000018236_43 (sequence is synthesized)
ctaataatcatctgctttaagacgcaagattctgaattaaactttatataggtatagatacatctgttgtttctttgtatttcaggaaaggtgatagtagttttatttgatactgataaa

SEQ ID NO: 18016 - DNA, 120 bp, Artificial Sequence
  ENSG00000018236_44 (sequence is synthesized)
tattgaattgattttttagttattttttatcattttttcaatggagtagtataggactgtgctttgtcctttttatgaatgaaaaaattagtataaagtaataaatgtcttatgttaccc

SEQ ID NO: 18017 - DNA, 120 bp, Artificial Sequence
  ENSG00000018236_45 (sequence is synthesized)
gggcttctgctgtcaagtagccagggtgggctccgccgaggcgaggaggggcgccggtggggagatgcgctcccaggtgtttgcagcggaagtgggaaacctgtagggtatggtccagct

SEQ ID NO: 18018 - DNA, 120 bp, Artificial Sequence
  ENSG00000018236_46 (sequence is synthesized)
ctgaactgaatttacacgaaaagggaaggaggaaaatggtttgtctttttttgcagagaattctatccaaattcacttgcatttaattacttcatattttggaaatgacattttcaagtg

SEQ ID NO: 18019 - DNA, 120 bp, Artificial Sequence
  ENSG00000018236_47 (sequence is synthesized)
aacttgctttctgctgcaggagagaggcgtattgtggtataactgttgctgtatttattcaaatggacaatttgcaatagatattatacccaggacgacagataagtcaacacataagta

SEQ ID NO: 18020 - DNA, 120 bp, Artificial Sequence
  ENSG00000018236_48 (sequence is synthesized)
ttctccccgtctgtgcaagcctgcctccaacctggtgatcgttgacactcaccatttctgtgaaagacttttttttttttaacatattatactagatttgactaactcaatcttgtagct

SEQ ID NO: 18021 - DNA, 120 bp, Artificial Sequence
  ENSG00000018236_49 (sequence is synthesized)
tctgcagttctccccacccccaacctagttcttagagtatgtttccccttttgaaacatgtaaacatactttgggcataaatattttttaaaatataactataatgcttcactaatacct

SEQ ID NO: 18022 - DNA, 120 bp, Artificial Sequence
  ENSG00000018236_50 (sequence is synthesized)
taaaaatgcctagtgaactaactcagtacattatataatggccaagtgaaagttttgtgttttcatgtcctgtttttctttgaaattatatagcccagaaattagctcattatctgaaaa

SEQ ID NO: 18023 - DNA, 120 bp, Artificial Sequence
  ENSG00000018236_51 (sequence is synthesized)
acgtatgaagaactgatgaattgtataatacaggagtattgccattgaatgtactgtttgatttattcaagcaggtaatgaacaatgttgtcaaactctctaatgagacatcataattag

SEQ ID NO: 18024 - DNA, 120 bp, Artificial Sequence
  ENSG00000018236_52 (sequence is synthesized)
gacataagctaaaaggggcattactccggcagtctttttttcttaatcctagtaccatacatattctttggcatgaaagaatgaaaagcattagtaaacaactgaagtcctaccatggct

SEQ ID NO: 18025 - DNA, 120 bp, Artificial Sequence
  ENSG00000018236_53 (sequence is synthesized)
ctgtagggtttttggaacaattcctggaattggaaagtgaaaatggatagcatgtgggggaaaccctcatctgagtagcaagattttagtaaagatgactaagccattaacagcatgcat

SEQ ID NO: 18026 - DNA, 120 bp, Artificial Sequence
  ENSG00000018236_54 (sequence is synthesized)
tcatatttaattttattgactcctgccatcagcttttgtagatcgtttgggtggaaggttgtgatttttactgggaggacttgagtagaagtggatgattaaaattgaggagtatataat

SEQ ID NO: 18027 - DNA, 120 bp, Artificial Sequence
  ENSG00000018236_55 (sequence is synthesized)
tctttctgggactgcttaaatgttattgtttgaaaataccttcactttccccctttggtcaaagagatgtgcttaaaattcttattccttcacaataaataattttgattttcttagaca

SEQ ID NO: 18028 - DNA, 120 bp, Artificial Sequence
  ENSG00000018236_56 (sequence is synthesized)
gctttatttgaaagtattgctatgtagacagccggcttttctgtcatctaacctgctctccccaggttggctgaaggatgggagcggctgtgcctgcctgtgaggtcacagcatgaagtc

SEQ ID NO: 18029 - DNA, 120 bp, Artificial Sequence
  ENSG00000018236_57 (sequence is synthesized)
cttttaacttgctttctgctgcaggagagaggcgtattgtggtataactgttgctgtatttattcaaatggacaatttgcaatagatattatacccaggacgacagataagtcaacacat

SEQ ID NO: 18030 - DNA, 120 bp, Artificial Sequence
  ENSG00000018236_58 (sequence is synthesized)
aaacactccatagaagtcccaatccccagagatggagaatacgttgtggaggttcgcgcgcacagtgatggaggagatggagtggtgtctcaagtcaaaatttcagaaggaaaatccaca

SEQ ID NO: 18031 - DNA, 120 bp, Artificial Sequence
  ENSG00000018236_59 (sequence is synthesized)
tccttgagaagtaaaacagccaaagatcacagaagcatcagaaccatgtcttgagcccaaatattctctgttgctaaagttatataactagctattgacagaactagaggtgcacccacc

SEQ ID NO: 18032 - DNA, 120 bp, Artificial Sequence
  ENSG00000018236_60 (sequence is synthesized)
agctgaactgaatttacacgaaaagggaaggaggaaaatggtttgtctttttttgcagagaattctatccaaattcacttgcatttaattacttcatattttggaaatgacattttcaac

SEQ ID NO: 18033 - DNA, 120 bp, Artificial Sequence
  ENSG00000018280_0 (sequence is synthesized)
acacttacttgcaccagtgcccagagagggggtgcaggctgaggagctgcccagagcaccgctcacactcccagagtacctgaagtcggcatttcaatgacaggtgacaagggtccccaa

SEQ ID NO: 18034 - DNA, 120 bp, Artificial Sequence
  ENSG00000018280_1 (sequence is synthesized)
aggctaagcgggtccagctatggttccatctccagcccgaccagcccgaccagcccagggccacagcaagcacctcccagagagacctacctgagtgagaagatccccatcccagacaca

SEQ ID NO: 18035 - DNA, 120 bp, Artificial Sequence
  ENSG00000018280_2 (sequence is synthesized)
aaaccgggcaccttcagcctgcggaagctatgggccttcacggggcctggcttcctcatgagcattgctttcctggacccaggaaacatcgagtcagatcttcaggctggcgccgtggcg

SEQ ID NO: 18036 - DNA, 120 bp, Artificial Sequence
  ENSG00000018280_3 (sequence is synthesized)
ggattcaaacttctctgggtgctgctctgggccaccgtgttgggcttgctctgccagcgactggctgcacgtctgggcgtggtgacaggcaaggacttgggcgaggtctgccatctctac

SEQ ID NO: 18037 - DNA, 120 bp, Artificial Sequence
  ENSG00000018280_4 (sequence is synthesized)
taccctaaggtgccccgcaccgtcctctggctgaccatcgagctagccattgtgggctccgacatgcaggaagtcatcggcacggccattgcattcaatctgctctcagctggacgaatc

SEQ ID NO: 18038 - DNA, 120 bp, Artificial Sequence
  ENSG00000018280_5 (sequence is synthesized)
ccactctggggtggcgtcctcatcaccatcgtggacaccttcttcttcctcttcctcgataactacgggctgcggaagctggaagctttttttggactccttataaccattatggccttg

SEQ ID NO: 18039 - DNA, 120 bp, Artificial Sequence
  ENSG00000018280_6 (sequence is synthesized)
acctttggctatgagtatgtggtggcgcgtcctgagcagggagcgcttcttcggggcctgttcctgccctcgtgcccgggctgcggccaccccgagctgctgcaggcggtgggcattgtt

SEQ ID NO: 18040 - DNA, 120 bp, Artificial Sequence
  ENSG00000018280_7 (sequence is synthesized)
ggcgccatcatcatgccccacaacatctacctgcactcggccctggtcaagtctcgagagatagaccgggcccgccgagcagacatcagagaagccaacatgtacttcctgattgaggcc

SEQ ID NO: 18041 - DNA, 120 bp, Artificial Sequence
  ENSG00000018280_8 (sequence is synthesized)
accatcgccctgtccgtctcctttatcatcaacctctttgtcatggctgtctttgggcaggccttctaccagaaaaccaaccaggctgcgttcaacatctgtgccaacagcagcctccac

SEQ ID NO: 18042 - DNA, 120 bp, Artificial Sequence
  ENSG00000018280_9 (sequence is synthesized)
gactacgccaagatcttccccatgaacaacgccaccgtggccgtggacatttaccaggggggcgtgatcctgggctgcctgttcggccccgcggccctctacatctgggccataggtctc

SEQ ID NO: 18043 - DNA, 120 bp, Artificial Sequence
  ENSG00000018280_10 (sequence is synthesized)
ctggcggctgggcagagctccaccatgacgggcacctacgcgggacagttcgtgatggagggcttcctgaggctgcggtggtcacgcttcgcccgtgtcctcctcacccgctcctgcgcc

SEQ ID NO: 18044 - DNA, 120 bp, Artificial Sequence
  ENSG00000018280_11 (sequence is synthesized)
atcctgcccaccgtgctcgtggctgtcttccgggacctgagggacttgtcgggcctcaatgatctgctcaacgtgctgcagagcctgctgctcccgttcgccgtgctgcccatcctcacg

SEQ ID NO: 18045 - DNA, 120 bp, Artificial Sequence
  ENSG00000018280_12 (sequence is synthesized)
ttcaccagcatgcccaccctcatgcaggagtttgccaatggcctgctgaacaaggtcgtcacctcttccatcatggtgctagtctgcgccatcaacctctacttcgtggtcagctatctg

SEQ ID NO: 18046 - DNA, 120 bp, Artificial Sequence
  ENSG00000018280_13 (sequence is synthesized)
cccagcctgccccaccctgcctacttcggccttgcagccttgctggccgcagcctacctgggcctcagcacctacctggtctggacctgttgccttgcccacggagccacctttctggcc

SEQ ID NO: 18047 - DNA, 120 bp, Artificial Sequence
  ENSG00000018280_14 (sequence is synthesized)
cacagctcccaccaccacttcctgtatgggctccttgaagaggaccagaaaggggagacctctggctaggcccacaccagggcctggctgggagtggcatgtatgacgtgactggcctgc

SEQ ID NO: 18048 - DNA, 120 bp, Artificial Sequence
  ENSG00000018280_15 (sequence is synthesized)
gagggggcgcgtgcaggcagcaggatagagtgggacagttcctgagaccagccaacctgggggctttagggacctgctgtttcctagcgcagccatgtgattaccctctgggtctcagtg

SEQ ID NO: 18049 - DNA, 120 bp, Artificial Sequence
  ENSG00000018280_16 (sequence is synthesized)
tcctcatctgtaaaatggagacaccaccacccttgccatggaggttaagcactttaacacagtgtctggcacttgggacaaaaacaaacaaacgaaaaacatttcaaaaggtatttattg

SEQ ID NO: 18050 - DNA, 120 bp, Artificial Sequence
  ENSG00000018280_17 (sequence is synthesized)
agcacctgcaggcgtgacctgacagcccaagggtgggtggggtgagggcttgaggacttgggcgggacacaggctccaaactggagcttgaaatagtgtctgatgaatgttaaattatct

SEQ ID NO: 18051 - DNA, 120 bp, Artificial Sequence
  ENSG00000018280_18 (sequence is synthesized)
atctatctatctatttatttatttatttgagacagggaaagggtctccctctgttgccaaggctggagtgcagtggcgcaatcttaactcattgcaacctccaccttctgggttcaagcg

SEQ ID NO: 18052 - DNA, 120 bp, Artificial Sequence
  ENSG00000018280_19 (sequence is synthesized)
cttctgggttcaagcgattctctttattcagccccgggagtggcgcgcgccaccacgcccagctaatttgtgtattttcagcagagacggggtttgccatgctggccaggctggtctcga

SEQ ID NO: 18053 - DNA, 120 bp, Artificial Sequence
  ENSG00000018280_20 (sequence is synthesized)
cgcccatctccgtctcccaaagtgctgggaattacaggcgtgagccaccaaacccggcctgattaaagttaaataaatactagttcccttctcgtccaaaggagcagggaatgggaaccg

SEQ ID NO: 18054 - DNA, 120 bp, Artificial Sequence
  ENSG00000018280_21 (sequence is synthesized)
ggaaggcacgaagtctctaaagcatccagaagacccctacaccagggtctggtccgctcctattcgccgcagcctttctgttccgcctgcaacccattttccagacagtaaaacggcggc

SEQ ID NO: 18055 - DNA, 120 bp, Artificial Sequence
  ENSG00000018280_22 (sequence is synthesized)
gcacttctttctccgtcaggcaccaggtcataaggaacccaagagtctgtgcctctgaggcccaaattatttgctgtttcctcaggggagccggcggccgcgactcccacgccgcgccgt

SEQ ID NO: 18056 - DNA, 120 bp, Artificial Sequence
  ENSG00000018280_23 (sequence is synthesized)
taccgctccctctctgctgactgctccccctaggggcagagacggtcccgacgcccgccatcccgccccggcctcacccctccccgccaggcggaacgacgcggggaggcgggcgctcgg

SEQ ID NO: 18057 - DNA, 120 bp, Artificial Sequence
  ENSG00000018280_24 (sequence is synthesized)
ggctcgcgccaggggccccagaatccttcggggagagtgggtgggaggaagctgtgtgggcggggagccccctctgccttagggagcggctgggcacccattcgccccattcaggggctg

SEQ ID NO: 18058 - DNA, 120 bp, Artificial Sequence
  ENSG00000018280_25 (sequence is synthesized)
cactttatagacgttccctaggctgtttctaggctcccccaagtccctcctccagcctcgtcgggtccctcagaccccagcccaggacctgcggagggccgcagcgaggagaggccaaca

SEQ ID NO: 18059 - DNA, 120 bp, Artificial Sequence
  ENSG00000018280_26 (sequence is synthesized)
ggcctttccctagagttgaacctgggccgggtgttgcacctggaagaacccccgatttcctggggacccagcagggcaggcggcctggctccgcgctcaggtccggacgcttgtttatga

SEQ ID NO: 18060 - DNA, 120 bp, Artificial Sequence
  ENSG00000018280_27 (sequence is synthesized)
gaagaatttcctctttcttaaaagggcaacgatgcgagtgggtccctcaaggagagaagagatgggaccggtctggtgcgacctgggcaagcgctgcagagggtacctgggcaagagggc

SEQ ID NO: 18061 - DNA, 120 bp, Artificial Sequence
  ENSG00000018280_28 (sequence is synthesized)
cgcccgcctcctctgggtttggcactggagaagatgggtccatgccagctgaaggaggagatggatgggggacgtttagcgaagaaaggcatctcccagatcctttagcctcctggaagt

SEQ ID NO: 18062 - DNA, 120 bp, Artificial Sequence
  ENSG00000018280_29 (sequence is synthesized)
gcccccgttgtaccccctacacacccctcttggcattgagtgccagtcctctgccaggctctgtgttacaagttggggagggcggcaaagtcccgaattaaagatgtcagttctcaagga

SEQ ID NO: 18063 - DNA, 85 bp, Artificial Sequence
  ENSG00000018280_30 (sequence is synthesized)
tcctggcggctgggcagagctccaccatgacgggcacctacgcgggacagttcgtgatggaggctggagtgcaatggcgcgatct

SEQ ID NO: 18064 - DNA, 89 bp, Artificial Sequence
  ENSG00000018280_31 (sequence is synthesized)
ttttttgagacaggattcgccatcacagctcgctgcagcctcaacttcagcctcccgagtcattgggactacaggctcatgccaccaca

SEQ ID NO: 18065 - DNA, 120 bp, Artificial Sequence
  ENSG00000018280_32 (sequence is synthesized)
gcctcaacttcagcctcccgagtcattgggactacaggctcatgccaccacaccaggctaatttttaaaattatttgtagagatgtggtcttcctatgtttcccaggctggtctcgaact

SEQ ID NO: 18066 - DNA, 73 bp, Artificial Sequence
  ENSG00000018280_33 (sequence is synthesized)
tgatctccactcagctttgtttccttcatgtagcccagagggcgacactataagccccattttacagatgaga

SEQ ID NO: 18067 - DNA, 120 bp, Artificial Sequence
  ENSG00000018280_34 (sequence is synthesized)
tgaggtgacttgctggaagctgcagacccaggactaacagaagccttttccccaaaactgtttagtcttcagcaaccagctatgggatgggagctccccatttctccccacccatcccct

SEQ ID NO: 18068 - DNA, 120 bp, Artificial Sequence
  ENSG00000018280_35 (sequence is synthesized)
cttgccacctagggacagagctgtcccagttcaacagtggaaaaacagagcatgcccccagggataaatcggttgagggactacagaggatctctcctctggaatccccagtcctgtcta

SEQ ID NO: 18069 - DNA, 120 bp, Artificial Sequence
  ENSG00000018280_36 (sequence is synthesized)
agcatgcccaccctcatgcaggagtttgccaatggcctgtgagtaccccctttcccaagtgctggattgcatcaccacatttcatcctcacagccacccagaggtacgagctacaattct

SEQ ID NO: 18070 - DNA, 120 bp, Artificial Sequence
  ENSG00000018280_37 (sequence is synthesized)
ccccattatcccaatgaagccacagaggctgagagaggttaagggacttacccaggttcacacagctagcaagttgaggagccaagactggaatccagggaagagggctgtttctagagc

SEQ ID NO: 18071 - DNA, 120 bp, Artificial Sequence
  ENSG00000018280_38 (sequence is synthesized)
ctgagcgcctcactctcgcctcagactcagctcttgccaaatcccgccagtgtgtagcctggagggcccaggaggcaggaggtggggagggggtctgtctgctccaggtcccacagacca

SEQ ID NO: 18072 - DNA, 120 bp, Artificial Sequence
  ENSG00000018280_39 (sequence is synthesized)
gagaagcggcctcagtgtatccccacccccagtgtgggcgctgggagatgaagaggagttgatgcaggtgggccagcagcaaccagccagtcctgagcctctctcgtgtcccccaggctg

SEQ ID NO: 18073 - DNA, 120 bp, Artificial Sequence
  ENSG00000018280_40 (sequence is synthesized)
actcttcaggccaggcagagaacagctgctgctacttccccccctaaccagtccctcccagagtctattttatcctgctgtcccctctgaagcagggctgctgccctgttttccagaaat

SEQ ID NO: 18074 - DNA, 120 bp, Artificial Sequence
  ENSG00000018280_41 (sequence is synthesized)
gtaaagtgacttgtctaaagtcacacagatgtgagtcatgcaggactttgggactgcagccccaaactccctgctgcgccgggtgccaggtctctcctctagctctgccctgcctcgact

SEQ ID NO: 18075 - DNA, 120 bp, Artificial Sequence
  ENSG00000018280_42 (sequence is synthesized)
gcgccatcatcatgccccacaacatctacctgcactcggccctggtcaaggtgagcagaggggaggggaaaggagaccccctcactcagtcggagccatgctggctccgcctccaagcct

SEQ ID NO: 18076 - DNA, 120 bp, Artificial Sequence
  ENSG00000018280_43 (sequence is synthesized)
gagccatgctggctccgcctccaagcctggagcccctcccctctggctccttccctcaggatttgcggagcctgtaataattgagggacaggcggggcgccatggctcacgcctgtaatc

SEQ ID NO: 18077 - DNA, 86 bp, Artificial Sequence
  ENSG00000018280_44 (sequence is synthesized)
cgagccaacgctcccagcctccaatatcttcagcagatttctaagtcaatatgccatgctctggaacagggtggggggaccatagc

SEQ ID NO: 18078 - DNA, 120 bp, Artificial Sequence
  ENSG00000018280_45 (sequence is synthesized)
caatatgccatgctctggaacagggtggggggaccatagcctcagcggaccacagagaggaggccccgtggtctgaaaaggagctggcaagggaggagctgggctagggaagcttggccc

SEQ ID NO: 18079 - DNA, 120 bp, Artificial Sequence
  ENSG00000018280_46 (sequence is synthesized)
cctcacccccttagacagccccctgtgaggtctctgaggacctgacaagtcagggcttgaggggcaggcagttcaggtgcaagccggctgctgagcttaacagatccagaaaaagatcct

SEQ ID NO: 18080 - DNA, 120 bp, Artificial Sequence
  ENSG00000018280_47 (sequence is synthesized)
ctgtgactcatcagagcatgctgcttcctccacccatgccctccccatcccttgggtggcagacccaggaatgggccatggagggcagggctgggctgatgagcctgttggggctcctct

SEQ ID NO: 18081 - DNA, 120 bp, Artificial Sequence
  ENSG00000018280_48 (sequence is synthesized)
aaccccaaacagccattttcagcttccacgatcaaataaatacatcatctcacatggggcatcccaagtctgtttgtttttgttgttgtttgtttgtttttcagtcggagtctcgctccg

SEQ ID NO: 18082 - DNA, 120 bp, Artificial Sequence
  ENSG00000018280_49 (sequence is synthesized)
ctcccaagatcattcctctcccttccctctggccgcgggctgcggggggctggggtgggatggaggctgagaaatggtgaccgcggcgtggttgcgaggggcggggcttgtcctgaccag

SEQ ID NO: 18083 - DNA, 120 bp, Artificial Sequence
  ENSG00000018280_50 (sequence is synthesized)
acagaacacggggtgcctggaaggggaacagatgtgttgtggggcacagggcaggctgggaggggaacaaaggtccactccatgggtaaccagacccttccgccagggctggccacttct

SEQ ID NO: 18084 - DNA, 120 bp, Artificial Sequence
  ENSG00000018280_51 (sequence is synthesized)
gcctttggaaaatgtttcacaacgccccatgttgtgtgtgtgtgtgaatcggccgatgtgaaccgaatgttgatgtaagaggcagggcactcggctgcggatgggtaacagggcgtgggc

SEQ ID NO: 18085 - DNA, 120 bp, Artificial Sequence
  ENSG00000018280_52 (sequence is synthesized)
ggtctgagcagcagtggtggacagtggcaactgccccttcctgcttccgtccccagtgcttagctggggtgcttcagtatttgtctaaaagcgattaaatgactttctcaatgaatctca

SEQ ID NO: 18086 - DNA, 120 bp, Artificial Sequence
  ENSG00000018280_53 (sequence is synthesized)
gctttcctatgaaggaaaagaggcccagggggaattgggattggagccttgaggacatgttatagcatttaggaaagggcatagggagaagtgaaggaggctgcaggctggcatctagca

SEQ ID NO: 18087 - DNA, 84 bp, Artificial Sequence
  ENSG00000018280_54 (sequence is synthesized)
atagggagaagtgaaggaggctgcaggctggcatctagcatctaggatgctgtcacctgcatttccagtatcttctcttttttt

SEQ ID NO: 18088 - DNA, 120 bp, Artificial Sequence
  ENSG00000018280_55 (sequence is synthesized)
ccaggctaagtgttgaaggcccctgctggccatgtttctccaatgtggcctgggagctggtgttaagttcaaatgggcccgaaaagggtccccagggcagccctgccagaaggtggggca

SEQ ID NO: 18089 - DNA, 120 bp, Artificial Sequence
  ENSG00000018280_56 (sequence is synthesized)
tttgtgtggggggtaggggactggactcctctctttaaaatatatatatgtatatttatttatttatttatttaattttattttttgagactcagtctcactcggtcacccaggctggag

SEQ ID NO: 18090 - DNA, 67 bp, Artificial Sequence
  ENSG00000018280_57 (sequence is synthesized)
cctgacctcaattgcctggcgtaatttatttatttatttagagatgggggtctcactatgttgctca

SEQ ID NO: 18091 - DNA, 86 bp, Artificial Sequence
  ENSG00000018280_58 (sequence is synthesized)
ctgggataacaggtgtgagccaccttgcctggcgtaatttatttatttatttagagatgggggtctcactatgttgctcaggctgc

SEQ ID NO: 18092 - DNA, 120 bp, Artificial Sequence
  ENSG00000018280_59 (sequence is synthesized)
gcgcccagccaggatgggactccatctctcccaccccctccccgaggagtatgcttggttagagggtaccacgagctcaggggctttctgaggctggcctctctggctgaaggcctctcc

SEQ ID NO: 18093 - DNA, 120 bp, Artificial Sequence
  ENSG00000018280_60 (sequence is synthesized)
actcccactccccttgccctagctgtctgggggcgcttagggtcctgctcccaggaggccagattcctgtctccagccctgaggctccgtaggagttagagacccctggaccaggctggg

SEQ ID NO: 18094 - DNA, 120 bp, Artificial Sequence
  ENSG00000018280_61 (sequence is synthesized)
gcgggcccaggagggcaaggggtccaaggacagcaggcacactactgggggctagaactccgagccttgtgggtcctcttttcttttctttcttttcttcctttttttttgtttttgttt

SEQ ID NO: 18095 - DNA, 120 bp, Artificial Sequence
  ENSG00000018408_0 (sequence is synthesized)
ataattcaacagctcaactttcgggcccgcctctttcctgggggtgggagtttgctccaaactttgtttatgggacagtccgggagctgctgcggccgcgctgtctgcttctcctgcgcc

SEQ ID NO: 18096 - DNA, 120 bp, Artificial Sequence
  ENSG00000018408_1 (sequence is synthesized)
tccttttcgcccagcactagcgccttaggccagctcgggggatgtgagagccgaagcccttagactgccaggcacagagtcgggtcgggatttgtcagccaagcctcggctccagctccg

SEQ ID NO: 18097 - DNA, 120 bp, Artificial Sequence
  ENSG00000018408_2 (sequence is synthesized)
caatctcgggactcacccgagcgacccaggcccgacggcaagttcgggcgggacggcggccgccgcgcgctcaggctcagcttcgctgcccgcccagaagatgaatccggcctcggcgcc

SEQ ID NO: 18098 - DNA, 120 bp, Artificial Sequence
  ENSG00000018408_3 (sequence is synthesized)
ccctccgctcccgccgcctgggcagcaagtgatccacgtcacgcaggacctagacacagacctcgaagccctcttcaactctgtcatgaatccgaagcctagctcgtggcggaagaagat

SEQ ID NO: 18099 - DNA, 120 bp, Artificial Sequence
  ENSG00000018408_4 (sequence is synthesized)
cctgccggagtctttctttaaggagcctgattcgggctcgcactcgcgccagtccagcaccgactcgtcgggcggccacccggggcctcgactggctgggggtgcccagcatgtccgctc

SEQ ID NO: 18100 - DNA, 120 bp, Artificial Sequence
  ENSG00000018408_5 (sequence is synthesized)
gcactcgtcgcccgcgtccctgcagctgggcaccggcgcgggtgctgcgggtagccccgcgcagcagcacgcgcacctccgccagcagtcctacgacgtgaccgacgagctgccactgcc

SEQ ID NO: 18101 - DNA, 120 bp, Artificial Sequence
  ENSG00000018408_6 (sequence is synthesized)
cccgggctgggagatgaccttcacggccactggccagaggtacttcctcaatcacatagaaaaaatcaccacatggcaagaccctaggaaggcgatgaatcagcctctgaatcatatgaa

SEQ ID NO: 18102 - DNA, 120 bp, Artificial Sequence
  ENSG00000018408_7 (sequence is synthesized)
cctccaccctgccgtcagttccacaccagtgcctcagaggtccatggcagtatcccagccaaatctcgtgatgaatcaccaacaccagcagcagatggcccccagtaccctgagccagca

SEQ ID NO: 18103 - DNA, 120 bp, Artificial Sequence
  ENSG00000018408_8 (sequence is synthesized)
gcagcagcagcagcagaaactgcggcttcagagaatccagatggagagagaaaggattcgaatgcgccaagaggagctcatgaggcaggaagctgccctctgtcgacagctccccatgga

SEQ ID NO: 18104 - DNA, 120 bp, Artificial Sequence
  ENSG00000018408_9 (sequence is synthesized)
agctgagactcttgccccagttcaggctgctgtcaacccacccacgatgaccccagacatgagatccatcactaataatagctcagatcctttcctcaatggagggccatatcattcgag

SEQ ID NO: 18105 - DNA, 120 bp, Artificial Sequence
  ENSG00000018408_10 (sequence is synthesized)
ggagcagagcactgacagtggcctggggttagggtgctacagtgtccccacaactccggaggacttcctcagcaatgtggatgagatggatacaggagaaaacgcaggacaaacacccat

SEQ ID NO: 18106 - DNA, 120 bp, Artificial Sequence
  ENSG00000018408_11 (sequence is synthesized)
gaacatcaatccccaacagacccgtttccctgatttccttgactgtcttccaggaacaaacgttgacttaggaactttggaatctgaagacctgatccccctcttcaatgatgtagagtc

SEQ ID NO: 18107 - DNA, 120 bp, Artificial Sequence
  ENSG00000018408_12 (sequence is synthesized)
tgctctgaacaaaagtgagccctttctaacctggctgtaatcactaccattgtaacttggatgtagccatgaccttacatttcctgggcctcttggaaaaagtgatggagcagagcaagt

SEQ ID NO: 18108 - DNA, 120 bp, Artificial Sequence
  ENSG00000018408_13 (sequence is synthesized)
ctgcaggtgcaccacttcccgcctccatgactcgtgctccctcctttttatgttgccagtttaatcattgcctggttttgattgagagtaacttaagttaaacataaataaatattctat

SEQ ID NO: 18109 - DNA, 120 bp, Artificial Sequence
  ENSG00000018408_14 (sequence is synthesized)
tttcattttctgcaagcctgcgttcttgtgacagattatacagaattgtgtctgcaggattgattatgcagaatacttttctctttcttctctgctgccccatggctaagctttatgggt

SEQ ID NO: 18110 - DNA, 120 bp, Artificial Sequence
  ENSG00000018408_15 (sequence is synthesized)
gttaattgaaatttatacaccaattgattttaaaccataaaaagctgaccacaggcagttacttctgagggcatcttggtccaggaaatgtgcacaaaattcgacctgatttacagtttc

SEQ ID NO: 18111 - DNA, 120 bp, Artificial Sequence
  ENSG00000018408_16 (sequence is synthesized)
aaaaactgtattgatgacagtagtaccaaatgctttaaaaactatttaacttgagctttaaaaatcattgtatggatagtaaaattctactgtatggaatacaatgtaattttgaatcca

SEQ ID NO: 18112 - DNA, 120 bp, Artificial Sequence
  ENSG00000018408_17 (sequence is synthesized)
gacacactcctctacaacaccagagactcccaaacacaaggccttatattgactcatttcagctcacatcctggcgactctcaagagagaaacctcagagtgactaaaatctccataatg

SEQ ID NO: 18113 - DNA, 120 bp, Artificial Sequence
  ENSG00000018408_18 (sequence is synthesized)
agaagacatgtacattcagtatctattttggcattttccccaatacatctctgctcatctgactcttatcttggcatctgcttcctggtggatctgaactgacccataagccacgcttac

SEQ ID NO: 18114 - DNA, 120 bp, Artificial Sequence
  ENSG00000018408_19 (sequence is synthesized)
attagtctgtatttataaaggcacacagtcctattgtagcttatctttcgttattttactgcagagcatctagacaacttagtccctccagcgggaaagtagcagcagcagcattagtca

SEQ ID NO: 18115 - DNA, 120 bp, Artificial Sequence
  ENSG00000018408_20 (sequence is synthesized)
caggtcttacactacagatcttgtgaaagagaccagtttggtactaattatgagcattttattcaaacaaaagtttttgaaatattacaactggggatttaaaaaattgcagcttagaat

SEQ ID NO: 18116 - DNA, 120 bp, Artificial Sequence
  ENSG00000018408_21 (sequence is synthesized)
ggggatttaaaaaattgcagcttagaatctgatggtttttttttttcttgatgttgtttgtttgtttttgagatcgagttttgctcttgttgtccaggctggaatgcaatggcacaatct

SEQ ID NO: 18117 - DNA, 69 bp, Artificial Sequence
  ENSG00000018408_22 (sequence is synthesized)
ggccttgatgtttattttataaagcactgtaattttgtagctgatgacaaaaggcagccaaatgttttt

SEQ ID NO: 18118 - DNA, 120 bp, Artificial Sequence
  ENSG00000018408_23 (sequence is synthesized)
taattttgtagctgatgacaaaaggcagccaaatgtttttgataaatcagtggcaactgtatttttgtcttttgaaataactctgaaaacatcaggacaacatagatttcaacctgatag

SEQ ID NO: 18119 - DNA, 120 bp, Artificial Sequence
  ENSG00000018408_24 (sequence is synthesized)
cacaccacacacagtgagctgttgctttttaaattctgaagccttgtcaggtttgcttcctagatttcaagtgtttaaaataattctatctatgaaactgaaggatgaagcagatctctg

SEQ ID NO: 18120 - DNA, 120 bp, Artificial Sequence
  ENSG00000018408_25 (sequence is synthesized)
actgacatgtaaaaaaaaatgccctttgagggtgtatggtggagataaatgtttctgaattcagtaaaattgattcctaagtatattatcctaatcctgtttgctacagttggtataaaa

SEQ ID NO: 18121 - DNA, 120 bp, Artificial Sequence
  ENSG00000018408_26 (sequence is synthesized)
aggcatgaaatatgtattcaatacctcttatgtaaccaaaaccatttttaattagcttttaaggactgagagagcatcatgttcaactggcatgcagtctgcctgcattgccaatgaagt

SEQ ID NO: 18122 - DNA, 120 bp, Artificial Sequence
  ENSG00000018408_27 (sequence is synthesized)
cctcaactgtttaatattttgaactaatattatttataatctatgaatttaatcttttttgaaagactttaataatttgagtctctgagaggatactttcaatttccatgggggacttat

SEQ ID NO: 18123 - DNA, 120 bp, Artificial Sequence
  ENSG00000018408_28 (sequence is synthesized)
ttgttggggatcttaaataagattccttttgatctaccggaatatacatgtacagagtacattggatcatgttggaaagaaggcaagtgaaaaggtcagagatgaagtagcaaagttatg

SEQ ID NO: 18124 - DNA, 120 bp, Artificial Sequence
  ENSG00000018408_29 (sequence is synthesized)
gaatatcgtggaaaggatactagttgtgaaatggaaagagacaagttatagtaccccaaaagcaaaacaagcaggagatgcaagagatgccccaaaaggacaaagcaacaattttctgtt

SEQ ID NO: 18125 - DNA, 120 bp, Artificial Sequence
  ENSG00000018408_30 (sequence is synthesized)
gccacctttataccggaagactctgttgtagaagaaaagaaggctttggtgcaccttatgtgggaggaggaggggcagggcatgctgatgctgagcgtacaggcagacaagagcgtagcc

SEQ ID NO: 18126 - DNA, 120 bp, Artificial Sequence
  ENSG00000018408_31 (sequence is synthesized)
tgctgttgcctccatcactatgaaatgacttattttacctgaaggacccatggtttatgttcctctaattcctttcactctccctaagccctctgagagagatgaagatagatgatttta

SEQ ID NO: 18127 - DNA, 120 bp, Artificial Sequence
  ENSG00000018408_32 (sequence is synthesized)
ttgctactaaattgaagggagcactatttctttttgtcttttgttagcaaaaaattgcaaaaagaattgtacattcttgctaaaaataaataaataaataaaaaattaaaaaaacaaggg

SEQ ID NO: 18128 - DNA, 120 bp, Artificial Sequence
  ENSG00000018408_33 (sequence is synthesized)
acctaacaaaactcagcagtgttactgtatttttaaaaaatatttttatagactcattttcaggttattaaatgtaagagaaacagatacccctcttttttaaagtaggtaaatcattga

SEQ ID NO: 18129 - DNA, 120 bp, Artificial Sequence
  ENSG00000018408_34 (sequence is synthesized)
atcattgatgatttatattaccaatttttagaagtaattttctagtaagcttgtggcatcagaaaatactagaagatttttttagttaaattagttagaacatttatgaatgaatataat

SEQ ID NO: 18130 - DNA, 120 bp, Artificial Sequence
  ENSG00000018408_35 (sequence is synthesized)
tttcagaataaaatatggaccctttgtgtttactaatagataaagccagatataattttttgtttttaaggccacaaaatatggcctttgttaaagaacactaaagttagaaatctaaag

SEQ ID NO: 18131 - DNA, 120 bp, Artificial Sequence
  ENSG00000018408_36 (sequence is synthesized)
ttagagcaactttttaatggctatttcctattattgtaagtgttaaaacccctgcagaattcttgataaggtgctatttatactatatttcttattataagataactgtctttagtcttc

SEQ ID NO: 18132 - DNA, 120 bp, Artificial Sequence
  ENSG00000018408_37 (sequence is synthesized)
ttagtactagtctttttagtactaaatcaatcagtaaacatcatcatttcaccccaaaattttgtcacagaaaaggcgtatcaaatgaaaaataatttcagagatctttctttcaagata

SEQ ID NO: 18133 - DNA, 120 bp, Artificial Sequence
  ENSG00000018408_38 (sequence is synthesized)
ttttttcctgataaaatacattgtcttgaagtaaatacattgtcaaaacctaattgcaattctgttaaatctaagtaatttttagacagtgtttcaccgtattatttaggatgtgaaatg

SEQ ID NO: 18134 - DNA, 120 bp, Artificial Sequence
  ENSG00000018408_39 (sequence is synthesized)
ccatttctttcactgattacaccatatacaggaaacaggtaaaacagtgaaaactttattgtgctggttgatgccaacttggttgaaaagctctctgcagaagaagtgatctagactgac

SEQ ID NO: 18135 - DNA, 120 bp, Artificial Sequence
  ENSG00000018408_40 (sequence is synthesized)
agaagtgttgctaattacaagttgtgttctcatgacgtaattagaaagtaacttctcaaagtacaacttttatgaaaaaaataagctgttaaaaaaaggaaatcgtaggttaatttaatt

SEQ ID NO: 18136 - DNA, 120 bp, Artificial Sequence
  ENSG00000018408_41 (sequence is synthesized)
gggaaaatgggcaattgacagagaccattttcctaacacatatatgtgctagtactttaactttttaaaattttacttctacgttttgtaatataaaaatttctattttaagtttagaat

SEQ ID NO: 18137 - DNA, 120 bp, Artificial Sequence
  ENSG00000018408_42 (sequence is synthesized)
gttatacgtaccgaaagtatgcagccaaatcgatcagatcaaaccattttacctggagtttggtactggtttttacttctctgaatctgtataagaaaaataaagacaattgaacttcca

SEQ ID NO: 18138 - DNA, 120 bp, Artificial Sequence
  ENSG00000018408_43 (sequence is synthesized)
ttggctcgggctgaacttctttcggggggctgcctgtcctggaatcgtgcgacctttcctttgccatcctgcggttcagcaagccccgagtgcagttattccctccacccctcgccctat

SEQ ID NO: 18139 - DNA, 120 bp, Artificial Sequence
  ENSG00000018408_44 (sequence is synthesized)
cttctcctcctccaggcaacttctttgcttcaagaaagttgcataattctcgagaagatgaatccggcctcggcgccccctccgctcccgccgcctgggcagcaagtgatccacgtcacg

SEQ ID NO: 18140 - DNA, 120 bp, Artificial Sequence
  ENSG00000018408_45 (sequence is synthesized)
tatttttataatttcaacttttattttatatttgggggtacatgtgcaggtttgctacatggttatgtgatgccggggtttgggatacgattgctctcgtcacccaggtagtgagcatag

SEQ ID NO: 18141 - DNA, 120 bp, Artificial Sequence
  ENSG00000018408_46 (sequence is synthesized)
aggctgcagaaaggaatctcctgagggagttattctgaagaagggaagttcctctggtctggtgtctactagaattgcttttccttgaaactctgccttcttctggaaggcagaaatcta

SEQ ID NO: 18142 - DNA, 120 bp, Artificial Sequence
  ENSG00000018408_47 (sequence is synthesized)
acatgattcaatggctacagctgtggaagtgtgcagaggaaagcattagaccagggttctcatccctggcttgcacacccagagcctggcctgcacacctagagcctggacccaaaaaca

SEQ ID NO: 18143 - DNA, 120 bp, Artificial Sequence
  ENSG00000018408_48 (sequence is synthesized)
acaaaaaagtgatggaactggatgctctcccagtcttacatttctatgtaaatgtgaaagagaaacatggctacaaggaccaggtttgaaatttttcactataaaaagtttttgaaaata

SEQ ID NO: 18144 - DNA, 120 bp, Artificial Sequence
  ENSG00000018408_49 (sequence is synthesized)
aggagccccagagagaattcctagaagatggcagaggaggaaaaagaggaacctatcttcccacctagataataattttaccagtagaatctgtctaatgattttctcctctggatttgc

SEQ ID NO: 18145 - DNA, 120 bp, Artificial Sequence
  ENSG00000018408_50 (sequence is synthesized)
tctggcacctcgaagaagcttaggggaacagttcagctttgctcttcctgataattagtggctttcctgatggtgtggttcaacacacccaccagagacggaagatgtaaacaacatgtg

SEQ ID NO: 18146 - DNA, 120 bp, Artificial Sequence
  ENSG00000018408_51 (sequence is synthesized)
caactcaggcagatattcgagtaggcctagactgtgtgggcctgtggccagtctcacaacaaaacagaatcaacagccttgcagtctcagaaatgcagtggtcattctggtaagcaatag

SEQ ID NO: 18147 - DNA, 120 bp, Artificial Sequence
  ENSG00000018408_52 (sequence is synthesized)
tgtgtctgatactccttttttttttggtttcaagagtaaagtcaagaaaagctgctttttgaaagtcaaagaatcacagtagttgttatttcttagtgcttactatttgctacatgcttc

SEQ ID NO: 18148 - DNA, 120 bp, Artificial Sequence
  ENSG00000018408_53 (sequence is synthesized)
tgcttactatttgctacatgcttcacatacgtggtctcatttaatcttcccaaacaattttgccataatattattacaaccatgttgaatctgaaaataataataataataataataata

SEQ ID NO: 18149 - DNA, 120 bp, Artificial Sequence
  ENSG00000018408_54 (sequence is synthesized)
cttacctaaggttaccaaattagtaaagactgaactgggatttaaaagcaagatttgtagaatttttctccaaaacccagaatctctgcattgagccagcctgccattctgagacagaca

SEQ ID NO: 18150 - DNA, 120 bp, Artificial Sequence
  ENSG00000018408_55 (sequence is synthesized)
acattcataacacttgcatattgtttgtacagtgttcattgtttaatgtagggcacatttcatacataccaagaggaatcatatgcttattcttgctagtatatggcaaacttttccatt

SEQ ID NO: 18151 - DNA, 120 bp, Artificial Sequence
  ENSG00000018408_56 (sequence is synthesized)
ctataatacaaatatgactgatgactgctgtcatcagcccagcaaatcacctttcatcacaggtacacagatgacaaatacagagtacggaaggagtcagctgaaggtgctgcttgcctg

SEQ ID NO: 18152 - DNA, 120 bp, Artificial Sequence
  ENSG00000018408_57 (sequence is synthesized)
ggctgtcttttttttttttttgttacatctgccacttcatttattttatttgcaggaggagttgaaaccaattttaagggagattttcattttccccctaaacatgaatcattcaagtaa

SEQ ID NO: 18153 - DNA, 120 bp, Artificial Sequence
  ENSG00000018408_58 (sequence is synthesized)
aaccaacttaactatagaaatgtagcaaagtaaggggaaagcagcacaacaacccaagaggcaaaggctggggggaaggggtgggtgcagtctgcgtataacatatgcacaaatgcctta

SEQ ID NO: 18154 - DNA, 120 bp, Artificial Sequence
  ENSG00000018408_59 (sequence is synthesized)
tgattcccctgctcaggaccgcctccccagaaggcaagcacaagggcccattttaagaggatgtttccccccaaacatctgagagcgcttcaacttaaacagcttacggttaaaaagaca

SEQ ID NO: 18155 - DNA, 120 bp, Artificial Sequence
  ENSG00000018408_60 (sequence is synthesized)
aaaaagaaagcaaaactaaccaaagaaactccaaaaaaccccatgaaccacccagccataactgccttccttaatcgatcataggagtttcattttataaaaagataaataaaaaacatt

SEQ ID NO: 18156 - DNA, 120 bp, Artificial Sequence
  ENSG00000018408_61 (sequence is synthesized)
ttatctgtctcctcgtttccttttccctctattctttctcccaccatctcgccctctcaccctgtaaccctcttacccacttcctccgactttaaataaaaggctgatctgaccttcttt

SEQ ID NO: 18157 - DNA, 120 bp, Artificial Sequence
  ENSG00000018408_62 (sequence is synthesized)
aggatttgcactttctccttttcttcagaatgtgtatctgcctaagcagtgtgataacttttttcccagactggatcgatattccttagctggtcctgttgcagcaggagtccggtgact

SEQ ID NO: 18158 - DNA, 120 bp, Artificial Sequence
  ENSG00000018408_63 (sequence is synthesized)
gtattaagtgcctcttgtgagcaatagctcactcttacttgttgcattcagcctgggagccactcttgacaccatgttagcgcagccttacagctgatgtcaggtcgactggtctgcaga

SEQ ID NO: 18159 - DNA, 120 bp, Artificial Sequence
  ENSG00000018408_64 (sequence is synthesized)
gccaggaatttgggctttcttctcagagttgttttggagcaatgagaactgctcacttaagaaaggctccctcttgtactccagcctttggggaatgcttcacatagaaaaaatcaccac

SEQ ID NO: 18160 - DNA, 120 bp, Artificial Sequence
  ENSG00000018510_0 (sequence is synthesized)
agcggttccgggcggcagcacaaggcggtagccatggcggaggcggcggctgcagcgggtgggactggcttgggcgcgggcgcgagctacgggtctgcagcggaccgggaccgggacccg

SEQ ID NO: 18161 - DNA, 120 bp, Artificial Sequence
  ENSG00000018510_1 (sequence is synthesized)
gacccggaccgcgccgggcggaggctgcgggttctctctggccatctgctgggccggccccgggaggctctgagtaccaatgagtgcaaagcgcggagagccgcgtcggcggccacggca

SEQ ID NO: 18162 - DNA, 120 bp, Artificial Sequence
  ENSG00000018510_2 (sequence is synthesized)
gcgcccacggccactcccgccgcgcaggagtcgggcaccatcccaaagaagcggcaagaagttatgaaatggaatggatggggatataatgattctaaattcatcttcaataagaagggc

SEQ ID NO: 18163 - DNA, 120 bp, Artificial Sequence
  ENSG00000018510_3 (sequence is synthesized)
caaattgaattgactgggaaaaggtaccctcttagtggcatgggtttaccaacatttaaagaatggatccaaaatacccttggagtaaatgtggagcataaaactacctctaaagcatcc

SEQ ID NO: 18164 - DNA, 120 bp, Artificial Sequence
  ENSG00000018510_4 (sequence is synthesized)
ttaaatcctagtgatacacctccttctgttgtaaatgaagattttcttcatgaccttaaagaaactaatatttcatattcacaagaggcagatgatcgagtatttagagctcatggtcat

SEQ ID NO: 18165 - DNA, 120 bp, Artificial Sequence
  ENSG00000018510_5 (sequence is synthesized)
tgtcttcatgagatatttttgctcagggaaggaatgtttgagcgaattcctgatatagttttatggccaacatgccatgatgatgtagttaagattgtgaatctagcttgcaaatataat

SEQ ID NO: 18166 - DNA, 120 bp, Artificial Sequence
  ENSG00000018510_6 (sequence is synthesized)
ctttgtatcataccaattggtggaggaacaagtgtttcatatggcctgatgtgtcctgcagatgagacaagaacaattatttctttggacacttcacaaatgaatcgaattctctgggtt

SEQ ID NO: 18167 - DNA, 120 bp, Artificial Sequence
  ENSG00000018510_7 (sequence is synthesized)
gatgagaacaatttgacagctcatgtagaggctggcataacaggacaagagttggaaagacagcttaaagaaagtggttattgtacaggtcatgaaccagattccctggagttcagtact

SEQ ID NO: 18168 - DNA, 120 bp, Artificial Sequence
  ENSG00000018510_8 (sequence is synthesized)
gtaggaggatgggtatctactcgcgcatcaggcatgaagaagaatatctatggcaatatcgaggacctggtggttcatataaaaatggtaacacctagaggtataatagaaaaaagctgt

SEQ ID NO: 18169 - DNA, 120 bp, Artificial Sequence
  ENSG00000018510_9 (sequence is synthesized)
caaggacctcgtatgtcaacaggccctgatatccatcacttcatcatgggatctgaaggaactcttggtgtaataacagaagctacaataaaaatcagaccagtccctgaataccaaaag

SEQ ID NO: 18170 - DNA, 120 bp, Artificial Sequence
  ENSG00000018510_10 (sequence is synthesized)
tatggctcagtagctttccctaattttgaacaaggagtagcctgtttaagagaaattgcaaaacagagatgtgctccggcatctattcgcctcatggacaacaagcagtttcagtttggt

SEQ ID NO: 18171 - DNA, 120 bp, Artificial Sequence
  ENSG00000018510_11 (sequence is synthesized)
catgctcttaaacctcaggtttcctctatttttacatcatttttggacggattaaaaaagttttatattacaaagtttaaaggatttgacccaaatcagctaagtgtagccacattactg

SEQ ID NO: 18172 - DNA, 120 bp, Artificial Sequence
  ENSG00000018510_12 (sequence is synthesized)
tttgagggggatcgtgagaaggttcttcaacatgaaaaacaagtgtatgatattgctgcaaaatttggtgggttggcagctggagaagataatggacagagaggttatttgctgacctat

SEQ ID NO: 18173 - DNA, 120 bp, Artificial Sequence
  ENSG00000018510_13 (sequence is synthesized)
gttattgcatacattcgagacttggctttggaatactatgtattaggagaatcttttgagacttctgctccttgggacagggtggtagatctctgtagaaatgtaaaagaaagaataaca

SEQ ID NO: 18174 - DNA, 120 bp, Artificial Sequence
  ENSG00000018510_14 (sequence is synthesized)
agggaatgcaaagagaagggtgttcagtttgctcctttttctacatgcagggtgacgcagacttacgatgcaggtgcttgtatctacttctattttgcctttaactacaggggaattagt

SEQ ID NO: 18175 - DNA, 120 bp, Artificial Sequence
  ENSG00000018510_15 (sequence is synthesized)
gacccactgaccgtatttgaacaaactgaggcagctgctagagaagaaatccttgctaatggagggagcctgtcacatcaccatggagtgggcaagttacggaagcaatggctaaaggaa

SEQ ID NO: 18176 - DNA, 120 bp, Artificial Sequence
  ENSG00000018510_16 (sequence is synthesized)
agtatctctgatgtcggctttgggatgctgaagtctgtcaaggaatatgtggaccccaataacatctttggaaacagaaaccttttataaatccattagtaccattacaaaaaaatgtca

SEQ ID NO: 18177 - DNA, 120 bp, Artificial Sequence
  ENSG00000018510_17 (sequence is synthesized)
attttttttttaagttttcaactgtggttatactagtaatcaaatatatcatggactatattttggatacatttgtttctttggtttaaaataagtttgttttcattctgtagtttgttt

SEQ ID NO: 18178 - DNA, 120 bp, Artificial Sequence
  ENSG00000018510_18 (sequence is synthesized)
tgtttctacatctatggattgacagatagtattcctaaatctctctcattgtaggtacatcattttacattcagcggttgtcatttcaaattttagtcaggcagcacaaagctgtcaatt

SEQ ID NO: 18179 - DNA, 120 bp, Artificial Sequence
  ENSG00000018510_19 (sequence is synthesized)
attccagaggaagctgctgccagctgttttgtattgttgcttcctcttggggaacaaagacagatttggtatcattgattgctcagctagcctctttttaaaagaacgtttctgggaatc

SEQ ID NO: 18180 - DNA, 120 bp, Artificial Sequence
  ENSG00000018510_20 (sequence is synthesized)
agatgtctagggaaggattccactgaggagtgatacacgtgtacattgtttaagagcatagtctagtgtgagtaggccattaaggggaaggatattcatgaaagaatttaggcaacctgt

SEQ ID NO: 18181 - DNA, 120 bp, Artificial Sequence
  ENSG00000018510_21 (sequence is synthesized)
tatttagaaagccttcacgtctgtaaggtgcttggcctacttttttttttaaattagtatacatgcataaaaccttgtatcatcaatatacaaattattctgttaggggacatgtttttg

SEQ ID NO: 18182 - DNA, 120 bp, Artificial Sequence
  ENSG00000018510_22 (sequence is synthesized)
ttctccatgtttctgtttctattgtggtatgagttgtatttgtatcactgagataacctattgttatattctaattcattgataatatgttttgtaagaaaagctgacatccttcattgc

SEQ ID NO: 18183 - DNA, 120 bp, Artificial Sequence
  ENSG00000018510_23 (sequence is synthesized)
aagtgaagaacaggtttaccatgaaatgaatgcctttattcaacttagagtcctaatgtttctgatttcacattcttgttgctgaaatgcagaagaaacagctacagcaagagcagaagg

SEQ ID NO: 18184 - DNA, 120 bp, Artificial Sequence
  ENSG00000018510_24 (sequence is synthesized)
aaaactcttagacttaatgtctccaattgcaagaattgtttcactaaagaaacagtcatcattcaactactgaatttgaaagcctcagcagtttcaatgacaaaaatcatttttgatttt

SEQ ID NO: 18185 - DNA, 120 bp, Artificial Sequence
  ENSG00000018510_25 (sequence is synthesized)
ttaaaattaatcccaatggcatgataaattttcatataaaaagtaaagtttcaatttagtttttaataatggtttaatgccttttttgaataactggtttaacctaattttttttaaatg

SEQ ID NO: 18186 - DNA, 120 bp, Artificial Sequence
  ENSG00000018510_26 (sequence is synthesized)
taatgtattaatgcatataccataatcaaaagtttgaaatatcctgtttcttaaataatgagaacattaatcacatttagcaagcatttgtacattcaaacctggatattaaagtgaaat

SEQ ID NO: 18187 - DNA, 120 bp, Artificial Sequence
  ENSG00000018510_27 (sequence is synthesized)
gattactttgaatcactgtctgccaaggttcatgattcacattttgagatggattcttttcttaatgcaatacctaacttttgataattttttaaaactaatatttgatcagataatgta

SEQ ID NO: 18188 - DNA, 120 bp, Artificial Sequence
  ENSG00000018510_28 (sequence is synthesized)
agtcaaaatgcagacgatcctttaaaaggatgcattgtctgtgtatgtagcaacagctccaaagtatttttgggcagtttgataccttttatatctgaagtagccttaaccagaaaaatg

SEQ ID NO: 18189 - DNA, 120 bp, Artificial Sequence
  ENSG00000018510_29 (sequence is synthesized)
gaagtagccttaaccagaaaaatggtaatttaaaattgacaaaatgatatttttaagacttcaaaatgataaataatttttaactattaaaattggcctcaaactaataaatctgtaatt

SEQ ID NO: 18190 - DNA, 120 bp, Artificial Sequence
  ENSG00000018510_30 (sequence is synthesized)
acaacaaaatgaaatatttattttttagaagctgcctctcttcattggtcatttatttttaattataaaatttccaacagatctttgctttaagcccttgatatttgacctagttggaca

SEQ ID NO: 18191 - DNA, 120 bp, Artificial Sequence
  ENSG00000018510_31 (sequence is synthesized)
gttcacgaaggtaatttctttaattggtgatcaaaatataaaattaaggtactaatgtctcactggaagtatatatatatatatatatatatgtatgcatgtgtgtgtgtgtatatatat

SEQ ID NO: 18192 - DNA, 120 bp, Artificial Sequence
  ENSG00000018510_32 (sequence is synthesized)
tttaaaaaataaaacaggttaataagaagatccattcctttgcatgtgattgttataacattctttcccagggagttcaatttcagcaacctcagaaatccatacttgatattaggaaac

SEQ ID NO: 18193 - DNA, 120 bp, Artificial Sequence
  ENSG00000018510_33 (sequence is synthesized)
tgtaaatgtaacacctgaaattattatgttcactattctacatgaaccttatggaaattcatgatttatgtctttgtttttctttttccaagtatatgcaggactccccaaccttgattt

SEQ ID NO: 18194 - DNA, 120 bp, Artificial Sequence
  ENSG00000018510_34 (sequence is synthesized)
tataatggtgactgcattttgtaggtggaatcatttctaccgaaatcattttgaaacacaagaatattgatcagtactgtttcactctgatttagtaaatcagaaagcctccccctaccc

SEQ ID NO: 18195 - DNA, 120 bp, Artificial Sequence
  ENSG00000018510_35 (sequence is synthesized)
ccagcccccactttcacataccttctgggaggtgcctcagtatagacttggtatctgtgaaggactgagttcatgaatatgcacagaagcacttaaaccatgcctcttatttctataata

SEQ ID NO: 18196 - DNA, 120 bp, Artificial Sequence
  ENSG00000018510_36 (sequence is synthesized)
tctgaaaatggcttcataaaagttaagtcaggagaacactgtttacatgacacttcttaactcatttttaatgtttatttttaatttcaaaaacttgttgcctatttggttttcagtact

SEQ ID NO: 18197 - DNA, 120 bp, Artificial Sequence
  ENSG00000018510_37 (sequence is synthesized)
gcataacactgactttcttaaattagtcatagttgcaataatttacttaaatttggtaatgtcacatttgggttggggtttcagtgggaatagtaacttgccgctagtgagaaatggcat

SEQ ID NO: 18198 - DNA, 120 bp, Artificial Sequence
  ENSG00000018510_38 (sequence is synthesized)
tgaatactaaagactcaatatgaacaggctttatagacccttagagaaactgttgccttaatgtttggtgcaatttctagtagtgcataagtgaatttagtcttatgataagtaactttg

SEQ ID NO: 18199 - DNA, 120 bp, Artificial Sequence
  ENSG00000018510_39 (sequence is synthesized)
agctgtttttagcttagtaagaattgtggaaaccacatgtttattgtgcccatcattttacacaaagaaaagaggattatattatttcttctaaggaagtaggagttttcttcctaaaag

SEQ ID NO: 18200 - DNA, 120 bp, Artificial Sequence
  ENSG00000018510_40 (sequence is synthesized)
tgcttacatattgtagtactattacttaaaagttatttatgaagttgggagccttctagtttgcctgtgttgatgtattttgaaaacaaaattgcaataaaggatgagcttccatcggtg

SEQ ID NO: 18201 - DNA, 120 bp, Artificial Sequence
  ENSG00000018510_41 (sequence is synthesized)
tgtatggtataccagatacagatggttgcaaggaaaccttttcccccactagaatagtctattagtaactgctaagtcctagcttgcatttttgaaaatgcctttctgcatgttagcacc

SEQ ID NO: 18202 - DNA, 120 bp, Artificial Sequence
  ENSG00000018510_42 (sequence is synthesized)
cagactttcctttgtcatattcctttatagctacaacttaactgtagcttatcagagaagctctgtagtcctacactgaagtgtgttcccttggctgttcatatggggctgggtttggtt

SEQ ID NO: 18203 - DNA, 120 bp, Artificial Sequence
  ENSG00000018510_43 (sequence is synthesized)
gaacttccattctgtataaatgctagaacacagttactacagattgattcacaaactgcatgtgctggtgcttgaggcagccaaaatggaatgctgtggaaagcatatctatatcttaaa

SEQ ID NO: 18204 - DNA, 120 bp, Artificial Sequence
  ENSG00000018510_44 (sequence is synthesized)
aaacactcagacaggagttaaggacagctttaataatttttttgtttaccacttaatctttatcaactttgattttagttagggcttagctcatggttgaagaaaagtggaaaataacaa

SEQ ID NO: 18205 - DNA, 120 bp, Artificial Sequence
  ENSG00000018510_45 (sequence is synthesized)
gtgcccatttaggtttgaagaatccagaatgttttacctttgactttatgagttatagaagcttggctttgctctaggcttcatgttcccaaatgagccatctgtcagtatattcactta

SEQ ID NO: 18206 - DNA, 120 bp, Artificial Sequence
  ENSG00000018510_46 (sequence is synthesized)
attcttactaatttcagtttcctgtaaaggaaacaacttacatattgatgcttaaatccagaaagtgtaaaaggttttcttaaactgttaaaatatagtgtctgatataaaggatgtaag

SEQ ID NO: 18207 - DNA, 120 bp, Artificial Sequence
  ENSG00000018510_47 (sequence is synthesized)
ttactcagctttctgctccctaagccaaacagtgtttgtcttcagtgtgaaatttaactgtaaaaactacttgtaatgtcaagagattatagatcatattattaataaaatggacctggg

SEQ ID NO: 18208 - DNA, 120 bp, Artificial Sequence
  ENSG00000018510_48 (sequence is synthesized)
tctaatattttttttcttcaaagggagtgtgaagctgtttattcttttatttgcatatgagtttttcttttagttttagtttttcatgttcatatttccactgatttgaaaacacaaaat

SEQ ID NO: 18209 - DNA, 120 bp, Artificial Sequence
  ENSG00000018510_49 (sequence is synthesized)
ttatttttataattttgttgcttgtagcataatcaagtgcaaaatcaagtgcaacctacttgtgactaaatctctttggatttatagctgaggatattgttagctaggttttgtcaatcc

SEQ ID NO: 18210 - DNA, 120 bp, Artificial Sequence
  ENSG00000018510_50 (sequence is synthesized)
ctaatcattttttaaaatcaatgctgtattcccaggaggctttgagactcctatgaacctgaagcactcccttttgaaccttggaagatcctcaaagagtgagcactcttgtgctcttct

SEQ ID NO: 18211 - DNA, 120 bp, Artificial Sequence
  ENSG00000018510_51 (sequence is synthesized)
aatcataattaattccttaacaaatcagagtaaggaccactgacatatagaaccctcaagccaaagaaccatcacagaatttagtaactttagttctgtgaacatgaaaagatttctttt

SEQ ID NO: 18212 - DNA, 120 bp, Artificial Sequence
  ENSG00000018510_52 (sequence is synthesized)
ttggtttccaaaggagattatttatttttccacaaggaaaaacatcttgcagagactctgaattccaaatctgagtgagaaagaaaaggaaaaaaatctgtttcatggtggatttctaag

SEQ ID NO: 18213 - DNA, 120 bp, Artificial Sequence
  ENSG00000018510_53 (sequence is synthesized)
caacatatatacatgtttttaagacaaccttttgttggcagtgtttttcctgaacaccatatgcaccctaggaaacatgtttttcctttaatcttgttcacatatcagaaaaggacatga

SEQ ID NO: 18214 - DNA, 120 bp, Artificial Sequence
  ENSG00000018510_54 (sequence is synthesized)
aatgctcatactggcatacaagtttctataagtagttattttttgagctacttatactatatccccaaaagctcacagtgccttgttgggattttttttttccatgaactagccattatt

SEQ ID NO: 18215 - DNA, 120 bp, Artificial Sequence
  ENSG00000018510_55 (sequence is synthesized)
ttaaatgagtgggagagggtaagtctttagacagaggtcattcagcagttcaagactattcctcttcaagaacatgtcaggaattaagcagttatatgtggaaacactggtaattctttc

SEQ ID NO: 18216 - DNA, 120 bp, Artificial Sequence
  ENSG00000018510_56 (sequence is synthesized)
cacagtgttgttttggataatctgttctagtatatttaactaattgtatggtggacctgtactctgatacacatcgaatcagtcaatgggatttgtatgtgcttttccttcctacatttt

SEQ ID NO: 18217 - DNA, 120 bp, Artificial Sequence
  ENSG00000018510_57 (sequence is synthesized)
cattcctactgccccaacctagtagccctaagttgtggcttggtgggtttggcattgagcctcaagacactcactacattctttctggatgtttgctcacaggctccctgaggagcagaa

SEQ ID NO: 18218 - DNA, 120 bp, Artificial Sequence
  ENSG00000018510_58 (sequence is synthesized)
cctgtggagctggggagtgcgggtggtttctattcctaatattgtgtgtcagtcctttttcgtgtgatggtgccttcagaataacgaatatttctgttctggacaatgattaaatcttat

SEQ ID NO: 18219 - DNA, 120 bp, Artificial Sequence
  ENSG00000018510_59 (sequence is synthesized)
gagaaatatatgtaggttatattaattcttgtccatttttgctaagcctgtgaaatactttggctctgatacaacttaacttgaataatatcttatcctgagtcttcctccaaggcagta

SEQ ID NO: 18220 - DNA, 120 bp, Artificial Sequence
  ENSG00000018510_60 (sequence is synthesized)
catattcctgccaggactgtagtaatcctttgggaactacatgtgagtaagcacttgtatgtaagccattatactgctgtaactaatgcatacaaacaattcttctctttacatttatag

SEQ ID NO: 18221 - DNA, 120 bp, Artificial Sequence
  ENSG00000018510_61 (sequence is synthesized)
tctaaaaggggatatgcagtgggaaggaaaattcctgagagattccagcatagctttgtcaattccgactgagccatactgttttccacaagggctcaacacatagtcagtattccgtgc

SEQ ID NO: 18222 - DNA, 120 bp, Artificial Sequence
  ENSG00000018510_62 (sequence is synthesized)
tttcagtgtgtgttcagattctcctcttactggttttcttagactgtattgttctataagcaaatgcccatgtgtgatttttaagatgtgctggggaaaaataaatcaataccacaacca

SEQ ID NO: 18223 - DNA, 120 bp, Artificial Sequence
  ENSG00000018510_63 (sequence is synthesized)
cacagatttgcggaagatcttttccaccattggataattttcaagattccagtagatttttgcctgagccatcaacacaggaatgtatttctccatggtttcatcatattcattcactgc

SEQ ID NO: 18224 - DNA, 120 bp, Artificial Sequence
  ENSG00000018510_64 (sequence is synthesized)
ctttttgatagcttcatcatctctattgtgtcttgcttcctgtacttgtatggcttacagctggaaggaacttgctatgagtcttagatgagactttggacttttgttgctggagcaagt

SEQ ID NO: 18225 - DNA, 120 bp, Artificial Sequence
  ENSG00000018510_65 (sequence is synthesized)
taagacttttgggactactggaatggaatgattgtattttgtatatgagaagcacatgatttttttgaggctaggggcagaatgctatatttgcatatgttcatcaccatcaaaactcat

SEQ ID NO: 18226 - DNA, 120 bp, Artificial Sequence
  ENSG00000018510_66 (sequence is synthesized)
gttgaaatgttattttcagtgccgcagtatagggaaatggagcctaggggagctgtttgggtcaagggaatggatccattatgaatgacttggtgctgttctcgcagtagtgagctcttg

SEQ ID NO: 18227 - DNA, 120 bp, Artificial Sequence
  ENSG00000018510_67 (sequence is synthesized)
ctctcatgagactggattattctcatggaaatggattagttcccatgagagtgggttgttataaagcaagatgctcttgggttttgcccctttgcacatgtctgcttcccctttgacctt

SEQ ID NO: 18228 - DNA, 120 bp, Artificial Sequence
  ENSG00000018510_68 (sequence is synthesized)
ctgccatgttatgatgcagcacaaaagccctcaccagaagccaagctgatgctggcaccgtgcttcttgtacttcccagcctgcagaaccatgagctaaataaacctttcttataaatta

SEQ ID NO: 18229 - DNA, 120 bp, Artificial Sequence
  ENSG00000018510_69 (sequence is synthesized)
ttagttcatggctttttcctctatgggccctagttgaagctgtaatttaatgcctgaataacaaaatgtttctgctttagtaattactttttaacctgtatatttatggagagaattttc

SEQ ID NO: 18230 - DNA, 120 bp, Artificial Sequence
  ENSG00000018510_70 (sequence is synthesized)
tttttcaaaagctaaatataaatatgtcctatataaacctttgagattagcataggaatggtaataagactcccaacaattctagaagctccatattccctcttcagctgatgctttctg

SEQ ID NO: 18231 - DNA, 120 bp, Artificial Sequence
  ENSG00000018610_0 (sequence is synthesized)
gcgaccctcttcttggcgtagagttttcagattgctcttgggaatcatgccgaaagtagtgtctcggtcagtagtctgctctgacactcgggaccgggaggaatatgacgacggcgagaa

SEQ ID NO: 18232 - DNA, 120 bp, Artificial Sequence
  ENSG00000018610_1 (sequence is synthesized)
gcccctccatgtttactactgtttgtgcggccagatggtcctagtgctggactgccagttagagaaattgcccatgaggccccgggaccggtcccgtgtgattgatgctgccaaacatgc

SEQ ID NO: 18233 - DNA, 120 bp, Artificial Sequence
  ENSG00000018610_2 (sequence is synthesized)
ccataagttttgtaacacagaagatgaggagactatgtatctgcggagacctgaaggcattgaacgacagtacaggaagaaatgtgcaaagtgtggactgccgctcttctaccaatccca

SEQ ID NO: 18234 - DNA, 120 bp, Artificial Sequence
  ENSG00000018610_3 (sequence is synthesized)
gccaaagaatgctcctgttaccttcattgtggatggagcagtagtcaagtttggccagggctttgggaaaacgaacatatatactcagaaacaagagcctcctaagaaggtgatgatgac

SEQ ID NO: 18235 - DNA, 120 bp, Artificial Sequence
  ENSG00000018610_4 (sequence is synthesized)
atatgcacagaatgccaaagtgattgaaaaacagctggagcgcaaaggcatgagcaagaggcgactgcaagagctggctgaattggaagccaagaaagcgaaaatgaaggggaccttgat

SEQ ID NO: 18236 - DNA, 120 bp, Artificial Sequence
  ENSG00000018610_5 (sequence is synthesized)
tgacaaccagttcaaataaccaggcctttttctaagccctagactagaggcaagcatttagatcaggaggcaaagtaatttcttgattacatagacggattcctatttatgccctagcag

SEQ ID NO: 18237 - DNA, 120 bp, Artificial Sequence
  ENSG00000018610_6 (sequence is synthesized)
agacggattcctatttatgccctagcagaaggctttacgttgtttcccattgattctcctacattcagtgaggtctttaactgagtccatttaacttgctttcttttttttttttttttt

SEQ ID NO: 18238 - DNA, 120 bp, Artificial Sequence
  ENSG00000018610_7 (sequence is synthesized)
ggccagatggtcctagtgctgggtgagtagccgggaactgcgggggcgtctgcaaggagccagacttcgggttcttgaaggcgaatttcctctggctgtgatctgggagccacttctcaa

SEQ ID NO: 18239 - DNA, 60 bp, Artificial Sequence
  ENSG00000018610_8 (sequence is synthesized)
tgccctgctttctaggagatggagttttctgaatttttctgtatttaggttttctgtact

SEQ ID NO: 18240 - DNA, 120 bp, Artificial Sequence
  ENSG00000018610_9 (sequence is synthesized)
ggagttttctgaatttttctgtatttaggttttctgtactattttttgtccacttgatgcaaacttcttcagctgtgtagaaactttatgaatagatgagtgcttgagtgtctccagtct

SEQ ID NO: 18241 - DNA, 120 bp, Artificial Sequence
  ENSG00000018610_10 (sequence is synthesized)
ctaaagtggctgcttttattctttcttcaaagttaataacatgttgcaagatttttggacaaaatattatggtgtgtcataggaaaagcaccatgaattatatttaggtatagcaagtca

SEQ ID NO: 18242 - DNA, 120 bp, Artificial Sequence
  ENSG00000018610_11 (sequence is synthesized)
gatcctttgaagtgactctgtctctgttcttagaagggttcttggaattggctgtggtttgaatctttctactgtcagaggagacccattaaaagccagaatctgcataaagctttcttt

SEQ ID NO: 18243 - DNA, 120 bp, Artificial Sequence
  ENSG00000018610_12 (sequence is synthesized)
acttcaaacactgaagctgtaggcgagccatcccgtatcgactttatactcaaagaaggaaaagccagattgcagtgagtgggtaggacagctcagatccaaatgaaagtagggtctcaa

SEQ ID NO: 18244 - DNA, 72 bp, Artificial Sequence
  ENSG00000018610_13 (sequence is synthesized)
gggtaggacagctcagatccaaatgaaagtagggtctcaagtaacccaagggagaggcgggcagattgcctg

SEQ ID NO: 18245 - DNA, 85 bp, Artificial Sequence
  ENSG00000018610_14 (sequence is synthesized)
gggcgacagagtggtaacccaagggagggagctaccctctagtcgggcagctgatactgcttccttgcatggatacatgggaggg

SEQ ID NO: 18246 - DNA, 120 bp, Artificial Sequence
  ENSG00000018610_15 (sequence is synthesized)
ggcagctgatactgcttccttgcatggatacatgggagggagacgttatagattaagaaatgatagcaagataaacaaaatgatttgttgggtatcttttactttacatttgttatttgc

SEQ ID NO: 18247 - DNA, 120 bp, Artificial Sequence
  ENSG00000018610_16 (sequence is synthesized)
agaggagtgttgtatatatagatgttattttatgtcacactgcttcaatgatacctatatccatgtgtttgtatccatgtttttatccattcaactgtattaaaaggtgttgggacagga

SEQ ID NO: 18248 - DNA, 120 bp, Artificial Sequence
  ENSG00000018610_17 (sequence is synthesized)
agaaaaatatgtaaataaaaacattggcacttttaaataggtcatcctgtcccaaagaggtagtgtttcccccaatacccacagcccctcacacaggcgtgtgcgcacacactcacggct

SEQ ID NO: 18249 - DNA, 120 bp, Artificial Sequence
  ENSG00000018610_18 (sequence is synthesized)
catggatcctgttttggtgaaccggactgacttcttcttgcctgccactccaggtgatgatgaccaaacggaccaaagacatgggcaagttcagttctgtcaccgtgtctaccattgatg

SEQ ID NO: 18250 - DNA, 120 bp, Artificial Sequence
  ENSG00000018625_0 (sequence is synthesized)
ctctgtctgccagggtctccgactgtcccagacgggctggtgtgggcttgggatcctcctggtgacctctcccgctaaggtccctcagccactctgccccaagatgggccgtggggctgg

SEQ ID NO: 18251 - DNA, 120 bp, Artificial Sequence
  ENSG00000018625_1 (sequence is synthesized)
ccgtgagtactcacctgccgccaccacggcagagaatgggggcggcaagaagaaacagaaggagaaggaactggatgagctgaagaaggaggtggcaatggatgaccacaagctgtcctt

SEQ ID NO: 18252 - DNA, 120 bp, Artificial Sequence
  ENSG00000018625_2 (sequence is synthesized)
ggatgagctgggccgcaaataccaagtggacctgtccaagggcctcaccaaccagcgggctcaggacgttctggctcgagatgggcccaacgccctcacaccacctcccacaacccctga

SEQ ID NO: 18253 - DNA, 120 bp, Artificial Sequence
  ENSG00000018625_3 (sequence is synthesized)
gtgggtcaagttctgccgtcagcttttcggggggttctccatcctgctgtggattggggctatcctctgcttcctggcctacggcatccaggctgccatggaggatgaaccatccaacga

SEQ ID NO: 18254 - DNA, 120 bp, Artificial Sequence
  ENSG00000018625_4 (sequence is synthesized)
caatctatatctgggtgtggtgctggcagctgtggtcattgtcactggctgcttctcctactaccaggaggccaagagctccaagatcatggattccttcaagaacatggtacctcagca

SEQ ID NO: 18255 - DNA, 120 bp, Artificial Sequence
  ENSG00000018625_5 (sequence is synthesized)
agcccttgtgatccgggagggagagaagatgcagatcaacgcagaggaagtggtggtgggagacctggtggaggtgaagggtggagaccgcgtccctgctgacctccggatcatctcttc

SEQ ID NO: 18256 - DNA, 120 bp, Artificial Sequence
  ENSG00000018625_6 (sequence is synthesized)
tcatggctgtaaggtggataactcatccttaacaggagagtcggagccccagacccgctcccccgagttcacccatgagaaccccctggagacccgcaatatctgtttcttctccaccaa

SEQ ID NO: 18257 - DNA, 120 bp, Artificial Sequence
  ENSG00000018625_7 (sequence is synthesized)
ctgtgttgaaggcactgccaggggcattgtgattgccacaggagaccggacggtgatgggccgcatagctactctcgcctcaggcctggaggttgggcggacacccatagcaatggagat

SEQ ID NO: 18258 - DNA, 120 bp, Artificial Sequence
  ENSG00000018625_8 (sequence is synthesized)
tgaacacttcatccagctgatcacaggggtcgctgtattcctgggggtctccttcttcgtgctctccctcatcctgggctacagctggctggaggcagtcatcttcctcatcggcatcat

SEQ ID NO: 18259 - DNA, 120 bp, Artificial Sequence
  ENSG00000018625_9 (sequence is synthesized)
agtggccaacgtgcctgaggggcttctggccactgtcactgtgtgcctgaccctgacagccaagcgcatggcacggaagaactgcctggtgaagaacctggaggcggtggagacgctggg

SEQ ID NO: 18260 - DNA, 120 bp, Artificial Sequence
  ENSG00000018625_10 (sequence is synthesized)
ctccacgtccaccatctgctcggacaagacgggcaccctcacccagaaccgcatgaccgtcgcccacatgtggttcgacaaccaaatccatgaggctgacaccaccgaagatcagtctgg

SEQ ID NO: 18261 - DNA, 120 bp, Artificial Sequence
  ENSG00000018625_11 (sequence is synthesized)
ggccacttttgacaaacgatcccctacgtggacggccctgtctcgaattgctggtctctgcaaccgcgccgtcttcaaggcaggacaggagaacatctccgtgtctaagcgggacacagc

SEQ ID NO: 18262 - DNA, 120 bp, Artificial Sequence
  ENSG00000018625_12 (sequence is synthesized)
tggtgatgcctctgagtcagctctgctcaagtgcattgagctctcctgtggctcagtgaggaaaatgagagacagaaaccccaaggtggcagagattcctttcaactctaccaacaagta

SEQ ID NO: 18263 - DNA, 120 bp, Artificial Sequence
  ENSG00000018625_13 (sequence is synthesized)
ccagctgtctatccacgagcgagaagacagcccccagagccacgtgctggtgatgaagggggccccagagcgcattctggaccggtgctccaccatcctggtgcagggcaaggagatccc

SEQ ID NO: 18264 - DNA, 120 bp, Artificial Sequence
  ENSG00000018625_14 (sequence is synthesized)
gctcgacaaggagatgcaagatgcctttcaaaatgcctacatggagctggggggacttggggagcgtgtgctgggattctgtcaactgaatctgccatctggaaagtttcctcggggctt

SEQ ID NO: 18265 - DNA, 120 bp, Artificial Sequence
  ENSG00000018625_15 (sequence is synthesized)
caaattcgacacggatgagctgaactttcccacggagaagctttgctttgtggggctcatgtctatgattgaccctccccgggctgctgtgccagatgctgtgggcaagtgccgaagcgc

SEQ ID NO: 18266 - DNA, 120 bp, Artificial Sequence
  ENSG00000018625_16 (sequence is synthesized)
aggcatcaaggtgatcatggtaaccggggatcaccctatcacagccaaggccattgccaaaggcgtgggcatcatatcagagggtaacgagactgtggaggacattgcagcccggctcaa

SEQ ID NO: 18267 - DNA, 120 bp, Artificial Sequence
  ENSG00000018625_17 (sequence is synthesized)
cattcccatgagtcaagtcaaccccagagaagccaaggcatgcgtggtgcacggctctgacctgaaggacatgacatcggagcagctcgatgagatcctcaagaaccacacagagatcgt

SEQ ID NO: 18268 - DNA, 120 bp, Artificial Sequence
  ENSG00000018625_18 (sequence is synthesized)
ctttgctcgaacgtctccccagcagaagctcatcattgtggagggatgtcagaggcagggagccattgtggccgtgacgggtgacggggtgaacgactcccctgcattgaagaaggctga

SEQ ID NO: 18269 - DNA, 120 bp, Artificial Sequence
  ENSG00000018625_19 (sequence is synthesized)
cattggcattgccatgggcatctctggctctgacgtctctaagcaggcagccgacatgatcctgctggatgacaactttgcctccatcgtcacgggggtggaggagggccgcctgatctt

SEQ ID NO: 18270 - DNA, 120 bp, Artificial Sequence
  ENSG00000018625_20 (sequence is synthesized)
tgacaacttgaagaaatccatcgcctacaccctgaccagcaacatccccgagatcacccccttcctgctgttcatcattgccaacatccccctacctctgggcactgtgaccatcctttg

SEQ ID NO: 18271 - DNA, 120 bp, Artificial Sequence
  ENSG00000018625_21 (sequence is synthesized)
cattgacctgggcacagatatggtccctgccatctccttggcctatgaggcagctgagagtgatatcatgaagcggcagccacgaaactcccagacggacaagctggtgaatgagaggct

SEQ ID NO: 18272 - DNA, 120 bp, Artificial Sequence
  ENSG00000018625_22 (sequence is synthesized)
aggcactgggtggcttcttcacctactttgtgatcctggcagagaacggtttcctgccatcacggctactgggaatccgcctcgactgggatgaccggaccatgaatgatctggaggaca

SEQ ID NO: 18273 - DNA, 120 bp, Artificial Sequence
  ENSG00000018625_23 (sequence is synthesized)
gctatggacaggagtggacctatgagcagcggaaggtggtggagttcacgtgccacacggcattctttgccagcatcgtggtggtgcagtgggctgacctcatcatctgcaagacccgcc

SEQ ID NO: 18274 - DNA, 120 bp, Artificial Sequence
  ENSG00000018625_24 (sequence is synthesized)
gcaactcagtcttccagcagggcatgaagaacaagatcctgatttttgggctcctggaggagacggcgttggctgcctttctctcttactgcccaggcatgggtgtagccctccgcatgt

SEQ ID NO: 18275 - DNA, 120 bp, Artificial Sequence
  ENSG00000018625_25 (sequence is synthesized)
acccgctcaaagtcacctggtggttctgcgccttcccctacagcctcctcatcttcatctatgatgaggtccgaaagctcatcctgcggcggtatcctggtggctgggtggagaaggaga

SEQ ID NO: 18276 - DNA, 120 bp, Artificial Sequence
  ENSG00000018625_26 (sequence is synthesized)
catactactgaccccattggaagaagaaccaggcatggaaagatggggagctctggaggtgttgtggggatggtgatggagagggatggaaataacgggtggcattgggtggcaacattt

SEQ ID NO: 18277 - DNA, 120 bp, Artificial Sequence
  ENSG00000018625_27 (sequence is synthesized)
ggggagagataatgaggcaactcagcaggctaagttgcggggtatataaattggggtgatgaccccatagacctaactgtgaacaatcagattagacactatgtgttagagtccccccga

SEQ ID NO: 18278 - DNA, 120 bp, Artificial Sequence
  ENSG00000018625_28 (sequence is synthesized)
ccagatccttttccatcccactccactatgttgtctattttttctgaggaattaagggttaccccaccctgcccactcccatcccttcaaccccacttcctactgtaatagatcagcatc

SEQ ID NO: 18279 - DNA, 120 bp, Artificial Sequence
  ENSG00000018625_29 (sequence is synthesized)
caaaagcaggaacccatctaaaccagaaggaagccctctcagatcaccccagcctcactccatttcccacttccacccccgttagcttcctgcaggactctatccctggcttccccttca

SEQ ID NO: 18280 - DNA, 120 bp, Artificial Sequence
  ENSG00000018625_30 (sequence is synthesized)
gaccttgcaatcacaaaaggttcttctggtgagtgcaagagcctgagactggaaaaggtggacttgtctcccagtcgaggctggtaagggaccttcagggagagctgggcagacaggtgg

SEQ ID NO: 18281 - DNA, 120 bp, Artificial Sequence
  ENSG00000018625_31 (sequence is synthesized)
gagatggaggtagggctggctggaggaaggaaacaacaaaggaagtgaggtagtgccaatgacaggacatttgacatgagtctccagatagatgtcgtggactccagctctacgtcccac

SEQ ID NO: 18282 - DNA, 120 bp, Artificial Sequence
  ENSG00000018625_32 (sequence is synthesized)
attttagaataccccaccagcagaacaaactcagatctcatcagggtagcagcagaggcaggaccagaaggcaatcaagagcttccagaaatgccacacttgtgtgccacagagttcccc

SEQ ID NO: 18283 - DNA, 120 bp, Artificial Sequence
  ENSG00000018625_33 (sequence is synthesized)
gctgacccttggttaggggtcctcttagtccacaaggtccggatgtcactcatgtacttaataacacttcaccttctgtaatactaagtcctcagagctccatgctgttctgaaagggat

SEQ ID NO: 18284 - DNA, 120 bp, Artificial Sequence
  ENSG00000018625_34 (sequence is synthesized)
ggccacaagttctttcccagcctcttccattccctttcttttcatgcccatcccgatgaacctgcatcattccccgacactgccaagccaaccctggaaaaggagttcgctggccattgg

SEQ ID NO: 18285 - DNA, 120 bp, Artificial Sequence
  ENSG00000018625_35 (sequence is synthesized)
ctagaatcagggtggagaagttccctgaaccttcctgtctcccagggacatgtatgcttccagggacaagcttaggtcatgaacatggtcagaacctttggacaagaggaaaaatactaa

SEQ ID NO: 18286 - DNA, 120 bp, Artificial Sequence
  ENSG00000018625_36 (sequence is synthesized)
gagactccatctcaaaaaaaaaaaaaatgatttgcttttgacgtcttaggtggcagggctgttccctccaggcaaatgcccttcaaaccgacgatcattgtgcccacttaccctgggctg

SEQ ID NO: 18287 - DNA, 120 bp, Artificial Sequence
  ENSG00000018625_37 (sequence is synthesized)
cttcaaaccgacgatcattgtgcccacttaccctgggctggagagttggtttcaggttcctacaggagatagctttctttcccttactccctatctaacacttttgctctgcaggcagcc

SEQ ID NO: 18288 - DNA, 120 bp, Artificial Sequence
  ENSG00000018625_38 (sequence is synthesized)
ttgcccattctctaagcctggcttagaaggcactgggaatgtcctgtagagagagacctagataggtcatgcaagtgagaaagacatctgaggaaaatggaagacctaaggcagacagga

SEQ ID NO: 18289 - DNA, 120 bp, Artificial Sequence
  ENSG00000018625_39 (sequence is synthesized)
aggaagcacaaaagacaagcattgggtcagacccataaaccacctcccaaaggctgtcatttcattgcactggaattttgctttatcagaagcaaggaagtaagggagtcattgccttgg

SEQ ID NO: 18290 - DNA, 120 bp, Artificial Sequence
  ENSG00000018625_40 (sequence is synthesized)
gcctgggaatctaagtgggagacaatattaatttggatccgattaattggagattactaactgtggacaaaagtttatctttgcacaatcaataaaaatggcatttttttagtaaattaa

SEQ ID NO: 18291 - DNA, 120 bp, Artificial Sequence
  ENSG00000018625_41 (sequence is synthesized)
gagcataaacaatattgctagaggtggcatgtttagtctaccaaaaacaatacttttcaggcactttagaaatatccttttagaagcagcgagtgcatgggctaattatcatcaatcttt

SEQ ID NO: 18292 - DNA, 120 bp, Artificial Sequence
  ENSG00000018625_42 (sequence is synthesized)
atgtatttgttaaagaaacatctacaggatctttattggtgaccttttgtaagacattagtttgaggtactacctatgtacttgaaaataataaagtggcatttctttatgaaaaaaaaa

SEQ ID NO: 18293 - DNA, 120 bp, Artificial Sequence
  ENSG00000018625_43 (sequence is synthesized)
gaggggccccatgctgggagagctgtccctgcagcccattgcactcagagaaactccgtgtcccccatgctgctcaactcacccctgtgccctgcagtaccctcatatgcatcttagata

SEQ ID NO: 18294 - DNA, 120 bp, Artificial Sequence
  ENSG00000018625_44 (sequence is synthesized)
cctcctccccaaagtaactcaccctcccttccccaggatgaccacaagctgtccttggatgagctgggccgcaaataccaagtggacctgtccaaggtgagtggaggggcttctagggaa

SEQ ID NO: 18295 - DNA, 120 bp, Artificial Sequence
  ENSG00000018625_45 (sequence is synthesized)
atagtcaggatgaagggctctggtagtacttacctggcaaaagctctgccattggtggggcaattgaggggtcagggggccctgaatattatggaaacaccctccacagagcagggtatt

SEQ ID NO: 18296 - DNA, 120 bp, Artificial Sequence
  ENSG00000018625_46 (sequence is synthesized)
gactgagggcagcctgactccatgggaaatgtatctcccttccccagggagatctctgttctgtccaccccaagactgagtggatttcaaagctttcaggtattgggttaagaacccctt

SEQ ID NO: 18297 - DNA, 120 bp, Artificial Sequence
  ENSG00000018625_47 (sequence is synthesized)
ccaacccacacaggccaagcttccaactcagccctggaccagagctgtaaggagggcatcagattttaatcttccatctgtatatccatagataggtttcatatagaagagagaagccat

SEQ ID NO: 18298 - DNA, 120 bp, Artificial Sequence
  ENSG00000018625_48 (sequence is synthesized)
gctcatcctgcggcggtatcctggtgaatggacagctgctcccttagactctcgttcgtcacctgaagaggccctgtgggcgtttgcattttcaccctcgacctattctgccccagcctc

SEQ ID NO: 18299 - DNA, 120 bp, Artificial Sequence
  ENSG00000018699_0 (sequence is synthesized)
cttctcctaggcggaagccagaccagagagcgtgcgtgtttttcccagggtgccccgcgctgctgttatggccgcctccttgaggtagtatccgcacatggaattctagggccgcaggtg

SEQ ID NO: 18300 - DNA, 120 bp, Artificial Sequence
  ENSG00000018699_1 (sequence is synthesized)
tatttacggtaactgtcgccactagatttcagcgcctttggactctcctgttttcactttcttttgttgactcccgtgtggccctcgtgggagcctgttttggctgcagcggtgtctggg

SEQ ID NO: 18301 - DNA, 120 bp, Artificial Sequence
  ENSG00000018699_2 (sequence is synthesized)
gtgatgtggaccccggagctggcaattctgaggggattccccactgaggctgagcggcagcaatggaaacaggagggggtcgtcggttcagagagtggatctttcctacaattgctactg

SEQ ID NO: 18302 - DNA, 120 bp, Artificial Sequence
  ENSG00000018699_3 (sequence is synthesized)
gaagggaactatgaagccatattcttaaattcaatgactcaaaatatttttaattcaacaacaaccgctgaagaaaagattgatagctacctggagaagcaggtagtaacattcctggat

SEQ ID NO: 18303 - DNA, 120 bp, Artificial Sequence
  ENSG00000018699_4 (sequence is synthesized)
tactcaacagatttggacacaacggaaagacaacagttgatatttctacttggtgtgagcagtttgcaactttttgttcagagcaactggacggggccccctgttgacttacaccctcag

SEQ ID NO: 18304 - DNA, 120 bp, Artificial Sequence
  ENSG00000018699_5 (sequence is synthesized)
gactttttgtcatctgttttgttccagcaattcagtgaggttaaaggactggatgcatttgttctgagcctgctcactctagatggtgaatcaatctacagcctgacctcgaagcctata

SEQ ID NO: 18305 - DNA, 120 bp, Artificial Sequence
  ENSG00000018699_6 (sequence is synthesized)
ctactgttattagcacgcattatcctagtgaatgtaagacataaactgacagctattcagagcttgccatggtggactttgagatgtgtgaatattcatcagcatttgcttgaggaacgc

SEQ ID NO: 18306 - DNA, 120 bp, Artificial Sequence
  ENSG00000018699_7 (sequence is synthesized)
tcacctctgctttttactcttgccgaaaactgtattgatcaagtgatgaaactacagaatctgtttgtagatgattcaggtcgatatttggctattcaattccatctggaatgtgcatat

SEQ ID NO: 18307 - DNA, 120 bp, Artificial Sequence
  ENSG00000018699_8 (sequence is synthesized)
gtgtttttatattattatgagtacagaaaagcaaaagatcagttggatattgctaaggacatcagccaattacaaattgatttgacaggtgctttgggaaaaagaacacggttccaggaa

SEQ ID NO: 18308 - DNA, 120 bp, Artificial Sequence
  ENSG00000018699_9 (sequence is synthesized)
aattatgtggcacaactgattctagatgtaagaagggaaggggatgtcctttcaaattgtgaattcactccagcacccactcctcaggaacatttaaccaagaatcttgagctcaatgat

SEQ ID NO: 18309 - DNA, 120 bp, Artificial Sequence
  ENSG00000018699_10 (sequence is synthesized)
gacaccattctgaatgacataaagttagcagattgtgaacagttccagatgccggatctgtgtgctgaagagatcgctattattcttggaatctgcactaattttcaaaagaataaccca

SEQ ID NO: 18310 - DNA, 120 bp, Artificial Sequence
  ENSG00000018699_11 (sequence is synthesized)
gtgcacacattaactgaagtggagcttctggcatttacatcatgtttgctttcacaaccaaagttctgggccattcagacatcagccttgatcctccggacaaaacttgagaaaggaagt

SEQ ID NO: 18311 - DNA, 120 bp, Artificial Sequence
  ENSG00000018699_12 (sequence is synthesized)
agtggaacgggcaatgaggcagacacaggctcttgcagaccaatttgaagataaaactacatctgtattggaacgcctgaagattttctattgctgtcaagtaccacctcactgggccat

SEQ ID NO: 18312 - DNA, 120 bp, Artificial Sequence
  ENSG00000018699_13 (sequence is synthesized)
tcagcgccaacttgcaagtttgctctttgagttgggatgtaccagttcagcccttcagatatttgaaaagctagaaatgtgggaagatgttgtcatttgttatgaaagagccgggcagca

SEQ ID NO: 18313 - DNA, 120 bp, Artificial Sequence
  ENSG00000018699_14 (sequence is synthesized)
cggaaaggcagaagaaatccttagacaagagctggagaaaaaagaaacgcctagtttatactgcttgcttggagatgtcctcggagaccattcttgctatgacaaggcctgggagttgtc

SEQ ID NO: 18314 - DNA, 120 bp, Artificial Sequence
  ENSG00000018699_15 (sequence is synthesized)
ccggtaccgcagtgctcgtgctcagcgctccaaagccctccttcatcttcggaacaaggagtttcaagagtgtgtagagtgcttcgaacgctcggttaagattaatcccatgcagctcgg

SEQ ID NO: 18315 - DNA, 120 bp, Artificial Sequence
  ENSG00000018699_16 (sequence is synthesized)
ggtgtggttttctctcggttgtgcctatttggccttggaagactatcaaggttcagcaaaggcatttcagcgctgtgtgactctagaacccgataatgctgaagcttggaacaatttgtc

SEQ ID NO: 18316 - DNA, 120 bp, Artificial Sequence
  ENSG00000018699_17 (sequence is synthesized)
aacttcctatatccgattaaaacaaaaagtaaaagcttttagaactttacaagaagctctcaagtgtaactatgaacactggcagatttgggaaaactacatcctcaccagcactgacgt

SEQ ID NO: 18317 - DNA, 120 bp, Artificial Sequence
  ENSG00000018699_18 (sequence is synthesized)
tggggaattttcagaagccattaaagcttatcaccggctcttggacttacgtgacaaatacaaagatgttcaggtccttaaaattctagtcagggcagtgattgatgggatgactgatcg

SEQ ID NO: 18318 - DNA, 120 bp, Artificial Sequence
  ENSG00000018699_19 (sequence is synthesized)
aagtggagatgttgcaactggcctcaaaggaaagctgcaggagttatttggcagagtgacttcaagagtgacaaatgatggagaaatctggaggctgtatgcccacgtatatggaaatgg

SEQ ID NO: 18319 - DNA, 120 bp, Artificial Sequence
  ENSG00000018699_20 (sequence is synthesized)
gcagagtgaaaagcctgatgaaaatgaaaaggcattccagtgcctctcaaaggcatacaagtgtgacacccagtccaattgttgggagaaagatattacatcatttaaggaagttgttca

SEQ ID NO: 18320 - DNA, 120 bp, Artificial Sequence
  ENSG00000018699_21 (sequence is synthesized)
aagagccttaggacttgcacatgtggccataaaatgcagtaaaaacaaatccagttcccaagaagctgtacaaatgctttcttctgttcgactcaatttacggggcttgttatctaaagc

SEQ ID NO: 18321 - DNA, 120 bp, Artificial Sequence
  ENSG00000018699_22 (sequence is synthesized)
aaagcaactttttacagatgtggcaactggagaaatgtccagggaattagctgatgacataacagctatggacaccttagtgacagagctccaagacctaagcaaccagtttcgaaatca

SEQ ID NO: 18322 - DNA, 120 bp, Artificial Sequence
  ENSG00000018699_23 (sequence is synthesized)
gtattgattctgctggaagcagattctggaaaaggtgctttcacctgctggtaaaagatacatctgtatatctgaaatgcaagatattgatttttaaaataaatttgttttatgacttaa

SEQ ID NO: 18323 - DNA, 120 bp, Artificial Sequence
  ENSG00000018699_24 (sequence is synthesized)
ttatcctgtcactggggatgttatttgatcattcagtaagcttgtgtttgtgagatttctccccaagtaaagttactctactcttttcccattgtaattaataaacattttcaggaagtg

SEQ ID NO: 18324 - DNA, 120 bp, Artificial Sequence
  ENSG00000018699_25 (sequence is synthesized)
cttactcaagctcgggttcttctcctaggcggaagccagaccagagagcgtgcgtgtttttcccagggtgccccgcgctgctgttatggccgcctccttgagagagtggatctttcctac

SEQ ID NO: 18325 - DNA, 120 bp, Artificial Sequence
  ENSG00000018699_26 (sequence is synthesized)
ctcggggtgtggttttctctcggttgtgcctatttggccttggaagactatcaaggttcagcaaaggcatttcagcgctgtgtgactctagaacccgatgtctgtgcatattccactgtc

SEQ ID NO: 18326 - DNA, 120 bp, Artificial Sequence
  ENSG00000018699_27 (sequence is synthesized)
tcttgctgttcactggcctcctgcttgagttggatttttacctgacgaccaaatgctggaacttgccccacctctcttatacctcattctacctgagagtctcgctctgttgcccaggct

SEQ ID NO: 18327 - DNA, 120 bp, Artificial Sequence
  ENSG00000018869_0 (sequence is synthesized)
caccggtaccgtggtggaagcgcgccctgggctgccgggggcgcggccgcggtggcacttggacccgaggaggcggcagctctaccgtcgcaggactctgcccttccccaagagaggaac

SEQ ID NO: 18328 - DNA, 120 bp, Artificial Sequence
  ENSG00000018869_1 (sequence is synthesized)
cagaaggaggacctatcagcccttgaaattctaaaagtcatgtcccttgggtcagaattgttcagggatgtggccatagtcttctcccaagaagaatggcagtggttggcacctgctcag

SEQ ID NO: 18329 - DNA, 120 bp, Artificial Sequence
  ENSG00000018869_2 (sequence is synthesized)
agggatttgtacagagacgtgatgttggagacctacagcaacctggtctcactgggtcttgccgtttccaaacctgatgtgatctccttcctagagcaaggcaaagagccctggatggtg

SEQ ID NO: 18330 - DNA, 120 bp, Artificial Sequence
  ENSG00000018869_3 (sequence is synthesized)
gagagagtggtgtctggaggcctgtgtccagtattggagtccagatatgataccaaggaattatttccaaagcagcatgtttatgaagtcgaatcaccccaatgggagataatggaaagc

SEQ ID NO: 18331 - DNA, 120 bp, Artificial Sequence
  ENSG00000018869_4 (sequence is synthesized)
cttacaagttatggtcttgagtgttcaagtttccaagatgattgggaatgcagaaaccagtttgacagacaacagggaaatccagacagacatttccatcagatgatcatcagacatgaa

SEQ ID NO: 18332 - DNA, 120 bp, Artificial Sequence
  ENSG00000018869_5 (sequence is synthesized)
gaaatgcccacttttgaccagcatgcatcccttactttttatcagaaaattcatactagagaaaaaccttttgggtataataaatgtagaaaagacttctggcaaaaggaactccttatt

SEQ ID NO: 18333 - DNA, 120 bp, Artificial Sequence
  ENSG00000018869_6 (sequence is synthesized)
aatcatcaaggaatttatactaatgagaaaccctataaatgtaaggaatgtgggaaggcctttaaatatggctcacgactaattcaacatgagaatattcattctggtaagaaaccatat

SEQ ID NO: 18334 - DNA, 120 bp, Artificial Sequence
  ENSG00000018869_7 (sequence is synthesized)
gaatgtaaggaatgtggaaaggccttcaattctggttcaaattttatacaacatcagagagttcatactggtgagaaaccgtatgaatgtaaagattgtgagaaggcctttagtcgaagc

SEQ ID NO: 18335 - DNA, 120 bp, Artificial Sequence
  ENSG00000018869_8 (sequence is synthesized)
tcacagttgattgaacatcagcgaactcacacaggcgagaaaccctatcagtgtaaggaatgtggcaaggccttcaatcggatctcacatcttaaagtacattatagaattcatactggt

SEQ ID NO: 18336 - DNA, 120 bp, Artificial Sequence
  ENSG00000018869_9 (sequence is synthesized)
gaaaaaccctatgcatgcaaggaatgtgggaaaacctttagtcatcgttctcagttgattcaacatcagactgttcatactggcaggaaactctatgaatgtaaggaatgtgggaaggct

SEQ ID NO: 18337 - DNA, 120 bp, Artificial Sequence
  ENSG00000018869_10 (sequence is synthesized)
tttaatcaaggctcaactcttatacgacatcagagaattcataccggtgagaaaccctatgagtgcaaagtatgtggaaaggcctttagagtgagctcacaactcaagcaacatcagaga

SEQ ID NO: 18338 - DNA, 120 bp, Artificial Sequence
  ENSG00000018869_11 (sequence is synthesized)
atcttactgtacattacagaattcatacaggtgaaaagccatatgaatgtaaggaatgtgggaaggcttttagtcattgctcacaattgattcatcatcaggttattcacactgagaaaa

SEQ ID NO: 18339 - DNA, 120 bp, Artificial Sequence
  ENSG00000018869_12 (sequence is synthesized)
agccctatgaatataaggaatgtgagaagaccttgagtcatgattcaactaccgttcaacctcagagaatgcataatagagaaacacatgtgaatataataaatgtagaaaagccttcca

SEQ ID NO: 18340 - DNA, 120 bp, Artificial Sequence
  ENSG00000018869_13 (sequence is synthesized)
tcagcagttaccccttactaatcatcagagaatttatgttggcaagcaaccatatgaatggaagtaatggggaaagcccattagcctaggctaattgtgactgtgacttacttctccctc

SEQ ID NO: 18341 - DNA, 120 bp, Artificial Sequence
  ENSG00000018869_14 (sequence is synthesized)
ttggagaaagacttgaagaatgtaatgccagtgacaatgccttcattcagaggtaagcctttatcctaagtctgaaaattcatatcaaagaaaattttatggatgtaaattgttcagatc

SEQ ID NO: 18342 - DNA, 120 bp, Artificial Sequence
  ENSG00000018869_15 (sequence is synthesized)
ataattgtcaaaaatgctgggaaaggttgggagaaattttatttctaacacattccagaaccacattttctaaccacagtgtagtaattttatcaagagcaaaagttatagttttcttac

SEQ ID NO: 18343 - DNA, 120 bp, Artificial Sequence
  ENSG00000018869_16 (sequence is synthesized)
aagttaaaaaaacagccagattatcatttgcttaacaaagaaatcatgcaattaccataaatggtaatgaaaagaatgaattgagagtttaacatgccaagagatgtgaaatgtggccaa

SEQ ID NO: 18344 - DNA, 120 bp, Artificial Sequence
  ENSG00000018869_17 (sequence is synthesized)
agagatgtgagggtaaggggaaagccaaagctacactggaggaatttttatagcctttgaatgcatgcatatacatgaaaatctgaaagataaactcatatgcactaaacatgctattca

SEQ ID NO: 18345 - DNA, 120 bp, Artificial Sequence
  ENSG00000018869_18 (sequence is synthesized)
agtctaccaaacatccaggcagtgaaagaagaaagtaacagaaaatgatgaaataaagagaccatcttacaataatctcagtttttgtttctttctgatccagaaataatctaaatttag

SEQ ID NO: 18346 - DNA, 120 bp, Artificial Sequence
  ENSG00000018869_19 (sequence is synthesized)
gagaatatttcttaatttccacattgttacattgttttatgtgactggcacagacaaccattggttgtcatcccagcagccatacccaattccccttgttattggcagcatctgtgtctt

SEQ ID NO: 18347 - DNA, 120 bp, Artificial Sequence
  ENSG00000018869_20 (sequence is synthesized)
gccttggactctgagaatatcagatgctaattttccagtctcctgtgcagcacagtatggccagtatctcccagtgttgctcagtggaatctgccggggcttctgggaaagattttcctc

SEQ ID NO: 18348 - DNA, 120 bp, Artificial Sequence
  ENSG00000018869_21 (sequence is synthesized)
attcagaagagacaggtttatcatgaagacttcctcctctctcacttcctgcttttaaacatttttatataagaacatgatgcctgaagctgctgcagctgtcttggaaccaagaagaga

SEQ ID NO: 18349 - DNA, 120 bp, Artificial Sequence
  ENSG00000018869_22 (sequence is synthesized)
aaaaagtggacctcagagaagctgacccagagcctgagaagactcagctactaggccaattctggaactgcctttttgatgccttgttatctgagaaaaataaaacttgattgctcagtt

SEQ ID NO: 18350 - DNA, 120 bp, Artificial Sequence
  ENSG00000018869_23 (sequence is synthesized)
atcttccggctgcgcacggcgaatccaccggtaccgtggtggaagcgcgccctgggctgccgggggcgcggccgcggtggcacttggacccgaggaggcggcaggtgagaggttccggag

SEQ ID NO: 18351 - DNA, 120 bp, Artificial Sequence
  ENSG00000018869_24 (sequence is synthesized)
ctttccaggcgctctggggtccagcaggagctggtgcccgggccggttgggtctcaggcctgagaagaacgcagacgtctcgcctcatcgtcgctctgtggctttaccggcgtgagacta

SEQ ID NO: 18352 - DNA, 120 bp, Artificial Sequence
  ENSG00000018869_25 (sequence is synthesized)
catttcccgccggccctcgcggcgtgcgctttctggcgccccctttctgcttccagcctcatagcccaggtgcatggaccccttagctctaccgtcgcaggactctgcccttccccaaga

SEQ ID NO: 18353 - DNA, 120 bp, Artificial Sequence
  ENSG00000018869_26 (sequence is synthesized)
cttgctgtaaaagaacagaacagaaccccggtcaattatggaaaatgactgagtctggcctgtttttcatgcactaaacatgtgggaatcccactgttttttccagattatactgtgtat

SEQ ID NO: 18354 - DNA, 120 bp, Artificial Sequence
  ENSG00000018869_27 (sequence is synthesized)
gtagacagtggagagggctaacctcattaagggtgcaagaggggctggttttacagggggcctctactacgaaggcctaatggttttgaaaatgaactcaaataaaagattattaccaaa

SEQ ID NO: 18355 - DNA, 120 bp, Artificial Sequence
  ENSG00000019102_0 (sequence is synthesized)
agtctcgctcctgcccagcccgggcggctgcccttgggtgctcccttccctgcccgacacccagaccgaccttgaccgcccacctggcaggagcaggacaggacggccggacgcggccat

SEQ ID NO: 18356 - DNA, 120 bp, Artificial Sequence
  ENSG00000019102_1 (sequence is synthesized)
ggccgagctcccggggccctttctctgcggggccctgctaggcttcctgtgcctgagtgggctggccgtggaggtgaaggtacccacagagccgctgagcacgcccctggggaagacagc

SEQ ID NO: 18357 - DNA, 120 bp, Artificial Sequence
  ENSG00000019102_2 (sequence is synthesized)
cgagctgacctgcacctacagcacgtcggtgggagacagcttcgccctggagtggagctttgtgcagcctgggaaacccatctctgagtcccatccaatcctgtacttcaccaatggcca

SEQ ID NO: 18358 - DNA, 120 bp, Artificial Sequence
  ENSG00000019102_3 (sequence is synthesized)
tctgtatccaactggttctaagtcaaagcgggtcagcctgcttcagaacccccccacagtgggggtggccacactgaaactgactgacgtccacccctcagatactggaacctacctctg

SEQ ID NO: 18359 - DNA, 120 bp, Artificial Sequence
  ENSG00000019102_4 (sequence is synthesized)
tatgcagtcagagtggacaaacctctgtgggaggctctactgcactgagatgcagctcttccgagggggctcctaagccagtgtacaactgggtgcgtcttggaacttttcctacacctt

SEQ ID NO: 18360 - DNA, 120 bp, Artificial Sequence
  ENSG00000019102_5 (sequence is synthesized)
ctcctggcagcatggttcaagatgaggtgtctggccagctcattctcaccaacctctccctgacctcctcgggcacctaccgctgtgtggccaccaaccagatgggcagtgcatcctgtg

SEQ ID NO: 18361 - DNA, 120 bp, Artificial Sequence
  ENSG00000019102_6 (sequence is synthesized)
agctgaccctctctgtgaccgaaccctcccaaggccgagtggccggagctctgattggggtgctcctgggcgtgctgttgctgtcagttgctgcgttctgcctggtcaggttccagaaag

SEQ ID NO: 18362 - DNA, 120 bp, Artificial Sequence
  ENSG00000019102_7 (sequence is synthesized)
agagggggaagaagcccaaggagacatatgggggtagtgaccttcgggaggatgccatcgctcctgggatctctgagcacacttgtatgagggctgattctagcaaggggttcctggaaa

SEQ ID NO: 18363 - DNA, 120 bp, Artificial Sequence
  ENSG00000019102_8 (sequence is synthesized)
gaccctcgtctgccagcaccgtgacgaccaccaagtccaagctccctatggtcgtgtgacttctcccgatccctgagggcggtgagggggaatatcaataattaaagtctgtgggtacca

SEQ ID NO: 18364 - DNA, 120 bp, Artificial Sequence
  ENSG00000019102_9 (sequence is synthesized)
cttgagttaaaagcgggtgcctgcaaccctcaaactccgacatcattcagtgtgtttaggggcaggaggtgttgttcagccgtggaatttgctggtggcagcagtgtaacctgtgtattt

SEQ ID NO: 18365 - DNA, 120 bp, Artificial Sequence
  ENSG00000019102_10 (sequence is synthesized)
gagggtacaggcaagcggtacagggtggagtggctggtccacaagctgtggcagggaagctgtttgcaggactgccctgcccctcctcatatttaataaagtttacttttctgttccgaa

SEQ ID NO: 18366 - DNA, 120 bp, Artificial Sequence
  ENSG00000019144_0 (sequence is synthesized)
actaaactcattgaattagaacagcacttgtccatctcaaagaggataaattattttttgctatccaccccagctggaatttagaccagacttacaggctttctgctccttccttcagtg

SEQ ID NO: 18367 - DNA, 120 bp, Artificial Sequence
  ENSG00000019144_1 (sequence is synthesized)
aagaagagtctccagggtccctctagtgcaggtcaaagaagtccagtccagctgagttcagctccctagggcctccccagccagtctcctggaccaagagctggctttgcaagaaaacat

SEQ ID NO: 18368 - DNA, 120 bp, Artificial Sequence
  ENSG00000019144_2 (sequence is synthesized)
cctactaaagccctgggaaaagagacaaatggtgaagaggagaatgaaaggttgcaggagggagctcctgttttagccctgccacctacctgggggccctctggctaccagtgtccttgg

SEQ ID NO: 18369 - DNA, 120 bp, Artificial Sequence
  ENSG00000019144_3 (sequence is synthesized)
aggggcttccttgctgcttctcccactaaggagctctggagccttaggaccatggacgctctcaataggaaccaaataggccctggatgccagacccagaccatggtgcagaaaggaccc

SEQ ID NO: 18370 - DNA, 120 bp, Artificial Sequence
  ENSG00000019144_4 (sequence is synthesized)
ttggacctgatcgagacaggcaaagggctgaaagtgcaaacggacaaaccccacctggtgagcctgggcagtgggcgactcagcacagccatcaccctcctgccgctggaggaagggagg

SEQ ID NO: 18371 - DNA, 120 bp, Artificial Sequence
  ENSG00000019144_5 (sequence is synthesized)
acggtgattggctctgcagccagagacatctcactacagggcccaggcctggctccagagcactgctacatcgagaacctgcggggcaccctcaccctctacccctgtggcaatgcctgc

SEQ ID NO: 18372 - DNA, 120 bp, Artificial Sequence
  ENSG00000019144_6 (sequence is synthesized)
actattgatgggctccctgtccggcagcctacccggctcactcagggctgcatgttgtgcctgggtcagtccaccttccttcgctttaaccacccggctgaagccaagtggatgaaaagc

SEQ ID NO: 18373 - DNA, 120 bp, Artificial Sequence
  ENSG00000019144_7 (sequence is synthesized)
atgattccagcagggggccgagcccctgggcccccctacagccctgttcctgcagaatcagaaagtctggtaaatgggaaccacaccccacagactgcaacacggggaccctctgcctgt

SEQ ID NO: 18374 - DNA, 120 bp, Artificial Sequence
  ENSG00000019144_8 (sequence is synthesized)
gccagccacagttccctggtgagctctattgagaaggacctgcaagagatcatggactcactggtgctagaggagcctggagctgctggcaagaagcctgccgcaacctctccactgtca

SEQ ID NO: 18375 - DNA, 120 bp, Artificial Sequence
  ENSG00000019144_9 (sequence is synthesized)
ccgatggctaatggtgggcgctacctgctgtctcccccaaccagccccggcgccatgtctgtgggctccagctatgagaacacctctccagccttctctccactctcttcaccagccagc

SEQ ID NO: 18376 - DNA, 120 bp, Artificial Sequence
  ENSG00000019144_10 (sequence is synthesized)
agtggaagctgtgccagtcactcacccagtgggcaagagccaggaccttctgtgcccccgctggtacctgcccgttcctccagctaccatctggccctacagcccccacagtcccgccca

SEQ ID NO: 18377 - DNA, 120 bp, Artificial Sequence
  ENSG00000019144_11 (sequence is synthesized)
agtggtgctcgctccgagagtcctcggctgagcaggaaagggggccatgagaggcctcccagccctggcctccggggtctgctgacagacagccctgcagctactgtcttggcggaggcc

SEQ ID NO: 18378 - DNA, 120 bp, Artificial Sequence
  ENSG00000019144_12 (sequence is synthesized)
cggagagccactgagagcccccggctgggtgggcagctgcctgtggtggccatcagcctgagtgaatacccagcttctggtgctctcagtcaacccaccagcattcctggcagccccaag

SEQ ID NO: 18379 - DNA, 120 bp, Artificial Sequence
  ENSG00000019144_13 (sequence is synthesized)
tttcagcctccagtccctgctccccgaaacaagattggcacactccaggaccgccctcccagccctttccgtgagcctccaggcagtgagcgggtgctaacaaccagcccctcacgccaa

SEQ ID NO: 18380 - DNA, 120 bp, Artificial Sequence
  ENSG00000019144_14 (sequence is synthesized)
ctggtgggccgaacattttcagatgggttagccacccgtaccctgcagcctcctgagagtccccgcctgggccggcggggcctggacagtatgcgagaactaccccccttaagtccatct

SEQ ID NO: 18381 - DNA, 120 bp, Artificial Sequence
  ENSG00000019144_15 (sequence is synthesized)
ctgtcccggcgagctctctccccgctgcccacccggaccaccccagatcccaagctaaacagggaagtggcagagagtcctcggccccggcgctgggcagcccatggggcttcaccagag

SEQ ID NO: 18382 - DNA, 120 bp, Artificial Sequence
  ENSG00000019144_16 (sequence is synthesized)
gacttctccctgacgctgggggcacggggccgtaggacacggagcccctcacccacactgggtgagtctctggcaccccacaagggcagcttcagtggcaggctgagcccagcctacagt

SEQ ID NO: 18383 - DNA, 120 bp, Artificial Sequence
  ENSG00000019144_17 (sequence is synthesized)
ctgggctctcttactggggcttcaccctgccagagtccctgtgtccagaggaagctctccagcggggacttgcgggtgcctgtcacaagggagcggaaaaatagcatcacagagatcagt

SEQ ID NO: 18384 - DNA, 120 bp, Artificial Sequence
  ENSG00000019144_18 (sequence is synthesized)
gacaatgaggacgacctcctggagtaccaccggcgacagcgccaagagcggctccgggagcaggagatggagaggctggaacgccagcgcctggagaccatcctgaacctgtgtgccgaa

SEQ ID NO: 18385 - DNA, 120 bp, Artificial Sequence
  ENSG00000019144_19 (sequence is synthesized)
tacagccgggctgatgggggacctgaggctggggagcttcccagcattggggaggccaccgcagcattggcactggcaggccggaggccctcacgaggccttgcaggggcctctgggcgg

SEQ ID NO: 18386 - DNA, 120 bp, Artificial Sequence
  ENSG00000019144_20 (sequence is synthesized)
agcagcgaggagcctggcgttgccacccaacgcctatgggagagtatggagcgctcagatgaggaaaatctcaaggaggagtgcagcagcactgagagcacccagcaggagcacgaagat

SEQ ID NO: 18387 - DNA, 120 bp, Artificial Sequence
  ENSG00000019144_21 (sequence is synthesized)
gcacctagcaccaagctccagggagaggtgctagccctggaagaagagcgggctcaggtgctggggcacgtggagcagctcaaggtccgtgtgaaggagctagagcagcagctgcaggag

SEQ ID NO: 18388 - DNA, 120 bp, Artificial Sequence
  ENSG00000019144_22 (sequence is synthesized)
tcagcccgagaggccgaaatggagcgggcactgctgcagggagagagggaggcagagcgggcactgctgcagaaggagcagaaggcagtggatcagctgcaggagaagctggtggccttg

SEQ ID NO: 18389 - DNA, 120 bp, Artificial Sequence
  ENSG00000019144_23 (sequence is synthesized)
ggagcgcgagctggccggccaggggctgctccggagcaaggctgagctgctccgcagcatcgccaagaggaaggagcgcctggccatcctggacagtcaggctgggcagatccgggctca

SEQ ID NO: 18390 - DNA, 120 bp, Artificial Sequence
  ENSG00000019144_24 (sequence is synthesized)
ggccgtgcaggaatcagaacgcctggcccgggacaagaatgcctccttacagctgctgcaaaaggagaaggagaagctgactgtgctggaaaggagataccactcactcacagggggcag

SEQ ID NO: 18391 - DNA, 120 bp, Artificial Sequence
  ENSG00000019144_25 (sequence is synthesized)
gcctttcccgaagaccacatcgaccctcaaagagatggagaagctgctgctccctgctgtagacttagagcagtggtaccaggagctgatggccgggctggggactggccccgctgcagc

SEQ ID NO: 18392 - DNA, 120 bp, Artificial Sequence
  ENSG00000019144_26 (sequence is synthesized)
ctcccctcactcttctcccccgcctctgcccgccaaagcttcccgtcagctgcaggtttaccgctccaagatggatggcgaggccaccagcccccttccccggacccgcagcggccccct

SEQ ID NO: 18393 - DNA, 120 bp, Artificial Sequence
  ENSG00000019144_27 (sequence is synthesized)
cccctcctcctctggctcttcctcctcctcctcccagctcagcgtggctaccctggggcgtagcccctccccaaagagcgctctactcacccagaatggcacgggcagccttcctcgcaa

SEQ ID NO: 18394 - DNA, 120 bp, Artificial Sequence
  ENSG00000019144_28 (sequence is synthesized)
cctggcagccacactgcaggacatcgagaccaagcgccaactagctctgcagcagaagggacaacaagtgattgaagagcagcggcggcgactggctgagctgaagcagaaagcggcagc

SEQ ID NO: 18395 - DNA, 120 bp, Artificial Sequence
  ENSG00000019144_29 (sequence is synthesized)
tgaggcacagtgccagtgggatgcccttcacggggcagcacccttcccagcgggcccctcgggcttcccccctctcatgcaccactctatcctacaccacctgcctgcggggcgggagcg

SEQ ID NO: 18396 - DNA, 120 bp, Artificial Sequence
  ENSG00000019144_30 (sequence is synthesized)
tggggaggagggtgagcacgcctatgatacgctgagtctggagagctctgacagcatggagaccagcatctccaccgggggcaactcggcctgctcccctgacaacatgtccagcgcgag

SEQ ID NO: 18397 - DNA, 120 bp, Artificial Sequence
  ENSG00000019144_31 (sequence is synthesized)
tggtctggacatggggaagatcgaggagatggagaagatgctgaaagaggctcatgcagagaagaaccggctcatggagtcgagggagcgggagatggagctgcggcggcaggccctgga

SEQ ID NO: 18398 - DNA, 120 bp, Artificial Sequence
  ENSG00000019144_32 (sequence is synthesized)
ggaggagcggcggaggcgtgagcaggtagaacggaggctgcagagtgagagtgcccggaggcagcagctggtcgagaaggaggtcaagatgcgggagaaacaattttcccaggcacgacc

SEQ ID NO: 18399 - DNA, 120 bp, Artificial Sequence
  ENSG00000019144_33 (sequence is synthesized)
cctgacccgctacctgccaatccggaaggaggactttgacctgaagacacatattgagtcatcgggccatggtgttgatacctgcctgcacgtggtgctcagcagcaaggtctgccgtgg

SEQ ID NO: 18400 - DNA, 120 bp, Artificial Sequence
  ENSG00000019144_34 (sequence is synthesized)
ctacttggtcaagatgggcggcaagattaaatcatggaagaagcgctggtttgtcttcgaccggctcaagcgcaccctttcctattatgtggacaagcatgagacgaagctgaagggagt

SEQ ID NO: 18401 - DNA, 120 bp, Artificial Sequence
  ENSG00000019144_35 (sequence is synthesized)
catctatttccaggccattgaggaagtgtactacgaccacctgcgcagtgcagccaagaagaggtttttccgcttcactatggtgactgagagcccgaacccagccctcaccttctgcgt

SEQ ID NO: 18402 - DNA, 120 bp, Artificial Sequence
  ENSG00000019144_36 (sequence is synthesized)
aaagacccatgaccggctgtactacatggtggccccatctgcagaggccatgcgtatctggatggatgtcattgtcacaggggctgagggctacactcagttcatgaactaactgccgtg

SEQ ID NO: 18403 - DNA, 120 bp, Artificial Sequence
  ENSG00000019144_37 (sequence is synthesized)
ggcctcctggcagagcacaactggggcttttgtataagaagactttaatattctgtaaggagcttggtcctgtgagtttctgggctctggcctcctgaagaaccagccagaagaagaaaa

SEQ ID NO: 18404 - DNA, 120 bp, Artificial Sequence
  ENSG00000019144_38 (sequence is synthesized)
gtagaggtggctttgctgcctcctgggagcccagaacttgcagtaaccctttagggtcctgccccaggcccagccagggctgaggagctgtcacagagagggcctcagctctgacctgac

SEQ ID NO: 18405 - DNA, 120 bp, Artificial Sequence
  ENSG00000019144_39 (sequence is synthesized)
acctgctctccccagcctgttttctcttttctaaaagacaaattatggtaccataagctgccaaagatcccctcctgcctcagacccctttgccaggggctttgggggctgagcagagcc

SEQ ID NO: 18406 - DNA, 120 bp, Artificial Sequence
  ENSG00000019144_40 (sequence is synthesized)
acatccagagtggggtaatagctcaggcggcccgcttcccatttctcaaaccccgctctgccccattgttctcctttcccttatactttttattaccttgctcaagggccagagatctca

SEQ ID NO: 18407 - DNA, 120 bp, Artificial Sequence
  ENSG00000019144_41 (sequence is synthesized)
agtgtcaaccttgaggtcccagctccatcccctagttgcagactcatcaccatggttaccatagtgactgcttcattgccatggttacatactaattgctgcagctctgtggcccagccc

SEQ ID NO: 18408 - DNA, 120 bp, Artificial Sequence
  ENSG00000019144_42 (sequence is synthesized)
actgcttcagctgtgggccatctgagggtacgtgccatcatctctccagcccaggcccctgggcatctcatgctggggggaagggactgaatacctttttccttccccctgcctgtgtct

SEQ ID NO: 18409 - DNA, 120 bp, Artificial Sequence
  ENSG00000019144_43 (sequence is synthesized)
tcagccctgatgcacaggctgccagccccccagtccagccctctcccttccactggtgccttgcttagagccagaagggatgaagccgggggatctatggaacagaggaggagcgatgca

SEQ ID NO: 18410 - DNA, 120 bp, Artificial Sequence
  ENSG00000019144_44 (sequence is synthesized)
gttgggagaggaagctagaagggttatggttggagttctgtacagtgttgagtttccgacagggaaagaggattcctccaatgctcctagagagaaagcctgagcaggagatgatgcagc

SEQ ID NO: 18411 - DNA, 120 bp, Artificial Sequence
  ENSG00000019144_45 (sequence is synthesized)
agaggggaagggccctgtggtgccgccgcccttccttcagcctccgaagggtgatggaaatggagagtggaggaccaggcctccagctgtctggcctcgcccttcacgccttaacactaa

SEQ ID NO: 18412 - DNA, 120 bp, Artificial Sequence
  ENSG00000019144_46 (sequence is synthesized)
gcccacctcccctgctctccttcccagcattgagcccttggttgcctgggcccaggctgggggttttcagtatttgtaagcatttcagcagaacaataaagcctttggactacggaagtg

SEQ ID NO: 18413 - DNA, 120 bp, Artificial Sequence
  ENSG00000019144_47 (sequence is synthesized)
caggcgtgagccaccgtgcctggcctacgtgcccttcttgaggagggatataggatatagattggaggagtctagtcttggggtgaattgacaacaatagtcttagaagtgcctatcatt

SEQ ID NO: 18414 - DNA, 120 bp, Artificial Sequence
  ENSG00000019144_48 (sequence is synthesized)
gttaactgttttaagtcacaggcaggaaggccctgccgattcccttcctttacagaaggagaaactgaggacaagtgacttggctaaggttgcatagcaggtcagtggcagagctagctg

SEQ ID NO: 18415 - DNA, 120 bp, Artificial Sequence
  ENSG00000019144_49 (sequence is synthesized)
gtaccagaaccacatctcctggcttcttctccagagccttgttagcctcactgtgctaggaggaggggggctagtgctctggcttttatgcatatgcagctccctaaagtcaaagacctt

SEQ ID NO: 18416 - DNA, 120 bp, Artificial Sequence
  ENSG00000019144_50 (sequence is synthesized)
agccacactgcaggacatcgagaccaagcgccaactagctctgcagcagaaggtcgagtcgcttcccgccgagcccctcccaaccgacgacccagcaggacaacaagtgattgaagagca

SEQ ID NO: 18417 - DNA, 120 bp, Artificial Sequence
  ENSG00000019144_51 (sequence is synthesized)
agcgagctcccggggaaaagcaacggtgtcctcctaagcctgaggccaccgcgaccgagccgagccaggctaagggaccagtgtctccctgccccccccccacctctaggagctctggag

SEQ ID NO: 18418 - DNA, 120 bp, Artificial Sequence
  ENSG00000019144_52 (sequence is synthesized)
taagggcttagggggctgtgacatctttcctagagagcctagccaataagggaactgcttgttgacctgagtcgggttagacattgccctctctggagggaggggatggatttgatgact

SEQ ID NO: 18419 - DNA, 120 bp, Artificial Sequence
  ENSG00000019144_53 (sequence is synthesized)
tctagaaatggttgcctgagatattggctctggggacccaggagtccttgttgcttgtgtgcaatttggttgttttgaaagcccatgtctgtgcctctctctcctcttaccccctctgtg

SEQ ID NO: 18420 - DNA, 120 bp, Artificial Sequence
  ENSG00000019144_54 (sequence is synthesized)
tctctaccgtaccctctgcctggggtcccccacgccagtcgagtcgcttcccgccgagcccctcccaaccgacgacccagcaggtagaacgttggtcatagagggcattgctttggccag

SEQ ID NO: 18421 - DNA, 120 bp, Artificial Sequence
  ENSG00000019144_55 (sequence is synthesized)
gcagcccctgccctggcatcagcatgatgtgtcctgcccaggtccccactgcctgcaggcagggtcccaggctgagctgggttggggtgtctgctggcctcacccctccagctggcctct

SEQ ID NO: 18422 - DNA, 120 bp, Artificial Sequence
  ENSG00000019144_56 (sequence is synthesized)
cttctgccctcatctgtgctctaccgtgtctcccctgccttctttcttgcgtttgttgcttttgcttctgcattgcaggggggtctgcattggcagtctgggtgctcatggggtttctgc

SEQ ID NO: 18423 - DNA, 120 bp, Artificial Sequence
  ENSG00000019144_57 (sequence is synthesized)
catctcttccttctcccttctccagcaggcagggtgggtgcatgtatcctgcctagacctacttaggccttggttgtgagctggagccaactggctgtcgtgctgccccagcactacttg

SEQ ID NO: 18424 - DNA, 120 bp, Artificial Sequence
  ENSG00000019144_58 (sequence is synthesized)
ggtaggtttggtgtcctatatggactcagggtgcgaaagagcactgaagccagactgtgcatctgtggccggttgtgcaggcgactgaagcattggcagagcagccaggcctggagctgc

SEQ ID NO: 18425 - DNA, 120 bp, Artificial Sequence
  ENSG00000019144_59 (sequence is synthesized)
gctctgtgttaacctctccctgcttgcccctccctctgtgtgttgtgctgccagtggcctgctccttagctgcgtggggagcccactgtgactcccatctgtctctccttcaggacaaca

SEQ ID NO: 18426 - DNA, 120 bp, Artificial Sequence
  ENSG00000019144_60 (sequence is synthesized)
gaaggcggcggccgagaggaccccagctcggcctggcgggcctctggccacagccatgcaccgcttgggccgaggccgaggccgacccccagggacacaggagctctggagccttaggac

SEQ ID NO: 18427 - DNA, 120 bp, Artificial Sequence
  ENSG00000019144_61 (sequence is synthesized)
ggaacagttacaggagcagctgagaagggtcagttccaccgccccccctcccccggccccgcgggccacgccccagaaggaagagaggagagcggtgggacgggaccacctggcctctgc

SEQ ID NO: 18428 - DNA, 120 bp, Artificial Sequence
  ENSG00000019144_62 (sequence is synthesized)
ttcatagctcttaggaacagagaaggcagcatagtaaccattctctaaccaataatttcctgtatggaaacttccagtttttgcatgtttacttctgtagactttttggcaactacagga

SEQ ID NO: 18429 - DNA, 120 bp, Artificial Sequence
  ENSG00000019144_63 (sequence is synthesized)
attttgattcctgtctacccgtatggcaggccattcctcttggggctgattaggaaaagcaggaactatgagtgaagtatagaccagaagaggaggcagatgtccaagtcagtgtagagg

SEQ ID NO: 18430 - DNA, 120 bp, Artificial Sequence
  ENSG00000019144_64 (sequence is synthesized)
tgttggcaggggaaccttgggagcagagagggctgacagctccttcacttgggcacggagctgggattcagcaaagagggacccatggtttatcctgggcataggcaggctgatgaaatg

SEQ ID NO: 18431 - DNA, 120 bp, Artificial Sequence
  ENSG00000019144_65 (sequence is synthesized)
tgtgcctaggaaggaggataaataaaggatctgcagaagctgttctgtgtccaccattggaggcactctgcatatttgagatgagagtgggacgcagagagtaaggtcagcagtttgagg

SEQ ID NO: 18432 - DNA, 120 bp, Artificial Sequence
  ENSG00000019144_66 (sequence is synthesized)
gatttaataaaaaacagatactgacagtctgaatggaggaccagccagaaaagaatgcctcctatcttatttatgtctgaatatggcaaatgtataagcatctcctggcaaatgtgggga

SEQ ID NO: 18433 - DNA, 120 bp, Artificial Sequence
  ENSG00000019144_67 (sequence is synthesized)
aaggagattctgctaagttttgagctgggaagaaatagtaaatgggagttaatggtataggaggtctttattagtaattaagacatataaagcatcactgacatgctctgtatttaatta

SEQ ID NO: 18434 - DNA, 120 bp, Artificial Sequence
  ENSG00000019144_68 (sequence is synthesized)
tttgttttaatgacttctaaaatccttttatagtggcttttataagttcagttctgaccttagtctctagtcacttttttcccataaagtttgaagttcaatagcaaatgtttctaattt

SEQ ID NO: 18435 - DNA, 120 bp, Artificial Sequence
  ENSG00000019144_69 (sequence is synthesized)
gaagtttcagaaggccttcagttagtgattgggaaaggactatatattagctgtcaaaaaaagttgtctagataacccatgttgcgaggattcagatacaattgtaagagccccatttat

SEQ ID NO: 18436 - DNA, 120 bp, Artificial Sequence
  ENSG00000019144_70 (sequence is synthesized)
tttttgagtgctttccaactggaatcagtgatgggcatttatctacatgatctaatttcattttcactataattccaggaatgggcattcttaacttcatttcacagatgaggcaactga

SEQ ID NO: 18437 - DNA, 69 bp, Artificial Sequence
  ENSG00000019144_71 (sequence is synthesized)
atgggcattcttaacttcatttcacagatgaggcaactgaggcttaaaaagtttaaatggctgggtgcg

SEQ ID NO: 18438 - DNA, 120 bp, Artificial Sequence
  ENSG00000019144_72 (sequence is synthesized)
gcagtgagcgagataaaaaaaaaagtttaaatgattttatcaggatcacagagcccatagtggtagcggggccagggtttgaagtcaggacagtcatgcttaaagcatttctctttaacc

SEQ ID NO: 18439 - DNA, 120 bp, Artificial Sequence
  ENSG00000019144_73 (sequence is synthesized)
agccagggctcttggagagggtgggctttgaagatgatgcctcctcatgccagactaccctgaggtggattcctcctgcagccctgcccaggtgtgaagagggccagtggggggaagagg

SEQ ID NO: 18440 - DNA, 120 bp, Artificial Sequence
  ENSG00000019144_74 (sequence is synthesized)
aggggtggaggcactggcccagcctcccaggtgccgaggctctgttccggttttttttttttttttttgccatggaactgggcaagcaacaggagggaagctgggaacgccagcgcctgg

SEQ ID NO: 18441 - DNA, 120 bp, Artificial Sequence
  ENSG00000019144_75 (sequence is synthesized)
cggaggcacctggaggcccgccaggcgctctacgccgagctccagacgcagctcgataactgccccgagtcagtgcgggaacagttacaggagcagctgagaagggaggcagaggccctg

SEQ ID NO: 18442 - DNA, 120 bp, Artificial Sequence
  ENSG00000019144_76 (sequence is synthesized)
gttttttgtttttaattaaaaaaaatttttttagctgattgtgttgggttgaggttgctttctggggaagaaaaggtgtaggagttgagacatctggagatagcaggaatggctgagttt

SEQ ID NO: 18443 - DNA, 120 bp, Artificial Sequence
  ENSG00000019144_77 (sequence is synthesized)
gggttctgagtagcatagggcaagaaagcacagaagtatagattgggccctatgggactgtttgtgcttacagtggcagggggcaggactggtatccatgctgtggctggctggagactt

SEQ ID NO: 18444 - DNA, 120 bp, Artificial Sequence
  ENSG00000019144_78 (sequence is synthesized)
ggcactgctcccagacaactcccacccaagctctttagctgcctctatttcccttcagcatgagcatttggggaatgatggtgactggtgacacctctgccctgagaaccctgccacaga

SEQ ID NO: 18445 - DNA, 120 bp, Artificial Sequence
  ENSG00000019144_79 (sequence is synthesized)
cctctatccttataggcattcctgccctggaggcccacctcctgcatgtgttggggcccttctactgtctgctggtgctcgcctccccacaccaccagcttgcttcccttgtctctgcct

SEQ ID NO: 18446 - DNA, 120 bp, Artificial Sequence
  ENSG00000019144_80 (sequence is synthesized)
ctctgcctccccagactgcctgccttccttggtagatgatctggttccacgactgggcttaaagatcagcttagaaacaaggaggagaggccaggtgtggtggctcacgcctgttatccc

SEQ ID NO: 18447 - DNA, 120 bp, Artificial Sequence
  ENSG00000019144_81 (sequence is synthesized)
acccaggacggctggtcttctagaaggaggccaagcttccaagtaggggaccagagtcttgggctaggctttgccctccttccctgaaaatgtacacaatgtacctggttcacctccatt

SEQ ID NO: 18448 - DNA, 120 bp, Artificial Sequence
  ENSG00000019144_82 (sequence is synthesized)
tttgtgttcattcattcattccttcattcagcaatgttactaagcatctagtaagttctaggcactgttctaggctctggtgatgagtaagatggccacagcgctctcatggagcttata

SEQ ID NO: 18449 - DNA, 120 bp, Artificial Sequence
  ENSG00000019144_83 (sequence is synthesized)
atcagggaagcagacaagagtgataaccacgcacaatgggtatgctgataggagacatccaggcactgcaggagcatggggtcttatggtcagagttgggctgggaactcccccttggac

SEQ ID NO: 18450 - DNA, 120 bp, Artificial Sequence
  ENSG00000019144_84 (sequence is synthesized)
aaattccatcagagattccaagacaagcagttgaacagtgccaaagagtgctcaggatagcccaggaacaggccgactagaccctcttgctctctcagctctctccgttccagcatctag

SEQ ID NO: 18451 - DNA, 120 bp, Artificial Sequence
  ENSG00000019144_85 (sequence is synthesized)
cctagtttcccatccctggaactcccttgtacttttcccacttggagcgtgggatgctgtgttataccctagtcaggaggaggtaaggtatgctgcagtaacaagaagtcataaaatccc

SEQ ID NO: 18452 - DNA, 120 bp, Artificial Sequence
  ENSG00000019144_86 (sequence is synthesized)
aaaatcccagtggctggacaggtgcagtggctcacacctgtgatcccaaaactttgggaggccaaggtgggcagatagcttgaggctaagagattgagaccagcctgggcaacatggtga

SEQ ID NO: 18453 - DNA, 78 bp, Artificial Sequence
  ENSG00000019144_87 (sequence is synthesized)
actgcgccactgcactccagcctggacaacagcgtgagactctgtctcaaaaaaataaattaaagagaggccgaagcg

SEQ ID NO: 18454 - DNA, 85 bp, Artificial Sequence
  ENSG00000019144_88 (sequence is synthesized)
aggttactcgatagagcaagacgccgtctcaaaaaaaaaaaaaaaaggaaatctcagtggcttacaagtactaggcttccttatg

SEQ ID NO: 18455 - DNA, 120 bp, Artificial Sequence
  ENSG00000019144_89 (sequence is synthesized)
aggaaatctcagtggcttacaagtactaggcttccttatgcccaatacatgtcgactgcacattgtgagttggtgggggctttgctgtgcatcagcgttgtctttgcttcagcatggctt

SEQ ID NO: 18456 - DNA, 120 bp, Artificial Sequence
  ENSG00000019144_90 (sequence is synthesized)
ttgggaacatttctggccacagtggcagagggaaagagaggcttaagtgagcccggccttggtattaaatgtcctagttgggaagtgacacacatcatttctgtccagaagtcatagatg

SEQ ID NO: 18457 - DNA, 120 bp, Artificial Sequence
  ENSG00000019144_91 (sequence is synthesized)
gggctgtctgccagtcacacagcctcacctagccacacagctgggaagagcaatcctgctaggagctcagaagaggggaaagggctgcagagtttggtgccagagatgctcaggtctgga

SEQ ID NO: 18458 - DNA, 120 bp, Artificial Sequence
  ENSG00000019144_92 (sequence is synthesized)
gtgcccacttcccccctaacctggtccctgatcacctgctggcccctctaagaaaccttccctgaccaccctgggtcttgggtgttttgaggaggcaggaggaccagaagcacaggtgtc

SEQ ID NO: 18459 - DNA, 120 bp, Artificial Sequence
  ENSG00000019144_93 (sequence is synthesized)
ccatgtttctctctgggccaggaaggtagagggactagggactttggagaggaagaaacatgcctggggaaaggagttccattttaggcatgttgagattgaagtgcctctgggacatct

SEQ ID NO: 18460 - DNA, 120 bp, Artificial Sequence
  ENSG00000019144_94 (sequence is synthesized)
aggtttaggaggatggtcaggattagaggtggagtaatagttgaatcaggtggaataatagtaatagcagatcacctttatcaagcacttgcatgagccaggcgctgtgctaagcactct

SEQ ID NO: 18461 - DNA, 120 bp, Artificial Sequence
  ENSG00000019144_95 (sequence is synthesized)
gcatgcatcatctcattaatctttgaaataatcctatgagggaaacactatttttatgccattttaccgatgaggaaaatgatgctcagagaggttaagtaaattgcccaaggtcccaca

SEQ ID NO: 18462 - DNA, 120 bp, Artificial Sequence
  ENSG00000019144_96 (sequence is synthesized)
gctcctaagagacagagataagactgaacctgggcagtcagactgcagagcagagaagaggggagggagagggccgaaccctggggcaggcctacccgtgtggggaaggagaaagaggag

SEQ ID NO: 18463 - DNA, 120 bp, Artificial Sequence
  ENSG00000019144_97 (sequence is synthesized)
agaccagcagagggagaaggggcaggagacaggaagccagcactaaccacatgccaggtgctgggctggtgcttggcatatgtggccttagttagcgcctgtggaacaaaaggagactaa

SEQ ID NO: 18464 - DNA, 120 bp, Artificial Sequence
  ENSG00000019144_98 (sequence is synthesized)
gttcagatggcaggaatagaaatgggagcagaaacagggaaggaagccagccaaaggagcagacattcacaagcaggaggtgtcaccagcagtgatggatgctgcaggaaggccaagaaa

SEQ ID NO: 18465 - DNA, 120 bp, Artificial Sequence
  ENSG00000019144_99 (sequence is synthesized)
gatgtggcccaaaggctgttagactcagggatgggagcttgtcaagagaaggctttctgctgtgcatggggccaggagccagactgcacaagattgaggataggtgggtggtaaggaagc

SEQ ID NO: 18466 - DNA, 120 bp, Artificial Sequence
  ENSG00000019144_100 (sequence is synthesized)
ggaggcaggagtgtgttactatttcctgtgaaggaagggatgggagagaacaggagctggagggctgagcaggcccagagccaggcagggctggtcctttaccaaggaggaaatgtcaga

SEQ ID NO: 18467 - DNA, 120 bp, Artificial Sequence
  ENSG00000019144_101 (sequence is synthesized)
aatgggcctgtggctggataagggccatgggtgccttgcctattccgcttggaccctcttcctgccaactcgatagaaaccccctcattgcatggagtccagattacgtattatatctag

SEQ ID NO: 18468 - DNA, 120 bp, Artificial Sequence
  ENSG00000019144_102 (sequence is synthesized)
gaagcctttcctgaccccaccttactaggagtgattcccaccctcctctgaacccctgcattatccagcatctgtttttccatgtgacatcaatccaggagtgtaatgatataataacag

SEQ ID NO: 18469 - DNA, 120 bp, Artificial Sequence
  ENSG00000019144_103 (sequence is synthesized)
acactgtgctgaataccttaaatgtgttctttcatttaatactcatgacaacctgtgatgcgtaggtggtctcatggggttcctagccatgcctttagtagctatttacatagctgtgtg

SEQ ID NO: 18470 - DNA, 120 bp, Artificial Sequence
  ENSG00000019144_104 (sequence is synthesized)
tctgtattttcctcactgtgagattgtagtttcctaagagaagggtctctgacttctctctgaatcccagtgtctaggactcattccttcagtattgggtacctactgtgtgccaggcac

SEQ ID NO: 18471 - DNA, 120 bp, Artificial Sequence
  ENSG00000019144_105 (sequence is synthesized)
atagttgtttgtgttgggggaggtagaccatggaatggataaaggaggattcagattcagcataagttctatacagaggagcatctgtgctttgggaacacaggagagcacaactgtgca

SEQ ID NO: 18472 - DNA, 120 bp, Artificial Sequence
  ENSG00000019144_106 (sequence is synthesized)
ctgtcgtggtgacattttgcaatgggtcttgaagatcatttaggagtttgctaaggaaatgggctggaggagatagttccagcatacagggtgtattattaagggaacagtgagaagctc

SEQ ID NO: 18473 - DNA, 120 bp, Artificial Sequence
  ENSG00000019144_107 (sequence is synthesized)
agataggacttgggactcatgcaggggaaggttatgatacaaggctggagggacatgttggcagcagtccgtaagttgcctttaccaagctgcagaggtcggggagaggaggagcactcg

SEQ ID NO: 18474 - DNA, 120 bp, Artificial Sequence
  ENSG00000019144_108 (sequence is synthesized)
ggaaggaacttacttccagccggcaccattgaatttagtgattcgcgtgacctctcctgtaggacgcaggctcactgttaaggatgtcagctgtagcatctgagcagtgccacagacaag

SEQ ID NO: 18475 - DNA, 120 bp, Artificial Sequence
  ENSG00000019144_109 (sequence is synthesized)
ttggcccaggccctgtgctttcccttgacagggatcctgccccttctcactgaatggtcacctctgctcaggtagtttgcccctttcctgccacctctgacctccagaggctatatgcta

SEQ ID NO: 18476 - DNA, 120 bp, Artificial Sequence
  ENSG00000019144_110 (sequence is synthesized)
tatgtatatgctaactgctctgtacacatcaagggagtgtgcttcctatctttttttttaaaaaataggtaaaagtattcatatagttcaaaaataaaaaatatataaaaaggtttaaat

SEQ ID NO: 18477 - DNA, 120 bp, Artificial Sequence
  ENSG00000019144_111 (sequence is synthesized)
tgagaattatgccccacccactacagtaactaattttataaatctcttgtgtatccttatagagtttctataggagaatataaacaaatactttttcttgcacaaaaggtggcatacagt

SEQ ID NO: 18478 - DNA, 120 bp, Artificial Sequence
  ENSG00000019144_112 (sequence is synthesized)
acattctttttacctcctaatgtgtcttagagatcattttatatcaaatttatctatatctagacattatatctcgatataaattatagacttatttctgagtctgtatctgtatcagat

SEQ ID NO: 18479 - DNA, 90 bp, Artificial Sequence
  ENSG00000019144_113 (sequence is synthesized)
aaatgctggaatatcattttacttaacagctgtatttagtcttccatgatgtgacacacactaacttattaaccagtctccacttgattg

SEQ ID NO: 18480 - DNA, 120 bp, Artificial Sequence
  ENSG00000019144_114 (sequence is synthesized)
gtgacacacactaacttattaaccagtctccacttgattgatattttggttgtttccaatcttctgtgactgcagacaatactatacttaataatcttgtgtgtgttactttgtatatgt

SEQ ID NO: 18481 - DNA, 120 bp, Artificial Sequence
  ENSG00000019144_115 (sequence is synthesized)
gaaagagaaattctcctaaatgtaagcattggatcaaaagataaatgcctttctaattttgatagacatggccaaattgttcataagggttttaccaatttatactcccacatgtcatta

SEQ ID NO: 18482 - DNA, 120 bp, Artificial Sequence
  ENSG00000019144_116 (sequence is synthesized)
gactgcctccttcaccatagacttgccaaaagtgtgctgtatatttgttgtatgtttttgtcattggggtaggtgagaagtggtatctcagtggagttctgatttgtatttctctgtgat

SEQ ID NO: 18483 - DNA, 120 bp, Artificial Sequence
  ENSG00000019144_117 (sequence is synthesized)
tatgagtgaggctgagcattatccatatctttaggattctgtattgggttctgtttgggggtcttgggagactaggatcttcaccccatttcccagatttggaagctcaggccatggagc

SEQ ID NO: 18484 - DNA, 120 bp, Artificial Sequence
  ENSG00000019144_118 (sequence is synthesized)
tccacgtaaatggagctagacctgaagtgtgaccggctccatagcccacccttacttgctttgcagacaagcatgagacgaagctgaagggagtcatctatttccaggccattgaggaag

SEQ ID NO: 18485 - DNA, 120 bp, Artificial Sequence
  ENSG00000019144_119 (sequence is synthesized)
cttgatgctctcctttctcccttccttcctccccttcttccttcaccttcctgtccatttccctgatgtggccttcctttttaaccttccccttccttcttcctcttctttcttctttct

SEQ ID NO: 18486 - DNA, 120 bp, Artificial Sequence
  ENSG00000019144_120 (sequence is synthesized)
cccttctcctgccttttcctttccctttatttcctggcctttcctctccatcctcccctcctgtccccttttcccctccccattcccacctccagatggagaagctgctgctccctgctg

SEQ ID NO: 18487 - DNA, 120 bp, Artificial Sequence
  ENSG00000019144_121 (sequence is synthesized)
tcctgaggggaccctgggtagttgccatgcctcctctatgctcacacctttcacaggatgtttttcctttaattgggatctaggcaagaccagaaaggatttagagtgggtacctaaaga

SEQ ID NO: 18488 - DNA, 120 bp, Artificial Sequence
  ENSG00000019144_122 (sequence is synthesized)
ctgcagaaggagcagaaggcagtggatcagctgcaggagaagctggtggccttggagacaggcatccagaaggagagggacaaggtaacccacacctggcccagcttagtgctgggtacc

SEQ ID NO: 18489 - DNA, 120 bp, Artificial Sequence
  ENSG00000019144_123 (sequence is synthesized)
agtggcctgggagagaaggagaaatgtcttctctggggccctgtacccttcacctcatcatccattctgcagtacaagtggtctctgtggctttccagagacagagtgacttctcctcct

SEQ ID NO: 18490 - DNA, 120 bp, Artificial Sequence
  ENSG00000019144_124 (sequence is synthesized)
ctgtggaaggaaccagcttggagggcactgccaggggctgggctggtgtctggggtctcctctgtctgggtctgtgtgctacctctgggtgcctgccatcctaggccctttatggccctt

SEQ ID NO: 18491 - DNA, 120 bp, Artificial Sequence
  ENSG00000019144_125 (sequence is synthesized)
ctaggaagtgccaaagccccttcttgggcagtgagcacagcccaagggactgacattggggagtgattcaagttcgggtcccaccatctggagaacatctccctccaagcatgccacaag

SEQ ID NO: 18492 - DNA, 120 bp, Artificial Sequence
  ENSG00000019144_126 (sequence is synthesized)
tgcttacgttgtgatctttgggagatggccctcgggcctctgcttcccttgagccttcaggatctgcagcctcccatcccaggtgatcctagctcctgcccctgcccctttcagatttcg

SEQ ID NO: 18493 - DNA, 120 bp, Artificial Sequence
  ENSG00000019144_127 (sequence is synthesized)
tgccagcctgcaggggccactcccagatgcccaacaccgtgccaaaagctctgaagtggagaggggtcatctatttctggatctgacagtatttttccaataatttaattttccttctgg

SEQ ID NO: 18494 - DNA, 120 bp, Artificial Sequence
  ENSG00000019144_128 (sequence is synthesized)
attttttgagtttcttcctcctgccctcaattttgagaatcttaaaaattctttgaccctttttttttttttttggagctttggctctggcccccaaaaccacactcccaaattctgtgc

SEQ ID NO: 18495 - DNA, 120 bp, Artificial Sequence
  ENSG00000019144_129 (sequence is synthesized)
caaattaactccacgcttgccaactaggcctacactaacgtcccttctaatcactgacttgggctttccgcatgcccctaactgccagtgccacccaggtagggctgagccatgcccgct

SEQ ID NO: 18496 - DNA, 120 bp, Artificial Sequence
  ENSG00000019144_130 (sequence is synthesized)
tttgcactaactcagtgggtgcctctgtgcccctggcctctctcctctaatgctgcctccttcttttcttggtgtgggaccccagagtttttatatgaaaggaattggcaggaggattgg

SEQ ID NO: 18497 - DNA, 120 bp, Artificial Sequence
  ENSG00000019144_131 (sequence is synthesized)
tagctcaactttactcaagggggcattggcaggaggggtatgagggtgggggaaatgcttggctgtggagctgctcagactgaagagttctttccattggaaatgcctaggctgctgtct

SEQ ID NO: 18498 - DNA, 120 bp, Artificial Sequence
  ENSG00000019144_132 (sequence is synthesized)
taggctactgtctgaggacagcatgagataacccaaggaagcttcctggcagcttcctgcacagcagagtaggctgtcttccacctattcccctgcctgccctctggagccaaggagtaa

SEQ ID NO: 18499 - DNA, 120 bp, Artificial Sequence
  ENSG00000019144_133 (sequence is synthesized)
ggaggcccagttgtgggcgtggtcttggagggcttgaacaggacctctctgccaacatagtggctacccttcctagctttcccttggggcttcccaaattcagatacccatcagaggttg

SEQ ID NO: 18500 - DNA, 120 bp, Artificial Sequence
  ENSG00000019144_134 (sequence is synthesized)
gtaatgggtagcccctactcttctcctcactcctgagccacctataacacagggtattttaaaggctgagtccaaggatgaggaagcacctagaccccaggaactggcctgattaggtcc

SEQ ID NO: 18501 - DNA, 120 bp, Artificial Sequence
  ENSG00000019144_135 (sequence is synthesized)
aaggaacctgcctaacctcatttcccactgacctggagttttttggaggcctagacttcgctttctctgtggggaagagaggttattcgaggctgtggtagtgatggtggtggtggtgat

SEQ ID NO: 18502 - DNA, 120 bp, Artificial Sequence
  ENSG00000019144_136 (sequence is synthesized)
ggtggtagtgatggcaatggtgtggagggttcacttggcttccctcccctgccctcagcccatggctccactctggctttggaatcagtaaccacagtttctcctctgcctgtcctttga

SEQ ID NO: 18503 - DNA, 120 bp, Artificial Sequence
  ENSG00000019144_137 (sequence is synthesized)
ggggtgactcaccaaaccctcccctcgtcccccttcccaccctcagaggtgtcatctcaccccagaaagaaccgtccaccccctctgtacccactcctgggactcattaccatggaaaca

SEQ ID NO: 18504 - DNA, 120 bp, Artificial Sequence
  ENSG00000019144_138 (sequence is synthesized)
gcccgaactaattgcaaccctcatccctgaagttcagcctgcagggccaacaccccaccccgaccctgggcaggaggggagggaggccaagggtgttgggttggggtcccctctgccaca

SEQ ID NO: 18505 - DNA, 120 bp, Artificial Sequence
  ENSG00000019144_139 (sequence is synthesized)
ctgctttaacatcctcagctcctgattgacgcccaaccctggatttaaccctcaccatcactaccctttttccctgggttaaattttggtctctgggctgtagtagaaggggagggatga

SEQ ID NO: 18506 - DNA, 120 bp, Artificial Sequence
  ENSG00000019144_140 (sequence is synthesized)
gagctggaggctctgtgatgcagaaccagccttgactggtttggagagaaaacagagggccttttctcgagacctacccaacaatttcagttcaagggacttcaggagaccaaaatctgt

SEQ ID NO: 18507 - DNA, 120 bp, Artificial Sequence
  ENSG00000019144_141 (sequence is synthesized)
gccctgcccccacacctctgcctgtgttacctcatcccctgcacctctgactgccgtgttaccttcagctcctggccttgggccctctccctcttcacctctttccctcctcactttccc

SEQ ID NO: 18508 - DNA, 120 bp, Artificial Sequence
  ENSG00000019144_142 (sequence is synthesized)
tttctgcccttttctttctcctcgcctggttattctcctctttgattctagcctttttttctcctctctcaacccccattgccgacccccattctgtcccgccctggccgccctcccgcg

SEQ ID NO: 18509 - DNA, 120 bp, Artificial Sequence
  ENSG00000019144_143 (sequence is synthesized)
atcgaccctcaaagaggtatcatgattggattagccccagcttcaggcccaaggcgtgtcctgggaggctctgagtaacacatggcactttcaccccagtagctgaggttgtgtgggggc

SEQ ID NO: 18510 - DNA, 120 bp, Artificial Sequence
  ENSG00000019144_144 (sequence is synthesized)
tgaatatatttttacagagtactttcacatacactgtcttattaaccctacaagatcagtggtattgtccccatttttctgattaagagaactagattcagaggtgaagttacttcaccc

SEQ ID NO: 18511 - DNA, 120 bp, Artificial Sequence
  ENSG00000019144_145 (sequence is synthesized)
tctactctgtcttgtgctgcggagccctggaggtgcccatctcaagcacaggcaaggtcaggtgtggactgtgtggactctgagagcagatgaggatgggtctttagagctgaggctgca

SEQ ID NO: 18512 - DNA, 120 bp, Artificial Sequence
  ENSG00000019144_146 (sequence is synthesized)
ttgattttccatggctgccagctgcctctgtttagttgcctctggggttcccaggagcctacagatttcactgtttttggtggctgaatatatgtggggggactcaggggcctgggttgg

SEQ ID NO: 18513 - DNA, 120 bp, Artificial Sequence
  ENSG00000019144_147 (sequence is synthesized)
gtgggtagacagctcagaggcttggtaggggccgggctggatggactcaccttgaaggggagcatagggatataggggtgctgatcctggggctcttgggcttcagtcctgagttaggca

SEQ ID NO: 18514 - DNA, 120 bp, Artificial Sequence
  ENSG00000019144_148 (sequence is synthesized)
tttgtctcagaagaggatattgaggccccttaagtggttcttccccaagtctgtatgtctggtgtgtgaattccaaatagaacatatctggtttaccaacttcgttccctccctccctcc

SEQ ID NO: 18515 - DNA, 120 bp, Artificial Sequence
  ENSG00000019144_149 (sequence is synthesized)
ctccctgcctcactacacaaacaatttaggcctgcggtggggaactgggccaagtgtgagggatgcagcccctcaccatgtcccctctctgtaggccgagctgctcatctccgagtcctc

SEQ ID NO: 18516 - DNA, 120 bp, Artificial Sequence
  ENSG00000019144_150 (sequence is synthesized)
agagatggggctggggactaaggctctgggccttttcccagggtcttctcaggctggggcctcctctgtctctttaaccccacctgcttccactcttctctgccccaaagcacaagaggt

SEQ ID NO: 18517 - DNA, 120 bp, Artificial Sequence
  ENSG00000019144_151 (sequence is synthesized)
aatcacagctaactgcgtgctctgctttgcccactgcctgtctgcctgcccgctgagcccctgcctacagctcctcccagggcttagctgaagggcatgtggtgatagtttcttggctgg

SEQ ID NO: 18518 - DNA, 120 bp, Artificial Sequence
  ENSG00000019144_152 (sequence is synthesized)
ccagagtttgggagagtgtgtgcgagcatgccatgccgccattccatagagtgcctgtgcagcccattgaattgcatatttatttgccatgcagaatataattctgcatgccattcatta

SEQ ID NO: 18519 - DNA, 120 bp, Artificial Sequence
  ENSG00000019144_153 (sequence is synthesized)
gttctcacaacatgctggaccctctgactgactttccttttccatgaccccagaggacaacctggttctagagctaggcctggatgggccccttgggtagagcaggcttatgatcctgcg

SEQ ID NO: 18520 - DNA, 120 bp, Artificial Sequence
  ENSG00000019144_154 (sequence is synthesized)
ctttgattcagcatgcattgtggaggtctaccatgctcccagcacccagataagctcagtttctaaggacaggtgatgaatacgacagtccctatcctcccgacccacagttgaatgtgt

SEQ ID NO: 18521 - DNA, 120 bp, Artificial Sequence
  ENSG00000019144_155 (sequence is synthesized)
tggcatctttccaaggactcaccttgggcagtgggcccatttttctgctaggcttttagctgttcttgctaaggcctctttctcacagcccatcttgctcaggccctggtgatgtctcca

SEQ ID NO: 18522 - DNA, 120 bp, Artificial Sequence
  ENSG00000019144_156 (sequence is synthesized)
ccttcccccacctgtttctagctcctgtccaggctgatggggtgtgaggggaccctggggaatggtgtgactggtgctcaatgctgcatgtgtgtgccccactggggactgccaggttgt

SEQ ID NO: 18523 - DNA, 120 bp, Artificial Sequence
  ENSG00000019144_157 (sequence is synthesized)
tggggacggggagggggtctctggaagctgggttctgatcctcagtgaactcttagaaggccttctgtgggcttctttgcctgcccccagcccagggcgaattcaggcatgggccttcag

SEQ ID NO: 18524 - DNA, 120 bp, Artificial Sequence
  ENSG00000019144_158 (sequence is synthesized)
ggtctgcttggggcaggactggatgccaaagtggctctttaagagtggagggcaggaggagccttcagacagttggttctgctgcccttttctggtctctgtcactccctgcagccatct

SEQ ID NO: 18525 - DNA, 120 bp, Artificial Sequence
  ENSG00000019144_159 (sequence is synthesized)
catggagtttggggtgttgggcaccttattgaaccctgttaaccccttctttgcccacccctaccccttctactgggcaccccaggaatatgtgaccctggcagaagttttccagctgtg

SEQ ID NO: 18526 - DNA, 120 bp, Artificial Sequence
  ENSG00000019144_160 (sequence is synthesized)
ttcccgcttggacccctatgcttctgccacttcccccagtgtgctcgcccagcccctgcctgacagtgaggtaccagccaccgagggtgcccaccaatgcccaaggacctctttatggat

SEQ ID NO: 18527 - DNA, 120 bp, Artificial Sequence
  ENSG00000019144_161 (sequence is synthesized)
ggcctagattcccccttgggcctgggtggagctagggggacagaagggtctgtgttcgacagtgagggagaagggcagcctgcataaggggaggttgggagtggtttctttttttccctg

SEQ ID NO: 18528 - DNA, 120 bp, Artificial Sequence
  ENSG00000019144_162 (sequence is synthesized)
gggccttgggagctttctttagctcctatggcctggggaggggcacgccttctgctctaggatgagggtgtcgagttgagaggactctggctttcctaggctgcaggctctgtactttct

SEQ ID NO: 18529 - DNA, 120 bp, Artificial Sequence
  ENSG00000019144_163 (sequence is synthesized)
gccctttccctcccttcccctgtgggtagggccatctcatgtgttctggttccattaacctcttatattccctcctgcgtctggccttgctccaagtacgtgatgcttgagcagctaaag

SEQ ID NO: 18530 - DNA, 120 bp, Artificial Sequence
  ENSG00000019144_164 (sequence is synthesized)
gtgatgcggggcacctcgcccatgcccccagcccctgtgccaggcctttctccctgggcctccgcctcccgggacctggttcccaccacctgccttcctcccatgctgccctcctcctcg

SEQ ID NO: 18531 - DNA, 120 bp, Artificial Sequence
  ENSG00000019144_165 (sequence is synthesized)
ctgggcccgcagcctccctcagccaccgcctcagctccttgatgcacttcctcttccccttctctccccagcgcgagtggtctggacatggggaagatcgaggagatggagaagatgctg

SEQ ID NO: 18532 - DNA, 120 bp, Artificial Sequence
  ENSG00000019144_166 (sequence is synthesized)
cccctccccgggcattggcggctgctcgctgcctcgctgctcgctccgagcctagagccggcagctcgggaggtcggcccgccccctcaaaggctccgggcgggcccgggacctggaggg

SEQ ID NO: 18533 - DNA, 120 bp, Artificial Sequence
  ENSG00000019169_0 (sequence is synthesized)
agagccaaagggaagtgctgcgaggtttacaaccagctgcagtggttcgatgggaaggatctttctccaagtggttcctcttgaggggagcatttctgctggctccaggactttggccat

SEQ ID NO: 18534 - DNA, 120 bp, Artificial Sequence
  ENSG00000019169_1 (sequence is synthesized)
ctataaagcttggcaatgagaaataagaaaattctcaaggaggacgagctcttgagtgagacccaacaagctgcttttcaccaaattgcaatggagcctttcgaaatcaatgttccaaag

SEQ ID NO: 18535 - DNA, 120 bp, Artificial Sequence
  ENSG00000019169_2 (sequence is synthesized)
cccaagaggagaaatggggtgaacttctccctagctgtggtggtcatctacctgatcctgctcaccgctggcgctgggctgctggtggtccaagttctgaatctgcaggcgcggctccgg

SEQ ID NO: 18536 - DNA, 120 bp, Artificial Sequence
  ENSG00000019169_3 (sequence is synthesized)
gtcctggagatgtatttcctcaatgacactctggcggctgaggacagcccgtccttctccttgctgcagtcagcacaccctggagaacacctggctcagggtgcatcgaggctgcaagtc

SEQ ID NO: 18537 - DNA, 120 bp, Artificial Sequence
  ENSG00000019169_4 (sequence is synthesized)
ctgcaggcccaactcacctgggtccgcgtcagccatgagcacttgctgcagcgggtagacaacttcactcagaacccagggatgttcagaatcaaaggtgaacaaggcgccccaggtctt

SEQ ID NO: 18538 - DNA, 120 bp, Artificial Sequence
  ENSG00000019169_5 (sequence is synthesized)
caaggtcacaagggggccatgggcatgcctggtgcccctggcccgccgggaccacctgctgagaagggagccaagggggctatgggacgagatggagcaacaggcccctcgggaccccaa

SEQ ID NO: 18539 - DNA, 120 bp, Artificial Sequence
  ENSG00000019169_6 (sequence is synthesized)
ggcccaccgggagtcaagggagaggcgggcctccaaggaccccagggtgctccagggaagcaaggagccactggcaccccaggaccccaaggagagaagggcagcaaaggcgatgggggt

SEQ ID NO: 18540 - DNA, 120 bp, Artificial Sequence
  ENSG00000019169_7 (sequence is synthesized)
gaaaggagacctgggtctcccaggaagcaaaggggacaggggcatgaaaggagatgcaggggtcatggggcctcctggagcccaggggagtaaaggtgacttcgggaggccaggcccacc

SEQ ID NO: 18541 - DNA, 120 bp, Artificial Sequence
  ENSG00000019169_8 (sequence is synthesized)
aggtttggctggttttcctggagctaaaggagatcaaggacaacctggactgcagggtgttccgggccctcctggtgcagtgggacacccaggtgccaagggtgagcctggcagtgctgg

SEQ ID NO: 18542 - DNA, 120 bp, Artificial Sequence
  ENSG00000019169_9 (sequence is synthesized)
ctcccctgggcgagcaggacttccagggagccccgggagtccaggagccacaggcctgaaaggaagcaaaggggacacaggacttcaaggacagcaaggaagaaaaggagaatcaggagt

SEQ ID NO: 18543 - DNA, 120 bp, Artificial Sequence
  ENSG00000019169_10 (sequence is synthesized)
tccaggccctgcaggtgtgaagggagaacaggggagcccagggctggcaggtcccaagggagcccctggacaagctggccagaagggagaccagggagtgaaaggatcttctggggagca

SEQ ID NO: 18544 - DNA, 120 bp, Artificial Sequence
  ENSG00000019169_11 (sequence is synthesized)
aggagtaaagggagaaaaaggtgaaagaggtgaaaactcagtgtccgtcaggattgtcggcagtagtaaccgaggccgggctgaagtttactacagtggtacctgggggacaatttgcga

SEQ ID NO: 18545 - DNA, 120 bp, Artificial Sequence
  ENSG00000019169_12 (sequence is synthesized)
tgacgagtggcaaaattctgatgccattgtcttctgccgcatgctgggttactccaaaggaagggccctgtacaaagtgggagctggcactgggcagatctggctggataatgttcagtg

SEQ ID NO: 18546 - DNA, 120 bp, Artificial Sequence
  ENSG00000019169_13 (sequence is synthesized)
tcggggcacggagagtaccctgtggagctgcaccaagaatagctggggccatcatgactgcagccacgaggaggacgcaggcgtggagtgcagcgtctgacccggaaaccctttcacttc

SEQ ID NO: 18547 - DNA, 120 bp, Artificial Sequence
  ENSG00000019169_14 (sequence is synthesized)
tctgctcccgaggtgtcctcgggctcatatgtgggaaggcagaggatctctgaggagttccctggggacaactgagcagcctctggagaggggccattaataaagctcaacatcattggc

SEQ ID NO: 18548 - DNA, 120 bp, Artificial Sequence
  ENSG00000019169_15 (sequence is synthesized)
tttcttttccttaactgtagaactccaaaatgaaaagaaagagcccgcacttacccaaagccccaaggggccttccttgcctctcccatgtgtgtttcttcacccaggtgaaaactcagt

SEQ ID NO: 18549 - DNA, 120 bp, Artificial Sequence
  ENSG00000019169_16 (sequence is synthesized)
aaagcttggcaatgagaaataagaaaattctcaaggaggacgagctcttgagtgagacccaacaagctgcttttcaccaaattgcaatggagcctttcgaaatcaatggatgaggagtgt

SEQ ID NO: 18550 - DNA, 120 bp, Artificial Sequence
  ENSG00000019169_17 (sequence is synthesized)
aaatttcacactgtaccctctagaagcacagtgcaacttgcatccctctttcctgccatcacctccagcctccctcattagaacaagcctccttcattccattatctgcactagaattaa

SEQ ID NO: 18551 - DNA, 120 bp, Artificial Sequence
  ENSG00000019186_0 (sequence is synthesized)
atggagagggacaggaggaaacgcagcgccagcagcatctcatctaccctccttgacacctccccgtggctccagccagaccctagaggtcagccttgcggaccaacaggaggactccca

SEQ ID NO: 18552 - DNA, 120 bp, Artificial Sequence
  ENSG00000019186_1 (sequence is synthesized)
gctttcccttttcaagaggtccccagacaccggccaccctcttccagcccctgcggccagtgcaaggaggcaccaatgctctgaggctgtcgcgtggtgcagcgtcgagcatcctcgccg

SEQ ID NO: 18553 - DNA, 120 bp, Artificial Sequence
  ENSG00000019186_2 (sequence is synthesized)
aggtcctttctgctgcctgtcccgcctcaccccgctccatcacaccagctggccctctttgcttccttttcccagaatcgttaagccccgactcccactagcacctcgtaccaacctcgc

SEQ ID NO: 18554 - DNA, 120 bp, Artificial Sequence
  ENSG00000019186_3 (sequence is synthesized)
cccaccccatcctcctgccttcccgcgctccggtgtcccccgctgccatgagctcccccatcagcaagagccgctcgcttgccgccttcctgcagcagctgcgcagtccgaggcagcccc

SEQ ID NO: 18555 - DNA, 120 bp, Artificial Sequence
  ENSG00000019186_4 (sequence is synthesized)
cgagactggtgacatctacggcgtacacgtcccctcagccgcgagaggtgccagtctgcccgctgacagctggtggcgagactcagaacgcggccgccctgccgggccccaccagctggc

SEQ ID NO: 18556 - DNA, 120 bp, Artificial Sequence
  ENSG00000019186_5 (sequence is synthesized)
cactgctgggcagcctgctgcagattctctggaaagggggtctcaagaaacagcacgacaccctggtggagtaccacaagaagtatggcaagattttccgcatgaagttgggttcctttg

SEQ ID NO: 18557 - DNA, 120 bp, Artificial Sequence
  ENSG00000019186_6 (sequence is synthesized)
agtcggtgcacctgggctcgccatgcctgctggaagcgctgtaccgcaccgagagcgcgtacccgcagcggctggagatcaaaccgtggaaggcctatcgcgactaccgcaaagaaggct

SEQ ID NO: 18558 - DNA, 120 bp, Artificial Sequence
  ENSG00000019186_7 (sequence is synthesized)
acgggctgctgatcctggaaggggaagactggcagcgggtccggagtgcctttcaaaagaaactaatgaaaccaggggaagtgatgaagctggacaacaaaatcaatgaggtcttggccg

SEQ ID NO: 18559 - DNA, 120 bp, Artificial Sequence
  ENSG00000019186_8 (sequence is synthesized)
attttatgggcagaatagatgagctctgtgatgaaagaggccacgttgaagacttgtacagcgaactgaacaaatggtcgtttgaaagtatctgcctcgtgttgtatgagaagagatttg

SEQ ID NO: 18560 - DNA, 120 bp, Artificial Sequence
  ENSG00000019186_9 (sequence is synthesized)
ggcttctccagaagaatgcaggggatgaagctgtgaacttcatcatggccatcaaaacaatgatgagcacgtttgggaggatgatggtcactccagtcgagctgcacaagagcctcaaca

SEQ ID NO: 18561 - DNA, 120 bp, Artificial Sequence
  ENSG00000019186_10 (sequence is synthesized)
ccaaggtctggcaggaccacactctggcctgggacaccattttcaaatcagtcaaagcttgtatcgacaaccggttagagaagtattctcagcagcctagtgcagatttcctttgtgaca

SEQ ID NO: 18562 - DNA, 120 bp, Artificial Sequence
  ENSG00000019186_11 (sequence is synthesized)
tttatcaccagaatcggctttcaaagaaagaattgtatgctgctgtcacagagctccagctggctgcggtggaaacgacagcaaacagtctaatgtggattctctacaatttatcccgta

SEQ ID NO: 18563 - DNA, 120 bp, Artificial Sequence
  ENSG00000019186_12 (sequence is synthesized)
atccccaagtgcaacaaaagcttcttaaggaaattcaaagtgtattacctgagaatcaggtgccacgggcagaagatttgaggaatatgccgtatttaaaagcctgtctgaaagaatcta

SEQ ID NO: 18564 - DNA, 120 bp, Artificial Sequence
  ENSG00000019186_13 (sequence is synthesized)
cttgacaaggcaacagttctgggtgaatatgctttacccaaaggaacagtgctcatgctaaatacccaggtgttgggatccagtgaagacaattttgaagattcaagtcagtttagacct

SEQ ID NO: 18565 - DNA, 120 bp, Artificial Sequence
  ENSG00000019186_14 (sequence is synthesized)
gaacgttggcttcaggagaaggaaaaaattaatccttttgcgcatcttccatttggcgttggaaaaagaatgtgcattggtcgccgattagcagagcttcaactgcatttggctctttgt

SEQ ID NO: 18566 - DNA, 120 bp, Artificial Sequence
  ENSG00000019186_15 (sequence is synthesized)
tggattgtccgcaaatacgacatccaggccacagacaatgagcctgttgagatgctacactcaggcaccctggtgcccagccgggaactccccatcgcgttttgccagcgataatacgcc

SEQ ID NO: 18567 - DNA, 120 bp, Artificial Sequence
  ENSG00000019186_16 (sequence is synthesized)
tcagatggtggtatttgctaacatcatatccaactcagggaagcggactgagtgctgggatccaaggcattctacagggttcactgctggtttacacttcacctgtgtcagcaccatctt

SEQ ID NO: 18568 - DNA, 120 bp, Artificial Sequence
  ENSG00000019186_17 (sequence is synthesized)
caggtgcttagaatggcctgggagcctgttctgtcttgcatcttccatgacatgaaagggaggctggcacttgtcagtcaggtagaggttacaaaccgtttcaggccctgcctaccacat

SEQ ID NO: 18569 - DNA, 120 bp, Artificial Sequence
  ENSG00000019186_18 (sequence is synthesized)
tcactgtttgaatctttaattcccaagaataagtttacatttcacaatgaatgacctacaacagctaaattttctggggctgggagtaatactgacaatccatttactgtagctctgctt

SEQ ID NO: 18570 - DNA, 120 bp, Artificial Sequence
  ENSG00000019186_19 (sequence is synthesized)
aatgtactacttaggaaaatgtccctgcttaataatgtaagccaagctaaatgatggttaaagttatcaggcctcccatgaaattgcgttcttcctgcattgaaataaaaacattattgg

SEQ ID NO: 18571 - DNA, 120 bp, Artificial Sequence
  ENSG00000019186_20 (sequence is synthesized)
gaaactagagaacacctctatttttaaaaggactttaacgaagtcaaacaacttataagactagtgattcactggggcattattttgttagaggaccttaaaattgtttattttttaaat

SEQ ID NO: 18572 - DNA, 120 bp, Artificial Sequence
  ENSG00000019186_21 (sequence is synthesized)
gtgattcctttatggcattagggtaaagatgaagcaataatttttaaattgtgtatgtgcatatgaagcacagacatgcatgtgtgtgtgtgtctgtgtgtgtgtgtccgtgtatgtgtg

SEQ ID NO: 18573 - DNA, 120 bp, Artificial Sequence
  ENSG00000019186_22 (sequence is synthesized)
tgtgggttctaatggtaatttgcctcagtcatttttttaatatttgcagtacttgatttaggatctgtggtgcagggcaatgtttcaaagtttagtcacagcttaaaaacattcagtgtg

SEQ ID NO: 18574 - DNA, 120 bp, Artificial Sequence
  ENSG00000019186_23 (sequence is synthesized)
actttaatattataaaatgatttcccatgccataatttttctgtctattaaatgggacaagtgtaaagcatgcaaaagttagagatctgttatataacatttgttttgtgatttgaactc

SEQ ID NO: 18575 - DNA, 120 bp, Artificial Sequence
  ENSG00000019186_24 (sequence is synthesized)
ctaggaaaaatatgatttcataaatgtaaaatgcacagaaatgcatgcaatacttataagacttaaaaattgtgtttacagatggtttatttgtgcatatttttactactgcttttccta

SEQ ID NO: 18576 - DNA, 120 bp, Artificial Sequence
  ENSG00000019186_25 (sequence is synthesized)
gatggtttatttgtgcatatttttactactgcttttcctaaatgcatactgtatataattctgtgtatttgataaatatttcttcctacattatatttttagaatatttcagaaatatac

SEQ ID NO: 18577 - DNA, 120 bp, Artificial Sequence
  ENSG00000019186_26 (sequence is synthesized)
gtatatgctttctctctgctgtgaaattatttttagaattataaattcacgtcttgtcagatttcatctgtataccttcaaattctctgaaagtaaaaataaaagtttttaaatatttga

SEQ ID NO: 18578 - DNA, 120 bp, Artificial Sequence
  ENSG00000019186_27 (sequence is synthesized)
ctgctgatcctgtgagtccaatccgagggacctgggcatgcggccagacctgatgagcctgacggcgcctggaaattgtgaagaggcggagttagagttccctggggttggaagcttctt

SEQ ID NO: 18579 - DNA, 120 bp, Artificial Sequence
  ENSG00000019186_28 (sequence is synthesized)
ggacacctcaaaatccctgaacccaaattatctggacttcaactttttggtgcaatctttgactaggaggaaaggtgctttttcatcctattgtcaaactattgtcaaaagatgatcact

SEQ ID NO: 18580 - DNA, 120 bp, Artificial Sequence
  ENSG00000019186_29 (sequence is synthesized)
attttatcccaaatattctgatgctaatattctctggctatttcttggcatgattctcagtgtttgtttgattttatggttcctgaagttgcagctggagtatttctgcatctccttctt

SEQ ID NO: 18581 - DNA, 120 bp, Artificial Sequence
  ENSG00000019186_30 (sequence is synthesized)
ttgagtttgctaaatgaacggtctgtaccatttttagatgacagattttaaatagtaattcatctcattcatttcactgggattcactagcatcaactccacaaaaatgaaaagtctcat

SEQ ID NO: 18582 - DNA, 120 bp, Artificial Sequence
  ENSG00000019485_0 (sequence is synthesized)
agttctcgcggacgccctcggccccgcgccgggggctgctgcggggtgctcggggatgaaggtgggaggcgtcctttgggatgcgacgaagccttctccatcgcggttcgcgattgcccg

SEQ ID NO: 18583 - DNA, 120 bp, Artificial Sequence
  ENSG00000019485_1 (sequence is synthesized)
cgaagcgtggccgagccggagggcatttctggaatgcgttttaagtgtcagttgcggtgtagactcttcgggaaacctctccggagcgtagcctccaccccccactcgcagtccccaagg

SEQ ID NO: 18584 - DNA, 120 bp, Artificial Sequence
  ENSG00000019485_2 (sequence is synthesized)
acagaatgaccgagaacatgaaggagtgcttggcccagaccaatgcagccgtgggggatatggtgacggtggtgaagacggaggtctgctcaccactccgagaccaggagtatggccagc

SEQ ID NO: 18585 - DNA, 120 bp, Artificial Sequence
  ENSG00000019485_3 (sequence is synthesized)
cctgctctaggagaccggactcctcggccatggaagttgagcccaagaaactgaaggggaagcgcgacctcatcgtgcccaaaagcttccagcaagtggacttctggttctgtgagtcct

SEQ ID NO: 18586 - DNA, 120 bp, Artificial Sequence
  ENSG00000019485_4 (sequence is synthesized)
gccaggagtacttcgtggatgaatgcccaaaccatggccccccggtgtttgtgtctgacacaccggtgcccgtgggcatcccagaccgggcggcgctcaccatcccacagggcatggagg

SEQ ID NO: 18587 - DNA, 120 bp, Artificial Sequence
  ENSG00000019485_5 (sequence is synthesized)
tggtcaaggacactagtggagagagtgacgtgcgatgtgtaaacgaggtcatccccaagggccacatcttcggcccctatgaggggcagatctccacccaggacaaatcagctggcttct

SEQ ID NO: 18588 - DNA, 120 bp, Artificial Sequence
  ENSG00000019485_6 (sequence is synthesized)
tctcctggctgattgtggacaagaacaaccgctataagtccatagatggctcagacgagaccaaagccaactggatgaggtacgtggtcatctcccgggaggagagggagcagaacctgc

SEQ ID NO: 18589 - DNA, 120 bp, Artificial Sequence
  ENSG00000019485_7 (sequence is synthesized)
tggcgttccagcacagtgagcgcatctacttccgggcgtgcagggacatccggcctggggagtggctgcgggtctggtacagcgaggactacatgaagcgcctgcacagcatgtcccagg

SEQ ID NO: 18590 - DNA, 120 bp, Artificial Sequence
  ENSG00000019485_8 (sequence is synthesized)
aaaccattcaccgcaacctggccagaggagagaagaggttgcagagggagaagtctgagcaggttctggataacccagaagacctgaggggtcccattcatctctctgtgctgagacagg

SEQ ID NO: 18591 - DNA, 120 bp, Artificial Sequence
  ENSG00000019485_9 (sequence is synthesized)
gcaaaagtccctacaagcgtggctttgatgagggggatgtacacccccaagctaagaagaagaaaattgacctgattttcaaggatgttctggaggcctcactggaatctgcgaaggtgg

SEQ ID NO: 18592 - DNA, 120 bp, Artificial Sequence
  ENSG00000019485_10 (sequence is synthesized)
aagcccaccagttggccctgagcacctcactggtcatcaggaaagtccccaaataccaggatgacgcctacagtcagtgtgcaacaacaatgacccatggtgtgcagaatataggccaga

SEQ ID NO: 18593 - DNA, 120 bp, Artificial Sequence
  ENSG00000019485_11 (sequence is synthesized)
cccagggggagggggactggaaggtcccccagggggtctccaaggagccaggccaattggaggatgaagaagaggagccttcatcattcaaggccgacagtcctgccgaggcctcccttg

SEQ ID NO: 18594 - DNA, 120 bp, Artificial Sequence
  ENSG00000019485_12 (sequence is synthesized)
catctgaccctcatgaacttcccaccacctctttttgccctaactgtattcgcctaaagaagaaggttcgggagctccaggcagaattagacatgcttaagtctgggaaacttcctgagc

SEQ ID NO: 18595 - DNA, 120 bp, Artificial Sequence
  ENSG00000019485_13 (sequence is synthesized)
cccccgtattgccaccacaggtactggagctcccagagttctcggaccctgcagcctcagaaagcatggtctccggccccgccatcatggaggatgatgaccaggaagtcgattcagcag

SEQ ID NO: 18596 - DNA, 120 bp, Artificial Sequence
  ENSG00000019485_14 (sequence is synthesized)
atgaatctgtctccaatgatatgatgacagcgacggatgagccctccaagatgtcatcggccaccgggcgccgaatccggcgctttaagcaggaatggctgaagaagttctggttcctgc

SEQ ID NO: 18597 - DNA, 120 bp, Artificial Sequence
  ENSG00000019485_15 (sequence is synthesized)
ggtactccccaaccctcaatgagatgtggtgccacgtctgccgccagtacacggtgcagtcctcacgcacctcggccttcatcattggctccaagcagtttaagattcacaccatcaaac

SEQ ID NO: 18598 - DNA, 120 bp, Artificial Sequence
  ENSG00000019485_16 (sequence is synthesized)
ttcacagccagagcaacctgcacaagaagtgcctgcaactgtacaagctccgcatgcacccggagaagacagaggagatgtgtcgcaacatgaccctgctcttcaacaccgcctaccacc

SEQ ID NO: 18599 - DNA, 120 bp, Artificial Sequence
  ENSG00000019485_17 (sequence is synthesized)
tggccttggagggcaggccctacctggacttccggcccctggcggagctgctgaggaagtgtgagctcaaggtggtggaccagtacatgaatgagggagactgccagatcctcatccatc

SEQ ID NO: 18600 - DNA, 120 bp, Artificial Sequence
  ENSG00000019485_18 (sequence is synthesized)
acatcgcccgggccctgcgggaagacctggtggagcgcatccgccagtcaccttgcctcagcgtcatcctggatgggcagagcgacgacctgctggccgacacggtggctgtctatgttc

SEQ ID NO: 18601 - DNA, 120 bp, Artificial Sequence
  ENSG00000019485_19 (sequence is synthesized)
agtacaccagcagtgatgggcccccggccacagagttcctgtccctgcaggagctgggattctctagcacagaaagctatctccaggcacttgaccgggccttctcggccttgggcatcc

SEQ ID NO: 18602 - DNA, 120 bp, Artificial Sequence
  ENSG00000019485_20 (sequence is synthesized)
ggttgcaggatgaaaagccaactgttggcttgggtgtagatggagccaacatcacagccagcctccgtgccagcatgttcatgaccatccgcaagacgctgccctggctgctgtgcctgc

SEQ ID NO: 18603 - DNA, 120 bp, Artificial Sequence
  ENSG00000019485_21 (sequence is synthesized)
ccttcatggtgcaccggccccacctggagatcctggatgccatcagcgggaaggagctcccatgcctggaggagctggagaacaacctgaagcagctgctgagcttctaccgctactcac

SEQ ID NO: 18604 - DNA, 120 bp, Artificial Sequence
  ENSG00000019485_22 (sequence is synthesized)
cgcgcctcatgtgcgagctgcggtccacggcggccaccctttgtgaggagacagagttcctgggcgatatccgggcagtgcggtggatcatcggcgagcagaacgtcctcaacgctctca

SEQ ID NO: 18605 - DNA, 120 bp, Artificial Sequence
  ENSG00000019485_23 (sequence is synthesized)
tcaaggactacctggaggtggtggcccatctcaaggaggtcagcagccagacccagcgggcagacgcctcggccatcgcactggccctgctgcagttcctcatggactaccagtccatca

SEQ ID NO: 18606 - DNA, 120 bp, Artificial Sequence
  ENSG00000019485_24 (sequence is synthesized)
agctcatctacttcctgctggacgtgattgctgtgctctcgcgtctggcctacatcttccagggcgagtacctgctggtgtcccaggtggatgacaagatcgaggaggccatccaggaga

SEQ ID NO: 18607 - DNA, 120 bp, Artificial Sequence
  ENSG00000019485_25 (sequence is synthesized)
tcagccggctggctgactccccgggagaatacctgcaggagttcgaggagaatttccgagagagcttcaacgggatcgccatgaagaacctcagggtggctgaagccaagttccagtcca

SEQ ID NO: 18608 - DNA, 120 bp, Artificial Sequence
  ENSG00000019485_26 (sequence is synthesized)
tcagggagaagatctgccagaagacccaggtcatcctggctcagaggttcgactcccgcagccggatctttgtgaaggcctgccaggtgtttgacctggctgcctggcccaggagcagtg

SEQ ID NO: 18609 - DNA, 120 bp, Artificial Sequence
  ENSG00000019485_27 (sequence is synthesized)
aggagctgatgagctatggcaaggaggatatggtgcaaatatttgatcacctggaggccatcccgaccttttcccgggatgtctgtagggaagggctggacccccggggtagtctgttga

SEQ ID NO: 18610 - DNA, 120 bp, Artificial Sequence
  ENSG00000019485_28 (sequence is synthesized)
tggagtggcgagaactcaaggctgattactacaccaaaaatggcttcaaagacctgatcagccacatttgcaagtacaaacagaggtttccactcttgaacaagatcatccaggttctta

SEQ ID NO: 18611 - DNA, 120 bp, Artificial Sequence
  ENSG00000019485_29 (sequence is synthesized)
aagtcctccccacttccaccgcttgctgcgagaaaggccgcaatgccctccagcgagttcgcaaaaaccaccgctcccgcctgaccctggagcagcttagcgacctgttgacaatcgctg

SEQ ID NO: 18612 - DNA, 120 bp, Artificial Sequence
  ENSG00000019485_30 (sequence is synthesized)
taaacggaccgccaatcaccaactttgatgccaagcgagccctggacagctggtttgaggagaagtctgggaacagttacgcgctgtctgcagaagtcctcagtaggatgtctgcgctgg

SEQ ID NO: 18613 - DNA, 120 bp, Artificial Sequence
  ENSG00000019485_31 (sequence is synthesized)
agcagaagccagcactacagaccatggaccacgggacggagttttaccccgacatttagggagctggcgctgcagagttcactaagctgttgaatatttttttaatctatactcataagc

SEQ ID NO: 18614 - DNA, 120 bp, Artificial Sequence
  ENSG00000019485_32 (sequence is synthesized)
tataaatatatattatattatattatattatattatatatatatatatatataaactcacactgaaaatttttaaaaaccaaggtgacgcgtccaccagaagccactgggagatttcaga

SEQ ID NO: 18615 - DNA, 120 bp, Artificial Sequence
  ENSG00000019485_33 (sequence is synthesized)
ggagatttcagaaaggaaaaatgttggaaactgactcttgtctacaaaatttggcagctgcaacatacatggcaactcattttcactcacagaagcacgtgctggggcctcctgtgttcc

SEQ ID NO: 18616 - DNA, 120 bp, Artificial Sequence
  ENSG00000019485_34 (sequence is synthesized)
caccttactgtccaccaacagcataagctaaaatgacaggtctctgtcatcacctttaggtagctcattttgtttatgttttcatttgcgggtggcggggctctgggtttgggtttatgt

SEQ ID NO: 18617 - DNA, 120 bp, Artificial Sequence
  ENSG00000019485_35 (sequence is synthesized)
tcttgccttttcttttttcatttggttttatgatgggagggagctcctcagcctcctcattgacattctggtccggctgaatcagatctctgacttaagtcagggtgggttgtctgtctg

SEQ ID NO: 18618 - DNA, 120 bp, Artificial Sequence
  ENSG00000019485_36 (sequence is synthesized)
catttgggaggcaggggggttgacctttctccctccccacctgacttcagcttgagatctttttttattcatttcctgatgagggttccttcactgtcctacaaacaaaagtgtcggtca

SEQ ID NO: 18619 - DNA, 120 bp, Artificial Sequence
  ENSG00000019485_37 (sequence is synthesized)
aactgtgacactgccacacctcacctctgttgcctcgtccatccctgggttgtggatcccttccttccagccccccctggaaactcacaatattacccattatactgaaggcaacattgc

SEQ ID NO: 18620 - DNA, 120 bp, Artificial Sequence
  ENSG00000019485_38 (sequence is synthesized)
ctcaccgctgagcttgaaatcctggggaagggagaaggggtaagcttttagcattcctgtttttacgaggtggaggataaaacaatataattccattccaatccagggcttttggggaga

SEQ ID NO: 18621 - DNA, 120 bp, Artificial Sequence
  ENSG00000019485_39 (sequence is synthesized)
tgaagagccaagaagtccagaccccaacaggggagtgatttttggctaaaaaacaaggaaaatgaaaagtacatattcgagttacatggattatttatactttttctttataatcatatc

SEQ ID NO: 18622 - DNA, 120 bp, Artificial Sequence
  ENSG00000019485_40 (sequence is synthesized)
atgtgttgagggtattttttttcctttaataatcaagaaatgcctgctatagttcagtggcaggtagtgtcaatgcaaattgtgccctaagttatgcataactcaaatgagagtctgtag

SEQ ID NO: 18623 - DNA, 120 bp, Artificial Sequence
  ENSG00000019485_41 (sequence is synthesized)
agatgtggtcctccttttgcaacaaggctgataacatgctacatggtcataggaaactggggaatgtgtctctgcctgtaaactcttccttttttgaacagggtagagatgtcctaaaga

SEQ ID NO: 18624 - DNA, 79 bp, Artificial Sequence
  ENSG00000019485_42 (sequence is synthesized)
aactcttccttttttgaacagggtagagatgtcctaaagaaatggagaaaagaagagaggactctcaaggcatcagcct

SEQ ID NO: 18625 - DNA, 120 bp, Artificial Sequence
  ENSG00000019485_43 (sequence is synthesized)
ctttagaaatagccacttgcctattccctggggcaagtagtggtttaaactagaggagtctgatcaatgctctttcattcatttaactaccggtatacctcgcaagggagttttaaaaaa

SEQ ID NO: 18626 - DNA, 120 bp, Artificial Sequence
  ENSG00000019485_44 (sequence is synthesized)
gcatattttatatgcagagatcctatcacgtggatgcaggtcattttgggggagggaggaagatctgaattatatacatgtggtcagttctgctgagagcttcatctcttggttggcaga

SEQ ID NO: 18627 - DNA, 120 bp, Artificial Sequence
  ENSG00000019485_45 (sequence is synthesized)
gggtggtgttatctggccacaggcaaggccccaatgtcttcagcctgcttggttcagacattataaaactgtggtggcttccttccttcttggtttatgttgtctctgaggcctcatgcc

SEQ ID NO: 18628 - DNA, 120 bp, Artificial Sequence
  ENSG00000019485_46 (sequence is synthesized)
accgttgagaaccatagtggaaatgtcatcaacactgaacatgttatagccctttcttggttccaccagtcccttcatcccctaccaatcccttccccttcacctccatggtcttggtgc

SEQ ID NO: 18629 - DNA, 120 bp, Artificial Sequence
  ENSG00000019485_47 (sequence is synthesized)
tggtcttggtgctaagataactttagaatcattgctgctagtcaatagcttttcattatataaatatattatatatattatatattatttttgaaatatttttgtttgttttcaacagtg

SEQ ID NO: 18630 - DNA, 120 bp, Artificial Sequence
  ENSG00000019485_48 (sequence is synthesized)
aaaaaacaaaaaacaaaaaaaaatgggttcctccaactgtcccactgccaggcctcatatgctgccttcttcaacaaatcaatgcacccctgcctggtgacatccaccccacctcccacc

SEQ ID NO: 18631 - DNA, 120 bp, Artificial Sequence
  ENSG00000019485_49 (sequence is synthesized)
ccagttgcacacatgcttccctaccctcctctgagcaagaagacagttagcaggaactagcaaggaaaggctgaaagcctccttctgaggctttgagattcccagccccattccacttcc

SEQ ID NO: 18632 - DNA, 120 bp, Artificial Sequence
  ENSG00000019485_50 (sequence is synthesized)
ccactttaaactgatgtctccctccatctgctcctcccatcagggtcaaaacctaactgtggtcaaatgggatgctgttgcaaagcaccaggtcccacctggcccagccccagccttggg

SEQ ID NO: 18633 - DNA, 120 bp, Artificial Sequence
  ENSG00000019485_51 (sequence is synthesized)
acttcctctcccctcacacacgcaaactgctgtgtctggggagttttcactgaacattgcagagactaagaagggttgagggcagagatggctagcaagacagggcttggtgagggcaga

SEQ ID NO: 18634 - DNA, 120 bp, Artificial Sequence
  ENSG00000019485_52 (sequence is synthesized)
aacagtaggttgagatcctttcttctagccaacagttgccttacaccttacattgggtaatgggtagggaggagcaggctaaggctcccgctcatttgaaaaccaggaagagagaaccag

SEQ ID NO: 18635 - DNA, 120 bp, Artificial Sequence
  ENSG00000019485_53 (sequence is synthesized)
tgtcttcctgagcacctggtcagttggagctactctttttcctctcaagagatcatggccaaaatgagctaaaatcttcagctagaaggggaaaagcttatgggccagtgccagtgccta

SEQ ID NO: 18636 - DNA, 120 bp, Artificial Sequence
  ENSG00000019485_54 (sequence is synthesized)
ccctgtagttcctgagaaagctgagagcaggtgacccacttctggcctagcagaatgagctgctatgcacagcatgcagctgcaggggtcacttcctgagctggccaccagacctcggaa

SEQ ID NO: 18637 - DNA, 120 bp, Artificial Sequence
  ENSG00000019485_55 (sequence is synthesized)
aagctaacctctcaggtggtcttgaagttaggttagggcatccctaaaactctgggtgcttgtggcttctgctgaatttagccatgccagggctgtggcagacactctgtaggccacact

SEQ ID NO: 18638 - DNA, 120 bp, Artificial Sequence
  ENSG00000019485_56 (sequence is synthesized)
gccatgggacagggaataatttgggtgatacaccactgcaatttacacggggtctcttctcagcttggatgctccctgggaggcccagtgcttctgtcctgtgaattctgcatgtgatta

SEQ ID NO: 18639 - DNA, 120 bp, Artificial Sequence
  ENSG00000019485_57 (sequence is synthesized)
cccatgatttctgtcataggcatttcccactcttctgcttgcttgagaaggacttggactgatgggacactcagggtctagcccagggagcatatgcttggctaacctaatctccccttg

SEQ ID NO: 18640 - DNA, 120 bp, Artificial Sequence
  ENSG00000019485_58 (sequence is synthesized)
atgtgtatacagaactgtggaaaagcagttggtggatcccaaatgttgttacttcagacaagacagagccctttaactcagcctctggcttaggagtgatgactacaggcttagaatgaa

SEQ ID NO: 18641 - DNA, 120 bp, Artificial Sequence
  ENSG00000019485_59 (sequence is synthesized)
gtgtgtctctggggctgagacttggcataactgggctggctgattagtgactttctttggctcgtagggttggtgggaagtgagatcaaccttgaggcccaggtttgtggccaactgtgc

SEQ ID NO: 18642 - DNA, 120 bp, Artificial Sequence
  ENSG00000019485_60 (sequence is synthesized)
caaggtgatacctggcagagcctgggagccagagcccttatgattaatatgatctgcttttccttcatggaggacaaagaaaaaatccactgccatctagtatctgtgaaacatgaggac

SEQ ID NO: 18643 - DNA, 120 bp, Artificial Sequence
  ENSG00000019485_61 (sequence is synthesized)
agcgcagtcaagtctgtaactcttgccatgtcagaatccccaagttttgcctgcctggttgaatatgagagtccaggcatcagaaacagcagccttatttaatttaatttttctaatgac

SEQ ID NO: 18644 - DNA, 120 bp, Artificial Sequence
  ENSG00000019485_62 (sequence is synthesized)
tggcctatgacaccttgtgatgctaggcacatcctcatttccccatcctcacttgggactgagagcaggctcaagttccagggtccctggatggcaaggttcagtgctgggccctggaat

SEQ ID NO: 18645 - DNA, 120 bp, Artificial Sequence
  ENSG00000019485_63 (sequence is synthesized)
ctatggcacttgggggtctctgacctcagcctctgccacatgtttccaagttgagttgttttgctgaggtggtcctccccttgagttgcttatgccaaccctttaatttaggaaaagtac

SEQ ID NO: 18646 - DNA, 120 bp, Artificial Sequence
  ENSG00000019485_64 (sequence is synthesized)
cttgtaattacttaaggtaatgtttaaatgttttccattcatttggaggtggtgccaacaggggggaaagcatgcagaaggctggaaacaatagctgagaccctactgtgggcccacagc

SEQ ID NO: 18647 - DNA, 120 bp, Artificial Sequence
  ENSG00000019485_65 (sequence is synthesized)
cctggcccagccggcactgaggggctggtgccatgttacttgatcacctggagcctgatgggacccaggaggtggcctgaggggttgaagtataacttccctcttctggatccccccttt

SEQ ID NO: 18648 - DNA, 120 bp, Artificial Sequence
  ENSG00000019485_66 (sequence is synthesized)
cattttccttctaccccctctaggaatgggagttctagacctaggtctgcttttggctttcagtctgggttgatttccaagtcgaattcatgctttttcttggcccataggtccaatttt

SEQ ID NO: 18649 - DNA, 120 bp, Artificial Sequence
  ENSG00000019485_67 (sequence is synthesized)
ggcagaaggcattggacttgtgccccctccctgcttcaagaggcagatctagccaggccaggctgaaacagctgaaacaggcaggccagtcctcctcagacaagaaaggggttttcagag

SEQ ID NO: 18650 - DNA, 120 bp, Artificial Sequence
  ENSG00000019485_68 (sequence is synthesized)
ggcagtggtgtgcccattccagacaccagtcttctggggaggtggtgccgtgtcatgggttctagtctggcctcttcctcagtcctcaggaggacccaagagactggcacggcccttctc

SEQ ID NO: 18651 - DNA, 120 bp, Artificial Sequence
  ENSG00000019485_69 (sequence is synthesized)
ctgcttggagggaaacccatctcccacttggtgggggcccttctcttgccatctgttggttagggtgcttgagctgagtggatggtgctgtgatatttttaaggagcctttcaggcaatg

SEQ ID NO: 18652 - DNA, 120 bp, Artificial Sequence
  ENSG00000019485_70 (sequence is synthesized)
tttgcatgttagccagagggagaaaaagtgcccttttgggaggaaaatggtacgcccctccacttccatctggcactcccttcccccccaccccctcaagtggtatcaccctggaaatac

SEQ ID NO: 18653 - DNA, 120 bp, Artificial Sequence
  ENSG00000019485_71 (sequence is synthesized)
ctatgcaatccagtctccctaggagagagtgcatggaagcaggggtatgtgcagtgtagaatacagatgctacagcatatatgttgtatatatggacatatacagtacgtatacacacag

SEQ ID NO: 18654 - DNA, 120 bp, Artificial Sequence
  ENSG00000019485_72 (sequence is synthesized)
agtaagagagtaaatcacgtctatatatctataaataatatcctatatatttatacatttctatgttttaaatagatataaaaatagagtctatagagctgggagagcagtgggaagcct

SEQ ID NO: 18655 - DNA, 120 bp, Artificial Sequence
  ENSG00000019485_73 (sequence is synthesized)
ggcgctgtgctgtgcaaaggggaagggagcacggccttcggagagggagccggggaaggccagcaggcagggttggctggcaagggggcctcctacccggagtgttggagaggagagtgg

SEQ ID NO: 18656 - DNA, 120 bp, Artificial Sequence
  ENSG00000019485_74 (sequence is synthesized)
ctgggtcccggctcgctccatgcactttctctccttttccacaggcttggtctgaggttggaaggagataccccctgagctccagctgaggtgccccctacctctccccacccccacagc

SEQ ID NO: 18657 - DNA, 120 bp, Artificial Sequence
  ENSG00000019485_75 (sequence is synthesized)
ccacgcttaggcggtcactgctgcttggcagtaggacgtggtctctgactcctggtggagggaccactgcacaaactccttcaaaaccctcccgcaccaggactgagcagcgtcagtggc

SEQ ID NO: 18658 - DNA, 120 bp, Artificial Sequence
  ENSG00000019485_76 (sequence is synthesized)
aataggaaaggtccaaactggatcaagagctggtccaggaaagataccgcccctgccctgttagatgcttctgctgcccctagaggccaagcccctgaagtgcagccgtcctggcctccc

SEQ ID NO: 18659 - DNA, 120 bp, Artificial Sequence
  ENSG00000019485_77 (sequence is synthesized)
tcacttgctcaaccactgtcaggaggagaggatgtgggcagcatgagcatcgccaggcagcgctgcccaccatccacaggctttctggccagggcagggggcatcagctagcaggaaacg

SEQ ID NO: 18660 - DNA, 120 bp, Artificial Sequence
  ENSG00000019485_78 (sequence is synthesized)
gtgggagagacatatctgcacactcataaattcaatggctactccagtccagaagcagggctttggcccagcccgctccgcgcagcagctgctgctggctgtactcaggacaacgctgtt

SEQ ID NO: 18661 - DNA, 120 bp, Artificial Sequence
  ENSG00000019485_79 (sequence is synthesized)
ccccctccctcacagaggccccgtggcccctaccccactcccgccgtaacaggcaggtttagttcacatacactgttcgcattctgtgacttgaggcagaggctgagctgggatacccca

SEQ ID NO: 18662 - DNA, 120 bp, Artificial Sequence
  ENSG00000019485_80 (sequence is synthesized)
agctcatccactttcgttggggagggcccctccctgggtttatcaccagctcctagcccgggccgggcggggatgtctgggggccacgcgggggcactggtgcaagctggcagcatgaca

SEQ ID NO: 18663 - DNA, 120 bp, Artificial Sequence
  ENSG00000019485_81 (sequence is synthesized)
gagggcttgtgcagccctgacgggacccagaagcccatttgctcgcagtttcctctctctgtttttttcctcctggaggtaggagagagggcctgaccaggcaccagatgatggagcaag

SEQ ID NO: 18664 - DNA, 120 bp, Artificial Sequence
  ENSG00000019485_82 (sequence is synthesized)
ggcagctgcatgctccctctctccagaccagccttctgcttttggggtccgaaggggcatttgctcccatcctgagcctcctctgcccctgtcttgctcttccccaccatcctacaagta

SEQ ID NO: 18665 - DNA, 120 bp, Artificial Sequence
  ENSG00000019485_83 (sequence is synthesized)
cctcagtctccagcaggcccacccctccacctgcagcccagggcgggtctgttctgccaatgcccacctccttgagccacagttagctgccaactgggtcttgggacaccctccagtacc

SEQ ID NO: 18666 - DNA, 120 bp, Artificial Sequence
  ENSG00000019485_84 (sequence is synthesized)
tggctcaagagagaccaggccgggccgagccttcttcccactgcagtggactagacccacggccaggggatgggcatccccaggtagcaatcccacaatgcactgtacctcagagagaga

SEQ ID NO: 18667 - DNA, 120 bp, Artificial Sequence
  ENSG00000019485_85 (sequence is synthesized)
gcacgccaggggcaccaagggaccgagccctctgtccagagggggacagcggtcacaatactgctcaccaaaagacaaaggccaggctgccctcgggcacctctcagtcttcacttttgt

SEQ ID NO: 18668 - DNA, 120 bp, Artificial Sequence
  ENSG00000019485_86 (sequence is synthesized)
ctctccggaagaaccagcagtctgattccgtctatttcagcccccgtctctctcttctccacccccacgctgctgaaccattttcatgtcaatcacaaaggaaaaataagtggggatggg

SEQ ID NO: 18669 - DNA, 120 bp, Artificial Sequence
  ENSG00000019485_87 (sequence is synthesized)
gggaaatacctaggagtctattatcacatacatattaatatgttaatactttctttaaaaaaaacctcttgatgttattattttgcagactacgctttatagtacctgtgtgacgggacc

SEQ ID NO: 18670 - DNA, 120 bp, Artificial Sequence
  ENSG00000019485_88 (sequence is synthesized)
tagaacactggatacaaatagagctatgttggtttatcataatatgtacgcagaaactttctttttgtcatattatccttgtaatgtaagaagattgttaataaaagcatttaaatttac

SEQ ID NO: 18671 - DNA, 120 bp, Artificial Sequence
  ENSG00000019485_89 (sequence is synthesized)
gttggtttggatgagattattgtcggagggcagagtacgcagtgggctgtgtggagggtagcctaaagctctctgtggaaaccaccttccgggagacctgaggagtgtaacgtggaggcg

SEQ ID NO: 18672 - DNA, 120 bp, Artificial Sequence
  ENSG00000019485_90 (sequence is synthesized)
gctacctccgtgggtgggagcccaggtcctcagtgtctctggcagacccatcggcagctctgccaggtgctccatgtgttgcccttgtatcctccttgtcaataaaggaagttccgctgc

SEQ ID NO: 18673 - DNA, 120 bp, Artificial Sequence
  ENSG00000019485_91 (sequence is synthesized)
caagttctccaaggaggagctggacattcttgtcacagaggtgacccaccatgaagcagtgctctttgggagggagaccatgcggctgtcccatgctgacagggacaagatttgggaagg

SEQ ID NO: 18674 - DNA, 120 bp, Artificial Sequence
  ENSG00000019485_92 (sequence is synthesized)
catagcccggaaaatcacctccgtcagccaggtgccccgctccgtcaaggacattaagcacagatgggatgacatgaaacggaggaccaaggacaagctggccttcatgcagcagtccct

SEQ ID NO: 18675 - DNA, 120 bp, Artificial Sequence
  ENSG00000019485_93 (sequence is synthesized)
gtcgggccctggggccgggggccgggcccccaccatcgtgctcacggcccacgagagggccatcaagtcggcgctgctcacggcccgtgcagggcgcggcttccccagggcggaactgga

SEQ ID NO: 18676 - DNA, 120 bp, Artificial Sequence
  ENSG00000019485_94 (sequence is synthesized)
tggcaccgacagcccttcgaccagctatgatgaagatgaggaggcgcctgggccctcaaggcagcctcttcgggtgcctctgcagcggtctccggaggaagaggcccacctggccaggcc

SEQ ID NO: 18677 - DNA, 120 bp, Artificial Sequence
  ENSG00000019485_95 (sequence is synthesized)
cgccctgctccgttcatcctcctcctcagaccagtctgagacggtgggccccaagccagaggccctgccccatccctcgccccaggcccaggctgcctgcaggacccctcggccgcaccc

SEQ ID NO: 18678 - DNA, 120 bp, Artificial Sequence
  ENSG00000019485_96 (sequence is synthesized)
cagcccacccaccacgggccttgactggcagctcctccacgtccatgcccagcagaccgaggtgttccggcagttctgccaggagctggtgaccgtgcaccgggacatggccaacagcat

SEQ ID NO: 18679 - DNA, 120 bp, Artificial Sequence
  ENSG00000019485_97 (sequence is synthesized)
gcacgtcatcggccaggccatggccgagctgaccagccgtgtcggtcagatgtgccagacgctgacagagatccgggatggggttcaggcatctcagcgggggccagaaggggcagaccc

SEQ ID NO: 18680 - DNA, 120 bp, Artificial Sequence
  ENSG00000019485_98 (sequence is synthesized)
tacgggctccactccccaggccacccaggcccaagcccccctgccagagcccccaccagcttccccagcatcagcccccacacggactaccaggtctcggaagagaaagcacaatttcta

SEQ ID NO: 18681 - DNA, 120 bp, Artificial Sequence
  ENSG00000019485_99 (sequence is synthesized)
tgggggcgctgttacctcctcaccgagcgcaggtcgctgccctgtggtctaacagagcatgtattcagacccgcaccctcatctttggcggatgctgaagatgcaagaaaagccacctgc

SEQ ID NO: 18682 - DNA, 120 bp, Artificial Sequence
  ENSG00000019485_100 (sequence is synthesized)
ttgatgcttgcttggcctggagatcgttctcctcttggtctgtgtcccgtggtggcaggccttgcagggaggggggcgcaacagtggggagcatccgaatggagtcccactttccaacct

SEQ ID NO: 18683 - DNA, 120 bp, Artificial Sequence
  ENSG00000019485_101 (sequence is synthesized)
tggggctgctgcatcggcctcccacatgtgacctcccaggccctgatgctgcttcttttgaagggggtgaggcctgatgggcaggtcaagtcggtccttcagggaggggtctaccctccc

SEQ ID NO: 18684 - DNA, 120 bp, Artificial Sequence
  ENSG00000019485_102 (sequence is synthesized)
ttgcccgggggtggtgcccgccttggccctccgcttgcccttgtgcgcgtgctcagctgctgtgcttgccttttttggagtggggagaagaatgggatgacgtcggaggaaggaaaagac

SEQ ID NO: 18685 - DNA, 120 bp, Artificial Sequence
  ENSG00000019485_103 (sequence is synthesized)
tgtcttgcattcatagagagcactttatgcttttcctcgcccttgcagagtctgggtggtctcagtgggggctcaggacagtcagctcaagacagccaagtcaggtattattatgatcat

SEQ ID NO: 18686 - DNA, 120 bp, Artificial Sequence
  ENSG00000019485_104 (sequence is synthesized)
ttttatcatcatcatctgtataagacaaatgacacagccagttagtgagagggccaggactggaagccagggtatcggttttcccagctcccctgtcagaggccagatctggagtagtgg

SEQ ID NO: 18687 - DNA, 120 bp, Artificial Sequence
  ENSG00000019485_105 (sequence is synthesized)
gaagaggaggcagggggcaggtcttgccccttgccaggcctctgccccttgccaggcctctgccccctgtatctctgcttctgcctcagctgtcctgggtgaggtgggaggcacctagca

SEQ ID NO: 18688 - DNA, 120 bp, Artificial Sequence
  ENSG00000019485_106 (sequence is synthesized)
tttagcaggtgattctcccaccctgccctggctctatggctcatagccagtggcttggagaggcagggccagatctcaggagtggagggcaacctcttccctggcttctaaaagaatcca

SEQ ID NO: 18689 - DNA, 120 bp, Artificial Sequence
  ENSG00000019485_107 (sequence is synthesized)
gagcccagtggggctcatgtcccattccaggttccagcatgccttgcctctgcttgctcgggctgcctacgcactagctacatacacctctagcttcatgtttcatgttggagtgtgggg

SEQ ID NO: 18690 - DNA, 120 bp, Artificial Sequence
  ENSG00000019485_108 (sequence is synthesized)
agaaaactgggttcttagcattagagagggaagtggcaggtggcagatacaagcttagctctgacctgggtgcacctcagctctgtgtccttttttttccctgacctgaagctgacccca

SEQ ID NO: 18691 - DNA, 120 bp, Artificial Sequence
  ENSG00000019485_109 (sequence is synthesized)
gcagaagtcccccagccaacccctccacccaacaaccccccaccctcccatcctgcccccagccatagtgggagctgggaggattgcagcatctagtgccttccaaggctgttcctggag

SEQ ID NO: 18692 - DNA, 120 bp, Artificial Sequence
  ENSG00000019485_110 (sequence is synthesized)
cgctgcttgtaaacccaagccaagctttgtcccacgtagggagaatggaaggtgactgcaatgtccctgtgcctttggctccatctccccattctgtggttctttgggggttcctgcttc

SEQ ID NO: 18693 - DNA, 120 bp, Artificial Sequence
  ENSG00000019485_111 (sequence is synthesized)
cctcaaactgaacactctcctgtccaacagcctgatggcttaattattgcctggaattgcccggcctccgatgctggaatcaaagattgccttccgaagtatttttgttaagatggcaat

SEQ ID NO: 18694 - DNA, 80 bp, Artificial Sequence
  ENSG00000019485_112 (sequence is synthesized)
ggggaggagagcagcagcgagtcgccgccgccgccgcgccgaggctggcgctgaaactttgcctcgccggggaccagcgc

SEQ ID NO: 18695 - DNA, 120 bp, Artificial Sequence
  ENSG00000019505_0 (sequence is synthesized)
ggctcgcccggatcccgggagctgcctggaggcgggcccggcccggggaaggtgagcggctgcgggacccagcccctcgccgggagcgggcaccatggtgctgtcggtgcctgtgatcgc

SEQ ID NO: 18696 - DNA, 120 bp, Artificial Sequence
  ENSG00000019505_1 (sequence is synthesized)
cgggagcgggcaccatggtgctgtcggtgcctgtgatcgcgctgggcgccacgctgggcacagccaccagcatcctcgcgttgtgcggggtcacctgcctgtgtcggcacatgcacccca

SEQ ID NO: 18697 - DNA, 120 bp, Artificial Sequence
  ENSG00000019505_2 (sequence is synthesized)
agaaggggctgctgccgcgggaccaggaccccgacctggagaaggcgaagcccagcttgctcgggtctgcacaacagttcaatgttaaaaagtccacggaacctgttcagccccgtgccc

SEQ ID NO: 18698 - DNA, 120 bp, Artificial Sequence
  ENSG00000019505_3 (sequence is synthesized)
tcctcaagttcccagacatctatggacccaggccagctgtgacggctccagaggtcatcaactatgcagactattcactgaggtctacggaggagcccactgcacctgccagcccccaac

SEQ ID NO: 18699 - DNA, 120 bp, Artificial Sequence
  ENSG00000019505_4 (sequence is synthesized)
ccccgaatgacagtcgcctcaagaggcaggtcacagaggagctgttcatcctccctcagaatggtgtggtggaggatgtctgtgtcatggagacctggaacccagagaaggctgccagtt

SEQ ID NO: 18700 - DNA, 120 bp, Artificial Sequence
  ENSG00000019505_5 (sequence is synthesized)
ggaaccaggcccccaaactccactactgcctggactatgactgtcagaaggcagaattgtttgtgactcgcctggaagctgtgaccagcaaccacgacggaggctgtgactgctacgtcc

SEQ ID NO: 18701 - DNA, 120 bp, Artificial Sequence
  ENSG00000019505_6 (sequence is synthesized)
aagggagtgtggccaataggaccggctctgtggaggctcagacagccctaaagaagcggcagctgcacaccacctgggaggagggcctggtgctccccctggcggaggaggagctcccca

SEQ ID NO: 18702 - DNA, 120 bp, Artificial Sequence
  ENSG00000019505_7 (sequence is synthesized)
cagccaccctgacgctgaccttgaggacctgcgaccgcttctcccgtcacagcgtggccggggagctccgcctgggcctggacgggacatctgtgcctctaggggctgcccagtggggcg

SEQ ID NO: 18703 - DNA, 120 bp, Artificial Sequence
  ENSG00000019505_8 (sequence is synthesized)
agctgaagacttcagcgaaggagccatctgcaggagctggagaggtcctactatccatcagctacctcccggctgccaaccgcctcctggtggtgctgattaaagccaagaacctccact

SEQ ID NO: 18704 - DNA, 120 bp, Artificial Sequence
  ENSG00000019505_9 (sequence is synthesized)
ctaaccagtccaaggagctcctggggaaggatgtctctgtcaaggtgaccttgaagcaccaggctcggaagctgaagaagaagcagactaaacgagctaagcacaagatcaaccccgtgt

SEQ ID NO: 18705 - DNA, 120 bp, Artificial Sequence
  ENSG00000019505_10 (sequence is synthesized)
ggaacgagatgatcatgtttgagctgcctgacgacctgctgcaggcctccagtgtggagctggaagtgctgggccaggacgattcagggcagagctgtgcgcttggccactgcagcctgg

SEQ ID NO: 18706 - DNA, 120 bp, Artificial Sequence
  ENSG00000019505_11 (sequence is synthesized)
gcctgcacacctcgggctctgagcgcagccactgggaggagatgctcaaaaaccctcgccggcagattgccatgtggcaccagctgcacctgtaaccagctgcccagctgcctcccttct

SEQ ID NO: 18707 - DNA, 120 bp, Artificial Sequence
  ENSG00000019505_12 (sequence is synthesized)
tggacagccctgacccgtcctctgcaacctcctttctgtgcccctttcctcattctgacacccagaagacagtgacagatgtgtttgcaaggctgggatggctctctcatcatactcttg

SEQ ID NO: 18708 - DNA, 120 bp, Artificial Sequence
  ENSG00000019505_13 (sequence is synthesized)
tttcttagaaataagcaagacagagcaggaaatggaatatgcgggtcacactgaggaatgcattttgctcatctgtgttattgaaggaggtgcttattaaatacagttcctatgcctgtt

SEQ ID NO: 18709 - DNA, 120 bp, Artificial Sequence
  ENSG00000019505_14 (sequence is synthesized)
ttataggtggggttaggccagatgcagagaaagctaaatgtgggaatcatggatgcaaagaagaatttggctttttgaaaaacaagcatttcaaaaatgatgaaggaagtgaaagtatcc

SEQ ID NO: 18710 - DNA, 120 bp, Artificial Sequence
  ENSG00000019505_15 (sequence is synthesized)
tggatcaactcctagagttagagattgcccaggtggaaagaaaccttagccagcgttcaatcaagctcaccatgcagggcagtcacccggcagttctcaaactttagcatgtgaagagtc

SEQ ID NO: 18711 - DNA, 120 bp, Artificial Sequence
  ENSG00000019505_16 (sequence is synthesized)
accagcagattcctgggctcgcctggagacattcctagtcggtattcctggtcgaagcccaggagccttcctttttaacaagctgatgtagagggtggagcactgtatgtggagaaattc

SEQ ID NO: 18712 - DNA, 120 bp, Artificial Sequence
  ENSG00000019505_17 (sequence is synthesized)
cttctacaatattccacacaggtttttggccacagtccttgatggagtcccaaaaccatggtgcagccagttccaatgctggacacctcaaccatcagggtgaaatctggggcctcagct

SEQ ID NO: 18713 - DNA, 120 bp, Artificial Sequence
  ENSG00000019505_18 (sequence is synthesized)
ttttaatttaattattttaattcttaatactttaatttgtgcatttcataagccccctgctcttggactgaattttgtgctttttattgaagaattttattgtttttatcttaaaatcag

SEQ ID NO: 18714 - DNA, 120 bp, Artificial Sequence
  ENSG00000019505_19 (sequence is synthesized)
tttctattatccttggggagaccatccctaacaaagtacaggtgggatctcctgtgagtcattggctgggttctgattgctagatgtcacacccaccagcatcaccaaagtgactctgag

SEQ ID NO: 18715 - DNA, 120 bp, Artificial Sequence
  ENSG00000019505_20 (sequence is synthesized)
atagaccggtcccttctcagcgttccagtcacttcaggaggaatttagttattgacttagtctatgacatctggctacatgtaggtagagaagaaagataattttaaaaaggaaatcagg

SEQ ID NO: 18716 - DNA, 120 bp, Artificial Sequence
  ENSG00000019505_21 (sequence is synthesized)
tgcaactgtgcctccctctgtctgttttcacttgaatgggtaaataaccagcagctaggttttgaattcctaccttgttattctaaacagatgtccacattgttaattaaatctaaatta

SEQ ID NO: 18717 - DNA, 120 bp, Artificial Sequence
  ENSG00000019505_22 (sequence is synthesized)
tgagccttgctgagtggatacggtacttacacctgaaccaggattcctgggttctgttgttgacattgcccttcagcacctgtttggccagctgtgtaagataggactaatgactaggaa

SEQ ID NO: 18718 - DNA, 120 bp, Artificial Sequence
  ENSG00000019505_23 (sequence is synthesized)
gcctaccccaatgaatgatatactagatgaaatagtgttcaaaacctgtaggcactctctggctaaaaacaaactctgaggccaccagcagatcatctttaagctaagttactatttttc

SEQ ID NO: 18719 - DNA, 120 bp, Artificial Sequence
  ENSG00000019505_24 (sequence is synthesized)
tacaggcctgagccaccgcgcccggcctatttttcactttaatttggcagctgagaatgcccagaaagtgccagaagcatcgtggcatttccagaaccatggattctgcctttggacccc

SEQ ID NO: 18720 - DNA, 120 bp, Artificial Sequence
  ENSG00000019505_25 (sequence is synthesized)
agaaccatggattctgcctttggacccctctctattaatattaaaactctgggccttcagatgtcaccctaatccacttccctaagacagaatttctggacaagatgggtaagggcttca

SEQ ID NO: 18721 - DNA, 120 bp, Artificial Sequence
  ENSG00000019505_26 (sequence is synthesized)
ttccttcaacaagtcaagtcatacttggcctctccctgagaatctgagcaggagccttataacctgtggtcattattttttctttctgtacagaaatagaaaagcattagaaataacttc

SEQ ID NO: 18722 - DNA, 120 bp, Artificial Sequence
  ENSG00000019505_27 (sequence is synthesized)
taaccatcctctgaaaaaacagaaaaaatatcgaatccctctttcatgagaagtcttttggataattggaaaccttcatcactgaggttggccagcccctgccaagtgttgtgtaggcaa

SEQ ID NO: 18723 - DNA, 120 bp, Artificial Sequence
  ENSG00000019505_28 (sequence is synthesized)
agcacttgttagtggcttcctatgaaatgttttagagatctcttcaccatactggtttcttctctttggttggtgtgggtaaaagaaaacaaaacatttcctataagctgaaagctgacc

SEQ ID NO: 18724 - DNA, 120 bp, Artificial Sequence
  ENSG00000019505_29 (sequence is synthesized)
agcattctcttcttggtaacatctactactccaatctagaaaatttggattctagaccaaaaatcaggaaacatggctccttataaatctgtgcagctgccttatagtaccatcaaagga

SEQ ID NO: 18725 - DNA, 120 bp, Artificial Sequence
  ENSG00000019505_30 (sequence is synthesized)
atttcaggtgggctgggcggggccccgatcccagaattatcaactccacccatcatcatttggtcatgaagcatcctttcattcttcttcttcttttttttgggggggcggggcggggga

SEQ ID NO: 18726 - DNA, 120 bp, Artificial Sequence
  ENSG00000019505_31 (sequence is synthesized)
gggatctcaaagttttagtcttccagaatccaaattaaaggttgcccctgatgggggccaggttccgccacagaacatcttagatgtcagccttgacctcacttagcagggattacagaa

SEQ ID NO: 18727 - DNA, 120 bp, Artificial Sequence
  ENSG00000019505_32 (sequence is synthesized)
atgagatacattttgaaggagagttgtctgttatgttcactgtattctaagtgcctgggataaagctgtctcatgggtgctccatatatattcatatatatttgttgagtgaattaatga

SEQ ID NO: 18728 - DNA, 120 bp, Artificial Sequence
  ENSG00000019505_33 (sequence is synthesized)
attaagagtggctggcagagtaggcagaaaaagacactgcaaatggcataaaaattaaagtcctagctgagttctcaatggtaaaggcatcagatgtcttagcagtcaagctagaaattc

SEQ ID NO: 18729 - DNA, 120 bp, Artificial Sequence
  ENSG00000019505_34 (sequence is synthesized)
atgacaatgagtattactatttgcctaatggcaactcattgctctccatgtaaatgtaatcaacagatgaagagaatataattgctctgcttttccactaaaactccatcttagtgaatt

SEQ ID NO: 18730 - DNA, 120 bp, Artificial Sequence
  ENSG00000019505_35 (sequence is synthesized)
ttaaattatccagagatgtcaaactgccaaataaaaatatttcagtagtctttgcatcagcttaccttgtaccagaaacatttccaatttactatcaaattatagtaactgagcctgtgt

SEQ ID NO: 18731 - DNA, 120 bp, Artificial Sequence
  ENSG00000019505_36 (sequence is synthesized)
gaagtatctcatcattttcgaaaggaacaccttgtgtgatgccagtgagcatttctaaaaagggtgtgaggtagaggtaaaaataaggtgagagaccatttcagaatgcactgttgctca

SEQ ID NO: 18732 - DNA, 120 bp, Artificial Sequence
  ENSG00000019505_37 (sequence is synthesized)
aaaaggtgatctggttctttcttcagagatttctacggggatagaaaatcgggagtctgccctcattaatctgtgattccacctcttgcaccaaatcaatatctatttgttgagcactta

SEQ ID NO: 18733 - DNA, 120 bp, Artificial Sequence
  ENSG00000019505_38 (sequence is synthesized)
ttgattaagaccttgcatatgtctgtccattttgatttgagatacaactttttgtgtgggttgaatgacaaatcactccaaacaaagctgggcacagagaatcagctaggagaccagtta

SEQ ID NO: 18734 - DNA, 120 bp, Artificial Sequence
  ENSG00000019505_39 (sequence is synthesized)
ttcagggtccatttctcttggatgtaaaggagtcctgggtaaaatgtggctgtaacctaaaccaactagtccttgtgatttgtttctgccctctgtgtttcctgttgtcaaatgctaagt

SEQ ID NO: 18735 - DNA, 120 bp, Artificial Sequence
  ENSG00000019505_40 (sequence is synthesized)
gtgtgttttgcagtcatgaactaaagcacaaaaagatgcatgagacattgtagtcatatgtctggtgtgacactttggagcaaaaaccttgcagtggtaaataaaaaatttccaacaggg

SEQ ID NO: 18736 - DNA, 120 bp, Artificial Sequence
  ENSG00000019505_41 (sequence is synthesized)
cctggagaaggcgaagcccagcttgctcgggtctgcacaacagagcatctgttacatatgaagtttacagaggtggtggccaaagggctttgtgatgtgactgctgaaataatgcagggg

SEQ ID NO: 18737 - DNA, 120 bp, Artificial Sequence
  ENSG00000019505_42 (sequence is synthesized)
ccacctacaagaaggaaatctctagcctaaaaaagcaactcagaatgtggagtgggatagcctgcaaatcacttgtcacttaaggtgacggcccagagaggtgaaatgacctgcccaaag

SEQ ID NO: 18738 - DNA, 120 bp, Artificial Sequence
  ENSG00000019549_0 (sequence is synthesized)
agttcgtaaaggagccgggtgacttcagaggcgccggcccgtccgtctgccgcacctgagcacggcccctgcccgagcctggcccgccgcgatgctgtagggaccgccgtgtcctcccgc

SEQ ID NO: 18739 - DNA, 120 bp, Artificial Sequence
  ENSG00000019549_1 (sequence is synthesized)
cggaccgttatccgcgccgggcgcccgccagacccgctggcaagatgccgcgctccttcctggtcaagaagcatttcaacgcctccaaaaagccaaactacagcgaactggacacacata

SEQ ID NO: 18740 - DNA, 120 bp, Artificial Sequence
  ENSG00000019549_2 (sequence is synthesized)
cagtgattatttccccgtatctctatgagagttactccatgcctgtcataccacaaccagagatcctcagctcaggagcatacagccccatcactgtgtggactaccgctgctccattcc

SEQ ID NO: 18741 - DNA, 120 bp, Artificial Sequence
  ENSG00000019549_3 (sequence is synthesized)
acgcccagctacccaatggcctctctcctctttccggatactcctcatctttggggcgagtgagtccccctcctccatctgacacctcctccaaggaccacagtggctcagaaagcccca

SEQ ID NO: 18742 - DNA, 120 bp, Artificial Sequence
  ENSG00000019549_4 (sequence is synthesized)
ttagtgatgaagaggaaagactacagtccaagctttcagacccccatgccattgaagctgaaaagtttcagtgcaatttatgcaataagacctattcaactttttctgggctggccaaac

SEQ ID NO: 18743 - DNA, 120 bp, Artificial Sequence
  ENSG00000019549_5 (sequence is synthesized)
ataagcagctgcactgcgatgcccagtctagaaaatctttcagctgtaaatactgtgacaaggaatatgtgagcctgggcgccctgaagatgcatattcggacccacacattaccttgtg

SEQ ID NO: 18744 - DNA, 120 bp, Artificial Sequence
  ENSG00000019549_6 (sequence is synthesized)
tttgcaagatctgcggcaaggcgttttccagaccctggttgcttcaaggacacattagaactcacacgggggagaagcctttttcttgccctcactgcaacagagcatttgcagacaggt

SEQ ID NO: 18745 - DNA, 120 bp, Artificial Sequence
  ENSG00000019549_7 (sequence is synthesized)
caaatctgagggctcatctgcagacccattctgatgtaaagaaataccagtgcaaaaactgctccaaaaccttctccagaatgtctctcctgcacaaacatgaggaatctggctgctgtg

SEQ ID NO: 18746 - DNA, 120 bp, Artificial Sequence
  ENSG00000019549_8 (sequence is synthesized)
tagcacactgagtgacgcaatcaatgtttactcgaacagaatgcatttcttcactccgaagccaaatgacaaataaagtccaaaggcattttctcctgtgctgaccaaccaaataatatg

SEQ ID NO: 18747 - DNA, 120 bp, Artificial Sequence
  ENSG00000019549_9 (sequence is synthesized)
cacacacacacacacacacccacagagagagagctgcaagagcatggaattcatgtgtttaaagataatcctttccatgtgaagtttaaaattactatatatttgctgatggctagattg

SEQ ID NO: 18748 - DNA, 120 bp, Artificial Sequence
  ENSG00000019549_10 (sequence is synthesized)
agagaataaaagacagtaacctttctcttcaaagataaaatgaaaagcacattgcatcttttcttcctaaaaaaatgcaaagatttacattgctgccaaatcatttcaactgaaaagaac

SEQ ID NO: 18749 - DNA, 120 bp, Artificial Sequence
  ENSG00000019549_11 (sequence is synthesized)
agtattgctttgtaatagagtctgtaataggatttcccataggaagagatctgccagacgcgaactcaggtgccttaaaaagtattccaagtttactccattacatgtcggttgtctggt

SEQ ID NO: 18750 - DNA, 120 bp, Artificial Sequence
  ENSG00000019549_12 (sequence is synthesized)
tgccattgttgaactaaagcctttttttgattacctgtagtgctttaaagtatatttttaaaagggaggaaaaaaataacaagaacaaaacacaggagaatgtattaaaagtatttttgt

SEQ ID NO: 18751 - DNA, 120 bp, Artificial Sequence
  ENSG00000019549_13 (sequence is synthesized)
tttgttttgtttttgccaattaacagtatgtgccttgggggaggagggaaagattagctttgaacattcctggcgcatgctccattgtcttactattttaaaacattttaataatttttg

SEQ ID NO: 18752 - DNA, 120 bp, Artificial Sequence
  ENSG00000019549_14 (sequence is synthesized)
aaaattaattaaagatgggaataagtgcaaaagaggattcttacaaattcattaatgtacttaaactatttcaaatgcataccacaaatgcaataatacaataccccttccaagtgcctt

SEQ ID NO: 18753 - DNA, 120 bp, Artificial Sequence
  ENSG00000019549_15 (sequence is synthesized)
tttaaattgtatagttgatgagtcaatgtaaatttgtgtttatttttatatgattgaatgagttctgtatgaaactgagatgttgtctatagctatgtctataaacaacctgaagacttg

SEQ ID NO: 18754 - DNA, 120 bp, Artificial Sequence
  ENSG00000019549_16 (sequence is synthesized)
tgaaatcaatgtttcttttttaaaaaacaattttcaagttttttttacaataaacagttttgatttaaaatctcgtttgtatactattttcagagactttacttgcttcatgattagtac

SEQ ID NO: 18755 - DNA, 120 bp, Artificial Sequence
  ENSG00000019549_17 (sequence is synthesized)
caaaccactgtacaaagaattgtttgttaacaagaaaaaaatgaataatgcttattatgcatctgaagtgttattttatgtgttagattataataaagtaagctgctagtattattttta

SEQ ID NO: 18756 - DNA, 120 bp, Artificial Sequence
  ENSG00000019549_18 (sequence is synthesized)
caatgaagccctgggctggctgttggatttgcatgaagttgtgacatagtgcttttaatgatggacagtcattgatagctacttcctgactactcaaaaagttgttagggcacaaagtgc

SEQ ID NO: 18757 - DNA, 120 bp, Artificial Sequence
  ENSG00000019549_19 (sequence is synthesized)
tccatttcttgctaacaacctctgctccagggactgcaaacagcatgtagactttggaaagtagattcagaaggtttggtctcaaagatcagttagaaaatcaggaaagatgtgcttgaa

SEQ ID NO: 18758 - DNA, 120 bp, Artificial Sequence
  ENSG00000019549_20 (sequence is synthesized)
tgtgtgttctgtgaaactgcccccagtaatcagcaaatacaaatgttgctatcttaatcaattgatttggttaatagatgaaggcttttcctacagttttctgttagttacattcttgct

SEQ ID NO: 18759 - DNA, 120 bp, Artificial Sequence
  ENSG00000019549_21 (sequence is synthesized)
ctgatatttgtcacccgtgggtgacttggatagttgaaactaaatttactttgcctctcttgctttgtttggggattttttgctccttaatttcttattcgtatcacagaattattctgc

SEQ ID NO: 18760 - DNA, 120 bp, Artificial Sequence
  ENSG00000019549_22 (sequence is synthesized)
atgttgggaggtgctcaacattagctgcatctgctaaagcagaaagctttaagaagtgaaagtccaagaactacgtaaattatttctgtatgattggcagcagtaataatattcgtgtat

SEQ ID NO: 18761 - DNA, 120 bp, Artificial Sequence
  ENSG00000019549_23 (sequence is synthesized)
gatttttaaatgcaatattcaagtttatcttaaaaattcaggtatttttaaaagtgtctattatgagggattttaatcaggttttgctgcttctcattatttaagcaaaatgtgattgac

SEQ ID NO: 18762 - DNA, 120 bp, Artificial Sequence
  ENSG00000019549_24 (sequence is synthesized)
ttttgttaacatgattttactttatgtttcctctaaaaacactgactgtctttctttttttctcccactccacccccaggggagaagcctttttcttgccctcactgcaacagagcattt

SEQ ID NO: 18763 - DNA, 120 bp, Artificial Sequence
  ENSG00000019549_25 (sequence is synthesized)
tctggaagccaggcgggcagggcagagaccccggctcctgcgcccctcctagctcccagagagcgtggatcgcgggcggggctcaccgagcgagctgtcccagagggaggagctgaaatc

SEQ ID NO: 18764 - DNA, 120 bp, Artificial Sequence
  ENSG00000019582_0 (sequence is synthesized)
agatgcacaggaggagaagcaggagctgtcgggaagatcagaagccagtcatggatgaccagcgcgaccttatctccaacaatgagcaactgcccatgctgggccggcgccctggggccc

SEQ ID NO: 18765 - DNA, 120 bp, Artificial Sequence
  ENSG00000019582_1 (sequence is synthesized)
cggagagcaagtgcagccgcggagccctgtacacaggcttttccatcctggtgactctgctcctcgctggccaggccaccaccgcctacttcctgtaccagcagcagggccggctggaca

SEQ ID NO: 18766 - DNA, 120 bp, Artificial Sequence
  ENSG00000019582_2 (sequence is synthesized)
aactgacagtcacctcccagaacctgcagctggagaacctgcgcatgaagcttcccaagcctcccaagcctgtgagcaagatgcgcatggccaccccgctgctgatgcaggcgctgccca

SEQ ID NO: 18767 - DNA, 120 bp, Artificial Sequence
  ENSG00000019582_3 (sequence is synthesized)
tgggagccctgccccaggggcccatgcagaatgccaccaagtatggcaacatgacagaggaccatgtgatgcacctgctccagaatgctgaccccctgaaggtgtacccgccactgaagg

SEQ ID NO: 18768 - DNA, 120 bp, Artificial Sequence
  ENSG00000019582_4 (sequence is synthesized)
ggagcttcccggagaacctgagacaccttaagaacaccatggagaccatagactggaaggtctttgagagctggatgcaccattggctcctgtttgaaatgagcaggcactccttggagc

SEQ ID NO: 18769 - DNA, 120 bp, Artificial Sequence
  ENSG00000019582_5 (sequence is synthesized)
aaaagcccactgacgctccaccgaaagtactgaccaagtgccaggaagaggtcagccacatccctgctgtccacccgggttcattcaggcccaagtgcgacgagaacggcaactatctgc

SEQ ID NO: 18770 - DNA, 120 bp, Artificial Sequence
  ENSG00000019582_6 (sequence is synthesized)
cactccagtgctatgggagcatcggctactgctggtgtgtcttccccaacggcacggaggtccccaacaccagaagccgcgggcaccataactgcagtgagtcactggaactggaggacc

SEQ ID NO: 18771 - DNA, 120 bp, Artificial Sequence
  ENSG00000019582_7 (sequence is synthesized)
cgtcttctgggctgggtgtgaccaagcaggatctgggcccagtccccatgtgagagcagcagaggcggtcttcaacatcctgccagccccacacagctacagctttcttgctcccttcag

SEQ ID NO: 18772 - DNA, 120 bp, Artificial Sequence
  ENSG00000019582_8 (sequence is synthesized)
cccccagcccctcccccatctcccaccctgtacctcatcccatgagaccctggtgcctggctctttcgtcacccttggacaagacaaaccaagtcggaacagcagataacaatgcagcaa

SEQ ID NO: 18773 - DNA, 120 bp, Artificial Sequence
  ENSG00000019582_9 (sequence is synthesized)
ggccctgctgcccaatctccatctgtcaacaggggcgtgaggtcccaggaagtggccaaaagctagacagatccccgttcctgacatcacagcagcctccaacacaaggctccaagacct

SEQ ID NO: 18774 - DNA, 120 bp, Artificial Sequence
  ENSG00000019582_10 (sequence is synthesized)
aggctcatggacgagatgggaaggcacagggagaagggataaccctacacccagaccccaggctggacatgctgactgtcctctcccctccagcctttggccttggcttttctagcctat

SEQ ID NO: 18775 - DNA, 120 bp, Artificial Sequence
  ENSG00000019582_11 (sequence is synthesized)
ttacctgcaggctgagccactctcttccctttccccagcatcactccccaaggaagagccaatgttttccacccataatcctttctgccgacccctagttccctctgctcagccaagctt

SEQ ID NO: 18776 - DNA, 120 bp, Artificial Sequence
  ENSG00000019582_12 (sequence is synthesized)
tttatcctaaagaggtaactaaagacgctaaatccagtcactgaggtgggagaacgcagcccaagtaacccacagagatgcctgcggggccaggcaggcctgggggggggcttgtagtct

SEQ ID NO: 18777 - DNA, 120 bp, Artificial Sequence
  ENSG00000019582_13 (sequence is synthesized)
ttggacacagacatacttgattacatgtttaacacacacgaacactctacttccaaaaagaaataggctcttgcctagtttaagcacaagctcttcttggtacagctttcattttcctat

SEQ ID NO: 18778 - DNA, 120 bp, Artificial Sequence
  ENSG00000019582_14 (sequence is synthesized)
gtccccaatttcatttctatactaagaacagtgtgaatgtgatgacagatggcaaccgacatagggcctccgtgtcaggatggacaggaagtaggggactgtggagaactgggtgcccat

SEQ ID NO: 18779 - DNA, 120 bp, Artificial Sequence
  ENSG00000019582_15 (sequence is synthesized)
gccttacctaaggggctgactgctactcagctctatctggttgctgccaggaggaagcacagcccccgttgccagatgttatctttttaagaggagccagaaatcaagaactgcagtgaa

SEQ ID NO: 18780 - DNA, 120 bp, Artificial Sequence
  ENSG00000019582_16 (sequence is synthesized)
atcaccccatttttaagtttaaagtcttgctgtgggtcaacaaggcccaatgaggacactactctgtagttctgttctagagcaacatgcttgagaggagagaggccagatggtggaggg

SEQ ID NO: 18781 - DNA, 120 bp, Artificial Sequence
  ENSG00000019582_17 (sequence is synthesized)
tctggccccgggccccgagtcaagggtgcagctggatgccaacctgggtctccgacacctccagccatgcattccttttctgcactgcctctggctgtttccagcatgaggctaaaagct

SEQ ID NO: 18782 - DNA, 120 bp, Artificial Sequence
  ENSG00000019582_18 (sequence is synthesized)
ctggagaccatctccaggacccctggtgttccacatggctctgggcccagggaagtgggcttctgcatttccaggctggagcagcagaccacctcctttgctatccctcccctccctcag

SEQ ID NO: 18783 - DNA, 120 bp, Artificial Sequence
  ENSG00000019582_19 (sequence is synthesized)
tccacacccaagacatcatcctgtctttcatgttcatccacttcttgccctcaccaccacagaaccatggtgagctcgatttgaggggcaactcacttccgattttcctagacctgctgt

SEQ ID NO: 18784 - DNA, 120 bp, Artificial Sequence
  ENSG00000019582_20 (sequence is synthesized)
gcctgccacagctgttcaccaggcacctccagggagcctgcccctagctcgaggcctaactcgaggattctcagccccttccatttcttgtctttgggtatttacatgacttactctggc

SEQ ID NO: 18785 - DNA, 120 bp, Artificial Sequence
  ENSG00000019582_21 (sequence is synthesized)
aacaggaaatcaaccatgaccatcctttagttccatcctttagtttagatgccacctcatccaggaagccttccccaccaattcggcactcaggcacttcactgctcactgcctgtccca

SEQ ID NO: 18786 - DNA, 120 bp, Artificial Sequence
  ENSG00000019582_22 (sequence is synthesized)
ctaaccacggtcacccatagcctcaacatgcaggcaagagggaatcccgagtgtcggcgagacagtcccttccaagaaacatgtgccccagatgcactgggagcttgcacccttcctcca

SEQ ID NO: 18787 - DNA, 120 bp, Artificial Sequence
  ENSG00000019582_23 (sequence is synthesized)
agtcttttattttttttttgagttattaaaaaaaaaacaaaaaacacaaccaaaagaactgacgagaggaagacaaagcctcgggatcagccagagaccgagcggcacgggatgaggcac

SEQ ID NO: 18788 - DNA, 120 bp, Artificial Sequence
  ENSG00000019582_24 (sequence is synthesized)
aggtcaggcctagctggatctgtggagcaaggtggtgggaagtcccgaggcctttgggcatgtggggtctgtggaaggagaggaggtcacttaaaaaaatacatatactgtacacatcta

SEQ ID NO: 18789 - DNA, 120 bp, Artificial Sequence
  ENSG00000019582_25 (sequence is synthesized)
gcctccagcactccctggtcccagcaccgcggaatctcccatcctctcagctctcacttctttctcacttctctctctctcctgtctgttccttcttggtttggctgtccccctcccctg

SEQ ID NO: 18790 - DNA, 120 bp, Artificial Sequence
  ENSG00000019582_26 (sequence is synthesized)
caggaccctggccgggccaagctccaaggcctgtatacctggctcatggcagactttcaacatgtgctctctggattactgaatacaagggtgacccttaaatgttatatgtagtctggc

SEQ ID NO: 18791 - DNA, 65 bp, Artificial Sequence
  ENSG00000019582_27 (sequence is synthesized)
gaatacaagggtgacccttaaatgttatatgtagtctggcctctgcatttttgagataaacaggc

SEQ ID NO: 18792 - DNA, 120 bp, Artificial Sequence
  ENSG00000019582_28 (sequence is synthesized)
acatcctgccccgcaaaaggcagcttcaccaaagtggggtatttccagcctttgtagctttcacttccacatctaccaagtgggcggagtggccttctgtggacgaatcagattcctctc

SEQ ID NO: 18793 - DNA, 120 bp, Artificial Sequence
  ENSG00000019582_29 (sequence is synthesized)
cagctgggcccactgtcctctccctccggtttggaattccagcccttcctcatctgggtctgataccctcctccctgggcaccggggccacacttaccctcgttcctgtccccacagctc

SEQ ID NO: 18794 - DNA, 120 bp, Artificial Sequence
  ENSG00000019582_30 (sequence is synthesized)
tggtcaccagcagctcatccccagcagggccagctcctttgtgggcaggtgaaggagtgtgacgctgggccactctccaacattcctgggatgtccatttcacagacgaaggaacagggt

SEQ ID NO: 18795 - DNA, 120 bp, Artificial Sequence
  ENSG00000019582_31 (sequence is synthesized)
tggggggctgtggggagttacacaaatccatgatggtcattattggacctgagcagggggcaggggagggtggacagtccttaactgctctgcaggtccaggatgttagaaaggggcagg

SEQ ID NO: 18796 - DNA, 120 bp, Artificial Sequence
  ENSG00000019582_32 (sequence is synthesized)
cagtgccaaggggaggggcagggaagagagcccacctggggaggggtcctgactgctgcgggagggacagtgcctgcctcaggaagaatcgggctccccaggtgtggagggcacaggtga

SEQ ID NO: 18797 - DNA, 120 bp, Artificial Sequence
  ENSG00000019582_33 (sequence is synthesized)
cggagagcccatgcagaatgccaccaagtatggcaacatgacagaggaccatgtgatgcacctgctccagcactgtgcaaggctctgggcccacaatggggagcaattggacccagctcc

SEQ ID NO: 18798 - DNA, 120 bp, Artificial Sequence
  ENSG00000019582_34 (sequence is synthesized)
gggggctttgtgaagaaagaggcagaggactcaacctagctgggggcagtcaaggttgggtcctcacctgctggagcaggtaagacctgaaagctgagcagccatccacagggaggacac

SEQ ID NO: 18799 - DNA, 120 bp, Artificial Sequence
  ENSG00000019582_35 (sequence is synthesized)
tggggcttgttggtagagctggcctggaatctggaactcgactcgcaacgctgcagtctcgtagctgaacagctggactacccttacccgtaccctcccctcccctcccatcatggctga

SEQ ID NO: 18800 - DNA, 120 bp, Artificial Sequence
  ENSG00000019991_0 (sequence is synthesized)
aggcactgactccgaacaggattctttcacccaggcatctcctccagagggatccgccagcccgtccagcagcaccatgtgggtgaccaaactcctgccagccctgctgctgcagcatgt

SEQ ID NO: 18801 - DNA, 120 bp, Artificial Sequence
  ENSG00000019991_1 (sequence is synthesized)
cctcctgcatctcctcctgctccccatcgccatcccctatgcagagggacaaaggaaaagaagaaatacaattcatgaattcaaaaaatcagcaaagactaccctaatcaaaatagatcc

SEQ ID NO: 18802 - DNA, 120 bp, Artificial Sequence
  ENSG00000019991_2 (sequence is synthesized)
agcactgaagataaaaaccaaaaaagtgaatactgcagaccaatgtgctaatagatgtactaggaataaaggacttccattcacttgcaaggcttttgtttttgataaagcaagaaaaca

SEQ ID NO: 18803 - DNA, 120 bp, Artificial Sequence
  ENSG00000019991_3 (sequence is synthesized)
atgcctctggttccccttcaatagcatgtcaagtggagtgaaaaaagaatttggccatgaatttgacctctatgaaaacaaagactacattagaaactgcatcattggtaaaggacgcag

SEQ ID NO: 18804 - DNA, 120 bp, Artificial Sequence
  ENSG00000019991_4 (sequence is synthesized)
ctacaagggaacagtatctatcactaagagtggcatcaaatgtcagccctggagttccatgataccacacgaacacagctttttgccttcgagctatcggggtaaagacctacaggaaaa

SEQ ID NO: 18805 - DNA, 120 bp, Artificial Sequence
  ENSG00000019991_5 (sequence is synthesized)
ctactgtcgaaatcctcgaggggaagaagggggaccctggtgtttcacaagcaatccagaggtacgctacgaagtctgtgacattcctcagtgttcagaagttgaatgcatgacctgcaa

SEQ ID NO: 18806 - DNA, 120 bp, Artificial Sequence
  ENSG00000019991_6 (sequence is synthesized)
tggggagagttatcgaggtctcatggatcatacagaatcaggcaagatttgtcagcgctgggatcatcagacaccacaccggcacaaattcttgcctgaaagatatcccgacaagggctt

SEQ ID NO: 18807 - DNA, 120 bp, Artificial Sequence
  ENSG00000019991_7 (sequence is synthesized)
tgatgataattattgccgcaatcccgatggccagccgaggccatggtgctatactcttgaccctcacacccgctgggagtactgtgcaattaaaacatgcgctgacaatactatgaatga

SEQ ID NO: 18808 - DNA, 120 bp, Artificial Sequence
  ENSG00000019991_8 (sequence is synthesized)
cactgatgttcctttggaaacaactgaatgcatccaaggtcaaggagaaggctacaggggcactgtcaataccatttggaatggaattccatgtcagcgttgggattctcagtatcctca

SEQ ID NO: 18809 - DNA, 120 bp, Artificial Sequence
  ENSG00000019991_9 (sequence is synthesized)
cgagcatgacatgactcctgaaaatttcaagtgcaaggacctacgagaaaattactgccgaaatccagatgggtctgaatcaccctggtgttttaccactgatccaaacatccgagttgg

SEQ ID NO: 18810 - DNA, 120 bp, Artificial Sequence
  ENSG00000019991_10 (sequence is synthesized)
ctactgctcccaaattccaaactgtgatatgtcacatggacaagattgttatcgtgggaatggcaaaaattatatgggcaacttatcccaaacaagatctggactaacatgttcaatgtg

SEQ ID NO: 18811 - DNA, 120 bp, Artificial Sequence
  ENSG00000019991_11 (sequence is synthesized)
ggacaagaacatggaagacttacatcgtcatatcttctgggaaccagatgcaagtaagctgaatgagaattactgccgaaatccagatgatgatgctcatggaccctggtgctacacggg

SEQ ID NO: 18812 - DNA, 120 bp, Artificial Sequence
  ENSG00000019991_12 (sequence is synthesized)
aaatccactcattccttgggattattgccctatttctcgttgtgaaggtgataccacacctacaatagtcaatttagaccatcccgtaatatcttgtgccaaaacgaaacaattgcgagt

SEQ ID NO: 18813 - DNA, 120 bp, Artificial Sequence
  ENSG00000019991_13 (sequence is synthesized)
tgtaaatgggattccaacacgaacaaacataggatggatggttagtttgagatacagaaataaacatatctgcggaggatcattgataaaggagagttgggttcttactgcacgacagtg

SEQ ID NO: 18814 - DNA, 120 bp, Artificial Sequence
  ENSG00000019991_14 (sequence is synthesized)
tttcccttctcgagacttgaaagattatgaagcttggcttggaattcatgatgtccacggaagaggagatgagaaatgcaaacaggttctcaatgtttcccagctggtatatggccctga

SEQ ID NO: 18815 - DNA, 120 bp, Artificial Sequence
  ENSG00000019991_15 (sequence is synthesized)
aggatcagatctggttttaatgaagcttgccaggcctgctgtcctggatgattttgttagtacgattgatttacctaattatggatgcacaattcctgaaaagaccagttgcagtgttta

SEQ ID NO: 18816 - DNA, 120 bp, Artificial Sequence
  ENSG00000019991_16 (sequence is synthesized)
tggctggggctacactggattgatcaactatgatggcctattacgagtggcacatctctatataatgggaaatgagaaatgcagccagcatcatcgagggaaggtgactctgaatgagtc

SEQ ID NO: 18817 - DNA, 120 bp, Artificial Sequence
  ENSG00000019991_17 (sequence is synthesized)
tgaaatatgtgctggggctgaaaagattggatcaggaccatgtgagggggattatggtggcccacttgtttgtgagcaacataaaatgagaatggttcttggtgtcattgttcctggtcg

SEQ ID NO: 18818 - DNA, 120 bp, Artificial Sequence
  ENSG00000019991_18 (sequence is synthesized)
tggatgtgccattccaaatcgtcctggtatttttgtccgagtagcatattatgcaaaatggatacacaaaattattttaacatataaggtaccacagtcatagctgaagtaagtgtgtct

SEQ ID NO: 18819 - DNA, 120 bp, Artificial Sequence
  ENSG00000019991_19 (sequence is synthesized)
gaagcacccaccaatacaactgtcttttacatgaagatttcagagaatgtggaatttaaaatgtcacttacaacaatcctaagacaactactggagagtcatgtttgttgaaattctcat

SEQ ID NO: 18820 - DNA, 120 bp, Artificial Sequence
  ENSG00000019991_20 (sequence is synthesized)
taatgtttatgggtgttttctgttgttttgtttgtcagtgttattttgtcaatgttgaagtgaattaaggtacatgcaagtgtaataacatatctcctgaagatacttgaatggattaaa

SEQ ID NO: 18821 - DNA, 120 bp, Artificial Sequence
  ENSG00000019991_21 (sequence is synthesized)
aaaacacacaggtatatttgctggatgataaagatttcatgggaaaaaaaatcaattaatctgtctaagctgctttctgatgttggtttcttaataatgagtaaaccacaaattaaatgt

SEQ ID NO: 18822 - DNA, 120 bp, Artificial Sequence
  ENSG00000019991_22 (sequence is synthesized)
tattttaacctcaccaaaacaatttataccttgtgtccctaaattgtagccctatattaaattatattacatttcatatgctatatgttatagttcattcatttctcttcaccatgtatc

SEQ ID NO: 18823 - DNA, 120 bp, Artificial Sequence
  ENSG00000019991_23 (sequence is synthesized)
ctgcaatactggtacacgaacacactttttacaaaaccacatacccatgtacacatgcctaggtacacatgtgcatgcactacagtttaaattatggtgtacctaatgtaacccctaaat

SEQ ID NO: 18824 - DNA, 120 bp, Artificial Sequence
  ENSG00000019991_24 (sequence is synthesized)
aatgatgcaagatcaaaatgattagctaattctccatacataatctgcagatgatcttctttggttggcatttcaggtgtggccatcacccagagttaaataacacctaatctaggtgtt

SEQ ID NO: 18825 - DNA, 120 bp, Artificial Sequence
  ENSG00000019991_25 (sequence is synthesized)
tacatgtattcattatcctagttatttcatgtagtttctaattcttaaaggaaagagggtaatagttctatttgtgtaatttgtttcctccaaacttaaggccacttatttacacaagat

SEQ ID NO: 18826 - DNA, 120 bp, Artificial Sequence
  ENSG00000019991_26 (sequence is synthesized)
atttgtagatctattttcctaaagcatttcttaagtgctcagatcagtatctaattgaagaagtttaaaagtgttttggtcattaaaaatgtacttaaataggttaaatctaagccttgc

SEQ ID NO: 18827 - DNA, 120 bp, Artificial Sequence
  ENSG00000019991_27 (sequence is synthesized)
tgctgtgattggcttctagctcactgcctttaaattttaaaaaatttaagaggaaaatttccaagtctccaaagttttataaatacccttcatcaagtcatgcattaaagtatatattgg

SEQ ID NO: 18828 - DNA, 120 bp, Artificial Sequence
  ENSG00000019991_28 (sequence is synthesized)
agaaaaaaataaaaatacttttctcaacctggaagattttagcctaataaagcttttttgaagtaaaagacaacttgtaaaaggaaagaaactagtttgtctcaactctgtattcattta

SEQ ID NO: 18829 - DNA, 120 bp, Artificial Sequence
  ENSG00000019991_29 (sequence is synthesized)
ttttttttttgaagtagagtggaatctgttgaatcagatattttatcaagatatgtttattttttcttatttcattttacaaagttcactcctaatgccatatgtaacagacatttaaat

SEQ ID NO: 18830 - DNA, 120 bp, Artificial Sequence
  ENSG00000019991_30 (sequence is synthesized)
tttgtgttctgtataacagccaaattatcatatttatcattgtatttgtcatgcttagctaaagatcatgtatttgttgagaaatagaataacaaaaagtaataggataggctttgaatt

SEQ ID NO: 18831 - DNA, 120 bp, Artificial Sequence
  ENSG00000019991_31 (sequence is synthesized)
tttgcagaaatcttcctgtacaaaacacctttaaaaataattttttgaatggtgtgaatccagtagtcccatttctctgacttagttttcttgagtgatttttatcaaggccaagtcccc

SEQ ID NO: 18832 - DNA, 120 bp, Artificial Sequence
  ENSG00000019991_32 (sequence is synthesized)
aaacaattccctaccagctctttagagtactgttcaatctggactaaaatggttttaagtttatggagagcttagtccacagaatatagggcggcgagtccagaaatgcttatacaattt

SEQ ID NO: 18833 - DNA, 120 bp, Artificial Sequence
  ENSG00000019991_33 (sequence is synthesized)
ttttttcataataagatatgtgctggcatcaagaaacttaaagtggaagcaaaaagacatccaactagttgctggtctctatcatcttatctgatggtatttctattttccttatataat

SEQ ID NO: 18834 - DNA, 120 bp, Artificial Sequence
  ENSG00000019991_34 (sequence is synthesized)
acaccattttagtaagaactcctagaaatttcaagagcatattgccaaaatataaagtatatttcatagtttcttctggctgaaccagtgaaattttattattgcatattaatgatattt

SEQ ID NO: 18835 - DNA, 120 bp, Artificial Sequence
  ENSG00000019991_35 (sequence is synthesized)
gtaaaacttttataaaaattgtcataattttaaatactcacattttaaaaatacttctttaatgactcttcctctaaatttcctggaaatacagataaagattagctagatacaagatac

SEQ ID NO: 18836 - DNA, 120 bp, Artificial Sequence
  ENSG00000019991_36 (sequence is synthesized)
agctaagtatttagacattttgaggctagtatttttcattttattaaaggctaaaaacaataccaccaataaatcatcaaacaaaccgtacaaagtaattctctctttgggaggctcctt

SEQ ID NO: 18837 - DNA, 120 bp, Artificial Sequence
  ENSG00000019991_37 (sequence is synthesized)
tcgtgatagagggacatgggtggaattgacaatgaaacttagatgaacaaggtccatgttattttaggtggtagaacagggtagagtcatgtcattatttgctggtggaagacactattt

SEQ ID NO: 18838 - DNA, 120 bp, Artificial Sequence
  ENSG00000019991_38 (sequence is synthesized)
accaggtgttctttgctgaataaatcattaaacatttttaaaaatccaacaatccactttattttgtgtcattgacaaaaggatcttttaaatcagaaggtttcaatgcaatttttggtt

SEQ ID NO: 18839 - DNA, 120 bp, Artificial Sequence
  ENSG00000019991_39 (sequence is synthesized)
tggctgtttgaataatggttatgtactgttataattgtagacattttctcacgtctaccaggaattgaagtgtaaaactaaaatatttttcataatgcctctgccgtgcagaaggaatga

SEQ ID NO: 18840 - DNA, 120 bp, Artificial Sequence
  ENSG00000019991_40 (sequence is synthesized)
taatccttttgtatacttctttaattttattgtaaaatgtgtaatgacttttacctatatgctgtgggcaggtcctcagtaaaatctattgagtcaatttctagtattaacaggcttttg

SEQ ID NO: 18841 - DNA, 120 bp, Artificial Sequence
  ENSG00000019991_41 (sequence is synthesized)
cttgctatctaagtgtttcaaattatgggaagtgtgagacactggaaggcaagaaaattaacaataatggcatgtgatagcaaaattgtatttcacttattcctgtgaatatttcttgtt

SEQ ID NO: 18842 - DNA, 120 bp, Artificial Sequence
  ENSG00000019991_42 (sequence is synthesized)
ggtaccaatggtactgtacaaagtgaatgttatagccacaacattctcttgaaaagaacactgtcaagaagtgggaaattgctgtcaggcatttcattgttgtttttaaacttttttaaa

SEQ ID NO: 18843 - DNA, 120 bp, Artificial Sequence
  ENSG00000019991_43 (sequence is synthesized)
atactggttttgcaatatagagatcatgtggtaaagaattttaataagatcttatactaaaaagccttaaatcaatttattgagattcaaaaaatactattataattaattacatcccat

SEQ ID NO: 18844 - DNA, 120 bp, Artificial Sequence
  ENSG00000019991_44 (sequence is synthesized)
ccatacatataggcaaactcatttaaaaaataaaactaattttggtaaaagtacatggcctttgtttttaaaatacataattttaaaataaatcacttgtcatgataaagtccaaaaaga

SEQ ID NO: 18845 - DNA, 120 bp, Artificial Sequence
  ENSG00000019991_45 (sequence is synthesized)
agttatcattcaacattcaactaaggttggagctaagaatttactaatacaaaaaaagttaaaattttttggaccatatatatcttgacagtgtaacttttaagtaggttcatttccatt

SEQ ID NO: 18846 - DNA, 120 bp, Artificial Sequence
  ENSG00000019991_46 (sequence is synthesized)
tgcacagaaagtttctgtctttaggaaactgaaaatgaaatactgtggatgctatgactgtttgtcttgtatgtaaataggaaattaataagctgcctattgagtggtatagctgtatgc

SEQ ID NO: 18847 - DNA, 120 bp, Artificial Sequence
  ENSG00000019991_47 (sequence is synthesized)
ctgtatgcttacccaaaaaagggaacactgtggttatgacttgtattataaactttctgtagttaataaagttgttatttttataaccatgattatattattattattaataaaatattt

SEQ ID NO: 18848 - DNA, 120 bp, Artificial Sequence
  ENSG00000019991_48 (sequence is synthesized)
aactgatggtgaacttcttctggtgagtgacagaggctgcagtgaagaataatgagtctaatagaagtttatcacagatgtctctaatctttatagctgatccctacctctctcgctgtc

SEQ ID NO: 18849 - DNA, 120 bp, Artificial Sequence
  ENSG00000019991_49 (sequence is synthesized)
tttgtacccagcctgcattctgtttcgatctgtcttttagcagtccatacaatcatttttctacatgctggcccttacctagcttttctgaatttacaataaaaactattttttaacgtg

SEQ ID NO: 18850 - DNA, 120 bp, Artificial Sequence
  ENSG00000019991_50 (sequence is synthesized)
attgggctcagccttgctcctcccttccttactcggataggagccactgggatctggagctccagcttccaaattgaagctggcctcaggccaggtgaccttttctttgattctttcacc

SEQ ID NO: 18851 - DNA, 120 bp, Artificial Sequence
  ENSG00000019991_51 (sequence is synthesized)
attgagcgaattggtcccctgcctgtgccttgatttagccattgggctcagccttgctcctcccttccttactcggataggagccactgggatctggagctccagcttccaaattgaagc

SEQ ID NO: 18852 - DNA, 120 bp, Artificial Sequence
  ENSG00000019991_52 (sequence is synthesized)
gaaatctagtatattgtcaagtaaaatcactttcttgtagatgatccttaggattttttttatatatgagccttaaaaacatttctccaatgtttatttttttaaaacattttgtattta

SEQ ID NO: 18853 - DNA, 120 bp, Artificial Sequence
  ENSG00000019991_53 (sequence is synthesized)
gtcagccctggagttccatgataccacacgaacacaggtaagaacagtatgaagaaaagagatgaagcctctgtcttttttacatgttaacagtctcatattagtccttcagaataattc

SEQ ID NO: 18854 - DNA, 120 bp, Artificial Sequence
  ENSG00000019991_54 (sequence is synthesized)
tacaatcctaaaataacttagccaacttgctgaattgtattacggcaaggtttatatgaattcatgactgatatttagcaaatgattaattaatatgttaataaaatgtagccaaaacaa

SEQ ID NO: 18855 - DNA, 120 bp, Artificial Sequence
  ENSG00000019991_55 (sequence is synthesized)
agtggtggtgatgactgccttgttgaatccactttttattctattccattttggggacacaattctgcaagatgattcttcattaggaaacagagatgagttattgaccaacacagaaag

SEQ ID NO: 18856 - DNA, 120 bp, Artificial Sequence
  ENSG00000019991_56 (sequence is synthesized)
agaaaacaacaattttcaaaattagttacttacaattatgtagaaatgcctctaaaacacagtattttccttatattacaaaaacaaaaattataattggttttgtcctcttttgagagt

SEQ ID NO: 18857 - DNA, 120 bp, Artificial Sequence
  ENSG00000019991_57 (sequence is synthesized)
ttgcatggtgttactccctgcatagtgaagaaaacattttatttaagtagatggatctaagtttttcatgaacaaaggaatgacatttgaaatcaatcctaccctagtccaggagaatgc

SEQ ID NO: 18858 - DNA, 120 bp, Artificial Sequence
  ENSG00000019991_58 (sequence is synthesized)
attagattaacctagtagaggtcttatttcaccctgagttttctatgatcgtgattctctgctggaggagtaattgtgaaatagatctctctgggaactggcttcctagtccaatcagct

SEQ ID NO: 18859 - DNA, 120 bp, Artificial Sequence
  ENSG00000019991_59 (sequence is synthesized)
cttttaccaatgaacacttccttgtgatatagatgtttatggccgagaggatccagtatattaataaaatccctttttgtattcaatgagggaaacacataattttcatcaattagcagc

SEQ ID NO: 18860 - DNA, 120 bp, Artificial Sequence
  ENSG00000019991_60 (sequence is synthesized)
ttattggaatatctgcatgatggtttaacacttttaagtgttgactaaagattaattttacagaaaatagaaaaagaaatatgtttctgtctggaggaatgatttattgttgacccctaa

SEQ ID NO: 18861 - DNA, 120 bp, Artificial Sequence
  ENSG00000019991_61 (sequence is synthesized)
attgaaatattttactagtggcttaatggaaagatgatgaaagatgatgaaattaatgtagaagcttaactagaaaatcaggtgacctgatatctacatctgtatccttcattggccacc

SEQ ID NO: 18862 - DNA, 120 bp, Artificial Sequence
  ENSG00000019991_62 (sequence is synthesized)
tatttgtgaaataataacgtaaacttcgtttaaaaggattcttcttcctgtctttgagaaagtacggcactgtgcagggggagaggttgattgtgaaaaatcagaggtagatgagaatct

SEQ ID NO: 18863 - DNA, 120 bp, Artificial Sequence
  ENSG00000019991_63 (sequence is synthesized)
tactgagggctgagggttctttaaccttggtggatctcaacattggttgcacattaaaatcacctgctgcaagcccttgacgaatcttacttagaagatgacaacacagaacaattaaat

SEQ ID NO: 18864 - DNA, 120 bp, Artificial Sequence
  ENSG00000019991_64 (sequence is synthesized)
cagaatctctggggagaatagggcaccagtattttttgagctcccaccatgattccaaagtgcagccaaatttgagaaccactgctaaaagctcaagcttcagattgaccagcttttcca

SEQ ID NO: 18865 - DNA, 120 bp, Artificial Sequence
  ENSG00000019991_65 (sequence is synthesized)
tctcacctatcgcctaaagaccaaattggataaatgtgttcattacgacagatgggtactatttaaagatgagtaaacacaatatacttaggctcgtcagactgagagttttaatcatca

SEQ ID NO: 18866 - DNA, 120 bp, Artificial Sequence
  ENSG00000019991_66 (sequence is synthesized)
ctggagtattagtcaaggcttatttcacacacaattttatcagaaaccaaagtagtttaaaacagctctccccttattagtaatgcattggagggtttactttaccatgtaccttgctga

SEQ ID NO: 18867 - DNA, 120 bp, Artificial Sequence
  ENSG00000019991_67 (sequence is synthesized)
gcactgtaccttgttaatctcatttacttgtaatgagaaccacacagcgggtagttttattggttctattttacctacatgacaaaactgaagcataaaaacacttagtaagttttcagt

SEQ ID NO: 18868 - DNA, 120 bp, Artificial Sequence
  ENSG00000019991_68 (sequence is synthesized)
gtcatgcacaactaggaagtgacatggccagaatataagcccagtcaccatcactctataacctgcgcttttaacaacttcagggcatgacacatttggccggtcagtagaacccatgct

SEQ ID NO: 18869 - DNA, 120 bp, Artificial Sequence
  ENSG00000019991_69 (sequence is synthesized)
atcaatcataacaaatatgttgttcgtgcaaatgcaactacaaataattatttaaacatttttatacaatgtttttaaaactgttggattatcaccagattaatgcaaaataacagagcg

SEQ ID NO: 18870 - DNA, 120 bp, Artificial Sequence
  ENSG00000019991_70 (sequence is synthesized)
ttacctactgtcttgagctcacatacctcaaaatctactactgtgtggcacctgaaaggagttgaatgaagcttagcctttcattagcaatgttaattctattcaaccagcacctgcttc

SEQ ID NO: 18871 - DNA, 120 bp, Artificial Sequence
  ENSG00000019991_71 (sequence is synthesized)
cacagaaattctgtccaaactatcatgaagtggtgtgacaagggtatatggacccagaagataatacaatataagaagggatcactggaagcttgaccccatgcacattttggtgaaaat

SEQ ID NO: 18872 - DNA, 120 bp, Artificial Sequence
  ENSG00000019991_72 (sequence is synthesized)
gtgcctagaatcaaatgtgacacgtaggctggaactgagtaccattcagaataggatctgaagagatcaaagcaatggagaccaccaaactgtcttgaaggcatgtctatggaccttaag

SEQ ID NO: 18873 - DNA, 120 bp, Artificial Sequence
  ENSG00000019991_73 (sequence is synthesized)
tccatgtctatgttttcagctcttctcacagcataaaagggcattgtccttacttttgcagtggaaaactgaatggctgacaagatggaagagtaaccatttcagcattgtatgtggttt

SEQ ID NO: 18874 - DNA, 120 bp, Artificial Sequence
  ENSG00000019991_74 (sequence is synthesized)
catttttcttagttatctggctactgaatagccggatttttcagttctgtcagaaactctaaatttccaaaaatctaagtgaaacatggatgaaactctgttagaaaattgttaggattt

SEQ ID NO: 18875 - DNA, 120 bp, Artificial Sequence
  ENSG00000019991_75 (sequence is synthesized)
tggagtatttggggagggggactactggaatgctgtccaagttttatactaagatatcttacctgtttgttattaaccaaatatttttaaaaatatttcctccataaatattcatttaat

SEQ ID NO: 18876 - DNA, 120 bp, Artificial Sequence
  ENSG00000019991_76 (sequence is synthesized)
attaggttgatatttatcacataaaaagtaaaggctactgttagctaattgtcacagagaaggatttgttttctgttgttagtgaatttgaaatccttgactttatgtgctacagccagt

SEQ ID NO: 18877 - DNA, 120 bp, Artificial Sequence
  ENSG00000019991_77 (sequence is synthesized)
tccatctctgtttgtaaattcttactttccattccatatcatattctgttccctataacctcttcattgttttcttttcttttaaaaataataaacttttctatgatcacgttttgaaca

SEQ ID NO: 18878 - DNA, 120 bp, Artificial Sequence
  ENSG00000019995_0 (sequence is synthesized)
gtgatggcctccctgaaattaaacatttctattagtggcttcccgttaatctcatccttcttagatcaaacctcgttatatctcctgcctatctcttttgcattccaaagttcagtttta

SEQ ID NO: 18879 - DNA, 120 bp, Artificial Sequence
  ENSG00000019995_1 (sequence is synthesized)
ttaaatcccagggtctaagattttttctttgagaatttatctccagtgtttctatggaaattaaaaaagaaaattaggataattcaatgtcgaaatgttgcatgcatcttttgagaaatt

SEQ ID NO: 18880 - DNA, 120 bp, Artificial Sequence
  ENSG00000019995_2 (sequence is synthesized)
tatattttgtaggttgaaggacttgctttttgggcagcgtatttttggaggtggaatgtagttattttaataaccatgtcctaattatttatagcttcctgcctgacacagctcacttca

SEQ ID NO: 18881 - DNA, 120 bp, Artificial Sequence
  ENSG00000019995_3 (sequence is synthesized)
agaagtgcacaatgtcagaacgtggaattaagtgggcttgtgaatattgtacgtatgaaaactggccatctgcaatcaagtgtactatgtgtcgtgcccaaagacctagtggaacaatta

SEQ ID NO: 18882 - DNA, 120 bp, Artificial Sequence
  ENSG00000019995_4 (sequence is synthesized)
ttacagaagatccatttaaaagtggttcaagtgatgttggtagagattgggatccttccagcaccgaaggaggaagtagtcctttgatatgtccagactctagtgcaagaccaagggtga

SEQ ID NO: 18883 - DNA, 120 bp, Artificial Sequence
  ENSG00000019995_5 (sequence is synthesized)
aatcttcgtatagcatggaaaatgcaaataagtggtcatgccacatgtgtacatatttgaactggccaagagcaatcagatgtacccagtgcttatcccaacgtaggaccaggagtccta

SEQ ID NO: 18884 - DNA, 120 bp, Artificial Sequence
  ENSG00000019995_6 (sequence is synthesized)
cagaatctcctcagtcctcaggatctggctcaagaccagttgctttttctgttgatccttgtgaggaatacaatgatagaaataaactgaacactaggacacagcactggacttgctctg

SEQ ID NO: 18885 - DNA, 120 bp, Artificial Sequence
  ENSG00000019995_7 (sequence is synthesized)
tttgcacatatgaaaactgggccaaggctaaaagatgtgttgtttgtgatcatcccagacctaataacattgaagcaatagaattggcagagactgaagaggcttcttcaataataaatg

SEQ ID NO: 18886 - DNA, 120 bp, Artificial Sequence
  ENSG00000019995_8 (sequence is synthesized)
agcaagacagagctcgatggaggggaagttgcagtagtggtaatagccaaaggagatcacctcctgctacgaagcgggactctgaagtgaaaatggattttcagaggattgaattggctg

SEQ ID NO: 18887 - DNA, 120 bp, Artificial Sequence
  ENSG00000019995_9 (sequence is synthesized)
gtgctgtgggaagcaaggaggaacttgaagtagactttaaaaaactaaagcaaattaaaaacaggatgaaaaagactgattggctcttcctcaatgcttgtgtgggggttgtagaaggtg

SEQ ID NO: 18888 - DNA, 120 bp, Artificial Sequence
  ENSG00000019995_10 (sequence is synthesized)
atttagctgccatagaagcatacaagtcatcaggaggagacattgcacgtcagctcaccgcagatgaagtacgcttgctgaatcgtccttctgcctttgatgttggctatactcttgtac

SEQ ID NO: 18889 - DNA, 120 bp, Artificial Sequence
  ENSG00000019995_11 (sequence is synthesized)
acttggctatacgttttcagaggcaggatatgctagcaatattgcttacagaggtgtctcaacaagcagcaaagtgtattccagcaatggtgtgtcctgaactgacagaacaaatccgga

SEQ ID NO: 18890 - DNA, 120 bp, Artificial Sequence
  ENSG00000019995_12 (sequence is synthesized)
gagagatagctgcctctcttcatcagagaaagggggattttgcttgctattttctgactgaccttgtaacatttacattgccagcagatattgaagatttgcccccaacagtccaagaaa

SEQ ID NO: 18891 - DNA, 120 bp, Artificial Sequence
  ENSG00000019995_13 (sequence is synthesized)
aattatttgatgaggtgcttgatagagacgttcaaaaagaattagaagaagaatctccaattattaactggtccttggaattggctacacgtttggacagtcgactgtatgcactttgga

SEQ ID NO: 18892 - DNA, 120 bp, Artificial Sequence
  ENSG00000019995_14 (sequence is synthesized)
accggactgcaggagactgcctacttgattcagttctacaagctacctggggcatctatgacaaggactcagtgcttcggaaagccctgcatgacagcctgcatgactgttcacattggt

SEQ ID NO: 18893 - DNA, 120 bp, Artificial Sequence
  ENSG00000019995_15 (sequence is synthesized)
tttacacacgctggaaagattgggaatcatggtattctcagagctttggtttacatttttccttgagagaagaacagtggcaagaagactgggcatttatactctctcttgctagtcagc

SEQ ID NO: 18894 - DNA, 120 bp, Artificial Sequence
  ENSG00000019995_16 (sequence is synthesized)
ctggagcaagcttggagcagacgcacatttttgtactggcacatattcttagacgaccaattatagtttatggagtaaaatattacaagagtttccggggagaaactttaggatatactc

SEQ ID NO: 18895 - DNA, 120 bp, Artificial Sequence
  ENSG00000019995_17 (sequence is synthesized)
ggtttcaaggtgtttatctgcctttgttgtgggaacagagtttttgttggaaaagtccgattgctctgggttatacgaggggccacttctctgctttggttgccatggaaaatgatggct

SEQ ID NO: 18896 - DNA, 120 bp, Artificial Sequence
  ENSG00000019995_18 (sequence is synthesized)
atggcaaccgaggtgctggtgctaatctcaataccgatgatgatgtcaccatcacatttttgcctctggttgacagtgaaaggaagctactccatgtgcacttcctttctgctcaggagc

SEQ ID NO: 18897 - DNA, 120 bp, Artificial Sequence
  ENSG00000019995_19 (sequence is synthesized)
taggtaatgaggaacagcaagaaaaactgctcagggagtggctggactgctgtgtgacggaggggggagttctggttgccatgcagaagagttctcggcggcgaaatcaccccctggtca

SEQ ID NO: 18898 - DNA, 120 bp, Artificial Sequence
  ENSG00000019995_20 (sequence is synthesized)
ctcagatggtagaaaaatggcttgaccgctaccgacagatccggccgtgtacatccctgtctgatggagaggaagatgaggatgatgaagatgaatgaaaaaaaaaatcaaacagcagaa

SEQ ID NO: 18899 - DNA, 120 bp, Artificial Sequence
  ENSG00000019995_21 (sequence is synthesized)
gaccaaggcatcagatctgtaatgaccctaaagttagtgtggtgctccaagcagagtcgacatcatggaatgaaccaaatctggcaggatctgctcggggaagtgttttcctggaccaca

SEQ ID NO: 18900 - DNA, 120 bp, Artificial Sequence
  ENSG00000019995_22 (sequence is synthesized)
cacaccttatggagataatgcctctgctgcgtgaggagacagagaactttagttggactacagtttgtaaaaaaaactaattttattaagacagaactttttttccttccaaattgtaaa

SEQ ID NO: 18901 - DNA, 120 bp, Artificial Sequence
  ENSG00000019995_23 (sequence is synthesized)
ttgtaccagcatcttcatattattgagaaaattttttccagcatgggcacttagaaaaagcacatggcaaatggctctttgttcctttcagatattatttcagtagaacctggcattcta

SEQ ID NO: 18902 - DNA, 120 bp, Artificial Sequence
  ENSG00000019995_24 (sequence is synthesized)
ctttcaccttaaaagatccatctaagtctcagatctggaaacgttttgtaccgattatccacagcaaaacaaaaataagcttttattttattaataatttcgttcctcttgtgcccaatc

SEQ ID NO: 18903 - DNA, 120 bp, Artificial Sequence
  ENSG00000019995_25 (sequence is synthesized)
aaatcttttaggaacaaactgcaagaaaagctaagaatgttttagagtgaactaaatacagacattgcttacttgttttgaagagggttttggttttggttattgtgtctttaagttttc

SEQ ID NO: 18904 - DNA, 120 bp, Artificial Sequence
  ENSG00000019995_26 (sequence is synthesized)
tgatatgccccctttcaatatttagatatttatttgttgggaagaataccttaaaatgagggttcttattccagattctgggcagtggtctgtgagtagtttttttcctggatgaaaagg

SEQ ID NO: 18905 - DNA, 120 bp, Artificial Sequence
  ENSG00000019995_27 (sequence is synthesized)
gagcaagcccacttgtcactaaatgaattgtgtgaaatgtgctcacttggactccatcaacaatgtgctgctcccagattgccatgccagagggtcttcggattcttccttctatcacct

SEQ ID NO: 18906 - DNA, 120 bp, Artificial Sequence
  ENSG00000019995_28 (sequence is synthesized)
ctgctctaagcaaatcttgttagaagggcatgcctttgcttaggcagattgggaataccaattcactacagaataaagattttaaaaatgcaataaggtggcaaatgcattgtatgaaga

SEQ ID NO: 18907 - DNA, 120 bp, Artificial Sequence
  ENSG00000019995_29 (sequence is synthesized)
atttctcagtgtttagtctgagaatttttgcatgttggttaattgtggccattctttaatttaaagttaaaactataatcttaggtagaaaaacttttttataagaagtattatttgacc

SEQ ID NO: 18908 - DNA, 120 bp, Artificial Sequence
  ENSG00000019995_30 (sequence is synthesized)
acttcaggtatacattcaatactgggtaaaaatttcagacctatctcaggaacacagaaatatttggtgtcctgataagcactttctagactattgatgtggccaggaatttggaaagac

SEQ ID NO: 18909 - DNA, 120 bp, Artificial Sequence
  ENSG00000019995_31 (sequence is synthesized)
cacacacacacacacacacacagttttttccttccctgtgatgaaaaaggctgtgaaaaccttaaagtatttgcttgcttcttgttttgtttagttgataatgaaatgtgtacaacctca

SEQ ID NO: 18910 - DNA, 120 bp, Artificial Sequence
  ENSG00000019995_32 (sequence is synthesized)
gtttagttgataatgaaatgtgtacaacctcaaatttgctgccagaatactaaaaatagaaaaatacccacaaaactgtcatgtctttagttctttccccccgaaaactcagtaaaaagg

SEQ ID NO: 18911 - DNA, 120 bp, Artificial Sequence
  ENSG00000019995_33 (sequence is synthesized)
tgttcccaggatgaaaagatcattttttgctgcatgctaaatcttgcaggaaaaatgattttttagtacgattctgtagaaatgaatctttgatataatgtaaatgctgctgtttgtttc

SEQ ID NO: 18912 - DNA, 120 bp, Artificial Sequence
  ENSG00000019995_34 (sequence is synthesized)
aagtggtgaatgtgttgttaaaaattggctgtttgctttcattttggccaataagtaatcaagtttgtagaaaatgttagcattctgactacttagcatctgtagtaatttctctatgta

SEQ ID NO: 18913 - DNA, 120 bp, Artificial Sequence
  ENSG00000019995_35 (sequence is synthesized)
tagggataattttttagtgggcagagatcctgttctagttgcctgttaagcaaaatctgccctcccaattgaaaaagccaaagagaattgttagagggaaaagcatgtagccattgcagt

SEQ ID NO: 18914 - DNA, 120 bp, Artificial Sequence
  ENSG00000019995_36 (sequence is synthesized)
ctgcattgcagccagcgttgtccagagtacacgctcagcacttagcttctactgtgtgttgtggtctggtgagtgttgtttcccctgagcgctctattatttatttatttattatcaatc

SEQ ID NO: 18915 - DNA, 120 bp, Artificial Sequence
  ENSG00000019995_37 (sequence is synthesized)
agtgaccctgaccacatagtgtgataggtgcagcattcttccctgtgggaaagaattaaagatggttccatttcctaggctacagacaggaatggggctctaaatggttttcatagactg

SEQ ID NO: 18916 - DNA, 120 bp, Artificial Sequence
  ENSG00000019995_38 (sequence is synthesized)
gctgttaaaggccaaaaattttggtaaatcaatgctatattatgctcttgaactattaaaacagccataattattgtcccaagatagaatatagtcctttttcaaagatgattatacgtg

SEQ ID NO: 18917 - DNA, 120 bp, Artificial Sequence
  ENSG00000019995_39 (sequence is synthesized)
gctaggtgacagacattaatgactgactctggagagtaagtcatacctgcactctgtggacttgatggttctttttctagagcaaacagagcgtggcattttgttttgacttgttcttcc

SEQ ID NO: 18918 - DNA, 120 bp, Artificial Sequence
  ENSG00000019995_40 (sequence is synthesized)
ttggggtcaaatttatatatatatatataaatttttgtttgggcgaccaagatctaataattaaaacccaggtggaccatggattcagacctgcctttttatgtttttgactcttaggtt

SEQ ID NO: 18919 - DNA, 120 bp, Artificial Sequence
  ENSG00000019995_41 (sequence is synthesized)
catcgtgtcccagacttcttcacatattcgtgaaggtaagatattctgtgtgcgcttggcctccttttcacgcatatttcattgcctctttgatgagtggttacgaagacgttaaactac

SEQ ID NO: 18920 - DNA, 120 bp, Artificial Sequence
  ENSG00000019995_42 (sequence is synthesized)
ctttttgttccctggggtaataggtcagtaactatgagcgccgtctctctccatgtgagcttgtgttaatagacacttttatggtagagttgggatggggccaccaccttaaaatgagtg

SEQ ID NO: 18921 - DNA, 120 bp, Artificial Sequence
  ENSG00000019995_43 (sequence is synthesized)
agcagacaaggccaggcaagccaaaggctttaagacaccatgattttcttgttttgttttaattgggaagggaagtataaggaagagctcagagggagtttcatacctggaattgttgga

SEQ ID NO: 18922 - DNA, 120 bp, Artificial Sequence
  ENSG00000019995_44 (sequence is synthesized)
cttaattgacacttgcaaatacttttagtataaaggtttaattctatttaaaaagaagatccattaaatcaagctcttaactcatgggactatttgcaacacttctttgtaaatatcatt

SEQ ID NO: 18923 - DNA, 120 bp, Artificial Sequence
  ENSG00000019995_45 (sequence is synthesized)
ttgtttgttaggttattggcaaaacagtttcaaggttcacttccctcccttgaaccaggtccaggtcattttgctttggggtagattaaagtcagaactctaaaagttgagcaactttgt

SEQ ID NO: 18924 - DNA, 120 bp, Artificial Sequence
  ENSG00000019995_46 (sequence is synthesized)
ttttttttgaattgatttagcactaacccaccattgcatcttaaggatggcatgacgtgataatgatggacttgtgtgaggttttgatttttcaattaaactttttgttatcacaggtaa

SEQ ID NO: 18925 - DNA, 120 bp, Artificial Sequence
  ENSG00000019995_47 (sequence is synthesized)
taaactaattgtggacagtggaaaataaccagtctcatcattagcgtttgaagtttgaaaatttggttgtcggtaaatcaaattctgactaaagatgttaaaggatgttacaaggtatct

SEQ ID NO: 18926 - DNA, 120 bp, Artificial Sequence
  ENSG00000019995_48 (sequence is synthesized)
gctagtggaagagggaggcatttttcattagaaaaatacattaccaaccagacaaaataaaattattaattgtttcacagactgcttaaagactgcattaaataaaaatgatcagaactt

SEQ ID NO: 18927 - DNA, 120 bp, Artificial Sequence
  ENSG00000020129_0 (sequence is synthesized)
agccaggagtgggcaacgcggcgtgagcagcggcccgaggctcccggagcatcgcgctgggagaagacttcgccgctcggggccgcagcctgtgtgatctcatcgccgccctgtcgtgac

SEQ ID NO: 18928 - DNA, 120 bp, Artificial Sequence
  ENSG00000020129_1 (sequence is synthesized)
ttcatcaatgtcgtgttgtgacctggctgcggcgggacagttgggcaaggcgagcatcatggcctcggattgcgagccagctctgaaccaggcagagggccgaaaccccaccctggagcg

SEQ ID NO: 18929 - DNA, 120 bp, Artificial Sequence
  ENSG00000020129_2 (sequence is synthesized)
ctacctgggagccctccgtgaggccaagaatgacagcgagcagtttgcagccctgctgctagtgaccaaggcagtcaaagcaggtgacatagatgccaaaactcggcggcggatcttcga

SEQ ID NO: 18930 - DNA, 120 bp, Artificial Sequence
  ENSG00000020129_3 (sequence is synthesized)
tgctgtcggcttcaccttccccaatcgtctcctgaccaccaaggaggcgccggatggctgccctgaccatgttctgcgggctttgggtgtggccctgctggcctgcttctgcagtgaccc

SEQ ID NO: 18931 - DNA, 120 bp, Artificial Sequence
  ENSG00000020129_4 (sequence is synthesized)
tgaactggccgcccatccccaagtcctgaacaagattcccattcttagcaccttcctcacagcccggggggacccggacgatgctgcccgccgctccatgattgatgacacctaccagtg

SEQ ID NO: 18932 - DNA, 120 bp, Artificial Sequence
  ENSG00000020129_5 (sequence is synthesized)
cctgacggctgtagcaggcacacccagagggcctcggcacctcattgctggtggcaccgtgtctgccctatgccaggcatacctggggcacggctatggctttgaccaggccctggcact

SEQ ID NO: 18933 - DNA, 120 bp, Artificial Sequence
  ENSG00000020129_6 (sequence is synthesized)
cctggtggggctgctggctgctgccgagacacagtgctggaaggaggcggagcccgacctgctggccgtgttgcggggcctcagtgaggatttccagaaagctgaggatgccagcaagtt

SEQ ID NO: 18934 - DNA, 120 bp, Artificial Sequence
  ENSG00000020129_7 (sequence is synthesized)
tgagctctgccagctgctgcccctctttttgcccccgacaaccgtgccccctgaatgctaccgggatctgcaggccgggctggcacgcatcctgggaagcaagctgagctcctggcagcg

SEQ ID NO: 18935 - DNA, 120 bp, Artificial Sequence
  ENSG00000020129_8 (sequence is synthesized)
caaccctgcactgaagctggcagcccgcctggcacacgcctgcggctccgactggatcccggcgggcagctccgggagcaagttcctggccctgctggtgaatctggcgtgcgtggaagt

SEQ ID NO: 18936 - DNA, 120 bp, Artificial Sequence
  ENSG00000020129_9 (sequence is synthesized)
gcggctggcactggaggagacgggcacggaggtgaaagaggatgtggtgaccgcctgctatgccctcatggagttggggatccaggaatgcactcgctgtgagcagtcactgcttaagga

SEQ ID NO: 18937 - DNA, 120 bp, Artificial Sequence
  ENSG00000020129_10 (sequence is synthesized)
gccacagaaggtgcagctcgtgagcgtcatgaaggaggccataggggctgttatccactacctgctgcaggtggggtcagagaagcagaaggagccctttgtgtttgcctcggtgcggat

SEQ ID NO: 18938 - DNA, 120 bp, Artificial Sequence
  ENSG00000020129_11 (sequence is synthesized)
cctgggtgcctggctggccgaggagacctcatccttgcgtaaggaggtgtgccagctgctgcccttcctcgtccgctatgccaagaccctctacgaggaggccgaggaggccaatgacct

SEQ ID NO: 18939 - DNA, 120 bp, Artificial Sequence
  ENSG00000020129_12 (sequence is synthesized)
ttcccagcaggtggccaacctggccatctcccccaccaccccagggcccacctggccaggagacgctctccggctcctcctgcctggctggtgccacctgaccgttgaagatgggccccg

SEQ ID NO: 18940 - DNA, 120 bp, Artificial Sequence
  ENSG00000020129_13 (sequence is synthesized)
ggagatcctgatcaaggaaggggccccctcgcttctgtgcaagtatttcctgcagcagtgggaactcacatcccctggccacgacacctcggtgctgcctgacagcgtggagattggcct

SEQ ID NO: 18941 - DNA, 120 bp, Artificial Sequence
  ENSG00000020129_14 (sequence is synthesized)
acatctctaatgaacaccctcatgacgtcgctaccagcactagtgcagcaacagggaaggctgcttctggctgctaatgtggccaccctggggctcctcatggcccggctccttagcacc

SEQ ID NO: 18942 - DNA, 120 bp, Artificial Sequence
  ENSG00000020129_15 (sequence is synthesized)
tctccagctcttcagggaacaccagcatcccgagggttcttcgcagctgccatcctcttcctatcacagtcccacgtggcgcgggccaccccgggctcagaccaggcagtgctagccctg

SEQ ID NO: 18943 - DNA, 120 bp, Artificial Sequence
  ENSG00000020129_16 (sequence is synthesized)
tcccctgagtatgagggcatctgggccgacctgcaggagctctggttcctgggcatgcaggccttcaccggctgtgtgcctctgctgccctggctggcccccgctgccctgcgctcccgc

SEQ ID NO: 18944 - DNA, 120 bp, Artificial Sequence
  ENSG00000020129_17 (sequence is synthesized)
tggccgcaggagctgctccagctgctaggcagtgtcagccccaactctgtcaagcccgagatggtggccgcctatcagggtgtcctggtggagctggcgcgggccaaccggctgtgccgg

SEQ ID NO: 18945 - DNA, 120 bp, Artificial Sequence
  ENSG00000020129_18 (sequence is synthesized)
gaggccatgaggctgcaggcgggcgaggagacggccagccactaccgcatggctgccttggagcagtgcctgtcagagccctgaggggtgtccaccggggacagacccaggggcgggcag

SEQ ID NO: 18946 - DNA, 120 bp, Artificial Sequence
  ENSG00000020129_19 (sequence is synthesized)
agagggaaggagggaggaggcatcttccctgaagcccccaatctggcccccccctccccagacttcctccccaaaacaccccagctttctggcttttctgagggcaagggcatggtgccc

SEQ ID NO: 18947 - DNA, 120 bp, Artificial Sequence
  ENSG00000020129_20 (sequence is synthesized)
acccctcaagtgtaaggaactgcgttccgcccctcaggcccccatgggggcagggatcggcttggaaatcaacgtggttgtccccgccaggccggggaaggttggagcagcccccaggga

SEQ ID NO: 18948 - DNA, 120 bp, Artificial Sequence
  ENSG00000020129_21 (sequence is synthesized)
ggggggcactaggtgtcattgtgcccgatgtctggctcccctgcaggagggaggctccagggtaagacagggctggcaggagcagactgcctcagcccatgtgccctgccggccagggcg

SEQ ID NO: 18949 - DNA, 120 bp, Artificial Sequence
  ENSG00000020129_22 (sequence is synthesized)
tgggctcccctcggctgtggtgcctcctctggccccccaggtccacgtcctttaaattggccctttggctcttgcccttggctcccttgggcagacagcaggcttaggccattgatatcg

SEQ ID NO: 18950 - DNA, 120 bp, Artificial Sequence
  ENSG00000020129_23 (sequence is synthesized)
cagttcttcctatcagcttcagtgacccagggtctgaactgcctccatcctagggcaacctggggcagacaggcctggtggggggtggggaaacctccttccacctgagcttgcttgaag

SEQ ID NO: 18951 - DNA, 120 bp, Artificial Sequence
  ENSG00000020129_24 (sequence is synthesized)
ggacccagagtctttgggcccagatctttaaacctttgtgtcgtgttgcagcagagtgacgatgggggttggggggttatttattttgcctgtccttatccctgcttggacacctgagca

SEQ ID NO: 18952 - DNA, 120 bp, Artificial Sequence
  ENSG00000020129_25 (sequence is synthesized)
tctgattcctgtccccctggtgccatctggcctggctggagccaggaacaggagggacacttccccagaatccgcatgtttccccagtgattacactccactgccaccgtggtgcctggc

SEQ ID NO: 18953 - DNA, 120 bp, Artificial Sequence
  ENSG00000020129_26 (sequence is synthesized)
tgcctggctttaactcccacccctgctatgactcctctctgcagagacgcgactggcggctccagcagggactacctttcttataaacccagggggaccacacacacacacacacacaca

SEQ ID NO: 18954 - DNA, 120 bp, Artificial Sequence
  ENSG00000020129_27 (sequence is synthesized)
cacacacacacacacacacactcttgatcccttgcttccctcccccagtgcgttctgtgatcgccaagttcaaagctgtgcacatgtggacactcaataaatgttcattggtgacgagaa

SEQ ID NO: 18955 - DNA, 120 bp, Artificial Sequence
  ENSG00000020129_28 (sequence is synthesized)
agtgggcaacgcggcgtgagcagcggcccgaggctcccggagcatcgcgctgggagaagacttcgccgctcggggccgcagcctggtgagctcagcccccttcgggccctcccctgcatc

SEQ ID NO: 18956 - DNA, 120 bp, Artificial Sequence
  ENSG00000020129_29 (sequence is synthesized)
ccagccggggcctctccgagccggcgctgatcgatgccgacacaccccggggaccctatcgcgactccatcgcgccatatcgcgacaccatcgtgccctgtcgagactccattttgtcac

SEQ ID NO: 18957 - DNA, 120 bp, Artificial Sequence
  ENSG00000020129_30 (sequence is synthesized)
agcccttttcaatatatatcttttttttttttaatttgccctgtcatctttgggggctgtctcccatgtcgtgattttgacgtgatctctccgtgacatcaccgcgccatcgtgaagtgt

SEQ ID NO: 18958 - DNA, 120 bp, Artificial Sequence
  ENSG00000020129_31 (sequence is synthesized)
cctcccccgggaagggcaatgccggccgcgagaccaagggggaggaggggcagtgctgggcgggtaaaactacgcacaagcgaaggaatctgggcccccagcctctcgccgcccgctctc

SEQ ID NO: 18959 - DNA, 120 bp, Artificial Sequence
  ENSG00000020129_32 (sequence is synthesized)
cagaggcagtctgcaccttgcctccttcgctcgagccccagcccccagactcgggcaatacccacaagcaagatggcggcaacggcggcaccccctactgcttagcaccctgacttgcca

SEQ ID NO: 18960 - DNA, 120 bp, Artificial Sequence
  ENSG00000020129_33 (sequence is synthesized)
ttggccagagcccggagtgaagcagccgcggattcgtcaagagcggtgcgggggtgggggtggagctgcagcagcctggagccaggagtgggcaacgcggcgtgagcagcggcccgaggc

SEQ ID NO: 18961 - DNA, 120 bp, Artificial Sequence
  ENSG00000020129_34 (sequence is synthesized)
ggtggtgaccgccaggaaccctcctccccttctcatctccccatctcagcagccctgcttcgattatccggcttttggattctccgttgtcctgggaactatccgggaccccctcttgct

SEQ ID NO: 18962 - DNA, 120 bp, Artificial Sequence
  ENSG00000020129_35 (sequence is synthesized)
tctccagcccctgccggcatccacaggctggtagcgggacggggagggcgagaagagggagcgcaaggggttaattctgctgctgccgccgccgctgctgctgctgctgcagcctctacc

SEQ ID NO: 18963 - DNA, 120 bp, Artificial Sequence
  ENSG00000020129_36 (sequence is synthesized)
ctgagagccctggctggaggggtggggtccccaaaggggcctccaagccttccctgttgagcgtcttgtattctcacttctgaagcgtatctctgcctctgaagaagggaggggaaagga

SEQ ID NO: 18964 - DNA, 120 bp, Artificial Sequence
  ENSG00000020129_37 (sequence is synthesized)
ggttctgattttacagacaaagcaactttggcatggataagtgattggctcaaggtgttgccgctagtcagtgccagagccaggactccacacaggccatccgactccccagcccacatc

SEQ ID NO: 18965 - DNA, 120 bp, Artificial Sequence
  ENSG00000020129_38 (sequence is synthesized)
tttcacttgtacagcagattgccaaactcatgttgatgtggccaggccttgtgggggctctggtgctctcaagtacagatgaaacactgcacccccgcccccatgtcactgggttgctgc

SEQ ID NO: 18966 - DNA, 120 bp, Artificial Sequence
  ENSG00000020129_39 (sequence is synthesized)
caagtggccctgccatatcctcccatttttaaagaagtcaggaatcctaatttgtatgtgaaacccaacttttgaatgtcagtaactatctttaattaaataactactgatccaacaaaa

SEQ ID NO: 18967 - DNA, 80 bp, Artificial Sequence
  ENSG00000020181_0 (sequence is synthesized)
atccatggcacggagcggcggcggcggcggcagcaggagcccggcgcgatccgctaggtcccagcccagcgcccagcgag

SEQ ID NO: 18968 - DNA, 80 bp, Artificial Sequence
  ENSG00000020181_1 (sequence is synthesized)
ccgggcgctgagactccggccgcgcagctgggagctgcccgcgctgcgctgacagccgcgccgacgtcctccccgccggg

SEQ ID NO: 18969 - DNA, 80 bp, Artificial Sequence
  ENSG00000020181_2 (sequence is synthesized)
ctccgcccagggcccccctccacgccctcgggagccccgggcccccgctgagcactcctcccgcacgcctgggtccctcc

SEQ ID NO: 18970 - DNA, 80 bp, Artificial Sequence
  ENSG00000020181_3 (sequence is synthesized)
acgcaggatgcggggggcgcccgcgcgcctgctgctgccgctgctgccgtggctcctgctgctcctggcgcccgaggctc

SEQ ID NO: 18971 - DNA, 120 bp, Artificial Sequence
  ENSG00000020181_4 (sequence is synthesized)
cgaggctcggggcgcgcccggctgcccgctatccatccgcagctgcaagtgctcgggggagcggcccaaggggctgagcggcggcgtccctggcccggctcggcggagggtggtgtgcag

SEQ ID NO: 18972 - DNA, 120 bp, Artificial Sequence
  ENSG00000020181_5 (sequence is synthesized)
acctcccggagcctcccgagcccggccttctgcctaacggcaccgttaccctgctcttgagcaataacaagatcacggggctccgcaatggctccttcctgggactgtcactgctggaga

SEQ ID NO: 18973 - DNA, 120 bp, Artificial Sequence
  ENSG00000020181_6 (sequence is synthesized)
agctggacctgaggaacaacatcatcagcacagtgcagccgggcgccttcctgggcctgggggagctgaagcgtttagatctctccaacaaccggattggctgtctcacctccgagacct

SEQ ID NO: 18974 - DNA, 120 bp, Artificial Sequence
  ENSG00000020181_7 (sequence is synthesized)
tccagggcctccccaggcttctccgactaaacatatctggaaacatcttctccagtctgcaacctggggtctttgatgagctgccagcccttaaggttgtggacttgggcaccgagttcc

SEQ ID NO: 18975 - DNA, 120 bp, Artificial Sequence
  ENSG00000020181_8 (sequence is synthesized)
tgacctgtgactgccacctgcgctggctgctgccctgggcccagaatcgctccctgcagctgtcggaacacacgctctgtgcttaccccagtgccctgcatgctcaggccctgggcagcc

SEQ ID NO: 18976 - DNA, 120 bp, Artificial Sequence
  ENSG00000020181_9 (sequence is synthesized)
tccaggaggcccagctctgctgcgagggggccctggagctgcacacacaccacctcatcccgtccctacgccaagtggtgttccagggggatcggctgcccttccagtgctctgccagct

SEQ ID NO: 18977 - DNA, 120 bp, Artificial Sequence
  ENSG00000020181_10 (sequence is synthesized)
acctgggcaacgacacccgcatccgctggtaccacaaccgagcccctgtggagggtgatgagcaggcgggcatcctcctggccgagagcctcatccacgactgcaccttcatcaccagtg

SEQ ID NO: 18978 - DNA, 120 bp, Artificial Sequence
  ENSG00000020181_11 (sequence is synthesized)
agctgacgctgtctcacatcggcgtgtgggcctcaggcgagtgggagtgcaccgtgtccatggcccaaggcaacgccagcaagaaggtggagatcgtggtgctggagacctctgcctcct

SEQ ID NO: 18979 - DNA, 120 bp, Artificial Sequence
  ENSG00000020181_12 (sequence is synthesized)
actgccccgccgagcgtgttgccaacaaccgcggggacttcaggtggccccgaactctggctggcatcacagcctaccagtcctgcctgcagtatcccttcacctcagtgcccctgggcg

SEQ ID NO: 18980 - DNA, 120 bp, Artificial Sequence
  ENSG00000020181_13 (sequence is synthesized)
ggggtgccccgggcacccgagcctcccgccggtgtgaccgtgccggccgctgggagccaggggactactcccactgtctctacaccaacgacatcaccagggtgctgtacaccttcgtgc

SEQ ID NO: 18981 - DNA, 120 bp, Artificial Sequence
  ENSG00000020181_14 (sequence is synthesized)
tgatgcccatcaatgcctccaatgcgctgaccctggctcaccagctgcgcgtgtacacagccgaggccgctagcttttcagacatgatggatgtagtctatgtggctcagatgatccaga

SEQ ID NO: 18982 - DNA, 120 bp, Artificial Sequence
  ENSG00000020181_15 (sequence is synthesized)
aatttttgggttatgtcgaccagatcaaagagctggtagaggtgatggtggacatggccagcaacctgatgctggtggacgagcacctgctgtggctggcccagcgcgaggacaaggcct

SEQ ID NO: 18983 - DNA, 120 bp, Artificial Sequence
  ENSG00000020181_16 (sequence is synthesized)
gcagccgcatcgtgggtgccctggagcgcattgggggggccgccctcagcccccatgcccagcacatctcagtgaatgcgaggaacgtggcattggaggcctacctcatcaagccgcaca

SEQ ID NO: 18984 - DNA, 120 bp, Artificial Sequence
  ENSG00000020181_17 (sequence is synthesized)
gctacgtgggcctgacctgcacagccttccagaggagggagggaggggtgccgggcacacggccaggaagccctggccagaaccccccacctgagcccgagcccccagctgaccagcagc

SEQ ID NO: 18985 - DNA, 120 bp, Artificial Sequence
  ENSG00000020181_18 (sequence is synthesized)
tccgcttccgctgcaccaccgggaggcccaatgtttctctgtcgtccttccacatcaagaacagcgtggccctggcctccatccagctgcccccgagtctattctcatcccttccggctg

SEQ ID NO: 18986 - DNA, 120 bp, Artificial Sequence
  ENSG00000020181_19 (sequence is synthesized)
ccctggctcccccggtgcccccagactgcaccctgcaactgctcgtcttccgaaatggccgcctcttccacagccacagcaacacctcccgccctggagctgctgggcctggcaagaggc

SEQ ID NO: 18987 - DNA, 120 bp, Artificial Sequence
  ENSG00000020181_20 (sequence is synthesized)
gtggcgtggccacccccgtcatcttcgcaggaaccagtggctgtggcgtgggaaacctgacagagccagtggccgtttcgctgcggcactgggctgagggagccgaacctgtggccgctt

SEQ ID NO: 18988 - DNA, 120 bp, Artificial Sequence
  ENSG00000020181_21 (sequence is synthesized)
ggtggagccaggaggggcccggggaggctgggggctggacctcggagggctgccagctccgctccagccagcccaatgtcagcgccctgcactgccagcacttgggcaatgtggccgtgc

SEQ ID NO: 18989 - DNA, 120 bp, Artificial Sequence
  ENSG00000020181_22 (sequence is synthesized)
tcatggagctgagcgcctttcccagggaggtggggggcgccggggcagggctgcaccccgtggtatacccctgcacggccttgctgctgctctgcctcttcgccaccatcatcacctaca

SEQ ID NO: 18990 - DNA, 120 bp, Artificial Sequence
  ENSG00000020181_23 (sequence is synthesized)
tcctcaaccacagctccatccgtgtgtcccggaaaggctggcacatgctgctgaacttgtgcttccacatagccatgacctctgctgtctttgcggggggcatcacactcaccaactacc

SEQ ID NO: 18991 - DNA, 120 bp, Artificial Sequence
  ENSG00000020181_24 (sequence is synthesized)
agatggtctgccaggcggtgggcatcaccctgcactactcctccctatccacgctgctctggatgggcgtgaaggcgcgagtgctccataaggagctcacctggagggcaccccctccgc

SEQ ID NO: 18992 - DNA, 120 bp, Artificial Sequence
  ENSG00000020181_25 (sequence is synthesized)
aagaaggggaccccgctctgcctactcccagtcctatgctccggttctatttgatcgctggagggattccactcattatctgtggcatcacagctgcagtcaacatccacaactaccggg

SEQ ID NO: 18993 - DNA, 120 bp, Artificial Sequence
  ENSG00000020181_26 (sequence is synthesized)
accacagcccctactgctggctggtgtggcgtccaagccttggcgccttctacatccctgtggctttgattctgctcatcacctggatctatttcctgtgcgccgggctacgcttacggg

SEQ ID NO: 18994 - DNA, 120 bp, Artificial Sequence
  ENSG00000020181_27 (sequence is synthesized)
gtcctctggcacagaaccccaaggcgggcaacagcagggcctccctggaggcaggggaggagctgaggggttccaccaggctcaggggcagcggccccctcctgagtgactcaggttccc

SEQ ID NO: 18995 - DNA, 120 bp, Artificial Sequence
  ENSG00000020181_28 (sequence is synthesized)
ttcctgtacttggccatgtgggcctgcggggctctggcagtgtcccagcgctggctgccccgggtggtgtgcagctgcttgtacggggtggcagcctccgccctgggcctcttcgtcttc

SEQ ID NO: 18996 - DNA, 120 bp, Artificial Sequence
  ENSG00000020181_29 (sequence is synthesized)
ctcttcgtcttcactcaccactgtgccaggcggagggacgtgagagcctcgtggcgcgcctgctgcccccctgcctctcccgcggccccccatgccccgccccgggccctgcccgccgcc

SEQ ID NO: 18997 - DNA, 120 bp, Artificial Sequence
  ENSG00000020181_30 (sequence is synthesized)
tccccggtgttcggggagggccccccctccctcaagtcctccccaagcggcagcagcggccatccgctggctctgggcccctgcaagctcaccaacctgcagctggcccagagtcaggtg

SEQ ID NO: 18998 - DNA, 120 bp, Artificial Sequence
  ENSG00000020181_31 (sequence is synthesized)
ggtgtgcgaggcgggggcggcggccggcggggaaggagagccggagccggcgggcacccggggaaacctcgcccaccgccaccccaacaacgtgcaccacgggcgtcgggcgcacaagag

SEQ ID NO: 18999 - DNA, 120 bp, Artificial Sequence
  ENSG00000020181_32 (sequence is synthesized)
gccaagggacaccgcgcgggggaggcctgcggcaagaaccggctcaaggccctgcgcgggggcgcggcgggggcgctggagctgctgtccagcgagagcggcagtctgcacaacagcccc

SEQ ID NO: 19000 - DNA, 120 bp, Artificial Sequence
  ENSG00000020181_33 (sequence is synthesized)
accgacagctacctgggcagcagccgcaacagcccgggcgccggcctgcagctggaaggcgagcccatgctcacgccgtccgagggcagcgacaccagcgccgcgccgctttctgaggcg

SEQ ID NO: 19001 - DNA, 120 bp, Artificial Sequence
  ENSG00000020181_34 (sequence is synthesized)
ggccgggcaggccagcgccgcagcgccagccgcgacagtctcaagggcggcggcgcgctggagaaggagagccatcgccgctcgtacccgctcaacgccgccagcctaaacggcgccccc

SEQ ID NO: 19002 - DNA, 120 bp, Artificial Sequence
  ENSG00000020181_35 (sequence is synthesized)
aaggggggcaagtacgacgacgtcaccctgatgggcgcggaggtagccagcggcggctgcatgaagaccggactctggaagagcgaaactaccgtctaaggtggggcgggcgacgcggta

SEQ ID NO: 19003 - DNA, 120 bp, Artificial Sequence
  ENSG00000020181_36 (sequence is synthesized)
gacgggctggccacgcggctcgttcccccgctcctcggggccctccaaggtgtctccgtagtcagcaggttggaggcagaggagccgatggctggaggaagcccacaggcggatgttccc

SEQ ID NO: 19004 - DNA, 120 bp, Artificial Sequence
  ENSG00000020181_37 (sequence is synthesized)
cacttgcctagagggcatccctctggggtagcgacagacaatcccagaaacacgcataatacatttccgtccagcccggggcagtctgactgtcggtgccctcccaggaacggggaaggc

SEQ ID NO: 19005 - DNA, 120 bp, Artificial Sequence
  ENSG00000020181_38 (sequence is synthesized)
ctccgtctgtgtgaaagggcacagcacatcccaggtgcaccctccccaagtactcccaccccgcctactgtccatgcggcctcactgggggccatcagcctcaccagcaaagcagagatg

SEQ ID NO: 19006 - DNA, 120 bp, Artificial Sequence
  ENSG00000020181_39 (sequence is synthesized)
agagcgtgggaactgtgttctttcctccctgccctctactgatttcagcccagcccctgcctagatcctaggtcccttttcctcccgagtttggctggcacgagagctagcccagcacat

SEQ ID NO: 19007 - DNA, 120 bp, Artificial Sequence
  ENSG00000020181_40 (sequence is synthesized)
gaagcaggtgatgttaagtcacaaggtgctgcttttcagatccactatgcaagaggggagggtggggccacgtgaaaggcagctctagacatcaaccagtcctgggggaggggagtggga

SEQ ID NO: 19008 - DNA, 120 bp, Artificial Sequence
  ENSG00000020181_41 (sequence is synthesized)
accgggcacaactaggaacaatgccaccattcccacaggagtggtacttaaaccagacagcagggttcagaggtggcacaccgggacaaagctgaggccctgcacctcaacagctgactg

SEQ ID NO: 19009 - DNA, 120 bp, Artificial Sequence
  ENSG00000020181_42 (sequence is synthesized)
ccaggtgcctgtgggtgaactgaggggagtagagggagagggcaggtggaactggggcagaatctagtcatgccctaaagctagtcctgtaaacaatggtgccccagaaagctgcaggtg

SEQ ID NO: 19010 - DNA, 120 bp, Artificial Sequence
  ENSG00000020181_43 (sequence is synthesized)
gtgtttggagaagcagttacttttcagttacaagacccatctccctagtctcagccttacaacaccacgggactaaggaagagcacttccttgcctccgtaaggccagaggaagaaccat

SEQ ID NO: 19011 - DNA, 120 bp, Artificial Sequence
  ENSG00000020181_44 (sequence is synthesized)
cccaatcatttgatctccagctccacagtagagagaaacctacaaaatgtcaaaccagcttcccgactcccaggagctcaagccaagcccagaggcagtggctggggtccctgcaggtca

SEQ ID NO: 19012 - DNA, 120 bp, Artificial Sequence
  ENSG00000020181_45 (sequence is synthesized)
tgaggggcctatgcctttactccttttaaacaccagcacccgtcttttccccaacctaaaaccaaccaccagcatttcactacaggaccaaatggaaaccgagggaaccctgggtcttgg

SEQ ID NO: 19013 - DNA, 120 bp, Artificial Sequence
  ENSG00000020181_46 (sequence is synthesized)
gaagaacaacaggaaaccaaggtctgacctagggttccctcccagtcttcacatcactctggcctcatcaccaaggtgacagaggacacaggggagggggaaaacccacacacactcctt

SEQ ID NO: 19014 - DNA, 120 bp, Artificial Sequence
  ENSG00000020181_47 (sequence is synthesized)
ggaatgggtcctgttatttatgcttgctgcacagacatattagaagaaaaaaaaaagctttgtattattcttccacatatgctggctgctgtttacacaccctgccaatgccttagcact

SEQ ID NO: 19015 - DNA, 120 bp, Artificial Sequence
  ENSG00000020181_48 (sequence is synthesized)
ggagagctttttgcaatatgctggggaaaggggagggagggaatgaaagtgccaaagaaaacatgtttttaagaactcgggttttatacaatagaatgttttctagcagatgcctcttgt

SEQ ID NO: 19016 - DNA, 120 bp, Artificial Sequence
  ENSG00000020181_49 (sequence is synthesized)
tttaatatattaaaattttgcaaagccctttgagctactgccttagtctacccactgtccttttgttatgaggtagaggatctcatgacaccatacacacaaacccatcattgcctgtga

SEQ ID NO: 19017 - DNA, 120 bp, Artificial Sequence
  ENSG00000020181_50 (sequence is synthesized)
atgcacgtagggccagaattccccagttcccgctcctctgagggttgatactgctgggaatgccaaccactccacaagcagagggaagccccctcaggcctgcaggaggagccgcagcag

SEQ ID NO: 19018 - DNA, 120 bp, Artificial Sequence
  ENSG00000020181_51 (sequence is synthesized)
tgtgtccaattcaaaccagcagcaaagagcctgacattttcccatccatctatgaggaaagccatctcacagaacatggacataggcaacttgctctcccacaccaagggatgggaatct

SEQ ID NO: 19019 - DNA, 120 bp, Artificial Sequence
  ENSG00000020181_52 (sequence is synthesized)
ctcctacctatagtcatccctgcactcctgactttactccaggacccagggtccaactaatggcagagcccctcttggttccttcaaacaagaaaagcaatacctacggactggtgtaca

SEQ ID NO: 19020 - DNA, 120 bp, Artificial Sequence
  ENSG00000020181_53 (sequence is synthesized)
cttccatccttggttataacaggaatgttatcaagctgtcagaacaggatgaagtgctcccagtggatatccatcagggagggttagggacactcgtggcagcctgtctagcagcctggg

SEQ ID NO: 19021 - DNA, 120 bp, Artificial Sequence
  ENSG00000020181_54 (sequence is synthesized)
ctctctgaaagtccctaacttcctgaggggtacgcaaatactgttctatttcactatcagaaatgttctcatctccagtgacagtggagacagggggtacagggcagatccgcttcgggg

SEQ ID NO: 19022 - DNA, 120 bp, Artificial Sequence
  ENSG00000020181_55 (sequence is synthesized)
acttcaacatgcagggtggcaagagaagggcaggactggccggccgcttcccctggggtaaacctaaggaattatttcccacctccccttctccttgcccctgtccccaccccggtggct

SEQ ID NO: 19023 - DNA, 120 bp, Artificial Sequence
  ENSG00000020181_56 (sequence is synthesized)
ccttctctcgggtctccacttctgctgtcccatcccgaaaggcagagcggaccagtgactggcggtgctggagaaggtcaccgatgtgcttcaccacagaccgtttgtcaagtctcagaa

SEQ ID NO: 19024 - DNA, 120 bp, Artificial Sequence
  ENSG00000020181_57 (sequence is synthesized)
agagccgctgtgcagggcctggaaccccggccagcccatctctcccttggctgtgtggctgccttcctctactggtttccccgggagcatctcctgcatggaggaaaagggaaggtgccc

SEQ ID NO: 19025 - DNA, 120 bp, Artificial Sequence
  ENSG00000020256_0 (sequence is synthesized)
tgtagatcagcgtcccccactttggcatcccggccggccggggacctcccagtctgcggccatgaacgcgagcagcgagggcgagagcttcgcgggctcggtgcaaattccaggtggcac

SEQ ID NO: 19026 - DNA, 120 bp, Artificial Sequence
  ENSG00000020256_1 (sequence is synthesized)
aacggtgctggtggagctgactcccgacatccatatctgcggcatctgcaagcagcagtttaacaacctggatgcctttgtagctcacaagcaaagtggctgccagctgacaggcacatc

SEQ ID NO: 19027 - DNA, 120 bp, Artificial Sequence
  ENSG00000020256_2 (sequence is synthesized)
cgcagcagcccccagcacggtccagtttgtatcggaggaaacagtgcctgccacccagactcagaccaccaccagaaccatcacctcggagacccagacaatcacagtttcagctccaga

SEQ ID NO: 19028 - DNA, 120 bp, Artificial Sequence
  ENSG00000020256_3 (sequence is synthesized)
atttgtttttgaacatggctatcaaacttacctgcccacggaaagtaatgaaaaccagacagccactgtcatctctctccctgccaagtcacgcaccaaaaagcccacaacaccacctgc

SEQ ID NO: 19029 - DNA, 120 bp, Artificial Sequence
  ENSG00000020256_4 (sequence is synthesized)
tcagaaaaggcttaactgttgctatccaggttgccaattcaagactgcttatggcatgaaggacatggagcggcatttaaaaattcacacgggagacaaaccccataagtgtgaagtctg

SEQ ID NO: 19030 - DNA, 120 bp, Artificial Sequence
  ENSG00000020256_5 (sequence is synthesized)
tggcaagtgctttagccggaaagacaagctgaaaactcacatgcggtgccacacgggcgtgaagccctacaagtgtaagacgtgtgactacgccgctgccgacagcagcagcctcaacaa

SEQ ID NO: 19031 - DNA, 120 bp, Artificial Sequence
  ENSG00000020256_6 (sequence is synthesized)
gcacctgaggatccactcggacgagcggcccttcaaatgccagatctgcccctacgccagccgcaactccagccagctcactgtccacctgcgatcccacacggcttcagaacttgatga

SEQ ID NO: 19032 - DNA, 120 bp, Artificial Sequence
  ENSG00000020256_7 (sequence is synthesized)
tgatgttccaaaagcaaactgcctctccactgaaagcactgacactccgaaggcccctgtcatcactcttccctcagaggcaagggaacaaatggccacccttggagagaggacgttcaa

SEQ ID NO: 19033 - DNA, 120 bp, Artificial Sequence
  ENSG00000020256_8 (sequence is synthesized)
ctgttgctacccaggttgccacttcaaaactgtccatggcatgaaagacttggaccgccatctcagaatccacacgggagacaaaccgcacaagtgtgagttctgtgacaagtgcttcag

SEQ ID NO: 19034 - DNA, 120 bp, Artificial Sequence
  ENSG00000020256_9 (sequence is synthesized)
ccggaaggacaacctgaccatgcacatgcggtgccacaccagtgtgaagccacacaagtgtcacctgtgtgactacgctgccgtggacagcagtagcctcaagaagcacctgcggatcca

SEQ ID NO: 19035 - DNA, 120 bp, Artificial Sequence
  ENSG00000020256_10 (sequence is synthesized)
cagctctgcccctatgccagccgcaactccagccagctcaccgtccacctgcgatctcacacgggggatacccccttccagtgctggctctgtagcgccaagttcaaaatcagctcggac

SEQ ID NO: 19036 - DNA, 120 bp, Artificial Sequence
  ENSG00000020256_11 (sequence is synthesized)
ttgaaaaggcacatgatcgtgcactcgggggagaagcctttcaagtgcgagttctgcgacgtccgctgcaccatgaaggcgaatctcaaatcgcacatccgcatcaagcacaccttcaaa

SEQ ID NO: 19037 - DNA, 120 bp, Artificial Sequence
  ENSG00000020256_12 (sequence is synthesized)
tgtctgcactgtgccttccagggccgggaccgggctgacctcctggagcacagccggctgcaccaggccgaccacccggagaagtgtccagagtgcagctactcctgctccagcgcggcc

SEQ ID NO: 19038 - DNA, 120 bp, Artificial Sequence
  ENSG00000020256_13 (sequence is synthesized)
gccctgcgcgtgcacagcagagtccactgtaaggaccgtcccttcaagtgtgacttctgcagcttcgacacgaagcggcccagcagcctggccaagcacgtcgacaaggtgcacagggac

SEQ ID NO: 19039 - DNA, 120 bp, Artificial Sequence
  ENSG00000020256_14 (sequence is synthesized)
gaggccaagacggagaaccgggcccctctgggcaaggaagggctcagagagggcagctcccagcacgtggccaagatcgtgacgcagagggccttccgctgtgagacctgcggcgcctcc

SEQ ID NO: 19040 - DNA, 120 bp, Artificial Sequence
  ENSG00000020256_15 (sequence is synthesized)
ttcgtcagggatgactctctgagatgccacaagaagcagcacagtgatcagagtgagaacaagaactcagacttggtcaccttcccaccggaaagcggtgcctcgggacagctcagcacc

SEQ ID NO: 19041 - DNA, 120 bp, Artificial Sequence
  ENSG00000020256_16 (sequence is synthesized)
ctggtctccgtggggcagctcgaggctcccctagagcccagccaagacctctagctcagccgaagagggtggtcagctgtcggaacttctgaccagtgctgttgcccagccctccagagg

SEQ ID NO: 19042 - DNA, 120 bp, Artificial Sequence
  ENSG00000020256_17 (sequence is synthesized)
tgaggccactgagagacaggctttgggcaccacttctggggctggccgctccaacttcacaggccttcagaggcgatggctgggcgacagtgacgaaagcaaagcaaagcagggctgtgg

SEQ ID NO: 19043 - DNA, 120 bp, Artificial Sequence
  ENSG00000020256_18 (sequence is synthesized)
agacactcctcgcatttgtctcttccctccaaggattatctgagcaagtcgacttgttcattcaaaggcggggtctgccaagccctgctctatccaatggggatagcttctacgtaacgg

SEQ ID NO: 19044 - DNA, 120 bp, Artificial Sequence
  ENSG00000020256_19 (sequence is synthesized)
attccaattttaaaactgatccatctctgatggaattattaaacttagacgatatagaaaactaaaactaatctctagagtggaaagggttaaagtgaggaaggtgtacgtgaagggtct

SEQ ID NO: 19045 - DNA, 120 bp, Artificial Sequence
  ENSG00000020256_20 (sequence is synthesized)
ggggttgctggaaaacttctatttcataacctgggtgatcgttctaagagtgtttgccttatatgtttgtgtggtttcttttacctgttgtcttacaataaaaaaggcagactcatggta

SEQ ID NO: 19046 - DNA, 120 bp, Artificial Sequence
  ENSG00000020256_21 (sequence is synthesized)
cacctgcgatctcacacggggccgggaccgggctgacctcctggagcacagccggctgcaccaggccgaccacccggagaagtgtccagagtgcagctactcctgctccagcgcggccgc

SEQ ID NO: 19047 - DNA, 120 bp, Artificial Sequence
  ENSG00000020256_22 (sequence is synthesized)
ggattcctctagccactcctctcaagagctagtcaacgagtttgcctcccaaacacgctggaaggatgctcagaggacccctcagaggctgttttcgggatgcgcgggcacccgagtctc

SEQ ID NO: 19048 - DNA, 120 bp, Artificial Sequence
  ENSG00000020256_23 (sequence is synthesized)
cggcctccttggcactgggcttcggctgcgcgcctggaaggtggcttcttgccttggggttacgtttcaaatgcgttgtccagggaaggcctcaccgaggagcggacgttcgagcgaaga

SEQ ID NO: 19049 - DNA, 120 bp, Artificial Sequence
  ENSG00000020256_24 (sequence is synthesized)
cacgggggacgcccccttccagtgctggctctgtagcgccaagttcaaaatcagctcggacttgaaaaggcacatgcgggtgcactcgggggagaagcctttcaagtgcgagttctgcaa

SEQ ID NO: 19050 - DNA, 120 bp, Artificial Sequence
  ENSG00000020256_25 (sequence is synthesized)
tgtccgctgcaccatgaaggggaacctcaagtcgcacatccgtatcaagcacagcgggaataacttcaagtgtcctcattgcgacttcctgggtgacagcaaagccaccctccggaagca

SEQ ID NO: 19051 - DNA, 120 bp, Artificial Sequence
  ENSG00000020256_26 (sequence is synthesized)
cagccgcgtgcaccagtcggagcatcctgagaagtgctcggaatgcagctactcctgctccagcaaggccgccctgcgcatccacgagcgtatccactgcaccgaccgccctttcaagtg

SEQ ID NO: 19052 - DNA, 120 bp, Artificial Sequence
  ENSG00000020256_27 (sequence is synthesized)
caactactgcagcttcgacaccaaacagcccagcaacctgagcaagcacatgaagaagttccatggggacatggttaagactgaggctctagagaggaaggacaccggcaggcagagcag

SEQ ID NO: 19053 - DNA, 120 bp, Artificial Sequence
  ENSG00000020256_28 (sequence is synthesized)
ccggcaggtggccaagctggatgccaagaagagtttccactgcgatatatgcgatgcctccttcatgcgggaggactcgctccgcagccacaagagacagcacagtgagtacagtgagag

SEQ ID NO: 19054 - DNA, 120 bp, Artificial Sequence
  ENSG00000020256_29 (sequence is synthesized)
tcagcgagggaagagtcaaaatcatcgttgggcatcaggtgccccaggcgaacaccatcgtccaggctgccgccgctgcagtgaacatcgtcccgcctgccttggtggcccagaacccag

SEQ ID NO: 19055 - DNA, 120 bp, Artificial Sequence
  ENSG00000020256_30 (sequence is synthesized)
aggaactcccagggaacagccggctgcagatcctgcgccaggtcagtctgatcgccccccctcagtcctcgcggtgtccgagcgaggcgggcgcaatgacccagccggctgtcctgctga

SEQ ID NO: 19056 - DNA, 120 bp, Artificial Sequence
  ENSG00000020256_31 (sequence is synthesized)
ccacccacgagcagacggacggagccactctgcaccagactctcatccccacggcctcaggtggcccccaggaaggctctggcaatcaaactttcattaccagttcgggtattacttgca

SEQ ID NO: 19057 - DNA, 120 bp, Artificial Sequence
  ENSG00000020256_32 (sequence is synthesized)
ctgactttgaaggcctaaacgccttgattcaggaggggacagcagaagtgacagtggtgagcgatggaggccagaacatcgcagtggccaccacagcgccaccggtcttctcctcctctt

SEQ ID NO: 19058 - DNA, 120 bp, Artificial Sequence
  ENSG00000020256_33 (sequence is synthesized)
cccagcaagaactacccaagcagacctactccatcattcaaggggcagcccatccagctttgctctgtcccgccgactccattccagattagtgcttaaaaaaacaaaaggagtggggga

SEQ ID NO: 19059 - DNA, 120 bp, Artificial Sequence
  ENSG00000020256_34 (sequence is synthesized)
ttagtgcttaaaaaaacaaaaggagtgggggaaaggaattgagaaaaagaaatcttaagtagaattctctaaaaggtttgctcttaatgttttctttgttttgttttgtttttgagacgg

SEQ ID NO: 19060 - DNA, 71 bp, Artificial Sequence
  ENSG00000020256_35 (sequence is synthesized)
aggttcaagcgattctcatgcctcagccctccgagtagctgggaccacaggtgtacgacatcatgactcct

SEQ ID NO: 19061 - DNA, 120 bp, Artificial Sequence
  ENSG00000020256_36 (sequence is synthesized)
taatgtttttaaggatggttgtgaatccccctggccccataataaattgtaattttatactgcttactataatttttttaacactgtaacaactttgagaccacctctgaatcgtcgcat

SEQ ID NO: 19062 - DNA, 120 bp, Artificial Sequence
  ENSG00000020256_37 (sequence is synthesized)
tataactgttgtagaatcttaaatgttaccaagatgattccaatgaggggttggaattaaatgcattaagtagtgaattcatgtgtttgtttccaacttgattttccaactctaataaag

SEQ ID NO: 19063 - DNA, 120 bp, Artificial Sequence
  ENSG00000020256_38 (sequence is synthesized)
gtttctgtccatcttattacatttgtgtagtaaatggtacttcccagcctctcttttgccccattctggaatactccccagagtttgggggtgttcatgttttatacatgtaagtctgtt

SEQ ID NO: 19064 - DNA, 120 bp, Artificial Sequence
  ENSG00000020256_39 (sequence is synthesized)
ggcatgaaggaccattttctacataatatgacatggatacttgacccaaaaaaaaatgtttagtgctaatgagcagaaaatgaatggttccataataaattgatatctgattaaaatata

SEQ ID NO: 19065 - DNA, 120 bp, Artificial Sequence
  ENSG00000020256_40 (sequence is synthesized)
agctggggcgtggtcagggcttccaacagggcagcgccactcacccctggggagggacatttgggccggtctaacgcccactgtggacggtaaaggccgtttgggaacagctttcagctc

SEQ ID NO: 19066 - DNA, 120 bp, Artificial Sequence
  ENSG00000020256_41 (sequence is synthesized)
gaatccacacggcaccctttgaccaacagcctagggggagatgccgtgctgcttgctgtttggaagaagtgagaggaaggggtccacctgaccattctccatgtggttcatgaagctgcc

SEQ ID NO: 19067 - DNA, 120 bp, Artificial Sequence
  ENSG00000020256_42 (sequence is synthesized)
aggattacaaactgcagcccatgggcaactcagcctgttggcatgctccttcatttacctattgcttgcagctttctggccttacaagaggtagttgttacagggactgtagggtgcaca

SEQ ID NO: 19068 - DNA, 89 bp, Artificial Sequence
  ENSG00000020256_43 (sequence is synthesized)
cttacaagaggtagttgttacagggactgtagggtgcacaaagcctaaaatactatctttttgttttgtttttttctcagaatgcagtg

SEQ ID NO: 19069 - DNA, 120 bp, Artificial Sequence
  ENSG00000020256_44 (sequence is synthesized)
cctgaccaggaaacctcaatcccttactttttctctaatttcttaaccttcatttacttaacaacacaagcaacttaaatgacttggtgtggtagaagtacaagaatttggaacttctgt

SEQ ID NO: 19070 - DNA, 72 bp, Artificial Sequence
  ENSG00000020256_45 (sequence is synthesized)
tgccagccgcaactccagccagctcaccgtccacctgcgatctcacacggggtgttgctatgttgcctagaa

SEQ ID NO: 19071 - DNA, 68 bp, Artificial Sequence
  ENSG00000020256_46 (sequence is synthesized)
atcctcctcctcctgccccagcctcccaaatatagaaacgaggtcttgctctgttgcccaggctggtc

SEQ ID NO: 19072 - DNA, 120 bp, Artificial Sequence
  ENSG00000020256_47 (sequence is synthesized)
ttagccttctgaaatgctatgattacaggcacgagccaccgtgcctggcctatttttttaatatttttaaagatttgtaaaacaaagaagcatgtatggaccacaaagcctagtactacc

SEQ ID NO: 19073 - DNA, 120 bp, Artificial Sequence
  ENSG00000020256_48 (sequence is synthesized)
tggctctttaccaaaaaaaaaaaaaaaaaaattgccacatccaggtcagtagaacataaattatgtaaaaacttgatcactacacatttagtgattttgctgaaatcaacacaaaaaaaa

SEQ ID NO: 19074 - DNA, 120 bp, Artificial Sequence
  ENSG00000020256_49 (sequence is synthesized)
ggcagacaaagcctgtaggaagtgagtggccttctccaagccaagccccaagggatgacagagccataagacagaaggggtccgggcctttgatggagaacctcctactgacgttccagg

SEQ ID NO: 19075 - DNA, 120 bp, Artificial Sequence
  ENSG00000020256_50 (sequence is synthesized)
ctgcgcttctgaaattttaatgggcaaacgaatcacctggggatctcgttaaaatgcagacacggtttctcaaactttaatgtgcatgcgaatcacctggggatcttgttaaaatgcaga

SEQ ID NO: 19076 - DNA, 120 bp, Artificial Sequence
  ENSG00000020256_51 (sequence is synthesized)
ttctgattcagcgggtctggggtagagcccgagagtctgcatttctaacgagctcccaggtggcgcgggctgcccgggagcggaccgcaagtccgcgggactcctggggtcttggctcca

SEQ ID NO: 19077 - DNA, 120 bp, Artificial Sequence
  ENSG00000020256_52 (sequence is synthesized)
ggccaatcagccgtcaggactcttgataaatcgccctgctcggctgatgagcagaattgccgggacatgcgcgttccggccgaaggggggtaatttccgaactccgggaattcgttgtgt

SEQ ID NO: 19078 - DNA, 120 bp, Artificial Sequence
  ENSG00000020256_53 (sequence is synthesized)
gaagtaggccactcctagggacgcgcggggagcccggtcctcgcgccatgtcgcggcgcaagcaggccaagccccagcacctcaactccgaggagccgcggcctgcgcgccgggagtgtg

SEQ ID NO: 19079 - DNA, 120 bp, Artificial Sequence
  ENSG00000020426_0 (sequence is synthesized)
aagcgcctgttggtaggaacctgcttggtcgcgtctgagggggcttgtaggtggctctggctgaaacaggcgcctgcgagagtctgtaggagggaaaccgccatggacgatcagggttgc

SEQ ID NO: 19080 - DNA, 120 bp, Artificial Sequence
  ENSG00000020426_1 (sequence is synthesized)
cctcggtgtaagaccaccaaatatcggaacccctccttgaagctgatggtgaatgtgtgcggacacactctctgtgaaagttgtgtagatttactgtttgtgagaggagctggaaactgc

SEQ ID NO: 19081 - DNA, 120 bp, Artificial Sequence
  ENSG00000020426_2 (sequence is synthesized)
cctgagtgtggtactccactcagaaagagcaacttcagggtacaactctttgaagatcccactgttgacaaggaggttgagatcaggaaaaaagtgctaaagatatacaataaaagggaa

SEQ ID NO: 19082 - DNA, 120 bp, Artificial Sequence
  ENSG00000020426_3 (sequence is synthesized)
gaagattttcctagtctaagagaatacaatgatttcttggaagaagtggaagaaattgttttcaacttgaccaacaatgtggatttggacaacaccaaaaagaaaatggagatataccaa

SEQ ID NO: 19083 - DNA, 120 bp, Artificial Sequence
  ENSG00000020426_4 (sequence is synthesized)
aaggaaaacaaagatgttattcagaaaaataaattaaagctgactcgagaacaggaagaactggaagaagctttagaagtggaacgacaggaaaatgaacaaagaagattatttatacaa

SEQ ID NO: 19084 - DNA, 120 bp, Artificial Sequence
  ENSG00000020426_5 (sequence is synthesized)
aaagaagaacaactgcagcagattctaaaaaggaagaataagcaggcttttttagatgagctggagagttctgatctccctgttgctctgcttttggctcagcataaagatagatctacc

SEQ ID NO: 19085 - DNA, 120 bp, Artificial Sequence
  ENSG00000020426_6 (sequence is synthesized)
caattagaaatgcaacttgagaaacccaaacctgtaaaaccagtgacgttttccacaggcatcaaaatgggtcaacatatttcactggcacctattcacaagcttgaagaagctctgtat

SEQ ID NO: 19086 - DNA, 120 bp, Artificial Sequence
  ENSG00000020426_7 (sequence is synthesized)
gaataccagccactgcagatagagacatatggaccacatgttcctgagcttgagatgctaggaagacttgggtatttaaaccatgtcagagctgcctcaccacaggaccttgctggaggc

SEQ ID NO: 19087 - DNA, 120 bp, Artificial Sequence
  ENSG00000020426_8 (sequence is synthesized)
tatacttcttctcttgcttgtcacagagcactacaggatgcattcagtgggcttttctggcagcccagttaaccatttataagatttggaccttggagctgaaccagggagctagcaaaa

SEQ ID NO: 19088 - DNA, 120 bp, Artificial Sequence
  ENSG00000020426_9 (sequence is synthesized)
gtaaagcagacttataaaattatagctatgtgcagctgcacaacacagtccttccactagcagctgtgttaaagtatttataaggagaaaatttcagaactaagttgagtaatatagggg

SEQ ID NO: 19089 - DNA, 120 bp, Artificial Sequence
  ENSG00000020426_10 (sequence is synthesized)
atatatatttgtgaaaaataatttttacttatatttttcagaggatttgacacgataagcctcatctgatggaagagaggaataaataattcacctatatgtgtttgaggttgtgacaga

SEQ ID NO: 19090 - DNA, 120 bp, Artificial Sequence
  ENSG00000020426_11 (sequence is synthesized)
atctttttaaaaaataaagctataatttatattaagttctgtggtttttctcttattacagtgttttacttgaacacattttaaataccattttgattacaacatttactgttaatatcc

SEQ ID NO: 19091 - DNA, 120 bp, Artificial Sequence
  ENSG00000020426_12 (sequence is synthesized)
aagtctattatttcttctcataaaatgttcccctttttcctaatgtcttgttaatactagtccagacaagtggatatatttcctttgaccaagttatggcaagaaaaacctgacccatga

SEQ ID NO: 19092 - DNA, 120 bp, Artificial Sequence
  ENSG00000020426_13 (sequence is synthesized)
taatgtcattccctcaatactaaggactcaatgcctgttttaagcagtggaaaatgaggcaaaccttgatcaaggtgttatagttcccagctgtgagccacactcaggataaaacaaaac

SEQ ID NO: 19093 - DNA, 120 bp, Artificial Sequence
  ENSG00000020426_14 (sequence is synthesized)
ccagcattaacctgctttagtgacacattcaaagaagttaataaaatttaatacttaaatgatacctttcacctccaatgtaagctcattttatgatgaatcctttggagactggagaag

SEQ ID NO: 19094 - DNA, 120 bp, Artificial Sequence
  ENSG00000020426_15 (sequence is synthesized)
gtacattttaagtacagttccctatgtataaattgtatactgatacagtttttttgttgaaacttcaaaggcttttattaccagggttttgcttaaagagtttagatatgaataggatga

SEQ ID NO: 19095 - DNA, 120 bp, Artificial Sequence
  ENSG00000020426_16 (sequence is synthesized)
tattgcagcatctcaaccttgtatgagtctgttacatagagcattggatatgggatatagtttcttaaggaaattaagggatttcctatcaaatctctattacaacagatgttagtttta

SEQ ID NO: 19096 - DNA, 120 bp, Artificial Sequence
  ENSG00000020426_17 (sequence is synthesized)
tgggtagaaacttaggtgaaacaagacttgtggttacattaggatggactatccatctgtaacaactccatcttattttactaagcagttattaattaattttagcaatacatcttcatc

SEQ ID NO: 19097 - DNA, 120 bp, Artificial Sequence
  ENSG00000020426_18 (sequence is synthesized)
tttattgtacttctatctttgttaaatgagaaaaccaaggcatcaaataattgagtagacaaagatcatattcacaagttagtaaaaagccagaattagaatgcaggttttttttttcaa

SEQ ID NO: 19098 - DNA, 120 bp, Artificial Sequence
  ENSG00000020426_19 (sequence is synthesized)
agtccagttccatctacattctaccagactgcatatcctattcctgtatctattaggtattcccgaactgaggattagtgtttttaagtacagtctataaatctgttcaaagaatagtta

SEQ ID NO: 19099 - DNA, 120 bp, Artificial Sequence
  ENSG00000020426_20 (sequence is synthesized)
gaacattgaatgtagagttaaggctttgcagcagccaattgcaaaaataaggaatccagtcttttgaaaagaaacactactgcttgttctcataccttttataaatgtattttaaaaaga

SEQ ID NO: 19100 - DNA, 120 bp, Artificial Sequence
  ENSG00000020426_21 (sequence is synthesized)
atgaactaattaataaaacatatcaaaggcttttaaggcttgttttgagcctgccttattgtggaaattgcatgcacctggtttggcaaataaattccaaaacctttatacatttgtaaa

SEQ ID NO: 19101 - DNA, 120 bp, Artificial Sequence
  ENSG00000020426_22 (sequence is synthesized)
aggcttttttagatgagctgcataaagatagatctacccaattagaaatgcaacttgagaaacccaaacctgtaaaaccagtgacgttttccacaggcatcaaaatggtaagccttattt

SEQ ID NO: 19102 - DNA, 120 bp, Artificial Sequence
  ENSG00000020426_23 (sequence is synthesized)
tgtgcggacacactctttttcaacttgaccaacaatgtggatttggacaacaccaaaaagaaaatggagatataccaaaaggaaaacaaagatgttattcagaaaaataaattaaagctg

SEQ ID NO: 19103 - DNA, 120 bp, Artificial Sequence
  ENSG00000020426_24 (sequence is synthesized)
atgttcctgagcttgagatgctaggaagacttgggtatgtgtcctaaagaactttacattgaggagctgatatgtgggacttattgctgttcttaactgacatgttaacattcttagatt

SEQ ID NO: 19104 - DNA, 120 bp, Artificial Sequence
  ENSG00000020426_25 (sequence is synthesized)
ttcagtttatagaactttactgttttgtgaaaaatgaacagtactcaataccaaattgttttatttagtacattaatttttctgtggacttgttaggtctcttgagattgagcctggaat

SEQ ID NO: 19105 - DNA, 120 bp, Artificial Sequence
  ENSG00000020426_26 (sequence is synthesized)
tctatgaacatcattcagacaccatcgtttctgctgcattctgtttgttcagagtcctaaatacagctcacattcagaggaaggggaattgggcttccccttttgatgaaagaagtataa

SEQ ID NO: 19106 - DNA, 120 bp, Artificial Sequence
  ENSG00000020426_27 (sequence is synthesized)
agaatttgtggccatatgtaaaaccacaccaaccacatatgtatatttatcactggaataccttgaatccaagagggctcccagtgatttttgtctcctactttttatgtccttgcttag

SEQ ID NO: 19107 - DNA, 120 bp, Artificial Sequence
  ENSG00000020426_28 (sequence is synthesized)
tttctccctgattgtatcagggttgcttgtataaccaatcgaatatggtagaagtttctcatttccaaggctaggtctttaacaaagactttgtggctttccatgtggttactctctatg

SEQ ID NO: 19108 - DNA, 120 bp, Artificial Sequence
  ENSG00000020426_29 (sequence is synthesized)
taaattaaagctggtcggttgctaagtattttcttcttattttgtcttagaaacaaatgtttccacatgatactttaaaaagccatcttcctttaaaccagttacatttatagaaaattt

SEQ ID NO: 19109 - DNA, 120 bp, Artificial Sequence
  ENSG00000020426_30 (sequence is synthesized)
agctgaaatttagaccagaaatatgaatatatgctgtataggtatgtaggtaggcaggcacacattactgtagcaaaaaccactttgacagcattatgttagactgtgctttcttaagga

SEQ ID NO: 19110 - DNA, 120 bp, Artificial Sequence
  ENSG00000020426_31 (sequence is synthesized)
agtggatccgtaagataggtgattgttaacgctagttttatctgcctgtataatcttctggtaagtgagcatttggacagtggtcacaaaacactggaggctcatttttatccttggaca

SEQ ID NO: 19111 - DNA, 120 bp, Artificial Sequence
  ENSG00000020426_32 (sequence is synthesized)
ttaatttctctaaaggagagagaaaacccagacagacggtgatggagctaccaagagggagataaaacaaaaacactatttattagaaactaaaatgaattcatgattagatcagaggaa

SEQ ID NO: 19112 - DNA, 120 bp, Artificial Sequence
  ENSG00000020426_33 (sequence is synthesized)
cacatttgtaaactaaggttaactttggtttctcaattagttaccttttttgttttaccgaaagagtaacattgctagatataaatatgattttggtttgttttagttgatctcatgttg

SEQ ID NO: 19113 - DNA, 120 bp, Artificial Sequence
  ENSG00000020577_0 (sequence is synthesized)
attcttcattcagttgtgtgccttgtgggggatttttaaaaagtcgtttttttttttaaagaaacatttccgtgctactgtctgtcatcgtctctggggaaatcagccagaaccaccgga

SEQ ID NO: 19114 - DNA, 120 bp, Artificial Sequence
  ENSG00000020577_1 (sequence is synthesized)
acgtaactgaaaccagacaagagaggcaggagcccaggcagtacctgcagcgtccgggcaccagagccaccttggaacaggaacgcgtctccggccgcggggctgcggctccgccaaact

SEQ ID NO: 19115 - DNA, 120 bp, Artificial Sequence
  ENSG00000020577_2 (sequence is synthesized)
ttggggcgggcggggcgggctggggcgcccagggggctctgtagaccgagggcggccccctaaccatgatgtttcgcgaccaggtcggggtgctggcgggctggtttaagggctggaacg

SEQ ID NO: 19116 - DNA, 120 bp, Artificial Sequence
  ENSG00000020577_3 (sequence is synthesized)
agtgcgagcagactgttgcgctgctgtcgctgctcaagcgcgtgagccagacccaggcccgcttcctccagctctgcctggagcactcgctggccgactgcgccgagctgcacgtcctcg

SEQ ID NO: 19117 - DNA, 120 bp, Artificial Sequence
  ENSG00000020577_4 (sequence is synthesized)
aacgcgaggccaacagccccggaatcattaaccaatggcaacaggaatccaaggataaagtgatttccctcctgttaactcatctgcctttgctgaagccaggaaacctcgacgcgaaag

SEQ ID NO: 19118 - DNA, 120 bp, Artificial Sequence
  ENSG00000020577_5 (sequence is synthesized)
tagaatatatgaaactgctgcccaaaatcctggctcactctattgaacacaaccagcacattgaggagagcaggcagctgctgtcctatgctttgatacatccagccacttcgttagaag

SEQ ID NO: 19119 - DNA, 120 bp, Artificial Sequence
  ENSG00000020577_6 (sequence is synthesized)
accgtagtgctttagccatgtggctgaatcacttggaggaccgcacgtcgaccagctttggtggccagaaccgaggccgctcagactctgtggattatggacagacacactactatcacc

SEQ ID NO: 19120 - DNA, 120 bp, Artificial Sequence
  ENSG00000020577_7 (sequence is synthesized)
aaagacagaactctgatgacaagctcaatgggtggcagaactctcgggattctgggatttgcatcaatgcctccaactggcaggacaaaagcatggggtgtgagaatggccatgtgcccc

SEQ ID NO: 19121 - DNA, 120 bp, Artificial Sequence
  ENSG00000020577_8 (sequence is synthesized)
tctactcctcctcatctgtccccaccacaatcaatacgattggaaccagcacaagtacaattctctcaggccaggcacaccacagccctttgaaacgatctgtgtcccttaccccaccca

SEQ ID NO: 19122 - DNA, 120 bp, Artificial Sequence
  ENSG00000020577_9 (sequence is synthesized)
tgaatgtgccaaaccagcctctaggacatggatggatgtctcatgaggacttacgagctagaggaccccagtgcctcccatccgatcatgcccccctgtctccacaaagcagtgtagcct

SEQ ID NO: 19123 - DNA, 120 bp, Artificial Sequence
  ENSG00000020577_10 (sequence is synthesized)
cttcaggaagtggtgggagtgaacacttagaagatcagaccactgctcgtaacacattccaagaagaaggtagtgggatgaaagatgttccagcctggctgaaaagcctccgcctgcaca

SEQ ID NO: 19124 - DNA, 120 bp, Artificial Sequence
  ENSG00000020577_11 (sequence is synthesized)
aatatgccgcgcttttctcccagatgacctatgaggagatgatggccctcaccgagtgccagctggaggcgcagaatgttaccaaaggtgcaagacacaaaattgtcatcagtattcaga

SEQ ID NO: 19125 - DNA, 120 bp, Artificial Sequence
  ENSG00000020577_12 (sequence is synthesized)
agctcaaagaaagacaaaatctcctgaagtctttggaaagggacatcatcgaggggggcagcctgcgcatcccgctccaggaactgcaccagatgatcctgactccgatcaaggcctaca

SEQ ID NO: 19126 - DNA, 120 bp, Artificial Sequence
  ENSG00000020577_13 (sequence is synthesized)
gctccccgagcaccacccccgaggctcgccgccgggagccccaggccccgcgtcagccctcactgatgggccccgagagccagagccccgactgcaaagatggggccgcagccactggcg

SEQ ID NO: 19127 - DNA, 120 bp, Artificial Sequence
  ENSG00000020577_14 (sequence is synthesized)
accccctcggccggggccagcggggggctccagccgcaccagctgagcagctgcgatggggagctggccgtcgcccccctgccagagggggacctccccgggcagttcacacgcgtcatg

SEQ ID NO: 19128 - DNA, 120 bp, Artificial Sequence
  ENSG00000020577_15 (sequence is synthesized)
gcgtcatggggaaagtgtgcacacagctcttggtctccagacctgatgaggaaaatataagttcctatttacagctcatagacaagtgtctaattcatgaggcatttacagagacacaga

SEQ ID NO: 19129 - DNA, 120 bp, Artificial Sequence
  ENSG00000020577_16 (sequence is synthesized)
aaaaaagattgttgtcatggaaacagcaggtgcagaagctctttcggtctttccctcggaaaacccttctagacatatcaggatatcgacagcaaagaaatcgaggctttgggcaatcca

SEQ ID NO: 19130 - DNA, 120 bp, Artificial Sequence
  ENSG00000020577_17 (sequence is synthesized)
actccctcccgacggctggctctgtgggcggtggcatgggcagacggaacccgcgccagtaccagatcccctctcggaacgtcccttccgcccgcctgggcctcttgggcaccagtggat

SEQ ID NO: 19131 - DNA, 120 bp, Artificial Sequence
  ENSG00000020577_18 (sequence is synthesized)
tcgtcagctccaaccagcgcaacaccacagctacccccaccatcatgaaacaaggaagacagaacctgtggtttgccaaccccgggggcagcaatagcatgccaagccgcacccacagct

SEQ ID NO: 19132 - DNA, 120 bp, Artificial Sequence
  ENSG00000020577_19 (sequence is synthesized)
cagtccagaggacccgctcgctgcccgtgcacacttccccacagaacatgctgatgttccagcagccagaattccagcttcccgtgaccgaacctgacatcaacaacaggctggagtcgt

SEQ ID NO: 19133 - DNA, 120 bp, Artificial Sequence
  ENSG00000020577_20 (sequence is synthesized)
tgtgcctcagtatgaccgaacacgccctgggagacggggttgaccggacctccaccatctagaagctgaagacgagagtgaccgcgctggccgtgaaatcgactgctgcgggtccagtgt

SEQ ID NO: 19134 - DNA, 120 bp, Artificial Sequence
  ENSG00000020577_21 (sequence is synthesized)
ccgccatcttcagggttgcacagaatcctccaagatactttgcagccttttttccccctggtccctctcccgttttgattttgtgagagcgtaggtcatcctcgtaaacatatcagtaga

SEQ ID NO: 19135 - DNA, 120 bp, Artificial Sequence
  ENSG00000020577_22 (sequence is synthesized)
cctggggttggttattttgtcatttgtttctgtcatgggatggtttggtgtgtggggtggggaggggtctctagggaattatgagactgggaggggggtggagggaatgcaggtagctct

SEQ ID NO: 19136 - DNA, 120 bp, Artificial Sequence
  ENSG00000020577_23 (sequence is synthesized)
ctggatggaacggggacaggggaaagagtactgccatgaaagagataggagacacataagaggacagcagaagccctggccctggggaggcttctcggaaggcctggcttcacaggcagg

SEQ ID NO: 19137 - DNA, 120 bp, Artificial Sequence
  ENSG00000020577_24 (sequence is synthesized)
ccacagaaggatatcgcgggcacgtgcacccaaagcaagatagtggcttcccttttatatccaatctaatcctgattggatgtccctgaggcccctgctggaaacagccataggagaggg

SEQ ID NO: 19138 - DNA, 120 bp, Artificial Sequence
  ENSG00000020577_25 (sequence is synthesized)
cccatggcagtaggggaaagaaggaagaaattccctgcaacaaaacttcagctaaactttgatttgtgtattgtttacataataattttaaagggtacataatgtgtaaagagtttggat

SEQ ID NO: 19139 - DNA, 120 bp, Artificial Sequence
  ENSG00000020577_26 (sequence is synthesized)
agaacctctcttcatactatggttttcgtaaaggatctgttgttgttacggattcattttttccctctatttttataagagcagcagagttgtcttctcaaaacggctgccaagctctgc

SEQ ID NO: 19140 - DNA, 120 bp, Artificial Sequence
  ENSG00000020577_27 (sequence is synthesized)
ttcttgggaagatggatgcagtcatgtaggcctgagctgtccgtctttcaccgttaggtgggaggagcgtatgggtggacttgaaggacatggacgtggctggaatgagcacagcattgg

SEQ ID NO: 19141 - DNA, 120 bp, Artificial Sequence
  ENSG00000020577_28 (sequence is synthesized)
ggagaggcctccctccctttccaccccacccatggggcattatcctgtcactcccagccttgctccacacacacacaggtgggtacaagttccactggaggagaaaaggcaaggatggac

SEQ ID NO: 19142 - DNA, 120 bp, Artificial Sequence
  ENSG00000020577_29 (sequence is synthesized)
tttttccccttgtgagaggtttgatacccagaaaatgagctcaaaacctttacattagggttgcttgtaggaactggagcctggaggctgcatctacttcacctgtcactgctgagggag

SEQ ID NO: 19143 - DNA, 120 bp, Artificial Sequence
  ENSG00000020577_30 (sequence is synthesized)
aggaggggagaaaggcccagcaacagcgtacagaggggtcagtcagcaagtccagagagcacatgcagggagatgtttggcccacaccgcacagccccgccatctccagtgggcgatgaa

SEQ ID NO: 19144 - DNA, 120 bp, Artificial Sequence
  ENSG00000020577_31 (sequence is synthesized)
agatgtaggaaaggttgatttcaagatggaaatgacagcgctatccgcacagtatgaattagggatttgctgtgttagttgatttatccatccacacagaggggaggaaaaagacactcg

SEQ ID NO: 19145 - DNA, 120 bp, Artificial Sequence
  ENSG00000020577_32 (sequence is synthesized)
ttacttggtgggagattgagaaactgtggtacctaccacaaagtaatagctctgtttatgaagggcaagaaaggctacatttcagaatttgacacagtggagggtattagaggaaatcaa

SEQ ID NO: 19146 - DNA, 120 bp, Artificial Sequence
  ENSG00000020577_33 (sequence is synthesized)
agaggagttgtgtggaaaatcaggttgtgtaaatgaaggtatgaatgctcagccagaggcaagatcagggagatggtacaaggcctgtttgttacatggatgagtcgggtgcctggttgt

SEQ ID NO: 19147 - DNA, 120 bp, Artificial Sequence
  ENSG00000020577_34 (sequence is synthesized)
gtgtgtgtgtgtgtgtgtgtgtgtgaagtcagagttgaaattcagaagatcagactatggaaatcactgcccttttttttttaaaagctaatgaactacatacagacctaaaaggcctta

SEQ ID NO: 19148 - DNA, 120 bp, Artificial Sequence
  ENSG00000020577_35 (sequence is synthesized)
aggccttaatgaaatccgaacaattttcttttactttcaagatcaaaaacatgcacccaacccagccttggatgccaccaccaggtttttgaagcccttttgagtctaagaaggtgagaa

SEQ ID NO: 19149 - DNA, 120 bp, Artificial Sequence
  ENSG00000020577_36 (sequence is synthesized)
caatgtaaccatagaaagcctttcgtgagcagagaaggcttgaatccacaatttcattcgctgaattaaaaaaaaaaggttcagacctctccttgggtgactaagttctaaagatgcaaa

SEQ ID NO: 19150 - DNA, 120 bp, Artificial Sequence
  ENSG00000020577_37 (sequence is synthesized)
tccatgtgcagaaagagatggcattttttagttgattatttttaaccaagtgccattaacattcatcccccacatcccttttctaaacaagcttagtgttacttggggaatgtgttggga

SEQ ID NO: 19151 - DNA, 120 bp, Artificial Sequence
  ENSG00000020577_38 (sequence is synthesized)
tggacgatcacatgtaaggcaggaagaataggtcaaaggttgaaggccaaaggtaagaccagagggtttgcgaatgtgggtttgtaggatactgagaaagtgaataaagaggagaaaaaa

SEQ ID NO: 19152 - DNA, 120 bp, Artificial Sequence
  ENSG00000020577_39 (sequence is synthesized)
ccatggtattacacatcttgctgagaaaggaaagcattcggatctgctgcaaaaacacatatatccataaagactcatgttattcagaaaacagattgtgaacacaatcacattcgcatg

SEQ ID NO: 19153 - DNA, 120 bp, Artificial Sequence
  ENSG00000020577_40 (sequence is synthesized)
aatcctttaaaaggaagaagaccttaaagtatctgcaaatctgaatttctatttattccttcactgaatatagaaacaatggttatctgattattagagatattattttggatatgttac

SEQ ID NO: 19154 - DNA, 120 bp, Artificial Sequence
  ENSG00000020577_41 (sequence is synthesized)
ttattaacttgctatggctggtaaccatgataaagtctgttattaataacaacataattctttttttaaagaagaaaagcttatttttcattgacagtgtatagatttatctacttagtt

SEQ ID NO: 19155 - DNA, 120 bp, Artificial Sequence
  ENSG00000020577_42 (sequence is synthesized)
gtgttttgctattagtgttttaattttttttttaagttgagtgtttgataaattttaagaccctgtccccaccttgttttgagtcctgtgttgactacaggtatatagctcaatttaaaa

SEQ ID NO: 19156 - DNA, 120 bp, Artificial Sequence
  ENSG00000020577_43 (sequence is synthesized)
atcctaaagcaaaagaattttatttataaaagaatcaaacagttgcatgcatgaggctgtgaagtcagatatttagtaataaaagcagcagtgcctttttttgtatttacccattgaccc

SEQ ID NO: 19157 - DNA, 120 bp, Artificial Sequence
  ENSG00000020577_44 (sequence is synthesized)
ccaccaaatgcaactgttttatattaagaaaatagtaacaattttaaaatctcagagtaaaatctatttcactacatgcttttccccccttgttctgatttaagcagtgtgtacttggca

SEQ ID NO: 19158 - DNA, 120 bp, Artificial Sequence
  ENSG00000020577_45 (sequence is synthesized)
tctctacattgtcctagggacagtggtgttctacaatattatcatgtatgatgttttattggtgctttttattcatagtggcttcttaccagaaacagtaggaagaaacacatgaactgt

SEQ ID NO: 19159 - DNA, 120 bp, Artificial Sequence
  ENSG00000020577_46 (sequence is synthesized)
gtacaagacatgaaacattgctgctgatatgttgttttttcacatgcttttgagttttcactttttaaacgagagccagcaagcaaaatagatgtggctgggtctgcctgtccgggcggc

SEQ ID NO: 19160 - DNA, 120 bp, Artificial Sequence
  ENSG00000020577_47 (sequence is synthesized)
tctttgcaccgagctctcaaatcctgtgtattgagggttcctttttggtactcaggattggagctacagctgggcccccctctctcccattcgtttgaagagacactgagggaaacaagg

SEQ ID NO: 19161 - DNA, 120 bp, Artificial Sequence
  ENSG00000020577_48 (sequence is synthesized)
gtttcttttgaggtgtccttggctgccttttacgggatgggagccttctccggatcttttgttcttctgcacctcttgtagctactgccggtgcaaggttgtagatgttattccccagga

SEQ ID NO: 19162 - DNA, 120 bp, Artificial Sequence
  ENSG00000020577_49 (sequence is synthesized)
gcctgggcttgggggctgagctgggctgaatgcaaaagcatgcaaccagaaggcgggcaaggggaggaaaagcaggcctggcctcattggtcccctggagatgtctgtagcagtcagctc

SEQ ID NO: 19163 - DNA, 120 bp, Artificial Sequence
  ENSG00000020577_50 (sequence is synthesized)
cagcttgggcctggggaagcagcctgaccaaggcgctcaggtgtgcctgttacaagaagaacctgcagaaggataatttgcacatggagctgtgataacactaatgttgatttttttttt

SEQ ID NO: 19164 - DNA, 120 bp, Artificial Sequence
  ENSG00000020577_51 (sequence is synthesized)
ttttacaagtcatcagagatgtttgcaaagtgagttttatttttttgtaattcctttatctttacttaaaggtgaatgtgtattcctctgggaggaataggaagaaaacaggaatgttaa

SEQ ID NO: 19165 - DNA, 120 bp, Artificial Sequence
  ENSG00000020577_52 (sequence is synthesized)
taatgtcgaacagaaaacttcctcccttattaatatataatcctcatgtatttatgcctaatgtaagctgacttttaaaaagctttcttttgttgcatgccctgtgcaggcatctgtatt

SEQ ID NO: 19166 - DNA, 120 bp, Artificial Sequence
  ENSG00000020577_53 (sequence is synthesized)
gtacatgcatgcctttcgtcctgttttcctgtataaagttagtgaacaaagaaatatttttgcctagttcatgttgccaagcaatgcatattttttaaatttgtcatatatggaaagagc

SEQ ID NO: 19167 - DNA, 120 bp, Artificial Sequence
  ENSG00000020577_54 (sequence is synthesized)
atgtttgttacatgtaaaagctttactgatatacagatatactaatgtttgaagatgctgttctttgcaagtgtacagttttcaaatgttgttaccagtgaaacacccttgtggtttaaa

SEQ ID NO: 19168 - DNA, 120 bp, Artificial Sequence
  ENSG00000020577_55 (sequence is synthesized)
cttgctacaatgtatttattattcatttcctcccatgtaactaagaatcatggctatatttcatatcaacgttatattgaaagtgaagggaaatgattaatacaaggttttgtaacactg

SEQ ID NO: 19169 - DNA, 120 bp, Artificial Sequence
  ENSG00000020577_56 (sequence is synthesized)
ttagctcccacccccacccccgcgccccttcgcagccgcattgcaagttttctgcgcggggaagatctgttgctggtgctggcgttcttaagcacggcgcccgaggccaccccaggcggg

SEQ ID NO: 19170 - DNA, 120 bp, Artificial Sequence
  ENSG00000020577_57 (sequence is synthesized)
ccgtgaggggagcaccagccgttggcagcggcagcaacaggaagccgcggggtctcctcccgcacctgggaagcaggcttctcgctgttacccggtggggaatagcccatctcccacatc

SEQ ID NO: 19171 - DNA, 120 bp, Artificial Sequence
  ENSG00000020577_58 (sequence is synthesized)
cgctggagggttctgagcagaggaggcacagactgtgacatgaccagctatttttagtctccgttttgttccaggttcccaagttcacagtggactgtgtttaacagaccttagagaatt

SEQ ID NO: 19172 - DNA, 120 bp, Artificial Sequence
  ENSG00000020577_59 (sequence is synthesized)
ggagaaggacaaagtggagagggaggagatggagcaatctcttatgtgatcattccatcaactcacaaatttttcacctaacacctggttcaactgtaatgtgctcagctccgtataacc

SEQ ID NO: 19173 - DNA, 120 bp, Artificial Sequence
  ENSG00000020577_60 (sequence is synthesized)
tggacagcagctgtgccctcacccctaaactcagcaaaatattatggtcctctaatcaagagaattttgctcctgttactgcatgtcttgtgggttcatcgtcagaccagtgagttgata

SEQ ID NO: 19174 - DNA, 120 bp, Artificial Sequence
  ENSG00000020577_61 (sequence is synthesized)
ccaaacttcaccaaacggttctccggagcaaccgtttagagtcacttagagcacctgatactcctacagttcttaagagtgaataccttagaaaggagccgccaagacaactgaacccat

SEQ ID NO: 19175 - DNA, 120 bp, Artificial Sequence
  ENSG00000020577_62 (sequence is synthesized)
cttaggcgctaacaaccagcatcttgggctccgattgtccaggtgacttgactaccctacctgtgtctgtgactgagtagaggcaagaggagggggctcttagcagaaatacattggaca

SEQ ID NO: 19176 - DNA, 120 bp, Artificial Sequence
  ENSG00000020577_63 (sequence is synthesized)
tgtgacctggtgaaggccaagggaggggtgttgatgtgaagacgctggggacatcatctgtgaagacaggccagccctccccttctgctggagcctcagtgtcccctcaccattctgcgc

SEQ ID NO: 19177 - DNA, 120 bp, Artificial Sequence
  ENSG00000020577_64 (sequence is synthesized)
tggtccagagatttcctgctattgatacttatcagagacacaaagctgaggaggaacagatgtgccatgtcatcagccataatagaaaaagtgcatgaatcttttttggaccagatgttt

SEQ ID NO: 19178 - DNA, 120 bp, Artificial Sequence
  ENSG00000020577_65 (sequence is synthesized)
gcaagagttgtattaaatatatttcattctgctgtctcagcctctcaaatccttttcacgaagattactttaatgggtgtcagttacaatcacaaaaagcacccattttgcttttgtttt

SEQ ID NO: 19179 - DNA, 120 bp, Artificial Sequence
  ENSG00000020577_66 (sequence is synthesized)
ctagcaaaaaacaatggggaaactttccatcttaaacagaatattgaaaaggggggggtagtaaagactttgaaaattgagctaatcattttattttcctcttttccatgttcctgtttt

SEQ ID NO: 19180 - DNA, 120 bp, Artificial Sequence
  ENSG00000020577_67 (sequence is synthesized)
tatttgatgttaaagctaaaaataatcagaatacaacaaagttgaatgagaaaggggcaactgaacagtttgtgtgtgacagttggtacctactattgtttataggtcgtctattctatc

SEQ ID NO: 19181 - DNA, 120 bp, Artificial Sequence
  ENSG00000020577_68 (sequence is synthesized)
ttaagccttccatttaaaggaaacttctaggaaatacctaacattttgaagaaatccaaacgactattaaaacactatcaaacaaaaggccataattagctgggcgcagtgcctcatgcc

SEQ ID NO: 19182 - DNA, 78 bp, Artificial Sequence
  ENSG00000020577_69 (sequence is synthesized)
tgggaggctgaggcaggaggatcatttgaaactaacctgagcaacaaagcaagagtagatggctgtagtccgagctgc

SEQ ID NO: 19183 - DNA, 120 bp, Artificial Sequence
  ENSG00000020577_70 (sequence is synthesized)
aaaatacaaaaattagccagatgtggtagtagatggctgtagtccgagctgcttaggatgttgaggtgggaggaaggcttgaggctaagaggttgaggttgcagtgagctgtgattgtgc

SEQ ID NO: 19184 - DNA, 120 bp, Artificial Sequence
  ENSG00000020577_71 (sequence is synthesized)
gtctcaaaaaaaaactgtaattaagaaggaactattaatgcatgaaaaaatggagacaccctcattaccctcatggagcttgcattctaatggagaggggccagaaataagcatactgta

SEQ ID NO: 19185 - DNA, 120 bp, Artificial Sequence
  ENSG00000020577_72 (sequence is synthesized)
cagcaggtcacatggtggtaagcgctatggaaaaaacaaagcatgacctgggaataagggagtgtaaggtgagagagtggggtgggcaatttaaaatagtgtagacagataagatctcat

SEQ ID NO: 19186 - DNA, 120 bp, Artificial Sequence
  ENSG00000020577_73 (sequence is synthesized)
taggaaggtgacatttgagcaaagacagagctgagagaggctaaacatgggtgtgggggaaacgtgttccaggcagaggaagcagcaagtgtgaaggttctgaggcaggcacgcggctga

SEQ ID NO: 19187 - DNA, 120 bp, Artificial Sequence
  ENSG00000020577_74 (sequence is synthesized)
aaacaggagagggtcagtagtaagggtggaggctagatcatagagggactaacaggccatcataaggactttggcttttactctgagatgggaagccattgacatgtttgatcaggggag

SEQ ID NO: 19188 - DNA, 120 bp, Artificial Sequence
  ENSG00000020577_75 (sequence is synthesized)
tgacatgacttaccttctagttttaaaagatccttcttttagaaatgattgttatggttgataagagactactggagagggtggggatatgcagaaacatggtgaggggtagtcacattc

SEQ ID NO: 19189 - DNA, 120 bp, Artificial Sequence
  ENSG00000020577_76 (sequence is synthesized)
cagatgtattttgaagattcagcccataggatttatggagaggttagatgcaggatatgagagaaaggagtcaaggatactccaaggttttgacctgagcaattggaaagatggaaagcc

SEQ ID NO: 19190 - DNA, 120 bp, Artificial Sequence
  ENSG00000020577_77 (sequence is synthesized)
atctgctgagataggaaagaggagcaaagaagcagatgtggtgagagtgagagcaagagttgggttgtggacatgttgactttgagatcatctgagtgagcatggagagggtgcagttgg

SEQ ID NO: 19191 - DNA, 120 bp, Artificial Sequence
  ENSG00000020577_78 (sequence is synthesized)
agtgtgaatctggggctcaggggagaaacctgggctggaaatacaaacgtggagttgtctgcatactcatgggccagaggtcagaaccgaggcaggtggctgggggagctggcctggttt

SEQ ID NO: 19192 - DNA, 120 bp, Artificial Sequence
  ENSG00000020577_79 (sequence is synthesized)
ttgtgccctctgggaatggccagcctcagacctcctgactggtcatggccaggaggtcagaaatctgaaggtgaatcctaaccctaacttgagtccttggctgagatctcaggactactt

SEQ ID NO: 19193 - DNA, 120 bp, Artificial Sequence
  ENSG00000020577_80 (sequence is synthesized)
cccagctggcctgggtcctcaaggagtaaaggagcagtcctggagcacccagctgtgccggtacctggggaaaaagtaactacagatggaaagtctccatggaagaaatgaccagatctc

SEQ ID NO: 19194 - DNA, 120 bp, Artificial Sequence
  ENSG00000020577_81 (sequence is synthesized)
tactctggaaagagaaataacaaagaaaatattcagaaaacatagtagaggtgagctgacatcatcaaaccttgaagttcttgcacttaagttttccactgtgtcctgaatcaggtgata

SEQ ID NO: 19195 - DNA, 89 bp, Artificial Sequence
  ENSG00000020577_82 (sequence is synthesized)
tgaagctcaagcaatcctcccacctcagcgtctggagtagctggatctacaggaatcattaaccaatggcaacaggaatccaaggataa

SEQ ID NO: 19196 - DNA, 120 bp, Artificial Sequence
  ENSG00000020577_83 (sequence is synthesized)
tccccaccacaatcaatacgattggaaccagcacaagtacaaactgactctaatcctggctatacagaggaacccccacttccacttggggtacacctggcaggcaccagtcaaagcatc

SEQ ID NO: 19197 - DNA, 120 bp, Artificial Sequence
  ENSG00000020577_84 (sequence is synthesized)
caccagatagtctgaaacggttgcagaagtaccagaaagcaaagatgtctaagctggaatgtcccagcactcagggcagccgtaaacagtctgcccaattttatataaatacttagacag

SEQ ID NO: 19198 - DNA, 120 bp, Artificial Sequence
  ENSG00000020577_85 (sequence is synthesized)
tttttcctttcgtatctgcgtacagatgggctgcatctgtgttcacacagcagaaaatggtactatattgttccctttaagagtgtgggttttctctacttaatctcggactcttcatgg

SEQ ID NO: 19199 - DNA, 120 bp, Artificial Sequence
  ENSG00000020577_86 (sequence is synthesized)
cccaccacaatcaatacgattggaaccagcacaagtacaagtaagttccccggaatccctttaacgtagtctggtttggcgatttgctgtgtatgtggcatgtcctgctgacagtgtctg

SEQ ID NO: 19200 - DNA, 120 bp, Artificial Sequence
  ENSG00000020577_87 (sequence is synthesized)
caccctgtgaccctgggagagaaggactgattggaattggctgtgggaaaggtcctttggaccccatatttgttgctctttgactctgcaaagatgaaaatacttgggaaggtaaaagtg

SEQ ID NO: 19201 - DNA, 120 bp, Artificial Sequence
  ENSG00000020577_88 (sequence is synthesized)
actgatggtccaaatttgggttataaacagaccaaaaataaatagacaataaatgaaagaaggaaacttgccgtttccacaatcagaaatgcatttcacccatgtctttcaccctggggt

SEQ ID NO: 19202 - DNA, 120 bp, Artificial Sequence
  ENSG00000020577_89 (sequence is synthesized)
tttggatttgctgagacactgagttactgtgtgattctctaaacctaattctaacccatggttaaccaggcagcctcatgggctttgtgctttctctttattttttttttcctctttctt

SEQ ID NO: 19203 - DNA, 120 bp, Artificial Sequence
  ENSG00000020577_90 (sequence is synthesized)
tctctttatttatttattttttcttaaatttcaccctggaatgtttcctccctttgcattttctggttttaatccccaattgttggggcacttttttcctgaccagtgggagcaggtttg

SEQ ID NO: 19204 - DNA, 120 bp, Artificial Sequence
  ENSG00000020577_91 (sequence is synthesized)
ctgtgtgctgtggcctggtgagaatgccatggacttctctcgctcagtccaacaccttaggagaggtgggtcaggaactgctttgtgcgtggggagagcggaggacagccctctgctctt

SEQ ID NO: 19205 - DNA, 120 bp, Artificial Sequence
  ENSG00000020577_92 (sequence is synthesized)
acagccctctgctcttttgaccactaaagcaaagtattgcaccctcagctgggcactggggctgggagtcctctctgtgtctccccactgaggctgagcaaagtgacaaacacaccattg

SEQ ID NO: 19206 - DNA, 120 bp, Artificial Sequence
  ENSG00000020577_93 (sequence is synthesized)
gtgtctgtataaagtagcggtgtggaagtgcaccctgtcttcaaacagcgttccttaatgctagtttgcacctgtccatgaatgcagtggcagtgccaagataactttcttgaaggaatg

SEQ ID NO: 19207 - DNA, 120 bp, Artificial Sequence
  ENSG00000020577_94 (sequence is synthesized)
cttttgcaattagacctcgtgtgcctgtcttcatgcaggaacccccagttaaaagatatgagaggattaataattggggtgccggcacagagactcaggcctgtgatcccaccactttgg

SEQ ID NO: 19208 - DNA, 120 bp, Artificial Sequence
  ENSG00000020577_95 (sequence is synthesized)
ccgtgcacacttccccacagaacatgctgatgttccagcagccaggttcccaagttcacagtggactgtgtttaacagaccttagaggttggttgagcctgagtggagccccttccatgc

SEQ ID NO: 19209 - DNA, 120 bp, Artificial Sequence
  ENSG00000020633_0 (sequence is synthesized)
gccgctgttatgcgtattcccgtagacccaagcaccagccgccgcttcacacctccctccccggccttcccctgcggcggcggcggcggcaagatgggcgagaacagcggcgcgctgagc

SEQ ID NO: 19210 - DNA, 120 bp, Artificial Sequence
  ENSG00000020633_1 (sequence is synthesized)
gcgcaggcggccgtggggcccggagggcgcgcccggcccgaggtgcgctcgatggtggacgtgctggcggaccacgcaggcgagctcgtgcgcaccgacagccccaacttcctctgctcc

SEQ ID NO: 19211 - DNA, 120 bp, Artificial Sequence
  ENSG00000020633_2 (sequence is synthesized)
gtgctgccctcgcactggcgctgcaacaagacgctgcccgtcgccttcaaggtggtggcattgggggacgtgccggatggtacggtggtgactgtgatggcaggcaatgacgagaactac

SEQ ID NO: 19212 - DNA, 120 bp, Artificial Sequence
  ENSG00000020633_3 (sequence is synthesized)
tccgctgagctgcgcaatgcctcggccgtcatgaagaaccaggtggccaggttcaacgaccttcgcttcgtgggccgcagtgggcgagggaagagtttcaccctgaccatcactgtgttc

SEQ ID NO: 19213 - DNA, 120 bp, Artificial Sequence
  ENSG00000020633_4 (sequence is synthesized)
accaaccccacccaagtggcgacctaccaccgagccatcaaggtgaccgtggacggaccccgggagcccagacggcaccggcagaagctggaggaccagaccaagccgttccctgaccgc

SEQ ID NO: 19214 - DNA, 120 bp, Artificial Sequence
  ENSG00000020633_5 (sequence is synthesized)
tttggggacctggaacggctgcgcatgcgggtgacaccgagcacacccagcccccgaggctcactcagcaccacaagccacttcagcagccagccccagaccccaatccaaggcacctcg

SEQ ID NO: 19215 - DNA, 120 bp, Artificial Sequence
  ENSG00000020633_6 (sequence is synthesized)
gaactgaacccattctccgacccccgccagtttgaccgctccttccccacgctgccaaccctcacggagagccgcttcccagaccccaggatgcattatcccggggccatgtcagctgcc

SEQ ID NO: 19216 - DNA, 120 bp, Artificial Sequence
  ENSG00000020633_7 (sequence is synthesized)
ttcccctacagcgccacgccctcgggcacgagcatcagcagcctcagcgtggcgggcatgccggccaccagccgcttccaccatacctacctcccgccaccctacccgggggccccgcag

SEQ ID NO: 19217 - DNA, 120 bp, Artificial Sequence
  ENSG00000020633_8 (sequence is synthesized)
aaccagagcgggcccttccaggccaacccgtccccctaccacctctactacgggacatcctctggctcctaccagttctccatggtggccggcagcagcagtgggggcgaccgctcacct

SEQ ID NO: 19218 - DNA, 120 bp, Artificial Sequence
  ENSG00000020633_9 (sequence is synthesized)
acccgcatgctggcctcttgcaccagcagcgctgcctctgtcgccgccggcaacctcatgaaccccagcctgggcggccagagtgatggcgtggaggccgacggcagccacagcaactca

SEQ ID NO: 19219 - DNA, 120 bp, Artificial Sequence
  ENSG00000020633_10 (sequence is synthesized)
cccacggccctgagcacgccaggccgcatggatgaggccgtgtggcggccctactgaccgccctggtggactcctcccgctggaggcggggaccctaacaaccttcaagaccagtgatgg

SEQ ID NO: 19220 - DNA, 120 bp, Artificial Sequence
  ENSG00000020633_11 (sequence is synthesized)
gccggctccgaggctccgggcgggaatgggacctgcgctccagggtggtctcggtcccagggtggtcccagctggtgggagcctctggctgcatctgtgcagccacatccttgtacagag

SEQ ID NO: 19221 - DNA, 120 bp, Artificial Sequence
  ENSG00000020633_12 (sequence is synthesized)
gcataggttaccacccccaccccggcccgggatactgcccccggcccagatcctggccgtctcatcccatacttctgtggggaatcagcctcctgccacccccccggaaggacctcactg

SEQ ID NO: 19222 - DNA, 120 bp, Artificial Sequence
  ENSG00000020633_13 (sequence is synthesized)
tctccagctatgcccagtgctgcatgggacccatgtctcctgggacagaggccatctctcttccagagagaggcagcattggcccacaggataagcctcaggccctgggaaacctcccga

SEQ ID NO: 19223 - DNA, 120 bp, Artificial Sequence
  ENSG00000020633_14 (sequence is synthesized)
cccctgcaccttcgttggagcccctgcatcccctgggtccagccccctctgcatttacacagatttgagtcagaactggaaagtgtcccccacccccaccaccctcgagcggggttcccc

SEQ ID NO: 19224 - DNA, 120 bp, Artificial Sequence
  ENSG00000020633_15 (sequence is synthesized)
tcattgtacagatggggcaggacccagcacgctgctggcagagatggtttgagaacacatccaagccagtccccccagcccagcttcccctccgttcctaactgttggctttcccccagc

SEQ ID NO: 19225 - DNA, 120 bp, Artificial Sequence
  ENSG00000020633_16 (sequence is synthesized)
agaagatgagtctatggcatcaggttcttaaacccaggaaagcacctacagaccggctcctccatgcactttaccagctcaacgcatccactctctgttctcttggcagggcgggggagg

SEQ ID NO: 19226 - DNA, 120 bp, Artificial Sequence
  ENSG00000020633_17 (sequence is synthesized)
ggggataggaggtcccctttcccctaggtggtctcataattccatttgtggagagaacaggagggccagatagataggtcctagcagaaggcattgaggtgagggatcattttgggtcag

SEQ ID NO: 19227 - DNA, 120 bp, Artificial Sequence
  ENSG00000020633_18 (sequence is synthesized)
acatcaatgtccctgtcccccctgggtccagccaagctgtgccccatcccccaagcctcctgggaggatccagccaaatcttgcgactcctggcacacacctgtctgtaacctgttttgt

SEQ ID NO: 19228 - DNA, 120 bp, Artificial Sequence
  ENSG00000020633_19 (sequence is synthesized)
acaaaaaaacaaaaaaaaaacaaaacagtttttaaaactgattttagaaaaagaagcttaatctaacgttttcaaacacaaggtctcttacaggtatagttccgtgattatgatagctct

SEQ ID NO: 19229 - DNA, 120 bp, Artificial Sequence
  ENSG00000020633_20 (sequence is synthesized)
aggtctcttacaggtatagttccgtgattatgatagctctgtgattataagcaacatccccgccccctctcccccccgcggacccccagctgcctcctgagggtgtggggttattagggt

SEQ ID NO: 19230 - DNA, 120 bp, Artificial Sequence
  ENSG00000020633_21 (sequence is synthesized)
ctcaatactttctcaaggggctacactccccatcaggcagcatcccaccagcctgcaccacaggctcccctgggaggacgagggaaacgctgatgagacgctgggcatctctcctctgtg

SEQ ID NO: 19231 - DNA, 120 bp, Artificial Sequence
  ENSG00000020633_22 (sequence is synthesized)
gctctaggacatctgtccaggaggctgggcggaggtgggcaggatgtgagaggtggggagtactggctgtgcgtggcaggacagaagcactgtaaagggctctccagccgcagctcagct

SEQ ID NO: 19232 - DNA, 120 bp, Artificial Sequence
  ENSG00000020633_23 (sequence is synthesized)
gcactgcgttccgaggtgaagtcttgcccctgaattttgcaaaatgggaaagtgggcgcttgcccaagggccaggctgcatggattctcacatcagagttctctggccctagaaaggctt

SEQ ID NO: 19233 - DNA, 120 bp, Artificial Sequence
  ENSG00000020633_24 (sequence is synthesized)
agaaaaggcgtaagggaactcataaaggctagcagcatgcggtattttaactttctgcctcggcctctgtggatgcagaaatctgccctacaaaatgctcttcattggttgtctctgtga

SEQ ID NO: 19234 - DNA, 120 bp, Artificial Sequence
  ENSG00000020633_25 (sequence is synthesized)
gagcactgtccccacccaacctgtcacaacggccagaaccatacaccagagacacactggcaggttaggcagtccttctggtgatcctattccattccctcctgctgcggtttctcttgg

SEQ ID NO: 19235 - DNA, 120 bp, Artificial Sequence
  ENSG00000020633_26 (sequence is synthesized)
cctgtcctcactggaaaaacagtctccatctcctcaaaatagttgctgactccctgcacccaaggggcctctccatgccttcttaggaagcagctatgaatccattgtccttgtagtttc

SEQ ID NO: 19236 - DNA, 120 bp, Artificial Sequence
  ENSG00000020633_27 (sequence is synthesized)
ttccctcctgttctctggttatagctggtcccaggtcagcgtgggaggcacctttgggttcccagtgcccagcactttgtagtctcatcccagattactaacccttcctgatcctggaga

SEQ ID NO: 19237 - DNA, 120 bp, Artificial Sequence
  ENSG00000020633_28 (sequence is synthesized)
ggcagggatagtaaataaattgctcttcctaccccatcccccatcccctgacaaaaagtgacggcagccgtactgagtctgtaaggcccaaagtgggtacagacagcctgggctggtaaa

SEQ ID NO: 19238 - DNA, 120 bp, Artificial Sequence
  ENSG00000020633_29 (sequence is synthesized)
agtaggtccttatttacaaggctgcgttaaagttgtactaggcaaacacactgatgtaggaagcacgaggaaaggaagacgttttgatatagtgttactgtgagcctgtcagtagtgggt

SEQ ID NO: 19239 - DNA, 120 bp, Artificial Sequence
  ENSG00000020633_30 (sequence is synthesized)
accaatcttttgtgacatattgtcatgctgaggtgtgacacctgctgcactcatctgatgtaaaaccatcccagagctggcgagaggatggagctgggtggaaactgctttgcactatcg

SEQ ID NO: 19240 - DNA, 120 bp, Artificial Sequence
  ENSG00000020633_31 (sequence is synthesized)
tttgcttggtgtttgtttttaacgcacaacttgcttgtacagtaaactgtcttctgtactatttaactgtaaaatggaattttgactgatttgttacaataatataactctgagatgtgt

SEQ ID NO: 19241 - DNA, 120 bp, Artificial Sequence
  ENSG00000020633_32 (sequence is synthesized)
ggcggcccactctgctctgtcagcttcggagctcctccaccctggctgccgaaagccccttcccgccatctaatgatacactctgcatacgcttctgttgagaatttgtggctagacatt

SEQ ID NO: 19242 - DNA, 120 bp, Artificial Sequence
  ENSG00000020633_33 (sequence is synthesized)
cctgtgggaccgggaatccaaattcttggtagctagaggaaaaaaaaataaaacaacagccaaccaagtgaatcccaacccaaccccctgaagggctgaaaattctcgccttcttcagag

SEQ ID NO: 19243 - DNA, 120 bp, Artificial Sequence
  ENSG00000020633_34 (sequence is synthesized)
ttctttccttttttctttttcgtagcagcaggggggaaaaaagagacaaaaacaaaacaaaaaacaacaaaaagcaacaccccccccttttattttcaaaagtagctagaggaaaaaaaa

SEQ ID NO: 19244 - DNA, 120 bp, Artificial Sequence
  ENSG00000020633_35 (sequence is synthesized)
ggcccttgccgcctccagggccctgcgcgggagctggttggctcctggtgctccccacccccggccgccctcgtacccaccagagcctgggctctgtcaaggagcggggcatggcatcga

SEQ ID NO: 19245 - DNA, 120 bp, Artificial Sequence
  ENSG00000020922_0 (sequence is synthesized)
agccaatgagagccgaactggacttgaagcatctacgttatccatgaagtgtcgcgagagaaacggacgccgttctctcccgcggaattcaggtttacggccctgcgggttctcagagaa

SEQ ID NO: 19246 - DNA, 120 bp, Artificial Sequence
  ENSG00000020922_1 (sequence is synthesized)
tttctagaatttggaatcgagtgcattttctgacatttgagtacagtacccaggggttcttggagaagaacctggtcccagaggagcttgactgaccataaaaatgagtactgcagatgc

SEQ ID NO: 19247 - DNA, 120 bp, Artificial Sequence
  ENSG00000020922_2 (sequence is synthesized)
acttgatgatgaaaacacatttaaaatattagttgcaacagatattcatcttggatttatggagaaagatgcagtcagaggaaatgatacgtttgtaacactcgatgaaattttaagact

SEQ ID NO: 19248 - DNA, 120 bp, Artificial Sequence
  ENSG00000020922_3 (sequence is synthesized)
tgcccaggaaaatgaagtggattttattttgttaggtggtgatctttttcatgaaaataagccctcaaggaaaacattacatacctgcctcgagttattaagaaaatattgtatgggtga

SEQ ID NO: 19249 - DNA, 120 bp, Artificial Sequence
  ENSG00000020922_4 (sequence is synthesized)
tcggcctgtccagtttgaaattctcagtgatcagtcagtcaactttggttttagtaagtttccatgggtgaactatcaagatggcaacctcaacatttcaattccagtgtttagtattca

SEQ ID NO: 19250 - DNA, 120 bp, Artificial Sequence
  ENSG00000020922_5 (sequence is synthesized)
tggcaatcatgacgatcccacaggggcagatgcactttgtgccttggacattttaagttgtgctggatttgtaaatcactttggacgttcaatgtctgtggagaagatagacattagtcc

SEQ ID NO: 19251 - DNA, 120 bp, Artificial Sequence
  ENSG00000020922_6 (sequence is synthesized)
ggttttgcttcaaaaaggaagcacaaagattgcgctatatggtttaggatccattccagatgaaaggctctatcgaatgtttgtcaataaaaaagtaacaatgttgagaccaaaggaaga

SEQ ID NO: 19252 - DNA, 120 bp, Artificial Sequence
  ENSG00000020922_7 (sequence is synthesized)
tgagaactcttggtttaacttatttgtgattcatcagaacaggagtaaacatggaagtactaacttcattccagaacaatttttggatgacttcattgatcttgttatctggggccatga

SEQ ID NO: 19253 - DNA, 120 bp, Artificial Sequence
  ENSG00000020922_8 (sequence is synthesized)
acatgagtgtaaaatagctccaaccaaaaatgaacaacagctgttttatatctcacaacctggaagctcagtggttacttctctttccccaggagaagctgtaaagaaacatgttggttt

SEQ ID NO: 19254 - DNA, 120 bp, Artificial Sequence
  ENSG00000020922_9 (sequence is synthesized)
gctgcgtattaaagggaggaagatgaatatgcataaaattcctcttcacacagtgcggcagtttttcatggaggatattgttctagctaatcatccagacatttttaacccagataatcc

SEQ ID NO: 19255 - DNA, 120 bp, Artificial Sequence
  ENSG00000020922_10 (sequence is synthesized)
taaagtaacccaagccatacaaagcttctgtttggagaagattgaagaaatgcttgaaaatgctgaacgggaacgtctgggtaattctcaccagccagagaagcctcttgtacgactgcg

SEQ ID NO: 19256 - DNA, 120 bp, Artificial Sequence
  ENSG00000020922_11 (sequence is synthesized)
agtggactatagtggaggttttgaacctttcagtgttcttcgctttagccagaaatttgtggatcgggtagctaatccaaaagacattatccattttttcaggcatagagaacaaaagga

SEQ ID NO: 19257 - DNA, 120 bp, Artificial Sequence
  ENSG00000020922_12 (sequence is synthesized)
aaaaacaggagaagagatcaactttgggaaacttatcacaaagccttcagaaggaacaactttaagggtagaagatcttgtaaaacagtactttcaaaccgcagagaagaatgtgcagct

SEQ ID NO: 19258 - DNA, 120 bp, Artificial Sequence
  ENSG00000020922_13 (sequence is synthesized)
ctcactgctaacagaaagagggatgggtgaagcagtacaagaatttgtggacaaggaggagaaagatgccattgaggaattagtgaaataccagttggaaaaaacacagcgatttcttaa

SEQ ID NO: 19259 - DNA, 120 bp, Artificial Sequence
  ENSG00000020922_14 (sequence is synthesized)
agaacgtcatattgatgccctcgaagacaaaatcgatgaggaggtacgtcgtttcagagaaaccagacaaaaaaatactaatgaagaagatgatgaagtccgtgaggctatgaccagggc

SEQ ID NO: 19260 - DNA, 120 bp, Artificial Sequence
  ENSG00000020922_15 (sequence is synthesized)
cagagcactcagatctcagtcagaggagtctgcttctgcctttagtgctgatgaccttatgagtatagatttagcagaacagatggctaatgactctgatgatagcatctcagcagcaac

SEQ ID NO: 19261 - DNA, 120 bp, Artificial Sequence
  ENSG00000020922_16 (sequence is synthesized)
caacaaaggaagaggccgaggaagaggtcgaagaggtggaagagggcagaattcagcatcgagaggagggtctcaaagaggaagagcagacactggtctggagacttctacccgtagcag

SEQ ID NO: 19262 - DNA, 120 bp, Artificial Sequence
  ENSG00000020922_17 (sequence is synthesized)
gaactcaaagactgctgtgtcagcatctagaaatatgtctattatagatgcctttaaatctacaagacagcagccttcccgaaatgtcactactaagaattattcagaggtgattgaggt

SEQ ID NO: 19263 - DNA, 120 bp, Artificial Sequence
  ENSG00000020922_18 (sequence is synthesized)
agatgaatcagatgtggaagaagacatttttcctaccacttcaaagacagatcaaaggtggtccagcacatcatccagcaaaatcatgtcccagagtcaagtatcgaaaggggttgattt

SEQ ID NO: 19264 - DNA, 120 bp, Artificial Sequence
  ENSG00000020922_19 (sequence is synthesized)
tgaatcaagtgaggatgatgatgatgatccttttatgaacactagttctttaagaagaaatagaagataatatatttaatggcactgagaaacatgcaagatacaggaaaaatgaaaatg

SEQ ID NO: 19265 - DNA, 120 bp, Artificial Sequence
  ENSG00000020922_20 (sequence is synthesized)
ttacaagctaagagtttacagtttaagattttaagtattgtttcctgagcataactccataagtaagaaatttctagttcacagacatacaatagcattgattcaccttgtttttttaac

SEQ ID NO: 19266 - DNA, 120 bp, Artificial Sequence
  ENSG00000020922_21 (sequence is synthesized)
ctggttgttgtagtaagagctttgtttcaatatcactcttgagtaaagattaaaataaagctaccattttacatttctatttcataatgaaaaactatgtcagtattttaatatggttac

SEQ ID NO: 19267 - DNA, 120 bp, Artificial Sequence
  ENSG00000020922_22 (sequence is synthesized)
atttagccaaagttgagggaaagagcttataaaatttaacttcttcataattttagtaatttcctagaggttctgggttttctgaaagtaaaacaatttatgcgaacctatgtctaaatt

SEQ ID NO: 19268 - DNA, 120 bp, Artificial Sequence
  ENSG00000020922_23 (sequence is synthesized)
cactgtttgttactatgtatgtttttttccaatgcttcttataagactaaatgattagaagtacctaatagtttgaacagatatgtttttatttaaaagagtagaataacctttcagaat

SEQ ID NO: 19269 - DNA, 120 bp, Artificial Sequence
  ENSG00000020922_24 (sequence is synthesized)
tactgagttttttattccagttgtagcaaagatttcaaaagattgtgttcccattaagtggtagtaatttcctttattattctgtatccttaatggtgttctctctctctctctctctct

SEQ ID NO: 19270 - DNA, 120 bp, Artificial Sequence
  ENSG00000020922_25 (sequence is synthesized)
ctctctctccctctcccccccgttccccactcttcctttctcctttgctttttcttctctttcatacatatatgcgtgcctagttctaggaggaaacgggttaaaaattgttttaaacta

SEQ ID NO: 19271 - DNA, 120 bp, Artificial Sequence
  ENSG00000020922_26 (sequence is synthesized)
catcttgaaaatattgaagaatttgttttaggtagagtggtcagttgaaccttacagtaaagtatagaaatatatttaatgtggaatgtcaatgccaggatttctcattaacaatatttt

SEQ ID NO: 19272 - DNA, 120 bp, Artificial Sequence
  ENSG00000020922_27 (sequence is synthesized)
atctcaactttggttcctgtgatacatttctgaatgggcaattccagaaatcttagtagcccatgttaagcttctattttttacttgttttcggggagaaataagaattagacatcttca

SEQ ID NO: 19273 - DNA, 120 bp, Artificial Sequence
  ENSG00000020922_28 (sequence is synthesized)
attccttcttctagttttatgcgacagctttactttaaaattcaagttatacatcttgggagtacaatggcccgacatttcttcataggtagaaacaaatacttgactcagtgatactca

SEQ ID NO: 19274 - DNA, 120 bp, Artificial Sequence
  ENSG00000020922_29 (sequence is synthesized)
tgaccattagaatagtcatacctggaatgtgtcaaattataagagacagacacttggttagtggctgcctcatatagcacttttgaagaggcctaagtcaaaacttgcaatataacattc

SEQ ID NO: 19275 - DNA, 120 bp, Artificial Sequence
  ENSG00000020922_30 (sequence is synthesized)
tattgactttcttaaaaatattttttctgtacctaacttgagcataagggttatttgagcaagtaacattaactcagtggaaggcattgtcctgtgaaatattcttaggcagatctgccc

SEQ ID NO: 19276 - DNA, 120 bp, Artificial Sequence
  ENSG00000020922_31 (sequence is synthesized)
acatctttattgaacttgaaatctaatatttctagtatttgaacaaagcagaaggttaagtcagggaagagcagtgctgtccatgatgtaatggaagctaccaggggaggcagtgtctgg

SEQ ID NO: 19277 - DNA, 120 bp, Artificial Sequence
  ENSG00000020922_32 (sequence is synthesized)
atgatgctgtgctacctacccctgcacaagccatgctggctcagtctgagctgtgggccacatcagctagtggctcttctcatgcatcagttaggtgggtctgggtgagagttatagtga

SEQ ID NO: 19278 - DNA, 120 bp, Artificial Sequence
  ENSG00000020922_33 (sequence is synthesized)
gggaatggtcactaaagtatcctgacaagttcctaggaaaaaaggaataaagtttttttccttaaaaaaaaaaaaattgctcttggctgtgaaaagaggtactaaatgcgattcagttca

SEQ ID NO: 19279 - DNA, 120 bp, Artificial Sequence
  ENSG00000020922_34 (sequence is synthesized)
ccgctaaggaaagtgatgacatagcagttacagagggtgataaatctctccagctaattcaggtcattttgtgaatactatgtatcaagccctgaaaatatggtaaataaaacgtgacag

SEQ ID NO: 19280 - DNA, 120 bp, Artificial Sequence
  ENSG00000020922_35 (sequence is synthesized)
ggaaacctttttttgattgaatattgttacatagttaaatgtgctatatatccttaatattttatattgatcctgcaaaatctgttggttttaggggagttttgttttttgtttctaaca

SEQ ID NO: 19281 - DNA, 120 bp, Artificial Sequence
  ENSG00000020922_36 (sequence is synthesized)
attttcagacctgttggtataggaatgtagaagtctttcagatgatttgaaagcagctgcatttgctcttggaggctttgggagagcaggaatgaaaacattcagaggaagacatctgta

SEQ ID NO: 19282 - DNA, 120 bp, Artificial Sequence
  ENSG00000020922_37 (sequence is synthesized)
gggaattcttctgttacttaccaaagaataagtgtctttctggtgttttatttcctatcataaaaatacaacagtgcatttacaaggttaaagattcctcgaagttctaggaaattcttg

SEQ ID NO: 19283 - DNA, 120 bp, Artificial Sequence
  ENSG00000020922_38 (sequence is synthesized)
aaaatataagtggtgcttagaaaattcaagcatttaggaatgtgacctttaattcaggtatgtaaaagacttttttcccaaacttttaaaagtaggaaatacaataaatacagaaaagtc

SEQ ID NO: 19284 - DNA, 120 bp, Artificial Sequence
  ENSG00000020922_39 (sequence is synthesized)
atatggttgaataaataattataaattgagcactgatggaatccctctacaggtcaagaaatagcgcagtgtcctggatgcccattatattgttttctcctttctgggtaacaagcccta

SEQ ID NO: 19285 - DNA, 120 bp, Artificial Sequence
  ENSG00000020922_40 (sequence is synthesized)
acttctgtaatttaaaagctcctacttttgccacaaggtggtgcttctgccattagacgcagttaggaggatgcaactgcaaatctaaaattacgaagttagtgtagttgcaataaactt

SEQ ID NO: 19286 - DNA, 120 bp, Artificial Sequence
  ENSG00000020922_41 (sequence is synthesized)
agaacatatgcattaatactaaacctatgcagtaataccataattagccttctaatcatgtaatttgctttacttaggtatttcatttggttcagcctgttatggaatttaccagcttga

SEQ ID NO: 19287 - DNA, 120 bp, Artificial Sequence
  ENSG00000020922_42 (sequence is synthesized)
taaatttgcctataaagttttataaagaaaaggaatattttgttttcataaagaggaaaatccattcttagaaaaaaactgagtaaaaaagtatctcaatgggctgggtgcagtggctca

SEQ ID NO: 19288 - DNA, 120 bp, Artificial Sequence
  ENSG00000020922_43 (sequence is synthesized)
gcaacaagagtgaaactcaatctcaaaaaaaaaaaaagtatctaaatgtaaaatatcttttttggaaatatagaatttaaaagcgactttcccccaaagaaatctgatgtcctttttgta

SEQ ID NO: 19289 - DNA, 81 bp, Artificial Sequence
  ENSG00000020922_44 (sequence is synthesized)
attttgggcttgcccaggctggagggcaggggcaccatttcggctcactgcaagctccacgccattctcctgcctcagcct

SEQ ID NO: 19290 - DNA, 120 bp, Artificial Sequence
  ENSG00000020922_45 (sequence is synthesized)
accattaagatcattatagaagtttggtataatgaagatttgggtttttcagtccaatgagtttccatattcttgaatgaaaaagatccacatttcatcatttgcctgtttcattttctt

SEQ ID NO: 19291 - DNA, 120 bp, Artificial Sequence
  ENSG00000020922_46 (sequence is synthesized)
ttagtacttttgaacttagtttggtcagaaaatactagaattttagtttgatctaaagaaccagcttatataacttgctgttgccatgtacatttgtatgtctttgctgtgtcaaataac

SEQ ID NO: 19292 - DNA, 120 bp, Artificial Sequence
  ENSG00000020922_47 (sequence is synthesized)
tggatctgattttagctctttttaagtggtgaaagcaatgcatttttattcttcaaattcagacattgaatgtgtattaaaatgtgtgtgcttacctttaatcctctccccaccgacaat

SEQ ID NO: 19293 - DNA, 120 bp, Artificial Sequence
  ENSG00000020922_48 (sequence is synthesized)
atcctctccccaccgacaattaggaacacgtttctccaattactgttggcaagactaccaagaaaaattgttgaattagaatcccagcaccgggcacggtggctcacgcctgtgatccta

SEQ ID NO: 19294 - DNA, 68 bp, Artificial Sequence
  ENSG00000020922_49 (sequence is synthesized)
tggaggtcacggtgagctgacaatctatccatcaatcgataagaaccccagattgtatagctacatgt

SEQ ID NO: 19295 - DNA, 120 bp, Artificial Sequence
  ENSG00000020922_50 (sequence is synthesized)
ccatcaatcgataagaaccccagattgtatagctacatgttttagcccccttttcaaagtatatgttctccttggtacttattttgacattctgacttttctacatatgctttatcaacc

SEQ ID NO: 19296 - DNA, 120 bp, Artificial Sequence
  ENSG00000020922_51 (sequence is synthesized)
tcttaattaaaccatcattgtctattttgagagataactgcgctgcttcccgttgtgtgttttaaatgttattgttcagtttgagtcaaataaaaggatatttaatctgtggtgccttga

SEQ ID NO: 19297 - DNA, 120 bp, Artificial Sequence
  ENSG00000020922_52 (sequence is synthesized)
aaacggacgccgttctctcccgcggaattcaggtttacggccctgcgggttctcagaggcaagttcagaccgtgttgttttcttttcacggatcctgccctttcttcccgaaaagaagac

SEQ ID NO: 19298 - DNA, 120 bp, Artificial Sequence
  ENSG00000020922_53 (sequence is synthesized)
aactcaaagactgctgtgtcagcatctagaaatatgtctattatagatggtgagtatagactgcaagtgattatttataaattccaacattagaaagaccaaggtaatcaccattggtag

SEQ ID NO: 19299 - DNA, 120 bp, Artificial Sequence
  ENSG00000020922_54 (sequence is synthesized)
tttattatctgatcactgcagtaaaaatgtgaggtggtgacagtgatggcaatgaaacagaaatgggagggacacaccggagaagttgtcagggaagaactcaaaggatttggggcctga

SEQ ID NO: 19300 - DNA, 120 bp, Artificial Sequence
  ENSG00000020922_55 (sequence is synthesized)
ttatataatttattacagttgtcccttggtatccacggggggtgttcggtccaggacctaaaatcctgggatgctgaaatcccttgaataaaatggtatagcatttgcatataacctaca

SEQ ID NO: 19301 - DNA, 120 bp, Artificial Sequence
  ENSG00000020922_56 (sequence is synthesized)
tatatcctcctatgtactttaaatcatctctagattacttgtaatacctgatacaatgtaaatactgtttaaatagttgttatactgtattgctttaaaaatttatatttttcgttgtta

SEQ ID NO: 19302 - DNA, 120 bp, Artificial Sequence
  ENSG00000020922_57 (sequence is synthesized)
tatgggtgatcggcctgtccagtttgaaattctcagtgatcagtcagtcaactttggttttagtaaacagggtctggctctctttcctatgctgtagtgcagtggcatgatcatagctca

SEQ ID NO: 19303 - DNA, 120 bp, Artificial Sequence
  ENSG00000020922_58 (sequence is synthesized)
gtaagcagatgcactttgtgccttggacattttaagttgtgctggatttgtaaatcactttggacgttcaatgtctgtggagaagatagacattagtccggttttgcttcaaaaaggaag

SEQ ID NO: 19304 - DNA, 120 bp, Artificial Sequence
  ENSG00000021300_0 (sequence is synthesized)
gaaatgctgccctggccacccaggaaccatgagccctgcagccccggtcccgcctgactccgctctggaaagtccttttgaagaaatggccctggtgaggggcggctggctgtggagaca

SEQ ID NO: 19305 - DNA, 120 bp, Artificial Sequence
  ENSG00000021300_1 (sequence is synthesized)
gagctccatcctccgccgctggaagcggaactggtttgccctgtggctggacgggaccctgggatactaccacgatgagacagcgcaggacgaggaggaccgtgtgctcatccacttcaa

SEQ ID NO: 19306 - DNA, 120 bp, Artificial Sequence
  ENSG00000021300_2 (sequence is synthesized)
tgtccgtgacataaagatcggcccagagtgccatgatgtgcagcccccagagggccggagccgagatggcctgctgactgtgaacctacgggaaggcggccgcctgcacctctgtgcgga

SEQ ID NO: 19307 - DNA, 120 bp, Artificial Sequence
  ENSG00000021300_3 (sequence is synthesized)
gaccaaggatgatgccctagcatggaagacagcactgctggaggcaaactccaccccggccccagctggagccaccgtccctcccaggagccgccgggtttgctccaaggtcaggtgtgt

SEQ ID NO: 19308 - DNA, 120 bp, Artificial Sequence
  ENSG00000021300_4 (sequence is synthesized)
gacccgctcgtggagcccctgtaaggttgagaggcggatctgggtgcgcgtctacagcccgtaccaagactactacgaggtggtgccccccaatgcacacgaggccacgtatgtccgcag

SEQ ID NO: 19309 - DNA, 120 bp, Artificial Sequence
  ENSG00000021300_5 (sequence is synthesized)
ctactacggaccgccctacgcaggccctggcgtgacgcacgtgatagtgcgggaggatccctgctacagcgccggcgcccctctggccatgggcatgcttgcgggagccgccactggggc

SEQ ID NO: 19310 - DNA, 120 bp, Artificial Sequence
  ENSG00000021300_6 (sequence is synthesized)
ggcgctgggctcgctcatgtggtcgccctgctggttctgagccctgggactcggagcactgacccctgcgcttggattgctagactcctcttcctcctggaccccatcctctaccatcca

SEQ ID NO: 19311 - DNA, 120 bp, Artificial Sequence
  ENSG00000021300_7 (sequence is synthesized)
agccctgtcccactttggccctatcctctccattagctccttccgggtttggaccattccccccactccctacccttaatccccacatgggaagaagctatcatcacaggtacaaacatc

SEQ ID NO: 19312 - DNA, 120 bp, Artificial Sequence
  ENSG00000021300_8 (sequence is synthesized)
ggatacatttcctctaaacacaacagggcacagcaaatacgacttcatttggcttcgagttccccaggcgctgtagacacaacatgaatcgggctctctgctctctccttagggagctcg

SEQ ID NO: 19313 - DNA, 120 bp, Artificial Sequence
  ENSG00000021300_9 (sequence is synthesized)
agtcctggtggggagaacaggagtaaacaaggacttgacaaagctgaagagttatcagtcctttgacaaggacaggtggggcagggagcaagacaggtaggctggaagaacagttattgg

SEQ ID NO: 19314 - DNA, 120 bp, Artificial Sequence
  ENSG00000021300_10 (sequence is synthesized)
caagtatgcagagccgtgaacgtcatggcatgtccaaggaattaaatgggagttcatttgggctggggtggaggctgggatcagaccgtggtgggccttcaagctaaggagcttcctagg

SEQ ID NO: 19315 - DNA, 120 bp, Artificial Sequence
  ENSG00000021300_11 (sequence is synthesized)
tgaaaggggagatgtgagccttctctggagggaagtttcatgattgcatctataatgaatatattgcctgttttgtgaatactgacacatgtccatacctaaaacactcctgagtcaagt

SEQ ID NO: 19316 - DNA, 120 bp, Artificial Sequence
  ENSG00000021300_12 (sequence is synthesized)
cccatccttcccacaaacagcttcctggctggtacccatgataacaattgagctgaacctggggacccctggttggggaacaggtgagttctatttgagacttccagccctagaaagctg

SEQ ID NO: 19317 - DNA, 120 bp, Artificial Sequence
  ENSG00000021300_13 (sequence is synthesized)
cctccgtccagaaatgcctctcacaccaggagctcggccctctctttgtagctgtgactgtcaccctctcaggctttgtctcatccttcattctgaataagatggcagtgttctcctctg

SEQ ID NO: 19318 - DNA, 120 bp, Artificial Sequence
  ENSG00000021300_14 (sequence is synthesized)
gggcctgatccacctctacaccagcccaggaagccccatctgtgcctgccctcaggtggtccaccagtctccccctttggttcccttccagtctcttccccctttctatcccaatcacca

SEQ ID NO: 19319 - DNA, 120 bp, Artificial Sequence
  ENSG00000021300_15 (sequence is synthesized)
atagaaatgctaacatccctgcctggtagccagactagcccactaaagctcccctgtaaatgggggctccattagttctgctgccgagactaataaagatttggttggctctagcagtaa

SEQ ID NO: 19320 - DNA, 120 bp, Artificial Sequence
  ENSG00000021300_16 (sequence is synthesized)
actccccctccctggggtgggcaggtccggagggcggggcccgggggcagctgggctctcaggcgctgcgggaggagagaaatgccccaggctctccggggcacacaaagcgcaggcgca

SEQ ID NO: 19321 - DNA, 120 bp, Artificial Sequence
  ENSG00000021300_17 (sequence is synthesized)
aagagaggaaggcttaaagagccagactgcgcagccaggactggggtgatgggcgctgtcctgccaggccaaagaatgaagatgtagccccgcccccaacctagggaggaggaccagccc

SEQ ID NO: 19322 - DNA, 120 bp, Artificial Sequence
  ENSG00000021300_18 (sequence is synthesized)
ggttcctgtcctgcccccgcaacctcgccccgattccactccgggaacctcggcgatgctgagccaagaccacttctgaatcagggatgacttgtctagtgaacctagggtcagagccat

SEQ ID NO: 19323 - DNA, 120 bp, Artificial Sequence
  ENSG00000021300_19 (sequence is synthesized)
cagttggaaaggctgggaggagcctggagaaagagggcgaccttccttgggatctgtgcgctccctccttgcctccccctccagcctcccacttggtagcaccttcctgatccccttatc

SEQ ID NO: 19324 - DNA, 120 bp, Artificial Sequence
  ENSG00000021300_20 (sequence is synthesized)
acttctacagatctagaaactgagaccaggacagagggccagggaggagggatatggccaaagttaccaagctgaggctggaatccaggctcctggtccccacccccaccccacaccaat

SEQ ID NO: 19325 - DNA, 120 bp, Artificial Sequence
  ENSG00000021300_21 (sequence is synthesized)
ggctgccctgctgaccccacagtgacagtgctcccattctcttcctgagcagagaatggggaggaggccgaggccgcctggcccttgtttactaaccctccctcaaacgtttcctgggtg

SEQ ID NO: 19326 - DNA, 120 bp, Artificial Sequence
  ENSG00000021300_22 (sequence is synthesized)
gctccccagggacggcagggctgggggcttctctccagggagctgctgctgaggcctgtgtctcccgtggctcctctgacaggtcccgcctgactccgctctggaaagtccttttgaaga

SEQ ID NO: 19327 - DNA, 120 bp, Artificial Sequence
  ENSG00000021300_23 (sequence is synthesized)
acttctcatccctatccttcctttcccttccttcctccccaacccctgtttatttcctgggcctggggcttggccatgttcccctccttgtgactagtagagctgggtctttcaagtggc

SEQ ID NO: 19328 - DNA, 120 bp, Artificial Sequence
  ENSG00000021300_24 (sequence is synthesized)
attattgtagagctgctagcaaatattagactacctataaggagaaattgggagccatagagaattttttgagctaggtgggaggccagagttggagaatgggtgtcactgggagctgga

SEQ ID NO: 19329 - DNA, 120 bp, Artificial Sequence
  ENSG00000021300_25 (sequence is synthesized)
tgtagggcagaagttttagaggaccgtggaccttgtggggagggcagggcctttctccaagagcttgctagtggctggaggcccatttctaaacttggggaggtggctccatggatccca

SEQ ID NO: 19330 - DNA, 120 bp, Artificial Sequence
  ENSG00000021300_26 (sequence is synthesized)
gttttgtttgtagatttgggatgtggagggggactgggctacaacacccacccaagagtgtcagaatctgacatcccctgagagaccacccaagcccaaccgtccactgtatagatgagg

SEQ ID NO: 19331 - DNA, 120 bp, Artificial Sequence
  ENSG00000021300_27 (sequence is synthesized)
aaactggaacttctagaggggacgagaagaatgaattagcctaacttagtgctccatccatgtgactggggcaggggaggggtcacttttgtcttcctgagggagacaagagatctctcc

SEQ ID NO: 19332 - DNA, 120 bp, Artificial Sequence
  ENSG00000021300_28 (sequence is synthesized)
acacgaggccacgtatgtccgcagctactacggaccgccctacgcaggtaagtctccagcgtgccccggggcttgcctcgatccagcaccgattcagcgccaggcccagcccacggtccg

SEQ ID NO: 19333 - DNA, 120 bp, Artificial Sequence
  ENSG00000021300_29 (sequence is synthesized)
aaagcgcaggcgcagcgggttgggtggcagcagcatcgagtagcggccgcttaggcagcaacatccgcaacaagtgtagacaaggtgggtgcatcaaggggaggggctggaaaaggagtc

SEQ ID NO: 19334 - DNA, 120 bp, Artificial Sequence
  ENSG00000021300_30 (sequence is synthesized)
tgcacctgaccctcttgtctgatctgtgtcaagaccgtggagaggggagggagcggcaagaggaacagacaaggctgggccttccagcccaggtgtgccagcccttgttacgcagcaaca

SEQ ID NO: 19335 - DNA, 120 bp, Artificial Sequence
  ENSG00000021300_31 (sequence is synthesized)
tctcattgggccttctggttctctgaccgtaggaagagggcactaaggccagtcagcaagggagtcttattggaggcgggtggagtggatttgaagggcttgtggtgactggcatggcac

SEQ ID NO: 19336 - DNA, 120 bp, Artificial Sequence
  ENSG00000021300_32 (sequence is synthesized)
caaactccaccccgatgataagactgaagctcattcatccgcacaacaaatatttactgagctgctactatgggccaggtggtgtgccaagtgccagggatcagaggtgcgcgtctacag

SEQ ID NO: 19337 - DNA, 120 bp, Artificial Sequence
  ENSG00000021300_33 (sequence is synthesized)
ggcaagtgagtcgccctcaggaacagagggcacctacctggattccagtgcaagctacatcatgtacatggatgagtcatttgctaaccctcagtttgtccatctgtaaaacaggagtaa

SEQ ID NO: 19338 - DNA, 120 bp, Artificial Sequence
  ENSG00000021300_34 (sequence is synthesized)
aaagcgcaggcgcagcgggttgggtggcagcagcatcgagtagcggccgcttaggcagcaacatccgcaacaagtgtagacaagacattctgatttaattgttacggagtgtggcctggt

SEQ ID NO: 19339 - DNA, 120 bp, Artificial Sequence
  ENSG00000021300_35 (sequence is synthesized)
tttgcgctggaggagagtgaaagagatgggtgtgtgggagtgggggaagctgagctccaggcagacagcacagagccgccttgtccaacccagccaggtgccatggcaaccaacaaaggc

SEQ ID NO: 19340 - DNA, 120 bp, Artificial Sequence
  ENSG00000021300_36 (sequence is synthesized)
caattcacccacccccaaactccctcctcatggtctggtgggatttgctttgcagagcatggaagacagcactgctggaggcaaactccaccccggtgcgcgtctacagcccgtaccaag

SEQ ID NO: 19341 - DNA, 120 bp, Artificial Sequence
  ENSG00000021300_37 (sequence is synthesized)
gggaaatgctgccctggccacccaggaaccatgagccctgcagccccggaactgagttcaatgattcttaagaaaaagtatttcatgataaatgagtgaacaaatgtcttaatagaaaag

SEQ ID NO: 19342 - DNA, 120 bp, Artificial Sequence
  ENSG00000021300_38 (sequence is synthesized)
ggtgagccaggcacagttcctgccctccaggcgctcggtactggatgaagacgaaatgaaattaggaggcccagagaagcgaagtggcccagagtcacagcaaatctccacattcctcca

SEQ ID NO: 19343 - DNA, 120 bp, Artificial Sequence
  ENSG00000021300_39 (sequence is synthesized)
ccaaggcccaggccacagttctaacaggatgtgcagcccccagagggccggagccgagatggcctgctgactgtgaacctacgggaaggcggccgcctgcacctctgtgcggagaccaag

SEQ ID NO: 19344 - DNA, 120 bp, Artificial Sequence
  ENSG00000021355_0 (sequence is synthesized)
cctgacctcgcacccagctcggagcccggagcgtgcctcggcggcctgtcggttttcaccatggagcagctgagctcagcaaacacccgcttcgccttggacctgttcctggcgttgagt

SEQ ID NO: 19345 - DNA, 120 bp, Artificial Sequence
  ENSG00000021355_1 (sequence is synthesized)
gagaacaatccggctggaaacatcttcatctctcccttcagcatttcatctgctatggccatggtttttctggggaccagaggtaacacggcagcacagctgtccaagactttccatttc

SEQ ID NO: 19346 - DNA, 120 bp, Artificial Sequence
  ENSG00000021355_2 (sequence is synthesized)
aacacggttgaagaggttcattcaagattccagagtctgaatgctgatatcaacaaacgtggagcgtcttatattctgaaacttgctaatagattatatggagagaaaacttacaatttc

SEQ ID NO: 19347 - DNA, 120 bp, Artificial Sequence
  ENSG00000021355_3 (sequence is synthesized)
cttcctgagttcttggtttcgactcagaaaacatatggtgctgacctggccagtgtggattttcagcatgcctctgaagatgcaaggaagaccataaaccagtgggtcaaaggacagaca

SEQ ID NO: 19348 - DNA, 120 bp, Artificial Sequence
  ENSG00000021355_4 (sequence is synthesized)
gaaggaaaaattccggaactgttggcttcgggcatggttgataacatgaccaaacttgtgctagtaaatgccatctatttcaagggaaactggaaggataaattcatgaaagaagccacg

SEQ ID NO: 19349 - DNA, 120 bp, Artificial Sequence
  ENSG00000021355_5 (sequence is synthesized)
acgaatgcaccattcagattgaataagaaagacagaaaaactgtgaaaatgatgtatcagaagaaaaaatttgcatatggctacatcgaggaccttaagtgccgtgtgctggaactgcct

SEQ ID NO: 19350 - DNA, 120 bp, Artificial Sequence
  ENSG00000021355_6 (sequence is synthesized)
taccaaggcgaggagctcagcatggtcatcctgctgccggatgacattgaggacgagtccacgggcctgaagaagattgaggaacagttgactttggaaaagttgcatgagtggactaaa

SEQ ID NO: 19351 - DNA, 120 bp, Artificial Sequence
  ENSG00000021355_7 (sequence is synthesized)
cctgagaatctcgatttcattgaagttaatgtcagcttgcccaggttcaaactggaagagagttacactctcaactccgacctcgcccgcctaggtgtgcaggatctctttaacagtagc

SEQ ID NO: 19352 - DNA, 120 bp, Artificial Sequence
  ENSG00000021355_8 (sequence is synthesized)
aaggctgatctgtctggcatgtcaggagccagagatatttttatatcaaaaattgtccacaagtcatttgtggaagtgaatgaagagggaacagaggcggcagctgccacagcaggcatc

SEQ ID NO: 19353 - DNA, 120 bp, Artificial Sequence
  ENSG00000021355_9 (sequence is synthesized)
gcaactttctgcatgttgatgcccgaagaaaatttcactgccgaccatccattccttttctttattcggcataattcctcaggtagcatcctattcttggggagattttcttccccttag

SEQ ID NO: 19354 - DNA, 120 bp, Artificial Sequence
  ENSG00000021355_10 (sequence is synthesized)
tatatctttaccaataaaaccactgttcagaaacaagtctttcattttctttgtaagtttggctctgttggctgtttacacccatgaattttggcatgggtatctatttttcttttttac

SEQ ID NO: 19355 - DNA, 120 bp, Artificial Sequence
  ENSG00000021355_11 (sequence is synthesized)
attgaaaaaaatccagtggttgcttttgaatgcatcaagtaaagaagaagaaaagaatacatccgatgcgtagattcttgaccatgtagtaatctataaaattgctatatcctcctgata

SEQ ID NO: 19356 - DNA, 120 bp, Artificial Sequence
  ENSG00000021355_12 (sequence is synthesized)
gccatgggaaaacatgataagatggtcatttattttgcagttagaattttggaagccacaaaatagacagacaccctgactgttgaagggaggtttaaaaacagatattcaattgaaatg

SEQ ID NO: 19357 - DNA, 120 bp, Artificial Sequence
  ENSG00000021355_13 (sequence is synthesized)
taagagagcaccccaattgagagcccaggttacgaagacaagcttgcctcgcctgacttttctgtcccttgttctgcaggattagtattctgttacagacctctagtttttagactcttc

SEQ ID NO: 19358 - DNA, 120 bp, Artificial Sequence
  ENSG00000021355_14 (sequence is synthesized)
aattaaagggccaatggttataacctgcattcccttttttgttcttctttatgtataatatatagttcatgtggcgctgcatgaaatcaagaagtgggtgtcttaggataaaagatacca

SEQ ID NO: 19359 - DNA, 120 bp, Artificial Sequence
  ENSG00000021355_15 (sequence is synthesized)
agataccaagagtctacaaaaataaccatgtagtaagataaactgctgaacaaaggttttactgttagccaccttctcatgtgttttcttttctctttttctttttctttctttctttct

SEQ ID NO: 19360 - DNA, 120 bp, Artificial Sequence
  ENSG00000021355_16 (sequence is synthesized)
tacaggcatgagctaccatgcctggccttctcatgtgttttctgattaaggctcttgacttccaaggctgtgtggggagatggggtgggggctcttggactgatataaaactttgtcaaa

SEQ ID NO: 19361 - DNA, 120 bp, Artificial Sequence
  ENSG00000021355_17 (sequence is synthesized)
tgatataaaactttgtcaaatgtagttctttgaatggagcttgaaacgccgcatattcttgctcccacaaggatagtgggcatcatgaattaataaaacgtcctaggattctgcaagcta

SEQ ID NO: 19362 - DNA, 80 bp, Artificial Sequence
  ENSG00000021355_18 (sequence is synthesized)
ctgacctcgcacccagctcggagcccggagcgtgcctcggcggcctgtcgggtaaggccgggcctcggagcggtggcgcg

SEQ ID NO: 19363 - DNA, 120 bp, Artificial Sequence
  ENSG00000021355_19 (sequence is synthesized)
ggcaccccccaccccccaggctcaggcccctcagacccgcagctccctgcgctcgccctccccgccagcttcgcgcccccatcccttccgggcgccccgacggagacagacgacctctga

SEQ ID NO: 19364 - DNA, 120 bp, Artificial Sequence
  ENSG00000021355_20 (sequence is synthesized)
agctcggagcccggagcgtgcctcggcggcctgtcggagctgtttgtgacggtttccaggcagcccagggccaggccgcggctcctatctgcagctgcagggagagagaggaggaacccc

SEQ ID NO: 19365 - DNA, 120 bp, Artificial Sequence
  ENSG00000021355_21 (sequence is synthesized)
gtgcgattctagagacgatttcacaacaaggagaaatcagctttgtgcttacatgccgagcagccagcacggttcttctttgcctgtcctcgggggaaatcagggctctgagagtggaga

SEQ ID NO: 19366 - DNA, 120 bp, Artificial Sequence
  ENSG00000021355_22 (sequence is synthesized)
acgcagtcaccgggaagggccgccgccccgcccgcggctgctggcccgggtgacgcttccgcctgctataagagcagcggccctcggtgcctccttcctgacctcgcacccagctcggag

SEQ ID NO: 19367 - DNA, 120 bp, Artificial Sequence
  ENSG00000021461_0 (sequence is synthesized)
atggatctcattccaaactttgccatggaaacatgggttcttgtggctaccagcctggtactcctctatatttatgggacccattcacataaactttttaagaagctgggaattcctggg

SEQ ID NO: 19368 - DNA, 120 bp, Artificial Sequence
  ENSG00000021461_1 (sequence is synthesized)
ccaacccctctgccttttctgggaactattttgttctaccttaggggtctttggaattttgacagagaatgtaatgaaaaatacggagaaatgtgggggctgtatgaggggcaacagccc

SEQ ID NO: 19369 - DNA, 120 bp, Artificial Sequence
  ENSG00000021461_2 (sequence is synthesized)
atgctggtcatcatggatcccgacatgatcaaaacagtgttagtgaaagaatgttactctgtcttcacaaaccagatgcctttaggtccaatgggatttctgaaaagtgccttaagtttt

SEQ ID NO: 19370 - DNA, 120 bp, Artificial Sequence
  ENSG00000021461_3 (sequence is synthesized)
gctgaagatgaagaatggaagagaatacgaacattgctatctccagctttcaccagtgtaaaattcaaggaaatggtccccatcatttcccaatgtggagatatgttggtgagaagcctg

SEQ ID NO: 19371 - DNA, 120 bp, Artificial Sequence
  ENSG00000021461_4 (sequence is synthesized)
aggcaggaagcagagaacagcaagtccatcaacttgaaagatttctttggggcctacaccatggatgtaatcactggcacattatttggagtgaacttggattctctcaacaatccacaa

SEQ ID NO: 19372 - DNA, 120 bp, Artificial Sequence
  ENSG00000021461_5 (sequence is synthesized)
gatccctttctgaaaaatatgaagaagcttttaaaattggattttttggatccctttttactcttaatatcactctttccatttcttaccccagtttttgaagccctaaatatcggtttg

SEQ ID NO: 19373 - DNA, 120 bp, Artificial Sequence
  ENSG00000021461_6 (sequence is synthesized)
aagcatcgagtagatttctttcaacagatgatcgactcccagaattccaaagaaacaaagtcccataaagctctgtctgatctggagcttgtggcccagtcaattatcatcatttttgct

SEQ ID NO: 19374 - DNA, 120 bp, Artificial Sequence
  ENSG00000021461_7 (sequence is synthesized)
gcctatgacacaactagcaccactctccccttcattatgtatgaactggccactcaccctgatgtccagcagaaactgcaggaggagattgacgcagttttacccaataaggcacctgtc

SEQ ID NO: 19375 - DNA, 120 bp, Artificial Sequence
  ENSG00000021461_8 (sequence is synthesized)
acctacgatgccctggtacagatggagtaccttgacatggtggtgaatgaaacgctcagattattcccagttgttagtagagttacgagagtctgcaagaaagatattgaaatcaatgga

SEQ ID NO: 19376 - DNA, 120 bp, Artificial Sequence
  ENSG00000021461_9 (sequence is synthesized)
gtgttcattcccaaagggttagcagtgatggttccaatctatgctcttcaccatgacccaaagtactggacagagcctgagaagttctgccctgaaagtaggttcagtaagaagaacaag

SEQ ID NO: 19377 - DNA, 120 bp, Artificial Sequence
  ENSG00000021461_10 (sequence is synthesized)
gacagcatagatctttacagatacataccttttggagctggaccccgaaactgcattggcatgaggtttgctctcacaaacataaaacttgctgtcattagagcactgcagaacttctcc

SEQ ID NO: 19378 - DNA, 120 bp, Artificial Sequence
  ENSG00000021461_11 (sequence is synthesized)
ttcaaaccttgtaaagagactcagatcccactgaaattagacaatctaccaattcttcaaccagaaaaacctattgttctaaaagtgcacttaagagatgggattacaagtggaccctga

SEQ ID NO: 19379 - DNA, 120 bp, Artificial Sequence
  ENSG00000021461_12 (sequence is synthesized)
tccaatgggatttctgaaaagtgccttaagttttgctgaagatgaagaatggaagagaatacgaacattgctatctccagctttcaccagtgtaaaattcaaggaagtaagaaaataaga

SEQ ID NO: 19380 - DNA, 120 bp, Artificial Sequence
  ENSG00000021461_13 (sequence is synthesized)
aaacttaaaggatgaatctggagacaggtagtaagtatcatcatagttcctttctaatgggtagtccactgagtttgagctttctaaaaagggtcttttcagctgggcacagtggctcat

SEQ ID NO: 19381 - DNA, 90 bp, Artificial Sequence
  ENSG00000021461_14 (sequence is synthesized)
attagctgggcatggtggcggatgcctataatcctagctgctcagaaggctaaggcagaagaattgtttgaatctagccgttgcactcca

SEQ ID NO: 19382 - DNA, 120 bp, Artificial Sequence
  ENSG00000021461_15 (sequence is synthesized)
agagcgaaactctgtctcaaaaaaaaggggcagggggcggtcttttctatttatgtcctagaggacatggtgagtcattacaaaatatcatttactgttccatgctgggcaaagccatgt

SEQ ID NO: 19383 - DNA, 120 bp, Artificial Sequence
  ENSG00000021461_16 (sequence is synthesized)
ggtctttggaattttgacagagaatgtaatgaaaaatacggagaaatgtggggcactctttccatttcttaccccagtttttgaagccctaaatatcggtttgtttccaaaagatgttac

SEQ ID NO: 19384 - DNA, 120 bp, Artificial Sequence
  ENSG00000021461_17 (sequence is synthesized)
gaaccctgaagtctataggtagagaaaattgtaattgttgtaggtaaatttcacatttttcactatgatttattttttctttttctatttaattttcctatagcactctttccatttctt

SEQ ID NO: 19385 - DNA, 120 bp, Artificial Sequence
  ENSG00000021488_0 (sequence is synthesized)
gccatttctagggttggaccgtgcaggcacgggcggtcagctgggccgcagctcctccggctctgcagggtcacggaggaagccagctcccctagtccaggccgagcttgcacttgcgtc

SEQ ID NO: 19386 - DNA, 120 bp, Artificial Sequence
  ENSG00000021488_1 (sequence is synthesized)
ttgtctgctgctgctgaaccaagatttagctgtgcgccctccttgcagtctcctggaaccagcaggaggaaacatgggggatactggcctgagaaagcggagagaggatgagaagtcgat

SEQ ID NO: 19387 - DNA, 120 bp, Artificial Sequence
  ENSG00000021488_2 (sequence is synthesized)
ccagagccaagagcctaagaccaccagtctccaaaaggagctgggcctcatcagtggcatctccatcatcgtgggcaccatcattggctctgggatcttcgtttcccccaagtctgtgct

SEQ ID NO: 19388 - DNA, 120 bp, Artificial Sequence
  ENSG00000021488_3 (sequence is synthesized)
cagcaacacggaagctgtggggccctgcctcatcatatgggcggcttgcggggtcctcgcgacgctgggtgccctgtgctttgcggagcttggcacaatgatcaccaagtcagggggaga

SEQ ID NO: 19389 - DNA, 120 bp, Artificial Sequence
  ENSG00000021488_4 (sequence is synthesized)
gtatccctacctgatggaggcctacgggcccatccccgcctacctcttctcctgggccagcctgatcgtcattaagcccacgtccttcgccatcatctgcctcagcttctccgagtatgt

SEQ ID NO: 19390 - DNA, 120 bp, Artificial Sequence
  ENSG00000021488_5 (sequence is synthesized)
gtgtgcgcccttctatgtgggctgcaagcctcctcaaatcgttgtgaaatgcctggccgccgccgccatcttgttcatctcgacagtgaactcactgagcgtgcggctgggaagctacgt

SEQ ID NO: 19391 - DNA, 120 bp, Artificial Sequence
  ENSG00000021488_6 (sequence is synthesized)
ccagaacatcttcaccgcggccaagctggtgatcgtggccatcatcatcatcagcgggctggtgctcctggcccaaggaaacacaaagaattttgataattctttcgagggcgcccagct

SEQ ID NO: 19392 - DNA, 120 bp, Artificial Sequence
  ENSG00000021488_7 (sequence is synthesized)
ttagaaacccttacagaaacctgcctttggccattatcatcgggatccccctggtgacggcgtgctacatcctcatgaacgtgtcctacttcaccgtgatgactgccaccgaactcctgc

SEQ ID NO: 19393 - DNA, 120 bp, Artificial Sequence
  ENSG00000021488_8 (sequence is synthesized)
agtcccaggcggtggctgtgacatttggtgaccgtgttctctatcctgcttcttggatcgttccactttttgtggcattttcaaccatcggtgctgctaacgggacctgcttcacagcgg

SEQ ID NO: 19394 - DNA, 120 bp, Artificial Sequence
  ENSG00000021488_9 (sequence is synthesized)
gcagactcatttacgtggcgggccgggagggtcacatgctcaaagtgctttcttacatcagcgtcaggcgcctcactccagcccccgccatcatcttttatggtatcatagcaacgattt

SEQ ID NO: 19395 - DNA, 120 bp, Artificial Sequence
  ENSG00000021488_10 (sequence is synthesized)
atatcatccctggtgacataaactcgttagtcaattatttcagctttgccgcatggctgttttatggcctgacgattctaggactcatcgtgatgagatttacaaggaaagagctggaaa

SEQ ID NO: 19396 - DNA, 120 bp, Artificial Sequence
  ENSG00000021488_11 (sequence is synthesized)
ggcctatcaaggtgcccgtagtcattcccgtcttgatgacactcatctctgtgtttttggttctggctccaatcatcagcaagcccacctgggagtacctctactgtgtgctgtttatat

SEQ ID NO: 19397 - DNA, 120 bp, Artificial Sequence
  ENSG00000021488_12 (sequence is synthesized)
taagcggccttttattttacttcctgtttgtccactacaagtttggatgggctcagaaaatctcaaagccgattaccatgcaccttcagatgctaatggaagtggtcccaccggaggaag

SEQ ID NO: 19398 - DNA, 120 bp, Artificial Sequence
  ENSG00000021488_13 (sequence is synthesized)
accctgagtaacaagctccgtctcttgtagccaagtcagctgaatttattttcttaagcaatatttgtggttatttcttcctttttttcttacgaataaaatatactcagatgtttaaaa

SEQ ID NO: 19399 - DNA, 120 bp, Artificial Sequence
  ENSG00000021488_14 (sequence is synthesized)
atttctagggttggaccgtgcaggcacgggcggtcagctgggccgcagctcctccggctctgcagggtcacggaggaagtctcctggaaccagcaggaggaaacatgggggatactggcc

SEQ ID NO: 19400 - DNA, 120 bp, Artificial Sequence
  ENSG00000021488_15 (sequence is synthesized)
ggcaaacaggtgtaaatcaggctggactgaatgtccaacgctggagctcagggccgtccagcgagggcggaccacggtgggcccctccatacgagcgcagcctccggtgggaggaaggct

SEQ ID NO: 19401 - DNA, 120 bp, Artificial Sequence
  ENSG00000021488_16 (sequence is synthesized)
ccgccgccatctgaatcaactcaattacatcacagaagaacttagaaacccttacaggtaacagctgaatcagtgcagaggacagtagccgggcagcctgatttctcttctcctggtgaa

SEQ ID NO: 19402 - DNA, 120 bp, Artificial Sequence
  ENSG00000021488_17 (sequence is synthesized)
gacagtagccgggcagcctgatttctcttctcctggtgaaggctggagctatttccctgggtattccatgatgcccttcccgacagtgaattatttctttttttttttttttgagacaga

SEQ ID NO: 19403 - DNA, 120 bp, Artificial Sequence
  ENSG00000021488_18 (sequence is synthesized)
aggtgtgagccactgcacccggccagcgaatggtttcttatgagctcactatgcacgcttagagtttggtttggtttgggacagagcagtggctcctaagggagggaagagcttggtctt

SEQ ID NO: 19404 - DNA, 120 bp, Artificial Sequence
  ENSG00000021488_19 (sequence is synthesized)
ctcatttgaaaatgtcttatgttcctgctgggcctctgctacctgcgaatcttctccctgggagggcctcagggagggcgtccatcttccgcgggaggctgtggtctgaacgtgggtctc

SEQ ID NO: 19405 - DNA, 120 bp, Artificial Sequence
  ENSG00000021574_0 (sequence is synthesized)
tgcgcgtgcgcggccgccgctgggagccaccaggcggcggagaggacagcgacaggaagggaggggcccgagccaccgactgcaggaggagaaggggttgtgctcctggccgaggaagga

SEQ ID NO: 19406 - DNA, 120 bp, Artificial Sequence
  ENSG00000021574_1 (sequence is synthesized)
gaaaggggcggggccggcgggcagcgtgcggcagtgcggagctcctgagaccggcgggcacacgggggtctgtggcccccgccgtagcagtggctgccgccgtcgcttggttcccgtcgg

SEQ ID NO: 19407 - DNA, 120 bp, Artificial Sequence
  ENSG00000021574_2 (sequence is synthesized)
tctgcgggaggcgggttatggcggcggcggcagtgagagctgtgaatgaattctccgggtggacgagggaagaagaaaggctccggcggcgccagcaacccggtgcctcccaggcctccg

SEQ ID NO: 19408 - DNA, 120 bp, Artificial Sequence
  ENSG00000021574_3 (sequence is synthesized)
cccccttgcctggcccccgcccctcccgccgccgggccggcccctccgcccgagtcgccgcataagcggaacctgtactatttctcctacccgctgtttgtaggcttcgcgctgctgcgt

SEQ ID NO: 19409 - DNA, 120 bp, Artificial Sequence
  ENSG00000021574_4 (sequence is synthesized)
ttggtcgccttccacctggggctcctcttcgtgtggctctgccagcgcttctcccgcgccctcatggcagccaagaggagctccggggccgcgccagcacctgcctcggcctcggccccg

SEQ ID NO: 19410 - DNA, 120 bp, Artificial Sequence
  ENSG00000021574_5 (sequence is synthesized)
gcgccggtgccgggcggcgaggccgagcgcgtccgagtcttccacaaacaggccttcgagtacatctccattgccctgcgcatcgatgaggatgagaaagcaggacagaaggagcaagct

SEQ ID NO: 19411 - DNA, 120 bp, Artificial Sequence
  ENSG00000021574_6 (sequence is synthesized)
gtggaatggtataagaaaggtattgaagaactggaaaaaggaatagctgttatagttacaggacaaggtgaacagtgtgaaagagctagacgccttcaagctaaaatgatgactaatttg

SEQ ID NO: 19412 - DNA, 120 bp, Artificial Sequence
  ENSG00000021574_7 (sequence is synthesized)
gttatggccaaggaccgcttacaacttctagagaagatgcaaccagttttgccattttccaagtcacaaacggacgtctataatgacagtactaacttggcatgccgcaatggacatctc

SEQ ID NO: 19413 - DNA, 120 bp, Artificial Sequence
  ENSG00000021574_8 (sequence is synthesized)
cagtcagaaagtggagctgttccaaaaagaaaagaccccttaacacacactagtaattcactgcctcgttcaaaaacagttatgaaaactggatctgcaggcctttcaggccaccataga

SEQ ID NO: 19414 - DNA, 120 bp, Artificial Sequence
  ENSG00000021574_9 (sequence is synthesized)
gcacctagttacagtggtttatccatggtttctggagtgaaacagggatctggtcctgctcctaccactcataagggtactccgaaaacaaataggacaaataaaccttctacccctaca

SEQ ID NO: 19415 - DNA, 120 bp, Artificial Sequence
  ENSG00000021574_10 (sequence is synthesized)
actgctactcgtaagaaaaaagacttgaagaattttaggaatgtggacagcaaccttgctaaccttataatgaatgaaattgtggacaatggaacagctgttaaatttgatgatatagct

SEQ ID NO: 19416 - DNA, 120 bp, Artificial Sequence
  ENSG00000021574_11 (sequence is synthesized)
ggtcaagacttggcaaaacaagcattgcaagaaattgttattcttccttctctgaggcctgagttgttcacagggcttagagctcctgccagagggctgttactctttggtccacctggg

SEQ ID NO: 19417 - DNA, 120 bp, Artificial Sequence
  ENSG00000021574_12 (sequence is synthesized)
aatgggaagacaatgctggctaaagcagtagctgcagaatcgaatgcaaccttctttaatataagtgctgcaagtttaacttcaaaatacgtgggagaaggagagaaattggtgagggct

SEQ ID NO: 19418 - DNA, 120 bp, Artificial Sequence
  ENSG00000021574_13 (sequence is synthesized)
ctttttgctgtggctcgagaacttcaaccttctataatttttatagatgaagttgatagccttttgtgtgaaagaagagaaggggagcacgatgctagtagacgcctaaaaactgaattt

SEQ ID NO: 19419 - DNA, 120 bp, Artificial Sequence
  ENSG00000021574_14 (sequence is synthesized)
ctaatagaatttgatggtgtacagtctgctggagatgacagagtacttgtaatgggtgcaactaataggccacaagagcttgatgaggctgttctcaggcgtttcatcaaacgggtatat

SEQ ID NO: 19420 - DNA, 120 bp, Artificial Sequence
  ENSG00000021574_15 (sequence is synthesized)
gtgtctttaccaaatgaggagacaagactacttttgcttaaaaatctgttatgtaaacaaggaagtccattgacccaaaaagaactagcacaacttgctagaatgactgatggatactca

SEQ ID NO: 19421 - DNA, 120 bp, Artificial Sequence
  ENSG00000021574_16 (sequence is synthesized)
ggaagtgacctaacagctttggcaaaagatgcagcactgggtcctatccgagaactaaaaccagaacaggtgaagaatatgtctgccagtgagatgagaaatattcgattatctgacttc

SEQ ID NO: 19422 - DNA, 120 bp, Artificial Sequence
  ENSG00000021574_17 (sequence is synthesized)
actgaatccttgaaaaaaataaaacgcagcgtcagccctcaaactttagaagcgtacatacgttggaacaaggactttggagataccactgtttaaggaaatacctttgtaaacctgcag

SEQ ID NO: 19423 - DNA, 120 bp, Artificial Sequence
  ENSG00000021574_18 (sequence is synthesized)
aacattttacttaaaagaggaaacacaagatcttcaatgaacgtcatcggctacagaaacagcctaagtttacaggactttttagagtcttacatatttgtgcaccaaacttgaagatga

SEQ ID NO: 19424 - DNA, 120 bp, Artificial Sequence
  ENSG00000021574_19 (sequence is synthesized)
accagaaaacagacttaaacaaaatatacaatgcaaatgtaattttttgttgtttaaggccttgccttgatggtcacagttatcccaatggacactaagttagagcacaacaaaacctga

SEQ ID NO: 19425 - DNA, 120 bp, Artificial Sequence
  ENSG00000021574_20 (sequence is synthesized)
ttctggtcttctttaccaatataatcataatgtaaataataatttgtatattgtgttgcagatgaaagtattccaggaacagtgaatggtagaagacacaagaacatttgtttgtttgtc

SEQ ID NO: 19426 - DNA, 120 bp, Artificial Sequence
  ENSG00000021574_21 (sequence is synthesized)
aaattcagtgtgccaaatgaaacttttttcctaagtaactgtaataggaaaaagtttattttgagagtttcttcttcataaatctacagacattaaacaattgttgtgttctttttacct

SEQ ID NO: 19427 - DNA, 120 bp, Artificial Sequence
  ENSG00000021574_22 (sequence is synthesized)
tttatttttctattaccttgctaccaaacagtttagatagcaatataatagcaaaaaagcaaatatggtaaaatagagaaggtttgaaggtttgagttactctgtcatataacatgtaga

SEQ ID NO: 19428 - DNA, 120 bp, Artificial Sequence
  ENSG00000021574_23 (sequence is synthesized)
tcagtcttcatgtgacctgcagtatttttttttctaatgtatttgtcagaaatctgttgtagactgttaacttcttcctgatggaatttattttctgcaagaattattctgatatttaag

SEQ ID NO: 19429 - DNA, 120 bp, Artificial Sequence
  ENSG00000021574_24 (sequence is synthesized)
agagccaattttaactgctgtgaaaatgtttccagtgcaagagaagggaaatactaggaactaagacatttctaatttattgcttattactttcttaattttacaggataattataagca

SEQ ID NO: 19430 - DNA, 120 bp, Artificial Sequence
  ENSG00000021574_25 (sequence is synthesized)
agtggaactaccatcttttattcttaataattattaatcccttcaatgaaactttaaaaaaactgaatttttatacatggcatacatttttctagttccttctgcttgctttattaactc

SEQ ID NO: 19431 - DNA, 120 bp, Artificial Sequence
  ENSG00000021574_26 (sequence is synthesized)
aaaagttctagttctagtctgttgatctgccttttgttctcccaaaatgtacagtaattccatttgtttgtataaatatgcctggattttcattataaaaatgtcattgtagggagtaga

SEQ ID NO: 19432 - DNA, 120 bp, Artificial Sequence
  ENSG00000021574_27 (sequence is synthesized)
gactcatatcatggccttttaaatattgtaataaaggcaaatagatatttgcccttagtttactggttaaaagtttgtttacagaacttttctctggtgcttaaatgatgctatgtaaaa

SEQ ID NO: 19433 - DNA, 120 bp, Artificial Sequence
  ENSG00000021574_28 (sequence is synthesized)
tgtcatgagtggaaagaatatttgtagtagtaacaagaatttttcatttaggaaagatttcttaggttttgaaagaatacattaaaataaaaaacttgcccctactaggtaagaacttta

SEQ ID NO: 19434 - DNA, 120 bp, Artificial Sequence
  ENSG00000021574_29 (sequence is synthesized)
gaactttataatgaagacatacattcttcttaattttactcttgctcttgttaaagatttgtttgaatatagaagatgcatgatttctgggtttttttttttttttgagacagagtttcg

SEQ ID NO: 19435 - DNA, 120 bp, Artificial Sequence
  ENSG00000021574_30 (sequence is synthesized)
taagccactgcgcccagccagaagatgcatgatttcttaggatcatatgctgtttgtagccataaggtaaatcatgtctcttccaatcatgactttggaactccctgaataataaaaatg

SEQ ID NO: 19436 - DNA, 120 bp, Artificial Sequence
  ENSG00000021574_31 (sequence is synthesized)
agagttgagataaataggggaaaaaaaatttttttcaagccagagctatgcatatgttaggtgatgggtagtatccctttaaggtctcaaacattacaacatcaattatgaaatactgat

SEQ ID NO: 19437 - DNA, 120 bp, Artificial Sequence
  ENSG00000021574_32 (sequence is synthesized)
aacgaaaggtagtaatgaaatatatatgatgaaaagaattgagaagttctaaattaagacatttcagttaagctcataaaatttcattgttttcatttaaaagattaacgttattgatac

SEQ ID NO: 19438 - DNA, 120 bp, Artificial Sequence
  ENSG00000021574_33 (sequence is synthesized)
ttggataactggctaatcatattaaaggactatgtggttccagctcaacttttaatatattgtctcctttaaaactatcatggttataattctattgggaaagacttttagataacaaag

SEQ ID NO: 19439 - DNA, 120 bp, Artificial Sequence
  ENSG00000021574_34 (sequence is synthesized)
atttcaaatgttaaaagagataaaagtcaggttaatactatcttaaacactgagtcagaaaatcattactgtatagaagttgctttcctgatcaagtctgaacttcagctagtgctagag

SEQ ID NO: 19440 - DNA, 120 bp, Artificial Sequence
  ENSG00000021574_35 (sequence is synthesized)
aactattttctatgacttaactctaaccaagttttattttaagctgtttctttgatagaagggccatgaaaatagagtaatgatatagtaggagataagggattggtttggtctttttca

SEQ ID NO: 19441 - DNA, 120 bp, Artificial Sequence
  ENSG00000021574_36 (sequence is synthesized)
ataaagatagaagttgctgaagttttctgaattaataatgacttagattgtgaccttttagattcggtgttgagctctgtgttgtattacttcctaaaagataatgcttaaacattaagc

SEQ ID NO: 19442 - DNA, 120 bp, Artificial Sequence
  ENSG00000021574_37 (sequence is synthesized)
attagtgtgctcttcatgttaatatggcagagttttgtaaactaaattaaaacttactgatatattggactttgagccaagggaaagaatgagtactatctttccagatatcttaagggt

SEQ ID NO: 19443 - DNA, 120 bp, Artificial Sequence
  ENSG00000021574_38 (sequence is synthesized)
aaaagcttattctaagacagtctgtccattgagaatattagatttctgacttgcaaatatgtttgtactccagaagaattagaggaaaagcagatactagaattctaatttaattacata

SEQ ID NO: 19444 - DNA, 120 bp, Artificial Sequence
  ENSG00000021574_39 (sequence is synthesized)
tacagccgtctttgtttatagtgtagaattctttatattttgtacaaaaactaattcttttggtaaaatgaaccatttacagttcggttttggactctgagtcaaaggattttcctttaa

SEQ ID NO: 19445 - DNA, 120 bp, Artificial Sequence
  ENSG00000021574_40 (sequence is synthesized)
atgcttgtctcaattttagtctggtcttttgtacttttcttcagaagaaatgaattaaagggtacagttgcataaagtgggtttttatcctaatgtattggaaataaatgataaacttta

SEQ ID NO: 19446 - DNA, 69 bp, Artificial Sequence
  ENSG00000021574_41 (sequence is synthesized)
tgagacagggtctcactttgtcagccaggctggagtacagtggcacaatcaaagctcactgcacccttg

SEQ ID NO: 19447 - DNA, 120 bp, Artificial Sequence
  ENSG00000021574_42 (sequence is synthesized)
gctcaggtgatccagcacacccagctaattttttttttttttaattttttgtagaagcagagttcccctatgttgcccaagctggtcttgaactcttgggctcatgtaatcctcctgtct

SEQ ID NO: 19448 - DNA, 120 bp, Artificial Sequence
  ENSG00000021574_43 (sequence is synthesized)
ttacaggtgtgagccaccacacccagctgtttttaattattacattaatttatgattatgtgtttcctttaaagctatgggcagctctgtttgggaagatgctactgaaaaaaggatgct

SEQ ID NO: 19449 - DNA, 120 bp, Artificial Sequence
  ENSG00000021574_44 (sequence is synthesized)
gctactgaaaaaaggatgctttttagatggcaaagagtacttaaaatgtctctagaatcatagttgtaaactaaagtatatattttttagttgttcacagggcttagagctcctgccaga

SEQ ID NO: 19450 - DNA, 120 bp, Artificial Sequence
  ENSG00000021574_45 (sequence is synthesized)
gggctgttactctttggtccacctgggaatgggaagacaatgctggtaagggttctcttcaaatttgagttttctgttgagatatttgggataatatgaaaaaaagaaactttatcttgt

SEQ ID NO: 19451 - DNA, 84 bp, Artificial Sequence
  ENSG00000021574_46 (sequence is synthesized)
gatatttgggataatatgaaaaaaagaaactttatcttgtccttgagtctattatttacgacttgctttttgctattgtacacg

SEQ ID NO: 19452 - DNA, 66 bp, Artificial Sequence
  ENSG00000021574_47 (sequence is synthesized)
attacaggcacacgccaccacacctgtctaggttttttatttttggccagtcctcctacctgggcc

SEQ ID NO: 19453 - DNA, 78 bp, Artificial Sequence
  ENSG00000021574_48 (sequence is synthesized)
tacacttttaagtttttcagctacttttcaatgtagaagtagatggaaaaccatgtacgttatcttcagtagtgtgtt

SEQ ID NO: 19454 - DNA, 120 bp, Artificial Sequence
  ENSG00000021574_49 (sequence is synthesized)
gtagatggaaaaccatgtacgttatcttcagtagtgtgtttttggttggttaaatttgacagtatgattgtcattattttttgtaaattaaatttttacctggaagagcttaccttacta

SEQ ID NO: 19455 - DNA, 120 bp, Artificial Sequence
  ENSG00000021574_50 (sequence is synthesized)
tattgagtatctttctaacccctgatttttgcttctactatcataataactttatttaagtaatcagtatgttatagcttttttttttttttaagtattcttttgccagaagtttttatc

SEQ ID NO: 19456 - DNA, 120 bp, Artificial Sequence
  ENSG00000021574_51 (sequence is synthesized)
aggctctggatacctctttcctctgcatagtcctcctggatggaagaaacaaagagggaaagagtaacttttccttagatgtttgtctttctcaaagcagttatctttgtatatctaaga

SEQ ID NO: 19457 - DNA, 120 bp, Artificial Sequence
  ENSG00000021574_52 (sequence is synthesized)
agagaggagaataacactgtctctctttttttttaaatctctctctactcattctctctcaggaggagagtagaaagaagcacagctcttcctataacctgtccttattactgagaaagg

SEQ ID NO: 19458 - DNA, 86 bp, Artificial Sequence
  ENSG00000021574_53 (sequence is synthesized)
ctataacctgtccttattactgagaaaggaacacattgattgccatgtattggggattgtattataccttacaagacagtcttact

SEQ ID NO: 19459 - DNA, 64 bp, Artificial Sequence
  ENSG00000021574_54 (sequence is synthesized)
agtgcagtgatgtgatctcggctcactaccatctcttccttctgggttcaagcaattctgccac

SEQ ID NO: 19460 - DNA, 120 bp, Artificial Sequence
  ENSG00000021574_55 (sequence is synthesized)
tgcgcatcgatgaggatgagaaagtaacatactaaaaaataatgcagtccaggtgcagtggctcacacgtgtaatcctagcacttttggaagttgaggcaggaggatcacttgaagccag

SEQ ID NO: 19461 - DNA, 120 bp, Artificial Sequence
  ENSG00000021574_56 (sequence is synthesized)
tgtcgtattttaagttactgtctaaatgttactgtgttaactgtaaatggtaatatttcatgaaaatatttttctaggagcttatctattgtatctattatttacatatgatgaatatct

SEQ ID NO: 19462 - DNA, 120 bp, Artificial Sequence
  ENSG00000021574_57 (sequence is synthesized)
atcttcagagtagaaagttatgtacatttgtgttgtcaaatactgtattagtttactggggccatgtaataaaataccgtaaactggctggcttaaacatcagcaatttattgtctcaca

SEQ ID NO: 19463 - DNA, 120 bp, Artificial Sequence
  ENSG00000021574_58 (sequence is synthesized)
gttgtggaaggtagaagtctaagatcagtcaaaatgttggcagggttgcttcctcctgagggctgtgagggaaaatgtatgttgtgtgcctctctcctggcttctggtggcttgctggca

SEQ ID NO: 19464 - DNA, 120 bp, Artificial Sequence
  ENSG00000021574_59 (sequence is synthesized)
atcttttgtattccttggcttgtagatgcatccctcctatctctgtctttatctttatgtggcattctccctgtgtctgtcaccatgtccaaatttcccctgtggattaggacccaccct

SEQ ID NO: 19465 - DNA, 120 bp, Artificial Sequence
  ENSG00000021574_60 (sequence is synthesized)
aatgatctcaatttaagtttgtcatcagcaacaattctatgtccaaataatgtcacattcataggtactagggataggacttcaacacgtttttggagaacacagttcaacccattaaca

SEQ ID NO: 19466 - DNA, 120 bp, Artificial Sequence
  ENSG00000021574_61 (sequence is synthesized)
aatactatcactttccacttaagcttcaagtaaagtggattttatctcaaggagccaccagataggaacacagatctgatggcataaactgagtatttctggccttctgattctgatcta

SEQ ID NO: 19467 - DNA, 120 bp, Artificial Sequence
  ENSG00000021574_62 (sequence is synthesized)
tttttttttttataatagagacacagtctcgctatgttgccaggctactttcaaattcctgggcttaagcaatcctcctgcctcggactctcaaagtgctggaattacaagtgtgagcca

SEQ ID NO: 19468 - DNA, 120 bp, Artificial Sequence
  ENSG00000021574_63 (sequence is synthesized)
tttcttttgattgtttataattttgttttctttttccattcaccctctgctgaccctatagtattattcaaagaagtgttcagtctagttttggggtagggcaagcataactacagtgct

SEQ ID NO: 19469 - DNA, 120 bp, Artificial Sequence
  ENSG00000021574_64 (sequence is synthesized)
taaagagagtaatttgtctggtgtgcagaactagtgtgtaaatataactggtgcattgcaaaactgtgaagtagtttctgtcaaaccttacactgctttgtctttctccctctctccctt

SEQ ID NO: 19470 - DNA, 120 bp, Artificial Sequence
  ENSG00000021574_65 (sequence is synthesized)
tctcttggttgccccctccccctcccaatgataccttagtctctgcttgcctttatcaaaacctttatgattggccgggcacagtggcccatgcctataatcctagcattttgggaggct

SEQ ID NO: 19471 - DNA, 83 bp, Artificial Sequence
  ENSG00000021574_66 (sequence is synthesized)
ggctgaggcaggaagatcacctgagcccagaagttgtccaaaaataaaaaatagagccaggtgtggtggcatgcacctgtagt

SEQ ID NO: 19472 - DNA, 68 bp, Artificial Sequence
  ENSG00000021574_67 (sequence is synthesized)
agaggttgtgagaccctgtctcaaagaaacaaaacaagggggggcatggtggctaactcctgtaatcc

SEQ ID NO: 19473 - DNA, 70 bp, Artificial Sequence
  ENSG00000021574_68 (sequence is synthesized)
ctccagcctgagtgacagtgtgagaccctgtctcaaagaaacaaaacaagggggggcatggtggctaact

SEQ ID NO: 19474 - DNA, 87 bp, Artificial Sequence
  ENSG00000021574_69 (sequence is synthesized)
cgaatacgtggtcccagcaaaaaggaggttgaggttgcagtgagccacgatcatgccaatgcattccaacctgggcgtcagagcaag

SEQ ID NO: 19475 - DNA, 120 bp, Artificial Sequence
  ENSG00000021574_70 (sequence is synthesized)
cgatcatgccaatgcattccaacctgggcgtcagagcaagaccacgtctcaaaaacaaaacaaaacaaacttttatggttgaaagtgttttggcaaacatacttaaactgaaatgtgaat

SEQ ID NO: 19476 - DNA, 120 bp, Artificial Sequence
  ENSG00000021574_71 (sequence is synthesized)
acatacttaaactgaaatgtgaatctctgatgaaagaacatgttacctgtaaaagtttgaagtgtcagcatttgttgcaccgaaatccagaggtgaggccaggtgtggtggctcacgcct

SEQ ID NO: 19477 - DNA, 68 bp, Artificial Sequence
  ENSG00000021574_72 (sequence is synthesized)
tgcaaaaccccgtctcgactaaaaatacaaaaattagccagacttggtggtgtgcgcctgtaatccca

SEQ ID NO: 19478 - DNA, 88 bp, Artificial Sequence
  ENSG00000021574_73 (sequence is synthesized)
cagcttactgcaacctctgcctcccagacgcaggcaaccacaggacagaaggagcaagctgtggaatggtataagaaaggtattgaag

SEQ ID NO: 19479 - DNA, 120 bp, Artificial Sequence
  ENSG00000021645_0 (sequence is synthesized)
ctctccgggctgttccctggcctgtctgctcctccgggctctgtcccagcagcgacaatgagctccacactccactcggttttcttcaccctgaaggtcagcatcctgctggggtccctg

SEQ ID NO: 19480 - DNA, 120 bp, Artificial Sequence
  ENSG00000021645_1 (sequence is synthesized)
ctggggctctgcctgggccttgagttcatgggcctccccaaccagtgggcccgctacctccgctgggatgccagcacacgcagtgacctgagtttccagttcaagaccaacgtctctacg

SEQ ID NO: 19481 - DNA, 120 bp, Artificial Sequence
  ENSG00000021645_2 (sequence is synthesized)
gggctgctcctctacctggatgatggcggcgtctgcgacttcctatgcctctccctggtggatggccgcgttcagctccgcttcagcatggactgtgccgagactgccgtgctgtccaac

SEQ ID NO: 19482 - DNA, 120 bp, Artificial Sequence
  ENSG00000021645_3 (sequence is synthesized)
aagcaggtgaatgacagcagctggcacttcctcatggtgagccgtgaccgcctgcgcacggtgctgatgcttgatggcgagggccagtctggggagctgcagccccagcggccctacatg

SEQ ID NO: 19483 - DNA, 120 bp, Artificial Sequence
  ENSG00000021645_4 (sequence is synthesized)
gatgtggtcagtgacttgttccttggtggagtccctactgacatacgaccttctgccctgacccttgatggagttcaggccatgcccggcttcaaggggttaattctggatctcaagtat

SEQ ID NO: 19484 - DNA, 120 bp, Artificial Sequence
  ENSG00000021645_5 (sequence is synthesized)
ggaaactcggagcctcggcttctggggagccggggtgtccagatggatgccgagggaccctgtggtgagcgtccctgtgaaaatggtgggatctgctttctcctggacggccaccccacc

SEQ ID NO: 19485 - DNA, 120 bp, Artificial Sequence
  ENSG00000021645_6 (sequence is synthesized)
tgtgactgttctaccactggctatggtggcaagctctgctcagaagatgtcagtcaagatccaggcctctcccacctcatgatgagtgaacaagctcgagaggagaatgtggccactttc

SEQ ID NO: 19486 - DNA, 120 bp, Artificial Sequence
  ENSG00000021645_7 (sequence is synthesized)
cgaggctcagagtatctgtgctacgacctgtctcagaacccgatccagagcagcagtgatgaaatcaccctctcctttaagacctggcagcgtaacggcctcatcctgcacacgggcaag

SEQ ID NO: 19487 - DNA, 120 bp, Artificial Sequence
  ENSG00000021645_8 (sequence is synthesized)
tcggctgactatgtcaacctggctctgaaggatggtgcggtctccttggtcattaacctggggtccggggcctttgaggccattgtggagccagtgaatggaaaattcaacgacaacgcc

SEQ ID NO: 19488 - DNA, 120 bp, Artificial Sequence
  ENSG00000021645_9 (sequence is synthesized)
tggcatgatgtcaaagtgacacgcaacctccggcaggtgacaatctctgtggatggcattcttaccacgacgggctacactcaagaggactataccatgctgggctcggacgacttcttc

SEQ ID NO: 19489 - DNA, 120 bp, Artificial Sequence
  ENSG00000021645_10 (sequence is synthesized)
tatgtaggaggaagcccaagtaccgctgacttgcctggctcccctgtcagcaacaacttcatgggctgccttaaagaggttgtttataagaataatgacatccgtctggagctgtctcgc

SEQ ID NO: 19490 - DNA, 120 bp, Artificial Sequence
  ENSG00000021645_11 (sequence is synthesized)
ctggcccggattgcggacaccaagatgaaaatctatggcgaagttgtgtttaagtgtgagaatgtggccacactggaccccatcaactttgagaccccagaggcttacatcagcttgccc

SEQ ID NO: 19491 - DNA, 120 bp, Artificial Sequence
  ENSG00000021645_12 (sequence is synthesized)
aagtggaacactaaacgtatgggctccatctcctttgacttccgcaccacagagcccaatggcctgatcctcttcactcatggaaagccccaagagaggaaggatgctcggagccagaag

SEQ ID NO: 19492 - DNA, 120 bp, Artificial Sequence
  ENSG00000021645_13 (sequence is synthesized)
aatacaaaagtagacttctttgccgtggaactcctcgatggcaacctgtacttgctgcttgacatgggctctggcaccatcaaagtgaaagccactcagaagaaagccaatgatggggaa

SEQ ID NO: 19493 - DNA, 120 bp, Artificial Sequence
  ENSG00000021645_14 (sequence is synthesized)
tggtaccatgtggacattcagcgagatggcagatcaggtactatatcagtgaacagcaggcgcacgccattcaccgccagtggggagagcgagatcctggacctggaaggagacatgtac

SEQ ID NO: 19494 - DNA, 120 bp, Artificial Sequence
  ENSG00000021645_15 (sequence is synthesized)
ctgggagggctgccggagaaccgtgctggccttattctccccaccgagctgtggactgccatgctcaactatggctacgtgggctgcatccgcgacctattcattgatgggcgcagcaag

SEQ ID NO: 19495 - DNA, 120 bp, Artificial Sequence
  ENSG00000021645_16 (sequence is synthesized)
aacattcgacagctggcagagatgcagaatgctgcgggtgtcaagtcctcctgttcacggatgagtgccaagcagtgtgacagctacccctgcaagaataatgctgtgtgcaaggacggc

SEQ ID NO: 19496 - DNA, 120 bp, Artificial Sequence
  ENSG00000021645_17 (sequence is synthesized)
tggaaccgcttcatctgcgactgcaccggcaccggatactggggaagaacctgcgaaagggaggcatccatcctgagctatgatggtagcatgtacatgaagatcatcatgcccatggtc

SEQ ID NO: 19497 - DNA, 120 bp, Artificial Sequence
  ENSG00000021645_18 (sequence is synthesized)
atgcatactgaggcagaggatgtgtccttccgcttcatgtcccagcgagcttatgggctgctggtggctacgacctccagggactctgccgacaccctgcgtctggagctggatgggggg

SEQ ID NO: 19498 - DNA, 120 bp, Artificial Sequence
  ENSG00000021645_19 (sequence is synthesized)
cgtgtcaagctcatggttaacttagactgtatcaggataaactgtaactccagcaaaggaccagagaccttgtatgcagggcagaagctcaatgacaacgagtggcacaccgttcgggtg

SEQ ID NO: 19499 - DNA, 120 bp, Artificial Sequence
  ENSG00000021645_20 (sequence is synthesized)
gtgcggagaggaaaaagccttaagttaaccgtggatgatgatgtggctgagggtacaatggtgggagaccatacccgtttggagttccacaacattgaaacgggaatcatgactgagaaa

SEQ ID NO: 19500 - DNA, 120 bp, Artificial Sequence
  ENSG00000021645_21 (sequence is synthesized)
acattgattattgtgagctgaaggctcgttttggactgaggaacatcatcgctgaccctgtcacctttaagaccaagagcagctacctgagccttgccactcttcaggcttacacctcca

SEQ ID NO: 19501 - DNA, 120 bp, Artificial Sequence
  ENSG00000021645_22 (sequence is synthesized)
tgcacctcttcttccagttcaagaccacctcaccagatggcttcattctcttcaatagtggtgatggcaatgacttcattgcagtcgagcttgtcaaggggtatatacactacgtttttg

SEQ ID NO: 19502 - DNA, 120 bp, Artificial Sequence
  ENSG00000021645_23 (sequence is synthesized)
acctcggaaacggtcccaatgtgatcaaaggcaacagtgaccgccccctgaatgacaaccagtggcacaatgtcgtcatcactcgggacaatagtaacactcatagcctgaaagtggaca

SEQ ID NO: 19503 - DNA, 120 bp, Artificial Sequence
  ENSG00000021645_24 (sequence is synthesized)
ccaaagtggtcactcaggttatcaatggtgccaaaaatctggatttgaaaggtgatctctatatggctggtctggcccaaggcatgtacagcaacctcccaaagctcgtggcctctcgag

SEQ ID NO: 19504 - DNA, 120 bp, Artificial Sequence
  ENSG00000021645_25 (sequence is synthesized)
atggctttcagggctgtctagcatcagtggacttgaatggacgcctgccagacctcatcaatgatgctcttcatcggagcggacagatcgagcgtggctgtgaaggacccagtaccacct

SEQ ID NO: 19505 - DNA, 120 bp, Artificial Sequence
  ENSG00000021645_26 (sequence is synthesized)
gccaggaagattcatgtgccaaccagggggtctgcatgcaacaatgggagggcttcacctgtgattgttctatgacctcttattctggaaaccagtgcaatgatcctggcgctacgtaca

SEQ ID NO: 19506 - DNA, 120 bp, Artificial Sequence
  ENSG00000021645_27 (sequence is synthesized)
tctttgggaaaagtggtgggcttatcctctacacctggccagccaatgacaggcccagcacgcggtctgaccgccttgccgtgggcttcagcaccactgtgaaggatggcatcttggtcc

SEQ ID NO: 19507 - DNA, 120 bp, Artificial Sequence
  ENSG00000021645_28 (sequence is synthesized)
gcatcgacagtgctccaggacttggtgacttcctccagcttcacatagaacaggggaaaattggagttgtcttcaacattggcacagttgacatctccatcaaagaggagagaacccctg

SEQ ID NO: 19508 - DNA, 120 bp, Artificial Sequence
  ENSG00000021645_29 (sequence is synthesized)
taaatgacggcaaataccatgtggtacgcttcaccaggaacggcggcaacgccaccctgcaggtggacaactggccagtgaatgaacattatcctacaggcaacactgataatgaacgct

SEQ ID NO: 19509 - DNA, 120 bp, Artificial Sequence
  ENSG00000021645_30 (sequence is synthesized)
tccaaatggtaaaacagaaaatccccttcaaatataatcggcctgtagaggagtggctgcaggaaaaaggccggcagttaaccatcttcaacactcaggcgcaaatagccattggtggaa

SEQ ID NO: 19510 - DNA, 120 bp, Artificial Sequence
  ENSG00000021645_31 (sequence is synthesized)
aggacaaaggacgcctcttccaaggccaactctctgggctctattatgatggtttgaaagtactgaacatggcggctgagaacaaccccaatattaaaatcaatggaagtgttcggctgg

SEQ ID NO: 19511 - DNA, 120 bp, Artificial Sequence
  ENSG00000021645_32 (sequence is synthesized)
ttggagaagtcccatcaattttgggaacaacacagacgacctccatgccaccagaaatgtctactactgtcatggaaaccactactacaatggcgactaccacaacccgtaagaatcgct

SEQ ID NO: 19512 - DNA, 120 bp, Artificial Sequence
  ENSG00000021645_33 (sequence is synthesized)
ctacagccagcattcagccaacatcagatgatcttgtttcatctgctgaatgttcaagtgatgatgaagactttgttgaatgtgagccgagtacagataagagtctttccacttcaatct

SEQ ID NO: 19513 - DNA, 120 bp, Artificial Sequence
  ENSG00000021645_34 (sequence is synthesized)
tcgaaggtggctacaaagcacatgcgcccaagtgggaatccaaggactttagacctaacaaagtctccgaaactagtaggactactaccacatctttatcccctgagctgatccgcttca

SEQ ID NO: 19514 - DNA, 120 bp, Artificial Sequence
  ENSG00000021645_35 (sequence is synthesized)
cagcttcctcctcgtctgggatggtgcccaaattgccagctggcaaaatgaataaccgtgatctcaaaccccagcctgatatagtcttgcttccgttgcccactgcctatgagctagaca

SEQ ID NO: 19515 - DNA, 120 bp, Artificial Sequence
  ENSG00000021645_36 (sequence is synthesized)
gcaccaaactgaagagcccactaattacttcccccatgttccgtaatgtgcccacagcaaaccccacggagccgggaatcagacgggttccgggggcctcagaggtgatccgggagtcga

SEQ ID NO: 19516 - DNA, 120 bp, Artificial Sequence
  ENSG00000021645_37 (sequence is synthesized)
gcagcacaacagggatggtcgtcggcattgtggctgctgccgccctctgcatcttgatcctcctgtacgccatgtacaagtacaggaacagggacgaggggtcctatcaagtggacgaga

SEQ ID NO: 19517 - DNA, 120 bp, Artificial Sequence
  ENSG00000021645_38 (sequence is synthesized)
cgcggaactacatcagcaactccgcccagagcaacggcacgctcatgaaggagaagcagcagagctcgaagagcggccacaagaaacagaaaaacaaggacagggagtattacgtgtaaa

SEQ ID NO: 19518 - DNA, 120 bp, Artificial Sequence
  ENSG00000021645_39 (sequence is synthesized)
catgcgaacactgctcacacgcgagttttcacagttatttctatccacgcctatgaatctttggacggtgagatctcacagatgtcagaactgctggaactatgaaatggggtatataac

SEQ ID NO: 19519 - DNA, 120 bp, Artificial Sequence
  ENSG00000021645_40 (sequence is synthesized)
cacgactctggtggggaaaaccgttttttaaaggacacacacacacacagcgatgcatctctctctaaagctcagccacggctgcggcaaggtcccagcggtcgctgggagacagaaggt

SEQ ID NO: 19520 - DNA, 120 bp, Artificial Sequence
  ENSG00000021645_41 (sequence is synthesized)
tttgtgccctgctgtatcataaagcacacacttagcgctctggagccggacggtggctccaccacttccgcaggcctggaaacttccttctccggaggaccttttactaaaaggtagaag

SEQ ID NO: 19521 - DNA, 120 bp, Artificial Sequence
  ENSG00000021645_42 (sequence is synthesized)
acttcatggcttacttgttccataactccaagtgagtctgtaatgtttgtgaagcttgactgtaaccatgttttttctgtttaattatgtaaaaaacaaaactacaacaacaaaaaaaga

SEQ ID NO: 19522 - DNA, 120 bp, Artificial Sequence
  ENSG00000021645_43 (sequence is synthesized)
atctatcgttcccctgtttcccttcgaggaggacacggcaacttatcagctttatgtttgcaggaacagccctccagggaacatgagcgtgaaccatactagggggttcctgcccttgta

SEQ ID NO: 19523 - DNA, 120 bp, Artificial Sequence
  ENSG00000021645_44 (sequence is synthesized)
ctctgtgtggctcccgggagtgtgcggttaagtcatcagactcgaagtgcctagagatccggaggaagccgcgccggtcttcccctgacatgcgtggcatgccggggctccgtaggaggt

SEQ ID NO: 19524 - DNA, 120 bp, Artificial Sequence
  ENSG00000021645_45 (sequence is synthesized)
ttgctatacctgggaggaccctggcattctaaatttcagctccgggaaagagaaggggctttttgccttttatcttttttttttctttctttaagtagtaattttttaactgattcattg

SEQ ID NO: 19525 - DNA, 120 bp, Artificial Sequence
  ENSG00000021645_46 (sequence is synthesized)
tttggaaagcgcatattgcttccctcttccccgaattctggcaactcttcctcctgctatgatgggcccttgggcatcatgaacttcattactcctcactggctggaattcaaactgccc

SEQ ID NO: 19526 - DNA, 120 bp, Artificial Sequence
  ENSG00000021645_47 (sequence is synthesized)
atctgtagtggtcccgtgcgttgaccatgcacctgagaatccacgcgagacggagccctcctcgccggccggcctggacgcttgggatctggttcctgttctggggatgtatcgtcagct

SEQ ID NO: 19527 - DNA, 120 bp, Artificial Sequence
  ENSG00000021645_48 (sequence is synthesized)
ctgtatggagttcttctaatgtagcttcctcctcctccacctcttcctcgccggggtctcactctcagcacgagcaccatttccatggcagcaagcatcactcagtgcctatttctatct

SEQ ID NO: 19528 - DNA, 120 bp, Artificial Sequence
  ENSG00000021645_49 (sequence is synthesized)
aacccacaacccttatctggttctgaccagtgtgcgtgtaactttatgatctgaggggaaaaatggcttttgggtttttgtttatttttttgataatgactggacatcagaagaggaaaa

SEQ ID NO: 19529 - DNA, 120 bp, Artificial Sequence
  ENSG00000021645_50 (sequence is synthesized)
aaactcaaaacaaaagcgagagagactattgccatatgaactcaaaagctatcatggtgttcactctacatatcaggttatggtgtctctagaatctgttgtttgtttcctataagatgc

SEQ ID NO: 19530 - DNA, 120 bp, Artificial Sequence
  ENSG00000021645_51 (sequence is synthesized)
tttgctgaacacatagcaaaattcatgtgacggatgataaattgattcgaaaagctggtcccccaggatctaatttcagaatttaccacccaaacccggaacagatgggtttagggctgg

SEQ ID NO: 19531 - DNA, 120 bp, Artificial Sequence
  ENSG00000021645_52 (sequence is synthesized)
tgttatcagagctattggctttacgtaacaatattgttcctgtccattcacccagccaaattgtgttaaagaggaaagccccacaaactaaaacagcctttcctagggaagaggaagggg

SEQ ID NO: 19532 - DNA, 120 bp, Artificial Sequence
  ENSG00000021645_53 (sequence is synthesized)
aggtgggctggatctgtgactgattgaaatgcatgcaaataaaaaagacaatattaaagtctgttatcaaaccagacagtaggggagttcaactcgtgatggaaccacaaaaggtcacac

SEQ ID NO: 19533 - DNA, 120 bp, Artificial Sequence
  ENSG00000021645_54 (sequence is synthesized)
aagccaaccatgtcatgccagagtacaaaacacatagttctttccccgccccgaatgtgacaatggttttcatagtggtttaattttgtagcctgacatttatggataactctgtccttc

SEQ ID NO: 19534 - DNA, 120 bp, Artificial Sequence
  ENSG00000021645_55 (sequence is synthesized)
catttgctcacttctctcttcacccatcttttttaaaaacaaataaatgaataaagctgctgtgacacacacacaaaaggaatttaatagtataatatatatataaataaatatatatac

SEQ ID NO: 19535 - DNA, 120 bp, Artificial Sequence
  ENSG00000021645_56 (sequence is synthesized)
agatatatttatcatggtatgtttgatgggatgactgacacaggaaatctgttaaagtcttaaaatggaatgagaatgttgttttaaaagaaaatagcaaaacaacaaaaaagcaaacct

SEQ ID NO: 19536 - DNA, 120 bp, Artificial Sequence
  ENSG00000021645_57 (sequence is synthesized)
taaaatgtgaagaaagtgtgaattttagttttgtcacagttaactgtgtcaaagagaattaaaaaaaaaaacttcagattttgtttacatattttactacatttttgctggtataattcc

SEQ ID NO: 19537 - DNA, 120 bp, Artificial Sequence
  ENSG00000021645_58 (sequence is synthesized)
ttagccacctatgtacatactgctttaagaaatgtttttttcctgtttatttctgtttggtttatattctggttgtctttttctttttgtaaagaggaaacaatgtacagaaaaacaata

SEQ ID NO: 19538 - DNA, 120 bp, Artificial Sequence
  ENSG00000021645_59 (sequence is synthesized)
aactggttgtatggccatagctatccgaaaagcaagagacaaagcaagacaaatattcacacaaaaatgaagtgtgtcctctggagggtcagatatacaatttcttttgtacagatgaaa

SEQ ID NO: 19539 - DNA, 120 bp, Artificial Sequence
  ENSG00000021645_60 (sequence is synthesized)
atcaatcagctgcttagatttagaaatctactcttgctggtctttgtaagttgcatgaatatttgactttgaaaaaatatcttaacgacatggggcaaaaagtgcaatctaaatggtagc

SEQ ID NO: 19540 - DNA, 120 bp, Artificial Sequence
  ENSG00000021645_61 (sequence is synthesized)
ctttactaatgtgtgtggaaagaggtgttcctcattatctaatatttcaatgtgttaagagtttaatttttttgttatcattaaaaaagacaggattataaagagatatcaaagcacgat

SEQ ID NO: 19541 - DNA, 120 bp, Artificial Sequence
  ENSG00000021645_62 (sequence is synthesized)
tttagataacctaaacggcccagcctatacgaagttgattatatctcgatgtctgtaaaagattgctgttcttggagtcttgaggtcttgtgaattgatttcctgctttctttcattttt

SEQ ID NO: 19542 - DNA, 120 bp, Artificial Sequence
  ENSG00000021645_63 (sequence is synthesized)
ttcaatttaagtaataatacatttgttatattcctttcagtgtaagtttctatttggacaattttatgggaacatgtgcattctctatgtgagcttctatcatattcctgttttattagc

SEQ ID NO: 19543 - DNA, 120 bp, Artificial Sequence
  ENSG00000021645_64 (sequence is synthesized)
agaacctaaaggaatttatttaatgatgttgtgacattactgctttttcttttttcttttcttagttcatatttgcattttcgttcaaggatatgcttagcaataaaatgttcttcccaa

SEQ ID NO: 19544 - DNA, 120 bp, Artificial Sequence
  ENSG00000021645_65 (sequence is synthesized)
ttcttcagtgcccagttttctgccgtgggatggtgttaggcccgggaagaacagagcctaaatgcacccctctacccacttccaccgggatcttgacgaagctcgagaggagaatgtggc

SEQ ID NO: 19545 - DNA, 120 bp, Artificial Sequence
  ENSG00000021645_66 (sequence is synthesized)
atgtttggagatttggagaatcttaaaggacaatatgtaaaaggatggctcttctgaaagattcataagtaattctctcctccagaaacttgggaaataaatgactagtgctcttatgag

SEQ ID NO: 19546 - DNA, 120 bp, Artificial Sequence
  ENSG00000021645_67 (sequence is synthesized)
attgcttacaatacctgcttgcctcatgtgctactattgtttccaaccaactatgctagacttcttaaagtaatatatccacatggttgaaaaaaagtctaacactgtaagagggcacag

SEQ ID NO: 19547 - DNA, 120 bp, Artificial Sequence
  ENSG00000021645_68 (sequence is synthesized)
acttcgcaggcgcccgcccgcctctcggccacctctgcagcctgccaggcacctcctcttgcgctctcgctgatttcgcccacccacctccctccaccccgtgccacgttggtttgggtg

SEQ ID NO: 19548 - DNA, 120 bp, Artificial Sequence
  ENSG00000021645_69 (sequence is synthesized)
gctgctccgcaccgggttcctcctcctctcctctttccctccagtccttcttattctcttcctctggctgcggtggctgctgctgctgctggttttcatccagttgggaaacccaggaag

SEQ ID NO: 19549 - DNA, 120 bp, Artificial Sequence
  ENSG00000021645_70 (sequence is synthesized)
ccggcggctgctccgtggcgctagtccagcacgcccagggttaaaagcctcgcgcccttccgcggagactcccaggaacacccgaagaactcttccacctgcagcccccttttgcctggc

SEQ ID NO: 19550 - DNA, 120 bp, Artificial Sequence
  ENSG00000021645_71 (sequence is synthesized)
agttctgcattgcatctcatggaagtggaaacaggaaaataaaaatgttcaaactccttggatgttgggataaactcacctgaacccacttgggttcgggctgcctccttctcttccttc

SEQ ID NO: 19551 - DNA, 120 bp, Artificial Sequence
  ENSG00000021645_72 (sequence is synthesized)
acatttgagaaaatctcgcactgaagctaattatgtcatatcttattaaaagccgagtaagagctagaccactttcatgtgatagaagatattctaagcagttactaattattacattat

SEQ ID NO: 19552 - DNA, 120 bp, Artificial Sequence
  ENSG00000021645_73 (sequence is synthesized)
caaaatgccatatttatgagataattatctgttacttgaggcattattttttagattgctatgatagaataaccaggagggagtgcatttttctggaaagatgatagaaacattgtattc

SEQ ID NO: 19553 - DNA, 66 bp, Artificial Sequence
  ENSG00000021645_74 (sequence is synthesized)
gagtgcatttttctggaaagatgatagaaacattgtattctagaaaagattattggatactatggg

SEQ ID NO: 19554 - DNA, 120 bp, Artificial Sequence
  ENSG00000021645_75 (sequence is synthesized)
tggatactatgttttttaaaggcatttcgtaccttttacgtattttctataagtcaacaagctttaaacagtatttaaaactatgttcacatagtgccataagcactagaaagtcttaga

SEQ ID NO: 19555 - DNA, 120 bp, Artificial Sequence
  ENSG00000021645_76 (sequence is synthesized)
tgtcttctttccaagcctcccaccatattaaaatttaaaattaaaaaacagaatccaaaaccaaaatttaaatgagttcttcaattttaacagcttcttacaagaatttctgattacaac

SEQ ID NO: 19556 - DNA, 120 bp, Artificial Sequence
  ENSG00000021645_77 (sequence is synthesized)
ttgtttcatacacccattgtagcagtaatgtctcatatttctcgttctctcagcacacacttacttggccaattggataatccatctaccctttgttcttcactgtaatctagaaatata

SEQ ID NO: 19557 - DNA, 120 bp, Artificial Sequence
  ENSG00000021645_78 (sequence is synthesized)
gatttaactgaacagctgtcctttatccatatgttggttaccagttttcaaagagttagaattttaaaaatatatatttagttaagcctgtgccttcaagataacattagtggagtggtt

SEQ ID NO: 19558 - DNA, 120 bp, Artificial Sequence
  ENSG00000021645_79 (sequence is synthesized)
atactatcgactatgttaggaatgggggggagaaagtcaggttcagtgatgtcaaattatgtaaagttttttttttgttcctgtcttcaaagttctgtattagatgttctcccatcattt

SEQ ID NO: 19559 - DNA, 77 bp, Artificial Sequence
  ENSG00000021645_80 (sequence is synthesized)
ctgtcttcaaagttctgtattagatgttctcccatcattttttgagatggagtcttgcagcctacaacctcaaacga

SEQ ID NO: 19560 - DNA, 83 bp, Artificial Sequence
  ENSG00000021645_81 (sequence is synthesized)
agcctcctgagtagctgcgactacaggcatgggccaccacacccagctcattttttaatttattttttatttttttagtaagg

SEQ ID NO: 19561 - DNA, 120 bp, Artificial Sequence
  ENSG00000021645_82 (sequence is synthesized)
aaatgctgggattataggtgtgagccactcctcctgaaatctttctaaatctcactaatatataattctaggactactttaagcattcactttttctttaattcaagaaacatttattga

SEQ ID NO: 19562 - DNA, 120 bp, Artificial Sequence
  ENSG00000021645_83 (sequence is synthesized)
tttattgaacacttatgtacaagctagtctactattggctattgttactttgtttcaatgaaggcagaaaatggctagaaggattttaagcctttttgtctcttgtataaatctatacag

SEQ ID NO: 19563 - DNA, 120 bp, Artificial Sequence
  ENSG00000021645_84 (sequence is synthesized)
gtccagtctctctttgctcatattcaaattgaagtttgatctttctccaaaaaatatccaagccctgtgtttgtcccagttgaactaatatcttgattatatagtttaagatcagtttga

SEQ ID NO: 19564 - DNA, 120 bp, Artificial Sequence
  ENSG00000021645_85 (sequence is synthesized)
taatgtctattgaatatttactaaatgattatgggatattaaattgagagccttgggagcttatcatctagtaaagatgaacaaaaaatggtactatagtgaatgcaaataagctatcaa

SEQ ID NO: 19565 - DNA, 120 bp, Artificial Sequence
  ENSG00000021645_86 (sequence is synthesized)
aaagtacaaactaagttgggagcttagaagaaattatgtaagggaaggcttcatagaaggggtgacattttggtaaaccttggaaaactgataggcagaaataagggctgtatatcattc

SEQ ID NO: 19566 - DNA, 120 bp, Artificial Sequence
  ENSG00000021645_87 (sequence is synthesized)
taagcaaacccttaaagtgggagcaagcaggatcaaaaccataatttggattgatgacagactgcaaaaagtacattggaggaagatatgagtaggaaggtttttgaaatcatgtcaatg

SEQ ID NO: 19567 - DNA, 120 bp, Artificial Sequence
  ENSG00000021645_88 (sequence is synthesized)
aatgggaagagagaaatgggagaatagcttgagaagttcaaggtcaagggctgctttgtcgagtacaaaggactcgagcatatttgaaatgaaaggtaataactgatctactcttatgga

SEQ ID NO: 19568 - DNA, 120 bp, Artificial Sequence
  ENSG00000021645_89 (sequence is synthesized)
gcaaccgagtttcctgatagagatgtttatctgggggaaaaaggcataagtcaatcttcttggagagaatgggatcagaaactgacatattgctacagaggttacaaaagctgtagtcag

SEQ ID NO: 19569 - DNA, 120 bp, Artificial Sequence
  ENSG00000021645_90 (sequence is synthesized)
agggcttcagtgttctggatatattaaaggacaaggtcagatacccaagtgggaccgtgagtgattaatggcagcagtccactgacagcaccagtaggaaggcgctaatgaaaagatctc

SEQ ID NO: 19570 - DNA, 120 bp, Artificial Sequence
  ENSG00000021645_91 (sequence is synthesized)
taaatatcagtaaggggttagctgccattaataatacaactttatagctttactattttttcttttattgttgaaatagtgagggcacgtatttttctaattgtgtttattacaaagaaa

SEQ ID NO: 19571 - DNA, 120 bp, Artificial Sequence
  ENSG00000021645_92 (sequence is synthesized)
acagacccgaagaacttaaatgacttctccaaggtcacacagctaatacatgacaatgtcatgacttaaaatccagtcttgtggttccaaatttagagctctttcataaacctgtctcta

SEQ ID NO: 19572 - DNA, 120 bp, Artificial Sequence
  ENSG00000021645_93 (sequence is synthesized)
gagaagcaagtcattttctactttttccagaagcatttgaagtggaagctaaggcaggaaatgagaggatattgtgttagtctactgggattaccctggcaaaataccacaggctgggta

SEQ ID NO: 19573 - DNA, 120 bp, Artificial Sequence
  ENSG00000021645_94 (sequence is synthesized)
gacaactgaaatgtatttctcagttccagaaacaaagttgcagatcaaagtttgttagggctcagtttctgggaagggctctcttcctggcttgtagataataagctaccttctcactat

SEQ ID NO: 19574 - DNA, 120 bp, Artificial Sequence
  ENSG00000021645_95 (sequence is synthesized)
gtactcacagggcctttcttctgttcatgcactgagagatttctttttcttgctcttcttataagaccaccagtgctattggttaaagccctgccattatgactttgtttgaccttaatt

SEQ ID NO: 19575 - DNA, 120 bp, Artificial Sequence
  ENSG00000021645_96 (sequence is synthesized)
acttcctaaagacactacctcccaatacagtcatgtttggggttgggacttcaacatatgaatgttggaggggatatggttctgtttctagcaaatgtatagtagtgggaattgcaaagg

SEQ ID NO: 19576 - DNA, 120 bp, Artificial Sequence
  ENSG00000021645_97 (sequence is synthesized)
ttgaagttccaaagtatcaagggaatcagaattgggaagcaattctaacctttttgaagtggttacatggcccaagtagaagagcaaataattccaagagacaccaagccacagagcagg

SEQ ID NO: 19577 - DNA, 120 bp, Artificial Sequence
  ENSG00000021645_98 (sequence is synthesized)
taggatcacgtgagtagggcccaggatagaagagcagtgttagggttgcatgagagtgagggcatataagacaacaacagctaaaagcaatgcatgctcagatcttgggagatgtattaa

SEQ ID NO: 19578 - DNA, 120 bp, Artificial Sequence
  ENSG00000021645_99 (sequence is synthesized)
atgagtagagtgaatttcaagatatctgagttttttttttttaatgattacatgggttctagagtcaaaatgccatggctcatctggtactgtaacttaagataaactgcttagctaagg

SEQ ID NO: 19579 - DNA, 120 bp, Artificial Sequence
  ENSG00000021645_100 (sequence is synthesized)
ctcagctttcatacctataattttgttatacttatcttgcaggtttcttgagaaatattggatgaaataattcatgtgaaatgcttaacatatgtgtgacaaataattatccttaaataa

SEQ ID NO: 19580 - DNA, 120 bp, Artificial Sequence
  ENSG00000021645_101 (sequence is synthesized)
atgttggtcgttattacaattggctttgttacttgattcaggcaggatcaaaattagctgctatatgcatgactaaccaggaccaaaaagttaataaaaatacgaaagtttggcactctt

SEQ ID NO: 19581 - DNA, 120 bp, Artificial Sequence
  ENSG00000021645_102 (sequence is synthesized)
gaggtgaattagttatccctcttcttgtagaagaccctttagctacccctcctattgctactcgtgcaccttccattacactcccccctacctttcgccccctcctcaccattattgaga

SEQ ID NO: 19582 - DNA, 120 bp, Artificial Sequence
  ENSG00000021645_103 (sequence is synthesized)
ccaccaaagattccctgtccatgacctctgaggcggggttaccttgcttgtcggaccaaggcagcgatggttgtgatgatgatggcttggtgatatctgggtatggctcaggggaaacct

SEQ ID NO: 19583 - DNA, 120 bp, Artificial Sequence
  ENSG00000021645_104 (sequence is synthesized)
aaatggcagggggatttccttgaggaggtgctacactaaagaagagttcttagttctgagtaggtgaccatcagaggaagaagtgaggatgctgcttaaataggatgagcaaagctggcg

SEQ ID NO: 19584 - DNA, 120 bp, Artificial Sequence
  ENSG00000021645_105 (sequence is synthesized)
cacatagtcagaaaatatgtgcggaacagaccctgagatgctgactgtgcaaggctgttcagacccagtcagggatgacattaatgaggtatcgcctttgcaacttcaagaatgaataga

SEQ ID NO: 19585 - DNA, 120 bp, Artificial Sequence
  ENSG00000021645_106 (sequence is synthesized)
agttaatcagacaagaaaagaaccatttcacaaggaacaatatgtacacataattcaagacagccagaatgtgaagtaagaggagactcaagttttgtcagcatattatataagtaaggg

SEQ ID NO: 19586 - DNA, 120 bp, Artificial Sequence
  ENSG00000021645_107 (sequence is synthesized)
gtcttttctctggagtcctgggaggcaagttatgggcagcactgcttctggccgcaccatgaagcctgagtctgcttgcgctctgcccagggccctgctctgtctgagcattgggcttct

SEQ ID NO: 19587 - DNA, 120 bp, Artificial Sequence
  ENSG00000021645_108 (sequence is synthesized)
agctgcccccctccccacagcctgccgctgctaggaggtagaactttaggagtggtccttggcctgtttctacctgtcacctggctcacctcaccactcactcctcctccatcacagcac

SEQ ID NO: 19588 - DNA, 120 bp, Artificial Sequence
  ENSG00000021645_109 (sequence is synthesized)
cccggccctccctgtccctggcctccctggctggggcatttgggggtccgctgggaggagtgcatcgctgaaggcttcttcctactctcctgcaccttctcctccttgagtcaaggcctc

SEQ ID NO: 19589 - DNA, 120 bp, Artificial Sequence
  ENSG00000021645_110 (sequence is synthesized)
cggatccacatggatagctgagatcttttcttggagaaagacgctttcctctttactccagtccctcacttccccacctgattttcctcctcttctgctggtcctgtctttttctactgc

SEQ ID NO: 19590 - DNA, 120 bp, Artificial Sequence
  ENSG00000021645_111 (sequence is synthesized)
ctctttattcaatttcttgcttgtgtgcccctctgggactctcttgtacactttcctccatctccactatctcaggatctgtgtgtgtgctgccttcctcctgtgtgctttctgtccccc

SEQ ID NO: 19591 - DNA, 120 bp, Artificial Sequence
  ENSG00000021645_112 (sequence is synthesized)
ggtcagccagaagctctaatgcagctagatcactccgtgccgcccttacatggacatggcgactcacttacacatttactcctatcatcttcatctcctgtgtagttcactcatagatat

SEQ ID NO: 19592 - DNA, 120 bp, Artificial Sequence
  ENSG00000021645_113 (sequence is synthesized)
gaccctccccttcctgcatctttccttcccattctccccctttctttagcattgttaaaatttatgtgctgtcatccatctccctaaattaaagaaagcctaaaatttgtcaaaaagaca

SEQ ID NO: 19593 - DNA, 120 bp, Artificial Sequence
  ENSG00000021645_114 (sequence is synthesized)
aaaaaatatatatatctgaaaacttataaatgcagaaattcattcaaaacccgttagagtcatagaattttttgaaaggcaaattataaaagtaaacaggtttttttgtttggtttttca

SEQ ID NO: 19594 - DNA, 120 bp, Artificial Sequence
  ENSG00000021645_115 (sequence is synthesized)
atcatagcaatcggaattattttaaattcaaaaattgatgccctcccaaaccccccaaagtaaaaatttgttaaagtgcagattttttttttctttttatgttatgtggtgtggatgtat

SEQ ID NO: 19595 - DNA, 120 bp, Artificial Sequence
  ENSG00000021645_116 (sequence is synthesized)
gtgttgttgcctccctgtatcatcctctgttgtaaattattatatttgaaaaattagacattttgctcaaaagtttttaagaaatgacaacaaaaaaagcaagttacaagaatgtggcaa

SEQ ID NO: 19596 - DNA, 120 bp, Artificial Sequence
  ENSG00000021645_117 (sequence is synthesized)
agtctcaggctcagcgctcagccctacacatcgcctcttgcatgcaactcacagagagggagaggcaacctgtcctcccctctctcagcctcggcatctccagccaccaaggacctgctt

SEQ ID NO: 19597 - DNA, 120 bp, Artificial Sequence
  ENSG00000021645_118 (sequence is synthesized)
ttcgcacctccaacaacccctcccttctaccctgccactccctcccagagagaaaggaaaaggagagagaaagattctggaatttgaacctacccaaagaggaaacatacccagcaaact

SEQ ID NO: 19598 - DNA, 120 bp, Artificial Sequence
  ENSG00000021645_119 (sequence is synthesized)
caggactggagggcttgaggaatgtggtggtccctctcttcgttgtttctgccccctgaggttgtgctttctcagggatatgcactctgcacttccattcctgcagtgaaattaactcga

SEQ ID NO: 19599 - DNA, 120 bp, Artificial Sequence
  ENSG00000021762_0 (sequence is synthesized)
atctgctggcatttcctgcagccaggcccgcgccgccagtggagcccccgcgcgcccggccggcccggagcaccgagctcgcggcacggtaggagaagcccccgagcgcccacagcatga

SEQ ID NO: 19600 - DNA, 120 bp, Artificial Sequence
  ENSG00000021762_1 (sequence is synthesized)
aggaggaggccttcctccggcgccgcttctccctgtgtccaccttcctccacccctcagaaagtcgacccccggaagctcacccggaacttgctcctcagcggagacaatgagctctacc

SEQ ID NO: 19601 - DNA, 120 bp, Artificial Sequence
  ENSG00000021762_2 (sequence is synthesized)
cactcagcccagggaaggacatggagcccaacggcccgtcgctgcccagggatgaagggcccccgaccccaagctctgccacgaaggtgccaccggcagagtacaggctgtgcaacgggt

SEQ ID NO: 19602 - DNA, 120 bp, Artificial Sequence
  ENSG00000021762_3 (sequence is synthesized)
cagacaaggaatgtgtgtcccccaccgccagggtcaccaagaaggagactctcaaggcgcagaaggagaactaccggcaggagaagaagcgcgccacacggcagctgctcagcgctctga

SEQ ID NO: 19603 - DNA, 120 bp, Artificial Sequence
  ENSG00000021762_4 (sequence is synthesized)
cagaccccagcgtggtcatcatggctgacagcctgaagatccgcggcaccctgaagagctggaccaagctgtggtgcgtgctgaagccgggggtgctgctcatctacaagacgcccaagg

SEQ ID NO: 19604 - DNA, 120 bp, Artificial Sequence
  ENSG00000021762_5 (sequence is synthesized)
tgggccagtgggtgggcacggtgctgctgcactgctgcgagctcatcgagcggccctccaagaaggacggcttctgcttcaagctcttccacccgctggatcagtccgtctgggccgtga

SEQ ID NO: 19605 - DNA, 120 bp, Artificial Sequence
  ENSG00000021762_6 (sequence is synthesized)
agggccccaaaggtgagagcgtgggctccatcacacagcccctgcccagcagctacctgatcttcagggccgcctccgagtcagatggtcgctgctggctggacgccctggagctggccc

SEQ ID NO: 19606 - DNA, 120 bp, Artificial Sequence
  ENSG00000021762_7 (sequence is synthesized)
tgcgctgctctagcctactgagactgggcacctgcaagccgggccgagacggggagccagggacctcgccagacgcatcaccctcatcgctctgtgggctgccagcctcagccaccgtcc

SEQ ID NO: 19607 - DNA, 120 bp, Artificial Sequence
  ENSG00000021762_8 (sequence is synthesized)
acccagaccaagacctgttcccactgaacgggtcttccctggagaacgatgcattctcagacaagtcggagagagagaaccctgaggagtcagataccgagacccaggaccatagccgga

SEQ ID NO: 19608 - DNA, 120 bp, Artificial Sequence
  ENSG00000021762_9 (sequence is synthesized)
agacggagagtggcagcgaccagtcagagacccctggggccccggtgcggagagggaccacctatgtggagcaggtccaggaggagctgggggagctgggcgaggcgtcccaggtggaga

SEQ ID NO: 19609 - DNA, 120 bp, Artificial Sequence
  ENSG00000021762_10 (sequence is synthesized)
cagtgtcagaggagaacaagagtctgatgtggaccctgctgaagcagctacggccaggcatggacctgtcccgcgtggtgctacccacgttcgtactggagccgcgctccttcctgaaca

SEQ ID NO: 19610 - DNA, 120 bp, Artificial Sequence
  ENSG00000021762_11 (sequence is synthesized)
agctctccgactactactaccacgcagacctgctctccagggctgcggtggaggaggatgcctacagccgcatgaagctggtgctgcggtggtacctgtctggcttctacaagaagccca

SEQ ID NO: 19611 - DNA, 120 bp, Artificial Sequence
  ENSG00000021762_12 (sequence is synthesized)
agggaatcaagaagccgtacaaccccatcctgggggagaccttccgctgctgctggttccacccgcagactgacagccgcacattctacatagcagagcaggtgtcccaccacccgcccg

SEQ ID NO: 19612 - DNA, 120 bp, Artificial Sequence
  ENSG00000021762_13 (sequence is synthesized)
tgtctgccttccacgtcagcaaccggaaggacggcttctgcatcagtggcagcatcacagccaagtccaggttttatgggaactcgctgtcggcgctgctggacggcaaagccacgctca

SEQ ID NO: 19613 - DNA, 120 bp, Artificial Sequence
  ENSG00000021762_14 (sequence is synthesized)
ccttcctgaaccgagccgaggattacacccttaccatgccctacgcccactgcaaaggaatcctgtatggcacgatgaccctggagctgggtgggaaggtcaccatcgagtgtgcgaaga

SEQ ID NO: 19614 - DNA, 120 bp, Artificial Sequence
  ENSG00000021762_15 (sequence is synthesized)
acaacttccaggcccagctggaattcaaactcaagcccttcttcgggggtagcaccagcatcaaccagatctcgggaaagatcacgtcgggagaggaagtcctggcgagcctcagtggcc

SEQ ID NO: 19615 - DNA, 120 bp, Artificial Sequence
  ENSG00000021762_16 (sequence is synthesized)
gtgtttatcaaggaggaagggagcggaagcagtgcgcttttctggaccccgagcggggaggtccgcagacagaggctgaggcagcacacggtgccgctggaggagcagacggagctggag

SEQ ID NO: 19616 - DNA, 120 bp, Artificial Sequence
  ENSG00000021762_17 (sequence is synthesized)
tccgagaggctctggcagcacgtcaccagggccatcagcaagggcgaccagcacagggccacacaggagaagtttgcactggaggaggcacagcggcagcgggcccgtgagcggcaggag

SEQ ID NO: 19617 - DNA, 120 bp, Artificial Sequence
  ENSG00000021762_18 (sequence is synthesized)
agcctcatgccctggaagccgcagctgttccacctggaccccatcacccaggagtggcactaccgatacgaggaccacagcccctgggaccccctgaaggacatcgcccagtttgagcaa

SEQ ID NO: 19618 - DNA, 120 bp, Artificial Sequence
  ENSG00000021762_19 (sequence is synthesized)
gacgggatcctgcggaccttgcagcaggaggccgtggcccgccagaccaccttcctgggcagcccagggcccaggcacgagaggtctggcccagaccagcggcttcgcaaggccagcgac

SEQ ID NO: 19619 - DNA, 120 bp, Artificial Sequence
  ENSG00000021762_20 (sequence is synthesized)
cagccctccggccacagccaggccacggagagcagcggatccacgcctgagtcctgcccagagctctcagacgaggagcaggatggtgactttgtccctggcggtgagagcccatgccct

SEQ ID NO: 19620 - DNA, 120 bp, Artificial Sequence
  ENSG00000021762_21 (sequence is synthesized)
cggtgcaggaaggaggcgcggcggctgcaggccctgcacgaggccatcctctccatccgagaggcccagcaggagctgcacaggcacctctcggccatgctgagctccacggcacgggca

SEQ ID NO: 19621 - DNA, 120 bp, Artificial Sequence
  ENSG00000021762_22 (sequence is synthesized)
gcacaggcaccgaccccaggcctcctgcagagcccccgatcctggttcctgctctgcgtgttcctggcgtgtcagctgttcattaaccacatcctcaaataggagccctgagggcagagc

SEQ ID NO: 19622 - DNA, 120 bp, Artificial Sequence
  ENSG00000021762_23 (sequence is synthesized)
tcctggccggtcctgagccctccctcccaggcacccagcactttaagcctgctccatggaggcagagaggcccggcaagcacagccactgtgacggggagtccaggcgcaggagggaccc

SEQ ID NO: 19623 - DNA, 120 bp, Artificial Sequence
  ENSG00000021762_24 (sequence is synthesized)
ggggccacaaggcgctgcgggcccaggtgtgctgggcccctctcaggggcactggcctctctgcagggccttccgcccagcgctggccttaatgctaaagccaaatgcagcttctgctgt

SEQ ID NO: 19624 - DNA, 120 bp, Artificial Sequence
  ENSG00000021762_25 (sequence is synthesized)
gcgacgcactcctggccatcttgccgtgtcaccccctgtccggcctccacttgccatgggggatggatggatttagggtgggagggcctgtgggggccctggacagtcacaccccagcag

SEQ ID NO: 19625 - DNA, 120 bp, Artificial Sequence
  ENSG00000021762_26 (sequence is synthesized)
cagtgagtgggcaggtttggaggagccccgagtggcccaggagtccccccacacacagatgcataggcctgccttccggagaccctgtccacattgccgggaccaccctggtggggccac

SEQ ID NO: 19626 - DNA, 120 bp, Artificial Sequence
  ENSG00000021762_27 (sequence is synthesized)
tggtgggtgccagggacaggttagggccactctggggaaggcattttggttttttattccacgctgtgctgtttggatgggagccccacagaggcaggtcctggaaccaccccaccccca

SEQ ID NO: 19627 - DNA, 120 bp, Artificial Sequence
  ENSG00000021762_28 (sequence is synthesized)
cacctggacgctcgctctggtgggggcacacgcaggtggaggtggttgtgggtgcaggtgtgtgcaggggtgtggggggcgcaggggtgtggcttagctggccccgcacccaggccgggg

SEQ ID NO: 19628 - DNA, 120 bp, Artificial Sequence
  ENSG00000021762_29 (sequence is synthesized)
aggctcaagttcgccactttactcagaccgatgcacagtcttcccattttacacttttttaataaacataattgcaatattttaggtgggctgcgagctgcagtcagccttcacgtctgg

SEQ ID NO: 19629 - DNA, 120 bp, Artificial Sequence
  ENSG00000021762_30 (sequence is synthesized)
cctcagtccccgtgtcagtgccgctctgcgtgtgcgtgtgcgcgtgtgtgagcctctacacatatatatacgtacagagccttaaaccacatcgtggcggtgccgtctgagctgtagcgg

SEQ ID NO: 19630 - DNA, 120 bp, Artificial Sequence
  ENSG00000021762_31 (sequence is synthesized)
gtggctttgtttccagtttttgtacccgtgtccttgtctcccctcctcccccatctggggatgtgtctgtgttccacaccttgaaataaacagacacatacgtgttctcttcttgcggga

SEQ ID NO: 19631 - DNA, 120 bp, Artificial Sequence
  ENSG00000021762_32 (sequence is synthesized)
cacagaccctctcctgcagaggcagaggccgcctgccacaggccacgcggagcagggtcccaccatggccctgagcatcttgactgagcagttctgcatcccaaggcctcacaagaagcc

SEQ ID NO: 19632 - DNA, 120 bp, Artificial Sequence
  ENSG00000021762_33 (sequence is synthesized)
gaccctgctgaccacagcctgacatggccaagcaggcaggtcagcagggctacagtgctgtgagcatggccccaggatgtccctggcagggagggcaggcctggtgcacccctggtggca

SEQ ID NO: 19633 - DNA, 120 bp, Artificial Sequence
  ENSG00000021762_34 (sequence is synthesized)
tgaccacccaccaccaggctcccagggcccaggccctcctcaccctgcctcagaagtcccctgagagggggacttcttagccaggggcacccccaccatgtggctctgaagccccttccg

SEQ ID NO: 19634 - DNA, 120 bp, Artificial Sequence
  ENSG00000021762_35 (sequence is synthesized)
tcatgtatgggaaatacttacaccaaaaagctactcatggtttctctgggattcgaacatcattgggcatcctggatgtgcctttgctgattctggacagcccaagtcaggaggctcaga

SEQ ID NO: 19635 - DNA, 120 bp, Artificial Sequence
  ENSG00000021762_36 (sequence is synthesized)
gctggaaagctgagggcagagctgccagctaagaaaggggacagagctcccccacctacccgcctctctgcagccaagtgtctacctggccaggtgcctggccccacctggtggccctgt

SEQ ID NO: 19636 - DNA, 120 bp, Artificial Sequence
  ENSG00000021762_37 (sequence is synthesized)
ggagactctcaaggtgagcccgggcccggggagggtgcagcagtgtcactgtcagaccgacggccacctgagccagggaggtcaccctccccacctgtcaaaaggaggggacaaaccgca

SEQ ID NO: 19637 - DNA, 120 bp, Artificial Sequence
  ENSG00000021762_38 (sequence is synthesized)
accaggtggcctgaaacgatggaaattcacttccctgcatctagccgttatcactgcagcctctgctccttcctcatgaggcctttccttatccacctgtctctccccctttttataagg

SEQ ID NO: 19638 - DNA, 120 bp, Artificial Sequence
  ENSG00000021762_39 (sequence is synthesized)
agaccgctgggctgcctcctgtcagaagccaactggagttagggtttggggtgactcctgggggtatggaggggtcacagggtgggcttacctgcccctccctcgtccctgggctgagcc

SEQ ID NO: 19639 - DNA, 120 bp, Artificial Sequence
  ENSG00000021762_40 (sequence is synthesized)
cagcccctccctcatccttgggctgagcgggtctgccccgccgaagcggctgggtggatttcctctcttgccgtttcgcaacttgctcccctctgtgtgtctgccccagtctcttcaagg

SEQ ID NO: 19640 - DNA, 120 bp, Artificial Sequence
  ENSG00000021762_41 (sequence is synthesized)
tgccttttacaggaagacttctgtaagggtcccaccccacctgatacagcctcccaaagcctggagaagtgggccagcctttgggatcctagatagatgctcttgggtctgcctgcacca

SEQ ID NO: 19641 - DNA, 120 bp, Artificial Sequence
  ENSG00000021762_42 (sequence is synthesized)
gggaccatctgctggcatttcctgcagccaggcccgcgccgccagtggagcccccgcgcgcccggccggcccggagcaccgagctcgcggcacgaagcccccgagcgcccacagcatgaa

SEQ ID NO: 19642 - DNA, 120 bp, Artificial Sequence
  ENSG00000021762_43 (sequence is synthesized)
aaaacaaagaaagacgtattaatttttttaaacatacgggatgccatcatgggtgctggtgccctctgtgttctgggtgccatcctgggacgcagcagtgagcgagaagatgcctgccct

SEQ ID NO: 19643 - DNA, 120 bp, Artificial Sequence
  ENSG00000021762_44 (sequence is synthesized)
caggagcccaatgccagagcgggaactgcagagtcaagtgaagcacgatgcatgtctcacagggctggtggcctcccaggaggctggaacaggaggcgacacctgacatgagcaaaggcc

SEQ ID NO: 19644 - DNA, 120 bp, Artificial Sequence
  ENSG00000021762_45 (sequence is synthesized)
ctggcgaggacagagcccccttagtgggggagacggcccctgagggaccaggcgtgcctcccaggctccgtgcctcccaggctccgcacctcccaggctccgcacccccaccagcctctc

SEQ ID NO: 19645 - DNA, 120 bp, Artificial Sequence
  ENSG00000021762_46 (sequence is synthesized)
cctgtggggttctgctcccagcgcctcctgtccttctcaccctcccagggactgacacaggcctcccagggatcggtgctgctgggtcgggactcagggatcggtgctgctgggtcggta

SEQ ID NO: 19646 - DNA, 120 bp, Artificial Sequence
  ENSG00000021762_47 (sequence is synthesized)
agcacataaggggcagggacaacgggctcagatgtctggggctcctcttgtgttctgatggctcctgagacggggagaaacggcgacagtttcctgggttcaggaagggagaggaggcgc

SEQ ID NO: 19647 - DNA, 120 bp, Artificial Sequence
  ENSG00000021762_48 (sequence is synthesized)
ctcgcaccctggctagggtgggctgggggcctgcacccctaagttggagaaccccacgaagctgaccccactcaccgctgcccaccccgccaagcctcctggccattttcagcggagtgt

SEQ ID NO: 19648 - DNA, 120 bp, Artificial Sequence
  ENSG00000021762_49 (sequence is synthesized)
atttcctgcagccaggcccgcgccgccagtggagcccccgcgcgcccggccggcccggagcaccgagctcgcggcacggtaggaggcacagctgtgtgcccagcggcttagcagctctgc

SEQ ID NO: 19649 - DNA, 120 bp, Artificial Sequence
  ENSG00000021762_50 (sequence is synthesized)
agaaggcaagcgacggagtgcccgaaaccgggtgcgatggaaaccgggtgccagaaagacaccgggtgcctcgtcccagccatgccgtgacagggtccaacagccgtgcccacaggcagg

SEQ ID NO: 19650 - DNA, 120 bp, Artificial Sequence
  ENSG00000021762_51 (sequence is synthesized)
ccccaaatcctgtagaggaatccacaaacgagacccctttcctaccttcccgtgagttcccctcctcgtctgccctcacctcccccggagtgagctctgtctcctcaaagagtcccacac

SEQ ID NO: 19651 - DNA, 120 bp, Artificial Sequence
  ENSG00000021762_52 (sequence is synthesized)
gccctgggggtttcccgcaggaaagaacagacttccccagaggtgggtttgggggtgggggcgcagctcataagggcagtgtgtctgtctcgctggtctgcccgccctggtctgagagct

SEQ ID NO: 19652 - DNA, 120 bp, Artificial Sequence
  ENSG00000021762_53 (sequence is synthesized)
atttcctccatgctctaggatgggaaggacaagagggcgtgactcttcccagagtcccatcatctctgatttaggaatggagcccttagggtgtctcacctcctcgggatgcctaatagt

SEQ ID NO: 19653 - DNA, 120 bp, Artificial Sequence
  ENSG00000021762_54 (sequence is synthesized)
gtgtttggtgaatgcagatggacttaactggtccatagatcccctctcaccctgctgacacgaagacaaggatgaaggggaaagttgaggctcaacaactgaacagtattccttctaaat

SEQ ID NO: 19654 - DNA, 120 bp, Artificial Sequence
  ENSG00000021762_55 (sequence is synthesized)
gccttcccttcatccaaggccaggggagatggcaaaccttcagtaagcgctgccgtacctggcagagcagaagcaccaccccagcttggagacagcatgcccctgactgctggtcacgga

SEQ ID NO: 19655 - DNA, 120 bp, Artificial Sequence
  ENSG00000021776_0 (sequence is synthesized)
atccggcccggagcgtttgtgcggcgcggagttaagcgccccggcagtaacttaagggaagtggaccagggttgccgctgcccagagcggtcctttagtttccactggagtggagggaag

SEQ ID NO: 19656 - DNA, 120 bp, Artificial Sequence
  ENSG00000021776_1 (sequence is synthesized)
agtgctgccatggcagcccctgcgcagcccaagaagatcgtggcccctacggtgtcccaaatcaatgcggagttcgtgacccagttagcatgtaaatactgggctccccacatcaagaag

SEQ ID NO: 19657 - DNA, 120 bp, Artificial Sequence
  ENSG00000021776_2 (sequence is synthesized)
aaatcaccttttgatataaaggttattgaagatatatatgaaaaagagattgtcaaatcaaggtttgctattagaaagataatgctcttggaatttagccagtatcttgaaaattatctc

SEQ ID NO: 19658 - DNA, 120 bp, Artificial Sequence
  ENSG00000021776_3 (sequence is synthesized)
tggatgaattattctcctgaggtatctagcaaggcctatttaatgtcaatctgctgtatggtgaatgagaagtttagagaaaacgtgcctgcatgggagatttttaagaagaagccagac

SEQ ID NO: 19659 - DNA, 120 bp, Artificial Sequence
  ENSG00000021776_4 (sequence is synthesized)
cacttcccattcttttttaaacacatcttgaaggcggcattagctgaaactgatggtgaattttcacttcatgaacagacagtcttactactttttcttgatcattgcttcaatagtttg

SEQ ID NO: 19660 - DNA, 120 bp, Artificial Sequence
  ENSG00000021776_5 (sequence is synthesized)
gaagtagacttgatacgaagtcaagtacagcagcttatctccctcccaatgtggatgggcttacagctggcacgattggaattagaattaaaaaagacacctaagctaagaaaattctgg

SEQ ID NO: 19661 - DNA, 120 bp, Artificial Sequence
  ENSG00000021776_6 (sequence is synthesized)
aacttgattaaaaagaatgatgaaaagatggatccagaagcaagagaacaggcatatcaagagaggagatttctttcacaactcatccagaagtttatctctgtgctgaaatcagtccca

SEQ ID NO: 19662 - DNA, 120 bp, Artificial Sequence
  ENSG00000021776_7 (sequence is synthesized)
ctttctgaacctgtcactatggacaaagttcattactgtgaaagattcattgaacttatgattgatctagaggccctgctacccacaaggcgctggtttaataccatcctggatgattcc

SEQ ID NO: 19663 - DNA, 120 bp, Artificial Sequence
  ENSG00000021776_8 (sequence is synthesized)
caccttctggttcactgttacctttccaatcttgttcgtagagaagaggatggccatcttttttcccagcttttggacatgcttaaattctatactggttttgaaattaatgaccaaact

SEQ ID NO: 19664 - DNA, 120 bp, Artificial Sequence
  ENSG00000021776_9 (sequence is synthesized)
ggaaatgctctgacagagaatgagatgaccacaattcactatgatagaattacttctctacagagagctgcttttgcacattttcctgaactctatgattttgccctctcaaatgtggca

SEQ ID NO: 19665 - DNA, 120 bp, Artificial Sequence
  ENSG00000021776_10 (sequence is synthesized)
gaagtagatactcgggagtccttggtcaagttttttggacctcttagttcaaacacactccaccaggtggcatcatacctctgcttgttgccaactcttcctaaaaatgaagacacaact

SEQ ID NO: 19666 - DNA, 120 bp, Artificial Sequence
  ENSG00000021776_11 (sequence is synthesized)
tttgataaagaatttcttctagaattgctggtatctcgtcatgaacgtcgaatttctcagattcagcagttgaaccagatgcctttgtatccaactgagaaaattatatgggatgaaaat

SEQ ID NO: 19667 - DNA, 120 bp, Artificial Sequence
  ENSG00000021776_12 (sequence is synthesized)
attgtcccaactgagtactattctggagaaggttgtcttgctcttcccaaattgaatttgcagtttttgactcttcatgactacctgctaaggaactttaacctcttccgcttagaatca

SEQ ID NO: 19668 - DNA, 120 bp, Artificial Sequence
  ENSG00000021776_13 (sequence is synthesized)
acttatgaaattcgtcaggacattgaagatagtgtcagcagaatgaagccatggcaatctgaatatggcggtgtagtgtttggtggttgggcgcgaatggcccagcccattgtggctttc

SEQ ID NO: 19669 - DNA, 120 bp, Artificial Sequence
  ENSG00000021776_14 (sequence is synthesized)
actgtcgttgaagtggccaaacccaacataggtgaaaactggccaacccgagttcgtgcagatgttaccataaatctcaatgtcagagatcacatcaaagatgaatgggaaggtcttcgt

SEQ ID NO: 19670 - DNA, 120 bp, Artificial Sequence
  ENSG00000021776_15 (sequence is synthesized)
aagcatgatgtatgctttttaattaccgtacgtcccacaaaaccttatggcactaagtttgaccggaggagaccttttattgagcaggttggcctggtttatgtcagaggctgtgaaatt

SEQ ID NO: 19671 - DNA, 120 bp, Artificial Sequence
  ENSG00000021776_16 (sequence is synthesized)
cagggcatgctggatgataaaggacgtgtcattgaagatggacctgaacccagacccaatcttagaggagaatcaaggacatttagagtgtttttggatccaaaccagtatcaacaagat

SEQ ID NO: 19672 - DNA, 120 bp, Artificial Sequence
  ENSG00000021776_17 (sequence is synthesized)
atgaccaatactatacaaaatggagcagaggatgtgtatgaaacttttaatataataatgaggagaaaaccaaaggaaaataactttaaggctgtgctggagactattcggaacctgatg

SEQ ID NO: 19673 - DNA, 120 bp, Artificial Sequence
  ENSG00000021776_18 (sequence is synthesized)
aatactgattgtgtggtacctgactggctgcacgatatcattttaggttatggggacccaagtagtgcacattattcgaaaatgcccaatcagattgccacccttgatttcaatgataca

SEQ ID NO: 19674 - DNA, 120 bp, Artificial Sequence
  ENSG00000021776_19 (sequence is synthesized)
tttctctccattgagcatttaaaagccagcttccctggtcataatgttaaagtaactgtagaagaccctgctctacaaataccccctttcaggataacttttccagtaagaagtggaaaa

SEQ ID NO: 19675 - DNA, 120 bp, Artificial Sequence
  ENSG00000021776_20 (sequence is synthesized)
gggaagaaaaggaaagatgcggatgtggaagatgaagacaccgaggaagcaaaaaccttaattgttgagccccatgttattcctaataggggtccttatccttataatcaacccaaacgt

SEQ ID NO: 19676 - DNA, 120 bp, Artificial Sequence
  ENSG00000021776_21 (sequence is synthesized)
aatacgattcagttcactcatacacagatagaagccatccgtgctggaatgcagcctgggctgactatggttgtgggcccacctggtacaggcaaaacagatgtggcagttcagatcata

SEQ ID NO: 19677 - DNA, 120 bp, Artificial Sequence
  ENSG00000021776_22 (sequence is synthesized)
tccaacatctaccacaacttcccagaacagaggactctaattgttactcattccaatcaggccctaaaccagttgtttgagaaaatcatggcattagacattgatgagcgccacctactg

SEQ ID NO: 19678 - DNA, 120 bp, Artificial Sequence
  ENSG00000021776_23 (sequence is synthesized)
cgtcttggtcatggagaagaagagctggagacagagaaagatttcagcaggtatggaagagttaattatgttctggctcgaagaatagaacttttagaagaagtcaaacgattgcaaaag

SEQ ID NO: 19679 - DNA, 120 bp, Artificial Sequence
  ENSG00000021776_24 (sequence is synthesized)
agtctaggggttccaggagatgcctcatatacctgtgaaactgcaggctatttcttcttataccaggtaatgtctcgctgggaagagtatatcagcaaagtgaaaaataaaggtagtaca

SEQ ID NO: 19680 - DNA, 120 bp, Artificial Sequence
  ENSG00000021776_25 (sequence is synthesized)
ttgccagatgttacggaagtctccactttcttccctttccatgaatactttgcaaatgctcctcaacccatttttaaaggaagatcttatgaagaagacatggaaattgctgaaggatgt

SEQ ID NO: 19681 - DNA, 120 bp, Artificial Sequence
  ENSG00000021776_26 (sequence is synthesized)
ttcaggcatattaagaaaatctttacgcagcttgaggaattcagagcctctgaattgcttcgaagtggactggacagatctaaataccttttagtgaaagaagccaaaattattgctatg

SEQ ID NO: 19682 - DNA, 120 bp, Artificial Sequence
  ENSG00000021776_27 (sequence is synthesized)
acctgtactcatgctgccttaaaacgacatgacttggtcaagctaggtttcaagtatgacaacattttgatggaagaggctgctcagattctggagatagaaacttttatccctcttctt

SEQ ID NO: 19683 - DNA, 120 bp, Artificial Sequence
  ENSG00000021776_28 (sequence is synthesized)
ctacagaatcctcaggatggatttagccgactaaaacgatggattatgattggcgatcatcaccagttacctccagttattaagaacatggcctttcaaaagtactcaaacatggagcag

SEQ ID NO: 19684 - DNA, 120 bp, Artificial Sequence
  ENSG00000021776_29 (sequence is synthesized)
tctctcttcactcgctttgttcgcgttggagttccgactgttgaccttgatgctcaagggagagccagagcaagcttgtgcaacctctacaactggcgatacaagaatctaggaaactta

SEQ ID NO: 19685 - DNA, 120 bp, Artificial Sequence
  ENSG00000021776_30 (sequence is synthesized)
ccccatgtgcagctcttgccagagtttagtacagcaaatgctggcttactgtatgacttccagctcattaatgttgaagattttcaaggagtgggagaatctgaacctaatccttacttc

SEQ ID NO: 19686 - DNA, 120 bp, Artificial Sequence
  ENSG00000021776_31 (sequence is synthesized)
tatcagaatcttggagaggcagaatatgtagtagcactttttatgtacatgtgtttacttggttaccctgctgacaaaatcagtattctaacaacatataatggccaaaagcatcttatt

SEQ ID NO: 19687 - DNA, 120 bp, Artificial Sequence
  ENSG00000021776_32 (sequence is synthesized)
cgcgacatcatcaatagacgatgtggaaacaatccattgattggaagaccaaacaaggtgacaactgttgatagatttcaaggtcaacagaatgactatattcttctttctctggtacga

SEQ ID NO: 19688 - DNA, 120 bp, Artificial Sequence
  ENSG00000021776_33 (sequence is synthesized)
accagggcagtgggccatctgagggatgtccgtcgcttggtagtggccatgtctagagccagacttggactttatatcttcgccagagtatccctcttccaaaactgttttgaactgact

SEQ ID NO: 19689 - DNA, 120 bp, Artificial Sequence
  ENSG00000021776_34 (sequence is synthesized)
ccagctttcagtcagctcacagctcgcccccttcatttgcatataattccaacagaacctttcccaactactagaaagaatggagagagaccatctcatgaagtacaaataataaaaaat

SEQ ID NO: 19690 - DNA, 120 bp, Artificial Sequence
  ENSG00000021776_35 (sequence is synthesized)
atgccccagatggcaaactttgtatacaacatgtacatgcatttgatacagactacacatcattatcatcagactttattacaactaccacctgctatggtagaagagggtgaggaagtt

SEQ ID NO: 19691 - DNA, 120 bp, Artificial Sequence
  ENSG00000021776_36 (sequence is synthesized)
caaaatcaagaaacagaattggaaacagaagaagaggccatgactgttcaagctgacatcatacccagtccaacagacaccagctgccgtcaagaaactccagcctttcaaactgacacc

SEQ ID NO: 19692 - DNA, 120 bp, Artificial Sequence
  ENSG00000021776_37 (sequence is synthesized)
acccccagtgagacaggagccacttccactccagaagccatccctgctttatctgagaccacccctactgtggtaggagctgtatctgcaccggcagaagctaacacacctcaggatgcc

SEQ ID NO: 19693 - DNA, 120 bp, Artificial Sequence
  ENSG00000021776_38 (sequence is synthesized)
acatctgccccggaagagaccaagtagccaaactgtagtccttctaaaggaggacatggcagtcaaaaagtctgagtaaagctgttttttgtattttatatttgcttctgccattttact

SEQ ID NO: 19694 - DNA, 120 bp, Artificial Sequence
  ENSG00000021776_39 (sequence is synthesized)
taaccattcctttcatgttttgatcactgagtgtgtctgtaatcatacctacattaaaatcattttctatgaatatataatatatacttcacatttttagtgaacttctctaaagaagag

SEQ ID NO: 19695 - DNA, 120 bp, Artificial Sequence
  ENSG00000021776_40 (sequence is synthesized)
gacagaatatactggacttaaccacgaatacccttgagtgtccaaattgggaaggaacttgtttcttctgttatactatcaaatgcttaaattctgtttccttttttcttacctttgttt

SEQ ID NO: 19696 - DNA, 120 bp, Artificial Sequence
  ENSG00000021776_41 (sequence is synthesized)
gctgtctttatgtaaagatattattagcagtaagatacaggtttcttcaatctatcaaagtggttacatgcatttccttctctcaaatcttagaatgccttagaatcacctaagatgtct

SEQ ID NO: 19697 - DNA, 120 bp, Artificial Sequence
  ENSG00000021776_42 (sequence is synthesized)
gtttattcttgaggcacacctcagactgaatgagtcagaatctcaggattagagcctaggaatctatattttaggaggttctccacaccactaatgtttgggttgctggcagagtggcat

SEQ ID NO: 19698 - DNA, 120 bp, Artificial Sequence
  ENSG00000021776_43 (sequence is synthesized)
cagccaaggctggttaggctgagccaggatttgtcatcagctaaataggaggactctgccaaatcaatctgggcaagaagcaggatcctgagtctgggcaatgagagtcagagaacttaa

SEQ ID NO: 19699 - DNA, 120 bp, Artificial Sequence
  ENSG00000021776_44 (sequence is synthesized)
ctcctgtgtgcagggtagaattttcccatggcagaaattctgagttttctgccttatttttcttgggataaccagccacaaggagaccttcaggtaaaatgtggttcaaatatgggaagg

SEQ ID NO: 19700 - DNA, 120 bp, Artificial Sequence
  ENSG00000021776_45 (sequence is synthesized)
cagaggtacctgggaccttgctactcaagtatgatttgtgaaccaacagcatcaacatcgtattgaagtttgttatttatagaaatgcagaagtttgggctctgctccaaacctattaaa

SEQ ID NO: 19701 - DNA, 120 bp, Artificial Sequence
  ENSG00000021776_46 (sequence is synthesized)
tctaaatctacattgcaacaaagtccccaggtgattcacaggcactttgtagtttgagaagcactgtactaagattactgtgttgtcttcacatgaatgaggctataatgtagaattacc

SEQ ID NO: 19702 - DNA, 120 bp, Artificial Sequence
  ENSG00000021776_47 (sequence is synthesized)
agtgaatgtgactaatgttttctgacaagggacctctgcttacaaggtccctgggcatggtgcccagaactggaaaaaaaaaaaaaaaaaaggaaatgtttatatgtatgtgtagagggg

SEQ ID NO: 19703 - DNA, 120 bp, Artificial Sequence
  ENSG00000021776_48 (sequence is synthesized)
aaaattgcccactagttctctatttcccattttgatcatctgctagagtatctaaaggggaggggagcatttaccccagaatgtctcctctagtgcatccacctatgggcctggccatgt

SEQ ID NO: 19704 - DNA, 120 bp, Artificial Sequence
  ENSG00000021776_49 (sequence is synthesized)
ccaaggaatctttgaagaaacaagcaagaactgcacactaccattgaaatccttctggtcctgacattttgaaggaatgattgcttcatagggaaattaaacccagaaagtcaagtcagt

SEQ ID NO: 19705 - DNA, 120 bp, Artificial Sequence
  ENSG00000021776_50 (sequence is synthesized)
tatatttttgagtgactagtgtttgctcagctctaccaggctgtgttgaatatggtacagactctcattttatgatgtatcctactgcatcaggacatttgtgtcaatgtcaggtgatga

SEQ ID NO: 19706 - DNA, 120 bp, Artificial Sequence
  ENSG00000021776_51 (sequence is synthesized)
ggggaaatgaaagtgatgagacgatgagaggagtgaaataccaaggacgcgatactaggaaacccaggtctatttgttatcagagtaaggatcaagccagatagcctgttatgtaatttc

SEQ ID NO: 19707 - DNA, 120 bp, Artificial Sequence
  ENSG00000021776_52 (sequence is synthesized)
tccgataaaagattttgaaagcaggtgctgtgggcatctgtatggggaatcgcactcatagaattattttcatttgtaaatatttggtatcaggccaagcaagggaaagaagctttactg

SEQ ID NO: 19708 - DNA, 120 bp, Artificial Sequence
  ENSG00000021776_53 (sequence is synthesized)
tattaccatctttcctggaaaagattgatttttctctctcccttaggggatatgaggtatgatacctgcaaccaaaataagctggctgttaagtgctctctccttaactattgtccaagc

SEQ ID NO: 19709 - DNA, 120 bp, Artificial Sequence
  ENSG00000021776_54 (sequence is synthesized)
aatgtacatcactcttgcctagatgagtgaccatacttttttctttgctgcttggtttttctatcactaaaaagcaaatttaggtggaagatggatgggtaagtcctttgtccttgtcaa

SEQ ID NO: 19710 - DNA, 120 bp, Artificial Sequence
  ENSG00000021776_55 (sequence is synthesized)
aagaatttagaaagggtaaaggtggtgggatttgaattcttttaaacggtttattcattggaaaggcaagtgagtggcagttgactgtagaatcttgggaatttttgaaggaatttaaga

SEQ ID NO: 19711 - DNA, 120 bp, Artificial Sequence
  ENSG00000021776_56 (sequence is synthesized)
gctgtacttattttaaataatgaggaaacaatcagagagacttaaccagggtggcaactatggaagagtgggggtagaatccaagtctacagttctacggcactgctttgtttatttttt

SEQ ID NO: 19712 - DNA, 120 bp, Artificial Sequence
  ENSG00000021776_57 (sequence is synthesized)
caatcaagcacacatgagggattgcttaataaattcaagagttttctatatagtttgggattactacagacacaggtactctagccatgtgactatttcagattagtgttcccattgctc

SEQ ID NO: 19713 - DNA, 120 bp, Artificial Sequence
  ENSG00000021776_58 (sequence is synthesized)
tccatcctatttttcatatctaaatgtgtcatgattttagaatctctttgtaaagaaaaccaaaaagagccatgcccaaaagaatgagcatgaaatgaagcaattcaagtatttagaatt

SEQ ID NO: 19714 - DNA, 120 bp, Artificial Sequence
  ENSG00000021776_59 (sequence is synthesized)
tcttcttcttttttttttttttttttcaaaattctgagttaagaaagttcattgccaacagttgaggataaatagctctattgatttaggcaaatgaatgagaagatttaaacatcatca

SEQ ID NO: 19715 - DNA, 120 bp, Artificial Sequence
  ENSG00000021776_60 (sequence is synthesized)
agactcccaaagttggtgtaataaaagttgagatgttttgctagatgctgagagaaaaggcataaataggccatttgtgctcctgtaaacaaatgaaattttgtaatgatcaagagacag

SEQ ID NO: 19716 - DNA, 120 bp, Artificial Sequence
  ENSG00000021776_61 (sequence is synthesized)
caagatattataaaacacactttggactcatcgagacctggctcagagttgtacctaatttgcttatcagcatttggttagaccttagacaaattttataacctctctaagcccattttc

SEQ ID NO: 19717 - DNA, 120 bp, Artificial Sequence
  ENSG00000021776_62 (sequence is synthesized)
tttatctgtaaataaaggaaaaagatctgtttggatttgggacaggagagttgtctgttttatagggtaatgtttatgaaaataatttatcacctaggtacttagtaaataccagtttct

SEQ ID NO: 19718 - DNA, 120 bp, Artificial Sequence
  ENSG00000021776_63 (sequence is synthesized)
gtctctgtttttcttcaaagctttgttgacaatgtaggatattgccaactaatcctttgacttgagtgcttagccatgccccaatccaggcagcatgaagaatgatcaagaaggggacac

SEQ ID NO: 19719 - DNA, 120 bp, Artificial Sequence
  ENSG00000021776_64 (sequence is synthesized)
ctagtggcagttgacctttgaggatctatctaggatcaggttactgatttgggacctctgaatcagtacatcataacatcgagagtgatctctgccaaaattaaaattctgtcagaacag

SEQ ID NO: 19720 - DNA, 120 bp, Artificial Sequence
  ENSG00000021776_65 (sequence is synthesized)
tataagcagaaggaagacattaggtctttctgaaatatggagctgataacttctatcagttctgaattctgtactgtcccacccccaaatcatctatattgttgcatgtgcttagctttg

SEQ ID NO: 19721 - DNA, 120 bp, Artificial Sequence
  ENSG00000021776_66 (sequence is synthesized)
tgccttgaattgctatttcctttttatcttgcactcagatggtatttttagagatgtttcttcaatcaaaacaagataaagttaaaaaaaaaaaaaaaacagtgacccttttgcataagc

SEQ ID NO: 19722 - DNA, 120 bp, Artificial Sequence
  ENSG00000021776_67 (sequence is synthesized)
cagaagagcagtgccttgcttcctgtgaaaaatgcttggcagttagcctgtgtaattatttagcaatcatgttaatagatgtttaagaataatggaactggagctgtactgagccaagga

SEQ ID NO: 19723 - DNA, 120 bp, Artificial Sequence
  ENSG00000021776_68 (sequence is synthesized)
tggaaatgaagacatgtgagactattttttcttcatccaccgatactcttcagttacaaggatttaatttaaaagggttttaattaaatggaatccagaagctttggacgctccagtttt

SEQ ID NO: 19724 - DNA, 120 bp, Artificial Sequence
  ENSG00000021776_69 (sequence is synthesized)
tcttcttagagacaaaccctagctcagtttcctggagcttgactcagaatgcagcatggtactccggactgacagtgtgccagctttattcacttatctctctaccttttggcttgcgtt

SEQ ID NO: 19725 - DNA, 120 bp, Artificial Sequence
  ENSG00000021776_70 (sequence is synthesized)
tatttcagggctgcctgacattttgaccttatgtacaaagatggccgatacgattatttttcatcatatattacagaaaatactactcttgaaaaatactctgagaaatatgttctatgg

SEQ ID NO: 19726 - DNA, 120 bp, Artificial Sequence
  ENSG00000021776_71 (sequence is synthesized)
tcagataagtttgggaaacagtgaattattgttcctcctttgcagaatcacaatgcactgttagctaattaaagactctcagatgtcccactggaaagaatcatgtttagctttgtttaa

SEQ ID NO: 19727 - DNA, 120 bp, Artificial Sequence
  ENSG00000021776_72 (sequence is synthesized)
cctagcatttcccaaacttattagagcataaaactttgtttttgtttttttttaataagataggtagctatttccttagaacacagtttgggaaactttttgttcatttgttttaataag

SEQ ID NO: 19728 - DNA, 69 bp, Artificial Sequence
  ENSG00000021776_73 (sequence is synthesized)
acacagtttgggaaactttttgttcatttgttttaataagataccttaggtagctatttccttagaaca

SEQ ID NO: 19729 - DNA, 120 bp, Artificial Sequence
  ENSG00000021776_74 (sequence is synthesized)
gatggcgccactgtactccagcctgggcgacgagcaaaaactccttcaaaaaaaaaaaaaaaacataacttaggtagctatttccttgggaaccaatatctttacattggctagaactgt

SEQ ID NO: 19730 - DNA, 120 bp, Artificial Sequence
  ENSG00000021776_75 (sequence is synthesized)
tatctttacattggctagaactgtgaatcgccctttaaagataaagccccaaaatacattttttttccctacaggtaaccagagggtgaagtaacagccgaagaggaaaccagaagtgaa

SEQ ID NO: 19731 - DNA, 120 bp, Artificial Sequence
  ENSG00000021776_76 (sequence is synthesized)
gtgatttgtacaaaatgtcgtagtgtaatttattgagtgtcatgtggtattaatcgcaacatcctgaaaatgcaaatgaataaaagtttggtcaatgtaccatgacattccttcatgtga

SEQ ID NO: 19732 - DNA, 120 bp, Artificial Sequence
  ENSG00000021776_77 (sequence is synthesized)
gcctcctaagaaaaggtcactgagcattctctgtttacattttaattttagactccagaatttcacactaagtttttcttctcatttcttatgcagtaaaagaagagtttgtatttccaa

SEQ ID NO: 19733 - DNA, 120 bp, Artificial Sequence
  ENSG00000021776_78 (sequence is synthesized)
cccagtgccgagtagggccttgttaagaaaccgcttatcactaaatgatctgtcttccagctctacaatggcaagaatctgggacttactgtttatactgtttactttgcagttagcatg

SEQ ID NO: 19734 - DNA, 120 bp, Artificial Sequence
  ENSG00000021776_79 (sequence is synthesized)
taaagtacttcatagctttcatactgacccacataagccattacaaagtggcagaacttttactgatagtggtgcttttagagcagaactttacccagtaataaagcaaatattgagaaa

SEQ ID NO: 19735 - DNA, 120 bp, Artificial Sequence
  ENSG00000021776_80 (sequence is synthesized)
gaaaaaacataaagataatactaatgataaaattaggactttggctatgaacatggctatgtaaaagctcaccttttttggaaattatgcaaatgtaacaggaaaatgagaaaaagaggg

SEQ ID NO: 19736 - DNA, 120 bp, Artificial Sequence
  ENSG00000021776_81 (sequence is synthesized)
gacaaactatttttatagactatctgtgcagtagcagaagaaaagagggccttttgttatgaaaaccgtccagccttcagaaaacagccttgctcaccccatcttcatgtctcccacata

SEQ ID NO: 19737 - DNA, 120 bp, Artificial Sequence
  ENSG00000021776_82 (sequence is synthesized)
gctaatctaagaaacttacttattcagtgatgaatagtataaagggaactagcacaagctcaatttataggaaaaaatgaagaacagcaaaacatagataggatacatgctccagaaacc

SEQ ID NO: 19738 - DNA, 120 bp, Artificial Sequence
  ENSG00000021776_83 (sequence is synthesized)
atgttggcctggaaaagatgaaattttcaaatatacattttgctgtaaattgggaaatacttaatgaagtaaccatatctttgaggaaaagctacaaagcagagaaatgtaagaactcag

SEQ ID NO: 19739 - DNA, 120 bp, Artificial Sequence
  ENSG00000021776_84 (sequence is synthesized)
aaagagatgaaatgtaagctggaagaaaataaaatcagaggaatgaaaacaaaatcaaaaggaatacagggaagaatagacactgcacagaatacttcataaggaatagagtgaaactga

SEQ ID NO: 19740 - DNA, 120 bp, Artificial Sequence
  ENSG00000021776_85 (sequence is synthesized)
gaaactaataattttgcaagtttagaaatagaaggacctcaatatttgagtccttttacagaaaatcttactcaaataataaggaaagttactttctctcataacaagatggaaataggg

SEQ ID NO: 19741 - DNA, 120 bp, Artificial Sequence
  ENSG00000021776_86 (sequence is synthesized)
tggttccaaggttgggttacagggtagctcaacgatgttattctgccctgctaatgtcagcatgtgagcccagttctccacatggtcagagtggcaacagaattcccaggtataatatcc

SEQ ID NO: 19742 - DNA, 120 bp, Artificial Sequence
  ENSG00000021776_87 (sequence is synthesized)
acacataacaacaaaggacgtatatccagaatatatgaactcctataaaagttattactaaataaggcagaccaatacaaaatgggcaaatgacttgaacagacacttcacataaggaag

SEQ ID NO: 19743 - DNA, 120 bp, Artificial Sequence
  ENSG00000021776_88 (sequence is synthesized)
acctacaggtagccaatacgtcatgaaaaagtgcttaccatcattagttgtcaaggaaatagaaattaaagctacaatgatataccactacctacccaaaagaatgggtaaaatgatgaa

SEQ ID NO: 19744 - DNA, 120 bp, Artificial Sequence
  ENSG00000021776_89 (sequence is synthesized)
gattgacattatgacaaatgttggcaaggatgtacaacaactgaaactctagaactggggttctagagtttacacattgctggggaatgtgtaaagtgggataacaattttggaaaagtt

SEQ ID NO: 19745 - DNA, 120 bp, Artificial Sequence
  ENSG00000021776_90 (sequence is synthesized)
tgacagtttcttataaagtatgcacttactgtacagctcagcaatttcactcctgcatatttattcaagagcaatgaaaacatgtccacaaaaatatttgtacatgaatatttattgcag

SEQ ID NO: 19746 - DNA, 120 bp, Artificial Sequence
  ENSG00000021776_91 (sequence is synthesized)
ctttatgcaagatagcttcaaactagaaacaggccaacttttcatgaaaaggtgagtggacaaaactgtggtatatttgttcagtgaaagaatactcaaaaaggtatgaatttctcatgt

SEQ ID NO: 19747 - DNA, 120 bp, Artificial Sequence
  ENSG00000021776_92 (sequence is synthesized)
acacatacatgaatatatctcagaaacatgctgattgaaagaaacaggacacaaaagaatatatccttttgatgctatttttatgtaattctagaactggcaaaaaataatctgtagtga

SEQ ID NO: 19748 - DNA, 120 bp, Artificial Sequence
  ENSG00000021776_93 (sequence is synthesized)
cagaaagtaaatcagtggttgcctggggctgggggatgcagatttgaccaaaatggggcctgagatgatggacatttttattgtggtggtggtcacatgggaaaatgtattgtcaaaatt

SEQ ID NO: 19749 - DNA, 120 bp, Artificial Sequence
  ENSG00000021776_94 (sequence is synthesized)
catcaaattgtacacttgaacacattttattgtgtataaactatacctccatgtagttgacttaaaaagtgttttgtaaacttcctaaagatagagagactataaattacagtatctgca

SEQ ID NO: 19750 - DNA, 120 bp, Artificial Sequence
  ENSG00000021776_95 (sequence is synthesized)
ataaactttttgtcaaattgatgaaaagataaatgtctgagttgccagtattagtgactgaaacctttctgaacttccctatttgtacatacactttttttctttctttcttcttctttt

SEQ ID NO: 19751 - DNA, 67 bp, Artificial Sequence
  ENSG00000021776_96 (sequence is synthesized)
tcttcttcttttttttttaaacagggccttactctgttacccaggccggagtgtagtgtacatagcc

SEQ ID NO: 19752 - DNA, 120 bp, Artificial Sequence
  ENSG00000021776_97 (sequence is synthesized)
agctaatttttgtataatttgtagagatgggatttcaccgcattgcccaggctggtctttaactcctgggctcaagcgatctgcccatgttggcctcccatgtacatatattttcaaact

SEQ ID NO: 19753 - DNA, 120 bp, Artificial Sequence
  ENSG00000021776_98 (sequence is synthesized)
gaacagaaagtgcaatgaagattatttgtttttttctttgatggaggaatgctgtagacatttactagtgatacgttaagtaataaataagcatactaagttatattgctgagcatcaaa

SEQ ID NO: 19754 - DNA, 120 bp, Artificial Sequence
  ENSG00000021776_99 (sequence is synthesized)
ctgggataccagttaataagctagacatagtctctgctttcatgaagttttgcaatctaatgggggaagactgttaattccaaaaatagttatttagttatcagcaaaggtaaagacaag

SEQ ID NO: 19755 - DNA, 120 bp, Artificial Sequence
  ENSG00000021776_100 (sequence is synthesized)
tgctgtaagtgttaataacataaggatgtagtttgatctgattagtatggtttctttaataatgttcattaacttgttcttggaattccaagcctatgattatgtttcttttgggattga

SEQ ID NO: 19756 - DNA, 120 bp, Artificial Sequence
  ENSG00000021776_101 (sequence is synthesized)
ttaaggataagatgtttgttcctagcacattatttaaatgatctctagtgtcttttggcttttgcaaatgcaccatattttccattttttatttctaggtgacaactgttgatagatttc

SEQ ID NO: 19757 - DNA, 120 bp, Artificial Sequence
  ENSG00000021776_102 (sequence is synthesized)
cttaacttttacttggtttattagtcacgtaacattgattaacttctattaagtttttaagaagcttaactttttattgccagggcttaacaggactatctaatgaaatctgtgaaaaaa

SEQ ID NO: 19758 - DNA, 120 bp, Artificial Sequence
  ENSG00000021776_103 (sequence is synthesized)
cagagcaaggtaaaagagacaggaaaaaaaatcattcccatttaaggacatttgttccatgatccaagtatttgtgaatagcttttgtgtagactattagcattcttggctatccaggaa

SEQ ID NO: 19759 - DNA, 120 bp, Artificial Sequence
  ENSG00000021776_104 (sequence is synthesized)
cttggctatccataaatccaaaagcacttttgtcgacttctgcaagagatgtgaatggaccaaataatttatttccttcatttcattcattaatattaatttaagtaacttataatctaa

SEQ ID NO: 19760 - DNA, 120 bp, Artificial Sequence
  ENSG00000021776_105 (sequence is synthesized)
aggcttcttttcattgtcccttctcctttcttcatgtccccaaaagatatacagttaatataattttaaaatctaaaaataaagtgaacaagaggagaacacaccaattcttacttcata

SEQ ID NO: 19761 - DNA, 120 bp, Artificial Sequence
  ENSG00000021776_106 (sequence is synthesized)
aaggatgcaggccccatctcatagttacccccaaatgtcctcaatttttagtcttccttgattttttaatttaagggataaagatagcattgacctcagagagcgtaatagaactctcat

SEQ ID NO: 19762 - DNA, 120 bp, Artificial Sequence
  ENSG00000021776_107 (sequence is synthesized)
ttttgtagtaccttcagtcttctgacccttggttacttgaagtagggaagctaaggttgaaagagcattattgcttaaaagatgagccaaaatggctaacatgaaaatttaaaagaagca

SEQ ID NO: 19763 - DNA, 120 bp, Artificial Sequence
  ENSG00000021776_108 (sequence is synthesized)
cagaaacagaaacctccttatgtatattaaaagagattttacactgctaatattttctgtttgtgggggaatttgtctttggaaagcttgtgcaacctctacaactggcgatacaagaat

SEQ ID NO: 19764 - DNA, 120 bp, Artificial Sequence
  ENSG00000021826_0 (sequence is synthesized)
aaagatcgctgtgcagtcagccttaaacactgactgcacccctcccagatttcttttacattaactaaaaagtcttatcacacaatctcataaaatttatgtaatttcatttaattttag

SEQ ID NO: 19765 - DNA, 120 bp, Artificial Sequence
  ENSG00000021826_1 (sequence is synthesized)
ccacaaatcatcaaaatgacgaggattttgacagctttcaaagtggtgaggacactgaagactggttttggctttaccaatgtgactgcacaccaaaaatggaaattttcaagacctggc

SEQ ID NO: 19766 - DNA, 120 bp, Artificial Sequence
  ENSG00000021826_2 (sequence is synthesized)
atcaggctcctttctgtcaaggcacagacagcacacattgtcctggaagatggaactaagatgaaaggttactcctttggccatccatcctctgttgctggtgaagtggtttttaatact

SEQ ID NO: 19767 - DNA, 120 bp, Artificial Sequence
  ENSG00000021826_3 (sequence is synthesized)
ggcctgggagggtacccagaagctattactgaccctgcctacaaaggacagattctcacaatggccaaccctattattgggaatggtggagctcctgatactactgctctggatgaactg

SEQ ID NO: 19768 - DNA, 120 bp, Artificial Sequence
  ENSG00000021826_4 (sequence is synthesized)
ggacttagcaaatatttggagtctaatggaatcaaggtttcaggtttgctggtgctggattatagtaaagactacaaccactggctggctaccaagagtttagggcaatggctacaggaa

SEQ ID NO: 19769 - DNA, 120 bp, Artificial Sequence
  ENSG00000021826_5 (sequence is synthesized)
gaaaaggttcctgcaatttatggagtggacacaagaatgctgactaaaataattcgggataagggtaccatgcttgggaagattgaatttgaaggtcagcctgtggattttgtggatcca

SEQ ID NO: 19770 - DNA, 120 bp, Artificial Sequence
  ENSG00000021826_6 (sequence is synthesized)
aataaacagaatttgattgctgaggtttcaaccaaggatgtcaaagtgtacggcaaaggaaaccccacaaaagtggtagctgtagactgtgggattaaaaacaatgtaatccgcctgcta

SEQ ID NO: 19771 - DNA, 120 bp, Artificial Sequence
  ENSG00000021826_7 (sequence is synthesized)
gtaaagcgaggagctgaagtgcacttagttccctggaaccatgatttcaccaagatggagtatgatgggattttgatcgcgggaggaccggggaacccagctcttgcagaaccactaatt

SEQ ID NO: 19772 - DNA, 120 bp, Artificial Sequence
  ENSG00000021826_8 (sequence is synthesized)
cagaatgtcagaaagattttggagagtgatcgcaaggagccattgtttggaatcagtacaggaaacttaataacaggattggctgctggtgccaaaacctacaagatgtccatggccaac

SEQ ID NO: 19773 - DNA, 120 bp, Artificial Sequence
  ENSG00000021826_9 (sequence is synthesized)
agagggcagaatcagcctgttttgaatatcacaaacaaacaggctttcattactgctcagaatcatggctatgccttggacaacaccctccctgctggctggaaaccactttttgtgaat

SEQ ID NO: 19774 - DNA, 120 bp, Artificial Sequence
  ENSG00000021826_10 (sequence is synthesized)
gtcaacgatcaaacaaatgaggggattatgcatgagagcaaacccttcttcgctgtgcagttccacccagaggtcaccccggggccaatagacactgagtacctgtttgattcctttttc

SEQ ID NO: 19775 - DNA, 120 bp, Artificial Sequence
  ENSG00000021826_11 (sequence is synthesized)
tcactgataaagaaaggaaaagctaccaccattacatcagtcttaccgaagccagcactagttgcatctcgggttgaggtttccaaagtccttattctaggatcaggaggtctgtccatt

SEQ ID NO: 19776 - DNA, 120 bp, Artificial Sequence
  ENSG00000021826_12 (sequence is synthesized)
ggtcaggctggagaatttgattactcaggatctcaagctgtaaaagccatgaaggaagaaaatgtcaaaactgttctgatgaacccaaacattgcatcagtccagaccaatgaggtgggc

SEQ ID NO: 19777 - DNA, 120 bp, Artificial Sequence
  ENSG00000021826_13 (sequence is synthesized)
ttaaagcaagcggatactgtctactttcttcccatcacccctcagtttgtcacagaggtcatcaaggcagaacagccagatgggttaattctgggcatgggtggccagacagctctgaac

SEQ ID NO: 19778 - DNA, 120 bp, Artificial Sequence
  ENSG00000021826_14 (sequence is synthesized)
tgtggagtggaactattcaagagaggtgtgctcaaggaatatggtgtgaaagtcctgggaacttcagttgagtccattatggctacggaagacaggcagctgttttcagataaactaaat

SEQ ID NO: 19779 - DNA, 120 bp, Artificial Sequence
  ENSG00000021826_15 (sequence is synthesized)
gagatcaatgaaaagattgctccaagttttgcagtggaatcgattgaggatgcactgaaggcagcagacaccattggctacccagtgatgatccgttccgcctatgcactgggtgggtta

SEQ ID NO: 19780 - DNA, 120 bp, Artificial Sequence
  ENSG00000021826_16 (sequence is synthesized)
ggctcaggcatctgtcccaacagagagactttgatggacctcagcacaaaggcctttgctatgaccaaccaaattctggtggagaagtcagtgacaggttggaaagaaatagaatatgaa

SEQ ID NO: 19781 - DNA, 120 bp, Artificial Sequence
  ENSG00000021826_17 (sequence is synthesized)
gtggttcgagatgctgatgacaattgtgtcactgtctgtaacatggaaaatgttgatgccatgggtgttcacacaggtgactcagttgttgtggctcctgcccagacactctccaatgcc

SEQ ID NO: 19782 - DNA, 120 bp, Artificial Sequence
  ENSG00000021826_18 (sequence is synthesized)
gagtttcagatgttgagacgtacttcaatcaatgttgttcgccacttgggcattgtgggtgaatgcaacattcagtttgcccttcatcctacctcaatggaatactgcatcattgaagtg

SEQ ID NO: 19783 - DNA, 120 bp, Artificial Sequence
  ENSG00000021826_19 (sequence is synthesized)
aatgccagactgtcccgaagctctgctctggcctcaaaagccactggctacccattggcattcattgctgcaaagattgccctaggaatcccacttccagaaattaagaacgtcgtatcc

SEQ ID NO: 19784 - DNA, 120 bp, Artificial Sequence
  ENSG00000021826_20 (sequence is synthesized)
gggaagacatcagcctgttttgaacctagcctggattacatggtcaccaagattccccgctgggatcttgaccgttttcatggaacatctagccgaattggtagctctatgaaaagtgta

SEQ ID NO: 19785 - DNA, 120 bp, Artificial Sequence
  ENSG00000021826_21 (sequence is synthesized)
ggagaggtcatggctattggtcgtacctttgaggagagtttccagaaagctttacggatgtgccacccatctatagaaggtttcactccccgtctcccaatgaacaaagaatggccatct

SEQ ID NO: 19786 - DNA, 120 bp, Artificial Sequence
  ENSG00000021826_22 (sequence is synthesized)
aatttagatcttagaaaagagttgtctgaaccaagcagcacgcgtatctatgccattgccaaggccattgatgacaacatgtcccttgatgagattgagaagctcacatacattgacaag

SEQ ID NO: 19787 - DNA, 120 bp, Artificial Sequence
  ENSG00000021826_23 (sequence is synthesized)
tggtttttgtataagatgcgtgatattttaaacatggaaaagacactgaaaggcctcaacagtgagtccatgacagaagaaaccctgaaaagggcaaaggagattgggttctcagataag

SEQ ID NO: 19788 - DNA, 120 bp, Artificial Sequence
  ENSG00000021826_24 (sequence is synthesized)
cagatttcaaaatgccttgggctcactgaggcccagacaagggagctgaggttaaagaaaaacatccacccttgggttaaacagattgatacactggctgcagaatacccatcagtaaca

SEQ ID NO: 19789 - DNA, 120 bp, Artificial Sequence
  ENSG00000021826_25 (sequence is synthesized)
aactatctctatgttacctacaatggtcaggagcatgatgtcaattttgatgaccatggaatgatggtgctaggctgtggtccatatcacattggcagcagtgtggaatttgattggtgt

SEQ ID NO: 19790 - DNA, 120 bp, Artificial Sequence
  ENSG00000021826_26 (sequence is synthesized)
gctgtctctagtatccgcacactgcgtcaacttggcaagaagacggtggtggtgaattgcaatcctgagactgtgagcacagactttgatgagtgtgacaaactgtactttgaagagttg

SEQ ID NO: 19791 - DNA, 120 bp, Artificial Sequence
  ENSG00000021826_27 (sequence is synthesized)
tccttggagagaatcctagacatctaccatcaggaggcatgtggtggctgcatcatatcagttggaggccagattccaaacaacctggcagttcctctatacaagaatggtgtcaagatc

SEQ ID NO: 19792 - DNA, 120 bp, Artificial Sequence
  ENSG00000021826_28 (sequence is synthesized)
atgggcacaagccccctgcagatcgacagggctgaggatcgctccatcttctcagctgtcttggatgagctgaaggtggctcaggcaccttggaaagctgttaatactttgaatgaagca

SEQ ID NO: 19793 - DNA, 120 bp, Artificial Sequence
  ENSG00000021826_29 (sequence is synthesized)
ctggaatttgcaaagtctgtggactacccctgcttgttgaggccttcctatgttttgagtgggtctgctatgaatgtggtattctctgaggatgagatgaaaaaattcctagaagaggcg

SEQ ID NO: 19794 - DNA, 120 bp, Artificial Sequence
  ENSG00000021826_30 (sequence is synthesized)
actagagtttctcaggagcacccagtggtgctgacaaaatttgttgaaggggcccgagaagtagaaatggacgctgttggcaaagatggaagggttatctctcatgccatctctgaacat

SEQ ID NO: 19795 - DNA, 120 bp, Artificial Sequence
  ENSG00000021826_31 (sequence is synthesized)
gttgaagatgcaggtgtccactcgggagatgccactctgatgctgcccacacaaaccatcagccaaggggccattgaaaaggtgaaggatgctacccggaagattgcaaaggcttttgcc

SEQ ID NO: 19796 - DNA, 120 bp, Artificial Sequence
  ENSG00000021826_32 (sequence is synthesized)
atctctggtccattcaacgtccaatttcttgtcaaaggaaatgatgtcttggtgattgagtgtaacttgagagcttctcgatccttcccctttgtttccaagactcttggggttgacttc

SEQ ID NO: 19797 - DNA, 120 bp, Artificial Sequence
  ENSG00000021826_33 (sequence is synthesized)
attgatgtggccaccaaggtgatgattggagagaatgttgatgagaaacatcttccaacattggaccatcccataattcctgctgactatgttgcaattaaggctcccatgttttcctgg

SEQ ID NO: 19798 - DNA, 120 bp, Artificial Sequence
  ENSG00000021826_34 (sequence is synthesized)
ccccggttgagggatgctgaccccattctgagatgtgagatggcttccactggagaggtggcttgctttggtgaaggtattcatacagccttcctaaaggcaatgctttccacaggattt

SEQ ID NO: 19799 - DNA, 120 bp, Artificial Sequence
  ENSG00000021826_35 (sequence is synthesized)
aagataccccagaaaggcatcctgataggcatccagcaatcattccggccaagattccttggtgtggctgaacaattacacaatgaaggtttcaagctgtttgccacggaagccacatca

SEQ ID NO: 19800 - DNA, 120 bp, Artificial Sequence
  ENSG00000021826_36 (sequence is synthesized)
gactggctcaacgccaacaatgtccctgccaccccagtggcatggccgtctcaagaaggacagaatcccagcctctcttccatcagaaaattgattagagatggcagcattgacctagtg

SEQ ID NO: 19801 - DNA, 120 bp, Artificial Sequence
  ENSG00000021826_37 (sequence is synthesized)
attaaccttcccaacaacaacactaaatttgtccatgataattatgtgattcggaggacagctgttgatagtggaatccctctcctcactaattttcaggtgaccaaactttttgctgaa

SEQ ID NO: 19802 - DNA, 120 bp, Artificial Sequence
  ENSG00000021826_38 (sequence is synthesized)
gctgtgcagaaatctcgcaaggtggactccaagagtcttttccactacaggcagtacagtgctggaaaagcagcatagagatgcagacaccccagccccattattaaatcaacctgagcc

SEQ ID NO: 19803 - DNA, 120 bp, Artificial Sequence
  ENSG00000021826_39 (sequence is synthesized)
acatgttatctaaaggaactgattcacaactttctcagagatgaatattgataactaaacttcatttcagtttactttgttatgccttaatattctgtgtcttttgcaattaaattgtca

SEQ ID NO: 19804 - DNA, 120 bp, Artificial Sequence
  ENSG00000021826_40 (sequence is synthesized)
gtcacttcttcaaaaccttacagtccttcctaagttactcttcatgagatttcatccatttactaatactgtatttttggtggactaggcttgcctatgtgcttatgtgtagctttttac

SEQ ID NO: 19805 - DNA, 120 bp, Artificial Sequence
  ENSG00000021826_41 (sequence is synthesized)
tttttatggtgctgattaatggtgatcaaggtaggaaaagttgctgttctattttctgaactctttctatactttaagatactctatttttaaaacactatctgcaaactcaggacactt

SEQ ID NO: 19806 - DNA, 120 bp, Artificial Sequence
  ENSG00000021826_42 (sequence is synthesized)
taacagggcagaatactctaaaaacttgataaaattaaatatagatttaatttatgaaccttccatcatgatgtttgtgtattgcttctttttggatcctcattctcacccatttggcta

SEQ ID NO: 19807 - DNA, 120 bp, Artificial Sequence
  ENSG00000021826_43 (sequence is synthesized)
cattctcacccatttggctaatccaggaatattgttatcccttcccattatattgaagttgagaaatgtgacagaggcatttagagtatggacttttcttttctttttctttttcttttt

SEQ ID NO: 19808 - DNA, 120 bp, Artificial Sequence
  ENSG00000021826_44 (sequence is synthesized)
agtggcacaatctcggctcactgcaatttccgtctcccaagttcaagcgattctcctgctttagactatggatttctttaaggaatactggtttgcagttttgttttctggactatatca

SEQ ID NO: 19809 - DNA, 120 bp, Artificial Sequence
  ENSG00000021826_45 (sequence is synthesized)
ttgttttctggactatatcagcagatggtagacagtgtttatgtagatgtgttgttgtttttatcattggattttaacttggcccgagtgaaataatcagatttttgtcattcacactct

SEQ ID NO: 19810 - DNA, 120 bp, Artificial Sequence
  ENSG00000021826_46 (sequence is synthesized)
cccccagttttggaataacttggaagtaaggttcattcccttaagacgatggattctgttgaactatggggtcccacactgcactattaattccacccactgtaagggcaaggacaccat

SEQ ID NO: 19811 - DNA, 120 bp, Artificial Sequence
  ENSG00000021826_47 (sequence is synthesized)
tccttctacatataagaaaaaagtctctccccaagggcagcctttgttacttttaaatattttctgttattacaagtgctctaattgtgaacttttaaataaaatactattaagaggtaa

SEQ ID NO: 19812 - DNA, 120 bp, Artificial Sequence
  ENSG00000021826_48 (sequence is synthesized)
acagctgtaatttctttttgtagagaggctgttttatgtgtcacaagtgttcaatacatgtttgatagaagtttataatgtgcctatggaagccaacacccagaccagaaggtagagtgg

SEQ ID NO: 19813 - DNA, 120 bp, Artificial Sequence
  ENSG00000021826_49 (sequence is synthesized)
tttcctggctgggaactgtcgatactgtcatgttggatatttatcttttccacctgggggacaacactgaaacagctccataatgaggttctgcctggtgtctgcaggtcttagaggact

SEQ ID NO: 19814 - DNA, 120 bp, Artificial Sequence
  ENSG00000021826_50 (sequence is synthesized)
tgctgacttattttactttaaaatggcaaagaaaaaaattacattctagtactcctcccttaatgtttttcgtggtgattttagccaaggttaatgcaatcttgacttcatattacacaa

SEQ ID NO: 19815 - DNA, 120 bp, Artificial Sequence
  ENSG00000021826_51 (sequence is synthesized)
tgagtgaacgatagtcttcctatcccctattcccccctttctcaagcttaagtatgcatcaaaatcacctggagggtttgtaaaacaacaaattgctaggatccactcccagagttcctg

SEQ ID NO: 19816 - DNA, 120 bp, Artificial Sequence
  ENSG00000021826_52 (sequence is synthesized)
attcaatagatctggggtggggttcaaattttcatatttttaataaattcccaggtaatgctgatgctgctctgccagggaccacagtttgagaaccactctacttgagcgatggtactt

SEQ ID NO: 19817 - DNA, 120 bp, Artificial Sequence
  ENSG00000021826_53 (sequence is synthesized)
tagaaacctggttaaaagttatgttagcacttattattgtcaaacatattatcagggaatttttgctaggggaaagtataaaagattgaggaaagttgagtgcatgattaatgtatcaat

SEQ ID NO: 19818 - DNA, 120 bp, Artificial Sequence
  ENSG00000021826_54 (sequence is synthesized)
tagcaagtgttggagatcattatgctgagccttctaatgtgatttggtacttactgaagtctattctgtgtttagcagagggtcacaatgtaatgttccatattaggggtatttaacaac

SEQ ID NO: 19819 - DNA, 120 bp, Artificial Sequence
  ENSG00000021826_55 (sequence is synthesized)
atttggaagttcattttggacatttcatatatatttgttatataccaaggaatcttaaaacatgaaaaaaaatttatatgccatcaaatttagccctttgccttttctgaggagaatgaa

SEQ ID NO: 19820 - DNA, 120 bp, Artificial Sequence
  ENSG00000021826_56 (sequence is synthesized)
acttgaattgtcttattcttctgtctaaccaattgtcctgatgtcactaagagttattctctaattttttacttgtttttttcttttacgtctaaccatgagcttcttgcatctaagctc

SEQ ID NO: 19821 - DNA, 120 bp, Artificial Sequence
  ENSG00000021826_57 (sequence is synthesized)
atttctttctgtttggtcctaagtggaaatgaaaagctactttcctgggcatggttaaaattcatgttctataaggcagtcatgaataaccactgagcctgcctcagctgaaattcatcc

SEQ ID NO: 19822 - DNA, 120 bp, Artificial Sequence
  ENSG00000021826_58 (sequence is synthesized)
agttacatttatctattctatttaccaatagtttcctcttataaaactgcagttctgggattgagggggccagaatctgaaagaattttatatttgaacatagtctttggggtcttttct

SEQ ID NO: 19823 - DNA, 120 bp, Artificial Sequence
  ENSG00000021826_59 (sequence is synthesized)
taggatttagatctgtgctcagaaatactctgcaagtaaatattagggggtgttatgggctaaacattatcaaaattgtgcaaggatcacatgtgttttattgtcacagttcctagtttc

SEQ ID NO: 19824 - DNA, 120 bp, Artificial Sequence
  ENSG00000021826_60 (sequence is synthesized)
tgactctgaaataagatcatttgattttttccagccatcactaatatggtttataaacaggttacaagacatttgctgaagtaactagctcatgtcatctgtttaaaacctttttacaag

SEQ ID NO: 19825 - DNA, 120 bp, Artificial Sequence
  ENSG00000021826_61 (sequence is synthesized)
ggaaaccaacaagaatgttcctatttaaagaagaatggatatgtttttaacagtgtgtgattttaaatacgccagctcagttactcagacactcatgttaatgaagtcaaggtcagggtt

SEQ ID NO: 19826 - DNA, 120 bp, Artificial Sequence
  ENSG00000021826_62 (sequence is synthesized)
tgatctttgggtaggtcacctagtgttgttttctttcattctgaccactatcttgcaaacactagctcttgatcacaggaagtatgttcagaaatagggaactcctgatggcaatggtca

SEQ ID NO: 19827 - DNA, 120 bp, Artificial Sequence
  ENSG00000021826_63 (sequence is synthesized)
ggaatccagggaaggtaggggctggacactagacaggtccacctggggtcctaggaaagacacagcaatggactacaggaaaatatctgaacagtgagatggagcattagggaagcctgt

SEQ ID NO: 19828 - DNA, 120 bp, Artificial Sequence
  ENSG00000021826_64 (sequence is synthesized)
gtggaaatgaaatgcgtataaatgagggggcagtcagtttgggttgtaagtgtaatcgtgggtagaggaacccatgcttggaaactaggatgtaagggcaggaatctagtttttaggggg

SEQ ID NO: 19829 - DNA, 120 bp, Artificial Sequence
  ENSG00000021826_65 (sequence is synthesized)
gggggctgaaaaaacaattattgtaattataataatatttattaagaactattaataggcaagtaactgtgctaaattatagtagtaacacttaagtagtgcttacttctaaattagttt

SEQ ID NO: 19830 - DNA, 120 bp, Artificial Sequence
  ENSG00000021826_66 (sequence is synthesized)
aacactcatactaatgtaagaactgttactattcctgttcaacagatgaggaaactgcatcttagagttgttaagtaagatattcaaggtaacacagtttaataaggtgtggagcctcaa

SEQ ID NO: 19831 - DNA, 120 bp, Artificial Sequence
  ENSG00000021826_67 (sequence is synthesized)
aaaaaaaagttgaaatactactattgtcatcactgtttttgagtgaagaaatgaaggcaaagacattaactttttgaagctcataccactagtgaatggtgaaagccaggatttgaaatg

SEQ ID NO: 19832 - DNA, 120 bp, Artificial Sequence
  ENSG00000021826_68 (sequence is synthesized)
ctttagagctcattctttagctacaactttttattgcctcagagtaaatgaaaaaagagttccaaagattgagttattgcagggactagtgcataagctactaggaaaatggcctagtta

SEQ ID NO: 19833 - DNA, 85 bp, Artificial Sequence
  ENSG00000021826_69 (sequence is synthesized)
agggactagtgcataagctactaggaaaatggcctagttattgaagagcagtacaaaattagaacttagaaataagagcaagttg

SEQ ID NO: 19834 - DNA, 61 bp, Artificial Sequence
  ENSG00000021826_70 (sequence is synthesized)
caggagaatcgcttgaacccagaaggccccatctcaaaaaaaaaaaccaaaaaaaaaaaaa

SEQ ID NO: 19835 - DNA, 120 bp, Artificial Sequence
  ENSG00000021826_71 (sequence is synthesized)
gagcaggttgaataggcaaaacagctagcctgactcggtactggctcctaacccgcatatcttttaagtcctccctgaccaggaaaaggatccttgtagaaccgaagtggatctgaactt

SEQ ID NO: 19836 - DNA, 120 bp, Artificial Sequence
  ENSG00000021826_72 (sequence is synthesized)
acaaagaccaagtagattaaatagagaataaaaggagataagaacaaggtgaaaagcagggatcaagattatgtggatggaatttcattgacattgggatatagctaaaactcacactca

SEQ ID NO: 19837 - DNA, 120 bp, Artificial Sequence
  ENSG00000021826_73 (sequence is synthesized)
ccatagaaggataaaaggataaaacttgtcattttttaatataaagcatccggcaacatgtaacattgtcttttaagatgttgtaaggaaataccatattgcataaatgaagagcatgta

SEQ ID NO: 19838 - DNA, 120 bp, Artificial Sequence
  ENSG00000021826_74 (sequence is synthesized)
gagaataaacagcagcaggagaaggaggggaagggtgttggaggggagagagggcatgcatgcacatacatagatgattcagacggcttcagaaaagaaccacaaggaatgcttagagga

SEQ ID NO: 19839 - DNA, 120 bp, Artificial Sequence
  ENSG00000021826_75 (sequence is synthesized)
gttttgtatttaatctaaatatttttacttttttgtgtgtgagctcttagttcattgttcaaacccatctttccaaataaattcttctggtgatatccagaaaaatctgaagtctattgt

SEQ ID NO: 19840 - DNA, 120 bp, Artificial Sequence
  ENSG00000021826_76 (sequence is synthesized)
tctgtgcaggggagaatggagacggggtttgagagttcagtgctgaccaggatttatgccagggtattttgccaaatatccttgttgaagccagtgctttttcttactctttgatatctt

SEQ ID NO: 19841 - DNA, 120 bp, Artificial Sequence
  ENSG00000021826_77 (sequence is synthesized)
gctcttttaaaatagttgctttcttaggaaatgtagttgctttcttaacctcatcaaattcatgaagatttagccgaggcccatgctacccattatcttctaaatggccttcagaaatga

SEQ ID NO: 19842 - DNA, 120 bp, Artificial Sequence
  ENSG00000021826_78 (sequence is synthesized)
aatgccatgcatgtcagaagggggacctagtttagtctcaggatttaccaagccaggtaagcctgctccctctcaggataattaatgcaacaattacatattttaaaagaagggcattga

SEQ ID NO: 19843 - DNA, 120 bp, Artificial Sequence
  ENSG00000021826_79 (sequence is synthesized)
tggagaaactgacacgttatgagtatttcctgccctacatggattttgaacttgaattcccagcctcgcttgcatctagacacaggcacgtgacccaagccccaccagtcagacaaaccc

SEQ ID NO: 19844 - DNA, 120 bp, Artificial Sequence
  ENSG00000021826_80 (sequence is synthesized)
gcccagccgaacctatcatcttaaataagctttgaggaggtcccattagtctttagtaccatgtaatttcagggcctgtacctcccagcaggtgaaggatgctacccggaagattgcaaa

SEQ ID NO: 19845 - DNA, 120 bp, Artificial Sequence
  ENSG00000021826_81 (sequence is synthesized)
ttgttcttttcctattattttgtgtgtatttattgcatattattttgttaatagaaacctaatagtgccctccattataattattaatgtagatatatagctgtctgtgaagagaaatta

SEQ ID NO: 19846 - DNA, 120 bp, Artificial Sequence
  ENSG00000021826_82 (sequence is synthesized)
aagacatccaaatttaaggtactgtgccttttagaaagttttcaaaaactaagatatgctctttagcacactatacgattatgctttttaattcaggtgaaggatgctacccggaagatt

SEQ ID NO: 19847 - DNA, 120 bp, Artificial Sequence
  ENSG00000021852_0 (sequence is synthesized)
ggcactcacagcacaggcttgttatgggtctagcagcctctgtggcatctcctgtcacattgggaaaatgaagaattccaggacatgggcttggagggcgccggtggagctatttcttct

SEQ ID NO: 19848 - DNA, 120 bp, Artificial Sequence
  ENSG00000021852_1 (sequence is synthesized)
ctgtgctgccctgggctgtctcagtttgcctggctccagaggtgaaaggccacattcctttgggtcaaatgcagtcaacaagagctttgctaagagcagacagatgcggagtgtggatgt

SEQ ID NO: 19849 - DNA, 120 bp, Artificial Sequence
  ENSG00000021852_2 (sequence is synthesized)
taccctgatgcccattgattgtgagctgtctagttggtcctcttggaccacatgtgacccctgtcagaagaaaaggtacaggtatgcctacttgctccagccctctcagttccatgggga

SEQ ID NO: 19850 - DNA, 120 bp, Artificial Sequence
  ENSG00000021852_3 (sequence is synthesized)
accgtgcaacttctctgacaaggaagtcgaagactgtgttaccaacagaccatgcggaagtcaagtgcgatgtgaaggctttgtgtgtgcacagacaggaaggtgtgtaaaccgcagact

SEQ ID NO: 19851 - DNA, 120 bp, Artificial Sequence
  ENSG00000021852_4 (sequence is synthesized)
tctttgcaatggggacaatgactgtggagaccagtcagatgaagcaaactgtagaaggatttataaaaaatgtcagcatgaaatggaccaatactggggaattggcagtctggccagtgg

SEQ ID NO: 19852 - DNA, 120 bp, Artificial Sequence
  ENSG00000021852_5 (sequence is synthesized)
gataaatttgttcacaaacagttttgagggcccagttcttgatcacaggtattatgcaggtggatgctccccgcattacatcctgaacacgaggtttaggaagccctacaatgtggaaag

SEQ ID NO: 19853 - DNA, 120 bp, Artificial Sequence
  ENSG00000021852_6 (sequence is synthesized)
ctacacgccacagacccaaggcaaatacgaattcatattaaaagagtatgaatcatactcagattttgaacgcaatgtcacagagaaaatggcaagcaagtctggtttcagttttggttt

SEQ ID NO: 19854 - DNA, 120 bp, Artificial Sequence
  ENSG00000021852_7 (sequence is synthesized)
taaaatacctggaatatttgaacttggcatcagtagtcaaagtgatcgaggcaaacactatattaggagaaccaaacgattctctcatactaaaagcgtatttctgcatgcacgctctga

SEQ ID NO: 19855 - DNA, 120 bp, Artificial Sequence
  ENSG00000021852_8 (sequence is synthesized)
ccttgaagtagcacattacaagctgaaacccagaagcctcatgctccattacgagttccttcagagagttaagcggctgcccctggagtacagctacggggaatacagagatctcttccg

SEQ ID NO: 19856 - DNA, 120 bp, Artificial Sequence
  ENSG00000021852_9 (sequence is synthesized)
tgattttgggacccactacatcacagaggctgtgcttgggggcatttatgaatacaccctcgttatgaacaaagaggccatggagagaggagattatactcttaacaacgtccatgcctg

SEQ ID NO: 19857 - DNA, 120 bp, Artificial Sequence
  ENSG00000021852_10 (sequence is synthesized)
tgccaaaaatgattttaaaattggtggtgccattgaagaggtctacgtcagtctgggtgtgtctgtaggcaaatgcagaggtattctgaatgaaataaaagacagaaacaagagggacac

SEQ ID NO: 19858 - DNA, 120 bp, Artificial Sequence
  ENSG00000021852_11 (sequence is synthesized)
catggtggaggacttggtggtcctggtacgaggaggggcaagtgagcacatcaccaccctggcataccaggagctgccgacggcggacctgatgcaggagtggggagacgctgtgcagta

SEQ ID NO: 19859 - DNA, 120 bp, Artificial Sequence
  ENSG00000021852_12 (sequence is synthesized)
caacccagccatcatcaaagttaaggtggagcctctgtatgaactagtgacagccacagattttgcctattccagcacagtgaggcagaacatgaagcaggcactggaggagttccagaa

SEQ ID NO: 19860 - DNA, 120 bp, Artificial Sequence
  ENSG00000021852_13 (sequence is synthesized)
ggaagttagttcctgccactgtgctccctgccaaggaaatggagtccctgtcctgaaaggatcacgctgtgactgcatctgtcctgttggatcccaaggcctagcctgtgaggtctccta

SEQ ID NO: 19861 - DNA, 120 bp, Artificial Sequence
  ENSG00000021852_14 (sequence is synthesized)
tcggaagaatacccccattgatgggaagtggaattgctggtcaaattggtcttcatgctctggaagacgtaagacaagacaaaggcagtgtaacaatccacctcctcaaaatgggggtag

SEQ ID NO: 19862 - DNA, 120 bp, Artificial Sequence
  ENSG00000021852_15 (sequence is synthesized)
cccctgttcaggccctgcttcagaaacacttgactgctcctagcagatgatacagcagtgggctacatacaatgagagccctgagccctcaagaactcatgccagctcagccctacacca

SEQ ID NO: 19863 - DNA, 120 bp, Artificial Sequence
  ENSG00000021852_16 (sequence is synthesized)
gtttccacctggagttcatgcaagggcaaaaggcagtgccatgcaagctgtttaaaataaagatgttaccttgtaaaatgcaagttgatttaaataaatactgagttaaaggcttaagca

SEQ ID NO: 19864 - DNA, 120 bp, Artificial Sequence
  ENSG00000021852_17 (sequence is synthesized)
attattctggttggtttccagagtgacaggtaagtttttggtctgtgcaaagtctgtttccagtcactagtggctttctgtttactttgcagagctatttgctcttggggacagaagctg

SEQ ID NO: 19865 - DNA, 120 bp, Artificial Sequence
  ENSG00000021852_18 (sequence is synthesized)
ggccaaaagagttttttgttcttacttactcttgtaatcaagtcagatgatgaaatcacaatcactgtgtcgtaagacctattatgtattgccactctgtgccagcaacttggaaacatt

SEQ ID NO: 19866 - DNA, 120 bp, Artificial Sequence
  ENSG00000021852_19 (sequence is synthesized)
ccgaatctagcctacatttccagcacaatggacacttgtatgactctggccttcactctctctgggcgtttcttcatgctgctttctcagtacaggtatgcctacttgctccagccctct

SEQ ID NO: 19867 - DNA, 120 bp, Artificial Sequence
  ENSG00000021852_20 (sequence is synthesized)
ctgccactgtgctccctgccaaggaaatggagtccctgtcctgaaaggatcacgctgtgactgcatctgtcctgttggatcccaaggcctagcctgtgaggtctcctatcggaagagtaa

SEQ ID NO: 19868 - DNA, 120 bp, Artificial Sequence
  ENSG00000021852_21 (sequence is synthesized)
gaaacctgagatccatcctgcttaaactcagcttggattgaaattccatctccatcatttaataactgatggattgattgttatgcatttcattatttttacaacacagagtgcttcatg

SEQ ID NO: 19869 - DNA, 120 bp, Artificial Sequence
  ENSG00000022267_0 (sequence is synthesized)
taacaatgctgagtgtttgagctaatacggcttgataatgagggagccagatccactgccagtgctcatgttatatgataaacagacatttggagaagcaccttggaagttgttttcaac

SEQ ID NO: 19870 - DNA, 120 bp, Artificial Sequence
  ENSG00000022267_1 (sequence is synthesized)
catatccagcctttgccgaatacatcctatctgccacacatccagcgtgaggtccctccagctacaaggtgggcaccatggcggagaagtttgactgccactactgcagggatcccttgc

SEQ ID NO: 19871 - DNA, 120 bp, Artificial Sequence
  ENSG00000022267_2 (sequence is synthesized)
aggggaagaagtatgtgcaaaaggatggccaccactgctgcctgaaatgctttgacaagttctgtgccaacacctgtgtggaatgccgcaagcccatcggtgcggactccaaggaggtgc

SEQ ID NO: 19872 - DNA, 120 bp, Artificial Sequence
  ENSG00000022267_3 (sequence is synthesized)
actataagaaccgcttctggcatgacacctgcttccgctgtgccaagtgccttcaccccttggccaatgagacctttgtggccaaggacaacaagatcctgtgcaacaagtgcaccactc

SEQ ID NO: 19873 - DNA, 120 bp, Artificial Sequence
  ENSG00000022267_4 (sequence is synthesized)
gggaggactcccccaagtgcaaggggtgcttcaaggccattgtggcaggagatcaaaacgtggagtacaaggggaccgtctggcacaaagactgcttcacctgtagtaactgcaagcaag

SEQ ID NO: 19874 - DNA, 120 bp, Artificial Sequence
  ENSG00000022267_5 (sequence is synthesized)
tcatcgggactggaagcttcttccctaaaggggaggacttctactgcgtgacttgccatgagaccaagtttgccaagcattgcgtgaagtgcaacaaggccatcacatctggaggaatca

SEQ ID NO: 19875 - DNA, 120 bp, Artificial Sequence
  ENSG00000022267_6 (sequence is synthesized)
cttaccaggatcagccctggcatgccgattgctttgtgtgtgttacctgctctaagaagctggctgggcagcgtttcaccgctgtggaggaccagtattactgcgtggattgctacaaga

SEQ ID NO: 19876 - DNA, 120 bp, Artificial Sequence
  ENSG00000022267_7 (sequence is synthesized)
actttgtggccaagaagtgtgctggatgcaagaaccccatcactgggtttggtaaaggctccagtgtggtggcctatgaaggacaatcctggcacgactactgcttccactgcaaaaaat

SEQ ID NO: 19877 - DNA, 120 bp, Artificial Sequence
  ENSG00000022267_8 (sequence is synthesized)
gctccgtgaatctggccaacaagcgctttgttttccaccaggagcaagtgtattgtcccgactgtgccaaaaagctgtaaactgacaggggctcctgtcctgtaaaatggcatttgaatc

SEQ ID NO: 19878 - DNA, 120 bp, Artificial Sequence
  ENSG00000022267_9 (sequence is synthesized)
ttttacagtattactcaaataagggcacacagtgatcatattagcatttagcaaaaagcaaccctgcagcaaagtgaatttctgtccggctgcaatttaaaaatgaaaacttaggtagat

SEQ ID NO: 19879 - DNA, 120 bp, Artificial Sequence
  ENSG00000022267_10 (sequence is synthesized)
tgactcttctgcatgtttctcatagagcagaaaagtgctaatcatttagccacttagtgatgtaagcaagaagcataggagataaaacccccactgagatgcctctcatgcctcagctgg

SEQ ID NO: 19880 - DNA, 120 bp, Artificial Sequence
  ENSG00000022267_11 (sequence is synthesized)
gacccaccgtgtagacacacgacatgcaagagttgcagcggctgctccaactcactgctcaccctcttctgtgagcaggaaaagaaccctactgacatgcatggtttaacttcctcatca

SEQ ID NO: 19881 - DNA, 120 bp, Artificial Sequence
  ENSG00000022267_12 (sequence is synthesized)
gaactctgcccttccttctgttcttttgtgctttcaaataactaacacgaacttccagaaaattaacatttgaacttagctgtaattctaaactgacctttccccgtactaacgtttggt

SEQ ID NO: 19882 - DNA, 120 bp, Artificial Sequence
  ENSG00000022267_13 (sequence is synthesized)
ttccccgtgtggcatgttttctgagcgttcctactttaaagcatggaacatgcaggtgatttgggaagtgtagaaagacctgagaaaacgagcctgtttcagaggaacatcgtcacaacg

SEQ ID NO: 19883 - DNA, 120 bp, Artificial Sequence
  ENSG00000022267_14 (sequence is synthesized)
aatacttctggaagcttaacaaaactaaccctgctgtcctttttattgtttttaattaatatttttgttttaattgatagcaaaatagtttatgggtttggaaacttgcatgaaaatatt

SEQ ID NO: 19884 - DNA, 120 bp, Artificial Sequence
  ENSG00000022267_15 (sequence is synthesized)
ttagccccctcagatgttcctgcagtgctgaaattcatcctacggaagtaaccgcaaaactctagagggggagttgagcaggcgccagggctgtcatcaacatggatatgacatttcaca

SEQ ID NO: 19885 - DNA, 120 bp, Artificial Sequence
  ENSG00000022267_16 (sequence is synthesized)
acagtgactagttgaatcccttgtaacgtagtagttgtctgctctttgtccatgtgttaatgaggactgcaaagtcccttctgttgtgattcctaggacttttcctcaagaggaaatctg

SEQ ID NO: 19886 - DNA, 120 bp, Artificial Sequence
  ENSG00000022267_17 (sequence is synthesized)
gatttccacctaccgcttacctgaaatgcaggatcacctacttactgtattctacattattatatgacatagtataatgagacaatatcaaaagtaaacatgtaatgacaatacatacta

SEQ ID NO: 19887 - DNA, 120 bp, Artificial Sequence
  ENSG00000022267_18 (sequence is synthesized)
acattcttgtaggagtggttagagaagctgatgcctcatttctacattctgtcattagctattatcatctaacgtttcagtgtatccttacagaaataaagcagcatatgaataacctgc

SEQ ID NO: 19888 - DNA, 120 bp, Artificial Sequence
  ENSG00000022267_19 (sequence is synthesized)
acacctgtttcctagtgctgcagaaccctcgtcctgggatgagcctgcccgctagtctgcatcctaatcctgctgttgattggagataacttcagcggtcacagggcacctcgtctccat

SEQ ID NO: 19889 - DNA, 120 bp, Artificial Sequence
  ENSG00000022267_20 (sequence is synthesized)
ggcaacccctctaaatattcctctagtgacttgtgctctacattctggctggatcagagccctcctgtggcaaaatattctaaagatgttaaaagagagagagagaaaaaaaaaggctca

SEQ ID NO: 19890 - DNA, 120 bp, Artificial Sequence
  ENSG00000022267_21 (sequence is synthesized)
actaataaatctattctaaacgactgagtcatttgttttgattacccgggtgattgccaaatgttaatttaaaactgaaataggccatgagctcactcccctaacaatgctgagtgtttg

SEQ ID NO: 19891 - DNA, 120 bp, Artificial Sequence
  ENSG00000022267_22 (sequence is synthesized)
agctaatacggcttgataatgagggagccagatccactgccagtgctcatgttatatgataaacagacatttggagaagtatgcagaacatcttggcagttttcctttaactctaagggt

SEQ ID NO: 19892 - DNA, 120 bp, Artificial Sequence
  ENSG00000022267_23 (sequence is synthesized)
tgtaaatacaaagtagaatgtgttaccatgagccatttcataggaagttgactttatttttttagaattcagaactttgcttctaaaaaggtaactttgcctcttgattctcattttttt

SEQ ID NO: 19893 - DNA, 120 bp, Artificial Sequence
  ENSG00000022267_24 (sequence is synthesized)
gccccgctccgcatcttttgtgaatcagcacagttgatatatctgagcaggggcttctaccatctccccagggaatcactagccatcggccatctggccccgcggggtccctccagctac

SEQ ID NO: 19894 - DNA, 120 bp, Artificial Sequence
  ENSG00000022267_25 (sequence is synthesized)
tatccagcctttgccgaatacatcctatctgccacacatccagcgtgagttccagctgctgttgcttgggaagaaacaaatttctgctgtgttctcaatctccagacggtccatgaaaat

SEQ ID NO: 19895 - DNA, 120 bp, Artificial Sequence
  ENSG00000022267_26 (sequence is synthesized)
ctgcagacaacgctgttatcaccagagcccggcactgagcttggcacatggcgagggctcagtaaactgaatgctgagtgaatgagacgccacgcgccgctttgccatcggtgctttctg

SEQ ID NO: 19896 - DNA, 120 bp, Artificial Sequence
  ENSG00000022267_27 (sequence is synthesized)
agtgacgttaaaacgctctggatggtggcactgggattatggatggggcttatttagctccctccggcttgctactaaggggaggggtcgtcggtgggcctttcggcgccgctgcaagcc

SEQ ID NO: 19897 - DNA, 120 bp, Artificial Sequence
  ENSG00000022267_28 (sequence is synthesized)
acagaggtttctgctttcgaagtttctcttcctttcctctctgctcttagcgtccaggactaggtaaaggttaaaaaatcatcaaggctaagcgactgttgtgtcgttcgtgttgagcgc

SEQ ID NO: 19898 - DNA, 80 bp, Artificial Sequence
  ENSG00000022267_29 (sequence is synthesized)
cccaggcgcgcacccctcccctcgcgcccctcccgcgccctacatccaccgcccggcggagggggctcagtccgcagccg

SEQ ID NO: 19899 - DNA, 120 bp, Artificial Sequence
  ENSG00000022267_30 (sequence is synthesized)
agccttatcagctggggttgagggaagactggtctaggtgctgctcctgaacttggtctctgagccatggcttcccatagacactcaggtccctccagctacaaggtgggcaccatggcg

SEQ ID NO: 19900 - DNA, 80 bp, Artificial Sequence
  ENSG00000022267_31 (sequence is synthesized)
tgcccttctgccccgccgccgccgccgctcggggctggtccctgcggtcccggctgcctggccttccagggctgggtact

SEQ ID NO: 19901 - DNA, 120 bp, Artificial Sequence
  ENSG00000022267_32 (sequence is synthesized)
gtctgactctggtgcccctgctgtgaagagctgtgccctgctgcattcctcctgtagctgcacgaaagggaaacatcaattccagaagggtgaattagatgaaatatgataagactagtg

SEQ ID NO: 19902 - DNA, 120 bp, Artificial Sequence
  ENSG00000022267_33 (sequence is synthesized)
aggcagtctgactctggtgcccctgctgtgaagagctgtgccctgctgcattcctcctgtagctgcacgaaagggtggccattatgatgctcatagaggctggacagctaatatgaggcg

SEQ ID NO: 19903 - DNA, 120 bp, Artificial Sequence
  ENSG00000022267_34 (sequence is synthesized)
gagccggtatttgagctcaggcagtctgactctggtgcccctgctgtgaagagctgtgccctgctgcattcctcctgtagctgcacgaaagggtgtggaatcttctagaagcagcacctt

SEQ ID NO: 19904 - DNA, 120 bp, Artificial Sequence
  ENSG00000022267_35 (sequence is synthesized)
tcccttgcctccaattttcccatcttcccggggagccttgaaatgtacatttgagaagacttttgccatcctcagggaaaaggactgtgtcaagagtgagccacccagtctctaaagcta

SEQ ID NO: 19905 - DNA, 120 bp, Artificial Sequence
  ENSG00000022267_36 (sequence is synthesized)
ggaagcccccagtgtgccacgggaaacgcttgcctctcaccctgtttcccagcgccaacctccggggcaggcatccgggtggagagaggacttgtccctcgtgggtggtggttctttata

SEQ ID NO: 19906 - DNA, 120 bp, Artificial Sequence
  ENSG00000022267_37 (sequence is synthesized)
agtccgcagccgccgccgccaccgccgcgcctcggcctcggtgcaggcagcggccgccgccgccgagacagctgcgcgggcgagcatccccacgcagctggaaaacagtgacgatcgtgg

SEQ ID NO: 19907 - DNA, 120 bp, Artificial Sequence
  ENSG00000022267_38 (sequence is synthesized)
gcattcctcctgtagctgcacgaaaggattcaggtttgacgcttcagttggattgaatcgaaagagaggtatatttggtatcaggcgtttgtggtggcatgtgaaatcattatccacgtt

SEQ ID NO: 19908 - DNA, 120 bp, Artificial Sequence
  ENSG00000022267_39 (sequence is synthesized)
ttgtggcaggtactgcctccttcccaccccgggttcccagggaggaggccctgagggcagacgtgatgtgggcttgcttatcatggtggggctaacgttgctctgagctgctttgagatc

SEQ ID NO: 19909 - DNA, 120 bp, Artificial Sequence
  ENSG00000022267_40 (sequence is synthesized)
ttagcatatatatgtacacatatacatacacgtatatatgcgtacacatatatgctcgcacacacgcacacactcggagactaaagaacactggcgagaacagcctgtggcaacagaatg

SEQ ID NO: 19910 - DNA, 120 bp, Artificial Sequence
  ENSG00000022267_41 (sequence is synthesized)
aagtgaacagtatgtagcgctttctcatttgggcgtagtaagtgatgaaagcatgcttcttcctcagggtgtcattctgggccaggcagtccctgatttaatgtctaagtgcacgcaggg

SEQ ID NO: 19911 - DNA, 120 bp, Artificial Sequence
  ENSG00000022267_42 (sequence is synthesized)
tatagaggtgggggagtgggggattcaggcactggatcctaaaataataatgctggggtccccacccatgacagaaatcctgggttggcacaagcacaagtagaacacaggtaggttagt

SEQ ID NO: 19912 - DNA, 120 bp, Artificial Sequence
  ENSG00000022267_43 (sequence is synthesized)
gttaagctatgccagagccgagtccaaattttattccggtacagggatgactttctatgtggcctctctggctctggagctaatttggatgctgagtagccccgcaggtccctccagcta

SEQ ID NO: 19913 - DNA, 120 bp, Artificial Sequence
  ENSG00000022267_44 (sequence is synthesized)
ccgccgccaccgccgcgcctcggcctcggtgcaggcagcggccgccgccgccgagacagctgcgcgggcgagcatccccacgcagtccctccagctacaaggtgggcaccatggcggaga

SEQ ID NO: 19914 - DNA, 120 bp, Artificial Sequence
  ENSG00000022267_45 (sequence is synthesized)
atttcctttgtttggaggcttggttctgagtgagagttcaacagcctttgcccaggcggcttctcaaacacagggtgtggtttccttagctcactctctgctgtttggttgctcatggca

SEQ ID NO: 19915 - DNA, 120 bp, Artificial Sequence
  ENSG00000022267_46 (sequence is synthesized)
acaagatccaaataacttggacatgtgtttgtataaaaaaaacctgggaatggaacccaaagtgagactttggggctttcagttagtggaagagctgcggtccctccagctacaaggtgg

SEQ ID NO: 19916 - DNA, 120 bp, Artificial Sequence
  ENSG00000022277_0 (sequence is synthesized)
agcgtgctgcgtcacggcggtgcgccggaagtggctgcggatttcgccggaaatcccggaagtgacagctttgggggtttgctgctggctctgactcccgtcctgcgatgggttgcgacg

SEQ ID NO: 19917 - DNA, 120 bp, Artificial Sequence
  ENSG00000022277_1 (sequence is synthesized)
ggggaacaatccccaagaggcatgaactggtgaaggggccgaagaaggttgagaaggtcgacaaagatgctgaattagtggcccaatggaactattgtactctaagtcaggaaatattaa

SEQ ID NO: 19918 - DNA, 120 bp, Artificial Sequence
  ENSG00000022277_2 (sequence is synthesized)
gacgaccaatagttgcctgtgaacttggcagactttataacaaagatgccgtcattgaatttctcttggacaaatctgcagaaaaggctcttgggaaggcagcatctcacattaaaagca

SEQ ID NO: 19919 - DNA, 120 bp, Artificial Sequence
  ENSG00000022277_3 (sequence is synthesized)
ttaagaatgtgacagagctgaagctttctgataatcctgcctgggaaggggataaaggaaacactaaaggtgacaagcacgatgacctccagcgggcgcgtttcatctgccccgttgtgg

SEQ ID NO: 19920 - DNA, 120 bp, Artificial Sequence
  ENSG00000022277_4 (sequence is synthesized)
gcctggagatgaacggccgacacaggttctgcttccttcggtgctgcggctgtgtgttttctgagcgagccttgaaagagataaaagcggaagtttgccacacgtgtggggctgccttcc

SEQ ID NO: 19921 - DNA, 120 bp, Artificial Sequence
  ENSG00000022277_5 (sequence is synthesized)
aggaggatgatgtcatcatgctcaatggcaccaaggaggatgtggacgtgctgaagacaaggatggaggagagaaggctgagagcgaagctggaaaagaaaacaaagaaacccaaggcag

SEQ ID NO: 19922 - DNA, 120 bp, Artificial Sequence
  ENSG00000022277_6 (sequence is synthesized)
cagagtctgtttcaaaaccagatgtcagtgaagaagccccagggccatcaaaagttaagacagggaagcctgaagaagccagccttgattctagagagaagaaaaccaacttggctccca

SEQ ID NO: 19923 - DNA, 120 bp, Artificial Sequence
  ENSG00000022277_7 (sequence is synthesized)
aaagcacagcaatgaatgagagctcttctggaaaagctgggaagcctccgtgtggagccacaaagaggtccatcgctgacagtgaagaatcggaggcctacaagtccctctttaccactc

SEQ ID NO: 19924 - DNA, 120 bp, Artificial Sequence
  ENSG00000022277_8 (sequence is synthesized)
acagctccgccaagcgctccaaggaggagtctgcccactgggtcacccacacgtcctactgcttctgaagcccgcactgccaccgctcctgccccagaaggttgtttagtttccacgtag

SEQ ID NO: 19925 - DNA, 120 bp, Artificial Sequence
  ENSG00000022277_9 (sequence is synthesized)
tgtgtcataaagctgtcctggccagccttcaagctggtgtggccactcttgatgtgaggcgtgtcggttccaggggggacatgggaggggctgcacagtggcccgaggtcatgcttgctt

SEQ ID NO: 19926 - DNA, 120 bp, Artificial Sequence
  ENSG00000022277_10 (sequence is synthesized)
ccacctgcaggtgcatttggtcctttccatggccaggaagccctgtgggctgcactttttatgcttgcagtaacaagagactccagagtcctcaccggtgcagagttggcacatattaat

SEQ ID NO: 19927 - DNA, 120 bp, Artificial Sequence
  ENSG00000022277_11 (sequence is synthesized)
taactaaaattctaatgatcttgctaccagcaataaatcaagtaggccaagtgaaactgggctttaaaaaggatggatttcaaatacactgtgcccactagaagcttcgaagggcctcgt

SEQ ID NO: 19928 - DNA, 120 bp, Artificial Sequence
  ENSG00000022277_12 (sequence is synthesized)
ccctctgctacagccctgggaggagccaggatccttgttggtctagctaaatactgttaggggagtgtgccccatctcatcatttcgaagatagcagagtcatagttgggcacccagtga

SEQ ID NO: 19929 - DNA, 120 bp, Artificial Sequence
  ENSG00000022277_13 (sequence is synthesized)
ttgggttcaaaaataaagctggtctgcctcttctctcctctgtgtttttatcttttctaccttctgctcatgcttgggtaagaacattgcagccgttgcattggtgattacaggagtcat

SEQ ID NO: 19930 - DNA, 120 bp, Artificial Sequence
  ENSG00000022277_14 (sequence is synthesized)
tccatgaagtcagaagaacccacccttctctcctccagcagatggtaaagggagaatcgtacccaaaaagaggtgcattttatctgcctataagttgtgttgacgtcaatagctagtgaa

SEQ ID NO: 19931 - DNA, 120 bp, Artificial Sequence
  ENSG00000022277_15 (sequence is synthesized)
acttctcatgagactcctaatgaagaaccaagagccacaggcctctgcgtggctttctgcacacggtggtatgactgagatagtgactggttctctatacagaccccggggccctgggtt

SEQ ID NO: 19932 - DNA, 120 bp, Artificial Sequence
  ENSG00000022277_16 (sequence is synthesized)
tccttcagaagcagaaggagctgtgggaggtgaatggtgggaggtgaacaggcaggttctgtgggagacacagacacgtgggcagaactccagggagaggccagcaagggagaaccatgt

SEQ ID NO: 19933 - DNA, 120 bp, Artificial Sequence
  ENSG00000022277_17 (sequence is synthesized)
gtggccctgctttttctcaaaccctgtgtggttcccggcttcacagttgatgggaaggtttggccccaaggatattttgacattgtgagtatagagcattttaataaaaattaagtgatg

SEQ ID NO: 19934 - DNA, 120 bp, Artificial Sequence
  ENSG00000022277_18 (sequence is synthesized)
ggatggaggagagaaggctgagagcgaagctggaaaagaaaacaaagaaacccaaggcagcagagtctgtttcaaaaccagatgtcagtgaaggtaagatccttcaagagatccttattt

SEQ ID NO: 19935 - DNA, 120 bp, Artificial Sequence
  ENSG00000022277_19 (sequence is synthesized)
ggaaaaaatgcatttcaaaggaaactactagaaatgttcatattccctttgaccattttgctttcgtgagttttctctgtcacaggtttcctgccaagttaattcaaagcccagtgggac

SEQ ID NO: 19936 - DNA, 120 bp, Artificial Sequence
  ENSG00000022277_20 (sequence is synthesized)
taacatgctcctctctgcaaaatattctccagagcttctgggaatacctcatagctactgctaccaggataccaaaatatttcccaaatacacttgcagctggaagcaagatataacatt

SEQ ID NO: 19937 - DNA, 120 bp, Artificial Sequence
  ENSG00000022277_21 (sequence is synthesized)
tcctctctaactccttcttgcctgtgcttttcaaataacctcagctgtgaatggagggcttagaagtaaacagttgtctcttatttgtttgaaggaccgagtatcagttttcacagatgt

SEQ ID NO: 19938 - DNA, 120 bp, Artificial Sequence
  ENSG00000022277_22 (sequence is synthesized)
gaatgcttgcattgcatgtgtgaaatgcacagaaggtctttatgttctgttataaatcacactgcatgtatatgttagaaattcaaggcctgagaggtctttctttaatgctcagtgctg

SEQ ID NO: 19939 - DNA, 120 bp, Artificial Sequence
  ENSG00000022277_23 (sequence is synthesized)
ggagatggctgaagtaatcaggctgcctatttttagtgccaccttttggatgcttaggaaattgacattttaaagtaaattaaatgaacatagtcctacttgtcatttctgcgattaaat

SEQ ID NO: 19940 - DNA, 120 bp, Artificial Sequence
  ENSG00000022277_24 (sequence is synthesized)
caattccaacgcagctgtgtgaccgtagaatggtttgttttattattgctgatcaaaataactattatgagtagcagaattctagtgcctggaaatctaacaagagtagttttgagttta

SEQ ID NO: 19941 - DNA, 120 bp, Artificial Sequence
  ENSG00000022277_25 (sequence is synthesized)
gaagaattagctcaactgtctttaatataaacttcaaggccttacacttgaataacaaataccaaagcagtttgacagctttgaaaaaaagttagtggaatgtgcaagatttagttggtg

SEQ ID NO: 19942 - DNA, 120 bp, Artificial Sequence
  ENSG00000022277_26 (sequence is synthesized)
tttatgctggctggacttcacatacccatatatactctgtgttactcatttaagtgcgcttttgtatacagttgtcaccatcaacattggcccttattactgaaatctgtcagcctcatt

SEQ ID NO: 19943 - DNA, 120 bp, Artificial Sequence
  ENSG00000022277_27 (sequence is synthesized)
taaatttttgcaaatgtgatttgggagatgtaaatataaaagtgagcagctctgtgcagatacatttttgtgtgaggcagaagtgcatgactggtgtcacatgcagagggtgaaggcttt

SEQ ID NO: 19944 - DNA, 120 bp, Artificial Sequence
  ENSG00000022277_28 (sequence is synthesized)
gtgactgtctgtctcatgtgactagcatcggtcagtcagacagggcacccgggacaatgggcagccacactgacgctgaagtggagtgaatctgagcacagcctccaacattctctatct

SEQ ID NO: 19945 - DNA, 120 bp, Artificial Sequence
  ENSG00000022277_29 (sequence is synthesized)
gctttgggggtttgctgctggctctgactcccgtcctgcgatgggttgcgacgggggaacaatccccaagaggcatgaactggtgaaggggccgaagaaggttgagaaggcaattattgg

SEQ ID NO: 19946 - DNA, 120 bp, Artificial Sequence
  ENSG00000022277_30 (sequence is synthesized)
tgggctcctggatggggcctggtcaccagaaacaccaagccaagattagaagcctggaactttcagccccacctcacccccatccttcagggaggagaagaggaattggacatggagtta

SEQ ID NO: 19947 - DNA, 120 bp, Artificial Sequence
  ENSG00000022277_31 (sequence is synthesized)
tggagattttctgggttgccgacaacatccacatgccaggagagttaccccaactccatgaggacagccctgcacttgggacccttccagattacttctttatctggctatttatttgta

SEQ ID NO: 19948 - DNA, 120 bp, Artificial Sequence
  ENSG00000022277_32 (sequence is synthesized)
tcctttaaaatgtatttgtaataaatcagcaatgtacagatatgtaaaaacttaaaagaagaaagaccctaggaaagaagagagaccctgatttggcatttgaagaatgggaaagagtgg

SEQ ID NO: 19949 - DNA, 120 bp, Artificial Sequence
  ENSG00000022277_33 (sequence is synthesized)
ctctgactcccgtcctgcgatgggttgcgacgggggaacaatccccaagaggcatgaactggtgaaggggccgaagaaggttgagaagtacagatatgtaaaaacttaaaagaagaaaga

SEQ ID NO: 19950 - DNA, 120 bp, Artificial Sequence
  ENSG00000022355_0 (sequence is synthesized)
aacagaagatgccggagaaggggggggaaaagtagatgcggatttcgtcctgacttctaaaaattcctcctctccctctcccattttcctaatccgagaatgatggagctcgaggcaaag

SEQ ID NO: 19951 - DNA, 120 bp, Artificial Sequence
  ENSG00000022355_1 (sequence is synthesized)
gaatgattccggaaatggagatatgattctcaaacctagaaatgatcggagtgatttattagttaaatattcttcgtccaggaacccagcacaattcagagctgcagattggatattggg

SEQ ID NO: 19952 - DNA, 120 bp, Artificial Sequence
  ENSG00000022355_2 (sequence is synthesized)
aagcaaatttgggtgtgaaatcttcagcaaaggagcacgcagagtccatgatggctcagaccaagtgagtgagaggcagagcgaggacgcccctctgctctggcgcgcccggactcggac

SEQ ID NO: 19953 - DNA, 120 bp, Artificial Sequence
  ENSG00000022355_3 (sequence is synthesized)
tcgcagactcgcgctggctccagtctctccacgattctctctcccagacttttccccggtcttaagagatcctgtgtccagagggggccttagctgctccagcccgcgatgaggaaaagt

SEQ ID NO: 19954 - DNA, 120 bp, Artificial Sequence
  ENSG00000022355_4 (sequence is synthesized)
ccaggtctgtctgactgtctttgggcctggatcctccttctgagcacactgactggaagaagctatggacagccgtcattacaagatgaacttaaagacaataccactgtcttcaccagg

SEQ ID NO: 19955 - DNA, 120 bp, Artificial Sequence
  ENSG00000022355_5 (sequence is synthesized)
attttggacagactcctagatggttatgacaatcgcctgagaccaggattgggagagcgtgtaaccgaagtgaagactgatatcttcgtcaccagtttcggacccgtttcagaccatgat

SEQ ID NO: 19956 - DNA, 120 bp, Artificial Sequence
  ENSG00000022355_6 (sequence is synthesized)
atggaatatacaatagatgtatttttccgtcaaagctggaaggatgaaaggttaaaatttaaaggacctatgacagtcctccggttaaataacctaatggcaagtaaaatctggactccg

SEQ ID NO: 19957 - DNA, 120 bp, Artificial Sequence
  ENSG00000022355_7 (sequence is synthesized)
gacacatttttccacaatggaaagaagtcagtggcccacaacatgaccatgcccaacaaactcctgcggatcacagaggatggcaccttgctgtacaccatgaggctgacagtgagagct

SEQ ID NO: 19958 - DNA, 120 bp, Artificial Sequence
  ENSG00000022355_8 (sequence is synthesized)
cttgcccactaaaatttggaagttatgcttatacaagagcagaagttgtttatgaatggaccagagagccagcacgctcagtggttgtagcagaagatggatcacgtctaaaccagtatg

SEQ ID NO: 19959 - DNA, 120 bp, Artificial Sequence
  ENSG00000022355_9 (sequence is synthesized)
accttcttggacaaacagtagactctggaattgtccagtcaagtacaggagaatatgttgttatgaccactcatttccacttgaagagaaagattggctactttgttattcaaacatacc

SEQ ID NO: 19960 - DNA, 120 bp, Artificial Sequence
  ENSG00000022355_10 (sequence is synthesized)
tgccatgcataatgacagtgattctctcacaagtctccttctggctcaacagagagtctgtaccagcaagaactgtctttggagtaacaactgtgctcaccatgacaacattgagcatca

SEQ ID NO: 19961 - DNA, 120 bp, Artificial Sequence
  ENSG00000022355_11 (sequence is synthesized)
gtgccagaaactccctccctaaggtggcttatgcaacagctatggattggtttattgccgtgtgctatgcctttgtgttctcagctctgattgagtttgccacagtaaactatttcacta

SEQ ID NO: 19962 - DNA, 120 bp, Artificial Sequence
  ENSG00000022355_12 (sequence is synthesized)
agagaggttatgcatgggatggcaaaagtgtggttccagaaaagccaaagaaagtaaaggatcctcttattaagaaaaacaacacttacgctccaacagcaaccagctacacccctaatt

SEQ ID NO: 19963 - DNA, 120 bp, Artificial Sequence
  ENSG00000022355_13 (sequence is synthesized)
tggccaggggcgacccgggcttagccaccattgctaaaagtgcaaccatagaacctaaagaggtcaagcccgaaacaaaaccaccagaacccaagaaaacctttaacagtgtcagcaaaa

SEQ ID NO: 19964 - DNA, 120 bp, Artificial Sequence
  ENSG00000022355_14 (sequence is synthesized)
ttgaccgactgtcaagaatagccttcccgctgctatttggaatctttaacttagtctactgggctacgtatttaaacagagagcctcagctaaaagcccccacaccacatcaatagatct

SEQ ID NO: 19965 - DNA, 120 bp, Artificial Sequence
  ENSG00000022355_15 (sequence is synthesized)
tttactcacattctgttgttcagtcctctgcactgggaatttatttatgttctcaacgcagtaattcccatctgctttattgcctctgtcttaaagaatttgaaagtttccttattttca

SEQ ID NO: 19966 - DNA, 120 bp, Artificial Sequence
  ENSG00000022355_16 (sequence is synthesized)
taattcatttaagaacaagagacccctgtctggcagtctggagcaaagcagactatgcagcttggagacaggattctgacagagcaagcgaaagagcaaagtcatgtcagaaggagacag

SEQ ID NO: 19967 - DNA, 120 bp, Artificial Sequence
  ENSG00000022355_17 (sequence is synthesized)
tttatgtgaaggtgtttcaaagggtaaattataaatgtttcatgaagaaaaaattttaaaaatctacgtctttattacacaaactatggtgtgcttatgtttttgttttgctttttaaac

SEQ ID NO: 19968 - DNA, 120 bp, Artificial Sequence
  ENSG00000022355_18 (sequence is synthesized)
tgatgtatagctttaacattttgtttccaaagctgaagatccccattctttctctttgaaaaaaaaaaaggcctaatgcattattttgtcataaaatgctattttaaaattcatggaact

SEQ ID NO: 19969 - DNA, 120 bp, Artificial Sequence
  ENSG00000022355_19 (sequence is synthesized)
ttcatacgtaaaggtgcagttgctcattgtagagcacatttagtccaatgaagataaatgctttaaatagtttacttcactttcatctgagcttttaccactagactcaaggaagaataa

SEQ ID NO: 19970 - DNA, 120 bp, Artificial Sequence
  ENSG00000022355_20 (sequence is synthesized)
ttttaacagacatgtatactccatagaaactaaactaaaatagtttaaaaatattccctttttcaccctattttcagatagcacatgagcccaacactcacttaattctcattatgaaga

SEQ ID NO: 19971 - DNA, 120 bp, Artificial Sequence
  ENSG00000022355_21 (sequence is synthesized)
tgtttttagaggggcaaaaatattttgcaagctctggaattgttgaatgtattcttttatataactacattaaaagctttagattgaaatttatgactagcaaacaaaaatagaatatat

SEQ ID NO: 19972 - DNA, 120 bp, Artificial Sequence
  ENSG00000022355_22 (sequence is synthesized)
aaacgatatatgtaaatatacagcatgagattgtacattttttacttttttaaaattgtgttcttaaaatattgtgtaagaatcactgcacttagctgttggaatgttgttaaatgctat

SEQ ID NO: 19973 - DNA, 120 bp, Artificial Sequence
  ENSG00000022355_23 (sequence is synthesized)
ggaaatacatttagaacctgcatttaagaacagaacagcaagtatgaaccacatggaacttaaaacatatgggtgtgaagtccacttatgtagacaaaacttataatttccaaactgttg

SEQ ID NO: 19974 - DNA, 120 bp, Artificial Sequence
  ENSG00000022355_24 (sequence is synthesized)
tctagtatacagtgatcagttgctctctgttcaagtcattccacacatttccctattttaggctattataatatagaaagaaaatgggaagcattagttggagctagaaaatgaactgta

SEQ ID NO: 19975 - DNA, 120 bp, Artificial Sequence
  ENSG00000022355_25 (sequence is synthesized)
attgctatatttgctaataccaactatttcaataagtgttgtaccatatgtagcattaaatataaaatacataaaagaatgtacagaaaatagcttttattgagtaatattacatttcat

SEQ ID NO: 19976 - DNA, 120 bp, Artificial Sequence
  ENSG00000022355_26 (sequence is synthesized)
tcatttatactgtagcaatatatttgtaggtatactatgtaagggctttaaataaaagaggtccattaatacttccttataaaaattctagtctgtttcattactgcccagatgttttag

SEQ ID NO: 19977 - DNA, 120 bp, Artificial Sequence
  ENSG00000022355_27 (sequence is synthesized)
agataaatatttatgcagaaggtatttttgaagtctccttttgtctgatagagtttaacagatatttaaatttagtgctcagaatccacaagtcacggtctaaacacacttagaatacta

SEQ ID NO: 19978 - DNA, 120 bp, Artificial Sequence
  ENSG00000022355_28 (sequence is synthesized)
cagcataaatctgttagcattattgccaaataagacagttgggatccaaacccaagtcttgagcaatgtttttctcaaaaagctgctatccaatgatataggaaaatacattgtgttttc

SEQ ID NO: 19979 - DNA, 120 bp, Artificial Sequence
  ENSG00000022355_29 (sequence is synthesized)
ctaaacacacttttctttttaaatgtgcttcattgtttgatttggtcctgcctaaatttcacaagctaggccaatgaaggctgaatcaaagacatttcatccaccaatatcatgtgtaga

SEQ ID NO: 19980 - DNA, 120 bp, Artificial Sequence
  ENSG00000022355_30 (sequence is synthesized)
tattatgtatagaaaataaaataaattatggctctaacttctgtgttgctgtttatcttgttatttttcggcgttatactaatgtgtttattgagagcattttaccttccagacttctca

SEQ ID NO: 19981 - DNA, 120 bp, Artificial Sequence
  ENSG00000022355_31 (sequence is synthesized)
tggctaacttttggtctgtattttgctccttagatgtgaatatttcttattagtctgcttcctgctacgcaatgactgcatttctatcatttctcagtttgttagtatatgtggatagta

SEQ ID NO: 19982 - DNA, 120 bp, Artificial Sequence
  ENSG00000022355_32 (sequence is synthesized)
ttctactgtataaatgattgcaaagtttatcaaaaacaaattattatatgtagcttttctacagtgctttgctaaaccatgtagtactagttaagtcttccttgaaaataaagatacact

SEQ ID NO: 19983 - DNA, 120 bp, Artificial Sequence
  ENSG00000022355_33 (sequence is synthesized)
cttataggggacagttcctgttcactcccaggaaacttttttaaaagatgacactgaatgtttattgcactttagtgcagtgaagtggcaataaaacctaacatgaatcaaggttgttta

SEQ ID NO: 19984 - DNA, 120 bp, Artificial Sequence
  ENSG00000022355_34 (sequence is synthesized)
tggcagatgcatgtgttgctttacagagtttagcaaaagctcttaattttatgtcatactgtattctactgaataataaagctaacattattcaataataaaatggaatacttgactctc

SEQ ID NO: 19985 - DNA, 120 bp, Artificial Sequence
  ENSG00000022355_35 (sequence is synthesized)
gggagagaggcgagacgagtgctctccccacacgtgtaaccctgcatctcccagtttcagagcttgcgttcattcatatgcaggcagtggtttaatatttgatcaaagctgcagattgga

SEQ ID NO: 19986 - DNA, 88 bp, Artificial Sequence
  ENSG00000022355_36 (sequence is synthesized)
gagagacaggaatgttatagtagagagagagagagaagaaggagagcgagcgagcgagcaagggagcgagcaggacaggagcctgatc

SEQ ID NO: 19987 - DNA, 120 bp, Artificial Sequence
  ENSG00000022355_37 (sequence is synthesized)
atgagagagaaaagagggggaagatggttcaaagatacaagaaaaagtagaaaaaaaaataacacttaactaaaacccctaggtcatttgtagatatatatttccaaatattctaaaaaa

SEQ ID NO: 19988 - DNA, 120 bp, Artificial Sequence
  ENSG00000022355_38 (sequence is synthesized)
aaatgtttttctttcagggtgaaaccgcagcaatataagagcattattattatttttttcccgctgtctttcttcttttcttctcctctttcttaggcatatttgaatgtattccgcagg

SEQ ID NO: 19989 - DNA, 120 bp, Artificial Sequence
  ENSG00000022355_39 (sequence is synthesized)
tgtgtgtgtgtgtgtgtgtgtggtttgtatgtgagagagatcagcacatggcttgactataaagtgtgtcctttagcttcacagaaacattaggaagcatgtttaacaaagcagtcacag

SEQ ID NO: 19990 - DNA, 120 bp, Artificial Sequence
  ENSG00000022355_40 (sequence is synthesized)
attcacaaaatccgaggaggaaaccaagtcatccctgattccttggaaatttagttagactgatgttgaaacacacccccctttcctagtgtataattatttgtgggtggagagctacca

SEQ ID NO: 19991 - DNA, 120 bp, Artificial Sequence
  ENSG00000022355_41 (sequence is synthesized)
agcttaaaaattttaatgcacagttcactgtggaaactgaaatcttaaaagtccaaatatttagatgataaacaacaagaagagaataaaccaaactatattctaaatataaaacctaga

SEQ ID NO: 19992 - DNA, 120 bp, Artificial Sequence
  ENSG00000022355_42 (sequence is synthesized)
gataaacaactcacagtttttatgttgagcaatactgtcacctgaaagcgtttcagcttgtattcttttacaggagaataaggacactgatatatttctgaatggagaaatggaagggaa

SEQ ID NO: 19993 - DNA, 120 bp, Artificial Sequence
  ENSG00000022355_43 (sequence is synthesized)
atatttctgaatggagaaatggaagggaaagtggagaatggatggtccaggtttccattgcttccaatgaggtgtcatatcccagtgaggtcatttcctgacttcaaagcattcatctaa

SEQ ID NO: 19994 - DNA, 120 bp, Artificial Sequence
  ENSG00000022355_44 (sequence is synthesized)
agtggacgctggtgaaatgccctcttgtgtaggggtctctcccattctgaacacgaaaactcaacttagtctttgatatggatggcatgggatggagaataaggacactgatatatttct

SEQ ID NO: 19995 - DNA, 120 bp, Artificial Sequence
  ENSG00000022355_45 (sequence is synthesized)
ggaaggcacgctcttgtcctggctgcaaaattgcctgtttttccctttccagtggacgctggtgaaatgccctcttgtgtaggggtctctcccattctgaacacgaaaactcaacttagt

SEQ ID NO: 19996 - DNA, 120 bp, Artificial Sequence
  ENSG00000022355_46 (sequence is synthesized)
gggagtgtgtgtgtgagggagagaggcgagacgagtgctctccccacacgtgtaaccctgcatctcccagtttcagagcttgcgttcattcatatgcaggcagtggtttaatatttgatc

SEQ ID NO: 19997 - DNA, 120 bp, Artificial Sequence
  ENSG00000022355_47 (sequence is synthesized)
aaaggtagaatagttgcactaaatagttgtatttttaatgggctcaccttaaaatcgggtgttcataaattgcaagtgtgaaaagactctaagtgcagtccgtatgtctctcaccctttc

SEQ ID NO: 19998 - DNA, 120 bp, Artificial Sequence
  ENSG00000022355_48 (sequence is synthesized)
tacccttccctcccccattgccgctccccccaaaaagagaagcttgcagcagattgtagaaggatttgagcctgcagctagagagaaggggattagggccagagtggtgcaagttaaatt

SEQ ID NO: 19999 - DNA, 120 bp, Artificial Sequence
  ENSG00000022355_49 (sequence is synthesized)
gtgctgcatataaaaaatgggcggattggtctccagatccagaggctggtaccaccttcctttctaaaataaaatctctctggcatgaagtcaccgcctatttcacatccggtttgccct

SEQ ID NO: 20000 - DNA, 120 bp, Artificial Sequence
  ENSG00000022355_50 (sequence is synthesized)
aaaatttggaagtttcaaactggtcttcctcaaactagtcaagcttttgcctgcaatagaagaaaacacttgggaggctgagacaggaggattacttgaacccgggaggcggaaattgca

SEQ ID NO: 20001 - DNA, 87 bp, Artificial Sequence
  ENSG00000022355_51 (sequence is synthesized)
aagagtgaaactgcatgtagaaggagaaggagaaggagaaggaggggcagggggagggggaggaggaggaggaggagaaggagaagg

SEQ ID NO: 20002 - DNA, 120 bp, Artificial Sequence
  ENSG00000022355_52 (sequence is synthesized)
ggagaaggagaaggagaagaagaagaagacacttgttagtttgtctattggacaaactcttccccaagattttcacatgcatctgccatgtatttgtataaatgttacctcctcagagac

SEQ ID NO: 20003 - DNA, 120 bp, Artificial Sequence
  ENSG00000022355_53 (sequence is synthesized)
tgtatttgtataaatgttacctcctcagagacgactctgtctgagccccttaccttacttaggataagtctccatcccttcattctctatccttttactcggttgtgtatgactctatca

SEQ ID NO: 20004 - DNA, 120 bp, Artificial Sequence
  ENSG00000022355_54 (sequence is synthesized)
cacttatctctacttgaaattacatacgtatttgcttatatgtttttgtccccactgctacaatgcatattccataagataaagaacatttgttcttatattcactactgtatccccagc

SEQ ID NO: 20005 - DNA, 120 bp, Artificial Sequence
  ENSG00000022355_55 (sequence is synthesized)
acagtattttgtcctttgtagatccttataaccatttgttggaagagtgaataaatgactaaaaaaaaaaaatcagaaaacgtgttttagtttttgtaaattaagggacataagctcatc

SEQ ID NO: 20006 - DNA, 120 bp, Artificial Sequence
  ENSG00000022355_56 (sequence is synthesized)
tttcctagcctgccctctggaaccatgatatagaaaatatgaagctgatgaaaggtaccaactaaataagagaattgaagtggtaaaatatatggatcattttctactgtttccttttag

SEQ ID NO: 20007 - DNA, 120 bp, Artificial Sequence
  ENSG00000022355_57 (sequence is synthesized)
atgagatgttttggcctgtggtattggatggagtatgcagaataataaggattctttttttcttatgtcgtaaacaattaagtgccatgataattttgttattgataaagggagaggtca

SEQ ID NO: 20008 - DNA, 120 bp, Artificial Sequence
  ENSG00000022355_58 (sequence is synthesized)
tttaggtgaatagatgtacaaagtggaggagataaaggagagtcaggaaggcaaacatttctagtcaaataggctttcctgtggtttctattgatttgagaacagttttaatgaacctga

SEQ ID NO: 20009 - DNA, 120 bp, Artificial Sequence
  ENSG00000022355_59 (sequence is synthesized)
tattaggagcaaataaacttagtcaaatcctttatttaccaagtgcgttataattttataacttgaaagttatattcttttggttgttttctgagcctaatcatttggtcataaatgtat

SEQ ID NO: 20010 - DNA, 120 bp, Artificial Sequence
  ENSG00000022355_60 (sequence is synthesized)
aaccataatgcctcaattaaattaagtttgccacatgaaccatccctagttctctgcaaagtcaagggcaggcacattttctctttccaaaatagacatatgctttagggatcataacac

SEQ ID NO: 20011 - DNA, 120 bp, Artificial Sequence
  ENSG00000022355_61 (sequence is synthesized)
acagaaattaccaagaaatgcctcatggtagaaaatgttcaagttaagaatactgctgcttctctcaattagaacctattacacagtatggattttatgtcacagcttgggaggatagct

SEQ ID NO: 20012 - DNA, 120 bp, Artificial Sequence
  ENSG00000022355_62 (sequence is synthesized)
gtgtttgtggggtttgaagaacaagcgtgacaaaatgcaagtaagctttgggatgctgtgatgaagagcaaagacagagacaaagagattttaagatgtttagaaataatctagaaggag

SEQ ID NO: 20013 - DNA, 120 bp, Artificial Sequence
  ENSG00000022355_63 (sequence is synthesized)
tcacttgacataagcttttctgaaactttattctatagaatattagtttcttaagatactctctgaaaatttagttctttgttgatgcccacttgaatattgctgcatactgtatttcct

SEQ ID NO: 20014 - DNA, 120 bp, Artificial Sequence
  ENSG00000022355_64 (sequence is synthesized)
ggtcacagcatattaaaggggctaagaaattctgtagtaaataaactggcttaactgtgtttatcccatagttaaacaaatgcattagataagaaaatcctctgtagtggtaacatctac

SEQ ID NO: 20015 - DNA, 120 bp, Artificial Sequence
  ENSG00000022355_65 (sequence is synthesized)
cttatttaataaaatctaaggtgttgtacttcttgatggcaaaaggctattaaatactgcctgcatttttaatttattataataagacaggcataaattatgtttttaaattcctaaata

SEQ ID NO: 20016 - DNA, 120 bp, Artificial Sequence
  ENSG00000022355_66 (sequence is synthesized)
aggcacagatttaggctgcaaaataagggccaccttgctcagcaacttataattttgcttctcactgtttactaaacaaaatgcattgctctttctttctacagccaaagaaagtaaagg

SEQ ID NO: 20017 - DNA, 120 bp, Artificial Sequence
  ENSG00000022355_67 (sequence is synthesized)
gtctgtctgactgtctttgggcctggatcctccttctgagcacactgactggaagaagaacatcaagaaaatcccaccaaaacacagacctatatgaagtgaatgaaggaaaggatgttg

SEQ ID NO: 20018 - DNA, 120 bp, Artificial Sequence
  ENSG00000022556_0 (sequence is synthesized)
aatcacagggctgcggccgagagagaagccttattagagctttctcaacctgcagccctcatctccgccggcgagtagggccaggtgttgggagctcccacgtgggacaagatggtgtct

SEQ ID NO: 20019 - DNA, 120 bp, Artificial Sequence
  ENSG00000022556_1 (sequence is synthesized)
tcggcgcagatgggcttcaacctgcaggctctcctggagcagctcagccaggatgagttgagcaagttcaagtatctgatcacgaccttctccctggcacacgagctccagaagatcccc

SEQ ID NO: 20020 - DNA, 120 bp, Artificial Sequence
  ENSG00000022556_2 (sequence is synthesized)
cacaaggaggtagacaaggctgatgggaagcaactggtagaaatcctcaccacccattgtgacagctactgggtggagatggcgagcctccaggtctttgaaaagatgcaccgaatggat

SEQ ID NO: 20021 - DNA, 120 bp, Artificial Sequence
  ENSG00000022556_3 (sequence is synthesized)
ctgtctgagagagcaaaggatgaagtcagagaagcagctttgaaatcctttaataaaaggaagcctctatcattagggataacacggaaagaacgaccacctctagacgtggacgaaatg

SEQ ID NO: 20022 - DNA, 120 bp, Artificial Sequence
  ENSG00000022556_4 (sequence is synthesized)
ctggagcgcttcaaaacagaagcacaagcgtttacagaaacgaaaggaaatgtcatctgcctgggtaaagaagtctttaaaggaaaaaagccagacaaagacaataggtgcaggtatata

SEQ ID NO: 20023 - DNA, 120 bp, Artificial Sequence
  ENSG00000022556_5 (sequence is synthesized)
ttgaagacgaagttccgggagatgtggaagagctggcctggagatagcaaagaggtccaggttatggctgagagatacaagatgctgatcccattcagcaaccccagggtgcttcccggg

SEQ ID NO: 20024 - DNA, 120 bp, Artificial Sequence
  ENSG00000022556_6 (sequence is synthesized)
cccttctcatacacggtggtgctgtatggtcctgcaggccttgggaaaaccacgctggcccagaaactaatgctagactgggcagaggacaacctcatccacaaattcaaatatgcgttc

SEQ ID NO: 20025 - DNA, 120 bp, Artificial Sequence
  ENSG00000022556_7 (sequence is synthesized)
tacctcagctgcagggagctcagccgcctgggcccgtgcagttttgcagagctggtcttcagggactggcctgaattgcaggatgacattccacacatcctagcccaagcacggaaaatc

SEQ ID NO: 20026 - DNA, 120 bp, Artificial Sequence
  ENSG00000022556_8 (sequence is synthesized)
ttgttcgtgattgacggctttgatgagctgggagccgcacctggggcgctgatcgaggacatctgcggggactgggagaagaagaagccggtgcccgtcctcctggggagtttgctgaac

SEQ ID NO: 20027 - DNA, 120 bp, Artificial Sequence
  ENSG00000022556_9 (sequence is synthesized)
agggtgatgttacccaaggccgccctgctggtcaccacgcggcccagggccctgagggacctccggatcctggcggaggagccgatctacataagggtggagggcttcctggaggaggac

SEQ ID NO: 20028 - DNA, 120 bp, Artificial Sequence
  ENSG00000022556_10 (sequence is synthesized)
aggagggcctatttcctgagacactttggagacgaggaccaagccatgcgtgcctttgagctaatgaggagcaacgcggccctgttccagctgggctcggcccccgcggtgtgctggatc

SEQ ID NO: 20029 - DNA, 120 bp, Artificial Sequence
  ENSG00000022556_11 (sequence is synthesized)
gtgtgcacgactctgaagctgcagatggagaagggggaggacccggtccccacctgcctcacccgcacggggctgttcctgcgtttcctctgcagccggttcccgcagggcgcacagctg

SEQ ID NO: 20030 - DNA, 120 bp, Artificial Sequence
  ENSG00000022556_12 (sequence is synthesized)
cggggcgcgctgcggacgctgagcctcctggccgcgcagggcctgtgggcgcagacgtccgtgcttcaccgagaggatctggaaaggctcggggtgcaggagtccgacctccgtctgttc

SEQ ID NO: 20031 - DNA, 120 bp, Artificial Sequence
  ENSG00000022556_13 (sequence is synthesized)
ctggacggagacatcctccgccaggacagagtctccaaaggctgctactccttcatccacctcagcttccagcagtttctcactgccctgttctacaccctggagaaggaggaggaagag

SEQ ID NO: 20032 - DNA, 120 bp, Artificial Sequence
  ENSG00000022556_14 (sequence is synthesized)
agactcaggaaccccgacctgatccaagcaggctactactcctttggcctcgctaacgagaagagagccaaggagttggaggccacttttggctgccggatgtcaccggacatcaaacag

SEQ ID NO: 20033 - DNA, 120 bp, Artificial Sequence
  ENSG00000022556_15 (sequence is synthesized)
gaattgctgcgatgcgacataagttgtaagggtggacattcaacggtgacagacctgcaggagctcctcggctgtctgtacgagtctcaggaggaggagctggtgaaggaggtgatggct

SEQ ID NO: 20034 - DNA, 120 bp, Artificial Sequence
  ENSG00000022556_16 (sequence is synthesized)
cagttcaaagaaatatccctgcacttaaatgcagtagacgttgtgccatcttcattctgcgtcaagcactgtcgaaacctgcagaaaatgtcactgcaggtaataaaggagaatctcccg

SEQ ID NO: 20035 - DNA, 120 bp, Artificial Sequence
  ENSG00000022556_17 (sequence is synthesized)
gagaatgtcactgcgtctgaatcagacgccgaggttgagagatcccaggatgatcagcacatgcttcctttctggacggacctttgttccatatttggatcaaataaggatctgatgggt

SEQ ID NO: 20036 - DNA, 120 bp, Artificial Sequence
  ENSG00000022556_18 (sequence is synthesized)
ctagcaatcaatgatagctttctcagtgcctccctagtaaggatcctgtgtgaacaaatagcctctgacacctgtcatctccagagagtggtgttcaaaaacatttccccagctgatgct

SEQ ID NO: 20037 - DNA, 120 bp, Artificial Sequence
  ENSG00000022556_19 (sequence is synthesized)
catcggaacctctgcctagctcttcgaggtcacaagactgtaacgtatctgacccttcaaggcaatgaccaggatgatatgtttcccgcattgtgtgaggtcttgagacatccagaatgt

SEQ ID NO: 20038 - DNA, 120 bp, Artificial Sequence
  ENSG00000022556_20 (sequence is synthesized)
aacctgcgatatctcgggttggtgtcttgttccgctaccactcagcagtgggctgatctctccttggcccttgaagtcaaccagtccctgacgtgcgtaaacctctccgacaatgagctt

SEQ ID NO: 20039 - DNA, 120 bp, Artificial Sequence
  ENSG00000022556_21 (sequence is synthesized)
ctggatgagggtgctaagttgctgtacacaactttgagacaccccaagtgctttctgcagaggttgtcgttggaaaactgtcaccttacagaagccaattgcaaggaccttgctgctgtg

SEQ ID NO: 20040 - DNA, 120 bp, Artificial Sequence
  ENSG00000022556_22 (sequence is synthesized)
ttggttgtcagccgggagctgacacacctgtgcttggccaagaaccccattgggaatacaggggtgaagtttctgtgtgagggcttgaggtaccccgagtgtaaactgcagaccttggtg

SEQ ID NO: 20041 - DNA, 120 bp, Artificial Sequence
  ENSG00000022556_23 (sequence is synthesized)
ctttggaactgcgacataactagcgatggctgctgcgatctcacaaagcttctccaagaaaaatcaagcctgttgtgtttggatctggggctgaatcacataggagttaagggaatgaag

SEQ ID NO: 20042 - DNA, 120 bp, Artificial Sequence
  ENSG00000022556_24 (sequence is synthesized)
ttcctgtgtgaggctttgaggaaaccactgtgcaacttgagatgtctgtggttgtggggatgttccatccctccgttcagttgtgaagacctctgctctgccctcagctgcaaccagagc

SEQ ID NO: 20043 - DNA, 120 bp, Artificial Sequence
  ENSG00000022556_25 (sequence is synthesized)
ctcgtcactctggacctgggtcagaatcccttggggtctagtggagtgaagatgctgtttgaaaccttgacatgttccagtggcaccctccggacactcaggttgaaaatcgatgacttt

SEQ ID NO: 20044 - DNA, 120 bp, Artificial Sequence
  ENSG00000022556_26 (sequence is synthesized)
aatgatgaactcaataagctgctggaagaaatagaagaaaaaaacccacaactgattattgatactgagaaacatcatccctgggcagaaaggccttcttctcatgacttcatgatctga

SEQ ID NO: 20045 - DNA, 120 bp, Artificial Sequence
  ENSG00000022556_27 (sequence is synthesized)
atccccccgagtcattcattctccatgaagtcatcgattttccaggtgttggtgaactgcctgtgactcctctcctccccggcccctacccctcagggataatgagttcattgctgggct

SEQ ID NO: 20046 - DNA, 120 bp, Artificial Sequence
  ENSG00000022556_28 (sequence is synthesized)
agatgttttagccatgattctgcctctgttttatacctgcacacatccttatctttgttacatatgaaatatctgtatcacgggtatattgagagaaataaaggtgagagcattcacaaa

SEQ ID NO: 20047 - DNA, 120 bp, Artificial Sequence
  ENSG00000022556_29 (sequence is synthesized)
tacagagcagctgtgctttcgatctggggccacagacgagcaatggtcatgcctgacttggctgtatggaacctctcgctgatgtgaacacctgttcccatgtttagatccaggccgatg

SEQ ID NO: 20048 - DNA, 82 bp, Artificial Sequence
  ENSG00000022556_30 (sequence is synthesized)
aaactcctcagacaccgagttaaagaagaaaggggtttatccggccaggggcatcggcaagactcccgtctcaagagccgag

SEQ ID NO: 20049 - DNA, 120 bp, Artificial Sequence
  ENSG00000022556_31 (sequence is synthesized)
aaaaaaaaaaaaaaaaagtttctatacattcataaagtttcaagatttgggggtgtgttttcacttctccatcgtcatggactccaatctgccatctatttccaaggcccttccaggtcc

SEQ ID NO: 20050 - DNA, 120 bp, Artificial Sequence
  ENSG00000022556_32 (sequence is synthesized)
tgtgtccctcagctagtggtatgcttcacttgggacccagagatacatgggcattatagttcaaattataattaagtttagaactctattgagacagaagaaagaaaacagagctaaggt

SEQ ID NO: 20051 - DNA, 120 bp, Artificial Sequence
  ENSG00000022556_33 (sequence is synthesized)
gaaatatctctgataatctgtgttggttaatatctaggatcctagtaccagatatgttggagtgtgagctggtgtcttctgcctgtaagacactacctctctagcaactgaatttagcaa

SEQ ID NO: 20052 - DNA, 77 bp, Artificial Sequence
  ENSG00000022556_34 (sequence is synthesized)
gcctgtaagacactacctctctagcaactgaatttagcaaatacaatcgtaatcccagcatgttagggaggccaggg

SEQ ID NO: 20053 - DNA, 120 bp, Artificial Sequence
  ENSG00000022556_35 (sequence is synthesized)
agctgggtgtggtggcacgcgcatgtgtgtacacacacacacccccctgtaatcccagctactcggaaggctggggcacaagaatcgcgtgaaaccaggaggcggaggttgaagtgagcc

SEQ ID NO: 20054 - DNA, 120 bp, Artificial Sequence
  ENSG00000022556_36 (sequence is synthesized)
accgtgccagctgagaatcctttttacttctccaacttctgttggccacctgcattccttggcttgtggcccttcctccaacttcggcagagcatcttcaaacgttgccctggctccctt

SEQ ID NO: 20055 - DNA, 120 bp, Artificial Sequence
  ENSG00000022556_37 (sequence is synthesized)
atcacgtcacctcctgctggctttgactctcagctccctcttatgaggatccctgtgattgctggacctacccaaataaaccaggatataaaccatcttaagatgctcagtcacctctac

SEQ ID NO: 20056 - DNA, 120 bp, Artificial Sequence
  ENSG00000022556_38 (sequence is synthesized)
atttccatgtcaccactgtctctaagtgtgtctaacccacggctcaagagtcaaaggtgcatcacagcagtgagaactcacaggttcgggtttgctttcttcctgtggttgatttctagg

SEQ ID NO: 20057 - DNA, 80 bp, Artificial Sequence
  ENSG00000022556_39 (sequence is synthesized)
caatgtagcaggaccaaggggtttatccggccaggggcatcggcaagactcccgtctcaagagccgagatccccaactcc

SEQ ID NO: 20058 - DNA, 120 bp, Artificial Sequence
  ENSG00000022556_40 (sequence is synthesized)
ctgtgtgagggcttgaggtaccccgagtgtaaactgcagaccttggtgtaagtccgtgctggctgcctgtgtgcgtgggtgtatatgcacacgccccccacctccgggtttgagtagggt

SEQ ID NO: 20059 - DNA, 120 bp, Artificial Sequence
  ENSG00000022556_41 (sequence is synthesized)
ggttatgagaacacttaattcctctaaaagttccaagcatgatgctaatgacaactggtaagacctgggtagatgatggtaggaaaaaagtataagtagtagtagagtagtagtaatatt

SEQ ID NO: 20060 - DNA, 120 bp, Artificial Sequence
  ENSG00000022556_42 (sequence is synthesized)
aaagtgctagaattacaggcatgagccatgtcaccccatgctgtgttttctcttaatctgtgttcttagaactataactgtaacataaattgcatgcaattggttgtaaatggaattcat

SEQ ID NO: 20061 - DNA, 120 bp, Artificial Sequence
  ENSG00000022556_43 (sequence is synthesized)
ataaattgcatgcaattggttgtaaatggaattcatttacttattttttaatgaatgatttgcaaatcagctgagatggcaccactgaagtccagtctggccaatagagcaagactctct

SEQ ID NO: 20062 - DNA, 89 bp, Artificial Sequence
  ENSG00000022556_44 (sequence is synthesized)
gatctgtctgagagagcaaaggatgaagtcagagaagcagctttgaaatcctttaataaaaggaagcctctatcattaggctgatctcc

SEQ ID NO: 20063 - DNA, 120 bp, Artificial Sequence
  ENSG00000022556_45 (sequence is synthesized)
agtagctgggacttacagggataacacggaaagaacgaccacctctagacgtggacgaaatgctggagcgcttcaaaacagaagcacaagcgtttacagaaacgaaaggaaatgtcatct

SEQ ID NO: 20064 - DNA, 81 bp, Artificial Sequence
  ENSG00000022556_46 (sequence is synthesized)
acaaagaagattgtgctaaggcttgagtgccttgagcccaactgcagatctaagaatgctggctattaaaagatacaagca

SEQ ID NO: 20065 - DNA, 120 bp, Artificial Sequence
  ENSG00000022556_47 (sequence is synthesized)
agaatgtaacctgcgatatctcggctgattcctgggcgatgttggtgccactggtctgaccaccctttgacaactgctgctccagataattcaagtcggggtataacacaaccagtgaga

SEQ ID NO: 20066 - DNA, 120 bp, Artificial Sequence
  ENSG00000022567_0 (sequence is synthesized)
tgatagggcagagaggagcccatgctccagctgcggggagtgcctgcccgaggagctggccagtgaagacaggtgcctgccagtgaagacaggtgcccacaagctggacacagggtcggc

SEQ ID NO: 20067 - DNA, 120 bp, Artificial Sequence
  ENSG00000022567_1 (sequence is synthesized)
cctgagacaggacagcagctgcggaatgttcccgctggctttctggagcgccagcgtcctgcttgggtctggccaggggcctctagccaggctgttgaggcgcccctccttgttgaagag

SEQ ID NO: 20068 - DNA, 120 bp, Artificial Sequence
  ENSG00000022567_2 (sequence is synthesized)
gagaaacagtggccccctgggagttgctgggaggtgcctggcacagggcggcagggacagcatcatctatggggaaagcaagcccagcctcagggctgtcccgtccaaagacccttgtga

SEQ ID NO: 20069 - DNA, 120 bp, Artificial Sequence
  ENSG00000022567_3 (sequence is synthesized)
gtccactgaggtcaaatcaatggagtcttcagaaaggccttccggagcagtactacagcctcacctggttcctgagccccatccttggcctcatcttcacacctctcattgggtctgcga

SEQ ID NO: 20070 - DNA, 120 bp, Artificial Sequence
  ENSG00000022567_4 (sequence is synthesized)
gtgaccggtgcaccctgagctggggccgccggcggcccttcatcctcgccctctgcgttggcgtcctctttggcgttgcacttttccttaacggctctgccatcggtctggccctcggcg

SEQ ID NO: 20071 - DNA, 120 bp, Artificial Sequence
  ENSG00000022567_5 (sequence is synthesized)
atgtccccaaccggcagcccattggcatcgtgctcacggtgctgggagtggtggtcctggacttcagcgccgatgccaccgaggggcccatccgtgcctatctgctggacgtggtggaca

SEQ ID NO: 20072 - DNA, 120 bp, Artificial Sequence
  ENSG00000022567_6 (sequence is synthesized)
gcgaggagcaggacatggccctcaacatccacgccttctctgccggcctcggcggagccatcggctacgtgctgggtgggctggactggacccagaccttcctgggcagctggttccgga

SEQ ID NO: 20073 - DNA, 120 bp, Artificial Sequence
  ENSG00000022567_7 (sequence is synthesized)
cccagaaccaggtgctcttcttctttgccgccatcatcttcacggtgtccgtggccctgcacctgttcagcatcgacgaggagcagtacagcccgcagcaggagcgcagcgctgaggagc

SEQ ID NO: 20074 - DNA, 120 bp, Artificial Sequence
  ENSG00000022567_8 (sequence is synthesized)
ccggcgccctggatgggggcgagccgcacggcgtccctgccttcccagacgaggtacagtcggagcacgagctggccctggactacccggacgtggacatcatgcgcagcaaaagcgact

SEQ ID NO: 20075 - DNA, 120 bp, Artificial Sequence
  ENSG00000022567_9 (sequence is synthesized)
cggcattgcacgtgccggacaccgcgctggacctggagcccgagctgctgttcctgcacgacatcgagccctccatcttccacgacgcctcctaccccgccaccccccgcagcaccagcc

SEQ ID NO: 20076 - DNA, 120 bp, Artificial Sequence
  ENSG00000022567_10 (sequence is synthesized)
aggagctcgccaagaccaagctgccccgcctggccaccttcctcaaggaagccgccaaggaggacgagaccttgctggataatcacttgaatgaagctaaagtcccaaacggaagtggct

SEQ ID NO: 20077 - DNA, 120 bp, Artificial Sequence
  ENSG00000022567_11 (sequence is synthesized)
cccccacaaaagacgccctcggcggctacaccagggtggacacgaagccctcggccacgtcgagctccatgcggcggcggcggcacgcgttccgcaggcaggcctccagcaccttctcct

SEQ ID NO: 20078 - DNA, 120 bp, Artificial Sequence
  ENSG00000022567_12 (sequence is synthesized)
actacggcaagcttgggtcccactgctaccgctaccggcgcgccaacgccgtggtgctgatcaagccgtcgcgcagcatgagcgacctgtacgacatgcagaagcggcagcggcagcacc

SEQ ID NO: 20079 - DNA, 120 bp, Artificial Sequence
  ENSG00000022567_13 (sequence is synthesized)
ggcaccggaaccagagcggggccaccacctccagcggggacaccgagagtgaggagggggagggcgagaccacggtgcgcctgctgtggctctccatgctgaagatgcccagggagctga

SEQ ID NO: 20080 - DNA, 120 bp, Artificial Sequence
  ENSG00000022567_14 (sequence is synthesized)
acttcatgggccaggtcatcttcgaaggcgaccccaaggccccctcgaactcgaccgcctggcaagcctacaacgccggggtcaagatgggctgctggggcctggtcatttatgccgcca

SEQ ID NO: 20081 - DNA, 120 bp, Artificial Sequence
  ENSG00000022567_15 (sequence is synthesized)
ctggtgctatttgttcagccctgttacagaagtacttggacaactacgacctgagcgtcagggtgatctacgtgctggggacgctgggcttctctgtcggcacagccgtgatggccatgt

SEQ ID NO: 20082 - DNA, 120 bp, Artificial Sequence
  ENSG00000022567_16 (sequence is synthesized)
ttcccaacgtctacgtcgccatggtcaccatcagcaccatgggcatcgtctccatgagcatctcctactgcccgtacgccctgctgggccagtaccatgacatcaagcagtacatccacc

SEQ ID NO: 20083 - DNA, 120 bp, Artificial Sequence
  ENSG00000022567_17 (sequence is synthesized)
acagccccgggaactccaagcgagggtttggcatagattgtgccatcctgtcctgccaagtgtacatctcgcagatcctggtggcctctgcccttgggggcgtggtcgacgccgtgggga

SEQ ID NO: 20084 - DNA, 120 bp, Artificial Sequence
  ENSG00000022567_18 (sequence is synthesized)
ctgtccgcgtcatccccatggtggcctctgtgggctctttcctgggcttcctgacggccacattcctggtgatctatcccaacgtgtcagaggaggccaaggaggagcagaaaggcctgt

SEQ ID NO: 20085 - DNA, 120 bp, Artificial Sequence
  ENSG00000022567_19 (sequence is synthesized)
cttccccgttggccggcgaaggcagggccggtgggaacagcgaaaagcccaccgtgctgaagctcacgcggaaggagggcctgcagggaccggtggagacagaacgcctgcaggtattga

SEQ ID NO: 20086 - DNA, 120 bp, Artificial Sequence
  ENSG00000022567_20 (sequence is synthesized)
cgtctgtcagatctcgtcacattggctggtgccgcagctgttggagagtatttttctttatgattattttagaaaaaaaattttcttttccacaatgtggttctcttagaagaatgacgt

SEQ ID NO: 20087 - DNA, 120 bp, Artificial Sequence
  ENSG00000022567_21 (sequence is synthesized)
atcttcttttcctcagcgagttggacacattgtgcccagggcagccctgtccttgggcagcgaccgcacaccaaagctgggaggaggctggtccggggggcctgggcagaagacagtgat

SEQ ID NO: 20088 - DNA, 120 bp, Artificial Sequence
  ENSG00000022567_22 (sequence is synthesized)
ttgcaggggtggctcccagacaccctgcccagggatgggctgggcaccacctgggggcggagcgtgagctccagacgagctcctgcgtgcgcgtgtgagtgtgtctgcgcccagccatgt

SEQ ID NO: 20089 - DNA, 120 bp, Artificial Sequence
  ENSG00000022567_23 (sequence is synthesized)
gaccccgctcgtcccgtctgaaggactctcctaggaggccaggttgcccctccagaccgctcccaacgtcagggggaaggaaacgttgactttcactgcactttgattcgtctctaaacc

SEQ ID NO: 20090 - DNA, 120 bp, Artificial Sequence
  ENSG00000022567_24 (sequence is synthesized)
atttgctggggattcctgagagcagagctcccagcgggccctgcctcccaagtcccgccgcaaggctacctcgggtgtgtggatgtgcgagggcctcccccgcttgcgaaggggacatgc

SEQ ID NO: 20091 - DNA, 120 bp, Artificial Sequence
  ENSG00000022567_25 (sequence is synthesized)
gtgctggaacctgtcggaactccatgccttcctcgcctgctcacctgctcgacgctggaatcgggacaggtgcaaagggacgcagacgtctgggacagctaaggcccgtgtcaccggagg

SEQ ID NO: 20092 - DNA, 120 bp, Artificial Sequence
  ENSG00000022567_26 (sequence is synthesized)
gctccgcacagtcgttctggtttcaacgaataagcaaaactcgggcaagtactgcagctatttggaaatgttttccaaaccacagtctctttagaactaagcctatttgaaacggtcggt

SEQ ID NO: 20093 - DNA, 120 bp, Artificial Sequence
  ENSG00000022567_27 (sequence is synthesized)
gtaggcttactgagatcaggagacagggaggccccgcacatcacacagataaagtcagacaattgtaattaatacttttgctgcctcaagttgttttttaaataaagtactttgaaatgc

SEQ ID NO: 20094 - DNA, 120 bp, Artificial Sequence
  ENSG00000022567_28 (sequence is synthesized)
atgagaatcatgctgcaatatgatcattctagagcaaatatatatatacacgtatatatatttcaagatgaaactaaagcagtttttaaataaattacttgaattttctgtgtatttaaa

SEQ ID NO: 20095 - DNA, 80 bp, Artificial Sequence
  ENSG00000022567_29 (sequence is synthesized)
ggccgcagcctcgcagcgctctctccgcgcccgcgtcgctgactgaccgcccggccggccggccgagggagcagcccccg

SEQ ID NO: 20096 - DNA, 120 bp, Artificial Sequence
  ENSG00000022567_30 (sequence is synthesized)
gctccgcgcccccgtagcccctgcccggcccggcccggccgccccgccgcccccgcggccccggccggaggagacagatcatccagtcactcgatggggattaccagcggaccacctgtt

SEQ ID NO: 20097 - DNA, 120 bp, Artificial Sequence
  ENSG00000022567_31 (sequence is synthesized)
tgtatcaccttcccacctctctgtagcaagaaaaatcacttcagcacctcttcagtaataatgatgaaactggtattaactgaatggcaattatggatttttaactctaattcacagtaa

SEQ ID NO: 20098 - DNA, 120 bp, Artificial Sequence
  ENSG00000022567_32 (sequence is synthesized)
aagccatatgtttaaaatccaaccaaaaatcgttctgtgttgctgcatgtctcataccgttgtgagaagttgtgagatagccacttgtgcaaagaggaatgtaagtgttacctgcccgag

SEQ ID NO: 20099 - DNA, 120 bp, Artificial Sequence
  ENSG00000022567_33 (sequence is synthesized)
gaacacagcagaagcagaaagagaagacgtcttaatttatcattacagatatatgaaagcattatttatatagatagaatatatagataaatacatatatttttggtggtaatgaaaatg

SEQ ID NO: 20100 - DNA, 120 bp, Artificial Sequence
  ENSG00000022567_34 (sequence is synthesized)
gctccgcagaatgccgacccggaatctatgcaagttcaagagttatccgtgcccctgccggacccgcagaaagccggaggcgcagaggccgagaactgcgagaccatcagcgaggggtcc

SEQ ID NO: 20101 - DNA, 120 bp, Artificial Sequence
  ENSG00000022567_35 (sequence is synthesized)
ctgagaggctttctgatggaagggcggggacttcaggagcggccctcccttgttgagatggggtgctctgacagcacctttaactttaaagacctccagggcccagccctgacagccaca

SEQ ID NO: 20102 - DNA, 120 bp, Artificial Sequence
  ENSG00000022567_36 (sequence is synthesized)
gtgggtcttatttgagtcggtgatgcagaaacagaggcctgtgcttcttcagcttctgggaaacctacttccaagagtctactcaccgggccggctgtgttgtggaaaatagtctaatgc

SEQ ID NO: 20103 - DNA, 120 bp, Artificial Sequence
  ENSG00000022567_37 (sequence is synthesized)
aggccatgggcgggagcagagacaccgcggaaccctgcagatgctgtggccgacccggcagtgcgggccagagcccctccgcccccatagccacaattcagtagtcgtagggtaggtttg

SEQ ID NO: 20104 - DNA, 120 bp, Artificial Sequence
  ENSG00000022567_38 (sequence is synthesized)
agctactaagcaaataccacactaaccactttttcgataattaaaagaatcatttgaaatattttttttaattgaaaaagatattttaatttcagctcttttattctgcaggtgtattat

SEQ ID NO: 20105 - DNA, 120 bp, Artificial Sequence
  ENSG00000022567_39 (sequence is synthesized)
tctgcatgtttttaaatgatataaaacatttatatagacaataagcaacttagaaaaaataagattttgcatttctaaaattataattgaaaacaaaatctgacattctctgctaagtct

SEQ ID NO: 20106 - DNA, 120 bp, Artificial Sequence
  ENSG00000022567_40 (sequence is synthesized)
gtgtgtttgtgtccgggtggcagttgggtacctgctcacgcacggtgtgtctgccaggccacggtgtcccaggatcgcagagggctgactttcaagacttcaagaacattttctggatgt

SEQ ID NO: 20107 - DNA, 120 bp, Artificial Sequence
  ENSG00000022567_41 (sequence is synthesized)
gtggaaacttgagaatggccttgtgaatctcgtgcttggacagggcaagtccgactactgaaagtgctgccagctttgctgcgagccctccggccagcgggagccccgtgggctgggcac

SEQ ID NO: 20108 - DNA, 120 bp, Artificial Sequence
  ENSG00000022567_42 (sequence is synthesized)
tgtggcccttcttctctgggggacggcacccctggcttcctcacctcggccgggcgtccgtggcagctcactctatgcaacttgatcctctagcggctttaagactgtagatcccctctc

SEQ ID NO: 20109 - DNA, 120 bp, Artificial Sequence
  ENSG00000022567_43 (sequence is synthesized)
tgagacctggctgtacttgtcaggatctcgaggcgcagctcccgtcttagctggtttctccggcttctcgtcctgacgactataaaacagttggaggcaagaaagcagcggatgtggggt

SEQ ID NO: 20110 - DNA, 120 bp, Artificial Sequence
  ENSG00000022567_44 (sequence is synthesized)
ggcagtggcctgacccgaatcaagatccgacccaaaccacaccaaatgtgggttcatctgggggccaccccttgcctgaggcttcccaccctcatctgaaggcccaggggccggatccag

SEQ ID NO: 20111 - DNA, 120 bp, Artificial Sequence
  ENSG00000022567_45 (sequence is synthesized)
ggctcaccaaagccgattcctcgccagctgggagtgcagaagtctcagggcctggctgcgacttgatttttaggaggaagaggggcttcgcaacccccctctgaatagtgtgttaaccct

SEQ ID NO: 20112 - DNA, 120 bp, Artificial Sequence
  ENSG00000022567_46 (sequence is synthesized)
tgagatcccagcctcgactaatctgaagtaaggacaacaaaggccattcagtgccctccacatggccttgccacagtcactgtcagggtatgaacgtgccggaagccagtgccagccagg

SEQ ID NO: 20113 - DNA, 120 bp, Artificial Sequence
  ENSG00000022567_47 (sequence is synthesized)
gacaggcgtgactgttgtgtgctcctcggtgacaggagtcggtggctgcacactttgtagactcgtcaagctgtcagcacttcaggtgtttgcaagcaaagcccttcttagtgtgcaggt

SEQ ID NO: 20114 - DNA, 120 bp, Artificial Sequence
  ENSG00000022567_48 (sequence is synthesized)
cagtgtgcagagcccaaatgaggggaccgcaggggctggggtccagggtcagtagagtcggtttctggagctgccttcctgggaggcaggtgtgggtgaccggggctctggcggtgcgtg

SEQ ID NO: 20115 - DNA, 120 bp, Artificial Sequence
  ENSG00000022567_49 (sequence is synthesized)
tgggcccggcctggccacagcggggaccaggtcacgacatctttggcctcaacccctcccctgcactgagattatttccagattgcactcacttgaaaccgtccgtgtcgtcaccttgtg

SEQ ID NO: 20116 - DNA, 120 bp, Artificial Sequence
  ENSG00000022567_50 (sequence is synthesized)
tcttaagggaagccgagaagaagggcagacgggcaggctgtcttgtctgcaaagcgccattgcgcccgcagcttgtgtgggtcaggctgcagctcgggtgtctgtggcttctaaccttgt

SEQ ID NO: 20117 - DNA, 120 bp, Artificial Sequence
  ENSG00000022567_51 (sequence is synthesized)
acctcagacggatgcagtaacaaggcggggctggggacgccggtcagtgtcaaaggggaggtgctctggctgatagccttgcccgagagggacgaggaggccgtgcgggtgccccctggg

SEQ ID NO: 20118 - DNA, 120 bp, Artificial Sequence
  ENSG00000022567_52 (sequence is synthesized)
gaagctggccagccatccagtgctgaggacgcagctggagttgggctcgtggcacccttggggtgtgggctgtgcaggctggtggcctgggtgcctctgcacactgagtggagtgtcagg

SEQ ID NO: 20119 - DNA, 120 bp, Artificial Sequence
  ENSG00000022567_53 (sequence is synthesized)
cagggtgtgtcggttggtcgagtcttgtgtaatgtgcgcagaccagttaccaaactaggataatgttggtctcatttgtggtggttttgttccctatacaagtcagctaagtaaagactc

SEQ ID NO: 20120 - DNA, 120 bp, Artificial Sequence
  ENSG00000022567_54 (sequence is synthesized)
ttttaacgagcttccccttaacacatggcagaagtttccaggtgcaggaatgcgagctggcgggaaggggcagaggccgtgagctctcagctgggccggcctgcctgtgtcccctttcct

SEQ ID NO: 20121 - DNA, 120 bp, Artificial Sequence
  ENSG00000022567_55 (sequence is synthesized)
gggtctgtcggcagactggcatcatgacgttccctggtggctgaagagctagctttggagtgttgtttttctcactctcaggcaggggccttagctggaatcctccaacctgccactgaa

SEQ ID NO: 20122 - DNA, 120 bp, Artificial Sequence
  ENSG00000022567_56 (sequence is synthesized)
cacgtcagtgctgtgtgctgcctcttggacacctgcccttgaaagcctcaggcccctgggagaagcactctgtccagtcctgtccccgggggggaggcagggccactgagccctcctcag

SEQ ID NO: 20123 - DNA, 120 bp, Artificial Sequence
  ENSG00000022567_57 (sequence is synthesized)
atggttagtggcttccaacagccatcaggagtgtttcttgaatgccccaggtgtggaggacttggtctgtgaccacctagaaccccagagctgaacaggaagccgtccctgcagcaacaa

SEQ ID NO: 20124 - DNA, 120 bp, Artificial Sequence
  ENSG00000022567_58 (sequence is synthesized)
gagggctggaagggggagctgcaggccaccctcggctctcccactgctggggcggtgatgttcgggtgacatgtttgaaaaatactcttaaagataccaactgttcccttatatggctaa

SEQ ID NO: 20125 - DNA, 120 bp, Artificial Sequence
  ENSG00000022567_59 (sequence is synthesized)
tggtttgtgcagccaccagcgatggcggcccctattagagaccaggtttgttaaaacaccaaatattgctgtccacactagacattaaccggcttcagaaaagatggacaccttttccca

SEQ ID NO: 20126 - DNA, 120 bp, Artificial Sequence
  ENSG00000022567_60 (sequence is synthesized)
cgctgtttcgcttcttaactttggtccagctttagccaccacacagcgtgtgagggactgctgctgcggagtcagcctcgtttgtccctccgcctcccaccagcacgcgccgcttctgag

SEQ ID NO: 20127 - DNA, 120 bp, Artificial Sequence
  ENSG00000022567_61 (sequence is synthesized)
agacaccagctccctgcctccaagcctggtgccacaggcctgtcgtgagggacccctgcttccgagagctcctgggggggttctgcccttcaccacctgggagaggtgtcagttcagttc

SEQ ID NO: 20128 - DNA, 120 bp, Artificial Sequence
  ENSG00000022567_62 (sequence is synthesized)
cgagttgaacaaggcccgtgcacacagcatgttgggggcccagcccaaagttcttgtcacctcctcatgcaaagccagccatcaccctccggccagagctcaaggtggccccttggccag

SEQ ID NO: 20129 - DNA, 120 bp, Artificial Sequence
  ENSG00000022567_63 (sequence is synthesized)
cccctccttgggtcctccaggaggactgagcacccctcctagcggcatcccttgccctccacagtgctgccaggggcacgtcgctctgtgccgtggactgagaccatcccctggtgacag

SEQ ID NO: 20130 - DNA, 120 bp, Artificial Sequence
  ENSG00000022567_64 (sequence is synthesized)
aatgacccgtttgttggaaatgcctcgttgccagagaaactccccaggcatctcggaacgaaactatttagttccattgtgaactggccacgggacagctttttatcaacttattaagtt

SEQ ID NO: 20131 - DNA, 120 bp, Artificial Sequence
  ENSG00000022567_65 (sequence is synthesized)
ggagcactgtaatcgcgcttgctgagttagcagtggtggtaagcgtgtgttaaacacataatgttacgttttaggagagagaggtcgtaaggaagtgtcgtgtcgctcatgactctcttc

SEQ ID NO: 20132 - DNA, 120 bp, Artificial Sequence
  ENSG00000022567_66 (sequence is synthesized)
tattagttgggtaacagtggcctcatgtttgtgtctgtgtgtacacagagcccttaggttctgctctgtttctttgccaggtgaatgtttgtggcatgcgctgctgtccgcgcccctctg

SEQ ID NO: 20133 - DNA, 120 bp, Artificial Sequence
  ENSG00000022567_67 (sequence is synthesized)
tcctgcgcagggttcagctgtgcggcgccctgatttcctccatgcacacagaacctccttgtgtctgtttctctgttcctctgtggctgactcaataaacttttccctctgacatgatga

SEQ ID NO: 20134 - DNA, 120 bp, Artificial Sequence
  ENSG00000022840_0 (sequence is synthesized)
gctgtttggcgactcgtcgccattcccggagcaggtcggcctcggcccaggggcgagtatccgttgctgtgtcggagacactagtccccgacaccgagacagccagccctctcccctgcc

SEQ ID NO: 20135 - DNA, 120 bp, Artificial Sequence
  ENSG00000022840_1 (sequence is synthesized)
ctagtccccgacaccgagacagccagccctctcccctgcctcgcggcgggagagcgtgtccggccggccggccggcggggctcgcgcaacctccctcgcctccccttcccccgcagcctc

SEQ ID NO: 20136 - DNA, 120 bp, Artificial Sequence
  ENSG00000022840_2 (sequence is synthesized)
cctcgtcctcggtcgccgctgccgccgggcttaacagccccgtccgccgcttctcttcctagtttgagaagccaaggaaggaaacagggaaaaatgtcgccatgaaggccgagaaccgct

SEQ ID NO: 20137 - DNA, 120 bp, Artificial Sequence
  ENSG00000022840_3 (sequence is synthesized)
catgaaggccgagaaccgctgccgccgccgacccccgccggccctgaacgccatgagcctgggtccccgccgcgcccgctccgctccgactgccgtcgccgccgaggcccccgttgatgc

SEQ ID NO: 20138 - DNA, 120 bp, Artificial Sequence
  ENSG00000022840_4 (sequence is synthesized)
gccgccaccgcctccgacatggacaagaacagcggctccaacagctcctccgcctcttcgggcagcagcaaagggcaacagccgccccgctccgcctcggcggggccagccggcgagtct

SEQ ID NO: 20139 - DNA, 120 bp, Artificial Sequence
  ENSG00000022840_5 (sequence is synthesized)
aaacccaagagcgatggaaagaactccagtggatccaagcgttataatcgcaaacgtgaactttcctaccccaaaaatgaaagttttaacaaccagtcccgtcgctccagttcacagaaa

SEQ ID NO: 20140 - DNA, 120 bp, Artificial Sequence
  ENSG00000022840_6 (sequence is synthesized)
agcaagacttttaacaagatgcctcctcaaaggggcggcggcagcagcaaactctttagctcttcttttaatggtggaagacgagatgaggtagcagaggctcaacgggcagagtttagc

SEQ ID NO: 20141 - DNA, 120 bp, Artificial Sequence
  ENSG00000022840_7 (sequence is synthesized)
cctgcccagttctctggtcctaagaagatcaacctgaaccacttgttgaatttcacttttgaaccccgtggccagacgggtcactttgaaggcagtggacatggtagctggggaaagagg

SEQ ID NO: 20142 - DNA, 120 bp, Artificial Sequence
  ENSG00000022840_8 (sequence is synthesized)
aacaagtggggacataagccttttaacaaggaactctttttacaggccaactgccaatttgtggtgtctgaagaccaagactacacagctcattttgctgatcctgatacattagttaac

SEQ ID NO: 20143 - DNA, 120 bp, Artificial Sequence
  ENSG00000022840_9 (sequence is synthesized)
tgggactttgtggaacaagtgcgcatttgtagccatgaagtgccatcttgcccaatatgcctctatccacctactgcagccaagataacccgttgtggacacatcttctgctgggcatgc

SEQ ID NO: 20144 - DNA, 120 bp, Artificial Sequence
  ENSG00000022840_10 (sequence is synthesized)
atcctgcactatctttcactgagtgagaagacgtggagtaaatgtcccatctgttacagttctgtgcataagaaggatctcaagagtgttgttgccacagagtcacatcagtatgttgtt

SEQ ID NO: 20145 - DNA, 120 bp, Artificial Sequence
  ENSG00000022840_11 (sequence is synthesized)
ggtgataccattacgatgcagctgatgaagagggagaaaggggtgttggtggctttgcccaaatccaaatggatgaatgtagaccatcccattcatctaggagatgaacagcacagccag

SEQ ID NO: 20146 - DNA, 120 bp, Artificial Sequence
  ENSG00000022840_12 (sequence is synthesized)
tactccaagttgctgctggcctctaaggagcaggtgctgcaccgggtagttctggaggagaaagtagcactagagcagcagctggcagaggagaagcacactcccgagtcctgctttatt

SEQ ID NO: 20147 - DNA, 120 bp, Artificial Sequence
  ENSG00000022840_13 (sequence is synthesized)
gaggcagctatccaggagctcaagactcgggaagaggctctgtcgggattggccggaagcagaagggaggtcactggtgttgtggctgctctggaacaactggtgctgatggctcccttg

SEQ ID NO: 20148 - DNA, 120 bp, Artificial Sequence
  ENSG00000022840_14 (sequence is synthesized)
gcgaaggagtctgtttttcaacccaggaagggtgtgctggagtatctgtctgccttcgatgaagaaaccacggaagtttgttctctggacactccttctagacctcttgctctccctctg

SEQ ID NO: 20149 - DNA, 120 bp, Artificial Sequence
  ENSG00000022840_15 (sequence is synthesized)
ggaccatttgcactgagtccagccagcaggaacccatcaccaagtcaggcttcacacgcctcagcagctctccttgttactacttttaccaagcggaagatggacagcatatgttcctgc

SEQ ID NO: 20150 - DNA, 120 bp, Artificial Sequence
  ENSG00000022840_16 (sequence is synthesized)
accctgtgaatgtgcgctgcctcgtgcgggagtacggcagcctggagaggagccccgagaagatctcagcaactgtggtggagattgctggctactccatgtctgaggatgttcgacagc

SEQ ID NO: 20151 - DNA, 120 bp, Artificial Sequence
  ENSG00000022840_17 (sequence is synthesized)
gtcacagatatctctctcacttgccactcacctgtgagttcagcatctgtgaactggctttgcaacctcctgtggtctctaaggaaaccctagagatgttctcagatgacattgagaaga

SEQ ID NO: 20152 - DNA, 120 bp, Artificial Sequence
  ENSG00000022840_18 (sequence is synthesized)
ggaaacgtcagcgccaaaagaaggctcgggaggaacgccgccgagagcgcaggattgagatagaggagaacaagaaacagggcaagtacccagaagtccacattcccctcgagaatctac

SEQ ID NO: 20153 - DNA, 120 bp, Artificial Sequence
  ENSG00000022840_19 (sequence is synthesized)
agcagtttcctgccttcaattcttatacctgctcctctgattctgctttgggtcccaccagcaccgagggccatggggccctctccatttctcctctcagcagaagtccaggttcccatg

SEQ ID NO: 20154 - DNA, 120 bp, Artificial Sequence
  ENSG00000022840_20 (sequence is synthesized)
cagactttctgctgacccctctgtcacccactgccagtcagggcagtccctcattctgcgttgggagtctggaagaagactctcccttcccttcctttgcccagatgctgagggttggaa

SEQ ID NO: 20155 - DNA, 120 bp, Artificial Sequence
  ENSG00000022840_21 (sequence is synthesized)
aagcaaaagcagatgtgtggcccaaaactgctccaaagaaagatgagaacagcttagttcctcctgcccctgtggacagcgacggggagagtgataattcagaccgtgttcctgtgccca

SEQ ID NO: 20156 - DNA, 120 bp, Artificial Sequence
  ENSG00000022840_22 (sequence is synthesized)
gttttcaaaattccttcagccaagctattgaagcagccttcatgaaactggacacaccagctacttcagatcccctctctgaagagaaaggaggaaagaaaagaaaaaaacagaaacaga

SEQ ID NO: 20157 - DNA, 120 bp, Artificial Sequence
  ENSG00000022840_23 (sequence is synthesized)
agctcctgttcagcacctcagtcgtccacaccaagtgacactactggcccaggctaccttctccatctggtttttgtttttgtttttttttcccccatgcttttgtttggctgctgtaat

SEQ ID NO: 20158 - DNA, 120 bp, Artificial Sequence
  ENSG00000022840_24 (sequence is synthesized)
ttttaagtatttgagtttgaacagattagctctggggggagggggtttccacaatgtgagggggaaccaagaaaattttaaatacagtgtattttccagcttcctgtctttacaccaaaa

SEQ ID NO: 20159 - DNA, 120 bp, Artificial Sequence
  ENSG00000022840_25 (sequence is synthesized)
taaagtattgacacaagagatctcttcctgccaaggtttttagttcattgccagtttagtctttttgacccatgtgtaattaatttttctcaacccaaagtaagattgagtcccctttga

SEQ ID NO: 20160 - DNA, 120 bp, Artificial Sequence
  ENSG00000022840_26 (sequence is synthesized)
gatgcattagagcagtccaacccagaatggcacacactgctctgctgtagcatcatgtcagggcttcctggactcagtacacctctcagtttgtcttttaaaaaacagctgaatctttac

SEQ ID NO: 20161 - DNA, 120 bp, Artificial Sequence
  ENSG00000022840_27 (sequence is synthesized)
tacctatttagttctccttgttaaagaaacaggggtgggaataaaatggatttaggacacccagtttgaattgcagtttttttttttctgacacatggccaggctgtggtgccagcttaa

SEQ ID NO: 20162 - DNA, 120 bp, Artificial Sequence
  ENSG00000022840_28 (sequence is synthesized)
tggagtaggctgtccttggcacttgcatgtgtgaaaggagggttttgcctcttcttgagcatggcttgagttggtaaggaaagctgtaactcacgaagccctgagacctgctacccctaa

SEQ ID NO: 20163 - DNA, 120 bp, Artificial Sequence
  ENSG00000022840_29 (sequence is synthesized)
gatcgagcttgttttcagtgactggcttgagtcataggaggaggagtctggtacagctgcaggagagcagggccatctgaagcggtagcattgccaccatctccctctcatctagagcag

SEQ ID NO: 20164 - DNA, 120 bp, Artificial Sequence
  ENSG00000022840_30 (sequence is synthesized)
ttttcttatgccttggtttgagctgaatttgatgtgaattcttttgctgcttaataaagtgacctctaggtgcattagaatgcgaaggcaaatagttgcaataaatcacctgcacaagca

SEQ ID NO: 20165 - DNA, 120 bp, Artificial Sequence
  ENSG00000022840_31 (sequence is synthesized)
gtcccagatccattcctctgtcgaagaggaagtcatccttcagtggctattcattgtggggttaagagcgcagactatgaattcagtctttttgggtcccagtttgccagaccttgaaat

SEQ ID NO: 20166 - DNA, 120 bp, Artificial Sequence
  ENSG00000022840_32 (sequence is synthesized)
ttgaaggcagtggacatggtagctggggaaagaggaacaagtggggacataagccttttaacaaggaactctttttacaggccaaagtctccctctgtcgcccaggctggagtgtagtgg

SEQ ID NO: 20167 - DNA, 120 bp, Artificial Sequence
  ENSG00000022840_33 (sequence is synthesized)
aacaagtgccatgaagtgccatcttgcccaatatgcctctatccacctactgcagccaagataacccgttgtggacacatcttctgctgggcatgcatcctgcactatctttcactgagt

SEQ ID NO: 20168 - DNA, 120 bp, Artificial Sequence
  ENSG00000022840_34 (sequence is synthesized)
cttttcaactgccttgaagactagccattttctggggttctaaggggtgagagaggaaatctggcttactgctgtttgatggagtcacggtctaggttaattttagttcaagggatgcct

SEQ ID NO: 20169 - DNA, 120 bp, Artificial Sequence
  ENSG00000022840_35 (sequence is synthesized)
ttggggaatttggctggacttgaagcagaagaaaacagttcatggatttagacttctgcctgctgagtctttgggttctttccagagctggagctcagaactgaggctgaggtcctagtg

SEQ ID NO: 20170 - DNA, 120 bp, Artificial Sequence
  ENSG00000022840_36 (sequence is synthesized)
tttgcccaggaattttactggcctgtggttggatctgaaagttaatgatgaaggagctattggaaaagcagactaaaaggtagtgaggggctgttgaagcggtgtcaggagagagtttag

SEQ ID NO: 20171 - DNA, 120 bp, Artificial Sequence
  ENSG00000022840_37 (sequence is synthesized)
aagcggtgtcaggagagagtttagttagttttcatggctttaggtaactgaagtttagtagccatgtggtttaaaactggagggtacttggctgggcacggtgtctcatgcctgtaatcc

SEQ ID NO: 20172 - DNA, 120 bp, Artificial Sequence
  ENSG00000022840_38 (sequence is synthesized)
attacacgcatgaaacactgcttatggcctgtttccgcctctgtctcctgggtaatggggaccacaggtgcgcaccgccacgccaggctaaagaaataaagtgatgtactgtatgaagaa

SEQ ID NO: 20173 - DNA, 88 bp, Artificial Sequence
  ENSG00000022840_39 (sequence is synthesized)
ttaagatggagttttgctctatcacccaggctgagacagaattgcttgaacctgggaggcacaggtcacagtgagccaatattgtaaa

SEQ ID NO: 20174 - DNA, 120 bp, Artificial Sequence
  ENSG00000022840_40 (sequence is synthesized)
ctgtctaaaaaacaaaaactggagggtactactcactgcttcctccgacagctcgatgtttttaggggtcccaggaagggcagaaaaacttaaccagaaagtcggaattcccaatttgag

SEQ ID NO: 20175 - DNA, 120 bp, Artificial Sequence
  ENSG00000022840_41 (sequence is synthesized)
ggtctcagtaagaatctcttgtgccttctgtgcagtgttctttacccatttcctaaggaacaaacagcttatggtttactaccttgtgggtttcattgccatttccattagccaggatat

SEQ ID NO: 20176 - DNA, 120 bp, Artificial Sequence
  ENSG00000022840_42 (sequence is synthesized)
agaggacatgactagaacagtgtgttaaggagagaagtacctggaaaatcttttcaaaggtgatagttggttctgtgcctctccagttagtcaaggtaggtctgaaaaagaagttggacc

SEQ ID NO: 20177 - DNA, 120 bp, Artificial Sequence
  ENSG00000022840_43 (sequence is synthesized)
agctacttaaattctctcccccacttctttcccactttggcagatgctgagggttggaaaagcaaaagcagatgtgtggcccaaaactgctccaaagaaagcttagttcctcctgcccct

SEQ ID NO: 20178 - DNA, 120 bp, Artificial Sequence
  ENSG00000022840_44 (sequence is synthesized)
cctcaaatgctgtcattgagctggtaggcattactgtgagatctaaaccttctcaagagaagaggggacaatgagtattttctgtatgcttgttattagttctttccccaggggtgttaa

SEQ ID NO: 20179 - DNA, 80 bp, Artificial Sequence
  ENSG00000022976_0 (sequence is synthesized)
cggcggcccggctcctccgggccagagcggcagcgtcgcacgtgtggccccgctgggccccgagcagctgcggcaggtcc

SEQ ID NO: 20180 - DNA, 80 bp, Artificial Sequence
  ENSG00000022976_1 (sequence is synthesized)
ctgggccccgagcagctgcggcaggtcctggagcaggtgacgaaggcgcagccgccgccgccgccgccccccttcgtgct

SEQ ID NO: 20181 - DNA, 120 bp, Artificial Sequence
  ENSG00000022976_2 (sequence is synthesized)
gccgccctgcagcggggccggggcaccgagcccccgcgcctgccgcgcctgctcccgccccagcaactagaagccatttgtgtcaaggtaacgtctggagaaacaaaaggtcaggaaagg

SEQ ID NO: 20182 - DNA, 120 bp, Artificial Sequence
  ENSG00000022976_3 (sequence is synthesized)
ccaatgctcctaccgaccacaatccagccccaaactgcaagaaagagccagctgccccgggggaattcctgcctggtggggctccatatcgccagccctcagctgctcagggtacagccg

SEQ ID NO: 20183 - DNA, 120 bp, Artificial Sequence
  ENSG00000022976_4 (sequence is synthesized)
cttgtgagaaccgagccacagtcctgcttcctaagtgacttatgccaacctcctgctcaggggtttgtacagagaccactgccagccctccaggtggtccctgcaaagagagtcccagcc

SEQ ID NO: 20184 - DNA, 120 bp, Artificial Sequence
  ENSG00000022976_5 (sequence is synthesized)
cccaaggctccagatgaacagggctccatgttgacccctttgtctgcctctgacccgctggcagtaacatctctttcatccagttcagcacatccatttatttccaacttgcatacaaga

SEQ ID NO: 20185 - DNA, 120 bp, Artificial Sequence
  ENSG00000022976_6 (sequence is synthesized)
catactgagaaactaaaaaaatcgttaaaagtaaagacacgttctggacgggtatctcgacctcccaaatataaagctaaagattataagttcataaaaacagaggatctggcggatggt

SEQ ID NO: 20186 - DNA, 120 bp, Artificial Sequence
  ENSG00000022976_7 (sequence is synthesized)
catctgtcagattctgatgattactcagaactctgtgtggaagaagatgaagatcagagggagaggcacgcactctttgacttatcgagctgctccctgaggcccaaaagctttaagtgt

SEQ ID NO: 20187 - DNA, 120 bp, Artificial Sequence
  ENSG00000022976_8 (sequence is synthesized)
cagacttgtgaaaagtcatatatagggaaggggggactggcccgacattttaaacttaacccaggccacggccagttggaccccgagatggtgctgtctgagaaagccagtggaagcacc

SEQ ID NO: 20188 - DNA, 120 bp, Artificial Sequence
  ENSG00000022976_9 (sequence is synthesized)
ctccgggggtgcacggaggaaaggacgctcagcctgacctccctggggctgtccatgccagcggatccatgtgagggaggggcccgctcctgcttggtgacagagtcagcacgcggtggc

SEQ ID NO: 20189 - DNA, 120 bp, Artificial Sequence
  ENSG00000022976_10 (sequence is synthesized)
ctgcagaatggtcagtctgtagacgttgaagagacattgccatctgaaccagaaaatggagctcttttgcgatcagagagataccaaggacctagaagacgcgcatgctcagagaccctt

SEQ ID NO: 20190 - DNA, 120 bp, Artificial Sequence
  ENSG00000022976_11 (sequence is synthesized)
gcagagtcccgcacagctgtcctccagcagagaagagctgctcagctacctggtggccctgctgcggcaggggagcagagggcgtcgccaagcaaagccaggctcaaggagttcctccag

SEQ ID NO: 20191 - DNA, 120 bp, Artificial Sequence
  ENSG00000022976_12 (sequence is synthesized)
gccttttttcccagctatatataaggaatttgaagagttgcataaaatggttaagaaaatgtgccaagattacctcagtagttctggtctgtgttcccaggagaccctggaaataaacaa

SEQ ID NO: 20192 - DNA, 120 bp, Artificial Sequence
  ENSG00000022976_13 (sequence is synthesized)
tgataaggttgctgagtcattaggaatcacagaattcctacggaagaaagaaatacacccagacaaccttggacccaagcacctcagccgagacatggatggggagcagctagagggagc

SEQ ID NO: 20193 - DNA, 120 bp, Artificial Sequence
  ENSG00000022976_14 (sequence is synthesized)
tagcagcgagaagagggaacgtgaggctgcggaggagggactggcctcagtgaaaaggcccagaagagaagccctgtccaacgataccactgaatctcttgctgccaacagcagaggccg

SEQ ID NO: 20194 - DNA, 120 bp, Artificial Sequence
  ENSG00000022976_15 (sequence is synthesized)
ggagaagcccaggcccttgcatgctttggccgctggtttttcccctccagtaaatgtgactgtctctccccgttctgaagaaagccatacaacgacggtttctggtggcaatgggagcgt

SEQ ID NO: 20195 - DNA, 120 bp, Artificial Sequence
  ENSG00000022976_16 (sequence is synthesized)
gttccaggcgggcccgcagcttcaggcactggctaacttagaagccaggagggggtctataggtgctgctctctcatcccgggatgtcagtgggctgcctgtttatgctcagtcaggaga

SEQ ID NO: 20196 - DNA, 120 bp, Artificial Sequence
  ENSG00000022976_17 (sequence is synthesized)
gcctaggaggctgacccaggcacaggtggcagcgtttcctggagagaatgctttggaacactcttcagaccaggacacctgggacagcctgaggagcccgggtttctgcagccctttgtc

SEQ ID NO: 20197 - DNA, 120 bp, Artificial Sequence
  ENSG00000022976_18 (sequence is synthesized)
atctggtggtggagcagagtccctgccgcctggggggcctggacatgcagaggcaggacacctcggcaaggtttgtgacttccacctgaaccaccagcagcccagccccaccagcgtcct

SEQ ID NO: 20198 - DNA, 120 bp, Artificial Sequence
  ENSG00000022976_19 (sequence is synthesized)
gcctacagaggtggcagcccctccgcttgagaaaattttgtctgtggatagcgtggcagtggactgtgcctacaggactgtgcccaagccagggcctcagcctggcccacatggatcact

SEQ ID NO: 20199 - DNA, 120 bp, Artificial Sequence
  ENSG00000022976_20 (sequence is synthesized)
attgactgaagggtgtctcagaagcctttcgggggacttgaaccggttcccctgtgggatggaggtgcactctggccagagagaactggagagcgtggttgctgtcggcgaagccatggc

SEQ ID NO: 20200 - DNA, 120 bp, Artificial Sequence
  ENSG00000022976_21 (sequence is synthesized)
ttttgaaatttccaatgggagccatgagttactgtctcagggacagaagcagatttttattcagacttccgatgggcttatcttgtcccctccaggtacaatagtgtctcaggaggagga

SEQ ID NO: 20201 - DNA, 120 bp, Artificial Sequence
  ENSG00000022976_22 (sequence is synthesized)
cattgtcacagtgactgatgcagaggggcgtgcctgcggatgggcccgctagaaggagttcctctagaagctgtggagtcggtcgtcaccgtggagccagagccctcacagtgaagtgga

SEQ ID NO: 20202 - DNA, 120 bp, Artificial Sequence
  ENSG00000022976_23 (sequence is synthesized)
gtcagatcctagattcgtctgattttatccagagaaggtctatggcaagcaatgtatatttttctaatgtgaatattgcacagatgaaccttttatttataaagaataatgtctttctgc

SEQ ID NO: 20203 - DNA, 120 bp, Artificial Sequence
  ENSG00000022976_24 (sequence is synthesized)
agaatgccattggttaggccttttacttttgtcgttttaaaggacactctggacatccaaccgatgcacatcccacgcccccaccccccacgtttcctgaggctgcgtctggcctggagg

SEQ ID NO: 20204 - DNA, 120 bp, Artificial Sequence
  ENSG00000022976_25 (sequence is synthesized)
aaccgcccagtgaagacaggtgctcgcagatatcaccgcctagtgttccctgggcccacttgcggggaagtcttggaggtgaaaatccaggtctggaatgaatgcattccacagatgcat

SEQ ID NO: 20205 - DNA, 120 bp, Artificial Sequence
  ENSG00000022976_26 (sequence is synthesized)
gaaacactctcgttaacaattcaaactgtggtcccctcccagatgtataaatccaaatgtttaggggtgggcacagtactctgcatctccagacagcatcctccgctgattcggatgcat

SEQ ID NO: 20206 - DNA, 120 bp, Artificial Sequence
  ENSG00000022976_27 (sequence is synthesized)
gatgacgtcagaacacttggatattgtggtaacttttgggccaggggctctgaaaccccgaagacctccccctgggagatccgggacagctcccagagaagcaactagaagccatttgtg

SEQ ID NO: 20207 - DNA, 120 bp, Artificial Sequence
  ENSG00000022976_28 (sequence is synthesized)
ccatgtgagggaggggcccgctcctgcttggtgacagagtcagcacgcggtggcctgcagttcctccagcagtgtgaccgggaggatctggtggaattggctctgcctcagctggctcag

SEQ ID NO: 20208 - DNA, 120 bp, Artificial Sequence
  ENSG00000022976_29 (sequence is synthesized)
tcatgatggtgatgagtagcactgcactgtcacctgatgattggccctgctccgtttcccttctctcctgggagatatgctgcttttccaccagacttgctccatactagaagcttcttt

SEQ ID NO: 20209 - DNA, 120 bp, Artificial Sequence
  ENSG00000022976_30 (sequence is synthesized)
tgggttcaattaaaaagaaaataagctagtcattctgggcagcattttattgatagaagggggaaaaagtcatttctacttgcatgattttttaaattaaattaaattaaattaatttaa

SEQ ID NO: 20210 - DNA, 73 bp, Artificial Sequence
  ENSG00000022976_31 (sequence is synthesized)
agagaaggggtctcgctgtgttgtccactctggtcttgaactccagggctcaactgatcctcccttagccctg

SEQ ID NO: 20211 - DNA, 120 bp, Artificial Sequence
  ENSG00000022976_32 (sequence is synthesized)
ttttcttccttatgtgggtttttggggatggattatataggggccattcatttttgtttgtggtggttccgacacaattctcatttcagtgtcattgttattatcaaattgcctttagct

SEQ ID NO: 20212 - DNA, 120 bp, Artificial Sequence
  ENSG00000022976_33 (sequence is synthesized)
gtgtcattgttattatcaaattgcctttagctacattggattttttggggtgtttttgtttttttgagacagagtctcgctgtcagccaggcttgagtgcaatggtgccatcttggctca

SEQ ID NO: 20213 - DNA, 88 bp, Artificial Sequence
  ENSG00000022976_34 (sequence is synthesized)
ttattttcttaaattacatatgatgaaaatgtaaaaggtttttgctaagcctcatgtagatgccctccacagcagtcacctgtgtgtt

SEQ ID NO: 20214 - DNA, 120 bp, Artificial Sequence
  ENSG00000022976_35 (sequence is synthesized)
gcctcatgtagatgccctccacagcagtcacctgtgtgttttttaaactcttgagtttagcaagtgtgggtatcatcctgctttgaggcggaactcggcacacacacactgtgcctgccc

SEQ ID NO: 20215 - DNA, 60 bp, Artificial Sequence
  ENSG00000022976_36 (sequence is synthesized)
taggtgtgagctaccgtgcccagctcatagttgttttggaaagagccaggccatttggaa

SEQ ID NO: 20216 - DNA, 120 bp, Artificial Sequence
  ENSG00000022976_37 (sequence is synthesized)
cagctcatagttgttttggaaagagccaggccatttggaatcgttttccttttgcaggacagctgaagtgagcctgctggtcacacaccgtgcctggtgtgggggccgctgcctgggtag

SEQ ID NO: 20217 - DNA, 120 bp, Artificial Sequence
  ENSG00000022976_38 (sequence is synthesized)
ctgggtgtctcgggcaggtgcccgtttactcccttgacttttaacttggtacaggaggaatggaagtggcagccacaaataatggctatcctgggctctcctagaacccactcgccccag

SEQ ID NO: 20218 - DNA, 120 bp, Artificial Sequence
  ENSG00000022976_39 (sequence is synthesized)
ctggcctcttctgcccgcggctctgctccttctgagcccactctgaggctgcagcccaggctgcctgtgccccacactccctctggagctgacagtccagccggggctcagggcctttct

SEQ ID NO: 20219 - DNA, 120 bp, Artificial Sequence
  ENSG00000022976_40 (sequence is synthesized)
gccttcccttcccaccctgtccaggagctcacccatgccctacatggcccccacccagggcttgtttgtttcttggcctgctcctcccatgcccatcctggcttctctgcaccatgcggg

SEQ ID NO: 20220 - DNA, 120 bp, Artificial Sequence
  ENSG00000022976_41 (sequence is synthesized)
gcacacagtaggtgctcactggggactgaaggaaacgcacaccactgagggctgctgaggggttaaggaaccgaaactttgtttagattttcttctgtattttccatatcagtgccttga

SEQ ID NO: 20221 - DNA, 120 bp, Artificial Sequence
  ENSG00000023041_0 (sequence is synthesized)
agagtcctggcgagggcgctggccgagaggtgctcggcttgtagcaggtcccgcactccagcctctcgctgccagggtttgctctctgcttgtcctgggctgaggtgtccatgacggagt

SEQ ID NO: 20222 - DNA, 120 bp, Artificial Sequence
  ENSG00000023041_1 (sequence is synthesized)
catccaaggaggaaaaaatctgttccgggtgagcccaggccgccccggatatgcgatggctgaggagcagacaccagggaccacactgaggttgggtttcagaccaagacactggattct

SEQ ID NO: 20223 - DNA, 120 bp, Artificial Sequence
  ENSG00000023041_2 (sequence is synthesized)
cctagttaagataaagagctttgggtgcctgacagtgaaaatggtgtaatctgcgttaacagttcacagcttgaaggcatgacaattaaagaacacacatggacttgtggcacatggaaa

SEQ ID NO: 20224 - DNA, 120 bp, Artificial Sequence
  ENSG00000023041_3 (sequence is synthesized)
tgtgcgcacagaaaaaggaaatctataattcttttaaagtaggaaggcattcttccttgccaaaatgggtacattctgttcggttatcaagtttgaaaatctacaagaattaaagagact

SEQ ID NO: 20225 - DNA, 120 bp, Artificial Sequence
  ENSG00000023041_4 (sequence is synthesized)
gtgtcactggggtcccatcatagcccttggtgttatagcaatatgttctaccatggccatgattgactctgtgttgtggtattggcccttacatacaactggaggaagtgtgaatttcat

SEQ ID NO: 20226 - DNA, 120 bp, Artificial Sequence
  ENSG00000023041_5 (sequence is synthesized)
catgttgataaattggactgtcatgattctttataattacttcaatgccatgtttgtcggtccgggctttgtccctctggggtggaaaccggaaatttctcaggataccatgtatctcca

SEQ ID NO: 20227 - DNA, 120 bp, Artificial Sequence
  ENSG00000023041_6 (sequence is synthesized)
gtattgtaaagtctgccaagcatacaaggcaccacgttcacatcactgcagaaagtgtaacagatgtgtgatgaagatggaccatcactgtccttggatcaacaactgttgtggttacca

SEQ ID NO: 20228 - DNA, 120 bp, Artificial Sequence
  ENSG00000023041_7 (sequence is synthesized)
aaatcatgcttcgttcacactgtttctccttttagcaccactgggttgtatccatgctgctttcatttttgtgatgactatgtacacacagctttatcatcggctctcctttgggtggaa

SEQ ID NO: 20229 - DNA, 120 bp, Artificial Sequence
  ENSG00000023041_8 (sequence is synthesized)
cacagtgaagatcgacatgagtgcagcccggagagatcctcttccaattgttccatttggattagctgcatttgctaccaccttgtttgccttgggattagctttaggaacaaccatagc

SEQ ID NO: 20230 - DNA, 120 bp, Artificial Sequence
  ENSG00000023041_9 (sequence is synthesized)
ttgttttttatccagatgaaaataattctcagaaacaaaacttctattgagtcatggattgaagagaaggctaaagatcgaattcagtattatcaactagatgaagtctttgtttttcca

SEQ ID NO: 20231 - DNA, 120 bp, Artificial Sequence
  ENSG00000023041_10 (sequence is synthesized)
tatgatatgggaagtagatggaggaactttaaacaggtatttacgtggtcaggggtccctgaaggagatggacttgagtggccagtaagagaaggctgtcaccaatacagcttaacaata

SEQ ID NO: 20232 - DNA, 120 bp, Artificial Sequence
  ENSG00000023041_11 (sequence is synthesized)
gaacagttgaaacaaaaagcagataagagagtcagaagtgttcgctataaagtaatagaagattatagtggtgcctgctgccctctgaataaaggaatcaaaaccttcttcacaagtccc

SEQ ID NO: 20233 - DNA, 120 bp, Artificial Sequence
  ENSG00000023041_12 (sequence is synthesized)
tgcaccgaagagcctcgaatacagctgcaaaaaggggaattcattttagccacaagaggtttacgatactggttatatggagacaaaattcttgatgattcctttatagaaggtgtttca

SEQ ID NO: 20234 - DNA, 120 bp, Artificial Sequence
  ENSG00000023041_13 (sequence is synthesized)
agaataaggggttggttccctagaaaatgtgtggaaaagtgtccctgtgatgctgaaacagatcaagccccagagggggagaagaaaaatagatagctgctgttaaaacaaaattatcct

SEQ ID NO: 20235 - DNA, 120 bp, Artificial Sequence
  ENSG00000023041_14 (sequence is synthesized)
ttaagtctgcttaattacttgaaaattgtacatattactaaagaattatgcaatgagcctactctggttaagatgttcttttcctcaaaggtgccctagtgccatgatttaaatattttt

SEQ ID NO: 20236 - DNA, 120 bp, Artificial Sequence
  ENSG00000023041_15 (sequence is synthesized)
attaccattttgaaatggagaagccattctgcatatgcctttgaattcctgcccctctttaccacctcttcctccccctcaaaggaaaaacatttcatccaagtaagttaacggcatttt

SEQ ID NO: 20237 - DNA, 120 bp, Artificial Sequence
  ENSG00000023041_16 (sequence is synthesized)
ctgtaggattttcttatgcactgcacactctggacctcacctgcagatacagttccccccttgccaggagcatctgcatgtggtacttctcttttccctcagttgatatttcttatatga

SEQ ID NO: 20238 - DNA, 120 bp, Artificial Sequence
  ENSG00000023041_17 (sequence is synthesized)
tattctagatactatagaactcaatttgtcagattcagtataacctcagattttgttacctgtcttttaaaaatgcagattttgtcaaatcaaataaagatcaatggatgttgggtataa

SEQ ID NO: 20239 - DNA, 120 bp, Artificial Sequence
  ENSG00000023041_18 (sequence is synthesized)
acgattttggtggtctttgtcccaccagagtgggagcaggctctcctgaatgttgagaccaacctggcttaccaggatatttcttccttgggttgggtttcagaccaagacactggattc

SEQ ID NO: 20240 - DNA, 120 bp, Artificial Sequence
  ENSG00000023041_19 (sequence is synthesized)
tcatcatggtccatgaggaaagaaacaccacaacttttataagcttggatcttctcattctgaacccaactatacaaatttcctgtagctacaagaaccagcatggtttgtgactgaaat

SEQ ID NO: 20241 - DNA, 120 bp, Artificial Sequence
  ENSG00000023041_20 (sequence is synthesized)
gggctattgttaaaatgatatattacccgtaagctctccccgtgtacaaaaatttgtaacactggttgactcctgttgtagatattttctatcttctctggtgcaatgtattctccttgg

SEQ ID NO: 20242 - DNA, 120 bp, Artificial Sequence
  ENSG00000023041_21 (sequence is synthesized)
gccagcttgaaaatgttctttttacggtcgatgatcttcagagttccattctacatgagacagataaaagtatcagtatttttgagccacagagatgatatcagtggggagagtggtgaa

SEQ ID NO: 20243 - DNA, 120 bp, Artificial Sequence
  ENSG00000023041_22 (sequence is synthesized)
gtcacagtcatctttcttctctaaagctgatttctccagagacttttgagctgtctttcatttctctttcttggctttggtgaaaggggagggaagcatcgtgcagcaagaacctgtctt

SEQ ID NO: 20244 - DNA, 120 bp, Artificial Sequence
  ENSG00000023041_23 (sequence is synthesized)
tactgtatatctatgtggagagtcaatgcgcagccttagagaaagtctcctggatctactggagttatgcaaattgatgcctcatccaaggaagaaattgcacagctctcaatttccaat

SEQ ID NO: 20245 - DNA, 120 bp, Artificial Sequence
  ENSG00000023041_24 (sequence is synthesized)
cactaatttccaattagttcattttcagaactctcagaaatagaggtgttgtcttttgtttagacttttgatttgatttgaatagttctcccaccacttgactccctgttatgttttcct

SEQ ID NO: 20246 - DNA, 120 bp, Artificial Sequence
  ENSG00000023041_25 (sequence is synthesized)
ccttgttagatccgggagcaggctcaaacagctccactgtgctaatcaagcaactcaattactgggcttgttaggacagcaacagggctgagaggactctgaccagccaccaaaggtcat

SEQ ID NO: 20247 - DNA, 120 bp, Artificial Sequence
  ENSG00000023041_26 (sequence is synthesized)
ttgcagcttcatttctctgaactaattggtctgaggagcttaggtctttagggatttgaattgtagaattgggacaaatggcaaataaaatccacatgctaacaccctaagtagggcgac

SEQ ID NO: 20248 - DNA, 120 bp, Artificial Sequence
  ENSG00000023041_27 (sequence is synthesized)
taactaaaccaacactggaactatcacaaggccgacttgataaattagccatcaattcagcctaacgttcattatctgaaagtgattaataaggtgcagccttctataaccctggtgtgg

SEQ ID NO: 20249 - DNA, 120 bp, Artificial Sequence
  ENSG00000023041_28 (sequence is synthesized)
ggacatatctgttgcttacatcctaggcttattagagtgttatttaattctgttactagacagaaacaaatatattagcaagatactaccaaacccaaatcaataaaatgcatcgttagg

SEQ ID NO: 20250 - DNA, 120 bp, Artificial Sequence
  ENSG00000023041_29 (sequence is synthesized)
gaaaacctcactctcagcctctggttcttagcatagggcctttttttccatgctaaaacaacctgtggcctttaaattatcagcaacttgaaatgctggaaaattggggttttgccatat

SEQ ID NO: 20251 - DNA, 120 bp, Artificial Sequence
  ENSG00000023171_0 (sequence is synthesized)
ggagtgtgccgcggggccgagggtggggaacagccagagggagacgcgaaccaggccgctggcggagggctcagggggagcgcagaggcgacggcccccatgccggcggccaacatgatg

SEQ ID NO: 20252 - DNA, 120 bp, Artificial Sequence
  ENSG00000023171_1 (sequence is synthesized)
gagaaccggccgctgcccgccctgcaggtgcccgagccgcagggtgcgcccgagggcagcccggtctggtccagttcgtcgacccccacgcttcgccgccggcgcttcaagatgcgccgc

SEQ ID NO: 20253 - DNA, 120 bp, Artificial Sequence
  ENSG00000023171_2 (sequence is synthesized)
atgaagaacgtacaggagcagagcctggaggccgggctggcccgggacctgcccgccgtcttggcccccggcaaggagttcctgcagctgccgtccatcgagatcacgccctccagcgac

SEQ ID NO: 20254 - DNA, 120 bp, Artificial Sequence
  ENSG00000023171_3 (sequence is synthesized)
gaggacaccccgtggtccaactgctccacacccagcgcgtccccgcgccgaaaacgcttcctcctccgcaagtggctgagggtgagggagcggaaggagtgcagtgaaagcagcagccaa

SEQ ID NO: 20255 - DNA, 120 bp, Artificial Sequence
  ENSG00000023171_4 (sequence is synthesized)
cagagcagtcagcagagcagccacgatgatgattctagcaggttcctgagtcctcgagcgcgggaagaaagcactgccagtaactccaaccgcagcacgccggcctgctcgcccatcctc

SEQ ID NO: 20256 - DNA, 120 bp, Artificial Sequence
  ENSG00000023171_5 (sequence is synthesized)
cggaagcggtctcgctcgccaaccccgcagaaccaggacggagacaccatggtggagaagggctcagatcactcctcggacaagtccccgtccacaccggagcagggcgtgcagcgcagc

SEQ ID NO: 20257 - DNA, 120 bp, Artificial Sequence
  ENSG00000023171_6 (sequence is synthesized)
tgctcctcccagtccggccggagcggcggcaagaattccaagaaaagccagagttggtataatgtgttaagccccacctacaagcagagaaatgaagacttcagaaagctctttaagcag

SEQ ID NO: 20258 - DNA, 120 bp, Artificial Sequence
  ENSG00000023171_7 (sequence is synthesized)
cttccagacacggagcgcctcattgttgattactcatgtgcactccaaagagacattctccttcagggccgactctacctctctgaaaattggatctgcttctacagcaacatcttccgc

SEQ ID NO: 20259 - DNA, 120 bp, Artificial Sequence
  ENSG00000023171_8 (sequence is synthesized)
tgggaaactctgctgacagtccgtttgaaagacatctgttccatgactaaagaaaaaacagctcgcctcattcccaatgccatccaagtttgcactgattcagaaaagcacttcttcact

SEQ ID NO: 20260 - DNA, 120 bp, Artificial Sequence
  ENSG00000023171_9 (sequence is synthesized)
tcgtttggggcccgggataggacatatatgatgatgttccggctctggcagaatgctctccttgaaaagcctctgtgtcccaaggagctctggcactttgttcaccagtgctatgggaac

SEQ ID NO: 20261 - DNA, 120 bp, Artificial Sequence
  ENSG00000023171_10 (sequence is synthesized)
gaattgggcctgaccagtgatgacgaggactacgtgccccctgacgacgacttcaacacaatgggatactgtgaagagatccctgtggaagagaatgaagtgaatgacagctcatccaag

SEQ ID NO: 20262 - DNA, 120 bp, Artificial Sequence
  ENSG00000023171_11 (sequence is synthesized)
accaacagcacactaacatccacagggagcagtgaggcccccgtctcgtttgatgggctgcccctggaggaagaggcgctggagggagacgggtccctggaaaaggagctcgccattgac

SEQ ID NO: 20263 - DNA, 120 bp, Artificial Sequence
  ENSG00000023171_12 (sequence is synthesized)
aacatcatgggggagaagattgagatgatcgctcctgtgaactccccttcactggacttcaatgacaatgaggacatccccactgagctcagtgactcttccgacacacacgatgaagga

SEQ ID NO: 20264 - DNA, 120 bp, Artificial Sequence
  ENSG00000023171_13 (sequence is synthesized)
gaggtccaggccttctatgaggacctgagtggccggcagtacgtgaatgaagtcttcaacttcagcgtggacaagctctatgacctcctcttcaccaactcgcccttccagcgggatttc

SEQ ID NO: 20265 - DNA, 120 bp, Artificial Sequence
  ENSG00000023171_14 (sequence is synthesized)
atggagcagcggcgcttctctgatatcatcttccatccatggaaaaaggaggagaatggaaaccagagccgagtgattctttacaccatcacccttaccaaccctctggctcccaaaact

SEQ ID NO: 20266 - DNA, 120 bp, Artificial Sequence
  ENSG00000023171_15 (sequence is synthesized)
gccactgtcagggagacacagaccatgtacaaggcgagccaggagagtgaatgttacgtgatagatgccgaagtcctcacccacgacgtgccctaccatgactacttctacacaatcaat

SEQ ID NO: 20267 - DNA, 120 bp, Artificial Sequence
  ENSG00000023171_16 (sequence is synthesized)
cgctacacgctcacccgtgtggctcggaacaagagccgactcagggtctccacagagctgcgctatcgaaaacagccctgggggttagtgaaaacgttcatcgagaagaacttctggagt

SEQ ID NO: 20268 - DNA, 120 bp, Artificial Sequence
  ENSG00000023171_17 (sequence is synthesized)
gggctggaggactacttccgccatttagagagcgagctggccaaaacggagagcacttatttggctgagatgcacagacaatctcccaaagagaaggccagcaagactacaacggtgcgg

SEQ ID NO: 20269 - DNA, 120 bp, Artificial Sequence
  ENSG00000023171_18 (sequence is synthesized)
aggaggaagcgtccccatgcccacctgcgagtccctcacctggaagaggtgatgagcccggtcaccacgcccacagatgaggatgtgggccacaggatcaaacatgtggcaggttccaca

SEQ ID NO: 20270 - DNA, 120 bp, Artificial Sequence
  ENSG00000023171_19 (sequence is synthesized)
cagacgcggcatatcccggaggacacccccaacggtttccacctgcagagcgtgtccaagctgctgctggttatcagctgtgttctggtgctgctggtcatccttaacatgatgctcttc

SEQ ID NO: 20271 - DNA, 120 bp, Artificial Sequence
  ENSG00000023171_20 (sequence is synthesized)
tacaaactctggatgttggaatacaccacgcagaccctcactgcctggcagggtctaaggctccaagaaaggttaccccagtctcagacagaatgggcccagctcttagagtcccaacaa

SEQ ID NO: 20272 - DNA, 120 bp, Artificial Sequence
  ENSG00000023171_21 (sequence is synthesized)
aagtaccacgatactgagctccaaaaatggagggaaatcatcaaatcctcagtgatgctccttgaccagatgaaggactcgctcatcaaccttcagaacggcatcaggtcccgcgactac

SEQ ID NO: 20273 - DNA, 120 bp, Artificial Sequence
  ENSG00000023171_22 (sequence is synthesized)
acgtcggaaagtgaagaaaagaggaatcgctatcattgacaaggcaggaacagggtggctgcaagaggcctgtgcaatacatgtacatagaccatataaatatatatatataaatatata

SEQ ID NO: 20274 - DNA, 120 bp, Artificial Sequence
  ENSG00000023171_23 (sequence is synthesized)
cggctccccaacctggtctgctgaacgcaaaccgctgagagtttgctgcaccgccccctggggcccctggctgccgagtcccgctaaggcaaagacgccagcaagcgaggaagcgcagcg

SEQ ID NO: 20275 - DNA, 120 bp, Artificial Sequence
  ENSG00000023171_24 (sequence is synthesized)
gaagaaaaacaagcgggcgcgcgaggggagccccaggagggctgccgagtggctggcaggcggctcccgcccctcccgggtggcctcgccggcggctgacggcccggaggacgcgcgctc

SEQ ID NO: 20276 - DNA, 120 bp, Artificial Sequence
  ENSG00000023171_25 (sequence is synthesized)
gagcaactgagtcattgatcactttccctggaattccttctccaaatctgttcaattacattgatttcaattcactcaagcttgcggattttcactgcacaaagttgaaaatatgaagag

SEQ ID NO: 20277 - DNA, 120 bp, Artificial Sequence
  ENSG00000023171_26 (sequence is synthesized)
gattaggagacccttttcttctccttaaaccctaggaaggaagaagtggaacaaatggtaaagacagcatggcttactaactttccagtgttcactggaatactccaagaccaatcatgt

SEQ ID NO: 20278 - DNA, 120 bp, Artificial Sequence
  ENSG00000023171_27 (sequence is synthesized)
tcatctttgtatcgtcacagcactgtacctgacctcttacagtgatctatagatctatagatgtttgttgatgagttaataatgagtaaataaatgattcctttttctctactgtttaaa

SEQ ID NO: 20279 - DNA, 120 bp, Artificial Sequence
  ENSG00000023171_28 (sequence is synthesized)
agattatatggagctgcgggagctgccgcctgggggaagagaggtgcagcttctgctaggtttgtgctctcctcccagggtctccttggcttccttccccaaagcagctcagagctggta

SEQ ID NO: 20280 - DNA, 120 bp, Artificial Sequence
  ENSG00000023171_29 (sequence is synthesized)
tgaggtgagggtggggggcagccggccagcctggctgttgacggcaactccagggcttgtttcgcgcagccttgccagcattacccatcctcatcagaaactggcagcggcagccacagc

SEQ ID NO: 20281 - DNA, 120 bp, Artificial Sequence
  ENSG00000023171_30 (sequence is synthesized)
tcgggcaggcggctccagccccaggctggatttgcagaatctgtcctttgcctccaagcccagctttcagctgggagagggggaagaaggggcagtggcagcagttcttctggctctttc

SEQ ID NO: 20282 - DNA, 120 bp, Artificial Sequence
  ENSG00000023171_31 (sequence is synthesized)
tccctttctctctttctctttctgtgttcaagtcacattacatgggattctgttcttttgggacttcgtcatcttttccaatatgtcctgggacctccggagctgtaacggggatgctaa

SEQ ID NO: 20283 - DNA, 120 bp, Artificial Sequence
  ENSG00000023171_32 (sequence is synthesized)
cacagacctagtgatataggtggctctgtgacgagaagtatttgtaaaatgcctgtgaatgcatctatttaagacgtgtatgccccaaattgtatacatgagggtgcagatattgggaac

SEQ ID NO: 20284 - DNA, 120 bp, Artificial Sequence
  ENSG00000023171_33 (sequence is synthesized)
atatggttccttgcaatgttgaacaaccccagaggaagggtttgactggggctgggtcccacaagtacctcctgaggctcatgggcatccctgaggatcctcaacccacccaaccaactt

SEQ ID NO: 20285 - DNA, 120 bp, Artificial Sequence
  ENSG00000023171_34 (sequence is synthesized)
tctgggctactctctgcccgtggaccagccgagaagaaagcagagcccgccatgggagactggctggccagcttgtcctgagaaccacgctgaccacctcggctcacttgtgaagcttca

SEQ ID NO: 20286 - DNA, 120 bp, Artificial Sequence
  ENSG00000023171_35 (sequence is synthesized)
tgctgggcatgcagctctaggagcagaaaggacacctgtcagagtcacacaggccctctgctgagaaaccagaggccacccatccacagtcaagccaggggagaccagttgttttcatcg

SEQ ID NO: 20287 - DNA, 120 bp, Artificial Sequence
  ENSG00000023171_36 (sequence is synthesized)
tgtggggacagtcgggagtcagtgctcagggagccaggcgtcgttgggaggggcagccgtgctgggcaatggaatcactgacggagtcgggggtcctctggagccttctgctggagcagg

SEQ ID NO: 20288 - DNA, 120 bp, Artificial Sequence
  ENSG00000023171_37 (sequence is synthesized)
agagccagctgctgcagtggtacctgaagcagcttggccatgcacctgctgccgctgaacaccgttgctggcacggatctgaggaaatcccagccgtgttaagccccacctacaagcaga

SEQ ID NO: 20289 - DNA, 120 bp, Artificial Sequence
  ENSG00000023171_38 (sequence is synthesized)
atattatatacagattttaaaaaagagataatgcctatgtaccagggagaaggagcgggccctcccgcgccctgtgctggccggagcagcgttttcttatggtggagcagctgaggaggg

SEQ ID NO: 20290 - DNA, 120 bp, Artificial Sequence
  ENSG00000023171_39 (sequence is synthesized)
caggaaccgcctctcagcaccgacctcccctgatctccctcctcccaccctctgttccccaccccttcccttgctggccattcttggcttttagaagggaaatgttgagccaaagttatg

SEQ ID NO: 20291 - DNA, 120 bp, Artificial Sequence
  ENSG00000023171_40 (sequence is synthesized)
cctgcgaagaccctaaggtctcaaaaagaagtcttaagacggcattgcttaaggtgcttcattccctaatccccttttgatttgtttccaaaataaaagagaatcttttcttccctaccc

SEQ ID NO: 20292 - DNA, 120 bp, Artificial Sequence
  ENSG00000023171_41 (sequence is synthesized)
caggcttccccaggcattctcttgggaacacagaagcatcaagggagcccagtctaaactcctagggttggccgcccacttgatccagaccgtactgagtgtcagatggagaggatgctt

SEQ ID NO: 20293 - DNA, 120 bp, Artificial Sequence
  ENSG00000023171_42 (sequence is synthesized)
ggaaagctaggaaggctgcattgtgtggtggcaggctcccgagactcgtgttctgaaggatactctcctccatcacccctgcaccttcctccgacctgtgtagggtgtggacccagtaag

SEQ ID NO: 20294 - DNA, 120 bp, Artificial Sequence
  ENSG00000023171_43 (sequence is synthesized)
ggctgggaatttcttactttcccacccgctttctctctggtcttctcccaggctggatctgggcgaagtgtcactttttagtgcctaaagtcctattgtttctctgtgccctaagagcac

SEQ ID NO: 20295 - DNA, 120 bp, Artificial Sequence
  ENSG00000023171_44 (sequence is synthesized)
attgtttattagccagggtggagcgttttcgaccttattaaacctcttttagtgcttctaagcaagtcaggtctgtggctctgaggccttcacttagagctgtcagtgtgatttccagga

SEQ ID NO: 20296 - DNA, 120 bp, Artificial Sequence
  ENSG00000023171_45 (sequence is synthesized)
tgagtcagggtgtgctgggccctccaggatttgagagagggagagaaggcccttgccacgtccggggtgcagggtctacccacagaacactgtgagtggtgagcaccaagatgggttgcc

SEQ ID NO: 20297 - DNA, 120 bp, Artificial Sequence
  ENSG00000023171_46 (sequence is synthesized)
agcctcatttgctctttgaacgaaccaacattagccagtggagacgactgtctgagacagtttgcacatagaaaaagcatctgagccactggagggaaggatttggcaaaggtgcatgtg

SEQ ID NO: 20298 - DNA, 120 bp, Artificial Sequence
  ENSG00000023171_47 (sequence is synthesized)
tttgggcaggaaaaggccaagtgaaatctatgccctacgggagccattcccaatcctgagtttctcagacttggcaatgggggttctggcgggggttggagtacaaatcctgctctggtc

SEQ ID NO: 20299 - DNA, 120 bp, Artificial Sequence
  ENSG00000023171_48 (sequence is synthesized)
gaaggcactagcttcaaagagtgagacattcagggccttttcagcattggcccactagcaccatgcatttatctgaattcacggggccctctgggcacattcatcatccctcatacacta

SEQ ID NO: 20300 - DNA, 120 bp, Artificial Sequence
  ENSG00000023171_49 (sequence is synthesized)
actactgtttcttcatgtaatgaccaaaagagtcccaccagctccaggcagagcttgtggagattcatgaaagagtcatagccagtttggcatgcagaggtcttcagtcttgcttattct

SEQ ID NO: 20301 - DNA, 120 bp, Artificial Sequence
  ENSG00000023171_50 (sequence is synthesized)
tctcctgggcttcttgacacaggggcagaagaaaccccagatgtcccagatgtcccagaacatcagcccaaaagacagaagattttatcactcatctaccccaaagataaagttgtattt

SEQ ID NO: 20302 - DNA, 120 bp, Artificial Sequence
  ENSG00000023171_51 (sequence is synthesized)
ttttcttagaatggcctttaattccctgtggcaattacagtttttgacttttccatgtgagaataaggccttggtatttccctaagggcaggatcagaaaacaggaaggtccatgcccag

SEQ ID NO: 20303 - DNA, 120 bp, Artificial Sequence
  ENSG00000023171_52 (sequence is synthesized)
gtgatcctccaagggaggagggtgaggaggctccagggcatgagctagagtggatattcctcccctagaagaggagatgggaggaaatgcagtttcatgtaatccctgtgaagagtgcct

SEQ ID NO: 20304 - DNA, 120 bp, Artificial Sequence
  ENSG00000023171_53 (sequence is synthesized)
atgcccacagcccagtgggtccttgttcagttcttgtccaggcctttgggtgagggacactggtagggatcaaggctcatgggctctgagccaaagaaggaggcatggtgcagactgctg

SEQ ID NO: 20305 - DNA, 120 bp, Artificial Sequence
  ENSG00000023171_54 (sequence is synthesized)
gaaatctcccccttggcacagccagaagccaaaactattcccagaaagttttgaatgcaaaacttgtagattcctgaatttattccatacataattatttccttaagttatttaattatt

SEQ ID NO: 20306 - DNA, 120 bp, Artificial Sequence
  ENSG00000023171_55 (sequence is synthesized)
aaaggtgccacggtgggacctttgggatgacttaaaaagggttctttgttgggagtcaagtgacagagcagacctggccgcagggagttgttctgcttctgctttacctctcaggaccat

SEQ ID NO: 20307 - DNA, 120 bp, Artificial Sequence
  ENSG00000023171_56 (sequence is synthesized)
tcccaggaggaaaaggtggcagagagggcagtactgagtatgtcagaagagccctcctggttttttagcgatttgaacccactagacaatgtgtgcacatagggaatgtcctttaagaat

SEQ ID NO: 20308 - DNA, 120 bp, Artificial Sequence
  ENSG00000023171_57 (sequence is synthesized)
catggatctcttgtaggctctctgtgttccaataattttttgactatcataccaggaaaaaaccaacaactctattcattcccaaacaaaatctcttcccccttagtcaatagcttgcga

SEQ ID NO: 20309 - DNA, 120 bp, Artificial Sequence
  ENSG00000023171_58 (sequence is synthesized)
aagacatcttaactcacccttgcagataagtcttggagtgaaacaaataaatagcattgtattcctggccatttgcctggctagttgctgtctacaagggagcatcaaaacatcactact

SEQ ID NO: 20310 - DNA, 120 bp, Artificial Sequence
  ENSG00000023171_59 (sequence is synthesized)
tcttatgtaacttcttccagccagtgcttttattgttcgttttagtttactggggacacacaggagtctttctgtaatgacttatgtggtaaaatgtttgagagtttgcactcaatttta

SEQ ID NO: 20311 - DNA, 120 bp, Artificial Sequence
  ENSG00000023171_60 (sequence is synthesized)
aagaatttgcagtttctaacaaggtgaagaacagctataggatctaaagttccattacagcttactgtgaaagaattgacaagactggcctcagacaagctaatcatggtgcgactctct

SEQ ID NO: 20312 - DNA, 120 bp, Artificial Sequence
  ENSG00000023171_61 (sequence is synthesized)
cccttcctcatccacctctttggggacaagaggattacatctcaggccagcaagatcagctgcttgaagctctgtgtaagagcactgcactgacggtttggagacctgagcctgggtcct

SEQ ID NO: 20313 - DNA, 120 bp, Artificial Sequence
  ENSG00000023171_62 (sequence is synthesized)
gacttttccattgactaagctctgtggccttgggcaagtcactccccctctctgagcttcagtatcctcctgtcacaggagggagttgggctagatcatctttaaggtaggttctagctt

SEQ ID NO: 20314 - DNA, 120 bp, Artificial Sequence
  ENSG00000023171_63 (sequence is synthesized)
tgacatcatcttgggggttaggccagaggctgggaagactgggtggactttctcaattgctctgccaggagggaacaagcccagaggctgaagcttcccagtatttagaggtgtggtagg

SEQ ID NO: 20315 - DNA, 120 bp, Artificial Sequence
  ENSG00000023171_64 (sequence is synthesized)
ttagaggtgtggtagggcagtgtctgcattcccaggagacccagggtgattaaaatttattctttaggtggctaggagggctggggaggcccagtggaagagagagagagagagagagag

SEQ ID NO: 20316 - DNA, 120 bp, Artificial Sequence
  ENSG00000023171_65 (sequence is synthesized)
agagagatcgagcttgatgtattgctcagtattcacttagaagggtttctttctctttggcctagtttgtgaagggatcttcctttggactttctctaagttgggagaagaacattcttt

SEQ ID NO: 20317 - DNA, 120 bp, Artificial Sequence
  ENSG00000023171_66 (sequence is synthesized)
tcaatggagctcatcttctatctctagggtctgttcagcctttcatctatccatccttcctctttattggtagaagaaacagtggagagtagccacttctggttctagcacttctctttt

SEQ ID NO: 20318 - DNA, 120 bp, Artificial Sequence
  ENSG00000023171_67 (sequence is synthesized)
gttaagatagggtttggatttagtatgaagctttggctaaaacccttgggtttgccttagaacactgacactaagaacctggaatgacatggggaggacaaagagagctcaagaggaatg

SEQ ID NO: 20319 - DNA, 120 bp, Artificial Sequence
  ENSG00000023171_68 (sequence is synthesized)
ctttgtgagaagtggattctctccgtgtccctgccccccacccaaacttgaactatacctattacatttccaggcagtatccctaagatgagatcctggagaaaggactaggggaagtat

SEQ ID NO: 20320 - DNA, 120 bp, Artificial Sequence
  ENSG00000023171_69 (sequence is synthesized)
ctttctggatgcttgtggtcccagaagggtactttctgtgtcataccatgccacttctttaagctcttcagggcagccaaagccagcccttttctcctactgcccccaggagaaatagca

SEQ ID NO: 20321 - DNA, 120 bp, Artificial Sequence
  ENSG00000023171_70 (sequence is synthesized)
ctcttctcccttcccccagatggcagggctctggcctccctacacctcataccctgcctgcctcctccaggaggaatctccggggccccttcctgactctccccaccttcgccacttgtc

SEQ ID NO: 20322 - DNA, 120 bp, Artificial Sequence
  ENSG00000023171_71 (sequence is synthesized)
tctaggctatgggacaatcatcccattcaccacttgacatccttgacatccttgactttcattcccccaacctccagcaggttggccccaatcctcttcacctctgtgttttcttctaga

SEQ ID NO: 20323 - DNA, 120 bp, Artificial Sequence
  ENSG00000023171_72 (sequence is synthesized)
agatgcattttgggtctgagaggagcattttcctggaaggccatcttttaaggcccctgcttgctgtcatagtgcagagcagaaacttgcacactatttagagagctcccttcccacctc

SEQ ID NO: 20324 - DNA, 120 bp, Artificial Sequence
  ENSG00000023171_73 (sequence is synthesized)
tctgcccagccttgttacctcacttctgctctggccatggctgtgaagggcccagccagctccctgttttgatgttctgtgcaacagctccggggtcttgtgactggagatcctcaacag

SEQ ID NO: 20325 - DNA, 120 bp, Artificial Sequence
  ENSG00000023171_74 (sequence is synthesized)
gccctggagccaggactggagtcttggcagctgatgagcagcaccttgccggccaggaggagctgatgctgacgatctccccaacatctgaaggcttaaagaacattgtcgttcttcagc

SEQ ID NO: 20326 - DNA, 120 bp, Artificial Sequence
  ENSG00000023171_75 (sequence is synthesized)
cctccttgcttctctcaatacaataagacattgcagaagcaaaagggtggcctctgctccaggcaaggcagctggctctgtctggggcatcggcctggggcttgggtgccacgtgctgag

SEQ ID NO: 20327 - DNA, 120 bp, Artificial Sequence
  ENSG00000023171_76 (sequence is synthesized)
attgcatagtcaaaacagccatttttgccaacaatagcttgtggctccccacattttcctaccctgcactcaagggccagaccactctctgcatggaccagaccatcttcccaaacccat

SEQ ID NO: 20328 - DNA, 120 bp, Artificial Sequence
  ENSG00000023171_77 (sequence is synthesized)
ggtgctttttccccaactcaacctagactccaaggtggggagggatgggtcagaggccatagtggcccctggataatcctgacgtggggtggagtggggtgaggcagagggagcagcccc

SEQ ID NO: 20329 - DNA, 120 bp, Artificial Sequence
  ENSG00000023171_78 (sequence is synthesized)
aacacctgcactgggccatctatgggaaagaacacgggtcgagtgcagtcgagttgtctggccatctgtatttggatctataactgtactttgcctggcgctgtgcgcaaggtcagaaaa

SEQ ID NO: 20330 - DNA, 120 bp, Artificial Sequence
  ENSG00000023171_79 (sequence is synthesized)
cttactgctagtacctagaaacacacaaggctgcccagccaaatcttaatgtaaagtagctagagccatggaagtacagtatgaattaaaaagaaaaaagtattgaactacaataataaa

SEQ ID NO: 20331 - DNA, 120 bp, Artificial Sequence
  ENSG00000023171_80 (sequence is synthesized)
gtctgtgagggagtcagagggagagagagaaagggagccaggcagagagagagagggacttctgtaaggcggcacgaccacaccaaataacagcagcagagggaggtgggggagagggaa

SEQ ID NO: 20332 - DNA, 120 bp, Artificial Sequence
  ENSG00000023171_81 (sequence is synthesized)
ataaaggggagtcatgcttaaaatgctacagcggtgtgaaacagcagagcaaagaagcgcccccagcttctgagagccctggcccgagtcccctcccccgttagaaacagggctttggga

SEQ ID NO: 20333 - DNA, 120 bp, Artificial Sequence
  ENSG00000023171_82 (sequence is synthesized)
tggtcatggaggtgagtgccctccagcctcctcagggcccccgctccccgcccccgccccccactgcccaatgcatgaatgaatgagttcctctctgcactgcactctgctactgttcct

SEQ ID NO: 20334 - DNA, 120 bp, Artificial Sequence
  ENSG00000023171_83 (sequence is synthesized)
ctctgcttgccctggtctttgggagcggggactccttcccttatgctgtgagaaagatcctcgtctctatcaccaccctccagacttctccctccaattcattcttcctccaggccatgc

SEQ ID NO: 20335 - DNA, 120 bp, Artificial Sequence
  ENSG00000023171_84 (sequence is synthesized)
attgttctaaatggaaagccttccttgagtgggctgctagaaatgcaggtgtattctaaaaaataagaacaataaaatgacccactgaatttgcaccaggaaagctgtagtttaggtgga

SEQ ID NO: 20336 - DNA, 120 bp, Artificial Sequence
  ENSG00000023171_85 (sequence is synthesized)
acacctagcctcggagacagtgggagctccgagcccacggagagcgggggagttccgcttcctcccgccccagcggctcccgccccgcctgggcgcagccggccgtcccggctccgaggg

SEQ ID NO: 20337 - DNA, 120 bp, Artificial Sequence
  ENSG00000023171_86 (sequence is synthesized)
tgcagcgcgcccgggcgcagcgcgagtgcgtggagccgggctccagcacgaccccgccgctcgggtttgggtgtcctcaggctccgcgctcctcctcccctcctccagatgggactggct

SEQ ID NO: 20338 - DNA, 120 bp, Artificial Sequence
  ENSG00000023171_87 (sequence is synthesized)
ctcctctttgcaaagccaggctcgcggggagacgtggtgagcagtagccagcagctggtgtgccgtggacgccgctgaccgccgcgcgcccgaaccgggtgtccacatgagtgcctctcc

SEQ ID NO: 20339 - DNA, 120 bp, Artificial Sequence
  ENSG00000023171_88 (sequence is synthesized)
ggcacctttgctgagtcatttggggttggcagacctggaaaagacagcggtttagagagtggttagtgccgtgatcagccaacgcaggctctattgtctgttagtatttcctggtgcact

SEQ ID NO: 20340 - DNA, 120 bp, Artificial Sequence
  ENSG00000023171_89 (sequence is synthesized)
tttggaacctgatctgcccttctcatggttaagggcaggggatgagtaactagccatggggatgttctgcatatcttgccttgtgctgaatttcctataaaatggcttcatgaaactttg

SEQ ID NO: 20341 - DNA, 120 bp, Artificial Sequence
  ENSG00000023171_90 (sequence is synthesized)
atgtcagcttaagcagtactgccaccaggctctgcggagggccctaagtgaatagagggcagcagtgtcttccaaatttgaaatgagtgacagtgggttataattaggggagaagatgct

SEQ ID NO: 20342 - DNA, 120 bp, Artificial Sequence
  ENSG00000023171_91 (sequence is synthesized)
cttgatgctactgagaagatacagagtgagaacttttcttagaaaagtctgaggttgtaaagaagaaccaagtttttgttttccaggcccccagcagaatggatggtgcccactcacaat

SEQ ID NO: 20343 - DNA, 120 bp, Artificial Sequence
  ENSG00000023171_92 (sequence is synthesized)
gagggcggatcttccgcacctagtccactcagactcacatgctgatctcttctggcaacatcttcacagacacgcccaaaaataatgctttaccgggttcctaggtagtctttaatccag

SEQ ID NO: 20344 - DNA, 120 bp, Artificial Sequence
  ENSG00000023171_93 (sequence is synthesized)
tcaaactgacacctaaaattaaccatcacaattaccttctcactaaaatcaatctgagaagaaaatggtcataaagaatttgatgcaaatcccttttttgatttataggatgaacagtat

SEQ ID NO: 20345 - DNA, 120 bp, Artificial Sequence
  ENSG00000023171_94 (sequence is synthesized)
cctagataaggaaacagtgaaaggctgttttgtttttttttttttttcccctcctcttcatactccccaatgtgagtaatgggcaaaaaattccaggagaatgggagcattctgagtgat

SEQ ID NO: 20346 - DNA, 120 bp, Artificial Sequence
  ENSG00000023171_95 (sequence is synthesized)
aagaacaagtatctctcaacatgtagagtgtgtatacgggtgggttattttcaaatttcaagtctgcaaatgggtagttccaggtatggcttggtgattgaagtggaggttcttttgggg

SEQ ID NO: 20347 - DNA, 120 bp, Artificial Sequence
  ENSG00000023171_96 (sequence is synthesized)
ctagtcctttgtgctcctgtaatttccccccaactctgagtctgagctcagtgagaacaatcactttaatgcttaatgcacaccgtaatacacagcggagttaacagaatattcagacaa

SEQ ID NO: 20348 - DNA, 120 bp, Artificial Sequence
  ENSG00000023171_97 (sequence is synthesized)
tcacagacacaatggccttcctagccatgagtttggaaaagtgtttctaggagcttgttgtagcagaggctgtgtagatgacaaagaacatgcactgcattgtagatgggttatagttat

SEQ ID NO: 20349 - DNA, 86 bp, Artificial Sequence
  ENSG00000023171_98 (sequence is synthesized)
gggtatttgattgcaaagaaataagacacttctatatatttttttttaatttgctgatcatgggaaaatcttcatgaacccttatc

SEQ ID NO: 20350 - DNA, 71 bp, Artificial Sequence
  ENSG00000023171_99 (sequence is synthesized)
taattttctatttttaatagaggtggggttttgccatgttgtctaggctggtctccaactcccgacttcag

SEQ ID NO: 20351 - DNA, 120 bp, Artificial Sequence
  ENSG00000023171_100 (sequence is synthesized)
atgatccacccacctcggcctcccaaattgttgagattacaggcatgcaccactgtggtcggccatattcatgatttaaaggaattgaagataaaagaattgagtttgataaaaaagaga

SEQ ID NO: 20352 - DNA, 120 bp, Artificial Sequence
  ENSG00000023171_101 (sequence is synthesized)
ggaattgaagataaaagaattgagtttgataaaaaagagagagaagaatattattttcttcaaatactgacttttaagtgagatagtgtgcaaaaaatccatatactaggtactcaaata

SEQ ID NO: 20353 - DNA, 120 bp, Artificial Sequence
  ENSG00000023171_102 (sequence is synthesized)
cctgttagttgacccttcccctatgatgtgaactggttattcacaactatctttatactttaagtcctgttcctaaacacacactgaggttctggagggcagggctgggtcttaggtaaa

SEQ ID NO: 20354 - DNA, 120 bp, Artificial Sequence
  ENSG00000023171_103 (sequence is synthesized)
tttgttctgctaccttctcactggacacctggctcacccaaagcttgcctctcatctgttttctgtgtacagattgccattcaaaaagtgttttctgagtgaatgaattatttactttat

SEQ ID NO: 20355 - DNA, 120 bp, Artificial Sequence
  ENSG00000023171_104 (sequence is synthesized)
ggagcatcaacatcctttttatgttcttgtccatttttatgtccttgtcctcacccttgtcccttcaagttcagtgggtcccagaactgaacttgaagagagttaattggatataggcca

SEQ ID NO: 20356 - DNA, 120 bp, Artificial Sequence
  ENSG00000023171_105 (sequence is synthesized)
ggagtgtgattggacatacgtgtgtgtgtgtttcattaaaattctcaaactaaaaataaatggtttgtggattagtcaacttctgttttcttctgctcgatatcctgaattatccagtac

SEQ ID NO: 20357 - DNA, 120 bp, Artificial Sequence
  ENSG00000023171_106 (sequence is synthesized)
ctgttgcctccatgctactgaaaagtgaccatgtgtggtatgacaagcttatcagaaggctgtcaaagtgcttggcagagaagacatggagtttaatcctgagtggaaaatggcattgtg

SEQ ID NO: 20358 - DNA, 120 bp, Artificial Sequence
  ENSG00000023171_107 (sequence is synthesized)
gaaacagatgaattatagtagatgaatatagtagaaaatatagtagatgaattaaagtacatgaattatctactttgtggaccatcaaaatcctttttatgttcttgtccaagttcagtg

SEQ ID NO: 20359 - DNA, 120 bp, Artificial Sequence
  ENSG00000023171_108 (sequence is synthesized)
ggtgccaagggttcgggggggagcactgaggctttagcagctctcctgtatcctcatttgcatcctcctgtagcagctggaaaattcagattacaggtgaaattccctggctggcaatct

SEQ ID NO: 20360 - DNA, 120 bp, Artificial Sequence
  ENSG00000023171_109 (sequence is synthesized)
tctgtatatggacacagtgatgtgccagaagggctttgcatccctgagactgaaggaagctccatttttggagccctcccacaccttgctctgtgtgcctctcattctgatttgaattct

SEQ ID NO: 20361 - DNA, 120 bp, Artificial Sequence
  ENSG00000023171_110 (sequence is synthesized)
tattttgctatatgatgaagctgtaatcctaagtttaaaaaggggagtaggtattgacatcatggtagaaataggctgtcttatggaactgtagttagggatcacagcctattggaccag

SEQ ID NO: 20362 - DNA, 120 bp, Artificial Sequence
  ENSG00000023171_111 (sequence is synthesized)
ccccagccttagcagcagttctgtacactgattcttccagattagtctacgttccctcgaacagacctatgccatgggttacaactacaatttgttgtcgattagagttaacttacagac

SEQ ID NO: 20363 - DNA, 120 bp, Artificial Sequence
  ENSG00000023171_112 (sequence is synthesized)
tctcaaaaccccattctttgggtttaggcaacttccagaagtagtcatttatttgaattttagtctaagatcaactgaattagggaggtttgaaagtgtaaaagcaaatcgtacattccc

SEQ ID NO: 20364 - DNA, 120 bp, Artificial Sequence
  ENSG00000023171_113 (sequence is synthesized)
aaacactttgtaaagaaggaatgggtagtgtcagctaaaggaaatggtgtgcatcccagcaaaagaaagagaccgaaagcaaagtcataaaccatgcccacgagctcagctgtcctgctc

SEQ ID NO: 20365 - DNA, 120 bp, Artificial Sequence
  ENSG00000023171_114 (sequence is synthesized)
cgtgtcctctccatacccttgttgactgtgctcatattagccagagacctaagtgctcttggaggatgtccctggggccccctccccctccgctgtcactgtctacttcctgatcctctc

SEQ ID NO: 20366 - DNA, 120 bp, Artificial Sequence
  ENSG00000023171_115 (sequence is synthesized)
ccccaggcttgcccaccctgggccctccatctgcctgtgttttatattgaaccacacggaggggagagcttatgtgcaggagcccacagttgacagctggggtagctgcaagggcagcaa

SEQ ID NO: 20367 - DNA, 120 bp, Artificial Sequence
  ENSG00000023171_116 (sequence is synthesized)
gtccacgcagctccagagtgagcccccagcccttgaggtcccagctgccatgtggccagccctcccctgagcccagcatggtgcagaatctacagccagagaccgtctcttgcagcactg

SEQ ID NO: 20368 - DNA, 120 bp, Artificial Sequence
  ENSG00000023171_117 (sequence is synthesized)
cggctgctctcatgtacctttagacagaggctgtgagtctctgggagtggagtgggggggtgtgaaccgcccgctcctggctcctgtgtaggcctcagtcagtctgaatgttattgcaag

SEQ ID NO: 20369 - DNA, 120 bp, Artificial Sequence
  ENSG00000023191_0 (sequence is synthesized)
gaacacgcccgcgccgctgactggcgggtggggttgtcgacacgttcaacccgttctgctggctcgagaacgaagtaggccgtctcgctctgggtctccaggcccgcgaccgtccgccag

SEQ ID NO: 20370 - DNA, 120 bp, Artificial Sequence
  ENSG00000023191_1 (sequence is synthesized)
tcgtcccgaggcatgaagaactcttgactgacagaaacggagggtgtgtccaaagttttgaggacggccgagcggcgctccaaaacccgtcctcacagcctcgccccgttcgcctcagct

SEQ ID NO: 20371 - DNA, 120 bp, Artificial Sequence
  ENSG00000023191_2 (sequence is synthesized)
acaacaaatcatcgtcaacctgttccaccttctccagtctggtagcaaaaaggggtgtctcagaatctccggcctgtgaaactgtgaggggattcggccaagacgtcctcttccctctgc

SEQ ID NO: 20372 - DNA, 120 bp, Artificial Sequence
  ENSG00000023191_3 (sequence is synthesized)
ctcccacccaggccactcttcacctccaccatgagcctggacatccagagcctggacatccagtgtgaggagctgagcgacgctagatgggccgagctcctccctctgctccagcagtgc

SEQ ID NO: 20373 - DNA, 120 bp, Artificial Sequence
  ENSG00000023191_4 (sequence is synthesized)
caagtggtcaggctggacgactgtggcctcacggaagcacggtgcaaggacatcagctctgcacttcgagtcaaccctgcactggcagagctcaacctgcgcagcaacgagctgggcgat

SEQ ID NO: 20374 - DNA, 120 bp, Artificial Sequence
  ENSG00000023191_5 (sequence is synthesized)
gtcggcgtgcattgcgtgctccagggcctgcagaccccctcctgcaagatccagaagctgagcctccagaactgctgcctgacgggggccggctgcggggtcctgtccagcacactacgc

SEQ ID NO: 20375 - DNA, 120 bp, Artificial Sequence
  ENSG00000023191_6 (sequence is synthesized)
accctgcccaccctgcaggagctgcacctcagcgacaacctcttgggggatgcgggcctgcagctgctctgcgaaggactcctggacccccagtgccgcctggaaaagctgcagctggag

SEQ ID NO: 20376 - DNA, 120 bp, Artificial Sequence
  ENSG00000023191_7 (sequence is synthesized)
tattgcagcctctcggctgccagctgcgagcccctggcctccgtgctcagggccaagccggacttcaaggagctcacggttagcaacaacgacatcaatgaggctggcgtccgtgtgctg

SEQ ID NO: 20377 - DNA, 120 bp, Artificial Sequence
  ENSG00000023191_8 (sequence is synthesized)
ggaggcgctcaagctggagagctgcggtgtgacatcagacaactgccgggacctgtgcggcattgtggcctccaaggcctcgctgcgggagctggccctgggcagcaacaagctgggtga

SEQ ID NO: 20378 - DNA, 120 bp, Artificial Sequence
  ENSG00000023191_9 (sequence is synthesized)
tgtgggcatggcggagctgtgcccagggctgctccaccccagctccaggctcaggaccctgtggatctgggagtgtggcatcactgccaagggctgcggggatctgtgccgtgtcctcag

SEQ ID NO: 20379 - DNA, 120 bp, Artificial Sequence
  ENSG00000023191_10 (sequence is synthesized)
ggccaaggagagcctgaaggagctcagcctggccggcaacgagctgggggatgagggtgcccgactgctgtgtgagaccctgctggaacctggctgccagctggagtcgctgtgggtgaa

SEQ ID NO: 20380 - DNA, 120 bp, Artificial Sequence
  ENSG00000023191_11 (sequence is synthesized)
gtcctgcagcttcacagccgcctgctgctcccacttcagctcagtgctggcccagaacaggtttctcctggagctacagataagcaacaacaggctggaggatgcgggcgtgcgggagct

SEQ ID NO: 20381 - DNA, 120 bp, Artificial Sequence
  ENSG00000023191_12 (sequence is synthesized)
gtgccagggcctgggccagcctggctctgtgctgcgggtgctctggttggccgactgcgatgtgagtgacagcagctgcagcagcctcgccgcaaccctgttggccaaccacagcctgcg

SEQ ID NO: 20382 - DNA, 120 bp, Artificial Sequence
  ENSG00000023191_13 (sequence is synthesized)
tgagctggacctcagcaacaactgcctgggggacgccggcatcctgcagctggtggagagcgtccggcagccgggctgcctcctggagcagctggtcctgtacgacatttactggtctga

SEQ ID NO: 20383 - DNA, 120 bp, Artificial Sequence
  ENSG00000023191_14 (sequence is synthesized)
ggagatggaggaccggctgcaggccctggagaaggacaagccatccctgagggtcatctcctgaggctcttcctgctgctgctctccctggacgaccggcctcgaggcaaccctggggcc

SEQ ID NO: 20384 - DNA, 120 bp, Artificial Sequence
  ENSG00000023191_15 (sequence is synthesized)
caccagcccctgccatgctctcaccctgcatatcctaggtttgaagagaaacgctcagatccgcttatttctgccagtatattttggacactttataatcattaaagcactttcttggca

SEQ ID NO: 20385 - DNA, 120 bp, Artificial Sequence
  ENSG00000023191_16 (sequence is synthesized)
ggctgcgcctgcgtggttcgtcctcacgtggccgtcaagccctctagtgccttagattccagcgagctacgcaagcaatcctggcccagccgagcttgcttccccaaatcccgtaatcct

SEQ ID NO: 20386 - DNA, 120 bp, Artificial Sequence
  ENSG00000023191_17 (sequence is synthesized)
tgaccttattcccccaaagaagcggcctcccgggaaggagcgccctggcggagaagactcgaacggctcccacagccgggcgttgggggaaagaatctccggcctgtgaaactgtgaggg

SEQ ID NO: 20387 - DNA, 120 bp, Artificial Sequence
  ENSG00000023191_18 (sequence is synthesized)
cacaccctggtcggttttgctcacgtgcttcgggtcggttggattcagttcctccatgtggggccgtgggatgtcaccaccctttgccactgtccttgcaggccgggcgcccaggcgtgt

SEQ ID NO: 20388 - DNA, 120 bp, Artificial Sequence
  ENSG00000023191_19 (sequence is synthesized)
ggacccgagcccagccttgcgtctttcctcccagttggtaccaggggcctcttgcctccactcatgcagagtggaccagccgcctctgaagcagccccggggagaggagtgccaggcaca

SEQ ID NO: 20389 - DNA, 120 bp, Artificial Sequence
  ENSG00000023191_20 (sequence is synthesized)
cagactcaggaagctgggggtgtcagggcaccaggagcctctcaagcggtcctgttggccgtctttctgaagggcagctggggttgcatcatttccccaagtggatcctgccaactttct

SEQ ID NO: 20390 - DNA, 120 bp, Artificial Sequence
  ENSG00000023191_21 (sequence is synthesized)
ggggcttctggatgagagccctctccccaccccacccacccctccccgcattgtggcatcagtgctgctgcttccagggagccttcctggccatccaagcctcctctccaggttcctgcc

SEQ ID NO: 20391 - DNA, 120 bp, Artificial Sequence
  ENSG00000023191_22 (sequence is synthesized)
ctgctgtagtccccaggccagtgcttggcaggtgctcagggaatgtatccaccaaccaaggtttggggtggctgtctctgcctgaccactttccccaggcccctggcgggtacctgagct

SEQ ID NO: 20392 - DNA, 120 bp, Artificial Sequence
  ENSG00000023191_23 (sequence is synthesized)
gtgctctcagggcctcaggaacctccttccatattcagggcctgtgcctggggaggcttcagggtgtagcagctgtgcccatcccaggctgacccacccagcttgcctggtagcccagcc

SEQ ID NO: 20393 - DNA, 120 bp, Artificial Sequence
  ENSG00000023191_24 (sequence is synthesized)
tctgggctagtgtgccgtggggcaggggatgtgctgtagcctggtgcagagtccccaaccccagaagggggccatggaagctgacaccccaagtggccgcccccctgctctgtcttgctt

SEQ ID NO: 20394 - DNA, 120 bp, Artificial Sequence
  ENSG00000023191_25 (sequence is synthesized)
cggacactgtggccgggtccaggatcctggcatcctgggaggtctctggctttgtgggcagcctgcctggcccgcacagtctgcctgtcctgagggtgagacacaggtcaagcccacaga

SEQ ID NO: 20395 - DNA, 120 bp, Artificial Sequence
  ENSG00000023191_26 (sequence is synthesized)
cccccttgctcccctgctggggcctccaggctcacagaccaccccaccctaccctgtccttgcccaagcaaatgagaggcaggggcttcccgggctgctgctgtcccgccctctgtgggg

SEQ ID NO: 20396 - DNA, 120 bp, Artificial Sequence
  ENSG00000023191_27 (sequence is synthesized)
caggaggaggtgcccacagaggctgggtggtgatagccaggagatgggctggcatctgcattacccaagctctgctgcccatggtggcctttctgggggtgggtgctggtccctgccccc

SEQ ID NO: 20397 - DNA, 120 bp, Artificial Sequence
  ENSG00000023191_28 (sequence is synthesized)
tgccccacccctgatgtctgctccagagacaaaggtggggagggtgctgaagaggaagtgtttgcccagggagaggctgcggctcctcctgaaacatcagccctgtgggtcctgtttgca

SEQ ID NO: 20398 - DNA, 120 bp, Artificial Sequence
  ENSG00000023191_29 (sequence is synthesized)
ctgcctcctggagcagctggtgtatgtgcacgcgctgggcgggtggtgcggccagggctgcccagggaggaaggcgggggtgggggaggacacgggcccatgcctcccttctggcctgtg

SEQ ID NO: 20399 - DNA, 120 bp, Artificial Sequence
  ENSG00000023191_30 (sequence is synthesized)
cttggggtgctggtggggcaggctggcgggtggcggctccctctgaagggtgcattgctctggaacgccttgtttgtggacatgaagtatgaattctgtgcagctaccacgtgcatgaga

SEQ ID NO: 20400 - DNA, 120 bp, Artificial Sequence
  ENSG00000023191_31 (sequence is synthesized)
tgtgattcttgtgtttctttttgacaatttaggaatgtaaaacccattccaggctcatgcagcatgggctgaggtgggcgggccgaggtgggcggccactggccagtgggtctctggctc

SEQ ID NO: 20401 - DNA, 120 bp, Artificial Sequence
  ENSG00000023191_32 (sequence is synthesized)
cggtgtctcagctcctctccctcccttggagacacgagggcaggacacagcttgggtcccctccgtgagcctccatggggcgctgcttgtccctgccaagctgggggctgggagtcctcg

SEQ ID NO: 20402 - DNA, 120 bp, Artificial Sequence
  ENSG00000023191_33 (sequence is synthesized)
gccctcgaggtcctcacaaacccagcagcttcacaagcaggacacgagtgcctgggtgggccgcatcttttctctttttacctggtgatttcaagtagtgtcaggtttgcggaggagtta

SEQ ID NO: 20403 - DNA, 120 bp, Artificial Sequence
  ENSG00000023191_34 (sequence is synthesized)
cgaggaccggacggggctccctggtgaggtggtcctgtgtacctgcggacgctagctctggcccagcacctccaggcagggtctgcttttccgccctgcccttttcgtcttcctcactgg

SEQ ID NO: 20404 - DNA, 120 bp, Artificial Sequence
  ENSG00000023191_35 (sequence is synthesized)
tccaggattgcgtggccctcagccctctgtctccttagccctctcccgtctgtgactgtcccctcgtctctctgggttcttggtggtctgagggtctggccaggctcctgcaggacgtcc

SEQ ID NO: 20405 - DNA, 120 bp, Artificial Sequence
  ENSG00000023191_36 (sequence is synthesized)
tctgttggggcttgtctggtggtttcttgtggttgaagtcctacagttttggcaggaatgcagggagatgccgtggggcctgccaggagcgtcctgtcacaggcgccgtctgccaccctc

SEQ ID NO: 20406 - DNA, 120 bp, Artificial Sequence
  ENSG00000023191_37 (sequence is synthesized)
tccactgtgacgccactgcctttcctcctgtgactgatcagtgccttcgagagatactttaaattctttttatttttagagacagggcattgctctgtcacccaggctggagtggctccc

SEQ ID NO: 20407 - DNA, 120 bp, Artificial Sequence
  ENSG00000023191_38 (sequence is synthesized)
ggccgctgcctgtcccccagccagccccctacatagaacatcgcctgccaggagccgtgaggaggggactcaggtcacaggggccttgtggtgctctcctttccccatgatgctgggtct

SEQ ID NO: 20408 - DNA, 120 bp, Artificial Sequence
  ENSG00000023191_39 (sequence is synthesized)
tccagaagctgaggtgaggcggggcctggcactgcctctggcctggtgcagtctgctttggtagcccggcagcaggggacagagccgccaggggcgcgtgggcagctgcaggtggacagg

SEQ ID NO: 20409 - DNA, 120 bp, Artificial Sequence
  ENSG00000023191_40 (sequence is synthesized)
cagtggcagcagacatttccaacatcagccagaggcacacaggcctggcggtctcacagcgggggggacagggcccttcctgccttatcccagcccccgcacccaagatctggccctgcc

SEQ ID NO: 20410 - DNA, 120 bp, Artificial Sequence
  ENSG00000023191_41 (sequence is synthesized)
cgccatccctagccttccagcatcaccacagacccccactgaaaggtgtgtctgcagacaaggtttccctgggtcgagccacatgcgtgccctccttcactcggcctggagaccccagac

SEQ ID NO: 20411 - DNA, 120 bp, Artificial Sequence
  ENSG00000023191_42 (sequence is synthesized)
cccagagccccgtccagggaaggagcaggtatagacctgccgcctgaagagtgctgctccgggctctgggctctggcaggcgaagggcgtggcagcttggctcaggggagccctgctgac

SEQ ID NO: 20412 - DNA, 120 bp, Artificial Sequence
  ENSG00000023191_43 (sequence is synthesized)
agccaggtatgctccagcctccagaactgctgcctgacgggggccggctgcggggtcctgtccagcacactacgcaccctgcccaccctgcaggagctgcacctcagcgacaacctcttg

SEQ ID NO: 20413 - DNA, 84 bp, Artificial Sequence
  ENSG00000023191_44 (sequence is synthesized)
ttgagcccaggagtttgcgaccaacatactgagtttggccaaaatagtgagacccccgtctctacaaaagatagaaaaaattag

SEQ ID NO: 20414 - DNA, 120 bp, Artificial Sequence
  ENSG00000023191_45 (sequence is synthesized)
tagtgagacccccgtctctacaaaagatagaaaaaattagccagttgcggtagtgaacgcttgtagtcccagctacttgggacgctgagggaggaggagcacttgagccctggaagagga

SEQ ID NO: 20415 - DNA, 120 bp, Artificial Sequence
  ENSG00000023191_46 (sequence is synthesized)
ggctgcagtgagctattttctcatccctgctataacgaatttgtcacaggctgttttataggcctggagctcagaagcccgaagtgagttttaggaggttaaaatcaaggtgttggcaag

SEQ ID NO: 20416 - DNA, 120 bp, Artificial Sequence
  ENSG00000023191_47 (sequence is synthesized)
ggtagttccttctggagtttcccaaggagaatctgcttcttttcctcttccaacttctagaggccaccttcttccatcttcaaaacctactgtctctgcataagaactctcatgattata

SEQ ID NO: 20417 - DNA, 120 bp, Artificial Sequence
  ENSG00000023191_48 (sequence is synthesized)
tgccggccgcccagacaccccagggtagccttcacatctcaatattcttaatatttgcaaagtcccttttgccacttaaggtaacaccacaggtttggagattaggaggtggacatcttt

SEQ ID NO: 20418 - DNA, 120 bp, Artificial Sequence
  ENSG00000023191_49 (sequence is synthesized)
cagggccattcttattttaaaaaatgtactgtcgataagaatagttaaaatgtaaaatatttgaagggatttattctgaatcgaatatgagtgaccgcggccggtgacacagccctcagg

SEQ ID NO: 20419 - DNA, 120 bp, Artificial Sequence
  ENSG00000023191_50 (sequence is synthesized)
ggatcctgggaacatgtgcccaaggtggttggggcagtttggttttacatgttttagagagacatgaggcattaatgaaatacatttaagatatccattggtttggtccagaaaggcggg

SEQ ID NO: 20420 - DNA, 120 bp, Artificial Sequence
  ENSG00000023191_51 (sequence is synthesized)
ctgtcatcaccctccctccccatccagttgtcctttgcaaggcacagctgccccaggacccgacggtgggaacagatgcctggccgtgagtcaggttccactcaccgcctcagtgtgtgt

SEQ ID NO: 20421 - DNA, 120 bp, Artificial Sequence
  ENSG00000023191_52 (sequence is synthesized)
gggggacccggccattgtgagttgaccacagcctgggacgtgcaggtggccctgccctccagaggctggtttctttctcccgggcctggttgggccccaaagtctgaggtccgggagggg

SEQ ID NO: 20422 - DNA, 120 bp, Artificial Sequence
  ENSG00000023191_53 (sequence is synthesized)
gtgaggggtttccagaaggaatgccggtgtccacagaggcccgggcctctggatgagtctgtgggggtccctcagcactgacacctgatgcccaggcagaagactgaggggagatgagac

SEQ ID NO: 20423 - DNA, 120 bp, Artificial Sequence
  ENSG00000023191_54 (sequence is synthesized)
agaggacttctgcaccgtttcccgaggacagtttggcagtgtttcagaagggccttagaaccaggcaggcccccttctaggatggtggaaagcctaaagatctgaaaacggtctcaagtg

SEQ ID NO: 20424 - DNA, 120 bp, Artificial Sequence
  ENSG00000023191_55 (sequence is synthesized)
agtgtcgtcttagcgattggctgactaaaccgaatgcaagccggagactgcacacgatgttgccgttaacagttacactgggccgggcagtcagaggcaggcggatcacctgaggtcagg

SEQ ID NO: 20425 - DNA, 120 bp, Artificial Sequence
  ENSG00000023191_56 (sequence is synthesized)
gtggactccccgccagccccggcctggaggctccgcccgcccccgcctgggcggaaggaacgcggagcggctctggccttgggtctgcggcggcggcgtcgggccactcttcacctccac

SEQ ID NO: 20426 - DNA, 120 bp, Artificial Sequence
  ENSG00000023228_0 (sequence is synthesized)
agagttagccgaggccgccatattgaataagcgacccggcctcctagggggtcgtcgtggtccagacagtttagcagaacagcctccgcggctccggggagaagcaatatgttaaggata

SEQ ID NO: 20427 - DNA, 120 bp, Artificial Sequence
  ENSG00000023228_1 (sequence is synthesized)
cctgtaagaaaggccttagtaggcctttctaagtctcctaaaggatgtgttcgaacaactgccacagcagcaagcaacttgattgaagtatttgttgatggtcagtctgtcatggtggaa

SEQ ID NO: 20428 - DNA, 120 bp, Artificial Sequence
  ENSG00000023228_2 (sequence is synthesized)
ccgggaacgaccgtcctccaagcttgtgagaaggttggcatgcagatccctcgattctgttatcatgaaaggttgtctgttgctggaaactgcaggatgtgccttgttgaaattgagaaa

SEQ ID NO: 20429 - DNA, 120 bp, Artificial Sequence
  ENSG00000023228_3 (sequence is synthesized)
gcccctaaggttgtagctgcttgtgccatgccagtaatgaagggttggaatatcctaacaaactcagaaaaatccaaaaaagccagggaaggtgtgatggagttcttattagcaaatcac

SEQ ID NO: 20430 - DNA, 120 bp, Artificial Sequence
  ENSG00000023228_4 (sequence is synthesized)
ccattggactgtcctatttgtgaccagggaggtgaatgtgatctgcaggaccagtccatgatgtttggaaatgataggagccgatttttagaggggaagcgtgctgtggaagacaagaac

SEQ ID NO: 20431 - DNA, 120 bp, Artificial Sequence
  ENSG00000023228_5 (sequence is synthesized)
attgggccattggtaaagaccatcatgacaagatgtatacagtgtactcgctgcatcaggtttgcaagtgagattgcaggagtagatgatttgggaacaacaggcagaggaaatgatatg

SEQ ID NO: 20432 - DNA, 120 bp, Artificial Sequence
  ENSG00000023228_6 (sequence is synthesized)
caagttggcacatacattgaaaagatgttcatgtctgaactgtctgggaatatcattgatatctgccctgtaggtgccctaacctctaagccctatgcctttactgcccggccttgggaa

SEQ ID NO: 20433 - DNA, 120 bp, Artificial Sequence
  ENSG00000023228_7 (sequence is synthesized)
acaagaaagacagaatccattgatgtaatggatgcggttggaagtaatattgtggttagcacaagaactggagaagtgatgaggattttgccacgtatgcatgaggacatcaatgaagag

SEQ ID NO: 20434 - DNA, 120 bp, Artificial Sequence
  ENSG00000023228_8 (sequence is synthesized)
tggatctctgataaaaccagatttgcctatgatgggctaaaacgtcaaagacttaccgagccaatggtcagaaatgaaaaagggcttttaacctatacttcttgggaggatgcgctctct

SEQ ID NO: 20435 - DNA, 120 bp, Artificial Sequence
  ENSG00000023228_9 (sequence is synthesized)
cgcgtagctggaatgttgcagagttttcaaggcaaagatgtggcagcaattgcaggtggcttggtggatgctgaagccctggtagctctcaaagatttgcttaatagagtggactctgac

SEQ ID NO: 20436 - DNA, 120 bp, Artificial Sequence
  ENSG00000023228_10 (sequence is synthesized)
accttatgcactgaagaggtcttccccactgcaggagctggcacagatttgcgttccaattatcttcttaatactacaattgctggtgtggaagaggcagatgttgttcttctggttggt

SEQ ID NO: 20437 - DNA, 120 bp, Artificial Sequence
  ENSG00000023228_11 (sequence is synthesized)
acaaacccacgttttgaggcaccactgtttaatgctagaattcgaaagagctggctgcataatgacttaaaagtggcccttataggcagtccagtggacctcacttacacatatgaccac

SEQ ID NO: 20438 - DNA, 120 bp, Artificial Sequence
  ENSG00000023228_12 (sequence is synthesized)
ctgggagactcccccaaaattcttcaagacattgcttcgggaagccatccatttagccaggtcctaaaggaagctaaaaaaccaatggtggttttaggcagttctgcactccaaagaaat

SEQ ID NO: 20439 - DNA, 120 bp, Artificial Sequence
  ENSG00000023228_13 (sequence is synthesized)
gatggagcagcaattcttgcagctgtttctagcattgcacaaaagattcggatgactagtggtgttactggtgattggaaagttatgaatatccttcataggattgcaagtcaagtagct

SEQ ID NO: 20440 - DNA, 120 bp, Artificial Sequence
  ENSG00000023228_14 (sequence is synthesized)
gctttggaccttggctataagcctggggtggaagcaattcggaagaaccctcccaaggtgctgtttctcctgggagcagatggaggttgtatcacacgacaggatttgccaaaggattgt

SEQ ID NO: 20441 - DNA, 120 bp, Artificial Sequence
  ENSG00000023228_15 (sequence is synthesized)
ttcattatttatcaaggacatcatggtgatgttggggctcccatagctgatgttattctcccaggagctgcttacacagagaagtctgctacatatgtcaacactgagggtagagctcag

SEQ ID NO: 20442 - DNA, 120 bp, Artificial Sequence
  ENSG00000023228_16 (sequence is synthesized)
cagactaaggtagcagtgacacctcctggcttggcaagagaagactggaaaattataagagcactctctgagattgctggaatgactcttccatatgatactctggatcaagtaaggaac

SEQ ID NO: 20443 - DNA, 120 bp, Artificial Sequence
  ENSG00000023228_17 (sequence is synthesized)
agattggaagaagtctctcctaatcttgttcgatatgatgatattgaaggggctaattacttccagcaagcaaatgagctctcaaagctagtgaaccagcagcttcttgctgacccactt

SEQ ID NO: 20444 - DNA, 120 bp, Artificial Sequence
  ENSG00000023228_18 (sequence is synthesized)
gttccacctcagctaactataaaagacttctacatgacagattcaattagcagagcctcacagacaatggccaaatgtgtcaaagctgtcacagagggtgcccaggcagtagaggaacca

SEQ ID NO: 20445 - DNA, 120 bp, Artificial Sequence
  ENSG00000023228_19 (sequence is synthesized)
tccatatgctgaagcttctactaggatcccagttttgccgcagataattaatggacaactgtagtgcagtgatcctttacaggtttatttctttgtaaaaaaaaataataataatttgaa

SEQ ID NO: 20446 - DNA, 120 bp, Artificial Sequence
  ENSG00000023228_20 (sequence is synthesized)
tcatgtaatatttaaggttatactatgcctatttgaaaatgatattagttatcaactttgcagtttgaaaaacatgtattgtgtgtaaaggttaaataacaaaactatgcagatgctctt

SEQ ID NO: 20447 - DNA, 120 bp, Artificial Sequence
  ENSG00000023228_21 (sequence is synthesized)
aaaagcattgataacctttgtgacgaacataaagagatccttaaattatgagttgttggcttatcttcataaataatttgtctgtaaaatggatgaaatgaaaagaggttcaattaaaac

SEQ ID NO: 20448 - DNA, 120 bp, Artificial Sequence
  ENSG00000023228_22 (sequence is synthesized)
ctacttttttctagtgctaaagaaaagatttaagcaccttgtcaagctgggtaaataggaaaaatacataatcatgctcagatatgtatctaggataattataattaataataatcatag

SEQ ID NO: 20449 - DNA, 120 bp, Artificial Sequence
  ENSG00000023228_23 (sequence is synthesized)
taacaatggctaatgataatttagctttattatatgtgctaagcactctggttttacatgcattatcttcttttgttcttgctacaaccctgtgagatagtagtattatctcattttact

SEQ ID NO: 20450 - DNA, 120 bp, Artificial Sequence
  ENSG00000023228_24 (sequence is synthesized)
gatgaagactgaagcctaggtatattaaatagcttgcccaaggccacacagcaaaagtcaccaactcaaacctacttcttatttactccaaagcctgttgttcttaactgcaacatatta

SEQ ID NO: 20451 - DNA, 120 bp, Artificial Sequence
  ENSG00000023228_25 (sequence is synthesized)
tttcgtctcattaatgttgattctataggttgttacttctaaaaattagtattgagtttaatggtgaacacatttttctattttctcttgaatctgcttctataatgtcatggtgattta

SEQ ID NO: 20452 - DNA, 120 bp, Artificial Sequence
  ENSG00000023228_26 (sequence is synthesized)
tgtggcttttttttttttataagttatacatgtatgcatgtatacttatgagacctcccttggaatgagggaggtctcaagagatataatttagattctcattgatgttctgtattcatt

SEQ ID NO: 20453 - DNA, 120 bp, Artificial Sequence
  ENSG00000023228_27 (sequence is synthesized)
atcctaacaccatctgtagtgttaaatcaactaaattatttcagcaataggagacaaaacaaccagctttcataatttttaattgtcaaaaccaaaaggaatcagaataaggatcactga

SEQ ID NO: 20454 - DNA, 120 bp, Artificial Sequence
  ENSG00000023228_28 (sequence is synthesized)
ctgagaatttaaaaaaataaaaaaggaagtaaaaattttacaattaggagataattaaaaatagataatttttttttttaatctaaggttgggtgtggtggcttacacctgtaatcccaa

SEQ ID NO: 20455 - DNA, 77 bp, Artificial Sequence
  ENSG00000023228_29 (sequence is synthesized)
tactcggaaggctgaggtgggaggatcacctgacccaggaggttgaggctgcagtgagccgttgtttcaaacaaaca

SEQ ID NO: 20456 - DNA, 120 bp, Artificial Sequence
  ENSG00000023228_30 (sequence is synthesized)
ttcaaacaaacaaacaaaactatgttcacaatttatttgttttgtaatccttattcttttctgctttcactaaagactcagcccaagtataggatgccctttttccctttgttttttttt

SEQ ID NO: 20457 - DNA, 120 bp, Artificial Sequence
  ENSG00000023228_31 (sequence is synthesized)
acaggcgtgagccaccgcgcccagtctaggatgtcgtttttctgatacaacaaaggataaggttttagaataatagtatgttacaatatctttaaaaacagcaggtgcagtggctcacac

SEQ ID NO: 20458 - DNA, 120 bp, Artificial Sequence
  ENSG00000023228_32 (sequence is synthesized)
ttagaataatagtatgttacaatatctttaaaaacagcaggtgcagtggctcacacctgtaagcccagcattttgggggttcaaggcaggaagatcagttgaggccaggagttcaagacc

SEQ ID NO: 20459 - DNA, 120 bp, Artificial Sequence
  ENSG00000023228_33 (sequence is synthesized)
caaaaaaatgtaaaacttaaaattgcacaaaatttgtcacctgtaccagcttttagaactgtttatcttatcctcctcagtgatacatcatgaagttgtgtgctttgcctaaaatgccca

SEQ ID NO: 20460 - DNA, 120 bp, Artificial Sequence
  ENSG00000023228_34 (sequence is synthesized)
gttacctgaaattgtataaattcttgccaaaagtgtttgaacttaatacaaacttcccatctcttacctcttagcactgtgctcatcttgaggggacatagtcccaattttgtattttat

SEQ ID NO: 20461 - DNA, 120 bp, Artificial Sequence
  ENSG00000023228_35 (sequence is synthesized)
ataatactgttaatgaatatgtgtagacttcatatggttgtgggtaagagaatactgcattcagatagaaaagatgctatatagctaagttgatccaggatccttgggctacctgctagg

SEQ ID NO: 20462 - DNA, 84 bp, Artificial Sequence
  ENSG00000023228_36 (sequence is synthesized)
atagctaagttgatccaggatccttgggctacctgctaggcagcttgtggtgaacaatcataatctctaaaaaataccttgtct

SEQ ID NO: 20463 - DNA, 120 bp, Artificial Sequence
  ENSG00000023228_37 (sequence is synthesized)
agatcacaccattgcactgcagcctgggtgaagaaacaagcctccctctcaaaaaataaataaataaataaataatacctcctctgggataagtagtgctccgtctgtctcatgggcaca

SEQ ID NO: 20464 - DNA, 120 bp, Artificial Sequence
  ENSG00000023228_38 (sequence is synthesized)
cctctgggataagtagtgctccgtctgtctcatgggcacatattagtgtcgtaatgccaaatactaaggttattgtaagcataaacattgaagataattgctagagaaaaatagactgaa

SEQ ID NO: 20465 - DNA, 120 bp, Artificial Sequence
  ENSG00000023228_39 (sequence is synthesized)
aaagatgtaagaaaaatacacgtagatgagagtaacctgtctggtggaatcatgacattctaagcagtgaaggaatcaccaatgagaaaatctacaaaggctcaagatcaagtctcttta

SEQ ID NO: 20466 - DNA, 120 bp, Artificial Sequence
  ENSG00000023228_40 (sequence is synthesized)
ggtgaataaggcaatctagaaagaccttggaataataataccatttcctgaggaccttctaaataagtgccattaaagctttaaatacattaagactattcttcacaaaatctctgctaa

SEQ ID NO: 20467 - DNA, 120 bp, Artificial Sequence
  ENSG00000023228_41 (sequence is synthesized)
tagtaggtattaattgagactcaagaaatatcaaataacttatttatggctacacagctagatactaatggcaggagtgtttaattagaagtacttttactatcccaggttgcctcaaat

SEQ ID NO: 20468 - DNA, 120 bp, Artificial Sequence
  ENSG00000023228_42 (sequence is synthesized)
aagtacttttactatcccaggttgcctcaaatgaaaacattttggacagcaatgtaaggtgaatagctgagcatgatggcacaagctatagccccagctacttgggaggctgaggcacaa

SEQ ID NO: 20469 - DNA, 120 bp, Artificial Sequence
  ENSG00000023228_43 (sequence is synthesized)
tggacaactgtattcctgcagcctgcttgtattcctctcctcaaagtgctttttccttctctgccacatgactagtctgtgaattttccaaacttctacgctctgcttcccttttaaata

SEQ ID NO: 20470 - DNA, 76 bp, Artificial Sequence
  ENSG00000023228_44 (sequence is synthesized)
ctctgcttcccttttaaatatgttccaactttaagttatttctttgcttccatatctgattgtaggctgctagcat

SEQ ID NO: 20471 - DNA, 120 bp, Artificial Sequence
  ENSG00000023228_45 (sequence is synthesized)
tcaaacttccacagattcctagggcctggacacaatgcacccaagctatttgctaaagcatgacatagatgtacctttattcctgttcccaataacttcctcatttccatctgagacctc

SEQ ID NO: 20472 - DNA, 120 bp, Artificial Sequence
  ENSG00000023228_46 (sequence is synthesized)
atcactctggacttcaccatatgtctatcagcattttggtcacaaccacttaactagtctctaagttccaaactttccctcatctttctgtcttctgagccctccagattcttccaacct

SEQ ID NO: 20473 - DNA, 120 bp, Artificial Sequence
  ENSG00000023228_47 (sequence is synthesized)
ctgcctgttacccagttccaaagctgtttctacattttccaatatgtatagcagtgccccactgtcagtactaatctgttttaatctgtttgcattactgtaaaggaatatctgagattg

SEQ ID NO: 20474 - DNA, 120 bp, Artificial Sequence
  ENSG00000023228_48 (sequence is synthesized)
ggtaattcttgcaaaagagagatttaattggcttacagtttctgcaggctgtacacaaagcatggcaccagcagctgcttctgatgagggcctcaggaagcttacaatcatggtagaagg

SEQ ID NO: 20475 - DNA, 120 bp, Artificial Sequence
  ENSG00000023228_49 (sequence is synthesized)
caaaatgggagcgagcatatcacatggtgagagagggagcaagagagaggaggaggtcccagactctaaacaaccaaatttcacatgaactaagatctcactcatcaccaaggtgatggt

SEQ ID NO: 20476 - DNA, 120 bp, Artificial Sequence
  ENSG00000023228_50 (sequence is synthesized)
gccaagccattcatgaaggatttgccccatgattctatacctcccacgaggccctacctccagcattgggggttacatttcaacatgagatttggaagtgacagccatccaaaccatatc

SEQ ID NO: 20477 - DNA, 120 bp, Artificial Sequence
  ENSG00000023228_51 (sequence is synthesized)
agcaacataacaagacccccaactcttaaaaaaaaaagttgaatatatatccaaaaatatcttgaattccatatggaaagcctcccccctcaaatttgtagtaaattgtattataatgaa

SEQ ID NO: 20478 - DNA, 70 bp, Artificial Sequence
  ENSG00000023228_52 (sequence is synthesized)
cctcccccctcaaatttgtagtaaattgtattataatgaatacattaattaaaaatatacttggcctggc

SEQ ID NO: 20479 - DNA, 74 bp, Artificial Sequence
  ENSG00000023228_53 (sequence is synthesized)
gcaccggtaaaaattaaaaaatatatttgacaatacccagtaccaatttattgtttgttgttgacattaacatt

SEQ ID NO: 20480 - DNA, 120 bp, Artificial Sequence
  ENSG00000023228_54 (sequence is synthesized)
ttgtttgttgttgacattaacattttctttaagagtatttcttcatctgtaaaatgaggataaaaattgtaaaattgtacctacttccagcctcatagaattgttttgatgattacatca

SEQ ID NO: 20481 - DNA, 120 bp, Artificial Sequence
  ENSG00000023228_55 (sequence is synthesized)
gaaagcttgtaaaaaccttaggcctgtttcctgacatatactaaatgccccatgtgctaactgaggatgatcattgtaggaaaatttcatagactatgagggaaagccatgcctaaaata

SEQ ID NO: 20482 - DNA, 120 bp, Artificial Sequence
  ENSG00000023228_56 (sequence is synthesized)
ggaaagccatgcctaaaataatctccagcttattaagaagtgcattcctttttgtttctttgttttatcttagattgagtctcactgtattgccagtctggagtgcagtggcgcaatctc

SEQ ID NO: 20483 - DNA, 75 bp, Artificial Sequence
  ENSG00000023228_57 (sequence is synthesized)
atgtgagccagcgcacccagcctggccatcttttataaaaagatgaagatgtcagaattccctaataagattctg

SEQ ID NO: 20484 - DNA, 120 bp, Artificial Sequence
  ENSG00000023228_58 (sequence is synthesized)
atcttttataaaaagatgaagatgtcagaattccctaataagattctggctctgttacccagactggagtgcaatgcatggcatgatctcagcacactgcaacctccatctcctgggctc

SEQ ID NO: 20485 - DNA, 120 bp, Artificial Sequence
  ENSG00000023228_59 (sequence is synthesized)
catagcactttagtttgctgatttaatttatcccaagggacaaggatgttaatgagaaaactgactagatttcagatcacagattttaagagaacaaggatctcaaaaccaaataccctc

SEQ ID NO: 20486 - DNA, 120 bp, Artificial Sequence
  ENSG00000023228_60 (sequence is synthesized)
tgcttaaagtgttttttgtgtttttcactactgaaaatgtttagagattgacttacctattgctgatactcaaaacatctgatatcttaatatttttaaataactcactaaaagcatatg

SEQ ID NO: 20487 - DNA, 120 bp, Artificial Sequence
  ENSG00000023228_61 (sequence is synthesized)
ttgaaaatggcaatgtatagtctgagactggtgattagactggactaaaagcatatgttggaaatggcaaatatatgatctgagactggtgattaatttacagtattggcacctaaagag

SEQ ID NO: 20488 - DNA, 120 bp, Artificial Sequence
  ENSG00000023228_62 (sequence is synthesized)
atactgagatgaataacttattaatttccttcttaaaatcataattttggatctgtaaaggactatacaaaaaaaaattttagtattatacctgcattttataattgtggaaatggaggc

SEQ ID NO: 20489 - DNA, 120 bp, Artificial Sequence
  ENSG00000023228_63 (sequence is synthesized)
cagaaagaataagaggcaagttaggggcagatcttgggtttggatcagctcttctgatgcctggttctgtgacattacaaagcctgaaattcagctccaacatctattaaacatttgcag

SEQ ID NO: 20490 - DNA, 68 bp, Artificial Sequence
  ENSG00000023228_64 (sequence is synthesized)
agcctgaaattcagctccaacatctattaaacatttgcagagtatcagctgggtgcggtggctctcat

SEQ ID NO: 20491 - DNA, 90 bp, Artificial Sequence
  ENSG00000023228_65 (sequence is synthesized)
tcccagatcgcgccactgcgctctagcatgggcgacaaagcgagaccccatctcaaaaagaaaaacaaaatttttttgcagagtatctac

SEQ ID NO: 20492 - DNA, 120 bp, Artificial Sequence
  ENSG00000023228_66 (sequence is synthesized)
tctcaaaaagaaaaacaaaatttttttgcagagtatctactgtgtgtcaagtacattacccaagactacaaagagaaatacaatttagctaatgtcctcaagaagctaacagtatactaa

SEQ ID NO: 20493 - DNA, 120 bp, Artificial Sequence
  ENSG00000023228_67 (sequence is synthesized)
aagagatatgtaggcatcaattatagtaatgacataacatattctaatagaggtaagtacataacacagtgggcatgtctagttgtctttgtttctgctgttaaaacagaatatcacaga

SEQ ID NO: 20494 - DNA, 120 bp, Artificial Sequence
  ENSG00000023228_68 (sequence is synthesized)
ttgtttctgctgttaaaacagaatatcacagactgggtgatgggttgattgattgactgattgaggcaactctgtcacccaggctggggttcagtggcatgatcacagttcactgcagcc

SEQ ID NO: 20495 - DNA, 120 bp, Artificial Sequence
  ENSG00000023228_69 (sequence is synthesized)
tcagcctcctgaacagctggaactacaggtgtgagccaccatgccccactaatttttatttatttattttttttttctgagacggagtctcagtttgtcgcccaggctgaagtgcagtgg

SEQ ID NO: 20496 - DNA, 60 bp, Artificial Sequence
  ENSG00000023228_70 (sequence is synthesized)
tcactgcaacctccacctcccgggttcagttttcctgcctcaatctactaggatctagct

SEQ ID NO: 20497 - DNA, 120 bp, Artificial Sequence
  ENSG00000023228_71 (sequence is synthesized)
ttttaaaaatattttatagagacaggtctcactatgttgcccaggctcgtcttgaacccctgggcccaggcgctcctcccaccttgacctcccaaagttctggaattacacatgtgagcc

SEQ ID NO: 20498 - DNA, 120 bp, Artificial Sequence
  ENSG00000023228_72 (sequence is synthesized)
aacacaccaggcccagactgggtaatttataaagaaatttacttctgcccacaccgccccgcctccccgcgcgagtggctgaggcgtagcgctgccatccccgcacccctgggaacatgg

SEQ ID NO: 20499 - DNA, 120 bp, Artificial Sequence
  ENSG00000023228_73 (sequence is synthesized)
cgctgcgagtggtgcggagcgtgcgggccgtgctctgcagcctgcacgtggtcctggcacctgccgcgccctgcctatcgaggccctggcagcttgggatgggcgccgtctggttactgt

SEQ ID NO: 20500 - DNA, 120 bp, Artificial Sequence
  ENSG00000023228_74 (sequence is synthesized)
aatctgcctgaagttgggacaaaattgaacaaacaagatgagtttggtgctttggagagtgtgaaagctgctagtgaactctattctcctttatcaggagaagtaaccgaaattaatgaa

SEQ ID NO: 20501 - DNA, 120 bp, Artificial Sequence
  ENSG00000023228_75 (sequence is synthesized)
gctcttgcagaaaatccaggacttgtaaacaaatctcgttatgaagatggttggctgatcaagatgacactgagtaacccttcataactagatgaacttatgagtgaagaagcatatgag

SEQ ID NO: 20502 - DNA, 120 bp, Artificial Sequence
  ENSG00000023228_76 (sequence is synthesized)
aaatacataaaatctattgaggagtgaaaatggaaccactaaataagctagtatgaaataacgcaacccagcagagttgtcctaaattagtggtggatagaagacttagaatagcaactt

SEQ ID NO: 20503 - DNA, 120 bp, Artificial Sequence
  ENSG00000023228_77 (sequence is synthesized)
ttagcattacccatgggaaaaaaaaactactgttaacactgctaatgaaagaagatgccttttaactttctaatgattgtagataaacataatatgtgtctttttcacaacatcctatga

SEQ ID NO: 20504 - DNA, 120 bp, Artificial Sequence
  ENSG00000023228_78 (sequence is synthesized)
tttttagactaggctctagtattcatgaaattatccatgaaattatccatggtaaaaattagttacaaaaattacataattcaaagataatgttgttattcttaagccttatataatatt

SEQ ID NO: 20505 - DNA, 120 bp, Artificial Sequence
  ENSG00000023228_79 (sequence is synthesized)
gtaacttgtgtatgtccatacctggacttgggatgaaatacttaatgatctttccattggaaataactgggagtgaagaagtttttgttgcttgtacagtgtcagatgaagaacaacact

SEQ ID NO: 20506 - DNA, 120 bp, Artificial Sequence
  ENSG00000023228_80 (sequence is synthesized)
atcttaattttgcaatacactgcatttgctggtgctgtttttatatagtgaagcaacagctgtacagcaaaataataaaatactcacttcttcgttaaaaaaaaaaaaaatttacttctt

SEQ ID NO: 20507 - DNA, 120 bp, Artificial Sequence
  ENSG00000023228_81 (sequence is synthesized)
acaattctggaggccaggaagaccatgatcaggtgccagcatctgggaagggccttcttgctgtcctcccatggcagaagatggaagggcaagggagagctaacatgctcccgcaaaccc

SEQ ID NO: 20508 - DNA, 120 bp, Artificial Sequence
  ENSG00000023228_82 (sequence is synthesized)
tttttataatggcatcaatcaaatatgaggccagagtccttgtgacctaatcatctcccagaaggctccgcctcccaaccctgttgcattgggattaagtttccaacacatgaattgtgg

SEQ ID NO: 20509 - DNA, 120 bp, Artificial Sequence
  ENSG00000023228_83 (sequence is synthesized)
agacaacacattcaaaacatagcattccacaccttgggctccccagattcatgtcctcacatgcaaaataaattcattccatcccaatagcccctaaaaagtcttaacttgttccagcat

SEQ ID NO: 20510 - DNA, 120 bp, Artificial Sequence
  ENSG00000023228_84 (sequence is synthesized)
caactttaaagtcaaagtccaaagtctcatctaaatcagatatgagtgagactcaaggcatgattcatcatgagacaaaggatgtacatttgcaatgtttgtcatgtcagacaaaacaaa

SEQ ID NO: 20511 - DNA, 120 bp, Artificial Sequence
  ENSG00000023228_85 (sequence is synthesized)
aatatgtaaatatccatcaatagggaactgctgaaaaatttttttgtataatcataaaatgaaacatgcagatgtttaaaccaatgagctagatctcaacgtgctgatatggaaagtgct

SEQ ID NO: 20512 - DNA, 120 bp, Artificial Sequence
  ENSG00000023228_86 (sequence is synthesized)
tcagaatgtattaaggacataaattaagtgtacaataatgtgtgtgtgtgtatatatgtatatgcttacgtgtgtatggaaagtatctcagcagatacaataaaaacttaattgtgatta

SEQ ID NO: 20513 - DNA, 120 bp, Artificial Sequence
  ENSG00000023228_87 (sequence is synthesized)
gacgtagtcttctgttgtccttgactgggcgccgcctcccgccccgccgcctcggaagcccctgagagccggcagatggggggcttttagccacggtctctggtctgatgaagcagaaaa

SEQ ID NO: 20514 - DNA, 120 bp, Artificial Sequence
  ENSG00000023228_88 (sequence is synthesized)
gaggtataatttctgagtcatttcttagtgatgctactaaaggcatatttgatattttagcctgttagaatgattttcaaagtcaaggaagatgccagtctgaaatgcagagatgatttg

SEQ ID NO: 20515 - DNA, 120 bp, Artificial Sequence
  ENSG00000023228_89 (sequence is synthesized)
tttgaataatttctatagaaaacatgtattcagaaacaggaattcaaggttacagtgagctctcattgcaccgctgcactccagcctgagggacagagcaagaccctgtctcttaaaaaa

SEQ ID NO: 20516 - DNA, 120 bp, Artificial Sequence
  ENSG00000023287_0 (sequence is synthesized)
ggagtcgacaataacaaaccaagccgcggcggtgtccgcggccctgccgagccctcggcgttgcctcagaatcccccagtcgcctgggcccctcggctctgacaggccgcggccttctgt

SEQ ID NO: 20517 - DNA, 120 bp, Artificial Sequence
  ENSG00000023287_1 (sequence is synthesized)
cccagacccagagccgaggggcctgctcgcgtccttgtccgcccggacccctccctgcctcctagagttcggggccgcggcgggcgggcgcccgggacgccggcggttgtgtcggcttag

SEQ ID NO: 20518 - DNA, 120 bp, Artificial Sequence
  ENSG00000023287_2 (sequence is synthesized)
cggcttagcggtgccgaatgggcggttggtaaccgctgccgaggactaggcggcggcggaagatggtgccgggggtcgctggctctgctgctgccgccggcgaaggaggaggcgttgccg

SEQ ID NO: 20519 - DNA, 120 bp, Artificial Sequence
  ENSG00000023287_3 (sequence is synthesized)
gttttctgagtttaaccagtaatgccattcagttgccaatctcaagcaaagcaaacataagccagttttaatctactttttaagaaaagtggtagtccttttcacagtgcctgacgtaac

SEQ ID NO: 20520 - DNA, 120 bp, Artificial Sequence
  ENSG00000023287_4 (sequence is synthesized)
tgtatcagagggtgaggtataagctcacagaattcagataaatcatcatgaagttatatgtatttctggttaacactggaactactctaacatttgacactgaacttacagtgcaaactg

SEQ ID NO: 20521 - DNA, 120 bp, Artificial Sequence
  ENSG00000023287_5 (sequence is synthesized)
tggcagaccttaagcatgccattcaaagcaaatacaagattgctattcaacaccaggtgctggtggtcaatggaggagaatgcatggctgcagatcgaagagtgtgtacctacagtgctg

SEQ ID NO: 20522 - DNA, 120 bp, Artificial Sequence
  ENSG00000023287_6 (sequence is synthesized)
ggacggatacaaatccaatttttctttttaacaaagaaatgatcttatgtgatcgtccacctgctattcctaaaactaccttttcgacagaaaatgacatggaaataaaagttgaagaat

SEQ ID NO: 20523 - DNA, 120 bp, Artificial Sequence
  ENSG00000023287_7 (sequence is synthesized)
ctcttatgatgcctgcagtttttcatactgttgcttcaaggacacagcttgcattggaaatgtatgaagttgccaagaaactttgttctttttgtgaaggtcttgtacatgatgaacatc

SEQ ID NO: 20524 - DNA, 120 bp, Artificial Sequence
  ENSG00000023287_8 (sequence is synthesized)
ttcaacaccaaggctgggctgcaatcatggccaacctggaggactgttcaaattcataccaaaagctacttttcaagtttgaaagtatttattcaaattatctgcagtccatagaagaca

SEQ ID NO: 20525 - DNA, 120 bp, Artificial Sequence
  ENSG00000023287_9 (sequence is synthesized)
tcaagttaaaacttactcatttaggaactgcagtttcagtaatggccaagattccactgttggagtgcctaaccagacatagttacagagaatgtttgggaagactggattctttacctg

SEQ ID NO: 20526 - DNA, 120 bp, Artificial Sequence
  ENSG00000023287_10 (sequence is synthesized)
aacatgaagactcagaaaaagctgagatgaaaagatccactgaactggtgctctctcctgatatgcctagaacaactaacgaatctttgttaacctcatttcccaagtcagtggaacatg

SEQ ID NO: 20527 - DNA, 120 bp, Artificial Sequence
  ENSG00000023287_11 (sequence is synthesized)
tgtccccagataccgcagatgctgaaagtggcaaagaaattagggaatcttgtcaaagtactgttcatcagcaagatgaaactacgattgacactaaagatggtgatctgccctttttta

SEQ ID NO: 20528 - DNA, 120 bp, Artificial Sequence
  ENSG00000023287_12 (sequence is synthesized)
atgtctctttgttagactggataaatgttcaagatagacctaatgatgtggaatctttggtcaggaagtgctttgattctatgagcaggcttgatccaaggattattcgaccatttatag

SEQ ID NO: 20529 - DNA, 120 bp, Artificial Sequence
  ENSG00000023287_13 (sequence is synthesized)
cagaatgccgtcaaactattgccaaacttgataatcagaatatgaaagccattaaaggacttgaagatcggctctacgccctggaccagatgattgctagctgtggccgactggtgaatg

SEQ ID NO: 20530 - DNA, 120 bp, Artificial Sequence
  ENSG00000023287_14 (sequence is synthesized)
aacagaaagagcttgctcagggatttttagctaatcagaagagagctgaaaacttaaaggatgcatctgtattacctgatttatgcctgagtcacgcaaatcagttgatgattatgttgc

SEQ ID NO: 20531 - DNA, 120 bp, Artificial Sequence
  ENSG00000023287_15 (sequence is synthesized)
aaaatcatagaaaactgttagatattaagcagaagtgtaccactgccaaacaagaactagcaaataacctacatgtcagactgaagtggtgttgctttgtaatgcttcatgctgatcaag

SEQ ID NO: 20532 - DNA, 120 bp, Artificial Sequence
  ENSG00000023287_16 (sequence is synthesized)
atggagagaagttacaagctttgctccgcctcgtaatagagctgttagaaagagtcaaaattgttgaagctcttagtacagttcctcagatgtactgcttagctgttgttgaggttgtaa

SEQ ID NO: 20533 - DNA, 120 bp, Artificial Sequence
  ENSG00000023287_17 (sequence is synthesized)
gaagaaaaatgttcataaaacactacagggagtgggctggtgctttagtcaaagatggaaagagattatatgaagcagaaaaatcaaaaagggaatcctttgggaaattatttaggaagt

SEQ ID NO: 20534 - DNA, 120 bp, Artificial Sequence
  ENSG00000023287_18 (sequence is synthesized)
cttttttaagaaatcgtctgtttaggggactggactcctggcccccttccttttgtactcaaaagcctcgaaagtttgactgtgaacttccagatatttcattaaaagatttacagtttc

SEQ ID NO: 20535 - DNA, 120 bp, Artificial Sequence
  ENSG00000023287_19 (sequence is synthesized)
tgcaatcattttgtccttcggaagttcagccattcctcagggttcccttactttgtgactttgaacctctacaccagcatgtacttgctctacataatttggtaaaagcagcacaaagtt

SEQ ID NO: 20536 - DNA, 120 bp, Artificial Sequence
  ENSG00000023287_20 (sequence is synthesized)
tggatgaaatgtcacagaccattacagatctactgagtgaacaaaaggcatctgtgagtcagacatccccacagtctgcttcttcaccaaggatggaaagtacagcaggaattacaacta

SEQ ID NO: 20537 - DNA, 120 bp, Artificial Sequence
  ENSG00000023287_21 (sequence is synthesized)
ctacctcaccgagaactcctccaccactgactgttcaggatcccttatgtcctgcagtttgtcccttagaagaattatctccagatagtattgatgcacatacgtttgattttgaaacta

SEQ ID NO: 20538 - DNA, 120 bp, Artificial Sequence
  ENSG00000023287_22 (sequence is synthesized)
ttccccatccaaacatagaacagactattcaccaagtttctttagacttggattcattagcagaaagtcctgaatcagattttatgtctgctgtgaatgagtttgtaatagaagaaaatt

SEQ ID NO: 20539 - DNA, 120 bp, Artificial Sequence
  ENSG00000023287_23 (sequence is synthesized)
tgtcgtctcctaatcctataagtgatccacaaagcccagaaatgatggtggaatcactttattcatcagttatcaatgcgatagacagtagacgaatgcaggatacaaatgtatgtggta

SEQ ID NO: 20540 - DNA, 120 bp, Artificial Sequence
  ENSG00000023287_24 (sequence is synthesized)
aggaggattttggagatcatacttctctgaatgtccagttggaaagatgtagagttgttgcccaagactctcacttcagtatacaaaccattaaggaagacctttgccactttagaacat

SEQ ID NO: 20541 - DNA, 120 bp, Artificial Sequence
  ENSG00000023287_25 (sequence is synthesized)
ttgtacaaaaagaacagtgtgacttctcaaattcattaaaatgtacagcagtagaaataagaaacattattgaaaaagtaaaatgttctctggaaataacactaaaagaaaaacatcaaa

SEQ ID NO: 20542 - DNA, 120 bp, Artificial Sequence
  ENSG00000023287_26 (sequence is synthesized)
aagaactactgtctttaaaaaatgaatatgaaggtaaacttgacggactaataaaggaaactgaagagaatgaaaacaaaattaaaaaattgaagggagagttagtatgccttgaggagg

SEQ ID NO: 20543 - DNA, 120 bp, Artificial Sequence
  ENSG00000023287_27 (sequence is synthesized)
aacatgaaaaagaagctgtaatctgcctgcagaatgaaaaggatcagaagttgttagagatggaaaatataatgcactctcaaaattgtgaaattaaagaactgaagcagtcacgagaaa

SEQ ID NO: 20544 - DNA, 120 bp, Artificial Sequence
  ENSG00000023287_28 (sequence is synthesized)
tagtgttagaagacttaaaaaagctccatgttgaaaatgatgagaagttacagttattgagggcagaacttcagtccttggagcaaagtcatctaaaggaattagaggacacacttcagg

SEQ ID NO: 20545 - DNA, 120 bp, Artificial Sequence
  ENSG00000023287_29 (sequence is synthesized)
ttaggcacatacaagagtttgagaaggttatgacagaccacagagtttctttggaggaattaaaaaaggaaaaccaacaaataattaatcaaatacaagaatctcatgctgaaattatcc

SEQ ID NO: 20546 - DNA, 120 bp, Artificial Sequence
  ENSG00000023287_30 (sequence is synthesized)
aggaaaaagaaaaacagttacaggaattaaaactcaaggtttctgatttgtcagacacgagatgcaagttagaggttgaacttgcgttgaaggaagcagaaactgatgaaataaaaattt

SEQ ID NO: 20547 - DNA, 120 bp, Artificial Sequence
  ENSG00000023287_31 (sequence is synthesized)
tgctggaagaaagcagagcccagcagaaggagaccttgaaatctcttcttgaacaagagacagaaaatttgagaacagaaattagtaaactcaaccaaaagattcaggataataatgaaa

SEQ ID NO: 20548 - DNA, 120 bp, Artificial Sequence
  ENSG00000023287_32 (sequence is synthesized)
attatcaggtgggcttagcagagctaagaactttaatgacaattgaaaaagatcagtgtatttccgagttaattagtagacatgaagaagaatctaatatacttaaagctgaattaaaca

SEQ ID NO: 20549 - DNA, 120 bp, Artificial Sequence
  ENSG00000023287_33 (sequence is synthesized)
aagtaacatctttgcataaccaagcatttgaaatagaaaaaaacctaaaagaacaaataattgaactgcagagtaaattggattcagaattgagtgctcttgaaagacaaaaagatgaaa

SEQ ID NO: 20550 - DNA, 120 bp, Artificial Sequence
  ENSG00000023287_34 (sequence is synthesized)
aaattacccaacaagaagagaaatacgaagctattatccagaaccttgagaaagacagacaaaaattggtcagcagccaggagcaagacagagaacagttaattcagaagcttaattgtg

SEQ ID NO: 20551 - DNA, 120 bp, Artificial Sequence
  ENSG00000023287_35 (sequence is synthesized)
aaaaagatgaagctattcagactgccctaaaagaatttaaattggagagagaagttgttgagaaagagttattagaaaaagttaaacatcttgagaatcaaatagcaaaaagtcctgcca

SEQ ID NO: 20552 - DNA, 120 bp, Artificial Sequence
  ENSG00000023287_36 (sequence is synthesized)
ttgactctaccagaggagattcttcaagcttagttgctgaacttcaagaaaagcttcaggaagaaaaagctaagtttctagaacaacttgaagagcaagaaaaaagaaagaatgaagaaa

SEQ ID NO: 20553 - DNA, 120 bp, Artificial Sequence
  ENSG00000023287_37 (sequence is synthesized)
tgcaaaatgttcgaacatctttgattgcggaacaacagaccaattttaacactgttttaacaagagagaaaatgagaaaagaaaacataataaatgatcttagtgataagttgaaaagta

SEQ ID NO: 20554 - DNA, 120 bp, Artificial Sequence
  ENSG00000023287_38 (sequence is synthesized)
caatgcagcaacaagaacgggataaagatttgatagagtcactttctgaagatcgagctcgtttgcttgaggaaaagaaaaagcttgaagaagaagtcagtaagttgcgtagtagcagtt

SEQ ID NO: 20555 - DNA, 120 bp, Artificial Sequence
  ENSG00000023287_39 (sequence is synthesized)
ttgttccttcaccatatgtagctacagccccagaactttatggagcttgtgcacctgaactcccaggtgaatcagatagatccgctgtggaaacagcagatgaaggaagagtggattcag

SEQ ID NO: 20556 - DNA, 120 bp, Artificial Sequence
  ENSG00000023287_40 (sequence is synthesized)
caatggagacaagcatgatgtctgtacaagaaaatattcatatgttgtctgaagaaaaacagcggataatgctgttagaacgaacattgcaattgaaagaagaagaaaataaacggttaa

SEQ ID NO: 20557 - DNA, 120 bp, Artificial Sequence
  ENSG00000023287_41 (sequence is synthesized)
atcaaagactgatgtctcagagcatgtcttcagtatcttcaaggcattctgaaaagatagctattagagattttcaggtgggagatttggtactcatcatcctagacgaacgccatgaca

SEQ ID NO: 20558 - DNA, 120 bp, Artificial Sequence
  ENSG00000023287_42 (sequence is synthesized)
attatgtgttatttactgttagtcctactttatattttctacattcagagtctctacctgccctggatctcaaaccaggtgagggtgcttcaggtgcatctagaagaccctgggtacttg

SEQ ID NO: 20559 - DNA, 120 bp, Artificial Sequence
  ENSG00000023287_43 (sequence is synthesized)
gaaaagtaatggaaaaagaatactgtcaagccaaaaaggcacaaaacagatttaaagttcctttggggacaaagttttacagagtgaaagccgtatcatggaataagaaagtataactta

SEQ ID NO: 20560 - DNA, 120 bp, Artificial Sequence
  ENSG00000023287_44 (sequence is synthesized)
tggacaaaattaatacattctatgacatttttttctgatttgtcctgcagtgctcattcatcactccaaaaacagcaggccatctttttatgcaaaagtcagcgtgacaatatacttcac

SEQ ID NO: 20561 - DNA, 120 bp, Artificial Sequence
  ENSG00000023287_45 (sequence is synthesized)
tggtgtacatcgtttactttttaactggcttcattttaggaataataaattcatcagaatccttggctgaattaaaatggtttttgttttttggtttttttttttacccagacaactcta

SEQ ID NO: 20562 - DNA, 120 bp, Artificial Sequence
  ENSG00000023287_46 (sequence is synthesized)
gaaatgcggaccaaactacttcattttctcaaagggcataccttgtgcattgtggcttatgatgagccatattaattgcctgttaaatatacactagcttgaacttagatgttaaatgtt

SEQ ID NO: 20563 - DNA, 120 bp, Artificial Sequence
  ENSG00000023287_47 (sequence is synthesized)
attattaccagcatttgtccttttgtgaaatcagtatcagaatacttgcactctttaacacattctttataaaatgtataaattattcagaactatttaaaataaagaggagtgttattg

SEQ ID NO: 20564 - DNA, 120 bp, Artificial Sequence
  ENSG00000023287_48 (sequence is synthesized)
catgctgataatcattttgagtttgcctcagtagatactaaagcaaattgtttcagtttttttaaatgccctttgatgtttcaaaaaaaaaaaggaactgtaatttgattgactgatttt

SEQ ID NO: 20565 - DNA, 120 bp, Artificial Sequence
  ENSG00000023287_49 (sequence is synthesized)
aagatcagccataagtaatcagcaatcttcaaaagcactttcagtggattggtcatctgggttctaaagggaagagtctgtgctactaaccatttcaaatgcagactcaaaccttcccaa

SEQ ID NO: 20566 - DNA, 120 bp, Artificial Sequence
  ENSG00000023287_50 (sequence is synthesized)
catctttatgactctagaataatcatattgatgaaatcgtaattcatggttgagtttcagaacaaaagatattcattgcacattaaccatttagaggtcatttaaataacaaaatattgt

SEQ ID NO: 20567 - DNA, 120 bp, Artificial Sequence
  ENSG00000023287_51 (sequence is synthesized)
attgtaaaagaactgtacaattttaaaacaataaagatttgaacctgtaaatgtgtgtgccttttaaagaaggatacatttttaatatatttgagtgattgctgggaagtgtgaaaatat

SEQ ID NO: 20568 - DNA, 120 bp, Artificial Sequence
  ENSG00000023287_52 (sequence is synthesized)
tgttatgtatcatatcaaagagaaacatgtttattacaaaaatgttctttaactatatactatgtaacagggtaaacagtgttatgtagaatagaattgtgtaaactagatctttagaga

SEQ ID NO: 20569 - DNA, 120 bp, Artificial Sequence
  ENSG00000023287_53 (sequence is synthesized)
agttgccattgagcaaagttatttaaatgagttagttgagttggatgagaattgtttgaggtttgttgctagagaacaataataaaataattctttttcagaaaatatttaatttcttca

SEQ ID NO: 20570 - DNA, 120 bp, Artificial Sequence
  ENSG00000023287_54 (sequence is synthesized)
attgcagatatccaaataagagaaataaggaagatagagtcatatctaaaatgttagggtggtgatcaaatgctaaagacaaaaggaaggtttcagaggcaggatgattactccaggaaa

SEQ ID NO: 20571 - DNA, 120 bp, Artificial Sequence
  ENSG00000023287_55 (sequence is synthesized)
aaagtaagtgtctaacagcactctaagttattgatgcttctaattcttcaaaatttcaaaatctctgacagtaaatatatggacaataataagaaaataggatttgctttcaagagactt

SEQ ID NO: 20572 - DNA, 120 bp, Artificial Sequence
  ENSG00000023287_56 (sequence is synthesized)
aaattggaaccaagaaagtagaacctttgccacagtatgttacattttcatttttaaaacatttcatgaatcataccccatcatctccatgtacaaatgtgccacagaaaagaatatttg

SEQ ID NO: 20573 - DNA, 120 bp, Artificial Sequence
  ENSG00000023287_57 (sequence is synthesized)
agagagggagcttcgccatgtttctcaggctgatctcgaatttctgacctcaagtaatccgcccgcctcggcctcagaagtgctgagattaggggcttgagccaccgcacccgaccttct

SEQ ID NO: 20574 - DNA, 120 bp, Artificial Sequence
  ENSG00000023287_58 (sequence is synthesized)
tttaaatttaaattagatggccagaggtggggcaaatgcataaataccctaaaaaggatttaaggaagagagttctgaggtgtttattctgaacttagaactaacgtttctacagcattt

SEQ ID NO: 20575 - DNA, 120 bp, Artificial Sequence
  ENSG00000023287_59 (sequence is synthesized)
aggatttcttgctcagtgtagaggtgaaaagcagttcaacaggcagctgatggaagtgatggaactattatggaggatttctagctcagtgtagaggtgaaacacagatgatggaaggaa

SEQ ID NO: 20576 - DNA, 120 bp, Artificial Sequence
  ENSG00000023318_0 (sequence is synthesized)
gtgttcgccgctggagcccgggtcgagaggacgaggtgccgctgcctggagaatcctccgctgccgtcggctcccggagcccagccctttcctaacccaacccaacctagcccagtccca

SEQ ID NO: 20577 - DNA, 120 bp, Artificial Sequence
  ENSG00000023318_1 (sequence is synthesized)
gccgccagcgcctgtccctgtcacggaccccagcgttaccatgcatcctgccgtcttcctatccttacccgacctcagatgctcccttctgctcctggtaacttgggtttttactcctgt

SEQ ID NO: 20578 - DNA, 120 bp, Artificial Sequence
  ENSG00000023318_2 (sequence is synthesized)
aacaactgaaataacaagtcttgatacagagaatatagatgaaattttaaacaatgctgatgttgctttagtaaatttttatgctgactggtgtcgtttcagtcagatgttgcatccaat

SEQ ID NO: 20579 - DNA, 120 bp, Artificial Sequence
  ENSG00000023318_3 (sequence is synthesized)
ttttgaggaagcttccgatgtcattaaggaagaatttccaaatgaaaatcaagtagtgtttgccagagttgattgtgatcagcactctgacatagcccagagatacaggataagcaaata

SEQ ID NO: 20580 - DNA, 120 bp, Artificial Sequence
  ENSG00000023318_4 (sequence is synthesized)
cccaaccctcaaattgtttcgtaatgggatgatgatgaagagagaatacaggggtcagcgatcagtgaaagcattggcagattacatcaggcaacaaaaaagtgaccccattcaagaaat

SEQ ID NO: 20581 - DNA, 120 bp, Artificial Sequence
  ENSG00000023318_5 (sequence is synthesized)
tcgggacttagcagaaatcaccactcttgatcgcagcaaaagaaatatcattggatattttgagcaaaaggactcggacaactatagagtttttgaacgagtagcgaatattttgcatga

SEQ ID NO: 20582 - DNA, 120 bp, Artificial Sequence
  ENSG00000023318_6 (sequence is synthesized)
tgactgtgcctttctttctgcatttggggatgtttcaaaaccggaaagatatagtggcgacaacataatctacaaaccaccagggcattctgctccggatatggtgtacttgggagctat

SEQ ID NO: 20583 - DNA, 120 bp, Artificial Sequence
  ENSG00000023318_7 (sequence is synthesized)
gacaaattttgatgtgacttacaattggattcaagataaatgtgttcctcttgtccgagaaataacatttgaaaatggagaggaattgacagaagaaggactgccttttctcatactctt

SEQ ID NO: 20584 - DNA, 120 bp, Artificial Sequence
  ENSG00000023318_8 (sequence is synthesized)
tcacatgaaagaagatacagaaagtttagaaatattccagaatgaagtagctcggcaattaataagtgaaaaaggtacaataaactttttacatgccgattgtgacaaatttagacatcc

SEQ ID NO: 20585 - DNA, 120 bp, Artificial Sequence
  ENSG00000023318_9 (sequence is synthesized)
tcttctgcacatacagaaaactccagcagattgtcctgtaatcgctattgacagctttaggcatatgtatgtgtttggagacttcaaagatgtattaattcctggaaaactcaagcaatt

SEQ ID NO: 20586 - DNA, 120 bp, Artificial Sequence
  ENSG00000023318_10 (sequence is synthesized)
cgtatttgacttacattctggaaaactgcacagagaattccatcatggacctgacccaactgatacagccccaggagagcaagcccaagatgtagcaagcagtccacctgagagctcctt

SEQ ID NO: 20587 - DNA, 120 bp, Artificial Sequence
  ENSG00000023318_11 (sequence is synthesized)
ccagaaactagcacccagtgaatataggtatactctattgagggatcgagatgagctttaaaaacttgaaaaacagtttgtaagcctttcaacagcagcatcaacctacgtggtggaaat

SEQ ID NO: 20588 - DNA, 120 bp, Artificial Sequence
  ENSG00000023318_12 (sequence is synthesized)
agtaaacctatattttcataattctatgtgtatttttattttgaataaacagaaagaaattttgggtttttaatttttttctccccgactcaaaatgcattgtcatttaatatagtagcc

SEQ ID NO: 20589 - DNA, 120 bp, Artificial Sequence
  ENSG00000023318_13 (sequence is synthesized)
tcttaaaaaaaaaaaacctgctaggatttaaaaataaaaatcagaggcctatctccactttaaatctgtcctgtaaaagttttataaatcaaatgaaaggtgacattgccagaaacttac

SEQ ID NO: 20590 - DNA, 120 bp, Artificial Sequence
  ENSG00000023318_14 (sequence is synthesized)
cattaacttgcactactagggtagggaggacttagggatgtttcctgtgtcgtatgtgcttttctttctttcatatgatcaattctgttggtattttcagtatctcatttctcaaagcta

SEQ ID NO: 20591 - DNA, 120 bp, Artificial Sequence
  ENSG00000023318_15 (sequence is synthesized)
aagagatatacattctggatacttgggaggggaataaattaaagttttcacactgtgtactgtgttttactgattggttggatattgcttatgaaaattccatagtggtatttttttgga

SEQ ID NO: 20592 - DNA, 120 bp, Artificial Sequence
  ENSG00000023318_16 (sequence is synthesized)
ttcttaatgtgtaacttaaacatactttgaagtggaggagagtcataagacagaacatttggcaggaattgtccttatgaaacaagaaaaagaaaatgaaaagtattattaagcttctgt

SEQ ID NO: 20593 - DNA, 120 bp, Artificial Sequence
  ENSG00000023318_17 (sequence is synthesized)
gtttgtctaaaaatgtggcatatggatggcatttaaaactttgaatgaattatacctaaatctgggacagggaggtgacagtggaacaggctaccaatcagaactagatgacttttaagg

SEQ ID NO: 20594 - DNA, 120 bp, Artificial Sequence
  ENSG00000023318_18 (sequence is synthesized)
ctcctcctattatgagacttcaatttccaaagagaagaactagcagagaaattgtatttcagtaattttaagctccttctgtcttgtagagtcttgttatagttgtataaatcaaaaaca

SEQ ID NO: 20595 - DNA, 120 bp, Artificial Sequence
  ENSG00000023318_19 (sequence is synthesized)
cagaataaggaacatatttaactttttttcattataaaatggttagaggaccctaccccctctagattccctgatttccccaggcctgcagcatacagtaagatgggtccctgtgccagg

SEQ ID NO: 20596 - DNA, 120 bp, Artificial Sequence
  ENSG00000023318_20 (sequence is synthesized)
ctgccagggaataaaaccagagggagaggaccctcagtgtcatatcaggaagcccagtgccagaggacagacaggttcaaaactggcttttcctctgggcctgggttggtgctataggcc

SEQ ID NO: 20597 - DNA, 120 bp, Artificial Sequence
  ENSG00000023318_21 (sequence is synthesized)
aagggtcattttatacttgggtataaatcaatcccagtttgggaaaagattatttttaagcttaaaaggctgacatgtgccattatatgtagtatgtaatatatgtaacatcttccaatt

SEQ ID NO: 20598 - DNA, 120 bp, Artificial Sequence
  ENSG00000023318_22 (sequence is synthesized)
catcttccaattcttttaaaataaaattaatatttataatggatatttaatgattgttatttttaaaaaccagcttataattcctcgttatgcatgatttatccaaagtttccatagttt

SEQ ID NO: 20599 - DNA, 120 bp, Artificial Sequence
  ENSG00000023318_23 (sequence is synthesized)
taaatgttaataaggtgataaggggtatatttaatgtattgtatcaaattgtgaataagaaagtaggatggagctttctagaggttgggccttagttctgttatcctcattgcttttaac

SEQ ID NO: 20600 - DNA, 120 bp, Artificial Sequence
  ENSG00000023318_24 (sequence is synthesized)
caataagttaaatgaagttagagttatggtcttcaggttagattatggaccagatctgtgagggtcagcatggaaattcacattcaacaaggtagcacacaggaccaagagcagcacatg

SEQ ID NO: 20601 - DNA, 120 bp, Artificial Sequence
  ENSG00000023318_25 (sequence is synthesized)
caatcaactggaataatatagtaatcctgtaactgggtttgaaaaaataatcaacaaaagatacaattcaagggttaggttgcagagagctggcttgagagtagttattatgaaaaaggc

SEQ ID NO: 20602 - DNA, 120 bp, Artificial Sequence
  ENSG00000023318_26 (sequence is synthesized)
ctcaaggagtacgtgttcagtatgctctaagatgataaagtggctgttaaaaagggagttgatttgaggaagtattacttagcattcatgcatattgggcttaggctctagccctgccac

SEQ ID NO: 20603 - DNA, 120 bp, Artificial Sequence
  ENSG00000023318_27 (sequence is synthesized)
tatcattgtcttctctggactgtgaagtcactgaggacaaggaaactaaatttaatgtctgtatcactagtgcctagaatttctggacacttagtagtcaccatcaggcgtttatttaat

SEQ ID NO: 20604 - DNA, 120 bp, Artificial Sequence
  ENSG00000023318_28 (sequence is synthesized)
gaatgagaagcaaagtgaccttggttacttttttaccctgaggggctcagcactcattaggacttggtgcctaattttataaaaagtcactaagctcaagtgcttggatgaaaggacagc

SEQ ID NO: 20605 - DNA, 120 bp, Artificial Sequence
  ENSG00000023318_29 (sequence is synthesized)
gtggataaaaaggtttttaaaacatggatgttaaggctgttttgcttggagaagacttgggactgggacagtctttagatattatttgaaatgctggcactgtctatctggatcccaggg

SEQ ID NO: 20606 - DNA, 120 bp, Artificial Sequence
  ENSG00000023318_30 (sequence is synthesized)
cttgaactaggatttgaggaagtcacagggaagcagatttcagtctgacatttattcagtgcaagttttttggtgctgtagtatatgatgaaagatgtaaagctgaataaagcattattt

SEQ ID NO: 20607 - DNA, 120 bp, Artificial Sequence
  ENSG00000023318_31 (sequence is synthesized)
ctgccctagagttgttcacagcctagtcaggcatatggatatgtaaacaatgactgtaacgtgttatagatgtaaagacaaaataaaggttaaagagggcataaaggagcactcaattgc

SEQ ID NO: 20608 - DNA, 120 bp, Artificial Sequence
  ENSG00000023318_32 (sequence is synthesized)
agagatttgaggacattatttttattttgagctttaaaaagatgaataggtgttctcaggaggtagggatctggctgagagggaataatctgagcaaaggtatgaaacagcctaatgcat

SEQ ID NO: 20609 - DNA, 120 bp, Artificial Sequence
  ENSG00000023318_33 (sequence is synthesized)
tagagaaaaaagttcttttagtaaggcatttggggttggggaagctagaaaaagaaatgggagctggtcacacagggccttgtgtgccagactaaggggtttgtagtatatattgtaggc

SEQ ID NO: 20610 - DNA, 120 bp, Artificial Sequence
  ENSG00000023318_34 (sequence is synthesized)
agaagagatccatcaacagattgcaagcaaggaagtatgttcactttaaagtttgagaaagaatagtgtggaagcacgtctcaaatttagacttgttccccctctgaaccgtgaatcaga

SEQ ID NO: 20611 - DNA, 120 bp, Artificial Sequence
  ENSG00000023318_35 (sequence is synthesized)
ccatttcaggtagaagtcttccccggtttatctgatctactcggggcctcaggcttctcagctgggaagagaggatgcaagaccagactgaagaacacggttgagtccccagaaccaaaa

SEQ ID NO: 20612 - DNA, 120 bp, Artificial Sequence
  ENSG00000023318_36 (sequence is synthesized)
gggggcctttctgcttcttagccagctacctcttcgagtttttcaaattgtgagggggaccataaaaggatggaaacttttagatgacattctacaaattatttttttctttaaattaaa

SEQ ID NO: 20613 - DNA, 120 bp, Artificial Sequence
  ENSG00000023318_37 (sequence is synthesized)
agaacctagccaataagatagagaatgggcatctaaggcatctcagagctctctgatgaagccaggttgtcaaagatcatttgcaaaagaagggaaaactggcatgacaaaagctacaga

SEQ ID NO: 20614 - DNA, 120 bp, Artificial Sequence
  ENSG00000023318_38 (sequence is synthesized)
gaggagagtgaaatatagaagtgtttgaaatgttcaagctcacaataagcttaaatttatagaaaatgctaaggttgtcaagaaggcttttttttttttcttttttaaacctgagggcaa

SEQ ID NO: 20615 - DNA, 120 bp, Artificial Sequence
  ENSG00000023318_39 (sequence is synthesized)
aaaggaatggataaagtagtgtaatggattgacaatcaggaagaacagaataactcagttttttttctcctacaaggagatatggctggaccaaaataaaatgacatgaaactgcaaaaa

SEQ ID NO: 20616 - DNA, 120 bp, Artificial Sequence
  ENSG00000023330_0 (sequence is synthesized)
atattaaggcgccggcgatcgcggcctgaggctgctcccggacaagggcaacgagcgtttcgtttggacttctcgacttgagtgcccgcctccttcgccgccgcctctgcagtcctcagc

SEQ ID NO: 20617 - DNA, 120 bp, Artificial Sequence
  ENSG00000023330_1 (sequence is synthesized)
gcaggagccagcatacttcctgaacatggagagtgttgttcgccgctgcccattcttatcccgagtcccccaggcctttctgcagaaagcaggcaaatctctgttgttctatgcccaaaa

SEQ ID NO: 20618 - DNA, 120 bp, Artificial Sequence
  ENSG00000023330_2 (sequence is synthesized)
ctgccccaagatgatggaagttggggccaagccagcccctcgggcattgtccactgcagcagtacactaccaacagatcaaagaaacccctccggccagtgagaaagacaaaactgctaa

SEQ ID NO: 20619 - DNA, 120 bp, Artificial Sequence
  ENSG00000023330_3 (sequence is synthesized)
ggccaaggtccaacagactcctgatggatcccagcagagtccagatggcacacagcttccgtctggacaccccttgcctgccacaagccagggcactgcaagcaaatgccctttcctggc

SEQ ID NO: 20620 - DNA, 120 bp, Artificial Sequence
  ENSG00000023330_4 (sequence is synthesized)
agcacagatgaatcagagaggcagcagtgtcttctgcaaagccagtcttgagcttcaggaggatgtgcaggaaatgaatgccgtgaggaaagaggttgctgaaacctcagcaggccccag

SEQ ID NO: 20621 - DNA, 120 bp, Artificial Sequence
  ENSG00000023330_5 (sequence is synthesized)
tgtggttagtgtgaaaaccgatggaggggatcccagtggactgctgaagaacttccaggacatcatgcaaaagcaaagaccagaaagagtgtctcatcttcttcaagataacttgccaaa

SEQ ID NO: 20622 - DNA, 120 bp, Artificial Sequence
  ENSG00000023330_6 (sequence is synthesized)
atctgtttccacttttcagtatgatcgtttctttgagaaaaaaattgatgagaaaaagaatgaccacacctatcgagtttttaaaactgtgaaccggcgagcacacatcttccccatggc

SEQ ID NO: 20623 - DNA, 120 bp, Artificial Sequence
  ENSG00000023330_7 (sequence is synthesized)
agatgactattcagactccctcatcaccaaaaagcaagtgtcagtctggtgcagtaatgactacctaggaatgagtcgccacccacgggtgtgtggggcagttatggacactttgaaaca

SEQ ID NO: 20624 - DNA, 120 bp, Artificial Sequence
  ENSG00000023330_8 (sequence is synthesized)
acatggtgctggggcaggtggtactagaaatatttctggaactagtaaattccatgtggacttagagcgggagctggcagacctccatgggaaagatgccgcactcttgttttcctcgtg

SEQ ID NO: 20625 - DNA, 120 bp, Artificial Sequence
  ENSG00000023330_9 (sequence is synthesized)
tgtgagatttactctgattctgggaaccatgcctccatgatccaagggattcgaaacagccgagtgccaaagtacatcttccgccacaatgatgtcagccacctcagagaactgctgcaa

SEQ ID NO: 20626 - DNA, 120 bp, Artificial Sequence
  ENSG00000023330_10 (sequence is synthesized)
agatctgacccctcagtccccaagattgtggcatttgaaactgtccattcaatggatggggcggtgtgcccactggaagagctgtgtgatgtggcccatgagtttggagcaatcaccttc

SEQ ID NO: 20627 - DNA, 120 bp, Artificial Sequence
  ENSG00000023330_11 (sequence is synthesized)
gtggatgaggtccacgcagtggggctttatggggctcgaggcggagggattggggatcgggatggagtcatgccaaaaatggacatcatttctggaacacttggcaaagcctttggttgt

SEQ ID NO: 20628 - DNA, 120 bp, Artificial Sequence
  ENSG00000023330_12 (sequence is synthesized)
gttggagggtacatcgccagcacgagttctctgattgacaccgtacggtcctatgctgctggcttcatcttcaccacctctctgccacccatgctgctggctggagccctggagtctgtg

SEQ ID NO: 20629 - DNA, 120 bp, Artificial Sequence
  ENSG00000023330_13 (sequence is synthesized)
cggatcctgaagagcgctgagggacgggtgcttcgccgccagcaccagcgcaacgtcaaactcatgagacagatgctaatggatgccggcctccctgttgtccactgccccagccacatc

SEQ ID NO: 20630 - DNA, 120 bp, Artificial Sequence
  ENSG00000023330_14 (sequence is synthesized)
atccctgtgcgggttgcagatgctgctaaaaacacagaagtctgtgatgaactaatgagcagacataacatctacgtgcaagcaatcaattaccctacggtgccccggggagaagagctc

SEQ ID NO: 20631 - DNA, 120 bp, Artificial Sequence
  ENSG00000023330_15 (sequence is synthesized)
ctacggattgcccccacccctcaccacacaccccagatgatgaactacttccttgagaatctgctagtcacatggaagcaagtggggctggaactgaagcctcattcctcagctgagtgc

SEQ ID NO: 20632 - DNA, 120 bp, Artificial Sequence
  ENSG00000023330_16 (sequence is synthesized)
aacttctgcaggaggccactgcattttgaagtgatgagtgaaagagagaagtcctatttctcaggcttgagcaagttggtatctgctcaggcctgagcatgacctcaattatttcactta

SEQ ID NO: 20633 - DNA, 120 bp, Artificial Sequence
  ENSG00000023330_17 (sequence is synthesized)
accccaggccattatcatatccagatggtcttcagagttgtctttatatgtgaattaagttatattaaattttaatctatagtaaaaacatagtcctggaaataaattcttgcttaaatg

SEQ ID NO: 20634 - DNA, 120 bp, Artificial Sequence
  ENSG00000023330_18 (sequence is synthesized)
gggacacgaccacggaggaatccttgcttcagggactcgggaccctgctggaccccttcctcgggtttaggggatgtggggaccaggagaaagtcaggatccctaagagtcttccctgcc

SEQ ID NO: 20635 - DNA, 120 bp, Artificial Sequence
  ENSG00000023330_19 (sequence is synthesized)
accacacaccccagatgatgaactacttccttggtgagtacctggggagctgctggtgcctcactgaggagttgcataaagctgtctttgcagtgtttataattgaagcccttcagaggc

SEQ ID NO: 20636 - DNA, 120 bp, Artificial Sequence
  ENSG00000023445_0 (sequence is synthesized)
ggcacggaaaaggccaggcgacaggtgtcgcttgaaaagactgggcttgtccttgctggtgcatgcgtcgtcggcctctgggcagcaggtttacaaaggaggaaaacgacttcttctaga

SEQ ID NO: 20637 - DNA, 120 bp, Artificial Sequence
  ENSG00000023445_1 (sequence is synthesized)
tttttttttcagtttcttctataaatcaaaacatctcaaaatggagacctaaaatccttaaagggacttagtctaatctcgggaggtagttttgtgcatgggtaaacaaattaagtatta

SEQ ID NO: 20638 - DNA, 120 bp, Artificial Sequence
  ENSG00000023445_2 (sequence is synthesized)
actggtgttttactatccaaagaatgctaattttataaacatgatcgagttatataaggtataccataatgagtttgattttgaatttgatttgtggaaataaaggaaaagtgattctag

SEQ ID NO: 20639 - DNA, 120 bp, Artificial Sequence
  ENSG00000023445_3 (sequence is synthesized)
ctggggcatattgttaaagcatttttttcagagttggccaggcagtctcctactggcacattctcccattatgtagaatagaaatagtacctgtgtttgggaaagattttaaaatgagtg

SEQ ID NO: 20640 - DNA, 120 bp, Artificial Sequence
  ENSG00000023445_4 (sequence is synthesized)
acagttatttggaacaaagagctaataatcaatccactgcaaattaaagaaacatgcagatgaaagttttgacacattaaaatacttctacagtgacaaagaaaaatcaagaacaaagct

SEQ ID NO: 20641 - DNA, 120 bp, Artificial Sequence
  ENSG00000023445_5 (sequence is synthesized)
ttttgatatgtgcaacaaatttagaggaagtaaaaagataaatgtgatgattggtcaagaaattatccagttatttacaaggccactgatattttaaacgtccaaaagtttgtttaaatg

SEQ ID NO: 20642 - DNA, 120 bp, Artificial Sequence
  ENSG00000023445_6 (sequence is synthesized)
ggctgttaccgctgagaatgatgaggatgagaatgatggttgaaggttacattttaggaaatgaagaaacttagaaaattaatataaagacagtgatgaatacaaagaagatttttataa

SEQ ID NO: 20643 - DNA, 120 bp, Artificial Sequence
  ENSG00000023445_7 (sequence is synthesized)
caatgtgtaaaatttttggccagggaaaggaatattgaagttagatacaattacttacctttgagggaaataattgttggtaatgagatgtgatgtttctcctgccacctggaaacaaag

SEQ ID NO: 20644 - DNA, 120 bp, Artificial Sequence
  ENSG00000023445_8 (sequence is synthesized)
atgtttctcctgccacctggaaacaaagcattgaagtctgcagttgaaaagcccaacgtctgtgagatccaggaaaccatgcttgcaaaccactggtaaaaaaaaaaaaaaaaaaaaaaa

SEQ ID NO: 20645 - DNA, 120 bp, Artificial Sequence
  ENSG00000023445_9 (sequence is synthesized)
ttgctagtattatcgactcagaacctctttactaatggctagtaaatcataattgagaaattctgaattttgacaaggtctctgctgttgaaatggtaaatttattattttttttgtcat

SEQ ID NO: 20646 - DNA, 120 bp, Artificial Sequence
  ENSG00000023445_10 (sequence is synthesized)
gataaattctggttcaaggtatgctatccatgaaataatttctgaccaaaactaaattgatgcaatttgattatccatcttagcctacagatggcatctggtaacttttgactgttttaa

SEQ ID NO: 20647 - DNA, 120 bp, Artificial Sequence
  ENSG00000023445_11 (sequence is synthesized)
aaaataaatccactatcagagtagatttgatgttggcttcagaaacatttagaaaaacaaaagttcaaaaatgttttcaggaggtgataagttgaataactctacaatgttagttctttg

SEQ ID NO: 20648 - DNA, 120 bp, Artificial Sequence
  ENSG00000023445_12 (sequence is synthesized)
agggggacaaaaaatttaaaatctttgaaaggtcttattttacagccatatctaaattatcttaagaaaatttttaacaaagggaatgaaatatatatcatgattctgtttttccaaaag

SEQ ID NO: 20649 - DNA, 120 bp, Artificial Sequence
  ENSG00000023445_13 (sequence is synthesized)
taacctgaatatagcaatgaagttcagttttgttattggtagtttgggcagagtctctttttgcagcacctgttgtctaccataattacagaggacatttccatgttctagccaagtata

SEQ ID NO: 20650 - DNA, 120 bp, Artificial Sequence
  ENSG00000023445_14 (sequence is synthesized)
ctattagaataaaaaaacttaacattgagttgcttcaacagcatgaaactgagtccaaaagaccaaatgaacaaacacattaatctctgattatttattttaaatagaatatttaattgt

SEQ ID NO: 20651 - DNA, 120 bp, Artificial Sequence
  ENSG00000023445_15 (sequence is synthesized)
gtaagatctaatagtatcattatacttaagcaatcatattcctgatgatctatgggaaataactattatttaattaatattgaaaccaggttttaagatgtgttagccagtcctgttact

SEQ ID NO: 20652 - DNA, 120 bp, Artificial Sequence
  ENSG00000023445_16 (sequence is synthesized)
agtaaatctctttatttggagagaaattttagattgttttgttctccttattagaaggattgtagaaagaaaaaaatgactaattggagaaaaattggggatatatcatatttcactgaa

SEQ ID NO: 20653 - DNA, 120 bp, Artificial Sequence
  ENSG00000023445_17 (sequence is synthesized)
ttcaaaatgtcttcagttgtaaatcttaccattattttacgtacctctaagaaataaaagtgcttctaattaaaatatgatgtcattaattatgaaatacttcttgataacagaagtttt

SEQ ID NO: 20654 - DNA, 120 bp, Artificial Sequence
  ENSG00000023445_18 (sequence is synthesized)
aaaatagccatcttagaatcagtgaaatatggtaatgtattattttcctcctttgagttaggtcttgtgcttttttttcctggccactaaatttcacaatttccaaaaagcaaaataaac

SEQ ID NO: 20655 - DNA, 120 bp, Artificial Sequence
  ENSG00000023445_19 (sequence is synthesized)
atattctgaatatttttgctgtgaaacacttgacagcagagctttccaccatgaaaagaagcttcatgagtcacacattacatctttgggttgattgaatgccactgaaacattctagta

SEQ ID NO: 20656 - DNA, 120 bp, Artificial Sequence
  ENSG00000023445_20 (sequence is synthesized)
gcctggagaagttgacctacctgtggagatgcctgccattaaatggcatcctgatggcttaatacacatcactcttctgtgaagggttttaattttcaacacagcttactctgtagcatc

SEQ ID NO: 20657 - DNA, 120 bp, Artificial Sequence
  ENSG00000023445_21 (sequence is synthesized)
atgtttacattgtatgtataaagattatacaaaggtgcaattgtgtatttcttccttaaaatgtatcagtataggatttagaatctccatgttgaaactctaaatgcatagaaataaaaa

SEQ ID NO: 20658 - DNA, 120 bp, Artificial Sequence
  ENSG00000023445_22 (sequence is synthesized)
taataaaaaatttttcattttggcttttcagcctagtattaaaactgataaaagcaaagccatgcacaaaactacctccctagagaaaggctagtcccttttcttccccattcatttcat

SEQ ID NO: 20659 - DNA, 120 bp, Artificial Sequence
  ENSG00000023445_23 (sequence is synthesized)
tatgaacatagtagaaaacagcatattcttatcaaatttgatgaaaagcgccaacacgtttgaactgaaatacgacttgtcatgtgaactgtaccgaatgtctacgtattccacttttcc

SEQ ID NO: 20660 - DNA, 120 bp, Artificial Sequence
  ENSG00000023445_24 (sequence is synthesized)
tgctggggttcctgtctcagaaaggagtcttgctcgtgctggtttctattacactggtgtgaatgacaaggtcaaatgcttctgttgtggcctgatgctggataactggaaaagaggaga

SEQ ID NO: 20661 - DNA, 120 bp, Artificial Sequence
  ENSG00000023445_25 (sequence is synthesized)
cagtcctactgaaaagcataaaaagttgtatcctagctgcagattcgttcagagtctaaattccgttaacaacttggaagctacctctcagcctacttttccttcttcagtaacaaattc

SEQ ID NO: 20662 - DNA, 120 bp, Artificial Sequence
  ENSG00000023445_26 (sequence is synthesized)
cacacactcattacttccgggtacagaaaacagtggatatttccgtggctcttattcaaactctccatcaaatcctgtaaactccagagcaaatcaagatttttctgccttgatgagaag

SEQ ID NO: 20663 - DNA, 120 bp, Artificial Sequence
  ENSG00000023445_27 (sequence is synthesized)
ttcctaccactgtgcaatgaataacgaaaatgccagattacttacttttcagacatggccattgacttttctgtcgccaacagatctggcaaaagcaggcttttactacataggacctgg

SEQ ID NO: 20664 - DNA, 120 bp, Artificial Sequence
  ENSG00000023445_28 (sequence is synthesized)
agcaattgggaaccgaaggataatgctatgtcagaacacctgagacattttcccaaatgcccatttatagaaaatcagcttcaagacacttcaagatacacagtttctaatctgagcatg

SEQ ID NO: 20665 - DNA, 120 bp, Artificial Sequence
  ENSG00000023445_29 (sequence is synthesized)
cagacacatgcagcccgctttaaaacattctttaactggccctctagtgttctagttaatcctgagcagcttgcaagtgcgggtttttattatgtgggtaacagtgatgatgtcaaatgc

SEQ ID NO: 20666 - DNA, 120 bp, Artificial Sequence
  ENSG00000023445_30 (sequence is synthesized)
ttttgctgtgatggtggactcaggtgttgggaatctggagatgatccatgggttcaacatgccaagtggtttccaaggtgtgagtacttgataagaattaaaggacaggagttcatccgt

SEQ ID NO: 20667 - DNA, 120 bp, Artificial Sequence
  ENSG00000023445_31 (sequence is synthesized)
caagttcaagccagttaccctcatctacttgaacagctgctatccacatcagacagcccaggagatgaaaatgcagagtcatcaattatccattttgaacctggagaagaccattcagaa

SEQ ID NO: 20668 - DNA, 120 bp, Artificial Sequence
  ENSG00000023445_32 (sequence is synthesized)
gatgcaatcatgatgaatactcctgtgattaatgctgccgtggaaatgggctttagtagaagcctggtaaaacagacagttcagagaaaaatcctagcaactggagagaattatagacta

SEQ ID NO: 20669 - DNA, 120 bp, Artificial Sequence
  ENSG00000023445_33 (sequence is synthesized)
gtcaatgatcttgtgttagacttactcaatgcagaagatgaaataagggaagaggagagagaaagagcaactgaggaaaaagaatcaaatgatttattattaatccggaagaatagaatg

SEQ ID NO: 20670 - DNA, 120 bp, Artificial Sequence
  ENSG00000023445_34 (sequence is synthesized)
gcactttttcaacatttgacttgtgtaattccaatcctggatagtctactaactgccggaattattaatgaacaagaacatgatgttattaaacagaagacacagacgtctttacaagca

SEQ ID NO: 20671 - DNA, 120 bp, Artificial Sequence
  ENSG00000023445_35 (sequence is synthesized)
agagaactgattgatacgattttagtaaaaggaaatattgcagccactgtattcagaaactctctgcaagaagctgaagctgtgttatatgagcatttatttgtgcaacaggacataaaa

SEQ ID NO: 20672 - DNA, 120 bp, Artificial Sequence
  ENSG00000023445_36 (sequence is synthesized)
tatattcccacagaagatgtttcagatctaccagtggaagaacaattgcggagactacaagaagaaagaacatgtaaagtgtgtatggacaaagaagtgtccatagtgtttattccttgt

SEQ ID NO: 20673 - DNA, 120 bp, Artificial Sequence
  ENSG00000023445_37 (sequence is synthesized)
ggtcatctagtagtatgcaaagattgtgctccttctttaagaaagtgtcctatttgtaggagtacaatcaagggtacagttcgtacatttctttcatgaagaagaaccaaaacatcgtct

SEQ ID NO: 20674 - DNA, 120 bp, Artificial Sequence
  ENSG00000023445_38 (sequence is synthesized)
tcgtacatttctttcatgaagaagaaccaaaacatcgtctaaactttagaattaatttattaaatgtattataactttaacttttatcctaatttggtttccttaaaatttttatttatt

SEQ ID NO: 20675 - DNA, 120 bp, Artificial Sequence
  ENSG00000023445_39 (sequence is synthesized)
atgtatctaaaccatatgaacatatattttttagaaactaagagaatgataggcttttgttcttatgaacgaaaaagaggtagcactacaaacacaatattcaatcaaaatttcagcatt

SEQ ID NO: 20676 - DNA, 120 bp, Artificial Sequence
  ENSG00000023445_40 (sequence is synthesized)
attgaaattgtaagtgaagtaaaacttaagatatttgagttaacctttaagaattttaaatattttggcattgtactaataccgggaacatgaagccaggtgtggtggtatgtgcctgta

SEQ ID NO: 20677 - DNA, 120 bp, Artificial Sequence
  ENSG00000023445_41 (sequence is synthesized)
gtcccaggctgaggcaagagaattacttgagcccaggagtttgaatccatcctgggcagcatactgagaccctgcctttaaaaacaaacagaacaaaaacaaaacaccagggacacattt

SEQ ID NO: 20678 - DNA, 120 bp, Artificial Sequence
  ENSG00000023445_42 (sequence is synthesized)
ctctgtcttttttgatcagtgtcctatacatcgaaggtgtgcatatatgttgaatgacattttagggacatggtgtttttataaagaattctgtgagaaaaaatttaataaagcaacaaa

SEQ ID NO: 20679 - DNA, 120 bp, Artificial Sequence
  ENSG00000023445_43 (sequence is synthesized)
aattactcttattcttcattgctttatttcaatgacattggatagtttagtcactcccagactctttccataccttcttaaagcctctcaaatattgaactacagtttatactccttccc

SEQ ID NO: 20680 - DNA, 120 bp, Artificial Sequence
  ENSG00000023445_44 (sequence is synthesized)
ataagatgcttcttcattgacacttgtagaacacggggtcaacacatcataaaatctattatggaatgcctgagacaagaatcaaacagtccctttagtaagtttgtttattcacttctc

SEQ ID NO: 20681 - DNA, 120 bp, Artificial Sequence
  ENSG00000023445_45 (sequence is synthesized)
tattgattcattcaagaagtctcatgccagccccacctattggaagaaggtctgagttttattcttatctctttggtattaattctgaaacttagaaagtacactggttagcaatgcttg

SEQ ID NO: 20682 - DNA, 120 bp, Artificial Sequence
  ENSG00000023445_46 (sequence is synthesized)
ggaccaacaggttgttctggtaaataaatctgtttcatattgtcagtgcaacaaaatgtccccctctgcattatgttattggtactcaacacgtccgagtcataactctgtcctttgctt

SEQ ID NO: 20683 - DNA, 120 bp, Artificial Sequence
  ENSG00000023445_47 (sequence is synthesized)
cttatagaggtattaggtcttcaagagcagaagtaagactgtaatagggaatactcaggggaaggcaggcaaaggctagtcatctaaaccagttctagatgtctgtataggggcagatgg

SEQ ID NO: 20684 - DNA, 120 bp, Artificial Sequence
  ENSG00000023445_48 (sequence is synthesized)
ctctgtaagggcagaagggaaagaccccttcataagggtcacagctgacaatcctataacaaaagacaggttaacaagagaaaaacttaacaaatttatttaatcacagatttacatcac

SEQ ID NO: 20685 - DNA, 120 bp, Artificial Sequence
  ENSG00000023445_49 (sequence is synthesized)
cggggagccttcgtaatgaagatccaaaattacaggggaaactgtgcatttttatgcttaggtttgataatgaatggacagccctgaagaatagtgattggaaaaaaaggatatgatcta

SEQ ID NO: 20686 - DNA, 120 bp, Artificial Sequence
  ENSG00000023445_50 (sequence is synthesized)
atgggaatagacacaggttggggacccagcaaggcctgtctgttcagattattcttggtctctgtgcagcattccttcctcctggatatagggcagggcctgtatgggatggggatatta

SEQ ID NO: 20687 - DNA, 120 bp, Artificial Sequence
  ENSG00000023445_51 (sequence is synthesized)
taacctgctatcaagcaaggtaggtcagagaatttatttatggccagctcttacatagttaggtgaggaaagattagagtactatctttaagatgtaagtctggcattgtggaaagatgg

SEQ ID NO: 20688 - DNA, 120 bp, Artificial Sequence
  ENSG00000023445_52 (sequence is synthesized)
ttccagtttctatgacctaccttggggaagaggaattcaagtttctgtggcttgccttcagggagaatgaggctgagacaggagggcaggataacatcagagaaaaactttgcttctgag

SEQ ID NO: 20689 - DNA, 120 bp, Artificial Sequence
  ENSG00000023445_53 (sequence is synthesized)
gccttcactttgggttttctgagccccaacatctgctagtgttgtaaagagaacaattagggaccaagtgaggggaggaaagaatccatctctgcattctgatgctgggagacttatttc

SEQ ID NO: 20690 - DNA, 120 bp, Artificial Sequence
  ENSG00000023445_54 (sequence is synthesized)
cttgaaatgcaattgattttgcctctgctaagaggctctgctggctacccatgtactagccagtgtcctgcatgggtgctaggctgaattatttgtaattgtgcttaggtgatttgtaac

SEQ ID NO: 20691 - DNA, 120 bp, Artificial Sequence
  ENSG00000023445_55 (sequence is synthesized)
tcaggtatagggtatttaaatagtaggcaccctttttgcaccatgtgtttttttttttatctagttcttgtatactacagataatatttgaactttgtcatctcactgtaaaacttttgt

SEQ ID NO: 20692 - DNA, 120 bp, Artificial Sequence
  ENSG00000023445_56 (sequence is synthesized)
tcatttctcattatggtaataaatagctattataaccaacccatttattcaaatatgttatttccctaagtgttattttgacattttgttttggaaaaaataaatcaccatagataataa

SEQ ID NO: 20693 - DNA, 120 bp, Artificial Sequence
  ENSG00000023445_57 (sequence is synthesized)
cgacaggtgtcgcttgaaaagactgggcttgtccttgctggtgcatgcgtcgtcggcctctgggcagcagttgttgcctaaatttccacaaatatatgccttgctggagtgcagtggtgt

SEQ ID NO: 20694 - DNA, 88 bp, Artificial Sequence
  ENSG00000023445_58 (sequence is synthesized)
aaatacagggtcttgctctgtcacccagtttggagtgcagttatgcagtctcacactgcaagctctgcctcatgggctcaagtgaacc

SEQ ID NO: 20695 - DNA, 120 bp, Artificial Sequence
  ENSG00000023445_59 (sequence is synthesized)
cactgcactccagcttgggtgacagactctgtctcaaaaaaaaatcaatctaatttatagatattagttacataaaaagattaaagacttctgttgccttgaaatgagtatttggctata

SEQ ID NO: 20696 - DNA, 120 bp, Artificial Sequence
  ENSG00000023445_60 (sequence is synthesized)
ttctgttgccttgaaatgagtatttggctatagtctaaagtgttcatttttaaaatagattccatagctaaatattaaccttatttgtcatagtaatgctttttctttttctcccttagt

SEQ ID NO: 20697 - DNA, 120 bp, Artificial Sequence
  ENSG00000023516_0 (sequence is synthesized)
agcttgcttgcccggctcgctcacgggtcgttgaggccggtgacatgtctgtgagctgcggaggctgcggcccccagatctttctctttgacactttgcaataaaaaagggcagtgagat

SEQ ID NO: 20698 - DNA, 120 bp, Artificial Sequence
  ENSG00000023516_1 (sequence is synthesized)
tgaataggtgttttgtggattaactcttcattgattatatacaacaaaaaatagttatggcgactttcagaaacaatcacatgaagactaaagcatctgtcagaaaaagcttcagtgaag

SEQ ID NO: 20699 - DNA, 120 bp, Artificial Sequence
  ENSG00000023516_2 (sequence is synthesized)
atgtgttccagtctgtaaagtctttattgcagagtcagaaggaactatgcagtgtaacagcagaggactgtttacagcaggatgagcatgccaatttaactgaggtcacatttctgggtt

SEQ ID NO: 20700 - DNA, 120 bp, Artificial Sequence
  ENSG00000023516_3 (sequence is synthesized)
ttaatgaagagacagatgctgctcatatacaggatttagctgcagtttctttggaacttccagatattctgaattcactccacttctgcagtctaaatgaaaatgaaattatttgtatga

SEQ ID NO: 20701 - DNA, 120 bp, Artificial Sequence
  ENSG00000023516_4 (sequence is synthesized)
agaatataaataaaccattagatataagcagtgatcctctaaatcagagtcatccttctggaatgctttgtgtcatgagagtgtcacctacatcaccaagacttaggattgattttatct

SEQ ID NO: 20702 - DNA, 120 bp, Artificial Sequence
  ENSG00000023516_5 (sequence is synthesized)
ttagtctcctaagtaaatatgctactggtataaggtacaccttggacacattcttgcatcagaagcaccaacttgagaccactgatgaagatgatgatgatactaaccagtctgtgtcat

SEQ ID NO: 20703 - DNA, 120 bp, Artificial Sequence
  ENSG00000023516_6 (sequence is synthesized)
ccatagaggatgactttgtcactgcttttgagcacttagaagaggaagagacttcaaagccatacaatgatggaatgaacattactgtgctaaggagccagtgtgatgctgcttcccaga

SEQ ID NO: 20704 - DNA, 120 bp, Artificial Sequence
  ENSG00000023516_7 (sequence is synthesized)
cggttactggtcatcatttagaaacccatgatttaaagattctcattagctctggacagcagaagtcattggctaaaccctcaacttcctcagtgaatgtcctgggacataaagaactac

SEQ ID NO: 20705 - DNA, 120 bp, Artificial Sequence
  ENSG00000023516_8 (sequence is synthesized)
cttctgtgaaaacttcagtcacaacatcaatttcagagccttggacccaaaggagtttctataggtcatctaatgcttcagataaagatagtgatttacagaaaacatttttttcgtctt

SEQ ID NO: 20706 - DNA, 120 bp, Artificial Sequence
  ENSG00000023516_9 (sequence is synthesized)
ctcctgcctactcatctgaatcagaatgttcaagtccaagtcctgttattttcttggatgaagagggatatcaaaaaagcttaaaagcaaaacttgagctgcctaaaattcctgtgatga

SEQ ID NO: 20707 - DNA, 120 bp, Artificial Sequence
  ENSG00000023516_10 (sequence is synthesized)
aagatgatatagaggattcagactcagaagtaagtgaattttttgatagttttgatcagtttgatgaactagaacaaactttagagacttgcctgtttaacaaagatcccgtcataggga

SEQ ID NO: 20708 - DNA, 120 bp, Artificial Sequence
  ENSG00000023516_11 (sequence is synthesized)
agtcatcgcagaggaaagggcacaaacatggaaagtcatgtatgaatcctcaaaaattcaagtttgatcgtccagctctcccagctaatgttagaaagccaactcctcgtaaaccagaat

SEQ ID NO: 20709 - DNA, 120 bp, Artificial Sequence
  ENSG00000023516_12 (sequence is synthesized)
ctccatatggtaacctgtgtgatgctccggattctcctcgcccagtgaaggcatcaagggaagatagtggtttatttagtcctattcgatcctctgcttttagtcctcttggaggctgta

SEQ ID NO: 20710 - DNA, 120 bp, Artificial Sequence
  ENSG00000023516_13 (sequence is synthesized)
ctccagctgaatgtttttgccaaacagatattggtggagataggattcatgaaaatcatgattctgtttattacacctatgaagactatgcaaaaagcatttcatgtgaagtactaggct

SEQ ID NO: 20711 - DNA, 120 bp, Artificial Sequence
  ENSG00000023516_14 (sequence is synthesized)
cagttcttcgtacccaccatactaataccctatcaaatattaacagtattaaacatggagaaaataaaactgtaacttttaagcatggaaaccttgatcaaaaaaataaatctaaaaata

SEQ ID NO: 20712 - DNA, 120 bp, Artificial Sequence
  ENSG00000023516_15 (sequence is synthesized)
aatccttaatgattaaagatagcattcaaaaatttgcagcagatcttgtggaaaaaagttttggcagtgcatttaaagacttacagaaaggagtctcttcatgtaccaatgctttgtacc

SEQ ID NO: 20713 - DNA, 120 bp, Artificial Sequence
  ENSG00000023516_16 (sequence is synthesized)
acttagccatcaaattgacatcatctgttttgcagatggcatttgatgagctgagaaggcagcgtgcattttcactaaaagaacgtgccattagtggcctggctaactttttggtgagtg

SEQ ID NO: 20714 - DNA, 120 bp, Artificial Sequence
  ENSG00000023516_17 (sequence is synthesized)
aagctttatcaaatgccttaaaagatttacagtatgtaaagaagcagatattcacaaacacagttgctaggtttgctgcagatcttgctgaagagcttgtttttgaaggcatcatggagg

SEQ ID NO: 20715 - DNA, 120 bp, Artificial Sequence
  ENSG00000023516_18 (sequence is synthesized)
tgtgtcagttttcatatcctcaaacgcctgcatctccacagtgtgggtcgtttgactttgaagacaaagtagtgaagttgtatgcaaaagatttgtctgaatctgtaatacaggaagcat

SEQ ID NO: 20716 - DNA, 120 bp, Artificial Sequence
  ENSG00000023516_19 (sequence is synthesized)
tcattgagctatcacaagttgatgtgacctttacaacaaaggcagcagttagtgtctctacggataatatcaagtatgtgagtgcagaaagtgtagtgccatcgacacaggctgtcacgt

SEQ ID NO: 20717 - DNA, 120 bp, Artificial Sequence
  ENSG00000023516_20 (sequence is synthesized)
tttccccttcttttcacaatcaagcaattatggtgacaaaaccagtgcaggaatataaaaaggaatacacagtgcagcaggccttgttttgtacttctggaattgttacttctataccgg

SEQ ID NO: 20718 - DNA, 120 bp, Artificial Sequence
  ENSG00000023516_21 (sequence is synthesized)
tgcccttggcaggaagtgcccttctcccatatcatatttcatctactgcatgtcaggccaaggctcatctgtcatctgatgatagtaattcaaatggtgattctgcccaagtgcatattg

SEQ ID NO: 20719 - DNA, 120 bp, Artificial Sequence
  ENSG00000023516_22 (sequence is synthesized)
ccacaaaaaacagagaagaaaaagcagcttgtctcagaaatatttgtttaccttcagaacacaatccaggtaatcagaatgattttaaaccaactaatgacgatattgaaatgcagagtt

SEQ ID NO: 20720 - DNA, 120 bp, Artificial Sequence
  ENSG00000023516_23 (sequence is synthesized)
cctcaaaattaccaaatgatcctgcaattattagcaacttttctgcagcagtggtgcatacgatagtaaatgaaactttagagtcaatgacatcattggaagttacaaaaatggttgatg

SEQ ID NO: 20721 - DNA, 120 bp, Artificial Sequence
  ENSG00000023516_24 (sequence is synthesized)
aacgtacagattatttaactaaatctttaaaggagaaaacccctccattttcccactgtgatcaggcagtgctgcaatgcagtgaagctagtagcaataaggacatgtttgctgaccggt

SEQ ID NO: 20722 - DNA, 120 bp, Artificial Sequence
  ENSG00000023516_25 (sequence is synthesized)
tatctaaatctattattaaacattccatagataagagcaaatcagtgatcccaaatatagataaaaatgcagtatacaaggaaagcttgcctgtttctggagaagaatcacagttgacac

SEQ ID NO: 20723 - DNA, 120 bp, Artificial Sequence
  ENSG00000023516_26 (sequence is synthesized)
cagaaaagtctcccaaatttcctgactctcagaatcagttaactcactgctcactttcagctgcaaaggattgtgttccagaatgtaaagtttctatggttcatggatcctccctagaga

SEQ ID NO: 20724 - DNA, 120 bp, Artificial Sequence
  ENSG00000023516_27 (sequence is synthesized)
cactgccatcttgtccagctgtgacaggtcagaaatctgacttgaaggaatctgctaaggatcaaccactgaaaaagcataacttgaatagtacatcacttgaggccttgtcttttggac

SEQ ID NO: 20725 - DNA, 120 bp, Artificial Sequence
  ENSG00000023516_28 (sequence is synthesized)
aggaaaacccctttcctcattcacatactttctcatctacagcacttacctgtgtagatggtttgcatgtggaagataaacagaaagtcagagacagaaatgtaatacctgatactcctc

SEQ ID NO: 20726 - DNA, 120 bp, Artificial Sequence
  ENSG00000023516_29 (sequence is synthesized)
catcaactcctctagtaccatcccgggctagttctgaatgggatatcaagaagttaactaaaaagctcaagggagaattagccaaagagtttgcacctgctacaccaccttctactccac

SEQ ID NO: 20727 - DNA, 120 bp, Artificial Sequence
  ENSG00000023516_30 (sequence is synthesized)
acaactcatctgttggtagtttgtctgagaatgaacaaaatactatagaaaaagaagagttcatgttgaaactcatgcgatctctttctgaagaagttgagagtagtgaaagtggagagc

SEQ ID NO: 20728 - DNA, 120 bp, Artificial Sequence
  ENSG00000023516_31 (sequence is synthesized)
tcccagaagtggatgtgaagtcggagcactcagggaagaaggttcagtttgcagaagcattagctacacacatcctttctcttgcaactgaaatggcagcttcccatttagataacaaaa

SEQ ID NO: 20729 - DNA, 120 bp, Artificial Sequence
  ENSG00000023516_32 (sequence is synthesized)
taattcaagaacccaaggttaaaaacccttgcttaaatgtgcaaagtcaaagaagtgtgtcgcctacttttttaaacccctcagacgaaaatttgaaaacattatgcaattttgcgggtg

SEQ ID NO: 20730 - DNA, 120 bp, Artificial Sequence
  ENSG00000023516_33 (sequence is synthesized)
atctggcagcagaagtcattacagaagctgagaaaatagcaaaagtccgaaattgtatgcttttcaagcaaaagaagaacagttgttatgctgatggtgacgaagattataaagtagaag

SEQ ID NO: 20731 - DNA, 120 bp, Artificial Sequence
  ENSG00000023516_34 (sequence is synthesized)
agaagttggatatagaggctgtagtgcacccaagagaagtggatccgtttattctttcattaccaccaagttcttgtatgtcaggtctgatgtataagtatcccagctgtgaaagtgtga

SEQ ID NO: 20732 - DNA, 120 bp, Artificial Sequence
  ENSG00000023516_35 (sequence is synthesized)
cagatgaatatgcaggtcaccttattcagatactaaaacaggaaggtggtaatagtgagttgataatggatcagtatgccaataggcttgcctaccgatctgttaaatcaggattacagg

SEQ ID NO: 20733 - DNA, 120 bp, Artificial Sequence
  ENSG00000023516_36 (sequence is synthesized)
aagcagctaagacaaccaaagtgcagtgcaactcaagaatgttccctgtgccaagttcacaagtgaaaacaaacaaggaactgttaatgttttcaaacaaagagcaccaccaagaagcag

SEQ ID NO: 20734 - DNA, 120 bp, Artificial Sequence
  ENSG00000023516_37 (sequence is synthesized)
acaaaaagagacaaagtaaaagaaatgaaggttacttttgtaaaaatcaaacttgtgaaaggaccctggatccatatagaaatgaggtctcccaactgtatagtttttcaacctctctgg

SEQ ID NO: 20735 - DNA, 120 bp, Artificial Sequence
  ENSG00000023516_38 (sequence is synthesized)
ttcacagcataacaaaagatgctaaggaagagttgacagcctctctagttggcctaccaaaatccttaacagattcttgcttgtttgaaaaatctggatatgaagaagataatgagtgtc

SEQ ID NO: 20736 - DNA, 120 bp, Artificial Sequence
  ENSG00000023516_39 (sequence is synthesized)
acgttacaccagaattgcctaagtctcttcagccttcctcacaaaatcacaggttttaccacagcactggcagtttaaatggatatggttgtggagacaatgttgttcaagctgtagaac

SEQ ID NO: 20737 - DNA, 120 bp, Artificial Sequence
  ENSG00000023516_40 (sequence is synthesized)
agtatgccaaaaaagtagtggatgacactctagagctaactctaggatctacagtgttccgagtgtctgagaccacaaaatcagcagacagggtcacttatgcagaaaagttgtcacctc

SEQ ID NO: 20738 - DNA, 120 bp, Artificial Sequence
  ENSG00000023516_41 (sequence is synthesized)
tcagacagggttctctcgccagtagtaagccagcttctaatccaaaatttagcagccgctatcagaaatctaggatttttcatctcagtgtccctcagattcatgttaatcttgataaga

SEQ ID NO: 20739 - DNA, 120 bp, Artificial Sequence
  ENSG00000023516_42 (sequence is synthesized)
aggcagtgcttgctgagaagatagttgctgaagccattgaaaaagctgagcgagagctgagcagtaccagcctggcagccgacagtgggatcggacaggagggtgccagctttgctgaaa

SEQ ID NO: 20740 - DNA, 120 bp, Artificial Sequence
  ENSG00000023516_43 (sequence is synthesized)
gccttgccacagaaaccatgacagcagctgtcacaaatgttgggcatgctgttagcagttcaaaagaaatagaagactttcagtcaaccgagtctgtcagtagccagcagatgaacctca

SEQ ID NO: 20741 - DNA, 120 bp, Artificial Sequence
  ENSG00000023516_44 (sequence is synthesized)
gtattggtgatgacagcactggtagctggtccaatttaagttttgaagatgaacaccaagatgaaagcagcagttttcatcatctaagtgaaagtaatggtaacagcagtagctggagca

SEQ ID NO: 20742 - DNA, 120 bp, Artificial Sequence
  ENSG00000023516_45 (sequence is synthesized)
gtcttggtttagaaggagatttgtatgaggacaatttatcctttccaacatcagacagtgatggaccagatgataaagatgaagagcatgaggacgaagtagaaggtttggggcaagatg

SEQ ID NO: 20743 - DNA, 120 bp, Artificial Sequence
  ENSG00000023516_46 (sequence is synthesized)
gaaagacactgctaattacgaatattgacatggagccatgcacggtagacccccagctaaggattattcttcagtggctcattgcctctgaggctgaagttgcagaactttattttcatg

SEQ ID NO: 20744 - DNA, 120 bp, Artificial Sequence
  ENSG00000023516_47 (sequence is synthesized)
actctgcaaataaggagtttatgctactttcaaaacaattacaagagaaaggatggaaagtgggagacctcctgcaggctgtgcttcaatactatgaagtgatggaaaaagcttccagtg

SEQ ID NO: 20745 - DNA, 120 bp, Artificial Sequence
  ENSG00000023516_48 (sequence is synthesized)
aggagagatgcaagtcgctgtttgattggctcttggaaaatgcatagagcaaaccccaaaccagtatattttagtatttgtttggggaggggaacaagccaataaagatgtttaggataa

SEQ ID NO: 20746 - DNA, 120 bp, Artificial Sequence
  ENSG00000023516_49 (sequence is synthesized)
aatttgaatagtgaatattaacatcgtaagtcagttgggaggcaagtaaatatagctttctgagcgctttgtgttatcactcggtgtatatagttcatacttttgtaatctgtcaaaata

SEQ ID NO: 20747 - DNA, 120 bp, Artificial Sequence
  ENSG00000023516_50 (sequence is synthesized)
ctaccttcatttattcttctatacacatgtgtagtgtgtcaagaccctaagaacatgtatttgaaggaaggtctaaccagggggttttcaggggcattgtctgaccacattctttttgta

SEQ ID NO: 20748 - DNA, 120 bp, Artificial Sequence
  ENSG00000023516_51 (sequence is synthesized)
tccaaatagtgctgctagaaactgcactgaagtggctgaggataggttccagtgatagagttataattttgctcctttgcaaacaaatggtatctaattaataactagtctgacatcaga

SEQ ID NO: 20749 - DNA, 120 bp, Artificial Sequence
  ENSG00000023516_52 (sequence is synthesized)
aaataaaattgaggctgatttttaaaaatttctagtagatttttggcctttcctgtttttaaaaatcagtttcattttcatatttcatagatcagctattggtagctttttgatttcccc

SEQ ID NO: 20750 - DNA, 120 bp, Artificial Sequence
  ENSG00000023516_53 (sequence is synthesized)
aaactatttaatttcttagcagaaacattagtattttaggtttctataaacactataagtgatagtttcccccatcctttcattgacattatttgccaatgctgccagtcattctggcat

SEQ ID NO: 20751 - DNA, 120 bp, Artificial Sequence
  ENSG00000023516_54 (sequence is synthesized)
tgtgtgtgtgtgtgtgtgtgtaagggagtactttaaccttgccagtttgttccctcttttattttactgttttctttttagaaacccactgttaaaatttaaaaaggtgctttaaaataa

SEQ ID NO: 20752 - DNA, 120 bp, Artificial Sequence
  ENSG00000023516_55 (sequence is synthesized)
taaaatttaaaaaggtgctttaaaataaaacgcctataaagattgtgcagtaagaatttttattgacaataattaaaattttttttgacaattttgggttcccaacttatcttacaagtg

SEQ ID NO: 20753 - DNA, 120 bp, Artificial Sequence
  ENSG00000023516_56 (sequence is synthesized)
aaaacttaaattgtaaaacatgttgaaattttaaaaattaatgttaatatggaaatgcatttagagaagcccagtagtttttattgttggatttttgaaaaaacctctaccaagaatgtg

SEQ ID NO: 20754 - DNA, 120 bp, Artificial Sequence
  ENSG00000023516_57 (sequence is synthesized)
tttttttgtttgtttgtttgtttgttttagaaaaattgggatttccccccaccccgccccacccagataaactatatctacactgtctcgtcaagttctctgacacgatctttctgggct

SEQ ID NO: 20755 - DNA, 120 bp, Artificial Sequence
  ENSG00000023516_58 (sequence is synthesized)
ggctctacatttcctactagtttgtgtccagaaactgcaagttgacatgaatagaggacaaaggttgtgtcttgcttttgtctctctcttccctccctgcaactctctctcccctcctcc

SEQ ID NO: 20756 - DNA, 120 bp, Artificial Sequence
  ENSG00000023516_59 (sequence is synthesized)
cactctcttccccctcccccctcctcccactgtctctcacctcccccaccccccactctctctcatctctcgctgtgtcctgtgtatgtgtgggtgtgtgtgtatttgggtgtgtaaatg

SEQ ID NO: 20757 - DNA, 120 bp, Artificial Sequence
  ENSG00000023516_60 (sequence is synthesized)
ttggttcttccactactggattttgtaatctaggataaatcactttttttggggactttgattttgctccattacgttttcattttttctgagcactgactgttctgaaagctgcacaaa

SEQ ID NO: 20758 - DNA, 120 bp, Artificial Sequence
  ENSG00000023516_61 (sequence is synthesized)
acgtagaaagaagacatagcgcctgccagggaataggaaatgagggcacttacacattaatgtgaattagtaattgtggtatagaaatgttttatagtgaaagattcaaatttgcttttc

SEQ ID NO: 20759 - DNA, 120 bp, Artificial Sequence
  ENSG00000023516_62 (sequence is synthesized)
aagaaaaatgccaaaagctatttaaataattcgaggttacatcgtaggttttgatttttctcaatttaagatacagaaatacagcaagccttaatataaagtttcctaaagtttcttcaa

SEQ ID NO: 20760 - DNA, 120 bp, Artificial Sequence
  ENSG00000023516_63 (sequence is synthesized)
gtattttttaaggtggagaaatgcaggaattgtataaccagaattgttcctgcctttagcttttcagaacttgagatgtggcagcactggactgggtttttttaaatgttaggactagga

SEQ ID NO: 20761 - DNA, 120 bp, Artificial Sequence
  ENSG00000023516_64 (sequence is synthesized)
atgtttgctcttgttaattatgaattaattgattattaagtttagaatgcatttttacaagtatctaactatcaaattgtgtttagtaacttgagtgtatgcacaagtttgatcaacagc

SEQ ID NO: 20762 - DNA, 120 bp, Artificial Sequence
  ENSG00000023516_65 (sequence is synthesized)
aaaatagagttctgaatttcttttaaagtgatgatatattattttgtgaaactttgtgtttgaaaatgtttatttctgtttatggtgtaatcattctgaggtgaggcttttcttatttcc

SEQ ID NO: 20763 - DNA, 120 bp, Artificial Sequence
  ENSG00000023516_66 (sequence is synthesized)
tttgcattttgctagagctgtgctgagttcagcatttgcttatttaaccactacataatgacagaccagttattaggtattagcatgtgtggtaataataatagtggaacttcacactta

SEQ ID NO: 20764 - DNA, 120 bp, Artificial Sequence
  ENSG00000023516_67 (sequence is synthesized)
catcaattcagtgcaggggcatagaataaaatattaaatattggcagatgtatgaaaagaagtgtgagttaaaaatattgaatattggcaggtgtgaaaacaagtgtcaaaattcctcat

SEQ ID NO: 20765 - DNA, 120 bp, Artificial Sequence
  ENSG00000023516_68 (sequence is synthesized)
atagagaaaataattttgagtttagagtattatcttttaattaagtgtagtctaaacttaactttctgtaaaggcactttgtggtttttccaaagatgttctagatctatttggttgctc

SEQ ID NO: 20766 - DNA, 120 bp, Artificial Sequence
  ENSG00000023516_69 (sequence is synthesized)
tatagtcaaacagctcttttgaagacaactgtcttattttattacaaattggcttgacatatttatactgtaacattgtaatattgctgtgctgtacattttggcccttacgaaatacgt

SEQ ID NO: 20767 - DNA, 120 bp, Artificial Sequence
  ENSG00000023516_70 (sequence is synthesized)
ctttttcagaactgttaaagttttgatgtacatcgagctgaattctgtttttaccagtttcaaaaccttcaagtgatatgtggaaaaaagtgaatgagacctctgatagggggttttcag

SEQ ID NO: 20768 - DNA, 120 bp, Artificial Sequence
  ENSG00000023516_71 (sequence is synthesized)
aaccttgttcacaccaaaatgtgacagttctttcatgttttcctaaaccaagttaaaattacatgtatattttggtgttaaggttgatttttaagatacttctgatttgtacaaaaggaa

SEQ ID NO: 20769 - DNA, 120 bp, Artificial Sequence
  ENSG00000023516_72 (sequence is synthesized)
tgtttcctttataaatcacagaagaaaatgacaatatctgttggatatttgatataatttaatggtgttataaaacctttaagaggattcatggtgaatatatgtgataacatctttata

SEQ ID NO: 20770 - DNA, 120 bp, Artificial Sequence
  ENSG00000023516_73 (sequence is synthesized)
ctttgaaaaatgttccacttacccttcagatatttgttgtaagttaattcaattcttaatactttaattttgctccaacaagggctttatgttgctggtaagagaatttatttactaaat

SEQ ID NO: 20771 - DNA, 120 bp, Artificial Sequence
  ENSG00000023516_74 (sequence is synthesized)
gcactatgtataaagtgaaagatagtttacttatctgactttgatattagatggctgacattagtgcacataatgcagagtttaaccttgattcttcaacagagtccagatttaaatgtc

SEQ ID NO: 20772 - DNA, 120 bp, Artificial Sequence
  ENSG00000023516_75 (sequence is synthesized)
tacttagttaattagttagctgatattcttccacaattaatatattcaatttcccatcagtatatcactttaaattttatgtttttctaaggaaactttccacagaattttaaacaactg

SEQ ID NO: 20773 - DNA, 120 bp, Artificial Sequence
  ENSG00000023516_76 (sequence is synthesized)
atgcatccatactcagggtgtagggagaatactttgcatttaaaaaccctgtccacctgtcaccagcacaagagaattagagcttcagtgagaatttagaaaaattatactaaagtgaga

SEQ ID NO: 20774 - DNA, 120 bp, Artificial Sequence
  ENSG00000023516_77 (sequence is synthesized)
tgcattttttctcattttcagcaagactcctctaagcatttactcatttactgtattcctgctctgaagatgtggatacagaattagtcactcttgtcactttatttatttattggtttt

SEQ ID NO: 20775 - DNA, 120 bp, Artificial Sequence
  ENSG00000023516_78 (sequence is synthesized)
tttttaaccatctgtgtacattcctttcatagggtagagttctagttctagaagttcttattttgtttttgttgtaatgtttgaatactatttaatatccggttttaatattgctggatt

SEQ ID NO: 20776 - DNA, 120 bp, Artificial Sequence
  ENSG00000023516_79 (sequence is synthesized)
tgctacctttggttacttgtgcagtgttaaaagtaatccactttcttgtttaatataccagatacatagcaaaagcagcttggaataattatagctgtttatttggctgtgctcagttac

SEQ ID NO: 20777 - DNA, 120 bp, Artificial Sequence
  ENSG00000023516_80 (sequence is synthesized)
tatattaagatcttgtactgtgtaacagtaactcttttttgcttttcagtaatttaatatgttcacttaacaaaatacgaactttgagatgcactaaagttttgtttcagcagtggctca

SEQ ID NO: 20778 - DNA, 120 bp, Artificial Sequence
  ENSG00000023516_81 (sequence is synthesized)
aaaaatttcagaaattacttttgtaattatttgcaattaattgttcttttatcttacaattgtttaagcctgtgatctttcttctcccagctaagagttcttcaataaatttaagaaata

SEQ ID NO: 20779 - DNA, 120 bp, Artificial Sequence
  ENSG00000023572_0 (sequence is synthesized)
aaggctattattaccaccactgagtggcttaaataatcctgtcaacagcaatcgcccatttccaaagccatggtgaaacatctctgtgctaatttcttttgttttgtttcctaatttttt

SEQ ID NO: 20780 - DNA, 120 bp, Artificial Sequence
  ENSG00000023572_1 (sequence is synthesized)
ttttttggcaggtggtgggaaataatctttgtcttctttggagtaaaccttcaacaccggattttttcttttaattatggatgtaaaccccaatatccccataatttacattgggtctcg

SEQ ID NO: 20781 - DNA, 120 bp, Artificial Sequence
  ENSG00000023572_2 (sequence is synthesized)
accaattgcctaattataagaggatatatttaggctcttatttcatccacacaaaaacttgtgtaacaggtagttggaaacatctgaggcaccactttgattctgttttggatggtcatg

SEQ ID NO: 20782 - DNA, 120 bp, Artificial Sequence
  ENSG00000023572_3 (sequence is synthesized)
ttttttctcctccgtttccccagcatgtctgccaccatcctcatgcactgcttccaagtgcctgggagcctttatgagcgtccctaaacctaaaagaatccagaggcggggctcggatga

SEQ ID NO: 20783 - DNA, 120 bp, Artificial Sequence
  ENSG00000023572_4 (sequence is synthesized)
cgtgggtggcactcgctggaatccagcgctcgggcagccctgggaggacgcgctcagctgcgaggaggatggagagcaatacatcatcatctttggagaatttagcgacggcgcctgtga

SEQ ID NO: 20784 - DNA, 120 bp, Artificial Sequence
  ENSG00000023572_5 (sequence is synthesized)
accagatccaagaaacaatttctgataattgtgtggtgattttctcaaaaacatcctgttcttactgtacaatggcaaaaaagcttttccatgacatgaatgttaactataaagtggtgg

SEQ ID NO: 20785 - DNA, 120 bp, Artificial Sequence
  ENSG00000023572_6 (sequence is synthesized)
aactggacctgcttgaatatggaaaccagttccaagatgctctttacaaaatgactggtgaaagaactgttccaagaatatttgtcaatggtacttttattggaggtgcaactgacactc

SEQ ID NO: 20786 - DNA, 120 bp, Artificial Sequence
  ENSG00000023572_7 (sequence is synthesized)
ataggcttcacaaagaaggaaaattgctcccactagttcatcagtgttatttaaaaaaaagtaagaggaaagaatttcagtgatgtttatactaataagtttgctagtacagtgtcagtt

SEQ ID NO: 20787 - DNA, 120 bp, Artificial Sequence
  ENSG00000023572_8 (sequence is synthesized)
atttaaagtggtaatgcccgataatgtcttttaaatgtttgaggatgttttaaatacatgcattgtcttcacgaagaagatgtaaaaataatgaacaataaattgcggtggaaacctctt

SEQ ID NO: 20788 - DNA, 120 bp, Artificial Sequence
  ENSG00000023572_9 (sequence is synthesized)
gatccgcggtgtccggcagtagagctcgctgcagatccgggctctgaccatgatttggcgccgcgcggcgctggcggggacgcggctggtttggagcaggagcggctcggcaggctggct

SEQ ID NO: 20789 - DNA, 120 bp, Artificial Sequence
  ENSG00000023572_10 (sequence is synthesized)
cttgagaaaaagggatggtattaaaaaaatgaaaggttggagttgtatcaagataagaatgtattttattaggaatttagatatgaattttacaaccaagagctagaaggtaagcatttg

SEQ ID NO: 20790 - DNA, 120 bp, Artificial Sequence
  ENSG00000023572_11 (sequence is synthesized)
gaattctttatttcctattcaggagttaactctttatctcacatagtttttaagtggtaaggactgatatttgatttctctttaaaatttaaggcttttgctgatacacttgtgaactag

SEQ ID NO: 20791 - DNA, 120 bp, Artificial Sequence
  ENSG00000023572_12 (sequence is synthesized)
gcaggaatatcttatacgatattgtgaaaagccttcacactttgtacttgtagagtaatagaagtatattaaatttttagcatggaatgaaatttatcttagagaaactaaattactcat

SEQ ID NO: 20792 - DNA, 120 bp, Artificial Sequence
  ENSG00000023572_13 (sequence is synthesized)
ttaatgacttaatagttcattaagtcattaatgacttaatagttcatttgtcattaaaactatacctatgggcagaaattaaaaggagaagatttcggcattgtatgaggatgaactttt

SEQ ID NO: 20793 - DNA, 120 bp, Artificial Sequence
  ENSG00000023572_14 (sequence is synthesized)
gaaacagtgtagaaatgtactttagttggcatgagccaccgtgcccggccttatgtgtattgtaatacatatatatatataaattctggaaagcagaactctccacctcacaatttaact

SEQ ID NO: 20794 - DNA, 120 bp, Artificial Sequence
  ENSG00000023572_15 (sequence is synthesized)
caatttccaagagcctttgaacacttaatgtgttcaatactgggaatactattcaaactgatttcaattcagctaaacttagcaaacaagatttatcctataggaagtcttactttacaa

SEQ ID NO: 20795 - DNA, 120 bp, Artificial Sequence
  ENSG00000023572_16 (sequence is synthesized)
tgattgaagacgttcagtacttcattaatgaaatcgtctttccagcttcctatcaacaagaatttttaaagtgcctactatacaaagcattttcctagttgatcccacagagtcacttgg

SEQ ID NO: 20796 - DNA, 120 bp, Artificial Sequence
  ENSG00000023572_17 (sequence is synthesized)
ggcagattaccagatgctgagaagaaaaaacccttcatcagaggtggaggaaaaatggatttcaagagtgcttctggtttttgtcaggatggaccagagaatctggaacagtcctgaaga

SEQ ID NO: 20797 - DNA, 120 bp, Artificial Sequence
  ENSG00000023572_18 (sequence is synthesized)
aaatagctggtggcttccttggccttttgccatcaatgatgcttcttacttggatttaaactgccattaggaaacctcttgatcaagaatttagacaagaatttcattcccatgtgataa

SEQ ID NO: 20798 - DNA, 120 bp, Artificial Sequence
  ENSG00000023572_19 (sequence is synthesized)
tttaggttataacactagaatggaacaaagagtagaatgtctttagttctttattttgcattatgtcataagaaagttcttgctatgttgtaaaatcgttgttagattcaggcttttggg

SEQ ID NO: 20799 - DNA, 120 bp, Artificial Sequence
  ENSG00000023572_20 (sequence is synthesized)
gattctgaaaacacattttgttagagttgaagtctattacctgagaaaggtaaaattgtgtcataattgttcatcatactaggtattaagggtagagacaagttacttcaaggtatagaa

SEQ ID NO: 20800 - DNA, 120 bp, Artificial Sequence
  ENSG00000023572_21 (sequence is synthesized)
acactgaccagtactcgactgtgaaaaacatctttacctttagcattttttttttgaaacagtctcgctccgttgctcagactggggggcaatggcgcaatctcagctcactgcaacttc

SEQ ID NO: 20801 - DNA, 120 bp, Artificial Sequence
  ENSG00000023572_22 (sequence is synthesized)
cacttcctgggtacaagcgattctcaatcctcagcctcctgagagtagctgggactacaggcgagcaccaccacacttcgctaattttttgtatttttagtacagccaggatttcgccac

SEQ ID NO: 20802 - DNA, 120 bp, Artificial Sequence
  ENSG00000023572_23 (sequence is synthesized)
atgcttcctagactggtaggacatagggtgagaggcgagtggtggttcgttcttgattatgttcagatcttgaaagaattcaacattagggagagaagccttatcaaaagcctcaaaaac

SEQ ID NO: 20803 - DNA, 120 bp, Artificial Sequence
  ENSG00000023572_24 (sequence is synthesized)
tctactgaaggtaatatgatacctgattctcactatggctttatttaaaatagaagaaataaacccttctaatatctgcatcttagtcttctgaattaaactcattgactaataaaagat

SEQ ID NO: 20804 - DNA, 120 bp, Artificial Sequence
  ENSG00000023572_25 (sequence is synthesized)
ttttactttggagggtttagcactgcatcaaaaaggaagcagatctctcctatttgttaaacgctaaggaatgaaagaaaataacaataaatctgacctctttttgtcatatggcacatt

SEQ ID NO: 20805 - DNA, 120 bp, Artificial Sequence
  ENSG00000023572_26 (sequence is synthesized)
aatgcaaggctaagcaggttttaaaaagtatagggactctccaagaggaaaacaaaaccaggagcagaatccaaggatatagggaagcactgaagccagcagctcccttactgacagtgc

SEQ ID NO: 20806 - DNA, 120 bp, Artificial Sequence
  ENSG00000023572_27 (sequence is synthesized)
caatcgtggaatgccaacagctttagttttaactgtatgcaaggggctggttacaaagctgggggttaagggagaaagatttagataggagaccacagcataccaccactaaatcttcag

SEQ ID NO: 20807 - DNA, 120 bp, Artificial Sequence
  ENSG00000023572_28 (sequence is synthesized)
ttaaaaaaattcgtaatatactttcagagcatagctgatgatttgccaagacagacaagcgttcagatcactaaaggtgtaaccattaggtaggtgacttaacctcccagaacttcaagt

SEQ ID NO: 20808 - DNA, 120 bp, Artificial Sequence
  ENSG00000023572_29 (sequence is synthesized)
ttcttataaaatgtaggtaatagtactttcctttaggatttactttttgaggaatggagataatacatgtaaatctttcagagtggtttttaatagacaatacataatggctatcattaa

SEQ ID NO: 20809 - DNA, 120 bp, Artificial Sequence
  ENSG00000023572_30 (sequence is synthesized)
tcacaatggttcaggtatgtgtgttttcttgtggacccatcagggttttccaagattcctgcctgtacccagccaagaatttagggggcaggggaagcctctggggtttcgtgttgtctt

SEQ ID NO: 20810 - DNA, 120 bp, Artificial Sequence
  ENSG00000023572_31 (sequence is synthesized)
ggatattgatttccatttcttctccctttccataccttacagctggataaaagtaagataatggtgactaagaaaaacttgtaatttttttcctcagtccttatttttacattttttatt

SEQ ID NO: 20811 - DNA, 86 bp, Artificial Sequence
  ENSG00000023572_32 (sequence is synthesized)
tttttttttttttgagacagggtctccctctgtagcccaggatggagaacagtggctctgaagtgatcctcctaccgtagccttct

SEQ ID NO: 20812 - DNA, 120 bp, Artificial Sequence
  ENSG00000023572_33 (sequence is synthesized)
agccttctgaatagctagggctacaggcacatgccaccatgctcaactaattctttttagttttttgtaaatatgggggtcttactgtgttgcccagcaagatccccatagttacaactt

SEQ ID NO: 20813 - DNA, 120 bp, Artificial Sequence
  ENSG00000023572_34 (sequence is synthesized)
tttagttttgaactcctaggctcaagcagtcctcctcctttggcctcctgaagtgctatgattacaggtgtaagccacaatgcccggccctttattttaagatctgaaatacgagctgtt

SEQ ID NO: 20814 - DNA, 120 bp, Artificial Sequence
  ENSG00000023572_35 (sequence is synthesized)
tactggagttcattaatataaaaaactaggccatttttcactttatcattagataatcaatttacattttaattgccaaaatatctgtaattgaaaagctgttgaagaaaaaaagggatc

SEQ ID NO: 20815 - DNA, 120 bp, Artificial Sequence
  ENSG00000023572_36 (sequence is synthesized)
ttctgtacctggattttactgtttactgataaaaaattaccatttgaacaacatcttttaaagtcaggttttcttcataaggtttaatattgttaaaatttattaaatctagtatgtata

SEQ ID NO: 20816 - DNA, 120 bp, Artificial Sequence
  ENSG00000023572_37 (sequence is synthesized)
atttgtgatccttcttgtacaagtgttgaaatgagtgctgtaaaatcaaccaaatgttttgaagttttggtgaatatattctgatgtaacttgctttcagttacccacagttcagatctt

SEQ ID NO: 20817 - DNA, 120 bp, Artificial Sequence
  ENSG00000023572_38 (sequence is synthesized)
agaacttttcagaaaatttttatgggaattgagagaaaaatgtctgcaaattggcactgaaacagtgtttttatttgcatagttgactttttgtgtttggatgataacttttgccaaagg

SEQ ID NO: 20818 - DNA, 120 bp, Artificial Sequence
  ENSG00000023572_39 (sequence is synthesized)
caattttgagtagatcttttcacaaaagaatcctattttaaaactttaaataatttgttttcattaaatctaatcattttgttataattgaattccatgggtaaagaatctttaacttca

SEQ ID NO: 20819 - DNA, 120 bp, Artificial Sequence
  ENSG00000023572_40 (sequence is synthesized)
acttacataaaactagatacattaaaaggtcaatattaattatcaaaacttaaattttaccttgttcaaatacaagattactaaaggctttagattttttaaggcatattataaccttaa

SEQ ID NO: 20820 - DNA, 120 bp, Artificial Sequence
  ENSG00000023572_41 (sequence is synthesized)
ttataaccttaacattcgtatttcttgaaagagatagacagacacttgtttaatgtgcatagagtttatttggtacatctatcaatttctacaataactgaccaaaaacagttcacacag

SEQ ID NO: 20821 - DNA, 120 bp, Artificial Sequence
  ENSG00000023572_42 (sequence is synthesized)
tgtccacctgcactccatgtctaaaatgatttatttagtagggtattttgcaaggctagaaaggagagaaaggatttcacagtatcagtgaaaactgttttatcatgaaacaaatgtaat

SEQ ID NO: 20822 - DNA, 120 bp, Artificial Sequence
  ENSG00000023572_43 (sequence is synthesized)
acattaatatattcattcattctctattagaaaacagcaaaattacattgttagttgtattatttacagtgaaaacttggaagacttgacaaagcatcagttagtttatcaacagaccta

SEQ ID NO: 20823 - DNA, 120 bp, Artificial Sequence
  ENSG00000023572_44 (sequence is synthesized)
ggaagctccctgtcccctcctttcagggtcctttccttggaaatgaaataaacttaaatcagattttacataactttaagcaccagcttgacaatttaaagttttatttcagttttataa

SEQ ID NO: 20824 - DNA, 120 bp, Artificial Sequence
  ENSG00000023572_45 (sequence is synthesized)
aatactcctgctttgaaaggcaaagtgaatgtaaaaatgtgaatgtaattaaacaagtcactggcctggaaactttttattgcaatagtctttatgttttactactatattcacttcttg

SEQ ID NO: 20825 - DNA, 120 bp, Artificial Sequence
  ENSG00000023572_46 (sequence is synthesized)
gaatgaatttgcttgtaggtttgaaacaaaatatttgccttttgtcttgaaaaattcccttaaaaaattaattatttttggaactgtacaactacattttcattcgatgttaaatatgca

SEQ ID NO: 20826 - DNA, 120 bp, Artificial Sequence
  ENSG00000023572_47 (sequence is synthesized)
acttggtccttggatatcatgttacaaagtccaacctgttggataacttgttatagaaaacaataaaaaaccttaaactatcataaaatattactgatgttaacagtcatgtatgtataa

SEQ ID NO: 20827 - DNA, 120 bp, Artificial Sequence
  ENSG00000023572_48 (sequence is synthesized)
cacatcactgtatctagattttcctgttattggatgtttaaattaccaatgtacaatcaggttttaaaatgtaatacttaaatttccattcactatgtaaaattaaaagctctaaaagac

SEQ ID NO: 20828 - DNA, 120 bp, Artificial Sequence
  ENSG00000023608_0 (sequence is synthesized)
agaggcgtgcgggcttcggaggcgtgcgggcttcgggtgccatggggactcctcccggcctgcagaccgactgcgaggcgctgctcagccgcttccaggagacggacagtgtacgcttcg

SEQ ID NO: 20829 - DNA, 120 bp, Artificial Sequence
  ENSG00000023608_1 (sequence is synthesized)
aggacttcacggagctctggagaaacatgaagttcgggactatcttctgtggcagaatgagaaatttagaaaagaacatgtttacaaaagaagctttagctttggcttggcgatattttt

SEQ ID NO: 20830 - DNA, 120 bp, Artificial Sequence
  ENSG00000023608_2 (sequence is synthesized)
tacctccatacaccttccagatcagagttggtgctttgtatctgctatatggattatataatacccaactgtgtcaaccaaaacaaaagatcagagttgccctgaaggattgggatgaag

SEQ ID NO: 20831 - DNA, 120 bp, Artificial Sequence
  ENSG00000023608_3 (sequence is synthesized)
ttttaaaatttcagcaagatttagtaaatgcacagcattttgatgcagcttatatttttaggaagctacgactagacagagcatttcactttacagcaatgcccaaattgctgtcatata

SEQ ID NO: 20832 - DNA, 120 bp, Artificial Sequence
  ENSG00000023608_4 (sequence is synthesized)
ggatgaagaaaaaaattcaccgagctgaagttacagaagaatttaaggacccaagtgatcgtgtgatgaaacttatcacttctgatgtattagaggaaatgctgaatgttcatgatcatt

SEQ ID NO: 20833 - DNA, 120 bp, Artificial Sequence
  ENSG00000023608_5 (sequence is synthesized)
atcagaacatgaaacatgtaatttcagttgataagtccaagccagataaagccctcagcttgataaaggatgatttttttgacaatattaagaacatagttttggagcatcagcagtggc

SEQ ID NO: 20834 - DNA, 120 bp, Artificial Sequence
  ENSG00000023608_6 (sequence is synthesized)
acaaagacagaaagaatccatccttaaagtcaaaaactaatgatggagaagaaaaaatggaaggaaattcacaagaaacggagagatgtgaaagggcagaatcattagcgaaaataaaat

SEQ ID NO: 20835 - DNA, 120 bp, Artificial Sequence
  ENSG00000023608_7 (sequence is synthesized)
caaaggccttttcagttgtcatacaggcatccaaatcaagaaggcatcgtcaagtcaaactcgactcttctgactctgattctgcatctggtcaagggcaagtcaaagcaactaggaaaa

SEQ ID NO: 20836 - DNA, 120 bp, Artificial Sequence
  ENSG00000023608_8 (sequence is synthesized)
aagagaagaaagaaagattgaaaccagcaggaaggaagatgtctctcagaaacaaaggcaatgtgcagaatatacacaaggaagataaacctttaagtctgagtatgcctgtaattacag

SEQ ID NO: 20837 - DNA, 120 bp, Artificial Sequence
  ENSG00000023608_9 (sequence is synthesized)
aagaagaagagaatgaaagtttgagtggaacagagttcactgcatccaagaagaggagaaaacactgaacaaagagcctggtgtagtttttaattttgagttttctgacagaagaaaaga

SEQ ID NO: 20838 - DNA, 120 bp, Artificial Sequence
  ENSG00000023608_10 (sequence is synthesized)
ttggaaattgcaatacgtagttctagaataaaagtacaaaaaattagaataagaattctttaacattttctttaatgatttgcataaatggagataaaacttgtatttagtatgtaatag

SEQ ID NO: 20839 - DNA, 120 bp, Artificial Sequence
  ENSG00000023608_11 (sequence is synthesized)
aaaaaattctgttattcgcagattgttactatttcctataaggttttgtgatactatactgtcctaatacagtctggtaatactattctattttatttaaaatattttttattgaaatat

SEQ ID NO: 20840 - DNA, 120 bp, Artificial Sequence
  ENSG00000023608_12 (sequence is synthesized)
taatgtttattacatgcaaataactattttgtatctacagtcggataatggattttttattttgtatatttattctattttgtatattgttaagtgcaataaagtttttgccttgcttta

SEQ ID NO: 20841 - DNA, 120 bp, Artificial Sequence
  ENSG00000023608_13 (sequence is synthesized)
ttttttaatacataaaacttacattctcataacgtgattgataacttaggaagttcacaatgtattttctacttctgcaattaaatattctttagtgcttgtttattattactaaatact

SEQ ID NO: 20842 - DNA, 120 bp, Artificial Sequence
  ENSG00000023608_14 (sequence is synthesized)
gtattaagtatttaagtactttctaataaaatctttaacaataataatgtaaatttcagaatgtgtctctggtacagaatagttgatattaacagaaaaaaaaaaatctgtagcttcatg

SEQ ID NO: 20843 - DNA, 120 bp, Artificial Sequence
  ENSG00000023608_15 (sequence is synthesized)
ttaacagaaaaaaaaaaatctgtagcttcatgaatatgccactctgttaatttcttgttccagacattttaatagagattgcttgagccatgttgtttgaattgctgccaatagcagacc

SEQ ID NO: 20844 - DNA, 120 bp, Artificial Sequence
  ENSG00000023608_16 (sequence is synthesized)
catgttgtttgaattgctgccaatagcagaccatatccctatcatgttgttggctcaactgttttttttttttccctaatagagatggagtatcgctatgttgctcaggctggtcttgaa

SEQ ID NO: 20845 - DNA, 120 bp, Artificial Sequence
  ENSG00000023608_17 (sequence is synthesized)
caaagtactgggattataggtgtgagctactgtacccagccttaacctgtttcacagttgattatacttcatgctgttttccagcatggtattattaagggatttaaagtttgggttgca

SEQ ID NO: 20846 - DNA, 120 bp, Artificial Sequence
  ENSG00000023608_18 (sequence is synthesized)
acttcgtctcaaaaaaaaaaaaaagtttgggttgaagatcaaattcgtgatatctctatatctaatctttaaaaatcagaatgctaatgctgacgcaaataaaattttcatttattagca

SEQ ID NO: 20847 - DNA, 120 bp, Artificial Sequence
  ENSG00000023697_0 (sequence is synthesized)
gcggcgcagaggcgggcgcctaccagccggcagctccggagctgcccgcgccatgtccgcgcacaatcggggcaccgagctcgaccttagctggatctccaaaatacaagtgaatcaccc

SEQ ID NO: 20848 - DNA, 120 bp, Artificial Sequence
  ENSG00000023697_1 (sequence is synthesized)
ggcagttctgaggcgtgcggaacaaatccaggctcgcagaaccgtgaaaaaggagtggcaggctgcttggctcctgaaagctgttacctttatagatcttactacactttcaggtgatga

SEQ ID NO: 20849 - DNA, 120 bp, Artificial Sequence
  ENSG00000023697_2 (sequence is synthesized)
tacatcttccaacattcaaaggctctgttataaagccaaatacccaatccgggaagatctcttaaaagctttaaatatgcatgataaaggcattactacagccgccgtttgtgtttatcc

SEQ ID NO: 20850 - DNA, 120 bp, Artificial Sequence
  ENSG00000023697_3 (sequence is synthesized)
cgcccgggtgtgtgatgctgtaaaagcactcaaggctgcaggctgtaatatccctgtggcatcagtggccgctggatttccagctggacagactcatttgaagacacgattagaagagat

SEQ ID NO: 20851 - DNA, 120 bp, Artificial Sequence
  ENSG00000023697_4 (sequence is synthesized)
cagattggctgtggaagatggagctacagaaatcgacgtggtaattaacagaagcttggtgctgacaggccagtgggaagccctgtatgatgagattcgtcagtttcgcaaggcctgtgg

SEQ ID NO: 20852 - DNA, 120 bp, Artificial Sequence
  ENSG00000023697_5 (sequence is synthesized)
ggaggctcatcttaaaactatattagcgacaggagaacttggaactcttactaatgtctataaagccagtatgatagcaatgatggcaggatcagattttattaagacctctactggaaa

SEQ ID NO: 20853 - DNA, 120 bp, Artificial Sequence
  ENSG00000023697_6 (sequence is synthesized)
agggtttaaaccagcaggaggcatccgcagtgcaaaggattcccttgcttggctctctcttgtaaaggaggagcttggagatgagtggctgaagccagaactctttcgaataggtgccag

SEQ ID NO: 20854 - DNA, 120 bp, Artificial Sequence
  ENSG00000023697_7 (sequence is synthesized)
tactctgctctcggacattgagaggcagatttaccatcatgtgactggaagatatgcagcttatcatgatcttccaatgtcttaaatcagtcaccagttccagaaaagttctttacgaca

SEQ ID NO: 20855 - DNA, 120 bp, Artificial Sequence
  ENSG00000023697_8 (sequence is synthesized)
atgtttaaaaattatttttctacgtaattgctaaaattatttaattaaaaaattgggcagtaggtaactggcattcctctctttaaaatttctaccgaacttaatggaatggaaaaagca

SEQ ID NO: 20856 - DNA, 120 bp, Artificial Sequence
  ENSG00000023697_9 (sequence is synthesized)
aactcatccacatgtggtactcatttcaggcacatctgaaatgatcttaattactagaagatctgcactattaactttgtgaagagtttctcctaaaaactttaagtaaaatgttaatgg

SEQ ID NO: 20857 - DNA, 120 bp, Artificial Sequence
  ENSG00000023697_10 (sequence is synthesized)
tagctttgataacatcaaattctaagggagaaaaaaacaatattaaaccgcccaagcagtgtgccctagcagaggaaaatgcaacatctcgcaagcgctgctgtaacgacttcaggagtc

SEQ ID NO: 20858 - DNA, 120 bp, Artificial Sequence
  ENSG00000023697_11 (sequence is synthesized)
actgattcagcactaatttcctgctgtgaaaactcatctttcatttttgccgtggataggcgcttttattaattgttgtcctaatgaaatttctgacattgtcatatacaacgatgaata

SEQ ID NO: 20859 - DNA, 120 bp, Artificial Sequence
  ENSG00000023697_12 (sequence is synthesized)
agaggtgaggtacgtggcatgggtaacacacatttcccacgtcgttagacatgtctgtgtgatgaatcaatacaggttcttccagttccaaatgtataggctggtacagaagcaattgtg

SEQ ID NO: 20860 - DNA, 120 bp, Artificial Sequence
  ENSG00000023697_13 (sequence is synthesized)
ggcgcggcgcagaggcgggcgcctaccagccggcagctccggagctgcccgcgccatgtccgcgcacaatcggggcaccgagctcgtttgtttcagagaagatgcaatttatcctgaggg

SEQ ID NO: 20861 - DNA, 120 bp, Artificial Sequence
  ENSG00000023697_14 (sequence is synthesized)
agaatggaaaagtccaaactttggtagattatgagagtagggttcgatgttagtgaagttttcaaggatggcatgtcaaaaccagacttcctcaggaactgcttcatgtggatatactga

SEQ ID NO: 20862 - DNA, 120 bp, Artificial Sequence
  ENSG00000023697_15 (sequence is synthesized)
tgcctgacattgtgtagctgtatcaggctggctttctggaatagctcagtggccaaagattgatcacgaagggtttagagctgtgaaaatgccccagaccttagctggatctccaaaata

SEQ ID NO: 20863 - DNA, 120 bp, Artificial Sequence
  ENSG00000023697_16 (sequence is synthesized)
aagataatgttatttataatactagttacagccacaataactgtctttatatggagaagttgtgaatgaattacctttattaagataaatgtttaatttacctttcattataaaagaaca

SEQ ID NO: 20864 - DNA, 120 bp, Artificial Sequence
  ENSG00000023697_17 (sequence is synthesized)
cactgatggagaaaaattgtgatgaacagaaagtgagttgtgagtgtgggagtgagtatgtgtgatcaagatgtaaactcactttatgtccttttgttaaccgaagacaattttgtcact

SEQ ID NO: 20865 - DNA, 120 bp, Artificial Sequence
  ENSG00000023697_18 (sequence is synthesized)
gacaagagattcctaaatgggttctttaacgaactaattctgctgcaacacagaggctttctcacaaggtgttggccagtgaaaacaggttaatgcagaaattaaacttccttgaggaat

SEQ ID NO: 20866 - DNA, 120 bp, Artificial Sequence
  ENSG00000023697_19 (sequence is synthesized)
caaccacttttctacttttatcaccatgcttagctttgccagtattagaacattatctaatcacatagtgtgaactcttgggtgctttgtttttggtttgttttgccctcactaaaaata

SEQ ID NO: 20867 - DNA, 120 bp, Artificial Sequence
  ENSG00000023697_20 (sequence is synthesized)
taacagaagcttggtgctgacaggccagtgggaaggatcagattttattaagacctctactggaaaagaaacagtaaatgccaccttcccggtagctatagtaatgctgcgggccattag

SEQ ID NO: 20868 - DNA, 120 bp, Artificial Sequence
  ENSG00000023697_21 (sequence is synthesized)
cggcagctccggagctgcccgcgccatgtccgcgcacaatcggggcaccgagctcgctcgctggttggaaaacccaacaacccaaaaaacaaaacccaaaacaaacaacccccaagcaga

SEQ ID NO: 20869 - DNA, 120 bp, Artificial Sequence
  ENSG00000023734_0 (sequence is synthesized)
cgtcgtcacttcctgccgatgccggtgtggacgctgtgaatcgtggctggcccggttctccgcttctccccatcccctactttcctccctccctccctttccctccctcgtcgactgttg

SEQ ID NO: 20870 - DNA, 120 bp, Artificial Sequence
  ENSG00000023734_1 (sequence is synthesized)
cttgctggtcgcagactccctgacccctccctcacccctccctaacctcggtgccaccggattgcccttcttttcctgttgcccagcccagccctagtgtcagggcgggggcctggagca

SEQ ID NO: 20871 - DNA, 120 bp, Artificial Sequence
  ENSG00000023734_2 (sequence is synthesized)
gcccgaggcactgcagcagaagagagaaaagacaacgacgaccctcagctcgccagtccggtcgctggcttcgccgccgccatggcaatgagacagacgccgctcacctgctctggccac

SEQ ID NO: 20872 - DNA, 120 bp, Artificial Sequence
  ENSG00000023734_3 (sequence is synthesized)
acgcgacccgtggttgatttggccttcagtggcatcacgccttatgggtatttcttaatcagcgcttgcaaagatggtaaacctatgctacgccagggagatacaggagactggattgga

SEQ ID NO: 20873 - DNA, 120 bp, Artificial Sequence
  ENSG00000023734_4 (sequence is synthesized)
acatttttgggtcataaaggtgctgtttggggtgcaacactgaataaggatgccaccaaagcagctacagcagctgcagatttcacagccaaagtgtgggatgctgtctcaggagatgaa

SEQ ID NO: 20874 - DNA, 120 bp, Artificial Sequence
  ENSG00000023734_5 (sequence is synthesized)
ttgatgaccctggctcataaacacattgtcaagactgtggatttcacgcaggatagtaattatttgttaaccgggggacaggataaactgttacgcatatatgacttgaacaaacctgaa

SEQ ID NO: 20875 - DNA, 120 bp, Artificial Sequence
  ENSG00000023734_6 (sequence is synthesized)
gcagaacctaaggaaattagtggtcatacttctggtataaaaaaagctctgtggtgcagtgaggataaacagattctttctgctgatgacaaaactgttcgactttgggatcatgctact

SEQ ID NO: 20876 - DNA, 120 bp, Artificial Sequence
  ENSG00000023734_7 (sequence is synthesized)
ggttataacttatggacgatctattgcttttcatagtgcagtaagtttggacccaattaaatcctttgaagctcctgcaaccatcaattctgcatctcttcatcctgagaaagaatttct

SEQ ID NO: 20877 - DNA, 120 bp, Artificial Sequence
  ENSG00000023734_8 (sequence is synthesized)
tgttgcaggcggtgaagattttaaactttataagtatgattataatagtggagaagaattagaatcctacaagggacactttggtcctattcactgtgtgagatttagtcctgatggaga

SEQ ID NO: 20878 - DNA, 120 bp, Artificial Sequence
  ENSG00000023734_9 (sequence is synthesized)
actctatgccagtggttcagaagatggaacattgagactatggcaaactgtggtaggaaaaacgtatggcctttggaaatgtgtgcttcctgaagaagatagtggtgagctggcaaagcc

SEQ ID NO: 20879 - DNA, 120 bp, Artificial Sequence
  ENSG00000023734_10 (sequence is synthesized)
aaagattggttttccagagacaacagaagaggagctagaagaaattgcttcagagaattcagattgcatctttccttcagctcctgatgttaaggcctgagcgtcaatcatatgtgcagt

SEQ ID NO: 20880 - DNA, 120 bp, Artificial Sequence
  ENSG00000023734_11 (sequence is synthesized)
tagtatacaactgactaaaacaagcaagcagagaaaagcatcagccttccagagttactgtctgcttaaggcagaaacagcagtaaataatgaggaaaatgaattagctccagtgctgga

SEQ ID NO: 20881 - DNA, 120 bp, Artificial Sequence
  ENSG00000023734_12 (sequence is synthesized)
acaactaactaacttggtgttacctgtaagtgaaaactcaagtgtcagatgaagggaggtggagttatcctcttatagtacagtggcctgttatctttttaatgaatatatacaagccaa

SEQ ID NO: 20882 - DNA, 120 bp, Artificial Sequence
  ENSG00000023734_13 (sequence is synthesized)
catccaatttctattattacaattagggttcttgtagctgtttatgttaatatggagaagaaaactatattggctgattttttctgatcttaaagcagaatgccttttctttttttgctt

SEQ ID NO: 20883 - DNA, 120 bp, Artificial Sequence
  ENSG00000023734_14 (sequence is synthesized)
cagttgtaaagaagagggaatacatgataaagtaactggtttgatttctcgttcattgtacactgcctctgaacatctaattgtttttagttgtctaaataaaatgcctctaaaacaaaa

SEQ ID NO: 20884 - DNA, 120 bp, Artificial Sequence
  ENSG00000023734_15 (sequence is synthesized)
tacagtgatgtggttacctttatcatatgttaagtcccagtaattaacacctcatttatatatatatatatgttacatatatatgttgaaagtaaatttttcagctaacttaagcttggt

SEQ ID NO: 20885 - DNA, 120 bp, Artificial Sequence
  ENSG00000023734_16 (sequence is synthesized)
gcttacaagtgaaaaagtaaaggagttttaaccatttgggtcagatgcttttatagatctgtaaacaaagtatgcagaaatttatccttttaactaaagttcatcattatgctgatgtta

SEQ ID NO: 20886 - DNA, 120 bp, Artificial Sequence
  ENSG00000023839_0 (sequence is synthesized)
agtcacatgtccatccactgtttcaatgtaacatgcatctaggcaaggttaacgattaaatggttgggatgaaaggtcatcctttacggagaacatcagaatggtagataattcctgttc

SEQ ID NO: 20887 - DNA, 120 bp, Artificial Sequence
  ENSG00000023839_1 (sequence is synthesized)
cactttctttgatgaaacaagtaaagaagaaacaacacaatcatattaatagaagagtcttcgttccagacgcagtccaggaatcatgctggagaagttctgcaactctactttttggaa

SEQ ID NO: 20888 - DNA, 120 bp, Artificial Sequence
  ENSG00000023839_2 (sequence is synthesized)
ttcctcattcctggacagtccggaggcagacctgccactttgttttgagcaaactgttctggtgtggattcccttgggctacctatggctcctggccccctggcagcttctccacgtgta

SEQ ID NO: 20889 - DNA, 120 bp, Artificial Sequence
  ENSG00000023839_3 (sequence is synthesized)
taaatccaggaccaagagatcctctaccaccaaactctatcttgctaagcaggtattcgttggttttcttcttattctagcagccatagagctggcccttgtactcacagaagactctgg

SEQ ID NO: 20890 - DNA, 120 bp, Artificial Sequence
  ENSG00000023839_4 (sequence is synthesized)
acaagccacagtccctgctgttcgatataccaatccaagcctctacctaggcacatggctcctggttttgctgatccaatacagcagacaatggtgtgtacagaaaaactcctggttcct

SEQ ID NO: 20891 - DNA, 120 bp, Artificial Sequence
  ENSG00000023839_5 (sequence is synthesized)
gtccctattctggattctctcgatactctgtggcactttccaatttcagactctgatccggacactcttacagggtgacaattctaatctagcctactcctgcctgttcttcatctccta

SEQ ID NO: 20892 - DNA, 120 bp, Artificial Sequence
  ENSG00000023839_6 (sequence is synthesized)
cggattccagatcctgatcctgatcttttcagcattttcagaaaataatgagtcatcaaataatccatcatccatagcttcattcctgagtagcattacctacagctggtatgacagcat

SEQ ID NO: 20893 - DNA, 120 bp, Artificial Sequence
  ENSG00000023839_7 (sequence is synthesized)
cattctgaaaggctacaagcgtcctctgacactcgaggatgtctgggaagttgatgaagagatgaaaaccaagacattagtgagcaagtttgaaacgcacatgaagagagagctgcagaa

SEQ ID NO: 20894 - DNA, 120 bp, Artificial Sequence
  ENSG00000023839_8 (sequence is synthesized)
agccaggcgggcactccagagacggcaggagaagagctcccagcagaactctggagccaggctgcctggcttgaacaagaatcagagtcaaagccaagatgcccttgtcctggaagatgt

SEQ ID NO: 20895 - DNA, 120 bp, Artificial Sequence
  ENSG00000023839_9 (sequence is synthesized)
tgaaaagaaaaaaaagaagtctgggaccaaaaaagatgttccaaaatcctggttgatgaaggctctgttcaaaactttctacatggtgctcctgaaatcattcctactgaagctagtgaa

SEQ ID NO: 20896 - DNA, 120 bp, Artificial Sequence
  ENSG00000023839_10 (sequence is synthesized)
tgacatcttcacgtttgtgagtcctcagctgctgaaattgctgatctcctttgcaagtgaccgtgacacatatttgtggattggatatctctgtgcaatcctcttattcactgcggctct

SEQ ID NO: 20897 - DNA, 120 bp, Artificial Sequence
  ENSG00000023839_11 (sequence is synthesized)
cattcagtctttctgccttcagtgttatttccaactgtgcttcaagctgggtgtaaaagtacggacagctatcatggcttctgtatataagaaggcattgaccctatccaacttggccag

SEQ ID NO: 20898 - DNA, 120 bp, Artificial Sequence
  ENSG00000023839_12 (sequence is synthesized)
gaaggagtacaccgttggagaaacagtgaacctgatgtctgtggatgcccagaagctcatggatgtgaccaacttcatgcacatgctgtggtcaagtgttctacagattgtcttatctat

SEQ ID NO: 20899 - DNA, 120 bp, Artificial Sequence
  ENSG00000023839_13 (sequence is synthesized)
cttcttcctatggagagagttgggaccctcagtcttagcaggtgttggggtgatggtgcttgtaatcccaattaatgcgatactgtccaccaagagtaagaccattcaggtcaaaaatat

SEQ ID NO: 20900 - DNA, 120 bp, Artificial Sequence
  ENSG00000023839_14 (sequence is synthesized)
gaagaataaagacaaacgtttaaagatcatgaatgagattcttagtggaatcaagatcctgaaatattttgcctgggaaccttcattcagagaccaagtacaaaacctccggaagaaaga

SEQ ID NO: 20901 - DNA, 120 bp, Artificial Sequence
  ENSG00000023839_15 (sequence is synthesized)
gctcaagaacctgctggcctttagtcaactacagtgtgtagtaatattcgtcttccagttaactccagtcctggtatctgtggtcacattttctgtttatgtcctggtggatagcaacaa

SEQ ID NO: 20902 - DNA, 120 bp, Artificial Sequence
  ENSG00000023839_16 (sequence is synthesized)
tattttggatgcacaaaaggccttcacctccattaccctcttcaatatcctgcgctttcccctgagcatgcttcccatgatgatctcctccatgctccaggccagtgtttccacagagcg

SEQ ID NO: 20903 - DNA, 120 bp, Artificial Sequence
  ENSG00000023839_17 (sequence is synthesized)
gctagagaagtacttgggaggggatgacttggacacatctgccattcgacatgactgcaattttgacaaagccatgcagttttctgaggcctcctttacctgggaacatgattcggaagc

SEQ ID NO: 20904 - DNA, 120 bp, Artificial Sequence
  ENSG00000023839_18 (sequence is synthesized)
cacagtccgagatgtgaacctggacattatggcaggccaacttgtggctgtgataggccctgtcggctctgggaaatcctccttgatatcagccatgctgggagaaatggaaaatgtcca

SEQ ID NO: 20905 - DNA, 120 bp, Artificial Sequence
  ENSG00000023839_19 (sequence is synthesized)
cgggcacatcaccatcaagggcaccactgcctatgtcccacagcagtcctggattcagaatggcaccataaaggacaacatcctttttggaacagagtttaatgaaaagaggtaccagca

SEQ ID NO: 20906 - DNA, 120 bp, Artificial Sequence
  ENSG00000023839_20 (sequence is synthesized)
agtactggaggcctgtgctctcctcccagacttggaaatgctgcctggaggagatttggctgagattggagagaagggtataaatcttagtgggggtcagaagcagcggatcagcctggc

SEQ ID NO: 20907 - DNA, 120 bp, Artificial Sequence
  ENSG00000023839_21 (sequence is synthesized)
cagagctacctaccaaaatttagacatctatcttctagatgaccccctgtctgcagtggatgctcatgtaggaaaacatatttttaataaggtcttgggccccaatggcctgttgaaagg

SEQ ID NO: 20908 - DNA, 120 bp, Artificial Sequence
  ENSG00000023839_22 (sequence is synthesized)
caagactcgactcttggttacacatagcatgcactttcttcctcaagtggatgagattgtagttctggggaatggaacaattgtagagaaaggatcctacagtgctctcctggccaaaaa

SEQ ID NO: 20909 - DNA, 120 bp, Artificial Sequence
  ENSG00000023839_23 (sequence is synthesized)
aggagagtttgctaagaatctgaagacatttctaagacatacaggccctgaagaggaagccacagtccatgatggcagtgaagaagaagacgatgactatgggctgatatccagtgtgga

SEQ ID NO: 20910 - DNA, 120 bp, Artificial Sequence
  ENSG00000023839_24 (sequence is synthesized)
agctttcgtcgaacacttagccgcagttctaggtccaatggcaggcatctgaagtccctgagaaactccttgaaaactcggaatgtgaatagcctgaaggaagacgaagaactagtgaaa

SEQ ID NO: 20911 - DNA, 120 bp, Artificial Sequence
  ENSG00000023839_25 (sequence is synthesized)
ggacaaaaactaattaagaaggaattcatagaaactggaaaggtgaagttctccatctacctggagtacctacaagcaataggattgttttcgatattcttcatcatccttgcgtttgtg

SEQ ID NO: 20912 - DNA, 120 bp, Artificial Sequence
  ENSG00000023839_26 (sequence is synthesized)
atgaattctgtggcttttattggatccaacctctggctcagtgcttggaccagtgactctaaaatcttcaatagcaccgactatccagcatctcagagggacatgagagttggagtctac

SEQ ID NO: 20913 - DNA, 120 bp, Artificial Sequence
  ENSG00000023839_27 (sequence is synthesized)
ggagctctgggattagcccaaggtatatttgtgttcatagcacatttctggagtgcctttggtttcgtccatgcatcaaatatcttgcacaagcaactgctgaacaatatccttcgagca

SEQ ID NO: 20914 - DNA, 120 bp, Artificial Sequence
  ENSG00000023839_28 (sequence is synthesized)
cctatgagattttttgacacaacacccacaggccggattgtgaacaggtttgccggcgatatttccacagtggatgacaccctgcctcagtccttgcgcagctggattacatgcttcctg

SEQ ID NO: 20915 - DNA, 120 bp, Artificial Sequence
  ENSG00000023839_29 (sequence is synthesized)
gggataatcagcacccttgtcatgatctgcatggccactcctgtcttcaccatcatcgtcattcctcttggcattatttatgtatctgttcagatgttttatgtgtctacctcccgccag

SEQ ID NO: 20916 - DNA, 120 bp, Artificial Sequence
  ENSG00000023839_30 (sequence is synthesized)
ctgaggcgtctggactctgtcaccaggtccccaatctactctcacttcagcgagaccgtatcaggtttgccagttatccgtgcctttgagcaccagcagcgatttctgaaacacaatgag

SEQ ID NO: 20917 - DNA, 120 bp, Artificial Sequence
  ENSG00000023839_31 (sequence is synthesized)
gtgaggattgacaccaaccagaaatgtgtcttttcctggatcacctccaacaggtggcttgcaattcgcctggagctggttgggaacctgactgtcttcttttcagccttgatgatggtt

SEQ ID NO: 20918 - DNA, 120 bp, Artificial Sequence
  ENSG00000023839_32 (sequence is synthesized)
atttatagagataccctaagtggggacactgttggctttgttctgtccaatgcactcaatatcacacaaaccctgaactggctggtgaggatgacatcagaaatagagaccaacattgtg

SEQ ID NO: 20919 - DNA, 120 bp, Artificial Sequence
  ENSG00000023839_33 (sequence is synthesized)
gctgttgagcgaataactgagtacacaaaagtggaaaatgaggcaccctgggtgactgataagaggcctccgccagattggcccagcaaaggcaagatccagtttaacaactaccaagtg

SEQ ID NO: 20920 - DNA, 120 bp, Artificial Sequence
  ENSG00000023839_34 (sequence is synthesized)
cggtaccgacctgagctggatctggtcctcagagggatcacttgtgacatcggtagcatggagaagattggtgtggtgggcaggacaggagctggaaagtcatccctcacaaactgcctc

SEQ ID NO: 20921 - DNA, 120 bp, Artificial Sequence
  ENSG00000023839_35 (sequence is synthesized)
ttcagaatcttagaggctgccggtggtcagattatcattgatggagtagatattgcttccattgggctccacgacctccgagagaagctgaccatcatcccccaggaccccatcctgttc

SEQ ID NO: 20922 - DNA, 120 bp, Artificial Sequence
  ENSG00000023839_36 (sequence is synthesized)
tctggaagcctgaggatgaatctcgaccctttcaacaactactcagatgaggagatttggaaggccttggagctggctcacctcaagtcttttgtggccagcctgcaacttgggttatcc

SEQ ID NO: 20923 - DNA, 120 bp, Artificial Sequence
  ENSG00000023839_37 (sequence is synthesized)
cacgaagtgacagaggctggtggcaacctgagcataggccagaggcagctgctgtgcctgggcagggctctgcttcggaaatccaagatcctggtcctggatgaggccactgctgcggtg

SEQ ID NO: 20924 - DNA, 120 bp, Artificial Sequence
  ENSG00000023839_38 (sequence is synthesized)
gatctagagacagacaacctcattcagacgaccatccaaaacgagttcgcccactgcacagtgatcaccatcgcccacaggctgcacaccatcatggacagtgacaaggtaatggtccta

SEQ ID NO: 20925 - DNA, 120 bp, Artificial Sequence
  ENSG00000023839_39 (sequence is synthesized)
gacaacgggaagattatagagtgcggcagccctgaagaactgctacaaatccctggacccttttactttatggctaaggaagctggcattgagaatgtgaacagcacaaaattctagcag

SEQ ID NO: 20926 - DNA, 120 bp, Artificial Sequence
  ENSG00000023839_40 (sequence is synthesized)
aaggccccatgggttagaaaaggactataagaataatttcttatttaattttattttttataaaatacagaatacatacaaaagtgtgtataaaatgtacgttttaaaaaaggataagtg

SEQ ID NO: 20927 - DNA, 120 bp, Artificial Sequence
  ENSG00000023839_41 (sequence is synthesized)
aacacccatgaacctactacccaggttaagaaaataaatgtcaccaggtacttgagaaacccctcgattgtctacctcgatcgtacttccttgctacccacccctcccagggacaaccac

SEQ ID NO: 20928 - DNA, 120 bp, Artificial Sequence
  ENSG00000023839_42 (sequence is synthesized)
tgtcctgaatttcacgataattattcctttgcctttcatttctgttttatcacctttgtatgtatctttaaacaacatatacccttttttacttatgtaaatggactgactcatactgca

SEQ ID NO: 20929 - DNA, 120 bp, Artificial Sequence
  ENSG00000023839_43 (sequence is synthesized)
tacatcttctatgacttgattcttttgttcaatattatatctgagattcatccatggtgatgcaaataggtgcattattttttttcactgctctgtagtctggcattgtatgaatacagc

SEQ ID NO: 20930 - DNA, 120 bp, Artificial Sequence
  ENSG00000023839_44 (sequence is synthesized)
acaatgtatcagttttaatattggggatcattagcattattctcaggtttttaaaaattataagcagtactactatggacattctggtctacatctcctggcacatatgtaagagtttct

SEQ ID NO: 20931 - DNA, 120 bp, Artificial Sequence
  ENSG00000023839_45 (sequence is synthesized)
ctagggtataacctaggaatggagggtatgaacatgtttacatgcacaaactagctgatgccaaactggtaatgccaactgaaaacattgctgtcaatctgatgaatatgaattgatgta

SEQ ID NO: 20932 - DNA, 120 bp, Artificial Sequence
  ENSG00000023839_46 (sequence is synthesized)
tcaatgagaatttcatttgcatttccctagtatctattggggatgaatatattttcatgtttctggggcatttgcatttccacttgttttttaaatattgtgtctgataattccaatgtc

SEQ ID NO: 20933 - DNA, 120 bp, Artificial Sequence
  ENSG00000023839_47 (sequence is synthesized)
tggattctttgtttatctgttgtttctgttggtttttactcatggtattttatttccttgtatgtcttgtgaatttttattataagctcgttctccttaaaactttatctgtggacattc

SEQ ID NO: 20934 - DNA, 90 bp, Artificial Sequence
  ENSG00000023839_48 (sequence is synthesized)
gaatcgcttgaacctgggaggcagatcttgcagtaatcgacaagatcgcaactccgtctcaacagaaacaaaaaaagaagaagaagaaca

SEQ ID NO: 20935 - DNA, 120 bp, Artificial Sequence
  ENSG00000023839_49 (sequence is synthesized)
actccgtctcaacagaaacaaaaaaagaagaagaagaacaagaagccgtgtgcagtggtgcaaacctgtaatcccagctacttgggaagcttaagcaggagaatcactttgaagccggga

SEQ ID NO: 20936 - DNA, 81 bp, Artificial Sequence
  ENSG00000023839_50 (sequence is synthesized)
cacaaaaaacaaacaacaacaacaacaaaaaaccacacacaccaaaaacaaagatgccacaggggctgctttatttcttga

SEQ ID NO: 20937 - DNA, 120 bp, Artificial Sequence
  ENSG00000023839_51 (sequence is synthesized)
ccaaaaacaaagatgccacaggggctgctttatttcttgagggcatcaaggaggcccccaaggagatgccagagtggcagagaggcagccagtgtttgaggaggaaggagcaagagcagg

SEQ ID NO: 20938 - DNA, 120 bp, Artificial Sequence
  ENSG00000023839_52 (sequence is synthesized)
gcaagggtacatcagcatcatggcgattctgtccttacatttttatagcacttcatacttctcagtgcacttcatattattaatggtattcacaatactgatactaccttagtgatggat

SEQ ID NO: 20939 - DNA, 120 bp, Artificial Sequence
  ENSG00000023839_53 (sequence is synthesized)
acatggcgtgtaatgtactgttctctttcctttggggtacttttgaaattttccagaatgaaacgtggttttgaaaaaaataataccttagcatttctagattttgcaccttggtacaaa

SEQ ID NO: 20940 - DNA, 120 bp, Artificial Sequence
  ENSG00000023839_54 (sequence is synthesized)
ttagcataagcaggcaatttgttgattcattcacttgaaaatatttattgagcacaactgtgtgtcagtgaccattctgggcactaaaagattgctcatcttttgtgagctagaaaatat

SEQ ID NO: 20941 - DNA, 120 bp, Artificial Sequence
  ENSG00000023839_55 (sequence is synthesized)
gtagtaagcccatacataggttactctttgaaagtaataatagctattaagaaaataaaacaatagtgtatttggagtgaagtgcgacttgagacagggtaacaggggaagcttctcaga

SEQ ID NO: 20942 - DNA, 120 bp, Artificial Sequence
  ENSG00000023839_56 (sequence is synthesized)
ggagatgacatctgaacagacactcaaatgatgagatcaggccctctgagggacagtcagagggaagtgtgttccagtcagaaggagcaggcatgcgaggctgagaggggaacacatttg

SEQ ID NO: 20943 - DNA, 120 bp, Artificial Sequence
  ENSG00000023839_57 (sequence is synthesized)
gcttgctcagggaatggcaagaagatccaggacagggtgcgcatggggtgagatgggctcaaggaagtggacagggattaagctatgtggacccctgtgggccacaataaggaatctgga

SEQ ID NO: 20944 - DNA, 120 bp, Artificial Sequence
  ENSG00000023839_58 (sequence is synthesized)
aaagtcggcactggattgtccttgtggtttgagtggttgagttggtttctgtgcctatgatgattttcagtcttctggtttttctgtagatcacacaaaccctgaactggctggtgagga

SEQ ID NO: 20945 - DNA, 85 bp, Artificial Sequence
  ENSG00000023839_59 (sequence is synthesized)
gacaggtaggaaagcctggagtatggattggctgtatccttactctctcactcctctgaaagtgtcagaaagattttttatttta

SEQ ID NO: 20946 - DNA, 120 bp, Artificial Sequence
  ENSG00000023839_60 (sequence is synthesized)
ctgcagaaattttcttacagagaattacagcactttggccaccccctgtttaatatgttccctaatggccacagcaggaaagagcaattagcaaattcctgaatatttccttcacatcat

SEQ ID NO: 20947 - DNA, 120 bp, Artificial Sequence
  ENSG00000023839_61 (sequence is synthesized)
agtcatcaaatgtgagattctaaatatgcccatctcatatattacttaattggatgatatcttaatgaatataactttaagatgtctgggtctcacggaggcgccacaagcccagaataa

SEQ ID NO: 20948 - DNA, 120 bp, Artificial Sequence
  ENSG00000023839_62 (sequence is synthesized)
ggtagtacagaccattttatgacaaggaaacagatagtgatgagagtaaaatactgacttttactttcacctaccaattgtcagtgtaattaattcattcatatatctatgccagaaaat

SEQ ID NO: 20949 - DNA, 120 bp, Artificial Sequence
  ENSG00000023839_63 (sequence is synthesized)
ctgattatcattctactagtggctttagggtctccaaataaacacatgttgataagctgactttaacatcatatctagtttctagcacaacattatatcattaaaaaatcagtttctgat

SEQ ID NO: 20950 - DNA, 120 bp, Artificial Sequence
  ENSG00000023892_0 (sequence is synthesized)
agtgtcagagccgcccccagccgggcgggcgcctcagccatggccctgcgcaaggaactgctcaagtccatctggtacgcctttaccgcgctggacgtggagaagagtggcaaagtctcc

SEQ ID NO: 20951 - DNA, 120 bp, Artificial Sequence
  ENSG00000023892_1 (sequence is synthesized)
aagtcccagctcaaggtgctgtcccacaacctgtacacggtcctgcacatcccccatgaccccgtggccctggaggaacacttccgagatgatgatgacggccctgtgtccagccaggga

SEQ ID NO: 20952 - DNA, 120 bp, Artificial Sequence
  ENSG00000023892_2 (sequence is synthesized)
tacatgccctacctcaacaagtacatcctggacaaggtggaggagggggcttttgttaaagagcactttgatgagctgtgctggacgctgacggccaagaagaactatcgggcagatagc

SEQ ID NO: 20953 - DNA, 120 bp, Artificial Sequence
  ENSG00000023892_3 (sequence is synthesized)
aacgggaacagtatgctctccaatcaggatgccttccgcctctggtgcctcttcaacttcctgtctgaggacaagtaccctctgatcatggttcctgatgaggtggaatacctgctgaaa

SEQ ID NO: 20954 - DNA, 120 bp, Artificial Sequence
  ENSG00000023892_4 (sequence is synthesized)
aaggtactcagcagcatgagcttggaggtgagcttgggtgagctggaggagcttctggcccaggaggcccaggtggcccagaccaccggggggctcagcgtctggcagttcctggagctc

SEQ ID NO: 20955 - DNA, 120 bp, Artificial Sequence
  ENSG00000023892_5 (sequence is synthesized)
ttcaattcgggccgctgcctgcggggcgtgggccgggacaccctcagcatggccatccacgaggtctaccaggagctcatccaagatgtcctgaagcagggctacctgtggaagcgaggg

SEQ ID NO: 20956 - DNA, 120 bp, Artificial Sequence
  ENSG00000023892_6 (sequence is synthesized)
cacctgagaaggaactgggccgaacgctggttccagctgcagcccagctgcctctgctactttgggagtgaagagtgcaaagagaaaaggggcattatcccgctggatgcacactgctgc

SEQ ID NO: 20957 - DNA, 120 bp, Artificial Sequence
  ENSG00000023892_7 (sequence is synthesized)
gtggaggtgctgccagaccgcgacggaaagcgctgcatgttctgtgtgaagacagccaaccgcacgtatgagatgagcgcctcagacacgcgccagcgccaggagtggacagctgccatc

SEQ ID NO: 20958 - DNA, 120 bp, Artificial Sequence
  ENSG00000023892_8 (sequence is synthesized)
cagatggcgatccggctgcaggccgaggggaagacgtccctacacaaggacctgaagcagaaacggcgcgagcagcgggagcagcgggagcggcgccgggcggccaaggaagaggagctg

SEQ ID NO: 20959 - DNA, 120 bp, Artificial Sequence
  ENSG00000023892_9 (sequence is synthesized)
tgcaggaggagaaggagcggaagctgcaggagctggagctgctgcaggaggcgcagcggcaggccgagcggctgctgcaggaggaggaggaacggcgccgcagccagcaccgcgagctgc

SEQ ID NO: 20960 - DNA, 120 bp, Artificial Sequence
  ENSG00000023892_10 (sequence is synthesized)
agcaggcgctcgagggccaactgcgcgaggcggagcaggcccgggcctccatgcaggctgagatggagctgaaggaggaggaggctgcccggcagcggcagcgcatcaaggagctggagg

SEQ ID NO: 20961 - DNA, 120 bp, Artificial Sequence
  ENSG00000023892_11 (sequence is synthesized)
agatgcagcagcggttgcaggaggccctgcaactagaggtgaaagctcggcgagatgaagaatctgtgcgaatcgctcagaccagactgctggaagaggaggaagagaagctgaagcagt

SEQ ID NO: 20962 - DNA, 120 bp, Artificial Sequence
  ENSG00000023892_12 (sequence is synthesized)
tgatgcagctgaaggaggagcaggagcgctacatcgaacgggcgcagcaggagaaggaagagctgcagcaggagatggcacagcagagccgctccctgcagcaggcccagcagcagctgg

SEQ ID NO: 20963 - DNA, 120 bp, Artificial Sequence
  ENSG00000023892_13 (sequence is synthesized)
aggaggtgcggcagaaccggcagagggctgacgaggatgtggaggctgcccagagaaaactgcgccaggccagcaccaacgtgaaacactggaatgtccagatgaaccggctgatgcatc

SEQ ID NO: 20964 - DNA, 120 bp, Artificial Sequence
  ENSG00000023892_14 (sequence is synthesized)
caattgagcctggagataagcgtccggtcaccagcagctccttctcaggcttccagccccctctgcttgcccaccgtgactcctccctaaagcgcctgacccgctggggatcccagggca

SEQ ID NO: 20965 - DNA, 120 bp, Artificial Sequence
  ENSG00000023892_15 (sequence is synthesized)
acaggaccccctcgcccaacagcaatgagcagcagaagtccctcaatggtggggatgaggctcctgccccggcttccacccctcaggaagataaactggatccagcaccagaaaattagc

SEQ ID NO: 20966 - DNA, 120 bp, Artificial Sequence
  ENSG00000023892_16 (sequence is synthesized)
ctctcttagccccttgttcttcccaatgtcatatccaccaggacctggccacagctggcctgtgggtgatcccagctcttactaggagagggagctgaggtcctggtgccaggggcccag

SEQ ID NO: 20967 - DNA, 120 bp, Artificial Sequence
  ENSG00000023892_17 (sequence is synthesized)
gccctccaaccataaacagtccaggatggaacctggttcacccttcataccagctccaagccccagaccatgggagctgtctgggatgttgatccttgagaacttggccctgtgctttag

SEQ ID NO: 20968 - DNA, 120 bp, Artificial Sequence
  ENSG00000023892_18 (sequence is synthesized)
acccaaggacccgattcttgggctaggaaagagagaacaagcaagccggggctacctgcccccaggtggccaccaagttgtggaagcacatttctaaataaaaactgctcttagaatgaa

SEQ ID NO: 20969 - DNA, 120 bp, Artificial Sequence
  ENSG00000023892_19 (sequence is synthesized)
gcgtgatctgcataaacactgagtggcgattatgtactgggccccgtggaataatagcaagatggaaacgcacccacctagccttcaaagagcaaaggctacagagttgtggggacttaa

SEQ ID NO: 20970 - DNA, 80 bp, Artificial Sequence
  ENSG00000023902_0 (sequence is synthesized)
gtgcgctcggggacccgggccgcgtgggcgccgggatggagggcgccaaggggcggggagcgggcgtgcgtgtgtgtgcg

SEQ ID NO: 20971 - DNA, 120 bp, Artificial Sequence
  ENSG00000023902_1 (sequence is synthesized)
cgtgcgtgtgtgtgcgagtgcgaatgcgagggaggccggccttgagtgaaaccggagctacaaagaaggggagagtccgggagcgggagggcgcgagggaggagcggcggcgccggggca

SEQ ID NO: 20972 - DNA, 120 bp, Artificial Sequence
  ENSG00000023902_2 (sequence is synthesized)
gcggggaaggagcccccgcggtgccgccgaggccccgacgcggggccgcccctcggctcgccgccccgcgcccgcgcccgctgggaatgatgaagaagaacaattccgccaagcggggac

SEQ ID NO: 20973 - DNA, 120 bp, Artificial Sequence
  ENSG00000023902_3 (sequence is synthesized)
tccgccaagcggggacctcaggatggaaaccagcagcctgcaccgcccgagaaggtcggctgggtccggaaattctgcgggaaagggattttcagggagatttggaaaaaccgctatgtg

SEQ ID NO: 20974 - DNA, 120 bp, Artificial Sequence
  ENSG00000023902_4 (sequence is synthesized)
gtgctgaaaggggaccagctctacatctctgagaaggaggtaaaagatgagaaaaatattcaagaggtatttgacctgagtgactatgagaagtgtgaagagctccggaagtccaagagc

SEQ ID NO: 20975 - DNA, 120 bp, Artificial Sequence
  ENSG00000023902_5 (sequence is synthesized)
aggagcaagaaaaatcatagcaagtttactcttgcccactccaaacagcccggtaacacggcacccaacctgatcttcctggcagtgagtccagaagagaaggaatcgtggatcaatgcc

SEQ ID NO: 20976 - DNA, 120 bp, Artificial Sequence
  ENSG00000023902_6 (sequence is synthesized)
ctcaactctgccatcacccgagccaagaaccgtatcttggatgaggtcaccgttgaggaggacagctatcttgcccatcccactcgagacagggcaaaaatccagcactcccgccgcccc

SEQ ID NO: 20977 - DNA, 120 bp, Artificial Sequence
  ENSG00000023902_7 (sequence is synthesized)
ccaacaaggggacacctaatggctgtggcttccacctctacctcggatgggatgctgaccttggacttgatccaagaggaagacccttcccctgaggaaccaacctcttgtgctgagagc

SEQ ID NO: 20978 - DNA, 120 bp, Artificial Sequence
  ENSG00000023902_8 (sequence is synthesized)
gccctccgcagaccgggcaagcagtctctcccgaccttgggaaaaaacagacaaaggggccacctacaccccccaggcacccaagaagttgacgcccacagagaaaggccgctgcgcctc

SEQ ID NO: 20979 - DNA, 120 bp, Artificial Sequence
  ENSG00000023902_9 (sequence is synthesized)
cctggaggagatcctatctcagcgggatgctgcctctgcccgcaccctccagctgcgggctgaggaacccccaacccctgccctccccaacccggggcagctgtcccggatccaggacct

SEQ ID NO: 20980 - DNA, 120 bp, Artificial Sequence
  ENSG00000023902_10 (sequence is synthesized)
ggtagcaaggaaactggaggagactcaggagcttctggcagaggttcagggactgggagatgggaagcgaaaggccaaggacccccctcggtctccgccggattctgagtcagagcagct

SEQ ID NO: 20981 - DNA, 120 bp, Artificial Sequence
  ENSG00000023902_11 (sequence is synthesized)
gctgctggagacggaacggctgctgggagaggcatcatcgaattggagccaggcaaagagggtgctgcaggaggtcagggagctgagagacctgtacagacagatggacctgcagacccc

SEQ ID NO: 20982 - DNA, 120 bp, Artificial Sequence
  ENSG00000023902_12 (sequence is synthesized)
ggactcccacctcagacagaccaccccgcacagtcagtaccggaagagcctgatgtgagggcagggtggggtctggaacttgtcgggttggacagactcttatctccgtgttgctggata

SEQ ID NO: 20983 - DNA, 120 bp, Artificial Sequence
  ENSG00000023902_13 (sequence is synthesized)
aagcttttttatttacctcaatcaaaaaaagaaaacaaaaatgaactcattgctcttgctgatgcctgaccccactacaacccttattgccccacctactttccatatgcccctcgtatg

SEQ ID NO: 20984 - DNA, 120 bp, Artificial Sequence
  ENSG00000023902_14 (sequence is synthesized)
cccctcaggtttgaggaagtgaccccgcagcagtagcaggaagtttttacccagccagagagagagaaggcacggtaaagacacagtctgaccactccacacaccgcccgcccccaagac

SEQ ID NO: 20985 - DNA, 120 bp, Artificial Sequence
  ENSG00000023902_15 (sequence is synthesized)
ggcacagggagtccactgctgctcccaaggatacagtgggcttctaagcttagagcgggagggggatgaggatgttttctgttatgtcccaccccaggccttcagtttgagggtgaagtt

SEQ ID NO: 20986 - DNA, 120 bp, Artificial Sequence
  ENSG00000023902_16 (sequence is synthesized)
tcagctgcccaactctagttgtagggatgtggaggccagtgtcacctgtccgtgcacatggaagtgaaatttatcccagccctgaggaggatttgtggaattaaaatctccccagccaga

SEQ ID NO: 20987 - DNA, 120 bp, Artificial Sequence
  ENSG00000023902_17 (sequence is synthesized)
gggtgctgcaggaggtcagggagctgagagacctgtacagacagatggacctgcagaccccggactcccacctcagacagaccaccccgcacaatattaaagccatgacagcaaacagcc

SEQ ID NO: 20988 - DNA, 120 bp, Artificial Sequence
  ENSG00000023902_18 (sequence is synthesized)
cctttctcctaaggttcctgatttgaagtggcaaaacaaggcagtggcatagtctcctgtcctatgtccttggcatgcagcctccacccagctctggctgcagagggccgcactccgctt

SEQ ID NO: 20989 - DNA, 120 bp, Artificial Sequence
  ENSG00000023902_19 (sequence is synthesized)
cgcaattcatgcacagtccagacttatacagcagccggcaaccctaagggcaggatgattccgagacacaccaaatctgtatgttgatgtgttgtcccaaatttatttctccagcctaaa

SEQ ID NO: 20990 - DNA, 120 bp, Artificial Sequence
  ENSG00000023902_20 (sequence is synthesized)
tttccctctctggcacttagagctaagtgtcaacttgacatctttacctgggtatctaacatgcatcttaaatgtactataaatgtaataaatgactaaataatgatcctcagtgaacca

SEQ ID NO: 20991 - DNA, 120 bp, Artificial Sequence
  ENSG00000023902_21 (sequence is synthesized)
tcagggggctcactgtggggagagggaggaacgctggggcagagggaacagctgtgacccactgaagggggaggattgtgcaggccccgtttactcgctcctccaccagctctacttctt

SEQ ID NO: 20992 - DNA, 120 bp, Artificial Sequence
  ENSG00000023902_22 (sequence is synthesized)
taccacccttttaaaagccctgatctctttctaccttctctccaagtctcatctgacacctcctcttccccgcttcatgatgggggagccagccttgggtcagcttaaagagcccccttc

SEQ ID NO: 20993 - DNA, 120 bp, Artificial Sequence
  ENSG00000023902_23 (sequence is synthesized)
atggagtgggcacatgttcaggcctcgggatgctgggttgggacagcgagtcgctgaagagcactcatgattcacagtacatctcttcaggtcaccgttgaggaggacagctatcttgcc

SEQ ID NO: 20994 - DNA, 120 bp, Artificial Sequence
  ENSG00000023902_24 (sequence is synthesized)
ctggcagtgagtccagaagagaaggaatcgtggatcaatgccctcaactctgccatcacccgagccaagaaccgtatcttggatgagtacatctcttcaggtcaccgttgaggaggacag

SEQ ID NO: 20995 - DNA, 120 bp, Artificial Sequence
  ENSG00000023902_25 (sequence is synthesized)
aaggataatggtttggagacagagttctattcctgccagcattgacactgtgtctgaaaagccagcatcgacactgtgtctgcaaatccctcagctattctgagtctccgttttctccct

SEQ ID NO: 20996 - DNA, 120 bp, Artificial Sequence
  ENSG00000023902_26 (sequence is synthesized)
gtgagatggagatcataaaatccgcctcatccttaggattattctcctgaagctacaataaggcctgaggcattgtacgctggaagaaacgtgtattaatagcaacttctgtcccacccc

SEQ ID NO: 20997 - DNA, 120 bp, Artificial Sequence
  ENSG00000023902_27 (sequence is synthesized)
atcccccaacacgtcgatcccctccggagcataaaactttcccccagcatctgacctgcccaggccaccctagcacctaggagcgtgaattcctgatgcgggttgtgggtggcgcgccct

SEQ ID NO: 20998 - DNA, 120 bp, Artificial Sequence
  ENSG00000023902_28 (sequence is synthesized)
cccggttcccgctctcgtttttgtttttggtcgggtaaggcgatgctgtagaggctggcgatctccagtcttcacgaatccgcacgtctctccattatccaccgcgcccgcccactgggc

SEQ ID NO: 20999 - DNA, 120 bp, Artificial Sequence
  ENSG00000023902_29 (sequence is synthesized)
ggccggcggccgggtctctcgggctccgcgtgtcgcccgagccgccgccggagcgagggtccctgccccctggggagcggtctccagccgcttcgaagccgccttcttccccctccggac

SEQ ID NO: 21000 - DNA, 120 bp, Artificial Sequence
  ENSG00000023902_30 (sequence is synthesized)
gaggcatagtgggactctggaaatggcagcctggctaaggagagtgaagagaaggggtttaaacagaaacacaccttaacattcaagacttggagctgccctagcgtcctcctcgatgtg

SEQ ID NO: 21001 - DNA, 120 bp, Artificial Sequence
  ENSG00000023902_31 (sequence is synthesized)
aggaccttgtaggctttgggcagacggccctctcctctcctggcgtgcctccctctcctcaggcttcctctgtttcccaagatgatctaaactaacagtctgggtggaggggctaaataa

SEQ ID NO: 21002 - DNA, 120 bp, Artificial Sequence
  ENSG00000023902_32 (sequence is synthesized)
gggcctggagggaacctgggagcctctccgcgcccggccggcgcccctgccacttgcagccccggttgtttattcgggagcgggggaggggagcggggggagttcctcggagtgaaaacc

SEQ ID NO: 21003 - DNA, 120 bp, Artificial Sequence
  ENSG00000023902_33 (sequence is synthesized)
tttccgaagtgggagcgaacctggggcggccccccgccccccggccgcagccttcggaggagactgggccgccgaggcggtcgtgagagacggacggagaggaagcgccggctggaatct

SEQ ID NO: 21004 - DNA, 120 bp, Artificial Sequence
  ENSG00000023902_34 (sequence is synthesized)
agaacttcctacacatcaaagagaaaaacataatagtgaaagggtaagaggaataagacatccattgcttgtttgtatttgcccaaagagcagagtctgggggcaaaagcgtagttgatc

SEQ ID NO: 21005 - DNA, 120 bp, Artificial Sequence
  ENSG00000023902_35 (sequence is synthesized)
cttgcttttaggtacagagacagaggaaaggatggaatgacctcagcctaggatatctggtgtcctatgagtcaggaccatctgactggtcatggagccagctgtctcctgctgggaagg

SEQ ID NO: 21006 - DNA, 120 bp, Artificial Sequence
  ENSG00000023902_36 (sequence is synthesized)
ctgaccaagatttttttttttaaggcagagtataatctatatcatttactgttaatgcaagaaaatttctaaccctatctcccagaattttcaccagtctcttttgttatttcctctctt

SEQ ID NO: 21007 - DNA, 120 bp, Artificial Sequence
  ENSG00000023902_37 (sequence is synthesized)
aaaggcagggtctcccacaaccacctctgccgtagaatttcttctgtgttcgatagtaatcattttcttccttctcaaagggcatcctctctcaaagagggctggagcaccttatgatca

SEQ ID NO: 21008 - DNA, 120 bp, Artificial Sequence
  ENSG00000023902_38 (sequence is synthesized)
caggctgatgtgtaagaacagaagctagaccttaggaagacctcatggtggaggaaattggattcggggcaactctttggacaggcgtgggaaaaatccctttctatagtcaaggacgaa

SEQ ID NO: 21009 - DNA, 120 bp, Artificial Sequence
  ENSG00000023902_39 (sequence is synthesized)
gaatcaggggaaaggaagggttaatttggaagatgggtagttataaatgagactctgggaattagatatgtggggaaaaaaaaaacaatatggtggagaacaaggctgcttggctttgtc

SEQ ID NO: 21010 - DNA, 120 bp, Artificial Sequence
  ENSG00000023902_40 (sequence is synthesized)
catcttcccaggcactggaatatacttgtcctactgcttgcctcaccccatctcccaccctctccaccaagggctaacctctatcagtgtctcctgctccccagagctcctaatcagtct

SEQ ID NO: 21011 - DNA, 120 bp, Artificial Sequence
  ENSG00000023902_41 (sequence is synthesized)
gtatgcaaggtagaataactccctttccttcccttcccctaaggaaaacatagtaagttaactctcttcccctggctacattcacacacccaacactttcctctccacggtttctgggct

SEQ ID NO: 21012 - DNA, 120 bp, Artificial Sequence
  ENSG00000023902_42 (sequence is synthesized)
ctgctgatagtctcagctctggagaaggagggggagaggagggatgatgcatcatcttgtatccctgtcccgtgtttctgggaattgctcttggacaccccttgccagcaccttgtccta

SEQ ID NO: 21013 - DNA, 120 bp, Artificial Sequence
  ENSG00000023902_43 (sequence is synthesized)
cttccacccgtaatcattcaaggcctctggccactttccagcccaaagccagggaaccctggaaagtgggaggccctggaggagccaagccttgctgaaacaaatggaggtagatgtatg

SEQ ID NO: 21014 - DNA, 120 bp, Artificial Sequence
  ENSG00000023902_44 (sequence is synthesized)
aggcgtcactcacctgaatggggccatgttgacatctgtcctcatctgtcatcagcctccaggtccagcagcagttcagaaggatgggcagatacaagactgtagatggtctgggtaatg

SEQ ID NO: 21015 - DNA, 120 bp, Artificial Sequence
  ENSG00000023902_45 (sequence is synthesized)
gaagggagaaccacttccccacttccaggtttccaggaaccaggaggatagatgagttcacctccatgcacacgagtcctatttcagaacttgggaagttggggactgttttggaaaata

SEQ ID NO: 21016 - DNA, 120 bp, Artificial Sequence
  ENSG00000023902_46 (sequence is synthesized)
atttcagtcagggtgggtagatgtcatccaaggaagacgtgaggctacttttatctgtttgtttagttttaatgagacaagtgctggtgcttttaattctcattccaggaaaacgtgacc

SEQ ID NO: 21017 - DNA, 120 bp, Artificial Sequence
  ENSG00000023902_47 (sequence is synthesized)
aggtttttcctgaggtgttccaaccctgggctcaagccacggagggtggacagactgcacggtctggacttgtaactaagtctcctctctgtaactttggtccttgctagccaaaacaaa

SEQ ID NO: 21018 - DNA, 120 bp, Artificial Sequence
  ENSG00000023902_48 (sequence is synthesized)
tccataagccactgcttcagagtcccagagttgtaggaacaccaccttaggggaaaagagaaaacattgtggtcagtttcagatgaacctgcgaagaaatgttcctagagctgctttgca

SEQ ID NO: 21019 - DNA, 120 bp, Artificial Sequence
  ENSG00000023902_49 (sequence is synthesized)
gtgctcagaaaaggctagttggggttggagaatgtcactaggaatgcggcctcgatgagacgttcagcaggagtgctaagagctaaatgttgcttaaaacctgctaaaggtggaaccaga

SEQ ID NO: 21020 - DNA, 120 bp, Artificial Sequence
  ENSG00000023902_50 (sequence is synthesized)
gtgcgggacggagactatagcagggagggctaagtttagataggaggaagagcttcctggcagtaaagggggcccaggcactcaaactggaataatggcaagaagtcacagaagtcactt

SEQ ID NO: 21021 - DNA, 120 bp, Artificial Sequence
  ENSG00000023902_51 (sequence is synthesized)
tctcccagggagagtctaagtgcattcttgcctagagatagggggtctggaggagttagtttggattgtcacagtaccttagagggaggaggaaagggtaggaactgtaattgtagtttt

SEQ ID NO: 21022 - DNA, 120 bp, Artificial Sequence
  ENSG00000023902_52 (sequence is synthesized)
cagcttctctggacaaattcagcaaactgaacacggggctgccgtcctgtggtggcgatgctcctgaaatgaacaaggaagatgagtctctataattgtacataccagagaaggaagcga

SEQ ID NO: 21023 - DNA, 120 bp, Artificial Sequence
  ENSG00000023902_53 (sequence is synthesized)
ggtggggtgggagagctatactgcacacatgtgagtggggaggccagagaccgcccctcgttccctccagacaccccgataactggccctgccttgatcttctttctgtggaccatcaag

SEQ ID NO: 21024 - DNA, 120 bp, Artificial Sequence
  ENSG00000023902_54 (sequence is synthesized)
ggccatacaggtctgtcttactgagggcaatggatcaaccatctaccatgtccctttaaggacgtgagcctttttagaacatgtaagctgtgtccttaaggaaaagagtggggcggttgg

SEQ ID NO: 21025 - DNA, 120 bp, Artificial Sequence
  ENSG00000023909_0 (sequence is synthesized)
agtttggaatcagctctcccgctgcggccgcagtagccggagccggagccgcagccaccggtgccttcctttcccgccgccgcccagccgccgtccggcctccctcgggcccgagcgcag

SEQ ID NO: 21026 - DNA, 80 bp, Artificial Sequence
  ENSG00000023909_1 (sequence is synthesized)
accaggctccagccgcgcggcgccggcagcctcgcgctccctctcgggtctctctcgggcctcgggcaccgcgtcctgtg

SEQ ID NO: 21027 - DNA, 120 bp, Artificial Sequence
  ENSG00000023909_2 (sequence is synthesized)
cccctgggcggccgctgccatgggcaccgacagccgcgcggccaaggcgctcctggcgcgggcccgcaccctgcacctgcagacggggaacctgctgaactggggccgcctgcggaagaa

SEQ ID NO: 21028 - DNA, 120 bp, Artificial Sequence
  ENSG00000023909_3 (sequence is synthesized)
cggaagaagtgcccgtccacgcacagcgaggagcttcatgattgtatccaaaaaaccttgaatgaatggagttcccaaatcaacccagatttggtcagggagtttccagatgtcttggaa

SEQ ID NO: 21029 - DNA, 120 bp, Artificial Sequence
  ENSG00000023909_4 (sequence is synthesized)
tgcactgtatctcatgcagtagaaaagataaatcctgatgaaagagaagaaatgaaagtttctgcaaaactgttcattgtagaatcaaactcttcatcatcaactagaagtgcagttgac

SEQ ID NO: 21030 - DNA, 120 bp, Artificial Sequence
  ENSG00000023909_5 (sequence is synthesized)
atggcctgttcagtccttggagttgcacagctggattctgtgatcattgcttcacctcctattgaagatggagttaatctttccttggagcatttacagccttactgggaggaattagaa

SEQ ID NO: 21031 - DNA, 120 bp, Artificial Sequence
  ENSG00000023909_6 (sequence is synthesized)
aacttagttcagagcaaaaagattgttgccataggtacctctgatctagacaaaacacagttggaacagctgtatcagtgggcacaggtaaaaccaaatagtaaccaagttaatcttgcc

SEQ ID NO: 21032 - DNA, 120 bp, Artificial Sequence
  ENSG00000023909_7 (sequence is synthesized)
tcctgctgtgtgatgccaccagatttgactgcatttgctaaacaatttgacatacagctgttgactcacaatgatccaaaagaactgctttctgaagcaagtttccaagaagctcttcag

SEQ ID NO: 21033 - DNA, 120 bp, Artificial Sequence
  ENSG00000023909_8 (sequence is synthesized)
gaaagcattcctgacattcaagcgcacgagtgggtgccgctgtggctactgcggtattcggtcattgtgaaaagtagaggaattatcaaatcaaaaggctacattttacaagctaaaaga

SEQ ID NO: 21034 - DNA, 120 bp, Artificial Sequence
  ENSG00000023909_9 (sequence is synthesized)
aggggttcttaactgacttaggagcataacttacctgtaatttccttcaatatgagagaaaattgagatgtgtaaaaatctagttactgcctgtaaatggtgtcattgaggcagatattc

SEQ ID NO: 21035 - DNA, 120 bp, Artificial Sequence
  ENSG00000023909_10 (sequence is synthesized)
tttcgtcatatttgacagtatgttgtctgtcaagttttaaatacttatcttgcctccatatcaatccattctcatgaacctctgtattgctttccttaaactattgttttctaattgaaa

SEQ ID NO: 21036 - DNA, 120 bp, Artificial Sequence
  ENSG00000023909_11 (sequence is synthesized)
ttgtctataaagaaaatacttgcaatatatttttcctttatttttatgactaatataaatcaagaaaatttgttgttagatatattttggcctaggtatcagggtaatgtatatacatat

SEQ ID NO: 21037 - DNA, 120 bp, Artificial Sequence
  ENSG00000023909_12 (sequence is synthesized)
tttttatttccaaaaaaaattcattaattgcttcttaactcttattataaccaagcaatttaattacaattgttaaaactgaaatactggaagaagatatttttcctgtcattgatgaga

SEQ ID NO: 21038 - DNA, 120 bp, Artificial Sequence
  ENSG00000023909_13 (sequence is synthesized)
tatatcagagtaactggagtagctgggatttactagtagtgtaaataaaattcactcttcaatacatgaatggaaacttaaatttttttttatgtgtccttgcttatagtttagctgtaa

SEQ ID NO: 21039 - DNA, 120 bp, Artificial Sequence
  ENSG00000023909_14 (sequence is synthesized)
taatttaaccttgtattcttgtgccatattctgtctttttattacttataaagacaaaccaaagtaaatctgaaaggagactagaagctttgaaattattgtttgggggttttataaaag

SEQ ID NO: 21040 - DNA, 120 bp, Artificial Sequence
  ENSG00000023909_15 (sequence is synthesized)
caactactgtcacctccatccagattcttttaaattattgatccatccatagtatatattgctactcattcaagaatcctcaataagtattgagtatttaccatatgttgggatactgtg

SEQ ID NO: 21041 - DNA, 120 bp, Artificial Sequence
  ENSG00000023909_16 (sequence is synthesized)
ggctctggagagaggagggggcaatagagctaggaattaagaatcagttgagtaaaatgtgtaatatttattccccattaataactgactaggaaggactaaaagccagaaaggggatga

SEQ ID NO: 21042 - DNA, 120 bp, Artificial Sequence
  ENSG00000023909_17 (sequence is synthesized)
aaaaaaaatccttaattcagggccgacattatctacttaaacaactttgagatatggtcttaattattttaaagcagaataatataattgaaagtttatagctaaaagagactatatagg

SEQ ID NO: 21043 - DNA, 120 bp, Artificial Sequence
  ENSG00000023909_18 (sequence is synthesized)
tcatttagtataattcttcattagtttacgaaccacaaaattgcaaataaataagctatgaactttgatgtacactataaatctccttaattctataaatttgtgtctgtaacctgaata

SEQ ID NO: 21044 - DNA, 120 bp, Artificial Sequence
  ENSG00000023909_19 (sequence is synthesized)
aaaaactcttgtatctcaatatttttaaaccacaggcctaaataaaactaattttgctcaagttttctcaacctagggaaaaagaactatggttccatattcaaaataaatattatagac

SEQ ID NO: 21045 - DNA, 120 bp, Artificial Sequence
  ENSG00000023909_20 (sequence is synthesized)
aatattatagacccttttcctaagtaggattttgtggtttactgattgggtaatttgatcattaaaattatgtgaaatctgcccgggcacacctcatgcctgtaatcccagcactctggg

SEQ ID NO: 21046 - DNA, 120 bp, Artificial Sequence
  ENSG00000023909_21 (sequence is synthesized)
agaaaaattatgtgaaatcatgtgatttgcctgggaaaacttgtttagatattgagctacttatgccttctagcctttatattaattgtatgtaatgttattaaatatatatatagttca

SEQ ID NO: 21047 - DNA, 120 bp, Artificial Sequence
  ENSG00000023909_22 (sequence is synthesized)
tctttacatttggaaatgcccaacatttttttcatataagtccttaaacaagcgttcattttattttaaatctatacagtgaactggccaagatattttaagagggaactttaatatccc

SEQ ID NO: 21048 - DNA, 120 bp, Artificial Sequence
  ENSG00000023909_23 (sequence is synthesized)
atttattgtttttataaccctggacttataaaaatgggttgtttgaagggttattttgaaagtgggggaaaaaaaaacttagttgctaatgtatctaaacttcagcagagctttttggtg

SEQ ID NO: 21049 - DNA, 120 bp, Artificial Sequence
  ENSG00000023909_24 (sequence is synthesized)
atctcctacctgcaccctcaactcttgacaaagaagcaagactatagattcattttctgaaggggatcatgtatggaattttttgatgagtttttacttttacctctctactcttgattt

SEQ ID NO: 21050 - DNA, 120 bp, Artificial Sequence
  ENSG00000023909_25 (sequence is synthesized)
tctattattgaatactcttttaaaacactgatttttaaggctttatatatgttttccaggctgatgttcacatctttttttcatgaactatcagaatatagtgaacacttttcaaatatt

SEQ ID NO: 21051 - DNA, 120 bp, Artificial Sequence
  ENSG00000023909_26 (sequence is synthesized)
taaggacttaatgtttaaaaagccataaaatagagagtggtaatactaccaaataattacttaaaactgaaagctaagttatcaatagtttatataagagatgttttctgaggagatgtg

SEQ ID NO: 21052 - DNA, 120 bp, Artificial Sequence
  ENSG00000023909_27 (sequence is synthesized)
catccagtgagaccaaggtagaaagtttatataattgttttttttccagtaaatatgaaaaaaaaagctgtagcttgtttattacatgtccaaaatacagtggagccttactttaacaca

SEQ ID NO: 21053 - DNA, 120 bp, Artificial Sequence
  ENSG00000023909_28 (sequence is synthesized)
atgtactgtaacttggaatttgttctgttatgagtctatcttgaattcccatccatgaaactgtagtcaccaaaagcaacaagtattttcacatgatgtaaaagaccatactatgatggc

SEQ ID NO: 21054 - DNA, 120 bp, Artificial Sequence
  ENSG00000023909_29 (sequence is synthesized)
cattgctagaaattgaatcacaaataatagctaataatttttcatttttcaaaaaagatcatttggatagcagctatgtataaaatggaaaataaaaaattattctattttgcatgaata

SEQ ID NO: 21055 - DNA, 120 bp, Artificial Sequence
  ENSG00000023909_30 (sequence is synthesized)
gttcagactttcccataccacagccaagcagtaactaaaattaggatcttaattttcaatgataaaaggtctaaggttcatttaattatgctcctttaacactgtctttctagatttttc

SEQ ID NO: 21056 - DNA, 120 bp, Artificial Sequence
  ENSG00000023909_31 (sequence is synthesized)
acccagtattttcaaaatttgggaatgtaaacaattgatatatttattgtatgttggctagcagttcatccttctgcaaaatatgcattcagagaaatgtgaagcttgttttaatgaaga

SEQ ID NO: 21057 - DNA, 120 bp, Artificial Sequence
  ENSG00000023909_32 (sequence is synthesized)
cttaaaccatttgtgtcatttgtgttttcatattcaaatacaccaaattaaaattctgaacctatatttttcatcattaacttcctaatataccagaacatatacctttttcatgtaaag

SEQ ID NO: 21058 - DNA, 120 bp, Artificial Sequence
  ENSG00000023909_33 (sequence is synthesized)
ttggcaatgggatatggcagttttatttttgaaaaatatgtaacatgactttaatatttttatagttttcagaattagaaacataggaagggaaaatgttttaattagataagtcaactt

SEQ ID NO: 21059 - DNA, 120 bp, Artificial Sequence
  ENSG00000023909_34 (sequence is synthesized)
aggaagggaaaatgttttaattagataagtcaactttttatgtgtctgtagtggtgtactataatagcaaattataaagcattattaaatgtttataataatttttaatattacctacat

SEQ ID NO: 21060 - DNA, 120 bp, Artificial Sequence
  ENSG00000023909_35 (sequence is synthesized)
tttttaattgggttgtttcaatagctggaagcatcctgaagcattatattgatttttgaactatttgaactcaaactgagtatgatttgaaaataaattaataatttaaaaacatccaaa

SEQ ID NO: 21061 - DNA, 120 bp, Artificial Sequence
  ENSG00000023909_36 (sequence is synthesized)
gcttaaggctggtagcaaaactctcaaacatcctgggtccctcttcctggcacggaggtcacagagggccaggacgtcgctccgtctctctccacatctctcgcttccttcccccaccct

SEQ ID NO: 21062 - DNA, 120 bp, Artificial Sequence
  ENSG00000023909_37 (sequence is synthesized)
gcacctgggctccgcccgcggtcagatgctgaggccagtgtcgacgcgaccttgggtccaaacccgctgccgagggcaacgcgtctaaaaaacttagccggtgcagctgcgcactgagtg

SEQ ID NO: 21063 - DNA, 120 bp, Artificial Sequence
  ENSG00000023909_38 (sequence is synthesized)
gcaaaaatcatgcaggtcaaaaaggaagtaaagtaaacaggaagttaatttcttcagttttgtgagggaagtcaaataggcaattagccataaactctctgtggttgatttgctgagacg

SEQ ID NO: 21064 - DNA, 120 bp, Artificial Sequence
  ENSG00000023909_39 (sequence is synthesized)
gcactctgatccagtaggcttatgcataaaacagaaaatctagaccgtaggcaactctttaaccagacaagatactaggattctcatgcttaattctcaccatggtttcctcactatcag

SEQ ID NO: 21065 - DNA, 120 bp, Artificial Sequence
  ENSG00000024048_0 (sequence is synthesized)
ttctgtgtccttccctgggtcagggacgagccagtgacttgactcttgggcgctaagcttgggagggagcgcaggaggccgctgtccttcctttccggttcacgtcacccttctctccct

SEQ ID NO: 21066 - DNA, 120 bp, Artificial Sequence
  ENSG00000024048_1 (sequence is synthesized)
ctgttgctccacctgcagccacttggacggctccgggactgattgcctggggcaggggtggcagtcgaggccgccggggccgaggtgaggctgcagctctccgggcggcggtagcgctgg

SEQ ID NO: 21067 - DNA, 120 bp, Artificial Sequence
  ENSG00000024048_2 (sequence is synthesized)
ggaggaggaggagagaagatggcgtcggagctagagccagaggtgcaggccatcgaccggagcttgctggaatgttcggccgaggagattgcggggaaatggctgcaagcaactgacctc

SEQ ID NO: 21068 - DNA, 120 bp, Artificial Sequence
  ENSG00000024048_3 (sequence is synthesized)
actagagaagtgtaccagcatttagcccactatgtacccaaaatctactgcaggggtcccaacccttttccacagaaagaagacatgctggcacagcatgttttgttgggaccaatggaa

SEQ ID NO: 21069 - DNA, 120 bp, Artificial Sequence
  ENSG00000024048_4 (sequence is synthesized)
tggtacctttgtggtgaagatcctgcatttggatttccaaaacttgagcaagcaaacaaaccttctcatctttgtggtcgtgtttttaaagtaggagagcctacatattcttgcagagac

SEQ ID NO: 21070 - DNA, 120 bp, Artificial Sequence
  ENSG00000024048_5 (sequence is synthesized)
tgtgcagttgatccaacttgtgttttgtgcatggagtgctttttgggaagtattcacagagatcatcgatataggatgacaacatcaggaggtggaggtttctgtgactgtggtgatact

SEQ ID NO: 21071 - DNA, 120 bp, Artificial Sequence
  ENSG00000024048_6 (sequence is synthesized)
gaagcctggaaagagggtccttactgtcaaaaacatgaacttaacacctctgaaattgaggaagaagaggatcctcttgttcatttatcagaagatgtgatagcaagaacttataacatt

SEQ ID NO: 21072 - DNA, 120 bp, Artificial Sequence
  ENSG00000024048_7 (sequence is synthesized)
tttgctattacgtttcggtatgcagtagaaatattaacctgggaaaaagaaagtgaattgccagcagatttagagatggtagagaagagtgacacctactattgcatgctgtttaatgat

SEQ ID NO: 21073 - DNA, 120 bp, Artificial Sequence
  ENSG00000024048_8 (sequence is synthesized)
gaggttcacacctatgaacaagttatttatactcttcagaaagctgttaactgtacacaaaaagaagctattggttttgcaactacagtagatcgagatgggcgtaggtctgttcgatat

SEQ ID NO: 21074 - DNA, 120 bp, Artificial Sequence
  ENSG00000024048_9 (sequence is synthesized)
ggagattttcagtattgtgagcaagcaaaatcagtaattgtgagaaataccagtagacagacaaagccactcaaagttcaagttatgcattcgtctattgtcgcacatcagaattttggt

SEQ ID NO: 21075 - DNA, 120 bp, Artificial Sequence
  ENSG00000024048_10 (sequence is synthesized)
ttgaaacttttgtcttggctgggaagtattattggatattcagatggccttcgccggattttatgtcaagttggtttacaagaagggccagatggtgaaaactcttctctagtggacaga

SEQ ID NO: 21076 - DNA, 120 bp, Artificial Sequence
  ENSG00000024048_11 (sequence is synthesized)
ctgatgcttagtgattccaaattatggaaaggtgctaggagtgtatatcatcagttgttcatgagcagtctgcttatggatttgaaatacaagaaactatttgctgttcgatttgcaaaa

SEQ ID NO: 21077 - DNA, 120 bp, Artificial Sequence
  ENSG00000024048_12 (sequence is synthesized)
aattaccagcagttgcagagagattttatggaggatgatcacgagcgagcagtgtcggtgactgctctatctgtccagttcttcaccgcacctactctggctcgaatgctcatcacagaa

SEQ ID NO: 21078 - DNA, 120 bp, Artificial Sequence
  ENSG00000024048_13 (sequence is synthesized)
gaaaacttaatgagcattatcattaagacttttatggatcatttgagacatcgagatgcccagggcagatttcagtttgaacgatacactgctttacaagccttcaaatttaggagagta

SEQ ID NO: 21079 - DNA, 120 bp, Artificial Sequence
  ENSG00000024048_14 (sequence is synthesized)
cagagccttattttagatctcaagtatgtgttaattagcaaaccaactgaatggtcagatgagctgaggcagaagttcctagaagggtttgatgcctttttggaattactaaaatgtatg

SEQ ID NO: 21080 - DNA, 120 bp, Artificial Sequence
  ENSG00000024048_15 (sequence is synthesized)
cagggaatggatccaattacacgtcaagtaggacaacatattgaaatggaaccagagtgggaagcagccttcacactacaaatgaaattaacacatgtcatttcaatgatgcaggactgg

SEQ ID NO: 21081 - DNA, 120 bp, Artificial Sequence
  ENSG00000024048_16 (sequence is synthesized)
tgtgcttcagatgaaaaagtgttaatcgaagcttacaagaaatgtctcgctgtactgatgcagtgtcatggtggttatactgatggtgaacagccaatcacactaagcatttgtggacat

SEQ ID NO: 21082 - DNA, 120 bp, Artificial Sequence
  ENSG00000024048_17 (sequence is synthesized)
tcagtggaaactatcagatactgtgtttcccaagaaaaagttagcattcacctcccagtttctcgcttacttgcaggtttacatgtattattaagcaaaagtgaagtggcatataaattt

SEQ ID NO: 21083 - DNA, 120 bp, Artificial Sequence
  ENSG00000024048_18 (sequence is synthesized)
ccagagctcctacctctaagtgaacttagcccacccatgttgatagaacaccctcttagatgtcttgttctgtgtgcccaagtacatgccggaatgtggagaagaaatgggttctctcta

SEQ ID NO: 21084 - DNA, 120 bp, Artificial Sequence
  ENSG00000024048_19 (sequence is synthesized)
gtaaaccagatttattactaccataatgtgaaatgcagacgtgagatgtttgacaaggatgtagtaatgcttcagacaggtgtctccatgatggatccaaatcatttcctgatgatcatg

SEQ ID NO: 21085 - DNA, 120 bp, Artificial Sequence
  ENSG00000024048_20 (sequence is synthesized)
ctcagccgctttgaactttatcagattttcagtactccagactatggaaaaagatttagttctgagattacccataaggatgttgttcagcagaacaatactctaatagaagaaatgcta

SEQ ID NO: 21086 - DNA, 120 bp, Artificial Sequence
  ENSG00000024048_21 (sequence is synthesized)
tacctcattataatgcttgttggagagagatttagtcctggagttggacaggtaaatgctacagatgaaatcaagcgagagattatccatcagttgagtatcaagcctatggctcatagt

SEQ ID NO: 21087 - DNA, 120 bp, Artificial Sequence
  ENSG00000024048_22 (sequence is synthesized)
gaattggtaaagtctttacctgaagatgagaacaaggagactggcatggagagtgtaatcgaagcagttgcccatttcaagaaacctggattaacaggacgaggcatgtatgaactgaaa

SEQ ID NO: 21088 - DNA, 120 bp, Artificial Sequence
  ENSG00000024048_23 (sequence is synthesized)
ccagaatgtgccaaagagttcaacttgtatttctatcacttttcaagggcagaacagtccaaggcagaagaagcgcaacggaaattgaaaagacaaaatagagaagatacagcactccca

SEQ ID NO: 21089 - DNA, 120 bp, Artificial Sequence
  ENSG00000024048_24 (sequence is synthesized)
cctccggtgttgcctccattctgccctctgtttgcaagcctggttaacattttgcagtcagatgtcatgttgtgcatcatgggaacaattctgcaatgggctgtggaacataatggatat

SEQ ID NO: 21090 - DNA, 120 bp, Artificial Sequence
  ENSG00000024048_25 (sequence is synthesized)
gcctggtcagagtccatgctgcaaagggtgttacatttaattggcatggcactacaagaagaaaaacaacatttagagaatgtcacggaagagcatgtagtaacatttaccttcactcag

SEQ ID NO: 21091 - DNA, 120 bp, Artificial Sequence
  ENSG00000024048_26 (sequence is synthesized)
aagatatcaaaacctggtgaagcgccaaaaaattctcctagcatactagctatgctggaaacactacaaaatgctccctacctagaagtccacaaagacatgattcggtggatattgaag

SEQ ID NO: 21092 - DNA, 120 bp, Artificial Sequence
  ENSG00000024048_27 (sequence is synthesized)
acttttaatgctgttaaaaagatgagggagagttcacctaccagtcccgtggcagagacagaaggaaccataatggaagagagttcaagggacaaagacaaagctgagaggaagagaaaa

SEQ ID NO: 21093 - DNA, 120 bp, Artificial Sequence
  ENSG00000024048_28 (sequence is synthesized)
gcagagattgccagactgcgcagagaaaagatcatggctcagatgtctgaaatgcagcggcattttattgatgaaaacaaagaactctttcagcagacattagaactggatgcctcaacc

SEQ ID NO: 21094 - DNA, 120 bp, Artificial Sequence
  ENSG00000024048_29 (sequence is synthesized)
tctgctgttcttgatcatagccctgtggcttcagatatgacacttacagcactgggccccgcacaaactcaggttcctgaacaaagacaattcgttacatgtatattgtgtcaagaggag

SEQ ID NO: 21095 - DNA, 120 bp, Artificial Sequence
  ENSG00000024048_30 (sequence is synthesized)
caagaagttaaagtggaaagcagggcaatggtcttggcagcatttgttcagagatcaactgtattatcaaaaaacagaagtaaatttattcaagatccagaaaaatatgatccattattc

SEQ ID NO: 21096 - DNA, 120 bp, Artificial Sequence
  ENSG00000024048_31 (sequence is synthesized)
atgcaccctgatctgtcttgtggaacacacactagtagctgtgggcacattatgcatgcccattgttggcaaaggtattttgattccgttcaagctaaagaacagcgaaggcaacagaga

SEQ ID NO: 21097 - DNA, 120 bp, Artificial Sequence
  ENSG00000024048_32 (sequence is synthesized)
gaatgcttgagtaatactgttattcctctgctgcttcctccaagaaatatttttaacaacaggttaaatttttcagaccaaccaaatctgactcagtggattagaacaatatctcagcaa

SEQ ID NO: 21098 - DNA, 120 bp, Artificial Sequence
  ENSG00000024048_33 (sequence is synthesized)
ataaaagcattacagtttcttaggaaagaagaaagtactcctaataatgcctctacaaagaattcagaaaatgtggatgaattacagctccctgaagggttcaggcctgattttcgtcct

SEQ ID NO: 21099 - DNA, 120 bp, Artificial Sequence
  ENSG00000024048_34 (sequence is synthesized)
aagatcccttattctgagagcataaaagaaatgctaacgacatttggaactgctacctacaaggtgggactaaaggttcatcccaatgaagaggatcctcgtgttcccataatgtgttgg

SEQ ID NO: 21100 - DNA, 120 bp, Artificial Sequence
  ENSG00000024048_35 (sequence is synthesized)
ggtagctgcgcgtacaccatccaaagcatagaaagaattttgagtgatgaagataaaccattgtttggtcctttaccttgcagactggatgactgtcttaggtcattgacgagatttgcc

SEQ ID NO: 21101 - DNA, 120 bp, Artificial Sequence
  ENSG00000024048_36 (sequence is synthesized)
gcagcacactggacagtggcatcagtttcagtggtgcaaggacatttttgtaaactttttgcatcactggtgcctaatgacagccatgaggaacttccatgcatattagatattgacatg

SEQ ID NO: 21102 - DNA, 120 bp, Artificial Sequence
  ENSG00000024048_37 (sequence is synthesized)
tttcatttattggtgggcttggtgcttgcatttcctgcgttgcagtgtcaggatttttcagggatcagccttggcactggagaccttcacattttccatctggttactatggcacacatc

SEQ ID NO: 21103 - DNA, 120 bp, Artificial Sequence
  ENSG00000024048_38 (sequence is synthesized)
atacagatcttacttacctcatgtacagaagagaatggcatggatcaagaaaatcccccttgtgaagaagaatcagcagttcttgctttgtataaaacacttcaccagtatacgggaagt

SEQ ID NO: 21104 - DNA, 120 bp, Artificial Sequence
  ENSG00000024048_39 (sequence is synthesized)
gccttgaaagaaataccatccggctggcatctgtggaggagtgtcagagctggaatcatgcctttcctgaagtgttctgctttattttttcattacttaaatggagttccttccccaccc

SEQ ID NO: 21105 - DNA, 120 bp, Artificial Sequence
  ENSG00000024048_40 (sequence is synthesized)
gacattcaagttcctggaacaagccattttgaacatttatgtagctatctttccctaccaaacaacctcatttgcctttttcaagaaaatagtgagataatgaattcactgattgaaagt

SEQ ID NO: 21106 - DNA, 120 bp, Artificial Sequence
  ENSG00000024048_41 (sequence is synthesized)
tggtgccgtaacagtgaagttaaaagatatctagaaggtgaaagagatgctataagatatccaagagaatctaacaaattaataaaccttccagaggattacagcagcctcattaatcaa

SEQ ID NO: 21107 - DNA, 120 bp, Artificial Sequence
  ENSG00000024048_42 (sequence is synthesized)
gcatccaatttctcgtgcccgaaatcaggtggtgataagagcagagccccaactctgtgccttgtgtgcggatctctgctgtgctcccagagttactgctgccagactgaactggaaggg

SEQ ID NO: 21108 - DNA, 120 bp, Artificial Sequence
  ENSG00000024048_43 (sequence is synthesized)
gaggatgtaggagcctgcacagctcacacctactcctgtggctctggagtgggcatcttcctgagagtacgggaatgtcaggtgctatttttagctggcaaaaccaaaggctgtttttat

SEQ ID NO: 21109 - DNA, 120 bp, Artificial Sequence
  ENSG00000024048_44 (sequence is synthesized)
tctcctccttaccttgatgactatggggagaccgaccagggactcagacggggaaatcctttacatttatgcaaagagcgattcaagaagattcagaagctctggcaccaacacagtgtc

SEQ ID NO: 21110 - DNA, 120 bp, Artificial Sequence
  ENSG00000024048_45 (sequence is synthesized)
acagaggaaattggacatgcacaggaagccaatcagacactggttggcattgactggcaacatttataattattgcaccaccaaaaaacacaaacttggatttttttaacccagttggct

SEQ ID NO: 21111 - DNA, 120 bp, Artificial Sequence
  ENSG00000024048_46 (sequence is synthesized)
ttttaagaaagaaagaagttctgctgaatttggaaataaattctttatttaaactttccttcccagttttatagtttctggttctgaggactgatgaaaatcatcttccatcagcagatt

SEQ ID NO: 21112 - DNA, 120 bp, Artificial Sequence
  ENSG00000024048_47 (sequence is synthesized)
ttcttgcactgtttgctgtgcccctcaaatataatgtcttgggttttaagatcgagcaaggagcttctcttcctagattggatcccagcccctttgtgggggtctgactgcatagtccca

SEQ ID NO: 21113 - DNA, 120 bp, Artificial Sequence
  ENSG00000024048_48 (sequence is synthesized)
gccattatgtgatatttcacgttattgatgatagtgaaccgtgggtccgaagctgactcaacggaggcagggaacaaagtctctgtggtctgttgggtcatacttcctggttccactgag

SEQ ID NO: 21114 - DNA, 120 bp, Artificial Sequence
  ENSG00000024048_49 (sequence is synthesized)
tggcccaacactgggactgggttggtgtcccctctgctgacaggaccctactcctaggagcaaagtggttgattttgaaggcagtgttcccttctctccattgactatgagagagttggg

SEQ ID NO: 21115 - DNA, 120 bp, Artificial Sequence
  ENSG00000024048_50 (sequence is synthesized)
ggacacacatgcagaagaagcccgtggggagaaggtggattcctggtgtgctggctggtttttcagggctgttagaggttttttttttttctttttttttttatggcaagacttttggct

SEQ ID NO: 21116 - DNA, 120 bp, Artificial Sequence
  ENSG00000024048_51 (sequence is synthesized)
ttgagaaaactcacttagagggctttccaaaaacttaggatggtctaaaaaattaggatattcttttagaattaggaagaaaaattaggatattctaaaagaatatggattaaaaattta

SEQ ID NO: 21117 - DNA, 120 bp, Artificial Sequence
  ENSG00000024048_52 (sequence is synthesized)
ggatattcttttagatatcctaatatctagatgagaggccttccttcataagatctggttgtttgggctgtggttggcataagtgatatttattttggcctctgtcacatccagtttctt

SEQ ID NO: 21118 - DNA, 120 bp, Artificial Sequence
  ENSG00000024048_53 (sequence is synthesized)
gagcttttaaggtaagcttcttttggctttttttcagatgttcaccaagcttaagtttaaaataataggtattctaaaagagtatcctaattttcttatctgtattcttttagaataccc

SEQ ID NO: 21119 - DNA, 120 bp, Artificial Sequence
  ENSG00000024048_54 (sequence is synthesized)
taatgtttcagacagtgatattctcttgttatttctaaggctaaattggcagagtatatcatctaaagccaaacactgaagaaggtgagaacccactcccacccagccagcatttcctgg

SEQ ID NO: 21120 - DNA, 120 bp, Artificial Sequence
  ENSG00000024048_55 (sequence is synthesized)
aacagacaagctgctgcttccttgctggctcacttagtgcattcctgggatggtctggcacccaggctttttattctttttgatcattgttcttactgaggtgccttcctagaacaagag

SEQ ID NO: 21121 - DNA, 120 bp, Artificial Sequence
  ENSG00000024048_56 (sequence is synthesized)
ccacttacaaaatagcttataattattatgtaccacacaactactattgtttgatgtatgactgctgagagcttgaatacatgcagagagtgactgaagacttagtagaggaataaattc

SEQ ID NO: 21122 - DNA, 120 bp, Artificial Sequence
  ENSG00000024048_57 (sequence is synthesized)
tgagcctgtctaaggtggggctaaggaacagatgagtaataagaggctcttggatttttttaaccaatgcaactgaccctttcaatcagttttctttgaattacatctacaagttttgtt

SEQ ID NO: 21123 - DNA, 120 bp, Artificial Sequence
  ENSG00000024048_58 (sequence is synthesized)
ccactcagctaccagtcaactaggcatgctccacagtatcacaggaagaaggtcagaaatctggaactgaagctaaaagaagtgaggatgtagaagccacattcctctccaaggtagtgt

SEQ ID NO: 21124 - DNA, 120 bp, Artificial Sequence
  ENSG00000024048_59 (sequence is synthesized)
gtgaaagaaccgccccctcttgacaggaggatgaccgtcgccattcttgcgtgggactgactcacccagctgagaggaggaccaatagaaagaaaattcacatttgagtccacctctctc

SEQ ID NO: 21125 - DNA, 120 bp, Artificial Sequence
  ENSG00000024048_60 (sequence is synthesized)
cccctttttctggccttcattcataagatctggttgtttgggctgtaggtggcataattcatgtttattttggcctctgtcacatccagtttctttagcttttaaggtaagcttcttttg

SEQ ID NO: 21126 - DNA, 120 bp, Artificial Sequence
  ENSG00000024048_61 (sequence is synthesized)
gctttttttcatatgttcaccaagctaaaatttaaaataataagaccaggtttctctctgtacaagtggattataaacattttcaccaaatcataacaatactccagctttccggtccga

SEQ ID NO: 21127 - DNA, 120 bp, Artificial Sequence
  ENSG00000024048_62 (sequence is synthesized)
cttcctaggagcctggagttagcaaaggttgtctctggatttcattctctgagaatatcacagagcctgggagaagatgaatttacatgaaattgcaacatacacacctttttattttct

SEQ ID NO: 21128 - DNA, 120 bp, Artificial Sequence
  ENSG00000024048_63 (sequence is synthesized)
ggtgttaagctagttgtctttcctaccttacaaatcatgttagttttatgatttgttccgcatgttttatgtttattgtagaaatgtttatataacatacgctttccatatcagggaaaa

SEQ ID NO: 21129 - DNA, 120 bp, Artificial Sequence
  ENSG00000024048_64 (sequence is synthesized)
tcatatctgtttaataaattggctataactttaatatctgtggacaacttgtaaaatttggaatgtatcatatgtaaaaagtttaaagatatccaaataaatgctttaggtgttggcatt

SEQ ID NO: 21130 - DNA, 120 bp, Artificial Sequence
  ENSG00000024048_65 (sequence is synthesized)
aactatgagcgtttgcagagtgattatgtgacagatgaccacgacagagagttttcagtcgcagacctctcggttcagatattcacggttccttcacttgctcgaatgctcatcacagaa

SEQ ID NO: 21131 - DNA, 66 bp, Artificial Sequence
  ENSG00000024048_66 (sequence is synthesized)
ctatctctgctgggcgcagtggctcacctctgtaatcctagccaaggcaggtggatcacctgagct

SEQ ID NO: 21132 - DNA, 66 bp, Artificial Sequence
  ENSG00000024048_67 (sequence is synthesized)
gtatccaaaaaaaaaaagttcttgctctgtcactcaggctggagtgaggtggcacgatcacagctc

SEQ ID NO: 21133 - DNA, 120 bp, Artificial Sequence
  ENSG00000024048_68 (sequence is synthesized)
atccaaaaaaaaaaagttcttgctctgtcactcaggctggagtgaggtggcacgatcacagctcactgcagctttgaccacctgggcttaggcaatcctcctgtctcagcctcccaagta

SEQ ID NO: 21134 - DNA, 120 bp, Artificial Sequence
  ENSG00000024048_69 (sequence is synthesized)
cacacccagctagtcttaacatttttaaattaagcttatatggtttatatttttgatgctgtagtaaactttttatatttttgatgctgtagtaaactttttatatttttaaacaggcta

SEQ ID NO: 21135 - DNA, 120 bp, Artificial Sequence
  ENSG00000024048_70 (sequence is synthesized)
tggtagtatttaggaaaactactgatttttatatgtccatcttatatctgtctggtctatctggatatgtatgtattcagattaaataggttctaccagactcttttccataatggttaa

SEQ ID NO: 21136 - DNA, 120 bp, Artificial Sequence
  ENSG00000024048_71 (sequence is synthesized)
accaattcatgcttctgttaataacgtatgaaagtgatagttgctccacatcctcaccaacacttggttttaccagtcttttaagattttatctattctagtgggacatagtggtttctc

SEQ ID NO: 21137 - DNA, 120 bp, Artificial Sequence
  ENSG00000024048_72 (sequence is synthesized)
attatggttttaatttgcattcttctgatgatgatgaagctgaattcctttttatatgtttattggcatttggatatactcctttgtgaatccctgttaaagttgtcctttgattatcta

SEQ ID NO: 21138 - DNA, 120 bp, Artificial Sequence
  ENSG00000024422_0 (sequence is synthesized)
acgggaccgcgagcacaggccgctccgcgggcgcttcggatcctcgcgggaccccaccctctcccagcctgcccagcccgctgcagccgccagcgcgccccgtcggcagctctccatctg

SEQ ID NO: 21139 - DNA, 120 bp, Artificial Sequence
  ENSG00000024422_1 (sequence is synthesized)
gctctccatctgcacgtctctccgtgaaccccgtgagcggtgtgcagccaccatgttcagctggctgaagcggggcggggcacggggccagcagcccgaggccatccgcacggtgacctc

SEQ ID NO: 21140 - DNA, 120 bp, Artificial Sequence
  ENSG00000024422_2 (sequence is synthesized)
ggccctcaaggagctgtaccgcacgaagctgctgccgctggaggagcactaccgctttggggccttccactcgccggccctggaggacgcagacttcgacggcaagcccatggtgctggt

SEQ ID NO: 21141 - DNA, 120 bp, Artificial Sequence
  ENSG00000024422_3 (sequence is synthesized)
ggccggccagtacagcacgggcaagaccagcttcatccagtacctgctggagcaggaggtgcccggctcccgcgtggggcctgagcccaccaccgactgctttgtggccgtcatgcacgg

SEQ ID NO: 21142 - DNA, 120 bp, Artificial Sequence
  ENSG00000024422_4 (sequence is synthesized)
ggacactgagggcaccgtgcccggcaacgccctcgtcgtggacccggacaagcccttccgcaaactcaaccctttcggaaacaccttcctcaacaggttcatgtgtgcccagctccctaa

SEQ ID NO: 21143 - DNA, 120 bp, Artificial Sequence
  ENSG00000024422_5 (sequence is synthesized)
tcaggtcctggagagcatcagcatcatcgacaccccgggtatcctgtcgggtgccaagcagagagtgagccgcggctacgacttcccggccgtgctgcgctggttcgcggagcgcgtgga

SEQ ID NO: 21144 - DNA, 120 bp, Artificial Sequence
  ENSG00000024422_6 (sequence is synthesized)
cctcatcatcctgctctttgatgcgcacaagctggagatctcggacgagttctcagaggccatcggcgcgttgcggggccatgaggacaagatccgcgtggtgctcaacaaggccgacat

SEQ ID NO: 21145 - DNA, 120 bp, Artificial Sequence
  ENSG00000024422_7 (sequence is synthesized)
ggtggagacgcagcagctgatgcgcgtctacggcgcgctcatgtgggcgctgggcaaggtggtgggcacgcccgaggtgctgcgcgtctacatcggctccttctggtcccagcccctcct

SEQ ID NO: 21146 - DNA, 120 bp, Artificial Sequence
  ENSG00000024422_8 (sequence is synthesized)
cgtgcccgacaaccggcgcctcttcgagctggaggagcaggacctcttccgcgacatccagggcctgccccggcacgcagccttgcgcaagctcaacgacctggtgaagagggcccggct

SEQ ID NO: 21147 - DNA, 120 bp, Artificial Sequence
  ENSG00000024422_9 (sequence is synthesized)
ggtgcgagttcacgcttacatcatcagctacctgaagaaggagatgccctctgtgtttgggaaggagaacaagaagaagcagctgatcctcaaactgcccgtcatctttgcgaagattca

SEQ ID NO: 21148 - DNA, 120 bp, Artificial Sequence
  ENSG00000024422_10 (sequence is synthesized)
gctggaacatcacatctcccctggggactttcctgattgccagaaaatgcaggagctgctgatggcgcacgacttcaccaagtttcactcgctgaagccgaagctgctagaggcactgga

SEQ ID NO: 21149 - DNA, 120 bp, Artificial Sequence
  ENSG00000024422_11 (sequence is synthesized)
cgagatgctgacgcacgacatcgccaagctcatgcccctgctgcggcaggaggagctggagagcaccgaggtgggcgtgcaggggggcgcttttgagggcacccacatgggcccgtttgt

SEQ ID NO: 21150 - DNA, 120 bp, Artificial Sequence
  ENSG00000024422_12 (sequence is synthesized)
ggagcggggacctgacgaggccatggaggacggcgaggagggctcggacgacgaggccgagtgggtggtgaccaaggacaagtccaaatacgacgagatcttctacaacctggcgcctgc

SEQ ID NO: 21151 - DNA, 120 bp, Artificial Sequence
  ENSG00000024422_13 (sequence is synthesized)
cgacggcaagctgagcggctccaaggccaagacctggatggtggggaccaagctccccaactcagtgctggggcgcatctggaagctcagcgatgtggaccgcgacggcatgctggatga

SEQ ID NO: 21152 - DNA, 120 bp, Artificial Sequence
  ENSG00000024422_14 (sequence is synthesized)
tcatcgaggccaagctggaaggccacgggctgcccgccaacctgccccgtcgcctggtgccaccctccaagcgacgccacaagggctccgccgagtgagccggcccccctcccatggccc

SEQ ID NO: 21153 - DNA, 120 bp, Artificial Sequence
  ENSG00000024422_15 (sequence is synthesized)
tgctgtggctccccagctccagtcggctgcacgcacacccctgctccggctcacacacgccctgcctgccctccctgcccagctgtaaggaccgggggtctccctcctcactaccgccag

SEQ ID NO: 21154 - DNA, 120 bp, Artificial Sequence
  ENSG00000024422_16 (sequence is synthesized)
acaccccggtggaagcatttagaggggaccacgggagggacaaggcttctctgtccgcccttcacacctccagcctcacgttcacttaggcacatcacacacacactggcacacgcaggc

SEQ ID NO: 21155 - DNA, 120 bp, Artificial Sequence
  ENSG00000024422_17 (sequence is synthesized)
atccatccatccgtcattcattcaaatatttattgagcacctactatgtgcccagccctgttctaggcactgggcattaccatagagaacaaaatagacaaatacatctgccctcatgga

SEQ ID NO: 21156 - DNA, 120 bp, Artificial Sequence
  ENSG00000024422_18 (sequence is synthesized)
aggtgacgttcccaggagagggcacctacacagtcacgcaaacacacactaattcctggcagggcccccagcccctcccctggctgagcagccctgtggctgaaatgactagcagataaa

SEQ ID NO: 21157 - DNA, 120 bp, Artificial Sequence
  ENSG00000024422_19 (sequence is synthesized)
cagacccccttctgctccgcttcctcctgcccagccaggcaacaccctcaaccggctccatcacatcctcaggtctcgggaccatggggggctcagaggggagacacacctactgcttcc

SEQ ID NO: 21158 - DNA, 120 bp, Artificial Sequence
  ENSG00000024422_20 (sequence is synthesized)
tcagatgggcccctccgcagccccttcccttgctcggggaaagcccccaattctgcccacacccatttatttccttccttccttccttcttttctttccttccttccttcttttttgttt

SEQ ID NO: 21159 - DNA, 120 bp, Artificial Sequence
  ENSG00000024422_21 (sequence is synthesized)
ttgcccccaattctgcccatacccatttctttctttccttccttccttcttttttgtttttgcccccagttctgtccacaccccttccctttcctgtcctgtcctttctttcttttttga

SEQ ID NO: 21160 - DNA, 120 bp, Artificial Sequence
  ENSG00000024422_22 (sequence is synthesized)
attacaggcatgagccaccgtgcccggcttcacacccatttctttaaaaaggatcccgtagcaggcagaaaagccccttccatcctgctcctctgatactgtgcccccttggagatattt

SEQ ID NO: 21161 - DNA, 120 bp, Artificial Sequence
  ENSG00000024422_23 (sequence is synthesized)
agatatttccgtcctccacccacgtgtctgtggctggaactgcccagcctgctcctggccccctggaagcctccccacagctggtaatctggacttaaggattgctgggccaccgcctct

SEQ ID NO: 21162 - DNA, 120 bp, Artificial Sequence
  ENSG00000024422_24 (sequence is synthesized)
ctgcctaccaccattccatatttaagtggagcccctacgtagaaaggccccggggctttattttagtctccttttcagggatgtcgtgggcgggggagggggttcttggtgctacagccc

SEQ ID NO: 21163 - DNA, 120 bp, Artificial Sequence
  ENSG00000024422_25 (sequence is synthesized)
tctccccacccctaaagggacgccgacgctgtttgctgccttcaccacatattagtgcttgaccctggcaggggaccccatggaaaagatggggaagagcaaaatacatggagacgacgc

SEQ ID NO: 21164 - DNA, 120 bp, Artificial Sequence
  ENSG00000024422_26 (sequence is synthesized)
accctccaggatgctcgctgggattcccacgcccaccactgtcccccaccccatggctgggaggggcctctgaacggaacagtgtccccacagagcgaataaagccaaggcttcttccca

SEQ ID NO: 21165 - DNA, 120 bp, Artificial Sequence
  ENSG00000024422_27 (sequence is synthesized)
ggctccggacgggaccgcgagcacaggccgctccgcgggcgcttcggatcctcgcgggaccccaccctctcccagcctgcccagcccgctgcagccgccagcgcgccccgtcggttcatg

SEQ ID NO: 21166 - DNA, 120 bp, Artificial Sequence
  ENSG00000024422_28 (sequence is synthesized)
aagagggcccggctggtgcgagtgagtagtcctgagggctgggcgcgcattcttggaggaggtttcctcggtcctctcctaccagtgctgtgagtccctgacttatcagggcccaggttc

SEQ ID NO: 21167 - DNA, 120 bp, Artificial Sequence
  ENSG00000024526_0 (sequence is synthesized)
agctactggagccccaggacgcagccgagcggccctcgccgactccttcccgagcctggctgtggcgtcacgtgacccgcggcgcggccaatccgcgcagccctctatgctattcaaatc

SEQ ID NO: 21168 - DNA, 120 bp, Artificial Sequence
  ENSG00000024526_1 (sequence is synthesized)
ggcggcggggccaacggttgtgccgagactcgccactgccgcggccgctgggcctgagtgtcgccttcgccgccatggacgccaccgggcgctgacagacctatggagagtcagggtgtg

SEQ ID NO: 21169 - DNA, 120 bp, Artificial Sequence
  ENSG00000024526_2 (sequence is synthesized)
cctcccgggccttatcgggccaccaagctgtggaatgaagttaccacatcttttcgagcaggaatgcctctaagaaaacacagacaacactttaaaaaatatggcaattgtttcacagca

SEQ ID NO: 21170 - DNA, 120 bp, Artificial Sequence
  ENSG00000024526_3 (sequence is synthesized)
ggagaagcagtggattggctttatgacctattaagaaataatagcaattttggtcctgaagttacaaggcaacagactatccaactgttgaggaaatttcttaagaatcatgtaattgaa

SEQ ID NO: 21171 - DNA, 120 bp, Artificial Sequence
  ENSG00000024526_4 (sequence is synthesized)
gatatcaaagggaggtggggatcagaaaatgttgatgataacaaccagctcttcagatttcctgcaacttcgccacttaaaactctaccacgaaggtatccagaattgagaaaaaacaac

SEQ ID NO: 21172 - DNA, 120 bp, Artificial Sequence
  ENSG00000024526_5 (sequence is synthesized)
atagagaacttttccaaagataaagatagcatttttaaattacgaaacttatctcgtagaactcctaaaaggcatggattacatttatctcaggaaaatggcgagaaaataaagcatgaa

SEQ ID NO: 21173 - DNA, 120 bp, Artificial Sequence
  ENSG00000024526_6 (sequence is synthesized)
ataatcaatgaagatcaagaaaatgcaattgataatagagaactaagccaggaagatgttgaagaagtttggagatatgttattctgatctacctgcaaaccattttaggtgtgccatcc

SEQ ID NO: 21174 - DNA, 120 bp, Artificial Sequence
  ENSG00000024526_7 (sequence is synthesized)
ctagaagaagtcataaatccaaaacaagtaattccccaatatataatgtacaacatggccaatacaagtaaacgtggagtagttatactacaaaacaaatcagatgacctccctcactgg

SEQ ID NO: 21175 - DNA, 120 bp, Artificial Sequence
  ENSG00000024526_8 (sequence is synthesized)
gtattatctgccatgaagtgcctagcaaattggccaagaagcaatgatatgaataatccaacttatgttggatttgaacgagatgtattcagaacaatcgcagattattttctagatctc

SEQ ID NO: 21176 - DNA, 120 bp, Artificial Sequence
  ENSG00000024526_9 (sequence is synthesized)
cctgaacctctacttacttttgaatattacgaattatttgtaaacattttgggcttgctgcaacctcatttagagagggttgccatcgatgctctacagttatgttgtttgttacttccc

SEQ ID NO: 21177 - DNA, 120 bp, Artificial Sequence
  ENSG00000024526_10 (sequence is synthesized)
ccaccaaatcgtagaaagcttcaacttttaatgcgtatgatttcccgaatgagtcaaaatgttgatatgcccaaacttcatgatgcaatgggtacgaggtcactgatgatacataccttt

SEQ ID NO: 21178 - DNA, 120 bp, Artificial Sequence
  ENSG00000024526_11 (sequence is synthesized)
tctcgatgtgtgttatgctgtgctgaagaagtggatcttgatgagcttcttgctggaagattagtttctttcttaatggatcatcatcaggaaattcttcaagtaccctcttacttacag

SEQ ID NO: 21179 - DNA, 120 bp, Artificial Sequence
  ENSG00000024526_12 (sequence is synthesized)
actgcagtggaaaaacatcttgactacttaaaaaagggacatattgaaaatcctggagatggactatttgctcctttgccaacttactcatactgtaagcagattagtgctcaggagttt

SEQ ID NO: 21180 - DNA, 120 bp, Artificial Sequence
  ENSG00000024526_13 (sequence is synthesized)
gatgagcaaaaagtttctacctctcaagctgcaattgcagaacttttagaaaatattattaaaaacaggagtttacctctaaaggagaaaagaaaaaaactaaaacagtttcagaaggaa

SEQ ID NO: 21181 - DNA, 120 bp, Artificial Sequence
  ENSG00000024526_14 (sequence is synthesized)
tatcctttgatatatcagaaaagatttccaaccacggagagtgaagcagcactttttggtgacaaacctacaatcaagcaaccaatgctgattttaagaaaaccaaagttccgtagtcta

SEQ ID NO: 21182 - DNA, 120 bp, Artificial Sequence
  ENSG00000024526_15 (sequence is synthesized)
agataactaactgaattaaaaattatgtaatacttgtggaactttgataaatgaagccatatctgagaatgtagctactcaaaaggaagtctgtcattaataaggtatttctaaataaac

SEQ ID NO: 21183 - DNA, 120 bp, Artificial Sequence
  ENSG00000024526_16 (sequence is synthesized)
acattatgtaaggaagtgccaaaatagttatcaatgtgagactcttaggaaactaactagatctcaattgagagcacataacaatagatgataccaaatactttttgtttttaacacagc

SEQ ID NO: 21184 - DNA, 120 bp, Artificial Sequence
  ENSG00000024526_17 (sequence is synthesized)
tatccagtaaggctatcatgatgtgtgctaaaattttatttacttgaattttgaaaactgagctgtgttagggattaaactataattctgttcttaaaagaaaatttatctgcaaatgtg

SEQ ID NO: 21185 - DNA, 120 bp, Artificial Sequence
  ENSG00000024526_18 (sequence is synthesized)
caagttctgagatattagctaatgaattagttgtttggggttacttctttgtttctaagtataagaatgtgaagaatatttgaaaactcaatgaaataattctcagctgccaaatgttgc

SEQ ID NO: 21186 - DNA, 120 bp, Artificial Sequence
  ENSG00000024526_19 (sequence is synthesized)
tttgatctatttatatatatgtatgtgtttttaaaatatgtgtatattttatcagatttggttttgccttaaatattatccccaattgcttcagtcattcatttgttcagtatatatatt

SEQ ID NO: 21187 - DNA, 120 bp, Artificial Sequence
  ENSG00000024526_20 (sequence is synthesized)
ttgaattctagttttcataatctattagaagatggggatataaaagaagtataaggcaatcatatattcattcaaaagatatttatttagcaactgctatgtgcctttcgttgttccaga

SEQ ID NO: 21188 - DNA, 120 bp, Artificial Sequence
  ENSG00000024526_21 (sequence is synthesized)
tatgcagagacaatgataaataaaacatataatctcttccataaggtatttattttttaatcaagggagatacacctatcagatgtttaaaataacaacactacccactgaaatcagggc

SEQ ID NO: 21189 - DNA, 120 bp, Artificial Sequence
  ENSG00000024526_22 (sequence is synthesized)
atatagaatcattcagctaaagagtgacttctatgatgatggaacaggtctctaagctagtggttttcaaactggtacacattagactcacccgaggaattttaaaacagcctatatgcc

SEQ ID NO: 21190 - DNA, 120 bp, Artificial Sequence
  ENSG00000024526_23 (sequence is synthesized)
cagggcctaacttacactaattaaatctgaattttggggatgttgtatagggattagtattttttttaatctaggtgattccaatattcagccaactgtgagaatcaatggcctaaatgc

SEQ ID NO: 21191 - DNA, 120 bp, Artificial Sequence
  ENSG00000024526_24 (sequence is synthesized)
tttttataaacatttttataagtgtcaagataatggcacattgactttattttttcattggaagaaaatgcctgccaagtataaatgactctcatcttaaaacaaggttcttcaggtttc

SEQ ID NO: 21192 - DNA, 120 bp, Artificial Sequence
  ENSG00000024526_25 (sequence is synthesized)
tgcttgattgacttggtacaaacttgaagcaagttgccttctaatttttactccaagattgtttcatatctattccttaagtgtaaagaaatatataatgcatggtttgtaataaaatct

SEQ ID NO: 21193 - DNA, 120 bp, Artificial Sequence
  ENSG00000024526_26 (sequence is synthesized)
taatgtttaatgactgttctcatttctcaatgtaatttcatactgtttctctataaaatgatagtattccatttaacattactgatttttattaaaaacctggacagaaaattataaatt

SEQ ID NO: 21194 - DNA, 120 bp, Artificial Sequence
  ENSG00000024526_27 (sequence is synthesized)
ataaatatgactttatcctggctataaaattattgaaccaaaatgaattctttctaaggcatttgaatactaaaacgtttattgtttatagatatgtaaaatgtggattatgttgcaaat

SEQ ID NO: 21195 - DNA, 120 bp, Artificial Sequence
  ENSG00000024526_28 (sequence is synthesized)
tgagattaaaattatttggggttttgtaacaatataattttgcttttgtattatagacaaatatataaataataaaggcaggcaactttcatttgcactaatgtacatgcaattgagatt

SEQ ID NO: 21196 - DNA, 120 bp, Artificial Sequence
  ENSG00000024526_29 (sequence is synthesized)
acaaaatacatggtacaatgctttaataacaaactctgccagtcaggtttgaatcctactgtgctattaactagctagtaaactcagacaagttacttaacttctctaagccccagtttt

SEQ ID NO: 21197 - DNA, 120 bp, Artificial Sequence
  ENSG00000024526_30 (sequence is synthesized)
gttatctataaaatgaatattataatagtacctctttttaggattgcgaggattaagcaggataatgcatgtaaagtgttagcacagtgtctcacatagaataagcactctataaatatt

SEQ ID NO: 21198 - DNA, 120 bp, Artificial Sequence
  ENSG00000024526_31 (sequence is synthesized)
ttactagaatcacctaggattatagcactagaagagatcttagcaaaaatgtggtcctttctgttgctttggacagacatgaaccaaaacaaaattacggacaattgatgagccttatta

SEQ ID NO: 21199 - DNA, 120 bp, Artificial Sequence
  ENSG00000024526_32 (sequence is synthesized)
actatcttttcattatgagacaaaggttctgattatgcctactggttgaaattttttaatctagtcaagaaggaaaatttgatgaggaaggaaggaatggatatcttcagaagggcttcg

SEQ ID NO: 21200 - DNA, 120 bp, Artificial Sequence
  ENSG00000024526_33 (sequence is synthesized)
cctaagctggaacatggatagattccattctaacataaagatctttaagttcaaatatagatgagttgactggtagatttggtggtagttgctttctcgggatataagaagcaaaatcaa

SEQ ID NO: 21201 - DNA, 120 bp, Artificial Sequence
  ENSG00000024526_34 (sequence is synthesized)
ctgctacaagtaaagaggggatggggaaggtgttgcacatttaaagagagaaagtgtgaaaaagcctaattgtgggaatgcacaggtttcaccagatcagatgatgtctggttattctgt

SEQ ID NO: 21202 - DNA, 120 bp, Artificial Sequence
  ENSG00000024526_35 (sequence is synthesized)
aaattatagttcttatcccagaaattactgcctccaccatccctaatatcttctaattggtatcatataatgacccactcttcttatgttatccaaacagttatgtggcatttagtaatg

SEQ ID NO: 21203 - DNA, 120 bp, Artificial Sequence
  ENSG00000024526_36 (sequence is synthesized)
gaatgtacatggaatttcccactgacttacctttctgtccttgggaagcttaaactctgaatcttctcatctgtaaaatgtgaattaaagtatctacctaactgagttgtgattgtagtg

SEQ ID NO: 21204 - DNA, 120 bp, Artificial Sequence
  ENSG00000024526_37 (sequence is synthesized)
aaagaaaggcaatatatttaaatcttgaatttagcaagcccacgcttgatttttatgtcctttcctcttgccttgtattgagtttaagatctctactgattaaaactcttttgctatcaa

SEQ ID NO: 21205 - DNA, 120 bp, Artificial Sequence
  ENSG00000024526_38 (sequence is synthesized)
tgtaaacattttgggaaatttcaaggattttaggagctccataccagttgtttgtggctacatcacagtttcagatagatccagtgggatacataaaattcaagatgatccacagtcttc

SEQ ID NO: 21206 - DNA, 120 bp, Artificial Sequence
  ENSG00000024526_39 (sequence is synthesized)
ttctcagtctgcttcatagagaaaaaaacaaagaagaatcagattctactgagagactacagataagcaatccaggatttcaagaaagatgtgctaagaaaatgcagctagttaatttaa

SEQ ID NO: 21207 - DNA, 120 bp, Artificial Sequence
  ENSG00000024526_40 (sequence is synthesized)
tatatcaatacaccagtggctgaaattatcatgaaaccaaatgttggacaaggcagcacaagtgtgcaaacagctatggaaagtgaactcggagagtctagtgccacaatcaataaaaga

SEQ ID NO: 21208 - DNA, 120 bp, Artificial Sequence
  ENSG00000024526_41 (sequence is synthesized)
ctctgcaaaagtacaatagaactttcagaaaattctttacttccagcttcttctatgttgactggcacacaaagtaaggctgttgctttcaatgcatgcaatattaactttgagtgttta

SEQ ID NO: 21209 - DNA, 120 bp, Artificial Sequence
  ENSG00000024526_42 (sequence is synthesized)
ctaactctgtgttttgcttacctggcttttcttccttgaagttgcttaattttttttcctccaagaggaattatttaaaaagacttttgtctgtgacataaccaagatttattctgttta

SEQ ID NO: 21210 - DNA, 120 bp, Artificial Sequence
  ENSG00000024526_43 (sequence is synthesized)
cctaaggaacttattttcttttttgcaatttcatttattctgagtcactttatttgtaataagtgaagaattttaatacttagaaataagttgtaaagaaaataatgagaatcttaccat

SEQ ID NO: 21211 - DNA, 120 bp, Artificial Sequence
  ENSG00000024526_44 (sequence is synthesized)
gctttagaggaacgtaatttctagaaatagttaaaagatgaaatactaagatattattttaccttctttatatagctgtatatactggtagtatgaaagcaactagtgtcattgatgatt

SEQ ID NO: 21212 - DNA, 120 bp, Artificial Sequence
  ENSG00000024526_45 (sequence is synthesized)
cctctaacagcaaaccaaggtgctgttctttggaaggaattgtagatgtgccagggaattcaagtaaagaggcatccagtgtctttcatcaatcttttccgaacatagaaggacaaaata

SEQ ID NO: 21213 - DNA, 120 bp, Artificial Sequence
  ENSG00000024526_46 (sequence is synthesized)
ataaactgtttttagagtctaagcccaaacaggaattcctgttgaatcttcattcagaggaaaatattcaaaagccattcagtgctggttttaagagaacctctactttgactgttcaag

SEQ ID NO: 21214 - DNA, 120 bp, Artificial Sequence
  ENSG00000024862_0 (sequence is synthesized)
ggcggagtagcttccggaaagggtactgcatttcccgtttctacctccactgcacccgcttattgcgtcttgctcctgggtcacagagcctaaaacgacacacccaacacgcccgccgga

SEQ ID NO: 21215 - DNA, 120 bp, Artificial Sequence
  ENSG00000024862_1 (sequence is synthesized)
gttacagctaaaggaaggacaggggaagcaatgaaatgccgagggcggagccaagagcgacactgggggagcaggaaaaggcggggcttccgcttggggcatggaggctgtacctcttac

SEQ ID NO: 21216 - DNA, 120 bp, Artificial Sequence
  ENSG00000024862_2 (sequence is synthesized)
gtcacttccgtaaacaaacggagctgcggaggagcgggtcccgggatgtgaccggggctctgcttgtggctgcggcggtggcttctgaggctgtcgggtctttgcgggttgcggaagggg

SEQ ID NO: 21217 - DNA, 120 bp, Artificial Sequence
  ENSG00000024862_3 (sequence is synthesized)
gccccaatacccttcttcttcaggtcttaagaagctggccgtggtgcaataaggaacttaaaacaatggaagagcggaaagtgaagaggaggagtcctaagtcttttagtgcccactgta

SEQ ID NO: 21218 - DNA, 120 bp, Artificial Sequence
  ENSG00000024862_4 (sequence is synthesized)
ctcaggttgtcaatgccaaaaaaaatgccattccagtgagtaaaagcacagggttttcaaatcctgcatcacagtcaacttcacagcgaccaaagttaaaaagagtgatgaaagaaaaga

SEQ ID NO: 21219 - DNA, 120 bp, Artificial Sequence
  ENSG00000024862_5 (sequence is synthesized)
ccaaacctcagggtggagagggcaaaggcgctcagtcaactccgatccagcactccttcctcactgatgtctcagatgttcaggagatggagagagggctgctcagtcttttgaatgatt

SEQ ID NO: 21220 - DNA, 120 bp, Artificial Sequence
  ENSG00000024862_6 (sequence is synthesized)
catgttcggggaatgcaggagaaattagctcgcttgaatttggagctctatggggagttagaggaacttcctgaggataagagaaaaacagccagtgactccaatctggataggcttctg

SEQ ID NO: 21221 - DNA, 120 bp, Artificial Sequence
  ENSG00000024862_7 (sequence is synthesized)
tcagatttagaagaattgaattcttccatacaaaaactccatttggcagatgcacaagatgttccaaatacttctgctagctaaaatgaaatgtagtttgctttcttgtgatttgaagag

SEQ ID NO: 21222 - DNA, 120 bp, Artificial Sequence
  ENSG00000024862_8 (sequence is synthesized)
aagcagcagtctttacttttccagccaaatccagtagcagaatcatcttccacaacaaggaattaaagtaattaaagtgcaagttcaatgatcgttttcacttactgcttttagtaaatg

SEQ ID NO: 21223 - DNA, 120 bp, Artificial Sequence
  ENSG00000024862_9 (sequence is synthesized)
tgactcgctgtaattcaccataactggaggcctaggccttgttgaaggcttcatcaggaaatgtgacgcagagattgtgctgctgtgcttcatattgttgccttatgggattatacttga

SEQ ID NO: 21224 - DNA, 120 bp, Artificial Sequence
  ENSG00000024862_10 (sequence is synthesized)
aatgcattgtgctgatgttcttgacagggcggagggatttctctttcctgagctcaccaaacttattccagtgttgatcgcaagctgttgatgcacaggcgtcttgtggcaagcccagct

SEQ ID NO: 21225 - DNA, 120 bp, Artificial Sequence
  ENSG00000024862_11 (sequence is synthesized)
tcagtttatgttagacaatcagtacacatgctggtgtgttttccaatggccagtgataagaaattaaataagtatttgtgagatttgctattttttaataaagtaattgttttaaattaa

SEQ ID NO: 21226 - DNA, 120 bp, Artificial Sequence
  ENSG00000025039_0 (sequence is synthesized)
agtctctctctctctccctcctccgggaggaactgccgcgctccggctgactcctccgccggcgggcggggcgggggagggggcttcgggcgcgctgggaaccgcgggacccggacctgg

SEQ ID NO: 21227 - DNA, 120 bp, Artificial Sequence
  ENSG00000025039_1 (sequence is synthesized)
gcgccgcccgccgggggacgcgcggcccccgcttccgccgggccccgctgagctctagacaaacctccgcttcagaaataggctgcgggcggccggctaggaggcttggcccccaccccg

SEQ ID NO: 21228 - DNA, 120 bp, Artificial Sequence
  ENSG00000025039_2 (sequence is synthesized)
ggacccccgccgtccccgggccggccggccggtgggcacgatgagccaggtgctggggaagccgcagccgcaggacgaggacgacgcggaggaggaggaggaggaggatgagctggtggg

SEQ ID NO: 21229 - DNA, 120 bp, Artificial Sequence
  ENSG00000025039_3 (sequence is synthesized)
gctagcggactacggagacgggcccgactcctccgacgccgatccggacagcggcacagaggagggagttctggacttcagtgaccccttcagcactgaagtgaagccgagaatcctgct

SEQ ID NO: 21230 - DNA, 120 bp, Artificial Sequence
  ENSG00000025039_4 (sequence is synthesized)
catgggcctgaggagaagcggcaagtcgtctattcagaaagttgtctttcacaaaatgtctcccaacgaaactctgttcttggagagcactaataagatatgccgggaagatgtttccaa

SEQ ID NO: 21231 - DNA, 120 bp, Artificial Sequence
  ENSG00000025039_5 (sequence is synthesized)
cagctcctttgtcaattttcagatttgggacttcccaggacagattgacttttttgaccctacatttgactatgagatgatcttccggggaacaggagcactgatatttgtcattgactc

SEQ ID NO: 21232 - DNA, 120 bp, Artificial Sequence
  ENSG00000025039_6 (sequence is synthesized)
acaggatgattacatggaagccctggccaggctccacctcacggtgaccagggcctacaaagtgaatactgacatcaacttcgaggtgtttattcataaagtggatggtctgtcagatga

SEQ ID NO: 21233 - DNA, 120 bp, Artificial Sequence
  ENSG00000025039_7 (sequence is synthesized)
ccacaaaattgaaacccaaagagatattcaccagagggcaaacgatgaccttgcagatgctggattagaaaaaattcacctcagcttttatctgacaagcatatatgatcattcaatatt

SEQ ID NO: 21234 - DNA, 120 bp, Artificial Sequence
  ENSG00000025039_8 (sequence is synthesized)
tgaagcttttagcaaagttgttcagaaactgattccacaactcccaactctggagaatttgctgaacatctttatctcaaattctggaattgaaaaggcatttctatttgatgtggtcag

SEQ ID NO: 21235 - DNA, 120 bp, Artificial Sequence
  ENSG00000025039_9 (sequence is synthesized)
taaaatttatattgcaactgatagtactccggtggatatgcaaacctatgagctctgctgtgatatgatagatgtggttattgacatctcttgtatttatggtctcaaagaagatggagc

SEQ ID NO: 21236 - DNA, 120 bp, Artificial Sequence
  ENSG00000025039_10 (sequence is synthesized)
aggaaccccctatgacaaggaatccacagccatcataaagcttaataatacaaccgtgctttatttaaaagaggtgacaaagttcctggctctcgtttgctttgtcagagaggaaagctt

SEQ ID NO: 21237 - DNA, 120 bp, Artificial Sequence
  ENSG00000025039_11 (sequence is synthesized)
tgaaagaaaagggctaattgactataattttcattgcttccggaaggccattcatgaagtttttgaggtgagaatgaaagtagtaaaatctcgaaaggttcagaatcggctgcagaagaa

SEQ ID NO: 21238 - DNA, 120 bp, Artificial Sequence
  ENSG00000025039_12 (sequence is synthesized)
aaagagagccacccctaatgggacccctagagtgctgctgtaggtgaggtttcaggaatgtcttttgaaatcagaccttatccatgaggctgctgcgccatgttgcactaaaggaagagg

SEQ ID NO: 21239 - DNA, 120 bp, Artificial Sequence
  ENSG00000025039_13 (sequence is synthesized)
aagaaggagattgggacacataccattgatttgttgttaaaaaaaaaaaattcctgcaaccctcttgatcttctcttttataaataaagtaagcactttgaagcaaaaacttgtatatta

SEQ ID NO: 21240 - DNA, 120 bp, Artificial Sequence
  ENSG00000025039_14 (sequence is synthesized)
acagtgatgtgaaatccattgtcatttcattacacaaatgtaaacttttatggtctgtagtcaaaaaaatcccgtgtgagaactgccaggaattgtacatattttgcactttttcatgtt

SEQ ID NO: 21241 - DNA, 120 bp, Artificial Sequence
  ENSG00000025039_15 (sequence is synthesized)
tctcattgaactgaactttgataaaacgacttttctaagctttttttctgtacttggtgtcaaggacatgcatactgtagtccatatctatatggcaatcagaaattaatcaaaaagtga

SEQ ID NO: 21242 - DNA, 120 bp, Artificial Sequence
  ENSG00000025039_16 (sequence is synthesized)
tgcattggtaatgactttttgtaaatttggaaatctttgctaccaattgttgagaaaaatcatttttcagtggagctggaacagattggagctacaagctccaggagcaataagaactgt

SEQ ID NO: 21243 - DNA, 120 bp, Artificial Sequence
  ENSG00000025039_17 (sequence is synthesized)
cccctatttataatgggtgtaaacagttttgtagaataatgctagcaccagacttacctaaaaatttctatagcagtggctgtgcttccctgctcaacggtttttatgaagctgtttacc

SEQ ID NO: 21244 - DNA, 120 bp, Artificial Sequence
  ENSG00000025039_18 (sequence is synthesized)
tcaacacacatctctataatcactttatacagagaggttatttctttttgttgcattagtattcttttgaaactttgggaccagatttccaaaatggtgccgaacactggagagaagtaa

SEQ ID NO: 21245 - DNA, 120 bp, Artificial Sequence
  ENSG00000025039_19 (sequence is synthesized)
gaatgtcactgaattgtagggtttctggaggcttttctgtacctaccacccagggctaaagtaacatcagaggcctaaagttgttccaaaagtatgtgattggcaactgcagactaaaaa

SEQ ID NO: 21246 - DNA, 120 bp, Artificial Sequence
  ENSG00000025039_20 (sequence is synthesized)
tagatacaattctggacttttggccctgtgcgatggtctggtgtgctgcatttaaaatgcttattcaggaccagttctttattgctccatgaccatagtgaatagaacaaatcgcagaac

SEQ ID NO: 21247 - DNA, 120 bp, Artificial Sequence
  ENSG00000025039_21 (sequence is synthesized)
cccaccatggagctcaatcctgttagtcacttttgtcacctccacatctccttctcactggtgataacatgcctcatgtactccacttgttcccaccttatgattaagccaagctcagcc

SEQ ID NO: 21248 - DNA, 120 bp, Artificial Sequence
  ENSG00000025039_22 (sequence is synthesized)
tgccaccagcatgctctgcaaggctgaagagtcatcctgaagacccctaaaggtcagtgggaaaaggatggctggagagacattacaattagctgtgtaattgtttctgtgaaattattt

SEQ ID NO: 21249 - DNA, 120 bp, Artificial Sequence
  ENSG00000025039_23 (sequence is synthesized)
cacttatgtttactttagactaacaggaaattaagagtcctaaatctacccctatgccaaatcattccaagtagataattttacgtgcatctcaagggttagcaccctaaggcatgcttg

SEQ ID NO: 21250 - DNA, 120 bp, Artificial Sequence
  ENSG00000025039_24 (sequence is synthesized)
tggggcattagaaaatgagatttttttttttttaaagcagagcctcctaagaacatcaaagttggtcctagcaaaatatataaagtccctaaagcaacttatacttgaaacttttttttt

SEQ ID NO: 21251 - DNA, 120 bp, Artificial Sequence
  ENSG00000025039_25 (sequence is synthesized)
ttttttttttagaggggggcctcattctgttgcttgtgctggaatacattggtacaatcatagctcactgttacctcttgggctcaagggatccttccacctcagcctccctagtagcta

SEQ ID NO: 21252 - DNA, 120 bp, Artificial Sequence
  ENSG00000025039_26 (sequence is synthesized)
gaactacaggtgtgcacaaccacgcccggctaattcttaaattttgtttttgtagagacaggatctcactgtgttgcccaagatggtctcaaactcctggccccaagcaatcctcctgcc

SEQ ID NO: 21253 - DNA, 120 bp, Artificial Sequence
  ENSG00000025039_27 (sequence is synthesized)
ttggcctcctcaaatgctgagattacaggcctgagctactgtgcccagcctaaactttcccacttctctctgtggcttctttccaacctctctccttcctctccccaagtcctgtttctt

SEQ ID NO: 21254 - DNA, 120 bp, Artificial Sequence
  ENSG00000025039_28 (sequence is synthesized)
tgaagctggtaactgaatttaagatgatatctggttggtgtttaaggtttgagcctcccaaggttctgtgcattttgaaaggagatttctaaaaataattaaggtgccctaactcctttc

SEQ ID NO: 21255 - DNA, 120 bp, Artificial Sequence
  ENSG00000025039_29 (sequence is synthesized)
ctcatgattcctactccgaaacctggatggttaggagcccagggctccctgatttccagagctatatcctgttggacctttgccaacagacctgacacttaggggttattgttataaatc

SEQ ID NO: 21256 - DNA, 120 bp, Artificial Sequence
  ENSG00000025039_30 (sequence is synthesized)
taattctctaatattttttacatgttgtttcactttgaataagcaaatgaagaatcagttttctaatatgactttatcctcaagctagagacactagcctatttggtaaatcacacatta

SEQ ID NO: 21257 - DNA, 120 bp, Artificial Sequence
  ENSG00000025039_31 (sequence is synthesized)
cttaggtatatttattactataaccaggttggagcttccatgtttaagctgggtatatgatgggtttttgttaaaatgtgccttaaaaagcctattacttcaagagcaaatgattctttg

SEQ ID NO: 21258 - DNA, 120 bp, Artificial Sequence
  ENSG00000025039_32 (sequence is synthesized)
ggggaaaggcaaaaataattctatgacatagggcccaagttcatggtagtaagtgtactctttgattaatcacacgctaatatagattactgcctctaactttgtaagtgtggcaatgac

SEQ ID NO: 21259 - DNA, 120 bp, Artificial Sequence
  ENSG00000025039_33 (sequence is synthesized)
ttcttaattaaagaaagatgcaggagttatgtctaagcgttcagtttttcaaatctgtgttattggaaatgtcttcaagtcattttgcattgtatttttgatatgagaggcagcttattg

SEQ ID NO: 21260 - DNA, 120 bp, Artificial Sequence
  ENSG00000025039_34 (sequence is synthesized)
cgatgtgtatggccatgtttcattctcaaatttaattctataaatacaaatcctaaatacatggctacagcaactgcactggaacatttttgcttggttttagggattgagaacttgcct

SEQ ID NO: 21261 - DNA, 120 bp, Artificial Sequence
  ENSG00000025039_35 (sequence is synthesized)
tgcaggtttccttcctcaaaaggagcagggcagtcctttccctgttgagtcaattagaatttttacatagaggtgagactgtgaattattttggttattttcagtgatgtagattagtgt

SEQ ID NO: 21262 - DNA, 120 bp, Artificial Sequence
  ENSG00000025039_36 (sequence is synthesized)
gaatgaccagggtggaatgtttttgaaggaatataaagcaaaaactggttgacattcacaaactgttcttttgtgaacatattttggacccttaaatatgactaaaatcacagcaatatt

SEQ ID NO: 21263 - DNA, 120 bp, Artificial Sequence
  ENSG00000025039_37 (sequence is synthesized)
gttacatacgggttatatgccaactctgtttgaaatatactctggaaaaacagctgaattgtcttggttattaaagtatggtatgtattcaacttgtacagactggatgtaatttgtaat

SEQ ID NO: 21264 - DNA, 120 bp, Artificial Sequence
  ENSG00000025039_38 (sequence is synthesized)
caggtatagtccatgttttactttaagcagtacatcacttaataaccattgttaagccattgctttcaagaatgttaactgccaatttaaaagcatgtgtcctaggttcatgctttggta

SEQ ID NO: 21265 - DNA, 120 bp, Artificial Sequence
  ENSG00000025039_39 (sequence is synthesized)
aagctctcatttcaagtgtattcatagctaagctttctgggagcagaattgtctctttggtgaaaaggaagtacagcctttcctgtttctgaggttgcttaccatacatgtatgtcactg

SEQ ID NO: 21266 - DNA, 120 bp, Artificial Sequence
  ENSG00000025039_40 (sequence is synthesized)
tttcattggccctgttacatccatttggtaaaatttatttgtcctgattaaccagctctcattttatggaaatgatgataaatctcactacttaaatttaatttatgcttttatttttaa

SEQ ID NO: 21267 - DNA, 120 bp, Artificial Sequence
  ENSG00000025039_41 (sequence is synthesized)
gggaggggaccgcgggcgcgccctgggacctctctcccagaacggtgctgttgaagccagggtcagatgtcgtggctaaaaaaaggcagccggcggcggcgtgactggcagggtcgtcgg

SEQ ID NO: 21268 - DNA, 120 bp, Artificial Sequence
  ENSG00000025156_0 (sequence is synthesized)
gttctcggggagctgctgccgtagctgccgccgccgctaccaccgcgttcgggtgtagaatttggaatccctgcgccgcgttaacaatgaagcagagttcgaacgtgccggctttcctca

SEQ ID NO: 21269 - DNA, 120 bp, Artificial Sequence
  ENSG00000025156_1 (sequence is synthesized)
gcaagctgtggacgcttgtggaggaaacccacactaacgagttcatcacctggagccagaatggccaaagttttctggtcttggatgagcaacgatttgcaaaagaaattcttcccaaat

SEQ ID NO: 21270 - DNA, 120 bp, Artificial Sequence
  ENSG00000025156_2 (sequence is synthesized)
atttcaagcacaataatatggcaagctttgtgaggcaactgaatatgtatggtttccgtaaagtagtacatatcgactctggaattgtaaagcaagaaagagatggtcctgtagaatttc

SEQ ID NO: 21271 - DNA, 120 bp, Artificial Sequence
  ENSG00000025156_3 (sequence is synthesized)
agcatccttacttcaaacaaggacaggatgacttgttggagaacattaaaaggaaggtttcatcttcaaaaccagaagaaaataaaattcgtcaggaagatttaacaaaaattataagta

SEQ ID NO: 21272 - DNA, 120 bp, Artificial Sequence
  ENSG00000025156_4 (sequence is synthesized)
gtgctcagaaggttcagataaaacaggaaactattgagtccaggctttctgaattaaaaagtgagaatgagtccctttggaaggaggtgtcagaattacgagcaaagcatgcacaacagc

SEQ ID NO: 21273 - DNA, 120 bp, Artificial Sequence
  ENSG00000025156_5 (sequence is synthesized)
aacaagttattcgaaagattgtccagtttattgttacattggttcaaaataaccaacttgtgagtttaaaacgtaaaaggcctctacttctaaacactaatggagcccaaaagaagaacc

SEQ ID NO: 21274 - DNA, 120 bp, Artificial Sequence
  ENSG00000025156_6 (sequence is synthesized)
tgtttcagcacatagtcaaagaaccaactgataatcatcatcataaagttccacacagtaggactgaaggtttaaagccaagggagaggatttcagatgacatcattatttatgatgtta

SEQ ID NO: 21275 - DNA, 120 bp, Artificial Sequence
  ENSG00000025156_7 (sequence is synthesized)
ctgatgataatgcagatgaagaaaatatcccagttattccagaaactaatgaggatgttatatctgatccctccaactgtagccagtaccctgatattgtcatcgttgaagatgacaatg

SEQ ID NO: 21276 - DNA, 120 bp, Artificial Sequence
  ENSG00000025156_8 (sequence is synthesized)
aagatgagtatgcacctgtcattcagagtggagagcagaatgaaccagccagagaatccctaagttcaggcagtgatggcagcagccctctcatgtctagtgctgtccagctaaatggct

SEQ ID NO: 21277 - DNA, 120 bp, Artificial Sequence
  ENSG00000025156_9 (sequence is synthesized)
catccagtctgacctcagaagatccagtgaccatgatggattccattttgaatgataacatcaatcttttgggaaaggttgagctgttggattatcttgacagtattgactgcagtttag

SEQ ID NO: 21278 - DNA, 120 bp, Artificial Sequence
  ENSG00000025156_10 (sequence is synthesized)
tgtgcagatgaatcccacagattacatcaataatacaaaatctgagaataaaggattagaaactaccaagaacaatgtagttcagccagtttcggaagagggaagaaaatctaaatccaa

SEQ ID NO: 21279 - DNA, 120 bp, Artificial Sequence
  ENSG00000025156_11 (sequence is synthesized)
accagataagcagcttatccagtataccgcctttccacttcttgcattcctcgatgggaaccctgcttcttctgttgaacaggcgagtacaacagcatcatcagaagttttgtcctctgt

SEQ ID NO: 21280 - DNA, 120 bp, Artificial Sequence
  ENSG00000025156_12 (sequence is synthesized)
agataaacccatagaagttgatgagcttctggatagcagcctagacccagaaccaacccaaagtaagcttgttcgcctggagccattgactgaagctgaagctagtgaagctacactgtt

SEQ ID NO: 21281 - DNA, 120 bp, Artificial Sequence
  ENSG00000025156_13 (sequence is synthesized)
ttatttatgtgaacttgctcctgcacctctggatagtgatatgccacttttagatagctaaatccccaggaagtggactttacatgtatatattcatcaaaatgatgaactatttatttt

SEQ ID NO: 21282 - DNA, 120 bp, Artificial Sequence
  ENSG00000025156_14 (sequence is synthesized)
aaagtatcatttggtactttttttgtaaattgctttgttttgtttaatcagatactgtggaataaaagcaccttttgcttttctcactaaccacacactcttgcagagctttcaggtgtt

SEQ ID NO: 21283 - DNA, 120 bp, Artificial Sequence
  ENSG00000025156_15 (sequence is synthesized)
actcagctgcatagttacgcagatgtaatgcacattattggcgtatctttaagttggattcaaatggccatttttctccaattttggtaaattggatatcttttttttacaaatacgacc

SEQ ID NO: 21284 - DNA, 120 bp, Artificial Sequence
  ENSG00000025156_16 (sequence is synthesized)
attaacctcagttaaatttttgtttgttttcctgtttgatgctgtctatttgcattgagtgtaagtcatttgaactaatggtataactcctaaagctttctctgctccagttatttttat

SEQ ID NO: 21285 - DNA, 120 bp, Artificial Sequence
  ENSG00000025156_17 (sequence is synthesized)
taaatatttttcacttggcttatttttaaaactgggaacataaagtgcctgtatcttgtaaaacttcatttgtttcttttggttcagagaagttcatttatgttcaaagacgtttattca

SEQ ID NO: 21286 - DNA, 120 bp, Artificial Sequence
  ENSG00000025156_18 (sequence is synthesized)
tgttcaacaggaaagacaaagtgtacgtgaatgctcgctgtctgatagggttccagctccatatatatagaaagatcgggggtgggatgggatggagtgagccccatccagttagttgga

SEQ ID NO: 21287 - DNA, 120 bp, Artificial Sequence
  ENSG00000025156_19 (sequence is synthesized)
ctagttttaaataaaggttttccggtttgtgtttttttgaaccatactgtttagtaaaataaatacaatgaatgttgagtactagtgtctgttatgtgtcttctttagaggtgacactca

SEQ ID NO: 21288 - DNA, 120 bp, Artificial Sequence
  ENSG00000025156_20 (sequence is synthesized)
catgaaacaattttttcttctcataggaagcagtagctttaaactgtctgtggttcattattctcaatatgaatcataccaagatatttgtgcctcatctcgaaaatatattgtatattg

SEQ ID NO: 21289 - DNA, 120 bp, Artificial Sequence
  ENSG00000025293_0 (sequence is synthesized)
gcagagcacgcagagtccttctgtcggttggtcctggagcggcgcagccggagtggggccgtgaggagaataaaggcagccccgttgatgactgaaaatgacaaagcatccacctaacag

SEQ ID NO: 21290 - DNA, 120 bp, Artificial Sequence
  ENSG00000025293_1 (sequence is synthesized)
acgaggaatcagctttgaagtgggagcccagttggaagcccgggaccgtttaaaaaactggtatccagctcacatagaagacattgactacgaggaaggaaaagtactcatccatttcaa

SEQ ID NO: 21291 - DNA, 120 bp, Artificial Sequence
  ENSG00000025293_2 (sequence is synthesized)
gcgttggaaccatcgttatgatgagtggttctgctgggacagtccttatttacgccctttagagaaaatacagctgaggaaagagggcttgcatgaagaggatggatcttctgaatttca

SEQ ID NO: 21292 - DNA, 120 bp, Artificial Sequence
  ENSG00000025293_3 (sequence is synthesized)
aataaatgagcaggtccttgcttgctggtctgattgtcgtttttacccggccaaagtcactgctgttaacaaggatggtacttacactgtgaaattttatgatggagtagttcagactgt

SEQ ID NO: 21293 - DNA, 120 bp, Artificial Sequence
  ENSG00000025293_4 (sequence is synthesized)
caaacatattcatgtcaaagctttttccaaagatcagaatattgtgggtaatgctaggcctaaagaaacagatcacaaaagtctttcatcatctcctgataaacgagagaagtttaaaga

SEQ ID NO: 21294 - DNA, 120 bp, Artificial Sequence
  ENSG00000025293_5 (sequence is synthesized)
acagagaaaagcaacagtgaatgtgaagaaagacaaagaagataaacccttaaagacagaaaagcgacccaagcagcctgataaagaaggaaagttaatctgttctgaaaaggggaaagt

SEQ ID NO: 21295 - DNA, 120 bp, Artificial Sequence
  ENSG00000025293_6 (sequence is synthesized)
gtcagagaaaagtcttcccaagaacgagaaggaagacaaggaaaacatttccgaaaatgacagagagtattctggagatgcccaagtggataagaaacctgaaaatgacattgtgaagag

SEQ ID NO: 21296 - DNA, 120 bp, Artificial Sequence
  ENSG00000025293_7 (sequence is synthesized)
tccacaagaaaacttgagggaacccaaaagaaaacgaggcagacccccttccatagctcctactgctgtggattcaaactctcaaactttgcaaccaataacattggaactgagaagaag

SEQ ID NO: 21297 - DNA, 120 bp, Artificial Sequence
  ENSG00000025293_8 (sequence is synthesized)
gaaaatatcaaaaggatgtgaagtcccattaaaacgtcctcggcttgacaaaaattcatcccaggaaaagtcaaaaaactactcggaaaacactgacaaagacttatcgaggagacgttc

SEQ ID NO: 21298 - DNA, 120 bp, Artificial Sequence
  ENSG00000025293_9 (sequence is synthesized)
ctccaggctgtccactaatgggacccatgagatcctagatcctgacttggttgtatcagatttggttgatacggatcctttgcaagacacgttgtctagtaccaaggaatctgaagaagg

SEQ ID NO: 21299 - DNA, 120 bp, Artificial Sequence
  ENSG00000025293_10 (sequence is synthesized)
tcagttgaagtctgctttggaagctggccaggtctcatctgcactgacttgccactcctttggggatggatccggggctgcaggcttggagttgaactgcccatcaatgggagaaaacac

SEQ ID NO: 21300 - DNA, 120 bp, Artificial Sequence
  ENSG00000025293_11 (sequence is synthesized)
gatgaaaacagaaccgacttctccccttgtggaattacaagagatttcgactgtggaagtaacaaatacttttaagaaaacagatgattttgggtcatctaatgcaccagctgtcgacct

SEQ ID NO: 21301 - DNA, 120 bp, Artificial Sequence
  ENSG00000025293_12 (sequence is synthesized)
agaccataagtttagatgcaaagttgtggactgtttaaaatttttccgcaaagccaaactgttgcactatcacatgaagtatttccatggaatggagaagtcactggagccagaagagag

SEQ ID NO: 21302 - DNA, 120 bp, Artificial Sequence
  ENSG00000025293_13 (sequence is synthesized)
cccgggaaagaggcatgtccaaaccaggggcccttcagcttcagacaagcccagccaggagaccctgaccaggaagcgggtctctgccagttccccaactacaaaagacaaggaaaagaa

SEQ ID NO: 21303 - DNA, 120 bp, Artificial Sequence
  ENSG00000025293_14 (sequence is synthesized)
taaagagaagaaattcaaggagtttgtgagagtgaagccaaagaagaaaaagaaaaagaaaaagaaaaccaaacctgaatgcccctgcagtgaggagatcagtgacacctcccaggaacc

SEQ ID NO: 21304 - DNA, 120 bp, Artificial Sequence
  ENSG00000025293_15 (sequence is synthesized)
ttctccacccaaggcatttgctgttaccaggtgtgggtcctcacacaagccaggggtccatatgagcccgcagcttcatggcccagaatctggacaccacaaagggaaagtgaaagcatt

SEQ ID NO: 21305 - DNA, 120 bp, Artificial Sequence
  ENSG00000025293_16 (sequence is synthesized)
ggaggaggataatttgagtgagtcctcttctgagagctttctctggagtgatgatgagtatggccaagatgtggatgtgaccaccaacccagatgaggaacttgatggggatgaccgcta

SEQ ID NO: 21306 - DNA, 120 bp, Artificial Sequence
  ENSG00000025293_17 (sequence is synthesized)
tgacttcgaggtggtccgctgcatctgtgaggtccaggaggaaaatgacttcatgattcagtgtgaagagtgccagtgctggcagcatggggtctgcatgggattactggaagaaaatgt

SEQ ID NO: 21307 - DNA, 120 bp, Artificial Sequence
  ENSG00000025293_18 (sequence is synthesized)
gcccgagaaatacacctgttatgtttgccaagaccctccaggtcagaggcctggcttcaagtactggtatgacaaggagtggctgagcaggggacatatgcatggcctggcatttctaga

SEQ ID NO: 21308 - DNA, 120 bp, Artificial Sequence
  ENSG00000025293_19 (sequence is synthesized)
agagaactactcccatcagaatgccaagaagatcgtggccacccaccagcttcttggtgatgtgcagagagtgattgaggttctgcatggcctgcagctcaagatgagcatcttgcaaag

SEQ ID NO: 21309 - DNA, 120 bp, Artificial Sequence
  ENSG00000025293_20 (sequence is synthesized)
ccgggagcatcctgatctgccgctgtggtgccagccttggaaacagcactcaggggaggggagatctcatttcagaaacatccctgtcactgacaccaggagcaaggaggaagctccaag

SEQ ID NO: 21310 - DNA, 120 bp, Artificial Sequence
  ENSG00000025293_21 (sequence is synthesized)
ctatagaactttgaacggggcagtggagaagcccaggcccctggccctgcccctgccgcgttctgtggaggaatcctatatcaccagtgagcattgctaccagaagccccgcgcctatta

SEQ ID NO: 21311 - DNA, 120 bp, Artificial Sequence
  ENSG00000025293_22 (sequence is synthesized)
ccctgccgtggagcagaagctggtggtggagacgaggggctctgccctcgacgatgcggtcaaccccctccatgagaacggcgatgattccctttccccgcgcctgggctggcctctaga

SEQ ID NO: 21312 - DNA, 120 bp, Artificial Sequence
  ENSG00000025293_23 (sequence is synthesized)
ccaagacaggagcaagggggacagtgaccccaaacccggctccccaaaggtgaaggaatatgtctccaaaaaggccctaccagaagaagcccctgctcggaagctgctggacagaggtgg

SEQ ID NO: 21313 - DNA, 120 bp, Artificial Sequence
  ENSG00000025293_24 (sequence is synthesized)
agagctggctggactacactggggaactggagccccctgagccgctggccaggcttccgcagctcaagcattgtatcaagcagctgctgatggacctgggcaaggtgcagcagatcgccc

SEQ ID NO: 21314 - DNA, 120 bp, Artificial Sequence
  ENSG00000025293_25 (sequence is synthesized)
tctgctgctcaacatgaaactgggcacccaaaactcatgggggcacaatcctggggcacctgcaggaggagcttcgcatatttaaataaataaacctagcatgctgaatgcacgtgacac

SEQ ID NO: 21315 - DNA, 120 bp, Artificial Sequence
  ENSG00000025293_26 (sequence is synthesized)
cgactgacttcagggatctgggccaggagtgtggtggacattggacaaagaggccattttggctgcgggaggacactctgatctcgaagcctgccataaaggtagcaaatagactcttgg

SEQ ID NO: 21316 - DNA, 120 bp, Artificial Sequence
  ENSG00000025293_27 (sequence is synthesized)
gattcccctcttctgtgcacatcgttgaatgaagagagtctttttgcacaaacttcacttgaaattgtgccactgatgataaacggaatgagagccaaaaaagtttagttggagacagtt

SEQ ID NO: 21317 - DNA, 120 bp, Artificial Sequence
  ENSG00000025293_28 (sequence is synthesized)
gtaaattcaatttggagtttatttaattgacttttctatcacgttggggcacatgccaactccctggtttcttcctggcatggtgtttgggcagcaggcatcattttccttttctagctt

SEQ ID NO: 21318 - DNA, 120 bp, Artificial Sequence
  ENSG00000025293_29 (sequence is synthesized)
cataggaatattgtgagctcaccatgctgtggaggttgggaaagagcagagtcttggctgccctgctttctccttaggactcttcacttttctcaccacatctcttgcatgacttcatgg

SEQ ID NO: 21319 - DNA, 120 bp, Artificial Sequence
  ENSG00000025293_30 (sequence is synthesized)
tactggggacaagtttgtatgccttcaccccagagctggctgggttatggcttttgtagcagagcccatacagcctatggaagaactagaatctcactcacagtaataagaatctaggag

SEQ ID NO: 21320 - DNA, 120 bp, Artificial Sequence
  ENSG00000025293_31 (sequence is synthesized)
gaattccaaaccgaagcaggcagggtctggaacccaaaggacagcattttctacccacttcttaatattgacagcttccccgttctatttaatgtccaaaaatgtttcccaaaatttcaa

SEQ ID NO: 21321 - DNA, 120 bp, Artificial Sequence
  ENSG00000025293_32 (sequence is synthesized)
actctttcactgtaaagatttgttacaaagaatgtggtttggggaattaccttattttatattgttgtaaacaaacttcaaattctacatgtgcgacttttctccttcctgaagggtgtt

SEQ ID NO: 21322 - DNA, 120 bp, Artificial Sequence
  ENSG00000025293_33 (sequence is synthesized)
tagtagtcagcgttttcagaattgttttgttactatactttaacattttacatttcctgtttgtattattttgtgagagcaaggtgatcatgctgcttaaggtccaggtacaacctattt

SEQ ID NO: 21323 - DNA, 120 bp, Artificial Sequence
  ENSG00000025293_34 (sequence is synthesized)
gtaccttttgagacaatatttgtgttacttttgcaggttacggttccacatgtaattgctatattttgttttgtttttccttactaggcaaagttaaaatgttccatgctttgaggagtg

SEQ ID NO: 21324 - DNA, 120 bp, Artificial Sequence
  ENSG00000025293_35 (sequence is synthesized)
acccatttcactactttgttttcttatcactaaaggcaaaaatcaaagcacagttgtccattaacacttataagttaattatgggtttatgagtctgtaatgttatatgctgcaaacatt

SEQ ID NO: 21325 - DNA, 120 bp, Artificial Sequence
  ENSG00000025293_36 (sequence is synthesized)
tactatgtaaacgtgaagtagccaataatatctcaatagtagtaacagtatctttagcgacctttggaatagttaagcacaggtcattgtggacatgaattcaggcctctgtactaaaat

SEQ ID NO: 21326 - DNA, 120 bp, Artificial Sequence
  ENSG00000025293_37 (sequence is synthesized)
ctatttcagggaatgttctgtctagtgatttgctcaccatttgatatataatgaattataggacaagtataagctgatctgctatagctgtccatcagagagaatacacgtggctataac

SEQ ID NO: 21327 - DNA, 120 bp, Artificial Sequence
  ENSG00000025293_38 (sequence is synthesized)
atctataacaaaacgacgattcctctacaagaggctgtttctcactgctaacgttggtgtttctggcgtgggaagaaatgcacaggcgtgcatggcatgcacgttcagacagctgcattg

SEQ ID NO: 21328 - DNA, 120 bp, Artificial Sequence
  ENSG00000025293_39 (sequence is synthesized)
taagagttctgtcatgcagtctgaaaagggaagaaacaggatggctttctgtagccacacctgtgaggcgtgatgattgttgtattattagattactgatttttcttttctgaaaataca

SEQ ID NO: 21329 - DNA, 120 bp, Artificial Sequence
  ENSG00000025293_40 (sequence is synthesized)
tttgagttttaatcacatctgtggaagctgtaacttttaaggtagtcaatttcatgtcttgttcaacgatgtaagcagaaactgaattgccctaattttgccaactggccattattggga

SEQ ID NO: 21330 - DNA, 120 bp, Artificial Sequence
  ENSG00000025293_41 (sequence is synthesized)
ttattgtttaaatttttggtaaaggaagtaatctcctttcattcattgtgacttttgttcttagggaagcagagaagactccccaagttcttataacctcattgtgcttccctaatttaa

SEQ ID NO: 21331 - DNA, 120 bp, Artificial Sequence
  ENSG00000025293_42 (sequence is synthesized)
agccatgttgaggggctccattcccaattcctgggtcaaggtgaattaaccctatgttggagcactggaaaccgttatttgcaaacattgctgttaccatttagaaatatgtgcactatc

SEQ ID NO: 21332 - DNA, 89 bp, Artificial Sequence
  ENSG00000025293_43 (sequence is synthesized)
ctctatgtgcactacctaagttttgtctttagaaaaactatccacctataaaaaattaccttgacaaaaatagttccggtttgactaat

SEQ ID NO: 21333 - DNA, 120 bp, Artificial Sequence
  ENSG00000025293_44 (sequence is synthesized)
aaaaaattaccttgacaaaaatagttccggtttgactaatcattttgtttctttaagtggtaagtgtatgcaaggtggatccttgatgagccaacattgcactgtggatacatatctatg

SEQ ID NO: 21334 - DNA, 120 bp, Artificial Sequence
  ENSG00000025293_45 (sequence is synthesized)
tttacgcgctattagaacagaaggcgctgtatatagaaatgttgctttgaagcaatatttgcaaaacacgcagacttctgtatctgtatttggaaaaaataaaacaggttcttgttgcta

SEQ ID NO: 21335 - DNA, 120 bp, Artificial Sequence
  ENSG00000025293_46 (sequence is synthesized)
gaaaacagaaccgacttctccccttgtggaattacaagagatttcgactgtggaaggttcatatttagagttaaattaatcctctttttatatacacttttgcttatgctttgtgaacta

SEQ ID NO: 21336 - DNA, 120 bp, Artificial Sequence
  ENSG00000025293_47 (sequence is synthesized)
gggcggggcatacgctgggcgcgtcccgggggtcacgtggtgcagagcacgcagagtccttctgtcggttggtcctggagcggcgcagccggagtggggccgtgagttgcttaaaactat

SEQ ID NO: 21337 - DNA, 120 bp, Artificial Sequence
  ENSG00000025293_48 (sequence is synthesized)
ccagttccccttccgggaggcaaaccgggttacttgatcctccttcccgaggtagcccacgcatttaaaaacaggtatccagctcacatagaagacattgactacgaggaaggaaaagta

SEQ ID NO: 21338 - DNA, 120 bp, Artificial Sequence
  ENSG00000025293_49 (sequence is synthesized)
ggttcatggggagttgtagctcctctgccactgagttctatgatcttgagtagccactgccgttgggcttcattctctcagtgaaatgaggaagtggagttgagttcactgccaggcagc

SEQ ID NO: 21339 - DNA, 120 bp, Artificial Sequence
  ENSG00000025293_50 (sequence is synthesized)
aaaacaaaagaagacctgcttcaaagtagaatgaagtaggtgctgaaatagagctaccaggaggaggcagggcaggatggtgcaggttaatcatggtacttacactgtgaaattttatga

SEQ ID NO: 21340 - DNA, 89 bp, Artificial Sequence
  ENSG00000025293_51 (sequence is synthesized)
acgcagagtccttctgtcggttggtcctggagcggcgcagccggagtggggccgtgaggctggaatgcagtgacatcatctcagagctg

SEQ ID NO: 21341 - DNA, 85 bp, Artificial Sequence
  ENSG00000025293_52 (sequence is synthesized)
agcctcccgagtagctaggattacaggcggaagagatgggttttcaccatattcgccaagctagtcttgaactcctgacctcaag

SEQ ID NO: 21342 - DNA, 120 bp, Artificial Sequence
  ENSG00000025293_53 (sequence is synthesized)
gcctcccaaagtgctaggattacaggccactgtgcctggccaagaggtcacttttcatgtccaggctgcatggagaataaaggcagccccgttgatgactgaaaatgacaaagcatccac

SEQ ID NO: 21343 - DNA, 120 bp, Artificial Sequence
  ENSG00000025293_54 (sequence is synthesized)
atcctccttcctcagcctcctgagtacctgggactataggaatttcaaataaatgagcaggtccttgcttgctggtctgattgtcgtttttacccggccaaagtcactgctgttaacaag

SEQ ID NO: 21344 - DNA, 120 bp, Artificial Sequence
  ENSG00000025293_55 (sequence is synthesized)
cagaatcacctggaggagttgttaaaaatgcacattcctgtgccctgttcccagttgctgtttcagtgtatctgaggtgggactggtaacttgcatttctaatgagttcccaggagttgc

SEQ ID NO: 21345 - DNA, 120 bp, Artificial Sequence
  ENSG00000025293_56 (sequence is synthesized)
ttctgtcggttggtcctggagcggcgcagccggagtggggccgtgagatcttattcagggcttctcagcctgaacccccaaccagattaatttctccacagctggaattccaagtgcttg

SEQ ID NO: 21346 - DNA, 120 bp, Artificial Sequence
  ENSG00000025293_57 (sequence is synthesized)
gggataatgatacctctgacctttcttccttttgggaagtacttgagtgtgcagctgcatgaggcctcagcaggagagagattttaggtccaagaagctataccagtaggacaaggcagg

SEQ ID NO: 21347 - DNA, 120 bp, Artificial Sequence
  ENSG00000025293_58 (sequence is synthesized)
gatcaagcccctctgactctcatttggaaactggatgtttgctaagcacctgcttcttaaggatgccgagggatttaatgatactcccagaaacctggagagattaatggggcctatgga

SEQ ID NO: 21348 - DNA, 120 bp, Artificial Sequence
  ENSG00000025293_59 (sequence is synthesized)
gaagtgctctgaactcagtgttgggacttgaataaaattaaccattgtcatgttttcagaacaactaagctgttttatatttcatgtgcatgaaagccctagaactaagttgtgttattt

SEQ ID NO: 21349 - DNA, 120 bp, Artificial Sequence
  ENSG00000025293_60 (sequence is synthesized)
ccagaaatgaaatagatcccacagttagatgatgtggccattaggaagtaccaaatttataaaaatcactggaggtctgtctgagcagtacctaataaaatatagtatactgaaagtgaa

SEQ ID NO: 21350 - DNA, 120 bp, Artificial Sequence
  ENSG00000025293_61 (sequence is synthesized)
agagtccttctgtcggttggtcctggagcggcgcagccggagtggggccgtgagcacgagtacacgagacaggattgagaaaggagagattcaaattgtgacttcagattcaaaggcaat

SEQ ID NO: 21351 - DNA, 120 bp, Artificial Sequence
  ENSG00000025293_62 (sequence is synthesized)
aatataggcaggtaaaaacaggaacccagacctttgttgtacttacactgtgaaattttatgatggagtagttcagactgtcaaacatattcatgtcaaagctttttccaaagatcagct

SEQ ID NO: 21352 - DNA, 120 bp, Artificial Sequence
  ENSG00000025293_63 (sequence is synthesized)
cataagtcattgctgagctgcctgtgtagataattgtttatgctcttatccttttatgttcttatccttttatcatagcctgttcatctaattgttgttgtcatctaattgctgatgttt

SEQ ID NO: 21353 - DNA, 120 bp, Artificial Sequence
  ENSG00000025293_64 (sequence is synthesized)
taacccaaccaggcataactatgtatctttatatcttgtttgctagccagtttcttttttttatatttttaatttttttaaaaatttttaatttttgtgggtacataagtgggtgtatgt

SEQ ID NO: 21354 - DNA, 120 bp, Artificial Sequence
  ENSG00000025293_65 (sequence is synthesized)
atgtcagtcttttctctttgatgcagggatcccagtgtcagggtgactgtcctgtaaccccctgtatatatttgtttcccccttttgcctgttcatctgaaagagttctgggaaaaagaa

SEQ ID NO: 21355 - DNA, 120 bp, Artificial Sequence
  ENSG00000025293_66 (sequence is synthesized)
gcaggaatggctacagggaagggaagagttaatagtggcagctctcttgctcctggctgcctgtctgaaaaaagaggaaagatcagggatggaatagtgaagaaaaaggggttcgattgg

SEQ ID NO: 21356 - DNA, 120 bp, Artificial Sequence
  ENSG00000025423_0 (sequence is synthesized)
agcagttggggcaggaggaagccgactgctgcctggtctgcaaagaagtcctttcaagtctctaggactggactcttcctaagcaagtccgagaaggaagcaccctcactatgtggctct

SEQ ID NO: 21357 - DNA, 120 bp, Artificial Sequence
  ENSG00000025423_1 (sequence is synthesized)
acctggcggccttcgtgggcctgtactaccttctgcactggtaccgggagaggcaggtggtgagccacctccaagacaagtatgtctttatcacgggctgtgactcgggctttgggaacc

SEQ ID NO: 21358 - DNA, 120 bp, Artificial Sequence
  ENSG00000025423_2 (sequence is synthesized)
tgctggccagacagctggatgcacgaggcttgagagtgctggctgcgtgtctgacggagaagggggccgagcagctgaggggccagacgtctgacaggctggagacggtgaccctggatg

SEQ ID NO: 21359 - DNA, 120 bp, Artificial Sequence
  ENSG00000025423_3 (sequence is synthesized)
ttaccaagatggagagcatcgctgcagctactcagtgggtgaaggagcatgtgggggacagaggactctggggactggtgaacaatgcaggcattcttacaccaattaccttatgtgagt

SEQ ID NO: 21360 - DNA, 120 bp, Artificial Sequence
  ENSG00000025423_4 (sequence is synthesized)
ggctgaacactgaggactctatgaatatgctcaaagtgaacctcattggtgtgatccaggtgaccttgagcatgcttcctttggtgaggagagcacggggaagaattgtcaatgtctcca

SEQ ID NO: 21361 - DNA, 120 bp, Artificial Sequence
  ENSG00000025423_5 (sequence is synthesized)
gcattctgggaagagttgctttctttgtaggaggctactgtgtctccaagtatggagtggaagccttttcagatattctgaggcgtgagattcaacattttggggtgaaaatcagcatag

SEQ ID NO: 21362 - DNA, 120 bp, Artificial Sequence
  ENSG00000025423_6 (sequence is synthesized)
aagaagcccccaagcatattaaggagacctatggacagcagtattttgatgccctttacaatatcatgaaggaagggctgttgaattgtagcacaaacctgaacctggtcactgactgca

SEQ ID NO: 21363 - DNA, 120 bp, Artificial Sequence
  ENSG00000025423_7 (sequence is synthesized)
tggaacatgctctgacatcggtgcatccgcgaactcgatattcagctggctgggatgctaaatttttcttcatccctctatcttatttacctacatcactggcagactacattttgacta

SEQ ID NO: 21364 - DNA, 120 bp, Artificial Sequence
  ENSG00000025423_8 (sequence is synthesized)
gatcttggcccaaaccagcccaggcagtctaaagaaaactgggttggtgcttcttggaatgaaggcaaaaatctgaaattgttagtgtctcagtaatcctgatttagaacccaggctttt

SEQ ID NO: 21365 - DNA, 120 bp, Artificial Sequence
  ENSG00000025423_9 (sequence is synthesized)
tgtaacaatgtgttttcttgcctaaattcatttatctggcatcatcagagtactaacatgtttatatttcagatatccaaagcttaccactttaggtgatgaatctttactattttagcc

SEQ ID NO: 21366 - DNA, 120 bp, Artificial Sequence
  ENSG00000025423_10 (sequence is synthesized)
cttttttgatgagactatttgtctaaagtgaatcatttgttcttgccttattaaacagagtagatggaaaacaatttaacctattttgaagtcatttctttatgaatatgaataattgtt

SEQ ID NO: 21367 - DNA, 120 bp, Artificial Sequence
  ENSG00000025423_11 (sequence is synthesized)
ctatgctttaataatctattgtgaggaaactactaagaaatatgttggtgtgtttgtccttacttgaaatgggtctgtattatggtacttttaataaatatttgatttttctttctcttc

SEQ ID NO: 21368 - DNA, 120 bp, Artificial Sequence
  ENSG00000025423_12 (sequence is synthesized)
acttggtgcgcgcgggggctgcgggagacgcagcagtttgcgatctgcccacgcgttcgggcactagggccaccgctcttgtgggcagaaggccgcgtccattccaggaagaggatcttc

SEQ ID NO: 21369 - DNA, 120 bp, Artificial Sequence
  ENSG00000025423_13 (sequence is synthesized)
tccggaaatatctgattctgcagctgatcaaggatgacactggtgagaaccctatgagggagtgaagcagcctggactcttaccacaagagggaggtgttataagagcaatgcagaggtt

SEQ ID NO: 21370 - DNA, 120 bp, Artificial Sequence
  ENSG00000025423_14 (sequence is synthesized)
actccgctcccgaacccattcctcgcctccatcacctccaccgtagttgagccagcgatagtactgagagtagggaaagagcctccggtaataaagtttaagcagctcgggcagctcggt

SEQ ID NO: 21371 - DNA, 120 bp, Artificial Sequence
  ENSG00000025423_15 (sequence is synthesized)
tagagcgaatgaagcaaagttggaaagaagcccccaagcatattaaggagacctatggacagcagtattttgatgcccgtgataggagctttgtgggagtgggatttgtcaatttcctat

SEQ ID NO: 21372 - DNA, 120 bp, Artificial Sequence
  ENSG00000025423_16 (sequence is synthesized)
agcaagtccgaccaggcttttgaaaaagagtctccactcggctccacttcctgccctccaattcatgcagcagcccactgaagattggcttctgtgcccttcactgtctgagtcttcccg

SEQ ID NO: 21373 - DNA, 120 bp, Artificial Sequence
  ENSG00000025423_17 (sequence is synthesized)
ttaagagcaccagtgccctcctattacccagcagacctcctggttgcattgctgatcctcattaagcccccctttccttggctttcatcagcttgctttttcctacttctctggctcatt

SEQ ID NO: 21374 - DNA, 120 bp, Artificial Sequence
  ENSG00000025434_0 (sequence is synthesized)
gtcctgcttgtgctcagctccagctcactggctggccaccgagacttctggacaggaaactgcaccatcctcttctcccagcaagggggctccagagactgcccacccaggaagtctggt

SEQ ID NO: 21375 - DNA, 120 bp, Artificial Sequence
  ENSG00000025434_1 (sequence is synthesized)
ggcctggggatttggacagtgccttggtaatgaccagggctccaggaagagatgtccttgtggctgggggcccctgtgcctgacattcctcctgactctgcggtggagctgtggaagcca

SEQ ID NO: 21376 - DNA, 120 bp, Artificial Sequence
  ENSG00000025434_2 (sequence is synthesized)
ggcgcacaggatgcaagcagccaggcccagggaggcagcagctgcatcctcagagaggaagccaggatgccccactctgctgggggtactgcaggggtggggctggaggctgcagagccc

SEQ ID NO: 21377 - DNA, 120 bp, Artificial Sequence
  ENSG00000025434_3 (sequence is synthesized)
acagccctgctcaccagggcagagcccccttcagaacccacagagatccgtccacaaaagcggaaaaaggggccagcccccaaaatgctggggaacgagctatgcagcgtgtgtggggac

SEQ ID NO: 21378 - DNA, 120 bp, Artificial Sequence
  ENSG00000025434_4 (sequence is synthesized)
aaggcctcgggcttccactacaatgttctgagctgcgagggctgcaagggattcttccgccgcagcgtcatcaagggagcgcactacatctgccacagtggcggccactgccccatggac

SEQ ID NO: 21379 - DNA, 120 bp, Artificial Sequence
  ENSG00000025434_5 (sequence is synthesized)
acctacatgcgtcgcaagtgccaggagtgtcggcttcgcaaatgccgtcaggctggcatgcgggaggagtgtgtcctgtcagaagaacagatccgcctgaagaaactgaagcggcaagag

SEQ ID NO: 21380 - DNA, 120 bp, Artificial Sequence
  ENSG00000025434_6 (sequence is synthesized)
gaggaacaggctcatgccacatccttgccccccagggcttcctcacccccccaaatcctgccccagctcagcccggaacaactgggcatgatcgagaagctcgtcgctgcccagcaacag

SEQ ID NO: 21381 - DNA, 120 bp, Artificial Sequence
  ENSG00000025434_7 (sequence is synthesized)
caccagatccccatagccgggaggcccgtcagcagcgctttgcccacttcactgagctggccatcgtctctgtgcaggagatagttgactttgctaaacagctacccggcttcctgcagc

SEQ ID NO: 21382 - DNA, 120 bp, Artificial Sequence
  ENSG00000025434_8 (sequence is synthesized)
tcagccgggaggaccagattgccctgctgaagacctctgcgatcgaggtgatgcttctggagacatctcggaggtacaaccctgggagtgagagtatcaccttcctcaaggatttcagtt

SEQ ID NO: 21383 - DNA, 120 bp, Artificial Sequence
  ENSG00000025434_9 (sequence is synthesized)
ataaccgggaagactttgccaaagcagggctgcaagtggaattcatcaaccccatcttcgagttctccagggccatgaatgagctgcaactcaatgatgccgagtttgccttgctcattg

SEQ ID NO: 21384 - DNA, 120 bp, Artificial Sequence
  ENSG00000025434_10 (sequence is synthesized)
ctatcagcatcttctctgcagaccggcccaacgtgcaggaccagctccaggtagagaggctgcagcacacatatgtggaagccctgcatgcctacgtctccatccaccatccccatgacc

SEQ ID NO: 21385 - DNA, 120 bp, Artificial Sequence
  ENSG00000025434_11 (sequence is synthesized)
gactgatgttcccacggatgctaatgaaactggtgagcctccggaccctgagcagcgtccactcagagcaagtgtttgcactgcgtctgcaggacaaaaagctcccaccgctgctctctg

SEQ ID NO: 21386 - DNA, 120 bp, Artificial Sequence
  ENSG00000025434_12 (sequence is synthesized)
agatctgggatgtgcacgaatgactgttctgtccccatattttctgttttcttggccggatggctgaggcctggtggctgcctcctagaagtggaacagactgagaagggcaaacattcc

SEQ ID NO: 21387 - DNA, 120 bp, Artificial Sequence
  ENSG00000025434_13 (sequence is synthesized)
tgggagctgggcaaggagatcctcccgtggcattaaaagagagtcaaagggttgcgagttttgtggctactgagcagtggagccctcgctaacactgtgctgtgtctgaagatcatgctg

SEQ ID NO: 21388 - DNA, 120 bp, Artificial Sequence
  ENSG00000025434_14 (sequence is synthesized)
accccacaaacggatgggcctgggggccactttgcacagggttctccagagccctgcccatcctgcctccaccacttcctgtttttcccacagggccccaagaaaaattctccactgtca

SEQ ID NO: 21389 - DNA, 120 bp, Artificial Sequence
  ENSG00000025434_15 (sequence is synthesized)
tctggggagaagtgaggggtgatggtgatggaagcttgggacaggagcaggactctgggtcccagaataactcatgaggggctcaggggaggaggtcctctatgtgaattggggagattc

SEQ ID NO: 21390 - DNA, 120 bp, Artificial Sequence
  ENSG00000025434_16 (sequence is synthesized)
ttggagacaggtttgtgctgggaccctggaaagtggcacgagcgaggttctctaataagcagcgtgtttcactgggtggagtgagctgtcctcagtgttggagtgagggggaaggggccc

SEQ ID NO: 21391 - DNA, 120 bp, Artificial Sequence
  ENSG00000025434_17 (sequence is synthesized)
aagagaagcagggcagatgcacccaaacattccctgctggcctggaggggactttgggggagaaaagccggcacggtggctgggagcccagactttggagtcagaggagggttggagtct

SEQ ID NO: 21392 - DNA, 120 bp, Artificial Sequence
  ENSG00000025434_18 (sequence is synthesized)
tgactctaccgccgcctaactgtgtgaccatagttacttaatctctttgaacctcagtttgcttatctgtaaaatgagtttaagaatagtcctgagccaggagcagtagcgtgcgcccat

SEQ ID NO: 21393 - DNA, 120 bp, Artificial Sequence
  ENSG00000025434_19 (sequence is synthesized)
aatctcagatactcaggaagctgaaacctgattgcttcagcccagtagtttgaggcgatagtgtcctattattgcacctgtgaatagcactgagttccagcctgggcaacatagagagac

SEQ ID NO: 21394 - DNA, 120 bp, Artificial Sequence
  ENSG00000025434_20 (sequence is synthesized)
cccatctcaaaaaaaaaattaatagttttgacctcagagggatattatgaggaaagcacataaagccttataacaggctgggcgcagtggcttactccaataatccccacactttgggag

SEQ ID NO: 21395 - DNA, 120 bp, Artificial Sequence
  ENSG00000025434_21 (sequence is synthesized)
gcccaggtgagaggatcacttgagcccaggaattcctagactagcctgggcaaaatagggagaacctgtctctaaaaaacataatagtaatataataaagccttagtacaggctaatata

SEQ ID NO: 21396 - DNA, 120 bp, Artificial Sequence
  ENSG00000025434_22 (sequence is synthesized)
tggcaagtaaatgttagctgatattgttgatattgataaaagggaggatcaggtggagaagggagctgaggccagaaaggagcccagttctagaagagtataatctgggtccttcctgca

SEQ ID NO: 21397 - DNA, 120 bp, Artificial Sequence
  ENSG00000025434_23 (sequence is synthesized)
gagttctccagggccatgaatgagctgcaactcaatgatgccgagtttgccttgctcattgctatcagcatcttctctgcaggtgtggaggaggggcaatgggaaacagcaagagactta

SEQ ID NO: 21398 - DNA, 120 bp, Artificial Sequence
  ENSG00000025434_24 (sequence is synthesized)
caccaaggagggctgcaggtcccacaggaatcggtggggggaggggggtggtggcttgggagggtggaggcatttgctgtgttattttaggatgagagagcttggctggagcatgtctct

SEQ ID NO: 21399 - DNA, 120 bp, Artificial Sequence
  ENSG00000025434_25 (sequence is synthesized)
ggaaaaggcgcagtctcggtgggattgcgtgcaggagggtcgtggtctggctgtggcggaggagcataagaaggtgtcctgtcagaagaacagatccgcctgaagaaactgaagcggcaa

SEQ ID NO: 21400 - DNA, 120 bp, Artificial Sequence
  ENSG00000025434_26 (sequence is synthesized)
ggaggggcctccagacatcgagctgggagagccaaatctgctgggaagcagggatgaggagaatcggcctccctggaagaggccatgctccaagaccagccctcctagtccccgtttgag

SEQ ID NO: 21401 - DNA, 120 bp, Artificial Sequence
  ENSG00000025434_27 (sequence is synthesized)
ttcatttaaggtcctgagatgtaagaaactacaagtgactagtcctagctagagcccacacagactctagggtcccaaagcctgagctgggactttgctgccctctaagggtggggataa

SEQ ID NO: 21402 - DNA, 120 bp, Artificial Sequence
  ENSG00000025434_28 (sequence is synthesized)
gcccagatcacctctcccctggttccagtgcctggcccttgcaggcacccgcccagtcctccccagtctggatttgctgctagagagttggccagctgagtgcttaccctgctctggctt

SEQ ID NO: 21403 - DNA, 120 bp, Artificial Sequence
  ENSG00000025434_29 (sequence is synthesized)
gattctaacttagctaagcaatgctactggagaccataggcaaagccaaggtacagcttcagggaagtctttggtgagcccatctctcattaccaaggtaacgaagcgcagactccgggc

SEQ ID NO: 21404 - DNA, 120 bp, Artificial Sequence
  ENSG00000025434_30 (sequence is synthesized)
ccgggtgggcggcatcaccaccaggttcacgccgagaaggagctggaggagagccgcccggctccagccggaccgcttgcccgccatcaccgttgtaatctatgcagcaaacaagctgga

SEQ ID NO: 21405 - DNA, 120 bp, Artificial Sequence
  ENSG00000025434_31 (sequence is synthesized)
ggaaaaggcgcagtctcggtgggattgcgtgcaggagggtcgtggtctggctgtggcggaggagcataagaaggactccagattcaattatttatatatacttcaggatttaaactttgc

SEQ ID NO: 21406 - DNA, 120 bp, Artificial Sequence
  ENSG00000025708_0 (sequence is synthesized)
agtggaccgctgtgcgcgaaccctgaaccctacggtcccgacccgcgggcgaggccgggtacctgggctgggatccggagcaagcgggcgagggcagcgccctaagcaggcccggagcga

SEQ ID NO: 21407 - DNA, 120 bp, Artificial Sequence
  ENSG00000025708_1 (sequence is synthesized)
tggcagccttgatgaccccgggaaccggggccccacccgcgcctggtgacttctccggggaagggagccagggacttcccgacccttcgccagagcccaagcagctcccggagctgatcc

SEQ ID NO: 21408 - DNA, 120 bp, Artificial Sequence
  ENSG00000025708_2 (sequence is synthesized)
gcatgaagcgagacggaggccgcctgagcgaagcggacatcaggggcttcgtggccgctgtggtgaatgggagcgcgcagggcgcacagatcggggccatgctgatggccatccgacttc

SEQ ID NO: 21409 - DNA, 120 bp, Artificial Sequence
  ENSG00000025708_3 (sequence is synthesized)
ggggcatggatctggaggagacctcggtgctgacccaggccctggctcagtcgggacagcagctggagtggccagaggcctggcgccagcagcttgtggacaagcattccacagggggtg

SEQ ID NO: 21410 - DNA, 120 bp, Artificial Sequence
  ENSG00000025708_4 (sequence is synthesized)
tgggtgacaaggtcagcctggtcctcgcacctgccctggcggcatgtggctgcaaggtgccaatgatcagcggacgtggtctggggcacacaggaggcaccttggataagctggagtcta

SEQ ID NO: 21411 - DNA, 120 bp, Artificial Sequence
  ENSG00000025708_5 (sequence is synthesized)
ttcctggattcaatgtcatccagagcccagagcagatgcaagtgctgctggaccaggcgggctgctgtatcgtgggtcagagtgagcagctggttcctgcggacggaatcctatatgcag

SEQ ID NO: 21412 - DNA, 120 bp, Artificial Sequence
  ENSG00000025708_6 (sequence is synthesized)
agcctgccactcatcacagcctccattctcagtaagaaactcgtggaggggctgtccgctctggtggtggacgttaagttcggaggggccgccgtcttccccaaccaggagcaggcccgg

SEQ ID NO: 21413 - DNA, 120 bp, Artificial Sequence
  ENSG00000025708_7 (sequence is synthesized)
gagctggcaaagacgctggttggcgtgggagccagcctagggcttcgggtcgcggcagcgctgaccgccatggacaagcccctgggtcgctgcgtgggccacgccctggaggtggaggag

SEQ ID NO: 21414 - DNA, 120 bp, Artificial Sequence
  ENSG00000025708_8 (sequence is synthesized)
gcgctgctctgcatggacggcgcaggcccgccagacttaagggacctggtcaccacgctcgggggcgccctgctctggctcagcggacacgcggggactcaggcccagggcgctgcccgg

SEQ ID NO: 21415 - DNA, 120 bp, Artificial Sequence
  ENSG00000025708_9 (sequence is synthesized)
gtggccgcggcgctggacgacggctcggcccttggccgcttcgagcggatgctggcggcgcagggcgtggatcccggtctggcccgagccctgtgctcgggaagtcccgcagaacgccgg

SEQ ID NO: 21416 - DNA, 120 bp, Artificial Sequence
  ENSG00000025708_10 (sequence is synthesized)
cagctgctgcctcgcgcccgggagcaggaggagctgctggcgcccgcagatggcaccgtggagctggtccgggcgctgccgctggcgctggtgctgcacgagctcggggccgggcgcagc

SEQ ID NO: 21417 - DNA, 120 bp, Artificial Sequence
  ENSG00000025708_11 (sequence is synthesized)
ggagccgctccgcctgggggtgggcgcagagctgctggtcgacgtgggtcagaggctgcgccgtgggaccccctggctccgcgtgcaccgggacggccccgcgctcagcggcccgcagag

SEQ ID NO: 21418 - DNA, 120 bp, Artificial Sequence
  ENSG00000025708_12 (sequence is synthesized)
ccgcagagccgcgccctgcaggaggcgctcgtactctccgaccgcgcgccattcgccgccccctcgcccttcgcagagctcgttctgccgccgcagcaataaagctcctttgccgcgaaa

SEQ ID NO: 21419 - DNA, 120 bp, Artificial Sequence
  ENSG00000025708_13 (sequence is synthesized)
ccgccccgccgccggcagtggaccgctgtgcgcgaaccctgaaccctacggtcccgacccgcgggcgaggccgggtacctgggctgggatccggagcaagcgggcgagggcagcgcccta

SEQ ID NO: 21420 - DNA, 120 bp, Artificial Sequence
  ENSG00000025708_14 (sequence is synthesized)
agtggaccgctgtgcgcgaaccctgaaccctacggtcccgacccgcgggcgaggccgggtacctgggctgggatccggagcaagcgggcgagggcagcgccctaagcaggccgcagaccc

SEQ ID NO: 21421 - DNA, 120 bp, Artificial Sequence
  ENSG00000025708_15 (sequence is synthesized)
cgaaccctgaaccctacggtcccgacccgcgggcgaggccgggtacctgggctgggatccggagcaagcgggcgagggcagcgccctaagcaggtacgggcggggctcaagtcgcgaggc

SEQ ID NO: 21422 - DNA, 120 bp, Artificial Sequence
  ENSG00000025708_16 (sequence is synthesized)
ggggaagcgggaggcagacacggacgagggcgacacagacacgggaccgaggggcggacaccggagagacacgggaaaggggtcgggacaggagcacgtggctcagacaccgacgccggg

SEQ ID NO: 21423 - DNA, 120 bp, Artificial Sequence
  ENSG00000025708_17 (sequence is synthesized)
ttcacaggctcctgacctccaaactcaagtcaagggcctctcgttaggagttacccgtcacctgaccgtgtgcccccctacccccatcacaagatgcctgaccaccaccatgtggggtgg

SEQ ID NO: 21424 - DNA, 120 bp, Artificial Sequence
  ENSG00000025708_18 (sequence is synthesized)
cctgatactcaacccaccaggtgctgccacccccataataagggacttgaccctcaatgctcagggcccctgaccccaaagtcggcatccccgaactctcccaagaagctccaggttctc

SEQ ID NO: 21425 - DNA, 120 bp, Artificial Sequence
  ENSG00000025708_19 (sequence is synthesized)
gtggaccgctgtgcgcgaaccctgaaccctacggtcccgacccgcgggcgaggccgggtacctgggctgggatccggagcaagcgggcgagggcagcgccctaagcagatgcaagtgctg

SEQ ID NO: 21426 - DNA, 120 bp, Artificial Sequence
  ENSG00000025708_20 (sequence is synthesized)
accccgactgggaggtcagcccgagagactttgggtccctgggggtgcgacggtgccccactaccagcaccggccccagggtgccccaccgctgtgggctgccaccctcacgcgtacccc

SEQ ID NO: 21427 - DNA, 120 bp, Artificial Sequence
  ENSG00000025708_21 (sequence is synthesized)
cacctgccctggcggcatgtggctgcaaggttagaaaccacctcctttccagacgggagcctataccgcacatgcagcaaccagtccatccacaggcagctcccaacctcaagcctggcc

SEQ ID NO: 21428 - DNA, 120 bp, Artificial Sequence
  ENSG00000025708_22 (sequence is synthesized)
caaagcctccaagaccctaccaaggcttctccccaccctgctccccagcacagttctccccaccccgttccccagcacagcgcttggggcccctctggctccagaccaggccccttggag

SEQ ID NO: 21429 - DNA, 120 bp, Artificial Sequence
  ENSG00000025708_23 (sequence is synthesized)
caggaaaaagatccactgatggaattcagacccctttccccttgggtccccagacagctcccccaagggaggagctgaggactttcctccctctgccccaagccttgtttccccaaggac

SEQ ID NO: 21430 - DNA, 120 bp, Artificial Sequence
  ENSG00000025708_24 (sequence is synthesized)
aggtaccaacctcctcccctactgacacttctcaaccaagaaaacttcctttccattccctcaccagctgggcacccctatagctgcttaaatactttccaaatccagctgcactcctag

SEQ ID NO: 21431 - DNA, 120 bp, Artificial Sequence
  ENSG00000025708_25 (sequence is synthesized)
ggcccgagccctgtgctcgggaagtcccgcagaacgccggcagctgctgcctcgcgcccgggagcaggaggagctgctggcgcccgcagatgggaccccctggctccgcgtgcaccggga

SEQ ID NO: 21432 - DNA, 120 bp, Artificial Sequence
  ENSG00000025708_26 (sequence is synthesized)
ctcagcatccctgaccaccaggtgccaatgatcagcggacgtggtctggggcacacaggaggcaccttggataagctggagtctattcctggattcaatgtcatccagagcccagagcag

SEQ ID NO: 21433 - DNA, 120 bp, Artificial Sequence
  ENSG00000025708_27 (sequence is synthesized)
gtacggggcgccacggatcagtcattaatccaggttgatgatggagaccctggccagaatcactaaaagatcactggtggatcattagggtcactaatgagaacactggtcaaggttact

SEQ ID NO: 21434 - DNA, 120 bp, Artificial Sequence
  ENSG00000025708_28 (sequence is synthesized)
catgagtcactgggcctgggccgaaatcatcagtggaactttgattaggatcataaaatgggaagttggtcaaaatcacagatggctggcggggcacggtggctcacacctgtagtccta

SEQ ID NO: 21435 - DNA, 120 bp, Artificial Sequence
  ENSG00000025708_29 (sequence is synthesized)
gcacttggggaggccgaagagggcagatcccttgaacccaggagttcaaaaccagcctggataacacggcaaaaccccatctctacaaaatagttcgctgcgtgtggtggtgcacgcatg

SEQ ID NO: 21436 - DNA, 74 bp, Artificial Sequence
  ENSG00000025708_30 (sequence is synthesized)
aggaggatcacttgagcctgggaggtctaggctgcagtgagccgggacagcactctgggaggcagaggagccca

SEQ ID NO: 21437 - DNA, 120 bp, Artificial Sequence
  ENSG00000025708_31 (sequence is synthesized)
ccagcactctgggaggcagaggagcccagttggagatcagcctgggtaatatagtgaaacttgatctctacaaaaaaaagaagaaaaaaaaaagccgcgtgtggtggtgcgcacctgtag

SEQ ID NO: 21438 - DNA, 87 bp, Artificial Sequence
  ENSG00000025708_32 (sequence is synthesized)
gcgcacctgtagtcccagctactgggaacagaggtcacaatgagccgaaattgtgccaactgcactccagcctgggcaacagaggaa

SEQ ID NO: 21439 - DNA, 120 bp, Artificial Sequence
  ENSG00000025708_33 (sequence is synthesized)
gctgtatcgtgggtcagagtgagcagctggttcctgcggacggaatcctatatgcagccagagatgtgacagccaccgtggacagcctgccactcatcacagctccaggttctccattgt

SEQ ID NO: 21440 - DNA, 120 bp, Artificial Sequence
  ENSG00000025708_34 (sequence is synthesized)
agtggaccgctgtgcgcgaaccctgaaccctacggtcccgacccgcgggcgaggccgggtacctgggctgggatccggagcaagcgggcgagggcagcgccctaagcagaccccggacgt

SEQ ID NO: 21441 - DNA, 120 bp, Artificial Sequence
  ENSG00000025770_0 (sequence is synthesized)
gcattttcctgggcgggaacagcaaaatggcgccagaactagtggcgggctgaggacgccgtacccctcggaaggcagccctgcggtccctttgccgcccgttccctcccggacatggag

SEQ ID NO: 21442 - DNA, 120 bp, Artificial Sequence
  ENSG00000025770_1 (sequence is synthesized)
gacgtggaggcgcgcttcgcccacctcttgcagcccatccgcgacctcaccaagaactgggaggtggacgtggcggcccagctgggcgagtatctggaggagctggatcagatctgcatt

SEQ ID NO: 21443 - DNA, 120 bp, Artificial Sequence
  ENSG00000025770_2 (sequence is synthesized)
tcttttgacgaaggcaagaccacaatgaacttcattgaggcagcgttgttgatccagggctctgcctgcgtctacagtaagaaggtggaatacctctactcactcgtctaccaggccctt

SEQ ID NO: 21444 - DNA, 120 bp, Artificial Sequence
  ENSG00000025770_3 (sequence is synthesized)
gatttcatctctggaaagaggcgggccaagcagctctcttcggtgcaggaggacagggccaatggggttgccagctccggggtcccccaggaggcagagaatgagttcctgtcgctggat

SEQ ID NO: 21445 - DNA, 120 bp, Artificial Sequence
  ENSG00000025770_4 (sequence is synthesized)
gacttccctgactcccggactaacgtggatctcaagaatgatcagacgcccagtgaggtcctcatcatccccctcctgcccatggccctggtggcccctgatgaaatggagaagaacaac

SEQ ID NO: 21446 - DNA, 120 bp, Artificial Sequence
  ENSG00000025770_5 (sequence is synthesized)
aatcccctgtacagccgtcagggtgaggtcctggccagccggaaggatttcaggatgaacacgtgcgttccccaccccagaggggccttcatgttggagccagagggcatgtcccccatg

SEQ ID NO: 21447 - DNA, 120 bp, Artificial Sequence
  ENSG00000025770_6 (sequence is synthesized)
gaaccagcgggcgtttcccccatgccagggacccagaaggacaccgggaggactgaggagcagccaatggaagtttccgtgtgcaggagccctgtcccagcactcggcttctcccaggag

SEQ ID NO: 21448 - DNA, 120 bp, Artificial Sequence
  ENSG00000025770_7 (sequence is synthesized)
ccaggcccctctccagaaggcccgatgcccctgggtgggggcgaggacgaggatgcagaggaggcagtagagcttcctgaggcctcggcccccaaggccgctctggagcccaaggagtcc

SEQ ID NO: 21449 - DNA, 120 bp, Artificial Sequence
  ENSG00000025770_8 (sequence is synthesized)
aggagcccgcagcagagtgctgccctgcccaggaggtacatgctgcgggagcgggagggggccccagagcctgcatcctgcgtgaaggagactccagacccctggcagagcctggacccc

SEQ ID NO: 21450 - DNA, 120 bp, Artificial Sequence
  ENSG00000025770_9 (sequence is synthesized)
tttgactccttggagtctaagcccttcaagaaaggtaggccttactctgtgcccccctgtgtggaggaggctctgggacagaagcgcaagaggaagggcgctgccaagctgcaggacttc

SEQ ID NO: 21451 - DNA, 120 bp, Artificial Sequence
  ENSG00000025770_10 (sequence is synthesized)
caccagtggtacctggctgcctatgcagaccatgccgacagcaggcggcttcggcgaaagggtccgtcctttgcagacatggaggtcctgtactggacacacgtgaaggagcagttggaa

SEQ ID NO: 21452 - DNA, 120 bp, Artificial Sequence
  ENSG00000025770_11 (sequence is synthesized)
actctccggaagctgcagaggagggaggtggctgagcagtggctgcggcctgcagaggaggaccacctggaggattccctggaagacctgggggcagcagatgactttctagagcctgag

SEQ ID NO: 21453 - DNA, 120 bp, Artificial Sequence
  ENSG00000025770_12 (sequence is synthesized)
gagtacatggagcccgagggagcagaccccagggaagccgctgaccttgacgcagtgccgatgtccctgagctacgaggagctggttcgaaggaatgtggagctcttcatcgccacctcc

SEQ ID NO: 21454 - DNA, 120 bp, Artificial Sequence
  ENSG00000025770_13 (sequence is synthesized)
ttgacatccacacctatggggaccagctggtctcacggttcccccagctcaatgagtggtgtccctttgcggagctggtggctggccagccggccttcgaggtgtgtcgttccatgctgg

SEQ ID NO: 21455 - DNA, 120 bp, Artificial Sequence
  ENSG00000025770_14 (sequence is synthesized)
cctccctgcagctggccaatgactacacagtggagataacccagcagcccgggctggagatggccgtggacaccatgtccctgagactgctcacgcaccagcgagcgcacaagcgcttcc

SEQ ID NO: 21456 - DNA, 120 bp, Artificial Sequence
  ENSG00000025770_15 (sequence is synthesized)
agacctacgctgccccctccatggcccagccctgagtggggagcaccgaggcaggggtgggggaatgtgtactgaggagccgtgtgtctgctcctggctggcccggcctaataaagcagt

SEQ ID NO: 21457 - DNA, 120 bp, Artificial Sequence
  ENSG00000025770_16 (sequence is synthesized)
gttgccatctcatcttccccctaaaaacccttttatgtacacctgcgcagagaagagggctgcctggcctccctgggccgctggtacagatcacacacacacacagattaaacgcagccc

SEQ ID NO: 21458 - DNA, 120 bp, Artificial Sequence
  ENSG00000025770_17 (sequence is synthesized)
gtttaatgatggggcccagactgcagtggctcaagacaggacactgcggaaagccgccatgtgccgccgcacactgtctgagatctgctcagccgatctgctccggccgtagtaatccgt

SEQ ID NO: 21459 - DNA, 120 bp, Artificial Sequence
  ENSG00000025770_18 (sequence is synthesized)
gaagaggccgtcagggttgagcaggtagatggcaatggagtggtccacgatgtagtcctggtcctcatccttggggcctgcattgtagtacacgcggtaactgtgactagcctgggcaac

SEQ ID NO: 21460 - DNA, 120 bp, Artificial Sequence
  ENSG00000025770_19 (sequence is synthesized)
ctgtttggtggagccggtcagacccaacagtcttgggtggaagtcctggacgtagcgggccatggcttcaacgtcgtcccgctcggggtccacagtgatgaagacaggctgcactggagg

SEQ ID NO: 21461 - DNA, 120 bp, Artificial Sequence
  ENSG00000025770_20 (sequence is synthesized)
caaaccaggctctgcttccagctgccgcaccacctgcaccagcttctccagctcgtctgggcagatgtcagggcagtgagtgaagccaaagtacatcagcacccactggccccggaagtc

SEQ ID NO: 21462 - DNA, 120 bp, Artificial Sequence
  ENSG00000025770_21 (sequence is synthesized)
agccttgcagcgagcccggcctctgtgatccagcaggtggaagtcgccctggcccacagctgcctggcgcagggcttctgttcgcttttgctgctgcagcctctccttctcagccctcag

SEQ ID NO: 21463 - DNA, 120 bp, Artificial Sequence
  ENSG00000025770_22 (sequence is synthesized)
ggccagccaggccccaccgagtccagccccgaacaggcctgtgatcagcagccgggttcgaagcccagggccctggggctggccctgcccacctgtctctgcagggccctgccttgacaa

SEQ ID NO: 21464 - DNA, 120 bp, Artificial Sequence
  ENSG00000025770_23 (sequence is synthesized)
aagccaggacctcagatgcagggcctggcctcccagggtcccagggaggacccgaggcttgagctgagagagcctgtgccaagctgtggggctccgagtcagcagcagcatggatctgat

SEQ ID NO: 21465 - DNA, 120 bp, Artificial Sequence
  ENSG00000025770_24 (sequence is synthesized)
gctcctggaaacaagcacaggcgtcaggagccagaagggaaggcccaggacagtgcctgggctgcccctgcgacttgagaccagccacccatctgaaggacccagcccacgttcaggctt

SEQ ID NO: 21466 - DNA, 120 bp, Artificial Sequence
  ENSG00000025770_25 (sequence is synthesized)
aacaggcatttgcagctgctcacctgagctcagaactccacctccaccaaacatccacacctgggcaaccacacctgtcactcctgtcctctacctgggatcaccagcctgtcaccgcac

SEQ ID NO: 21467 - DNA, 120 bp, Artificial Sequence
  ENSG00000025770_26 (sequence is synthesized)
cctgccctgcacctgcacctcagcaaggtgaacctcttgctgacggaaagcattccaagtgcatgccttgcctgaactaaccacgttatctatttgcaataaacccatttcttaaaagga

SEQ ID NO: 21468 - DNA, 73 bp, Artificial Sequence
  ENSG00000025770_27 (sequence is synthesized)
cactgccttggcctctcaaagcactgggattataggcgtgagccactgtgtccggtccctgtaggtttttttt

SEQ ID NO: 21469 - DNA, 120 bp, Artificial Sequence
  ENSG00000025770_28 (sequence is synthesized)
ccttggcctctcaaagcactgggattataggcgtgagccactgtgtccggtccctgtaggttttttttttttttttggacggagtcttgttcttttgcccaggctggagtgcagtggtgt

SEQ ID NO: 21470 - DNA, 67 bp, Artificial Sequence
  ENSG00000025770_29 (sequence is synthesized)
cttgtagggttcttgatgttaacccaaggtggagttcctggggtacccagagccttgaggggagaaa

SEQ ID NO: 21471 - DNA, 120 bp, Artificial Sequence
  ENSG00000025770_30 (sequence is synthesized)
tgcacaaggaggacagtggtatggccttggccccagaccactggtctggggcagaagcccacctgtcttgcagcccgtcctgcaaccagcccttttgaagagcagcttctgtgttcctcc

SEQ ID NO: 21472 - DNA, 120 bp, Artificial Sequence
  ENSG00000025770_31 (sequence is synthesized)
cctctctgagcagaactgatgctcctcagagtagtgggctggcgtccaaggatttgagccctgtcgagctcacggcaacctgggatggccgccggttgccaaggcgcctctctgcagtcg

SEQ ID NO: 21473 - DNA, 120 bp, Artificial Sequence
  ENSG00000025770_32 (sequence is synthesized)
ggctggtaggagggagtgtctggaggccattgctgcctccctcaacccccggggtcaactgtacccagcctagagccaagaaatccttcctttttattcattaaaacaaaatcaacctga

SEQ ID NO: 21474 - DNA, 120 bp, Artificial Sequence
  ENSG00000025772_0 (sequence is synthesized)
aaggtgtgccgcaccacacgggggaggaaggaaggagctcccaactcgccggcctggccacgggatggcccccaaattcccagactctgtggaggagctccgcgccgccggcaatgagag

SEQ ID NO: 21475 - DNA, 120 bp, Artificial Sequence
  ENSG00000025772_1 (sequence is synthesized)
tttccgcaacggccagtacgccgaggcctccgcgctctacggccgcgcgctgcgggtgctgcaggcgcaaggttcttcagacccagaagaagaaagtgttctctactccaaccgagcagc

SEQ ID NO: 21476 - DNA, 120 bp, Artificial Sequence
  ENSG00000025772_2 (sequence is synthesized)
atgtcacttgaaggatggaaactgcagagactgcatcaaagattgcacttcagcactggccttggttcccttcagcattaagcccctgctgcggcgagcatctgcttatgaggctctgga

SEQ ID NO: 21477 - DNA, 120 bp, Artificial Sequence
  ENSG00000025772_3 (sequence is synthesized)
gaagtaccctatggcctatgttgactataagactgtgctgcagattgatgataatgtgacgtcagccgtagaaggcatcaacagaatgaccagagctctcatggactcgcttgggcctga

SEQ ID NO: 21478 - DNA, 120 bp, Artificial Sequence
  ENSG00000025772_4 (sequence is synthesized)
gtggcgcctgaagctgccctcaatccccttggtgcctgtttcagctcagaagaggtggaattccttgccttcggagaaccacaaagagatggctaaaagcaaatccaaagaaaccacagc

SEQ ID NO: 21479 - DNA, 120 bp, Artificial Sequence
  ENSG00000025772_5 (sequence is synthesized)
tacaaagaacagagtgccttctgctggggatgtggagaaagccagagttctgaaggaagaaggcaatgagcttgtaaagaagggaaaccataagaaagctattgagaagtacagtgaaag

SEQ ID NO: 21480 - DNA, 120 bp, Artificial Sequence
  ENSG00000025772_6 (sequence is synthesized)
cctcttgtgtagtaacctggaatctgccacgtacagcaacagagcactctgctatttggtcctgaagcagtacacagaagcagtgaaggactgcacagaagccctcaagctggatggaaa

SEQ ID NO: 21481 - DNA, 120 bp, Artificial Sequence
  ENSG00000025772_7 (sequence is synthesized)
gaacgtgaaggcattctacagacgggctcaagcccacaaagcactcaaggactataaatccagctttgcagacatcagcaacctcctacagattgagcctaggaatggtcctgcacagaa

SEQ ID NO: 21482 - DNA, 120 bp, Artificial Sequence
  ENSG00000025772_8 (sequence is synthesized)
gaacccctgcctgaccttacccagagaagccatgggccacctgctctgtgcccgctcctgaaacccagcatgccccaagtgagctctgaagccccctcctcaatcccttgatggcctccc

SEQ ID NO: 21483 - DNA, 120 bp, Artificial Sequence
  ENSG00000025772_9 (sequence is synthesized)
accctgtaagaggctttgcttgttcaaattaaactcagtgtagtcaaacacagacatggttgttgcaccagaaaggtccccactagagctaagcgtgaagctgaagctctgtccctattc

SEQ ID NO: 21484 - DNA, 120 bp, Artificial Sequence
  ENSG00000025772_10 (sequence is synthesized)
ccccagcccagctagctgatcacaccaacagatcctcatcagcaaagcatttggctttgtcctgcccaagtgggctgcagactgagtgctgcccttgtagcttccccagaccccaactca

SEQ ID NO: 21485 - DNA, 120 bp, Artificial Sequence
  ENSG00000025772_11 (sequence is synthesized)
ctgcagttcatctgaacaacctgagctcctgggccggggtggaaggagggggataaacctaaggccctgatccaaagcagcctgttgagctggttctccagggctgcagtctctccaggt

SEQ ID NO: 21486 - DNA, 120 bp, Artificial Sequence
  ENSG00000025772_12 (sequence is synthesized)
gtacagctgctgtccctgccctgtcctgtccttgcacagtctcctatgtctgagccccagtgccttctgttcgggccctcctttggtgggaaggcagagccctgacccttgaatggttgt

SEQ ID NO: 21487 - DNA, 120 bp, Artificial Sequence
  ENSG00000025772_13 (sequence is synthesized)
ccttgactctgtgctgctgccttctgcagagaggcacctaagctgtttaaagagcccagtgattgtggctgctcctcctagaggtgggagggggcaagaggcctccttggtcagtgtcca

SEQ ID NO: 21488 - DNA, 120 bp, Artificial Sequence
  ENSG00000025772_14 (sequence is synthesized)
tgctttctgggcagggacttggttttttgttccaacagtggccttctccgggcttcatagttctttgtaatatgttgaagttaatttgaattgactgattttgttgaactgtgtgtttaa

SEQ ID NO: 21489 - DNA, 120 bp, Artificial Sequence
  ENSG00000025772_15 (sequence is synthesized)
gctgttgcattaaaaagctttcttctacatcaatatctgctgtgctttcatttatgccttttcagctttgcacctggaactctgtagtaataataaaagttattgcttattgggcattca

SEQ ID NO: 21490 - DNA, 120 bp, Artificial Sequence
  ENSG00000025796_0 (sequence is synthesized)
ctctcgcgagagctggcgacggcggcggcagcggcagaggtggcggcggcgtgtccgtgagagtggcgtgggggcggggaggagaggcggcggcggcagtgtccaagctacgccactcgg

SEQ ID NO: 21491 - DNA, 120 bp, Artificial Sequence
  ENSG00000025796_1 (sequence is synthesized)
gccggggcgttgggagcgggagtgcagagcgtggtcgtggcggcggcggtgagaagagcgaggcggaggagggggtgccatggccgggcagcagttccagtacgatgacagtgggaacac

SEQ ID NO: 21492 - DNA, 120 bp, Artificial Sequence
  ENSG00000025796_2 (sequence is synthesized)
cttcttctacttcctcacctccttcgtggggctcatcgtgatcccggcgacatactacctctggccccgagatcagaatgccgagcaaattcgattaaagaatatcagaaaagtatatgg

SEQ ID NO: 21493 - DNA, 120 bp, Artificial Sequence
  ENSG00000025796_3 (sequence is synthesized)
aaggtgtatgtggtatcgtttacggttattaaaaccccagccaaatattattcctacagtaaagaaaatagttctgcttgcaggatgggcattgttcttattccttgcatataaagtttc

SEQ ID NO: 21494 - DNA, 120 bp, Artificial Sequence
  ENSG00000025796_4 (sequence is synthesized)
caaaacagaccgagaataccaagaatacaatccttatgaagtattaaatttggatcctggagccacagtagcagaaattaaaaaacaatatcgtttgctgtcacttaaatatcatccaga

SEQ ID NO: 21495 - DNA, 120 bp, Artificial Sequence
  ENSG00000025796_5 (sequence is synthesized)
taaaggaggtgatgaggttatgttcatgaggatagcaaaagcttatgctgctttaacggatgaagagtcccggaaaaattgggaagaatttggaaatccagatgggcctcaagccacaag

SEQ ID NO: 21496 - DNA, 120 bp, Artificial Sequence
  ENSG00000025796_6 (sequence is synthesized)
ctttggaattgccctgccagcttggatagttgaccagaaaaactcaattctggttttacttgtatatggattggcatttatggttatccttccagttgttgtgggctcttggtggtatcg

SEQ ID NO: 21497 - DNA, 120 bp, Artificial Sequence
  ENSG00000025796_7 (sequence is synthesized)
ctcaatacgctatagtggagaccagattctaatacgcacaacacagatttatacatactttgtttataaaacccgaaatatggatatgaaacgtcttatcatggttttggctggagcttc

SEQ ID NO: 21498 - DNA, 120 bp, Artificial Sequence
  ENSG00000025796_8 (sequence is synthesized)
tgaatttgatcctcagtataataaagatgccacaagcagaccaacggataatattctaataccacagctaatcagagaaattggcagcattaatttaaagaagaatgagcctccacttac

SEQ ID NO: 21499 - DNA, 120 bp, Artificial Sequence
  ENSG00000025796_9 (sequence is synthesized)
ctgcccatatagcctgaaggccagagttcttttactgtctcatcttgctagaatgaaaattcctgagacccttgaagaagatcagcaattcatgctaaaaaagtgtcctgccctacttca

SEQ ID NO: 21500 - DNA, 120 bp, Artificial Sequence
  ENSG00000025796_10 (sequence is synthesized)
agaaatggttaatgtaatctgccaactaatagtaatggcccggaaccgtgaagaaagggagtttcgtgctccaactttggcatccctagaaaactgcatgaagctttctcagatggccgt

SEQ ID NO: 21501 - DNA, 120 bp, Artificial Sequence
  ENSG00000025796_11 (sequence is synthesized)
tcagggacttcagcaatttaagtctccccttctgcagctccctcatattgaagaggacaatcttagacgggtttctaatcataagaagtataaaattaaaactatccaggatttggtgag

SEQ ID NO: 21502 - DNA, 120 bp, Artificial Sequence
  ENSG00000025796_12 (sequence is synthesized)
tttaaaagaatcagatcgtcacactctactgcacttccttgaagatgaaaaatatgaagaggttatggctgtccttgggagttttccatatgtgaccatggatataaaatcacaggtgtt

SEQ ID NO: 21503 - DNA, 120 bp, Artificial Sequence
  ENSG00000025796_13 (sequence is synthesized)
agatgatgaagatagcaacaacatcacagtaggatccttagttacagtgttggttaagttgacaaggcaaacaatggctgaagtatttgaaaaggagcagtccatctgtgctgcagagga

SEQ ID NO: 21504 - DNA, 120 bp, Artificial Sequence
  ENSG00000025796_14 (sequence is synthesized)
acagccagcagaagatgggcagggtgaaactaacaagaacaggacaaaaggaggatggcaacagaagagtaaaggacccaagaaaactgctaaatcaaaaaaaaagaaacctttaaaaaa

SEQ ID NO: 21505 - DNA, 120 bp, Artificial Sequence
  ENSG00000025796_15 (sequence is synthesized)
aaaacctacacctgtgctattaccacagtcaaagcaacagaaacaaaagcaggcaaatggagtcgttgggaatgaagctgcagtaaaggaagatgaagaagaagtttcagataagggcag

SEQ ID NO: 21506 - DNA, 120 bp, Artificial Sequence
  ENSG00000025796_16 (sequence is synthesized)
tgattctgaagaagaagaaaccaatagagattcccaaagtgagaaagatgatggtagtgacagagactctgatagagagcaagatgaaaaacaaaacaaagatgatgaagcagagtggca

SEQ ID NO: 21507 - DNA, 120 bp, Artificial Sequence
  ENSG00000025796_17 (sequence is synthesized)
agaattacaacaaagcatacagcgaaaagagagagctctattggaaaccaaatcaaaaataacacatcctgtgtatagcctttactttcctgaggaaaaacaagaatggtggtggcttta

SEQ ID NO: 21508 - DNA, 120 bp, Artificial Sequence
  ENSG00000025796_18 (sequence is synthesized)
cattgcagataggaaggagcagacattaatatccatgccatatcatgtgtgtacgctgaaagatacagaggaggtagagctgaagtttcctgcaccaggcaagcctggaaattatcagta

SEQ ID NO: 21509 - DNA, 120 bp, Artificial Sequence
  ENSG00000025796_19 (sequence is synthesized)
tactgtgtttctgagatcagactcctatatgggtttggatcagattaaaccattgaagttggaagttcatgaggctaagcctgtgccagaaaatcacccacagtgggatacagcaataga

SEQ ID NO: 21510 - DNA, 120 bp, Artificial Sequence
  ENSG00000025796_20 (sequence is synthesized)
gggggatgaagaccaggaggacagtgagggctttgaagatagctttgaggaagaagaggaggaagaagaagatgatgactaagcagtactctgaatggaccacagtgtttgcacatattt

SEQ ID NO: 21511 - DNA, 120 bp, Artificial Sequence
  ENSG00000025796_21 (sequence is synthesized)
gcaattttttgctgttttggaagtgtatcataaaccagaaacagtacagaactgatgttgagggaggtgtagtttttttactcttgaaatgggtgcataatataactaggcagtggcggt

SEQ ID NO: 21512 - DNA, 120 bp, Artificial Sequence
  ENSG00000025796_22 (sequence is synthesized)
gccttggtacaacctgaaaaatgttaaggcttattgaaacctttcaagtaggggatggtacatttatttcatctgcaaatgataataaatcctttgttattataactgtccagaagtgtg

SEQ ID NO: 21513 - DNA, 120 bp, Artificial Sequence
  ENSG00000025796_23 (sequence is synthesized)
ggctatgtattatctgatcagtctatggtcccagtaaaagtaaagatgcaggaaacacagtctgtaaatgagcgacttttctttgttcagctttagttttagcaaacaccacaaatatgt

SEQ ID NO: 21514 - DNA, 120 bp, Artificial Sequence
  ENSG00000025796_24 (sequence is synthesized)
tttaagtaacatcgctcaagtttaagtaacatcgctcaagttgataatctcttgataagctctgttgttgacattttgcagtgatacaacagctccactcatagatttaaacttttattt

SEQ ID NO: 21515 - DNA, 120 bp, Artificial Sequence
  ENSG00000025796_25 (sequence is synthesized)
ttacttatcttggtcataagttggcattctctcacattccacatgatatagagggctacgttttggaattttccttttcttaattgcccagagttatcagacagattataaaaatggctt

SEQ ID NO: 21516 - DNA, 120 bp, Artificial Sequence
  ENSG00000025796_26 (sequence is synthesized)
tctagctctaaaagtgatagtgggactgtatgttttctgatactggtggcttatgttattaaaccttttttaaaaaaggttcactctaaaagctgaactacatccttagttttcagtcta

SEQ ID NO: 21517 - DNA, 120 bp, Artificial Sequence
  ENSG00000025796_27 (sequence is synthesized)
cttgactctatcaggagctttttaaggaaagtaagtataacatgcaaaggaagctttttttgtattcattttggactcctgtcaataaaaatagaagtttgttgactcgttttatgtttc

SEQ ID NO: 21518 - DNA, 120 bp, Artificial Sequence
  ENSG00000025796_28 (sequence is synthesized)
aatggtgtgtgtctttttactatcaggacataaatagggcaatccacttctttatttttcaactaaagattgaatagtattgtacattactgctaaagtgactgctatttctgtatactg

SEQ ID NO: 21519 - DNA, 120 bp, Artificial Sequence
  ENSG00000025796_29 (sequence is synthesized)
tagaaaaacccaggagtgagagggatttcccctcatagtacaactggaaggatagtgcttgtaaagagtagagatgtgtacatgatgaatcattgagggagggtggatatttttattcct

SEQ ID NO: 21520 - DNA, 120 bp, Artificial Sequence
  ENSG00000025796_30 (sequence is synthesized)
agatatggaggaaacataagtctgtagtattataaaactgattgtaataattctttcctatcaaaatctccataggtcaaaatattgttggaatactaaaatttgcaaccttgtttactt

SEQ ID NO: 21521 - DNA, 120 bp, Artificial Sequence
  ENSG00000025796_31 (sequence is synthesized)
taaaaggttgccactttcagtgcagaatactaccggcatcttgttactgcaatagttggaaataaaatgtgaaaattagcaaaaccatgaatggtttttttggttctaaatttaagatgt

SEQ ID NO: 21522 - DNA, 120 bp, Artificial Sequence
  ENSG00000025796_32 (sequence is synthesized)
aatatttcctataaaagggtgaaagcagtttctttctctataacctcaatcaccagtttagtgagagcctttcttggcaggcaggaggcagtgtcactgaggatttttttcatttacttc

SEQ ID NO: 21523 - DNA, 120 bp, Artificial Sequence
  ENSG00000025796_33 (sequence is synthesized)
attgtacaagtaggagggtgggtttaattttcaaatcaggttctgctgtgaagcaccagtgtcttgaggcagctactgattacctaagtgtggtggcagggggtaagccagctggtgtca

SEQ ID NO: 21524 - DNA, 120 bp, Artificial Sequence
  ENSG00000025796_34 (sequence is synthesized)
agtgaaaggagggattagagaaaacaggtgtggcacgaaggcaaggaaactgagcagacaagacagaacaatgtgtagaatgcatatttcctagttttcttgaaagatttcaagaaaagt

SEQ ID NO: 21525 - DNA, 120 bp, Artificial Sequence
  ENSG00000025796_35 (sequence is synthesized)
tgtttttttttttctagtggctactttgccttaaagaggctttataagttcattcacacagctggcttctctggttttaagattctggagaggatgataacctagtaacaccacagtgct

SEQ ID NO: 21526 - DNA, 120 bp, Artificial Sequence
  ENSG00000025796_36 (sequence is synthesized)
taaaaaaaaaaaaaaaaaaaaaactaccatcaccagaaaattccaccagtttgttttccttttctctttgtgtgatgtgtatgtacttcccaactaagtaaaataaaatttcctctagtg

SEQ ID NO: 21527 - DNA, 120 bp, Artificial Sequence
  ENSG00000025796_37 (sequence is synthesized)
agtgctttaggtaacctctttccatatggcagtagtgaaagaactgagccttcagttgatagttcttctctctccagcaagtcgctaaactccacatcccttcgtttttcctctggaatg

SEQ ID NO: 21528 - DNA, 120 bp, Artificial Sequence
  ENSG00000025796_38 (sequence is synthesized)
agaataacaaactatcctagtttgcatttaatctaatggaaacttgagcaaagtttcaattttcttcctataaagaaactgacattttgtcaacaattgatgagcctatagatcatacag

SEQ ID NO: 21529 - DNA, 120 bp, Artificial Sequence
  ENSG00000025796_39 (sequence is synthesized)
tgtataggaagtgaaattgaaacagttaaattatgtgatatttttctctaattggtaaagtacctattaaaatacagctgttcatgaggagacttaccacaattcaaagtgtagcagttg

SEQ ID NO: 21530 - DNA, 120 bp, Artificial Sequence
  ENSG00000025796_40 (sequence is synthesized)
tgtattttagcattataatatttgattgaggccctgaggtgttaatatctcaatctcagagttagatgttcatgtcctttttgaattttttaaacatttttcataattttttttttaagt

SEQ ID NO: 21531 - DNA, 120 bp, Artificial Sequence
  ENSG00000025796_41 (sequence is synthesized)
tagggagcacattgagtgaagttctctgtgtagaacaataccttctgctctgcttctcccagctttcactgagggctggaaaaggacaggcctgtccagctgtactgtcccactgtgtat

SEQ ID NO: 21532 - DNA, 120 bp, Artificial Sequence
  ENSG00000025796_42 (sequence is synthesized)
ggggaagctcaggctctggtggaagcagggggcgtggatgtcaaacaactgatgtggaaacagggagggagagatataatgaggctctctaggcatgttatttttgaccacaagttttgt

SEQ ID NO: 21533 - DNA, 120 bp, Artificial Sequence
  ENSG00000025796_43 (sequence is synthesized)
tcagtttgcttcagccaatccaaaccatatactagagtgttctgtagtcacaattcttatttcaaatgtaattcagcaccttacataatttttgagaggttgtcattcatcacatattta

SEQ ID NO: 21534 - DNA, 120 bp, Artificial Sequence
  ENSG00000025796_44 (sequence is synthesized)
ctgagtttctatgtgccaggctctgtgactggatactggagctatcaaaatgaaaaaaatagtgttaagaactcactcgctggtgttagagcaggtagatgagtggcaatccatttaaat

SEQ ID NO: 21535 - DNA, 120 bp, Artificial Sequence
  ENSG00000025796_45 (sequence is synthesized)
ccatttgccttggctattatttggaatgcctttttttttttttagtctatctactgtaggcagaagaattatttctttaggggctagctgtttattttgctggcctttttttctctcttt

SEQ ID NO: 21536 - DNA, 87 bp, Artificial Sequence
  ENSG00000025796_46 (sequence is synthesized)
gggctagctgtttattttgctggcctttttttctctctttctctttttcttcttaagacggagtctcgctctgtcctccaggctgga

SEQ ID NO: 21537 - DNA, 86 bp, Artificial Sequence
  ENSG00000025796_47 (sequence is synthesized)
gcatgccaccacacccagctaattttttaatttttagtagagatgggattttgccacgttgtccagcctcctcagcctcccaaagt

SEQ ID NO: 21538 - DNA, 120 bp, Artificial Sequence
  ENSG00000025796_48 (sequence is synthesized)
tacaggcatgagccactgcgcccagcctgttgggtttttttggaaaaaaaacaaaaacaacaaatcatcatcctttcctttaaaatgtttttttttttttaagaaacaattttcccacaa

SEQ ID NO: 21539 - DNA, 120 bp, Artificial Sequence
  ENSG00000025796_49 (sequence is synthesized)
ttttttttttttaagaaacaattttcccacaaacggtctgatttaactccatgaaatcctctatttagactgccttaaagtgaaataactgttggtgaaccataacattttgccagctgt

SEQ ID NO: 21540 - DNA, 120 bp, Artificial Sequence
  ENSG00000025796_50 (sequence is synthesized)
gtagtgattagtccaaatatgtctcaagaagttagcaccaagcattctcatccatttaaacttgatgctagggctattttgcaaaacttaaaaagatgcgatcttgtacatatttctgta

SEQ ID NO: 21541 - DNA, 120 bp, Artificial Sequence
  ENSG00000025796_51 (sequence is synthesized)
acctgagctgaaaacccaaataacaatcattgacatactttagggctattgtttcaggtgggggtgtatacatcccaggggcgtggagatgatcaatccattgaggaagtattaagatga

SEQ ID NO: 21542 - DNA, 120 bp, Artificial Sequence
  ENSG00000025796_52 (sequence is synthesized)
atgatcaatccattgaggaagtattaagatgattatttgtatttaatctcatccttttaaatttctatttttgtgtgttttataatgtacataatatattgtacaattgtacacttctat

SEQ ID NO: 21543 - DNA, 120 bp, Artificial Sequence
  ENSG00000025796_53 (sequence is synthesized)
agtctccctataacattttaaatgtatgttagaatataacccattgatccttgaatttaagagtcttgccactgaaggtgaggtgggaggatcgcttgagcctaggtgtttgaggttgcg

SEQ ID NO: 21544 - DNA, 120 bp, Artificial Sequence
  ENSG00000025796_54 (sequence is synthesized)
tttagccctctgtcgtgtgtattagttcatatgtgctaaatgtggtctatcctgagaggccatatttttaaaagggaatattacaataggtattatacttagtgaacgtgttgcttataa

SEQ ID NO: 21545 - DNA, 120 bp, Artificial Sequence
  ENSG00000025796_55 (sequence is synthesized)
gaacctatttttcctagtgaaagaaatattttatttacttttccaattgacttatattgctctgggagagtaattcagtttagctatttccacctaaaaattactacaaccttcaattga

SEQ ID NO: 21546 - DNA, 120 bp, Artificial Sequence
  ENSG00000025796_56 (sequence is synthesized)
atctgttgctataacttaagagtgtgacgtgttatgattcacagcagggtgaaactaacaagaacaggacaaaaggaggatggcaacagaagagtaaaggacccaagaaaactgctaaat

SEQ ID NO: 21547 - DNA, 120 bp, Artificial Sequence
  ENSG00000025796_57 (sequence is synthesized)
gcgacatactacctctggccccgagatcagaatgccgcggggagagtctcatttacccaggctggtcttgaacttgcttcaagtcatcctcccgcttcagccccccgagtagctggcctt

SEQ ID NO: 21548 - DNA, 120 bp, Artificial Sequence
  ENSG00000025796_58 (sequence is synthesized)
agacttgagccactgtgtcaggatggatttttgaaatttgaaagtcatattttcatgcccagttgcagtatcttgaatatgaaagagaaatcttgaattactgcctcattcaaagctctg

SEQ ID NO: 21549 - DNA, 120 bp, Artificial Sequence
  ENSG00000025796_59 (sequence is synthesized)
aataaggaacttttttcagaagtttgctgcaaaataatttgccgacttgtactgacaggaggctactgaataatctttatctcacttaataaatagttatgttctgtcttggaatattaa

SEQ ID NO: 21550 - DNA, 120 bp, Artificial Sequence
  ENSG00000025796_60 (sequence is synthesized)
tttcatttgttcactcactgtgggggttggaagcaatgccgttattcctcttagcaaaaataggcttttttctatttccttttcttcggagtttcctgtttgtgacggaaaaagtgcaaa

SEQ ID NO: 21551 - DNA, 120 bp, Artificial Sequence
  ENSG00000025796_61 (sequence is synthesized)
tatgattgatgtttttgaaagcagaaccatcttagcctttgtgttattgggctttgcaaatagaaatacttttatttgacaaattatgaagaatgaataaaataactaacaatagacaga

SEQ ID NO: 21552 - DNA, 120 bp, Artificial Sequence
  ENSG00000025796_62 (sequence is synthesized)
ctagccagatattaaactctttagtctgactcccacatctttataagtaggaatgtttataattttaaaaaattgtatatgaatagtgaaattgtcatcgagtcagtttagttaaattga

SEQ ID NO: 21553 - DNA, 120 bp, Artificial Sequence
  ENSG00000025796_63 (sequence is synthesized)
gattttttaaccatttcggacaattgagagtttagaatagtctagtactattttggttaaataaatatttagaacatcctagagtttattttgttttaagctgtaaaacatttttcttta

SEQ ID NO: 21554 - DNA, 120 bp, Artificial Sequence
  ENSG00000025796_64 (sequence is synthesized)
aactgttttagaaagatacttccctacccaactcttaaaacaggtgttaataagcaggtgactaaatagtgaactgaggtgtgctgtaatagagcagttgttgctgaatgcacggaggtt

SEQ ID NO: 21555 - DNA, 120 bp, Artificial Sequence
  ENSG00000025796_65 (sequence is synthesized)
ttgctgaatgcacggaggtttcgtgctttcagacttcttggccttctaaaatatatatatacacacacacatatatgtatatgtatatatgtgtatatatatatatatacacacacatat

SEQ ID NO: 21556 - DNA, 120 bp, Artificial Sequence
  ENSG00000025796_66 (sequence is synthesized)
aactttgtggcttttgcttattactaggtaagagtactaagattatttgctacatgctattgtaatagttgtatatatttagaataatgcttgttacttaaggttagtcagggtttttaa

SEQ ID NO: 21557 - DNA, 120 bp, Artificial Sequence
  ENSG00000025796_67 (sequence is synthesized)
tatgaaggccaatcaataggttttaaggagctattgaaatccccaaaattgcatacaaaatgcttttaggcaatggatctacaaatgttaagaacagcttattctttcagtaaatattca

SEQ ID NO: 21558 - DNA, 120 bp, Artificial Sequence
  ENSG00000025796_68 (sequence is synthesized)
tttgaatacctattttgtaccaagcagtttgtcagtgcagaggatctctaagataagagaggccaaaattatattctttctagttctttctgattatttatacccctcttcttttttttt

SEQ ID NO: 21559 - DNA, 120 bp, Artificial Sequence
  ENSG00000025796_69 (sequence is synthesized)
agtgctgggattacaggaatgagccatctcgcccagcctatcgtagtttttatactttctttcttgtttaattttttttgtgttttagggctcttggtggtatcgctcaatacgctatag

SEQ ID NO: 21560 - DNA, 120 bp, Artificial Sequence
  ENSG00000025800_0 (sequence is synthesized)
atattgtctactgaaagctgccgctgaagctgccgccgttgcctccgccgccaagagtgagcgagcggacccgcgatggagaccatggcgagcccagggaaagacaattatcgaatgaag

SEQ ID NO: 21561 - DNA, 120 bp, Artificial Sequence
  ENSG00000025800_1 (sequence is synthesized)
agctataagaacaatgctctaaaccctgaagaaatgagacgaagaagagaggaagagggcattcagctccggaagcagaagcgagagcaacaactttttaaacggagaaatgtggagctg

SEQ ID NO: 21562 - DNA, 120 bp, Artificial Sequence
  ENSG00000025800_2 (sequence is synthesized)
attaatgaagaagctgccatgttcgatagtcttctcatggactcttatgtgagctctaccactggggagagtgtgatcacaagagagatggtggagatgctcttttctgatgattctgac

SEQ ID NO: 21563 - DNA, 120 bp, Artificial Sequence
  ENSG00000025800_3 (sequence is synthesized)
ctgcagttagcaaccacacagaaattccggaaactgctctccaaagagcctagtcctccaatagatgaagttatcaacactccaagagtggtggatcggttcgtggagtttctgaagagg

SEQ ID NO: 21564 - DNA, 120 bp, Artificial Sequence
  ENSG00000025800_4 (sequence is synthesized)
aatgagaattgtacattacagtttgaagctgcctgggctctaacgaatattgcctctggaacctctcagcagaccaaaattgtcattgaagcaggggctgtccccatttttatagagctg

SEQ ID NO: 21565 - DNA, 120 bp, Artificial Sequence
  ENSG00000025800_5 (sequence is synthesized)
cttaattcagactttgaggatgttcaggaacaggcagtctgggcactgggaaacatagctggagatagctctgtttgccgagattacgtcttgaactgttccatccttaatcctttgtta

SEQ ID NO: 21566 - DNA, 120 bp, Artificial Sequence
  ENSG00000025800_6 (sequence is synthesized)
acactccttaccaagtccacacgactgacgatgacacggaatgcagtctgggccctgtcaaatctctgccgagggaaaaacccacccccagagtttgcaaaggtctctccttgtttgcct

SEQ ID NO: 21567 - DNA, 120 bp, Artificial Sequence
  ENSG00000025800_7 (sequence is synthesized)
gtactgtctcgcctactcttcagcagcgactcggacttgctggcagatgcttgctgggccctttcttatctgtctgatggccccaatgagaagatccaggcagtcatagactccggagtc

SEQ ID NO: 21568 - DNA, 120 bp, Artificial Sequence
  ENSG00000025800_8 (sequence is synthesized)
tgccggagattggtagagctgctgatgcacaatgattacaaagtggcttctcctgccctgagagccgtgggtaacatcgtcactggggatgacatccagacccaggtcattcttaactgt

SEQ ID NO: 21569 - DNA, 120 bp, Artificial Sequence
  ENSG00000025800_9 (sequence is synthesized)
tcagccctaccttgccttctccacttgttgagcagtcccaaggagtcaatccggaaggaagcttgctggactatttcaaatattactgctggcaacagggctcaaatacaggctgttata

SEQ ID NO: 21570 - DNA, 120 bp, Artificial Sequence
  ENSG00000025800_10 (sequence is synthesized)
gatgcaaatatcttccctgtgttgatcgaaatccttcagaaagcagagtttcgtacaaggaaagaggcagcctgggccatcaccaatgccacatcaggaggaacccctgagcagatcagg

SEQ ID NO: 21571 - DNA, 120 bp, Artificial Sequence
  ENSG00000025800_11 (sequence is synthesized)
tacctggtctcactgggctgcatcaaacccctatgtgacttgctgactgtaatggattcgaagattgtgcaagtggccctcaatggactggagaacatcctgcggcttggagagcaagag

SEQ ID NO: 21572 - DNA, 120 bp, Artificial Sequence
  ENSG00000025800_12 (sequence is synthesized)
ggcaagcgcagtggctcaggggtcaatccttattgtggcctcatagaggaagcctatggcttggataaaattgagtttctccagagccacgagaaccaggagatctaccagaaggccttc

SEQ ID NO: 21573 - DNA, 120 bp, Artificial Sequence
  ENSG00000025800_13 (sequence is synthesized)
gacctcattgagcactactttggtgtagaagacgatgatagcagcctggctccccaagtcgatgaaacgcaacagcagttcatcttccagcagcctgaggcccccatggagggcttccag

SEQ ID NO: 21574 - DNA, 120 bp, Artificial Sequence
  ENSG00000025800_14 (sequence is synthesized)
ctataatatctgcctccagggaggggaggggatgggaagcaccaccagccagcggaagagcagccctctggtgggcgggaaaccagtgtccccaccatcagccaccacacacctctgctg

SEQ ID NO: 21575 - DNA, 120 bp, Artificial Sequence
  ENSG00000025800_15 (sequence is synthesized)
ccctggagactgtgctcttgacctgctccgcccccttccctggagggagcaccctctggacagacagaaccatctgaggctcacctttgggttttgtgacaagaaggggacgtgttgggt

SEQ ID NO: 21576 - DNA, 120 bp, Artificial Sequence
  ENSG00000025800_16 (sequence is synthesized)
ttttcttccttacactatattttggctgcacacatgtctttaacccaggagcccaggggtagacaaaggaggactaaggtaatcaatttgcacctttttttatttttattttttttcttt

SEQ ID NO: 21577 - DNA, 120 bp, Artificial Sequence
  ENSG00000025800_17 (sequence is synthesized)
ttttcttcagtggtgacttccttccctttatcttttttcattcttcccggtcctctgccctgatctgtgtaactcttatcttgggtacttgagcagacggtatattccagaggtgggagg

SEQ ID NO: 21578 - DNA, 120 bp, Artificial Sequence
  ENSG00000025800_18 (sequence is synthesized)
tgggaggggaagggagaaatccaaaacaaagtgttcttgctctgacagaatattaatcttgtacgcttggattgagttatttaatttttttttcttttgcacatttttcttgtattaaga

SEQ ID NO: 21579 - DNA, 120 bp, Artificial Sequence
  ENSG00000025800_19 (sequence is synthesized)
ttgctcttcccaagagccacaagttcctggttttagtaaacccagctgcctgcattgcctgggactagaggctggggaggctaccatgaaacaaaggtccctccctccctctgactcttt

SEQ ID NO: 21580 - DNA, 120 bp, Artificial Sequence
  ENSG00000025800_20 (sequence is synthesized)
gcccagacctctttagtttgggggatcctcctcactctcctgaagtgtctcaagtataccagtgggagtgcaggggaggagcacaggccttcagatggggcttcccacgtgtagctactg

SEQ ID NO: 21581 - DNA, 120 bp, Artificial Sequence
  ENSG00000025800_21 (sequence is synthesized)
atcccatatttcctactcaccttccaaatggtgcgacccaacttcatttgtttacttgaaaattccccctcgaggttgagagaacctctgaggtggctgtattttctcctaagcttgaga

SEQ ID NO: 21582 - DNA, 120 bp, Artificial Sequence
  ENSG00000025800_22 (sequence is synthesized)
tagggggctgtggtccttcctttctcctgaggagaaagtccttgctctggtgacctgtaagttgcagaggagggtggagtgagagtgtcatgtattgggatagtcagggatccctgcctt

SEQ ID NO: 21583 - DNA, 120 bp, Artificial Sequence
  ENSG00000025800_23 (sequence is synthesized)
tggcctttcttcttcttcttcttcctcttccatagttggatcatgtatattttacttctaaaggagagaatgtcaaaaagttctgtatttttttatattctatatattaggtaggtcaat

SEQ ID NO: 21584 - DNA, 120 bp, Artificial Sequence
  ENSG00000025800_24 (sequence is synthesized)
cttaattggtctcaagaggaagaactgtctgtcatttcggtaagtaggatactgtgaggaagaccaaaaagagatatggatgcttcctcgctcaggaggcctgagcttggtccttttcct

SEQ ID NO: 21585 - DNA, 120 bp, Artificial Sequence
  ENSG00000025800_25 (sequence is synthesized)
ctctgcttggattctggaccaccacctgggaccaaccttcagctctggaaccttcataaagcaggtcagcgtggcctgattgtcccaggacctgaagggagcaaggatggcctcagggcc

SEQ ID NO: 21586 - DNA, 120 bp, Artificial Sequence
  ENSG00000025800_26 (sequence is synthesized)
tggtgaagtctgctactctgtccttactgctgaacatcctgcttgtatcaggaaactcagaagcagtttgccttgtcaaattcaatctcaatggccattgtccacataactgatcaccca

SEQ ID NO: 21587 - DNA, 120 bp, Artificial Sequence
  ENSG00000025800_27 (sequence is synthesized)
tggctgcctctcctattatctattatcactgaaacttagtagcctgctttttttttttttttttttagagctattgcgtatcttccctgtttgggatccttgtacctggtttgggttttc

SEQ ID NO: 21588 - DNA, 120 bp, Artificial Sequence
  ENSG00000025800_28 (sequence is synthesized)
ccttccttgtgacaattataatccagatgcctcttctttctgtttgaattacggtagtgcattgccttagtggcttgcctgtgcctctgggtggattacatatgatagtaaagcccacct

SEQ ID NO: 21589 - DNA, 120 bp, Artificial Sequence
  ENSG00000025800_29 (sequence is synthesized)
gtttggatgggagtagaggaagttggtgtagaccagctgtggagctgaaggcacagtctgccccacccccacctccccactgtggttagtcagaggcatcctgctccaagctctgctttt

SEQ ID NO: 21590 - DNA, 120 bp, Artificial Sequence
  ENSG00000025800_30 (sequence is synthesized)
gctacacatctccttctggctcaggtgaaatccatgcccttctgcttatagacctaaagttcaggtacttattattggccattgatcttgaatttgccctctcctagtgctgcagtccca

SEQ ID NO: 21591 - DNA, 120 bp, Artificial Sequence
  ENSG00000025800_31 (sequence is synthesized)
cttcaaagccattttctgaggaggatggtttaggtctggcaattgtccttgaaaaatcccacccatgttgtaccaccttggtgagtcatatgccactcatcagcttgggaatgatggctg

SEQ ID NO: 21592 - DNA, 120 bp, Artificial Sequence
  ENSG00000025800_32 (sequence is synthesized)
ccaactcccaatctcccaggaaggcagggggcagaatctttttttcacttggcctgctacctccattaaaaaaccattctcttacagtttaaaaaaaaaaaaaaaaaaaaagccttcccc

SEQ ID NO: 21593 - DNA, 120 bp, Artificial Sequence
  ENSG00000025800_33 (sequence is synthesized)
tacccaacctccgcccattgttctcttccaaagggcaatttagtaggatctactttgtacatctcaagtaagagttaagtccctgatacagggaccagtttcttagtgtaagacatacac

SEQ ID NO: 21594 - DNA, 120 bp, Artificial Sequence
  ENSG00000025800_34 (sequence is synthesized)
atcctgcttgtccagctgttcctccaaaatctactttggcttcagctccgggtcctgtaccagatggaaaatgtttttggtgatctggctgctgcttaaagccagttttccctaagaact

SEQ ID NO: 21595 - DNA, 120 bp, Artificial Sequence
  ENSG00000025800_35 (sequence is synthesized)
ccaaaggctaaagtctactaggggcagagtgtgaggatagatttctaatcagagaaaagtggcctccaggagctttcatttatgtcttctccagaccaggttttcctgttatcttccttt

SEQ ID NO: 21596 - DNA, 120 bp, Artificial Sequence
  ENSG00000025800_36 (sequence is synthesized)
aatcccctttcaaccaacaggtgaagttcttccagcccacagaggtagtaatatcatcttttctatctcctcctctcctttggccatgtaatgaagcaaaatattatttatttagcccag

SEQ ID NO: 21597 - DNA, 120 bp, Artificial Sequence
  ENSG00000025800_37 (sequence is synthesized)
gcttgagagccactgtttgtggacagtcttcatctagattccataccctggcctaggcgaggtaaggctctctggttattgccaggatggagcccctctaccccagtctgctgtagggaa

SEQ ID NO: 21598 - DNA, 120 bp, Artificial Sequence
  ENSG00000025800_38 (sequence is synthesized)
taccctaattagttgaggcatgcttttggaatcctggcatgttggcatatggctggtctatcctttttaagatctctggttgggggtatctggatatggattaggagggacaaggagcct

SEQ ID NO: 21599 - DNA, 120 bp, Artificial Sequence
  ENSG00000025800_39 (sequence is synthesized)
ttttcttggctaatgttttccaatacttttttgaatggtgccagcccctccaggcatcccacccccaaatcatcatctttagtactaacagggtgtctggtcttagaagcctcccttcag

SEQ ID NO: 21600 - DNA, 120 bp, Artificial Sequence
  ENSG00000025800_40 (sequence is synthesized)
atcccagctgaccctggtgactgcctggccttgatgttggctgcagccttctgatagaaccacatggattccacccacagctggccaggcttgttacatgggtcagggaatacaaatggc

SEQ ID NO: 21601 - DNA, 120 bp, Artificial Sequence
  ENSG00000025800_41 (sequence is synthesized)
ccccccccagggagcaggtgttggcctcagttttcagggacccttggtgttgctccttacctagagcccattaatctaccccatcaactctctgccatgaaagccatcttccaggagccc

SEQ ID NO: 21602 - DNA, 120 bp, Artificial Sequence
  ENSG00000025800_42 (sequence is synthesized)
tgttttttggagctgaactgcacagattatagctgctattgtacttaaataagggagaggaaaagaaggttctcaggcacagactttctatttttctcaagccaaaccagtttaaaatgt

SEQ ID NO: 21603 - DNA, 120 bp, Artificial Sequence
  ENSG00000025800_43 (sequence is synthesized)
ctagcagaatgaactgtatttccatttcttcatgtctacctgccttccccccacaccctaaagttgtacttgtttctagcaaactagaaggaaaagataggaaagcctggcactactaac

SEQ ID NO: 21604 - DNA, 120 bp, Artificial Sequence
  ENSG00000025800_44 (sequence is synthesized)
ctcacctctcatacacctctttgaaggccccagctcttttgttcaggcctctcttctcccctagactcactcagcttggtatccatcatcttgagcattcttcagtagattcatctaggg

SEQ ID NO: 21605 - DNA, 120 bp, Artificial Sequence
  ENSG00000025800_45 (sequence is synthesized)
ttcagattccagactctcagctgaagacagggagccaatttcccccaggtccctgcaggtaatccagggaccccatagggagaacaggctgactggggcattaggaatgtttgtacctct

SEQ ID NO: 21606 - DNA, 120 bp, Artificial Sequence
  ENSG00000025800_46 (sequence is synthesized)
ctgcttccctggcagcctggggaagggtgcagggctcagtgcgctaaaccatggtaaacatcttcaatagaactaccctagaatttagtgagtgtgagactgagatattgctcagaataa

SEQ ID NO: 21607 - DNA, 120 bp, Artificial Sequence
  ENSG00000025800_47 (sequence is synthesized)
atttattccatagccatttaggattgcatgttctggaccaaccttgtccagtatgttttctgtttgagctttttcattcttttgttaagccaacaagttgagaatttggccctgctggga

SEQ ID NO: 21608 - DNA, 120 bp, Artificial Sequence
  ENSG00000025800_48 (sequence is synthesized)
tccatgtagtgggcactagctgctctttggccaaggccttcataaatgattcagtctctcattatctgtcctctagccccacaccctgatttagaccgtggcaaaggaagaacttgaggt

SEQ ID NO: 21609 - DNA, 120 bp, Artificial Sequence
  ENSG00000025800_49 (sequence is synthesized)
caagaccaaccaaatctgtgaattaaagctgttatttttttctctgcaagggcgctttgcttcaggtctgggctatgtgcagaacctaagcaggctgtgagagttagaagaggcagtatt

SEQ ID NO: 21610 - DNA, 120 bp, Artificial Sequence
  ENSG00000025800_50 (sequence is synthesized)
acatgttaggcccagaacaccatgggaaaaggtttatgtagtgtatcttagtggcctgcctagctgcctctgggccaggctgacttctgatgtccacattagctcgtacctgaaccctgt

SEQ ID NO: 21611 - DNA, 120 bp, Artificial Sequence
  ENSG00000025800_51 (sequence is synthesized)
tgctgaatgccagccctgttctcctgtaactattatatacgccatggcctggggggcattgaaggaagtaagctctcagagatcctaacactggctgggaacctctgactcagagcatgt

SEQ ID NO: 21612 - DNA, 63 bp, Artificial Sequence
  ENSG00000025800_52 (sequence is synthesized)
gatcctaacactggctgggaacctctgactcagagcatgtctttaaagagtccacatctggcc

SEQ ID NO: 21613 - DNA, 89 bp, Artificial Sequence
  ENSG00000025800_53 (sequence is synthesized)
ggttaggggttcaaacctacaaaaataaaaaaataaaaaaaataagccaggtgtggtggtgggcacctgtgatctcagctacgtgggag

SEQ ID NO: 21614 - DNA, 66 bp, Artificial Sequence
  ENSG00000025800_54 (sequence is synthesized)
cccgtccctacaaaaataaaaaaataaaaaaaataagccaggtgtggtggtgggcacctgtgatct

SEQ ID NO: 21615 - DNA, 120 bp, Artificial Sequence
  ENSG00000025800_55 (sequence is synthesized)
aggctcttgtctcaaaaaaaaaagtccacatcttcatgaaccctcagactctggagttgggtgtcggcttttttagccagcttttgtgggaattgcctttgacctattaaagaaggaaag

SEQ ID NO: 21616 - DNA, 120 bp, Artificial Sequence
  ENSG00000025800_56 (sequence is synthesized)
tgggtaatggagtcccagccactcaagagactggatatcccccgagaatggcttgggttaccagctatggacccttggaagatgaatctaatccttctcactggtttttctttgcaaatt

SEQ ID NO: 21617 - DNA, 120 bp, Artificial Sequence
  ENSG00000025800_57 (sequence is synthesized)
catttgcttttatttttctaataacaataaactctattttccatgttctcagggcccctgggtagacagacacagcttgatttcagagcagacataggcgaagaaaacatggcattgagt

SEQ ID NO: 21618 - DNA, 120 bp, Artificial Sequence
  ENSG00000025800_58 (sequence is synthesized)
gtgctgagtccagacaaatgttatttatatacacatccaaatttgaagagaaaatgtatttctttaggtttcaaacactgtaatagatataaagcaaaaataaaaacctgttgcaaagtt

SEQ ID NO: 21619 - DNA, 120 bp, Artificial Sequence
  ENSG00000025800_59 (sequence is synthesized)
agctcagcatggctctcctcccagcttcactgtcagctgtgcttgaaggagaggctagcgtccaggacagcccaggctcagtcatgaaaagctatgtgtcagagaccatggcgagcccag

SEQ ID NO: 21620 - DNA, 120 bp, Artificial Sequence
  ENSG00000026025_0 (sequence is synthesized)
ctctgccactctcgctccgaggtccccgcgccagagacgcagccgcgctcccaccacccacacccaccgcgccctcgttcgcctcttctccgggagccagtccgcgccaccgccgccgcc

SEQ ID NO: 21621 - DNA, 120 bp, Artificial Sequence
  ENSG00000026025_1 (sequence is synthesized)
caggccatcgccaccctccgcagccatgtccaccaggtccgtgtcctcgtcctcctaccgcaggatgttcggcggcccgggcaccgcgagccggccgagctccagccggagctacgtgac

SEQ ID NO: 21622 - DNA, 120 bp, Artificial Sequence
  ENSG00000026025_2 (sequence is synthesized)
tacgtccacccgcacctacagcctgggcagcgcgctgcgccccagcaccagccgcagcctctacgcctcgtccccgggcggcgtgtatgccacgcgctcctctgccgtgcgcctgcggag

SEQ ID NO: 21623 - DNA, 120 bp, Artificial Sequence
  ENSG00000026025_3 (sequence is synthesized)
cagcgtgcccggggtgcggctcctgcaggactcggtggacttctcgctggccgacgccatcaacaccgagttcaagaacacccgcaccaacgagaaggtggagctgcaggagctgaatga

SEQ ID NO: 21624 - DNA, 120 bp, Artificial Sequence
  ENSG00000026025_4 (sequence is synthesized)
ccgcttcgccaactacatcgacaaggtgcgcttcctggagcagcagaataagatcctgctggccgagctcgagcagctcaagggccaaggcaagtcgcgcctgggggacctctacgagga

SEQ ID NO: 21625 - DNA, 120 bp, Artificial Sequence
  ENSG00000026025_5 (sequence is synthesized)
ggagatgcgggagctgcgccggcaggtggaccagctaaccaacgacaaagcccgcgtcgaggtggagcgcgacaacctggccgaggacatcatgcgcctccgggagaaattgcaggagga

SEQ ID NO: 21626 - DNA, 120 bp, Artificial Sequence
  ENSG00000026025_6 (sequence is synthesized)
gatgcttcagagagaggaagccgaaaacaccctgcaatctttcagacaggatgttgacaatgcgtctctggcacgtcttgaccttgaacgcaaagtggaatctttgcaagaagagattgc

SEQ ID NO: 21627 - DNA, 120 bp, Artificial Sequence
  ENSG00000026025_7 (sequence is synthesized)
aaatcgatgtggatgtttccaagcctgacctcacggctgccctgcgtgacgtacgtcagcaatatgaaagtgtggctgccaagaacctgcaggaggcagaagaatggtacaaatccaagt

SEQ ID NO: 21628 - DNA, 120 bp, Artificial Sequence
  ENSG00000026025_8 (sequence is synthesized)
ttgctgacctctctgaggctgccaaccggaacaatgacgccctgcgccaggcaaagcaggagtccactgagtaccggagacaggtgcagtccctcacctgtgaagtggatgcccttaaag

SEQ ID NO: 21629 - DNA, 120 bp, Artificial Sequence
  ENSG00000026025_9 (sequence is synthesized)
gaaccaatgagtccctggaacgccagatgcgtgaaatggaagagaactttgccgttgaagctgctaactaccaagacactattggccgcctgcaggatgagattcagaatatgaaggagg

SEQ ID NO: 21630 - DNA, 120 bp, Artificial Sequence
  ENSG00000026025_10 (sequence is synthesized)
aaatggctcgtcaccttcgtgaataccaagacctgctcaatgttaagatggcccttgacattgagattgccacctacaggaagctgctggaaggcgaggagagcaggatttctctgcctc

SEQ ID NO: 21631 - DNA, 120 bp, Artificial Sequence
  ENSG00000026025_11 (sequence is synthesized)
ttccaaacttttcctccctgaacctgagggaaactaatctggattcactccctctggttgatacccactcaaaaaggacacttctgattaagacggttgaaactagagatggacaggtta

SEQ ID NO: 21632 - DNA, 120 bp, Artificial Sequence
  ENSG00000026025_12 (sequence is synthesized)
tcaacgaaacttctcagcatcacgatgaccttgaataaaaattgcacacactcagtgcagcaatatattaccagcaagaataaaaaagaaatccatatcttaaagaaacagctttcaagt

SEQ ID NO: 21633 - DNA, 120 bp, Artificial Sequence
  ENSG00000026025_13 (sequence is synthesized)
gcctttctgcagtttttcaggagcgcaagatagatttggaataggaataagctctagttcttaacaaccgacactcctacaagatttagaaaaaagtttacaacataatctagtttacag

SEQ ID NO: 21634 - DNA, 120 bp, Artificial Sequence
  ENSG00000026025_14 (sequence is synthesized)
aaaaatcttgtgctagaatactttttaaaaggtattttgaataccattaaaactgcttttttttttccagcaagtatccaaccaacttggttctgcttcaataaatctttggaaaaactc

SEQ ID NO: 21635 - DNA, 120 bp, Artificial Sequence
  ENSG00000026025_15 (sequence is synthesized)
gggaggcccacgtatggcgcctctccaaaggctgcagaagtttcttgctaacaaaaagtccgcacattcgagcaaagacaggctttagcgagttattaaaaacttaggggcgctcttgtc

SEQ ID NO: 21636 - DNA, 120 bp, Artificial Sequence
  ENSG00000026025_16 (sequence is synthesized)
ccccacagggcccgaccgcacacagcaaggcgatggcccagctgtaagttggtagcactgagaactagcagcgcgcgcggagcccgctgagacttgaatcaatctggtctaacggtttcc

SEQ ID NO: 21637 - DNA, 120 bp, Artificial Sequence
  ENSG00000026025_17 (sequence is synthesized)
gcagccgcctgaccccacccaacacaacccacgagcaattctaaaagttgcttaactcacgtctaaaaagtgcaaaacttcagggctgcgcgtaaagccctctagtggcgggaagaccac

SEQ ID NO: 21638 - DNA, 90 bp, Artificial Sequence
  ENSG00000026025_18 (sequence is synthesized)
cagggctgcgcgtaaagccctctagtggcgggaagaccacaggttggagcttctcatgattagaaaaatattaataaaaccccttgagcg

SEQ ID NO: 21639 - DNA, 85 bp, Artificial Sequence
  ENSG00000026025_19 (sequence is synthesized)
ccttgaatgatttctaagcagttccttgggacataaagaaaaatcttttaactttttactttgtttcccaaatgttgcacagttt

SEQ ID NO: 21640 - DNA, 120 bp, Artificial Sequence
  ENSG00000026025_20 (sequence is synthesized)
gcagggcgcggtgagtcaccgccggtgactaagcgaccccacccctctccctcgggctttcctctgccaccgccgtctcgcaactcccgccgtccgaagctggactgagcccgttaggtc

SEQ ID NO: 21641 - DNA, 120 bp, Artificial Sequence
  ENSG00000026025_21 (sequence is synthesized)
cgctcctttgcccgcgggtctccccgcctgaccgcagccccgagaccgccgcgcacctcctcccacgcccctttggcgtggtgccaccggacccctctggttcagtcccaggcggacccc

SEQ ID NO: 21642 - DNA, 120 bp, Artificial Sequence
  ENSG00000026025_22 (sequence is synthesized)
ggcataagccaccatgaccagccttaaaaagtaattttaaaatatcactggtaaaatgtggattcagtcatgattgagtgcagtttaccatgtgtgtggacatttatttattttaaaatt

SEQ ID NO: 21643 - DNA, 120 bp, Artificial Sequence
  ENSG00000026025_23 (sequence is synthesized)
gtctgatcaccaccttgagtaaaacacaagcagtcacaattaaaatatattagtgagcaggagaaagcacagcatattatagcactgaatgatttataaacctattccagggtcataaaa

SEQ ID NO: 21644 - DNA, 120 bp, Artificial Sequence
  ENSG00000026025_24 (sequence is synthesized)
tgtgtcaacggcttttctatagtaaggagactaggttcagatggttaatctaagacaaataaatgagataagccatacacttttacatcctccatgtcctgtcttttctctgttcaaaat

SEQ ID NO: 21645 - DNA, 120 bp, Artificial Sequence
  ENSG00000026025_25 (sequence is synthesized)
atgtatatcataatgcaaagaaaatgagttatcaagacagactcaaaagggacttcatggaactcttgaaggttttagcttgcctatatcattgcttctaatatgaaggacttggtactc

SEQ ID NO: 21646 - DNA, 120 bp, Artificial Sequence
  ENSG00000026025_26 (sequence is synthesized)
aagtagctgggcctcgggagggggctggagggagaggggaacgcccccccggcccccgcgagagctgccacgcccttggggatgtggccggggggaggcctgccagggagacagcggaga

SEQ ID NO: 21647 - DNA, 120 bp, Artificial Sequence
  ENSG00000026025_27 (sequence is synthesized)
gcggggctgtggctgtggtggcgcagccccgcccagaacccagaccttgcagttcgcatttcctcctctgtccccacacattgcccaaggacgctccgtttcaagttacagatttcttaa

SEQ ID NO: 21648 - DNA, 120 bp, Artificial Sequence
  ENSG00000026025_28 (sequence is synthesized)
aactaccactttgtgtgcagttgaaggcccttgggcacaatgagagccagtcctccaaactttcagaaagtttcctgccccttctggcaggctgccaatcaccgggcgggagaaggaagg

SEQ ID NO: 21649 - DNA, 120 bp, Artificial Sequence
  ENSG00000026025_29 (sequence is synthesized)
aggggaaggcggtggagggagcgagacaaagggatggtccctcgggggcggggatggcggggctgtcctgtaggtctgtgcggccaccgtgattgcccctctgcgcggtgcccgaagtcc

SEQ ID NO: 21650 - DNA, 120 bp, Artificial Sequence
  ENSG00000026025_30 (sequence is synthesized)
cgctgaaacctgccgagggcagcaggtctgaaagctgcaggcgctagttgcgcggaggtggcgcagctgctctggaggcgcagagcgaatacgtggtgtttgggtgtggccgccccgccc

SEQ ID NO: 21651 - DNA, 120 bp, Artificial Sequence
  ENSG00000026025_31 (sequence is synthesized)
gtgaccatttgttaggccctgtgccactgggctctaagcagtgtcacatttaatctttagaaagtttctttgaggtaactgctttccactttttgtagaggaggaatttgaattgagaga

SEQ ID NO: 21652 - DNA, 120 bp, Artificial Sequence
  ENSG00000026025_32 (sequence is synthesized)
gagtaagtgacttgctgaaaaagggttaatcaacagcagagctgggatttgaacccataactctgtcaaagcctccactcctaactcctgttcatgctcctgtggagaaaatgcttgtag

SEQ ID NO: 21653 - DNA, 120 bp, Artificial Sequence
  ENSG00000026025_33 (sequence is synthesized)
taacatattttaaatgtactaacaagaccagtcatgggaaaatgtttctgagacaaatctctagtttatgatttaaaacagtacgttttcttacgtgacgaaaacaaaaagtgtgttaat

SEQ ID NO: 21654 - DNA, 120 bp, Artificial Sequence
  ENSG00000026025_34 (sequence is synthesized)
ttgttcccagtggttgaagttatttgccaacaattttactgtttctcttcatctgtttataggatttctctgcctcttccaaacttttcctccctgaacctgaggggtaagcattttatt

SEQ ID NO: 21655 - DNA, 120 bp, Artificial Sequence
  ENSG00000026025_35 (sequence is synthesized)
tccctttaggaaaaacgtcagctgcttgtaaccactgtgtttatgtcaaagcattcattttttttaggatatctgaaaaaatgccatataagagaaaactctataaaacatctataattt

SEQ ID NO: 21656 - DNA, 120 bp, Artificial Sequence
  ENSG00000026025_36 (sequence is synthesized)
tcgaacccaagtacactcttgcattctatgctttaagttaaatgcaaactcctttttccttcttcctgctgcaagtactatctcatcctgatgctcaagagtgtcagggcctgggtttcc

SEQ ID NO: 21657 - DNA, 120 bp, Artificial Sequence
  ENSG00000026025_37 (sequence is synthesized)
aaacagagactaccctaaaattatttggcgagtagtactttacacaattgcctctcccccacaaatcataattgtttcagtaaaatggttacttggtttttccaagaaaaaactcgtttt

SEQ ID NO: 21658 - DNA, 120 bp, Artificial Sequence
  ENSG00000026025_38 (sequence is synthesized)
tcctaaatatcctctagctccaatgcaaagctggctttgacttcttgctcatattgtgtttgccaccacagcctccccaccactcacatcacctcctttatttatttatttattttctta

SEQ ID NO: 21659 - DNA, 120 bp, Artificial Sequence
  ENSG00000026103_0 (sequence is synthesized)
ctcttctcccgcgggttggtggacccgctcagtacggagttggggaagctctttcacttcggaggattgctcaacaaccatgctgggcatctggaccctcctacctctggttcttacgtc

SEQ ID NO: 21660 - DNA, 120 bp, Artificial Sequence
  ENSG00000026103_1 (sequence is synthesized)
tgttgctagattatcgtccaaaagtgttaatgcccaagtgactgacatcaactccaagggattggaattgaggaagactgttactacagttgagactcagaacttggaaggcctgcatca

SEQ ID NO: 21661 - DNA, 120 bp, Artificial Sequence
  ENSG00000026103_2 (sequence is synthesized)
tgatggccaattctgccataagccctgtcctccaggtgaaaggaaagctagggactgcacagtcaatggggatgaaccagactgcgtgccctgccaagaagggaaggagtacacagacaa

SEQ ID NO: 21662 - DNA, 120 bp, Artificial Sequence
  ENSG00000026103_3 (sequence is synthesized)
agcccatttttcttccaaatgcagaagatgtagattgtgtgatgaaggacatggcttagaagtggaaataaactgcacccggacccagaataccaagtgcagatgtaaaccaaacttttt

SEQ ID NO: 21663 - DNA, 120 bp, Artificial Sequence
  ENSG00000026103_4 (sequence is synthesized)
ttgtaactctactgtatgtgaacactgtgacccttgcaccaaatgtgaacatggaatcatcaaggaatgcacactcaccagcaacaccaagtgcaaagaggaaggatccagatctaactt

SEQ ID NO: 21664 - DNA, 120 bp, Artificial Sequence
  ENSG00000026103_5 (sequence is synthesized)
ggggtggctttgtcttcttcttttgccaattccactaattgtttgggtgaagagaaaggaagtacagaaaacatgcagaaagcacagaaaggaaaaccaaggttctcatgaatctccaac

SEQ ID NO: 21665 - DNA, 120 bp, Artificial Sequence
  ENSG00000026103_6 (sequence is synthesized)
tttaaatcctgaaacagtggcaataaatttatctgatgttgacttgagtaaatatatcaccactattgctggagtcatgacactaagtcaagttaaaggctttgttcgaaagaatggtgt

SEQ ID NO: 21666 - DNA, 120 bp, Artificial Sequence
  ENSG00000026103_7 (sequence is synthesized)
caatgaagccaaaatagatgagatcaagaatgacaatgtccaagacacagcagaacagaaagttcaactgcttcgtaattggcatcaacttcatggaaagaaagaagcgtatgacacatt

SEQ ID NO: 21667 - DNA, 120 bp, Artificial Sequence
  ENSG00000026103_8 (sequence is synthesized)
gattaaagatctcaaaaaagccaatctttgtactcttgcagagaaaattcagactatcatcctcaaggacattactagtgactcagaaaattcaaacttcagaaatgaaatccaaagctt

SEQ ID NO: 21668 - DNA, 120 bp, Artificial Sequence
  ENSG00000026103_9 (sequence is synthesized)
ggtctagagtgaaaaacaacaaattcagttctgagtatatgcaattagtgtttgaaaagattcttaatagctggctgtaaatactgcttggttttttactgggtacattttatcatttat

SEQ ID NO: 21669 - DNA, 120 bp, Artificial Sequence
  ENSG00000026103_10 (sequence is synthesized)
tagcgctgaagagccaacatatttgtagatttttaatatctcatgattctgcctccaaggatgtttaaaatctagttgggaaaacaaacttcatcaagagtaaatgcagtggcatgctaa

SEQ ID NO: 21670 - DNA, 120 bp, Artificial Sequence
  ENSG00000026103_11 (sequence is synthesized)
gtacccaaataggagtgtatgcagaggatgaaagattaagattatgctctggcatctaacatatgattctgtagtatgaatgtaatcagtgtatgttagtacaaatgtctatccacaggc

SEQ ID NO: 21671 - DNA, 120 bp, Artificial Sequence
  ENSG00000026103_12 (sequence is synthesized)
taaccccactctatgaatcaatagaagaagctatgaccttttgctgaaatatcagttactgaacaggcaggccactttgcctctaaattacctctgataattctagagattttaccatat

SEQ ID NO: 21672 - DNA, 120 bp, Artificial Sequence
  ENSG00000026103_13 (sequence is synthesized)
ttctaaactttgtttataactctgagaagatcatatttatgtaaagtatatgtatttgagtgcagaatttaaataaggctctacctcaaagacctttgcacagtttattggtgtcatatt

SEQ ID NO: 21673 - DNA, 120 bp, Artificial Sequence
  ENSG00000026103_14 (sequence is synthesized)
atacaatatttcaattgtgaattcacatagaaaacattaaattataatgtttgactattatatatgtgtatgcattttactggctcaaaactacctacttctttctcaggcatcaaaagc

SEQ ID NO: 21674 - DNA, 120 bp, Artificial Sequence
  ENSG00000026103_15 (sequence is synthesized)
atcaccaaaaaatacttaatagtccaccaaaaggcaagactgcccttagaaattctagcctggtttggagatactaactgctctcagagaaagtagctttgtgacatgtcatgaacccat

SEQ ID NO: 21675 - DNA, 120 bp, Artificial Sequence
  ENSG00000026103_16 (sequence is synthesized)
gtttgcaatcaaagatgataaaatagattcttatttttcccccacccccgaaaatgttcaataatgtcccatgtaaaacctgctacaaatggcagcttatacatagcaatggtaaaatca

SEQ ID NO: 21676 - DNA, 120 bp, Artificial Sequence
  ENSG00000026103_17 (sequence is synthesized)
tcatctggatttaggaattgctcttgtcatacccccaagtttctaagatttaagattctccttactactatcctacgtttaaatatctttgaaagtttgtattaaatgtgaattttaaga

SEQ ID NO: 21677 - DNA, 120 bp, Artificial Sequence
  ENSG00000026103_18 (sequence is synthesized)
aataatatttatatttctgtaaatgtaaactgtgaagatagttataaactgaagcagatacctggaaccacctaaagaacttccatttatggaggatttttttgccccttgtgtttggaa

SEQ ID NO: 21678 - DNA, 120 bp, Artificial Sequence
  ENSG00000026103_19 (sequence is synthesized)
ttataaaatataggtaaaagtacgtaattaaataatgtttttggtatttctggttttctcttttttggtaggggcttgctttttggttttgtcttccttttctctaactgatgctaaata

SEQ ID NO: 21679 - DNA, 120 bp, Artificial Sequence
  ENSG00000026103_20 (sequence is synthesized)
taacttgtctttaatgcttcttggatcccttagaaggtacttcctttttaaccttaacccttttagtagttaaataattatttccataggttgctattgccaagaagacctcttccaaac

SEQ ID NO: 21680 - DNA, 120 bp, Artificial Sequence
  ENSG00000026103_21 (sequence is synthesized)
agcacatgattattcgtcaaacagtttcgtattccagatactggaatgtggataagaaagtatacatttcaaggggtaggttttattattaagaaagccaaatgaggattttgaaatatt

SEQ ID NO: 21681 - DNA, 120 bp, Artificial Sequence
  ENSG00000026103_22 (sequence is synthesized)
ctttcctgcatattatccattctagctacatgctggccagtgggccacctttcttttctgcaatttaatgctagtaatatattctatttaacccatgagtcccaaagtattagcatttca

SEQ ID NO: 21682 - DNA, 120 bp, Artificial Sequence
  ENSG00000026103_23 (sequence is synthesized)
acatgtaagcatgtcggtaagatagttgtgctttgcttagggttccctcctgtgttatggtctggaaagtgtctttaggcagaaagtctgagtgatcacagggttcactcattaatttct

SEQ ID NO: 21683 - DNA, 120 bp, Artificial Sequence
  ENSG00000026103_24 (sequence is synthesized)
cttttctgagccatcatagtctgtgctgtctgctctccagttttctatttctagacagaagtagggcaagttaggtactagttattcttcatggccagaagtgcaagttctactttgcaa

SEQ ID NO: 21684 - DNA, 120 bp, Artificial Sequence
  ENSG00000026103_25 (sequence is synthesized)
gacaagattaagttagagaacaccctattccactttggtgaactcagagcaagaactttgagttcctttgggaggaagacagtggagaagtctttgtacttggtgatgtggtttttttcc

SEQ ID NO: 21685 - DNA, 120 bp, Artificial Sequence
  ENSG00000026103_26 (sequence is synthesized)
tcatggcttcacctagtggccccaagcatgacttctcccatgtcaatgagcacagccacattcccgagttgaggtgaccccacggtccagaatcatcctcattctggtgaacctggttct

SEQ ID NO: 21686 - DNA, 120 bp, Artificial Sequence
  ENSG00000026103_27 (sequence is synthesized)
ctttgtggtgggcatactgggtaggagaatcacccaaaggtcacccatgagctgcagaaaaaaaggctatttgcagaaggagctcacagatcacattgaaagcattgcatattcaaacat

SEQ ID NO: 21687 - DNA, 120 bp, Artificial Sequence
  ENSG00000026103_28 (sequence is synthesized)
cttggtcttctttattggcatgcccacagggtcttctgacctctgattagatcagacactttttagatattgaatcatcagtttctgtacaactatctgaataaggtatataatcaatga

SEQ ID NO: 21688 - DNA, 120 bp, Artificial Sequence
  ENSG00000026103_29 (sequence is synthesized)
aatttagaatttttttctatgcttactcctgattggtaatttgtttgggtttagaattctatacaaggccatttgtaattttcctcagcactttaaaaatattaaaccatgttttcttaa

SEQ ID NO: 21689 - DNA, 120 bp, Artificial Sequence
  ENSG00000026103_30 (sequence is synthesized)
atccctgcagagaaacagcctttaccaggcatgggttcagtatccaagcctgagcaaagagattgctcttaaagtttgtcataagggcacagcttaactttctctggctgccggttgacc

SEQ ID NO: 21690 - DNA, 120 bp, Artificial Sequence
  ENSG00000026103_31 (sequence is synthesized)
ataaaagtagcacacttattgggcatgtatttgttatgtgccaggttctgtgctaacagctttaagtgcattattccacgtattttcacaacaagcctgtgaggaagaggttatttccac

SEQ ID NO: 21691 - DNA, 120 bp, Artificial Sequence
  ENSG00000026103_32 (sequence is synthesized)
taggaaataagtcagcaccgaagcagtggttaagccggagggctcggaagaacggcaccttttctttctcgaaaaagttatatgggggctgaatgagcttctggaggcttgtttaccgtt

SEQ ID NO: 21692 - DNA, 120 bp, Artificial Sequence
  ENSG00000026103_33 (sequence is synthesized)
cagggcagtaagtgggaggccctgttcaccttagaacacctggcttctatcattcatggtgctgtttctagtgtggtttgaagaacctgagatccaaactgctatacaagtgacctgctg

SEQ ID NO: 21693 - DNA, 120 bp, Artificial Sequence
  ENSG00000026103_34 (sequence is synthesized)
acctgggagcggcgggctgctgcgggaggcgttggagactggctcccgggggctgttaggaccttccctcaggcccgggtgctcagaacgctggaggacttgcttttcttgggccttgat

SEQ ID NO: 21694 - DNA, 120 bp, Artificial Sequence
  ENSG00000026103_35 (sequence is synthesized)
gggcgttccccagcgaggcttccttcccatcctcctgaccaccggggcttttcgtgagctcgtctctgatctcgcgcaagagtgacacacaggtgttcaaagacgcttctggggagtgag

SEQ ID NO: 21695 - DNA, 120 bp, Artificial Sequence
  ENSG00000026103_36 (sequence is synthesized)
gctccacgttgaggtgggcgtggggtgcggacaggaattgaagcggaagtctgggaagctttagggtcgctggagggggaccccggttggagagaggagcggaactcctggacaagccct

SEQ ID NO: 21696 - DNA, 120 bp, Artificial Sequence
  ENSG00000026103_37 (sequence is synthesized)
agaggaaggtaattatttttttacggttatattctcctttcccccaaccccatggaaagatgtgaagaaaaaccaatcactcttgattactagaaagtcctttatttaatcttaaagatt

SEQ ID NO: 21697 - DNA, 120 bp, Artificial Sequence
  ENSG00000026103_38 (sequence is synthesized)
gcttattttcatataaaatgtccaatgttccaacctacaggatccagatctaacttggggtggctttgtcttcttcttttgccaattccactaattgtttggggtaagttcttgctttgt

SEQ ID NO: 21698 - DNA, 120 bp, Artificial Sequence
  ENSG00000026103_39 (sequence is synthesized)
tcaaactgcagattgaaataacttgggaagtagttcacaaagatttgcctcattcttacctataaaaagctaccactttggtagatttatgtattgttaatttcttgcccctgaatgcag

SEQ ID NO: 21699 - DNA, 120 bp, Artificial Sequence
  ENSG00000026103_40 (sequence is synthesized)
ggagagaggagcggaactcctggacaagccctgacaagccaagccaaaggtccgctccggcgcgggtgggtgagtgcgcgccgccccgcgggggcggggagagagcctgcagccttcaga

SEQ ID NO: 21700 - DNA, 120 bp, Artificial Sequence
  ENSG00000026297_0 (sequence is synthesized)
ttggtgctcccagcacctagcaccgggagactggagaggtttccaggagagtgacccgagtcggcaccatgcgccctgcagccctgcgcggggccctgctgggctgcctctgcctggcgt

SEQ ID NO: 21701 - DNA, 120 bp, Artificial Sequence
  ENSG00000026297_1 (sequence is synthesized)
tgctttgcctgggcggtgcggacaagcgcctgcgtgacaaccatgagtggaaaaaactaattatggttcagcactggcctgagacagtatgcgagaaaattcaaaacgactgtagagacc

SEQ ID NO: 21702 - DNA, 120 bp, Artificial Sequence
  ENSG00000026297_2 (sequence is synthesized)
ctccggattactggacaatacatggactatggcccgataaaagtgaaggatgtaatagatcgtggcccttcaatttagaagagattaaggatcttttgccagaaatgagggcatactggc

SEQ ID NO: 21703 - DNA, 120 bp, Artificial Sequence
  ENSG00000026297_3 (sequence is synthesized)
gagtgggaaaagcatgggacctgcgccgcccaggtggatgcgctcaactcccagaagaagtactttggcagaagcctggaactctacagggagctggacctcaacagtgtgcttctaaaa

SEQ ID NO: 21704 - DNA, 120 bp, Artificial Sequence
  ENSG00000026297_4 (sequence is synthesized)
ttggggataaaaccatccatcaattactaccaagttgcagattttaaagatgcccttgccagagtatatggagtgatacccaaaatccagtgccttccaccaagccaggatgaggaagta

SEQ ID NO: 21705 - DNA, 120 bp, Artificial Sequence
  ENSG00000026297_5 (sequence is synthesized)
cagacaattggtcagatagaactgtgcctcactaagcaagaccagcagctgcaaaactgcaccgagccgggggagcagccgtcccccaagcaggaagtctggctggcaaatggggccgcc

SEQ ID NO: 21706 - DNA, 120 bp, Artificial Sequence
  ENSG00000026297_6 (sequence is synthesized)
gagagccggggtctgagagtctgtgaagatggcccagtcttctatcccccacctaaaaagaccaagcattgatgcccaagttttggaaatattctgttttaaaaagcaagagaaattcac

SEQ ID NO: 21707 - DNA, 120 bp, Artificial Sequence
  ENSG00000026297_7 (sequence is synthesized)
ctgcctcggcctctctgagccaaccacggggcggggcgtgaacgccgggcggggacgtgccgttctggggggcgtgtccaccggcgggggcgtgccgtcctgggggcgtggctctctgct

SEQ ID NO: 21708 - DNA, 120 bp, Artificial Sequence
  ENSG00000026297_8 (sequence is synthesized)
ccggtgcaggcccgcagggcgccctgggctgggagcaacgcgactgaccgtggtcgtgggcggacggcggctgcagcgtggaggagctggggtcgctgtgggtcgcgaagcagagcccgg

SEQ ID NO: 21709 - DNA, 120 bp, Artificial Sequence
  ENSG00000026297_9 (sequence is synthesized)
gacgtgcgcgcttggtgcacgatcctgaaggggagctccgaggggcccgggtcgccagggctgctgcggccattcccggagcccggcgcggggcccgcgagatactggtttaggccgtcc

SEQ ID NO: 21710 - DNA, 120 bp, Artificial Sequence
  ENSG00000026297_10 (sequence is synthesized)
cagggctccgggcgcacccggtggccgctgctgcagcggagggagcgcggcggcgcgggggctcggagacagcgtttctcccggaagtcttcctcgggcagcaggtgggaagtgggagcc

SEQ ID NO: 21711 - DNA, 120 bp, Artificial Sequence
  ENSG00000026297_11 (sequence is synthesized)
ttgctttgcctgggcggtgcggacaagcgcctgcgactgctcccagcctaggacgcgacaaagcaggtggcaggcttggtggagcactgttcctgcactcgaagttctctcagaggtcga

SEQ ID NO: 21712 - DNA, 120 bp, Artificial Sequence
  ENSG00000026297_12 (sequence is synthesized)
ttgacttttaattatatttctactgcagagtgctcctcacacagactctcctcctctcctccgggactcactgcagggaatggtttctggggagggtcagaggaaaggtgtggacgtgga

SEQ ID NO: 21713 - DNA, 120 bp, Artificial Sequence
  ENSG00000026297_13 (sequence is synthesized)
cttcaatttagaagagattaagaaaaattggatggagattacagacagttcactcccttccccctcaactctcccaatcattaacatcttctatagtgtgttacatttgttacaattaat

SEQ ID NO: 21714 - DNA, 120 bp, Artificial Sequence
  ENSG00000026297_14 (sequence is synthesized)
gaactgatactgatactttattattaaataaagtttagcattaacattagggtttactcctgtgttgtgcggctttggacaaatgcaggagagcaagtcccacccagtgtgctctggagc

SEQ ID NO: 21715 - DNA, 120 bp, Artificial Sequence
  ENSG00000026297_15 (sequence is synthesized)
agccgctggccctaaaccccctgagccatacctccccttcttcctccccttgaacccccaagcaaccgcgaatctcattcctgtctcttaagactaccttttccaaattgtcacgtcgtt

SEQ ID NO: 21716 - DNA, 120 bp, Artificial Sequence
  ENSG00000026297_16 (sequence is synthesized)
tcatacagtatgtagcctctgcagactggcttcttgcacttagcaatgtatgtttgcagttcctccagtgtcttttcatgactcgacggctcattggtttttgttgctgaaaatattcca

SEQ ID NO: 21717 - DNA, 120 bp, Artificial Sequence
  ENSG00000026297_17 (sequence is synthesized)
ttgtttggatgtacactttatcccttcacctataacagcttgtattttcgtgtgcagttttatgattactcaaattgcacttgtagatatatcttaacaaacacttcatacaaaataagc

SEQ ID NO: 21718 - DNA, 120 bp, Artificial Sequence
  ENSG00000026297_18 (sequence is synthesized)
ataggattattttattcaccaaagtattgttaattagcagagctcaattctttggtgtcagtttatcaaatttaccttctaggttttgagtttattattaagaacctgcgtagacttatt

SEQ ID NO: 21719 - DNA, 120 bp, Artificial Sequence
  ENSG00000026297_19 (sequence is synthesized)
tgactgtttgtgaaataaattggcaacagtgtctttgctctcatggtgtctgcttacctgtgcagccatttttccagagtgtggggagcagtggacttgaggaaggagtctaccagccct

SEQ ID NO: 21720 - DNA, 120 bp, Artificial Sequence
  ENSG00000026297_20 (sequence is synthesized)
ttccagactccccctcaaccccaaccccaggaagccgtaagatgatcgcttgcagggccctcaccgtcctcacctggactcatgtgcgaatagatgagggacatgtgcctgccatgtttg

SEQ ID NO: 21721 - DNA, 120 bp, Artificial Sequence
  ENSG00000026297_21 (sequence is synthesized)
cccagagctcggtgttcagggaactgattacaggggtggcaaaagccacaggggccacacatttgctgagctgcttccaggtgcgaacggcgcttgtttgggcatcagaaacagcacggt

SEQ ID NO: 21722 - DNA, 120 bp, Artificial Sequence
  ENSG00000026297_22 (sequence is synthesized)
ggatactcggagtcctgtcctttgaaaggagtttgatttatcatcaggagaaatttgttgcttttgcatccagcatccagccacgtatccactcatctgttttatggggaaatcagggct

SEQ ID NO: 21723 - DNA, 120 bp, Artificial Sequence
  ENSG00000026297_23 (sequence is synthesized)
gcgggagcacccaggagagctgccgacccagacatttcctgggaaatgcgttgctgagatggaggcctgcagcctgcccaggccctgaggggagtggttcagtggagcagagctgggggc

SEQ ID NO: 21724 - DNA, 120 bp, Artificial Sequence
  ENSG00000026297_24 (sequence is synthesized)
tgggggctgggagatatgggaccagttgcttcttgagggggctcaggggcagagcaggagggttgggaaggggccgggtgggagccatagacatgaggacctcatcctccagcagcgctg

SEQ ID NO: 21725 - DNA, 120 bp, Artificial Sequence
  ENSG00000026297_25 (sequence is synthesized)
agctctgagtaggccggggtgtttgcttgttgctgtccccgtggtactggggagaggctaggcacagagaccctccgagtaggtcacatgctgggggaatctgggcctatggctatgcag

SEQ ID NO: 21726 - DNA, 120 bp, Artificial Sequence
  ENSG00000026297_26 (sequence is synthesized)
ctggagaggaagggatagtgtggggagcttggacttggccgtttgggacagggggatgggagaggcagaggtcctgcctcaggcctccataggagtgacatttgctggtgtcagaagctt

SEQ ID NO: 21727 - DNA, 120 bp, Artificial Sequence
  ENSG00000026297_27 (sequence is synthesized)
ggcaagaggggaggatgatcagaccctgcatggacagttcgaattggagctctctgcagagtccaggaagagaggtctggatgggagggaagccatggggtggaaaagatagcttccaat

SEQ ID NO: 21728 - DNA, 120 bp, Artificial Sequence
  ENSG00000026297_28 (sequence is synthesized)
ggaaggcagtgaaaactcgccataagtgaaggagaagaaggaggccaaggagatggggcaggaatggcagccggcagccaggcggtcagtggagcaggtgctcaggaggcccacaggaga

SEQ ID NO: 21729 - DNA, 120 bp, Artificial Sequence
  ENSG00000026297_29 (sequence is synthesized)
gcttcgtggaaggagtggacagtgtctgaggcaaggggcaaaaggcatctgctggagctggtgaccccagcttggtgccccccaaagccagagtacgaggctgagaggatgcaggtgtcc

SEQ ID NO: 21730 - DNA, 120 bp, Artificial Sequence
  ENSG00000026297_30 (sequence is synthesized)
tcctaggaggtttgagtcagaaggcacgaggcagaagcagtgggggaggactccctcagtagagcgaggaggaggcccctcatccaagaggaggttggagcacaggggggtctaggtttg

SEQ ID NO: 21731 - DNA, 120 bp, Artificial Sequence
  ENSG00000026297_31 (sequence is synthesized)
cagtttcgggaccggtagctgaggggtcccagggcctttcttctgtgaaggagaatgtgtccaccgtggggagggggtcgggagagagagatacttcagagtggacagggctgagaaagc

SEQ ID NO: 21732 - DNA, 120 bp, Artificial Sequence
  ENSG00000026297_32 (sequence is synthesized)
tttatgggccgcgaaaggcagagtagttgttggtggatgagggtggctgtggcaggtggcgtttcaggtgagacagctcggggcccagaaagacactgggaggaggagagctctgctctc

SEQ ID NO: 21733 - DNA, 120 bp, Artificial Sequence
  ENSG00000026297_33 (sequence is synthesized)
cagagaaacaggagcagagaggaaaacagagccgcagcgagcggcttgtggtctggggatgaagcccaggttgacagcatcctctgcttcgctggtggaggtgggggcatcattctcaca

SEQ ID NO: 21734 - DNA, 120 bp, Artificial Sequence
  ENSG00000026297_34 (sequence is synthesized)
cctgtgctgggtcctgtccctgccagccaagggagaccaggaccctgccactgttgcgctcaggatagtccagaactgtcagatcttttctgttgaagtttaatttctaatacacttgta

SEQ ID NO: 21735 - DNA, 120 bp, Artificial Sequence
  ENSG00000026297_35 (sequence is synthesized)
caggagagtgacccgagtaggtcccctcctaattctggagccgtccctcgggctgcgcagtggagcgccgaggtggcgggaggctgcggggagcctgggcggccaagcaccatctgcagt

SEQ ID NO: 21736 - DNA, 120 bp, Artificial Sequence
  ENSG00000026297_36 (sequence is synthesized)
caggagctcccgggcagcttgcagggcgcagtttttgaaagcgggtgctgcgtgcggaccgcgggcctgcagggtcggcaccatgcgccctgcagccctgcgcggggccctgctgggctg

SEQ ID NO: 21737 - DNA, 120 bp, Artificial Sequence
  ENSG00000026297_37 (sequence is synthesized)
cagcctcctgagtagctgggattacaggatcttttgccagaaatgagggcatactggcctgacgtaattcactcgtttcccaatcgcagccgcttctggaagcatgagtgggaaaagcat

SEQ ID NO: 21738 - DNA, 120 bp, Artificial Sequence
  ENSG00000026297_38 (sequence is synthesized)
cccaagcctgacagctggatccaggggagtgggtgtagacctcactgccctccagcagcttctgcatgtgcactattcggctactgggatcattcctgaggaatgttctgagcctaccaa

SEQ ID NO: 21739 - DNA, 120 bp, Artificial Sequence
  ENSG00000026297_39 (sequence is synthesized)
gcctttccagatcattctacatcacgatcacacagagtgggtgcagagtattgggatgcccatctgggcaccatctcatcatcagagtcggccatagggaaaacgaggactccaaccagc

SEQ ID NO: 21740 - DNA, 120 bp, Artificial Sequence
  ENSG00000026297_40 (sequence is synthesized)
atgtgccgaactctgtggccaagacagtctgacaataagttattgcccacagaggatgtctaagtctttgtgtccactctgtgatcgtgatctagaattttctaccaaggcttgatgggg

SEQ ID NO: 21741 - DNA, 120 bp, Artificial Sequence
  ENSG00000026297_41 (sequence is synthesized)
aactaggatattcttctgcaatgattcagaattttacagtgtacctttatactttaataagtgaattctatatatggtagtttggtaggattctgtgtagaagtgctttaggaggtgatt

SEQ ID NO: 21742 - DNA, 120 bp, Artificial Sequence
  ENSG00000026297_42 (sequence is synthesized)
gaaagctgtagggacttaccatacggttatgtattgcttggtgatggggtataaaattgtcatgtgaacatcttggagtgcacttacttagctgatacagcccacgacacacatatgctt

SEQ ID NO: 21743 - DNA, 120 bp, Artificial Sequence
  ENSG00000026297_43 (sequence is synthesized)
tgtggtatagcctgttgcttcgaggctacaaacctgtacagtgtgtgactctactgagtactgtaggcacctgtatgtaacacaatggtaaggatttgtgtatctaaacatatctcaaca

SEQ ID NO: 21744 - DNA, 120 bp, Artificial Sequence
  ENSG00000026297_44 (sequence is synthesized)
acatgcaggccttcactgactgaatgtcgtaatgtggcgcatgactgtgtttaaagatttgtccaaatgcagtttaccaggataagcctggaatccgatttcaattgctgtcttttaaag

SEQ ID NO: 21745 - DNA, 120 bp, Artificial Sequence
  ENSG00000026297_45 (sequence is synthesized)
caggtgtggcaaacgggtggtgatgtgtgtgccagctccactcggtggtggccccagcgctcccatgctccgaaggagtcaggaactggaaagggtacctgcctggagcagtttgtgtgt

SEQ ID NO: 21746 - DNA, 120 bp, Artificial Sequence
  ENSG00000026297_46 (sequence is synthesized)
gtgctaaggggtggggaaggcggggactgggaaccatgtatttgcagtccatgttgacacatttgttgcataaagtcatagaaaacactttcctttaagagtgtcttaatttttaccatg

SEQ ID NO: 21747 - DNA, 120 bp, Artificial Sequence
  ENSG00000026297_47 (sequence is synthesized)
aaatatgatacctgaaaagaacaagaaagcaaagtggaccttcattatacagctaacttttttaaatttaaattttagtgtgcttctaaaattggggataaaaccatccatcaattacta

SEQ ID NO: 21748 - DNA, 120 bp, Artificial Sequence
  ENSG00000026297_48 (sequence is synthesized)
ccaagtaagtcttgcttttgcttcttttctcgtgtgtctctcccggggacctccagtagggccgtttcagcctctgagtcaatgggctgtaaattgccccagtgcaaacccccttcctac

SEQ ID NO: 21749 - DNA, 120 bp, Artificial Sequence
  ENSG00000026297_49 (sequence is synthesized)
ttaaatgttatcatgtgaacagattttatttgcattttattttcctgcgcatgttgagtaggagctgaaggctgcttagaccagtgatttggaagcacagatttcatggctccctttgtg

SEQ ID NO: 21750 - DNA, 120 bp, Artificial Sequence
  ENSG00000026297_50 (sequence is synthesized)
agaagtgtgtgctccagggtccggcagagcaggtggaatctgcagtttcaagagtcacattcacttttataacgtagtcttatatttgtttgtggtttgttttcatgataaaattgtgat

SEQ ID NO: 21751 - DNA, 120 bp, Artificial Sequence
  ENSG00000026297_51 (sequence is synthesized)
ttgttttatgataaaagaaactatagatatttaagcatgacaagatgttattagctggtaagcatatacaaaaagttgctttttgccaggtgtggtgactcacgcctataaatcccagga

SEQ ID NO: 21752 - DNA, 120 bp, Artificial Sequence
  ENSG00000026297_52 (sequence is synthesized)
ccttgggaggctcaggctggaggattgcttgtggctagaatttcgagaccagcctgggcagcagagtgagacctctagaaagaagtaaaagtagctgagcatgatagtatgtgtctgtgg

SEQ ID NO: 21753 - DNA, 89 bp, Artificial Sequence
  ENSG00000026297_53 (sequence is synthesized)
agaagtaaaagtagctgagcatgatagtatgtgtctgtggtctcagctattcaggaagctaaggtcagaggattgcctgcgtcgcccca

SEQ ID NO: 21754 - DNA, 120 bp, Artificial Sequence
  ENSG00000026297_54 (sequence is synthesized)
cttgcataattagttccaatgtacaactaagttttcataccatcttaactgtaaattctatacaaattcaacaggactcaattatttacaaaagctaatgtgtgacaacttgatcttctt

SEQ ID NO: 21755 - DNA, 120 bp, Artificial Sequence
  ENSG00000026297_55 (sequence is synthesized)
acttggaatcttcccttctaaaatttgatttatcctgaagtgtctgcttgacttatatcctgtgttgctgctggctttttccatgtgcattttttgcaagctgctctttttacttcagtc

SEQ ID NO: 21756 - DNA, 120 bp, Artificial Sequence
  ENSG00000026297_56 (sequence is synthesized)
tcgttaagtcttgcagttctggctagaggcctactgccatgaataagctgccgctccacagtggcttctttgaagtcttagagtcagatgagtttcacggtgttcaggtttgtgatccag

SEQ ID NO: 21757 - DNA, 120 bp, Artificial Sequence
  ENSG00000026297_57 (sequence is synthesized)
tgtggccccaggttctgggtaacacgtgtgatgcagtgctgtgtgcataccatgtcgtgaataacattcatgatgcagtgcacataccgtgttcaagttaacagtcctggtggcatctga

SEQ ID NO: 21758 - DNA, 120 bp, Artificial Sequence
  ENSG00000026297_58 (sequence is synthesized)
agtagcaccctaaaatcaaatgacacaaattctgcagagaagcaagtgaagtctaaaaactgagttggggtagtaacgataaatagcgttatgctagttcaggttatgttttgttgccaa

SEQ ID NO: 21759 - DNA, 120 bp, Artificial Sequence
  ENSG00000026297_59 (sequence is synthesized)
atgaattacaaaaaactaccaggtttcaggcttttatgggtttcacgaatgcaggggagggatcgtgggtctgcatttctcttgagcatccttaggagaaaggtgcttcgtggctcagtg

SEQ ID NO: 21760 - DNA, 120 bp, Artificial Sequence
  ENSG00000026297_60 (sequence is synthesized)
gcttcccttcagtgaggccctccctggctgcactcctagcttgccctgcctccgcttcccctcctctcccctcctccccttatcctattcatgttctccgccactcagcactggacgcca

SEQ ID NO: 21761 - DNA, 120 bp, Artificial Sequence
  ENSG00000026297_61 (sequence is synthesized)
ccacacgtgccttcttagtgtaggggtgtaccgccttcctcacgggagtgtgtgcagcagcagggcaggcagtgttcctcctcccacagcactcagtgctgaatgaatgattgaagggat

SEQ ID NO: 21762 - DNA, 120 bp, Artificial Sequence
  ENSG00000026297_62 (sequence is synthesized)
gatcacacagagtgggtgcagagtattgggatgcccatctggaccatctcatcatcagagtcggccatagggaaaacgaggactcaaccagcatgtgccgttctcagccatgattcctga

SEQ ID NO: 21763 - DNA, 120 bp, Artificial Sequence
  ENSG00000026508_0 (sequence is synthesized)
gagaagaaagccagtgcgtctctgggcgcaggggccagtggggctcggaggcacaggcaccccgcgacactccaggttccccgacccacgtccctggcagccccgattatttacagcctc

SEQ ID NO: 21764 - DNA, 120 bp, Artificial Sequence
  ENSG00000026508_1 (sequence is synthesized)
agcagagcacggggcgggggcagaggggcccgcccgggagggctgctacttcttaaaacctctgcgggctgcttagtcacagccccccttgcttgggtgtgtccttcgctcgctccctcc

SEQ ID NO: 21765 - DNA, 120 bp, Artificial Sequence
  ENSG00000026508_2 (sequence is synthesized)
ctccgtcttaggtcactgttttcaacctcgaataaaaactgcagccaacttccgaggcagcctcattgcccagcggaccccagcctctgccaggttcggtccgccatcctcgtcccgtcc

SEQ ID NO: 21766 - DNA, 120 bp, Artificial Sequence
  ENSG00000026508_3 (sequence is synthesized)
tccgccggcccctgccccgcgcccagggatcctccagctcctttcgcccgcgccctccgttcgctccggacaccatggacaagttttggtggcacgcagcctggggactctgcctcgtgc

SEQ ID NO: 21767 - DNA, 120 bp, Artificial Sequence
  ENSG00000026508_4 (sequence is synthesized)
cgctgagcctggcgcagatcgatttgaatataacctgccgctttgcaggtgtattccacgtggagaaaaatggtcgctacagcatctctcggacggaggccgctgacctctgcaaggctt

SEQ ID NO: 21768 - DNA, 120 bp, Artificial Sequence
  ENSG00000026508_5 (sequence is synthesized)
tcaatagcaccttgcccacaatggcccagatggagaaagctctgagcatcggatttgagacctgcaggtatgggttcatagaagggcacgtggtgattccccggatccaccccaactcca

SEQ ID NO: 21769 - DNA, 120 bp, Artificial Sequence
  ENSG00000026508_6 (sequence is synthesized)
tctgtgcagcaaacaacacaggggtgtacatcctcacatccaacacctcccagtatgacacatattgcttcaatgcttcagctccacctgaagaagattgtacatcagtcacagacctgc

SEQ ID NO: 21770 - DNA, 120 bp, Artificial Sequence
  ENSG00000026508_7 (sequence is synthesized)
ccaatgcctttgatggaccaattaccataactattgttaaccgtgatggcacccgctatgtccagaaaggagaatacagaacgaatcctgaagacatctaccccagcaaccctactgatg

SEQ ID NO: 21771 - DNA, 120 bp, Artificial Sequence
  ENSG00000026508_8 (sequence is synthesized)
atgacgtgagcagcggctcctccagtgaaaggagcagcacttcaggaggttacatcttttacaccttttctactgtacaccccatcccagacgaagacagtccctggatcaccgacagca

SEQ ID NO: 21772 - DNA, 120 bp, Artificial Sequence
  ENSG00000026508_9 (sequence is synthesized)
cagacagaatccctgctaccactttgatgagcactagtgctacagcaactgagacagcaaccaagaggcaagaaacctgggattggttttcatggttgtttctaccatcagagtcaaaga

SEQ ID NO: 21773 - DNA, 120 bp, Artificial Sequence
  ENSG00000026508_10 (sequence is synthesized)
atcatcttcacacaacaacacaaatggctggtacgtcttcaaataccatctcagcaggctgggagccaaatgaagaaaatgaagatgaaagagacagacacctcagtttttctggatcag

SEQ ID NO: 21774 - DNA, 120 bp, Artificial Sequence
  ENSG00000026508_11 (sequence is synthesized)
gcattgatgatgatgaagattttatctccagcaccatttcaaccacaccacgggcttttgaccacacaaaacagaaccaggactggacccagtggaacccaagccattcaaatccggaag

SEQ ID NO: 21775 - DNA, 120 bp, Artificial Sequence
  ENSG00000026508_12 (sequence is synthesized)
tgctacttcagacaaccacaaggatgactgatgtagacagaaatggcaccactgcttatgaaggaaactggaacccagaagcacaccctcccctcattcaccatgagcatcatgaggaag

SEQ ID NO: 21776 - DNA, 120 bp, Artificial Sequence
  ENSG00000026508_13 (sequence is synthesized)
aagagaccccacattctacaagcacaatccaggcaactcctagtagtacaacggaagaaacagctacccagaaggaacagtggtttggcaacagatggcatgagggatatcgccaaacac

SEQ ID NO: 21777 - DNA, 120 bp, Artificial Sequence
  ENSG00000026508_14 (sequence is synthesized)
ccaaagaagactcccattcgacaacagggacagctgcagcctcagctcataccagccatccaatgcaaggaaggacaacaccaagcccagaggacagttcctggactgatttcttcaacc

SEQ ID NO: 21778 - DNA, 120 bp, Artificial Sequence
  ENSG00000026508_15 (sequence is synthesized)
caatctcacaccccatgggacgaggtcatcaagcaggaagaaggatggatatggactccagtcatagtataacgcttcagcctactgcaaatccaaacacaggtttggtggaagatttgg

SEQ ID NO: 21779 - DNA, 120 bp, Artificial Sequence
  ENSG00000026508_16 (sequence is synthesized)
acaggacaggacctctttcaatgacaacgcagcagagtaattctcagagcttctctacatcacatgaaggcttggaagaagataaagaccatccaacaacttctactctgacatcaagca

SEQ ID NO: 21780 - DNA, 120 bp, Artificial Sequence
  ENSG00000026508_17 (sequence is synthesized)
ataggaatgatgtcacaggtggaagaagagacccaaatcattctgaaggctcaactactttactggaaggttatacctctcattacccacacacgaaggaaagcaggaccttcatcccag

SEQ ID NO: 21781 - DNA, 120 bp, Artificial Sequence
  ENSG00000026508_18 (sequence is synthesized)
tgacctcagctaagactgggtcctttggagttactgcagttactgttggagattccaactctaatgtcaatcgttccttatcaggagaccaagacacattccaccccagtggggggtccc

SEQ ID NO: 21782 - DNA, 120 bp, Artificial Sequence
  ENSG00000026508_19 (sequence is synthesized)
ataccactcatggatctgaatcagatggacactcacatgggagtcaagaaggtggagcaaacacaacctctggtcctataaggacaccccaaattccagaatggctgatcatcttggcat

SEQ ID NO: 21783 - DNA, 120 bp, Artificial Sequence
  ENSG00000026508_20 (sequence is synthesized)
ccctcttggccttggctttgattcttgcagtttgcattgcagtcaacagtcgaagaaggtgtgggcagaagaaaaagctagtgatcaacagtggcaatggagctgtggaggacagaaagc

SEQ ID NO: 21784 - DNA, 120 bp, Artificial Sequence
  ENSG00000026508_21 (sequence is synthesized)
caagtggactcaacggagaggccagcaagtctcaggaaatggtgcatttggtgaacaaggagtcgtcagaaactccagaccagtttatgacagctgatgagacaaggaacctgcagaatg

SEQ ID NO: 21785 - DNA, 120 bp, Artificial Sequence
  ENSG00000026508_22 (sequence is synthesized)
tggacatgaagattggggtgtaacacctacaccattatcttggaaagaaacaaccgttggaaacataaccattacagggagctgggacacttaacagatgcaatgtgctactgattgttt

SEQ ID NO: 21786 - DNA, 120 bp, Artificial Sequence
  ENSG00000026508_23 (sequence is synthesized)
tgctttctgaaattagggcccaattaataatcagcaagaatttgatcgttccagttcccacttggaggcctttcatccctcgggtgtgctatggatggcttctaacaaaaactacacata

SEQ ID NO: 21787 - DNA, 120 bp, Artificial Sequence
  ENSG00000026508_24 (sequence is synthesized)
tgtattcctgatcgccaacctttcccccaccagctaaggacatttcccagggttaatagggcctggtccctgggaggaaatttgaatgggtccattttgcccttccatagcctaatccct

SEQ ID NO: 21788 - DNA, 120 bp, Artificial Sequence
  ENSG00000026508_25 (sequence is synthesized)
gggcattgctttccactgaggttgggggttggggtgtactagttacacatcttcaacagaccccctctagaaatttttcagatgcttctgggagacacccaaagggtgaagctatttatc

SEQ ID NO: 21789 - DNA, 120 bp, Artificial Sequence
  ENSG00000026508_26 (sequence is synthesized)
tgtagtaaactatttatctgtgtttttgaaatattaaaccctggatcagtcctttgatcagtataattttttaaagttactttgtcagaggcacaaaagggtttaaactgattcataata

SEQ ID NO: 21790 - DNA, 120 bp, Artificial Sequence
  ENSG00000026508_27 (sequence is synthesized)
aatatctgtacttcttcgatcttcaccttttgtgctgtgattcttcagtttctaaaccagcactgtctgggtccctacaatgtatcaggaagagctgagaatggtaaggagactcttcta

SEQ ID NO: 21791 - DNA, 120 bp, Artificial Sequence
  ENSG00000026508_28 (sequence is synthesized)
taaggagactcttctaagtcttcatctcagagaccctgagttcccactcagacccactcagccaaatctcatggaagaccaaggagggcagcactgtttttgttttttgttttttgtttt

SEQ ID NO: 21792 - DNA, 120 bp, Artificial Sequence
  ENSG00000026508_29 (sequence is synthesized)
ccaaaggttttccatcctgtcctggaatcagagttggaagctgaggagcttcagcctcttttatggtttaatggccacctgttctctcctgtgaaaggctttgcaaagtcacattaagtt

SEQ ID NO: 21793 - DNA, 120 bp, Artificial Sequence
  ENSG00000026508_30 (sequence is synthesized)
tgcatgacctgttatccctggggccctatttcatagaggctggccctattagtgatttccaaaaacaatatggaagtgccttttgatgtcttacaataagagaagaagccaatggaaatg

SEQ ID NO: 21794 - DNA, 120 bp, Artificial Sequence
  ENSG00000026508_31 (sequence is synthesized)
aaagagattggcaaaggggaaggatgatgccatgtagatcctgtttgacatttttatggctgtatttgtaaacttaaacacaccagtgtctgttcttgatgcagttgctatttaggatga

SEQ ID NO: 21795 - DNA, 120 bp, Artificial Sequence
  ENSG00000026508_32 (sequence is synthesized)
gttaagtgcctggggagtccctcaaaaggttaaagggattcccatcattggaatcttatcaccagataggcaagtttatgaccaaacaagagagtactggctttatcctctaacctcata

SEQ ID NO: 21796 - DNA, 120 bp, Artificial Sequence
  ENSG00000026508_33 (sequence is synthesized)
ttttctcccacttggcaagtcctttgtggcatttattcatcagtcagggtgtccgattggtcctagaacttccaaaggctgcttgtcatagaagccattgcatctataaagcaacggctc

SEQ ID NO: 21797 - DNA, 120 bp, Artificial Sequence
  ENSG00000026508_34 (sequence is synthesized)
ctgttaaatggtatctcctttctgaggctcctactaaaagtcatttgttacctaaacttatgtgcttaacaggcaatgcttctcagaccacaaagcagaaagaagaagaaaagctcctga

SEQ ID NO: 21798 - DNA, 120 bp, Artificial Sequence
  ENSG00000026508_35 (sequence is synthesized)
ctaaatcagggctgggcttagacagagttgatctgtagaatatctttaaaggagagatgtcaactttctgcactattcccagcctctgctcctccctgtctaccctctcccctccctctc

SEQ ID NO: 21799 - DNA, 120 bp, Artificial Sequence
  ENSG00000026508_36 (sequence is synthesized)
tccctccacttcaccccacaatcttgaaaaacttcctttctcttctgtgaacatcattggccagatccattttcagtggtctggatttctttttattttcttttcaacttgaaagaaact

SEQ ID NO: 21800 - DNA, 120 bp, Artificial Sequence
  ENSG00000026508_37 (sequence is synthesized)
ggacattaggccactatgtgttgttactgccactagtgttcaagtgcctcttgttttcccagagatttcctgggtctgccagaggcccagacaggctcactcaagctctttaactgaaaa

SEQ ID NO: 21801 - DNA, 120 bp, Artificial Sequence
  ENSG00000026508_38 (sequence is synthesized)
gcaacaagccactccaggacaaggttcaaaatggttacaacagcctctacctgtcgccccagggagaaaggggtagtgatacaagtctcatagccagagatggttttccactccttctag

SEQ ID NO: 21802 - DNA, 120 bp, Artificial Sequence
  ENSG00000026508_39 (sequence is synthesized)
atattcccaaaaagaggctgagacaggaggttattttcaattttattttggaattaaatacttttttccctttattactgttgtagtccctcacttggatatacctctgttttcacgata

SEQ ID NO: 21803 - DNA, 120 bp, Artificial Sequence
  ENSG00000026508_40 (sequence is synthesized)
gaaataagggaggtctagagcttctattccttggccattgtcaacggagagctggccaagtcttcacaaacccttgcaacattgcctgaagtttatggaataagatgtattctcactccc

SEQ ID NO: 21804 - DNA, 120 bp, Artificial Sequence
  ENSG00000026508_41 (sequence is synthesized)
ttgatctcaagggcgtaactctggaagcacagcttgactacacgtcatttttaccaatgattttcaggtgacctgggctaagtcatttaaactgggtctttataaaagtaaaaggccaac

SEQ ID NO: 21805 - DNA, 120 bp, Artificial Sequence
  ENSG00000026508_42 (sequence is synthesized)
atttaattattttgcaaagcaacctaagagctaaagatgtaatttttcttgcaattgtaaatcttttgtgtctcctgaagacttcccttaaaattagctctgagtgaaaaatcaaaagag

SEQ ID NO: 21806 - DNA, 120 bp, Artificial Sequence
  ENSG00000026508_43 (sequence is synthesized)
acaaaagacatcttcgaatccatatttcaagcctggtagaattggcttttctagcagaacctttccaaaagttttatattgagattcataacaacaccaagaattgattttgtagccaac

SEQ ID NO: 21807 - DNA, 120 bp, Artificial Sequence
  ENSG00000026508_44 (sequence is synthesized)
attcattcaatactgttatatcagaggagtaggagagaggaaacatttgacttatctggaaaagcaaaatgtacttaagaataagaataacatggtccattcacctttatgttatagata

SEQ ID NO: 21808 - DNA, 120 bp, Artificial Sequence
  ENSG00000026508_45 (sequence is synthesized)
tgtctttgtgtaaatcatttgttttgagttttcaaagaatagcccattgttcattcttgtgctgtacaatgaccactgttattgttactttgacttttcagagcacacccttcctctggt

SEQ ID NO: 21809 - DNA, 120 bp, Artificial Sequence
  ENSG00000026508_46 (sequence is synthesized)
ttttgtatatttattgatggatcaataataatgaggaaagcatgatatgtatattgctgagttgaaagcacttattggaaaatattaaaaggctaacattaaaagactaaaggaaacaga

SEQ ID NO: 21810 - DNA, 120 bp, Artificial Sequence
  ENSG00000026508_47 (sequence is synthesized)
aacggtagacattgaggacattgaacaaaaggacactggaggaattgtcacgagatgttaggttacttaataaattatgctgcagttcacacagagccaaaccttaaaggctcataacaa

SEQ ID NO: 21811 - DNA, 120 bp, Artificial Sequence
  ENSG00000026508_48 (sequence is synthesized)
gaagattttatctccagcaccagtattctttttcagaatcatctataggaaagctctagctgctcaggcattcctttccccactgaaattactaacaacataaagtgattatcatggtat

SEQ ID NO: 21812 - DNA, 120 bp, Artificial Sequence
  ENSG00000026508_49 (sequence is synthesized)
aacagtcgaagaagttgaagagattcaggttatagcataagaagagcactgtttcatcgtcttcttgctgttaggaggtctatgaagcagagaagaactttcctttggaaaacaactaaa

SEQ ID NO: 21813 - DNA, 120 bp, Artificial Sequence
  ENSG00000026508_50 (sequence is synthesized)
tgaagacagtcacctcgctagaactgacacatgggctgtttttatattcttgaaggccactctctccctacctgaaccaagacctataggtttacatgttatttacattttatatataat

SEQ ID NO: 21814 - DNA, 120 bp, Artificial Sequence
  ENSG00000026508_51 (sequence is synthesized)
atatatatacacatacattatatatacacaatagtaattctagcaacagaggaaatgacctttaacaggggtataaatctaaatttataaaagtataaatctaaatttcttacccaagac

SEQ ID NO: 21815 - DNA, 120 bp, Artificial Sequence
  ENSG00000026508_52 (sequence is synthesized)
cccaagacactttaaagatacattatttttctccaggacgtaattcataggaatattaagccttttgtaaatgtccctttagatggtttctcataaggtaaaagaaacttatttccaagc

SEQ ID NO: 21816 - DNA, 120 bp, Artificial Sequence
  ENSG00000026508_53 (sequence is synthesized)
aggaccacctttattgtgtccccagatcacctcacagggcagaaaaatgcccctcagtctgggagaagacctagagagaattatggactccttactggtttttggaaagcaaccaacagc

SEQ ID NO: 21817 - DNA, 120 bp, Artificial Sequence
  ENSG00000026508_54 (sequence is synthesized)
taattccaacaccatgggcagcccatacagtctctaattatctgagaaaatcaaatgatgctgttacaataattacgctggtacaagttaataaaagtgccatgttacagtcaaacagct

SEQ ID NO: 21818 - DNA, 120 bp, Artificial Sequence
  ENSG00000026508_55 (sequence is synthesized)
atgttgctatctataccattgagggcatagttttaaaaagtagttatgctacctgattgtataaggaacaaaactgagagaaaaaatctaaaaggccgcctatgattgaatggaaagatt

SEQ ID NO: 21819 - DNA, 120 bp, Artificial Sequence
  ENSG00000026508_56 (sequence is synthesized)
ttttttagttgaatttaaataatgtgacttgggggagcctttacaaagagtctttatacctcccttcagcttcctcattttcccttggattacttttgctcaattaaatatgaatttcct

SEQ ID NO: 21820 - DNA, 120 bp, Artificial Sequence
  ENSG00000026508_57 (sequence is synthesized)
agcacccgaccactggggaaagctggcggcctgggaccaggcagctgggcttagaactggaaggctcctttcccacagctgaatggattattgcctaaggagtcaaccccacgtattaat

SEQ ID NO: 21821 - DNA, 120 bp, Artificial Sequence
  ENSG00000026508_58 (sequence is synthesized)
ttggccaagtcaatctgcaacctgtatgacaactggagtttaaagtcagctaaagacacctttgtgaatcatagagcgggaacccagaggaagccattaggggtcctctcggctggaatc

SEQ ID NO: 21822 - DNA, 120 bp, Artificial Sequence
  ENSG00000026508_59 (sequence is synthesized)
ctcttgtctaacctgcttccacagagctctcctggctttgaagaagctgcagtatcattgtcagaaccacaagaaaacataaaccaaataacagtgtttgaaataaatatgtggctgtta

SEQ ID NO: 21823 - DNA, 120 bp, Artificial Sequence
  ENSG00000026508_60 (sequence is synthesized)
gtcaagaagtacttctccttcatcttcctttgatgtcggtaactcatcctttctgcactgcgggagttgttaatgcttttgtgtcctccagttcacatgctgattgctaagaagaaaatg

SEQ ID NO: 21824 - DNA, 120 bp, Artificial Sequence
  ENSG00000026508_61 (sequence is synthesized)
agcatgagtgaacccaaagctgctgaaacattctgcgtttatgcaacttccttgccctctatacaaggaagatggtttcattgtcttgtctagagaataaagtcttttttaaaaataaaa

SEQ ID NO: 21825 - DNA, 120 bp, Artificial Sequence
  ENSG00000026508_62 (sequence is synthesized)
agcacttcaggagatatggactccagtcatagtataacgcttcagcctactgcaaatccaaacacaggtttggtggaagatttggacaggacaggacctctttcaatgacaacgcagcag

SEQ ID NO: 21826 - DNA, 120 bp, Artificial Sequence
  ENSG00000026508_63 (sequence is synthesized)
ttcaaccacaccacgggcttttgaccacacaaaacagaaccaggactggacccagtggaacccaagccattcaaatccggaagtgctacttcagacaaccacaaggatgactgtccaggc

SEQ ID NO: 21827 - DNA, 120 bp, Artificial Sequence
  ENSG00000026508_64 (sequence is synthesized)
ggagaataaatcactgtgcttcccaatagcaattccctggcaaaatgtctctgaccttcctgagcattgcacactcacgtgctgattttctcgtctctagacagctggaagctggtgatg

SEQ ID NO: 21828 - DNA, 120 bp, Artificial Sequence
  ENSG00000026508_65 (sequence is synthesized)
ccattcagggaggtgggctcttgtggttgtcagtaaactgcctgcattgactactactgcctaccttttttcctcatctataactgtttttcttaccttagcataagaagtgccatattg

SEQ ID NO: 21829 - DNA, 120 bp, Artificial Sequence
  ENSG00000026508_66 (sequence is synthesized)
gaagttttattttggggagagccctccttattctcttatccccaggtatacagtaacaattcaagcctgatatgaaaactgttttcattttttcatgtttccttcttgttcttatccacc

SEQ ID NO: 21830 - DNA, 120 bp, Artificial Sequence
  ENSG00000026508_67 (sequence is synthesized)
gaaagatcattcatgtatattctaaaattaccacagtcataaaaagtcttggactttcatgaggaaatagcatagctagatatgaaaaaatatagaaaatcttcatcaatggaactattc

SEQ ID NO: 21831 - DNA, 120 bp, Artificial Sequence
  ENSG00000026508_68 (sequence is synthesized)
ttggggtagacactaatcatatgaaaagacaaatgctcattccctaagatagcctgaatctcatttaaaatgtagaaaacccctttttagtaaagagacatcttctacagtaaccactga

SEQ ID NO: 21832 - DNA, 120 bp, Artificial Sequence
  ENSG00000026508_69 (sequence is synthesized)
gaagaagtggaagtttttcatctcctttttttattcaaaaagaaaaagaatttctcaatttctgaaccacagttcactttagttaacccctttgattgcctaataatgccaaaaatgatt

SEQ ID NO: 21833 - DNA, 120 bp, Artificial Sequence
  ENSG00000026508_70 (sequence is synthesized)
tctctgttaattggcttcacatttttgctctatgctgaagtagtattgggaactgcagtgtagcttccatctctgtttggaggtacactgatctgatctgatactagagaagataaaaaa

SEQ ID NO: 21834 - DNA, 120 bp, Artificial Sequence
  ENSG00000026508_71 (sequence is synthesized)
tgaattagcaaattgtgaacacaatgaaatgactgacgtaggtgtagattccaacatttttctgaaggtgtcttgaccaaaaaaaaaaaaaaaaaaggcacgtgtgaaacctttccattc

SEQ ID NO: 21835 - DNA, 120 bp, Artificial Sequence
  ENSG00000026508_72 (sequence is synthesized)
agcttcggagatcagaacataagaatttggggtatgcaagtcaactccctcactttcttttaaaaatcctgggaaatccattataccttctgtgcctgattttcttcctttgcaagtggg

SEQ ID NO: 21836 - DNA, 120 bp, Artificial Sequence
  ENSG00000026508_73 (sequence is synthesized)
gtatctctcttgagaagtagttaatgtgaaaaatgggtgaacctatgatcataccttagttatatcttgatgagattatggaagaagaaatagaatgttttgagaagtggggaaaatatc

SEQ ID NO: 21837 - DNA, 120 bp, Artificial Sequence
  ENSG00000026508_74 (sequence is synthesized)
tcacaaaatttctcttgtctcatgttcttcctgttttatttatctatgggatctactgctacagattgtctttgaatgatcaggctttatcagagaatgacattaaaacagtacaaaaaa

SEQ ID NO: 21838 - DNA, 120 bp, Artificial Sequence
  ENSG00000026508_75 (sequence is synthesized)
tggattaagcaatgaacggtaattaacattgtggacccattcaaggctgttttgccatcattttttggaataccttaaaaagactaaactttgtgataggctgtataagaatgcaaaggt

SEQ ID NO: 21839 - DNA, 120 bp, Artificial Sequence
  ENSG00000026508_76 (sequence is synthesized)
ctgttatccccatcttacgagtgtgaaaagggagacttggagaaggtagattgacccagcacacatggctagttagcaagggacagcggtgagacttaaatccagggttgtccagctcta

SEQ ID NO: 21840 - DNA, 120 bp, Artificial Sequence
  ENSG00000026508_77 (sequence is synthesized)
gacaccaaagtcctgaacactgtgcaacactgctgctgagaattctcatgttccttgacacaaaataacattactaagccttagccttaatcaaatgaggtgggggggaaatcttttgtg

SEQ ID NO: 21841 - DNA, 120 bp, Artificial Sequence
  ENSG00000026559_0 (sequence is synthesized)
gcagagacggggcggccgtggctccgagggcgggagctgagccgggccccgggaccgaagtttggcggcggctccgggaggcagagcgggctccccgggcgacttccaggcccctctcgc

SEQ ID NO: 21842 - DNA, 120 bp, Artificial Sequence
  ENSG00000026559_1 (sequence is synthesized)
ccccgggcgacttccaggcccctctcgcgtcctcgccccggacccgtgggcagccggggggaacggaagccgcggccgggccaactccgaggcggggacgccgcgacgggaacttgaggc

SEQ ID NO: 21843 - DNA, 120 bp, Artificial Sequence
  ENSG00000026559_2 (sequence is synthesized)
ccgagagggatgtgaaggcccaaaatgaccctcttaccgggagacaattctgactacgactacagcgcgctgagctgcacctcggacgcctccttccacccggccttcctcccgcagcgc

SEQ ID NO: 21844 - DNA, 120 bp, Artificial Sequence
  ENSG00000026559_3 (sequence is synthesized)
caggccatcaagggcgcgttctaccgccgggcgcagcggctgcggccgcaggatgagccccgccagggctgtcagcccgaggaccgccgccgtcggatcatcatcaacgtaggcggcatc

SEQ ID NO: 21845 - DNA, 120 bp, Artificial Sequence
  ENSG00000026559_4 (sequence is synthesized)
aagtactcgctgccctggaccacgctggacgagttcccgctgacgcgcctgggccagctcaaggcctgcaccaacttcgacgacatcctcaacgtgtgcgatgactacgacgtcacctgc

SEQ ID NO: 21846 - DNA, 120 bp, Artificial Sequence
  ENSG00000026559_5 (sequence is synthesized)
aacgagttcttcttcgaccgcaacccgggggccttcggcactatcctgaccttcctgcgcgcgggcaagctgcggctgctgcgcgagatgtgcgcgctgtccttccaggaggagctgctg

SEQ ID NO: 21847 - DNA, 120 bp, Artificial Sequence
  ENSG00000026559_6 (sequence is synthesized)
tactggggcatcgcggaggaccacctggacggctgctgcaagcgccgctacctgcagaagattgaggagttcgcggagatggtggagcgggaggaagaggacgacgcgctggacagcgag

SEQ ID NO: 21848 - DNA, 120 bp, Artificial Sequence
  ENSG00000026559_7 (sequence is synthesized)
ggccgcgacagcgagggcccggccgagggcgagggccgcctggggcgctgcatgcggcgactgcgcgacatggtggagaggccgcactcggggctgcctggcaaggtgttcgcctgcctg

SEQ ID NO: 21849 - DNA, 120 bp, Artificial Sequence
  ENSG00000026559_8 (sequence is synthesized)
tcggtgctcttcgtgaccgtcaccgccgtcaacctctccgtcagcaccttgcccagcctgagggaggaggaggagcagggccactgttcccagatgtgccacaacgtcttcatcgtggag

SEQ ID NO: 21850 - DNA, 120 bp, Artificial Sequence
  ENSG00000026559_9 (sequence is synthesized)
gttcctcctgcggctcattcaggcgcccagcaagttcgccttcctgcggagcccgctgacgctgatcgacctggtggccatcctgccctactacatcacgctgctggtggacggcgccgc

SEQ ID NO: 21851 - DNA, 120 bp, Artificial Sequence
  ENSG00000026559_10 (sequence is synthesized)
cgcaggccgtcgcaagcccggcgcgggcaacagctacctggacaaggtggggctggtgctgcgcgtgctgcgggcgctgcgcatcctgtacgtgatgcgcctggcgcgccactccctggg

SEQ ID NO: 21852 - DNA, 120 bp, Artificial Sequence
  ENSG00000026559_11 (sequence is synthesized)
gctgcagacgctggggctcacggcccgccgctgcacccgcgagttcgggctcctgctgctcttcctctgcgtggccatcgccctcttcgcgcccctgctctacgtcatcgagaacgagat

SEQ ID NO: 21853 - DNA, 120 bp, Artificial Sequence
  ENSG00000026559_12 (sequence is synthesized)
ggccgacagccccgagttcaccagcatccctgcctgctactggtgggctgtcatcaccatgacgacggtgggctatggcgacatggtccccaggagcaccccgggccaggtagtggccct

SEQ ID NO: 21854 - DNA, 120 bp, Artificial Sequence
  ENSG00000026559_13 (sequence is synthesized)
gagcagcatcctgagcggcatcctgctcatggccttcccagtcacctccatcttccacaccttctcccgctcctacctggagctcaagcaggagcaagagagggtgatgttccggagggc

SEQ ID NO: 21855 - DNA, 120 bp, Artificial Sequence
  ENSG00000026559_14 (sequence is synthesized)
gcagttcctcatcaaaaccaagtcgcagctgagcgtgtcccaggacagtgacatcttgttcggaagtgcctcctcggacaccagagacaataactgagcgcggaggacacgcctgccctg

SEQ ID NO: 21856 - DNA, 120 bp, Artificial Sequence
  ENSG00000026559_15 (sequence is synthesized)
cctgccatctgtggcccgaagccattgccatccactgcagacgcctggagagggacaggccgcttccgagtgcagtcctggcgcagcaccgactcccacgcacccggggaaggacaccct

SEQ ID NO: 21857 - DNA, 120 bp, Artificial Sequence
  ENSG00000026559_16 (sequence is synthesized)
cactcccacaccccgggaagaacactagaacatcagcagaggggccctgcccctccgcctgcagccgtgaaaggaagctgggtcatcagcccagccccgcccaccccagcccctatgtgt

SEQ ID NO: 21858 - DNA, 120 bp, Artificial Sequence
  ENSG00000026559_17 (sequence is synthesized)
gtttccctcaataaggagatgccttgttcttttcaccatgcaaataacatgcccagcaaaaacttgctttatgggtctgcctggagaaaaaaaaaaaaaatacaaacagcagaaacagca

SEQ ID NO: 21859 - DNA, 120 bp, Artificial Sequence
  ENSG00000026559_18 (sequence is synthesized)
tgaaaagagagatcaccaaggaaagtgcctgaaagggattattcccacgcctccaaaggatcctggcaggctgtgcctgaggagatgggttccaattttagggagcaggctgcctaatga

SEQ ID NO: 21860 - DNA, 120 bp, Artificial Sequence
  ENSG00000026559_19 (sequence is synthesized)
ctgctgccgagacaggatcactttccacacaggaaactcacgtgggggcagggcgtgaaggaaataaatcactaattgggggagttttctgctggagggaaagctgggagggttgaaaga

SEQ ID NO: 21861 - DNA, 120 bp, Artificial Sequence
  ENSG00000026559_20 (sequence is synthesized)
agaaattcctaaaaagaagaggtgattacagccatggggattcacaagagccctccagggcttgtgtgaggcattttccgtttacctccatcaccattcttgccaaacagaatgtcactt

SEQ ID NO: 21862 - DNA, 120 bp, Artificial Sequence
  ENSG00000026559_21 (sequence is synthesized)
cgggcgccaccgaagcgcgaaccggaccccgagcctgcaaactcgggctcgggggcggctgcacgtggccgtggccctgaactccctgcgggggcctcgaaacccgcctgcggggaggcc

SEQ ID NO: 21863 - DNA, 120 bp, Artificial Sequence
  ENSG00000026559_22 (sequence is synthesized)
tattgagcactgactgtataccctgcatgtgctaagtgctttacgtgcactctcgaatttaacattagaagtactcaccatgtcaggatttttccacttatgtatgtggaggttgcagtg

SEQ ID NO: 21864 - DNA, 88 bp, Artificial Sequence
  ENSG00000026559_23 (sequence is synthesized)
tagagatgggggtgttgctatgttgcccaggttggactcgaactcttggactcaagcattcctcctgcctcagcctcctgaatagctg

SEQ ID NO: 21865 - DNA, 120 bp, Artificial Sequence
  ENSG00000026559_24 (sequence is synthesized)
ctcagcctcctgaatagctgggactaaaggcatatgccatcacacccagctggtaaaatcaactttcaataagcatgaagggtagtgatgaagagatcagggctagagccagatggcctg

SEQ ID NO: 21866 - DNA, 120 bp, Artificial Sequence
  ENSG00000026559_25 (sequence is synthesized)
ggctagagccagatggcctgaattcaaatcctgctttctcctctctagctgtgtagtagctgtgggcaagttacttaaactctttgagcctctgatttctcacctgtccagggcgggtat

SEQ ID NO: 21867 - DNA, 120 bp, Artificial Sequence
  ENSG00000026559_26 (sequence is synthesized)
tgatttctcacctgtccagggcgggtatgaacaggcccacctcacagtgttgcaaggattcagtgagttcgcatgaagtgattagaagtgattggggctgggtgcggtggctcacgcctg

SEQ ID NO: 21868 - DNA, 120 bp, Artificial Sequence
  ENSG00000026559_27 (sequence is synthesized)
actgagtccacgccacatgaagggattagaagcgatgcatagtgaatgtgcagaaagtcctctcttaaggattagggtcaagaagaaaaagaaaggaaagggaaagtgctcaccatttga

SEQ ID NO: 21869 - DNA, 120 bp, Artificial Sequence
  ENSG00000026559_28 (sequence is synthesized)
gacctgtctggaaattgctgtacttagtgtaaatttcttctcagcttcaacatctttgatcgtgattttatcaggaaaatactaataaagccactgttttgttcaacttctgatacttgc

SEQ ID NO: 21870 - DNA, 120 bp, Artificial Sequence
  ENSG00000026559_29 (sequence is synthesized)
tttttgaaaagataataatacctttgcctttttaaggattcagtgaaaatgctgttcttcaacttcattttggggtgcagtaggattcactgcttcacatgctccttgtgcacacatttg

SEQ ID NO: 21871 - DNA, 120 bp, Artificial Sequence
  ENSG00000026559_30 (sequence is synthesized)
agtgcctactgtatgcaggcactacaggggagacagggtgaccaggacaagtcttccaacctcaagaagcttcaagtctattggggttgggatggagtagtggcaccacccacccccccc

SEQ ID NO: 21872 - DNA, 120 bp, Artificial Sequence
  ENSG00000026559_31 (sequence is synthesized)
atcaccataagcaggagacacaagccaaggaggttctgtatgggaggcccactgacactgctggagctacttagtggggcacgctccaggaaagcttcccagaggaaggggcttcccatc

SEQ ID NO: 21873 - DNA, 120 bp, Artificial Sequence
  ENSG00000026559_32 (sequence is synthesized)
ccagaggtctaagaccttaaagccccaccaggtattagttcatatctccagcctctaacatattcctagagacagaattgttcaagtgggacttgtagaactcagctgtgccccagaacc

SEQ ID NO: 21874 - DNA, 120 bp, Artificial Sequence
  ENSG00000026559_33 (sequence is synthesized)
tccaagatgccccaggctggaaccacactggcctctcctctctgccaaaggccccttcaaggatgaggcccaaatccactaaaggactgtttaccacccaattatattccagaccagaga

SEQ ID NO: 21875 - DNA, 120 bp, Artificial Sequence
  ENSG00000026559_34 (sequence is synthesized)
ggcaagctggcagcctgcatgccaaacccaacaaaaatatgtgttttagtggcccatagagtatttctttgcactgaattatcaccaggacttaaatcaacattttatctatttaaccaa

SEQ ID NO: 21876 - DNA, 120 bp, Artificial Sequence
  ENSG00000026559_35 (sequence is synthesized)
ttatcaccaacatttgtcaccaggagagttcatgtaaaactgcacatttccagcctcttttgaaagcttcggtgaggcagcctcagcctaaatttgcccggggcagtgatgggggcactg

SEQ ID NO: 21877 - DNA, 120 bp, Artificial Sequence
  ENSG00000026559_36 (sequence is synthesized)
aacaagactattcctcacagtccatcgggagccgtggagggtgctaagcagaggaggaacaggatccctctggctatgtgtggaaaatggactgcagggatgagggagcccagcggggag

SEQ ID NO: 21878 - DNA, 120 bp, Artificial Sequence
  ENSG00000026559_37 (sequence is synthesized)
gtgaggtgactgcaaccatccaggcaagaaaggatggtggccagaccaggtgggagcagtgggcagtgggtttgattctcgcactgttttaaatgaagagacttcctgggggttatacgc

SEQ ID NO: 21879 - DNA, 120 bp, Artificial Sequence
  ENSG00000026559_38 (sequence is synthesized)
aaggtggtaaggatgacgccaggtctcctgtcctaagccattggaaagatgggattgcctaaagctagggagggaaaccaccagtgggcagaggaaaccaggatcccatggtgagttcga

SEQ ID NO: 21880 - DNA, 120 bp, Artificial Sequence
  ENSG00000026559_39 (sequence is synthesized)
gatgcccctcagacacccaggtgggagcgtcagggaggcagcctgttgggggtctggagttcagggctgaggtgggggctggagagagagatgaggagcggccagtgtagagatggtgct

SEQ ID NO: 21881 - DNA, 120 bp, Artificial Sequence
  ENSG00000026559_40 (sequence is synthesized)
tagtgccccaggcctcggagtgggcacaactagggagaggacccggggccactcaacctggagaggtcaccttccgcctgggaagcccagcagggcacagggcagagcttctgccctcct

SEQ ID NO: 21882 - DNA, 120 bp, Artificial Sequence
  ENSG00000026559_41 (sequence is synthesized)
ttcctggagggcccgctgacccctccggcgtcccttcccctctctcccagggccactgttcccagatgtgccacaacgtcttcatcgtggagtcggtgtgcgtgggctggttctccctgg

SEQ ID NO: 21883 - DNA, 120 bp, Artificial Sequence
  ENSG00000026652_0 (sequence is synthesized)
gctttttctttccagtgttggctgacttacagctcttataaactagtggcaatttctgaacccagccggctccatctcagcttctggtttctaagtccatgtgccaaaggctgccaggaa

SEQ ID NO: 21884 - DNA, 120 bp, Artificial Sequence
  ENSG00000026652_1 (sequence is synthesized)
ggagacgccttcctgagtcctggatctttcttccttctggaaatctttgactgtgggtagttatttatttctgaataagagcgtccacgcatcatggacctcgcgggactgctgaagtct

SEQ ID NO: 21885 - DNA, 120 bp, Artificial Sequence
  ENSG00000026652_2 (sequence is synthesized)
cagttcctgtgccacctggtcttctgctacgtctttattgcctcagggctaatcatcaacaccattcagctcttcactctcctcctctggcccattaacaagcagctcttccggaagatc

SEQ ID NO: 21886 - DNA, 120 bp, Artificial Sequence
  ENSG00000026652_3 (sequence is synthesized)
aactgcagactgtcctattgcatctcaagccagctggtgatgctgctggagtggtggtcgggcacggaatgcaccatcttcacggacccgcgcgcctacctcaagtatgggaaggaaaat

SEQ ID NO: 21887 - DNA, 120 bp, Artificial Sequence
  ENSG00000026652_4 (sequence is synthesized)
gccatcgtggttctcaaccacaagtttgaaattgactttctgtgtggctggagcctgtccgaacgctttgggctgttagggggctccaaggtcctggccaagaaagagctggcctatgtc

SEQ ID NO: 21888 - DNA, 120 bp, Artificial Sequence
  ENSG00000026652_5 (sequence is synthesized)
ccaattatcggctggatgtggtacttcaccgagatggtcttctgttcgcgcaagtgggagcaggatcgcaagacggttgccaccagtttgcagcacctccgggactaccccgagaagtat

SEQ ID NO: 21889 - DNA, 120 bp, Artificial Sequence
  ENSG00000026652_6 (sequence is synthesized)
tttttcctgattcactgtgagggcacacggttcacggagaagaagcatgagatcagcatgcaggtggcccgggccaaggggctgcctcgcctcaagcatcacctgttgccacgaaccaag

SEQ ID NO: 21890 - DNA, 120 bp, Artificial Sequence
  ENSG00000026652_7 (sequence is synthesized)
ggcttcgccatcaccgtgaggagcttgagaaatgtagtttcagctgtatatgactgtacactcaatttcagaaataatgaaaatccaacactgctgggagtcctaaacggaaagaaatac

SEQ ID NO: 21891 - DNA, 120 bp, Artificial Sequence
  ENSG00000026652_8 (sequence is synthesized)
catgcagatttgtatgttaggaggatcccactggaagacatccctgaagacgatgacgagtgctcggcctggctgcacaagctctaccaggagaaggatgcctttcaggaggagtactac

SEQ ID NO: 21892 - DNA, 120 bp, Artificial Sequence
  ENSG00000026652_9 (sequence is synthesized)
aggacgggcaccttcccagagacgcccatggtgcccccccggcggccctggaccctcgtgaactggctgttttgggcctcgctggtgctctaccctttcttccagttcctggtcagcatg

SEQ ID NO: 21893 - DNA, 120 bp, Artificial Sequence
  ENSG00000026652_10 (sequence is synthesized)
atcaggagcgggtcttccctgacgctggccagcttcatcctcgtcttctttgtggcctccgtgggagttcgatggatgattggtgtgacggaaattgacaagggctctgcctacggcaac

SEQ ID NO: 21894 - DNA, 120 bp, Artificial Sequence
  ENSG00000026652_11 (sequence is synthesized)
tctgacagcaagcagaaactgaatgactgactcagggaggtgtcaccatccgaagggaaccttggggaactggtggcctctgcatatcctccttagtgggacacggtgacaaaggctggg

SEQ ID NO: 21895 - DNA, 120 bp, Artificial Sequence
  ENSG00000026652_12 (sequence is synthesized)
tgagcccctgctgggcacggcggaagtcacgacctctccagccagggagtctggtctcaaggccggatggggaggaagatgttttgtaatctttttttccccatgtgctttagtgggctt

SEQ ID NO: 21896 - DNA, 120 bp, Artificial Sequence
  ENSG00000026652_13 (sequence is synthesized)
tggttttctttttgtgcgagtgtgtgtgagaatggctgtgtggtgagtgtgaactttgttctgtgatcatagaaagggtattttaggctgcaggggagggcagggctggggaccgaaggg

SEQ ID NO: 21897 - DNA, 120 bp, Artificial Sequence
  ENSG00000026652_14 (sequence is synthesized)
gacaagttcccctttcatcctttggtgctgagttttctgtaacccttggttgccagagataaagtgaaaagtgctttaggtgagatgactaaattatgcctccaagaaaaaaaaattaaa

SEQ ID NO: 21898 - DNA, 120 bp, Artificial Sequence
  ENSG00000026652_15 (sequence is synthesized)
gtgcttttctgggtcatctgtggtgtatgttgacatggaccgctgcccctccatcctgcccttgcccgtggctttggtgtttcagatcctactcacgggaggcagctgccgcggaggtgt

SEQ ID NO: 21899 - DNA, 120 bp, Artificial Sequence
  ENSG00000026652_16 (sequence is synthesized)
gggcagctgagaggggtgggcaggccagcacagctcctggcaggagacacaggtccaggagcccgtgagcatttgtgagagcagagatggcaagcacgtgcgtggagaccaacgaagcgt

SEQ ID NO: 21900 - DNA, 120 bp, Artificial Sequence
  ENSG00000026652_17 (sequence is synthesized)
gtccctggcacacagcaagggagagtttcgctcggtctctgcagtgcagtctcctggcgtaagtcttgaagatggacccaactccctgaagaaatggatcttgaaattgaacacaaacat

SEQ ID NO: 21901 - DNA, 120 bp, Artificial Sequence
  ENSG00000026652_18 (sequence is synthesized)
catgaacgtacagcctgggcattctgcagtgatttgtgagatgagcttgcatcgactgttcctctcagcagtgacagccaaagtcacccctgataaaatgcagtttcactttataaaatg

SEQ ID NO: 21902 - DNA, 120 bp, Artificial Sequence
  ENSG00000026652_19 (sequence is synthesized)
cctcgccccttcccagcatgtagagcttgtctgcagccctaaaggagccaggtcctgctctgatgagggtcaaatcagagccgacatcccatgtacaaaaaacccccaggcttctgcctt

SEQ ID NO: 21903 - DNA, 120 bp, Artificial Sequence
  ENSG00000026652_20 (sequence is synthesized)
ccttccgggctcctgtctgctcccattttactccacggaatagttctgccctgtagcatctccagcggcctttgcagactgctgtcagccaacaggtgccaaaaatgcaaaagaagaaga

SEQ ID NO: 21904 - DNA, 120 bp, Artificial Sequence
  ENSG00000026652_21 (sequence is synthesized)
aactaaaagcagtgctatttttgcagaacaaatgctagctattaaatcatcttaggccaagacaccaatggcacttggaccgataggtatttggagcatgagttaggaaggatatgtctt

SEQ ID NO: 21905 - DNA, 120 bp, Artificial Sequence
  ENSG00000026652_22 (sequence is synthesized)
tctccaggtgcgcagctgaaagttgctgagaaaagctgcctgtgttgctgtggtaacatgagaaggaatgaacagctctatacaaaaactggccacacattataaggcctattctatgca

SEQ ID NO: 21906 - DNA, 120 bp, Artificial Sequence
  ENSG00000026652_23 (sequence is synthesized)
gttatgtttttggctatttgctcatttagtcattgtttatcaaccaaactaggtaagccaaggagttacaagacagctctagagaagctccctctgcttacaggacaataatgcattgtt

SEQ ID NO: 21907 - DNA, 120 bp, Artificial Sequence
  ENSG00000026652_24 (sequence is synthesized)
tgtttgttgatacaaatgaattatttgaatccacagaagtgaaaaagggaaaaaatcctggctgacttgtgggaagagcgtactgcagagcctagggcctgagttaactcgctggcggcc

SEQ ID NO: 21908 - DNA, 120 bp, Artificial Sequence
  ENSG00000026652_25 (sequence is synthesized)
ctgcaggcaggcttgatgggagcgcccagcacatctgcccaccctgcacagggcatgaagcaccgtgtgcagagatctgtgggcaaaagcccaggacgtgaccttaggcaagaggggtcc

SEQ ID NO: 21909 - DNA, 120 bp, Artificial Sequence
  ENSG00000026652_26 (sequence is synthesized)
ttggagaagtggaggtgtgcatggtgtgtagccttgcgtgtctgtgagcacgccctagtggacctgcgcctggattatcgggccagtctctcggaggggtccgtgatgctgagttacgcc

SEQ ID NO: 21910 - DNA, 120 bp, Artificial Sequence
  ENSG00000026652_27 (sequence is synthesized)
attcacctgaactctgcagctcatcggctgtaggatttgggtgagacacttttccttgctgactcatttccccatctgcaaaatgggggtgacgatatctacctcttggggtgtgtcaag

SEQ ID NO: 21911 - DNA, 120 bp, Artificial Sequence
  ENSG00000026652_28 (sequence is synthesized)
ggtaaaagagcacactttaagaatcctaaagcactaagccaaggatgaaagactagaaagctgcctctatgttgctactctcaaaaatgctcagaaattttcttgtcgtactaaaaatgt

SEQ ID NO: 21912 - DNA, 120 bp, Artificial Sequence
  ENSG00000026652_29 (sequence is synthesized)
gttatttttctcattttcattcttccattcaacacagaagtaatctaagtaagttctaaaaacatagatccgggggcccacagacattcaattttcttctgaattggctctggtatcaca

SEQ ID NO: 21913 - DNA, 120 bp, Artificial Sequence
  ENSG00000026652_30 (sequence is synthesized)
caacacacaagcaagcaaacagcctgcctgctagggccttgggttccaggctggaggaatgcaggcagaaatctcttaggaaataactaagtgagcgccaagttttgaattgccttagag

SEQ ID NO: 21914 - DNA, 120 bp, Artificial Sequence
  ENSG00000026652_31 (sequence is synthesized)
ccgaaagagaatgtggcgtgctggggagagatctggacctctttctcatcagtcatttgacctgtccacgaagaacaattttgttatgcagcctgggaacctggtttccttacaccctgc

SEQ ID NO: 21915 - DNA, 120 bp, Artificial Sequence
  ENSG00000026652_32 (sequence is synthesized)
gcccttaatgacacagacaaccacgggtactcctggacggaagctcatcacgcctcctcaaataccttcacccatgttcaggtcacacggaggtcaccatctcctcagcacacaacaact

SEQ ID NO: 21916 - DNA, 120 bp, Artificial Sequence
  ENSG00000026652_33 (sequence is synthesized)
ttggttcccagggttattttttctacgagttgaaaacccacggagcctaagccatctttttgtcccctaaggagagccccatagactaagagctacacttcctgtctgtctttcccacct

SEQ ID NO: 21917 - DNA, 120 bp, Artificial Sequence
  ENSG00000026652_34 (sequence is synthesized)
ttccatctcattctagcttaaagcttatcacgctactgagagcctgttctgtagttcaaggtggcagagaaaaatacgaaccttgagtgaaatctggagagcagtgcagggtcatcccca

SEQ ID NO: 21918 - DNA, 120 bp, Artificial Sequence
  ENSG00000026652_35 (sequence is synthesized)
gacgtgacgggccatatcctaggcgactcctgcagcttatagaagcagggaatttaatggacttcttccaggaaagccagcccacggggactcttaaaaagacaccaaccatttggaaga

SEQ ID NO: 21919 - DNA, 120 bp, Artificial Sequence
  ENSG00000026652_36 (sequence is synthesized)
tgcagcttgaggtctgggggactggactgattctgccaccatatagtgaacacgattaatcgggaggaagaagtaaggcactctgtgagttagtctaccaccctattgactttgacagag

SEQ ID NO: 21920 - DNA, 120 bp, Artificial Sequence
  ENSG00000026652_37 (sequence is synthesized)
agaaaaccaacttttttcatatgatcacacagtagtactggaatatctcgactgcaatatcctctaaacaaatgcatgcaaagctttgtaaaagcagctgatgattaaaaaaattttaaa

SEQ ID NO: 21921 - DNA, 120 bp, Artificial Sequence
  ENSG00000026652_38 (sequence is synthesized)
acattagggtttttctaatatatccatatgtgggacagtgatttaaatgtcattaattgtccagccacaacttgtaacagtgatgtgaaagacacaaaaaaggccccactggagtggagg

SEQ ID NO: 21922 - DNA, 120 bp, Artificial Sequence
  ENSG00000026652_39 (sequence is synthesized)
agtggtctggctggtccccaagcaaaacagaatgggcttcgcataggctttagaacttattcataaatattgaccaaagtgtgaagcaaggtatccagtgaagattctctagggtctcta

SEQ ID NO: 21923 - DNA, 120 bp, Artificial Sequence
  ENSG00000026652_40 (sequence is synthesized)
cttctgctcaagagatttaatccagctttctctaaagcagtggtccagacttgccacatactaggttaaagataaagtgagaaaaacaaatactttggtttgcacgtctcttgaggggcc

SEQ ID NO: 21924 - DNA, 120 bp, Artificial Sequence
  ENSG00000026652_41 (sequence is synthesized)
ctaggctgtatggaggaatatttagaggaatatttgtgagctgccatttgtgtttaaaagaacatgaaagcaagacgggccctaacccgcctgtgtctgtagctgaccaggaggccactg

SEQ ID NO: 21925 - DNA, 120 bp, Artificial Sequence
  ENSG00000026652_42 (sequence is synthesized)
cttccttcccccagagcttctaggagagccccccaaaatgcaactctccaaggtcctgtggagtagtcccctcataatgcctccaccacacctgtgtctcacgatgccttaactgacgta

SEQ ID NO: 21926 - DNA, 120 bp, Artificial Sequence
  ENSG00000026652_43 (sequence is synthesized)
gctcctaagtgatgttcacagagaaggaaatacttaggcaagcccatgtgtaacatgctcacagatgtgctggctttgccaatgctttcggactccaccatgctttctgattcttctggt

SEQ ID NO: 21927 - DNA, 120 bp, Artificial Sequence
  ENSG00000026652_44 (sequence is synthesized)
cctagtcacgccttggcacggggcagaagcggccgagctatgctgacaggtgctgctgagagccaacagccattcagccgagaaggcgtttctaggtgagggcatgagagctggcattcc

SEQ ID NO: 21928 - DNA, 120 bp, Artificial Sequence
  ENSG00000026652_45 (sequence is synthesized)
aggctgctgagtgcggcatctgcaggtgcaccacattgctccacggtgtgttcagaagagaccagcatcttgaatctcaggctctgggctcattctttgcctctgccaagggaccattca

SEQ ID NO: 21929 - DNA, 120 bp, Artificial Sequence
  ENSG00000026652_46 (sequence is synthesized)
ggggcttcaagccagctgctgaaaatcccccttttctggatttttccccatctatataaggatatggtggctgtgtggacaagaaattggtttcatctcagaagggtgcttccctacaaa

SEQ ID NO: 21930 - DNA, 120 bp, Artificial Sequence
  ENSG00000026652_47 (sequence is synthesized)
gatcttcagaaatttaattgaaaacaattttttgaactttttttgtttggccaggatgaatgaagctgaagtcacatcctgaatgtgcatgccagacaaagggtaagcaagcagtcttta

SEQ ID NO: 21931 - DNA, 120 bp, Artificial Sequence
  ENSG00000026652_48 (sequence is synthesized)
caaatgccaatccctctgcactccaaaaccggagcccgtaatgaaggcccaggttccagtcatcacaggatcccccaagccagcacagtgcctgatgcctccctaggcattagcacatcc

SEQ ID NO: 21932 - DNA, 120 bp, Artificial Sequence
  ENSG00000026652_49 (sequence is synthesized)
cagcactctaattcacatcctcagcatccctgcctcctgcatccagggcttaggttgagtgtttccagagtgtcaagtacatttaaacacaaaccaaatactccagggttttgacctgtc

SEQ ID NO: 21933 - DNA, 120 bp, Artificial Sequence
  ENSG00000026652_50 (sequence is synthesized)
acaatggcttttgaaaacaacagacgtacaatttgagagaaggactcgatggacttcttaggctgaggactaaggacatgttgctgttcctcttggtccaggacattcaataccattcac

SEQ ID NO: 21934 - DNA, 120 bp, Artificial Sequence
  ENSG00000026652_51 (sequence is synthesized)
agcattcatcaccaactgacatagtatcgatcacgacattcaactgtttgaaattactgctattttggtcaaaaactaagaaatcagaaattgcacctacatagtgtgtctcctcattgg

SEQ ID NO: 21935 - DNA, 120 bp, Artificial Sequence
  ENSG00000026652_52 (sequence is synthesized)
agtcccatctctctgagcacagggatgggctcctgagctcacagccctgccctgcccccccagcagggcctcaccctcatggccctcagtgaatagtgactacatgaagggggcacttac

SEQ ID NO: 21936 - DNA, 120 bp, Artificial Sequence
  ENSG00000026652_53 (sequence is synthesized)
tagaggcctgagtaatggaatttcaattagcttctgcttcccttttctaaaaaagaaccacctttcttaagaataattaggccaaaataaacttgagtaatttgtacagtcaatattttg

SEQ ID NO: 21937 - DNA, 120 bp, Artificial Sequence
  ENSG00000026652_54 (sequence is synthesized)
aagtttcggagttaccagtgaaatagcaaagctgttctccaggaaaggacatccaggttcccacccaggccttccttcctcagctcctgcagcctcatcctagtttaatatgaaggttgt

SEQ ID NO: 21938 - DNA, 120 bp, Artificial Sequence
  ENSG00000026652_55 (sequence is synthesized)
gaatgggttaaaaagcagttcttaagcacctacttagatcttttcagtatctggaaatagcacccagggctgtgttagtaaagcttttcactgggtaagagtcatacaatttttacattt

SEQ ID NO: 21939 - DNA, 120 bp, Artificial Sequence
  ENSG00000026652_56 (sequence is synthesized)
aatttgtttttttaaaacaaggcagtcttgttttacatattggaatgactagatattttttgacatttctggcacctctggttctgctgaattttaagggaggtgagtggtatgtacaca

SEQ ID NO: 21940 - DNA, 120 bp, Artificial Sequence
  ENSG00000026652_57 (sequence is synthesized)
aagttaagattgctgcataataattcctttgcatttccaaaataaattacacaaatgtcacttttccttttctattccatagtactagttttagccagatctttgccaaacattctagga

SEQ ID NO: 21941 - DNA, 120 bp, Artificial Sequence
  ENSG00000026652_58 (sequence is synthesized)
cattcagaaaagtcatccatggaattttggaatgccattctctctgtatctttgcagatcatgaggaaggaaagttgatgaactagtacgggatggctcagacttgtaaagtgtctaagt

SEQ ID NO: 21942 - DNA, 120 bp, Artificial Sequence
  ENSG00000026652_59 (sequence is synthesized)
cacaacgctgcagagccagcttccgggtagcaatggcatggcctcagctgtgccaaggctacaactggagcttccttactcgcatctgaggcaaacacagcaaggctggcccaggccgcc

SEQ ID NO: 21943 - DNA, 120 bp, Artificial Sequence
  ENSG00000026652_60 (sequence is synthesized)
cacagtcaacagatgttcacgggagatggatcagcccctcttttgcttgttctatcaaggaaagagatctaaccatgggcaagggtggaacacacccggttcaggtcagggaatgagttg

SEQ ID NO: 21944 - DNA, 120 bp, Artificial Sequence
  ENSG00000026652_61 (sequence is synthesized)
ctctaagtgaacagtgaattcttacttctcagcctgtatcaattgtacccagggttcatgattactgtgacccactaagggatgatctttgaggaaacagacctggagggaggtaattta

SEQ ID NO: 21945 - DNA, 120 bp, Artificial Sequence
  ENSG00000026652_62 (sequence is synthesized)
aggagggaaagcgagtgggttttacagactgctttgtggcgacattcaggaacagaccattcaatggatgacttttcagtacataaaagcaagcagtaatggccaggagagagcaaagat

SEQ ID NO: 21946 - DNA, 120 bp, Artificial Sequence
  ENSG00000026652_63 (sequence is synthesized)
gccctaagaatgacatcagactgaccaaatgtgccttttcaaataagttatgagaacgaatgaattggaattagagcaaggtattggacagaaccatgctagtctttgagagaacgtgtg

SEQ ID NO: 21947 - DNA, 120 bp, Artificial Sequence
  ENSG00000026652_64 (sequence is synthesized)
gattgggtggatgtttggaccgaatgaatggtaactttttaatgtgaaacagagaactgatatatgggctgtcatgtcaccctagggtactgtcgctctgtcatgtgtagcaatctttcc

SEQ ID NO: 21948 - DNA, 120 bp, Artificial Sequence
  ENSG00000026652_65 (sequence is synthesized)
aaatttttgttggtgggctgaacaaagataaaactaataaagtatgtgtggataccactagacagcacagcttactggactggatgtaataaaactgactgaaactttaacttggaaaaa

SEQ ID NO: 21949 - DNA, 120 bp, Artificial Sequence
  ENSG00000026652_66 (sequence is synthesized)
agcttgcatgcctttggaactgggtctcttcagttgacttttgtcgtcttcaacacactgcagcgtgtagcggttgagcctgtgtcacatagctgaatcagagtcatctgcggtactcag

SEQ ID NO: 21950 - DNA, 120 bp, Artificial Sequence
  ENSG00000026652_67 (sequence is synthesized)
gtattccgtaggaatcacagtgtacacagtgtacattggtctggggctaggaaaggtcctaagagtttgcaccagaacttagagatcaggttttgcacctgggaacaatgccctgtagaa

SEQ ID NO: 21951 - DNA, 120 bp, Artificial Sequence
  ENSG00000026652_68 (sequence is synthesized)
cagatacgggggctgctgaaatcaccttgctttttggtagcccctgaagacaaaatcgtggtgtttagaatatagaagattggagacagaggctatcaggccatggaggacatagggaac

SEQ ID NO: 21952 - DNA, 120 bp, Artificial Sequence
  ENSG00000026652_69 (sequence is synthesized)
tagacgggtctggttcctggaggcagatgaagatagcctcctgcccactgttttctccttttgttttcctatttattctcccagtgctaacttgatatcttcttgtgtgtacacgtgtgt

SEQ ID NO: 21953 - DNA, 120 bp, Artificial Sequence
  ENSG00000026652_70 (sequence is synthesized)
gtgtgtgcaaatatatttctaggaacaagagcaaacattctagtaactatcattctctgatgtggagaacttgggcagagatctgagttacagctttgtggatttattctctctgatgag

SEQ ID NO: 21954 - DNA, 120 bp, Artificial Sequence
  ENSG00000026652_71 (sequence is synthesized)
agatcgccccttagaatgtcatggtcctaaccccgtcatggataccaggggtgaatggcagggttcttctcctgcccaggaggaagggtatggggagccggtgcatcttgactgtcaggt

SEQ ID NO: 21955 - DNA, 120 bp, Artificial Sequence
  ENSG00000026652_72 (sequence is synthesized)
cacctgtcttaccacctttacagctaggctttctgaggtgccagcgtctcctggaattcaaactgtagtttagaggcagctggtgattttccaggctttgtaagtactttctggtagtgt

SEQ ID NO: 21956 - DNA, 120 bp, Artificial Sequence
  ENSG00000026652_73 (sequence is synthesized)
tcatgcttagaatgtgcaaacattcataattcgtggaccaggagtctctgaggtagagcagaaggcccattgaacttgggggtgccttccaatccctgcttgccccttggtggcattaca

SEQ ID NO: 21957 - DNA, 120 bp, Artificial Sequence
  ENSG00000026652_74 (sequence is synthesized)
cccacgagctcactccgtgtgctgttcaccttatttccgtaatttctaatccttaggatattattatccacattttataaataaacccccagagcctcagtttggctgagtgatttgccc

SEQ ID NO: 21958 - DNA, 120 bp, Artificial Sequence
  ENSG00000026652_75 (sequence is synthesized)
gaggacaatagctcctaagtctgctttcaaagcttctgctctttcccctggaagatgttgggggcacaaaagcaggggccctggggcccaagacctgctccagaaacaggaccctgacca

SEQ ID NO: 21959 - DNA, 120 bp, Artificial Sequence
  ENSG00000026652_76 (sequence is synthesized)
tcctaaaacgacccagaccagctgcagtaaggaccaggcttctaataccttcctggctcgtgatgtgcaaaggcctcattcgaggggtgcaagtcacccgcaccttcatggggttgggga

SEQ ID NO: 21960 - DNA, 120 bp, Artificial Sequence
  ENSG00000026652_77 (sequence is synthesized)
tggagttgcaggagctggcagagcagggtcatgcacagagatgctggagaagcacccagatgcccagcactagcaggcacggggacaggcacagatgagggagaaggtgagccccacaac

SEQ ID NO: 21961 - DNA, 120 bp, Artificial Sequence
  ENSG00000026652_78 (sequence is synthesized)
acatgcagggagggacccaggtccagagagaggacatagcccccagacgggaagagacattcacggagcgggaatttaatctcagcaccgtttagggttttgctcccaaaggcttccgaa

SEQ ID NO: 21962 - DNA, 120 bp, Artificial Sequence
  ENSG00000026652_79 (sequence is synthesized)
tccatgatcactttacaactctgagcataagggcgggagcgctgatggcgggaaagcaagtcaacagcacgcccatcccacctgcagcatagggaccgcacctccccttgatttcatcgg

SEQ ID NO: 21963 - DNA, 120 bp, Artificial Sequence
  ENSG00000026652_80 (sequence is synthesized)
tgatattctatttataggacttcactcattactgtgaacacccaaacaactaatgctgtgtgtaagggggtctgcgccctgccactgatggtggagactgtgcttaggattagagtcttc

SEQ ID NO: 21964 - DNA, 120 bp, Artificial Sequence
  ENSG00000026652_81 (sequence is synthesized)
gggggctccacttacaggtgaaataggcaggtctgggagcctggggccagggcgatgcctcttctcttctcactggaagtttgggagccttgctcagtgggggccttgggttttctggat

SEQ ID NO: 21965 - DNA, 120 bp, Artificial Sequence
  ENSG00000026652_82 (sequence is synthesized)
tcttgctaaagtgcttccttaagccctgagtcctctcttctccaaacaccacagaaacagccagtgccattgttatgcacattctcacaaagcaaggagctagagagagcaggtgccagg

SEQ ID NO: 21966 - DNA, 120 bp, Artificial Sequence
  ENSG00000026652_83 (sequence is synthesized)
agaggactgagtggggcaggcacatggcaggcactggctggggcggatgggagctgccagcctgtaccctcccagggaaccccctccccatgtcacagggaacagctttgccatctactg

SEQ ID NO: 21967 - DNA, 120 bp, Artificial Sequence
  ENSG00000026652_84 (sequence is synthesized)
gagagctgtggcccatgacggtgggtgagatggctggtgctcatctctgccaccctggaagggggtaaagaacggcattgccttatattcattgttcagcaacatcttttgtctttaatg

SEQ ID NO: 21968 - DNA, 120 bp, Artificial Sequence
  ENSG00000026652_85 (sequence is synthesized)
accttcagaaaaaaaaaacaacctcattcatctctctgttttttcttaaataacacatgatgttgggatccttctggagtctgtggaatttgctttttaaagaggaaaggaacagaagaa

SEQ ID NO: 21969 - DNA, 120 bp, Artificial Sequence
  ENSG00000026652_86 (sequence is synthesized)
ggttcctgaccaggcatttttcatcctcacctatcacagtccaagaggaaatgagtttaaattgaagtcaatgaaatttgcagaaattcacgaaggtggcatttttaaatgtaaaattgg

SEQ ID NO: 21970 - DNA, 120 bp, Artificial Sequence
  ENSG00000026652_87 (sequence is synthesized)
ccatgaggccactgctcattgcagtgcctgtccccagaggctctggttctcctgggagccagtgcttcctggcatgtgccagggctctgaaggctttggttgatcttggagtcacacgct

SEQ ID NO: 21971 - DNA, 120 bp, Artificial Sequence
  ENSG00000026652_88 (sequence is synthesized)
gaaccttgcctccctggagatgagagtgacacgcagtcagctggggcacaggtcactaaggtgcccaacaaaccgtggtgtgcaagcgcaggtcaggttcctgaggcttcacgtccccat

SEQ ID NO: 21972 - DNA, 120 bp, Artificial Sequence
  ENSG00000026652_89 (sequence is synthesized)
ttgcttatctttttcccttagcaggtcccggctggttgcataagagcatgatcgttcagtgtctgggtagcgccaggccctggcaagcacaccatgagcagcagctattattatattatc

SEQ ID NO: 21973 - DNA, 120 bp, Artificial Sequence
  ENSG00000026652_90 (sequence is synthesized)
aatatttatctgccgggccaactgggatatttgtcttcagatccttaaagaagccatgtggattagttatccatggcagcgtgatgagacccaaaacatagcggcttaaaacaacaagcg

SEQ ID NO: 21974 - DNA, 120 bp, Artificial Sequence
  ENSG00000026652_91 (sequence is synthesized)
tgtcataaaggtcccctgcctatgtggtcaggaatccaggtgcagctgagcgggggatctggcagggtctctcgggaggggcttgtgtgtgatctgcctccaagcttgctcacgggtttg

SEQ ID NO: 21975 - DNA, 120 bp, Artificial Sequence
  ENSG00000026652_92 (sequence is synthesized)
ctgcccggcctccatccctcgccacacaggcttgttttaaaacacagtgtttcccggaatatggcaactgcacccctgaggttgagccatgcaagagagagagagcgggcgcccggggca

SEQ ID NO: 21976 - DNA, 120 bp, Artificial Sequence
  ENSG00000026652_93 (sequence is synthesized)
ggagccatgaagcttctgtaaccgggacccgggagagacctcccatcctttctatccatactgttggttggaagtggatcagtaagcaccgcccgtgccccagggatgtggggtagggtg

SEQ ID NO: 21977 - DNA, 120 bp, Artificial Sequence
  ENSG00000026652_94 (sequence is synthesized)
tgcaggggcgtgggtgccaggaggccaggatcacagggccccttggcggctgcccaccccacggtgacatgacatttggtctgagaccttcccttgccctcttagtaaatatgtaataca

SEQ ID NO: 21978 - DNA, 120 bp, Artificial Sequence
  ENSG00000026652_95 (sequence is synthesized)
ggcctggcacagtggctcatgcctgtaattccagtggtttggaaggccaagatgggaggatggcttgaagccaggaatttgagaccagtctgggcaacacagtgagatctctgtctctat

SEQ ID NO: 21979 - DNA, 120 bp, Artificial Sequence
  ENSG00000026652_96 (sequence is synthesized)
ccagtctgggcaacacagtgagatctctgtctctataaacataaatcaataaataaaacaaatgaaaaatagcagcattgcatttctttgcacagagaaaggtgagaggaggagagtggc

SEQ ID NO: 21980 - DNA, 120 bp, Artificial Sequence
  ENSG00000026652_97 (sequence is synthesized)
attatccctcctaggcagagtgcctgtgcgtgagggcgcccataaagccctgtgctgcctctttaaacgaaggattttcgatcatgacaacgatagcaattgatataccttcaaaatacg

SEQ ID NO: 21981 - DNA, 120 bp, Artificial Sequence
  ENSG00000026652_98 (sequence is synthesized)
tgtccagtgagtgttgattgtgtgtggtttctctaggagaccgtgttcatgcaacacagcattatttcaccgcctttaccccagcttcttcatacacatgcacttgtcaagggctctttg

SEQ ID NO: 21982 - DNA, 120 bp, Artificial Sequence
  ENSG00000026652_99 (sequence is synthesized)
gctgaagagaagttagaagtttccagatatggaggggtattttcagcagatatgcccaccgccatggttttgtcagctctgtagggtggtcttgcaccctgctcactgctggcatcacct

SEQ ID NO: 21983 - DNA, 120 bp, Artificial Sequence
  ENSG00000026652_100 (sequence is synthesized)
gagcctatggcagatacccagtgctgcccgccaccatgtgaattcatcagctctgcaggcacagaccttgcactaggaatgggctgggacgccaccctctgcctcttaccattcactggg

SEQ ID NO: 21984 - DNA, 120 bp, Artificial Sequence
  ENSG00000026652_101 (sequence is synthesized)
tttggcaagtgtgctgggatctggaatcacatggatgaggaacccgataatggtgacgaccgaggtagcaggcgaaccactggccagggcaggaagtgggcagctcacgggactatggct

SEQ ID NO: 21985 - DNA, 120 bp, Artificial Sequence
  ENSG00000026652_102 (sequence is synthesized)
gcaccgcgggttcataccgactaccatcctggaggtgggagcgcatgctcatctgtaaaagtccggtcccacgttggacacaccggggtcttcttctttgttgaccaggatcctctggca

SEQ ID NO: 21986 - DNA, 120 bp, Artificial Sequence
  ENSG00000026652_103 (sequence is synthesized)
gtgtctttaacaagccagagtctgatcccaccgctcataaagccagggttgttgaaagcttggggcttcctcctcctctgtgcgcagccctcagcaaacggtcacagcctgtgctgtctg

SEQ ID NO: 21987 - DNA, 120 bp, Artificial Sequence
  ENSG00000026652_104 (sequence is synthesized)
ctgtacaccgacttggtatcatcccatgaactgtccccctttcgtgctctgtgcttagggccctctgatgccccatctgcctgtgcttcctgcaactgtttagcaagcacctattatcta

SEQ ID NO: 21988 - DNA, 120 bp, Artificial Sequence
  ENSG00000026652_105 (sequence is synthesized)
tagggtgctggggtgctgggcgaggccaatcgctcctattactttctgccctggggacgtcctgttttcccacctacccctgtaacgcctctgctctgccttcccatctgcggggctaac

SEQ ID NO: 21989 - DNA, 120 bp, Artificial Sequence
  ENSG00000026652_106 (sequence is synthesized)
gccatcccacaagggctgggctgtccgttcagaagagaaactgggaaggggccttgaggacctgtgtccaggcagggtggacaagggctttgtgcagggagctcctctcccatctttgtg

SEQ ID NO: 21990 - DNA, 120 bp, Artificial Sequence
  ENSG00000026652_107 (sequence is synthesized)
tcctgacagccgtgaccgtgacccctcaaagcagagccagtagtgatcagtatcctgctgcttcaagcctgcacggtcctcttctcctctccgcacatctgcatgcctgtcaaacccaga

SEQ ID NO: 21991 - DNA, 120 bp, Artificial Sequence
  ENSG00000026652_108 (sequence is synthesized)
atagtttggggcctggtaaacagagggaagttggctggaggaggccagtcaggagtgcaagaaccccgcgtactctgtcccacgtggataaagtctctaattccagtctgaggtgaattc

SEQ ID NO: 21992 - DNA, 120 bp, Artificial Sequence
  ENSG00000026652_109 (sequence is synthesized)
ttagagagtgctttcatttaatgtttgctttatgcatttcccctgcagctgtgactaattgtggaacagcatacattttgttttgagactctcttgagatttttctggcagtgtaaggtc

SEQ ID NO: 21993 - DNA, 120 bp, Artificial Sequence
  ENSG00000026652_110 (sequence is synthesized)
tacaccattttcctctcagcatcagagaaggcagaaagcaagagaaaggaatgcaatgtgagcaaggccaggcacacttgtgctactgcagttggcaagaatggagtctaatcccagcac

SEQ ID NO: 21994 - DNA, 120 bp, Artificial Sequence
  ENSG00000026652_111 (sequence is synthesized)
cccaccacttgtctttttgctcctggtcattcagaacttgcagaagaatcaacagagtttctacttgatgaaatggtcctaataaactgctttttattcttgctgggagtcagtcttaac

SEQ ID NO: 21995 - DNA, 120 bp, Artificial Sequence
  ENSG00000026652_112 (sequence is synthesized)
agcttcttatgggcaatcataagaggtactcaacaattgctacctgccggccattttacatatgattcatttatttaatccttacagcaacatgaatagatgatgtgccacactccattt

SEQ ID NO: 21996 - DNA, 120 bp, Artificial Sequence
  ENSG00000026652_113 (sequence is synthesized)
tttaaaaactaagttatatagagcttaatattcggctcagagtcacacagctgtaattagatttggatttcactcccatccatatttcttaattccatgctctactgcctccttggctaa

SEQ ID NO: 21997 - DNA, 120 bp, Artificial Sequence
  ENSG00000026652_114 (sequence is synthesized)
ttccgagaagatcgctgagcagcaagtggaagtggtgcatggtttctccaagcagagtggtgaatagacatcaagggacaattcctttctgtatcagcctattttgctaggagcctagat

SEQ ID NO: 21998 - DNA, 120 bp, Artificial Sequence
  ENSG00000026652_115 (sequence is synthesized)
ctaaagctttacgtgccccaaatctgggtgcccgacccagtttgtcaaagtgggatttcattttaatgatcaaccttgcagtcagaagtgtggtgtatgtcaaaagacagttctgttgat

SEQ ID NO: 21999 - DNA, 120 bp, Artificial Sequence
  ENSG00000026751_0 (sequence is synthesized)
gtaatacctaagagggaagtggcttcatttcagtggctgacttccagagagcaatatggctggttccccaacatgcctcaccctcatctatatcctttggcagctcacagggtcagcagc

SEQ ID NO: 22000 - DNA, 120 bp, Artificial Sequence
  ENSG00000026751_1 (sequence is synthesized)
ctctggacccgtgaaagagctggtcggttccgttggtggggccgtgactttccccctgaagtccaaagtaaagcaagttgactctattgtctggaccttcaacacaacccctcttgtcac

SEQ ID NO: 22001 - DNA, 120 bp, Artificial Sequence
  ENSG00000026751_2 (sequence is synthesized)
catacagccagaagggggcactatcatagtgacccaaaatcgtaatagggagagagtagacttcccagatggaggctactccctgaagctcagcaaactgaagaagaatgactcagggat

SEQ ID NO: 22002 - DNA, 120 bp, Artificial Sequence
  ENSG00000026751_3 (sequence is synthesized)
ctactatgtggggatatacagctcatcactccagcagccctccacccaggagtacgtgctgcatgtctacgagcacctgtcaaagcctaaagtcaccatgggtctgcagagcaataagaa

SEQ ID NO: 22003 - DNA, 120 bp, Artificial Sequence
  ENSG00000026751_4 (sequence is synthesized)
tggcacctgtgtgaccaatctgacatgctgcatggaacatggggaagaggatgtgatttatacctggaaggccctggggcaagcagccaatgagtcccataatgggtccatcctccccat

SEQ ID NO: 22004 - DNA, 120 bp, Artificial Sequence
  ENSG00000026751_5 (sequence is synthesized)
ctcctggagatggggagaaagtgatatgaccttcatctgcgttgccaggaaccctgtcagcagaaacttctcaagccccatccttgccaggaagctctgtgaaggtgctgctgatgaccc

SEQ ID NO: 22005 - DNA, 120 bp, Artificial Sequence
  ENSG00000026751_6 (sequence is synthesized)
agattcctccatggtcctcctgtgtctcctgttggtgcccctcctgctcagtctctttgtactggggctatttctttggtttctgaagagagagagacaagaagagtacattgaagagaa

SEQ ID NO: 22006 - DNA, 120 bp, Artificial Sequence
  ENSG00000026751_7 (sequence is synthesized)
gaagagagtggacatttgtcgggaaactcctaacatatgcccccattctggagagaacacagagtacgacacaatccctcacactaatagaacaatcctaaaggaagatccagcaaatac

SEQ ID NO: 22007 - DNA, 120 bp, Artificial Sequence
  ENSG00000026751_8 (sequence is synthesized)
ggtttactccactgtggaaataccgaaaaagatggaaaatccccactcactgctcacgatgccagacacaccaaggctatttgcctatgagaatgttatctagacagcagtgcactcccc

SEQ ID NO: 22008 - DNA, 120 bp, Artificial Sequence
  ENSG00000026751_9 (sequence is synthesized)
taagtctctgctcaaaaaaaaaacaattctcggcccaaagaaaacaatcagaagaattcactgatttgactagaaacatcaaggaagaatgaagaacgttgacttttttccaggataaat

SEQ ID NO: 22009 - DNA, 120 bp, Artificial Sequence
  ENSG00000026751_10 (sequence is synthesized)
tatctctgatgcttctttagatttaagagttcataattccatccactgctgagaaatctcctcaaacccagaaggtttaatcacttcatcccaaaaatgggattgtgaatgtcagcaaac

SEQ ID NO: 22010 - DNA, 120 bp, Artificial Sequence
  ENSG00000026751_11 (sequence is synthesized)
cctgttgtattaatgatggctccaggtcagtgtctggagtttcattccatcccagggcttggatgtcaggattataccaagagtcttgctaccaggagggcaagaagaccaaaacagaca

SEQ ID NO: 22011 - DNA, 120 bp, Artificial Sequence
  ENSG00000026751_12 (sequence is synthesized)
gacaagtccagcagaagcagatgcacctgacaaaaatggatgtattaattggctctataaactatgtgcccagcactatgctgagcttacactaattggtcagacatgctgtctgccctc

SEQ ID NO: 22012 - DNA, 120 bp, Artificial Sequence
  ENSG00000026751_13 (sequence is synthesized)
atgaaattggctccaaatgaatgaactactttcatgagcagttgtagcaggcctgaccacagattcccagagggccaggtgtggatccacaggacttgaaggtcaaagttcacaaagatg

SEQ ID NO: 22013 - DNA, 120 bp, Artificial Sequence
  ENSG00000026751_14 (sequence is synthesized)
aagaatcagggtagctgaccatgtttggcagatactataatggagacacagaagtgtgcatggcccaaggacaaggacctccagccaggcttcatttatgcacttgtgctgcaaaagaaa

SEQ ID NO: 22014 - DNA, 120 bp, Artificial Sequence
  ENSG00000026751_15 (sequence is synthesized)
agtctaggttttaaggctgtgccagaacccatcccaataaagagaccgagtctgaagtcacattgtaaatctagtgtaggagacttggagtcaggcagtgagactggtggggcacggggg

SEQ ID NO: 22015 - DNA, 120 bp, Artificial Sequence
  ENSG00000026751_16 (sequence is synthesized)
agtgagactggtggggcacggggggcagtgggtacttgtaaacctttaaagatggttaattcattcaatagatatttattaagaacctatgcggcccggcatggtggctcacacctgtaa

SEQ ID NO: 22016 - DNA, 80 bp, Artificial Sequence
  ENSG00000026751_17 (sequence is synthesized)
ggcctaggcaacgagagcaaaactccaatacaaacaaacaaacaaacacctgtgctaggtcagtctggcacgtaagatga

SEQ ID NO: 22017 - DNA, 120 bp, Artificial Sequence
  ENSG00000026751_18 (sequence is synthesized)
aacaaacacctgtgctaggtcagtctggcacgtaagatgaacatccctaccaatacagagctcaccatctcttatacttaagtgaaaaacatggggaaggggaaaggggaatggctgctt

SEQ ID NO: 22018 - DNA, 120 bp, Artificial Sequence
  ENSG00000026751_19 (sequence is synthesized)
ttgatatgttccctgacacatatcttgaatggagacctccctaccaagtgatgaaagtgttgaaaaacttaataacaaatgcttgttgggcaagaatgggattgaggattatcttctctc

SEQ ID NO: 22019 - DNA, 120 bp, Artificial Sequence
  ENSG00000026751_20 (sequence is synthesized)
agaaaggcattgtgaaggaattgagccagatctctctccctactgcaaaaccctattgtagtaaaaaagtcttctttactatcttaataaaacagatattgtgagattcacatacaaaaa

SEQ ID NO: 22020 - DNA, 120 bp, Artificial Sequence
  ENSG00000026751_21 (sequence is synthesized)
agctaaaatataaaatgggaatataccaaatgctgatgaagatggggagcaaatagatctctcatagattgctggtggcaaggtaaaatgctctattcactctgaaaataatttagcaat

SEQ ID NO: 22021 - DNA, 120 bp, Artificial Sequence
  ENSG00000026751_22 (sequence is synthesized)
gtaatacctaagagggaagtggcttcatttcagtggctgacttccagagagcaatatggctggttccccaacatgcctcaccctcatctatatcctttggcagctcacaggtcaggaaga

SEQ ID NO: 22022 - DNA, 120 bp, Artificial Sequence
  ENSG00000026751_23 (sequence is synthesized)
gactagagagagggggaaaaatggctctgggaactgactcccctgttgactgtcccagggatgaaggagctgaaagaagtggtgctgggtatcagagaccatttttctaatccaggttct

SEQ ID NO: 22023 - DNA, 120 bp, Artificial Sequence
  ENSG00000026751_24 (sequence is synthesized)
ggtagagcgtgtactatttttgtcctcacccacattcatgtttttctccttcactgattcaacaagcacatatagagctgtgtgccagacttggcatgaggtgttgaagatgcagagatg

SEQ ID NO: 22024 - DNA, 120 bp, Artificial Sequence
  ENSG00000026751_25 (sequence is synthesized)
aagaagccacagtctctgccctcaagaagcatacagtcagcctgtgctccttagttctggagtagagaaagtgctggaggtctttcccaaggacacggttctcccagttccctttccagg

SEQ ID NO: 22025 - DNA, 120 bp, Artificial Sequence
  ENSG00000026751_26 (sequence is synthesized)
gctcacttctctccttctcccagagggacatcctgatgtggctcttctgttgatacaggccccacactgctgactctgctcccctgacctgggaggtgatggcctccaactctgaggtcc

SEQ ID NO: 22026 - DNA, 120 bp, Artificial Sequence
  ENSG00000026751_27 (sequence is synthesized)
ccacagaccagcatcctctagtcaatccttcctatccctgtcagagcccacaaaccacccacaccctttccacaggatcaacccaagacctcgctttactgcccactagacacatggctc

SEQ ID NO: 22027 - DNA, 120 bp, Artificial Sequence
  ENSG00000026751_28 (sequence is synthesized)
ctggggaagcctttccctgtctctctccagttgcaccccatcctgtgttcctaaaccctgctgattggtcttctgggctcccactgtccatgtgggtgatggggagggacctaacatcag

SEQ ID NO: 22028 - DNA, 120 bp, Artificial Sequence
  ENSG00000026751_29 (sequence is synthesized)
ttgggtatgacttgcagactttgaaatctcccttccctcctggaagcccctctgaaagtgtctttgactttctctacttcccactttgaccaccttgatggagagatcaggaagtgaaat

SEQ ID NO: 22029 - DNA, 120 bp, Artificial Sequence
  ENSG00000026751_30 (sequence is synthesized)
gttgggggtggccaattcatcctgatttgtttagattttcccagttttaacactgaaagtcctctatcctgaaaacccttccattacaaggaaactcggctggttggtcaccctaagtgg

SEQ ID NO: 22030 - DNA, 120 bp, Artificial Sequence
  ENSG00000026751_31 (sequence is synthesized)
gtcatccaggagaaatggtgggccagtggaagtggtgagtggttggagaggtggctttgattctctcccaacttgcttttagagtacattgaagagaagaagagagtggacatttgtcgg

SEQ ID NO: 22031 - DNA, 120 bp, Artificial Sequence
  ENSG00000026751_32 (sequence is synthesized)
gaaactcctaacatatgcccccattctggagagaacacagagtacgacacaatccctcacactaatgtgagtcccttctcatctttcctgagaactgatcctgtctctgaggctctcctt

SEQ ID NO: 22032 - DNA, 120 bp, Artificial Sequence
  ENSG00000026751_33 (sequence is synthesized)
gtgaggtttttccatgggtttggacaacatgggaatgaagaggggagtgaggatatatagacttaaaactcaatgcacctgtgcctcctccaagtcttcatggattctcttctgtgcaga

SEQ ID NO: 22033 - DNA, 120 bp, Artificial Sequence
  ENSG00000026751_34 (sequence is synthesized)
agaagctggtggtctctggagcacctggttctgactcacaatgctcatgctgtggtctgtgaaatcacctgctcccctccacagttcataacggccacacaaaaggccagattccttttg

SEQ ID NO: 22034 - DNA, 120 bp, Artificial Sequence
  ENSG00000026751_35 (sequence is synthesized)
acacaaaaggccagattccttttgcataaggcagtgggtagaagagtgtgactttgacaggatgtttgaatcatggtatcagaagacttctctagagatctctctctctctctctctctc

SEQ ID NO: 22035 - DNA, 120 bp, Artificial Sequence
  ENSG00000026751_36 (sequence is synthesized)
tatacacacacatatatatataatatttttgaaattcattttaacacagtacagtttaaaaataatgtaatggcttcctgaaaaaagttatcaaaatttattataatagcagtcaccaac

SEQ ID NO: 22036 - DNA, 120 bp, Artificial Sequence
  ENSG00000026751_37 (sequence is synthesized)
aagttatcaaaatttattataatagcagtcaccaacaagagaacttcctacctcccttccctgttccagaaccctccttttcctctcacatctcctcccatctctgctttcccctctctg

SEQ ID NO: 22037 - DNA, 120 bp, Artificial Sequence
  ENSG00000026950_0 (sequence is synthesized)
attcctcacgatgacccgacagtctctgctttctttttcctttcttccagaaggagatttaaccatagtagaaagaatggagaactattaactgcctttcttctgtgggctgtgattttc

SEQ ID NO: 22038 - DNA, 120 bp, Artificial Sequence
  ENSG00000026950_1 (sequence is synthesized)
agaggggaatgctaagaggtgattttcaatgttgggactcaaaggtgaagacactgaaggacagaatttttggcagaggaaagatcttcttcggtcaccatacttgagttagctctaggg

SEQ ID NO: 22039 - DNA, 120 bp, Artificial Sequence
  ENSG00000026950_2 (sequence is synthesized)
aagtggaggtttccatttggaattctatagcttcttccaggtcatagtgtctgccccccaccttccagtatctcctgatatgcagcatgaatgaaaatggcaagtttcctggccttcctt

SEQ ID NO: 22040 - DNA, 120 bp, Artificial Sequence
  ENSG00000026950_3 (sequence is synthesized)
ctgctcaactttcgtgtctgcctccttttgcttcagctgctcatgcctcactcagctcagttttctgtgcttggaccctctgggcccatcctggccatggtgggtgaagacgctgatctg

SEQ ID NO: 22041 - DNA, 120 bp, Artificial Sequence
  ENSG00000026950_4 (sequence is synthesized)
ccctgtcacctgttcccgaccatgagtgcagagaccatggagctgaagtgggtgagttccagcctaaggcaggtggtgaacgtgtatgcagatggaaaggaagtggaagacaggcagagt

SEQ ID NO: 22042 - DNA, 120 bp, Artificial Sequence
  ENSG00000026950_5 (sequence is synthesized)
gcaccgtatcgagggagaacttcgattctgcgggatggcatcactgcagggaaggctgctctccgaatacacaacgtcacagcctctgacagtggaaagtacttgtgttatttccaagat

SEQ ID NO: 22043 - DNA, 120 bp, Artificial Sequence
  ENSG00000026950_6 (sequence is synthesized)
ggtgacttctatgaaaaagccctggtggagctgaaggttgcagcactgggttctgatcttcacgttgatgtgaagggttacaaggatggagggatccatctggagtgcaggtccactggc

SEQ ID NO: 22044 - DNA, 120 bp, Artificial Sequence
  ENSG00000026950_7 (sequence is synthesized)
tggtacccccaaccccaaatacagtggagcaacaacaagggagagaacatcccgactgtggaagcacctgtggttgcagacggagtgggcctgtatgcagtagcagcatctgtgatcatg

SEQ ID NO: 22045 - DNA, 120 bp, Artificial Sequence
  ENSG00000026950_8 (sequence is synthesized)
agaggcagctctggggagggtgtatcctgtaccatcagaagttccctcctcggcctggaaaagacagccagcatttccatcgcagaccccttcttcaggagcgcccagaggtggatcgcc

SEQ ID NO: 22046 - DNA, 120 bp, Artificial Sequence
  ENSG00000026950_9 (sequence is synthesized)
gccctggcagggaccctgcctgtcttgctgctgcttcttgggggagccggttacttcctgtggcaacagcaggaggaaaaaaagactcagttcagaaagaaaaagagagagcaagagttg

SEQ ID NO: 22047 - DNA, 120 bp, Artificial Sequence
  ENSG00000026950_10 (sequence is synthesized)
agagaaatggcatggagcacaatgaagcaagaacaaagcacaagagtgaagctcctggaggaactcagatggagaagtatccagtatgcatctcggggagagagacattcagcctataat

SEQ ID NO: 22048 - DNA, 120 bp, Artificial Sequence
  ENSG00000026950_11 (sequence is synthesized)
gaatggaaaaaggccctcttcaagcctgcggatgtgattctggatccaaaaacagcaaaccccatcctccttgtttctgaggaccagaggagtgtgcagcgtgccaaggagccccaggat

SEQ ID NO: 22049 - DNA, 120 bp, Artificial Sequence
  ENSG00000026950_12 (sequence is synthesized)
ctgccagacaaccctgagagatttaattggcattattgtgttctcggctgtgagagcttcatatcagggagacattactgggaggtggaggtaggggacaggaaagagtggcatataggg

SEQ ID NO: 22050 - DNA, 120 bp, Artificial Sequence
  ENSG00000026950_13 (sequence is synthesized)
gtgtgcagtaagaatgtgcagagaaaaggctgggtcaaaatgacacctgagaatggattctggactatggggctgactgatgggaataagtatcggactctaactgagcccagaaccaac

SEQ ID NO: 22051 - DNA, 120 bp, Artificial Sequence
  ENSG00000026950_14 (sequence is synthesized)
tgggggtcttcctggactatgagactggagatatctcattctacaatgctgtggatggatcgcatattcatactttcctggacgtctccttctctgaggctctatatcctgttttcagaa

SEQ ID NO: 22052 - DNA, 120 bp, Artificial Sequence
  ENSG00000026950_15 (sequence is synthesized)
ttttgaccttggagcccacggccctgactatttgtccagcgtgaaaagaagaagagagttcctccaattctgaccgagtgctgatcattccctagagacaccagtaaccccgggcttagc

SEQ ID NO: 22053 - DNA, 120 bp, Artificial Sequence
  ENSG00000026950_16 (sequence is synthesized)
taacgaaagtggggagcctcaggctgaagtaacttttctctgcttctccctgcccagctcagagctgagggcctccccctccacagcaaccaatcacaaccataaagctacaagcacgca

SEQ ID NO: 22054 - DNA, 120 bp, Artificial Sequence
  ENSG00000026950_17 (sequence is synthesized)
ctgaagcactttactgatactcattcaattattcatatgacagttgtttgagtttggtaccatcttattttccccttatacagataaggaaactggggtgcagaaaagtgaattgactac

SEQ ID NO: 22055 - DNA, 120 bp, Artificial Sequence
  ENSG00000026950_18 (sequence is synthesized)
aaagtagacatgactagttaacaacacagctgggatctaaacagcaataactaacattaatggagaacttaaaatgctctgagtgctgtgttatgagctttggtggatgtcactccttta

SEQ ID NO: 22056 - DNA, 120 bp, Artificial Sequence
  ENSG00000026950_19 (sequence is synthesized)
atcctcgcaacaccctgtcgggtagtctcatttagcaagtatggaagttgaggcagggcaacattaagcaacttacataactcatgcagtaatttctgcagttgggagatgttcagcttc

SEQ ID NO: 22057 - DNA, 120 bp, Artificial Sequence
  ENSG00000026950_20 (sequence is synthesized)
agtccccggccctatggccgttcttttccaccctgtttcttcccccataggaagaacccacctgtagccctgaggttcttttcccaggatggctccaggataaggatcactgtaggtggt

SEQ ID NO: 22058 - DNA, 120 bp, Artificial Sequence
  ENSG00000026950_21 (sequence is synthesized)
tgtggagttgacacccctgttgactccttcccagctgattgtcagagccttagacccagcacgccttggattagctctgcagagtgtcttggttgagagaataacctcaccgtacccaca

SEQ ID NO: 22059 - DNA, 120 bp, Artificial Sequence
  ENSG00000026950_22 (sequence is synthesized)
tgacacgtgatttggaaagagactagaggccacacttgataaatcatggggaacagatgtgttccacccaacaaatgtgataagtgatcatgcagccagagccagccttccttcaatcaa

SEQ ID NO: 22060 - DNA, 120 bp, Artificial Sequence
  ENSG00000026950_23 (sequence is synthesized)
ggtttccaggcagagcaaataccctagagattctctgtgatataggaaatttggatgaagggagctagaagaaatacagggatttttttttttttttaagatggagtcttactctgttgc

SEQ ID NO: 22061 - DNA, 72 bp, Artificial Sequence
  ENSG00000026950_24 (sequence is synthesized)
ctgggaatataggtgcacgccaccacacccaacaaatttttgtacttttagtacagatgagggttcactatg

SEQ ID NO: 22062 - DNA, 70 bp, Artificial Sequence
  ENSG00000026950_25 (sequence is synthesized)
cccgagtactgggaatataggtgcacgccaccacacccaacaaatttttgtacttttagtacagatgagg

SEQ ID NO: 22063 - DNA, 120 bp, Artificial Sequence
  ENSG00000026950_26 (sequence is synthesized)
ccaccgggtgaccggcttacagggatatttttaatcccgttatggactctgtctccaggagaggggtctatccacccctgctcattggtggatgttaaaccaatattcctttcaactgct

SEQ ID NO: 22064 - DNA, 120 bp, Artificial Sequence
  ENSG00000026950_27 (sequence is synthesized)
gcctgctagggaaaaactactcctcattatcatcattattattgctctccactgtatcccctctacctggcatgtgcttgtcaagttctagttgttcaataaatttgttaataatgctga

SEQ ID NO: 22065 - DNA, 120 bp, Artificial Sequence
  ENSG00000026950_28 (sequence is synthesized)
ttaaataaattggatgtatggaaaaatagactgcagaaaaggggaactcatttagctcatgagtggtcgaatgaaggttgaaaattaacctctgagtataaagcattagtgggcagagtg

SEQ ID NO: 22066 - DNA, 120 bp, Artificial Sequence
  ENSG00000026950_29 (sequence is synthesized)
aatatggggagggaaacaagaaaaacgtagaaaggatccttgctgcttcctgaggccgcgtcagggtattgggttaggcagagatgctgaggcaaccctcatttcaccctcctcttcccc

SEQ ID NO: 22067 - DNA, 120 bp, Artificial Sequence
  ENSG00000026950_30 (sequence is synthesized)
tctggacacaagatacctgatacctggggctttctctcctgacatcgatgagagagtcacatttagggcagactagggacaccaggctttggactcagacctcctcagcatggcccaggc

SEQ ID NO: 22068 - DNA, 120 bp, Artificial Sequence
  ENSG00000026950_31 (sequence is synthesized)
cttgcatgctgaggctctgaaatccaggaaaaatggttgacctcatggacacttcctcaaactctctgcagcggatgtgattctggatccaaaaacagcaaaccccatcctccttgtttc

SEQ ID NO: 22069 - DNA, 120 bp, Artificial Sequence
  ENSG00000026950_32 (sequence is synthesized)
caaagcacaagagtgaagctcctggaggaactcagtaagttcccattcccccagagacccaggcatgtcttcctgtccctgctttatgcgccttgatgcatcttcccctgttccttccgt

SEQ ID NO: 22070 - DNA, 120 bp, Artificial Sequence
  ENSG00000026950_33 (sequence is synthesized)
accagaggacaagggagcccagtggcactgtctcaggaatctgcccagaggacagattcctggggcccagaagagggtggagaaagctgaagggtggagagtgaatctagggcatataag

SEQ ID NO: 22071 - DNA, 120 bp, Artificial Sequence
  ENSG00000026950_34 (sequence is synthesized)
gcaccacatagagcccagcacagagacggccttgcagctatcaggaagatgaggagcttccttcatggcctgctgtgggctgagtaaataacatgattgccttctacagcgctagagatt

SEQ ID NO: 22072 - DNA, 120 bp, Artificial Sequence
  ENSG00000026950_35 (sequence is synthesized)
gtgttccctggaccaacaacctgagggactatattcctttttcctttttacttctccaactgttgtgatttggggaagaaaagctcccatgactaggagaatttggggtaggcaacatta

SEQ ID NO: 22073 - DNA, 120 bp, Artificial Sequence
  ENSG00000026950_36 (sequence is synthesized)
aattccaatctgaaaagtgggcccatctccaagaccctttctgctgagagcccagggaaccagggcgaatagatctcttgcacttcctcagaccttcctgggaaggaagacatataaagg

SEQ ID NO: 22074 - DNA, 120 bp, Artificial Sequence
  ENSG00000026950_37 (sequence is synthesized)
gtggatctgaggggaaggagacacacactgagtaatactgcagggagagtgaggatggaaatgccaaggaaaggaggcgatgcctgcccaaagaacttagtccttcccagacttctcatg

SEQ ID NO: 22075 - DNA, 120 bp, Artificial Sequence
  ENSG00000026950_38 (sequence is synthesized)
ccacctactgtcagtgccttctcaaaaaaacttaatgcttctgagctttggcctccacatatttaggtgatgatttcaatctgtgtttgtgggggttgaggtgaagactgaaggaataat

SEQ ID NO: 22076 - DNA, 120 bp, Artificial Sequence
  ENSG00000026950_39 (sequence is synthesized)
aaagcaacaaggaaaagtgcagtgcccccatggttcccaacagtggggagctgtctccactcctacactgggacggctagggaggggaggcagttactggaacccagaataagaagtagc

SEQ ID NO: 22077 - DNA, 120 bp, Artificial Sequence
  ENSG00000026950_40 (sequence is synthesized)
tcaaagagagggctccctgagaagagtcttcaggccttgttagagcagcagcagctgctgctggcagggaggaagcaggaaattaaacggtgtgtctctcctttctttctccttccaatc

SEQ ID NO: 22078 - DNA, 120 bp, Artificial Sequence
  ENSG00000026950_41 (sequence is synthesized)
ttaaagcattccaatattttaaaagtaaagggaacaaaaggccaagtgtcccttcactcactaacctctgatcttcagattagcatgcgtcttttttgagtttttcaggcatttacataa

SEQ ID NO: 22079 - DNA, 120 bp, Artificial Sequence
  ENSG00000026950_42 (sequence is synthesized)
atagttatgcagaaatggatagctttgcttctgttcttcaattgaatctttagtatagttgtgcaaggtgttttttgatcacttagtgtgtctccgttatctaggttcatgacaacaaat

SEQ ID NO: 22080 - DNA, 120 bp, Artificial Sequence
  ENSG00000027001_0 (sequence is synthesized)
ggaaacgcggagcgcgcgctcccagcgaaagcagcagggcagggatctgcgttggaggaagggactgctctggtgctagaatgctgtgcgtcggaaggctgggcggcttgggagccagag

SEQ ID NO: 22081 - DNA, 120 bp, Artificial Sequence
  ENSG00000027001_1 (sequence is synthesized)
cagcagctctgccgccccgccgggcgggccggggaagcctcgaagccgggatccgggcccgaagggtcagcaccagctggtctcccgtgggcgccgccttcaatgtcaagccccagggca

SEQ ID NO: 22082 - DNA, 120 bp, Artificial Sequence
  ENSG00000027001_2 (sequence is synthesized)
gccgcttggacctgttcggcgagcgccggggtctttttggagttcctgagctgagtgccccagaaggatttcatattgcacaagaaaaagccttgagaaagacagaattgcttgtggacc

SEQ ID NO: 22083 - DNA, 120 bp, Artificial Sequence
  ENSG00000027001_3 (sequence is synthesized)
gtgcatgttccaccccacctgggccccagaccgtgctgatcttcgatgagctctcggattccttatgcagagtggccgacttggctgattttgtgaaaatcgctcaccctgagccagcat

SEQ ID NO: 22084 - DNA, 120 bp, Artificial Sequence
  ENSG00000027001_4 (sequence is synthesized)
tcagagaagctgcggaagaagcttgtagaagtattggcaccatggtagagaagttgaacacaaatgtggatttatatcaaagtttgcaaaaattactagctgataaaaaacttgtggatt

SEQ ID NO: 22085 - DNA, 120 bp, Artificial Sequence
  ENSG00000027001_5 (sequence is synthesized)
cccttgatccagaaacaaggcgagtggctgaactgtttatgtttgattttgaaattagtggaatccatctagacaaagaaaagcgtaaaagagcagtggacctcaatgttaaaatcttgg

SEQ ID NO: 22086 - DNA, 120 bp, Artificial Sequence
  ENSG00000027001_6 (sequence is synthesized)
atttgagtagtacatttcttatgggaaccaattttcccaacaagattgagaagcatctcttaccagaacacattcgtcgtaactttacatctgctggggatcatatcataattgatggtc

SEQ ID NO: 22087 - DNA, 120 bp, Artificial Sequence
  ENSG00000027001_7 (sequence is synthesized)
tccacgcagaatcaccagatgacttggtgcgagaagctgcttataaaatttttctttatcccaatgctggtcaattgaaatgtttagaagaattgctcagcagcagagatcttctggcaa

SEQ ID NO: 22088 - DNA, 120 bp, Artificial Sequence
  ENSG00000027001_8 (sequence is synthesized)
agttggtggggtattccacgttttctcacagggctctccaaggaacgatagctaaaaatccagagactgtcatgcagttccttgaaaaactatctgacaaactttctgaaagaactctga

SEQ ID NO: 22089 - DNA, 120 bp, Artificial Sequence
  ENSG00000027001_9 (sequence is synthesized)
gaaaggtataatattgagcccagcctatattgcccgtttttctctcttggagcatgcatggaaggcctgaatattttgcttaacagactgttggggatttcattatatgcagagcagcct

SEQ ID NO: 22090 - DNA, 120 bp, Artificial Sequence
  ENSG00000027001_10 (sequence is synthesized)
gcaaaaggagaggtgtggagcgaagatgtccgaaaactggctgttgttcatgaatctgaaggattgttggggtacatttactgtgatttttttcagcgagcagacaaaccacatcaggat

SEQ ID NO: 22091 - DNA, 120 bp, Artificial Sequence
  ENSG00000027001_11 (sequence is synthesized)
tgccatttcactatccgtggaggcagactaaaggaagatggagactatcaactcccagttgtagttcttatgctgaatcttccccgttcctcaaggagttctccaactttgctaactcct

SEQ ID NO: 22092 - DNA, 120 bp, Artificial Sequence
  ENSG00000027001_12 (sequence is synthesized)
agcatgatggaaaatcttttccatgaaatgggacatgccatgcattcaatgctaggacgtactcgttaccaacacgtcactgggaccaggtgccctactgattttgctgaggttccttct

SEQ ID NO: 22093 - DNA, 120 bp, Artificial Sequence
  ENSG00000027001_13 (sequence is synthesized)
attctgatggagtactttgcaaatgattatcgagtagttaaccaatttgccagacattatcagactggacagccactgccaaaaaatatggtgtctcgtctttgtgaatctaaaaaggtt

SEQ ID NO: 22094 - DNA, 120 bp, Artificial Sequence
  ENSG00000027001_14 (sequence is synthesized)
tgtgctgcagctgatatgcaacttcaggtcttttatgccactctggatcaaatctaccatgggaagcatcccctgaggaattcaaccacagacattctcaaggaaacacaagagaaattc

SEQ ID NO: 22095 - DNA, 120 bp, Artificial Sequence
  ENSG00000027001_15 (sequence is synthesized)
tatggcctaccatatgttccaaatactgcctggcagctgcgattcagccacctcgtggggtatggtgctagatattactcttacctcatgtccagagcggtcgcctccatggtttggaag

SEQ ID NO: 22096 - DNA, 120 bp, Artificial Sequence
  ENSG00000027001_16 (sequence is synthesized)
gagtgttttctacaggatcctttcaacagggctgccggggagcgctatcgcagggagatgctggcccacggtggaggcagggagcccatgctcatggttgaaggtatgcttcagaagtgt

SEQ ID NO: 22097 - DNA, 120 bp, Artificial Sequence
  ENSG00000027001_17 (sequence is synthesized)
ccttctgttgatgacttcgtaagtgccctcgtttccgacttggatctggacttcgaaactttcctcatggattctgaataaaagaaacactctacacctcttaaatcaaggtcatgtaga

SEQ ID NO: 22098 - DNA, 120 bp, Artificial Sequence
  ENSG00000027001_18 (sequence is synthesized)
taatgactttgttataaatgctacagctgtgagagcttgtttctgatttcattgttcgcttctgtaattctgaaaaactttaaactggtagaacttggaataaataatttgttttaatta

SEQ ID NO: 22099 - DNA, 120 bp, Artificial Sequence
  ENSG00000027001_19 (sequence is synthesized)
aaattccgaagtaatgccctgggaccccccttactacagtggtgtgattcgtgcagaaagcaccccgcaggtttgctgacagcatgcttgagtgaacgaaccagggagcgagggcactgg

SEQ ID NO: 22100 - DNA, 120 bp, Artificial Sequence
  ENSG00000027001_20 (sequence is synthesized)
atcatgaacgtctctttcaacactaggattctgtttaaagaaaaatcagtcagaaattaaggtgtaaatttgtggatgtccatagccaaagtctcatttgttgtgcaatttatgttcact

SEQ ID NO: 22101 - DNA, 120 bp, Artificial Sequence
  ENSG00000027001_21 (sequence is synthesized)
tactaaactcattcatttattagtaactatgtttttatatttttatatataaatttgttgtggggactcattttatggaacgaagtgttgtgcagttctagaatcacaaataaagccaat

SEQ ID NO: 22102 - DNA, 120 bp, Artificial Sequence
  ENSG00000027001_22 (sequence is synthesized)
cgcttggacctgttcggcgagcgccgggtgagcggcgcaggaggagctcccctcagtccccgagctaagccgacccctgctccgcgcggccagcaacaatcagggcgagattgtttgggc

SEQ ID NO: 22103 - DNA, 120 bp, Artificial Sequence
  ENSG00000027001_23 (sequence is synthesized)
ctgggaggaggcgagcagcgaacccaccttttacagtggcgtcttgtgtgcgctctcgatgagggcaaggtcacctctgctttgaggggccgggtttagtggtctcctacccagagtgtc

SEQ ID NO: 22104 - DNA, 120 bp, Artificial Sequence
  ENSG00000027001_24 (sequence is synthesized)
agccccttgctccacgtgaatctgaatagttcgttctggcagtggcggtgaattcgtcctgccaggacccgccctctgcatacactcaggcgcacccctgctaaagccctttagctccag

SEQ ID NO: 22105 - DNA, 120 bp, Artificial Sequence
  ENSG00000027001_25 (sequence is synthesized)
cgctacagtcctgccttaagaggcctatccctgtgcgttcacaggcggcatcacatggtctttttgcaaggacacggctgcctgcagtcgagtaatgggtctttttggagttcctgagct

SEQ ID NO: 22106 - DNA, 120 bp, Artificial Sequence
  ENSG00000027001_26 (sequence is synthesized)
ttacagggaatatgtcacacctgatttaatttattttagaacaatttaaaagccagaatttgatttttagaagcaagaaaataggggccaaattgtcacatggtggcagcttttatgaat

SEQ ID NO: 22107 - DNA, 120 bp, Artificial Sequence
  ENSG00000027075_0 (sequence is synthesized)
aagagacgcttggggctggggctcaccggacgggtaggtccggctctccagggagaggagctgcccggccctggagaaggggcgagtcctgcgcgagtccccgggaggcgccgcgcgctt

SEQ ID NO: 22108 - DNA, 120 bp, Artificial Sequence
  ENSG00000027075_1 (sequence is synthesized)
ggaagggacggtcgggcttccccggcccgctgagggctcggcggcgggctcccctcctttccacctcgggagggagggaaggaggggagggaaaagtcccacggaggaggcagaatggcc

SEQ ID NO: 22109 - DNA, 120 bp, Artificial Sequence
  ENSG00000027075_2 (sequence is synthesized)
agtcgaggggcgcttaggcgctgcctttccccagggctgcctcgactcctgcacctgtcccgagggctggcctgagacgggactcccggttctcccgctgcgaagcagcgcggccccccg

SEQ ID NO: 22110 - DNA, 120 bp, Artificial Sequence
  ENSG00000027075_3 (sequence is synthesized)
gggccggggcagcggcgccggcatgtcgtctggcaccatgaagttcaatggctatttgagggtccgcatcggtgaggcagtggggctgcagcccacccgctggtccctgcgccactcgct

SEQ ID NO: 22111 - DNA, 120 bp, Artificial Sequence
  ENSG00000027075_4 (sequence is synthesized)
cttcaagaagggccaccagctgctggacccctatctgacggtgagcgtggaccaggtgcgcgtgggccagaccagcaccaagcagaagaccaacaaacccacgtacaacgaggagttttg

SEQ ID NO: 22112 - DNA, 120 bp, Artificial Sequence
  ENSG00000027075_5 (sequence is synthesized)
cgctaacgtcaccgacggcggccacctcgagttggccgtcttccacgagacgcccctgggctacgaccacttcgtggccaactgcaccctgcagttccaggagctgctgcgcacgaccgg

SEQ ID NO: 22113 - DNA, 120 bp, Artificial Sequence
  ENSG00000027075_6 (sequence is synthesized)
cgcctcggacaccttcgagggttgggtggatctcgagccagaggggaaagtatttgtggtaataacccttaccgggagtttcactgaagctactctccagagagaccggatcttcaaaca

SEQ ID NO: 22114 - DNA, 120 bp, Artificial Sequence
  ENSG00000027075_7 (sequence is synthesized)
ttttaccaggaagcgccaaagggctatgcgaaggcgagtccaccagatcaatggacacaagttcatggccacgtatctgaggcagcccacctactgctctcactgcagggagtttatctg

SEQ ID NO: 22115 - DNA, 120 bp, Artificial Sequence
  ENSG00000027075_8 (sequence is synthesized)
gggagtgtttgggaaacagggttatcagtgccaagtgtgcacctgtgtcgtccataaacgctgccatcatctaattgttacagcctgtacttgccaaaacaatattaacaaagtggattc

SEQ ID NO: 22116 - DNA, 120 bp, Artificial Sequence
  ENSG00000027075_9 (sequence is synthesized)
aaagattgcagaacagaggttcgggatcaacatcccacacaagttcagcatccacaactacaaagtgccaacattctgcgatcactgtggctcactgctctggggaataatgcgacaagg

SEQ ID NO: 22117 - DNA, 120 bp, Artificial Sequence
  ENSG00000027075_10 (sequence is synthesized)
acttcagtgtaaaatatgtaaaatgaatgtgcatattcgatgtcaagcgaacgtggcccctaactgtggggtaaatgcggtggaacttgccaagaccctggcagggatgggtctccaacc

SEQ ID NO: 22118 - DNA, 120 bp, Artificial Sequence
  ENSG00000027075_11 (sequence is synthesized)
cggaaatatttctccaacctcgaaactcgtttccagatcgaccctaagacgacagggaaaggagagcagcaaagaaggaaatgggattggggttaattcttccaaccgacttggtatcga

SEQ ID NO: 22119 - DNA, 120 bp, Artificial Sequence
  ENSG00000027075_12 (sequence is synthesized)
caactttgagttcatccgagtgttggggaaggggagttttgggaaggtgatgcttgcaagagtaaaagaaacaggagacctctatgctgtgaaggtgctgaagaaggacgtgattctgca

SEQ ID NO: 22120 - DNA, 120 bp, Artificial Sequence
  ENSG00000027075_13 (sequence is synthesized)
ggatgatgatgtggaatgcaccatgaccgagaaaaggatcctgtctctggcccgcaatcaccccttcctcactcagttgttctgctgctttcagacccccgatcgtctgttttttgtgat

SEQ ID NO: 22121 - DNA, 120 bp, Artificial Sequence
  ENSG00000027075_14 (sequence is synthesized)
tctcatgttcctccatgataaaggaatcatctatagagatctgaaactggacaatgtcctgttggaccacgagggtcactgtaaactggcagacttcggaatgtgcaaggaggggatttg

SEQ ID NO: 22122 - DNA, 120 bp, Artificial Sequence
  ENSG00000027075_15 (sequence is synthesized)
caatggtgtcaccacggccacattctgtggcacgccagactatatcgctccagagatcctccaggaaatgctgtacgggcctgcagtagactggtgggcaatgggcgtgttgctctatga

SEQ ID NO: 22123 - DNA, 120 bp, Artificial Sequence
  ENSG00000027075_16 (sequence is synthesized)
gatgctctgtggtcacgcgccttttgaggcagagaacgaagatgacctctttgaggccatactgaatgatgaggtggtctaccctacctggctccatgaagatgccacagggatcctaaa

SEQ ID NO: 22124 - DNA, 120 bp, Artificial Sequence
  ENSG00000027075_17 (sequence is synthesized)
atctttcatgaccaagaaccccaccatgcgcttgggcagcctgactcagggaggcgagcacgccatcttgagacatcctttttttaaggaaatcgactgggcccagctgaaccatcgcca

SEQ ID NO: 22125 - DNA, 120 bp, Artificial Sequence
  ENSG00000027075_18 (sequence is synthesized)
aatagaaccgcctttcagacccagaatcaaatcccgagaagatgtcagtaattttgaccctgacttcataaaggaagagccagttttaactccaattgatgagggacatcttccaatgat

SEQ ID NO: 22126 - DNA, 120 bp, Artificial Sequence
  ENSG00000027075_19 (sequence is synthesized)
taaccaggatgagtttagaaacttttcctatgtgtctccagaattgcaaccatagccttatggggagtgagagagagggcacgagaacccaaagggaatagagattctccaggaatttcc

SEQ ID NO: 22127 - DNA, 120 bp, Artificial Sequence
  ENSG00000027075_20 (sequence is synthesized)
tctatgggaccttcccagcatcagccttagaacaagaaccttaccttcaaggagcaagtgaagaactctgtgaaggatggaactttcagatatcaactatttagagtccagagggagcca

SEQ ID NO: 22128 - DNA, 120 bp, Artificial Sequence
  ENSG00000027075_21 (sequence is synthesized)
tggcactagaaatagttgataatgaaatgagattttatgaagtataccgctccacctatgagcgtctgtctctgtgggcttgggatgttaacaggagccaaaaggagggaaagtgtgaag

SEQ ID NO: 22129 - DNA, 120 bp, Artificial Sequence
  ENSG00000027075_22 (sequence is synthesized)
aataaagtagatctgagaaattctgagccaatcaggcttcttaattcaagagacaaaccaagacgttctgtcaactgtgctgtgctcttctttaagccaatgaaccccaattcctggcag

SEQ ID NO: 22130 - DNA, 120 bp, Artificial Sequence
  ENSG00000027075_23 (sequence is synthesized)
tctacaagaagtctcttaatgctaatgaagaatttaaaggtctttttaaggaaatgaagggctttccaaatagaatgatttactctgaagaaacaaacaatggtatctctgaaactcaca

SEQ ID NO: 22131 - DNA, 120 bp, Artificial Sequence
  ENSG00000027075_24 (sequence is synthesized)
acctaaagcccaatcttgaaaatatgttgtgcaccaagacgactgcttcagcttcttctcttatccttactttctttaatagatatttattaaactgtccagtgaaaaggtgccacaatg

SEQ ID NO: 22132 - DNA, 120 bp, Artificial Sequence
  ENSG00000027075_25 (sequence is synthesized)
cccagtattgtaaacaacaggtttgcattcatgaagctttcattcattctggagtctactaatttacctgaatggtgtttgcattctgtgaaatgcctctccacgttgcatatgtcacac

SEQ ID NO: 22133 - DNA, 120 bp, Artificial Sequence
  ENSG00000027075_26 (sequence is synthesized)
ttttgtctgcacataactcttttttcacaagaagggtcactgccacaacagcacagtcagcgggtgaattacaggtgcctgctgcctgcctacctgggtaatctgatcttgtctgtatcg

SEQ ID NO: 22134 - DNA, 120 bp, Artificial Sequence
  ENSG00000027075_27 (sequence is synthesized)
ccgtgtgctcatcactgaagaattgcaggccactcatgtcagtgaccagatttgtggcttataaacattagcagtttatttatgttttaagatgcaaagatgtgtgtttgatattcactt

SEQ ID NO: 22135 - DNA, 120 bp, Artificial Sequence
  ENSG00000027075_28 (sequence is synthesized)
taataattagaaatggatcttgtaaacagggcatatatcaaagatgaccttataatatgtacccgaatatacagttcaagaattttgtctgactggaaataaatgcattttgtagcaaaa

SEQ ID NO: 22136 - DNA, 120 bp, Artificial Sequence
  ENSG00000027075_29 (sequence is synthesized)
ataaatgtaaaatgcctggcaccactgaggaagtagggtgaggagttaagttagacagtgactggcatttcccagccacactagtacagaagtgtcctgtggtacgaacggaggcaggct

SEQ ID NO: 22137 - DNA, 120 bp, Artificial Sequence
  ENSG00000027075_30 (sequence is synthesized)
ggaccgacgcgcgggctgaccgagtgggggccccgccgcggggcgcctccctctccgcgccgcgcaagcccggggactgctcgcgggtcgggtttcccgccagctcaggtggatctcgag

SEQ ID NO: 22138 - DNA, 120 bp, Artificial Sequence
  ENSG00000027075_31 (sequence is synthesized)
acagtgttcagtcagctgatgacttcaagattttattaaacactccttgtaaataatttatttgaaggttaggtaaggccggtcatgttgccaatccctggaggagccatctattcacaa

SEQ ID NO: 22139 - DNA, 120 bp, Artificial Sequence
  ENSG00000027075_32 (sequence is synthesized)
atgggaccttcccgtggaaagccaccgcagaaggcacccaagggaccacacaaggcattggtgtttccatgcacttccacttgagcgctaactgtaactccatggcttagacgtattttt

SEQ ID NO: 22140 - DNA, 120 bp, Artificial Sequence
  ENSG00000027075_33 (sequence is synthesized)
aattgaccttttacacaaagcagtaagcacagattcagaagctgatactgagggagtttcgagtggcagaaccgatcatctgtcaaactgagttgatctttcccccacgttatactgggg

SEQ ID NO: 22141 - DNA, 120 bp, Artificial Sequence
  ENSG00000027075_34 (sequence is synthesized)
atcctgtttgaacagtgatctacatgtggcatttaaactgctaccttttatttcactgttgagagacagaaaaaaatacagttgacatgattctttgttatttaattgcctgtgaattgc

SEQ ID NO: 22142 - DNA, 120 bp, Artificial Sequence
  ENSG00000027075_35 (sequence is synthesized)
agaaaacctgaactgtgttttagctttgttttccaccatctaaatggcttgagtctgtcctaaaattcctttgacccttaaagttcttatcattaaaatgaaaacaggatcgctgtgagg

SEQ ID NO: 22143 - DNA, 120 bp, Artificial Sequence
  ENSG00000027075_36 (sequence is synthesized)
gtcaaatgagagaatgcagaatattttgtacagtgcgaagtgctgttcaaaagtgagtcagttcaactgtggtgatgaccccctccatcctcacaccaaaggaaaaatgtcccagggctt

SEQ ID NO: 22144 - DNA, 120 bp, Artificial Sequence
  ENSG00000027075_37 (sequence is synthesized)
tggaaagctgtatgtggaccagaaatgccaaaggaggttccatcaggaagaggggacttgtgctctgactctgctgtacccctgatcatatgttaccacttatttatgctttaaagaaca

SEQ ID NO: 22145 - DNA, 120 bp, Artificial Sequence
  ENSG00000027075_38 (sequence is synthesized)
aatttctgcttctgctgtgaggctgtctctctctcctcccactagaaggaattgttctctcttatgtttctctcgtagcacttggttcataccttcatcgtgccactaggatgatacagc

SEQ ID NO: 22146 - DNA, 120 bp, Artificial Sequence
  ENSG00000027075_39 (sequence is synthesized)
gtactccagctccttgatgccgttggaggagtagtagaggcccaggcccaggccgatgaaggccaggcccgcgcagaagaagagcggcagcgcgatgctggccgacagcagcggctgcca

SEQ ID NO: 22147 - DNA, 120 bp, Artificial Sequence
  ENSG00000027075_40 (sequence is synthesized)
agaactctgcatgcttatcggggtgtaatgcctgcctcctgctgctgctccaagctcctccaggagaaggacgctgcttctgcctggtccaggatcgtatcagggtctgggatcgtctgt

SEQ ID NO: 22148 - DNA, 120 bp, Artificial Sequence
  ENSG00000027075_41 (sequence is synthesized)
gtaatgagggccacagcaggaaggggaacataaaatgagtccctgagttcttgacccttctctttcccctgctctccagtcagtttgagacttacacttggggtagaatccagattttcc

SEQ ID NO: 22149 - DNA, 120 bp, Artificial Sequence
  ENSG00000027075_42 (sequence is synthesized)
accctggtcccctcactcactctgtgcagcttataaagtgcttttcttggccctagaaaacattctgcttcctttagtaaatgtgtgcagaatatttcatgaagtcacattattttcctc

SEQ ID NO: 22150 - DNA, 120 bp, Artificial Sequence
  ENSG00000027075_43 (sequence is synthesized)
tttggccgactttccctcttggatcacagtcagggagaaagtcagctgaggtgaggcaacttttcagtgtgaccttaaatgtggatgaaagtgatggccccgaggagcacaattgttaac

SEQ ID NO: 22151 - DNA, 120 bp, Artificial Sequence
  ENSG00000027075_44 (sequence is synthesized)
ttactggcatttgggtcccattagggacataagcaaataatgaaagttttctgcaaaaggattatgctgtcaccattcacagcagtaggaacagagagtttagggaaaggcctgtgccca

SEQ ID NO: 22152 - DNA, 120 bp, Artificial Sequence
  ENSG00000027075_45 (sequence is synthesized)
gcctaggatggcaagctatccacctccaactccacaccatctgcaccaacgtgaactgtgaaagatttcaggcctgggactaatgttaaatgttcccttaactcctcatctccacatcac

SEQ ID NO: 22153 - DNA, 120 bp, Artificial Sequence
  ENSG00000027075_46 (sequence is synthesized)
tggacgggggtagtggtagaagggccaccccaccaccaccacaacacacaaagcttctacccccttagtatcaccccggaccctccttctcccggtcctggtttctgtttcatggtattc

SEQ ID NO: 22154 - DNA, 120 bp, Artificial Sequence
  ENSG00000027075_47 (sequence is synthesized)
atcctcctctggcctcttcatggcatcctccagctgccactctggctgcttctcaccctacaccaggggtcaggagccatgaaagtccgtgagtgataccagccaggtgggaggtgatag

SEQ ID NO: 22155 - DNA, 120 bp, Artificial Sequence
  ENSG00000027075_48 (sequence is synthesized)
ggagtggtggggcatgtgactgactgggcatctggtgccccatgaaaagcagaagcccctgctcaactccaggccgtttctatgagaggagtgcaggcccagtgttcccgagtatctcat

SEQ ID NO: 22156 - DNA, 120 bp, Artificial Sequence
  ENSG00000027075_49 (sequence is synthesized)
tttccacgagaagttggaaaacctgacttttcatgtgatgtgacatttcctagcgtttaaatatttgagaagtaattaaaattatttcaaaacacactaggtaggccaaataaaatgtgt

SEQ ID NO: 22157 - DNA, 120 bp, Artificial Sequence
  ENSG00000027075_50 (sequence is synthesized)
ctgagacctagggctggtatcagttctagtctgtctctgtcactttccacaatctaacctgccctcccagcttcagtggttactcaaatttcaatgtctctgagcgttagatggccagcc

SEQ ID NO: 22158 - DNA, 120 bp, Artificial Sequence
  ENSG00000027075_51 (sequence is synthesized)
atgcttatcggggtgtaatgcctgcctcctgctgctgctccaagctcctccaggagaaggacgctgcttctgcctggtccaggatcgtatcagggtctggggctgcctcgactcctgcac

SEQ ID NO: 22159 - DNA, 120 bp, Artificial Sequence
  ENSG00000027075_52 (sequence is synthesized)
aaatagcactttaacaagcttggcggaggcagtggggtgaggagaggaagttaataggcccagggaggagagtatctcactggtttctccaagctgattcttctgggtgccaagagagct

SEQ ID NO: 22160 - DNA, 120 bp, Artificial Sequence
  ENSG00000027075_53 (sequence is synthesized)
tcttgcctcctcagaagaaagaatttgaccaaggggcataaagcagaaagatagtgcaaggttttcaactctactttcatctcccatgagacctttttttgagacaagcaaagcctctca

SEQ ID NO: 22161 - DNA, 120 bp, Artificial Sequence
  ENSG00000027075_54 (sequence is synthesized)
catgagacctttttttgagacaagcaaagcctctcagttcagcttatatatttttgaatacaccctcccaacctaaaatcaaactagagctctgcaattagaacatagctacagaagtta

SEQ ID NO: 22162 - DNA, 120 bp, Artificial Sequence
  ENSG00000027075_55 (sequence is synthesized)
agtcacaagctcttaagcaactgcgggtcaacgcttgagaccgttttggatttctgttagcacttgtttctgttgcccaagaagatcctttccaagacttcagcaggcatactggcttcg

SEQ ID NO: 22163 - DNA, 120 bp, Artificial Sequence
  ENSG00000027075_56 (sequence is synthesized)
agtctttgggtaaggagctccaactttcagcacgagagtgataggtgatagtattgggaaaaacgaaaaggaatatgtgatcgtaattaaaatgtcagtggataaaaataaggcccttgg

SEQ ID NO: 22164 - DNA, 120 bp, Artificial Sequence
  ENSG00000027075_57 (sequence is synthesized)
agtaccctgtgggaaatcaggagccacttcctcctggatgctttatgtagcacattatactgacctattaaataatgagaatcaggctgggcatggtggctcatacctgtaaccccagca

SEQ ID NO: 22165 - DNA, 120 bp, Artificial Sequence
  ENSG00000027075_58 (sequence is synthesized)
gcaagaccccatcgctacaaaaaaaataaaaatataaattagccaggcatggtggcacatgactgtggtcctagctacatgggacactgagacaggaggactgcttgagcccaggagttt

SEQ ID NO: 22166 - DNA, 120 bp, Artificial Sequence
  ENSG00000027075_59 (sequence is synthesized)
atggttacagtgggctatgattgcaccgctacactccagcaggagcaacagagtgagaccctacctctgaaaaaataataataagaagaatcacatggatgaagcaaatgatgataacca

SEQ ID NO: 22167 - DNA, 120 bp, Artificial Sequence
  ENSG00000027075_60 (sequence is synthesized)
aagacaggtgcacagacagagccttctggaatacagtgcggggtatgctatcatagaagtataaactgggcaccctaggagcagagttgatattgctatgactgtctggggacatcagga

SEQ ID NO: 22168 - DNA, 120 bp, Artificial Sequence
  ENSG00000027075_61 (sequence is synthesized)
gtgctacaagagattggcccatgatagccagttataaccaggcagtgggcatctcaggggtttgcataggtctaaccttaaaaagccacatgactgggtgcggtgacacacacttgtaat

SEQ ID NO: 22169 - DNA, 120 bp, Artificial Sequence
  ENSG00000027075_62 (sequence is synthesized)
ggctgcagcaggtgggatattttttggattatggagagctgtttgatttcacatcagtgggttcttccctcaaccttgttcagatcagtgcctgagtggatctcgagccagaggggaaag

SEQ ID NO: 22170 - DNA, 120 bp, Artificial Sequence
  ENSG00000027075_63 (sequence is synthesized)
gtttaaactctattttcttctttcgtgtacttgctcttgatttgctgaccttctaaatggggaccagcatctaatgcttaatgcagagtgctggggacatggggaggcaggaggagctgg

SEQ ID NO: 22171 - DNA, 120 bp, Artificial Sequence
  ENSG00000027075_64 (sequence is synthesized)
aggctgcgtcatggaaagaccttggcgccccctcaggaaggaaggactggcttggcaggatcccaggctgttttcctggttcagccctcccgaagacattgtgttctctgcagccctgga

SEQ ID NO: 22172 - DNA, 120 bp, Artificial Sequence
  ENSG00000027075_65 (sequence is synthesized)
atgcaaggctcctaaacttccttccctagtgcttccttaagattgaccagactttggtggaaatatgtagcagagactctttatactttttactccataaaactaaagatttgcagttga

SEQ ID NO: 22173 - DNA, 120 bp, Artificial Sequence
  ENSG00000027075_66 (sequence is synthesized)
ggaaaattcagaaactcagtgaccttgtttggaaatgacagcctacattttcctgtggtcagcccattcttaatgggcgcatcatcttggagccatgagagatctgaaactggacaatgt

SEQ ID NO: 22174 - DNA, 120 bp, Artificial Sequence
  ENSG00000027075_67 (sequence is synthesized)
aatagcactctgcagcttttcatacagcatgagcttgttattcatgtagaaatactccaaggcagttcttagaacttgggatcgtctgttttttgtgatggagtttgtgaatgggggtga

SEQ ID NO: 22175 - DNA, 120 bp, Artificial Sequence
  ENSG00000027075_68 (sequence is synthesized)
atgcttatcggggtgtaatgcctgcctcctgctgctgctccaagctcctccaggagaaggacgctgcttctgcctggtccaggatcgtatcagggtctggctactctccagagagaccgg

SEQ ID NO: 22176 - DNA, 120 bp, Artificial Sequence
  ENSG00000027644_0 (sequence is synthesized)
gggaaggaccgcagccagcactgtcagctggcgctggggggccgcgcgcccggagggatccagggagactctccctgcggagtcccacgcgccccgggacccccgctgccctccttggga

SEQ ID NO: 22177 - DNA, 120 bp, Artificial Sequence
  ENSG00000027644_1 (sequence is synthesized)
gcggtccccagcctgctgctccgccctcagggttggctggcctctcggcctgccttttgctcagaaccctgtgtcattttctccctctggaggcccgagactctccctgtcactgtctgc

SEQ ID NO: 22178 - DNA, 120 bp, Artificial Sequence
  ENSG00000027644_2 (sequence is synthesized)
atctctgtccccatctctcaatctcatgctgagtctctctgtctccaactgcctgtcactgtctttgtgtctctgtgactctcatttctttttttctgtctcctgctgtctctgtgtggg

SEQ ID NO: 22179 - DNA, 120 bp, Artificial Sequence
  ENSG00000027644_3 (sequence is synthesized)
attccttgtctctctgcccctgccctccctctcctatctgaaccctggtctctgtgtcccttagggcttatcacaccgttctccccagagtcaccgggaggagagccgggactggacaca

SEQ ID NO: 22180 - DNA, 120 bp, Artificial Sequence
  ENSG00000027644_4 (sequence is synthesized)
agccagggctgggacaatggcagtgcctagtctgtggccctggggagcatgcctgcctgtgatcttcctctccttgggatttggcctggatacagtagaggtgtgccccagcctggatat

SEQ ID NO: 22181 - DNA, 120 bp, Artificial Sequence
  ENSG00000027644_5 (sequence is synthesized)
tcgctcagaggtggcagagcttcgtcagctggagaactgcagcgtggtggagggccacctgcagatcctgctcatgttcacagccaccggggaggacttccgcggcctcagcttccctcg

SEQ ID NO: 22182 - DNA, 120 bp, Artificial Sequence
  ENSG00000027644_6 (sequence is synthesized)
cctcacccaggtcaccgactacctgctgctcttccgtgtctacggactggagagcctgcgcgacctcttccccaacctagcagtcatccgcgggacgcgcctcttcctgggctatgcact

SEQ ID NO: 22183 - DNA, 120 bp, Artificial Sequence
  ENSG00000027644_7 (sequence is synthesized)
ggtcatctttgagatgccacatctgcgtgacgtggcactgcctgcacttggggccgtgctgcgtggggctgtgcgtgtggagaagaaccaggagctctgccacctctccaccattgactg

SEQ ID NO: 22184 - DNA, 120 bp, Artificial Sequence
  ENSG00000027644_8 (sequence is synthesized)
gggactgctgcagccagcacctggcgccaaccacatcgtgggcaacaagctgggcgaggagtgtgctgacgtgtgccctggtgtgctgggtgctgctggtgagccctgtgccaagaccac

SEQ ID NO: 22185 - DNA, 120 bp, Artificial Sequence
  ENSG00000027644_9 (sequence is synthesized)
cttcagcgggcacactgactacagatgctggacctccagccactgccagagagtgtgcccctgcccccatgggatggcttgcacagcgaggggcgagtgctgccacaccgaatgcctggg

SEQ ID NO: 22186 - DNA, 120 bp, Artificial Sequence
  ENSG00000027644_10 (sequence is synthesized)
gggctgcagccagccagaagaccctcgtgcctgtgtagcttgccgccacctctacttccagggtgcctgcctgtgggcctgcccgccaggcacctaccagtatgagtcctggcgctgtgt

SEQ ID NO: 22187 - DNA, 120 bp, Artificial Sequence
  ENSG00000027644_11 (sequence is synthesized)
cacagctgagcgctgtgccagcctgcactctgtgcccggccgtgcctccaccttcggcatacaccagggcagttgcctggcccagtgcccttctggcttcacccgtaatagcagcagcat

SEQ ID NO: 22188 - DNA, 120 bp, Artificial Sequence
  ENSG00000027644_12 (sequence is synthesized)
attctgccacaagtgcgaggggctgtgccctaaagagtgcaaggtaggcaccaagaccatcgactccatccaggcggcacaggatcttgtgggctgcacgcatgtggagggaagcctcat

SEQ ID NO: 22189 - DNA, 120 bp, Artificial Sequence
  ENSG00000027644_13 (sequence is synthesized)
cctcaaccttcgccagggctacaacctggagccacagctgcagcacagcctggggctggtagaaaccattactggcttcctcaaaatcaagcactcctttgccctcgtgtccctgggctt

SEQ ID NO: 22190 - DNA, 120 bp, Artificial Sequence
  ENSG00000027644_14 (sequence is synthesized)
tttcaagaacctcaaactaatccggggagacgccatggtggatgggaactacactctctacgtgctggacaaccagaacctacaacagctagggtcctgggtggccgcggggctcaccat

SEQ ID NO: 22191 - DNA, 120 bp, Artificial Sequence
  ENSG00000027644_15 (sequence is synthesized)
tcccgtgggcaagatctacttcgccttcaacccgcgcctctgcttggaacacatctaccgactggaggaggtgacaggcacgcgaggtcggcagaacaaggctgagatcaacccccgcac

SEQ ID NO: 22192 - DNA, 120 bp, Artificial Sequence
  ENSG00000027644_16 (sequence is synthesized)
caacggagaccgcgccgcctgccagactcgcaccctgcgcttcgtgtccaacgtgacggaggcagaccgcatcctgctacgctgggagcgctatgagccactggaggcccgcgacctgct

SEQ ID NO: 22193 - DNA, 120 bp, Artificial Sequence
  ENSG00000027644_17 (sequence is synthesized)
cagcttcatcgtgtactacaaggagtccccattccagaacgccacagagcacgtgggtccagatgcttgtggaacccagagctggaacctgctggatgtggagctgcccctaagccgcac

SEQ ID NO: 22194 - DNA, 120 bp, Artificial Sequence
  ENSG00000027644_18 (sequence is synthesized)
ccaggagccaggggtgaccctagcctccctcaagccttggacacagtacgcagtgtttgtgcgggccatcacgctaaccactgaggaggacagccctcatcaaggagcccagagtcccat

SEQ ID NO: 22195 - DNA, 120 bp, Artificial Sequence
  ENSG00000027644_19 (sequence is synthesized)
cgtctacctccgaacgctgcctgcagctcccacggtgccccaagacgtcatctccacgtccaactcctcctcccacctcctggtgcgctggaagccaccgacccagcgcaatgggaacct

SEQ ID NO: 22196 - DNA, 120 bp, Artificial Sequence
  ENSG00000027644_20 (sequence is synthesized)
cacctactacctggtgctgtggcagcggctggcagaggacggcgacctctacctcaatgactactgccaccgcggcttgcggctgcccaccagcaacaacgatccgcgcttcgacggcga

SEQ ID NO: 22197 - DNA, 120 bp, Artificial Sequence
  ENSG00000027644_21 (sequence is synthesized)
ccttgccagcacccacctcctggtcaggttctgcccccgctggaggcgcaagaggcctcgttccagaagaagtttgaaaactttctacacaacgcgatcaccatccccatatccccttgg

SEQ ID NO: 22198 - DNA, 120 bp, Artificial Sequence
  ENSG00000027644_22 (sequence is synthesized)
aaggtgacgtccatcaacaagagcccccaaagggactcagggcggcaccgccgggcagctgggcccctccggctggggggcaacagctcggatttcgagatccaggaggacaaggtgccc

SEQ ID NO: 22199 - DNA, 120 bp, Artificial Sequence
  ENSG00000027644_23 (sequence is synthesized)
cgtgagcgagcggtgctgagcggcctgcgccacttcacggaataccggatcgacatccatgcctgcaaccacgcggcgcacaccgtgggctgcagcgccgccaccttcgtctttgcgcgc

SEQ ID NO: 22200 - DNA, 120 bp, Artificial Sequence
  ENSG00000027644_24 (sequence is synthesized)
accatgccccacagagaggctgatggtattccaggaaaggtggcctgggaggcctccagcaagaacagtgtccttctgcgctggctcgagccaccagaccccaacggactcatcctcaag

SEQ ID NO: 22201 - DNA, 120 bp, Artificial Sequence
  ENSG00000027644_25 (sequence is synthesized)
tacgaaatcaagtaccgccgcttgggagaggaggccacagtgctgtgtgtgtcccgtcttcgatatgcgaagtttgggggagtccacctggccctgctgccccctggaaactactctgcc

SEQ ID NO: 22202 - DNA, 120 bp, Artificial Sequence
  ENSG00000027644_26 (sequence is synthesized)
agggttagggcaacctcactggctggcaatggctcttggacagacagtgttgccttctacatccttggcccagaggaggaggatgctggggggctgcatgtcctcctcactgccacccct

SEQ ID NO: 22203 - DNA, 120 bp, Artificial Sequence
  ENSG00000027644_27 (sequence is synthesized)
gtggggctcacgctgctcatcgttcttgctgcccttggtttcttctacggcaagaagagaaacagaaccctgtatgcttctgtgaatccagagtacttcagcgcctctgatatgtatgtc

SEQ ID NO: 22204 - DNA, 120 bp, Artificial Sequence
  ENSG00000027644_28 (sequence is synthesized)
cctgatgaatgggaggtgcctcgggagcagatctcgataatccgggaactgggccagggctcttttgggatggtatatgaggggctggcacgaggacttgaggctggagaggagtccaca

SEQ ID NO: 22205 - DNA, 120 bp, Artificial Sequence
  ENSG00000027644_29 (sequence is synthesized)
cccgtggccctgaagacggtgaatgagctggccagcccacgggaatgcattgagttcctcaaggaagcttctgtcatgaaagccttcaagtgtcaccatgtggtgcgtctcctgggtgtg

SEQ ID NO: 22206 - DNA, 120 bp, Artificial Sequence
  ENSG00000027644_30 (sequence is synthesized)
gtatctcagggccagccaactctggtcatcatggagttaatgacccgtggggacctcaagagccatcttcgatctttgcggcctgaggcagagaacaaccctgggctcccacagccagca

SEQ ID NO: 22207 - DNA, 120 bp, Artificial Sequence
  ENSG00000027644_31 (sequence is synthesized)
ttgggggaaatgatccaaatggctggtgagattgcagacggcatggcctaccttgctgccaacaagtttgtgcaccgagatctagcagcccgcaactgcatggtgtcccaggacttcacc

SEQ ID NO: 22208 - DNA, 120 bp, Artificial Sequence
  ENSG00000027644_32 (sequence is synthesized)
gtcaagatcggggacttcgggatgactcgggacgtgtatgagacagactattaccgcaagggtgggaaggggctgctgcccgtgcgctggatggcccccgagtccctcaaagatgggatc

SEQ ID NO: 22209 - DNA, 120 bp, Artificial Sequence
  ENSG00000027644_33 (sequence is synthesized)
ttcaccacccactcggatgtctggtcctttggcgtggtactctgggagattgtgaccctggcagaacaaccctaccagggcctgtccaatgagcaggtgctgaagttcgtcatggatggc

SEQ ID NO: 22210 - DNA, 120 bp, Artificial Sequence
  ENSG00000027644_34 (sequence is synthesized)
ggggtcctggaggagctggagggctgtccccttcagctgcaggagctgatgagccgctgctggcagccgaacccacgcctgcgcccatctttcacacacattctggacagcatacaggag

SEQ ID NO: 22211 - DNA, 120 bp, Artificial Sequence
  ENSG00000027644_35 (sequence is synthesized)
gagctgcggccctccttccgcctcctctccttctactacagcccggaatgccggggggcccggggctccctgcctaccaccgatgcagagcctgactcctcacccactccaagagactgc

SEQ ID NO: 22212 - DNA, 120 bp, Artificial Sequence
  ENSG00000027644_36 (sequence is synthesized)
agccctcaaaatgggggtccagggcactgaggggcacctcattccctggctggcctcccatggggagacaggaagggacccgacctctgtggctgagacgcctgaatgttcacccccacc

SEQ ID NO: 22213 - DNA, 120 bp, Artificial Sequence
  ENSG00000027644_37 (sequence is synthesized)
ccaactcagggcaagggatggccgagggtggggcagagaacaggagcagggaaggctgtgggggtgggcagaggggtctcaccataggagtttctcagactctgagtccctcgggggaga

SEQ ID NO: 22214 - DNA, 120 bp, Artificial Sequence
  ENSG00000027644_38 (sequence is synthesized)
gcaagcagggtcaaagccagaggagtagagatcaggtcagggagagatgtcctgccctcagaggtagggaccccactcagactaggaagagggggcccgcccaccctagaggccctgccc

SEQ ID NO: 22215 - DNA, 120 bp, Artificial Sequence
  ENSG00000027644_39 (sequence is synthesized)
ctcagtttggggtctcctctggacaggtagggccagcgacatgtttgaaatcagatgagcaatcagaagcaggcctggggcgctctccatgcatgtatgggaggggggtggggctccaca

SEQ ID NO: 22216 - DNA, 120 bp, Artificial Sequence
  ENSG00000027644_40 (sequence is synthesized)
tgactgccttgcttgccactggtttcacctcctcccctcagctccactgaccaggtggcatggggagaacccaggggcctggggagtggttcccagcctgcccgccctcacctcctcctc

SEQ ID NO: 22217 - DNA, 120 bp, Artificial Sequence
  ENSG00000027644_41 (sequence is synthesized)
tccttttgccctgcccagggctccccaagcttggtgctccttcctccttttctccaggggcatcccttggagtacagtcaccctttcttcagtccctcccctcaatgattagccctggat

SEQ ID NO: 22218 - DNA, 120 bp, Artificial Sequence
  ENSG00000027644_42 (sequence is synthesized)
gcttaaggctttcagagcctcatcttcctccctcccctcaccctcacccagccccgcccccacccctgcctctcatgggaagactggagaaggcacaataaatgctgaggcctgtttgta

SEQ ID NO: 22219 - DNA, 120 bp, Artificial Sequence
  ENSG00000027697_0 (sequence is synthesized)
gcctcctgccgacgccggcacagaccccggtgacggaagtgacgtaaggccggggctggagggcagtgctgggctggtcccgcaggcgctcggggttggagccagcgaccgtcggtagca

SEQ ID NO: 22220 - DNA, 120 bp, Artificial Sequence
  ENSG00000027697_1 (sequence is synthesized)
gcatggctctcctctttctcctaccccttgtcatgcagggtgtgagcagggctgagatgggcaccgcggatctggggccgtcctcagtgcctacaccaactaatgttacaattgaatcct

SEQ ID NO: 22221 - DNA, 120 bp, Artificial Sequence
  ENSG00000027697_2 (sequence is synthesized)
ataacatgaaccctatcgtatattgggagtaccagatcatgccacaggtccctgtttttaccgtagaggtaaagaactatggtgttaagaattcagaatggattgatgcctgcatcaata

SEQ ID NO: 22222 - DNA, 120 bp, Artificial Sequence
  ENSG00000027697_3 (sequence is synthesized)
tttctcatcattattgtaatatttctgatcatgttggtgatccatcaaattctctttgggtcagagttaaagccagggttggacaaaaagaatctgcctatgcaaagtcagaagaatttg

SEQ ID NO: 22223 - DNA, 120 bp, Artificial Sequence
  ENSG00000027697_4 (sequence is synthesized)
ctgtatgccgagatggaaaaattggaccacctaaactggatatcagaaaggaggagaagcaaatcatgattgacatatttcacccttcagtttttgtaaatggagacgagcaggaagtcg

SEQ ID NO: 22224 - DNA, 120 bp, Artificial Sequence
  ENSG00000027697_5 (sequence is synthesized)
attatgatcccgaaactacctgttacattagggtgtacaatgtgtatgtgagaatgaacggaagtgagatccagtataaaatactcacgcagaaggaagatgattgtgacgagattcagt

SEQ ID NO: 22225 - DNA, 120 bp, Artificial Sequence
  ENSG00000027697_6 (sequence is synthesized)
gccagttagcgattccagtatcctcactgaattctcagtactgtgtttcagcagaaggagtcttacatgtgtggggtgttacaactgaaaagtcaaaagaagtttgtattaccattttca

SEQ ID NO: 22226 - DNA, 120 bp, Artificial Sequence
  ENSG00000027697_7 (sequence is synthesized)
atagcagtataaaaggttctctttggattccagttgttgctgctttactactctttctagtgcttagcctggtattcatctgtttttatattaagaaaattaatccattgaaggaaaaaa

SEQ ID NO: 22227 - DNA, 120 bp, Artificial Sequence
  ENSG00000027697_8 (sequence is synthesized)
cattttccttagaaaaggaggtggtctgtgaagagccgttgtctccagcaacagttccaggcatgcataccgaagacaatccaggaaaagtggaacatacagaagaactttctagtataa

SEQ ID NO: 22228 - DNA, 120 bp, Artificial Sequence
  ENSG00000027697_9 (sequence is synthesized)
cagaagtggtgactactgaagaaaatattcctgacgtggtcccgggcagccatctgactccaatagagagagagagttcttcacctttaagtagtaaccagtctgaacctggcagcatcg

SEQ ID NO: 22229 - DNA, 120 bp, Artificial Sequence
  ENSG00000027697_10 (sequence is synthesized)
ctttaaactcgtatcactccagaaattgttctgagagtgatcactccagaaatggttttgatactgattccagctgtctggaatcacatagctccttatctgactcagaatttcccccaa

SEQ ID NO: 22230 - DNA, 120 bp, Artificial Sequence
  ENSG00000027697_11 (sequence is synthesized)
ataataaaggtgaaataaaaacagaaggacaagagctcataaccgtaataaaagcccccacctcctttggttatgataaaccacatgtgctagtggatctacttgtggatgatagcggta

SEQ ID NO: 22231 - DNA, 120 bp, Artificial Sequence
  ENSG00000027697_12 (sequence is synthesized)
aagagtccttgattggttatagaccaacagaagattccaaagaattttcatgagatcagctaagttgcaccaactttgaagtctgattttcctggacagttttctgctttaatttcatga

SEQ ID NO: 22232 - DNA, 120 bp, Artificial Sequence
  ENSG00000027697_13 (sequence is synthesized)
aaagattatgatctcagaaattgtatcttagttggtatcaaccaaatggagtgacttagtgtacatgaaagcgtaaagaggatgtgtggcattttcacttttggcttgtaaagtacagac

SEQ ID NO: 22233 - DNA, 120 bp, Artificial Sequence
  ENSG00000027697_14 (sequence is synthesized)
ttttttttttttttaaacaaaaaaagcattgtaacttatgaacctttacatccagataggttaccagtaacggaacagtatccagtactcctggttcctaggtgagcaggtgatgcccca

SEQ ID NO: 22234 - DNA, 120 bp, Artificial Sequence
  ENSG00000027697_15 (sequence is synthesized)
gggacctttgtagccacttcactttttttcttttctctgccttggtatagcatatgtttttgtaagtttatgcatacagtaattttaagtaatttcagaagaaattctgcaagcttttca

SEQ ID NO: 22235 - DNA, 120 bp, Artificial Sequence
  ENSG00000027697_16 (sequence is synthesized)
gcaagcttttcaaaattggacttaaaatctaattcaaactaatagaattaatggaatatgtaaatagaaacgtgtatattttttatgaaacattacagttagagatttttaaataaagaa

SEQ ID NO: 22236 - DNA, 120 bp, Artificial Sequence
  ENSG00000027697_17 (sequence is synthesized)
ttgaactcgtcggttgcctttctcctgcctcttccctggttgccgccacaacaaatcacgccgcttgtttttccgactcttatgttttctgaaagagtgaaggcaagaagaaatgttggg

SEQ ID NO: 22237 - DNA, 120 bp, Artificial Sequence
  ENSG00000027697_18 (sequence is synthesized)
gggacccctgcgtcgggccctgagcgggcgacggggacgcgaggtggggtcgcgagactggggctccgtggtttgaactcgtcggttgcctttctcctgcctcttccctggttgccgcca

SEQ ID NO: 22238 - DNA, 120 bp, Artificial Sequence
  ENSG00000027697_19 (sequence is synthesized)
caacaaatcacgccgcttgtttttccgactctttggccataatataattgtgataatgtaataaaatcaggaaacattacctgaagcagatgcttttgaagtcaccagaaaatagtcttc

SEQ ID NO: 22239 - DNA, 120 bp, Artificial Sequence
  ENSG00000027697_20 (sequence is synthesized)
gtggtctcaaagattataatatcgtcttcttactgtacctttttttatggttagatacgcagatactcactagtatgctacggttgcctgcagtgttcagtgcagtgacaggctgtacag

SEQ ID NO: 22240 - DNA, 120 bp, Artificial Sequence
  ENSG00000027697_21 (sequence is synthesized)
gttcatgacctaagagcagtaggctgtgtcatctgggtttgtctgggtttctactgcccgaagaaattgcctaaggggacatttctccatttctcagaacggatctccatcgttaagtga

SEQ ID NO: 22241 - DNA, 120 bp, Artificial Sequence
  ENSG00000027697_22 (sequence is synthesized)
agccttcccacgtggcaaaacattctaaactgcttatagaggtccaaaagtactaaagatgcaaattctttgccaaatatttcttgcctcttatttcctcttccttatcagtattgaaat

SEQ ID NO: 22242 - DNA, 120 bp, Artificial Sequence
  ENSG00000027697_23 (sequence is synthesized)
agagaagtatcactaaacttctgagattagcatgacaaataaagctaatagttactatgtcatcttcctgtagtgtatttttagtagaacaatataaatttcaaaaaacttttttgacaa

SEQ ID NO: 22243 - DNA, 120 bp, Artificial Sequence
  ENSG00000027697_24 (sequence is synthesized)
tctcctaccccttgtcatgcagggtgtgagcagggctgagatgggcaccgcggatctggggccgtcctcagatgttttctgaaagagtgaaggcaagaagaaatgttgggtatgttttgt

SEQ ID NO: 22244 - DNA, 120 bp, Artificial Sequence
  ENSG00000027697_25 (sequence is synthesized)
ctcctaccccttgtcatgcagggtgtgagcagggctgagatgggcaccgcggatctggggccgtcctcagtcttatcaacagatgttttctgaaagagtgaaggcaagaagaaatgttgg

SEQ ID NO: 22245 - DNA, 120 bp, Artificial Sequence
  ENSG00000027847_0 (sequence is synthesized)
ggaggccgggccggccgggctgcgagcgcctgccccatgcgccgccgcctctccgcacgatgttcccctcgcggaggaaagcggcgcagctgccctgggaggacggcaggtccgggttgc

SEQ ID NO: 22246 - DNA, 120 bp, Artificial Sequence
  ENSG00000027847_1 (sequence is synthesized)
ggacggcaggtccgggttgctctccggcggcctccctcggaagtgttccgtcttccacctgttcgtggcctgcctctcgctgggcttcttctccctactctggctgcagctcagctgctc

SEQ ID NO: 22247 - DNA, 120 bp, Artificial Sequence
  ENSG00000027847_2 (sequence is synthesized)
tggggacgtggcccgggcagtcaggggacaagggcaggagacctcgggccctccccgtgcctgccccccagagccgccccctgagcactgggaagaagacgcatcctggggcccccaccg

SEQ ID NO: 22248 - DNA, 120 bp, Artificial Sequence
  ENSG00000027847_3 (sequence is synthesized)
cctggcagtgctggtgcccttccgcgaacgcttcgaggagctcctggtcttcgtgccccacatgcgccgcttcctgagcaggaagaagatccggcaccacatctacgtgctcaaccaggt

SEQ ID NO: 22249 - DNA, 120 bp, Artificial Sequence
  ENSG00000027847_4 (sequence is synthesized)
ggaccacttcaggttcaaccgggcagcgctcatcaacgtgggcttcctggagagcagcaacagcacggactacattgccatgcacgacgttgacctgctccctctcaacgaggagctgga

SEQ ID NO: 22250 - DNA, 120 bp, Artificial Sequence
  ENSG00000027847_5 (sequence is synthesized)
ctatggctttcctgaggctgggcccttccacgtggcctccccggagctccaccctctctaccactacaagacctatgtcggcggcatcctgctgctctccaagcagcactaccggctgtg

SEQ ID NO: 22251 - DNA, 120 bp, Artificial Sequence
  ENSG00000027847_6 (sequence is synthesized)
caatgggatgtccaaccgcttctggggctggggccgcgaggacgacgagttctaccggcgcattaagggagctgggctccagcttttccgcccctcgggaatcacaactgggtacaagac

SEQ ID NO: 22252 - DNA, 120 bp, Artificial Sequence
  ENSG00000027847_7 (sequence is synthesized)
cccagcctggcggaagagggaccagaagcgcatcgcagctcaaaaacaggagcagttcaaggtggacagggagggaggcctgaacactgtgaagtaccatgtggcttcccgcactgccct

SEQ ID NO: 22253 - DNA, 120 bp, Artificial Sequence
  ENSG00000027847_8 (sequence is synthesized)
gtctgtgggcggggccccctgcactgtcctcaacatcatgttggactgtgacaagaccgccacaccctggtgcacattcagctgagctggatggacagtgaggaagcctgtacctacagg

SEQ ID NO: 22254 - DNA, 120 bp, Artificial Sequence
  ENSG00000027847_9 (sequence is synthesized)
ccatattgctcaggctcaggacaaggcctcaggtcgtgggcccagctctgacaggatgtggagtggccaggaccaagacagcaagctacgcaattgcagccacccggccgccaaggcagg

SEQ ID NO: 22255 - DNA, 120 bp, Artificial Sequence
  ENSG00000027847_10 (sequence is synthesized)
cttgggctgggccaggacacgtggggtgcctgggacgctgcttgccatgcacagtgatcagagagaggctggggtgtgtcctgtccgggaccccccctgccttcctgctcaccctactct

SEQ ID NO: 22256 - DNA, 120 bp, Artificial Sequence
  ENSG00000027847_11 (sequence is synthesized)
gacctccttcacgtgcccaggcctgtgggtagtggggagggctgaacaggacaacctctcatcacccccacttttgttccttcctgctgggctgcctcgtgcagagacacagtgtagggg

SEQ ID NO: 22257 - DNA, 120 bp, Artificial Sequence
  ENSG00000027847_12 (sequence is synthesized)
ccatgcagctggcgtaggtggcagttgggcctggtgagggttaggacttcagaaaccagagcacaagccccacagagggggaacagccagcaccgctctagctggttgttgccatgccgg

SEQ ID NO: 22258 - DNA, 120 bp, Artificial Sequence
  ENSG00000027847_13 (sequence is synthesized)
aatgtgggcctagtgttgccagatcttctgatttttcgaaagaaactagaatgctggattcttaagtgatatcttctgattttttaaatgatagcacctaaatgaaactttcaaaaagta

SEQ ID NO: 22259 - DNA, 120 bp, Artificial Sequence
  ENSG00000027847_14 (sequence is synthesized)
aagcggcgcagctgccctgggaggacggcaggtgcttggggtagacgagttatgtgcagcctcctcgtggggaggccagagaacgggtctgtcacagggccagccctgccccgccctcct

SEQ ID NO: 22260 - DNA, 120 bp, Artificial Sequence
  ENSG00000027847_15 (sequence is synthesized)
gcctctggggcccagcagatggagccctgccctggcctagcaggagaacttgggagcagccagagtgcgaagagcaggcgagccagtcagccgcagcagcagaactgcttgcacgggggc

SEQ ID NO: 22261 - DNA, 120 bp, Artificial Sequence
  ENSG00000027847_16 (sequence is synthesized)
ttcagaaacctgggtggttagtggcccttaacactgaagagtgtaggggcggttcaggtgtaccttgcccacctctcagacagtgtcaccaggaccctgtttctctgtgcatctcccagc

SEQ ID NO: 22262 - DNA, 120 bp, Artificial Sequence
  ENSG00000027847_17 (sequence is synthesized)
tctccttccctgcactgggtttattggcaaggtggtggttgttactgcagtctgtatccatctaggccccgggctggtgggagatggggcccttcccttgtagctcaggcaggagtcccg

SEQ ID NO: 22263 - DNA, 120 bp, Artificial Sequence
  ENSG00000027847_18 (sequence is synthesized)
cagtgagctgcactggctcttgattggccggcttgagtgctgagcccacccctcagccagtcactggctggtggacgggcaggcaggaagaagcacttgtggctcaggcctgggtgtcct

SEQ ID NO: 22264 - DNA, 120 bp, Artificial Sequence
  ENSG00000027847_19 (sequence is synthesized)
cctctccaggccatggcaggggccagctttatgtaaatgaagcccctgagccaggtgcaagaatgggtgtctgtcatggaaccctgctacccctctcacacacacaggaagagatgaggg

SEQ ID NO: 22265 - DNA, 120 bp, Artificial Sequence
  ENSG00000027847_20 (sequence is synthesized)
cagggccaccaggagaaaggggaatgggggaagcagaaatcaagtaggagctggcgcttctgcccatcgacagttccccacagagatcccctctgggcagccagccgtttttgagaaggt

SEQ ID NO: 22266 - DNA, 120 bp, Artificial Sequence
  ENSG00000027847_21 (sequence is synthesized)
gagcctctcacacaggttcaaggccccgtgagaacgggagagggcccgggacgcgctgcttcctgccgcccgcactgcagaagtgcaggagcctgcaagcacccggggcttattcagagg

SEQ ID NO: 22267 - DNA, 120 bp, Artificial Sequence
  ENSG00000027847_22 (sequence is synthesized)
cgctgggggagaggggcactcccgagcggtaggagaccaaaggcccccccccccgggaagatgggccgagtgacgctgcttgtctctgtgtcagtgcaatgggatgtccaaccgcttctg

SEQ ID NO: 22268 - DNA, 120 bp, Artificial Sequence
  ENSG00000027847_23 (sequence is synthesized)
taagggagctgggctccaggtgagattccccgggccccgccgccacctcagctgcggtggctgccctgagattttcttctgtttcctcagatgaagctcctggggtctggagatggccct

SEQ ID NO: 22269 - DNA, 120 bp, Artificial Sequence
  ENSG00000027847_24 (sequence is synthesized)
gattctgatccctgccctaaccctgccctgcatggtcatctagccagttccttgccctgtgggccccagtctcctctcctgcaggctgggagtgcaggtcccttcctgtgggacctcggg

SEQ ID NO: 22270 - DNA, 120 bp, Artificial Sequence
  ENSG00000027847_25 (sequence is synthesized)
agctggtggtgagggctggggctccaggaagggcagcctgaccccgacttccttggacctccctagcttttccgcccctcgggaatcacaactgggtacaagacatttcgccacctgcat

SEQ ID NO: 22271 - DNA, 120 bp, Artificial Sequence
  ENSG00000027847_26 (sequence is synthesized)
gcacgatgttcccctcgcggaggaaagcggcgcagctgccctgggaggacggcagttttgaggtcctgtaaccagagcagctgaggattcaaacctcgtagtacgaaggtctgtatgaga

SEQ ID NO: 22272 - DNA, 120 bp, Artificial Sequence
  ENSG00000027847_27 (sequence is synthesized)
gtccccttgatccagatccccagaccccccccttttccctgccacccttcttgtctttacttcctccttacccaacctggagtccaaggtccatcattaaaaccctccctggcatactcc

SEQ ID NO: 22273 - DNA, 120 bp, Artificial Sequence
  ENSG00000027847_28 (sequence is synthesized)
ttctctgctttctggcagacctccttccctttctctcccctcgtctctcttgaaccccttccgctcagactcctgcacccaccatggcacagagcagctctcactgaggtcaccagccac

SEQ ID NO: 22274 - DNA, 120 bp, Artificial Sequence
  ENSG00000027847_29 (sequence is synthesized)
ctcctccactctgttggtccagaggccatgctgggccctcatcctgtggacctgccagcagcatcttctttcgtaaaatgcccctgcttggggcagcaccctctggtcctccctctgcac

SEQ ID NO: 22275 - DNA, 120 bp, Artificial Sequence
  ENSG00000027847_30 (sequence is synthesized)
tggctgggcctctgtgtctgtgggttctgctcatctccccgagctctcaccatcggggcttctctggactcggtgcttcggcagccccccttttttaactccaggtgttccttggggcat

SEQ ID NO: 22276 - DNA, 120 bp, Artificial Sequence
  ENSG00000027847_31 (sequence is synthesized)
ctcatgtcatctccagcattaaaccacgtctctgatgattcctgaggctgtttcctggagttctctcctaaactccaggctcaacagcccagccatctacacagtccctccacgtggtgg

SEQ ID NO: 22277 - DNA, 120 bp, Artificial Sequence
  ENSG00000027847_32 (sequence is synthesized)
cctcagagctactgcaagcttccatgatcacagctgaattgctggtggcctgccctgccccaaacctgtagctctgtcctcttctccatgggaatggaagctctttgctctcattgctca

SEQ ID NO: 22278 - DNA, 120 bp, Artificial Sequence
  ENSG00000027847_33 (sequence is synthesized)
agcccaaaagcccgggggtcatcctcagctgctccttctctgtcatacactgcgtcctattcgtcagcaaaatccatctagaatctgcccgcttctcgctgttgccactgccacctcctg

SEQ ID NO: 22279 - DNA, 120 bp, Artificial Sequence
  ENSG00000027847_34 (sequence is synthesized)
agctaggccaccttcatcttttggtctctcacctaaatcattgccatagtctcccagctggtctccctgctttcacccctgctctgacagtctcttccagcacaacagctagggcggtcc

SEQ ID NO: 22280 - DNA, 120 bp, Artificial Sequence
  ENSG00000027847_35 (sequence is synthesized)
tgtccaggcataagtcacagcacgcctctaccctgctcagagcctccatggcacccatcttacccgagtcaaagccccgtccttcagtggcccttgggccttgtgcagtcactgtgtcac

SEQ ID NO: 22281 - DNA, 120 bp, Artificial Sequence
  ENSG00000027847_36 (sequence is synthesized)
ccccaacatccccacctctgccctcgccctgcccagctgcccgttggtctgctcctgcctcctgccgtggcagtgccatctctcctatgcagagccctaggcacccactgccctgtgggt

SEQ ID NO: 22282 - DNA, 120 bp, Artificial Sequence
  ENSG00000027847_37 (sequence is synthesized)
catctcttcaggccttcaggtttctgtcactcagttcccctggccctccctgacggccccaccgaggacaagagccacctccacccccagcaagatcgccctccttgcctgctttgcttt

SEQ ID NO: 22283 - DNA, 120 bp, Artificial Sequence
  ENSG00000027847_38 (sequence is synthesized)
tccccccagcacgaaccactgctggccacgctttgtgtttgcttgtttctgtttccttctattggaatctcagttccttgagaacagggcctggtttttcactgctgtacctcccgtgct

SEQ ID NO: 22284 - DNA, 120 bp, Artificial Sequence
  ENSG00000027847_39 (sequence is synthesized)
ggcacatagtgggtgcttagtaaatatgcgatgagtggagggactgccccacaggctgagtgaagtcagtgctgggccagagggcagcataggcaccatggggacccccgggtgggtgct

SEQ ID NO: 22285 - DNA, 120 bp, Artificial Sequence
  ENSG00000027869_0 (sequence is synthesized)
cgtgagtcctcgccagaactaaggctgtgggtaaggcgacatttcctgcccccggggccagggtgagaggagagatgatgagttgctgagtgtgcacacctttccggaacacatacacac

SEQ ID NO: 22286 - DNA, 120 bp, Artificial Sequence
  ENSG00000027869_1 (sequence is synthesized)
accctgctctgggatcccttgtgaggctgccctcatggagttccccctggcccagatatgtccccaagggagtcacgaagcccccatcccaaccttcagcaccttccagatcacagacat

SEQ ID NO: 22287 - DNA, 120 bp, Artificial Sequence
  ENSG00000027869_2 (sequence is synthesized)
gacccgcaggagctgccagaacctgggctacactgcggcatctccccaggccccggaggctgcctccaacacagggaatgctgagagggcagaggaggtgcctggagaaggaagcctgtt

SEQ ID NO: 22288 - DNA, 120 bp, Artificial Sequence
  ENSG00000027869_3 (sequence is synthesized)
cctgcaggccgagacccgggcttggttccagaagacccaggcccactggctcctgcagcacggggcagcccctgcctggttccatggcttcatcacccggagggaggcagagaggctgct

SEQ ID NO: 22289 - DNA, 120 bp, Artificial Sequence
  ENSG00000027869_4 (sequence is synthesized)
ggagcccaagcctcaggggtgctacttggtgcggttcagcgagagcgcggtgaccttcgtgctgacttacaggagccggacttgctgccgccacttcctgctggcccagctcagggacgg

SEQ ID NO: 22290 - DNA, 120 bp, Artificial Sequence
  ENSG00000027869_5 (sequence is synthesized)
gcgccacgtggtgctgggcgaggacagcgcccacgcgcggctgcaggacctgctgctgcactacaccgcgcacccgctcagcccctacggggagacgctcaccgagcccctcgcccgaca

SEQ ID NO: 22291 - DNA, 120 bp, Artificial Sequence
  ENSG00000027869_6 (sequence is synthesized)
aggggcaagccccagtcccgatgcagaaagagggggccggggagaaggagccctcccagctgctcaggcccaagcctcccatccccgccaaacctcagctgcccccagaagtctacacaa

SEQ ID NO: 22292 - DNA, 120 bp, Artificial Sequence
  ENSG00000027869_7 (sequence is synthesized)
tccctgttccacgacaccgcccggccccacgccccaagccctccaatcctatctacaatgagcctgatgaacccatagctttctatgccatgggccggggcagccctggggaagccccca

SEQ ID NO: 22293 - DNA, 120 bp, Artificial Sequence
  ENSG00000027869_8 (sequence is synthesized)
gcaacatctatgtggaagtggaagatgagggcctacccgccacccttgggcaccctgtcctacggaagagctggtccaggcctgtcccaggaggccagaatacaggtggctcccagctgc

SEQ ID NO: 22294 - DNA, 120 bp, Artificial Sequence
  ENSG00000027869_9 (sequence is synthesized)
attctgagaactctgtgattgggcaaggccctcccctgccccaccagcccccacccgcctggagacacaccctcccccacaatctttctagacaggtgcttcaggacagaggacaggcat

SEQ ID NO: 22295 - DNA, 120 bp, Artificial Sequence
  ENSG00000027869_10 (sequence is synthesized)
ggcttccccttgggcctcctcagtaggcggtctggcctgacccccaacaaagaagcctggaggtcagagaagcaaatgcggagcctgctccctcctaagaagatcccaagaatccaatgg

SEQ ID NO: 22296 - DNA, 120 bp, Artificial Sequence
  ENSG00000027869_11 (sequence is synthesized)
ctcagtccttggtgatctaagacagcaaagaagtgtgcaaggagggccctgttagctcccactgtcctggtttctcctcctggagtctaatttccttggccctctgagccttttgagtct

SEQ ID NO: 22297 - DNA, 120 bp, Artificial Sequence
  ENSG00000027869_12 (sequence is synthesized)
gggccctggtccaatgctgctgttgtctgaggaatggtttggtgagaacagatgttagaacttgtttgttgattcttgtctggctaataaatcatcaccaactgccttctcctacaggga

SEQ ID NO: 22298 - DNA, 120 bp, Artificial Sequence
  ENSG00000027869_13 (sequence is synthesized)
cattccccgggctgctgaaggtggggatcacgcctctcgctggtgaccctggccgaggagcgggagatagtctgatccctaacggcgccctccaggagccggacttgctgccgccacttc

SEQ ID NO: 22299 - DNA, 120 bp, Artificial Sequence
  ENSG00000027869_14 (sequence is synthesized)
ggaagccagaacagctggagctgaagaagggatttaagttagactttaggaaggactttctgggcaattgtaccctaaaatagacaggagaggctgggtatgaggaaaagaaggtggcag

SEQ ID NO: 22300 - DNA, 120 bp, Artificial Sequence
  ENSG00000027869_15 (sequence is synthesized)
cctgccacctgccaggaatagatgaaggctcccacttctaccagtctggagtagatggaggcgcccactccaggctcccactcccagagttttcctagcctttcactgaggcatctctcc

SEQ ID NO: 22301 - DNA, 120 bp, Artificial Sequence
  ENSG00000027869_16 (sequence is synthesized)
aggggagatcattggagaggctccagtccagccctctgtgtacctcagcttcccctctctaggccccattatcctcctgtccctaaggcctcgaatgctggtattttccacctctctctc

SEQ ID NO: 22302 - DNA, 120 bp, Artificial Sequence
  ENSG00000027869_17 (sequence is synthesized)
cctccaggcttactccatctttatctcccagccctctcttcttccacccttgcagaatctccctcctccatttctcagcctcatttctccctaactctttgttcacctcctcagttcagc

SEQ ID NO: 22303 - DNA, 120 bp, Artificial Sequence
  ENSG00000027869_18 (sequence is synthesized)
tttgacttctgaaatctggaagtccaactactttcccatccctgtagctgcagtagcagcccctgcaggctgccctttcaggatgaggccaggggaggatgcgggggtctcctgaatggg

SEQ ID NO: 22304 - DNA, 120 bp, Artificial Sequence
  ENSG00000028116_0 (sequence is synthesized)
gggccgctgcactgcgaggccgacgcagctggagagaagttaggcaggtcctagggagggcaggctcgagtgctgggcccgcctccccgcgggactgtaggcccgggggctccgcctcgt

SEQ ID NO: 22305 - DNA, 120 bp, Artificial Sequence
  ENSG00000028116_1 (sequence is synthesized)
cgcagcggcaggtaggaggcggtgcgcgcggcccggcgacgggggatcctgaggcccgaagtgatgccaccaaaaagaaatgaaaaatacaaacttcctattccatttccagaaggcaag

SEQ ID NO: 22306 - DNA, 120 bp, Artificial Sequence
  ENSG00000028116_2 (sequence is synthesized)
gttctggatgatatggaaggcaatcagtgggtactgggcaagaagattggctctggaggatttggattgatatatttagctttccccacaaataaaccagagaaagatgcaagacatgta

SEQ ID NO: 22307 - DNA, 120 bp, Artificial Sequence
  ENSG00000028116_3 (sequence is synthesized)
gtaaaagtggaatatcaagaaaatggcccgttattttcagaacttaaattttatcagagagttgcaaaaaaagactgtatcaaaaagtggatagaacgcaaacaacttgattatttagga

SEQ ID NO: 22308 - DNA, 120 bp, Artificial Sequence
  ENSG00000028116_4 (sequence is synthesized)
attcctctgttttatggatctggtctgactgaattcaagggaagaagttacagatttatggtaatggaaagactaggaatagatttacagaagatctcaggccagaatggtacctttaaa

SEQ ID NO: 22309 - DNA, 120 bp, Artificial Sequence
  ENSG00000028116_5 (sequence is synthesized)
aagtcaactgtcctgcaattaggtatccgaatgttggatgtactggaatatatacatgaaaatgaatatgttcatggtgatataaaagcagcaaatctacttttgggttacaaaaatcca

SEQ ID NO: 22310 - DNA, 120 bp, Artificial Sequence
  ENSG00000028116_6 (sequence is synthesized)
gaccaggtttatcttgcagattatggactttcctacagatattgtcccaatgggaaccacaaacagtatcaggaaaatcctagaaaaggccataatgggacaatagagtttaccagcttg

SEQ ID NO: 22311 - DNA, 120 bp, Artificial Sequence
  ENSG00000028116_7 (sequence is synthesized)
cctgggaacagaacctgaaggaccctgtggctgtgcagactgctaaaacaaatctgttggacgagctcccccagtcagtgcttaaatgggctccttctggaagcagttgctgtgaaatag

SEQ ID NO: 22312 - DNA, 120 bp, Artificial Sequence
  ENSG00000028116_8 (sequence is synthesized)
cccaatttttggtatgtgctcatagtttagcatatgatgaaaagccaaactatcaagccctcaagaaaattttgaaccctcatggaatacctttaggaccactggacttttccacaaaag

SEQ ID NO: 22313 - DNA, 120 bp, Artificial Sequence
  ENSG00000028116_9 (sequence is synthesized)
gacagagtataaatgtccatactccaaacagtcaaaaagttgattcacaaaaggctgcaacaaagcaagtcaacaaggcacacaataggttaatcgaaaaaaaagtccacagtgagagaa

SEQ ID NO: 22314 - DNA, 120 bp, Artificial Sequence
  ENSG00000028116_10 (sequence is synthesized)
gcgctgagtcctgtgcaacatggaaagtgcagaaagaggagaaactgattggattgatgaacaatgaagcagctcaggaaagcacaaggagaagacagaaatatcaagagtctcaagaac

SEQ ID NO: 22315 - DNA, 120 bp, Artificial Sequence
  ENSG00000028116_11 (sequence is synthesized)
ctttgaatgaagtaaacagtttcccacaaaaaatcagctatacacaattcccaaactcattttatgagcctcatcaagattttaccagtccagatatattcaagaagtcaagatctccat

SEQ ID NO: 22316 - DNA, 120 bp, Artificial Sequence
  ENSG00000028116_12 (sequence is synthesized)
cttggtataaatacacttccacagtcagcacggggatcacagacttagaaagttcaactggactttggcctacaatttcccagtttactcttagtgaagagacaaacgcagatgtttatt

SEQ ID NO: 22317 - DNA, 120 bp, Artificial Sequence
  ENSG00000028116_13 (sequence is synthesized)
attatcgcatcatcatacctgtccttttgatgttagtatttcttgctttattttttctctgaagatgataccaaaattccttttgataattttttaagtttccagctcttcaccgaaatg

SEQ ID NO: 22318 - DNA, 120 bp, Artificial Sequence
  ENSG00000028116_14 (sequence is synthesized)
ttgtattcttatttcagtgtttccttccagacatttttaaggtaattggctttaaaaagagaacatattttaacaaagtttgtggacactctaaaaaataaaattgctttgtactagaaa

SEQ ID NO: 22319 - DNA, 120 bp, Artificial Sequence
  ENSG00000028116_15 (sequence is synthesized)
ggctattcacacgcttcagttcacaacttccatccagaatcctacttctctgattgtcctcatggggaaagtatgctatttccttcatcctacaagatgcttctcactgactctatccat

SEQ ID NO: 22320 - DNA, 120 bp, Artificial Sequence
  ENSG00000028116_16 (sequence is synthesized)
attcttctcatccttcaagagccaagtcaaatctctctgcttccaataagccttccttgctacactcagaaatggaatgaatccccaagatggcttaaggatgcccttctgttttggaat

SEQ ID NO: 22321 - DNA, 120 bp, Artificial Sequence
  ENSG00000028116_17 (sequence is synthesized)
gctttctcttggtgtatatcaaggttggttcagtttaccagagaaaagatgccagggtctcattctgtcacccaagctggagtccagtgacatggtcacagctcactgaagcctcaacct

SEQ ID NO: 22322 - DNA, 120 bp, Artificial Sequence
  ENSG00000028116_18 (sequence is synthesized)
ccttggctcaagcaatcctttcacctcagccttctaagtagctaggagcacagtgtcataaagaagaatatttgaagctctataaatatgttgctttacgtggcaaaaaggactttacag

SEQ ID NO: 22323 - DNA, 120 bp, Artificial Sequence
  ENSG00000028116_19 (sequence is synthesized)
atctgagtacactggattatctgggtgggcacaatgtaatcacaaggggctttctaagaaggaagaaggagggttcaaggcagaaaaaccggaagaagttataacattggctttgaagat

SEQ ID NO: 22324 - DNA, 120 bp, Artificial Sequence
  ENSG00000028116_20 (sequence is synthesized)
ggaagatggggacacaagtcaaggaattcaggtggcctctagaagcctgaaaagtcaaagaaatgaattctcccctagagcctcaagaaggaacacagccctgctgacagcttgatttta

SEQ ID NO: 22325 - DNA, 120 bp, Artificial Sequence
  ENSG00000028116_21 (sequence is synthesized)
tggattgatgaacaatgaagcagctcagtttaggtagaagcttaggctattgatttgaacccactattttttctaatgaaagcacaaggagaagacagaaatatcaagagtctcaagaac

SEQ ID NO: 22326 - DNA, 120 bp, Artificial Sequence
  ENSG00000028116_22 (sequence is synthesized)
tccttggctcaagcaatcctttcacctcagccttctaagtagctaggagcacagctctacatcaagggtcaggaatataaagaagagaagtggccattttcttaatccagtctatcattg

SEQ ID NO: 22327 - DNA, 120 bp, Artificial Sequence
  ENSG00000028116_23 (sequence is synthesized)
ctcttgctctggggtcttgggtggcgggcggcacctccgcttgcagtgccggagccgcggccccgctcggaaaagggctgccgtcggagttagatgccggggactccgggccgtcccagc

SEQ ID NO: 22328 - DNA, 120 bp, Artificial Sequence
  ENSG00000028116_24 (sequence is synthesized)
ccccgggcctcagctccggcccgggcagagtcgctgcttccgcgtttggttcttttttccccgctgggagtgagaacaaggcgtccccttctactcacgtttgccaaaagcgggtccgac

SEQ ID NO: 22329 - DNA, 120 bp, Artificial Sequence
  ENSG00000028116_25 (sequence is synthesized)
cctccagactgtaagagaattaatttatatcatataagtcactaagtttgtggtaatttgttaatcaacaatagtaaattaatacagactacctttagtttcataagtaaaaatatcctc

SEQ ID NO: 22330 - DNA, 120 bp, Artificial Sequence
  ENSG00000028116_26 (sequence is synthesized)
gacgcagctggagagaagttaggcaggtcctagggagggcaggctcgagtgctgggcccgcctccccgcgggactgtaggcccgggggctccgcctcgtcgcagcggcagaagtgatgcc

SEQ ID NO: 22331 - DNA, 120 bp, Artificial Sequence
  ENSG00000028116_27 (sequence is synthesized)
gatatatttagagacactggccatttttctctctccaatgcttagtgtggagtaaaggcagcttcccgcaaatttatttcaagcaagagcaatcggaagcttcgacatgtgtgaaagagg

SEQ ID NO: 22332 - DNA, 120 bp, Artificial Sequence
  ENSG00000028137_0 (sequence is synthesized)
agtcgagggctagcgagcgcagcggagcctggagagaaggcgctgggctgcgagggcgcgagggcgcgagggcagggggcaaccggaccccgcccgcacccatggcgcccgtcgccgtct

SEQ ID NO: 22333 - DNA, 120 bp, Artificial Sequence
  ENSG00000028137_1 (sequence is synthesized)
gggccgcgctggccgtcggactggagctctgggctgcggcgcacgccttgcccgcccaggtggcatttacaccctacgccccggagcccgggagcacatgccggctcagagaatactatg

SEQ ID NO: 22334 - DNA, 120 bp, Artificial Sequence
  ENSG00000028137_2 (sequence is synthesized)
accagacagctcagatgtgctgcagcaaatgctcgccgggccaacatgcaaaagtcttctgtaccaagacctcggacaccgtgtgtgactcctgtgaggacagcacatacacccagctct

SEQ ID NO: 22335 - DNA, 120 bp, Artificial Sequence
  ENSG00000028137_3 (sequence is synthesized)
ggaactgggttcccgagtgcttgagctgtggctcccgctgtagctctgaccaggtggaaactcaagcctgcactcgggaacagaaccgcatctgcacctgcaggcccggctggtactgcg

SEQ ID NO: 22336 - DNA, 120 bp, Artificial Sequence
  ENSG00000028137_4 (sequence is synthesized)
cgctgagcaagcaggaggggtgccggctgtgcgcgccgctgcgcaagtgccgcccgggcttcggcgtggccagaccaggaactgaaacatcagacgtggtgtgcaagccctgtgccccgg

SEQ ID NO: 22337 - DNA, 120 bp, Artificial Sequence
  ENSG00000028137_5 (sequence is synthesized)
ggacgttctccaacacgacttcatccacggatatttgcaggccccaccagatctgtaacgtggtggccatccctgggaatgcaagcatggatgcagtctgcacgtccacgtcccccaccc

SEQ ID NO: 22338 - DNA, 120 bp, Artificial Sequence
  ENSG00000028137_6 (sequence is synthesized)
ggagtatggccccaggggcagtacacttaccccagccagtgtccacacgatcccaacacacgcagccaactccagaacccagcactgctccaagcacctccttcctgctcccaatgggcc

SEQ ID NO: 22339 - DNA, 120 bp, Artificial Sequence
  ENSG00000028137_7 (sequence is synthesized)
ccagccccccagctgaagggagcactggcgacttcgctcttccagttggactgattgtgggtgtgacagccttgggtctactaataataggagtggtgaactgtgtcatcatgacccagg

SEQ ID NO: 22340 - DNA, 120 bp, Artificial Sequence
  ENSG00000028137_8 (sequence is synthesized)
tgaaaaagaagcccttgtgcctgcagagagaagccaaggtgcctcacttgcctgccgataaggcccggggtacacagggccccgagcagcagcacctgctgatcacagcgccgagctcca

SEQ ID NO: 22341 - DNA, 120 bp, Artificial Sequence
  ENSG00000028137_9 (sequence is synthesized)
gcagcagctccctggagagctcggccagtgcgttggacagaagggcgcccactcggaaccagccacaggcaccaggcgtggaggccagtggggccggggaggcccgggccagcaccggga

SEQ ID NO: 22342 - DNA, 120 bp, Artificial Sequence
  ENSG00000028137_10 (sequence is synthesized)
gctcagattcttcccctggtggccatgggacccaggtcaatgtcacctgcatcgtgaacgtctgtagcagctctgaccacagctcacagtgctcctcccaagccagctccacaatgggag

SEQ ID NO: 22343 - DNA, 120 bp, Artificial Sequence
  ENSG00000028137_11 (sequence is synthesized)
acacagattccagcccctcggagtccccgaaggacgagcaggtccccttctccaaggaggaatgtgcctttcggtcacagctggagacgccagagaccctgctggggagcaccgaagaga

SEQ ID NO: 22344 - DNA, 120 bp, Artificial Sequence
  ENSG00000028137_12 (sequence is synthesized)
agcccctgccccttggagtgcctgatgctgggatgaagcccagttaaccaggccggtgtgggctgtgtcgtagccaaggtgggctgagccctggcaggatgaccctgcgaaggggccctg

SEQ ID NO: 22345 - DNA, 120 bp, Artificial Sequence
  ENSG00000028137_13 (sequence is synthesized)
gtccttccaggcccccaccactaggactctgaggctctttctgggccaagttcctctagtgccctccacagccgcagcctccctctgacctgcaggccaagagcagaggcagcgagttgt

SEQ ID NO: 22346 - DNA, 120 bp, Artificial Sequence
  ENSG00000028137_14 (sequence is synthesized)
ggaaagcctctgctgccatggcgtgtccctctcggaaggctggctgggcatggacgttcggggcatgctggggcaagtccctgactctctgtgacctgccccgcccagctgcacctgcca

SEQ ID NO: 22347 - DNA, 120 bp, Artificial Sequence
  ENSG00000028137_15 (sequence is synthesized)
tccagaaaaccccagcatccttttctgcagaggggctttctggagaggagggatgctgcctgagtcacccatgaagacaggacagtgcttcagcctgaggctgagactgcgggatggtcc

SEQ ID NO: 22348 - DNA, 120 bp, Artificial Sequence
  ENSG00000028137_16 (sequence is synthesized)
tggggctctgtgcagggaggaggtggcagccctgtagggaacggggtccttcaagttagctcaggaggcttggaaagcatcacctcaggccaggtgcagtggctcacgcctatgatccca

SEQ ID NO: 22349 - DNA, 66 bp, Artificial Sequence
  ENSG00000028137_17 (sequence is synthesized)
gcgggcacctatagtcccagctactcagaagcctgaggctgggaaatcgtttgaacccgggaagcg

SEQ ID NO: 22350 - DNA, 120 bp, Artificial Sequence
  ENSG00000028137_18 (sequence is synthesized)
gtctgtctcaaaagaaaaaaaaaagcaccgcctccaaatgccaacttgtccttttgtaccatggtgtgaaagtcagatgcccagagggcccaggcaggccaccatattcagtgctgtggc

SEQ ID NO: 22351 - DNA, 120 bp, Artificial Sequence
  ENSG00000028137_19 (sequence is synthesized)
ctgggcaagataacgcacttctaactagaaatctgccaattttttaaaaaagtaagtaccactcaggccaacaagccaacgacaaagccaaactctgccagccacatccaaccccccacc

SEQ ID NO: 22352 - DNA, 120 bp, Artificial Sequence
  ENSG00000028137_20 (sequence is synthesized)
tgccatttgcaccctccgccttcactccggtgtgcctgcagccccgcgcctccttccttgctgtcctaggccacaccatctcctttcagggaatttcaggaactagagatgactgagtcc

SEQ ID NO: 22353 - DNA, 120 bp, Artificial Sequence
  ENSG00000028137_21 (sequence is synthesized)
tcgtagccatctctctactcctacctcagcctagaccctcctcctcccccagaggggtgggttcctcttccccactccccaccttcaattcctgggccccaaacgggctgccctgccact

SEQ ID NO: 22354 - DNA, 120 bp, Artificial Sequence
  ENSG00000028137_22 (sequence is synthesized)
ttggtacatggccagtgtgatcccaagtgccagtcttgtgtctgcgtctgtgttgcgtgtcgtgggtgtgtgtagccaaggtcggtaagttgaatggcctgccttgaagccactgaagct

SEQ ID NO: 22355 - DNA, 120 bp, Artificial Sequence
  ENSG00000028137_23 (sequence is synthesized)
gggattcctccccattagagtcagccttccccctcccagggccagggccctgcagaggggaaaccagtgtagccttgcccggattctgggaggaagcaggttgaggggctcctggaaagg

SEQ ID NO: 22356 - DNA, 120 bp, Artificial Sequence
  ENSG00000028137_24 (sequence is synthesized)
ctcagtctcaggagcatggggataaaggagaaggcatgaaattgtctagcagagcaggggcagggtgataaattgttgataaattccactggacttgagcttggcagctgaactattgga

SEQ ID NO: 22357 - DNA, 120 bp, Artificial Sequence
  ENSG00000028137_25 (sequence is synthesized)
gggtgggagagcccagccattaccatggagacaagaagggttttccaccctggaatcaagatgtcagactggctggctgcagtgacgtgcacctgtactcaggaggctgaggggaggatc

SEQ ID NO: 22358 - DNA, 89 bp, Artificial Sequence
  ENSG00000028137_26 (sequence is synthesized)
agtgacgtgcacctgtactcaggaggctgaggggaggatcactggagcccaggagtttgaggctgcagcgagctatgatcgcgccacta

SEQ ID NO: 22359 - DNA, 120 bp, Artificial Sequence
  ENSG00000028137_27 (sequence is synthesized)
caggtttctgcccacattggacccacatgaggacatgatggagcgcacctgccccctggtggacagtcctgggagaacctcaggcttccttggcatcacagggcagagccgggaagcgat

SEQ ID NO: 22360 - DNA, 120 bp, Artificial Sequence
  ENSG00000028137_28 (sequence is synthesized)
gaatttggagactctgtggggccttggttcccttgtgtgtgtgtgttgatcccaagacaatgaaagtttgcactgtatgctggacggcattcctgcttatcaataaacctgtttgtttta

SEQ ID NO: 22361 - DNA, 120 bp, Artificial Sequence
  ENSG00000028137_29 (sequence is synthesized)
gtactgcgcgctgagcaagcaggaggggtgccggctgtgcgcgccgctgcgcaagtgccgcccgggcttcggcgtggccagaccagacctctcctagggctctagtgccaaggcccagct

SEQ ID NO: 22362 - DNA, 120 bp, Artificial Sequence
  ENSG00000028203_0 (sequence is synthesized)
cttcatttcccatcgtgctgaggcgggtggcatggcggagaaggatgacaccggagtttgacgaagaggtggtttttgagaattctccactttaccaatacttacaggatctgggacaca

SEQ ID NO: 22363 - DNA, 120 bp, Artificial Sequence
  ENSG00000028203_1 (sequence is synthesized)
cagactttgaaatatgttcttctttgtcaccaaaaacagaaaaatgcacaacagagggacaacaaaagcctcctacaagagtcctaccaaaacaaggtatcctgttaaaagtggctgaaa

SEQ ID NO: 22364 - DNA, 120 bp, Artificial Sequence
  ENSG00000028203_2 (sequence is synthesized)
ccatcaaaagttggatttttttttctcagtgcaataagaaagatgacttacttcacaagttggatattggattccgactcgactcattacataccatcctgcaacaggaagtcctgttac

SEQ ID NO: 22365 - DNA, 120 bp, Artificial Sequence
  ENSG00000028203_3 (sequence is synthesized)
aagaggatgtggagctgattgagctacttgatcccagtatcctgtctgcagggcaatctcaacaacaggaaaatggacaccttccaacactttgctccctggcaacccctaatatttggg

SEQ ID NO: 22366 - DNA, 120 bp, Artificial Sequence
  ENSG00000028203_4 (sequence is synthesized)
atctctcaatgctatttgccttcattagcttgctcgttatgcttcccacttggtggattgtgtcttcctggctggtatggggagtgattctatttgtgtatctggtcataagagctttga

SEQ ID NO: 22367 - DNA, 120 bp, Artificial Sequence
  ENSG00000028203_5 (sequence is synthesized)
gattatggaggacagccaaactacaagtgaccctaaaaaaatacagcgttcatttggaagatatggccacaaacagccgagcttttactaacctcgtgagaaaagctttacgtctcattc

SEQ ID NO: 22368 - DNA, 120 bp, Artificial Sequence
  ENSG00000028203_6 (sequence is synthesized)
aagaaaccgaagtgatttccagaggatttacactggtcagtgctgcttgcccatttaataaagctggacagcatccaagtcagcatctcatcggtcttcggaaagctgtctaccgaactc

SEQ ID NO: 22369 - DNA, 120 bp, Artificial Sequence
  ENSG00000028203_7 (sequence is synthesized)
taagagccaacttccaagcagcaaggctagctaccctatatatgctgaaaaactaccccctgaactctgagagtgacaatgtaaccaactacatctgtgtggtgccttttaaagagctgg

SEQ ID NO: 22370 - DNA, 120 bp, Artificial Sequence
  ENSG00000028203_8 (sequence is synthesized)
gccttggacttagtgaagagcagatttcagaagaggaagcacataactttacagatggcttcagcctgcctgcattgaaggttttgttccaactctgggtggcacagagttcagagttct

SEQ ID NO: 22371 - DNA, 120 bp, Artificial Sequence
  ENSG00000028203_9 (sequence is synthesized)
tcagacggttagccctattactttctacagccaattcacctcctgggcccttacttactccagcacttctgcctcatcgtatcttatctgatgtgactcaaggtctacctcatgctcatt

SEQ ID NO: 22372 - DNA, 120 bp, Artificial Sequence
  ENSG00000028203_10 (sequence is synthesized)
ctgcctgtttggaagagcttaagcgcagctatgagttctatcggtactttgaaactcagcaccagtcagtaccgcagtgtttatccaaaactcaacagaagtcaagagaactgaataatg

SEQ ID NO: 22373 - DNA, 120 bp, Artificial Sequence
  ENSG00000028203_11 (sequence is synthesized)
ttcacacagcagtgcgtagcttgcagctccatctgaaagcattactgaatgaggtaataattcttgaagatgaacttgaaaagcttgtttgtactaaagaaacacaagaactagtgtcag

SEQ ID NO: 22374 - DNA, 120 bp, Artificial Sequence
  ENSG00000028203_12 (sequence is synthesized)
aggcttatcccatcctagaacagaaattaaagttgattcagccccacgttcaagcaagcaacaattgctgggaagaggccatttctcaggtcgacaaactgctacgaagaaatacagata

SEQ ID NO: 22375 - DNA, 120 bp, Artificial Sequence
  ENSG00000028203_13 (sequence is synthesized)
aaaaaggcaagcctgaaatagcatgtgaaaacccacattgtacagtagtacctttgaagcagcctactctacacattgcagacaaagatccaatcccagaggagcaggaattagaagctt

SEQ ID NO: 22376 - DNA, 120 bp, Artificial Sequence
  ENSG00000028203_14 (sequence is synthesized)
atgtagatgatatagatattgatagtgatttcagaaaggatgatttttattacttgtctcaagaagacaaagagagacagaagcgtgagcatgaagaatccaagagggtgctccaagaat

SEQ ID NO: 22377 - DNA, 120 bp, Artificial Sequence
  ENSG00000028203_15 (sequence is synthesized)
taaaatctgtgctgggatttaaagcttcagaggcagaaaggcagaagtggaagcaacttctatttagtgatcatgccgtgttgaaatccttgtctcctgtagacccagtggaacccataa

SEQ ID NO: 22378 - DNA, 120 bp, Artificial Sequence
  ENSG00000028203_16 (sequence is synthesized)
gtaattcagaaccatcaatgaattcagatatgggaaaagtcagtaaaaatgatactgaagaggaaagtaataaatccgccacaacagacaatgaaataagtaggactgagtatttatgtg

SEQ ID NO: 22379 - DNA, 120 bp, Artificial Sequence
  ENSG00000028203_17 (sequence is synthesized)
aaaactctctagaaggtaaaaataaagataattcttcaaatgaagtcttcccccaaggagcagaagaaagaatgtgttaccaatgtgagagtgaagatgaaccacaagcagatggaagtg

SEQ ID NO: 22380 - DNA, 120 bp, Artificial Sequence
  ENSG00000028203_18 (sequence is synthesized)
acagctgtcaccagattttaccttcactgctggccttgctgcagaagtggctgctagatctctctcctttaccaccatgcaggaacagacttttggtggtgaggaggaagaacaaataat

SEQ ID NO: 22381 - DNA, 120 bp, Artificial Sequence
  ENSG00000028203_19 (sequence is synthesized)
agaagaaaataaaaatgagatagaagaaaagtaagaaccaagattcatatgaagtgatattagattgttccttttacaaaagtgtttagcttcaagactggaaagggaatatgagtgtaa

SEQ ID NO: 22382 - DNA, 120 bp, Artificial Sequence
  ENSG00000028203_20 (sequence is synthesized)
gtttactatatataaagctaagatgtggatttacaggaagaaccctggtttgaataactgatctgaaattagtagttacctgtaaatggcagatcttttaggaaaataagagaaaggtaa

SEQ ID NO: 22383 - DNA, 120 bp, Artificial Sequence
  ENSG00000028203_21 (sequence is synthesized)
gggctcttttgaataaactgctgttttatttgtggcacaactgatcaatcttggaaattctttaagtatttttaataagaaatgaattatcatttcttgccagaatttgctaccttaagg

SEQ ID NO: 22384 - DNA, 120 bp, Artificial Sequence
  ENSG00000028203_22 (sequence is synthesized)
tgattgggaaaattctgttgcaagaacattaacatttagtatgactcctttttactgtattcttgcagttaataactgcagctattatgttaataacaagttgtttgtattttatttttg

SEQ ID NO: 22385 - DNA, 120 bp, Artificial Sequence
  ENSG00000028203_23 (sequence is synthesized)
tttataccagtcttaaagatccaggttctgaataaaaaaattaattgatacaattgatgtgtgctggggtttggaactaaaagtagtttcaacagtgcgtgggttatgacatttcttatg

SEQ ID NO: 22386 - DNA, 120 bp, Artificial Sequence
  ENSG00000028203_24 (sequence is synthesized)
tttctttgttcatgtgtgtatttagtagttaattttaagatgtcctagtgatctttaaaagaaaaatattgtaccattttttagaattacactttcacctttctttttgcaattgaaagt

SEQ ID NO: 22387 - DNA, 120 bp, Artificial Sequence
  ENSG00000028203_25 (sequence is synthesized)
gatgatgtcaaagtgggatttctgtactccaaggccccacccccaatttagcaagcagaaaaacgttccttgtatcactttaccttggataattgggtgccattaacacaaacaggtcac

SEQ ID NO: 22388 - DNA, 120 bp, Artificial Sequence
  ENSG00000028203_26 (sequence is synthesized)
aatcctgctgttttctagccctgtccaccataatgagattcaggaaacatcctgtcagcctcctggaaagcatccttgtctccttagtatttcatttacaaactacctcttaacagagac

SEQ ID NO: 22389 - DNA, 120 bp, Artificial Sequence
  ENSG00000028203_27 (sequence is synthesized)
tgcttttcaaattggccaatcttacctgttttgtgttgtgattgcattttcaaagagtaattattttcagcatatacagttttgaaacctgtagctcctatgcaataacatagttctata

SEQ ID NO: 22390 - DNA, 120 bp, Artificial Sequence
  ENSG00000028203_28 (sequence is synthesized)
gacattatttgggggaaatgtagtaataactcaatctatgttgctgtcctagaaaggaaattgcatgatgaatctagattgtctttagagtaaagaaacacattcaaattcctgtaactt

SEQ ID NO: 22391 - DNA, 120 bp, Artificial Sequence
  ENSG00000028203_29 (sequence is synthesized)
atcactttcagtgagtaaatttacttataccaaaggggattttttttctttcaggaatctaaggaaatttactttttaacctgagaaaaaaacttggttctgctttatataaacagtaga

SEQ ID NO: 22392 - DNA, 120 bp, Artificial Sequence
  ENSG00000028203_30 (sequence is synthesized)
gattattgtactataagtgattttgcctttttgccaaaatcctggaactcatctataattaacctcttcggagcaataccttaggttgggccttgctttactacttagaaatagctaaat

SEQ ID NO: 22393 - DNA, 120 bp, Artificial Sequence
  ENSG00000028203_31 (sequence is synthesized)
ttcaattttaaaaatctttgtgtgttataactgttaaattattcaataatacttagggtttactttcttatttaaatcacttatttagtttaccgacttcatttttctttggatttagaa

SEQ ID NO: 22394 - DNA, 120 bp, Artificial Sequence
  ENSG00000028203_32 (sequence is synthesized)
gaagcaattatggaaaaacttggtaatctctctcaacctataaccttacacaggaagaattagagtttaataatttttaattcttttattgtatgttacttttattacaccagtttgggg

SEQ ID NO: 22395 - DNA, 120 bp, Artificial Sequence
  ENSG00000028203_33 (sequence is synthesized)
gaaaatcttcataaaattgtatcagttttattcagtgttctctaaggtgataccttttaattttgaaagactaaataattttaatcgagaatttccagtctttcagtctgatctatttaa

SEQ ID NO: 22396 - DNA, 120 bp, Artificial Sequence
  ENSG00000028203_34 (sequence is synthesized)
ttcactacttgttacataatccagtgaaaactctacttgttgaaattatgacataaagatcttgcagctttatttgagtatttgttcttttgtgtagtttccatcttttaaaatatttaa

SEQ ID NO: 22397 - DNA, 120 bp, Artificial Sequence
  ENSG00000028203_35 (sequence is synthesized)
aatattttcaagataaagtattatcttctctgcaaaaattcctggagtaattttctctcataatatttgaagtcagtggttctcagttgtattagtggggtaactacatcaaaataaata

SEQ ID NO: 22398 - DNA, 120 bp, Artificial Sequence
  ENSG00000028203_36 (sequence is synthesized)
aagtcttatttttaaaatgcaaattttagaccatactcccagtgattcttagttggtctttttggaatgagccataggtaatgtttatgtccaataaaatctaggaacctctgtctggaa

SEQ ID NO: 22399 - DNA, 84 bp, Artificial Sequence
  ENSG00000028203_37 (sequence is synthesized)
gagtttgacgaagaggtggtttttgagacattaaaactaccactactatggaagtaccactactagatggaagtttgacctgga

SEQ ID NO: 22400 - DNA, 120 bp, Artificial Sequence
  ENSG00000028203_38 (sequence is synthesized)
ttttgtactgtggttcttctggagaaacaagtgggaatcatcaaagaaagaaatgtatggataaaaaagaatatggacaagaggcagtaaatttttcatttaggtcaactggagaaatta

SEQ ID NO: 22401 - DNA, 120 bp, Artificial Sequence
  ENSG00000028203_39 (sequence is synthesized)
agcctcctacaagagtcctaccaaaatacctgggatatagtaatcactcaatgaatataaactgcacttactggcatgctcaaggaatgggctattaagcaaggtatcctgttaaaagtg

SEQ ID NO: 22402 - DNA, 120 bp, Artificial Sequence
  ENSG00000028203_40 (sequence is synthesized)
cagctcttcgagaagcacttttttccttccgtcatgcttcatactatattgtattgtactaacccctcatgctgggatgagcgactgcctagcaagcaacccactgcctactaacatcaa

SEQ ID NO: 22403 - DNA, 120 bp, Artificial Sequence
  ENSG00000028203_41 (sequence is synthesized)
gaggggctaaataaaactgcattttccttgcaaggacaacttctaccgtatgaatatatattatatttatgtattatattttgtacaatagttgatcttgaatgcagacttcatttgtat

SEQ ID NO: 22404 - DNA, 120 bp, Artificial Sequence
  ENSG00000028203_42 (sequence is synthesized)
ttttcgtggtactacaaaatgtgtagaagttatggcttttctttcattagggtcttgttaggtggttggcaagtaagttaaattgtatgttgcatttttttccatgctgttttaacttgt

SEQ ID NO: 22405 - DNA, 120 bp, Artificial Sequence
  ENSG00000028203_43 (sequence is synthesized)
aaatatatatgtatacatatggaagatattattattatctagattactttaagccttttatctgatgtattatcagtgaaaaccatgctgcttattccctaatacaatggttctcaaact

SEQ ID NO: 22406 - DNA, 120 bp, Artificial Sequence
  ENSG00000028203_44 (sequence is synthesized)
ttagtgtgtatcagaatcaagatgagggcttgtaaaatatagctggtccctactcccagagtttccatttcaggaggtctgggatcaggcccaagaatttgcatttttaacaaattccta

SEQ ID NO: 22407 - DNA, 120 bp, Artificial Sequence
  ENSG00000028203_45 (sequence is synthesized)
ggtgataactgataatgttggttcagggaacacactttcagaaccactgctttaatattttaaataagataatatgtgaggtgtcataaaaaccttcatcaaatccctatctcatttcat

SEQ ID NO: 22408 - DNA, 120 bp, Artificial Sequence
  ENSG00000028203_46 (sequence is synthesized)
ttcttaggcattttctctcttataaagtttcctggatttataaattttcattgattttactagaaagttttatttagcttttatttatttattgttctttttaagaaaaaaactgagagt

SEQ ID NO: 22409 - DNA, 120 bp, Artificial Sequence
  ENSG00000028203_47 (sequence is synthesized)
gtaccagatactgtgaagaggtgaagagagaagggcaggtcctcttctccaagagtttaaagacttaaagttaagttgtaaatctactaatttattgtttttcactttaatatctttatg

SEQ ID NO: 22410 - DNA, 120 bp, Artificial Sequence
  ENSG00000028203_48 (sequence is synthesized)
tatgtttttataaatacaaagttattagaacaagttggactatgaaattgacaaagtattagtaccaaggatttttttggttgggggagacaggatctagctctgttgcccaggctggag

SEQ ID NO: 22411 - DNA, 69 bp, Artificial Sequence
  ENSG00000028203_49 (sequence is synthesized)
attacaggtgtgcaccaccatgcccagccaatttttatttcagtttttgtagcgacagagtctttgttt

SEQ ID NO: 22412 - DNA, 120 bp, Artificial Sequence
  ENSG00000028203_50 (sequence is synthesized)
tagatagtcacaacttagcctcctccttttccatccgcgatttttttgggtcagtatccagagtgcttcaggtcactgttcaccgtcaaggcgtggccctcggaatgaaggcagcagaat

SEQ ID NO: 22413 - DNA, 120 bp, Artificial Sequence
  ENSG00000028203_51 (sequence is synthesized)
actgtggtaagtgtcaagcctgatgcctggcttatagaagatattccttgatagatgaatagaaagaagagaaggagaaataaatgagctcgtatatgtgaaggcattttgtaaactata

SEQ ID NO: 22414 - DNA, 120 bp, Artificial Sequence
  ENSG00000028203_52 (sequence is synthesized)
ttgtcttttttttagtggttgtctatatatacatatatatatatatctagtcacagaaatgactattttatgagacctgagttgacatatgtataatcattttctagtgaagatcatgaa

SEQ ID NO: 22415 - DNA, 120 bp, Artificial Sequence
  ENSG00000028203_53 (sequence is synthesized)
agaggaatttgttttctacatttaatagaattgtggatttaggaaacaaaaactttaggacacctgtacagttgtatcacattttacttttcaagtttgcttgacagggtcagtgctgct

SEQ ID NO: 22416 - DNA, 120 bp, Artificial Sequence
  ENSG00000028203_54 (sequence is synthesized)
atcgtgctgaggcgggtggcatggcggagaaggatgacaccggagtttgacgaagaggtggtttttgaggcagcagagcccttgctagaagccagtggcatgctcttgaacttcccagcc

SEQ ID NO: 22417 - DNA, 120 bp, Artificial Sequence
  ENSG00000028203_55 (sequence is synthesized)
gaggcgccctggccgtggccggcctctatctcgggcccgcccagaattcccagacggtgcccggttgccaggctctgggctggagcggtgtctcttccttcctgggaatggatgtgcggc

SEQ ID NO: 22418 - DNA, 120 bp, Artificial Sequence
  ENSG00000028203_56 (sequence is synthesized)
gggggggactgcgcccggctggggcggggccgaatcgtgccttttagatagtcacaacttagcctcctccttttccatccgcgatttttttggacattaaaactaccactactatggaag

SEQ ID NO: 22419 - DNA, 120 bp, Artificial Sequence
  ENSG00000028203_57 (sequence is synthesized)
tttcccatcgtgctgaggcgggtggcatggcggagaaggatgacaccggagtttgacgaagaggtggtttttgaggttcggccagtgggaaggacctgcagatcagaggatggaggaaag

SEQ ID NO: 22420 - DNA, 120 bp, Artificial Sequence
  ENSG00000028203_58 (sequence is synthesized)
gaaaggcagaagtggaagcaacttctatttagtgatcatggggtaaagtccgcatggaattagagggggaaagtctgcactggaacctgctgtggccattttttttctgttgttgctgct

SEQ ID NO: 22421 - DNA, 120 bp, Artificial Sequence
  ENSG00000028203_59 (sequence is synthesized)
taagaaagatgacttacttcacaagttggtggagccatctcattcttcagtgatactaggactgtggtaaggatattggattccgactcgactcattacataccatcctgcaacaggaag

SEQ ID NO: 22422 - DNA, 120 bp, Artificial Sequence
  ENSG00000028203_60 (sequence is synthesized)
accgtcaaggcgtggccctcggaatgaaggcagcaggtgcccgttttctaacacggtttaaagtctatttgtgggacctactgtgggtagttagggccagggcatctcagcatctagatt

SEQ ID NO: 22423 - DNA, 120 bp, Artificial Sequence
  ENSG00000028203_61 (sequence is synthesized)
cgattcttttgtcctttgctgttgcgctaggtgtagccagttcttctgactcggggctctagatgtgagtgcttttgtgtgggactattttaagacgttctctgccatcttgaatgaaaa

SEQ ID NO: 22424 - DNA, 120 bp, Artificial Sequence
  ENSG00000028203_62 (sequence is synthesized)
aaactttctgttagataaacatgaatccttactgctttggaatactttgtaggtaatttatatccagtgaggaaataatttggtagagaattaaaatacattacttatttaaatattgat

SEQ ID NO: 22425 - DNA, 120 bp, Artificial Sequence
  ENSG00000028203_63 (sequence is synthesized)
gctatccaaacagaatcgaaaaaaatatactaaaactttaatgagagcacaactaataggaatcctctactaactggatttttctctttaaatcttttttttaaaaaacagcatgaatga

SEQ ID NO: 22426 - DNA, 120 bp, Artificial Sequence
  ENSG00000028203_64 (sequence is synthesized)
caacttctatttagtgatcatggtaagcactgactttaaagtaacaggttatttcaatgtaggggattctttctttcttgaaccatgaatgttattttagctgaagaattcttggggttt

SEQ ID NO: 22427 - DNA, 120 bp, Artificial Sequence
  ENSG00000028203_65 (sequence is synthesized)
tataagggtccaccagtatgcatagtactttttcttctagatgctaaatcaatttgattaataaaagagtaggaatgtaaccacattggaaatatgaagtcatacttttttatgagttat

SEQ ID NO: 22428 - DNA, 120 bp, Artificial Sequence
  ENSG00000028203_66 (sequence is synthesized)
ttaattttttagtaaatttgttttagaatgggcagtgagttgaataatttgggatattttaaatgttattttcaaatttagtgaatttgagattctcaactctgttgtccatatgttaaa

SEQ ID NO: 22429 - DNA, 120 bp, Artificial Sequence
  ENSG00000028203_67 (sequence is synthesized)
atatttaaaaatacctcagtgaagcacaaaattaataactgtgctcacattgaaaaaaatggcccaggcgcagcggcacatgcttgtaatatcagcacgttgggaagctgaggcgggtgg

SEQ ID NO: 22430 - DNA, 120 bp, Artificial Sequence
  ENSG00000028277_0 (sequence is synthesized)
ggctcggcccccagagagggtggggagatgacacagttgttcccccagccctggcggggcgggcagcatggttcactccagcatgggggctccagaaataagaatgtctaagcccctgga

SEQ ID NO: 22431 - DNA, 120 bp, Artificial Sequence
  ENSG00000028277_1 (sequence is synthesized)
ggccgagaagcaaggtctggactccccatcagagcacacagacaccgaaagaaatggaccagacactaatcatcagaacccccaaaataagacctccccattctccgtgtccccaactgg

SEQ ID NO: 22432 - DNA, 120 bp, Artificial Sequence
  ENSG00000028277_2 (sequence is synthesized)
ccccagtacaaagatcaaggctgaagaccccagtggcgattcagccccagcagcacccctgccccctcagccggcccagcctcatctgccccaggcccaactcatgttgacgggcagcca

SEQ ID NO: 22433 - DNA, 120 bp, Artificial Sequence
  ENSG00000028277_3 (sequence is synthesized)
gctagctggggacatacagcagctcctccagctccagcagctggtgcttgtgccaggccaccacctccagccacctgctcagttcctgctaccgcaggcccagcagagccagccaggcct

SEQ ID NO: 22434 - DNA, 120 bp, Artificial Sequence
  ENSG00000028277_4 (sequence is synthesized)
gctaccgacaccaaatctattccagctacctcagcaaacccagggagctcttctgacctcccagccccgggccgggcttcccacacagccccccaaatgcttggagccaccatcccaccc

SEQ ID NO: 22435 - DNA, 120 bp, Artificial Sequence
  ENSG00000028277_5 (sequence is synthesized)
cgaggagcccagtgatctggaggagctggagcaattcgcccgcaccttcaagcaacgccgcatcaagctgggcttcacgcagggtgatgtgggcctggccatgggcaagctctacggcaa

SEQ ID NO: 22436 - DNA, 120 bp, Artificial Sequence
  ENSG00000028277_6 (sequence is synthesized)
cgacttcagccagacgaccatttcccgcttcgaggccctcaacctgagcttcaagaacatgtgcaaactcaagcccctcctggagaagtggctcaacgatgcagagactatgtctgtgga

SEQ ID NO: 22437 - DNA, 120 bp, Artificial Sequence
  ENSG00000028277_7 (sequence is synthesized)
ctcaagcctgcccagccccaaccagctgagcagccccagcctgggtttcgacggcctgcccggccggagacgcaagaagaggaccagcatcgagacaaacgtccgcttcgccttagagaa

SEQ ID NO: 22438 - DNA, 120 bp, Artificial Sequence
  ENSG00000028277_8 (sequence is synthesized)
gagttttctagcgaaccagaagcctacctcagaggagatcctgctgatcgccgagcagctgcacatggagaaggaagtgatccgcgtctggttctgcaaccggcgccagaaggagaaacg

SEQ ID NO: 22439 - DNA, 120 bp, Artificial Sequence
  ENSG00000028277_9 (sequence is synthesized)
catcaacccctgcagtgcggcccccatgctgcccagcccagggaagccggccagctacagcccccatatggtcacaccccaagggggcgcggggaccttaccgttgtcccaagcttccag

SEQ ID NO: 22440 - DNA, 120 bp, Artificial Sequence
  ENSG00000028277_10 (sequence is synthesized)
cagtctgagcacaacagttactaccttatcctcagctgtggggacgctccaccccagccggacagctggagggggtgggggcgggggcggggctgcgccccccctcaattccatcccctc

SEQ ID NO: 22441 - DNA, 120 bp, Artificial Sequence
  ENSG00000028277_11 (sequence is synthesized)
tgtcactcccccacccccggccaccaccaacagcacaaaccccagccctcaaggcagccactcggctatcggcttgtcaggcctgaaccccagcacgggccctggcctctggtggaaccc

SEQ ID NO: 22442 - DNA, 120 bp, Artificial Sequence
  ENSG00000028277_12 (sequence is synthesized)
tgccccttaccagccttgatggcagcgggaatctggtgctgggggcagccggtgcagccccggggagccctggcctggtgacctcgccgctcttcttgaatcatgctgggctgcccctgc

SEQ ID NO: 22443 - DNA, 120 bp, Artificial Sequence
  ENSG00000028277_13 (sequence is synthesized)
tcagcaccccgcctggtgtgggcctggtctcagcagcggctgcggctgtggcagcctccatctccagcaagtctcctggcctctcctcctcatcctcttcatcctcatcctcctcctcct

SEQ ID NO: 22444 - DNA, 120 bp, Artificial Sequence
  ENSG00000028277_14 (sequence is synthesized)
ccacttgcagcgagacggcagcacagacccctggaggtccaggggggcccgaggcagggtccaaacctgagtgagggccagccatgcctcccctcccattcctctggtccctgccttggt

SEQ ID NO: 22445 - DNA, 120 bp, Artificial Sequence
  ENSG00000028277_15 (sequence is synthesized)
gccttggtcccttgcctgggaagagggcgaggaggccagtggtggggacgcagagggtcctcagagcaggagtgacaagggaggaaagaccaaaaaaacaaccaaccaaaaaaaaaaaaa

SEQ ID NO: 22446 - DNA, 120 bp, Artificial Sequence
  ENSG00000028277_16 (sequence is synthesized)
aaaaaaaaaaaaaaaaggaaagaaactaaccaacaaaagagaaaaccaaaaataatcacaacagaaaccagctgccccaaaggaaccagaggtgaaaaacaaacaaaaaaaaaccaaaaa

SEQ ID NO: 22447 - DNA, 120 bp, Artificial Sequence
  ENSG00000028277_17 (sequence is synthesized)
cccacaaaatcaaacaaaccaaaaaaccagtcgcgagccagacctcagcgtgctcaccctcactgctacgacgccaaataaaaaccccagccaggggcggagaagcctccagcaggtcag

SEQ ID NO: 22448 - DNA, 120 bp, Artificial Sequence
  ENSG00000028277_18 (sequence is synthesized)
acctcatgccaccgagccctggctgtgggaccaacccccaaccctgcctcccccgtgggggctacagaaggaaaaagagaagatgccagcttcctaatcccagcccccagccctgggcca

SEQ ID NO: 22449 - DNA, 120 bp, Artificial Sequence
  ENSG00000028277_19 (sequence is synthesized)
gcgaagacagggcacagcctgggcagatgggctggggcttagcaccacccaccaaatgttcttttccagaaggtgaaagagaaagggcctgaacaaccttacaccaaatattcagtagct

SEQ ID NO: 22450 - DNA, 120 bp, Artificial Sequence
  ENSG00000028277_20 (sequence is synthesized)
tcatccaaaggatgtacagaatttttagcattgtgctcaacagaatgtgtccctaccatgtgtccccttctcccctggcccccagctctccccacctgggcagggggtcttgctttaacc

SEQ ID NO: 22451 - DNA, 120 bp, Artificial Sequence
  ENSG00000028277_21 (sequence is synthesized)
tcctccctccccccagcaggggagagttcaagggaaggcctgcggacaacttttcatcccctgttcctccctcttttcccctttgaagggtgggctaggccattttgccaagttctagct

SEQ ID NO: 22452 - DNA, 120 bp, Artificial Sequence
  ENSG00000028277_22 (sequence is synthesized)
ctcacaagtccctcctcaaccctgtcaccctcctctgctctggaactgactccctccccagcctatgggaaggtggaaatttcaggcaagaggggatgaagacattcagttgagggcatt

SEQ ID NO: 22453 - DNA, 120 bp, Artificial Sequence
  ENSG00000028277_23 (sequence is synthesized)
cagttgtctttttccatcctgtctgtttccctgaaaaaaaaaaaaattcatattccagtgcctatccgtgggatccttcacgttctttgacattaaccagaaaccaaaaagagaactcac

SEQ ID NO: 22454 - DNA, 120 bp, Artificial Sequence
  ENSG00000028277_24 (sequence is synthesized)
ctcgcttttcccaccctgtgcccctctggtactggcgaatgcctctccctccccccacatgcacgcacgcacacaccccagtggtggggttcctcgagatggcatccccatcagggtcca

SEQ ID NO: 22455 - DNA, 120 bp, Artificial Sequence
  ENSG00000028277_25 (sequence is synthesized)
tgtggtggggacagtgccacagcctgtggtccccatctgagagggcgcggtggtggccaccactcccacaagacctccacaactcttggctggaccctgtgtttgaccagccccggacac

SEQ ID NO: 22456 - DNA, 120 bp, Artificial Sequence
  ENSG00000028277_26 (sequence is synthesized)
gtctccactgacgacggacagaggagagacaccactgggagccaccctgccctcctgctattgtggaggccaacaaagttttgaaccgaaaaccaaaaaaacagaaacaaacaaacaata

SEQ ID NO: 22457 - DNA, 120 bp, Artificial Sequence
  ENSG00000028277_27 (sequence is synthesized)
aatttaaactagaaaaaaaatttatatatatatataaacatatatatatatatatatataaaagggaaagaagatgaggactcttcaagaataagatggaaccgcgaggcggagccaagc

SEQ ID NO: 22458 - DNA, 120 bp, Artificial Sequence
  ENSG00000028277_28 (sequence is synthesized)
ctcttcacaaatacctcatggacgttgtctttgggaaagccggagggggcggctggggcagggcctgtccctcggccagggcagatggaagcgggtgggcggggctgagagagggtatca

SEQ ID NO: 22459 - DNA, 120 bp, Artificial Sequence
  ENSG00000028277_29 (sequence is synthesized)
gggacaggggtgaagagccccaaactcccctcccaaatcaactgaaaaagctttaaaaaaagacaggaaaaaaaggagtaagaaagcaaaaagaacagatgaaggaaaacttaacaactt

SEQ ID NO: 22460 - DNA, 120 bp, Artificial Sequence
  ENSG00000028277_30 (sequence is synthesized)
ttgggtggtttgattcctcctttgatttctttttcggttctcttttgtctgacctctctcctcccctccttcctctctcctcccctccttcctctctcctctcctccttcctgtctcctc

SEQ ID NO: 22461 - DNA, 120 bp, Artificial Sequence
  ENSG00000028277_31 (sequence is synthesized)
tctctccctttgctctcctctcttctctctcaatcttgttctttctgtgtctctcctcaaaccaaagtgttgcagtgaaggacacgagccattgaaatcagggtggggcctgacagccgt

SEQ ID NO: 22462 - DNA, 120 bp, Artificial Sequence
  ENSG00000028277_32 (sequence is synthesized)
agtgtggcccctgccccttgttgggcaggagcagagagagaggagagccctgagaccgcagggctttggcctgggcagcttccactttctgccggacactctgaggagaggcagatggag

SEQ ID NO: 22463 - DNA, 120 bp, Artificial Sequence
  ENSG00000028277_33 (sequence is synthesized)
ctccaggcctcagcgttctcttttttccttgtctcccttctcccacccgggaaatgaaactgttgggctgggcgacggaggcagcagagactcggccattgcaggggcctctgggtgcct

SEQ ID NO: 22464 - DNA, 120 bp, Artificial Sequence
  ENSG00000028277_34 (sequence is synthesized)
tgtccgggcagtggtgaagtagccgcccctcccaccccggcacgatggggcctggcacctcgtctacccaacctcaccggaatgtaagcatctccgctgaacgactccctgcccttaccc

SEQ ID NO: 22465 - DNA, 120 bp, Artificial Sequence
  ENSG00000028277_35 (sequence is synthesized)
tacctctgagtttgtccatgtttatttcctgaagagagaagggactggcaagagggcttgggccccagcccaagggtggagagggggccaagggctcctgaccaaataggaaggacattt

SEQ ID NO: 22466 - DNA, 120 bp, Artificial Sequence
  ENSG00000028277_36 (sequence is synthesized)
gagcagagcaaaatgaaaggaattacaaccaaaaaccccctccgagaagacaggcagcatggaaggcatggtggagatgactcaaacaaaaactatgattctagaccaaaaaggaaaaaa

SEQ ID NO: 22467 - DNA, 120 bp, Artificial Sequence
  ENSG00000028277_37 (sequence is synthesized)
aaaaaaaaaaaaggaaagaaaatccaggactcaccaccacccacttcatcctgcttcctccccatcaagtcccaccacctgggacctctccccaccccagtatgtgggagtggggtaaag

SEQ ID NO: 22468 - DNA, 120 bp, Artificial Sequence
  ENSG00000028277_38 (sequence is synthesized)
aggagaggaggagcagggggcagggatggggcagatgccctgatgttggtggagggacccctgtgcagccgggggtgctggggaccctccccatccaaccctcacacctaggaaaagaaa

SEQ ID NO: 22469 - DNA, 120 bp, Artificial Sequence
  ENSG00000028277_39 (sequence is synthesized)
aacaagaaaaaaaaattcctgggagggggaaaaataaccaaatcccaagctttaactacagctgtgaaaccaaatattgggaagggggtaggagggagggaggggcaggtgagccccagg

SEQ ID NO: 22470 - DNA, 120 bp, Artificial Sequence
  ENSG00000028277_40 (sequence is synthesized)
tctccccctgggcccccctcccctgaggactcgagataaggcaccaaatacctcatagaactttaatgttaaaaaaaggaaaccaaatatcgttggctgggggccagccagggcaagggg

SEQ ID NO: 22471 - DNA, 120 bp, Artificial Sequence
  ENSG00000028277_41 (sequence is synthesized)
ctggggggctggagggagccagggttgggaaggtgatgggggaattcatgccccccacccccatctgccccttacactctggtcccccgtctcgactccgggaaacaaaactatctcatc

SEQ ID NO: 22472 - DNA, 120 bp, Artificial Sequence
  ENSG00000028277_42 (sequence is synthesized)
gtttttattttgtggtctgtacagagcctgtgtccgtgtgtctgtgtatgagcgagagagttggagggctggggagctttatgtgggggatggggagggcaaccccaggctaggctatgg

SEQ ID NO: 22473 - DNA, 120 bp, Artificial Sequence
  ENSG00000028277_43 (sequence is synthesized)
gctaggttagatgtccgaggttgggggccaagggcctgggctagaaagagaggagagatgagtgggttggagcagtggggagccctctgaatttctcttctccccaaccctgacctccta

SEQ ID NO: 22474 - DNA, 120 bp, Artificial Sequence
  ENSG00000028277_44 (sequence is synthesized)
cttaagggagggacagagactgggtctaccctaatggtgggccttttcattgtgccaaaaaaaaaaaaaaaaaaattgatgccagtaactaaaccacctctctctgttctcttctggggg

SEQ ID NO: 22475 - DNA, 120 bp, Artificial Sequence
  ENSG00000028277_45 (sequence is synthesized)
gtggggtgggtgtgtgtgtgggggtgggtagggatggggaacccaagccccagtaggagttggggctgagatcaggaggaggggaaggatatgagttttccatccatctccctggagaag

SEQ ID NO: 22476 - DNA, 120 bp, Artificial Sequence
  ENSG00000028277_46 (sequence is synthesized)
gccatgacgggctctccaagccctggggagatctggcgagggactagccaagtcagggtgacctcttgacctgactagtttttctaacccacatgaacaccagggtgcctctctcttcct

SEQ ID NO: 22477 - DNA, 120 bp, Artificial Sequence
  ENSG00000028277_47 (sequence is synthesized)
ctagcccagggtagggggacctgagtgagagagagagtgagacagacagcaagattgagacacgcgggcccccactggtctctgagtgggaaaggcaagtgcgagagataaaggcctcca

SEQ ID NO: 22478 - DNA, 120 bp, Artificial Sequence
  ENSG00000028277_48 (sequence is synthesized)
agagaaaaaagaaacaaaccaaagatttaaccatttaaaaaaaaaaaaaaacccacagacaactccgctacctttttatatgttggaaaaaaagtgaaaaaaaattaaaaataaaaataa

SEQ ID NO: 22479 - DNA, 120 bp, Artificial Sequence
  ENSG00000028277_49 (sequence is synthesized)
aaaaaaatacacaaaaactccaagccgcaagtccttcatgcggtttaaactttgacctcagcagtctccaaagcaagacgacgatgacaaaggcggaaacaaagaaaaaataatgtatat

SEQ ID NO: 22480 - DNA, 120 bp, Artificial Sequence
  ENSG00000028277_50 (sequence is synthesized)
ttttaagtatttgtccttgaattgttagctccttgttaaacaaacaaaaggagagaaaaatccagagagaagtgttgctgggatggagacaactatttactatgtctgtgacccctccct

SEQ ID NO: 22481 - DNA, 120 bp, Artificial Sequence
  ENSG00000028277_51 (sequence is synthesized)
tctgcctccctccccttcctctctttcctgtcctctatccttgctgcccctcccccaatatgtcccccaaacccaggggctcagtatttatttatttatataattgcagggtgactgggg

SEQ ID NO: 22482 - DNA, 120 bp, Artificial Sequence
  ENSG00000028277_52 (sequence is synthesized)
gcctctctcggcaactcgtagagagcctttggataatggcagggtggggaatgggcgaggagtctttgggaagagcaggggcctgaactttcaactcctttctggcctcttgtcccactg

SEQ ID NO: 22483 - DNA, 120 bp, Artificial Sequence
  ENSG00000028277_53 (sequence is synthesized)
cttccaccatcaccttccaaatccagggctgcactagggcaaggtgaccaccctacttggtaaagacctgattggcgcagcccattctggtgtgggtgtctttcaccacccagaatgacc

SEQ ID NO: 22484 - DNA, 120 bp, Artificial Sequence
  ENSG00000028277_54 (sequence is synthesized)
aggttggaatgggggtgggtgaagttggagggggtggcaagtacaaggcaagggtgcccaggaaccggcatccagaaatcagccctggagtagacctgcctttcctccatccttaccaag

SEQ ID NO: 22485 - DNA, 120 bp, Artificial Sequence
  ENSG00000028277_55 (sequence is synthesized)
ttagcctccctttcagttccgtctgacccctgtgttggtagccccttccttcccttcctgtaccccctccgtctcttctcgtggtagcgggttagtgtttcagtgttcttaactccaatc

SEQ ID NO: 22486 - DNA, 120 bp, Artificial Sequence
  ENSG00000028277_56 (sequence is synthesized)
tgcttgttcattgtacaatgtgcttcttttaaggccccatttttgtaacttgagtgtgtcattcatctgaacaacaaacatcaaaaaataaaaaattaaaaactgtacagagagaaatga

SEQ ID NO: 22487 - DNA, 120 bp, Artificial Sequence
  ENSG00000028277_57 (sequence is synthesized)
caggcgaggagcagcggccagagcagcgccagcagcaggcagcgagcgggcgcgggagcgggagcgggagcgggggtagcgttggcggcggcggctcctcctcggccatcccctcggagc

SEQ ID NO: 22488 - DNA, 120 bp, Artificial Sequence
  ENSG00000028277_58 (sequence is synthesized)
cgtgcagctgacgcgcatggcgaagacagcggcgcctaccgatgggagcagcggttctcgactggaccgggttggtggcctgaatgtattagcttcgctgcgtctgcccaagagaaataa

SEQ ID NO: 22489 - DNA, 120 bp, Artificial Sequence
  ENSG00000028277_59 (sequence is synthesized)
gagtgagagtctcctttccatttgacccagccacactctgccagtgatttgctgtgagacctcaggcaagcccatctccctgtctgggtcagcctcttcctctatagaatgaggggagct

SEQ ID NO: 22490 - DNA, 120 bp, Artificial Sequence
  ENSG00000028277_60 (sequence is synthesized)
gtgggaagctgtggggagaagcagggtcgctgctgcttctagggtggggagcggcaccccagttatgttggcaggtccctgcccctgctaatgcctctgctttgcctcttgcagaagcac

SEQ ID NO: 22491 - DNA, 120 bp, Artificial Sequence
  ENSG00000028277_61 (sequence is synthesized)
aatggtggggttgagctccgggctgagtccagccctcatgagcaacaaccctttggccactatccaaggtgcgtgctgcctcatgtcacacccatcgtcaccagccctatcctctggggc

SEQ ID NO: 22492 - DNA, 120 bp, Artificial Sequence
  ENSG00000028277_62 (sequence is synthesized)
cagggagggcagaaaatggtgaggggggactgggaggatgtggcacaggctggagcctgaggttcccaagtggctctgggtgtccatgggcctcaagactgggcctggggagtgtgggtg

SEQ ID NO: 22493 - DNA, 120 bp, Artificial Sequence
  ENSG00000028277_63 (sequence is synthesized)
ggggaatgggagagacagtgggaagagggtaggactcacccctcctctgcaggagcaactcagctttaatctgcttcacgatttcatatgagaaaagcatgggcctggtaaaaggtgagg

SEQ ID NO: 22494 - DNA, 120 bp, Artificial Sequence
  ENSG00000028277_64 (sequence is synthesized)
cacttgagttttgtgcctggcctctgtcatttttaagctgtgtgaattcaagcacttattttatccttctaagcctcagtttttattaaattattatgaatgtgtaaaacataaaaagat

SEQ ID NO: 22495 - DNA, 120 bp, Artificial Sequence
  ENSG00000028277_65 (sequence is synthesized)
atcggagcccatgggagatgtgggaggccggcgtggccccacggaggagcggaaccttgggttggcctgtgcgggctgaggaggagttcaacagagtgacggggtattctgggcagggga

SEQ ID NO: 22496 - DNA, 120 bp, Artificial Sequence
  ENSG00000028277_66 (sequence is synthesized)
cagcctttgctggaatttttcagcccttgcgaaggcctcgggacgtgcctgaatgggatgtagtaagacggacagagtcagaggttctcgactggaccgggttggtggcctgaatgtatt

SEQ ID NO: 22497 - DNA, 120 bp, Artificial Sequence
  ENSG00000028277_67 (sequence is synthesized)
ctgctccagccatgccatcctgcccctgctcactgcattgcttgcctcttcatacccatctcacctttggggaaggtgtgaggggtgctgatgggggtcagtgggaccgatggggagatg

SEQ ID NO: 22498 - DNA, 120 bp, Artificial Sequence
  ENSG00000028277_68 (sequence is synthesized)
acgccgctgccgccgccgccgccgcctccgcctcctcctctacttcctcctcctcctcctcctctgcctcctcctcgacctcacagcccccagcctcctctggggggggtgacctgccac

SEQ ID NO: 22499 - DNA, 80 bp, Artificial Sequence
  ENSG00000028310_0 (sequence is synthesized)
gtttccggcgcggcccagcgagctcggcaacctcggcgcagcgagcgcgggcggccagccagggccagggggcggtggcg

SEQ ID NO: 22500 - DNA, 120 bp, Artificial Sequence
  ENSG00000028310_1 (sequence is synthesized)
ctcgggcccgccgccggcgccgccatgggcaagaagcacaagaagcacaaggccgagtggcgctcgtcctacgaggattatgccgacaagcccctggagaagcctctaaagctagtcctg

SEQ ID NO: 22501 - DNA, 120 bp, Artificial Sequence
  ENSG00000028310_2 (sequence is synthesized)
aaggtcggaggaagtgaagtgactgaactctcaggatccggccacgactccagttactatgatgacaggtcagaccatgagcgagagaggcacaaagaaaagaaaaagaagaagaagaag

SEQ ID NO: 22502 - DNA, 120 bp, Artificial Sequence
  ENSG00000028310_3 (sequence is synthesized)
aagtccgagaaggagaagcatctggacgatgaggaaagaaggaagcgaaaggaagagaagaagcggaagcgagagagggagcactgtgacacggagggagaggctgacgactttgatcct

SEQ ID NO: 22503 - DNA, 120 bp, Artificial Sequence
  ENSG00000028310_4 (sequence is synthesized)
gggaagaaggtggaggtggagccgcccccagatcggccagtccgagcgtgccggacacagccagccgaaaatgagagcacacctattcagcaactcctggaacacttcctccgccagctt

SEQ ID NO: 22504 - DNA, 120 bp, Artificial Sequence
  ENSG00000028310_5 (sequence is synthesized)
cagagaaaagatccccatggattttttgcttttcctgtcacggatgcaattgctcctggatattcaatgataataaaacatcccatggattttggcaccatgaaagacaaaattgtagct

SEQ ID NO: 22505 - DNA, 120 bp, Artificial Sequence
  ENSG00000028310_6 (sequence is synthesized)
aatgaatacaagtcagttacggaatttaaggcagatttcaagctgatgtgtgataatgcaatgacatacaataggccagataccgtgtactacaagttggcgaagaagatccttcacgca

SEQ ID NO: 22506 - DNA, 120 bp, Artificial Sequence
  ENSG00000028310_7 (sequence is synthesized)
ggctttaagatgatgagcaaacaggcagctcttttgggcaatgaagatacagctgttgaggaacctgtccctgaagttgtaccagtacaagtagaaactgccaagaaatccaaaaagccg

SEQ ID NO: 22507 - DNA, 120 bp, Artificial Sequence
  ENSG00000028310_8 (sequence is synthesized)
agtagagaagttatcagctgcatgtttgagcctgaagggaatgcctgcagcttgacggacagtaccgcagaggagcacgtgctggcgctggtggagcacgcagctgacgaagctcgggac

SEQ ID NO: 22508 - DNA, 120 bp, Artificial Sequence
  ENSG00000028310_9 (sequence is synthesized)
aggatcaaccggttcctcccaggcggcaagatgggctatctgaagaggaacggggacgggagcctgctctacagcgtggtcaacacggccgagccggacgctgatgaggaggagacccac

SEQ ID NO: 22509 - DNA, 120 bp, Artificial Sequence
  ENSG00000028310_10 (sequence is synthesized)
ccggtggacttgagctcgctctccagtaagctactcccaggcttcaccacgctgggcttcaaagacgagagaagaaacaaagtcacctttctctccagtgccactactgcgctttcgatg

SEQ ID NO: 22510 - DNA, 120 bp, Artificial Sequence
  ENSG00000028310_11 (sequence is synthesized)
tgaagtcggacgagatggagctgctctactcagcctacggagatgagacaggcgtgcagtgtgcgctgagcctgcaggagtttgtgaaggatgctgggagctacagcaagaaagtggtgg

SEQ ID NO: 22511 - DNA, 120 bp, Artificial Sequence
  ENSG00000028310_12 (sequence is synthesized)
acgacctcctggaccagatcacaggcggagaccactctaggacgctcttccagctgaagcagagaagaaatgttcccatgaagcctccagatgaagccaaggttggggacaccctaggag

SEQ ID NO: 22512 - DNA, 120 bp, Artificial Sequence
  ENSG00000028310_13 (sequence is synthesized)
acagcagcagctctgttctggagttcatgtcgatgaagtcctatcccgacgtttctgtggatatctccatgctcagctctctggggaaggtgaagaaggagctggaccctgacgacagcc

SEQ ID NO: 22513 - DNA, 120 bp, Artificial Sequence
  ENSG00000028310_14 (sequence is synthesized)
atttgaacttggatgagacgacgaagctcctgcaggacctgcacgaagcacaggcggagcgcggcggctctcggccgtcgtccaacctcagctccctgtccaacgcctccgagagggacc

SEQ ID NO: 22514 - DNA, 120 bp, Artificial Sequence
  ENSG00000028310_15 (sequence is synthesized)
agcaccacctgggaagcccttctcgcctgagtgtcggggagcagccagacgtcacccacgacccctatgagtttcttcagtctccagagcctgcggcctctgccaagacctaactctaga

SEQ ID NO: 22515 - DNA, 120 bp, Artificial Sequence
  ENSG00000028310_16 (sequence is synthesized)
ccaccttcagctcttttattttatttttttagttttattttgcacgtgtagagtttttgtcatcagacaaggactttgatcctgtcccctttggcatgcgggaagcagccgcggggaggt

SEQ ID NO: 22516 - DNA, 120 bp, Artificial Sequence
  ENSG00000028310_17 (sequence is synthesized)
aatgaattgtctgtggtatcatgtcagcagagtctccaagccccacgaaccctgaggagtggagtcatacgcgaaggccatatggccatcgtgtcagcagagagagtctctgtacacagc

SEQ ID NO: 22517 - DNA, 120 bp, Artificial Sequence
  ENSG00000028310_18 (sequence is synthesized)
cccgtgaaccctgaggagtggagtcatacacgaagggcgtgtggccatcgtgtcagcagagagagtctctgtacacagccccgtgaaccctgaggagtggagtcatacgcgaagggtgtg

SEQ ID NO: 22518 - DNA, 120 bp, Artificial Sequence
  ENSG00000028310_19 (sequence is synthesized)
tggccaggctgcagagctgcgtgccgtttgtgtccgagcatcacgtgtggctccagcccttgtttctgccagtgtagacacctctgtctgccccactgtcctggggtcgctcttgggagg

SEQ ID NO: 22519 - DNA, 120 bp, Artificial Sequence
  ENSG00000028310_20 (sequence is synthesized)
cacaggcatgggtgtgtctggcctcattctgtatcagtccagtgtgttcctgtcatagtttgtgtctcccaggcaggccatggtaggggcctcgcaggggccattggggagcacagggcc

SEQ ID NO: 22520 - DNA, 120 bp, Artificial Sequence
  ENSG00000028310_21 (sequence is synthesized)
aggctggggtgaggagagctcccctgttttctgtttaattgatgagcctgggaaaggagtgtgttctgcctgcccgttacagtggagcgttccgtgtccataaaacgttttctaactggg

SEQ ID NO: 22521 - DNA, 120 bp, Artificial Sequence
  ENSG00000028310_22 (sequence is synthesized)
gcctccacctcctctcccttcctgactagacagggatgccaggaaaatcttttgttacggtatttggtctttgtcccaggtttttggaccatagctcctaaaatccttggaatctcctga

SEQ ID NO: 22522 - DNA, 120 bp, Artificial Sequence
  ENSG00000028310_23 (sequence is synthesized)
ccacctcccgctgctccgccgtggaaagttagctcttaggccaggagcggctgttagctttgaagcgcagcatgtcgtttatgcaggacatggatttttctcagcaggcagctcttttgg

SEQ ID NO: 22523 - DNA, 120 bp, Artificial Sequence
  ENSG00000028310_24 (sequence is synthesized)
tatttactttttgttgaattttaagggacctcaagtgaaataataatcggtgaattcaggatcaacctttatgtccagagcgtttgttccgtcgtccatttcttgtctagagtagtggta

SEQ ID NO: 22524 - DNA, 120 bp, Artificial Sequence
  ENSG00000028310_25 (sequence is synthesized)
tgagctgaaaacattgctaagtgatcaccacatattgttgatgtaagggctaccggttattacaagagatttttatgactcctgctgtgggggtgccctttctacccggctgagcttggt

SEQ ID NO: 22525 - DNA, 120 bp, Artificial Sequence
  ENSG00000028310_26 (sequence is synthesized)
gggagccaaggctgagtcggatgtatctttatatccccagttctcggtggaacttaaaatgctgtgagacaccagacagacagatactgtgaacttggagctctctaatgaagggatacc

SEQ ID NO: 22526 - DNA, 120 bp, Artificial Sequence
  ENSG00000028310_27 (sequence is synthesized)
gcaaggtagtgctctgtggccaccgagagagggtgccacgtggccccagactctctgtgtgcctctccttctgggttggtgctgtgtgatctagcacagccaccgggatccagaggtcag

SEQ ID NO: 22527 - DNA, 120 bp, Artificial Sequence
  ENSG00000028310_28 (sequence is synthesized)
cgtggggccctgacgggaggtccggatcagacacacataaggctggtctcttcagtcggggtccaggtgcctctggcagggctgccgctggtgtttcatgcatcgtggaggccacgtggt

SEQ ID NO: 22528 - DNA, 120 bp, Artificial Sequence
  ENSG00000028310_29 (sequence is synthesized)
cactgacctcatttccttgatggaggccctgctgcaggctaatcctttctcttggagtgaatgctgacttctgtgtctctgtcactgggtgttgacgtgaggcaccgcccttgttattcc

SEQ ID NO: 22529 - DNA, 120 bp, Artificial Sequence
  ENSG00000028310_30 (sequence is synthesized)
agtgggggtgctggtgttggatccgacagatggtccataataggccaccgactgtgttcacgtggctcctgccacagatggtctttgtggtggtggggcccactcagctgaccacgctct

SEQ ID NO: 22530 - DNA, 120 bp, Artificial Sequence
  ENSG00000028310_31 (sequence is synthesized)
cctttctggcaggagacgttctagacccagtgtcttcagtggaaacagagcacaggctgtctgcagtctcaggcttcctagcagccctgataagagaagtagagcaatgcaggtgacatt

SEQ ID NO: 22531 - DNA, 120 bp, Artificial Sequence
  ENSG00000028310_32 (sequence is synthesized)
aatccttgcaggtttcatttcacctctatatccaacattttatctcaacatgtagtctgtagaaaacgttaatttgagctttatgggtttttttcatattaagtcttcaaaatgcacatg

SEQ ID NO: 22532 - DNA, 120 bp, Artificial Sequence
  ENSG00000028310_33 (sequence is synthesized)
ggatgggatgtaaagaacgctgaagtgggggcatttcagaggtgtctgctgctttttgcctgtgcctgctgggaagttgcagtgctctgtgtggcttgcgtgttgcgaggttgcggtctg

SEQ ID NO: 22533 - DNA, 120 bp, Artificial Sequence
  ENSG00000028310_34 (sequence is synthesized)
cgtggctcacgtgttgggaggtcgtggtctgcgtggctcacgtgttgggaagttgcagtggtctgtatggcttgcgtgttgggaggttgcagtctgtgtggcccgtgtgttgggaggttg

SEQ ID NO: 22534 - DNA, 120 bp, Artificial Sequence
  ENSG00000028310_35 (sequence is synthesized)
tggtctgcgtggcttgtgtgttgggaggttgtggtttttgtggcttgcgtgttggggggttgtggtctgtgtggctcacgtgttgggaggttgtggtctgcgtggctcacgtgttgggca

SEQ ID NO: 22535 - DNA, 120 bp, Artificial Sequence
  ENSG00000028310_36 (sequence is synthesized)
gttgtctgcttggctcacgtgttgggaagttgtggtctgcgtggctcatgtgttgggaagttgtttatgtggcttgtgtgctggaggttgtggcctgcgtggctcacgtgttgggcggtt

SEQ ID NO: 22536 - DNA, 120 bp, Artificial Sequence
  ENSG00000028310_37 (sequence is synthesized)
gtctgcttggctcatgtgttgggaagttgtggtctgcgtggcttgtgtgttgggaagttgtttatgtggcttgtgtgctggaggttgtggtctacgtggcttgcactgtagttcttttgg

SEQ ID NO: 22537 - DNA, 120 bp, Artificial Sequence
  ENSG00000028310_38 (sequence is synthesized)
acagccttgttctgcagtctgtgtttcagccctggaattgccacattctccaagaagccctggtttcttgactagagagccttgtgtagaagccaggacctgggttctgggtgaagccct

SEQ ID NO: 22538 - DNA, 120 bp, Artificial Sequence
  ENSG00000028310_39 (sequence is synthesized)
gggattctgttggcacctgtgtttacatgggttgaaaactgtttttacacggaaacttccagttccctcgtgccccgtgggttccgcccacttcttccctttcagttttgtatctgcgcc

SEQ ID NO: 22539 - DNA, 120 bp, Artificial Sequence
  ENSG00000028310_40 (sequence is synthesized)
gtgaggacttgtctcctaatcttcgtatcaactccgtgtcccattgagctgaccttccgcctctcccccagggccctggccatcctgtgggctctgagactttgcatggatccgcggtgg

SEQ ID NO: 22540 - DNA, 120 bp, Artificial Sequence
  ENSG00000028310_41 (sequence is synthesized)
ggagctgcccccacacaaacgtccggctcttctcaggccaggtggctgccctgacatggcatgatgtccagcgcatggacgtcacccttgcactggagcccagccaaccgctgcatgaca

SEQ ID NO: 22541 - DNA, 120 bp, Artificial Sequence
  ENSG00000028310_42 (sequence is synthesized)
gccctcttcccccttgaaccccaagtctgcacacaccagtgcctcctcttcctggatcctcctgatggcctgtacacagaactggggtgtgggtggtgggtttttaaatgaaaaccagtc

SEQ ID NO: 22542 - DNA, 120 bp, Artificial Sequence
  ENSG00000028310_43 (sequence is synthesized)
cacacatgcttgagggctggagccgcctgccgtcagggcagtgccatgctgacctgctgaccgttccattttgtcaaggctcatgagcaattttaaatgtttactcgtgggtgaaggttt

SEQ ID NO: 22543 - DNA, 120 bp, Artificial Sequence
  ENSG00000028310_44 (sequence is synthesized)
ttgtttcagctgtaccccctatagcagggccatggggagcctaagaggttctccttggcacctgtgcgcgctctgctgttgccggtgagtctgaaattccagggaatgccgtgaggggcc

SEQ ID NO: 22544 - DNA, 120 bp, Artificial Sequence
  ENSG00000028310_45 (sequence is synthesized)
ctctggcgtttgttcttggacaaatgtgctttcacccccattaagccctgcttgttggtcttcatttcatttgtgctgcgctgcccctcctgagggacagacgctcaggcagtgcttcct

SEQ ID NO: 22545 - DNA, 120 bp, Artificial Sequence
  ENSG00000028310_46 (sequence is synthesized)
taaagtcggatcggaatttggtgtcttattaccacggagtctgctttgtcaaccttcagatttctgttttaaagttaatgctggtcagctgtgcctgaattccaaaagaggggataatga

SEQ ID NO: 22546 - DNA, 120 bp, Artificial Sequence
  ENSG00000028310_47 (sequence is synthesized)
ggtgccaacagcagcagagggacaagagtgacatccaaggaaacccagcgtgaggcccagatccactcccagcagaggcacatgggacacgcttaattcccaggagtgagctgtgacaac

SEQ ID NO: 22547 - DNA, 120 bp, Artificial Sequence
  ENSG00000028310_48 (sequence is synthesized)
gggcaccgggcgaggtcctggccacgagggaggggttctgggcacgcgggagggggtcctgggatttcgggcagggaaccgggcacacgtgaggggtcctggattatgccgacaagcccc

SEQ ID NO: 22548 - DNA, 120 bp, Artificial Sequence
  ENSG00000028310_49 (sequence is synthesized)
ccctcatcttcctgtctttaagttctcccagctgttctagcctctgctcattacccagttctacagggcatgtctgtagtcactgttactacactttgtctactgattccctgatatcag

SEQ ID NO: 22549 - DNA, 120 bp, Artificial Sequence
  ENSG00000028310_50 (sequence is synthesized)
ctttgagtctctcctagtttggggctgtgttttcctgctccttcgtgtgtgttggaatcatttactggataccaggtggagtttgtagttgatgccgttgggtgataggtctgcttacac

SEQ ID NO: 22550 - DNA, 120 bp, Artificial Sequence
  ENSG00000028310_51 (sequence is synthesized)
acctttgaggcctggcggcctttgttctgagtttgagaagtggcttagactctgtgggaccttccccaggcattgtcagggtaagcccagagtcaccccggggagggtgaagctggtccc

SEQ ID NO: 22551 - DNA, 120 bp, Artificial Sequence
  ENSG00000028310_52 (sequence is synthesized)
ctggctggtggggctcaggtgaccacagacctgtgtgcaggttcttggcatgtctggtgcacagttcaggagtgggctgggagctcatcctttccacctctcagctggacgtgctgggtc

SEQ ID NO: 22552 - DNA, 120 bp, Artificial Sequence
  ENSG00000028310_53 (sequence is synthesized)
cccgatggctgtggcctggaacctgctccacagtgaactgggcgggtaccagggtctgccggcctcttgcaccctccatccagctgtctggcctttgtgtgttgaggacaggagcccaca

SEQ ID NO: 22553 - DNA, 120 bp, Artificial Sequence
  ENSG00000028310_54 (sequence is synthesized)
ccaggcccatcctgggttgtggccacatccctccacggtgtctgtgcgtgccatgacgtggtctgtgcggtgctaggtcttgtctgatgctttgcttgagcaaaggacgctgggtgtctg

SEQ ID NO: 22554 - DNA, 120 bp, Artificial Sequence
  ENSG00000028310_55 (sequence is synthesized)
ccttcccttcactcactgctaagggtaatgtctgtcctccaggcctgtccacctgtctgctgtgagctcgtccactcagtttccagagcaattattgtcctgagcagagaggcctgtctg

SEQ ID NO: 22555 - DNA, 120 bp, Artificial Sequence
  ENSG00000028310_56 (sequence is synthesized)
ggggtgataaagaaatgaaattgaaatgcagttagttttgagaatggtagttggcttttgcaaatttgttttcaggtgatcattataaaatccccccacctgcaccaatcacatccactg

SEQ ID NO: 22556 - DNA, 120 bp, Artificial Sequence
  ENSG00000028310_57 (sequence is synthesized)
gctctactcagcctacggagatgagacaggcgtgcagtgtgcgctgagatggacacccgctccgggagccagtgttccgtcaccccagaagccatactcaataatgaaaagctggtcttg

SEQ ID NO: 22557 - DNA, 120 bp, Artificial Sequence
  ENSG00000028310_58 (sequence is synthesized)
ccgccccgcatctccagagtgaacggctggtcgttacccctgcactacttccaggtggtgacctgggctgtcttcgtgggcctttcctcggccaccttcgggatcttcattcccttcctg

SEQ ID NO: 22558 - DNA, 120 bp, Artificial Sequence
  ENSG00000028310_59 (sequence is synthesized)
cctcacgcgtggaaatacattgcctacgtggtatccttttcatcgtggcatggtctaagcgggaggggttcctggaggaacttgcgatggacctggctgtggggtctgggccatggctgc

SEQ ID NO: 22559 - DNA, 120 bp, Artificial Sequence
  ENSG00000028310_60 (sequence is synthesized)
gccactcacaccatctgctaatgggacagctcactcttccctccaaaccatggccttggctcaagagcttccttgtttctggaatgttctttcctccagctccaggtgttgaaattctgc

SEQ ID NO: 22560 - DNA, 120 bp, Artificial Sequence
  ENSG00000028310_61 (sequence is synthesized)
ctggtctgggtctcctgttgaaggacgccctccactgggaaggatcctcttgccttcaccacttgtcttcaccagcccctgctcccctcttcctcttggggctgttgtggttgttgatac

SEQ ID NO: 22561 - DNA, 120 bp, Artificial Sequence
  ENSG00000028310_62 (sequence is synthesized)
tttttttttgttgtgtttgacacacatcttcttctcaccctctaacacagttctcaaccacagcacttttgtccctggagatgttggcagtgtccagaggcgtgttgatggtcccactgg

SEQ ID NO: 22562 - DNA, 120 bp, Artificial Sequence
  ENSG00000028310_63 (sequence is synthesized)
ggttgggggtgctgctggcaccagatggtagggagatgccaggggtgctgctccacaccctatgggacactgcacagtacacctggcctgtgtcccccacagcgagagctggccctgggc

SEQ ID NO: 22563 - DNA, 120 bp, Artificial Sequence
  ENSG00000028310_64 (sequence is synthesized)
aggcgtggtccctgcggtgtgtgttggttgggatcctccacagtgacagacggtgcgctctgcccacgtttccacacagctcttttgcttgtggagctcacccctttgcagagagctcat

SEQ ID NO: 22564 - DNA, 120 bp, Artificial Sequence
  ENSG00000028310_65 (sequence is synthesized)
ttccctgcggtctttggcctgcagaagtaaaatgaggggtggtgaattacacccctgctggttacacatggaaaactcaggagtgagaattttgtggagagcaagagaggtgagactggg

SEQ ID NO: 22565 - DNA, 120 bp, Artificial Sequence
  ENSG00000028310_66 (sequence is synthesized)
gtgctggctgccagccaggcggtccctcagcccctggagaagcggggtggggcctgcacaccgagtccttccagtgagtccagtgatgctctctcctcttcctcccagtcacctttctct

SEQ ID NO: 22566 - DNA, 120 bp, Artificial Sequence
  ENSG00000028310_67 (sequence is synthesized)
ggctggaggaggggagggggtgttccgttggtagcaaaacgcgaaccgctgaggcccgcagactcagttccaggatcctgggtgtgctgttcctcagcagaccctgccagggtctctgtg

SEQ ID NO: 22567 - DNA, 120 bp, Artificial Sequence
  ENSG00000028310_68 (sequence is synthesized)
aggagggagcctggcatgaggaggatctcggagggggtttcccttagttctgtccctcccctgagaactgcgaggggattgggcagacctgtccggatcccgcctactcctgcctttctc

SEQ ID NO: 22568 - DNA, 120 bp, Artificial Sequence
  ENSG00000028310_69 (sequence is synthesized)
gggcaccgggcgaggtcctggccacgagggaggggttctgggcacgcgggagggggtcctgggatttcgggcagggaaccgggcacacgtgaggggtcctgggtaggcgcttacgttcct

SEQ ID NO: 22569 - DNA, 120 bp, Artificial Sequence
  ENSG00000028310_70 (sequence is synthesized)
ggtagagggttctgggttcgaggctgcaagcccactcaccccggtcctggagactagggaagcatctgtgctggcttttgtgtggagctcagggagaagctgggctgccctttctcccgc

SEQ ID NO: 22570 - DNA, 120 bp, Artificial Sequence
  ENSG00000028310_71 (sequence is synthesized)
ctttccctccctctcccttgctcccgcagcagctccatgggtgtcagcgggcagcacgggcgcctgcaggaagtcaggcgagggtgaaccgaagtgctgggggtttctaggagggagatc

SEQ ID NO: 22571 - DNA, 120 bp, Artificial Sequence
  ENSG00000028310_72 (sequence is synthesized)
gggctccggggttccaggtccctcttaatccatcttcttgaacgagtaatgtgaacaacatcccacagggcctctgattatgccgacaagcccctggagaagcctctaaagctagtcctg

SEQ ID NO: 22572 - DNA, 120 bp, Artificial Sequence
  ENSG00000028310_73 (sequence is synthesized)
agttacggaatttaagggtttgctgactcacagaaacacaacagaacagacttaaaggagagtgggagaaaaggaaactcgatgagaggatcaggcagcgcctgagggtagatgttaaga

SEQ ID NO: 22573 - DNA, 120 bp, Artificial Sequence
  ENSG00000028310_74 (sequence is synthesized)
catttgatagctggttagtcggaagcacagaccacagcctggggctttcagttggcatcagccggtggggccatcctggagactgtgccctcacctgggaggctgccggtgcagcgcccc

SEQ ID NO: 22574 - DNA, 120 bp, Artificial Sequence
  ENSG00000028310_75 (sequence is synthesized)
cgagctgttctgacctccagcagcatttgtggtgcctggatccatgggtcccactgctttgcgtggtgacgttccacctgtctctgctggctctgttcaggcacttatggccgtgattta

SEQ ID NO: 22575 - DNA, 120 bp, Artificial Sequence
  ENSG00000028528_0 (sequence is synthesized)
gttgttgcggcttccgccgcgggtggaagaagatggcgtcgggtggtggtggctgtagcgcttcggagagactgcctccgcccttccccggcctggagccggagtccgagggggcggccg

SEQ ID NO: 22576 - DNA, 120 bp, Artificial Sequence
  ENSG00000028528_1 (sequence is synthesized)
ggggatcagaacccgaggctggggacagcgacaccgagggggaggacattttcaccggcgccgcggtggtcagtaaacatcagtctccaaagataactacatcccttcttcccatcaaca

SEQ ID NO: 22577 - DNA, 120 bp, Artificial Sequence
  ENSG00000028528_2 (sequence is synthesized)
atggctccaaagaaaatgggatccatgaagaacaagaccaagagccacaggatctctttgcagatgccacagtggagctatccttggacagcacacaaaataatcagaagaaggtgctag

SEQ ID NO: 22578 - DNA, 120 bp, Artificial Sequence
  ENSG00000028528_3 (sequence is synthesized)
ccaaaacactcatttctcttcctcctcaggaagccacaaattcttcgaagccccagccaacctatgaggagctagaggaagaagaacaggaggatcaatttgatttgacagtcggtataa

SEQ ID NO: 22579 - DNA, 120 bp, Artificial Sequence
  ENSG00000028528_4 (sequence is synthesized)
ctgatcctgagaagataggggatggtatgaatgcatatgtagcctacaaagttacaacacagacaagcttaccattgttcagaagcaaacagtttgcagtaaaaagaagatttagtgact

SEQ ID NO: 22580 - DNA, 120 bp, Artificial Sequence
  ENSG00000028528_5 (sequence is synthesized)
ttctgggtctttatgagaagctttccgagaagcactctcagaatggcttcattgtccctccgcccccggagaagagcctcatagggatgacaaaagtgaaagttgggaaggaagattctt

SEQ ID NO: 22581 - DNA, 120 bp, Artificial Sequence
  ENSG00000028528_6 (sequence is synthesized)
cttctgcagaatttcttgaaaaacggagggccgctttagaaaggtaccttcagaggattgtaaatcatcctaccatgttacaggaccctgacgtcagagagttcttggaaaaagaagagc

SEQ ID NO: 22582 - DNA, 120 bp, Artificial Sequence
  ENSG00000028528_7 (sequence is synthesized)
tgccacgtgccgtgggtacccagacattgagtggtgctggtctcctcaagatgttcaacaaagccacagatgccgtcagcaaaatgaccatcaagatgaatgaatcagacatttggtttg

SEQ ID NO: 22583 - DNA, 120 bp, Artificial Sequence
  ENSG00000028528_8 (sequence is synthesized)
aggagaagctccaggaggtagagtgtgaggagcagcgcttacggaaactgcatgctgttgtagaaactctagtcaaccataggaaagagctagcgctgaacacagcccagtttgcaaaga

SEQ ID NO: 22584 - DNA, 120 bp, Artificial Sequence
  ENSG00000028528_9 (sequence is synthesized)
gtctagccatgcttgggagctctgaggacaacacggcattgtcacgggcactctcccagctggctgaggtggaagaaaaaattgagcagctccaccaggaacaggccaacaatgacttct

SEQ ID NO: 22585 - DNA, 120 bp, Artificial Sequence
  ENSG00000028528_10 (sequence is synthesized)
tcctccttgctgagctcctgagtgactacattcgcctcctggccatagtccgcgctgccttcgaccagcgcatgaagacatggcagcgctggcaggatgcccaagccacactgcagaaga

SEQ ID NO: 22586 - DNA, 120 bp, Artificial Sequence
  ENSG00000028528_11 (sequence is synthesized)
agcgggaggccgaggctcggctgctgtgggccaacaagcctgataagctgcagcaggccaaggacgagatcctcgagtgggagtctcgggtgactcaatatgaaagggacttcgagagga

SEQ ID NO: 22587 - DNA, 120 bp, Artificial Sequence
  ENSG00000028528_12 (sequence is synthesized)
tttcaacagtggtccgaaaagaagtgatacggtttgagaaagagaaatccaaggacttcaagaaccacgtgatcaagtaccttgagacactcctttactcacagcagcagctggcaaagt

SEQ ID NO: 22588 - DNA, 120 bp, Artificial Sequence
  ENSG00000028528_13 (sequence is synthesized)
actgggaagccttccttcctgaggcaaaggccatctcctaatggaccaaggaccccagagcccacctgtgtgacgctgcctttttatacactgtcctcctccaccttgatggacccctag

SEQ ID NO: 22589 - DNA, 120 bp, Artificial Sequence
  ENSG00000028528_14 (sequence is synthesized)
tgatgcatcctgcctaggctggacttaaccccttcctccctgtccccacgaccaactgtccccagttactctaaccgttatttcatttagcttccatatatattttcttacctaagagaa

SEQ ID NO: 22590 - DNA, 120 bp, Artificial Sequence
  ENSG00000028528_15 (sequence is synthesized)
tagtttcctgctttaagcaaaagacctacaataggtggtggaattatgggatggggtggagtattgatataaatatataaatacaaatgtatatttttcaggatgtggtttaggaactgg

SEQ ID NO: 22591 - DNA, 120 bp, Artificial Sequence
  ENSG00000028528_16 (sequence is synthesized)
gaataacgttttctgttactcctgatggtgccatgaaaaggttatgtaataaaatattttaaaatcaggtcacatgactcagaatgttggtggtttttgcttaggctggggagcagttgg

SEQ ID NO: 22592 - DNA, 120 bp, Artificial Sequence
  ENSG00000028528_17 (sequence is synthesized)
gaatcaggtctggaatactcctaaccaagaagttgcccaggtatagtaagtttttctctaccgttcacaagttttgtgctgctgcttccctctggaaatggggtttctttctctccgcct

SEQ ID NO: 22593 - DNA, 120 bp, Artificial Sequence
  ENSG00000028528_18 (sequence is synthesized)
acctcagctacctgttctgagggtctcaatctgtttcgtattcccacttctttagggaaggagttttaaaaacatctcttaaaataagaggagcaaaatctattaaaacctattctcctg

SEQ ID NO: 22594 - DNA, 120 bp, Artificial Sequence
  ENSG00000028528_19 (sequence is synthesized)
caaaggaggcagagactttctctctctcttttttttttttttttggtgtccctatcattaagcaagagcctttctcttttattcttcctgcttccctaagctgctcagggttctctgagt

SEQ ID NO: 22595 - DNA, 120 bp, Artificial Sequence
  ENSG00000028528_20 (sequence is synthesized)
cttgccctctgatggcaagtcttatatataactaaacctatttttgtcacccatcaaaacacatcctcagtagactgtgtgaaggtgtgaaggtctgataatgacttgatgctttgtctc

SEQ ID NO: 22596 - DNA, 120 bp, Artificial Sequence
  ENSG00000028528_21 (sequence is synthesized)
catagacatgaaagccatgccctctgcctctagatagggtgatccaagagctcctgaaccttaggaggttcaaagaagctctactgtctgtgcccaggaggtagcctgccagcaagagcc

SEQ ID NO: 22597 - DNA, 120 bp, Artificial Sequence
  ENSG00000028528_22 (sequence is synthesized)
ctcaggagttgcacacacagccaaagggtgttcacacagatctctgccggtctagccaggggaggccagagtctcgtcagtcaaggatgggcttcccccttagctgtgtccacagctgct

SEQ ID NO: 22598 - DNA, 120 bp, Artificial Sequence
  ENSG00000028528_23 (sequence is synthesized)
caagctatactggtcagagtgggctttgaagctcctttgtgagctcgagctgctgactgccactatgggagccttgccacctccagcccctccatcccaaagacgctcctgccactgggg

SEQ ID NO: 22599 - DNA, 120 bp, Artificial Sequence
  ENSG00000028528_24 (sequence is synthesized)
ccccaggtcctgctgtatcagttctctttggtggggggctaaggtttggggcgaggcaacctgagacaagaaaacgcagtaaacattctgattccctgtacacagatgcagcaccagggg

SEQ ID NO: 22600 - DNA, 120 bp, Artificial Sequence
  ENSG00000028528_25 (sequence is synthesized)
aagggccagtggtgcaagtatttctttttaacaggtgaagtttttggaaaaagtcactctccctacccctcagtatccttaccatcaactttggttttatccttccagtctttattatat

SEQ ID NO: 22601 - DNA, 120 bp, Artificial Sequence
  ENSG00000028528_26 (sequence is synthesized)
gcttgcttttacatagttgtaataatatacacataaagtattttgtatcctgcttttatcattcaacattgtacatgttataagcattttactatattgttatatatcttcacaaagttg

SEQ ID NO: 22602 - DNA, 120 bp, Artificial Sequence
  ENSG00000028528_27 (sequence is synthesized)
atctgtaaagctgtgtaatttgaaggcatccatagggtgactgtaccataattttgattcatcccttgttgttggattcttggtcaggggttgtttgttttgttttattggtaactttaa

SEQ ID NO: 22603 - DNA, 120 bp, Artificial Sequence
  ENSG00000028528_28 (sequence is synthesized)
aattttgaatacaatttcagatttacagaaaagttgcaggaatatcacaaagaactcctatatatcttttatccagatttactgagtgtttacattttatcccatttgccttatctatat

SEQ ID NO: 22604 - DNA, 120 bp, Artificial Sequence
  ENSG00000028528_29 (sequence is synthesized)
ttcatgttgcattttcttaatcatttgagaataatttgcacagataccccattatgcccaaaacagtatgcatttccctaagaacaggacattctcttctaagagaagaagagaattact

SEQ ID NO: 22605 - DNA, 120 bp, Artificial Sequence
  ENSG00000028528_30 (sequence is synthesized)
ttaagcattattcagtatttttttaagtattattatcaaaatcaggaagtttaacagtgatttaatactgttatctaacccatgattcatatttaaattttgccatttatcccaataatg

SEQ ID NO: 22606 - DNA, 120 bp, Artificial Sequence
  ENSG00000028528_31 (sequence is synthesized)
tcctttgtagccattcttttaccttgtgcaggatcatgttacatttgtaaacgtgtgtctctcaatactgcagattcctcaactttcttttgtctttcattaccatgacatttttgaaga

SEQ ID NO: 22607 - DNA, 120 bp, Artificial Sequence
  ENSG00000028528_32 (sequence is synthesized)
atacaggctattttgtcgaatgttcctcagtttggatttgtgtgatggttccgcatgactaggtgagggttttgcattctgggtgggaatatcacagaagcagtgtgtcgtcagtgcgtc

SEQ ID NO: 22608 - DNA, 120 bp, Artificial Sequence
  ENSG00000028528_33 (sequence is synthesized)
gtaatcagcatataatgtcagttggtcccattaatgttgttaactctgttcaccgcttaggttggtgtctgccagatttcattttaaatttacgatttcctctttgtaatttacaagtaa

SEQ ID NO: 22609 - DNA, 120 bp, Artificial Sequence
  ENSG00000028528_34 (sequence is synthesized)
tatatagtatcagttgattagtcttgtcccagttattactgtcatgattgaccaacatgatttcctaactccataatgccttctacatttattggttgacattctacatacaaagaaaaa

SEQ ID NO: 22610 - DNA, 120 bp, Artificial Sequence
  ENSG00000028528_35 (sequence is synthesized)
catcctttctcaccatttatttattcacttgtttatcaatatggatgcagggattcctgttttactcagagttgcaagccattgctttgattttatcttgattctcaaattgtcccagat

SEQ ID NO: 22611 - DNA, 120 bp, Artificial Sequence
  ENSG00000028528_36 (sequence is synthesized)
ttatagcggcctcttgtgtgtttgtagcttgctcccatcatgttttgagtactttcttaccttctggcataacaagatgttccaggctcatcttgaatgttccctaccctagccctggaa

SEQ ID NO: 22612 - DNA, 120 bp, Artificial Sequence
  ENSG00000028528_37 (sequence is synthesized)
ccctggaatcagccatttctccagggagtcttggttccttataatggagaatggtatttatttatttttatttgatttgattattattactatttttgagacagagtctcgctcttgtcg

SEQ ID NO: 22613 - DNA, 80 bp, Artificial Sequence
  ENSG00000028528_38 (sequence is synthesized)
tagctgggattacaggtgcctgcccccacacccagctaatttttgcatttttggtagaaatgggggttttaccatgttgg

SEQ ID NO: 22614 - DNA, 120 bp, Artificial Sequence
  ENSG00000028528_39 (sequence is synthesized)
accatacccagccagagaatgttatttagaaaccaagatctgggtgccaaatgtgctgcttgttactggaatgtcattgcctctaggctctcaccatacagtgcaaagagatgatagata

SEQ ID NO: 22615 - DNA, 120 bp, Artificial Sequence
  ENSG00000028528_40 (sequence is synthesized)
gatagatagatagatagatgatagatatagatagatagatagattgattgatttgtagaaacaagataggttagagatacctgacataaatagatactaaaaatcatgaattcacactga

SEQ ID NO: 22616 - DNA, 120 bp, Artificial Sequence
  ENSG00000028528_41 (sequence is synthesized)
catgaattcacactgatgctttgagaccagccctgtaggtttattccagtctgcccccttttccatgttgttaactctttcctccagagagacaaagatttcaggttgctttgttaagtt

SEQ ID NO: 22617 - DNA, 120 bp, Artificial Sequence
  ENSG00000028528_42 (sequence is synthesized)
ccatctaatgatcattctgacgtaagtctgtttttcttatttccttggaatgatgtctcctctggtttcagaacttcctcctctgcttcctgtatcctgaggctggcggggccagttgtc

SEQ ID NO: 22618 - DNA, 120 bp, Artificial Sequence
  ENSG00000028528_43 (sequence is synthesized)
tttagggcttgtgcatttttgtaaagagcttgcacgtgtggaaatcaagtaggccagtagtgggttaggggtactgagccagaagcctctacaaggaataacaggagcacaaaggaagaa

SEQ ID NO: 22619 - DNA, 120 bp, Artificial Sequence
  ENSG00000028528_44 (sequence is synthesized)
ggtggtattccagctggggacccaggagggaggactttgtggagaacctgatgcttgaactgagtctaaaaggtgtaaaagtgtttgttgcttctgcctccctgtctgtctggcagggtg

SEQ ID NO: 22620 - DNA, 120 bp, Artificial Sequence
  ENSG00000028528_45 (sequence is synthesized)
aggtaggcgcatctagggaaatgtcaagtggcttggtgtagggtaaagtcagtgaggcccatggagaaaaacgagcaggagccacatcacatgggtgtctgataggacctgggaggcgct

SEQ ID NO: 22621 - DNA, 120 bp, Artificial Sequence
  ENSG00000028528_46 (sequence is synthesized)
ttccacattaccattgtcgcttcgtgatctggacacaccagaaggcgtgagactggaggcaggaagagcagccaggcttatccctaccctcaggagagctgaaaagggcaggtatggtgg

SEQ ID NO: 22622 - DNA, 120 bp, Artificial Sequence
  ENSG00000028528_47 (sequence is synthesized)
ggccagagctcaggagagtttcggaaccactgagatcggtccttgatttgatgagaggcttgaggggagagggaggtagctaggatgccccgcaagcttctggcccagacactgggcaga

SEQ ID NO: 22623 - DNA, 120 bp, Artificial Sequence
  ENSG00000028528_48 (sequence is synthesized)
caatgaaaccctttgtaacacatgaggcaataggtttggggcagatgggaggggaagcagtggtgggggcagtgagtgctgaaggtgttttaagaagcggctctgggccaggcacagtgg

SEQ ID NO: 22624 - DNA, 120 bp, Artificial Sequence
  ENSG00000028528_49 (sequence is synthesized)
cttatgcctgtattcctagcattttgggaggccgaggtgggagaatcacttgagcccaagaatttgagaccagcctggggaatatagtgagaccctgtccctacaaaaataaaaacaact

SEQ ID NO: 22625 - DNA, 120 bp, Artificial Sequence
  ENSG00000028528_50 (sequence is synthesized)
aatatagtgagaccctgtccctacaaaaataaaaacaactagctgggtgtgtggtggtgcatgcctgtaggcccagctacgcgggaacatcacctgagcccaggaggttgaggttgcagt

SEQ ID NO: 22626 - DNA, 120 bp, Artificial Sequence
  ENSG00000028528_51 (sequence is synthesized)
agcaagatcttgtctcaaaaaaaaaagcagctctggatgggaagggaggccagttgctttaagtaggggagatagagttaaaggaggctttgttttatttaaaggtgggacaaacttaag

SEQ ID NO: 22627 - DNA, 120 bp, Artificial Sequence
  ENSG00000028528_52 (sequence is synthesized)
catgttaataaaattcagagaagagaaagagaatgactatcagagccatgtttggaagaaaatggggtccagagcacaggaaggggacctgtgttcagagggtgcctcactgctgaggcc

SEQ ID NO: 22628 - DNA, 120 bp, Artificial Sequence
  ENSG00000028528_53 (sequence is synthesized)
acaggaaagaatctgtaggtggaggggaggccgaagaggggaagtttcatgcttgataattaaaattttctgagataggaatgtcatatttacctatttaagccaagtttttttagataa

SEQ ID NO: 22629 - DNA, 120 bp, Artificial Sequence
  ENSG00000028528_54 (sequence is synthesized)
aaggtatggaacctgctttccccttggctagttcagcgtttgggctccggagtgctgaagatgaggactggacttcgagctggtgtgatcccagtattcagtgtcagtactcagtgacaa

SEQ ID NO: 22630 - DNA, 120 bp, Artificial Sequence
  ENSG00000028528_55 (sequence is synthesized)
aataaatgagagaaacgggaataagaattgtcgcctacacaaaaataccagcaactgttaactcttcccagaagattttcattctgaatgctcctgtagctaggaaccctaaaaagtctt

SEQ ID NO: 22631 - DNA, 120 bp, Artificial Sequence
  ENSG00000028528_56 (sequence is synthesized)
tgaagcaactcaagttttaaaaaaggggaggaactcctggaaatctcaggatggggccaagatgtggctggagagtgtgtggtgatggagggcgtgtcttttgccgagcacactcagggc

SEQ ID NO: 22632 - DNA, 120 bp, Artificial Sequence
  ENSG00000028528_57 (sequence is synthesized)
ccacgggaagcccatagacttcaaggacatcaagccccaaggtggtgggattttccccaccagtacttggcagcctagggggaaggggagggcgggagaagataatggggatccctggct

SEQ ID NO: 22633 - DNA, 120 bp, Artificial Sequence
  ENSG00000028528_58 (sequence is synthesized)
ccaaacataggaggacacatctgtgctacagtgcgcacatgcctggatgtacactctgtctttggagacactggctaagattctctgctccatgtttggacagggtcgtgcctgatctga

SEQ ID NO: 22634 - DNA, 120 bp, Artificial Sequence
  ENSG00000028528_59 (sequence is synthesized)
gataaatggacaagaacaactgaagcctgtcttctggtgcatgtgtcacctgccgataactgcatcttgtgataaagttgggtgatttacagtctccaccaaatgctaaactctggggtc

SEQ ID NO: 22635 - DNA, 120 bp, Artificial Sequence
  ENSG00000028528_60 (sequence is synthesized)
ttacgcctttataactccatgggccccagcaaaggttcaggctcaaaacaggtgtcaaatagataactgttgaatgattgttccccagttgcaggctctgccacctggcgttcatactgt

SEQ ID NO: 22636 - DNA, 120 bp, Artificial Sequence
  ENSG00000028528_61 (sequence is synthesized)
ctgtgaaaggacccagctcacctttccctctttatctcccagtccttcccaacagcgccgacacctcatggaaactgattgcaaatgtgctacttctcacttctgtgtggcccgaggagg

SEQ ID NO: 22637 - DNA, 120 bp, Artificial Sequence
  ENSG00000028528_62 (sequence is synthesized)
ctgggttaatgctgggcttggtaccttaagcaccctttctcccttccccatcttcattctcagaattacacctgtctgaagcaggcattttccaatgccctagatgggaatataagtgta

SEQ ID NO: 22638 - DNA, 120 bp, Artificial Sequence
  ENSG00000028528_63 (sequence is synthesized)
aggagatgtgaagcatttgcctgtgtgtcagaacattcactgaggatcctcataggcacttctagaaaccaaatccttgaagatgactaaccagaaatgcccgtcatagcactgtttaca

SEQ ID NO: 22639 - DNA, 120 bp, Artificial Sequence
  ENSG00000028528_64 (sequence is synthesized)
gttgcaaaaactgaagccaattgaaatgtccatcaggaggggattaaatgaattatggtacagttacaccgttgaatattttacagccattgaagatgatatatagctatattcattgac

SEQ ID NO: 22640 - DNA, 120 bp, Artificial Sequence
  ENSG00000028528_65 (sequence is synthesized)
aaggaaaactcatattttttagtgaaaaaagcaggttatagaattgcatgatattcacatttatataaaactttatatatgggaaggatgttgattgaattgttaataactatggtcacc

SEQ ID NO: 22641 - DNA, 120 bp, Artificial Sequence
  ENSG00000028528_66 (sequence is synthesized)
tctagagatggaagtttgcattacctttaatttttaataccattttgtattgcttaaaatttgtatgtattatcgttaaaataagaaaaatcaaataaagctattttcattatgggaaaa

SEQ ID NO: 22642 - DNA, 88 bp, Artificial Sequence
  ENSG00000028528_67 (sequence is synthesized)
gataactacatcccttcttcccatcaacaatggctccaaagaaaatgggatccatgaagaacaagaccaagagccacaggatctcttt

SEQ ID NO: 22643 - DNA, 120 bp, Artificial Sequence
  ENSG00000028528_68 (sequence is synthesized)
gactgactcactcagtatccgtgataagttaaagatgaatcctgaaggggtaggggaaaggagatcttgagttctccagcacggagactctttacaattatttctccgcgggatccgctg

SEQ ID NO: 22644 - DNA, 120 bp, Artificial Sequence
  ENSG00000028528_69 (sequence is synthesized)
acagccaacgtctttcttacttcctgatcggacaggaagtaggtttcagttgctgtgaaaagggatgtcatgggaagccagtgaggtagtcagagtaaacatcagtctccaaagataact

SEQ ID NO: 22645 - DNA, 120 bp, Artificial Sequence
  ENSG00000028528_70 (sequence is synthesized)
ctgctttcccagtagtctgcatacttgtatctatttgtaattgtaaatgtaatgttggccttttccattagatgacaagttccatgaaaatgggaccatgagtttcatccactgtattct

SEQ ID NO: 22646 - DNA, 120 bp, Artificial Sequence
  ENSG00000028528_71 (sequence is synthesized)
tagctcctggcacatggcaggcactcagggaaagtatgtagccttatgaactgactgatctgagggaggcacttctgtaagccatagtattggtcactggcatgaggccacctactggat

SEQ ID NO: 22647 - DNA, 120 bp, Artificial Sequence
  ENSG00000028528_72 (sequence is synthesized)
gcactaacatgtggctgcagaacctgcccttgctcagtctgtccctggtgcagctgctgggagagcctgcctcgaggcagagccagcagagctcttgaagagctggttgtgctcctcctc

SEQ ID NO: 22648 - DNA, 120 bp, Artificial Sequence
  ENSG00000028528_73 (sequence is synthesized)
tacccacctgacctggtaagcattggagcttctctgacccctgcaagacattctttccccagatgggcaggggttgcccagtggagtagtagcagaggctggaagacagaagcatctttg

SEQ ID NO: 22649 - DNA, 120 bp, Artificial Sequence
  ENSG00000028528_74 (sequence is synthesized)
gtgagtagctggggaccttaatggcagacatgaaaaactccacttgctgagaagccaccgccagcaccctggggacagctagcatatgaggcagggccacctcccttccagacctcgagg

SEQ ID NO: 22650 - DNA, 120 bp, Artificial Sequence
  ENSG00000028528_75 (sequence is synthesized)
cctggagctcctgcccatcctggcttctgcctgttgccccagttcttggtccctcagctctcttcacagtgaacccctgttacttgagggacccaagtgtgtctttgtttcttgaacccc

SEQ ID NO: 22651 - DNA, 120 bp, Artificial Sequence
  ENSG00000028528_76 (sequence is synthesized)
gggtgttctgctggttccaaatgaacccagggcccatcccacccagaggtttggaaccccacagggggaagagcgctgattgagtctaaagggccgtggctgctgaggaagcctctgaga

SEQ ID NO: 22652 - DNA, 120 bp, Artificial Sequence
  ENSG00000028839_0 (sequence is synthesized)
ctcgcacccggaacaacaaagcaaggaagacggagtccgagcctcgggggctcctagcaacgggccggggcgggagttccatggagactggggagcgcgcccgtctcatcctcatccttg

SEQ ID NO: 22653 - DNA, 120 bp, Artificial Sequence
  ENSG00000028839_1 (sequence is synthesized)
tcctccagcttctccttcgcatccgacgcaaccggcagcagcgctgccgccgcgtcctcagccaccgctccctcttcccacggatgtgatcttcgtggtggaaagctaaattttaaaacc

SEQ ID NO: 22654 - DNA, 120 bp, Artificial Sequence
  ENSG00000028839_2 (sequence is synthesized)
accccaatggatgcagacagtgatgttgcattggacattctaattacaaatgtagtctgtgtttttagaacaagatgtcatttaaacttaaggaagattgctttggaaggagcaaatgta

SEQ ID NO: 22655 - DNA, 120 bp, Artificial Sequence
  ENSG00000028839_3 (sequence is synthesized)
atttataaacgtgatgttggaaaagtattaatgaagcttagaaaacctagaattacagctacaatttggtcctcaggaaaaattatttgcactggagcaacaagtgaagaagaagctaaa

SEQ ID NO: 22656 - DNA, 120 bp, Artificial Sequence
  ENSG00000028839_4 (sequence is synthesized)
tttggtgccagacgcttagcccgtagtctgcagaaactaggttttcaggtaatatttacagattttaaggttgttaacgttctggcagtgtgtaacatgccatttgaaatccgtttgcca

SEQ ID NO: 22657 - DNA, 120 bp, Artificial Sequence
  ENSG00000028839_5 (sequence is synthesized)
gaattcacaaagaacaatagacctcatgccagttacgaacctgaacttcatcctgctgtgtgctatcggataaaatctctaagagctacattacagattttttcaacaggaagtatcaca

SEQ ID NO: 22658 - DNA, 120 bp, Artificial Sequence
  ENSG00000028839_6 (sequence is synthesized)
gtaacagggcccaatgtaaaggctgttgctactgctgtggaacagatttacccatttgtgtttgaaagcaggaaagaaattttataattcaccacttaattggttagaatctctaactga

SEQ ID NO: 22659 - DNA, 120 bp, Artificial Sequence
  ENSG00000028839_7 (sequence is synthesized)
gcaccttttaaacctgctgcacattggactcaaaaggaaaactggaccaacaataattgaggaaatagactcttttattcattcacggctacagtgtaagctccagtccctttggatttt

SEQ ID NO: 22660 - DNA, 120 bp, Artificial Sequence
  ENSG00000028839_8 (sequence is synthesized)
attccaaaccttgctgtaatataaaaggaagtttacaagacatgatattgctgcttttacaaaaggacattctatttattttcgcagtaattctcatgtccccataagcagagctgtcac

SEQ ID NO: 22661 - DNA, 120 bp, Artificial Sequence
  ENSG00000028839_9 (sequence is synthesized)
agtgtgcactaccttagattgttttattgtcgtcattgttatttttttccattttgagctaatgtgttttatttgtgaatagtcttttacatttttgtatgctgaatatgggcaccaaag

SEQ ID NO: 22662 - DNA, 120 bp, Artificial Sequence
  ENSG00000028839_10 (sequence is synthesized)
aacctgtaaaagttatctttttcaattgaatgtgcacaaataaaagtttggaaaagatctctcttcattctataacttttattccccattttctattttaacaaaaattgtattcatact

SEQ ID NO: 22663 - DNA, 120 bp, Artificial Sequence
  ENSG00000028839_11 (sequence is synthesized)
ctattttaacaaaaattgtattcatacttcttttttttaaaatctatgcaagcttaagactttggctaaagtgtgttggcttctttttgaagtgtattttgtgtgtgtgtgtgtgtgtgt

SEQ ID NO: 22664 - DNA, 120 bp, Artificial Sequence
  ENSG00000028839_12 (sequence is synthesized)
catgtgtatagtatcttttaatgctctgttaccaaataacaaataggaattttttttcttgcagattagaaataaaaacgtgtatataaactctagggaaccagactagaagtttataga

SEQ ID NO: 22665 - DNA, 120 bp, Artificial Sequence
  ENSG00000028839_13 (sequence is synthesized)
taaaggataatgttttatgttgctaatttaatatgatagaaaatgttaaataacttgtaaaggttaagaaattgtagttttaagaagagaaacctcttacccactagatggaaatgagaa

SEQ ID NO: 22666 - DNA, 120 bp, Artificial Sequence
  ENSG00000028839_14 (sequence is synthesized)
agaagctgtgatgaatggtgcctcatttggacctttgtttttctggaaagactcaacacctgtagttgtagagaagtgattgaggttcttgactttaatcttgggttgatgcccaagcct

SEQ ID NO: 22667 - DNA, 120 bp, Artificial Sequence
  ENSG00000028839_15 (sequence is synthesized)
atactaagagtcttgtcagaagttggtaacatggagatgttttaacaagaagtgcccataagctgcctctgtgccacagtgtaattatcaaatagccccacttgaatttgaaagccattt

SEQ ID NO: 22668 - DNA, 120 bp, Artificial Sequence
  ENSG00000028839_16 (sequence is synthesized)
tgtgtgatactgtccttccccttgctgtatcttatttaatggagttaaagagtgactattcagtatatgagattgctactcttaaagttataataaatatgcatttatgaaacagtgtct

SEQ ID NO: 22669 - DNA, 120 bp, Artificial Sequence
  ENSG00000028839_17 (sequence is synthesized)
ggagagtccaattagcttctcaggagaaacttaatggggacaatattccaacacaatgttccacaaaaacttgtatttccaaaatgtttttaaacctttgtggaaaaattgcaacatcct

SEQ ID NO: 22670 - DNA, 120 bp, Artificial Sequence
  ENSG00000028839_18 (sequence is synthesized)
aatctccatatatagtacattttccttactgtattataaaatcttgaaaacctagcttaggcactgcactgaacaacacatattatttttatcttttttcttctcaatgccttccctaac

SEQ ID NO: 22671 - DNA, 120 bp, Artificial Sequence
  ENSG00000028839_19 (sequence is synthesized)
ctcctgcttattccaaagtggaaagcaaaggctaacttacatttttccttcttgtgaaatatttcattgagatttttagacttgtatttttccttttttttaaaaaaaaagtgtttattt

SEQ ID NO: 22672 - DNA, 120 bp, Artificial Sequence
  ENSG00000028839_20 (sequence is synthesized)
cctttattttaagattcagtaggatagccaaattcatagagaataaaattacatgaaagagttacaagctcactgttttaaagacttgacatttttcatttagttttaattaacagtaat

SEQ ID NO: 22673 - DNA, 120 bp, Artificial Sequence
  ENSG00000028839_21 (sequence is synthesized)
aagtcacctcctgtttttcaatgttcaccaaaaaaagaaacatagaatagggggaaaacatgcttatatagccaaggtacagatccagatgatgtaacctttttagtattcgcatgactt

SEQ ID NO: 22674 - DNA, 120 bp, Artificial Sequence
  ENSG00000028839_22 (sequence is synthesized)
gaaaactgggcagatcaatagataatcgaagtgctttatctgaagggagagggtaaagacagtgtgaccaggtttgttttcagggctgccgaatgagcctcacctaacagtgtccatggg

SEQ ID NO: 22675 - DNA, 120 bp, Artificial Sequence
  ENSG00000028839_23 (sequence is synthesized)
taattcgctaaccttaacaaagatgggaagaagtgagtgctctgatgtcttctgctggctctccataagtactgtaaattttttttataaataaaaactgtgaatatatatgtacaagtt

SEQ ID NO: 22676 - DNA, 120 bp, Artificial Sequence
  ENSG00000028839_24 (sequence is synthesized)
gtaagtatttccccctttttatttttgaaaatcaagaagcttgatttggtgtggtgcaatggatattggataaaaatttgaagacaaaattgtttagttacagactcaggataataaaag

SEQ ID NO: 22677 - DNA, 120 bp, Artificial Sequence
  ENSG00000028839_25 (sequence is synthesized)
aaaaatataaaagaatgctcaagatactgaagtcaaggtcactagtaataaactggctaggttgataaacaatttcctgcccatttataatgaagggctaaacaaaaaatacctgaagta

SEQ ID NO: 22678 - DNA, 120 bp, Artificial Sequence
  ENSG00000028839_26 (sequence is synthesized)
tatatagagtttgaactataaacacggaaggaaacatggggcagaacacacttcccttctctttccaaaaacaaaaaacaatgcatgctctgatttgcgtatgaaatacaccatgataga

SEQ ID NO: 22679 - DNA, 120 bp, Artificial Sequence
  ENSG00000028839_27 (sequence is synthesized)
attgagatctccaatctcctttccttttagcttccccctgccaatttttatacagataatacactgcagatccaggccttttagtcagtctcctgagtctctgatatagttttactactt

SEQ ID NO: 22680 - DNA, 120 bp, Artificial Sequence
  ENSG00000028839_28 (sequence is synthesized)
acataggtttatagtctctccacattgttataaaggaatgtaatagatcatgtttccttatatgacattgggacagtttgttaggaaccaataggaaaattccaagctaaataaaaagga

SEQ ID NO: 22681 - DNA, 120 bp, Artificial Sequence
  ENSG00000028839_29 (sequence is synthesized)
gctttggctcttaggattctcttttcttcaggttaatcatattttaaaattctttttcaagttaggttgttcgtgcttttaagttttttgtgtgtcttccatcacttaaatattagtaat

SEQ ID NO: 22682 - DNA, 120 bp, Artificial Sequence
  ENSG00000028839_30 (sequence is synthesized)
ttaatatgttatttggttcaagatttgattgtggattttctatcatacccaaattttattagtaagacctcttaacaagtctttaaaatcaactggagaagtaagagaacagttcatcgt

SEQ ID NO: 22683 - DNA, 120 bp, Artificial Sequence
  ENSG00000028839_31 (sequence is synthesized)
tgtgtgggtgaaacccacgttgctggtacaggtggccatcatagaaaagaacatgagggaattgtcctgatgtctgaatgtcatttattgtgtcttcagttatctgaacatcatcatcaa

SEQ ID NO: 22684 - DNA, 120 bp, Artificial Sequence
  ENSG00000028839_32 (sequence is synthesized)
ttatagcctgtgtaccgtaacctgaggtagtgatattcctgaggagtgtgaagaattggacactgtggattactatacattgtcatgaaagccttacaaggaggcagcttttctaggctt

SEQ ID NO: 22685 - DNA, 120 bp, Artificial Sequence
  ENSG00000028839_33 (sequence is synthesized)
gacttaataacttcaacctaattgcttagagatttggataaataacctaatggcctgactccttttctaatgttttactaacagctacttctaaataaatatggtcccaggattttaaaa

SEQ ID NO: 22686 - DNA, 120 bp, Artificial Sequence
  ENSG00000028839_34 (sequence is synthesized)
ggccgttacgcgattttcgctcccgcgggcagcgcctctcaggccactcccgagggaccccgaggacgcactcgggccccagggcgacggttcaaacgggccattgtgcgcccccggggt

SEQ ID NO: 22687 - DNA, 120 bp, Artificial Sequence
  ENSG00000028839_35 (sequence is synthesized)
cccccggcccctgcagggctacttgggcgcagagccgcggagggtctccgttcctagaggtcctcctatcccgggctgcctgagtcctcgccagcatccgccctctcccactcccatcct

SEQ ID NO: 22688 - DNA, 120 bp, Artificial Sequence
  ENSG00000028839_36 (sequence is synthesized)
tcctggatccgcctctcggttcccgagggacagtcccgaccgcaaacccacgtagagtaaggaatgtgggacaggcgacagaagtggcatacggtcctgcgttatccctccgtctcgcca

SEQ ID NO: 22689 - DNA, 120 bp, Artificial Sequence
  ENSG00000028839_37 (sequence is synthesized)
caccttgtgtctccatctctccccacttccttccctccgtctgtcatctgtcatccccggtcgctctaagaccaggattccaattcgcctagtgaggaatctcactaggggaatttatcg

SEQ ID NO: 22690 - DNA, 120 bp, Artificial Sequence
  ENSG00000029153_0 (sequence is synthesized)
gaccaagtggctcctgcgatggcggcggaagaggaggctgcggcgggaggtaaagtgttgagagaggagaaccagtgcattgctcctgtggtttccagccgcgtgagtccagggacaaga

SEQ ID NO: 22691 - DNA, 120 bp, Artificial Sequence
  ENSG00000029153_1 (sequence is synthesized)
ccaacagctatggggtctttcagctcacacatgacagagtttccacgaaaacgcaaaggaagtgattcagacccatcccagtcaggaatcatgacagaaaaagtggtggaaaagctttct

SEQ ID NO: 22692 - DNA, 120 bp, Artificial Sequence
  ENSG00000029153_2 (sequence is synthesized)
cagaatccccttacctatcttctttcaacaaggatagaaatatcagcctccagtggcagcagagtggaagatggtgaacaccaagttaaaatgaaggccttcagagaagctcatagccaa

SEQ ID NO: 22693 - DNA, 120 bp, Artificial Sequence
  ENSG00000029153_3 (sequence is synthesized)
actgaaaagcggaggagagataaaatgaataacctgattgaagaactgtctgcaatgatccctcagtgcaaccccatggcgcgtaaactggacaaacttacagttttaagaatggctgtt

SEQ ID NO: 22694 - DNA, 120 bp, Artificial Sequence
  ENSG00000029153_4 (sequence is synthesized)
caacacttgagatctttaaaaggcttgacaaattcttatgtgggaagtaattatagaccatcatttcttcaggataatgagctcagacatttaatccttaagactgcagaaggcttctta

SEQ ID NO: 22695 - DNA, 120 bp, Artificial Sequence
  ENSG00000029153_5 (sequence is synthesized)
tttgtggttggatgtgaaagaggaaaaattctcttcgtttctaagtcagtctccaaaatacttaattatgatcaggctagtttgactggacaaagcttatttgacttcttacatccaaaa

SEQ ID NO: 22696 - DNA, 120 bp, Artificial Sequence
  ENSG00000029153_6 (sequence is synthesized)
gatgttgccaaagtaaaggaacaactttcttcttttgatatttcaccaagagaaaagctaatagatgccaaaactggtttgcaagttcacagtaatctccacgctggaaggacacgtgtg

SEQ ID NO: 22697 - DNA, 120 bp, Artificial Sequence
  ENSG00000029153_7 (sequence is synthesized)
tattctggctcaagacgatcttttttctgtcggataaagagttgtaaaatctctgtcaaagaagagcatggatgcttacccaactcaaagaagaaagagcacagaaaattctatactatc

SEQ ID NO: 22698 - DNA, 120 bp, Artificial Sequence
  ENSG00000029153_8 (sequence is synthesized)
cattgcactggttacttgagaagctggcctccaaatattgttggaatggaagaagaaaggaacagtaagaaagacaacagtaattttacctgccttgtggccattggaagattacagcca

SEQ ID NO: 22699 - DNA, 120 bp, Artificial Sequence
  ENSG00000029153_9 (sequence is synthesized)
acagaacagtggagagattaatgtgaaaccaactgaatttataacccggtttgcagtgaatggaaaatttgtctatgtagatcaaagggcaacagcgattttaggatatctgcctcagga

SEQ ID NO: 22700 - DNA, 120 bp, Artificial Sequence
  ENSG00000029153_10 (sequence is synthesized)
acttttgggaacttcttgttatgaatattttcatcaagatgaccacaataatttgactgacaagcacaaagcagttctacagagtaaggagaaaatacttacagattcctacaaattcag

SEQ ID NO: 22701 - DNA, 120 bp, Artificial Sequence
  ENSG00000029153_11 (sequence is synthesized)
agcaaaagatggctcttttgtaactttaaaaagccaatggtttagtttcacaaatccttggacaaaagaactggaatatattgtatctgtcaacactttagttttgggacatagtgagcc

SEQ ID NO: 22702 - DNA, 120 bp, Artificial Sequence
  ENSG00000029153_12 (sequence is synthesized)
tggagaagcatcatttttaccttgtagctctcaatcatcagaagaatcctctagacagtcctgtatgagtgtacctggaatgtctactggaacagtacttggtgctggtagtattggaac

SEQ ID NO: 22703 - DNA, 120 bp, Artificial Sequence
  ENSG00000029153_13 (sequence is synthesized)
agatattgcaaatgaaattctggatttacagaggttacagtcttcttcataccttgatgattcgagtccaacaggtttaatgaaagatactcatactgtaaactgcaggagtatgtcaaa

SEQ ID NO: 22704 - DNA, 120 bp, Artificial Sequence
  ENSG00000029153_14 (sequence is synthesized)
taaggagttgtttccaccaagtccttctgaaatgggggagctagaggctaccaggcaaaaccagagtactgttgctgtccacagccatgagccactcctcagtgatggtgcacagttgga

SEQ ID NO: 22705 - DNA, 120 bp, Artificial Sequence
  ENSG00000029153_15 (sequence is synthesized)
tttcgatgccctatgtgacaatgatgacacagccatggctgcatttatgaattacttagaagcagaggggggcctgggagaccctggggacttcagtgacatccagtggaccctctagcc

SEQ ID NO: 22706 - DNA, 120 bp, Artificial Sequence
  ENSG00000029153_16 (sequence is synthesized)
tttgatttttaactccaaaaatgagaaacattttaaagcatttcatttacgaaaaactgtctcaactattcttaagtactgtattgatattgtttgtatcttttattaatgttctaccac

SEQ ID NO: 22707 - DNA, 120 bp, Artificial Sequence
  ENSG00000029153_17 (sequence is synthesized)
tttttatagatttgcatcttcctgtcacagggatgtggggaaatacgttttcctcccaagagaaccaagtttattatagactcctttattcagtgaaatggcttataatccactagttgc

SEQ ID NO: 22708 - DNA, 120 bp, Artificial Sequence
  ENSG00000029153_18 (sequence is synthesized)
catatttttgctaaaatatttctaaccaagaatactacttacatattgttttggctttgttttatttttgatgcagttttttttagttgaggtaatgtaatatattgatgttttcctttg

SEQ ID NO: 22709 - DNA, 80 bp, Artificial Sequence
  ENSG00000029153_19 (sequence is synthesized)
ccagtccccgcttccctgctccagagccgccgcctgggccggggcagggcgggcccggggctcctccatgctgccagccg

SEQ ID NO: 22710 - DNA, 120 bp, Artificial Sequence
  ENSG00000029153_20 (sequence is synthesized)
cggggctgcggagccgaccaagtggctcctgcgatggcggcggaagaggaggctgcggcgggaggtgaggttgccggtggcgaggcgacggccccaggtaaagtgttgagagaggagaac

SEQ ID NO: 22711 - DNA, 120 bp, Artificial Sequence
  ENSG00000029153_21 (sequence is synthesized)
tcatttataatagtaggtttgtataatttggaacattttccattccttgcgaatttccttaattgaggatagggcttacacactttaagaaaacagtgagtacttgaacatttaaaggga

SEQ ID NO: 22712 - DNA, 120 bp, Artificial Sequence
  ENSG00000029153_22 (sequence is synthesized)
cagtgcaatttatagtcataatcacattgaatactgtatttgatctttggagacttaggcaagcacagagctgggatatttatgctcagttgagcactttaagatgaattttaagtgaga

SEQ ID NO: 22713 - DNA, 120 bp, Artificial Sequence
  ENSG00000029153_23 (sequence is synthesized)
tgatttcttgcttaaaactcagaaagtcaaaagagtttcagctttccttacagaaaaggaaggatcttgggccctagatcttggggattaacctctgcatataagatttactcttaatag

SEQ ID NO: 22714 - DNA, 120 bp, Artificial Sequence
  ENSG00000029153_24 (sequence is synthesized)
aaaatacaaaaaaaattacccaggcactcactcttgaggtaactaaccaactcccacgataatgacagtccattcatgagcgcaaaggcctcatgacctaatggcacacacctgtaatcc

SEQ ID NO: 22715 - DNA, 120 bp, Artificial Sequence
  ENSG00000029153_25 (sequence is synthesized)
aaagtaaaaaaaaagatttaatataatcactgaagatctctattatagatagattaggtttttgacattggaaacatacttagggatagatttgtcctaaaggaaaaaagtaggcccggg

SEQ ID NO: 22716 - DNA, 120 bp, Artificial Sequence
  ENSG00000029153_26 (sequence is synthesized)
cagattaaatgtcttgtgtaaagtcacacattaaattcagtcacacattaaattcatagagttttaaatgtttaatgtatataaaccagtttctttatacacatttgggaaaacattggt

SEQ ID NO: 22717 - DNA, 120 bp, Artificial Sequence
  ENSG00000029153_27 (sequence is synthesized)
attacagttattgcctgtaaccaaaggtaataaaacaaaatgacaagtacatgtttaaaattatgaggcaatgagaaataatttaaaaaccaattttctagttataatttaaaatttgga

SEQ ID NO: 22718 - DNA, 120 bp, Artificial Sequence
  ENSG00000029153_28 (sequence is synthesized)
gagcatttttaacagtaattaatccagaggtggctcaaattgagtataagaattaagattatttaaaatactgcatgtctaccttctcggggatcatactttataacactttctgcttca

SEQ ID NO: 22719 - DNA, 120 bp, Artificial Sequence
  ENSG00000029153_29 (sequence is synthesized)
gtagctcttcatagcttgccaagtatgctcccatattttctctctcgtgcctcgcaaatgaaagtcagataggctgggaactcatggggcagccctcagacttcaatgtgggcttcaaat

SEQ ID NO: 22720 - DNA, 120 bp, Artificial Sequence
  ENSG00000029153_30 (sequence is synthesized)
ccagtttcctgttctatatggtgctacatctttccagaaaatttccctcagagcccctcgccaaaacaaagcattattttgaccctgcatgctatttctttagctgtaggtgatagatta

SEQ ID NO: 22721 - DNA, 120 bp, Artificial Sequence
  ENSG00000029153_31 (sequence is synthesized)
gaacttctgtcagacatgttaatgacaaacataccaacagacaataaccaaaagcaaatgtttccttcaagtgtgaaatgtgcaggggcttcgtgggcaaggatgtattggcacactgtc

SEQ ID NO: 22722 - DNA, 120 bp, Artificial Sequence
  ENSG00000029153_32 (sequence is synthesized)
ctcttgaactgatagtgtcccagcaatgttggagggttggcaccattcctggtccgacacttgaggacctgagagacatcaggtttagaatgagccaaagaaatcctacaagatggggag

SEQ ID NO: 22723 - DNA, 120 bp, Artificial Sequence
  ENSG00000029153_33 (sequence is synthesized)
aattggtgtgcagcagcctaagtgttatagttaagtctaaagaagtatgaaagatcccctgtgttctctaaattgagcagaggggcctgcctaccaatatcactttttaggggactgaac

SEQ ID NO: 22724 - DNA, 120 bp, Artificial Sequence
  ENSG00000029153_34 (sequence is synthesized)
cattgcaggttagacttggcttccaaagagtctgcctaagccaggggtggcagggtaggccatcatagctggatggcctcaaaagcagatgggggcagacttgccctcgtgatgccagga

SEQ ID NO: 22725 - DNA, 120 bp, Artificial Sequence
  ENSG00000029153_35 (sequence is synthesized)
tttgagaggcagagtttctagagggagaccagtgctgcctctcacagtggcagttttttctctttgcaagaggaggggctgttcaattccatagaccagtgggcagatagccagttgaat

SEQ ID NO: 22726 - DNA, 120 bp, Artificial Sequence
  ENSG00000029153_36 (sequence is synthesized)
actctgtgcatggtttgatcctttattagttcgctctaatatttttctgtagatccttttgtcctggactcaaaatctaatccatgcattgtatgataccgtagctctcctaaggtttgt

SEQ ID NO: 22727 - DNA, 120 bp, Artificial Sequence
  ENSG00000029153_37 (sequence is synthesized)
gtttccttcaaaatgttttagttttcttcaactaaatttgatttttgctgttagaagtgacatatttttatggtatacactatgttccttttttctactgcgagtcaattttttgaattt

SEQ ID NO: 22728 - DNA, 120 bp, Artificial Sequence
  ENSG00000029153_38 (sequence is synthesized)
ttccttttttctactgcgagtcaattttttgaattttcgtgagaaagaatatatctacaaattgcacgaaagtatcataaaaacagtactctagacttttcttttcttttcttttttttt

SEQ ID NO: 22729 - DNA, 88 bp, Artificial Sequence
  ENSG00000029153_39 (sequence is synthesized)
tgcagtggcgcgatcttggctcactgccatctctgcctcctgggttcacgccattctgcctcagcctccagagcagctgggaccgctt

SEQ ID NO: 22730 - DNA, 120 bp, Artificial Sequence
  ENSG00000029153_40 (sequence is synthesized)
tgagccactgcgcccggcctactctacactttttttaaccctaagaattaccactacagtaatgtagtggagtgggaagagtgcctggaatcagaagaccctgttgaggctgaatttagc

SEQ ID NO: 22731 - DNA, 120 bp, Artificial Sequence
  ENSG00000029153_41 (sequence is synthesized)
tgtatgacctcatgcaagccatttaaactctgtgcctcagcgtcctcatttttaaaaggaggtttgatctctatgtttacttccagctctgattctgggattctaatccacaggacttgg

SEQ ID NO: 22732 - DNA, 120 bp, Artificial Sequence
  ENSG00000029153_42 (sequence is synthesized)
gtgttagggtggaacctagaactgtgctgtccagtgcagtagccactagccacatgtggctactgagcacttgcaatgtggctagtacaaagtgagatgtgctatcaatgtaagatacat

SEQ ID NO: 22733 - DNA, 120 bp, Artificial Sequence
  ENSG00000029153_43 (sequence is synthesized)
atgtgctatcaatgtaagatacataccagattttgaagactagtattaccaaaagaatgtaaaatatcacattaataattttatattaattacatgttcaaatgatattttggatatact

SEQ ID NO: 22734 - DNA, 120 bp, Artificial Sequence
  ENSG00000029153_44 (sequence is synthesized)
tacttgtatctttttacttttttaatgtggctagaagaaaataaaattatacatgtggctcagattatatttctattggacagcgctgctctagaacattatattaagtggttattattg

SEQ ID NO: 22735 - DNA, 120 bp, Artificial Sequence
  ENSG00000029153_45 (sequence is synthesized)
aagtagaccaaagtttataccataaggatatttttccttaaataccatgtttgaagaacaattatttattgatccttgaatctgtaagatcaaataacaagtctctatccatgttaccaa

SEQ ID NO: 22736 - DNA, 120 bp, Artificial Sequence
  ENSG00000029153_46 (sequence is synthesized)
atttaaacttttgaaaataataaactttaaaatatcagatgtgttattacaggatgatacttggaatcaagtgaaatgagttatatggtcatcactaaatttagaaatctattgtgaaac

SEQ ID NO: 22737 - DNA, 120 bp, Artificial Sequence
  ENSG00000029153_47 (sequence is synthesized)
aaagacaaacaggaaagtacagaatagagacttttagtaaataaatggaatttaaaagaaagtgtttatttacagtgtcacgacagaaaaggatgtctttgttgtcatagtctttgaggg

SEQ ID NO: 22738 - DNA, 120 bp, Artificial Sequence
  ENSG00000029153_48 (sequence is synthesized)
atctccgtaaaatctggggcacaggtacaagaaatagccaatatttagttcccagaccatgtttagtagtgtccagtttcagatcatgctgccaagaggtatctccccctcaggtgggtc

SEQ ID NO: 22739 - DNA, 120 bp, Artificial Sequence
  ENSG00000029153_49 (sequence is synthesized)
atcactgagccctggaattggagactcatacttgcccagcacaatgttacgggcagacaggccgacatctatgattagctagaagccataaagaaaagctgctaagtggccactaggtgc

SEQ ID NO: 22740 - DNA, 120 bp, Artificial Sequence
  ENSG00000029153_50 (sequence is synthesized)
cacttttctgtttttgtaatgctttcattagcagatcttttttttccaagctccatggggcctatgagaggcatttatgatttttgtgcctacaataagtcagcctgtctggtgtgagtt

SEQ ID NO: 22741 - DNA, 120 bp, Artificial Sequence
  ENSG00000029153_51 (sequence is synthesized)
gttttatgagaaatgctttccaagggaggtctaggaagatcctgacacataagaactttggcttagagagctttccaggtgtagtgccaataaaaactgacctggaaagaaaacctgccc

SEQ ID NO: 22742 - DNA, 120 bp, Artificial Sequence
  ENSG00000029153_52 (sequence is synthesized)
agcacggaacatgctttctgaactcacttgagagtgtatggtgtatgtcacttctcatatattcttgagtttagatttgtcttttatacaatttttagctcttttccagttcacttgtgc

SEQ ID NO: 22743 - DNA, 120 bp, Artificial Sequence
  ENSG00000029153_53 (sequence is synthesized)
gtgctcgtctgtatattggtatttttaaatttttgtggtaaataatgaaaagagtgaaattatattttataattactcatttgtagtttttttttttaatttaataaacttcctccaaaa

SEQ ID NO: 22744 - DNA, 120 bp, Artificial Sequence
  ENSG00000029153_54 (sequence is synthesized)
ctcctgtggtttccagccgcgtgagtccagggacaagaccaacagctatggggtctttcagctcacacatgacagagtttccacgaaaacgcaaaggaagtgattcagacccatcccatc

SEQ ID NO: 22745 - DNA, 120 bp, Artificial Sequence
  ENSG00000029363_0 (sequence is synthesized)
agatcggaagtgacggagacgtgctagcgcgtcgaaggtagctctatggttttcctcgcgttcttgagtcgggaaatggccgctgtgtggttgcaacggagataaattcccggaaccgcg

SEQ ID NO: 22746 - DNA, 120 bp, Artificial Sequence
  ENSG00000029363_1 (sequence is synthesized)
attcggcgtgtcaggaattcgaatttagagtttaatttctcagagcattctctccaggaagaatttttacagtatctcaaagacttcacttgacttcttgatcctgcataaaaccaagga

SEQ ID NO: 22747 - DNA, 120 bp, Artificial Sequence
  ENSG00000029363_2 (sequence is synthesized)
gaaaagaaatgggtcgctccaattctagatcacattcttcaaggtcaaagtctagatcacagtctagttctcgatcaagatcaagatctcattctagaaagaagcgatacagttctaggt

SEQ ID NO: 22748 - DNA, 120 bp, Artificial Sequence
  ENSG00000029363_3 (sequence is synthesized)
ctcgttccagaacatattcaaggtctcgtagtagagatcgtatgtattctagagattatcgtcgcgattacagaaataatagaggaatgagacgaccttatgggtacagaggaaggggta

SEQ ID NO: 22749 - DNA, 120 bp, Artificial Sequence
  ENSG00000029363_4 (sequence is synthesized)
gagggtattatcaaggaggaggaggtagatatcatcgaggtggttatagacctgtctggaatagaaggcactctaggagtcctagacgaggtcgttcacgttccaggagtccaaaaagaa

SEQ ID NO: 22750 - DNA, 120 bp, Artificial Sequence
  ENSG00000029363_5 (sequence is synthesized)
gatccgtttcttctcaaagatccagaagcagatctcgccggtcatatagatcttctaggtctccaagatcatcctcttctcgttcttcatccccatatagcaaatctcctgtttctaaaa

SEQ ID NO: 22751 - DNA, 120 bp, Artificial Sequence
  ENSG00000029363_6 (sequence is synthesized)
gacgagggtctcaggaaaaacaaaccaaaaaagctgaaggggaaccccaagaagagagtccgttgaaaagtaaatcacaggaggaaccgaaagatacatttgaacatgacccatctgagt

SEQ ID NO: 22752 - DNA, 120 bp, Artificial Sequence
  ENSG00000029363_7 (sequence is synthesized)
ctatcgatgaatttaataagtcatcagccacatccggtgatatttggcctggcctttcagcttatgataatagtcctagatcaccccatagtccttcacctattgctacaccacctagtc

SEQ ID NO: 22753 - DNA, 120 bp, Artificial Sequence
  ENSG00000029363_8 (sequence is synthesized)
agagttcatcttgctctgatgctcccatgctcagtacagttcactctgcaaaaaatactccttctcagcattcacattccattcagcatagtcctgaaaggtctgggtctggttctgttg

SEQ ID NO: 22754 - DNA, 120 bp, Artificial Sequence
  ENSG00000029363_9 (sequence is synthesized)
gaaatggatctagtcgatacagtccttctcagaatagtccaattcatcacatcccttcacgaagaagtcctgcaaagacaatcgcaccacagaatgctccaagagatgagtctaggggcc

SEQ ID NO: 22755 - DNA, 120 bp, Artificial Sequence
  ENSG00000029363_10 (sequence is synthesized)
gttcctcgttttatcctgatggtggagatcaggaaactgcaaagactgggaagttcttaaaaaggttcacagatgaagagtctagagtattcctgcttgataggggtaataccagggata

SEQ ID NO: 22756 - DNA, 120 bp, Artificial Sequence
  ENSG00000029363_11 (sequence is synthesized)
aagaggcttcaaaagagaaaggatcagagaaagggagggcagagggagaatgggaagatcaggaagctctagattacttcagtgataaagagtctggaaaacaaaagtttaatgattcag

SEQ ID NO: 22757 - DNA, 120 bp, Artificial Sequence
  ENSG00000029363_12 (sequence is synthesized)
aaggggatgacacagaggagacagaggattatagacagttcaggaagtcagtcctcgcagatcagggtaaaagttttgctactgcatctcaccggaatactgaggaggaaggactcaagt

SEQ ID NO: 22758 - DNA, 120 bp, Artificial Sequence
  ENSG00000029363_13 (sequence is synthesized)
acaagtccaaagtttcactgaaaggcaatagagaaagtgatggatttagagaagaaaaaaattataaacttaaagagactggatatgtagtggaaaggcctagcactacaaaagataagc

SEQ ID NO: 22759 - DNA, 120 bp, Artificial Sequence
  ENSG00000029363_14 (sequence is synthesized)
acaaagaagaagacaaaaattctgaaagaataacagtaaagaaagaaactcagtcacctgagcaggtaaagtctgaaaagctcaaagacctctttgattacagtccccctctacacaaga

SEQ ID NO: 22760 - DNA, 120 bp, Artificial Sequence
  ENSG00000029363_15 (sequence is synthesized)
atctggatgcacgagaaaagtctaccttcagagaggaaagcccacttaggatcaaaatgatagcgagtgattctcaccgtcctgaagtcaaactcaaaatggcacctgttcctcttgatg

SEQ ID NO: 22761 - DNA, 120 bp, Artificial Sequence
  ENSG00000029363_16 (sequence is synthesized)
attctaacagacctgcttccttgactaaagacaggctgcttgctagtacacttgtccattctgtcaagaaggagcaagaattccgatccatctttgaccacattaagttgccacaggcca

SEQ ID NO: 22762 - DNA, 120 bp, Artificial Sequence
  ENSG00000029363_17 (sequence is synthesized)
gcaaaagcacttcagagtcatttattcaacacattgtgtccttggttcatcatgttaaagagcaatacttcaagtcagctgcaatgaccctaaacgagcggttcacttcgtatcagaaag

SEQ ID NO: 22763 - DNA, 120 bp, Artificial Sequence
  ENSG00000029363_18 (sequence is synthesized)
ccactgaagaacatagtactcggcaaaagagccctgaaatacacaggagaattgacatctcaccaagtaccctgaggaagcatacccgtttagcaggggaagagagagtttttaaagaag

SEQ ID NO: 22764 - DNA, 120 bp, Artificial Sequence
  ENSG00000029363_19 (sequence is synthesized)
aaaatcaaaagggagataaaaaattaaggtgtgactctgctgaccttcggcatgacattgatcgccgtagaaaagaaagaagtaaagaacggggagattccaagggctccagggaatcca

SEQ ID NO: 22765 - DNA, 120 bp, Artificial Sequence
  ENSG00000029363_20 (sequence is synthesized)
gtggatcaagaaagcaggaaaaaactccaaaagattacaaggaatacaaatcttacaaagatgacagtaaacataaaagagagcaagatcattctcgatcttcatcctcttcagcatcac

SEQ ID NO: 22766 - DNA, 120 bp, Artificial Sequence
  ENSG00000029363_21 (sequence is synthesized)
cttcttctcccagttctcgagaagaaaaggagagtaagaaggaaagagaagaagaatttaaaactcaccatgaaatgaaagaatactcaggctttgcaggagttagccgaccacgaggaa

SEQ ID NO: 22767 - DNA, 120 bp, Artificial Sequence
  ENSG00000029363_22 (sequence is synthesized)
ccttttttcgaattagaggcagaggaagagccagaggagtttttgctgggacaaatactggtccaaacaactcaaatactacttttcaaaagagaccgaaggaagaggaatgggatccag

SEQ ID NO: 22768 - DNA, 120 bp, Artificial Sequence
  ENSG00000029363_23 (sequence is synthesized)
aatataccccaaagagcaagaagtacttcttgcatgacgacagagatgatggtgtggattattgggccaaaagaggaagaggtcgtggtacttttcaacgtggcagagggcgctttaact

SEQ ID NO: 22769 - DNA, 120 bp, Artificial Sequence
  ENSG00000029363_24 (sequence is synthesized)
tcaaaaaatcaggtagcagtcctaaatggactcatgacaaataccaaggggatgggattgttgaagatgaagaagagaccatggaaaataatgaagaaaagaaggacagacgcaaggaag

SEQ ID NO: 22770 - DNA, 120 bp, Artificial Sequence
  ENSG00000029363_25 (sequence is synthesized)
aaaaggaataataaatatgaagtaagattacaacagagcagaacttgcacccaccattttttttacctgatttttgttttcaaataagaatgtaagcattttacttaaattttactgttt

SEQ ID NO: 22771 - DNA, 120 bp, Artificial Sequence
  ENSG00000029363_26 (sequence is synthesized)
gcaagtagtctatagaaattttgttttaagtcttcaaatatcttgagaaatagtagactgtatgttgaaaattgtactgaaataaagtagaaaattgttacgtaccatatttgtaactat

SEQ ID NO: 22772 - DNA, 120 bp, Artificial Sequence
  ENSG00000029363_27 (sequence is synthesized)
caacttttaaaacttttaacgtttttgttacatgcattgtaattctgctttgtctataagatatggtcaagtacagctctgtgaaagttctgattctcttccttccctgtttgtcaatgt

SEQ ID NO: 22773 - DNA, 120 bp, Artificial Sequence
  ENSG00000029363_28 (sequence is synthesized)
tttattctgaagtaaacgttagctctacatataaatcctggaacagaaattgtttatagagactacactaattattttaactgtatacatctgtttaatttgaacacactacatcgtagg

SEQ ID NO: 22774 - DNA, 120 bp, Artificial Sequence
  ENSG00000029363_29 (sequence is synthesized)
gtgactgatttttgaagtataccacagacaaaaagttgttactatggtaaactaagctagtttaacacttgagcaaatgcttaagaaggaattaaaaaaaaaaagctttgccaatagcta

SEQ ID NO: 22775 - DNA, 120 bp, Artificial Sequence
  ENSG00000029363_30 (sequence is synthesized)
aaaagtacaagctattaaaaatcagattgaaaagttttgagaaaatgttatttttactgaaagcaagcagtggcctataaagaacattcttaggagccttttctatttgcgttcaaaact

SEQ ID NO: 22776 - DNA, 120 bp, Artificial Sequence
  ENSG00000029363_31 (sequence is synthesized)
gctatttgtgagaggaaactggtttgtaacaatactgcaaatagaaaccccatttctactgaacatcctagttttaaacagaagaaaaactgtaatcctggggttggtatgtaggaggtc

SEQ ID NO: 22777 - DNA, 120 bp, Artificial Sequence
  ENSG00000029363_32 (sequence is synthesized)
tatcctgcagaataagttgatacattagtacctgatttcatatcttacatatttatttgagctgaacattagtttgtagtgtaactattagtaaaaatagagaaacacagcatactgttc

SEQ ID NO: 22778 - DNA, 120 bp, Artificial Sequence
  ENSG00000029363_33 (sequence is synthesized)
attaatagtattttaaaaaaattgtttttcaaatgtcaccaataaaagttttggcaggaagcttgttgcggcattgatctaacctttttcccccccatttcagttgcagtttttgtagaa

SEQ ID NO: 22779 - DNA, 120 bp, Artificial Sequence
  ENSG00000029363_34 (sequence is synthesized)
tggctttttctttttcctcttaagagttctattcttcaggtagataatttttcaaatgtgaattatcttttgtgtctatattgatagctcttaaaggagtgaaaatctaaaatagtaaat

SEQ ID NO: 22780 - DNA, 120 bp, Artificial Sequence
  ENSG00000029363_35 (sequence is synthesized)
ttcaatgttaagtgtctgctttatgggcatatataaaagtagacacatttcatttgttaatttagttgtgtgtgtgtgttaaaaggagctaatgcttattctgttaatgtaaacttttga

SEQ ID NO: 22781 - DNA, 120 bp, Artificial Sequence
  ENSG00000029363_36 (sequence is synthesized)
agatcttaagtgtattgctctttcatcttaaacactttcgaggatttgcagtgcgtctagcacctagattacagccaggaacattggttaagaactgttggaaacaaaactaaaagcaaa

SEQ ID NO: 22782 - DNA, 120 bp, Artificial Sequence
  ENSG00000029363_37 (sequence is synthesized)
ctcaacatatgtgatgtttatggccctcagatccttagtattgtgtgattttcccccgttaacatgtctttctaaaattgtctattaaagcagaggaaatacctgccaaaggaagtatgt

SEQ ID NO: 22783 - DNA, 120 bp, Artificial Sequence
  ENSG00000029363_38 (sequence is synthesized)
attgcattaatcagggcataactaatattctcctgttcagaataatacttatttacgtgtgaaagcaacatggatgtgattcccaacacagaattttcatgacccttttattgtatacaa

SEQ ID NO: 22784 - DNA, 120 bp, Artificial Sequence
  ENSG00000029363_39 (sequence is synthesized)
ataaataccataacagttacttggttagacatcaaatctgtgtgcatgactatgtgcttatccacttaagacaataggtaaaaggggatctgagaaattatgtaatagggagtgggaata

SEQ ID NO: 22785 - DNA, 120 bp, Artificial Sequence
  ENSG00000029363_40 (sequence is synthesized)
aaactacttaattcctgtgggcaggttatattttaagttcaaatgcattgctttaacctttggttacttttattctgttaaacagaattgaagaaagagtattataccagagtgtagtag

SEQ ID NO: 22786 - DNA, 120 bp, Artificial Sequence
  ENSG00000029363_41 (sequence is synthesized)
gctagggtgattgtaagaactctgtaatagaatgtcattgtggatgttacctttttcagatccaagcatataaaaagcctgtatattttttaaaaacacatcttaactccacgctttacg

SEQ ID NO: 22787 - DNA, 120 bp, Artificial Sequence
  ENSG00000029363_42 (sequence is synthesized)
atattataaaagttgaatggttcctcttggtaaggatatttgcttacaagtgctaggaaataactcactgatacctgcgttaacatactttgttttgcctagagaggggcaataaaaatg

SEQ ID NO: 22788 - DNA, 120 bp, Artificial Sequence
  ENSG00000029363_43 (sequence is synthesized)
aaccaaaggatatttccagaaaggattaagaaagctgtttaagaaggccatgactctttaggtgtgtatgtgtacctttcagcatcctaggaatttttatactaaaagcaaaatgttttt

SEQ ID NO: 22789 - DNA, 120 bp, Artificial Sequence
  ENSG00000029363_44 (sequence is synthesized)
tccagttagtcttcttcaaggaattactattgttccttttgtcacaggtaaaatcagtgttgggaattataatttgagaaaaatattacccagtaacattgaatgtagatggctaaacga

SEQ ID NO: 22790 - DNA, 120 bp, Artificial Sequence
  ENSG00000029363_45 (sequence is synthesized)
ttcttactcagtgtgatgtataatgatgcaacagggacccttgtaaattgtcatacgccaataaaatgtcacaagtaataactgctgttgtttgtttacctgtgtctatttcacacatct

SEQ ID NO: 22791 - DNA, 120 bp, Artificial Sequence
  ENSG00000029363_46 (sequence is synthesized)
tatttctgtggcctattttagaatatcagcgcatctgttaggaagattactggtgtggtaaggcttgataaatgctttataaactccctcaaacctttctttactgtttttttgttttgt

SEQ ID NO: 22792 - DNA, 120 bp, Artificial Sequence
  ENSG00000029363_47 (sequence is synthesized)
tgtttttgtttttgtttttgtttttcccttgtctcccctgggaaaatgggaaattttacagttggtaaatctaagccaaaattattttgaaataaaggaattctggatgtccagtttagt

SEQ ID NO: 22793 - DNA, 120 bp, Artificial Sequence
  ENSG00000029363_48 (sequence is synthesized)
ttctggatgtccagtttagtcctcgttttcttacgttaatctgggaccttatcacccataatatggtgattacttctctttctaaaaacatagtagctagtaaataagtaaaaagaattg

SEQ ID NO: 22794 - DNA, 120 bp, Artificial Sequence
  ENSG00000029363_49 (sequence is synthesized)
tcttttcattcactttaagtaagatgtggtataattcttaccatgtgccatcctgtcagttttaacaaagcattttcacagaaatttgtgtactaagacaaactgacacattttgactca

SEQ ID NO: 22795 - DNA, 120 bp, Artificial Sequence
  ENSG00000029363_50 (sequence is synthesized)
tacaaatggcaaattagtccttaaaaattctgtgagagaaataactctgtgtgtacatacatatgcatgtaaagtgttgtgtaagatcattggtagcttaattatactggataattgtaa

SEQ ID NO: 22796 - DNA, 120 bp, Artificial Sequence
  ENSG00000029363_51 (sequence is synthesized)
tgttatatacaaatttcttatataaaagtatgctgcattattaacatttgtttaacttttcttatttttctttttctgggtttcaactggaatcccattggtggggatgtaccttaagtt

SEQ ID NO: 22797 - DNA, 120 bp, Artificial Sequence
  ENSG00000029363_52 (sequence is synthesized)
tccttgtggaataatagactttcacatccagaaagagaagttcagaggcctttctcaatttacagagttgaagaggaaaggcaaatggaggaataaacttcattgtcattgggattaatt

SEQ ID NO: 22798 - DNA, 120 bp, Artificial Sequence
  ENSG00000029363_53 (sequence is synthesized)
tggctagactcaatctcttgagccttaaaatgagaaagtaatatccattacatgtttagagttctcaaatagttgatactattattaaatgtttcaaattttattggggtagatactaaa

SEQ ID NO: 22799 - DNA, 120 bp, Artificial Sequence
  ENSG00000029363_54 (sequence is synthesized)
aattagtacactgtcctaatgaagtttaaatgaacaagttttacatttcttaggattcaggaatatatggaatctagttgtatttaattgacttgagagccacagagattgtgttgattt

SEQ ID NO: 22800 - DNA, 120 bp, Artificial Sequence
  ENSG00000029363_55 (sequence is synthesized)
atgagctggactcctattgttttagaaacatgcagtaatgattaacttgtgtcaatgatggtaatgagaccaaacttgtacatttaattaagggtaccagttctttttatgttactagac

SEQ ID NO: 22801 - DNA, 120 bp, Artificial Sequence
  ENSG00000029363_56 (sequence is synthesized)
tataccttggcctttaaaaatgaatctcactgattaaagagaacaggcattattaggatagcattccaccacaactagaaacattcaaataatgtgtcttaattgtaatctgtatatagg

SEQ ID NO: 22802 - DNA, 120 bp, Artificial Sequence
  ENSG00000029363_57 (sequence is synthesized)
aaaatttttcctatggatatttttggtgttttaccacagtgaactgatttgtagcacttatgaagtgcagaaggtaatattcttgaaaatagaaaaaggttgggtgagcaggctttaatg

SEQ ID NO: 22803 - DNA, 120 bp, Artificial Sequence
  ENSG00000029363_58 (sequence is synthesized)
cctttcccccaagaatatacatcgaatttttcttaatcttttggggttggccagcttccagatttcattaataatgagctctgcctttaataaaagtacatgatcatagctacactgtat

SEQ ID NO: 22804 - DNA, 120 bp, Artificial Sequence
  ENSG00000029363_59 (sequence is synthesized)
gtttaggtggtgtgaaatgatttataatcacagcttgaactgtgtttgcttggtactgtcatagtgattacaaatttcatggaatgcgaagagcaacaataaataaaaaataccactcac

SEQ ID NO: 22805 - DNA, 120 bp, Artificial Sequence
  ENSG00000029363_60 (sequence is synthesized)
cctccagaatagtggattatttgctaccttgagtccttcactatggaaaataatttttcagtctcatttgtactagaagggaaaactaaactttctgttgagttctcaggatacttgtaa

SEQ ID NO: 22806 - DNA, 73 bp, Artificial Sequence
  ENSG00000029363_61 (sequence is synthesized)
gaaaactaaactttctgttgagttctcaggatacttgtaaggtggccgtgaaaaagaatgttaaatgcacttt

SEQ ID NO: 22807 - DNA, 120 bp, Artificial Sequence
  ENSG00000029363_62 (sequence is synthesized)
agatgacagcaaaaatgtatttgtcttttacacggcttatggtggatgaggacaaaaactttggaatagcaagctaacactgaaaaaaaaaatgacaaattaatgtgtcctattatccag

SEQ ID NO: 22808 - DNA, 120 bp, Artificial Sequence
  ENSG00000029363_63 (sequence is synthesized)
ttcaaagtaaaatagctgttgaaagatacaggcaaagttgaatcttctgtcttcctggcaaaaatggcataaaaactgagttgctagctcaaattcctgggtttcatggaattatgattg

SEQ ID NO: 22809 - DNA, 120 bp, Artificial Sequence
  ENSG00000029363_64 (sequence is synthesized)
aggcactacccttgtagtggccgtttcaagttttaatgattggttatgagacatgtgctggatattgggcgagcaatacttcaagtcagctgcaatgaccctaaacgagcggttcacttc

SEQ ID NO: 22810 - DNA, 120 bp, Artificial Sequence
  ENSG00000029363_65 (sequence is synthesized)
tgattcattattttctgatactaaaatgccagtttagaagctggcataaaatttaactctataatatgtgtatatatattttttctatttctcccctgaaatctgtattttatatctgtc

SEQ ID NO: 22811 - DNA, 120 bp, Artificial Sequence
  ENSG00000029363_66 (sequence is synthesized)
gttaatacttgttgaatgagtatcgtaaacacagtgctaaaccccaaaatgtattttattctcaaagaaccctgtgaaatggatctattgttatccttattgtaagcgagaaaatgagaa

SEQ ID NO: 22812 - DNA, 120 bp, Artificial Sequence
  ENSG00000029363_67 (sequence is synthesized)
tgtccaggtaacaagctctagtaaatggcagagcttggattgaaatccagttagtctgactccaggtctcaaattttactgtataatgtatggtaggtttctttgtatttgtccacaatg

SEQ ID NO: 22813 - DNA, 120 bp, Artificial Sequence
  ENSG00000029363_68 (sequence is synthesized)
gattacttgaagtaatgtcattggttcatattggcaaggtattagagcatccatagattatgttcctttttgttctgaggaagtagtgtattaatgaagtggaattagagactcttgatt

SEQ ID NO: 22814 - DNA, 120 bp, Artificial Sequence
  ENSG00000029363_69 (sequence is synthesized)
taatctattaattgctcttggattagatgtagtattgacagggacctgtgagcaactttcgaaacactctcctgttgaggtacaagaaattgaaagggtaggagttccttgtaacacttg

SEQ ID NO: 22815 - DNA, 120 bp, Artificial Sequence
  ENSG00000029363_70 (sequence is synthesized)
tttcttttcacctgctacatgcccttctgtcacaaacaaatctctcttaaagtaaagttaactaatcggacagtatttcttctaaatcaacagagcaatacttcaagtcagctgcaatga

SEQ ID NO: 22816 - DNA, 120 bp, Artificial Sequence
  ENSG00000029363_71 (sequence is synthesized)
tgtcagcttaattgctttcaattttgactgtgtaatcgaatgtttaaatttaaacaattaaaattatttgttttacagcaaaaatgtatttgtcttttacacggcttatggtggatgagg

SEQ ID NO: 22817 - DNA, 120 bp, Artificial Sequence
  ENSG00000029363_72 (sequence is synthesized)
ctgttgtaagattcagcagggtctttatctttttaaaagtatcacattttttgttttctttattttgcagtaaacataaaagagagcaagatcattctcgatcttcatcctcttcagcat

SEQ ID NO: 22818 - DNA, 120 bp, Artificial Sequence
  ENSG00000029363_73 (sequence is synthesized)
tactttttcctactcttctcttcctttcattaaagtaataaaagacataacttaatttaaaaatactaaagaactgaaccttattcttgacctttacagactactattttctaactggca

SEQ ID NO: 22819 - DNA, 120 bp, Artificial Sequence
  ENSG00000029363_74 (sequence is synthesized)
ggccctagcatgtttttcattattgatgtaaaacacatattgaaggagaatggaaacagactgtgtcaaagtttaacacccaattattttatttacataattttattaggggatagtgtt

SEQ ID NO: 22820 - DNA, 120 bp, Artificial Sequence
  ENSG00000029363_75 (sequence is synthesized)
aggatgagggataataaggatgtgctgagtggaaaaaatatttgtatcatttactgtacaaaaatttattatagattgttttggataaaaacctgcaaaattctcaagataattagcttt

SEQ ID NO: 22821 - DNA, 120 bp, Artificial Sequence
  ENSG00000029364_0 (sequence is synthesized)
gaagagatgccacttggcggccatggcagctgtagtatcggcgactccgggtcaaggcccggtcgagtgcagtaccatgggcagcaccgggtatagggcagagacagctttgtgtcaact

SEQ ID NO: 22822 - DNA, 120 bp, Artificial Sequence
  ENSG00000029364_1 (sequence is synthesized)
ttgctgctgaacccctaggacccatcgttagagacctgcaggactcctttcctcatcccaggctcggaggagagtttgctgggactggtgggctggtttcctgctctggggggcggatca

SEQ ID NO: 22823 - DNA, 120 bp, Artificial Sequence
  ENSG00000029364_2 (sequence is synthesized)
ccttcggggccgcctcttggagacaggggcgcctagggaacgaacaggttcgcttgagtcacttacccgccgccgcctaagacattgtgccaccctcaatccgacaatcgaagaaatcga

SEQ ID NO: 22824 - DNA, 120 bp, Artificial Sequence
  ENSG00000029364_3 (sequence is synthesized)
tcattcgcacattttccccattgacttttcccatctctgttaacccacgagaatctaatgactggcatctgagaacccagagcctgggaccttagattgctgtaagctttctctggtgct

SEQ ID NO: 22825 - DNA, 120 bp, Artificial Sequence
  ENSG00000029364_4 (sequence is synthesized)
aatatcagcaaaaagggtctgttgccgggtacgttcaagaggaaggtgcctcgtgaacacatctgctggtgggaaggcctaaagaactggaaagcccactctcttggaaccaccacacct

SEQ ID NO: 22826 - DNA, 120 bp, Artificial Sequence
  ENSG00000029364_5 (sequence is synthesized)
gtttaaagaacctaagcaccatttaaagccactggaaatttgttgtctagtggttgtgggtgaataaaggagggcagaatggatgatttcatctccattagcctgctgtctctggctatg

SEQ ID NO: 22827 - DNA, 120 bp, Artificial Sequence
  ENSG00000029364_6 (sequence is synthesized)
ttggtgggatgttacgtggccggaatcattcccttggctgttaatttctcagaggaacgactgaagctggtgactgttttgggtgctggccttctctgtggaactgctctggcagtcatc

SEQ ID NO: 22828 - DNA, 120 bp, Artificial Sequence
  ENSG00000029364_7 (sequence is synthesized)
gtgcctgaaggagtacatgccctttatgaagatattcttgagggaaaacaccaccaagcaagtgaaacacataatgtgattgcatcagacaaagcagcagaaaaatcagttgtccatgaa

SEQ ID NO: 22829 - DNA, 120 bp, Artificial Sequence
  ENSG00000029364_8 (sequence is synthesized)
catgagcacagccacgaccacacacagctgcatgcctatattggtgtttccctcgttctgggcttcgttttcatgttgctggtggaccagattggtaactcccatgtgcattctactgac

SEQ ID NO: 22830 - DNA, 120 bp, Artificial Sequence
  ENSG00000029364_9 (sequence is synthesized)
gatccagaagcagcaaggtctagcaattccaaaatcaccaccacgctgggtctggttgtccatgctgcagctgatggtgttgctttgggagcagcagcatctacttcacagaccagtgtc

SEQ ID NO: 22831 - DNA, 120 bp, Artificial Sequence
  ENSG00000029364_10 (sequence is synthesized)
cagttaattgtgtttgtggcaatcatgctacataaggcaccagctgcttttggactggtttccttcttgatgcatgctggcttagagcggaatcgaatcagaaagcacttgctggtcttt

SEQ ID NO: 22832 - DNA, 120 bp, Artificial Sequence
  ENSG00000029364_11 (sequence is synthesized)
gcattggcagcaccagttatgtccatggtgacatacttaggactgagtaagagcagtaaagaagccctttcagaggtgaacgccacgggagtggccatgcttttctctgccgggacattt

SEQ ID NO: 22833 - DNA, 120 bp, Artificial Sequence
  ENSG00000029364_12 (sequence is synthesized)
ctttatgttgccacagtacatgtcctccctgaggtgggcggaatagggcacagccacaagcccgatgccacgggagggagaggcctcagccgcctggaagtggcagccctggttctgggt

SEQ ID NO: 22834 - DNA, 120 bp, Artificial Sequence
  ENSG00000029364_13 (sequence is synthesized)
tgcctcatccctctcatcctgtcagtaggacaccagcattaaatgttcaaggtccagccttggtccagggccgtttgccatccagtgagaacagccggcacgtgacagctactcacttcc

SEQ ID NO: 22835 - DNA, 120 bp, Artificial Sequence
  ENSG00000029364_14 (sequence is synthesized)
tcagtctcttgtctcaccttgcgcatctctacatgtattcctagagtccagaggggaggtgaggttaaaacctgagtaatggaaaagcttttagagtagaaacacatttacgttgcagtt

SEQ ID NO: 22836 - DNA, 120 bp, Artificial Sequence
  ENSG00000029364_15 (sequence is synthesized)
agctatagacatcccattgtgttatcttttaaaaggcccttgacattttgcgttttaatatttctcttaaccctattctcagggaagatggaatttagttttaaggaaaagaggagaact

SEQ ID NO: 22837 - DNA, 120 bp, Artificial Sequence
  ENSG00000029364_16 (sequence is synthesized)
tcatactcacaatgaaatagtgattatgaaaatacagtgttctgtaattaagctatgtctctttcttcttagtttagaggctctgctactttatccattgatttttaacatggttcccac

SEQ ID NO: 22838 - DNA, 120 bp, Artificial Sequence
  ENSG00000029364_17 (sequence is synthesized)
catgtaagactggtgctttagcatctatgccacatgcgttgatggaaggtcatagcacccactcacttagatgctaaaggtgattctagttaatctgggattagggtcaggaaaatgata

SEQ ID NO: 22839 - DNA, 120 bp, Artificial Sequence
  ENSG00000029364_18 (sequence is synthesized)
gcaagacacattgaaagctctctttatactcaaaagagatatccattgaaaagggatgtctagagggatttaaacagctcctttggcacgtgcctctctgaatccagcctgccattccat

SEQ ID NO: 22840 - DNA, 120 bp, Artificial Sequence
  ENSG00000029364_19 (sequence is synthesized)
caaatggagcaggagaggtgggaggagcttctaaagaggtgactggtattttgtagcattccttgtcaagttctcctttgcagaatacctgtctccacattcctagagaggagccaagtt

SEQ ID NO: 22841 - DNA, 120 bp, Artificial Sequence
  ENSG00000029364_20 (sequence is synthesized)
ctagtagtttcagttctaggctttccttcaagaacagtcagatcacaaagtgtctttggaaattaagggatattaaattttaagtgatttttggatggttattgatatctttgtagtagc

SEQ ID NO: 22842 - DNA, 120 bp, Artificial Sequence
  ENSG00000029364_21 (sequence is synthesized)
ttttgttttttttttttttaattatttctcttagcagatcagcaatccctctagggacctaaatactaggtcagctttggcgacactgtgtcttctcacataaccacctgtagcaagatg

SEQ ID NO: 22843 - DNA, 120 bp, Artificial Sequence
  ENSG00000029364_22 (sequence is synthesized)
ttttcttctaacttttccctctagcctctcctcgccacaatttgctgcttactgctggtgttaatatttgtgtgggatgaattcttatcaggacaaccacttctcgaactgtaataatga

SEQ ID NO: 22844 - DNA, 120 bp, Artificial Sequence
  ENSG00000029364_23 (sequence is synthesized)
agataataatatctttattctttatcccccttcaaagaaattacctttgtgtcaaatgccgctttgttgagcccttaaaataccacctcctcatgtgtaaattgacacaatcactaatct

SEQ ID NO: 22845 - DNA, 120 bp, Artificial Sequence
  ENSG00000029364_24 (sequence is synthesized)
ggtaatttaaacaattgagatagcaaaagtgtttaacagactaggataatttttttttcatatttgccaaaatttttgtaaaccctgtcttgtcaaataagtgtataatattgtattatt

SEQ ID NO: 22846 - DNA, 120 bp, Artificial Sequence
  ENSG00000029364_25 (sequence is synthesized)
aatttatttttactttctataccatttcaaaacacattacactaagggggaaccaagactagtttcttcagggcagtggacgtagtagtttgtaaaaacgttttctatgacgcataagct

SEQ ID NO: 22847 - DNA, 120 bp, Artificial Sequence
  ENSG00000029364_26 (sequence is synthesized)
agcatgcctatgatttatttccttcatgaatttgtcactggatcagcagctgtggaaataaagcttgtgagccctctgctggccacagtgaggaaagtagcacaaataggatacagttgt

SEQ ID NO: 22848 - DNA, 120 bp, Artificial Sequence
  ENSG00000029364_27 (sequence is synthesized)
atgtagtcattggcaacaattgcatacaattttactaccaagagaaggtatagtatggaaagtccaaatgacttccttgattggatgttaacagctgactggtgtgagacttgaggtttc

SEQ ID NO: 22849 - DNA, 120 bp, Artificial Sequence
  ENSG00000029364_28 (sequence is synthesized)
atctagtccttcaaaactatatggttgcctagattctctctggaaactgactttgtcaaataaatagcagattgtagtgtctggtttggtttggacagtagtgctttctatcatattgtt

SEQ ID NO: 22850 - DNA, 120 bp, Artificial Sequence
  ENSG00000029364_29 (sequence is synthesized)
gtgtgcaatggtaatttgttctactggccaaagcctctttcagcagtgccttgccatcatgcttaaaagtttggctagtatatcttgctggatggagccttgaactccggcaaggattga

SEQ ID NO: 22851 - DNA, 120 bp, Artificial Sequence
  ENSG00000029364_30 (sequence is synthesized)
accatctgacttccaaatttgccttcccctctggacctcactattaacaagcaaacctttcagggccctcttagctctcagaagctatgtatgggctttcccagattttaaagctgctgc

SEQ ID NO: 22852 - DNA, 120 bp, Artificial Sequence
  ENSG00000029364_31 (sequence is synthesized)
ctcgagaactactcatttctctcctggtcagcagacagaaatagccatactaatctcatagggctcaaatgcatcttcaggcagcagggaaccaagcagcgtggcacaggccttcttgac

SEQ ID NO: 22853 - DNA, 120 bp, Artificial Sequence
  ENSG00000029364_32 (sequence is synthesized)
tggaggaagagcttgctggcatggtgggcagtattccaggagaggccatgtccgtgttcacttcttggcacatttcagttccgttttcctcttgtttaaaactgcctctttagatgtgga

SEQ ID NO: 22854 - DNA, 120 bp, Artificial Sequence
  ENSG00000029364_33 (sequence is synthesized)
tgccttaatgctgtaacacatttgaaaacattggcaatacttaagttgctgccatgattacagatggaattattggctaccaaagagacgcaattgatgatgagaagcatgattcttgct

SEQ ID NO: 22855 - DNA, 120 bp, Artificial Sequence
  ENSG00000029364_34 (sequence is synthesized)
tccatataaccaaagttaatcttaattgcaatttgactccgtttccttggtagggatagactttcttcagattccaagtgctctcttaaatggcaaattaagttaaagaatactactgct

SEQ ID NO: 22856 - DNA, 120 bp, Artificial Sequence
  ENSG00000029364_35 (sequence is synthesized)
ccattcccctcacttattctccagttaattgcttgtcagttccatttcaagaaagcagtgatgttccaggtttgattcagttttcctgtgcacactattgccaaatttttttttagcaaa

SEQ ID NO: 22857 - DNA, 120 bp, Artificial Sequence
  ENSG00000029364_36 (sequence is synthesized)
gattctgcactggaacgtagacagttggaaacagtactacctacctagaggttatgtgttttctctttctccccgctttcacctctttctttcccaattcaaaacagccaagtgagccct

SEQ ID NO: 22858 - DNA, 120 bp, Artificial Sequence
  ENSG00000029364_37 (sequence is synthesized)
gttctggtattttgaatcattagagaaaagaaagggagtggctgttttgagttgtcctttctttgcagaaaggagaaaatgtgattgtgttttttttttaccagcctacttctaagtgtc

SEQ ID NO: 22859 - DNA, 120 bp, Artificial Sequence
  ENSG00000029364_38 (sequence is synthesized)
actgcctggtttttctctttttcaaggattagaactaagaggacacaccagcatcggagtgtattaagcccctgaaacacatggtagctagggactgaacacaggaaccgtatgacagca

SEQ ID NO: 22860 - DNA, 120 bp, Artificial Sequence
  ENSG00000029364_39 (sequence is synthesized)
gcacaaacccccaaaggatgttcctgccttgtgggcccctgagccccttgggagactgagaatcatgaccagattcatccagaactgctgcagtgttaagtgaaaatcctctgtagttgt

SEQ ID NO: 22861 - DNA, 120 bp, Artificial Sequence
  ENSG00000029364_40 (sequence is synthesized)
tctgcagaggaaccttccttccattagaaaatttctgctcaatacagaatggtccacatcacccaaagtgcactgttggagatgctgtgaaattaaaacctctttgtacctgagacatct

SEQ ID NO: 22862 - DNA, 120 bp, Artificial Sequence
  ENSG00000029364_41 (sequence is synthesized)
agattcacctcaggaggcctgaaggaaatgtgtaacttgtgggaaagaactagacaaccatttaggaattctctagatatactcagcctaacccagtggcttaacacaaggagattggct

SEQ ID NO: 22863 - DNA, 120 bp, Artificial Sequence
  ENSG00000029364_42 (sequence is synthesized)
ttgatctttttttcttgtggcatcttccagcaagttagaagtctcatgggataagactgcagttcccctggttcaatagctggaacagtgattttaaatgtccctttttctggatccctt

SEQ ID NO: 22864 - DNA, 120 bp, Artificial Sequence
  ENSG00000029364_43 (sequence is synthesized)
gtaaacatgaaatcattccatggatggctgccttataattttgtctctttccactttaattgtgaatggttaaaaaaatgctgttttctgatattaaatttttattagtgcataccttaa

SEQ ID NO: 22865 - DNA, 120 bp, Artificial Sequence
  ENSG00000029364_44 (sequence is synthesized)
aacattactagatccagctggacctgactgtaaagctcatacactcaaccactacactgttattgttgttgttgtttatagtattttatgtttccttgtttccaaatatagctgatggtg

SEQ ID NO: 22866 - DNA, 120 bp, Artificial Sequence
  ENSG00000029364_45 (sequence is synthesized)
aggcgggcgcgcaaccgcagggcggaccggggctccgaggcctagagtcaggcctggcgtccctgcggcgggaagaagggtcaatccaccgactagagtggcggggagcatcacgcggcg

SEQ ID NO: 22867 - DNA, 120 bp, Artificial Sequence
  ENSG00000029364_46 (sequence is synthesized)
ctgcatggggctcgtggggaggggaaaacgtatggggctggggtcgctctggaggccggggactcggactcgggtagccgcggaggcctttctcaccatcgcgccaaactctcttcgcta

SEQ ID NO: 22868 - DNA, 120 bp, Artificial Sequence
  ENSG00000029364_47 (sequence is synthesized)
cagcagctgccgacaccgccgccgttacacgagcttaactacaacgccgctaacagccaatcctcgcgagaggagccgccggaagtcgtcgaaagtgcaacgcaaaagagccttttggat

SEQ ID NO: 22869 - DNA, 120 bp, Artificial Sequence
  ENSG00000029364_48 (sequence is synthesized)
aaggcagaagacatttgggaattttttcatcatgaactttaagttgaaggagttaatgattggctggattacaatataaaaagtggatgtctttacagtaaagaaaacaccaccaagcaa

SEQ ID NO: 22870 - DNA, 120 bp, Artificial Sequence
  ENSG00000029364_49 (sequence is synthesized)
agtcacttccggcagctagagcagctactgactctgtttcagccatcttcgataaaggcaaaaaggtaagggaaagtttccaagctttaggaagaattattttttttcaagacgctgtct

SEQ ID NO: 22871 - DNA, 120 bp, Artificial Sequence
  ENSG00000029364_50 (sequence is synthesized)
tccgtactttcgttattaaacatacggctcaagtgatcaccggtatagacagtgacatcagacatctttcattagccctactcaaaaatggcggcaacgaacgactgaagctggtgactg

SEQ ID NO: 22872 - DNA, 120 bp, Artificial Sequence
  ENSG00000029364_51 (sequence is synthesized)
aatgggacccaagtgggatcaagatcctggaggtttttttcaaagaattgtaacagaagatgaaacatggctttaccaacgatcctgaaggcaaaccacattcaaagcaatggctactga

SEQ ID NO: 22873 - DNA, 120 bp, Artificial Sequence
  ENSG00000029364_52 (sequence is synthesized)
gaagtggaagtggtcagtcaaagcagaagtgggtcggttaagagcaaaggtcactggcaacagtatttggggatgtgcaagacattttacttgttgattttctagagtgccaatgaacca

SEQ ID NO: 22874 - DNA, 120 bp, Artificial Sequence
  ENSG00000029364_53 (sequence is synthesized)
taacatctgcgtattatgagatgcgtattatggtttttaaaaagttacccaaagttttagcagaagaatgcccagaaatgcttgatcagagtcctccaccacgacaatgttcctgctcat

SEQ ID NO: 22875 - DNA, 120 bp, Artificial Sequence
  ENSG00000029364_54 (sequence is synthesized)
tgctctcatcagacaagggcaattttgccaggttttcaataggaaagttttgggcatcagctttatagtcctgatttggctccttccaacttctttttgtttcctaatcttaaaatctat

SEQ ID NO: 22876 - DNA, 120 bp, Artificial Sequence
  ENSG00000029364_55 (sequence is synthesized)
aaagggtacccatttttcttcagttaataatgtaaaaaagactgcattgacatggttaaatttccaggaccctcagttatttaggggtgaactaaatagctggtatcatcatttacaaaa

SEQ ID NO: 22877 - DNA, 120 bp, Artificial Sequence
  ENSG00000029364_56 (sequence is synthesized)
gtgtctcacacttgatagagcttatgttcagtaataatgtttatatttttaaatttttttaatcttttaattccatttttccacaagctttttgaagtccccttatattctgtgtatcaa

SEQ ID NO: 22878 - DNA, 120 bp, Artificial Sequence
  ENSG00000029364_57 (sequence is synthesized)
tagtttgtaccttttttttttctgagtggtatttcattgtttgcatgaaccatgtttggctattccttcaccagttggaagatgtatatatgggtggttcctggtttgggtgactatgaa

SEQ ID NO: 22879 - DNA, 120 bp, Artificial Sequence
  ENSG00000029534_0 (sequence is synthesized)
agaggctgcggtgagtccgccagccccagctgctcctcctcaagcccccaaggcccttcggcgggcccctgctgaaagaccggcatgccctattctgtgggcttccgcgaagccgatgct

SEQ ID NO: 22880 - DNA, 120 bp, Artificial Sequence
  ENSG00000029534_1 (sequence is synthesized)
gctaccagctttctgagagcagcaagatcaggtaacttggacaaagctttggatcacctgcggaatggggtagatattaacacctgtaaccagaatgggttgaatggcttgcatctggct

SEQ ID NO: 22881 - DNA, 120 bp, Artificial Sequence
  ENSG00000029534_2 (sequence is synthesized)
tctaaggaaggccatgtgaaaatggtggttgaacttctgcacaaagaaatcattctagaaacgacaaccaagaaggggaacacggccctgcacatcgctgctctagccgggcaggatgag

SEQ ID NO: 22882 - DNA, 120 bp, Artificial Sequence
  ENSG00000029534_3 (sequence is synthesized)
gtggtccgggagcttgtcaactatggagccaacgtcaacgcccagtcacagaaaggttttacacccctgtacatggcagcacaagagaaccacttggaagtggttaagtttttactggaa

SEQ ID NO: 22883 - DNA, 120 bp, Artificial Sequence
  ENSG00000029534_4 (sequence is synthesized)
aatggagctaaccagaatgtagccacagaagacggcttcacgcctctggcggtagccctgcagcagggccatgagaacgtcgtcgcgcacctcatcaactacggcaccaaggggaaggtg

SEQ ID NO: 22884 - DNA, 120 bp, Artificial Sequence
  ENSG00000029534_5 (sequence is synthesized)
cgcctcccggccctgcacatcgcggcccgcaacgacgacacgcgcacggctgcggtgctgctgcagaacgaccccaacccggacgtgctttccaagacgggattcacgcccctgcacatt

SEQ ID NO: 22885 - DNA, 120 bp, Artificial Sequence
  ENSG00000029534_6 (sequence is synthesized)
gcggctcactacgagaacctcaacgtggcccagttgctcctcaacagaggagccagcgtcaatttcacaccacagaacggcatcacgccactgcacatcgcctcccgcaggggcaacgtg

SEQ ID NO: 22886 - DNA, 120 bp, Artificial Sequence
  ENSG00000029534_7 (sequence is synthesized)
atcatggtgcggctgctgctggatcggggagcccagatagaaaccaagaccaaggacgaattgacacctctccactgtgcagctcgaaatgggcacgtgcgaatctcagagatcctgctg

SEQ ID NO: 22887 - DNA, 120 bp, Artificial Sequence
  ENSG00000029534_8 (sequence is synthesized)
gaccacggggcaccaatccaagccaaaaccaagaacggcctgtccccaattcacatggcggctcagggagaccacctcgactgtgtccggctcctgttgcaatacgacgcagagatagac

SEQ ID NO: 22888 - DNA, 120 bp, Artificial Sequence
  ENSG00000029534_9 (sequence is synthesized)
gacatcaccctggaccacctgaccccactccacgtggctgcccactgtggacaccacagggtggctaaggtccttctggataaaggggccaaacccaactccagagccctgaatggcttt

SEQ ID NO: 22889 - DNA, 120 bp, Artificial Sequence
  ENSG00000029534_10 (sequence is synthesized)
acccccttacacatcgcctgcaaaaagaaccacgtccgtgtcatggagctgctgctgaagacgggagcctcgatcgacgcggtcaccgagtctggcctgacacctctccacgtggcctcc

SEQ ID NO: 22890 - DNA, 120 bp, Artificial Sequence
  ENSG00000029534_11 (sequence is synthesized)
ttcatggggcaccttcccatcgtgaagaacctcctgcagcggggggcgtcgcccaacgtctccaacgtgaaagtggagaccccgctacacatggcagccagagccgggcacacggaagtg

SEQ ID NO: 22891 - DNA, 120 bp, Artificial Sequence
  ENSG00000029534_12 (sequence is synthesized)
gccaaatatttactccagaacaaagccaaagtcaatgccaaggccaaggatgaccagaccccacttcactgtgcagctcgcatcggccacacaaacatggtgaagctcctgctggaaaat

SEQ ID NO: 22892 - DNA, 120 bp, Artificial Sequence
  ENSG00000029534_13 (sequence is synthesized)
aacgccaaccccaacctggccaccaccgccgggcacacccccctgcacattgcagcccgtgagggccatgtggaaacagtcctggcccttctggaaaaggaagcatcccaggcctgcatg

SEQ ID NO: 22893 - DNA, 120 bp, Artificial Sequence
  ENSG00000029534_14 (sequence is synthesized)
accaagaaaggatttacccctctgcacgtggcggccaagtacgggaaggtgcgggtggcagagctgctgctggagcgggacgcacacccgaatgctgccggaaaaaatggcctgaccccc

SEQ ID NO: 22894 - DNA, 120 bp, Artificial Sequence
  ENSG00000029534_15 (sequence is synthesized)
ctgcacgtggccgtccatcacaacaacctggacatcgtcaagctgctgcttccccggggcggctccccgcacagccctgcctggaatggctacacccctttgcacatcgctgccaagcag

SEQ ID NO: 22895 - DNA, 120 bp, Artificial Sequence
  ENSG00000029534_16 (sequence is synthesized)
aaccaggtggaggtggcccgtagtctgctgcagtatgggggctcagcaaacgccgagtcggtgcaaggtgtgacgccccttcacctggccgcccaggagggccacgcagagatggtggct

SEQ ID NO: 22896 - DNA, 120 bp, Artificial Sequence
  ENSG00000029534_17 (sequence is synthesized)
ctgctgctctcgaaacaagccaatggcaacctggggaacaagagcggactcactcccctccatctggtagcacaagaaggccacgttccagtggcagatgtgctgatcaaacacggcgtc

SEQ ID NO: 22897 - DNA, 120 bp, Artificial Sequence
  ENSG00000029534_18 (sequence is synthesized)
atggtggacgccaccacccggatgggctacactcccctccatgtggccagtcactatggaaacatcaagctggtgaagtttctgctgcagcaccaggcagatgtcaatgccaagaccaag

SEQ ID NO: 22898 - DNA, 120 bp, Artificial Sequence
  ENSG00000029534_19 (sequence is synthesized)
ctaggatacagccccctgcaccaggcagcccagcagggacacacagacatcgtgactctgcttctgaaaaacggtgcttccccaaacgaggtcagctcggatggaaccacacctctggcc

SEQ ID NO: 22899 - DNA, 120 bp, Artificial Sequence
  ENSG00000029534_20 (sequence is synthesized)
atagccaagcgcttgggctacatttctgtcaccgacgtgctcaaggtcgtcacggatgaaaccagtttcgtgttagtcagtgataagcatcgaatgagtttccctgagacagttgatgag

SEQ ID NO: 22900 - DNA, 120 bp, Artificial Sequence
  ENSG00000029534_21 (sequence is synthesized)
atcctggatgtctcggaagatgaaggggaagaactcatcagcttcaaggctgagaggcgggattccagggatgttgatgaagagaaggagctgctggattttgtgccgaagctagaccaa

SEQ ID NO: 22901 - DNA, 120 bp, Artificial Sequence
  ENSG00000029534_22 (sequence is synthesized)
gtggtggaatctccagccatccccaggattccctgtgccatgcctgagacagtggtgatcaggtcagaagagcaggagcaggcatctaaagagtatgatgaggactccctcatccccagc

SEQ ID NO: 22902 - DNA, 120 bp, Artificial Sequence
  ENSG00000029534_23 (sequence is synthesized)
agcccggccaccgagacctcagacaacatcagcccggtggccagcccggtgcatacagggtttctggtgagcttcatggttgacgcccggggtggttccatgagaggaagtcgccacaac

SEQ ID NO: 22903 - DNA, 120 bp, Artificial Sequence
  ENSG00000029534_24 (sequence is synthesized)
ggcctgcgagtggtgatcccgccacggacgtgcgcagcgcccacccgcatcacctgccgcctggtcaagccccagaagctcagcacgccgcccccactggccgaggaggagggcctggcc

SEQ ID NO: 22904 - DNA, 120 bp, Artificial Sequence
  ENSG00000029534_25 (sequence is synthesized)
agcaggatcatagcactggggcccacgggggcacagttcctgagccctgtaatcgtggagatcccgcactttgcctcccatggccgtggagaccgcgagctcgtggttctgaggagcgaa

SEQ ID NO: 22905 - DNA, 120 bp, Artificial Sequence
  ENSG00000029534_26 (sequence is synthesized)
aacggctccgtgtggaaggagcacaggagccgctatggagagagctacctggatcagatcctcaacgggatggacgaagagctggggagcctggaggagctagagaagaagagggtgtgc

SEQ ID NO: 22906 - DNA, 120 bp, Artificial Sequence
  ENSG00000029534_27 (sequence is synthesized)
cgaatcatcaccaccgacttcccgctgtacttcgtgatcatgtcacggctctgccaggactacgacaccatcggtcccgaagggggctccctgaagagcaagctggtgcccctggtacag

SEQ ID NO: 22907 - DNA, 120 bp, Artificial Sequence
  ENSG00000029534_28 (sequence is synthesized)
gcaacgttcccggagaatgccgtcaccaagagagtgaagctggctctgcaggcccagcctgtcccggatgagcttgtcactaagctcctgggcaaccaggccacattcagccccattgtc

SEQ ID NO: 22908 - DNA, 120 bp, Artificial Sequence
  ENSG00000029534_29 (sequence is synthesized)
accgtggagccccggcgccggaagttccaccgccccattgggcttcggatcccactacctccttcctggaccgacaacccgagggacagcggggagggagacaccaccagcctgcgcctg

SEQ ID NO: 22909 - DNA, 120 bp, Artificial Sequence
  ENSG00000029534_30 (sequence is synthesized)
ctttgcagcgtcattggaggaacagaccaagcccagtgggaagacataacaggaaccaccaaacttgtatatgccaacgagtgcgccaacttcaccaccaatgtctctgccaggttttgg

SEQ ID NO: 22910 - DNA, 120 bp, Artificial Sequence
  ENSG00000029534_31 (sequence is synthesized)
ctgtcggactgtcctcggactgctgaggctgtgaactttgccaccctgctgtacaaagagctcactgcagtgccctacatggccaaattcgtcatctttgccaagatgaatgacccccga

SEQ ID NO: 22911 - DNA, 120 bp, Artificial Sequence
  ENSG00000029534_32 (sequence is synthesized)
gaggggcgcctgcgctgctactgcatgacagatgataaagtggacaagaccctggagcagcatgagaacttcgtggaggtggcccggagcagggacatagaggtgttggaaggaatgtcc

SEQ ID NO: 22912 - DNA, 120 bp, Artificial Sequence
  ENSG00000029534_33 (sequence is synthesized)
ctgtttgcagaactctctgggaacctggtgcctgtgaagaaagctgcccagcagcggagcttccacttccagtcatttcgggagaaccgtctggccatgcctgtaaaggtgagggacagc

SEQ ID NO: 22913 - DNA, 120 bp, Artificial Sequence
  ENSG00000029534_34 (sequence is synthesized)
cctgaacatcaccatgcccccctgcgccaagggaagtggagccgaagataggagaaggaccccgacgcccctggccctgcgatacagcattctcagtgagtccacaccaggttctctcag

SEQ ID NO: 22914 - DNA, 120 bp, Artificial Sequence
  ENSG00000029534_35 (sequence is synthesized)
tgggacagagcaggcagagatgaagatggctgttatctcagagcacctcggtctcagctgggcagagttggcccgggagctgcagttcagtgtggaagacatcaacaggatccgagtgga

SEQ ID NO: 22915 - DNA, 120 bp, Artificial Sequence
  ENSG00000029534_36 (sequence is synthesized)
aaatcccaactccctgttggagcagagtgtggccttgctgaacctctgggtcatccgtgaaggccaaaacgcaaacatggagaatctgtacacagccctgcagagcattgaccgtggcga

SEQ ID NO: 22916 - DNA, 120 bp, Artificial Sequence
  ENSG00000029534_37 (sequence is synthesized)
gatcgtgaacatgctggagggttccggccgacagagccgcaacttgaagccagacaggcggcacaccgaccgcgactactcgctgtcaccctcccagatgaatggttactcctcactgca

SEQ ID NO: 22917 - DNA, 120 bp, Artificial Sequence
  ENSG00000029534_38 (sequence is synthesized)
ggacgagctgctgtcccctgcctccctgggctgtgcactttcctctccgctacgtgcagaccagtactggaatgaggtggccgtcctagacgccatccccttggcggccacggagcatga

SEQ ID NO: 22918 - DNA, 120 bp, Artificial Sequence
  ENSG00000029534_39 (sequence is synthesized)
caccatgctggagatgtctgacatgcaggtgtggtctgcgggcctcacgccttctctggtcactgctgaggactcctctctggagtgtagcaaggctgaggactctgatgccacaggtca

SEQ ID NO: 22919 - DNA, 120 bp, Artificial Sequence
  ENSG00000029534_40 (sequence is synthesized)
cgagtggaagttggagggggcactctcagaggaaccgcggggccccgagttgggctctctggaacttgtggaggacgacacagtggattcagatgccacaaatggccttatcgatttgct

SEQ ID NO: 22920 - DNA, 120 bp, Artificial Sequence
  ENSG00000029534_41 (sequence is synthesized)
tgaacaggaggaaggtcagaggtcagaagagaagctgccaggttctaagaggcaggatgacgcgacaggtgcagggcaggactcagagaatgaagtgtctcttgtttcaggccatcagag

SEQ ID NO: 22921 - DNA, 120 bp, Artificial Sequence
  ENSG00000029534_42 (sequence is synthesized)
ggggcaagcccgaatcacacattcccccaccgtgagtcaggtgacggagaggagtcaggacagactgcaggactgggatgcagacggctcgattgtctcatacctgcaagatgctgcaca

SEQ ID NO: 22922 - DNA, 120 bp, Artificial Sequence
  ENSG00000029534_43 (sequence is synthesized)
aggttcctggcaagaggaggtcacgcaaggtccacactcattccagggaacaagtaccatgactgaagggctagagcccggtggatctcaggagtacgagaaggtcctggtgtctgtaag

SEQ ID NO: 22923 - DNA, 120 bp, Artificial Sequence
  ENSG00000029534_44 (sequence is synthesized)
tgagcacacgtggacagaacagcccgaggctgagagctcccaggccgacagggaccggaggcagcaaggccaagaagagcaggtgcaggaggccaagaacaccttcacccaagtggtgca

SEQ ID NO: 22924 - DNA, 120 bp, Artificial Sequence
  ENSG00000029534_45 (sequence is synthesized)
ggggaatgagtttcagaatattccaggggagcaggtgacagaggagcaattcacggatgagcagggcaacattgtcaccaagaagatcattcgcaaggtggttcgacagatagacttgtc

SEQ ID NO: 22925 - DNA, 120 bp, Artificial Sequence
  ENSG00000029534_46 (sequence is synthesized)
cagcgccgatgccgcccaggagcacgaggaggtgactgtagaggggcccctggaggatcccagtgagctggaggtcgatattgattactttatgaaacactccaaggatcacacctcgac

SEQ ID NO: 22926 - DNA, 120 bp, Artificial Sequence
  ENSG00000029534_47 (sequence is synthesized)
acccaacccctgaaccccacacactctgccatgcacacaggaggagagctggacctgagggccaccgcagcggtgcacacattcctctgggctgacggcatgacctctgtaagggactcc

SEQ ID NO: 22927 - DNA, 120 bp, Artificial Sequence
  ENSG00000029534_48 (sequence is synthesized)
tgctagtcccctcttggcatgaatgactgactgtagacgcatgacctccaggcttcaatcctgcctcttgcaatgacagctgatctgtcggaaccaggacacaaaagcagcaagaagcgg

SEQ ID NO: 22928 - DNA, 120 bp, Artificial Sequence
  ENSG00000029534_49 (sequence is synthesized)
ggagagagagggatagaaaacaagcgcaggagagcctgcgaacgcaaaagtgaatgagggctttttgtggctggggatgggttttggttttggggttttttttttaaattgttttgactt

SEQ ID NO: 22929 - DNA, 120 bp, Artificial Sequence
  ENSG00000029534_50 (sequence is synthesized)
cgtacagggtactttttcccaacctcatctgtcagaaatccatgtgggcttcctggaaagaaaaaaaaaaaaaagaaaactaggcatgaaatcagtttaacaccttaatcttaagccatg

SEQ ID NO: 22930 - DNA, 120 bp, Artificial Sequence
  ENSG00000029534_51 (sequence is synthesized)
tcctcatctgcccaccctccccaacccacatacctccattccacttgtgacaccccctcgactccctggtgacgctcctcccagatcgctctacatgacattcaggacacacacacacac

SEQ ID NO: 22931 - DNA, 120 bp, Artificial Sequence
  ENSG00000029534_52 (sequence is synthesized)
acacacacaccactcgcctccactgaatctacacacagattttactgtgacttctgaagctgtatagactctgctgtggataaattggaattttttatgttgtctctctctctgccaatt

SEQ ID NO: 22932 - DNA, 120 bp, Artificial Sequence
  ENSG00000029534_53 (sequence is synthesized)
tcaatacgaatcatcttccaatggaaaatcattaccttgaagagtgcattcggggttccttgtgttagggacttaagaatctgaggcgaggacccccaggcttacctgtaggactcaaag

SEQ ID NO: 22933 - DNA, 120 bp, Artificial Sequence
  ENSG00000029534_54 (sequence is synthesized)
ggagccaggaccccatctgaaagggtctcctctctcagttgggggacaggccggtggctgacccaggattgcaccagcatgtccatagagaagaggttttctatgtcttcaagcactata

SEQ ID NO: 22934 - DNA, 120 bp, Artificial Sequence
  ENSG00000029534_55 (sequence is synthesized)
tcatagtccgtgttcaaagtgtaaactgtacagtaatcagccttgtgtatatgaaaaacaataaatactatgcaaaccaatagaaacatttagcagtacgtacagagcctgacagcgcag

SEQ ID NO: 22935 - DNA, 120 bp, Artificial Sequence
  ENSG00000029534_56 (sequence is synthesized)
ctcctgaggacttctgcggctgcaggagaaggagctgtggcctgtctttcagtgaaagaggaaggaaaggagtagggctagtgaatgtatctgccaggtcttagaagtcaggaccaccca

SEQ ID NO: 22936 - DNA, 120 bp, Artificial Sequence
  ENSG00000029534_57 (sequence is synthesized)
gggtctcccagagtgaacttggtgctctaagtccaggcagcctgcaggctggggaccctgggtgcaggtgccaggctcgaggctgttccctgtcctgcctcagtgcctcccctctgccca

SEQ ID NO: 22937 - DNA, 120 bp, Artificial Sequence
  ENSG00000029534_58 (sequence is synthesized)
gcccctgtggcctcttggagaggcgagccagggggctccccggaccgcatggccggtgagagtagagtcggaggcggagagcctggacgcccagaggccggggccaggctctgggtcaag

SEQ ID NO: 22938 - DNA, 120 bp, Artificial Sequence
  ENSG00000029534_59 (sequence is synthesized)
gcaggaaggagacagacagctggcagttcctcgcctcggtgccatcagggaggagccttaagttccactagagcctccggcccagggaggccagaatcagcacaatcccggccccgccct

SEQ ID NO: 22939 - DNA, 120 bp, Artificial Sequence
  ENSG00000029534_60 (sequence is synthesized)
gcgggcgcccccagggccaggagagagagacagggctggctcctctcgcccctggagccgcggtgtggacggcccggccccgtccgccccgccgctctgcgggagtgtcctcgggacaca

SEQ ID NO: 22940 - DNA, 120 bp, Artificial Sequence
  ENSG00000029534_61 (sequence is synthesized)
cacacttaaaccttccaagtagcacagaagccccctccacgtcagaggccccctggccgcggggcctgtgagcggagaggggccctgcttcccacacaaatccgccccggtgcacccccg

SEQ ID NO: 22941 - DNA, 120 bp, Artificial Sequence
  ENSG00000029534_62 (sequence is synthesized)
gccaggcaggccccggggcggcctaggcgccttgtcggccgggggtggggctgcttttgcttcctttagaggggcgggcagggagaggaagctctagctccgggcctgagtttccccgag

SEQ ID NO: 22942 - DNA, 120 bp, Artificial Sequence
  ENSG00000029534_63 (sequence is synthesized)
cctgagtttccccgaggctgcgtcggaggagctgcagggcgagcccggacggctgccgtctccgccagaggccaccccggcccggcctccagggcgcagaggcgcccccctccatcctcc

SEQ ID NO: 22943 - DNA, 120 bp, Artificial Sequence
  ENSG00000029534_64 (sequence is synthesized)
cggcaggggggccgcacagcgcggctgggaccgattcggtgacggcccaaggaagctgggctcagggctcgcctctcccgcctcgatcctgcaccttcctctcccaggtcgctgctgcag

SEQ ID NO: 22944 - DNA, 120 bp, Artificial Sequence
  ENSG00000029534_65 (sequence is synthesized)
ccaacccagtagcccccttagcgcccccgcggaccccgcagctccagactccgctttggcacctctgctccggctggcatggctgcacgctccggctgctagtaggagccgttaggggag

SEQ ID NO: 22945 - DNA, 120 bp, Artificial Sequence
  ENSG00000029534_66 (sequence is synthesized)
gagtttggggtctccacacgatgcctagagaatgctgcagtctgcacattagacgctttttagaagttttgaaattaccttgatttttttaattgttatgaaaatggatcttttcttgac

SEQ ID NO: 22946 - DNA, 120 bp, Artificial Sequence
  ENSG00000029534_67 (sequence is synthesized)
tctcccacatgctctgttatgggagagaatcccctaccctactctgatgtatagaccattctcccttcaccagccgaaccaatgtcaaaattaataaagaaatggactaatggcacaggg

SEQ ID NO: 22947 - DNA, 80 bp, Artificial Sequence
  ENSG00000029534_68 (sequence is synthesized)
ggcggcagcgccatcccgggccgcgggcagccgcccctcgccctccgcgtccggaactgccttcgccttcccgcgacccc

SEQ ID NO: 22948 - DNA, 120 bp, Artificial Sequence
  ENSG00000029534_69 (sequence is synthesized)
cttcgccttcccgcgaccccgcagcagccggccctcggggcgccacgaacgctgtcccctctgtggagcagagacccccttccccttcttagggggtgtcgcctcggggatcgctgagcg

SEQ ID NO: 22949 - DNA, 120 bp, Artificial Sequence
  ENSG00000029534_70 (sequence is synthesized)
ctaggggtccaggaggcggggacgggagcgccgtgacccgccatggctcaagcggccaaacagctgaagaaaatcaaagacatcgaggcgcaggccctccaggagcagaaggagaaggag

SEQ ID NO: 22950 - DNA, 120 bp, Artificial Sequence
  ENSG00000029534_71 (sequence is synthesized)
cagccggacctgatagagggcaggaagggggcgcagatagtgaagcgggccagcctgaaaagggggaaacagtgaccccgagccgctctccttggagtagcctctcgggaggatcacacc

SEQ ID NO: 22951 - DNA, 120 bp, Artificial Sequence
  ENSG00000029534_72 (sequence is synthesized)
actcagggcagagcctggctgctgggcagaagggcacttgggccgggctgcttcagccgagagggccattcggtgtcctgcccacagagagagaaacagtgagagaccaagagagcaaac

SEQ ID NO: 22952 - DNA, 120 bp, Artificial Sequence
  ENSG00000029534_73 (sequence is synthesized)
cagagagatagggagggggaatgcaaggggtccctgggggactcaggagtcccagtggagaatgagaggcaggccccccgtggtggccggggccctggctgccagaggaccgggctggtg

SEQ ID NO: 22953 - DNA, 120 bp, Artificial Sequence
  ENSG00000029534_74 (sequence is synthesized)
aggaggcgaggatgtggactttcgtcacccagctgttggtcacgctggtgctgctgagcttcttcctggtcagctgtcagaacgtgatgcacattgtcagggggtccctgtgctttgtgc

SEQ ID NO: 22954 - DNA, 120 bp, Artificial Sequence
  ENSG00000029534_75 (sequence is synthesized)
agttttgggaggctgtaccccataaaggaagggtgcaagggcctgtgggctgacaggaattacagaccggcttccaggtggccccaccacctgtgctgggcccctgctgggctcacttga

SEQ ID NO: 22955 - DNA, 120 bp, Artificial Sequence
  ENSG00000029534_76 (sequence is synthesized)
ctgtccctgagcccatcactcacccttttggagcaatttttgaaacagaccgctaagtacccagggtattagctggtctcatccctaccatgccggggaacagcatttggatcaccgcag

SEQ ID NO: 22956 - DNA, 120 bp, Artificial Sequence
  ENSG00000029534_77 (sequence is synthesized)
tagcagcccaaggagacacacaagtagctgctttctcggactgtattattttctgaaacacatccaccaggagctggacaaggagctgggggagagcgagggcctcagtgacgacgagga

SEQ ID NO: 22957 - DNA, 120 bp, Artificial Sequence
  ENSG00000029534_78 (sequence is synthesized)
ctgctcctcctcaagcccccaaggcccttcggcgggcccctgctgaaagaccggcatgccctattctgtgggcttccgcgaagttcttctctggatcaataactcttaaccttctaagaa

SEQ ID NO: 22958 - DNA, 120 bp, Artificial Sequence
  ENSG00000029534_79 (sequence is synthesized)
ctctggaaatttaaagaagatcttcctacctttaacgcacctttgactcaggccaacagaaagtatggaataggaaacagtaaatcacacagtctcttgttctcaggaagtgggaaatgc

SEQ ID NO: 22959 - DNA, 120 bp, Artificial Sequence
  ENSG00000029534_80 (sequence is synthesized)
tggaggctgaaacagggaagagtgaacgctctggccaggaaagcaagagagtgtgccagggaagctttgcagaggaagagaactttgaatgggccttgaagaatctgtagaatttcacaa

SEQ ID NO: 22960 - DNA, 120 bp, Artificial Sequence
  ENSG00000029534_81 (sequence is synthesized)
aacagagaaagcctcatgaaaagtgtggcttgtgtgtttgggagaggtgtaggatccagtgttgagggacaggtggggtggacagagtaggagatgaggatgaagagatagagaggagct

SEQ ID NO: 22961 - DNA, 120 bp, Artificial Sequence
  ENSG00000029534_82 (sequence is synthesized)
gagatggtcagatggggccctttcctgtggtggcgcagtccttggatgcagcccaggacagcagcagtgagaaaccagtgggtccttgaccagcccactgtcttcaactcttggcctagg

SEQ ID NO: 22962 - DNA, 120 bp, Artificial Sequence
  ENSG00000029534_83 (sequence is synthesized)
tctttatgagctctctctccagtctctcttctccctggtgggcagtgtgtctgccacctccgtgtggcctcctttcgatcttctgcctgtgttctgcccgtctttgcgatctgtcctgct

SEQ ID NO: 22963 - DNA, 120 bp, Artificial Sequence
  ENSG00000029534_84 (sequence is synthesized)
agccaccccagcatgatgtgggacaaacaacttgttgttgtgtctcgaggcagagattctcacttcccaaccctgctaacagttggctctgaaccccagcttcctcatcaaggaaacaga

SEQ ID NO: 22964 - DNA, 120 bp, Artificial Sequence
  ENSG00000029534_85 (sequence is synthesized)
agttggctctgaaccccagcttcctcatcaaggaaacagagttaataatatccacttatcagggaccgcacggttttgtaagaatgccttttgggccgggcacagtggctcatgtctgta

SEQ ID NO: 22965 - DNA, 73 bp, Artificial Sequence
  ENSG00000029534_86 (sequence is synthesized)
acaaaaaaaagaaaaaaaaaagccagaaagaaaaaaatgctctttgaaaagtaaaagcactctgtaaatctaa

SEQ ID NO: 22966 - DNA, 120 bp, Artificial Sequence
  ENSG00000029559_0 (sequence is synthesized)
gagtgagagggcagaggaaatactcaatctgtgccactcactgccttgagcctgcttcctcactccaggactgccagaggaagcaatcaccaaaatgaagactgctttaattttgctcag

SEQ ID NO: 22967 - DNA, 120 bp, Artificial Sequence
  ENSG00000029559_1 (sequence is synthesized)
cattttgggaatggcctgtgctttctcaatgaaaaatttgcatcgaagagtcaaaatagaggattctgaagaaaatggggtctttaagtacaggccacgatattatctttacaagcatgc

SEQ ID NO: 22968 - DNA, 120 bp, Artificial Sequence
  ENSG00000029559_2 (sequence is synthesized)
ctacttttatcctcatttaaaacgatttccagttcagggcagtagtgactcatccgaagaaaatggagatgacagttcagaagaggaggaggaagaagaggagacttcaaatgaaggaga

SEQ ID NO: 22969 - DNA, 120 bp, Artificial Sequence
  ENSG00000029559_3 (sequence is synthesized)
aaacaatgaagaatcgaatgaagatgaagactctgaggctgagaataccacactttctgctacaacactgggctatggagaggacgccacgcctggcacagggtatacagggttagctgc

SEQ ID NO: 22970 - DNA, 120 bp, Artificial Sequence
  ENSG00000029559_4 (sequence is synthesized)
aatccagcttcccaagaaggctggggatataacaaataaagctacaaaagagaaggaaagtgatgaagaagaagaggaggaagaggaaggaaatgaaaacgaagaaagcgaagcagaagt

SEQ ID NO: 22971 - DNA, 120 bp, Artificial Sequence
  ENSG00000029559_5 (sequence is synthesized)
ggatgaaaacgaacaaggcataaacggcaccagtaccaacagcacagaggcagaaaacggcaacggcagcagcggaggagacaatggagaagaaggggaagaagaaagtgtcactggagc

SEQ ID NO: 22972 - DNA, 120 bp, Artificial Sequence
  ENSG00000029559_6 (sequence is synthesized)
accacagagaccggaaggcagggcaagggcacctcgaagacaacaacctctccaaatggtgggtttgaacctacaaccccaccacaagtctatagaaccacttccccaccttttgggaaa

SEQ ID NO: 22973 - DNA, 120 bp, Artificial Sequence
  ENSG00000029559_7 (sequence is synthesized)
accaccaccgttgaatacgagggggagtacgaatacacgggcgccaatgaatacgacaatggatatgaaatctatgaaagtgagaacggggaacctcgtggggacaattaccgagcctat

SEQ ID NO: 22974 - DNA, 120 bp, Artificial Sequence
  ENSG00000029559_8 (sequence is synthesized)
gaagatgagtacagctactttaaaggacaaggctacgatggctatgatggtcagaattactaccaccaccagtgaagctccagcctgggatgaattcatccattctggctttgcatccgg

SEQ ID NO: 22975 - DNA, 120 bp, Artificial Sequence
  ENSG00000029559_9 (sequence is synthesized)
ctaccattttcgaagttcaactcaggaaggtgcaatataacaaatgtgcatattataatgaggaatggtactaccgttccagattttctgtaattgcttctgcaaagtaataggcttctt

SEQ ID NO: 22976 - DNA, 120 bp, Artificial Sequence
  ENSG00000029559_10 (sequence is synthesized)
gtcccttttttttctggcatgttatggaatgatcattgtaaatcaggaccatttatcaagcagtacaccaactcataagatcaaatttcattgaatggtttgaggttgtagctctataaa

SEQ ID NO: 22977 - DNA, 120 bp, Artificial Sequence
  ENSG00000029559_11 (sequence is synthesized)
tagtagtttttaacatgcctgtagtattgctaactgcaaaaacatactctttgtacaagaagtgcttctaagaatttcattgacattaatgacactgtatacaataaatgtgtagtttct

SEQ ID NO: 22978 - DNA, 120 bp, Artificial Sequence
  ENSG00000029559_12 (sequence is synthesized)
taatcgcactacctatgcaacactgtgtattaggtttatcatcctcatgtatttttatgtgacctgtatgtatattctaatctacgagttttatcacaaataaaaatgcaatccttcaaa

SEQ ID NO: 22979 - DNA, 120 bp, Artificial Sequence
  ENSG00000029639_0 (sequence is synthesized)
ggagcggcggtgaaggtcctgggtgaggtagggttggatggtgcttgccgcgtatcatggctgcctccggaaaactcagcacttgccgtctccctccgttgcccacgattcgagaaatca

SEQ ID NO: 22980 - DNA, 120 bp, Artificial Sequence
  ENSG00000029639_1 (sequence is synthesized)
ttaagttgttaagactgcaagcagcgaagcagctatcacagaatttcctcctggacttgaggctgacagataagattgtaaggaaagctggcaatctgacaaatgcttatgtttacgaag

SEQ ID NO: 22981 - DNA, 120 bp, Artificial Sequence
  ENSG00000029639_2 (sequence is synthesized)
tgggccctgggccagggggaatcacaagatctattcttaatgccgacgtcgctgaacttctggtggttgaaaaggacactcgatttattcctggattacagatgctttctgatgcagcac

SEQ ID NO: 22982 - DNA, 120 bp, Artificial Sequence
  ENSG00000029639_3 (sequence is synthesized)
ctgggaaactgagaattgttcatggagatgtcttgacatttaaggtagaaaaggctttttcagaaagtcttaaaagaccctgggaagatgatcctccaaatgtacatattattggaaatc

SEQ ID NO: 22983 - DNA, 120 bp, Artificial Sequence
  ENSG00000029639_4 (sequence is synthesized)
tgccttttagtgtttcaactccactgattatcaagtggcttgaaaatatttcctgtagagatggaccttttgtttatggcagaactcagatgactttgacttttcaaaaggaagtggcag

SEQ ID NO: 22984 - DNA, 120 bp, Artificial Sequence
  ENSG00000029639_5 (sequence is synthesized)
agagacttgcagccaatacaggaagcaaacagcgtagtcgcctctctgttatggctcagtacctctgcaatgttcgacacatctttacgattccaggacaagcttttgtccccaaaccag

SEQ ID NO: 22985 - DNA, 120 bp, Artificial Sequence
  ENSG00000029639_6 (sequence is synthesized)
aggtggacgtgggcgtggtgcacttcactcccttgatacagcccaagatagagcagccattcaagctggtggaaaaagtggttcagaatgtatttcagttccgaaggaaatactgccatc

SEQ ID NO: 22986 - DNA, 120 bp, Artificial Sequence
  ENSG00000029639_7 (sequence is synthesized)
gagggctcagaatgttattccctgaagcgcagcgcttggaaagcacgggcaggctgttagagttggcagacatagaccctactcttcggccccgccagctctccatctcacactttaaga

SEQ ID NO: 22987 - DNA, 120 bp, Artificial Sequence
  ENSG00000029639_8 (sequence is synthesized)
gcctctgtgatgtatacagaaaaatgtgtgatgaagacccacaactctttgcatataatttcagagaagaactcaagcgaagaaaaagcaaaaatgaagaaaaagaagaggatgacgcag

SEQ ID NO: 22988 - DNA, 120 bp, Artificial Sequence
  ENSG00000029639_9 (sequence is synthesized)
agaattacagactctagctgctgcctgggggcgagcagcctaccagatgtcgatttgcactacgtggagcttcttatataggtactcttttgtctttacagaatgacgatacaaatgcca

SEQ ID NO: 22989 - DNA, 120 bp, Artificial Sequence
  ENSG00000029639_10 (sequence is synthesized)
atgaccagatgtgacttattttccttttactatacagcttggcagagaaaataaatatcatcaaataagatacagtacaagctttcttttaatatatactgtatagatagttatgacatg

SEQ ID NO: 22990 - DNA, 120 bp, Artificial Sequence
  ENSG00000029639_11 (sequence is synthesized)
aatgaagtatctgcacattttgcccctaaaccacattaaaataacttaaatatgctttaaataaagcaaaaactaacaaacagctgaaagaaaatgcccagaggattttaaaaaatggcc

SEQ ID NO: 22991 - DNA, 120 bp, Artificial Sequence
  ENSG00000029639_12 (sequence is synthesized)
ctttgaaaactattaatcacgacttccccagccttactttttccacataacttaattattagaatgtaattttaaggatcctaaatcatttgatacctgctcaaagtggatataaactaa

SEQ ID NO: 22992 - DNA, 120 bp, Artificial Sequence
  ENSG00000029639_13 (sequence is synthesized)
gtaatttacagattctgaccagtttcatctaggtttctgatccacaataaattaaaataacttaaatctttacaaccattttgtgggaaaatgtatactgcacaaaacccaggaatgaac

SEQ ID NO: 22993 - DNA, 120 bp, Artificial Sequence
  ENSG00000029639_14 (sequence is synthesized)
agtttttttttttttttttttttgcaatttccactttaccaccagtttaaaagtaaaatgaggaatttaacccatatctggattgaatcatactatgattttccgtggctctctgtttca

SEQ ID NO: 22994 - DNA, 120 bp, Artificial Sequence
  ENSG00000029639_15 (sequence is synthesized)
taaaaacactcctcactgacaacagatgttaaactctggacactgaattctcgctctagaacagaatttaggtcgatggtggcattttcagactgactgtcaagggactggtgacggatc

SEQ ID NO: 22995 - DNA, 120 bp, Artificial Sequence
  ENSG00000029639_16 (sequence is synthesized)
tgcgccttgagcaaagttcctctgtccctcttggtgctgttggcttttcgtttaatggggcagaagtgcccccggaccagtttgggctgctctcctcctttctgaccctcacccgactcc

SEQ ID NO: 22996 - DNA, 120 bp, Artificial Sequence
  ENSG00000029639_17 (sequence is synthesized)
gggccaggctgctgctcagcctcggggtgaacgtctgggtcctcggaaatcctcagtctctggaactgaatttcgatgtctttagtagggctgccctgcttcacagtctgacggtggtca

SEQ ID NO: 22997 - DNA, 120 bp, Artificial Sequence
  ENSG00000029639_18 (sequence is synthesized)
tcatcttcatcgctcaggatgtcactctctttgatgagattgtcggcaaaatctgccaagccggggtgtgggtatttcccgggagaagtgctcttggagtcctgcctgccctcagccgtg

SEQ ID NO: 22998 - DNA, 120 bp, Artificial Sequence
  ENSG00000029639_19 (sequence is synthesized)
gggcagccgctgctctgggtgccgctgctcaagctgccctcgtcagagtccagcaaggttcccttgccagtctcaccggtccactcgttgctggaggaattcttcaggacttttaaagac

SEQ ID NO: 22999 - DNA, 120 bp, Artificial Sequence
  ENSG00000029639_20 (sequence is synthesized)
ctggatgaagctacagtgagaaaaacacatttcgctgtgatacagaaacaggttacacaatgtgtaatgtttgcctcaaagcttgtgtaagatttaacattaagattttattttatgata

SEQ ID NO: 23000 - DNA, 120 bp, Artificial Sequence
  ENSG00000029639_21 (sequence is synthesized)
tgacttcagttagcaactatcctggtaattaggcaaaaatgtagctactgaaaacatggacatttttgacttaggtttacagttgtaagttaggcaattcagcatttttagattaccaga

SEQ ID NO: 23001 - DNA, 120 bp, Artificial Sequence
  ENSG00000029639_22 (sequence is synthesized)
gctcaattatgtaaatagaactagacactagaaactactacatgggctaagattcttattttgccaaggagtaagttgaaaagttaattggtaataataaatctaggctcctttctttca

SEQ ID NO: 23002 - DNA, 120 bp, Artificial Sequence
  ENSG00000029639_23 (sequence is synthesized)
tttattcctggattacaggtgagatgcttaaagtgtctgctttaggaggcaaaagctgaatttaaatctttatgccatgatgcttaaaccccaaggtatccaaagattatgtaggttttt

SEQ ID NO: 23003 - DNA, 120 bp, Artificial Sequence
  ENSG00000029639_24 (sequence is synthesized)
cctcaactatagatccccaaggccccattccagagattttgattccatagtctggagaaatctggaaatctccatttttaacaagcactctcagagggtctattgactacaccttgaaaa

SEQ ID NO: 23004 - DNA, 120 bp, Artificial Sequence
  ENSG00000029639_25 (sequence is synthesized)
aaacctgctttaagcatttatgctaaacaaattaattgttttgtgtgatttttttttttaagtctgctaatagctatgcatgtcgtggcccattccttcaaaaataaataaaaataaata

SEQ ID NO: 23005 - DNA, 120 bp, Artificial Sequence
  ENSG00000029639_26 (sequence is synthesized)
taaaattgctactagaaagttctgtggcttttcagactacactcatgaattcagtccagctgattaatcagtgtctaccgaaaataagtggtgtctctatctgggaagtttagcactgag

SEQ ID NO: 23006 - DNA, 120 bp, Artificial Sequence
  ENSG00000029639_27 (sequence is synthesized)
aagtgactttttagtccatacaaagtataagtacggagatcagtggtagaagcaggcccactgacaactgtaagaagtaacagttgttacagtaacagaaagctataaaagacaaatata

SEQ ID NO: 23007 - DNA, 120 bp, Artificial Sequence
  ENSG00000029639_28 (sequence is synthesized)
aacgcagaagaaacaataataataatagggtagcaaaaacaccttcgtaactattgaggccattattctaaagacaacagtaaccctaggtcatcaagaaaagggtgaaatttggtttag

SEQ ID NO: 23008 - DNA, 120 bp, Artificial Sequence
  ENSG00000029639_29 (sequence is synthesized)
atctttacgattccaggacaagcttttgtccccaaaccagagaatgtaccatcttccatgcctagagatgaaaccgaagtacgtggaaaggtctgtttatgaaaacaggctgttgacagc

SEQ ID NO: 23009 - DNA, 120 bp, Artificial Sequence
  ENSG00000029639_30 (sequence is synthesized)
gtgcgacgggcttttggtcaggtccttcgacctctttgtatcagaactccggtcccaccgcccaggagacacgtgaaataagattgtaaggaaagctggcaatctgacaaatgcttatgt

SEQ ID NO: 23010 - DNA, 120 bp, Artificial Sequence
  ENSG00000029725_0 (sequence is synthesized)
gtcaggatgaggaggcggaggtcggcggtcgggtccgtctctgcccgcggctgtggcggcgccggcggatccagccttagcggtttctctctgggcggcggcggcggcggctcggttgac

SEQ ID NO: 23011 - DNA, 120 bp, Artificial Sequence
  ENSG00000029725_1 (sequence is synthesized)
cctccgccagctgagcccgcgggagcccaggacgccgcttccccgcccatccccgctccccgaggccggccgcctggtcatggcgcagccgggcccggcttcccagcctgacgtttctct

SEQ ID NO: 23012 - DNA, 120 bp, Artificial Sequence
  ENSG00000029725_2 (sequence is synthesized)
ctcttcagcaacgggtagcagaattggaaaaaattaatgcagaatttttacgtgcacaacagcagcttgaacaagaatttaatcaaaagagagcaaaatttaaggagttatatttggcta

SEQ ID NO: 23013 - DNA, 120 bp, Artificial Sequence
  ENSG00000029725_3 (sequence is synthesized)
aagaggaggatctgaagaggcaaaatgcagtattacaagctgcacaagatgatttgggacaccttcgaacccagctgtgggaagctcaagcagagatggagaatattaaggcgattgcca

SEQ ID NO: 23014 - DNA, 120 bp, Artificial Sequence
  ENSG00000029725_4 (sequence is synthesized)
cagtctctgagaacaccaagcaagaagctatagatgaagtgaaaagacagtggagagaagaagttgcttcacttcaggctgttatgaaagaaacagttcgtgactatgagcaccagttcc

SEQ ID NO: 23015 - DNA, 120 bp, Artificial Sequence
  ENSG00000029725_5 (sequence is synthesized)
accttaggctggagcaggagcgaacacagtgggcacagtatagagaatccgcagagagggaaatagctgatttaagaagaaggctgtctgaaggtcaagaggaggaaaatttagaaaatg

SEQ ID NO: 23016 - DNA, 120 bp, Artificial Sequence
  ENSG00000029725_6 (sequence is synthesized)
aaatgaaaaaggcccaagaggatgctgagaaacttcggtccgttgtgatgccaatggaaaaggaaattgcagctttgaaggataaactgacagaggctgaagacaaaattaaagagctgg

SEQ ID NO: 23017 - DNA, 120 bp, Artificial Sequence
  ENSG00000029725_7 (sequence is synthesized)
aggcctcaaaggttaaagaactgaatcattatctggaagctgagaaatcttgtaggactgatctagagatgtatgtagctgttttgaatactcagaaatctgttctacaggaagatgctg

SEQ ID NO: 23018 - DNA, 120 bp, Artificial Sequence
  ENSG00000029725_8 (sequence is synthesized)
agaaactgcggaaagaattgcatgaagtttgccatctcttggagcaagagcgacaacaacacaaccagttaaaacatacgtggcagaaggccaatgaccagtttctggaatctcagcgtt

SEQ ID NO: 23019 - DNA, 120 bp, Artificial Sequence
  ENSG00000029725_9 (sequence is synthesized)
tactgatgagagacatgcagcgaatggagattgtgctaacttcagaacagctccgacaagttgaagaactgaagaagaaagatcaggaggatgatgaacaacaaagactcaataagagaa

SEQ ID NO: 23020 - DNA, 120 bp, Artificial Sequence
  ENSG00000029725_10 (sequence is synthesized)
aggatcacaaaaaagcagatgttgaggaagaaataaaaataccagtagtgtgtgctttaactcaagaagaatcttcagcccagttatcaaatgaagaggagcatttagacagcacccgtg

SEQ ID NO: 23021 - DNA, 120 bp, Artificial Sequence
  ENSG00000029725_11 (sequence is synthesized)
gctcagttcattccttagatgcaggcttgctgttgccatctggagatcctttcagtaaatcggacaatgacatgtttaaagatggactcaggagagcacagtctacagacagcttgggaa

SEQ ID NO: 23022 - DNA, 120 bp, Artificial Sequence
  ENSG00000029725_12 (sequence is synthesized)
cctcgggctcattgcaatccaaagctttaggctataactacaaagcaaaatctgctggaaacctggacgagtcagattttggaccactggtaggagcagattcagtgtctgagaactttg

SEQ ID NO: 23023 - DNA, 120 bp, Artificial Sequence
  ENSG00000029725_13 (sequence is synthesized)
atactgcatcccttgggtcactccagatgccaagtgggtttatgttaaccaaagatcaggaaagagcaatcaaggcgatgacaccagaacaagaagagacagcgtccctcctctccagcg

SEQ ID NO: 23024 - DNA, 120 bp, Artificial Sequence
  ENSG00000029725_14 (sequence is synthesized)
ttacccagggcatggagagtgcctatgtgtcccctagtggttatcgtttagttagtgaaacagaatggaatctcttgcagaaagaggtacataatgctggaaataaacttggtagacgtt

SEQ ID NO: 23025 - DNA, 120 bp, Artificial Sequence
  ENSG00000029725_15 (sequence is synthesized)
gtgatatgtgttccaattacgaaaaacagttacaaggaattcagattcaggaggctgaaacgagagaccaggtgaaaaaactacagctgatgctaaggcaagctaatgaccagttagaga

SEQ ID NO: 23026 - DNA, 120 bp, Artificial Sequence
  ENSG00000029725_16 (sequence is synthesized)
agacaatgaaagataagcaggagctggaagacttcataaagcaaagcagcgaagattcgagtcaccagatctctgcactcgtcctaagagcccaggcctccgagatcttacttgaagagt

SEQ ID NO: 23027 - DNA, 120 bp, Artificial Sequence
  ENSG00000029725_17 (sequence is synthesized)
tacagcaggggctttcccaggcaaagagggatgttcaggaacagatggcggtgctgatgcagtcacgggaacaggtttcagaagagctggtgaggttacagaaagataatgacagtctcc

SEQ ID NO: 23028 - DNA, 120 bp, Artificial Sequence
  ENSG00000029725_18 (sequence is synthesized)
agggaaagcacagcctgcatgtgtcattacagcaagcagaagacttcatcctcccagacactacagaggcactgcgggagttggtattaaaataccgtgaggacatcattaatgtgcgga

SEQ ID NO: 23029 - DNA, 120 bp, Artificial Sequence
  ENSG00000029725_19 (sequence is synthesized)
cagcagcagaccacgtagaagaaaagctgaaggctgagatacttttcctaaaagagcagatccaagcagaacagtgtttaaaagaaaatcttgaagaaactctgcaactagaaatagaaa

SEQ ID NO: 23030 - DNA, 120 bp, Artificial Sequence
  ENSG00000029725_20 (sequence is synthesized)
actgcaaggaggaaatagcttctatttctagcctaaaagctgaattagaaagaataaaagtggaaaaaggacagttggagtccacattaagagagaagtctcaacagcttgagagtcttc

SEQ ID NO: 23031 - DNA, 120 bp, Artificial Sequence
  ENSG00000029725_21 (sequence is synthesized)
aggaaataaagatcagtttggaagagcagttaaagaaagagactgctgctaaggctaccgttgaacaactaatgtttgaagagaagaataaagctcagagattacagacagaattagatg

SEQ ID NO: 23032 - DNA, 120 bp, Artificial Sequence
  ENSG00000029725_22 (sequence is synthesized)
tcagtgagcaagtccagagggattttgtaaagctttcacagacccttcaggtgcagttagagcggatccggcaagctgactccttggagagaatccgggcaattctgaatgatactaaac

SEQ ID NO: 23033 - DNA, 120 bp, Artificial Sequence
  ENSG00000029725_23 (sequence is synthesized)
tgacagacattaaccagcttcctgagacatgacaccctcatggcaggattctagcctgcactttgggtttttaactcatctttagagcaacagtaattattatttaactcttaactgaag

SEQ ID NO: 23034 - DNA, 120 bp, Artificial Sequence
  ENSG00000029725_24 (sequence is synthesized)
gagaaatgcttacttctagagggagaagactgtgcggcacaggaaacagcaaacagtggggtgatctgcagcccagagaccttcaaatgcgaacactataaactccaggcttgattccaa

SEQ ID NO: 23035 - DNA, 120 bp, Artificial Sequence
  ENSG00000029725_25 (sequence is synthesized)
caggcgtgggatcagatttggtgatggaaaaagcgctgtttccttgcctgctttctccaagacagattttcggaacacatttccctaccctaaagcgacatcccagtagtgtttggaatt

SEQ ID NO: 23036 - DNA, 120 bp, Artificial Sequence
  ENSG00000029725_26 (sequence is synthesized)
ttctgttcatagatattggaagagagaatttgctttatctgttgtctagagctcatcagtaacagtattcagttagcagacagaagtgtagtatgctgtatgaatattttatattaaaat

SEQ ID NO: 23037 - DNA, 120 bp, Artificial Sequence
  ENSG00000029725_27 (sequence is synthesized)
atgaaggtttgagagcaggccattggctactgactgtattttgttttccttttaccattttatcttatcttgctttggaggaccttaaatgctactgaaacttacctgagaaccatagga

SEQ ID NO: 23038 - DNA, 120 bp, Artificial Sequence
  ENSG00000029725_28 (sequence is synthesized)
ctgtggcaaacaaaaccaattcatgaagtgaattaatgatgaggatctgaaaacttggctggggctatatatactggaagttgaaggttaaaggaaaagcacaagaaactttggaagcac

SEQ ID NO: 23039 - DNA, 120 bp, Artificial Sequence
  ENSG00000029725_29 (sequence is synthesized)
tttttctgcatacttagatgatcttcatgggcccacagggtaccaggataaagccgaactggtaccatctactcttttgaagtgttttagtctagttattggatcagtgaaaaacattag

SEQ ID NO: 23040 - DNA, 120 bp, Artificial Sequence
  ENSG00000029725_30 (sequence is synthesized)
tatacgtttttaaataggctaatttttcaacttggatcattaggcttacgtactacttgtttcaaatgtgtcaaatacaaaaatggtaactaggttgacagatactttgtatttttcttt

SEQ ID NO: 23041 - DNA, 120 bp, Artificial Sequence
  ENSG00000029725_31 (sequence is synthesized)
tgaattcagacctggaatgtaagtaagtgacaatgcttatggaaagccagttagttagaattggaaatctgtcttgtcattttacaagcattagattcctttcctgtgtgaagaaagcct

SEQ ID NO: 23042 - DNA, 120 bp, Artificial Sequence
  ENSG00000029725_32 (sequence is synthesized)
cagtgaaacaggtctttgccataactttatgaagtgctacagaaagcacaaagaattgattcatgttcatcaatacctgctgagagtactgtcccaggaatatccagtggatggattcat

SEQ ID NO: 23043 - DNA, 120 bp, Artificial Sequence
  ENSG00000029725_33 (sequence is synthesized)
catccaggaggttcaaaagtaagatggttttcaaatcatttttgagactggttgcataacagcagggtacctgaaagagccttctgggagttagtgaactaggtagattgttttgttcac

SEQ ID NO: 23044 - DNA, 120 bp, Artificial Sequence
  ENSG00000029725_34 (sequence is synthesized)
ataacgccaccatcaacttaaagtgaattgtctttgttataaatgaggtcactatggacttaccctaaagatcttctgtacttctgtcttccataggacaaatgataagtactacatacc

SEQ ID NO: 23045 - DNA, 120 bp, Artificial Sequence
  ENSG00000029725_35 (sequence is synthesized)
tcatctcttgggttattattgtagtcttgcattcatggttatgaatttaaaaataaataccaattatggaaatagtactaaaggcttgccgcacatgaaacattattttaattggtttaa

SEQ ID NO: 23046 - DNA, 120 bp, Artificial Sequence
  ENSG00000029725_36 (sequence is synthesized)
agtccctttataaagagtgctacatggtttagataaaggaaacatataactattgagttacaggggattttattaattataaaatgcaatcaatttaaattacgtaggtttaagactagt

SEQ ID NO: 23047 - DNA, 120 bp, Artificial Sequence
  ENSG00000029725_37 (sequence is synthesized)
cccttggataagccccaagcgaatttgtcttcagattattaaaattagtgctgtaaatcagggtgggcaattcacagcctttctgaactgactgaactagagcttgcagtgaagtgttct

SEQ ID NO: 23048 - DNA, 120 bp, Artificial Sequence
  ENSG00000029725_38 (sequence is synthesized)
gctgagactgagcaccttacagatatttttctccagaagatggtgctgggtaataaaatcatcacaattagggaatggttagtggtctctactgtggcaaatgccaactgttggaattca

SEQ ID NO: 23049 - DNA, 120 bp, Artificial Sequence
  ENSG00000029725_39 (sequence is synthesized)
ctttattgtagaaaaacccaaactgagactcttaagttttgtttagcaatgtgtttctggtatgaaacaaactactgtgtcactgtccaggtaggaaacaattctttcaactgggttttc

SEQ ID NO: 23050 - DNA, 120 bp, Artificial Sequence
  ENSG00000029725_40 (sequence is synthesized)
agcataaatgggaactgatgtagaaggcaggatttagcccttctaggcaaaagaaaagctcagttgggtttcacgagtgttcctgtgcttatattcagtctgtgcctacatgttctcatg

SEQ ID NO: 23051 - DNA, 120 bp, Artificial Sequence
  ENSG00000029725_41 (sequence is synthesized)
catgtctaacctgatttacctcttacctgtaacctaccttatcatgtggcttttaattgacagtcactcagccatttctaagcagatatagtagtacctttcagaactcacattggcaag

SEQ ID NO: 23052 - DNA, 120 bp, Artificial Sequence
  ENSG00000029725_42 (sequence is synthesized)
tgtaaaaagatgacttaaggtgaagtgaggacaaaatcacattctgcatactaacctatttttttctccctttaaggtgctaaacttgcacctcatgtccactcagtaacaagtattggg

SEQ ID NO: 23053 - DNA, 120 bp, Artificial Sequence
  ENSG00000029725_43 (sequence is synthesized)
acgtagagcacagcctcactcagctctgaaaggtaatacagcttgtgaggaagtgagccagcagtggcctttgcaattgtggatcttgagctctgctctcagcagatttcaggtgtaacc

SEQ ID NO: 23054 - DNA, 120 bp, Artificial Sequence
  ENSG00000029725_44 (sequence is synthesized)
atttgttaactgtactgaaggtgtgtcctcaagaagaaagtgttcaaattaaaaaagctgctgccaagtacactgtgtggtcttctcctttgaatcctagggttctatccctcttcagag

SEQ ID NO: 23055 - DNA, 120 bp, Artificial Sequence
  ENSG00000029725_45 (sequence is synthesized)
tcatgtttctggtgctgctactttaaaacacagctcacaagaataactaacttgctcaaatatggagaaaactcaatagggttcagggaggttctggcagtgtgcagtgtgaaataatcc

SEQ ID NO: 23056 - DNA, 120 bp, Artificial Sequence
  ENSG00000029725_46 (sequence is synthesized)
tgagtccttgctgaacacaactgtaggcttgagttataaagcacattccaaattttaaataaaagcatttactcaattattataaaacaacatatttaaaaagatgaaccacaccaaagg

SEQ ID NO: 23057 - DNA, 120 bp, Artificial Sequence
  ENSG00000029725_47 (sequence is synthesized)
tcatcaaaacacctttttataaattagataattctacctgttttacaatatgggtttaagccttcaatggtgttcagttcaggtgtgagtcagctcctggtggtgtcagaagtttacatg

SEQ ID NO: 23058 - DNA, 120 bp, Artificial Sequence
  ENSG00000029725_48 (sequence is synthesized)
attgcggatatcattgatttgcttcaccatttcccttatatgttcacccctgtaaaattgtaaagtcactcacttttggaattataataaaccatttatatggattcttaagaatttaaa

SEQ ID NO: 23059 - DNA, 120 bp, Artificial Sequence
  ENSG00000029725_49 (sequence is synthesized)
gtttttaatgacctttctgtcattttttaaagtgctttttaaaggttttgtttatgatgacattcagcacttggaattgtgaagtcatatttatattaataaataacttgatttgtgatc

SEQ ID NO: 23060 - DNA, 120 bp, Artificial Sequence
  ENSG00000029725_50 (sequence is synthesized)
cttcaggctgcattttaatgatcaccttttgcatttggtgtcaggcaagaaaactttgttcttccacaatcccactttgttactgcacacagaggcaagatacagagagcttgtggttct

SEQ ID NO: 23061 - DNA, 120 bp, Artificial Sequence
  ENSG00000029725_51 (sequence is synthesized)
gaacaggagtgtttctcttcagcaacgggtagcagaattggaaaaaattaatgcagaatttttacgtgcacaacagcagcttgaacaagaatttaatcaaaagagagcaaaatttaagga

SEQ ID NO: 23062 - DNA, 120 bp, Artificial Sequence
  ENSG00000029725_52 (sequence is synthesized)
aaaaaagcagatgttgaggaagaaataaaaataccagtagtgtgtgctttaactcaagaagaatcttcagcccagttatcaaatgaagagaaaacaccattcaaaataaaaataactgat

SEQ ID NO: 23063 - DNA, 120 bp, Artificial Sequence
  ENSG00000029725_53 (sequence is synthesized)
gtaaagctttcacagacccttcaggtgaggcatttggggaaccacatacagagcacgaaggcagttttgggggacagaaccttgccgatccctgacttgaccactggcagtagctagagg

SEQ ID NO: 23064 - DNA, 120 bp, Artificial Sequence
  ENSG00000029725_54 (sequence is synthesized)
tttagagactggctgctcctacctccaccccaaatgtctgactcatcattcaagccagaaacctggtgtgttcttcacacttggcccatttttctttttctgtatgccttgccaattttg

SEQ ID NO: 23065 - DNA, 120 bp, Artificial Sequence
  ENSG00000029725_55 (sequence is synthesized)
aaaagtggaaaaaggacaggtaagtcgtgagtttcaaattaattctatcagcaaccagtggttatttactgactcctactatgctgcacccaacgaataaaaaatagttaaggcatgggc

SEQ ID NO: 23066 - DNA, 120 bp, Artificial Sequence
  ENSG00000029725_56 (sequence is synthesized)
cctgccttaaggaacttttgtcttgtgggaagaaaaccacggggtaagggtgtgctggtgatttattgagagtgccctgtgtgtcaggctacgttaaactggaggaggtaaggctaagat

SEQ ID NO: 23067 - DNA, 120 bp, Artificial Sequence
  ENSG00000029725_57 (sequence is synthesized)
gtgactgtggcctggagtttccagtgtagtgagaagataggcaaggcatggtcataacatgttatatgcttagaggtacagtagaaatatgtataaaaaacattacaaacaagagatgac

SEQ ID NO: 23068 - DNA, 120 bp, Artificial Sequence
  ENSG00000029725_58 (sequence is synthesized)
attttctagctggcttagtcctcttagacatcattagttcctttcatagtaaccccattcaacttcctgacctcactgttccttgatttagagattttcacctccaccctgctctcccct

SEQ ID NO: 23069 - DNA, 120 bp, Artificial Sequence
  ENSG00000029993_0 (sequence is synthesized)
gcgcgtcgtgccctgcgctgcccagactagcgaacaatacagtcaggatggctaaaggtgaccccaagaaaccaaagggcaagatgtccgcttatgccttctttgtgcagacatgcagag

SEQ ID NO: 23070 - DNA, 120 bp, Artificial Sequence
  ENSG00000029993_1 (sequence is synthesized)
aagaacataagaagaaaaacccagaggtccctgtcaattttgcggaattttccaagaagtgctctgagaggtggaagacgatgtccgggaaagagaaatctaaatttgatgaaatggcaa

SEQ ID NO: 23071 - DNA, 120 bp, Artificial Sequence
  ENSG00000029993_2 (sequence is synthesized)
aggcagataaagtgcgctatgatcgggaaatgaaggattatggaccagctaagggaggcaagaagaagaaggatcctaatgctcccaaaaggccaccgtctggattcttcctgttctgtt

SEQ ID NO: 23072 - DNA, 120 bp, Artificial Sequence
  ENSG00000029993_3 (sequence is synthesized)
cagaattccgccccaagatcaaatccacaaaccccggcatctctattggagacgtggcaaaaaagctgggtgagatgtggaataatttaaatgacagtgaaaagcagccttacatcacta

SEQ ID NO: 23073 - DNA, 120 bp, Artificial Sequence
  ENSG00000029993_4 (sequence is synthesized)
aggcggcaaagctgaaggagaagtatgagaaggatgttgctgactataagtcgaaaggaaagtttgatggtgcaaagggtcctgctaaagttgcccggaaaaaggtggaagaggaagatg

SEQ ID NO: 23074 - DNA, 120 bp, Artificial Sequence
  ENSG00000029993_5 (sequence is synthesized)
aagaagaggaggaggaagaagaggaggaggaggaggaggaggatgaataaagaaactgtttatctgtctccttgtgaatacttagagtaggggagcgccgtaattgacacatctcttatt

SEQ ID NO: 23075 - DNA, 120 bp, Artificial Sequence
  ENSG00000029993_6 (sequence is synthesized)
tgagaagtgtctgttgccctcattaggtttaattacaaaatttgatcacgatcatattgtagtctctcaaagtgctctagaaattgtcagtggtttacatgaagtggccatgggtgtctg

SEQ ID NO: 23076 - DNA, 120 bp, Artificial Sequence
  ENSG00000029993_7 (sequence is synthesized)
gagcaccctgaaactgtatcaaagttgtacatatttccaaacatttttaaaatgaaaaggcactctcgtgttctcctcactctgtgcactttgctgttggtgtgacaaggcatttaaaga

SEQ ID NO: 23077 - DNA, 120 bp, Artificial Sequence
  ENSG00000029993_8 (sequence is synthesized)
tgtttctggcattttctttttatttgtaaggtggtggtaactatggttattggctagaaatcctgagttttcaactgtatatatctatagtttgtaaaaagaacaaaacaaccgagacaa

SEQ ID NO: 23078 - DNA, 120 bp, Artificial Sequence
  ENSG00000029993_9 (sequence is synthesized)
acccttgatgctccttgctcggcgttgaggctgtggggaagatgccttttgggagaggctgtagctcagggcgtgcactgtgaggctggacctgttgactctgcagggggcatccattta

SEQ ID NO: 23079 - DNA, 120 bp, Artificial Sequence
  ENSG00000029993_10 (sequence is synthesized)
gcttcaggttgtcttgtttctgtatatagtgacatagcattctgctgccatcttagctgtggacaaaggggggtcagctggcatgagaatattttttttttttaagtgcggtagttttta

SEQ ID NO: 23080 - DNA, 120 bp, Artificial Sequence
  ENSG00000029993_11 (sequence is synthesized)
aactgtttgtttttaaacaaactatagaactcttcattgtcagcaaagcaaagagtcactgcatcaatgaaagttcaagaacctcctgtacttaaacacgattcgcaacgttctgttatt

SEQ ID NO: 23081 - DNA, 120 bp, Artificial Sequence
  ENSG00000029993_12 (sequence is synthesized)
ttttttgtatgtttagaatgctgaaatgtttttgaagttaaataaacagtattacatttttaaaactcttctctattataacagtcaatttctgactcacagcagtgaacaaacccccac

SEQ ID NO: 23082 - DNA, 120 bp, Artificial Sequence
  ENSG00000029993_13 (sequence is synthesized)
tccattgtatttggagactggcctccctataaatgtggtagcttcttttattactcagtggccagctcacttagggctgagatgaaggagagggctacttgaagctactgtgtgattttg

SEQ ID NO: 23083 - DNA, 120 bp, Artificial Sequence
  ENSG00000029993_14 (sequence is synthesized)
gtctggaggagttaggagaacgacataggcaaggttcagcagccttccaaggtataggaaggtgggtgattaggactgaggctatctaggtttaacttttgtcccacctccaccccctat

SEQ ID NO: 23084 - DNA, 120 bp, Artificial Sequence
  ENSG00000029993_15 (sequence is synthesized)
tttgtggggccaaatgcattgctaaacagcaatttcagagtgtatggtgtgtcaaaaattaaggccttattgtttttctctttcacccctaccccccgtgctcctggcacatatcacatt

SEQ ID NO: 23085 - DNA, 120 bp, Artificial Sequence
  ENSG00000029993_16 (sequence is synthesized)
atttgtggtgcccaacatttggggtcttgagcctgctgctggtctcctggatgccagtgagggtatgtgggatggggtggtggggtaggggacggtatcctttttttgctcctacttgga

SEQ ID NO: 23086 - DNA, 120 bp, Artificial Sequence
  ENSG00000029993_17 (sequence is synthesized)
aacaccaaacaccccaaggaagatgataggctccatcttgggccacctgagctatagggcaggctaatggaatcaaccatttctgagcactaaatgtatcatgaaaagttgaatggcctg

SEQ ID NO: 23087 - DNA, 120 bp, Artificial Sequence
  ENSG00000029993_18 (sequence is synthesized)
ctcataagtttagctcattcactggaaatgtagattgatgttcaatgttaaactggaaggagcttggtttgtgtgtcagtggttatattagtgggtagtgtaacattttatccaggttgg

SEQ ID NO: 23088 - DNA, 120 bp, Artificial Sequence
  ENSG00000029993_19 (sequence is synthesized)
ggtgaggggagatggccacagtagcaagtggtgacactaaataccattttgaaggctgatgtgtatatacatcattactgtccgtagcaatgaaggatacagtactgtgttgtgggtgag

SEQ ID NO: 23089 - DNA, 120 bp, Artificial Sequence
  ENSG00000029993_20 (sequence is synthesized)
tgttgctattgcccagcattaatatttgggtgtgtatgtttgaggctatgaaacacgcaggagtgtttttgtgctattaattttaagagaaagcagctttttcttaaaattcactgttga

SEQ ID NO: 23090 - DNA, 120 bp, Artificial Sequence
  ENSG00000029993_21 (sequence is synthesized)
gaaacttgcatgtctggaggcggtgtcctctccgccctgtcgggtcctggatgagtacgagttatggtcacggtcacagcctgatctcttatgtgttcatagccattcgctctcccatca

SEQ ID NO: 23091 - DNA, 120 bp, Artificial Sequence
  ENSG00000029993_22 (sequence is synthesized)
gaactgtttgtcctgaatgtgttcctctagttctagaaaatgaccactaatttaaaaaactcggttgtgaggtttgcccagaggcacttgttccagaatttcccctcctgcttcagccat

SEQ ID NO: 23092 - DNA, 120 bp, Artificial Sequence
  ENSG00000029993_23 (sequence is synthesized)
gtccttgtcacttggcattctaagctaaagctttagcttcccaattcgtgatgtgctaggccaagattcgggagctgttgccagcctcgtcaaatatggaagagaaacaacctgcggtca

SEQ ID NO: 23093 - DNA, 120 bp, Artificial Sequence
  ENSG00000029993_24 (sequence is synthesized)
aaagggagtgatttgttaagtggtgcgcgtctatctcataactagatgtaccaaccagggaagggccaaggatggaaaggggtaacttttgtgcttccaaagtagctaagcagaagtggg

SEQ ID NO: 23094 - DNA, 120 bp, Artificial Sequence
  ENSG00000029993_25 (sequence is synthesized)
ggagcagtttagccagatgatctttgattaggcaaacattgagttttaaagaggctgtcaagttgaggccacttggtccattagctggggcagcaagatcactactcaacgttttcacac

SEQ ID NO: 23095 - DNA, 120 bp, Artificial Sequence
  ENSG00000029993_26 (sequence is synthesized)
tgtggcaagattgctcttctagtggaataatgccctagtttctctgagatgatgtaagtggcatgatgttacctaaggcttaggcttagcttgatttctgggcccactgtctgtgttctt

SEQ ID NO: 23096 - DNA, 120 bp, Artificial Sequence
  ENSG00000029993_27 (sequence is synthesized)
aagatgccaacctgttgctttttttttttttttcccccatttaaaaggatagtacctactccctctaaccacctcaccccattcttgaatgacattttatccttcggaaagaacaaggct

SEQ ID NO: 23097 - DNA, 120 bp, Artificial Sequence
  ENSG00000029993_28 (sequence is synthesized)
gtgatgtagtgactattgtctgtgtctcctgtgtgtgtctgttcttgtcacaaatgtatttggggacgttggatgcattcattttctgtaataaagtttcttaatcactcttcccaaaaa

SEQ ID NO: 23098 - DNA, 120 bp, Artificial Sequence
  ENSG00000029993_29 (sequence is synthesized)
gccgccgcagcgcccgcacaactttccggcccgcgccgccgtgagcgcgccctgccgccgcctccccctgcctctactccccattcccttcccgccccctccgccttccctcctgctagg

SEQ ID NO: 23099 - DNA, 120 bp, Artificial Sequence
  ENSG00000029993_30 (sequence is synthesized)
tttgtagttcagcttcaggccaagtgcttcagctccatataagaggtagctttcttgagagcagagatcgaaatatttcctatgcaaaggatggaaatacttcctgcgcgtaagcgcaat

SEQ ID NO: 23100 - DNA, 120 bp, Artificial Sequence
  ENSG00000030066_0 (sequence is synthesized)
gtggaagcctcgcaacgaagggccggagccgcctttctgctcccggaatgcttcacctgtccgcagctccgcccgccccacccccggaagtgacggcgaccgcgcggccctgcctttgtt

SEQ ID NO: 23101 - DNA, 120 bp, Artificial Sequence
  ENSG00000030066_1 (sequence is synthesized)
ccgttgggcgtcgcggcgacggcgggaagatggcggcggcgggagccctggaacggagcttcgtggagctaagcggagctgagcgcgaaaggccgaggcactttcgggaattcacagtct

SEQ ID NO: 23102 - DNA, 120 bp, Artificial Sequence
  ENSG00000030066_2 (sequence is synthesized)
gcagcattgggactgcaaatgccgtggctggcgccgtaaaatacagtgaaagcgcgggaggcttttactacgtggagagtggcaagttgttctccgtaaccagaaacaggttcattcatt

SEQ ID NO: 23103 - DNA, 120 bp, Artificial Sequence
  ENSG00000030066_3 (sequence is synthesized)
ggaagacctctggagatacattggagctgatggaggagtcactggacataaatctgttgaataatgccattcgcctaaaattccaaaattgcagtgttttacctggaggggtttatgtct

SEQ ID NO: 23104 - DNA, 120 bp, Artificial Sequence
  ENSG00000030066_4 (sequence is synthesized)
ctgagactcagaatcgtgtgataatcttgatgttaaccaatcaaacagtgcacaggttacttttaccacacccctcccggatgtataggagtgagttggtagttgacagtcagatgcagt

SEQ ID NO: 23105 - DNA, 120 bp, Artificial Sequence
  ENSG00000030066_5 (sequence is synthesized)
caatattcactgacattggaaaagttgatttcacagatccttgcaactatcagttaattccagcagtacctggaatatctcctaattccaccgcctctacagcctggctcagcagtgatg

SEQ ID NO: 23106 - DNA, 120 bp, Artificial Sequence
  ENSG00000030066_6 (sequence is synthesized)
gggaggccctgtttgccttaccatgtgcttctgggggaatctttgttcttaagctacctccttatgacatacctggtatggtgtcagtcgtggaactgaaacagagttcagtaatgcaac

SEQ ID NO: 23107 - DNA, 120 bp, Artificial Sequence
  ENSG00000030066_7 (sequence is synthesized)
gattgcttacaggctggatgccaacagctatcaggggtgaccagtcgccttcagatcgtcccctcagtcttgctgttcattgtgtggagcatgatgccttcatctttgctttgtgtcagg

SEQ ID NO: 23108 - DNA, 120 bp, Artificial Sequence
  ENSG00000030066_8 (sequence is synthesized)
atcataaactacgaatgtggtcttacaaggagcaaatgtgcctaatggtagctgacatgctggagtatgtccctgtgaagaaagaccttcggcttactgctggaactggacacaaattac

SEQ ID NO: 23109 - DNA, 120 bp, Artificial Sequence
  ENSG00000030066_9 (sequence is synthesized)
ggcttgcttattcccccaccatgggactctacctggggatatacatgcatgcaccaaaacgaggacagttctgcattttccagttggtgagcactgagagtaatcgctatagtctcgatc

SEQ ID NO: 23110 - DNA, 120 bp, Artificial Sequence
  ENSG00000030066_10 (sequence is synthesized)
atatttcttcactgttcacttctcaggagacactgattgactttgccttaacttccacggatatctgggccctgtggcatgatgctgagaaccaaacagtagtgaaatacatcaactttg

SEQ ID NO: 23111 - DNA, 120 bp, Artificial Sequence
  ENSG00000030066_11 (sequence is synthesized)
aacataatgttgcaggtcagtggaatccagtttttatgcagcctctgccagaggaagagattgtcatcagagatgatcaagaccccagagagatgtatctgcaaagtctttttacaccag

SEQ ID NO: 23112 - DNA, 120 bp, Artificial Sequence
  ENSG00000030066_12 (sequence is synthesized)
gacaattcacaaatgaagctttatgtaaggctttacagattttctgccgaggaactgagaggaatttggatctttcctggagtgaactgaagaaagaagttactttagctgttgaaaatg

SEQ ID NO: 23113 - DNA, 120 bp, Artificial Sequence
  ENSG00000030066_13 (sequence is synthesized)
agcttcaaggaagtgtaacagagtatgaattctcccaggaggagtttcgaaatttacaacaagaattctggtgcaagttctatgcctgttgtcttcagtatcaagaagccctctctcacc

SEQ ID NO: 23114 - DNA, 120 bp, Artificial Sequence
  ENSG00000030066_14 (sequence is synthesized)
ctcttgccctacatttgaatccacacacaaacatggtgtgcctgctgaaaaaagggtacctgtctttccttattccctcatccttagtggatcatttgtatctcctgccttatgagaacc

SEQ ID NO: 23115 - DNA, 120 bp, Artificial Sequence
  ENSG00000030066_15 (sequence is synthesized)
ttttgacagaagatgagacaaccatatctgatgatgtggacatcgctcgggatgtcatatgtcttataaaatgcctccggctgattgaagagtcagtaactgtggatatgtcagttataa

SEQ ID NO: 23116 - DNA, 120 bp, Artificial Sequence
  ENSG00000030066_16 (sequence is synthesized)
tggaaatgagttgttataacctacagtctccggaaaaggctgcagagcagattctggaagatatgatcactattgatgtagaaaatgtgatggaggatatttgtagtaaactgcaagaga

SEQ ID NO: 23117 - DNA, 120 bp, Artificial Sequence
  ENSG00000030066_17 (sequence is synthesized)
ttaggaacccaatccatgcaattggactacttatacgggaaatggattatgaaacagaagtggaaatggaaaagggattcaatccagctcagcctttgaatattcgaatgaatcttaccc

SEQ ID NO: 23118 - DNA, 120 bp, Artificial Sequence
  ENSG00000030066_18 (sequence is synthesized)
agctctatggtagtaacacagcagggtatattgtgtgcagaggggtgcataaaatcgccagtactcgtttcctgatctgcagagatcttttgatcttacagcagctgttaatgaggcttg

SEQ ID NO: 23119 - DNA, 120 bp, Artificial Sequence
  ENSG00000030066_19 (sequence is synthesized)
gagatgctgtgatttggggaactggtcagctctttcaagctcagcaagacctactacatcgaacagctcccctactcttatcttattacctcattaaatggggaagtgagtgcttggcaa

SEQ ID NO: 23120 - DNA, 120 bp, Artificial Sequence
  ENSG00000030066_20 (sequence is synthesized)
ctgatgttccacttgacacactggagtctaatctccaacacttatcagtactggaattaacagactctggtgctttaatggcaaataggtttgtatctagtcctcagactattgtggagt

SEQ ID NO: 23121 - DNA, 120 bp, Artificial Sequence
  ENSG00000030066_21 (sequence is synthesized)
tattcttccaagaagttgcaagaaaacacattatatctcacctcttctctcagccaaaggcacctctgagccaaactggattgaattggcctgaaatgattactgcaattaccagttatt

SEQ ID NO: 23122 - DNA, 120 bp, Artificial Sequence
  ENSG00000030066_22 (sequence is synthesized)
tgctacatccctggtgtcaagtcaatgttggttcctgtcgatttatgctgggaaggtgttacctagttacaggagaaggacagaaggctctggaatgtttttgtcaggcagcatctgaag

SEQ ID NO: 23123 - DNA, 120 bp, Artificial Sequence
  ENSG00000030066_23 (sequence is synthesized)
taggcaaagaggaattcttggatcgcttgattcgctcagaggatggggagatcgtgtctacccccaggctgcagtattatgacaaggttttacgactactagatgtcattggtttgcctg

SEQ ID NO: 23124 - DNA, 120 bp, Artificial Sequence
  ENSG00000030066_24 (sequence is synthesized)
aactggttattcagttggctacatcagccataactgaagcaggtgatgactggaaaagtcaggctactctaaggacatgtattttcaaacatcatttggatttgggtcacaatagccaag

SEQ ID NO: 23125 - DNA, 120 bp, Artificial Sequence
  ENSG00000030066_25 (sequence is synthesized)
catatgaagccttaacccaaattcctgattccagcaggcaattagattgtttacggcagttggtggtagttctttgtgaacgctcacagctacaggatcttgtagagtttccctatgtga

SEQ ID NO: 23126 - DNA, 120 bp, Artificial Sequence
  ENSG00000030066_26 (sequence is synthesized)
atctgcataatgaggttgtgggaataattgagtcacgtgctagagctgtggaccttatgactcacaattactatgaacttctgtatgcctttcacatctatcgccacaattaccgcaagg

SEQ ID NO: 23127 - DNA, 120 bp, Artificial Sequence
  ENSG00000030066_27 (sequence is synthesized)
ctggcacagtgatgtttgagtatggaatgcggcttggcagagaagttcgaactctccggggacttgagaaacaaggcaactgttatctggctgctctcaattgtttacgacttattcgtc

SEQ ID NO: 23128 - DNA, 120 bp, Artificial Sequence
  ENSG00000030066_28 (sequence is synthesized)
cagaatatgcgtggattgtgcagccagtgtctggtgcagtgtatgatcgccctggagcatcccctaagaggaatcatgatggagaatgcacagctgcccccacaaatcgacaaattgaaa

SEQ ID NO: 23129 - DNA, 120 bp, Artificial Sequence
  ENSG00000030066_29 (sequence is synthesized)
tcctggaactggaagatctggagaaagagtgttccttggctcgcatccgcctcactttggctcagcatgatccatcagcggttgcagttgctggaagttcatcagcagaggaaatggtca

SEQ ID NO: 23130 - DNA, 120 bp, Artificial Sequence
  ENSG00000030066_30 (sequence is synthesized)
ctctcttggttcaggcgggcctctttgacactgccatatcactctgtcagacttttaagcttcccttaacgccagtctttgaagggcttgccttcaaatgcatcaaattgcaatttggag

SEQ ID NO: 23131 - DNA, 120 bp, Artificial Sequence
  ENSG00000030066_31 (sequence is synthesized)
gagaggcagcacaagcagaagcctgggcctggctagcagccaatcagctctcatctgtcatcactactaaggagtctagtgctacagatgaagcatggcgactattatccacttacctgg

SEQ ID NO: 23132 - DNA, 120 bp, Artificial Sequence
  ENSG00000030066_32 (sequence is synthesized)
agaggtacaaagtccagaataacttgtatcaccactgtgtaatcaacaagctcttgtctcatggagtgcctctgcctaattggcttataaacagttacaagaaggttgatgctgctgaat

SEQ ID NO: 23133 - DNA, 120 bp, Artificial Sequence
  ENSG00000030066_33 (sequence is synthesized)
tgcttcgtttatacttaaactatgaccttttagaagaagctgtggatttggtgtcagaatatgtggatgctgtattgggaaaaggacatcaatacttcggaattgagtttccactgtccg

SEQ ID NO: 23134 - DNA, 120 bp, Artificial Sequence
  ENSG00000030066_34 (sequence is synthesized)
caacagccccaatggtgtggcttccatactcctctattgatcagcttctccaagctctgggagagaacagtgccaacagtcacaacatcgcactgtcccagaaaatacttgacaaattgg

SEQ ID NO: 23135 - DNA, 120 bp, Artificial Sequence
  ENSG00000030066_35 (sequence is synthesized)
aggactaccagcaaaaagttgataaggcaacacgggatttattatatcgtcggaccttgtgatttggattgtcacctagcctttgtaaccgcttggtgcctcttaggacttaagactacc

SEQ ID NO: 23136 - DNA, 120 bp, Artificial Sequence
  ENSG00000030066_36 (sequence is synthesized)
ctacaggaaccctgtactcaaggccgatttttgtaactgtaaatgatgtgtacaacattcaagtctgcattctgcacaagataggagggcggaagagtcagaggaccctgtgcttgctgg

SEQ ID NO: 23137 - DNA, 120 bp, Artificial Sequence
  ENSG00000030066_37 (sequence is synthesized)
tggtgctaacacaatttctggtgttcaaccttggtctcaaatagctgcttttgtatatgattcacgagcttttttagagtttatatttttttaaactaccgaagacattcattatctgca

SEQ ID NO: 23138 - DNA, 120 bp, Artificial Sequence
  ENSG00000030066_38 (sequence is synthesized)
aattaagactcaccttcactttccaaaatagctgagggttgttggcttgttgtagctgaccaccaaaagcagtcactgcaaatcttttaattcttccctatcaccttttgtattttaatg

SEQ ID NO: 23139 - DNA, 120 bp, Artificial Sequence
  ENSG00000030066_39 (sequence is synthesized)
caattattttggtccagaactgacctgtattttctgtattgtacacaaaagctaataattttgtgtactttttatttattttggaggttttatatgatcttcaattgagtattaaataat

SEQ ID NO: 23140 - DNA, 120 bp, Artificial Sequence
  ENSG00000030066_40 (sequence is synthesized)
ttgcctagattaagcctaaaatgatgaccagctaattaaagaagatattttgaatctggttctgagctaaagttgagtaaattcttagctaagaaaaaattggaaatccatcatctatat

SEQ ID NO: 23141 - DNA, 120 bp, Artificial Sequence
  ENSG00000030066_41 (sequence is synthesized)
tagcaacagattctcagagtaaattgttaacttctatgatttatgataatcaagctggacttgatcatacaagttagtctcataatgtattggaccaaaatgtaaacttcattggtcaga

SEQ ID NO: 23142 - DNA, 120 bp, Artificial Sequence
  ENSG00000030066_42 (sequence is synthesized)
tttagaagcattcatgctcacaagttttgggaaagtgaaaaataataaaatcatcttggattttattctgtatattaaaatttatcttttaaggaaacaatctgtatactacttgcttgt

SEQ ID NO: 23143 - DNA, 120 bp, Artificial Sequence
  ENSG00000030066_43 (sequence is synthesized)
atagccttttgacccttcttgagtttttcagaagcctttaatttttatactttcaataccatatttacattatatactttaattaacaatgtgagtttctctgtggtactgttgttgata

SEQ ID NO: 23144 - DNA, 120 bp, Artificial Sequence
  ENSG00000030066_44 (sequence is synthesized)
ttcttgagacagttcagtggctgttataacaaaatgccttcagaaaacaaaaagttcagtggctcttgccgaatgttagtctggtgaatgttgcggttagcatttaggactttgcatttg

SEQ ID NO: 23145 - DNA, 120 bp, Artificial Sequence
  ENSG00000030066_45 (sequence is synthesized)
actttgcatttgtattttttcccctaaaattgtgattcattcatttaaatagttttctgtgttattctctatactttttttgtattttattgtatttatttctttttctttttttctctt

SEQ ID NO: 23146 - DNA, 120 bp, Artificial Sequence
  ENSG00000030066_46 (sequence is synthesized)
gtacagagtaagaacccactctttatcattctggataacttcatgagatgattaaaaatatggactgattgcagtggctcatacctgtcatgcccgcacattggtaggccaacaggggag

SEQ ID NO: 23147 - DNA, 76 bp, Artificial Sequence
  ENSG00000030066_47 (sequence is synthesized)
ggagaccccatctctatttaaatttaaaaatatataaagaaaaagaaaaagatggggtgataacttatgggaacat

SEQ ID NO: 23148 - DNA, 120 bp, Artificial Sequence
  ENSG00000030066_48 (sequence is synthesized)
tacattttaagttgagaattagttttcattaagaagaatagctttcttaaacttgacagttttttactttaaaaacttttttagcaatagagaggaactgagcaaaattctggttatttt

SEQ ID NO: 23149 - DNA, 120 bp, Artificial Sequence
  ENSG00000030066_49 (sequence is synthesized)
ctccttatgacatacctggtaagaatgggaactgagcatggatttaactttaaacaaggaatgttaacattgaaacagttcaacctcgtcatccaatgcagggattgcatctctactgcc

SEQ ID NO: 23150 - DNA, 120 bp, Artificial Sequence
  ENSG00000030066_50 (sequence is synthesized)
ccggaactggtcattcattattgcttgcctaatgagtccctaatgctttacttttatacagtggataaggaactataaagcatattggagcacggaaaaacaaatagacaagtataagac

SEQ ID NO: 23151 - DNA, 120 bp, Artificial Sequence
  ENSG00000030066_51 (sequence is synthesized)
agcctattctaaatcttgtagtagagatgggttgcctaattgtctgccctgagatggaggcattataacattataattaaattaattgaaacaaagacattaaataccctgcaccaagtt

SEQ ID NO: 23152 - DNA, 120 bp, Artificial Sequence
  ENSG00000030066_52 (sequence is synthesized)
tacttgttttggtcctttcaaaactattgtgtcattttgcttcttttgatttacaatttctactgagatatttgtgaaaaaaatctatgtttacaattcaattgttgtatattactaccc

SEQ ID NO: 23153 - DNA, 120 bp, Artificial Sequence
  ENSG00000030066_53 (sequence is synthesized)
ctttagttttcaagttcagaattattgtaggaagaaatattgcagagtggttttggagttagacctgacccaattcagacaagttacttaatcttttgtcattctctggcataaaatacg

SEQ ID NO: 23154 - DNA, 120 bp, Artificial Sequence
  ENSG00000030066_54 (sequence is synthesized)
gataatatctactttataggattgtttgggtattaatgagataattcaagtcgattgcttagaacagtaacagtgcctggcccacaaactgtgctcagtaaatggtagctgcttttattt

SEQ ID NO: 23155 - DNA, 120 bp, Artificial Sequence
  ENSG00000030066_55 (sequence is synthesized)
ctattgtgtttgttaatgcagtctacagttactgttttaaaggacacacactttgagtttttcctatcatactgatgggtcagatacatgcagctgtttctgttatatataactctggag

SEQ ID NO: 23156 - DNA, 120 bp, Artificial Sequence
  ENSG00000030066_56 (sequence is synthesized)
ccgagaaaaattagttgatttacatggagatcaaatccctgtccttggactcagtaatatgttatggttaagttaacaacttggcaaagaacttctttctttgtctcatagttacagtac

SEQ ID NO: 23157 - DNA, 120 bp, Artificial Sequence
  ENSG00000030066_57 (sequence is synthesized)
ctctgtaagaagagctctgctggtcgaaacaaaaataatttccattgagaaaatttaagcataaaagctatgaatcaccgttaatgatatcagaataaaatactgattttcacagttaaa

SEQ ID NO: 23158 - DNA, 120 bp, Artificial Sequence
  ENSG00000030066_58 (sequence is synthesized)
gttaactgcattttaaagaaccacaataatttaaacttgattatgtgaagacataccccaaagagattgttctctatttctataccatcctgaacttgcttgattttgtctgatctacga

SEQ ID NO: 23159 - DNA, 120 bp, Artificial Sequence
  ENSG00000030066_59 (sequence is synthesized)
gggcgccgtgtctcatgcctgtaatcctaacactttgagaggccgaggcaggcaaatcacttaagctcaggagttcgagaccaggctgggcaacagaaaccccgtctctactaaaaacac

SEQ ID NO: 23160 - DNA, 73 bp, Artificial Sequence
  ENSG00000030066_60 (sequence is synthesized)
aattagctgggcctggtggcaggtgcctataatcccagctcctcgggaggcaaggctgtacattgctccactg

SEQ ID NO: 23161 - DNA, 120 bp, Artificial Sequence
  ENSG00000030066_61 (sequence is synthesized)
tggtctcaaactcctgagttcaagcagtccacccacctcggcttcccaatgtgctgggattacaagtgtgaaccacagcacccagcctgaatttttcttctgcattttccagttggtgag

SEQ ID NO: 23162 - DNA, 120 bp, Artificial Sequence
  ENSG00000030066_62 (sequence is synthesized)
ggtgtttttattgcatttttatagtgcctcacaatttacagactacttttatttatattgccactggatatatacccgtgatacattttctgttttgaagtgctaaattgtttgttacaa

SEQ ID NO: 23163 - DNA, 120 bp, Artificial Sequence
  ENSG00000030110_0 (sequence is synthesized)
acagagcaacttcctctagagggagctgattggagccgggtgccgctggcacctctatgatcactggagtctcgcgggtccctcgggctgcacagggacaagtaaaggctacatccagat

SEQ ID NO: 23164 - DNA, 120 bp, Artificial Sequence
  ENSG00000030110_1 (sequence is synthesized)
gccgggaatgcactgacgcccattcctggaaactgggctcccactcagcccctgggagcagcagccgccagcccctcgggacctccatctccaccctgctgagccacccgggttgggcca

SEQ ID NO: 23165 - DNA, 120 bp, Artificial Sequence
  ENSG00000030110_2 (sequence is synthesized)
ggatcccggcaggctgatcccgtcctccactgagacctgaaaaatggcttcggggcaaggcccaggtcctcccaggcaggagtgcggagagcctgccctgccctctgcttctgaggagca

SEQ ID NO: 23166 - DNA, 120 bp, Artificial Sequence
  ENSG00000030110_3 (sequence is synthesized)
ggtagcccaggacacagaggaggttttccgcagctacgttttttaccgccatcagcaggaacaggaggctgaaggggtggctgcccctgccgacccagagatggtcaccttacctctgca

SEQ ID NO: 23167 - DNA, 120 bp, Artificial Sequence
  ENSG00000030110_4 (sequence is synthesized)
acctagcagcaccatggggcaggtgggacggcagctcgccatcatcggggacgacatcaaccgacgctatgactcagagttccagaccatgttgcagcacctgcagcccacggcagagaa

SEQ ID NO: 23168 - DNA, 120 bp, Artificial Sequence
  ENSG00000030110_5 (sequence is synthesized)
tgcctatgagtacttcaccaagattgccaccagcctgtttgagagtggcatcaattggggccgtgtggtggctcttctgggcttcggctaccgtctggccctacacgtctaccagcatgg

SEQ ID NO: 23169 - DNA, 120 bp, Artificial Sequence
  ENSG00000030110_6 (sequence is synthesized)
cctgactggcttcctaggccaggtgacccgcttcgtggtcgacttcatgctgcatcactgcattgcccggtggattgcacagaggggtggctgggtggcagccctgaacttgggcaatgg

SEQ ID NO: 23170 - DNA, 120 bp, Artificial Sequence
  ENSG00000030110_7 (sequence is synthesized)
tcccatcctgaacgtgctggtggttctgggtgtggttctgttgggccagtttgtggtacgaagattcttcaaatcatgactcccaagggtgccctttggggtcccggttcagacccctgc

SEQ ID NO: 23171 - DNA, 120 bp, Artificial Sequence
  ENSG00000030110_8 (sequence is synthesized)
ctggacttaagcgaagtctttgccttctctgttcccttgcaggggtcccccctcaagagtacagaagctttagcaagtgtgcactccagcttcggagggcccctgcgtgggggccagtca

SEQ ID NO: 23172 - DNA, 120 bp, Artificial Sequence
  ENSG00000030110_9 (sequence is synthesized)
gcacctcaacattgcatggtgctagtgggccctctctctgggcccaggggctgtggccgtctcctccctcagctctctgggacctccttagccctgtctgctaggcgctggggagactga

SEQ ID NO: 23173 - DNA, 120 bp, Artificial Sequence
  ENSG00000030110_10 (sequence is synthesized)
taacttggggaggcaagagactgggagccacttctccccagaaagtgtttaacggttttagctttttataatacccttgtgagagcccattcccaccattctacctgaggccaggacgtc

SEQ ID NO: 23174 - DNA, 120 bp, Artificial Sequence
  ENSG00000030110_11 (sequence is synthesized)
tggggtgtggggattggtgggtctatgttccccaggattcagctattctggaagatcagcaccctaagagatgggactaggacctgagcctggtcctggccgtccctaagcatgtgtccc

SEQ ID NO: 23175 - DNA, 120 bp, Artificial Sequence
  ENSG00000030110_12 (sequence is synthesized)
aggagcaggacctactaggagaggggggccaaggtcctgctcaactctacccctgctcccattcctccctccggccatactgcctttgcagttggactctcagggattctgggcttgggg

SEQ ID NO: 23176 - DNA, 120 bp, Artificial Sequence
  ENSG00000030110_13 (sequence is synthesized)
tgtggggtggggtggagtcgcagaccagagctgtctgaactcacgtgtcagaagcctccaagcctgcctcccaaggtcctctcagttctctcccttcctctctccttatagacacttgct

SEQ ID NO: 23177 - DNA, 120 bp, Artificial Sequence
  ENSG00000030110_14 (sequence is synthesized)
cccaacccattcactacaggtgaaggctctcacccccatccctgggggccttgggtgagtggcctgctaaggctcctccttgcccagactacagggcttaggacttggtttgttatatca

SEQ ID NO: 23178 - DNA, 120 bp, Artificial Sequence
  ENSG00000030110_15 (sequence is synthesized)
gggaaaaggagtagggagttcatctggagggttctaagtgggagaaggactatcaacaccactaggaatcccagaggtgggatcctccctcatggctctggcacagtgtaatccaggggt

SEQ ID NO: 23179 - DNA, 120 bp, Artificial Sequence
  ENSG00000030110_16 (sequence is synthesized)
gtagatgggggaactgtgaatacttgaactctgttcccccaccctccatgctcctcacctgtctaggtctcctcagggtggggggtgacagtgccttctctattgggcacagcctagggt

SEQ ID NO: 23180 - DNA, 120 bp, Artificial Sequence
  ENSG00000030110_17 (sequence is synthesized)
cttgggggtcaggggggagaagttcttgattcagccaaatgcagggaggggaggcagatggagcccataggccaccccctatcctctgagtgtttggaaataaactgtgcaatcccctca

SEQ ID NO: 23181 - DNA, 120 bp, Artificial Sequence
  ENSG00000030304_0 (sequence is synthesized)
agtcattagcagacaacccttttgcaacaaagtatgctttaaaatgtaaactgtggagccattttccttgcgttgtccagaaggaacttcgtcctgcgtgagcctggattaatcatgaga

SEQ ID NO: 23182 - DNA, 120 bp, Artificial Sequence
  ENSG00000030304_1 (sequence is synthesized)
gagctcgtcaacattccactggtacatattcttactctggttgccttcagcggaactgagaaacttccaaaagctcctgtcatcaccactcctcttgaaacagtggatgccttagttgaa

SEQ ID NO: 23183 - DNA, 120 bp, Artificial Sequence
  ENSG00000030304_2 (sequence is synthesized)
gaagtggctactttcatgtgtgcagtggaatcctacccccagcctgagatttcctggactagaaataaaattctcattaaactctttgacacccggtacagcatccgggagaatgggcag

SEQ ID NO: 23184 - DNA, 120 bp, Artificial Sequence
  ENSG00000030304_3 (sequence is synthesized)
ctcctcaccatcctgagtgtggaagacagtgatgatggcatttactgctgcacggccaacaatggtgtgggaggagctgtggagagttgtggagccctgcaagtgaagatgaaacctaaa

SEQ ID NO: 23185 - DNA, 120 bp, Artificial Sequence
  ENSG00000030304_4 (sequence is synthesized)
ataactcgtcctcccataaatgtgaaaataatagagggattaaaagcagtcctaccatgtactacaatgggtaatcccaaaccatcagtgtcttggataaagggagacagccctctcagg

SEQ ID NO: 23186 - DNA, 120 bp, Artificial Sequence
  ENSG00000030304_5 (sequence is synthesized)
gaaaattcccgaattgcagttcttgaatctgggagcttgaggattcataacgtacaaaaggaagatgcaggacagtatcgatgtgtggcaaaaaacagcctcgggacagcatattccaaa

SEQ ID NO: 23187 - DNA, 120 bp, Artificial Sequence
  ENSG00000030304_6 (sequence is synthesized)
gtggtgaagctggaagttgaggtttttgccaggatcctgcgggctcctgaatcccacaatgtcacctttggctcctttgtgaccctgcactgtacagcaacaggcattcctgtccccacc

SEQ ID NO: 23188 - DNA, 120 bp, Artificial Sequence
  ENSG00000030304_7 (sequence is synthesized)
atcacctggattgaaaacggaaatgctgtttcttctgggtccattcaagagagtgtgaaagaccgagtgattgactcaagactgcagctgtttatcaccaagccaggactctacacatgc

SEQ ID NO: 23189 - DNA, 120 bp, Artificial Sequence
  ENSG00000030304_8 (sequence is synthesized)
atagctaccaataagcatggggagaagttcagtactgccaaggctgcagccaccatcagcatagcagaatggagtaaaccacagaaagataacaaaggctactgcgcccagtacagaggg

SEQ ID NO: 23190 - DNA, 120 bp, Artificial Sequence
  ENSG00000030304_9 (sequence is synthesized)
gaggtgtgtaatgcagtcctggcaaaagatgctcttgtttttctcaacacctcctatgcggaccctgaggaggcccaagagctactggtccacacggcctggaatgaactgaaagtagtg

SEQ ID NO: 23191 - DNA, 120 bp, Artificial Sequence
  ENSG00000030304_10 (sequence is synthesized)
agcccagtctgccggccagctgctgaggctttgttgtgtaaccacatcttccaggagtgcagtcctggagtagtgcctactcctattcccatttgcagagagtactgcttggcagtaaag

SEQ ID NO: 23192 - DNA, 120 bp, Artificial Sequence
  ENSG00000030304_11 (sequence is synthesized)
gagctcttctgcgcaaaagaatggctggtaatggaagagaagacccacagaggactctacagatccgagatgcatttgctgtccgtgccagaatgcagcaagcttcccagcatgcattgg

SEQ ID NO: 23193 - DNA, 120 bp, Artificial Sequence
  ENSG00000030304_12 (sequence is synthesized)
gaccccacggcctgtgccagactgccacatctagattataacaaagaaaacctaaaaacattcccaccaatgacgtcctcaaagccaagtgtggacattccaaatctgccttcctcctcc

SEQ ID NO: 23194 - DNA, 120 bp, Artificial Sequence
  ENSG00000030304_13 (sequence is synthesized)
tcttcttccttctctgtctcacctacatactccatgactgtaataatctccatcatgtccagctttgcaatatttgtgcttcttaccataactactctctattgctgccgaagaagaaaa

SEQ ID NO: 23195 - DNA, 120 bp, Artificial Sequence
  ENSG00000030304_14 (sequence is synthesized)
caatggaaaaataagaaaagagaatcagcagcagtaaccctcaccacactgccttctgagctcttactagatagacttcatcccaaccccatgtaccagaggatgccgctccttctgaac

SEQ ID NO: 23196 - DNA, 120 bp, Artificial Sequence
  ENSG00000030304_15 (sequence is synthesized)
cccaaattgctcagcctggagtatccaaggaataacattgaatatgtgagagacatcggagagggagcgtttggaagggtgtttcaagcaagggcaccaggcttacttccctatgaacct

SEQ ID NO: 23197 - DNA, 120 bp, Artificial Sequence
  ENSG00000030304_16 (sequence is synthesized)
ttcactatggtggcagtaaagatgctcaaagaagaagcctcggcagatatgcaagcggactttcagagggaggcagccctcatggcagaatttgacaaccctaacattgtgaagctatta

SEQ ID NO: 23198 - DNA, 120 bp, Artificial Sequence
  ENSG00000030304_17 (sequence is synthesized)
ggagtgtgtgctgtcgggaagccaatgtgcctgctctttgaatacatggcctatggtgacctcaatgagttcctccgcagcatgtcccctcacaccgtgtgcagcctcagtcacagtgac

SEQ ID NO: 23199 - DNA, 120 bp, Artificial Sequence
  ENSG00000030304_18 (sequence is synthesized)
ttgtctatgagggctcaggtctccagccctgggcccccacccctctcctgtgctgagcagctttgcattgccaggcaggtggcagctggcatggcttacctctcagaacgtaagtttgtt

SEQ ID NO: 23200 - DNA, 120 bp, Artificial Sequence
  ENSG00000030304_19 (sequence is synthesized)
caccgagatttagccaccaggaactgcctggtgggcgagaacatggtggtgaaaattgccgactttggcctctccaggaacatctactcagcagactactacaaagctaatgaaaacgac

SEQ ID NO: 23201 - DNA, 120 bp, Artificial Sequence
  ENSG00000030304_20 (sequence is synthesized)
gctatccctatccgttggatgccaccagagtccattttttataaccgctacactacagagtctgatgtgtgggcctatggcgtggtcctctgggagatcttctcctatggcctgcagccc

SEQ ID NO: 23202 - DNA, 120 bp, Artificial Sequence
  ENSG00000030304_21 (sequence is synthesized)
tactatgggatggcccatgaggaggtcatttactacgtgcgagatggcaacatcctctcctgccctgagaactgccccgtggagctgtacaatctcatgcgtctatgttggagcaagctg

SEQ ID NO: 23203 - DNA, 120 bp, Artificial Sequence
  ENSG00000030304_22 (sequence is synthesized)
cctgcagacagacccagtttcaccagtattcaccgaattctggaacgcatgtgtgagagggcagagggaactgtgagtgtctaaggttgaagacgttcaaataaaatgctgcagtttcct

SEQ ID NO: 23204 - DNA, 120 bp, Artificial Sequence
  ENSG00000030304_23 (sequence is synthesized)
ctcagactctgtgagccaggggaatcctacaccagaggcccaacaagacccacataggaaagagtaagagtaaacatgagtagtgtgttgtttgcttcccagggagagcaaagacagtgc

SEQ ID NO: 23205 - DNA, 120 bp, Artificial Sequence
  ENSG00000030304_24 (sequence is synthesized)
aaaacccatgtggtagacggacccattgaaagccagtgattggaaacacaggctaggaaatgtgtcagataatggagacaactattcttcttcatgaaggtttgtaatacacactgcaca

SEQ ID NO: 23206 - DNA, 120 bp, Artificial Sequence
  ENSG00000030304_25 (sequence is synthesized)
gggaagaatgtcatcctgttcagtttccaaagtagctggtcacagagtaaagctctgctgtattaaattttaatatgaaatgggattcagagcttcattttttaattgagttaattcctg

SEQ ID NO: 23207 - DNA, 120 bp, Artificial Sequence
  ENSG00000030304_26 (sequence is synthesized)
tccattgtgaaagtagcttaatcgtcatgtaagacacttaggtgaagtacagaaaactaaaaagaaggaaaagccactcattctgtctccccccaaagacgagtcttagtgttttattaa

SEQ ID NO: 23208 - DNA, 120 bp, Artificial Sequence
  ENSG00000030304_27 (sequence is synthesized)
atctttcttgcatttaatgcataattttatatttgtttgtattctgcagagttgtggttacattttattgatagagggtttctaaggaatgaaacagcaaatcagcaagcctgtaactct

SEQ ID NO: 23209 - DNA, 120 bp, Artificial Sequence
  ENSG00000030304_28 (sequence is synthesized)
gagttcccttttctgtcctgtgcccctccttttttcctttctgtgcatttgtcatgaattaagtctgcttattttattcctccagttttcttgaaacaagtttttgtatcttactgattt

SEQ ID NO: 23210 - DNA, 120 bp, Artificial Sequence
  ENSG00000030304_29 (sequence is synthesized)
accttttcctttaaaaattgtattggtatcttttccattgctttaatctttatttcttcttctttccaggacttctgtccttttttagttattaagctatttttttcttttatttcattc

SEQ ID NO: 23211 - DNA, 120 bp, Artificial Sequence
  ENSG00000030304_30 (sequence is synthesized)
atgtaataaacactctggcagaaataataacattttaaataccattgtagattgatatgtatatgccttttgcaaagtattactatttttcctgcatttgcctttgaagccacacatttc

SEQ ID NO: 23212 - DNA, 120 bp, Artificial Sequence
  ENSG00000030304_31 (sequence is synthesized)
aacattctcacctattaatattattactagagtctatttaaatctcttaaaccataatttataatatgagatttcacaagatacacttgtggctctgagttatttcaaaactgatatttc

SEQ ID NO: 23213 - DNA, 120 bp, Artificial Sequence
  ENSG00000030304_32 (sequence is synthesized)
tgtgcattctgacattttattccttttagaaacaaattcagttggctgtagaattaatatcgttctgcttaacaactttgtgcatgacatattaactgattttgttgtatttcatgattt

SEQ ID NO: 23214 - DNA, 120 bp, Artificial Sequence
  ENSG00000030304_33 (sequence is synthesized)
aaaaaaaaaagcagcagctctggaactcagattcctgggggttcagattttttctcagtggatcctcacacaatacatctttatctaagtccatacatgatctgagtttatttctgatat

SEQ ID NO: 23215 - DNA, 120 bp, Artificial Sequence
  ENSG00000030304_34 (sequence is synthesized)
ttctcctgaaaacgaacagggaagagaaaataacagtctactctataccagcttatcttaattcagactaattggtagttagggcattggaggaatggtgtgaattcttgaaagtagatt

SEQ ID NO: 23216 - DNA, 120 bp, Artificial Sequence
  ENSG00000030304_35 (sequence is synthesized)
ttcgctgtctgctggaaaactctgcctgaaatccccaaatctgcctcatgtaacagcttgacatctttggtgggaaacctgccatttcttattcatagtgtctccaggcaaccaagacaa

SEQ ID NO: 23217 - DNA, 120 bp, Artificial Sequence
  ENSG00000030304_36 (sequence is synthesized)
aaatgtagaaattttcctagactttgccctctctttcatcatcagttttctattagttttacttcctaaaatcctcctgctgacatcctcttcccttcaacccaagagccaatgactcaa

SEQ ID NO: 23218 - DNA, 120 bp, Artificial Sequence
  ENSG00000030304_37 (sequence is synthesized)
cctctaccgttgcccaccctgtctattagctggccttcctctcatttcagacctgaacagattctgtaggatacaacgacagtaaggcggtccttagtcacagttctggttcataaatag

SEQ ID NO: 23219 - DNA, 120 bp, Artificial Sequence
  ENSG00000030304_38 (sequence is synthesized)
cgaggtcagcatttaggactgagacctaaagaagtgcttcagataaaaatcatgagtctaagtccaaaattgatactgtaatccaaatgactgaataaagaataaagttgcagcgtgtgt

SEQ ID NO: 23220 - DNA, 120 bp, Artificial Sequence
  ENSG00000030304_39 (sequence is synthesized)
ctaaagcagaaagtcaagatgccaacaaagcagaaaagttggagagggccaccagcaagtctagaacttgagcatagatatccatggcttattttagatggttcatgtatgctctgcaaa

SEQ ID NO: 23221 - DNA, 120 bp, Artificial Sequence
  ENSG00000030304_40 (sequence is synthesized)
attcaaagacagcttcgggctttctccgctgataaagttttgttgtaaaagacagacatagaagtcaggctgacagaaaatagagtaacagtaatcataaaaattataatatcagctagc

SEQ ID NO: 23222 - DNA, 120 bp, Artificial Sequence
  ENSG00000030304_41 (sequence is synthesized)
atttattgaaatcttaccatgtgtattctgaggcctttaaatatatgaacttaaacctcacaacatccctgtaatgttggtactatcattatatacattttagttttgctttgttttgtt

SEQ ID NO: 23223 - DNA, 85 bp, Artificial Sequence
  ENSG00000030304_42 (sequence is synthesized)
agcctccaacagtcacagagagattgtgcaactggcccgagtgcacacagcaacagagcctactttttgaccaaaagaggccgaa

SEQ ID NO: 23224 - DNA, 120 bp, Artificial Sequence
  ENSG00000030304_43 (sequence is synthesized)
cacagcaacagagcctactttttgaccaaaagaggccgaattctcaaccactatactgtagagcctctgtacatgatagaagcaataactgaacctcagtaactctgtggaagtgatttg

SEQ ID NO: 23225 - DNA, 120 bp, Artificial Sequence
  ENSG00000030304_44 (sequence is synthesized)
taatttgcatgtcgtttcaagcacactctatatctatattttattctattaacttcctaagtctttttaatgaatagcaaaaaaagtatatttcagcattatcaatttaagttaatcata

SEQ ID NO: 23226 - DNA, 120 bp, Artificial Sequence
  ENSG00000030304_45 (sequence is synthesized)
acatctaataggtgacatgtttattttttcatgagttctaattacattttcaagttaagatcactgacttattccctaagtgctcgatctaatgttctgaatcacaggagtatagatgca

SEQ ID NO: 23227 - DNA, 120 bp, Artificial Sequence
  ENSG00000030304_46 (sequence is synthesized)
ttattcaccaatattgtttacttttttaaataagattttttttcatggtagaatcatcatatacattcaaaaaggtagacaaaagagagacactcacagtgtcactgttaccaagtgcca

SEQ ID NO: 23228 - DNA, 120 bp, Artificial Sequence
  ENSG00000030304_47 (sequence is synthesized)
ggacagatatcagtaaggcaccagcagtcatttttagtgatcaaataccaaacatggtaagataccagagtatttttcacatgacacccaaaaacatattctctgctatcgtggtagagc

SEQ ID NO: 23229 - DNA, 120 bp, Artificial Sequence
  ENSG00000030304_48 (sequence is synthesized)
agaaaaagaacactttcttttcattttacagtatattacgaacctgttccacgtcattaaatattcttctaaaaacccaattttggaataatattctattttattcatatactgtaattt

SEQ ID NO: 23230 - DNA, 120 bp, Artificial Sequence
  ENSG00000030304_49 (sequence is synthesized)
agctaatcaatcttgtatttttgaacatttaggttttttccaatttttatcattataaaaaatgctgtaattaacatccttatttgttcatgtccacatttctttttatgaaaattcaga

SEQ ID NO: 23231 - DNA, 120 bp, Artificial Sequence
  ENSG00000030304_50 (sequence is synthesized)
gaaaggaaatgtctggaccaaatggcatgtacaatattaacacttctgttatgtggtttcatattctgcagaaatattactgccacttctacattgtacaagagatctcatagccctaaa

SEQ ID NO: 23232 - DNA, 120 bp, Artificial Sequence
  ENSG00000030304_51 (sequence is synthesized)
catttgctttcatagataattttctgttttttagaaatcttttgtctctttggttatagaaaaagagaacctctttttaattttattttttaaattactagtcaggttgaatgtttcttg

SEQ ID NO: 23233 - DNA, 120 bp, Artificial Sequence
  ENSG00000030304_52 (sequence is synthesized)
ttcctaggtcattaacagtttttattttggcaattgtctacagcccatttttctgctgtgttcattttctaatcgaattatgggatttatcttgtaaaaagcctattaagcctttttcat

SEQ ID NO: 23234 - DNA, 120 bp, Artificial Sequence
  ENSG00000030304_53 (sequence is synthesized)
aaaagcctattaagcctttttcatactttacacaagagatcacatctacttactttaccttaaaataacatttacttattttcttataaaagtaatatattatgtttgaaaagaaaaata

SEQ ID NO: 23235 - DNA, 120 bp, Artificial Sequence
  ENSG00000030304_54 (sequence is synthesized)
gtataatcataatagacaataataaaaatgaaaaaacaccaaccagaggtaattaacattaacatcataatattcttccaggctttttcagatagacaggtaggtaagtaggttggtagg

SEQ ID NO: 23236 - DNA, 120 bp, Artificial Sequence
  ENSG00000030304_55 (sequence is synthesized)
taaatagatagatagatgatacatagagagagatagatagataatttaaacaaaaataagatcatactgctacattacttcaagccttgcttttatcacttaatatatcttaaacatctt

SEQ ID NO: 23237 - DNA, 120 bp, Artificial Sequence
  ENSG00000030304_56 (sequence is synthesized)
ctacatgaacaagtattcatgtgcaacattaattttgatggttgaatagtattatacagatttatcgtaattgacataactattctactgttagacatttggtttatttctatttttcca

SEQ ID NO: 23238 - DNA, 120 bp, Artificial Sequence
  ENSG00000030304_57 (sequence is synthesized)
ttataaaatgtaatgtttggatcatcctgttgctaaattttgtaagcatttatcttaagtgatttctttagctataactcctagaagtgaaatttctagattaaaggataaatgcacttt

SEQ ID NO: 23239 - DNA, 120 bp, Artificial Sequence
  ENSG00000030304_58 (sequence is synthesized)
taatactttttaaatatattaaaaaattaccttcctgaattattttattaacatgtacctctcctagtcagataagacagcccatttatttcagtctcaccaatactgagtatagcattt

SEQ ID NO: 23240 - DNA, 120 bp, Artificial Sequence
  ENSG00000030304_59 (sequence is synthesized)
taatcattgccaatataatagctaatagcttaaagttatttcatagcttatatttacacttctttaaatactaataaaattgaacattgtttaatgttttgaggatacttgattggtgat

SEQ ID NO: 23241 - DNA, 120 bp, Artificial Sequence
  ENSG00000030304_60 (sequence is synthesized)
ttgcctcctactattatttttctactgggtatatctttttcttgttgctttgtaagagcactttatatattaaggagttaaattttgtgatatatgtttcaactacttttatcatgttaa

SEQ ID NO: 23242 - DNA, 120 bp, Artificial Sequence
  ENSG00000030304_61 (sequence is synthesized)
aaatatagacttctatttgtcttttattgtaggttttatcaatcagaaaagaatgttgacttttccgtccattcagatgattgtggcttttttccctaatggatttgttaatatgttcaa

SEQ ID NO: 23243 - DNA, 120 bp, Artificial Sequence
  ENSG00000030304_62 (sequence is synthesized)
ttgtatgaatttatttcctaatgtagcgatatccttgtcttctaggaataaactttttgggcgaatcatatcaatcttctacttaactaccaaattaatttacatatatttgcatcaata

SEQ ID NO: 23244 - DNA, 120 bp, Artificial Sequence
  ENSG00000030304_63 (sequence is synthesized)
ttaagttcataaaattaaaagtttatcattttcatctctgttagagttttgtattggcattagcatttgtattagcattgtattaggaaaaactcaggagtttttctctataatcttggt

SEQ ID NO: 23245 - DNA, 120 bp, Artificial Sequence
  ENSG00000030304_64 (sequence is synthesized)
tggttagtttatttttaaataattgttatttatgaaagtaatacataaaaatgttgtttaaaaaaactcacaagagggtaaaaattaaaaaaataataaaagttcccttcttccttttca

SEQ ID NO: 23246 - DNA, 120 bp, Artificial Sequence
  ENSG00000030304_65 (sequence is synthesized)
tagtcccagcctaagtgctaaccacttcacccatttatagtgttagttcttctggtgattaccagtgcaattctaacaaataggtttgcatttctctttctgaattgatcaattttttaa

SEQ ID NO: 23247 - DNA, 120 bp, Artificial Sequence
  ENSG00000030304_66 (sequence is synthesized)
aaatatgcagcactctgactcaaactccctttctttttcctgagatatgttaacttctaatgttatattgtttatcacaactttcacaaatatttctaaataaaggttacctactgattc

SEQ ID NO: 23248 - DNA, 120 bp, Artificial Sequence
  ENSG00000030304_67 (sequence is synthesized)
tggattgtgctacataaaattagagcttccaaatttccctccatcacttctccctgctctctactctcacaatcagtcaactatacacctatttctacgctgtcaactatatgttcattt

SEQ ID NO: 23249 - DNA, 120 bp, Artificial Sequence
  ENSG00000030304_68 (sequence is synthesized)
ctatgaatctgtaatatttgcattttgttctggaacaaattaagatttaggtgctttgactagattgattctaaacatcaaaaaacaaaaataaaatatctgcaattatgtgatcatgta

SEQ ID NO: 23250 - DNA, 120 bp, Artificial Sequence
  ENSG00000030304_69 (sequence is synthesized)
ccctacccattagccccaagatcatagaaaaatcttccaagctggaaactggttgacaatgatcctgactttcagtaggtgtgttttttaaactctgtatacctttttcctctacctgtg

SEQ ID NO: 23251 - DNA, 120 bp, Artificial Sequence
  ENSG00000030304_70 (sequence is synthesized)
ttgttatttgaatatgaagttgggagaagacatatcagagattcccaatctaatacgttttaaatttgacgtttttttcccttagactagcattaattgtgtttcacaacaaaacgagat

SEQ ID NO: 23252 - DNA, 120 bp, Artificial Sequence
  ENSG00000030304_71 (sequence is synthesized)
agcatttcatctcacgggacagtacactagatttcatgaggtctcatattatttacagtaaaaagtttctttcataaacgcgcttttttcaagaacaatttaccatgatgatgtcttgaa

SEQ ID NO: 23253 - DNA, 120 bp, Artificial Sequence
  ENSG00000030304_72 (sequence is synthesized)
tgtatttcatcagaaaacagaggctttccaagtttttctccccttgttcgtgctttttccttttctccttgatcagtgagacgtttcagttccttttcaaatttagcttcttcaccttgg

SEQ ID NO: 23254 - DNA, 120 bp, Artificial Sequence
  ENSG00000030304_73 (sequence is synthesized)
tctatcccaaccctataggacattcatggcttaatggattatccctctttaaattcatcacttcaatttgtctctgtctttgctgcctcctatttataaaaatgtttaaaatgtccccat

SEQ ID NO: 23255 - DNA, 120 bp, Artificial Sequence
  ENSG00000030304_74 (sequence is synthesized)
gttgagggtgctaaaggcattcacacccagtttgtggcttctgccctccagctaagatcgttccttagctgtccccaaatatgagaatgaatatacaatgataaaacaaaaataaatcaa

SEQ ID NO: 23256 - DNA, 120 bp, Artificial Sequence
  ENSG00000030419_0 (sequence is synthesized)
gctcctcgctgaagatggaggaagtaaaaacaggattacccttagctacagatccactgccttagtttccaccaccaactgcagtgcacaaacacacgttaggcacaggaaagaaagaaa

SEQ ID NO: 23257 - DNA, 120 bp, Artificial Sequence
  ENSG00000030419_1 (sequence is synthesized)
gacagaggacacattaacagtaaacacaaacaaaagggtgatgggattattttactgcatgcactgctgagcccgacattgtcacctcctctttgaggggttagaagaagctgagatctc

SEQ ID NO: 23258 - DNA, 120 bp, Artificial Sequence
  ENSG00000030419_2 (sequence is synthesized)
ccgacagagctggaaatggtgatgaatcttttttaatcaaaggacaatttcttttcattgcactttgactatggaaacagaggctattgatggctatataacgtgtgacaatgagctttc

SEQ ID NO: 23259 - DNA, 120 bp, Artificial Sequence
  ENSG00000030419_3 (sequence is synthesized)
acccgaaagggagcactccaatatggcaattgacctcacctcaagcacacccaatggacagcatgcctcaccaagtcacatgacaagcacaaattcagtaaagctagaaatgcagagtga

SEQ ID NO: 23260 - DNA, 120 bp, Artificial Sequence
  ENSG00000030419_4 (sequence is synthesized)
tgaagagtgtgacaggaaacccctgagccgtgaagatgagatcaggggccatgatgagggtagcagcctagaagaacccctaattgagagcagcgaggtggctgacaacaggaaagtcca

SEQ ID NO: 23261 - DNA, 120 bp, Artificial Sequence
  ENSG00000030419_5 (sequence is synthesized)
ggagcttcaaggcgagggaggaatccggcttccgaatggtaaactgaaatgtgacgtctgtggcatggtttgcattgggcccaatgtgcttatggtacataaaaggagtcacactggtga

SEQ ID NO: 23262 - DNA, 120 bp, Artificial Sequence
  ENSG00000030419_6 (sequence is synthesized)
acgccccttccactgtaaccagtgtggagcttcttttactcagaagggcaaccttctgagacacataaagttacactctggagagaagccgttcaaatgtcctttctgtagctacgcctg

SEQ ID NO: 23263 - DNA, 120 bp, Artificial Sequence
  ENSG00000030419_7 (sequence is synthesized)
tagaagaagggacgccctcacaggacacctcaggacccattctgtgggtaaacctcacaagtgcaactactgtggacgaagctacaagcagcgcagttcactggaggagcacaaggaacg

SEQ ID NO: 23264 - DNA, 120 bp, Artificial Sequence
  ENSG00000030419_8 (sequence is synthesized)
ctgccacaactatctccagaatgtcagcatggaggctgctgggcaggtcatgagtcaccatgtacctcctatggaagattgtaaggaacaagagcctattatggacaacaatatttctct

SEQ ID NO: 23265 - DNA, 120 bp, Artificial Sequence
  ENSG00000030419_9 (sequence is synthesized)
ggtgccttttgagagacctgctgtcatagagaagctcacggggaatatgggaaaacgtaaaagctccactccacaaaagtttgtgggggaaaagctcatgcgattcagctacccagatat

SEQ ID NO: 23266 - DNA, 120 bp, Artificial Sequence
  ENSG00000030419_10 (sequence is synthesized)
tcactttgatatgaacttaacatatgagaaggaggctgagctgatgcagtctcatatgatggaccaagccatcaacaatgcaatcacctaccttggagctgaggcccttcaccctctgat

SEQ ID NO: 23267 - DNA, 120 bp, Artificial Sequence
  ENSG00000030419_11 (sequence is synthesized)
gcagcacccgccaagcacaatcgctgaagtggccccagttataagctcagcttattctcaggtctatcatccaaataggatagaaagacccattagcagggaaactgctgatagtcatga

SEQ ID NO: 23268 - DNA, 120 bp, Artificial Sequence
  ENSG00000030419_12 (sequence is synthesized)
aaacaacatggatggccccatctctctcatcagaccaaagagtcgaccccaggaaagagaggcctctcccagcaatagctgcctggattccactgactcagaaagcagccatgatgacca

SEQ ID NO: 23269 - DNA, 120 bp, Artificial Sequence
  ENSG00000030419_13 (sequence is synthesized)
ccagtcctaccaaggacaccctgccttaaatcccaagaggaaacaaagcccagcttacatgaaggaggatgtcaaagctttggatactaccaaggctcctaagggctctctgaaggacat

SEQ ID NO: 23270 - DNA, 120 bp, Artificial Sequence
  ENSG00000030419_14 (sequence is synthesized)
ctacaaggtcttcaatggagaaggagaacagattagggccttcaagtgtgagcactgccgagtccttttcctagaccatgtcatgtacaccattcacatgggttgccatggctaccggga

SEQ ID NO: 23271 - DNA, 120 bp, Artificial Sequence
  ENSG00000030419_15 (sequence is synthesized)
cccactggaatgcaacatctgtggctacagaagccaggaccgttatgagttttcatcacacattgttcgaggggagcacacattccactaggccttttcattccaaaggggacccctatg

SEQ ID NO: 23272 - DNA, 120 bp, Artificial Sequence
  ENSG00000030419_16 (sequence is synthesized)
tcctcaaatgttgacataccttttattttttttaatattattactgttgataattcttattttgtggaggcagtgtcatttgctctgcctaattacgataaggaagaaacagaagagaga

SEQ ID NO: 23273 - DNA, 120 bp, Artificial Sequence
  ENSG00000030419_17 (sequence is synthesized)
aggggcgggaatattgtttctttatcacctggcttgtttattttgtgggaatttaagagcagtccatttctaccaaggcatatcatgctttgaaaaatcacttgattcataaagattcac

SEQ ID NO: 23274 - DNA, 120 bp, Artificial Sequence
  ENSG00000030419_18 (sequence is synthesized)
ctaagagattctgatttgccactgatattcagaattatgatggaagacaggaaagttcagagttttctgggtaggactttggtggtttaaaaatggtataagtaactttattcttgaaag

SEQ ID NO: 23275 - DNA, 120 bp, Artificial Sequence
  ENSG00000030419_19 (sequence is synthesized)
aagaatgtgtttcaaactgtaaaccaattttttgttcttcagagatcatggaacacaaacacattgttattttcagtgataactcctaagaggagctgagttgttgtgggttctatgttt

SEQ ID NO: 23276 - DNA, 120 bp, Artificial Sequence
  ENSG00000030419_20 (sequence is synthesized)
acttcccctatggaatttataattcagtatgttttacactgtaccatatagcaaaacttttaaactacaggtagttaagggccacctacaatacatctgaggtcctgtgatcttattttt

SEQ ID NO: 23277 - DNA, 120 bp, Artificial Sequence
  ENSG00000030419_21 (sequence is synthesized)
ctaaacgtaagcactgtttttccatagttttgatgactggcattttatagacaccctggcagccttacttttaacacctttaaggaatagtatttttatgtagttttcagaataacatat

SEQ ID NO: 23278 - DNA, 120 bp, Artificial Sequence
  ENSG00000030419_22 (sequence is synthesized)
ggtctaagagtggataaaaggcagtcaataatttctgggagggacttctactttcataaatttgtttgagaggttttcttttaaagttgtaatgtgatggcagcatagtatatgtatttg

SEQ ID NO: 23279 - DNA, 120 bp, Artificial Sequence
  ENSG00000030419_23 (sequence is synthesized)
tttctaaaagtatgcttacgattgtcactttatcagcatttaatcagtgttaaccagtcagcagaaaaatataattatgctaacagtagggggagaaaacccacttagaaatcccttttc

SEQ ID NO: 23280 - DNA, 120 bp, Artificial Sequence
  ENSG00000030419_24 (sequence is synthesized)
tggtatttctcttttcactagtttttttcaagatgtgacctcccggtgttctgtccatagttcattcatcctttactcttcgagtagaaggtcttaaaagtcttcctgtcggctgtttct

SEQ ID NO: 23281 - DNA, 120 bp, Artificial Sequence
  ENSG00000030419_25 (sequence is synthesized)
ttcaaaatctcctcagagcaattgctaatttggcctgaatctggtaacttgaaccctgtaaggttacagaactagggctatttattttagcatttcttcagtagtatttactactcttgt

SEQ ID NO: 23282 - DNA, 120 bp, Artificial Sequence
  ENSG00000030419_26 (sequence is synthesized)
tgcaaagaaaagggaatgggacttctttgtaacctgtaccttggacaacagataaaagaaacaaaaaaataagaaagtttacttttacccttcttggagtctagaatgtgacagaacccc

SEQ ID NO: 23283 - DNA, 120 bp, Artificial Sequence
  ENSG00000030419_27 (sequence is synthesized)
caaaggaaagtcctgcacatttttctgtttccaaaacatttaattgtgtaagtccttgtcagaaatgaatctcaatcccttagtatagaattccccttacatggtataggttgccatatt

SEQ ID NO: 23284 - DNA, 120 bp, Artificial Sequence
  ENSG00000030419_28 (sequence is synthesized)
tcatgtgcagattttaatttcatttatgtgggcgctctgttttttctttgcagtccagccacattagaggggaggaaccgagtgatattgattcaagtcattttagggggacatacttgg

SEQ ID NO: 23285 - DNA, 120 bp, Artificial Sequence
  ENSG00000030419_29 (sequence is synthesized)
aaggcagaacttgctgcttctgtttggggaggacagacctgactgtgactggattatctgataaccatttgtgaatactgaaattctgttaggcagtaactgataactgctctaaaggat

SEQ ID NO: 23286 - DNA, 120 bp, Artificial Sequence
  ENSG00000030419_30 (sequence is synthesized)
cattaaataggatgctgaaattatgtatcttaatacagtgtggtatgagaattaccaagtcaagagaattgtggacataagcaagtttggccccaatactgctcttaactcattttccag

SEQ ID NO: 23287 - DNA, 120 bp, Artificial Sequence
  ENSG00000030419_31 (sequence is synthesized)
cttactatttgctatttaaatggtaggcaccagctaagcacttctaagcactaacacagctagaactaggcaaaaatggttagaactcagctctcttctactagtccctgtcataattat

SEQ ID NO: 23288 - DNA, 120 bp, Artificial Sequence
  ENSG00000030419_32 (sequence is synthesized)
gggcttggcttggagggggcaagggagggaaagagagaagggggaaacacaaaaaacttctttctttctccctccgtttatcttcagcccgacattgtcacctcctctttgaggggttag

SEQ ID NO: 23289 - DNA, 120 bp, Artificial Sequence
  ENSG00000030419_33 (sequence is synthesized)
agctgattccacattagtctgtaggctgcctaaaagaatgaattggttatttgaatattttcatctcagatcgggtaacacggagaaaatttgcaacaatatagaagacatctgttgttt

SEQ ID NO: 23290 - DNA, 120 bp, Artificial Sequence
  ENSG00000030419_34 (sequence is synthesized)
gacatgaatgtctttctcagtctattccccaggacccctcttatcccgcttcaggtcccggtcaatgcggtgcgctttccgaaatggggccgcagagttgccggcggagaccagtaggtg

SEQ ID NO: 23291 - DNA, 120 bp, Artificial Sequence
  ENSG00000030419_35 (sequence is synthesized)
ggaggctccacgcacactccccgactcggccgggacgcggctcccggactccgcgcagggcgccaagatcgccgccccgctcccttcccccggcctccccaccaatcccagtttgaaaga

SEQ ID NO: 23292 - DNA, 120 bp, Artificial Sequence
  ENSG00000030419_36 (sequence is synthesized)
ccaagtcacatgacaagcaggtctttttcaaaaatatagaattagaagtgtcctttgatatacttctgttccttgccagattacattcaaccattaatttaagcaaattcagtaaagcta

SEQ ID NO: 23293 - DNA, 120 bp, Artificial Sequence
  ENSG00000030419_37 (sequence is synthesized)
atagctactgttatagattttgctaaagaaagaacaacacagatttattcctgttcattctagtattataaaacatgagcctgcttactagtctgaactatcccaaggtggcatttggga

SEQ ID NO: 23294 - DNA, 120 bp, Artificial Sequence
  ENSG00000030419_38 (sequence is synthesized)
gctggtgcttacctgtatcaggtaagaaaggttagaatttgctggttgttgttttgacttgccaggtttatgactggattttttgttgttgttgggtaaaaaatgtggaaacgtcacttc

SEQ ID NO: 23295 - DNA, 120 bp, Artificial Sequence
  ENSG00000030419_39 (sequence is synthesized)
gtagattacaattcaatttttttgacccatctataggttaatcaaaacttggatggaatgttgatttctttaaacatgtccaaatcatgaaaacattttttcacactatgtttcattttc

SEQ ID NO: 23296 - DNA, 120 bp, Artificial Sequence
  ENSG00000030419_40 (sequence is synthesized)
ttcaaaattggtaacctattggttattaaatacatcaactgaattgtgcactgaattttcctacctttcatctcttgctttctcacttatttttgtgtctgccaagaggatccccttata

SEQ ID NO: 23297 - DNA, 120 bp, Artificial Sequence
  ENSG00000030419_41 (sequence is synthesized)
aatgagactacatttttttgtacacagtgggactatcttatacaaatgaaaggatcagagtaaatcatttttacagggcatactgaacaagtaaagttattctaagaaatgaaagcttta

SEQ ID NO: 23298 - DNA, 120 bp, Artificial Sequence
  ENSG00000030419_42 (sequence is synthesized)
ggtttccaaacagtactggcacaagtgcaactggagaaagcaacaataaacaacaagtaataagttatgttctttcctgagaacactgtttttaatcaactgattcgccttgtctgagtt

SEQ ID NO: 23299 - DNA, 120 bp, Artificial Sequence
  ENSG00000030419_43 (sequence is synthesized)
gttaccctatccttaattaaacatccttgggcagtatttctactcaaaaaacaactgttttaagttctttgtctgcactatgaatgtcagtgtctaagggctaacagattagtccatagc

SEQ ID NO: 23300 - DNA, 120 bp, Artificial Sequence
  ENSG00000030419_44 (sequence is synthesized)
aacttagaaaaaagggatgaatagggaacagcattggagagtatatgtcaaatgaattagggcagtagtttagtgagccaatgtgccaatttagaaatggattcttcttcctgctgaaga

SEQ ID NO: 23301 - DNA, 120 bp, Artificial Sequence
  ENSG00000030419_45 (sequence is synthesized)
gctctttttaaaataaattacaatcataaagctgccacagtttactgtgcatagacatgttcagaattggctcttcttcatgagggctgcttggtgcaggtatttaagctactgccaata

SEQ ID NO: 23302 - DNA, 120 bp, Artificial Sequence
  ENSG00000030419_46 (sequence is synthesized)
aggctaacagctcatcaaatagaaaatacgctgcaggaaaatacatgggttaagaaaaacagttaaataccgtgctgttattttgtatgtctgtttaagcttttctctcaaacaagttga

SEQ ID NO: 23303 - DNA, 120 bp, Artificial Sequence
  ENSG00000030419_47 (sequence is synthesized)
cttacttaaattgttttttaaaaataaactctaaaagccttgaaaatagtgcagtcttaaaagtagtattgattttagtcaatgctaaaaacactttcaggggaataagatgagaaacca

SEQ ID NO: 23304 - DNA, 120 bp, Artificial Sequence
  ENSG00000030419_48 (sequence is synthesized)
catgaacaagtttgccaccaatagtggcaacagtgtatgtatgtcatggatttaagagagactcaaataaaaacaaatcctctggtgtatatgtgtgtgtgcaaatttaaagagtatact

SEQ ID NO: 23305 - DNA, 120 bp, Artificial Sequence
  ENSG00000030419_49 (sequence is synthesized)
ttcacactagagggtattctttctacttgcttctactgaagcatactagcttttataacacatatcgagatggcatatccagctttgtatcatccaaaatgttgaagaaattatcagatt

SEQ ID NO: 23306 - DNA, 120 bp, Artificial Sequence
  ENSG00000030419_50 (sequence is synthesized)
atgcaccaaaacagagatatatagaatgtcaaccatttcatttttttttttctgcatgccttggtacatagtgaacatacaacctatttaaagataaagcatgtttttgagactcgctca

SEQ ID NO: 23307 - DNA, 120 bp, Artificial Sequence
  ENSG00000030419_51 (sequence is synthesized)
cccccccccacccaaccactcccaaataataattgggatgccattttttttccttttggatgaggtaaataattttaaggttcacaattttgtcttttactgcaatttaaggaaacattt

SEQ ID NO: 23308 - DNA, 120 bp, Artificial Sequence
  ENSG00000030419_52 (sequence is synthesized)
ggatgtcagtcaatatgttcataattttggctgtgtgcgaatttctgctggcattatctatgaattttcttcctacttatttttttttcagtatatgaacaatcatgtatctacctgccc

SEQ ID NO: 23309 - DNA, 120 bp, Artificial Sequence
  ENSG00000030419_53 (sequence is synthesized)
caggatgaaactaaatttaggtggaccctaaaccttatgaagacagtgctgaggcactttccttttctgatttcatctttttgggaatctgttttattgaaggtagttagtagttgagag

SEQ ID NO: 23310 - DNA, 120 bp, Artificial Sequence
  ENSG00000030419_54 (sequence is synthesized)
tgcatttgctacaagcatatacttgtatcttcctagcttcatgaggaacagaaagaggtggatatggctcagggtgtggcagggacaattgaggacaaagtcaattcaaatttgtgggtc

SEQ ID NO: 23311 - DNA, 120 bp, Artificial Sequence
  ENSG00000030419_55 (sequence is synthesized)
agaaagaatttttgtggacgtagtgtttttggagaaactctggatggttatatgtgcatgccttttcttcaaaaggaaatacgcaaggttgtagcatctaaaaataaacataagagtcag

SEQ ID NO: 23312 - DNA, 120 bp, Artificial Sequence
  ENSG00000030419_56 (sequence is synthesized)
acaccaaataaatcaagttttacataacagttgtatgcccagtttgtttaggtgagatttcacattacagaaagtatttgaggagcatgaaaatgggttatcttctgtattttccagttt

SEQ ID NO: 23313 - DNA, 120 bp, Artificial Sequence
  ENSG00000030419_57 (sequence is synthesized)
cctttttaagacagggaaagggatcagtaggcggattggaagaaatttcaagtcattgaaatattccattgagatttcctaaagggacaaaattgggaaaataagaaactacgacttaga

SEQ ID NO: 23314 - DNA, 120 bp, Artificial Sequence
  ENSG00000030419_58 (sequence is synthesized)
tttggctacgtagtagaaagtatctcccctacatacatacaggcaattgtatgtatgaatcatagggtatatgtgtgtgtatactacacacacattcttttaaagagaattcatggaaaa

SEQ ID NO: 23315 - DNA, 120 bp, Artificial Sequence
  ENSG00000030419_59 (sequence is synthesized)
aaaagcagttggagtgatcagatgtattgcaaaaacatacagagaatttaaatgacagttaataccaagaaattagttgggtttactttatcaggtcgtaataggaatcactaaagaagt

SEQ ID NO: 23316 - DNA, 120 bp, Artificial Sequence
  ENSG00000030419_60 (sequence is synthesized)
tactagtgtgtctttaggaccagtggcaactcttaaactaaaactttgggtccttattatctacttacagaacaaagtgaaacaaacaatgattaagctgattggatatacattcaaaga

SEQ ID NO: 23317 - DNA, 120 bp, Artificial Sequence
  ENSG00000030419_61 (sequence is synthesized)
tatttaatgtaaagttttttggaatacgaagaaaattcagaaaataaatattatcaacagttacttattggcaaatagagaaagacaagaatagtttagtgagcccggtattttgttttt

SEQ ID NO: 23318 - DNA, 120 bp, Artificial Sequence
  ENSG00000030419_62 (sequence is synthesized)
atagtttttatctcagttgtacaactcacaaaaccatgaagtctttggtattttataaatgtttaacaaaatttacatcagattaaggcatttagatgaaaattattatgttctcactat

SEQ ID NO: 23319 - DNA, 120 bp, Artificial Sequence
  ENSG00000030419_63 (sequence is synthesized)
cttccaaattttatttcatcctatctccaaaatgatttcttagggtacaaaaagagcagacggggctgtaaaaatacaagcaaaaaactgtgtgcccctagtttcaggcagaacttaaac

SEQ ID NO: 23320 - DNA, 120 bp, Artificial Sequence
  ENSG00000030419_64 (sequence is synthesized)
tgtcagaggtactagctacatgatttgttttttaactttggattgttcacgtccaaaaatggataaattacatttgtgtttatcatcagttgcattttatgtattattttaataaatact

SEQ ID NO: 23321 - DNA, 120 bp, Artificial Sequence
  ENSG00000030419_65 (sequence is synthesized)
atctgaatgaagactattctaaaccagaaaattccccaaatccaaaagaaaaaaaaagtgggaagaggtgaaattgaagtttgtgtatatgaaagttatcttagacatatttttaattct

SEQ ID NO: 23322 - DNA, 120 bp, Artificial Sequence
  ENSG00000030419_66 (sequence is synthesized)
ccagtttctgcaaaataattaaaatatacagtaactggtctcctaaatcctgaatttaatgtattaaatacttatgttctttatattggtgcctttttaaaatgcattgagagtgttggt

SEQ ID NO: 23323 - DNA, 120 bp, Artificial Sequence
  ENSG00000030419_67 (sequence is synthesized)
tagctgttgcagctgtacaacacttttaatatgcatttttaaaaatcacttaaaattgagtactatataattcatctctgcatttttagtgcaaatctttagagcaatttctaatagaga

SEQ ID NO: 23324 - DNA, 120 bp, Artificial Sequence
  ENSG00000030419_68 (sequence is synthesized)
aattttcagctcagctgttaaaaggaaaaggaaactttgaaactagactttactacctttttagtttcatagtatttctgaatatgattacaagattatgcaggtaaaatatagagtgaa

SEQ ID NO: 23325 - DNA, 120 bp, Artificial Sequence
  ENSG00000030419_69 (sequence is synthesized)
actttacctgtgaattgaattataatttgtgtttttgttttgtttttaaggaagaataagttctgtatcaaacaagaatttattagataattttttggtcaataaaatacagtattcatt

SEQ ID NO: 23326 - DNA, 120 bp, Artificial Sequence
  ENSG00000030419_70 (sequence is synthesized)
tggattttcatctccagactagtattgttctagtcttggaatctgtattttctaatctgttagaaaatagagattgaaaattgatggaataatgtgaaaaagcaggtaattaattctcct

SEQ ID NO: 23327 - DNA, 120 bp, Artificial Sequence
  ENSG00000030419_71 (sequence is synthesized)
tgaacaaagcaaaactgaacagtcatatcacattgctattctccaaagcataatctcaaatggtttcatatcatggttgtgtattacttgcaatgggtgtgttaggatatgacagctttt

SEQ ID NO: 23328 - DNA, 120 bp, Artificial Sequence
  ENSG00000030419_72 (sequence is synthesized)
taaaaaaatgagctgctggttatacaaagcaaatggcatatgaccaagaagctgtgatatgctagtgtttctttttatcatagtgtattactaggccaaataatgacaccttgaatattt

SEQ ID NO: 23329 - DNA, 120 bp, Artificial Sequence
  ENSG00000030419_73 (sequence is synthesized)
ttacatttattgcagaaaccttaaactttggaatttccataaggtttttatgtaatattctatttctagctttttagttttatcttgctgtactgtaagtttgaggatatttttcacctg

SEQ ID NO: 23330 - DNA, 120 bp, Artificial Sequence
  ENSG00000030419_74 (sequence is synthesized)
cactcttaggaataagttcataattctgtttatggggctttcctcccataacactgcatttgtatattttctgtataaaatatgtgttgtgtattaacctttatcccatacagagagtgg

SEQ ID NO: 23331 - DNA, 120 bp, Artificial Sequence
  ENSG00000030419_75 (sequence is synthesized)
tacatgaatgactagttttctaagatgtcctttttattgtgaataaaatataaaagttaaaggccctctgctaagtcacataaagtacagcatataagttcatataggtacaaataaatg

SEQ ID NO: 23332 - DNA, 120 bp, Artificial Sequence
  ENSG00000030419_76 (sequence is synthesized)
agtttgcagtgaattgggccttcaaattacctcaagtgacagatagtaagaaaagcttcttgagcaggtggaggtcactgaatcccctactatgcacttaccaagattttacttacttta

SEQ ID NO: 23333 - DNA, 120 bp, Artificial Sequence
  ENSG00000030419_77 (sequence is synthesized)
actatgcacttaccaagattttacttactttaatttactggaaattgattttttaaaaaatgactacactgtaacaagggaagggatctgggtttttttgttgttttattcttgtttttt

SEQ ID NO: 23334 - DNA, 120 bp, Artificial Sequence
  ENSG00000030419_78 (sequence is synthesized)
aaaattttttacagtcaagcattctgattttgaacataactcccttccctttctgtgtaacaaaggtctctctgttatctcttaaattttgttacatctccctcagcctctttctttgtc

SEQ ID NO: 23335 - DNA, 120 bp, Artificial Sequence
  ENSG00000030419_79 (sequence is synthesized)
cgtctcccttctgtcattgtctatggatgtttacctctctgttctcctaaaagtttgaagattaggtcaactcttatttctagttcattggtaatttaatcttaatttttttttcgtgat

SEQ ID NO: 23336 - DNA, 120 bp, Artificial Sequence
  ENSG00000030419_80 (sequence is synthesized)
ttttgttggttgtataatctgctgacgtatttttatactcaagtgtagttttctattaaaaagaaaagtggttggattaaaaatagtaagctatgtaaccctcatgttactttcactttc

SEQ ID NO: 23337 - DNA, 120 bp, Artificial Sequence
  ENSG00000030419_81 (sequence is synthesized)
aaatattgggtacctaaaacattacttcagagattatgtaatcctattatagtatgtttgctttcctttattgttggattttacattctgatttggctttcctccaaaaaatgtatatca

SEQ ID NO: 23338 - DNA, 120 bp, Artificial Sequence
  ENSG00000030419_82 (sequence is synthesized)
tgaaagactagacagttatttgcaagtgtttagaaaggtgttaaaaatgtaaagcaaagagtcttaactttctcctaattgggagaaaaatgctttaacattactataataatattccag

SEQ ID NO: 23339 - DNA, 120 bp, Artificial Sequence
  ENSG00000030419_83 (sequence is synthesized)
gtttggagggggtctccaggccccatatttgctgttaatagttggaccttttagaccatgtgttatttgcaatcccagaatgattgcttctgctattagttaaaaagatactattctttt

SEQ ID NO: 23340 - DNA, 120 bp, Artificial Sequence
  ENSG00000030419_84 (sequence is synthesized)
ctttctgtacaagtgcaatactccccttgaagtcttaaaaactatggtgatttttttttcttttctgacctattcttcctttagctaatgacaaaaagaaactcataaaagtcatagtat

SEQ ID NO: 23341 - DNA, 120 bp, Artificial Sequence
  ENSG00000030419_85 (sequence is synthesized)
gttaaaggacacaacaagcaaagagaaaaacactccacaatcaaaagattacagaatgtggaaaccactagtctgatctcatggtatctttatttaagctaaatttccatggaaattagt

SEQ ID NO: 23342 - DNA, 120 bp, Artificial Sequence
  ENSG00000030419_86 (sequence is synthesized)
aatcttttgcttgaaaaatgtgtcctaaagttgaactttttacagattgaatcttcttagaccctcgcccaatgctctaaattaagaacctaatacttaatatttttattttacttctcc

SEQ ID NO: 23343 - DNA, 120 bp, Artificial Sequence
  ENSG00000030419_87 (sequence is synthesized)
ccttttagaaataaacttttaaataaaagcaaagcacttagctgagttttaaacacttacatatcacctattggagaaattttttttaaaaatatttggagcagtcctgttttcatacaa

SEQ ID NO: 23344 - DNA, 120 bp, Artificial Sequence
  ENSG00000030419_88 (sequence is synthesized)
atttaagtaagaggtatttttcttatacatatttatatgtagtgtgctaattttctttttttatacctgtgtccctgtagtaaaactgctgtaatataaatacatgttttgttaaaagat

SEQ ID NO: 23345 - DNA, 120 bp, Artificial Sequence
  ENSG00000030419_89 (sequence is synthesized)
aacatttctttggcatttcttttaaaggcagttactgcatttctgcatttgtacagtatgtgtcttggccattttagatattctttctttaacaataccaaaggtaattagactatttta

SEQ ID NO: 23346 - DNA, 120 bp, Artificial Sequence
  ENSG00000030419_90 (sequence is synthesized)
aagactaattgcttgacagtttctagggtattttgtgttttagaagcaaaaaaagaaaaaaaaataggtcaaaccagtaaacctcattttttttcaaactaataatttggggaaataaaa

SEQ ID NO: 23347 - DNA, 120 bp, Artificial Sequence
  ENSG00000030419_91 (sequence is synthesized)
aaaagaaatatatatatatatatataaatatatatgtaaagttaaaattccataccttgtatgtcaggtttgctaagtgtaatgtagtttttttaaggctcaaataccatacctcagaaa

SEQ ID NO: 23348 - DNA, 120 bp, Artificial Sequence
  ENSG00000030419_92 (sequence is synthesized)
atacctcagaaaatgaggtttactatggaaatactgaaacagtctttgcagctgtgtgacaagtcactctactacatactgatttggagacctccgctaaatagttttatcactgcagac

SEQ ID NO: 23349 - DNA, 120 bp, Artificial Sequence
  ENSG00000030419_93 (sequence is synthesized)
taaaatgtgggacttgtatcttctttgtttttaatgcacacacatacatgttctgtgcatgtatgtggttactgtgtatatgtgtatgagtgttgtatatgcatgtgtgagtgtgtgtct

SEQ ID NO: 23350 - DNA, 120 bp, Artificial Sequence
  ENSG00000030419_94 (sequence is synthesized)
gtatgtgtgtacaactaaagaagctgcagaaactttgtaatactttgtgaaaaggattatattataaaggtttgtactgtctgagtgcacagctactggaataaatttagggaatctcag

SEQ ID NO: 23351 - DNA, 120 bp, Artificial Sequence
  ENSG00000030419_95 (sequence is synthesized)
gaacaagcatataatttgtccaagatttatttcttctcagaagtgtaagtgcagtttttaattctgtatattatttaatattttaccaataaaataaacttctgacataaaaagtttgct

SEQ ID NO: 23352 - DNA, 120 bp, Artificial Sequence
  ENSG00000030582_0 (sequence is synthesized)
gctgctgcccaaggaccgcggagtcggacgcaggcagaccatgtggaccctggtgagctgggtggccttaacagcagggctggtggctggaacgcggtgcccagatggtcagttctgccc

SEQ ID NO: 23353 - DNA, 120 bp, Artificial Sequence
  ENSG00000030582_1 (sequence is synthesized)
tgtggcctgctgcctggaccccggaggagccagctacagctgctgccgtccccttctggacaaatggcccacaacactgagcaggcatctgggtggcccctgccaggttgatgcccactg

SEQ ID NO: 23354 - DNA, 120 bp, Artificial Sequence
  ENSG00000030582_2 (sequence is synthesized)
ctctgccggccactcctgcatctttaccgtctcagggacttccagttgctgccccttcccagaggccgtggcatgcggggatggccatcactgctgcccacggggcttccactgcagtgc

SEQ ID NO: 23355 - DNA, 120 bp, Artificial Sequence
  ENSG00000030582_3 (sequence is synthesized)
agacgggcgatcctgcttccaaagatcaggtaacaactccgtgggtgccatccagtgccctgatagtcagttcgaatgcccggacttctccacgtgctgtgttatggtcgatggctcctg

SEQ ID NO: 23356 - DNA, 120 bp, Artificial Sequence
  ENSG00000030582_4 (sequence is synthesized)
ggggtgctgccccatgccccaggcttcctgctgtgaagacagggtgcactgctgtccgcacggtgccttctgcgacctggttcacacccgctgcatcacacccacgggcacccaccccct

SEQ ID NO: 23357 - DNA, 120 bp, Artificial Sequence
  ENSG00000030582_5 (sequence is synthesized)
ggcaaagaagctccctgcccagaggactaacagggcagtggccttgtccagctcggtcatgtgtccggacgcacggtcccggtgccctgatggttctacctgctgtgagctgcccagtgg

SEQ ID NO: 23358 - DNA, 120 bp, Artificial Sequence
  ENSG00000030582_6 (sequence is synthesized)
gaagtatggctgctgcccaatgcccaacgccacctgctgctccgatcacctgcactgctgcccccaagacactgtgtgtgacctgatccagagtaagtgcctctccaaggagaacgctac

SEQ ID NO: 23359 - DNA, 120 bp, Artificial Sequence
  ENSG00000030582_7 (sequence is synthesized)
cacggacctcctcactaagctgcctgcgcacacagtgggggatgtgaaatgtgacatggaggtgagctgcccagatggctatacctgctgccgtctacagtcgggggcctggggctgctg

SEQ ID NO: 23360 - DNA, 120 bp, Artificial Sequence
  ENSG00000030582_8 (sequence is synthesized)
ggggccccaccaggtgccctggatggagaaggccccagctcacctcagcctgccagacccacaagccttgaagagagatgtcccctgtgataatgtcagcagctgtccctcctccgatac

SEQ ID NO: 23361 - DNA, 120 bp, Artificial Sequence
  ENSG00000030582_9 (sequence is synthesized)
ctgctgccaactcacgtctggggagtggggctgctgtccaatcccagaggctgtctgctgctcggaccaccagcactgctgcccccagggctacacgtgtgtagctgaggggcagtgtca

SEQ ID NO: 23362 - DNA, 120 bp, Artificial Sequence
  ENSG00000030582_10 (sequence is synthesized)
gcgaggaagcgagatcgtggctggactggagaagatgcctgcccgccgggcttccttatcccaccccagagacatcggctgtgaccagcacaccagctgcccggtggggcagacctgctg

SEQ ID NO: 23363 - DNA, 120 bp, Artificial Sequence
  ENSG00000030582_11 (sequence is synthesized)
cccgagcctgggtgggagctgggcctgctgccagttgccccatgctgtgtgctgcgaggatcgccagcactgctgcccggctggctacacctgcaacgtgaaggctcgatcctgcgagaa

SEQ ID NO: 23364 - DNA, 120 bp, Artificial Sequence
  ENSG00000030582_12 (sequence is synthesized)
ggaagtggtctctgcccagcctgccaccttcctggcccgtagccctcacgtgggtgtgaaggacgtggagtgtggggaaggacacttctgccatgataaccagacctgctgccgagacaa

SEQ ID NO: 23365 - DNA, 120 bp, Artificial Sequence
  ENSG00000030582_13 (sequence is synthesized)
ccgacagggctgggcctgctgtccctaccgccagggcgtctgttgtgctgatcggcgccactgctgtcctgctggcttccgctgcgcagccaggggtaccaagtgtttgcgcagggaggc

SEQ ID NO: 23366 - DNA, 120 bp, Artificial Sequence
  ENSG00000030582_14 (sequence is synthesized)
cccgcgctgggacgcccctttgagggacccagccttgagacagctgctgtgagggacagtactgaagactctgcagccctcgggaccccactcggagggtgccctctgctcaggcctccc

SEQ ID NO: 23367 - DNA, 120 bp, Artificial Sequence
  ENSG00000030582_15 (sequence is synthesized)
tagcacctccccctaaccaaattctccctggaccccattctgagctccccatcaccatgggaggtggggcctcaatctaaggccttccctgtcagaagggggttgtggcaaaagccacat

SEQ ID NO: 23368 - DNA, 120 bp, Artificial Sequence
  ENSG00000030582_16 (sequence is synthesized)
tacaagctgccatcccctccccgtttcagtggaccctgtggccaggtgcttttccctatccacaggggtgtttgtgtgtgtgcgcgtgtgcgtttcaataaagtttgtacactttcttaa

SEQ ID NO: 23369 - DNA, 120 bp, Artificial Sequence
  ENSG00000030582_17 (sequence is synthesized)
cccttcccagaggccgtggcatgcggggatggccatcactgctgcccacggggcttccactgcagtgcagacgggcgatcctgcttccaaagatcaggtgcagctggggtgtgggtgcag

SEQ ID NO: 23370 - DNA, 120 bp, Artificial Sequence
  ENSG00000030582_18 (sequence is synthesized)
ggcaggcagacgggcagcatgtggagtctggaacccaggagcccagctggcgggggcagccctgattcctgcccttgtgccctcattcatgtggcatctgtactaagcaacagccctgct

SEQ ID NO: 23371 - DNA, 120 bp, Artificial Sequence
  ENSG00000030582_19 (sequence is synthesized)
gtcatcgcgctggggtctgtagtctgagcgctacccggttgctgctgcccaaggaccgcggagtcggacgcaggtgctggcttcttcccctctcctggtggtggtgggtggttcccgcgg

SEQ ID NO: 23372 - DNA, 120 bp, Artificial Sequence
  ENSG00000030582_20 (sequence is synthesized)
tgtggcctgctgcctggaccccggaggagccagctacagctgctgccgtccccttctggtgagtgcccctcagcctaggcaagagctggcagcctgggttttcccaaagggtcatcttgg

SEQ ID NO: 23373 - DNA, 120 bp, Artificial Sequence
  ENSG00000030582_21 (sequence is synthesized)
accgccaggtcagtgccaacccccatcctggggctgggtatggccagggaccaggtcccacctcgtccaaccctctcgcccccctctgaccatccagggcgtctgttgtgctgatcggcg

SEQ ID NO: 23374 - DNA, 120 bp, Artificial Sequence
  ENSG00000030582_22 (sequence is synthesized)
gctgctgcccaaggaccgcggagtcggacgcagaaggggctttctacctccccagcattcccccaaagcagggaccacaccattcttgacccagctccacccctgtcggcagaccatgtg

SEQ ID NO: 23375 - DNA, 120 bp, Artificial Sequence
  ENSG00000030582_23 (sequence is synthesized)
gctgctgcccaaggaccgcggagtcggacgcagggtaaacaggaggggccacatgcacaggtaattcaccagggagccgaacactcctgtgcagacagactccccttcccagcaagccat

SEQ ID NO: 23376 - DNA, 120 bp, Artificial Sequence
  ENSG00000030582_24 (sequence is synthesized)
ctggctgatgcagggttcatgctaccccctagtgggggattggggcagtgccagccatcagcctggctgctccctgtgtgctactgagcctggaagtgacaaagacccacccctgtcccc

SEQ ID NO: 23377 - DNA, 120 bp, Artificial Sequence
  ENSG00000030582_25 (sequence is synthesized)
cctgcgcacacaggtaccagaggcagggtgcagatacaggggtggggccccctttcctcccttttaggcctggccttaggatcactgcaaggtggtgtaagcggtaccctccatcttcaa

SEQ ID NO: 23378 - DNA, 120 bp, Artificial Sequence
  ENSG00000030582_26 (sequence is synthesized)
gctgctgcccaaggaccgcggagtcggacgcaggtaggagagcggccgcgcagacctctcgcctgctcctgcccaggggcccgccagggccatgtgagcttgaggttcccctggagtctc

SEQ ID NO: 23379 - DNA, 120 bp, Artificial Sequence
  ENSG00000030582_27 (sequence is synthesized)
agccggagacaacagaagaaccgcttactgaaactccttgggggttctgatacactagggggagttttatgggaaagaggaagcagtaattgcagtgacgccccgttagaaggggctttc

SEQ ID NO: 23380 - DNA, 120 bp, Artificial Sequence
  ENSG00000030582_28 (sequence is synthesized)
atcgcgctggggtctgtagtctgagcgctacccggttgctgctgcccaaggaccgcggagtcggacgcagcagggaccacaccattcttgacccagctccacccctgtcggcagaccatg

SEQ ID NO: 23381 - DNA, 120 bp, Artificial Sequence
  ENSG00000030582_29 (sequence is synthesized)
ggaagtatggctgctgcccaatgcccaacgccacctgctgctccgatcacctgcactgctgcccccaagacactgtgtgtgacctgatccagatgggggatgtgaaatgtgacatggagg

SEQ ID NO: 23382 - DNA, 120 bp, Artificial Sequence
  ENSG00000031003_0 (sequence is synthesized)
ccgcctctgtcgccactctctccccctgttccgcgtctgcgtcgccaccaccgccgggggtatccggggggtcgcttaccgggctggccccgcgccacagccgtagctttaacctcccgt

SEQ ID NO: 23383 - DNA, 120 bp, Artificial Sequence
  ENSG00000031003_1 (sequence is synthesized)
cagcggccgccccaggaagaggcttctcggccgcggagccacttggggcctcagttctcgccctcttgccgtcgccgcgggtcctggagaagcggccgcggccagggaacggggcatcgc

SEQ ID NO: 23384 - DNA, 120 bp, Artificial Sequence
  ENSG00000031003_2 (sequence is synthesized)
ggttccaacgattaactgctgaagtactgatcgagttctgcatttcttcaatgaggaactacaggctgatcttctgccataatctcaaacagccataaatgacaaaagaatgcttgctca

SEQ ID NO: 23385 - DNA, 120 bp, Artificial Sequence
  ENSG00000031003_3 (sequence is synthesized)
gtgagggtagctggtgcagaagccattttttaaacttaggtatttaagtactgaaagaaaagacagctttgatttctggctgcaaaaaagatatgaggaagagctcctccccttccttga

SEQ ID NO: 23386 - DNA, 120 bp, Artificial Sequence
  ENSG00000031003_4 (sequence is synthesized)
gtaactgcaactccgttcttgctaacaaaatatttggaattccacttgatgagctgcagcagggaggacatccagacaatgaggttccattcatagtccgccacgttgtggactatattg

SEQ ID NO: 23387 - DNA, 120 bp, Artificial Sequence
  ENSG00000031003_5 (sequence is synthesized)
aggaacatggaggtctggagcaacaaggactttttcaagtcaatggaaatgctgagacagtggagtggcttcggcagagatacgacagcggagaagaggtggatttggttaaggaagcag

SEQ ID NO: 23388 - DNA, 120 bp, Artificial Sequence
  ENSG00000031003_6 (sequence is synthesized)
atgttccctcagctattagccttcttagattttttcttcaagaacttcctgaacctgttatccctggcagtttacatattcacttgatgcagctttctcaagattataataatgaagatg

SEQ ID NO: 23389 - DNA, 120 bp, Artificial Sequence
  ENSG00000031003_7 (sequence is synthesized)
aatttggaagaaagttgaggttcctcttgcaacagcttccacctgttaattatagtttgttaaagtttctgtgtagatttttagccaatgtagcatcacatcatgaagaaatttggtccg

SEQ ID NO: 23390 - DNA, 120 bp, Artificial Sequence
  ENSG00000031003_8 (sequence is synthesized)
caaattctttggctgctgtctttggtccagatgtcttccacatttacacagatgtggaagacatgaaagagcaagaaatagtgagcaggataatggctggacttctggaaaactactatg

SEQ ID NO: 23391 - DNA, 120 bp, Artificial Sequence
  ENSG00000031003_9 (sequence is synthesized)
agttttttgagaatgaagaggaagatttttcatctaatgatttgagttcaattactgaacaggttaatgaactttctgaggaagaagaggaagatgaaaagctggaacatattgaagaac

SEQ ID NO: 23392 - DNA, 120 bp, Artificial Sequence
  ENSG00000031003_10 (sequence is synthesized)
ttccagaagagggtgcagaaaaatcaaatgacatgccagaggtggtacaattaaggatgactgaaaacatcctggaatcaaatagtgttacggcaacaagcacccatatatctcccatca

SEQ ID NO: 23393 - DNA, 120 bp, Artificial Sequence
  ENSG00000031003_11 (sequence is synthesized)
gcatcctaccagcctctacagatattttagaaagaacaattagagcagctgtggaacagcacctttttgatcttcagagcagcatagatcatgatcttaagaatttacaacagcaaagtg

SEQ ID NO: 23394 - DNA, 120 bp, Artificial Sequence
  ENSG00000031003_12 (sequence is synthesized)
tggtgtgtaataatgaagcagaaagtattcattgtgatggggaaggatctaataaccagattgatattgctgatgatattattaatgccagtgaaagtaacagagactgttcaaaacctg

SEQ ID NO: 23395 - DNA, 120 bp, Artificial Sequence
  ENSG00000031003_13 (sequence is synthesized)
tggctagcactaatttagacaatgaagctatgcagcaagattgtgtatttgagaatgaagaaaatacccagtctgtaggtatattgttagagccatgcagtgaccgtggtgatagtgaag

SEQ ID NO: 23396 - DNA, 120 bp, Artificial Sequence
  ENSG00000031003_14 (sequence is synthesized)
atggctgtcttgagagggaagaatatttgttatttgacagtgataaattgtcacacttgattctggattctagtagcaagatatgtgatttgaatgccaacactgaatcagaagtaccag

SEQ ID NO: 23397 - DNA, 120 bp, Artificial Sequence
  ENSG00000031003_15 (sequence is synthesized)
gaggtcagagtgttggtgttcaaggggaagcagcgtgtgtcagtattccacatttagatctgaagaatgtttctgatggtgataaatgggaagagccatttcctgcttttaagtcttggc

SEQ ID NO: 23398 - DNA, 120 bp, Artificial Sequence
  ENSG00000031003_16 (sequence is synthesized)
aggaggactctgagtctggagaagctcagctgtctccacaagctggaagaatgaatcatcaccccttggaagaggactgtcctccagtattatcacaccgcagtttagattttggtcaaa

SEQ ID NO: 23399 - DNA, 120 bp, Artificial Sequence
  ENSG00000031003_17 (sequence is synthesized)
gccagcgtttcctacatgatccagaaaagttggattcctcatctaaagcactgtcttttactagaattcgaagatcatcctttagttcaaaagatgaaaagagagaggacagaacacctt

SEQ ID NO: 23400 - DNA, 120 bp, Artificial Sequence
  ENSG00000031003_18 (sequence is synthesized)
atcagctggtcaagaaacttcagaagaaaatcagacaatttgaggaacagtttgaaagggaaagaaatagcaagccctcctacagtgatattgctgccaatccaaaggtattaaaatgga

SEQ ID NO: 23401 - DNA, 120 bp, Artificial Sequence
  ENSG00000031003_19 (sequence is synthesized)
tgacagagcttacaaaactgcggaagcaaattaaagatgcaaaacacaaaaattctgatggagaatttgtacctcagacacgtccacgtagtaacacacttccaaaaagctttggctctt

SEQ ID NO: 23402 - DNA, 120 bp, Artificial Sequence
  ENSG00000031003_20 (sequence is synthesized)
ctctagaccatgaagatgaagagaatgaagatgaacccaaggtcattcagaaggagaaaaaaccatctaaagaagcaacccttgaacttattcttaaaagactgaaagaaaaacgtattg

SEQ ID NO: 23403 - DNA, 120 bp, Artificial Sequence
  ENSG00000031003_21 (sequence is synthesized)
agaggtgtcttccagaagatatcaagaaaatgaccaaagatcatttggtagaagagaaagcttctcttcagaaaagtcttctttactatgaaagtcaacatggaaggccggtgaccaagg

SEQ ID NO: 23404 - DNA, 120 bp, Artificial Sequence
  ENSG00000031003_22 (sequence is synthesized)
gctagcatcactcctgtccttggatctccatccaccaagcgaaggggtcagatgttacagccaatcatagaaggagaaactgcacatttttttgaagaaatcaaggaggaagaagaagat

SEQ ID NO: 23405 - DNA, 120 bp, Artificial Sequence
  ENSG00000031003_23 (sequence is synthesized)
ggtgttaatctgtcctctgagttaggtgatatgttgaaaactgcagtacaggtacagtcttcattagaaaactctgaatctgatgttgaagaaaatcaagaaaaactggctctggatctc

SEQ ID NO: 23406 - DNA, 120 bp, Artificial Sequence
  ENSG00000031003_24 (sequence is synthesized)
cgattgtcaagttctcgagcagcttctatgcctgaattattggaacaactttggaaagccagagctgaaaaaaagaaactacgcaaaacgttgcgggaatttgaagaagcattttatcaa

SEQ ID NO: 23407 - DNA, 120 bp, Artificial Sequence
  ENSG00000031003_25 (sequence is synthesized)
caaaatggaaggaatgcccagaaagaggatcgtgttccagtgcttgaggagtacagagagtacaagaaaattaaagccaagcttaggcttcttgaagttcttataagcaaacaagattct

SEQ ID NO: 23408 - DNA, 120 bp, Artificial Sequence
  ENSG00000031003_26 (sequence is synthesized)
tcaaaatccatataagatacgttccttgaaaattcatatcataaagtcagttgtattccttgaagctatcatcgtgtgtacttggctggtacttaaattcgttttgtcaggcactcagag

SEQ ID NO: 23409 - DNA, 120 bp, Artificial Sequence
  ENSG00000031003_27 (sequence is synthesized)
aatctcattttgtacttggttgtggtgccactaaacaaaacaaatgatgggagagtaagtaggccctctcaagggagcgtaagtgatgttccatattaaccacagactgtcctctccacc

SEQ ID NO: 23410 - DNA, 120 bp, Artificial Sequence
  ENSG00000031003_28 (sequence is synthesized)
tttagcaaacatatggtttacttcattgttttgtactacagatacatccttttagcaaaagactggaattttatcctttcaacttcaagaactttggaaatgcaagctttttgttattac

SEQ ID NO: 23411 - DNA, 120 bp, Artificial Sequence
  ENSG00000031003_29 (sequence is synthesized)
caactttttgtttctcattactgaagaaaattggaggaaaatcttcatactgaattcttctgttgcctttttcttacagaatgactgaaaatttgaaagaaaagcctataaaagtgcaca

SEQ ID NO: 23412 - DNA, 120 bp, Artificial Sequence
  ENSG00000031003_30 (sequence is synthesized)
tacgcaactgtgttctctgttttcctagaaaaccaaaatcaaactgagatttcaagtcgtactatggaacacctttctgtttaattcccaaagtgacatcttctcacaggtagtatgtta

SEQ ID NO: 23413 - DNA, 120 bp, Artificial Sequence
  ENSG00000031003_31 (sequence is synthesized)
gtaaaattttgcaattcgctggtcacacagctcccggatgaagataacagttggtagaccaaaaggtgacctcgcttagtatattgaaaacacacaccacacatcacacacagaactgaa

SEQ ID NO: 23414 - DNA, 120 bp, Artificial Sequence
  ENSG00000031003_32 (sequence is synthesized)
tcataccacatgctgcctatgggacttcagttactgtttcctgagttactgtttatccgctggcaatggtgtgatttgtctggatcagatccgcgctattccccaacccacctccagata

SEQ ID NO: 23415 - DNA, 120 bp, Artificial Sequence
  ENSG00000031003_33 (sequence is synthesized)
atgtgagaaaatagccatgtcagtatgtaggaactctgatggtgctcagatttgtgtgttcaatcaatgggcttaaatcagcaaaatattatgcctaaagtaaatctgttcttaacaagg

SEQ ID NO: 23416 - DNA, 120 bp, Artificial Sequence
  ENSG00000031003_34 (sequence is synthesized)
gctctaccactgcattttcacatgtaccttcagggggttatctttttttttttcccctcctattttaatcagcaaaatccataccaaaacaacgacaacaacgccctcttaagggaccac

SEQ ID NO: 23417 - DNA, 120 bp, Artificial Sequence
  ENSG00000031003_35 (sequence is synthesized)
cctttggtcaatcataacatgctgtttaaagcagctgtttacaggatgtgtagtggtatgccccttgtcatatactcttagcatatctttttttcctttggctttgcatggcttttcttc

SEQ ID NO: 23418 - DNA, 120 bp, Artificial Sequence
  ENSG00000031003_36 (sequence is synthesized)
aggtactgtctcggtatcattctgctaatcattgttacagaatggtgacttcatttgtgctaacagtacaacagcagatttgggtcaggcttaatctaagtgttaacttttttttctggt

SEQ ID NO: 23419 - DNA, 120 bp, Artificial Sequence
  ENSG00000031003_37 (sequence is synthesized)
gcttttttggattgatgactgtctcactttgactatacccatgttttgcatgcaatgactcatgcatggttttcttaactagctaatattaacaatttattccatataaaaatggaattt

SEQ ID NO: 23420 - DNA, 120 bp, Artificial Sequence
  ENSG00000031003_38 (sequence is synthesized)
tgcaacatcctttaataaggtgagggaagcatgaacctcagacttctggcactattacatagtaagcacatgaagtagtttgataataaatagcagttctagtacttcacatttcacccg

SEQ ID NO: 23421 - DNA, 120 bp, Artificial Sequence
  ENSG00000031003_39 (sequence is synthesized)
tgtgtgcaatgcctttttctggggggtggggggtgagggaaaacctggtagtgaatgtgtagttggggaataaagaaaagcactaaatcctgccctttttgtgtggtttccttttgatac

SEQ ID NO: 23422 - DNA, 120 bp, Artificial Sequence
  ENSG00000031003_40 (sequence is synthesized)
aactaggttattcataatgtatacctagaaaagtgaaattgaaaataccaaaagatgtatcatttttatttgaatccatcatgcagtgtacatttcagataatttccttcagtctccaga

SEQ ID NO: 23423 - DNA, 120 bp, Artificial Sequence
  ENSG00000031003_41 (sequence is synthesized)
taggagtgtatccaaacatctaattttatgtgcactgtgtatcttatatgaatgttttattttatataccacatgcaaaaatgtccatatgcactatttaaatgttttaaataatatatt

SEQ ID NO: 23424 - DNA, 120 bp, Artificial Sequence
  ENSG00000031003_42 (sequence is synthesized)
ccttctttataatgctaaatctatatgagtaccatatttttataagtcagtggtctgactggtttcattttagaattaacagctgcttcaatatgttattcaatgttaatgtttggctgt

SEQ ID NO: 23425 - DNA, 120 bp, Artificial Sequence
  ENSG00000031003_43 (sequence is synthesized)
gagtagaatatgtaaaagtggcatggcagcacttatgctctgtgacagtattgtgtgtcatagttgagcagtagctggtagaattaggcagttggtgatagttttactttggtacaaata

SEQ ID NO: 23426 - DNA, 120 bp, Artificial Sequence
  ENSG00000031003_44 (sequence is synthesized)
aaaactgtatatctatatacaaataatatatagatatatatgtccaccagtataatggcattgctgtgtctggcacttcattgtacagacttttataataaaagaacttgaaagttctaa

SEQ ID NO: 23427 - DNA, 84 bp, Artificial Sequence
  ENSG00000031003_45 (sequence is synthesized)
aattccagaaaatgaccaaagatcatttggtagaagagaaagcttctcttcagaaaagtcttctttactatgaaagtcaacatg

SEQ ID NO: 23428 - DNA, 120 bp, Artificial Sequence
  ENSG00000031003_46 (sequence is synthesized)
tctcttcagaaaagtcttctttactatgaaagtcaacatggaaggccggtaatatctctcttgctaaaaagatttgattttatgtcttaaaaaagaacatgaatcaattttgtggcctac

SEQ ID NO: 23429 - DNA, 120 bp, Artificial Sequence
  ENSG00000031003_47 (sequence is synthesized)
aattgggggattgcctatgtatttaatataaaatttgaaattgggcgaataagtcattgtttaatgttttggacattttagatttgtgatgactagacaatttcttttttttcttgcttc

SEQ ID NO: 23430 - DNA, 120 bp, Artificial Sequence
  ENSG00000031003_48 (sequence is synthesized)
gtagcccatttacagatcatttcatagggtgttgatctaccggctgtcaaggagtccaaatggaagatctcaaagcccttaacagactataacaaagaagagattggctgaatattcata

SEQ ID NO: 23431 - DNA, 90 bp, Artificial Sequence
  ENSG00000031003_49 (sequence is synthesized)
aaaaattgaactctggactaaaaagtgaagcttgaataattttaaactatagtaggctttatgaagtgtatgtgtgtgtgtgtgtgtgta

SEQ ID NO: 23432 - DNA, 120 bp, Artificial Sequence
  ENSG00000031003_50 (sequence is synthesized)
tgtgtgtatgtatatatgaaccactacataatgatatgatttaaggaacacatagctgatattttgtgacttttttcccacgtggaatcaagagacccatggtactattctttgtgtttg

SEQ ID NO: 23433 - DNA, 120 bp, Artificial Sequence
  ENSG00000031003_51 (sequence is synthesized)
tgctctataaatccatagagattttggaacttgcccctgtagctgctatttgatttaacttgaggttttatagttcttagctggcaccagatacattgaagaatggatgttgcttgtctg

SEQ ID NO: 23434 - DNA, 120 bp, Artificial Sequence
  ENSG00000031003_52 (sequence is synthesized)
agactatgtaaatgtatggcattttgctatccttaagttaattttttcttttaagttggctgcattgtttcctagtcatgttgtgacattcttgatccagtgggtatacacttgatccag

SEQ ID NO: 23435 - DNA, 120 bp, Artificial Sequence
  ENSG00000031081_0 (sequence is synthesized)
gaaggcgtgagggcgggcagcagcgacaggatgcttgtttttcgctctaccaaagtcgtctgaaggcgagacagcgggcccagggcgcaggacccaccgcagccccctgggcagtctcct

SEQ ID NO: 23436 - DNA, 120 bp, Artificial Sequence
  ENSG00000031081_1 (sequence is synthesized)
cgccccgcgtccgcgtcgtctccggggcacttagtaaggggtggggagagcttgccctccctcttaagctgaggagaaacacccgaagacaccgcaggagcctgtgaaagtccctaggac

SEQ ID NO: 23437 - DNA, 120 bp, Artificial Sequence
  ENSG00000031081_2 (sequence is synthesized)
tccaagtgaggaagtgacactcccaggcgagccggcccgcggctgccagtctgcacggcctcggcacggcggccccggagcggcgcggggtggatctcaggctctgccggcccgcggccc

SEQ ID NO: 23438 - DNA, 120 bp, Artificial Sequence
  ENSG00000031081_3 (sequence is synthesized)
gcggggtccatgcgcagggcccccagcccaagttcttccatcttccgatgcggccccccagagccgcggggcagccggtgatctagcccgggagcccatcttacagcggtgccaagcaga

SEQ ID NO: 23439 - DNA, 120 bp, Artificial Sequence
  ENSG00000031081_4 (sequence is synthesized)
ggggcggcagagacggaggggcagcctctttgggactaactcatgaagaacaagggtgctaagcagaagctgaaacgaaagggagccgccagcgcgtttggctgtgacctgacggagtat

SEQ ID NO: 23440 - DNA, 120 bp, Artificial Sequence
  ENSG00000031081_5 (sequence is synthesized)
ctggaaagctcgggacaggatgttccatacgttttgaagagctgtgcagaatttatagagactcacggcatcgtggatggaatctatcggctttcaggagtcacctcaaacatacaacgg

SEQ ID NO: 23441 - DNA, 120 bp, Artificial Sequence
  ENSG00000031081_6 (sequence is synthesized)
ctaaggcaagagtttggctcagatcaatgtccagatctgacaagggaagtgtacctccaggacatccactgtgtgggctcgctttgcaagctctactttagggagctgcccaaccccctc

SEQ ID NO: 23442 - DNA, 120 bp, Artificial Sequence
  ENSG00000031081_7 (sequence is synthesized)
ctgacttatgagctctatgagaaattcacggaggcagtgtcgcattgccctgaagaaggccaactggcccgaatccaaaatgttatccaggagcttcctccatcccactataggaccttg

SEQ ID NO: 23443 - DNA, 120 bp, Artificial Sequence
  ENSG00000031081_8 (sequence is synthesized)
gaatacctgattcgacacctggcccatatcgcctccttcagcagcaagaccaacatgcacgcccggaacctggccctggtgtgggcgccaaacctcctcaggtctaaagaaattgaagcc

SEQ ID NO: 23444 - DNA, 120 bp, Artificial Sequence
  ENSG00000031081_9 (sequence is synthesized)
actggttgcaatggagatgcagccttccttgcagtccgggtccagcaggtggtgattgagttcatattgaatcatgtagatcaaatctttaacaacggtgcacctgggtctctggagaat

SEQ ID NO: 23445 - DNA, 120 bp, Artificial Sequence
  ENSG00000031081_10 (sequence is synthesized)
gatgaaaaccggcccatcatgaagagcctgaccttgccagccctctccctgcccatgaagctggtgagccttgaggaagctcaagcccgcagcctggccactaaccatcctgctcgcaag

SEQ ID NO: 23446 - DNA, 120 bp, Artificial Sequence
  ENSG00000031081_11 (sequence is synthesized)
gaaaggagggagaacagcctgcctgagattgtccctcccatgggcaccctcttccacactgtccttgagttaccagacaacaagcgaaagctctccagtaaatcaaagaagtggaaatca

SEQ ID NO: 23447 - DNA, 120 bp, Artificial Sequence
  ENSG00000031081_12 (sequence is synthesized)
atatttaacctgggacgttctggatcagactccaaatcaaaactgagtagaaatgggagtgtatttgtgagaggacagaggctctcggtggaaaaggctactatccgaccagctaaaagc

SEQ ID NO: 23448 - DNA, 120 bp, Artificial Sequence
  ENSG00000031081_13 (sequence is synthesized)
atggactcactatgttcagtgcctgtggaaggaaaagaaaccaagggaaatttcaatcgaacagttaccaccggtggatttttcattccagcaacaaagatgcactccaccggcaccggc

SEQ ID NO: 23449 - DNA, 120 bp, Artificial Sequence
  ENSG00000031081_14 (sequence is synthesized)
agctcatgtgacctcaccaagcaggagggcgaatggggccaggaggggatgcctcccggggctgagggtggctttgatgtgagcagtgatcgcagccatctccagggcgctcaggcccgg

SEQ ID NO: 23450 - DNA, 120 bp, Artificial Sequence
  ENSG00000031081_15 (sequence is synthesized)
cccccaccggaacagctgaaggttttccggcctgttgaggatccggagagcgagcaaacagccccaaagatgttgggtatgttctacacttcgaacgacagccctagcaaatccgtcttc

SEQ ID NO: 23451 - DNA, 120 bp, Artificial Sequence
  ENSG00000031081_16 (sequence is synthesized)
accagcagcctcttccagatggagccctcgccgcgtaaccagcgcaaggcgctgaacatctccgagccctttgcggtatctgtgccgctccgcgtgtccgcagtcatcagcaccaacagc

SEQ ID NO: 23452 - DNA, 120 bp, Artificial Sequence
  ENSG00000031081_17 (sequence is synthesized)
acgccgtgcagaacacccccgaaggagctgcagtctctttccagcctggaagagttttcttttcatggatcagagagcggaggctggccagaagaagagaaaccgctgggagctgagact

SEQ ID NO: 23453 - DNA, 120 bp, Artificial Sequence
  ENSG00000031081_18 (sequence is synthesized)
tctgcagcttctgtacctaagaaggcaggtcttgaggatgccaaggcagtacctgaagcaccggggacagtggaatgcagcaaaggcctgtcccaggagccaggcgcccacctggaggag

SEQ ID NO: 23454 - DNA, 120 bp, Artificial Sequence
  ENSG00000031081_19 (sequence is synthesized)
aagaaaaccccagaaagctccttgagctctcaacatttaaatgaattagagaagaggccaaatccggagaaggtggtggaggagggacgagaggctggtgagatggagtccagcaccctg

SEQ ID NO: 23455 - DNA, 120 bp, Artificial Sequence
  ENSG00000031081_20 (sequence is synthesized)
caggagagccccagggccagagccgaagctgtgcttctccatgagatggatgaagatgatctggccaatgccctgatctggcctgagattcaacaggagctgaaaatcattgaatctgag

SEQ ID NO: 23456 - DNA, 120 bp, Artificial Sequence
  ENSG00000031081_21 (sequence is synthesized)
gaggagctctcatcgttgccacctcctgctctgaagaccagcccaattcagcctattctcgagtcgagtctggggccctttattccctcagagcctcctgggagcttgccttgtggctcc

SEQ ID NO: 23457 - DNA, 120 bp, Artificial Sequence
  ENSG00000031081_22 (sequence is synthesized)
ttccctgctccagtctccacccctctggaggtgtggactagggatccagccaatcagagcacacagggggcttccacagcagccagcagagagaagccggaacctgagcagggcctgcac

SEQ ID NO: 23458 - DNA, 120 bp, Artificial Sequence
  ENSG00000031081_23 (sequence is synthesized)
ccagacctcgccagcctggctcctctggaaatagttccttttgagaaggcatctccacaagcaacagtggaagtaggaggcccaggcaatctgtctcctccactcccacctgctcctccc

SEQ ID NO: 23459 - DNA, 120 bp, Artificial Sequence
  ENSG00000031081_24 (sequence is synthesized)
cctccaactcctctggaggagtcaactccagtcctgctttcaaagggcggcccggaaagagaagactcatccaggaaattgaggacagatctctacatagaccagctgaagtcccaagac

SEQ ID NO: 23460 - DNA, 120 bp, Artificial Sequence
  ENSG00000031081_25 (sequence is synthesized)
agccctgagatctctagcctctgtcagggagaggaggcaaccccaagacacagtgacaagcaaaattcaaagaatgctgcttctgaggggaaaggctgtggttttccaagcccaaccagg

SEQ ID NO: 23461 - DNA, 120 bp, Artificial Sequence
  ENSG00000031081_26 (sequence is synthesized)
gaggttgagatcgtctcacaagaagaggaggatgtaacccattcagtacaggagccttcagactgtgacgaagatgacactgtgacagacattgcccagcatggcctggagatggtggag

SEQ ID NO: 23462 - DNA, 120 bp, Artificial Sequence
  ENSG00000031081_27 (sequence is synthesized)
ccctgggaggaaccccagtgggtgacgagtccccttcactctcccaccctgaaagacgcgcacaaggcccaggtacagggccttcagggtcaccagttggagaagaggctttcccacagg

SEQ ID NO: 23463 - DNA, 120 bp, Artificial Sequence
  ENSG00000031081_28 (sequence is synthesized)
cccagccttcgccagagccattctctagatagcaaacccacggttaaaagccagtggactctcgaggttccctcctccagcagctgtgctaatcttgaaacagagaggaattctgaccct

SEQ ID NO: 23464 - DNA, 120 bp, Artificial Sequence
  ENSG00000031081_29 (sequence is synthesized)
cttcagccccaggcacccaggagagagattactggatgggatgagaaagccctgaggtccttcagagagttctctggcctgaaaggggcagaggctcctcccaaccagaagggaccaagt

SEQ ID NO: 23465 - DNA, 120 bp, Artificial Sequence
  ENSG00000031081_30 (sequence is synthesized)
ggtgtgcaacccaacccagcagaaaccagccccatcagcctagcagagggaaaggagctagggacacacctggggcacagcagtccacagattaggcaaggtggtgttcctgggccagag

SEQ ID NO: 23466 - DNA, 120 bp, Artificial Sequence
  ENSG00000031081_31 (sequence is synthesized)
agcagcaaggagagttcacccagcgtgcaggacagcacttcgcctggagagcaccccgcaaagttacagctaaagagcacagagtgtgggcccccaaaagggaaaaacaggccttcttcc

SEQ ID NO: 23467 - DNA, 120 bp, Artificial Sequence
  ENSG00000031081_32 (sequence is synthesized)
ctcaacttggaccctgccattcccattgctgacctcttctggtttgagaatgtggcctcatttagttcacctggaatgcaggtctctgagccaggagacccaaaggtcacatggatgacc

SEQ ID NO: 23468 - DNA, 120 bp, Artificial Sequence
  ENSG00000031081_33 (sequence is synthesized)
tcatcttactgtaaagcagacccctggagggtttactcccaggacccccaggacctggacattgttgctcatgcactgacaggccgccgtaactcagctcctgtgagtgtgtcagctgtg

SEQ ID NO: 23469 - DNA, 120 bp, Artificial Sequence
  ENSG00000031081_34 (sequence is synthesized)
agaacctccttcatggtcaaaatgtgccaggccagggcggtcccagtcatccctcccaagattcagtacacccagatcccacagcccctgccctctcagagctcaggggagaatggggtt

SEQ ID NO: 23470 - DNA, 120 bp, Artificial Sequence
  ENSG00000031081_35 (sequence is synthesized)
cagcctctggagaggagccaggagggacccagctcaaccagtgggaccactcagaaacctgccaaagatgattctccctcctccctggaaagctcaaaggaagaaaaaccaaagcaagat

SEQ ID NO: 23471 - DNA, 120 bp, Artificial Sequence
  ENSG00000031081_36 (sequence is synthesized)
cccggagccattaagtcctcaccagtggatgccactgcaccctgcatgtgcgagggacctaccctttctccagaaccaggctcgtctaacctgctctccacccaggatgcagtagtgcaa

SEQ ID NO: 23472 - DNA, 120 bp, Artificial Sequence
  ENSG00000031081_37 (sequence is synthesized)
tgcagaaagcgcatgtcagagacagagccatctggggacaaccttctttcttcaaaactagagcgaccatctgggggttctaagcctttccacaggtcaaggccaggaagacctcagagc

SEQ ID NO: 23473 - DNA, 120 bp, Artificial Sequence
  ENSG00000031081_38 (sequence is synthesized)
ccaaggtcctgctgtcccctatcagaagtcccacccagacagtttcccctggccttctttgtggagagttggcagaaaacacatgggtcacaccagaaggggttacacttaggaataaaa

SEQ ID NO: 23474 - DNA, 120 bp, Artificial Sequence
  ENSG00000031081_39 (sequence is synthesized)
tgaccatccctaagaatggccagagactagagacctcaaccagctgtttttaccagcctcagcggagatcagtaattctggatggaagaagtgggaggcaaatagaatgatttcggttca

SEQ ID NO: 23475 - DNA, 120 bp, Artificial Sequence
  ENSG00000031081_40 (sequence is synthesized)
cctgctggtgtctgaaaaaaaccgtgattcatctggaagttattacagggccagcttgccatattccaggcacacgttatcaagtttgggcctattgtggcctctgacttctctttcttc

SEQ ID NO: 23476 - DNA, 120 bp, Artificial Sequence
  ENSG00000031081_41 (sequence is synthesized)
agccttttgaccacttattaattagtccatttgctagaagagtggtcaagggaaaaacgagagatgaaatttagttaagtctatgtgagcaagtgagagaaggttaggtaaggggagagg

SEQ ID NO: 23477 - DNA, 120 bp, Artificial Sequence
  ENSG00000031081_42 (sequence is synthesized)
atggaatgcttgcctccaatgaactttggagcttgtatgtgagtcagattgctcccctattgctattatctattactcttgagagctggctgtcctttgaaagaaagaagtaatgttctt

SEQ ID NO: 23478 - DNA, 120 bp, Artificial Sequence
  ENSG00000031081_43 (sequence is synthesized)
tgaaagaaagaaaaatctcttgctgtgtcaaacctcaaaatgttgctattggggttagaaggcctcctctttatgctttttaatgctctttcaaacgtgttcttttagaccagttttcta

SEQ ID NO: 23479 - DNA, 120 bp, Artificial Sequence
  ENSG00000031081_44 (sequence is synthesized)
ataagctttgtaaaatgtactatccaaattagaagcggatttggaaatgcaaactaacgtgcacttagatatccaagtgggtgagcttagccactcttacccatgctctttccctggaat

SEQ ID NO: 23480 - DNA, 120 bp, Artificial Sequence
  ENSG00000031081_45 (sequence is synthesized)
ccctggagacctgtccaagatgatttccatataccagcatagaaaatcagaatcaagagcaaactctgagactggcacaatccaagaagatttcctggctctggcttttagtaatttggg

SEQ ID NO: 23481 - DNA, 120 bp, Artificial Sequence
  ENSG00000031081_46 (sequence is synthesized)
actccaactgccactgtactggactgtaatttataaatccagtagctacgcagggtggaggctgggctgaggattaccataatgaaatgtactaaatcttcatttaggtatgcaattgtg

SEQ ID NO: 23482 - DNA, 120 bp, Artificial Sequence
  ENSG00000031081_47 (sequence is synthesized)
aagtgaaggcatctgctttctttacagtatcagagtccaagaacaggatgtcaccatagataaaagcctcatacaaaggcagaactacactccaaatttaatgtgtttaaattggtgggg

SEQ ID NO: 23483 - DNA, 120 bp, Artificial Sequence
  ENSG00000031081_48 (sequence is synthesized)
caccagcagaaaatattctagctcagctttactcttcttccacactaggctgggcccagcaatacaggagaggatgaagggaggagctccaggaggcgagggaagagccctagcagggcg

SEQ ID NO: 23484 - DNA, 120 bp, Artificial Sequence
  ENSG00000031081_49 (sequence is synthesized)
gccatcacaaccactcactgagagttgcccttcttaaaaatgtattttattttagccagtgggtcccttcctttctcctttcctctctactgctcaagaacagatttgaggccaggtgcg

SEQ ID NO: 23485 - DNA, 120 bp, Artificial Sequence
  ENSG00000031081_50 (sequence is synthesized)
cttgaggaacccctctcccttccataattcccctcatccaccgcccactccaggcactcactcaaacttgctcttcaactctgtatacaagcagaagcaataaaccaatctgattttctt

SEQ ID NO: 23486 - DNA, 120 bp, Artificial Sequence
  ENSG00000031081_51 (sequence is synthesized)
ttcaattatttataactttcaatggttctttcctttccagctggcgagagaaaggagaactaatatacctgctggcagatttttggtgctgcccaaaaaaggacttcacagggcatctct

SEQ ID NO: 23487 - DNA, 120 bp, Artificial Sequence
  ENSG00000031081_52 (sequence is synthesized)
tctcaggttcaagcctggctgaattctgcccagaagctcagtcattgcagaaatttctctaagggctgatagtacctctgggtaggcgtcacaaccaaggctggttctgggcttagtggg

SEQ ID NO: 23488 - DNA, 120 bp, Artificial Sequence
  ENSG00000031081_53 (sequence is synthesized)
ggctgagatgaagttacctcctccaatgagaaattgggagctgatgccctgcaacagatatatattcctctctctctctgtctctctatctctctcctccctctccctccctccctcccc

SEQ ID NO: 23489 - DNA, 120 bp, Artificial Sequence
  ENSG00000031081_54 (sequence is synthesized)
gccaataagccttacaaacagttttgaaatcttgttctgtaccttttaagccagtgtctgtggcgagggtgactggcaagtcagctgatgagttctgccttctgagagcactgagtgagc

SEQ ID NO: 23490 - DNA, 120 bp, Artificial Sequence
  ENSG00000031081_55 (sequence is synthesized)
aaggcctttcatcagtgttttggccttctcattgggtgaggaagacattgaaccaacagccaacgagatatgaacctgtaagaaaaaagtcctagaatatagtatttttccccaggccag

SEQ ID NO: 23491 - DNA, 120 bp, Artificial Sequence
  ENSG00000031081_56 (sequence is synthesized)
caaagtgaagaaatacagtggtgacagatgagaaaggccatgttcaagagatctgaaaagtacattcctgccttatcagaaaatgtgtcagacaggttttatgtcagcctcagtgctcct

SEQ ID NO: 23492 - DNA, 120 bp, Artificial Sequence
  ENSG00000031081_57 (sequence is synthesized)
gcggtgtcgacgctctgataaggaccatgttccagttagaatgcgagggagggaaagagctgcactttgcttcaccatcagaactctgagccaaataatgaatatgtaaactattttatg

SEQ ID NO: 23493 - DNA, 120 bp, Artificial Sequence
  ENSG00000031081_58 (sequence is synthesized)
attattttaaatgtttgtttggtaacatttataagatctatttttatttggggatagactgagaagccaccatttacatattaacaagtgacttcagttctaagggttgagatgcctgtg

SEQ ID NO: 23494 - DNA, 120 bp, Artificial Sequence
  ENSG00000031081_59 (sequence is synthesized)
tggatttataaaatggttgcaagatcttttagactctgacatttatagcatcaccttcaggaacacagttctggggatgtcatcatgagacacactgacagctgtggagatagtccctac

SEQ ID NO: 23495 - DNA, 120 bp, Artificial Sequence
  ENSG00000031081_60 (sequence is synthesized)
tctcagctttccttgctagtcaagtccaaaaggccttagaagctgactcaccttctcagccagagtcctgctgctcaagtgtggacctccactttgactctcacccagcctgccagccat

SEQ ID NO: 23496 - DNA, 120 bp, Artificial Sequence
  ENSG00000031081_61 (sequence is synthesized)
cacaaaggctttcataaacttcctgtggtctgggctagcctggcactgatgaaattccattctaaagaaagaaaactcatattcctcccccccacaaattgttcccccaaatgctctggg

SEQ ID NO: 23497 - DNA, 120 bp, Artificial Sequence
  ENSG00000031081_62 (sequence is synthesized)
attacctatttcaccactcatttgagtctccgaaaaatgaactccctgagaatggctggatgggaatcagatagtctgcttccattcaggagagggacagaacaggagctgctgtgttta

SEQ ID NO: 23498 - DNA, 120 bp, Artificial Sequence
  ENSG00000031081_63 (sequence is synthesized)
ggaggatttacctggtgccctagaaagggctatgcaatcaaattctcaagggctccttcaaatcagctatcagtcctcaaaatgggggttgctgatgttaaatgatggatttgcagtgaa

SEQ ID NO: 23499 - DNA, 120 bp, Artificial Sequence
  ENSG00000031081_64 (sequence is synthesized)
acgcatgcatgtactgacgttttctttcagcattagtggttgcttaagaaaatagtaacctatattttctgctacacttggaatatgaagaaatctgaacaagaaccccattaagacacc

SEQ ID NO: 23500 - DNA, 120 bp, Artificial Sequence
  ENSG00000031081_65 (sequence is synthesized)
taacctaatctaaaccctaaaattcaaaatattgtccaagtcaaaagtctagactctgaggacattaaaaatgtaaatatcatcatccttagcaaatatttattgggagcttagtaatag

SEQ ID NO: 23501 - DNA, 120 bp, Artificial Sequence
  ENSG00000031081_66 (sequence is synthesized)
tgcactgggtaccttagcactcccaaatcattcaagagtctagtgaaaaagggggagggatggcagcaaataaaacacccccataaacaaccaggagcaaggttgagaaccattaagttg

SEQ ID NO: 23502 - DNA, 120 bp, Artificial Sequence
  ENSG00000031081_67 (sequence is synthesized)
ccaaacaaaagcagaaggggaaaaagtgtggcaacaagcatcttttaataggatagttgacggtattcaagtgacctactgactccaaataatcaaattgaacacaattgcaaatccaat

SEQ ID NO: 23503 - DNA, 120 bp, Artificial Sequence
  ENSG00000031081_68 (sequence is synthesized)
agaacatcccagtgagacactcgggtatttgagaactttgcttgatttagaaaactggaaagtggcaactaggctagaatagtggcaactaggttcggaggtttcgtgtggtcataattg

SEQ ID NO: 23504 - DNA, 120 bp, Artificial Sequence
  ENSG00000031081_69 (sequence is synthesized)
gtttggtgaagtgtgagatctctgcaaatgagccaggtaagatcagtattccatagtgcttgaaaaggggattttagagacttctgtcatcacaaagcagattaactcctagttaatgat

SEQ ID NO: 23505 - DNA, 120 bp, Artificial Sequence
  ENSG00000031081_70 (sequence is synthesized)
gaagcagtaggcccaagataaactgttcaattcaagataaattgttcttgtcagtgtttggcatatgataatcacatttggctaaaattggatgggacagtcatttgtctacacaggcct

SEQ ID NO: 23506 - DNA, 120 bp, Artificial Sequence
  ENSG00000031081_71 (sequence is synthesized)
tccattcctgcatgaagagatactggggagcatacaattattttgtccagtattagagtgggagaagttctcagtaagtccagtcccaccaggatttatttgggccacattctaccacgg

SEQ ID NO: 23507 - DNA, 120 bp, Artificial Sequence
  ENSG00000031081_72 (sequence is synthesized)
ccagtccaatctgatgaccacatgaattggggttaagtgttgctaagactatgattttagacatgtctggcaggaaggtcagctcaaaatgtggcatgacaaagaatatgtgctctacta

SEQ ID NO: 23508 - DNA, 120 bp, Artificial Sequence
  ENSG00000031081_73 (sequence is synthesized)
ccaaaacctttcctagcaaaacaaggccagaagagggagcaagcatctttccaagcatggagaggagggggcaatggtggaagggtgattgcctgaaatcagtgccagtacagatagcat

SEQ ID NO: 23509 - DNA, 120 bp, Artificial Sequence
  ENSG00000031081_74 (sequence is synthesized)
aaaattgggggccaccacagattggctggctactgtgtagatcatttagtaatcttgaggtacattaataatgcagagattacttttctgtgagggtaagggggacgtagctaaatataa

SEQ ID NO: 23510 - DNA, 120 bp, Artificial Sequence
  ENSG00000031081_75 (sequence is synthesized)
gaagcttacaaggtccatagccatgtattttactggataaatcacaatgctttgcaataacttaatgtcatagtactttctggcttataattctgcaaagtaaagcactttttcaaagga

SEQ ID NO: 23511 - DNA, 120 bp, Artificial Sequence
  ENSG00000031691_0 (sequence is synthesized)
acttccgggtctcctctgtttacgaatgtttgggcgcgaattactctaagcgcggctctcagaagggtgcaagaagaatcagtgcactgtgtttagatcaagatgtctggtaaagcaaat

SEQ ID NO: 23512 - DNA, 120 bp, Artificial Sequence
  ENSG00000031691_1 (sequence is synthesized)
gcttccaagaaaaacgctcaacagttaaaaagaaatccaaagagaaaaaaggataatgaggaagttgtgttgtcagagaataaggttagaaacacagtgaaaaaaaataaaaatcatctg

SEQ ID NO: 23513 - DNA, 120 bp, Artificial Sequence
  ENSG00000031691_2 (sequence is synthesized)
aaagatctgtcttctgaaggacaaacaaagcacactaacctaaaacacggaaagacagcagccagcaagagaaaaacctggcaacctctgtcaaagagtaccagagaccatttgcaaact

SEQ ID NO: 23514 - DNA, 120 bp, Artificial Sequence
  ENSG00000031691_3 (sequence is synthesized)
atgatggaatcagtaataatgacaattttgagtaacagtattaaagaaaaagaagaaatacaataccatctcaacttcctgaagaaaagattgctacaacagtgtgaaactctgaaagtc

SEQ ID NO: 23515 - DNA, 120 bp, Artificial Sequence
  ENSG00000031691_4 (sequence is synthesized)
cctcccaaaaagatggaagatttaactaatgtatcaagtctactgaatatggaaagggcacgagacaaagctaatgaagaaggtctggcattactacaggaagaaatagataaaatggta

SEQ ID NO: 23516 - DNA, 120 bp, Artificial Sequence
  ENSG00000031691_5 (sequence is synthesized)
gagaccacagagttaatgactgggaatattcagagcctaaagaacaaaattcagattctggcaagtgaggtggaagaagaagaggagagagtaaaacagatgcatcaaataaatagtagt

SEQ ID NO: 23517 - DNA, 120 bp, Artificial Sequence
  ENSG00000031691_6 (sequence is synthesized)
ggagtactctctcttccggaactttctcagaaaactctcaaagcacccacacttcagaaagaaattttggcgctaattccaaaccagaatgctcttctaaaggacttggatattcttcat

SEQ ID NO: 23518 - DNA, 120 bp, Artificial Sequence
  ENSG00000031691_7 (sequence is synthesized)
catcttaaagagtgttttttttttagattgttccatattaatttaatgttcgtgaatttgtaaaactgttaacctatgattatatgtacagaggctaaggcttctgcaggatttattatc

SEQ ID NO: 23519 - DNA, 120 bp, Artificial Sequence
  ENSG00000031691_8 (sequence is synthesized)
tcctgatatgcactttaaaattagtctttgtagttctatcattagcatctaatgtagttctgaagactgtttttagcagttgccaaatctaggaaactaacatttatattgctgtatcta

SEQ ID NO: 23520 - DNA, 120 bp, Artificial Sequence
  ENSG00000031691_9 (sequence is synthesized)
taagtatttgcctaaaaccataaaataggaattgccttaaggatctagtagtttataatgcctgaatggaactcatttattggttaacagctcatatcaggagctgtgataagtaagtgt

SEQ ID NO: 23521 - DNA, 120 bp, Artificial Sequence
  ENSG00000031691_10 (sequence is synthesized)
ttacatacactgtctagtgcataaaaaccttagtgtttgctatcattcattctgtagccaatggcttacagtttctgtctggtcatctggaacttgaaaaatcctcaaatgccttcactc

SEQ ID NO: 23522 - DNA, 120 bp, Artificial Sequence
  ENSG00000031691_11 (sequence is synthesized)
ttttacctaactccctagtctttttgggaagtagttaagatatgcctgctatctttaactttggaggtagtatcaaaattttacttctttggttgtttagtgaattaatgttgaatattt

SEQ ID NO: 23523 - DNA, 120 bp, Artificial Sequence
  ENSG00000031691_12 (sequence is synthesized)
tctactgtcatcaaaacatattcccaaaaagtattaaaaaggaaccttagcacatttattttattaaaacaagaaaacccaaaatatataaaccttttcttattatgataataagcttat

SEQ ID NO: 23524 - DNA, 120 bp, Artificial Sequence
  ENSG00000031691_13 (sequence is synthesized)
atatgtgaataagttataacctagtgtataaaaaattatttctaacaaactacagtatactgtcttgggtttttttttttttttttagtctgtaaaataaaatgactgcaattacttttt

SEQ ID NO: 23525 - DNA, 120 bp, Artificial Sequence
  ENSG00000031698_0 (sequence is synthesized)
gcagtgcggcggtcacaggctgagtgctgcggcgcgatccttgcttccctgagcgttggcccgggaggaaagaagatggtgctggatctggatttgtttcgggtggataaaggaggggac

SEQ ID NO: 23526 - DNA, 120 bp, Artificial Sequence
  ENSG00000031698_1 (sequence is synthesized)
ccagccctcatccgagagacgcaggagaagcgcttcaaggacccgggactagtggaccagctggtgaaggcagacagcgagtggcgacgatgtagatttcgggcagacaacttgaacaag

SEQ ID NO: 23527 - DNA, 120 bp, Artificial Sequence
  ENSG00000031698_2 (sequence is synthesized)
ctgaagaacctatgcagcaagacaatcggagagaaaatgaagaaaaaagagccagtgggagatgatgagtctgtcccagagaatgtgctgagtttcgatgaccttactgcagacgcttta

SEQ ID NO: 23528 - DNA, 120 bp, Artificial Sequence
  ENSG00000031698_3 (sequence is synthesized)
gctaacctgaaagtctcacaaatcaaaaaagtccgactcctcattgatgaagccatcctgaagtgtgacgcggagcggataaagttggaagcagagcggtttgagaacctccgagagatt

SEQ ID NO: 23529 - DNA, 120 bp, Artificial Sequence
  ENSG00000031698_4 (sequence is synthesized)
gggaaccttctgcacccttctgtacccatcagtaacgatgaggatgtggacaacaaagtagagaggatttggggtgattgtacagtcaggaagaagtactctcatgtggacctggtggtg

SEQ ID NO: 23530 - DNA, 120 bp, Artificial Sequence
  ENSG00000031698_5 (sequence is synthesized)
atggtagatggctttgaaggcgaaaagggggccgtggtggctgggagtcgagggtacttcttgaagggggtcctggtgttcctggaacaggctctcatccagtatgcccttcgcaccttg

SEQ ID NO: 23531 - DNA, 120 bp, Artificial Sequence
  ENSG00000031698_6 (sequence is synthesized)
ggaagtcggggctacattcccatttataccccctttttcatgaggaaggaggtcatgcaggaggtggcacagctcagccagtttgatgaagaactttataaggtgattggcaaaggcagt

SEQ ID NO: 23532 - DNA, 120 bp, Artificial Sequence
  ENSG00000031698_7 (sequence is synthesized)
tatgctggcctgtctacctgcttccgtcaggaggtgggctcccatggccgtgacacccgtggcatcttccgagtccatcagtttgagaagattgaacagtttgtgtactcatcaccccat

SEQ ID NO: 23533 - DNA, 120 bp, Artificial Sequence
  ENSG00000031698_8 (sequence is synthesized)
gacaacaagtcatgggagatgtttgaagagatgattaccaccgcagaggagttctaccagtccctggggattccttaccacattgtgaatattgtctcaggttctttgaatcatgctgcc

SEQ ID NO: 23534 - DNA, 120 bp, Artificial Sequence
  ENSG00000031698_9 (sequence is synthesized)
agtaagaagcttgacctggaggcctggtttccgggctcaggagccttccgtgagttggtctcctgttctaattgcacggattaccaggctcgccggcttcgaatccgatatgggcaaacc

SEQ ID NO: 23535 - DNA, 120 bp, Artificial Sequence
  ENSG00000031698_10 (sequence is synthesized)
aagaagatgatggacaaggtggagtttgtccatatgctcaatgctaccatgtgcgccactacccgtaccatctgcgccatcctggagaactaccagacagagaagggcatcactgtgcct

SEQ ID NO: 23536 - DNA, 120 bp, Artificial Sequence
  ENSG00000031698_11 (sequence is synthesized)
gagaaattgaaggagttcatgccgccaggactgcaagaactgatcccctttgtgaagcctgcgcccattgagcaggagccatcaaagaagcagaagaagcaacatgagggcagcaaaaag

SEQ ID NO: 23537 - DNA, 120 bp, Artificial Sequence
  ENSG00000031698_12 (sequence is synthesized)
aaagcagcagcaagagacgtcaccctagaaaacaggctgcagaacatggaggtcaccgatgcttgaacattcctgcctccctatttgccaggctttcatttctgtctgctgagatctcag

SEQ ID NO: 23538 - DNA, 120 bp, Artificial Sequence
  ENSG00000031698_13 (sequence is synthesized)
agcctgcccaacagcagggaagccaagcacccattcatccccctgcccccatctgactgcgtagctgagaggggaacagtgccatgtaccacacagatgttcctgtctcctcgcatgggc

SEQ ID NO: 23539 - DNA, 120 bp, Artificial Sequence
  ENSG00000031698_14 (sequence is synthesized)
atagggacccatcattgatgactgatgaaaccatgtaataaagcatctctggggagggcttaggactcttcctcagtcttcttccccgggcttgaaccccgcctctgaggttctccctga

SEQ ID NO: 23540 - DNA, 120 bp, Artificial Sequence
  ENSG00000031698_15 (sequence is synthesized)
tgcaaatgtattggcaattagatgcaattctctttctaaagcaagagagggcttatcaggattccgtagaacaaaagccactaagtggtcctccataatgaatgtctgttttgctgactg

SEQ ID NO: 23541 - DNA, 120 bp, Artificial Sequence
  ENSG00000031698_16 (sequence is synthesized)
aatcagaacagtctctgcctttaagtagctcagtataattggacagtcagacaagtaacaaagaatcaaaatccactgtcataagctctgtggtttgtgtaggcccaaagtgctttgaga

SEQ ID NO: 23542 - DNA, 120 bp, Artificial Sequence
  ENSG00000031698_17 (sequence is synthesized)
acatcaggataattctcttaacggtgtgcctggatgatttgctgggcttcagtgttcagaacgaatctcaaggttcagaatgtcagttgctgggatctgtggtcttttcttggcctcctg

SEQ ID NO: 23543 - DNA, 120 bp, Artificial Sequence
  ENSG00000031698_18 (sequence is synthesized)
gtagtcctgttctcttggcccaggtgcctttaggtgtcagttctagctgaacatgatggtgacaagacccaatcacatagtactgtgtctctgctcctctagggggtcctggtgttcctg

SEQ ID NO: 23544 - DNA, 120 bp, Artificial Sequence
  ENSG00000031698_19 (sequence is synthesized)
tacactcttctcacttgggagtatttggtgttaagaatatctgggtgtgatttcacctctggagacaggacatgaattaaagaattcttcaggcttgctaaaggttagccttctgaaata

SEQ ID NO: 23545 - DNA, 120 bp, Artificial Sequence
  ENSG00000031698_20 (sequence is synthesized)
acggcccgtccgaattatttctcagcctttggggtgcactggtccccagcatcatgggaaaatctgagcttctcaatctagaccaaaaagggaatctgaaaatgccttctactgagtcag

SEQ ID NO: 23546 - DNA, 120 bp, Artificial Sequence
  ENSG00000031698_21 (sequence is synthesized)
gactgagttcttttagctagaaacctgaatctagctctcttctataaggtaattctagcttttctctttctggctttgtttttcttaactccagagaaagaataatctccatttatctac

SEQ ID NO: 23547 - DNA, 120 bp, Artificial Sequence
  ENSG00000031698_22 (sequence is synthesized)
acagaacaagttggaggcttccctcttctcacccaagaaggtctgggttgtaagctgctctcttcaaacccaattttcaggccctactcttttccaagtcaggtgcttgaaaggggtgaa

SEQ ID NO: 23548 - DNA, 120 bp, Artificial Sequence
  ENSG00000031698_23 (sequence is synthesized)
ttcttccttccctcaaagggcccaactctcagaataccagaagctaccacttgtcactcatcgaaacatgagggatctttctgcagttatctaataggcaataaataccaaataattcaa

SEQ ID NO: 23549 - DNA, 120 bp, Artificial Sequence
  ENSG00000031698_24 (sequence is synthesized)
atttagaaaaaagttgctaaggggtagaacccatcattttgatttggacagttgtggttggggaagtctggttgaatggatggttcctggccgtcagtaagacccgatgagagttgagcc

SEQ ID NO: 23550 - DNA, 120 bp, Artificial Sequence
  ENSG00000031698_25 (sequence is synthesized)
tagattcattccttcggtatcggaagcatttcggggcgttggaggccgctcttggccaaaataaatgaccctgaagcttttcggaaggccatcccccgacctatgggcatacctttaaga

SEQ ID NO: 23551 - DNA, 120 bp, Artificial Sequence
  ENSG00000031698_26 (sequence is synthesized)
ttgtgatttgtggacgttttcctttaaagacattggcagagttgggctagaacctggaactgccggatcttggagtcatatcgggcatctatcatgaagccgaataaaaccatagaacca

SEQ ID NO: 23552 - DNA, 120 bp, Artificial Sequence
  ENSG00000031698_27 (sequence is synthesized)
tctgcccataaatctctgcctgtattaactggagtggtcgctggttgggcggatgctgtcaagtacttgtgatttgatttgtctgatgcaataggtctgcaaccatctgggagctaggtc

SEQ ID NO: 23553 - DNA, 120 bp, Artificial Sequence
  ENSG00000031698_28 (sequence is synthesized)
gatgacagtacactgcaaaggcagccactatccaagagtgtgatggatttctattaggaaaattgattttctcctgtttataaggatcttggatgtcaaaagaatatttgtttaacttga

SEQ ID NO: 23554 - DNA, 120 bp, Artificial Sequence
  ENSG00000031823_0 (sequence is synthesized)
agaaagcaggcgagcctgggccggcgcggggccttgtgggagggcttaaggaagtaaaatggcggacctggcgaacgaagaaaagcctgccattgctccgcccgtctttgtgtttcagaa

SEQ ID NO: 23555 - DNA, 120 bp, Artificial Sequence
  ENSG00000031823_1 (sequence is synthesized)
ggataaaggacaaaagtcccctgcagagcaaaaaaacttgtcggattcgggagaggagcctcggggggaggctgaggccccccaccatggcacgggtcaccccgagtcagctggcgagca

SEQ ID NO: 23556 - DNA, 120 bp, Artificial Sequence
  ENSG00000031823_2 (sequence is synthesized)
tgccctagaacctcctgcccctgctggcgcctcagccagcactcctccgcctcccgctcctgaagcccagcttcctccttttccgcgagaactggcagggaggtcagctggcggctccag

SEQ ID NO: 23557 - DNA, 120 bp, Artificial Sequence
  ENSG00000031823_3 (sequence is synthesized)
tcctgaaggcggagaagattctgacagagaagatggaaattactgccctcctgtcaagcgagaaagaacatcctctttaacccagttcccaccctcacagtcagaggaaaggagcagtgg

SEQ ID NO: 23558 - DNA, 120 bp, Artificial Sequence
  ENSG00000031823_4 (sequence is synthesized)
cttccggttgaagccaccaacgctgatccacggccaagcccccagcgcaggtctgccaagccagaagcccaaggagcagcagcggagcgtgcttcgcccggcagtgttacaagctccgca

SEQ ID NO: 23559 - DNA, 120 bp, Artificial Sequence
  ENSG00000031823_5 (sequence is synthesized)
gccaaaggcgctgtcccagactgtccccagcagtggcaccaacggggtcagcctcccagcagactgcacgggggcagtgcccgcagcatcccctgacactgctgcatggagaagtccttc

SEQ ID NO: 23560 - DNA, 120 bp, Artificial Sequence
  ENSG00000031823_6 (sequence is synthesized)
cgaagctgccgatgaggtgtgtgcacttgaggagaaagagccccagaaaaatgagtccagcaatgcctctgaagaggaagcctgtgagaaaaaagaccccgccacacagcaagcctttgt

SEQ ID NO: 23561 - DNA, 120 bp, Artificial Sequence
  ENSG00000031823_7 (sequence is synthesized)
atttgggcagaacttgagggacagagttaagctgataaatgagagcgtggacgaagccgacatggagaatgctggacaccccagcgcagacacgccaaccgcaacgaactatttcctcca

SEQ ID NO: 23562 - DNA, 120 bp, Artificial Sequence
  ENSG00000031823_8 (sequence is synthesized)
gtatatcagttccagtttagagaactcaaccaatagtgccgacgcctccagcaacaaatttgtatttggccagaacatgagcgagcgagttttgagccccccaaaattaaacgaggtcag

SEQ ID NO: 23563 - DNA, 120 bp, Artificial Sequence
  ENSG00000031823_9 (sequence is synthesized)
ttcagatgccaacagggaaaatgcagctgccgagtcagggtctgagtcctcgtcccaggaggccacccctgagaaagagtccctggctgagtcggcagccgcctacaccaaggcaacagc

SEQ ID NO: 23564 - DNA, 120 bp, Artificial Sequence
  ENSG00000031823_10 (sequence is synthesized)
gcggaagtgtttgttggaaaaagtggaagtcatcaccggggaggaggcggagagcaatgtgttacagatgcagtgcaagctgtttgtctttgacaagacctcacagtcctgggtggagag

SEQ ID NO: 23565 - DNA, 120 bp, Artificial Sequence
  ENSG00000031823_11 (sequence is synthesized)
aggccgggggctgctcagactcaatgacatggcgtccaccgatgacggcacactacagtcccgactagtgatgcggacccaggggagcctgcgactgatcctcaacaccaagctgtgggc

SEQ ID NO: 23566 - DNA, 120 bp, Artificial Sequence
  ENSG00000031823_12 (sequence is synthesized)
ccagatgcagatcgacaaggccagcgagaagagcattcgcatcacagccatggacaccgaggaccagggcgtgaaggtcttcctgatctcggccagctccaaggacacaggtcagttgta

SEQ ID NO: 23567 - DNA, 120 bp, Artificial Sequence
  ENSG00000031823_13 (sequence is synthesized)
gcgacgatgacgatgtcctggctccttcaggggccaccgcagctggtgctggtgacgaaggggacgggcagacgaccgggagcacatagcggccgggagcccggctgcacaccaggctgc

SEQ ID NO: 23568 - DNA, 120 bp, Artificial Sequence
  ENSG00000031823_14 (sequence is synthesized)
tgctttgtccgtctatccacccgcccacccgcccccaccccaccggcagcgtccaggtgcggggccgggaaccacacaccccactgggccggccacagtctggacccgcacgtcctgttc

SEQ ID NO: 23569 - DNA, 120 bp, Artificial Sequence
  ENSG00000031823_15 (sequence is synthesized)
aaaagcagactcgggaactgcctgaatgtggtttgggacacgagacctcatcatattgatgagcgaacaaacaagaacatttcctccctcccctcctttgaattgaaatggcacattaag

SEQ ID NO: 23570 - DNA, 120 bp, Artificial Sequence
  ENSG00000031823_16 (sequence is synthesized)
acttgtcacggcttctcactgggactggagacctcgttccttcaccccgcgtgtcgccagcctctgggtccagccagagcccctggcttctccgccacccacacccttcccaccctgctg

SEQ ID NO: 23571 - DNA, 120 bp, Artificial Sequence
  ENSG00000031823_17 (sequence is synthesized)
tggggccctgcctttgtggggagcagccagccctctgcccctgcccagggctccccaactataggcctgggacccccgcccagcttggggggctgctcgtacgagtgtagacactgggcc

SEQ ID NO: 23572 - DNA, 120 bp, Artificial Sequence
  ENSG00000031823_18 (sequence is synthesized)
cattggacgtgctgttaactactatcttcatttcccacttcccctctctgattgggggtgtatattttacatctttttttctttttattttcgaaggctttgttttggtttcttaggtta

SEQ ID NO: 23573 - DNA, 120 bp, Artificial Sequence
  ENSG00000031823_19 (sequence is synthesized)
agatgctctcgagcgttgagcaggcacagctctgtcgaggtccctgtcccccacctgtggttctggcctctgaggttgggggactacttgtttcccaccccaggttcctccaggccaagt

SEQ ID NO: 23574 - DNA, 120 bp, Artificial Sequence
  ENSG00000031823_20 (sequence is synthesized)
catggggtgatgaggagttggggccctgtctgtcctaggcctggagagtgcctgtctgggaaaaggtcactggacctggaagggtccccagggtcccctgactcccgtctccatctgtca

SEQ ID NO: 23575 - DNA, 120 bp, Artificial Sequence
  ENSG00000031823_21 (sequence is synthesized)
cgtggttcaccatcatcaggcaccaggcgcaaactgcttcccgctgttggccatcccttccccagccacaggtgtccctgcccccaggacagtccagggccaggggcttctgtgagaggc

SEQ ID NO: 23576 - DNA, 120 bp, Artificial Sequence
  ENSG00000031823_22 (sequence is synthesized)
agagggggaccctcaccaaatcttggtggaagagcccaggggctggtcccagaacaggcagtctcacaagcacgcagcacactggagtggacgcctgtgcccacccgagcctggagcatg

SEQ ID NO: 23577 - DNA, 120 bp, Artificial Sequence
  ENSG00000031823_23 (sequence is synthesized)
gccaagagccagcttgcaccacccacctgggaggccgaggaggaggtcccctgggcacagggcctctttgggacttcagaggaaatctcccagtcccactctcggagggttaagagaagg

SEQ ID NO: 23578 - DNA, 120 bp, Artificial Sequence
  ENSG00000031823_24 (sequence is synthesized)
cctcctgcagctgtgccgtccacacctctaggtcgccagagccctggcccccagcccccagcaagcctgagcccgggaagaaccagaggccctcccgagagacccagtcacacgtctctg

SEQ ID NO: 23579 - DNA, 120 bp, Artificial Sequence
  ENSG00000031823_25 (sequence is synthesized)
ctttaagccttagccagctagtgacgagtacaacgagataacgcccatgtgttttggaacatttatgtaagattgtcatatgaaatgtatttgggaactacattaaacttttaactaaaa

SEQ ID NO: 23580 - DNA, 120 bp, Artificial Sequence
  ENSG00000031823_26 (sequence is synthesized)
aaggaagtaaaatggcggacctggcgaacgaagggttatgctgcattgtaggctgacatcaggatttgaaggcagagttttgtccctggcaaaggtaaagaagactggaaagaggaaaag

SEQ ID NO: 23581 - DNA, 120 bp, Artificial Sequence
  ENSG00000031823_27 (sequence is synthesized)
ggggccttgtgggagggcttaaggaagtaaaatggcggacctggcgaacgaagaaaagcctgccattgctccgcccgtctttgtgtttcagaaggataaaggacaaaagaggtcagctgg

SEQ ID NO: 23582 - DNA, 120 bp, Artificial Sequence
  ENSG00000031823_28 (sequence is synthesized)
cttgttttcgtggagcagggcctgtgacagggacctccagattttggctacccctggagcacgccttgtctgtctgcagctctggagagggccacgctctgggcctagcactagtggcag

SEQ ID NO: 23583 - DNA, 120 bp, Artificial Sequence
  ENSG00000031823_29 (sequence is synthesized)
cctgagccctttatctttgtattaagaagccttttgaagattataggtggagaagattgtgaactctcaagaacaagaaatgtcttgggtttttgaagtttgataaattgggaaagaggt

SEQ ID NO: 23584 - DNA, 120 bp, Artificial Sequence
  ENSG00000031823_30 (sequence is synthesized)
aggattgaaaactccatcctgtaggtaactcatgacagaagacccctattctcaggacagggaaaaaggactcttaacaagaaaagaagggacccagctctaccgcctgagcaccaggca

SEQ ID NO: 23585 - DNA, 120 bp, Artificial Sequence
  ENSG00000031823_31 (sequence is synthesized)
cagggcgtgaaggtcttcctgatctcggtgagccagccacgcgggtgcatctgggacccctcatcctgccagccctgtgggggttcctgggcacacagatcaggcaggacggtggggagg

SEQ ID NO: 23586 - DNA, 120 bp, Artificial Sequence
  ENSG00000031823_32 (sequence is synthesized)
aaggaagtaaaatggcggacctggcgaacgaaggatgttggtgtaagccacctcctaaggtggttgtggagattaggtgacatgatgcagataaaacctaacacataaagaagtgctcga

SEQ ID NO: 23587 - DNA, 120 bp, Artificial Sequence
  ENSG00000031823_33 (sequence is synthesized)
agaacgctggccacgtatatgaaaccatcacgcgtctgggagaccccatttgtggatgcctttgctgtgcatatcatggcagaaactaagataagtctaagagaaaagcctgccattgct

SEQ ID NO: 23588 - DNA, 120 bp, Artificial Sequence
  ENSG00000031823_34 (sequence is synthesized)
attttgcttttgggtcattcactgctagtgttagaaacacaatcgatttttgtatattgatcttgtgtcctgtagcttgacaagggggtgaagcttagcacaaacgcagggctacctcca

SEQ ID NO: 23589 - DNA, 120 bp, Artificial Sequence
  ENSG00000031823_35 (sequence is synthesized)
ggagccataatgccacagtctctgtgccttgcccaggaacaggcttgcctgcctgagtcacaggccttttatgacaatccttcctgttgtggatcagattagaccaccatccccactccc

SEQ ID NO: 23590 - DNA, 120 bp, Artificial Sequence
  ENSG00000031823_36 (sequence is synthesized)
tgtatgggcacagttgccaagacacacagatgaaggggtccatgtggacaggtggctgggcgaggctgggctctcgagccatcccaggagctcgtgggcattcacctttccctctagttt

SEQ ID NO: 23591 - DNA, 120 bp, Artificial Sequence
  ENSG00000031823_37 (sequence is synthesized)
tgtgaatttgtcagcccggactctggcccagggggagctggcctcctccacggtggccaggagtgccccctcactgagacgggaagctccgcaggcacatctggaaaggggaggcaggct

SEQ ID NO: 23592 - DNA, 120 bp, Artificial Sequence
  ENSG00000031823_38 (sequence is synthesized)
cactgtgtgccacctttgaccttttcatcacaaaaacctgtctcacttcccagacatctgtagtggtgccaaggttcttcctggccacagccgcatcctctgacagacaagccttctagg

SEQ ID NO: 23593 - DNA, 120 bp, Artificial Sequence
  ENSG00000031823_39 (sequence is synthesized)
aaagggaagtggggcctgagcgcctgtgttccgtggctccctgacattctccagagccaggtacagggccgctgagcagctcggctcctgagcctgcagcaggtcatagacagctgggag

SEQ ID NO: 23594 - DNA, 120 bp, Artificial Sequence
  ENSG00000031823_40 (sequence is synthesized)
ggcggctgacgccccacctgcccccatggtcagcagctggcccaagagccatcgttcctcctgcccttgtctctcccctcctccaggcgccttccaggcctgctgatcggacgagacttc

SEQ ID NO: 23595 - DNA, 120 bp, Artificial Sequence
  ENSG00000031823_41 (sequence is synthesized)
tgttgtaatttggaaatgttctccctggttctccaggcccgaagtcactgaggccaagaccatagtcctctcctgcccttgccccccaggcccagccccagcccaggcaggcctgctgtt

SEQ ID NO: 23596 - DNA, 120 bp, Artificial Sequence
  ENSG00000031823_42 (sequence is synthesized)
tctagaaagatcacttgtaacttgacccacgagccctggaaagttcctttaaagagaggctgtctgagcagggaggttgggacccctgactgtgagcgtcgtgtgttcagaaaagtgggc

SEQ ID NO: 23597 - DNA, 120 bp, Artificial Sequence
  ENSG00000031823_43 (sequence is synthesized)
agtggtggcacgggagcaggctaggcggggtgcatcgggcgggctccatgcccagcagtagcgcacttggttcagcctgtctgtccttcatgttctggcccccacataccacagtgttcg

SEQ ID NO: 23598 - DNA, 120 bp, Artificial Sequence
  ENSG00000031823_44 (sequence is synthesized)
ccccagttagcagggtggctgcattccagcggcgcgctgctagtgagccggctgctagtgaggctgccggggatgctgcacagggcagggcacatgcaagggtccttgtcccatctgcct

SEQ ID NO: 23599 - DNA, 120 bp, Artificial Sequence
  ENSG00000031823_45 (sequence is synthesized)
ttggcagagggacttcctcagcatggctgttttgaaaaacaggtgcaaaatgtgcctgtacgtgaccccacaccgagtcctgagcctccaggtagctgcctgtgaatgcactgctctcct

SEQ ID NO: 23600 - DNA, 120 bp, Artificial Sequence
  ENSG00000031823_46 (sequence is synthesized)
cccacagtctccacttgactgttgagtctgccggcgccccgccacgttactgtgctaactggattaattcacaggcgtcggtcactgggagtttcatgtaatcacatgtaaaaataacag

SEQ ID NO: 23601 - DNA, 120 bp, Artificial Sequence
  ENSG00000031823_47 (sequence is synthesized)
tagccagatctcctggccagctgttaaaaaaagacctcaagtttttaaaaaagtgcttccctgcaaagtctagcctgcaaggggcatgaaatgggatgccaggggtcagtctctgaagcg

SEQ ID NO: 23602 - DNA, 120 bp, Artificial Sequence
  ENSG00000031823_48 (sequence is synthesized)
tctctcattccccactctgggcacaaccttgggtgggccagggtggtgggccttgtcctgggattcactggacgcctgagacaggaccagagttctgtggggttgtccaggggcccatgg

SEQ ID NO: 23603 - DNA, 120 bp, Artificial Sequence
  ENSG00000031823_49 (sequence is synthesized)
aggctacagcccagcccttggagtgtgccctctgtcttgtggacctcatgcccagagcagaacagagcaggccagaggcgactcaggcgcccccttattctgggtttgggcacctggggc

SEQ ID NO: 23604 - DNA, 120 bp, Artificial Sequence
  ENSG00000031823_50 (sequence is synthesized)
aaagacctcatcatgtccttgactgacatggctgggggtaatgctacccacggaccagctgcccctccaggtgtctcagaagaaagcgtgtcccgactgggagatgggcgggtagagcag

SEQ ID NO: 23605 - DNA, 120 bp, Artificial Sequence
  ENSG00000031823_51 (sequence is synthesized)
gtggaaggtggcttccctcatgctgtggggcccctccatcagggcgagctaagggttaatgttttcaatggcacagggaggtgtgtggcttcctgcctctgacacgccaccccgtgcaca

SEQ ID NO: 23606 - DNA, 120 bp, Artificial Sequence
  ENSG00000031823_52 (sequence is synthesized)
gtggcggaggcccctccactgtgccctctgtgtcagtgtgtgctccatgggtacccatacatttgcctggccacgttcccacgtgacgccccacactcattgcacatcttctcttcagtt

SEQ ID NO: 23607 - DNA, 120 bp, Artificial Sequence
  ENSG00000031823_53 (sequence is synthesized)
gactcaatgacatggcgtccaccgatgacggcacactacagtcccgactaggtgagctgccgacggcgggggctgtggccgggtccccatggggagggctggggactatgcaattccaaa

SEQ ID NO: 23608 - DNA, 120 bp, Artificial Sequence
  ENSG00000031823_54 (sequence is synthesized)
gggaatgaagcgggggagatcctgaccctacccttgtgagagtcaaggcacagagtcggtctcccatgagagccgccccccaaaccccctccctgcacccagccctcaacaccaccctca

SEQ ID NO: 23609 - DNA, 120 bp, Artificial Sequence
  ENSG00000031823_55 (sequence is synthesized)
cacactggctccagctgccagctcgtccgtgaccctcttagtgtcaaaatggacaaaagtctatggaagtttttaagctgattttctgacaaagtggcaggtttatgatagaaaggaaaa

SEQ ID NO: 23610 - DNA, 120 bp, Artificial Sequence
  ENSG00000031823_56 (sequence is synthesized)
gcagaaagcaggcgagcctgggccggcgcggggccttgtgggagggcttaaggaagtaaaatggcggacctggcgaacgaagatgcagtgcaagctgtttgtctttgacaagacctcaca

SEQ ID NO: 23611 - DNA, 120 bp, Artificial Sequence
  ENSG00000031823_57 (sequence is synthesized)
tttttcccccatattttctattgtaaattatttcattccttggccaatgatgagcaaccaggttatttcctgtcctctgccggcactaaggcttctgcagggcacaggtgtttcttgttg

SEQ ID NO: 23612 - DNA, 90 bp, Artificial Sequence
  ENSG00000031823_58 (sequence is synthesized)
cagtggtgtgatctcagctcactacaactcccaggctcaagcagtcgtgcaggcacatgcagaggagacgtgtggagtacatgatctggt

SEQ ID NO: 23613 - DNA, 120 bp, Artificial Sequence
  ENSG00000031823_59 (sequence is synthesized)
caggcgtgagccaccgcacccggctgctacatctctttttttaagataaaggagcccatggagggttgcagcattccaactcatgagatctagttacagagggactggaaaagcctgcca

SEQ ID NO: 23614 - DNA, 120 bp, Artificial Sequence
  ENSG00000032219_0 (sequence is synthesized)
gattgtggcagtaaatcggggcgagtggggaacccggcgcaggaactgcagccgcggctgggagtggtgctgcccggacgggggcccacggaggtcagaggggaggaggactctggagct

SEQ ID NO: 23615 - DNA, 120 bp, Artificial Sequence
  ENSG00000032219_1 (sequence is synthesized)
gacagcgcgcacttcacccgcagttgttctagcgactgcgaagatagctcgctgagctggaaccccacagatcaccaacaaaaatgaaggcggcagatgagcctgcctacctgacagtgg

SEQ ID NO: 23616 - DNA, 120 bp, Artificial Sequence
  ENSG00000032219_2 (sequence is synthesized)
gaaccgatgtcagtgccaagtaccgaggtgccttctgtgaggcaaagattaagactgtgaaaaggctggtgaaagttaaggtactcctgaaacaggataataccacacaattggtacaag

SEQ ID NO: 23617 - DNA, 120 bp, Artificial Sequence
  ENSG00000032219_3 (sequence is synthesized)
atgaccaagtaaagggtcctttaagagttggagctattgttgaaacaaggacatctgatggatcttttcaggaagctattatcagcaagttgacagatgctagttggtataccgtggtgt

SEQ ID NO: 23618 - DNA, 120 bp, Artificial Sequence
  ENSG00000032219_4 (sequence is synthesized)
ttgatgatggtgatgagcgaacattgagacgtacctcactttgtctgaaaggagagagacattttgcagagagtgagacacttgaccagcttccattaacaaatccagagcattttggaa

SEQ ID NO: 23619 - DNA, 120 bp, Artificial Sequence
  ENSG00000032219_5 (sequence is synthesized)
ctccagtaattgcaaagaagacgaacagaggaaggagatcttctcttcctgttactgaagatgaaaaggaagaagaaagcagtgaagaggaagatgaagacaagcgccgtctcaatgatg

SEQ ID NO: 23620 - DNA, 120 bp, Artificial Sequence
  ENSG00000032219_6 (sequence is synthesized)
aattactaggaaaagttgtaagtgtggtgtctgcaacggagaggactgaatggtatcctgctttggtaatatctcccagctgtaatgatgacatcacagtgaaaaaggatcagtgtttag

SEQ ID NO: 23621 - DNA, 120 bp, Artificial Sequence
  ENSG00000032219_7 (sequence is synthesized)
ttcgatcatttattgattctaaattttactctatagcaagaaaggacattaaggaagtagacattctcaatctaccggaatctgagctctccactaaaccagggcttcagaaagcaagca

SEQ ID NO: 23622 - DNA, 120 bp, Artificial Sequence
  ENSG00000032219_8 (sequence is synthesized)
tcttcttaaaaactagagttgttcctgataattggaaaatggatataagtgaaatccttgagtcatccagtagtgatgatgaagatggcccagctgaagaaaatgatgaagagaaggaaa

SEQ ID NO: 23623 - DNA, 120 bp, Artificial Sequence
  ENSG00000032219_9 (sequence is synthesized)
aggaggccaaaaagacagaagaagaggtgcctgaggaagaacttgatcctgaagagagggacaacttcctccagcagctttataagtttatggaagacagaggtactccaatcaacaaac

SEQ ID NO: 23624 - DNA, 120 bp, Artificial Sequence
  ENSG00000032219_10 (sequence is synthesized)
cacctgttttgggctataaagatctcaatctcttcaaactcttcagactggtttatcatcagggtggatgtgacaatattgatagtggtgctgtatggaagcaaatttatatggaccttg

SEQ ID NO: 23625 - DNA, 120 bp, Artificial Sequence
  ENSG00000032219_11 (sequence is synthesized)
gcattcctattttgaattcagctgcttcctacaatgtaaaaactgcttatagaaagtatctctatggttttgaggagtactgccgttcggcaaatattcagttcagaactgttcatcacc

SEQ ID NO: 23626 - DNA, 120 bp, Artificial Sequence
  ENSG00000032219_12 (sequence is synthesized)
atgaaccaaaagtaaaagaggaaaaaaaagacttagaagaatcaatggaagaggctctcaaattagatcaagaaatgcctttaacagaagtgaagagtgaacctgaggaaaatatcgatt

SEQ ID NO: 23627 - DNA, 120 bp, Artificial Sequence
  ENSG00000032219_13 (sequence is synthesized)
caaacagtgaaagtgaaagagaagagatagaattaaaatctccgaggggacgaaggagaattgctcgagatgtaaattctattaaaaaggaaattgaagaagagaaaacagaagacaaat

SEQ ID NO: 23628 - DNA, 120 bp, Artificial Sequence
  ENSG00000032219_14 (sequence is synthesized)
taaaagataatgatacagaaaataaggatgtagatgatgactatgaaactgcagagaaaaaagaaaatgagctactactggggagaaaaaatacaccaaagcaaaaagagaagaaaatta

SEQ ID NO: 23629 - DNA, 120 bp, Artificial Sequence
  ENSG00000032219_15 (sequence is synthesized)
aaaaacaggaggattctgacaaagactcagatgaagaggaagagaaaagccaagagagggaagaaactgaaagcaaatgtgactctgaaggagaggaagatgaggaagacatggaaccct

SEQ ID NO: 23630 - DNA, 120 bp, Artificial Sequence
  ENSG00000032219_16 (sequence is synthesized)
gcctaacaggaaccaaagtgaaagtaaaatatggacgagggaagactcagaaaatttatgaagccagtattaaaagcactgaaattgatgacggagaagttttatatttggtacattact

SEQ ID NO: 23631 - DNA, 120 bp, Artificial Sequence
  ENSG00000032219_17 (sequence is synthesized)
atggatggaatgtcaggtatgatgagtgggtgaaggctgacaggataatctggcctttggacaaaggtggaccaaagaaaaaacagaagaaaaaagctaaaaataaagaagatagtgaaa

SEQ ID NO: 23632 - DNA, 120 bp, Artificial Sequence
  ENSG00000032219_18 (sequence is synthesized)
aggacgaaaagagagatgaggagaggcagaagtcaaaacggggacgacctcctttaaaatcaaccctctcatcaaacatgccgtatggcttatctaagacagcaaacagtgaaggaaaat

SEQ ID NO: 23633 - DNA, 120 bp, Artificial Sequence
  ENSG00000032219_19 (sequence is synthesized)
cagactcttgttcatctgatagtgaaacagaagatgctttagaaaagaatttaataaatgaagaactttctcttaaagatgaactagaaaaaaatgaaaatttgaatgatgataagctag

SEQ ID NO: 23634 - DNA, 120 bp, Artificial Sequence
  ENSG00000032219_20 (sequence is synthesized)
atgaagaaaatccaaagatttctgcacatatattaaaagaaaatgataggactcaaatgcagcctttagaaaccctgaagttagaagttggagagaatgaacaaatagtacagatttttg

SEQ ID NO: 23635 - DNA, 120 bp, Artificial Sequence
  ENSG00000032219_21 (sequence is synthesized)
ggaacaaaatggaaaaaacagaagaagttaagaaagaagccgaaaaatctccaaaaggaaagggaagacgaagcaagacaaaagatctttctttagaaattataaagatttcatcatttg

SEQ ID NO: 23636 - DNA, 120 bp, Artificial Sequence
  ENSG00000032219_22 (sequence is synthesized)
gccagaatgaagcaggaagtgaacctcatatagaagctcatagtcttgaattgtcttcattagacaataaaaacttttcttctgctacagaagatgaaattgaccaatgtgtgaaagaaa

SEQ ID NO: 23637 - DNA, 120 bp, Artificial Sequence
  ENSG00000032219_23 (sequence is synthesized)
agaagttgaaacggaaaatactaggacaatcatcgccagagaaaaaaataagaattgagaatggaatggaaatgacaaatactgtatctcaagaaaggaccagtgattgtattggatctg

SEQ ID NO: 23638 - DNA, 120 bp, Artificial Sequence
  ENSG00000032219_24 (sequence is synthesized)
gaaagatttgatagtccagctgaagaaactgtaaatattccactaaaagaagatgaggatgcaatgcctctgatcgggcctgaaaccttggtttgccatgaagtagatttggatgatttg

SEQ ID NO: 23639 - DNA, 120 bp, Artificial Sequence
  ENSG00000032219_25 (sequence is synthesized)
gatgaaaaggataagaccagcattgaggatgtagcagttgaaagctctgagtctaactctcttgtttctattccacctgccctacctcctgtagtccaacataacttttcagtagcttca

SEQ ID NO: 23640 - DNA, 120 bp, Artificial Sequence
  ENSG00000032219_26 (sequence is synthesized)
ccacttactcttagtcaagatgagtctcgaagcgtaaaaagtgagagtgatataacgattgaagttgatagtattgctgaagaatctcaagaaggtctctgtgagagggaatcggcaaat

SEQ ID NO: 23641 - DNA, 120 bp, Artificial Sequence
  ENSG00000032219_27 (sequence is synthesized)
ggatttgaaactaatgttgcctctggtacctgtagtataattgtacaagagagagagagcagagagaagggtcagaagaggccaagtgatggaaatagtggattaatggcaaaaaagcaa

SEQ ID NO: 23642 - DNA, 120 bp, Artificial Sequence
  ENSG00000032219_28 (sequence is synthesized)
aagcgtaccccaaagcgaacaagtgctgcagccaaaaatgaaaagaatggaacaggacaaagcagtgatagtgaagatcttcctgtcctagacaattcaagtaaatgtaccccagtaaag

SEQ ID NO: 23643 - DNA, 120 bp, Artificial Sequence
  ENSG00000032219_29 (sequence is synthesized)
catcttaatgtatctaagccacagaaacttgcacgatctcctgcaagaatatccccgcacatcaaagatggagagaaagataaacacagagaaaaacatccgaattcatcccctaggaca

SEQ ID NO: 23644 - DNA, 120 bp, Artificial Sequence
  ENSG00000032219_30 (sequence is synthesized)
tataaatggagctttcagctcaatgaattagataatatgaacagtacagagagaatctcatttctccaagaaaaactacaggaaatcagaaaatattatatgtctttgaagtctgaagtt

SEQ ID NO: 23645 - DNA, 120 bp, Artificial Sequence
  ENSG00000032219_31 (sequence is synthesized)
gcaaccatagacaggaggagaaaaagattaaaaaagaaagacagggaagtgtctcatgcgggagcctccatgtcatctgcttcatcagacactggaatgagtccctcatcatcatctccc

SEQ ID NO: 23646 - DNA, 120 bp, Artificial Sequence
  ENSG00000032219_32 (sequence is synthesized)
ccacaaaatgtacttgctgtagaatgcaggtgataaacattttctctaccttcccagcagtttgctgccatggacataaatccccaaaccctgaattacaaccacagaaagcactcaact

SEQ ID NO: 23647 - DNA, 120 bp, Artificial Sequence
  ENSG00000032219_33 (sequence is synthesized)
ggtttgacattgctaagtatatcctgtatacttttccaggctggattgtatctattcccctctctcttcttttttcttgttgcaaaaaataagctgattaataagtgaaggttaagcagc

SEQ ID NO: 23648 - DNA, 120 bp, Artificial Sequence
  ENSG00000032219_34 (sequence is synthesized)
ctgccatatttgtcataatttttcctctttacttttgtttttcgtttgttgtgatatagaacaaagggcacttagcaaatttgaatttgtataataaagctttcaggtgttacagaaatc

SEQ ID NO: 23649 - DNA, 120 bp, Artificial Sequence
  ENSG00000032219_35 (sequence is synthesized)
gtagacaagcaagtgcacatgataaacatcaaaatattacccagctgaatagttactgctgcactttcactaagatgtatttgaacacttggtgagtagggggtttatgttgtgtttttt

SEQ ID NO: 23650 - DNA, 120 bp, Artificial Sequence
  ENSG00000032219_36 (sequence is synthesized)
ttcattatcgttttttttatttttgtggaagcacttgctatttagaactgccaaagtatatgttcagcagtgtgcccaggattgaaggtgtaaatgggacaaaataaattgtgaaaggaa

SEQ ID NO: 23651 - DNA, 120 bp, Artificial Sequence
  ENSG00000032219_37 (sequence is synthesized)
gtgtagttgactgaaaactacagttgtaataagtcttccactttttataggatttttgagcacaaaattatgcaaatattttaatgtttattaatgtttacagtggaattgtgaataagt

SEQ ID NO: 23652 - DNA, 120 bp, Artificial Sequence
  ENSG00000032219_38 (sequence is synthesized)
tttcagtggactatcttatcccttgacaaaaatattttgtcttttttctatgtaatttcagagtttttattttgttacaaaaagacaaaaatgaaatatataacaacaatgaagttattt

SEQ ID NO: 23653 - DNA, 120 bp, Artificial Sequence
  ENSG00000032219_39 (sequence is synthesized)
atgaagttatttaacaagatttctaaagctgaaatttttgtgtaaaataaggtattatcttgcaacttgttaaatatatttattcagacattggatgttgtatttttatgtattttttaa

SEQ ID NO: 23654 - DNA, 120 bp, Artificial Sequence
  ENSG00000032219_40 (sequence is synthesized)
atttaaaaaaagaaaattctaggttaattcactctttggatgacaatagctctcagctgtcctttttacaggaggttgcatcctgcagccttgcctgtgttaaagggagtctgtctcagt

SEQ ID NO: 23655 - DNA, 120 bp, Artificial Sequence
  ENSG00000032219_41 (sequence is synthesized)
ccatcaaacagtatagaactataaatgggcatctggatcattaaagtatgtccttgtttagaaactttggcagtcctagtatttaaactgttttgaggatcaaatttttggttgccctta

SEQ ID NO: 23656 - DNA, 120 bp, Artificial Sequence
  ENSG00000032219_42 (sequence is synthesized)
agatactttgtcacagtttttatgtttgctatactgccgaatgaatttatatctcccaaagttgagatgcaacaactaagtaaagcaactatgtatgctttgtctgtgaattgttccaca

SEQ ID NO: 23657 - DNA, 120 bp, Artificial Sequence
  ENSG00000032219_43 (sequence is synthesized)
gactgatagattttgtaaataattcttccaaaatcatgtatttaaagcagttttgcatatacattatgtaaaaaggtgattttataaaagcagtttttaaattcatgtttgtacattgaa

SEQ ID NO: 23658 - DNA, 120 bp, Artificial Sequence
  ENSG00000032219_44 (sequence is synthesized)
aggggttttttttttaaacctccttttctgtgtttaatatgctgtagaataataacctagatgctctagactgtatatcaggatctgatttacaagaaaaagtcagagctaaacactagt

SEQ ID NO: 23659 - DNA, 120 bp, Artificial Sequence
  ENSG00000032219_45 (sequence is synthesized)
gatggcatagcattactgaaatcattgtttcttaatttcattttactacattgtgaacttgtgattcagattccattttctcagagaattaaaaacaaaaaaagtactcttgtaaaatgc

SEQ ID NO: 23660 - DNA, 120 bp, Artificial Sequence
  ENSG00000032219_46 (sequence is synthesized)
acttttctgtcttttctttgcaaagcagaagtatctcaatgtaaaataaaaatggagctcagtgggcagtattaataaaggccatgttttaaacataggctttatacttttagttttcat

SEQ ID NO: 23661 - DNA, 120 bp, Artificial Sequence
  ENSG00000032219_47 (sequence is synthesized)
ttaagtgattgcttttttcctaagtgcttgtaacttacagttggaaaatcagatttcacaaaaccaagcattttagtatattcagcctttacaataaaatatttctactaattataaaaa

SEQ ID NO: 23662 - DNA, 120 bp, Artificial Sequence
  ENSG00000032219_48 (sequence is synthesized)
attccgggtcaaagtggccagcgaggcgggggcgcggtgggccgctggcgagctccggggcggaacgggctgccctttggcgctcgtggggttctcgctgccccctcagctcctgcgtcc

SEQ ID NO: 23663 - DNA, 120 bp, Artificial Sequence
  ENSG00000032219_49 (sequence is synthesized)
tggctgccctcgtaaggggtcttgtcccttggctggtgaggattctgcccctccccgctggcgtttgtttactttctttcccttggtcgctccccgcagttgactgattatgtctgtgcc

SEQ ID NO: 23664 - DNA, 120 bp, Artificial Sequence
  ENSG00000032219_50 (sequence is synthesized)
tgaagaggaagagaaaagccaagagaggtacattatcttatgtttgttctccagaagcacctgtctggggtacaacagcgctttgttcctgcttagagattcaggtttgagggaatgttt

SEQ ID NO: 23665 - DNA, 120 bp, Artificial Sequence
  ENSG00000032219_51 (sequence is synthesized)
tcttattgggacttccgttcctcttgtctaatgaaggtgagacacattgtgaagatgatgtgtattgcctttcggaattggagaatatactggtcgcaccattttaatagcacttgtgcc

SEQ ID NO: 23666 - DNA, 120 bp, Artificial Sequence
  ENSG00000032219_52 (sequence is synthesized)
aaggctgcgccacccagtcaaaagaaaggtcctgcagttgacagcagggaagggagctggagaaaaatggaggaagtggacaagaggaaacagcgacagcaaaaattccattttaaaaaa

SEQ ID NO: 23667 - DNA, 120 bp, Artificial Sequence
  ENSG00000032219_53 (sequence is synthesized)
gaaacgtctgacttgttctatgcccaacacatagagtagtgcctgatacatagtggaccctcaaaatttgttgaatgaatcagtgaactagagcagtgattcctaaagggtccctccaga

SEQ ID NO: 23668 - DNA, 120 bp, Artificial Sequence
  ENSG00000032219_54 (sequence is synthesized)
ccagcagcatcagccttacttgggaacttgttccaaatgcaaattttccccaccccagatctacttcatcagaaactctgggggtactcctgaaacaggataataccacacaattggtac

SEQ ID NO: 23669 - DNA, 120 bp, Artificial Sequence
  ENSG00000032219_55 (sequence is synthesized)
tgggtacagtgcacctttacataataaattccttagtaagtaggccacagaaatcttctccttctcctccttcttctcctcctccactgatatgttattaaggtaatacttaggttgtga

SEQ ID NO: 23670 - DNA, 120 bp, Artificial Sequence
  ENSG00000032219_56 (sequence is synthesized)
ataatctacctgttggattcttttagcatattttattctccattaagttattagtagcattatcagtattataacttactgcagggaagaaactgaaagcaaatgtgactctgaaggaga

SEQ ID NO: 23671 - DNA, 80 bp, Artificial Sequence
  ENSG00000032219_57 (sequence is synthesized)
gggggccgagcggcggaggcggggcgcgggccgaagtcggggtatccgggggaccgcggagcggaggctcggcggtcgtc

SEQ ID NO: 23672 - DNA, 120 bp, Artificial Sequence
  ENSG00000032219_58 (sequence is synthesized)
aatggaggtttgccagatgctttgaaatgggctgtctttcttttcctttcatgtaatgtctgatttttatgtggaagagaatgtaagtagtgctgtataaccctgcggatgctatgccct

SEQ ID NO: 23673 - DNA, 120 bp, Artificial Sequence
  ENSG00000032219_59 (sequence is synthesized)
aagagggaaagcaaatatttgcaagtcagactgaaaaatgtccagaccctgtactgattaagtagaaggggaatctaaccactttgcatttgaaagaaaatgcagcatatagcctgagga

SEQ ID NO: 23674 - DNA, 120 bp, Artificial Sequence
  ENSG00000032389_0 (sequence is synthesized)
gatgacacatccgaaaaataggaagtggccactacggaagctgttctgggccagaaagacttccagtttggagtcgtttgctgcggggagggaatgaatgggcgctgggaacacgcccgc

SEQ ID NO: 23675 - DNA, 120 bp, Artificial Sequence
  ENSG00000032389_1 (sequence is synthesized)
gaggtggggacgcgccggccgtagcgaggtccttagcgtgtgagtggccggggtcgggtcgcttccccgcagcatggaggacgatgcaccagtgatctacgggctggagttccaggcacg

SEQ ID NO: 23676 - DNA, 120 bp, Artificial Sequence
  ENSG00000032389_2 (sequence is synthesized)
tgccttaacacctcaaactgcagaaacagatgccattcggtttttggttgggacgcagtctcttaaatatgataatcagatccatatcatagattttgacgatgaaaacaacattataaa

SEQ ID NO: 23677 - DNA, 120 bp, Artificial Sequence
  ENSG00000032389_3 (sequence is synthesized)
taaaaatgtcctcctccatcaagcgggtgaaatctggcatattagcgctagccctgcagacagaggtgtgctgacgacctgctacaacagaacttcagacagcaaagtcctgacatgtgc

SEQ ID NO: 23678 - DNA, 120 bp, Artificial Sequence
  ENSG00000032389_4 (sequence is synthesized)
agccgtgtggaggatgccgaaggaattggaatcaggcagccacgagtcccctgatgattcatccagcactgcacagaccctggagctgctctgtcaccttgacaacacagcccatggcaa

SEQ ID NO: 23679 - DNA, 120 bp, Artificial Sequence
  ENSG00000032389_5 (sequence is synthesized)
catggcctgtgtcgtgtgggagccaatgggagatgggaagaaaatcatttccttggctgataaccatatcctgctgtgggatttacaggaaagctcgagccaggctgtgctggccagctc

SEQ ID NO: 23680 - DNA, 120 bp, Artificial Sequence
  ENSG00000032389_6 (sequence is synthesized)
agcgtccctggaagggaagggacaactgaagttcacctcaggacggtggagcccacatcataactgcacccaggtggccacagcgaacgacaccaccctccgtggctgggacacccggag

SEQ ID NO: 23681 - DNA, 120 bp, Artificial Sequence
  ENSG00000032389_7 (sequence is synthesized)
ccagctgcggagacgactgtaaggtgaagttctgggacacccgaaatgtcaccgaacccgtgaagaccctggaggagcactcccactgggtgtggaacgtccgctacaaccactctcatg

SEQ ID NO: 23682 - DNA, 120 bp, Artificial Sequence
  ENSG00000032389_8 (sequence is synthesized)
accagctggtcctcacgggcagcagtgacagcagagtcatcctttccaacatggtgtccatctcgtcggagcccttcggccacttggtagacgacgatgacatcagtgaccaggaggacc

SEQ ID NO: 23683 - DNA, 120 bp, Artificial Sequence
  ENSG00000032389_9 (sequence is synthesized)
accgttctgaagagaagagcaaggagcccctgcaggacaacgtgatcgccacctacgaggagcacgaggacagcgtctatgccgtggactggtcctcggctgacccgtggctgtttgcct

SEQ ID NO: 23684 - DNA, 120 bp, Artificial Sequence
  ENSG00000032389_10 (sequence is synthesized)
ccctgagctatgacgggaggctcgtgatcaacagggtgcccagggccctgaagtaccacatcctgctatgactcccgggcctgggttatccaggtcccattgagtggttttcctcttggc

SEQ ID NO: 23685 - DNA, 120 bp, Artificial Sequence
  ENSG00000032389_11 (sequence is synthesized)
agattctcaaacagtcgcagctctttggaggtgactcgtgttccaggtggatccctctctgggagagccgctgttcccttcctgtagcagcagcatttatgaatggggtgaatggggcta

SEQ ID NO: 23686 - DNA, 120 bp, Artificial Sequence
  ENSG00000032389_12 (sequence is synthesized)
ttgtcgacggcacagctaatgcccgaacccagcccctgtcggcagagacagagccccacattattatgtgaataacaatgttttctgttttaagggtgtcaggagtttcgctttttaaaa

SEQ ID NO: 23687 - DNA, 120 bp, Artificial Sequence
  ENSG00000032389_13 (sequence is synthesized)
aaatgtctgttcctgcaatagtaactcttctttctcttgagagtaaaaaatgaaataaaataaatccacgctgcacaggtgctcggctcattctttcaggagctctgccctgtgacccca

SEQ ID NO: 23688 - DNA, 120 bp, Artificial Sequence
  ENSG00000032389_14 (sequence is synthesized)
agtgggaagagcggggcctctggacctgctccttgttcctggagcacggagagcactaatgggcacccgccgggcacagcccctgcagcgccgaggttcagccagcaccgcgacaggcgc

SEQ ID NO: 23689 - DNA, 120 bp, Artificial Sequence
  ENSG00000032389_15 (sequence is synthesized)
cggcctggtgcagactcgggagcgcacacttcaatggctgttccctgggcaacggagttgccgccgccagctggctctgcccccagagcccatcaaagcacacaccctgccaggagccgg

SEQ ID NO: 23690 - DNA, 120 bp, Artificial Sequence
  ENSG00000032389_16 (sequence is synthesized)
gggaggggggcacaattcagtccataacagtgagacaacaacagtgttgtcaggcattgccgggtgacagtgtaaaaaatactctagtgactacaggccggaaaagatttcctgcgtcat

SEQ ID NO: 23691 - DNA, 120 bp, Artificial Sequence
  ENSG00000032389_17 (sequence is synthesized)
aaatagttcatttgttagtgataaatgttaacatagcctagcaaagagagcgtctgtgccctcccaccttagtgcaagaagaggaagcagagttgctgggggctgcctctgggactttgt

SEQ ID NO: 23692 - DNA, 120 bp, Artificial Sequence
  ENSG00000032389_18 (sequence is synthesized)
atgcaggacctggagcacacaggtgcagtgttgtccgcaggtgtggtgttttcctgcccgcaggtgcggtgttgcccacaggtgtcgtgctgtctgcaggtgcggtgttgtcctgcccgc

SEQ ID NO: 23693 - DNA, 120 bp, Artificial Sequence
  ENSG00000032389_19 (sequence is synthesized)
aggtgtggtgtcatccgcaggtatagtgttgtctgcaggtgtggtgttgccctgcctgcaggtgtggtgttggctgcaggtgtgttatccccaggtatggtgttgccctgcctgcaggtg

SEQ ID NO: 23694 - DNA, 120 bp, Artificial Sequence
  ENSG00000032389_20 (sequence is synthesized)
ggtgttgcccgcaggggtggtgttgcccccaggggcggtgttgccctgcctgcaggtgcggtgttgcccgcaggtgtgatattgctctgcctgcaggggtggtgttgcccgcaggtgcag

SEQ ID NO: 23695 - DNA, 120 bp, Artificial Sequence
  ENSG00000032389_21 (sequence is synthesized)
attgctctgcctgcaggggtggtgttgcccgcaggtgcagtattgctctgcctcaggggtggtgttgcccgcaggtgtggtattgctctgcctcaggggtggtgttgcccgcaggggtgg

SEQ ID NO: 23696 - DNA, 85 bp, Artificial Sequence
  ENSG00000032389_22 (sequence is synthesized)
ttgcccgcaggggtggtgttgcccgcaggtgcagtattgccctgcccacaggtgcggtgttgtccacaggtgcggtgttgtccaa

SEQ ID NO: 23697 - DNA, 120 bp, Artificial Sequence
  ENSG00000032389_23 (sequence is synthesized)
gcccgcaggggtggtgttgcccgcaggtgcagtattgccctgcctgcaggtgcggtgttgcccgcaggtgtggtattgctctgcctgcaggggtggtgttgcctgcaggggtggtgttgc

SEQ ID NO: 23698 - DNA, 120 bp, Artificial Sequence
  ENSG00000032389_24 (sequence is synthesized)
gcaggggtggtgttgcccgcaggtgcagtgttgtttgctggagggaggaagagcacaccgggcgtggtggacagaacagcctcgactgtagccggtaacgggataacgaagatgaccgtg

SEQ ID NO: 23699 - DNA, 120 bp, Artificial Sequence
  ENSG00000032389_25 (sequence is synthesized)
aagatgatgacaatgacagctcccatcgagtgctcatgtgccaggcacggggatcggcgctttctgggaatgatcaagttgagtcctctgtgccattggccttttcccctgagggagttg

SEQ ID NO: 23700 - DNA, 120 bp, Artificial Sequence
  ENSG00000032389_26 (sequence is synthesized)
ttgcaatgacctgccgggccagcagcgctaattaggagcacacagcgcacttccagagcacctgacctacagctacaaggcttcaaggatgctgcttctgaggagacatcatagaatcgt

SEQ ID NO: 23701 - DNA, 120 bp, Artificial Sequence
  ENSG00000032389_27 (sequence is synthesized)
ttggcattcttcctgtagctcagagtcccacgattgtctttgtaaacacgttgcaccaggtcttcttcaggggacaggtcgcaggacagcgtgcatttgacggtctgtgtacacacatca

SEQ ID NO: 23702 - DNA, 120 bp, Artificial Sequence
  ENSG00000032389_28 (sequence is synthesized)
tgtgcctgagggcctgggaatctgctctaacaagactccacagctggcactgtggatctgagtgggctcctgctttgttgagcttagagtcatccacaggcattctccagggcccattag

SEQ ID NO: 23703 - DNA, 120 bp, Artificial Sequence
  ENSG00000032389_29 (sequence is synthesized)
cttgattcttaaagtcacaggcccggtatgggtatttcacaaactgcccaggatgtcaatcccatttgaccttaacagaccttggagttgcccaccaggtgcgcccacagactcagagga

SEQ ID NO: 23704 - DNA, 120 bp, Artificial Sequence
  ENSG00000032389_30 (sequence is synthesized)
agatgcgcgctgcttatggatttgtgtaaatgtgcgtgtgctgtctgcagaatgcggggcacaccgtgctctgttgacattatccattatgctctgttgctcagcttcagacagcaaagt

SEQ ID NO: 23705 - DNA, 120 bp, Artificial Sequence
  ENSG00000032389_31 (sequence is synthesized)
acagggatggccccagacacctgcacctgccacgggcctcactcacagaaggaggacctgccacgagcctcactcaaggaagaaggactcgccacgggcctcactcacagaaggacccgc

SEQ ID NO: 23706 - DNA, 120 bp, Artificial Sequence
  ENSG00000032389_32 (sequence is synthesized)
agcataccagaatgccatggccaaattcattcaacagacactcagtgagctcactttggagagggtaataaggacttttcccaacaaatggtcatttctcactatttttaagtagtcctt

SEQ ID NO: 23707 - DNA, 120 bp, Artificial Sequence
  ENSG00000032389_33 (sequence is synthesized)
ttaatcagacacagacctcctcatcatataattgggccccctcccaactgacagatgagaagaggaaagctaacgacggaagcagaggaagtgtctgaaggtgacgtggtctgagtgcca

SEQ ID NO: 23708 - DNA, 120 bp, Artificial Sequence
  ENSG00000032389_34 (sequence is synthesized)
gatctggggctgtgggtcaggtctgatgccctataaatgagtcccacccgggcacagaggtgctcacggtggctcctgcctgcccagacctctcctgtcctccttcaggtctgtgaggtt

SEQ ID NO: 23709 - DNA, 120 bp, Artificial Sequence
  ENSG00000032389_35 (sequence is synthesized)
ctcagataacttgctcttatttgagtatcttgaatgatcaataacattttgtcctatgagcatgaatttgatttttggaaaaagttaattggaacaaaatctggtaaataaaataggtca

SEQ ID NO: 23710 - DNA, 120 bp, Artificial Sequence
  ENSG00000032389_36 (sequence is synthesized)
gcaagctttgcaaaagctgattagtggaaaacgggttaaaaccacatgaaaactgatttccttgtaagactcataaaaagacattctgaaatattttgagcagagactgcatcattaaaa

SEQ ID NO: 23711 - DNA, 120 bp, Artificial Sequence
  ENSG00000032389_37 (sequence is synthesized)
taaatgtcagctttatagccagggatttcagacaatggccagtgaaatttatgttttggatatttgttttgaaaaagccattatctttaagaaaatatgtagtcagtgatttactaagtt

SEQ ID NO: 23712 - DNA, 120 bp, Artificial Sequence
  ENSG00000032389_38 (sequence is synthesized)
gcatattttaatatcatagtataatttaccaagttgcatagttttaatatcataaaactacatgtatagtttgattttgtaaatattggagctcactagcattttcttattagtcttcca

SEQ ID NO: 23713 - DNA, 120 bp, Artificial Sequence
  ENSG00000032389_39 (sequence is synthesized)
cagatacgcttctggagagatgagcgtggtgcgaccacacagggttgctgggatggaggaggtggcgccagcctcttcctgcagggcaggaacgccgaggggatgagagcaccctgggcc

SEQ ID NO: 23714 - DNA, 120 bp, Artificial Sequence
  ENSG00000032389_40 (sequence is synthesized)
gggggattagacagggtcccgggaaaccagtgtgtgcccgcagcacgcagtggcttttcctaatccatttactattttcctttgctgttcttccttctccctcagccagatctactgcat

SEQ ID NO: 23715 - DNA, 120 bp, Artificial Sequence
  ENSG00000032389_41 (sequence is synthesized)
ggataacagggttggccacagccggcctgcctccttccccttcacatcctgtcccgaacatgacttctgacctggaagttatcactcactttggtggactcatttatttacacgcccacc

SEQ ID NO: 23716 - DNA, 120 bp, Artificial Sequence
  ENSG00000032389_42 (sequence is synthesized)
ggggacaggtcgcagcttcagacagcaaagtcctgacatgtgcagccgtgtggaggatgccgaaggaattggaatcaggcagccacgagtcccctgatgattcatccagcactgcacaga

SEQ ID NO: 23717 - DNA, 120 bp, Artificial Sequence
  ENSG00000032389_43 (sequence is synthesized)
ggaaggaaataggccaaaaaggactaaaaattgagccaagggttatcttcagatgcttttcacaggggatgtgttccaagaccacccagcggatgccaggaaaccttgatccatatcata

SEQ ID NO: 23718 - DNA, 120 bp, Artificial Sequence
  ENSG00000032444_0 (sequence is synthesized)
tttttagcgggaggagcagtccttgcgttaagcggtgtgaggccctttaaggcgcggccacactcagcatggcggcctcagtcggccttccaagcatggcgcggggaggaggggtgggag

SEQ ID NO: 23719 - DNA, 120 bp, Artificial Sequence
  ENSG00000032444_1 (sequence is synthesized)
ggtcgggagggactgcggtgcgactaggagtgaataatttaaaggggccgtgcctgcggagccgggcggaacgctagcggtgttggcgcggagtggaccccggctgcggcccctggcaat

SEQ ID NO: 23720 - DNA, 120 bp, Artificial Sequence
  ENSG00000032444_2 (sequence is synthesized)
ggcgccaccatcggtcccggagtcccagtgatgctctgtgccatagagcccccataacttcactactacgtgatagtaaatccccggcaaaaaccagcagcgccttgcaagcccacgcca

SEQ ID NO: 23721 - DNA, 120 bp, Artificial Sequence
  ENSG00000032444_3 (sequence is synthesized)
ccccaagcatcccaggactcttctgaaacgactccgggctaccagatcggccgtccagctggaatcaaccgatggaggctccgctgcaaactggaatggtgcttggcgtgatgatcgggg

SEQ ID NO: 23722 - DNA, 120 bp, Artificial Sequence
  ENSG00000032444_4 (sequence is synthesized)
ccggagtggcggtggtggtcacggccgtgctcatcctcctggtggtgcggaggctgcgagtgccaaaaaccccagccccggatggcccccggtatcggttccggaagagggacaaagtgc

SEQ ID NO: 23723 - DNA, 120 bp, Artificial Sequence
  ENSG00000032444_5 (sequence is synthesized)
tcttctatggccggaagattatgcggaaggtgtcacaatccacctcctccctcgtggatacctctgtctccgccacctcccggccacgcatgaggaagaaactgaagatgctcaacattg

SEQ ID NO: 23724 - DNA, 120 bp, Artificial Sequence
  ENSG00000032444_6 (sequence is synthesized)
ccaagaagatcctgcgcatccagaaagagacgcccacgctgcagcggaaggagcccccgcccgcagtgctagaagctgacctgaccgagggcgacctggctaactcccatctgccctctg

SEQ ID NO: 23725 - DNA, 120 bp, Artificial Sequence
  ENSG00000032444_7 (sequence is synthesized)
aagtgctttatatgctcaagaacgtccgggtgctgggccacttcgagaagccactcttcctggagctctgccgccacatggtcttccagcggctgggccagggtgactacgtcttccggc

SEQ ID NO: 23726 - DNA, 120 bp, Artificial Sequence
  ENSG00000032444_8 (sequence is synthesized)
cgggccagccagatgccagcatctacgtggtgcaggacgggctgctggagctctgtctgccagggcctgacgggaaggagtgtgtggtgaaggaagtggttcctggggacagcgtcaaca

SEQ ID NO: 23727 - DNA, 120 bp, Artificial Sequence
  ENSG00000032444_9 (sequence is synthesized)
gccttctcagcatcctggatgtcatcaccggtcaccagcatccccagcggaccgtgtctgcccgggcggcccgggactccacggtgctgcgcctgccggtggaagcattctccgcggtct

SEQ ID NO: 23728 - DNA, 120 bp, Artificial Sequence
  ENSG00000032444_10 (sequence is synthesized)
tcaccaagtacccggagagcttggtgcgggtcgtgcagatcatcatggtgcggctgcagcgagtcaccttcctggcactgcacaactacctgggtctgaccaatgagctcttcagccacg

SEQ ID NO: 23729 - DNA, 120 bp, Artificial Sequence
  ENSG00000032444_11 (sequence is synthesized)
agatccagcccctgcgtctgttccccagccccggcctcccaactcgcaccagccctgtgcggggctccaagagaatggtcagcacctcagctacagacgagcccagggagaccccagggc

SEQ ID NO: 23730 - DNA, 120 bp, Artificial Sequence
  ENSG00000032444_12 (sequence is synthesized)
ggccacccgatcccaccggggccccgctgcctggacctacaggggaccctgtgaagcccacatccctggaaaccccctcggcccctctgctgagccgctgcgtctccatgccaggggaca

SEQ ID NO: 23731 - DNA, 120 bp, Artificial Sequence
  ENSG00000032444_13 (sequence is synthesized)
tctcaggcttgcagggtggcccccgctccgacttcgacatggcctatgagcgtggccggatctccgtgtccctgcaggaagaggcctccggggggtccctggcagcccccgctcggaccc

SEQ ID NO: 23732 - DNA, 120 bp, Artificial Sequence
  ENSG00000032444_14 (sequence is synthesized)
ccactcaggagcctcgtgagcagccggcaggcgcctgtgaatacagctactgtgaggatgagtcggccactggtggctgccctttcgggccctaccagggccgccagaccagcagcatct

SEQ ID NO: 23733 - DNA, 120 bp, Artificial Sequence
  ENSG00000032444_15 (sequence is synthesized)
tcgaggcagcaaagcaggagctggccaagctgatgcggattgaggacccctccctcctgaacagcagagtcttgctgcaccacgccaaagctggcaccatcattgcccgccagggagacc

SEQ ID NO: 23734 - DNA, 120 bp, Artificial Sequence
  ENSG00000032444_16 (sequence is synthesized)
aggacgtgagcctgcacttcgtgctctggggctgcctgcacgtgtaccagcgcatgatcgacaaggcggaggacgtgtgcctgttcgtagcgcagcccggggaactggtggggcagctgg

SEQ ID NO: 23735 - DNA, 120 bp, Artificial Sequence
  ENSG00000032444_17 (sequence is synthesized)
cggtgctcactggcgaacctctcatcttcacactgcgagcccaacgcgactgcaccttcctgcggatctccaagtccgacttctatgagatcatgcgcgcacagcccagtgtggtgctga

SEQ ID NO: 23736 - DNA, 120 bp, Artificial Sequence
  ENSG00000032444_18 (sequence is synthesized)
gtgcggcgcacacggtggcagccaggatgtcgcccttcgtgcgccagatggacttcgccatcgactggactgcagtggaggcgggacgcgcgctgtacaggcagggcgaccgctccgact

SEQ ID NO: 23737 - DNA, 120 bp, Artificial Sequence
  ENSG00000032444_19 (sequence is synthesized)
agaaggagctggtgggcgagtacggccgcggcgacctcatcggcgtggtggaggcactgacccggcagccgcgagccacgacggtgcacgcggtgcgcgacacggagctggccaagcttc

SEQ ID NO: 23738 - DNA, 120 bp, Artificial Sequence
  ENSG00000032444_20 (sequence is synthesized)
ccgagggcaccttgggtcacatcaaacgccggtacccgcaggtcgtgacccgccttatccacctactgagccagaaaattctagggaatttgcagcagctgcaaggacccttcccagcag

SEQ ID NO: 23739 - DNA, 120 bp, Artificial Sequence
  ENSG00000032444_21 (sequence is synthesized)
gctctgggttgggtgtgcccccacactcggaactcaccaacccagccagcaacctggcaactgtggcaatcctgcctgtgtgtgctgaggtccccatggtggccttcacgctggagctgc

SEQ ID NO: 23740 - DNA, 120 bp, Artificial Sequence
  ENSG00000032444_22 (sequence is synthesized)
agcacgccctgcaggccatcggtccgacgctactccttaacagtgacatcatccgggcacgcctgggggcctccgcactggatagcatccaagagttccggctgtcagggtggctggccc

SEQ ID NO: 23741 - DNA, 120 bp, Artificial Sequence
  ENSG00000032444_23 (sequence is synthesized)
agcaggaggatgcacaccgtatcgtactctaccagacggacgcctcgctgacgccctggaccgtgcgctgcctgcgacaggccgactgcatcctcattgtgggcctgggggaccaggagc

SEQ ID NO: 23742 - DNA, 120 bp, Artificial Sequence
  ENSG00000032444_24 (sequence is synthesized)
ctaccctcggccagctggagcagatgctggagaacacggctgtgcgcgcccttaagcagctagtcctgctccaccgagaggagggcgcgggccccacgcgcaccgtggagtggctaaata

SEQ ID NO: 23743 - DNA, 120 bp, Artificial Sequence
  ENSG00000032444_25 (sequence is synthesized)
tgcgcagctggtgctcggggcacctgcacctgcgctgtccgcgccgcctcttttcgcgccgcagccctgccaagctgcatgagctctacgagaaggttttctccaggcgcgcggaccggc

SEQ ID NO: 23744 - DNA, 120 bp, Artificial Sequence
  ENSG00000032444_26 (sequence is synthesized)
acagcgacttctcccgcttggcgagggtgctcacggggaacaccattgcccttgtgctaggcgggggcggggccaggggctgctcgcacatcggagtactaaaggcattagaggaggcgg

SEQ ID NO: 23745 - DNA, 120 bp, Artificial Sequence
  ENSG00000032444_27 (sequence is synthesized)
gggtccccgtggacctggtgggcggcacgtccattggctctttcatcggagcgttgtacgcggaggagcgcagcgccagccgcacgaagcagcgggcccgggagtgggccaagagcatga

SEQ ID NO: 23746 - DNA, 120 bp, Artificial Sequence
  ENSG00000032444_28 (sequence is synthesized)
cttcggtgctggaacctgtgttggacctcacgtacccagtcacctccatgttcactgggtctgcctttaaccgcagcatccatcgggtcttccaggataagcagattgaggacctgtggc

SEQ ID NO: 23747 - DNA, 120 bp, Artificial Sequence
  ENSG00000032444_29 (sequence is synthesized)
tgccttacttcaacgtgaccacagatatcaccgcctcagccatgcgagtccacaaagatggctccctgtggcggtacgtgcgcgccagcatgacgctgtcgggctacctgcccccgctgt

SEQ ID NO: 23748 - DNA, 120 bp, Artificial Sequence
  ENSG00000032444_30 (sequence is synthesized)
gcgaccccaaggacgggcacctactcatggatggcggctacatcaacaatctgccagcggacatcgcccgcagcatgggtgccaaaacggtcatcgccattgacgtggggagccaggatg

SEQ ID NO: 23749 - DNA, 120 bp, Artificial Sequence
  ENSG00000032444_31 (sequence is synthesized)
agacggacctcagcacctacggggacagcctgtccggctggtggctgctgtggaagcggctgaatccctgggctgacaaggtaaaggttccagacatggctgaaatccagtcccgcctgg

SEQ ID NO: 23750 - DNA, 120 bp, Artificial Sequence
  ENSG00000032444_32 (sequence is synthesized)
cctacgtgtcctgtgtgcggcagctagaggttgtcaagtccagctcctactgcgagtacctgcgcccgcccatcgactgcttcaagaccatggactttgggaagttcgaccagatctatg

SEQ ID NO: 23751 - DNA, 120 bp, Artificial Sequence
  ENSG00000032444_33 (sequence is synthesized)
atgtgggctaccagtacgggaaggcggtgtttggaggctggagccgtggcaacgtcattgagaaaatgctcacagaccggcggtctacagaccttaatgagagccgccgtgcagacgtgc

SEQ ID NO: 23752 - DNA, 120 bp, Artificial Sequence
  ENSG00000032444_34 (sequence is synthesized)
ttgccttcccaagctctggcttcactgacttggcagagattgtgtcccggattgagccccccacgagctatgtctctgatggctgtgctgacggagaggagtcagattgtctgacagagt

SEQ ID NO: 23753 - DNA, 120 bp, Artificial Sequence
  ENSG00000032444_35 (sequence is synthesized)
atgaggaggacgccggacccgactgctcgagggatgaaggggggtcccccgagggcgcaagccccagcactgcctccgagatggaggaggagaagtcgattctccggcaacgacgctgtc

SEQ ID NO: 23754 - DNA, 120 bp, Artificial Sequence
  ENSG00000032444_36 (sequence is synthesized)
tgccccaggagccgcccggctcagccacagatgcctgaggacctcgacaggggtcaccccctccctcccacccctggactgggctgggggtggccccgtgggggtagctcactccccctc

SEQ ID NO: 23755 - DNA, 120 bp, Artificial Sequence
  ENSG00000032444_37 (sequence is synthesized)
ctgctgctatgcctgtgacccccgcggcccacacactggactgacctgccctgagcggggatgcagtgttgcactgatgacttgaccagcccctcccccaataaactcgcctcttggaaa

SEQ ID NO: 23756 - DNA, 120 bp, Artificial Sequence
  ENSG00000032444_38 (sequence is synthesized)
tttcccggcatgcactgcgggccgccgggcctcagggaagagtcgcgcccccggggagggagcagcactggcccattctgcagatggggacatcgagtcacgggctggctacgaactcct

SEQ ID NO: 23757 - DNA, 120 bp, Artificial Sequence
  ENSG00000032444_39 (sequence is synthesized)
cgggggcgaaggtggcggagagggatgggttccaggacgtcctggcgcccggggaaggctcggcgggacggatttgcggtgcgcagccagtgccgttcgtccctcaggtgcttggcgtga

SEQ ID NO: 23758 - DNA, 120 bp, Artificial Sequence
  ENSG00000032444_40 (sequence is synthesized)
ggacctacaggcttgcagggtggcccccgctccgacttcgacatggcctatgagcgtggccggatctccgtgtccctgcaggaagaggcctccggggggtccctggcagcccccgctcgg

SEQ ID NO: 23759 - DNA, 120 bp, Artificial Sequence
  ENSG00000032444_41 (sequence is synthesized)
agaaacatcctcagcttcccagaaaaatcccagtaatattccagcatctctcagtatcttccaaggagcccggacgccctccccaggcccgctctcataagcaccccaggaatgtgccca

SEQ ID NO: 23760 - DNA, 120 bp, Artificial Sequence
  ENSG00000032444_42 (sequence is synthesized)
ggaacgctagcggtgttggcgcggagtggaccccggctgcggcccctgggtgtttccacaccggtagccagctgtgccctgaggtggaagaggaccggccacccaggaattttccaagta

SEQ ID NO: 23761 - DNA, 120 bp, Artificial Sequence
  ENSG00000032444_43 (sequence is synthesized)
tagtgtccgccaccgctccttccttgatggagaccccctggatccgtctgcctcttctccaaggtctgaattagcaattcacccatctccgccttcattctcccaggtgtcacaatccac

SEQ ID NO: 23762 - DNA, 120 bp, Artificial Sequence
  ENSG00000032444_44 (sequence is synthesized)
ggcagcaaagcaggagctggccaagctgatgcggattgaggtgggcagccgaggggagctgggcacagggcgcaagggaggcctggctgcgcccatctcaacccccctacctccccagga

SEQ ID NO: 23763 - DNA, 120 bp, Artificial Sequence
  ENSG00000032444_45 (sequence is synthesized)
gagtctgggtttccgttagcctcgcaggggtgtcccttcgagggtcgttagcgagcctccgctttcccacgatctgtcctccgattcctgttaactctagactttctgatgttcccatac

SEQ ID NO: 23764 - DNA, 120 bp, Artificial Sequence
  ENSG00000032444_46 (sequence is synthesized)
agtgaataatttaaaggggccgtgcctgcggagccgggcggaacgctagcggtgttggcgcggagtggaccccggctgcggcccctgggtgtttccacaccggtagccagctgtgccctg

SEQ ID NO: 23765 - DNA, 120 bp, Artificial Sequence
  ENSG00000032444_47 (sequence is synthesized)
cagctcctgggtcttccccggggcaggcttgcgtcgggagccgagtatctaggtgcccactcccggaccccacggtttgcgggcccgttttcctggggtggggcattcagtcttcgacgg

SEQ ID NO: 23766 - DNA, 120 bp, Artificial Sequence
  ENSG00000032444_48 (sequence is synthesized)
ggtcaggcttgatcaaccctgcagagggcagtgacccgggaggaagtcaccaggtgcagaggaccgtgccctgtggggacctgcctgcaggctgctgacagtgggtaccaggtcggcctt

SEQ ID NO: 23767 - DNA, 120 bp, Artificial Sequence
  ENSG00000032444_49 (sequence is synthesized)
tggccccggggtggggttggacaggcgggcgtctggtaggccctacgcgtaggcgaagggagcaggaagccggggacccgcctcatctcctggccagggccgagaggtcggtttgctcca

SEQ ID NO: 23768 - DNA, 120 bp, Artificial Sequence
  ENSG00000032444_50 (sequence is synthesized)
tcccttagtcccgcagcgcccctctagcctcgcccctggcagctggagacgcttcccccgccaccccagagggcagggcttgagctgggggcagggcttgaggcaggggagaggtgggcc

SEQ ID NO: 23769 - DNA, 120 bp, Artificial Sequence
  ENSG00000032444_51 (sequence is synthesized)
cagattgacgacttgcacgggttccttcgactccttgatttcccaggactccgggctaccagatcggccgtccagctggaatcaaccgatggaggctccgctgcaaactggaatggtaag

SEQ ID NO: 23770 - DNA, 120 bp, Artificial Sequence
  ENSG00000032444_52 (sequence is synthesized)
atgcgagtccacaaagatggctgtgtgtggcgttacgtccgggccagcgcctcctactgcccctacctgcccccactgtgcgaccccaaggacgggcacctgctggtggacgggtgctac

SEQ ID NO: 23771 - DNA, 120 bp, Artificial Sequence
  ENSG00000032444_53 (sequence is synthesized)
gttaacaacgtcccagcggacatcgcccgcagcatgggtgccaaaacggtcatcgccattgacgtggggagccaggatgagacggacctcagcacctacggggacagcctgtccggctgg

SEQ ID NO: 23772 - DNA, 120 bp, Artificial Sequence
  ENSG00000032444_54 (sequence is synthesized)
ctgtcctctccctctccccagagctctaatgggtagcgagcgaggcttgcttccctacacccccattgcaggggagccctagatggggcagtacagccccctttccacccatcttcggcc

SEQ ID NO: 23773 - DNA, 120 bp, Artificial Sequence
  ENSG00000032444_55 (sequence is synthesized)
ctgggtctgcctttaaccgcagcatccatcgggtcttccaggataagcagattgaggtaggcccacctcatcccctgccctgcctacccctccccggaggagccccctgctcctccccca

SEQ ID NO: 23774 - DNA, 120 bp, Artificial Sequence
  ENSG00000032444_56 (sequence is synthesized)
gccaggcaagtggccgcccgcaccacccgcacacgcaagcacctcccgcaccacacacacgcacacgcgtgggcacacacagacaggctcgatgacgggacacatgcccaagctgcccat

SEQ ID NO: 23775 - DNA, 120 bp, Artificial Sequence
  ENSG00000032444_57 (sequence is synthesized)
gcaggggtgcagacacacatgcgcacacatacgatcacttgcacaaaatgatacatgaatgtgcctgtggacagcgacatgtgcagttgagatctacattctggccaggcgcggtggctc

SEQ ID NO: 23776 - DNA, 120 bp, Artificial Sequence
  ENSG00000032444_58 (sequence is synthesized)
gtgctcatcctcctggtggtgcggaggctgcgagtgccaagtgagcacccgaggggcccctcttgggaggctgtatggtggggggcccaaatgcccgggtcccgaggcggcagagatggg

SEQ ID NO: 23777 - DNA, 120 bp, Artificial Sequence
  ENSG00000032444_59 (sequence is synthesized)
gatttgctggcgtctgttcgcggtaccccagctctggcagggtggagtctgcacagagctcggagtgcccctgtccccacctatccccagaaaccccagccccggatggcccccggtatc

SEQ ID NO: 23778 - DNA, 120 bp, Artificial Sequence
  ENSG00000032742_0 (sequence is synthesized)
ccccttcccgccgcgctctctcccgcccccgcgcttccggccccgcccgcccccgcgcggaggactgtgggagcggcttccttggattccgcgcttggcaacggctcggcgtcgcgcttt

SEQ ID NO: 23779 - DNA, 120 bp, Artificial Sequence
  ENSG00000032742_1 (sequence is synthesized)
cgcgctttggccaaccgctgcgtcgtccctgggcccgaataactgtcgcccgcttccctcagcgtgaggtacaaatgatgcaaaatgtgcacctggctccagagacagatgaagatgatc

SEQ ID NO: 23780 - DNA, 120 bp, Artificial Sequence
  ENSG00000032742_2 (sequence is synthesized)
tttattccggctataatgactacaatccaatctatgatatcgaggaattggagaatgatgcagcttttcagcaagctgtgaggactagtcatggcagaagacctccaataactgctaaaa

SEQ ID NO: 23781 - DNA, 120 bp, Artificial Sequence
  ENSG00000032742_3 (sequence is synthesized)
tatcaagcacggcagttactagacctatagctactggatatgggtccaagacatctctggcatcatcaataggaagaccaatgacaggggctattcaggatggagttactagacccatga

SEQ ID NO: 23782 - DNA, 120 bp, Artificial Sequence
  ENSG00000032742_4 (sequence is synthesized)
cagcagtgagagcagctggttttaccaaagcagctttgagaggctctgcatttgacccccttagtcagtcaaggggccctgcttcccctttggaagccaagaaaaaagatagcccagagg

SEQ ID NO: 23783 - DNA, 120 bp, Artificial Sequence
  ENSG00000032742_5 (sequence is synthesized)
aaaaaataaagcaattagagaaggaagtaaatgagttggtagaagaaagctgtattgccaatagttgtggagacttaaaattggccttagaaaaggcaaaagatgcaggaagaaaagaga

SEQ ID NO: 23784 - DNA, 120 bp, Artificial Sequence
  ENSG00000032742_6 (sequence is synthesized)
gagtcctggtgagacagcgagaacaagttacaactccagaaaatatcaatttggatttaacttactcagttcttttcaatttggccagtcagtattcagttaatgaaatgtatgccgaag

SEQ ID NO: 23785 - DNA, 120 bp, Artificial Sequence
  ENSG00000032742_7 (sequence is synthesized)
cacttaacacttatcaagttatagtcaaaaataagatgtttagcaatgcaggaatattgaaaatgaatatgggaaatatctatttaaagcaaagaaattattccaaagccattaaattct

SEQ ID NO: 23786 - DNA, 120 bp, Artificial Sequence
  ENSG00000032742_8 (sequence is synthesized)
accgaatggcattagaccaagttccaagtgtcaataagcaaatgaggattaaaataatgcagaatattggagttacatttattcaggctggtcagtattcagatgctattaattcatatg

SEQ ID NO: 23787 - DNA, 120 bp, Artificial Sequence
  ENSG00000032742_9 (sequence is synthesized)
agcacataatgagcatggcaccaaatctgaaggcaggctacaacctaactatctgttattttgctattggagaccgagaaaaaatgaagaaggcattccaaaaattgattactgttccat

SEQ ID NO: 23788 - DNA, 120 bp, Artificial Sequence
  ENSG00000032742_10 (sequence is synthesized)
tagaaattgatgaagataaatatatttcaccaagtgatgatcctcatactaacttagtaactgaagctataaaaaatgatcacctcaggcaaatggaacgtgaaaggaaagccatggcag

SEQ ID NO: 23789 - DNA, 120 bp, Artificial Sequence
  ENSG00000032742_11 (sequence is synthesized)
ctcaatatgtagagctagccaatgatctggaaataaacaaagcagttacatacttgagacaaaaagactataaccaagctgtagagatcttaaaagtgttggaaaaaaaggacagtagag

SEQ ID NO: 23790 - DNA, 120 bp, Artificial Sequence
  ENSG00000032742_12 (sequence is synthesized)
tgaaaagtgcagctgcaaccaatctctcagccctgtattatatgggaaaggattttgcacaagccagcagctatgcagatatagctgtgaactctgatagatataatccagcagctctta

SEQ ID NO: 23791 - DNA, 120 bp, Artificial Sequence
  ENSG00000032742_13 (sequence is synthesized)
ctaataaagggaatacagtttttgcaaatggtgattatgagaaggccgctgaattctataaagaggctctaagaaatgattcttcttgtactgaagcactttataatattggccttacct

SEQ ID NO: 23792 - DNA, 120 bp, Artificial Sequence
  ENSG00000032742_14 (sequence is synthesized)
atgagaaactaaatcggctagatgaggctttggactgtttcctgaaacttcacgcaatcctacgaaacagtgccgaagttctttaccagatagcaaatatatatgaattaatggaaaatc

SEQ ID NO: 23793 - DNA, 120 bp, Artificial Sequence
  ENSG00000032742_15 (sequence is synthesized)
ccagtcaagctattgaatggctaatgcaggtggtcagtgttattccaaccgatcctcaagttttatctaagctaggagaattatatgatcgtgaaggagataaatctcaagcatttcaat

SEQ ID NO: 23794 - DNA, 120 bp, Artificial Sequence
  ENSG00000032742_16 (sequence is synthesized)
attactatgagtcatataggtattttccttgtaatattgaagtcattgagtggcttggagcctattacattgacacccaattttgggaaaaagctattcagtactttgaaagagcttctc

SEQ ID NO: 23795 - DNA, 120 bp, Artificial Sequence
  ENSG00000032742_17 (sequence is synthesized)
ttatacagcctacacaagtgaaatggcagctgatggtagctagttgtttcagaagaagtggtaactaccaaaaagcattagatacttacaaagatactcacagaaaatttccagaaaatg

SEQ ID NO: 23796 - DNA, 120 bp, Artificial Sequence
  ENSG00000032742_18 (sequence is synthesized)
tcgaatgtctgcgtttcttagttcgtctctgcacagatcttggattaaaagatgctcaagaatatgccagaaaactgaagaggttggaaaaaatgaaagaaataagggaacagcgcataa

SEQ ID NO: 23797 - DNA, 120 bp, Artificial Sequence
  ENSG00000032742_19 (sequence is synthesized)
agtcaggcagagatggcagtgggggctcccgtggcaaaagagaaggaagtgctagcggtgatagtggccagaactatagtgccagtagtaaaggtgaacgactaagtgccagactcagag

SEQ ID NO: 23798 - DNA, 120 bp, Artificial Sequence
  ENSG00000032742_20 (sequence is synthesized)
ctttacctgggacaaatgaaccttatgaaagtagcagtaacaaagaaatagatgcctcctatgtggacccacttggccctcaaatagaacgaccaaaaactgcagccaagaaaaggatcg

SEQ ID NO: 23799 - DNA, 120 bp, Artificial Sequence
  ENSG00000032742_21 (sequence is synthesized)
atgaggatgattttgctgatgaagaattaggagatgatttgcttccagaataatattcactttaatatttattaaaggaaagaaattgccttatgagatcatcctcatgttaaaccttgg

SEQ ID NO: 23800 - DNA, 120 bp, Artificial Sequence
  ENSG00000032742_22 (sequence is synthesized)
attaaatatctaacctgtaattattttttttcactgtcaaaacttaagtaagtgtattctattctgtatgtatgcatttaagttgtttttttcttttaaggaataaaaacaggtaaaact

SEQ ID NO: 23801 - DNA, 120 bp, Artificial Sequence
  ENSG00000032742_23 (sequence is synthesized)
tgaagcacttcaaattgcctgatgaaagttgaatcaggaatgaagataaaagtacacaacaatgcagaaagcggtacttagcctcacaaagatggaaacattccaaaaacgtgaaaaact

SEQ ID NO: 23802 - DNA, 120 bp, Artificial Sequence
  ENSG00000032742_24 (sequence is synthesized)
gcagtaggcttcttggaagtagaccaagggtgtccaatctttggcttccctgggccacatcggaagaagaattgtcttgggccacacatgaaattcacaaacactaaggtacaaatgatg

SEQ ID NO: 23803 - DNA, 120 bp, Artificial Sequence
  ENSG00000032742_25 (sequence is synthesized)
gtaactgaagctataaaaaatgatcacctcaggcaaatggaacgtgaaagttgacatataacatggatattactcagcaacaaaaaggaatgaatattgatatacgcaacaaattggata

SEQ ID NO: 23804 - DNA, 120 bp, Artificial Sequence
  ENSG00000032742_26 (sequence is synthesized)
gaaaagtgcagctgcaaccaatctctcagccctgtattatatggtaagtttttttactactaagagttaatcatatgctatttttatattgctaaatttctgcccaaggatcatgcctag

SEQ ID NO: 23805 - DNA, 120 bp, Artificial Sequence
  ENSG00000032742_27 (sequence is synthesized)
ggagaggtccaaagaatattggtggagaatggtaagtggactgaggagtatagaggatctgatcctgacaagtgccaggccaggggctgagttggcagacatgagtgagaacaccatctc

SEQ ID NO: 23806 - DNA, 120 bp, Artificial Sequence
  ENSG00000032742_28 (sequence is synthesized)
tgaaggagaagggaggaagaaaaattgtagtgataagcatcgcatcatagattatgcaacatacagctggaagagctagagatgtatttcaactcctttgtgttattggtaaagaaagtg

SEQ ID NO: 23807 - DNA, 120 bp, Artificial Sequence
  ENSG00000032742_29 (sequence is synthesized)
acatcttaggttaaaagatttatgtaaggttacagagtatcaactctaacaagcatttattgagcatctcactggatgccagtcatgggaataccaaaagtctaaaagctccctaaaggg

SEQ ID NO: 23808 - DNA, 120 bp, Artificial Sequence
  ENSG00000032742_30 (sequence is synthesized)
gagcgttcttgtctttggaacaaaggaggtagactaggaaggaaggtttaaagtagagaacaataaacgaatgcagataataagtgcttcagaaattcagaggaggcaaataacatttta

SEQ ID NO: 23809 - DNA, 120 bp, Artificial Sequence
  ENSG00000032742_31 (sequence is synthesized)
atttaggactttcaggaaagatttcatagagagttggatctttcaggtcagaatatagaaaggggcatttgtagggagaaggggacgaaacagaagtacagaggcaaggaactgctggga

SEQ ID NO: 23810 - DNA, 120 bp, Artificial Sequence
  ENSG00000032742_32 (sequence is synthesized)
gggaagtgtgtataagagtcatttcttttcaccagaaaatacagaatttctggtaggctttttctgaatattgaaaattgattataggtaggtgtggtgcctcaagcctataatcccagc

SEQ ID NO: 23811 - DNA, 72 bp, Artificial Sequence
  ENSG00000032742_33 (sequence is synthesized)
cagcactttgggaggctgaggtgtgcctgtctctacaaaaagttcaaaaaattagctgggcatgatggtgca

SEQ ID NO: 23812 - DNA, 84 bp, Artificial Sequence
  ENSG00000032742_34 (sequence is synthesized)
tatagctgagctggggaggtcaaggctgttgtgagccattatcgtgccattgtactcctgtttggtgacagataccttgtctcc

SEQ ID NO: 23813 - DNA, 120 bp, Artificial Sequence
  ENSG00000032742_35 (sequence is synthesized)
gatagcaaatatgtatcttatttgaaaaccttagggacagttattaattctctcaattggtgattgaagatcaattattaaataagtttaactaatgaagtaattgatgaggataatatt

SEQ ID NO: 23814 - DNA, 120 bp, Artificial Sequence
  ENSG00000032742_36 (sequence is synthesized)
gatgtagtttgcatcgaaagaggaattaatggttaaaactattatttattaaattttgaaaataactgaagtaattaggacattttcggtacatataagccattcattgaaagtcaattt

SEQ ID NO: 23815 - DNA, 120 bp, Artificial Sequence
  ENSG00000032742_37 (sequence is synthesized)
ggtgctttagaacgttgtattaattctgaagcttgtagggtatcattgaagcactaacttactaaataaaatactgtttattactgattactattgattgaatttggataatttttctta

SEQ ID NO: 23816 - DNA, 120 bp, Artificial Sequence
  ENSG00000032742_38 (sequence is synthesized)
cttttttagctggcctgtagatataatgaggtctccaaagactgttaccctctaaaattatgtaattcttcatatgaactcattcattctgttcatttaatagtcatttattgaatgtat

SEQ ID NO: 23817 - DNA, 120 bp, Artificial Sequence
  ENSG00000032742_39 (sequence is synthesized)
actatgtgtatcagtattatgtttcaaactcaggggaatgtagaactacaaaatgttgcgctaatatcagtttcttccacaacacttagctttcttaataagccctgctcttggttagaa

SEQ ID NO: 23818 - DNA, 120 bp, Artificial Sequence
  ENSG00000032742_40 (sequence is synthesized)
aagcagaaatgtgttaatgtttttaatgcttttcatgctatttgaaaagcacttttaatttctctccttattttggtaagctttggccacaacattgggaagagttaaacatcttaggta

SEQ ID NO: 23819 - DNA, 120 bp, Artificial Sequence
  ENSG00000032742_41 (sequence is synthesized)
gattttcaacttactgttatcttggtttaaattttatacaaatatgtttagaaaattttatatgttgtgaggtgtaccattaataattttaagtactatctgctgtacttttgataaaga

SEQ ID NO: 23820 - DNA, 120 bp, Artificial Sequence
  ENSG00000032742_42 (sequence is synthesized)
ttgcagtgagccaagatagtgccactgtactccagcctaggtgcagagctagactatctcaaaaaaaaattagttttagagcagatagcatcatagttactcctgttagtctttttgttc

SEQ ID NO: 23821 - DNA, 120 bp, Artificial Sequence
  ENSG00000032742_43 (sequence is synthesized)
gttctgttttgttcatttaatttctctgaaactgccagtgtcattatcttttaccacccagttcatgatcagcttggatccagtcaagcaactgatgtatttgagactgtttgagtacat

SEQ ID NO: 23822 - DNA, 120 bp, Artificial Sequence
  ENSG00000032742_44 (sequence is synthesized)
tttcttttttttttttcttgtggtatcacacttgtcatcgttaaaaacagtagatcttctggtgtcactcttgtcaccattgaaaacaatgcttctttttcaataaactttgaattggaa

SEQ ID NO: 23823 - DNA, 120 bp, Artificial Sequence
  ENSG00000032742_45 (sequence is synthesized)
tctggcagcgtgaggacaggacacatggagagagaccctttaaacctccttccaaggaagtcagttctccctggtccagagattgcaaagtgtaattatttttcaggagaaaaatactat

SEQ ID NO: 23824 - DNA, 120 bp, Artificial Sequence
  ENSG00000033011_0 (sequence is synthesized)
gcggtcacgtgactgctgcgggccagccaagatggcggcctcatgcttggtcctgctggcgctgtgtctgctgctgccgctgctgctgctgggaggatggaagcgctggcgccgggggcg

SEQ ID NO: 23825 - DNA, 120 bp, Artificial Sequence
  ENSG00000033011_1 (sequence is synthesized)
ggcggcccggcatgtagtagcggtggtgctgggcgacgtgggccgcagcccccgtatgcagtaccacgcgctgtcgttggccatgcacggcttctcggtgaccctcctggggttctgcaa

SEQ ID NO: 23826 - DNA, 120 bp, Artificial Sequence
  ENSG00000033011_2 (sequence is synthesized)
ctccaaaccccatgatgagctcttgcagaacaacagaattcagattgtggggttgacagaacttcagagtcttgcagttgggccccgagttttccagtacggagtcaaagttgtacttca

SEQ ID NO: 23827 - DNA, 120 bp, Artificial Sequence
  ENSG00000033011_3 (sequence is synthesized)
ggctatgtacttgctgtggaagttgatgtggagggagccaggtgcctatatctttctccagaaccccccaggtctgcctagcattgctgtctgctggttcgtgggctgcctttgtggaag

SEQ ID NO: 23828 - DNA, 120 bp, Artificial Sequence
  ENSG00000033011_4 (sequence is synthesized)
caagctcgtcattgactggcacaactatggctactccatcatgggtctggtgcatggccccaaccatcccctcgttctgctggccaagtggtacgagaagttctttgggcgcctgtccca

SEQ ID NO: 23829 - DNA, 120 bp, Artificial Sequence
  ENSG00000033011_5 (sequence is synthesized)
cctgaacctgtgtgttaccaatgctatgcgagaagacctggcggataactggcacatcagggctgtgaccgtctacgacaagcccgcatctttctttaaagagacacctctggacctgca

SEQ ID NO: 23830 - DNA, 120 bp, Artificial Sequence
  ENSG00000033011_6 (sequence is synthesized)
gcaccggctcttcatgaagctgggcagcatgcactctccgttcagggcccgctcagaacctgaggacccagtcacggagcggtcggccttcacggagcgggatgctgggagcgggctggt

SEQ ID NO: 23831 - DNA, 120 bp, Artificial Sequence
  ENSG00000033011_7 (sequence is synthesized)
gacgcgtctccgtgagcggccagccctgctggtcagcagcacgagctggacagaggacgaagacttctccatcctgctggcagctttagaaaagtttgaacaactgactcttgatggaca

SEQ ID NO: 23832 - DNA, 120 bp, Artificial Sequence
  ENSG00000033011_8 (sequence is synthesized)
acttccagcacatccaggtctgcaccccctggctggaggccgaggactaccccctgcttctagggtcggcggacctgggtgtctgtctgcacacgtcctccagtggcctggacctgccca

SEQ ID NO: 23833 - DNA, 120 bp, Artificial Sequence
  ENSG00000033011_9 (sequence is synthesized)
tgaaggtggtggacatgttcgggtgctgtttgcctgtgtgtgctgtgaacttcaagtgtttacatgagctggtgaaacatgaagaaaatggcctggtctttgaggactcagaggaactgg

SEQ ID NO: 23834 - DNA, 120 bp, Artificial Sequence
  ENSG00000033011_10 (sequence is synthesized)
ctgcagatgcttttctcaaactttcctgatcctgcgggcaagctaaaccagttccggaagaacctgcgggagtcgcagcagctccgatgggatgagagctgggtgcagactgtgctccct

SEQ ID NO: 23835 - DNA, 120 bp, Artificial Sequence
  ENSG00000033011_11 (sequence is synthesized)
aactcctgggccagaggctaaaaccccaggacccctgctgtccttcccgcagcttcttcttggagtctcagggcaaaccctttcgagcagcacctcccagtggccagaagctgaaatgac

SEQ ID NO: 23836 - DNA, 120 bp, Artificial Sequence
  ENSG00000033011_12 (sequence is synthesized)
agctgaaatgacagcagtggtactgcctggtaaaagaattggttctgtgacccgggaagctttggttggccttgatttcttctctggaggcttggaaacgcttcctctcttcttctgttc

SEQ ID NO: 23837 - DNA, 120 bp, Artificial Sequence
  ENSG00000033011_13 (sequence is synthesized)
ttcacgccccatgcccctgctagcgtattactgttctgtgacttccctgtgacctctgcagaactcctcatcctgcgtttggtctccaggtgtcccctttctgccgtgttcctaacattt

SEQ ID NO: 23838 - DNA, 120 bp, Artificial Sequence
  ENSG00000033011_14 (sequence is synthesized)
tgattcctgtcttgaaaaaagcacctgctgcaccgtaagcccagggatgtggcagctgcagtgggcttggctttgtgaggaactgagtgtgtccacgttgggggaacatcatacttgata

SEQ ID NO: 23839 - DNA, 120 bp, Artificial Sequence
  ENSG00000033011_15 (sequence is synthesized)
cacacgtttttatttgcacaaagaaaatgctatttttggagccagaattttcatgtctgatttatggtgattttcttaagaaccagaactgctggcagaaagggggcacccacacgctta

SEQ ID NO: 23840 - DNA, 120 bp, Artificial Sequence
  ENSG00000033011_16 (sequence is synthesized)
gatagccgatgtcttattagagggcagtttgtggttcctgatttggaaattaacattctccaaacattccagtccaatgaaagttttatccgctttcccatataaaaattcttcccatga

SEQ ID NO: 23841 - DNA, 120 bp, Artificial Sequence
  ENSG00000033011_17 (sequence is synthesized)
aagtcccagggtggccgctttcagctcggactgaattacctgcgctcttttcggctggcgggctggcgggcggtgctggtgatgttaactttttatctccagtcatttcaccctctccct

SEQ ID NO: 23842 - DNA, 120 bp, Artificial Sequence
  ENSG00000033011_18 (sequence is synthesized)
ggtttggtaactgaagccttctgaaatgaaccagtgtcaggctccagtgaggactccatccccaattcaggaagcacagaggtggagcataatccccccaatttgtttatgtgcggctga

SEQ ID NO: 23843 - DNA, 120 bp, Artificial Sequence
  ENSG00000033011_19 (sequence is synthesized)
cttctctcaagatggtgtgcctgtttgggaaaacttttgtttgcaagacaatgtgaaagaaatccttaaagctcacagactgctgggtggatatgacattctggcccttggttcccccaa

SEQ ID NO: 23844 - DNA, 120 bp, Artificial Sequence
  ENSG00000033011_20 (sequence is synthesized)
gaaaacagcaacttgcagatagcaagtcaaacttgtcagcagaatccagggatgttcctcgaggcctgacaagttaagagcaatcatgggaaggcattcagaggaccgcagcagaggatc

SEQ ID NO: 23845 - DNA, 120 bp, Artificial Sequence
  ENSG00000033011_21 (sequence is synthesized)
aggtcaagggaaacctacctcctaaaggaaagatcgagaagaaccatgcgccccaccacccacctgggctgctcagctgggcacagaagcagccaaggatattttcattcggatgctcac

SEQ ID NO: 23846 - DNA, 120 bp, Artificial Sequence
  ENSG00000033011_22 (sequence is synthesized)
atatgactgagttgccacatgaggatgatccgtggcgattttccaccttgaggcaaagcaggacaatgcgtgtaaagaggtttgcagccccgggaccgggttttcagctggtttttctac

SEQ ID NO: 23847 - DNA, 120 bp, Artificial Sequence
  ENSG00000033011_23 (sequence is synthesized)
cccaaagtccaatgcgtgcaggctgtcatcagcaccacagacagcaccagaacccatcataatgtcccagaaggttttattgctaaattagtgtcagagctccagggaacacattcagat

SEQ ID NO: 23848 - DNA, 120 bp, Artificial Sequence
  ENSG00000033011_24 (sequence is synthesized)
atagtcacactgagtcagagctcgagggaagagctgtaagctgggaaccagagaaccgatgacaaggcagcggcctcttctggcagcttccggaggagcccccacttaatgggacgtcat

SEQ ID NO: 23849 - DNA, 120 bp, Artificial Sequence
  ENSG00000033011_25 (sequence is synthesized)
ctctctcagccgttgatcctcggttctaaccgccccggggagtcgaggcggaagtgctcctttagtcgccgcctttgggcagctctccgagattagacgagcggttctgccccagccttt

SEQ ID NO: 23850 - DNA, 120 bp, Artificial Sequence
  ENSG00000033011_26 (sequence is synthesized)
tccagcacaaattggtactatattgcatattcatatgtgtgtgtgttgtgtgtatgggcgtttaaagacatgagtaggagcctatggtatgtgtctatttatggcacctatccatgctct

SEQ ID NO: 23851 - DNA, 120 bp, Artificial Sequence
  ENSG00000033011_27 (sequence is synthesized)
ggcacagtcattgctcactacagcctcgactcctgggctctagcaatcctcccacttcctgagtagctgggatgacaggtgcgtgccaccatgccagtaatttttttattttgtagagat

SEQ ID NO: 23852 - DNA, 83 bp, Artificial Sequence
  ENSG00000033011_28 (sequence is synthesized)
tagagatggggtcctgaacgcatggcctcaagtgatgctcctgcctcagcctcttttattatttgtttttagacgaagtttta

SEQ ID NO: 23853 - DNA, 120 bp, Artificial Sequence
  ENSG00000033011_29 (sequence is synthesized)
cgtgatctgctcacctcagcctcccaaagcctcagcctcttacagtgttgggattacaggcgtgagacactgtgacccgggacgattttcaatcacagttttttgttacgagtggaaaat

SEQ ID NO: 23854 - DNA, 120 bp, Artificial Sequence
  ENSG00000033011_30 (sequence is synthesized)
gcgtatttataagaatgaagtagtacagacatgaatgtgtagaaatctctataatcctgccatccaaggatggcacctgttaatgtgtatatcagggatgtccaatcttttggcctccct

SEQ ID NO: 23855 - DNA, 120 bp, Artificial Sequence
  ENSG00000033011_31 (sequence is synthesized)
gtgccacactggaagaagaagaatcgccttgggccacgcataaaatacactaacactagcaatacctgatgagctaaaagaaaaaaaatcacaaaaaaacctcgtactgtttgaagaaag

SEQ ID NO: 23856 - DNA, 120 bp, Artificial Sequence
  ENSG00000033011_32 (sequence is synthesized)
tttacagatttgcgttgggccgcaagttggacaagactgctatatgtatattctaggttttcccctataggtatacttatgtgaaaatgattattgtgataaattttgttttgagatgaa

SEQ ID NO: 23857 - DNA, 120 bp, Artificial Sequence
  ENSG00000033030_0 (sequence is synthesized)
atgccgtcctccgggcaatcgcaagcccgataggccccgctgcattccgggagttgtagtctctagcgactggccccgccccgtgtgcagctttcgcggcctgcgtctggagaaaaccct

SEQ ID NO: 23858 - DNA, 120 bp, Artificial Sequence
  ENSG00000033030_1 (sequence is synthesized)
agcgggtggctccgtgcggccagagctctagagagtggtgccgccttccaaccttcttccccaagccctggtggccggctccgcctcttctcgaatcttttccacagcccaaaatggccg

SEQ ID NO: 23859 - DNA, 120 bp, Artificial Sequence
  ENSG00000033030_2 (sequence is synthesized)
cagaggtgtattttggcgatctagagctcttcgagccgttcgaccacccagaggagtcgattccgaagcccgttcacactcgcttcaaggacgacgacggcgacgaggaggacgaaaatg

SEQ ID NO: 23860 - DNA, 120 bp, Artificial Sequence
  ENSG00000033030_3 (sequence is synthesized)
gggtcggcgacgcggagctacgggagcggcttcggcagtgcgaggagaccatcgagcagctccgcgccgagaatcaagaacttaaacgaaaattgaacattctgactcgaccgagtggaa

SEQ ID NO: 23861 - DNA, 120 bp, Artificial Sequence
  ENSG00000033030_4 (sequence is synthesized)
tattggtgaacgatactaagttagatggacctatattacagattctattcatgaacaatgctatttcaaagcaatatcatcaagaaatagaggaatttgtatcaaatttagtaaaaagat

SEQ ID NO: 23862 - DNA, 120 bp, Artificial Sequence
  ENSG00000033030_5 (sequence is synthesized)
ttgaggaacagcagaaaaatgatgtggaaaagacttcctttaatcttttgccccagccatccagtattgtgctagaggaggaccacaaagtggaagagtcctgtgccattaaaaacaaca

SEQ ID NO: 23863 - DNA, 120 bp, Artificial Sequence
  ENSG00000033030_6 (sequence is synthesized)
aggaagctttcagtgttgtaggaagtgtcctgtattttactaatttttgccttgataaattggggcaaccgcttctaaatgaaaaccctcagctttccgaaggatgggaaatacccaagt

SEQ ID NO: 23864 - DNA, 120 bp, Artificial Sequence
  ENSG00000033030_7 (sequence is synthesized)
accatcaagtcttcagccacattgtttctctagaagggcaagaaatacaagtaaaggcaaaaaggccaaagcctcactgtttcaattgtggttctgaagaacaccaaatgaaagattgcc

SEQ ID NO: 23865 - DNA, 120 bp, Artificial Sequence
  ENSG00000033030_8 (sequence is synthesized)
caatgcctcggaatgctgctcgaataagtgaaaagagaaaagagtatatggatgcctgtggagaagcaaacaatcagaatttccagcagcgataccacgcagaagaagtagaagaaagat

SEQ ID NO: 23866 - DNA, 120 bp, Artificial Sequence
  ENSG00000033030_9 (sequence is synthesized)
ttggaagattcaagccaggagttattagtgaggaacttcaagatgcactaggtgtgacagacaagagtcttccaccttttatctatcggatgcgccagctagggtacccaccagggtggc

SEQ ID NO: 23867 - DNA, 120 bp, Artificial Sequence
  ENSG00000033030_10 (sequence is synthesized)
tcaaagaggctgaattggagaattcggggcttgcactctatgatggaaaagatggcactgatggggaaacagaagttggagaaatacaacagaataaaagtgtcacttacgatctctcaa

SEQ ID NO: 23868 - DNA, 120 bp, Artificial Sequence
  ENSG00000033030_11 (sequence is synthesized)
aattggtcaactatcctggttttaatatatctactcccagaggaattccagacgaatggaggatctttggttccataccaatgcaggcatgtcagcagaaggatgtgtttgccaattacc

SEQ ID NO: 23869 - DNA, 120 bp, Artificial Sequence
  ENSG00000033030_12 (sequence is synthesized)
caaagaagcagaagaatgaaagcaactcagcgggatctcccgccgacatggagctcgattcagatatggaggtaccacatggttctcagagcagcgaaagttttcagtttcaaccaccat

SEQ ID NO: 23870 - DNA, 120 bp, Artificial Sequence
  ENSG00000033030_13 (sequence is synthesized)
tacctcctgacactcctccactcccccggggaactcctccacccgtcttcacccctccactcccaaagggcaccccgccgctgactcccagtgactcaccccagaccagaacagcatctg

SEQ ID NO: 23871 - DNA, 120 bp, Artificial Sequence
  ENSG00000033030_14 (sequence is synthesized)
gagctgtggatgaggacgcactgactctagaagaacttgaagaacagcagaggcggatctgggcagctcttgagcaggccgagagcgtaaacagcgactccgacgttcctgtggacacac

SEQ ID NO: 23872 - DNA, 120 bp, Artificial Sequence
  ENSG00000033030_15 (sequence is synthesized)
ctttaactggcaattccgttgcctcatcaccttgtccaaatgagctagacctccctgtcccggagggaaaaacatctgaaaagcagacgctggatgagcctgaggtaccagagattttta

SEQ ID NO: 23873 - DNA, 120 bp, Artificial Sequence
  ENSG00000033030_16 (sequence is synthesized)
caaagaaatcagaagctggacatgcctccagtccagactctgaggtgacatcactttgtcagaaggaaaaagcagagttggctccggtaaacactgaaggtgcccttcttgataatggca

SEQ ID NO: 23874 - DNA, 120 bp, Artificial Sequence
  ENSG00000033030_17 (sequence is synthesized)
gtgtcgtaccaaactgtgacatcagcaatgggggcagccagaagctctttcctgcagacaccagtccttcaacggccactaaaattcatagccctatacctgacatgagcaaatttgcaa

SEQ ID NO: 23875 - DNA, 120 bp, Artificial Sequence
  ENSG00000033030_18 (sequence is synthesized)
ctggaatcacgccatttgaatttgagaatatggcagaatctactggaatgtacctcaggataagaagcttgttaaagaactcaccccgaaaccagcagaaaaacaaaaaggcctctgaat

SEQ ID NO: 23876 - DNA, 120 bp, Artificial Sequence
  ENSG00000033030_19 (sequence is synthesized)
aatggcttgacttagcactgagagctatttaataactttgttccgttaattagtactaattaagtggatagatagaatggttttcctgtttgtccctcccatgtttaaaaatctatccaa

SEQ ID NO: 23877 - DNA, 120 bp, Artificial Sequence
  ENSG00000033030_20 (sequence is synthesized)
ggttcatgttccaaagtcaagcctattttaaagaaagactgagctcactagttcagtatattttattctcactgacaaaacttggggggagatgtgaatatgacctggtttagagagggt

SEQ ID NO: 23878 - DNA, 120 bp, Artificial Sequence
  ENSG00000033030_21 (sequence is synthesized)
ttgttaaggtttatactatttttggattgtgactatccgtcgagagtgatggtttttatctgtcttttgtacattgttttccctttctacattttgctaattatcctgtatataagttta

SEQ ID NO: 23879 - DNA, 120 bp, Artificial Sequence
  ENSG00000033030_22 (sequence is synthesized)
atatatcactttttaaaagaaaaaattctaccattttaaattcatgtttcaactcctacaaccaaatgagaaaaatcagggatgagcagctttatcccatttggggtatttttgtaagtg

SEQ ID NO: 23880 - DNA, 120 bp, Artificial Sequence
  ENSG00000033030_23 (sequence is synthesized)
atttacatgtgtcaattttagtaatacttttacttttttgtaacttcatccttcatatatgcttgctatacaggtatgttcatctttgtgtacagaggtttaataaattagttttcatat

SEQ ID NO: 23881 - DNA, 120 bp, Artificial Sequence
  ENSG00000033030_24 (sequence is synthesized)
gactgtgtctcaaaaaaaaaaaaaaaaagttgaaaggattctacagtggacatccatagatttattccaaattctaaagttgttaacagctcgttatactgcattctctttatcacatag

SEQ ID NO: 23882 - DNA, 120 bp, Artificial Sequence
  ENSG00000033030_25 (sequence is synthesized)
gttatactgcattctctttatcacatagtggttgttgaaaggtttgacaggaacactgatgcttcaataatggttttggttcagtttgttagtctgttgaacttcaggatcgtgtcttag

SEQ ID NO: 23883 - DNA, 120 bp, Artificial Sequence
  ENSG00000033030_26 (sequence is synthesized)
aatatatgttcgaaaggataaaaaccgtactttaattttgggtttcaaaagcctacccctgcaacaaaatagaagctcaataagtgtgtcatcctcaaaatatccgtgggtcttttgtct

SEQ ID NO: 23884 - DNA, 120 bp, Artificial Sequence
  ENSG00000033030_27 (sequence is synthesized)
ttataatattctgacaccaaaagtgagagaagtagtagttgaattttatgatttgcattgttaaatgagggcttatcttccttaacaaataataacatcaagaacttaaacgaaaattga

SEQ ID NO: 23885 - DNA, 120 bp, Artificial Sequence
  ENSG00000033030_28 (sequence is synthesized)
aaggaagttattatttctaataattccatccaaaaataaattgttaaaacagttaatcataatcttacattatttaatgtctttttttctgcttaaatagcaatattttttgacttgttt

SEQ ID NO: 23886 - DNA, 120 bp, Artificial Sequence
  ENSG00000033030_29 (sequence is synthesized)
tcagccacattgtttctctagaagggcaagaaatacaagtaaaggcaaaaaggtttgtgtggggagttgttttgttttacttatttacttttttaaccaaaatcataaacttttggcttg

SEQ ID NO: 23887 - DNA, 120 bp, Artificial Sequence
  ENSG00000033030_30 (sequence is synthesized)
taatccatacatatatgttaaatgtttaaatgaatcatctgcttcctggaattcattggttctcacctaatgtgcctgggtgggtggaaaggtataattgttgctgtcaatttgattgca

SEQ ID NO: 23888 - DNA, 120 bp, Artificial Sequence
  ENSG00000033030_31 (sequence is synthesized)
gtcttataaccatctgccttctttccatgttacctaacggaaatatgatcaatgtgttcaccttgattcttcgttgttaaccactgaaaaaactcaaaagaggtaacagatcagtcagga

SEQ ID NO: 23889 - DNA, 120 bp, Artificial Sequence
  ENSG00000033030_32 (sequence is synthesized)
acagaagggttcttggttaaaagactctgcatagtactatttaaatcactaaataaaggagattaaagtgtacttcttgttgcagatattagtgatctgtgatcaacttgctttcttgtc

SEQ ID NO: 23890 - DNA, 120 bp, Artificial Sequence
  ENSG00000033030_33 (sequence is synthesized)
tctctgatacactttgctgtcatatagaattttattgatttgcttttctatttttattgacattataaaaatctttgtcttttgaccaaataggccaaagcctcactgtttcaattgtgg

SEQ ID NO: 23891 - DNA, 120 bp, Artificial Sequence
  ENSG00000033030_34 (sequence is synthesized)
gaaccttttttggccaagtgattgtgtcaggtagtcttttagtattcagtcttaattattttgcaggcaagtttagttttccttcaacacattattttccttaatttccaataaaggaaa

SEQ ID NO: 23892 - DNA, 120 bp, Artificial Sequence
  ENSG00000033030_35 (sequence is synthesized)
agtaacataagaaggaaaaatgtaatttgagatctccactgtacctcctttgagcaaaatctcaaaacatgacattttccaaatacatgtgttttttttttccttctcttttcatcatta

SEQ ID NO: 23893 - DNA, 120 bp, Artificial Sequence
  ENSG00000033030_36 (sequence is synthesized)
attccaagtgctttctgtcacccgccggcggaccgagagtctagggttcggggcgcgcaggctgcctcggcgcagacctcttcccctcagggaggccgtctcctgaccagacccactcct

SEQ ID NO: 23894 - DNA, 120 bp, Artificial Sequence
  ENSG00000033030_37 (sequence is synthesized)
gcctcccacccgggtgccgtgtttagggttattttaggctgctcacctgacagattgtacacaagcccttaattgcccccctctgtttgaggtcgtggtgaggtttcatatttcgcagcc

SEQ ID NO: 23895 - DNA, 120 bp, Artificial Sequence
  ENSG00000033030_38 (sequence is synthesized)
acgctcaaattgtgccgtcatgttacagttgtaggtgatgaaataccggctgcttagacgcgggatcggtttttataccggggcaaacgctagtggtcccagaatgcagagttgggggcc

SEQ ID NO: 23896 - DNA, 120 bp, Artificial Sequence
  ENSG00000033030_39 (sequence is synthesized)
tcaaggaatccgggtgtgctgagataattggttaattgcttgattaaaattggggattaattttagagttcttccactcggagctcgcttctgtgctgaagatgctttgcaacgccttga

SEQ ID NO: 23897 - DNA, 120 bp, Artificial Sequence
  ENSG00000033030_40 (sequence is synthesized)
tatattggtgtttccttatgtacgtattaagaatctctgggaggaggatgtggaagacctgaatatatggactatctttgtgttgcagaaatagatggccaagagacagggcaatatcat

SEQ ID NO: 23898 - DNA, 88 bp, Artificial Sequence
  ENSG00000033030_41 (sequence is synthesized)
acgcccagctaacttccgggtcaggctggtcttgacctcctgacttcaggtgatctgcccgcccagcctcccaaagtgctgggattac

SEQ ID NO: 23899 - DNA, 120 bp, Artificial Sequence
  ENSG00000033030_42 (sequence is synthesized)
gggattacaggcgtaagccacctcacctggccggtgcatataacttttaagtttaaaagtaaattgttggccaggcgtggtggctcatgcttataatcctagcactttgggaggccaagg

SEQ ID NO: 23900 - DNA, 120 bp, Artificial Sequence
  ENSG00000033030_43 (sequence is synthesized)
tgtaaaaatcagtggtagcaaaacaaaaataatgataggaattgcaagtttgggtgttttcagtggatttcagccttaaatatagaaacagcagaatttttgaaaagtaattattttgaa

SEQ ID NO: 23901 - DNA, 120 bp, Artificial Sequence
  ENSG00000033030_44 (sequence is synthesized)
aaatgaatggcatgcagctagcctttgtataaaaataattttctagatttgaaccctaatagttaaaaattaaaaattaaacataaacatactgcttttaattgtcaggtatatatataa

SEQ ID NO: 23902 - DNA, 120 bp, Artificial Sequence
  ENSG00000033030_45 (sequence is synthesized)
gatagagctgaaactgtggtttaggtctttctgtggaatgccattacatctttatattagtcaagtccatgaaaataaatgtttagatcgtcttgaattgttagtctcaggcagtgttat

SEQ ID NO: 23903 - DNA, 120 bp, Artificial Sequence
  ENSG00000033030_46 (sequence is synthesized)
cctgctctcaggccaacagggggagcaaaatagaaacattccagatatagctttcatttttgagaacttgagtaatcagaatttactgttctgtaaagaataaaggaaaggaaaattata

SEQ ID NO: 23904 - DNA, 120 bp, Artificial Sequence
  ENSG00000033030_47 (sequence is synthesized)
aagagagaaatttctttttaaagccctcacagaatgtgctagaaatagaataaaatttaaaatacttttggcttcttttcctcagcttaagttcaaaataaaagcaatcctttacagttg

SEQ ID NO: 23905 - DNA, 120 bp, Artificial Sequence
  ENSG00000033030_48 (sequence is synthesized)
ttcagtaaataatttaaaacagtgtcctttaatttgaaatcttttcaaatttgtgttcatattttaagacattaaattttttcagtaaataatttaaaacagtactctttgtatttgaga

SEQ ID NO: 23906 - DNA, 120 bp, Artificial Sequence
  ENSG00000033030_49 (sequence is synthesized)
tgaataaacatgagaattaaattgtagagtttatcctaaaaacttgatttaatttatgataataggtaataaatagactgctcctttccttacgtatttttctaaaatattcaccctctt

SEQ ID NO: 23907 - DNA, 120 bp, Artificial Sequence
  ENSG00000033030_50 (sequence is synthesized)
atgtgtgctaactaaaaaatatcatgatgatgtttccttggtaaattttacaaggaaggaataaaatttcagtgagtttgtagattatctgatggttttctgggcttgctcaggtactgt

SEQ ID NO: 23908 - DNA, 120 bp, Artificial Sequence
  ENSG00000033030_51 (sequence is synthesized)
ctaggccagagtatcacctctccagccagtcctcataagctcttatctttgtcagtaataataacagacataaatcctaaatgccaggagacctgtaaaatgtaaaatacagaaaacctc

SEQ ID NO: 23909 - DNA, 120 bp, Artificial Sequence
  ENSG00000033030_52 (sequence is synthesized)
taatagtctagaacttctctcctagatacctaccctagaaagatattcacacatatgaaaaggaaattgtatgtatacaagaatctttttgtatcattgaatatgatagtgaaaaatcta

SEQ ID NO: 23910 - DNA, 120 bp, Artificial Sequence
  ENSG00000033030_53 (sequence is synthesized)
cgacaacattaaggccctaaaaaagaatggttaaataaattggtagttctgagctgtggactccctgcaacatacatgaagagtggaataaatctgtatgagctgacatggcaaaatctt

SEQ ID NO: 23911 - DNA, 120 bp, Artificial Sequence
  ENSG00000033030_54 (sequence is synthesized)
tgtgcagtattgagtttttaaaaagcaggtttcagccgggcacagtggctcatggctgtaatcccaggatttttggaggccgagatgggtggatcagttgcggtcaggagttcaagacca

SEQ ID NO: 23912 - DNA, 86 bp, Artificial Sequence
  ENSG00000033030_55 (sequence is synthesized)
agaccagcctgggcacgcctaccctggtgtggttgtgcgttcatgtagtaccagctatttaggaggctgaggtgggaggatcactt

SEQ ID NO: 23913 - DNA, 120 bp, Artificial Sequence
  ENSG00000033030_56 (sequence is synthesized)
aaaaaaaaaaaaaaagttctgtcctaatgatttagaaaaattataatgaaaattgaaagccatttcaaaactaattctgttgccatgattataagcactttccaggtgtacttttggtct

SEQ ID NO: 23914 - DNA, 120 bp, Artificial Sequence
  ENSG00000033030_57 (sequence is synthesized)
actgtactccagcctgggcaacagagaccctatctcaaaacaaacaaaaaagtgtatgtgtgtgtgttcggtgtatgtgtaaagagagagagaggcagacaaaaatgttaaactattaac

SEQ ID NO: 23915 - DNA, 120 bp, Artificial Sequence
  ENSG00000033030_58 (sequence is synthesized)
taaactattaacagttgtttaggtgaaggatacattgggtattcattgtaccacttttccaacttgtctgtatggaattttttcaaaaagaactggagggataagaaaagagtaaatggg

SEQ ID NO: 23916 - DNA, 120 bp, Artificial Sequence
  ENSG00000033030_59 (sequence is synthesized)
aagaaaggaaatggaaacaataactaaagggtctgcatgtcttgcaaagagaagcaatgaaatggggcattggagggaaatatgagagtcaaggttttcattttttgtttgaattctgta

SEQ ID NO: 23917 - DNA, 120 bp, Artificial Sequence
  ENSG00000033030_60 (sequence is synthesized)
tgcagatttttcttgatttgctagtatgtttttttttacgttcgtagagttttataggtagatagataactttggttcgggtagttttccttttaaaatttgtagagaactgaaagtggc

SEQ ID NO: 23918 - DNA, 76 bp, Artificial Sequence
  ENSG00000033030_61 (sequence is synthesized)
gtagttttccttttaaaatttgtagagaactgaaagtggctgatatgttagcttttttagggggacggggtcgggg

SEQ ID NO: 23919 - DNA, 120 bp, Artificial Sequence
  ENSG00000033030_62 (sequence is synthesized)
tagctgggattacaggcgcccgccacggcgcccagtcagtatatcagtttttaaggtttgtgaagcgcgatttattttttcagaatgtcgtcttcctccacattgtgaggaaaattttca

SEQ ID NO: 23920 - DNA, 83 bp, Artificial Sequence
  ENSG00000033030_63 (sequence is synthesized)
tttgtgaagcgcgatttattttttcagaatgtcgtcttcctccacattgtgaggaaaattttcagaatacaaaaagttgaggc

SEQ ID NO: 23921 - DNA, 60 bp, Artificial Sequence
  ENSG00000033030_64 (sequence is synthesized)
gaggcgggtggatcatgaggtcaggaggatcatgaggatcaggtggatcatgaggatcag

SEQ ID NO: 23922 - DNA, 120 bp, Artificial Sequence
  ENSG00000033050_0 (sequence is synthesized)
aaggagcagctctgttgcgacataggccgagcagcgaggcccagctccctgaaacaacagtaacctacccctgtgggtcatcatcatgccctccgacctggccaagaagaaggcagccaa

SEQ ID NO: 23923 - DNA, 120 bp, Artificial Sequence
  ENSG00000033050_1 (sequence is synthesized)
aaagaaggaggctgccaaagctcgacagcggcccagaaaaggacatgaagaaaatggagatgttgtcacagaaccacaggtggcagagaagaatgaggccaatggcagagagaccacaga

SEQ ID NO: 23924 - DNA, 120 bp, Artificial Sequence
  ENSG00000033050_2 (sequence is synthesized)
agtagatttgctgaccaaggagctagaggactttgagatgaagaaagctgctgctcgagctgtcactggcgtcctggcctctcaccccaacagtactgatgttcacatcatcaacctctc

SEQ ID NO: 23925 - DNA, 120 bp, Artificial Sequence
  ENSG00000033050_3 (sequence is synthesized)
acttacctttcatggtcaagagctgctcagtgacaccaaactggaattaaactcaggccgtcgttatggcctcattggtttaaatggaattggaaagtccatgctgctctctgctattgg

SEQ ID NO: 23926 - DNA, 120 bp, Artificial Sequence
  ENSG00000033050_4 (sequence is synthesized)
gaagcgtgaagtgcccatccctgagcacatcgacatctaccatctgactcgagagatgccccctagtgacaagacacccttgcattgtgtgatggaagtcgacacagagcgggccatgct

SEQ ID NO: 23927 - DNA, 120 bp, Artificial Sequence
  ENSG00000033050_5 (sequence is synthesized)
ggagaaagaggcagagcggctggctcatgaggatgcggagtgtgagaagctcatggagctctacgagcgcctggaggagctggatgccgacaaggcagagatgagggcctcgcggatctt

SEQ ID NO: 23928 - DNA, 120 bp, Artificial Sequence
  ENSG00000033050_6 (sequence is synthesized)
gcatggactgggtttcacacctgccatgcagcgcaagaagctaaaagacttcagtgggggctggaggatgagggttgcccttgccagagccctctttattcggcccttcatgctgctcct

SEQ ID NO: 23929 - DNA, 120 bp, Artificial Sequence
  ENSG00000033050_7 (sequence is synthesized)
ggatgagcctaccaaccacctggacctagatgcttgcgtgtggttggaagaagaactaaaaacttttaagcgcatcttggtcctcgtctcccattcccaggattttctgaatggtgtctg

SEQ ID NO: 23930 - DNA, 120 bp, Artificial Sequence
  ENSG00000033050_8 (sequence is synthesized)
taccaatatcattcacatgcacaacaagaaactgaagtattatacgggtaattatgatcagtacgtgaagacgcggctagagctggaggagaaccagatgaagaggtttcactgggagca

SEQ ID NO: 23931 - DNA, 120 bp, Artificial Sequence
  ENSG00000033050_9 (sequence is synthesized)
agatcagattgcacacatgaagaactacattgcgaggtttggtcatggcagtgccaagctggcccggcaggcccagagcaaggagaagacgctacagaaaatgatggcatcaggactgac

SEQ ID NO: 23932 - DNA, 120 bp, Artificial Sequence
  ENSG00000033050_10 (sequence is synthesized)
agagagggtcgtgagcgataagacactgtcattttatttcccaccatgtggcaagatccctccacctgtcattatggtgcaaaatgtgagcttcaagtatacaaaagatgggccttgcat

SEQ ID NO: 23933 - DNA, 120 bp, Artificial Sequence
  ENSG00000033050_11 (sequence is synthesized)
ctacaataatctagaatttggaattgaccttgacacacgagtggctctggtagggcccaatggagcagggaagtcaactcttctgaagctgctaactggagagctactacccacagatgg

SEQ ID NO: 23934 - DNA, 120 bp, Artificial Sequence
  ENSG00000033050_12 (sequence is synthesized)
catgatccgaaaacactctcatgtcaagatagggcgttaccatcagcatttacaagagcagctggacttagatctctcacctttggagtacatgatgaagtgctacccagagatcaagga

SEQ ID NO: 23935 - DNA, 120 bp, Artificial Sequence
  ENSG00000033050_13 (sequence is synthesized)
gaaggaagaaatgaggaagatcattgggcgatacggtctcactgggaaacaacaggtgagcccaatccggaacttgtcagacgggcagaagtgccgagtgtgtctggcctggctggcctg

SEQ ID NO: 23936 - DNA, 120 bp, Artificial Sequence
  ENSG00000033050_14 (sequence is synthesized)
gcagaacccccacatgctcttcctggatgaacccaccaatcacctggatatcgagaccatcgacgccctggcagatgccatcaatgagtttgagggtggtatgatgctggtcagccatga

SEQ ID NO: 23937 - DNA, 120 bp, Artificial Sequence
  ENSG00000033050_15 (sequence is synthesized)
cttcagactcattcagcaggttgcacaggaaatttgggtctgtgagaagcagacaatcaccaagtggcctggagacatcctggcttacaaggagcacctcaagtccaagctggtggatga

SEQ ID NO: 23938 - DNA, 120 bp, Artificial Sequence
  ENSG00000033050_16 (sequence is synthesized)
ggagccccagctcaccaagaggacccacaacgtgtgagccctctacctgggttcgggtcaggagctccatctgggaactaacagctgctaacctgaccagccgctcaggacaggaccctg

SEQ ID NO: 23939 - DNA, 120 bp, Artificial Sequence
  ENSG00000033050_17 (sequence is synthesized)
gggctacactcctgcattgctgcaatactgctcccccagcctctcccctgcccctcaacctgccttagctgcactctcttacctacagctggacagtacctgtctgtttcctgtcctcct

SEQ ID NO: 23940 - DNA, 120 bp, Artificial Sequence
  ENSG00000033050_18 (sequence is synthesized)
gaggcacctgcgggttagcccaggggcccaagccctggatttggcctgcggaggagcttaggatcctcgttttctgggttttggtgatgttggaggagtaccccccagcccaccgccccg

SEQ ID NO: 23941 - DNA, 120 bp, Artificial Sequence
  ENSG00000033050_19 (sequence is synthesized)
attcctttttgcttctggtttggagctccggaccaggaccttcgtcctggtcagtttttaaataattatttagcagtgtaacttttagacctgcgtgacatctacaaagcgcccaataaa

SEQ ID NO: 23942 - DNA, 120 bp, Artificial Sequence
  ENSG00000033050_20 (sequence is synthesized)
gaaagaggaagccacggtccctaccttccttctcgggtctctggggccttctcctccctgcagtgccaacatgcactgcccacagcaggagctggatccagcgtcagtgtgtcgatggga

SEQ ID NO: 23943 - DNA, 120 bp, Artificial Sequence
  ENSG00000033050_21 (sequence is synthesized)
actgaagactagtccataggagctggaagaactttgtccctttacttctgatttgaaattgtaccttttctcaggcctgtgattcacagactttaacatgaatcagaatcacctggaggg

SEQ ID NO: 23944 - DNA, 120 bp, Artificial Sequence
  ENSG00000033050_22 (sequence is synthesized)
ctcatgcaatcagattgccagatctcgcctcagcgtttctggttcaataggttttgggggagaccaagaacgttaacatttctagcaagtttccaggtgatgctgttgttgctggtctag

SEQ ID NO: 23945 - DNA, 120 bp, Artificial Sequence
  ENSG00000033050_23 (sequence is synthesized)
agactattttgagaaccactgtccaggagcgtggttttctgattgtgatctgaggttctgccccaactgcacagcagttgggctgcttgttaaaaatgcaggccaggtgcggtggctcac

SEQ ID NO: 23946 - DNA, 86 bp, Artificial Sequence
  ENSG00000033050_24 (sequence is synthesized)
aaacatggcaaaacccgtctttatgtgcctggaatcccacctgctcaggtggctagggtggatggatcgcttgagcccaggaggtg

SEQ ID NO: 23947 - DNA, 64 bp, Artificial Sequence
  ENSG00000033050_25 (sequence is synthesized)
atgacagagcaaaaccctgtctcaaaaaaatgcagactggccaggcacagtggctcacacctgt

SEQ ID NO: 23948 - DNA, 120 bp, Artificial Sequence
  ENSG00000033050_26 (sequence is synthesized)
ccaggcacagtggctcacacctgtaatccgactgtaagctcatcaccttgggaggccactgtaggaggatcaattgagcctagaagttcaagaccagcctgggcaaagtagggagacccc

SEQ ID NO: 23949 - DNA, 120 bp, Artificial Sequence
  ENSG00000033050_27 (sequence is synthesized)
aaagtagggagaccccttctctacaaatagtaataaaatgaaccgggcatagtagcatgtgcctgcggtcccagctgctctgataagaggaggctcacttgagcccaggaggttgaggct

SEQ ID NO: 23950 - DNA, 120 bp, Artificial Sequence
  ENSG00000033050_28 (sequence is synthesized)
gcgtgccgctacactccagcctgatgacagaccgagacactgtctcaaaaaaataaaaaaattcagattgctgagcatcagacctattgattaatcgcatttggtagaatgagagaggtg

SEQ ID NO: 23951 - DNA, 120 bp, Artificial Sequence
  ENSG00000033050_29 (sequence is synthesized)
cagagatggccaggagtttgcattttcacaccaacgtctgtgaacctctcttcctattgggatacaggaaattttgtatttttacctgtccacagccatagttatcatcactgttgaatt

SEQ ID NO: 23952 - DNA, 120 bp, Artificial Sequence
  ENSG00000033050_30 (sequence is synthesized)
cacttccagcccagggctctgcataccttatctgggtcttttgaacttcaatagcatttcaccagtggccatccttcctggtgtggattcatcactctgcctctgaaatcagccatccct

SEQ ID NO: 23953 - DNA, 120 bp, Artificial Sequence
  ENSG00000033050_31 (sequence is synthesized)
atgggaagacacagccatgatttttcagtactcataatacagccaggactggcgggagcaactgtcccagatggtgcttaaaccccttaggagctcatgatcttcttggaaagccagtaa

SEQ ID NO: 23954 - DNA, 120 bp, Artificial Sequence
  ENSG00000033050_32 (sequence is synthesized)
gacagaaccatacaggacacaaattagatgctaaattgtgatttagataggagacagaagtattcaaaaaggagggaaatttcttgtgagtagctgcccagaaaggtggaattggtgtgc

SEQ ID NO: 23955 - DNA, 120 bp, Artificial Sequence
  ENSG00000033050_33 (sequence is synthesized)
tctcacttgaaaaatgagtaggatcttctcagatggccacaaagtccaggagctgccctgggcaacagggacaggagcctcccgtgagacactgcagctgagacagatgggagtcctctg

SEQ ID NO: 23956 - DNA, 120 bp, Artificial Sequence
  ENSG00000033050_34 (sequence is synthesized)
accccagagggtactggcttgactgctttatgccttaagtggggcctggagcaaaatggcccaggttagtctgtcctgagagtccagagccttggttcaggggagaatggcatctggaga

SEQ ID NO: 23957 - DNA, 120 bp, Artificial Sequence
  ENSG00000033050_35 (sequence is synthesized)
gtgggctgctgggataatggggacagtgagggacagagcccttgatacttaaggaagtgctggatattgctaagaattcaggtagtctcgggatctccagagtctccatactaggacagg

SEQ ID NO: 23958 - DNA, 120 bp, Artificial Sequence
  ENSG00000033050_36 (sequence is synthesized)
agatcttcagaacctggaggaatggaaatagtctagtcagcttatttgtcaagaaaaatgtcaaccttggtaatttaaataatgctttaaaagtccacaaaatacatatttctaaaatta

SEQ ID NO: 23959 - DNA, 120 bp, Artificial Sequence
  ENSG00000033050_37 (sequence is synthesized)
gggtgtatttgtgtacatacacacttctggttactatcactgttactaccgtctccatcccattctgttgaaaattagaacagaagattgaggaaactcaggctgtctcgccacactgaa

SEQ ID NO: 23960 - DNA, 120 bp, Artificial Sequence
  ENSG00000033050_38 (sequence is synthesized)
aggcgtccaaatacccttacagttagattgtcgagtcgtggcttaggtgcttgctaacagccaggaattggacaacacatctaaaagttttaagcgcatcttggtcctcgtctcccattc

SEQ ID NO: 23961 - DNA, 120 bp, Artificial Sequence
  ENSG00000033050_39 (sequence is synthesized)
gcgggggcaggccagggcatcagaggcttgatgttgatacgaagattcctgagagggatggagcagggcccaggcattcttactagtaagtttagggtttgggggtatctgtttgccttc

SEQ ID NO: 23962 - DNA, 120 bp, Artificial Sequence
  ENSG00000033050_40 (sequence is synthesized)
gacgagtgcgtcccggcaagaggctgggctcgacggccgggtgatgtggagagggacgatcgagaagaggcccgagacggacgggaggaggaagcccggaaagtgaggcggctagctgag

SEQ ID NO: 23963 - DNA, 120 bp, Artificial Sequence
  ENSG00000033050_41 (sequence is synthesized)
ccaagttgtagggaaaccggagacggagacctccgctgaggggcagaacctggtccccagccggaggccctgaaagaaggagcgtttccaaagctccctgaaacaacagtaacctacccc

SEQ ID NO: 23964 - DNA, 120 bp, Artificial Sequence
  ENSG00000033050_42 (sequence is synthesized)
gagaagctgacgggcggggtgggggaggacccgggggtgacgagcgtggagactcggaggggactcacgcgggcgaggacgagtgcgtcccggcaagaggctgggctcgacggccgggtg

SEQ ID NO: 23965 - DNA, 120 bp, Artificial Sequence
  ENSG00000033100_0 (sequence is synthesized)
aggggctgtgaggtggcagcggctgcagcggcggagccggcgcctcagcgggcactggggtctgttcccccttccccgtccctgctccctgccaggcgcgtgcgggacgccgctcttggt

SEQ ID NO: 23966 - DNA, 120 bp, Artificial Sequence
  ENSG00000033100_1 (sequence is synthesized)
ccctcccgggacgccgggagaccccggccgtcctttatccggtgtccgccggcccccggccctgaaacccgggcctcctccccgagggccttgggcgtccctcctggtcctgcgctcgcg

SEQ ID NO: 23967 - DNA, 120 bp, Artificial Sequence
  ENSG00000033100_2 (sequence is synthesized)
ctcctggtcctgcgctcgcggcctcgatgctgtctctggcgcggcctccgctcccgccgactggcctgagaacgaggtctgtgccccagtctcccagccgcgacctccgaccccgcctcg

SEQ ID NO: 23968 - DNA, 120 bp, Artificial Sequence
  ENSG00000033100_3 (sequence is synthesized)
cagaacgacccgagctggtctcccgagcccccttctcagcagcccggtgacgtggccagtttatttctgttttgagacgaacggcgaagactcgcgtcgggtcttcgttctagggctaga

SEQ ID NO: 23969 - DNA, 120 bp, Artificial Sequence
  ENSG00000033100_4 (sequence is synthesized)
cttggtctctgatcgccgagaggtagcgcaggggctgtgggcccccggcaggggtcctgtcggaagctggccgcgcttctgtttgcgttcccaggaccctggcattgtctctagttgctg

SEQ ID NO: 23970 - DNA, 120 bp, Artificial Sequence
  ENSG00000033100_5 (sequence is synthesized)
cttgtgctctctctttgcttttggtttgcttcatttggcccctggggccctggtaaaaccaggcaccgaatcgctcgcacacagagttccagtccccgcctgctgtctcctcagcagctg

SEQ ID NO: 23971 - DNA, 120 bp, Artificial Sequence
  ENSG00000033100_6 (sequence is synthesized)
gggttccgaggagaatgccctgcaagatggctccatcggccatggcgctcctgagaggctgtcagtgctgagtcaccgatctacctcattcgggtgggcagaacttatgtgtgccatgcg

SEQ ID NO: 23972 - DNA, 120 bp, Artificial Sequence
  ENSG00000033100_7 (sequence is synthesized)
agtggctccagaccgctcctgagtgggaggaggggttcctgtagccgttgcgtcttctcaaacacggggagcagagtagaaagaggctctggccccttcccttgtgcccaccgggcctgc

SEQ ID NO: 23973 - DNA, 120 bp, Artificial Sequence
  ENSG00000033100_8 (sequence is synthesized)
cgcagtggctcagcagccccttcagtagcccgcctgaggaccgatgccagaggcaggcattcttccggaaaggcccactgaggcaggctccggctcctctggttggggctgttgttttga

SEQ ID NO: 23974 - DNA, 120 bp, Artificial Sequence
  ENSG00000033100_9 (sequence is synthesized)
tggatcgtgtgcttttcccttacctcttatcacttgctgtcatctgttgacttaggcccagtctgcagatgtgtgtagtgttcctttttgggttagctttggcagtattgagttttactt

SEQ ID NO: 23975 - DNA, 120 bp, Artificial Sequence
  ENSG00000033100_10 (sequence is synthesized)
cctcctctttttagtggaagacagaccataatcccagtgtgagtgaaattgattgtttcatttattaccgttttggctgggggttagttccgacaccttcacagttgaagagcaggcaga

SEQ ID NO: 23976 - DNA, 120 bp, Artificial Sequence
  ENSG00000033100_11 (sequence is synthesized)
aggagttgtgaagacaggacaatcttcttggggatgctggtcctggaagccagcgggcctcgctctgtctttggcctcattgaccccaggttctctggttaaaactgaaagcctactact

SEQ ID NO: 23977 - DNA, 120 bp, Artificial Sequence
  ENSG00000033100_12 (sequence is synthesized)
ggcctggtgcccatcaatccattgatccttgaggctgtgcccctggggcacccacctggcagggcctaccaccatgcgactgagctccctgttggctctgctgcggccagcgcttcccct

SEQ ID NO: 23978 - DNA, 120 bp, Artificial Sequence
  ENSG00000033100_13 (sequence is synthesized)
catcttagggctgtctctggggtgcagcctgagcctcctgcgggtttcctggatccagggggagggagaagatccctgtgtcgaggctgtaggggagcgaggagggccacagaatccaga

SEQ ID NO: 23979 - DNA, 120 bp, Artificial Sequence
  ENSG00000033100_14 (sequence is synthesized)
ttccagagctcggctagaccaaagtgatgaagacttcaaaccccggattgtcccctactacagggaccccaacaagccctacaagaaggtgctcaggactcggtacatccagacagagct

SEQ ID NO: 23980 - DNA, 120 bp, Artificial Sequence
  ENSG00000033100_15 (sequence is synthesized)
gggctcccgtgagcggttgctggtggctgtcctgacctcccgagctacactgtccactttggccgtggctgtgaaccgtacggtggcccatcacttccctcggttactctacttcactgg

SEQ ID NO: 23981 - DNA, 120 bp, Artificial Sequence
  ENSG00000033100_16 (sequence is synthesized)
tccagcagggatgcaggtggtgtctcatggggatgagcggcccgcctggctcatgtcagagaccctgcgccaccttcacacacactttggggccgactacgactggttcttcatcatgca

SEQ ID NO: 23982 - DNA, 120 bp, Artificial Sequence
  ENSG00000033100_17 (sequence is synthesized)
ggatgacacatatgtgcaggccccccgcctggcagcccttgctggccacctcagcatcaaccaagacctgtacttaggccgggcagaggagttcattggcgcaggcgagcaggcccggta

SEQ ID NO: 23983 - DNA, 120 bp, Artificial Sequence
  ENSG00000033100_18 (sequence is synthesized)
ctgtcatgggggctttggctacctgttgtcacggagtctcctgcttcgtctgcggccacatctggatggctgccgaggagacattctcagtgcccgtcctgacgagtggcttggacgctg

SEQ ID NO: 23984 - DNA, 120 bp, Artificial Sequence
  ENSG00000033100_19 (sequence is synthesized)
cctcattgactctctgggcgtcggctgtgtctcacagcaccaggggcagcagtatcgctcatttgaactggccaaaaatagggaccctgagaaggaagggagctcggctttcctgagtgc

SEQ ID NO: 23985 - DNA, 120 bp, Artificial Sequence
  ENSG00000033100_20 (sequence is synthesized)
cttcgccgtgcaccctgtctccgaaggtaccctcatgtaccggctccacaaacgcttcagcgctctggagttggagcgggcttacagtgaaatagaacaactgcaggctcagatccggaa

SEQ ID NO: 23986 - DNA, 120 bp, Artificial Sequence
  ENSG00000033100_21 (sequence is synthesized)
cctgaccgtgctgacccccgaaggggaggcagggctgagctggcccgttgggctccctgctcctttcacaccacactctcgctttgaggtgctgggctgggactacttcacagagcagca

SEQ ID NO: 23987 - DNA, 120 bp, Artificial Sequence
  ENSG00000033100_22 (sequence is synthesized)
caccttctcctgtgcagatggggctcccaagtgcccactacagggggctagcagggcggacgtgggtgatgcgttggagactgccctggagcagctcaatcggcgctatcagccccgcct

SEQ ID NO: 23988 - DNA, 120 bp, Artificial Sequence
  ENSG00000033100_23 (sequence is synthesized)
gcgcttccagaagcagcgactgctcaacggctatcggcgcttcgacccagcacggggcatggagtacaccctggacctgctgttggaatgtgtgacacagcgtgggcaccggcgggccct

SEQ ID NO: 23989 - DNA, 120 bp, Artificial Sequence
  ENSG00000033100_24 (sequence is synthesized)
ggctcgcagggtcagcctgctgcggccactgagccgggtggaaatcctacctatgccctatgtcactgaggccacccgagtgcagctggtgctgccactcctggtggctgaagctgctgc

SEQ ID NO: 23990 - DNA, 120 bp, Artificial Sequence
  ENSG00000033100_25 (sequence is synthesized)
agccccggctttcctcgaggcctttgcagccaatgtcctggagccacgagaacatgcattgctcaccctgttgctggtctacgggccacgagaaggtggccgtggagctccagacccatt

SEQ ID NO: 23991 - DNA, 120 bp, Artificial Sequence
  ENSG00000033100_26 (sequence is synthesized)
tcttggggtgaaggctgcagcagcggagttagagcgacggtaccctgggacgaggctggcctggctcgctgtgcgagcagaggccccttcccaggtgcgactcatggacgtggtctcgaa

SEQ ID NO: 23992 - DNA, 120 bp, Artificial Sequence
  ENSG00000033100_27 (sequence is synthesized)
gaagcaccctgtggacactctcttcttccttaccaccgtgtggacaaggcctgggcccgaagtcctcaaccgctgtcgcatgaatgccatctctggctggcaggccttctttccagtcca

SEQ ID NO: 23993 - DNA, 120 bp, Artificial Sequence
  ENSG00000033100_28 (sequence is synthesized)
tttccaggagttcaatcctgccctgtcaccacagagatcacccccagggcccccgggggctggccctgaccccccctcccctcctggtgctgacccctcccggggggctcctataggggg

SEQ ID NO: 23994 - DNA, 120 bp, Artificial Sequence
  ENSG00000033100_29 (sequence is synthesized)
gagatttgaccggcaggcttctgcggagggctgcttctacaacgctgactacctggcggcccgagcccggctggcaggtgaactggcaggccaggaagaggaggaagccctggaggggct

SEQ ID NO: 23995 - DNA, 120 bp, Artificial Sequence
  ENSG00000033100_30 (sequence is synthesized)
ggaggtgatggatgttttcctccggttctcagggctccacctctttcgggccgtagagccagggctggtgcagaagttctccctgcgagactgcagcccacggctcagtgaagaactcta

SEQ ID NO: 23996 - DNA, 120 bp, Artificial Sequence
  ENSG00000033100_31 (sequence is synthesized)
ccaccgctgccgcctcagcaacctggaggggctagggggccgtgcccagctggctatggctctctttgagcaggagcaggccaatagcacttagcccgcctgggggccctaacctcatta

SEQ ID NO: 23997 - DNA, 120 bp, Artificial Sequence
  ENSG00000033100_32 (sequence is synthesized)
cctttcctttgtctgcctcagccccaggaagggcaaggcaagatggtggacagatagagaattgttgctgtattttttaaatatgaaaatgttattaaacatgtcttctgccaaactgtt

SEQ ID NO: 23998 - DNA, 120 bp, Artificial Sequence
  ENSG00000033100_33 (sequence is synthesized)
atgaaaacaaaggtgtgattatgaagaggatgtgagtcctttgggtgtaggagagaaaggctgttgagcttctatttcaagatacttttacctgtgcaaaaagcacattttccacctcct

SEQ ID NO: 23999 - DNA, 120 bp, Artificial Sequence
  ENSG00000033122_0 (sequence is synthesized)
gcttcccgcgggaacctctccagccgtccacctgaagggcactggcatcatggtctaacgtggcaccttcctggattcccctctatctcctgttcttcctaccttctactccttccctcc

SEQ ID NO: 24000 - DNA, 120 bp, Artificial Sequence
  ENSG00000033122_1 (sequence is synthesized)
tcttctcctccgaagaccctggcgcccactccactgcggacccctgaacacttaaggaataacccttggcagctgcacgactacgctctccgaaacctcatgggcagtttctcccgccgg

SEQ ID NO: 24001 - DNA, 120 bp, Artificial Sequence
  ENSG00000033122_2 (sequence is synthesized)
cgatgatggagaacctaataaggggaaggaatcccccgcaataccagagaagtccttgtaaagaggttcgtgcagcacttcggaagaggcctgaagaggagtgagcccgctacatgaaaa

SEQ ID NO: 24002 - DNA, 120 bp, Artificial Sequence
  ENSG00000033122_3 (sequence is synthesized)
aaaatgcaagtcaaagtggtcacaacctagaagtctgcagagacaggaataactagcaatgcagtgcctggagatgaccaccaaacggaaaatcatcggccgtctggtgccatgccgatg

SEQ ID NO: 24003 - DNA, 120 bp, Artificial Sequence
  ENSG00000033122_4 (sequence is synthesized)
tttccgaggtgaagaagaaatcatctcagttttagattactcccactgcagtcttcagcaggtgccaaaggaggtctttaacttcgaacgaacattagaggagctttatctagatgccaa

SEQ ID NO: 24004 - DNA, 120 bp, Artificial Sequence
  ENSG00000033122_5 (sequence is synthesized)
tcaaattgaagaactacccaagcaattgttcaactgtcaagctctacgaaaactaagtattcctgataacgacctttcaaatctgccaaccactattgctagtttagttaatcttaaaga

SEQ ID NO: 24005 - DNA, 120 bp, Artificial Sequence
  ENSG00000033122_6 (sequence is synthesized)
actcgacatcagtaaaaatggtgtacaagaatttccagaaaacataaagtgctgtaagtgtttaacaattattgaagccagtgtcaatcccatttctaaactacctgatggcttcacaca

SEQ ID NO: 24006 - DNA, 120 bp, Artificial Sequence
  ENSG00000033122_7 (sequence is synthesized)
gctcctaaacctgacccagctctacctgaatgacgcctttcttgaatttcttccagccaattttggaagacttgtcaaattgcggatcttggagttaagagaaaatcacttgaaaactct

SEQ ID NO: 24007 - DNA, 120 bp, Artificial Sequence
  ENSG00000033122_8 (sequence is synthesized)
accaaagtcaatgcacaaactggcccagttggaaagacttgacctaggcaataatgaattcggtgagctgcctgaagttctggatcaaatacaaaatttgagggagttatggatggataa

SEQ ID NO: 24008 - DNA, 120 bp, Artificial Sequence
  ENSG00000033122_9 (sequence is synthesized)
taatgcattacaagtgttacctgggtctatagggaagttaaagatgttggtatacctggatatgtcaaaaaacagaatagaaacagttgacatggacatttctggatgtgaagcccttga

SEQ ID NO: 24009 - DNA, 120 bp, Artificial Sequence
  ENSG00000033122_10 (sequence is synthesized)
ggacctcttattgtcatccaatatgttgcaacaattgcctgattctataggacttttgaaaaaactaacaactctaaaagtagatgacaatcaacttacaatgctacccaatacaattgg

SEQ ID NO: 24010 - DNA, 120 bp, Artificial Sequence
  ENSG00000033122_11 (sequence is synthesized)
aaatttatctttattagaagaatttgactgtagctgtaatgaactggagtcactaccttctactattggctaccttcatagtcttcggacattagcagttgatgagaatttccttccaga

SEQ ID NO: 24011 - DNA, 120 bp, Artificial Sequence
  ENSG00000033122_12 (sequence is synthesized)
attacccagagaaattggaagttgtaagaatgtaacagtcatgtctctacgctccaacaaattagaatttcttcctgaagagattggacagatgcagaaactaagagtcctaaatttgag

SEQ ID NO: 24012 - DNA, 120 bp, Artificial Sequence
  ENSG00000033122_13 (sequence is synthesized)
tgacaacagattgaagaatttaccattctcatttaccaaacttaaagagcttgcagctttgtggctttctgacaatcagtccaaagcccttatccctttacaaacagaagcccatccaga

SEQ ID NO: 24013 - DNA, 120 bp, Artificial Sequence
  ENSG00000033122_14 (sequence is synthesized)
aacaaagcaaagagtattgactaactacatgtttccccagcagcctcgtggtgatgaagatttccagtcagacagtgacagctttaaccctacactgtgggaagagcagagacaacaacg

SEQ ID NO: 24014 - DNA, 120 bp, Artificial Sequence
  ENSG00000033122_15 (sequence is synthesized)
catgactgttgcctttgaatttgaagacaaaaaagaagatgacgaaaatgctgggaaagttaaggatctctcctgccaagccccctgggaaaggggccagcgtgggattactctccaacc

SEQ ID NO: 24015 - DNA, 120 bp, Artificial Sequence
  ENSG00000033122_16 (sequence is synthesized)
tgccagactgtctggcgattgctgcacaccatgggccaggtgtgatcagcagatccaagatatgcccgtcccccagaatgacccacagctggcatggggttgtataagtggcctccagca

SEQ ID NO: 24016 - DNA, 120 bp, Artificial Sequence
  ENSG00000033122_17 (sequence is synthesized)
ggaaaggagcatgtgtactccattgccagttgcagcacaatccaccactcttccctctctaagtggcagacaggttgaaataaacctaaaacgatatccaactccttacccagaggattt

SEQ ID NO: 24017 - DNA, 120 bp, Artificial Sequence
  ENSG00000033122_18 (sequence is synthesized)
aaagaatatggtaaaatctgttcaaaatttggtgggtaagccaagccatggagtgcgtgttgagaattcaaatccaactgctaacacggagcaaactgtgaaagaaaaatatgaacacaa

SEQ ID NO: 24018 - DNA, 120 bp, Artificial Sequence
  ENSG00000033122_19 (sequence is synthesized)
gtggccggtagccccaaaggagattacagtggaggattcttttgttcatccagctaatgaaatgaggattggggaacttcacccttcattagctgagacccctctgtacccacccaaact

SEQ ID NO: 24019 - DNA, 120 bp, Artificial Sequence
  ENSG00000033122_20 (sequence is synthesized)
tgttctgctagggaaggacaaaaaagaatcaactgatgagtctgaagttgacaaaactcactgtctgaataacagtgtttcctcaggcacttactcagactactcgccttcccaggcttc

SEQ ID NO: 24020 - DNA, 120 bp, Artificial Sequence
  ENSG00000033122_21 (sequence is synthesized)
ctcaggatcctctaatacccgggttaaagtggggtccttgcagacaacagctaaagatgcagtacataattctttgtggggtaacaggattgcaccatctttcccacagcctcttgattc

SEQ ID NO: 24021 - DNA, 120 bp, Artificial Sequence
  ENSG00000033122_22 (sequence is synthesized)
aaagccattactcagccagcgggaggctgttcccccaggcaatataccacagcgtcctgaccggctgcccatgagtgatactttcactgacaactggactgatggctcgcattatgacaa

SEQ ID NO: 24022 - DNA, 120 bp, Artificial Sequence
  ENSG00000033122_23 (sequence is synthesized)
cacagggtttgttgctgaggaaaccacagccgagaatgccaacagtaatcctctcttaagttcgaaatctagaagcacatcttcgcatggacgcaggcctttgatcaggcaagacaggat

SEQ ID NO: 24023 - DNA, 120 bp, Artificial Sequence
  ENSG00000033122_24 (sequence is synthesized)
tgttggtgttcccctggaactcgagcagtctacacacagacacacaccagaaacagaagtgcctccttccaatccttggcagaattggaccagaacccctagtccgtttgaagacaggac

SEQ ID NO: 24024 - DNA, 120 bp, Artificial Sequence
  ENSG00000033122_25 (sequence is synthesized)
cgcttttccttccaaattagagacaacccccactaccagcccattgcctgaaaggaaagaacatataaaggaatctactgaaatacctagtcctttttctccaggcgtaccatgggagta

SEQ ID NO: 24025 - DNA, 120 bp, Artificial Sequence
  ENSG00000033122_26 (sequence is synthesized)
tcatgattccaatcccaacaggagtcttagtaatgtcttttctcaaatccactgccgcccggaatcttctaaaggtgttatttcaattagcaaaagcacagagaggctttcccccctaat

SEQ ID NO: 24026 - DNA, 120 bp, Artificial Sequence
  ENSG00000033122_27 (sequence is synthesized)
aaagtcacagagtatcgatgagattgacattggtacatataaggtgtataacataccattagaaaactatgcttctgggagtgatcacttaggaagccacgaacgaccggataagatgct

SEQ ID NO: 24027 - DNA, 120 bp, Artificial Sequence
  ENSG00000033122_28 (sequence is synthesized)
gggaccagagcatggtatgtccagtatgtctcgaagccagtcagtcccaatgctggatgatgagatgctcacctacggaagtagtaaggggccacaacaacaaaaagcttctatgacaaa

SEQ ID NO: 24028 - DNA, 120 bp, Artificial Sequence
  ENSG00000033122_29 (sequence is synthesized)
aaaagtctatcagtttgaccaaagcttcaatcctcaaggatcagtggaagtgaaagccgaaaagaggataccacccccttttcaacacaatcccgagtacgtgcaacaggccagcaaaaa

SEQ ID NO: 24029 - DNA, 120 bp, Artificial Sequence
  ENSG00000033122_30 (sequence is synthesized)
catcgccaaggatttgattagtcctagagcttacagaggatacccaccgatggagcaaatgttttcattttctcagccatctgtgaatgaggatgctgtggtgaatgcccagttcgcaag

SEQ ID NO: 24030 - DNA, 120 bp, Artificial Sequence
  ENSG00000033122_31 (sequence is synthesized)
ccaaggggccagggcgggcttcctgagaagggccgactccctggtgagcgccacagaaatggccatgtttagaagggtcaatgagcctcatgagctgcccccaactgataggtacggcag

SEQ ID NO: 24031 - DNA, 120 bp, Artificial Sequence
  ENSG00000033122_32 (sequence is synthesized)
acccccatataggggagggctggatcgccaaagcagcgttacagtgactgagtcccagttcctgaaaaggaatggcaggtatgaagatgaacacccttcatatcaagaagtgaaagctca

SEQ ID NO: 24032 - DNA, 120 bp, Artificial Sequence
  ENSG00000033122_33 (sequence is synthesized)
ggcgggaagttttccggttaaaaaccttacccaaaggaggccattgtctgcgagaagctacagtacagagagttacggtgcctcccaaaccaggccagtttcagctaggcctactatggc

SEQ ID NO: 24033 - DNA, 120 bp, Artificial Sequence
  ENSG00000033122_34 (sequence is synthesized)
agctcttttggaaaaaataccatctgactataacttgggtaactatggtgacaagccatcagataacagtgatttaaagacgaggcctactcctgtgaagggagaggagagctgtggtaa

SEQ ID NO: 24034 - DNA, 120 bp, Artificial Sequence
  ENSG00000033122_35 (sequence is synthesized)
aatgcctgcagactggagacaacagctgcttagacatatagaagctagacggttagacaggaccccgtcccagcaaagcaacattttagacaatggacaagaagatgtatctcctagtgg

SEQ ID NO: 24035 - DNA, 120 bp, Artificial Sequence
  ENSG00000033122_36 (sequence is synthesized)
ccaatggaatccttatccacttgggaggcgggatgtacctccggacaccattactaagaaggcaggcagccacatccagacgttgatggggtcccaaagccttcagcatcgcagccggga

SEQ ID NO: 24036 - DNA, 120 bp, Artificial Sequence
  ENSG00000033122_37 (sequence is synthesized)
gcagcagccgtatgaaggaaatataaacaaagtgaccatccagcaatttcagtcaccattgcctattcagatcccctcttcacaggccacccggggacctcagcctggacggtgcttaat

SEQ ID NO: 24037 - DNA, 120 bp, Artificial Sequence
  ENSG00000033122_38 (sequence is synthesized)
tcaaactaaagggcaaaggagtatggatggatatccagagcagttttgtgtgagaatagaaaagaatcctggccttggatttagtatcagtggtggaattagtggacaaggaaatccatt

SEQ ID NO: 24038 - DNA, 120 bp, Artificial Sequence
  ENSG00000033122_39 (sequence is synthesized)
caaaccttctgacaagggtatctttgttactagggttcagcctgatgggccagcatcaaacctactgcagcctggtgataagatccttcaggcaaatggacacagttttgtacatatgga

SEQ ID NO: 24039 - DNA, 120 bp, Artificial Sequence
  ENSG00000033122_40 (sequence is synthesized)
acatgaaaaagctgtattactactgaagagtttccagaacacagtagacctagttattcaacgtgagcttactgtctaaatattttttataaatagtgaagatacgtctagccagaccta

SEQ ID NO: 24040 - DNA, 120 bp, Artificial Sequence
  ENSG00000033122_41 (sequence is synthesized)
atgttcaaaaataaatttatacatagaaacaaattttgccaattgctggaccaatggcaaacattagtgccaaatgtataatactatatgttagcactgaccatccttaaaaaatgttaa

SEQ ID NO: 24041 - DNA, 120 bp, Artificial Sequence
  ENSG00000033122_42 (sequence is synthesized)
ctctataaatatgatgttcatgtggttatgtattagttttaattgtcagcctctggctgtgcattggtgcagttttgtttctgtttttgtttttgtttttaatcaaataagtttcttctc

SEQ ID NO: 24042 - DNA, 120 bp, Artificial Sequence
  ENSG00000033122_43 (sequence is synthesized)
aaaatggatttcatataatttcggagcacggaagcacacacaagctctttatgaattctgctctccatcagaaacactgcctcaaagttgtatatgcctttatatagaaaatacaaatat

SEQ ID NO: 24043 - DNA, 120 bp, Artificial Sequence
  ENSG00000033122_44 (sequence is synthesized)
aaagaattgtaattcccataaaatatttctagcacaaggtatatgttggcatatatacaaaaagaatatagagaaaaacaatattttcataaactaaacatctcagatagagaaaaaata

SEQ ID NO: 24044 - DNA, 120 bp, Artificial Sequence
  ENSG00000033122_45 (sequence is synthesized)
tatcttaaaataagactttactatattgaatctttttcaataaaaattacatgataatgccttatgaaagtaactgtacatatggtataaagtgtttatatttggttccatattcatttg

SEQ ID NO: 24045 - DNA, 120 bp, Artificial Sequence
  ENSG00000033122_46 (sequence is synthesized)
ctaaattctcatgacacagagtgaaatatttcataaattagccatttatctctgggacccaaataaaaataggatgaactaatttgttcaatgcctttagctaattacaatacatgcaga

SEQ ID NO: 24046 - DNA, 120 bp, Artificial Sequence
  ENSG00000033122_47 (sequence is synthesized)
gtttagaaacagactaaaggtcattgtagttaagtctttttcaccacaaatttaagcagtggatgatgggtggcaggaaaggtattgctttatttctttcaagttcatgttgattataaa

SEQ ID NO: 24047 - DNA, 120 bp, Artificial Sequence
  ENSG00000033122_48 (sequence is synthesized)
ctgtagcccctgtgatttctttacttgtaaatgtggaatttatttgtgtgttgcttaatctaatttgctgctttttaaattatttaaaacgaattttggaaattgataaaatttatcatt

SEQ ID NO: 24048 - DNA, 120 bp, Artificial Sequence
  ENSG00000033122_49 (sequence is synthesized)
acgaaagactgctgttagaaagttatggtaggtgattttaaatccttggtatttaaatatgaaacttcaaatataatttctcagagctgtggtctacctgtatcattaatttcaatggct

SEQ ID NO: 24049 - DNA, 120 bp, Artificial Sequence
  ENSG00000033122_50 (sequence is synthesized)
gtttttctgggcagaaatagataaaatactttttttccaaaaacagtttcaaggtatgtaaaatcctgaatgctttttcactgaagagaaagacaagcatggttaatgtagaattattta

SEQ ID NO: 24050 - DNA, 120 bp, Artificial Sequence
  ENSG00000033122_51 (sequence is synthesized)
attttcctgcataaatgatcaaaatttattttataatcctttaaaatacttatctttcatattagtcattaatttaattacaatattaatttgaatttccaggataatttcccggagttg

SEQ ID NO: 24051 - DNA, 120 bp, Artificial Sequence
  ENSG00000033122_52 (sequence is synthesized)
taatttcccggagttggttgcatgcattatctttcataattttacatagttcttttgttatataatgaatttactttacatgctagtgtttcaagtattgtatgaggattttcacaatag

SEQ ID NO: 24052 - DNA, 120 bp, Artificial Sequence
  ENSG00000033122_53 (sequence is synthesized)
tatcactgaatgatgtcaccagagctctgagaataatatttgtaagttaactgttttatggggacattgaaaatattgtatttttgtagggtctattaaaatgagtgtcacttattagaa

SEQ ID NO: 24053 - DNA, 120 bp, Artificial Sequence
  ENSG00000033122_54 (sequence is synthesized)
cgccgctgctgctgcggtcgctagcgcggcgcgctgggcaggctgaggctggggagtggacgcgctcctgcctcccccgccggcgcttcgggcttcccctcagccgcttcccgcgggaac

SEQ ID NO: 24054 - DNA, 120 bp, Artificial Sequence
  ENSG00000033122_55 (sequence is synthesized)
ctgccctatggaggtatttcagcaatgcatgcaggcagaagcatgactttaaacttgcagactaagtctaaatttgatcatcaagaactacctcttcagaaaaccccgtcccagcaaagc

SEQ ID NO: 24055 - DNA, 120 bp, Artificial Sequence
  ENSG00000033122_56 (sequence is synthesized)
acatttggagacatttcattgaagaatataacaaaaacattaaatattatgattataaatattaaaataaatatttgttgggcatcaactacatatcaggtactatgagggatgtaatgt

SEQ ID NO: 24056 - DNA, 120 bp, Artificial Sequence
  ENSG00000033122_57 (sequence is synthesized)
ggtcccctcagcacagaatctcacagtccagaggaaagatgagagaagttccacatcaaagacagtacaaggcaatgtgtatctttcccattctgcctgagatcatagctatttggtgtt

SEQ ID NO: 24057 - DNA, 120 bp, Artificial Sequence
  ENSG00000033122_58 (sequence is synthesized)
tgtttttcctatgaactttaagctttttgagagagaggatcagacaatacttaacaaaggacttctagacagaagagcctcaggagagaggagtaatcgttcagctcttcttggtttctg

SEQ ID NO: 24058 - DNA, 120 bp, Artificial Sequence
  ENSG00000033122_59 (sequence is synthesized)
aataagaaacttagtgtcattgcgcatcaacttagaaaatgtgaattgattaaaaatatgtgatggattgtgcagcatgcttacatttgaaaatggagattgtgcctttaaatacttaat

SEQ ID NO: 24059 - DNA, 120 bp, Artificial Sequence
  ENSG00000033122_60 (sequence is synthesized)
caaaggactcctgaccttcaagtaccagtttgggcatattactggagatccaggttgaaagtctgttggcagagaaagtatgactctgcttttagccttctgcacaagacaaaatccttc

SEQ ID NO: 24060 - DNA, 120 bp, Artificial Sequence
  ENSG00000033122_61 (sequence is synthesized)
tggtgatcctcagtctttccactcagaggactcttatttggcttgaatgtggaaaaggcatctggttcagaaaaaaagttgattacagttgatcctcattattcatgggtgctatatttg

SEQ ID NO: 24061 - DNA, 120 bp, Artificial Sequence
  ENSG00000033122_62 (sequence is synthesized)
caaacttgcctactcactaaagtttatacccccaaatcaatgtgtggcacttccgaggtcattcataaacaggcacagaggagcaaaaaattggagtcaccccacgggcatgttcccagg

SEQ ID NO: 24062 - DNA, 120 bp, Artificial Sequence
  ENSG00000033122_63 (sequence is synthesized)
tttctcttaataaaatgatatattttgttttgaactttggaattccattgtggcttggcactaaattataggcctagcaatcctaaatctcctatgtcctcaatatctagaaacaagcag

SEQ ID NO: 24063 - DNA, 120 bp, Artificial Sequence
  ENSG00000033122_64 (sequence is synthesized)
gaactgtttgtcagaaattaaacaggacttatttgaatgtgctttaaaaaaaaaatcaatgaattcaggggaatgaaaatacatgttagaaattaaaatgtggttatctcagctatagtt

SEQ ID NO: 24064 - DNA, 120 bp, Artificial Sequence
  ENSG00000033122_65 (sequence is synthesized)
aagaaaattatcaaatgtaaatgatcccttttttgctggatcttataaaatatgtgatacttaagtacactgaagttttaaagttagctgcttatattgtacaaagatatttttggctct

SEQ ID NO: 24065 - DNA, 120 bp, Artificial Sequence
  ENSG00000033122_66 (sequence is synthesized)
ttaaaggttattttcctatattaagaaaaggtttcttatattgaaaacttttatggtgactcaggttttgtgtctatgtataggcacacataaataggaggtgtttttctttgcacattt

SEQ ID NO: 24066 - DNA, 120 bp, Artificial Sequence
  ENSG00000033122_67 (sequence is synthesized)
gttttgcacagctaaaataatgaggttaaataatgcccaggtatgcaggtcaattgacctttttaatagcttaacgaaagcatttgacaaatggacaaaagaaatcacattgtatttctt

SEQ ID NO: 24067 - DNA, 120 bp, Artificial Sequence
  ENSG00000033122_68 (sequence is synthesized)
tgtatctctccattcctcttacccttccccaaccctctactaaagaatatttcttatttagtcaggaaatcttatgtaatatttttggacggtccataggaaaagcaagatgaaactctc

SEQ ID NO: 24068 - DNA, 120 bp, Artificial Sequence
  ENSG00000033122_69 (sequence is synthesized)
aggcagacaacataaagcagctcccatatctgctagaaaggtcattaattttcagaatatattgttgaaataatttttattttcaatacttgtagtctttccactcagaggactcttatt

SEQ ID NO: 24069 - DNA, 120 bp, Artificial Sequence
  ENSG00000033122_70 (sequence is synthesized)
tggcttgaatgtggaaaaggcatctggttcaggtcagtaaggactgttgtatgtaagttttactctagaaaatttggttttagctttgatgacacctagcgtcagtggaatgcaatgaat

SEQ ID NO: 24070 - DNA, 120 bp, Artificial Sequence
  ENSG00000033122_71 (sequence is synthesized)
gcttaatacttcggctttataatgtttgggcatttctctttaacatcctcaaatacactttcatccttgaaaacacaagcctattttctgtttgaaatgaagagaaaggtaattgacaga

SEQ ID NO: 24071 - DNA, 120 bp, Artificial Sequence
  ENSG00000033122_72 (sequence is synthesized)
taaacagatagtttttgtttgaagagccaatcaagtttctctttgtactcagtagggactaaaggaagcttaaggataatgacattgtcttcatatgaagaagaaattttttactagtgg

SEQ ID NO: 24072 - DNA, 120 bp, Artificial Sequence
  ENSG00000033122_73 (sequence is synthesized)
aaaattagaagtaaatctaccaaattctgtttgtaaattttaaagaccaccacaaaagaccttgaaaaaagtgaaactactgcaagattactgttgcttattgaaagtaataatacagtt

SEQ ID NO: 24073 - DNA, 120 bp, Artificial Sequence
  ENSG00000033122_74 (sequence is synthesized)
ttattttttccactttataactgcccaagggctcccccaaccagctatatataagaaaaccataacatgaactagggtctttctattcaaaaaagaaatattaaactaacataagcaatt

SEQ ID NO: 24074 - DNA, 120 bp, Artificial Sequence
  ENSG00000033122_75 (sequence is synthesized)
tattttttcctaaacgatttcataattgattacttttgacctcagttattttggggcataatccttttactactctataaagaagttctacttctacctatatgaatttgtattttccca

SEQ ID NO: 24075 - DNA, 120 bp, Artificial Sequence
  ENSG00000033122_76 (sequence is synthesized)
tatgccaaacacacacacataaattttctttttctcatttcagctcatataattcagttagtgaaatatttcactcttctgtaagtttaagaaaaattcctaagcagtgatacaactttg

SEQ ID NO: 24076 - DNA, 120 bp, Artificial Sequence
  ENSG00000033122_77 (sequence is synthesized)
ggtcgctattttagtaaaatgaagagtctctagactttttttttttttttaatgatctctgacttcactaccatatgtgcagcacaacagtgacatcttaaggccaagtaaccagagctc

SEQ ID NO: 24077 - DNA, 120 bp, Artificial Sequence
  ENSG00000033122_78 (sequence is synthesized)
ctttagccagagaaagaacttgaattgggatctgatttcaaagaaatcccattatattatcaagtcgttttcaaatttacaatattcgactggtaaagaaagtgcttctttatgacttct

SEQ ID NO: 24078 - DNA, 120 bp, Artificial Sequence
  ENSG00000033122_79 (sequence is synthesized)
tttgcagtctttgtgaaccttttaatgtgcaatagtaaacattgacattttacatagacatattgtatattaatgcatgcatttcactgcatagtttattgacactacccttgtaaagct

SEQ ID NO: 24079 - DNA, 120 bp, Artificial Sequence
  ENSG00000033122_80 (sequence is synthesized)
tttatggaagaaccaacaagccacagcagtatagcaaaagaggcttaatctttataaattggggccttttctgtctctttgctagcctaggtggctgtatacaaattcgggtgggagggg

SEQ ID NO: 24080 - DNA, 120 bp, Artificial Sequence
  ENSG00000033122_81 (sequence is synthesized)
gcaggaaacacctcttcacatttaaggttttctacttgggtgtactctagccaattcaaaacaaattgcttactttaataatacaattttaccattttataaaaaaaatcaaatcacaac

SEQ ID NO: 24081 - DNA, 120 bp, Artificial Sequence
  ENSG00000033122_82 (sequence is synthesized)
atgtttaactgaaatggctgtattgtaattaatattttgagataattgtgattttgagcttaaattatatataaaaaattgtcatttttgtatgtgttaaaaagactactatatcacaat

SEQ ID NO: 24082 - DNA, 120 bp, Artificial Sequence
  ENSG00000033122_83 (sequence is synthesized)
taaaagtactttttagttgaactacatattgatgtaaataaaactgaatgaagacatatttactactttattaacatagatcgtgaatgtacttactggtttttttgcagtatgagacca

SEQ ID NO: 24083 - DNA, 120 bp, Artificial Sequence
  ENSG00000033122_84 (sequence is synthesized)
taacaaccttgaaagctgcttcattttatgtgcaaagaagtcctatgaatctatattttaaatttactgaaccagtgaaattaattactgtcagttaatttgcaaatgcaagctgtattc

SEQ ID NO: 24084 - DNA, 120 bp, Artificial Sequence
  ENSG00000033122_85 (sequence is synthesized)
tccagttttattttatgtactgacactaattggtaaaggtgtacaatgtgattagaatgcattttgaagatgctttctgtacagatacaaaatacagggactaaaataatgctgtgcagt

SEQ ID NO: 24085 - DNA, 120 bp, Artificial Sequence
  ENSG00000033122_86 (sequence is synthesized)
gtatagcagagccatttttcggctttggtgtactcaactttttcagtatttaaaaaagtgttttgaataacataaaagtctccttattgtataaataataaaatgtcaccttattgtaaa

SEQ ID NO: 24086 - DNA, 120 bp, Artificial Sequence
  ENSG00000033122_87 (sequence is synthesized)
caggcactgggacaactcttttccaaagaaagacccaaaaatcgtacaaataagtccaaatgaagcatgatgggaaatcagggactaattctgcttggaggacagggaaggctttcaaag

SEQ ID NO: 24087 - DNA, 120 bp, Artificial Sequence
  ENSG00000033122_88 (sequence is synthesized)
ctcaatgcttaaattgccatgtagaaatcaactccctatcaattttctacatttaatccttggcttcttgtcatattttcatttttctgcactggttcccatggcaacaagtctgttggc

SEQ ID NO: 24088 - DNA, 120 bp, Artificial Sequence
  ENSG00000033122_89 (sequence is synthesized)
taacaaaaaggtaaaaggattttaggagccaatataactactaataatgaaaatacctgtgagaaaattattcccaactagatgactacctattacaaataaatatttttctctaaccta

SEQ ID NO: 24089 - DNA, 120 bp, Artificial Sequence
  ENSG00000033122_90 (sequence is synthesized)
ggtattgaaaaaaaagctctgtatctttgtatattcagttgtcaacatggagaagccaccttttaaaaaagatcagttctgtaaagcataatgcctactacacagacatcattattctac

SEQ ID NO: 24090 - DNA, 120 bp, Artificial Sequence
  ENSG00000033122_91 (sequence is synthesized)
ttaaaagtctttttttaaaattccaaatacttgtggtagtagaaagcaataaatattctaaaatgagggatattggtccttttgtgactgagctatatgataaactaaggaaaactacag

SEQ ID NO: 24091 - DNA, 120 bp, Artificial Sequence
  ENSG00000033122_92 (sequence is synthesized)
aagttatgtctattaactctttaaggtacatgatatagcaaataatcatttgtacaacctcatagaaagttgagaggattaatcaaattgtttcaaaatttttaaggagccaaatttaaa

SEQ ID NO: 24092 - DNA, 120 bp, Artificial Sequence
  ENSG00000033122_93 (sequence is synthesized)
ttctcaataccctatgagattttttaaactattttagattcttaccagaagaatgcatagatgtagtaaaaccattaaatacagtagtatctggtggcctttctgtgtggaggagctcgt

SEQ ID NO: 24093 - DNA, 120 bp, Artificial Sequence
  ENSG00000033122_94 (sequence is synthesized)
ttgtccaaggtatgatctaccagtgagaagatcagtgccaggtcacagaaaaagctaatcatttttagtttaatcctgaccagctagtcttcctccaggcatcagctacctgattttaaa

SEQ ID NO: 24094 - DNA, 120 bp, Artificial Sequence
  ENSG00000033122_95 (sequence is synthesized)
gagaccatattagaaatgaaaagcagcagtctctatcatatgttaaattcaaaggcatagctgctcgtgaagaccctattatgttttatttgcctatcggagaaagagatctgcctacct

SEQ ID NO: 24095 - DNA, 120 bp, Artificial Sequence
  ENSG00000033122_96 (sequence is synthesized)
gcctttaggaaaaagcaatgctttatgtagcttcaattagtcctgcatcaggttattctaatgcttcctactgcaaaaaccaagcccacaagtctccaatcctaaaagtcactagaatat

SEQ ID NO: 24096 - DNA, 120 bp, Artificial Sequence
  ENSG00000033122_97 (sequence is synthesized)
tgatataaggaattctgtgtcagcagtatctcagtattcaaacctctgtttagggtcctgcatgtactatcaaacagcaagtgatagaacattcaggcgttttattggatttcagaattc

SEQ ID NO: 24097 - DNA, 120 bp, Artificial Sequence
  ENSG00000033122_98 (sequence is synthesized)
agattcagaattaagtactcttgggataaaggaaattaacgagcttttgacatttcaagaactcattgagattgtcaaaggcttcagtaatgaactctaacaaatagatccagaagtcat

SEQ ID NO: 24098 - DNA, 120 bp, Artificial Sequence
  ENSG00000033122_99 (sequence is synthesized)
aagtgagaaagaaaacaagcatgtctagtgaaatctgtccagtgtacgtaacactgcacaaagagcatattttattcagaccatttggattcagatgtaccctaaagacaactatgctat

SEQ ID NO: 24099 - DNA, 120 bp, Artificial Sequence
  ENSG00000033122_100 (sequence is synthesized)
cccattgcccaggtggacgttatgtttttagtttttcctttgtgggtgagggaagaagaggacatcaggtgaagtgtgccattactatttgaaaactagctctgcaggaagggttaaatc

SEQ ID NO: 24100 - DNA, 120 bp, Artificial Sequence
  ENSG00000033122_101 (sequence is synthesized)
aaatcctttacagggtgaccttcctacatctccttagagcaactgcatttcaaaataggccaaagctgaagtcataggaatgagacattaattgtaggttttcaggaaagcttcggagac

SEQ ID NO: 24101 - DNA, 120 bp, Artificial Sequence
  ENSG00000033122_102 (sequence is synthesized)
acggcaggtacagtctccttagagcctttgaaaatacaacatgtaggtccttctcagattatgctgaaactccaaatccttgttaaaggttttcctggactcctacagtctggtttgatc

SEQ ID NO: 24102 - DNA, 120 bp, Artificial Sequence
  ENSG00000033122_103 (sequence is synthesized)
agtttattattaagtactgaatgacagagaagggtacacagggaggacttgtatcacatgaagtaaaataattatttccttaatgagaaacttaattctagggtacttacaatagctgcc

SEQ ID NO: 24103 - DNA, 120 bp, Artificial Sequence
  ENSG00000033122_104 (sequence is synthesized)
ttattgggggaagggaggcatagatttgcaaatggtgggttttttcgtttttttgtgtgttggagtaattgaaaagatacatcaagcaataataaactagatgtgcaataatcttgtcga

SEQ ID NO: 24104 - DNA, 120 bp, Artificial Sequence
  ENSG00000033122_105 (sequence is synthesized)
gtagtatgtgctggttttggaaaggtgaaaagaaaattgttacatcaggctgcttttatcaagctaagcatgggcatgcctttccaaagggtatatttgatcctacagttaattttaaca

SEQ ID NO: 24105 - DNA, 120 bp, Artificial Sequence
  ENSG00000033122_106 (sequence is synthesized)
ttgggctgcaagcttaacctcatcaggagtggaattagattttacaaagttccccttatccaaactacagcacgcttactactttctccttccattttccacacctcagccccctaggac

SEQ ID NO: 24106 - DNA, 120 bp, Artificial Sequence
  ENSG00000033122_107 (sequence is synthesized)
ctgaagatccagagtgtgccccttgcccaatcgcctgagactatacagtgacacctacaacagaggatgtggagggagcagcttttcgggcaccagaaatggcagcatcaggagcatcag

SEQ ID NO: 24107 - DNA, 120 bp, Artificial Sequence
  ENSG00000033122_108 (sequence is synthesized)
cacgaatagactttgtagaggtagttctcccaaactatattatgaaaccaaacatttttggtgcgctacctgctgatgggggctgccttcttactgcctagtatctacaaaatgtttggt

SEQ ID NO: 24108 - DNA, 120 bp, Artificial Sequence
  ENSG00000033122_109 (sequence is synthesized)
aaattttatcagtctcagaaaaacattaatacccatatttttatctaattgatttcactatttgttatgttaaggtgcttttgtgtataatttttgtatatatttttaaatgggatcaaa

SEQ ID NO: 24109 - DNA, 120 bp, Artificial Sequence
  ENSG00000033122_110 (sequence is synthesized)
ctaagccataatttaaaagtcatcctaatgcagtaaataagataatttctctagtttgttaaattcttcagagaccgaatataattgctcgtttttctgtcatactccctgatgatgttc

SEQ ID NO: 24110 - DNA, 120 bp, Artificial Sequence
  ENSG00000033122_111 (sequence is synthesized)
cattgtggacttattttgcaaagttcccagatggcacaagtcaaaatatgaaatgctgatgattgattgattttatgtatcctttcatcttatgtaatttaatgtggaacagttattttg

SEQ ID NO: 24111 - DNA, 120 bp, Artificial Sequence
  ENSG00000033122_112 (sequence is synthesized)
tagctctaaaatacatttgttaattaaccatattggcttttcatgcagttcaatggcttatagcatttcaatttgcatagaaaatgaatctctgtaatgatacttttgctaaataaataa

SEQ ID NO: 24112 - DNA, 120 bp, Artificial Sequence
  ENSG00000033122_113 (sequence is synthesized)
caatcgacataatgggttcatttgcttttaacattttatacatacaatttagaagtaggatatatttcatattgaaattttgaaaagcttgaaattcaacatacaaggtcaccatcttgc

SEQ ID NO: 24113 - DNA, 120 bp, Artificial Sequence
  ENSG00000033122_114 (sequence is synthesized)
tgatgcctaatgcagtacagcaaattcattcttcatcccatgttaactcctttttggaacaagtcaaaatacaaataatttacaatgattgtgttggagctattgcttgattaaatacaa

SEQ ID NO: 24114 - DNA, 120 bp, Artificial Sequence
  ENSG00000033122_115 (sequence is synthesized)
ttcaaaggttctttttataaaacaggtgtgagcaggacacattgcacttacgggcttttcctatttttttggttctatttcattttactgcctaggaaagaaacatttttttgtaaaacc

SEQ ID NO: 24115 - DNA, 120 bp, Artificial Sequence
  ENSG00000033122_116 (sequence is synthesized)
tatgctatggaactgaaatgtactttattgaatatttctattctgttttatgaatatcaattatgtgaaatatataaatataaaattgccttagaatgcctaactctttgtataaaacag

SEQ ID NO: 24116 - DNA, 120 bp, Artificial Sequence
  ENSG00000033122_117 (sequence is synthesized)
atatctgaaagtagatgttggttttttgttcaaattgtgtaaatgctgatttttccatgagtacttatgaagatctatatgtaaaaattttaagtctgcttactgtgtttgtaccacctt

SEQ ID NO: 24117 - DNA, 120 bp, Artificial Sequence
  ENSG00000033122_118 (sequence is synthesized)
gttcttagctgtgtatactctatgctaattgacttctgtcattgtcacatatattgcatatgtctctcaaaaattaaaaggtatattgctattctaaaaataaaaaatgtaaattcctga

SEQ ID NO: 24118 - DNA, 120 bp, Artificial Sequence
  ENSG00000033170_0 (sequence is synthesized)
tttcagttggaaggaggtagggaaaataagtgctttaattcctaggattttggaagtaaaaatggaacaccagacaaaaatggaatttttaggcaaatgtaaagctttgtacttgggtat

SEQ ID NO: 24119 - DNA, 120 bp, Artificial Sequence
  ENSG00000033170_1 (sequence is synthesized)
ctcaaagtattatacagtgtaaactatcatgattattaaccaactagaagtagttcttttttttaaattttatttttaattttagacatgagggtcttgctatgttgcccaggctgaagt

SEQ ID NO: 24120 - DNA, 120 bp, Artificial Sequence
  ENSG00000033170_2 (sequence is synthesized)
ggctactgacaggcacgatgtggcactgcagcctggaactcttgggcttaagtgatccttcctgcttcttctatcttaaaaaaaaaaagttacgcttgcttgttaaaatatttttaaaat

SEQ ID NO: 24121 - DNA, 120 bp, Artificial Sequence
  ENSG00000033170_3 (sequence is synthesized)
gctgtgtttaaactaagaagtaaatatccaccccacctctgacttctaaaaattatctaaagtatgactggtaagatttttacctttaatcccacataagtctaaaatttgtgttcattt

SEQ ID NO: 24122 - DNA, 120 bp, Artificial Sequence
  ENSG00000033170_4 (sequence is synthesized)
ccaacaaccaaagtgtgtcacttttataccagaattttgtcctgcttatacgtttagtacagaaatctcatgggagagagcatccatgcatttacaaattgttattgaattattttattg

SEQ ID NO: 24123 - DNA, 120 bp, Artificial Sequence
  ENSG00000033170_5 (sequence is synthesized)
aatgatgacacccaaactgagctagaacataattctggctctgctagtacatcttctgtgtgatcttggacaagtcactctactttcctttcaattttcttttctcacagggagataatc

SEQ ID NO: 24124 - DNA, 120 bp, Artificial Sequence
  ENSG00000033170_6 (sequence is synthesized)
ataaaaacgactgtaaagtacagcacttcatagagtgctttttgtttaaagagctgacaataaatacgagtctcaaggtctaggaaagcctccctcacaacctgagctgcttgaggacaa

SEQ ID NO: 24125 - DNA, 120 bp, Artificial Sequence
  ENSG00000033170_7 (sequence is synthesized)
gggattttcttttgaatcagcagtaccttatttgtgtatctgtgatagagttcctggtacataagaaggtctcaataaatatgtgaatttatgaatattaggcagattgcaaccttgaca

SEQ ID NO: 24126 - DNA, 120 bp, Artificial Sequence
  ENSG00000033170_8 (sequence is synthesized)
ggccactgcctcttaaatctcctttctgtgatcttttaatatttaacatctaaaaggccgccgctacttgctttgggataagtatccccggtatgtactttaaaatgcccaagcctagag

SEQ ID NO: 24127 - DNA, 120 bp, Artificial Sequence
  ENSG00000033170_9 (sequence is synthesized)
aaatgattcttgtcttaagggcaccatttcgctctcccaccgtaaagcgccccaggcttgggatctgggtcccaaggctacagggaagagtttggaacgggaagctcatcttccggccct

SEQ ID NO: 24128 - DNA, 120 bp, Artificial Sequence
  ENSG00000033170_10 (sequence is synthesized)
ctgattggccggctcgcactccactcacgcggcgcgcagctctgattggcctcggcggcacccctcgtcccgcgactactttgtgtgctggggcggcgcgctccggtcctcccgctcagc

SEQ ID NO: 24129 - DNA, 120 bp, Artificial Sequence
  ENSG00000033170_11 (sequence is synthesized)
tggcggtctgggctgctctggggcagcccttcggtccactgctctgcatcgcgggcgccgggaattttccgagtccgagcgggttgctgcttttgctcagaggacatccatgaccctaat

SEQ ID NO: 24130 - DNA, 120 bp, Artificial Sequence
  ENSG00000033170_12 (sequence is synthesized)
ggtctttttgttcaagataaagtgattttttgcctttgttgattaactggacaaattcagcatgtagagcgcatgaagtacaggacaataaagcttcctacacatatcaccaggaggatc

SEQ ID NO: 24131 - DNA, 120 bp, Artificial Sequence
  ENSG00000033170_13 (sequence is synthesized)
tctttgaaagattcactgcaggactaccagagagaataatttgtctgaagcatcatgtgttgaaacaacagaagtctattcacctgtgcactaactagaaacagagttacaatgttttca

SEQ ID NO: 24132 - DNA, 120 bp, Artificial Sequence
  ENSG00000033170_14 (sequence is synthesized)
attctttgagctccaggactccagggaagtgagttgaaaatctgaaaatgcggccatggactggttcctggcgttggattatgctcattctttttgcctgggggaccttgctgttttata

SEQ ID NO: 24133 - DNA, 120 bp, Artificial Sequence
  ENSG00000033170_15 (sequence is synthesized)
taggtggtcacttggtacgagataatgaccatcctgatcactctagccgagaactgtccaagattctggcaaagcttgaacgcttaaaacaacagaatgaagacttgaggcgaatggccg

SEQ ID NO: 24134 - DNA, 120 bp, Artificial Sequence
  ENSG00000033170_16 (sequence is synthesized)
aatctctccggataccagaaggccctattgatcaggggccagctataggaagagtacgcgttttagaagagcagcttgttaaggccaaagaacagattgaaaattacaagaaacagacca

SEQ ID NO: 24135 - DNA, 120 bp, Artificial Sequence
  ENSG00000033170_17 (sequence is synthesized)
gaaatggtctggggaaggatcatgaaatcctgaggaggaggattgaaaatggagctaaagagctctggtttttcctacagagtgaattgaagaaattaaagaacttagaaggaaatgaac

SEQ ID NO: 24136 - DNA, 120 bp, Artificial Sequence
  ENSG00000033170_18 (sequence is synthesized)
tccaaagacatgcagatgaatttcttttggatttaggacatcatgaaaggtctataatgacggatctatactacctcagtcagacagatggagcaggtgattggcgggaaaaagaggcca

SEQ ID NO: 24137 - DNA, 120 bp, Artificial Sequence
  ENSG00000033170_19 (sequence is synthesized)
aagatctgacagaactggttcagcggagaataacatatcttcagaatcccaaggactgcagcaaagccaaaaagctggtgtgtaatatcaacaaaggctgtggctatggctgtcagctcc

SEQ ID NO: 24138 - DNA, 120 bp, Artificial Sequence
  ENSG00000033170_20 (sequence is synthesized)
atcatgtggtctactgcttcatgattgcatatggcacccagcgaacactcatcttggaatctcagaattggcgctatgctactggtggatgggagactgtatttaggcctgtaagtgaga

SEQ ID NO: 24139 - DNA, 120 bp, Artificial Sequence
  ENSG00000033170_21 (sequence is synthesized)
cagacagatctggcatctccactggacactggtcaggtgaagtgaaggacaaaaatgttcaagtggtcgagcttcccattgtagacagtcttcatccccgtcctccatatttacccttgg

SEQ ID NO: 24140 - DNA, 120 bp, Artificial Sequence
  ENSG00000033170_22 (sequence is synthesized)
ctgtaccagaagacctcgcagatcgacttgtacgagtgcatggtgaccctgcagtgtggtgggtgtctcagtttgtcaaatacttgatccgcccacagccttggctagaaaaagaaatag

SEQ ID NO: 24141 - DNA, 120 bp, Artificial Sequence
  ENSG00000033170_23 (sequence is synthesized)
aagaagccaccaagaagcttggcttcaaacatccagttattggagtccatgtcagacgcacagacaaagtgggaacagaagctgccttccatcccattgaagagtacatggtgcatgttg

SEQ ID NO: 24142 - DNA, 120 bp, Artificial Sequence
  ENSG00000033170_24 (sequence is synthesized)
aagaacattttcagcttcttgcacgcagaatgcaagtggacaaaaaaagagtgtatttggccacagatgacccttctttattaaaggaggcaaaaacaaagtaccccaattatgaattta

SEQ ID NO: 24143 - DNA, 120 bp, Artificial Sequence
  ENSG00000033170_25 (sequence is synthesized)
ttagtgataactctatttcctggtcagctggactgcacaatcgatacacagaaaattcacttcgtggagtgatcctggatatacattttctctctcaggcagacttcctagtgtgtactt

SEQ ID NO: 24144 - DNA, 120 bp, Artificial Sequence
  ENSG00000033170_26 (sequence is synthesized)
tttcatcccaggtctgtcgagttgcttatgaaattatgcaaacactacatcctgatgcctctgcaaacttccattctttagatgacatctactattttgggggccagaatgcccacaatc

SEQ ID NO: 24145 - DNA, 120 bp, Artificial Sequence
  ENSG00000033170_27 (sequence is synthesized)
aaattgccatttatgctcaccaaccccgaactgcagatgaaattcccatggaacctggagatatcattggtgtggctggaaatcattgggatggctattctaaaggtgtcaacaggaaat

SEQ ID NO: 24146 - DNA, 120 bp, Artificial Sequence
  ENSG00000033170_28 (sequence is synthesized)
tgggaaggacgggcctatatccctcctacaaagttcgagagaagatagaaacggtcaagtaccccacatatcctgaggctgagaaataaagctcagatggaagagataaacgaccaaact

SEQ ID NO: 24147 - DNA, 120 bp, Artificial Sequence
  ENSG00000033170_29 (sequence is synthesized)
cagttcgaccaaactcagttcaaaccatttcagccaaactgtagatgaagagggctctgatctaacaaaataaggttatatgagtagatactctcagcaccaagagcagctgggaactga

SEQ ID NO: 24148 - DNA, 120 bp, Artificial Sequence
  ENSG00000033170_30 (sequence is synthesized)
cataggcttcaattggtggaattcctctttaacaagggctgcaatgccctcatacccatgcacagtacaataatgtactcacatataacatgcaaacaggttgttttctactttgcccct

SEQ ID NO: 24149 - DNA, 120 bp, Artificial Sequence
  ENSG00000033170_31 (sequence is synthesized)
ttcagtatgtccccataagacaaacactgccatattgtgtaatttaagtgacacagacattttgtgtgagacttaaaacatggtgcctatatctgagagacctgtgtgaactattgagaa

SEQ ID NO: 24150 - DNA, 120 bp, Artificial Sequence
  ENSG00000033170_32 (sequence is synthesized)
gatcggaacagctccttactctgaggaagttgattcttatttgatggtggtattgtgaccactgaattcactccagtcaacagattcagaatgagaatggacgtttggtttttttttgtt

SEQ ID NO: 24151 - DNA, 120 bp, Artificial Sequence
  ENSG00000033170_33 (sequence is synthesized)
tttgtttttgttttttcctttataaggttgtctgtttttttttttttaaataattgcatcagttcattgacctcatcattaataagtgaagaatacatcagaaaataaaatattcactct

SEQ ID NO: 24152 - DNA, 120 bp, Artificial Sequence
  ENSG00000033170_34 (sequence is synthesized)
ccattagaaaattttgtaaaacaatgccatgaacaaattctttagtactcaatgtttctggacattctctttgataacaaaaaataaattttaaaaaggaattttgtaaagtttctagaa

SEQ ID NO: 24153 - DNA, 120 bp, Artificial Sequence
  ENSG00000033170_35 (sequence is synthesized)
ttttatatcattggatgatatgttgatcagccttatgtggaagaactgtgataaaaagaggagctttttagtttttcagcttatttactttgttttttttcctgtttctgatatagtaac

SEQ ID NO: 24154 - DNA, 120 bp, Artificial Sequence
  ENSG00000033170_36 (sequence is synthesized)
taattcttaactcagagacattggtccattttaatactgaaaaccaattttcattggtacacattacaaaattgctaagaacactgtttgggagctttcattctcatattttggacattg

SEQ ID NO: 24155 - DNA, 120 bp, Artificial Sequence
  ENSG00000033170_37 (sequence is synthesized)
ttttaattgagtgaaataatcataactccttgctcccagagaagctatcacctccatttctaaaaccatttcaggtttgtttggtagtctttcttaatgtatttattatcgctttttgtg

SEQ ID NO: 24156 - DNA, 120 bp, Artificial Sequence
  ENSG00000033170_38 (sequence is synthesized)
agtagggtcctgttttatccaggaaccaatttctgccctagcctatcatgccctgcttttgagagtaccaggtatctttgggattgggaagctggctgtttcagaagtatatgtctcata

SEQ ID NO: 24157 - DNA, 120 bp, Artificial Sequence
  ENSG00000033170_39 (sequence is synthesized)
gtgtgcagaacttggtgaccaagtgagaagcgggaccaatgggagactcacaatggactgagtcttgggattatcttttccaaattcttccatgttagaatcacttcagaaaataagact

SEQ ID NO: 24158 - DNA, 120 bp, Artificial Sequence
  ENSG00000033170_40 (sequence is synthesized)
ttgatgctttgtctctgagcatcatttttctcctcataaaaacacttccttattgtatgtagcctgcctcctacagaggcctggtaggtgttactgcattctaaaagaaaaatgtcatct

SEQ ID NO: 24159 - DNA, 120 bp, Artificial Sequence
  ENSG00000033170_41 (sequence is synthesized)
ctgtaggagcgactatcaggcctagtgtgaaatattagggatcctaggcagaagagctattagtcctggccttcatatcttcaccaaatgaaaatactgtatataaaatttcaccaccaa

SEQ ID NO: 24160 - DNA, 120 bp, Artificial Sequence
  ENSG00000033170_42 (sequence is synthesized)
acttaactaaattctttttctcaagtcaagcctcccaaagaaaaaagaaattaacttcctacagtgtcagcaagcaattttccatttagttttggtacaaataaaagtcatttgaaacaa

SEQ ID NO: 24161 - DNA, 120 bp, Artificial Sequence
  ENSG00000033170_43 (sequence is synthesized)
tatcccagaggttatggtaggatttgtcgttactgtcattcagttcaaagaatttttaaatttccatgttgattttgtttttgacccagtgatcattcaggagcaggatcccagaaatgc

SEQ ID NO: 24162 - DNA, 120 bp, Artificial Sequence
  ENSG00000033170_44 (sequence is synthesized)
agatggccactttatttgctacccaacactaataccgacgctggaaaactgagatggcaccgaatcctgagagacagatatcttaacttatttaacttaactcatttaactcatgatggt

SEQ ID NO: 24163 - DNA, 120 bp, Artificial Sequence
  ENSG00000033170_45 (sequence is synthesized)
gtttcttcctctccgttcggtcgggagtagcatcctccactcagccacccttcccactcccccatcgtggggcagctgcggctgagggctgtggctttggcagctgcgacggggagcggc

SEQ ID NO: 24164 - DNA, 120 bp, Artificial Sequence
  ENSG00000033170_46 (sequence is synthesized)
gatgatcctagtagaagtcaaatgagatcatttttgatagttggtttgcaggcttcggtgtatgcacccaacctttcaaagactgcctgtgcttttcagggagctcagttttgtgactga

SEQ ID NO: 24165 - DNA, 120 bp, Artificial Sequence
  ENSG00000033170_47 (sequence is synthesized)
aaggatcagctattctcttctacctttttaatgcactactggtttctagcagctgctgcttaacgctgttcattcttgagtttggtgaattgttttctgtgctccatgtgatttctttgt

SEQ ID NO: 24166 - DNA, 120 bp, Artificial Sequence
  ENSG00000033170_48 (sequence is synthesized)
agtccgagcggagacagggtttctctgtgttgcccaggctggtctcgaactctgagctcaagcgacctgcccacctcggccacccaaaatgttgggattacaggggttgctgcttttgct

SEQ ID NO: 24167 - DNA, 120 bp, Artificial Sequence
  ENSG00000033170_49 (sequence is synthesized)
tttgttcaagataaagtgattttttgcctttgttgattaactggacaaattcagattctattttgaccagcaataagttgaattatggggctagaagataaggactaaaaacaagaattg

SEQ ID NO: 24168 - DNA, 120 bp, Artificial Sequence
  ENSG00000033170_50 (sequence is synthesized)
actgtctcattagtgaacaataaaagaaaaattgttgtattagcacaacctactactgtgaagaggaaaagaattaccccatacaagtctataatgacggatctatactacctcagtcag

SEQ ID NO: 24169 - DNA, 120 bp, Artificial Sequence
  ENSG00000033170_51 (sequence is synthesized)
atatcccagaggttatggtaggatttgtcgttactgtcattcagttcaaagaatttttaaatttccatgttgattttgtttttgacccagtgatcattcaggagcagagcctgcagcact

SEQ ID NO: 24170 - DNA, 120 bp, Artificial Sequence
  ENSG00000033170_52 (sequence is synthesized)
ccctgaagaaaaggataaaagaaaataaaatcaaaacttagttgaaaatcaggaagtgcggacaagcttctgtcgagaaaatggagcatgtagagcgcatgaagtacaggacaataaagc

SEQ ID NO: 24171 - DNA, 120 bp, Artificial Sequence
  ENSG00000033178_0 (sequence is synthesized)
accttccagtagccggcggcggtgtctcaggcggcaatggaaggatccgagcctgtggccgcccatcagggggaagaggcgtcctgttcttcctgggggactggcagcacaaataaaaat

SEQ ID NO: 24172 - DNA, 120 bp, Artificial Sequence
  ENSG00000033178_1 (sequence is synthesized)
ttgcccattatgtcaacagcatctgtggaaatcgatgatgcattgtatagtcgacagaggtacgttcttggagacacagcaatgcagaagatggccaagtcccatgttttcttaagtggg

SEQ ID NO: 24173 - DNA, 120 bp, Artificial Sequence
  ENSG00000033178_2 (sequence is synthesized)
atgggtggtcttggtttggaaattgcaaagaatcttgttcttgcagggattaaggcagttacaattcatgatacagaaaaatgccaagcatgggatctaggaaccaacttctttctcagt

SEQ ID NO: 24174 - DNA, 120 bp, Artificial Sequence
  ENSG00000033178_3 (sequence is synthesized)
gaagatgatgttgttaataagagaaacagggctgaagctgtacttaaacatattgcagaactaaatccatacgttcatgtcacatcatcttctgttcctttcaatgagaccacagatctc

SEQ ID NO: 24175 - DNA, 120 bp, Artificial Sequence
  ENSG00000033178_4 (sequence is synthesized)
tcctttttagataaataccagtgtgtagtattgactgagatgaaacttccattgcagaagaagatcaatgacttttgccgttctcagtgccctccaattaagtttatcagtgcagatgta

SEQ ID NO: 24176 - DNA, 120 bp, Artificial Sequence
  ENSG00000033178_5 (sequence is synthesized)
catggaatttggtcaaggttattttgtgatttcggtgatgaatttgaagttttagatacaacaggagaagaaccaaaagaaattttcatttcaaacataacgcaagcaaatcctggcatt

SEQ ID NO: 24177 - DNA, 120 bp, Artificial Sequence
  ENSG00000033178_6 (sequence is synthesized)
gttacttgccttgaaaatcatcctcacaaactggagacaggacaattcctaacatttcgagaaattaatggaatgacaggtttaaatggatctatacaacaaataacggtgatatcgcca

SEQ ID NO: 24178 - DNA, 120 bp, Artificial Sequence
  ENSG00000033178_7 (sequence is synthesized)
ttttcttttagtattggtgacaccacagaactggaaccatatttacatggaggcatagctgtccaagttaagactcctaaaacagttttttttgaatcactggagaggcagttaaaacat

SEQ ID NO: 24179 - DNA, 120 bp, Artificial Sequence
  ENSG00000033178_8 (sequence is synthesized)
ccaaagtgccttattgtggattttagcaaccctgaggcacctttagagattcacacagctatgcttgccttggaccagtttcaggagaaatacagtcgcaagccaaatgttggatgccaa

SEQ ID NO: 24180 - DNA, 120 bp, Artificial Sequence
  ENSG00000033178_9 (sequence is synthesized)
caagattcagaagaactgttgaaactagcaacatctataagtgaaaccttggaagagaagcctgatgtaaatgctgacattgtgcattggctctcttggactgcccaaggctttttatct

SEQ ID NO: 24181 - DNA, 120 bp, Artificial Sequence
  ENSG00000033178_10 (sequence is synthesized)
ccacttgctgcagcagtaggaggtgttgccagccaagaagtattgaaagctgtaacaggaaaattttctcctttgtgccagtggttatatcttgaagcagcagatattgttgaatcacta

SEQ ID NO: 24182 - DNA, 120 bp, Artificial Sequence
  ENSG00000033178_11 (sequence is synthesized)
ggcaaacctgaatgtgaagaatttctcccacgaggagatagatatgatgccttaagagcttgcattggagacactttgtgtcagaaactgcaaaatttaaacatcttcttagtagggtgt

SEQ ID NO: 24183 - DNA, 120 bp, Artificial Sequence
  ENSG00000033178_12 (sequence is synthesized)
ggagccataggctgtgaaatgttgaaaaattttgctttacttggtgttggcacaagcaaagagaaaggaatgattacagttacagatcctgacttgatagagaaatccaacttaaataga

SEQ ID NO: 24184 - DNA, 120 bp, Artificial Sequence
  ENSG00000033178_13 (sequence is synthesized)
cagttcctatttcgtcctcatcacatacagaaacctaaaagctacactgctgctgatgctactctgaaaataaattctcaaataaagatagatgcacacctgaacaaagtatgtccaacc

SEQ ID NO: 24185 - DNA, 120 bp, Artificial Sequence
  ENSG00000033178_14 (sequence is synthesized)
actgagaccatttacaatgatgagttctatactaaacaagatgtaattattacagcattagataatgtggaagccaggagatacgtagacagtcgttgcttagcaaatctaaggcctctt

SEQ ID NO: 24186 - DNA, 120 bp, Artificial Sequence
  ENSG00000033178_15 (sequence is synthesized)
ttagattctggaacaatgggcactaagggacacactgaagttattgtaccgcatttgactgagtcttacaatagtcatcgggatcccccagaagaggaaataccattttgtactctaaaa

SEQ ID NO: 24187 - DNA, 120 bp, Artificial Sequence
  ENSG00000033178_16 (sequence is synthesized)
tcctttccagctgctattgaacataccatacagtgggcaagagataagtttgaaagttccttttcccacaaaccttcattgtttaacaaattttggcaaacctattcatctgcagaagaa

SEQ ID NO: 24188 - DNA, 120 bp, Artificial Sequence
  ENSG00000033178_17 (sequence is synthesized)
gtcttacagaagatacagagtggacacagtttagaaggctgttttcaagttataaagttacttagcagaagacctagaaattggtcccagtgtgtagaattagcaagattaaagtttgaa

SEQ ID NO: 24189 - DNA, 120 bp, Artificial Sequence
  ENSG00000033178_18 (sequence is synthesized)
aaatattttaaccataaggctcttcagcttcttcactgtttccctctggacatacgattaaaagatggcagtttattttggcagtcaccaaagaggccaccctctccaataaaatttgat

SEQ ID NO: 24190 - DNA, 120 bp, Artificial Sequence
  ENSG00000033178_19 (sequence is synthesized)
ttaaatgagcctttgcacctcagtttccttcagaatgctgcaaaactatatgctacagtatattgtattccatttgcagaagaggacttatcagcagatgccctcttgaatattctttca

SEQ ID NO: 24191 - DNA, 120 bp, Artificial Sequence
  ENSG00000033178_20 (sequence is synthesized)
gaagtaaagattcaggaattcaagccttccaataaggttgttcaaacagatgaaactgcaaggaaaccagaccatgttcctattagcagtgaagatgagaggaatgcaattttccaacta

SEQ ID NO: 24192 - DNA, 120 bp, Artificial Sequence
  ENSG00000033178_21 (sequence is synthesized)
gaaaaggctattttatctaatgaagccaccaaaagtgaccttcagatggcagtgctttcatttgaaaaagatgatgatcataatggacacatagatttcatcacagctgcatcaaatctt

SEQ ID NO: 24193 - DNA, 120 bp, Artificial Sequence
  ENSG00000033178_22 (sequence is synthesized)
cgtgccaaaatgtacagcattgaaccagctgaccgtttcaaaacaaagcgcatagctggtaaaattatacctgctatagcaacaaccactgctacagtttctggcttggttgccttggag

SEQ ID NO: 24194 - DNA, 120 bp, Artificial Sequence
  ENSG00000033178_23 (sequence is synthesized)
atgatcaaagtaactggtggctatccatttgaagcttacaaaaattgttttcttaacttagccattccaattgtagtatttacagagacaactgaagtaaggaaaactaaaatcagaaat

SEQ ID NO: 24195 - DNA, 120 bp, Artificial Sequence
  ENSG00000033178_24 (sequence is synthesized)
ggaatatcatttacaatttgggatcgatggaccgtacatggaaaagaagatttcaccctcttggatttcataaatgcagtcaaagagaagtatggaattgagccaacaatggtggtacag

SEQ ID NO: 24196 - DNA, 120 bp, Artificial Sequence
  ENSG00000033178_25 (sequence is synthesized)
ggagtcaaaatgctttatgttcctgtaatgcctggtcatgcaaaaagattgaagttaacaatgcataaacttgtaaaacctactactgaaaagaaatatgtggatcttactgtgtcattt

SEQ ID NO: 24197 - DNA, 120 bp, Artificial Sequence
  ENSG00000033178_26 (sequence is synthesized)
gctccagacattgatggagatgaagatttgccgggacctccagtaagatactacttcagtcatgacactgattaatacaagttgtcttaacgttactccaggaccacttgattttggaaa

SEQ ID NO: 24198 - DNA, 120 bp, Artificial Sequence
  ENSG00000033178_27 (sequence is synthesized)
gagtgcacttaattcagaagctaaagaaaatcagttcataatactatggatttctctttcattaagccttaattttaagggaaacatcagtaagaaactgcactgaagaattataaaaca

SEQ ID NO: 24199 - DNA, 120 bp, Artificial Sequence
  ENSG00000033178_28 (sequence is synthesized)
ttttggggcatagcatacacttgtctaacggttcacacgtggctatgatcacaagcaactttgaactggaatgctatttacaaaagttttgtgtattaatctgtgtattaatctctctgg

SEQ ID NO: 24200 - DNA, 120 bp, Artificial Sequence
  ENSG00000033178_29 (sequence is synthesized)
ataaaaagaaggaaaaaatatgtatgaccagaacagatatggatgaagaaattgaaagcaacgaatgcaactattcaaaaagtttaattttatgaatttcttttttgtttagtcttgaag

SEQ ID NO: 24201 - DNA, 120 bp, Artificial Sequence
  ENSG00000033178_30 (sequence is synthesized)
actgattttctatgcaaatagtgtttggcatcctgcacctctgatatgatttggctttgagaatttaataccactgggaagaagtatggtagtggtggatgaagggtggatattttaaat

SEQ ID NO: 24202 - DNA, 120 bp, Artificial Sequence
  ENSG00000033178_31 (sequence is synthesized)
tgtgcagttacagtttactgtcctattacctctgctcgtttaaccagtttgttatatcactgtgtccccaaaatcaggatttttgttgatagcatcagtgttgtaggagcaataggtcag

SEQ ID NO: 24203 - DNA, 120 bp, Artificial Sequence
  ENSG00000033178_32 (sequence is synthesized)
atgagacatattaacttagactaaacgtgaacagtattatatggactctcacaacgctcttagagaatccgtgaatgtgaacagacaaatgtggctaaccatttgattcttcagtatgcc

SEQ ID NO: 24204 - DNA, 120 bp, Artificial Sequence
  ENSG00000033178_33 (sequence is synthesized)
ttctaatgtggctattttatttatgtgagactctaaacctgattgtcctaatatataaaactaaaagattttgtaaagggagtgtctttagaaatagatgaaatgtagaatgttaaaaat

SEQ ID NO: 24205 - DNA, 89 bp, Artificial Sequence
  ENSG00000033178_34 (sequence is synthesized)
agtgtctttagaaatagatgaaatgtagaatgttaaaaattattgctagggtagtcttttttttttccagaaacctaattagggtatta

SEQ ID NO: 24206 - DNA, 120 bp, Artificial Sequence
  ENSG00000033178_35 (sequence is synthesized)
gttaatgaagataaaaatttattttttaaggtctttattgagagaaactttgttttctgatatgaactattgcagatgtttttataaatactttcattaaaatgatgtaaacagtagtac

SEQ ID NO: 24207 - DNA, 120 bp, Artificial Sequence
  ENSG00000033178_36 (sequence is synthesized)
ccaacactgtaaactcagtgaaaatagtaaatgattcttttattactaagactgtcatgcattctgaagcagttggcttttttttaaccataggaagtaatttccctctagctcctttcc

SEQ ID NO: 24208 - DNA, 120 bp, Artificial Sequence
  ENSG00000033178_37 (sequence is synthesized)
ttctactctcctgctcagaccattagtaggtactttgttaaataaaaaactagattaacatcaatattactccaatttggtatcttttacactatgtattatacctactttctttttatt

SEQ ID NO: 24209 - DNA, 120 bp, Artificial Sequence
  ENSG00000033178_38 (sequence is synthesized)
tcatttacaaatagtttaaattactttatcaaccagctgtattgtttccctcttgtaaaagtaccatcaagtggggaaaatgtatgtggaagtggagagtgaatttgtatgactaaagga

SEQ ID NO: 24210 - DNA, 120 bp, Artificial Sequence
  ENSG00000033178_39 (sequence is synthesized)
ctttggaaaaaagaaattaaattttgttcacatatcctaccctttcccattgtgcatatcccaagtgtcatatttaaaactaaggttacttaaaacagaatccaggaatatcaaggctct

SEQ ID NO: 24211 - DNA, 120 bp, Artificial Sequence
  ENSG00000033178_40 (sequence is synthesized)
gtggcttggaattttagaggataggactaataaaaggacttttgcaaagaaggcttttttccacgttcactttgttttgtgttctttgaaagtaactgatacttttcgggtagttaattc

SEQ ID NO: 24212 - DNA, 120 bp, Artificial Sequence
  ENSG00000033178_41 (sequence is synthesized)
agcagtccataaatatgatccagtaacttgcttatattttattgaagtctcgacagctcttcagaagtaaatttagaacgatgctgtcagttcatatttatagatattagtgttttagca

SEQ ID NO: 24213 - DNA, 120 bp, Artificial Sequence
  ENSG00000033178_42 (sequence is synthesized)
gataaaacaaaatcaacaaaaattaagttcattttgtgattaaacctgcaaccatttttccattactttttttctatagttaatggttattgccatgatttcttctgtttggttctacta

SEQ ID NO: 24214 - DNA, 120 bp, Artificial Sequence
  ENSG00000033178_43 (sequence is synthesized)
agctagaaagccagggtgaagttaatgataattcccattattttatttctgtaccatgagattgctgttgatgactgaaataccaggtgcaaaaattaatgatttgatttttgtacagtt

SEQ ID NO: 24215 - DNA, 120 bp, Artificial Sequence
  ENSG00000033178_44 (sequence is synthesized)
tcaatgagtattttttacttattaaaaataaattaagaaatgtaagaatatctttgtaaatcatgtttcataagttgactccagagattctgattttgctgtttattttgtgagtaatgt

SEQ ID NO: 24216 - DNA, 120 bp, Artificial Sequence
  ENSG00000033178_45 (sequence is synthesized)
tgctttggtgtttcctgattttcaagtttgcaatcatggagatacagcagttattaggtgtggaaggacattacctcaaatgtcctcagatggctccaggaaattcttttaaaacagttg

SEQ ID NO: 24217 - DNA, 120 bp, Artificial Sequence
  ENSG00000033178_46 (sequence is synthesized)
gagagaaatagtcgtgaccatgtaaaacctagaggatctggtaaatcccatactactggttagggatttgtaaagtccatttctttttagagttcaaagcagttctgttacttgtccata

SEQ ID NO: 24218 - DNA, 120 bp, Artificial Sequence
  ENSG00000033178_47 (sequence is synthesized)
agttcctcataaattgtcccaaaggtaggacatggaaataaatgtatatctttattttttaatctactatgtcacactctggtgatattcatggaacattaaaaaagcaactatgtttat

SEQ ID NO: 24219 - DNA, 120 bp, Artificial Sequence
  ENSG00000033178_48 (sequence is synthesized)
tttataattagtaaaatgaagatagaaaattgttcttttgaaatttttagggaaaaaaaaaatctcgtgacctaaatctttccactataatgaatattcattgtgattgcaaatatctaa

SEQ ID NO: 24220 - DNA, 120 bp, Artificial Sequence
  ENSG00000033178_49 (sequence is synthesized)
ttttatataatcactgtgtatggatttagcgattttacttttcatagattcaaaaacatataatctgaatgctttctctgaaaaaaaaaaaatcagagttgagctcttgaggatcagagt

SEQ ID NO: 24221 - DNA, 120 bp, Artificial Sequence
  ENSG00000033178_50 (sequence is synthesized)
gaggatcagagttaagtatccattgataatatgtgttcattttgctctatgtcataactttgtttttttattgagaaatatatatttttcaaaaacacatatatattcaaaaatacataa

SEQ ID NO: 24222 - DNA, 120 bp, Artificial Sequence
  ENSG00000033178_51 (sequence is synthesized)
cagttcaaggaataattttaaagcaactatataactagcactcagcttagtagaatatattgacagcagttcagaaattacacatgtagttccttcccagtcacaaccagctccctgcca

SEQ ID NO: 24223 - DNA, 120 bp, Artificial Sequence
  ENSG00000033178_52 (sequence is synthesized)
cgtaccctttggtaattaccactatcctaccttgtatgataattgtctctttgtttttatagtgttaccacctatgtgtgtaaacttaaacaatacagtttgcttgtttttgagttttat

SEQ ID NO: 24224 - DNA, 120 bp, Artificial Sequence
  ENSG00000033178_53 (sequence is synthesized)
ttaaaatcatacattcttttgtagctgcatttgttcaagatgggattgattcatgttggttgtagctgtactttattcttcattatgtctgtgtaatttacttttctgttaatatgccac

SEQ ID NO: 24225 - DNA, 120 bp, Artificial Sequence
  ENSG00000033178_54 (sequence is synthesized)
aatttatttactgtagacaattgggatgtttttagtttcaggcaattacagtttcacaatgaacatcattttatgtaactcctagtacaaagagtatatatttaggagtagaattttttg

SEQ ID NO: 24226 - DNA, 120 bp, Artificial Sequence
  ENSG00000033178_55 (sequence is synthesized)
gtcatagggtattcatatcttaaattttattagatgattacaaatttttttctaagcattagtatgttggttggttttgtgttgctataaaggaatatccaagactcggtaattcataaa

SEQ ID NO: 24227 - DNA, 120 bp, Artificial Sequence
  ENSG00000033178_56 (sequence is synthesized)
gaaaaaaggtttatttggctcatggttcagcaggttgtacaaacattgcaccagcatccctgcaatcatggcagaaggcaaaggaggaactggcgtatcacatggctagaggagcaagag

SEQ ID NO: 24228 - DNA, 120 bp, Artificial Sequence
  ENSG00000033178_57 (sequence is synthesized)
agaaatagaggaagtcccagatcatttttaagaatcagatctcacattaactcatggagcaagaactcgtcatctcaacgagggcaccaagccatttatgagggatccagatatccatcc

SEQ ID NO: 24229 - DNA, 120 bp, Artificial Sequence
  ENSG00000033178_58 (sequence is synthesized)
aacactggggatcacatttcaacatgatatttgcaggggacaaatatccaaaccatatttctccatatcttggtcagtgctggtgttaacagtttttgtttttaattttgccaatctggt

SEQ ID NO: 24230 - DNA, 120 bp, Artificial Sequence
  ENSG00000033178_59 (sequence is synthesized)
gttaacagtttttgtttttaattttgccaatctggtggatgtgcaattgtatctcattgaagtgtcactctgcatttctctattacctgtgaagttgagtattttttcataagtttattg

SEQ ID NO: 24231 - DNA, 120 bp, Artificial Sequence
  ENSG00000033178_60 (sequence is synthesized)
gccaatttgactttctgtttttgtaaagtatcttgtcaggactgccacacgtttttgttgtgttgctaatctttttcctcattgattcataaaggatctttataaatcttattctttgtt

SEQ ID NO: 24232 - DNA, 120 bp, Artificial Sequence
  ENSG00000033178_61 (sequence is synthesized)
ggctgtatagttgccaatatcttctcccaatttgtggcttgcctttccctcccttatgatgttctttgataaaaacaatttattaatggttaagtactaggaagtatgagtgttttaaaa

SEQ ID NO: 24233 - DNA, 120 bp, Artificial Sequence
  ENSG00000033178_62 (sequence is synthesized)
ttagagcgtgagttgttttaaaaaaccattccctaccctggagtcatgaagatagtcttatatatcgtcttcttaaagctttagttttgcctttcatatttaaatttttttcatgaggaa

SEQ ID NO: 24234 - DNA, 120 bp, Artificial Sequence
  ENSG00000033178_63 (sequence is synthesized)
ttaatttggtgtatgctaggagatgcctcactaccgtttattgaaaaatctgggttttattcctcctttctatagtgccaccaaagtcatgtattatacccgtatgtgaatacagatttc

SEQ ID NO: 24235 - DNA, 90 bp, Artificial Sequence
  ENSG00000033178_64 (sequence is synthesized)
ccaaagtcatgtattatacccgtatgtgaatacagatttcatcaacatctgttgatgaaaagagtcaaactctgtaaatattttcagaga

SEQ ID NO: 24236 - DNA, 120 bp, Artificial Sequence
  ENSG00000033178_65 (sequence is synthesized)
ccaggtggtcagagtacatcttggttttatatagaaggcatgagacatcaaatacgtttaagaaatgcattggtttggttcagaaaggcaggacaactcaaagcgggggcttccagggta

SEQ ID NO: 24237 - DNA, 120 bp, Artificial Sequence
  ENSG00000033178_66 (sequence is synthesized)
taggttaatttaaaacattttctggttgacaattggtcgagtttatctgaagacctgggatcaataggaaggaaatattcaggttaaataagagattgtggagaacaagttttattgtgc

SEQ ID NO: 24238 - DNA, 120 bp, Artificial Sequence
  ENSG00000033178_67 (sequence is synthesized)
agaggaaactctcagcagacttcaaagagagcaggttgtaaagtgtttcttattggacctaaaaggatgcctgggtcttagttgattatctcctggatttggaaaggaaggaaggacaaa

SEQ ID NO: 24239 - DNA, 120 bp, Artificial Sequence
  ENSG00000033178_68 (sequence is synthesized)
aaaaaaatgggtaaaggggaaaggggattctttatagaatgtagatttttcccacaagggatggctttgcagggccatttcaagatatggcagagaaacatatttcggggtaaaatattt

SEQ ID NO: 24240 - DNA, 88 bp, Artificial Sequence
  ENSG00000033178_69 (sequence is synthesized)
caagatatggcagagaaacatatttcggggtaaaatattttgattttctttcttgttatgccagagtcagattggaaagttaagtcac

SEQ ID NO: 24241 - DNA, 120 bp, Artificial Sequence
  ENSG00000033178_70 (sequence is synthesized)
agacaggaatttgggcaagataacaaaatatcagagcttagtccttacatctctttctaaacattttttcccttttttctatccctgtgctagtataccatcatcatcatcattgtagct

SEQ ID NO: 24242 - DNA, 120 bp, Artificial Sequence
  ENSG00000033178_71 (sequence is synthesized)
gatatattcttgatatctggccaaacaaatcctcccaacttattgttcttttagagtatcttggttattctcagccccttgtattttcagttctcatatttctaattgaaagcatgtaaa

SEQ ID NO: 24243 - DNA, 120 bp, Artificial Sequence
  ENSG00000033178_72 (sequence is synthesized)
tttgtcactcctgcagtttctaattgtcttgctgaaattttcaatttcttatctgcttcaaaatgaaaagcataattattttctagtctgtctaataattccagaatcaaaacccgcctg

SEQ ID NO: 24244 - DNA, 120 bp, Artificial Sequence
  ENSG00000033178_73 (sequence is synthesized)
tgggtctgtttttattttgtttgttctagtcttcattcttactgtcttgtctccttgtgtgcctggttacctttaattatttaccaatattgtttgaaaaaactagaaataacttgatgc

SEQ ID NO: 24245 - DNA, 120 bp, Artificial Sequence
  ENSG00000033178_74 (sequence is synthesized)
tcagaatgatatttttatcctccacagagttttttgcttctggcaggtacctgcattagtaatttaggattattttgatccagtttcagatactgaaattttccaggtcacctaggtgac

SEQ ID NO: 24246 - DNA, 120 bp, Artificial Sequence
  ENSG00000033178_75 (sequence is synthesized)
tgaaagctgagccacagactgtggtaatgctcttctgttcatccttatttctagggttcaaccattcagggtttcaaagcatggtttggagttaccaggcccttacctcttcactgaccc

SEQ ID NO: 24247 - DNA, 120 bp, Artificial Sequence
  ENSG00000033178_76 (sequence is synthesized)
tggactctttttgaatctttagccccttagctctatctactcaacttcccagtggccttttgcaatctataaatactcctaacacagtggtcccaaatgaatggttcatttttctgaatt

SEQ ID NO: 24248 - DNA, 120 bp, Artificial Sequence
  ENSG00000033178_77 (sequence is synthesized)
tctatcttttctcagatattattggcatggtaattattcaccaacttatcagctccctgctgccttcctacatctttgaaaagtatattttatccagcttttctaaatgttttcaagtga

SEQ ID NO: 24249 - DNA, 120 bp, Artificial Sequence
  ENSG00000033178_78 (sequence is synthesized)
gaatgttaatccaaattacttagcccacattatttcctgttgattatgtgtaaaatacagttggtttatttgtattgtttttgtacctggaaacaataaactctgtagtgattctctaaa

SEQ ID NO: 24250 - DNA, 120 bp, Artificial Sequence
  ENSG00000033178_79 (sequence is synthesized)
gccttattgtggattttagcaaccctgaggtaaataaacactttgcaggtttgagagaggcagcagaatcagagatgagaattagtgagtgattatgaagttaaaatggaataaccatgt

SEQ ID NO: 24251 - DNA, 120 bp, Artificial Sequence
  ENSG00000033178_80 (sequence is synthesized)
aatgataaagtaataggaaaaagtttcacttttataatgatttgccaactttgataattataagacgatttcaataacttgtacaaagatgatcttattaaaagattttctgaatcgtac

SEQ ID NO: 24252 - DNA, 120 bp, Artificial Sequence
  ENSG00000033178_81 (sequence is synthesized)
cattttatacaatacatatttcttaccaaaaaagccttgagtatgtattctatttttttttaaaatggatgtaattttgtagcagtaaatgtgataaggaaggaactaacagtttccaaa

SEQ ID NO: 24253 - DNA, 120 bp, Artificial Sequence
  ENSG00000033178_82 (sequence is synthesized)
tttgtaaattttaataaggaaaggggattagatcatttaccttcatggccttgaggttaagtcatttaacttctaaccttcaggtttcttatttgttaaatagagttaataacagtatta

SEQ ID NO: 24254 - DNA, 120 bp, Artificial Sequence
  ENSG00000033178_83 (sequence is synthesized)
agctaatgtgtttattatgatggttaaataatgttttaaaagtatttagcccagtgcctgggacatacaaccactcagtaaatgttggccgatttttaatgttctcaataggcaccttta

SEQ ID NO: 24255 - DNA, 120 bp, Artificial Sequence
  ENSG00000033178_84 (sequence is synthesized)
gagattcacacagctatgcttgccttggaccagtttcaggagaaatacagtcgcaagccaaatgttgggtaatgttttaagtttaaaaataagtattttcctttttataaaagtagtagt

SEQ ID NO: 24256 - DNA, 120 bp, Artificial Sequence
  ENSG00000033178_85 (sequence is synthesized)
tcagaaattataatttaaaaagtaactatgccctttgtaattacaataccaatagatataccaagctgtgcaaacatttattatgactttctggtccttttcctggtgggagtggagaaa

SEQ ID NO: 24257 - DNA, 120 bp, Artificial Sequence
  ENSG00000033178_86 (sequence is synthesized)
tttggtttataaaagtggaatcatactaaatgtgaatttttccactttgaagcctttaaaaattaaagcttcttaaaacaaaaaaaattctgagaattactgaattattaacacatagta

SEQ ID NO: 24258 - DNA, 120 bp, Artificial Sequence
  ENSG00000033178_87 (sequence is synthesized)
attttttttttaactttatatcctgttaagtcagagtactgttggagaaggtttttgctttttatatttgggattaaatcttgggattgggtgttgtggctcacgcctatgatcccagga

SEQ ID NO: 24259 - DNA, 73 bp, Artificial Sequence
  ENSG00000033178_88 (sequence is synthesized)
tgctaaaaatacagaaattaccaggcgtggtggtgcatgccgaggaggcagagggtgcagtgagccaagattg

SEQ ID NO: 24260 - DNA, 120 bp, Artificial Sequence
  ENSG00000033178_89 (sequence is synthesized)
ataagtgttctgtatattagtattctcttatccttcacatccagctttgctactctgtggcattagacaacttttttcagtttgttctgttttaatttataaatctataaaatagagtta

SEQ ID NO: 24261 - DNA, 120 bp, Artificial Sequence
  ENSG00000033178_90 (sequence is synthesized)
acctaccttcatagggttattgtgaacattaaataatttaattttgtaaagtacttagaaatgccatgtgacatatagtaattaatatttgctgctatttttttaactgttactattatt

SEQ ID NO: 24262 - DNA, 120 bp, Artificial Sequence
  ENSG00000033178_91 (sequence is synthesized)
ttctgttatgatttacttgatttgttaacttaaacttatatatgttagctttcttatataagtcacctgttttatatattatacattcatatctctttatcacatttcgtacatcagatt

SEQ ID NO: 24263 - DNA, 120 bp, Artificial Sequence
  ENSG00000033178_92 (sequence is synthesized)
atcagatttagatttaaacatttcacctagaaaatggtttttttgtgtgtgttatgatgccagtgcctgcttgtcaacagttttatttgagcagctataaacatggtgatgtttgtgcaa

SEQ ID NO: 24264 - DNA, 120 bp, Artificial Sequence
  ENSG00000033327_0 (sequence is synthesized)
cagctgcccgagcccgcgccctcgtccgcgcgacccggcggggggctccaggccggcagcatgagcggcggcggcgacgtggtgtgcaccggctggctgaggaaatcgcctcccgagaag

SEQ ID NO: 24265 - DNA, 120 bp, Artificial Sequence
  ENSG00000033327_1 (sequence is synthesized)
ggtgtgcaccggctggctgaggaaatcgcctcccgagaagaagttgaggcgctatgcctggaagaaacgctggtttatcctgcggagtggccggatgagcggtgacccagatgttctgga

SEQ ID NO: 24266 - DNA, 120 bp, Artificial Sequence
  ENSG00000033327_2 (sequence is synthesized)
atactacaagaacgatcactccaagaagcctctgcggatcatcaacctgaacttctgtgagcaggtagatgcaggcctgacctttaacaagaaggagctgcaggatagttttgtgtttga

SEQ ID NO: 24267 - DNA, 120 bp, Artificial Sequence
  ENSG00000033327_3 (sequence is synthesized)
catcaagaccagtgaacgcaccttttacctggtggctgagacagaagaggacatgaataagtgggtccagagcatctgccagatctgtggcttcaatcaggctgaggagagcacagactc

SEQ ID NO: 24268 - DNA, 120 bp, Artificial Sequence
  ENSG00000033327_4 (sequence is synthesized)
cctgagaaatgtttcctcagccggtcatggcccccgctcttctccagctgagctcagcagctctagccagcaccttctccgagagcgcaagtcctcagccccatcacactccagccagcc

SEQ ID NO: 24269 - DNA, 120 bp, Artificial Sequence
  ENSG00000033327_5 (sequence is synthesized)
aactctgttcacgtttgaaccccctgtgtcaaaccacatgcagcccaccttgtccaccagcgcacctcaggagtatctctacttgcaccagtgcataagccgaagagcagaaaatgcaag

SEQ ID NO: 24270 - DNA, 120 bp, Artificial Sequence
  ENSG00000033327_6 (sequence is synthesized)
gagtgccagcttctctcagggcaccagagcctcttttctcatgaggagtgacacagctgtacaaaaacttgcccagggcaatggacactgtgtcaacgggatcagtggtcaagtccatgg

SEQ ID NO: 24271 - DNA, 120 bp, Artificial Sequence
  ENSG00000033327_7 (sequence is synthesized)
cttctatagccttcccaagccgagccggcacaatacagaattcagagacagtacctacgacctcccccgcagcctggcctcccatggccacaccaagggcagcctcacaggctccgagac

SEQ ID NO: 24272 - DNA, 120 bp, Artificial Sequence
  ENSG00000033327_8 (sequence is synthesized)
agataatgaggatgtgtacaccttcaagacgcccagcaacaccctgtgcagggagttcggggacctcctggtagacaatatggatgttccggccaccccactctcagcctaccagatccc

SEQ ID NO: 24273 - DNA, 120 bp, Artificial Sequence
  ENSG00000033327_9 (sequence is synthesized)
taggacattcactctggacaaaaaccacaatgccatgacagtggccactcctggggactcagccatagctcccccaccccgcccccccaagccaagtcaggcagaaacacctcgatgggg

SEQ ID NO: 24274 - DNA, 120 bp, Artificial Sequence
  ENSG00000033327_10 (sequence is synthesized)
cagtcctcagcagagaccgccaatcagtgaaaatagcagatctgtcgctgccaccatccccagacgcaacaccctccctgcaatggacaacagccgacttcaccgagcttcttcctgtga

SEQ ID NO: 24275 - DNA, 120 bp, Artificial Sequence
  ENSG00000033327_11 (sequence is synthesized)
gacctacgagtacccacagcgtggtggagagagtgcaggccggtctgctgaatccatgagtgatggagttggctctttcctgccagggaaaatgattgtgggccgatcggacagcaccaa

SEQ ID NO: 24276 - DNA, 120 bp, Artificial Sequence
  ENSG00000033327_12 (sequence is synthesized)
ttctgaagacaactatgtgcccatgaatccaggttcttccaccctgttggccatggaacgagcaggtgataattcccagagcgtctacatcccaatgagcccaggggcccatcactttga

SEQ ID NO: 24277 - DNA, 120 bp, Artificial Sequence
  ENSG00000033327_13 (sequence is synthesized)
ctcacttggctacccatcaacaacccttcctgtgcaccgaggccccagcagaggaagtgagattcagccaccccctgtcaaccgcaacctcaaacctgatcggaaagcaaagccaacacc

SEQ ID NO: 24278 - DNA, 120 bp, Artificial Sequence
  ENSG00000033327_14 (sequence is synthesized)
acttgacctgaggaacaacaccgtcatcgatgaactccccttcaagtcacctatcaccaagtcttggtctagggccaaccacaccttcaactccagctcctcccagtactgccgccccat

SEQ ID NO: 24279 - DNA, 120 bp, Artificial Sequence
  ENSG00000033327_15 (sequence is synthesized)
ctccacccagagcatcaccagcacagactcaggagacagcgaagagaactatgtccctatgcaaaacccagtgtctgcatctcccgttcccagtggcacgaacagtcctgcccctaagaa

SEQ ID NO: 24280 - DNA, 120 bp, Artificial Sequence
  ENSG00000033327_16 (sequence is synthesized)
gagcaccggcagcgttgattatctggccctggacttccagccgagctccccaagcccccaccgcaagccatctacttcatccgtcacctctgatgagaaggtggactacgttcaggtgga

SEQ ID NO: 24281 - DNA, 120 bp, Artificial Sequence
  ENSG00000033327_17 (sequence is synthesized)
caaggagaagacccaggccctgcagaacaccatgcaggagtggacagacgtgcggcagtcctcagagccttccaagggtgccaagctgtgatgagagggccaccgcagagcccaggaggc

SEQ ID NO: 24282 - DNA, 120 bp, Artificial Sequence
  ENSG00000033327_18 (sequence is synthesized)
agcatctccagagctggcccttcccatctcccctctcccctctcccgttcttcctcccatccacctcctctctactctgccagtctcagccttcaaagcacttgacatcagggaccctga

SEQ ID NO: 24283 - DNA, 120 bp, Artificial Sequence
  ENSG00000033327_19 (sequence is synthesized)
acccttcccctgggaggtgagggcctgatcaaggcacctcctctgcccactcggggcccagctgtgatttttatcagtaatggccatgcctccacccaccttagttaggagctacttcca

SEQ ID NO: 24284 - DNA, 120 bp, Artificial Sequence
  ENSG00000033327_20 (sequence is synthesized)
aaaagcatccttcagcctcttcctgtcctttagacctgactctctaccagatgtttggagggaagggctggggctctgagccagattccacacctcacgttcagtcacagccctcagcta

SEQ ID NO: 24285 - DNA, 120 bp, Artificial Sequence
  ENSG00000033327_21 (sequence is synthesized)
tcttccctccggccactgggctacctctccttcagtcccagaagacaagtctcaccaacccagggagtcaaggaccagcaaaccaaagtggataatggactttttcattcctgtttttct

SEQ ID NO: 24286 - DNA, 120 bp, Artificial Sequence
  ENSG00000033327_22 (sequence is synthesized)
tggcaggagagaagcaaggccactaaaagaggagatggtggagacggaggctcagcagtggtcttgaggggtaaaggacttagatgcccagatgaagagggaaagctgacatctgcaggg

SEQ ID NO: 24287 - DNA, 120 bp, Artificial Sequence
  ENSG00000033327_23 (sequence is synthesized)
aacccactttgaggctgaggccatggcaggacagctgctgtggggtgcagaggcagaagatgaaggacaaaaggaagggaaaactgatggccaacctagagcagcaaggagcagggcttg

SEQ ID NO: 24288 - DNA, 120 bp, Artificial Sequence
  ENSG00000033327_24 (sequence is synthesized)
gagctcgggtggtggagatgacaaggacactgtggggtctgggtccccagaactctggagctacaggccactctaggcccaagggctagtcctcttccccagtcccctcagaggcccccg

SEQ ID NO: 24289 - DNA, 120 bp, Artificial Sequence
  ENSG00000033327_25 (sequence is synthesized)
tggtgtggatgggggtgatgcagggactgaggggaaccctgggacaggcacaggctgggcagaggcacagggcagtgcaggggactctgcagtggggtcgggaagtgagtttctttgcag

SEQ ID NO: 24290 - DNA, 120 bp, Artificial Sequence
  ENSG00000033327_26 (sequence is synthesized)
tgagcagtgcagtggaagtcgggcacagaggtagcagacagatgtgaagcagtggtgaaggccatgtagcaagtggggaaatacatccaaagggcctgggagttggggggtgcccaacgc

SEQ ID NO: 24291 - DNA, 120 bp, Artificial Sequence
  ENSG00000033327_27 (sequence is synthesized)
aatccttgggggtgcagggtggagcagaaagtgaaggagggacacgtgcaagagtggtgtgcatggtggtgtgacatgaggaccgttcctaggatgggacagtgggtcaggcaggacaag

SEQ ID NO: 24292 - DNA, 120 bp, Artificial Sequence
  ENSG00000033327_28 (sequence is synthesized)
gagaaagcagggcagaatgatgcctagaggaccacatcaggcatggctgacagcttgtgcccatgggctgtggcgtatgtcagatcgcagggtaggaacgagtctggcctggtgccggcc

SEQ ID NO: 24293 - DNA, 120 bp, Artificial Sequence
  ENSG00000033327_29 (sequence is synthesized)
cagtgtttcctcagctcatccgccctctgttgctccctagcattccaggagccatcttggactctcctccccaggtttgaaaggccatcagattagcagggacggggtgtagggcatcac

SEQ ID NO: 24294 - DNA, 120 bp, Artificial Sequence
  ENSG00000033327_30 (sequence is synthesized)
ccaaggttccttctcttaaactaagggtgggggatctgaatgtttttatgttgactgttcttgactaaattttcaagagtttcagaagcaacaggacagaccagacgtttcattctaccc

SEQ ID NO: 24295 - DNA, 120 bp, Artificial Sequence
  ENSG00000033327_31 (sequence is synthesized)
tggggcgaacagaacttcttcctcccaaacaatgacttcctgccatgtttgatggggacagctaccactgtcctctgcccccattcccctttcagctcccatgagcatgcatagttcacc

SEQ ID NO: 24296 - DNA, 120 bp, Artificial Sequence
  ENSG00000033327_32 (sequence is synthesized)
agaccaatggcctagccattctctaagtcccatcctggaagaagttatttcttcaagagctgcacctctcctcctagcattagtttagatcaactcaaggagtatttattaatggctgct

SEQ ID NO: 24297 - DNA, 120 bp, Artificial Sequence
  ENSG00000033327_33 (sequence is synthesized)
gtctccagtttctggggttaagcactaaggacacaagaatcaatcagaccttctccctgaacttaagatagccacaatcagaaaaaggacaaggacatgagacagtggtgatggccatca

SEQ ID NO: 24298 - DNA, 120 bp, Artificial Sequence
  ENSG00000033327_34 (sequence is synthesized)
gacagagacttcaaatgctgatggagggcagaggaagtacttagggaggttggtgtcagaggcaggagtgggggatcagggaaggtggattctaggaaaagggagtgcctgaggtaggcc

SEQ ID NO: 24299 - DNA, 120 bp, Artificial Sequence
  ENSG00000033327_35 (sequence is synthesized)
ttagaaggggatgagtcagatttttacagaggaggagggcagggcttgggtccagtggaggaagaaggaaggagaggcttggaaagccttgtgtcttgggaacaaaaggcctttgagcat

SEQ ID NO: 24300 - DNA, 120 bp, Artificial Sequence
  ENSG00000033327_36 (sequence is synthesized)
atgggtccagccactcagaagtgtaggggccatgccttggtgttccaataagtgaatggaagcagtggtggtagctacactgggcagagttggcagggtgctggttcactctgcccagcc

SEQ ID NO: 24301 - DNA, 120 bp, Artificial Sequence
  ENSG00000033327_37 (sequence is synthesized)
ctgaatgtgtgccttaaaggccccctacaaggggccccatacgacagagcttttaactggtgccttccctgtacccgcagcagccacaagtgggcccagactattgcagcctcccataaa

SEQ ID NO: 24302 - DNA, 120 bp, Artificial Sequence
  ENSG00000033327_38 (sequence is synthesized)
catgtgagcatgttctgagtgtgccatgatgtgagtggacctggctggaatcttcggagagcgactgaggtgttcaaatcgaatctcccaggaggcttccttccagccccctattctggt

SEQ ID NO: 24303 - DNA, 120 bp, Artificial Sequence
  ENSG00000033327_39 (sequence is synthesized)
aactaccaggaggcttccttccagccccctattctggtaactaccaaaatccctcgggtgcaagtgtaggggtagagatggaaggatgagaggtgaaattgaccttttgaaagcaaagct

SEQ ID NO: 24304 - DNA, 120 bp, Artificial Sequence
  ENSG00000033327_40 (sequence is synthesized)
ctggctcacaggccccaaactaccagccgtatctagcatatccccaccctccacccactacctcctccaacaaaggagtcaactcagttgaaaaaactggtcctttggcctatccatggg

SEQ ID NO: 24305 - DNA, 120 bp, Artificial Sequence
  ENSG00000033327_41 (sequence is synthesized)
tcaaagtccacctctcctgggggcctggagaggactgagcctacggaaaggggataccttcccactcagcactgcttcacacaggccccctgcctggggctctccaaggagccttcttca

SEQ ID NO: 24306 - DNA, 120 bp, Artificial Sequence
  ENSG00000033327_42 (sequence is synthesized)
cccacttccagctccacttctgcaaggttaagtcaagtgagaacgatgagaaatagggagatggtgtctccttaagtccttgatctgcctgtctgtggaatgggaggttggattagctgc

SEQ ID NO: 24307 - DNA, 120 bp, Artificial Sequence
  ENSG00000033327_43 (sequence is synthesized)
gctgaggtcccatccacagctggtgctcagctgcttgaaggggagactccctcctctgtaacttctttctgggggattggggtgggcagtacctatccccagtcccctcctagcttgact

SEQ ID NO: 24308 - DNA, 120 bp, Artificial Sequence
  ENSG00000033327_44 (sequence is synthesized)
ttagtggtttccaatgtagaagttaacaaagtatgccccattcctgtgacaaaagcacaaccattctgaagttactggagcatgggctcagctcatcctccctctggccccttctcccat

SEQ ID NO: 24309 - DNA, 120 bp, Artificial Sequence
  ENSG00000033327_45 (sequence is synthesized)
ggggacatctcggcccagcacccctatcccatttccagagttcttccttccccatctgggccttcataaaatgcaggggaagccagactggtctcaggagcgctaaagcccttccgtggg

SEQ ID NO: 24310 - DNA, 120 bp, Artificial Sequence
  ENSG00000033327_46 (sequence is synthesized)
gggtcgtctttctgggactagccctgctgtttaggacctgggaccacaatggggtacctgccgagggggtccccaagagatccaggctgtcatgtgatttatggtggcatgtgttgtgta

SEQ ID NO: 24311 - DNA, 120 bp, Artificial Sequence
  ENSG00000033327_47 (sequence is synthesized)
tttgttggctacttgtgtcttgaaatctagaattatttcacgcagaattgtcactgtttgtcaggaagagaaaatgggctagtggaagcccagtcttgagttcttgtcttgttaccattt

SEQ ID NO: 24312 - DNA, 120 bp, Artificial Sequence
  ENSG00000033327_48 (sequence is synthesized)
aaaattgacatttaattttcaaatcactgttggtgcctaatcacttaagttattaatttattctgttgtattcttttttttaaattgtaacatatttatccggtgggtgggacaggagtg

SEQ ID NO: 24313 - DNA, 120 bp, Artificial Sequence
  ENSG00000033327_49 (sequence is synthesized)
tgttcaagtgggtcatgtttttgctgtggtgacacatggtacaggcttggagcttgcaggtccctttctactgtggtgttggagcaggacaataaagtccactagaaatgcaccccagaa

SEQ ID NO: 24314 - DNA, 120 bp, Artificial Sequence
  ENSG00000033327_50 (sequence is synthesized)
gtagtaggtccgtctcctcctcccgccgagggacgccagagttaaggagcttcttgctgggaaggggtccctcctttcagccggaacctgacccgcagaatgtatcggaaatgcctggaa

SEQ ID NO: 24315 - DNA, 120 bp, Artificial Sequence
  ENSG00000033327_51 (sequence is synthesized)
gaaattttgagaagtggtgggatgaagaagatccctgaagagaggagtaactgagacaaaggcgaggctagcaatagagagacaagtgagggaattagacctttggtatcatcatgaaaa

SEQ ID NO: 24316 - DNA, 120 bp, Artificial Sequence
  ENSG00000033327_52 (sequence is synthesized)
agttgaggcgctattaccttctgtctgacttcaaccccacatctgcttgacaagaattaactcaaatatctcttcttaacacctacctgattctggcatacagcctggaagaaacgctgg

SEQ ID NO: 24317 - DNA, 120 bp, Artificial Sequence
  ENSG00000033327_53 (sequence is synthesized)
tttctcatagggggttgaggtgaggcccttggattcctggagcattgagagcaggctctagctaaggtttcctgttggaagagcgttcatagataaagggtaaagagtgtgaaggggttg

SEQ ID NO: 24318 - DNA, 120 bp, Artificial Sequence
  ENSG00000033327_54 (sequence is synthesized)
tagttcaaatgacctcttaaacatggccagtgacagttacagaactctaaatggtgtttaatctacttacaagcattttatattaagtcacccttaaatgggaacatactcattgaaaat

SEQ ID NO: 24319 - DNA, 120 bp, Artificial Sequence
  ENSG00000033627_0 (sequence is synthesized)
ggcggcgcaggggcggggctttacggacgcaagcacgtcgaagcgctgctcctggagccgcggagggtgcgggtttggctgcggtggtttctgtggcggttgctgtggcggagtttggag

SEQ ID NO: 24320 - DNA, 120 bp, Artificial Sequence
  ENSG00000033627_1 (sequence is synthesized)
gttggagagaaatccaggtactcactagactggtaccttctgccaccatgggggagcttttccggagtgaagaaatgacactggcccagctttttctacagtcagaggctgcttattgtt

SEQ ID NO: 24321 - DNA, 120 bp, Artificial Sequence
  ENSG00000033627_2 (sequence is synthesized)
gtgtcagtgaattaggagaacttggaaaggttcagtttcgtgacttaaatccagatgtgaatgttttccaacggaaatttgtgaatgaagttagaagatgtgaagaaatggatcgaaagc

SEQ ID NO: 24322 - DNA, 120 bp, Artificial Sequence
  ENSG00000033627_3 (sequence is synthesized)
ttcgatttgttgagaaagagataagaaaagctaacattccgattatggacaccggtgaaaacccagaggttcccttcccccgggacatgattgacttagaggccaattttgagaagattg

SEQ ID NO: 24323 - DNA, 120 bp, Artificial Sequence
  ENSG00000033627_4 (sequence is synthesized)
aaaatgaactgaaggaaatcaacacaaaccaggaagctctgaagagaaacttcctggaactgaccgaattaaaatttatacttcgcaaaactcagcaattttttgatgagatggcggatc

SEQ ID NO: 24324 - DNA, 120 bp, Artificial Sequence
  ENSG00000033627_5 (sequence is synthesized)
cagacttgttggaagagtcctcatccctcttggagccaagtgagatgggaagaggcactcctttaagacttggcttcgtggctggtgtcattaaccgggagcgcatccctacttttgagc

SEQ ID NO: 24325 - DNA, 120 bp, Artificial Sequence
  ENSG00000033627_6 (sequence is synthesized)
gcatgctttggcgggtatgccggggaaatgtgttcctgcgacaggctgaaatcgagaaccccctggaggatcctgtgactggcgactacgtgcacaagtctgtgtttatcattttcttcc

SEQ ID NO: 24326 - DNA, 120 bp, Artificial Sequence
  ENSG00000033627_7 (sequence is synthesized)
aaggcgatcagctgaaaaacagagtcaagaaaatctgtgaagggttccgagcctcactctatccctgtcctgagacaccacaggagaggaaggaaatggcttctggagtgaataccagga

SEQ ID NO: 24327 - DNA, 120 bp, Artificial Sequence
  ENSG00000033627_8 (sequence is synthesized)
ttgatgatctccaaatggttctgaatcaaacggaggatcaccgccagagggttctgcaggcagctgctaagaacatccgtgtctggttcatcaaagtgcggaagatgaaggccatctatc

SEQ ID NO: 24328 - DNA, 120 bp, Artificial Sequence
  ENSG00000033627_9 (sequence is synthesized)
acaccctgaacctgtgcaacatagatgtgactcagaaatgcttgattgcagaggtctggtgccctgtcaccgaccttgactccatccagtttgcactcagaaggggcacggaacacagtg

SEQ ID NO: 24329 - DNA, 120 bp, Artificial Sequence
  ENSG00000033627_10 (sequence is synthesized)
gttccactgtaccttccattttgaacaggatgcagacaaaccagactcccccaacctataacaaaaccaacaagtttacctatggctttcagaacatagtagatgcttatggaattggaa

SEQ ID NO: 24330 - DNA, 120 bp, Artificial Sequence
  ENSG00000033627_11 (sequence is synthesized)
cttaccgagagataaatccagctccgtatactattatcacgttcccttttctatttgctgtgatgtttggagacttcggtcatggcattttaatgaccctttttgctgtgtggatggtac

SEQ ID NO: 24331 - DNA, 120 bp, Artificial Sequence
  ENSG00000033627_12 (sequence is synthesized)
gaatgagaatgagatgtttagcactgtgttcagtggtcgatacattattttattgatgggtgtgttctccatgtacactggcctcatctacaatgattgcttttccaagtctcttaatat

SEQ ID NO: 24332 - DNA, 120 bp, Artificial Sequence
  ENSG00000033627_13 (sequence is synthesized)
ctttgggtcatcctggagtgtacggccgatgtttacttataattggactgaagagacgcttcgggggaaccctgttctacagctgaacccagccctccctggagtgtttggtggaccata

SEQ ID NO: 24333 - DNA, 120 bp, Artificial Sequence
  ENSG00000033627_14 (sequence is synthesized)
cccttttggcattgatccaatttggaacattgctaccaataaactgacgttcttgaactcctttaagatgaagatgtctgttatccttggtatcatccatatgctgtttggagtcagcct

SEQ ID NO: 24334 - DNA, 120 bp, Artificial Sequence
  ENSG00000033627_15 (sequence is synthesized)
gagtctgttcaaccatatctatttcaagaagcccctgaatatctactttggatttattcctgaaataatcttcatgacctctttgtttggctatttggttatccttattttttacaagtg

SEQ ID NO: 24335 - DNA, 120 bp, Artificial Sequence
  ENSG00000033627_16 (sequence is synthesized)
gacggcctatgatgctcatacctctgagaatgcaccaagccttctgatccatttcataaacatgttcctcttttcctacccagagtctggttattcaatgttgtattctggacagaaagg

SEQ ID NO: 24336 - DNA, 120 bp, Artificial Sequence
  ENSG00000033627_17 (sequence is synthesized)
aattcagtgtttcctggtagtggttgcactactgtgtgtaccttggatgctgctgtttaaaccattggtccttcgccgtcagtatttgaggagaaagcatttgggaactctcaactttgg

SEQ ID NO: 24337 - DNA, 120 bp, Artificial Sequence
  ENSG00000033627_18 (sequence is synthesized)
tgggatcagggtgggcaacggaccgacagaggaggatgctgagattattcagcatgaccagctctccacccactcagaggacgcagacgagtttgactttggggacaccatggtccacca

SEQ ID NO: 24338 - DNA, 120 bp, Artificial Sequence
  ENSG00000033627_19 (sequence is synthesized)
ggccatccacaccatcgagtactgcctgggctgcatctccaacactgcctcctacttgcggctctgggccctcagcctcgctcatgcgcagctgtctgaggtgctttggaccatggtgat

SEQ ID NO: 24339 - DNA, 120 bp, Artificial Sequence
  ENSG00000033627_20 (sequence is synthesized)
ccacatcggcctgagcgtgaagagcttggcgggaggtttggtgctgttcttcttcttcactgcctttgccaccctgaccgtggccatcctcctgatcatggagggcctctcggcctttct

SEQ ID NO: 24340 - DNA, 120 bp, Artificial Sequence
  ENSG00000033627_21 (sequence is synthesized)
ccacgcactgcgcttacactgggttgagttccagaataaattctacagcgggaccggtttcaagttcttacccttctccttcgagcatattcgggaagggaagtttgaagagtgagtccc

SEQ ID NO: 24341 - DNA, 120 bp, Artificial Sequence
  ENSG00000033627_22 (sequence is synthesized)
tgtgagggccgtgtgccccatgctaccctccccgcctccctccacagtgatcagctgtgcctctctgcctgttggttgtgatctgtgggcaccagctcattcgtgtcaccctgtctgtga

SEQ ID NO: 24342 - DNA, 120 bp, Artificial Sequence
  ENSG00000033627_23 (sequence is synthesized)
gtcatttagatagaatagtcctccttgggtctcccaccacccctagctttgtgtgtagtgtagtgattttctggctgtcactcatactcactgggcaccagccttgccctcttagcctcc

SEQ ID NO: 24343 - DNA, 120 bp, Artificial Sequence
  ENSG00000033627_24 (sequence is synthesized)
atccatccagacagcccttcccacctcctggtggtgagccagtctgcattcccacgccatcccaaagccctttcatcttccccgtgcattgtagatggaaggagcacccatgccattcac

SEQ ID NO: 24344 - DNA, 120 bp, Artificial Sequence
  ENSG00000033627_25 (sequence is synthesized)
cctgcatctgccaccgtagtttctagcaggagtagtggggggagtaatacagattcttccctagaaggggacactggtaacatgtcccactcttggattagcaggggtgggtccaggaag

SEQ ID NO: 24345 - DNA, 120 bp, Artificial Sequence
  ENSG00000033627_26 (sequence is synthesized)
atgatatttgcgtcttttgcccacccccctggcattcagctggacccaactaggccatcatgagtggcttctccctgtcatccccaggggtcataggatatctacaccgcctttctgacc

SEQ ID NO: 24346 - DNA, 120 bp, Artificial Sequence
  ENSG00000033627_27 (sequence is synthesized)
ccaccctgcactcccatcctttcctctctccccgttcatgccctgcactacatagcacagccgggatgcttggaacagaggccttggctgctccgcagtgcacagggcttccctctctcg

SEQ ID NO: 24347 - DNA, 120 bp, Artificial Sequence
  ENSG00000033627_28 (sequence is synthesized)
gggttggcttcttcccaggccttgcatgggccctgcccacaagcacaccctcaggccgagggtgcagactgatgctcttccctgatggagaccctgagatcttccccacccccaatcatg

SEQ ID NO: 24348 - DNA, 120 bp, Artificial Sequence
  ENSG00000033627_29 (sequence is synthesized)
atgtcttcagtgtgggactggggtcctcttggttctgcctgcagcctgcctggctccgcccctagtgccccctcctcaccacactggccccaggtctcaggaggggtgtcctgggcaggg

SEQ ID NO: 24349 - DNA, 120 bp, Artificial Sequence
  ENSG00000033627_30 (sequence is synthesized)
aaggtcagtgtcactgatggtttgctgtttggaagccattggcagggctgccgtgcatgtggctgtgagggctgcacagtcctgccaaggggcttcctccttgtcaccccgaaccttgta

SEQ ID NO: 24350 - DNA, 120 bp, Artificial Sequence
  ENSG00000033627_31 (sequence is synthesized)
atcgtgtgctggcgtggcagccctggctaagttaatccccaccgctttcagtggtagaaagaattccctgagtgggccaggctggtgccctcctcctaccctggcttttctgagtgagct

SEQ ID NO: 24351 - DNA, 120 bp, Artificial Sequence
  ENSG00000033627_32 (sequence is synthesized)
gcctggagccctcatcccctctcccaggctgggctggccctgggcggggccactgtgtgctggcccactgtgacctgacccgaccttgtgcagcccccctgccctggtgtcctgggtttt

SEQ ID NO: 24352 - DNA, 120 bp, Artificial Sequence
  ENSG00000033627_33 (sequence is synthesized)
cgtgatgatctttgctctgtttccagtggggtttgaagcagagttcagggaaccctgcccaaggtcctcctgttcagacattcctatgttgaataaagtatgtttgacttccccggagaa

SEQ ID NO: 24353 - DNA, 120 bp, Artificial Sequence
  ENSG00000033627_34 (sequence is synthesized)
ctctaattggagaatttgaagtacttcctcttagttaattcctgtcatatatacatatggatgtatgatgtatacatgacatatacatattttcaagtttacccgtgtagatgttattct

SEQ ID NO: 24354 - DNA, 120 bp, Artificial Sequence
  ENSG00000033627_35 (sequence is synthesized)
agatgttattctgattggaaatttttattttcactcatttgccttttatgaaaattaactttaaagcaagacatctggttccaaatttggtaatttttttttttttgaggtggagtctca

SEQ ID NO: 24355 - DNA, 120 bp, Artificial Sequence
  ENSG00000033627_36 (sequence is synthesized)
tttgagcagctgatattatactcacacaagtgggccatatttttattccagtaattattttaatttgctagtttggaagcaatgccatttttgcaccctgttttagttacagaaatgtga

SEQ ID NO: 24356 - DNA, 120 bp, Artificial Sequence
  ENSG00000033627_37 (sequence is synthesized)
gattatgttccatttttcatgcagtacacaaccagccatggttttgcattttttcacattttcttcaatttttcatctcaatatgaggaaaagaaccctgaagtagttgtataaacatag

SEQ ID NO: 24357 - DNA, 120 bp, Artificial Sequence
  ENSG00000033627_38 (sequence is synthesized)
accttttgtcatcaaatttttatttcattgtctatgtttgcttataaaccttcgagcacatttttcagtacttcagatagcacacatcacactaatttttcaagagtttttcattgtatt

SEQ ID NO: 24358 - DNA, 120 bp, Artificial Sequence
  ENSG00000033627_39 (sequence is synthesized)
tattgtatggaaaatattggtaggatgcttgtttgaaacttctggattatcacataaacttagacgcattacctcagagggaaaaatgttagtaaagttcttgggttaaatatgtaggtg

SEQ ID NO: 24359 - DNA, 68 bp, Artificial Sequence
  ENSG00000033627_40 (sequence is synthesized)
gaaaaatgttagtaaagttcttgggttaaatatgtaggtgaggccaggcatggtggctcatgcgtgta

SEQ ID NO: 24360 - DNA, 76 bp, Artificial Sequence
  ENSG00000033627_41 (sequence is synthesized)
aactagccgggtgaggtggtggatttgaacctgggaggtggacgttgcattgagctgagattgctccactgcactc

SEQ ID NO: 24361 - DNA, 120 bp, Artificial Sequence
  ENSG00000033627_42 (sequence is synthesized)
agttattcagccccttttatctaagaatttctaagtcccagaacaggcagaaatggcttccttctcttttctctcctatactttcatcattcaggcaatataagatttaaagctgaattg

SEQ ID NO: 24362 - DNA, 120 bp, Artificial Sequence
  ENSG00000033627_43 (sequence is synthesized)
gtaaataagtctaaacagtgctaagaggagcatcatcttagcttcaagctcctggttgagtcaaaaaaacaaatagagaaagatttttgtgaattagagattatagggcagatgttcttg

SEQ ID NO: 24363 - DNA, 120 bp, Artificial Sequence
  ENSG00000033627_44 (sequence is synthesized)
tagtgaagcttaggaaatggagtgagggcagtggttaaaatgcaggactgccatgtccttaaaagatgcctgttgttcttgcatcaccaaaaaagtgggttatttaagagattttcatcc

SEQ ID NO: 24364 - DNA, 120 bp, Artificial Sequence
  ENSG00000033627_45 (sequence is synthesized)
ccttcctgccctcctgcaggtccttagggtcccagacccagacagtcactttctcaacagagtgccgtcaactcagcacacactcctctcttgagcacagagccccagagggagaagaac

SEQ ID NO: 24365 - DNA, 120 bp, Artificial Sequence
  ENSG00000033627_46 (sequence is synthesized)
aaatgtgttgaaaagaatcttattaagatgtagttaattaaaatgtaatgtattgaggggaatggaggtgtcccaggtgagggctaagtcaggcaggatttttggggaaggcattgccga

SEQ ID NO: 24366 - DNA, 120 bp, Artificial Sequence
  ENSG00000033627_47 (sequence is synthesized)
aatcaccacctgagctcaacactgggtgcttctggcccctccagagttgaggtgccatccatgggaagtgcagtcccctgccctggcccaggttcaaagcgccaagtagccacaactcag

SEQ ID NO: 24367 - DNA, 120 bp, Artificial Sequence
  ENSG00000033627_48 (sequence is synthesized)
tgaggtaatgtttaagttacatctgcattgaactgaaattttataatttcccaagcattcattatgaaaattatgatctggaagtcttttatccatgaatttatcaaaaggaagtagaga

SEQ ID NO: 24368 - DNA, 120 bp, Artificial Sequence
  ENSG00000033627_49 (sequence is synthesized)
gtcttcctcccaccctccctgagagtgaaagggccccacagagaccatcaggcatggatgctgaactgctgggaagggagctcaggctttttctttttagtccccaagagaagaattctt

SEQ ID NO: 24369 - DNA, 120 bp, Artificial Sequence
  ENSG00000033627_50 (sequence is synthesized)
tctcagatgtttttgtggttggagaatatttttgccattgctttgagaagacttcccctcctaactccccctctttccttggaatttccttccttaaatggaaagccttcaacattcact

SEQ ID NO: 24370 - DNA, 120 bp, Artificial Sequence
  ENSG00000033627_51 (sequence is synthesized)
cagagtcaagaaaatctgtgaagggtaagagaggcatgcctctaccaggagtgcacagccatgctgcccaactgttgagtcttaaagttcacaatagtgaaatacaaatcctttttagtc

SEQ ID NO: 24371 - DNA, 120 bp, Artificial Sequence
  ENSG00000033627_52 (sequence is synthesized)
tacctcaacacagttaattttaataatgttaggggctattttaatcaattagaaatagcctgcattcatttttatttttatttttgttgttcagatgggggggtctcactctgttgccca

SEQ ID NO: 24372 - DNA, 120 bp, Artificial Sequence
  ENSG00000033627_53 (sequence is synthesized)
gtcattatcagtgtgttcctgtcatgcttgatttgaaattgagcttaatatgcaaactggttgctttttccagatgacggttatttgtttgaattcctaagtggggaaatattgttttct

SEQ ID NO: 24373 - DNA, 120 bp, Artificial Sequence
  ENSG00000033627_54 (sequence is synthesized)
gaggaatctggaagattaaaccctttagtgtagccatagctttaggatagtgccagaactttgggcttttagaaatgcgcattgtcagtagaagggagaaggatagttacaaggcagaca

SEQ ID NO: 24374 - DNA, 120 bp, Artificial Sequence
  ENSG00000033627_55 (sequence is synthesized)
gtctgggaaatcttcaaaggccgtgaccactcagcaaggtttgactttggggacaccatggtccaccaggccatccacaccatcgagtactgcctgggctgcatctccaacactgcctcc

SEQ ID NO: 24375 - DNA, 120 bp, Artificial Sequence
  ENSG00000033627_56 (sequence is synthesized)
ggggaggcggtggttggggtggaacagttgtttgattttacttagccgttcagtcagtgggttttgtttttgttgttagacatatgcttttctgaggtttgtgttactaaccatcgccct

SEQ ID NO: 24376 - DNA, 120 bp, Artificial Sequence
  ENSG00000033627_57 (sequence is synthesized)
ccttggatgctgctgtttaaaccattggtccttcgccgtcagtatttgaggagaaagcatttggaagggcaacctgtggaggccccagtcagcccaaacccgagccaacagggactagag

SEQ ID NO: 24377 - DNA, 120 bp, Artificial Sequence
  ENSG00000033627_58 (sequence is synthesized)
actagtgtgagattcatgcagcatcataggaaggggggtgatgtgtttgaaaacagtgagcaggctaatgtattaatctgctaattctgtctcctgagttttctctcttttcctccctcc

SEQ ID NO: 24378 - DNA, 120 bp, Artificial Sequence
  ENSG00000033627_59 (sequence is synthesized)
tgccacatgaagtgtgcttggcttcttacctaccataattagacatcttttcttcctcagagaaggcatgagacagggatttgattgtagttatcactgtaaacatcaaactgattttta

SEQ ID NO: 24379 - DNA, 120 bp, Artificial Sequence
  ENSG00000033627_60 (sequence is synthesized)
tgcagaactattgccccagggcataccttccaaggaacctggtctctccttacctagcgaattccacatacacatagatgtacacctacctgtacactcacagattgggtggtgattaaa

SEQ ID NO: 24380 - DNA, 120 bp, Artificial Sequence
  ENSG00000033627_61 (sequence is synthesized)
gggacagaatcggggaccagcttcttgttaggaatgcagtgttgccacggcatgacagcatggagcagttgagggaatggctgcccaggagaactcagaactcttgaaatgtagttccag

SEQ ID NO: 24381 - DNA, 120 bp, Artificial Sequence
  ENSG00000033627_62 (sequence is synthesized)
gctgccatcattgccctgatattcaggccgtcagacagatgtgtgttgtaggccctgaacggcacagagagtggcagaacaggctacataaacagctcagcccagaattgtctttccaga

SEQ ID NO: 24382 - DNA, 120 bp, Artificial Sequence
  ENSG00000033627_63 (sequence is synthesized)
ctgcctgccctcagtcacaacccccaccagggaagggaagcggccccaagactccttcctccttcacccactcgaggaaacagagttcctgttacgtggcatgaatgatgtcttttggcc

SEQ ID NO: 24383 - DNA, 120 bp, Artificial Sequence
  ENSG00000033627_64 (sequence is synthesized)
ccagttaatccctctgagtcaccaggtggcctttgccaagtgctggagctggaagagatgatagagacactcatctggcgtcctgaggctctcctcacagctgttgaattctagaggtgc

SEQ ID NO: 24384 - DNA, 120 bp, Artificial Sequence
  ENSG00000033627_65 (sequence is synthesized)
atttcagtgtcttggggcatggcaagactttggaggctccctgagcagagcagtggagatgcccaaaaagaaggaagaacctaggatggcagatggggccccccttgccctggggaactt

SEQ ID NO: 24385 - DNA, 120 bp, Artificial Sequence
  ENSG00000033627_66 (sequence is synthesized)
catgtttgtactttctcaggaagcacacatttccccagttcagcgggagagagtggggagactagcagggaaattgctttccagctttgtgctgggtggttggggtgagggtggccacgg

SEQ ID NO: 24386 - DNA, 120 bp, Artificial Sequence
  ENSG00000033627_67 (sequence is synthesized)
aaggaggtgaaatcaggctgacctcaagatagacccaagatgtcccagttctggccgctctaagtctctaaagcagcagctggtgggaggggcagtattgggcagtatgtcagggaggcc

SEQ ID NO: 24387 - DNA, 120 bp, Artificial Sequence
  ENSG00000033627_68 (sequence is synthesized)
acctgtctgctcacacagtacaattgatgtgcccctcccaggcatatatccctcttcctccttgctgggcccccatgggtagataaggtgactggaggggtgccaagaaaagggcggtgc

SEQ ID NO: 24388 - DNA, 120 bp, Artificial Sequence
  ENSG00000033627_69 (sequence is synthesized)
ccccacaggcatctgaaaacaaagctgctgctccatttgcccagtttgaagattagaatggttttgtgattagccaggagggggtgggggtcagagttctggacacctcactggagtcgg

SEQ ID NO: 24389 - DNA, 120 bp, Artificial Sequence
  ENSG00000033627_70 (sequence is synthesized)
gggtcagcataccctaccaaggctgacattcactcctaggtaatggcctgggaccctcaggtgacttgtccactctctggctatgtattgttgaatgaaaaggggacatgtaaatctcgt

SEQ ID NO: 24390 - DNA, 120 bp, Artificial Sequence
  ENSG00000033627_71 (sequence is synthesized)
ttcagctgttctgaaataacccttgccacatgggaacacagtctattcaacatgaagaattcaaacctaacacaagtgggtgagaagcaggaacccactgctaggccccaccgcgttccc

SEQ ID NO: 24391 - DNA, 120 bp, Artificial Sequence
  ENSG00000033627_72 (sequence is synthesized)
tcagaggtggtctcagtagctggaacttggagaagtagttttggtggggtgttgggacgtgggtgaatccaggtcctggtttggaattgctctggtgggaaccgtcagctaacgtcagtt

SEQ ID NO: 24392 - DNA, 120 bp, Artificial Sequence
  ENSG00000033627_73 (sequence is synthesized)
ggaagctctgtgtcctccccctcctgagtcctgtttttcctggaggaccttggcccacccctgtggaatgtggggatgtggggaagaaagctgactgcttttactcccactcagaaaatt

SEQ ID NO: 24393 - DNA, 120 bp, Artificial Sequence
  ENSG00000033627_74 (sequence is synthesized)
cggttgcgctcttcttcaagggggtgctcctcagcctgcaccccagtgaaggggcctctgaggaactcccagtgccactggcaaacagtctgtaacctttgggccccagccacctcccag

SEQ ID NO: 24394 - DNA, 120 bp, Artificial Sequence
  ENSG00000033627_75 (sequence is synthesized)
cccctgttctcttaattcctgccttcttggcttggagggaggaatctccatttgtaaaagctgagttagggaactagagggttcctgaagctttaaagcgcctcaaagccctcaccctgc

SEQ ID NO: 24395 - DNA, 120 bp, Artificial Sequence
  ENSG00000033627_76 (sequence is synthesized)
acgtgacctgtcacctggagcctgccccagcccccacgcctgcctgttcttataggggctccggtgcctccagggtcacacagcaccatgtggaaactattcctcagggcagctctcctt

SEQ ID NO: 24396 - DNA, 120 bp, Artificial Sequence
  ENSG00000033627_77 (sequence is synthesized)
gaggtgggctgtgtgatcccctgccaggagggggcgatgggggccacttgttcattaacgatgttaggctcaaggtaactgaactttttttgcacatgcctctctgcagagagttgtgca

SEQ ID NO: 24397 - DNA, 120 bp, Artificial Sequence
  ENSG00000033627_78 (sequence is synthesized)
taaacacactgctcggcaggacagagcaagattgggaactgagggcaaatcccttcctccgtgcgtcgaactcttgatcccaggccttaaaagtgggatctctgcactctgggctttctc

SEQ ID NO: 24398 - DNA, 120 bp, Artificial Sequence
  ENSG00000033627_79 (sequence is synthesized)
tagcttccccagggaagggaggctcggggtgaggtgggcacggggcatctttcctgcccaactgtgaagtcctaaaaagcttcacaaagtttctattgaatgacagctttcttcttctct

SEQ ID NO: 24399 - DNA, 120 bp, Artificial Sequence
  ENSG00000033800_0 (sequence is synthesized)
gcggaggctagaggcgggctgggaaggtggaggggcgggccggggcggggccaggccggctagaggggcgggtctagcggcggcccccggcgaagttcactgcgcttgcgctgacagacg

SEQ ID NO: 24400 - DNA, 120 bp, Artificial Sequence
  ENSG00000033800_1 (sequence is synthesized)
tcactgcgcttgcgctgacagacgcaagatggcggacagtgcggaactaaagcaaatggttatgagccttagagtttctgaactccaagtactgttgggctacgccgggagaaacaagca

SEQ ID NO: 24401 - DNA, 120 bp, Artificial Sequence
  ENSG00000033800_2 (sequence is synthesized)
cggacgcaaacacgaacttctcacaaaagccctgcatttgctaaaggctggctgtagtcctgctgtgcaaatgaaaattaaggaactctataggcggcggttcccacagaaaatcatgac

SEQ ID NO: 24402 - DNA, 120 bp, Artificial Sequence
  ENSG00000033800_3 (sequence is synthesized)
gcctgcagacttgtccatccccaacgtacattcaagtcctatgccagcaactttgtctccatctaccattccacaactcacttacgatggtcaccctgcatcatcgccattactccctgt

SEQ ID NO: 24403 - DNA, 120 bp, Artificial Sequence
  ENSG00000033800_4 (sequence is synthesized)
ttctcttctgggacctaaacatgaactggaactcccacatcttacatcagctcttcacccagtccatccggatataaaacttcaaaaattaccattttatgatttactggatgaactgat

SEQ ID NO: 24404 - DNA, 120 bp, Artificial Sequence
  ENSG00000033800_5 (sequence is synthesized)
aaaacccaccagtctagcatcagacaacagtcagcgctttcgagaaacctgttttgcatttgccttgacaccacaacaagtgcagcaaatcagtagttccatggatatttctgggaccaa

SEQ ID NO: 24405 - DNA, 120 bp, Artificial Sequence
  ENSG00000033800_6 (sequence is synthesized)
atgtgacttcacagtacaggtccagttaaggttttgtttatcagaaaccagttgtccacaagaagatcacttcccacccaatctttgtgtgaaagtgaatacaaaaccttgcagccttcc

SEQ ID NO: 24406 - DNA, 120 bp, Artificial Sequence
  ENSG00000033800_7 (sequence is synthesized)
aggttaccttccacctacaaaaaatggcgtggaaccaaagcgacccagccgaccaattaatatcacctcacttgtccgactgtccacaacagtaccaaacacgattgttgtttcttggac

SEQ ID NO: 24407 - DNA, 120 bp, Artificial Sequence
  ENSG00000033800_8 (sequence is synthesized)
tgcagaaattggaagaaactattccatggcagtatatcttgtaaaacagttgtcctcaacagttcttcttcagaggttacgagcaaagggaataaggaatccggatcattctagagcttt

SEQ ID NO: 24408 - DNA, 120 bp, Artificial Sequence
  ENSG00000033800_9 (sequence is synthesized)
aattaaagagaagttgactgcggatccagacagtgaaatagctacaaccagcctaagggtttctctactatgtccacttggtaaaatgcggctgacaattccgtgtcgggcccttacatg

SEQ ID NO: 24409 - DNA, 120 bp, Artificial Sequence
  ENSG00000033800_10 (sequence is synthesized)
ttctcatctacaatgttttgacgcaactctttacattcagatgaatgagaaaaaaccaacctgggtttgtcctgtctgtgataagaaggctccatatgaacaccttattattgatggctt

SEQ ID NO: 24410 - DNA, 120 bp, Artificial Sequence
  ENSG00000033800_11 (sequence is synthesized)
gtttatggaaatcctaaagtactgtacagactgtgatgaaatacaatttaaggaggatggcacttgggcaccgatgagatcaaaaaaggaagtacaggaagtttctgcctcttacaatgg

SEQ ID NO: 24411 - DNA, 120 bp, Artificial Sequence
  ENSG00000033800_12 (sequence is synthesized)
agtcgatggatgcttgagctccacattggagcatcaggtagcgtctcaccaccagtcctcaaataaaaacaagaaagtagaagtgattgacctaaccatagacagttcatctgatgaaga

SEQ ID NO: 24412 - DNA, 120 bp, Artificial Sequence
  ENSG00000033800_13 (sequence is synthesized)
ggaagaagagccatctgccaagaggacctgtccttccctatctcccacatcaccactaaataataaaggcattttaagtcttccacatcaagcatctccagtatcccgcaccccaagcct

SEQ ID NO: 24413 - DNA, 120 bp, Artificial Sequence
  ENSG00000033800_14 (sequence is synthesized)
tcctgctgtagacacaagctacattaatacctccctcatccaagactataggcatcctttccacatgacacccatgccttacgacttacaaggattagatttctttcctttcttatcagg

SEQ ID NO: 24414 - DNA, 120 bp, Artificial Sequence
  ENSG00000033800_15 (sequence is synthesized)
agacaatcagcattacaacacctccttgcttgccgctgcagcagcagcagtttcagatgatcaagacctcctacactcgtctcggtttttcccgtatacctcctcacagatgtttcttga

SEQ ID NO: 24415 - DNA, 120 bp, Artificial Sequence
  ENSG00000033800_16 (sequence is synthesized)
tcagttaagtgcaggaggcagtacttctctgccaaccaccaatggaagcagtagtggcagtaacagcagcctggtttcttccaacagcctaagggaaagccatagccacaccgtcacaaa

SEQ ID NO: 24416 - DNA, 120 bp, Artificial Sequence
  ENSG00000033800_17 (sequence is synthesized)
caggagcagcacggacacggcatccatctttggcatcataccagacattatttcattggactgattcccaggccctgctgctcccatccccaccccagatcgaatgaacttggcagaaag

SEQ ID NO: 24417 - DNA, 120 bp, Artificial Sequence
  ENSG00000033800_18 (sequence is synthesized)
aagagaactttgtgctctgttttaccttactctgtttagaaaagtatacaagcgtgttttttttcctttttttagggaaaaaattaaaagaaatgtacagagaacaaaactatattttca

SEQ ID NO: 24418 - DNA, 120 bp, Artificial Sequence
  ENSG00000033800_19 (sequence is synthesized)
aaattaaaagaaatgtacagagaacaaaactatattttcagttttacttttgtatataaatctaagactgcctgtgtgataaaacacttgtttaaaaaaaaaaaggaaagaaaagaaaaa

SEQ ID NO: 24419 - DNA, 120 bp, Artificial Sequence
  ENSG00000033800_20 (sequence is synthesized)
ttctggattctgaagatttttcattatttgtcctatggttttggttttatttgacttcgatggcattattttatttgcaataacagaaaaggaattgcatgtatgaagttttcaatcgtg

SEQ ID NO: 24420 - DNA, 120 bp, Artificial Sequence
  ENSG00000033800_21 (sequence is synthesized)
ggcttttctttgttgtggggagggggtcgggggatagtttgatttccattttctgaaaacgacagacttggattctgtttgtgtgtgcatattttatccagccttaagttataaagctca

SEQ ID NO: 24421 - DNA, 120 bp, Artificial Sequence
  ENSG00000033800_22 (sequence is synthesized)
tctgtcccgctgcattccctgtgtattttcaggacatggctcgtgggtgtgtgtgttcattgtgtgcgtctgtatgtatttttctgtcatcactgttccctctcctcccgagtgtgcatt

SEQ ID NO: 24422 - DNA, 120 bp, Artificial Sequence
  ENSG00000033800_23 (sequence is synthesized)
cagttaatataatcagttgcttgcttctttcaaagtgctttgaaggtcttgaactcacgtgtgagcatctttatcaactatcccaattgcatgttctccatcacatattctcttatttgc

SEQ ID NO: 24423 - DNA, 120 bp, Artificial Sequence
  ENSG00000033800_24 (sequence is synthesized)
tctgtaccccctgagaatatgttttagagatattggaataaagctgtctgggtaaggagtaggcttagccgacctatgaataatacactttagtctagttctttattctaaatctggatt

SEQ ID NO: 24424 - DNA, 120 bp, Artificial Sequence
  ENSG00000033800_25 (sequence is synthesized)
gccagtattgtgtatttaaaccaagtctgtgaatacctgctttttttggccacagagtaacaagttttcatgtaagatcttcataccaaagtaggaagtaaaaatagcttagaaagctct

SEQ ID NO: 24425 - DNA, 120 bp, Artificial Sequence
  ENSG00000033800_26 (sequence is synthesized)
gtcaggtgttttgtgcagctgacagaggtaatgttacatcacctaaaaaagaaagatacacggtcagttatcctaaaaataaattgtttggaaagtacaatgcaccacatttttgtagaa

SEQ ID NO: 24426 - DNA, 120 bp, Artificial Sequence
  ENSG00000033800_27 (sequence is synthesized)
gtctactatttgataaacagttgaaattcaagatgtgtttgacccttagtcatttttactctttggttctgagtatacctattttcttagcgtatctgccttgtttatctttttcttcac

SEQ ID NO: 24427 - DNA, 120 bp, Artificial Sequence
  ENSG00000033800_28 (sequence is synthesized)
cttttaacaagtatgacataggaaagtcatttttttttagaattcatggatcagtctgatctactcttattcataatggaacatgtaaatatactgaaaactgtttttcaggagagaaat

SEQ ID NO: 24428 - DNA, 120 bp, Artificial Sequence
  ENSG00000033800_29 (sequence is synthesized)
atgagttggagggaaggaaaagtggttctactaatgttccaaaatcctcatcagagaaggtatgatgttctcaggtgtggaaaatattttttagttgattgagaatgcaggtttaacaga

SEQ ID NO: 24429 - DNA, 120 bp, Artificial Sequence
  ENSG00000033800_30 (sequence is synthesized)
agagataaggggcataatgactgctggttttccagactggattttcctaccgcaactattaatgttctcagagttgatgaggaccacctttgtgtatacacttgtagttttaaaccttgc

SEQ ID NO: 24430 - DNA, 120 bp, Artificial Sequence
  ENSG00000033800_31 (sequence is synthesized)
attggtaacaaaatgatcaactttaatccaggtagaattcaagatggctgtacttcagttgtatgataaaattaatggttctcatgacttgtgtggcatctaaaaataatgtttttatag

SEQ ID NO: 24431 - DNA, 120 bp, Artificial Sequence
  ENSG00000033800_32 (sequence is synthesized)
catctctctgccactaaattgttgacttgaattttgggaaaaaaaaaagttggtgttgatatgtatatgtgtgtgtgtatatatgtatttataaacaagtgtgtttgagtaacaagtgag

SEQ ID NO: 24432 - DNA, 120 bp, Artificial Sequence
  ENSG00000033800_33 (sequence is synthesized)
aaaaaaaaaccaaaacagattgtcagttaaccaggaaacagttaatgttttttaatgaatctggcattatagtgagcaaatgtcgtattaatttaggctaatttctaatactaccataat

SEQ ID NO: 24433 - DNA, 120 bp, Artificial Sequence
  ENSG00000033800_34 (sequence is synthesized)
ttgtgtctaaatttctgttggggtagaaattactaaaattgtggggagttttttctgatttttacattgctttaggaaacatttttactaattcagctgtcttaggtaaaatgaatagtt

SEQ ID NO: 24434 - DNA, 120 bp, Artificial Sequence
  ENSG00000033800_35 (sequence is synthesized)
ttcttcctgtttttttatgtgtcattgttagtggtctcagaattctgatcagtaactttgtgtatgatgctgaattacaaaccgtttgaatgatccagttgaaaacgtatccctctactt

SEQ ID NO: 24435 - DNA, 120 bp, Artificial Sequence
  ENSG00000033800_36 (sequence is synthesized)
tcttcagttgtagaaaaggttaatttccctcagtgtcccacattataccaacctaagagaagaacaggtaatagggagaaataaacatacggtggtttcagtggttttggtcatgtgtcc

SEQ ID NO: 24436 - DNA, 120 bp, Artificial Sequence
  ENSG00000033800_37 (sequence is synthesized)
acaggagaaactaaccattcagttgtcttaattttagttcgttctaccctgtgaggagtttgtttccatcagttgttgactttccaaaatgttgcattaagtaatagttgtcactctgtt

SEQ ID NO: 24437 - DNA, 120 bp, Artificial Sequence
  ENSG00000033800_38 (sequence is synthesized)
ggtctcatggtcaatatcaatcagactttcatgatctctactaattattagtagagtcctgtactatgtctgtaactactaagtttaaagaaaagcacatagtcacttcatctctttttt

SEQ ID NO: 24438 - DNA, 120 bp, Artificial Sequence
  ENSG00000033800_39 (sequence is synthesized)
tcttagcctacgctcactccccaacccatcccaacattgacatgctatctgtggacaaatagcagttctcagaatctagtcaagttgccatcatcccccttgccttggccgttcatagta

SEQ ID NO: 24439 - DNA, 120 bp, Artificial Sequence
  ENSG00000033800_40 (sequence is synthesized)
tgtgtgtgtgtgtgtatatatatatacatctgtatgcacacatctttgataaaatagctatttgactagcagggttaaagtggcttttaattacttcgtgagtgttattggatacatctt

SEQ ID NO: 24440 - DNA, 120 bp, Artificial Sequence
  ENSG00000033800_41 (sequence is synthesized)
aattacttcgtgagtgttattggatacatcttaaaaaaaaaaaatctgaaccagaaccatgccatacttggttgactattttgagcattaaaattgctttactaattatttagacatgat

SEQ ID NO: 24441 - DNA, 120 bp, Artificial Sequence
  ENSG00000033800_42 (sequence is synthesized)
cacaattctgtatctttactgaggaaagattcacgtaagctctgaaaaatcggattctttggcagattttcctttgagtcaagtgtctgaaatggagtgaaaatatatcctaactaaatt

SEQ ID NO: 24442 - DNA, 120 bp, Artificial Sequence
  ENSG00000033800_43 (sequence is synthesized)
aatgtggaaagagcatttttttagacaatttcaattttaaacacataaaactttcaagatcttcaggactttttaaagcacatttgaaattattttagtaagaattttgttttatcaata

SEQ ID NO: 24443 - DNA, 120 bp, Artificial Sequence
  ENSG00000033800_44 (sequence is synthesized)
gatgttgaattctgttttttaattaaatacaaagcttagatttcagaaagagagggaaaatagctggtggtcccagagtgtgctgctgttaattgtttaacaaaggggaaaatgtacata

SEQ ID NO: 24444 - DNA, 120 bp, Artificial Sequence
  ENSG00000033800_45 (sequence is synthesized)
aacagataaagttaccataaattccatgaacttaaatctgtgattcattgccttaaaactttctctcttagaatttccataccgcatgccaaaccagtaaaatggcttttaaaaatgtat

SEQ ID NO: 24445 - DNA, 120 bp, Artificial Sequence
  ENSG00000033800_46 (sequence is synthesized)
agtagacaatgtcagtttgtataaaagtaccaagtgaaaatatttattacatgcattggaaaaaaattgtttacctattgaatgttacctgtttatgtagagctctttagatgtaataaa

SEQ ID NO: 24446 - DNA, 120 bp, Artificial Sequence
  ENSG00000033800_47 (sequence is synthesized)
agaaaagccttcagttaatttgtcttctgtaaaataacactgctggatgttcaaggggacaatccctatgagacaagtgataatggtttgtgcttccaaagcacctttcatccagagatt

SEQ ID NO: 24447 - DNA, 120 bp, Artificial Sequence
  ENSG00000033800_48 (sequence is synthesized)
tcaaagcatgacaagtaactaactaattttcttgcagcatgctttgaggtaagtaatgaatatagccatcatttccctttcttgttgaaatatggctaactctttaataaatcacagcat

SEQ ID NO: 24448 - DNA, 120 bp, Artificial Sequence
  ENSG00000033800_49 (sequence is synthesized)
ctgtttagtatctgcagtttgaatgctaagagcaccgtggccttcttgtaaacaacactaggtgctagagaaaccagctggaatttcaggaatgagcttgaaaccaggaccaggagtaag

SEQ ID NO: 24449 - DNA, 120 bp, Artificial Sequence
  ENSG00000033800_50 (sequence is synthesized)
gtaacagcccttcctcgggtagaggtttgaatcaaacacttaataggatcttagactctggaccactgaatcccttaatgagcagggagtccgtgaagaggagccccaggttctaatgac

SEQ ID NO: 24450 - DNA, 120 bp, Artificial Sequence
  ENSG00000033800_51 (sequence is synthesized)
cattccacaccaactgtgtgtttttggcaagttatatttcagattcctgttaggcaaatgagattcataaaacttgctttaaaaccatactgggactattcagtgataaatatagacata

SEQ ID NO: 24451 - DNA, 120 bp, Artificial Sequence
  ENSG00000033800_52 (sequence is synthesized)
gaaaagctttgacggaaagtaccctcatttattatatccagaacttgctcttcctgtgccatctaaatcattggtatctatctcccatctaatctttggtattccaggttggctgtgcag

SEQ ID NO: 24452 - DNA, 120 bp, Artificial Sequence
  ENSG00000033800_53 (sequence is synthesized)
gatttacttcctaatgtccatgactggagctcaaaagaactgtgggcctaggacctttgagctttgcctgaaagtgacagcagttctctcggcggggccagcatctaaccggccctctgg

SEQ ID NO: 24453 - DNA, 120 bp, Artificial Sequence
  ENSG00000033800_54 (sequence is synthesized)
tggatttaccatgaaggtaatgaagtttaagcaccaggacccttcacttgttctggtcctaggagcagccccagaaattctgcatttctgtttttgtattcttaaggcagccaaatctcg

SEQ ID NO: 24454 - DNA, 120 bp, Artificial Sequence
  ENSG00000033800_55 (sequence is synthesized)
taaacctcagaccccacaaaacatctgctcctacactgtgtggacctgggcttcccagccagatggtcacaacttcacctagttggcatttgggccatttatttaccctcaccccacaaa

SEQ ID NO: 24455 - DNA, 120 bp, Artificial Sequence
  ENSG00000033800_56 (sequence is synthesized)
actctttggctcctaggaattcctcctctccttgcagttatgcttggggaaatgagagtctccttcctcagggccttgtttgggtctgaagccacacagcatcgttgagacagttgcact

SEQ ID NO: 24456 - DNA, 120 bp, Artificial Sequence
  ENSG00000033800_57 (sequence is synthesized)
aacactacaactcttgttccctgcagttttccctgtgcccggtgcctagtgaaagatttgtgtcttgtacatcctcccaaaagacacatcccatttgatttggttttcttctactttagc

SEQ ID NO: 24457 - DNA, 120 bp, Artificial Sequence
  ENSG00000033800_58 (sequence is synthesized)
cactgtggtactactagacaaagccacagcccagagaacccacttttgatacatacatggatgcaaatctttgtacttgaagccctgcacccctacctgtgttggtgtggtactccagcc

SEQ ID NO: 24458 - DNA, 120 bp, Artificial Sequence
  ENSG00000033800_59 (sequence is synthesized)
cttttaggactgtgctggcactacgaatgatccagatttgacaagtgtatggcacctctgaatctctggcagcaccaacctggcaccttctagctgtgtaactcactcaaagccactcca

SEQ ID NO: 24459 - DNA, 120 bp, Artificial Sequence
  ENSG00000033800_60 (sequence is synthesized)
gctggatggactcccagaaagcctagtgctcctactactgttttccagggctgttgtaccctggccattgctggttacatccccttatttctctccgtaagtcctggggaggtggcttaa

SEQ ID NO: 24460 - DNA, 120 bp, Artificial Sequence
  ENSG00000033800_61 (sequence is synthesized)
ggcaatgaccagtgtgggccacttgagcagaccatcccggaacctctctgcctgttaacagagcccagggaacagctcggaattctcacagcattggaagcccccttcttgagctctgca

SEQ ID NO: 24461 - DNA, 120 bp, Artificial Sequence
  ENSG00000033800_62 (sequence is synthesized)
aggccagtcaatttagcagctcacatctggtttcctttggtgtggggtgtaaagtagatcgctcttcctgctctcagctgatgctgcctcattgtagcatgtgttttcactctagtgttt

SEQ ID NO: 24462 - DNA, 120 bp, Artificial Sequence
  ENSG00000033800_63 (sequence is synthesized)
tcactctacactctgtgtttatgaatgaatagcctgagctatgtcactatatctgttgagatggaaatgagaatttgtaaatgggcctctggcactgcaagaattgttgtcataagtgtt

SEQ ID NO: 24463 - DNA, 120 bp, Artificial Sequence
  ENSG00000033800_64 (sequence is synthesized)
acagctttctgttcattgctgcttctcagctagcactggcttcatcttggaaaatcttggaaatatggaagatggttctagcccccaaatacagaataagtctcttggtagattgccctt

SEQ ID NO: 24464 - DNA, 120 bp, Artificial Sequence
  ENSG00000033800_65 (sequence is synthesized)
aagtcatcagctcaatccttcctcaacaggctccatgaggtaagaagtgggaatccagcttgtgtgggggggctttgaggagtgaaatgatttgcccaaagtcacagtgggaagcagcag

SEQ ID NO: 24465 - DNA, 120 bp, Artificial Sequence
  ENSG00000033800_66 (sequence is synthesized)
agccaggactggaacccaggccagactccaaaccgcaggctccttccatgcttgaaagggccggactcacggtagttaataaaatcaatacaaatcttttattaaagatctactcatacc

SEQ ID NO: 24466 - DNA, 120 bp, Artificial Sequence
  ENSG00000033800_67 (sequence is synthesized)
tgacccagttcgttgattgtactgtcatcagtagccagtgttttactcccagtggtaaaactagtgcaataatctttagtttttgtgagctcctgagtactctgcaaattgtttttgaat

SEQ ID NO: 24467 - DNA, 120 bp, Artificial Sequence
  ENSG00000033800_68 (sequence is synthesized)
ctgagtactctgcaaattgtttttgaatgactgctagtatgtgggtttgaattttggtatttatgaacattatttttttttgccgtggggaacggagtcttgctctgttgcctgggctgg

SEQ ID NO: 24468 - DNA, 71 bp, Artificial Sequence
  ENSG00000033800_69 (sequence is synthesized)
ccgagtagctgggattataggcgcccactaccacaccaggctaatgttttatatttttagtagagacaggg

SEQ ID NO: 24469 - DNA, 120 bp, Artificial Sequence
  ENSG00000033800_70 (sequence is synthesized)
acagccggttcaaggtcaactgaccagggaatgccaggatgtggcagtggtcacagtgaagaggatgcatcccctcccaccgagttcccacgacaggcccctcactggactggacattct

SEQ ID NO: 24470 - DNA, 120 bp, Artificial Sequence
  ENSG00000033800_71 (sequence is synthesized)
agtgggttcccaaccacagatggaggactgggctcctctgctcccttctagcgcttccctcctgccctgaactggagggaaacaggtccatgtgtgcattccacctttgacagccaccac

SEQ ID NO: 24471 - DNA, 120 bp, Artificial Sequence
  ENSG00000033800_72 (sequence is synthesized)
agtacatcttaccaggatggatcagcacccccacctggggtctcaagcctcagtcgcaggctgggctgctcacctgccttcccctcactgcagtctccatcccagcccctcctccacggg

SEQ ID NO: 24472 - DNA, 120 bp, Artificial Sequence
  ENSG00000033800_73 (sequence is synthesized)
ccctggctgggatgtaactgcaggaaatcaaaacttccctggactacaacttcctgtttggaggggacagaaatcaaggaaaccaccacccctttggagctggacatgggggatctcagg

SEQ ID NO: 24473 - DNA, 120 bp, Artificial Sequence
  ENSG00000033800_74 (sequence is synthesized)
tatcagaccactgagcaacccaccgccaggctgcaggctttcagaggcccacctgggcccagcgtggcctgccccagggtgggctcccagcgcaactgcaggcatcctctagtggggcct

SEQ ID NO: 24474 - DNA, 120 bp, Artificial Sequence
  ENSG00000033800_75 (sequence is synthesized)
ctggtaaccctagcagatggtggtgacccccctgagatgaggaagctggtgacctgagactgagcagcagcctatgggctccgggtcaagtgctattcccagcggatgcccttcccctgc

SEQ ID NO: 24475 - DNA, 120 bp, Artificial Sequence
  ENSG00000033800_76 (sequence is synthesized)
gccagtccctccttcctgagtgtccagcccccaatgcaaacagcaaccccaggctctgaaactactttttttcttagaaaaagcaaaacaaaacataaaacttgtttctgattatgaaaa

SEQ ID NO: 24476 - DNA, 120 bp, Artificial Sequence
  ENSG00000033800_77 (sequence is synthesized)
ttgttgtgggcgcctctggcgggggtggcgggggaagagatagggagtccggaggtaggggctgcagctgtctcatgggctcggctttttcaccttccagttagcctccctgccccccat

SEQ ID NO: 24477 - DNA, 120 bp, Artificial Sequence
  ENSG00000033800_78 (sequence is synthesized)
ggggagctggggctgggggcagggtgctctcgtaggggggattgggaaagctccccgtggccgcttcctcttcctcctttgcagtcccgggctcctgtcaggcgctcttctcagaccccc

SEQ ID NO: 24478 - DNA, 120 bp, Artificial Sequence
  ENSG00000033800_79 (sequence is synthesized)
gggaacttggcttcggccgccccgcccctccgtggatcccagtagcccccgccccggactcggctttccccggctgctcgcttgtcaggaagcgcctggggtgccccgcttgtgggaagc

SEQ ID NO: 24479 - DNA, 120 bp, Artificial Sequence
  ENSG00000033800_80 (sequence is synthesized)
gcgatcccggggcgatagggtggggatctgggggagaagctctggtaaagtttagcgagccccgggccggcgttggggttcggctgagaggtagtgagcgggacgttactctttctctct

SEQ ID NO: 24480 - DNA, 120 bp, Artificial Sequence
  ENSG00000033800_81 (sequence is synthesized)
gattccgggcagccgaggggagaaaccccctcgaagagtgtgtctttggaagcagtgttgggagggggggatgcagctacctctctcccttcttttgccttagctggtgtggagggtgag

SEQ ID NO: 24481 - DNA, 120 bp, Artificial Sequence
  ENSG00000033800_82 (sequence is synthesized)
aggagcctttgggggtctctgcacacaccatgatggcgatgctgtagctgatggagaacaaccaaatgccagatttgattctgtagagtttttcctgtggaatatcctcaccgaaagagc

SEQ ID NO: 24482 - DNA, 120 bp, Artificial Sequence
  ENSG00000033800_83 (sequence is synthesized)
agacgcaagatggcggacagtgcggaactaaaggaagaagagtgggagagaagaagtccatcagcattttagtggagtaaataatgaaattaaatgggaagagaaaccataattataaaa

SEQ ID NO: 24483 - DNA, 120 bp, Artificial Sequence
  ENSG00000033800_84 (sequence is synthesized)
attcagctattttgttaaaggttagagtagtattttctcaactcaagaaattttagaatttgtttattcactggagcctgttgtgtagttcttagagtagttctgatatctttgtcatga

SEQ ID NO: 24484 - DNA, 120 bp, Artificial Sequence
  ENSG00000033800_85 (sequence is synthesized)
gctatattttataatctatattttactaatcttaaaattaactttgtgaagtcagtgcacaaacatggaagaatattattctacaacttcataaaatcaatgtttaaggaattctgggaa

SEQ ID NO: 24485 - DNA, 120 bp, Artificial Sequence
  ENSG00000033867_0 (sequence is synthesized)
ctcactgtccctggaatcttcaagggagttactgcattacatcatcagaaacaaggcatttctatattactatggaaagatttcgtctggagaagaagttacctggtcctgatgaagaag

SEQ ID NO: 24486 - DNA, 120 bp, Artificial Sequence
  ENSG00000033867_1 (sequence is synthesized)
ctgttgtggatcttggcaaaactagctcaactgtgaacaccaagtttgaaaaagaagaactagaaagtcatagagctgtatatattggtgttcacgtcccgtttagtaaagagagtcgtc

SEQ ID NO: 24487 - DNA, 120 bp, Artificial Sequence
  ENSG00000033867_2 (sequence is synthesized)
ggcgtcataggcatcgcggacacaaacatcaccaccggagaagaaaagataaagaatcagataaagaagatggacgggaatctccttcttatgatacaccatcccagagagttcagttta

SEQ ID NO: 24488 - DNA, 120 bp, Artificial Sequence
  ENSG00000033867_3 (sequence is synthesized)
tccttggtactgaagatgatgatgaagaacatattccccatgatctcttcacggaaatggatgaactgtgttacagagatggagaagaatatgaatggaaagaaactgctagatggctga

SEQ ID NO: 24489 - DNA, 120 bp, Artificial Sequence
  ENSG00000033867_4 (sequence is synthesized)
aatttgaagaggatgttgaagatggcggtgaccgatggagtaaaccttatgtggcaactctctctttgcacagtctttttgaactaaggagttgcatcctcaatggaacagtcatgctgg

SEQ ID NO: 24490 - DNA, 120 bp, Artificial Sequence
  ENSG00000033867_5 (sequence is synthesized)
atatgagagcaagcactctagatgaaatagcagatatggtattagacaacatgatagcttctggccaattagacgagtccatacgagagaatgtcagagaagctcttctgaagagacatc

SEQ ID NO: 24491 - DNA, 120 bp, Artificial Sequence
  ENSG00000033867_6 (sequence is synthesized)
atcatcagaatgagaaaagattcaccagtcggattcctcttgttcgatcttttgcagatataggcaagaaacattctgaccctcacttgcttgaaaggaatggggaaggcctttcagcct

SEQ ID NO: 24492 - DNA, 120 bp, Artificial Sequence
  ENSG00000033867_7 (sequence is synthesized)
cccgccactctttgcgaacaggtctgtctgcctcaaacctttccttgagaggagaatcacctttatctcttcttcttggtcatcttcttccttcttcaagagctggaacccctgcaggct

SEQ ID NO: 24493 - DNA, 120 bp, Artificial Sequence
  ENSG00000033867_8 (sequence is synthesized)
caaggtgtacaaccccagtacccacccctcaaaacagtcctccttctagccctagcatcagccgcctgacctccagaagttcccaagagagtcagcgtcaggccccagaactactggttt

SEQ ID NO: 24494 - DNA, 120 bp, Artificial Sequence
  ENSG00000033867_9 (sequence is synthesized)
cacctgccagtgatgatattcccacagtagtaattcatccgcctgaggaagacttagaagcagcgctgaaaggcgaggagcagaagaatgaggaaaatgttgacttaactccaggtattt

SEQ ID NO: 24495 - DNA, 120 bp, Artificial Sequence
  ENSG00000033867_10 (sequence is synthesized)
tggcctctccccagtctgctcctggaaacttggacaatagtaaaagtggagaaattaaaggtaatggaagtggtggaagcagagaaaatagtactgttgacttcagcaaggttgatatga

SEQ ID NO: 24496 - DNA, 120 bp, Artificial Sequence
  ENSG00000033867_11 (sequence is synthesized)
atttcatgagaaaaattcctacgggtgctgaggcatccaacgtcctggtgggcgaagtagactttttggaaaggccaataattgcatttgtgagactggctcctgctgtcctccttacag

SEQ ID NO: 24497 - DNA, 120 bp, Artificial Sequence
  ENSG00000033867_12 (sequence is synthesized)
ggttgactgaggtccctgttccaaccaggtttttgtttttgttattgggtccagcgggcaaggcaccacagtaccatgaaattggacgatcaatagccactctcatgacagatgagattt

SEQ ID NO: 24498 - DNA, 120 bp, Artificial Sequence
  ENSG00000033867_13 (sequence is synthesized)
tccatgatgtagcttataaagcaaaagacagaaatgacctcttatctggaattgatgaatttttagatcaagtaactgtcctacctccaggagagtgggatccttctatacgcatagaac

SEQ ID NO: 24499 - DNA, 120 bp, Artificial Sequence
  ENSG00000033867_14 (sequence is synthesized)
caccaaaaagtgtcccttctcaggaaaagagaaagattcctgtgtttcacaatggatctacccccacactgggtgagactcctaaagaggccgctcatcatgctgggcctgagctacaga

SEQ ID NO: 24500 - DNA, 120 bp, Artificial Sequence
  ENSG00000033867_15 (sequence is synthesized)
ggactggacggctttttggtggtttgatacttgacatcaaaaggaaagcaccttttttcttgagtgacttcaaggatgcattaagcctgcagtgcctggcctcgattcttttcctatact

SEQ ID NO: 24501 - DNA, 120 bp, Artificial Sequence
  ENSG00000033867_16 (sequence is synthesized)
gtgcctgtatgtctcctgtaatcacttttggagggctgcttggagaagctacagaaggcagaataagtgcaatagagtctctttttggagcatcattaactgggattgcctattcattgt

SEQ ID NO: 24502 - DNA, 120 bp, Artificial Sequence
  ENSG00000033867_17 (sequence is synthesized)
ttgctgggcaacctctaacaatattggggagcacaggtccagttctagtgtttgaaaaaattttatataaattctgcagagattatcaactttcttatctgtctttaagaaccagtattg

SEQ ID NO: 24503 - DNA, 120 bp, Artificial Sequence
  ENSG00000033867_18 (sequence is synthesized)
gtctgtggacttcttttttgtgcattgttttggttgcaacagatgcaagcagccttgtgtgttatattactcgatttacagaagaggcttttgcagcccttatttgcatcatattcatct

SEQ ID NO: 24504 - DNA, 120 bp, Artificial Sequence
  ENSG00000033867_19 (sequence is synthesized)
acgaggctttggagaagctctttgatttaggagaaacatatgcatttaatatgcacaacaacttagataaactgaccagctactcatgtgtatgtactgaacctccaaaccccagcaatg

SEQ ID NO: 24505 - DNA, 120 bp, Artificial Sequence
  ENSG00000033867_20 (sequence is synthesized)
aaactctagcacaatggaagaaagataatataacagcacacaatatttcctggagaaatcttactgtttctgaatgtaaaaaacttcgtggtgtattcttggggtcagcttgtggtcatc

SEQ ID NO: 24506 - DNA, 120 bp, Artificial Sequence
  ENSG00000033867_21 (sequence is synthesized)
atggaccttatattccagatgtgctcttttggtgtgtcatcttgtttttcacaacattttttctgtcttcattcctcaagcaatttaagaccaagcgttactttcctaccaaggtgcgat

SEQ ID NO: 24507 - DNA, 120 bp, Artificial Sequence
  ENSG00000033867_22 (sequence is synthesized)
cgacaatcagtgattttgctgtatttctcacaatagtaataatggttacaattgactaccttgtaggagttccatctcctaaacttcatgttcctgaaaaatttgagcctactcatccag

SEQ ID NO: 24508 - DNA, 120 bp, Artificial Sequence
  ENSG00000033867_23 (sequence is synthesized)
agagagggtggatcataagcccactgggagataatccttggtggaccttattaatagctgctattcctgctttgctttgtaccattctcatctttatggatcaacaaatcacagctgtaa

SEQ ID NO: 24509 - DNA, 120 bp, Artificial Sequence
  ENSG00000033867_24 (sequence is synthesized)
ttataaacagaaaggaacacaaattgaagaaaggagctggctatcaccttgatttgctcatggttggcgttatgttgggagtttgctctgtcatgggacttccatggtttgtggctgcaa

SEQ ID NO: 24510 - DNA, 120 bp, Artificial Sequence
  ENSG00000033867_25 (sequence is synthesized)
cagtgttgtcaataagtcatgtcaacagcttaaaagttgaatctgaatgttctgctccaggggaacaacccaagtttttgggaattcgtgaacagcgggttacagggctaatgattttta

SEQ ID NO: 24511 - DNA, 120 bp, Artificial Sequence
  ENSG00000033867_26 (sequence is synthesized)
ttctaatgggcctctctgtgttcatgacttcagtcctaaagtttattccaatgcctgttctgtatggtgttttcctttatatgggagtttcctcattaaaaggaatccagttatttgacc

SEQ ID NO: 24512 - DNA, 120 bp, Artificial Sequence
  ENSG00000033867_27 (sequence is synthesized)
gtataaaattatttggaatgcctgctaagcatcagcctgatttgatatacctccgttatgtgccgctctggaaggtccatattttcacagtcattcagcttacttgtttggtccttttat

SEQ ID NO: 24513 - DNA, 120 bp, Artificial Sequence
  ENSG00000033867_28 (sequence is synthesized)
gggtgataaaagtttcagctgctgcagtggtttttcccatgatggttcttgcattagtgtttgtgcgcaaactcatggacctgtgtttcacgaagagagaacttagttggcttgatgatc

SEQ ID NO: 24514 - DNA, 120 bp, Artificial Sequence
  ENSG00000033867_29 (sequence is synthesized)
ttatgccagaaagtaagaaaaagaaagaagatgacaaaaagaaaaaagagaaagaggaagctgaacggatgcttcaagatgatgatgatactgtgcaccttccatttgaagggggaagtc

SEQ ID NO: 24515 - DNA, 120 bp, Artificial Sequence
  ENSG00000033867_30 (sequence is synthesized)
tcttgcaaattccagtcaaggccctaaaatatagtcctgataaacctgtgagtgtgaaaataagttttgaagatgaaccaagaaagaaatacgtggatgctgaaacttcattatagaatt

SEQ ID NO: 24516 - DNA, 120 bp, Artificial Sequence
  ENSG00000033867_31 (sequence is synthesized)
gaaccaagaggcattatacatatagatatatacatatgtaatgtgtgcgtatcatgtcactatatataagaatattgtatgtcatgctgtttatgtgtgactaccgggtttttaaaagta

SEQ ID NO: 24517 - DNA, 120 bp, Artificial Sequence
  ENSG00000033867_32 (sequence is synthesized)
cttaactattcaaatatttattctgttagaaaaaaaaattttctgttttgcaatagaaggatgtggagaaatgctttcagtctacttttcttaaatctctgttcatcagtggcaattcgt

SEQ ID NO: 24518 - DNA, 120 bp, Artificial Sequence
  ENSG00000033867_33 (sequence is synthesized)
aaaaaccttaagtgatactttgtttatatgtttataatttttaggtgtttcctgaaattttcacatattatttcacttttgttagtgctttatgggaagaatagggagtctataccagtg

SEQ ID NO: 24519 - DNA, 120 bp, Artificial Sequence
  ENSG00000033867_34 (sequence is synthesized)
ctgtgggaaaaatggtaacatttcagggcttctctatttgtgtttcatttctgtagatgtccatcgtgtttcactaactggcgttttcttagccatagagatgactgtagaacaatagaa

SEQ ID NO: 24520 - DNA, 120 bp, Artificial Sequence
  ENSG00000033867_35 (sequence is synthesized)
actttaataatgatagtttttaacttttatgtttaaattttttttaaatcttaaaaccttcatatctaggtatccattgtgacagacaagtaaaattgcaggtgatttgataattaagca

SEQ ID NO: 24521 - DNA, 120 bp, Artificial Sequence
  ENSG00000033867_36 (sequence is synthesized)
cccataccatttataacttctgaatttaaaaagttatacaatgccagtttgcaatagttgattttgatgcctttgtagaatattttttctgaatccttatgctcttttaaagccaatgat

SEQ ID NO: 24522 - DNA, 120 bp, Artificial Sequence
  ENSG00000033867_37 (sequence is synthesized)
tcccactctgttctctgccttgtctctctttgtcttaaaatgctttagtttccatcaggttcaagttcttgactattattctcttataagtagtaggcgtaaataatcaggagttagaat

SEQ ID NO: 24523 - DNA, 120 bp, Artificial Sequence
  ENSG00000033867_38 (sequence is synthesized)
tctctcagaagggtctatgatcagtattactttattaagaattacctttcattttctctttatgttattctttcacttttgtagattacatttaatagcttgttacctgtgattttattt

SEQ ID NO: 24524 - DNA, 120 bp, Artificial Sequence
  ENSG00000033867_39 (sequence is synthesized)
agcttgttacctgtgattttattttaaaatatttattttgatatgatgcttaaatattatataaacatttggaaaagtaacaaatagagtaaattgttaatgtaaatagttggtgcttac

SEQ ID NO: 24525 - DNA, 120 bp, Artificial Sequence
  ENSG00000033867_40 (sequence is synthesized)
agcaattgatagattttacatctttgatataaagcactgccatatttatattttaaaaggaaattagacattttatatgtagctcagattaatgacatttttattttgtgtattagtttt

SEQ ID NO: 24526 - DNA, 120 bp, Artificial Sequence
  ENSG00000033867_41 (sequence is synthesized)
tgcttttctgagctttttaaagtctaacaaatctttttagtcatcttttatatacttttagttccacatgaaataaatgttgttaagcctgtaggactggatgaatggggttgtgaaact

SEQ ID NO: 24527 - DNA, 120 bp, Artificial Sequence
  ENSG00000033867_42 (sequence is synthesized)
gatttgacaagagaataatttacaaaaatcaaatgagtattgagaagccacagaaatatcaaaaatggtgacatcactattaggatgaaaattttatgaaattccaatgctccctttaac

SEQ ID NO: 24528 - DNA, 120 bp, Artificial Sequence
  ENSG00000033867_43 (sequence is synthesized)
catataattaaattacaaaggtatacataattaatctaataaaggatcatgaggaatgccaaaagctgaaattttagcaagtctggtgttttaaattcattataaactatttattaacta

SEQ ID NO: 24529 - DNA, 120 bp, Artificial Sequence
  ENSG00000033867_44 (sequence is synthesized)
atgtaatgtcctcctctaagaccatattgtaagagtcttgttaaaatgatggattcaacttctgcctcggatgagaggttggaaatgtagctgcttttctttagaaaatatgtagctgtc

SEQ ID NO: 24530 - DNA, 120 bp, Artificial Sequence
  ENSG00000033867_45 (sequence is synthesized)
atcatttggtactgcctaaaaagagttagactctattggcaattgatagagtattacccacggtgcttattattgtttatgagcttccattgtaatgattcctttttatttgtagcagca

SEQ ID NO: 24531 - DNA, 120 bp, Artificial Sequence
  ENSG00000033867_46 (sequence is synthesized)
taattatttccaaagaccccagtatttgctgctatttttaaaactcccctgatgtacctgaacaagaggatttcctcacatcatttccttgtgtctggacatcaggggtaacaactgtac

SEQ ID NO: 24532 - DNA, 120 bp, Artificial Sequence
  ENSG00000033867_47 (sequence is synthesized)
ttactttacaggaagaaattttaaaactgaaaactacctgggatcatagtgtttctgtgattttatttaattgtgtatagtaattatccagtgccagaaaaaccgtcacttgcaaaatac

SEQ ID NO: 24533 - DNA, 120 bp, Artificial Sequence
  ENSG00000033867_48 (sequence is synthesized)
tttgcactcaaaatgtttttacaatgcttctaaatgttactggtttctgctttcttttgactacttgactgacaaaatgatctgactactccatttaagagcaaaggtaactcatgttta

SEQ ID NO: 24534 - DNA, 120 bp, Artificial Sequence
  ENSG00000033867_49 (sequence is synthesized)
ggtaattaactgcttgttttaagtgattatatttcttccactgtttttgaaaaataatcaaagatagcattcattgagagacagtgacagatataatttactacatatattgatttttaa

SEQ ID NO: 24535 - DNA, 120 bp, Artificial Sequence
  ENSG00000033867_50 (sequence is synthesized)
ataaagttgccttaaataagtgtatgtaagcagtagtagttgctatgtactgatttacctcaaggtgcaaaataattaaacctgtacatattccatttacaaaataaattcagccctgca

SEQ ID NO: 24536 - DNA, 120 bp, Artificial Sequence
  ENSG00000033867_51 (sequence is synthesized)
ctttctttagatgccttgatttccagaatggagcttagtgctactgaataccctggccacagagccacctcaggatattcttttctccaccctagtttatttatttatagatatctgttt

SEQ ID NO: 24537 - DNA, 120 bp, Artificial Sequence
  ENSG00000033867_52 (sequence is synthesized)
acaaagtctgtagtaaatcctgatgctgaccatctgaaatgtactttttttctgaatgctgtttcaatctaaaatagcagcttttgagaaaacaatgatgtaaattccttatgataaaag

SEQ ID NO: 24538 - DNA, 120 bp, Artificial Sequence
  ENSG00000033867_53 (sequence is synthesized)
gatgattctatatattctttaatgatattaaatatgccgaagccaagcacacagtctttctaaagtgtgtgtatgtttgtgtgaatgtgaatgatactgatcttatatctgttaaaagtt

SEQ ID NO: 24539 - DNA, 120 bp, Artificial Sequence
  ENSG00000033867_54 (sequence is synthesized)
gttttaaaaagctgtggcatcccattgttcatatttgccaagtcttctgtaaagatgtctaggacgaaatattttatgtgctaatgcatgtatttgtaaaccagatttgtttaccactca

SEQ ID NO: 24540 - DNA, 120 bp, Artificial Sequence
  ENSG00000033867_55 (sequence is synthesized)
aaattaacttgttttcttcatccaaaaaagtttatttcttccacgtacttaaattttctgtgtgggtataatatagctttctaatttttttctttcacaaaggcaggttcaaaattctgt

SEQ ID NO: 24541 - DNA, 120 bp, Artificial Sequence
  ENSG00000033867_56 (sequence is synthesized)
tgaaagaaaaatgctttctgaaactgaggtataacaccagagcttgctgtttaaaggattatatgatgtacatcagttctataaatgtgctcagcagtttaacatgtgaatcctgtttta

SEQ ID NO: 24542 - DNA, 120 bp, Artificial Sequence
  ENSG00000033867_57 (sequence is synthesized)
aagtgctcagatttcaactgtgtaagccattgatataacgctgtaattaaaaatgtttatatgaaataacttaatgttttaaatttatttatgtagatcacatcatttttatcgtatgca

SEQ ID NO: 24543 - DNA, 120 bp, Artificial Sequence
  ENSG00000033867_58 (sequence is synthesized)
gtgcaaatatgtgaaatgtcttttggtttattccaacaattatttattttagaaagtaagtttaaagactttaaggacattcaaagtttaaaatagtgttcaaattgcaaaatttggcaa

SEQ ID NO: 24544 - DNA, 120 bp, Artificial Sequence
  ENSG00000033867_59 (sequence is synthesized)
tcttcatataaattggtttcttttctaacttttcaaaaactaacattaaatgtcaattataggaaaacatagttggaaatgtaatcatccaaagatcatttttaaaatgaaatttaatta

SEQ ID NO: 24545 - DNA, 120 bp, Artificial Sequence
  ENSG00000033867_60 (sequence is synthesized)
gcacatattgaacatttgacttaattgttaaaccccagttttgttttgtttttttaatcagatttttgcacactgattagtttttgtgttgtggcttttgttgctttattattcaaggtt

SEQ ID NO: 24546 - DNA, 120 bp, Artificial Sequence
  ENSG00000033867_61 (sequence is synthesized)
ttttttttttttcttccccatgggggagattgtcttccaatgtttaactacgtttaaataaataaaaattgaattttattgttcatttatataaaatctgataccttgatgtaatttcac

SEQ ID NO: 24547 - DNA, 120 bp, Artificial Sequence
  ENSG00000033867_62 (sequence is synthesized)
tccaatttttatggcttttataattacaatgatattttcttctataataaaatccaaagtaaacatttaaattgtagaactgatatttttcatttatatgaagtataagcctctactggg

SEQ ID NO: 24548 - DNA, 120 bp, Artificial Sequence
  ENSG00000033867_63 (sequence is synthesized)
ctactgggtctatattgtgaatcatcctgcctttcaaatttgtttcataattgttagatgaaaactatttttttggagatgttactgaagttgattgagcaataaaagtctacttaatta

SEQ ID NO: 24549 - DNA, 120 bp, Artificial Sequence
  ENSG00000033867_64 (sequence is synthesized)
cctactaaagccagcccagcagtcgcagcgcgcacacgcacgccccgcgtctcccgcgcccggcgcccggctctccccacgcgcgcacacctcgcgcacggacgcacccacgtttgtcct

SEQ ID NO: 24550 - DNA, 120 bp, Artificial Sequence
  ENSG00000033867_65 (sequence is synthesized)
gctcggcggcggcggcaggggcagcggcagaagcaggcagaccgcgcggggcagtaccgtagcggccgtcacgggctggccggccggccatggaggctgatggggccggcgagcagatga

SEQ ID NO: 24551 - DNA, 120 bp, Artificial Sequence
  ENSG00000033867_66 (sequence is synthesized)
cctaaaatatagtgttgatccctcaattgttaacatatcagatgaaatggccaaaactgcacagtggaaggcactttccatgaatactgagaatgccaaagtaaccagatctaacatgag

SEQ ID NO: 24552 - DNA, 120 bp, Artificial Sequence
  ENSG00000033867_67 (sequence is synthesized)
tcttactgaggaaataagtagtaatttgtggctaatattattaacattgatgatagtaattttttagtagactggtgcttacaaacctgcatgtgatgtctgtgatatgttaatttaagg

SEQ ID NO: 24553 - DNA, 120 bp, Artificial Sequence
  ENSG00000033867_68 (sequence is synthesized)
taaaaactgtgagaagggttacagttaacctgtgagtacttgaataactttacaccattactagtgttagaaattctgaaaaagaatatgtgaataatacgatatttccatccataccta

SEQ ID NO: 24554 - DNA, 120 bp, Artificial Sequence
  ENSG00000033867_69 (sequence is synthesized)
cccatagatatcgtgaaacgtcagtactttttgaactacagtcatttgttctggagctaccaccactagaacgttaattctgggagtgatgttacagcactaatgattcagtctttcctg

SEQ ID NO: 24555 - DNA, 120 bp, Artificial Sequence
  ENSG00000033867_70 (sequence is synthesized)
aacccaaactttattccattctgttgtttctgatgtattttccactttctagtctccatgcttctcaatgtgggaaaaaaagaagttaaaatctaccacattgtataattgatttagtaa

SEQ ID NO: 24556 - DNA, 120 bp, Artificial Sequence
  ENSG00000033867_71 (sequence is synthesized)
tttgaggttaatactccatgccaactggttaataaagaaattattcgtagtgaaaaatgtatattacgtgcctgagctcacagtaggaagatgatggtaccataagagttgctaggttag

SEQ ID NO: 24557 - DNA, 120 bp, Artificial Sequence
  ENSG00000033867_72 (sequence is synthesized)
ttgcgaaatgtgtttcttatatttttggaaagaattaaatataaatgtgtttcactgttaacattgtcactagttaaaagctccatttgtacgttgtagtgacaattttatcaataaaag

SEQ ID NO: 24558 - DNA, 120 bp, Artificial Sequence
  ENSG00000033867_73 (sequence is synthesized)
gtttatgataattaaaagtatattccctaagtatttttaatgataatcagactcaggtcttccatcttttgtggttcacaccaactcacgttttatttctttttgcaaaaggccacaatt

SEQ ID NO: 24559 - DNA, 120 bp, Artificial Sequence
  ENSG00000033867_74 (sequence is synthesized)
tttgtaaattctaattgtattattttaaatattaaaatgtatagctttggtattgcttaaaatgttgttctagttttgctggtatgttactaacaccgggcacttattttttttaacctt

SEQ ID NO: 24560 - DNA, 120 bp, Artificial Sequence
  ENSG00000034053_0 (sequence is synthesized)
cagtctcctgaatatttacgcgttgctgaatctcctgtggacaaaccaccaataggccaggactgtcctgtggacagacggggtgagcctcttcttgtgtctggagattctgaaaagatt

SEQ ID NO: 24561 - DNA, 120 bp, Artificial Sequence
  ENSG00000034053_1 (sequence is synthesized)
tgatcaccaggagatttttcgggacattaccaaaccactcattttagtggctgcctccgggtgatgatggctgtgtgaacgactgccatggcccaccggaagcttgagagcgtggggagc

SEQ ID NO: 24562 - DNA, 120 bp, Artificial Sequence
  ENSG00000034053_2 (sequence is synthesized)
ggcatgttggaccatagggtgagaccaggtcctgtccctcacagccaggagcccgagagcgaggacatggagctgcccttggagggctatgtgcccgagggcctggagctggctgccctg

SEQ ID NO: 24563 - DNA, 120 bp, Artificial Sequence
  ENSG00000034053_3 (sequence is synthesized)
cggccagagagccccgcgccagaggaacaggagtgccacaaccacagccccgatggggactccagctctgactacgtgaacaacacctctgaggaggaggactatgacgagggcctccct

SEQ ID NO: 24564 - DNA, 120 bp, Artificial Sequence
  ENSG00000034053_4 (sequence is synthesized)
gaggaggaggagggcatcacctactacatccgctactgccctgaggacgacagctacctagagggcatggactgcaacggggaggagtacctggcccacagtgcacaccctgtggacact

SEQ ID NO: 24565 - DNA, 120 bp, Artificial Sequence
  ENSG00000034053_5 (sequence is synthesized)
gatgagtgccaggaggcggtggaggagtggacggactcggcgggcccgcacccccacggccacgaggctgaaggcagccaggactacccagacggccaactgcccattccggaggatgag

SEQ ID NO: 24566 - DNA, 120 bp, Artificial Sequence
  ENSG00000034053_6 (sequence is synthesized)
ccctccgtccttgaggcccatgaccaggaagaagatggtcactactgtgccagcaaagagggctaccaggactactaccccgaggaggccaacgggaacaccggcgcctccccctaccgc

SEQ ID NO: 24567 - DNA, 120 bp, Artificial Sequence
  ENSG00000034053_7 (sequence is synthesized)
ctgaggcgtggggatggggacctggaggaccaggaggaggacattgaccagatcgtggcagagatcaagatgagtctgagcatgaccagcatcaccagcgccagtgaggccagccccgag

SEQ ID NO: 24568 - DNA, 120 bp, Artificial Sequence
  ENSG00000034053_8 (sequence is synthesized)
catgggcctgagccagggcctgaggactctgtagaggcctgcccacccatcaaggccagctgcagccccagcaggcacgaggcgaggcccaagtcgctgaacctccttcccgaggccaag

SEQ ID NO: 24569 - DNA, 120 bp, Artificial Sequence
  ENSG00000034053_9 (sequence is synthesized)
caccccggagacccccagagaggcttcaagcccaagaccaggaccccagaagagaggctgaagtggccccacgagcaggtttgcaatggtctggagcagccaaggaagcagcagcgctct

SEQ ID NO: 24570 - DNA, 120 bp, Artificial Sequence
  ENSG00000034053_10 (sequence is synthesized)
gatctcaatggacctgttgacaataacaacattccagagacaaagaaggtggcatcatttccaagttttgtggctgttccagggccctgcgaaccagaagacctcatcgacgggatcatc

SEQ ID NO: 24571 - DNA, 120 bp, Artificial Sequence
  ENSG00000034053_11 (sequence is synthesized)
tttgctgccaattacctggggtccacccagctgctatcagaacggaacccttccaaaaacatcagaatgatgcaagcgcaggaggccgtcagccgggtcaagaggatgcaaaaggctgct

SEQ ID NO: 24572 - DNA, 120 bp, Artificial Sequence
  ENSG00000034053_12 (sequence is synthesized)
aagatcaagaaaaaagcgaattctgagggggatgcccagacgctgacggaagtggacctcttcatttccacccagaggatcaaggttttaaatgcagacacgcaggaaaccatgatggac

SEQ ID NO: 24573 - DNA, 120 bp, Artificial Sequence
  ENSG00000034053_13 (sequence is synthesized)
cacgccttgcgtaccatctcctacatcgccgacattgggaacattgtagtgctgatggccagacgccgcatgccccggtcagcctctcaggactgcatcgagaccacgcccggggcccag

SEQ ID NO: 24574 - DNA, 120 bp, Artificial Sequence
  ENSG00000034053_14 (sequence is synthesized)
gaaggcaagaagcagtataagatgatctgccatgtgttcgagtcggaggatgcccagctcatcgcccagtctatcggccaggccttcagcgtggcctaccaggagttcctgcgagccaat

SEQ ID NO: 24575 - DNA, 120 bp, Artificial Sequence
  ENSG00000034053_15 (sequence is synthesized)
cagcgacatcatcaacacccaggagatgtacaacgacgacctcatccacttctcaaactcggagaactgcaaggagctgcagctggagaagcacaagggcgagatcctgggcgtggtggt

SEQ ID NO: 24576 - DNA, 120 bp, Artificial Sequence
  ENSG00000034053_16 (sequence is synthesized)
ggtggagtcgggctggggctccatcctgcccacggtgatcctggccaacatgatgaatggcggcccggctgcccgctcggggaagctgagcatcggggaccagatcatgtccatcaatgg

SEQ ID NO: 24577 - DNA, 120 bp, Artificial Sequence
  ENSG00000034053_17 (sequence is synthesized)
caccagcctggtggggctgcccctcgccacctgccaaggcatcatcaagggcctgaagaaccagacacaggtgaagctcaacattgtcagctgtcccccggtcaccacggtccttatcaa

SEQ ID NO: 24578 - DNA, 120 bp, Artificial Sequence
  ENSG00000034053_18 (sequence is synthesized)
gcggccagacctcaagtaccagctgggcttcagcgtgcagaatggaattatctgcagcctcatgagagggggcattgctgagcgagggggcgtccgtgtgggccaccgcatcatcgagat

SEQ ID NO: 24579 - DNA, 120 bp, Artificial Sequence
  ENSG00000034053_19 (sequence is synthesized)
caacgggcagagcgtggtggccacagcccacgagaagatagtccaagctctgtccaactcggtcggagagatccacatgaagaccatgcccgccgccatgttcaggctcctcacgggtca

SEQ ID NO: 24580 - DNA, 120 bp, Artificial Sequence
  ENSG00000034053_20 (sequence is synthesized)
ggagaccccgctgtacatctaggccaccccagcctggccacgcagccaggacaccgggcagggccgcccgggcccagaggagctgggagccgggccgcagacttgaccccgacgccacag

SEQ ID NO: 24581 - DNA, 120 bp, Artificial Sequence
  ENSG00000034053_21 (sequence is synthesized)
cccagccacggacgctggctccccaaagggtgtgccctcaccacccacttgatttttttcattttgccaaaaaggggtatgtctttatcaaaggagagtcacagaacaaatgtttgtttg

SEQ ID NO: 24582 - DNA, 120 bp, Artificial Sequence
  ENSG00000034053_22 (sequence is synthesized)
taaagcgttccaagtattttgccacgttctggactgtcttctccctgcacaagccagggtgtgtctcggtagctgtgcgtggtgtggagtgtgtgtctttcctccctgaagctgtgcgga

SEQ ID NO: 24583 - DNA, 120 bp, Artificial Sequence
  ENSG00000034053_23 (sequence is synthesized)
gcgaactggcgcctccgagggacgcggctcccggggcagggcagccgtcacccctgcctcccgcccccttggctgggacgtctggggtcctgtggggcccccacaatggtcccaaacagc

SEQ ID NO: 24584 - DNA, 120 bp, Artificial Sequence
  ENSG00000034053_24 (sequence is synthesized)
tgcctctgccactgactgcagggacacgggcagcctggctcccaggacacgacttgtaatgaaagtttggggacatgtgattgattgattgattgtaaataaaggatgatggccacaaca

SEQ ID NO: 24585 - DNA, 120 bp, Artificial Sequence
  ENSG00000034053_25 (sequence is synthesized)
tgaaaactccatatttatttagatgctattattactgtttggacttttattttggcaggcttttttccagactctagggttttccaatgtgactaatgaccacacctgcctctcccgtcg

SEQ ID NO: 24586 - DNA, 120 bp, Artificial Sequence
  ENSG00000034053_26 (sequence is synthesized)
tctcttctgggcaccctcccacccggctgcatacccgggcagggctcccacagagacaaggagggcacaggtgtctgccccctctttaaaatcgatctacacacatccacgcacatgcga

SEQ ID NO: 24587 - DNA, 120 bp, Artificial Sequence
  ENSG00000034053_27 (sequence is synthesized)
ccccgaggaaacgaaacccactctagaaaacgcgaccttggccgcacctaaagcagccagccgtgagtgcagaccccttggccagcgtggcgcagtggccctgagcagtagtggcatgtg

SEQ ID NO: 24588 - DNA, 120 bp, Artificial Sequence
  ENSG00000034053_28 (sequence is synthesized)
tgtagatcaagtcggatctagtccagctcggttcattagcgatccatgtaatctgacgtcatcttgtctcgaagtctctttttttggcccaggccttgaagaatacactgtgacttaaga

SEQ ID NO: 24589 - DNA, 120 bp, Artificial Sequence
  ENSG00000034053_29 (sequence is synthesized)
agccttaccacgcagtaactaaagctttaggatgactgtattcgaggagtgccgtgtgttgcatgcagctacccgtaggaagacttcgcgcatatcactaataaacctgaagtcgtgatg

SEQ ID NO: 24590 - DNA, 120 bp, Artificial Sequence
  ENSG00000034053_30 (sequence is synthesized)
cgtgccgtacgctgcgtccggggcgcgcccgccgctattcgggaagctattcagcttcccgggctcattagcagtcgcggtgtgcggctcggcgcgggctcacaaagagctcggcctcgc

SEQ ID NO: 24591 - DNA, 120 bp, Artificial Sequence
  ENSG00000034053_31 (sequence is synthesized)
ggactgagccggcggcagcggggcggggacggcggcgtacccgggcagcccagcgccctggccaggcggagggagctgttcatcctctgggggctgctgggccagaaatatctcttacct

SEQ ID NO: 24592 - DNA, 120 bp, Artificial Sequence
  ENSG00000034053_32 (sequence is synthesized)
acataacagtaaggcaagaagatgactgcatttatcttctcagaatcacttcttcttaattgttgcttcccactattggcattggtgaaaggctgggccacaggaggctggatgaacttt

SEQ ID NO: 24593 - DNA, 120 bp, Artificial Sequence
  ENSG00000034053_33 (sequence is synthesized)
gcagatgagggcctgcttgggtctggggcgtcagtggggattggctgcaggcagccatgaggagccttcagggtgatgagggttctaaaagtgcgtcgtgtgcctgagccactgcgacat

SEQ ID NO: 24594 - DNA, 120 bp, Artificial Sequence
  ENSG00000034053_34 (sequence is synthesized)
tcactagaagtcctccgtgctgacggagggtgaactgtgtggggcccaagttctatctcaggaaagccagggaagccactcagttcagctttgtgaaaatcaagggagtcttcttggagg

SEQ ID NO: 24595 - DNA, 120 bp, Artificial Sequence
  ENSG00000034053_35 (sequence is synthesized)
aatggaattgtgagttccccctcctgctctgggccaccaccaccactgcagggcccagggagggggagcagctcccgtccaatggggcaggctatgtctggcagcctggtaggacctggc

SEQ ID NO: 24596 - DNA, 120 bp, Artificial Sequence
  ENSG00000034053_36 (sequence is synthesized)
ctgtggttgcagctgcccacagccaggccacctggggcaggaactttccatggctctctgggaggtcctggctagaaggggagggccagggcatggccgtggattgggcccctccagcct

SEQ ID NO: 24597 - DNA, 120 bp, Artificial Sequence
  ENSG00000034053_37 (sequence is synthesized)
gtgcggctcggcgcgggctcacaaagagctcggcctcgcggactgagccggcggcagcggggcggggacggcggcgtacccgggcagcccagcgccctggccaggcgtgcctgtgcttaa

SEQ ID NO: 24598 - DNA, 120 bp, Artificial Sequence
  ENSG00000034053_38 (sequence is synthesized)
gcctgtgcttaatcagcactgacgactggtgctgcttcagttgatttgatacacctagaggcagcctcatctccaacttgccttgacttcgtctggggagctgccgtgggggacccctgg

SEQ ID NO: 24599 - DNA, 120 bp, Artificial Sequence
  ENSG00000034053_39 (sequence is synthesized)
agtggtgagcacggtgtcgggggccgcattagctattgatttatgtgctgttatagaattaattgagtctggacatggagactcattttcttggacatgtagcagtggctgcctccgggt

SEQ ID NO: 24600 - DNA, 120 bp, Artificial Sequence
  ENSG00000034053_40 (sequence is synthesized)
gaaagaagacgtccacgctgctgagtgagaccttcctctgtgctgctgagtgagaccttccatctgaccagggggtcatgctctcactgctcctgcttggagttctggtgctgtagcggg

SEQ ID NO: 24601 - DNA, 120 bp, Artificial Sequence
  ENSG00000034053_41 (sequence is synthesized)
tctcggccgccccttctgagctgggtggaggaagaagtccctgttgaaatatcagatgagtagggatgatcgcctcttttgaaaacaggagccgtgaagggattcccagagaagattgtc

SEQ ID NO: 24602 - DNA, 120 bp, Artificial Sequence
  ENSG00000034053_42 (sequence is synthesized)
atctaacggagtcattcgtccgcccaggacttctctgtcacagggttacgtttgggagaattttcacaggccactggggatggctgtggctagcctggctttccactgatgccctctatc

SEQ ID NO: 24603 - DNA, 120 bp, Artificial Sequence
  ENSG00000034053_43 (sequence is synthesized)
cctaacctcagctcctgacatggctgtcattccagagagtgcttggaagcatcctgactatgttgacgatggcctgagcggagtttgcaatggtctggagcagccaaggaagcagcagcg

SEQ ID NO: 24604 - DNA, 120 bp, Artificial Sequence
  ENSG00000034053_44 (sequence is synthesized)
ccagggcactcccctcccaaagttcacagcccagggcggctccaggatccaggcgctgtggaaaccaccctcaggtggaaagcctccatgctgttactgatgtttccagtggatcagtga

SEQ ID NO: 24605 - DNA, 120 bp, Artificial Sequence
  ENSG00000034053_45 (sequence is synthesized)
tcttttgcatactctttgggtttgcaaagatagtgaatacagttttattctacttcttgaaataggttcttcaggagctgtttataaattgagttgtggttaaatatatgagggagctat

SEQ ID NO: 24606 - DNA, 120 bp, Artificial Sequence
  ENSG00000034053_46 (sequence is synthesized)
ttgaagaaatccctttacaaaacattttctctactaaaaatgaagttaatctttgcataacttttgttattaaaatgcaaattttcgcatggccctggcatgctgtataaagaaagcaca

SEQ ID NO: 24607 - DNA, 120 bp, Artificial Sequence
  ENSG00000034053_47 (sequence is synthesized)
tctgcacatgaggcttagttctgcctttgcgtgtggtcttcagaggaagtaaaaagtgattctgaagtataagataccaaagactcaggaaaagatcacaagccctttggctccctcctt

SEQ ID NO: 24608 - DNA, 120 bp, Artificial Sequence
  ENSG00000034053_48 (sequence is synthesized)
ggctggagaagagtgttgtttttagcctggagggggacagaggggctgaggaaggagcagcagggccaagaggggagctcagagaggaactgtccttcctggaggctgatcttactcaca

SEQ ID NO: 24609 - DNA, 120 bp, Artificial Sequence
  ENSG00000034053_49 (sequence is synthesized)
gaccagcagggggcgctgctggtgagccagttttgtggctgttgccagagtgaaattttaaaatatgatctatggctgggcacggtagttcatgcctgtaatcccaacacttttgggagg

SEQ ID NO: 24610 - DNA, 82 bp, Artificial Sequence
  ENSG00000034053_50 (sequence is synthesized)
tgcgaaaccctagtctctactaaagatacaaaaaaattagccaagcttggtggtgcgtgcctgtaatcccagctacgtggga

SEQ ID NO: 24611 - DNA, 120 bp, Artificial Sequence
  ENSG00000034053_51 (sequence is synthesized)
cagctcagccccactgcaaggagctcctgggtttatttaagtgagcctcagataactttacataaaagcaaatgtgtaaaaagcgataaagtcagatatattgaacatttgtcctgaggg

SEQ ID NO: 24612 - DNA, 120 bp, Artificial Sequence
  ENSG00000034053_52 (sequence is synthesized)
caaatttctgagctctaaaagccagtttggttttagataacatctgtgagtctggaaacaggctgagatactctatatctgcactcccaactctgcctttggctttgtgagccctgtggt

SEQ ID NO: 24613 - DNA, 80 bp, Artificial Sequence
  ENSG00000034152_0 (sequence is synthesized)
agtctgtctccggcgccgcccgtcgcggactcgtccttgctgcagtcgccgccgcagtcctcgccgcagtcgccgccgcc

SEQ ID NO: 24614 - DNA, 120 bp, Artificial Sequence
  ENSG00000034152_1 (sequence is synthesized)
gtctgcccgcagccatgagcgtgctcggccccggtggagcccgcagtcctctagattagtctccaccgccgtccaggacccacttgcagcatggagtcgcccgcctcgagccagcccgcc

SEQ ID NO: 24615 - DNA, 120 bp, Artificial Sequence
  ENSG00000034152_2 (sequence is synthesized)
agcatgccccagtccaaaggaaaatccaagaggaagaaggatctacggatatcctgcatgtccaagccacccgcacccaaccccacacccccccggaacctggactcccggaccttcatc

SEQ ID NO: 24616 - DNA, 120 bp, Artificial Sequence
  ENSG00000034152_3 (sequence is synthesized)
accattggagacagaaactttgaggtggaggctgatgacttggtgaccatctcagaactgggccgtggagcctatggggtggtagagaaggtgcggcacgcccagagcggcaccatcatg

SEQ ID NO: 24617 - DNA, 120 bp, Artificial Sequence
  ENSG00000034152_4 (sequence is synthesized)
gccgtgaagcggatccgggccaccgtgaactcacaggagcagaagcggctgctcatggacctggacatcaacatgcgcacggtcgactgtttctacactgtcaccttctacggggcacta

SEQ ID NO: 24618 - DNA, 120 bp, Artificial Sequence
  ENSG00000034152_5 (sequence is synthesized)
ttcagagagggagacgtgtggatctgcatggagctcatggacacatccttggacaagttctaccggaaggtgctggataaaaacatgacaattccagaggacatccttggggagattgct

SEQ ID NO: 24619 - DNA, 120 bp, Artificial Sequence
  ENSG00000034152_6 (sequence is synthesized)
gtgtctatcgtgcgggccctggagcatctgcacagcaagctgtcggtgatccacagagatgtgaagccctccaatgtccttatcaacaaggagggccatgtgaagatgtgtgactttggc

SEQ ID NO: 24620 - DNA, 120 bp, Artificial Sequence
  ENSG00000034152_7 (sequence is synthesized)
atcagtggctacttggtggactctgtggccaagacgatggatgccggctgcaagccctacatggcccctgagaggatcaacccagagctgaaccagaagggctacaatgtcaagtccgac

SEQ ID NO: 24621 - DNA, 120 bp, Artificial Sequence
  ENSG00000034152_8 (sequence is synthesized)
gtctggagcctgggcatcaccatgattgagatggccatcctgcggttcccttacgagtcctgggggaccccgttccagcagctgaagcaggtggtggaggagccgtccccccagctccca

SEQ ID NO: 24622 - DNA, 120 bp, Artificial Sequence
  ENSG00000034152_9 (sequence is synthesized)
cccttcttcaccttgcacaaaaccaagaagacggacattgctgccttcgtgaaggagatcctgggagaagactcataggggctgggcctcggaccccactccggccctccagagccccac

SEQ ID NO: 24623 - DNA, 120 bp, Artificial Sequence
  ENSG00000034152_10 (sequence is synthesized)
agccccatctgcgggggcagtgctcacccacaccataagctactgccatcctggcccagggcatctgggaggaaccgagggggctgctcccacctggctctgtggcgagccatttgtccc

SEQ ID NO: 24624 - DNA, 120 bp, Artificial Sequence
  ENSG00000034152_11 (sequence is synthesized)
aagtgccaaagaagcagaccattggggctcccagccaggcccttgtcggccccaccagtgcctctccctgctgctcctaggacccgtctccagctgctgagatcctggactgagggggcc

SEQ ID NO: 24625 - DNA, 120 bp, Artificial Sequence
  ENSG00000034152_12 (sequence is synthesized)
tggatgccccctgtggatgctgctgcccctgcacagcaggctgccagtgcctgggtggatgggccaccgccttgcccagcctggatgccatccaagttgtatatttttttaatctctcga

SEQ ID NO: 24626 - DNA, 120 bp, Artificial Sequence
  ENSG00000034152_13 (sequence is synthesized)
ctgaatggactttgcacactttggcccagggtggccacacctctatcccggctttggtgcggggtacacaagaggggatgagttgtgtgaataccccaagactcccatgagggagatgcc

SEQ ID NO: 24627 - DNA, 120 bp, Artificial Sequence
  ENSG00000034152_14 (sequence is synthesized)
atgagccgcccaaggccttcccctggcactggcaaacagggcctctgcggagcacactggctcacccagtcctgcccgccaccgttatcggtgtcattcacctttcgtgttttttttaat

SEQ ID NO: 24628 - DNA, 120 bp, Artificial Sequence
  ENSG00000034152_15 (sequence is synthesized)
ttatcctctgttgattttttcttttgctttatgggtttggcttgtttttcttgcatggtttggagctgatcgcttctcccccaccccctagggtaccagcaggcagagccttgccctctg

SEQ ID NO: 24629 - DNA, 120 bp, Artificial Sequence
  ENSG00000034152_16 (sequence is synthesized)
ctcaggctggggtccagtgggaggggcccaagatctctgctcagagaagtgcagggggagccttccagctcactctccctgaggactggcttgacaggggctatgggtttgctttggtgt

SEQ ID NO: 24630 - DNA, 120 bp, Artificial Sequence
  ENSG00000034152_17 (sequence is synthesized)
tgtttttaaaaaaagaaaatatatttttttgaaaaaacgactgcccatcccgggtcctttccctgatgggttggggcagttacctggttgctgttttaattaaaaaaaaaaaaaaaaaaa

SEQ ID NO: 24631 - DNA, 120 bp, Artificial Sequence
  ENSG00000034152_18 (sequence is synthesized)
gccaacccatggcccagcgcccaaagggagcaaagttctcagttggcccgtgtgaggagaaggccggggcagcggaggcttccggcggccggtggatgcagaggccagtccatataccac

SEQ ID NO: 24632 - DNA, 120 bp, Artificial Sequence
  ENSG00000034152_19 (sequence is synthesized)
ccaggcctgcgaggagcgtggtccccacccatccagcccatatgtgcaagtgcccttgacagagaggctggtcatatccatggtgaccatttatgggccacaacaggtccccatctgcgc

SEQ ID NO: 24633 - DNA, 120 bp, Artificial Sequence
  ENSG00000034152_20 (sequence is synthesized)
cccaaattaatgacagcagatgctgaagtctgagatggtcagatgttaggaaggggattggctgtgaccacctgggacctgcccacctggctcatgaggctacggcccaaagttgccagc

SEQ ID NO: 24634 - DNA, 120 bp, Artificial Sequence
  ENSG00000034152_21 (sequence is synthesized)
tcctcagatttttccagagcagctggaacctgcattgttttgtaaaatcttcagaattcaggttttctgaaaaccctatgatggtcccaccagtcccggtgtgggctgaatctgcttcct

SEQ ID NO: 24635 - DNA, 120 bp, Artificial Sequence
  ENSG00000034152_22 (sequence is synthesized)
gagctgggtcctgctggctgggtcggaggagctaagagctggcatccccggctttctcgcctttgttctgctgggatgtggtagggagatcagctgtgcagctttgacgcctggctctgg

SEQ ID NO: 24636 - DNA, 120 bp, Artificial Sequence
  ENSG00000034152_23 (sequence is synthesized)
atggccttgctgacctcgagccgggcccacgtggggacctttggagcacagcctacgatcctggtgcaaggaatgtcccattcttctgatgctctgggagggctgagcatcacttgtggg

SEQ ID NO: 24637 - DNA, 120 bp, Artificial Sequence
  ENSG00000034152_24 (sequence is synthesized)
tccccctgccctgtcatggcctcttaaagcctgagcatggggcctgccccacagtgtgggagcctggggccagagtcccaccgatctgaccccttttgtgctggggattttgtgtgcatg

SEQ ID NO: 24638 - DNA, 120 bp, Artificial Sequence
  ENSG00000034152_25 (sequence is synthesized)
gtggacttcactgctcagtgcctgaggaagaaccccgcagagcgtatgagctacctggagctgatggtgagtatgggcgggaggtgcctgccctgctcttcagggctggctggggctggg

SEQ ID NO: 24639 - DNA, 120 bp, Artificial Sequence
  ENSG00000034152_26 (sequence is synthesized)
ggccctgtgttctctcctttaggtgctcggtcatttgtttgctcctgcatacctggctccctcctccctccttcctgcatgccaggccctgggaagggtacacaggcagtgtgtgacaga

SEQ ID NO: 24640 - DNA, 120 bp, Artificial Sequence
  ENSG00000034152_27 (sequence is synthesized)
atggggcagaggggccaagggtggcatcagggaaggcttcatggaggaggtaccatttgaactgagcctggaaggatgaataagggttatctcctgatggagaggctgtcccaagcagaa

SEQ ID NO: 24641 - DNA, 120 bp, Artificial Sequence
  ENSG00000034239_0 (sequence is synthesized)
agtaactgagacctcaccgcgttgacccagcaccagggctcgcgggggtcccgcgagggtctcggtagccgcgcgcccagagacccccgccgcggcccgattctctgagcgccagacatg

SEQ ID NO: 24642 - DNA, 120 bp, Artificial Sequence
  ENSG00000034239_1 (sequence is synthesized)
aaccgcaagaaactgcagaagctgacggacaccttaaccaaaaattgcaagcattttaataaatttgaagtgaactgtcttataaagcttttttatgacttggtgggaggagtagagagg

SEQ ID NO: 24643 - DNA, 120 bp, Artificial Sequence
  ENSG00000034239_2 (sequence is synthesized)
caaggtctggttgttggactggatcgtaatgcatttcgaaacatcctgcatgtgacatttggaatgacagatgacatgattatggacagagtattccgaggttttgataaagataatgat

SEQ ID NO: 24644 - DNA, 120 bp, Artificial Sequence
  ENSG00000034239_3 (sequence is synthesized)
ggctgtgtaaatgtattggagtggattcatggattatcactgtttcttcgaggatctttggaagaaaaaatgaaatattgctttgaagtgtttgatttgaatggtgacggattcatttca

SEQ ID NO: 24645 - DNA, 120 bp, Artificial Sequence
  ENSG00000034239_4 (sequence is synthesized)
aaggaggaaatgtttcacatgttgaagaacagccttctcaaacagccatctgaggaagaccctgatgaaggaattaaagatttggttgaaataacactgaagaaaatggatcatgaccat

SEQ ID NO: 24646 - DNA, 120 bp, Artificial Sequence
  ENSG00000034239_5 (sequence is synthesized)
gatgggaagctgtcttttgcagactatgaactggctgtgagagaagagactcttctactggaggcctttgggccatgtcttcctgatccaaagagccagatggaatttgaagctcaagta

SEQ ID NO: 24647 - DNA, 120 bp, Artificial Sequence
  ENSG00000034239_6 (sequence is synthesized)
ttcaaagatccaaatgaattcaatgatatgtgaataactaaatgtctatattgtctcaagtgagtaaaaaaggaggcacacacatattgcttattttttctacttagttcagaaaaatga

SEQ ID NO: 24648 - DNA, 120 bp, Artificial Sequence
  ENSG00000034239_7 (sequence is synthesized)
tgttgaattgtgtgtttcagggtgaagatgaggttcacttacatatatcatttaacatcagtgtaagatgcaattaaaatagatggaagacaagaagtcccttattagatgatgggtttg

SEQ ID NO: 24649 - DNA, 120 bp, Artificial Sequence
  ENSG00000034239_8 (sequence is synthesized)
gcataaaacctttgggttcattaaatgaatagagagattacataattatgaattgttaatacaaatattctgcatgtcaaaaagaagctgggtgtacactgaaaaatcattgaaactact

SEQ ID NO: 24650 - DNA, 120 bp, Artificial Sequence
  ENSG00000034239_9 (sequence is synthesized)
ggatttcctttgaaacaaataatgaagatggcatcaaaagaataagagtattctattgagcattgaaacgcctttctggtaggcattgagggagatctagagagatgaaagatacatgga

SEQ ID NO: 24651 - DNA, 120 bp, Artificial Sequence
  ENSG00000034239_10 (sequence is synthesized)
aatcatattatattgaaatataatatgatttgcattattgtttgaggctttggctaaataacgttactgattgtaagcacctgaaggcaagggttttatccaccacatctttgtctgcca

SEQ ID NO: 24652 - DNA, 120 bp, Artificial Sequence
  ENSG00000034239_11 (sequence is synthesized)
tagcatttagtcctctgcatacaatgggctgtccataattactgtagattggactgaaaatcaaaaagtaccacaagataaatgcaaactcttggtgagcagagggagaacatgtactga

SEQ ID NO: 24653 - DNA, 120 bp, Artificial Sequence
  ENSG00000034239_12 (sequence is synthesized)
gtttcttaggtttcatggctaatgcattggcacagctttcagtgtatccctgcagtccttccagatagtccctgccccatgcattgcagatggttgccaaagcccccctctgtcctggca

SEQ ID NO: 24654 - DNA, 120 bp, Artificial Sequence
  ENSG00000034239_13 (sequence is synthesized)
cccagtgttcctccatcctgactccacgtattgcccccttgccactgcctgagtgcaccatagtgtccccatccccccactgcctggagttccccttgtgtacccccttatcagggcacg

SEQ ID NO: 24655 - DNA, 120 bp, Artificial Sequence
  ENSG00000034239_14 (sequence is synthesized)
acctaactgtgccctgctggctgtgacctcctgaagacagacctggcttctccctgcatccagttccccagtatgtgctgtgggcatcctgagaagcctgaaaaagacagggccaggtta

SEQ ID NO: 24656 - DNA, 120 bp, Artificial Sequence
  ENSG00000034239_15 (sequence is synthesized)
ggcttgggtgagctgctttctgccttcttggtacacacagtaagcagtggagaggcgtgttacaccgtatctgttctatcctcatctaaatactgagaggctagttgggatagtaaatct

SEQ ID NO: 24657 - DNA, 120 bp, Artificial Sequence
  ENSG00000034239_16 (sequence is synthesized)
ttcttactacatatgcattaagtttaagtaaaatagaatattgtgtgaaaaaatgcactgttactaataaatggaataaacagatccatgaaataaaagaaaacatattttactgtccaa

SEQ ID NO: 24658 - DNA, 120 bp, Artificial Sequence
  ENSG00000034239_17 (sequence is synthesized)
caaatgaattcaatgatatgtgaataactaaatgtctatattgtctcaagtgacaatgtgctatcagccctcactcggtcccggcacctcctcggcctcgaagtccactctgtccgcgct

SEQ ID NO: 24659 - DNA, 120 bp, Artificial Sequence
  ENSG00000034239_18 (sequence is synthesized)
tgaggagcccttcagcctgccactgcactgtgggatcccctctctgggcaggcctaggccagagccggctccctctgcttgtggggaggtgtggatggagaggcgcaggctggaaccggg

SEQ ID NO: 24660 - DNA, 120 bp, Artificial Sequence
  ENSG00000034239_19 (sequence is synthesized)
gctgcacgtggtgcttatgggccagcacgagttctgggtgggcgccggctcggcaggccccgcacttggagcggccggctggcctgcgggtgccgccggccccaggcagtgaggggctta

SEQ ID NO: 24661 - DNA, 120 bp, Artificial Sequence
  ENSG00000034239_20 (sequence is synthesized)
taaccaaaaattgcaagcattgtccaagttctggaagcttaccaagagacccataggagaaaacggtgctcaacttctcaacatctttcggagagatgagttgtgtcatctcatctgtgc

SEQ ID NO: 24662 - DNA, 120 bp, Artificial Sequence
  ENSG00000034239_21 (sequence is synthesized)
ctcagaacaatatttgtttggaaaccagagttcagcacaactaaacacgtgactatgaactggctgtgagagaagagactcttctactggaggcctttgggccatgtcttcctgatccaa

SEQ ID NO: 24663 - DNA, 120 bp, Artificial Sequence
  ENSG00000034239_22 (sequence is synthesized)
agctaggctcacagaggtccctggggtgagagattgtcagcgtggaggacatttggatgcactggttgaaacccaggctgccctctcctagcctgagctgcacctgcccacctcccatct

SEQ ID NO: 24664 - DNA, 120 bp, Artificial Sequence
  ENSG00000034239_23 (sequence is synthesized)
gcatttccaaagcctcgtgtggatgaaggggacctaagcagcctgctccctgagggaggacaccaccacttggagccacacagcctgaagacagagaacagtgtggaaattgaggaaatt

SEQ ID NO: 24665 - DNA, 120 bp, Artificial Sequence
  ENSG00000034239_24 (sequence is synthesized)
ggattttggaaaatcaggaacgtcctatgtgtctcaactagaaaagggcaaaagccaagattcagaccttatctagttctaatgctgaagacctttgtctaaagcaaatctgttctcgcc

SEQ ID NO: 24666 - DNA, 120 bp, Artificial Sequence
  ENSG00000034239_25 (sequence is synthesized)
atgtattgtgagatcattgattcctctcctatccactcttctcatctgaacataccttgggatttgctttctttagtgggagtttcctgcttggatgtaatgcctttcatatttggtgct

SEQ ID NO: 24667 - DNA, 120 bp, Artificial Sequence
  ENSG00000034239_26 (sequence is synthesized)
aataagaatctggacattaggctgggacctggccttaacaagagttcagatgtggtggagaacatggagtggtcactaggctggaaaactctgttggcaccaagagaggcagagtgagag

SEQ ID NO: 24668 - DNA, 120 bp, Artificial Sequence
  ENSG00000034239_27 (sequence is synthesized)
gagcgtcaacagactatgctaagagggaagagaggtagagaccaccacctgcttgtgaggagaatggtggaagccagactcctcaactagagagggacaaggaatgcttctttgggccgt

SEQ ID NO: 24669 - DNA, 120 bp, Artificial Sequence
  ENSG00000034239_28 (sequence is synthesized)
ctcggatgatgtcagggaaaggcttctacctagagaagaagaagatgccaatgataagaggccatgaaatgaagtggcaaacataataaattataatgtggtgctttccaggtgccagtc

SEQ ID NO: 24670 - DNA, 120 bp, Artificial Sequence
  ENSG00000034239_29 (sequence is synthesized)
actagcccaaggatagacagctgggacatggtagagctgggatttgtaccagatttgacctgcagcccaggccattacccatgttctagccctgactgcctcttactgtcacaagatacc

SEQ ID NO: 24671 - DNA, 120 bp, Artificial Sequence
  ENSG00000034239_30 (sequence is synthesized)
acctggcatggcacaggtcacatgaactttgaaagtgtgatataagtgaaaagtgattataggttggtaggaaccatggcatttatcatcccaaatgggatgctatcgtgaaagaagatg

SEQ ID NO: 24672 - DNA, 120 bp, Artificial Sequence
  ENSG00000034239_31 (sequence is synthesized)
ctcatagttacatcagcacaatgtaatctggggttgtcccaggcaaagcaggatgtattgtcaccctatttataggttatgaattactccacaaattaaatttatgtaaaattggaataa

SEQ ID NO: 24673 - DNA, 120 bp, Artificial Sequence
  ENSG00000034239_32 (sequence is synthesized)
tttccaagagtttcaaggtgaagatattcaagttactgttccttggtatgctttttcataattgagaatcaggaaatattttctaaggattattgtatatatcctagtatacgttgacac

SEQ ID NO: 24674 - DNA, 120 bp, Artificial Sequence
  ENSG00000034239_33 (sequence is synthesized)
ttacaatgcaaatcaggctgcactaagacctgtgggtacagcatcaagatagaacttggccctgaaaagtttatcagagaaaatattaccttactgatagcatcaaattcatgatttgtt

SEQ ID NO: 24675 - DNA, 120 bp, Artificial Sequence
  ENSG00000034239_34 (sequence is synthesized)
ggctcgggacttgcatcccgccatgcccaagccccacccgacctgtctgggtgggctcccgctctgcccgaacctccccgacaggcctgccccctgctccacagtgcctggtcccatcaa

SEQ ID NO: 24676 - DNA, 120 bp, Artificial Sequence
  ENSG00000034239_35 (sequence is synthesized)
ctgcccaagggctgaggagtgcaagtgtgcagcttacagcttactaagcttctctaaaccaatcattttgaattctttgtcaggaaattcaaggatttccatttctttggggttggttac

SEQ ID NO: 24677 - DNA, 120 bp, Artificial Sequence
  ENSG00000034239_36 (sequence is synthesized)
tggaaaatcagtcatgtttcattggttttatatgtttcttgtagctttgcatttatatctacacacgaaggagcagtcacctcttccacacttttatgggctgcctttggtggggaaaga

SEQ ID NO: 24678 - DNA, 120 bp, Artificial Sequence
  ENSG00000034239_37 (sequence is synthesized)
ccttcacctattggtgggtgtgaaggcaccagctggggtgtgacagctctggctccaggtggatacatcttggactctgggcagcttaatcagctggggtcagcatcagtgaagactgtg

SEQ ID NO: 24679 - DNA, 120 bp, Artificial Sequence
  ENSG00000034239_38 (sequence is synthesized)
ggcaccatcagtcataaaaactgtgggtgtccatgatggtgacaaaagctgctggggtcctcagtggcaaaggctactggacttctgctctcctttttccccacagagagaggtcacagc

SEQ ID NO: 24680 - DNA, 120 bp, Artificial Sequence
  ENSG00000034239_39 (sequence is synthesized)
caaaacgatcccctttgttgccaagctgtgccagggtagaagatgaggtgatgcagataaaacgcttccaacacttttatatacagctgtccttggtttgggggtgctttaatgggttcc

SEQ ID NO: 24681 - DNA, 120 bp, Artificial Sequence
  ENSG00000034239_40 (sequence is synthesized)
tgcagcttcttcactgtactctggagtattctcagagctatttttgttggcaagtagctgttaaattcttgcttttgttggggagacaagagctgggatctcctagtgtatcatcttgtt

SEQ ID NO: 24682 - DNA, 120 bp, Artificial Sequence
  ENSG00000034239_41 (sequence is synthesized)
gatattacttgcctgcttttaatattttaactaatttttctgattacaaaggaattgaggttctctgaagaatatttcagatatttaggaaattttaaaataagatgaaaatattgatta

SEQ ID NO: 24683 - DNA, 120 bp, Artificial Sequence
  ENSG00000034239_42 (sequence is synthesized)
atattctggtataaatccttccagacttttacaatgcatttgtaagtacatctacatttttgcaaagagaatactgtatttttcagatgatcatattgaaaatgcacttttgtcttggtg

SEQ ID NO: 24684 - DNA, 120 bp, Artificial Sequence
  ENSG00000034239_43 (sequence is synthesized)
tactactattttgtgaacattttttgaggtcattatttgtctgtagcttgacttgtaatggctgcctggtattccatcatgactgactttattaaaccactttcatgccattgacatgtc

SEQ ID NO: 24685 - DNA, 120 bp, Artificial Sequence
  ENSG00000034239_44 (sequence is synthesized)
tgtctcaacactctatgtggagtaccagaaagccaggctaggcctgtttaggagaggtagacatcacctcgcaagcagcatgaagaaattctatttgggaaacaattaagtgtttttttt

SEQ ID NO: 24686 - DNA, 120 bp, Artificial Sequence
  ENSG00000034239_45 (sequence is synthesized)
taactacaggatttaaaaaccaccactgaaaactggtagtcctgcattcttaacctgcaaatatctctgtgtacaagactgcacttgtaagaaaccaggcctgcaattgcttgcaccata

SEQ ID NO: 24687 - DNA, 120 bp, Artificial Sequence
  ENSG00000034239_46 (sequence is synthesized)
aaatcatccaaaacattcactaagttcctactttgtgcaacaccatgagggttaatgtattctaagctggttgtccctgccctaaccccattcaccatgtaaagtgataatttcatgggc

SEQ ID NO: 24688 - DNA, 120 bp, Artificial Sequence
  ENSG00000034510_0 (sequence is synthesized)
gtttcttgctgcagcaacgcgagtgggagcaccaggatctcgggctcggaacgagactgcacggattgttttaagaaaatggcagacaaaccagacatgggggaaatcgccagcttcgat

SEQ ID NO: 24689 - DNA, 120 bp, Artificial Sequence
  ENSG00000034510_1 (sequence is synthesized)
aggatttcctacccccgtcctcttcgagaccccagtcgtgatgtggaggaagagccacctgcaagatggacacgagccacaagctgcactgtgaacctgggcactccgcgccgatgccac

SEQ ID NO: 24690 - DNA, 120 bp, Artificial Sequence
  ENSG00000034510_2 (sequence is synthesized)
cggcctgtgggtctctgaagggacccccccccaatcggactgccaaattctccggtttgccccgggatattatagaaaattatttgtatgaataatgaaaataaaacacacctcgtggca

SEQ ID NO: 24691 - DNA, 120 bp, Artificial Sequence
  ENSG00000034533_0 (sequence is synthesized)
aagtaggcggagaaagcagaggaggaccggcgggccaagctttcctagcctgacagcagccatttcggaacgtacgtcccagccctctttagctacttagcgcctctgggcccgagaaca

SEQ ID NO: 24692 - DNA, 120 bp, Artificial Sequence
  ENSG00000034533_1 (sequence is synthesized)
cctgctccttggctcagtctggcgccaccggcatcacggaactgtacttcccagagacgtcacaccgggagacttccgattcccgctcttgagattggactctcacgtgcaggagccagt

SEQ ID NO: 24693 - DNA, 120 bp, Artificial Sequence
  ENSG00000034533_2 (sequence is synthesized)
cctcgctgggctctagcgggcttctgatggaggagctactcctctgggaggacagaaattagcagcagcctctgtcaccatccaaagattacaacccatgaaaccattgaatttgtgcct

SEQ ID NO: 24694 - DNA, 120 bp, Artificial Sequence
  ENSG00000034533_3 (sequence is synthesized)
tgtatcagaaagcaaaggagaatgaaaaagcacagctaacattgcttgaggatctaggcgattaattctttagactgtcatcatgggtatccgaggactaatgagttttgtggaagatca

SEQ ID NO: 24695 - DNA, 120 bp, Artificial Sequence
  ENSG00000034533_4 (sequence is synthesized)
tagtaatgagttcttcactgatttgaagttgcgggacacaaaaattgtcattgatggttatgctcttttccaccgtctttgcttcagttcaaacttggatctccggtatggaggggacta

SEQ ID NO: 24696 - DNA, 120 bp, Artificial Sequence
  ENSG00000034533_5 (sequence is synthesized)
tgattcttttgcagatgttgtacaaaaattctttgaatcactgtttgcttgtaatatatgcccatatgttgtattagatggaggatgtgacatttcagataaaaagcttacaactttaaa

SEQ ID NO: 24697 - DNA, 120 bp, Artificial Sequence
  ENSG00000034533_6 (sequence is synthesized)
ggatagagctagagagaagatccagatggcccattccctttctgttggtgggagtgggtacgtatgtcccttactcatccgggaagtattcatacaggttttgatcaagctgcgggtgtg

SEQ ID NO: 24698 - DNA, 120 bp, Artificial Sequence
  ENSG00000034533_7 (sequence is synthesized)
ttttgtccagtgcttttcagaagcagatcgggacattatgacacttgctaaccattggaattgccctgtgttatcatcagatagtgacttttgcatttttgacctgaaaactgggttttg

SEQ ID NO: 24699 - DNA, 120 bp, Artificial Sequence
  ENSG00000034533_8 (sequence is synthesized)
cccattgaatagctttcagtggagaaatatgaacactattaagggcacacaaaactatatccctgccaaatgcttttcccttgatgcattctgccatcacttcagcaatatgaataaagc

SEQ ID NO: 24700 - DNA, 120 bp, Artificial Sequence
  ENSG00000034533_9 (sequence is synthesized)
tctactacctctctttgcggtgctatgtggaaatgaccatgttaatctacccatcatggagacattcttaagtaaagcgcgtcttcctcttggagctaccagttctaaagggaggagaca

SEQ ID NO: 24701 - DNA, 120 bp, Artificial Sequence
  ENSG00000034533_10 (sequence is synthesized)
ccaccgaatcctgggacttctgaattggttgtctcattttgccaaccctaccgaagcactagataatgttctgaaatacctcccaaaaaaggatcgagaaaatgttaaggaacttctctg

SEQ ID NO: 24702 - DNA, 120 bp, Artificial Sequence
  ENSG00000034533_11 (sequence is synthesized)
gtcccaggtgaagctacaggacttcttccagtgtggtacttatgtctgtccagatgccttgaatcttggtttaccagaatgggtattagtggctttagctaaaggccagctatctccttt

SEQ ID NO: 24703 - DNA, 120 bp, Artificial Sequence
  ENSG00000034533_12 (sequence is synthesized)
catcagtgatgctttggtcctaagacggaccattcttcccacacaggtggaaaacatgcagcaaccaaatgcccacagaatatctcagcccatcaggcaaatcatctatgggcttctttt

SEQ ID NO: 24704 - DNA, 120 bp, Artificial Sequence
  ENSG00000034533_13 (sequence is synthesized)
aaatgcctcaccacatctggacaagacatcctggaatgcattgcctcctcagcctctagctttcagtgaagtggaaaggattaataaaaatatcagaacctcaatcattgatgcagtaga

SEQ ID NO: 24705 - DNA, 120 bp, Artificial Sequence
  ENSG00000034533_14 (sequence is synthesized)
actggccaaggatcattctgacttaagcagattgactgagctctccttgaggaggcggcagatgcttctgttagaaaccctgaaggtgaaacagaccattctggagccaatccctacttc

SEQ ID NO: 24706 - DNA, 120 bp, Artificial Sequence
  ENSG00000034533_15 (sequence is synthesized)
actgaagttgcccattgctgtcagttgctactggttgcagcacaccgagaccaaagcaaagctacatcatctacaatccttactgctcacaatgctagtggggcccttgattgccataat

SEQ ID NO: 24707 - DNA, 120 bp, Artificial Sequence
  ENSG00000034533_16 (sequence is synthesized)
caacagccctggtaaggaagagctgcaggaagatggtgctaagatgttgtatgcagagttccaaagagtgaaggcgcagacacggctgggcacaagactggacttagacacagctcacat

SEQ ID NO: 24708 - DNA, 120 bp, Artificial Sequence
  ENSG00000034533_17 (sequence is synthesized)
cttctgtcagtggcagtcctgtctccagatggggatgtatctcaaccagctgctgtccactcctctcccagagccagacctaactcgactgtacagtggaagcctggtgcacggactatg

SEQ ID NO: 24709 - DNA, 120 bp, Artificial Sequence
  ENSG00000034533_18 (sequence is synthesized)
ccagcaactgctagcatcgacctctgtagaaagtctcctgagcatatgtcctgaggctaagcaactttatgaatatctattcaatgccacaaggtcatatgcccccgctgaaatattcct

SEQ ID NO: 24710 - DNA, 120 bp, Artificial Sequence
  ENSG00000034533_19 (sequence is synthesized)
accaaaaggtagatcaaattcaaaaaaaaaaaggcagaagaaacagaataccagctgttctaagaacagagggagaaccactgcacacaccaagtgttggtatgagggaaacaaccggtt

SEQ ID NO: 24711 - DNA, 120 bp, Artificial Sequence
  ENSG00000034533_20 (sequence is synthesized)
tgggttgttaatggttgaaaacttagaggaacatagtgaggcctccaacattgaataaaactcagtttgcatcaaactagatgtatttaatataatccttacttaaaattcttccgttac

SEQ ID NO: 24712 - DNA, 120 bp, Artificial Sequence
  ENSG00000034533_21 (sequence is synthesized)
cacccttgaaacaattagctttttctttaggactgacctgttaggggataaacatcacaataatctgaattccaagttattttgtattttgtttttaataaatacaacctgatttaagaa

SEQ ID NO: 24713 - DNA, 120 bp, Artificial Sequence
  ENSG00000034533_22 (sequence is synthesized)
agacctaactcgccccagtgccttcaatactttgaatgaggatatatggacgcatacaaaatatggtgggactttacatgtttcaagactgtacagtggaagcctggtgcacggactatg

SEQ ID NO: 24714 - DNA, 120 bp, Artificial Sequence
  ENSG00000034533_23 (sequence is synthesized)
ttccgattcccgctcttgagattggactctcacgtgcaggagccagtcctcgctgggctctagcgggcttctgatggaggagctactcctctgggaggacagagtaggtgggctctgctg

SEQ ID NO: 24715 - DNA, 120 bp, Artificial Sequence
  ENSG00000034533_24 (sequence is synthesized)
caggtccgggcggcgggttgtgagggccgaggtggcacggtgtatgaaggcctgtgtttgaagacttaggtcagaccttttgcccgcctttcccctatgcagctctatgcaactgtctgt

SEQ ID NO: 24716 - DNA, 120 bp, Artificial Sequence
  ENSG00000034533_25 (sequence is synthesized)
tactgacagggctggaactagggtgagataagtgtaaaatgtaaatggatgccaataaaattcagtaatcaagaattagcagcagcctctgtcaccatccaaagattacaacccatgaaa

SEQ ID NO: 24717 - DNA, 120 bp, Artificial Sequence
  ENSG00000034533_26 (sequence is synthesized)
acttgacaacacgctccccctcgaggtttgagtgaacttgggcactgcgaacacatcttctttatttctgcatccccaatccctggcatacctcctggcatatactaggtgtttaacaaa

SEQ ID NO: 24718 - DNA, 120 bp, Artificial Sequence
  ENSG00000034533_27 (sequence is synthesized)
ccttgttaaggcaagtaagtgtccagcagatcaactgccgcccaaaggagagaaaaaaggtaataagaggaaggcaatttgtcaccagtttctgctacagcacaaatctacctttaaagt

SEQ ID NO: 24719 - DNA, 120 bp, Artificial Sequence
  ENSG00000034677_0 (sequence is synthesized)
gcgcttcctcaggctgctgtcgccgctgctgggagatgggcctactcgcccgccaccctgcgctgccgccgctctgaggagttaaagaacatccatgatagcagtcttctgtaaatcgaa

SEQ ID NO: 24720 - DNA, 120 bp, Artificial Sequence
  ENSG00000034677_1 (sequence is synthesized)
cttttcaagaattctctgaaggaaccaagtaggatattcttacatcatgacttaatgtgaatgcaagaacaagaaataggttttatctctaaatataatgaagggctgtgtgtaaacact

SEQ ID NO: 24721 - DNA, 120 bp, Artificial Sequence
  ENSG00000034677_2 (sequence is synthesized)
gaccctgtctcaattctaacaagcattttagacatgagtttacatcggcaaatgggttcagatcgagatcttcagtcctctgcttcatctgtgagcttgccttcagtcaaaaaggcaccc

SEQ ID NO: 24722 - DNA, 120 bp, Artificial Sequence
  ENSG00000034677_3 (sequence is synthesized)
aaaaaaagaagaatttcaataggctccctgtttcggaggaaaaaagataacaaacgtaaatcaagggagctaaatggcggggtggatggaattgcaagtattgaaagtatacattctgaa

SEQ ID NO: 24723 - DNA, 120 bp, Artificial Sequence
  ENSG00000034677_4 (sequence is synthesized)
atgtgtactgataagaactccattttctctacaaatacctcttctgacaatggattaacttccatcagcaaacaaattggagacttcatagagtgccctttgtgccttttgcggcattct

SEQ ID NO: 24724 - DNA, 120 bp, Artificial Sequence
  ENSG00000034677_5 (sequence is synthesized)
aaagacagatttcctgatataatgacttgtcatcacagatcttgtgtggattgcttacgacaatatttaaggatagaaatctctgaaagcagagttaatattagttgcccagaatgtact

SEQ ID NO: 24725 - DNA, 120 bp, Artificial Sequence
  ENSG00000034677_6 (sequence is synthesized)
gaacggtttaatccccatgatattcgcttgatattaagtgatgatgtcttgatggaaaaatacgaagaatttatgcttagacggtggcttgttgcagatcctgattgtaggtggtgtcca

SEQ ID NO: 24726 - DNA, 120 bp, Artificial Sequence
  ENSG00000034677_7 (sequence is synthesized)
gctccagactgtggatatgctgtgatagcatttggatgtgccagctgtccaaaattaacttgtgggcgagagggctgtggaacagagttttgctaccactgtaaacagatttggcacccc

SEQ ID NO: 24727 - DNA, 120 bp, Artificial Sequence
  ENSG00000034677_8 (sequence is synthesized)
aaccagacctgtgatgctgctcgacaagagagagcccagagcttacgtttgagaactatacgttcttcatccattagttatagtcaagagtctggagcagcagctgatgatataaagcca

SEQ ID NO: 24728 - DNA, 120 bp, Artificial Sequence
  ENSG00000034677_9 (sequence is synthesized)
tgtccacgatgtgctgcttatataataaagatgaatgatgggagctgcaatcacatgacatgtgctgtttgtggttgtgagttttgttggttgtgtatgaaagaaatctcagatttgcat

SEQ ID NO: 24729 - DNA, 120 bp, Artificial Sequence
  ENSG00000034677_10 (sequence is synthesized)
tatctaagtccatcaggatgtactttttgggggaagaaaccctggagccgaaagaagaaaatattgtggcaactgggaacactggttggtgctcctgtcggaatcgctttaatagctggc

SEQ ID NO: 24730 - DNA, 120 bp, Artificial Sequence
  ENSG00000034677_11 (sequence is synthesized)
attgctattcctgcaatgattattggcattcctgtgtatgtgggccgcaagattcacaatcgctatgaaggcaaggatgtttcaaagcacaaacggaatttggccatagcaggtggtgta

SEQ ID NO: 24731 - DNA, 120 bp, Artificial Sequence
  ENSG00000034677_12 (sequence is synthesized)
acgttgtctgtaatcgtgtctccagtagtagctgcagtgactgtaggtatcggtgttcctattatgttagcttatgtctatggcgtagttccaatttctctttgtcgaagcggaggttgt

SEQ ID NO: 24732 - DNA, 120 bp, Artificial Sequence
  ENSG00000034677_13 (sequence is synthesized)
ggagtctcagcaggcaatggaaaaggagttaggattgaatttgatgatgaaaatgatataaatgttggtggaactaacacagctgtagacacaacatcagtagcagaagcaagacacaac

SEQ ID NO: 24733 - DNA, 120 bp, Artificial Sequence
  ENSG00000034677_14 (sequence is synthesized)
ccaagcataggggagggaagtgttggtgggctgactggcagtttgagtgcaagtggaagccacatggatcgaataggagccatccgagacaacctgagtgaaacggccagcaccatggca

SEQ ID NO: 24734 - DNA, 120 bp, Artificial Sequence
  ENSG00000034677_15 (sequence is synthesized)
ctagctggagccagtataacggggagtctgtcaggaagtgccatggtaaactgttttaacaggttggaagtacaagcagatgtacagaaagaacggtacagtctaagtggagaatctggc

SEQ ID NO: 24735 - DNA, 120 bp, Artificial Sequence
  ENSG00000034677_16 (sequence is synthesized)
acagtcagcttgggaacagttagtgataatgccagcaccaaagcaatggcaggatccattctgaattcctacatcccattggacaaagaaggcaacagtatggaggtgcaagtagatatt

SEQ ID NO: 24736 - DNA, 120 bp, Artificial Sequence
  ENSG00000034677_17 (sequence is synthesized)
gtaaatctagtgccaccaagtggtccaaagaagcaacagcagggaaaaaatcaaaaagtggtaaactgaggaaaaagggtaacatgaagataaatgagacgagagaggacatggatgcac

SEQ ID NO: 24737 - DNA, 120 bp, Artificial Sequence
  ENSG00000034677_18 (sequence is synthesized)
agttgttagaacaacaaagcacgaactcaagtgaatttgaggctccatccctcagtgacagtatgccttctgtagcagattctcactctagtcatttttctgaatttagttgttctgacc

SEQ ID NO: 24738 - DNA, 120 bp, Artificial Sequence
  ENSG00000034677_19 (sequence is synthesized)
tagaaagcatgaaaacttcttgtagtcatggttccagtgattatcacacccgctttgctactgttaacattcttcctgaggtagaaaatgaccgtctggaaaattccccacatcagtgta

SEQ ID NO: 24739 - DNA, 120 bp, Artificial Sequence
  ENSG00000034677_20 (sequence is synthesized)
gcatttctgtggttacccaaactgcttcctgttcagaagtttcacagttgaatcatattgctgaagaacatggtaacaatggaataaaacctaatgttgatttatattttggcgatgcac

SEQ ID NO: 24740 - DNA, 120 bp, Artificial Sequence
  ENSG00000034677_21 (sequence is synthesized)
taaaagaaacaaataacaaccactcacatcagacaatggaattaaaagttgcaattcagactgaaatttaggcccataaatgctgcagaataattaccactgtacaaccgtgtttggagc

SEQ ID NO: 24741 - DNA, 120 bp, Artificial Sequence
  ENSG00000034677_22 (sequence is synthesized)
tggttgaactacatgtgactacttaagtttcaggttaccagcaaaagccgggtttcattatcataatgcagatacattttctgtgttcagcaaggcattgtgtgtcatgtggatcttagt

SEQ ID NO: 24742 - DNA, 120 bp, Artificial Sequence
  ENSG00000034677_23 (sequence is synthesized)
taccaaactatgaagtgaaggctttaaaagtgcattattttaaggataataaatttgaagagcaaagcatgttttgtgtgtttgccacaaaacattgcttgaagcacatacttagataga

SEQ ID NO: 24743 - DNA, 120 bp, Artificial Sequence
  ENSG00000034677_24 (sequence is synthesized)
aattggtcttaatttatataatcaatataaaatactaatgcaattctacagcattcaaatgaagaaaacttgaggctttagggataagtggttagtgatattttattgaaaccactaaag

SEQ ID NO: 24744 - DNA, 120 bp, Artificial Sequence
  ENSG00000034677_25 (sequence is synthesized)
agataagtttaaaagaactgcataggttactctcagtatatgatactctgtaacatttctatttatatcggcataaatttcattttttttcttcatatgcaatgtggttatataaagctt

SEQ ID NO: 24745 - DNA, 120 bp, Artificial Sequence
  ENSG00000034677_26 (sequence is synthesized)
aatgcagctcatttgctaccatttggatacttagacactttgagcaagattgtggcagtttttgcacaactttgaaatagaaatacctggtactctatcttgtttattgttgatgccatc

SEQ ID NO: 24746 - DNA, 120 bp, Artificial Sequence
  ENSG00000034677_27 (sequence is synthesized)
ttagaggaaaaaatgtaaaggtaagtaattaagcatatgacagcaacaaataagatacataaaactacaaaataaagtcccattaggttataagtattacaaaaaatccacctttctcta

SEQ ID NO: 24747 - DNA, 120 bp, Artificial Sequence
  ENSG00000034677_28 (sequence is synthesized)
aggggaagtttgtaccccattgattcttggtgcctttgggatcgactgggttttaatggcctagttatttgaggattttgctgtgttgttttccatgtcttctctggtcaccttggatta

SEQ ID NO: 24748 - DNA, 120 bp, Artificial Sequence
  ENSG00000034677_29 (sequence is synthesized)
tatataaaaatacaggaaatagataaacatgaatgtgattaataatgctgaaaaagtattagcctaccaaagacacactcaggctttagtgaataactttacataacctcagtttttaac

SEQ ID NO: 24749 - DNA, 120 bp, Artificial Sequence
  ENSG00000034677_30 (sequence is synthesized)
acatgcatatcttctccaaccatgaaatcaaagcacggtgcagaacttgtaccaagtacaaaaggtccatgtatgattagcattattttcttttgcttttgtttatggacaatgttcagc

SEQ ID NO: 24750 - DNA, 120 bp, Artificial Sequence
  ENSG00000034677_31 (sequence is synthesized)
tgacataagcagaagttggccaaaatactgcctgtactgttaatttcctgtataattcacttaaataaaagcaggttaacctcaatgatagcagttaaaatgttctatcttatgtatttc

SEQ ID NO: 24751 - DNA, 120 bp, Artificial Sequence
  ENSG00000034677_32 (sequence is synthesized)
ttttaagtattaccattatggtgctactgagcgttttcttttggtaaaaagaaaaatgccatgggctgcagtcttcttccatcacttttccctaccaggtccattaatatgcttataaca

SEQ ID NO: 24752 - DNA, 120 bp, Artificial Sequence
  ENSG00000034677_33 (sequence is synthesized)
ctagtgccagttattttatttgataatgcttatggtatttgtatatttgtttgcattccaattttgtttaataatgagtgtgtaaactgcatacgttaaataaatgtaaatactaatgta

SEQ ID NO: 24753 - DNA, 120 bp, Artificial Sequence
  ENSG00000034677_34 (sequence is synthesized)
atagtcaccagaagctggaagagtcaaaggacacattctcccctcaagccccagtgggagcacggcccagctggattttggacttctggcctccagaactagacagggcctcactgtgtc

SEQ ID NO: 24754 - DNA, 120 bp, Artificial Sequence
  ENSG00000034677_35 (sequence is synthesized)
gtgtgatcatagctcactgcagcctggaattcctgggctcaagcaaccctgccacctcagccttccaagtagctaggactacagaacatccatgatagcagtcttctgtaaatcgaactt

SEQ ID NO: 24755 - DNA, 120 bp, Artificial Sequence
  ENSG00000034677_36 (sequence is synthesized)
ctcttctctcattggcactgcctgtctactgccgagggcatttgagtgtgggacccatgccctgcatttcttcgctaccccacagcttctgctcatgaatccagctcaaatgtcagaaga

SEQ ID NO: 24756 - DNA, 120 bp, Artificial Sequence
  ENSG00000034677_37 (sequence is synthesized)
atgacgggccgaggcggcgctcccctcgagctgtctcctgcccctaaagcgggggagacccaagggcggttgccgcggggaggcggcgggggcggaacgcattcctgacgggtgaaatcg

SEQ ID NO: 24757 - DNA, 120 bp, Artificial Sequence
  ENSG00000034677_38 (sequence is synthesized)
gctctaacgggaccgatttccgggcctcgctgcaaatttggagccgggacatcgccccgcaagccgtgctgcctggggccttagggaggggagctgtgttcggaggaagaacatccatga

SEQ ID NO: 24758 - DNA, 120 bp, Artificial Sequence
  ENSG00000034677_39 (sequence is synthesized)
ggacaatttaaattgagcctgcagtaagtcttggttgaaagtattacagattcaagagcctagccttaaagtagttggtaaattgttagtggctgatacccttcctccccactccacccc

SEQ ID NO: 24759 - DNA, 120 bp, Artificial Sequence
  ENSG00000034677_40 (sequence is synthesized)
aagtacagttcggaggcctggcacttcaaaagaaaaaagtttgcatctctctctttttccccttatgtgcattacctgaaaggctgggaaccttgaatttgcttaacaactgggtaaatc

SEQ ID NO: 24760 - DNA, 86 bp, Artificial Sequence
  ENSG00000034677_41 (sequence is synthesized)
agtattgaacaaagggtatctttagtttcttcagtataaaacagttactcttttttcataaatttttagtgtttggcaagcatata

SEQ ID NO: 24761 - DNA, 120 bp, Artificial Sequence
  ENSG00000034677_42 (sequence is synthesized)
actcgcccgccaccctgcgctgccgccgctctgaggagttaaaggtagcctcaaaatcaagtgacaagtgtctttgtaagggacaagtagacccattacagagaagacgacgcgcagaaa

SEQ ID NO: 24762 - DNA, 87 bp, Artificial Sequence
  ENSG00000034677_43 (sequence is synthesized)
accacctctgcttctcaaagtgctaggactacagaacatccatgatagcagtcttctgtaaatcgaacttttcaagaattctctgaa

SEQ ID NO: 24763 - DNA, 120 bp, Artificial Sequence
  ENSG00000034677_44 (sequence is synthesized)
gaagtgggaggaggaggaggggaaagcgggggctgcgggagggggaggtggtagttgcggcgctggttcccgggagcagccgtcgagccacaactgcggaggaggagttcgggaaagcgg

SEQ ID NO: 24764 - DNA, 120 bp, Artificial Sequence
  ENSG00000034677_45 (sequence is synthesized)
ccgtcgggactcctcccctccgtcgtctccgccccggttgagaggcgcctcggcgcatcggagggaccctcccccgcgcttcctcaggctgctgtcgccgctgctgggagatgggcctac

SEQ ID NO: 24765 - DNA, 120 bp, Artificial Sequence
  ENSG00000034693_0 (sequence is synthesized)
agtgagcggcggcggctgcgcggcggcagcggcagaaagcgtagctgctttgctgtagtccacgcccccttgccgctccggtgacagtctctgcggaaagtcacgtttgtgatttcggga

SEQ ID NO: 24766 - DNA, 120 bp, Artificial Sequence
  ENSG00000034693_1 (sequence is synthesized)
gagcacagaacgggacgacggcgctcttgctgggtcatctgggccaggtgacgaagaaacagtttcctggtgaagcagtccctcacccctagtcagcccacacccctagggcctaaagat

SEQ ID NO: 24767 - DNA, 120 bp, Artificial Sequence
  ENSG00000034693_2 (sequence is synthesized)
gctgaggtctgtatggaattttctgaaacgccacaaaaagaaatgcatcttcctgggcacggtccttggaggagtatatattctggggaaatatggacagaagaaaatcagagaaataca

SEQ ID NO: 24768 - DNA, 120 bp, Artificial Sequence
  ENSG00000034693_3 (sequence is synthesized)
ggaaagggaggctgcagaatacattgcccaagcacgacgacaatatcattttgaaagtaaccagaggacttgcaatatgacagtgctgtccatgcttccaacactgagagaggccttaat

SEQ ID NO: 24769 - DNA, 120 bp, Artificial Sequence
  ENSG00000034693_4 (sequence is synthesized)
gcagcaactgaattccgagagcctcacagctctgctaaaaaacaggccttcaaacaagctagaaatatgggaggatctgaagataataagtttcacaagaagtactgtggctgtatacag

SEQ ID NO: 24770 - DNA, 120 bp, Artificial Sequence
  ENSG00000034693_5 (sequence is synthesized)
tacctgtatgctggttgttcttttgcgggtccagttaaacataattggtggatatatttacctggataatgcagcagttggcaaaaatggcactacaattcttgctcccccagatgtcca

SEQ ID NO: 24771 - DNA, 120 bp, Artificial Sequence
  ENSG00000034693_6 (sequence is synthesized)
acagcagtatttatcaagtattcagcacctacttggagatggcctgacagaattgatcactgtcattaaacaagctgtgcagaaggttttaggaagtgtttctcttaaacattctttgtc

SEQ ID NO: 24772 - DNA, 120 bp, Artificial Sequence
  ENSG00000034693_7 (sequence is synthesized)
ccttttggacttggagcaaaaactaaaagaaatcagaaatctcgttgagcagcataagtcttcttcttggattaataaagatggatccaaacctttattatgccattatatgatgccaga

SEQ ID NO: 24773 - DNA, 120 bp, Artificial Sequence
  ENSG00000034693_8 (sequence is synthesized)
tgaagaaactccattagcagtgcaggcctgtggactttctcctcgagacattaccactattaaacttctcaatgaaactagagacatgttggaaagcccagattttagtacagttttgaa

SEQ ID NO: 24774 - DNA, 120 bp, Artificial Sequence
  ENSG00000034693_9 (sequence is synthesized)
tacctgtttaaaccgaggttttagtagacttctagacaatatggctgagttctttcgacctactgaacaggacctgcaacatggtaactctatgaatagtctttccagtgtcagcctgcc

SEQ ID NO: 24775 - DNA, 120 bp, Artificial Sequence
  ENSG00000034693_10 (sequence is synthesized)
tttagctaagataattccaatagtaaacggacagatccattcagtttgcagtgaaacacctagtcattttgttcaggatctgttgacaatggagcaagtgaaagactttgctgctaatgt

SEQ ID NO: 24776 - DNA, 120 bp, Artificial Sequence
  ENSG00000034693_11 (sequence is synthesized)
ttagagtaacagtttgttatcaaaatgcctgataaaatatattcttaataaaagtcttcatttcataatgaaatcaatttatttggcatcttaatatatttttttagattcatcaacaga

SEQ ID NO: 24777 - DNA, 120 bp, Artificial Sequence
  ENSG00000034693_12 (sequence is synthesized)
ccagtttttgtgggcatatatatatacacgtgcaaatatcagaattgttaataatttgttacacatggacatttgttccaaactgactaaaaatcaatatagatattttatatacatata

SEQ ID NO: 24778 - DNA, 120 bp, Artificial Sequence
  ENSG00000034693_13 (sequence is synthesized)
tatatataaaaatacaaaattcagtgtactttaccatattaatactgaggaaaaatctgttggagacataggtctaggatgtgtgaagtttggaaaaatatgctatttaattataatgtt

SEQ ID NO: 24779 - DNA, 120 bp, Artificial Sequence
  ENSG00000034693_14 (sequence is synthesized)
ccctagactgctgtaaacagaagtgaatcagacttttctccagctacctttcaaaataataaattatttgtctcaaatataccttgatggaggacttttttattcttatggaaatagtga

SEQ ID NO: 24780 - DNA, 120 bp, Artificial Sequence
  ENSG00000034693_15 (sequence is synthesized)
attccaacaactatgatgaactatgttctttgctatttcttcactatattttttaaggttttattaaaaagccttagaaagttacatattggtttagaggctaaaattgtgttgatgctg

SEQ ID NO: 24781 - DNA, 120 bp, Artificial Sequence
  ENSG00000034693_16 (sequence is synthesized)
tgatgctgtttactcacctaattacatagttttaatcatttgtacataattttaaaaacttactttgtattgattttgaatacagtgaaaatcttattgcaataaactattttagtaaaa

SEQ ID NO: 24782 - DNA, 120 bp, Artificial Sequence
  ENSG00000034693_17 (sequence is synthesized)
tgttgagttaatatttttcagctattaatttacttatcccatagcatttttgttattatttcggaagagagagcatgctagtttaagtttcattttaattggtcgtgtacttggtgcttt

SEQ ID NO: 24783 - DNA, 120 bp, Artificial Sequence
  ENSG00000034693_18 (sequence is synthesized)
tttgttgttgttaacttgttcatttagtaaaaagcaaatagctttactttctgaaaaagaaataattcattatctctagtaatacatctgtaattcttcatttagaagggtaattagggc

SEQ ID NO: 24784 - DNA, 120 bp, Artificial Sequence
  ENSG00000034693_19 (sequence is synthesized)
aaaagtaaataaatcattatatatcattagtatgttgacatatattttcagtaacattgttttatgttcctccagcgtaacatgtagctgaacagtagaaggtagaaaataaattatgac

SEQ ID NO: 24785 - DNA, 120 bp, Artificial Sequence
  ENSG00000034693_20 (sequence is synthesized)
atctcttctaaggcctggctaggcctgaagctcactgccagggagtttgtgtctagaatgtttttaaaaataggtagtggagccatagccctcaccatagacacctctgagcccactggc

SEQ ID NO: 24786 - DNA, 120 bp, Artificial Sequence
  ENSG00000034693_21 (sequence is synthesized)
attgtctctgagcagaagatggctgtgccactcacatatgctaatcttggcaaatctgccaagcatgtcttcaccaagggatatggatttggcttaataaaacctgatttgaaaacaaaa

SEQ ID NO: 24787 - DNA, 120 bp, Artificial Sequence
  ENSG00000034713_0 (sequence is synthesized)
agtcgccgccgtcgctgccgctgccgctgccgccgtcgttgttgttgtgctcggtgcgctgagctccgcggctccgcgagccggttccgtccccttcccgccgccgccatgaagtggatg

SEQ ID NO: 24788 - DNA, 120 bp, Artificial Sequence
  ENSG00000034713_1 (sequence is synthesized)
ttcaaggaggaccactcgctggaacacagatgcgtggagtccgcgaagattcgagcgaaatatcccgacagggttccggtgattgtggaaaaggtctcaggctctcagattgttgacatt

SEQ ID NO: 24789 - DNA, 120 bp, Artificial Sequence
  ENSG00000034713_2 (sequence is synthesized)
gacaaacggaagtacttggttccatctgatatcactgtggctcagttcatgtggatcatcaggaaaaggatccagcttccttctgaaaaggcgatcttcctgtttgtggataagacagtc

SEQ ID NO: 24790 - DNA, 120 bp, Artificial Sequence
  ENSG00000034713_3 (sequence is synthesized)
ccacagtccagcctaactatgggacagctttacgagaaggaaaaagatgaagatggattcttatatgtggcctacagcggagagaacacttttggcttctgagggccattgctgggctag

SEQ ID NO: 24791 - DNA, 120 bp, Artificial Sequence
  ENSG00000034713_4 (sequence is synthesized)
cttgtgtatcttgtaaatagccagccattttcagttattataccagaacctcttcacatagacctattagtgcatttgtaactggatttatttcttaatatattggaaggttttgtttcc

SEQ ID NO: 24792 - DNA, 120 bp, Artificial Sequence
  ENSG00000034713_5 (sequence is synthesized)
ttagactagtaaattatcatacagagttttattttgagtttttctttttgtgcattgtcctcatgcctgtattctccaggaaacttgtccttctggaaatcatattgaatgatatttcta

SEQ ID NO: 24793 - DNA, 120 bp, Artificial Sequence
  ENSG00000034713_6 (sequence is synthesized)
tatcgaagtgaggtaggtgcggtattaaagtgaaagggaaggtgatgcatttattctgggttatgcttgaagtgttagatggctaagtattaaaattatccaaattaaatccttagcagt

SEQ ID NO: 24794 - DNA, 120 bp, Artificial Sequence
  ENSG00000034713_7 (sequence is synthesized)
cagaacacttgcttcactagaatatgccaactgccaatcatgttggactgagctaatttgttcctctttctgaaactattaaggtaaataattaacaataaaaattctcttataaaggca

SEQ ID NO: 24795 - DNA, 120 bp, Artificial Sequence
  ENSG00000034713_8 (sequence is synthesized)
ggccgagtggagcggggcggatgccctgctgcgggctggagtcgcccatgccctggtgcctcgggcagcggccccctgaccccatgtcaccctccgcgggccttgctgggagctagtagg

SEQ ID NO: 24796 - DNA, 120 bp, Artificial Sequence
  ENSG00000034713_9 (sequence is synthesized)
agtctgaaaactcttaggggtcctgactagaaatctggattttatgctccctgacatcaggggctccaggaaaataatggctgcaatacataagagtgcattttggattcagaaaataga

SEQ ID NO: 24797 - DNA, 120 bp, Artificial Sequence
  ENSG00000034713_10 (sequence is synthesized)
acccagtatatccataattttatcatttcaacatgtaatcaaaattgagctattttgctgcattttcatactaagtctgaagccttgtttatgttttacactgcacatcccaattcacac

SEQ ID NO: 24798 - DNA, 120 bp, Artificial Sequence
  ENSG00000034713_11 (sequence is synthesized)
gagccagactttcaagtgctgaatgtagctagtggctgctgtggcagtgatacaggacatttcaatcagagcagagatttctattgaacagttctgttccagggagtccttattttacaa

SEQ ID NO: 24799 - DNA, 120 bp, Artificial Sequence
  ENSG00000034713_12 (sequence is synthesized)
attccaggctaagaggtcctcacagggagcaccgtttttattgtacaagatgctgatgacaggttctttcatattcaaattcagacctcccccacattgttacttaataattctcatcta

SEQ ID NO: 24800 - DNA, 120 bp, Artificial Sequence
  ENSG00000034713_13 (sequence is synthesized)
cccacacagccatccgagctaagcttgcaaatggggcaggaagaacaggaaaaaaactcaaaacctcccccttcataaatgtggtatttgtccatgtttacatggaggttccactcagcc

SEQ ID NO: 24801 - DNA, 120 bp, Artificial Sequence
  ENSG00000034713_14 (sequence is synthesized)
cttgaggagcaaagcagcaagtggggcagtcactgtttcctcaggttgaggccttggactccttatcttccccactggctcttggtttatgagttccccttttaaggatctgttgtgact

SEQ ID NO: 24802 - DNA, 120 bp, Artificial Sequence
  ENSG00000034713_15 (sequence is synthesized)
tacctatctgggctagtgacctcagatgtctcagactgagcatcttaccactgtttctggttgatcccttcactcatggtcttaacacatttgcacttcctctcatctcagagagtacag

SEQ ID NO: 24803 - DNA, 120 bp, Artificial Sequence
  ENSG00000034713_16 (sequence is synthesized)
tcacggggcagagcttgcatagggatccaggtgttactagtcttactctggagctggtccaactcagtttcatggcacagaactagattaggtctccactgcgcagtctgttttactgct

SEQ ID NO: 24804 - DNA, 120 bp, Artificial Sequence
  ENSG00000034713_17 (sequence is synthesized)
tttgcattaagtgtgaggaaaataacttctctttgatgatgttgatacaccatgtgggcaccctggggcacagcggtttagctggggagattccatgagaatgaacccaaactactcttc

SEQ ID NO: 24805 - DNA, 120 bp, Artificial Sequence
  ENSG00000034713_18 (sequence is synthesized)
tttgctagggtcctttacccacacagaggtgagcctttcaggttcttcattttgcttagtttcttcccttgtccttggcatttaagaggcatccatgtgttagccagccaaagccccctg

SEQ ID NO: 24806 - DNA, 120 bp, Artificial Sequence
  ENSG00000034713_19 (sequence is synthesized)
aaggagctggctgctttaaaggatttacttgggaggatgtcaaatggctttgccttctgcagacttcatttattttaatctttttatggctcctttctcttgctttaaaacaggattata

SEQ ID NO: 24807 - DNA, 120 bp, Artificial Sequence
  ENSG00000034713_20 (sequence is synthesized)
agcacacagcaggtactgacacctgaagtcttactaaattcctgtcctcaggccatcctttttctcctgaaacctggactccaattttcaatgacgtttttgtttttctctttcaagcct

SEQ ID NO: 24808 - DNA, 120 bp, Artificial Sequence
  ENSG00000034971_0 (sequence is synthesized)
gagccagcaaggccacccatccaggcacctctcagcacagcagagctttccagaggaagcctcaccaagcctctgcaatgaggttcttctgtgcacgttgctgcagctttgggcctgaga

SEQ ID NO: 24809 - DNA, 120 bp, Artificial Sequence
  ENSG00000034971_1 (sequence is synthesized)
tgccagctgtccagctgctgcttctggcctgcctggtgtgggatgtgggggccaggacagctcagctcaggaaggccaatgaccagagtggccgatgccagtataccttcagtgtggcca

SEQ ID NO: 24810 - DNA, 120 bp, Artificial Sequence
  ENSG00000034971_2 (sequence is synthesized)
gtcccaatgaatccagctgcccagagcagagccaggccatgtcagtcatccataacttacagagagacagcagcacccaacgcttagacctggaggccaccaaagctcgactcagctccc

SEQ ID NO: 24811 - DNA, 120 bp, Artificial Sequence
  ENSG00000034971_3 (sequence is synthesized)
tggagagcctcctccaccaattgaccttggaccaggctgccaggccccaggagacccaggaggggctgcagagggagctgggcaccctgaggcgggagcgggaccagctggaaacccaaa

SEQ ID NO: 24812 - DNA, 120 bp, Artificial Sequence
  ENSG00000034971_4 (sequence is synthesized)
ccagagagttggagactgcctacagcaacctcctccgagacaagtcagttctggaggaagagaagaagcgactaaggcaagaaaatgagaatctggccaggaggttggaaagcagcagcc

SEQ ID NO: 24813 - DNA, 120 bp, Artificial Sequence
  ENSG00000034971_5 (sequence is synthesized)
aggaggtagcaaggctgagaaggggccagtgtccccagacccgagacactgctcgggctgtgccaccaggctccagagaagtttctacgtggaatttggacactttggccttccaggaac

SEQ ID NO: 24814 - DNA, 120 bp, Artificial Sequence
  ENSG00000034971_6 (sequence is synthesized)
tgaagtccgagctaactgaagttcctgcttcccgaattttgaaggagagcccatctggctatctcaggagtggagagggagacaccggatgtggagaactagtttgggtaggagagcctc

SEQ ID NO: 24815 - DNA, 120 bp, Artificial Sequence
  ENSG00000034971_7 (sequence is synthesized)
tcacgctgagaacagcagaaacaattactggcaagtatggtgtgtggatgcgagaccccaagcccacctacccctacacccaggagaccacgtggagaatcgacacagttggcacggatg

SEQ ID NO: 24816 - DNA, 120 bp, Artificial Sequence
  ENSG00000034971_8 (sequence is synthesized)
ttcacatactgcctaggccactggaaagcacgggtgctgtggtgtactcggggagcctctatttccagggcgctgagtccagaactgtcataagatatgagctgaataccgagacagtga

SEQ ID NO: 24817 - DNA, 120 bp, Artificial Sequence
  ENSG00000034971_9 (sequence is synthesized)
aggctgagaaggaaatccctggagctggctaccacggacagttcccgtattcttggggtggctacacggacattgacttggctgtggatgaagcaggcctctgggtcatttacagcaccg

SEQ ID NO: 24818 - DNA, 120 bp, Artificial Sequence
  ENSG00000034971_10 (sequence is synthesized)
atgaggccaaaggtgccattgtcctctccaaactgaacccagagaatctggaactcgaacaaacctgggagacaaacatccgtaagcagtcagtcgccaatgccttcatcatctgtggca

SEQ ID NO: 24819 - DNA, 120 bp, Artificial Sequence
  ENSG00000034971_11 (sequence is synthesized)
ccttgtacaccgtcagcagctacacctcagcagatgctaccgtcaactttgcttatgacacaggcacaggtatcagcaagaccctgaccatcccattcaagaaccgctataagtacagca

SEQ ID NO: 24820 - DNA, 120 bp, Artificial Sequence
  ENSG00000034971_12 (sequence is synthesized)
gcatgattgactacaaccccctggagaagaagctctttgcctgggacaacttgaacatggtcacttatgacatcaagctctccaagatgtgaaaagcctccaagctgtacaggcaatggc

SEQ ID NO: 24821 - DNA, 120 bp, Artificial Sequence
  ENSG00000034971_13 (sequence is synthesized)
agaaggagatgctcagggctcctggggggagcaggctgaagggagagccagccagccagggcccaggcagctttgactgctttccaagttttcattaatccagaaggatgaacatggtca

SEQ ID NO: 24822 - DNA, 120 bp, Artificial Sequence
  ENSG00000034971_14 (sequence is synthesized)
ccatctaactattcaggaattgtagtctgagggcgtagacaatttcatataataaatatcctttatcttctgtcagcatttatgggatgtttaatgacatagttcaagttttcttgtgat

SEQ ID NO: 24823 - DNA, 120 bp, Artificial Sequence
  ENSG00000034971_15 (sequence is synthesized)
ttggggcaaaagctgtaaggcataatagtttcttcctgaaaaccattgctcttgcatgttacatggttaccacaagccacaataaaaagcataacttctaaaggaagcagaatagctcct

SEQ ID NO: 24824 - DNA, 120 bp, Artificial Sequence
  ENSG00000034971_16 (sequence is synthesized)
ctggccagcatcgaatataagtaagatgcatttactacagttggcttctaatgcttcagatagaatacagttgggtctcacataaccctttacattgtgaaataaaattttcttacccaa

SEQ ID NO: 24825 - DNA, 120 bp, Artificial Sequence
  ENSG00000035115_0 (sequence is synthesized)
ctcttcctgggcagcctcgggacggggcgccgcggccgggcgggcagcatgaataaccctataccttccaatttgaaatcagaagcaaaaaaggctgccaaaatattaagagaattcaca

SEQ ID NO: 24826 - DNA, 120 bp, Artificial Sequence
  ENSG00000035115_1 (sequence is synthesized)
gaaataacttccagaaatggacctgataagatcattcctgctcacgtaattgcgaaggctaaaggccttgcaattctgtctgtgatcaaagccgggttcctggtgactgccagaggaggc

SEQ ID NO: 24827 - DNA, 120 bp, Artificial Sequence
  ENSG00000035115_2 (sequence is synthesized)
agcgggattgtagtggcgcgccttccagatggaaaatggtctgcaccctcagccattgggatagctggccttggtggaggatttgaaataggaattgaggtatcagacttggtgataatt

SEQ ID NO: 24828 - DNA, 120 bp, Artificial Sequence
  ENSG00000035115_3 (sequence is synthesized)
ctgaattatgaccgtgctgtagaagcttttgcaaaaggcggaaatctgaccctcggagggaacttgactgtggcggttgggcccttgggaaggaacttggaaggaaacgtggccctgaga

SEQ ID NO: 24829 - DNA, 120 bp, Artificial Sequence
  ENSG00000035115_4 (sequence is synthesized)
agctccgctgccgtcttcacgtactgcaagtcaaggggactctttgcaggcgtgtctttagaagggagctgtttgattgaaaggaaagaaactaatagaaaattttattgtcaagatatc

SEQ ID NO: 24830 - DNA, 120 bp, Artificial Sequence
  ENSG00000035115_5 (sequence is synthesized)
cgagcttatgacattttatttggagatacaccgcggcctgctcaagccgaagatctttatgaaattcttgattcctttactgaaaagtatgaaaatgaaggacaacgaatcaatgcaaga

SEQ ID NO: 24831 - DNA, 120 bp, Artificial Sequence
  ENSG00000035115_6 (sequence is synthesized)
aaagcagcaagggagcagaggaagtcttctgctaaagaattacctccaaagccattgtcaagaccacagcagtcatctgcaccagtccagctgaactctggctctcaaagtaacagaaat

SEQ ID NO: 24832 - DNA, 120 bp, Artificial Sequence
  ENSG00000035115_7 (sequence is synthesized)
tagaagtgacagcgctgtattcatttgaaggacagcagcctggggatttgaattttcaagctggagacagaatcacagttatatcaaaaacagattcacattttgattggtgggaaggaa

SEQ ID NO: 24833 - DNA, 120 bp, Artificial Sequence
  ENSG00000035115_8 (sequence is synthesized)
aacttcgaggtcaaactggcatttttccagccaactacgtaaccatgaattaaagcgtatactattttcttctttgagaattacaaaaaaattatttctacactgacaggatttactagt

SEQ ID NO: 24834 - DNA, 120 bp, Artificial Sequence
  ENSG00000035115_9 (sequence is synthesized)
taagcaatgtttaatataaattttaaaaaacttctgttctacaaaatttccattccgtatgtaaaagattttgtttttctatataaaaagagctgactgacatatctttaaatactttgt

SEQ ID NO: 24835 - DNA, 120 bp, Artificial Sequence
  ENSG00000035115_10 (sequence is synthesized)
actaactttatcacacttactgtgtcatagaatatcatacagtttatacgctcatagttctcttgtgaacacttcaaacatcgctaagcatttgatctggccatgtatatggtagctgtg

SEQ ID NO: 24836 - DNA, 120 bp, Artificial Sequence
  ENSG00000035115_11 (sequence is synthesized)
ttttaatttgagaatcttgagggtagagccacaaatttcaattcttacatttccatttgcaaagtgactagagaaaaagaaatcagcttaaatgaggtattaagtaatgtttagagtcgt

SEQ ID NO: 24837 - DNA, 120 bp, Artificial Sequence
  ENSG00000035115_12 (sequence is synthesized)
aggtattaactagaatataaatccttagaaattgtctttataccttcaaaaattatactatgcatttatcatagaaatgtgattacaaagaagtctgactaccatgtctttaaacatatg

SEQ ID NO: 24838 - DNA, 120 bp, Artificial Sequence
  ENSG00000035115_13 (sequence is synthesized)
gcatctctcaacttttcttccttatggggctacatttgttcatttccagcagtagcataaacttacggtgacatggtagacttgtctctaaataaaatttttaaatgtttactaagttaa

SEQ ID NO: 24839 - DNA, 120 bp, Artificial Sequence
  ENSG00000035115_14 (sequence is synthesized)
cgaaggcctgagcgcggcccggcgggcgcgtggtttttgtcccgcgaaacgtacacggcgggtgttttgcgccgcctccttcgtcacctgccgcaggaagtgtggaactggtctcaatcg

SEQ ID NO: 24840 - DNA, 120 bp, Artificial Sequence
  ENSG00000035115_15 (sequence is synthesized)
gttgaccaccttaaggaaataggatttacactgtggacagagatgtgtcctttacacttcatttgaaccaatatgcccatgctcctgtggaggctgagttggaaagtgacacgaagctgc

SEQ ID NO: 24841 - DNA, 120 bp, Artificial Sequence
  ENSG00000035115_16 (sequence is synthesized)
ccccccgcaagagagcagaaataaggatctggcatgtcaacacaaacataggaagttgaggcagtcaaagggaaataactgctaccctgactctgctgagagcctcacaagtccctgtgc

SEQ ID NO: 24842 - DNA, 120 bp, Artificial Sequence
  ENSG00000035115_17 (sequence is synthesized)
agtgcgcctgcggaggcggtcctatgacgaaaagctattccgaagtttggaatgatgacgatggtcgtgttatttttaacttcctgatatttgaacggcgaggtgtcagcgaccatcctt

SEQ ID NO: 24843 - DNA, 120 bp, Artificial Sequence
  ENSG00000035115_18 (sequence is synthesized)
ccgttccacagaagcgtctctgaagtttgggtcgaatgcgcgcgcttggaatgtgcgtggaacccgcggcaggcgcggggaggaggccttggctagggcgccggcgaggaagtgtggaac

SEQ ID NO: 24844 - DNA, 120 bp, Artificial Sequence
  ENSG00000035115_19 (sequence is synthesized)
cccaggtgctctctccaccttctgccaggttcccctatgaaggctttgctctcagactctccccttgtggagacaaaaatcccacagcaagtggaaacagaagtgccttggaaaaagtta

SEQ ID NO: 24845 - DNA, 120 bp, Artificial Sequence
  ENSG00000035115_20 (sequence is synthesized)
taagcacatgaagtttttaaaaaaattttctctgagaagatcccattttttactctaaaagatcagaccagtgtggcatgtgtggaactgctctgtaccaagatcacactcttcagttgg

SEQ ID NO: 24846 - DNA, 120 bp, Artificial Sequence
  ENSG00000035115_21 (sequence is synthesized)
agaagaggaagggcaggaataaataaagggctttcctgtctcccgagggagcagagaaagctttcgctgtcctcttccttccccagccacagcctggggttgggggactggaaacaagct

SEQ ID NO: 24847 - DNA, 120 bp, Artificial Sequence
  ENSG00000035115_22 (sequence is synthesized)
caggctagcacttgatgttcagacggtagtctgaaagtttgactagggagttaatgatctgaccagagagacaggtttttattttgagaactgacaagctttgtgtccttaaaacaaagg

SEQ ID NO: 24848 - DNA, 120 bp, Artificial Sequence
  ENSG00000035115_23 (sequence is synthesized)
aagtagttaaaccaaggccccagaaagagaaattcactgcatgtaactatgaccacgcatgattttatcagaagttgattagaatctgtaacattttctgtagttcagctgacacactga

SEQ ID NO: 24849 - DNA, 120 bp, Artificial Sequence
  ENSG00000035115_24 (sequence is synthesized)
agatgtcctcactgtgaccagccttgtcaacagctggatcacagtgacataagctgtgtctaggatgagtcttgcggtctgcagccgtgtgaggctgcatctgattcccaagtccaatgg

SEQ ID NO: 24850 - DNA, 120 bp, Artificial Sequence
  ENSG00000035115_25 (sequence is synthesized)
ctctcttcccgtgtttacagatcaggccatgacctttccctacagcaggatgtttgcaagattaactctcaactgaggaatttgcttatttgctctaatactgcttggttgagagagttc

SEQ ID NO: 24851 - DNA, 120 bp, Artificial Sequence
  ENSG00000035115_26 (sequence is synthesized)
aaagtagaaagtcttctgaggggataagattcatgtattatttacagtgcttcagttgcatgtatcagaaaatctagtctaaattgctttaacagaaaaagatgttgctggtccatttga

SEQ ID NO: 24852 - DNA, 120 bp, Artificial Sequence
  ENSG00000035115_27 (sequence is synthesized)
gcctctgaaataaagtagatgaaatattcagcagcagaaagaacaagtttccactccagtgaactaattcaaatgtatccagcatctagatatatgtataaatgtaattaaaacatattg

SEQ ID NO: 24853 - DNA, 120 bp, Artificial Sequence
  ENSG00000035115_28 (sequence is synthesized)
agcatctagagcatctctcccaagataattaccacctgatagtaatggctataaaagctaaaagtggaatcagtctacatgtttcgcaataggaatcaattgaagcatacatcaaaatgc

SEQ ID NO: 24854 - DNA, 120 bp, Artificial Sequence
  ENSG00000035115_29 (sequence is synthesized)
taatttgcagagtacatttatatattctttttacaacatgtggttttaagtgtgtatcttacatttaaaaattaaatatacaaataatatatgctcgtagaaaatgcagaagacacatga

SEQ ID NO: 24855 - DNA, 120 bp, Artificial Sequence
  ENSG00000035115_30 (sequence is synthesized)
ggaccagctttggttataaagccctgctgtggcaccaaaaggaatgtcgtcctgatacagcagcctcgggtcacccaatccactccagatactatggctgcagcatcaatgtaagcagac

SEQ ID NO: 24856 - DNA, 120 bp, Artificial Sequence
  ENSG00000035115_31 (sequence is synthesized)
attctgtccctgatatcaggttcctaagaacctactaagcctccttcgtagtttcactgacttcacattcttgtgaaaaggtcatgctaccttgacatttcctctgtacagatttcaggg

SEQ ID NO: 24857 - DNA, 120 bp, Artificial Sequence
  ENSG00000035115_32 (sequence is synthesized)
aaaaacataatttgtcctctgtgattgcatttctccaaggatggaactttgttgtatcaataatacaaataatatgtgggaggctgaggcaggtggagcacttgagatcaggagtttcag

SEQ ID NO: 24858 - DNA, 120 bp, Artificial Sequence
  ENSG00000035115_33 (sequence is synthesized)
accagcctggccaacatggcaaaaccccctctctaccataaaaatagaaacattagctgggcatggtggcgtgtgcccataatctcagctactcaggaggctgaaacaggaggatcgctt

SEQ ID NO: 24859 - DNA, 120 bp, Artificial Sequence
  ENSG00000035115_34 (sequence is synthesized)
gaatatttatagcagttttatttgtaatagccaaaagctggaaacaacccaattgtctatcaacagtgactggaaggacaaattgtgctatgtccacacattagaataccagttggcagt

SEQ ID NO: 24860 - DNA, 120 bp, Artificial Sequence
  ENSG00000035115_35 (sequence is synthesized)
caaaaaggaagagctgatctgtgcagcaatttgagtctcagtaatttcatggtgagtaaaataagctagacagaaaagaacacacactgatgactatatgaagttctggcacagacaaaa

SEQ ID NO: 24861 - DNA, 120 bp, Artificial Sequence
  ENSG00000035115_36 (sequence is synthesized)
agattggcactaacctgaggcaggggctgggtataggagtgaccactacagagggcacggatgctgtgatcaggagtggtctctacctctgtccatgcacactgagctatacctgtaaca

SEQ ID NO: 24862 - DNA, 120 bp, Artificial Sequence
  ENSG00000035115_37 (sequence is synthesized)
ggtagatttcattttgtaaattgtatctcatgaagttgatttgaaaagcctacactgagaggcagtattttaactattctgagataacattgattaaaaaatgcaacatgccaaaataca

SEQ ID NO: 24863 - DNA, 120 bp, Artificial Sequence
  ENSG00000035115_38 (sequence is synthesized)
gacgcctttgtatgtcaggccttggggcaccgagggatttgtgtgcattgttcatgatgttccacagcacctttcagagttggtatgatgcctgtttcatggaataaaaactgaagccta

SEQ ID NO: 24864 - DNA, 120 bp, Artificial Sequence
  ENSG00000035115_39 (sequence is synthesized)
aaccatccttaaccaaactactgtttaataaacttattgatttcatcattcagccttcaatgagtcttaaaaatcaaatgatgcccactaccaatgtgaaacaagtctaaattgctttaa

SEQ ID NO: 24865 - DNA, 120 bp, Artificial Sequence
  ENSG00000035115_40 (sequence is synthesized)
ttcatattttcatatctgtactttttcctgtattttacaatgtatttgtacgttgtacaaataattgctgatcatgtaaaaatatagaaatatagaaattttgttgccatacttgggtct

SEQ ID NO: 24866 - DNA, 120 bp, Artificial Sequence
  ENSG00000035115_41 (sequence is synthesized)
taattcctggttcttttataatttgatatttgacactctaaatcttcaatgaatttggagtttatctttctgtaacacaaagctgtgaatgaatttttgtttttctccccaaatgaacat

SEQ ID NO: 24867 - DNA, 120 bp, Artificial Sequence
  ENSG00000035115_42 (sequence is synthesized)
tatctagtatgcaatacatcatttcaacatagaattgaggtgtcatttttattatatactaaatttgtaaatatatttgggttaatttctgaattttcttctttgtgaattgatttttct

SEQ ID NO: 24868 - DNA, 120 bp, Artificial Sequence
  ENSG00000035115_43 (sequence is synthesized)
cctatatttgcatctgctattatgtattaattattgaggctttgtaatgtgtcacaggttctgtcaaggctgggctgtcattgttctcctattacatattttttcctagctcttcttgct

SEQ ID NO: 24869 - DNA, 120 bp, Artificial Sequence
  ENSG00000035115_44 (sequence is synthesized)
tgtttattttcccatttgaacttcaaaattactgtgttttattaaaagacccttgtaagatagaagacagatttgatttcattaagaaaaaacagaaaaaaaagcaaattcaaaagacaa

SEQ ID NO: 24870 - DNA, 120 bp, Artificial Sequence
  ENSG00000035115_45 (sequence is synthesized)
cgcaccaacgccaacagggcagcgcgtgtgagagccacgcctgcgcaatcggctccagtgcgcctgcggaggcggtcctatgacgtgaataaccctataccttccaatttgaaatcagaa

SEQ ID NO: 24871 - DNA, 120 bp, Artificial Sequence
  ENSG00000035115_46 (sequence is synthesized)
tttacagctacatattccctctgagcattgccctggctgccttccataagtgtgggttaccatctggtgtcatttccttactccaagacaactttgctcccacctgactcttttgtacgg

SEQ ID NO: 24872 - DNA, 120 bp, Artificial Sequence
  ENSG00000035115_47 (sequence is synthesized)
cacctgactcttttgtacggttattgtctagtatataatatttctatagttacagacttaaaatatagaaaaaatttatttttaaaccaattaagagaaaagagaagaactatgcattta

SEQ ID NO: 24873 - DNA, 120 bp, Artificial Sequence
  ENSG00000035115_48 (sequence is synthesized)
taattatctttactggtgattttttaaagtgtggatttaaattactctctagagtcacttgctttcagcctgaaggactttgtttagaatttataatatttcttgtaaaatggttctact

SEQ ID NO: 24874 - DNA, 120 bp, Artificial Sequence
  ENSG00000035115_49 (sequence is synthesized)
agcaacaaattctctcaacttaaaaaaaaatttttaatctgggaatgtcttcatatccccttcatttttgaaatatacttttgctgattataagattctaagttgaccagttctttcttt

SEQ ID NO: 24875 - DNA, 120 bp, Artificial Sequence
  ENSG00000035115_50 (sequence is synthesized)
cagcattttgtcatcctactgttttctgaagtctactgtttttgaagagaaatctatctattattctaattggggttccttttatgtgatgagtcatttttctcttgctcctttccagat

SEQ ID NO: 24876 - DNA, 120 bp, Artificial Sequence
  ENSG00000035115_51 (sequence is synthesized)
tttctcttgcattttaagattttttacaattatctatccagagtgttatctttttacatttattctactcagaatttgttgagcttcttgagtgtagatccatgtttttcatcagattga

SEQ ID NO: 24877 - DNA, 120 bp, Artificial Sequence
  ENSG00000035115_52 (sequence is synthesized)
gaattttcagccattatttctttgagaaaattttctgcttctttctctttttccttgccttctagtacttacatcacacatatgttggtgcacctaatggtgtcccaggtttcttgtgtt

SEQ ID NO: 24878 - DNA, 120 bp, Artificial Sequence
  ENSG00000035115_53 (sequence is synthesized)
tctgtcaatttttcttcattctctttctcttagtttttaagactttctattattcaaatttaccagttctttattttgcgtgctcagatctaccgttaaacttctctagtaaattgttca

SEQ ID NO: 24879 - DNA, 120 bp, Artificial Sequence
  ENSG00000035115_54 (sequence is synthesized)
tgttgcttaatgtactttttacctccagaatttccatttggttcttttatataattttatgtttttatcaatattctctattcaataagatattctcattgtacgtttttctacttctta

SEQ ID NO: 24880 - DNA, 120 bp, Artificial Sequence
  ENSG00000035115_55 (sequence is synthesized)
ttatgacagctgttttaaagtctttgtctgctaaatctgatagctggaccatctgaacagcagtcattctcgtctgcttcctttttaaattttttttctatgtatgggtcacactctccc

SEQ ID NO: 24881 - DNA, 120 bp, Artificial Sequence
  ENSG00000035115_56 (sequence is synthesized)
acttctttgtcttattatttttggttgagaatcagaaattttagatattatattgtatcaactctgggtgctcaacctctccccctaggagcctcttattgtttgcttgctgtttgttta

SEQ ID NO: 24882 - DNA, 120 bp, Artificial Sequence
  ENSG00000035115_57 (sequence is synthesized)
gagatatggctggactgtttgaatgaattctgtgccccactactgtgaagcctccaatgttgtctatgggcatgcatatagttttcctgagatgacaggtgttctgactgtccctgtccg

SEQ ID NO: 24883 - DNA, 120 bp, Artificial Sequence
  ENSG00000035115_58 (sequence is synthesized)
tgacctgtctgttaagctgtttgtctccattggtattacacactgttgttagcctccactaattgcctgctgattgctccattgtttccaacaatgccctggggacataaattgctccac

SEQ ID NO: 24884 - DNA, 120 bp, Artificial Sequence
  ENSG00000035115_59 (sequence is synthesized)
agtttgatccagttaaaattgtgctcctgtgcacaggtagtctttgaggctcatttctatttcaggagggctcttcttagctatctctgtccctggttctccctgataattttctagacc

SEQ ID NO: 24885 - DNA, 120 bp, Artificial Sequence
  ENSG00000035115_60 (sequence is synthesized)
accaatggtttagcttgttgctgtcatggagctaaatacctcatcttacctgtttatcaccaaaagcatcatttttgacagcacctttgaacttccccaccctgtgttccaaaagctttc

SEQ ID NO: 24886 - DNA, 120 bp, Artificial Sequence
  ENSG00000035115_61 (sequence is synthesized)
acttcccttggggagagctttggagctctctgctcttgcagcctgtctctctgtctgcccaagatctctgtgccgttgctccagagctggaggctggggcagtggctcccttctcttgga

SEQ ID NO: 24887 - DNA, 120 bp, Artificial Sequence
  ENSG00000035115_62 (sequence is synthesized)
gtgacatccctgcagccttgggtggtgtagtagcttggcttgcctctgtcagggtggagcttttgccccacaggtgaactggggcaagagtgagtggggtcctggtgctcctggactgtt

SEQ ID NO: 24888 - DNA, 120 bp, Artificial Sequence
  ENSG00000035115_63 (sequence is synthesized)
gtgctaggctggagccttcacttacacatgggttctgggtggaggaaggaagctccagacctctcagctgctcttgcctggaatggagcttctgtacaaggagctgtgggaagagaaatg

SEQ ID NO: 24889 - DNA, 120 bp, Artificial Sequence
  ENSG00000035115_64 (sequence is synthesized)
ctggcagaagcctctcctgtggatatactgcagccctgaccaggggctgggggaaggaagtctgtgttcttgcaaacccccttccccaagaggagcttccatcaggctgacctgcagcgg

SEQ ID NO: 24890 - DNA, 120 bp, Artificial Sequence
  ENSG00000035115_65 (sequence is synthesized)
ggcacaggttatagctcaaatgtcaccaactctctcttccttaccaatatttaatagtgttcattgaatcaatgtgtcttcattttcttcacttgccatatgcccttaggacaatttcca

SEQ ID NO: 24891 - DNA, 120 bp, Artificial Sequence
  ENSG00000035115_66 (sequence is synthesized)
gaagtgttaatttttaaaataatttttaccagttacggttattttgctgtggagagggtctgtggcctctttatgccaccactgcagtgtcattctgatttgtagatacattctacagtg

SEQ ID NO: 24892 - DNA, 120 bp, Artificial Sequence
  ENSG00000035115_67 (sequence is synthesized)
ggatggagattcaactgtaattgttaagttttagctcttcttttgttagttatagaacagtgaacaaagtacttaatcttcctgaatcaaatctgtaaaataaaaaatttttaagttgaa

SEQ ID NO: 24893 - DNA, 120 bp, Artificial Sequence
  ENSG00000035115_68 (sequence is synthesized)
ccttcacgggctcaaatccaagctcttctttctcctcacttagcctgcccctcccacagtgttcctcttcagtaaatggaaattccatccttggatttccttggtcctcagggtgacttc

SEQ ID NO: 24894 - DNA, 120 bp, Artificial Sequence
  ENSG00000035115_69 (sequence is synthesized)
agagccaactttcgttcttctatctcatgccctctattaaatccaccagagattctgttgcctttcagacactcgctgacccaatatttgcgctcccccatgcccaccctgaagcgagct

SEQ ID NO: 24895 - DNA, 120 bp, Artificial Sequence
  ENSG00000035115_70 (sequence is synthesized)
atcctggactttccagctatcatgagagactgtgaaggcattaacctcttaccaaggatttcctcatgtttgcttaccatcgctgcagagaaaagtcacagttacatggccccagggccc

SEQ ID NO: 24896 - DNA, 120 bp, Artificial Sequence
  ENSG00000035115_71 (sequence is synthesized)
gaagcaggacactgagtcctccacgtgcgagctcctgaatctgtctcagccccacggaggggctgctgggtgtgatgatcagctacatcacctgtactttcctcccaccatcttttggct

SEQ ID NO: 24897 - DNA, 120 bp, Artificial Sequence
  ENSG00000035115_72 (sequence is synthesized)
ttgccctttggaaggtccagctgtgtagttcttgggcctctgagagagacaaggcttgcaaatgcacagtccaattttctgatcttccctctagggactctggaaggaatggtttcataa

SEQ ID NO: 24898 - DNA, 120 bp, Artificial Sequence
  ENSG00000035115_73 (sequence is synthesized)
tcaaaagcttggaccctccagcgtcagcattcttccccgtcctcttacccatcccatagttgtctgggatggggtttctcaacctgggcactacacacaatttaggctggataacacttt

SEQ ID NO: 24899 - DNA, 120 bp, Artificial Sequence
  ENSG00000035115_74 (sequence is synthesized)
gttgtaggggctatcttgtgcctcatagggtgcttagcaaaggctgtgttctcctagttgtgaccttcccaaggctgtgatttttttcctgaaacagtcaggccaggggtgctggctgca

SEQ ID NO: 24900 - DNA, 120 bp, Artificial Sequence
  ENSG00000035115_75 (sequence is synthesized)
gggctgtggtgcctgtcgttcgagttcgcatagaggggctgggcgggtcacgcggggaacctgccttgagccccgcggggtccacgccggaccagggcggccttgggcctgggcgctccc

SEQ ID NO: 24901 - DNA, 120 bp, Artificial Sequence
  ENSG00000035115_76 (sequence is synthesized)
tgagacccccacccccaacaccgtgcttggagccgccgcggggctctgggcttttcgatcttgaggacggggcggttccgaagtccctgagggcgaaggcctgagcgcggcccggcgggc

SEQ ID NO: 24902 - DNA, 120 bp, Artificial Sequence
  ENSG00000035115_77 (sequence is synthesized)
aagaggcttcattagtaatgacctgtgtcttcatcagtatgatagaatgggacatcagcactctgatcaggtcatgctctatatgccttatggtacagcagaggaaaaatgggtgagcca

SEQ ID NO: 24903 - DNA, 120 bp, Artificial Sequence
  ENSG00000035115_78 (sequence is synthesized)
cacatagatggcacacacgtaatcgagtgccactccagctttcttaggttgccatctgcatgacacatctttctccatccttttactgtcaatctaatggtatcagacttggtgataatt

SEQ ID NO: 24904 - DNA, 120 bp, Artificial Sequence
  ENSG00000035115_79 (sequence is synthesized)
gtgagtacccggggacccacctgtccggcagcaccctcccctctcaagagctgggcggtggtgggaggaggaggacgggaaaaccggcgatgcctctggggtttctaggtcgcgcgtctg

SEQ ID NO: 24905 - DNA, 120 bp, Artificial Sequence
  ENSG00000035115_80 (sequence is synthesized)
ttaaccgcaaaccgcccaaagttaagatagagcagcttccaggactttcttgaccacagcgattttgattgaagtttagccaccgtcttttccatttttagaaaagctattccgaagttt

SEQ ID NO: 24906 - DNA, 120 bp, Artificial Sequence
  ENSG00000035115_81 (sequence is synthesized)
gaagggccggtccccccaacacctggcgccggggtcgcggggccacagggcgagcgcggggtcgcggcgagcacgggtcctctctgatcgctgggccttggcgctggctgctgagttttt

SEQ ID NO: 24907 - DNA, 120 bp, Artificial Sequence
  ENSG00000035141_0 (sequence is synthesized)
ggtgagggggcgggcccgtacgccgattccatatgggcgccggcgcggagcgccgcggggcagcgcggggtcgccatggctgagctgcagcagctccgggtgcaggaggcggtggagtcc

SEQ ID NO: 24908 - DNA, 120 bp, Artificial Sequence
  ENSG00000035141_1 (sequence is synthesized)
gtccatggtgaagagtctggaaagagagaacatccggaagatgcagggtctcatgttccggtgcagcgccagctgttgtgaggacagccaggcctccatgaagcaggtgcaccagtgcat

SEQ ID NO: 24909 - DNA, 120 bp, Artificial Sequence
  ENSG00000035141_2 (sequence is synthesized)
cgagcgctgccatgtgcctctggctcaagcccaggctttggtcaccagtgagctggagaagttccaggaccgcctggcccggtgcaccatgcattgcaacgacaaagccaaagattcaat

SEQ ID NO: 24910 - DNA, 120 bp, Artificial Sequence
  ENSG00000035141_3 (sequence is synthesized)
agatgctgggagtaaggagcttcaggtgaagcagcagctggacagttgtgtgaccaagtgtgtggatgaccacatgcacctcatcccaactatgaccaagaagatgaaggaggctctctt

SEQ ID NO: 24911 - DNA, 120 bp, Artificial Sequence
  ENSG00000035141_4 (sequence is synthesized)
atcaattggaaaataaaagtatttgccagtggccatcagggctgagggcaagaatatattttttataaggaattgggaattttagtcttttaagcaaagtttacgaatgaagaaatgaag

SEQ ID NO: 24912 - DNA, 120 bp, Artificial Sequence
  ENSG00000035141_5 (sequence is synthesized)
gatggccacaagcgtaaggcatatgtcacttgcctctggacactggttattttatgtttcagtccctaaaaaatgaaatggaaaaaagtggtgctaaatcgagtcagagatattacagga

SEQ ID NO: 24913 - DNA, 120 bp, Artificial Sequence
  ENSG00000035141_6 (sequence is synthesized)
gagttttagagcttattatttcctgtggccagtgcttgtcctggcagtaaggctttcccctgtaacaagccagagccctccaaggtaccagactcttcttactacacaggtactaacagg

SEQ ID NO: 24914 - DNA, 120 bp, Artificial Sequence
  ENSG00000035141_7 (sequence is synthesized)
agagttggtggagtctgaggagagatattttctctttgttgccaacatcctgtttaccaaaagtgtcaccccaccatcttccataagctgtgaaacaaaatcaatgaggtcactaactta

SEQ ID NO: 24915 - DNA, 120 bp, Artificial Sequence
  ENSG00000035141_8 (sequence is synthesized)
gaagggaaagaaagttttctgggtctttgttttcttgatttggggtaatttatacaagggcatacaagttgattttaagatgtggaactgggaggtagactagtttggataagaactttg

SEQ ID NO: 24916 - DNA, 120 bp, Artificial Sequence
  ENSG00000035141_9 (sequence is synthesized)
aaatgttccttgtggatccccatttctggtcatcaagatgtggatgtacatttcttaaaattattacatgctgcatctttcagcctggagactgtgcagaaacatgagaggtgatgacac

SEQ ID NO: 24917 - DNA, 120 bp, Artificial Sequence
  ENSG00000035141_10 (sequence is synthesized)
actaattatgggaagcagaattactggctgatggcccctgaggctgtgtgtaacaaaatgacaggacaatcttgcagtaacactttccccttgaagagaagggggttttgattgtgatat

SEQ ID NO: 24918 - DNA, 120 bp, Artificial Sequence
  ENSG00000035141_11 (sequence is synthesized)
atactagtatctaggaatgaacagtaaaagaggagcagttggctacttgattacaacagagtaaatgaagtactggatttgggaaaacctggttttattagaacatatggaatgaaagcc

SEQ ID NO: 24919 - DNA, 120 bp, Artificial Sequence
  ENSG00000035141_12 (sequence is synthesized)
tacacctagcattgcctacttagccccctgaattaacagagcccaattgagacaaacccctggcaacaggaaattcaagggagaaaaagtaagcaacttgggctaggatgagctgactcc

SEQ ID NO: 24920 - DNA, 120 bp, Artificial Sequence
  ENSG00000035141_13 (sequence is synthesized)
cttagagcaaaggagagacagcccccattaccaaataccatttttgcctggggcttgtgcagctggcagtgttcctgccccagcatggcaccttattgttttgatagcaacttcgttgaa

SEQ ID NO: 24921 - DNA, 120 bp, Artificial Sequence
  ENSG00000035141_14 (sequence is synthesized)
ttttcaccaacttattacttgaaattataatatagcctgtccgtttgctgtttccaggctgtgatatattttcctagtggtttgactttaaaaataaataaggtttaattttctccccac

SEQ ID NO: 24922 - DNA, 120 bp, Artificial Sequence
  ENSG00000035141_15 (sequence is synthesized)
cggaagatgcaggtgagcggcccgaggcccagcagaggcgctgccaacgtgaaagaccagaaaggcgaggacttccggcctccccgttggccaggtcatgcctgcttctcttgcgcccaa

SEQ ID NO: 24923 - DNA, 120 bp, Artificial Sequence
  ENSG00000035141_16 (sequence is synthesized)
cctcgcttcacacagcgcgggtttctacactgttcttctctgagccccgcaatgcctctgtgtgtttcggtcctgcttctctcacggaggtctcatgttccggtgcagcgccagctgttg

SEQ ID NO: 24924 - DNA, 120 bp, Artificial Sequence
  ENSG00000035141_17 (sequence is synthesized)
attgattagtgggtcggctgccctctggtggaatttgtattgctaggttgctgacctctgaaccccatggaagaggctcctggttttcagaatttggcttcgtcagaccaccctaccctc

SEQ ID NO: 24925 - DNA, 120 bp, Artificial Sequence
  ENSG00000035141_18 (sequence is synthesized)
acccactcgggcgaacctctgttcacccaaccatcggtgcaacaggtgccgatgagctagcagcaaggacaccatgaaacactacactagacattgaggataattttccccagtggtggt

SEQ ID NO: 24926 - DNA, 120 bp, Artificial Sequence
  ENSG00000035141_19 (sequence is synthesized)
tttaaggtcctggtgtctattctcagggaaggtgaaagcagaaggtggagagagaggtgcaaatatccacgtggccttctaactcctgtagtgctccatagtcatctctgtccccagaga

SEQ ID NO: 24927 - DNA, 120 bp, Artificial Sequence
  ENSG00000035141_20 (sequence is synthesized)
cttggttctgttaacagttgtgatactgatggccaaccagttttcacagggtttgaaattttggaaaaagtcttggcggtcgagtgccttaagttgaacatcatttcctatagaaatgat

SEQ ID NO: 24928 - DNA, 63 bp, Artificial Sequence
  ENSG00000035141_21 (sequence is synthesized)
cgagtgccttaagttgaacatcatttcctatagaaatgatgtaggccgagcgcagcaggagat

SEQ ID NO: 24929 - DNA, 120 bp, Artificial Sequence
  ENSG00000035141_22 (sequence is synthesized)
gggcccttccctcagccaccacgcgacgccttgcactgcagccgcgtccccgcagaccgggtgtgggcggccctggggtcgccggggcggcctcggacaggacttcggaagctttggcgg

SEQ ID NO: 24930 - DNA, 120 bp, Artificial Sequence
  ENSG00000035141_23 (sequence is synthesized)
ccccttccagcccggggcaggagcgtcctcggcggcaggtgggaagcccctggtggcaggcgctcgccccaccaccttcccctcttacgcggccccttccgcagggtctcatgttccggt

SEQ ID NO: 24931 - DNA, 120 bp, Artificial Sequence
  ENSG00000035403_0 (sequence is synthesized)
gtagtcgctgcacagtctgtctcttcgccggttcccggccccgtggatcctacttctctgtcgcccgcggttcgccgccccgctcgccgccgcgatgccagtgtttcatacgcgcacgat

SEQ ID NO: 24932 - DNA, 120 bp, Artificial Sequence
  ENSG00000035403_1 (sequence is synthesized)
cgagagcatcctggagccggtggcacagcagatctcccacctggtgataatgcacgaggagggcgaggtggacggcaaagccattcctgacctcaccgcgcccgtggccgccgtgcaggc

SEQ ID NO: 24933 - DNA, 120 bp, Artificial Sequence
  ENSG00000035403_2 (sequence is synthesized)
ggccgtcagcaacctcgtccgggttggaaaagagactgttcaaaccactgaggatcagattttgaagagagatatgccaccagcatttattaaggttgagaatgcttgcaccaagcttgt

SEQ ID NO: 24934 - DNA, 120 bp, Artificial Sequence
  ENSG00000035403_3 (sequence is synthesized)
ccaggcagctcagatgcttcagtcagacccttactcagtgcctgctcgagattatctaattgatgggtcaaggggcatcctctctggaacatcagacctgctccttaccttcgatgaggc

SEQ ID NO: 24935 - DNA, 120 bp, Artificial Sequence
  ENSG00000035403_4 (sequence is synthesized)
tgaggtccgtaaaattattagagtttgcaaaggaattttggaatatcttacagtggcagaggtggtggagactatggaagatttggtcacttacacaaagaatcttgggccaggaatgac

SEQ ID NO: 24936 - DNA, 120 bp, Artificial Sequence
  ENSG00000035403_5 (sequence is synthesized)
taagatggccaagatgattgacgagagacagcaggagctcactcaccaggagcaccgagtgatgttggtgaactcgatgaacaccgtgaaagagttgctgccagttctcatttcagctat

SEQ ID NO: 24937 - DNA, 120 bp, Artificial Sequence
  ENSG00000035403_6 (sequence is synthesized)
gaagatttttgtaacaactaaaaactcaaaaaaccaaggcatagaggaagctttaaaaaatcgcaattttactgtagaaaaaatgagtgctgaaattaatgagataattcgtgtgttaca

SEQ ID NO: 24938 - DNA, 120 bp, Artificial Sequence
  ENSG00000035403_7 (sequence is synthesized)
actcacctcttgggatgaagatgcctgggccagcaaggacactgaagccatgaagagagcattggcctccatagactccaaactgaaccaggccaaaggttggctccgtgaccctagtgc

SEQ ID NO: 24939 - DNA, 120 bp, Artificial Sequence
  ENSG00000035403_8 (sequence is synthesized)
ctccccaggggatgctggtgagcaggccatcagacagatcttagatgaagctggaaaagttggtgaactctgtgcaggcaaagaacgcagggagattctgggaacttgcaaaatgctagg

SEQ ID NO: 24940 - DNA, 120 bp, Artificial Sequence
  ENSG00000035403_9 (sequence is synthesized)
gcagatgactgatcaagtggctgacctccgtgccagaggacaaggatcctcaccggtggccatgcagaaagctcagcaggtatctcagggtctggatgtgctcacagcaaaagtggaaaa

SEQ ID NO: 24941 - DNA, 120 bp, Artificial Sequence
  ENSG00000035403_10 (sequence is synthesized)
tgcagctcgcaagctggaagccatgaccaactcaaagcagagcattgcaaagaagatcgatgctgctcagaactggcttgcagatccaaatggtggaccggaaggagaagagcagattcg

SEQ ID NO: 24942 - DNA, 120 bp, Artificial Sequence
  ENSG00000035403_11 (sequence is synthesized)
aggtgctttggctgaagctcggaaaatagcagaattatgtgatgatcctaaagaaagagatgacattctacgttcccttggggaaatatctgctctgacttctaaattagcagatctacg

SEQ ID NO: 24943 - DNA, 120 bp, Artificial Sequence
  ENSG00000035403_12 (sequence is synthesized)
aagacaggggaaaggagattctccagaggctcgagccttggccaaacaggtggccacggccctgcagaacctgcagaccaaaaccaaccgggctgtggccaacagcagaccggccaaagc

SEQ ID NO: 24944 - DNA, 120 bp, Artificial Sequence
  ENSG00000035403_13 (sequence is synthesized)
agctgtacaccttgagggcaagattgagcaagcacagcggtggattgataatcccacagtggatgaccgtggagtcggtcaggctgccatccgggggcttgtggccgaagggcatcgtct

SEQ ID NO: 24945 - DNA, 120 bp, Artificial Sequence
  ENSG00000035403_14 (sequence is synthesized)
ggctaatgttatgatggggccttatcggcaagatcttctcgccaagtgtgaccgagtggaccagctgacagcccagctggctgacctggctgccagaggggaaggggagagtcctcaggc

SEQ ID NO: 24946 - DNA, 120 bp, Artificial Sequence
  ENSG00000035403_15 (sequence is synthesized)
acgagcacttgcatctcagctccaagactccttaaaggatctaaaagctcggatgcaggaggccatgactcaggaagtgtcagatgttttcagcgataccacaactcccatcaagctgtt

SEQ ID NO: 24947 - DNA, 120 bp, Artificial Sequence
  ENSG00000035403_16 (sequence is synthesized)
ggcagtggcagccacggcgcctcctgatgcgcctaacagggaagaggtatttgatgagagggcagctaactttgaaaaccattcaggaaagcttggtgctacggccgagaaggcggctgc

SEQ ID NO: 24948 - DNA, 120 bp, Artificial Sequence
  ENSG00000035403_17 (sequence is synthesized)
ggttggtactgctaataaatcaacagtggaaggcattcaggcctcagtgaagacggcccgagaactcacaccccaggtggtctcggctgctcgtatcttacttaggaaccctggaaatca

SEQ ID NO: 24949 - DNA, 120 bp, Artificial Sequence
  ENSG00000035403_18 (sequence is synthesized)
agctgcttatgaacattttgagaccatgaagaaccagtggatcgataatgttgaaaaaatgacagggctggtggacgaagccattgataccaaatctctgttggatgcttcagaagaagc

SEQ ID NO: 24950 - DNA, 120 bp, Artificial Sequence
  ENSG00000035403_19 (sequence is synthesized)
aattaaaaaagacctggacaagtgcaaggtagctatggccaacattcagcctcagatgctggttgctggggcaaccagtattgctcgtcgggccaaccggatcctgctggtggctaagag

SEQ ID NO: 24951 - DNA, 120 bp, Artificial Sequence
  ENSG00000035403_20 (sequence is synthesized)
ggaggtggagaattccgaggatcccaagttccgtgaggctgtgaaagctgcctctgatgaattgagcaaaaccatctccccgatggtgatggatgcaaaagctgtggctggaaacatttc

SEQ ID NO: 24952 - DNA, 120 bp, Artificial Sequence
  ENSG00000035403_21 (sequence is synthesized)
cgaccctggactgcaaaagagcttcctggactcaggatatcggatcctgggagctgtggccaaggtcagagaagccttccaacctcaggagcctgacttcccgccgcctccaccagacct

SEQ ID NO: 24953 - DNA, 120 bp, Artificial Sequence
  ENSG00000035403_22 (sequence is synthesized)
ggaaaaggatgaagagttccctgagcagaaggccggggaggtgattaaccagccaatgatgatggctgccagacagctccatgatgaagctcgcaaatggtccagcaagccgggcatccc

SEQ ID NO: 24954 - DNA, 120 bp, Artificial Sequence
  ENSG00000035403_23 (sequence is synthesized)
agccgctgaggtgggtataggtgttgtagctgaggcagatgcggccgatgctgctggcttccctgtcccccctgacatggaagacgattacgaacctgagctgctgttaatgccatccaa

SEQ ID NO: 24955 - DNA, 120 bp, Artificial Sequence
  ENSG00000035403_24 (sequence is synthesized)
tcagccggtcaaccagcccattctggccgcggctcagtccttgcatcgggaagctaccaagtggtctagtaagggcaatgacatcattgcagcagccaagcgcatggctctgctgatggc

SEQ ID NO: 24956 - DNA, 120 bp, Artificial Sequence
  ENSG00000035403_25 (sequence is synthesized)
tgagatgtctcggctggtaagagggggcagtggtaccaagcgggcactcattcagtgtgccaaggacatcgccaaggcctcagatgaggtgactcggttggccaaggaggttgccaagca

SEQ ID NO: 24957 - DNA, 120 bp, Artificial Sequence
  ENSG00000035403_26 (sequence is synthesized)
gtgcacagataaacggattagaaccaacctcttacaggtatgtgagcgaatcccaaccataagcacccagctcaaaatcctgtccacagtgaaggccaccatgctgggccggaccaacat

SEQ ID NO: 24958 - DNA, 120 bp, Artificial Sequence
  ENSG00000035403_27 (sequence is synthesized)
cagtgatgaggagtctgagcaggccacagagatgctggttcacaatgcccagaacctcatgcagtctgtgaaggagactgtgcgggaagctgaagctgcttcaatcaaaattcgaacaga

SEQ ID NO: 24959 - DNA, 120 bp, Artificial Sequence
  ENSG00000035403_28 (sequence is synthesized)
tgctggatttacactgcgctgggttagaaagactccctggtaccagtaggcacctggctgagcctggctggcacagaaacctctactaaaaagaaggaaaatgatctgagtcccaggagc

SEQ ID NO: 24960 - DNA, 120 bp, Artificial Sequence
  ENSG00000035403_29 (sequence is synthesized)
tgcccagagttgctgggagctgaaaaatcacatcctggcctggcacatcagaaaggaatgggggcctcttcaaattagaagacatttatactcttttttcatggacactttgaaatgtgt

SEQ ID NO: 24961 - DNA, 120 bp, Artificial Sequence
  ENSG00000035403_30 (sequence is synthesized)
ttctgtataaagcctgtattctcaaacacagttacacttgtgcaccctctatcccaataggcagactgggtttctagcccatggacttcacataagctcagaatccaagtgaacactagc

SEQ ID NO: 24962 - DNA, 120 bp, Artificial Sequence
  ENSG00000035403_31 (sequence is synthesized)
cagacactctgctctgcccttgttccctaggggacacttccctctgtttctctttccttggctcccattcactcttccagaatcccaagacccagggcccaggcaaatcagttactaaga

SEQ ID NO: 24963 - DNA, 120 bp, Artificial Sequence
  ENSG00000035403_32 (sequence is synthesized)
agaaaattgctgtgcctcccaaaattgttttgagctttccatgttgctgccaaccataccttccttccctgggctgtgctacctgggtccttttcagaagtgagctttgctgctacaggg

SEQ ID NO: 24964 - DNA, 120 bp, Artificial Sequence
  ENSG00000035403_33 (sequence is synthesized)
gaaggtggcctctgtggagccccagcatatgggggcctggattcatttcctgcccttcctcagtttaatccttctagtttcccacaatataaaactgtacttcactgtcaggaagaaatc

SEQ ID NO: 24965 - DNA, 120 bp, Artificial Sequence
  ENSG00000035403_34 (sequence is synthesized)
acagaatcatatgattctgcttttaccatgcccctgagcaatgtctgtgctagggaaacttcccgtcccatatcctgcctcagcccgccaaggtagccatcccatgaacacactgtgtcc

SEQ ID NO: 24966 - DNA, 120 bp, Artificial Sequence
  ENSG00000035403_35 (sequence is synthesized)
tggtgctctctgccactggaagggcagagtagccagggtgtggccctgccatcttcccagcagggccactcccggcactccatgcttagtcactgcctgcagaggtctgtgctgaggcct

SEQ ID NO: 24967 - DNA, 120 bp, Artificial Sequence
  ENSG00000035403_36 (sequence is synthesized)
tatcattcattcttagctcttaattgttcattttgagctgaaatgctgcattttaattttaaccaaaacatgtctcctatcctggtttttgtagccttcctccacatcctttctaaacaa

SEQ ID NO: 24968 - DNA, 120 bp, Artificial Sequence
  ENSG00000035403_37 (sequence is synthesized)
gattttaaagacatgtaggtgtttgttcatctgtaactctaaaagatcctttttaaattcagtcctaagaaagaggagtgcttgtcccctaagagtgtttaatggcaaggcagccctgtc

SEQ ID NO: 24969 - DNA, 120 bp, Artificial Sequence
  ENSG00000035403_38 (sequence is synthesized)
tgaaggacacttcctgcctaagggagagtggtatttgcagactagaattctagtgctgctgaagatgaatcaatgggaaatactactcctgtaattcctacctccctgcaaccaactaca

SEQ ID NO: 24970 - DNA, 120 bp, Artificial Sequence
  ENSG00000035403_39 (sequence is synthesized)
accaagctctctgcatctactcccaagtatggggttcaagagagtaatgggtttcatatttcttatcaccacagtaagttcctactaggcaaaatgagagggcagtgtttcctttttggt

SEQ ID NO: 24971 - DNA, 120 bp, Artificial Sequence
  ENSG00000035403_40 (sequence is synthesized)
acttattactgctaagtatttcccagcacatgaaaccttattttttcccaaagccagaaccagatgagtaaaggagtaagaaccttgcctgaacatccttccttcccacccatcgctgtg

SEQ ID NO: 24972 - DNA, 120 bp, Artificial Sequence
  ENSG00000035403_41 (sequence is synthesized)
tgttagttcccaacatcgaatgtgtacaacttaagttggtcctttacactcaggctttcactatttcctttataatgaggatgattattttcaaggccctcagcatatttgtatagttgc

SEQ ID NO: 24973 - DNA, 120 bp, Artificial Sequence
  ENSG00000035403_42 (sequence is synthesized)
ttgcctgatataaatgcaatattaatgcctttaaagtatgaatctatgccaaagatcacttgttgttttactaaagaaagattacttagaggaaataagaaaaatcatgtttgctctccc

SEQ ID NO: 24974 - DNA, 120 bp, Artificial Sequence
  ENSG00000035403_43 (sequence is synthesized)
gtttgctctcccggttcttccagtggtttgagacactggtttacactttatgccggatgtgcttttctccaatatcagtgctcgagacacagtgaagcaaattaaaaaaaaaaaaaaaaa

SEQ ID NO: 24975 - DNA, 120 bp, Artificial Sequence
  ENSG00000035403_44 (sequence is synthesized)
gatgattagagacatcaccgctaaaaaactacatttataagctaggatttgttatatgcaaatattttctgcctcttcttttgttctgtttaaaacaataaaatgcatttgtataaaaaa

SEQ ID NO: 24976 - DNA, 120 bp, Artificial Sequence
  ENSG00000035403_45 (sequence is synthesized)
tttaaatgatggatatgttactttagcaagaacttttaggtcaggtttctcctttgttttgatgaatagtcaatgaaactaatcctcaagatctggaaactaaagatttttatttaatcc

SEQ ID NO: 24977 - DNA, 120 bp, Artificial Sequence
  ENSG00000035403_46 (sequence is synthesized)
aaatgttgcactggaagaagaaatcaacagtggtatatttacttaacaaggatgtgtgtaatacaagacaaccctggggattacacacttgaaggaatggaagtggcaaaggttaacagg

SEQ ID NO: 24978 - DNA, 120 bp, Artificial Sequence
  ENSG00000035403_47 (sequence is synthesized)
cagaaagcagctggatgaaacagtttattttcatcttagaagattctagctatctgtggagaccaccactgttccccgaaaagctaaagttgttaagtttgtaggagtaccacaggtcct

SEQ ID NO: 24979 - DNA, 61 bp, Artificial Sequence
  ENSG00000035403_48 (sequence is synthesized)
aagctaaagttgttaagtttgtaggagtaccacaggtccttccccctgctgcaagacagag

SEQ ID NO: 24980 - DNA, 120 bp, Artificial Sequence
  ENSG00000035403_49 (sequence is synthesized)
gattacaggtgtgatccaccacgcccggccacacaggtccatttttcatattccaaagcccagtatagaataaatagggttttcagggatccaccagggctataaaacagagttagcttt

SEQ ID NO: 24981 - DNA, 120 bp, Artificial Sequence
  ENSG00000035403_50 (sequence is synthesized)
gggctataaaacagagttagcttttggggacatagtcctcttcttccttaaagaaacactgactaaaatagtaggagcaggtttttagagtagagttgggacatcactttttccctgatt

SEQ ID NO: 24982 - DNA, 120 bp, Artificial Sequence
  ENSG00000035403_51 (sequence is synthesized)
ttctagatctgaaaggggtaacatgtcattaaagggtgatgatattgatatttagtgttgccaactgctattatcactgctttatcttggaaagttgccgactataaagacagattccag

SEQ ID NO: 24983 - DNA, 120 bp, Artificial Sequence
  ENSG00000035403_52 (sequence is synthesized)
cctgcttgagttaagggaaaggccaaggctgctactgaattagcagtttctaaaactgtcttgtttttgccatttaccatatgttcactggtgctgccttcctgctgtagtataatcatt

SEQ ID NO: 24984 - DNA, 120 bp, Artificial Sequence
  ENSG00000035403_53 (sequence is synthesized)
ttctcaaatcagttgcctctcaggacaagatcagcattttcctagggtccttctgtagcaccacttaaggaatgaacctatcacaggaactccctttgaataaaatgatggtgactccca

SEQ ID NO: 24985 - DNA, 120 bp, Artificial Sequence
  ENSG00000035403_54 (sequence is synthesized)
ttgagctgaagaagagaattctggatgttatactttctcatgagaagtttgagtggataacagtgttttggagtttctgttcttctaaattgaaactaaattccatttctgttttcctaa

SEQ ID NO: 24986 - DNA, 120 bp, Artificial Sequence
  ENSG00000035403_55 (sequence is synthesized)
atcccgggggacatcttagaattctgtctaccacaataggcatttgcgctagataaatacacagatgcacagcacagggcccagcaaccaccattctttctgtctctgtgaatttgacta

SEQ ID NO: 24987 - DNA, 120 bp, Artificial Sequence
  ENSG00000035403_56 (sequence is synthesized)
gaagatgcctgggccagcaaggtacgtgttcttagtggagaaataagcaaaatccccaactctccctggctgggggttttgattggcacctgtctcatactttatcttgtaatttttgta

SEQ ID NO: 24988 - DNA, 120 bp, Artificial Sequence
  ENSG00000035403_57 (sequence is synthesized)
gcataagagtactcagatattgtgaaagtaatttcttcttcatttctgtttcataggttacttgctatctttgctaatttcctttgttctaaggtagaacaagtaaataggcatgtgggg

SEQ ID NO: 24989 - DNA, 120 bp, Artificial Sequence
  ENSG00000035403_58 (sequence is synthesized)
tagatactggtttaaggctgagatttatagcttttccatcaggctggagtcttattggttggactggtggaagagtatattcccgtggatgggagctctgccttgtatatgggtggttct

SEQ ID NO: 24990 - DNA, 120 bp, Artificial Sequence
  ENSG00000035403_59 (sequence is synthesized)
tcccagctgactaagtaagatacagatatgcctgtaattctgaactttatggaaaacttttctttaaccaatctttgatccagagaaatctacagaggaaactcttggcatttctagatg

SEQ ID NO: 24991 - DNA, 120 bp, Artificial Sequence
  ENSG00000035403_60 (sequence is synthesized)
tgtcccttgatcattccattttccccaaggaaggtttaattaaaatattagtcttcacattggtcagttagtttgagggatcccttcaccctttttctggaatctcttttaggaccccag

SEQ ID NO: 24992 - DNA, 120 bp, Artificial Sequence
  ENSG00000035403_61 (sequence is synthesized)
aggggctggcagattccttctagagcctgttagcagtggttttgtgttgctgctgctctggtctgctgctccctgtttaatgactgtgaaccaagctttcaggtctgggggaacagagat

SEQ ID NO: 24993 - DNA, 120 bp, Artificial Sequence
  ENSG00000035403_62 (sequence is synthesized)
acttgggttcatactttccttgtaggagcccaagatgtaggcagtggggggaacacactgtccccaagatctagctttcccatgtgtgaccccaatgtctccagggccagccagaaggct

SEQ ID NO: 24994 - DNA, 120 bp, Artificial Sequence
  ENSG00000035403_63 (sequence is synthesized)
ggtagtcaactaaagaagggattttgttgtatgacttccattgggtgctcagtagaacggtatgttctccgggatctgtaaggtaatgtaaaagctggggcctgaaatcaccagccctct

SEQ ID NO: 24995 - DNA, 120 bp, Artificial Sequence
  ENSG00000035403_64 (sequence is synthesized)
ctcttgttgccctgaaagctaatttaattatatagagtaagttagcttattttaactatggatttatttacagagacattttctcattgatgtgaagttcttgaatagattctaagactg

SEQ ID NO: 24996 - DNA, 120 bp, Artificial Sequence
  ENSG00000035403_65 (sequence is synthesized)
tattttaaatctatatggtaaaatctttttaactctgatattttatttaattttgcttttgcatagttgacaactttcacttccctgttatgacttctttatgcatctttttttgttctt

SEQ ID NO: 24997 - DNA, 120 bp, Artificial Sequence
  ENSG00000035403_66 (sequence is synthesized)
ttgttttattctttttctcacgtttagaaggtaagctttctcttgccctctagtttctttttcgcttaaaaagagaaaagcatgtctgtgaggtttttttgtgctgtgtgccgtgcctta

SEQ ID NO: 24998 - DNA, 120 bp, Artificial Sequence
  ENSG00000035403_67 (sequence is synthesized)
ttctgtgtataacactgtgcttgaatgtgcgtcagaatgtgatttaatacgggactctaggcagtgctggggagactgactgtggctcatattgagtgatttctttgggaaaagctaaag

SEQ ID NO: 24999 - DNA, 120 bp, Artificial Sequence
  ENSG00000035403_68 (sequence is synthesized)
gaaagacattactgtgggctatcaggctgcctatatttggtgggtgccttcagttctttgggtaggctcctgggatcttttttggcctggtctttcccattgacttcatttgaggagcag

SEQ ID NO: 25000 - DNA, 120 bp, Artificial Sequence
  ENSG00000035403_69 (sequence is synthesized)
gattccccaggtagctgggagacccctgagttacctgtggaccctgctgttgggaaaggagacttccagctgatgctatctctgtacctgcctctcccaccagtcttctttgcgggctct

SEQ ID NO: 25001 - DNA, 120 bp, Artificial Sequence
  ENSG00000035403_70 (sequence is synthesized)
gaaattttgcttttggagatgcatcattgaggttttaagccataatgaaagagggtaggctagagagcttagatgaggcacctgtccttcataataatcctagccttcaaaatccaaagg

SEQ ID NO: 25002 - DNA, 120 bp, Artificial Sequence
  ENSG00000035403_71 (sequence is synthesized)
aaaacagaagtgaagtgtgtctaaaggtcttcctaacttcattctgtggctcactgcatgttttgctgtccaaactgaattagctgtagttctccatgacctcatgttcccctaacccaa

SEQ ID NO: 25003 - DNA, 120 bp, Artificial Sequence
  ENSG00000035403_72 (sequence is synthesized)
gctcttcgcttattctctttcttttgcttctagcagatgacaaaaagtaataaggaggaacaggcattttaaccttaatgtttctctattttcagaagggaaaagctatccatcatttag

SEQ ID NO: 25004 - DNA, 120 bp, Artificial Sequence
  ENSG00000035403_73 (sequence is synthesized)
tgaataaatgttattgaactttattttgtgcaagtgccatcaagagctgcttctctcattaaaaaaatgtagtcagttgagttttcagggctaggattaggcacttggggatacaagtga

SEQ ID NO: 25005 - DNA, 120 bp, Artificial Sequence
  ENSG00000035403_74 (sequence is synthesized)
aatagacctggtactcaccgtgtacagtcttgtagctgctcccagttttatgctgaggaaaaccaatttgttaggatgctacaaaactaacttcatctgaaatgaaagaaggtaaattaa

SEQ ID NO: 25006 - DNA, 120 bp, Artificial Sequence
  ENSG00000035403_75 (sequence is synthesized)
attagctcaactcaagtacacgatgacatcagaatgaacaagagatgtttatgttttaatctactgaccataagaatgaaaaagagatgcttattttttaacctaatgacatcagaataa

SEQ ID NO: 25007 - DNA, 120 bp, Artificial Sequence
  ENSG00000035403_76 (sequence is synthesized)
aaaaagaggtttatttttaacctaattttgcttttgttttacatttatgtggttcaaatatcaaagtgctgcaaaaagatatacctgataagtcttcctcctaacctggttcccatccac

SEQ ID NO: 25008 - DNA, 120 bp, Artificial Sequence
  ENSG00000035403_77 (sequence is synthesized)
tctaccgctcctcaccctctaagagtaatcatttctattggttatcaaaatagaaaaaaattttaccctgaaaatagaaattggtagctaggattttggctctttttcagttttgtagca

SEQ ID NO: 25009 - DNA, 120 bp, Artificial Sequence
  ENSG00000035403_78 (sequence is synthesized)
ttacgcatctttcattgctccactgtaagcagtgaattaatcagaccttttgtctgactgtgactgctgggttcccattctgtttaatgcatacagtgtctttcacctcttctcgcccct

SEQ ID NO: 25010 - DNA, 120 bp, Artificial Sequence
  ENSG00000035403_79 (sequence is synthesized)
accaataaataattaactttgtcttaccatacttgtttcatgcctccccattggtgcagtattcttctggaaagtgatgattcctctagaaaagtgggggaagaaagacactgaagccat

SEQ ID NO: 25011 - DNA, 120 bp, Artificial Sequence
  ENSG00000035403_80 (sequence is synthesized)
agagactgttcaaaccactgaggatcagattttgaagagagatatgccaccagcatttattaaacttttactagaggaaatcctaaagaatgtacttcagacaagtccgctgatcccaga

SEQ ID NO: 25012 - DNA, 120 bp, Artificial Sequence
  ENSG00000035403_81 (sequence is synthesized)
tgagccaagatactggacagtttgttggtaaatgtagataagtgttgatgtatataataatgggatgtttttactcaacgcttctgataccagatgtatggctttttttttccacaccaa

SEQ ID NO: 25013 - DNA, 120 bp, Artificial Sequence
  ENSG00000035499_0 (sequence is synthesized)
gattcaaactgctgctcctccggctggcggggatcagcgctggcgcggctgcggccgctgctgcctacgcgccatggagcatcgcatcgtggggcccgggccgtaccgagctaccaggct

SEQ ID NO: 25014 - DNA, 120 bp, Artificial Sequence
  ENSG00000035499_1 (sequence is synthesized)
gtggaatgagaccgtggagctttttcgtgctaagatgccgttacggaaacatcgctgtcgtttcaagagctatgagcattgtttcacagcggccgaagctgtggattggctgcatgagct

SEQ ID NO: 25015 - DNA, 120 bp, Artificial Sequence
  ENSG00000035499_2 (sequence is synthesized)
gctgaggtgcagtcaaaacttcggccctgaagtgacccgcaaacaaacggtccagctgctaaaaaaattcctgaagaatcacgttattgaagacatcaagggaaaatggggtgaggaaga

SEQ ID NO: 25016 - DNA, 120 bp, Artificial Sequence
  ENSG00000035499_3 (sequence is synthesized)
ttttgaagacaatcgtcacttatacagatttcctccttcttcacccctgaaaccatatccaaagaagcccccaaaccaaaaggatgttattaaatttccagaatggaatgatctcccacc

SEQ ID NO: 25017 - DNA, 120 bp, Artificial Sequence
  ENSG00000035499_4 (sequence is synthesized)
aggcacttcacaagagaacatcccagtgaggccagttgtgatgaattctgagatgtggtacaagcgtcacagtattgcaattggagaggtgccagcttgccgtcttgtccaccgcagaca

SEQ ID NO: 25018 - DNA, 120 bp, Artificial Sequence
  ENSG00000035499_5 (sequence is synthesized)
gctgacagaggccaatgtagaagagatatggaagtctatgacattatcatacttacagaaaattcttggcctggattccttagaagaagttttagacgtcaaacttgtcaattcgaagtt

SEQ ID NO: 25019 - DNA, 120 bp, Artificial Sequence
  ENSG00000035499_6 (sequence is synthesized)
catcatccataatgtatatagtgttagcaagcagggagttgttattcttgatgacaagtcaaaagaacttcctcattgggtgctgtcagctatgaagtgtttggcaaattggcccaactg

SEQ ID NO: 25020 - DNA, 120 bp, Artificial Sequence
  ENSG00000035499_7 (sequence is synthesized)
ttctgatttgaagcagcctatgtacttgggatttgaaaaagatgtctttaaaaccatagctgattactatggtcacttgaaagagcctctacttacatttcatctttttgatgcttttgt

SEQ ID NO: 25021 - DNA, 120 bp, Artificial Sequence
  ENSG00000035499_8 (sequence is synthesized)
cagtgtactgggtttgttacagaaggagaaagtggcagttgaagcatttcagatttgctgccttctcctacctcctgaaaataggagaaagttacagctattgatgaggatgatggcaag

SEQ ID NO: 25022 - DNA, 120 bp, Artificial Sequence
  ENSG00000035499_9 (sequence is synthesized)
gatttgcttaaacaaagagatgccacccctgtgtgatggctttggtacccgaacactgatggttcagacattttcccgttgcatcttgtgttccaaggatgaagtggacttggatgagtt

SEQ ID NO: 25023 - DNA, 120 bp, Artificial Sequence
  ENSG00000035499_10 (sequence is synthesized)
gaagagtccagataaaatacccaggagctgatatggatatcactttatctgctccatcattttgccgtcaaattagtccagaggaatttgaatatcaaagatcatatggctctcaggaac

SEQ ID NO: 25024 - DNA, 120 bp, Artificial Sequence
  ENSG00000035499_11 (sequence is synthesized)
ctctggcagccttgttggaggaagtcataacagatgccaaactctccaacaaagagaaaaagaagaaactgaagcagtttcagaaatcctatcctgaagtctatcaagaacgatttccta

SEQ ID NO: 25025 - DNA, 120 bp, Artificial Sequence
  ENSG00000035499_12 (sequence is synthesized)
caccagaaagtgcagcacttctgtttcctgaaaaacccaaaccgaaaccacagctgctaatgtgggcactaaagaagcctttccaaccatttcaaagaactagaagttttcgaatgtaat

SEQ ID NO: 25026 - DNA, 120 bp, Artificial Sequence
  ENSG00000035499_13 (sequence is synthesized)
aatacttccacagcaacaggtgctagagaccactgttgttgttttgagtgaatggtggttaggagaaagactttggtggtggaagaaagaaaagcataaaacaaagactactgaaatata

SEQ ID NO: 25027 - DNA, 120 bp, Artificial Sequence
  ENSG00000035499_14 (sequence is synthesized)
gataaagattgccttagtttttaaaaatgtttggccattagtatttttataaaactcaatgctagttttaaagtgtataaattggttaaaatttatgagtcaaatatatagtgataatgt

SEQ ID NO: 25028 - DNA, 120 bp, Artificial Sequence
  ENSG00000035499_15 (sequence is synthesized)
taacatgtttgtaattgctacagaatttaagggtatttttatctctgtgctttctttttcatggtgtttattaaataattgtgtatatacatcctagctactgatatctttattatagcc

SEQ ID NO: 25029 - DNA, 120 bp, Artificial Sequence
  ENSG00000035499_16 (sequence is synthesized)
ttaagacttaattttaagtcttaaaaatagcgtgtatacttgaataagaaagacactgggtactgttactgtgatgctattgacttagtagccaattatcatttctcctgtataaattcc

SEQ ID NO: 25030 - DNA, 120 bp, Artificial Sequence
  ENSG00000035499_17 (sequence is synthesized)
agtttttattgctgcacataaattttttaatgtcttatattgtgatagctatgtcttttattgcagatttattggatgttatgacagattttactaaagctagtgtttttataacatata

SEQ ID NO: 25031 - DNA, 120 bp, Artificial Sequence
  ENSG00000035499_18 (sequence is synthesized)
tattagttgatgtttacctataagtggagtagattttcatctgcctgcaatggtataatttcagtcttagctaaaaatggaaagttgaactggataaattctttgggtacccttagacct

SEQ ID NO: 25032 - DNA, 120 bp, Artificial Sequence
  ENSG00000035499_19 (sequence is synthesized)
ctgattctaagtcaaatgcaaatgggttaaataaaatgagactacttcctttataaatatattttcatccttttgaaagtaagtgaaatgtaaataaacttattttttttaaaaatgcca

SEQ ID NO: 25033 - DNA, 120 bp, Artificial Sequence
  ENSG00000035499_20 (sequence is synthesized)
atctaattttaaacaatttccaatggtgcctgtttccttttctttgaaaatctctggagaaatagttcctcttgctgtgtctttctttaggcaagaatttttactaattgatgtgtagtc

SEQ ID NO: 25034 - DNA, 120 bp, Artificial Sequence
  ENSG00000035499_21 (sequence is synthesized)
tgaatcctggctaagtataaaccttttattttttatacctgttcttagtgaaaatgaaactgtgactttttttttaattccttttgttggtcaaaaactacaattaactcttctgagttt

SEQ ID NO: 25035 - DNA, 120 bp, Artificial Sequence
  ENSG00000035499_22 (sequence is synthesized)
gccgtctcaaaaaccttcatgtttcatttcttttcagagctcccaaaaagaatagcttgctcttgacgttgtacatgttagtggaatgatcaggactactttgcaaagatgaaaaatttg

SEQ ID NO: 25036 - DNA, 120 bp, Artificial Sequence
  ENSG00000035499_23 (sequence is synthesized)
aagcacttttccatatttgcttcaaatggcctttagccccaaaaaattatgtcaaagaggaatgttttgaggtgacacattctgtttccttcagtactctcgttggtgagtctccagatt

SEQ ID NO: 25037 - DNA, 120 bp, Artificial Sequence
  ENSG00000035499_24 (sequence is synthesized)
caccttcatataaacttcccttgaacactatagacattttataattctttatttctgcatttgctttgagataaggtctttagttatttgtatgatttttttctgtggataacatgggta

SEQ ID NO: 25038 - DNA, 120 bp, Artificial Sequence
  ENSG00000035499_25 (sequence is synthesized)
agatttttaagctgtttttttggcttaagtaaataaaaagtcaaaataaaagtcaacaacccgctgccttttatgtcaacattaagaactagagttcttacattgcttttgcagtgcaat

SEQ ID NO: 25039 - DNA, 120 bp, Artificial Sequence
  ENSG00000035499_26 (sequence is synthesized)
ccttttctaacaagactgcagaaaaatattatctgataaaaaatatgtattcaatcacctttcttttctttatcaggtatggtatagagcagtttaaaaaattaaaatttatgtaattat

SEQ ID NO: 25040 - DNA, 120 bp, Artificial Sequence
  ENSG00000035499_27 (sequence is synthesized)
tgtataaatattgtacaaattattgtataaattttcagatacaccaaagtggagactattgttaaaatatctgtgtctcccactgactgcagtaatagagaatttcttcttgggttttag

SEQ ID NO: 25041 - DNA, 120 bp, Artificial Sequence
  ENSG00000035499_28 (sequence is synthesized)
atcagcgctggcgcggctgcggccgctgctgcctacgcgccatggagcatcgcatcgtggggcccgggccgtaccgagctaccaggctgggattgattctgttatcctgaagtggtccag

SEQ ID NO: 25042 - DNA, 120 bp, Artificial Sequence
  ENSG00000035664_0 (sequence is synthesized)
gattgtatgttccaggcctcaatgaggagtccaaacatggagccattcaagcagcagaaggtggaggacttttatgacatcggagaggagctggggagtggccagtttgccatcgtgaag

SEQ ID NO: 25043 - DNA, 120 bp, Artificial Sequence
  ENSG00000035664_1 (sequence is synthesized)
aagtgccgggagaagagcacggggcttgagtatgcagccaagttcatcaagaagcggcagagccgggcgagccggcgcggtgtgagccgggaggagatcgagcgggaggtgagcatcctg

SEQ ID NO: 25044 - DNA, 120 bp, Artificial Sequence
  ENSG00000035664_2 (sequence is synthesized)
cggcaggtgctgcaccacaatgtcatcacgctgcacgacgtctatgagaaccgcaccgacgtggtgctcatccttgagctagtgtctggaggagagctcttcgatttcctggcccagaag

SEQ ID NO: 25045 - DNA, 120 bp, Artificial Sequence
  ENSG00000035664_3 (sequence is synthesized)
gagtcactgagtgaggaggaggccaccagcttcattaagcagatcctggatggggtgaactaccttcacacaaagaaaattgctcactttgatctcaagccagaaaacattatgttgtta

SEQ ID NO: 25046 - DNA, 120 bp, Artificial Sequence
  ENSG00000035664_4 (sequence is synthesized)
gacaagaatattcccattccacacatcaagctgattgactttggtctggctcacgaaatagaagatggagttgaatttaagaatatttttgggacgccggaatttgttgctccagaaatt

SEQ ID NO: 25047 - DNA, 120 bp, Artificial Sequence
  ENSG00000035664_5 (sequence is synthesized)
gtgaactacgagcccctgggtctggaggctgacatgtggagcataggcgtcatcacctacatcctcttaagtggagcatcccctttcctgggagacacgaagcaggaaacactggcaaat

SEQ ID NO: 25048 - DNA, 120 bp, Artificial Sequence
  ENSG00000035664_6 (sequence is synthesized)
atcacagcagtgagttacgactttgatgaggaattcttcagccagacgagcgagctggccaaggactttattcggaagcttctggttaaagagacccggaaacggctcacaatccaagag

SEQ ID NO: 25049 - DNA, 120 bp, Artificial Sequence
  ENSG00000035664_7 (sequence is synthesized)
gctctcagacacccctggatcacgccggtggacaaccagcaagccatggtgcgcagggagtctgtggtcaatctggagaacttcaggaagcagtatgtccgcaggcggtggaagctttcc

SEQ ID NO: 25050 - DNA, 120 bp, Artificial Sequence
  ENSG00000035664_8 (sequence is synthesized)
ttcagcatcgtgtccctgtgcaaccacctcacccgctcgctgatgaagaaggtgcacctgaggccggatgaggacctgaggaactgtgagagtgacactgaggaggacatcgccaggagg

SEQ ID NO: 25051 - DNA, 120 bp, Artificial Sequence
  ENSG00000035664_9 (sequence is synthesized)
aaagccctccacccacggaggaggagcagcacctcctaactggcctgacctgcagtggccgccagggaggtctgggcccagcggggctcccttctgtgcagacttttggacccagctcag

SEQ ID NO: 25052 - DNA, 120 bp, Artificial Sequence
  ENSG00000035664_10 (sequence is synthesized)
cctgggagctgtggctgtcttctgtggaggaggctccagcattcccaaagctcttaattctccataaaatgggctttcctctgtctgccatcctcagagtctggggtgggagtgtggact

SEQ ID NO: 25053 - DNA, 120 bp, Artificial Sequence
  ENSG00000035664_11 (sequence is synthesized)
taggaaaacaatataaaggacatcctcatcatcacggggtgaaggtcagactaaggcagccttcttcacaggctgagggggttcagaaccagcctggccaaaaattacaccagagagaca

SEQ ID NO: 25054 - DNA, 120 bp, Artificial Sequence
  ENSG00000035664_12 (sequence is synthesized)
gagtcctccccattgggaacagggtgattgaggaaagtgaaccttgggtgtgagggaccaatcctgtgacctcccagaaccatggaagccaggacgtcaggctgaccaacacctcagacc

SEQ ID NO: 25055 - DNA, 120 bp, Artificial Sequence
  ENSG00000035664_13 (sequence is synthesized)
ttctgaagcagcccattgctggcccgccatgttgtaattttgctcatttttattaaacttctggtttacctgatgcttggcttcttttagggctacccccatctcatttcctttagcccg

SEQ ID NO: 25056 - DNA, 120 bp, Artificial Sequence
  ENSG00000035664_14 (sequence is synthesized)
tgtgcctgtaactctgagggggggcacccagtggggtgctgagtgggcagaatctcagaaggtcctcctgaaccgtccgcgcaggcctgcagtgggcctgcctcctccttgcttccctaa

SEQ ID NO: 25057 - DNA, 120 bp, Artificial Sequence
  ENSG00000035664_15 (sequence is synthesized)
caggaaggtgtccagttcaagagaacccacccagagactgggagtggtggctcacgcctataatccctgcgctttggcagtccgaggcaggggaattgcttgaactcaggagttggagac

SEQ ID NO: 25058 - DNA, 120 bp, Artificial Sequence
  ENSG00000035664_16 (sequence is synthesized)
cagcctgggcaacatggcaaaacgcagtctgtacaaaaaatacaaaaaattagccaggtgtaggggtaggcacctggcatcccagctactccaggggctgaggtgacagcattgcttaag

SEQ ID NO: 25059 - DNA, 120 bp, Artificial Sequence
  ENSG00000035664_17 (sequence is synthesized)
ccactgcactccagtctgggtgacagagagagaccatatccaaaaaaaaaaaaagttgccagagacgagtatgcccatgctccctctacctcactgccaccactcctgctgttaggagct

SEQ ID NO: 25060 - DNA, 120 bp, Artificial Sequence
  ENSG00000035664_18 (sequence is synthesized)
tctacctcactgccaccactcctgctgttaggagctgagtgtgtctccctaaaatttctatgttgaagtcttaacccttggtaccacagaatatcactgtatttggagatggggtcttta

SEQ ID NO: 25061 - DNA, 120 bp, Artificial Sequence
  ENSG00000035664_19 (sequence is synthesized)
gaaaggcacttaaattaaaatgagctcactgatatgggccccgatgcaatataattggtgtccttataagaaggggaggttaggacacgcaggaaagaccacatgaaggcccaggagtgg

SEQ ID NO: 25062 - DNA, 120 bp, Artificial Sequence
  ENSG00000035664_20 (sequence is synthesized)
gagggggaatagccatcgacaaactaagggggcctcagaggaaaccaaccctgctgacacctcaatcttagactctggcctcaaaaattgtaagaaaataaacttctgtcttttaagcca

SEQ ID NO: 25063 - DNA, 120 bp, Artificial Sequence
  ENSG00000035664_21 (sequence is synthesized)
gccctcttcttgggcagaattctggggtagcctggagctcagggatgggtgagttccctttcccctcacaaggcaggtgggtgttcactgtttccagccagttctgctggcccagtcctc

SEQ ID NO: 25064 - DNA, 120 bp, Artificial Sequence
  ENSG00000035664_22 (sequence is synthesized)
ctcttccctgaaggctgaagtgtgatcttcagaggagtgtgttctggggacctctgggtggtgccgggaggggaccactgatgcagcagcatgaactcctggaggatctcccatcctttc

SEQ ID NO: 25065 - DNA, 120 bp, Artificial Sequence
  ENSG00000035664_23 (sequence is synthesized)
ctggtgggccttcagaggggccgctgctgccggctgaccacagacaacccaaaatgtatttctgataacccaaaagctgctttagaatgggagctttacattcttttttccatatttcta

SEQ ID NO: 25066 - DNA, 120 bp, Artificial Sequence
  ENSG00000035664_24 (sequence is synthesized)
tttctgctttgtttcagattaccatcatcataatatttagacaatatcttatatttgattactttattgccattttgtatacatttaaagggagtagcttataacagaatatactggtga

SEQ ID NO: 25067 - DNA, 120 bp, Artificial Sequence
  ENSG00000035664_25 (sequence is synthesized)
agagggtgccctctgcagtcagactaccaggattcaaatctgccacttaccgtgtgaccttgaggaaattacttaacctctctgtgctgatagttcatcatttgtaaaatagggttaata

SEQ ID NO: 25068 - DNA, 78 bp, Artificial Sequence
  ENSG00000035664_26 (sequence is synthesized)
tctgtgctgatagttcatcatttgtaaaatagggttaataatagttcctaaagattaaataatgacatattcttcaca

SEQ ID NO: 25069 - DNA, 120 bp, Artificial Sequence
  ENSG00000035664_27 (sequence is synthesized)
atgacatattcttaaagcctggcatgtaagtgctcagtaagcgttagcaattgttgttgtttaaaaccttcctgtaggctggcagtagtggttcgtgcctatagtcccagcactttgggt

SEQ ID NO: 25070 - DNA, 120 bp, Artificial Sequence
  ENSG00000035664_28 (sequence is synthesized)
tcccagcactttgggtggctgaggcgggaggttcatttaaggccaggagttaaagaccagcccaggcaacaacagtgagaccctgactctacaaaacaaaaacaaacaaacaaacaaaaa

SEQ ID NO: 25071 - DNA, 84 bp, Artificial Sequence
  ENSG00000035664_29 (sequence is synthesized)
caaaaacaaacaaacaaacaaaaaaattagccaggtatggtgacaggcacctatagtcctagctactcagggaaggctgcagtg

SEQ ID NO: 25072 - DNA, 84 bp, Artificial Sequence
  ENSG00000035664_30 (sequence is synthesized)
gaatgtcagtttctttccaaacttttgttcttgtacaaatattcttaaatagtactctttttactcaaatagcaagcaccatca

SEQ ID NO: 25073 - DNA, 120 bp, Artificial Sequence
  ENSG00000035664_31 (sequence is synthesized)
catcagctcaaaggttcatcctagaagtggaaaaatgttgggtcccagatatctgttatgcagttttcccaaagggactttccttaaaaaaaaaaaaaaaaagagtaatgataggtcctt

SEQ ID NO: 25074 - DNA, 120 bp, Artificial Sequence
  ENSG00000035664_32 (sequence is synthesized)
ttgtttaggaagcactggaattgaacattggacaacagatattttaggaatgaagtcactgtggattagtacttcttttaataattttataattacattagatcatcatgacttggatga

SEQ ID NO: 25075 - DNA, 120 bp, Artificial Sequence
  ENSG00000035664_33 (sequence is synthesized)
aaagacattatggcctcggggtggctgcctcagctctggtttgccatgtaggaactgacagacagtactttatactcatttcctgttttataaaaatggagctcagaagtcatttccctg

SEQ ID NO: 25076 - DNA, 120 bp, Artificial Sequence
  ENSG00000035664_34 (sequence is synthesized)
gaaacactggtcagcaaggcggctgaaggtgcagcccatcaaagaagaaggggcatgggatggtggctgtcaagcatggggagtaccttgtggctcacacccatcctccagtctctctag

SEQ ID NO: 25077 - DNA, 120 bp, Artificial Sequence
  ENSG00000035664_35 (sequence is synthesized)
gctgagctcaggagacccagcagccacagaccacccagccaagtggccttgattatatggcagccacaaagggaactagatgtaattttctttattataatttggcctctcctgatgtct

SEQ ID NO: 25078 - DNA, 120 bp, Artificial Sequence
  ENSG00000035664_36 (sequence is synthesized)
ggtttcccttagatgccctgctgctttccttcctccaagcagttggtctggcctcgtttcagatccctcccatcccccagcccctggatggatcagcaggcttgctttcaccacccacct

SEQ ID NO: 25079 - DNA, 120 bp, Artificial Sequence
  ENSG00000035664_37 (sequence is synthesized)
ccctggcttgtagtcccgtggtccaggtgaatcaacccaggttgcccagcacagccccattcctggcgtctcatgatcctcctgccctggacctctttctcttttttttctccagaggaa

SEQ ID NO: 25080 - DNA, 120 bp, Artificial Sequence
  ENSG00000035664_38 (sequence is synthesized)
agccttccagctccctgcagcagtcatggggcagggttccccgagtccgtaatccccatttccacctactttcccttagttatttgattccctgtctgtcgtactcagcttaagtggagc

SEQ ID NO: 25081 - DNA, 120 bp, Artificial Sequence
  ENSG00000035664_39 (sequence is synthesized)
gaaggcagagcccctgaacagcggaagacagagcccacccagctgaagaccaagcacctgagagagtacactctcaaatgccactcaagcatgcctcccaacaactcctatgtcaacttc

SEQ ID NO: 25082 - DNA, 120 bp, Artificial Sequence
  ENSG00000035664_40 (sequence is synthesized)
gagcgttttgcctgtgtggtggaagacgtggctcgggtcgacctgggatgccgtgccctggtggaggcccacgataccatccaggacgatgtggaggccctggtctccatcttcaatgag

SEQ ID NO: 25083 - DNA, 120 bp, Artificial Sequence
  ENSG00000035664_41 (sequence is synthesized)
aaggaagcttggtaccgagaggagaatgagagcgcccggcatgacctgtcccagctcaggtatgagttccgcaaggtggagtcattgaagaagctgctgcgagaagacatccaggccacg

SEQ ID NO: 25084 - DNA, 120 bp, Artificial Sequence
  ENSG00000035664_42 (sequence is synthesized)
ggatgtagcctcggaagcatggccaggaaactggaccatctgcaagcccagtttgagattctgaggcaggagctctccgcagacctgcagtggattcaggagctggtgggcagcttccag

SEQ ID NO: 25085 - DNA, 120 bp, Artificial Sequence
  ENSG00000035664_43 (sequence is synthesized)
ctggagagtgggagctctgagggcctgggctccacattctaccaggacaccagtgaatccctgtcagagctgctcagcagatcatgcactgaggaatttctggcaggctggaagctctaa

SEQ ID NO: 25086 - DNA, 120 bp, Artificial Sequence
  ENSG00000035664_44 (sequence is synthesized)
attgcgtgcagccatacagcagactttagagagaggggtgtcagagaggggctccctacaccagtcctcctgaggggggtagggaactgtgagctggccggatgcaaaacggtatagtac

SEQ ID NO: 25087 - DNA, 120 bp, Artificial Sequence
  ENSG00000035664_45 (sequence is synthesized)
agtggtctcttgtaactcaggctgtagactgagagcaaaatgaacttggttaaaagcaagaaagcctcctccaccacagcagcaccctagacaagctggtggtttctaaaagtggccagt

SEQ ID NO: 25088 - DNA, 120 bp, Artificial Sequence
  ENSG00000035664_46 (sequence is synthesized)
tgctgcggcctccagctagaattatcctgcaggggtgtgtgtctgtagtatagccttccagcccctccacagaatccagaattgctgaggtgccagttaattcttcattctgcacctccc

SEQ ID NO: 25089 - DNA, 120 bp, Artificial Sequence
  ENSG00000035664_47 (sequence is synthesized)
ctcaccaatctggttttctgggagggctctggcagggcagccaagctgttaaaacaattagagagtgagtacccctcagggtccccttctgcagagggaggatggctggccctggggaaa

SEQ ID NO: 25090 - DNA, 120 bp, Artificial Sequence
  ENSG00000035664_48 (sequence is synthesized)
tgcttgagaattgatttgtgatgaaggatttgttcatatctcactttctgcctacataccttatggactgtagatcttgggtaatatttgagttaattaggaataactaagtcagcatgg

SEQ ID NO: 25091 - DNA, 120 bp, Artificial Sequence
  ENSG00000035664_49 (sequence is synthesized)
tgctttcctgctacagaagcagggatttacaatgcatagagaaaataatattgcctttcgtttgcattgatttttcacttaccaagcactcatgtctgacaaatgacctcacttggtcct

SEQ ID NO: 25092 - DNA, 120 bp, Artificial Sequence
  ENSG00000035664_50 (sequence is synthesized)
taaaagaactcagtgagataggaaggtgggtggcattattattattattatttacatgtaactgatgagaaaattgactcagagagggaaaatgatatagtcaatcagtacagatgaaac

SEQ ID NO: 25093 - DNA, 120 bp, Artificial Sequence
  ENSG00000035664_51 (sequence is synthesized)
agaaacccaggatgcccatctctaagatgaggtatatgggagaaagtagtaaggctttgctgtaaatatctaccttaatattaaagtccaggtcccagaggtaaagtaagcaacttcatg

SEQ ID NO: 25094 - DNA, 120 bp, Artificial Sequence
  ENSG00000035664_52 (sequence is synthesized)
tattctgccaggtgtaggtggaatgcatacacctgcagatgattgtcccaggagctctgtcccagaaggcaaagtcattgtccctacccatccctgtctctgtctgaagaccagcctgca

SEQ ID NO: 25095 - DNA, 120 bp, Artificial Sequence
  ENSG00000035664_53 (sequence is synthesized)
agcaggagagaaggaaggaaggagtcttcccattctccaccctttctcctcttctggctaacggccccaactctgtgtcgagaataaaggccagaaggtcctcaacaggaggttcctttt

SEQ ID NO: 25096 - DNA, 120 bp, Artificial Sequence
  ENSG00000035664_54 (sequence is synthesized)
cttatgtacctaggccattgggccttgaaggcctaagaagttccgtgagggtttttgaaaagggcaaacataaagatggggaagcgcaaggccacatggtcgtttcatgacccaaagctt

SEQ ID NO: 25097 - DNA, 120 bp, Artificial Sequence
  ENSG00000035664_55 (sequence is synthesized)
tgagcacccctccccaaggattataagatctcatctccctttctctgggggaggggacagtcaaccaactcatgtcaacagagcatggcatatgagcctagtgctgagctagaagcttgt

SEQ ID NO: 25098 - DNA, 120 bp, Artificial Sequence
  ENSG00000035664_56 (sequence is synthesized)
gggtaggggcataacttgtatagttcaaagtgtcttcatggcctcacaaaacatccctatcttagaggcagactaaacgatattcccaatttagagctgaggaaacagggagaggatggg

SEQ ID NO: 25099 - DNA, 120 bp, Artificial Sequence
  ENSG00000035664_57 (sequence is synthesized)
attttcccaaggtcacatcattatggcaaaagtagagaccttctaatgacaagtctgttgctctttctgcttcccctggctgcgccaggctccagaagtttactccctgcttgtgggggc

SEQ ID NO: 25100 - DNA, 120 bp, Artificial Sequence
  ENSG00000035664_58 (sequence is synthesized)
agctcacacctggattcatccatccatttataaattatacttaggcaccaaccaacttccagatgcccggcttgactctggggatacaatgtttagtaaaaataggcctgattcctgtct

SEQ ID NO: 25101 - DNA, 120 bp, Artificial Sequence
  ENSG00000035664_59 (sequence is synthesized)
cacggagtgctcagtccagcgaaggatttgaacattgaccaagaatcacagagagatagagctgcagcttgtgttcatgctgggagagaagcacatagcactgcaggggcctgccgtcag

SEQ ID NO: 25102 - DNA, 120 bp, Artificial Sequence
  ENSG00000035664_60 (sequence is synthesized)
ggtctgacagcatcgggggaagcgtcctgaagcagtgacactggaacggaggtcagctaagccaaccagggagagagaagtttcccaacagagccatcataccagagctctgtgatgaga

SEQ ID NO: 25103 - DNA, 120 bp, Artificial Sequence
  ENSG00000035664_61 (sequence is synthesized)
ggcggtgtggaaggttgagaatgtgaggactgaaagctggaggggagagaataggaatacagtgcggaaatgaccggagaacaagcaggagcagcagggctttggccatgtggaagagct

SEQ ID NO: 25104 - DNA, 120 bp, Artificial Sequence
  ENSG00000035664_62 (sequence is synthesized)
ctgcccttatcccgaaagtcatgagaagccagcgggttccaggtgctggggagggaatgccccgtgaacagctcagacaggaagtggtttaggacaagacaggaaagcttcatctcatga

SEQ ID NO: 25105 - DNA, 120 bp, Artificial Sequence
  ENSG00000035664_63 (sequence is synthesized)
aaccatttcttcagaatcctgtctccttttctatatgcatgaaggatcatttcaaatatcatatacaatatttgtaacagaaacttacttcatcagctatgagaaaccgtggtgataaga

SEQ ID NO: 25106 - DNA, 120 bp, Artificial Sequence
  ENSG00000035664_64 (sequence is synthesized)
tgcatcatcattttatggaccactaagaaaaaaggcccaagatggggcgtctaataggaaactctctctacccccaccacataaagctgtgatgccctcaatgagagggtaaatgagaaa

SEQ ID NO: 25107 - DNA, 120 bp, Artificial Sequence
  ENSG00000035664_65 (sequence is synthesized)
tagagccaccatgcagaaagggggagcaaggaaacccatgcatctcaaccttgacactaaatgggggtgaaaaatccttccctgagaacaggagtcccaagccggtggtactcatgcagg

SEQ ID NO: 25108 - DNA, 120 bp, Artificial Sequence
  ENSG00000035664_66 (sequence is synthesized)
agcagagagtgtaatgtccaacagtctgaggctgggtggccctggatggctggcaaaaacagtactatcctctcccggagcacctgccttctgtccgggccaacagtaagaatatgatac

SEQ ID NO: 25109 - DNA, 120 bp, Artificial Sequence
  ENSG00000035664_67 (sequence is synthesized)
catcatctgggagatgcctcctgacttcagagatccaaaaatgtatatcttggaaccaatgaaagatggcaaaagctccatttcctacatcttaccccagagaattggttcaaatgacct

SEQ ID NO: 25110 - DNA, 120 bp, Artificial Sequence
  ENSG00000035664_68 (sequence is synthesized)
gtctacagtctctccaaggtcttacctgccctgtcacgggaagttgtatacttgtttggtgctgagacactgcaaatattaaatgtccctttggccgtgttaacagaccttgaccttcac

SEQ ID NO: 25111 - DNA, 120 bp, Artificial Sequence
  ENSG00000035664_69 (sequence is synthesized)
cttgaccttcacacagccaggtttctaaggagaggaagccactgatggggcaacacagggcaagctttttagtgaaggtcaaaatagaatgcaggcccagtgtggtggctcatgcctgta

SEQ ID NO: 25112 - DNA, 120 bp, Artificial Sequence
  ENSG00000035664_70 (sequence is synthesized)
agactctgtctcaaaaaaataaaaaatagaatacagtaaaagagtaaaatgttggcaatgatttgaatggggaaaattgggaaaagggagggagaagtggttgttttagaatcatgatca

SEQ ID NO: 25113 - DNA, 120 bp, Artificial Sequence
  ENSG00000035664_71 (sequence is synthesized)
gctatacacagtgctgagagtcacccatttagttggccgtgagctggactccgaactctaagtggttttccttatagcagtgacatcgtcctctctatgctcatgtccagtcactgtaac

SEQ ID NO: 25114 - DNA, 120 bp, Artificial Sequence
  ENSG00000035664_72 (sequence is synthesized)
tgtttctcacttagacgtgtcgtaaacagacctttttctgtacaaagagcttctaaagacaaatgaaagagagttgagaaatgcccccaagtcttttggggaaagcagaggagaccatga

SEQ ID NO: 25115 - DNA, 120 bp, Artificial Sequence
  ENSG00000035664_73 (sequence is synthesized)
ccttcctctgtgtcctggccagctgaagtcccgtccttccatggcattggaacctgatgctgggggagcccgggggcctgtgggatgcagccacaggacctgcttatctctgctccccac

SEQ ID NO: 25116 - DNA, 120 bp, Artificial Sequence
  ENSG00000035664_74 (sequence is synthesized)
acgccctcagctgactttttacaacagtgtggagggctaacaatggcgggaagggctgtgagaatggactgtttcgctggtgcctagaggaaggaaggcttgtgggtgctgctctgtggg

SEQ ID NO: 25117 - DNA, 120 bp, Artificial Sequence
  ENSG00000035664_75 (sequence is synthesized)
ggaaggcttgtgggtgctgctctgtgggcaggcccctctgccattgaggatttttaattcaccaaattgcaatttttttggtgggggagccgcacagagtctcactctgccgcccaggct

SEQ ID NO: 25118 - DNA, 120 bp, Artificial Sequence
  ENSG00000035664_76 (sequence is synthesized)
aggtcggcttctgtgctctgttcaaacaccatcctgggctgtttgggaggggaaagtgagtgtatgacatcgccctgaataacaattctcaaggaagctggcaagctggcccttggggaa

SEQ ID NO: 25119 - DNA, 120 bp, Artificial Sequence
  ENSG00000035664_77 (sequence is synthesized)
ggcagctgcctgtccctgctgtgaggcaggtgctcacagcctagcattgcctgactgtgtgtcagaaggtggggtgatggtttggtaatcgatgattctgcagctgtgggagcctggcag

SEQ ID NO: 25120 - DNA, 120 bp, Artificial Sequence
  ENSG00000035664_78 (sequence is synthesized)
tgaagggatggagcagaggaataatggcagaaagagctggagtctcccccatgggccccctcccctcccttacaggtgatcatgaagatggtggcttcctacctcactccatcacgcagc

SEQ ID NO: 25121 - DNA, 120 bp, Artificial Sequence
  ENSG00000035664_79 (sequence is synthesized)
acaggtggcccggcccttgctggaggtggctgtgtgcccagctgtcacccctactgtcaatcttctgtaaatgtctgtgggactggatgccttttttccttggtccgtgaaattcctgac

SEQ ID NO: 25122 - DNA, 120 bp, Artificial Sequence
  ENSG00000035664_80 (sequence is synthesized)
ccagcagtgggcatgttcacgttgcaaaagggtccagtcccgttgaacaaacactgattgtgctctggctcagggggaggtgacagacaaggacaagataacctcaaataaaagattcag

SEQ ID NO: 25123 - DNA, 120 bp, Artificial Sequence
  ENSG00000035664_81 (sequence is synthesized)
tgtctggggcagatggggacccagccaactagattggaaaagctatggtgagtgataaaatagagcttcctcatctcctagaaatcaaaggagagaggaattctgattgagaaagggtaa

SEQ ID NO: 25124 - DNA, 120 bp, Artificial Sequence
  ENSG00000035664_82 (sequence is synthesized)
gagggttgcagagaagagaggccttcccagggacgccgtccccaccagtgaccgccctcctccactcccaagctgtgtcccttgaggaaggcatgagtaaaatctggaaggggggtgggg

SEQ ID NO: 25125 - DNA, 120 bp, Artificial Sequence
  ENSG00000035664_83 (sequence is synthesized)
ctgagccaagattggggttaggaacttggaacagttgaatggagattaaagagagggagattacacagatttaaaagagtgttttaaactttttgttatggtcccctcagcaggaaaatt

SEQ ID NO: 25126 - DNA, 120 bp, Artificial Sequence
  ENSG00000035664_84 (sequence is synthesized)
gccaaaacttgcacagaagtataaggaatgggatagtggattccaggacctatgaccccgctccagcaggaatcaagtcatgcgggtcctctttcattcatctctcccattacttttctt

SEQ ID NO: 25127 - DNA, 120 bp, Artificial Sequence
  ENSG00000035664_85 (sequence is synthesized)
ttcatctctcccattacttttcttctggggtattttaaagcaaatttcagacttatttaactcataagttctccagcataaatctctgctaaggattttcttcttctttttttctttttt

SEQ ID NO: 25128 - DNA, 120 bp, Artificial Sequence
  ENSG00000035664_86 (sequence is synthesized)
acaggcatgagccaccgcacccagccaggactttctttttaatacaaccccatgccattatcacacttgacaaaatcagcaataattccttcatctcatctggattcccattccatcctc

SEQ ID NO: 25129 - DNA, 120 bp, Artificial Sequence
  ENSG00000035664_87 (sequence is synthesized)
acatgtccccaccactcccaacagtgtcccattacagctggtttgttcaaatcaggatccaaacagtccacatgtggcatttggttgctacgtctctcaagtctcttgggttttataaca

SEQ ID NO: 25130 - DNA, 120 bp, Artificial Sequence
  ENSG00000035664_88 (sequence is synthesized)
gtacaaaaggaagaacctttgaagcttttcctggggacaaaaaattgctcagaaaactgatggtcccatagaagaataaaaaacagagcgtatccatgtcaagacctaactcagaaatgt

SEQ ID NO: 25131 - DNA, 120 bp, Artificial Sequence
  ENSG00000035664_89 (sequence is synthesized)
gagaccaggccaagcaaggaaaggaatgtttctgcctccttccactggcttgttcactgtagggggcagccttcaggctcacagcctttctgcagctgtccctcccacttaggaggaggc

SEQ ID NO: 25132 - DNA, 120 bp, Artificial Sequence
  ENSG00000035664_90 (sequence is synthesized)
agagcctcaagcctcccacaagccccatgtgctcctttcctgggaaaacaggtgggtgaaggcagcagagcccaggcttcagccatcaaaacatccagcgaaggggaggggtggaggggt

SEQ ID NO: 25133 - DNA, 120 bp, Artificial Sequence
  ENSG00000035664_91 (sequence is synthesized)
gccacctataaaactccattgagggaagggcagcggggaggggtcctgggcaggagagaagtgggtgtgagagtgccctggctttcactggagtaaggggctggagagatggcacagatg

SEQ ID NO: 25134 - DNA, 120 bp, Artificial Sequence
  ENSG00000035664_92 (sequence is synthesized)
ggggttggaggtgcaatctgcttgcagttcctaaagaagacctagtatctagagaaaatcgttgtgtggggggtggagttgggggagtcgcctcttcagtaaagccaggattcctttttc

SEQ ID NO: 25135 - DNA, 120 bp, Artificial Sequence
  ENSG00000035664_93 (sequence is synthesized)
atgccttagcagcggctgctgcttcctgcccctgcctgtggatgttggtactgacctggcacaccccactggactttttcaaaggcatttgcagctgcataaacaaaacttgactacccc

SEQ ID NO: 25136 - DNA, 120 bp, Artificial Sequence
  ENSG00000035664_94 (sequence is synthesized)
gaatccagctgctatgtcacgagaactcaagccaccctgtggagaattccacacggagtgcagctgaggcctcccaacaacaaccagcagcaatttgcaaaccatgtgtctcctacagct

SEQ ID NO: 25137 - DNA, 120 bp, Artificial Sequence
  ENSG00000035664_95 (sequence is synthesized)
actggtgtgttttttgcatattggccttccaacatttcttgttgaattatttcaggctcaccttggtcataatgagtggatctggctttacccagggcttcagcctttagcatttcacat

SEQ ID NO: 25138 - DNA, 120 bp, Artificial Sequence
  ENSG00000035664_96 (sequence is synthesized)
gaggaatatccactgagctgggggtcaagaggcctgacctttaatcttggctctgccccaggcaagtgtgaacttgggtaagaacactgaggccaggaaatgttgagtgacgtgtccata

SEQ ID NO: 25139 - DNA, 120 bp, Artificial Sequence
  ENSG00000035664_97 (sequence is synthesized)
ggcagccagatgcagagggcccatggagaggcctttgctttaaacactgaccctgggcacagatgaaagctagccaggggccccagagggcctgggcttattcgaataggtttatttgct

SEQ ID NO: 25140 - DNA, 120 bp, Artificial Sequence
  ENSG00000035664_98 (sequence is synthesized)
tgctattttaagtttgtgtgtctcaaattcaggtaacttatgaaatgaaaccctcacaaaccacagttgaaaccctttttctttggggccaacttacacagtgttctttgttgaagggta

SEQ ID NO: 25141 - DNA, 80 bp, Artificial Sequence
  ENSG00000035664_99 (sequence is synthesized)
gcccgccgcgcccgccgctcccgccgcgcctgccgcggccgcgaccgcggcagctcagcctcccgccgattgtatgttcc

SEQ ID NO: 25142 - DNA, 120 bp, Artificial Sequence
  ENSG00000035664_100 (sequence is synthesized)
gatgactccaaacacaccccgggctgctgctgaagagcaggatggagatgggtgtggagcatgagacggcatccagggtctgctgtggaggaggagcataggcgtcatcacctacatcct

SEQ ID NO: 25143 - DNA, 80 bp, Artificial Sequence
  ENSG00000035681_0 (sequence is synthesized)
acggtgccgccggagtccccacgcgaggatgctgcggtgagcgcggccgggacgccgcgtcgggctctcggccgcccagc

SEQ ID NO: 25144 - DNA, 120 bp, Artificial Sequence
  ENSG00000035681_1 (sequence is synthesized)
cagccggccaccaatcccgccctccccggctcctccggacctcctcggcaggcggcggcggggcctgcctgtgcgctctgcgcccgcccgcgcctaccctccatggcgtttatccggaag

SEQ ID NO: 25145 - DNA, 120 bp, Artificial Sequence
  ENSG00000035681_2 (sequence is synthesized)
aagcagcaggagcagcagctgcagctctactccaaggagagattttccttgctgctgcttaacttggaggagtactactttgaacagcatagagccaatcacattttgcacaagggcagt

SEQ ID NO: 25146 - DNA, 120 bp, Artificial Sequence
  ENSG00000035681_3 (sequence is synthesized)
caccatgaaaggaaaatcagaggctccttaaaaatatgttcaaaatcggtgatttttgaaccagattcaatatcccagcccatcatcaagattcctttgagagactgtataaaaatagga

SEQ ID NO: 25147 - DNA, 120 bp, Artificial Sequence
  ENSG00000035681_4 (sequence is synthesized)
aagcatggagaaaatggagccaatagacacttcacaaaggcaaaatctgggggtatttcactcattttcagtcaggtatatttcattaaagaacataatgttgttgcaccatataaaata

SEQ ID NO: 25148 - DNA, 120 bp, Artificial Sequence
  ENSG00000035681_5 (sequence is synthesized)
gaaaggggcaaaatggaatatgtttttgaattggatgttcccgggaaagtggaagatgttgtggagacgttgcttcagcttcacagagcatcctgccttgacaaattgggtgaccaaacc

SEQ ID NO: 25149 - DNA, 120 bp, Artificial Sequence
  ENSG00000035681_6 (sequence is synthesized)
gccatgataacagctattttgcagtctcgtttagctagaacatcatttgacaaaaacaggttccaaaacatttctgaaaagctgcacatggaatgcaaagcagaaatggtgacgcctctg

SEQ ID NO: 25150 - DNA, 120 bp, Artificial Sequence
  ENSG00000035681_7 (sequence is synthesized)
gtgactaatcctggacacgtgtgcatcacggacacaaacctgtattttcagcccctcaacggctacccgaaacctgtggtccagataacactccaagatgtccgccgcatctacaaaagg

SEQ ID NO: 25151 - DNA, 120 bp, Artificial Sequence
  ENSG00000035681_8 (sequence is synthesized)
aggcacggcctcatgcctctgggcttggaagtattttgcacagaagatgatctgtgttccgacatctacctaaagttctatgaacctcaagatagagatgatctctatttttacattgcc

SEQ ID NO: 25152 - DNA, 120 bp, Artificial Sequence
  ENSG00000035681_9 (sequence is synthesized)
acatacctagagcaccatgtggcggagcacactgctgagagctacatgctgcagtggcagcgtggacacctttccaactatcagtacctccttcacctcaacaacctggccgaccgcagc

SEQ ID NO: 25153 - DNA, 120 bp, Artificial Sequence
  ENSG00000035681_10 (sequence is synthesized)
tgcaacgacctctcccagtaccctgtgtttccatggataatacatgattattccagctcagaactagatttgtcaaatccaggaaccttccgggatctcagtaagccagtaggggcccta

SEQ ID NO: 25154 - DNA, 120 bp, Artificial Sequence
  ENSG00000035681_11 (sequence is synthesized)
aataaggaacggctggagagactactgacacgctaccaggaaatgcctgaaccaaagttcatgtatgggagtcactactcttccccgggttatgtacttttttatcttgttaggattgca

SEQ ID NO: 25155 - DNA, 120 bp, Artificial Sequence
  ENSG00000035681_12 (sequence is synthesized)
ccagagtatatgctgtgcctgcagaatggaagatttgataatgcagatagaatgttcaacagtattgcagaaacttggaaaaactgtctggatggtgcaacggattttaaagagttaatt

SEQ ID NO: 25156 - DNA, 120 bp, Artificial Sequence
  ENSG00000035681_13 (sequence is synthesized)
ccagaattctatggtgatgatgtgagctttctagtcaatagcctgaagttggatttgggaaagagacaaggaggacagatggttgacgacgtggagcttcccccttgggcttccagtccc

SEQ ID NO: 25157 - DNA, 120 bp, Artificial Sequence
  ENSG00000035681_14 (sequence is synthesized)
aaaaagggagtgatgcagttggggcccataatgtatttcatcccctgacctatgaaggaggtgtagacttgaacagcatccaggatcctgatgagaaggtagccatgcttacgcaaatct

SEQ ID NO: 25158 - DNA, 120 bp, Artificial Sequence
  ENSG00000035681_15 (sequence is synthesized)
tggaatttgggcagacaccaaaacaactatttgtgacaccacatcctcgaaggatcaccccaaagtttaaaagtttgtcccagacctccagttataatgcttctatggcagattccccag

SEQ ID NO: 25159 - DNA, 120 bp, Artificial Sequence
  ENSG00000035681_16 (sequence is synthesized)
gtgaagagtcttttgaagacctgaccgaagaaagcaaaacactggcctggaataacatcaccaaactgcagttacacgagcactataaaatccacaaagaagcagttactggaatcacgg

SEQ ID NO: 25160 - DNA, 120 bp, Artificial Sequence
  ENSG00000035681_17 (sequence is synthesized)
tctctcgcaatggatcttcagtattcacaacatcccaagattccaccttgaagatgttttctaaagaatcaaaaatgctacaaagaagtatatcattttcaaatatggctttatcgtctt

SEQ ID NO: 25161 - DNA, 120 bp, Artificial Sequence
  ENSG00000035681_18 (sequence is synthesized)
gtttacttttaccaggagatgccactgtcataacttcttcatgggataataatgtctatttttattccatagcatttggaagacgccaggacacgttaatgggacatgatgatgctgtta

SEQ ID NO: 25162 - DNA, 120 bp, Artificial Sequence
  ENSG00000035681_19 (sequence is synthesized)
gtaagatctgttggcatgacaacaggctatattctgcatcgtgggactctacagtgaaggtgtggtctggtgttcctgcagagatgccaggcaccaaaagacaccactttgacttgctgg

SEQ ID NO: 25163 - DNA, 120 bp, Artificial Sequence
  ENSG00000035681_20 (sequence is synthesized)
ccgagctggaacatgatgtcagtgtagatacaatcagtttaaatgctgcaagcacactgttagtttccggcaccaaagaaggcacagtgaatatttgggacctcacaacggccaccttaa

SEQ ID NO: 25164 - DNA, 120 bp, Artificial Sequence
  ENSG00000035681_21 (sequence is synthesized)
tgcaccagattccatgccattcagggattgtatgtgacactgcttttagcccagatagtcgccatgtcctcagcacaggaacagatggctgtcttaatgtcattgatgtgcagacaggaa

SEQ ID NO: 25165 - DNA, 120 bp, Artificial Sequence
  ENSG00000035681_22 (sequence is synthesized)
tgctcatctcctccatgacatcagatgagccccagaggtgctttgtctgggatggaaattccgttttatctggcagtcagtctggtgaactgctcgtttgggacctccttggagcaaaaa

SEQ ID NO: 25166 - DNA, 120 bp, Artificial Sequence
  ENSG00000035681_23 (sequence is synthesized)
tcagtgagagaatacagggccacacaggtgctgtgacatgtatatggatgaatgaacagtgtagcagtatcatcacaggaggggaagacagacaaattatattctggaaattgcagtatt

SEQ ID NO: 25167 - DNA, 120 bp, Artificial Sequence
  ENSG00000035681_24 (sequence is synthesized)
aagtgccttttcctctcctgaatattaaattgaactctatttaatgcatttttaaaccaaacttttaaacggactggtgaatgtgcaatgttagtaattagaagttttaccacatggaaa

SEQ ID NO: 25168 - DNA, 120 bp, Artificial Sequence
  ENSG00000035681_25 (sequence is synthesized)
atttgtggttttaaactttctaaatcatggtgacttcattgaaagccattagttgctattctcttagggcagataaaatgcggctgtgttaggaaaaacatgttacactgtaaggcagat

SEQ ID NO: 25169 - DNA, 120 bp, Artificial Sequence
  ENSG00000035681_26 (sequence is synthesized)
gatcgtccccgtatgatgattgtcagaagacaggactaagtagcagagaatagctaagagataaattgggctggggaaacttgtcagaaagcactgaacaattaagaaattttccaagaa

SEQ ID NO: 25170 - DNA, 120 bp, Artificial Sequence
  ENSG00000035681_27 (sequence is synthesized)
aatgtgcagtattctctgctacttctgaatctgttttgtcttcctaatctatcacaattgccacccatcgggttttgggtgtgtgttttcatagcgtggttactttctataatgctgtac

SEQ ID NO: 25171 - DNA, 120 bp, Artificial Sequence
  ENSG00000035681_28 (sequence is synthesized)
ccagattctaagaacctggagaaggattagcagttcttagtaagtttactgtgtataggaacggtttgtatttcattacagctattcatcttttctacattaaaaatatttttctctaaa

SEQ ID NO: 25172 - DNA, 120 bp, Artificial Sequence
  ENSG00000035681_29 (sequence is synthesized)
tcgtggggacgccggccggagatctgagggacgggaggcggcgtgggggccgggcacggaggcaggggccggacgcgtgtccagggcctgggctgggggctgtggcggaaacctgaggtc

SEQ ID NO: 25173 - DNA, 120 bp, Artificial Sequence
  ENSG00000035681_30 (sequence is synthesized)
aaacctgaggtcggggtgagaggccgggggcctggtctgggccggagcctgccggggacaggaactggatgacgggccaggccagattccaccgcggagccgaggcatgccgagctatcc

SEQ ID NO: 25174 - DNA, 120 bp, Artificial Sequence
  ENSG00000035681_31 (sequence is synthesized)
ggcagtgcaggtcccggcggccgcgggcagctcacccggaaggccgcgcggggtccgggcgtggatcccggcacgcgagcccgggcgttcgcaggggaggattttccttgctgctgctta

SEQ ID NO: 25175 - DNA, 120 bp, Artificial Sequence
  ENSG00000035681_32 (sequence is synthesized)
actgggggcgaagacatttacagacatgttcatgatcacttcatttgggcttacattggccagttcaacatatccttccttcatgatgaagaaaggactatttctaaatcattcttgcag

SEQ ID NO: 25176 - DNA, 120 bp, Artificial Sequence
  ENSG00000035681_33 (sequence is synthesized)
gttaaagtgggacactcagagagatggttagaactatgtggaaatgacaaacagaagttaatacagtattgcagaaacttggaaaaactgtctggatggtgcaacggattttaaagagtt

SEQ ID NO: 25177 - DNA, 120 bp, Artificial Sequence
  ENSG00000035681_34 (sequence is synthesized)
caggtttgatacaaatgccttgcttatcatttttaacactttctgattgtatatatacaacatacttgtttcaaagcactggatataataaaaaagtaaagaaatgtaaaaaatcactaa

SEQ ID NO: 25178 - DNA, 120 bp, Artificial Sequence
  ENSG00000035681_35 (sequence is synthesized)
ccctttaatttcgtgaagtttaacttactcttgcctgaacaaagctctgagctttcccacctaaaaaattttcgcctagaaataactcagttgcaatcagcaccaagaatctggtctctt

SEQ ID NO: 25179 - DNA, 120 bp, Artificial Sequence
  ENSG00000035681_36 (sequence is synthesized)
aataccacttcccactgaaaggatgggggttctttggagaaattgctgattctaagtcagaggcaggaaatctgtgagatgaacctgggacatcctgtcatactggcaagaaaatcagag

SEQ ID NO: 25180 - DNA, 120 bp, Artificial Sequence
  ENSG00000035681_37 (sequence is synthesized)
acataatgtttctttaatatatgtttaggagccttaaaattaagccagactactgttttaatgcttctcattatcttttagctatttttattccatagcatttggaagacgccaggacac

SEQ ID NO: 25181 - DNA, 120 bp, Artificial Sequence
  ENSG00000035681_38 (sequence is synthesized)
gtgacactgcttttagcccaggtagatattatcctttttaaaacagataatactaggtaaattggaattttgaaataaacaatattgttaattttgaaataaacaataaaacttacaaag

SEQ ID NO: 25182 - DNA, 120 bp, Artificial Sequence
  ENSG00000035681_39 (sequence is synthesized)
taagaaatatggacctcttgcctgtcctagaagctttatatacatatagatagacaagagaaatgggaggaaaaaaatgaagactccatgatttttcgattgagtctaatctaataggtc

SEQ ID NO: 25183 - DNA, 120 bp, Artificial Sequence
  ENSG00000035681_40 (sequence is synthesized)
gtaatccaaggtagtgaagactgaatgatcctttaagaggacaggctggaaccaattttctcatcattgaatagtcactgagtaaattagcttcagtaatcagcaagtgaagtgactgtg

SEQ ID NO: 25184 - DNA, 120 bp, Artificial Sequence
  ENSG00000035681_41 (sequence is synthesized)
aagaagagtttgtccttttggtgatggtcaaacgagggggaatagaaggagaagagttttccaattgccagaaattgtcaggaatatgtaaagcattgcatgtggaacacagggaagcaa

SEQ ID NO: 25185 - DNA, 120 bp, Artificial Sequence
  ENSG00000035681_42 (sequence is synthesized)
ctgtgaagaaaaaaattaaggaaacttggtaaaattaaatcaaggatatgaaacaaagagggtatcctaacacatgatgagtagtaatttgtgaaactttgtttttgagcagagcagtta

SEQ ID NO: 25186 - DNA, 120 bp, Artificial Sequence
  ENSG00000035681_43 (sequence is synthesized)
gttaaagtgggacactcagagagatggttagaactatgtggaaatgacaaacagaagttaatacaggtaaagtgtagaacagcccccaagtgcataggaaatgctgctattgctatttcc

SEQ ID NO: 25187 - DNA, 120 bp, Artificial Sequence
  ENSG00000035681_44 (sequence is synthesized)
gctgtgcattagatggatggcttcacatcacagtccagcctcccgaagagaaacaaggagttttggctgattcatgatgacaatggctgtcttttctcaacttctctaaatggcacatag

SEQ ID NO: 25188 - DNA, 120 bp, Artificial Sequence
  ENSG00000035681_45 (sequence is synthesized)
ccctgctctgtgattcgacgtgcagaatagctgcctctgtggacatgaggtgtgaaaagccagaagctttccctgccaggacacagcactgttttctaaagggaacagatattagagatg

SEQ ID NO: 25189 - DNA, 120 bp, Artificial Sequence
  ENSG00000035681_46 (sequence is synthesized)
aggacagtatggttggatttgaatatgattgcttagattgaataatttctccaattggagtctgtttttctctaagttttaaattgaggagaaaacagatgagccagacatggaaatttc

SEQ ID NO: 25190 - DNA, 120 bp, Artificial Sequence
  ENSG00000035681_47 (sequence is synthesized)
ttttcatgtatttccagcaatttatatagtcattttgaacaataaaattttgtgactctattaacatctttaatcaaatataataataatgagtatttaaaagcttcttacctggaagtt

SEQ ID NO: 25191 - DNA, 120 bp, Artificial Sequence
  ENSG00000035687_0 (sequence is synthesized)
ctctgcatgtggctggcggccgcagagcagttcagttcgctcactcctcgccggccgcctctccttcgggctctcctcgcgtcactggagccatggcgttcgccgagacctacccggcgg

SEQ ID NO: 25192 - DNA, 120 bp, Artificial Sequence
  ENSG00000035687_1 (sequence is synthesized)
catcctccctgcccaacggcgattgcggccgccccagggcgcggcccggaggaaaccgggtgacggtggtgctcggtgcgcagtggggcgacgaaggcaaagggaaggtggtggacctgc

SEQ ID NO: 25193 - DNA, 120 bp, Artificial Sequence
  ENSG00000035687_2 (sequence is synthesized)
tggcgcaggacgccgacatcgtgtgccgctgccagggaggaaataatgctggccatacagttgttgtggattctgtggaatatgattttcatctcttacccagtggaataattaatccaa

SEQ ID NO: 25194 - DNA, 120 bp, Artificial Sequence
  ENSG00000035687_3 (sequence is synthesized)
atgtcactgcattcattggaaatggtgtggtaattcatctacctggattgtttgaagaagcagagaaaaatgttcaaaaaggaaaaggactagaaggctgggaaaaaaggcttattatat

SEQ ID NO: 25195 - DNA, 120 bp, Artificial Sequence
  ENSG00000035687_4 (sequence is synthesized)
ctgacagagctcatattgtatttgattttcatcaagcagctgatggtatccaggaacaacagagacaagaacaagcaggaaaaaatttgggtacaacaaaaaagggcattggcccagttt

SEQ ID NO: 25196 - DNA, 120 bp, Artificial Sequence
  ENSG00000035687_5 (sequence is synthesized)
attcgtccaaagctgctcggagtggactcaggatgtgcgaccttgtttctgactttgatggcttctctgagaggtttaaagttctagctaaccaatacaaatctatataccccactttgg

SEQ ID NO: 25197 - DNA, 120 bp, Artificial Sequence
  ENSG00000035687_6 (sequence is synthesized)
aaatagacattgaaggtgaattacaaaaactcaagggttatatggaaaagattaaaccaatggtgagagatggagtttattttctatatgaggccctacatggaccaccaaagaaaatct

SEQ ID NO: 25198 - DNA, 120 bp, Artificial Sequence
  ENSG00000035687_7 (sequence is synthesized)
tggtagaaggtgcaaatgcagcactattagatattgattttgggacttacccttttgtaacctcttcaaattgtactgttggaggtgtttgtactggtttgggtatgccacctcaaaatg

SEQ ID NO: 25199 - DNA, 120 bp, Artificial Sequence
  ENSG00000035687_8 (sequence is synthesized)
ttggagaagtgtatggagttgtgaaagcttatacaactagagttggtattggtgcctttcctacagagcaagacaatgaaattggagaattattacaaacaaggggtagagagtttggtg

SEQ ID NO: 25200 - DNA, 120 bp, Artificial Sequence
  ENSG00000035687_9 (sequence is synthesized)
taactactggaaggaaaagaagatgtggctggttggacctcgttttgctcaaatatgctcatatgatcaatggatttactgcgttggcacttaccaagttggatattttggacatgttta

SEQ ID NO: 25201 - DNA, 120 bp, Artificial Sequence
  ENSG00000035687_10 (sequence is synthesized)
ggtgaaatcatacctcatatcccagcaaaccaagaagtcttaaataaagttgaagttcaatataagactctcccaggatggaacacagacatatcaaatgcaagggcgtttaaagaacta

SEQ ID NO: 25202 - DNA, 120 bp, Artificial Sequence
  ENSG00000035687_11 (sequence is synthesized)
cctgttaatgcacaaaactatgttcgatttattgaagatgagcttcaaattccagttaagtggattggtgttggtaaatccagagaatctatgattcaactcttttaatgattgccagta

SEQ ID NO: 25203 - DNA, 120 bp, Artificial Sequence
  ENSG00000035687_12 (sequence is synthesized)
atgcaagaaacactccttgagagggaggggaaaagactttcttaaatatttcatttatgacctgcaaattcaagaataaagacactgaagtaagtttgaagccctacagttgtttccagt

SEQ ID NO: 25204 - DNA, 120 bp, Artificial Sequence
  ENSG00000035687_13 (sequence is synthesized)
cttttcagatggatgcctactgtggagattaactttggcatattccagtgtcagctttctttagctggaattgccaaatcatttgttgctcctgctgctctcatggtgccacgttttttt

SEQ ID NO: 25205 - DNA, 120 bp, Artificial Sequence
  ENSG00000035687_14 (sequence is synthesized)
tttcaatgtttagtaatagtataatccatgttgtttgatatcaaaagtagaattacttttaatgtagtttttcttcattattgtcattgcgtgttcttaagttttacccctattagatgg

SEQ ID NO: 25206 - DNA, 120 bp, Artificial Sequence
  ENSG00000035687_15 (sequence is synthesized)
taagaacaattaatgcagttttgcacaaatatttttacattctgatcattcagttctgtcattgtaatctttgttgttagaaacaaatgatgaaaacataggggttctgtaaacttttgt

SEQ ID NO: 25207 - DNA, 120 bp, Artificial Sequence
  ENSG00000035687_16 (sequence is synthesized)
aatgctatgaattctgtttaaattttgggctgtctattttctgctgaaaccatgcaaaattgagctttggtggggctgggagggggttatgtattcatgggacctttaatttgtacagaa

SEQ ID NO: 25208 - DNA, 120 bp, Artificial Sequence
  ENSG00000035687_17 (sequence is synthesized)
cacagaacttatttctgtcagttatttaatacattgaaaatttagtgaaatgttcaaagagaatagatgtttcccaaaacaacaatctttatgttaaaaatagtcattaaaagatctgtt

SEQ ID NO: 25209 - DNA, 120 bp, Artificial Sequence
  ENSG00000035687_18 (sequence is synthesized)
gtaatatatggtggatatttttctttaatttcaaacattacctctgaaatgtgtatcttttcttttttatcttaccattaattttaaatctagtggattggttttcaacatcgtgcctgc

SEQ ID NO: 25210 - DNA, 120 bp, Artificial Sequence
  ENSG00000035687_19 (sequence is synthesized)
cgatatgcctacagaatcatctgtaagtgtcaaaatgaacccacgttgttagccataattttgattatgcctttatttctcctttcttgaaaaaaaaaaggtgttattttgacaattagg

SEQ ID NO: 25211 - DNA, 120 bp, Artificial Sequence
  ENSG00000035687_20 (sequence is synthesized)
cataacattgttttgtagattatcttttaatgaactattttaaatgttaaattaggtgccacttaaatttattttattacaccatgaatagctgattaaaagaaccaaatatttctagta

SEQ ID NO: 25212 - DNA, 120 bp, Artificial Sequence
  ENSG00000035687_21 (sequence is synthesized)
tggagttttaagggcaggggaggtgtgaatgccatatttgtgtcttggaaagatggctttggctgcatgacagcatttggattagagatgtctaagaatggaaagaggtacacacattag

SEQ ID NO: 25213 - DNA, 120 bp, Artificial Sequence
  ENSG00000035687_22 (sequence is synthesized)
gagactgcagttttggtgagaggtgatggaagctcgagactagtgaggaaaagggaggtgtcaacatgagccctagattcttggagtccagaacttgaagaaaaaagagtatttttgtaa

SEQ ID NO: 25214 - DNA, 120 bp, Artificial Sequence
  ENSG00000035687_23 (sequence is synthesized)
attgacctttgttaaattttagggcaagatgtttcaaaattaccctcttaatgacttattttttaaaatagtatagactgcaataaataagaacgaaagatcagacattttcatattaat

SEQ ID NO: 25215 - DNA, 120 bp, Artificial Sequence
  ENSG00000035687_24 (sequence is synthesized)
gggagtcatatttgttttacactaacaggaaactatgaaaataagtagatgagtttcagcattaaatttcttcataatccagtaagtgagtagctgctataaagagctgagtcagtaact

SEQ ID NO: 25216 - DNA, 120 bp, Artificial Sequence
  ENSG00000035687_25 (sequence is synthesized)
gtacatgcattcaaggagcctctctgtataagcacttgcgttaaagctctgacctcgtttttatgtcattacagctaaaatgaataaaaagtaaaacactgagtctttgagagggcagtt

SEQ ID NO: 25217 - DNA, 120 bp, Artificial Sequence
  ENSG00000035687_26 (sequence is synthesized)
acagttcagatctgttagatacctataatatactcaaatgcagaattgtaacggtaattctgttttaaaatgtgttattcatgtgtctactatattttaatgtctgtttctgtttttagg

SEQ ID NO: 25218 - DNA, 120 bp, Artificial Sequence
  ENSG00000035720_0 (sequence is synthesized)
gaacagttgccttttcctctcacagaaggaagatttcattttgtttgagacgagaaaccaaaccacacaccaaagagaggggtatgatggctaagaagcccccaaaaccagcccctcgca

SEQ ID NO: 25219 - DNA, 120 bp, Artificial Sequence
  ENSG00000035720_1 (sequence is synthesized)
ggatcttccaggaaaggttaaagattactgctctacctttgtactttgaaggttttttattaatcaagcggtcaggataccgggagtatgagcattactggacagagttgagaggaacta

SEQ ID NO: 25220 - DNA, 120 bp, Artificial Sequence
  ENSG00000035720_2 (sequence is synthesized)
ctcttttcttttataccgacaaaaagagtataatatatgttgacaaattagacatagtagacctcacatgccttactgagcagaattcaactgaaaagaactgtgcgaaattcacccttg

SEQ ID NO: 25221 - DNA, 120 bp, Artificial Sequence
  ENSG00000035720_3 (sequence is synthesized)
ttttgccgaaagaggaagtacaactgaagacagagaacacagaaagtggggaagaatggagaggcttcattcttacagtaacagagctgtcagttccccaaaacgtgtcactcctacctg

SEQ ID NO: 25222 - DNA, 120 bp, Artificial Sequence
  ENSG00000035720_4 (sequence is synthesized)
ggcaagtaattaaactgcatgaagtcctagagagagaaaagaaaaggaggattgagacagagcagagtacgtccgtggaaaaagagaaggaaccaactgaagattatgtggatgtactga

SEQ ID NO: 25223 - DNA, 120 bp, Artificial Sequence
  ENSG00000035720_5 (sequence is synthesized)
accctatgccagcatgtttttatacagtgtcccggaaagaggcaactgagatgctccagaagaacccttctttgggaaatatgatcctgaggcctggtagtgacagtagaaactactcca

SEQ ID NO: 25224 - DNA, 120 bp, Artificial Sequence
  ENSG00000035720_6 (sequence is synthesized)
tcactattcggcaggagatagacattccaagaatcaagcactacaaagtgatgagcgtaggacaaaactacactattgaactggaaaaacctgtaacactcccaaaccttttcagtgtca

SEQ ID NO: 25225 - DNA, 120 bp, Artificial Sequence
  ENSG00000035720_7 (sequence is synthesized)
ttgattattttgtgaaggagactcgaggaaatttaagaccatttatatgttcaactgatgaaaacactggtcaagaacccagtatggaagggagaagtgaaaagttgaagaaaaatccac

SEQ ID NO: 25226 - DNA, 120 bp, Artificial Sequence
  ENSG00000035720_8 (sequence is synthesized)
ttgtatatcttggtaatttatattttcaaaacgaagttcttacttttaaagagaattacctatattctcctgatactgattaccaagtcattcacctgaacaccagaattagaattaaac

SEQ ID NO: 25227 - DNA, 120 bp, Artificial Sequence
  ENSG00000035720_9 (sequence is synthesized)
attgtaccatacaatttcattatcttatcagaatgaaaccaattcacagggaaactagagactacggctgtggtggtaacctgcagatatacacattcccatgcactgacataagttgaa

SEQ ID NO: 25228 - DNA, 120 bp, Artificial Sequence
  ENSG00000035720_10 (sequence is synthesized)
aacacatagtactttctagatggaatttttttctttaggcctcaatgaaatacatttcccctatataattccaacagcagtttctctagttctaaattttaccaattcccaaaaaaccta

SEQ ID NO: 25229 - DNA, 120 bp, Artificial Sequence
  ENSG00000035720_11 (sequence is synthesized)
agttttgctgaaatctgatttgaccaatttatcaaatatgtcattttaattacctagctggaagttagagacatgaaatgtactagaggagcccttttccaatggaaatattatatacca

SEQ ID NO: 25230 - DNA, 120 bp, Artificial Sequence
  ENSG00000035720_12 (sequence is synthesized)
cattttttgttaatggaaataaatgtcttcattcccatgtttttccctggtgtcatctttttgccactcaaaatcagcccattatttccttacaaagatggtgaaaggctgtatcatcat

SEQ ID NO: 25231 - DNA, 120 bp, Artificial Sequence
  ENSG00000035720_13 (sequence is synthesized)
cttgtcgtaagtacgatgagcctgattataagtacctggagttcttaaaaatatggaaccatcagccccagactgcatctactgaatcaaaataacagggatattttttcataatttttt

SEQ ID NO: 25232 - DNA, 120 bp, Artificial Sequence
  ENSG00000035720_14 (sequence is synthesized)
tcttcaaaagcaaacttctaaattgattttgatggttatcaatttgggaatcacacaatcaactaagaatgaaaagatatggtctatattctacaggggaaagactatgtgagacagagg

SEQ ID NO: 25233 - DNA, 120 bp, Artificial Sequence
  ENSG00000035720_15 (sequence is synthesized)
gagaaaacagccattgacaactcaaggagagaggcctcggggggaaaaaaagatcaacctggccaaaaccttgaaaatccggcttcttgacttgtgagaaaataaatttgtgttccttaa

SEQ ID NO: 25234 - DNA, 80 bp, Artificial Sequence
  ENSG00000035862_0 (sequence is synthesized)
agcaaacacatccgtagaaggcagcgcggccgccgagaaccgcagcgccgctcgcccgccgccccccaccccgccgcccc

SEQ ID NO: 25235 - DNA, 120 bp, Artificial Sequence
  ENSG00000035862_1 (sequence is synthesized)
cctcccctcgcgcccccgagacaaagaggagagaaagtttgcgcggccgagcggggcaggtgaggagggtgagccgcgcgggaggggcccgcctcggccccggctcagcccccgcccgcg

SEQ ID NO: 25236 - DNA, 80 bp, Artificial Sequence
  ENSG00000035862_2 (sequence is synthesized)
gccatgggcgccgcggcccgcaccctgcggctggcgctcggcctcctgctgctggcgacgctgcttcgcccggccgacgc

SEQ ID NO: 25237 - DNA, 120 bp, Artificial Sequence
  ENSG00000035862_3 (sequence is synthesized)
ttcgcccggccgacgcctgcagctgctccccggtgcacccgcaacaggcgttttgcaatgcagatgtagtgatcagggccaaagcggtcagtgagaaggaagtggactctggaaacgaca

SEQ ID NO: 25238 - DNA, 120 bp, Artificial Sequence
  ENSG00000035862_4 (sequence is synthesized)
tttatggcaaccctatcaagaggatccagtatgagatcaagcagataaagatgttcaaagggcctgagaaggatatagagtttatctacacggccccctcctcggcagtgtgtggggtct

SEQ ID NO: 25239 - DNA, 120 bp, Artificial Sequence
  ENSG00000035862_5 (sequence is synthesized)
cgctggacgttggaggaaagaaggaatatctcattgcaggaaaggccgagggggacggcaagatgcacatcaccctctgtgacttcatcgtgccctgggacaccctgagcaccacccaga

SEQ ID NO: 25240 - DNA, 120 bp, Artificial Sequence
  ENSG00000035862_6 (sequence is synthesized)
agaagagcctgaaccacaggtaccagatgggctgcgagtgcaagatcacgcgctgccccatgatcccgtgctacatctcctccccggacgagtgcctctggatggactgggtcacagaga

SEQ ID NO: 25241 - DNA, 120 bp, Artificial Sequence
  ENSG00000035862_7 (sequence is synthesized)
agaacatcaacgggcaccaggccaagttcttcgcctgcatcaagagaagtgacggctcctgtgcgtggtaccgcggcgcggcgccccccaagcaggagtttctcgacatcgaggacccat

SEQ ID NO: 25242 - DNA, 120 bp, Artificial Sequence
  ENSG00000035862_8 (sequence is synthesized)
aagcaggcctccaacgcccctgtggccaactgcaaaaaaagcctccaagggtttcgactggtccagctctgacatcccttcctggaaacagcatgaataaaacactcatcccatgggtcc

SEQ ID NO: 25243 - DNA, 120 bp, Artificial Sequence
  ENSG00000035862_9 (sequence is synthesized)
aaattaatatgattctgctccccccttctccttttagacatggttgtgggtctggagggagacgtgggtccaaggtcctcatcccatcctccctctgccaggcactatgtgtctggggct

SEQ ID NO: 25244 - DNA, 120 bp, Artificial Sequence
  ENSG00000035862_10 (sequence is synthesized)
tcgatccttgggtgcaggcagggctgggacacgcggcttccctcccagtccctgccttggcaccgtcacagatgccaagcaggcagcacttagggatctcccagctgggttagggcaggg

SEQ ID NO: 25245 - DNA, 120 bp, Artificial Sequence
  ENSG00000035862_11 (sequence is synthesized)
cctggaaatgtgcattttgcagaaacttttgagggtcgttgcaagactgtgtagcaggcctaccaggtccctttcatcttgagagggacatggcccttgttttctgcagcttccacgcct

SEQ ID NO: 25246 - DNA, 120 bp, Artificial Sequence
  ENSG00000035862_12 (sequence is synthesized)
ctgcactccctgcccctggcaagtgctcccatcgccccggtgcccaccatgagctcccagcacctgactccccccacatccaagggcagcctggaaccagtggctagttcttgaaggagc

SEQ ID NO: 25247 - DNA, 120 bp, Artificial Sequence
  ENSG00000035862_13 (sequence is synthesized)
cccatcaatcctattaatcctcagaattccagtgggagcctccctctgagccttgtagaaatgggagcgagaaaccccagctgagctgcgttccagcctcagctgagtctttttggtctg

SEQ ID NO: 25248 - DNA, 120 bp, Artificial Sequence
  ENSG00000035862_14 (sequence is synthesized)
cccccacccccccccccccgcccacatgctccccagcttgcaggaggaatcggtgaggtcctgtcctgaggctgctgtccggggccggtggctgccctcaaggtcccttccctagctgct

SEQ ID NO: 25249 - DNA, 120 bp, Artificial Sequence
  ENSG00000035862_15 (sequence is synthesized)
attgagttgcacagctttgctttatccgggcttgtgtgcagggcccggctgggctccccatctgcacatcctgaggacagaaaaagctgggtcttgctgtgccctcccaggcttagtgtt

SEQ ID NO: 25250 - DNA, 120 bp, Artificial Sequence
  ENSG00000035862_16 (sequence is synthesized)
ccctccctcaaagactgacagccatcgttctgcacggggctttctgcatgtgacgccagctaagcatagtaagaagtccagcctaggaagggaaggattttggaggtaggtggctttggt

SEQ ID NO: 25251 - DNA, 120 bp, Artificial Sequence
  ENSG00000035862_17 (sequence is synthesized)
gacacactcacttctttctcagcctccaggacactatggcctgttttaagagacatcttatttttctaaaggtgaattctcagatgataggtgaacctgagttgcagatataccaacttc

SEQ ID NO: 25252 - DNA, 120 bp, Artificial Sequence
  ENSG00000035862_18 (sequence is synthesized)
tgcttgtatttcttaaatgacaaagattacctagctaagaaacttcctagggaactagggaacctatgtgttccctcagtgtggtttcctgaagccagtgatatgggggttaggatagga

SEQ ID NO: 25253 - DNA, 120 bp, Artificial Sequence
  ENSG00000035862_19 (sequence is synthesized)
agaactttctcggtaatgataaggagaatctcttgtttcctcccacctgtgttgtaaagataaactgacgatatacaggcacattatgtaaacatacacacgcaatgaaaccgaagcttg

SEQ ID NO: 25254 - DNA, 120 bp, Artificial Sequence
  ENSG00000035862_20 (sequence is synthesized)
gcggcctgggcgtggtcttgcaaaatgcttccaaagccaccttagcctgttctattcagcggcaaccccaaagcacctgttaagactcctgacccccaagtggcatgcagcccccatgcc

SEQ ID NO: 25255 - DNA, 120 bp, Artificial Sequence
  ENSG00000035862_21 (sequence is synthesized)
caccgggacctggtcagcacagatcttgatgacttccctttctagggcagactgggagggtatccaggaatcggcccctgccccacgggcgttttcatgctgtacagtgacctaaagttg

SEQ ID NO: 25256 - DNA, 120 bp, Artificial Sequence
  ENSG00000035862_22 (sequence is synthesized)
gtaagatgtcataatggaccagtccatgtgatttcagtatatacaactccaccagacccctccaacccatataacaccccacccctgttcgcttcctgtatggtgatatcatatgtaaca

SEQ ID NO: 25257 - DNA, 120 bp, Artificial Sequence
  ENSG00000035862_23 (sequence is synthesized)
tttactcctgtttctgctgattgtttttttaatgttttggtttgtttttgacatcagctgtaatcattcctgtgctgtgttttttattacccttggtaggtattagacttgcactttttt

SEQ ID NO: 25258 - DNA, 120 bp, Artificial Sequence
  ENSG00000035862_24 (sequence is synthesized)
aaaaaaaggtttctgcatcgtggaagcatttgacccagagtggaacgcgtggcctatgcaggtggattccttcaggtctttcctttggttctttgagcatctttgctttcattcgtctcc

SEQ ID NO: 25259 - DNA, 120 bp, Artificial Sequence
  ENSG00000035862_25 (sequence is synthesized)
cgtctttggttctccagttcaaattattgcaaagtaaaggatctttgagtaggttcggtctgaaaggtgtggcctttatatttgatccacacacgttggtcttttaaccgtgctgagcag

SEQ ID NO: 25260 - DNA, 120 bp, Artificial Sequence
  ENSG00000035862_26 (sequence is synthesized)
aaaacaaaacaggttaagaagagccgggtggcagctgacagaggaagccgctcaaataccttcacaataaatagtggcaatatatatatagtttaagaaggctctccatttggcatcgtt

SEQ ID NO: 25261 - DNA, 120 bp, Artificial Sequence
  ENSG00000035862_27 (sequence is synthesized)
taatttatatgttatgttctaagcacagctctcttctcctattttcatcctgcaagcaactcaaaatatttaaaataaagtttacattgtagttattttcaaatctttgcttgataagta

SEQ ID NO: 25262 - DNA, 120 bp, Artificial Sequence
  ENSG00000035862_28 (sequence is synthesized)
ttaagaaatattggacttgctgccgtaatttaaagctctgttgattttgtttccgtttggatttttgggggaggggagcactgtgtttatgctggaatatgaagtctgagaccttccggt

SEQ ID NO: 25263 - DNA, 120 bp, Artificial Sequence
  ENSG00000035862_29 (sequence is synthesized)
gctgggaacacacaagagttgttgaaagttgacaagcagactgcgcatgtctctgatgctttgtatcattcttgagcaatcgctcggtccgtggacaataaacagtattatcaaagagaa

SEQ ID NO: 25264 - DNA, 120 bp, Artificial Sequence
  ENSG00000035862_30 (sequence is synthesized)
cttgttgaagaatcgtggaaggaggaggaggaggctgggcatcatctctcagcctggaggaggagacgccatgccgggggctgggatcaccatgccccttgcccgtctcgcaccttgctg

SEQ ID NO: 25265 - DNA, 120 bp, Artificial Sequence
  ENSG00000035862_31 (sequence is synthesized)
gtggaaggaggaggaggaggctgggcatcatctctcagcctggaggaggagacgccatgccgggggctgggatcaccatgccccttgcccgtctcgcaccttgctgctgtctgtaacccc

SEQ ID NO: 25266 - DNA, 120 bp, Artificial Sequence
  ENSG00000035862_32 (sequence is synthesized)
ccagcacctcccgcaggcctggacgtcttatccctctccttagccccaggagcgtgtttcaggaactctcctcacctctgtgtcttgtgttttgcagtgatcagggccaaagcggtcagt

SEQ ID NO: 25267 - DNA, 120 bp, Artificial Sequence
  ENSG00000035862_33 (sequence is synthesized)
cagatggacggcagggattttgatccctggctttccaggacccgttaatccccggctcctgatctaagaccaggctctgggaaggtagagtcatcccaagagtaaggctgtctggctggg

SEQ ID NO: 25268 - DNA, 120 bp, Artificial Sequence
  ENSG00000035862_34 (sequence is synthesized)
tgtctggctggggacagagcctttgacccctggtccctggagagccctgaggcacatctctgacaggggatgtctggaggccgggcgctgcggctcacgcctgtaatcccggcactttgg

SEQ ID NO: 25269 - DNA, 70 bp, Artificial Sequence
  ENSG00000035862_35 (sequence is synthesized)
ctgtaatcccggcactttgggaggccgagataggtgggtcacttgaggtcgggagttggaaatcagcctc

SEQ ID NO: 25270 - DNA, 76 bp, Artificial Sequence
  ENSG00000035862_36 (sequence is synthesized)
agccaggtgaggtggtgcacgcctgtgatcccagcaacttgggaggatgaggcttaagaattgcttgaatcccagc

SEQ ID NO: 25271 - DNA, 120 bp, Artificial Sequence
  ENSG00000035862_37 (sequence is synthesized)
gggagatgtctggaaggctaggagatttgagagtaagagcatgaattcagctctgttacctgtagcttccagaaaaaggagctgtatggggagagagaatatggtcccatggagaatttt

SEQ ID NO: 25272 - DNA, 120 bp, Artificial Sequence
  ENSG00000035862_38 (sequence is synthesized)
ttatgagaaggcactgcaggccttacgctgtttccaacattcccgacattttcacacctgggttggtgtctatgtggggtctgtgtgttgagaatacctgaacacctgctcctcttaaaa

SEQ ID NO: 25273 - DNA, 120 bp, Artificial Sequence
  ENSG00000035862_39 (sequence is synthesized)
tgagcccggaggttgtgccaggcacagctggagcagtgcagcgcctagatgtggctgtggaaggtgagattaccgcctccagggctcccaggctggctcctaccctgtgggctcctagca

SEQ ID NO: 25274 - DNA, 120 bp, Artificial Sequence
  ENSG00000035862_40 (sequence is synthesized)
ccctatccccaccctccctgcaggaagcatggctgagtgctgggcacctcccaccctgggtcactcccagtgagtctgggaccaggagactctggtgaggctgtggggattggccttccc

SEQ ID NO: 25275 - DNA, 120 bp, Artificial Sequence
  ENSG00000035862_41 (sequence is synthesized)
tggggagctgcctggggctgccctccctcctgacggcccccagccccttctccgcatgttcaaaacaggaattctgaactcatagtctccagccacacgtatgttaagcgaaactcctct

SEQ ID NO: 25276 - DNA, 120 bp, Artificial Sequence
  ENSG00000035862_42 (sequence is synthesized)
gtgcccagcatgaaatcaaaagcaagtttttcctttttctttccacggtggtgaaggcggtcatcctcttgtagcctagggttccttggccaaattgctagttgccgatgacctcggggc

SEQ ID NO: 25277 - DNA, 120 bp, Artificial Sequence
  ENSG00000035862_43 (sequence is synthesized)
tcggcttgcgagcaacactgggctggaatctgtctccaggaaacccaggcccttttattgttgctgtgtcccccagagggcagggccaagctgaggccattctgtcatgctcaggaaggt

SEQ ID NO: 25278 - DNA, 120 bp, Artificial Sequence
  ENSG00000035862_44 (sequence is synthesized)
agaagatggcccaaagggaagcacacctgcagtaggagggggggcagcggtgggcagggcacagcttccctgcaggttagaccccctcgcaggccagctgcctgcccctgcaggaaccgt

SEQ ID NO: 25279 - DNA, 120 bp, Artificial Sequence
  ENSG00000035862_45 (sequence is synthesized)
gcatttgaggggggacgtaattcagcccatacaccaggctgccttctcttattcccagtcaccctttccgtgctcaaccaacttgggataaacaacccaggacatcccagggtagggtcc

SEQ ID NO: 25280 - DNA, 120 bp, Artificial Sequence
  ENSG00000035862_46 (sequence is synthesized)
cggaacaaatcccacagggacgacagcggcctgtctattctccagtgttcgattctcctcgaagcgatgcagtgatcagggccaaagcggtcagtgagaaggaagtggactctggaaacg

SEQ ID NO: 25281 - DNA, 120 bp, Artificial Sequence
  ENSG00000035928_0 (sequence is synthesized)
gtcttcgccttcttgcacttcgcgggagaagttgttggcgcgaatggatcctgagcctcgataacagattcctcaaccggcccacccgccagccagccagcgccttcatcctggggctgc

SEQ ID NO: 25282 - DNA, 120 bp, Artificial Sequence
  ENSG00000035928_1 (sequence is synthesized)
gatggacattcggaaattctttggagtaataccaagtggaaagaaacttgtaagtgaaacagtaaagaagaatgagaaaacaaagtctgatgaagaaactttaaaagcaaagaaaggaat

SEQ ID NO: 25283 - DNA, 120 bp, Artificial Sequence
  ENSG00000035928_2 (sequence is synthesized)
aaaggaaatcaaggtaaatagctcccgtaaagaggatgacttcaaacaaaagcaaccaagcaagaaaaagaggatcatctatgattcagattcagagtcagaggagacgttgcaggtaaa

SEQ ID NO: 25284 - DNA, 120 bp, Artificial Sequence
  ENSG00000035928_3 (sequence is synthesized)
aaatgccaaaaagccaccagaaaaactgccagtatcttctaaacctggtaaaatttcacggcaggatcctgttacatacatttcagaaacagatgaagaagatgactttatgtgtaagaa

SEQ ID NO: 25285 - DNA, 120 bp, Artificial Sequence
  ENSG00000035928_4 (sequence is synthesized)
ggcggcctctaaatcaaaagagaatggaagatctacaaatagtcatcttggaacatcaaacatgaaaaagaatgaagaaaacactaagaccaagaataagcctttatcaccaataaaact

SEQ ID NO: 25286 - DNA, 120 bp, Artificial Sequence
  ENSG00000035928_5 (sequence is synthesized)
tacacccacatcagtacttgattattttggaactggaagtgtccaaagatctaataagaagatggtggcaagcaaaagaaaagagctttcacaaaatacagatgagtctggattaaatga

SEQ ID NO: 25287 - DNA, 120 bp, Artificial Sequence
  ENSG00000035928_6 (sequence is synthesized)
tgaagccatcgccaagcaattacagcttgatgaagatgcggagctggagaggcagttgcatgaagatgaagagtttgccagaacattagccatgttggatgaagaacccaagaccaaaaa

SEQ ID NO: 25288 - DNA, 120 bp, Artificial Sequence
  ENSG00000035928_7 (sequence is synthesized)
ggctcgaaaggacacagaagcgggagaaacgttttcatctgtccaagccaatttaagtaaagcagaaaaacataaatatcctcataaagtaaaaacagcacaagtttcagatgaaagaaa

SEQ ID NO: 25289 - DNA, 120 bp, Artificial Sequence
  ENSG00000035928_8 (sequence is synthesized)
gagctacagtcctaggaagcaaagtaaatatgaaagttcaaaagaatctcagcaacattccaagtcatcagctgacaaaataggagaagtctcttctcccaaggccagttctaagctggc

SEQ ID NO: 25290 - DNA, 120 bp, Artificial Sequence
  ENSG00000035928_9 (sequence is synthesized)
aattatgaaaagaaaagaagagagctcttataaagaaatagagcctgtggcctcaaaaagaaaagaaaatgccattaaattgaaaggagagacaaaaactcctaagaaaaccaaaagttc

SEQ ID NO: 25291 - DNA, 120 bp, Artificial Sequence
  ENSG00000035928_10 (sequence is synthesized)
tccagctaaaaaagagtctgtaagtcctgaagattctgaaaagaaacgcactaattatcaagcttatcgaagctacttaaatcgagaaggtcccaaggctctgggctccaaagaaatacc

SEQ ID NO: 25292 - DNA, 120 bp, Artificial Sequence
  ENSG00000035928_11 (sequence is synthesized)
aaagggagctgaaaattgcttggaaggccttatatttgtaatcacaggcgtgctggagtctattgaacgagatgaggccaagtctctaattgaacgttatgggggaaaagtaacaggaaa

SEQ ID NO: 25293 - DNA, 120 bp, Artificial Sequence
  ENSG00000035928_12 (sequence is synthesized)
tgtcagcaagaaaacaaattatcttgtcatgggtcgtgatagtggacagtccaagagtgataaggccgcagccttggggacaaaaattattgatgaagatggcctgttgaatctgattcg

SEQ ID NO: 25294 - DNA, 120 bp, Artificial Sequence
  ENSG00000035928_13 (sequence is synthesized)
gactatgccaggcaagaaatccaagtatgaaatagcagttgaaactgagatgaagaaagagtccaaactggagagaacaccccaaaaaaatgtccaaggaaaaagaaaaattagtccatc

SEQ ID NO: 25295 - DNA, 120 bp, Artificial Sequence
  ENSG00000035928_14 (sequence is synthesized)
taaaaaggaatcagaatctaaaaagagcaggccgacttccaaaagggacagtttggcaaagacaataaaaaaggaaacagatgtgttttggaaaagcctggatttcaaggagcaggtggc

SEQ ID NO: 25296 - DNA, 120 bp, Artificial Sequence
  ENSG00000035928_15 (sequence is synthesized)
tgaggagacaagtggtgacagcaaggctaggaatttggctgatgacagcagtgaaaacaaagtggaaaatttgctctgggtggataaatataagccaacctcgctcaagaccataattgg

SEQ ID NO: 25297 - DNA, 120 bp, Artificial Sequence
  ENSG00000035928_16 (sequence is synthesized)
acagcaaggtgaccagagctgtgccaacaaactcctacgctggctccgaaactggcaaaagagttcttccgaagataaaaaacacgcaaagtttggtaaattttccggcaaagatgatgg

SEQ ID NO: 25298 - DNA, 120 bp, Artificial Sequence
  ENSG00000035928_17 (sequence is synthesized)
ctctagttttaaagcagcgttgctgtcaggccctcctggtgttggcaaaaccaccacagcttccctggtgtgtcaggagttgggatacagctacgtggaactgaatgcaagtgacacccg

SEQ ID NO: 25299 - DNA, 120 bp, Artificial Sequence
  ENSG00000035928_18 (sequence is synthesized)
gagtaagagcagtttgaaggcgattgttgctgagtcactgaacaataccagcatcaaaggcttttattcaaatggagcagcctcttcagtaagcacgaaacatgctctcatcatggatga

SEQ ID NO: 25300 - DNA, 120 bp, Artificial Sequence
  ENSG00000035928_19 (sequence is synthesized)
agtagatggcatggcaggcaatgaggataggggaggaattcaggaattaattggcctgataaaacatactaaaattcccattatttgtatgtgcaatgatagaaatcatcccaagattcg

SEQ ID NO: 25301 - DNA, 120 bp, Artificial Sequence
  ENSG00000035928_20 (sequence is synthesized)
atgtctattgcatttaaagaaggtttaaagattccccctccagctatgaatgaaataattttgggagccaatcaagatatcagacaggttttacataatctgagtatgtggtgtgcacga

SEQ ID NO: 25302 - DNA, 120 bp, Artificial Sequence
  ENSG00000035928_21 (sequence is synthesized)
agtaaagcattaacctatgaccaggccaaagctgattctcacagagccaaaaaggatatcaaaatgggcccatttgatgttgcccggaaagtgtttgcagctggagaggagactgctcac

SEQ ID NO: 25303 - DNA, 120 bp, Artificial Sequence
  ENSG00000035928_22 (sequence is synthesized)
atgtcacttgtggacaagtcagatctcttttttcatgattattcaatagcacccctcttcgtccaggaaaattacatacacgtgaagcctgtagcagcagggggtgacatgaaaaagcac

SEQ ID NO: 25304 - DNA, 120 bp, Artificial Sequence
  ENSG00000035928_23 (sequence is synthesized)
ctgatgcttttaagcagagcagcagacagcatatgcgatggtgacctagtggacagccagatccggagtaagcaaaactggagtcttctgcctgcgcaggccatttatgccagtgttctt

SEQ ID NO: 25305 - DNA, 120 bp, Artificial Sequence
  ENSG00000035928_24 (sequence is synthesized)
cctggagagttgatgagggggtacatgacccagtttcccaccttcccaagctggctggggaagcactcgtctacaggcaaacatgatcgtattgttcaggacctggccttgcatatgagt

SEQ ID NO: 25306 - DNA, 120 bp, Artificial Sequence
  ENSG00000035928_25 (sequence is synthesized)
ctcagaacttactccagcaaaaggactgtaaacatggattatctgtcgcttctaagggatgcacttgtacagcccttgacctcacaaggagtagacggagtacaggatgttgttgcactt

SEQ ID NO: 25307 - DNA, 120 bp, Artificial Sequence
  ENSG00000035928_26 (sequence is synthesized)
atggacacatattatttgatgaaagaagactttgagaatatcatggaaatcagcagctggggtggcaaacctagtcccttttcaaagctggatcccaaggtgaaagcagccttcacaaga

SEQ ID NO: 25308 - DNA, 120 bp, Artificial Sequence
  ENSG00000035928_27 (sequence is synthesized)
gcttacaataaggaagcccaccttactccatactcacttcaagctataaaggcatctagacacagcacaagcccatccctggattcggaatacaatgaagaattaaatgaagatgactct

SEQ ID NO: 25309 - DNA, 120 bp, Artificial Sequence
  ENSG00000035928_28 (sequence is synthesized)
caatctgatgagaaagaccaagatgctatagaaactgatgccatgatcaagaaaaagacaaaatcttcaaagccttcaaaaccagaaaaagataaggagcccagaaaaggaaaaggaaaa

SEQ ID NO: 25310 - DNA, 120 bp, Artificial Sequence
  ENSG00000035928_29 (sequence is synthesized)
agttcgaagaaatgaaaccatttttcactagcgacagccactttttactctccctcctgaccagtccagctggtctagagaaagccttgttttttcccagagcaaccatgttttagcata

SEQ ID NO: 25311 - DNA, 120 bp, Artificial Sequence
  ENSG00000035928_30 (sequence is synthesized)
atgggatgacctggtgtcccattataaataaagggtggtatggctagaagggtatgagcagtaggcttatgtacacctcttatagaggttgataggactgcttgggtcctccactgtcct

SEQ ID NO: 25312 - DNA, 120 bp, Artificial Sequence
  ENSG00000035928_31 (sequence is synthesized)
ctgtcaatctagttagacgtgcttctgaatgactgtagaattggaactagaaactacacctgggctttggagtcagattttagttaacaataatgagcctgggagcagtagtactaaggc

SEQ ID NO: 25313 - DNA, 120 bp, Artificial Sequence
  ENSG00000035928_32 (sequence is synthesized)
gtcttttgtaggcttaagaatttatcctaatggcctttataggaccaatgctgattttttttaaaggcagttcctattatgtggtgaaattttgtaaataaatgattatacaaaacagtc

SEQ ID NO: 25314 - DNA, 120 bp, Artificial Sequence
  ENSG00000035928_33 (sequence is synthesized)
accacctagaactgggtattctttgtacattgtcagatatctttcaaagtataaattaggaataaaaatgttccacatgatatgtgtacaaattctttttaagattgtcatcttgtacag

SEQ ID NO: 25315 - DNA, 120 bp, Artificial Sequence
  ENSG00000035928_34 (sequence is synthesized)
caaaatattatgttggtatattacttccttattaatttgcaaatgattggattaaaaaagctcactgtattccttactaacctgttgtgtgaaacataacattggcagtcgaggagtcag

SEQ ID NO: 25316 - DNA, 120 bp, Artificial Sequence
  ENSG00000035928_35 (sequence is synthesized)
aactcggattcccagcctcactccctctgtgtgtgttgaccacgtctctgctgtgaataggatttcatgcagtggtctgttatggggctttgcagcgtggggggctgcagaagattctca

SEQ ID NO: 25317 - DNA, 120 bp, Artificial Sequence
  ENSG00000035928_36 (sequence is synthesized)
gacattcttatccttctggagtctcaacccatcaggttcagaccagtaggaaccaggctgggtcaggctcttaatttcactatggtgggggacaaaatgaacactggcttttgttcactt

SEQ ID NO: 25318 - DNA, 120 bp, Artificial Sequence
  ENSG00000035928_37 (sequence is synthesized)
tgcccctgagagatctagtcctgtcctgtgatggcttccacaaaccctgttggaagtttgggttattcctataactgtatgtgttgagtggccgtgaggctatggacctagcctggaatt

SEQ ID NO: 25319 - DNA, 120 bp, Artificial Sequence
  ENSG00000035928_38 (sequence is synthesized)
tagatgtctagctattttttaatcttgttggtaaatgctcagaggtctgtgctacctctgtgaggtatatactaaaatgaatgtaaaataaggatcgtattccctgctttaaggaactgg

SEQ ID NO: 25320 - DNA, 120 bp, Artificial Sequence
  ENSG00000035928_39 (sequence is synthesized)
tagtcttgtttgggtgatgagacaaagttcttgagacatttaaactgtatttaccagtgtgaaaaatgtcatttatggagattaattcattatggaaataaaacattgcctaagcccttg

SEQ ID NO: 25321 - DNA, 60 bp, Artificial Sequence
  ENSG00000035928_40 (sequence is synthesized)
cagcctcccgagcagctgggactgcaggcgcccgccaccaagcctggctagtttttgtat

SEQ ID NO: 25322 - DNA, 120 bp, Artificial Sequence
  ENSG00000035928_41 (sequence is synthesized)
aaaaaagagtctgtaagtcctgaagattctgaaaagaaacgcactaattatcaattatcgaagctacttaaatcgagaaggtcccaaggctctgggctccaaagaaataccaaaggtaag

SEQ ID NO: 25323 - DNA, 120 bp, Artificial Sequence
  ENSG00000035928_42 (sequence is synthesized)
tggtgctatctcagctcactgcaaccttgacttcttgggcttgattgatcccctcaccgcagccccccaagtagctgggactacaggctcgaaaggacacagaagcgggagaaacgtttt

SEQ ID NO: 25324 - DNA, 120 bp, Artificial Sequence
  ENSG00000035928_43 (sequence is synthesized)
gcctggtgaataatagggccttttcagcacatagcagaataacttgaaaatacttcttaagtttttttgttcatcatggttgagggtggagaaggtagagatttcatttttataaagttt

SEQ ID NO: 25325 - DNA, 120 bp, Artificial Sequence
  ENSG00000035928_44 (sequence is synthesized)
cttatggtagtcgaagagccaaacagcaagaaaacaggccatgatattgacggccatatgttctgttagaaaaagtaccatttttatttatctagccattggtgtatgctttcaagaaaa

SEQ ID NO: 25326 - DNA, 120 bp, Artificial Sequence
  ENSG00000035928_45 (sequence is synthesized)
gatggtggcaagcaaaagaaaagagctggagaggcagttgcatgaagatgaagagtttgccagaacattagccatgttggatgaagaacccaagaccaaaaaggtggcataatgttgggc

SEQ ID NO: 25327 - DNA, 120 bp, Artificial Sequence
  ENSG00000035928_46 (sequence is synthesized)
tatttgcgttctgaatatacagtacagatcagtgttcatacttgcgtgttctaggctctagccaaaacatgaataacttttccagaaagaaattaaattattttataaaaatgtttttgg

SEQ ID NO: 25328 - DNA, 120 bp, Artificial Sequence
  ENSG00000035928_47 (sequence is synthesized)
tataaaatggagttttgaaggagcagtggaaagaatggatatatttttttcccctttgagaaagtgctctcattttctttcgagcttttgtttatttttattttagtcttttaaatttag

SEQ ID NO: 25329 - DNA, 120 bp, Artificial Sequence
  ENSG00000035928_48 (sequence is synthesized)
attttagtttttaactacttaatactaacaatttgagagttgagatgaaggagaaataaggcttctacttccagatttacaggttgggatgaagagagataatttttatagatgtatttt

SEQ ID NO: 25330 - DNA, 120 bp, Artificial Sequence
  ENSG00000035928_49 (sequence is synthesized)
tataccctttcatctgtttcctcatttgtaacatgaagtaataaaatatgcctcatttgccttggaaattttgtggatgaatgaatgacagtttattgtagtgtcctgctagttgaaagg

SEQ ID NO: 25331 - DNA, 120 bp, Artificial Sequence
  ENSG00000035928_50 (sequence is synthesized)
cagtgcctgacacattgagtagcagtccaaaggaaaaaataaaaagaaaaacaaagtccataggtgaactttgtaggttacgtgaaacatttgttgatgaaactgttcaaaatatcaaag

SEQ ID NO: 25332 - DNA, 120 bp, Artificial Sequence
  ENSG00000035928_51 (sequence is synthesized)
ttttaaagcttcgggtgaactctagtccctgtcttcatgcccgctggcacagcaaagtttggtaaattttccggcaaagatgatggctctagttttaaagcagcgttgctgtcaggccct

SEQ ID NO: 25333 - DNA, 120 bp, Artificial Sequence
  ENSG00000036054_0 (sequence is synthesized)
acgtggacgtcaacagcaatggcggaaggagaagatgtgccgccgctgccaacgtcgagcggcgacggctgggaaaaagatcttgaagaagctctggaagcaggaggttgtgatcttgaa

SEQ ID NO: 25334 - DNA, 120 bp, Artificial Sequence
  ENSG00000036054_1 (sequence is synthesized)
acgttgagaaatataattcaaggaagaccgctgcctgctgatctgagggccaaagtttggaagattgctctgaatgttgcaggaaaaggtgatagtttggcatcatgggatggtatttta

SEQ ID NO: 25335 - DNA, 120 bp, Artificial Sequence
  ENSG00000036054_2 (sequence is synthesized)
gacttgccagaacagaacactattcacaaagattgcctgcagtttattgaccagctttcagtgccagaggagaaggcagcagaattacttttggatattgaatctgtaattaccttttat

SEQ ID NO: 25336 - DNA, 120 bp, Artificial Sequence
  ENSG00000036054_3 (sequence is synthesized)
tgtaaatcacgtaacattaaatatagcacatcccttagctggatacatctactgaaaccattggtgcatcttcaactgccacgcagcgatttatacaactgcttttatgccataatgaat

SEQ ID NO: 25337 - DNA, 120 bp, Artificial Sequence
  ENSG00000036054_4 (sequence is synthesized)
aagtacattcccagggattgttcccagaaagggagaccatttcatctcttcaggttgctcatccaataccatgagcctgagctttgttcttatcttgatacaaagaaaattactccagac

SEQ ID NO: 25338 - DNA, 120 bp, Artificial Sequence
  ENSG00000036054_5 (sequence is synthesized)
tcctatgcactcaactggcttggaagtctttttgcatgttactgttccactgaagtcactcaggcaatatgggatggatatctacaacaagcagatccattttttatttatttcttaatg

SEQ ID NO: 25339 - DNA, 120 bp, Artificial Sequence
  ENSG00000036054_6 (sequence is synthesized)
ttaattatccttgttaatgcaaaagaagttattttaacacaagagtcagacagcaaagaagaagttatcaagttcttggaaaatactccatccagtctgaatatagaagatatagaagac

SEQ ID NO: 25340 - DNA, 120 bp, Artificial Sequence
  ENSG00000036054_7 (sequence is synthesized)
cttttctctctggctcagtattattgcagcaaaacaccggcttcttttaggaaggataatcaccatctctttggtagtactttgttgggaattaaggatgatgatgcagatctgagtcag

SEQ ID NO: 25341 - DNA, 120 bp, Artificial Sequence
  ENSG00000036054_8 (sequence is synthesized)
gctctttgtctggccatctccgtgtcagagatccttcaagcgaatcagctacaaggggaaggagtccggttctttgtggtggattgccgtcctgcagaacaatataatgctgggcattta

SEQ ID NO: 25342 - DNA, 120 bp, Artificial Sequence
  ENSG00000036054_9 (sequence is synthesized)
tcaactgctttccacttagattcagacctgatgcttcagaatccatctgagtttgcacagtcagtaaaatccttgctggaagcacagaagcagtccattgagtctggctccatagctggt

SEQ ID NO: 25343 - DNA, 120 bp, Artificial Sequence
  ENSG00000036054_10 (sequence is synthesized)
ggggagcacctctgttttatgggcagtggcagggaggaagaagacatgtatatgaacatggtcctggcacactttttacagaaaaacaaagaatatgtgagtattgccagtggaggattt

SEQ ID NO: 25344 - DNA, 120 bp, Artificial Sequence
  ENSG00000036054_11 (sequence is synthesized)
atggcactgcagcagcacctggcagacattaatgtggatggaccagaaaatggatatggccattggattgctagtacctcaggctcaaggagcagtatcaattctgttgatggtgaatct

SEQ ID NO: 25345 - DNA, 120 bp, Artificial Sequence
  ENSG00000036054_12 (sequence is synthesized)
cctaatggctcaagtgatagaggaatgaaatcactagtaaataaaatgactgtggctttgaagacaaaatccgttaatgtcagggaaaaagttatcagttttatagagaatacatcaact

SEQ ID NO: 25346 - DNA, 120 bp, Artificial Sequence
  ENSG00000036054_13 (sequence is synthesized)
cctgtggatcggcatgtgagcagcagtgacagagtgggcaagccttaccgtggcgtaaagcctgttttcagcattggggatgaagaagaatacgacacagatgaaattgacagttcttca

SEQ ID NO: 25347 - DNA, 120 bp, Artificial Sequence
  ENSG00000036054_14 (sequence is synthesized)
atgtcagatgatgatagaaaagaggttgtaaacattcagacttggataaacaaaccagatgtcaaacatcattttccttgtaaagaagtaaaagaaagtggacacatgtttcccagtcat

SEQ ID NO: 25348 - DNA, 120 bp, Artificial Sequence
  ENSG00000036054_15 (sequence is synthesized)
attggcttatatacagtctcgacaagcgctgaattctgtagttaaaattacatccaaaaaaaaacatcctgaactcattaccttcaagtatggaaatagcagtgcttcaggaatagaaat

SEQ ID NO: 25349 - DNA, 120 bp, Artificial Sequence
  ENSG00000036054_16 (sequence is synthesized)
cttggcaatcgaaaggtatttgattccaaatgcaggggatgcaactaaagccataaaacagcagatcatgaaagttttggatgctttggaaagttaatataaaagaaaattatataaaaa

SEQ ID NO: 25350 - DNA, 120 bp, Artificial Sequence
  ENSG00000036054_17 (sequence is synthesized)
gaaattaagacaaccaagagaaacatggacatatacctcctgactgaatactaactggagacctttcatttgctcatggggctgcttaaatagcaggtctaagaaagtgtaaattattat

SEQ ID NO: 25351 - DNA, 120 bp, Artificial Sequence
  ENSG00000036054_18 (sequence is synthesized)
aatcaatctgtggacagtaaactttttaaaaatttttcttctgcattttggttttataaaatgatgtattataaaggtcagttattaaattactttgaagtaactgaccctgtgccctta

SEQ ID NO: 25352 - DNA, 120 bp, Artificial Sequence
  ENSG00000036054_19 (sequence is synthesized)
tggactaagtaagggtacagaatgcagttctgttttgaagagctgttttaagggaacatgcatcactttcgggatcaaaaacaactgtacacatacatatctgcagtgtcttcactgaaa

SEQ ID NO: 25353 - DNA, 120 bp, Artificial Sequence
  ENSG00000036054_20 (sequence is synthesized)
attagagatagaattagttgaagagacttccttaattgctacattgttttactcactgagcaatatcagaaactaaaacatagattaataattcactcactgtttctattcttcttaaaa

SEQ ID NO: 25354 - DNA, 120 bp, Artificial Sequence
  ENSG00000036054_21 (sequence is synthesized)
agagtgaaatctttttaatggaatggttgaagattcctgccaactcaaaatacagtacagctagtaaaatgttgaaacatcagtttctaaatcacctttgctccattagctaattttttg

SEQ ID NO: 25355 - DNA, 120 bp, Artificial Sequence
  ENSG00000036054_22 (sequence is synthesized)
gacactaaatgcttcaaagataagaaacttcatcctaatgatttctaaagagcagttaaaagcattaaaataagtaggtaggctgttaagattaaaattaacattttggggacagaattg

SEQ ID NO: 25356 - DNA, 120 bp, Artificial Sequence
  ENSG00000036054_23 (sequence is synthesized)
tgtctgtaaaaatgtcattggttttattacaagcggattattttattcatattttaaaacaaatgtttaagccacattgatttatcctcattgaggattatggtctgtgaccacagtaat

SEQ ID NO: 25357 - DNA, 120 bp, Artificial Sequence
  ENSG00000036054_24 (sequence is synthesized)
atccacttatataaatgccaaataatcagagagcttataaagtacaattgtttttgtcatcattttctgaatttctttctcttcttttggttttgtcctctcattgaagttccagtggtt

SEQ ID NO: 25358 - DNA, 120 bp, Artificial Sequence
  ENSG00000036054_25 (sequence is synthesized)
tgaaattagttttggacacattgtcttaatgtactgaaaattgctctgctgtattttgcagcgttcttcatttaatttataatggtccatattagacacatttggtaagagaagtccagg

SEQ ID NO: 25359 - DNA, 120 bp, Artificial Sequence
  ENSG00000036054_26 (sequence is synthesized)
aacacatttagggccatggaatagtattttgtaaaatccatttgggaagttgcaatacccacaatctgacatgtcctaaaatgtaagggattatctctaaggggttgatgggagaaatat

SEQ ID NO: 25360 - DNA, 120 bp, Artificial Sequence
  ENSG00000036054_27 (sequence is synthesized)
ttagatgtaccctgttaacagccagtcattttgatttacttatggaaatcaagtgaataaaaggcaacataatttgggaaattttattctaatatctaataaaaacagtttgagtggttg

SEQ ID NO: 25361 - DNA, 120 bp, Artificial Sequence
  ENSG00000036054_28 (sequence is synthesized)
aagacatctgcatgaaattgcacctaggtgcattacttgatataactctcccctaaaactgttgtaattgcattttttcccttttcttggcacccctttagaaatgtactgaagtctcat

SEQ ID NO: 25362 - DNA, 120 bp, Artificial Sequence
  ENSG00000036054_29 (sequence is synthesized)
ttttcacccatttcagccatgggacatttttcataatattaatgtaaagatgtttgtgttactgtttataaattacaattgtaaataaattactagtttgcccaaaactttgttcttaaa

SEQ ID NO: 25363 - DNA, 120 bp, Artificial Sequence
  ENSG00000036054_30 (sequence is synthesized)
catatttaagagcattcagcctaccaaggccttatgccacttttgctaacataatttctttatcttcttttaatttccttaacatagctctcctaaaactatgggtagtacatggggttt

SEQ ID NO: 25364 - DNA, 120 bp, Artificial Sequence
  ENSG00000036054_31 (sequence is synthesized)
tgggggggtcaggtaaggaataattacattttgtgtgaatattcaaatgatgcttggtaaaaatctttgataacttcttaagtgattatttctctcctaaaattctttgaatataggcat

SEQ ID NO: 25365 - DNA, 120 bp, Artificial Sequence
  ENSG00000036054_32 (sequence is synthesized)
gacggctggtgagtgaaagccggggctaatttccaatgcccctttattcttccttctcaccatcttgccggtccccgaggagccgtctggcgtcggcatggaacggagaggccggtccta

SEQ ID NO: 25366 - DNA, 120 bp, Artificial Sequence
  ENSG00000036054_33 (sequence is synthesized)
ggcgaagtccggtgccctgccctacccctctgccagctgggtgccccctgcctgcctggttctgcccaagggactggggcgggactcccaaggagaggggtgtcatccaggtgctgggcc

SEQ ID NO: 25367 - DNA, 120 bp, Artificial Sequence
  ENSG00000036054_34 (sequence is synthesized)
tcagaacggtcctcctgtgtcgtctgtcagtctccaaagtgtgctggagtgggtggcttcagggctgggtttggccggagtcctggctgtgggagttggagtaggctgaagaaggaagtt

SEQ ID NO: 25368 - DNA, 120 bp, Artificial Sequence
  ENSG00000036054_35 (sequence is synthesized)
tgttggatgcagatctgagtcactaaaatacaatgtgaagaaaagacgttttgaaatgaccactgcgaccttcgcctgagggttcagaggttgacccgaggagaatccctcccacttagt

SEQ ID NO: 25369 - DNA, 120 bp, Artificial Sequence
  ENSG00000036054_36 (sequence is synthesized)
aactaagggtaaaatgagagtaaattgactgtatgaagcctgagatttcccacaagaaaacatgctgtgtataccttggcattacattttggttgctgagaacttttgtttcttagacaa

SEQ ID NO: 25370 - DNA, 120 bp, Artificial Sequence
  ENSG00000036054_37 (sequence is synthesized)
gcctttaataggccatgcttataaatgaatcttgaataagaaaaagtatgagataaagttcattttaataaataggacttattttttagggaaaaagatcttgaagaagctctggaagca

SEQ ID NO: 25371 - DNA, 120 bp, Artificial Sequence
  ENSG00000036054_38 (sequence is synthesized)
tttgcatcaatctttgtgtgaatgttcaacttttgttctattgtattatagatacatttataaatatttctcttatcccagggattttatttataagagcctttttttccccttcatttt

SEQ ID NO: 25372 - DNA, 120 bp, Artificial Sequence
  ENSG00000036054_39 (sequence is synthesized)
cattgtggctctttaaatattggggtttttcctaaaaaaaatttcaaatttacaaatatatgtgaaacacaggcttgtcaagtttttaactttaaaaaaattgtctagatgcttcagaat

SEQ ID NO: 25373 - DNA, 120 bp, Artificial Sequence
  ENSG00000036054_40 (sequence is synthesized)
aggtaaaatatgattcagttattgtagtttttaaaagtgaatacaggcctggtttgctttgagctaaagttgctagatttactttggcggtaaagtaaaaggttcaaataattttgagga

SEQ ID NO: 25374 - DNA, 120 bp, Artificial Sequence
  ENSG00000036054_41 (sequence is synthesized)
ttgtttgatccataattgttattttatttttgtggttataaacattttttaaaagattctttagttaaaaatgtatacttctgaaacagtggttatactggggttggagttggggaggaa

SEQ ID NO: 25375 - DNA, 120 bp, Artificial Sequence
  ENSG00000036257_0 (sequence is synthesized)
gaggacgacgttcggcctgcgcagtgagatgtttgtccgtcgccgccgccgccgccatcgcggaggagcgcgataaagggagccgagccggacgtgagggggaccccgcggagccgccgc

SEQ ID NO: 25376 - DNA, 80 bp, Artificial Sequence
  ENSG00000036257_1 (sequence is synthesized)
cgtgagggggaccccgcggagccgccgcgccagcgcagccccccagccgcatcggagtcgccagagtccgagccgccgcc

SEQ ID NO: 25377 - DNA, 120 bp, Artificial Sequence
  ENSG00000036257_2 (sequence is synthesized)
gggtcgcgccgccgccgcccccagcgtcgcccctagcctgcctgcccgccttaaatgtgacaccggcgtcgcggagcgcgacctgaagccgccgccggggaggggacgagcaccatgtcg

SEQ ID NO: 25378 - DNA, 120 bp, Artificial Sequence
  ENSG00000036257_3 (sequence is synthesized)
aatctgagcaaaggcacgggcagccggaaggacaccaagatgcggatccgggcctttccgatgaccatggatgaaaaatatgtaaacagcatttgggaccttctgaaaaatgcaattcaa

SEQ ID NO: 25379 - DNA, 120 bp, Artificial Sequence
  ENSG00000036257_4 (sequence is synthesized)
gaaatccagcgtaagaataacagtggtcttagttttgaggagctctatagaaatgcatatacaatggttttgcataaacatggagaaaagctctacactggactaagagaagttgttacc

SEQ ID NO: 25380 - DNA, 120 bp, Artificial Sequence
  ENSG00000036257_5 (sequence is synthesized)
gaacatctcataaataaggtgcgagaagatgtactaaattcattgaataacaactttcttcaaacgctaaatcaagcttggaatgatcatcaaacagctatggtgatgattagagacata

SEQ ID NO: 25381 - DNA, 120 bp, Artificial Sequence
  ENSG00000036257_6 (sequence is synthesized)
ctaatgtacatggaccgtgtgtatgtacaacaaaataatgtggagaacgtctacaatttgggattaattatttttcgagatcaagttgtacgttatgggtgtattagggatcatctacgg

SEQ ID NO: 25382 - DNA, 120 bp, Artificial Sequence
  ENSG00000036257_7 (sequence is synthesized)
caaactctattggatatgattgcaagagagcggaaaggagaagtcgtagacagaggcgcaataagaaatgcttgccagatgttaatgattttaggtctcgaaggaagatcagtctatgaa

SEQ ID NO: 25383 - DNA, 120 bp, Artificial Sequence
  ENSG00000036257_8 (sequence is synthesized)
gaagattttgaggctccttttttggaaatgtctgcagaattttttcagatggaaagccagaaatttttagcagaaaatagtgcttcagtatatataaagaaagtagaagctagaattaat

SEQ ID NO: 25384 - DNA, 120 bp, Artificial Sequence
  ENSG00000036257_9 (sequence is synthesized)
gaagaaatagaacgagtgatgcactgccttgacaaatcaacggaagaaccaattgtaaaggtggttgaaagggaactcatttccaagcacatgaagactatagtagaaatggagaattct

SEQ ID NO: 25385 - DNA, 120 bp, Artificial Sequence
  ENSG00000036257_10 (sequence is synthesized)
gggctagtacatatgttgaaaaatggaaagacagaagaccttggttgcatgtacaagttatttagtcgtgtgccaaatggtttgaaaacaatgtgtgagtgtatgagttcctatttgagg

SEQ ID NO: 25386 - DNA, 120 bp, Artificial Sequence
  ENSG00000036257_11 (sequence is synthesized)
gagcaaggtaaagctcttgtttctgaagaaggagaaggaaagaatcctgttgactatatccagggcttattggatctgaagagtaggttcgatcgcttcctcctggaatcattcaacaat

SEQ ID NO: 25387 - DNA, 120 bp, Artificial Sequence
  ENSG00000036257_12 (sequence is synthesized)
gaccgtctctttaaacaaactattgcgggtgactttgagtattttctcaacctcaactccaggtctcctgaatacctctcattatttattgatgataagctgaaaaagggagtcaaaggg

SEQ ID NO: 25388 - DNA, 120 bp, Artificial Sequence
  ENSG00000036257_13 (sequence is synthesized)
ctaacagaacaagaagtagaaacaatattggataaagcaatggtcctttttaggtttatgcaagaaaaagatgtatttgaacgttattataaacaacacttggcaaggagacttctcaca

SEQ ID NO: 25389 - DNA, 120 bp, Artificial Sequence
  ENSG00000036257_14 (sequence is synthesized)
aataaaagtgtttctgatgactctgaaaaaaacatgatatctaagttaaagactgaatgtggatgtcagttcacgtcaaaactggaaggaatgtttagggatatgagcatctcaaacaca

SEQ ID NO: 25390 - DNA, 120 bp, Artificial Sequence
  ENSG00000036257_15 (sequence is synthesized)
acgatggatgaattcaggcaacatctacaggcaactggtgtatctttaggtggtgttgatcttacagtccgggtgctcacgacaggatattggcccactcagtcagccacaccaaagtgc

SEQ ID NO: 25391 - DNA, 120 bp, Artificial Sequence
  ENSG00000036257_16 (sequence is synthesized)
aacatcccaccagcaccaagacatgcttttgagatattcagaaggttctacttagccaaacacagtggtcgacagctcacactccagcatcatatgggttctgcagatctcaatgccaca

SEQ ID NO: 25392 - DNA, 120 bp, Artificial Sequence
  ENSG00000036257_17 (sequence is synthesized)
ttttatggaccagttaaaaaggaagatggatctgaagttggtgttggaggtgcacaagtaactggctctaatacacggaagcacatattgcaagtttccactttccagatgaccatatta

SEQ ID NO: 25393 - DNA, 120 bp, Artificial Sequence
  ENSG00000036257_18 (sequence is synthesized)
atgctctttaataatagagaaaaatacacatttgaggaaattcagcaagagacagatatccctgaaagagagcttgttagagccctacagtccctcgcctgtggtaaaccaacacagcgg

SEQ ID NO: 25394 - DNA, 120 bp, Artificial Sequence
  ENSG00000036257_19 (sequence is synthesized)
gttcttacaaaagaacccaaatcaaaggaaatagaaaatggtcatatatttacagttaatgatcaattcacatccaaactacacagagtcaagattcaaacagttgctgccaaacaaggt

SEQ ID NO: 25395 - DNA, 120 bp, Artificial Sequence
  ENSG00000036257_20 (sequence is synthesized)
gaatccgacccagagaggaaagaaacaaggcagaaagtagacgacgacagaaaacatgagatagaagctgctatagtgcggataatgaaatctagaaagaagatgcagcacaatgttcta

SEQ ID NO: 25396 - DNA, 120 bp, Artificial Sequence
  ENSG00000036257_21 (sequence is synthesized)
gtagcggaggtaactcagcagttgaaggcgcgattcttaccaagtccagttgttattaagaaacgtattgaaggacttattgagagagaatatttggcacgaacacctgaggatcgcaaa

SEQ ID NO: 25397 - DNA, 120 bp, Artificial Sequence
  ENSG00000036257_22 (sequence is synthesized)
gtatacacatatgtagcataaaatgcgttcagaaatttgatttattcttggactgtactcttcgcatggactgggaagttcttttaaatcattaaatattaagacgaccatctcttctat

SEQ ID NO: 25398 - DNA, 120 bp, Artificial Sequence
  ENSG00000036257_23 (sequence is synthesized)
taaattacagtacatgttctagaccattgagatcaagcctttactccctttgagagtttccaacatcagttgattgagcttcaggctttacaacgtttatccctgtagagatcatcttta

SEQ ID NO: 25399 - DNA, 120 bp, Artificial Sequence
  ENSG00000036257_24 (sequence is synthesized)
cagttcctcgggaaaatgtgaatgtgctgcgttttgttttctttactgtatgaaaacaggaaaataaaagagaaatttagaaaatacagctcattacaataaaattgttggatttcattt

SEQ ID NO: 25400 - DNA, 120 bp, Artificial Sequence
  ENSG00000036257_25 (sequence is synthesized)
ccccaggtcttcagtgttgatgtaaatgtgttttgtagtgttgcttagcactttgcgcattgtgtaagttgggtaacaaaaatggcaaaagaaatgcagatttcccagttatcttgctct

SEQ ID NO: 25401 - DNA, 120 bp, Artificial Sequence
  ENSG00000036257_26 (sequence is synthesized)
gaagacatttctttagctagtcttatttaattttaaaggtttgataaatatacaaagacccaagcatacaatttgagcatgctgtattctaccacttgcacttactcatcttctagcctt

SEQ ID NO: 25402 - DNA, 120 bp, Artificial Sequence
  ENSG00000036257_27 (sequence is synthesized)
atgaccaggaacctttgttttgggctcaagtacacatcctgatttggtttctccctgttgtaatttgagatttcccaaattaagtcttataatgattaggttttgttctgagttatttct

SEQ ID NO: 25403 - DNA, 120 bp, Artificial Sequence
  ENSG00000036257_28 (sequence is synthesized)
aataatttttttgctgttgtactcactgctaatagtggattgtatagggtggtgtttttatttcatttattgtagacaaaaataatgaatttagtatacacatacccactaattcaagta

SEQ ID NO: 25404 - DNA, 120 bp, Artificial Sequence
  ENSG00000036257_29 (sequence is synthesized)
tgtcagagcacaaagttggcagctggttatatttaattcagcccctctgaaaagcacatacagtctatactttgtttataaataccctaggtcctccctgcccctaaatatatattttgg

SEQ ID NO: 25405 - DNA, 120 bp, Artificial Sequence
  ENSG00000036257_30 (sequence is synthesized)
tgaagctgtggtgcactattaattttctgtttcaaaatgcaatctaaagatgcaataaatatgatgaccttgatagttttaatgaaatcttcaattcttgcagctgtgttttggaaagtg

SEQ ID NO: 25406 - DNA, 120 bp, Artificial Sequence
  ENSG00000036257_31 (sequence is synthesized)
attaagcaatatttctcaaacctgatgattcttggatatttagctattgtcctccaaagagtcatcgtttcacgttttcaaacatgtgctttgtgctgaagattcttgtcagatatcctg

SEQ ID NO: 25407 - DNA, 120 bp, Artificial Sequence
  ENSG00000036257_32 (sequence is synthesized)
tgcttccagagtatttttatcttcaattttatttaattttgtttcattttgttttcataagacaatgtttcagatatgtaatggggcaaaccactatagatttctgttggatagaaaaat

SEQ ID NO: 25408 - DNA, 120 bp, Artificial Sequence
  ENSG00000036257_33 (sequence is synthesized)
gaaatgttactaataagtttaaattgacccttcgttgactatcagtactgttgatacatttattagaatgtatgtctcagaagatggtttctgtttaaatttatggtcaagttacaacaa

SEQ ID NO: 25409 - DNA, 120 bp, Artificial Sequence
  ENSG00000036257_34 (sequence is synthesized)
ctgaattctaatatggattaaaaactccacataaatatttttccccatgcgtcttgggttataattttccttttagacttgcaaatatgcttttattgcaattttgtctccatctgtact

SEQ ID NO: 25410 - DNA, 120 bp, Artificial Sequence
  ENSG00000036257_35 (sequence is synthesized)
gtagaattacaagccttgtgctctttatctctacattttccacttctacatgatgcaattaagatgccaatgaaaagtattgtgaacattattctcaggacacttttaccatacttgagt

SEQ ID NO: 25411 - DNA, 120 bp, Artificial Sequence
  ENSG00000036257_36 (sequence is synthesized)
agtactaagtcaggtgtaacatggaaagctaagggtttcaccttctgattttgacataattggaaattttctataatggtaagatgtttataggaaagtaatggtagttcatgtttgaga

SEQ ID NO: 25412 - DNA, 120 bp, Artificial Sequence
  ENSG00000036257_37 (sequence is synthesized)
atttttttattgctttcatttcccagttaaatgatatttaacacctgggaaaacaggacagctcagattgtcgagttagtaaacatgagcgatgtaaaaactttatttgaaatctcctaa

SEQ ID NO: 25413 - DNA, 120 bp, Artificial Sequence
  ENSG00000036257_38 (sequence is synthesized)
gtgagacattaaacattttagtgctagtttaagccattaaaagtaaagtttaagtttacgtcattgtctcaagtgtggctgtaaaaatcagatctagagtttagagacatacttgttaac

SEQ ID NO: 25414 - DNA, 120 bp, Artificial Sequence
  ENSG00000036257_39 (sequence is synthesized)
tttggagcacaggtttgatatttatgcttctaaatacattaaaacatttctgaattgcagttgaatggttggagattgctggcgatgtgatgctgcactgaaaaaactggtcacacaaaa

SEQ ID NO: 25415 - DNA, 120 bp, Artificial Sequence
  ENSG00000036257_40 (sequence is synthesized)
tgtttatatgtttgactgcataagtattattttaggtcataaaggttataacaaaatacatttaacattgctttctttttagcaagaggtcacagatgctattttttctcagtttttaat

SEQ ID NO: 25416 - DNA, 120 bp, Artificial Sequence
  ENSG00000036257_41 (sequence is synthesized)
gctttaatttgaaagaaaaatgcatcctaaccattccatcctgttggtgcagagaaattttggtgatttattagaagacttttaaggagggtggatacatagtttttcaactgcaaaaat

SEQ ID NO: 25417 - DNA, 120 bp, Artificial Sequence
  ENSG00000036257_42 (sequence is synthesized)
catgtcatctcttcagtaactgttaaagtgtaattctctgccttcattatcaagtccaggacagtgtttattttgaatcgttaacattatttaaagactgaaaattcattgcaattaggg

SEQ ID NO: 25418 - DNA, 120 bp, Artificial Sequence
  ENSG00000036257_43 (sequence is synthesized)
aacgcacagcctcacaaaaagtggttgtgattgcaaggattctttatgtcagtgaacttaaaaagggaatgggggaagagatgcatgcctttctaaaggtatgctagagtcacctgtgta

SEQ ID NO: 25419 - DNA, 120 bp, Artificial Sequence
  ENSG00000036257_44 (sequence is synthesized)
gcattgtaattatgtactatcaaacccccaagatgctgatgataggccttctctgtaagaatccttctcatagtgaagcactgttgatgttttgttcaccggatatgttgggtagcagaa

SEQ ID NO: 25420 - DNA, 120 bp, Artificial Sequence
  ENSG00000036257_45 (sequence is synthesized)
aaggcctagaaccagttttaagattatgcctacatctctagaagactagtacactggcatcatcttaggtttctaaatattatttaattccttaatttggaaagcagttttaatgtttac

SEQ ID NO: 25421 - DNA, 120 bp, Artificial Sequence
  ENSG00000036257_46 (sequence is synthesized)
agtttaagatactcattttcagtaactagtgttaaagatttttatctttgcctgtctactgtaacttaagactttcatagaataattttttatagagtatatggtatattgtgtcaatct

SEQ ID NO: 25422 - DNA, 120 bp, Artificial Sequence
  ENSG00000036257_47 (sequence is synthesized)
tggaaggaaagctgttgcatatcaattgtaggtcatgtattttactatatgttgcatagtattttgcattctgtaaatacgaatgttaaaacatttcaggtcagcaaaattagaagtcat

SEQ ID NO: 25423 - DNA, 120 bp, Artificial Sequence
  ENSG00000036257_48 (sequence is synthesized)
ttctagtcctcaaagcagaaataattagaaatgttaacatttaagtgcttatcatatgccagatactattctgaatattttatgtatattcattcatttagttgtcatattggctttatg

SEQ ID NO: 25424 - DNA, 120 bp, Artificial Sequence
  ENSG00000036257_49 (sequence is synthesized)
tgacataactgtcattataccagtgttgtccaaggttgctagcaggaaatggcagagccaggagttggacctaggtttaatcctatccatattccatgttacaaattgacatgattttcc

SEQ ID NO: 25425 - DNA, 120 bp, Artificial Sequence
  ENSG00000036257_50 (sequence is synthesized)
atattaaaaaattttcatttattttgtacctcattcacatgaatagtaatgtgacaaactaaagttaatacatgaagcattgcaatatggaattttgcacatttttgttagctttacatt

SEQ ID NO: 25426 - DNA, 120 bp, Artificial Sequence
  ENSG00000036257_51 (sequence is synthesized)
atttgctgataccaacttttggtaggaaggaaaacagggaaggtgattgctgctattctggaatgtgtccattgaaaagaaaataggcgctttgtctcctacaatcttagagaaagtttt

SEQ ID NO: 25427 - DNA, 120 bp, Artificial Sequence
  ENSG00000036257_52 (sequence is synthesized)
acatacttaagtgggtaccacagataggcatgtaccttaaattcaaatctacagttttacaaaatgttttcctttgtgtgcctttcctatgtcaaattagccagaaggaagaagagacgt

SEQ ID NO: 25428 - DNA, 120 bp, Artificial Sequence
  ENSG00000036257_53 (sequence is synthesized)
taagaatggcagataaatttaacaggtaatgatacagagattggccattacgccagctctcaggagaaaaacaactaggatgtcttgaaacccgtgcatttaattttagaaatggcaaat

SEQ ID NO: 25429 - DNA, 120 bp, Artificial Sequence
  ENSG00000036257_54 (sequence is synthesized)
ttgtaagcgtgtcatttaagtaatttgatgctcagttttagggtctaagttgacctcgagtgagccatgcaaaaatagctttaaaattatacatgagcagctcaaagtaaacgtgtattt

SEQ ID NO: 25430 - DNA, 120 bp, Artificial Sequence
  ENSG00000036257_55 (sequence is synthesized)
tttagtaacaatgaaattgtcaaatttcaagattttaataacaggacagttcaactaataaactttattgcatacaagatttattgcaatgtgggaaaattaaaattctcagtctcagaa

SEQ ID NO: 25431 - DNA, 74 bp, Artificial Sequence
  ENSG00000036257_56 (sequence is synthesized)
gagaatttcaacccagtggatcttagcttgcttgctgggatctgtcggggtgggacccactgaggacggttctc

SEQ ID NO: 25432 - DNA, 120 bp, Artificial Sequence
  ENSG00000036257_57 (sequence is synthesized)
aggacagagttctcagggtgaaaatgatttaaatggctctggaaaagtagtatacaagagatgtaggggaataatgttttctaaaagaaagctacgttatactgaggtgcatttatcata

SEQ ID NO: 25433 - DNA, 120 bp, Artificial Sequence
  ENSG00000036257_58 (sequence is synthesized)
gtgttattcttaaggtgcctttgttttagctcatatctgtatatttgctaagcttgaaaaagctatatttctttctgacatttatttgatgactgtcgatgagcgttcaagagattctat

SEQ ID NO: 25434 - DNA, 120 bp, Artificial Sequence
  ENSG00000036257_59 (sequence is synthesized)
cattgggcactttcctttgttgatgcatgagggattatactgtgctctgggctgtgttaaatctactgacgttctcatttaatcttcatgacagccctttgagatagatgctgttattga

SEQ ID NO: 25435 - DNA, 120 bp, Artificial Sequence
  ENSG00000036257_60 (sequence is synthesized)
acccaggacttaattttctcaaggtcacatggcttgtgagtaacaaagctgtggcacaaacctaaggctgtctgacagcaaaacccatgttctctaccagtatactaactatgtttacca

SEQ ID NO: 25436 - DNA, 120 bp, Artificial Sequence
  ENSG00000036257_61 (sequence is synthesized)
agataatcagtgactgtgatgttactttaccatattagcacaatggaatgtgacattagtccactgatttggactaggttttgggatatataagttctaatcccagctctatgattttgg

SEQ ID NO: 25437 - DNA, 120 bp, Artificial Sequence
  ENSG00000036257_62 (sequence is synthesized)
attaagcatgacccattgctgtgcttaaatgggtgccatggtctattaaaaaatattgtttgaaatacttgacatgcccaaacgtagttagacatttcacttaatgtgtaattggcttca

SEQ ID NO: 25438 - DNA, 120 bp, Artificial Sequence
  ENSG00000036257_63 (sequence is synthesized)
tagtagcagtggaagtggtgagaaagagttgaattctggggatacattttgaagttagagacaacagcattttctgttggagtagtagtggggtcagagagtagttaattatgatcacaa

SEQ ID NO: 25439 - DNA, 120 bp, Artificial Sequence
  ENSG00000036257_64 (sequence is synthesized)
gcattttggccggagcagctggaaggatggagtggacatttgttcagctggaaaagacttcaggggaaaccaactgagggaaaagatgaggagttctgtttcaggcttgatgaccatgga

SEQ ID NO: 25440 - DNA, 120 bp, Artificial Sequence
  ENSG00000036257_65 (sequence is synthesized)
aataatagagaaaaatacacatttgaggtatggattgtggttatatacattttaactgtgttgtttctaactctcacttgttacttgagtctttcttatttgaataacctttagagagtc

SEQ ID NO: 25441 - DNA, 120 bp, Artificial Sequence
  ENSG00000036257_66 (sequence is synthesized)
tctttgggtacttttagagaaaactgtataaaatggatcatggaactgtatgaacatcatacatgtattgagttatgtcttatttttaaattaactttatagaagtacttttatataaaa

SEQ ID NO: 25442 - DNA, 120 bp, Artificial Sequence
  ENSG00000036257_67 (sequence is synthesized)
agtagacaatttgatgagttttaaatgagtgcatctttgtaactaccatcacaagaatattgcccgaaaatacagagcattacctccaaaattgcgttgtaccccttgccagtctattcc

SEQ ID NO: 25443 - DNA, 120 bp, Artificial Sequence
  ENSG00000036257_68 (sequence is synthesized)
ctcctaccacctccagccccaggcagccagtgacctgctttatatcactataaattagttttgtttttttttagactttcatgtaaatggaatcatacatgttgtctgtatgctttaatc

SEQ ID NO: 25444 - DNA, 120 bp, Artificial Sequence
  ENSG00000036257_69 (sequence is synthesized)
ctttgtcagttcacctgcatttgggttgataccggatttaggctaagtagagctatatgtttaacattttaagaaactgccgaactgtatcccaaagcaactataccattttccttattt

SEQ ID NO: 25445 - DNA, 120 bp, Artificial Sequence
  ENSG00000036257_70 (sequence is synthesized)
gccagcagtgcaagacggtccagtcgctctacatcatctgcagtctttagattttgagccgctttagttggtgtgtaatagtgtctcattttggatttaattttcttttttttttttgat

SEQ ID NO: 25446 - DNA, 120 bp, Artificial Sequence
  ENSG00000036257_71 (sequence is synthesized)
gatgatgttgagcatcttttatgtgttaatatgccactgatatatcttgtttggtgaagtgtttgtatcttttttgagttgttttcttactacattgtaaaagttctttataaattctgg

SEQ ID NO: 25447 - DNA, 120 bp, Artificial Sequence
  ENSG00000036257_72 (sequence is synthesized)
gtagaaaattattcacagaggactaaagacttcttgtcctttgtatgtagtagatgttaagaattcacttcttttcatttagttttaatttgtctcatgatgtagttctctcagtaatca

SEQ ID NO: 25448 - DNA, 120 bp, Artificial Sequence
  ENSG00000036257_73 (sequence is synthesized)
caccaccaccaccaccaccaccacctgcctttctcaaattccatcccccagcgtgcatataggtcatatataggcacttgcacaacaaccccttctgctgcactcaagtgaggagtgttg

SEQ ID NO: 25449 - DNA, 120 bp, Artificial Sequence
  ENSG00000036257_74 (sequence is synthesized)
tgttaggctccagagtgagcccctcccctcccatttaaaaagaatactcattttgactcatcagcacgatctgcacatccatgtttttctgcaggtatttaagaagacacttatttaggt

SEQ ID NO: 25450 - DNA, 120 bp, Artificial Sequence
  ENSG00000036257_75 (sequence is synthesized)
gaccacatccagatgagccaaagggattgtttaaacaactacttttttccctgcaactttgtattttttgttttcaaatccacaaagaaagtgaaaagcactataatgaatatcaatatg

SEQ ID NO: 25451 - DNA, 120 bp, Artificial Sequence
  ENSG00000036257_76 (sequence is synthesized)
gctgtgacctacgtttaccagtcattagaattttgtcttcctccctgccttcctctgtgtgtgtgtatgtgtttgctacagcatttgaagttaatttacaaatatctcagtagtttcccc

SEQ ID NO: 25452 - DNA, 120 bp, Artificial Sequence
  ENSG00000036257_77 (sequence is synthesized)
ctaaaaaactttagcacacgtctcctatatcatatccaagaaaattaatttcatgtcatctgtttaccacccatattgcctcagttgtctcaaaaatttcttttatatctcactttttgg

SEQ ID NO: 25453 - DNA, 120 bp, Artificial Sequence
  ENSG00000036257_78 (sequence is synthesized)
atccatgattccatcaagatttccacattacatttaatttttatgtctttttagtttcatttaaaccagtacctctatctttttattttttcatgacatcaacttctgaggaaaagcatc

SEQ ID NO: 25454 - DNA, 120 bp, Artificial Sequence
  ENSG00000036257_79 (sequence is synthesized)
ataagcatcattcttagtagattattttcatcgaattttttttttttttactaagatattgattatcttacacttgggaaatgacaccgaaagcagtatttttatccaaaggattctaat

SEQ ID NO: 25455 - DNA, 120 bp, Artificial Sequence
  ENSG00000036257_80 (sequence is synthesized)
tagaaacagttgaatggatacgcacaccagaatgatcttctaaattgtacaatctgctgtctcgtggctatctatgcccatgcctcagtcagcaatgccccatgtgctgctttgcaattt

SEQ ID NO: 25456 - DNA, 120 bp, Artificial Sequence
  ENSG00000036257_81 (sequence is synthesized)
tacggtttctacctccagaaacttcacatctatctccttttggtgaacgaataaaacaccagttttctttttctgctatttcattcagagcagagttgcaggagaagacgacttctgtat

SEQ ID NO: 25457 - DNA, 120 bp, Artificial Sequence
  ENSG00000036257_82 (sequence is synthesized)
ttcccttaacagttgctttgaagactatagggaagaatagagtaagactcctaaagattggaatctggtatgaatttgtgatgaggttgtgacataaaaagcataataaaatatatgaca

SEQ ID NO: 25458 - DNA, 120 bp, Artificial Sequence
  ENSG00000036257_83 (sequence is synthesized)
agaaatggttagataacagaactctagggagatttttggcaaggagattttaggaactgacatcctagtggtacttttaaattatttatttcactgactgaatcttggcagtacatactc

SEQ ID NO: 25459 - DNA, 120 bp, Artificial Sequence
  ENSG00000036257_84 (sequence is synthesized)
ttgtctcctcataaagccttagagattacagctacattttgagttagtaagacaacagatacctatctgagataattttggtgagttttaacttggagccatggtaataaaataatcaat

SEQ ID NO: 25460 - DNA, 120 bp, Artificial Sequence
  ENSG00000036257_85 (sequence is synthesized)
tgacctctgatagtcataagcaatgaaaattatttactggtaattttactactgaatattttcagctactgtttttcttccaggtaagaaattatattctgcataaaaacaaaatcaact

SEQ ID NO: 25461 - DNA, 120 bp, Artificial Sequence
  ENSG00000036257_86 (sequence is synthesized)
ttattatctcaaagttaaattcctcatttttgaaaaggataatttagtattcaagtaaacattaagacagtttctgaatgcgtacttgaattaataagtgtgtatattcagaggctgaaa

SEQ ID NO: 25462 - DNA, 120 bp, Artificial Sequence
  ENSG00000036257_87 (sequence is synthesized)
agtagagagtgacaagagccaaggacagagttctcagggtgaaaatgatttaaatggctctggaaaagtagtatacaagagatgtaggggaataatgttttctaaaagaaagctacgtta

SEQ ID NO: 25463 - DNA, 120 bp, Artificial Sequence
  ENSG00000036257_88 (sequence is synthesized)
agtcagcttgctccagcagttatttctcttcagacctccatctctcccttgggtttcctcccttgtagtaaatgatcttactttctatttctcagagaaaagagaaagcatcaggaccgt

SEQ ID NO: 25464 - DNA, 120 bp, Artificial Sequence
  ENSG00000036257_89 (sequence is synthesized)
aaaaaaaaatagaaataaaaaaataaagtaagggcaatggcctttttactgtttggattataacaaattattgccttttgtttgcacagttgaggctttcagtgagcttaaatgaaaaat

SEQ ID NO: 25465 - DNA, 120 bp, Artificial Sequence
  ENSG00000036257_90 (sequence is synthesized)
tccgtcttttggctgtgtaagtttttgcctgcatatgcaaaggcttcataaaataatctctgtgactaaaatttcatttcatctgttctcaatcatcccttaacccagcgctatattacc

SEQ ID NO: 25466 - DNA, 120 bp, Artificial Sequence
  ENSG00000036257_91 (sequence is synthesized)
ttatgcctccaattcagtggtagccctctacggaatagaattccactccaacccctcattcatgatgcactaaatgagaatgtaagaatgatgctactgtgtgaagtaggagacactttc

SEQ ID NO: 25467 - DNA, 120 bp, Artificial Sequence
  ENSG00000036448_0 (sequence is synthesized)
agggaggcacaggcgcttgctttgcaggagtcagctctgccttcctcggctggagtgtgggtggcttggtgagccggtggtcaggaattctctctcctccttgcaattttcctttctgtc

SEQ ID NO: 25468 - DNA, 120 bp, Artificial Sequence
  ENSG00000036448_1 (sequence is synthesized)
tgggagcacgccaagatgtcccttgtgactgtccccttctaccagaagagacataggcacttcgaccagtcctaccgtaatattcaaacacggtacctgctggacgaatatgcgtcaaaa

SEQ ID NO: 25469 - DNA, 120 bp, Artificial Sequence
  ENSG00000036448_2 (sequence is synthesized)
aagcgagcttccacccaggcatcttcccagaagtccttgagtcagcggtcgtcttcacagagagcctccagccagacgtccctgggaggaaccatctgcagggtctgtgcgaagcgagtg

SEQ ID NO: 25470 - DNA, 120 bp, Artificial Sequence
  ENSG00000036448_3 (sequence is synthesized)
agcacgcaggaagatgaggagcaggagaacagaagcaggtaccagtccctggtggccgcctatggtgaggccaagcgacagcgcttcctcagcgagctggcccacttggaggaggatgtc

SEQ ID NO: 25471 - DNA, 120 bp, Artificial Sequence
  ENSG00000036448_4 (sequence is synthesized)
cacctggcacgctcccaggcccgcgacaagctggacaaatacgccattcagcagatgatggaggacaagctggcctgggagagacacacatttgaagagcggataagcagggctcctgag

SEQ ID NO: 25472 - DNA, 120 bp, Artificial Sequence
  ENSG00000036448_5 (sequence is synthesized)
atcctggtgcggctgcgatcccacaccgtctgggagaggatgtctgtgaaactctgcttcaccgtgcaaggatttcccacgcccgtggtgcagtggtacaaagatggcagtctgatttgc

SEQ ID NO: 25473 - DNA, 120 bp, Artificial Sequence
  ENSG00000036448_6 (sequence is synthesized)
caggcggctgaaccgggaaagtacaggattgagagcaactatggcgtacacacactggagatcaacagggcagactttgacgacactgcgacatactcagcagtggccaccaatgcccac

SEQ ID NO: 25474 - DNA, 120 bp, Artificial Sequence
  ENSG00000036448_7 (sequence is synthesized)
ggacaagtgtccaccaacgcggcggtggtggtgagaaggttccggggagacgaggaaccattccgttcggtgggactcccgattggattgcccctgtcatcgatgattccgtacacgcac

SEQ ID NO: 25475 - DNA, 120 bp, Artificial Sequence
  ENSG00000036448_8 (sequence is synthesized)
ttcgacgtccagtttttggagaagtttggggtcaccttcaggagggaaggcgagacggtcactctcaagtgcaccatgctggtgacgccggacctgaagcgggtgcagccgcgcgccgag

SEQ ID NO: 25476 - DNA, 120 bp, Artificial Sequence
  ENSG00000036448_9 (sequence is synthesized)
tggtaccgcgatgacgtgctgttgaaagagtccaagtggacgaagatgttctttggagaaggccaggcctccctgtccttcagccacctgcacaaggacgacgagggcctgtacaccctg

SEQ ID NO: 25477 - DNA, 120 bp, Artificial Sequence
  ENSG00000036448_10 (sequence is synthesized)
cgcatcgtgtctcggggcggcgtcagcgaccacagcgccttcctgtttgtcagagatgctgacccgctggtcacaggggcccccggtgcacccatggacttgcagtgccacgacgccaac

SEQ ID NO: 25478 - DNA, 120 bp, Artificial Sequence
  ENSG00000036448_11 (sequence is synthesized)
cgggactacgtcatcgtgacctggaagccgcccaacaccaccactgagagccccgtcatgggctattttgtggaccgatgtgaagtaggaacgaataattgggtgcagtgcaatgatgca

SEQ ID NO: 25479 - DNA, 120 bp, Artificial Sequence
  ENSG00000036448_12 (sequence is synthesized)
ccggtgaaaatctgcaaatacccggtcacagggctttttgaaggaaggtcttacatattccgagtgagggcagtgaacagtgcgggcatcagccgaccctccagggtctctgatgcggtg

SEQ ID NO: 25480 - DNA, 120 bp, Artificial Sequence
  ENSG00000036448_13 (sequence is synthesized)
gctgcacttgaccccttggacctcagaaggttacaagccgttcatttggagggagagaaggagattgccatttatcaggatgaccttgaaggtgacgcccaggttccagggcctcccacc

SEQ ID NO: 25481 - DNA, 120 bp, Artificial Sequence
  ENSG00000036448_14 (sequence is synthesized)
ggtgtgcacgcttccgagatcagcagaaactatgtcgtcctcagctgggagccacccactccccgtggcaaggacccgctcatgtacttcattgagaagtccgtggtggggagcggcagc

SEQ ID NO: 25482 - DNA, 120 bp, Artificial Sequence
  ENSG00000036448_15 (sequence is synthesized)
tggcagagagtcaacgcccagacggctgtgagatccccgagatatgccgtgtttgacctcatggaagggaagtcttatgtgttccgagtgctgtcagcaaaccggcatggcctgagcgaa

SEQ ID NO: 25483 - DNA, 120 bp, Artificial Sequence
  ENSG00000036448_16 (sequence is synthesized)
ccttcggagataacgtcccccattcaggcccaggatgtgaccgttgtcccttctgctccgggtcgggttcttgcttcccgaaacaccaagacgtcggtggtggtgcagtgggaccgacct

SEQ ID NO: 25484 - DNA, 120 bp, Artificial Sequence
  ENSG00000036448_17 (sequence is synthesized)
aagcatgaggaggacctgctgggctactacgtggactgctgtgtggccggaaccaacctctgggagccctgcaaccacaagcccatcggatacaacaggttcgtggtgcacggcttaacc

SEQ ID NO: 25485 - DNA, 120 bp, Artificial Sequence
  ENSG00000036448_18 (sequence is synthesized)
acgggagagcagtacatcttccgagtcaaggcggtcaatgctgtggggatgagtgaaaattcccaggaatcagacgtcataaaagtgcaggccgcactcaccgtcccgtcccatccttat

SEQ ID NO: 25486 - DNA, 120 bp, Artificial Sequence
  ENSG00000036448_19 (sequence is synthesized)
gggattacgctcctcaactgtgacggccactccatgaccctcggctggaaggtcccgaaattcagtggtggctcgcccatcctgggctactacctggacaagcgtgaagttcaccataaa

SEQ ID NO: 25487 - DNA, 120 bp, Artificial Sequence
  ENSG00000036448_20 (sequence is synthesized)
tcgccgccgtcaacctggccggcatcggggagccctcagatcccagtgagcacttcaagtgtgaggcctggaccatgccggagcccggtcctgcctacgacttgacgttctgtgaggtca

SEQ ID NO: 25488 - DNA, 120 bp, Artificial Sequence
  ENSG00000036448_21 (sequence is synthesized)
gggacacgtccttggtcatgctgtggaaggcccctgtgtactccggcagcagccctgtttctggatatttcgtggacttcagggaggaggatgctggagagtggatcactgtcaatcaga

SEQ ID NO: 25489 - DNA, 120 bp, Artificial Sequence
  ENSG00000036448_22 (sequence is synthesized)
cgacaacagccagccgttatttaaaggtctctgacctgcagcaaggtaagacctatgtcttcagggtccgggcagtcaatgcaaatggcgtggggaagccctcagacacgtcggagcctg

SEQ ID NO: 25490 - DNA, 120 bp, Artificial Sequence
  ENSG00000036448_23 (sequence is synthesized)
tgctggtagaggcgagaccaggcaccaaggaaatcagtgctggtgtcgatgaacaaggcaacatctatctgggcttcgactgccaggaaatgacagacgcgtctcagttcacctggtgta

SEQ ID NO: 25491 - DNA, 120 bp, Artificial Sequence
  ENSG00000036448_24 (sequence is synthesized)
aatcctacgaggagatttcagatgatgagaggtttaaaattgaaaccgtgggggatcactccaagctgtacttaaagaatccggataaggaggatttagggacttactccgtgtctgtaa

SEQ ID NO: 25492 - DNA, 120 bp, Artificial Sequence
  ENSG00000036448_25 (sequence is synthesized)
gtgatacagacggagtgtcctccagttttgttctggacccagaagagctcgagcgtttgatggcattgagcaatgaaataaagaaccccacaattcctctgaaatcggaattagcttatg

SEQ ID NO: 25493 - DNA, 120 bp, Artificial Sequence
  ENSG00000036448_26 (sequence is synthesized)
agatttttgataaggggcgggttcgcttctggctccaggctgagcacttatcaccagatgccagctaccgatttattattaacgacagagaagtctctgacagcgagatacacagaatta

SEQ ID NO: 25494 - DNA, 120 bp, Artificial Sequence
  ENSG00000036448_27 (sequence is synthesized)
aatgtgacaaagctactggcattattgagatggtgatggatcgatttagtattgaaaatgaggggacctacactgtgcagattcatgatgggaaagccaaaagtcagtcttctctagttc

SEQ ID NO: 25495 - DNA, 120 bp, Artificial Sequence
  ENSG00000036448_28 (sequence is synthesized)
ttattggagatgcattcaagactgtgctggaagaggctgagtttcaaaggaaagaatttctcaggaaacaaggccctcattttgctgagtacttgcactgggatgtcacggaagaatgtg

SEQ ID NO: 25496 - DNA, 120 bp, Artificial Sequence
  ENSG00000036448_29 (sequence is synthesized)
aagttcgacttgtttgcaaggttgcaaacaccaagaaagaaaccgttttcaaatggctcaaggatgatgttctgtatgaaacggagacactgcctaacctggagaggggaatctgtgagc

SEQ ID NO: 25497 - DNA, 120 bp, Artificial Sequence
  ENSG00000036448_30 (sequence is synthesized)
tcctcatcccaaagttgtcaaagaaggaccacggtgaatacaaggcaaccttgaaagatgacagaggccaagatgtgtccatccttgaaatagctggcaaagtgtatgatgatatgattt

SEQ ID NO: 25498 - DNA, 120 bp, Artificial Sequence
  ENSG00000036448_31 (sequence is synthesized)
tggcaatgagtagagtctgtgggaaatctgcttcgccactgaaggtactctgcaccccagaaggaatacgacttcagtgtttcatgaagtattttacagacgaaatgaaagtgaactggt

SEQ ID NO: 25499 - DNA, 120 bp, Artificial Sequence
  ENSG00000036448_32 (sequence is synthesized)
gtcacaaagatgctaagatctcatccagtgagcatatgagaatcggggggagtgaagagatggcttggctgcagatatgtgagccgactgagaaggataaaggaaaatacacttttgaga

SEQ ID NO: 25500 - DNA, 120 bp, Artificial Sequence
  ENSG00000036448_33 (sequence is synthesized)
ttttcgatggcaaagacaaccatcaacgctcccttgacctgtccggacaagcttttgatgaagcatttgcagaattccagcaattcaaagctgctgcttttgcagagaagaatcgtggca

SEQ ID NO: 25501 - DNA, 120 bp, Artificial Sequence
  ENSG00000036448_34 (sequence is synthesized)
ggttgatcggcggcttgcctgacgtggtgaccatcatggaagggaagaccttgaatctgacctgcacggtgtttggaaaccctgaccccgaagtgatttggttcaagaacgaccaggaca

SEQ ID NO: 25502 - DNA, 120 bp, Artificial Sequence
  ENSG00000036448_35 (sequence is synthesized)
tccagctcagcgagcacttctcggtgaaggtggagcaggccaagtacgtcagcatgaccatcaaaggcgtgacctccgaggactcgggcaagtacagcatcaacatcaagaataagtatg

SEQ ID NO: 25503 - DNA, 120 bp, Artificial Sequence
  ENSG00000036448_36 (sequence is synthesized)
gcggggagaagatcgacgtgacagtgagcgtgtacaaacacggggagaagatcccggacatggccccgccccagcaagccaagcccaagctcatccccgcgtctgcctcagcggcaggcc

SEQ ID NO: 25504 - DNA, 120 bp, Artificial Sequence
  ENSG00000036448_37 (sequence is synthesized)
agtgaaggcgttttcctagcctggagatgggaaaatatgcttggcagagacaggaatgctgtgtgcttgttccaaatgagcagctggcatccgagtggtgtcctgtgtgggctgatagtt

SEQ ID NO: 25505 - DNA, 120 bp, Artificial Sequence
  ENSG00000036448_38 (sequence is synthesized)
gatcacacattgtgcttttgatttttgcatttggtgatgaatattttatacccgtctaagggagaaagctaatgttttccacaagactgaacaacgtgtatttacacgagggtagacggc

SEQ ID NO: 25506 - DNA, 120 bp, Artificial Sequence
  ENSG00000036448_39 (sequence is synthesized)
agatgcctgacagagagtgggttggcagacaacacactagaattttcacgggtgtgggcacatgggtgtggcacctggacgtgtgcagcatgtggcggtctgtgtgaagccaccgtgctt

SEQ ID NO: 25507 - DNA, 120 bp, Artificial Sequence
  ENSG00000036448_40 (sequence is synthesized)
ctctttggggggccgcgagatctagcatctctgaaatcctggctgtcgaggctttgaagcatgtgttacctggttaagcttgttttctcttgctttaggcaaataaaagtttaaaaatca

SEQ ID NO: 25508 - DNA, 120 bp, Artificial Sequence
  ENSG00000036448_41 (sequence is synthesized)
attctcaaaaatctaataactaggattgatatttccctacaatttgcaggtattcttcctcacaaggattcatgcattattgacttgcgatttcttttcttcctgtagcaattcctctga

SEQ ID NO: 25509 - DNA, 120 bp, Artificial Sequence
  ENSG00000036448_42 (sequence is synthesized)
gtacctcggcgtgacgcggtggcgcagccgcaggcaggcagtacctcggcgtgacgccatgacgcagccggagagagcttcacgcacaccatctcttcgttcttcctcaactctgtcacg

SEQ ID NO: 25510 - DNA, 120 bp, Artificial Sequence
  ENSG00000036448_43 (sequence is synthesized)
agagatggtaactccagcagggcagtttcatatccaccgagagaaggagatttaggatacacatccagcagttaaaaccagcaggggctggcaagtagctgggtgtgggtgagagggaag

SEQ ID NO: 25511 - DNA, 120 bp, Artificial Sequence
  ENSG00000036448_44 (sequence is synthesized)
tgtactggaggaccgagtgggtgtgatatttcttgagatcagcactgtacggggagggccaagttttagggttttgagaatacattcaatttcacaaagatttagttatatccgtggaat

SEQ ID NO: 25512 - DNA, 120 bp, Artificial Sequence
  ENSG00000036448_45 (sequence is synthesized)
ggtcagtaaggcataaccggctcacgacaggacatgtgaacctggcagcaatgggaaagtcatctggagcatgtggattcatgagatatcgtgtgtggattcatgaggttgcaaacacca

SEQ ID NO: 25513 - DNA, 120 bp, Artificial Sequence
  ENSG00000036448_46 (sequence is synthesized)
ttctctgggtgctgggccctgtggtggggtgggcctgcttccttccctaaagcacagccacgtctgggtccggcacctgagcacaggctgagagggccttccacgggtgacaccttccgg

SEQ ID NO: 25514 - DNA, 120 bp, Artificial Sequence
  ENSG00000036448_47 (sequence is synthesized)
aaaccctttgatgacaggaaacagccagtgtctttagaatgaatgagtcagcttctaagaatcagctacataaatcaactagaagcttagtaaatatatatagatgtttatccaagcagg

SEQ ID NO: 25515 - DNA, 120 bp, Artificial Sequence
  ENSG00000036448_48 (sequence is synthesized)
cttgcctgacgtggtgaccatcatggaagggaagttttccagctttattctttttgtttgagaagcagcaatgttccttccagctttctgcaccctgggtagaagccggaagctccccaa

SEQ ID NO: 25516 - DNA, 120 bp, Artificial Sequence
  ENSG00000036448_49 (sequence is synthesized)
tgaatctagctggaaggccaatgttcttttcaatgtaatgccaaagaaaattcacacttgtttgttctgtagaaaaaagtgacataatattatttttatttttaaatttacttatagtca

SEQ ID NO: 25517 - DNA, 120 bp, Artificial Sequence
  ENSG00000036448_50 (sequence is synthesized)
tatgtgcatgcctgctcaaaaatgctcacccatcatttgcataagtaaatcagtttgtatttaatgttacagtttaagactcatgtttcagaaatacaatttttattaactgaattcaaa

SEQ ID NO: 25518 - DNA, 120 bp, Artificial Sequence
  ENSG00000036448_51 (sequence is synthesized)
gccaaaggacagcctttagagacaggaacatcacaaacaattggggcattctggaaaattcagattgtcagaggagaagaggagaccagctccaggattattaagcagaaaccctcagag

SEQ ID NO: 25519 - DNA, 120 bp, Artificial Sequence
  ENSG00000036448_52 (sequence is synthesized)
gcaggagtcagctctgccttcctcggctggagtgtgggtggcttggtgagccggtggtcaggaattctctctcctccttgcaattttcctttctgtctggtccgtggtggggagcggcag

SEQ ID NO: 25520 - DNA, 120 bp, Artificial Sequence
  ENSG00000036448_53 (sequence is synthesized)
gcgtgtcctgaggcttggtttgccagttgataaagtggaagtttggcatccagacactgtagctctcatttcccgttggagtaaagacacagatgctcttttccatggtctcgtgttttc

SEQ ID NO: 25521 - DNA, 120 bp, Artificial Sequence
  ENSG00000036448_54 (sequence is synthesized)
cttgctttcagcaaggcaggtttctggctgactgggcctgtgtcctcctccgtgggaggcggttgtgaatgtggcaggatttattcatcctcaggggacttttccaagtctgtgtttatg

SEQ ID NO: 25522 - DNA, 120 bp, Artificial Sequence
  ENSG00000036473_0 (sequence is synthesized)
aacacatttcttagtttttaggtggcccccgctggctaacttgctgtggagttttcaagggcatagaatcgtcctttacacaattaaaagaagatgctgtttaatctgaggatcctgtta

SEQ ID NO: 25523 - DNA, 120 bp, Artificial Sequence
  ENSG00000036473_1 (sequence is synthesized)
aacaatgcagcttttagaaatggtcacaacttcatggttcgaaattttcggtgtggacaaccactacaaaataaagtgcagctgaagggccgtgaccttctcactctaaaaaactttacc

SEQ ID NO: 25524 - DNA, 120 bp, Artificial Sequence
  ENSG00000036473_2 (sequence is synthesized)
ggagaagaaattaaatatatgctatggctatcagcagatctgaaatttaggataaaacagaaaggagagtatttgcctttattgcaagggaagtccttaggcatgatttttgagaaaaga

SEQ ID NO: 25525 - DNA, 120 bp, Artificial Sequence
  ENSG00000036473_3 (sequence is synthesized)
agtactcgaacaagattgtctacagaaacaggctttgcacttctgggaggacatccttgttttcttaccacacaagatattcatttgggtgtgaatgaaagtctcacggacacggcccgt

SEQ ID NO: 25526 - DNA, 120 bp, Artificial Sequence
  ENSG00000036473_4 (sequence is synthesized)
gtattgtctagcatggcagatgcagtattggctcgagtgtataaacaatcagatttggacaccctggctaaagaagcatccatcccaattatcaatgggctgtcagatttgtaccatcct

SEQ ID NO: 25527 - DNA, 120 bp, Artificial Sequence
  ENSG00000036473_5 (sequence is synthesized)
atccagatcctggctgattacctcacgctccaggaacactatagctctctgaaaggtcttaccctcagctggatcggggatgggaacaatatcctgcactccatcatgatgagcgcagcg

SEQ ID NO: 25528 - DNA, 120 bp, Artificial Sequence
  ENSG00000036473_6 (sequence is synthesized)
ccaaagagaatggtaccaagctgttgctgacaaatgatccattggaagcagcgcatggaggcaatgtattaattacagacacttggataagcatgggacaagaagaggagaagaaaaagc

SEQ ID NO: 25529 - DNA, 120 bp, Artificial Sequence
  ENSG00000036473_7 (sequence is synthesized)
ggctccaggctttccaaggttaccaggttacaatgaagactgctaaagttgctgcctctgactggacatttttacactgcttgcccagaaagccagaagaagtggatgatgaagtctttt

SEQ ID NO: 25530 - DNA, 120 bp, Artificial Sequence
  ENSG00000036473_8 (sequence is synthesized)
attctcctcgatcactagtgttcccagaggcagaaaacagaaagtggacaatcatggctgtcatggtgtccctgctgacagattactcacctcagctccagaagcctaaattttgatgtt

SEQ ID NO: 25531 - DNA, 120 bp, Artificial Sequence
  ENSG00000036473_9 (sequence is synthesized)
gtgttacttgtcaagaaagaagcaatgttcttcagtaacagaatgagttggtttatggggaaaagagaagagaatctaaaaaataaacaaatccctaacacgtggtatgggtgaaccgta

SEQ ID NO: 25532 - DNA, 120 bp, Artificial Sequence
  ENSG00000036473_10 (sequence is synthesized)
tgatatgctttgccattgtgaaactttccttaagcctttaatttaagtgctgatgcactgtaatacgtgcttaactttgcttaaactctctaattcccaatttctgagttacatttagat

SEQ ID NO: 25533 - DNA, 120 bp, Artificial Sequence
  ENSG00000036473_11 (sequence is synthesized)
atcatattaattatcatatacatttacttcaacataaaatactgtgttcataatgtataatgtctaagccattaagtgtaatctatgcttattacctaaataaattatcacccatgctaa

SEQ ID NO: 25534 - DNA, 80 bp, Artificial Sequence
  ENSG00000036530_0 (sequence is synthesized)
cccggcccgaccctggcctggcctgccctgccccggagccatgagccccgggctgctgctgctcggcagcgccgtcctgc

SEQ ID NO: 25535 - DNA, 120 bp, Artificial Sequence
  ENSG00000036530_1 (sequence is synthesized)
atgagccccgggctgctgctgctcggcagcgccgtcctgctcgccttcggcctctgctgcaccttcgtgcaccgcgctcgcagccgctacgagcacatccccgggccgccgcggcccagt

SEQ ID NO: 25536 - DNA, 120 bp, Artificial Sequence
  ENSG00000036530_2 (sequence is synthesized)
ttccttctaggacacctcccctgcttttggaaaaaggatgaggttggtggccgtgtgctccaagatgtgtttttggattgggctaagaagtatggacctgttgtgcgggtcaacgtcttc

SEQ ID NO: 25537 - DNA, 120 bp, Artificial Sequence
  ENSG00000036530_3 (sequence is synthesized)
cacaaaacctcagtcatcgtcacgagtcctgagtcggttaagaagttcctgatgtcaaccaagtacaacaaggactccaagatgtaccgtgcgctccagactgtgtttggtgagagactc

SEQ ID NO: 25538 - DNA, 120 bp, Artificial Sequence
  ENSG00000036530_4 (sequence is synthesized)
ttcggccaaggcttggtgtccgaatgcaactatgagcgctggcacaagcagcggagagtcatagacctggccttcagccggagctccttggttagcttaatggaaacattcaacgagaag

SEQ ID NO: 25539 - DNA, 120 bp, Artificial Sequence
  ENSG00000036530_5 (sequence is synthesized)
gctgagcagctggtggagattctagaagccaaggcagatgggcagaccccagtgtccatgcaggacatgctgacctacaccgccatggacatcctggccaaggcagcttttgggatggag

SEQ ID NO: 25540 - DNA, 120 bp, Artificial Sequence
  ENSG00000036530_6 (sequence is synthesized)
accagtatgctgctgggtgcccagaagcctctgtcccaggcagtgaaacttatgttggagggaatcactgcgtcccgcaacactctggcaaagttcctgccagggaagaggaagcagctc

SEQ ID NO: 25541 - DNA, 120 bp, Artificial Sequence
  ENSG00000036530_7 (sequence is synthesized)
cgggaggtccgggagagcattcgcttcctgcgccaggtgggcagggactgggtccagcgccgccgggaagccctgaagaggggcgaggaggttcctgccgacatcctcacacagattctg

SEQ ID NO: 25542 - DNA, 120 bp, Artificial Sequence
  ENSG00000036530_8 (sequence is synthesized)
aaagctgaagagggagcccaggacgacgagggtctgctggacaacttcgtcaccttcttcattgctggtcacgagacctctgccaaccacttggcgttcacagtgatggagctgtctcgc

SEQ ID NO: 25543 - DNA, 120 bp, Artificial Sequence
  ENSG00000036530_9 (sequence is synthesized)
atgaggtcattggttctaagaggtacctggatttcgaggacctggggagactgcagtacctgtcccaggtcctcaaagagtcgctgaggctgtacccaccagcatggggcacctttcgcc

SEQ ID NO: 25544 - DNA, 120 bp, Artificial Sequence
  ENSG00000036530_10 (sequence is synthesized)
tgctggaagaggagaccttgattgatggggtcagagtccccggcaacaccccgctcttgttcagcacctatgtcatggggcggatggacacatactttgaggacccgctgactttcaacc

SEQ ID NO: 25545 - DNA, 120 bp, Artificial Sequence
  ENSG00000036530_11 (sequence is synthesized)
ccgatcgcttcggccctggagcacccaagccacggttcacctacttccccttctccctgggccaccgctcctgcatcgggcagcagtttgctcagatggaggtgaaggtggtcatggcaa

SEQ ID NO: 25546 - DNA, 120 bp, Artificial Sequence
  ENSG00000036530_12 (sequence is synthesized)
agctgctgcagaggctggagttccggctggtgcccgggcagcgcttcgggctgcaggagcaggccacactcaagccactggaccccgtgctgtgcaccctgcggccccgcggctggcagc

SEQ ID NO: 25547 - DNA, 120 bp, Artificial Sequence
  ENSG00000036530_13 (sequence is synthesized)
ccgcacccccaccacccccctgctgagggggcctccaggcaggacgagactcctcgggcaagggccgtgcccgcccacctctgctgcccacggccacccacccttctcccctgccccgtc

SEQ ID NO: 25548 - DNA, 120 bp, Artificial Sequence
  ENSG00000036530_14 (sequence is synthesized)
ccctgggccacccttcacgctggcttccagcgggccctctgccgaccgcctgcttcacacccctcagcgctccctgtcgcctgcggactccatggcccttcctggactggcccttgccca

SEQ ID NO: 25549 - DNA, 120 bp, Artificial Sequence
  ENSG00000036530_15 (sequence is synthesized)
actcccagccaccaccactgtccctaccactgagcccttgcacaggccacttgctcagacgagacaccctaactcttgctcactccctaaagccctcttcaggggtcacctcctccaaga

SEQ ID NO: 25550 - DNA, 120 bp, Artificial Sequence
  ENSG00000036530_16 (sequence is synthesized)
agccctccttgccaccccccgccggcaggggcccctcctctgtgctccctcggtcacctgtgctacctctaacaccacactgaccacactgtatcgtgagtgtccgttgacgtgaccaat

SEQ ID NO: 25551 - DNA, 120 bp, Artificial Sequence
  ENSG00000036530_17 (sequence is synthesized)
tgccctgccaggctgtcagcgcctcaagggtagggtctgcgtgtgatttgtctctgagccccctgtgcccacccagggcccggcacagagtcgatgctcaataaatgtgtgttgactgca

SEQ ID NO: 25552 - DNA, 120 bp, Artificial Sequence
  ENSG00000036530_18 (sequence is synthesized)
cctcccgaaatgtccaccaccccctcatagaacctcagggtcatggggggcttttgtgtgcaccctgcatcctgggaaggcgaggccttgggctcacggactttgaattgtgtccccccc

SEQ ID NO: 25553 - DNA, 120 bp, Artificial Sequence
  ENSG00000036530_19 (sequence is synthesized)
actctccctgctgtgtgaccacagagacccattcctctccacctccactttctcttctccaaaatggaggtgagcacctccccgggccaagtgagacctagacgatggttcaaggaaggg

SEQ ID NO: 25554 - DNA, 120 bp, Artificial Sequence
  ENSG00000036530_20 (sequence is synthesized)
gtgcaagccagctcctcggacatttacccagaagtgagagggctgggttgtaggacccctgactgttcagctttacaaacgaacgccacattgttttccaaagtggctgcaccaacttgg

SEQ ID NO: 25555 - DNA, 120 bp, Artificial Sequence
  ENSG00000036530_21 (sequence is synthesized)
atgcccagtagtggtgagagagagcacctgctgttcttcatcatctccagcacttagcatggtccgattttgtatctgctgccatccaaatatgtgtttttaaaaaagtatttcactgtg

SEQ ID NO: 25556 - DNA, 120 bp, Artificial Sequence
  ENSG00000036530_22 (sequence is synthesized)
gaaacatgtaatgtacaaaatggcagtctcctccttccagctcccttggggttgccatttttgtgagtttggagtgcattcttccatatctctttctaagctctgtgcctgggagggagc

SEQ ID NO: 25557 - DNA, 120 bp, Artificial Sequence
  ENSG00000036530_23 (sequence is synthesized)
cctgtgggttgggagctctggggtgcgaatggtatctgaggactcatttccacatagagttggacaccatgattgctcaaggacaggcagtgaagtgggaaaacaaaatgctgcagctgg

SEQ ID NO: 25558 - DNA, 120 bp, Artificial Sequence
  ENSG00000036530_24 (sequence is synthesized)
tgcccagggcagggcaggtaaggagagcaggcaacgggagtagagggcaggaggggaaccgggattgccctctcatggactgtaggaggcccaaagtttctacactgtcacgtccctttg

SEQ ID NO: 25559 - DNA, 120 bp, Artificial Sequence
  ENSG00000036530_25 (sequence is synthesized)
aggtcagggctgaagggccacagtgaccaacagagtacctgtggaactgttaggacaagagcaagggaacagcatccatcctgagtggaggagaatggtgaaaccccagggtgtagttca

SEQ ID NO: 25560 - DNA, 120 bp, Artificial Sequence
  ENSG00000036530_26 (sequence is synthesized)
gttactacaactccaacctgcaatctgggtctcaaggggaggccagaaagactgggagggaccacccaccttcactctgcacagtatcctctctgtggagagggagggcacatggcagtc

SEQ ID NO: 25561 - DNA, 120 bp, Artificial Sequence
  ENSG00000036530_27 (sequence is synthesized)
tctggcaaaggtactgcctcagcaccccctctggtgaccagccaccagagctgttgtcttcatttgctgaagaacctccttcagtgattttttttttttttcccagaatgggttttgagt

SEQ ID NO: 25562 - DNA, 120 bp, Artificial Sequence
  ENSG00000036530_28 (sequence is synthesized)
tctggtatgtctgaagtgacttctgaatcaggatttgcatgcattgcctaaagtaaaggcttaaaatcaaattgccttaaagtaaattaggagttaatctttctctcatgtgaaatgatc

SEQ ID NO: 25563 - DNA, 120 bp, Artificial Sequence
  ENSG00000036530_29 (sequence is synthesized)
cccaaagcaggcaatgtaggatgactatgatggctccatggtgtcagattttctggatccttctgtcttcctgttccactgtctcagcacatcacctcattgtcataagatggctgctgc

SEQ ID NO: 25564 - DNA, 120 bp, Artificial Sequence
  ENSG00000036530_30 (sequence is synthesized)
gaaaggtgcaccctgcctgccactgcccgtgcccacatggggcctgggaaccaatctgccccacccgctgcagctaccaccacctgcacgcactgtccagggaccagacatgccccaccc

SEQ ID NO: 25565 - DNA, 120 bp, Artificial Sequence
  ENSG00000036530_31 (sequence is synthesized)
actgccagcacccgtgcgcatcatctaggggcctgaggaatggtctaccatgagtgctgccaccagcgcctgccactgagagggcctgaggagaggcctgccccacttgccgacactggc

SEQ ID NO: 25566 - DNA, 120 bp, Artificial Sequence
  ENSG00000036530_32 (sequence is synthesized)
ccccacatgcatcatccacgggcctgaggaatggtctaccatgactgctgccaccagcgcctgccactgagagggcctgaggagaggcctgccccacttgccgacactggcccccacatg

SEQ ID NO: 25567 - DNA, 120 bp, Artificial Sequence
  ENSG00000036530_33 (sequence is synthesized)
catcagccaggggcctgaggaatggtctaccatgagtgctgccaccagcgcctgccactgagagggcctgaggagaggcctgccccgcttgccgacactggcccccacatgcatcatcca

SEQ ID NO: 25568 - DNA, 120 bp, Artificial Sequence
  ENSG00000036530_34 (sequence is synthesized)
ggggcctgaggaatggtctaccatgactgctgccactagcgcctgccattgagagggcctgaggagaggcctgccccacttgccgacactggcccccacatgcatcatccacgggcctga

SEQ ID NO: 25569 - DNA, 120 bp, Artificial Sequence
  ENSG00000036530_35 (sequence is synthesized)
ggacaagcctgcccagcccaccacccactgttgcctgcacccaagcatgccatctggaggcctggggattggcttgccctgcctaatgtaggtagtgcctgtgtgcaatattggaggaca

SEQ ID NO: 25570 - DNA, 120 bp, Artificial Sequence
  ENSG00000036530_36 (sequence is synthesized)
cctgaggataggcccatccctcccgctactgctggcgcccacatatgccatccaagggcctgagcacaggcccatcctacccactgttgccaccagtgatgctcaaggactggcctgcct

SEQ ID NO: 25571 - DNA, 120 bp, Artificial Sequence
  ENSG00000036530_37 (sequence is synthesized)
ggcatctccatcctcagcaaagcctcaggatggcctccactaacaatgacagtctaagccactgagaaactcagagataccactgacactgattacagctgaagaaattaaacagaaact

SEQ ID NO: 25572 - DNA, 120 bp, Artificial Sequence
  ENSG00000036530_38 (sequence is synthesized)
atgttactgtgccaatccataatcaagccaaagcaccctacccacccaacactataaatgcccctatagaaaagtctttccctatgaaagccaatccataaaattggaagaagtaactat

SEQ ID NO: 25573 - DNA, 120 bp, Artificial Sequence
  ENSG00000036530_39 (sequence is synthesized)
tacactagatgcacaaaggggcaaaagaaacatggaaaaagcaaggaaatactataccttcaaagaaacaataactctccagcaacagattccaaagaaaataaaatttattatatgtct

SEQ ID NO: 25574 - DNA, 120 bp, Artificial Sequence
  ENSG00000036530_40 (sequence is synthesized)
gaaaaagaattcaaaataatgatattaaactctgagatacaagagaacacagataaaaatgcaaagaaatcaggaaaacaattcatcacctgaatgagaaattcaacagagagacagata

SEQ ID NO: 25575 - DNA, 120 bp, Artificial Sequence
  ENSG00000036530_41 (sequence is synthesized)
gatgtaaaagagaaacaaacagaaatcttaaaactgaggaattcagtgaatagaataaaaatataattgaaaacttcaacaatagactagattaagcagaagaaagaatttctgaacttg

SEQ ID NO: 25576 - DNA, 120 bp, Artificial Sequence
  ENSG00000036530_42 (sequence is synthesized)
aagacaggtcttttttgaagcaacccaatcagaccaaaaaaagaaaagattgaagaaagcctttgtgacatgagacagcagtaagtgaccaaatattccagttccgggaatttcaggaga

SEQ ID NO: 25577 - DNA, 120 bp, Artificial Sequence
  ENSG00000036530_43 (sequence is synthesized)
agagatgggcaaaggcatatgaaacctatttaatcaaataatagctgaaaacttctcaagtcttgcaaaagatatagacatccaggtacaggaaatatagagatccaggtatagtcatgc

SEQ ID NO: 25578 - DNA, 120 bp, Artificial Sequence
  ENSG00000036530_44 (sequence is synthesized)
tttgtataatgatgggagctcaaaaatctccgagtagattcaacccaaaaaggtctgccttctccaaggcacattatagtcaaagtgttgaaagtcaaagacacagagagaattttaaaa

SEQ ID NO: 25579 - DNA, 120 bp, Artificial Sequence
  ENSG00000036530_45 (sequence is synthesized)
acagcaagagagaagcatgaattcacatataaaggaatcagactaaagtagattgctcagtgaaaatcttacaagccaggagtgattgggataatatattcaaagtgctggaaattaaaa

SEQ ID NO: 25580 - DNA, 120 bp, Artificial Sequence
  ENSG00000036530_46 (sequence is synthesized)
actgtcagtcaagattatagtacccagtaatgctatacttccaaactgaaagagaaataaagtctgtcccaaacaagcaaaaaccgaggtaagtcatcactactagactggccctacaag

SEQ ID NO: 25581 - DNA, 120 bp, Artificial Sequence
  ENSG00000036530_47 (sequence is synthesized)
agggaattctgcatctggaagtgaaaggacaatctctatcatcatgaaaacacatgaaagtataaagcccactgatagggcagatcagcaaatgagaaagagaaaggagttaaacattac

SEQ ID NO: 25582 - DNA, 120 bp, Artificial Sequence
  ENSG00000036530_48 (sequence is synthesized)
tattatagaatgtttaccaaactgcaatgataaacagtaagagaggaagacaggcacaaaatatatacagaaaacaattaatcaaacaaccagaaaacaattaaccaaatgactagagta

SEQ ID NO: 25583 - DNA, 120 bp, Artificial Sequence
  ENSG00000036530_49 (sequence is synthesized)
agtccttacctatcaataataaccttgaatgtaactagattaaattcccccacttaaaagatatagattgactgaatggataaaaaaattacccaactatatgctgcttacaagaaactc

SEQ ID NO: 25584 - DNA, 120 bp, Artificial Sequence
  ENSG00000036530_50 (sequence is synthesized)
acttcgcctgtaaagacacatacagactgaaagtaaaggaatggaaaaagatattccacacaaacacaagccaaagctgtcaggagtagctataattatatcaaataaaacagactttaa

SEQ ID NO: 25585 - DNA, 120 bp, Artificial Sequence
  ENSG00000036530_51 (sequence is synthesized)
gtcaaaaactgtaaaaagagacaaggtcattatataatgataaagggatcaattctgcaagaagataaaatacttctaaatatatttgcacccaataccagagcacccagagatagaaag

SEQ ID NO: 25586 - DNA, 120 bp, Artificial Sequence
  ENSG00000036530_52 (sequence is synthesized)
caaagatctaaaggaaaagatagactctaatacagtaatagctggggacttcaacaccccactctcagcactggacagatcatctagacagaaaatcatcacagaaacattggatttaac

SEQ ID NO: 25587 - DNA, 120 bp, Artificial Sequence
  ENSG00000036530_53 (sequence is synthesized)
tacactttagaccgtatagacctaatagacatttacagaacttttcatctaatagctgcagaacatacattcttctcatcagcacatgaaagattctccaggatagatcatatcttaggc

SEQ ID NO: 25588 - DNA, 81 bp, Artificial Sequence
  ENSG00000036530_54 (sequence is synthesized)
caagtgaaactttggaaattgtacaaatacatggaaattaaacaatatactcctgaatgaccactgggtcaatgaagaaat

SEQ ID NO: 25589 - DNA, 120 bp, Artificial Sequence
  ENSG00000036530_55 (sequence is synthesized)
acaatatactcctgaatgaccactgggtcaatgaagaaattaagaaggaaataaaaaaattcttgaaacaaatgaaaaggggaacacaacataccaaaacctgtgggatacagcaaaagc

SEQ ID NO: 25590 - DNA, 120 bp, Artificial Sequence
  ENSG00000036530_56 (sequence is synthesized)
agtgctaagagcgatgtttataacagtaaacacttacatcaaaaaagtaggaagatttcaaataaacagccaaatgatatatctcaaggaattagaaaagcaagaacaaatcaaagccaa

SEQ ID NO: 25591 - DNA, 120 bp, Artificial Sequence
  ENSG00000036530_57 (sequence is synthesized)
aattagtagaaggaaataaatatcagtgcagaattaaaggaactaaagactaaaaaagtacaaagaccaatgaagtgaaaggttgatttttggaaaagataaaatcaataaaccaagcca

SEQ ID NO: 25592 - DNA, 120 bp, Artificial Sequence
  ENSG00000036530_58 (sequence is synthesized)
agaaaaaaaagaagacccatataaataaaagcagaaactaaaaaggagacattacaactgataccacagaaatacaaaggaacattacagatttttatgaaccactatacactaacgatt

SEQ ID NO: 25593 - DNA, 120 bp, Artificial Sequence
  ENSG00000036530_59 (sequence is synthesized)
ggaaaacttaaaagaaatggaattcctggacacatacaccctgccaagatgattgaacaaagaagaaatagaaaacctgaacagaccaatggtgagtaatgagattgaaatactaataaa

SEQ ID NO: 25594 - DNA, 120 bp, Artificial Sequence
  ENSG00000036530_60 (sequence is synthesized)
aagtcttccaacaaagaaaagcccgtgaccagatgtctttactgctgaattctcccaaacccatgaagaagaacaccaattcttctcaaactattccaaaaaattgaagaagagggaact

SEQ ID NO: 25595 - DNA, 120 bp, Artificial Sequence
  ENSG00000036530_61 (sequence is synthesized)
cttcctaacttattctatgaggccagcactaccctaccctgataccacaaacagacaaggacacaataaaaaaagaaaaactacatgccaacgtccctgatgaacatagatgcaaaaata

SEQ ID NO: 25596 - DNA, 120 bp, Artificial Sequence
  ENSG00000036530_62 (sequence is synthesized)
ttcaacaaaatactagcaaacaaacctaatccaacaacacattaaaaaggtaattcaccatgattaagtgggatttatcccagggatgcaagggtgcttcaacatacacaagtcaataaa

SEQ ID NO: 25597 - DNA, 120 bp, Artificial Sequence
  ENSG00000036530_63 (sequence is synthesized)
tgttatacatcatattaacaggatgaaggacaaaagccatatgatcatctcaatagatgcagaaaaagcacttgataaaatttaacaccacttcatgattaaaaactctcaacgaattat

SEQ ID NO: 25598 - DNA, 120 bp, Artificial Sequence
  ENSG00000036530_64 (sequence is synthesized)
gaatagaaggaacgtagctcaacataatgaaggtcgtatatgatatacccacagctaacatcatacttagtggggaaaagctaaaagtctttcctttaagaactggaacaggataaggat

SEQ ID NO: 25599 - DNA, 120 bp, Artificial Sequence
  ENSG00000036530_65 (sequence is synthesized)
gcccactttcatcactcttattcaacgtagtactattaatagaagtgctagccagagcagtcaggcaagagaaagaaataaaagacgtccaaattggaaaagaagaagtcaaactgtccc

SEQ ID NO: 25600 - DNA, 120 bp, Artificial Sequence
  ENSG00000036530_66 (sequence is synthesized)
tctttgcagaagacatgatcttatatttagaaattcctaaagactctaccaaaaaactcttagaactgatgaatgacttcagtaaagttgtggggtaaaaaaaaatcagcatacaaaaat

SEQ ID NO: 25601 - DNA, 120 bp, Artificial Sequence
  ENSG00000036530_67 (sequence is synthesized)
acaaaaatcagtagcaattctatacaccaataatgaactcatggaagaagaaaccaataaagcaatcccatttacaattgttatgtagaaaataaaatacctaggaataaatttaaccaa

SEQ ID NO: 25602 - DNA, 120 bp, Artificial Sequence
  ENSG00000036530_68 (sequence is synthesized)
aagacctatacaaggaaaactacaaaacactgatgaaagaaattgaagaagacacaaacaaatgaaaaaacatcccatgctcatggatcgaaagaattaatattgttaaaatgaccatgc

SEQ ID NO: 25603 - DNA, 85 bp, Artificial Sequence
  ENSG00000036530_69 (sequence is synthesized)
caatcttaaaatttgcgtgaaaccacgaaagagccaaatagccaaagcaactctgagcaaaaagaacaaagctggaggcaccata

SEQ ID NO: 25604 - DNA, 120 bp, Artificial Sequence
  ENSG00000036530_70 (sequence is synthesized)
agcaactctgagcaaaaagaacaaagctggaggcaccatactacccgatttcaaaatctactataaagctacaataaccaaaacagcatggtattggtttaaaaaataacaacagacata

SEQ ID NO: 25605 - DNA, 120 bp, Artificial Sequence
  ENSG00000036530_71 (sequence is synthesized)
gaccaatgtaacagaatagacagcccagaaatatattcatgtatttacaggaaacagactcaacaaaggcaccaagaacatacactggggaaagggcagtgctgggaaaactggatatct

SEQ ID NO: 25606 - DNA, 120 bp, Artificial Sequence
  ENSG00000036530_72 (sequence is synthesized)
ggatatctaaatgcagaagaattaaaccatacccctgtctctcaccatatacaaaaatcaccttaaaatgaatagacttggccgggcgcagtagctcacgcctgtaataccagcactttg

SEQ ID NO: 25607 - DNA, 120 bp, Artificial Sequence
  ENSG00000036549_0 (sequence is synthesized)
gttggcagagcagttgtcctggatggcggagccttgggttccgggggcctgggacctgcaactctttctacaagatatcaagttattctagtacaaccatataaataaataatacctgaa

SEQ ID NO: 25608 - DNA, 120 bp, Artificial Sequence
  ENSG00000036549_1 (sequence is synthesized)
gtctcagtgtaacatggacaattaacagtgatgacagataaatacagacgcatggggatcaaatactaggcaaaacgctttttaaaagtgtatcaggcttttaagaaacactgcaggatc

SEQ ID NO: 25609 - DNA, 120 bp, Artificial Sequence
  ENSG00000036549_2 (sequence is synthesized)
ctgtctatcttaatgctgatagagctcagctaaaaatttaggaggttctagtattcttcatggctgaagctgagagagtctgaaaccctgatgcttaagctccattctagatcatagctc

SEQ ID NO: 25610 - DNA, 120 bp, Artificial Sequence
  ENSG00000036549_3 (sequence is synthesized)
caactccttcaggatataaggaaaagagattatatttccacaatgatagatctttggttgtacaggtttcccaatgagtggatcatgatgaccgtattgtagggacttgccatagtatgg

SEQ ID NO: 25611 - DNA, 120 bp, Artificial Sequence
  ENSG00000036549_4 (sequence is synthesized)
ctgcttcccgatctactcgtgttacaagatcaacagtggggttaaacggcttggatgaatctttttgtggtagaactttaaggaatcgtagcattgcgcatcctgaagaaatctcttcta

SEQ ID NO: 25612 - DNA, 120 bp, Artificial Sequence
  ENSG00000036549_5 (sequence is synthesized)
attctcaagtacgatcaagatcaccaaagaagagaccagagcctgtgccaattcagaaaggaaataataatgggagaaccactgatttaaaacagcagagtacccgagaatcatgggtaa

SEQ ID NO: 25613 - DNA, 120 bp, Artificial Sequence
  ENSG00000036549_6 (sequence is synthesized)
gccctaggaaaagaggactttcttcttcagaaaaggataacatagaaaggcaggctatagaaaattgtgagagaaggcaaacagaacctgtttcaccagttttaaaaagaattaagcgtt

SEQ ID NO: 25614 - DNA, 120 bp, Artificial Sequence
  ENSG00000036549_7 (sequence is synthesized)
gtcttagatctgaagcaccaaacagttcagaagaagattctcctataaaatcagacaaggagtcagtagaacagaggagtacagtagtggacaatgatgcagattttcaagggactaaac

SEQ ID NO: 25615 - DNA, 120 bp, Artificial Sequence
  ENSG00000036549_8 (sequence is synthesized)
gagcttgtcgatgtcttatactggatgattgtgagaaaagggaaattaaaaaggtgaatgtcagtgaggaagggccacttaattctgcagtagttgaagaaatcacaggctatttggctg

SEQ ID NO: 25616 - DNA, 120 bp, Artificial Sequence
  ENSG00000036549_9 (sequence is synthesized)
tcaatggtgttgatgacagtgattcagctgttataaactgtgatgactgtcagcctgatgggaacactaaacaaaatagcattggttcctatgtgttacaggaaaaatcagtagctgaaa

SEQ ID NO: 25617 - DNA, 120 bp, Artificial Sequence
  ENSG00000036549_10 (sequence is synthesized)
atggggatacggatacccaaacttcaatgttccttgatagtaggaaggaggacagttatatagaccataaggtgccttgcacagattcacaagtgcaggtcaagttggaggaccacaaaa

SEQ ID NO: 25618 - DNA, 120 bp, Artificial Sequence
  ENSG00000036549_11 (sequence is synthesized)
tagtaactgcctgcttgcctgtggaacatgttaatcagctgactactgagccagctacagggcccttttctgaaactcagtcatctttaagggattctgaggaggaagtagatgtggtgg

SEQ ID NO: 25619 - DNA, 120 bp, Artificial Sequence
  ENSG00000036549_12 (sequence is synthesized)
gagatagcagtgcctcaaaagagcagtgtaaagaaaacaccaataacgaactggacacaagtcttgagagtatgccagcctccggagaacctgaaccatctcctgttctagactgtgttt

SEQ ID NO: 25620 - DNA, 120 bp, Artificial Sequence
  ENSG00000036549_13 (sequence is synthesized)
cagctcaaatgatgtctttatcagaacctcaagaacatcgttatactctgagaacctcaccacgaagggcagcccctaccagaggtagtcccactaaaaacagttctccttacagagaaa

SEQ ID NO: 25621 - DNA, 120 bp, Artificial Sequence
  ENSG00000036549_14 (sequence is synthesized)
atggacaatttgaggagaataatcttagtcctaatgaaacaaatgcaactgttagtgataatgtaagtcaatctcctacaaatcctggtgaaatttctcaaaatgaaaaagggatatgtt

SEQ ID NO: 25622 - DNA, 120 bp, Artificial Sequence
  ENSG00000036549_15 (sequence is synthesized)
gtgactctcaaaataatggaagtgaaggagtaagtaaaccaccctcagaggcaagactcaatattggacatttgccatctgccaaagagagtgccagtcagcacattacagaagaggaag

SEQ ID NO: 25623 - DNA, 120 bp, Artificial Sequence
  ENSG00000036549_16 (sequence is synthesized)
atgatgatcctgatgtttattactttgaatcagatcatgtggcactgaaacacaacaaagattatcagagactattacagacgattgctgtactcgaggctcagcgttctcaagcagtcc

SEQ ID NO: 25624 - DNA, 120 bp, Artificial Sequence
  ENSG00000036549_17 (sequence is synthesized)
aagaccttgaaagtttaggcaggcaccagagagaagcactgaaaaatcccattggatttgtggaaaaactccagaagaaggctgatattgggcttccatatccacagagagttgttcaat

SEQ ID NO: 25625 - DNA, 120 bp, Artificial Sequence
  ENSG00000036549_18 (sequence is synthesized)
tgcctgagatcgtatgggaccaatatacccatagccttgggaattttgaaagagaatttaaaaatcgtaaaagacatactagaagagttaagctagtttttgataaagtaggtttacctg

SEQ ID NO: 25626 - DNA, 120 bp, Artificial Sequence
  ENSG00000036549_19 (sequence is synthesized)
ctagaccaaaaagtcctttagatcctaagaaggatggagagtccctttcatattctatgttgcctttgagtgatggtccagaaggctcaagcagtcgtcctcagatgataagaggacgct

SEQ ID NO: 25627 - DNA, 120 bp, Artificial Sequence
  ENSG00000036549_20 (sequence is synthesized)
tgtgtgatgataccaaacctgaaacatttaaccagttgtggactgttgaagaacagaaaaagctggaacagctactcatcaaataccctcctgaagaagtagaatctcgacgctggcaga

SEQ ID NO: 25628 - DNA, 120 bp, Artificial Sequence
  ENSG00000036549_21 (sequence is synthesized)
agatagcagatgaattgggcaacaggacagcaaaacaggttgccagccgagtacagaagtatttcataaagctaactaaagctggcattccagtaccaggcagaacaccaaacttatata

SEQ ID NO: 25629 - DNA, 120 bp, Artificial Sequence
  ENSG00000036549_22 (sequence is synthesized)
tatactccaaaaagtcttcaacaagcagacgacagcaccctcttaataagcatctctttaagccttccactttcatgacttcacatgaaccgccagtgtatatggatgaagatgatgacc

SEQ ID NO: 25630 - DNA, 120 bp, Artificial Sequence
  ENSG00000036549_23 (sequence is synthesized)
gatcttgttttcatagccacatgaacactgctgttgaagatgcatcagatgacgaaagtattcctatcatgtataggaatttacctgaatataaagaactattacagtttaaaaagttaa

SEQ ID NO: 25631 - DNA, 120 bp, Artificial Sequence
  ENSG00000036549_24 (sequence is synthesized)
agaagcagaaacttcagcaaatgcaagctgaaagtggatttgtgcaacatgtgggctttaagtgtgataactgtggcatagaacccatccagggtgttcggtggcattgccaggattgtc

SEQ ID NO: 25632 - DNA, 120 bp, Artificial Sequence
  ENSG00000036549_25 (sequence is synthesized)
ctccagaaatgtctttggatttctgtgattcttgttcagactgtctacatgaaacagatattcacaaggaagatcaccaattagaacctatttataggtcagagacattcttagacagag

SEQ ID NO: 25633 - DNA, 120 bp, Artificial Sequence
  ENSG00000036549_26 (sequence is synthesized)
tccagcaaacagatgacatggaagagaacatcatttactagtcctcttcaacacatagcaatggtatcattgttaattatgtgcacagtttggaaagattctctgctttcccagaaatga

SEQ ID NO: 25634 - DNA, 120 bp, Artificial Sequence
  ENSG00000036549_27 (sequence is synthesized)
cactcacagcatgagagcttcctgagtgttctcgtcaagtacagctctgcaccgttgtggctctagatcactgttcagcagctgaacattcctggtgagcaaaggtttccctggtgaatt

SEQ ID NO: 25635 - DNA, 120 bp, Artificial Sequence
  ENSG00000036549_28 (sequence is synthesized)
tttcaccactgcgttttaggtggtgatcttaaatgggtgagatggaacgagagcacacattaaagagagagtaaattccaaaggtttcaaagaacttggtcataaatatgataatgagaa

SEQ ID NO: 25636 - DNA, 120 bp, Artificial Sequence
  ENSG00000036549_29 (sequence is synthesized)
gacaaagtatttatattaaaacagtttagtagccttcagttttgtgaaaatagttttcagcacagaaactgacttctttagacaaagttttaaccaatgatggtgtttgcttctaggata

SEQ ID NO: 25637 - DNA, 120 bp, Artificial Sequence
  ENSG00000036549_30 (sequence is synthesized)
tacactttaaaagaactcactgtcccagtggtggtcattgatggcctttagtaaattggagctgcttaatcatattgatatctaatttcttttaaccacaatgaattgtccttaattacc

SEQ ID NO: 25638 - DNA, 120 bp, Artificial Sequence
  ENSG00000036549_31 (sequence is synthesized)
aacagtgaagcactacaggaggcaactgtggcattgcttccttaaccagctcatggtgtgtgaatgttataaaattgtcactcagatatattttttaaatgtaatgttatataagatgat

SEQ ID NO: 25639 - DNA, 120 bp, Artificial Sequence
  ENSG00000036549_32 (sequence is synthesized)
catgtgatgtgtacaaactatggtgaaaagtgccagtggtagtaactgtgtaaagtttctaattcacaacattaattcctttaaaatacacagccttctgcctctgtatttggagttgtc

SEQ ID NO: 25640 - DNA, 120 bp, Artificial Sequence
  ENSG00000036549_33 (sequence is synthesized)
agtacaactcatcaaagaaaactgcctaatataaaaatcatatatatggtaataatttccctcttttgtagtctgcacaagatccataaaagattgtatttttattactatttaaacaag

SEQ ID NO: 25641 - DNA, 120 bp, Artificial Sequence
  ENSG00000036549_34 (sequence is synthesized)
tgattaaatttagtctgcacagtgagcaagggttcacatgcattcttttatactgctggattttgttgtgcatcatttaaaacattttgtatgtttcttcttatctgtgtatacagtatg

SEQ ID NO: 25642 - DNA, 120 bp, Artificial Sequence
  ENSG00000036549_35 (sequence is synthesized)
ttcttgaatgatgttcatttgtcaggagaactgtgagaaataaactatgtggatactgtctgtttatattatagaatgcttgttgtgacttccttttggttagattttggattttttttt

SEQ ID NO: 25643 - DNA, 120 bp, Artificial Sequence
  ENSG00000036549_36 (sequence is synthesized)
ttaccagtgttaaaaccagaaattggtattttttaaaatggtttgcttcacatatttaagagttttctttctgtcatttatgaagaataaggaatgtattatggaaaagagggtgatctt

SEQ ID NO: 25644 - DNA, 120 bp, Artificial Sequence
  ENSG00000036549_37 (sequence is synthesized)
aagcaaccctgtaaaaaatggtaaagatttttactcagtgtgtgctgaaacactaaattaaactagcttacaaaaaggaaacacggaccatggttaaagaaaaaggcaattattaatgct

SEQ ID NO: 25645 - DNA, 120 bp, Artificial Sequence
  ENSG00000036549_38 (sequence is synthesized)
caggtgtgaaaactaaagttgaaaattttttttctagttgtgtctcatgaagataagcccccatgtatttaaacagatggcttttgaaaaatcaccttgtttcctggaaattactattaa

SEQ ID NO: 25646 - DNA, 120 bp, Artificial Sequence
  ENSG00000036549_39 (sequence is synthesized)
ctataggaaaagatagtataaatattctaagattgattgttatatttgacccaatttttagaatcacctgttttttcctattttaaatcaagggaacattatttactagttctcttcagt

SEQ ID NO: 25647 - DNA, 120 bp, Artificial Sequence
  ENSG00000036549_40 (sequence is synthesized)
actagttctcttcagtacatagcagggtactaaaatcataccctgaattttttttaattgagaaaagtaatagaattttaaatatagaaatatgagaattttaaagtaatatattgatta

SEQ ID NO: 25648 - DNA, 120 bp, Artificial Sequence
  ENSG00000036549_41 (sequence is synthesized)
tagatataatatatcataacagaaggaaagtaaatggacttgagcttaacttctcaccctggaattattagtgggtgaagaggggaatcattagcattctgggcgtttttatattaaatg

SEQ ID NO: 25649 - DNA, 120 bp, Artificial Sequence
  ENSG00000036549_42 (sequence is synthesized)
ttttgtgaatatgccagaagatctgccttcaacttgtaattaggcaagatagtaatgcttgatggtaacttctatgtttgtgtagaaataataccagttagttttggaaagccattcaga

SEQ ID NO: 25650 - DNA, 120 bp, Artificial Sequence
  ENSG00000036549_43 (sequence is synthesized)
tccattcaaaaattccataaagtatgatgtatgctttggaagagggatatgagtgatacaattgttatataaatggaatagacaaaccatttgaatgcatttttctagggcaaacatttt

SEQ ID NO: 25651 - DNA, 120 bp, Artificial Sequence
  ENSG00000036549_44 (sequence is synthesized)
ttgagatttttgagttaagaagatttttcggcttgagcagaagatgtgtttgttttgcatttttcagctccaaggaaacagcccccatggctttaaaaggccctgaagttcagatagtag

SEQ ID NO: 25652 - DNA, 120 bp, Artificial Sequence
  ENSG00000036549_45 (sequence is synthesized)
taggtagtgttttgttattgttttaatttgagagttgcaggaataatgggcagagctgtcatttgccggtaggctaccatctgcctacatagaattattggactgtaagctaaaacagac

SEQ ID NO: 25653 - DNA, 120 bp, Artificial Sequence
  ENSG00000036549_46 (sequence is synthesized)
tgtaaaagacctacttgctaaagcattgcttattcagtggtattcagtagataagatctatttcctgatatattgtgctcaagttatttgcacatcttaagaaacttttaatatctaaaa

SEQ ID NO: 25654 - DNA, 120 bp, Artificial Sequence
  ENSG00000036549_47 (sequence is synthesized)
ccattgttgtaagatttaggtagaggaggtttccttttgtgtgatgcataataatagaaaacactgatacagtgtttactatgtgccaagcaagcatatgataactaattcttaacaact

SEQ ID NO: 25655 - DNA, 120 bp, Artificial Sequence
  ENSG00000036549_48 (sequence is synthesized)
ctatgaggcagggtcatttattatcctgttgtcatatgaggaaatctcgccagagagaagttaattaacctgcccaaggtcgtatagttagtaaagtggtcatgcttggattttaaccta

SEQ ID NO: 25656 - DNA, 120 bp, Artificial Sequence
  ENSG00000036549_49 (sequence is synthesized)
ggcagattacttcagagtcagcgtctgccttactatcctgtttcctgagcaggaatttccccttgtgtcaggcaacactaggtgttaggagtggaggtgtgcagatgttgccttacattc

SEQ ID NO: 25657 - DNA, 120 bp, Artificial Sequence
  ENSG00000036549_50 (sequence is synthesized)
tgttttcctgatgtggtgtgcttcctaagagtacaaacctgagcatatgtccaggcttgcaaagtctcaggcaaagctgggactaaggcttgtgtttcctgccttgggtaggattttctt

SEQ ID NO: 25658 - DNA, 120 bp, Artificial Sequence
  ENSG00000036549_51 (sequence is synthesized)
ctatgcatgttgggtgcttctcacttaacctaatagtatgccttgtctgttttccccccttcccctttttgtttaaattgattcacagaacacaaaaatttactaggtatgaacatttga

SEQ ID NO: 25659 - DNA, 120 bp, Artificial Sequence
  ENSG00000036549_52 (sequence is synthesized)
aaaaatggaatagagaaaatggtacatcacatgtaataaagataaatattgttttgtgaaatgtctttttcaatcataaatatgtgttgtgtgctatataaaactatttcttattgtgga

SEQ ID NO: 25660 - DNA, 120 bp, Artificial Sequence
  ENSG00000036549_53 (sequence is synthesized)
atcgagcttcctgcagcggtggccacccgagcaagtgccgtggcgggggcggagagcggccacggcggcggcgcctccccaagtggcccgttgcgtccgaccccgcgtgaaagatatcaa

SEQ ID NO: 25661 - DNA, 87 bp, Artificial Sequence
  ENSG00000036549_54 (sequence is synthesized)
gattctcgcgggacctcgttggcagagcagttgtcctggatggcggagccttgggttccgggggcctgggacctgcaactctttcta

SEQ ID NO: 25662 - DNA, 120 bp, Artificial Sequence
  ENSG00000036549_55 (sequence is synthesized)
ctcccaaagtgctggattacaggggtgagccacggtgcctggcccaaacatcttgatataattttgttctgctgattttatgaaattcctcccttttcagaactgtaataaacaatattg

SEQ ID NO: 25663 - DNA, 120 bp, Artificial Sequence
  ENSG00000036549_56 (sequence is synthesized)
agatttccctatttcaacagagtacaaccaagtgcctgaattgagtgattcctcctagtattaagattttatcattttaattatattttttttatctagcagtttcttaacgactttgat

SEQ ID NO: 25664 - DNA, 120 bp, Artificial Sequence
  ENSG00000036549_57 (sequence is synthesized)
tgttggaagatcaaaatgctcttttattttggtacttcgtaactcaggaagacctcatttattcccagtaatatgttttactaaactctttcagttatcagagactattacagacgattg

SEQ ID NO: 25665 - DNA, 70 bp, Artificial Sequence
  ENSG00000036549_58 (sequence is synthesized)
tcgtgtaggcttaaaaaaacaagtaaacagttaacatcagagtcagtattatgagatgggtggatcactt

SEQ ID NO: 25666 - DNA, 120 bp, Artificial Sequence
  ENSG00000036549_59 (sequence is synthesized)
acagagtgagactccatctcaaaaagaaaagagcctgtattttgagtcaggtgtatattgttgtatgtgatgcctgttagccatgagttttaaatatttaggcttatttttgtatacctt

SEQ ID NO: 25667 - DNA, 120 bp, Artificial Sequence
  ENSG00000036549_60 (sequence is synthesized)
tttaaatatttaggcttatttttgtatacctttttgcatacgtcaagaattttggattttgagaatgtgtaaacttttgtttggggataattttaaaagaaggaacctgggttttgagag

SEQ ID NO: 25668 - DNA, 120 bp, Artificial Sequence
  ENSG00000036549_61 (sequence is synthesized)
gggagtagaagtggatagaataaaatagatgtttttgtaatgtagctttgggagagagaaaaacctgaggccagtaaagctgagcttcaaagtgcattcttatttttgttgtcgaaggga

SEQ ID NO: 25669 - DNA, 120 bp, Artificial Sequence
  ENSG00000036549_62 (sequence is synthesized)
ggtgaggaagtcaagtcagttttggcatacagtttagaattgttttttggctaatggctagggttgttagtgggtgaagtttgaggcacatctttgtctcatatggctattaaccccaca

SEQ ID NO: 25670 - DNA, 120 bp, Artificial Sequence
  ENSG00000036549_63 (sequence is synthesized)
agatttttctgcatctttaggactatgagaagatacaggagacaagaaggaatattaaaatcaaatatttgaataaaggaccatacaaaagaaggaaaagcctcttttaatagtcgaaat

SEQ ID NO: 25671 - DNA, 120 bp, Artificial Sequence
  ENSG00000036549_64 (sequence is synthesized)
ttaagtgaatttacacgtttttgttaaaactgtaggggaaagaaaagtaagaaaagattgaccatcttttcttggatttcagtggatttagtgatttcagtggaaatcactaaaatgtgt

SEQ ID NO: 25672 - DNA, 120 bp, Artificial Sequence
  ENSG00000036549_65 (sequence is synthesized)
aatctaccaatttgtttacttattttctgttttcttatgagatatttttacttatgtgaatagaaaacttttctaagctctttcataagtttattctctaatttcattgttccctgtgaa

SEQ ID NO: 25673 - DNA, 120 bp, Artificial Sequence
  ENSG00000036549_66 (sequence is synthesized)
gtcttaagtttctaactagaaatttttcctaccatgaggatttctaattacgtaacccccaaaggtgggagagagtattacattttgaaatgaaatgtgaatgtatttatttagaaatcc

SEQ ID NO: 25674 - DNA, 120 bp, Artificial Sequence
  ENSG00000036549_67 (sequence is synthesized)
tgctcttttattttggtacttgttcaggttcaagaattaaaaacttaagatgggggaagaaggctttgctttctctaactcttattttctgtaggtacttcgtaactcaggaagacctca

SEQ ID NO: 25675 - DNA, 120 bp, Artificial Sequence
  ENSG00000036549_68 (sequence is synthesized)
tcctatagtgaactctattcaaatagagtagttatgtggttgattagaacttgatagagtgctactagggcacattccagtatgctcagagatatactttaagttgtagatgttctttgc

SEQ ID NO: 25676 - DNA, 120 bp, Artificial Sequence
  ENSG00000036549_69 (sequence is synthesized)
ttttgatgattgctactaccatcacacactgtaaaacgtaatgttttgccatgtttgtgaaaggcttcagtgtttggtacaaaggagttgtcacttggagtctgttataagaagagtggg

SEQ ID NO: 25677 - DNA, 120 bp, Artificial Sequence
  ENSG00000036549_70 (sequence is synthesized)
ttttcaagtcaagggttactttatgtaggatcatgttttcgctgagcttctccccatgttaacttagaacatttcttaatgtactgtagtattaaatggttattagacaattttcctacc

SEQ ID NO: 25678 - DNA, 120 bp, Artificial Sequence
  ENSG00000036565_0 (sequence is synthesized)
gaacagtgtccctgctgtcttgctaacagctgccaatacctcactgagtgcctcacaccaacatgggctccaagtgagtttccttcgtctgggcagactccctcccctcttccataaagg

SEQ ID NO: 25679 - DNA, 120 bp, Artificial Sequence
  ENSG00000036565_1 (sequence is synthesized)
ctgcaggagacctgtagctgtcacaggaccttccctaagagcccgcaggggaagactgccccagtccggccatcaccatgctccggaccattctggatgctccccagcggttgctgaagg

SEQ ID NO: 25680 - DNA, 120 bp, Artificial Sequence
  ENSG00000036565_2 (sequence is synthesized)
aggggagagcgtcccggcagctggtgctggtggtggtattcgtcgctttgctcctggacaacatgctgtttactgtggtggtgccaattgtgcccaccttcctatatgacatggagttca

SEQ ID NO: 25681 - DNA, 120 bp, Artificial Sequence
  ENSG00000036565_3 (sequence is synthesized)
aagaagtcaactcttctctgcacctcggccatgccggaagttccccacatgccctcgcctctcctgccttttccaccatcttctccttcttcaacaacaacaccgtggctgttgaagaaa

SEQ ID NO: 25682 - DNA, 120 bp, Artificial Sequence
  ENSG00000036565_4 (sequence is synthesized)
gcgtacctagtggaatagcatggatgaatgacactgccagcaccatcccacctccagccactgaagccatctcagctcataaaaacaactgcttgcaaggcacaggtttcttggaggaag

SEQ ID NO: 25683 - DNA, 120 bp, Artificial Sequence
  ENSG00000036565_5 (sequence is synthesized)
agattacccgggtcggggttctgtttgcttcaaaggctgtgatgcaacttctggtcaacccattcgtgggccctctcaccaacaggattggatatcatatccccatgtttgctggctttg

SEQ ID NO: 25684 - DNA, 120 bp, Artificial Sequence
  ENSG00000036565_6 (sequence is synthesized)
ttatcatgtttctctccacagttatgtttgctttttctgggacctatactctactctttgtggcccgaacccttcaaggcattggatcttcattttcatctgttgcaggtcttggaatgc

SEQ ID NO: 25685 - DNA, 120 bp, Artificial Sequence
  ENSG00000036565_7 (sequence is synthesized)
tggccagtgtctacactgatgaccatgagagaggacgagccatgggaactgctctggggggcctggccttggggttgctggtgggagctccctttggaagtgtaatgtacgagtttgttg

SEQ ID NO: 25686 - DNA, 120 bp, Artificial Sequence
  ENSG00000036565_8 (sequence is synthesized)
ggaagtctgcacccttcctcatcctggccttcctggcactactggatggagcactccagctttgcatcctacagccttccaaagtctctcctgagagtgccaaggggactcccctcttta

SEQ ID NO: 25687 - DNA, 120 bp, Artificial Sequence
  ENSG00000036565_9 (sequence is synthesized)
tgcttctcaaagacccttacatcctggtggctgcagggtccatctgctttgccaacatgggggtggccatcctggagcccacactgcccatctggatgatgcagaccatgtgctccccca

SEQ ID NO: 25688 - DNA, 120 bp, Artificial Sequence
  ENSG00000036565_10 (sequence is synthesized)
agtggcagctgggtctagctttcttgcctgccagtgtgtcctacctcattggcaccaacctctttggtgtgttggccaacaagatgggtcggtggctgtgttccctaatcgggatgctgg

SEQ ID NO: 25689 - DNA, 120 bp, Artificial Sequence
  ENSG00000036565_11 (sequence is synthesized)
ttttggtctcattggccccaatgcagggcttggccttgccataggcatggtggattcttctatgatgcccatcatggggcacctggtggatctacgccacacctcggtgtatgggagtgt

SEQ ID NO: 25690 - DNA, 120 bp, Artificial Sequence
  ENSG00000036565_12 (sequence is synthesized)
ctacgccatcgctgatgtggctttttgcatgggctttgctataggtccatccaccggtggtgccattgtaaaggccatcggttttccctggctcatggtcatcactggggtcatcaacat

SEQ ID NO: 25691 - DNA, 120 bp, Artificial Sequence
  ENSG00000036565_13 (sequence is synthesized)
cgtctatgctccactctgctactacctgcggagccccccggcaaaggaagagaagcttgctattctgagtcaggactgccccatggagacccggatgtatgcaacccagaagcccacgaa

SEQ ID NO: 25692 - DNA, 120 bp, Artificial Sequence
  ENSG00000036565_14 (sequence is synthesized)
ggaatttcctctgggggaggacagtgatgaggagcctgaccatgaggagtagcagcagaaggtgctccttgaattcatgatgcctcagtgaccacctctttccctgggaccagatcacca

SEQ ID NO: 25693 - DNA, 120 bp, Artificial Sequence
  ENSG00000036565_15 (sequence is synthesized)
tggctgagcccacggctcagtgggcttcacatacctctgcctgggaatcttctttcctcccctcccatggacactgtccctgatactcttctcacctgtgtaacttgtagctcttcctct

SEQ ID NO: 25694 - DNA, 120 bp, Artificial Sequence
  ENSG00000036565_16 (sequence is synthesized)
atgccttggtgccgcagtggcccatcttttatgggaagacagagtgatgcaccttcccgctgctgtgaggttgattaaacttgagctgtgacgggttctgcaaggggtgactcattgcat

SEQ ID NO: 25695 - DNA, 120 bp, Artificial Sequence
  ENSG00000036565_17 (sequence is synthesized)
agaggtggtagtgagtaatgtgcccctgaaaccagtggggtgactgacaagcctctttaatctgttgcctgattttctctggcatagtcccaacagatcggaagagtgttaccctctttt

SEQ ID NO: 25696 - DNA, 120 bp, Artificial Sequence
  ENSG00000036565_18 (sequence is synthesized)
ttttcctcaacgtgttctttcccgggttttcccagccgagttgagaaaatgttctcagcattgtcttgctgccaaatgccagcttgaagagttttgttttgttttttttcatttattttt

SEQ ID NO: 25697 - DNA, 120 bp, Artificial Sequence
  ENSG00000036565_19 (sequence is synthesized)
ttaataaagtgagtgatttttctgtggctaaatctagagctgctaaaagggctttaccctcagtgaaaagtgtcttctattttcattatctttcagaaacaggagcccatttctcttctg

SEQ ID NO: 25698 - DNA, 120 bp, Artificial Sequence
  ENSG00000036565_20 (sequence is synthesized)
ctggagttattgacattctcctgacctcccctgtgtgttcctaccttttctgaacctcttagactcttagaaataaaagtagaagaaagacagaaaaaataactgattagacccaagatt

SEQ ID NO: 25699 - DNA, 120 bp, Artificial Sequence
  ENSG00000036565_21 (sequence is synthesized)
tcatgggaagaagttaaaagaaactgccttgaaatccctcctgattgtagatttcctaacaggaggggtgtaatgtgacattgttcatacttgctaataaatacattattgcctaattca

SEQ ID NO: 25700 - DNA, 120 bp, Artificial Sequence
  ENSG00000036565_22 (sequence is synthesized)
cacacacacacatacacagaatcctcagataacaggaggcaataaatccaacagcacatccacgttcagagaacagtgtccctgctgtcttgctaacagctgccaatacctcactgagtg

SEQ ID NO: 25701 - DNA, 120 bp, Artificial Sequence
  ENSG00000036565_23 (sequence is synthesized)
cctcacaccaacatgggctccaagatgaaggcatctttctgatcaggggtttgtagctcaaacaaaagaatgagcgtgcttctagaaccacagagcaagggaacatggtagaggataagc

SEQ ID NO: 25702 - DNA, 120 bp, Artificial Sequence
  ENSG00000036565_24 (sequence is synthesized)
tggcaagttgaaaagcgtgggatttcatcccagtttgacactaactgtgcaaccccaaacaaatctcctaaccttcagaggctcggatttcttgtctatgagatgaagtgagtttccttc

SEQ ID NO: 25703 - DNA, 120 bp, Artificial Sequence
  ENSG00000036565_25 (sequence is synthesized)
ctgtctcaaaaaaagaaagaaaacaaaaagaaaagtactgaggctaaacaaagccttgctcctgaagaaaggagaggtgtgggggtcctatggcaactactgtgggtttgcacaaaggtc

SEQ ID NO: 25704 - DNA, 120 bp, Artificial Sequence
  ENSG00000036565_26 (sequence is synthesized)
cccagatcataaaacaaagtggtttggggatcttggaaggttacaggggtggacttcagtgtcttgtacgagacaaggcattttagagtaaattggacatgtcctaaggtaaggatctgt

SEQ ID NO: 25705 - DNA, 120 bp, Artificial Sequence
  ENSG00000036565_27 (sequence is synthesized)
gtctaccaagttagaagtctaaatgaaacctttcagtgatgtccataatggaaaacagaggcaactttattccatgaagaatgagaccaggagtgtatgtttaggttcctctggctcaca

SEQ ID NO: 25706 - DNA, 120 bp, Artificial Sequence
  ENSG00000036565_28 (sequence is synthesized)
agacagaaaagactggaaataacaaagtctgagaaaagatgctggtggccaggaaagaagagaccaagaatgtgcatctttgggagacaaggagaagttcggtgtgatcatgtctgccgg

SEQ ID NO: 25707 - DNA, 120 bp, Artificial Sequence
  ENSG00000036565_29 (sequence is synthesized)
gaagtaatgggagaagattaaaaacacaaccaaagacatctgtaatgaatgggcaaagggattacaattcttctgattcagacacttcgaggagattattcttaccctaggagacatttt

SEQ ID NO: 25708 - DNA, 120 bp, Artificial Sequence
  ENSG00000036565_30 (sequence is synthesized)
tctggaattggaggtgagacatgtctggacttaactaccctgaccaccagcaccctctgatttagttttgtgttgcgggaagtcagggaccctgaatggaaggacctgctgaagccatga

SEQ ID NO: 25709 - DNA, 79 bp, Artificial Sequence
  ENSG00000036565_31 (sequence is synthesized)
ccccaaattaatacttttataatttctcacacttgtctttactgcaatctctgaacattatcaatactcttataatttc

SEQ ID NO: 25710 - DNA, 120 bp, Artificial Sequence
  ENSG00000036672_0 (sequence is synthesized)
aggcgcgatgaggcggctgcccgctgggtggcgccgatttcccggggaggtcccttctgggcccccggcggaggtgggagagagtcaggcaggagccgaggccggggagccctcttcgtc

SEQ ID NO: 25711 - DNA, 120 bp, Artificial Sequence
  ENSG00000036672_1 (sequence is synthesized)
agctggtgctcactgcgccgcgccagcgccagccgggactcacccgcagctccatgcttgtgcccggttcgactcgtccatactccaagaagaggcagcccatgaggctcccagtcccca

SEQ ID NO: 25712 - DNA, 120 bp, Artificial Sequence
  ENSG00000036672_2 (sequence is synthesized)
ctgagtgccaccctgaaggatgtcccagctctcctccaccctgaagcgctacacagaatcggcccgctacacagatgcccactatgccaagtcgggctatggtgcctacaccccgtcctc

SEQ ID NO: 25713 - DNA, 120 bp, Artificial Sequence
  ENSG00000036672_3 (sequence is synthesized)
ctatggggccaatctggctgcctccttactggagaaggagaaacttggtttcaagccggtccccaccagcagcttcctcacccgtccccgtacctatggcccctcctccctcctggacta

SEQ ID NO: 25714 - DNA, 120 bp, Artificial Sequence
  ENSG00000036672_4 (sequence is synthesized)
tgaccggggccgccccctgctgagacccgacatcactgggggtggtaagcgggcagagagccagacccggggtactgagcggcctttaggcagtggcctcagcgggggcagcggattccc

SEQ ID NO: 25715 - DNA, 120 bp, Artificial Sequence
  ENSG00000036672_5 (sequence is synthesized)
ttatggagtgaccaacaactgcctcagctacctgcccatcaatgcctatgaccagggggtgaccctaacccagaagctggacagccaatcagacctggcccgggatttctccagcctccg

SEQ ID NO: 25716 - DNA, 120 bp, Artificial Sequence
  ENSG00000036672_6 (sequence is synthesized)
gacctcagatagctaccggatagaccccaggaacctgggccgcagccccatgctggcccggacgcgcaaggagctctgcaccctgcaggggctctaccagacagccagctgccctgaata

SEQ ID NO: 25717 - DNA, 120 bp, Artificial Sequence
  ENSG00000036672_7 (sequence is synthesized)
cctggtcgactacctggagaactatggtcgcaagggcagtgcatctcaggtgccctcccaggcccctccctcacgagtccctgaaatcatcagcccaacctaccgacccattggccgcta

SEQ ID NO: 25718 - DNA, 120 bp, Artificial Sequence
  ENSG00000036672_8 (sequence is synthesized)
cacgctgtgggagacgggaaagggtcaggcccctgggcccagccgctccagctccccgggaagagacggcatgaattctaagagtgcccagggtctggctggtcttcgaaaccttgggaa

SEQ ID NO: 25719 - DNA, 120 bp, Artificial Sequence
  ENSG00000036672_9 (sequence is synthesized)
cacgtgcttcatgaactcaattctgcagtgcctgagcaacactcgggagttgagagattactgcctccagaggctctacatgcgggacctgcaccacggcagcaatgcacacacagccct

SEQ ID NO: 25720 - DNA, 120 bp, Artificial Sequence
  ENSG00000036672_10 (sequence is synthesized)
cgtggaagagtttgcaaaactaattcagaccatatggacttcatcccccaatgatgtggtgagcccatctgagttcaagacccagatccagagatacgcaccgcgctttgttggctataa

SEQ ID NO: 25721 - DNA, 120 bp, Artificial Sequence
  ENSG00000036672_11 (sequence is synthesized)
tcagcaggatgctcaggagttccttcgctttcttctggatgggctccataacgaggtgaaccgagtgacactgagacctaagtccaaccctgagaacctcgatcatcttcctgatgacga

SEQ ID NO: 25722 - DNA, 120 bp, Artificial Sequence
  ENSG00000036672_12 (sequence is synthesized)
gaaaggccgacagatgtggagaaaatatctagaacgggaagacagtaggatcggggatctctttgttgggcagctaaagagctcgctgacgtgtacagattgtggttactgttctacggt

SEQ ID NO: 25723 - DNA, 120 bp, Artificial Sequence
  ENSG00000036672_13 (sequence is synthesized)
cttcgaccccttctgggacctctcactgcccattgctaagcgaggttatcctgaggtgacattaatggactgcatgaggctcttcaccaaagaggatgtgcttgatggagatgaaaagcc

SEQ ID NO: 25724 - DNA, 120 bp, Artificial Sequence
  ENSG00000036672_14 (sequence is synthesized)
aacatgctgtcgctgccgaggcagaaaacggtgtataaagaagttctccatccagaggttcccaaagatcttggtgctccatctgaagcggttctcagaatccaggatccgaaccagcaa

SEQ ID NO: 25725 - DNA, 120 bp, Artificial Sequence
  ENSG00000036672_15 (sequence is synthesized)
tccaatcactccggaaccaccatgggtggccactatacagcctactgtcgcagtccagggacaggagaatggcacactttcaacgactccagcgtcactcccatgtcctccagccaagtg

SEQ ID NO: 25726 - DNA, 120 bp, Artificial Sequence
  ENSG00000036672_16 (sequence is synthesized)
cgcaccagcgacgcctacctgctcttctacgaactggccagcccgccctcccgaatgtagcgccaggagccacgtcccttctcccttccccgtggtggccccgctccctaaattttttaa

SEQ ID NO: 25727 - DNA, 120 bp, Artificial Sequence
  ENSG00000036672_17 (sequence is synthesized)
aaagacaaaaacaaaacaacaacaacaacacacaaacctgacaagagaaaaacaaacctgaagctgccgagcaggagtggatgcagcctgatcagggtctggagcaaggagccgggcttt

SEQ ID NO: 25728 - DNA, 120 bp, Artificial Sequence
  ENSG00000036672_18 (sequence is synthesized)
cctgagctgtggcccggcagggaagatcgcctggacgtggagccagcatcgccccgtgccctcggcgtttgcatttgtaaacttgtggtcttcctatgtgtcagaaacaactgtgtcttg

SEQ ID NO: 25729 - DNA, 120 bp, Artificial Sequence
  ENSG00000036672_19 (sequence is synthesized)
cttgggggggaagaccctcgctgcgccgcttcccgccgcagcgcccgcgcctccgaggggacagcgccctctggagctcgctgggagcatcaccgcctggacgcccgcgccgcggaggag

SEQ ID NO: 25730 - DNA, 120 bp, Artificial Sequence
  ENSG00000036672_20 (sequence is synthesized)
cgcccatctccacccgcacggctcgccggtccagagccatgagccaagagccctcttcacgctgctaactccaggggacagacgaagggacatctttggaaaacgctggttttggttttt

SEQ ID NO: 25731 - DNA, 120 bp, Artificial Sequence
  ENSG00000036672_21 (sequence is synthesized)
aaaaagcccaactttttttttttaatttccataactaaagtgttcagactggagtgctctccttcaggcctcttcatagctgggacgttgcactggtccttttattgcttttccaagtac

SEQ ID NO: 25732 - DNA, 120 bp, Artificial Sequence
  ENSG00000036672_22 (sequence is synthesized)
aactttctaatgctagccctccgtggtgctaggtgggcgttggccaggccccaagcacagccacagtagacctgggatctaaaacaagtttctgttttgggggtttgggttttttttttt

SEQ ID NO: 25733 - DNA, 120 bp, Artificial Sequence
  ENSG00000036672_23 (sequence is synthesized)
tttttttaatgttttgaatggaatttagttgcctccaagaattgtgccttatagcatttggggaccagggggtaactgcccctcctgaaatatccctcagcctcttcccttttccccagt

SEQ ID NO: 25734 - DNA, 120 bp, Artificial Sequence
  ENSG00000036672_24 (sequence is synthesized)
gctctgttcaaacccgcctgggaaagggatcctgcccttagccctggctcgttgtgcattgcagtgaggcaaagaagaaagcaggtagattccttccgacagggcatcaagttcttcccg

SEQ ID NO: 25735 - DNA, 120 bp, Artificial Sequence
  ENSG00000036672_25 (sequence is synthesized)
cccacgtcctctagcccacccctggtctgctccccagctgtttgaaggatagcacaagcccctcgtccctagagcttctctcccttttatttattctcttaacatccctttccccctggc

SEQ ID NO: 25736 - DNA, 120 bp, Artificial Sequence
  ENSG00000036672_26 (sequence is synthesized)
cttcctgcccccgcccccttctcagagcctcctagacaataggccctttggaccgagtttctcagggatgcccaggccacccctcagctcttcttagcgctggtctccagtcctgccctg

SEQ ID NO: 25737 - DNA, 120 bp, Artificial Sequence
  ENSG00000036672_27 (sequence is synthesized)
ggagctggagcctgggtatttggggacatcttgcctcagttgtatggttctttcctgtgggctcaattttgccctacatagttggataaaactctgtgctgtcctggagagtaaagctgt

SEQ ID NO: 25738 - DNA, 120 bp, Artificial Sequence
  ENSG00000036672_28 (sequence is synthesized)
tcacccacacagctgggcccggcttgtgccccgtggagcctggcacattccaggctcctaggaggaggcatcagagaaagacaccctgagttttactggcctgacacccttctccagaga

SEQ ID NO: 25739 - DNA, 120 bp, Artificial Sequence
  ENSG00000036672_29 (sequence is synthesized)
agacctgtgaacctgagcccaagggcaagtgtacacttgtttactgtgtaagcaagagtagaagaatgtctaatgtacagtggaaccttgtacagaataaataatagctttgagaaatca

SEQ ID NO: 25740 - DNA, 120 bp, Artificial Sequence
  ENSG00000036672_30 (sequence is synthesized)
gtcggccggagcgcgagagccgggacccgggctgttggcggcgcacgccggggaggttgaggcggaggagcgcgcgttcgggcgccgcggacgctgtcctgtagcggtctcgccggcctc

SEQ ID NO: 25741 - DNA, 120 bp, Artificial Sequence
  ENSG00000036672_31 (sequence is synthesized)
ggcgtccggactgtggcaccgcgcggggactccccccgcgcccccgctgccaacgttaagcgagggccaaagcccgccgcccgccccccagcatgcgcacctcgtacaccgtgaccctgc

SEQ ID NO: 25742 - DNA, 120 bp, Artificial Sequence
  ENSG00000036672_32 (sequence is synthesized)
ccgaggacccccccgccgccccctttcccgccctcgccaaggagctgcggccgcgctcccctctctccccgtccctgctgctctccaccttcgtggggctcctgctcaacaaagccaaga

SEQ ID NO: 25743 - DNA, 120 bp, Artificial Sequence
  ENSG00000036672_33 (sequence is synthesized)
ggattacccagcccagagtcaggctccagcttctgggctttccactgcattccctgccctgctggggaaggagaagcccccagctcccatccagtgcccctggacacagcccatgaggct

SEQ ID NO: 25744 - DNA, 120 bp, Artificial Sequence
  ENSG00000036672_34 (sequence is synthesized)
gtggcaacagggagactcgcagccacgtgagtgcccgtcctgtccctgtcttgcgcagcgagactccggccagggccccagcccgctctcctgcccatagtgcattctgtggcctccagg

SEQ ID NO: 25745 - DNA, 120 bp, Artificial Sequence
  ENSG00000036672_35 (sequence is synthesized)
gtaggatcgggggtaagcgcatgaaagggaagatgcctgttttcactgttgcctgctcttgcctgagtggagcatgaaaagccctaagaatcactctcccggggaagcctgtttctgcct

SEQ ID NO: 25746 - DNA, 80 bp, Artificial Sequence
  ENSG00000036828_0 (sequence is synthesized)
gcagcggccgcccagagggtctgcgggggctgctgtggccggacccgaaggcgggcgccgggagcgcagcgagccagacg

SEQ ID NO: 25747 - DNA, 120 bp, Artificial Sequence
  ENSG00000036828_1 (sequence is synthesized)
ccgaaggcgggcgccgggagcgcagcgagccagacgcgcctctccaagaccgtgaccttggcatagggagcggggctgcgcgcagtcctgagatcagaccagagctcatcctcgtggaga

SEQ ID NO: 25748 - DNA, 120 bp, Artificial Sequence
  ENSG00000036828_2 (sequence is synthesized)
cccacggccgaggggccggagctgcctctgtgcgagggagccctggccgcggcgcagaaggcatcacaggaggcctctgcatgatgtggcttccaaagactcaaggaccacccacattac

SEQ ID NO: 25749 - DNA, 120 bp, Artificial Sequence
  ENSG00000036828_3 (sequence is synthesized)
aagtctggattgaggaaggcagaaatggagattcaaacaccacgtcttctattattttattaatcaatctgtagacatgtgtccccactgcagggagtgaactgctccaagggagaaact

SEQ ID NO: 25750 - DNA, 120 bp, Artificial Sequence
  ENSG00000036828_4 (sequence is synthesized)
tctgggagcctccaaactcctagctgtctcatcccttgccctggagagacggcagaaccatggcattttatagctgctgctgggtcctcttggcactcacctggcacacctctgcctacg

SEQ ID NO: 25751 - DNA, 120 bp, Artificial Sequence
  ENSG00000036828_5 (sequence is synthesized)
ggccagaccagcgagcccaaaagaagggggacattatccttggggggctctttcctattcattttggagtagcagctaaagatcaagatctcaaatcaaggccggagtctgtggaatgta

SEQ ID NO: 25752 - DNA, 120 bp, Artificial Sequence
  ENSG00000036828_6 (sequence is synthesized)
tcaggtataatttccgtgggtttcgctggttacaggctatgatatttgccatagaggagataaacagcagcccagcccttcttcccaacttgacgctgggatacaggatatttgacactt

SEQ ID NO: 25753 - DNA, 120 bp, Artificial Sequence
  ENSG00000036828_7 (sequence is synthesized)
gcaacaccgtttctaaggccttggaagccaccctgagttttgttgctcaaaacaaaattgattctttgaaccttgatgagttctgcaactgctcagagcacattccctctacgattgctg

SEQ ID NO: 25754 - DNA, 120 bp, Artificial Sequence
  ENSG00000036828_8 (sequence is synthesized)
tggtgggagcaactggctcaggcgtctccacggcagtggcaaatctgctggggctcttctacattccccaggtcagttatgcctcctccagcagactcctcagcaacaagaatcaattca

SEQ ID NO: 25755 - DNA, 120 bp, Artificial Sequence
  ENSG00000036828_9 (sequence is synthesized)
agtctttcctccgaaccatccccaatgatgagcaccaggccactgccatggcagacatcatcgagtatttccgctggaactgggtgggcacaattgcagctgatgacgactatgggcggc

SEQ ID NO: 25756 - DNA, 120 bp, Artificial Sequence
  ENSG00000036828_10 (sequence is synthesized)
cggggattgagaaattccgagaggaagctgaggaaagggatatctgcatcgacttcagtgaactcatctcccagtactctgatgaggaagagatccagcatgtggtagaggtgattcaaa

SEQ ID NO: 25757 - DNA, 120 bp, Artificial Sequence
  ENSG00000036828_11 (sequence is synthesized)
attccacggccaaagtcatcgtggttttctccagtggcccagatcttgagcccctcatcaaggagattgtccggcgcaatatcacgggcaagatctggctggccagcgaggcctgggcca

SEQ ID NO: 25758 - DNA, 120 bp, Artificial Sequence
  ENSG00000036828_12 (sequence is synthesized)
gctcctccctgatcgccatgcctcagtacttccacgtggttggcggcaccattggattcgctctgaaggctgggcagatcccaggcttccgggaattcctgaagaaggtccatcccagga

SEQ ID NO: 25759 - DNA, 120 bp, Artificial Sequence
  ENSG00000036828_13 (sequence is synthesized)
agtctgtccacaatggttttgccaaggagttttgggaagaaacatttaactgccacctccaagaaggtgcaaaaggacctttacctgtggacacctttctgagaggtcacgaagaaagtg

SEQ ID NO: 25760 - DNA, 120 bp, Artificial Sequence
  ENSG00000036828_14 (sequence is synthesized)
gcgacaggtttagcaacagctcgacagccttccgacccctctgtacaggggatgagaacatcagcagtgtcgagaccccttacatagattacacgcatttacggatatcctacaatgtgt

SEQ ID NO: 25761 - DNA, 120 bp, Artificial Sequence
  ENSG00000036828_15 (sequence is synthesized)
acttagcagtctactccattgcccacgccttgcaagatatatatacctgcttacctgggagagggctcttcaccaatggctcctgtgcagacatcaagaaagttgaggcgtggcaggtcc

SEQ ID NO: 25762 - DNA, 120 bp, Artificial Sequence
  ENSG00000036828_16 (sequence is synthesized)
tgaagcacctacggcatctaaactttacaaacaatatgggggagcaggtgacctttgatgagtgtggtgacctggtggggaactattccatcatcaactggcacctctccccagaggatg

SEQ ID NO: 25763 - DNA, 120 bp, Artificial Sequence
  ENSG00000036828_17 (sequence is synthesized)
gctccatcgtgtttaaggaagtcgggtattacaacgtctatgccaagaagggagaaagactcttcatcaacgaggagaaaatcctgtggagtgggttctccagggaggtgcccttctcca

SEQ ID NO: 25764 - DNA, 120 bp, Artificial Sequence
  ENSG00000036828_18 (sequence is synthesized)
actgcagccgagactgcctggcagggaccaggaaagggatcattgagggggagcccacctgctgctttgagtgtgtggagtgtcctgatggggagtatagtgatgagacagatgccagtg

SEQ ID NO: 25765 - DNA, 120 bp, Artificial Sequence
  ENSG00000036828_19 (sequence is synthesized)
cctgtaacaagtgcccagatgacttctggtccaatgagaaccacacctcctgcattgccaaggagatcgagtttctgtcgtggacggagccctttgggatcgcactcaccctctttgccg

SEQ ID NO: 25766 - DNA, 120 bp, Artificial Sequence
  ENSG00000036828_20 (sequence is synthesized)
tgctgggcattttcctgacagcctttgtgctgggtgtgtttatcaagttccgcaacacacccattgtcaaggccaccaaccgagagctctcctacctcctcctcttctccctgctctgct

SEQ ID NO: 25767 - DNA, 120 bp, Artificial Sequence
  ENSG00000036828_21 (sequence is synthesized)
gccgcctgcgccagccggcctttggcatcagcttcgtgctctgcatctcatgcatcctggtgaaaaccaaccgtgtcctcctggtgtttgaggccaagatccccaccagcttccaccgca

SEQ ID NO: 25768 - DNA, 120 bp, Artificial Sequence
  ENSG00000036828_22 (sequence is synthesized)
agtggtgggggctcaacctgcagttcctgctggttttcctctgcaccttcatgcagattgtcatctgtgtgatctggctctacaccgcgcccccgtcaagctaccgcaaccaggagctgg

SEQ ID NO: 25769 - DNA, 120 bp, Artificial Sequence
  ENSG00000036828_23 (sequence is synthesized)
aggatgagatcatcttcatcacgtgccacgagggctccctcatggccctgggcttcctgatcggctacacctgcctgctggctgccatctgcttcttctttgccttcaagtcccggaagc

SEQ ID NO: 25770 - DNA, 120 bp, Artificial Sequence
  ENSG00000036828_24 (sequence is synthesized)
tgccggagaacttcaatgaagccaagttcatcaccttcagcatgctcatcttcttcatcgtctggatctccttcattccagcctatgccagcacctatggcaagtttgtctctgccgtag

SEQ ID NO: 25771 - DNA, 120 bp, Artificial Sequence
  ENSG00000036828_25 (sequence is synthesized)
aggtgattgccatcctggcagccagctttggcttgctggcgtgcatcttcttcaacaagatctacatcattctcttcaagccatcccgcaacaccatcgaggaggtgcgttgcagcaccg

SEQ ID NO: 25772 - DNA, 120 bp, Artificial Sequence
  ENSG00000036828_26 (sequence is synthesized)
cagctcacgctttcaaggtggctgcccgggccacgctgcgccgcagcaacgtctcccgcaagcggtccagcagccttggaggctccacgggatccaccccctcctcctccatcagcagca

SEQ ID NO: 25773 - DNA, 120 bp, Artificial Sequence
  ENSG00000036828_27 (sequence is synthesized)
agagcaacagcgaagacccattcccacagcccgagaggcagaagcagcagcagccgctggccctaacccagcaagagcagcagcagcagcccctgaccctcccacagcagcaacgatctc

SEQ ID NO: 25774 - DNA, 120 bp, Artificial Sequence
  ENSG00000036828_28 (sequence is synthesized)
agcagcagcccagatgcaagcagaaggtcatctttggcagcggcacggtcaccttctcactgagctttgatgagcctcagaagaacgccatggcccacaggaattctacgcaccagaact

SEQ ID NO: 25775 - DNA, 120 bp, Artificial Sequence
  ENSG00000036828_29 (sequence is synthesized)
ccctggaggcccagaaaagcagcgatacgctgacccgacacgagccattactcccgctgcagtgcggggaaacggacttagatctgaccgtccaggaaacaggtctgcaaggacctgtgg

SEQ ID NO: 25776 - DNA, 120 bp, Artificial Sequence
  ENSG00000036828_30 (sequence is synthesized)
gtggagaccagcggccagaggtggaggaccctgaagagttgtccccagcacttgtagtgtccagttcacagagctttgtcatcagtggtggaggcagcactgttacagaaaacgtagtga

SEQ ID NO: 25777 - DNA, 120 bp, Artificial Sequence
  ENSG00000036828_31 (sequence is synthesized)
attcataaaatggaaggagaagactgggctagggagaatgcagagaggtttcttggggtcccagggaagaggaatcgccccagactcctttcctctgaggaagaagggataatagacaca

SEQ ID NO: 25778 - DNA, 120 bp, Artificial Sequence
  ENSG00000036828_32 (sequence is synthesized)
tcaaatgccccgaatttagtcacaccatcttaaatgacagtgaattgacccatgttccctttaaaattaaaaaaaagaagagccttgtgtttctgtggttgcatttgtcaaagcattgag

SEQ ID NO: 25779 - DNA, 120 bp, Artificial Sequence
  ENSG00000036828_33 (sequence is synthesized)
atctccacggtcagatttgctgttcacccacatctaatgtctcttcctctgttctatcccacccaacagctcagagatgaaactatggctttaaactaccctccagagtgtgcagactga

SEQ ID NO: 25780 - DNA, 120 bp, Artificial Sequence
  ENSG00000036828_34 (sequence is synthesized)
tgggacatcaaatttgccaccactagagctgagagtctgaaagacagaatgtcaccagtcctgcccaatgccttgacaacagactgaattttaaatgttcacaacataaggagaatgtat

SEQ ID NO: 25781 - DNA, 120 bp, Artificial Sequence
  ENSG00000036828_35 (sequence is synthesized)
ctcctcctatttatgaaaaccatatgatattttgtctcctacctgctgctgctattatgtaacatccagaaggtttgcacccctcctataccatatgtctgcttctgtccaggacatgat

SEQ ID NO: 25782 - DNA, 120 bp, Artificial Sequence
  ENSG00000036828_36 (sequence is synthesized)
actgatgccatgtttagattccaggatcacaagaatcacctcaaattgttaggaagggactgcataaaccaatgagctgtatctgtaattaatattcctatatgtagctttatccttagg

SEQ ID NO: 25783 - DNA, 120 bp, Artificial Sequence
  ENSG00000036828_37 (sequence is synthesized)
aaaatgcttctgttgtaatagtccatggacaatataaactgaaaaatgtcagtctggtttatataaggcagtattattgagctctatttccccaccccactatcctcactcccataagct

SEQ ID NO: 25784 - DNA, 120 bp, Artificial Sequence
  ENSG00000036828_38 (sequence is synthesized)
aagccttatgtgagccccttcagggactcaagggtccagaagtccctcccatctctaccccaaagaattcctgaagccagatccaccctatccctgtacagagtaagttctcaattattg

SEQ ID NO: 25785 - DNA, 120 bp, Artificial Sequence
  ENSG00000036828_39 (sequence is synthesized)
gcctgctaatagctgctagggtaggaaagcgtggttccaagaaagatccaccctcaaatgtcagagctatgttccctccagcagtggtattaatactgccggtcacccaggctctggagc

SEQ ID NO: 25786 - DNA, 120 bp, Artificial Sequence
  ENSG00000036828_40 (sequence is synthesized)
cagagagacagaccggggttcaagccatggcttcgtcatttgcaagctgagtgactgtaggcagggaaccttaacctctctaagccacagcttcttcatctttaaaataaggataataat

SEQ ID NO: 25787 - DNA, 120 bp, Artificial Sequence
  ENSG00000036828_41 (sequence is synthesized)
cattctttcccctcagagctcttatgtggattaaacgagataatgtatataaagtactttagcctggtacctagcacacaataagcattcaataaatattagttaatattattactgata

SEQ ID NO: 25788 - DNA, 120 bp, Artificial Sequence
  ENSG00000036828_42 (sequence is synthesized)
caacaggcacctggctgcagccaggaaggaccgcacgccctttcgcgcaggagagtggaaggagggagctgtttgccagcaccgaggtcttgcggcacaggcaacgcttgacctgagtct

SEQ ID NO: 25789 - DNA, 120 bp, Artificial Sequence
  ENSG00000036828_43 (sequence is synthesized)
cacaatcactctctctgtaataagcccaagagctctgggcccaacacatggggtcagccatagtatcactggctcatggtgaggaagccagaaagctggtcagcccctcaggtggcccaa

SEQ ID NO: 25790 - DNA, 120 bp, Artificial Sequence
  ENSG00000036828_44 (sequence is synthesized)
tgccctgtctccgcagtgtcagggcctggacctccagcatccagggaagaccatcaccagtctagcaggaggttctaagctgaggccaaaccattgcaattaaatctcctgaagcctcaa

SEQ ID NO: 25791 - DNA, 120 bp, Artificial Sequence
  ENSG00000036828_45 (sequence is synthesized)
attttacagctcttggtgacttcttcccctgaccactttcttccaaaggggcgcctttcagtgatttgtagggcaaattggtggacttgatagttgttaagattataatgagaaatcatt

SEQ ID NO: 25792 - DNA, 120 bp, Artificial Sequence
  ENSG00000036828_46 (sequence is synthesized)
agagggcaccatgtgggagcgcgactgtgagcagaaggtggtgactcaggatgacccaagtgaggtgcctgctccccacctaggaagggcaccggcccccacccagcctgcgcccccctg

SEQ ID NO: 25793 - DNA, 120 bp, Artificial Sequence
  ENSG00000036828_47 (sequence is synthesized)
cagtcatgcctctgagcaaggcaccgagctgagtggggatttatatttaacattttacttggtcttaaaagaaatgctgaaaatgtgatggtttcaaaataactatgagggaacagcctc

SEQ ID NO: 25794 - DNA, 120 bp, Artificial Sequence
  ENSG00000036828_48 (sequence is synthesized)
aacagaatgtgacatacttctccctccagggtttgacttcaatgtccatgtcacccaaggggctttaggaggaaaacataggtttacagtgagcttttatttcaccaagtgcttgcaaat

SEQ ID NO: 25795 - DNA, 120 bp, Artificial Sequence
  ENSG00000036828_49 (sequence is synthesized)
aaggagtctctcccaatgctgttgtcagaaaggcagatacagaaacactgtcccaatttatacgtagcaggcacaactcagcacaaaatcaggggtgtgaaatatgaacttgcattgttt

SEQ ID NO: 25796 - DNA, 120 bp, Artificial Sequence
  ENSG00000036828_50 (sequence is synthesized)
ttctacaacaacttaatttctatctcaaattcccctccagcctagtgacagaaacttcatcttagtcgaatcggggttttcacagtaacctcagtgttttctgagccaatttagatgttt

SEQ ID NO: 25797 - DNA, 120 bp, Artificial Sequence
  ENSG00000036828_51 (sequence is synthesized)
ggggatcaattcagaggttgttccttctcccttccaggagggcttttgtaatgttggggtgggcctcctcagtcatcagcagctccctcatgacattgctgaaagcaatcttatctggcc

SEQ ID NO: 25798 - DNA, 120 bp, Artificial Sequence
  ENSG00000036828_52 (sequence is synthesized)
ttcgctggcgtgctctgaggcattgtatcctcatctggtcccatcatgggtttcgtggtggttttcacgcatgcctcactgtcctaaccagtcggtccctgtggggcctgctagctcttg

SEQ ID NO: 25799 - DNA, 120 bp, Artificial Sequence
  ENSG00000036828_53 (sequence is synthesized)
cagctacctccatgctcatccctgaggcccagaaatcactggcagcctcactttcatgtctacttgactgctgtctccccatgacagtacacagagcttatggaggctaacaaagcttcc

SEQ ID NO: 25800 - DNA, 120 bp, Artificial Sequence
  ENSG00000036828_54 (sequence is synthesized)
agggtaccagagaagaaacagggtacatgtctccaaacctgaatagacttcgtagtgggcaaataatggtcacccaaagatgcccacatcctcatctctagaacctatggctatgttgtt

SEQ ID NO: 25801 - DNA, 120 bp, Artificial Sequence
  ENSG00000036828_55 (sequence is synthesized)
acatggcaagggtgaattaaagtatagtggaattaagattgctaatcagctgaccttgagataggaagagcgtcccaaattatccaggtgggtccagtggaatcccaagggcccttaaat

SEQ ID NO: 25802 - DNA, 120 bp, Artificial Sequence
  ENSG00000036828_56 (sequence is synthesized)
gtggacgaagcagaagagtcagtgtgagagcaatacagtatgagaaaaacaccactggcctgtactgcctttgcgtagggaagtggacatgagctgaggaaggcaggctgcttctagaag

SEQ ID NO: 25803 - DNA, 120 bp, Artificial Sequence
  ENSG00000036828_57 (sequence is synthesized)
ctggcaaatgccagaaaaccgattctcccctaaaacatccagaaaggaatgcagccctgccaacatcttgattttagcccagtgacacccttgtaggactttggacctccagatctgtaa

SEQ ID NO: 25804 - DNA, 120 bp, Artificial Sequence
  ENSG00000036828_58 (sequence is synthesized)
gataatacatttgtgttgttttaagccatgaagtttatagtaatttgtttcagcagcaacagaaaacaaatacatttgtattgttatctccttccctgagttttggcagccagagcctgt

SEQ ID NO: 25805 - DNA, 120 bp, Artificial Sequence
  ENSG00000036828_59 (sequence is synthesized)
ctcagagatctattcctgttctcactgtggtcctcttcccttcacctagctcactccttcccctctaatattctattcctctacatctgcttgggaaagtataaacctcatattctaagt

SEQ ID NO: 25806 - DNA, 120 bp, Artificial Sequence
  ENSG00000036828_60 (sequence is synthesized)
ctttgctggctttggttatagaaaatacacagccgtgttgtctcattctattatctgtcagtagcagaaacctgaaattggtagcttcaacaaactagtgtttgcttttctcttgaataa

SEQ ID NO: 25807 - DNA, 120 bp, Artificial Sequence
  ENSG00000036828_61 (sequence is synthesized)
aggaagtcaggaggtaaatatatgatcaccttttaattactttttaaaatatttcttaggttttgttaacaatgggaaactgcttacatttcttttgaaaattaaaatgaattataaagt

SEQ ID NO: 25808 - DNA, 120 bp, Artificial Sequence
  ENSG00000036828_62 (sequence is synthesized)
taaaaagattttcactcaaatgaaagtgtcctagaagattttaagaatttaggttggaaatttagaggtgacgatcagcatataacatcaataccctgaaagtccctatgatcgtcacac

SEQ ID NO: 25809 - DNA, 120 bp, Artificial Sequence
  ENSG00000036828_63 (sequence is synthesized)
gttgtctaattgcattaattttgattttggggaagttggggctaccctacctctgtctccaaaaggcacatttcaaggcaatgttgtctgtcgttttgctctggctgaaatcacatagct

SEQ ID NO: 25810 - DNA, 120 bp, Artificial Sequence
  ENSG00000036828_64 (sequence is synthesized)
acgggctggttctgcccagccagagcttccctttgctcatctgctgcatttgaaataattattgctacaagaataatggaacatcaataaggggtgctaatcaccggaggaggtggccct

SEQ ID NO: 25811 - DNA, 120 bp, Artificial Sequence
  ENSG00000036828_65 (sequence is synthesized)
catttgtctgagcctgagtggtcattttaggagtccactggagacaagaatactcccaaaggtgggtggaattagggtaggtgggaggaagttgccacagtgagatcacagcctctggga

SEQ ID NO: 25812 - DNA, 120 bp, Artificial Sequence
  ENSG00000036828_66 (sequence is synthesized)
gatgctggttttcctggcccagatcatggaaaaaaaacatcaagacttggatgacaactttgagtgactttgctattatgcaaggagtgaggcaggggtcagggaaacaacaagcacagg

SEQ ID NO: 25813 - DNA, 120 bp, Artificial Sequence
  ENSG00000036828_67 (sequence is synthesized)
gtagaacctgtcacaggaataaaggtgcattccaaggatccaaagaagaaccttagccttgagaggaaaagctcagcaagtggtatgagaaatggagaactgctaggtgaaggccaacag

SEQ ID NO: 25814 - DNA, 120 bp, Artificial Sequence
  ENSG00000036828_68 (sequence is synthesized)
ggcaggaagccgggcagagccagcatgaaggtgcctctgggaactggagggacaactgtgactctagcaccgagtggggctaggggaaccttctcctctgttgggaataaccaccacatt

SEQ ID NO: 25815 - DNA, 120 bp, Artificial Sequence
  ENSG00000036828_69 (sequence is synthesized)
catcccctcccctgacccctggacaagagtggaggacacttggagtggagacaagcaggggtacctgtttaaatcaacagctgaggccagatgcagaggctcatgcctgcaatcccagca

SEQ ID NO: 25816 - DNA, 78 bp, Artificial Sequence
  ENSG00000036828_70 (sequence is synthesized)
agttgcaataaaaaaaaaaaacagctggacatggtggcatgcgcctgtagtggcagataactcaggaggctgaggtgg

SEQ ID NO: 25817 - DNA, 120 bp, Artificial Sequence
  ENSG00000036828_71 (sequence is synthesized)
agctggacatggtggcatgcgcctgtagtggcagataactcaggaggctgaggtggggggatctgcttgagcccaggaggtgaaggctgcattgagctgtgattgcaccactgcactcca

SEQ ID NO: 25818 - DNA, 120 bp, Artificial Sequence
  ENSG00000036828_72 (sequence is synthesized)
aaaaaaaaaagaagaagaaaaacaattttattggtagaggcggggggaataatagagatacagcaccagctccctgcctctaaaatgtgggcacctgggtaactagatagcgcaggaagt

SEQ ID NO: 25819 - DNA, 120 bp, Artificial Sequence
  ENSG00000036828_73 (sequence is synthesized)
agatagcgcaggaagttagaacaaataaaagcagcaaactctgtgactgaagtttcagcacatggatggcaaatattttcaagtttggtgaaaataggtaagagatcaaagcccaagaat

SEQ ID NO: 25820 - DNA, 120 bp, Artificial Sequence
  ENSG00000036828_74 (sequence is synthesized)
aaaccctggggtcattacaggatttcctgtaaaggcatcaggaaatgtttttggaagaatgtgattgtcttcgttgatatcaacccaaagatgtggttattgttcagaatgtcctgattt

SEQ ID NO: 25821 - DNA, 120 bp, Artificial Sequence
  ENSG00000036828_75 (sequence is synthesized)
tctttaaatgttttgtttctatctgacctctcattataaatgagaaacttataaattataaatatacactcattataaatgaagattgcttggtaatggactaatggataattgtttctg

SEQ ID NO: 25822 - DNA, 120 bp, Artificial Sequence
  ENSG00000036828_76 (sequence is synthesized)
cttctttaggatgttctaaatttttcccaagttttgtacattaagcacaaaattataacaggaaaataaagaaaagaatttaaaataaacatgcaaccaaattttaaacagataagtata

SEQ ID NO: 25823 - DNA, 120 bp, Artificial Sequence
  ENSG00000036828_77 (sequence is synthesized)
ataaacatgcaaccaaattttaaacagataagtatatcatattagataggaatcaccatactgggtcagtcacccctcctccaaatttttctttattcttttttttttattatactttaa

SEQ ID NO: 25824 - DNA, 120 bp, Artificial Sequence
  ENSG00000036828_78 (sequence is synthesized)
ttggtagtggactaatggataattgtttctgcttctttaggattttctaaatttttcccaagttttgtatattaagcacaaaattataacaggaaaataaagaaaagaatttaaaataaa

SEQ ID NO: 25825 - DNA, 120 bp, Artificial Sequence
  ENSG00000036828_79 (sequence is synthesized)
gcgcagtcctgagatcagaccagagctcatcctcgtggagacccacggccgaggggccggagctgcctctgtgcgagggagccctggccgcggcgcagaaacaaaaaataaaacagggaa

SEQ ID NO: 25826 - DNA, 120 bp, Artificial Sequence
  ENSG00000036828_80 (sequence is synthesized)
gaaaccagaattccatcaatgagatctaatcatccttaacatttcgctacagcggagccacaaacttggcttacagcttcctaacactcaaagaaggaaacaggagaagagagaagattt

SEQ ID NO: 25827 - DNA, 120 bp, Artificial Sequence
  ENSG00000036828_81 (sequence is synthesized)
gtaatgcctataaaataattttggccaggttttccaaagaaaaccagaatttccatgtgcttagaaagatgtccccacgatgtgctagaacaggcttctatcggcgcttgagagccgatg

SEQ ID NO: 25828 - DNA, 120 bp, Artificial Sequence
  ENSG00000036828_82 (sequence is synthesized)
gttaaatattcagattttttacaaatatgttgttaaaccattggtagcttgaaactgaccatggtgggaatatttagcatacaccacaagtcaggtcttgtttttcttttagaagccaga

SEQ ID NO: 25829 - DNA, 120 bp, Artificial Sequence
  ENSG00000036828_83 (sequence is synthesized)
ctacaagcacaccaccacatgtccccagtggtcctcagacaaagacactgtgtgaggtcaggagagttgcaagtggatggggaaaggctcagtgtacaactttctatgtacaatagaaac

SEQ ID NO: 25830 - DNA, 120 bp, Artificial Sequence
  ENSG00000036828_84 (sequence is synthesized)
ccatccctcaggagtagcggagaacagaaacatatgcctgaccagagaatgacttcaaagttacatcagcagtcacccaccccacctgagtccttctttccaataataccctttggaatt

SEQ ID NO: 25831 - DNA, 120 bp, Artificial Sequence
  ENSG00000036828_85 (sequence is synthesized)
gggcagacatatctccccattcaaagatacacctaaacaaatgcgagaatctcagattacagactttatgctttccactcagtcagcccttccaagcccatgtttcacggcatcatgaaa

SEQ ID NO: 25832 - DNA, 120 bp, Artificial Sequence
  ENSG00000036828_86 (sequence is synthesized)
agtgtccttcagggaagaaaaaaagtgtcccataccaaaataagcaataatctttattgcaggacttctcagagcctttaaggaggcatatgtgctcctgtggcagagtgtacattagtt

SEQ ID NO: 25833 - DNA, 120 bp, Artificial Sequence
  ENSG00000036828_87 (sequence is synthesized)
cccaaacttgttttaccccagaacacttcctggtgacacatcttgggacatcatactgaaaaatgccaccctgggtagtcagggttccttatgatttggagaggcaacgccaggatgtta

SEQ ID NO: 25834 - DNA, 120 bp, Artificial Sequence
  ENSG00000036828_88 (sequence is synthesized)
ttccacagaaatgtttcttttatgtaggacttgaggctctggcatttttctttataaaaacatgagttgcatatcttcgcttttcaaatgaaccatttcattaactctgttggtgttcat

SEQ ID NO: 25835 - DNA, 120 bp, Artificial Sequence
  ENSG00000036828_89 (sequence is synthesized)
acatccgtcagcagagctgacttaaggcataaaggaaacagttcaggacaagaagtttcttaacttcctgtgggctatgtcgccagcaactcactcagtcctatgtggacacagagtttg

SEQ ID NO: 25836 - DNA, 120 bp, Artificial Sequence
  ENSG00000036828_90 (sequence is synthesized)
ttatgttgccggcagtacacacaagtatgcacccactcaaccatcatcatggagcccctccatgttccaggccgcggatgggacagacctggccctgtcttcaaggagctcaggatgcag

SEQ ID NO: 25837 - DNA, 120 bp, Artificial Sequence
  ENSG00000036828_91 (sequence is synthesized)
ttctcaggcggggcactgggagcaggatcagaagaagcaggcttgggggtgccatgcccaatagccatacggtttaccatattcccatctctggcacaaaagacctatgatttagttgat

SEQ ID NO: 25838 - DNA, 120 bp, Artificial Sequence
  ENSG00000036828_92 (sequence is synthesized)
atgctgtatcatgaccatttgggatttctgaaactccagtgtccacaatatcaatgataccttcactatgcttccaaaattcttttaaatgtaccttgcataaaactgtgtcttttttta

SEQ ID NO: 25839 - DNA, 120 bp, Artificial Sequence
  ENSG00000037042_0 (sequence is synthesized)
attccagctgcgactgctgagggagaaaatgatgcccaggttgggctccccggcccaccggccgaggagaggcctgcgctgcacacgcgcagaccgagcatccgcgtcaagaggcgaaga

SEQ ID NO: 25840 - DNA, 120 bp, Artificial Sequence
  ENSG00000037042_1 (sequence is synthesized)
gagcgcgcgctccccacgtcctgcgctcctggctgccgggcattcgtctcagccgtgactctcgccaggccggggctggcgcgcccacgtctgaagagcgatgccccgggagatcatcac

SEQ ID NO: 25841 - DNA, 120 bp, Artificial Sequence
  ENSG00000037042_2 (sequence is synthesized)
cctgcagctgggccagtgcggcaaccagattgggttcgagttctggaaacagctgtgcgccgagcatggtatcagccccgagggcatcgtggaggaattcgccaccgagggcactgaccg

SEQ ID NO: 25842 - DNA, 120 bp, Artificial Sequence
  ENSG00000037042_3 (sequence is synthesized)
caaggacgtctttttctaccaggcagacgatgagcactacatcccccgggccgtgctgctggacttggaaccccgggtgatccactccatcctcaactccccctatgccaagctctacaa

SEQ ID NO: 25843 - DNA, 120 bp, Artificial Sequence
  ENSG00000037042_4 (sequence is synthesized)
cccagagaacatctacctgtcggaacatggaggaggagctggcaacaactgggccagcggattctcccagggtgagaaaattcatgaagacatctttgacatcatagaccgagaagcaga

SEQ ID NO: 25844 - DNA, 120 bp, Artificial Sequence
  ENSG00000037042_5 (sequence is synthesized)
tggaagtgacagtttggagggcttcgtgctgtgtcactccatcgctgggggtacgggttctggcctgggctcctacctcctggagcgactgaatgacaggtaccccaagaagctagtgca

SEQ ID NO: 25845 - DNA, 120 bp, Artificial Sequence
  ENSG00000037042_6 (sequence is synthesized)
gacttattcagtgtttccctaccaggacgagatgagcgacgtagtggttcagccctacaattcactcctgacactcaagaggctgacgcagaacgcagattgtgtggtggtgctggacaa

SEQ ID NO: 25846 - DNA, 120 bp, Artificial Sequence
  ENSG00000037042_7 (sequence is synthesized)
caccctgcgctaccccggctacatgaacaatgacctcatcggcctcatcgcctcgctcattcccaccccacggctccacttcctcatgaccggctacaccccgctcactacagaccagtc

SEQ ID NO: 25847 - DNA, 120 bp, Artificial Sequence
  ENSG00000037042_8 (sequence is synthesized)
agtggccagcgtgaggaagaccacggtcctggatgtcatgaggcggctgctgcagcccaagaacgtgatggtgtccacaggccgagaccgccagaccaaccactgctacatcgccatcct

SEQ ID NO: 25848 - DNA, 120 bp, Artificial Sequence
  ENSG00000037042_9 (sequence is synthesized)
caacatcatccagggagaggtggaccccacccaggtccacaagagcctgcagaggatccgggaacggaagttggccaacttcatcccgtggggccccgccagcatccaggtggccctgtc

SEQ ID NO: 25849 - DNA, 120 bp, Artificial Sequence
  ENSG00000037042_10 (sequence is synthesized)
gaggaagtctccctacctgccctcggcccaccgggtcagcgggctcatgatggccaaccacaccagcatctcctcgctctttgaaagttcctgccagcagtttgacaagctgcggaagcg

SEQ ID NO: 25850 - DNA, 120 bp, Artificial Sequence
  ENSG00000037042_11 (sequence is synthesized)
ggatgccttcctcgagcagttccgtaaggaggacatgttcaaggacaactttgatgagatggacaggtctagggaggttgttcaggagctcattgatgagtaccatgcggccacccagcc

SEQ ID NO: 25851 - DNA, 120 bp, Artificial Sequence
  ENSG00000037042_12 (sequence is synthesized)
agactacatttcctggggcacccaggagcagtgatttccctccccactactccttctccttctagatggtaaccacagcctcgaccatgcctgctccctctgacccagcttcacctcatg

SEQ ID NO: 25852 - DNA, 120 bp, Artificial Sequence
  ENSG00000037042_13 (sequence is synthesized)
gacaacccttcttggttcatctccagcccgtgagctggtcctgcttcctcccttccatgccctaacttttaatatgcttgttcagctctaataaagtaataaagcttggttgtcagtata

SEQ ID NO: 25853 - DNA, 120 bp, Artificial Sequence
  ENSG00000037042_14 (sequence is synthesized)
accagagtgagcaagcgagcgccggccccgccggtctctggttctgccccttcgggtcccacccaagtgcctggcttccaccagtccccctttcccttccatgaaccccctgccctgctg

SEQ ID NO: 25854 - DNA, 120 bp, Artificial Sequence
  ENSG00000037042_15 (sequence is synthesized)
ctctggataacccagaccgagagctgcgcctccagcccggggctggggcagctaccaaacccaggcatcttgggtccaccctctgatcgtgtcagcctctgagactaaaactgggctcct

SEQ ID NO: 25855 - DNA, 120 bp, Artificial Sequence
  ENSG00000037042_16 (sequence is synthesized)
tacctgtcggaacatggaggaggagctggcaacaactgggccagcggattctcccaggtgtcctagcgaccattccagagacctttgatattcccatccagagggtgagaaaattcatga

SEQ ID NO: 25856 - DNA, 120 bp, Artificial Sequence
  ENSG00000037042_17 (sequence is synthesized)
agacatctttgacatcatagaccgagaagcagatggaagtgacagtttggaggtgaagttatggagtgggggaaggaatgggcagggaggccgaagagtgctggggacaggtcaggaggt

SEQ ID NO: 25857 - DNA, 120 bp, Artificial Sequence
  ENSG00000037042_18 (sequence is synthesized)
ggcctggataggtaatatgaggggagcaattcaattcaaaacccgtttatggagcatcagatgtgggatattgaggtgaataagatataatctttgttctcaaggaagtcataaatctga

SEQ ID NO: 25858 - DNA, 120 bp, Artificial Sequence
  ENSG00000037042_19 (sequence is synthesized)
aggcatgagtcattcagctgcttctccagctccaaaccttcccaaggagcctcagcctggatgcataagaggaagctttgagacattggcgttttgggaatggagaatgaaccaagccga

SEQ ID NO: 25859 - DNA, 120 bp, Artificial Sequence
  ENSG00000037042_20 (sequence is synthesized)
agtctctcccccagatccttggagactgcctctccatctctccccatgctgggtgcgatatgttcctggcttacagctcttataacccatgtaatttcctaagggactagagcaataata

SEQ ID NO: 25860 - DNA, 120 bp, Artificial Sequence
  ENSG00000037042_21 (sequence is synthesized)
gtatgttttgttaaaatatttgaccttttgtccttggtttctgaaacagctccagaacagctccagagtgataaaggtgaaagacagtcttttgttatttataacaagcccgtttctttt

SEQ ID NO: 25861 - DNA, 120 bp, Artificial Sequence
  ENSG00000037042_22 (sequence is synthesized)
agtttaatctttcattttattttaattagttaattttactaaccactgtactaaggaggaacaagtgcctttcaaccaaacctgagcttatgttaaagaggcgatttttggaaagtccca

SEQ ID NO: 25862 - DNA, 120 bp, Artificial Sequence
  ENSG00000037241_0 (sequence is synthesized)
acttccggccctgcgcactcagggtctgaggcagctagtagccggagggtcaccatgaagttcaatcccttcgttacctcggaccgcagtaaaaaccgcaaacgtcacttcaatgccccc

SEQ ID NO: 25863 - DNA, 120 bp, Artificial Sequence
  ENSG00000037241_1 (sequence is synthesized)
tcacacgtgcgcaggaagatcatgtcatccccgctctccaaggagctgcggcagaagtacaatgtccgctccatgcccatccgcaaggacgacgaggtccaggtagttcgaggacactac

SEQ ID NO: 25864 - DNA, 120 bp, Artificial Sequence
  ENSG00000037241_2 (sequence is synthesized)
aaaggtcagcaaattggcaaggtagtccaggtgtacagaaagaaatatgtcatctacatcgagcgggtgcagcgtgagaaggccaacggcacaactgtccacgtgggcattcacccaagc

SEQ ID NO: 25865 - DNA, 120 bp, Artificial Sequence
  ENSG00000037241_3 (sequence is synthesized)
ggtggttatcaccaggctaaaactggacaaggatcggaaaaaaattcttgaacgcaaagccaagtctcgacaagttggaaaagagaaaggcaaatataaagaagaacttattgagaaaat

SEQ ID NO: 25866 - DNA, 120 bp, Artificial Sequence
  ENSG00000037241_4 (sequence is synthesized)
gcaggaataaatagaacctgttgtgcaaccacggtttaaccggagattttgaggctagggtgtgtttctttcgaacttttcggaatgtctggaacatttcatttcctgttttgttacctg

SEQ ID NO: 25867 - DNA, 120 bp, Artificial Sequence
  ENSG00000037241_5 (sequence is synthesized)
tgcctctgtaaatctacttttgcaattttaagtaataattttatgaataaaaatgggaaatgcttcctaattccacatagtatttgcattgttttataaataaattccacttactatcaa

SEQ ID NO: 25868 - DNA, 120 bp, Artificial Sequence
  ENSG00000037241_6 (sequence is synthesized)
gtagagcctttgttgggggatgaggagtgtcttgggtcgagaacaggcccctgtaacccactgagcgccccttcattccgtctctctccgccctttgtagagggtcaccatgaagttcaa

SEQ ID NO: 25869 - DNA, 120 bp, Artificial Sequence
  ENSG00000037280_0 (sequence is synthesized)
actttcagccccgagccgcggccgctcgggtcggacccacgcgcagcggccggagatgcagcggggcgccgcgctgtgcctgcgactgtggctctgcctgggactcctggacggcctggt

SEQ ID NO: 25870 - DNA, 120 bp, Artificial Sequence
  ENSG00000037280_1 (sequence is synthesized)
gagtggctactccatgacccccccgaccttgaacatcacggaggagtcacacgtcatcgacaccggtgacagcctgtccatctcctgcaggggacagcaccccctcgagtgggcttggcc

SEQ ID NO: 25871 - DNA, 120 bp, Artificial Sequence
  ENSG00000037280_2 (sequence is synthesized)
aggagctcaggaggcgccagccaccggagacaaggacagcgaggacacgggggtggtgcgagactgcgagggcacagacgccaggccctactgcaaggtgttgctgctgcacgaggtaca

SEQ ID NO: 25872 - DNA, 120 bp, Artificial Sequence
  ENSG00000037280_3 (sequence is synthesized)
tgccaacgacacaggcagctacgtctgctactacaagtacatcaaggcacgcatcgagggcaccacggccgccagctcctacgtgttcgtgagagactttgagcagccattcatcaacaa

SEQ ID NO: 25873 - DNA, 120 bp, Artificial Sequence
  ENSG00000037280_4 (sequence is synthesized)
gcctgacacgctcttggtcaacaggaaggacgccatgtgggtgccctgtctggtgtccatccccggcctcaatgtcacgctgcgctcgcaaagctcggtgctgtggccagacgggcagga

SEQ ID NO: 25874 - DNA, 120 bp, Artificial Sequence
  ENSG00000037280_5 (sequence is synthesized)
ggtggtgtgggatgaccggcggggcatgctcgtgtccacgccactgctgcacgatgccctgtacctgcagtgcgagaccacctggggagaccaggacttcctttccaaccccttcctggt

SEQ ID NO: 25875 - DNA, 120 bp, Artificial Sequence
  ENSG00000037280_6 (sequence is synthesized)
gcacatcacaggcaacgagctctatgacatccagctgttgcccaggaagtcgctggagctgctggtaggggagaagctggtcctgaactgcaccgtgtgggctgagtttaactcaggtgt

SEQ ID NO: 25876 - DNA, 120 bp, Artificial Sequence
  ENSG00000037280_7 (sequence is synthesized)
cacctttgactgggactacccagggaagcaggcagagcggggtaagtgggtgcccgagcgacgctcccagcagacccacacagaactctccagcatcctgaccatccacaacgtcagcca

SEQ ID NO: 25877 - DNA, 120 bp, Artificial Sequence
  ENSG00000037280_8 (sequence is synthesized)
gcacgacctgggctcgtatgtgtgcaaggccaacaacggcatccagcgatttcgggagagcaccgaggtcattgtgcatgaaaatcccttcatcagcgtcgagtggctcaaaggacccat

SEQ ID NO: 25878 - DNA, 120 bp, Artificial Sequence
  ENSG00000037280_9 (sequence is synthesized)
cctggaggccacggcaggagacgagctggtgaagctgcccgtgaagctggcagcgtaccccccgcccgagttccagtggtacaaggatggaaaggcactgtccgggcgccacagtccaca

SEQ ID NO: 25879 - DNA, 120 bp, Artificial Sequence
  ENSG00000037280_10 (sequence is synthesized)
tgccctggtgctcaaggaggtgacagaggccagcacaggcacctacaccctcgccctgtggaactccgctgctggcctgaggcgcaacatcagcctggagctggtggtgaatgtgccccc

SEQ ID NO: 25880 - DNA, 120 bp, Artificial Sequence
  ENSG00000037280_11 (sequence is synthesized)
ccagatacatgagaaggaggcctcctcccccagcatctactcgcgtcacagccgccaggccctcacctgcacggcctacggggtgcccctgcctctcagcatccagtggcactggcggcc

SEQ ID NO: 25881 - DNA, 120 bp, Artificial Sequence
  ENSG00000037280_12 (sequence is synthesized)
ctggacaccctgcaagatgtttgcccagcgtagtctccggcggcggcagcagcaagacctcatgccacagtgccgtgactggagggcggtgaccacgcaggatgccgtgaaccccatcga

SEQ ID NO: 25882 - DNA, 120 bp, Artificial Sequence
  ENSG00000037280_13 (sequence is synthesized)
gagcctggacacctggaccgagtttgtggagggaaagaataagactgtgagcaagctggtgatccagaatgccaacgtgtctgccatgtacaagtgtgtggtctccaacaaggtgggcca

SEQ ID NO: 25883 - DNA, 120 bp, Artificial Sequence
  ENSG00000037280_14 (sequence is synthesized)
ggatgagcggctcatctacttctatgtgaccaccatccccgacggcttcaccatcgaatccaagccatccgaggagctactagagggccagccggtgctcctgagctgccaagccgacag

SEQ ID NO: 25884 - DNA, 120 bp, Artificial Sequence
  ENSG00000037280_15 (sequence is synthesized)
ctacaagtacgagcatctgcgctggtaccgcctcaacctgtccacgctgcacgatgcgcacgggaacccgcttctgctcgactgcaagaacgtgcatctgttcgccacccctctggccgc

SEQ ID NO: 25885 - DNA, 120 bp, Artificial Sequence
  ENSG00000037280_16 (sequence is synthesized)
cagcctggaggaggtggcacctggggcgcgccacgccacgctcagcctgagtatcccccgcgtcgcgcccgagcacgagggccactatgtgtgcgaagtgcaagaccggcgcagccatga

SEQ ID NO: 25886 - DNA, 120 bp, Artificial Sequence
  ENSG00000037280_17 (sequence is synthesized)
caagcactgccacaagaagtacctgtcggtgcaggccctggaagcccctcggctcacgcagaacttgaccgacctcctggtgaacgtgagcgactcgctggagatgcagtgcttggtggc

SEQ ID NO: 25887 - DNA, 120 bp, Artificial Sequence
  ENSG00000037280_18 (sequence is synthesized)
cggagcgcacgcgcccagcatcgtgtggtacaaagacgagaggctgctggaggaaaagtctggagtcgacttggcggactccaaccagaagctgagcatccagcgcgtgcgcgaggagga

SEQ ID NO: 25888 - DNA, 120 bp, Artificial Sequence
  ENSG00000037280_19 (sequence is synthesized)
tgcgggacgctatctgtgcagcgtgtgcaacgccaagggctgcgtcaactcctccgccagcgtggccgtggaaggctccgaggataagggcagcatggagatcgtgatccttgtcggtac

SEQ ID NO: 25889 - DNA, 120 bp, Artificial Sequence
  ENSG00000037280_20 (sequence is synthesized)
cggcgtcatcgctgtcttcttctgggtcctcctcctcctcatcttctgtaacatgaggaggccggcccacgcagacatcaagacgggctacctgtccatcatcatggaccccggggaggt

SEQ ID NO: 25890 - DNA, 120 bp, Artificial Sequence
  ENSG00000037280_21 (sequence is synthesized)
gcctctggaggagcaatgcgaatacctgtcctacgatgccagccagtgggaattcccccgagagcggctgcacctggggagagtgctcggctacggcgccttcgggaaggtggtggaagc

SEQ ID NO: 25891 - DNA, 120 bp, Artificial Sequence
  ENSG00000037280_22 (sequence is synthesized)
ctccgctttcggcatccacaagggcagcagctgtgacaccgtggccgtgaaaatgctgaaagagggcgccacggccagcgagcaccgcgcgctgatgtcggagctcaagatcctcattca

SEQ ID NO: 25892 - DNA, 120 bp, Artificial Sequence
  ENSG00000037280_23 (sequence is synthesized)
catcggcaaccacctcaacgtggtcaacctcctcggggcgtgcaccaagccgcagggccccctcatggtgatcgtggagttctgcaagtacggcaacctctccaacttcctgcgcgccaa

SEQ ID NO: 25893 - DNA, 120 bp, Artificial Sequence
  ENSG00000037280_24 (sequence is synthesized)
gccaggctggatcggaggcggccggggagcagcgacagggtcctcttcgcgcggttctcgaagaccgagggcggagcgaggcgggcttctccagaccaagaagctgaggacctgtggctg

SEQ ID NO: 25894 - DNA, 120 bp, Artificial Sequence
  ENSG00000037280_25 (sequence is synthesized)
agcccgctgaccatggaagatcttgtctgctacagcttccaggtggccagagggatggagttcctggcttcccgaaagtgcatccacagagacctggctgctcggaacattctgctgtcg

SEQ ID NO: 25895 - DNA, 120 bp, Artificial Sequence
  ENSG00000037280_26 (sequence is synthesized)
gaaagcgacgtggtgaagatctgtgactttggccttgcccgggacatctacaaagaccccgactacgtccgcaagggcagtgcccggctgcccctgaagtggatggcccctgaaagcatc

SEQ ID NO: 25896 - DNA, 120 bp, Artificial Sequence
  ENSG00000037280_27 (sequence is synthesized)
ttcgacaaggtgtacaccacgcagagtgacgtgtggtcctttggggtgcttctctgggagatcttctctctgggggcctccccgtaccctggggtgcagatcaatgaggagttctgccag

SEQ ID NO: 25897 - DNA, 120 bp, Artificial Sequence
  ENSG00000037280_28 (sequence is synthesized)
cggctgagagacggcacaaggatgagggccccggagctggccactcccgccatacgccgcatcatgctgaactgctggtccggagaccccaaggcgagacctgcattctcggagctggtg

SEQ ID NO: 25898 - DNA, 120 bp, Artificial Sequence
  ENSG00000037280_29 (sequence is synthesized)
gagatcctgggggacctgctccagggcaggggcctgcaagaggaagaggaggtctgcatggccccgcgcagctctcagagctcagaagagggcagcttctcgcaggtgtccaccatggcc

SEQ ID NO: 25899 - DNA, 120 bp, Artificial Sequence
  ENSG00000037280_30 (sequence is synthesized)
ctacacatcgcccaggctgacgctgaggacagcccgccaagcctgcagcgccacagcctggccgccaggtattacaactgggtgtcctttcccgggtgcctggccagaggggctgagacc

SEQ ID NO: 25900 - DNA, 120 bp, Artificial Sequence
  ENSG00000037280_31 (sequence is synthesized)
cgtggttcctccaggatgaagacatttgaggaattccccatgaccccaacgacctacaaaggctctgtggacaaccagacagacagtgggatggtgctggcctcggaggagtttgagcag

SEQ ID NO: 25901 - DNA, 120 bp, Artificial Sequence
  ENSG00000037280_32 (sequence is synthesized)
atagagagcaggcatagacaagaaagcggcttcagctgtaaaggacctggccagaatgtggctgtgaccagggcacaccctgactcccaagggaggcggcggcggcctgagcggggggcc

SEQ ID NO: 25902 - DNA, 120 bp, Artificial Sequence
  ENSG00000037280_33 (sequence is synthesized)
cgaggaggccaggtgttttacaacagcgagtatggggagctgtcggagccaagcgaggaggaccactgctccccgtctgcccgcgtgactttcttcacagacaacagctactaagcagca

SEQ ID NO: 25903 - DNA, 120 bp, Artificial Sequence
  ENSG00000037280_34 (sequence is synthesized)
tcggacaagacccccagcacttgggggttcaggcccggcagggcgggcagagggctggaggcccaggctgggaactcatctggttgaactctggtggcacaggagtgtcctcttccctct

SEQ ID NO: 25904 - DNA, 120 bp, Artificial Sequence
  ENSG00000037280_35 (sequence is synthesized)
ctgcagacttcccagctaggaagagcaggactccaggcccaaggctcccggaattccgtcaccacgactggccagggccacgctccagctgccccggcccctccccctgagattcagatg

SEQ ID NO: 25905 - DNA, 120 bp, Artificial Sequence
  ENSG00000037280_36 (sequence is synthesized)
tcatttagttcagcatccgcaggtgctggtcccggggccagcacttccatgggaatgtctctttggcgacctcctttcatcacactgggtggtggcctggtccctgttttcccacgagga

SEQ ID NO: 25906 - DNA, 120 bp, Artificial Sequence
  ENSG00000037280_37 (sequence is synthesized)
atctgtgggtctgggagtcacacagtgttggaggttaaggcatacgagagcagaggtctcccaaacgccctttcctcctcaggcacacagctactctccccacgagggctggctggcctc

SEQ ID NO: 25907 - DNA, 120 bp, Artificial Sequence
  ENSG00000037280_38 (sequence is synthesized)
acccacccctgcacagttgaagggaggggctgtgtttccatctcaaagaaggcatttgcagggtcctcttctgggcctgaccaaacagccaactagcccctggggtggccaccagtatga

SEQ ID NO: 25908 - DNA, 120 bp, Artificial Sequence
  ENSG00000037280_39 (sequence is synthesized)
cagtattatacgctggcaacacagaggcagcccgcacacctgcgcctgggtgttgagagccatcctgcaagtctttttcaacagaacttcacagactgttagagctgctgagaagaattt

SEQ ID NO: 25909 - DNA, 120 bp, Artificial Sequence
  ENSG00000037280_40 (sequence is synthesized)
gctttccgaattcagcctggaaggcgcccagggacagctgtactgagtctagatgactctgacccccgccccaggtcaaggccagcagagcagtcagtgcctctggagaaggcccttgct

SEQ ID NO: 25910 - DNA, 120 bp, Artificial Sequence
  ENSG00000037280_41 (sequence is synthesized)
ctcccacctggcccagactccgaggagcctgggtctggagctgccggtctggttcttccctttagagcccggatctgccacctgcggcccctcccaagccgtgaaccagctcatgagaga

SEQ ID NO: 25911 - DNA, 120 bp, Artificial Sequence
  ENSG00000037280_42 (sequence is synthesized)
tgaacactgtgggatccactcaggaaggctcggggctggcacaaaggaccacccagcattgccctgtgccacccagcactcagtggacattctggggacctgccttcagccttttcctgc

SEQ ID NO: 25912 - DNA, 120 bp, Artificial Sequence
  ENSG00000037280_43 (sequence is synthesized)
cctgtgcctgacatcagcaccctggctggtcagaatgccgccctcccagaggagcagccgagagatcccctgaaggctggaggcattctgctcaggacccctatcccagctcacagtgcc

SEQ ID NO: 25913 - DNA, 120 bp, Artificial Sequence
  ENSG00000037280_44 (sequence is synthesized)
caaccatctcaccaggagaaagagccacatccccacgttaggaccacggagactgaccaccaccctgaccccccaaacccacgcaccagacgcttgcaggacaggcgccgcgcagcgggc

SEQ ID NO: 25914 - DNA, 120 bp, Artificial Sequence
  ENSG00000037280_45 (sequence is synthesized)
aggggcttgcccggccgaccctcccctccccacctcccccactgcgcgttactccaggatatgccgagtgcacgtataaggtcatcttcgtcgtccccgtggacctcccccttcctctgc

SEQ ID NO: 25915 - DNA, 120 bp, Artificial Sequence
  ENSG00000037280_46 (sequence is synthesized)
acgtcgtccaacgtgggactggcgtgtcaggcttccctgggaggatctggaggttgttctctgcagagaaccagcctggctcctggcgcgcacctctgctcccttctcctcactacccac

SEQ ID NO: 25916 - DNA, 120 bp, Artificial Sequence
  ENSG00000037280_47 (sequence is synthesized)
ccacgcatgtaccgggaaaaaaactactatgcccttctagaccatgttctgagaaaagatcgaaaatatttaacaagagataataataaatctgatgccggtctttgtgtgtgttgcgga

SEQ ID NO: 25917 - DNA, 120 bp, Artificial Sequence
  ENSG00000037280_48 (sequence is synthesized)
gactttcgctatttcttctactgctatctactacaaacttcaaagaggaaccaggaggacaagaggagcatgaaagtggacaaggagtgtgaccactgaagcaccacagggaggggttag

SEQ ID NO: 25918 - DNA, 120 bp, Artificial Sequence
  ENSG00000037280_49 (sequence is synthesized)
cagagggcgccacggccagcgagcaccgcgcgctgatgtcggagctcaagatcctcattcacatcggcaaccacctcaacgtggtcaacctcctcggggcgtgcaccaagccgcagggag

SEQ ID NO: 25919 - DNA, 120 bp, Artificial Sequence
  ENSG00000037280_50 (sequence is synthesized)
ctcacgtgcccgcatggtctgttagggccctatctcaggggtcaggagcccaagcagtcccgagggcagagcgagggctgagggcagggcgagggcgggggcgagagctgagtgcggggg

SEQ ID NO: 25920 - DNA, 120 bp, Artificial Sequence
  ENSG00000037280_51 (sequence is synthesized)
cgagggctgagggcgggggtgagggctgagggcgggggtgagggctgagggtgggggcgagggctgagggcagtggctggtggtttctggcctggctgcctctcctgttcccgccaggag

SEQ ID NO: 25921 - DNA, 120 bp, Artificial Sequence
  ENSG00000037280_52 (sequence is synthesized)
gggccggtgggacggcaactcgggaagggagactgaggctggaagccagtctcatccgagattctacagggaggctgcgggcttcagagccgagggaccacccgaaccccctctgcctca

SEQ ID NO: 25922 - DNA, 120 bp, Artificial Sequence
  ENSG00000037280_53 (sequence is synthesized)
gtggggccggcaggatgtcctgggggcccttagtaaccctccccctcccaaaagcgccgggtggcggggaacggggacctgccagggtcggggccggtgtgaggcccgtgtcccctccag

SEQ ID NO: 25923 - DNA, 120 bp, Artificial Sequence
  ENSG00000037280_54 (sequence is synthesized)
gcaggttacatgaccgcccctgctggagtaagggactgggcacctggaggtgtgtgccaggtcgttctgaagcaggtggtttgtgggccaccaagggccccccacctctccccagcctgg

SEQ ID NO: 25924 - DNA, 120 bp, Artificial Sequence
  ENSG00000037280_55 (sequence is synthesized)
cccagcctccgagaggactttgcctccaacgtgggccaccctctgtggggtgcacattgaagcctgagccaggactgagccttttcacatggcagccccagagggagctcagtgcccagt

SEQ ID NO: 25925 - DNA, 120 bp, Artificial Sequence
  ENSG00000037280_56 (sequence is synthesized)
cagcagacgtgcctactccaagagctccaagagctccatgtgggaactcaggccccgctgcgagcatgatgaagtctccaggccagggtagggcagtgaacttgaaaaagttaaaatgtc

SEQ ID NO: 25926 - DNA, 120 bp, Artificial Sequence
  ENSG00000037280_57 (sequence is synthesized)
accaagtggcaactgatccacgctactgcggaaactaaaggagcaggaagagtgtaggaggcgtgggagctcgggtaagccagaggggcccaaggagggagttcagcagtccaggacggg

SEQ ID NO: 25927 - DNA, 120 bp, Artificial Sequence
  ENSG00000037280_58 (sequence is synthesized)
gagcagcaggggttgggaggagcagcaggggttggggggagcagcaggggttggggggagcagcaggagaagcagcgagaagcaagagaggctttgttgaaactgcctgcaggcggctcc

SEQ ID NO: 25928 - DNA, 120 bp, Artificial Sequence
  ENSG00000037280_59 (sequence is synthesized)
cccgccgctgatgatccagtaaccatgatgtctaccgtgtcgccagtgggtggatgctcttggcacccctagcaagcaggcggcacagtcctcttttaaccaaatgaactagagctgggg

SEQ ID NO: 25929 - DNA, 120 bp, Artificial Sequence
  ENSG00000037280_60 (sequence is synthesized)
agggcagcgacttgcccacaggtcccaggtagagcacagtcgggtgagccatctccaccccaccacggatggggaaagggacaggacggggtgacttgatggggaagggacaggatgggg

SEQ ID NO: 25930 - DNA, 120 bp, Artificial Sequence
  ENSG00000037280_61 (sequence is synthesized)
gggaggcagcgtcaggaattcgtaaggcaaatggcagaacccaacgactgtcctttgaaagtgcaagtccagggtgagccttgggcacatttgggccctcctgcgatgccacgactcaca

SEQ ID NO: 25931 - DNA, 120 bp, Artificial Sequence
  ENSG00000037280_62 (sequence is synthesized)
gctgctttctgtcctatgccctcgtcacccccacacgaggcctcccctcctcagcagcgcagaaaccccagtggaaggacggctcctcctcggtggcaggttcgggggtcccgggcctgg

SEQ ID NO: 25932 - DNA, 120 bp, Artificial Sequence
  ENSG00000037280_63 (sequence is synthesized)
tcagtgagcgctgggcagaggggccccatgggagcccttggccagaccacagggacctgggttcctgcctccagggccacttggagatgttgggggactctgaaaagatcgcagtttccc

SEQ ID NO: 25933 - DNA, 120 bp, Artificial Sequence
  ENSG00000037280_64 (sequence is synthesized)
tcccgtgtaattcaaaataaaaaccacaccaagccacagtcgaaggataacaaagccccccaaaccgggaggcagcctcacatggatcgttttttgaactacgagctgccaggttgtgag

SEQ ID NO: 25934 - DNA, 120 bp, Artificial Sequence
  ENSG00000037280_65 (sequence is synthesized)
gcctctccctgcttctcccacggctcctgctcttcacacactgagcatatgcttggccaccgtggaggtccccaagtatgaggcgtccacgggccacacacagcccccctgacctcagtg

SEQ ID NO: 25935 - DNA, 120 bp, Artificial Sequence
  ENSG00000037280_66 (sequence is synthesized)
tctccctccgtggcaggggcatgtgaccctcaccctgggatggaatggacgccttgtttctggctcagcttcccagggacaggtgttaggtcagccgcgctgcaggaccatgccgcactt

SEQ ID NO: 25936 - DNA, 120 bp, Artificial Sequence
  ENSG00000037280_67 (sequence is synthesized)
tcctggctgggggtggctgccctgcaggagggcctcaggcgggacccacagcctggcttgtcctctccacacaggacaaccagacagacagtgggatggtgctggcctcggaggagtttg

SEQ ID NO: 25937 - DNA, 120 bp, Artificial Sequence
  ENSG00000037280_68 (sequence is synthesized)
ggccctggcgaagggcaggtccggaggcccgcgaggccgacgatcccaaacccaggtggacccgcacctccaccccaccccctgcaggagtcgacttggcggactccaaccagaagctga

SEQ ID NO: 25938 - DNA, 120 bp, Artificial Sequence
  ENSG00000037280_69 (sequence is synthesized)
agggcaggggcctgcaagtgagccccttccccaccctgttctactatggcctttggcccctgccctgggtccctggcccgagctgcccctccaagcccatctaggctctgcccacctctc

SEQ ID NO: 25939 - DNA, 120 bp, Artificial Sequence
  ENSG00000037280_70 (sequence is synthesized)
gcacggccgccgcccggtcccgccgcaggccccctcatggtgatcgtggagttctgcaagtacggcaacctctccaacttcctgcgcgccaagcgggacgccttcagcccctgcgcggtg

SEQ ID NO: 25940 - DNA, 120 bp, Artificial Sequence
  ENSG00000037280_71 (sequence is synthesized)
agcgggcggcctgcggggcgccgcgggcggcgggggaatggaggcgcctctgcggcggacgactgggcgccctcgagccagcttcgtgcatccgcaggagaagtctcccgagcagcgcgg

SEQ ID NO: 25941 - DNA, 120 bp, Artificial Sequence
  ENSG00000037474_0 (sequence is synthesized)
gtagggctagagttctggccgtggcgggccggtttctgcgtgctgcgtgcgcggccgcgtgggctatggggcggcggtcgcggggtcggcggctccagcaacagcagcggccggaggacg

SEQ ID NO: 25942 - DNA, 120 bp, Artificial Sequence
  ENSG00000037474_1 (sequence is synthesized)
cggaggatggcgccgagggtggtggaaagcgcggcgaggcgggctgggaaggaggctaccccgagatcgtcaaggagaacaagctgttcgagcactactaccaggagctcaagatcgtgc

SEQ ID NO: 25943 - DNA, 120 bp, Artificial Sequence
  ENSG00000037474_2 (sequence is synthesized)
ccgagggcgagtggggccagttcatggacgctctcagggagccgctcccggccactttaagaattactggttacaaaagccacgcaaaagagattctccattgcttaaagaacaaatatt

SEQ ID NO: 25944 - DNA, 120 bp, Artificial Sequence
  ENSG00000037474_3 (sequence is synthesized)
ttaaggaattggaggacctggaggtggacggtcagaaagttgaagttccacagccactgagttggtatcctgaagaacttgcctggcacacaaatttaagtcgaaaaatcttgagaaaat

SEQ ID NO: 25945 - DNA, 120 bp, Artificial Sequence
  ENSG00000037474_4 (sequence is synthesized)
cgccacacttggaaaagtttcatcagtttctagttagtgaaacagaatctggaaatattagtcgtcaagaagctgttagcatgatcccaccactgctcctcaacgtgcggcctcatcata

SEQ ID NO: 25946 - DNA, 120 bp, Artificial Sequence
  ENSG00000037474_5 (sequence is synthesized)
agatcttagatatgtgtgcagcacctggctcaaagaccacacagttaattgaaatgctacatgccgacatgaatgtcccctttccagagggatttgttattgcgaatgatgtggacaaca

SEQ ID NO: 25947 - DNA, 120 bp, Artificial Sequence
  ENSG00000037474_6 (sequence is synthesized)
agcgctgctacctgctcgtccatcaagccaagaggctgagcagcccctgcatcatggtggtcaaccatgatgcctccagcatacccaggctccagatagatgtggacggcaggaaagaga

SEQ ID NO: 25948 - DNA, 120 bp, Artificial Sequence
  ENSG00000037474_7 (sequence is synthesized)
tcctcttctatgatcgaattttatgtgatgtcccttgcagtggagacggcactatgagaaaaaacattgatgtttggaaaaagtggaccaccttaaatagcttgcagctacatggcttac

SEQ ID NO: 25949 - DNA, 120 bp, Artificial Sequence
  ENSG00000037474_8 (sequence is synthesized)
agctgcggattgcaacacgcggggctgaacagctggctgaaggtggaaggatggtgtattccacgtgttcactaaaccctattgaggatgaagcagtcatagcatctttactggaaaaaa

SEQ ID NO: 25950 - DNA, 120 bp, Artificial Sequence
  ENSG00000037474_9 (sequence is synthesized)
gtgaaggtgctttggagcttgctgatgtgtctaatgaactgccagggctgaagtggatgcctggaatcacacagtggaaggtaatgacgaaagatgggcagtggtttacagactgggacg

SEQ ID NO: 25951 - DNA, 120 bp, Artificial Sequence
  ENSG00000037474_10 (sequence is synthesized)
ctgttcctcacagcagacacacccagatccgacctaccatgttccctccgaaggacccagaaaagctgcaggccatgcacctggagcgatgccttaggatattaccccatcatcagaata

SEQ ID NO: 25952 - DNA, 120 bp, Artificial Sequence
  ENSG00000037474_11 (sequence is synthesized)
ctggagggttttttgtggcagtattggtgaaaaaatcttcaatgccgtggaataaacgtcagccaaagcttcagggtaaatctgcagagaccagagaaagcacacagctgagccctgcag

SEQ ID NO: 25953 - DNA, 120 bp, Artificial Sequence
  ENSG00000037474_12 (sequence is synthesized)
ggaactggtgacacagaaatagctcatgcaactgaggatttagagaataatggcagtaagaaagatggcgtgtgtggtcctcctccatcaaagaaaatgaagttatttggatttaaagaa

SEQ ID NO: 25954 - DNA, 120 bp, Artificial Sequence
  ENSG00000037474_13 (sequence is synthesized)
gatccatttgtatttattcctgaagatgacccattatttccacctattgagaaattttatgctttggatccttcattcccaaggatgaatttgttaactcggactacagaagggaagaaa

SEQ ID NO: 25955 - DNA, 120 bp, Artificial Sequence
  ENSG00000037474_14 (sequence is synthesized)
aggcagctctacatggtttctaaggagttgcggaatgtgctgctgaataacagtgagaagatgaaggttattaacacggggatcaaagtctggtgtagaaataacagcggtgaagagttt

SEQ ID NO: 25956 - DNA, 120 bp, Artificial Sequence
  ENSG00000037474_15 (sequence is synthesized)
gactgtgctttccggctggcacaggagggaatatatacattgtatccatttattaactcaagaattattactgtatcaatggaagatgttaagatactgttgacccaggaaaatcccttt

SEQ ID NO: 25957 - DNA, 120 bp, Artificial Sequence
  ENSG00000037474_16 (sequence is synthesized)
tttagaaaactcagcagtgagacctacagtcaagcaaaggacctggcaaagggaagcatcgtgctgaagtatgaaccagattctgcgaatccagacgctctgcagtgtcccatcgtctta

SEQ ID NO: 25958 - DNA, 120 bp, Artificial Sequence
  ENSG00000037474_17 (sequence is synthesized)
tgcggatggcggggaaaggcctccattcgaacttttgtgcccaagaatgaacggcttcattatctcaggatgatggggctggaggtattgggagaaaagaagaaggaaggggttatcctc

SEQ ID NO: 25959 - DNA, 120 bp, Artificial Sequence
  ENSG00000037474_18 (sequence is synthesized)
acaaatgagagtgcagccagcaccggacagccagacaatgacgtgactgagggacagagagcaggagagcccaacagcccagatgcagaagaggccaacagtccagacgtgacagcaggc

SEQ ID NO: 25960 - DNA, 120 bp, Artificial Sequence
  ENSG00000037474_19 (sequence is synthesized)
tgtgacccggcgggggtccatccaccccggtgagcaggcccaaggcagcgggggcccacacccctcacacgcaaaactggcttcttctggtcactggtgtctgaaaccaaatccagagca

SEQ ID NO: 25961 - DNA, 120 bp, Artificial Sequence
  ENSG00000037474_20 (sequence is synthesized)
gcctgtggcctgtaaagcatatatttctaatgactgcagactggtgggatcataggagccttctgaatgaccaggactgctttctttggagctgatgaaaatgtactcttttagcgtgtt

SEQ ID NO: 25962 - DNA, 120 bp, Artificial Sequence
  ENSG00000037474_21 (sequence is synthesized)
agaaatcacttgttttattttgtttctttggccaagctgggtctagtgtttcttttgctgggaatagactttcaaaagttgtacttctatcaagaaacaaaactgcccttgcagaaattt

SEQ ID NO: 25963 - DNA, 120 bp, Artificial Sequence
  ENSG00000037474_22 (sequence is synthesized)
caggtcttttgttaagcctgtattggtcttaaggtgcagtattttttaaattattatttatagaaagaatctataaattcttggggaagtgtgttataagctttaataattacattgagc

SEQ ID NO: 25964 - DNA, 120 bp, Artificial Sequence
  ENSG00000037474_23 (sequence is synthesized)
tgcacctcagtggtgtgtcattaacatgcagtggggttaatatctgaggcctcagatgactttgtgccttttggaataaagggtaaaataaactctcccagagtaagagctgtatcgtga

SEQ ID NO: 25965 - DNA, 120 bp, Artificial Sequence
  ENSG00000037474_24 (sequence is synthesized)
attgtcatactaattattgagggggacttatgtgcttttattgaatggagtgctttacaatttttatttttaaatggggttgggatccttggaatatttcaataaaattgataaaatata

SEQ ID NO: 25966 - DNA, 120 bp, Artificial Sequence
  ENSG00000037474_25 (sequence is synthesized)
atttgctttactgtcctccaaacgacgtaatcacaagttgtgagtatcagttcgttcttaaccggggtttctcggtgggtttctgcttctcctctcctttcccattccgtgacggttgct

SEQ ID NO: 25967 - DNA, 120 bp, Artificial Sequence
  ENSG00000037474_26 (sequence is synthesized)
ccatgtggcccggcatccttacaggagatggtcctgtcttcatctctctgtgtttcatcttatttttttacttacaggttattaacacggggatcaaagtctggtgtagaaataacagcg

SEQ ID NO: 25968 - DNA, 120 bp, Artificial Sequence
  ENSG00000037474_27 (sequence is synthesized)
ggtgtgagccaccacgcccggctgcagatggtgtttctttatcaagcctacttacagaagatagatttcactgtttgaatttttagtaacaatttcccctttcccccacctttgttcatt

SEQ ID NO: 25969 - DNA, 120 bp, Artificial Sequence
  ENSG00000037474_28 (sequence is synthesized)
attattactattattattattattattacttactgccttacatgaagggtagtagtgtgtagttaaaagctaccatcagactccctgggttcaaatcctaatcggcaagttacttacagt

SEQ ID NO: 25970 - DNA, 120 bp, Artificial Sequence
  ENSG00000037474_29 (sequence is synthesized)
gttagacatcccatgtgaaatgggacgaatcagtatgtagcttgcgaggtgctcaggaaatgttagctgttatagtgacaccacgcccctttctcttaagtggaaacaaatacccatcgt

SEQ ID NO: 25971 - DNA, 120 bp, Artificial Sequence
  ENSG00000037474_30 (sequence is synthesized)
gatgttttagagtcagctttcatctcgtcctatctttgttcaggcaaacttctctagttctgttttaataggcatatttgttaggtctgttttttgaaatcctcttttttacattgttta

SEQ ID NO: 25972 - DNA, 120 bp, Artificial Sequence
  ENSG00000037474_31 (sequence is synthesized)
aagataatgccttggctaaaaagcctgcttcacttttccctgtttttagttgttttctccacattggcagtaaagagccttggcgtcccagtagcagcaggttctcctttttgtattgtg

SEQ ID NO: 25973 - DNA, 120 bp, Artificial Sequence
  ENSG00000037474_32 (sequence is synthesized)
gatgttttgcatttcatactgttgtgaagagtggctttgatcatacatgttgttggtatatttgcctttttgctgggggtgtgagaagaaccagagatgagcagaggtacacccagtaga

SEQ ID NO: 25974 - DNA, 120 bp, Artificial Sequence
  ENSG00000037474_33 (sequence is synthesized)
cttcccagcctgcagagcctcccgggaagagcttccgtgttcaggtgcttggggccccaccctaggagcctgactcacagtcagagcagggtcccggcttgtgttcaggattttgaaaca

SEQ ID NO: 25975 - DNA, 120 bp, Artificial Sequence
  ENSG00000037474_34 (sequence is synthesized)
tttgtaaggtgattttgttgtttctacacctttctcctcatcttttttttttgtagttaatcgttactaataacagaaaagacatttttggcatggtaattggcacaaagtgaataattg

SEQ ID NO: 25976 - DNA, 120 bp, Artificial Sequence
  ENSG00000037474_35 (sequence is synthesized)
ttgaatagatgacttttgaggctttcaaaattcgagtgtccataaaatccatccagagccacctggttcctttttttgaaccacttaacgtaattctggaaaaccttgactgtgggtctt

SEQ ID NO: 25977 - DNA, 120 bp, Artificial Sequence
  ENSG00000037474_36 (sequence is synthesized)
aagtttggtggattgctgcttctcactggctgacctttggaggtcgcatatttcaggatgtgattccacttaggctccatttcacctgacactgcaattctgtgccttcagagggatttg

SEQ ID NO: 25978 - DNA, 120 bp, Artificial Sequence
  ENSG00000037474_37 (sequence is synthesized)
acttgtattccctttataaggccagcaaaaatgcaggtggtgtgcgttggggcatatttatcaatcatagttttcagtttatttatggctacatcaatttccagagggttctgtagatcc

SEQ ID NO: 25979 - DNA, 120 bp, Artificial Sequence
  ENSG00000037474_38 (sequence is synthesized)
ctgattgacagttcagaatgctaagggtcaaaggcatcttggggttggtgtacttccccaggctctggtggtgccctgctgctgcccagcagcctgtggtgtgtctgtgtggcgtgcagg

SEQ ID NO: 25980 - DNA, 120 bp, Artificial Sequence
  ENSG00000037474_39 (sequence is synthesized)
aggctgtccgcggagctccttgagcccgcgtgggaaacctgggcgcttcgcgcggagacgcctttgtggctgcttcctggagcatttttttccccttagagctgttcgctgttttccctg

SEQ ID NO: 25981 - DNA, 120 bp, Artificial Sequence
  ENSG00000037474_40 (sequence is synthesized)
tcacgccgcttttctgaaagacgggttgtgcgctttgggcttattcctggacggtccccaaaggtccccgaaaggaccaggcccggacacgtggggccttggtttccggccggaagtccc

SEQ ID NO: 25982 - DNA, 120 bp, Artificial Sequence
  ENSG00000037474_41 (sequence is synthesized)
cgctggctgtgggtccctgagcctgccctttgatttcagagctgttgactgacacagggctgaatggttcctgccagagtcctgaatctggtggcctgtgtcttttctgtgccccattcc

SEQ ID NO: 25983 - DNA, 120 bp, Artificial Sequence
  ENSG00000037474_42 (sequence is synthesized)
cgcaggggggtgagccatggtgtagttctcacagctcgccctcctgggcagagaaggtactaaaggtgtagaggctgcgagtactgctgccccgacccttgggatttgtcctttgaggta

SEQ ID NO: 25984 - DNA, 120 bp, Artificial Sequence
  ENSG00000037474_43 (sequence is synthesized)
cttcccttagaatttggccatttgggggcccttctttcatttgctttactgtcctccaaacgacgtaatcacaagttgtgagtatcagttcgttcttaaccggggtttctcggtgggttt

SEQ ID NO: 25985 - DNA, 120 bp, Artificial Sequence
  ENSG00000037637_0 (sequence is synthesized)
ctgcgctgtcttctcccggcctgagcagcagcagctgcggcggcggcggcgtttgagtggaggaagatggcggctccgggcggctcggggtcccgccagctgtgaggagccccgagcacg

SEQ ID NO: 25986 - DNA, 120 bp, Artificial Sequence
  ENSG00000037637_1 (sequence is synthesized)
gctgtcgcggcctgaggcagagcgcctctgctctggccctgtccctggctccctcattaccgtcgccagcggagcgaacccgagagcgtggagcgggctgggccagctgttgagtggaat

SEQ ID NO: 25987 - DNA, 120 bp, Artificial Sequence
  ENSG00000037637_2 (sequence is synthesized)
gtcatggccagctcctcggacagtgaagatgacagtttcatggctgtggaccaggaagaaactgtgctggaagggacaatggatcaagatgaggagccccacccagtattggaggctgag

SEQ ID NO: 25988 - DNA, 120 bp, Artificial Sequence
  ENSG00000037637_3 (sequence is synthesized)
gagactagacataataggtccatgtcggagctgccagaagaggttttggagtatatcctgtcctttctctcaccgtatcaggaacacaaaactgcggcccttgtctgcaaacagtggtat

SEQ ID NO: 25989 - DNA, 120 bp, Artificial Sequence
  ENSG00000037637_4 (sequence is synthesized)
cgacttatcaaaggtgtagcccatcagtgttatcatggtttcatgaaggctgtccaggaaggaaacattcagtgggagagccgtacctatccttatcctggaaccccaatcactcagcgc

SEQ ID NO: 25990 - DNA, 120 bp, Artificial Sequence
  ENSG00000037637_5 (sequence is synthesized)
ttctcgcacagtgcatgctattatgatgctaatcagtctatgtatgtgtttggaggctgtacccagagcagctgcaatgctgctttcaatgacctctggagacttgacctaaacagcaaa

SEQ ID NO: 25991 - DNA, 120 bp, Artificial Sequence
  ENSG00000037637_6 (sequence is synthesized)
gagtggatccgacctttggcttcagggtcctatccttcccccaaagctggagcaactctggtcgtgtacaaggacttgctagtgctgtttggtggctggacgcggccaagcccttatccc

SEQ ID NO: 25992 - DNA, 120 bp, Artificial Sequence
  ENSG00000037637_7 (sequence is synthesized)
ctacaccagccagagagattctttgatgaaatacacacttactcaccctctaaaaattggtggaactgcattgtgacaacccatgggccacctcccatggctggccactcctcctgtgtg

SEQ ID NO: 25993 - DNA, 120 bp, Artificial Sequence
  ENSG00000037637_8 (sequence is synthesized)
atagatgataaaatgattgtctttggtggctctttaggatcccggcaaatgagcaatgatgtctgggtccttgaccttgagcagtgggcgtggtccaagccgaacatctctggccccagt

SEQ ID NO: 25994 - DNA, 120 bp, Artificial Sequence
  ENSG00000037637_9 (sequence is synthesized)
cctcatcctcgaggtggccaatctcagattgtcatagatgatgcaactatcttaatcctcggagggtgtggcggtcccaatgctctattcaaggatgcttggttgttgcacatgcattct

SEQ ID NO: 25995 - DNA, 120 bp, Artificial Sequence
  ENSG00000037637_10 (sequence is synthesized)
ggtccttgggcctggcagccactcaaggtagaaaatgaagagcatggggccccagaactgtggtgccatccagcttgccgggtgggacagtgtgtggtggtcttcagccaggctcctagt

SEQ ID NO: 25996 - DNA, 120 bp, Artificial Sequence
  ENSG00000037637_11 (sequence is synthesized)
gggagagccccactcagccccagtttgaactctcgcccatcacctatcagtgccactcctccagctctcgttcctgaaacccgagagtaccgctctcagtctccagtaagaagcatggat

SEQ ID NO: 25997 - DNA, 120 bp, Artificial Sequence
  ENSG00000037637_12 (sequence is synthesized)
gaagctccttgtgttaacggccgctggggaacactgagacccagggctcaaaggcagactccttcaggttcccgggaagggagcctttccccagccagaggagacggctctcctatcctc

SEQ ID NO: 25998 - DNA, 120 bp, Artificial Sequence
  ENSG00000037637_13 (sequence is synthesized)
aatggtgggagtttgtctccaggaacggcagctgtgggtggctcttctttggacagtcctgtacaggccatatctccaagtactccatctgctcctgaaggatacgacctgaaaatagga

SEQ ID NO: 25999 - DNA, 120 bp, Artificial Sequence
  ENSG00000037637_14 (sequence is synthesized)
ctttctttggccccccgacgaggatcactaccagatcagaaagatctgagattaggatccatagatctgaattgggatctgaaacccgcttccagtagtaatcccatggatggcatggac

SEQ ID NO: 26000 - DNA, 120 bp, Artificial Sequence
  ENSG00000037637_15 (sequence is synthesized)
aataggacagttgggggaagtatgagacaccctcctgaacagacaaatggtgtgcataccccacctcacgtggccagtgcccttgcaggggccgtctccccaggtgccctgcgtcggagt

SEQ ID NO: 26001 - DNA, 120 bp, Artificial Sequence
  ENSG00000037637_16 (sequence is synthesized)
ctggaagccatcaaagcgatgtcctccaaaggcccctcggcctctgcagcactaagtcctcctcttgggtcttctccaggctctcctgggagccagagtttgagcagtggagaaacagtg

SEQ ID NO: 26002 - DNA, 120 bp, Artificial Sequence
  ENSG00000037637_17 (sequence is synthesized)
cccatccctcgcccagggcctgcccaaggagatggacattccttacctcccattgctcgccgcctgggccaccaccctccacagtccctaaatgttggcaaacccctataccagagtatg

SEQ ID NO: 26003 - DNA, 120 bp, Artificial Sequence
  ENSG00000037637_18 (sequence is synthesized)
aactgcaagcccatgcagatgtacgtgctggacattaaagacaccaaggagaaggggcgggtcaaatggaaagtatttaatagcagttctgtggttggacctcctgaaaccagcctgcat

SEQ ID NO: 26004 - DNA, 120 bp, Artificial Sequence
  ENSG00000037637_19 (sequence is synthesized)
accgtggtacaaggcaggggtgaactcatcatatttggaggactcatggacaagaaacagaatgtgaagtactatccaaaaacaaacgccttgtactttgtacgagcaaagagataatgt

SEQ ID NO: 26005 - DNA, 120 bp, Artificial Sequence
  ENSG00000037637_20 (sequence is synthesized)
gttctaaacccctttccttttctgtggcttttaatttggaattttccagtgtgtaagcatttggactgagaattgggaaaacaaaattactcccagaagccaaaactctttaattcccaa

SEQ ID NO: 26006 - DNA, 120 bp, Artificial Sequence
  ENSG00000037637_21 (sequence is synthesized)
ccgaagtcactccaggctgggatcaaatctccattaagaaaaaaaattatatataaatatatatatatatattatatagccaactctgttgacaaaaaaagggagagatttccatcctgg

SEQ ID NO: 26007 - DNA, 120 bp, Artificial Sequence
  ENSG00000037637_22 (sequence is synthesized)
ttcagataaagttgttgctgtgttttaacaggggctgggctgcctttttctaccttgctggtaactagaccaagaagttagagaatagactaacatcagtaacttcccaaaagaaactga

SEQ ID NO: 26008 - DNA, 120 bp, Artificial Sequence
  ENSG00000037637_23 (sequence is synthesized)
agagccccctgtaaatctttatgtggccttcttggagttaaaaaatgaaagggcatatgtaagttgcaaaggtggagggttttagactctcatgcttcaggtgctgtcggggtaaaagta

SEQ ID NO: 26009 - DNA, 120 bp, Artificial Sequence
  ENSG00000037637_24 (sequence is synthesized)
actgtttttccccttctcttaaaaccacagaggacctgtgacagctctgcagaaatgccagtgcctggccccctcttgccttttatggctgaggaaagttacccaacaaaggattttatt

SEQ ID NO: 26010 - DNA, 120 bp, Artificial Sequence
  ENSG00000037637_25 (sequence is synthesized)
cattttgtgtctgattgtggaaatttctgacaatcaatcatatttggtggcaagttgccaaaaaacatatttattctcctctttcttcccttagaacatggtacttggaaactgcctttt

SEQ ID NO: 26011 - DNA, 120 bp, Artificial Sequence
  ENSG00000037637_26 (sequence is synthesized)
ccattcacttacaggctgcttttttcttctaccttttttcttttcttttttttttttcatatgtggtgaagtcctaaaacctgtctgactttctgtttcttttacaaagctcaggtgcct

SEQ ID NO: 26012 - DNA, 120 bp, Artificial Sequence
  ENSG00000037637_27 (sequence is synthesized)
acagaaatcagaagctgcttagaaatacttgtggaaccctttccctggtgtcactagggggccagtagggaattctaagatgccaatattgtgagaaatctttgaagcaagcatcaaaag

SEQ ID NO: 26013 - DNA, 120 bp, Artificial Sequence
  ENSG00000037637_28 (sequence is synthesized)
atactgttttttccctatgggcttctttttacttccaaagcacattgagcacactcatcccatatttgtagaatgtggaaattgattctggaagggaattccaataacagttctttttag

SEQ ID NO: 26014 - DNA, 120 bp, Artificial Sequence
  ENSG00000037637_29 (sequence is synthesized)
aaatgtttttttccttgtggtgacatatattcctcttcctggctattggcaggtgatggagttgagaatcatgtacttgacttcttgacgcatggctgacctcagaaacagctccatcct

SEQ ID NO: 26015 - DNA, 120 bp, Artificial Sequence
  ENSG00000037637_30 (sequence is synthesized)
ttgcacttgtcttcttcatgtgtcacccaaatagggcttgggtttttactttcacttcatttctgagattaaggtgtaaccaagtagagcatttctttgcttgatacagaaagttactag

SEQ ID NO: 26016 - DNA, 120 bp, Artificial Sequence
  ENSG00000037637_31 (sequence is synthesized)
tctcaaccatggcctgggcataggagatgtcaaaataagtttatttcaaatggcaccatttaaatagggatttttggtgatttctcatcagtggaaagaggatttttgttttgcctttgt

SEQ ID NO: 26017 - DNA, 120 bp, Artificial Sequence
  ENSG00000037637_32 (sequence is synthesized)
tttgttttgaaatttaaatcctaatttcaaaacatcaccttgccaccctgacactcctctttttattattagcgtttctcaggcacaaagcctgctgcagctggccctgggtcctggctt

SEQ ID NO: 26018 - DNA, 120 bp, Artificial Sequence
  ENSG00000037637_33 (sequence is synthesized)
tcagccagcatctggcagcctaagtgtactgataagtgtgttttctcctgttacatcatgctgaatcctttcccttagccattagcttttatgatgtggtcttcgtaggaaagccaccct

SEQ ID NO: 26019 - DNA, 120 bp, Artificial Sequence
  ENSG00000037637_34 (sequence is synthesized)
ggtgccaagcctagcttgtggggaggggtatgtgttccagaaactgctctttgtgttcccttcaatgaggaaacaacatgtgtctacttatgtggcatccaactgcttggagctccacac

SEQ ID NO: 26020 - DNA, 120 bp, Artificial Sequence
  ENSG00000037637_35 (sequence is synthesized)
ttccctttcgcgactcaggctctggtgctgttgccaatccttgcttggcaaagactgttcgatcatgtggggtccttatttacaagggaaagctgggccagaaggctagcaattcaggtg

SEQ ID NO: 26021 - DNA, 120 bp, Artificial Sequence
  ENSG00000037637_36 (sequence is synthesized)
ttaccgctattgctgtaccttgtgttaggacattgtgtttgtgcatggactgtgcctccaaactcagtagttcctatctaaatataaagtatattagaaacctgaaagtacagaatctca

SEQ ID NO: 26022 - DNA, 120 bp, Artificial Sequence
  ENSG00000037637_37 (sequence is synthesized)
accttacagtctttcccttagtcctgtggccttcctaagccagctgttaacgtgttgattccttccacttcccccaagtaggcaggcaacagatatgttgattgtcttagaaagtaatct

SEQ ID NO: 26023 - DNA, 120 bp, Artificial Sequence
  ENSG00000037637_38 (sequence is synthesized)
ggttcctctgaactccattgaattccagtttgacgcatactgcctggaaccagactgtttgcttacagctttttaagaaaaatctgccttgtctgcccccattatggttggtcttggtag

SEQ ID NO: 26024 - DNA, 120 bp, Artificial Sequence
  ENSG00000037637_39 (sequence is synthesized)
ctcctgggcactgtgggcgtgtaccatgggaaagtgattcaacacagtgaaggtgattgtctcctcaggcctcctgaagccacctgtgcggtgggacttcacgtgtctcggccaaggcga

SEQ ID NO: 26025 - DNA, 120 bp, Artificial Sequence
  ENSG00000037637_40 (sequence is synthesized)
gcatttccacaatgccgtggatgctgcagtcaggccagattgaaccatgaccccatttttcacatgataccaattttgtcttaaaattcactgagaaaaatgagactaaattttttttaa

SEQ ID NO: 26026 - DNA, 120 bp, Artificial Sequence
  ENSG00000037637_41 (sequence is synthesized)
ccctcaggagcacctgaagcaaatatttatccgtatttattgaaaattcattttgtttctacttgaagctttaaccccttccattcctgcaagtgtgccttttgagagctcccatggcct

SEQ ID NO: 26027 - DNA, 120 bp, Artificial Sequence
  ENSG00000037637_42 (sequence is synthesized)
agtgacttcactggtcaccttgtccatcttacttaagaattttagtctctccctaccctcttggacagagcttcctgttctcttatttcacaggttatacagcagagcgggttttgtgtt

SEQ ID NO: 26028 - DNA, 120 bp, Artificial Sequence
  ENSG00000037637_43 (sequence is synthesized)
ttcattcctatttccacccttcatttggttggtggactccacaacctcaccctaccctacactttgggagcacaaatttggtgttgaaacaagcttaaatttcattttagggcatactgg

SEQ ID NO: 26029 - DNA, 120 bp, Artificial Sequence
  ENSG00000037637_44 (sequence is synthesized)
gcttactctcctcccagctgtctgtggattgatttgattttaatgttcgagttttacagcaacagctgaaaaccatgaactattctaggaactgtgttggaactctttaaaataaagaaa

SEQ ID NO: 26030 - DNA, 120 bp, Artificial Sequence
  ENSG00000037637_45 (sequence is synthesized)
agaggaggaggaggaggaagaaagaaaaccaacttaagaagccttgactttggaggacagaaagccaccagccaatggagaacaaagagatgtttccctttcctttctttcaccttgtca

SEQ ID NO: 26031 - DNA, 120 bp, Artificial Sequence
  ENSG00000037637_46 (sequence is synthesized)
ttctgggtttccttctgcttcactctttccttcccccttaaaagtggtattcctggttggtctgtctgtctgtccttgtccttgtggtgatcctggcatggtgatatgctccactttgca

SEQ ID NO: 26032 - DNA, 120 bp, Artificial Sequence
  ENSG00000037637_47 (sequence is synthesized)
ttatccatggtctcttaccagcgcacaagtcagtggggaggatctaaccacgcctggtggtgaggaagctgaatttccaggcctgcgtcccatgtagcctctccatgaactgcagaaggc

SEQ ID NO: 26033 - DNA, 120 bp, Artificial Sequence
  ENSG00000037637_48 (sequence is synthesized)
atgttctgcatggttaccagtaagtggctccctctcaccgtgttcattgtcaaatgagagcaaactttaggtgttggctccattgtacactctacttgctctgctcccctccctccaacc

SEQ ID NO: 26034 - DNA, 120 bp, Artificial Sequence
  ENSG00000037637_49 (sequence is synthesized)
agggttcatgtcagtgcacaccccatgtgccctggcgaagctggtgctgtgagtgatgtttcccatacaactcagggatgccaggtggcttaccctgagatagtcattttgggcacataa

SEQ ID NO: 26035 - DNA, 120 bp, Artificial Sequence
  ENSG00000037637_50 (sequence is synthesized)
cagtgtaggaatgaaacatggatttcattgatatttaaatctgtcaatttcattttttgttaatgttttcccctgatgactttttagcaatttaacaaataaaatggacaattgtcttaa

SEQ ID NO: 26036 - DNA, 120 bp, Artificial Sequence
  ENSG00000037637_51 (sequence is synthesized)
cttaccaggtgactcccttggcatggaaactctacctgatcatttttggtgttggtctcaaggatgggttactgggactcaggtccttaagtttaatgtgccatgtaaatgataatagta

SEQ ID NO: 26037 - DNA, 120 bp, Artificial Sequence
  ENSG00000037637_52 (sequence is synthesized)
atatgcttgtgtaagtctttgttttttgttaaattatactttatcattagtaatggtgccctgccaaaattgctgtactgctgtgtgaattcatttgcatggttttctcaagtatactca

SEQ ID NO: 26038 - DNA, 120 bp, Artificial Sequence
  ENSG00000037637_53 (sequence is synthesized)
tacaggtgtgatacatcatttggtaggaggttgaagtaagaacagaaacacagagtcgtgagaactgtagttgactgacagaagctattgtcctagggctaaggtctctgaatatctgtt

SEQ ID NO: 26039 - DNA, 120 bp, Artificial Sequence
  ENSG00000037637_54 (sequence is synthesized)
gttgttgccagctcagatatttggggagtgtatgggacgtgcctctgctagttactcttaacaacccaggggtgtgggaagattctacagtaggtacattcctacccagtcccactatgc

SEQ ID NO: 26040 - DNA, 120 bp, Artificial Sequence
  ENSG00000037637_55 (sequence is synthesized)
cagaaatctggcagaaagaaactagattattttcttatttttgacctaacctctcctgggggaaaaaataaaaacaatggtttttgcactcatgaggcagggcaatttgaggaggcatag

SEQ ID NO: 26041 - DNA, 120 bp, Artificial Sequence
  ENSG00000037637_56 (sequence is synthesized)
attggaggggttggtgtgatggagaaatagtgtccactgagtataaagtattctgctagattttttggcaagcttttcccaaaacattcatttggctttttagtattaggactcagtctt

SEQ ID NO: 26042 - DNA, 120 bp, Artificial Sequence
  ENSG00000037637_57 (sequence is synthesized)
aggactaaggacatttgggtttccattgggcaagttccttatttatttaggccttgccttactactttgattaccagataggaggcatcattgtatattagaaagggcactggactaaga

SEQ ID NO: 26043 - DNA, 120 bp, Artificial Sequence
  ENSG00000037637_58 (sequence is synthesized)
gtgaggggacatgagtttcatttcctggcatagtcaccaattctccatgtaactataaataagttattgcacttctctgggagaaatgtggagtagtactaaatgactatttttaaatgg

SEQ ID NO: 26044 - DNA, 120 bp, Artificial Sequence
  ENSG00000037637_59 (sequence is synthesized)
actgtgaatgtctaggccagggacttaaacctgtttatgagaagaagctgcattttgcttccctaaaacttaagttcctgttctttccacctacattaggcaaatataggaggagcctac

SEQ ID NO: 26045 - DNA, 120 bp, Artificial Sequence
  ENSG00000037637_60 (sequence is synthesized)
tgagtggataccatgggtggagctgggctttgtgtagatgaagttctttattaaaattattggcatttggagggtaggagggtggtggtccagtctgcagatggccacaccaggaggagg

SEQ ID NO: 26046 - DNA, 120 bp, Artificial Sequence
  ENSG00000037637_61 (sequence is synthesized)
agctattatatccccttctcttccacttcctgtcacaaccaataaaggccgtttgtgccattcataaaaaacaaaaacaaaaacaaacctacaagccaggcccactggctcacgcctgta

SEQ ID NO: 26047 - DNA, 120 bp, Artificial Sequence
  ENSG00000037637_62 (sequence is synthesized)
acttgggaggctgaggcaggagaatctcatgaacccaggaggtggaggttgcactccatcctgggcaacagagcaagtctccacaaaaactattggaataataaagaaatggtaatcata

SEQ ID NO: 26048 - DNA, 120 bp, Artificial Sequence
  ENSG00000037637_63 (sequence is synthesized)
aataataaagaaatggtaatcatataaaaagtttgatagctagaactatttcagggccctgagaattttgtactttggagaataaccttttctagccctttataccatattgcacttagt

SEQ ID NO: 26049 - DNA, 120 bp, Artificial Sequence
  ENSG00000037637_64 (sequence is synthesized)
tagccctttataccatattgcacttagtgcaaattgattaatatttggagttacagcttctgttttgttttgtattgttttttgagacaagatcttgctttgtcacccaggctggagtac

SEQ ID NO: 26050 - DNA, 120 bp, Artificial Sequence
  ENSG00000037637_65 (sequence is synthesized)
tcagctgagttatggattctaaaatatagaagatcttctcagcttaagcatcctattgccaccatgcttgggatcttgtacaggtcttatttcagaggagctttgatagtttcagtcaca

SEQ ID NO: 26051 - DNA, 120 bp, Artificial Sequence
  ENSG00000037637_66 (sequence is synthesized)
aaatactattactgtctttattttgtaaacaagctttatgcctttgataatttagcatgggtggtgctctttcttgttaaaatggagctctggtttggggaccttcatagcctctgccaa

SEQ ID NO: 26052 - DNA, 120 bp, Artificial Sequence
  ENSG00000037637_67 (sequence is synthesized)
ctactgtgcttatttctccctgtaatatggagtaagactttttttttttaaaccatcaagtttaaagactgctttgtggctaggcgaagtggctcacgcctataaccccagcactttagg

SEQ ID NO: 26053 - DNA, 90 bp, Artificial Sequence
  ENSG00000037637_68 (sequence is synthesized)
taggcgaagtggctcacgcctataaccccagcactttaggaggccaaggcagaaggatcccttgaggccaggagtttgagactcaacaaa

SEQ ID NO: 26054 - DNA, 120 bp, Artificial Sequence
  ENSG00000037637_69 (sequence is synthesized)
ccatagtcccagatacttgggagggtgagacaggaggattgcttgagcccacagatataagcccagacgcctaggcgagagtgagactgtgtctcaaaaaaagaaacaaagaaagagaaa

SEQ ID NO: 26055 - DNA, 120 bp, Artificial Sequence
  ENSG00000037637_70 (sequence is synthesized)
ctttgctgtgtcatttctcaagagaatcctgcattttatgtggttgacattcatgttaatatttgatcaacaaagaatgtatcctttcaggtgaattatcagtaatttattcacagggat

SEQ ID NO: 26056 - DNA, 120 bp, Artificial Sequence
  ENSG00000037637_71 (sequence is synthesized)
cagaattgatatgtttttaggagaatggagaggttatggtaactagaatattcccatttgggagctaggtaggctattctcatataccagtgaagcatagaaagtcagaaacctgtgtct

SEQ ID NO: 26057 - DNA, 120 bp, Artificial Sequence
  ENSG00000037749_0 (sequence is synthesized)
ggagctagacggcggtcgggtaggtgacggcttggttggggtcgctgcgaggggactactaggagcgccgaggcgtgagtcgtagcctgtggcttggggtcgggagtgcaggaggcgaaa

SEQ ID NO: 26058 - DNA, 120 bp, Artificial Sequence
  ENSG00000037749_1 (sequence is synthesized)
atgtttgccattcttttgaaagtctggcctgggtgtgggagttcggtcatcgaacacttactgagagccagatacctgccaggcactgccctgggctccagggacacatcagtcaacgaa

SEQ ID NO: 26059 - DNA, 120 bp, Artificial Sequence
  ENSG00000037749_2 (sequence is synthesized)
cggaagggccctgctctcaagcagtgcgaaaagcagattataaacaagtcaacaaacgggattatctaaggtggtagttctctactcacatcttttaatcttgaagactagaaaatataa

SEQ ID NO: 26060 - DNA, 120 bp, Artificial Sequence
  ENSG00000037749_3 (sequence is synthesized)
ctggatctaccacttgtttggaaaatttctctaccaagcaataaattacccgctgtgcttttgttgtagtgtagaagtttttgagttctccaaatctaaacaagattttgtcccattttc

SEQ ID NO: 26061 - DNA, 120 bp, Artificial Sequence
  ENSG00000037749_4 (sequence is synthesized)
ccatgaagctacattgttgcttattcactttagtggcaagtattattgtgccagctgcttttgttttggaagatgtggacttcgaccaaatggtttcactggaagcaaatcgtagttctt

SEQ ID NO: 26062 - DNA, 120 bp, Artificial Sequence
  ENSG00000037749_5 (sequence is synthesized)
acaatgcatcctttccctcaagctttgaactctcagcaagttcccactcggatgatgatgtcatcatagccaaagagggaactagcgtttcaattgagtgtcttctcacagccagtcact

SEQ ID NO: 26063 - DNA, 120 bp, Artificial Sequence
  ENSG00000037749_6 (sequence is synthesized)
atgaagatgtccattggcacaattcaaaaggacagcaactggatggcagaagcagaggtggaaagtggttggtttctgataacttcctaaacatcaccaatgtagcttttgatgaccgtg

SEQ ID NO: 26064 - DNA, 120 bp, Artificial Sequence
  ENSG00000037749_7 (sequence is synthesized)
ggctctatacctgtttcgtcacctctccaattcgtgcctcctactctgtcaccctacgtgttatcttcacctcgggagacatgagtgtctattacatgattgtttgcctgattgccttta

SEQ ID NO: 26065 - DNA, 120 bp, Artificial Sequence
  ENSG00000037749_8 (sequence is synthesized)
caatcacactcatcttgaatgtcacacggctgtgcatgatgagcagccatcttcgcaagactgagaaggctatcaatgagttctttagaactgaaggggctgagaaacttcagaaggcct

SEQ ID NO: 26066 - DNA, 120 bp, Artificial Sequence
  ENSG00000037749_9 (sequence is synthesized)
ttgagattgcaaaacgtatccccatcattacctcagccaaaactctggagctcgccaaagtcacacaatttaagaccatggagtttgctcgttatattgaagaactggcaagaagtgtcc

SEQ ID NO: 26067 - DNA, 120 bp, Artificial Sequence
  ENSG00000037749_10 (sequence is synthesized)
ctcttccacctcttattctaaactgtcgagcctttgttgaggagatgtttgaggctgtgcgagtggacgaccctgatgacctgggtgaaagaattaaagagagacctgccttgaatgctc

SEQ ID NO: 26068 - DNA, 120 bp, Artificial Sequence
  ENSG00000037749_11 (sequence is synthesized)
aaggtggcatctatgtcattaacccagagatgggacggagtaattcaccaggaggagattcagatgatggctctctgaatgaacaaggccaggaaatagcagttcaggtttctgtccacc

SEQ ID NO: 26069 - DNA, 120 bp, Artificial Sequence
  ENSG00000037749_12 (sequence is synthesized)
accaaaagtattgatacagagtctcaaggcagcagtcatttcagtccacctgatgatataggatctgcagaatctaactgtaactacaaagatggggcatatgaaaactgtcagctgtaa

SEQ ID NO: 26070 - DNA, 120 bp, Artificial Sequence
  ENSG00000037749_13 (sequence is synthesized)
cctacaatgctgtaacccagtacctacaaaatcagctcgctctcagaaaaggaacctgtttcttagaagaagtaacatttttgccaaaagatgactggggttttccgtttgttaatatta

SEQ ID NO: 26071 - DNA, 120 bp, Artificial Sequence
  ENSG00000037749_14 (sequence is synthesized)
agcacatcagaacgtgaattgccaaagtcttcattagaaggcagcatttttcctctctgatacttttcagtcattttccttagagctttattaaattatgcatgctaagatttaaaggag

SEQ ID NO: 26072 - DNA, 120 bp, Artificial Sequence
  ENSG00000037749_15 (sequence is synthesized)
ccccagataaacatgatggggaaaagcactgaactaagagtcccatggtttctcttctggtcacagttcttccattggttggatctgatacttatcttgggacttcagtttttccgtcaa

SEQ ID NO: 26073 - DNA, 120 bp, Artificial Sequence
  ENSG00000037749_16 (sequence is synthesized)
taagatgagggattaggtgagatctgaagttgtttctagctctatagcttcttaacccatcacctttaaattaccagaatcttcactcatctctaagtaaacctttcccgggacttttac

SEQ ID NO: 26074 - DNA, 120 bp, Artificial Sequence
  ENSG00000037749_17 (sequence is synthesized)
tcgcttcttttggaaaggattaagctgagatctaaatttccacaccaatgtcataatgcacagaggtttttgaaaaacatctgagtgtttttcagatgttttgccatgtggagcatataa

SEQ ID NO: 26075 - DNA, 120 bp, Artificial Sequence
  ENSG00000037749_18 (sequence is synthesized)
tgatatgtgcaagattgaatcttttcaatgtagcacatgtctgtagggttatacagatgtcagagagctaactgctctgtaaactactttccatgagtaaattggtccttggtgggggtg

SEQ ID NO: 26076 - DNA, 120 bp, Artificial Sequence
  ENSG00000037749_19 (sequence is synthesized)
tatcatatttttaacttactgagatatcattttagttcattgaggttggcagggattgcctaactgatcttccaaagtgagcagtttatttctaaggtataacgtctttgatgcttttag

SEQ ID NO: 26077 - DNA, 120 bp, Artificial Sequence
  ENSG00000037749_20 (sequence is synthesized)
aataagaacagtgtcaaatcatctgtcttctggaaaatcatggattttcatatttctgttaacagaatttctcaggctttccctttttaaaagtattggactctacaaataggttctata

SEQ ID NO: 26078 - DNA, 120 bp, Artificial Sequence
  ENSG00000037749_21 (sequence is synthesized)
tttgggatctcatcctaggagaaaacccaaaactggattcctcttaagacctctgtcaaccctcctgccctttgtggtcttaggtatggtgctataggttgcatgcgtctttatcttgtt

SEQ ID NO: 26079 - DNA, 120 bp, Artificial Sequence
  ENSG00000037749_22 (sequence is synthesized)
tgtttggttaatattttgttgttgaggtttttatttttgtttacttcagatacataattctgagctatggctgcttttgtagcctttccaagaagcactaacctgaaataagattagata

SEQ ID NO: 26080 - DNA, 120 bp, Artificial Sequence
  ENSG00000037749_23 (sequence is synthesized)
attgtgagggtgtgttactatattaaaatacacacacaactgatctagacatcaagaggaagaaaaatgatggatgatgccacctgcttcaactgtatataataaacacttatgatgaca

SEQ ID NO: 26081 - DNA, 120 bp, Artificial Sequence
  ENSG00000037749_24 (sequence is synthesized)
gattccagggtctgagagagagccaagatgaatatggccttccaagaagacatgctgacaagaaaagactcagagtgcccaggagcttccccttcctaccaaccctgcagcctggaaccc

SEQ ID NO: 26082 - DNA, 120 bp, Artificial Sequence
  ENSG00000037749_25 (sequence is synthesized)
tagccatacctctccctgactgtggacagtacagcctttgagctgagccaagctgctcccctggcgatttccataagagtaccacttatcagcaccttggacagcatacaaatgattctg

SEQ ID NO: 26083 - DNA, 120 bp, Artificial Sequence
  ENSG00000037749_26 (sequence is synthesized)
catctccaggaagaactggtccttcagccaagggcagcactgagccccaagtggccccagatgagtgcaaaggactaccagttttgatcagcgactggttgaattcgtggatgcaaaacc

SEQ ID NO: 26084 - DNA, 120 bp, Artificial Sequence
  ENSG00000037749_27 (sequence is synthesized)
ccaagagcagagagggctcagatgcacagcctctgccttcgtggagtgggcattttcaggaagtgcttagcctccaagtatgggctacttattttttaacaattactttcactccaagac

SEQ ID NO: 26085 - DNA, 120 bp, Artificial Sequence
  ENSG00000037749_28 (sequence is synthesized)
gtacataattttttaaacatgggaatccctgatgtttcatttttgttttggaaatgatttttagagaagatgaattatcctgtctgatgccatgagatctatttttatcatttgggatgt

SEQ ID NO: 26086 - DNA, 120 bp, Artificial Sequence
  ENSG00000037749_29 (sequence is synthesized)
tgagactaaaactgacaacatatttagtattgcttatagtactcagtgacactgcctccctttgaagcccgccagagagccaccatgcaggaacatgagttactaattaattcaacctgc

SEQ ID NO: 26087 - DNA, 120 bp, Artificial Sequence
  ENSG00000037749_30 (sequence is synthesized)
tcactgggacaaaatgggaaggaagaacccacatttgacacagataaagtggagcatgttcaaagcgccaggacaccaagggatcaggaaattatgtctcaagggaagggctgaagaaac

SEQ ID NO: 26088 - DNA, 120 bp, Artificial Sequence
  ENSG00000037749_31 (sequence is synthesized)
catctccagaaattgtcacagccaccccaaccttcagctaccactaccctgattcatcagcatcaataccaaggcaacatcctccaccagaaaaagattacaactcaagcacattcacct

SEQ ID NO: 26089 - DNA, 120 bp, Artificial Sequence
  ENSG00000037749_32 (sequence is synthesized)
ctccagtctgcagctcccagtgagaccaacacagaagttttgatcagcgactggttgaattcgtggatgcaaaacctgtggatacagagggacagaggcctactgtacatggcacatgcc

SEQ ID NO: 26090 - DNA, 120 bp, Artificial Sequence
  ENSG00000037749_33 (sequence is synthesized)
gggacagaggcctactgtacatggcacatgcctcctgaaaagtgtcaagaggtgattctgggacagaggagccagcagatggactggctccaggaagagttcctgaggtgtctgaaccaa

SEQ ID NO: 26091 - DNA, 120 bp, Artificial Sequence
  ENSG00000037749_34 (sequence is synthesized)
ttccagtctgcattcctgtagttggcagaggcctccagagagaacagcaagatctgggctcacgtgtctcagtcccctgtttccttttttccttcccaatttccttccttcagcctttcc

SEQ ID NO: 26092 - DNA, 120 bp, Artificial Sequence
  ENSG00000037749_35 (sequence is synthesized)
tttcttactaattccttactcttcctttcttccttcctgcctgccctccctctgttcctcctgtctccctttctctcacacatttactaacccatgatcagacataacacccatgcatat

SEQ ID NO: 26093 - DNA, 120 bp, Artificial Sequence
  ENSG00000037749_36 (sequence is synthesized)
aaacatacacacccacatatccacctcctacacatatattatttatatatatccccctcacacacacacattcaaacacacactacaaatgcagcttcattcatacacatttcaggtata

SEQ ID NO: 26094 - DNA, 120 bp, Artificial Sequence
  ENSG00000037749_37 (sequence is synthesized)
ttttccttatggcttgccagataacttgcaaattcagtgttcaagatcatggtctccttgtaagtcatggcagccacattttccaggtagagaacctgagattcagagatgttgaagaat

SEQ ID NO: 26095 - DNA, 120 bp, Artificial Sequence
  ENSG00000037749_38 (sequence is synthesized)
ttcctcaaggtcacaaagctgggaagtgacagaatcgagattagccctcaagtgctcctggctctgattattctttagccacaccctgctctccctacacatgcagacacagacacacac

SEQ ID NO: 26096 - DNA, 120 bp, Artificial Sequence
  ENSG00000037749_39 (sequence is synthesized)
gcacttatacacatacccagacatggaaagaaatttcactgacttgtcactaacagttctaaggaagaatctgtctttccaaaaatgttctggctttcttgtagataagccttctgaatt

SEQ ID NO: 26097 - DNA, 120 bp, Artificial Sequence
  ENSG00000037749_40 (sequence is synthesized)
gtacgtattagctccttagagacacccagaggacttagttcaatagacttgctctgacaggggtagaagacaaatggtagggatgaggctttgtgttgtgtgtttgatttttgcagctct

SEQ ID NO: 26098 - DNA, 120 bp, Artificial Sequence
  ENSG00000037749_41 (sequence is synthesized)
ttctaccttatctcagctcatagtccattctcacaataaccctgtatgtggacatggaaggaactattatacccatgttacatatggggaaactgggaatcagggtgttcagggggcacc

SEQ ID NO: 26099 - DNA, 120 bp, Artificial Sequence
  ENSG00000037749_42 (sequence is synthesized)
caggtgcctccacctccttaatcatcaaggatctcacttttcttcaatgcccaaataacaacaattcaagctgccttctcccttgagttcagaaagtccactgcacaaccccccaagtga

SEQ ID NO: 26100 - DNA, 120 bp, Artificial Sequence
  ENSG00000037749_43 (sequence is synthesized)
tgtcatgggtacccaggaggaatacttaaatgttttagcagtccctcctggctctcccatgtcacatcctatttgagcatgtttgttcctctagtggtcatctctgatttcctcaaacct

SEQ ID NO: 26101 - DNA, 120 bp, Artificial Sequence
  ENSG00000037749_44 (sequence is synthesized)
ctgcttaacctctgactttcttcctttccaaagccaggataccagctctcccttaattctcaaaacacatctctttggttgcttttagctataagtaagtaacagaaaacccaactcaaa

SEQ ID NO: 26102 - DNA, 120 bp, Artificial Sequence
  ENSG00000037749_45 (sequence is synthesized)
tgcgtttaaacaatatagacattttattccatttctttaaccagaagttccaaaggagggtacctggtacctccaaggttaattaattcagtggctcagcaatattatcagggacccagg

SEQ ID NO: 26103 - DNA, 120 bp, Artificial Sequence
  ENSG00000037749_46 (sequence is synthesized)
ttctttccactttctccctccaccatccttatgtgtgttggttttgctcccaagttgactctgttttcccctgagtcataagctggctcacactattccaggcatcactcagggaaaaaa

SEQ ID NO: 26104 - DNA, 120 bp, Artificial Sequence
  ENSG00000037749_47 (sequence is synthesized)
aatctccagcaaaagaagagtttttttcttcctgtgtgtctctttgtaacagaaaggaagccttttctagaagtctctccacagaattgcacttacatgtcattggacagaattttatca

SEQ ID NO: 26105 - DNA, 120 bp, Artificial Sequence
  ENSG00000037749_48 (sequence is synthesized)
cataagcaaacttctgggtgtaactgataaatatctttattattttgattatagtgatagtttcacagctgtgttcatgtgtcaaattgtatgctttaaatgtgcacaagatattgtatg

SEQ ID NO: 26106 - DNA, 71 bp, Artificial Sequence
  ENSG00000037749_49 (sequence is synthesized)
tccagtctgcagctcccagtgagaacatctcagtgcgactgattagacagtgggtgcagcccacggagggt

SEQ ID NO: 26107 - DNA, 120 bp, Artificial Sequence
  ENSG00000037749_50 (sequence is synthesized)
tacatggcacatggggagttttcacagaagaaaagatttctgcaccccagtcttggccattctaatctgaggcttaagaatctgagtgatttggccaggctcagtggctgatgcctgtaa

SEQ ID NO: 26108 - DNA, 120 bp, Artificial Sequence
  ENSG00000037749_51 (sequence is synthesized)
ggtgacagagtgagacactgtctcgaaaaaaagaattaaaagagagagagagagagaatctgagtaattttttccaggtgatgtgcagtgaggtttggtgatgtctcttccagctctgtt

SEQ ID NO: 26109 - DNA, 120 bp, Artificial Sequence
  ENSG00000037749_52 (sequence is synthesized)
gttctgtgatcctgacactcctgcctcctcctaggcatgggacttgtttaggcccaaggtctacaccatctttgccacttaaattgctgctttctccatgggggaagatttttaagacaa

SEQ ID NO: 26110 - DNA, 120 bp, Artificial Sequence
  ENSG00000037749_53 (sequence is synthesized)
agaagtcctggtgactctggccttttactgcgtgtgactgatggagccatatttcagatgtcccactgaggaaatcctactcctgggaaggaagagactaacccatgctgctctattgtt

SEQ ID NO: 26111 - DNA, 120 bp, Artificial Sequence
  ENSG00000037749_54 (sequence is synthesized)
tgctggacactatgctgggctttgttgtcatttgatttctactgggtcatttaaacatcgcagcaaccttgggaaatattattgtcctcattttacagatgaggaaactgaagtacacag

SEQ ID NO: 26112 - DNA, 120 bp, Artificial Sequence
  ENSG00000037749_55 (sequence is synthesized)
tgacttagtaatttgcccaaggtcacatagctactatggagcccctatcccagatttgacagactccaaagcctgtgctcttttcattataccacctgcctacaaattaaggtgtctaag

SEQ ID NO: 26113 - DNA, 120 bp, Artificial Sequence
  ENSG00000037749_56 (sequence is synthesized)
gagacagagaccatggatggccagtgcctcctttccagagatgctcagaggagtctactcactttggctcccaattctcagccccttcctgccttaacaacccaagttcctgactcttgg

SEQ ID NO: 26114 - DNA, 120 bp, Artificial Sequence
  ENSG00000037749_57 (sequence is synthesized)
ctactgccccggaagtgctccttcagcgcagaggcgtgccggtgtgtccgagaaaacttccgagttaagccgccgctgaggccggaaggagctagacggcggtcgggttctctactcaca

SEQ ID NO: 26115 - DNA, 120 bp, Artificial Sequence
  ENSG00000037749_58 (sequence is synthesized)
agggctccatttaaatcttcctttgggcaaaacgggatcttgctgctcaaaaataatttgaaaaaactttgacattttgggtttgtgtcagaaagtcatggatttttttttttttttcgc

SEQ ID NO: 26116 - DNA, 120 bp, Artificial Sequence
  ENSG00000037749_59 (sequence is synthesized)
ctaagaagctatcaccaggaagcgtcaaatgagccctgtggaccatggctggcctcttatctttgggtttcaggagggacctcctgctaggttcatctccccccacagctcctgaaatgg

SEQ ID NO: 26117 - DNA, 120 bp, Artificial Sequence
  ENSG00000037749_60 (sequence is synthesized)
agtcaactctcccaggacgccaaacagggcccagaatttgtttgtgtggatttacataaaaagcttccctgaatgaaattcactgagattcactgaatgcaggtgagattcacagagtcc

SEQ ID NO: 26118 - DNA, 120 bp, Artificial Sequence
  ENSG00000037749_61 (sequence is synthesized)
tactaatttatgtgccactaaaataatccagaaccatagaatcttggggatgaaagagattttgaagattgggcactcaagtaatgcttaacaagcagtccgctaacctcctctgggaca

SEQ ID NO: 26119 - DNA, 120 bp, Artificial Sequence
  ENSG00000037749_62 (sequence is synthesized)
cctcctctagtcattggaatgcatccccacactgcaggtggaaagtggttggtttctgataacttcctaaacatcaccaatgtagcttttgatgaccgtgggctctatacctgtttcgtc

SEQ ID NO: 26120 - DNA, 120 bp, Artificial Sequence
  ENSG00000037757_0 (sequence is synthesized)
gccccgctcccaagtgcgcgcggacccctagctccctctgagttgcgctgggcttggctgctgcaccatgaccctggaggcgatccgctactcgcggggctccctgcagatcctagacca

SEQ ID NO: 26121 - DNA, 120 bp, Artificial Sequence
  ENSG00000037757_1 (sequence is synthesized)
gctgctgctgcccaagcagagccgctacgaggcggtgggctcggtgcaccaggcctgggaggccatccgcgccatgaaggtgcggggcgccccggccatagccctggtgggctgtctcag

SEQ ID NO: 26122 - DNA, 120 bp, Artificial Sequence
  ENSG00000037757_2 (sequence is synthesized)
cctcgccgtggagctgcaggcgggcgccgggggaccgggactcgccgcgctcgtggccttcgtgcgcgacaagctgagcttcctcgtcaccgcccggcccaccgctgtcaacatggcccg

SEQ ID NO: 26123 - DNA, 120 bp, Artificial Sequence
  ENSG00000037757_3 (sequence is synthesized)
cgccgcccgcgacctggctgatgttgcagcccgggaggccgaacgggagggcgctacggaagaggcggtccgggagagagtgatctgctgcaccgaggacatgctggagaaagacctcag

SEQ ID NO: 26124 - DNA, 120 bp, Artificial Sequence
  ENSG00000037757_4 (sequence is synthesized)
agacaaccgaagcattggggacctaggagcccgccacctcctggagcgggtggcccccagcggtggcaaggtgactgtgctgacccactgtaacactggtgctctggccaccgctggcta

SEQ ID NO: 26125 - DNA, 120 bp, Artificial Sequence
  ENSG00000037757_5 (sequence is synthesized)
tggtacagccctaggtgtgattcgctcactgcacagcctgggccgcctggagcatgccttctgcacagagacccggccctacaaccagggagcccggctgacggcctttgagctggtcta

SEQ ID NO: 26126 - DNA, 120 bp, Artificial Sequence
  ENSG00000037757_6 (sequence is synthesized)
tgagcagatccccgccacccttatcaccgacagcatggtggctgctgccatggcccataggggcgtgtcagctgtggtcgtgggagctgaccgcgtggttgccaacggcgacacagccaa

SEQ ID NO: 26127 - DNA, 120 bp, Artificial Sequence
  ENSG00000037757_7 (sequence is synthesized)
caaggtgggcacctaccagctggccattgtcgccaagcaccatggcattcccttctacgtggctgcccccagctcttcatgtgacctccgtctggagaccggcaaggagatcattattga

SEQ ID NO: 26128 - DNA, 120 bp, Artificial Sequence
  ENSG00000037757_8 (sequence is synthesized)
agagcgaccgggccaggagctgaccgatgttaatggggtccggattgcagcacctgggattggagtttggaatcctgccttcgatgtcaccccccacgacctcatcactggtggcatcat

SEQ ID NO: 26129 - DNA, 120 bp, Artificial Sequence
  ENSG00000037757_9 (sequence is synthesized)
cacagaactgggggtctttgcccctgaggagctccggacagccctaaccaccaccatctcttccagggatggaaccctagatggaccccagatgtaaccaactcagctctccctagcctg

SEQ ID NO: 26130 - DNA, 120 bp, Artificial Sequence
  ENSG00000037757_10 (sequence is synthesized)
cctctctaggtttttcaatacatttcttgaatggctacccaaaagctgaccgtccagcccctgaccacacttgttcctagtgcagggagctcagacagggccttccatctagagcccagc

SEQ ID NO: 26131 - DNA, 120 bp, Artificial Sequence
  ENSG00000037757_11 (sequence is synthesized)
acctagagccaggctgcccagattcaaatcctgactccgccacttttcccactgtatgatcttgggcaagtcacttcacctctctgtgccttggtttcctcatttataaaatgtggataa

SEQ ID NO: 26132 - DNA, 120 bp, Artificial Sequence
  ENSG00000037757_12 (sequence is synthesized)
taattaattatttaattaaaaaaataaaaaataaatgtggataatactagtacctccctcttaaggtcagggctggagctagggtgacatctccagggcagaattttaagaggacaccaa

SEQ ID NO: 26133 - DNA, 120 bp, Artificial Sequence
  ENSG00000037757_13 (sequence is synthesized)
aaaagctcagcaaccaagataaaaaatattttaaagcaatattttgttttgggttttttttttttgagatcaagtatcactcgttacccaggctggaatgtagaggcgagatctcagctc

SEQ ID NO: 26134 - DNA, 80 bp, Artificial Sequence
  ENSG00000037757_14 (sequence is synthesized)
caggcatgagccactgtgcctgaccttacagcagtattttttaaaaatcaaaattaatgcaaaaatccatgatgaggcca

SEQ ID NO: 26135 - DNA, 120 bp, Artificial Sequence
  ENSG00000037757_15 (sequence is synthesized)
taacataggaagagcttgtctctacaaacaaaaatttaaaaacaatgagctgggcatggaactcacacctctagccccagctactcaggctgaagtgggaggatggcttgagcccaggag

SEQ ID NO: 26136 - DNA, 120 bp, Artificial Sequence
  ENSG00000037757_16 (sequence is synthesized)
aggatgcagtgtgctttgattgcactactgcacttcaccctaagcaacagagtgagaccccatctctttaaaaaaaaaaaaaaatccatgatgaacaaaacaagtatttgtttgagacgg

SEQ ID NO: 26137 - DNA, 120 bp, Artificial Sequence
  ENSG00000037757_17 (sequence is synthesized)
ctatgcctggctaatttttgtatttttattggagacaccatgttagtcgtggctggtctccaactcctgacctcgggtgatccgcgccccgcggcctccgaaagtgctgggattacaagc

SEQ ID NO: 26138 - DNA, 120 bp, Artificial Sequence
  ENSG00000037757_18 (sequence is synthesized)
aagcgtgagccaccgtgcccggcctaaataaaattttgaagaggctagaaccccgcacttgtgccttgagcttactgacctcaacaccctggttccactaaaactttatttacaaaatta

SEQ ID NO: 26139 - DNA, 120 bp, Artificial Sequence
  ENSG00000037757_19 (sequence is synthesized)
attatgctgccggtctgcaggatgtagtttaacaatttgattattttggatattaaaatattttttaagtcttgaaaatattgtttactattaccaaagtttttgaaccttcttaaattc

SEQ ID NO: 26140 - DNA, 120 bp, Artificial Sequence
  ENSG00000037757_20 (sequence is synthesized)
tgtaccagaggtgagtgccacaccctaacctagtctgagtttttatgtgtaaagatcataaaacgttgtaagttttctaaaacacataagctctcaataaacgttagcttatcattgtca

SEQ ID NO: 26141 - DNA, 120 bp, Artificial Sequence
  ENSG00000037757_21 (sequence is synthesized)
gaggcggtccgggagagacgtgaaacggagctatgcgagcattgggaagagcataccaggcagagggaactgccactgcgagggcccctgggcgggactgtgctcggtaagcctttggca

SEQ ID NO: 26142 - DNA, 120 bp, Artificial Sequence
  ENSG00000037757_22 (sequence is synthesized)
aagccctgggggcggggctctggagcatggggccaggtaatgacccccaacttctcatacgccccctccccagctgtggtcgtgggagctgaccgcgtggttgccaacggcgacacagcc

SEQ ID NO: 26143 - DNA, 120 bp, Artificial Sequence
  ENSG00000037897_0 (sequence is synthesized)
agagaaaccccggactgggatcatggcagccgagactcggaacgtggccggagcagaggccccaccgccccagaagcgctactaccggcaacgtgctcactccaaccccatggcggacca

SEQ ID NO: 26144 - DNA, 120 bp, Artificial Sequence
  ENSG00000037897_1 (sequence is synthesized)
cacgctgcgctaccctgtgaagccagaggagatggactggtctgagctatacccagagttcttcgctccactcactcaaaatcagagccacgatgacccaaaggataagaaagaaaagag

SEQ ID NO: 26145 - DNA, 120 bp, Artificial Sequence
  ENSG00000037897_2 (sequence is synthesized)
agctcaggcccaagtggagtttgcagacataggctgtggctatggtggcctgttagtggaactgtcaccgctgttcccagacacacttattctgggtctggagatccgggtgaaggtctc

SEQ ID NO: 26146 - DNA, 120 bp, Artificial Sequence
  ENSG00000037897_3 (sequence is synthesized)
agactatgtacaagaccggattcgggccctacgcgcagctcctgcaggtggcttccagaacatcgcctgtctccgtagcaatgccatgaagcaccttcctaacttcttctacaagggcca

SEQ ID NO: 26147 - DNA, 120 bp, Artificial Sequence
  ENSG00000037897_4 (sequence is synthesized)
gctgacaaagatgttcttcctcttccccgacccacatttcaagcggacaaagcacaagtggcgaatcatcagtcccaccctgctagcagaatatgcctacgtgctaagagttggggggct

SEQ ID NO: 26148 - DNA, 120 bp, Artificial Sequence
  ENSG00000037897_5 (sequence is synthesized)
gagcacccactgtttgagcgtgtgcctctggaggacctgagtgaagaccccgttgtgggacatctaggcacctcaactgaggaggggaagaaagttctacgtaatggagggaagaatttc

SEQ ID NO: 26149 - DNA, 120 bp, Artificial Sequence
  ENSG00000037897_6 (sequence is synthesized)
ccagccatcttccgaagaatacaagatcccgtcctccaggcagtgacctcccaaaccagcctgcctggtcactgactgcttactctaccttagctggacctcgtctcccagggattagag

SEQ ID NO: 26150 - DNA, 120 bp, Artificial Sequence
  ENSG00000037897_7 (sequence is synthesized)
aaaagagcaggagtcctgggtcttcccagttgagactgctggagctgagacacagtactctcttaaagaaggtggggagctgcccagggcagaacccactggtgttcatgactacccctg

SEQ ID NO: 26151 - DNA, 120 bp, Artificial Sequence
  ENSG00000037897_8 (sequence is synthesized)
gctcctctcaccttgtccctccactgccaacagaaaacaaagcagctgactgagatggtcaaaggactttggaccataggggatctttggaaggctgtggggtcttgctcttccttagca

SEQ ID NO: 26152 - DNA, 120 bp, Artificial Sequence
  ENSG00000037897_9 (sequence is synthesized)
ctcctttctccttgtgagatctctcctcagctggaatgaggaatgtagtccatctaaactgcttgctaggctcaattaccacttctgtttgctttgtggatcctgggataacatgtatat

SEQ ID NO: 26153 - DNA, 120 bp, Artificial Sequence
  ENSG00000037897_10 (sequence is synthesized)
gtgtacacatgcctattctgccatttctcaggaaagggtggagtatgtatcatatgccttctaccatcctcctgtcctctccctgcgtaagacttgacctggggaatctgtgttccctaa

SEQ ID NO: 26154 - DNA, 120 bp, Artificial Sequence
  ENSG00000037897_11 (sequence is synthesized)
ccccgacccacatttcaagcggacaaagcacaagtggcgaatcatcagtcccaccctgctagcagaatatgcctacgtgctaagagttgggggtgattttgcctatgcaggggctggtgt

SEQ ID NO: 26155 - DNA, 120 bp, Artificial Sequence
  ENSG00000037897_12 (sequence is synthesized)
ctgtggctatggtggcctgttaggtaacactcaggccctctttttggggtgagaagaggcctagtagcttctgctgcctcagcaacttttgtggggggtcataattggcctttccccttt

SEQ ID NO: 26156 - DNA, 120 bp, Artificial Sequence
  ENSG00000037897_13 (sequence is synthesized)
cgtccagacactggtgacatcagcatggagaggctccacctaccctctactctgggtctgtgacctttgccctggagagtggagggggctgcctcaaatgcttcttaaaacctgggttgt

SEQ ID NO: 26157 - DNA, 120 bp, Artificial Sequence
  ENSG00000037897_14 (sequence is synthesized)
cctttctggcgtcaatccctacatgagccatttcatctgccaggttccgggtcagtgagctggtcagcacaagcatcagagattagccgttgtggccagtgatcctgaactgtcttttct

SEQ ID NO: 26158 - DNA, 120 bp, Artificial Sequence
  ENSG00000037897_15 (sequence is synthesized)
ccgagactcggaacgtggccggagcagaggccccaccgccccagaagcgctactaccggcaacgtgctcactccaaccccatggcggaccacacgctgcgctatggaactgtcaccgctg

SEQ ID NO: 26159 - DNA, 120 bp, Artificial Sequence
  ENSG00000037897_16 (sequence is synthesized)
cctacgcgcagctcctgcaggtggcttccagaacatcgcctgtctccgtagcaatgccatgaagcaccttcctaacttcttctacaagggccagcggacaaagcacaagtggcgaatcat

SEQ ID NO: 26160 - DNA, 80 bp, Artificial Sequence
  ENSG00000037965_0 (sequence is synthesized)
aagtgagagagcgcgagctctacctaccgacagtgaggagcgccgccgccgccgccgccgcccgctcgccgcccgccgcc

SEQ ID NO: 26161 - DNA, 120 bp, Artificial Sequence
  ENSG00000037965_1 (sequence is synthesized)
atccggccgagctcagcaccgaggcgccccccaacctgcccagcccccagcccaccagcccagcccagtcccggggagccagctggcctggggttcggtcccggggggaggggagtttcg

SEQ ID NO: 26162 - DNA, 120 bp, Artificial Sequence
  ENSG00000037965_2 (sequence is synthesized)
tactgggcggggtactcgtgagccagaggggagggggccgcgggttttcatgtacccagcatgagctcctacttcgtcaaccccctgttctccaaatacaaagccggcgagtccctggaa

SEQ ID NO: 26163 - DNA, 120 bp, Artificial Sequence
  ENSG00000037965_3 (sequence is synthesized)
ccggcctattacgactgccggttccctcagagcgtgggcaggagccatgcgctggtgtacgggcccggcggctcggcgcccggcttccagcacgcttcgcaccacgttcaagacttcttc

SEQ ID NO: 26164 - DNA, 120 bp, Artificial Sequence
  ENSG00000037965_4 (sequence is synthesized)
caccacggcacctccggcatctccaactcaggctaccagcagaacccgtgctcgcttagctgccacggagacgcctccaaattctatggctacgaggcgctccccagacagtccctttat

SEQ ID NO: 26165 - DNA, 120 bp, Artificial Sequence
  ENSG00000037965_5 (sequence is synthesized)
ggggctcagcaagaggcgagcgtggtgcaatatcccgactgtaaatcctccgccaacactaacagtagcgaaggacaaggccacttaaatcaaaactcgtctcccagcctcatgtttcca

SEQ ID NO: 26166 - DNA, 120 bp, Artificial Sequence
  ENSG00000037965_6 (sequence is synthesized)
tggatgagaccccacgctccggggaggcgcagtggacggcaaacttacagccggtatcagaccttggaactagaaaaggagtttctctttaatccttatttgacacgaaaacgtcggatt

SEQ ID NO: 26167 - DNA, 120 bp, Artificial Sequence
  ENSG00000037965_7 (sequence is synthesized)
gaagtctctcatgccctgggactgaccgagagacaagtgaagatctggttccagaaccgaaggatgaagtggaaaaaggagaacaacaaggataaactgccgggagcccgagatgaggag

SEQ ID NO: 26168 - DNA, 120 bp, Artificial Sequence
  ENSG00000037965_8 (sequence is synthesized)
aaggtggaggaagaaggaaatgaggaagaggagaaagaagaggaggaaaaggaagaaaacaaggactaagcaaaaaagaaagacccccccccccttagcaactcccttgaagtttcgttt

SEQ ID NO: 26169 - DNA, 120 bp, Artificial Sequence
  ENSG00000037965_9 (sequence is synthesized)
tatggtagcagataaattgagaagtttacgactgtcatttgcttttatagagaatagaatgacactcacaactctaactacctgtcagatacttgcagctctggttttattacctttgga

SEQ ID NO: 26170 - DNA, 120 bp, Artificial Sequence
  ENSG00000037965_10 (sequence is synthesized)
ttgtttgggggctggaggggggagacggagaaacagtgaaaagttcggactctctgtctcactccttgccccacacacacttgtccctgcccccacccttctgagtccttcctggatttt

SEQ ID NO: 26171 - DNA, 120 bp, Artificial Sequence
  ENSG00000037965_11 (sequence is synthesized)
aaggtctgagacctggcctccgtgctcctcggtctgtctctcaccacactcccacctccctgcttctctggtatttattttagaggggagccccctcgaaatgcagaaaaggacttgtgg

SEQ ID NO: 26172 - DNA, 120 bp, Artificial Sequence
  ENSG00000037965_12 (sequence is synthesized)
ttttgtttttatgctaaggctagtgtactagatgtactttttctaaaaaggaaaggacagaaaaaaatgaagaaaggaaaggaagacaaatgtaaagaaataaggaaaaaagcaaggaat

SEQ ID NO: 26173 - DNA, 120 bp, Artificial Sequence
  ENSG00000037965_13 (sequence is synthesized)
atcccctccccctccccctccccctccccagggctccctgcttagaaaaacccccttgactttctctaggaacctgatggaaacctgaaggagatgtgggtctttcccctccccccattt

SEQ ID NO: 26174 - DNA, 120 bp, Artificial Sequence
  ENSG00000037965_14 (sequence is synthesized)
ccagaagggtagataggagcctgcagtcgcctctaaaatcctacctaaccatcccatggtcactcgggcccatgccttcctctccttcgctgtttgatttctattctgttgggcccgcct

SEQ ID NO: 26175 - DNA, 120 bp, Artificial Sequence
  ENSG00000037965_15 (sequence is synthesized)
tcctctgagctgcattagtgttagtgctcagaaatcaccataatcacgaaaataataataataaatctttaacatactacctaaagggaacctgcaataatcttgaaaaagaaaaagaga

SEQ ID NO: 26176 - DNA, 83 bp, Artificial Sequence
  ENSG00000037965_16 (sequence is synthesized)
cctccagcgtattttatcactacctatagaaagaaatcctgctttgagagtatttgtaatgcggttttgttgtcgtttgttgc

SEQ ID NO: 26177 - DNA, 120 bp, Artificial Sequence
  ENSG00000037965_17 (sequence is synthesized)
ttgagagtatttgtaatgcggttttgttgtcgtttgttgctgcttatttcactaagaaaacccaacaactgagactgcctagcccgccggtcctgtgcgcttttattgtgcttctaaccc

SEQ ID NO: 26178 - DNA, 120 bp, Artificial Sequence
  ENSG00000037965_18 (sequence is synthesized)
cagtagagtagaactaaattgcactgaatgtatagttaactctgtcttgaattctctgtttatgcaatgtgctcgaaagaaaaaaatgttaaaaatatatctataataataattttttgt

SEQ ID NO: 26179 - DNA, 120 bp, Artificial Sequence
  ENSG00000037965_19 (sequence is synthesized)
catttgtctttatgtccagctatgaatgtagattttgtgtcccgacagccctgttcctggtccaagtactttgtattgtatacgtgagtcataataataaaaagaagaagaaaaataata

SEQ ID NO: 26180 - DNA, 120 bp, Artificial Sequence
  ENSG00000038002_0 (sequence is synthesized)
aattgttcggcgatcgctggctgccgggacttttctcgcgctggtctcttcggtggtcagggatggcgcggaagtcgaacttgcctgtgcttctcgtgccgtttctgctctgccaggccc

SEQ ID NO: 26181 - DNA, 120 bp, Artificial Sequence
  ENSG00000038002_1 (sequence is synthesized)
tagtgcgctgctccagccctctgcccctggtcgtcaacacttggccctttaagaatgcaaccgaagcagcgtggagggcattagcatctggaggctctgccctggatgcagtggagagcg

SEQ ID NO: 26182 - DNA, 120 bp, Artificial Sequence
  ENSG00000038002_2 (sequence is synthesized)
gctgtgccatgtgtgagagagagcagtgtgacggctctgtaggctttggaggaagtcctgatgaacttggagaaaccacactagatgccatgatcatggatggcactactatggatgtag

SEQ ID NO: 26183 - DNA, 120 bp, Artificial Sequence
  ENSG00000038002_3 (sequence is synthesized)
gagcagtaggagatctcagacgaattaaaaatgctattggtgtggcacggaaagtactggaacatacaacacacacacttttagtaggagagtcagccaccacatttgctcaaagtatgg

SEQ ID NO: 26184 - DNA, 120 bp, Artificial Sequence
  ENSG00000038002_4 (sequence is synthesized)
ggtttatcaatgaagacttatctaccactgcttctcaagctcttcattcagattggcttgctcggaattgccagccaaattattggaggaatgttataccagatccctcaaaatactgcg

SEQ ID NO: 26185 - DNA, 120 bp, Artificial Sequence
  ENSG00000038002_5 (sequence is synthesized)
gaccctacaaaccacctggtatcttaaagcaggatattcctatccataaagaaacagaagatgatcgtggtcatgacactattggcatggttgtaatccataagacaggacatattgctg

SEQ ID NO: 26186 - DNA, 120 bp, Artificial Sequence
  ENSG00000038002_6 (sequence is synthesized)
ctggtacatctacaaatggtataaaattcaaaatacatggccgtgtaggagactcaccaatacctggagctggagcctatgctgacgatactgcaggggcagccgcagccactgggaatg

SEQ ID NO: 26187 - DNA, 120 bp, Artificial Sequence
  ENSG00000038002_7 (sequence is synthesized)
gtgatatattgatgcgcttcctgccaagctaccaagctgtagaatacatgagaagaggagaagatccaaccatagcttgccaaaaagtgatttcaagaatccagaagcattttccagaat

SEQ ID NO: 26188 - DNA, 120 bp, Artificial Sequence
  ENSG00000038002_8 (sequence is synthesized)
ctgaggaaaaagtggactgcatctaatccatctttactgtcaacatctgtatttaaagaagaaagaaacaaaggctgaaaaggctgctcactctcatcatctagtgttcctcatgtgttc

SEQ ID NO: 26189 - DNA, 120 bp, Artificial Sequence
  ENSG00000038002_9 (sequence is synthesized)
ttttgtaaaataaacacaaaaataaatttatgttgaattggcactttctatatctgaaattgtattatctatttttatttaacctttcttatattatctgaagatgaatatgtatgtggc

SEQ ID NO: 26190 - DNA, 120 bp, Artificial Sequence
  ENSG00000038002_10 (sequence is synthesized)
tatgtggctgtattttgtatatatttaagttttaagtgacacttggatttctgatcagtgttgcaaaaaattgctactttgagatttatttccacagtgatatattaaacccaaaaggaa

SEQ ID NO: 26191 - DNA, 120 bp, Artificial Sequence
  ENSG00000038002_11 (sequence is synthesized)
tcatcatatttggatgcttaaaatagagtatacaagttttttagacccaaagaaaaaaacagcagagtctcagcatgatcagtcctgattgaatttcattatgtcacagtgatgcatgtc

SEQ ID NO: 26192 - DNA, 120 bp, Artificial Sequence
  ENSG00000038002_12 (sequence is synthesized)
ttagcactgattattggttttacttaatattccctaaaaacttgaggaaggaagatgatagaacatgagatactctttgttttgtacatactagaaaatacagctatcttctgatgagca

SEQ ID NO: 26193 - DNA, 120 bp, Artificial Sequence
  ENSG00000038002_13 (sequence is synthesized)
attgtgttgattttctttgcttttttcctcttatggagctctcagtgtgtgaaagttctaaagccacaagaatcaatgatgttttagctgctaatatttagtattgatcgtttcttttaa

SEQ ID NO: 26194 - DNA, 120 bp, Artificial Sequence
  ENSG00000038002_14 (sequence is synthesized)
aaatgatttggggaacttgatctgtactgtaattttactaattccttgtgcagaggtgggtatggcaattagaagtcaagaaatgggttgtttagcttggtttgtttccctaacttctga

SEQ ID NO: 26195 - DNA, 120 bp, Artificial Sequence
  ENSG00000038002_15 (sequence is synthesized)
ttaactctctgtatgacaactctacagaagttgtgcgcgtgctttctcagcagcatttttccttcaaaatcatctttttaatcaacagtcattaataaatgtacatgtacgatattcaaa

SEQ ID NO: 26196 - DNA, 120 bp, Artificial Sequence
  ENSG00000038002_16 (sequence is synthesized)
tcatgacactattgccgtgtaggagactcaccaatacctggagctggagcctatgctgacgatactgcaggggcagccgcagccactgggaatggtgatatattgatgcgcttcctgcca

SEQ ID NO: 26197 - DNA, 120 bp, Artificial Sequence
  ENSG00000038002_17 (sequence is synthesized)
tgatcgtggtcatgacactattggtaatttgccttttgtgcagtttttatggataaagtttagttaattatcttcctgtagctcttccctattcttctaccagaagttgattttgattgt

SEQ ID NO: 26198 - DNA, 120 bp, Artificial Sequence
  ENSG00000038002_18 (sequence is synthesized)
tttaactgccaattaagtgtgcctctctatagatagatccatcttgtcttaggatctgtataaaatttggcaaattatttatacaagacacctaaaacccaatgactattcacttgcgga

SEQ ID NO: 26199 - DNA, 120 bp, Artificial Sequence
  ENSG00000038002_19 (sequence is synthesized)
tttttaaatctttatttgacatttcattttttggcagttttatgttgctgtattttagtgaccttaaataactttttccaagttacaatgttgaaaatttacattagtctatgtcttagt

SEQ ID NO: 26200 - DNA, 120 bp, Artificial Sequence
  ENSG00000038002_20 (sequence is synthesized)
catggatgggtaagaacaccgttcaggtcctatttattatgttgagttacatttagagttgtggtcttctgagagcaagatgaaagaatgcatgagttttgacacagatcaaaaccccta

SEQ ID NO: 26201 - DNA, 120 bp, Artificial Sequence
  ENSG00000038002_21 (sequence is synthesized)
gcttattatacttgacctttctaaacacagtttccctctcaactgaaaaaaaaaaatcagagtaatagaaatatcacatggagagataggtagtcccttagaactgggagaatgccaagc

SEQ ID NO: 26202 - DNA, 120 bp, Artificial Sequence
  ENSG00000038210_0 (sequence is synthesized)
aagcgtgcccgtgcgctggtgaggtggcgtccgttctacccggtcgctcccgttccgcgccatgcagagcccagtctctggcacctggctgctctgatctggtctcagcgcggagggagc

SEQ ID NO: 26203 - DNA, 120 bp, Artificial Sequence
  ENSG00000038210_1 (sequence is synthesized)
agagggagtccatggaggatccctccgagcccgaccggttggcgtccgcggacggcgggagcccggaggaggaggaggatggggagcgggagccgctgctaccgcggatcgcctgggccc

SEQ ID NO: 26204 - DNA, 120 bp, Artificial Sequence
  ENSG00000038210_2 (sequence is synthesized)
gcggagaggcgccccaggcagcgccgtgaggctgctggacgctgccggggaggagggcgaggccggcgacgaggagctgcccctcccgcccggggacgtgggggtctcccggagttcgtc

SEQ ID NO: 26205 - DNA, 120 bp, Artificial Sequence
  ENSG00000038210_3 (sequence is synthesized)
cgtccgccgagctggaccggagccgccccgcggtttcagtaactattggtacttcagagatgaatgcattcttggatgacccagaatttgccgatattatgctgagagcagagcaagcaa

SEQ ID NO: 26206 - DNA, 120 bp, Artificial Sequence
  ENSG00000038210_4 (sequence is synthesized)
tagaagttggaatttttccagaaagaatctctcaaggttcaagtggaagttactttgtgaaggatcctaagaggaaaattattggtgtgtttaaacccaaatcagaagagccttatggtc

SEQ ID NO: 26207 - DNA, 120 bp, Artificial Sequence
  ENSG00000038210_5 (sequence is synthesized)
aactcaatccaaaatggaccaaatatgtccataaggtctgctgcccttgctgctttggccgaggctgcctgattcctaatcaggggtacctttccgaagcgggtgcctatcttgtggaca

SEQ ID NO: 26208 - DNA, 120 bp, Artificial Sequence
  ENSG00000038210_6 (sequence is synthesized)
acaagcttcatctgagcattgtacctaaaacaaaggtggtttggcttgtcagtgagacatttaactataatgcgattgaccgtgcaaaatcaagaggcaaaaagtatgctttagaaaaag

SEQ ID NO: 26209 - DNA, 120 bp, Artificial Sequence
  ENSG00000038210_7 (sequence is synthesized)
tgccaaaagtgggtagaaagtttcataggataggactccctcctaagattggttcctttcagttatttgttgaaggttacaaggaggctgaatattggcttaggaaatttgaagctgacc

SEQ ID NO: 26210 - DNA, 120 bp, Artificial Sequence
  ENSG00000038210_8 (sequence is synthesized)
ctttgcctgagaatattagaaaacaatttcagtcacaatttgaaagattagttattttggattacatcatcagaaatacagacaggggcaatgataattggttagtcagatacgaaaagc

SEQ ID NO: 26211 - DNA, 120 bp, Artificial Sequence
  ENSG00000038210_9 (sequence is synthesized)
agaaatgtgaaaaggaaattgaccataaggaatcaaaatggattgatgatgaagaattccttattaaaatagctgcaattgataatggtctagcatttccttttaaacatcctgatgaat

SEQ ID NO: 26212 - DNA, 120 bp, Artificial Sequence
  ENSG00000038210_10 (sequence is synthesized)
ggagagcatatccatttcactgggcttggcttcctcaagcaaaagttcccttttctgaagaaataagaaatttgattctaccatatatttctgacatgaactttgtgcaagatttatgtg

SEQ ID NO: 26213 - DNA, 120 bp, Artificial Sequence
  ENSG00000038210_11 (sequence is synthesized)
aagatctctatgaactttttaagactgacaaaggatttgacaaagccacttttgaaagtcagatgtctgtgatgaggggtcagatcttaaaccttactcaggcattgagagacgggaaga

SEQ ID NO: 26214 - DNA, 120 bp, Artificial Sequence
  ENSG00000038210_12 (sequence is synthesized)
gtcctttccagctagtacagataccttgtgtgattgtggaacgcagtcaaggtggaagtcagggtcggattgtccacctgagcaattcctttacccagactgtcaattgcaggaagccat

SEQ ID NO: 26215 - DNA, 120 bp, Artificial Sequence
  ENSG00000038210_13 (sequence is synthesized)
ttttttcctcctggtagtaaatgtcagagtaagagaaacaaactgtttagaattatcatgtttttaaaacatcatagtaatataaatctgctgttaggagctccagttgctaaaacctca

SEQ ID NO: 26216 - DNA, 120 bp, Artificial Sequence
  ENSG00000038210_14 (sequence is synthesized)
tgtagaaaatttgtattttatgttgttgttagtttaaaaggtaattttacacatgctggaatgactgtaattactctagaattccaagtagaatacaataacttttaatattgagaagaa

SEQ ID NO: 26217 - DNA, 120 bp, Artificial Sequence
  ENSG00000038210_15 (sequence is synthesized)
tgttcatgctaattcttcttacattacaaaaggcctttgaggatgcctacgtctgaaattgctcttacgaactttaataaaatagttagctaatagaaaaacaggtaagaataaagcaat

SEQ ID NO: 26218 - DNA, 120 bp, Artificial Sequence
  ENSG00000038210_16 (sequence is synthesized)
gttgccttaatttcaaaagctgctattttagaatttgaataagtactcctaaagtgaccattattagggaccagaaaattatatcttggctaagtaatagaggaccattttggtttttgt

SEQ ID NO: 26219 - DNA, 120 bp, Artificial Sequence
  ENSG00000038210_17 (sequence is synthesized)
acttgagaatatttttggtgaattactttgttgtagtgaggaaaaaacctaagaaatttcccctttttttaaaaaatggaaatattcaattgagacttgaggggaataatagaaaattaa

SEQ ID NO: 26220 - DNA, 120 bp, Artificial Sequence
  ENSG00000038210_18 (sequence is synthesized)
ggtagatccccaatattttggaataccaaaattgccttaaaaattcccttctgtttcttacatgggatcaaatacttgagattagtacttcagagtactggccttgttcaatttagtact

SEQ ID NO: 26221 - DNA, 120 bp, Artificial Sequence
  ENSG00000038210_19 (sequence is synthesized)
tcaattagtattaaacttcactaaaaagtaaaccatactccaaattgtatattggattgcattttggggtcctaggtcatacgttcttcaaaattattatgattgtactattgtacttga

SEQ ID NO: 26222 - DNA, 120 bp, Artificial Sequence
  ENSG00000038210_20 (sequence is synthesized)
aattacagatgttattataattacagtcaaatgtagactatcaggccaaattaaaggggagcatggcagataaccataaagtcatttatatttgattttgaaatgtatttttgtacttta

SEQ ID NO: 26223 - DNA, 120 bp, Artificial Sequence
  ENSG00000038210_21 (sequence is synthesized)
ttttgaatatcatccatatgtctgacattattggaatttgtaacattgttaatgcactaagtgatttaaattcaattgatgaagatgtgattttacagaagcagaagtttcattttcttg

SEQ ID NO: 26224 - DNA, 120 bp, Artificial Sequence
  ENSG00000038210_22 (sequence is synthesized)
aggcttaaaaccaatgtcaccacttgggcttaactgggtaatttgtggtctaggccttttgttttctaagcttactatcttgtgtttgtttatttgcttttaatgaagtattttgtgtag

SEQ ID NO: 26225 - DNA, 120 bp, Artificial Sequence
  ENSG00000038210_23 (sequence is synthesized)
aaggttaaattaggatgcaaaacagatctgccattcctttttcccttatatcttccttttggtcttcatggacgagatgaatgaggattctgctgccctgagggagttcattggaaacct

SEQ ID NO: 26226 - DNA, 120 bp, Artificial Sequence
  ENSG00000038210_24 (sequence is synthesized)
gcgttctcctacctcttccaaccctccattagctcaattttgagataatggaaaattgactggaaattcaaaactcaaactactatctttagatataaacactagtaattaaaatgtgcc

SEQ ID NO: 26227 - DNA, 120 bp, Artificial Sequence
  ENSG00000038210_25 (sequence is synthesized)
ttttgaagatgttttctaagagaaaggaaatacgttgcagtgatgtgggtactgctttcataaaacagttttttcagtattttgagaattgccatattaatttttataatggaaaactta

SEQ ID NO: 26228 - DNA, 120 bp, Artificial Sequence
  ENSG00000038210_26 (sequence is synthesized)
ataaattgctactgttttatatcataaaattaaaataccatggtaatatttgcaaaaggtctggccataccagaaaagtacagttgagatagttaagatataaccacaagtcagagtaca

SEQ ID NO: 26229 - DNA, 120 bp, Artificial Sequence
  ENSG00000038210_27 (sequence is synthesized)
ttggttgtattttgtaaactttcatgaactgaattcttatttaaatagtatggttttttttcaataagtatatttatagtgacaaatgtggtagactaaaggtaataaaaatcattgtct

SEQ ID NO: 26230 - DNA, 120 bp, Artificial Sequence
  ENSG00000038210_28 (sequence is synthesized)
taagattatgttcttctgtatgtacgtgtttggaatatttagaatgtttatgaacacatttactataaatgatgccaaactatcattttcttcatatattaaaggtatagtttaattctt

SEQ ID NO: 26231 - DNA, 120 bp, Artificial Sequence
  ENSG00000038210_29 (sequence is synthesized)
gattcgtctagttaaaccctggtgttcctgacacaaacttcaggaaaggattttgcacttgtgcagaccgggcgagcagagtaagaagcagtaactattggtacttcagagatgaatgca

SEQ ID NO: 26232 - DNA, 120 bp, Artificial Sequence
  ENSG00000038219_0 (sequence is synthesized)
acttccggggttgctctggatccgctggttccgtaacaacatcccgttggcttccctcaggcggcgggaccagtgcagccgccgcctcccaggatcgtccgccggtcagggcccttgccc

SEQ ID NO: 26233 - DNA, 80 bp, Artificial Sequence
  ENSG00000038219_1 (sequence is synthesized)
cggcacaggccaccatggccaccaacccacagccgcagccgcctcctccggcgccgccgcctcccccgccgcagccgcag

SEQ ID NO: 26234 - DNA, 120 bp, Artificial Sequence
  ENSG00000038219_2 (sequence is synthesized)
ggccccggcgcgggcggggcgggcggcgcgggtgcgggcgccggggacccgcagctcgtggccatgatcgtgaaccacctcaagagccaggggctcttcgaccagttccgcagagactgc

SEQ ID NO: 26235 - DNA, 120 bp, Artificial Sequence
  ENSG00000038219_3 (sequence is synthesized)
ctggccgacgtggacaccaagcctgcgtatcagaatctgagacagcgtgttgacaactttgttgcaaatcacttggcaactcacacatggagtccgcatctcaataagaaccagctaaga

SEQ ID NO: 26236 - DNA, 120 bp, Artificial Sequence
  ENSG00000038219_4 (sequence is synthesized)
aacaacattagacaacaagtcctcaaatcaggaatgttggagtctggtattgaccgaattatttctcaggttgtggacccaaagatcaaccacacattcagacctcaggtagagaaagct

SEQ ID NO: 26237 - DNA, 120 bp, Artificial Sequence
  ENSG00000038219_5 (sequence is synthesized)
gtgcatgagtttttggccacgctaaatcacaaagaggaaggaagtggcaacacagctcccgatgatgagaaaccagacacttcccttattacacaaggtgttcctactcctgggcccagt

SEQ ID NO: 26238 - DNA, 120 bp, Artificial Sequence
  ENSG00000038219_6 (sequence is synthesized)
gctaatgtagccaatgatgccatgtcgatattggaaaccataacttctcttaaccaagaagccagtgctgctagggcttcaacagaaacatcaaatgccaagaccagtgagagagcgtca

SEQ ID NO: 26239 - DNA, 120 bp, Artificial Sequence
  ENSG00000038219_7 (sequence is synthesized)
aaaaaacttccatctcagccaaccactgatactagtactgacaaagaaagaacttcagaggacatggctgataaagaaaaatctacagctgactctggaggtgaaggactggaaacagcc

SEQ ID NO: 26240 - DNA, 120 bp, Artificial Sequence
  ENSG00000038219_8 (sequence is synthesized)
ccaaagtctgaagagttcagcgacctcccctgtccagtcgaagaaattaaaaattacacaaaagagcataataatttaattctgctaaataaggatgttcaacaggaaagcagtgagcaa

SEQ ID NO: 26241 - DNA, 120 bp, Artificial Sequence
  ENSG00000038219_9 (sequence is synthesized)
aaaaataaatcaacagacaaaggtgaaaagaagccagacagcaatgagaaaggagaaagaaagaaagaaaagaaggaaaagactgaaaagaaatttgatcactcaaaaaagagtgaagat

SEQ ID NO: 26242 - DNA, 120 bp, Artificial Sequence
  ENSG00000038219_10 (sequence is synthesized)
acacagaaagttaaagatgaaaaacaagcaaaggaaaaagaagtagagagtttaaaacttccttcagaaaagaacagtaataaagctaaaactgttgaagggacaaaagaagatttctct

SEQ ID NO: 26243 - DNA, 120 bp, Artificial Sequence
  ENSG00000038219_11 (sequence is synthesized)
ttgatagattctgatgtggatggacttacagacatcacagttagctctgttcataccagtgacctttcatcttttgaagaagatactgaggaggaagttgtaacgtctgatagcatggaa

SEQ ID NO: 26244 - DNA, 120 bp, Artificial Sequence
  ENSG00000038219_12 (sequence is synthesized)
gaaggagagattacgtcagatgatgaagagaagaacaaacagaataaaacaaaaactcaaactagtgattctagtgaaggaaaaacaaaaagtgtacggcatgcgtatgtccacaaacca

SEQ ID NO: 26245 - DNA, 120 bp, Artificial Sequence
  ENSG00000038219_13 (sequence is synthesized)
tatctttactcaaaatactatagtgattctgatgatgagcttactgtagaacaacgacgacagtccattgccaaagaaaaagaagagaggcttttaagaaggcaaatcaatagagaaaaa

SEQ ID NO: 26246 - DNA, 120 bp, Artificial Sequence
  ENSG00000038219_14 (sequence is synthesized)
cttgaagaaaaacgaaaacagaaagcagaaaagacaaagtcttcaaaaaccaagggtcaaggcaggagtagtgtggacttagaagaatcatcaacaaagagtttggaacctaaagccgcc

SEQ ID NO: 26247 - DNA, 120 bp, Artificial Sequence
  ENSG00000038219_15 (sequence is synthesized)
agaattaaagaagtccttaaagaacggaaagttttagaaaaaaaagtagccttaagcaaaaagagaaaaaaagattcaaggaatgttgaagagaactccaaaaagaaacagcaatatgaa

SEQ ID NO: 26248 - DNA, 120 bp, Artificial Sequence
  ENSG00000038219_16 (sequence is synthesized)
gaagattccaaagaaacccttaaaacaagtgagcattgtgaaaaggaaaaaatttcttcttcaaaggagctgaagcatgttcatgcaaaaagtgaaccaagtaaacctgcccggagactt

SEQ ID NO: 26249 - DNA, 120 bp, Artificial Sequence
  ENSG00000038219_17 (sequence is synthesized)
tcagagtctttgcatgtagttgacgaaaacaaaaatgaatccaaattagaaagagaacataaaagacggacatctacccctgttatcatggagggggtacaggaagagactgacacaaga

SEQ ID NO: 26250 - DNA, 120 bp, Artificial Sequence
  ENSG00000038219_18 (sequence is synthesized)
gatgtaaaaaggcaagtagaacgctcagaaatttgcaccgaagagccccagaaacagaaaagcacacttaaaaacgaaaagcatctaaagaaagatgattctgaaacaccacatttgaaa

SEQ ID NO: 26251 - DNA, 120 bp, Artificial Sequence
  ENSG00000038219_19 (sequence is synthesized)
agcctacttaagaaagaggtgaaatcctccaaggagaagcctgaaagagagaaaactccatcggaagacaaattgtctgtgaaacataaatataaaggtgattgtatgcataaaacaggt

SEQ ID NO: 26252 - DNA, 120 bp, Artificial Sequence
  ENSG00000038219_20 (sequence is synthesized)
gatgagactgagcttcactcttctgagaaaggtttaaaagtagaggaaaatattcaaaagcaaagtcaacaaacaaagctttcttcagatgataaaaccgaacgaaaaagtaaacatagg

SEQ ID NO: 26253 - DNA, 120 bp, Artificial Sequence
  ENSG00000038219_21 (sequence is synthesized)
aatgaaaggaaattatcagtattaggcaaagatggaaagccagtttctgaatatattataaaaacagatgagaatgttcgtaaagaaaacaacaaaaaagagagacgcttgtcagctgaa

SEQ ID NO: 26254 - DNA, 120 bp, Artificial Sequence
  ENSG00000038219_22 (sequence is synthesized)
aaaactaaggcagagcacaaatcaagaaggtcaagtgattctaaaattcagaaagattctctgggttccaagcaacatggtatcacattacagagaagaagtgaaagttattcggaagat

SEQ ID NO: 26255 - DNA, 120 bp, Artificial Sequence
  ENSG00000038219_23 (sequence is synthesized)
aagtgtgatatggactccactaacatggatagtaatttgaaaccagaagaggttgttcacaaggagaaacgacgaacaaagagcttgttagaagagaaacttgtgttgaagtctaaatca

SEQ ID NO: 26256 - DNA, 120 bp, Artificial Sequence
  ENSG00000038219_24 (sequence is synthesized)
aaaactcaaggcaaacaggtaaaagttgtagaaacagaattacaagaaggtgccacaaaacaggcaaccactccaaaaccagacaaggagaagaacacagaagaaaatgactcagaaaaa

SEQ ID NO: 26257 - DNA, 120 bp, Artificial Sequence
  ENSG00000038219_25 (sequence is synthesized)
cagcgtaagtctaaagttgaagacaaaccttttgaagaaactggtgttgaacctgtattagagactgcttcttcttcagcacatagtacacagaaggattctagtcatagagccaagtta

SEQ ID NO: 26258 - DNA, 120 bp, Artificial Sequence
  ENSG00000038219_26 (sequence is synthesized)
ccattagcaaaggagaaatataagagtgataaagactccacttccaccaggcttgagagaaagttgtcagatggccacaaaagcagaagcttaaagcatagtagtaaagacataaaaaag

SEQ ID NO: 26259 - DNA, 120 bp, Artificial Sequence
  ENSG00000038219_27 (sequence is synthesized)
aaggacgaaaataaatcagatgacaaggatggtaaagaagttgacagtagtcatgaaaaggccagaggtaatagttcactcatggaaaagaaattaagtagaaggttgtgcgaaaatcgg

SEQ ID NO: 26260 - DNA, 120 bp, Artificial Sequence
  ENSG00000038219_28 (sequence is synthesized)
agaggaagcttgtcacaagaaatggccaaaggagaagaaaaattagcagcaaacactttgagcactcccagcggttcctcccttcagagaccaaaaaagagtggtgatatgacattgatc

SEQ ID NO: 26261 - DNA, 120 bp, Artificial Sequence
  ENSG00000038219_29 (sequence is synthesized)
cctgaacaagagccaatggaaattgattctgagccaggtgttgaaaatgtgtttgaagtatctaaaacccaagacaaccgcaataataattctcagcaagacattgactctgaaaatatg

SEQ ID NO: 26262 - DNA, 120 bp, Artificial Sequence
  ENSG00000038219_30 (sequence is synthesized)
aaacaaaaaacttctgccactgttcaaaaggatgaattgagaacttgcacagcagattcaaaagcaacagctccagcttataagccaggccgtggaacaggagttaatagtaattctgaa

SEQ ID NO: 26263 - DNA, 120 bp, Artificial Sequence
  ENSG00000038219_31 (sequence is synthesized)
aagcatgccgatcatagaagcaccttgaccaagaaaatgcatatacaaagtgctgtgtccaaaatgaaccctggggagaaagaacccattcatagaggaactactgaagtgaatatagat

SEQ ID NO: 26264 - DNA, 120 bp, Artificial Sequence
  ENSG00000038219_32 (sequence is synthesized)
tctgaaactgttcatagaatgttactgagtgccccatcagaaaatgatagggtacagaagaatttgaaaaacacagctgctgaagaacatgttgctcaaggagatgccactcttgaacat

SEQ ID NO: 26265 - DNA, 120 bp, Artificial Sequence
  ENSG00000038219_33 (sequence is synthesized)
tccacaaatttagactcctcaccatccttaagttcagtgactgttgtgcctctgagggaatcgtatgatccagatgtaattcctctgtttgacaaaagaactgttttggaaggtagcaca

SEQ ID NO: 26266 - DNA, 120 bp, Artificial Sequence
  ENSG00000038219_34 (sequence is synthesized)
gccagcacctcccctgcggatcactctgctctccctaaccaaagtctgactgttagggaatcagaagtccttaagacaagtgacagcaaagaaggtggtgaaggtttcacagtagataca

SEQ ID NO: 26267 - DNA, 120 bp, Artificial Sequence
  ENSG00000038219_35 (sequence is synthesized)
ccagcaaaagcaagcatcactagcaaaagacacattccagaagctcaccaggctactttattggatggtaaacaaggaaaggtaatcatgcctcttggaagtaagttaacgggcgtgatt

SEQ ID NO: 26268 - DNA, 120 bp, Artificial Sequence
  ENSG00000038219_36 (sequence is synthesized)
gtggaaaatgagaatattaccaaagaaggtggcttagtggacatggccaagaaagaaaatgacttaaatgcagagcccaatttaaagcagacaattaaagcaacagtagagaatggcaag

SEQ ID NO: 26269 - DNA, 120 bp, Artificial Sequence
  ENSG00000038219_37 (sequence is synthesized)
aaggatggcattgctgttgatcatgttgtaggcctgaatacagaaaaatatgctgaaactgtcaaacttaagcataaaagaagcccaggtaaagtaaaagacatatcaattgatgttgaa

SEQ ID NO: 26270 - DNA, 120 bp, Artificial Sequence
  ENSG00000038219_38 (sequence is synthesized)
agaaggaatgaaaacagtgaggtagacaccagtgctggaagtggctctgcaccctctgttttacaccaaaggaacggacaaactgaggatgtggcaactgggcctaggagagcagaaaag

SEQ ID NO: 26271 - DNA, 120 bp, Artificial Sequence
  ENSG00000038219_39 (sequence is synthesized)
acttctgttgccactagtactgaagggaaggacaaagatgtcaccttaagtccagtgaaggctgggcctgccacaaccacttcttcagaaacaagacaaagtgaggtggctttgccttgc

SEQ ID NO: 26272 - DNA, 120 bp, Artificial Sequence
  ENSG00000038219_40 (sequence is synthesized)
accagcattgaggcagatgaaggcctcataataggaacacattccagaaataatcctcttcatgttggtgcagaagccagtgaatgcactgtttttgctgcagctgaagaaggtggggct

SEQ ID NO: 26273 - DNA, 120 bp, Artificial Sequence
  ENSG00000038219_41 (sequence is synthesized)
gttgtcacagagggatttgctgaaagtgaaaccttcctcacaagcactaaggaaggggaaagtggggagtgtgctgtggctgaatctgaggacagagcagcagacctactggctgtgcat

SEQ ID NO: 26274 - DNA, 120 bp, Artificial Sequence
  ENSG00000038219_42 (sequence is synthesized)
gcagttaaaatcgaagccaatgtaaatagcgttgtgacagaggaaaaggatgatgctgtaaccagtgcaggctctgaagaaaaatgtgatggttctttaagtagagactcagaaatagtt

SEQ ID NO: 26275 - DNA, 120 bp, Artificial Sequence
  ENSG00000038219_43 (sequence is synthesized)
gaaggaactattacttttattagtgaagttgaaagtgatggagcagttacaagtgctggaacagagataagagcaggatctataagcagtgaagaggtggatggctcccagggaaatatg

SEQ ID NO: 26276 - DNA, 120 bp, Artificial Sequence
  ENSG00000038219_44 (sequence is synthesized)
tgggtcccaaaaaagaaacagagggcactgtgacatgtacaggagcagaaggcagaagtgataactttgtgatctgctcagtaactggagcagggccccgggaggaacgcatggttacag

SEQ ID NO: 26277 - DNA, 120 bp, Artificial Sequence
  ENSG00000038219_45 (sequence is synthesized)
gtgcaggtgttgtcctgggagataatgatgcaccaccaggaacaagtgccagccaagaaggagatggttctgtgaatgatggtacagaaggtgagagtgcagtcaccagcacggggataa

SEQ ID NO: 26278 - DNA, 120 bp, Artificial Sequence
  ENSG00000038219_46 (sequence is synthesized)
cagaagatggagaggggccagcaagttgcacaggttcagaagatagcagcgaaggctttgctataagttctgaatcggaagaaaatggagagagtgcaatggacagcacagtggccaaag

SEQ ID NO: 26279 - DNA, 120 bp, Artificial Sequence
  ENSG00000038219_47 (sequence is synthesized)
aaggcactaatgtaccattagttgctgctggtccttgtgatgatgaaggcattgtgactagcacaggcgcaaaagaggaagacgaggaaggggaggatgttgtgactagtactggaagag

SEQ ID NO: 26280 - DNA, 120 bp, Artificial Sequence
  ENSG00000038219_48 (sequence is synthesized)
gaaatgaaattgggcatgcttcaacttgtacagggttaggagaagaaagtgaaggggtcttgatttgtgaaagtgcagaaggggacagtcagattggtactgtggtagagcatgtggaag

SEQ ID NO: 26281 - DNA, 120 bp, Artificial Sequence
  ENSG00000038219_49 (sequence is synthesized)
ctgaggctggagctgccatcatgaatgcaaatgaaaataatgttgacagcatgagtggcacagagaaaggaagtaaagacacagatatctgctccagtgcaaaagggattgtagaaagca

SEQ ID NO: 26282 - DNA, 120 bp, Artificial Sequence
  ENSG00000038219_50 (sequence is synthesized)
gtgtgaccagtgcagtctcaggaaaggatgaagtgacaccagttccaggaggttgtgagggtcctatgactagtgctgcatctgatcaaagtgacagtcagctcgaaaaagttgaagata

SEQ ID NO: 26283 - DNA, 120 bp, Artificial Sequence
  ENSG00000038219_51 (sequence is synthesized)
ccactatttccactggcctggtcgggggtagttacgatgttcttgtatctggtgaagtcccagaatgtgaagttgctcacacatcaccaagtgaaaaagaagatgaggacatcatcacct

SEQ ID NO: 26284 - DNA, 120 bp, Artificial Sequence
  ENSG00000038219_52 (sequence is synthesized)
ctgtagaaaatgaagagtgtgatggtctcatggcaactacagccagtggtgatattaccaaccagaatagcttagcagggggtaaaaatcaaggcaaagttttgattatttccaccagta

SEQ ID NO: 26285 - DNA, 120 bp, Artificial Sequence
  ENSG00000038219_53 (sequence is synthesized)
ccacaaatgattacacccctcaggtaagcgcaattacagatgtggaaggaggtctctcagatgctctgagaactgaagaaaatatggaaggtaccagagtaaccacagaagaatttgagg

SEQ ID NO: 26286 - DNA, 120 bp, Artificial Sequence
  ENSG00000038219_54 (sequence is synthesized)
cccccatgcccagtgcagtctcaggagatgacagccaactcactgccagcagaagtgaagagaaagatgagtgtgccatgatttccacaagcataggggaagaattcgaattgcctatct

SEQ ID NO: 26287 - DNA, 120 bp, Artificial Sequence
  ENSG00000038219_55 (sequence is synthesized)
ccagtgcaacaaccatcaagtgtgctgaaagtcttcagccggttgctgcagcagtggaagaaagggctacaggtccagtcttgataagcaccgccgactttgaggggcctatgcccagtg

SEQ ID NO: 26288 - DNA, 120 bp, Artificial Sequence
  ENSG00000038219_56 (sequence is synthesized)
cgcccccagaagctgaaagtcctcttgcctcaaccagcaaggaggagaaggatgaatgtgctctcatttccactagcatagcagaagaatgtgaggcttctgtttccggtgtagttgttg

SEQ ID NO: 26289 - DNA, 120 bp, Artificial Sequence
  ENSG00000038219_57 (sequence is synthesized)
aaagtgaaaatgagcgagctggcacagtcatggaagaaaaagacgggagtggcatcatctctacgagctcggtggaagactgtgagggcccagtgtccagtgctgtccctcaagaggaag

SEQ ID NO: 26290 - DNA, 120 bp, Artificial Sequence
  ENSG00000038219_58 (sequence is synthesized)
gcgacccctcagtcacaccagcggaagagatgggtgacaccgccatgatttccacaagcacctctgaagggtgtgaagcagtcatgattggtgctgtcctccaggatgaagatcggctca

SEQ ID NO: 26291 - DNA, 120 bp, Artificial Sequence
  ENSG00000038219_59 (sequence is synthesized)
ccatcacaagagtagaagacttgagcgatgctgccatcatctccaccagcacagcagaatgtatgccaatttccgccagcattgacagacatgaagagaatcagctgactgcagacaacc

SEQ ID NO: 26292 - DNA, 120 bp, Artificial Sequence
  ENSG00000038219_60 (sequence is synthesized)
cagaagggaacggtgacctgtcagccacagaagtgagcaagcacaaggtccccatgcccagcctaattgctgagaataactgtcggtgtcctgggccagtcaggggaggcaaagaaccgg

SEQ ID NO: 26293 - DNA, 120 bp, Artificial Sequence
  ENSG00000038219_61 (sequence is synthesized)
gtcccgtgttggcagtgagcaccgaggaggggcacaacgggccatcagtccacaagccctctgcagggcaaggccatccaagtgctgtttgtgcggaaaaagaagagaagcatggcaagg

SEQ ID NO: 26294 - DNA, 120 bp, Artificial Sequence
  ENSG00000038219_62 (sequence is synthesized)
agtgccccgaaataggaccatttgcaggaagaggacagaaagagagcactttacacctcataaatgcagaagagaagaatgtattgttgaactcccttcagaaagaagataagagcccag

SEQ ID NO: 26295 - DNA, 120 bp, Artificial Sequence
  ENSG00000038219_63 (sequence is synthesized)
agacagggacagcagggggcagtagcacagcaagttattcagcaggaaggggcttagaggggaatgctaactcacctgcccacctgagaggaccagaacagacgtctgggcagacggcta

SEQ ID NO: 26296 - DNA, 120 bp, Artificial Sequence
  ENSG00000038219_64 (sequence is synthesized)
aggatccctctgtcagcattcgctatttggcagcagtaaacaccggtgctataaaagctgatgacatgccacctgttcaagggaccgtggctgagcattcctttcttcctgctgagcagc

SEQ ID NO: 26297 - DNA, 120 bp, Artificial Sequence
  ENSG00000038219_65 (sequence is synthesized)
aggggtctgaagacaacttgaaaaccagtaccaccaaatgtattactggccaagaatcaaaaattgctccttcccacacaatgatccctccagctacttacagtgtagctctgttggctc

SEQ ID NO: 26298 - DNA, 120 bp, Artificial Sequence
  ENSG00000038219_66 (sequence is synthesized)
ctaaatgtgagcaggacttgactataaagaatgattatagtggcaaatggactgatcaagcatctgctgagaaaacaggagatgataacagcacaaggaaatcattccctgaggaaggag

SEQ ID NO: 26299 - DNA, 120 bp, Artificial Sequence
  ENSG00000038219_67 (sequence is synthesized)
acataatggttactgtgtcttctgaagaaaatgtgtgtgacataggcaatgaagagtctccattgaatgttttgggaggattgaaactgaaagccaacttgaaaatggaggcttatgtgc

SEQ ID NO: 26300 - DNA, 120 bp, Artificial Sequence
  ENSG00000038219_68 (sequence is synthesized)
cttcagaggaagagaaaaatggtgaaattctggcaccaccagaaagtctgtgtgggggaaagccaagtggaatagctgaactccagagggagcctttgttggtgaatgaatcactaaatg

SEQ ID NO: 26301 - DNA, 120 bp, Artificial Sequence
  ENSG00000038219_69 (sequence is synthesized)
ttgaaaattcaggcttcagaacaaatgaagaaattcatagcgaatcttataacaaaggagagatatccagtggtagaaaagacaacgcagaagccataagcggtcacagtgttgaagcag

SEQ ID NO: 26302 - DNA, 120 bp, Artificial Sequence
  ENSG00000038219_70 (sequence is synthesized)
atcctaaagaggttgaagaggaagaaaggcatatgcctaaaagaaaaagaaagcagcattatctctcttcagaagatgaaccagatgataatccagatgtcctggattccagaatagaaa

SEQ ID NO: 26303 - DNA, 120 bp, Artificial Sequence
  ENSG00000038219_71 (sequence is synthesized)
cagcacaaaggcagtgtcctgaaacggagccacatgacacaaaggaagagaactccagagatttggaagaattacctaaaaccagttctgagacaaatagcactacctcaagggtcatgg

SEQ ID NO: 26304 - DNA, 120 bp, Artificial Sequence
  ENSG00000038219_72 (sequence is synthesized)
aagaaaaagatgaatatagcagcagtgaaactactggtgaaaagccagagcagaacgatgatgacaccataaaatctcaggaggaagatcagccaataattattaaaaggaaaagaggaa

SEQ ID NO: 26305 - DNA, 120 bp, Artificial Sequence
  ENSG00000038219_73 (sequence is synthesized)
gacctcgcaaataccctgtagaaacaacgttaaaaatgaaagacgactccaaaacagatactggcattgtcactgtagaacaatctccatctagcagcaaactgaaagtaatgcaaacag

SEQ ID NO: 26306 - DNA, 120 bp, Artificial Sequence
  ENSG00000038219_74 (sequence is synthesized)
atgaatccaataaagaaacagctaacctacaagaaagaagtataagcaatgatgatggtgaagaaaaaatagtaacaagtgtgcgtcggagaggaagaaaacccaaacgttctctcactg

SEQ ID NO: 26307 - DNA, 120 bp, Artificial Sequence
  ENSG00000038219_75 (sequence is synthesized)
tatcagatgatgctgaatcctcagagccagaaagaaaacgccagaaatcagtttctgatccagtggaggacaagaaagagcaggagtctgatgaggaagaggaagaagaggaagaggacg

SEQ ID NO: 26308 - DNA, 120 bp, Artificial Sequence
  ENSG00000038219_76 (sequence is synthesized)
agccttcaggagccaccacaagatccaccaccagatcagaggctcagagatcaaagacacagctctccccttctatcaagcgcaagagagaagtcagccctcctggggcccgaacaagag

SEQ ID NO: 26309 - DNA, 120 bp, Artificial Sequence
  ENSG00000038219_77 (sequence is synthesized)
gccagcaaagggtggaggaagcccctgtgaaaaaagcgaagcgataatcctgaccactgctgccctaggcttatggaggaacacggtggagaggaaagagacatgccttggtggccatag

SEQ ID NO: 26310 - DNA, 120 bp, Artificial Sequence
  ENSG00000038219_78 (sequence is synthesized)
gcttctctttaaccaggaaaaagatatgcatgtgctgtaagtccctaggtgcaagctttttcttgttatgttttaaacagctttataaactattgttcatagaagatattatgtacattt

SEQ ID NO: 26311 - DNA, 120 bp, Artificial Sequence
  ENSG00000038219_79 (sequence is synthesized)
atttcagataaaggacaataagtttactttgtatctgaactcaaaacaaagtagttgtatattttaacattcaaaattgggatttcccaatgtgacacatcatgaatgcaaacccctcca

SEQ ID NO: 26312 - DNA, 120 bp, Artificial Sequence
  ENSG00000038219_80 (sequence is synthesized)
gcccatcagacgccaggctgcctactggtaatctgtgtatagtatataaacatgtaaaaataggttgtattttactctatgtatgatgctaatcaatgaacactttatttattttacaga

SEQ ID NO: 26313 - DNA, 120 bp, Artificial Sequence
  ENSG00000038219_81 (sequence is synthesized)
gaaaacttatctgtgaactttactatatatctgtttattttactttattttttttttaaataaaaagggttttaaatgctatgcagtcattagtagaaaattttttaggactctgcctgc

SEQ ID NO: 26314 - DNA, 120 bp, Artificial Sequence
  ENSG00000038219_82 (sequence is synthesized)
tctgtaactatcttaatatgatctggcagaaactcgcatgtatccaagtaaagtagtttagctaaagaaaggttcttcattgcttttctgttcacagttgtggctctgttttttaagaat

SEQ ID NO: 26315 - DNA, 120 bp, Artificial Sequence
  ENSG00000038219_83 (sequence is synthesized)
gtaacttgtttttagattatacttgcatctgtgactttactaccagccacgttgacacaaaacaggttctggttcaggtaaagttgcgtcagtcacctgcagcagaaatccctcttcatt

SEQ ID NO: 26316 - DNA, 120 bp, Artificial Sequence
  ENSG00000038219_84 (sequence is synthesized)
cctcttctctgtgttcattcctcttctgtgctgttctgaagcttctaccaatactctttccatattgtctttttcagtgaagagaaatgcattcaagattaggtccctcctgtctatcca

SEQ ID NO: 26317 - DNA, 120 bp, Artificial Sequence
  ENSG00000038219_85 (sequence is synthesized)
gtttcaggattttatgttgttttatacacagttatttcagtatagaaactggctttattgccaagtgtttttttaaacatgttttaactctcatatgagcaaactgtccaacttcagttt

SEQ ID NO: 26318 - DNA, 120 bp, Artificial Sequence
  ENSG00000038219_86 (sequence is synthesized)
ttcataagattaaacttcttacgatcaaatttgtctcttgcaatgatgtgatgagttgccaaataattgagattattttaaaatgttttgttcatattcttgttttataattaaaattta

SEQ ID NO: 26319 - DNA, 120 bp, Artificial Sequence
  ENSG00000038219_87 (sequence is synthesized)
cattcagtgtgtatgggtttttttttttattttgactcttaatgtaaggtggatatttctgtcattttacatggtttcttactgagattttatatataaattataaaatgtttaccaaaa

SEQ ID NO: 26320 - DNA, 120 bp, Artificial Sequence
  ENSG00000038219_88 (sequence is synthesized)
aagtttcccactccctatgagtaaccaccttcagtacaataaaattatatttatattgttatagaattttttttcactcgatcatgtattgcaggcacccatcattactttattagcata

SEQ ID NO: 26321 - DNA, 120 bp, Artificial Sequence
  ENSG00000038219_89 (sequence is synthesized)
tacagatccactttctttgttttaatagctaaataatcatccctaataccaattttaggtcttttaatggcctcggggtttctactgttacagggctgcaacgaactttcataatgcata

SEQ ID NO: 26322 - DNA, 120 bp, Artificial Sequence
  ENSG00000038219_90 (sequence is synthesized)
tcactacatgtgttttaccaagtattttcataaaattggattgggggagggagggtcaaagaatatacaggttaagtatccctaatccaaaaggcttggggtcagaagtatttcgaattt

SEQ ID NO: 26323 - DNA, 120 bp, Artificial Sequence
  ENSG00000038219_91 (sequence is synthesized)
cagatttcttagggtttgggaatatgtgcattatacctcattgagcatcccgtatctaaaaattcaaagtcaaacttccagtgagcctttcctttgagagtcatgttggtactcagagaa

SEQ ID NO: 26324 - DNA, 120 bp, Artificial Sequence
  ENSG00000038219_92 (sequence is synthesized)
tttcagattttggagcatttcagatttctcatttttgaatttgggatgctcaacctgtatacgttttgaatttttataagtacttgttactcatttgaggctaaatattgaataatgagt

SEQ ID NO: 26325 - DNA, 120 bp, Artificial Sequence
  ENSG00000038219_93 (sequence is synthesized)
aggtatgcattaagtgtacaaggcaaagagaagggcagtagatgtggaatgattcagattaagtgaatagtgcatataaatcctcacccatgactatctggggaggtttggggagtggga

SEQ ID NO: 26326 - DNA, 120 bp, Artificial Sequence
  ENSG00000038219_94 (sequence is synthesized)
gcagttgaggaccttcttacacaaaaccatctgaaagggtctcagaagactcgtaagaagtgtcagccagtcctggaagaccacaccaagacttggtaagtcatttatactgacatgtta

SEQ ID NO: 26327 - DNA, 120 bp, Artificial Sequence
  ENSG00000038219_95 (sequence is synthesized)
aaaccctgaagatgactaatctattcaaaacttggaaagatacattaattaaaatgtgcatgggtgttttatactacaaataattaacgtctcatttgttaattgtcaagaagctaacat

SEQ ID NO: 26328 - DNA, 120 bp, Artificial Sequence
  ENSG00000038219_96 (sequence is synthesized)
ctgaagtccgttgttcccacagttatatttcagataactttactgtgtttaggtacagttcagtaagagatctacttacgtaaaaggaagttgtttaaaagaaaaatgtgtgttctgtca

SEQ ID NO: 26329 - DNA, 120 bp, Artificial Sequence
  ENSG00000038219_97 (sequence is synthesized)
ttgttgagtagaaacagtagactttgtacttcatgtttccaaagcatataaacagaccattgctgttggaggggataggatctaacttttcatttgacgctattattttaaatgaaccag

SEQ ID NO: 26330 - DNA, 120 bp, Artificial Sequence
  ENSG00000038219_98 (sequence is synthesized)
tgttatactgcagcttaacagctacattaaggtcttttactttttttctaagcttcagatcaccaacatagttaaatcaccatagtgatgtaatataccactgccgttattataaaaaat

SEQ ID NO: 26331 - DNA, 120 bp, Artificial Sequence
  ENSG00000038219_99 (sequence is synthesized)
gcaggcaacattaatttatgttgtctttttctggtagtatattctggtagtacaacatggattgattgtgggaaataactggtcagatttttataatttatgaaagcagctaagccactt

SEQ ID NO: 26332 - DNA, 120 bp, Artificial Sequence
  ENSG00000038219_100 (sequence is synthesized)
ggtgacataggataggttccctatcctaaaaatcttcaaatttgtttctctgcatttcagaaacaatattcagtttctttacatctcatttttatttttgaacagctgaactccagaggg

SEQ ID NO: 26333 - DNA, 120 bp, Artificial Sequence
  ENSG00000038219_101 (sequence is synthesized)
tttgtttgtttatttaaacataggtagaacaatctccatctagcagcaaactgaaagtaatgcaaacagatgaatccaataaagaaacagctaacctacaagaaagaagtataagcaatg

SEQ ID NO: 26334 - DNA, 120 bp, Artificial Sequence
  ENSG00000038219_102 (sequence is synthesized)
actgcactccagcctgaatgactgagtgaaactctgtcttagaaaaaaaaaaaaagtagtctaatccaacttcttattttgcagctgaaaaaactgagggtcagcaaatttaaataaaat

SEQ ID NO: 26335 - DNA, 120 bp, Artificial Sequence
  ENSG00000038219_103 (sequence is synthesized)
ctgaaatgaaaacttatgtttcgtgactcacaatccaatgtgatctctgctaggtattctgattctatctttgcttgactgatacaagataatgatgaaatgtataacaatgtattaata

SEQ ID NO: 26336 - DNA, 64 bp, Artificial Sequence
  ENSG00000038219_104 (sequence is synthesized)
agtaggcatgagccaccgcgcccggtcgagggttttctcatagtatgtttagttgttctgagga

SEQ ID NO: 26337 - DNA, 120 bp, Artificial Sequence
  ENSG00000038219_105 (sequence is synthesized)
gtcgagggttttctcatagtatgtttagttgttctgaggagctttgtatctttgagaaatgcatgtttacaacatccacagtttcttctaaagctttcaggtgaactgcacacagttcca

SEQ ID NO: 26338 - DNA, 120 bp, Artificial Sequence
  ENSG00000038219_106 (sequence is synthesized)
ctatgtcttctggggaaactcttgaatatcctggtacatcttcctttataaggactcatactgggcccactatgtaaaacgtggtttttcgggatattggaggttttgcaccacagagaa

SEQ ID NO: 26339 - DNA, 120 bp, Artificial Sequence
  ENSG00000038219_107 (sequence is synthesized)
ttcaattcacttgggagtgttcatctatttaggaagtatagttttttttacttttgtcttcaggaatatgcactgctaccttttagaaataatttctattgcctttattatttttgttgt

SEQ ID NO: 26340 - DNA, 120 bp, Artificial Sequence
  ENSG00000038219_108 (sequence is synthesized)
tatttaatgggaaaaggttagacatggccaggtaaatgttatcaaataaagttagttattcgtattcaacaagtggaatttttactttgctgttctcagaaacccatgaatctgtgtgtt

SEQ ID NO: 26341 - DNA, 120 bp, Artificial Sequence
  ENSG00000038219_109 (sequence is synthesized)
ctcagaaacccatgaatcattatgtatacaaattaaaaattgtaatgtactgctgcaatgtctgaggctcaacttttttattatcctattcccacaaaatgttattggtatgtgtctata

SEQ ID NO: 26342 - DNA, 120 bp, Artificial Sequence
  ENSG00000038219_110 (sequence is synthesized)
atatccctgccagacccttcaaagtaaaggattaaaaccttttttggagggaaggagggaagcacagtatctctgatcatctaatgaaagttaggaccttctctcaagaaaaatgcgcaa

SEQ ID NO: 26343 - DNA, 120 bp, Artificial Sequence
  ENSG00000038219_111 (sequence is synthesized)
gtaacacattaaaacgctgtttttctacttcagaatggtcaactataggcaatttcatgagaatcaatctaataacatatacagtttcagtgagttcaggaaccatggaataagaaccta

SEQ ID NO: 26344 - DNA, 120 bp, Artificial Sequence
  ENSG00000038219_112 (sequence is synthesized)
ttttaatgttcttagcctcttttttgaggtcaagaattgaatgatattgttacaacaaaactcttccattccgaggcacagtacttgtttatatgaacaaggtttctcagggcgcatgac

SEQ ID NO: 26345 - DNA, 120 bp, Artificial Sequence
  ENSG00000038219_113 (sequence is synthesized)
tataaaaattagaaataggaatagaattgatgatcaacccttcttctagtaataagacatattcagccacagatgcaggaactttaaaaagcaacagtatggccaggcccggtggctcat

SEQ ID NO: 26346 - DNA, 120 bp, Artificial Sequence
  ENSG00000038219_114 (sequence is synthesized)
gcctggccaccgtgggccaaagtagaagattccctgttcatgcaaagaaccatcactttaatggaatccttgagtttcatctgccacttgaacctcaaagactgacctgctttctgtcaa

SEQ ID NO: 26347 - DNA, 120 bp, Artificial Sequence
  ENSG00000038219_115 (sequence is synthesized)
aaagtcttaacttgtagcatatagagttatagtggattatgtctgtcacgtgcatatttaagaatgaagacatttgatacctgccaggtgctaagagcaaaactgtcatccagtttagtg

SEQ ID NO: 26348 - DNA, 120 bp, Artificial Sequence
  ENSG00000038219_116 (sequence is synthesized)
tgtttaaaccaggatgagaagtaccaaagtctgctgctacaccagaagaccacagaaccctggtcttctgggaggccgaggtgggtggatcattagaggtcaggagttcgaggccaacct

SEQ ID NO: 26349 - DNA, 74 bp, Artificial Sequence
  ENSG00000038219_117 (sequence is synthesized)
gtgggtggatcattagaggtcaggagttcgaggccaaagtagccatgtatggtggcacatgcctgtagtcccag

SEQ ID NO: 26350 - DNA, 120 bp, Artificial Sequence
  ENSG00000038219_118 (sequence is synthesized)
tgggagacagaacaagacttggtctaaaaaacaaaaatttttaaaaagcaacaatacacatttttcaatacagttgcatatactatttaataattatgaaaatttctaatatttctgttg

SEQ ID NO: 26351 - DNA, 120 bp, Artificial Sequence
  ENSG00000038219_119 (sequence is synthesized)
ctttgagaaattagaactgaaatgacaccctcccagacaaaaaagaacactcagctatggttgaagttctggtgctcagacgctagcttaaactctcccacaaaatctctctctctctcc

SEQ ID NO: 26352 - DNA, 120 bp, Artificial Sequence
  ENSG00000038219_120 (sequence is synthesized)
ccctccctgccactaacctctgtacctgctcctggttatgttacaggttatgttctggtacttcctttaccccatgactctctccttctcttctactcccttagttagcaattaggtaga

SEQ ID NO: 26353 - DNA, 120 bp, Artificial Sequence
  ENSG00000038219_121 (sequence is synthesized)
ttttaatttgatttaaaagatttgttctcattgaataccattttatacttcattttcttatttgaaaaaaaaaaaaatatattcccccctgcttcccaaaaagccaaagttttcttcatc

SEQ ID NO: 26354 - DNA, 120 bp, Artificial Sequence
  ENSG00000038219_122 (sequence is synthesized)
agaacataacattcatatcaatatgatgagtgggccaaagtagaagattccctgttcatgcaaagaaccatcactttaatggaatccttgagtttcatctgccacttgaacctcaaagac

SEQ ID NO: 26355 - DNA, 120 bp, Artificial Sequence
  ENSG00000038219_123 (sequence is synthesized)
tgacctgctttctgtcaaaaagtcttaacttgtagcatatagagttatagtggattatgtctgtcacatgcatatttaagaatgaagacatttgatacctgccaggtgctaagagcaaaa

SEQ ID NO: 26356 - DNA, 120 bp, Artificial Sequence
  ENSG00000038219_124 (sequence is synthesized)
ctgtcatccagtttagtgtgtttaaaccaggatgagaagtaccaaagtctgctgctacaccagaagaccatagaacccccctccaaactgtccagggtcattgatagtccttaaccagga

SEQ ID NO: 26357 - DNA, 120 bp, Artificial Sequence
  ENSG00000038219_125 (sequence is synthesized)
gagagatctgactgtaacagaccaaatcagcccttcccacccaaagaaatggaaccatgggcaaccctaagctccaactactgcaaagactcctccgttatagactaccagtttccagat

SEQ ID NO: 26358 - DNA, 120 bp, Artificial Sequence
  ENSG00000038219_126 (sequence is synthesized)
ctctggagcaagcttagtggttacaaagccattctgtctcctttgcactgattagcatctggagcgtgtgaggagggatgatcaagaggcccttcagggagctcgccagccagcctgcgt

SEQ ID NO: 26359 - DNA, 120 bp, Artificial Sequence
  ENSG00000038219_127 (sequence is synthesized)
agagaaagcaacatagcaagccatctgcacgtgcaacatccaaacttggcagcccagacacagtttctcctagaaatcgccaaaaattagcaaaagagaagttacctaccagcgaaaaag

SEQ ID NO: 26360 - DNA, 120 bp, Artificial Sequence
  ENSG00000038274_0 (sequence is synthesized)
gaggcccgcgtcgatcctgggttggaggaggtggcggccgctgaggctgcggcgtgaagacggcgggcatggtggggcgggagaaagagctctctatacactttgttcccgggagctgtc

SEQ ID NO: 26361 - DNA, 120 bp, Artificial Sequence
  ENSG00000038274_1 (sequence is synthesized)
ggctggtggaggaggaagttaacatccctaataggagggttctggttactggtgccactgggcttcttggcagagctgtacacaaagaatttcagcagaataattggcatgcagttggct

SEQ ID NO: 26362 - DNA, 120 bp, Artificial Sequence
  ENSG00000038274_2 (sequence is synthesized)
gtggtttcagaagagcaagaccaaaatttgaacaggttaatctgttggattctaatgcagttcatcacatcattcatgattttcagccccatgttatagtacattgtgcagcagagagaa

SEQ ID NO: 26363 - DNA, 120 bp, Artificial Sequence
  ENSG00000038274_3 (sequence is synthesized)
gaccagatgttgtagaaaatcagccagatgctgcctctcaacttaatgtggatgcttctgggaatttagcaaaggaagcagctgctgttggagcatttctcatctacattagctcagatt

SEQ ID NO: 26364 - DNA, 120 bp, Artificial Sequence
  ENSG00000038274_4 (sequence is synthesized)
atgtatttgatggaacaaatccaccttacagagaggaagacataccagctcccctaaatttgtatggcaaaacaaaattagatggagaaaaggctgtcctggagaacaatctaggagctg

SEQ ID NO: 26365 - DNA, 120 bp, Artificial Sequence
  ENSG00000038274_5 (sequence is synthesized)
ctgttttgaggattcctattctgtatggggaagttgaaaagctcgaagaaagtgctgtgactgttatgtttgataaagtgcagttcagcaacaagtcagcaaacatggatcactggcagc

SEQ ID NO: 26366 - DNA, 120 bp, Artificial Sequence
  ENSG00000038274_6 (sequence is synthesized)
agaggttccccacacatgtcaaagatgtggccactgtgtgccggcagctagcagagaagagaatgctggatccatcaattaagggaacctttcactggtctggcaatgaacagatgacta

SEQ ID NO: 26367 - DNA, 120 bp, Artificial Sequence
  ENSG00000038274_7 (sequence is synthesized)
agtatgaaatggcatgtgcaattgcagatgccttcaacctccccagcagtcacttaagacctattactgacagccctgtcctaggagcacaacgtccgagaaatgctcagcttgactgct

SEQ ID NO: 26368 - DNA, 120 bp, Artificial Sequence
  ENSG00000038274_8 (sequence is synthesized)
gccaacgaacaccatttcgaattggaatcaaagaatcactttggcctttcctcattgacaagagatggagacaaacggtctttcattagtttatttgtgttgggttctttttttttttta

SEQ ID NO: 26369 - DNA, 120 bp, Artificial Sequence
  ENSG00000038274_9 (sequence is synthesized)
aatgaaaagtatagtatgtggcactttttaaagaacaaaggaaatagttttgtatgagtactttaattgtgactcttaggatctttcaggtaaatgatgctcttgcactagtgaaattgt

SEQ ID NO: 26370 - DNA, 120 bp, Artificial Sequence
  ENSG00000038274_10 (sequence is synthesized)
ctaaagaaactaaagggcagtcatgccctgtttgcagtaatttttctttttatcattttgtttgtcctggctaaacttggagtttgagtatagtaaattatgatccttaaatatttgaga

SEQ ID NO: 26371 - DNA, 120 bp, Artificial Sequence
  ENSG00000038274_11 (sequence is synthesized)
gtcaggatgaagcagatctgctgtagacttttcagatgaaattgttcattctcgtaacctccatattttcaggatttttgaagctgttgaccttttcatgttgattattttaaattgtgt

SEQ ID NO: 26372 - DNA, 120 bp, Artificial Sequence
  ENSG00000038274_12 (sequence is synthesized)
gaaatagtataaaaatcattggtgttcattatttgctttgcctgagctcagatcaaaatgtttgaagaaaggaactttatttttgcaagttacgtacagtttttatgcttgagatatttc

SEQ ID NO: 26373 - DNA, 120 bp, Artificial Sequence
  ENSG00000038274_13 (sequence is synthesized)
aacatgttatgtatattggaacttctacagcttgatgcctcctgcttttatagcagtttatggggagcacttgaaagagcgtgtgtacatgtattttttttctaggcaaacattgaatgc

SEQ ID NO: 26374 - DNA, 120 bp, Artificial Sequence
  ENSG00000038274_14 (sequence is synthesized)
aaacgtgtatttttttaatataaatatataactgtccttttcatcccatgttgccgctaagtgatatttcatatgtgtggttatactcataataatgggccttgtaagtcttttcaccat

SEQ ID NO: 26375 - DNA, 120 bp, Artificial Sequence
  ENSG00000038274_15 (sequence is synthesized)
tcatgaataataataaatatgtactgctggcatgtaatgcttagttttcttgtatttacttctttttttaaatgtaaggaccaaacttctaaactaattgttcttttgttgctttaattt

SEQ ID NO: 26376 - DNA, 120 bp, Artificial Sequence
  ENSG00000038274_16 (sequence is synthesized)
ttaaaaattacattcttctgatgtaacatgtgatacatacaaaagaatatagtttaatatgtattgaaataaaacacaataaaattaacacttgatccagaatgttaacttaccacccca

SEQ ID NO: 26377 - DNA, 120 bp, Artificial Sequence
  ENSG00000038274_17 (sequence is synthesized)
gcaaatagacccaggcttgactggcaattaaacatgaaacttctcattgggtattttcgagactactacggggaatcagctaccagcttactgccatgtggagaactgcacgagattccg

SEQ ID NO: 26378 - DNA, 120 bp, Artificial Sequence
  ENSG00000038274_18 (sequence is synthesized)
ggattggaatcaaaatgctaatttaaaaggtcaagtgaagctgctcctcacgttttggcgtgcctgcgctctctgcaggcagaagcgaacaaagacccagcaagagaaggcagaggctaa

SEQ ID NO: 26379 - DNA, 120 bp, Artificial Sequence
  ENSG00000038274_19 (sequence is synthesized)
aattactatgtttgaaagctctaaagttgtattatgcagtagcatttttttcatttagcatgacatggtatatgtaaaccttaaagttaaattttgacacgctgacaaagacaaatatga

SEQ ID NO: 26380 - DNA, 120 bp, Artificial Sequence
  ENSG00000038274_20 (sequence is synthesized)
ttaagtttttgttgtagcttgggataattaaaaatactcattaaattgtactgttttcataaaaatttgtaatgcttttttatattcccactaattaagtaaaattggagcctttttttg

SEQ ID NO: 26381 - DNA, 120 bp, Artificial Sequence
  ENSG00000038274_21 (sequence is synthesized)
attttaaaaattcttaaggtttaaattctagaaattgctcttttaagtgttttgctaagagtattattcctggaccttattttaagtaagctttttggtcaaacctattctactcagctc

SEQ ID NO: 26382 - DNA, 120 bp, Artificial Sequence
  ENSG00000038274_22 (sequence is synthesized)
tgtaaacctcacaacactgcaaaatagttattttcattttagggctgagggagcaggctcagagaggttttcggtatcattgatactattctccctttgacatggatttattagatattt

SEQ ID NO: 26383 - DNA, 120 bp, Artificial Sequence
  ENSG00000038274_23 (sequence is synthesized)
aaatcatgttaattgcataaatgatagctctttccttttgtccaaattgggggataaaacttgttttgatttagaaagacttctgttttgttcttgtttttgtgacgtaatcttggtttg

SEQ ID NO: 26384 - DNA, 120 bp, Artificial Sequence
  ENSG00000038274_24 (sequence is synthesized)
ttgcccaggctggagtgcagtggtgcagttgagctcactgcagcctccgcctcccagggttcaagcaattctcctgcctaagcttcctgagtacctgagactacaggcatgcgcaaccac

SEQ ID NO: 26385 - DNA, 120 bp, Artificial Sequence
  ENSG00000038274_25 (sequence is synthesized)
gatttgagccaccgcgcccagcctagaaacatggttgttttattttcagacagggtctcactctgtagcccagggtgaagtacggtagatcgatcacagcccactgtagccttgaattcc

SEQ ID NO: 26386 - DNA, 120 bp, Artificial Sequence
  ENSG00000038274_26 (sequence is synthesized)
ttggctcaagtgatccttctgcctcggcctccacaacagttagaactacaggctcatgccaccacgactggctgatttttaaatttttttgtagagattgagtaccaaccactatgttgc

SEQ ID NO: 26387 - DNA, 120 bp, Artificial Sequence
  ENSG00000038274_27 (sequence is synthesized)
cctcagcctcccaaagtgttgggattacatgcatgaaccgtcacaccagagtagaaatacagttgttgacagtttttttcctggtttgtgtctgcatattatgaaatactcttttcagtg

SEQ ID NO: 26388 - DNA, 120 bp, Artificial Sequence
  ENSG00000038274_28 (sequence is synthesized)
ctggtttgtgtctgcatattatgaaatactcttttcagtgcctataaatattttaagtttgaaccttgcggggaaaagaagcagcatgacaaaactacattagaaattacaatgatttat

SEQ ID NO: 26389 - DNA, 120 bp, Artificial Sequence
  ENSG00000038274_29 (sequence is synthesized)
tttccatgcttgaactttcacagctgtacttggagtgttactgagtgaaagccaaaagtgcttttttaaaactaggagaccaaacaaaagtagtttacatatacactgtattcatgaaga

SEQ ID NO: 26390 - DNA, 120 bp, Artificial Sequence
  ENSG00000038274_30 (sequence is synthesized)
ataaaaatattatgctcttctgtttgaatttatttcttatgtactatagatcccatcatttcttttattgcaaagtgttaggaaacttcaaaataatcatctaaggtcttttaagaagat

SEQ ID NO: 26391 - DNA, 120 bp, Artificial Sequence
  ENSG00000038274_31 (sequence is synthesized)
gatggctcacacctgtaatcccagcacatttgaaaaagttggtattaaatataatatccatacaaagaaagatgagactgatttagtttagaatattaataggatgaccacagtttttta

SEQ ID NO: 26392 - DNA, 120 bp, Artificial Sequence
  ENSG00000038274_32 (sequence is synthesized)
aaattctagaaattgctcttttaagtgttttgctaagagtattagtaggaatttgattttagatatcttgtggagacctttccagaaaaagagggttgccttttagttcctggaccttat

SEQ ID NO: 26393 - DNA, 120 bp, Artificial Sequence
  ENSG00000038274_33 (sequence is synthesized)
aacctccccagcagtcacttaagacctgtaagtacatggctgtaaaaacctttagatccattgctatggtatatattattgctgtgttgggtaacttcatttctcagtactaatcaaagt

SEQ ID NO: 26394 - DNA, 120 bp, Artificial Sequence
  ENSG00000038274_34 (sequence is synthesized)
gaactttgcttgtatgctggctgttcatagtgctacttttctctaaattatcatctgtagagaagatcatgagtattgaagtttgtagaaaatgtattattgtcttgatcatgacaggca

SEQ ID NO: 26395 - DNA, 120 bp, Artificial Sequence
  ENSG00000038274_35 (sequence is synthesized)
tcatgacaggcatttggtttatttttccagggatgatcaaatcagatttcttacactaagagcaaaaataagtagcaaatataaaacctcaaaatggccaggcacaatggctcatgcctg

SEQ ID NO: 26396 - DNA, 120 bp, Artificial Sequence
  ENSG00000038274_36 (sequence is synthesized)
tttgggaggctgacgcaggaggatcccttgagcccaggaatttgagactagcctgggcaatggagggagatctcatctctgtttaaaaatatatacatatttaaaaaaaggtcaggggga

SEQ ID NO: 26397 - DNA, 120 bp, Artificial Sequence
  ENSG00000038274_37 (sequence is synthesized)
acaaagccctcaaaatatagcctttcacttacttttgatttttttgtgtttatctttctttaaagattactgacagccctgtcctaggagcacaacgtccgagaaatgctcagcttgact

SEQ ID NO: 26398 - DNA, 120 bp, Artificial Sequence
  ENSG00000038295_0 (sequence is synthesized)
caaacagtgcatccccaaatcctcacacttttgctctcttgcagtcagttgctttgctggcttctgcaggcttttaaggtctcgcggcgtagaaatgcctggcccccacccccttcctcg

SEQ ID NO: 26399 - DNA, 120 bp, Artificial Sequence
  ENSG00000038295_1 (sequence is synthesized)
gtctcccctttcaattcagatgtgctgatgtgcagaccggattcatcttctcggagctgcggcggcggctttgggctcaggcggcggcggctcgcgctcggccgcggagtcctggcagca

SEQ ID NO: 26400 - DNA, 120 bp, Artificial Sequence
  ENSG00000038295_2 (sequence is synthesized)
gcggggacgcggcgcgggagtccgagctctggtggcagctgagcccgcggggcgccgctcgccgagccgcggccgcgggaagttcggcagccagaaggacgacctggcaggctgcgagcg

SEQ ID NO: 26401 - DNA, 120 bp, Artificial Sequence
  ENSG00000038295_3 (sequence is synthesized)
ccagcgccgccagagccgagtttgcctgcgccctccccgcctccgagtgcagagttccttacctgccctccgcccacccgtgggcccctagccaacttctccctgcgactgggggtaaca

SEQ ID NO: 26402 - DNA, 120 bp, Artificial Sequence
  ENSG00000038295_4 (sequence is synthesized)
ggcagtgcttgccctctctactgtcccggcggcatccacatgtttccggacacctgagcaccccggtcccgccgaggagcctccgggtggggagaagagcaccggtgcccctagccccgc

SEQ ID NO: 26403 - DNA, 120 bp, Artificial Sequence
  ENSG00000038295_5 (sequence is synthesized)
acatcagcgcggaccgcggctgcctaacctctgggtcccgtcccctccttttcctccgggggaggaggatggggttgggaacgctttccccgaggatgctcgtgtggctggtggcctcgg

SEQ ID NO: 26404 - DNA, 120 bp, Artificial Sequence
  ENSG00000038295_6 (sequence is synthesized)
ggattgttttctacggggagctatgggtctgcgctggcctcgattatgattacacttttgatgggaacgaagaggataaaacagagactatagattacaaggacccgtgtaaagccgctg

SEQ ID NO: 26405 - DNA, 120 bp, Artificial Sequence
  ENSG00000038295_7 (sequence is synthesized)
tattttggggcgatattgccttagatgatgaagacttaaatatctttcaaatagataggacaattgaccttacgcagaacccctttggaaaccttggacataccacaggtggacttggag

SEQ ID NO: 26406 - DNA, 120 bp, Artificial Sequence
  ENSG00000038295_8 (sequence is synthesized)
accatgctatgtcaaagaagcgaggggccctctaccaacttatagacaggataagaagaattggctttggcttggagcaaaacaacacagttaagggaaaagtacctctacaattctcag

SEQ ID NO: 26407 - DNA, 120 bp, Artificial Sequence
  ENSG00000038295_9 (sequence is synthesized)
ggcaaaatgagaaaaatcgagttcccagagccgctacatcaagaacggaaagaatatggcctggaggcgttattccttatgttataggaggaaacttcactggcagccagagagccatgt

SEQ ID NO: 26408 - DNA, 120 bp, Artificial Sequence
  ENSG00000038295_10 (sequence is synthesized)
tcaagcaggccatgaggcactgggaaaagcacacatgtgtgactttcatagaaagaagtgatgaagagagttacattgtattcacctataggccttgtggatgctgctcctatgtaggtc

SEQ ID NO: 26409 - DNA, 120 bp, Artificial Sequence
  ENSG00000038295_11 (sequence is synthesized)
ggcgaggaaatggacctcaggcaatctctatcggcaagaactgtgataaatttgggattgttgttcatgaattgggtcatgtgataggcttttggcatgaacacacaagaccagatcgag

SEQ ID NO: 26410 - DNA, 120 bp, Artificial Sequence
  ENSG00000038295_12 (sequence is synthesized)
ataaccacgtaactatcataagagaaaacatccagccaggtcaagagtacaattttctgaagatggagcctggagaagtaaactcacttggagaaagatatgatttcgacagtatcatgc

SEQ ID NO: 26411 - DNA, 120 bp, Artificial Sequence
  ENSG00000038295_13 (sequence is synthesized)
actatgccaggaacaccttctcaagggggatgtttctggataccattctcccctcccgtgatgataatggcatacgtcctgcaattggtcagcgaacccgtctaagcaaaggagatatcg

SEQ ID NO: 26412 - DNA, 120 bp, Artificial Sequence
  ENSG00000038295_14 (sequence is synthesized)
cacaggcaagaaagctgtatagatgtccagcatgtggagaaactctacaagaatccaatggcaacctttcctctccaggatttcccaatggctacccttcttacacacactgcatctgga

SEQ ID NO: 26413 - DNA, 120 bp, Artificial Sequence
  ENSG00000038295_15 (sequence is synthesized)
gagtttctgtgaccccaggggagaagattgttttaaattttacaacgatggatctatacaagagtagtttgtgctggtatgactatattgaagtaagagacgggtactggagaaaatcac

SEQ ID NO: 26414 - DNA, 120 bp, Artificial Sequence
  ENSG00000038295_16 (sequence is synthesized)
ctctccttggtagattctgtggggacaaattgcctgaagttcttacttctacagacagcagaatgtggattgagtttcgtagcagcagtaattgggtaggaaaaggctttgcagctgtct

SEQ ID NO: 26415 - DNA, 120 bp, Artificial Sequence
  ENSG00000038295_17 (sequence is synthesized)
atgaagcgatctgtggaggtgagatacgtaaaaatgaaggacagattcagtctcccaattatcctgatgactatcgcccgatgaaagaatgtgtgtggaaaataacagtgtctgagagct

SEQ ID NO: 26416 - DNA, 120 bp, Artificial Sequence
  ENSG00000038295_18 (sequence is synthesized)
accacgtcgggctgacctttcagtcctttgagattgaaagacatgacaattgtgcttatgactacctggaagttagagatggaaccagtgaaaatagccctttgatagggcgtttctgtg

SEQ ID NO: 26417 - DNA, 120 bp, Artificial Sequence
  ENSG00000038295_19 (sequence is synthesized)
gttatgacaaacctgaagacataagatctacctccaatactttgtggatgaagtttgtttctgacggaactgtgaacaaagcagggtttgctgctaacttttttaaagaggaagatgagt

SEQ ID NO: 26418 - DNA, 120 bp, Artificial Sequence
  ENSG00000038295_20 (sequence is synthesized)
gtgccaaacctgaccgtggaggctgtgagcagcgatgtctgaacactctgggcagttaccagtgtgcctgtgagcctggctatgagctgggcccagacagaaggagctgtgaagctgctt

SEQ ID NO: 26419 - DNA, 120 bp, Artificial Sequence
  ENSG00000038295_21 (sequence is synthesized)
gtggtggacttcttaccaaacttaacggcaccataaccacccctggctggcccaaggagtaccctcctaataagaactgtgtgtggcaagtggttgcaccaacccagtacagaatttctg

SEQ ID NO: 26420 - DNA, 120 bp, Artificial Sequence
  ENSG00000038295_22 (sequence is synthesized)
tgaagtttgagttttttgaattggaaggcaatgaagtttgcaaatatgattatgtggagatctggagtggtctttcctctgagtctaaactgcatggcaaattctgtggcgctgaagtgc

SEQ ID NO: 26421 - DNA, 120 bp, Artificial Sequence
  ENSG00000038295_23 (sequence is synthesized)
ctgaagtgatcacatcccagttcaacaatatgagaattgaattcaaatctgacaatactgtatccaagaagggcttcaaagcacattttttctcagacaaagatgaatgctctaaggata

SEQ ID NO: 26422 - DNA, 120 bp, Artificial Sequence
  ENSG00000038295_24 (sequence is synthesized)
atggtggatgtcagcacgaatgtgtcaacacgatggggagctacatgtgtcaatgccgtaatggatttgtgctacatgacaataaacatgattgcaaggaagctgagtgtgaacagaaga

SEQ ID NO: 26423 - DNA, 120 bp, Artificial Sequence
  ENSG00000038295_25 (sequence is synthesized)
tccacagtccaagtggcctcatcaccagtcccaactggccagacaagtacccaagcaggaaagaatgcacttgggaaatcagcgccactcctggccaccgaatcaaattagcctttagtg

SEQ ID NO: 26424 - DNA, 120 bp, Artificial Sequence
  ENSG00000038295_26 (sequence is synthesized)
aatttgagattgagcagcatcaagaatgtgcttatgaccacttagaagtatttgatggagaaacagaaaagtcaccgattcttggacgactgtgtggcaacaagataccagatccccttg

SEQ ID NO: 26425 - DNA, 120 bp, Artificial Sequence
  ENSG00000038295_27 (sequence is synthesized)
tggctactggaaataaaatgtttgttcggtttgtttctgatgcatctgttcaaagaaaaggctttcaagctacacattctacagagtgtggcggacgattgaaagcagaatcaaaaccaa

SEQ ID NO: 26426 - DNA, 120 bp, Artificial Sequence
  ENSG00000038295_28 (sequence is synthesized)
gagatctgtactcacatgctcagtttggtgataacaactacccaggacaggttgactgtgaatggctattagtatcagaacggggctctcgacttgaattatccttccagacatttgaag

SEQ ID NO: 26427 - DNA, 120 bp, Artificial Sequence
  ENSG00000038295_29 (sequence is synthesized)
tggaggaagaagcagactgtggctatgactatgtggagctctttgatggtcttgattcaacagctgtggggcttggtcgattctgtggatccgggccaccagaagagatttattcaattg

SEQ ID NO: 26428 - DNA, 120 bp, Artificial Sequence
  ENSG00000038295_30 (sequence is synthesized)
cacacataccaaaaaataacaccaaaacctctgtcagaacacaaaggaatgtgcataatggagagaagacatattttttttaaaactgaagatattggcacaaatgttttatacaaagag

SEQ ID NO: 26429 - DNA, 120 bp, Artificial Sequence
  ENSG00000038295_31 (sequence is synthesized)
tttgaacaaaaaatccctgtaagaccagaattatctttgtactaaaagagaagtttccagcaaaaccctcatcagcattacaaggatatttgaactccatgcttgatggtattaataaag

SEQ ID NO: 26430 - DNA, 120 bp, Artificial Sequence
  ENSG00000038295_32 (sequence is synthesized)
ctggtgaaagggcatcatatacttcaaggaagactctacaagcttttgttcacagcttgaaatagatgcctcacaattcagacagtttaattcaggaactgtgaccctgcagtgttcttt

SEQ ID NO: 26431 - DNA, 120 bp, Artificial Sequence
  ENSG00000038295_33 (sequence is synthesized)
ttgacaatttgtcaagatttagggacataaaatgatcttgcaggtcgtaaactggaaaacagtattttggttgtcttaggataattgctgactttgtatcttggatacagtgtaaaccag

SEQ ID NO: 26432 - DNA, 120 bp, Artificial Sequence
  ENSG00000038295_34 (sequence is synthesized)
atccatataaggtgaatgtgaaatgggagtcttctgagggtgatttgtactttccatgtgtatgtgtgtgtctggtgtttggaaactgggatatttcagcttcattatttccacttgcag

SEQ ID NO: 26433 - DNA, 120 bp, Artificial Sequence
  ENSG00000038295_35 (sequence is synthesized)
gccagcttaacctctgaaacacaaatgatcttgagaccactttagtgtacttacatttagatgagtttgaaatctcaatggtgtctaattattgcagttaaattctagacatcagttctt

SEQ ID NO: 26434 - DNA, 120 bp, Artificial Sequence
  ENSG00000038295_36 (sequence is synthesized)
taagtctcagaaaacgcccagtgaattggtaaacttagttcttttttttggaagtgctgccttttcacaccaaatccaagaagcctgtgatgtcttatgaaccttatgagaaaactccga

SEQ ID NO: 26435 - DNA, 120 bp, Artificial Sequence
  ENSG00000038295_37 (sequence is synthesized)
agaggtgtgagcaggattcttctgaatgactgtctggatggttcattactcaagttactgctgctgctattgtctttcctttgttgtcgatctgttattgttgtattattattgttgatg

SEQ ID NO: 26436 - DNA, 120 bp, Artificial Sequence
  ENSG00000038295_38 (sequence is synthesized)
ttgtcatggttaatctattttttaaaattgaaatgaagcagaagtaggccttgtgagaactgaaaggtctctttcatttttctcttcctgggattcattttttcaaaacacaatgctgga

SEQ ID NO: 26437 - DNA, 120 bp, Artificial Sequence
  ENSG00000038295_39 (sequence is synthesized)
aaaaaaagatttgtttctgaaagacttcttatggtgctattccataaactttttttcaaacaagtttttgacctttgagccaacccacccgtagactacgaatgtctccctatggctggt

SEQ ID NO: 26438 - DNA, 120 bp, Artificial Sequence
  ENSG00000038295_40 (sequence is synthesized)
agcatttgaagactaaagacttgtcaaatatatcaagagtatatcattgcaagggcagcacttgtcctgtggaacaactacttataatgccttagaattcctgcacatgatcaaacagat

SEQ ID NO: 26439 - DNA, 120 bp, Artificial Sequence
  ENSG00000038295_41 (sequence is synthesized)
cctcctaaaacacaccttttgaaatgttgaacataatagtgtatgttaattaacagctctatgaagaaaatccatttccatgactgaagcattggatataaatatggtgtcctgcttttt

SEQ ID NO: 26440 - DNA, 120 bp, Artificial Sequence
  ENSG00000038295_42 (sequence is synthesized)
ttgtagaaaatgtaatttgaggatgaattttctgctttaaaggcatgtgtgtttttaaaattaatgaatgtagatgtgtgattgtctgagtgagtgaaactacaagaggtaaaaaataat

SEQ ID NO: 26441 - DNA, 120 bp, Artificial Sequence
  ENSG00000038295_43 (sequence is synthesized)
gggtggttgaaaagttaaaatgtatgtgccaagttctactagaattccatttgaaatagcaccttccttaggtttcatggacaaataatgggaacttctaattttgatcaatcccattaa

SEQ ID NO: 26442 - DNA, 120 bp, Artificial Sequence
  ENSG00000038295_44 (sequence is synthesized)
aaaaaggctctttcctttagagaaactctattttgatgtcaatatagattactgtatgaagtagctttgtgtctgttacctgtccatgagcatacaacattgaatacaattgggtgtatt

SEQ ID NO: 26443 - DNA, 120 bp, Artificial Sequence
  ENSG00000038295_45 (sequence is synthesized)
ctttcagttttacacaattaaagtatacacacagatgtagcttatctgtttttttcttaaattgttgccctgaaaaaatttcttgcatatgaattgtaaaatgtaaatacatttttataa

SEQ ID NO: 26444 - DNA, 120 bp, Artificial Sequence
  ENSG00000038295_46 (sequence is synthesized)
ccaatgttttgatcttattgaatgttactttgaaaatgtataactattgcctgcaatgtagatgagccttttagtagagctgatttattccagtaacttcttccatattttctcactaat

SEQ ID NO: 26445 - DNA, 120 bp, Artificial Sequence
  ENSG00000038295_47 (sequence is synthesized)
ctcccgttagccaaaatatgccagaaatgggaaagagaggagaaaaagtcattaacattaacacctatactgttctatactactcctacccgtgtgctaggaatgtgcactagctctttt

SEQ ID NO: 26446 - DNA, 120 bp, Artificial Sequence
  ENSG00000038295_48 (sequence is synthesized)
taaattccatgctacactttgaggactgtcatcatgttctcgttttgtagttcagaaagtgaggctcaaagaatttatgtaaccttcccagagtcacagtgtaaagttagatgttgaaac

SEQ ID NO: 26447 - DNA, 120 bp, Artificial Sequence
  ENSG00000038295_49 (sequence is synthesized)
ccagtttatcttatacaaatgagcctctgcttgttctacaaaggtagtagaatcaatctcgacctatataaatagtagattttttatggtgaaactttcccacataaagtaaattttagg

SEQ ID NO: 26448 - DNA, 120 bp, Artificial Sequence
  ENSG00000038295_50 (sequence is synthesized)
ggtgaattagagtaaaacttacaggataagcattttgctctttttaagaacagcatgaaatttagaataccaatgatagctatctttaagaatcagaattagtactagaaatttaaaaaa

SEQ ID NO: 26449 - DNA, 120 bp, Artificial Sequence
  ENSG00000038295_51 (sequence is synthesized)
ccctatagtttggagttagtatgagccttttgtgaaaataaatatattaaattattttgcctgatgtggtaggggaaatgtattgctctatattaagaaatattctggatattctgattg

SEQ ID NO: 26450 - DNA, 120 bp, Artificial Sequence
  ENSG00000038295_52 (sequence is synthesized)
acatcttattaggccatagtgagctatgctctgcacaactgagaaattaggtatttagaaggcatatagagatgttgtcataactaggtcttcaacgtgaaaattaatttttattgtatc

SEQ ID NO: 26451 - DNA, 120 bp, Artificial Sequence
  ENSG00000038295_53 (sequence is synthesized)
atgtcaagtatcagtttaccacatattatttttatattaattcaacatttgccttaagtgtgttgttaaatgaaagtacagacagcttcattgttgtattgttaataattgttacttact

SEQ ID NO: 26452 - DNA, 120 bp, Artificial Sequence
  ENSG00000038295_54 (sequence is synthesized)
gctccaggcattttattaaattaattttttaaattattttccaccctacatcagtatattggttgtgctttatatttgccaaagtcctaactgactatacatagaaaaaaaaaaaaacac

SEQ ID NO: 26453 - DNA, 120 bp, Artificial Sequence
  ENSG00000038295_55 (sequence is synthesized)
tgttctcacttgattttattaaattatttttaaaagtcaattttgaaaataactgtattttattaaggagatcgtgacttaacttaaatggacaaaataactttttaaaagaaatggatg

SEQ ID NO: 26454 - DNA, 120 bp, Artificial Sequence
  ENSG00000038295_56 (sequence is synthesized)
agaagtaattgtgtttccaaaaccctcaaatatcccattcctatactggctggatttttgctacctgtcgctcattttaatatgtcacagtatgagattcaaattctgtttaactttgtt

SEQ ID NO: 26455 - DNA, 120 bp, Artificial Sequence
  ENSG00000038295_57 (sequence is synthesized)
ttaaaatagcttggtctcttttatttggtttgtaatactgctgtatttttggtggtaagcttcaaatatcaaattttgttctgccatgtagaaaaatctctaaaagcatcaaatgactaa

SEQ ID NO: 26456 - DNA, 120 bp, Artificial Sequence
  ENSG00000038295_58 (sequence is synthesized)
ttttatttttgcaaggttaaaatttatttttaaaagaaacattaaattatatctttatgtagatttagaaggactgcaaccctatgtgacattataacttacttaaaacagttatcaaat

SEQ ID NO: 26457 - DNA, 120 bp, Artificial Sequence
  ENSG00000038295_59 (sequence is synthesized)
atttggaaactattgtttactaataagaataagacttgccttatggaaaatttttgataccacttgttaaatcaggcatgggaggaggagagcagaaaatataattgccttctaaagata

SEQ ID NO: 26458 - DNA, 120 bp, Artificial Sequence
  ENSG00000038295_60 (sequence is synthesized)
tcttctgatgaacacaaattataaagtttgatgtcataccacttgtctacttttagttttattgcctgtgcttttggtgtcatagccaagaaatcatggccatatgtaatgacatgaagt

SEQ ID NO: 26459 - DNA, 120 bp, Artificial Sequence
  ENSG00000038295_61 (sequence is synthesized)
ttttaccctgtgttttcttctatgagttctatagttttacagtcttatatgtaggtttttaatcaatattgtgttaatagaaaccattcttgtacatgtggatatccagtttcttcaaca

SEQ ID NO: 26460 - DNA, 120 bp, Artificial Sequence
  ENSG00000038295_62 (sequence is synthesized)
ccatttgttaaagatttactaaatgtttttattcagcattcctgctcatgtttctgacttctattatggcttattttggtcctgcctatagcttacattatagattattttttaaattag

SEQ ID NO: 26461 - DNA, 120 bp, Artificial Sequence
  ENSG00000038295_63 (sequence is synthesized)
cgtttttgtttttttctgtttgaaaatgtggattttttacatgaatttataaaactatagtttcactggatatagttggctgcacatttaactttgttttaaataaaagcttgcaaaaat

SEQ ID NO: 26462 - DNA, 120 bp, Artificial Sequence
  ENSG00000038358_0 (sequence is synthesized)
agcctcggctcgtgggtgccggaagtggaggcggttggtggggttggcggggctcagcgacgctgcgcgggtggcggtttgcgaactgcgggtggactgtgtagtgaccggcgtcccgct

SEQ ID NO: 26463 - DNA, 120 bp, Artificial Sequence
  ENSG00000038358_1 (sequence is synthesized)
gtctcgccccgtggcgggtgagcgagggtgcgtggtgcgcggcggcggcggaacgaacgcggtgcgggcggggcgcccgccgcagggcccatggcctcctgcgcgagcatcgacatcgag

SEQ ID NO: 26464 - DNA, 120 bp, Artificial Sequence
  ENSG00000038358_2 (sequence is synthesized)
gacgccacgcagcacctgcgggacatcctcaagctggaccggcccgcgggcggccccagtgcagagagcccacggccatccagtgcctacaatggggacctcaatggacttctggtccca

SEQ ID NO: 26465 - DNA, 120 bp, Artificial Sequence
  ENSG00000038358_3 (sequence is synthesized)
gacccgctctgctcaggtgatagtacctcagcaaacaagactggtcttcggaccatgccacccattaacctgcaagagaagcaggtcatctgtctctcaggagatgatagctccacctgc

SEQ ID NO: 26466 - DNA, 120 bp, Artificial Sequence
  ENSG00000038358_4 (sequence is synthesized)
attgggattttggccaaggaggtggagattgtggctagcagtgactctagcatttcaagcaaggcccggggaagcaacaaggtgaaaattcagcctgtcgccaagtatgactgggaacag

SEQ ID NO: 26467 - DNA, 120 bp, Artificial Sequence
  ENSG00000038358_5 (sequence is synthesized)
aagtactactatggcaacctgattgctgtgtctaactccttcttggcctatgccattcgggctgccaacaatggctctgccatggtgcgggtgatcagcgtcagcacttcggagcggacc

SEQ ID NO: 26468 - DNA, 120 bp, Artificial Sequence
  ENSG00000038358_6 (sequence is synthesized)
ttgctcaagggcttcacaggcagtgtggctgatctggctttcgcgcacctcaactctccacagctggcctgcctggatgaggcaggcaacctgttcgtgtggcgcttggctctggttaat

SEQ ID NO: 26469 - DNA, 120 bp, Artificial Sequence
  ENSG00000038358_7 (sequence is synthesized)
ggcaaaattcaagaagagatcttggtccatattcggcagccagagggcacgccactgaaccactttcgcaggatcatctggtgccccttcatccctgaggagagcgaagactgctgtgag

SEQ ID NO: 26470 - DNA, 120 bp, Artificial Sequence
  ENSG00000038358_8 (sequence is synthesized)
gagagcagcccaacagtggccctgctgcatgaagaccgggctgaggtgtgggacctggacatgctccgctccagccacagtacctggcctgtggatgttagccagatcaagcagggcttc

SEQ ID NO: 26471 - DNA, 120 bp, Artificial Sequence
  ENSG00000038358_9 (sequence is synthesized)
attgtggtaaaaggtcatagcacgtgcctcagtgaaggagccctctctcctgatgggactgtgctggctactgcgagccacgatggctatgtcaagttctggcagatctacattgagggg

SEQ ID NO: 26472 - DNA, 120 bp, Artificial Sequence
  ENSG00000038358_10 (sequence is synthesized)
caagatgagccaaggtgtctgcacgagtggaaacctcatgatgggcggcccctctcctgcctcctgttctgtgacaaccataagaaacaagaccctgatgtccctttctggaggttcctt

SEQ ID NO: 26473 - DNA, 120 bp, Artificial Sequence
  ENSG00000038358_11 (sequence is synthesized)
attactggtgctgaccagaaccgagagttaaagatgtggtgtacagtatcctggacctgcctgcagactattcgcttctccccagatatcttcagctcagtgagtgtgccccctagcctc

SEQ ID NO: 26474 - DNA, 120 bp, Artificial Sequence
  ENSG00000038358_12 (sequence is synthesized)
aaggtttgcttggacctctcagcagaatacctgattctcagcgatgtgcaacggaaggtcctctatgtgatggagctgctgcaaaaccaggaggagggccacgcctgcttcagctccatc

SEQ ID NO: 26475 - DNA, 120 bp, Artificial Sequence
  ENSG00000038358_13 (sequence is synthesized)
tcggagttcctgctcacccaccctgtgctgagctttggtatccaggttgtgagtcgctgccggctacggcacactgaggtgctgcctgccgaagaggaaaatgacagcctgggtgctgat

SEQ ID NO: 26476 - DNA, 120 bp, Artificial Sequence
  ENSG00000038358_14 (sequence is synthesized)
ggtacccatggagccggtgccatggagtctgcggccggtgtgctcatcaagctcttttgtgtgcatactaaggcactgcaagatgtgcagatccgcttccagccacagctgaaccctgat

SEQ ID NO: 26477 - DNA, 120 bp, Artificial Sequence
  ENSG00000038358_15 (sequence is synthesized)
gtggtggccccactgcccacccacactgcccacgaggacttcacatttggagagtctcggcccgaactgggctctgagggcctggggtcagccgctcacggctcccagcctgacctccga

SEQ ID NO: 26478 - DNA, 120 bp, Artificial Sequence
  ENSG00000038358_16 (sequence is synthesized)
cgaatcgtggagctgcctgcacctgccgacttcctcagtctgagcagtgagaccaagcccaagttgatgacacctgacgccttcatgacacctagcgcctccttgcagcagatcactgcc

SEQ ID NO: 26479 - DNA, 120 bp, Artificial Sequence
  ENSG00000038358_17 (sequence is synthesized)
tctcccagcagcagcagcagcggtagcagcagcagcagcagcagtagcagcagctcccttacagctgtgtctgccatgagcagcacctcagctgtggacccctccttgaccaggccacct

SEQ ID NO: 26480 - DNA, 120 bp, Artificial Sequence
  ENSG00000038358_18 (sequence is synthesized)
gaggagctgaccttgagccccaagctgcagctggatggcagcctgacaatgagcagcagtggcagccttcaggcaagcccgcgtggcctcctgcctggcctgctcccagccccagctgac

SEQ ID NO: 26481 - DNA, 120 bp, Artificial Sequence
  ENSG00000038358_19 (sequence is synthesized)
ccccaagcctcccctagccgcactcgttcccctgatgtcatctcctcagcttccactgccctgtcccaggacatccctgagattgcatctgaggccctgtcccgtggttttggctcctct

SEQ ID NO: 26482 - DNA, 120 bp, Artificial Sequence
  ENSG00000038358_20 (sequence is synthesized)
gcaccagagggccttgagccagacagtatggcttcagccgcctcggcactgcacctgctgtccccacggccccggccagggcccgagctcggcccccagctcgggcttgatggaggccct

SEQ ID NO: 26483 - DNA, 120 bp, Artificial Sequence
  ENSG00000038358_21 (sequence is synthesized)
ggggatggagatcggcataataccccctccctcctggaggcagccttgacccaggaggcctcgactcctgacagtcaggtttggcccacagcacctgacattactcgtgagacctgcagc

SEQ ID NO: 26484 - DNA, 120 bp, Artificial Sequence
  ENSG00000038358_22 (sequence is synthesized)
accctggcagaaagccccaggaatggccttcaggaaaagcacaagagcctggccttccaccgaccaccatatcacctgctgcagcaacgtgacagccaggatgccagtgctgagcaaagt

SEQ ID NO: 26485 - DNA, 120 bp, Artificial Sequence
  ENSG00000038358_23 (sequence is synthesized)
gaccatgatgatgaggtggccagccttgcctctgcttcaggaggctttggcaccaaagttcctgctccacggctgcctgccaaggactggaagaccaagggatcccctcgaacctcaccc

SEQ ID NO: 26486 - DNA, 120 bp, Artificial Sequence
  ENSG00000038358_24 (sequence is synthesized)
aagctcaagaggaaaagcaagaaggatgatggggatgcagccatgggatcccggctcacagagcaccaggtggcagagccccctgaggactggccagcactaatttggcaacagcagaga

SEQ ID NO: 26487 - DNA, 120 bp, Artificial Sequence
  ENSG00000038358_25 (sequence is synthesized)
gagctggcagagctgcggcacagccaggaagagctgctgcagcgtctgtgtacccaactcgaaggcctgcagagcacagtcacaggccacgtagaacgtgcccttgagactcggcacgag

SEQ ID NO: 26488 - DNA, 120 bp, Artificial Sequence
  ENSG00000038358_26 (sequence is synthesized)
caggaacagcggcggctggagcgagcactggctgaggggcagcagcggggagggcagctgcaggagcagctgacacaacagttgtcccaagcactgtcgtcagctgtagctgggcggcta

SEQ ID NO: 26489 - DNA, 120 bp, Artificial Sequence
  ENSG00000038358_27 (sequence is synthesized)
gagcgcagcatacgggatgagatcaagaagacagtccctccatgtgtctcaaggagtctggagcctatggcaggccaactgagcaactcagtggctaccaagctcacagctgtggagggc

SEQ ID NO: 26490 - DNA, 120 bp, Artificial Sequence
  ENSG00000038358_28 (sequence is synthesized)
agcatgaaagagaacatctccaagctgctcaagtccaagaacttgactgatgccatcgcccgagcagctgcagacacattacaagggccgatgcaggctgcctaccgggaagccttccag

SEQ ID NO: 26491 - DNA, 120 bp, Artificial Sequence
  ENSG00000038358_29 (sequence is synthesized)
agtgtggtgctgccggcctttgagaagagctgccaggccatgttccagcaaatcaatgatagcttccggctggggacacaggaatacttgcagcagctagaaagccacatgaagagccgg

SEQ ID NO: 26492 - DNA, 120 bp, Artificial Sequence
  ENSG00000038358_30 (sequence is synthesized)
aaggcacgggaacaggaggccagggagcctgtgctagcccagctgcggggcctggtcagcacactgcagagtgccactgagcagatggcagccaccgtggccggcagtgttcgtgctgag

SEQ ID NO: 26493 - DNA, 120 bp, Artificial Sequence
  ENSG00000038358_31 (sequence is synthesized)
gtgcagcaccagctgcatgtggctgtgggcagcctgcaggagtccattttagcacaggtacagcgcatcgttaagggtgaggtgagtgtggcgctcaaggagcagcaggccgccgtcacc

SEQ ID NO: 26494 - DNA, 120 bp, Artificial Sequence
  ENSG00000038358_32 (sequence is synthesized)
tccagcatcatgcaggccatgcgctcagctgctggcacacctgtcccctctgcccaccttgactgccaggcccagcaagcccatatcctgcagctgctgcagcagggccacctcaatcag

SEQ ID NO: 26495 - DNA, 120 bp, Artificial Sequence
  ENSG00000038358_33 (sequence is synthesized)
gccttccagcaggcgctgacagctgctgacctgaacctggtgctgtatgtgtgtgaaactgtggacccagcccaggtttttgggcagccaccctgcccgctctcccagcctgtgctcctt

SEQ ID NO: 26496 - DNA, 120 bp, Artificial Sequence
  ENSG00000038358_34 (sequence is synthesized)
tccctcatccagcagctggcatctgaccttggcactcgaactgacctcaagctcagctacctggaagaggccgtgatgcacctggaccacagtgaccccatcactcgggaccacatgggc

SEQ ID NO: 26497 - DNA, 120 bp, Artificial Sequence
  ENSG00000038358_35 (sequence is synthesized)
tccgttatggcccaggtgcgccaaaagctttttcagttcctgcaggctgagccacacaactcacttggcaaagcagctcggcgtctcagcctcatgctgcatggcctcgtgacccccagc

SEQ ID NO: 26498 - DNA, 120 bp, Artificial Sequence
  ENSG00000038358_36 (sequence is synthesized)
ctcccttagctgctaagcctgccttgcccaggggtgggatggcactgaaggccagcagacaggcctaggctggggcagggtcacggctggcctttacctgctcaggcccccatctctggg

SEQ ID NO: 26499 - DNA, 120 bp, Artificial Sequence
  ENSG00000038358_37 (sequence is synthesized)
gtgtttgggggtcagggagcagggagcactggccgtggtctacagcgtgtggtagtcagaaggtttagctgggcccagggcaggtattgcgcctgcttgggttctgccatgcctggagca

SEQ ID NO: 26500 - DNA, 120 bp, Artificial Sequence
  ENSG00000038358_38 (sequence is synthesized)
tgaccctgagatcgtgacaccacttgagtggaattttccatgttcctttttacctctaatttggatctttttgtttttgaaaaacattgagaaattcaattaaatgcttttggaataaaa

SEQ ID NO: 26501 - DNA, 120 bp, Artificial Sequence
  ENSG00000038358_39 (sequence is synthesized)
ctgcctaccgggaagccttccagagtgtggtgctgccggcctttgagaagagctgccaggccatgttccagcaaatcaatgatagcttccggctggggacacaggaatgcgctgacagct

SEQ ID NO: 26502 - DNA, 120 bp, Artificial Sequence
  ENSG00000038358_40 (sequence is synthesized)
gggattatagaggaaggccggggggcaggtggcgcatcacagcccttagcctctgagctcagctaggaacgttctgcctgtgcaggtcctctatgtgatggagctgctgcaaaaccagga

SEQ ID NO: 26503 - DNA, 120 bp, Artificial Sequence
  ENSG00000038358_41 (sequence is synthesized)
aggcgagctgacaaaagggcggcgcgcgtctgaaccgccattggggcccacagctcccttaggactagctctggatcctcccggcgggccccagtgcagagagcccacggccatccagtg

SEQ ID NO: 26504 - DNA, 120 bp, Artificial Sequence
  ENSG00000038358_42 (sequence is synthesized)
agcaggtgggcagcagcagggaaggtgggtggtgggctcctcccagccccctgctgctgatcctgctctacccgacatggtccgtgtttccctgaggtcatttcaccctcctgtgtttcc

SEQ ID NO: 26505 - DNA, 120 bp, Artificial Sequence
  ENSG00000038358_43 (sequence is synthesized)
tggtgggtgtctcctcagcctccctgtccccacctcctcttcttggctgtggcctcgtttttgacctgtatccccacttccctgctgccctgtctctcattactgctaatactaatgcct

SEQ ID NO: 26506 - DNA, 120 bp, Artificial Sequence
  ENSG00000038358_44 (sequence is synthesized)
gacgccacgcagcacctgcgggacatcctcaagctggaccggcccgcgggcggtagaagagcctcatgctcatccttggtcctgcctacatcagtgtttatggaacgagagatgaacaca

SEQ ID NO: 26507 - DNA, 120 bp, Artificial Sequence
  ENSG00000038358_45 (sequence is synthesized)
cctgctgcatgaagaccgggtgagggggctgacatggcgaagaggcgccagagaagccatagtgtggggttgggctgcacactcacctccctgtgccttccaggctgaggtgtgggacct

SEQ ID NO: 26508 - DNA, 120 bp, Artificial Sequence
  ENSG00000038358_46 (sequence is synthesized)
ggacatgctccgctccagccacagtacctggcctgtggatgttagccagatcaagcagggcttcattgtggtaaaaggtcatagcacggtaagcctgtgactgcctgcctcccctgccct

SEQ ID NO: 26509 - DNA, 120 bp, Artificial Sequence
  ENSG00000038358_47 (sequence is synthesized)
ccccacttcctcatatccatcttctgttccctatatccacagctgcccgggcagctttactagcattctgcccgtggggactctgagctcaaattggccctcacctgtgcagctttctcc

SEQ ID NO: 26510 - DNA, 120 bp, Artificial Sequence
  ENSG00000038358_48 (sequence is synthesized)
ttatctagcagcaccctgcaggtctggccttctctaggaaccctgttcatttagtcagtcacacaagcatgccagtcccaccgtgagtcagcccagctcattgccatcctcacttgggag

SEQ ID NO: 26511 - DNA, 120 bp, Artificial Sequence
  ENSG00000038358_49 (sequence is synthesized)
gggcaggggcttactcctccttccccttcccacagtgaccatgatgatgaggtggccagccttgcctctgcttcaggaggctttggcaccaaagttcctgctccacggctgcctgccaag

SEQ ID NO: 26512 - DNA, 120 bp, Artificial Sequence
  ENSG00000038382_0 (sequence is synthesized)
attgaaatcaagatggaggctcgcggcagccgccggcgcccgtgatcccggaggtctcgccggccacgggcccccgccctcgcgactgcgcgtccgggaggcgcgtgctgctgcccgcgc

SEQ ID NO: 26513 - DNA, 80 bp, Artificial Sequence
  ENSG00000038382_1 (sequence is synthesized)
ccctcggccagctcgcggctaccgggcggagtcctcgtctatgtgggcgcgctccttgggccgagccgccgccgccgccc

SEQ ID NO: 26514 - DNA, 120 bp, Artificial Sequence
  ENSG00000038382_2 (sequence is synthesized)
ggcgagggggcagaggaggcggccaaggacctggccgacatcgcggccttcttccgatccgggtttcgaaaaaacgatgaaatgaaagctatggatgttttaccaattttgaaggaaaaa

SEQ ID NO: 26515 - DNA, 120 bp, Artificial Sequence
  ENSG00000038382_3 (sequence is synthesized)
gttgcatacctttcaggtgggagagataaacgtggaggtcccattttaacgtttccggcccgcagcaatcatgacagaatacgacaggaggatctcaggagactcatttcctatctagcc

SEQ ID NO: 26516 - DNA, 120 bp, Artificial Sequence
  ENSG00000038382_4 (sequence is synthesized)
tgtattcccagcgaggaggtctgcaagcgtggcttcacggtgatcgtggacatgcgtgggtccaagtgggactccatcaagccccttctgaagatcctgcaggagtccttcccctgctgc

SEQ ID NO: 26517 - DNA, 120 bp, Artificial Sequence
  ENSG00000038382_5 (sequence is synthesized)
atccatgtggccctgatcatcaagccagacaacttctggcagaaacagaggactaattttggcagttctaaatttgaatttgagacaaatatggtctctttagaaggccttaccaaagta

SEQ ID NO: 26518 - DNA, 120 bp, Artificial Sequence
  ENSG00000038382_6 (sequence is synthesized)
gttgatccttctcagctaactcctgagtttgatggctgcctggaatacaaccacgaagaatggattgaaatcagagttgcttttgaagactacattagcaatgccacccacatgctgtct

SEQ ID NO: 26519 - DNA, 120 bp, Artificial Sequence
  ENSG00000038382_7 (sequence is synthesized)
cggctggaggaacttcaggacatcctagctaagaaggagctgcctcaggatttagagggggctcggaatatgatcgaggaacattctcagctgaagaagaaggtgattaaggcccccatc

SEQ ID NO: 26520 - DNA, 120 bp, Artificial Sequence
  ENSG00000038382_8 (sequence is synthesized)
gaggacctggatttggagggacagaagctgcttcagaggatacagagcagtgaaagctttcccaaaaagaactcaggctcaggcaatgcggacctgcagaacctcttgcccaaggtgtcc

SEQ ID NO: 26521 - DNA, 120 bp, Artificial Sequence
  ENSG00000038382_9 (sequence is synthesized)
accatgctggaccggctgcactcgacacggcagcatctgcaccagatgtggcatgtgaggaagctgaagctggaccagtgcttccagctgaggctgtttgaacaggatgctgagaagatg

SEQ ID NO: 26522 - DNA, 120 bp, Artificial Sequence
  ENSG00000038382_10 (sequence is synthesized)
tttgactggatcacacacaacaaaggcctgtttctaaacagctacacagagattgggaccagccaccctcatgccatggagcttcagacgcagcacaatcactttgccatgaactgtatg

SEQ ID NO: 26523 - DNA, 120 bp, Artificial Sequence
  ENSG00000038382_11 (sequence is synthesized)
aacgtgtatgtaaatataaaccgcatcatgtcggtggccaatcgtctggtggagtctggccactatgcctcgcagcagatcaggcagatcgcgagtcagctggagcaggagtggaaggcg

SEQ ID NO: 26524 - DNA, 120 bp, Artificial Sequence
  ENSG00000038382_12 (sequence is synthesized)
tttgcggcagccctggatgagcggagcaccttgctggacatgtcctccattttccaccagaaggccgaaaagtatatgagcaacgtggattcatggtgtaaagcttgcggtgaggtagac

SEQ ID NO: 26525 - DNA, 120 bp, Artificial Sequence
  ENSG00000038382_13 (sequence is synthesized)
cttccctcagagctgcaggacctagaagatgccattcatcaccaccagggaatatatgaacatatcactcttgcttattctgaggtcagccaagatgggaagtcgctccttgacaagctc

SEQ ID NO: 26526 - DNA, 120 bp, Artificial Sequence
  ENSG00000038382_14 (sequence is synthesized)
cagcggcccttgactcccggcagctccgattccctgacagcctctgccaactactccaaggccgtgcaccatgtcctggatgtcatccacgaggtgctgcaccaccagcggcagctggag

SEQ ID NO: 26527 - DNA, 120 bp, Artificial Sequence
  ENSG00000038382_15 (sequence is synthesized)
aacatctggcaacaccgcaaggtccggctgcatcagaggctgcagctgtgtgttttccagcaggacgttcagcaggtgctagactggatcgagaaccacggagaagcatttctgagcaaa

SEQ ID NO: 26528 - DNA, 120 bp, Artificial Sequence
  ENSG00000038382_16 (sequence is synthesized)
catacaggtgtggggaaatctcttcatcgggccagagcattgcagaaacgtcatgaagattttgaagaagtggcacagaacacatacaccaatgcggataaattactggaagcagcagaa

SEQ ID NO: 26529 - DNA, 120 bp, Artificial Sequence
  ENSG00000038382_17 (sequence is synthesized)
cagctggctcagactggggaatgtgaccccgaagagatttatcaggctgcccatcagctggaagaccggattcaagatttcgttcggcgtgttgagcagcgaaagatcctactggacatg

SEQ ID NO: 26530 - DNA, 120 bp, Artificial Sequence
  ENSG00000038382_18 (sequence is synthesized)
tcagtgtcctttcacacccatgtgaaagagctgtggacgtggctggaggagctgcagaaggagctgctggacgacgtgtatgccgagtcggtggaggccgtgcaggacctcatcaagcgc

SEQ ID NO: 26531 - DNA, 120 bp, Artificial Sequence
  ENSG00000038382_19 (sequence is synthesized)
tttggccagcagcagcagaccaccctgcaggtgactgtcaacgtgatcaaggaaggggaggacctcatccagcagctcagggactctgccatctccagtaacaagaccccccacaacagc

SEQ ID NO: 26532 - DNA, 120 bp, Artificial Sequence
  ENSG00000038382_20 (sequence is synthesized)
tccatcaaccacattgagacggtgctgcagcagctggacgaggcgcagtcgcagatggaggagctcttccaggagcgcaagatcaagctggagctcttcctgcagctgcgcatcttcgag

SEQ ID NO: 26533 - DNA, 120 bp, Artificial Sequence
  ENSG00000038382_21 (sequence is synthesized)
agggacgccatcgacattatctcagacctcgagtcttggaatgatgagctttctcagcaaatgaatgacttcgacacagaagatctcacgattgcagagcagcgcctccagcaccatgca

SEQ ID NO: 26534 - DNA, 120 bp, Artificial Sequence
  ENSG00000038382_22 (sequence is synthesized)
gacaaagccttgaccatgaacaacttgacttttgacgtcatccaccaagggcaagatcttctgcagtatgtcaatgaggtccaggcctctggtgtggagctgctgtgtgatagagatgta

SEQ ID NO: 26535 - DNA, 120 bp, Artificial Sequence
  ENSG00000038382_23 (sequence is synthesized)
gacatggcaactcgggtccaggacctgctggagtttcttcatgaaaaacagcaggaattggatttagccgcagagcagcatcggaaacacctggagcagtgcgtgcagctgcgccacctg

SEQ ID NO: 26536 - DNA, 120 bp, Artificial Sequence
  ENSG00000038382_24 (sequence is synthesized)
caggcagaagtgaaacaggtgctgggttggatccgcaacggagagtccatgttaaatgccggacttatcacagccagctcgttacaagaggcagagcagctccagcgagagcacgagcag

SEQ ID NO: 26537 - DNA, 120 bp, Artificial Sequence
  ENSG00000038382_25 (sequence is synthesized)
ttccagcatgccattgagaaaacacatcagagcgcgctgcaggtgcagcagaaggcagaagccatgctacaggccaaccactacgacatggacatgatccgggactgcgccgagaaggtg

SEQ ID NO: 26538 - DNA, 120 bp, Artificial Sequence
  ENSG00000038382_26 (sequence is synthesized)
gcgtctcactggcaacagctcatgctcaagatggaagatcgcctcaagctcgtcaacgcctctgtcgctttctacaaaacctcagagcaggtctgcagcgtcctcgagagcctggaacag

SEQ ID NO: 26539 - DNA, 120 bp, Artificial Sequence
  ENSG00000038382_27 (sequence is synthesized)
gagtacaagagagaagaagactggtgtggcggggcggataagctgggcccaaactctgagacggaccacgtgacgcccatgatcagcaagcacctggagcagaaggaggcattcctgaag

SEQ ID NO: 26540 - DNA, 120 bp, Artificial Sequence
  ENSG00000038382_28 (sequence is synthesized)
gcttgcacccttgctcggaggaatgcagacgtcttcctgaaatacctgcacaggaacagcgtgaacatgccaggaatggtgacgcacatcaaagctcctgaacagcaagtgaaaaatatc

SEQ ID NO: 26541 - DNA, 120 bp, Artificial Sequence
  ENSG00000038382_29 (sequence is synthesized)
ttgaatgaactcttccaacgggagaacagggtattgcattactggaccatgaggaagagacggctggaccagtgtcagcagtacgtggtctttgagaggagtgccaagcaggctttggaa

SEQ ID NO: 26542 - DNA, 120 bp, Artificial Sequence
  ENSG00000038382_30 (sequence is synthesized)
tggatccatgacaatggcgagttctacctttccacacacacctccacgggctccagtatacagcacacccaggagctcctgaaagagcacgaggagttccagataactgcaaagcaaacc

SEQ ID NO: 26543 - DNA, 120 bp, Artificial Sequence
  ENSG00000038382_31 (sequence is synthesized)
aaagagagagtgaagctattgatacagctggctgatggcttttgtgaaaaagggcatgcccatgcggcagagataaaaaaatgtgttactgctgtggataagaggtacagagatttctct

SEQ ID NO: 26544 - DNA, 120 bp, Artificial Sequence
  ENSG00000038382_32 (sequence is synthesized)
ctgcggatggagaagtacaggacctctttggaaaaagccctggggatttcttcagattccaacaaatcgagtaaaagtctccagctagatatcattccagccagtatccctggctcagag

SEQ ID NO: 26545 - DNA, 120 bp, Artificial Sequence
  ENSG00000038382_33 (sequence is synthesized)
gtgaaacttcgagatgctgctcatgaacttaatgaagagaagcggaaatctgcccgcaggaaagagttcataatggctgagctcattcaaactgaaaaggcttatgtaagagacctccgg

SEQ ID NO: 26546 - DNA, 120 bp, Artificial Sequence
  ENSG00000038382_34 (sequence is synthesized)
gaatgtatggatacgtacctgtgggaaatgaccagtggcgtggaagagattccacctggcattgtaaacaaagaactcatcatcttcggaaacatgcaagaaatctacgaatttcataat

SEQ ID NO: 26547 - DNA, 120 bp, Artificial Sequence
  ENSG00000038382_35 (sequence is synthesized)
aacatattcctaaaggagctggaaaaatatgaacagttgccagaggatgttggacattgttttgttacttgggcagacaagtttcagatgtatgtcacatattgcaaaaataagcctgat

SEQ ID NO: 26548 - DNA, 120 bp, Artificial Sequence
  ENSG00000038382_36 (sequence is synthesized)
tctactcagctgatattggaacatgcagggtcctattttgacgagatacagcagcgacatggattagccaattccatttcttcctaccttattaaaccagttcagcgaataacgaagtat

SEQ ID NO: 26549 - DNA, 120 bp, Artificial Sequence
  ENSG00000038382_37 (sequence is synthesized)
cagctccttttaaaagagctgctgacgtgctgtgaggaaggaaagggagagattaaagatggcctggaggtgatgctcagcgtgccgaagcgagccaatgatgccatgcacctcagcatg

SEQ ID NO: 26550 - DNA, 120 bp, Artificial Sequence
  ENSG00000038382_38 (sequence is synthesized)
ctggaagggtttgatgaaaacattgagtctcagggagaactcatcctacaggaatccttccaagtgtgggacccaaaaaccttaattcgaaagggtcgagaacggcatctcttccttttt

SEQ ID NO: 26551 - DNA, 120 bp, Artificial Sequence
  ENSG00000038382_39 (sequence is synthesized)
gaaatgtccttagtatttagtaaagaagtgaaagattccagtgggagaagcaagtacctttataaaagcaaattgtttacctcagagttgggtgtcacagaacatgttgaaggagaccct

SEQ ID NO: 26552 - DNA, 120 bp, Artificial Sequence
  ENSG00000038382_40 (sequence is synthesized)
tgcaaatttgcactgtgggtggggagaacaccaacttcagataataaaattgtccttaaggcttccagcatagagaacaagcaggactggataaagcatatccgcgaagtcatccaggag

SEQ ID NO: 26553 - DNA, 120 bp, Artificial Sequence
  ENSG00000038382_41 (sequence is synthesized)
cggacgatccacctgaagggagccctgaaggagcccattcacatccctaagaccgctcccgccacaagacagaagggaaggagggatggagaggatctggacagccaaggagacggcagc

SEQ ID NO: 26554 - DNA, 120 bp, Artificial Sequence
  ENSG00000038382_42 (sequence is synthesized)
agccagcctgatacgatttccatcgcctcacggacgtctcagaacacgctggacagcgataagctctctggtggctgtgagctgacagtggtgatccatgacttcaccgcttgcaacagc

SEQ ID NO: 26555 - DNA, 120 bp, Artificial Sequence
  ENSG00000038382_43 (sequence is synthesized)
aacgagctgaccatccgacggggccagaccgtggaagttctggagcggccgcatgacaagcctgactggtgtctggtgcggacaactgaccgctccccagcggcagaaggcctggtcccc

SEQ ID NO: 26556 - DNA, 120 bp, Artificial Sequence
  ENSG00000038382_44 (sequence is synthesized)
tgtggttcactgtgcatcgcccactccagaagtagcatggaaatggagggcatcttcaaccacaaagactcgctctccgtctccagcaatgacgccagtccacccgcatccgtggcttcc

SEQ ID NO: 26557 - DNA, 120 bp, Artificial Sequence
  ENSG00000038382_45 (sequence is synthesized)
ctgcgcaagtggctcaccagccccgtgcggcggctcagcagcggcaaggccgacgggcacgtgaagaagctggcgcacaagcacaagaagagccgcgaggtccgcaagagcgccgacgcc

SEQ ID NO: 26558 - DNA, 120 bp, Artificial Sequence
  ENSG00000038382_46 (sequence is synthesized)
ggctcgcagaaggactccgacgacagtgcggccaccccgcaggacgagacggtcgaggagagaggccggaacgagggcctgagcagcggtactctctccaaatcctcctcctcggggatg

SEQ ID NO: 26559 - DNA, 120 bp, Artificial Sequence
  ENSG00000038382_47 (sequence is synthesized)
cagagctgtggagaagaggaaggcgaggagggggccgacgccgtgcccctgccgccacccatggccatccagcagcacagcctcctccagccagactcacaggatgacaaggcctcttct

SEQ ID NO: 26560 - DNA, 120 bp, Artificial Sequence
  ENSG00000038382_48 (sequence is synthesized)
cggttattagtccgccccaccagctccgaaacaccgagtgcagccgagctcgtcagtgcaattgaggaactcgtgaaaagcaagatggcactggaggatcgccccagctcactccttgtt

SEQ ID NO: 26561 - DNA, 120 bp, Artificial Sequence
  ENSG00000038382_49 (sequence is synthesized)
gaccagggagatagtagcagcccttccttcaacccttcggataattcccttctctcttcctcctcgcccattgatgagatggaagaaaggaaatccagctctttaaagagaagacactac

SEQ ID NO: 26562 - DNA, 120 bp, Artificial Sequence
  ENSG00000038382_50 (sequence is synthesized)
gttttgcaagaactagtggagacagagcgtgactatgtgcgggaccttggctatgtggttgagggctacatggcacttatgaaagaagatggtgttcctgatgacatgaaaggaaaagac

SEQ ID NO: 26563 - DNA, 120 bp, Artificial Sequence
  ENSG00000038382_51 (sequence is synthesized)
aaaattgtgttcggcaacatccatcagatttacgactggcacagagacttttttttaggagagttagagaagtgccttgaagatccagaaaaactaggatccctttttgttaaacacgag

SEQ ID NO: 26564 - DNA, 120 bp, Artificial Sequence
  ENSG00000038382_52 (sequence is synthesized)
agaaggttgcacatgtacatagcttattgtcaaaataaaccaaagtctgagcacattgtctcagaatacattgataccttttttgaggacttaaagcagcgtcttggccacaggttacag

SEQ ID NO: 26565 - DNA, 120 bp, Artificial Sequence
  ENSG00000038382_53 (sequence is synthesized)
ctcacagatctgttgatcaaaccagtgcagagaatcatgaagtatcagctgttactgaaggacttcctcaagtattccaaaaaggccagcctggatacatcagaattagagagagctgtg

SEQ ID NO: 26566 - DNA, 120 bp, Artificial Sequence
  ENSG00000038382_54 (sequence is synthesized)
gaagtcatgtgcatagtacccaggcggtgcaacgacatgatgaacgtggggcggctgcaaggattcgacgggaaaatcgttgcccagggtaaactgctcttgcaggacacattcttggtc

SEQ ID NO: 26567 - DNA, 120 bp, Artificial Sequence
  ENSG00000038382_55 (sequence is synthesized)
acagaccaagatgcaggacttctgcctcgctgcagagagaggcgcatcttcctctttgagcagatcgtcatattcagcgaaccacttgataaaaagaagggcttctccatgccgggattc

SEQ ID NO: 26568 - DNA, 120 bp, Artificial Sequence
  ENSG00000038382_56 (sequence is synthesized)
ctgtttaagaacagtatcaaggtgagttgcctttgcctggaggaaaatgtggaaaatgatccctgtaaatttgctctgacatcgaggacgggtgacgtggtagagaccttcattttgcat

SEQ ID NO: 26569 - DNA, 120 bp, Artificial Sequence
  ENSG00000038382_57 (sequence is synthesized)
tcatctagtccaagtgtccggcaaacttggatccatgaaatcaaccaaattttagaaaaccagcgcaattttttaaatgccttgacatcgccaatcgagtaccagaggaaccacagcggg

SEQ ID NO: 26570 - DNA, 80 bp, Artificial Sequence
  ENSG00000038382_58 (sequence is synthesized)
aatcgagtaccagaggaaccacagcgggggcggcggcggcggcggcagcgggggcagcggcgggggtgggggcagcggcg

SEQ ID NO: 26571 - DNA, 120 bp, Artificial Sequence
  ENSG00000038382_59 (sequence is synthesized)
acgagcaggagccggccctcccggatcccccagcctgtccgacaccacccccccgtgctggtctcctctgcagcctcgagccaggcagaggcagacaagatgtcaggtacgtccaccccc

SEQ ID NO: 26572 - DNA, 120 bp, Artificial Sequence
  ENSG00000038382_60 (sequence is synthesized)
gcggcccccgaggccggccccagcgcgcccagcaggcggccccccggcgcggacgccgaggggtccgagcgagaagcggagccgatccccaagatgaaggtgctggagagccccaggaaa

SEQ ID NO: 26573 - DNA, 120 bp, Artificial Sequence
  ENSG00000038382_61 (sequence is synthesized)
aaggtgctggagagccccaggaaaggcgccgcgaacgcctcggggtcgagcccagacgcccccgccaaggacgcgcgcgctagcctgggcaccctgccgcttgggaagccccgggccggg

SEQ ID NO: 26574 - DNA, 120 bp, Artificial Sequence
  ENSG00000038382_62 (sequence is synthesized)
gccgcttcgccgctgaactcgccgctctccagcgcggtcccttctctcggcaaggagcccttcccccccagcagccccctgcagaaggggggctccttctggagctccatccccgcctcc

SEQ ID NO: 26575 - DNA, 120 bp, Artificial Sequence
  ENSG00000038382_63 (sequence is synthesized)
cccgccagccgacccggctccttcaccttcccgggggacagcgactccctccagcggcagacaccccgccacgcggcccctggcaaggatactgaccgcatgagcacgtgctcctcggcc

SEQ ID NO: 26576 - DNA, 120 bp, Artificial Sequence
  ENSG00000038382_64 (sequence is synthesized)
agcgagcagtccgtgcagtccacccagagcaacgggagtgaaagcagcagcagtagcaacatctccaccatgttggtgacacacgattacacggcagtgaaggaggatgagatcaacgtc

SEQ ID NO: 26577 - DNA, 120 bp, Artificial Sequence
  ENSG00000038382_65 (sequence is synthesized)
taccaaggagaggtcgttcaaattctggccagcaaccagcagaacatgtttctggtgttccgagccgccactgaccagtgccccgcagctgagggctggattccaggctttgtcctgggc

SEQ ID NO: 26578 - DNA, 120 bp, Artificial Sequence
  ENSG00000038382_66 (sequence is synthesized)
cacaccagtgcagtcatcgtggagaacccggacgggactctcaagaagtcaacatcttggcacacagcactccgtttaaggaaaaaatctgagaaaaaagataaagacggcaaaagggaa

SEQ ID NO: 26579 - DNA, 120 bp, Artificial Sequence
  ENSG00000038382_67 (sequence is synthesized)
ggcaagttagagaacggttatcggaagtcacgggaaggactcagcaacaaggtatctgtgaagcttctcaatcccaactacatttatgacgttcccccagaattcgtcattccattgagt

SEQ ID NO: 26580 - DNA, 120 bp, Artificial Sequence
  ENSG00000038382_68 (sequence is synthesized)
gaggtcacgtgtgagacaggggagaccgttgttcttagatgtcgagtctgtggccgccccaaagcctcaattacctggaagggccctgaacacaacaccttgaacaacgatggtcactac

SEQ ID NO: 26581 - DNA, 120 bp, Artificial Sequence
  ENSG00000038382_69 (sequence is synthesized)
agcatctcctacagtgacctgggagaggccacgctgaagattgtgggcgtgaccacggaagatgacggcatctacacgtgcatcgctgtcaatgacatgggttcagcctcatcgtcggcc

SEQ ID NO: 26582 - DNA, 120 bp, Artificial Sequence
  ENSG00000038382_70 (sequence is synthesized)
agcctgagggtcctaggtccagggatggatgggatcatggtgacctggaaagacaactttgactccttctacagtgaagtggctgagcttggcaggggcagattctctgtcgttaagaaa

SEQ ID NO: 26583 - DNA, 120 bp, Artificial Sequence
  ENSG00000038382_71 (sequence is synthesized)
tgtgatcagaaaggaaccaagcgagcagtggccactaagtttgtgaacaagaagttgatgaagcgcgaccaggtcacccatgagcttggcatcctgcagagcctccagcaccccctgctt

SEQ ID NO: 26584 - DNA, 120 bp, Artificial Sequence
  ENSG00000038382_72 (sequence is synthesized)
gtcggcctcctcgacacctttgagacccccaccagctacatcctggtcttagaaatggctgaccagggtcgcctcctggactgcgtggtgcgatggggaagcctcactgaagggaagatc

SEQ ID NO: 26585 - DNA, 120 bp, Artificial Sequence
  ENSG00000038382_73 (sequence is synthesized)
agggcgcacctgggggaggttctggaagctgtccggtacctgcacaactgcaggatagcacacctggacctaaagcctgagaatatcctggtggatgagagtttagccaagccaaccatc

SEQ ID NO: 26586 - DNA, 120 bp, Artificial Sequence
  ENSG00000038382_74 (sequence is synthesized)
aaactggctgactttggagatgctgttcagctcaacacgacctactacatccaccagttactggggaaccctgaattcgcagcccctgaaatcatcctcgggaaccctgtctccctgacc

SEQ ID NO: 26587 - DNA, 120 bp, Artificial Sequence
  ENSG00000038382_75 (sequence is synthesized)
tcggatacgtggagtgttggagtgctcacatacgtacttcttagtggcgtgtcccccttcctggatgacagtgtggaagagacctgcctgaacatttgccgcttagactttagcttccca

SEQ ID NO: 26588 - DNA, 120 bp, Artificial Sequence
  ENSG00000038382_76 (sequence is synthesized)
gatgactactttaaaggagtgagccagaaggccaaggagttcgtgtgcttcctcctgcaggaggaccccgccaagcgtccctcggctgcgctggccctccaggagcagtggctgcaggcc

SEQ ID NO: 26589 - DNA, 120 bp, Artificial Sequence
  ENSG00000038382_77 (sequence is synthesized)
ggcaacggcagaagcacgggcgtcctcgacacgtccagactgacttccttcattgagcggcgcaaacaccagaatgatgttcgacctatccgtagcattaaaaactttctgcagagcagg

SEQ ID NO: 26590 - DNA, 120 bp, Artificial Sequence
  ENSG00000038382_78 (sequence is synthesized)
cttctgcctagagtttgacctatccagaagttctttctcattctctttcacctgccaatcagctgttaatctgaattttcaagagaaaacaagcaaacataactgatcagctgccggtat

SEQ ID NO: 26591 - DNA, 120 bp, Artificial Sequence
  ENSG00000038382_79 (sequence is synthesized)
gttcatcgtgtgaaattgcattccaagtgagctgtgctcagcagtgcttggacacagagctgcaagctgcgctggggtggaggaccgtcacttacactctgcccaaggcagaggtcgcat

SEQ ID NO: 26592 - DNA, 120 bp, Artificial Sequence
  ENSG00000038382_80 (sequence is synthesized)
tgctgtatcacagtattttattcaggtttctgcaaaaaaataaaaagataacttttttaaacaaacatgaatagaattttgcaaatttaacgttttcaagatttattcaaggaaacaaaa

SEQ ID NO: 26593 - DNA, 120 bp, Artificial Sequence
  ENSG00000038382_81 (sequence is synthesized)
tgcctatgttcaaccactggtgttaatgaacaaagatactgtgcgtctctggggaagacgcacctaggtggcggccactcccatggccttgtctaggactcagagaccactcggctctga

SEQ ID NO: 26594 - DNA, 120 bp, Artificial Sequence
  ENSG00000038382_82 (sequence is synthesized)
gcttccaggcgcctcgtctgtgtgcatctcacgcccgacgtggcttctgaaacgtgcattcaacctcaaacttttgcataaaatagaatgaatcgttttgctctgatgaaatgtaggcct

SEQ ID NO: 26595 - DNA, 120 bp, Artificial Sequence
  ENSG00000038382_83 (sequence is synthesized)
tacttgtatataagactgttcctgccttcggtctgtcattttcccacctgcctcccctacccaccccccacccaccacctggggcttcctctgggggtccgagggtcttcccatcacatg

SEQ ID NO: 26596 - DNA, 120 bp, Artificial Sequence
  ENSG00000038382_84 (sequence is synthesized)
aagacatcaggttgggtcctgccccactgcccctccccctgttcctgccccaagccgtcaatcagattgtggagcagtacacagtcagatgaaaatactgtaaatgcactcattgggggt

SEQ ID NO: 26597 - DNA, 120 bp, Artificial Sequence
  ENSG00000038382_85 (sequence is synthesized)
tttttggttttacttcatatcatgtgcaatgttgtggctttaacattttatgcaactatttatgaagacctctgttgtacctgtaataaatatatagaaaaagcacatacttcgtatggt

SEQ ID NO: 26598 - DNA, 120 bp, Artificial Sequence
  ENSG00000038382_86 (sequence is synthesized)
gagctttatggttttgtgtgtgtgttggggttggcgggtgggtgggtagggtcgtagccctgtgccatcggttcaaagagacttttcgtgaaatttgttggttttgaggactgtaaaagt

SEQ ID NO: 26599 - DNA, 120 bp, Artificial Sequence
  ENSG00000038382_87 (sequence is synthesized)
gatttcatactctgaatataaaactggataatagggtaatgttttaaaatttattatgctattattcagaatgccaaagtattattttttttcccaaaatcagtctggacatttactact

SEQ ID NO: 26600 - DNA, 120 bp, Artificial Sequence
  ENSG00000038382_88 (sequence is synthesized)
ttttagactttttgacgttgaactttctgtataaaaattggctgggttttgagcttttggtaagaaataaaagccgattaagcactggccgccccgcggctggtacccaatgcccgagtc

SEQ ID NO: 26601 - DNA, 120 bp, Artificial Sequence
  ENSG00000038382_89 (sequence is synthesized)
actgtggcagcattcgcactggtgtggggagtcctttcaactcaaggaggctgggtttctgggcaccctcgaagttttctggatgtctttttatctttctcgtgtgaactgcactacaaa

SEQ ID NO: 26602 - DNA, 120 bp, Artificial Sequence
  ENSG00000038382_90 (sequence is synthesized)
agagaccagcccgcttcccaagccagccagacacctgggtcttgagccataaactggcgtagttaagctttgcagcttccagtgtattttatttattcttttgttgggtttttgtttgtt

SEQ ID NO: 26603 - DNA, 120 bp, Artificial Sequence
  ENSG00000038382_91 (sequence is synthesized)
tcttcttgtaaaattgtacagaaactttttaaaagaaattggattcgaaactggatgtgtattcgtaacctcataatttttatttgtgtattgtttcttttattatttcagttaaatttt

SEQ ID NO: 26604 - DNA, 120 bp, Artificial Sequence
  ENSG00000038382_92 (sequence is synthesized)
tacattattttgcatgtatatttctttgtacagagaccttacatgtttacacagtatgatgtgatgtaaatattttattttgccatcagttattttaaaaaattaaacatatttgcctga

SEQ ID NO: 26605 - DNA, 120 bp, Artificial Sequence
  ENSG00000038382_93 (sequence is synthesized)
gaaaggcagaggattttcagactttggccaaaagccaaaggtgtccacttccatttctggtgaagctgcccatgcatttggaacagcggtgggcttcccctcgtggtgtctttgcattta

SEQ ID NO: 26606 - DNA, 120 bp, Artificial Sequence
  ENSG00000038382_94 (sequence is synthesized)
gagatctgagccatgctggcttttagcctgttgccagaatgctttgcattcagtatattcagttgcatcaatataagtccttgaatttgagttgaaaataaagtacaacttttcctgaaa

SEQ ID NO: 26607 - DNA, 120 bp, Artificial Sequence
  ENSG00000038382_95 (sequence is synthesized)
ttacattttcagttattgaaatagatgcacacagttagccagagggtaaaggaaatgttgaaaatttctcggtgcttgcctggtgagccctgcacggggtcatggtgccatggggcacac

SEQ ID NO: 26608 - DNA, 120 bp, Artificial Sequence
  ENSG00000038382_96 (sequence is synthesized)
ttgttttgcctttctcaccccgagcaccatacagggcacatgtctaactcatgcacatgaccttggataagttataaagcatcgagatgttgctgttttctcatttttaaaatggcaacg

SEQ ID NO: 26609 - DNA, 120 bp, Artificial Sequence
  ENSG00000038382_97 (sequence is synthesized)
atcatatcaactatattttatggtgatgggaatccaacaggatgatatgttttaaacactcagcacagtgcctagcagaaagcctgtgctcggtgaagggtgccttaaccattgtccgca

SEQ ID NO: 26610 - DNA, 120 bp, Artificial Sequence
  ENSG00000038382_98 (sequence is synthesized)
gcgctgggccgggccgtgggctggcgccggccgctgagcaacacgctgccagtctgtgtgcctgtccctgtcgcgtcccagtctgtgtctgagtgtctgtttagctggtcgctgcttttg

SEQ ID NO: 26611 - DNA, 120 bp, Artificial Sequence
  ENSG00000038382_99 (sequence is synthesized)
ctgccaagcgggtggctctagctgctgtggagggagaggtaggataggggttctgcacctttagcctccagtcggctccagtcaccatgcccaacggattgaagccagtggacacgctgg

SEQ ID NO: 26612 - DNA, 120 bp, Artificial Sequence
  ENSG00000038382_100 (sequence is synthesized)
actcgctgtcctctgtcagttcagcctactgcagcggcgggcagccgggcacctgcaagtactggatcctcgacctagactcgctctccgtctccagcaatgacgccagtccacccgcat

SEQ ID NO: 26613 - DNA, 120 bp, Artificial Sequence
  ENSG00000038382_101 (sequence is synthesized)
tttcttttgtcttggattatttctctccacatagagaaagctgatccttttcacttggttttctggcttctctcactttacctcaatctgattgatattttatttccttttttttttttt

SEQ ID NO: 26614 - DNA, 120 bp, Artificial Sequence
  ENSG00000038382_102 (sequence is synthesized)
atttgggatatctagaggttgtttgttggtgttctgggatcctgagggacactgccaactgttaacctttggcagatagtgactgttttacttcgattttattttcgtggtaaccgtttt

SEQ ID NO: 26615 - DNA, 120 bp, Artificial Sequence
  ENSG00000038382_103 (sequence is synthesized)
agcaagtacctttataaaagcaaattgtttgtaagtataggcgttcagaattgtaagtctaaaggtaacacaattgcagtctttttgtaggtagagaagaattgttcattgtcttcagtt

SEQ ID NO: 26616 - DNA, 120 bp, Artificial Sequence
  ENSG00000038382_104 (sequence is synthesized)
taacctcccaatctgtcctgaaatgttcaagtctgaattgtggtagggttttcatcttcagtgaaattatttcccaccctcaagtccactagagggtgctctggagtttatagacttagg

SEQ ID NO: 26617 - DNA, 120 bp, Artificial Sequence
  ENSG00000038382_105 (sequence is synthesized)
aaacttgctcttcttaaatcctgtatcatataactgcaggataagaaaacatttcataagtgaaatcatttatctccggtgtgcttaactagctttataaataaaataatcatatctatg

SEQ ID NO: 26618 - DNA, 120 bp, Artificial Sequence
  ENSG00000038382_106 (sequence is synthesized)
tgaacccccagcccacgaggtggtaaccagaatagttcttcctccatgaatattggtgtgtgtgcaaacactcttgtgtagcacatactgtgagctccgcatgtgagctctgaagtcact

SEQ ID NO: 26619 - DNA, 120 bp, Artificial Sequence
  ENSG00000038382_107 (sequence is synthesized)
tggccctgagtttaaattccagctcttttagtccttgctgcgtaaccttaggcaagtgacttagcctctctgttttgttttttcatttgtaaagtagaaataaaagtacctgtttgagtg

SEQ ID NO: 26620 - DNA, 120 bp, Artificial Sequence
  ENSG00000038382_108 (sequence is synthesized)
gggagggcaactgtcacttcacatttcactgagtaaggaaattgcagctctggctagtgcaggcggggagagacatctggtttccagggtgcctgaagaatttccttgagctccaattag

SEQ ID NO: 26621 - DNA, 120 bp, Artificial Sequence
  ENSG00000038382_109 (sequence is synthesized)
caattgaggaactcgtgaaaagcaagatggtgaggcctcccagagaaagtctgacttttggaagctgctctgtgttgctacttgcagatggatttgcccttgtctttgtattgctctggg

SEQ ID NO: 26622 - DNA, 120 bp, Artificial Sequence
  ENSG00000038382_110 (sequence is synthesized)
ctgcagaatgtggctgtggcttatggcacatctcaggagtccccatgaccaccctcgggttcactgatttgaaggactcagagaactcaggaaagccattattcccacatttgcagtgta

SEQ ID NO: 26623 - DNA, 120 bp, Artificial Sequence
  ENSG00000038382_111 (sequence is synthesized)
ttcccatgaaaggacacagatcaaaataggcaagggaagaactgcatagggcaggtctcagggagtgcctggttcaagctgccagccatgctctcccagtggagtcaggcagacagagga

SEQ ID NO: 26624 - DNA, 120 bp, Artificial Sequence
  ENSG00000038382_112 (sequence is synthesized)
ttgccaaccacagcagctcacccgagccttggtgttgagtgtctgtttgggctcagacgcatatggctgactgctctgtgtggctgaccttaggtagtctcctgcccctccagagatcaa

SEQ ID NO: 26625 - DNA, 120 bp, Artificial Sequence
  ENSG00000038382_113 (sequence is synthesized)
gacactgtcacattgctagcatagactatttgccttggtcccaggcccccaggtaaacagacattctcatcaagcagaacattccaaggacttacaagttccctcctagaagctgggggc

SEQ ID NO: 26626 - DNA, 120 bp, Artificial Sequence
  ENSG00000038382_114 (sequence is synthesized)
aaacctcactgcacataccctgcctgcagtcactgcaaatgtggtcagctccagtctgtctgaagatgtgccagggtcagtggtacccacagttagactctccgttttgttttgcaaccc

SEQ ID NO: 26627 - DNA, 120 bp, Artificial Sequence
  ENSG00000038382_115 (sequence is synthesized)
ctgagatctttcatttgggttcacaatgtgtgagagagaagggtttacattattatataagggcttcattttcttagtgatctctttgttgccagttggccaacgtgggttcatttgata

SEQ ID NO: 26628 - DNA, 120 bp, Artificial Sequence
  ENSG00000038382_116 (sequence is synthesized)
tttagagccaagaacagtaaaagaaaaaaaaaattaaactccataaattaataaaagaaaaatacattattccataggaggaaatctaaagaaaacagcttcagataacttagaaggcaa

SEQ ID NO: 26629 - DNA, 120 bp, Artificial Sequence
  ENSG00000038382_117 (sequence is synthesized)
ctttgagacccccaccagctacatcctggtcttagaaatgtgcgtacacacctggccttccctctgcccagccctctgcctccacctcagggggttttgttgttcctgtttgttctctaa

SEQ ID NO: 26630 - DNA, 120 bp, Artificial Sequence
  ENSG00000038382_118 (sequence is synthesized)
ccctggagcgctctgtctccgcgcctctcctgcctgttaatgtgcatgagcttccttgtcagctgtgccttcagcacatggtcactgactgtccgggcatttccagtccatcagcacctg

SEQ ID NO: 26631 - DNA, 120 bp, Artificial Sequence
  ENSG00000038382_119 (sequence is synthesized)
caccgtgcaacgaggattctacgtgacccagtggggcacgtctttcaggagtctccttaagtcctgagtctgcccttacactccaagtggcctgaaagatagaacaataagtcatttgtg

SEQ ID NO: 26632 - DNA, 120 bp, Artificial Sequence
  ENSG00000038382_120 (sequence is synthesized)
agtgacctctcggcaccttatgtaaagtcgggggagacaccggagctcctgttgctgggaggaggatgggggcctgcctggtgaaggcctctggctgcccaccatggggcaccagggccc

SEQ ID NO: 26633 - DNA, 120 bp, Artificial Sequence
  ENSG00000038382_121 (sequence is synthesized)
cccacgaccagcttctgagttggagcagggtgctttccgtgctcctagtactcaaaacactcatatccagctacccagctgaatctggatctggtctaggttggtctcatgtagaatgtg

SEQ ID NO: 26634 - DNA, 120 bp, Artificial Sequence
  ENSG00000038382_122 (sequence is synthesized)
catgggaaaagcaggaaaggagatgtgggtgagtcccgggcctgcgcaggccctgtgcctgtctgagaccctaacagcaacccttctgggtgaatgcacgccctcctcaccccatccagg

SEQ ID NO: 26635 - DNA, 120 bp, Artificial Sequence
  ENSG00000038382_123 (sequence is synthesized)
tgttcgtgtcttctaataagagcaagccgatcattaaccttctcaacgcagcgtcttttggtttcttccatttccaaccagcagaatatcttcttggaactttcttttttaacctctgcc

SEQ ID NO: 26636 - DNA, 120 bp, Artificial Sequence
  ENSG00000038382_124 (sequence is synthesized)
ttcctcacgcacctattttttggagggttccttttccctgctctctacctcctgtttaaattgaaacctgtacactttaagctttttgctcatcgcttggttttgctcttttatgcctta

SEQ ID NO: 26637 - DNA, 120 bp, Artificial Sequence
  ENSG00000038382_125 (sequence is synthesized)
aattatctttgcggcatttttgactcatctgctggggaagaccattccctcaagaaaacttccaacagcaactcaaagcaaactaagatgaaaaaatggggggaaagaatctgtccactg

SEQ ID NO: 26638 - DNA, 120 bp, Artificial Sequence
  ENSG00000038382_126 (sequence is synthesized)
ggaacgctttacgtcaccgtgttgctctggaagacagagactgctctgggcacctggcgaggcggctctgcagtgcaggctggggccggtccctgcggcctgctgggctctggcctcgtt

SEQ ID NO: 26639 - DNA, 120 bp, Artificial Sequence
  ENSG00000038382_127 (sequence is synthesized)
tggcccatcactcatgctgccgtctcaagcacaagggttgctgtggtgggttttccctctgtttcctgcttcctcactgtcctacccacctgtttcctacagggcagatggcctggcccg

SEQ ID NO: 26640 - DNA, 120 bp, Artificial Sequence
  ENSG00000038382_128 (sequence is synthesized)
gtgttaatgagttggaattaaaatcccttcttcaacatgagttacctgctttcccagtcacctggctgaagctggctatttggctagcaacagtacaggttggtgagagaagaccagagc

SEQ ID NO: 26641 - DNA, 120 bp, Artificial Sequence
  ENSG00000038382_129 (sequence is synthesized)
caggcctgaacagtatctggggtgtctgtgaacaggcaggtattgttgagtggagatgtaactgtacctgcagtgggtttaacataacagccaaatagtgtggatatcgaaaataagcgt

SEQ ID NO: 26642 - DNA, 120 bp, Artificial Sequence
  ENSG00000038382_130 (sequence is synthesized)
tactaacctgtaaactgggaataactggcatttgtgcagaatggctcccaggttcctgatgcccagcggcactctacagacattgccaggtctgtctgcaaatccacggtgcttggccgg

SEQ ID NO: 26643 - DNA, 120 bp, Artificial Sequence
  ENSG00000038382_131 (sequence is synthesized)
atgctgtttgaagtgtgcactttagagaagaaaaggggcggggtgtcatttcccacacacaagccgctagtccttatggaaactcttccaacgaaggtggatggaaacttttccaacgaa

SEQ ID NO: 26644 - DNA, 120 bp, Artificial Sequence
  ENSG00000038382_132 (sequence is synthesized)
ggtgatgtttttgaaacccagcttttatttggacaaagccttcttgaaaaatccttgaaaatgctttctgtttttaataaaggagatctctggaacatttccatgagctttcatagcact

SEQ ID NO: 26645 - DNA, 120 bp, Artificial Sequence
  ENSG00000038382_133 (sequence is synthesized)
ctgctcatatccatgcttgcggagaaatagactttacctcaaagaattgcatacttcaactaattgtttttgtggagcagacaagtttcagatgtatgtcacatattgcaaaaataagcc

SEQ ID NO: 26646 - DNA, 120 bp, Artificial Sequence
  ENSG00000038382_134 (sequence is synthesized)
tcctgaaccctaaaaatccccgctttatgtctctatgttagtggttaagaacatttcttaaagaatcagtgtcattgcttttcttgaggaccacataaaatgtttctatactcattgaaa

SEQ ID NO: 26647 - DNA, 120 bp, Artificial Sequence
  ENSG00000038382_135 (sequence is synthesized)
tctgcccgcaggaaagagtaagccagtctttcagaatctaccaggattcactggaaaagtgaagagaatgtcatttggacagacatgcttctgtgtgtgctttgaagtcacatggcaccc

SEQ ID NO: 26648 - DNA, 120 bp, Artificial Sequence
  ENSG00000038382_136 (sequence is synthesized)
accgcggctgttctcactaactcggctgcccagcgctctccgccgcccgttgcggcctctacctgggaccaggctaaccctcctgcgggccggcccacggcgctactaactactccttgc

SEQ ID NO: 26649 - DNA, 120 bp, Artificial Sequence
  ENSG00000038427_0 (sequence is synthesized)
gcatttgaacttgcaggcgagctgccccgagcctttctggggaagaactccaggcgtgcggacgcaacagccgagaacattaggtgttgtggacaggagctgggaccaagatcttcggcc

SEQ ID NO: 26650 - DNA, 120 bp, Artificial Sequence
  ENSG00000038427_1 (sequence is synthesized)
agccccgcatcctcccgcatcttccagcaccgtcccgcaccctccgcatccttccccgggccaccacgcttcctatgtgacccgcctgggcaacgccgaacccagtcgcgcagcgctgca

SEQ ID NO: 26651 - DNA, 120 bp, Artificial Sequence
  ENSG00000038427_2 (sequence is synthesized)
gtgaattttccccccaaactgcaataagccgccttccaaggccaagatgttcataaatataaagagcatcttatggatgtgttcaaccttaatagtaacccatgcgctacataaagtcaa

SEQ ID NO: 26652 - DNA, 120 bp, Artificial Sequence
  ENSG00000038427_3 (sequence is synthesized)
agtgggaaaaagcccaccggtgaggggctccctctctggaaaagtcagcctaccttgtcatttttcaacgatgcctactttgccacccagttacaacaccagtgaatttctccgcatcaa

SEQ ID NO: 26653 - DNA, 120 bp, Artificial Sequence
  ENSG00000038427_4 (sequence is synthesized)
atggtctaagattgaagtggacaaaaatggaaaagatttgaaagagactactgtccttgtggcccaaaatggaaatatcaagattggtcaggactacaaagggagagtgtctgtgcccac

SEQ ID NO: 26654 - DNA, 120 bp, Artificial Sequence
  ENSG00000038427_5 (sequence is synthesized)
acatcccgaggctgtgggcgatgcctccctcactgtggtcaagctgctggcaagtgatgcgggtctttaccgctgtgacgtcatgtacgggattgaagacacacaagacacggtgtcact

SEQ ID NO: 26655 - DNA, 120 bp, Artificial Sequence
  ENSG00000038427_6 (sequence is synthesized)
gactgtggatggggttgtgtttcactacagggcggcaaccagcaggtacacactgaattttgaggctgctcagaaggcttgtttggacgttggggcagtcatagcaactccagagcagct

SEQ ID NO: 26656 - DNA, 120 bp, Artificial Sequence
  ENSG00000038427_7 (sequence is synthesized)
ctttgctgcctatgaagatggatttgagcagtgtgacgcaggctggctggctgatcagactgtcagatatcccatccgggctcccagagtaggctgttatggagataagatgggaaaggc

SEQ ID NO: 26657 - DNA, 120 bp, Artificial Sequence
  ENSG00000038427_8 (sequence is synthesized)
aggagtcaggacttatggattccgttctccccaggaaacttacgatgtgtattgttatgtggatcatctggatggtgatgtgttccacctcactgtccccagtaaattcaccttcgagga

SEQ ID NO: 26658 - DNA, 120 bp, Artificial Sequence
  ENSG00000038427_9 (sequence is synthesized)
ggctgcaaaagagtgtgaaaaccaggatgccaggctggcaacagtgggggaactccaggcggcatggaggaacggctttgaccagtgcgattacgggtggctgtcggatgccagcgtgcg

SEQ ID NO: 26659 - DNA, 120 bp, Artificial Sequence
  ENSG00000038427_10 (sequence is synthesized)
ccaccctgtgactgtggccagggcccagtgtggaggtggtctacttggggtgagaaccctgtatcgttttgagaaccagacaggcttccctccccctgatagcagatttgatgcctactg

SEQ ID NO: 26660 - DNA, 120 bp, Artificial Sequence
  ENSG00000038427_11 (sequence is synthesized)
ctttaaacctaaagaggctacaaccatcgatttgagtatcctcgcagaaactgcatcacccagtttatccaaagaaccacaaatggtttctgatagaactacaccaatcatccctttagt

SEQ ID NO: 26661 - DNA, 120 bp, Artificial Sequence
  ENSG00000038427_12 (sequence is synthesized)
tgatgaattacctgtcattccaacagagttccctcccgtgggaaatattgtcagttttgaacagaaagccacagtccaacctcaggctatcacagatagtttagccaccaaattacccac

SEQ ID NO: 26662 - DNA, 120 bp, Artificial Sequence
  ENSG00000038427_13 (sequence is synthesized)
acctactggcagtaccaagaagccctgggatatggatgactactcaccttctgcttcaggacctcttggaaagctagacatatcagaaattaaggaagaagtgctccagagtacaactgg

SEQ ID NO: 26663 - DNA, 120 bp, Artificial Sequence
  ENSG00000038427_14 (sequence is synthesized)
cgtctctcattatgctacggattcatgggatggtgtcgtggaagataaacaaacacaagaatcggttacacagattgaacaaatagaagtgggtcctttggtaacatctatggaaatctt

SEQ ID NO: 26664 - DNA, 120 bp, Artificial Sequence
  ENSG00000038427_15 (sequence is synthesized)
aaagcacattccttccaaggaattccctgtaactgaaacaccattggtaactgcaagaatgatcctggaatccaaaactgaaaagaaaatggtaagcactgtttctgaattggtaaccac

SEQ ID NO: 26665 - DNA, 120 bp, Artificial Sequence
  ENSG00000038427_16 (sequence is synthesized)
aggtcactatggattcaccttgggagaagaggatgatgaagacagaacacttacagttggatctgatgagagcaccttgatctttgaccaaattcctgaagtcattacggtgtcaaagac

SEQ ID NO: 26666 - DNA, 120 bp, Artificial Sequence
  ENSG00000038427_17 (sequence is synthesized)
ttcagaagacaccatccacactcatttagaagacttggagtcagtctcagcatccacaactgtttcccctttaattatgcctgataataatggatcatccatggatgactgggaagagag

SEQ ID NO: 26667 - DNA, 120 bp, Artificial Sequence
  ENSG00000038427_18 (sequence is synthesized)
acaaactagtggtaggataacggaagagtttcttggcaaatatctgtctactacaccttttccatcacagcatcgtacagaaatagaattgtttccttattctggtgataaaatattagt

SEQ ID NO: 26668 - DNA, 120 bp, Artificial Sequence
  ENSG00000038427_19 (sequence is synthesized)
agagggaatttccacagttatttatccttctctacaaacagaaatgacacatagaagagaaagaacagaaacactaataccagagatgagaacagatacttatacagatgaaatacaaga

SEQ ID NO: 26669 - DNA, 120 bp, Artificial Sequence
  ENSG00000038427_20 (sequence is synthesized)
agagatcactaaaagtccatttatgggaaaaacagaagaagaagtcttctctgggatgaaactctctacatctctctcagagccaattcatgttacagagtcttctgtggaaatgaccaa

SEQ ID NO: 26670 - DNA, 120 bp, Artificial Sequence
  ENSG00000038427_21 (sequence is synthesized)
gtcttttgatttcccaacattgataacaaagttaagtgcagagccaacagaagtaagagatatggaggaagactttacagcaactccaggtactacaaaatatgatgaaaatattacaac

SEQ ID NO: 26671 - DNA, 120 bp, Artificial Sequence
  ENSG00000038427_22 (sequence is synthesized)
agtgcttttggcccatggtactttaagtgttgaagcagccactgtatcaaaatggtcatgggatgaagataatacaacatccaagcctttagagtctacagaaccttcagcctcttcaaa

SEQ ID NO: 26672 - DNA, 120 bp, Artificial Sequence
  ENSG00000038427_23 (sequence is synthesized)
attgccccctgccttactcacaactgtggggatgaatggaaaggataaagacatcccaagtttcactgaagatggagcagatgaatttactcttattccagatagtactcaaaagcagtt

SEQ ID NO: 26673 - DNA, 120 bp, Artificial Sequence
  ENSG00000038427_24 (sequence is synthesized)
agaggaggttactgatgaagacatagcagcccatggaaaattcacaattagatttcagccaactacatcaactggtattgcagaaaagtcaactttgagagattctacaactgaagaaaa

SEQ ID NO: 26674 - DNA, 120 bp, Artificial Sequence
  ENSG00000038427_25 (sequence is synthesized)
agttccacctatcacaagcactgaaggccaagtttatgcaaccatggaaggaagtgctttgggtgaagtagaagatgtggacctctctaagccagtatctactgttccccaatttgcaca

SEQ ID NO: 26675 - DNA, 120 bp, Artificial Sequence
  ENSG00000038427_26 (sequence is synthesized)
cacttcagaggtggaaggattagcatttgttagttatagtagcacccaagagcctactacttatgtagactcttcccataccattcctctttctgtaattcccaagacagactggggagt

SEQ ID NO: 26676 - DNA, 120 bp, Artificial Sequence
  ENSG00000038427_27 (sequence is synthesized)
gttagtaccttctgttccatcagaagatgaagttctaggtgaaccctctcaagacatacttgtcattgatcagactcgccttgaagcgactatttctccagaaactatgagaacaacaaa

SEQ ID NO: 26677 - DNA, 120 bp, Artificial Sequence
  ENSG00000038427_28 (sequence is synthesized)
aatcacagagggaacaactcaggaagaattcccttggaaagaacagactgcagagaaaccagttcctgctctcagttctacagcttggactcccaaggaggcagtaacaccactggatga

SEQ ID NO: 26678 - DNA, 120 bp, Artificial Sequence
  ENSG00000038427_29 (sequence is synthesized)
acaagagggcgatggatcagcatatacagtctctgaagatgaattgttgacaggttctgagagggtcccagttttagaaacaactccagttggaaaaattgatcacagtgtgtcttatcc

SEQ ID NO: 26679 - DNA, 120 bp, Artificial Sequence
  ENSG00000038427_30 (sequence is synthesized)
accaggtgctgtaactgagcacaaagtgaaaacagatgaagtggtaacactaacaccacgcattgggccaaaagtatctttaagtccagggcctgaacaaaaatatgaaacagaaggtag

SEQ ID NO: 26680 - DNA, 120 bp, Artificial Sequence
  ENSG00000038427_31 (sequence is synthesized)
tagtacaacaggatttacatcatctttgagtccttttagtacccacattacccagcttatggaagaaaccactactgagaaaacatccctagaggatattgatttaggctcaggattatt

SEQ ID NO: 26681 - DNA, 120 bp, Artificial Sequence
  ENSG00000038427_32 (sequence is synthesized)
tgaaaagcccaaagccacagaactcatagaattttcaacaatcaaagtcacagttccaagtgatattaccactgccttcagttcagtagacagacttcacacaacttcagcattcaagcc

SEQ ID NO: 26682 - DNA, 120 bp, Artificial Sequence
  ENSG00000038427_33 (sequence is synthesized)
atcttccgcgatcactaagaaaccacctctcatcgacagggaacctggtgaagaaacaaccagtgacatggtaatcattggagaatcaacatctcatgttcctcccactacccttgaaga

SEQ ID NO: 26683 - DNA, 120 bp, Artificial Sequence
  ENSG00000038427_34 (sequence is synthesized)
tattgtagccaaggaaacagaaaccgatattgatagagagtatttcacgacttcaagtcctcctgctacacagccaacaagaccacccactgtggaagacaaagaggcctttggacctca

SEQ ID NO: 26684 - DNA, 120 bp, Artificial Sequence
  ENSG00000038427_35 (sequence is synthesized)
ggcgctttctacgccacagcccccagcaagcacaaaatttcaccctgacattaatgtttatattattgaggtcagagaaaataagacaggtcgaatgagtgatttgagtgtaattggtca

SEQ ID NO: 26685 - DNA, 120 bp, Artificial Sequence
  ENSG00000038427_36 (sequence is synthesized)
tccaatagattcagaatctaaagaagatgaaccttgtagtgaagaaacagatccagtgcatgatctaatggctgaaattttacctgaattccctgacataattgaaatagacctatacca

SEQ ID NO: 26686 - DNA, 120 bp, Artificial Sequence
  ENSG00000038427_37 (sequence is synthesized)
cagtgaagaaaatgaagaagaagaagaagagtgtgcaaatgctactgatgtgacaaccaccccatctgtgcagtacataaatgggaagcatctcgttaccactgtgcccaaggacccaga

SEQ ID NO: 26687 - DNA, 120 bp, Artificial Sequence
  ENSG00000038427_38 (sequence is synthesized)
agctgcagaagctaggcgtggccagtttgaaagtgttgcaccttctcagaatttctcggacagctctgaaagtgatactcatccatttgtaatagccaaaacggaattgtctactgctgt

SEQ ID NO: 26688 - DNA, 120 bp, Artificial Sequence
  ENSG00000038427_39 (sequence is synthesized)
gcaacctaatgaatctacagaaacaactgagtctcttgaagttacatggaagcctgagacttaccctgaaacatcagaacatttttcaggtggtgagcctgatgttttccccacagtccc

SEQ ID NO: 26689 - DNA, 120 bp, Artificial Sequence
  ENSG00000038427_40 (sequence is synthesized)
attccatgaggaatttgaaagtggaacagccaaaaaaggggcagaatcagtcacagagagagatactgaagttggtcatcaggcacatgaacatactgaacctgtatctctgtttcctga

SEQ ID NO: 26690 - DNA, 120 bp, Artificial Sequence
  ENSG00000038427_41 (sequence is synthesized)
agagtcttcaggagagattgccattgaccaagaatctcagaaaatagcctttgcaagggctacagaagtaacatttggtgaagaggtagaaaaaagtacttctgtcacatacactcccac

SEQ ID NO: 26691 - DNA, 120 bp, Artificial Sequence
  ENSG00000038427_42 (sequence is synthesized)
tatagttccaagttctgcatcagcatatgtttcagaggaagaagcagttaccctaataggaaatccttggccagatgacctgttgtctaccaaagaaagctgggtagaagcaactcctag

SEQ ID NO: 26692 - DNA, 120 bp, Artificial Sequence
  ENSG00000038427_43 (sequence is synthesized)
acaagttgtagagctctcagggagttcttcgattccaattacagaaggctctggagaagcagaagaagatgaagatacaatgttcaccatggtaactgatttatcacagagaaatactac

SEQ ID NO: 26693 - DNA, 120 bp, Artificial Sequence
  ENSG00000038427_44 (sequence is synthesized)
tgatacactcattactttagacactagcaggataatcacagaaagcttttttgaggttcctgcaaccaccatttatccagtttctgaacaaccttctgcaaaagtggtgcctaccaagtt

SEQ ID NO: 26694 - DNA, 120 bp, Artificial Sequence
  ENSG00000038427_45 (sequence is synthesized)
tgtaagtgaaacagacacttctgagtggatttccagtaccactgttgaggaaaagaaaaggaaggaggaggagggaactacaggtacggcttctacatttgaggtatattcatctacaca

SEQ ID NO: 26695 - DNA, 120 bp, Artificial Sequence
  ENSG00000038427_46 (sequence is synthesized)
gagatcggatcaattaattttaccctttgaattagaaagtccaaatgtagctacatctagtgattcaggtaccaggaaaagttttatgtccttgacaacaccaacacagtctgaaaggga

SEQ ID NO: 26696 - DNA, 120 bp, Artificial Sequence
  ENSG00000038427_47 (sequence is synthesized)
aatgacagattctactcctgtctttacagaaacaaatacattagaaaatttgggggcacagaccactgagcacagcagtatccatcaacctggggttcaggaagggctgaccactctccc

SEQ ID NO: 26697 - DNA, 120 bp, Artificial Sequence
  ENSG00000038427_48 (sequence is synthesized)
acgtagtcctgcctctgtctttatggagcagggctctggagaagctgctgccgacccagaaaccaccactgtttcttcattttcattaaacgtagagtatgcaattcaagccgaaaagga

SEQ ID NO: 26698 - DNA, 120 bp, Artificial Sequence
  ENSG00000038427_49 (sequence is synthesized)
agtagctggcactttgtctccgcatgtggaaactacattctccactgagccaacaggactggttttgagtacagtaatggacagagtagttgctgaaaatataacccaaacatccaggga

SEQ ID NO: 26699 - DNA, 120 bp, Artificial Sequence
  ENSG00000038427_50 (sequence is synthesized)
aatagtgatttcagagcgattaggagaaccaaattatggggcagaaataaggggcttttccacaggttttcctttggaggaagatttcagtggtgactttagagaatactcaacagtgtc

SEQ ID NO: 26700 - DNA, 120 bp, Artificial Sequence
  ENSG00000038427_51 (sequence is synthesized)
cagtcacatatctgactcagaaggacccagtagcaccatggtcagcacttcagccttcccctgggaagagtttacatcctcagctgagggctcaggtgagcaactggtcacagtcagcag

SEQ ID NO: 26701 - DNA, 120 bp, Artificial Sequence
  ENSG00000038427_52 (sequence is synthesized)
ctctgttgttccagtgcttcccagtgctgtgcaaaagttttctggtacagcttcctccattatcgacgaaggattgggagaagtgggtactgtcaatgaaattgatagaagatccaccat

SEQ ID NO: 26702 - DNA, 120 bp, Artificial Sequence
  ENSG00000038427_53 (sequence is synthesized)
tttaccaacagcagaagtggaaggtacgaaagctccagtagagaaggaggaagtaaaggtcagtggcacagtttcaacaaactttccccaaactatagagccagccaaattatggtctag

SEQ ID NO: 26703 - DNA, 120 bp, Artificial Sequence
  ENSG00000038427_54 (sequence is synthesized)
gcaagaagtcaaccctgtaagacaagaaattgaaagtgaaacaacatcagaggaacaaattcaagaagaaaagtcatttgaatcccctcaaaactctcctgcaacagaacaaacaatctt

SEQ ID NO: 26704 - DNA, 120 bp, Artificial Sequence
  ENSG00000038427_55 (sequence is synthesized)
tgattcacagacatttactgaaactgaactcaaaaccacagattattctgtactaacaacaaagaaaacttacagtgatgataaagaaatgaaggaggaagacacttctttagttaacat

SEQ ID NO: 26705 - DNA, 120 bp, Artificial Sequence
  ENSG00000038427_56 (sequence is synthesized)
gtctactccagatccagatgcaaatggcttggaatcttacacaactctccctgaagctactgaaaagtcacattttttcttagctactgcattagtaactgaatctataccagctgaaca

SEQ ID NO: 26706 - DNA, 120 bp, Artificial Sequence
  ENSG00000038427_57 (sequence is synthesized)
tgtagtcacagattcaccaatcaaaaaggaagaaagtacaaaacattttccgaaaggcatgagaccaacaattcaagagtcagatactgagctcttattctctggactgggatcaggaga

SEQ ID NO: 26707 - DNA, 120 bp, Artificial Sequence
  ENSG00000038427_58 (sequence is synthesized)
agaagttttacctactctaccaacagagtcagtgaattttactgaagtggaacaaatcaataacacattatatccccacacttctcaagtggaaagtacctcaagtgacaaaattgaaga

SEQ ID NO: 26708 - DNA, 120 bp, Artificial Sequence
  ENSG00000038427_59 (sequence is synthesized)
ctttaacagaatggaaaatgtggcaaaagaagttggaccactcgtatctcaaacagacatctttgaaggtagtgggtcagtaaccagcacaacattaatagaaattttaagtgacactgg

SEQ ID NO: 26709 - DNA, 120 bp, Artificial Sequence
  ENSG00000038427_60 (sequence is synthesized)
agcagaaggacccacggtggcacctctccctttctccacggacatcggacatcctcaaaatcagactgtcaggtgggcagaagaaatccagactagtagaccacaaaccataactgaaca

SEQ ID NO: 26710 - DNA, 120 bp, Artificial Sequence
  ENSG00000038427_61 (sequence is synthesized)
agactctaacaagaattcttcaacagcagaaattaacgaaacaacaacctcatctactgattttctggctagagcttatggttttgaaatggccaaagaatttgttacatcagcaccaaa

SEQ ID NO: 26711 - DNA, 120 bp, Artificial Sequence
  ENSG00000038427_62 (sequence is synthesized)
accatctgacttgtattatgaaccttctggagaaggatctggagaagtggatattgttgattcatttcacacttctgcaactactcaggcaaccagacaagaaagcagcaccacatttgt

SEQ ID NO: 26712 - DNA, 120 bp, Artificial Sequence
  ENSG00000038427_63 (sequence is synthesized)
ttctgatgggtccctggaaaaacatcctgaggtgccaagcgctaaagctgttactgctgatggattcccaacagtttcagtgatgctgcctcttcattcagagcagaacaaaagctcccc

SEQ ID NO: 26713 - DNA, 120 bp, Artificial Sequence
  ENSG00000038427_64 (sequence is synthesized)
tgatccaactagcacactgtcaaatacagtgtcatatgagaggtccacagacggtagtttccaagaccgtttcagggaattcgaggattccaccttaaaacctaacagaaaaaaacccac

SEQ ID NO: 26714 - DNA, 120 bp, Artificial Sequence
  ENSG00000038427_65 (sequence is synthesized)
tgaaaatattatcatagacctggacaaagaggacaaggatttaatattgacaattacagagagtaccatccttgaaattctacctgagctgacatcggataaaaatactatcatagatat

SEQ ID NO: 26715 - DNA, 120 bp, Artificial Sequence
  ENSG00000038427_66 (sequence is synthesized)
tgatcatactaaacctgtgtatgaagacattcttggaatgcaaacagatatagatacagaggtaccatcagaaccacatgacagtaatgatgaaagtaatgatgacagcactcaagttca

SEQ ID NO: 26716 - DNA, 120 bp, Artificial Sequence
  ENSG00000038427_67 (sequence is synthesized)
agagatctatgaggcagctgtcaacctttctttaactgaggaaacatttgagggctctgctgatgttctggctagctacactcaggcaacacatgatgaatcaatgacttatgaagatag

SEQ ID NO: 26717 - DNA, 120 bp, Artificial Sequence
  ENSG00000038427_68 (sequence is synthesized)
aagccaactagatcacatgggctttcacttcacaactgggatccctgctcctagcacagaaacagaattagacgttttacttcccacggcaacatccctgccaattcctcgtaagtctgc

SEQ ID NO: 26718 - DNA, 120 bp, Artificial Sequence
  ENSG00000038427_69 (sequence is synthesized)
cacagttattccagagattgaaggaataaaagctgaagcaaaagccctggatgacatgtttgaatcaagcactttgtctgatggtcaagctattgcagaccaaagtgaaataataccaac

SEQ ID NO: 26719 - DNA, 120 bp, Artificial Sequence
  ENSG00000038427_70 (sequence is synthesized)
attgggccaatttgaaaggactcaggaggagtatgaagacaaaaaacatgctggtccttcttttcagccagaattctcttcaggagctgaggaggcattagtagaccatactccctatct

SEQ ID NO: 26720 - DNA, 120 bp, Artificial Sequence
  ENSG00000038427_71 (sequence is synthesized)
aagtattgctactacccaccttatggatcagagtgtaacagaggtgcctgatgtgatggaaggatccaatcccccatattacactgatacaacattagcagtttcaacatttgcgaagtt

SEQ ID NO: 26721 - DNA, 120 bp, Artificial Sequence
  ENSG00000038427_72 (sequence is synthesized)
gtcttctcagacaccatcatctcccctcactatctactcaggcagtgaagcctctggacacacagagatcccccagcccagtgctctgccaggaatagacgtcggctcatctgtaatgtc

SEQ ID NO: 26722 - DNA, 120 bp, Artificial Sequence
  ENSG00000038427_73 (sequence is synthesized)
cccacaggattcttttaaggaaattcatgtaaatattgaagcgactttcaaaccatcaagtgaggaataccttcacataactgagcctccctctttatctcctgacacaaaattagaacc

SEQ ID NO: 26723 - DNA, 120 bp, Artificial Sequence
  ENSG00000038427_74 (sequence is synthesized)
ttcagaagatgatggtaaacctgagttattagaagaaatggaagcttctcccacagaacttattgctgtggaaggaactgagattctccaagatttccaaaacaaaaccgatggtcaagt

SEQ ID NO: 26724 - DNA, 120 bp, Artificial Sequence
  ENSG00000038427_75 (sequence is synthesized)
ttctggagaagcaatcaagatgtttcccaccattaaaacacctgaggctggaactgttattacaactgccgatgaaattgaattagaaggtgctacacagtggccacactctacttctgc

SEQ ID NO: 26725 - DNA, 120 bp, Artificial Sequence
  ENSG00000038427_76 (sequence is synthesized)
ttctgccacctatggggtcgaggcaggtgtggtgccttggctaagtccacagacttctgagaggcccacgctttcttcttctccagaaataaaccctgaaactcaagcagctttaatcag

SEQ ID NO: 26726 - DNA, 120 bp, Artificial Sequence
  ENSG00000038427_77 (sequence is synthesized)
agggcaggattccacgatagcagcatcagaacagcaagtggcagcgagaattcttgattccaatgatcaggcaacagtaaaccctgtggaatttaatactgaggttgcaacaccaccatt

SEQ ID NO: 26727 - DNA, 120 bp, Artificial Sequence
  ENSG00000038427_78 (sequence is synthesized)
ttcccttctggagacttctaatgaaacagatttcctgattggcattaatgaagagtcagtggaaggcacggcaatctatttaccaggacctgatcgctgcaaaatgaacccgtgccttaa

SEQ ID NO: 26728 - DNA, 120 bp, Artificial Sequence
  ENSG00000038427_79 (sequence is synthesized)
cggaggcacctgttatcctactgaaacttcctacgtatgcacctgtgtgccaggatacagcggagaccagtgtgaacttgattttgatgaatgtcactctaatccctgtcgtaatggagc

SEQ ID NO: 26729 - DNA, 120 bp, Artificial Sequence
  ENSG00000038427_80 (sequence is synthesized)
cacttgtgttgatggttttaacacattcaggtgcctctgccttccaagttatgttggtgcactttgtgagcaagataccgagacatgtgactatggctggcacaaattccaagggcagtg

SEQ ID NO: 26730 - DNA, 120 bp, Artificial Sequence
  ENSG00000038427_81 (sequence is synthesized)
ctacaaatactttgcccatcgacgcacatgggatgcagctgaacgggaatgccgtctgcagggtgcccatctcacaagcatcctgtctcacgaagaacaaatgtttgttaatcgtgtggg

SEQ ID NO: 26731 - DNA, 120 bp, Artificial Sequence
  ENSG00000038427_82 (sequence is synthesized)
ccatgattatcagtggataggcctcaatgacaagatgtttgagcatgacttccgttggactgatggcagcacactgcaatacgagaattggagacccaaccagccagacagcttcttttc

SEQ ID NO: 26732 - DNA, 120 bp, Artificial Sequence
  ENSG00000038427_83 (sequence is synthesized)
tgctggagaagactgtgttgtaatcatttggcatgagaatggccagtggaatgatgttccctgcaattaccatctcacctatacgtgcaagaaaggaacagtcgcttgcggccagccccc

SEQ ID NO: 26733 - DNA, 120 bp, Artificial Sequence
  ENSG00000038427_84 (sequence is synthesized)
tgttgtagaaaatgccaagacctttggaaagatgaaacctcgttatgaaatcaactccctgattagataccactgcaaagatggtttcattcaacgtcaccttccaactatccggtgctt

SEQ ID NO: 26734 - DNA, 120 bp, Artificial Sequence
  ENSG00000038427_85 (sequence is synthesized)
aggaaatggaagatgggctatacctaaaattacctgcatgaacccatctgcataccaaaggacttattctatgaaatactttaaaaattcctcatcagcaaaggacaattcaataaatac

SEQ ID NO: 26735 - DNA, 120 bp, Artificial Sequence
  ENSG00000038427_86 (sequence is synthesized)
atccaaacatgatcatcgttggagccggaggtggcaggagtcgaggcgctgatccctaaaatggcgaacatgtgttttcatcatttcagccaaagtcctaacttcctgtgcctttcctat

SEQ ID NO: 26736 - DNA, 120 bp, Artificial Sequence
  ENSG00000038427_87 (sequence is synthesized)
cacctcgagaagtaattatcagttggtttggatttttggaccaccgttcagtcattttgggttgccgtgctcccaaaacattttaaatgaaagtattggcattcaaaaagacagcagaca

SEQ ID NO: 26737 - DNA, 120 bp, Artificial Sequence
  ENSG00000038427_88 (sequence is synthesized)
aaatgaaagaaaatgagagcagaaagtaagcatttccagcctatctaatttctttagttttctatttgcctccagtgcagtccatttcctaatgtataccagcctactgtactatttaaa

SEQ ID NO: 26738 - DNA, 120 bp, Artificial Sequence
  ENSG00000038427_89 (sequence is synthesized)
atgctcaatttcagcaccgatggccatgtaaataagatgatttaatgttgattttaatcctgtatataaaataaaaagtcacaatgagtttgggcatatttaatgatgattatggagcct

SEQ ID NO: 26739 - DNA, 120 bp, Artificial Sequence
  ENSG00000038427_90 (sequence is synthesized)
tagaggtctttaatcattggttcggctgcttttatgtagtttaggctggaaatggtttcacttgctctttgactgtcagcaagactgaagatggcttttcctggacagctagaaaacaca

SEQ ID NO: 26740 - DNA, 120 bp, Artificial Sequence
  ENSG00000038427_91 (sequence is synthesized)
aaatcttgtaggtcattgcacctatctcagccataggtgcagtttgcttctacatgatgctaaaggctgcgaatgggatcctgatggaactaaggactccaatgtcgaactcttctttgc

SEQ ID NO: 26741 - DNA, 120 bp, Artificial Sequence
  ENSG00000038427_92 (sequence is synthesized)
tgcattcctttttcttcacttacaagaaaggcctgaatggaggacttttctgtaaccaggaacattttttaggggtcaaagtgctaataattaactcaaccaggtctactttttaatggc

SEQ ID NO: 26742 - DNA, 120 bp, Artificial Sequence
  ENSG00000038427_93 (sequence is synthesized)
ttaatggctttcataacactaactcataaggttaccgatcaatgcatttcatacggatatagacctagggctctggagggtgggggattgttaaaacacatgcaaaaaaaaaaaaaaaaa

SEQ ID NO: 26743 - DNA, 120 bp, Artificial Sequence
  ENSG00000038427_94 (sequence is synthesized)
gaaattttgtatatataaccattttaatcttttataaagttttgaatgttcatgtatgaatgctgcagctgtgaagcatacataaataaatgaagtaagccatactgatttaatttattg

SEQ ID NO: 26744 - DNA, 120 bp, Artificial Sequence
  ENSG00000038427_95 (sequence is synthesized)
gatgttattttccctaagacctgaaaatgaacatagtatgctagttatttttcagtgttagccttttactttcctcacacaatttggaatcatataatataggtactttgtccctgatta

SEQ ID NO: 26745 - DNA, 120 bp, Artificial Sequence
  ENSG00000038427_96 (sequence is synthesized)
aataatgtgacggatagaatgcatcaagtgtttattatgaaaagagtggaaaagtatatagcttttagcaaaaggtgtttgcccattctaagaaatgagcgaatatatagaaatagtgtg

SEQ ID NO: 26746 - DNA, 120 bp, Artificial Sequence
  ENSG00000038427_97 (sequence is synthesized)
ggcatttcttcctgttaggtggagtgtatgtgttgacatttctccccatctcttcccactctgttttctccccattatttgaataaagtgactgctgaagatgactttgaatccttatcc

SEQ ID NO: 26747 - DNA, 120 bp, Artificial Sequence
  ENSG00000038427_98 (sequence is synthesized)
acttaatttaatgtttaaagaaaaacctgtaatggaaagtaagactccttccctaatttcagtttagagcaacttgaagaagagtagacaaaaaataaaatgcacatagaaaaagagaaa

SEQ ID NO: 26748 - DNA, 120 bp, Artificial Sequence
  ENSG00000038427_99 (sequence is synthesized)
aagggcacaaagggattggcccaatattgattctttttttataaaacctcctttggcttagaaggaatgactctagctacaataatacacagtatgtttaagcaggttcccttggttgtt

SEQ ID NO: 26749 - DNA, 120 bp, Artificial Sequence
  ENSG00000038427_100 (sequence is synthesized)
gcattaaatgtaatccacctttaggtattttagagcacagaacaacactgtgttgatctagtaggtttctatttttcctttctctttacaatgcacataatactttcctgtatttatatc

SEQ ID NO: 26750 - DNA, 120 bp, Artificial Sequence
  ENSG00000038427_101 (sequence is synthesized)
ataacgtgtatagtgtaaaatgtgaatgactttttttgtgaatgaaaatctaaaatctttgtaactttttatatctgcttttgtttcaccaaagaaacctaaaatccttcttttactaca

SEQ ID NO: 26751 - DNA, 120 bp, Artificial Sequence
  ENSG00000038427_102 (sequence is synthesized)
ccgtaagtggtcctttagaaagaatggactaccgtgctataacaactactagacaccttcattttacggctgtggtatcggcagtttagggtatggagcaagtaatattgtgtgttttct

SEQ ID NO: 26752 - DNA, 120 bp, Artificial Sequence
  ENSG00000038427_103 (sequence is synthesized)
ttttttctttctttccttccatgtagcatctgcataccaaaggacttattctatgaaatactttaaaaattcctcatcagcaaaggacaattcaataaatacatccaaacatgatcatcg

SEQ ID NO: 26753 - DNA, 120 bp, Artificial Sequence
  ENSG00000038427_104 (sequence is synthesized)
tgttcaactagccgttggagtggattccatgtcttgcagtgtgtgcacggaatggaaacagttcagtgattttcaaaagcaagcaaactgaacagcagtgatatggttaaaaccacagga

SEQ ID NO: 26754 - DNA, 120 bp, Artificial Sequence
  ENSG00000038427_105 (sequence is synthesized)
attttggcaaatggatttttagaggggtgaggaaatatcaggttaagctgtaactgtgctctgttgtgtccagagccacagagcatttttctaagtattttatattaattgcagtcctta

SEQ ID NO: 26755 - DNA, 120 bp, Artificial Sequence
  ENSG00000038427_106 (sequence is synthesized)
agttttgcaatttgtttattggtgttacaatgccaaggccaactgaggctgagttaaatccttaagattgttgattttgtcttcggtatcactctgtttctttgagatggcaaagaattt

SEQ ID NO: 26756 - DNA, 120 bp, Artificial Sequence
  ENSG00000038427_107 (sequence is synthesized)
aaatttcagtaattacaggtgagtatttgaagctgacatggatactcaaaatgttcaagtcataactaaaaatgaaccatactatcaataaaaatctccatttatgtcaagtaatggaaa

SEQ ID NO: 26757 - DNA, 120 bp, Artificial Sequence
  ENSG00000038427_108 (sequence is synthesized)
tgaagctgcggagcgcttttggagcctgtgaatgaaccctcctcctctccctcctccttcttctcgctgagtctcctcctcggctctgacggtacagtgatataatgatgatgggtgtca

SEQ ID NO: 26758 - DNA, 120 bp, Artificial Sequence
  ENSG00000038427_109 (sequence is synthesized)
ctgatgaaacagcaaaagctagatattgtttcttctatacatagaaggaaatagcttcttgcaacaggaacaattcaggagaaaacagttgttttctcccctttagatgataggttggga

SEQ ID NO: 26759 - DNA, 120 bp, Artificial Sequence
  ENSG00000038427_110 (sequence is synthesized)
agcagggttggctccgtcataatgatttctcctaaacacttctcaggtttggcctatgcatgtgtgttatagattggggatagtttgaaaactcattctgtagtattattcctatgggca

SEQ ID NO: 26760 - DNA, 120 bp, Artificial Sequence
  ENSG00000038427_111 (sequence is synthesized)
gggtggtgagtagtgtgtaaattctttgtcttctttatgggtcagtatatccacaggcacattttcatactgctttgtcactgaaagtaaggcagctgcagtggcaggaccctgttctag

SEQ ID NO: 26761 - DNA, 120 bp, Artificial Sequence
  ENSG00000038427_112 (sequence is synthesized)
gacagttgaatgcctctatgatgagacctcagaatttcctctttcctagtgcccaagacaaggagctttgctgatgtatttctgatagcagaaaaggccattgagcttagtggttggtac

SEQ ID NO: 26762 - DNA, 120 bp, Artificial Sequence
  ENSG00000038427_113 (sequence is synthesized)
catatggcaatttacaatctgggaaatattctgatgatacatacttttcgaggaatgctagttagaatatttagataggactcctgaactttctttgagaagatgttgatgacaagaact

SEQ ID NO: 26763 - DNA, 120 bp, Artificial Sequence
  ENSG00000038427_114 (sequence is synthesized)
aaaatcagcctaatctgggtcacatcccaggaaggataaaggtctataggtgtggaaggctctttctggtcctttcagtgagctatttccaatagagcccgcctatccagagcttcccac

SEQ ID NO: 26764 - DNA, 120 bp, Artificial Sequence
  ENSG00000038427_115 (sequence is synthesized)
tcttgtgcataggatgtggttaagctcatgtctcagtgccacagtaggtagaggatgccattgcaatgtaaaagggctataaataaagctctcttgtttttccataaaacagtctgctct

SEQ ID NO: 26765 - DNA, 120 bp, Artificial Sequence
  ENSG00000038427_116 (sequence is synthesized)
agaacagattataaaggggccagaaggaatctcttctcattttcttattgaatagagagtgtataaattattcccttacataaaggacaattactttttctatatagatcatatatagaa

SEQ ID NO: 26766 - DNA, 120 bp, Artificial Sequence
  ENSG00000038427_117 (sequence is synthesized)
atagagctatagaaaaagtaattaattctatatgatatggcctcaatttttaatttttaaattgtttttatatgaaatagtcttaattttactctttttgcagttcacacaaagatgaat

SEQ ID NO: 26767 - DNA, 120 bp, Artificial Sequence
  ENSG00000038427_118 (sequence is synthesized)
tcctgcacttcaagattacattgtatatgtgattccttgcttcattttaaggactatgttgttttcttaaatgtgttgatgagtctttataacctgttttaataatgttaaattgaattc

SEQ ID NO: 26768 - DNA, 120 bp, Artificial Sequence
  ENSG00000038427_119 (sequence is synthesized)
atttttcttattgttaatacaaaaacagtaaatttgaagactgagaaccatataagagggtgattgcacttattatgaaaagatttgaatccttctttgtgtgtgtgggtgtgaccagcc

SEQ ID NO: 26769 - DNA, 120 bp, Artificial Sequence
  ENSG00000038532_0 (sequence is synthesized)
agtgctgggctgtgggccggggaggaaggcggctcgcggttcctccaccgcctccgccgccgcatcctccgcttgtgctaccgccgcgggcgctgggccgctctgctggtccggcatgag

SEQ ID NO: 26770 - DNA, 120 bp, Artificial Sequence
  ENSG00000038532_1 (sequence is synthesized)
accgtgagacgagagacgggtcggggccgccgacatgtttggccgctcgcggagctgggtgggcgggggccatggcaagacttcccgcaacatccactccttggaccacctcaagtatct

SEQ ID NO: 26771 - DNA, 120 bp, Artificial Sequence
  ENSG00000038532_2 (sequence is synthesized)
gtaccacgttttgaccaaaaacaccacagtcacagaacagaaccggaacctgctagtggagaccatccgttccatcactgagatcctgatctggggagatcaaaatgacagctctgtatt

SEQ ID NO: 26772 - DNA, 120 bp, Artificial Sequence
  ENSG00000038532_3 (sequence is synthesized)
tgacttcttcctggagaagaatatgtttgttttcttcttgaacatcttgcggcaaaagtcgggccgttacgtgtgcgttcagctgctgcagaccttgaacatcctctttgagaacatcag

SEQ ID NO: 26773 - DNA, 120 bp, Artificial Sequence
  ENSG00000038532_4 (sequence is synthesized)
tcacgagacctcactttattatttgctctcaaataactacgtaaattctatcatcgttcataaatttgacttttctgatgaggagattatggcctattatatatcgttcctgaaaacact

SEQ ID NO: 26774 - DNA, 120 bp, Artificial Sequence
  ENSG00000038532_5 (sequence is synthesized)
ttcgttaaaactcaacaaccacactgtccatttcttttataatgagcacaccaatgactttgccctgtacacagaagccatcaagtttttcaaccaccctgaaagcatggttagaattgc

SEQ ID NO: 26775 - DNA, 120 bp, Artificial Sequence
  ENSG00000038532_6 (sequence is synthesized)
tgtaagaaccataactttgaatgtctataaagtgtcattggataaccaggccatgctgcactacatccgagataaaactgctgttccttacttctccaatttggtctggttcattgggag

SEQ ID NO: 26776 - DNA, 120 bp, Artificial Sequence
  ENSG00000038532_7 (sequence is synthesized)
ccatgtgatcgaactcgatgactgcgtgcagactgatgaggagcatcggaatcggggtaaactgagtgatctggtggcagagcacctagaccacctgcactatctcaatgacatcctgat

SEQ ID NO: 26777 - DNA, 120 bp, Artificial Sequence
  ENSG00000038532_8 (sequence is synthesized)
catcaactgtgagttcctcaacgatgtgctcactgaccacctgctcaacaggctcttcctgcccctctacgtgtactcactggagaaccaggacaagggaggagaacggccgaaaattag

SEQ ID NO: 26778 - DNA, 120 bp, Artificial Sequence
  ENSG00000038532_9 (sequence is synthesized)
cctgccggtgtctctttatcttctgtcacaggtcttcttaattatacatcatgcaccgctggtgaactcgttagctgaagtcattctgaatggtgatctgtctgagatgtacgctaagac

SEQ ID NO: 26779 - DNA, 120 bp, Artificial Sequence
  ENSG00000038532_10 (sequence is synthesized)
tgaacaggatattcagagaagttctgccaagcccagcattcggtgcttcattaaacccaccgagacactcgagcggtcccttgagatgaacaagcacaagggcaagaggcgggtgcaaaa

SEQ ID NO: 26780 - DNA, 120 bp, Artificial Sequence
  ENSG00000038532_11 (sequence is synthesized)
gagacccaactacaaaaacgttggggaagaagaagatgaggagaaagggcccaccgaggatgcccaagaagacgccgagaaggctaaaggtacagagggtggttcaaaaggcatcaagac

SEQ ID NO: 26781 - DNA, 120 bp, Artificial Sequence
  ENSG00000038532_12 (sequence is synthesized)
gagtggggagagtgaagagatcgagatggtgatcatggagcgtagcaagctctcagagctggccgccagcacctccgtgcaggagcagaacaccacggacgaggagaaaagcgccgccgc

SEQ ID NO: 26782 - DNA, 120 bp, Artificial Sequence
  ENSG00000038532_13 (sequence is synthesized)
cacctgctctgagagcacgcaatggagcagacccttcctggatatggtgtaccacgcgctggacagcccggatgatgattaccatgccctgttcgtgctctgcctcctctatgccatgtc

SEQ ID NO: 26783 - DNA, 120 bp, Artificial Sequence
  ENSG00000038532_14 (sequence is synthesized)
tcataataaaggcatggatcctgaaaaattagagcgaatccagctccccgtgccaaatgcggccgagaagaccacctacaaccacccgctagctgaaagactcatcaggatcatgaacaa

SEQ ID NO: 26784 - DNA, 120 bp, Artificial Sequence
  ENSG00000038532_15 (sequence is synthesized)
cgctgcccagccagatgggaagatccggctggcgacgctggagctgagctgcctgcttctgaagcagcaagtcctgatgagtgctggctgcatcatgaaggacgtgcacctggcctgcct

SEQ ID NO: 26785 - DNA, 120 bp, Artificial Sequence
  ENSG00000038532_16 (sequence is synthesized)
ggagggtgcgagagaagaaagtgttcaccttgtacgacatttttataagggagaagacatttttttggacatgtttgaagatgagtataggagcatgacaatgaagcccatgaacgtgga

SEQ ID NO: 26786 - DNA, 120 bp, Artificial Sequence
  ENSG00000038532_17 (sequence is synthesized)
atatctcatgatggacgcctccatcctgctgcccccaacaggcacgccactgacgggcattgacttcgtgaagcggctgccgtgtggcgatgtggagaagacccggcgggccatccgggt

SEQ ID NO: 26787 - DNA, 120 bp, Artificial Sequence
  ENSG00000038532_18 (sequence is synthesized)
gttcttcatgctgcgttccctgtcactgcaattgcgaggggagcctgagacacagttgccgctgactcgggaggaggacctgatcaagactgatgatgtcctggatctgaataacagcga

SEQ ID NO: 26788 - DNA, 120 bp, Artificial Sequence
  ENSG00000038532_19 (sequence is synthesized)
cttgattgcatgtacagtgatcaccaaggatggcggcatggtccagcgattcctggctgtggatatttaccagatgagtttggtggagcctgatgtgtccaggcttggctggggagtggt

SEQ ID NO: 26789 - DNA, 120 bp, Artificial Sequence
  ENSG00000038532_20 (sequence is synthesized)
caagtttgcaggcctattgcaggacatgcaggtgactggcgtggaggacgacagccgtgccctgaacatcaccatccacaagcctgcgtccagcccccattccaagcccttccccatcct

SEQ ID NO: 26790 - DNA, 120 bp, Artificial Sequence
  ENSG00000038532_21 (sequence is synthesized)
ccaggccaccttcatcttctcagaccacatccgctgcatcatcgccaagcagcgcctggccaaaggccgcatccaggcaaggcgcatgaagatgcagagaatagctgccctcctggacct

SEQ ID NO: 26791 - DNA, 120 bp, Artificial Sequence
  ENSG00000038532_22 (sequence is synthesized)
cccaatccagcccaccactgaagtcctggggtttggactcggctcctccacctccactcagcacctgcctttccgcttctacgaccaggggcgccggggcagcagcgaccccacagtgca

SEQ ID NO: 26792 - DNA, 120 bp, Artificial Sequence
  ENSG00000038532_23 (sequence is synthesized)
gcgctccgtgtttgcatcggtggacaaggtgccaggcttcgccgtggcccagtgcataaaccagcacagctccccgtccctgtcctcacagtcgccaccctccgccagcgggagccccag

SEQ ID NO: 26793 - DNA, 120 bp, Artificial Sequence
  ENSG00000038532_24 (sequence is synthesized)
cggcagcgggagcaccagccactgcgactctggaggcaccagctcgtcctccaccccctccacagcccagagtccagcagatgcccccatgagtccagaactgcctaagcctcaccttcc

SEQ ID NO: 26794 - DNA, 120 bp, Artificial Sequence
  ENSG00000038532_25 (sequence is synthesized)
tgaccagttggtaatcgtcaacgaaacggaagcagactctaagcccagcaagaacgtggccaggagcgcagccgtggagacagccagcctgtcccccagcctcgtccctgcccggcagcc

SEQ ID NO: 26795 - DNA, 120 bp, Artificial Sequence
  ENSG00000038532_26 (sequence is synthesized)
caccatttccctgctctgcgaggacacggctgacacgctgagcgtcgaatcgctgacccttgtccccccagttgacccccacagcctccgcagcctcaccggcatgcccccgctgtccac

SEQ ID NO: 26796 - DNA, 120 bp, Artificial Sequence
  ENSG00000038532_27 (sequence is synthesized)
gccggctgccgcctgcacagagcccgtgggcgaagaggctgcatgtgctgagcctgtgggcaccgctgaggactgagtcagtgccggggcctccctttgtgtgtgtggccccgctggtag

SEQ ID NO: 26797 - DNA, 120 bp, Artificial Sequence
  ENSG00000038532_28 (sequence is synthesized)
tcccttgaatgggaagaagccccacgttgtccttgaattcctttttcactttgcatctcttcacgtgcaggctgggaccagcggagacaccgcggcgaatgcagatgactgcaccggcca

SEQ ID NO: 26798 - DNA, 120 bp, Artificial Sequence
  ENSG00000038532_29 (sequence is synthesized)
ctcagggagctgcctgggctccgtgtctctgagccccgggtggcaggacccaccggcacctctttcttcctctgtcatatggctcctctgtcaccagccccagtgtgcacagaagaattg

SEQ ID NO: 26799 - DNA, 120 bp, Artificial Sequence
  ENSG00000038532_30 (sequence is synthesized)
gaccaggtcactgtacgtagaaatttgtagaaaagcagacttagataaacatctcctttggatatttatttccgcttttggcagcaggtgaacatttatttttaaaacttctatttaaaa

SEQ ID NO: 26800 - DNA, 120 bp, Artificial Sequence
  ENSG00000038532_31 (sequence is synthesized)
gaagtccaaaaacatcaacactaaggtttgatgtcatgtgaaaagtgtaataataacagttaagatttcatgatcattttcactggacctttcctgatattttgtttcagagttcttagt

SEQ ID NO: 26801 - DNA, 120 bp, Artificial Sequence
  ENSG00000038532_32 (sequence is synthesized)
gtggctttttccatttatttaagtgattctttgttactcactaactctgcaagcctgtggaataatgaagtaccttcctggaaagtttggattattttttaaacaaaaacaagggagata

SEQ ID NO: 26802 - DNA, 120 bp, Artificial Sequence
  ENSG00000038532_33 (sequence is synthesized)
catgtattctcaggtacacacagagctgagagggctgaatggttttctgctatagcagccgagaggcctcccatcatggaaagatttctccaggaaaaggaggaatgtagccagctcccc

SEQ ID NO: 26803 - DNA, 120 bp, Artificial Sequence
  ENSG00000038532_34 (sequence is synthesized)
actcaggacgcttcctcatttctcttcaccaaaaccaaacagagacagcttccagcaccttcttcagtgttaccatctctaagaaggaaccagttgggaccgtgaagactcccgaccctg

SEQ ID NO: 26804 - DNA, 120 bp, Artificial Sequence
  ENSG00000038532_35 (sequence is synthesized)
tggccatgatggaaatcaaaggaagacaccctctacgtcacctgccctcgactgtgtgtgcccacatgtgccgagagatggcccagagccagttcccctccagctgcaagggcatggtgt

SEQ ID NO: 26805 - DNA, 120 bp, Artificial Sequence
  ENSG00000038532_36 (sequence is synthesized)
ccccagagctctgagtctgtcactctccctctgctactgctgctgatctgaatatggaaaccccatggttcccttccccattcggactgggtgtgtacaagcaaggacccagatgcatca

SEQ ID NO: 26806 - DNA, 120 bp, Artificial Sequence
  ENSG00000038532_37 (sequence is synthesized)
gacacagcccccaagatgttcctttctactcggccagctcgggagccagacacagcactcacagcccaggccgtgatccaccctccccaagtccaccagggccagcggcccctcacctct

SEQ ID NO: 26807 - DNA, 120 bp, Artificial Sequence
  ENSG00000038532_38 (sequence is synthesized)
ctggtcactggtgagaccttccacaactttcctccagacctgccagcagatgtgcccaccaggggcattaggtatccgccggagcctggccatagggtagtctcgggagccgcgctgaga

SEQ ID NO: 26808 - DNA, 120 bp, Artificial Sequence
  ENSG00000038532_39 (sequence is synthesized)
tcttttgccacctgcattttagaagaacatggtctctgtctcctcggcccagccagctgtcccggcaaggcctgccgagggcagttttcaacctcatgaaggaaacacagtcctgccaag

SEQ ID NO: 26809 - DNA, 120 bp, Artificial Sequence
  ENSG00000038532_40 (sequence is synthesized)
gagggggagtggcgcccatggggacaggcctcagtccttagaagccctctgggtagctgtgcccacccagccttcatggctgcaggtacaaggacctttgcttccatagagaaaacgcac

SEQ ID NO: 26810 - DNA, 120 bp, Artificial Sequence
  ENSG00000038532_41 (sequence is synthesized)
agctcagaaagggggccacatgggcagaaacccaaaggaaggacaaaccacgaccaccgtggccatctgcagaatccctggaagagaaggaaggcagggtggagcggggggaagaccatc

SEQ ID NO: 26811 - DNA, 120 bp, Artificial Sequence
  ENSG00000038532_42 (sequence is synthesized)
atggagagaaggaccacagcatcaggagacgggacacgccacacccagcaggcagcctgtgtgttgcttaattttttaagagcaagaggggtagagaggatcaagctggccctggctgga

SEQ ID NO: 26812 - DNA, 120 bp, Artificial Sequence
  ENSG00000038532_43 (sequence is synthesized)
gatggctagcccctgagacatgcacttctggttttgaaatgactctgtctgtggggcagcagaaactagagaaggcaagtggctgccccaccccaaggcgtgaccaggaggaacagcctg

SEQ ID NO: 26813 - DNA, 120 bp, Artificial Sequence
  ENSG00000038532_44 (sequence is synthesized)
cagctcactccatgccacacgggtgggccaccagcctgctgtcagaagtctctgggctccaactggtcttgtaaccactgagcactgaaggagagaggtcttggtcagggctggacagca

SEQ ID NO: 26814 - DNA, 120 bp, Artificial Sequence
  ENSG00000038532_45 (sequence is synthesized)
tgcccgggaggaccagcagaggattaaaggtgactgggaggaccagcggaggataaaagacactgctcagggcagggcttctaccctgcatccctggccaagaaaagggcagtccccatg

SEQ ID NO: 26815 - DNA, 120 bp, Artificial Sequence
  ENSG00000038532_46 (sequence is synthesized)
tgggcttgcagggtcactctcaggggcctctttcagctggggctggcaacttgcgtctgggggacacctccaggtgtgtggggtgaggatttcctataaccagggctcccagaagctttg

SEQ ID NO: 26816 - DNA, 120 bp, Artificial Sequence
  ENSG00000038532_47 (sequence is synthesized)
cttatgtaaggaggtctgggagccagcccattggaggccaccagccattttggcttcaaaggaccccacctcacccaggtctcagcggcagtgggcacagctatgtcttcaggagctccc

SEQ ID NO: 26817 - DNA, 120 bp, Artificial Sequence
  ENSG00000038532_48 (sequence is synthesized)
gtcaaacctcatagctggggcgctcccagacaggccagtccagacaggacacgctgggcccctggcatccagaggaagagccaggagtgtgggaaggcccacagtgggggctgtggcttc

SEQ ID NO: 26818 - DNA, 120 bp, Artificial Sequence
  ENSG00000038532_49 (sequence is synthesized)
tgacactcaggtcatagcctcagaggtctgaggtcagcccccacagacccatccggcccgccccccaagtccctgcagagagcacttagagttatggcccaggccctggtccacccttcc

SEQ ID NO: 26819 - DNA, 120 bp, Artificial Sequence
  ENSG00000038532_50 (sequence is synthesized)
cctgtgcacctccggctgggtttgccaagtcagggagcagggctggccgcaggaactcccaaaccttggctttgaatattgttgtggaggtgtgctcgtccctttctggacgtgcaaggt

SEQ ID NO: 26820 - DNA, 120 bp, Artificial Sequence
  ENSG00000038532_51 (sequence is synthesized)
acctgtcccagcaggtcagatggggccagctgaggcgctcccccaggcaggaagggccagccttcaccatcgcgtgggattgggaggaggggcctccgtgagcagcccctcctctgccgc

SEQ ID NO: 26821 - DNA, 120 bp, Artificial Sequence
  ENSG00000038532_52 (sequence is synthesized)
tgtcccagcccagtccctctcccggagccttggcagcctcccacaacccagacacttgcgttcacaagcaacctaaggggcaggtgaagaagcgcagccctgccagacgcgctagattcc

SEQ ID NO: 26822 - DNA, 120 bp, Artificial Sequence
  ENSG00000038532_53 (sequence is synthesized)
tctaaggtctctgagatgcaccgttttttaaaaaggcgtggggtgaactgattttgatcttcttgtctagatgcaataaataaatctgaagcatttaatgtagtcatcttgacattgggc

SEQ ID NO: 26823 - DNA, 120 bp, Artificial Sequence
  ENSG00000038532_54 (sequence is synthesized)
ctacactgtacgagttccttatgtttccttgagctaaaaatatgtaaataatttttgtcccagtgagaaccgagggttagaaaacctcgatgcctctgagcctcgggaccgctctaggga

SEQ ID NO: 26824 - DNA, 120 bp, Artificial Sequence
  ENSG00000038532_55 (sequence is synthesized)
agtacctgctttcgccagcatgactcatgcttcgtgggtactgaacacgagggtggaaatgaaaactggaacttccttgtaaatttaaacttggcaataaaagagaaaaaaagttaccaa

SEQ ID NO: 26825 - DNA, 120 bp, Artificial Sequence
  ENSG00000038532_56 (sequence is synthesized)
ggtgggcgttcaaggtctttctctctgtggagcctgtgtgagctgcccttcctctctcagaagccccgtcggctggcagcaccagcttcttagaatttgtcaaagcacagcgcaagatta

SEQ ID NO: 26826 - DNA, 120 bp, Artificial Sequence
  ENSG00000038532_57 (sequence is synthesized)
aacacagcccccaaaataaattttggctttccctttagtgtttggtttggttttccagagatttgttgggtatgtggaagaacttctcagaattgactaagaattttcttggaaatttct

SEQ ID NO: 26827 - DNA, 120 bp, Artificial Sequence
  ENSG00000038532_58 (sequence is synthesized)
tggaaacatttaaatgattagtgctgaagttgtgggagagtaatttccttctccatgtaagatgactagaaagagagagtgtgtttggttccggttacaaccccctgaagaagtgagact

SEQ ID NO: 26828 - DNA, 120 bp, Artificial Sequence
  ENSG00000038532_59 (sequence is synthesized)
tcaaaagaaggccgtgctgcccacaggtcagctgtccactccttccatatgagggcgtctcctcccacttttgccacagctcatctctaaccctgctcctccgctcctcccaaaacagaa

SEQ ID NO: 26829 - DNA, 120 bp, Artificial Sequence
  ENSG00000038532_60 (sequence is synthesized)
acttgaatggaaagtccattgctgatttgtcagagtggaaaggaccacttctccagaagaccgagttctccccttcctgttctgacatgtctgctttaagtaaatccgtatgcaccccga

SEQ ID NO: 26830 - DNA, 120 bp, Artificial Sequence
  ENSG00000038532_61 (sequence is synthesized)
attgatgtctgtttgttctgtgtctaccagctgacacgggagctttggtgtggggagtttgtataattgattccctgtgtctggaatacctgacccttcctggatatggtgtaccacgcg

SEQ ID NO: 26831 - DNA, 120 bp, Artificial Sequence
  ENSG00000038532_62 (sequence is synthesized)
actttgcattgatgtctgtttgttctgtgtctaccagctgacacgggagctttgacccttcctggatatggtgtaccacgcgctggacagcccggatgatgattaccatgccctgttcgt

SEQ ID NO: 26832 - DNA, 120 bp, Artificial Sequence
  ENSG00000038532_63 (sequence is synthesized)
atggtgtgtattgtagaaacagaagtgtggtgtctggttctatgcagataaacgttatatgtcttcagttattttttatgcctataattactgaataaaaatgctcaatttcatagtccc

SEQ ID NO: 26833 - DNA, 120 bp, Artificial Sequence
  ENSG00000038532_64 (sequence is synthesized)
agaaatcaaatagcagctcccatgcattggcaccgtccacagtgcctgaccctgtgctaaatgcttttcagtcttcattgcgcttgaatcctcacaataatcctgcaagacccttcctgg

SEQ ID NO: 26834 - DNA, 120 bp, Artificial Sequence
  ENSG00000038532_65 (sequence is synthesized)
cagggccacgcagttgtaggaagcagaccccactgggagcctgagccctgggtgctaggcctgagccttctgagaatccgggcccatcccaacctctccctctgcctctcaacccctgca

SEQ ID NO: 26835 - DNA, 120 bp, Artificial Sequence
  ENSG00000038532_66 (sequence is synthesized)
tcctgggccagccctcctgcctgctgggactgtgtcttagctctgggtctccttttgccatcccatcccctgccacttggtaaccatctttcttcttccacaccccgcccttcttttgct

SEQ ID NO: 26836 - DNA, 120 bp, Artificial Sequence
  ENSG00000038532_67 (sequence is synthesized)
gagattgtcaatgttttcgcccccaccccgctatgtctgggtggcccaaggtaatattatgagaaagaactaggctgacagtggagtgaggggagaacattcgaaggtttaacgggccag

SEQ ID NO: 26837 - DNA, 120 bp, Artificial Sequence
  ENSG00000038532_68 (sequence is synthesized)
tagacgtaggagacagagttttgttaccagcaacagttgtgggtaggtatggaaacaggtaggagtgagaatgcgcttggagaaaaactcacttggactgggcagctgaagagaggttac

SEQ ID NO: 26838 - DNA, 120 bp, Artificial Sequence
  ENSG00000038532_69 (sequence is synthesized)
gctagtgctggggctgagtggggtggggccaggagagccgatggagccgagaccacccagtccttggtcatccctggggcttgtattatgtttgggaagacctattttttgtgatagcgc

SEQ ID NO: 26839 - DNA, 120 bp, Artificial Sequence
  ENSG00000038532_70 (sequence is synthesized)
ggcctcccaaagtgctgggattacaaggttgggccactgcgcctggcctgctgtttcattttttaggcagatccccttttctcacttattttcacctgacttacaatgcattaacaaagg

SEQ ID NO: 26840 - DNA, 120 bp, Artificial Sequence
  ENSG00000038532_71 (sequence is synthesized)
ttacaatgcattaacaaagggactggcagggaggtgggcagaggggtgtatctgcctttagttttttcccagtgacctatcgtggtctctgatgtttccaaggccttagaggcatagcct

SEQ ID NO: 26841 - DNA, 120 bp, Artificial Sequence
  ENSG00000038532_72 (sequence is synthesized)
gaaggcctcctcctctccacagtgggacctttcaccagaaataaacttgaaagacccacagaggagtttgcataagagcagttgtccttcagtcagtcagttacagatgcttctaggaga

SEQ ID NO: 26842 - DNA, 120 bp, Artificial Sequence
  ENSG00000038532_73 (sequence is synthesized)
gatgccagatgcgggttttggctttctgagcacctgcagtctaccactacccagctatgagacctaggacaagtcacttcacttttctaagcctcaatctttccagcactcattgcaata

SEQ ID NO: 26843 - DNA, 120 bp, Artificial Sequence
  ENSG00000038532_74 (sequence is synthesized)
ggtttttatagagattccttcaggacctatataaagtgttcggcactgtgcctcgttcacagtggtaagtaagtaatagcatagtaagtaagctgtgttagagctctcttggtcttgaca

SEQ ID NO: 26844 - DNA, 120 bp, Artificial Sequence
  ENSG00000038532_75 (sequence is synthesized)
gaaacccgactcactctggcttaaacaatacaagcagacaaagctgtgttagcttataaagactgctgaggcctagcttcaggcaaagctggatccaggggctcaaacagtatttttcta

SEQ ID NO: 26845 - DNA, 120 bp, Artificial Sequence
  ENSG00000038532_76 (sequence is synthesized)
cctttggcctctgccaccttctgggttgacgagataaatgccagcccctccagctagccctttctgcactgagactctagacttactctacgggagacacttagatttgaacagtctagt

SEQ ID NO: 26846 - DNA, 120 bp, Artificial Sequence
  ENSG00000038532_77 (sequence is synthesized)
ctcgaagtgatatttgtagaatactttactaagattaaaaatgctggcaagggtgaggaggtggccgatatagattataatgcttgtgcccctcagggcgtcaccacggtcctctgctca

SEQ ID NO: 26847 - DNA, 120 bp, Artificial Sequence
  ENSG00000038532_78 (sequence is synthesized)
gcccggcacaaggagaatttctcttaacccagcagttccagcagattgtgaggttgagccttactggctctgactggctcccttgcctggttcttacctagtcactgggaccaagggaat

SEQ ID NO: 26848 - DNA, 120 bp, Artificial Sequence
  ENSG00000038532_79 (sequence is synthesized)
atggagcaccccaactggccaggtgatgtgcccaaccctggaacggggaaggaggatcagctccacccaaatcacatgacccagagtgggactggcggctctctaaaggaagtgggggtg

SEQ ID NO: 26849 - DNA, 120 bp, Artificial Sequence
  ENSG00000038532_80 (sequence is synthesized)
cagggccactttccaggcctcaacagtgtttagtcaccctctttttcctgcaccctgtcagtaaagggacttcagggaagtatttggtataggtagttttgatggagaacattgaattct

SEQ ID NO: 26850 - DNA, 120 bp, Artificial Sequence
  ENSG00000038532_81 (sequence is synthesized)
aactgatggggaatggtttgggcatggggggttcccactgtgtccccactggatgttgggagccatgagcagttggtctatcatgtgacctgctagcctcaacgtggataggcagcagtc

SEQ ID NO: 26851 - DNA, 120 bp, Artificial Sequence
  ENSG00000038532_82 (sequence is synthesized)
tttgtgaccaaatagcacagattgatggggaagcagatttagaatggtgtcttgtgatccccaccactgttaaaatttcagactatattctctccctctaacatgggaggtgtccgatga

SEQ ID NO: 26852 - DNA, 120 bp, Artificial Sequence
  ENSG00000038532_83 (sequence is synthesized)
atcaggatgattctctgctatgaatagtaattttggggacagtatcattttattgaggacttactctgtgctggatgtatatagcatgctgtacagattatatctcttcatcctcacacc

SEQ ID NO: 26853 - DNA, 120 bp, Artificial Sequence
  ENSG00000038532_84 (sequence is synthesized)
attatatctcttcatcctcacaccaaccaacggtaatagctactgccattgtccctttcttgctgaattagtctcttctcatactgctacgcagaaatacccaagactgggtaatttata

SEQ ID NO: 26854 - DNA, 120 bp, Artificial Sequence
  ENSG00000038532_85 (sequence is synthesized)
cagttccacattgccggagaggcctcaggaaacttacgatcatggtggaaggcacctcttcacagggtgacaggagagagaattagtgcaaggagaaaagatgccagatgcttagaaaac

SEQ ID NO: 26855 - DNA, 120 bp, Artificial Sequence
  ENSG00000038532_86 (sequence is synthesized)
catcagatttcatgagaacttactcactatcatgagaacagtataagggaaactgctcccatgattcagttaccggcacatggttctgcccttgacacgtggggattctcatgtgtctca

SEQ ID NO: 26856 - DNA, 120 bp, Artificial Sequence
  ENSG00000038532_87 (sequence is synthesized)
gtgaggacacagagccaaaccatatcacttgctaatgaggaaactgagtcagagaggtctagtgatgtacccaagtctgcccggccggtgagtggcagagccacgcttctagaggaggac

SEQ ID NO: 26857 - DNA, 120 bp, Artificial Sequence
  ENSG00000038532_88 (sequence is synthesized)
ccacgcttctagaggaggacagcccagccccgcatcccccgtgcttctccatgtattatgtccctgcctccctgtttgctgctccactggaatgtttcagcatgcagctctccctccagt

SEQ ID NO: 26858 - DNA, 120 bp, Artificial Sequence
  ENSG00000038532_89 (sequence is synthesized)
ctgtagtgccagcacatgggcttccttcctcctcccgcaggcagaatcgcgggaagccataggttcagaagatcccagctttctctgctttgcgcgtttgtctctgttatcccagcacct

SEQ ID NO: 26859 - DNA, 120 bp, Artificial Sequence
  ENSG00000038532_90 (sequence is synthesized)
gcccttggctaggtactccataagtacgtgataagtgatccttcttgtggatattacccaccaaagcatgtgtgatttgggaagtttataataaacctaagtgttttaagtgtcaaaaag

SEQ ID NO: 26860 - DNA, 120 bp, Artificial Sequence
  ENSG00000038532_91 (sequence is synthesized)
ggtggacaaggtgccagacccttctctgtgcagttgcatttcatacatgtgccagagctgatgaacagaacagagccaccaccccttctctgcaattctgaaacccaaacagctctgaaa

SEQ ID NO: 26861 - DNA, 120 bp, Artificial Sequence
  ENSG00000038532_92 (sequence is synthesized)
agtaattgtgagtttatgttttcgtttctgcaaaaattcagtgtttggttttagctgctcacgacccagctgacagtgtaacgtaatacctatgtgtgccctacatggccttttacctcc

SEQ ID NO: 26862 - DNA, 120 bp, Artificial Sequence
  ENSG00000038532_93 (sequence is synthesized)
taaagattctaaattccaagacatatctggccacagaggtttaggataaggagttaagtatggatctgtaattgtgttaaggtttgggcttcccttaaataaaatcataattctgtatac

SEQ ID NO: 26863 - DNA, 120 bp, Artificial Sequence
  ENSG00000038532_94 (sequence is synthesized)
tttgcatcggtggacaaggtgccagcagcagagtatttgcccaggtgagaagcagcagaatgaaagcacccagcacaagccaaagagtatgggcccaagtcccagccttccacctccacg

SEQ ID NO: 26864 - DNA, 120 bp, Artificial Sequence
  ENSG00000038532_95 (sequence is synthesized)
ggaaaattgttaggtggccttgacccatttggttcaccttgttggatctcagtttattcatataagaaacagggatgatgctcgacaatgtgagtggacttaagaactgaactgtactct

SEQ ID NO: 26865 - DNA, 120 bp, Artificial Sequence
  ENSG00000038532_96 (sequence is synthesized)
aggatttatccatggataaagagctataggctaaaagactctgcaagttcccagctatttttgtatgttggacatgttatccgttgaaaagcaatcagaaataaaaagtatttaagcgtt

SEQ ID NO: 26866 - DNA, 120 bp, Artificial Sequence
  ENSG00000038532_97 (sequence is synthesized)
cacagcccagagtccagcagtcaggagtggcaggaaaggacgccgacgagtgttcagcctgtcggaggccgacagtcatggcggccactgggtttagtgctccgaacggcagctgccacg

SEQ ID NO: 26867 - DNA, 120 bp, Artificial Sequence
  ENSG00000038945_0 (sequence is synthesized)
aattgtaaagagagagaagtggataaatcagtgctgctttctttaggacgaaagaagtatggagcagtgggatcactttcacaatcaacaggaggacactgatagctgctccgaatctgt

SEQ ID NO: 26868 - DNA, 120 bp, Artificial Sequence
  ENSG00000038945_1 (sequence is synthesized)
gaaatttgatgctcgctcaatgacagctttgcttcctccgaatcctaaaaacagcccttcccttcaagagaaactgaagtccttcaaagctgcactgattgccctttacctcctcgtgtt

SEQ ID NO: 26869 - DNA, 120 bp, Artificial Sequence
  ENSG00000038945_2 (sequence is synthesized)
tgcagttctcatccctctcattggaatagtggcagctcaactcctgaagtgggaaacgaagaattgctcagttagttcaactaatgcaaatgatataactcaaagtctcacgggaaaagg

SEQ ID NO: 26870 - DNA, 120 bp, Artificial Sequence
  ENSG00000038945_3 (sequence is synthesized)
aaatgacagcgaagaggaaatgagatttcaagaagtctttatggaacacatgagcaacatggagaagagaatccagcatattttagacatggaagccaacctcatggacacagagcattt

SEQ ID NO: 26871 - DNA, 120 bp, Artificial Sequence
  ENSG00000038945_4 (sequence is synthesized)
ccaaaatttcagcatgacaactgatcaaagatttaatgacattcttctgcagctaagtaccttgttttcctcagtccagggacatgggaatgcaatagatgaaatctccaagtccttaat

SEQ ID NO: 26872 - DNA, 120 bp, Artificial Sequence
  ENSG00000038945_5 (sequence is synthesized)
aagtttgaataccacattgcttgatttgcagctcaacatagaaaatctgaatggcaaaatccaagagaataccttcaaacaacaagaggaaatcagtaaattagaggagcgtgtttacaa

SEQ ID NO: 26873 - DNA, 120 bp, Artificial Sequence
  ENSG00000038945_6 (sequence is synthesized)
tgtatcagcagaaattatggctatgaaagaagaacaagtgcatttggaacaggaaataaaaggagaagtgaaagtactgaataacatcactaatgatctcagactgaaagattgggaaca

SEQ ID NO: 26874 - DNA, 120 bp, Artificial Sequence
  ENSG00000038945_7 (sequence is synthesized)
ttctcagaccttgagaaatatcactttaattcaaggtcctcctggacccccgggtgaaaaaggagatcgaggtcccactggagaaagtggtccacgaggatttccaggtccaataggtcc

SEQ ID NO: 26875 - DNA, 120 bp, Artificial Sequence
  ENSG00000038945_8 (sequence is synthesized)
tccgggtcttaaaggtgatcggggagcaattggctttcctggaagtcgaggactcccaggatatgccggaaggccaggaaattctggaccaaaaggccagaaaggggaaaaggggagtgg

SEQ ID NO: 26876 - DNA, 120 bp, Artificial Sequence
  ENSG00000038945_9 (sequence is synthesized)
aaacacattaactccatttacgaaagttcgactggtcggtgggagcggccctcacgaggggagggtggagatactccacagcggccagtggggtacaatttgtgacgatcgctgggaagt

SEQ ID NO: 26877 - DNA, 120 bp, Artificial Sequence
  ENSG00000038945_10 (sequence is synthesized)
gcgcgttggacaggtcgtctgtaggagcttgggatacccaggtgttcaagccgtgcacaaggcagctcactttggacaaggtactggtccaatatggctgaatgaagtgttttgttttgg

SEQ ID NO: 26878 - DNA, 120 bp, Artificial Sequence
  ENSG00000038945_11 (sequence is synthesized)
gagagaatcatctattgaagaatgtaaaattcggcaatgggggacaagagcctgttcacattctgaagatgctggagtcacttgcactttataatgcatcatattttcattcacaactat

SEQ ID NO: 26879 - DNA, 120 bp, Artificial Sequence
  ENSG00000038945_12 (sequence is synthesized)
gaaatcgctgctcaaaaatgattttattaccttgttcctgtaaaatccatttaatcaatatttaagagattaagaatattgcccaaataatattttagattacaggattaatatattgaa

SEQ ID NO: 26880 - DNA, 120 bp, Artificial Sequence
  ENSG00000038945_13 (sequence is synthesized)
caccttcatgcttactattttatgtctatatttaaatcattttaacttctataggtttttaaatggaattttctaatataatgacttatatgctgaattgaacattttgaagtttatagc

SEQ ID NO: 26881 - DNA, 120 bp, Artificial Sequence
  ENSG00000038945_14 (sequence is synthesized)
ttccagattacaaaggccaagggtaatagaaatgcataccagtaattggctccaattcataatatgttcaccaggagattacaattttttgctcttcttgtctttgtaatctatttagtt

SEQ ID NO: 26882 - DNA, 120 bp, Artificial Sequence
  ENSG00000038945_15 (sequence is synthesized)
aataacggaagggatcagaagatatcttttgtgcctagattgcaaaatctccaatccacacatattgttttaaaataagaatgttatccaactattaagatatctcaatgtgcaataact

SEQ ID NO: 26883 - DNA, 120 bp, Artificial Sequence
  ENSG00000038945_16 (sequence is synthesized)
tgtgtattagatatcaatgttaatgatatgtcttggccactatggaccagggagcttatttttcttgtcatgtactgacaactgtttaattgaatcatgaagtaaattgaaagcaggaca

SEQ ID NO: 26884 - DNA, 120 bp, Artificial Sequence
  ENSG00000038945_17 (sequence is synthesized)
tatgagaaaactgaccatcagtatatttgtccagataattggtggatcaaaaatgccacttaacaggaagtttagtttgttatgcactttaaatggaataattagcttgttacaattcta

SEQ ID NO: 26885 - DNA, 120 bp, Artificial Sequence
  ENSG00000038945_18 (sequence is synthesized)
ggacatggtgtttaaaatttaaatctgattaatccattttaacaaacaatgcaaacatcttcagtgcagaaggaagagtggtttcaactgtttggagtcttttatgaagtcagtcaacat

SEQ ID NO: 26886 - DNA, 120 bp, Artificial Sequence
  ENSG00000038945_19 (sequence is synthesized)
ttacaaccaaagggcgggggggggggtggggggtgcgtctttagtcctaaagggacaataactctgagcatgccccaaaaaagtagtttagcaaccttttgttggtagtcaacccatccc

SEQ ID NO: 26887 - DNA, 120 bp, Artificial Sequence
  ENSG00000038945_20 (sequence is synthesized)
cagggccatagtgtagagtgtgaaaagctaccctgaaacccagtaattctaccctgaaagtgactgcctgcagaaagaccagcagttgatattaaagcgcaaatgaattcaacctcagcc

SEQ ID NO: 26888 - DNA, 120 bp, Artificial Sequence
  ENSG00000038945_21 (sequence is synthesized)
ctgaaaataacagaattctgaagtttcctatgactaattcacaaaaaaagtaattgtaaactagtactattatggaattactctactgttctttctttaatagtggcaaatgaaagcata

SEQ ID NO: 26889 - DNA, 120 bp, Artificial Sequence
  ENSG00000038945_22 (sequence is synthesized)
agcttaagcattttttcatattctgaagtctcaccacacataataaccaagtggtagactcacagccgtccaacttaaaaaggcaaaaccttaccttggaattggaattactgtaaacag

SEQ ID NO: 26890 - DNA, 120 bp, Artificial Sequence
  ENSG00000038945_23 (sequence is synthesized)
cctactgaaaatgcatttttatcatgtaacattcttctacttgtttaacattgctgattttctctggcagcataattttgtggttaagagaatgaattctgaatgtacactttctgtctc

SEQ ID NO: 26891 - DNA, 120 bp, Artificial Sequence
  ENSG00000038945_24 (sequence is synthesized)
aaaccctggctgtaatttcagctagttaataattctttgtgttcagttccactatctaggtattttcttcaaaaggtaaatacaatggtttctgaaagaatcatttgcattatcagcctg

SEQ ID NO: 26892 - DNA, 120 bp, Artificial Sequence
  ENSG00000038945_25 (sequence is synthesized)
tttgggatgtctgagatcagtgcctctgggttgttaatactgtattgctgtatggtatatgtatgctgatttactacttatgcgtaagtggtatgcatgggatgtctgaaatcagtgcct

SEQ ID NO: 26893 - DNA, 120 bp, Artificial Sequence
  ENSG00000038945_26 (sequence is synthesized)
atgggatgtctgaaatcagtgcctatgggttgtcaatagtattaactattagtgttaactgttagtattaactattagtattattaacactaataatagtactattactattactatttt

SEQ ID NO: 26894 - DNA, 120 bp, Artificial Sequence
  ENSG00000038945_27 (sequence is synthesized)
aaaataataatagtactattgctagtactagtactattgctattactagtactattactagtactagtactatgacactgttaatagtactattaacaacccataggcacttgggatgtc

SEQ ID NO: 26895 - DNA, 120 bp, Artificial Sequence
  ENSG00000038945_28 (sequence is synthesized)
tgagatcagtgcctatgggttgttaatactatattgctgtatggtatatgcatgctgatttaccacttatgcatagatatatctttaataagtaatctaaaaatcctttttgtatttgag

SEQ ID NO: 26896 - DNA, 120 bp, Artificial Sequence
  ENSG00000038945_29 (sequence is synthesized)
agaatctactaagttcagtccagtcaagaaaagaacctaatagcaccaatacaaattgaggacttaatttactttggaatgttgaattgcatttgttccattaaaaaaaacagaaatttg

SEQ ID NO: 26897 - DNA, 120 bp, Artificial Sequence
  ENSG00000038945_30 (sequence is synthesized)
tttctacttcattgcacagaacccttgagaacatattgatgctctgaaagataaccccagaagagtatgaggagacatacacagtctacacagatggggtttcaccgtgtcagccaggat

SEQ ID NO: 26898 - DNA, 76 bp, Artificial Sequence
  ENSG00000038945_31 (sequence is synthesized)
gttgccgccatatataaaggagtgcaagagtccataaaacttactccctctgctcttgaaggtgaacagcacactt

SEQ ID NO: 26899 - DNA, 120 bp, Artificial Sequence
  ENSG00000038945_32 (sequence is synthesized)
gaatgctgaaagtcacctgttctccaaaggtatgtgccaccaaatcaaggaaaagcaatagaaagcagccccaaaatgaagaaccaggtatccttacaggaatatagtgaaccacaaagg

SEQ ID NO: 26900 - DNA, 120 bp, Artificial Sequence
  ENSG00000038945_33 (sequence is synthesized)
gctatgtgaaaatgcatttgctgcaagcgggaacatcaggggaatttggtgcctccaaccaagttaacatatctttcaatcacttgtgatattgcagaataatggcaactaccatggaaa

SEQ ID NO: 26901 - DNA, 120 bp, Artificial Sequence
  ENSG00000038945_34 (sequence is synthesized)
gtcactatagttcccttgtttcccttgggaaaagatatgaagtttgatcacctatttttgtgtttatgatattctaaaatatctgctcctcgccctcctatagtattgaaaatctctgca

SEQ ID NO: 26902 - DNA, 120 bp, Artificial Sequence
  ENSG00000038945_35 (sequence is synthesized)
ttgtatgttgataagtttgtatgtttgtatgtcaagaaaataatgaaccatttagttataatttttcaatggtatgaaaaaatctaagtgacaataaacttgtatctgtcaaaattcaaa

SEQ ID NO: 26903 - DNA, 120 bp, Artificial Sequence
  ENSG00000038945_36 (sequence is synthesized)
cagcacactttagtagcaaaagaaaattggtagtgaaagcaaaacaaggaaagaaatctctctgggccctgcttctgtttctcaaaagaaaactgaagcctacccagagggtaaatattg

SEQ ID NO: 26904 - DNA, 120 bp, Artificial Sequence
  ENSG00000038945_37 (sequence is synthesized)
acacagttggactttacagctctcaggatcgtaacacctaacttcttccaaaaagtgaaatgactttacttctaatttcctccattcatccaataccatttgaaaatagtgtctgagtgt

SEQ ID NO: 26905 - DNA, 120 bp, Artificial Sequence
  ENSG00000038945_38 (sequence is synthesized)
atactatttttcaagcactgttcctgggaatccaggtacacagtaaactttagagacaaagttcctgatcttagtccactgttccagtaggaaaagacatcaacatcgggccaaatagat

SEQ ID NO: 26906 - DNA, 120 bp, Artificial Sequence
  ENSG00000038945_39 (sequence is synthesized)
atataactacatatgttagcatagaagtggtattgtaattggagataattcctttaccagagatcagtttgcattgttttacgtacttggctatgggtgacttttctgctgataacatat

SEQ ID NO: 26907 - DNA, 120 bp, Artificial Sequence
  ENSG00000038945_40 (sequence is synthesized)
gattgcctgttttacttctcaccattgatttatgttgccaaaacaaagagctacctgaggaggtccgtattttatagcctttgtttaatatatgggaaaatgggagtcaaggaaaattag

SEQ ID NO: 26908 - DNA, 120 bp, Artificial Sequence
  ENSG00000038945_41 (sequence is synthesized)
attggaacacctgcctgtgacaccagtgcatgcttttaacaacgaccttgataacttctcacttttactcccttccttgtttacccagtctgtccacctggaaatgctagttcattaaga

SEQ ID NO: 26909 - DNA, 120 bp, Artificial Sequence
  ENSG00000038945_42 (sequence is synthesized)
ctcagatcaaaggtcatttcccatcagaatgtttctctgactattccagacacagtctaatgcatcatccttttctgatctgtagagaacattaaaaggttgtttaattttaagctttta

SEQ ID NO: 26910 - DNA, 120 bp, Artificial Sequence
  ENSG00000038945_43 (sequence is synthesized)
ttttccatctgcttcatcaaggatccctgtgatgatgctgatgagtctctctgaaattctttctgttctttttctacttcattgcacagaacccttgagggtagaatgtgaagttctgat

SEQ ID NO: 26911 - DNA, 120 bp, Artificial Sequence
  ENSG00000038945_44 (sequence is synthesized)
atatgtgtgcctcgtggaattatcgtatcaagaacatattgatgctctgaaagataaccccagaagagtatgaggagacatacacagtctacacagaaaactgaagcctacccagagggt

SEQ ID NO: 26912 - DNA, 120 bp, Artificial Sequence
  ENSG00000038945_45 (sequence is synthesized)
ctcagggttatagaacagccgccttcagctattctcccccagggctctgcagaaccttcccacctttcagcaggctggagtgcagtggcatgatcgtgactcactgcagccttccactcc

SEQ ID NO: 26913 - DNA, 120 bp, Artificial Sequence
  ENSG00000038945_46 (sequence is synthesized)
actctgctgttgagacgttggggagatgaggaggaatacccagaaataaataaaactcccctggatgtgctatctcagtgcaatcatcagtatctctcttctcaacaaaaaaccaagtat

SEQ ID NO: 26914 - DNA, 120 bp, Artificial Sequence
  ENSG00000038945_47 (sequence is synthesized)
aaatttagattttgcaaacctgtgcattgatgagagtgctattgaaacacattaagaaagattttcaacgcaggaatgtgtcatttcctttcttcatgtaccagatgctgaaatactatg

SEQ ID NO: 26915 - DNA, 120 bp, Artificial Sequence
  ENSG00000038945_48 (sequence is synthesized)
ctctggacaagtcatctgcacaactgacttccaagatccttttgtgactcctccaaatgactttggttcccgtgttgtacctgacttccacatggccttctctcctggtccctggtgctg

SEQ ID NO: 26916 - DNA, 120 bp, Artificial Sequence
  ENSG00000038945_49 (sequence is synthesized)
ctatcacccccagcctggacacctctcatgcacggactggagggctgctccaaccagtcctcagttctctgccacccattgacctagagtcttgaacccaatttaatttattgggttcta

SEQ ID NO: 26917 - DNA, 120 bp, Artificial Sequence
  ENSG00000038945_50 (sequence is synthesized)
ggagaactgctgtgttctcaccctaacttggaagagtgatgtttcagtcaagcaaagcgattcctaccatacaatataacacttgtgtgaggctctgtcctaaatatctcaattaccaat

SEQ ID NO: 26918 - DNA, 120 bp, Artificial Sequence
  ENSG00000038945_51 (sequence is synthesized)
atgtggtttggtagtatttctcgccatgctttgctcatgcgcaatgagactacaactagggtgtaaattttaagtatcccatctaaaactcatacaatgataggaaaaatccatttgttt

SEQ ID NO: 26919 - DNA, 120 bp, Artificial Sequence
  ENSG00000038945_52 (sequence is synthesized)
ttcatttgatttttactgaggaatcagctcaatcttcaatgaatactggtctctttccaaagcatttttgatcaaagtaaagactgagtcaagggctttttttttttctttttcttgttt

SEQ ID NO: 26920 - DNA, 120 bp, Artificial Sequence
  ENSG00000038945_53 (sequence is synthesized)
taagagacagagccttgttctattgcacaggctggactacacgcattcacctagagtctagaacacaatttaatttattgggttctaggagaactgtcatgagtattgataatatgagag

SEQ ID NO: 26921 - DNA, 120 bp, Artificial Sequence
  ENSG00000038945_54 (sequence is synthesized)
ttctttatattcaaacattattctcaaccagagatagggatgtcatagaagaaaatccattcattcaatcattaattcacatgtccattatgtacctccatgagctggacataacagcta

SEQ ID NO: 26922 - DNA, 120 bp, Artificial Sequence
  ENSG00000038945_55 (sequence is synthesized)
ataagagataattgtctctggttttacagagctaattgtccctaagagatgtagacaaatgaacaagcaattacaatacatctaagctatactgggggaggaacagggctggataggtat

SEQ ID NO: 26923 - DNA, 120 bp, Artificial Sequence
  ENSG00000038945_56 (sequence is synthesized)
agggctggataggtatgcagaggagataaaaaaattttaattccttagaatattttttaaaaattgattcttattttaccttctcatcttcttattttccaaattacagcatatatatat

SEQ ID NO: 26924 - DNA, 120 bp, Artificial Sequence
  ENSG00000038945_57 (sequence is synthesized)
tttttttttttttttttttaagttttgaagtgtagtcgagcttgggcaatttatccaacccatttaaaccaaaaataaaacttttcatgtattacctggtcatttcaaacaaaaatattt

SEQ ID NO: 26925 - DNA, 120 bp, Artificial Sequence
  ENSG00000038945_58 (sequence is synthesized)
gtattacctggtcatttcaaacaaaaatattttgatcatgaaaaagaataccaatattcttttgttctaaaaatctcttatgggattacatgttatatttttggtttctctctactgatc

SEQ ID NO: 26926 - DNA, 120 bp, Artificial Sequence
  ENSG00000038945_59 (sequence is synthesized)
aacagactacattttcacaactcttctttcctttacgttttaacacacagacccaagattcatactattaagattctagtagaactctagatggtatgcctctgtgtatctcagcatttt

SEQ ID NO: 26927 - DNA, 120 bp, Artificial Sequence
  ENSG00000038945_60 (sequence is synthesized)
tattcccactcttgtataatgaacatgttaacacctacctcacagggttgttgtgaggatcaagtaagatattgtgtgtgtgaagatgctctgtgaaatcataaagtcctttaaagatgt

SEQ ID NO: 26928 - DNA, 74 bp, Artificial Sequence
  ENSG00000038945_61 (sequence is synthesized)
aaaaaccaggagagcccaagggcattttgctcttgccattcctgaggagtttattgcctacagataagctttgc

SEQ ID NO: 26929 - DNA, 120 bp, Artificial Sequence
  ENSG00000039068_0 (sequence is synthesized)
agtggcgtcggaactgcaaagcacctgtgagcttgcggaagtcagttcagactccagcccgctccagcccggcccgacccgaccgcacccggcgcctgccctcgctcggcgtccccggcc

SEQ ID NO: 26930 - DNA, 120 bp, Artificial Sequence
  ENSG00000039068_1 (sequence is synthesized)
agccatgggcccttggagccgcagcctctcggcgctgctgctgctgctgcaggtctcctcttggctctgccaggagccggagccctgccaccctggctttgacgccgagagctacacgtt

SEQ ID NO: 26931 - DNA, 120 bp, Artificial Sequence
  ENSG00000039068_2 (sequence is synthesized)
cacggtgccccggcgccacctggagagaggccgcgtcctgggcagagtgaattttgaagattgcaccggtcgacaaaggacagcctatttttccctcgacacccgattcaaagtgggcac

SEQ ID NO: 26932 - DNA, 120 bp, Artificial Sequence
  ENSG00000039068_3 (sequence is synthesized)
agatggtgtgattacagtcaaaaggcctctacggtttcataacccacagatccatttcttggtctacgcctgggactccacctacagaaagttttccaccaaagtcacgctgaatacagt

SEQ ID NO: 26933 - DNA, 120 bp, Artificial Sequence
  ENSG00000039068_4 (sequence is synthesized)
ggggcaccaccaccgccccccgccccatcaggcctccgtttctggaatccaagcagaattgctcacatttcccaactcctctcctggcctcagaagacagaagagagactgggttattcc

SEQ ID NO: 26934 - DNA, 120 bp, Artificial Sequence
  ENSG00000039068_5 (sequence is synthesized)
tcccatcagctgcccagaaaatgaaaaaggcccatttcctaaaaacctggttcagatcaaatccaacaaagacaaagaaggcaaggttttctacagcatcactggccaaggagctgacac

SEQ ID NO: 26935 - DNA, 120 bp, Artificial Sequence
  ENSG00000039068_6 (sequence is synthesized)
accccctgttggtgtctttattattgaaagagaaacaggatggctgaaggtgacagagcctctggatagagaacgcattgccacatacactctcttctctcacgctgtgtcatccaacgg

SEQ ID NO: 26936 - DNA, 120 bp, Artificial Sequence
  ENSG00000039068_7 (sequence is synthesized)
gaatgcagttgaggatccaatggagattttgatcacggtaaccgatcagaatgacaacaagcccgaattcacccaggaggtctttaaggggtctgtcatggaaggtgctcttccaggaac

SEQ ID NO: 26937 - DNA, 120 bp, Artificial Sequence
  ENSG00000039068_8 (sequence is synthesized)
ctctgtgatggaggtcacagccacagacgcggacgatgatgtgaacacctacaatgccgccatcgcttacaccatcctcagccaagatcctgagctccctgacaaaaatatgttcaccat

SEQ ID NO: 26938 - DNA, 120 bp, Artificial Sequence
  ENSG00000039068_9 (sequence is synthesized)
taacaggaacacaggagtcatcagtgtggtcaccactgggctggaccgagagagtttccctacgtataccctggtggttcaagctgctgaccttcaaggtgaggggttaagcacaacagc

SEQ ID NO: 26939 - DNA, 120 bp, Artificial Sequence
  ENSG00000039068_10 (sequence is synthesized)
aacagctgtgatcacagtcactgacaccaacgataatcctccgatcttcaatcccaccacgtacaagggtcaggtgcctgagaacgaggctaacgtcgtaatcaccacactgaaagtgac

SEQ ID NO: 26940 - DNA, 120 bp, Artificial Sequence
  ENSG00000039068_11 (sequence is synthesized)
tgatgctgatgcccccaataccccagcgtgggaggctgtatacaccatattgaatgatgatggtggacaatttgtcgtcaccacaaatccagtgaacaacgatggcattttgaaaacagc

SEQ ID NO: 26941 - DNA, 120 bp, Artificial Sequence
  ENSG00000039068_12 (sequence is synthesized)
aaagggcttggattttgaggccaagcagcagtacattctacacgtagcagtgacgaatgtggtaccttttgaggtctctctcaccacctccacagccaccgtcaccgtggatgtgctgga

SEQ ID NO: 26942 - DNA, 120 bp, Artificial Sequence
  ENSG00000039068_13 (sequence is synthesized)
tgtgaatgaagcccccatctttgtgcctcctgaaaagagagtggaagtgtccgaggactttggcgtgggccaggaaatcacatcctacactgcccaggagccagacacatttatggaaca

SEQ ID NO: 26943 - DNA, 120 bp, Artificial Sequence
  ENSG00000039068_14 (sequence is synthesized)
gaaaataacatatcggatttggagagacactgccaactggctggagattaatccggacactggtgccatttccactcgggctgagctggacagggaggattttgagcacgtgaagaacag

SEQ ID NO: 26944 - DNA, 120 bp, Artificial Sequence
  ENSG00000039068_15 (sequence is synthesized)
cacgtacacagccctaatcatagctacagacaatggttctccagttgctactggaacagggacacttctgctgatcctgtctgatgtgaatgacaacgcccccataccagaacctcgaac

SEQ ID NO: 26945 - DNA, 120 bp, Artificial Sequence
  ENSG00000039068_16 (sequence is synthesized)
tatattcttctgtgagaggaatccaaagcctcaggtcataaacatcattgatgcagaccttcctcccaatacatctcccttcacagcagaactaacacacggggcgagtgccaactggac

SEQ ID NO: 26946 - DNA, 120 bp, Artificial Sequence
  ENSG00000039068_17 (sequence is synthesized)
cattcagtacaacgacccaacccaagaatctatcattttgaagccaaagatggccttagaggtgggtgactacaaaatcaatctcaagctcatggataaccagaataaagaccaagtgac

SEQ ID NO: 26947 - DNA, 120 bp, Artificial Sequence
  ENSG00000039068_18 (sequence is synthesized)
caccttagaggtcagcgtgtgtgactgtgaaggggccgctggcgtctgtaggaaggcacagcctgtcgaagcaggattgcaaattcctgccattctggggattcttggaggaattcttgc

SEQ ID NO: 26948 - DNA, 120 bp, Artificial Sequence
  ENSG00000039068_19 (sequence is synthesized)
tttgctaattctgattctgctgctcttgctgtttcttcggaggagagcggtggtcaaagagcccttactgcccccagaggatgacacccgggacaacgtttattactatgatgaagaagg

SEQ ID NO: 26949 - DNA, 120 bp, Artificial Sequence
  ENSG00000039068_20 (sequence is synthesized)
aggaccaggactttgacttgagccagctgcacaggggcctggacgctcggcctgaagtgactcgtaacgacgttgcaccaaccctcatgagtgtcccccggtatcttccccgccctgcca

SEQ ID NO: 26950 - DNA, 120 bp, Artificial Sequence
  ENSG00000039068_21 (sequence is synthesized)
atcccgatgaaattggaaattttattgatgaaaatctgaaagcggctgatactgaccccacagccccgccttatgattctctgctcgtgtttgactatgaaggaagcggttccgaagctg

SEQ ID NO: 26951 - DNA, 120 bp, Artificial Sequence
  ENSG00000039068_22 (sequence is synthesized)
ctagtctgagctccctgaactcctcagagtcagacaaagaccaggactatgactacttgaacgaatggggcaatcgcttcaagaagctggctgacatgtacggaggcggcgaggacgact

SEQ ID NO: 26952 - DNA, 120 bp, Artificial Sequence
  ENSG00000039068_23 (sequence is synthesized)
aggggactcgagagaggcgggccccagacccatgtgctgggaaatgcagaaatcacgttgctggtggtttttcagctcccttcccttgagatgagtttctggggaaaaaaaagagactgg

SEQ ID NO: 26953 - DNA, 120 bp, Artificial Sequence
  ENSG00000039068_24 (sequence is synthesized)
ttagtgatgcagttagtatagctttatactctctccactttatagctctaataagtttgtgttagaaaagtttcgacttatttcttaaagcttttttttttttcccatcactctttacat

SEQ ID NO: 26954 - DNA, 120 bp, Artificial Sequence
  ENSG00000039068_25 (sequence is synthesized)
ggtggtgatgtccaaaagatacccaaattttaatattccagaagaacaactttagcatcagaaggttcacccagcaccttgcagattttcttaaggaattttgtctcacttttaaaaaga

SEQ ID NO: 26955 - DNA, 120 bp, Artificial Sequence
  ENSG00000039068_26 (sequence is synthesized)
aggggagaagtcagctactctagttctgttgttttgtgtatataattttttaaaaaaaatttgtgtgcttctgctcattactacactggtgtgtccctctgccttttttttttttttaag

SEQ ID NO: 26956 - DNA, 75 bp, Artificial Sequence
  ENSG00000039068_27 (sequence is synthesized)
ctacactggtgtgtccctctgccttttttttttttttaagacagggtctcattctatcggtcctcccaggctcaa

SEQ ID NO: 26957 - DNA, 75 bp, Artificial Sequence
  ENSG00000039068_28 (sequence is synthesized)
gctatccttacgcatgactaattttttaaatatttgagacggggtctccctgtgttacccaggctggtctcaaac

SEQ ID NO: 26958 - DNA, 120 bp, Artificial Sequence
  ENSG00000039068_29 (sequence is synthesized)
gggattacagacatgagccactgcacctgcccagctccccaactccctgccattttttaagagacagtttcgctccatcgcccaggcctgggatgcagtgatgtgatcatagctcactgt

SEQ ID NO: 26959 - DNA, 89 bp, Artificial Sequence
  ENSG00000039068_30 (sequence is synthesized)
tgggatgcagtgatggggctcaagcagttctcccaccagcctcctttttatttttttgtacagatggggtcttgctatgttgcccaagc

SEQ ID NO: 26960 - DNA, 120 bp, Artificial Sequence
  ENSG00000039068_31 (sequence is synthesized)
ccttctgccttggccccccaaagtgctgggattgtgggcatgagctgctgtgcccagcctccatgttttaatatcaactctcactcctgaattcagttgctttgcccaagataggagttc

SEQ ID NO: 26961 - DNA, 120 bp, Artificial Sequence
  ENSG00000039068_32 (sequence is synthesized)
tctgatgcagaaattattgggctcttttagggtaagaagtttgtgtctttgtctggccacatcttgactaggtattgtctactctgaagacctttaatggcttccctctttcatctcctg

SEQ ID NO: 26962 - DNA, 120 bp, Artificial Sequence
  ENSG00000039068_33 (sequence is synthesized)
agtatgtaacttgcaatgggcagctatccagtgacttgttctgagtaagtgtgttcattaatgtttatttagctctgaagcaagagtgatatactccaggacttagaatagtgcctaaag

SEQ ID NO: 26963 - DNA, 120 bp, Artificial Sequence
  ENSG00000039068_34 (sequence is synthesized)
tgctgcagccaaagacagagcggaactatgaaaagtgggcttggagatggcaggagagcttgtcattgagcctggcaatttagcaaactgatgctgaggatgattgaggtgggtctacct

SEQ ID NO: 26964 - DNA, 120 bp, Artificial Sequence
  ENSG00000039068_35 (sequence is synthesized)
catctctgaaaattctggaaggaatggaggagtctcaacatgtgtttctgacacaagatccgtggtttgtactcaaagcccagaatccccaagtgcctgcttttgatgatgtctacagaa

SEQ ID NO: 26965 - DNA, 120 bp, Artificial Sequence
  ENSG00000039068_36 (sequence is synthesized)
aatgctggctgagctgaacacatttgcccaattccaggtgtgcacagaaaaccgagaatattcaaaattccaaatttttttcttaggagcaagaagaaaatgtggccctaaagggggtta

SEQ ID NO: 26966 - DNA, 120 bp, Artificial Sequence
  ENSG00000039068_37 (sequence is synthesized)
gttgaggggtagggggtagtgaggatcttgatttggatctctttttatttaaatgtgaatttcaacttttgacaatcaaagaaaagacttttgttgaaatagctttactgtttctcaagt

SEQ ID NO: 26967 - DNA, 120 bp, Artificial Sequence
  ENSG00000039068_38 (sequence is synthesized)
gttttggagaaaaaaatcaaccctgcaatcactttttggaattgtcttgatttttcggcagttcaagctatatcgaatatagttctgtgtagagaatgtcactgtagttttgagtgtata

SEQ ID NO: 26968 - DNA, 120 bp, Artificial Sequence
  ENSG00000039068_39 (sequence is synthesized)
catgtgtgggtgctgataattgtgtattttctttgggggtggaaaaggaaaacaattcaagctgagaaaagtattctcaaagatgcatttttataaattttattaaacaattttgttaaa

SEQ ID NO: 26969 - DNA, 120 bp, Artificial Sequence
  ENSG00000039068_40 (sequence is synthesized)
aacatccacccaggattttttggtcaacccatgctggatccgcagatcagaggctctgaacacatgaggagcttaacttgacacctcttgacctgttgctaaggagaagtgatgggagaa

SEQ ID NO: 26970 - DNA, 120 bp, Artificial Sequence
  ENSG00000039068_41 (sequence is synthesized)
aaaaaaaaaaagtacatacctaaataaaacccaagcagctctgctctcttcactcggcttgcgggtgtctttagttcactagcaattttattctggaatgagctttttattttcctcccc

SEQ ID NO: 26971 - DNA, 120 bp, Artificial Sequence
  ENSG00000039068_42 (sequence is synthesized)
cacttttaggttgggccaactgagaattttggggactttccttgctgtgaatgtggaattaaattgcttttttatttttattttttatttttcgagatggagtctcgctctgtcgccagg

SEQ ID NO: 26972 - DNA, 62 bp, Artificial Sequence
  ENSG00000039068_43 (sequence is synthesized)
ttttttatttttcgagatggagtctcgctctgtcgccagcctgcctcagcctcctgagtagc

SEQ ID NO: 26973 - DNA, 120 bp, Artificial Sequence
  ENSG00000039068_44 (sequence is synthesized)
ctggctgctttttaatttttttggaaaggtaggggggatttggtcaatgattaatccatctggagtttggtaacggatccagcagtgaattttgaagattgcaccggtcgacaaaggaca

SEQ ID NO: 26974 - DNA, 120 bp, Artificial Sequence
  ENSG00000039068_45 (sequence is synthesized)
aaacacagcctgccaatcctggagaatgcctggtgggggtgctgggggaagaagtccaatttcagctgggaaaatgggacaggagccttgggagtgggtttacacctcaaattcccttat

SEQ ID NO: 26975 - DNA, 120 bp, Artificial Sequence
  ENSG00000039068_46 (sequence is synthesized)
ggccacagtccattggcccctagcctcctccccactttacagatgaagagactgaggtttagagagaggaacagccggcttggcagaggcaactgctgaggcagttgaggaaagtgaatt

SEQ ID NO: 26976 - DNA, 120 bp, Artificial Sequence
  ENSG00000039068_47 (sequence is synthesized)
gaagtgatgcaaaccagaccgtgcagccaactcctgcgtcaggttccataggaatcctttccccgccagtggaggaggctctcccgtcttttggaaatgatgtgcaggagacagagctga

SEQ ID NO: 26977 - DNA, 120 bp, Artificial Sequence
  ENSG00000039068_48 (sequence is synthesized)
gaactatattcttctgtgagaggaatccaaagcctcaggtggcaggattgcttgaacctagtgatcctcccatcttggcctcccagagtattgggattacagacatgagccactgcacct

SEQ ID NO: 26978 - DNA, 120 bp, Artificial Sequence
  ENSG00000039123_0 (sequence is synthesized)
agatttgctctcactgctcccaaaaatggcggacgcattcggagatgagctgttcagcgtgttcgagggcgactcgaccactgcggcgggaaccaaaaaagacaaggaaaaggacaaggg

SEQ ID NO: 26979 - DNA, 120 bp, Artificial Sequence
  ENSG00000039123_1 (sequence is synthesized)
gaaatggaaggggcctccagggtctgcagacaaggcagggaaacgttttgatggtaaattacaatcagaatcaactaataatggaaaaaataagagagatgtagatttcgaaggtacaga

SEQ ID NO: 26980 - DNA, 120 bp, Artificial Sequence
  ENSG00000039123_2 (sequence is synthesized)
tgaacccatttttggaaagaagcccaggatagaagagtcaataactgaagacttaagtttggcagacctgatgcccagagtcaaggtacaatcagttgaaactgttgaagggtgtacaca

SEQ ID NO: 26981 - DNA, 120 bp, Artificial Sequence
  ENSG00000039123_3 (sequence is synthesized)
tgaggttgcacttcctgcagaagaggattatttaccacttaaaccacgagttggaaaagctgctaaggaatacccgttcattcttgatgcttttcaaagagaggccattcagtgtgttga

SEQ ID NO: 26982 - DNA, 120 bp, Artificial Sequence
  ENSG00000039123_4 (sequence is synthesized)
caataatcagtctgttctagtatctgcacatacctcagcgggaaaaacagtatgcgccgagtatgccattgcattggccttaagggaaaagcagcgtgtaatatttaccagcccaattaa

SEQ ID NO: 26983 - DNA, 120 bp, Artificial Sequence
  ENSG00000039123_5 (sequence is synthesized)
ggctctgagtaaccaaaaataccgtgaaatgtatgaagaatttcaagatgttggtttgatgactggtgatgttactattaatcctacggcatcttgtcttgttatgaccacagagatttt

SEQ ID NO: 26984 - DNA, 120 bp, Artificial Sequence
  ENSG00000039123_6 (sequence is synthesized)
gagaagtatgctttacagaggttccgaagttatgagagaagttgcttgggttatatttgatgaaattcattatatgagagattcagaacgtggtgtagtatgggaagaaactattatttt

SEQ ID NO: 26985 - DNA, 120 bp, Artificial Sequence
  ENSG00000039123_7 (sequence is synthesized)
gcttcctgataacgtccactatgtctttctttcggctactattccaaatgcccgacagtttgctgaatggatttgccatttacataaacagccttgtcatgttatttacacagattatcg

SEQ ID NO: 26986 - DNA, 120 bp, Artificial Sequence
  ENSG00000039123_8 (sequence is synthesized)
gcccactccattgcaacactacatttttccagcagggggagatggcctgcatcttgtggttgatgaaaatggtgacttcagagaagataattttaatactgcaatgcaagtgcttcgaga

SEQ ID NO: 26987 - DNA, 120 bp, Artificial Sequence
  ENSG00000039123_9 (sequence is synthesized)
tgcaggtgatttggccaaaggagaccagaaagggcggaaaggaggaacaaaaggaccatcaaatgttttcaaaattgtgaagatgattatggaaagaaatttccaacctgtgattatttt

SEQ ID NO: 26988 - DNA, 120 bp, Artificial Sequence
  ENSG00000039123_10 (sequence is synthesized)
cagttttagtaagaaagattgtgaagcctatgcacttcaaatgaccaaattagatttcaacacagatgaagaaaagaagatggttgaagaagtattcagtaatgcaattgattgcttatc

SEQ ID NO: 26989 - DNA, 120 bp, Artificial Sequence
  ENSG00000039123_11 (sequence is synthesized)
cgatgaagataaaaaactccctcaggtagaacatgtacttcctcttttgaagaggggaattggtattcaccatggtggtttacttcctattttgaaagaaactatagaaattctcttttc

SEQ ID NO: 26990 - DNA, 120 bp, Artificial Sequence
  ENSG00000039123_12 (sequence is synthesized)
tgaaggattgataaaggccttatttgccacggagacctttgctatgggaattaacatgccagctagaactgttttatttacaaatgcccgcaaatttgatgggaaggatttccgatggat

SEQ ID NO: 26991 - DNA, 120 bp, Artificial Sequence
  ENSG00000039123_13 (sequence is synthesized)
ttcttctggtgaatacattcagatgtctggtcgtgctggaaggagaggaatggatgatagaggaattgtaattcttatggtagatgaaaagatgagcccaacaattggaaaacaattact

SEQ ID NO: 26992 - DNA, 120 bp, Artificial Sequence
  ENSG00000039123_14 (sequence is synthesized)
taagggctccgctgatcctctaaatagtgctttccatttgacctacaacatggttttgaacttactacgtgtagaagaaattaatcctgagtacatgttggaaaaatccttctaccagtt

SEQ ID NO: 26993 - DNA, 120 bp, Artificial Sequence
  ENSG00000039123_15 (sequence is synthesized)
tcagcattatagagcaattccaggagtagtagagaaggtaaagaattcagaagaacagtataataaaatagtaattcccaatgaagaaagtgtggttatctattataagattagacagca

SEQ ID NO: 26994 - DNA, 120 bp, Artificial Sequence
  ENSG00000039123_16 (sequence is synthesized)
cttgccaaattgggtaaagaaattgaagaatatattcacaaaccaaaatactgcttaccttttctacaaccaggtcgtttggtaaaggtaaagaatgaaggagatgactttggctgggga

SEQ ID NO: 26995 - DNA, 120 bp, Artificial Sequence
  ENSG00000039123_17 (sequence is synthesized)
gtagtggtgaatttctcaaaaaagtcaaatgttaagcctaactctggtgaactggatcctttgtatgtagtagaagtacttctgcgctgtagcaaagagagcttgaaaaattcagctaca

SEQ ID NO: 26996 - DNA, 120 bp, Artificial Sequence
  ENSG00000039123_18 (sequence is synthesized)
gaagctgcaaaaccagctaaacctgatgagaaaggagagatgcaggttgtcccagttttggtgcatctcctgtctgctatcagcagtgttaggctttacattcctaaagaccttcggccg

SEQ ID NO: 26997 - DNA, 120 bp, Artificial Sequence
  ENSG00000039123_19 (sequence is synthesized)
gtggacaatagacagagtgttttaaaatcaatacaggaagttcagaaacgttttcctgacggcatccccttattagaccctattgatgatatgggcattcaagatcaagggctgaaaaaa

SEQ ID NO: 26998 - DNA, 120 bp, Artificial Sequence
  ENSG00000039123_20 (sequence is synthesized)
gtcattcagaaagtagaagcttttgagcatcgaatgtattctcatccacttcacaatgatccaaatttggaaactgtgtatacgctttgtgaaaaaaaagcacagattgcaatagatatt

SEQ ID NO: 26999 - DNA, 120 bp, Artificial Sequence
  ENSG00000039123_21 (sequence is synthesized)
aaatctgcaaagcgagaactgaagaaagcaagaacagtcctacaaatggatgaactcaaatgtcgcaaacgtgttttaagaaggttgggatttgctacttcttctgatgtaatagagatg

SEQ ID NO: 27000 - DNA, 120 bp, Artificial Sequence
  ENSG00000039123_22 (sequence is synthesized)
aaaggacgagtggcttgtgagataagcagtgctgatgagctccttctaactgagatgatgtttaatggccttttcaatgacctttctgcagaacaggcaacagcattattaagctgcttt

SEQ ID NO: 27001 - DNA, 120 bp, Artificial Sequence
  ENSG00000039123_23 (sequence is synthesized)
gtgtttcaagagaattctagtgagatgcccaaattaacagaacaattagcaggaccacttcgtcaaatgcaggaatgtgctaaaagaattgcaaaagtttcagcagaagccaaattggaa

SEQ ID NO: 27002 - DNA, 120 bp, Artificial Sequence
  ENSG00000039123_24 (sequence is synthesized)
attgatgaggaaacttatctaagctcatttaaacctcacttaatggatgtagtatatacctgggcaactggagctacatttgcccatatctgcaaaatgacagatgtctttgaaggcagc

SEQ ID NO: 27003 - DNA, 120 bp, Artificial Sequence
  ENSG00000039123_25 (sequence is synthesized)
ataattcgttgtatgaggcgcctggaagaattgcttcgacaaatgtgtcaagcagcaaaagccattggaaacactgagctggaaaataaatttgcagaaggaatcaccaaaatcaagaga

SEQ ID NO: 27004 - DNA, 120 bp, Artificial Sequence
  ENSG00000039123_26 (sequence is synthesized)
gatattgtgtttgctgccagcctctacttgtagagtcagctaaaggaatgtgagattttaaattattgaccacctgtttgattacagttgactacaaatgcctgcaagtgtggatttggt

SEQ ID NO: 27005 - DNA, 120 bp, Artificial Sequence
  ENSG00000039123_27 (sequence is synthesized)
tctcccatacattttaatatgtattatatttaaatcaaacatcattcatagaaagcatattacatacatgtttatacataagcattacatttttttaataaaaatgtatacaggtggggc

SEQ ID NO: 27006 - DNA, 120 bp, Artificial Sequence
  ENSG00000039123_28 (sequence is synthesized)
actgttttggtggaaggcttggagtttttttaatgagtttagagctattagataaccactgagttaaaggtaactatgtacacacaaagtgtgcatccaagaggcatagcagcagcagaa

SEQ ID NO: 27007 - DNA, 120 bp, Artificial Sequence
  ENSG00000039123_29 (sequence is synthesized)
gtctttaaaggcttgtacaccaggaagaaagatgcatcctcttgccttgtggcaatcattttcctttagaaaacaggccagcttcacctgggcaccctgctgcctttcaaggctggtgat

SEQ ID NO: 27008 - DNA, 120 bp, Artificial Sequence
  ENSG00000039123_30 (sequence is synthesized)
tgctcggatagtgattcccagttgttggtgtttcatgcagagttgtatgagagtcctcctcttttctttctttaaaagaagttctttctttgaagaaatccgatacatatacagcctaca

SEQ ID NO: 27009 - DNA, 120 bp, Artificial Sequence
  ENSG00000039123_31 (sequence is synthesized)
gtgcaaaatatttaatggtataatttagatcaagttaaaaactacatacaaagttgtgatcaacagcatcctaagataaatataaacaaaaggatatactttgaggtgtacagattaagc

SEQ ID NO: 27010 - DNA, 120 bp, Artificial Sequence
  ENSG00000039123_32 (sequence is synthesized)
atataaaaaattagagactaactgggattttttaaagattattccaaattaagagttgctttgttatgccttcagcaaatagcttcattttgccaatactgaataaaagagttatttcta

SEQ ID NO: 27011 - DNA, 120 bp, Artificial Sequence
  ENSG00000039123_33 (sequence is synthesized)
gttgaaactagctttttgccttgttcttaaagacagttatttgatttacagtgtctgagacagctaaagttcatcactctagttcatcagttttattttccaaaccatcattcattatgg

SEQ ID NO: 27012 - DNA, 120 bp, Artificial Sequence
  ENSG00000039123_34 (sequence is synthesized)
aatgctaaatacatcagttctcaaatagttggtgaggtttttttttcttttttactttgttgtcaggttgcacttcctgcagaagaggattatttaccacttaaaccacgagttggaaaa

SEQ ID NO: 27013 - DNA, 120 bp, Artificial Sequence
  ENSG00000039123_35 (sequence is synthesized)
gaatgtatctaagaagctccagtttccccagtctccccagcactgaagctttaacccagaagtatactgtaagatgttctttaaaaatattttttgtttgatttcatgaataaatctcct

SEQ ID NO: 27014 - DNA, 62 bp, Artificial Sequence
  ENSG00000039123_36 (sequence is synthesized)
aaggtacaatcagttgaaactgttgaagggtgtacacatgaggcagaggttcgctgttgtcg

SEQ ID NO: 27015 - DNA, 120 bp, Artificial Sequence
  ENSG00000039123_37 (sequence is synthesized)
gagccctggaccacaacctaggaggacgttttgagatgttcttcactgcattgtcatggagagctatctactagtgtttctataaaatttagtgtgttgggggaaaagttgagattttat

SEQ ID NO: 27016 - DNA, 120 bp, Artificial Sequence
  ENSG00000039123_38 (sequence is synthesized)
atatacatgcatttacgtatattaattgtacgctaactacatgccaggcattgttttaagcactaggggatatagtgaacaaaaagacacccctgccttcatggagtttacattctagtg

SEQ ID NO: 27017 - DNA, 120 bp, Artificial Sequence
  ENSG00000039123_39 (sequence is synthesized)
tggggagatagacaataagtcaacaattaaatttatcagatggtgataagtctgtaagataaaaacaaagcagaaaagacaatagaattggcagatggatatgatggtctagggcctcca

SEQ ID NO: 27018 - DNA, 120 bp, Artificial Sequence
  ENSG00000039123_40 (sequence is synthesized)
cagggaaggtggcagttaaggcctttggtgtatgcttgatgtacgtgaacaccagcaagaggccagtgtggctggagcagaatgggcagtgagtagaggagtaggggttgaagtgagaaa

SEQ ID NO: 27019 - DNA, 120 bp, Artificial Sequence
  ENSG00000039123_41 (sequence is synthesized)
ggaaatgattccatagttcccagccccaggcttctcaactctgcagtgactggaggtgtggagtttgggagtgacctgccccaacttggactttacaaggtaattgttgctcttacattc

SEQ ID NO: 27020 - DNA, 120 bp, Artificial Sequence
  ENSG00000039123_42 (sequence is synthesized)
agggcaagtctgtagagtagcacagtagaagtggggagaacagatcaagaaaggatggctaaaccaaggtggtagtaatggagtggtggtgggggggcaaggggcataagcttcagtcct

SEQ ID NO: 27021 - DNA, 120 bp, Artificial Sequence
  ENSG00000039123_43 (sequence is synthesized)
gtctactgactcttgaccaagaaaaaggactaagttaatcaaagaatataaccacattgttgctgagtcagtcaatgctagtgatttctgcaaacaacttagtgtcctaagaagaggttt

SEQ ID NO: 27022 - DNA, 120 bp, Artificial Sequence
  ENSG00000039123_44 (sequence is synthesized)
gttgataaatgtaggcctgtttaatgactcagaatttaagtgtaggtgtcaaagttttaaaaataatttgtaatcaaaatttgtatttgtccttccttggcctagaaagaatttcacatg

SEQ ID NO: 27023 - DNA, 120 bp, Artificial Sequence
  ENSG00000039123_45 (sequence is synthesized)
ggaactgaaaaaaaagtgtcttctgatataggttgaaaatccaagtctttggattttacatttctttagacagtttagtccttccctataattttttttatttttatttttatttattta

SEQ ID NO: 27024 - DNA, 70 bp, Artificial Sequence
  ENSG00000039123_46 (sequence is synthesized)
tttatttttatttttatttatttatttagtgtgtggagacagagtttcgctcttgttatccacctcccag

SEQ ID NO: 27025 - DNA, 77 bp, Artificial Sequence
  ENSG00000039123_47 (sequence is synthesized)
ctcctgcctcagcctcctgagtagctgaactacaggcatgcgccaccacgcccggctgggctgctcttgaactcctg

SEQ ID NO: 27026 - DNA, 120 bp, Artificial Sequence
  ENSG00000039123_48 (sequence is synthesized)
ggattacaggcatgagctactgcgcccgacctagcatttatctttttaaacagttctagacacctctttcctggccagcccccatggagtatttcagagtcaaaagaacaggggtctggc

SEQ ID NO: 27027 - DNA, 120 bp, Artificial Sequence
  ENSG00000039123_49 (sequence is synthesized)
ttcagagtcaaaagaacaggggtctggcttgtatgttttccacctcacagaggtggctgcaaattcctctaggtgttcagcaaggtgtttgactttctaggctgctcgcttaccagttga

SEQ ID NO: 27028 - DNA, 120 bp, Artificial Sequence
  ENSG00000039139_0 (sequence is synthesized)
agtaaaactttccatttggaagcctgttggatgttgagcaggtctgccaggagttagaagaccattccggaagagctgactccagcctgtccatgcacggctacaatgtttaggattggg

SEQ ID NO: 27029 - DNA, 120 bp, Artificial Sequence
  ENSG00000039139_1 (sequence is synthesized)
aggagacagctctggaagcatagcgtcactcgagttttaacgcaaagactgaagggagagaaggaagccaagcgggctcttttggatgcgaggcataactacttatttgcaattgtggct

SEQ ID NO: 27030 - DNA, 120 bp, Artificial Sequence
  ENSG00000039139_2 (sequence is synthesized)
tcctgtttggacctgaacaaaaccgaagtggaggatgccattcttgaagggaatcagattgaaagaattgatcaactttttgctgttggaggtctccgacacctcatgttttactatcaa

SEQ ID NO: 27031 - DNA, 120 bp, Artificial Sequence
  ENSG00000039139_3 (sequence is synthesized)
gatgtggaggaagcagaaacaggacaacttggctctctaggaggggtaaatcttgtttctggaaagattaaaaaacctaaggtgttcgtgaccgagggaaacgatgtggctcttactggg

SEQ ID NO: 27032 - DNA, 120 bp, Artificial Sequence
  ENSG00000039139_4 (sequence is synthesized)
gtatgtgtgttcttcatcaggactgacccttccaaagccatcacccctgacaacatccaccaggaggtgagttttaacatgttagatgcggcagatggaggcctgctcaacagtgtgaga

SEQ ID NO: 27033 - DNA, 120 bp, Artificial Sequence
  ENSG00000039139_5 (sequence is synthesized)
cgtttgctgtcggacatcttcattcctgctctcagagccacgagccatggctggggcgagctcgagggccttcaggacgcagctaacattcgccaggagttcttgagctccctggaaggc

SEQ ID NO: 27034 - DNA, 120 bp, Artificial Sequence
  ENSG00000039139_6 (sequence is synthesized)
tttgtgaacgtcctgtcgggtgcacaggagagtctgaaggagaaggtgaaccttcgaaagtgtgacatacttgaactgaaaaccctaaaggaacctacggactacttgactctagcaaat

SEQ ID NO: 27035 - DNA, 120 bp, Artificial Sequence
  ENSG00000039139_7 (sequence is synthesized)
aaccctgagactttgggaaaaatagaggattgcatgaaagtatggatcaaacagacagaacaggttcttgctgaaaacaatcagctgctgaaggaagcggatgacgttgggccacgagcg

SEQ ID NO: 27036 - DNA, 120 bp, Artificial Sequence
  ENSG00000039139_8 (sequence is synthesized)
gagctggagcactggaaaaaaagactctccaagtttaactaccttttggaacaattgaaaagcccggatgtgaaggctgtgctggcagtgcttgcggcggccaagtcgaaactgctgaag

SEQ ID NO: 27037 - DNA, 120 bp, Artificial Sequence
  ENSG00000039139_9 (sequence is synthesized)
acttggcgggagatggatattcgaatcactgatgcaactaatgaagcaaaggacaatgtgaaatacttgtatacacttgaaaaatgttgtgaccctttgtacagcagtgatcccctatcc

SEQ ID NO: 27038 - DNA, 120 bp, Artificial Sequence
  ENSG00000039139_10 (sequence is synthesized)
atgatggatgctattcctacacttataaatgcaattaaaatgatctatagtatctctcattactataatacctctgagaagatcacatctctgtttgtaaaggtgacaaatcagattata

SEQ ID NO: 27039 - DNA, 120 bp, Artificial Sequence
  ENSG00000039139_11 (sequence is synthesized)
tctgcatgtaaagcctatattaccaataatggaaccgcttccatctggaaccagccacaggatgttgttgaagaaaaaatactatctgcgattaaactgaaacaggaataccagctctgc

SEQ ID NO: 27040 - DNA, 120 bp, Artificial Sequence
  ENSG00000039139_12 (sequence is synthesized)
tttcacaagacaaaacaaaagcttaaacaaaatccaaatgcaaaacaatttgattttagcgagatgtatatttttggaaaattcgaaacttttcaccgacgccttgccaagataatagac

SEQ ID NO: 27041 - DNA, 120 bp, Artificial Sequence
  ENSG00000039139_13 (sequence is synthesized)
atctttacaaccctcaagacgtattcagtcctgcaagattccacaattgaagggctggaagacatggccactaaataccagggcattgtggcaaccataaagaaaaaggaatacaatttc

SEQ ID NO: 27042 - DNA, 120 bp, Artificial Sequence
  ENSG00000039139_14 (sequence is synthesized)
ctagaccagcggaaaatggattttgaccaagattacgaagagttttgcaagcagactaatgaccttcataacgagttgcggaagttcatggatgttacatttgcaaagattcaaaacaca

SEQ ID NO: 27043 - DNA, 120 bp, Artificial Sequence
  ENSG00000039139_15 (sequence is synthesized)
aatcaagctctaagaatgttgaagaaatttgaaagattgaatatacctaatcttggtattgatgacaaatatcaacttatccttgagaactatggggctgacattgatatgatttcaaag

SEQ ID NO: 27044 - DNA, 120 bp, Artificial Sequence
  ENSG00000039139_16 (sequence is synthesized)
ctgtatacaaagcagaaatacgatcctcctctggctcgaaaccagcctcccatcgctggaaagattttgtgggcccgccagctcttccataggattcagcagcccatgcagcttttccag

SEQ ID NO: 27045 - DNA, 120 bp, Artificial Sequence
  ENSG00000039139_17 (sequence is synthesized)
cagcacccagctgtgctaagcacggcagaagccaaacctataattcgcagttacaacaggatggccaaggtcctcctggagtttgaggtcctcttccacagggcgtggcttcggcaaatt

SEQ ID NO: 27046 - DNA, 120 bp, Artificial Sequence
  ENSG00000039139_18 (sequence is synthesized)
gaagaaattcatgtaggtcttgaggcttcattattggtgaaggctccaggcacaggggaattgtttgtaaactttgaccctcagatattaatcttatttagagaaacagagtgcatggcc

SEQ ID NO: 27047 - DNA, 120 bp, Artificial Sequence
  ENSG00000039139_19 (sequence is synthesized)
cagatgggtctggaagtctctccactggcaacttccctcttccagaaacgagatagatacaaaaggaacttcagtaacatgaagatgatgctagctgaatatcagagagtgaagtcaaaa

SEQ ID NO: 27048 - DNA, 120 bp, Artificial Sequence
  ENSG00000039139_20 (sequence is synthesized)
atacctgctgccattgagcaattgattgtccctcacttggccaaagtggatgaagctctccaacctggcttggctgcactgacctggacatcactgaatattgaggcttatttagaaaac

SEQ ID NO: 27049 - DNA, 120 bp, Artificial Sequence
  ENSG00000039139_21 (sequence is synthesized)
acttttgcaaagatcaaggacctggagttgctgcttgacagggtcaatgatttgattgagttccgcattgatgccattctagaagaaatgagcagcacgcctctttgtcagcttccccag

SEQ ID NO: 27050 - DNA, 120 bp, Artificial Sequence
  ENSG00000039139_22 (sequence is synthesized)
gaggagccactaacctgtgaagagtttctccaaatgacaaaggatctttgtgtaaatggtgcacaaatactacattttaaaagctcattagtggaggaggcagtcaatgagcttgtaaat

SEQ ID NO: 27051 - DNA, 120 bp, Artificial Sequence
  ENSG00000039139_23 (sequence is synthesized)
atgttgctggatgtggaagttttatctgaagaagaaagtgaaaaaatatccaatgagaatagtgttaattacaaaaatgaaagttcagcaaaaagagaagaaggaaattttgacaccttg

SEQ ID NO: 27052 - DNA, 120 bp, Artificial Sequence
  ENSG00000039139_24 (sequence is synthesized)
acatcatctattaatgccagggccaatgccctgcttttgacgacagtcacgaggaaaaagaaagaaactgagatgttaggggaagaagcccgcgagttactctctcatttcaaccatcag

SEQ ID NO: 27053 - DNA, 120 bp, Artificial Sequence
  ENSG00000039139_25 (sequence is synthesized)
aacatggatgctcttctgaaagttacaaggaatacactagaggccattcgcaaacgtattcattcctctcacacaattaacttccgggacagtaacagtgcctctaacatgaagcagaac

SEQ ID NO: 27054 - DNA, 120 bp, Artificial Sequence
  ENSG00000039139_26 (sequence is synthesized)
agtttgcccattttccgggcaagcgtcactctggccattcccaacatcgtcatggcccctgccctggaagatgtacagcagaccctgaacaaagccgtggagtgcatcatcagtgtccct

SEQ ID NO: 27055 - DNA, 120 bp, Artificial Sequence
  ENSG00000039139_27 (sequence is synthesized)
aagggggtcagacagtggagcagtgaactgttgtccaagaaaaagatacaagaaagaaaaatggctgctttgcagagtaatgaagacagtgattctgatgttgaaatgggagaaaatgaa

SEQ ID NO: 27056 - DNA, 120 bp, Artificial Sequence
  ENSG00000039139_28 (sequence is synthesized)
cttcaagataccttggagatagcatctgtaaatttacccattcccgtgcaaaccaagaactattataagaatgtttctgaaaacaaagagattgtaaaattagtttctgtgcttagcaca

SEQ ID NO: 27057 - DNA, 120 bp, Artificial Sequence
  ENSG00000039139_29 (sequence is synthesized)
attatcaactccaccaaaaaggaagttattacatccatggattgcttcaaacgctacaatcacatttggcaaaagggaaaagaagaagccattaagacatttattacacagagccccttg

SEQ ID NO: 27058 - DNA, 120 bp, Artificial Sequence
  ENSG00000039139_30 (sequence is synthesized)
ctttctgaatttgagtcccagattctctatttccaaaacctagagcaggaaattaatgctgagcctgaatatgtctgtgtgggttccattgctctgtacacagctgacttgaagttcgcc

SEQ ID NO: 27059 - DNA, 120 bp, Artificial Sequence
  ENSG00000039139_31 (sequence is synthesized)
ctgactgctgagacaaaggcctggatggttgtcattggacgccactgtaacaaaaaataccggagtgagatggaaaacatttttatgcttattgaagaattcaataagaaactaaatcgt

SEQ ID NO: 27060 - DNA, 120 bp, Artificial Sequence
  ENSG00000039139_32 (sequence is synthesized)
ccaattaaggacctagatgatattcggattgcaatggcagcgctgaaagaaataagggaggagcaaatctccattgactttcaagtaggacctattgaggaatcttatgccctgcttaac

SEQ ID NO: 27061 - DNA, 120 bp, Artificial Sequence
  ENSG00000039139_33 (sequence is synthesized)
agatatggacttctgatagcaagggaagagatagacaaagttgatacactgcactatgcttgggagaagctgctggcacgtgctggcgaagtccagaataaattagtctcactgcagccc

SEQ ID NO: 27062 - DNA, 120 bp, Artificial Sequence
  ENSG00000039139_34 (sequence is synthesized)
agtttcaagaaagagcttattagtgctgtggaggtattcctccaagattgtcaccagttttatctggactatgatttgaatggtccaatggctagcggcttgaagccccaggaagccagt

SEQ ID NO: 27063 - DNA, 120 bp, Artificial Sequence
  ENSG00000039139_35 (sequence is synthesized)
gacaggcttatcatgtttcagaatcaatttgataatatctatcggaaatacatcacatatactggaggagaggagctttttggcctgccagctacacagtatcctcagcttcttgaaata

SEQ ID NO: 27064 - DNA, 120 bp, Artificial Sequence
  ENSG00000039139_36 (sequence is synthesized)
aagaagcaactaaatcttctacagaaaatatatactctgtacaacagtgtcatagaaactgtaaatagctattatgatattctttggtcagaggtgaatattgaaaaaattaacaatgaa

SEQ ID NO: 27065 - DNA, 120 bp, Artificial Sequence
  ENSG00000039139_37 (sequence is synthesized)
ctcttagaattccagaacagatgtcgaaagcttccccgggccttgaaggactggcaggcttttttggacctgaagaagatcattgatgatttcagcgagtgttgcccgctgctggaatac

SEQ ID NO: 27066 - DNA, 120 bp, Artificial Sequence
  ENSG00000039139_38 (sequence is synthesized)
atggccagtaaagccatgatggagcggcactgggaaaggataaccaccctcaccgggcacagtctggatgtggggaatgaaagctttaagttaagaaatatcatggaggcacctcttctg

SEQ ID NO: 27067 - DNA, 120 bp, Artificial Sequence
  ENSG00000039139_39 (sequence is synthesized)
aaatataaagaggaaatagaggacatctgtatcagtgcggtgaaagagagagacattgagcaaaagctgaagcaagtgattaatgaatgggacaataaaacattcaccttcggcagcttt

SEQ ID NO: 27068 - DNA, 120 bp, Artificial Sequence
  ENSG00000039139_40 (sequence is synthesized)
aaaacccgtggagagctcctcttgagaggagacagtacctcggaaatcatcgccaacatggaggacagcttgatgttgctgggatccctactgagcaacaggtacaatatgccattcaaa

SEQ ID NO: 27069 - DNA, 120 bp, Artificial Sequence
  ENSG00000039139_41 (sequence is synthesized)
gcccagattcaaaaatgggtgcagtacctttccaactcaacagacatcatcgagagctggatgacggtgcaaaacctgtggatttatttagaagctgtctttgtgggaggagacattgcc

SEQ ID NO: 27070 - DNA, 120 bp, Artificial Sequence
  ENSG00000039139_42 (sequence is synthesized)
aagcagctgcccaaggaagccaagcggttttctaacatagataaatcttgggtgaagatcatgactcgggcacatgaagtgcccagtgtagtccagtgctgtgttggagatgagaccctg

SEQ ID NO: 27071 - DNA, 120 bp, Artificial Sequence
  ENSG00000039139_43 (sequence is synthesized)
gggcagctgttaccacacttgctggaccagttggaaatatgccagaaatcccttactgggtacttggagaaaaaacgactgtgctttcctcggtttttcttcgtctcagatcctgccctt

SEQ ID NO: 27072 - DNA, 120 bp, Artificial Sequence
  ENSG00000039139_44 (sequence is synthesized)
ctagagattctggggcaggcgtcggactcccacactatacaggcccatttgctgaatgtgtttgacaacattaaatctgtcaagttccacgaaaagatctatgatcgaattctgtcaatt

SEQ ID NO: 27073 - DNA, 120 bp, Artificial Sequence
  ENSG00000039139_45 (sequence is synthesized)
tcctctcaagagggtgagacgattgaattggataaacctgtcatggcagagggcaatgtggaagtttggcttaattctcttttggaagaatctcagtcctcattgcatcttgtgattcgc

SEQ ID NO: 27074 - DNA, 120 bp, Artificial Sequence
  ENSG00000039139_46 (sequence is synthesized)
caggcagccgcaaatattcaagaaacaggtttccaactaactgaatttctttcatccttccctgctcaggttggattattaggaattcagatgatatggacacgggattcagaagaagcc

SEQ ID NO: 27075 - DNA, 120 bp, Artificial Sequence
  ENSG00000039139_47 (sequence is synthesized)
cttagaaatgccaagtttgataaaaaaatcatgcagaaaactaatcaggctttcctggagctactcaatacattgatagacgtcaccacgagggatctgagttccacggaacgagtgaaa

SEQ ID NO: 27076 - DNA, 120 bp, Artificial Sequence
  ENSG00000039139_48 (sequence is synthesized)
tacgagactctgattactattcatgtgcaccaaagggatatctttgatgacctgtgtcatatgcatatcaagagtcccatggactttgagtggctgaaacagtgcagattttactttaac

SEQ ID NO: 27077 - DNA, 120 bp, Artificial Sequence
  ENSG00000039139_49 (sequence is synthesized)
gaagattctgacaagatgatgattcacatcacagatgtggcgttcatataccagaatgaatttttaggctgcactgacaggcttgtaataactccacttacagacagatgttacatcacg

SEQ ID NO: 27078 - DNA, 120 bp, Artificial Sequence
  ENSG00000039139_50 (sequence is synthesized)
ctggctcaagctctgggaatgagcatggggggagcccctgctggacctgcaggcacaggcaaaacagaaaccactaaagacatgggacgatgcctcgggaaatacgtcgtggttttcaat

SEQ ID NO: 27079 - DNA, 120 bp, Artificial Sequence
  ENSG00000039139_51 (sequence is synthesized)
tgttcagaccagatggatttccgaggacttggacggatttttaagggactggcacagtctggatcctggggttgttttgatgaatttaaccgtattgatctaccagttctctcggttgca

SEQ ID NO: 27080 - DNA, 120 bp, Artificial Sequence
  ENSG00000039139_52 (sequence is synthesized)
gcccagcaaatttccattattctgacatgtaaaaaggagcacaaaaagtcttttatctttactgatggagataatgtgactatgaaccctgaatttgggcttttcttaaccatgaatcct

SEQ ID NO: 27081 - DNA, 120 bp, Artificial Sequence
  ENSG00000039139_53 (sequence is synthesized)
ggctatgccggacggcaggaactccctgaaaacttgaagattaatttccgctcagtggccatgatggtgcctgaccgtcagattatcataagggtgaagttggctagttgtggcttcatt

SEQ ID NO: 27082 - DNA, 120 bp, Artificial Sequence
  ENSG00000039139_54 (sequence is synthesized)
gacaacgttgttttggccaggaagtttttcacgctctacaaactgtgtgaggagcagctttctaagcaggttcattatgactttggcctgcgtaacattctgtcagttcttcggaccttg

SEQ ID NO: 27083 - DNA, 120 bp, Artificial Sequence
  ENSG00000039139_55 (sequence is synthesized)
ggagcagcaaaaagagccaatccaatggatacggagtccacgattgtcatgcgtgtactacgggacatgaatctttctaaactgattgatgaggatgaacccttgtttttgagtttgatt

SEQ ID NO: 27084 - DNA, 120 bp, Artificial Sequence
  ENSG00000039139_56 (sequence is synthesized)
gaagatctctttccaaatattcttctggacaaggcaggttaccctgaactggaagcagcaattagtagacaggttgaagaagctggtttaatcaaccatcctccttggaaactgaaggtc

SEQ ID NO: 27085 - DNA, 120 bp, Artificial Sequence
  ENSG00000039139_57 (sequence is synthesized)
atccagctattcgaaacgcagagagtgcgacatgggatgatgactctggggcccagtggggctgggaagaccacctgcatccacaccttgatgagagccatgacagattgtggaaaacca

SEQ ID NO: 27086 - DNA, 120 bp, Artificial Sequence
  ENSG00000039139_58 (sequence is synthesized)
catcgggaaatgaggatgaatcccaaagcgattactgccccacagatgtttggtcggctggacgttgccacaaatgactggactgatgggatattttctacgctttggaggaaaacatta

SEQ ID NO: 27087 - DNA, 120 bp, Artificial Sequence
  ENSG00000039139_59 (sequence is synthesized)
agagcaaagaaaggggaacatatctggataattcttgatggtccagtagatgccatctggattgaaaatctgaattctgttttggatgataacaaaactctaacccttgccaatggtgat

SEQ ID NO: 27088 - DNA, 120 bp, Artificial Sequence
  ENSG00000039139_60 (sequence is synthesized)
cggattcccatggctccaaactgcaagatcattttcgagcctcataacattgacaatgcttctcctgccaccgtctcaagaaatggaatggttttcatgagctcttctatccttgattgg

SEQ ID NO: 27089 - DNA, 120 bp, Artificial Sequence
  ENSG00000039139_61 (sequence is synthesized)
agtcctattcttgagggttttcttaagaaacgctcacctcaagaagcagaaattcttcgtcagctgtacaccgagtctttcccagacttgtatcgcttctgtatccagaacttagaatac

SEQ ID NO: 27090 - DNA, 120 bp, Artificial Sequence
  ENSG00000039139_62 (sequence is synthesized)
aagatggaggtgctggaggcctttgtcatcacacagagcattaacatgcttcaaggcctgattcctctgaaggagcaaggcggggaggtgagccaggctcacctggggcggctgttcgtg

SEQ ID NO: 27091 - DNA, 120 bp, Artificial Sequence
  ENSG00000039139_63 (sequence is synthesized)
tgttcgtgttcgcgctgctgtggagcgcgggggcggcgctggagctggacggacggcgccgcctggagctctggctgcgctctcggcccacagggacgctggagctgccgccgccagcgg

SEQ ID NO: 27092 - DNA, 120 bp, Artificial Sequence
  ENSG00000039139_64 (sequence is synthesized)
gacaccgccttcgactactatgtggcgcccgatggtacatggacgcactggaacacgcgtacccaggaatacctgtatccgtctgataccaccccagagtatggttctattctggtgcca

SEQ ID NO: 27093 - DNA, 120 bp, Artificial Sequence
  ENSG00000039139_65 (sequence is synthesized)
caaaccattgctaaacagggcaaggctgtgctattaattggtgaacaaggaacagccaaaacagtaataattaaaggatttatgtcaaaatatgatcctgaatgtcacatgatcaagagt

SEQ ID NO: 27094 - DNA, 120 bp, Artificial Sequence
  ENSG00000039139_66 (sequence is synthesized)
ctgaatttttcttctgcaaccaccccactgatgttccagaggacgatagagagctatgtggataaacgaatgggtacaacatatggccctcctgcgggaaagaagatgactgtttttatt

SEQ ID NO: 27095 - DNA, 120 bp, Artificial Sequence
  ENSG00000039139_67 (sequence is synthesized)
gatgatgtgaatatgccaataatcaatgagtggggagatcaggttacgaatgagatagtgcgacagctgatggaacaaaatggattctataatctagagaagcctggggagttcaccagc

SEQ ID NO: 27096 - DNA, 120 bp, Artificial Sequence
  ENSG00000039139_68 (sequence is synthesized)
atcgtggacatccagtttttggcagccatgatccatcctggtggtggacgcaatgacataccccaaagactcaagaggcagttctctatatttaattgcacgttgccctctgaagcttct

SEQ ID NO: 27097 - DNA, 120 bp, Artificial Sequence
  ENSG00000039139_69 (sequence is synthesized)
gtggacaagatctttggtgtgattggggtaggccactactgtactcagaggggtttctcagaagaagtgagagattctgtgacaaaattggtgcctctgacacgccgactatggcagatg

SEQ ID NO: 27098 - DNA, 120 bp, Artificial Sequence
  ENSG00000039139_70 (sequence is synthesized)
accaagattaaaatgcttcctacccctgcaaaattccattatgtgtttaacctacgagatctttctcgggtctggcagggaatgctgaacactacttcagaggtcatcaaggaaccaaat

SEQ ID NO: 27099 - DNA, 120 bp, Artificial Sequence
  ENSG00000039139_71 (sequence is synthesized)
gatctgttaaagctgtggaagcatgagtgtaaacgtgttatagctgaccgtttcacagtgtccagtgatgtgacctggtttgataaggctttagtaagtttggtagaggaggagtttggt

SEQ ID NO: 27100 - DNA, 120 bp, Artificial Sequence
  ENSG00000039139_72 (sequence is synthesized)
gaagagaaaaaactcttggtggattgtggaattgacacatattttgtggatttcttgagagatgcacctgaagctgcaggtgaaacatctgaagaggctgatgctgaaacacctaaaatt

SEQ ID NO: 27101 - DNA, 120 bp, Artificial Sequence
  ENSG00000039139_73 (sequence is synthesized)
tatgagccaattgaatcttttagtcacctaaaagagcgtctgaatatgttcctgcagctctataatgagagcatccgtggcgccggcatggacatggtgttctttgcagatgccatggtt

SEQ ID NO: 27102 - DNA, 120 bp, Artificial Sequence
  ENSG00000039139_74 (sequence is synthesized)
cacttagtcaagatctctcgtgtcattcgtactcctcagggaaatgccctcctggtcggggtgggcggatcaggaaagcagagcctgacgaggttggcttcattcattgctggctacgtt

SEQ ID NO: 27103 - DNA, 120 bp, Artificial Sequence
  ENSG00000039139_75 (sequence is synthesized)
tccttccagatcactctgacgagatcctacaacacatcaaatctgatggaagatctgaaggttttgtatcgaacagctggtcagcaaggcaaaggaatcacttttattttcacagacaat

SEQ ID NO: 27104 - DNA, 120 bp, Artificial Sequence
  ENSG00000039139_76 (sequence is synthesized)
gagattaaagatgagtcatttttggaatatatgaacaatgttttatcatcaggtgaggtctctaacctatttgctcgagatgaaattgatgaaattaatagcgacctggcatcagtcatg

SEQ ID NO: 27105 - DNA, 120 bp, Artificial Sequence
  ENSG00000039139_77 (sequence is synthesized)
aaaaaagaattccccaggtgccttcctaccaatgagaacctgcacgactacttcatgagtcgggtccgacagaaccttcatattgtgctctgcttctcgccagtgggggagaaatttcga

SEQ ID NO: 27106 - DNA, 120 bp, Artificial Sequence
  ENSG00000039139_78 (sequence is synthesized)
aacagagctttgaagttccctgccctaatttcaggatgcacaattgactggttcagccgatggcccaaagatgctttagttgctgtgtctgaacacttcctcacttcctatgatattgac

SEQ ID NO: 27107 - DNA, 120 bp, Artificial Sequence
  ENSG00000039139_79 (sequence is synthesized)
tgcagtttggaaatcaagaaggaggtggtccaatgcatgggctccttccaggatggggtggctgagaagtgtgttgattattttcagagattccgacgttctacccacgtgacgcccaaa

SEQ ID NO: 27108 - DNA, 120 bp, Artificial Sequence
  ENSG00000039139_80 (sequence is synthesized)
tcatacctctcctttattcagggctataagttcatatatggagaaaagcatgtggaggtgcggaccctggccaacagaatgaatactggattggaaaagctcaaagaagcttcagagtct

SEQ ID NO: 27109 - DNA, 120 bp, Artificial Sequence
  ENSG00000039139_81 (sequence is synthesized)
gttgcagccttgagtaaagaactggaagcgaaagaaaaggagctacaagtggccaacgataaagccgacatggtcttaaaagaagtgacaatgaaagcacaggctgctgaaaaggtcaag

SEQ ID NO: 27110 - DNA, 120 bp, Artificial Sequence
  ENSG00000039139_82 (sequence is synthesized)
gctgaggtacagaaggtgaaggacagggcccaggccattgtggacagcatctctaaagacaaagccattgctgaagaaaaactggaagcagcaaaaccagctttagaagaggcagaagct

SEQ ID NO: 27111 - DNA, 120 bp, Artificial Sequence
  ENSG00000039139_83 (sequence is synthesized)
gcattgcagaccatcaggccttcggacatcgccactgttcgcacgttgggccgcccccctcacctcatcatgcggatcatggattgcgtactgctgctgtttcaaaggaaagtcagtgct

SEQ ID NO: 27112 - DNA, 120 bp, Artificial Sequence
  ENSG00000039139_84 (sequence is synthesized)
gtgaaaattgacctggaaaaaagctgtaccatgccctcctggcaggaatccttaaaattgatgactgcagggaactttttacagaacttacagcaattcccaaaagacacaatcaatgaa

SEQ ID NO: 27113 - DNA, 120 bp, Artificial Sequence
  ENSG00000039139_85 (sequence is synthesized)
gaggtgatagaatttttgagtccttactttgaaatgcctgactataacatcgaaactgctaaacgcgtatgtggaaatgtagctggtctttgttcctggacgaaagctatggcttccttc

SEQ ID NO: 27114 - DNA, 120 bp, Artificial Sequence
  ENSG00000039139_86 (sequence is synthesized)
ttttctataaacaaagaagtactgcctctgaaggccaacttggtggtgcaagagaatcgccatctcctggccatgcaggatctgcagaaagcccaggccgagttggatgacaagcaggcg

SEQ ID NO: 27115 - DNA, 120 bp, Artificial Sequence
  ENSG00000039139_87 (sequence is synthesized)
gaacttgacgtggtgcaggctgagtatgaacaggccatgactgaaaagcagaccttgcttgaagatgcagagcgatgcagacacaagatgcagacagcttccacgctcatcagtggcttg

SEQ ID NO: 27116 - DNA, 120 bp, Artificial Sequence
  ENSG00000039139_88 (sequence is synthesized)
gcaggtgaaaaagaaagatggacagagcaaagccaagagtttgctgcacaaactaaaagacttgtaggggatgtactgttggctacagcttttctatcttattctggtccatttaaccaa

SEQ ID NO: 27117 - DNA, 120 bp, Artificial Sequence
  ENSG00000039139_89 (sequence is synthesized)
gagtttcgtgatcttctgttaaatgactggcggaaggaaatgaaagcccggaaaattccatttggaaagaacctaaatctcagtgagatgttgattgatgctcctactattagtgaatgg

SEQ ID NO: 27118 - DNA, 120 bp, Artificial Sequence
  ENSG00000039139_90 (sequence is synthesized)
aacctccaaggtctgccaaatgatgacttgtccattcaaaatggaattattgtcacgaaggcatctcgttaccctttgttaattgatccacagactcaaggcaagatctggattaaaaat

SEQ ID NO: 27119 - DNA, 120 bp, Artificial Sequence
  ENSG00000039139_91 (sequence is synthesized)
aaagaaagccgaaatgaactccagatcacgtctttaaatcacaagtacttcagaaaccacctggaagacagcctttctcttggaaggcctttgcttattgaagatgttggagaggaacta

SEQ ID NO: 27120 - DNA, 120 bp, Artificial Sequence
  ENSG00000039139_92 (sequence is synthesized)
gatccagcactagataatgttttggaaagaaacttcattaaaactgggtctacctttaaggtgaaagttggtgacaaggaagtagatgtgttggatggctttagactctacattaccacc

SEQ ID NO: 27121 - DNA, 120 bp, Artificial Sequence
  ENSG00000039139_93 (sequence is synthesized)
aaattgcctaacccagcctacacccctgagataagtgcccgtacctccatcattgacttcactgtcaccatgaaaggtctagaagatcagttactggggagggtcattctcacagagaag

SEQ ID NO: 27122 - DNA, 120 bp, Artificial Sequence
  ENSG00000039139_94 (sequence is synthesized)
caggaattggagaaagaaagaactcatctgatggaagatgtaactgcaaacaaaagaaggatgaaggaactagaagataacttgctttaccgcctgacaagtacccaggggtccctggta

SEQ ID NO: 27123 - DNA, 120 bp, Artificial Sequence
  ENSG00000039139_95 (sequence is synthesized)
gaagatgaaagtctcattgtcgtgctgagtaacacaaaaaggacagccgaggaggtgacacagaagctagaaatttctgctgagacagaagttcaaattaactcagcccgggaggaatac

SEQ ID NO: 27124 - DNA, 120 bp, Artificial Sequence
  ENSG00000039139_96 (sequence is synthesized)
agacctgtggctacgcggggcagcatcctctacttcctcattactgagatgcgcttggttaatgagatgtatcagacttcgcttcgccagtttctgggcttatttgacctttccttagcc

SEQ ID NO: 27125 - DNA, 120 bp, Artificial Sequence
  ENSG00000039139_97 (sequence is synthesized)
aggtctgtcaagagcccgattacaagcaagaggattgctaatatcatcgagcacatgacctacgaggtttataagtatgctgcccgagggctgtacgaggagcacaaattcctgttcacc

SEQ ID NO: 27126 - DNA, 120 bp, Artificial Sequence
  ENSG00000039139_98 (sequence is synthesized)
ttgttgcttaccctaaagattgacatccagaggaaccgagtcaagcatgaagagtttctcactcttattaaaggaggtgcctcattagaccttaaagcttgtcctccaaaaccatcaaaa

SEQ ID NO: 27127 - DNA, 120 bp, Artificial Sequence
  ENSG00000039139_99 (sequence is synthesized)
tggatcctggacataacatggctgaatttggtggaacttagcaaactcagacagttttcagatgtccttgaccagatatcgagaaatgagaaaatgtggaaaatttggtttgataaggaa

SEQ ID NO: 27128 - DNA, 120 bp, Artificial Sequence
  ENSG00000039139_100 (sequence is synthesized)
aacccggaggaggaacctcttccaaatgcctatgataaatctcttgactgcttcagacgtcttctccttattagatcctggtgtcctgacagaaccatcgcccaggcccgcaagtacatc

SEQ ID NO: 27129 - DNA, 120 bp, Artificial Sequence
  ENSG00000039139_101 (sequence is synthesized)
gtggactccatgggagaaaaatatgccgaaggtgttattttagacttggagaagacgtgggaggaatctgatccacggacgccactcatctgtctcctgtctatgggctcagaccccaca

SEQ ID NO: 27130 - DNA, 120 bp, Artificial Sequence
  ENSG00000039139_102 (sequence is synthesized)
gattccatcattgccttggggaagagattaaaaatagaaacccgttatgtgtccatgggccagggccaggaagtccatgctcggaagctcttgcagcagaccatggcgaacggaggatgg

SEQ ID NO: 27131 - DNA, 120 bp, Artificial Sequence
  ENSG00000039139_103 (sequence is synthesized)
gcacttctgcagaactgccatctgggacttgatttcatggatgagctgatggacataatcatagaaactgagcttgtacatgatgcgttccgcctctggatgaccaccgaggctcataag

SEQ ID NO: 27132 - DNA, 120 bp, Artificial Sequence
  ENSG00000039139_104 (sequence is synthesized)
cagtttcccattacactccttcagatgtccattaaatttgccaacgatcctccacaaggactccgggcaggactgaaaagaacatatagtggtgtcagccaagacctgctggacgtgagc

SEQ ID NO: 27133 - DNA, 120 bp, Artificial Sequence
  ENSG00000039139_105 (sequence is synthesized)
tctgggtcccagtggaagcccatgctgtacgcagtggctttcctgcactccactgtccaggagaggcgcaagttcggtgccctggggtggaatatcccctacgaatttaaccaagcggac

SEQ ID NO: 27134 - DNA, 120 bp, Artificial Sequence
  ENSG00000039139_106 (sequence is synthesized)
tttaatgccactgtgcagttcatccaaaaccacttggatgacatggatgtcaaaaagggtgtctcctggaccaccatccgctacatgataggagagattcaatatggaggcagagtcact

SEQ ID NO: 27135 - DNA, 120 bp, Artificial Sequence
  ENSG00000039139_107 (sequence is synthesized)
gacgactatgataagagattgttgaacacatttgctaaggtttggttcagtgaaaatatgtttggaccagatttcagtttttaccaaggatacaatattccaaaatgcagcacagtggat

SEQ ID NO: 27136 - DNA, 120 bp, Artificial Sequence
  ENSG00000039139_108 (sequence is synthesized)
aactatcttcagtatatccagagtttgcctgcctatgacagccctgaggtgtttgggctgcaccccaatgctgacatcacctaccagagcaagctggccaaggacgtgctggacaccatc

SEQ ID NO: 27137 - DNA, 120 bp, Artificial Sequence
  ENSG00000039139_109 (sequence is synthesized)
ctaggcatccaacccaaggacacctctggtggaggggatgagacccgggaggcggtggtggcccggctggctgatgatatgctggagaagctgcccccagactatgtcccctttgaagta

SEQ ID NO: 27138 - DNA, 120 bp, Artificial Sequence
  ENSG00000039139_110 (sequence is synthesized)
aaagagaggctgcagaagatggggccattccagcctatgaacattttcctcaggcaggaaatagacagaatgcaaagggtactcagccttgtccgcagcaccctcactgagctgaaactt

SEQ ID NO: 27139 - DNA, 120 bp, Artificial Sequence
  ENSG00000039139_111 (sequence is synthesized)
gctattgatggcaccatcatcatgagcgaaaatctgcgagatgcattggattgcatgtttgatgctagaatccctgcttggtggaaaaaagcttcttggatttctagtacactgggtttc

SEQ ID NO: 27140 - DNA, 120 bp, Artificial Sequence
  ENSG00000039139_112 (sequence is synthesized)
tggtttactgaacttatagaaagaaacagccagtttacctcgtgggttttcaatggccgacctcactgcttttggatgacgggtttttttaacccccagggatttttaactgcaatgcga

SEQ ID NO: 27141 - DNA, 120 bp, Artificial Sequence
  ENSG00000039139_113 (sequence is synthesized)
caggaaataactcgggccaacaaaggctgggctctggacaatatggtgctttgcaatgaagtcaccaaatggatgaaggacgacatttctgcccctcccacagagggtgtctatgtctat

SEQ ID NO: 27142 - DNA, 120 bp, Artificial Sequence
  ENSG00000039139_114 (sequence is synthesized)
ggcttatatcttgaaggtgctggctgggacaagaggaacatgaaactcattgaatcaaagccaaaagtgctctttgagttgatgcctgtcataaggatttatgcagaaaacaatacttta

SEQ ID NO: 27143 - DNA, 120 bp, Artificial Sequence
  ENSG00000039139_115 (sequence is synthesized)
cgagatcctcggttttactcctgtcccatctataagaagccagttcgaacggacttgaactacattgccgctgtggatctcaggacagcccagacccctgaacactgggtgctccgtggg

SEQ ID NO: 27144 - DNA, 120 bp, Artificial Sequence
  ENSG00000039139_116 (sequence is synthesized)
gttgcccttctgtgtgatgtcaagtaacatgtggggagtgtccccacccaatgctttggaaaatgcaagatctaaattattgtaacctttatttctgtatgactgctggacagtgtatgt

SEQ ID NO: 27145 - DNA, 120 bp, Artificial Sequence
  ENSG00000039139_117 (sequence is synthesized)
taggtcgtttatgcaattaatgagctgcataggttttccccactccttaattggatgcttatattttacttgtttcatcattagtgaccaatgtctgagtttgttgaaaatgttatttag

SEQ ID NO: 27146 - DNA, 120 bp, Artificial Sequence
  ENSG00000039139_118 (sequence is synthesized)
tgatataaaagtaaatttacagcatcctaatgaagtgtggccctcaaatccacagtagtatattttcttcttacttcgctccgaagactgactagggtaagcagacagtatttctctggg

SEQ ID NO: 27147 - DNA, 120 bp, Artificial Sequence
  ENSG00000039139_119 (sequence is synthesized)
aggaattattcttctgttaacgtggcctggtaacagccaagttcttgaaggtaacagggcaagtctgtgctgattttgcttctattgcctttcgtatttaggtcaagttaagagacttat

SEQ ID NO: 27148 - DNA, 120 bp, Artificial Sequence
  ENSG00000039139_120 (sequence is synthesized)
tttcagggtttcaagcagccaattaaaaataccttttaaaaaatagaaggaaatagaagaatggattaagaatgtaaatagaaaatttatgtaaacatagagaataaacgtagaacaatg

SEQ ID NO: 27149 - DNA, 120 bp, Artificial Sequence
  ENSG00000039139_121 (sequence is synthesized)
cttaagcctacttataattaataatgaaatactaattgataattcttataataaaaattaaagctaaaagtaaatgatagcatgctctcagtaaaactgatccactcacaaattgctgga

SEQ ID NO: 27150 - DNA, 120 bp, Artificial Sequence
  ENSG00000039139_122 (sequence is synthesized)
gcaatgtaaatcaacccaacctttttgtaaaatgattaaatacagaaagagccataaaaatattcacacccttggatctttgttttctctacatcaaggaaacaatttaaaagactgaaa

SEQ ID NO: 27151 - DNA, 120 bp, Artificial Sequence
  ENSG00000039139_123 (sequence is synthesized)
acagtctatataaaattgcatttaataacagaaaaaaatggaaaaatcataaatattcaatagtcaggctatggttaaggaaattaagagatatttggcaaccataaaaaacaattttga

SEQ ID NO: 27152 - DNA, 120 bp, Artificial Sequence
  ENSG00000039139_124 (sequence is synthesized)
agattccataatatgaaatggtagacccagactgttaagtgaaagatttagtttacaaaatattgagcacactgtgattataacagcaaatatatttgcatgtggacaaagattagatgg

SEQ ID NO: 27153 - DNA, 120 bp, Artificial Sequence
  ENSG00000039139_125 (sequence is synthesized)
caagatagaaaaataagaacagatgtgatagcaagaattatagttggcttgaaaaaatgtgatgatcaggagaaaaaataaaaaaagggtagaaatattagacggtgcgtagggactttc

SEQ ID NO: 27154 - DNA, 120 bp, Artificial Sequence
  ENSG00000039139_126 (sequence is synthesized)
tatggacttttattaattaggaaacattatcaaaggaacttttcacgtatttttctttaaattctggttagatgttattaataattcttcatctaacctactgactagaaaatatagtca

SEQ ID NO: 27155 - DNA, 120 bp, Artificial Sequence
  ENSG00000039139_127 (sequence is synthesized)
gtactaaattagaattgtggtttataaacttttggttagctctggatctgtataactgcatttttttggataaacagtttttggtaggtggataccgggagacaagtgtgggtccctctc

SEQ ID NO: 27156 - DNA, 120 bp, Artificial Sequence
  ENSG00000039139_128 (sequence is synthesized)
actgggcttcattctgtggaccaggatcattatttcatgctcatgatcatgagagttaggactgagtggctcctgtgactcccaccatcttagatgatactgttttcttgtgagttcttt

SEQ ID NO: 27157 - DNA, 120 bp, Artificial Sequence
  ENSG00000039139_129 (sequence is synthesized)
cttttggtgtggattagtatatcagttgatttgtgtgaattgtggtgaaacaatcatttcattttgaaaagcaagtaatgaaaatgtcaacatcataggaattaataaaatgtttttact

SEQ ID NO: 27158 - DNA, 120 bp, Artificial Sequence
  ENSG00000039139_130 (sequence is synthesized)
gcccgcctcggcctcccaaagtggtgggagtacaggcatgagccaccgtgcccggccaaccctattatgtttaaaggcagcttgctattctcagagatcagttcttcatttgttctccag

SEQ ID NO: 27159 - DNA, 120 bp, Artificial Sequence
  ENSG00000039139_131 (sequence is synthesized)
ttctccagttgtattcatcctttcccttgttcttggagggcaactagtgtcttgtttctatgtttactgttcccattgaaaccctagagcaacgtttgggtttcagaatcaagttattaa

SEQ ID NO: 27160 - DNA, 120 bp, Artificial Sequence
  ENSG00000039139_132 (sequence is synthesized)
gtgtatgcagaaaggcgactgtcctaggagtatgaccaaccctccttcaatgctaggcttcagccacctcctcctgaaagctgtcctgtcatccccacccctaccccttatcaactccag

SEQ ID NO: 27161 - DNA, 120 bp, Artificial Sequence
  ENSG00000039139_133 (sequence is synthesized)
gctagagtgggagacccttctttttgctccttctctgtagacccataaatgcccctgcatttggagacccataaatctgatgcctctgtggcaactgccatgccatctgtcatatttaaa

SEQ ID NO: 27162 - DNA, 120 bp, Artificial Sequence
  ENSG00000039139_134 (sequence is synthesized)
ttttcagctcacatcctgccagccaggccatgagcttttttgaggttaccaggtagtgttagtctcttcagtgctgacacatattaggggtttaacaaatgtttgttgattaaaagaagg

SEQ ID NO: 27163 - DNA, 120 bp, Artificial Sequence
  ENSG00000039139_135 (sequence is synthesized)
gattgcatgaaagtatggatcaaacagacagaacagcgtctccagccccgtgcaatggctcgtgtttttccccgcgcatttgcaggttcttgctgaaaacaatcagctgctgaaggaagc

SEQ ID NO: 27164 - DNA, 120 bp, Artificial Sequence
  ENSG00000039139_136 (sequence is synthesized)
aaacaggttggctgctgaccagaacctgcagctgtgtagaagagatgtctctgcacaagcaccaggcaacaaagagtgttgatagtgtctgaacacttcctcacttcctatgatattgac

SEQ ID NO: 27165 - DNA, 120 bp, Artificial Sequence
  ENSG00000039319_0 (sequence is synthesized)
ctctgcgctgcccggtggggcggggaaagaagccctgagccgggatctggcactcccaggactcccggccggggtagctcttcactcctcagcgcgacgtcgtgtcgagttcccaaaaag

SEQ ID NO: 27166 - DNA, 120 bp, Artificial Sequence
  ENSG00000039319_1 (sequence is synthesized)
ctccgcaggggctgtagggaggcatacaagaattaaattctgaataagtctgcaggtaggatggacagttattttaaagcagctgtcagtgacttggacaaactccttgatgattttgaa

SEQ ID NO: 27167 - DNA, 120 bp, Artificial Sequence
  ENSG00000039319_2 (sequence is synthesized)
cagaacccagatgaacaagattatctccaagatgtacaaaatgcatatgattctaaccactgctcagtttcttcagagttggcttcctcacagcgaacttcattgctcccaaaagaccaa

SEQ ID NO: 27168 - DNA, 120 bp, Artificial Sequence
  ENSG00000039319_3 (sequence is synthesized)
gagtgcgttaatagttgtgcctcatcagaaacaagctatggaacaaatgagagttccctgaatgaaaaaacactcaagggacttacttctatacaaaatgaaaaaaatgtaacaggactt

SEQ ID NO: 27169 - DNA, 120 bp, Artificial Sequence
  ENSG00000039319_4 (sequence is synthesized)
gatcttctttcttctgtggatggtggtacttcagatgaaatccagccgttatatatgggacgatgtagtaaacctatctgtgatctgataagtgacatgggtaacttagttcatgcaacc

SEQ ID NO: 27170 - DNA, 120 bp, Artificial Sequence
  ENSG00000039319_5 (sequence is synthesized)
aatagtgaagaagatattaaaaaattattgccagatgattttaagtctaatgcagattccttgattggattggatttatcttcagtgtcagatactccctgtgtttcttcaacagaccat

SEQ ID NO: 27171 - DNA, 120 bp, Artificial Sequence
  ENSG00000039319_6 (sequence is synthesized)
gatagtgatactgtcagagaacaacagaatgatatcagttctgaattacaaaatagagaaatcggaggaatcaaagaattgggtataaaagtagatacaacactttcagattcctataat

SEQ ID NO: 27172 - DNA, 120 bp, Artificial Sequence
  ENSG00000039319_7 (sequence is synthesized)
tacagtggaacagaaaatttaaaagataaaaagatctttaatcagttagaatcaattgttgattttaacatgtcatctgctttgactcgacaaagttccaaaatgtttcatgccaaagac

SEQ ID NO: 27173 - DNA, 120 bp, Artificial Sequence
  ENSG00000039319_8 (sequence is synthesized)
aagctacaacacaagagccagccatgtggattactaaaagatgttggcttagtaaaagaggaagtagatgtggcagtcataactgccgcagaatgtttaaaagaagagggcaagacaagt

SEQ ID NO: 27174 - DNA, 120 bp, Artificial Sequence
  ENSG00000039319_9 (sequence is synthesized)
gctttgacctgcagccttccgaaaaatgaagatttatgcttaaatgattcaaattcaagagatgaaaatttcaaattacctgacttttcctttcaggaagataagactgttataaaacaa

SEQ ID NO: 27175 - DNA, 120 bp, Artificial Sequence
  ENSG00000039319_10 (sequence is synthesized)
tctgcacaagaagactcaaaaagtttagaccttaaggataatgatgtaatccaagattcctcttcagctttacatgtttccagtaaagatgtgccgtcctcattgtcctgtcttcctgcg

SEQ ID NO: 27176 - DNA, 120 bp, Artificial Sequence
  ENSG00000039319_11 (sequence is synthesized)
tctgggtctatgtgtggatcattaattgaaagtaaagcacggggtgattttttacctcagcatgaacataaagataatatacaagatgcagtgactatacatgaagaaatacagaacagt

SEQ ID NO: 27177 - DNA, 120 bp, Artificial Sequence
  ENSG00000039319_12 (sequence is synthesized)
gttgttctaggtggggaaccattcaaagagaatgatcttttgaaacaggaaaaatgtaaaagcatactccttcagtcattaattgaagggatggaagacagaaagatagatcctgaccag

SEQ ID NO: 27178 - DNA, 120 bp, Artificial Sequence
  ENSG00000039319_13 (sequence is synthesized)
acagtaatcagagctgagtctttggatggtggtgacaccagttctacagttgtagaatctcaagaggggctttctggcactcatgtcccagagtcttctgattgttgtgaaggttttatt

SEQ ID NO: 27179 - DNA, 120 bp, Artificial Sequence
  ENSG00000039319_14 (sequence is synthesized)
aatactttttcaagcaatgatatggatgggcaagacttagattactttaatattgatgaaggcgcaaaaagtggcccactaattagtgatgctgaacttgatgcctttctgacagaacag

SEQ ID NO: 27180 - DNA, 120 bp, Artificial Sequence
  ENSG00000039319_15 (sequence is synthesized)
tatcttcagaccactaacataaagtcttttgaagaaaatgtaaatgactctaaatcgcaaatgaatcagatagatatgaaaggcttagatgatggaaacatcaataatatatatttcaat

SEQ ID NO: 27181 - DNA, 120 bp, Artificial Sequence
  ENSG00000039319_16 (sequence is synthesized)
gcagaagcaggagctattggggaaagtcatggtattaatataatttgtgaaatagttgataaacaaaatacaatagaaaatggcctttctttaggagaaaaaagcactattccagttcaa

SEQ ID NO: 27182 - DNA, 120 bp, Artificial Sequence
  ENSG00000039319_17 (sequence is synthesized)
caagggttacctaccagtaagtctgagattacaaatcaattatcggtctctgatattaacagtcaatctgttggaggggccagacctaagcaattgtttagccttccatcaagaacaagg

SEQ ID NO: 27183 - DNA, 120 bp, Artificial Sequence
  ENSG00000039319_18 (sequence is synthesized)
agttcaaaggacctgaataagccagatgttccagatacaatagaaagtgaacccagcacagcagataccgttgttccaatcacttgtgctatagattctacagctgatccacaggttagc

SEQ ID NO: 27184 - DNA, 120 bp, Artificial Sequence
  ENSG00000039319_19 (sequence is synthesized)
ttcaactctaattacattgatatagaaagtaattctgaaggtggatctagtttcgtaactgcaaatgaagattctgtacctgaaaacacttgcaaagaaggcttggttttgggccagaaa

SEQ ID NO: 27185 - DNA, 120 bp, Artificial Sequence
  ENSG00000039319_20 (sequence is synthesized)
cagcctacttgggttcctgattcagaagctccaaactgtatgaactgccaagtcaaatttacttttaccaaacggcgacaccattgccgagcatgtgggaaagtattttgtggtgtctgt

SEQ ID NO: 27186 - DNA, 120 bp, Artificial Sequence
  ENSG00000039319_21 (sequence is synthesized)
tgtaataggaagtgtaaactgcaatatctagaaaaggaagcaagagtatgtgtagtctgctatgaaactattagtaaagctcaggcatttgaaaggatgatgagtccaactggttctaat

SEQ ID NO: 27187 - DNA, 120 bp, Artificial Sequence
  ENSG00000039319_22 (sequence is synthesized)
cttaagtctaatcattctgatgaatgtactactgtccagcctcctcaggagaaccaaacatccagtataccttcaccagcaactttgccagtctcagcacttaaacaaccaggtgttgaa

SEQ ID NO: 27188 - DNA, 120 bp, Artificial Sequence
  ENSG00000039319_23 (sequence is synthesized)
ggactatgttccaaagaacagaagagagtatggtttgcagatggtatattgcccaatggtgaagttgcagatacaacaaaattatcatctggaagtaaaagatgttctgaagactttagt

SEQ ID NO: 27189 - DNA, 120 bp, Artificial Sequence
  ENSG00000039319_24 (sequence is synthesized)
cctctctcacctgatgtgcctatgacagtaaacacagtggatcattcccattctactacagtggaaaagccaaacaatgagacaggagatattacaagaaatgagataattcagagtcct

SEQ ID NO: 27190 - DNA, 120 bp, Artificial Sequence
  ENSG00000039319_25 (sequence is synthesized)
atttctcaggttccatcagtggaaaaattgtctatgaacacaggaaatgaggggttacctacttctggttcatttacactagatgatgatgtttttgcagaaactgaagaaccatctagt

SEQ ID NO: 27191 - DNA, 120 bp, Artificial Sequence
  ENSG00000039319_26 (sequence is synthesized)
cctactggtgtcttagttaacagcaatttacctattgctagtatttcagattataggttactgtgtgatattaacaagtatgtctgcaataagattagtcttctacctaatgatgaggac

SEQ ID NO: 27192 - DNA, 120 bp, Artificial Sequence
  ENSG00000039319_27 (sequence is synthesized)
agtttgcccccacttctggttgcatctggagaaaagggatcagtgcctgtagtagaagaacatccatctcatgagcagatcattttgcttcttgaaggtgaaagctttcatcctgttaca

SEQ ID NO: 27193 - DNA, 120 bp, Artificial Sequence
  ENSG00000039319_28 (sequence is synthesized)
agacaaatattggtacttttcaaccaatggattgcatggcttgggacaggcagaaattattattctattgttatgtttgccaaatgaagatactattcctaaggacatcttcagactatt

SEQ ID NO: 27194 - DNA, 120 bp, Artificial Sequence
  ENSG00000039319_29 (sequence is synthesized)
tatcaccatatataaggatgctctaaaaggaaaatacatagaaaacttggacaatattacctttactgagagttttctcagtagcaaggatcacggaggattcctgtttattacacctac

SEQ ID NO: 27195 - DNA, 120 bp, Artificial Sequence
  ENSG00000039319_30 (sequence is synthesized)
ttttcagaaacttgatgatctctcattaccaagtaatccttttctttgtggaattcttatccagaagcttgagattccctgggcaaaggtttttcctatgcgtttaatgttgagattggg

SEQ ID NO: 27196 - DNA, 120 bp, Artificial Sequence
  ENSG00000039319_31 (sequence is synthesized)
tgcagaatataaagcatatcctgctcctctaacaagcatcagaggccgaaaacctctttttggagaaataggacacactattatgaacttacttgttgaccttcgaaattaccagtatac

SEQ ID NO: 27197 - DNA, 120 bp, Artificial Sequence
  ENSG00000039319_32 (sequence is synthesized)
cttgcataatatagatcaactgttgattcatatggaaatgggaaaaagctgcataaaaataccacggaaaaagtacagtgatgtaatgaaagtactaaattcttccaatgagcatgtcat

SEQ ID NO: 27198 - DNA, 120 bp, Artificial Sequence
  ENSG00000039319_33 (sequence is synthesized)
tagcattggagcaagtttcagtacagaagcagattctcatctagtctgtatacagaatgatggaatttatgaaacacaggccaacagtgccactggccatcctagaaaagtgacaggtgc

SEQ ID NO: 27199 - DNA, 120 bp, Artificial Sequence
  ENSG00000039319_34 (sequence is synthesized)
aagttttgtggtattcaatggagctctaaaaacatcttcaggatttcttgctaagtccagcatagttgaagatggcttaatggtacaaataactccagagaccatgaatggcttgcggct

SEQ ID NO: 27200 - DNA, 120 bp, Artificial Sequence
  ENSG00000039319_35 (sequence is synthesized)
agctttacgagaacagaaagactttaaaattacatgtgggaaagttgatgcagtagacctgagagaatacgtggatatctgctgggtagatgctgaagaaaaaggaaacaaaggagttat

SEQ ID NO: 27201 - DNA, 120 bp, Artificial Sequence
  ENSG00000039319_36 (sequence is synthesized)
cagttcagtggatggaatatcattacaaggatttccaagtgaaaaaataaaactggaagcagattttgaaaccgatgagaagattgtaaaatgtaccgaggtgttctactttctaaagga

SEQ ID NO: 27202 - DNA, 120 bp, Artificial Sequence
  ENSG00000039319_37 (sequence is synthesized)
ccaggatttatctattttatcaacttcttatcagtttgcaaaagaaatagccatggcttgtagtgctgcgctgtgccctcacctgaaaactctaaaaagtaatgggatgaataaaattgg

SEQ ID NO: 27203 - DNA, 120 bp, Artificial Sequence
  ENSG00000039319_38 (sequence is synthesized)
actcagagtttccattgacactgatatggttgaatttcaggcaggatctgaaggccaacttctgcctcagcattatctaaatgatcttgatagtgctctgatacctgtgatccatggtgg

SEQ ID NO: 27204 - DNA, 120 bp, Artificial Sequence
  ENSG00000039319_39 (sequence is synthesized)
gacctccaactctagtttaccattagaaatagaattagtgtttttcattatagaacatcttttttagtgaaagaatgtgccatattacatattgcaacctaatttgttaaaactaactcc

SEQ ID NO: 27205 - DNA, 120 bp, Artificial Sequence
  ENSG00000039319_40 (sequence is synthesized)
agcactaaagctgaaatgccacaaacactaaaagtataaatatgtctgatttttgaaacacataagctttgctctttaggcaggaatgatcttttcaaatcattagcacaatatttaaat

SEQ ID NO: 27206 - DNA, 120 bp, Artificial Sequence
  ENSG00000039319_41 (sequence is synthesized)
atctaaaaatttaagagatccatactttctgtagctttacaattaatttaagtactaaaaagacaaggatttcttttaagaaatttatagcatttactgtgttatttaaatgctaagcca

SEQ ID NO: 27207 - DNA, 120 bp, Artificial Sequence
  ENSG00000039319_42 (sequence is synthesized)
aagtatctgcacttaggtatacctctttatgccaataatgattttaatgaaggctcttttcagatgtaaccttatgaaggaaatatctgctttgtgtatatgccagttagaatactggtt

SEQ ID NO: 27208 - DNA, 120 bp, Artificial Sequence
  ENSG00000039319_43 (sequence is synthesized)
tctaaagtctgtcaaattgtatttcagtggcacaaaaaccagttttgaggtcttagacttataattctttgaataaaactgataacttatttgtataattggagtggagacctacctcca

SEQ ID NO: 27209 - DNA, 120 bp, Artificial Sequence
  ENSG00000039319_44 (sequence is synthesized)
tccataattagataaactctttttggattataatcagaattttgccttttttcttctcaaattattacatatgtatgtattatatatccacatatatagttttccctgattaaatggata

SEQ ID NO: 27210 - DNA, 120 bp, Artificial Sequence
  ENSG00000039319_45 (sequence is synthesized)
aataattgcgggtgcttcaggactttttgcttctatatttaagtatattgtttttatagcaagaacatattctgaatgttttataaatctttaataatttatatgtaggtaatatttttg

SEQ ID NO: 27211 - DNA, 120 bp, Artificial Sequence
  ENSG00000039319_46 (sequence is synthesized)
tatcacaatgcattatttttttcctcctttccttccaaactataccactgtatttaccacttctaagagtgactgacgacgggccagatgacccttgaagtagtcattatgtagcaataa

SEQ ID NO: 27212 - DNA, 120 bp, Artificial Sequence
  ENSG00000039319_47 (sequence is synthesized)
atgaagcctgaaacaggtttttttacttccactttaatccttagaaatttcttggcaacttcgcatattttcattgacaccagtgtataagtataaatttaaatgaactaattacttttg

SEQ ID NO: 27213 - DNA, 120 bp, Artificial Sequence
  ENSG00000039319_48 (sequence is synthesized)
catattttaaattctttatatggtagttattttttataacaggatattaacataagttaaatcctatgtatttgaaattgttacagagctttcctctttacttcaaacagcaaaaaagtg

SEQ ID NO: 27214 - DNA, 120 bp, Artificial Sequence
  ENSG00000039319_49 (sequence is synthesized)
gggggcatattgtagtcctgtcatttaagttatgtaaaaaatttaatcattattttgatgctttaaacattctcatgtgtaatatatgtttttgtatcaaaaacactcatatatttcaag

SEQ ID NO: 27215 - DNA, 120 bp, Artificial Sequence
  ENSG00000039319_50 (sequence is synthesized)
aaaaagaaattatgttaaatagccctgttttaagaaaaatatttatgaagcatctcaacttgaagatcaagtcaaagttataactcaggatctgaggtctcaagctaggagagactgaga

SEQ ID NO: 27216 - DNA, 120 bp, Artificial Sequence
  ENSG00000039319_51 (sequence is synthesized)
attttaatcagtttgggcatatagtttggactgaatcacatctgtagtacttagccaaagacaatttggaggagaatatcagccttctggaagtagctacttcctgaacaatgtaaagtg

SEQ ID NO: 27217 - DNA, 120 bp, Artificial Sequence
  ENSG00000039319_52 (sequence is synthesized)
tcgcagatattcaataaaatggcaacctgttataatttgtgaaatttattgaaatggtgtaagatgaaaacaattgcatatcaaacccaatttatgttttctaaatatagtgtatgtatt

SEQ ID NO: 27218 - DNA, 120 bp, Artificial Sequence
  ENSG00000039319_53 (sequence is synthesized)
ctgccatgtaagtaattgaacagtcttaaaataaccaaatggtagagggctgttccatgatgggacagctttggatttgttttcataaaatctctatattcaataaaaattggaattatg

SEQ ID NO: 27219 - DNA, 120 bp, Artificial Sequence
  ENSG00000039319_54 (sequence is synthesized)
tgcctgaagtttggaggcacattttgaagtattctttgtagacatatagtatgtttctgaatgtgtttgttacttatttggtcattggtacttaatttgaaattttaattttttaagaga

SEQ ID NO: 27220 - DNA, 120 bp, Artificial Sequence
  ENSG00000039319_55 (sequence is synthesized)
agaaatagaatggttctttgtactcagtctgcaatgatctatttttggcttatgtcttttaatactactctctttctctgaattttgaaatatgaagtaaaatctagcccatttgtttta

SEQ ID NO: 27221 - DNA, 120 bp, Artificial Sequence
  ENSG00000039319_56 (sequence is synthesized)
actcccaggactcccggccggggtagctcttcactcctcagcgcgacgtcgtgtcgagttcccaaaaagctccgcaggggctgtagggagattcctgtgaggtttctcgggcttatttgg

SEQ ID NO: 27222 - DNA, 120 bp, Artificial Sequence
  ENSG00000039319_57 (sequence is synthesized)
gcaaaaatttctaaaaatgattaattgttctgacagaattaggcgtagttctttatcaacatttatggattccatgccacaagtagtatgcgcttaagtgcagagcatgccaagagaaag

SEQ ID NO: 27223 - DNA, 120 bp, Artificial Sequence
  ENSG00000039319_58 (sequence is synthesized)
agtaggatttggccctgtaggagcaaagattcaattgtgggaaactacttgtttctgaaaattgcatgctaggatatttacatcatgttcctgttgaaaacaattcctgattaaaataca

SEQ ID NO: 27224 - DNA, 120 bp, Artificial Sequence
  ENSG00000039319_59 (sequence is synthesized)
agaataatcttaaaacatcaaagagattttccagacaataaggaatgccaagtccaaaagtaaagagaataagagaagcaagcatgtacccttactctgacaaccttatgagtgaggggg

SEQ ID NO: 27225 - DNA, 120 bp, Artificial Sequence
  ENSG00000039319_60 (sequence is synthesized)
acagaaattaaagttcagggcccatataaggtgatgaacctaacaggagaccctccacacaataggctgagactcccaaatactttcacctttaggatgataatgaatcagaggtggaag

SEQ ID NO: 27226 - DNA, 120 bp, Artificial Sequence
  ENSG00000039319_61 (sequence is synthesized)
aaccaatgtaaaagaacaggcaagtttagaattgccccagtgatctaaagaatcttaagcactgagcttcctttaaggtgttcccacactagtaatgcctccaggtgacagagaaaataa

SEQ ID NO: 27227 - DNA, 120 bp, Artificial Sequence
  ENSG00000039319_62 (sequence is synthesized)
aatgtaaatacttttcatggaaaagtaatttcattgtaggcctcaaattacttttcaaatatgtctagtaacacatagtaaaaagtagtcatataaggaaactagattccagaggcaaga

SEQ ID NO: 27228 - DNA, 120 bp, Artificial Sequence
  ENSG00000039319_63 (sequence is synthesized)
attacttgaagcaatgaaaacaaactcacagatataggtattagatttgttttctttgtttaaggaaataaggtgtgtgaatgtacttgcaggaaatgggaaactatacgataaaaagtt

SEQ ID NO: 27229 - DNA, 120 bp, Artificial Sequence
  ENSG00000039319_64 (sequence is synthesized)
gtggagctaatctggaaaagaactgaatataaacattacaagaatatacataaaaactgcactttaaaactcagtaaatagatgtaatagaatgtagccaattggggtagtttataaact

SEQ ID NO: 27230 - DNA, 120 bp, Artificial Sequence
  ENSG00000039319_65 (sequence is synthesized)
ggaagataactcaggagaaactattcacagtgcaccatgggagaaacagctggaaaaaaaaacagaagacctgtagagaatacagtgaaaaatcctaagtgcttcattagctgtgagagg

SEQ ID NO: 27231 - DNA, 120 bp, Artificial Sequence
  ENSG00000039319_66 (sequence is synthesized)
agaggcaagaataggacagagcaaatacttagatagaatgcagaattttaaaaactgatgaaagacatgaccccacacattctagaagccagacaaatcccaaacagaataaactagaaa

SEQ ID NO: 27232 - DNA, 87 bp, Artificial Sequence
  ENSG00000039319_67 (sequence is synthesized)
cacacctgtaatcgcgagctcaggttgagaccagagtgagcaacacagggagacactgtctctgcaaaattaaaaaaattttgccag

SEQ ID NO: 27233 - DNA, 120 bp, Artificial Sequence
  ENSG00000039319_68 (sequence is synthesized)
cagagtgagcaacacagggagacactgtctctgcaaaattaaaaaaattttgccaggtgtggtggctcatacttgtggtcccagcttcacgggggctgaggtgggaggatcacttgagcc

SEQ ID NO: 27234 - DNA, 120 bp, Artificial Sequence
  ENSG00000039319_69 (sequence is synthesized)
cagtgagctgtgatcgtgcaacagagcaaaaccttgtctcaaaaaaaaggaaaaagaaaaaagacatttaacaggaaaactggaaatgctagctgacagagagaaaaatagtccaaggaa

SEQ ID NO: 27235 - DNA, 120 bp, Artificial Sequence
  ENSG00000039319_70 (sequence is synthesized)
caatttgctgtttctagtcagaggaccagaaaggaggttggaggctatgggacaaaaccctttttaatttaattgcagtattctaagagagcctcaggaaagatgcagtaagacccaccg

SEQ ID NO: 27236 - DNA, 120 bp, Artificial Sequence
  ENSG00000039319_71 (sequence is synthesized)
ccccaccaggagaaccatgggtaatgacttggaaccttctggactttccttgctctacatcaatcccgcagcagtaaagaggtatcactcttctcttccccctggtgcactagtggcaga

SEQ ID NO: 27237 - DNA, 120 bp, Artificial Sequence
  ENSG00000039319_72 (sequence is synthesized)
cattgcagggcagaacactggcaatggggaggctaacgccctgactttctagccaaaaaccaagaatggggttctagaaaccagagtataggtaagatcacaaataggagggaactgaag

SEQ ID NO: 27238 - DNA, 120 bp, Artificial Sequence
  ENSG00000039319_73 (sequence is synthesized)
aaaaggaacccttaaatctgtcaataaaatcctgggatcatctcacaagctgtgtatgtgtgaaactaaccagaagcagctgagcaaaggttctgaacactgaattacagtgtaggccac

SEQ ID NO: 27239 - DNA, 120 bp, Artificial Sequence
  ENSG00000039319_74 (sequence is synthesized)
tgtccaagtttcagattggccactagatggtgcacaactggggcaaagaacagcttaacaaaggcagtgaaaactaacattggaaccacagccaccaaaaaaagtggccaggatgtgtgc

SEQ ID NO: 27240 - DNA, 120 bp, Artificial Sequence
  ENSG00000039319_75 (sequence is synthesized)
tctgaaacttaactgaattgatggtctgctaaaacaaaacaaaacaaaaacattcttatgaagatttaaacaggatagagaatatcataatattccaaatatatcccagaaacaacccaa

SEQ ID NO: 27241 - DNA, 120 bp, Artificial Sequence
  ENSG00000039319_76 (sequence is synthesized)
aatgattggacaaagaacttgtgaaacctaagcaactctctagggaaaagacaatgaacaagagccaactctaaggttacccaaatgtcagaattatcagaaaaagacttaaaactagtt

SEQ ID NO: 27242 - DNA, 120 bp, Artificial Sequence
  ENSG00000039319_77 (sequence is synthesized)
attttattttttttatttatttttgagacagtctctatcacccaggctagagtgcagtgatacaatcttggctcactgcaacctccacccccagggtgcaagtgattctcctgtctcagc

SEQ ID NO: 27243 - DNA, 120 bp, Artificial Sequence
  ENSG00000039319_78 (sequence is synthesized)
gtgctgggattacaggcataagccagcacacctggccgttaaactagttattttaatcatgctacacaaagaagacatttctccaaaggaaatatataaagggaaacactgttgaaataa

SEQ ID NO: 27244 - DNA, 120 bp, Artificial Sequence
  ENSG00000039319_79 (sequence is synthesized)
taaagggaaacactgttgaaataaatggaaagctaaaagtctcagcatagaagctataaaaagaaacaagtggaaattgtagaactgaaaatacaataacaaaatttactggaaggtctc

SEQ ID NO: 27245 - DNA, 120 bp, Artificial Sequence
  ENSG00000039319_80 (sequence is synthesized)
aacacaatgaagatgactgagggaagagtcagtaaatttgaagatacatgagcagaaattatctagtctgaatgacagagaaaaaagtgaaaaaaatgagaagacctttggggatctgtg

SEQ ID NO: 27246 - DNA, 120 bp, Artificial Sequence
  ENSG00000039319_81 (sequence is synthesized)
ggacaatatgaaacagtctaatattcatgtcttaggagcccagaaagaacaattggaagaaaaaaatatctgaagaaataatagctaaaaacttccaaacatctggcaaaaaacaaatat

SEQ ID NO: 27247 - DNA, 120 bp, Artificial Sequence
  ENSG00000039319_82 (sequence is synthesized)
tcacatacatttacatagcattctatttaaagccggtctgctggcacagcaaatcccaaaaaggaaaaccacacccaggcacgtcataatcaaagtgatgaaaccaactgtaaagaaaat

SEQ ID NO: 27248 - DNA, 120 bp, Artificial Sequence
  ENSG00000039319_83 (sequence is synthesized)
actttgaaaacaactggaagaaaacaacactttgtatataggagaaccaaagatttcagtgatggcagatttctcatcagaaaccatggagcaacatttataaagtgcttttaaaaagca

SEQ ID NO: 27249 - DNA, 120 bp, Artificial Sequence
  ENSG00000039319_84 (sequence is synthesized)
tttataaagtgcttttaaaaagcaacaaaactgtcaacacagaatcctttatccagcaaatatattctttaggaaagaaaatgaaataaagacattttcttttttttctttacttttttt

SEQ ID NO: 27250 - DNA, 120 bp, Artificial Sequence
  ENSG00000039319_85 (sequence is synthesized)
actgcaacctccgcctcccggttcaagcagttctcctgtctgagcctccagaggagtagctgggattacaggtgcgtggtaccacgcccagctaatttttttatgtttgtagtagagacg

SEQ ID NO: 27251 - DNA, 80 bp, Artificial Sequence
  ENSG00000039319_86 (sequence is synthesized)
tgagcctccagaggagtagctgggattacaggtgcgtggtaccacgcccagctaatttttttatgtttgtagtagagacg

SEQ ID NO: 27252 - DNA, 120 bp, Artificial Sequence
  ENSG00000039319_87 (sequence is synthesized)
attagaggcatgagccaccatacctggctgaaataaagacattgtcagaagaaggaaagctaaaataattcattgctagtagtcctcctttaacagaaatggtaaaggaagttcatgggg

SEQ ID NO: 27253 - DNA, 120 bp, Artificial Sequence
  ENSG00000039319_88 (sequence is synthesized)
aaggaaaatgattgcaaagaaggaagagcaaccaaaatggcaaatctctggataaaccaaatagacttacatgtttgttaaaatatatgtaactgctgaaataaaaaaattgtaacatca

SEQ ID NO: 27254 - DNA, 120 bp, Artificial Sequence
  ENSG00000039319_89 (sequence is synthesized)
ctgtagggaggtgatctcatccattaacagctgtgtgttgccagttcccaaatctttatctatctcagacttctctcctgcattccagattcttatattcagctgccttttggatatctc

SEQ ID NO: 27255 - DNA, 120 bp, Artificial Sequence
  ENSG00000039319_90 (sequence is synthesized)
tgtcgagttcccaaaaagctccgcaggggctgtagggaggttgaagcatatgaagaaaacaccagccttgaacagatacgtagcaggaaaagcgaggatcttacaagcctgctgaaaggc

SEQ ID NO: 27256 - DNA, 120 bp, Artificial Sequence
  ENSG00000039319_91 (sequence is synthesized)
tcctggggacatccaggggtcctgagaccacagtttgagaaagctgatttaaccatttttggattggtgggctgttaggttgtttaaaattttacactgttacaacccttgcaacagtga

SEQ ID NO: 27257 - DNA, 120 bp, Artificial Sequence
  ENSG00000039319_92 (sequence is synthesized)
agtttgttaaacacattacttttgatgcctgtataatttgcttttgtgcactaatgttggtgtttagattgtttcaactaatgatttggtgaaatatctttgcatgtttttagttgtttt

SEQ ID NO: 27258 - DNA, 120 bp, Artificial Sequence
  ENSG00000039319_93 (sequence is synthesized)
gaattattttctttttgagggggctggggggagtccagtaaaaaccagacaactgccagatacattttaagagagctttaacacatggattcttttctaaaatttctaaaaagataattg

SEQ ID NO: 27259 - DNA, 120 bp, Artificial Sequence
  ENSG00000039319_94 (sequence is synthesized)
ttagatcaaatattaggaatctttctcaggctattggtacatattgtcacattgttttcatgggagatagtaccagtttgtttcctgtcagcagtgtctgacatgctttaaaaaaaaaaa

SEQ ID NO: 27260 - DNA, 120 bp, Artificial Sequence
  ENSG00000039319_95 (sequence is synthesized)
attttcaaatatactgaatgtaaagactttcagggaatcattaaaatcaattttaatggattaatggaactacttttgttttgctatgcttttaaagttctaagacaaccctcttctact

SEQ ID NO: 27261 - DNA, 120 bp, Artificial Sequence
  ENSG00000039319_96 (sequence is synthesized)
accaggttggtctagataactgtggtatgtcttcaagtttctagatgttcataagttcttttattacctaaaacttttcttcttaaatttcagaacaaaacagaaaactttcacagtgca

SEQ ID NO: 27262 - DNA, 120 bp, Artificial Sequence
  ENSG00000039319_97 (sequence is synthesized)
ggttgagtatgccatatctgaaatgtattggatcagttttttggattttggactttttcagattttggaatattcacagagtacataccagttgagcatcccaaattcaaaatctgaaat

SEQ ID NO: 27263 - DNA, 120 bp, Artificial Sequence
  ENSG00000039319_98 (sequence is synthesized)
ataccagttgagcatcccaaattcaaaatctgaaatgctccagtgagcatttcttttgagcatcacgttggcatttgaaaaagttatagaccgggcatggtggctcacgcctgtactccc

SEQ ID NO: 27264 - DNA, 67 bp, Artificial Sequence
  ENSG00000039319_99 (sequence is synthesized)
aggagaatcacctgaacccaggaggcagatttgcagtgagctaagatcatgcctctgcattccagcc

SEQ ID NO: 27265 - DNA, 120 bp, Artificial Sequence
  ENSG00000039319_100 (sequence is synthesized)
gaaactattagtaaaggtgagtattaacttgatatattttcttccagtaattgaatatatcttaaaattaattggattgtgacaaagataaacttctttattttcttaaggcaaggacct

SEQ ID NO: 27266 - DNA, 120 bp, Artificial Sequence
  ENSG00000039319_101 (sequence is synthesized)
agtgttgaattatctggcttaggtgggacatcccaaggcttggtttctcttctttttgttccactctcacaattaatactaccaatctggaaaggaagcattcagtttctggagtggcag

SEQ ID NO: 27267 - DNA, 120 bp, Artificial Sequence
  ENSG00000039319_102 (sequence is synthesized)
ttcattaacttttaacaggtaccaagtccctaaatgctgcatttcatctgcctatttgtttttgtcatcatcattgtcatgttaatcatcttaatctaaataaacacttacagataccta

SEQ ID NO: 27268 - DNA, 120 bp, Artificial Sequence
  ENSG00000039319_103 (sequence is synthesized)
attgcaaaggttgccccctcattcatataaggcaaaaagctagcagttaatcatttcctttatcgtttttatgtcttttcacactaatatcttgtatttttttcaaatctagaccctctg

SEQ ID NO: 27269 - DNA, 120 bp, Artificial Sequence
  ENSG00000039319_104 (sequence is synthesized)
tctttcaaataacttagttgcctttttagaattacaaaatatgtttgtactagcaagaaaatgactactttgacttaagtctttaaagcagctaatgttgggtatgtggtgtttctttag

SEQ ID NO: 27270 - DNA, 120 bp, Artificial Sequence
  ENSG00000039319_105 (sequence is synthesized)
aattttaaggaagtatatttgtataatagacattagagagattagtttgcttaagacctaacttgagaactgaaggttacaaatgtgtctgtgtcttatcactatagaaatagtcttgcc

SEQ ID NO: 27271 - DNA, 120 bp, Artificial Sequence
  ENSG00000039319_106 (sequence is synthesized)
ttccttttcttcagagtgcctgctgcgttaccagtaaggtctcttttcctttttggtgtccagaatttatggtgccctaaagaaagaacatagttaggtggccgacctcatgtcccttcc

SEQ ID NO: 27272 - DNA, 77 bp, Artificial Sequence
  ENSG00000039319_107 (sequence is synthesized)
agaaagaacatagttaggtggccgacctcatgtcccttccctttttgtgcattggtttccctgactctatctgtata

SEQ ID NO: 27273 - DNA, 66 bp, Artificial Sequence
  ENSG00000039319_108 (sequence is synthesized)
gccagccccagtatatttcttttatcatgctgaaccaagaactttaaaagtttactaccattcata

SEQ ID NO: 27274 - DNA, 120 bp, Artificial Sequence
  ENSG00000039319_109 (sequence is synthesized)
atgctgaaccaagaactttaaaagtttactaccattcataaattagcacaattgaatattagttataaatgccttaaaagtctttagttctttgtatttctctttaaattatcagaaacc

SEQ ID NO: 27275 - DNA, 120 bp, Artificial Sequence
  ENSG00000039319_110 (sequence is synthesized)
tatatcgttctaaccaattatcataattttccaccccctataattttgtggaaacaagatgtataatgaaaagatgaaatactctcgaatcagacaagcctaatttcaaatctgtttcac

SEQ ID NO: 27276 - DNA, 120 bp, Artificial Sequence
  ENSG00000039319_111 (sequence is synthesized)
caattattagtcactaggagcaagttgattaatttctgtgtctcaactttctcatttatgaaatagtatagacacactccattaggttgttgaatttaaataagataatgtatgtatagt

SEQ ID NO: 27277 - DNA, 120 bp, Artificial Sequence
  ENSG00000039319_112 (sequence is synthesized)
ggttgttgaatttaaataagataatgtatgtatagttcccagttcaatgtagcatctagtagatacatagatacacagtaagtgttaatattgtctcttggctgggtgtggtggctcatg

SEQ ID NO: 27278 - DNA, 63 bp, Artificial Sequence
  ENSG00000039319_113 (sequence is synthesized)
ggttgcaatgagtcaaaaaaaaaattatctctcactttcccctaagaactgattgagtgatat

SEQ ID NO: 27279 - DNA, 120 bp, Artificial Sequence
  ENSG00000039319_114 (sequence is synthesized)
attatctctcactttcccctaagaactgattgagtgatatttatacataatgtttgtttgtaaaatgagagttgaaggtaataaattcaataatttggggttttttttgttgatagtaac

SEQ ID NO: 27280 - DNA, 120 bp, Artificial Sequence
  ENSG00000039319_115 (sequence is synthesized)
cagttttcctttcttatgtatagcatatcctgctcctctaacaagcatcagaggccgaaaacctctttttggagaaataggacacactattatgaacttacttgttgtgagtaattgaac

SEQ ID NO: 27281 - DNA, 120 bp, Artificial Sequence
  ENSG00000039319_116 (sequence is synthesized)
gagtaattgaactattttattaggtatttttatactgttactttaaaactgtatttagcaaagtttatacatttatattttcctactttaatttgccatatttggtataatgaccattca

SEQ ID NO: 27282 - DNA, 120 bp, Artificial Sequence
  ENSG00000039319_117 (sequence is synthesized)
cctaattattttaacattagtgctcagtttttgacgaattgctttttagaacgtactatctcctcatgtacgtgtacctgattctaagtgccttttgattcattctcctgcagttcttgg

SEQ ID NO: 27283 - DNA, 120 bp, Artificial Sequence
  ENSG00000039319_118 (sequence is synthesized)
atatttaggtaatgtaagaactctatacagacctcttaaagttgttgaaacttttgtaaatgtattagtaaagtcagtcagtcttgtgattttgagcaaattatggccttagttttctca

SEQ ID NO: 27284 - DNA, 120 bp, Artificial Sequence
  ENSG00000039319_119 (sequence is synthesized)
tttataataggaagtgttggattagatgatatctaaagttcccttccacctatactttttgtaattttgtgtttccctgttaccatagaaaaatgtttcagtggactcacttttatttat

SEQ ID NO: 27285 - DNA, 120 bp, Artificial Sequence
  ENSG00000039319_120 (sequence is synthesized)
ccatgcctagtttgaagaccttttctattttggaagttctgtaactagaaagttaccctaaatactacaaagtttttcctgagaatgatattctttattactgctgtggagaaggatttc

SEQ ID NO: 27286 - DNA, 120 bp, Artificial Sequence
  ENSG00000039523_0 (sequence is synthesized)
ggcgacagcggcagctgcggcgcgaccaggccgggcacctccgagcgcaaggacagcgcgaggtccgcgcagcccagcgcagccatggagccccgcgcggactcactctatgatgtccct

SEQ ID NO: 27287 - DNA, 120 bp, Artificial Sequence
  ENSG00000039523_1 (sequence is synthesized)
gtcggtgcggccgcagcgccgtctgctcagcgcccgggtcaataggagccagtccttcgcaggcgtcctcggcagccacgagcgggggcccaggagtttcccggtcttcagcccgccggg

SEQ ID NO: 27288 - DNA, 120 bp, Artificial Sequence
  ENSG00000039523_2 (sequence is synthesized)
gcccccacggaagccccccgcgctctcccgagtgtccaggatgttttccgtggctcacccagccgccaaggtgccgcagcccgagcggctggacctggtgtacacggcgctgaagcgggg

SEQ ID NO: 27289 - DNA, 120 bp, Artificial Sequence
  ENSG00000039523_3 (sequence is synthesized)
cctgacggcctacttggaagtgcaccagcaggagcaagagaaactccaggggcagataagggagtccaagaggaattcccgcttgggcttcctgtatgatctggacaagcaagtcaagtc

SEQ ID NO: 27290 - DNA, 120 bp, Artificial Sequence
  ENSG00000039523_4 (sequence is synthesized)
cattgaacgcttcctgcgacgactggagttccatgccagcaagatcgatgagctgtatgaggcatactgtgtccagcggcgtctccgggatggtgcctacaacatggtccgtgcctacac

SEQ ID NO: 27291 - DNA, 120 bp, Artificial Sequence
  ENSG00000039523_5 (sequence is synthesized)
cactgggtccccgggaagccgagaggcccgggacagcctggcagaggccactcgggggcatcgcgagtacacggagagcatgtgtctgctggagagcgagctggaggcacagctgggcga

SEQ ID NO: 27292 - DNA, 120 bp, Artificial Sequence
  ENSG00000039523_6 (sequence is synthesized)
gtttcatctccgaatgaaagggctggctggcttcgccaggctgtgtgtaggcgatcagtatgagatctgcatgaaatatgggcgtcagcgctggaaactacggggccgaattgagggtag

SEQ ID NO: 27293 - DNA, 120 bp, Artificial Sequence
  ENSG00000039523_7 (sequence is synthesized)
tggaaagcaggtgtgggacagtgaagaaaccatctttctccctctactcacggaatttctgtctattaaggtgacagaactgaagggcctggccaaccatgtggttgtgggcagtgtctc

SEQ ID NO: 27294 - DNA, 120 bp, Artificial Sequence
  ENSG00000039523_8 (sequence is synthesized)
ctgtgagaccaaggacctgtttgccgccctgccccaggttgtggctgtggatatcaatgaccttggtaccatcaagctcagcctggaagtcacatggagccccttcgacaaggatgacca

SEQ ID NO: 27295 - DNA, 120 bp, Artificial Sequence
  ENSG00000039523_9 (sequence is synthesized)
gccctcagctgcttcttctgtcaacaaggcctccacagtcaccaagcgcttctccacctatagccagagcccaccggacacaccctcacttcgggaacaggctttctataacatgctgcg

SEQ ID NO: 27296 - DNA, 120 bp, Artificial Sequence
  ENSG00000039523_10 (sequence is synthesized)
acggcaggaggagctggagaatgggacagcatggtccctgtcatctgaatcttcagacgactcatccagcccacagctctcaggcactgcccgccactcaccagcccctaggcccctggt

SEQ ID NO: 27297 - DNA, 120 bp, Artificial Sequence
  ENSG00000039523_11 (sequence is synthesized)
gcagcagcccgagccccttcccatccaagttgccttccgcaggcctgagacccccagctctgggcccttggatgaggagggggccgtggccccagtcctggcaaatgggcatgcacccta

SEQ ID NO: 27298 - DNA, 120 bp, Artificial Sequence
  ENSG00000039523_12 (sequence is synthesized)
cagtcggactctgagccacatcagtgaggctagtgtagatgctgccttggctgaggcttcagtggaggccgttggcccagaaagcctagcctggggacctagcccacctacacacccagc

SEQ ID NO: 27299 - DNA, 120 bp, Artificial Sequence
  ENSG00000039523_13 (sequence is synthesized)
tcccacccatggagagcaccccagtcctgttcctcctgccctggaccctggccactctgccacaagctctaccctcggtacaacaggctctgtccccacatctacagaccctgccccatc

SEQ ID NO: 27300 - DNA, 120 bp, Artificial Sequence
  ENSG00000039523_14 (sequence is synthesized)
tgcacacctagactcagttcataagtccacagactctggcccttcagaactgccaggccccactcacaccactacaggctctacctatagtgccattaccactacccacagtgctccaag

SEQ ID NO: 27301 - DNA, 120 bp, Artificial Sequence
  ENSG00000039523_15 (sequence is synthesized)
ccccctcactcacactactacaggctccacccacaagcccataatctctacccttactactacaggccctaccctcaatatcataggcccagtccagactaccacaagccccacccacac

SEQ ID NO: 27302 - DNA, 120 bp, Artificial Sequence
  ENSG00000039523_16 (sequence is synthesized)
tatgccaagccctacccataccacagcaagccccactcatacttccacaagccccacccatacccccacaagtcccacccacaaaaccagtatgtcacctcccaccactacaagtcctac

SEQ ID NO: 27303 - DNA, 120 bp, Artificial Sequence
  ENSG00000039523_17 (sequence is synthesized)
gggcctagtccagactgccacaagtcccacccatcctaccacaagccccacccatcccaccacaagccccatccttataaatgtaagcccttccacttctctagaacttgctaccctctc

SEQ ID NO: 27304 - DNA, 120 bp, Artificial Sequence
  ENSG00000039523_18 (sequence is synthesized)
cagcccctccaaacactcagaccccaccctcccaggcactgactcccttccctgtagtcccccagtctccaattcctacactcaggcagaccctatggcccccagaactccccacccaag

SEQ ID NO: 27305 - DNA, 120 bp, Artificial Sequence
  ENSG00000039523_19 (sequence is synthesized)
tcctgcccattccagtaggaaacccctcacaagccctgccccagatccctcagagtctacggttcagagtctaagccccactccctcacccccaacccctgcaccccagcattcagacct

SEQ ID NO: 27306 - DNA, 120 bp, Artificial Sequence
  ENSG00000039523_20 (sequence is synthesized)
ttgcctggccatggctgtccagaccccagtcccaacggcagccggagggtctggggacaggagcctggaggaggcactgggggccctaatggctgccctggatgactaccgtggccagtt

SEQ ID NO: 27307 - DNA, 120 bp, Artificial Sequence
  ENSG00000039523_21 (sequence is synthesized)
tcctgagctgcagggcctggagcaggaggtgacccgcctagaaagtctgctcatgcagagacaaggtctgactcgcagccgggcctccagtctcagcatcactgtggagcatgccttgga

SEQ ID NO: 27308 - DNA, 120 bp, Artificial Sequence
  ENSG00000039523_22 (sequence is synthesized)
gagcttcagcttcctcaatgaagacgaagatgaagacaatgatgttcctggggacaggcctccaagcagcccggaggctggggctgaggacagcatagactcacccagtgcccgccccct

SEQ ID NO: 27309 - DNA, 120 bp, Artificial Sequence
  ENSG00000039523_23 (sequence is synthesized)
cagcacggggtgtccagctctggatgctgccttggtccggcacctgtaccactgcagtcgcctcctgctgaaactgggcacatttgggcccctgcgctgccaggaggcatgggccctgga

SEQ ID NO: 27310 - DNA, 120 bp, Artificial Sequence
  ENSG00000039523_24 (sequence is synthesized)
gcggctgctgcgggaagcccgagtactggaggcagtatgcgagttcagcaggcggtgggagatcccggccagctctgcccaggaagtggtgcagttctcggcctctcggcctggcttcct

SEQ ID NO: 27311 - DNA, 120 bp, Artificial Sequence
  ENSG00000039523_25 (sequence is synthesized)
gaccttctgggaccagtgcacagagagactcagctgcttcctctgcccggtggagcgggtgcttctcaccttctgcaaccagtatggtgcccgcctctccctgcgccagccaggcttggc

SEQ ID NO: 27312 - DNA, 120 bp, Artificial Sequence
  ENSG00000039523_26 (sequence is synthesized)
tgaggctgtgtgtgtgaagttcctggaggatgccctggggcagaagctgcccagaaggccccagccagggcctggagagcagctcacagtcttccagttctggagttttgtggaaacctt

SEQ ID NO: 27313 - DNA, 120 bp, Artificial Sequence
  ENSG00000039523_27 (sequence is synthesized)
ggacagccccaccatggaggcctacgtgactgagaccgctgaggaggtgctactggtgcggaatctgaactcggatgatcaggctgttgtgctgaaggccctgagattggcgcccgaggg

SEQ ID NO: 27314 - DNA, 120 bp, Artificial Sequence
  ENSG00000039523_28 (sequence is synthesized)
gcgtctgcgaagggacgggctgcgggccctcagctccctgctcgtccatggcaacaacaaggtcatggctgctgtcagcacccagctccggagcctgtcactgggccctaccttccggga

SEQ ID NO: 27315 - DNA, 120 bp, Artificial Sequence
  ENSG00000039523_29 (sequence is synthesized)
gagggccctcctgtgcttcctggaccagctggaggatgaggacgtgcagactcgagtggctggctgcctggccctaggctgcatcaaggctcccgagggcattgagcccctggtgtacct

SEQ ID NO: 27316 - DNA, 120 bp, Artificial Sequence
  ENSG00000039523_30 (sequence is synthesized)
ctgccaaactgacacagaagctgtgagggaagctgcccggcaaagcctacagcagtgtggagaagagggacagtctgcccatcgacggctggaggagtccctggacgccctgccccgcat

SEQ ID NO: 27317 - DNA, 120 bp, Artificial Sequence
  ENSG00000039523_31 (sequence is synthesized)
ctttgggcctggcagcatggccagcacagcattctaaactattcacccatgggttcctggtgcccctttccccccactttcagggctcaccaggcactggcagggagggtaagggctggc

SEQ ID NO: 27318 - DNA, 120 bp, Artificial Sequence
  ENSG00000039523_32 (sequence is synthesized)
tccagatacccctcccccacagattcctagcaatgaaaatctaatatattcttctgttgcccctggggttggagagtcagtgcctgcagtcaagtgcctcccagcctcggctcagcacat

SEQ ID NO: 27319 - DNA, 120 bp, Artificial Sequence
  ENSG00000039523_33 (sequence is synthesized)
cccttgccacaaatcagtgtctggggcttggccaccctgccgctgcccagccacatcccttggttttgtattttatttacagagttttacagaaaataaaaaagcaaaatgtctttccta

SEQ ID NO: 27320 - DNA, 120 bp, Artificial Sequence
  ENSG00000039523_34 (sequence is synthesized)
agcctcgtgtaacaatacttgtgccctggctgcagtctgcggggccgcgccctgggcctgccgcattcggccaacgcacagcatctgaggagggttatgaccatctggcagatgcagaaa

SEQ ID NO: 27321 - DNA, 120 bp, Artificial Sequence
  ENSG00000039523_35 (sequence is synthesized)
gagccgctgggagcgagcccggagcccagccgggcggctcgaagtggccagggccggaaggtccgcggggggcgagcgcgggtcgggggccgtcccggacccaccatgaacaccaagaag

SEQ ID NO: 27322 - DNA, 120 bp, Artificial Sequence
  ENSG00000039523_36 (sequence is synthesized)
acagcgcgaggtccgcgcagcccagcgcagccatggtgagccctgagtccggcctcccctacagaccctccccagccagttctaacgtgtgtccaggctggccgccccagcacctactgt

SEQ ID NO: 27323 - DNA, 120 bp, Artificial Sequence
  ENSG00000039523_37 (sequence is synthesized)
attcggccaacgcacagcatctgaggagggttatgaccatctggcagatgcagaaacaggcccagagaggttagtagtattctcaaggtcacacagctggtttgggagaagcgaggatta

SEQ ID NO: 27324 - DNA, 120 bp, Artificial Sequence
  ENSG00000039523_38 (sequence is synthesized)
gatctgagtccttgcccctgcgacacccacctccgtggtattggagggaggagaggaatgataattgggggctgaggtacaaaatactccagcgggacaaggaggactggcatagctcct

SEQ ID NO: 27325 - DNA, 120 bp, Artificial Sequence
  ENSG00000039523_39 (sequence is synthesized)
ctgacattggctctcttggcttcctgggacagccctcaccagcatcctgggctctcaagagcctgggctggtggctgccatccccccaggacaggagcccaccaagtcccttctggttga

SEQ ID NO: 27326 - DNA, 120 bp, Artificial Sequence
  ENSG00000039523_40 (sequence is synthesized)
ccttgggccctcaaggatcccaactctgctcatgatggcatctgggggagcgcgggagccctggaggggaagggagccccgcgcggactcactctatgatgtccctgtcggtgcggccgc

SEQ ID NO: 27327 - DNA, 120 bp, Artificial Sequence
  ENSG00000039523_41 (sequence is synthesized)
caggtgagggggctaggcaagatgggtgtgaggctaggtgagagggaaaaggtgaggcaggaccaggggaaggtggaacaggtgaattgggagaaagtcaaaggacaggacaggtgaggc

SEQ ID NO: 27328 - DNA, 120 bp, Artificial Sequence
  ENSG00000039523_42 (sequence is synthesized)
agggccaggtggagcatgtgaggactgagttgctggcaggtgcacctgtgtccacccctcccatgtccttcatgcccatgtctccaaccctacgtgtgtccccagtgcttctgaccgccc

SEQ ID NO: 27329 - DNA, 120 bp, Artificial Sequence
  ENSG00000039523_43 (sequence is synthesized)
tcttcatctctgcaatgtctgcctcccctgccggtccccatcagcttgggtgcctccagcccctcctcttccccttggcctcaccttggacctgccctttaaggagctctctcagtgtct

SEQ ID NO: 27330 - DNA, 120 bp, Artificial Sequence
  ENSG00000039523_44 (sequence is synthesized)
tctatgcaaattcagacctcagatttcccatgatctcatagcccctgcacccttgtgaccctaccatgcactcttggctacaggtgacagaactgaagggcctggccaaccatgtggttg

SEQ ID NO: 27331 - DNA, 120 bp, Artificial Sequence
  ENSG00000039523_45 (sequence is synthesized)
cacccctctgtccgcttccggcacccccacccctgaaaccctcccatctgctcccctgagcccacctcaatgctccctcccctgacaggctcccgagggcattgagcccctggtgtacct

SEQ ID NO: 27332 - DNA, 120 bp, Artificial Sequence
  ENSG00000039523_46 (sequence is synthesized)
ccgaatgaaagggctggctggcttcgccaggctgtgtgtaggcgatcagtatgaggctgcctcatcctacctgttcccccagatctgcatgaaatatgggcgtcagcgctggaaactacg

SEQ ID NO: 27333 - DNA, 120 bp, Artificial Sequence
  ENSG00000039523_47 (sequence is synthesized)
gagctaatcctcctagctctaggggccggcctaagcggctttgtggccggccccgaggtgaccgagcctgggctggagccgggctctccgcccaaacctggcgtagccgaagccggagag

SEQ ID NO: 27334 - DNA, 120 bp, Artificial Sequence
  ENSG00000039523_48 (sequence is synthesized)
gatcgtccttgtcggggaacggagcttttccctggaaatggaggttggcgcaaggttcctgcaacagccgggcctgggctctctgcagaactggtttgggcaaggggctgctcaccaggg

SEQ ID NO: 27335 - DNA, 120 bp, Artificial Sequence
  ENSG00000039523_49 (sequence is synthesized)
aaacaggcgcttccgcacattcttcgcgcgcgccgcccctttcctgccccttcccagccggaggagggtccccgcgcgaccccccttcctgccccgcggcaggcggagcccgcacctcgg

SEQ ID NO: 27336 - DNA, 120 bp, Artificial Sequence
  ENSG00000039523_50 (sequence is synthesized)
caggaagtgggggccgagccgaggccacgctgagtccgaggccgagtcgcctgcggctgtcctgtcattagtgcccgggtcggcgggactaggcggacccggccggagcccgctggggca

SEQ ID NO: 27337 - DNA, 120 bp, Artificial Sequence
  ENSG00000039523_51 (sequence is synthesized)
gctgtgcctagcgacaggaaagacctgcgccagccctggatcccgctgcgtgggagagggcttcggggatccgactggtactggacacccccccgatcacccgcagggagccccgcgcgg

SEQ ID NO: 27338 - DNA, 120 bp, Artificial Sequence
  ENSG00000039523_52 (sequence is synthesized)
tacaccactgggtccccgggaagccgagaggcccgggacagcctggcagaggccactcgggggcatcgcgagtacacggaggtgagggatgggggcccatgaggcagaggcacagggtgt

SEQ ID NO: 27339 - DNA, 120 bp, Artificial Sequence
  ENSG00000039523_53 (sequence is synthesized)
gaggcggtggccctgatcacatagtggcctcttggggtctgaggacatgaggacaagccctccccaacctcgggggctcctcaccctgccaccttgcccacccacccaccatatcccctt

SEQ ID NO: 27340 - DNA, 120 bp, Artificial Sequence
  ENSG00000039523_54 (sequence is synthesized)
tccgaatgaaagggctggctggcttcgccaggctgtgtgtaggcgatcagtatgaggtatgagaatgtgcagggaagggctgggtcggtagggtcccaacacctaggctgcctcatccta

SEQ ID NO: 27341 - DNA, 120 bp, Artificial Sequence
  ENSG00000039523_55 (sequence is synthesized)
gcatgacccggctatgagcctggacttaccagccagacagtggcagaaagggcggcctgcctctacagcgacgctgaggctggctgaaatggcagggctgaagggcagcgtctggaccca

SEQ ID NO: 27342 - DNA, 120 bp, Artificial Sequence
  ENSG00000039523_56 (sequence is synthesized)
gaaggtgccaggcggcttctggactccccaaggccttcacaacagccctggatcctttccaccaaccagcctaagccagcagtagcagctccaggacctgtttcagggagccccgcgcgg

SEQ ID NO: 27343 - DNA, 120 bp, Artificial Sequence
  ENSG00000039537_0 (sequence is synthesized)
ctaaaatatacccgtctctcttaattttgtatgtcttcaacataacattcattaaattttattctgaaactgagtcttaaaaactgaaatacttttaaagagagatgtttctagcttaaa

SEQ ID NO: 27344 - DNA, 120 bp, Artificial Sequence
  ENSG00000039537_1 (sequence is synthesized)
tatttcatcatatagtaagattcctgctgagagctcataataagaaatatgaaaccagttactctggacttggattttgatgtgctgaagtatctgctggtatttcttcaagtcatagat

SEQ ID NO: 27345 - DNA, 120 bp, Artificial Sequence
  ENSG00000039537_2 (sequence is synthesized)
gcataggcctggaggctctcaaggcatggccagacgctctgtcttgtacttcatcctgctgaatgctctgatcaacaagggccaagcctgcttctgtgatcactatgcatggactcagtg

SEQ ID NO: 27346 - DNA, 120 bp, Artificial Sequence
  ENSG00000039537_3 (sequence is synthesized)
gaccagctgctcaaaaacttgcaattctggaacccagagcagacacagacaaatagtagtagataagtactaccaggaaaacttttgtgaacagatttgcagcaagcaggagactagaga

SEQ ID NO: 27347 - DNA, 120 bp, Artificial Sequence
  ENSG00000039537_4 (sequence is synthesized)
atgtaactggcaaagatgccccatcaactgcctcctgggagattttggaccatggtcagactgtgacccttgtattgaaaaacagtctaaagttagatctgtcttgcgtcccagtcagtt

SEQ ID NO: 27348 - DNA, 120 bp, Artificial Sequence
  ENSG00000039537_5 (sequence is synthesized)
tgggggacagccatgcactgcgcctctggtagcctttcaaccatgcattccatctaagctctgcaaaattgaagaggctgactgcaagaataaatttcgctgtgacagtggccgctgcat

SEQ ID NO: 27349 - DNA, 120 bp, Artificial Sequence
  ENSG00000039537_6 (sequence is synthesized)
tgccagaaagttagaatgcaatggagaaaatgactgtggagacaattcagatgaaagggactgtgggaggacaaaggcagtatgcacacggaagtataatcccatccctagtgtacagtt

SEQ ID NO: 27350 - DNA, 120 bp, Artificial Sequence
  ENSG00000039537_7 (sequence is synthesized)
gatgggcaatgggtttcattttctggcaggagagcccagaggagaagtccttgataactctttcactggaggaatatgtaaaactgtcaaaagcagtaggacaagtaatccataccgtgt

SEQ ID NO: 27351 - DNA, 120 bp, Artificial Sequence
  ENSG00000039537_8 (sequence is synthesized)
tccggccaatctggaaaatgtcggctttgaggtacaaactgcagaagatgacttgaaaacagatttctacaaggatttaacttctcttggacacaatgaaaatcaacaaggctcattctc

SEQ ID NO: 27352 - DNA, 120 bp, Artificial Sequence
  ENSG00000039537_9 (sequence is synthesized)
aagtcagggggggagctctttcagtgtaccaattttttattcctcaaagagaagtgaaaatatcaaccataattctgccttcaaacaagccattcaagcctctcacaaaaaggattctag

SEQ ID NO: 27353 - DNA, 120 bp, Artificial Sequence
  ENSG00000039537_10 (sequence is synthesized)
ttttattaggatccataaagtgatgaaagtcttaaacttcacaacgaaagctaaagatctgcacctttctgatgtctttttgaaagcacttaaccatctgcctctagaatacaactctgc

SEQ ID NO: 27354 - DNA, 120 bp, Artificial Sequence
  ENSG00000039537_11 (sequence is synthesized)
tttgtacagccgaatattcgatgactttgggactcattacttcacctctggctccctgggaggcgtgtatgaccttctctatcagtttagcagtgaggaactaaagaactcaggtttaac

SEQ ID NO: 27355 - DNA, 120 bp, Artificial Sequence
  ENSG00000039537_12 (sequence is synthesized)
cgaggaagaagccaaacactgtgtcaggattgaaacaaagaaacgcgttttatttgctaagaaaacaaaagtggaacataggtgcaccaccaacaagctgtcagagaaacatgaaggttc

SEQ ID NO: 27356 - DNA, 120 bp, Artificial Sequence
  ENSG00000039537_13 (sequence is synthesized)
atttatacagggagcagagaaatccatatccctgattcgaggtggaaggagtgaatatggagcagctttggcatgggagaaagggagctctggtctggaggagaagacattttctgagtg

SEQ ID NO: 27357 - DNA, 120 bp, Artificial Sequence
  ENSG00000039537_14 (sequence is synthesized)
gttagaatcagtgaaggaaaatcctgctgtgattgactttgagcttgcccccatcgtggacttggtaagaaacatcccctgtgcagtgacaaaacggaacaacctcaggaaagctttgca

SEQ ID NO: 27358 - DNA, 120 bp, Artificial Sequence
  ENSG00000039537_15 (sequence is synthesized)
accctctcagggactgaatgtctgtgtgtgtgtcagagtggcacctatggtgagaactgtgagaaacagtctccagattataaatccaatgcagtagacggacagtggggttgttggtct

SEQ ID NO: 27359 - DNA, 120 bp, Artificial Sequence
  ENSG00000039537_16 (sequence is synthesized)
tcctggagtacctgtgatgctacttataagagatcgagaacccgagaatgcaataatcctgccccccaacgaggagggaaacgctgtgagggggagaagcgacaagaggaagactgcaca

SEQ ID NO: 27360 - DNA, 120 bp, Artificial Sequence
  ENSG00000039537_17 (sequence is synthesized)
ttttcaatcatggaaaacaatggacaaccatgtatcaatgatgacgaagaaatgaaagaggtcgatcttcctgagatagaagcagattccgggtgtcctcagccagttcctccagaaaat

SEQ ID NO: 27361 - DNA, 120 bp, Artificial Sequence
  ENSG00000039537_18 (sequence is synthesized)
ggatttatccggaatgaaaagcaactatacttggttggagaagatgttgaaatttcatgccttactggctttgaaactgttggataccagtacttcagatgcttaccagacgggacctgg

SEQ ID NO: 27362 - DNA, 120 bp, Artificial Sequence
  ENSG00000039537_19 (sequence is synthesized)
agacaaggggatgtggaatgccaacggacggagtgcatcaagccagttgtgcaggaagtcctgacaattacaccatttcagagattgtatagaattggtgaatccattgagctaacttgc

SEQ ID NO: 27363 - DNA, 120 bp, Artificial Sequence
  ENSG00000039537_20 (sequence is synthesized)
cccaaaggctttgttgttgctgggccatcaaggtacacatgccaggggaattcctggacaccacccatttcaaactctctcacctgtgaaaaagatactctaacaaaattaaaaggccat

SEQ ID NO: 27364 - DNA, 120 bp, Artificial Sequence
  ENSG00000039537_21 (sequence is synthesized)
tgtcagctgggacagaaacaatcaggatctgaatgcatttgtatgtctccagaagaagactgtagccatcattcagaagatctctgtgtgtttgacacagactccaacgattactttact

SEQ ID NO: 27365 - DNA, 120 bp, Artificial Sequence
  ENSG00000039537_22 (sequence is synthesized)
tcacccgcttgtaagtttttggctgagaaatgtttaaataatcagcaactccattttctacatattggttcctgccaagacggccgccagttagaatggggtcttgaaaggacaagactt

SEQ ID NO: 27366 - DNA, 120 bp, Artificial Sequence
  ENSG00000039537_23 (sequence is synthesized)
tcatccaacagcacaaagaaagaatcctgtggctatgacacctgctatgactgggaaaaatgttcagcctccacttccaaatgtgtctgcctattgcccccacagtgcttcaagggtgga

SEQ ID NO: 27367 - DNA, 120 bp, Artificial Sequence
  ENSG00000039537_24 (sequence is synthesized)
aaccaactctactgtgtcaaaatgggatcatcaacaagtgagaaaacattgaacatctgtgaagtgggaactataagatgtgcaaacaggaagatggaaatactgcatcctggaaagtgt

SEQ ID NO: 27368 - DNA, 120 bp, Artificial Sequence
  ENSG00000039537_25 (sequence is synthesized)
ttggcctagcacaattactgctaggcccagcacaatgaacagatttaccatcccgaagaaccaactcctacaaatgagaattcttgcacaaacagcagactggcatgctcaaagttactg

SEQ ID NO: 27369 - DNA, 120 bp, Artificial Sequence
  ENSG00000039537_26 (sequence is synthesized)
acaaaaattattttctgttagtttgagatcattattctcccctgactctcctgtttgggcatgtcttattcagttccagctcatgacgccctgtagcatacccctaggtaccaacttcca

SEQ ID NO: 27370 - DNA, 120 bp, Artificial Sequence
  ENSG00000039537_27 (sequence is synthesized)
cagcagtctcgtaaattctcctgttcacattgtacaaaaataatgtgacttctgaggcccttatgtagcctgtgacattaagcattctcgcaattagaaataagaataaaacccataatt

SEQ ID NO: 27371 - DNA, 120 bp, Artificial Sequence
  ENSG00000039537_28 (sequence is synthesized)
ttcttcaatgagttaataaacagaaatctccagaacctctgaaacacattcttgaagcccagctttcatatcttcattcaacaaataatttctgagtgtgtatacaggatgtcaagtact

SEQ ID NO: 27372 - DNA, 120 bp, Artificial Sequence
  ENSG00000039537_29 (sequence is synthesized)
gaccaaagtcctgagaactcggcagataataaaacagacaaaagcctttgccttcatgaagcatacattcattcaggggtagacacacaaaaaatgaaataaacaggtaaaatatgtagc

SEQ ID NO: 27373 - DNA, 120 bp, Artificial Sequence
  ENSG00000039537_30 (sequence is synthesized)
ttgccttgtgttagctagcaataagaaaagaagctttgtttggattaacatatataccctcttcattctgcatacctattttttccccaataatttgcagcttaggtccgaggacaccac

SEQ ID NO: 27374 - DNA, 120 bp, Artificial Sequence
  ENSG00000039537_31 (sequence is synthesized)
tttccagcttccttgcatgcctcaccatggactaggaaaaaaaagcggaggtgtgggggattccttcaagtcatttgtcttgaggcaaaaaggtttagaagaggaattcctttcatataa

SEQ ID NO: 27375 - DNA, 120 bp, Artificial Sequence
  ENSG00000039537_32 (sequence is synthesized)
tacagactgtggagtatttgttgctcctgtgctgggaggtgtgggcagctgagtcccagcactgcttcaacctgaggctgattggaagagcagattccttgcataagatcattgacaatt

SEQ ID NO: 27376 - DNA, 120 bp, Artificial Sequence
  ENSG00000039537_33 (sequence is synthesized)
tcaaacctgtagtgatagagcaaggctgtgtgccacttgaaagctgaattgattctttttggaaacaatgtataccttgctgctcctcccaggcctaattacaaagggcaaagaggcaca

SEQ ID NO: 27377 - DNA, 120 bp, Artificial Sequence
  ENSG00000039537_34 (sequence is synthesized)
gtcaggaaatgaaaaagagcttccagaagaatgatccaaacttctttcccagtcccagaaaagtaggaacagctgaaatgtacttgaggctattgctcacacaaaaggagcaggtgtttt

SEQ ID NO: 27378 - DNA, 120 bp, Artificial Sequence
  ENSG00000039537_35 (sequence is synthesized)
gagaaggggcctggaggctctcaaggcatggccagacgctctgtcttgtacttcatcctgctgaatgctctgatcaacaagggccaagcctgcttctgtgatcactatgcatggactcag

SEQ ID NO: 27379 - DNA, 120 bp, Artificial Sequence
  ENSG00000039537_36 (sequence is synthesized)
gttaagtggcaacaagtggcaggcaacaaggacaggacatcaccatccccatgggaagggccaaaatggctcatatgtgcttctgagggtcagtgctgaaaggggagatgatgggcactc

SEQ ID NO: 27380 - DNA, 120 bp, Artificial Sequence
  ENSG00000039560_0 (sequence is synthesized)
actgacccccgcagcgggggaggaggagggactgcggcgcaggaagccgagcaggaagcgagcccggcggccgcgttttcctggggaagcggcgggcggggtggagcagccagctgggtc

SEQ ID NO: 27381 - DNA, 120 bp, Artificial Sequence
  ENSG00000039560_1 (sequence is synthesized)
cggggagcgccgccgccgcctcgatggggtgttgaaaagtctcctctagagctttggaaggctgaatgcactaaacatgaagagcttgaaagcgaagttcaggaagagtgacaccaatga

SEQ ID NO: 27382 - DNA, 120 bp, Artificial Sequence
  ENSG00000039560_2 (sequence is synthesized)
gtggaacaagaatgatgaccggctactgcaggccgtggagaatggagatgcggagaaggtggcctcactgctcggcaagaagggggccagtgccaccaaacacgacagtgagggcaagac

SEQ ID NO: 27383 - DNA, 120 bp, Artificial Sequence
  ENSG00000039560_3 (sequence is synthesized)
cgctttccatcttgctgctgcaaaaggacacgtggaatgcctcagggtcatgattacacatggtgtggatgtgacagcccaagatactaccggacacagcgccttacatctcgcagccaa

SEQ ID NO: 27384 - DNA, 120 bp, Artificial Sequence
  ENSG00000039560_4 (sequence is synthesized)
gaacagccaccatgaatgcatcaggaagctgcttcagtctaaatgcccagccgaaagtgtcgacagctctgggaaaacagctttacattatgcagcggctcagggctgccttcaagctgt

SEQ ID NO: 27385 - DNA, 120 bp, Artificial Sequence
  ENSG00000039560_5 (sequence is synthesized)
gcagattctctgcgaacacaagagccccataaacctcaaagatttggatgggaatataccgctgcttcttgctgtacaaaatggtcacagtgagatctgtcactttctcctggatcatgg

SEQ ID NO: 27386 - DNA, 120 bp, Artificial Sequence
  ENSG00000039560_6 (sequence is synthesized)
agcagatgtcaattccaggaacaaaagtggaagaactgctctcatgctggcctgtgagattggcagctctaacgctgtggaagccttaattaaaaagggtgcagacctaaaccttgtaga

SEQ ID NO: 27387 - DNA, 120 bp, Artificial Sequence
  ENSG00000039560_7 (sequence is synthesized)
ttctcttggatacaatgccttacattattccaaactctcagaaaatgcaggaattcaaagccttctattatcaaaaatctctcaggatgctgatttaaagaccccaacaaaaccaaagca

SEQ ID NO: 27388 - DNA, 120 bp, Artificial Sequence
  ENSG00000039560_8 (sequence is synthesized)
gcatgaccaagtctctaaaataagctcagaaagaagtggaactccaaaaaaacgcaaagctccaccacctcctatcagtcctacccagttgagtgatgtctcttccccaagatcaataac

SEQ ID NO: 27389 - DNA, 120 bp, Artificial Sequence
  ENSG00000039560_9 (sequence is synthesized)
ttcgactccactatcgggaaaggaatcggtattttttgctgaaccacccttcaaggctgagatcagttctatacgagaaaacaaagacagactaagtgacagtactacaggtgctgatag

SEQ ID NO: 27390 - DNA, 120 bp, Artificial Sequence
  ENSG00000039560_10 (sequence is synthesized)
cttattggatataagttctgaagctgaccaacaagatcttctctctctattgcaagcaaaagttgcttcccttaccttacacaataaggagttacaagataaattacaggccaaatcacc

SEQ ID NO: 27391 - DNA, 120 bp, Artificial Sequence
  ENSG00000039560_11 (sequence is synthesized)
caaggaggcggaagcagacctaagctttgactcataccattccacccaaactgacttgggcccatccctgggaaaacctggtgaaacctctcccccagactccaaatcatctccatctgt

SEQ ID NO: 27392 - DNA, 120 bp, Artificial Sequence
  ENSG00000039560_12 (sequence is synthesized)
cttaatacattctttaggtaaatccactactgacaatgatgtcagaattcagcaactgcaagagattttgcaagatctacagaagagattagagagctctgaagcagagagaaaacagct

SEQ ID NO: 27393 - DNA, 120 bp, Artificial Sequence
  ENSG00000039560_13 (sequence is synthesized)
acaggtcgaactccaatcccgaagggcagaactggtatgcttaaacaacactgagatttcagagaacagctctgacctcagccagaaacttaaagaaactcagagcaaatacgaggaggc

SEQ ID NO: 27394 - DNA, 120 bp, Artificial Sequence
  ENSG00000039560_14 (sequence is synthesized)
tatgaaagaagtccttagtgtgcagaagcagatgaaactcggtcttgtctcacctgaaagcatggataattattcacatttccacgagctgagggtcacggaagaggaaataaatgtgct

SEQ ID NO: 27395 - DNA, 120 bp, Artificial Sequence
  ENSG00000039560_15 (sequence is synthesized)
aaagcaggatctgcagaatgcattagaagaaagtgaaagaaataaagagaaagtgagagagttagaggaaaaactggtagagagggagaaaggtacagtgattaagccacctgtggaaga

SEQ ID NO: 27396 - DNA, 120 bp, Artificial Sequence
  ENSG00000039560_16 (sequence is synthesized)
gtacgaggaaatgaaaagttcatattgctctgttattgagaatatgaataaggagaaagcatttttgtttgagaaataccaagaagcccaagaagaaatcatgaaattaaaagacacact

SEQ ID NO: 27397 - DNA, 120 bp, Artificial Sequence
  ENSG00000039560_17 (sequence is synthesized)
aaaaagtcagatgacacaggaagccagtgatgaagctgaggacatgaaagaagccatgaataggatgatagatgaactcaataaacaggtgagcgagctgtcacagctgtacaaagaagc

SEQ ID NO: 27398 - DNA, 120 bp, Artificial Sequence
  ENSG00000039560_18 (sequence is synthesized)
ccaggctgagctggaggattacaggaagaggaaatctctagaggatgtcacagctgaatatatccataaagcagagcatgagaaactgatgcaattgacaaacgtgtccagggctaaagc

SEQ ID NO: 27399 - DNA, 120 bp, Artificial Sequence
  ENSG00000039560_19 (sequence is synthesized)
agaagatgcactgtctgaaatgaagtctcagtattcaaaagtgttgaatgagttgacccagctcaaacaactggtggatgcacaaaaagagaactctgtctctatcacagaacatttgca

SEQ ID NO: 27400 - DNA, 120 bp, Artificial Sequence
  ENSG00000039560_20 (sequence is synthesized)
ccttgcaagcaaggaagtggaagtagcaaagctggagaaacaactcttagaagagaaagctgctatgactgatgcaatggtacctcggtcttcctatgaaaaactccagtcatccttaga

SEQ ID NO: 27401 - DNA, 120 bp, Artificial Sequence
  ENSG00000039560_21 (sequence is synthesized)
gagtgaagtgagtgtgttggcatcgaaattaaaggaatctgtgaaagagaaagagaaggtccattcagaggttgtccagattagaagtgaggtctcacaggtgaaaagagaaaaggaaaa

SEQ ID NO: 27402 - DNA, 120 bp, Artificial Sequence
  ENSG00000039560_22 (sequence is synthesized)
tattcagactctcttgaaatccaaagagcaagaagtaaatgaacttctgcaaaaattccagcaagctcaggaagaacttgcagaaatgaaaagatacgctgagagctcttcaaaactgga

SEQ ID NO: 27403 - DNA, 120 bp, Artificial Sequence
  ENSG00000039560_23 (sequence is synthesized)
ggaagataaagataaaaagataaatgagatgtcgaaggaagtcaccaaattgaaggaggccttgaacagcctctcccagctctcctactcaacaagctcatccaaaaggcagagtcagca

SEQ ID NO: 27404 - DNA, 120 bp, Artificial Sequence
  ENSG00000039560_24 (sequence is synthesized)
gctggaggcgctgcagcagcaagtcaaacagctccagaaccagctggcggaatgcaagaaacaacaccaggaggtcatatcagtttacagaatgcatcttctgtatgctgtgcagggcca

SEQ ID NO: 27405 - DNA, 120 bp, Artificial Sequence
  ENSG00000039560_25 (sequence is synthesized)
gatggatgaagatgtccagaaagtactgaagcaaatccttaccatgtgtaaaaaccagtctcaaaagaagtaaagtggattccttggcaggacactgccccttgtcatctgtctttgtgt

SEQ ID NO: 27406 - DNA, 120 bp, Artificial Sequence
  ENSG00000039560_26 (sequence is synthesized)
tagatccagagttgtcggcagccgctgccattgttctcattcgtggtatgcactgtggcctagcgtagcttcttccctttccaaaggtttctgaggacttctcccaggagaagactgccc

SEQ ID NO: 27407 - DNA, 120 bp, Artificial Sequence
  ENSG00000039560_27 (sequence is synthesized)
gcctcagaactgcttagagacttcaaaccagcagaggtgaaagtccctgtcatcccttcagattccagagctgggatcagccatgcccagaggtctggtcctgatgctggcaggggggcc

SEQ ID NO: 27408 - DNA, 120 bp, Artificial Sequence
  ENSG00000039560_28 (sequence is synthesized)
ccctcctccatccctgactggctgagtggctttatcaccaccgagtgatgtgctgaggcctcctgcagtgaatgctccttccattcctgtactcgggcagtgccattcagcacaggagag

SEQ ID NO: 27409 - DNA, 120 bp, Artificial Sequence
  ENSG00000039560_29 (sequence is synthesized)
ctctttttgcctttggctttcaattccaaaacatgatttaatttctaactaaattagtatggcactagttatgaagtatctgcttaaaacccttcatcatgatatcctgtggatttaaaa

SEQ ID NO: 27410 - DNA, 120 bp, Artificial Sequence
  ENSG00000039560_30 (sequence is synthesized)
actctaattccatgttttcttcccatctgccttatatatctcatcaccctgcttatcaatattcagtttgatgagcactattaactaaaatatgaaacttaaaaacaaaagcaagttgtc

SEQ ID NO: 27411 - DNA, 120 bp, Artificial Sequence
  ENSG00000039560_31 (sequence is synthesized)
cttaaaagttctttttttaagtaaattgttgacatactgcaaattttctatgcaaacttgcctcctgctgttatctgtgaagctcaggaaatccaaacatttgtgtttcaacaagggaca

SEQ ID NO: 27412 - DNA, 120 bp, Artificial Sequence
  ENSG00000039560_32 (sequence is synthesized)
gtaaactgtgtgtttacagccaaaagaaatgcctcatagttcttaacctcaacttttgtagaagtatttttttctctgtaatatttttattggctcataaagatgttttcatatctgaac

SEQ ID NO: 27413 - DNA, 120 bp, Artificial Sequence
  ENSG00000039560_33 (sequence is synthesized)
tcctaaataagtgaaattacagtagattatattaacaaaatactttttaggtagccatgcttgagactttttaaaaatataactttttccttaaagttttcagctatagcaaaaggtagt

SEQ ID NO: 27414 - DNA, 120 bp, Artificial Sequence
  ENSG00000039560_34 (sequence is synthesized)
tatgtatgccagacctaatatgagctgccaccaacacccctagaactttcagccatggtgtcttcagaattgtagcgcatttctgaatctagcaaatcctccttttacccgttgaatgtt

SEQ ID NO: 27415 - DNA, 120 bp, Artificial Sequence
  ENSG00000039560_35 (sequence is synthesized)
ttgaatgccctgactctaccagcgcccataaatgatctctagaaggactgttagtaccaatctgtttttcaactttgaagctaaaaaccctgatatggtaatattatggtgcatagcaga

SEQ ID NO: 27416 - DNA, 120 bp, Artificial Sequence
  ENSG00000039560_36 (sequence is synthesized)
ggtctcggaaaaaaaatatttctgttcactttactttcaggttaaaaatgtttctaacacgcttgcaacttcccttatggcattaatcttgttgagggagagagacagaatcctggactc

SEQ ID NO: 27417 - DNA, 120 bp, Artificial Sequence
  ENSG00000039560_37 (sequence is synthesized)
tccaaagtatttaactgaaagtagggcctgctctgacagggcccatgtcccacaaggctgcttggcctcagtgggtgcttggctgtgctggatgatatgttgatctgtattggataagga

SEQ ID NO: 27418 - DNA, 120 bp, Artificial Sequence
  ENSG00000039560_38 (sequence is synthesized)
ccaatgacagcaaagcaaaaatggctttaaagcttggtgttacttttcttaagttgtttaattatagttaagcaatttcaaaaatgctccaaagaaatgtgaaaggaccttttgtcacag

SEQ ID NO: 27419 - DNA, 120 bp, Artificial Sequence
  ENSG00000039560_39 (sequence is synthesized)
cacttcagaaaatacacaacagccccttctgcccccgcacagaaatgctgcagagtatataaaacttgagacatttttgtaggatgcctgacgaggtgtagccttttatcttgtttccgg

SEQ ID NO: 27420 - DNA, 120 bp, Artificial Sequence
  ENSG00000039560_40 (sequence is synthesized)
atgcatatttattacgagtactctggttaaatattgaaaagttatatgctgtagtttttagtattttgtctttgtaatttacagaagttattggagaaaataaacttgtttcattttgca

SEQ ID NO: 27421 - DNA, 120 bp, Artificial Sequence
  ENSG00000039560_41 (sequence is synthesized)
gatggggtgagtgcgcggcacggagttgggaggctcccggcgcggggtcccgggctcgtgtccccgcctttgtgtctggagctcgggcgcgggaggcgctggggacggcgcccgggcgga

SEQ ID NO: 27422 - DNA, 120 bp, Artificial Sequence
  ENSG00000039560_42 (sequence is synthesized)
gcggctgagcgggctgcagccggggtcccgccacctctccctggtccaccgccggcagcccactgtctgcggagagcagatctggggacaagaggaaggagaggaaggtgttgaaaagtc

SEQ ID NO: 27423 - DNA, 120 bp, Artificial Sequence
  ENSG00000039560_43 (sequence is synthesized)
actcccgctgaggctgggaagattgaaaggggccatggagaggctgcagtcacaatgaggcctccagattcatgtcatcaaagtgcttcatgatgactggattttcacaccatttatcca

SEQ ID NO: 27424 - DNA, 120 bp, Artificial Sequence
  ENSG00000039560_44 (sequence is synthesized)
agggccctagtcaatggcagcagcaagaatgaaagtagacacattggaagctagagagtcactgggtgacttttggaggtagcaacaagctcatgaagaaggcattcagtggcttgcact

SEQ ID NO: 27425 - DNA, 120 bp, Artificial Sequence
  ENSG00000039560_45 (sequence is synthesized)
agcagccagctgggtccggggagcgccgccgccgcctcgatggggtaacctctaatgtgaagttagcgcacacagttctcaagcatgtttggaactacactgtatccacaaaaaaataca

SEQ ID NO: 27426 - DNA, 120 bp, Artificial Sequence
  ENSG00000039560_46 (sequence is synthesized)
gttgctacttctgtgaaatgaggcacttagactagatgagcaatcttgacttttgaagggtggcaactaccttgtagaatccagtgaaaactcagaaccttcctccctgaaaaatgtgtt

SEQ ID NO: 27427 - DNA, 120 bp, Artificial Sequence
  ENSG00000039560_47 (sequence is synthesized)
aaagcgaagttcaggaagagtgacgtaaattaaataaaactcatagagtgcaaagagacttcgacaaagacagaaaactagctgttggccagagtgaaagtcctggtcatccgacttccg

SEQ ID NO: 27428 - DNA, 120 bp, Artificial Sequence
  ENSG00000039560_48 (sequence is synthesized)
agaaacctccttcaacctcatcgtctgctggctgtatgttatgcagcctacatatctcccgtggctttcagctaaggagaaaaaggcaattaaatggaaaatgttgcccaattcagcaga

SEQ ID NO: 27429 - DNA, 120 bp, Artificial Sequence
  ENSG00000039560_49 (sequence is synthesized)
caagattccatgagaaatctgaggcacaaggttaaagaaattctccagaattatatatacacctggaatttaacttcccagagcacagggctttgtagttcttgttcacaggcctgtcca

SEQ ID NO: 27430 - DNA, 120 bp, Artificial Sequence
  ENSG00000039560_50 (sequence is synthesized)
ggaaatgcctgataacatacatctgcagttatttgtggcaaaagacaaggcaaataggcaaatattcggtattataaaaaatgcacagatttcaaaggacaagtataggtggatttacat

SEQ ID NO: 27431 - DNA, 120 bp, Artificial Sequence
  ENSG00000039560_51 (sequence is synthesized)
cgcgttttcctggggaagcggcgggcggggtggagcagccagctgggtccggggagcgccgccgccgcctcgatggggatctcgctctgtcccttaggctggagtgcagtggtgcaatct

SEQ ID NO: 27432 - DNA, 120 bp, Artificial Sequence
  ENSG00000039560_52 (sequence is synthesized)
tgctggctgtatgttatgcagcctacatatctcccgtggctttcagctaaggagaaaaaggcaattaaatggaaaatgttgcccaattcagcagataggggtttctaaattttgtgacca

SEQ ID NO: 27433 - DNA, 120 bp, Artificial Sequence
  ENSG00000039560_53 (sequence is synthesized)
gggagaaaaacatagcagaggggttgtacacgataatatttttttaaaaggtcaccccataaacccttctatgatcccagtcttgtattagctgcattccagatactttgagcagagttg

SEQ ID NO: 27434 - DNA, 120 bp, Artificial Sequence
  ENSG00000039560_54 (sequence is synthesized)
ataaaggggagctcccctgcacatgctctgtctttgcctgctaccatgtgagatgtgcctttgctcttcctttgtcttctgccatgattgtgatgtctccccagccatctggaactacca

SEQ ID NO: 27435 - DNA, 120 bp, Artificial Sequence
  ENSG00000039560_55 (sequence is synthesized)
tggttctgggtttttggggtgttctctggaatccttagtatccataggggaatttcacacgtgctccctctccactcccatgttgaaatatgtaagaagatattttaatctagtgccttt

SEQ ID NO: 27436 - DNA, 120 bp, Artificial Sequence
  ENSG00000039560_56 (sequence is synthesized)
ctctccaaattccaagtcacatatggagctctaccttgaatgggtatacatgttcccaagtataagcaaaggttttacctcctaagattgcaaccaattgtagatgagacatgaattctc

SEQ ID NO: 27437 - DNA, 120 bp, Artificial Sequence
  ENSG00000039560_57 (sequence is synthesized)
ttttttttttcaatcatacccattttaagagtaaaagtaggaaaccaacatcacagcttttgttaccgccatcaccaaaacataatatgtaattcaagggcctttatctgaacctaatgg

SEQ ID NO: 27438 - DNA, 120 bp, Artificial Sequence
  ENSG00000039560_58 (sequence is synthesized)
atgtagcgggctttgttagtttgcctgattttgtcatccatttcattttatgagttttttaatttaaatgtattaaaaaggaattgttccaaagtcttaagtcccagaggccaaaagaga

SEQ ID NO: 27439 - DNA, 120 bp, Artificial Sequence
  ENSG00000039560_59 (sequence is synthesized)
gagatgcaccctggagtctgcgccgggtcccacctgtttcgccccgcgcggcgcctcgctgcccccgcgtcggtgctgctgagcccaatccgcctcccggctgaacttggaggaggtgtt

SEQ ID NO: 27440 - DNA, 120 bp, Artificial Sequence
  ENSG00000039600_0 (sequence is synthesized)
attgtcgcagctccgggtgggggagggatgactaaagacaacggctgtaagagaactccacaagagagtcagaacgaaaatgtgcaacaagtgcggcggctcctaccatggcaggtgatt

SEQ ID NO: 27441 - DNA, 120 bp, Artificial Sequence
  ENSG00000039600_1 (sequence is synthesized)
cgaggactcagcacgaggcgagagtagggaccaggaagagccggaaaacccgcctgtgattggccgtccacgggtatcggtcgttgtgattgggtgaggcccagacagacagctgcgttt

SEQ ID NO: 27442 - DNA, 120 bp, Artificial Sequence
  ENSG00000039600_2 (sequence is synthesized)
tgaaccgcgtagggttctgggtagcaaaggccttgcaaggctcttaaccgaaagggggagggggaaggtcgccaacaaacggctgagctcacaatcctggccggggcgtccccctccccc

SEQ ID NO: 27443 - DNA, 120 bp, Artificial Sequence
  ENSG00000039600_3 (sequence is synthesized)
atggagagagccagacccgagccgccgcctcagccgcgcccgttgcgtcccgctccgcccccgctgccggtcgagggcacctccttttgggcagcagccatggagccccctccgtcgtct

SEQ ID NO: 27444 - DNA, 120 bp, Artificial Sequence
  ENSG00000039600_4 (sequence is synthesized)
cccacactgagcgcggcagccagtgcgaccttggcctcgtcgtgcggggaggcagtggcgtccggcttacagcccgcggtgcggcggctgctgcaggtgaagccagagcaggtgttgctg

SEQ ID NO: 27445 - DNA, 120 bp, Artificial Sequence
  ENSG00000039600_5 (sequence is synthesized)
ctaccacagcctcaggcccagaacgaggaagccgctgcctcgtccgcgcaggcgcggctgttgcagttcaggcccgacctgcggctcctgcagccgccgacagcgtcagacggcgccacc

SEQ ID NO: 27446 - DNA, 120 bp, Artificial Sequence
  ENSG00000039600_6 (sequence is synthesized)
tccaggcccgagttgcacccggtgcagcccctggcgctgcatgtcaaggccaagaagcagaagctggggcccagcctggatcagtcagtggggcctcgaggggccgtcgaaaccggtcct

SEQ ID NO: 27447 - DNA, 120 bp, Artificial Sequence
  ENSG00000039600_7 (sequence is synthesized)
agagcctccagggtggtcaagttggaaggccccgggccggccctcggctacttccgaggggacgagaagggcaagctggaggcggaggaggtcatgagagactcgatgcaaggcggggca

SEQ ID NO: 27448 - DNA, 120 bp, Artificial Sequence
  ENSG00000039600_8 (sequence is synthesized)
ggcaaaagcccggcagccatccgagaaggtgtgatcaaaacggaggaacccgagagactcctcgaggactgcaggctcggcgcggagcccgcgtccaatggcctggttcatggcagcgcg

SEQ ID NO: 27449 - DNA, 120 bp, Artificial Sequence
  ENSG00000039600_9 (sequence is synthesized)
gaggtcatcttggccccaacgtccggtgcctttgggccgcaccagcaagaccttaggatccctttgacgctccacacggtcccccctggggcccggatccagtttcagggagctccgcct

SEQ ID NO: 27450 - DNA, 120 bp, Artificial Sequence
  ENSG00000039600_10 (sequence is synthesized)
tcagagctgataagattgaccaaggtccccctgacaccagtgcctactaaaatgcagtccctactggagccttctgtaaaaattgaaaccaaagatgtcccgctcaccgtgttgccctca

SEQ ID NO: 27451 - DNA, 120 bp, Artificial Sequence
  ENSG00000039600_11 (sequence is synthesized)
gatgcaggcataccagatactcccttcagtaaggacagaaatggtcatgtgaagcgacccatgaacgcatttatggtttgggcaaggatccaccgaccagcactagccaaagctaaccca

SEQ ID NO: 27452 - DNA, 120 bp, Artificial Sequence
  ENSG00000039600_12 (sequence is synthesized)
gcagccaacaatgcagaaatcagtgtccagcttgggttagagtggaacaaacttagtgaagaacaaaagaaaccctattacgatgaagcacaaaagattaaggaaaagcacagagaggaa

SEQ ID NO: 27453 - DNA, 120 bp, Artificial Sequence
  ENSG00000039600_13 (sequence is synthesized)
gattccctctaagtgtttccaatgtattttctggtaccacacagaatatcatctctacaaatcctacaacagtttatccttaccgctcacctacgtactctgtggtaattcccagcctac

SEQ ID NO: 27454 - DNA, 120 bp, Artificial Sequence
  ENSG00000039600_14 (sequence is synthesized)
agaatcccatcactcatccagttggtgaaacctcacctgctatccagctgcccacacctgcagtccagagcccaagccctgtcacacttttccagcccagcgtctccagtgctgctcagg

SEQ ID NO: 27455 - DNA, 120 bp, Artificial Sequence
  ENSG00000039600_15 (sequence is synthesized)
tggctgtccaggatccaagtctacctgtctatccagcactcccaccccaacgctttactgggccttcccaaacagacactcatcagctgcattctgaagccactcacactgtgaagcaac

SEQ ID NO: 27456 - DNA, 120 bp, Artificial Sequence
  ENSG00000039600_16 (sequence is synthesized)
ccactcctgtctctctagagagcgccaacaggatttcaagtagtgcaagtactgcccatgccagatttgcaacttcgaccatccaacctcctagggagtattccagcgtttccccttgtc

SEQ ID NO: 27457 - DNA, 120 bp, Artificial Sequence
  ENSG00000039600_17 (sequence is synthesized)
ccagaagtgctccaatcccccaggcttctcccattccacacccacatgtctaccagccccctccccttggccatccagccacactgttcgggacaccaccaagattctcttttcatcacc

SEQ ID NO: 27458 - DNA, 120 bp, Artificial Sequence
  ENSG00000039600_18 (sequence is synthesized)
cttacttcctacccggacctcactacttcccatcaagtacatgcccttacagtcggcctccctttggctatggaaattttccgagttcaatgccagaatgccttagttattatgaagaca

SEQ ID NO: 27459 - DNA, 120 bp, Artificial Sequence
  ENSG00000039600_19 (sequence is synthesized)
ggtacccaaaacatgagggtatcttttcaactttaaatagagactattcttttagagactactcaagtgaatgcacacacagtgaaaattctcggagttgtgagaacatgaatggaactt

SEQ ID NO: 27460 - DNA, 120 bp, Artificial Sequence
  ENSG00000039600_20 (sequence is synthesized)
cttactataacagtcatagccacagtggggaagaaaacttaaaccctgtgcctcagctggacattggaaccttggagaatgtcttcacagccccgacatcaactccttctagcatccagc

SEQ ID NO: 27461 - DNA, 120 bp, Artificial Sequence
  ENSG00000039600_21 (sequence is synthesized)
aagtcaatgtcaccgacagtgatgaggaggaagaagaaaaagtgctcagggatttataattttaaaacaaatatgcacagaaaataaacatttcttaaaatatattctgggtcagttggt

SEQ ID NO: 27462 - DNA, 120 bp, Artificial Sequence
  ENSG00000039600_22 (sequence is synthesized)
atgagaaaaaaaaaagcctagaattctttgttgaaagttttcagtcgtgatttgaggagttaaaaccaaatgcaatttatgtcttcataaaattttgattagtgaaactagagtctggat

SEQ ID NO: 27463 - DNA, 120 bp, Artificial Sequence
  ENSG00000039600_23 (sequence is synthesized)
gtttcattgtaggaatatttaagttattaagtagtttaattttaatggctgaaatttgcatcaacatgtattattattactttatcctggaacatgcaaaatactgaagcctcacagttg

SEQ ID NO: 27464 - DNA, 120 bp, Artificial Sequence
  ENSG00000039600_24 (sequence is synthesized)
tatgtgaggggaaaggggaaataaatctagcatagtgtgatttttattttatctcaggatacattttttaaatgattttttgtttgctttttatgtaatacttatggatgttgtcaattt

SEQ ID NO: 27465 - DNA, 120 bp, Artificial Sequence
  ENSG00000039600_25 (sequence is synthesized)
ttgatgtaacattttgaaagtattttgacaactcctagtgaacttggacttggttgctaaatttaacttacactaataaccaattataagttccaaatgtgttttaatggcacctgggtg

SEQ ID NO: 27466 - DNA, 120 bp, Artificial Sequence
  ENSG00000039600_26 (sequence is synthesized)
attcttcagctaaatttagtcatttctgtttctaaatatttttatcattttaaaatattttttttccatttggcatacatcgttctttgttgtaattaaataaacatagataaaattgtt

SEQ ID NO: 27467 - DNA, 120 bp, Artificial Sequence
  ENSG00000039600_27 (sequence is synthesized)
atattggctgcggggaaggggacgggggctgttggacatgcgtgcagagtccggcggccacggacgcggtaatattgtccctcggcatccgccgtggtgagacccggcgcgttgctgtga

SEQ ID NO: 27468 - DNA, 120 bp, Artificial Sequence
  ENSG00000039650_0 (sequence is synthesized)
atttccgtccgccgaggaaccgaccgccgccggccgggttgcaggcggggcacctcgggcaggacctccctggtcggaagtggccgtgagcccaagccgcggtcccgggccggcacccag

SEQ ID NO: 27469 - DNA, 120 bp, Artificial Sequence
  ENSG00000039650_1 (sequence is synthesized)
gatgggcgaggtggaggccccgggccgcttgtggctcgagagcccccctgggggagcgccccccatcttcctgccctcggacgggcaagccctggtcctgggcaggggacccctgaccca

SEQ ID NO: 27470 - DNA, 120 bp, Artificial Sequence
  ENSG00000039650_2 (sequence is synthesized)
ggttacggaccggaagtgctccagaactcaagtggagctggtcgcagatcctgagacccggacagtggcagtgaaacagctgggagttaacccctcaactaccgggacccaggagttgaa

SEQ ID NO: 27471 - DNA, 120 bp, Artificial Sequence
  ENSG00000039650_3 (sequence is synthesized)
gccggggttggagggctctctgggggtgggggacacactgtatttggtcaatggcctccacccactgaccctgcgctgggaagagacccgcacaccagaatcccagccagatactccgcc

SEQ ID NO: 27472 - DNA, 120 bp, Artificial Sequence
  ENSG00000039650_4 (sequence is synthesized)
tggcacccctctggtgtcccaagatgagaagagagatgctgagctgccgaagaagcgtatgcggaagtcaaaccccggctgggagaacttggagaagttgctagtgttcaccgcagctgg

SEQ ID NO: 27473 - DNA, 120 bp, Artificial Sequence
  ENSG00000039650_5 (sequence is synthesized)
ggtgaaaccccagggcaaggtggctggctttgatctggacgggacgctcatcaccacacgctctgggaaggtctttcccactggccccagtgactggaggatcttgtacccagagattcc

SEQ ID NO: 27474 - DNA, 120 bp, Artificial Sequence
  ENSG00000039650_6 (sequence is synthesized)
ccgtaagctccgagagctggaagccgagggctacaagctggtgatcttcaccaaccagatgagcatcgggcgcgggaagctgccagccgaggagttcaaggccaaggtggaggctgtggt

SEQ ID NO: 27475 - DNA, 120 bp, Artificial Sequence
  ENSG00000039650_7 (sequence is synthesized)
gtaccggaagccggtgacgggcatgtgggaccatctgcaggagcaggccaacgacggcacgcccatatccatcggggacagcatctttgtgggagacgcagccggacgcccggccaactg

SEQ ID NO: 27476 - DNA, 120 bp, Artificial Sequence
  ENSG00000039650_8 (sequence is synthesized)
ggccccggggcggaagaagaaagacttctcctgcgccgatcgcctgtttgccctcaaccttggcctgcccttcgccacgcctgaggagttctttctcaagtggccagcagccggcttcga

SEQ ID NO: 27477 - DNA, 120 bp, Artificial Sequence
  ENSG00000039650_9 (sequence is synthesized)
gctcccagcctttgatccgaggactgtctcccgctcagggcctctctgcctccccgagtccagggccctcctgagcgccagcccggaggtggttgtcgcagtgggattccctggggccgg

SEQ ID NO: 27478 - DNA, 120 bp, Artificial Sequence
  ENSG00000039650_10 (sequence is synthesized)
gaagtccacctttctcaagaagcacctcgtgtcggccggatatgtccacgtgaacagggacacgctaggctcctggcagcgctgtgtgaccacgtgtgagacagccctgaagcaagggaa

SEQ ID NO: 27479 - DNA, 120 bp, Artificial Sequence
  ENSG00000039650_11 (sequence is synthesized)
acgggtcgccatcgacaacacaaacccagacgccgcgagccgcgccaggtacgtccagtgtgcccgagccgcgggcgtcccctgccgctgcttcctcttcaccgccactctggagcaggc

SEQ ID NO: 27480 - DNA, 120 bp, Artificial Sequence
  ENSG00000039650_12 (sequence is synthesized)
gcgccacaacaaccggtttcgagagatgacggactcctctcatatccccgtgtcagacatggtcatgtatggctacaggaagcagttcgaggccccaacgctggctgaaggcttctctgc

SEQ ID NO: 27481 - DNA, 120 bp, Artificial Sequence
  ENSG00000039650_13 (sequence is synthesized)
catcctggagatcccgttccggctatgggtggagccgaggctggggcggctgtactgccagttctccgagggctgagccccgcccagctcccctccacaataaacgctgtttctccttga

SEQ ID NO: 27482 - DNA, 120 bp, Artificial Sequence
  ENSG00000039650_14 (sequence is synthesized)
gcgggaacaatccagagggacgcttggctgctacgcgggattgcagtggtgcagccagccccgaagtcggaaggtgctctctagggagtacaggaagataaagtttgtgcttgatttaga

SEQ ID NO: 27483 - DNA, 120 bp, Artificial Sequence
  ENSG00000039650_15 (sequence is synthesized)
attagctagatcctttgggggagaggggatcgagccgatttagggaggatgttcactgcgcggatgatgctcaggccatcgggaaatccagaaacaggcgacgaccttcgtcaagagaaa

SEQ ID NO: 27484 - DNA, 120 bp, Artificial Sequence
  ENSG00000039650_16 (sequence is synthesized)
aatgatcctgtggagaaaagtaaatgtcgctaggttgggatggatggtaacaggccaagccccggacctatatctagccacattttttgtcaaggaggaaaccaattctgtagagaaaag

SEQ ID NO: 27485 - DNA, 120 bp, Artificial Sequence
  ENSG00000039650_17 (sequence is synthesized)
tacctccctgtcccttgcaaggaccagtgtcaggcaatcctagtgccactatctggctactgcatgtcaaggagccaatcccatgtagaaataaactgcctcttactccctggatgctat

SEQ ID NO: 27486 - DNA, 120 bp, Artificial Sequence
  ENSG00000039650_18 (sequence is synthesized)
gccaggtagcgtgaccgcggggccgtaggtggcctgcggcggggtgggcggggcctgcacatccagctccttcccccacaggtacgtccagtgtgcccgagccgcgggcgtcccctgccg

SEQ ID NO: 27487 - DNA, 120 bp, Artificial Sequence
  ENSG00000039650_19 (sequence is synthesized)
ccacctcccatggccctgaggctgggctgcagtttcccgacagcctaggaccgctgggactgctgcctctccctctgctctgctctccccaaggccaaggtcgccctgcttctttcccaa

SEQ ID NO: 27488 - DNA, 120 bp, Artificial Sequence
  ENSG00000039650_20 (sequence is synthesized)
ccccaccccccccacatgccccagggtccctcctgtacatgacagggtcaccactcaccagtctctgcgggggcctcatctgtgactcctggaggggcccagcccggggtaaccactacc

SEQ ID NO: 27489 - DNA, 120 bp, Artificial Sequence
  ENSG00000039650_21 (sequence is synthesized)
cacgccggatgccgttgacaaagttgccctggtcatgggggatgaggccaatgaagattttcttctctgaagagtacaggagcataagcacgcggatctcacacgatgctttgtaggaaa

SEQ ID NO: 27490 - DNA, 120 bp, Artificial Sequence
  ENSG00000039650_22 (sequence is synthesized)
agtgcacgcagccggcctggcaggcacagggcgtggtgtcaccagacagcaccacagggaccagcatccctccaaccacggcatcatgccgtgggctccatgagccaggcacagcctaac

SEQ ID NO: 27491 - DNA, 120 bp, Artificial Sequence
  ENSG00000039650_23 (sequence is synthesized)
ggggcctaagggtctgatagtggtggagaagggctgatttttccgctgggtatttgattggaggaagctcccggtgggggcggagccagtcccagctcctccctctctttctgcagctgg

SEQ ID NO: 27492 - DNA, 120 bp, Artificial Sequence
  ENSG00000039650_24 (sequence is synthesized)
acctgtctctctaaaaaattagcgggaatggtggcgcgtccttgtagttcctaatcgggaggctgaagcgggaggatcccttgagcccagtaggtcaagggtgtagtgagcagtgatcac

SEQ ID NO: 27493 - DNA, 120 bp, Artificial Sequence
  ENSG00000039650_25 (sequence is synthesized)
cacactgtacttcagcctgggtgacagagcgagaacctgtctcaaaaaaagaaaagaaaaaatatggctgggagagaaggggatgtgtccagtaaagaaagaagtgttgcctgtttcagt

SEQ ID NO: 27494 - DNA, 120 bp, Artificial Sequence
  ENSG00000039650_26 (sequence is synthesized)
cctgttcctgtgcgcgtgccctgagccccgcctgggtcctaggccacccaccgacactgccccccacacagccgggaagtccacctttctcaagaagcacctcgtgtcggccggatatgt

SEQ ID NO: 27495 - DNA, 120 bp, Artificial Sequence
  ENSG00000039650_27 (sequence is synthesized)
ccacgtgaacagggtatgaccaggcttttgccgccccaaatctattataaagttcccatctccacctctcaactggtttggggcggctttcctccatcattgcctccccgtccccgctcg

SEQ ID NO: 27496 - DNA, 120 bp, Artificial Sequence
  ENSG00000039650_28 (sequence is synthesized)
gggtcttctctccccctgggtctgccgatctgtttgtgacctctcgtgtccccaggacacgctaggctcctggcagcgctgtgtgaccacgtgtgagacagccctgaagcaagggaaacg

SEQ ID NO: 27497 - DNA, 120 bp, Artificial Sequence
  ENSG00000039650_29 (sequence is synthesized)
atcctttttatagatgaggaaactagaacatcgagggtgaagccaaagaaggacttaggggcgctgtcgggggcggaggtttcctcgactgacaatgaccatcagatgggaaaaaaatct

SEQ ID NO: 27498 - DNA, 120 bp, Artificial Sequence
  ENSG00000039650_30 (sequence is synthesized)
tcctccctgggatgaaaattagaagtcaaggtggaaagaggcaaatctgctaacggaggatccagtccccgctaccggcctgagcctcgcgttgcagcaagagagatgaaggccggcacc

SEQ ID NO: 27499 - DNA, 120 bp, Artificial Sequence
  ENSG00000039650_31 (sequence is synthesized)
gacatggtcatgtatggctacagcagttcgaggccccaacgctggctgaaggcttctctgccatcctggagatcccgttccggctatgggtggagccgaggctggggcggctgtactgcc

SEQ ID NO: 27500 - DNA, 120 bp, Artificial Sequence
  ENSG00000039650_32 (sequence is synthesized)
tcagtgcctctgcaagggccagcaaggcctggggatgggatttggggaggaattgcaagccgtcagtgaaggggtacattaggaaaatctgattggggccgggcgtggtggctcaagcct

SEQ ID NO: 27501 - DNA, 120 bp, Artificial Sequence
  ENSG00000039650_33 (sequence is synthesized)
ctgccaggaagcagttcgaggccccaacgctggctgaaggcttctctgccatcctggagatcccgttccggctatgggtggagccgaggctggggcggctgtactgccagttctccgagg

SEQ ID NO: 27502 - DNA, 120 bp, Artificial Sequence
  ENSG00000039650_34 (sequence is synthesized)
ttcaccgccactctggagcaggcgcgccacaacaaccgggtgagcccgctcagcccggacaccccccgggctgcaccccctgacccccctcctcccctgacccctgggcctgccgcccct

SEQ ID NO: 27503 - DNA, 120 bp, Artificial Sequence
  ENSG00000039650_35 (sequence is synthesized)
tcaggtcccactgctgaccgccagaccaaactcctacagctgccgcctgcatcccagaccgcctgcatcccgctcggagcgggtccgagccctgctccctcccagcgcaccttttccacg

SEQ ID NO: 27504 - DNA, 120 bp, Artificial Sequence
  ENSG00000039650_36 (sequence is synthesized)
aagagaaaaatgatcctgtggagaaaatggagctggtcgcagatcctgagacccggacagtggcagtgaaacagctgggagttaacccctcaactaccgggacccaggagttgaagccgg

SEQ ID NO: 27505 - DNA, 120 bp, Artificial Sequence
  ENSG00000039987_0 (sequence is synthesized)
atgaccgtcacctacacagcccgagtggcgaacgcccgcttcggtggcttctcccagctgctgctactgtggcgtgggagcatctacaaactcctgtggcgagagctgctctgcttcctt

SEQ ID NO: 27506 - DNA, 120 bp, Artificial Sequence
  ENSG00000039987_1 (sequence is synthesized)
gggttctacatggcgctgagtgctgcctaccgctttgtgctgaccgaagggcagaagcgctacttcgagaagcttgtgatttattgtgaccagtatgccagcctcatccctgtctccttc

SEQ ID NO: 27507 - DNA, 120 bp, Artificial Sequence
  ENSG00000039987_2 (sequence is synthesized)
gtgcttggcttttatgtgacgctggtggtgaaccgctggtggagccagtacctatgcatgccgctgcccgacgcgctcatgtgcgtggtggcgggcaccgtgcacggacgcgacgaccgc

SEQ ID NO: 27508 - DNA, 120 bp, Artificial Sequence
  ENSG00000039987_3 (sequence is synthesized)
ggccgcctctaccggcgcacactcatgcgctacgcagggctctcggccgtgctcatcctgcgctccgtcagcaccgcggtgttcaagcgcttccccaccatagaccacgtggtggaggct

SEQ ID NO: 27509 - DNA, 120 bp, Artificial Sequence
  ENSG00000039987_4 (sequence is synthesized)
gggtttatgacccgcgaggagcgcaagaagtttgaaaacctgaactcatcctacaacaagtactgggtgccctgcgtctggttctccaacctggcggcacaggcccgacgcgagggccgc

SEQ ID NO: 27510 - DNA, 120 bp, Artificial Sequence
  ENSG00000039987_5 (sequence is synthesized)
atccgcgacaacagcgcccttaagctgctgctcgaggagctgaatgtttttcggggcaaatgtggaatgctctttcactatgactggattagcgtacccctcgtgtacacgcaggtggtg

SEQ ID NO: 27511 - DNA, 120 bp, Artificial Sequence
  ENSG00000039987_6 (sequence is synthesized)
accatcgcactgtacagctacttcctggcttgcctcattggtcgccagttcctggacccggctcagggttacaaagaccacgacctagacctgtgtgtgcccatcttcaccctcttgcag

SEQ ID NO: 27512 - DNA, 120 bp, Artificial Sequence
  ENSG00000039987_7 (sequence is synthesized)
gtgtccatgctggcagtggacgagatgtatgatgacctggctgtgctggagaaggacttgtactgggatgcagccgaggctcgcgccccatacacagcggctactgtcttccagctgcgg

SEQ ID NO: 27513 - DNA, 120 bp, Artificial Sequence
  ENSG00000039987_8 (sequence is synthesized)
cagccttccttccagggctccacctttgacatcacgctggccaaagaagacatgcagttccagcggctggacggcttggatggaccgatgggagaggcgcccggcgacttcctgcagcgc

SEQ ID NO: 27514 - DNA, 120 bp, Artificial Sequence
  ENSG00000039987_9 (sequence is synthesized)
ctcctgccggcgggcgcgggcatggtcgcgggaggcccgctgggccggcgcctgtcctttctactccgcaagaacagctgcgtgtcggaggcgtctactggggccagctgctcatgcgcg

SEQ ID NO: 27515 - DNA, 120 bp, Artificial Sequence
  ENSG00000039987_10 (sequence is synthesized)
gttgtccccgaaggcgcggccccggagtgcagctgcggggacccgctgctcgaccccggcctgccggagcccgaggccccgccccctgcgggtcccgaaccgcttaccctcatccctggg

SEQ ID NO: 27516 - DNA, 120 bp, Artificial Sequence
  ENSG00000039987_11 (sequence is synthesized)
cctgtcgagcccttcagcatcgtgaccatgcccgggccccggggtccggcgccaccctggctgcccagccctattggcgaggaggaggagaatctggcctgagatcttagagcccagccc

SEQ ID NO: 27517 - DNA, 120 bp, Artificial Sequence
  ENSG00000039987_12 (sequence is synthesized)
cctaaggacagggaaccaggtccctgcacggcacccacgcaggtgtcccggtctgcataagcctcgtgtgcctttgtaaagtccacctacacttttgaccagctctcgctgcccgcatgt

SEQ ID NO: 27518 - DNA, 120 bp, Artificial Sequence
  ENSG00000039987_13 (sequence is synthesized)
gtttggcgctgtgctaggggcgggagttcttccagactcttggaccagcccgccctgaccaccagctctacttcccaacccccactgcctgagaggtctctatcagtgtcctgcctgaat

SEQ ID NO: 27519 - DNA, 120 bp, Artificial Sequence
  ENSG00000039987_14 (sequence is synthesized)
tctttccttcaagtgaagatgtgactgactacctcctcgagttgtcatgaggatgaaagaatggcattaaagcatttggtatacagtaggtgctcaataaattgctagtgatttttactc

SEQ ID NO: 27520 - DNA, 120 bp, Artificial Sequence
  ENSG00000039987_15 (sequence is synthesized)
ctgaagctacagcctagccgagggaggaggaccaggaaagggaggcacgcccactccccagccccacccaacgccaaagccacccgcccattccatccctgtccctgtgggtccttgcac

SEQ ID NO: 27521 - DNA, 120 bp, Artificial Sequence
  ENSG00000039987_16 (sequence is synthesized)
cggccaccttcaacacaggtgagatgagcccaggcttggggaaatagggggccctgagggaagagggaacctgcgggcaggaatgcatccggagtcctcccggggcggggagtggagggc

SEQ ID NO: 27522 - DNA, 120 bp, Artificial Sequence
  ENSG00000039987_17 (sequence is synthesized)
ggggcacatctgattgaaaaggttaagtggaatcaattctggagatggggataagagctaaagtctcaggactgtgataacgccagaagctaagataggagtcaggggacaaggtcaagg

SEQ ID NO: 27523 - DNA, 120 bp, Artificial Sequence
  ENSG00000039987_18 (sequence is synthesized)
tctgagactgggccactgactggggacagagctaagggctgaggtcagcgaggatcagaccggtcagtggtgattccaaaggagatgagggctgaggccaggagcactggctcacgcctg

SEQ ID NO: 27524 - DNA, 70 bp, Artificial Sequence
  ENSG00000039987_19 (sequence is synthesized)
atgagggctgaggccaggagcacctttgagcaagcccaggagttcagaccagcctgggcaacatagtgag

SEQ ID NO: 27525 - DNA, 120 bp, Artificial Sequence
  ENSG00000040199_0 (sequence is synthesized)
gcacaggggtatagatctaaagaagggcagaggggagatctggaaacaggctggctgactccaaatttggcccattggcaacaaaactactatcactgcgagaacgaaaagaaaaacaaa

SEQ ID NO: 27526 - DNA, 120 bp, Artificial Sequence
  ENSG00000040199_1 (sequence is synthesized)
acaaagaaaagaaaagaagttaacttttaaaagtttttttctgaatcagccttgcaaataaatcataaaccgggtcacaggccatattactgcttgaagcagagcaccgaattctgataa

SEQ ID NO: 27527 - DNA, 120 bp, Artificial Sequence
  ENSG00000040199_2 (sequence is synthesized)
ttttgctccaggaggaggcaagggaattaaaacatggctgggaggtgagcggacgttttgtacgaggttgggttgaatttgcttaagaaggtcgcacgcatctctgataaggaagagaaa

SEQ ID NO: 27528 - DNA, 120 bp, Artificial Sequence
  ENSG00000040199_3 (sequence is synthesized)
aggccttgccaagagaaatatgaaacgcaatgggagcagaaattgtttgaataggagaagtaggtttggttctcgagaaagagactggctaagagaagatgtaaagagaggctgtgttta

SEQ ID NO: 27529 - DNA, 120 bp, Artificial Sequence
  ENSG00000040199_4 (sequence is synthesized)
cctttatggagcagacactaccactgccactacaaccaccaccacctcctcttcctcttcctcctcctcctcttcctctgacttacatctcgtcctttgcactgtagagacaccagcatc

SEQ ID NO: 27530 - DNA, 120 bp, Artificial Sequence
  ENSG00000040199_5 (sequence is synthesized)
agaaatatgtgctggagagggaagagaaagtctttatttacagcttcatggagacctggtcaggagactggaacctactgaacgacctcttcagatcgtttatgattacttatccaggct

SEQ ID NO: 27531 - DNA, 120 bp, Artificial Sequence
  ENSG00000040199_6 (sequence is synthesized)
gggatttgatgatcctgtgcgcatacaggaggaggctacaaatcctgacctcggctgtatgattcgattttatggtgaaaaaccatgccacatggatcgtttggatcgaatcctattgtc

SEQ ID NO: 27532 - DNA, 120 bp, Artificial Sequence
  ENSG00000040199_7 (sequence is synthesized)
tggcatctataatgtacgcaagggaaagacccagctgcataagtgggctgagcgcctagttgtcctctgtggtacctgccttatcgtttcctcagtgaaggattgtcaaactggaaagat

SEQ ID NO: 27533 - DNA, 120 bp, Artificial Sequence
  ENSG00000040199_8 (sequence is synthesized)
gcacattttgcctctggttggtggaaagatagaagaagtgaagcgacggcaatactcccttgctttcagctcagcaggagcccaagctcagacctatcatgtcagcttcgagactttggc

SEQ ID NO: 27534 - DNA, 120 bp, Artificial Sequence
  ENSG00000040199_9 (sequence is synthesized)
cgagtaccagcgatggcaacggcaagcatccaaggtggtgtcccagcgaatcagtaccgtggatctctcgtgttacagcctcgaggaggttcctgagcatctcttctatagtcaagatat

SEQ ID NO: 27535 - DNA, 120 bp, Artificial Sequence
  ENSG00000040199_10 (sequence is synthesized)
tacctacctcaacttgcgacacaacttcatgcagttagaaagacccggaggcctcgatacactctacaaattttctcaactgaagggcctgaacttgtcccataataaacttgggttgtt

SEQ ID NO: 27536 - DNA, 120 bp, Artificial Sequence
  ENSG00000040199_11 (sequence is synthesized)
tcctatattgttatgcgagatctctaccctgactgagctcaacctttcctgtaatggatttcatgacctaccaagtcaaattggcaatctgctaaatcttcaaaccctctgtcttgatgg

SEQ ID NO: 27537 - DNA, 120 bp, Artificial Sequence
  ENSG00000040199_12 (sequence is synthesized)
caactttctgactactttacctgaagaattgggaaatctacaacagctttcctccttgggaatttccttcaacaactttagtcaaattcctgaggtttatgagaaactcactatgttaga

SEQ ID NO: 27538 - DNA, 120 bp, Artificial Sequence
  ENSG00000040199_13 (sequence is synthesized)
tagagtggttatggcaggaaattgcctggaagtcctgaacttaggggtgctgaataggatgaaccatatcaagcatgtggatttaaggatgaaccatttgaaaaccatggttattgaaaa

SEQ ID NO: 27539 - DNA, 120 bp, Artificial Sequence
  ENSG00000040199_14 (sequence is synthesized)
tctggagggaaataaacacatcacccacgtggatctgcgggacaaccgactgactgacttggatcttagctccttatgcagcttggaacagctgcactgtgggcggaatcagctgaggga

SEQ ID NO: 27540 - DNA, 120 bp, Artificial Sequence
  ENSG00000040199_15 (sequence is synthesized)
gctaacactcagtggcttttcccttcggaccctctatgccagttccaacaggctgacagcagtgaacgtctatccagtacccagcctgctcactttcttggatctctcccgaaacctgct

SEQ ID NO: 27541 - DNA, 120 bp, Artificial Sequence
  ENSG00000040199_16 (sequence is synthesized)
agagtgtgtccctgactgggcctgtgaagcaaagaagatagaagtattagatgtgagctataatcttctcacagaggttcccgtgagaattctgagtagcttgagtcttagaaaactgat

SEQ ID NO: 27542 - DNA, 120 bp, Artificial Sequence
  ENSG00000040199_17 (sequence is synthesized)
gctgggacacaatcatgtgcaaaaccttccaacactggtagagcacatccccctcgaggtgctggatcttcagcataatgcactcacgaggctgccagacaccctcttctccaaggcctt

SEQ ID NO: 27543 - DNA, 120 bp, Artificial Sequence
  ENSG00000040199_18 (sequence is synthesized)
aaatctcagatacttgaatgcatctgcaaatagtctggagtctttaccatccgcctgcactggagaggagagtttgagtatgctgcagctgctttatctgaccaacaatctcctgacgga

SEQ ID NO: 27544 - DNA, 120 bp, Artificial Sequence
  ENSG00000040199_19 (sequence is synthesized)
tcagtgcatacctgtcctggtagggcacctgcacctgcgaatcttgcaccttgcaaacaatcagttacagacctttcctgcaagcaaactaaataaattggagcaattggaggaactgaa

SEQ ID NO: 27545 - DNA, 120 bp, Artificial Sequence
  ENSG00000040199_20 (sequence is synthesized)
cctaagtggcaacaagcttaaaaccattcccacaaccatagcaaactgtaaaaggctgcacacccttgttgcacactccaacaacatcagcattttcccagaaatactgcagttgcctca

SEQ ID NO: 27546 - DNA, 120 bp, Artificial Sequence
  ENSG00000040199_21 (sequence is synthesized)
gatccagtttgtagacctaagttgcaacgacttgacagaaatcctgattccagaggctttgcctgctacattacaagaccttgacctgactggaaatacaaatctggttctggaacacaa

SEQ ID NO: 27547 - DNA, 120 bp, Artificial Sequence
  ENSG00000040199_22 (sequence is synthesized)
gacactggacatatttagccatatcacaaccctgaaaattgatcagaaacctttgccaaccacagattctacagttacgtcaaccttctggagccatggactggctgagatggcagggca

SEQ ID NO: 27548 - DNA, 120 bp, Artificial Sequence
  ENSG00000040199_23 (sequence is synthesized)
gagaaataagctgtgtgtctcagcacttgctatggatagctttgcagagggggtgggagctgtgtatggcatgtttgatggagaccgaaatgaggagctcccgcgcctgctgcagtgtac

SEQ ID NO: 27549 - DNA, 120 bp, Artificial Sequence
  ENSG00000040199_24 (sequence is synthesized)
gatggcagatgtgcttttagaagaggtacagcagtcaactaatgacacagttttcatggctaacaccttcttggtatctcacaggaaattaggaatggctggccagaagttgggctcctc

SEQ ID NO: 27550 - DNA, 120 bp, Artificial Sequence
  ENSG00000040199_25 (sequence is synthesized)
cgctctcctgtgctacatccgccctgacactgccgatccagcaagtagctttagcttgactgtagccaatgttggcacgtgccaagcagtcctgtgccgaggtgggaagccagtgcccct

SEQ ID NO: 27551 - DNA, 120 bp, Artificial Sequence
  ENSG00000040199_26 (sequence is synthesized)
ctctaaagtcttcagcctggagcaggacccagaggaggctcaaagggtgaaggaccaaaaagccatcatcacagaggacaacaaagtgaatggggtaacctgctgtacccggatgctggg

SEQ ID NO: 27552 - DNA, 120 bp, Artificial Sequence
  ENSG00000040199_27 (sequence is synthesized)
ctgtacatacctctacccttggatcctccccaagccccacatatcttccactccgctgaccattcaagatgagttgctgattctgggaaacaaagcattgtgggaacacttgtcctacac

SEQ ID NO: 27553 - DNA, 120 bp, Artificial Sequence
  ENSG00000040199_28 (sequence is synthesized)
agaagctgtcaatgctgtacgtcacgtacaagacccattagcagctgctaagaagctgtgcacattagcgcagagctatggctgtcaggacaatgtaggggcgatggtagtttatttgaa

SEQ ID NO: 27554 - DNA, 120 bp, Artificial Sequence
  ENSG00000040199_29 (sequence is synthesized)
tattggtgaggaaggctgcacttgtgaaatgaatgggctcaccctcccaggtcctgtgggatttgcttcaaccaccactatcaaggatgcccctaagccagccactccatcctctagcag

SEQ ID NO: 27555 - DNA, 120 bp, Artificial Sequence
  ENSG00000040199_30 (sequence is synthesized)
tgggattgcctctgagttcagcagtgagatgtccacctcagaggtgagcagtgaagtggggtccactgcttctgatgagcataatgctgggggcctggacactgccttgcttccgaggcc

SEQ ID NO: 27556 - DNA, 120 bp, Artificial Sequence
  ENSG00000040199_31 (sequence is synthesized)
agagcggcgctgcagcctccacccaacacccacctctgggctgtttcagcgccagccttcttctgctaccttctccagtaaccagtctgacaacggcctggacagtgatgatgaccagcc

SEQ ID NO: 27557 - DNA, 120 bp, Artificial Sequence
  ENSG00000040199_32 (sequence is synthesized)
cgttgagggggtcataaccaatggcagcaaggtagaggtggaagtagacatccactgctgcagggggagggatctggagaactcaccccctctcatagagagttctcctaccctgtgttc

SEQ ID NO: 27558 - DNA, 120 bp, Artificial Sequence
  ENSG00000040199_33 (sequence is synthesized)
tgaggaacatgctagagggtcgtgttttgggatccgaagacagaacagtgtgaatagtggcatgctcctgccaatgagcaaggacaggatggagttacagaagtctccctccacctcctg

SEQ ID NO: 27559 - DNA, 120 bp, Artificial Sequence
  ENSG00000040199_34 (sequence is synthesized)
cccctagaggacagcctgaacctcattgaagtggccacagaagtgcccaagaggaaaactggctattttgctgcccccactcagatggaaccagaggaccagtttgttgtgcctcatgac

SEQ ID NO: 27560 - DNA, 120 bp, Artificial Sequence
  ENSG00000040199_35 (sequence is synthesized)
ctggaagaagaagtgaaggaacaaatgaaacagcaccaggacagccggctcgagcctgagccccatgaagaggatcggaccgagcccccggaggagttcgacacagcactatgactgccc

SEQ ID NO: 27561 - DNA, 120 bp, Artificial Sequence
  ENSG00000040199_36 (sequence is synthesized)
cactgggcacagtgtgggaggaggctgtgcagggttggggtagggacttgctagaggcattctgcctctacatttctttttgtttgttcgttttttttttgtttgtttgttttgagacgg

SEQ ID NO: 27562 - DNA, 87 bp, Artificial Sequence
  ENSG00000040199_37 (sequence is synthesized)
tttttagtcgctcaggctggagtgcaatggtggggtctcgggtcactgcagcctctgtccctgggttcaagccattctcctgtctca

SEQ ID NO: 27563 - DNA, 68 bp, Artificial Sequence
  ENSG00000040199_38 (sequence is synthesized)
agtagctgggattacaggcacctgccattatgcccggctaagttttatttttttcctcaggtgatcca

SEQ ID NO: 27564 - DNA, 120 bp, Artificial Sequence
  ENSG00000040199_39 (sequence is synthesized)
tgctgtgattacaggcctcagccaccatgcccagccctgcgtctacatttctaaaccatagctgtgtggggttgaactcggagccaaaaagtgtgagagccatcaggggctggctctgga

SEQ ID NO: 27565 - DNA, 120 bp, Artificial Sequence
  ENSG00000040199_40 (sequence is synthesized)
taaactggtagccactatcagtgttaagtttcacatttaacctgcattggaattcccaggggtactgggaagaaagcagctgttctgtatcagtcctaccacctgccattaaccctttct

SEQ ID NO: 27566 - DNA, 120 bp, Artificial Sequence
  ENSG00000040199_41 (sequence is synthesized)
ctcctaggatcattttgagaatttgcctgcctgggcaggaaagggactatttctgtggaggaaaaaagtgaagattgattctctttactagttgctgctgatggatctctgtgacagaga

SEQ ID NO: 27567 - DNA, 120 bp, Artificial Sequence
  ENSG00000040199_42 (sequence is synthesized)
aatcaccttatctcagactaatggggtgtgatgtgactagtcacatggcttttcattcttctctacgagaatacagcctatcaaaatgatgtctgttggaaatgtagaaccaatcaaaca

SEQ ID NO: 27568 - DNA, 120 bp, Artificial Sequence
  ENSG00000040199_43 (sequence is synthesized)
gataatttatgtatgtaatgtaatgagagcacttttcattgactgtgaactttttatttttgaatctgcactcgagccaatcttcttagaggcagcccggcaccttcatccataggcaga

SEQ ID NO: 27569 - DNA, 120 bp, Artificial Sequence
  ENSG00000040199_44 (sequence is synthesized)
gagagaactgggtgttggagacttattcgagggtataggaagggccctgtgaagttgatttaacttttggatgtcagactgtgaaagctcctgagaaacttggggtaataggatcttctt

SEQ ID NO: 27570 - DNA, 120 bp, Artificial Sequence
  ENSG00000040199_45 (sequence is synthesized)
ttggggatgaaaatggggaaggcgtgaggacctagactacttctccctagatcagaaaaagagaattaccccttgacaaatatgatacctgctaggtatttcccagggaaatttagggat

SEQ ID NO: 27571 - DNA, 120 bp, Artificial Sequence
  ENSG00000040199_46 (sequence is synthesized)
tggcgtctttccctagcatgtggaggaattggcagacagcttcctaagggcggggagcgggggcccaaggctgacactgcttgcatccacgtgaccttaagttatggcagatgactctga

SEQ ID NO: 27572 - DNA, 120 bp, Artificial Sequence
  ENSG00000040199_47 (sequence is synthesized)
aacggactgaggccaatgagaacagatggatggagcactcaggttagacttgttccttctcctatgctggaggagagggatggttctctagaatgttggaggtgagttgagagctcgcct

SEQ ID NO: 27573 - DNA, 120 bp, Artificial Sequence
  ENSG00000040199_48 (sequence is synthesized)
cttgaatgttgaacagtgtactcttctgaaaactgcatattcactttatgtggtttcagaatactgggctcaatactaacataagaaagacacttcattgagaaattcttaagcttacag

SEQ ID NO: 27574 - DNA, 120 bp, Artificial Sequence
  ENSG00000040199_49 (sequence is synthesized)
aaaacctatactctttgcacattccacataaccctagcaaaatgcagtttcttcatacttctgtcactttttccattggaagatttgcttaggaaaattaattcctatttattcccacaa

SEQ ID NO: 27575 - DNA, 120 bp, Artificial Sequence
  ENSG00000040199_50 (sequence is synthesized)
aatgttggcattgcttgattttacccaatggggaatgtgctttgaatttttggaacacttttacaattaaaaataaagtagggccatttttaatttgtttcatcagaaactatgttaaag

SEQ ID NO: 27576 - DNA, 120 bp, Artificial Sequence
  ENSG00000040199_51 (sequence is synthesized)
agagggttaaatataaatatattttcgtgtgtatttttgggaagatttttgttcaaagcaatagtcaaaatcagatgacctgtccataataattatgtgtcttcatcttctcagaggccc

SEQ ID NO: 27577 - DNA, 120 bp, Artificial Sequence
  ENSG00000040199_52 (sequence is synthesized)
catgctcatatgcacgtgtcattgggatacactcttgggggatttggtacactctaatggatgtctaatgttcaacccctcgagaatctgaacttgagtccccagattgtcaaactactg

SEQ ID NO: 27578 - DNA, 120 bp, Artificial Sequence
  ENSG00000040199_53 (sequence is synthesized)
gtcagctattgagaattttagaactcaggtctttgatttgaagtagggaacatagtggctcacacagagtttaggtgctgttagaaagatgggaacaagagtgttttgccaccttatttt

SEQ ID NO: 27579 - DNA, 120 bp, Artificial Sequence
  ENSG00000040199_54 (sequence is synthesized)
tatatgggaaattttttttaatgaagaaaaaatgaaaatgaaataacaggatgatagtgatgagtgatgtaaaacatcttacttagatggcagaaccttcgggttgtagaatagtgatgt

SEQ ID NO: 27580 - DNA, 120 bp, Artificial Sequence
  ENSG00000040199_55 (sequence is synthesized)
ctaaaaattaaagttattttgggaatacaccactttaatagtatagtcttataaaaattattcattatggtgaacccttcttgtctgctattcgtttcccaacctacttattggaaccac

SEQ ID NO: 27581 - DNA, 120 bp, Artificial Sequence
  ENSG00000040199_56 (sequence is synthesized)
ctcaaaacccagttctgaaatgaccttaccaaaagtaaatgtatttattttttagtcagcagaactctgtaattccaaatgttgttctgtgtggtagaattttttttcaggaaccattag

SEQ ID NO: 27582 - DNA, 120 bp, Artificial Sequence
  ENSG00000040199_57 (sequence is synthesized)
gttgtattgaaaatctttgttataggcgataccaaaactgattattcttttttgcagtctgctttaattcatgtccttctgcagttgctctgtattaaaacagggtaaaaaggccatagc

SEQ ID NO: 27583 - DNA, 120 bp, Artificial Sequence
  ENSG00000040199_58 (sequence is synthesized)
ccattatgaaaaatataatacaaaactctttgacctatgaggtaacttacagacattgtgttttctaaacaggctgtcagtgaaagcccgtatctgtctccaggtgaatgtaatttactt

SEQ ID NO: 27584 - DNA, 120 bp, Artificial Sequence
  ENSG00000040199_59 (sequence is synthesized)
ccgagtactttacccagaggatgtgttccccaggtgggcagagtacagttgatctctagcacagacagagattctggcctctgcatattctcaggtctctgtgtgtacctcccattgagt

SEQ ID NO: 27585 - DNA, 120 bp, Artificial Sequence
  ENSG00000040199_60 (sequence is synthesized)
agagaagcttaagataatttctgagagaagaacactgctgattgtgggagcagtttaggagtccatggaagaaagaaaaatacatgtgtcttggcagccatggtgtatttttgtccaaat

SEQ ID NO: 27586 - DNA, 120 bp, Artificial Sequence
  ENSG00000040199_61 (sequence is synthesized)
ggattggaaggatatttgaatatttgaatgttggtatgacataaagctgcagtgcactatagagtcaagtcattgaattaccactcctgatacagggctttattgtactactgtgaagtg

SEQ ID NO: 27587 - DNA, 120 bp, Artificial Sequence
  ENSG00000040199_62 (sequence is synthesized)
tatgtgtgcaatacattggtgagttcatttactggtgtacggaagagccagcaggagcagcgtggtcattgctgggtgctattacagttgcttgtagtgagtgctgttttccaggagatg

SEQ ID NO: 27588 - DNA, 120 bp, Artificial Sequence
  ENSG00000040199_63 (sequence is synthesized)
gagccagttgggtgtggcagatctactgaatatcaaatgatgctcttcttcccatgtagaccttcagcaaaagccggtacttggaagccacaggctcaccttctctatctatccaataat

SEQ ID NO: 27589 - DNA, 120 bp, Artificial Sequence
  ENSG00000040199_64 (sequence is synthesized)
tattaatgaagagacctccataagggagcagctggctgttatcgataaatgtaccaattattaaataattagtctccaagccattcagtgatgtcttcagcatcactataggactgtcta

SEQ ID NO: 27590 - DNA, 120 bp, Artificial Sequence
  ENSG00000040199_65 (sequence is synthesized)
gtgtcactttttacttccttctgggtggaggctttccgactcccaatcatgaaggcaagttaatctttccagttagtgacttttgccccatagttggggtaagcacttcctagattgaga

SEQ ID NO: 27591 - DNA, 120 bp, Artificial Sequence
  ENSG00000040199_66 (sequence is synthesized)
aaaagcagctacagtcaatcctgctctgtttgcctcatttggtgatcagtcagtcacacataagttccttgtattctaaatttcatgcacttctcccagatgctatagggttttctctca

SEQ ID NO: 27592 - DNA, 120 bp, Artificial Sequence
  ENSG00000040199_67 (sequence is synthesized)
ctgttgccagtggatgtcatccagacagtgggctcatatcttacggttttgtgcaatcattgtcgtattgtagtcttaagactcattatagtgtatttttgatatttttgaaatgtgtta

SEQ ID NO: 27593 - DNA, 120 bp, Artificial Sequence
  ENSG00000040199_68 (sequence is synthesized)
aattttttaattcaataatatgagccagagcatgttgcagcaaatctattgtttgtaaaaataacaataacaataataaataaaataaagtggaatctttttcatggctttgttttaaaa

SEQ ID NO: 27594 - DNA, 120 bp, Artificial Sequence
  ENSG00000040199_69 (sequence is synthesized)
ctgggtcgccgatgggggaggtggagccggggcccgcgggcccgctggagcccccggagccgcccgaagcgcccgcgagccgccggccgggagggatccgggtcctgaagagaaatatga

SEQ ID NO: 27595 - DNA, 120 bp, Artificial Sequence
  ENSG00000040199_70 (sequence is synthesized)
gctatgagttaaggttccggaagatctcaaagagttccagaccacagatattccggtgcatcactgtaacttccgggctgttctcggctgcctttgtagcgcttctgttctcggtagcta

SEQ ID NO: 27596 - DNA, 120 bp, Artificial Sequence
  ENSG00000040199_71 (sequence is synthesized)
cgcagggccagcaccacgctggcgccgtacatgatcacgagaagacaagcaaaggtggctgctgctccgtcggtgcctgccagctggcagtccatccaggtgagacccttgcgggcatag

SEQ ID NO: 27597 - DNA, 120 bp, Artificial Sequence
  ENSG00000040199_72 (sequence is synthesized)
agcctctctcttgttttgcaagtgtcggtgctattgatctgcagagccacgtggaggtaaacaccaatgcctgtgcagtagcccactgccgctaggaggctgaaggcggcctccgtgagg

SEQ ID NO: 27598 - DNA, 120 bp, Artificial Sequence
  ENSG00000040199_73 (sequence is synthesized)
agccacttccctgacaacattgttcgactcttggctccttggagtaaaacacccatggtgaggacccccagacccagagaaacagccacgccaccgtatatcaggggcgagcggaggatc

SEQ ID NO: 27599 - DNA, 120 bp, Artificial Sequence
  ENSG00000040199_74 (sequence is synthesized)
gtgtactgctggtccagctgccgaacctgctctagctcagtgccctcgaacgatgttttcagatcagttcctacaagaggagccacattttgttaagtggccttcgacttcattgtatgg

SEQ ID NO: 27600 - DNA, 120 bp, Artificial Sequence
  ENSG00000040199_75 (sequence is synthesized)
atggatttgtctattcaaccaggaccttactgatagatatttggactgaaaggaacccacaaatggcacgaggcagaggaagccaacaggccaacagactgaagatcttcttgtccgagg

SEQ ID NO: 27601 - DNA, 120 bp, Artificial Sequence
  ENSG00000040199_76 (sequence is synthesized)
tcagcttttatttgttactgacagaggccccaaatccttcttaggtgtccttctgggagagggtctcctgccattcccgtggtgttcagggatgagcatgaagagaaatacaaatgaacc

SEQ ID NO: 27602 - DNA, 120 bp, Artificial Sequence
  ENSG00000040199_77 (sequence is synthesized)
gagagcaggaccaccaggttcaagtccccgctttttactgccttgtcatcttggccaagccattcagtccttctaagcctcagacaatatgacaaatgaagctaagtctgccaatcttca

SEQ ID NO: 27603 - DNA, 120 bp, Artificial Sequence
  ENSG00000040199_78 (sequence is synthesized)
cccacagggatgtggggaggctcaaatgaaagcaaccgtgtgatactgtgggaagttaacaacaacaacaaaaaagcaagtatgtgaaaatactctaaaaataaaataatgtacaaatgg

SEQ ID NO: 27604 - DNA, 120 bp, Artificial Sequence
  ENSG00000040199_79 (sequence is synthesized)
aaggttattctttaccacaccttcctttaaattgactctggtggacctttatgtcttctgtttatgaagatttgtttaaaacattagggtttttaaaattttgttgttgttttgagacaa

SEQ ID NO: 27605 - DNA, 120 bp, Artificial Sequence
  ENSG00000040199_80 (sequence is synthesized)
tgttgttttgagacaaggtctcactttgtcacccaagctggcatacagtggcacgatctcggcccactgcagtcttgacctcccgttctcaggcgattctcccacctcagcctcccgagt

SEQ ID NO: 27606 - DNA, 86 bp, Artificial Sequence
  ENSG00000040199_81 (sequence is synthesized)
cctcagcctcccgagtagttgggacttcaggtgcgcaccacgaggcctggctaatttttttcgcaggcaggtctcgaactcctgga

SEQ ID NO: 27607 - DNA, 120 bp, Artificial Sequence
  ENSG00000040199_82 (sequence is synthesized)
gggattacagccaccgcacctggcccataactttaggttttttgaatagtgtagaaatatatgttttcaaaggtatagtaagactttatttatcactcagtagcagagagattaaggatc

SEQ ID NO: 27608 - DNA, 120 bp, Artificial Sequence
  ENSG00000040199_83 (sequence is synthesized)
aggtagttgtaccatgtgatagagactatcaaattgcctttgacaaagattgttctcacttaccctcccatcagtgtatattttttattttaaaaattttttatagagatggggtcttgc

SEQ ID NO: 27609 - DNA, 68 bp, Artificial Sequence
  ENSG00000040199_84 (sequence is synthesized)
tgcccgacccctccaccattttatgagaattcccattttctcatatctttgtcagtattggattttag

SEQ ID NO: 27610 - DNA, 120 bp, Artificial Sequence
  ENSG00000040199_85 (sequence is synthesized)
attcccattttctcatatctttgtcagtattggattttagcatttctttttatttatcatcagtctagtaggttgaaaaaagtatttcattgttttaatcaacgtttatttacatagcag

SEQ ID NO: 27611 - DNA, 120 bp, Artificial Sequence
  ENSG00000040199_86 (sequence is synthesized)
tgaggttgaacatctttttatatgtatattagtagtttgtagatttccataaatgaccatttttctgttgagtcattgggtttcttcttgatacccattgtattacaattaaaatgttaa

SEQ ID NO: 27612 - DNA, 120 bp, Artificial Sequence
  ENSG00000040199_87 (sequence is synthesized)
gggtttcattactaagaactttttatgagagttttattttctagtcataatattttcctaaaggaagctggtaaaaagacacctactggatgttctgttatttacagtaagccattgatg

SEQ ID NO: 27613 - DNA, 120 bp, Artificial Sequence
  ENSG00000040199_88 (sequence is synthesized)
tagcttgtaaagacagtaagagagtttttttttttttttaaaccacactggagacttaagagagagatttatagaaatacaggaaagtgagaatagacctgcataaattaaatcatacac

SEQ ID NO: 27614 - DNA, 88 bp, Artificial Sequence
  ENSG00000040199_89 (sequence is synthesized)
aggaaagtgagaatagacctgcataaattaaatcatacacctgtgtagaaaaaacccagaggtcattttctataatttgcctttgaac

SEQ ID NO: 27615 - DNA, 120 bp, Artificial Sequence
  ENSG00000040199_90 (sequence is synthesized)
ttaattttatgtttgaaccttagctctagagatagagcaggcatagcaacaggaagaagtatggctccatccttatactctggacatggtactgttgtgactgctttgctactcactgac

SEQ ID NO: 27616 - DNA, 120 bp, Artificial Sequence
  ENSG00000040199_91 (sequence is synthesized)
tcaaaaggttgtgttcatcttcctgttcctttgtcctacttagtgcccacctgacattattaggtatttggatataagtgtttaactgttcgtagatatggcctcttttttccttctctt

SEQ ID NO: 27617 - DNA, 120 bp, Artificial Sequence
  ENSG00000040199_92 (sequence is synthesized)
tattaatttgtatacgtatttgccaatttggattgtctaacttagctgtaccttgagttattcatcaactaattatttatatagtaccttgcaaaatgaggcgagtagtgaaattcttaa

SEQ ID NO: 27618 - DNA, 61 bp, Artificial Sequence
  ENSG00000040199_93 (sequence is synthesized)
atagtaccttgcaaaatgaggcgagtagtgaaattcttaagttgtttaggaaacagagaaa

SEQ ID NO: 27619 - DNA, 120 bp, Artificial Sequence
  ENSG00000040199_94 (sequence is synthesized)
ccgagatcacgccattgcactccagcctgcgcaacacagtgaaactccatctcaaaaaaaaaaagtaaacagagaaagggatcatacctgtcctattttttatttttattctggtaagca

SEQ ID NO: 27620 - DNA, 120 bp, Artificial Sequence
  ENSG00000040199_95 (sequence is synthesized)
ggtaagcacatttaatagactcttatttatgattattttcttgtttctgcgtattaaggatgaaccatttgaaaaccatggttattgaaaatctggagggaaataaacacatcacccacg

SEQ ID NO: 27621 - DNA, 120 bp, Artificial Sequence
  ENSG00000040199_96 (sequence is synthesized)
gccactgtgcccaggcaaaatattaaaatttctatttttgagagacaaggtctcgctctgtcacccagatagggttgcagtggcacaatcacggctcactgcaacctcaatctcccgggt

SEQ ID NO: 27622 - DNA, 76 bp, Artificial Sequence
  ENSG00000040199_97 (sequence is synthesized)
atataaaaaaaaatttcttttgtagagatgggatgttgccatcttacctaggctagtcttgaactcctggcctcaa

SEQ ID NO: 27623 - DNA, 74 bp, Artificial Sequence
  ENSG00000040199_98 (sequence is synthesized)
tcctcttacccgctgtttcgttattcttgacacgtttctgaaaacacaaggaaaagagaggtcaacgaagatga

SEQ ID NO: 27624 - DNA, 120 bp, Artificial Sequence
  ENSG00000040199_99 (sequence is synthesized)
tttctgaaaacacaaggaaaagagaggtcaacgaagatgatggatggaaacacagacagcagtaaagaaaattaagttatctgagttattacgaatgagcatgatagatgtgaagtgctc

SEQ ID NO: 27625 - DNA, 120 bp, Artificial Sequence
  ENSG00000040199_100 (sequence is synthesized)
cacaaaaggaggggatacttgagcagaatgttggggaatataaagtagagagaggtggggtgaggactgaaatgtctaattcagtcagatgttctagctaacgatttctttctcttgata

SEQ ID NO: 27626 - DNA, 120 bp, Artificial Sequence
  ENSG00000040275_0 (sequence is synthesized)
actcgagagctagctgagcgaatgggccggcgactgtggagttagcgtcctcaatgtggacgccctgagctcccattaggagccgctggctgcggcagcaggggactagcgtgagagttg

SEQ ID NO: 27627 - DNA, 120 bp, Artificial Sequence
  ENSG00000040275_1 (sequence is synthesized)
gctaaaaaaaagaaaagaacatggaggcagatataatcacaaatcttcgatgcaggctcaaagaggctgaagaagagcgactaaaagctgcacagtatggtttacaactagtagagagtc

SEQ ID NO: 27628 - DNA, 120 bp, Artificial Sequence
  ENSG00000040275_2 (sequence is synthesized)
aaaatgaattacagaatcaattggataaatgtcgtaatgaaatgatgaccatgactgagagttatgaacaagaaaaatatacccttcaaagagaagttgaactcaagagtcgaatgttag

SEQ ID NO: 27629 - DNA, 120 bp, Artificial Sequence
  ENSG00000040275_3 (sequence is synthesized)
aaagtttgagctgcgaatgtgaagctattaaacaacaacaaaaaatgcacctggagaaattggaagaacaactaagcagaagccatggacaggaagtgaatgaactaaaaactaagatag

SEQ ID NO: 27630 - DNA, 120 bp, Artificial Sequence
  ENSG00000040275_4 (sequence is synthesized)
aaaaactgaaagtggaattagatgaagccaggcttagtgaaaagcagctgaagcaccaagtagatcatcagaaggaactcctctcttgtaaatcagaggaactgcgcgtaatgtctgaac

SEQ ID NO: 27631 - DNA, 120 bp, Artificial Sequence
  ENSG00000040275_5 (sequence is synthesized)
gtgtgcaggaaagcatgtcttcagagatgctggctcttcaaattgagctgacagaaatggagagtatgaagaccaccctcaaagaagaagtgaatgaactacaatacagacaagaacagc

SEQ ID NO: 27632 - DNA, 120 bp, Artificial Sequence
  ENSG00000040275_6 (sequence is synthesized)
tagaacttcttattactaacctaatgcgccaggtagaccggcttaaagaggaaaaagaggagcgagagaaagaagcagtttcttactataatgccctagagaaagctcgtgtagcaaatc

SEQ ID NO: 27633 - DNA, 120 bp, Artificial Sequence
  ENSG00000040275_7 (sequence is synthesized)
aagatcttcaggtacagttggaccaggcactccagcaagccttggatcccaatagtaaaggcaactctttgtttgcagaggtggaagatcgaagggcagcaatggaacgtcagctcatca

SEQ ID NO: 27634 - DNA, 120 bp, Artificial Sequence
  ENSG00000040275_8 (sequence is synthesized)
gtatgaaagtcaagtatcagtcactaaagaagcaaaatgtatttaacagagaacagatgcagagaatgaagttacaaattgccacgttgctacagatgaaagggtctcaaactgaatttg

SEQ ID NO: 27635 - DNA, 120 bp, Artificial Sequence
  ENSG00000040275_9 (sequence is synthesized)
agcagcaggaacggttgcttgccatgttggagcagaagaatggtgaaataaaacatcttttaggtgaaattagaaatctggagaaatttaagaatttatatgacagtatggaatctaagc

SEQ ID NO: 27636 - DNA, 120 bp, Artificial Sequence
  ENSG00000040275_10 (sequence is synthesized)
actctggtactctggaagataacacctattatacagatttacttcagatgaagctggataacttaaacaaagaaattgaaagcactaaaggtgaattgtccatacagcgaatgaaagcat

SEQ ID NO: 27637 - DNA, 120 bp, Artificial Sequence
  ENSG00000040275_11 (sequence is synthesized)
tatttgagagccagcgggctctagatattgagcgaaaactttttgcaaatgaaagatgcctccagctttcagaaagtgaaaatatgaaactgagagctaaactagatgaattgaaactaa

SEQ ID NO: 27638 - DNA, 120 bp, Artificial Sequence
  ENSG00000040275_12 (sequence is synthesized)
aatatgaacctgaagagacagttgaagtgcctgtactgaaaaagaggcgtgaggtgctccctgtggatataaccaccgctaaagatgcatgtgtcaacaacagtgctctcgggggagaag

SEQ ID NO: 27639 - DNA, 120 bp, Artificial Sequence
  ENSG00000040275_13 (sequence is synthesized)
tttatcgattaccgcctcagaaagaggagacacagtcctgccctaacagtttagaagataacaacttgcaattagaaaaatcagtttctatatacacaccagtagtcagtctctctcctc

SEQ ID NO: 27640 - DNA, 120 bp, Artificial Sequence
  ENSG00000040275_14 (sequence is synthesized)
acaaaaatctgcccgtggatatgcagctgaagaaggaaaagaaatgtgtgaaactcataggagttcccgctgacgctgaggccttaagtgaaagaagtggaaacacccctaactctccca

SEQ ID NO: 27641 - DNA, 120 bp, Artificial Sequence
  ENSG00000040275_15 (sequence is synthesized)
ggttagctgctgaatcaaagcttcaaacagaagttaaagaaggaaaagaaacttcaagcaaattggaaaaagaaacttgtaagaaattacaccctattctatatgtgtcttctaaatcta

SEQ ID NO: 27642 - DNA, 120 bp, Artificial Sequence
  ENSG00000040275_16 (sequence is synthesized)
ctccagagacccagtgccctcaacagtaaagacttgtctttaataagagtacggtgccacttgcctcaaaagttactatggtgcttaagattgtcttgatctgacatatatcaccttctg

SEQ ID NO: 27643 - DNA, 120 bp, Artificial Sequence
  ENSG00000040275_17 (sequence is synthesized)
ggttatttactcattgtgccaggacctggcattttcatgtgcctttgaccaagtgttcagaatttgcttgactctaacctggagagcttcttaagtgatgccccttcatggagcttctat

SEQ ID NO: 27644 - DNA, 120 bp, Artificial Sequence
  ENSG00000040275_18 (sequence is synthesized)
gacagtgaataaactattaattgaaggaaaatgttataattaatgtatctatttgctgcattgtatatggattaaatgataaaaaacaagtaatctaccctcagagccatgtatttgaga

SEQ ID NO: 27645 - DNA, 120 bp, Artificial Sequence
  ENSG00000040275_19 (sequence is synthesized)
atgcttcaatcatattttcctatgtacttttttttataaacttagttttagactatgttgtaaaaatgggaaggttgtaaactatgttgtaaaaataggaaatgtggcttaaaatatata

SEQ ID NO: 27646 - DNA, 120 bp, Artificial Sequence
  ENSG00000040275_20 (sequence is synthesized)
cattatattgtttcaggattttgtcagtgtttaaagaaccaatgttcatctttgtatttatatacatgatttaaattttgtctaaaattttaaataaaactgcagtgatttatccttaaa

SEQ ID NO: 27647 - DNA, 120 bp, Artificial Sequence
  ENSG00000040275_21 (sequence is synthesized)
atgcgcagtagctgtaggagggggtgggcgctccattgggcgtttctcttggtttttcctttccgcgcggcttgggcggacgtctcgtgagacgtgggacttctcgcgggaactgcattc

SEQ ID NO: 27648 - DNA, 120 bp, Artificial Sequence
  ENSG00000040275_22 (sequence is synthesized)
ctctccatctctcctctctcgctgcatgaactgtgctgtctgtttctttatctactttcttacaattgcatgcagtataattcctcagtttcatctacctaccttcaacttttccagaac

SEQ ID NO: 27649 - DNA, 120 bp, Artificial Sequence
  ENSG00000040275_23 (sequence is synthesized)
tttaagaaagactaaactgattgcaaagggaaaggactcttgaataaggcaatcacattaaaaagttacacgtttctgtttcatgaaagggaatatcacagtttaacacatctctgaatg

SEQ ID NO: 27650 - DNA, 120 bp, Artificial Sequence
  ENSG00000040275_24 (sequence is synthesized)
ttttatcagtttgaatacatgtactgttatttttctcctggttcaagcatggccatgaaagaaaaattaacttactttctcaaagggctttccagtagtctaagaaatttcagccttcta

SEQ ID NO: 27651 - DNA, 120 bp, Artificial Sequence
  ENSG00000040275_25 (sequence is synthesized)
actcgagagctagctgagcgaatgggccggcgactgtggagttagcgtcctcaatgtggacgccctgagctcccattaggagccgctggctgcggcagcaggggactagcgtgagaggga

SEQ ID NO: 27652 - DNA, 120 bp, Artificial Sequence
  ENSG00000040275_26 (sequence is synthesized)
catcactagcaattctccagtgtcttctagatcatcagtttttcttctctcctggatttatcccatgacctacaaacactgttatttttttccatcttaaaaataaaaaaacttgtccct

SEQ ID NO: 27653 - DNA, 120 bp, Artificial Sequence
  ENSG00000040275_27 (sequence is synthesized)
ttgaaggcattctagttaggctttcacccccacctggatatcaaaactgttcttgtcaccagagacctccaggaattcaagttcaatggccagttctctgctctcaccttaattgcctta

SEQ ID NO: 27654 - DNA, 120 bp, Artificial Sequence
  ENSG00000040275_28 (sequence is synthesized)
gcagcagcatctggcatgattgattactcccacctccttaatacactgtttattgccttccaggacaacacatactcctggttttccttctacctcactggtcactcctgattctccgct

SEQ ID NO: 27655 - DNA, 120 bp, Artificial Sequence
  ENSG00000040275_29 (sequence is synthesized)
tttttttcgtccattttgttccctaatgaatctgaactgcccagaatggaacctagtatataaggcattcaagaaatactcgttcagtgaatgactacattgacttgagacatgggggaa

SEQ ID NO: 27656 - DNA, 120 bp, Artificial Sequence
  ENSG00000040275_30 (sequence is synthesized)
aatgatgaccatgactgagagattacttgacttgacgtgttgacataccatggagcacattttacttccttgacaaggcacagaagcagtaagagttatgaacaagaaaaatataccctt

SEQ ID NO: 27657 - DNA, 120 bp, Artificial Sequence
  ENSG00000040275_31 (sequence is synthesized)
atttaacagagaacagatgcagagaatgaagggtttccagactgtgctgcctcatttcctgagactctcccctgtctgggaagtatttctttataaattttctcacgtttactttagttt

SEQ ID NO: 27658 - DNA, 120 bp, Artificial Sequence
  ENSG00000040275_32 (sequence is synthesized)
tcttacagtatttgttggggttacttttaatctaccaatgttgcatatgtcccaaactatctttagagactagaagcattctgagtcttaggctaagtgggcctagcctccaatctgaaa

SEQ ID NO: 27659 - DNA, 120 bp, Artificial Sequence
  ENSG00000040275_33 (sequence is synthesized)
caggaacaaaaaggatatcctttaaaatgttaaaagtcatctgcaacctcatatcattgattgttttactcaaaactatatttaaactaataggcactcttttcaactccagaaatttcc

SEQ ID NO: 27660 - DNA, 120 bp, Artificial Sequence
  ENSG00000040275_34 (sequence is synthesized)
aaaggcagaaagaaatgctagatttagagtctacttaatttccctctggtagcttcacaactccagatttggggtgggggaggtataatgaggtaagttgagtgctgctctaaaaaaatt

SEQ ID NO: 27661 - DNA, 120 bp, Artificial Sequence
  ENSG00000040275_35 (sequence is synthesized)
aaaacatggtatattgaagattaccccagtatactaagatagccttttatctttgcttttaacgtcatttgtgaatctaacatttgtggctgtcagtagcttagttttcctcacttaatt

SEQ ID NO: 27662 - DNA, 120 bp, Artificial Sequence
  ENSG00000040275_36 (sequence is synthesized)
cttatacactgggttccgagccggtcttatcttccgctggaccacctcgccgccctcagggattctggacaaatatggaacgttgggtcggttgccgggtcctcaaaattataaccgcca

SEQ ID NO: 27663 - DNA, 120 bp, Artificial Sequence
  ENSG00000040275_37 (sequence is synthesized)
tgagcgaatgggccggcgactgtggagttagcgtcctcaatgtggacgccctgagctcccattaggagccgctggctgcggcagcaggggactagcgtgagagggattctggacaaatat

SEQ ID NO: 27664 - DNA, 120 bp, Artificial Sequence
  ENSG00000040275_38 (sequence is synthesized)
gagtgtgcttagctattgaagatttgtcctgtttagcaattaatagtagtagtagtttattcttttctgaagattttagatctagttcccgccctgccccgtccctgttaaaaaagaatg

SEQ ID NO: 27665 - DNA, 120 bp, Artificial Sequence
  ENSG00000040275_39 (sequence is synthesized)
aactaaatgaattcctgttattctttccaccctagtgtattcagagtttgaaagatcaagttatcattactctctttgccacatttactaccagattttgctttgtctgcacacttccta

SEQ ID NO: 27666 - DNA, 120 bp, Artificial Sequence
  ENSG00000040341_0 (sequence is synthesized)
agttctctgtagtgtttgccaatgttggagccgtctgcaaagtgtccccggcaagaagaggctgcctaccacaaggactttagcttactttttaaagattgaagaaaaaaaagaagacag

SEQ ID NO: 27667 - DNA, 120 bp, Artificial Sequence
  ENSG00000040341_1 (sequence is synthesized)
aaaaagaagaactcaaagatacacaaagtaatttgaaccaaggctcagaagtttttggagccgtgagggatacagcagtttggtcaatattgtcttaacatgcttcaaataaatcagctt

SEQ ID NO: 27668 - DNA, 120 bp, Artificial Sequence
  ENSG00000040341_2 (sequence is synthesized)
ctctccaagataaaatggcaaacccaaaagagaaaactgcaatgtgtctggtaaatgagttagcccgtttcaatagagtccaaccccagtataaacttctgaatgaaagagggcctgctc

SEQ ID NO: 27669 - DNA, 120 bp, Artificial Sequence
  ENSG00000040341_3 (sequence is synthesized)
attcaaagatgttctcagtgcagctgagtcttggtgagcagacatgggaatccgaaggcagcagtataaagaaggctcagcaggctgttgccaataaagctttgactgaatctacgcttc

SEQ ID NO: 27670 - DNA, 120 bp, Artificial Sequence
  ENSG00000040341_4 (sequence is synthesized)
ccaaaccagttcagaagccacccaaaagtaatgttaacaataacccaggcagtataactccaactgtggaactgaatgggcttgctatgaaaaggggagagcctgccatctacaggccat

SEQ ID NO: 27671 - DNA, 120 bp, Artificial Sequence
  ENSG00000040341_5 (sequence is synthesized)
tagatccaaagccattcccaaattatagagctaattacaactttcggggcatgtacaatcagaggtatcattgcccagtgcctaagatcttttatgttcagctcactgtaggaaataatg

SEQ ID NO: 27672 - DNA, 120 bp, Artificial Sequence
  ENSG00000040341_6 (sequence is synthesized)
aattttttggggaaggaaagactcgacaagctgctagacacaatgctgcaatgaaagccctccaagcactgcagaatgaacctattccagaaagatctcctcagaatggtgaatcaggaa

SEQ ID NO: 27673 - DNA, 120 bp, Artificial Sequence
  ENSG00000040341_7 (sequence is synthesized)
aggatgtggatgatgacaaagatgcaaataagtctgagatcagcttagtgtttgaaattgctctgaagcgaaatatgcctgtcagttttgaggttattaaagaaagtggaccaccacata

SEQ ID NO: 27674 - DNA, 120 bp, Artificial Sequence
  ENSG00000040341_8 (sequence is synthesized)
tgaaaagctttgttactcgagtgtcagtaggagagttctctgcagaaggagaaggaaatagcaaaaaactctccaagaagcgcgctgcgaccaccgtcttacaggagcttaaaaaacttc

SEQ ID NO: 27675 - DNA, 120 bp, Artificial Sequence
  ENSG00000040341_9 (sequence is synthesized)
cacctcttcctgtggtggaaaagccaaaactattttttaaaaaacgccctaaaacaatagtaaaggccggaccagaatatggccaagggatgaaccctattagccgcctggcgcaaattc

SEQ ID NO: 27676 - DNA, 120 bp, Artificial Sequence
  ENSG00000040341_10 (sequence is synthesized)
aacaggccaaaaaggaaaaggagccggattatgttttgctttcagaaagaggaatgcctcgacgtcgagaatttgtgatgcaggtgaaggtaggcaatgaagttgctacaggaacaggac

SEQ ID NO: 27677 - DNA, 120 bp, Artificial Sequence
  ENSG00000040341_11 (sequence is synthesized)
ctaataaaaagatagccaaaaaaaatgctgcagaagcaatgctgttacaacttggttataaagcatccactaatcttcaggatcaacttgagaagacaggggaaaacaaaggatggagtg

SEQ ID NO: 27678 - DNA, 120 bp, Artificial Sequence
  ENSG00000040341_12 (sequence is synthesized)
gccgccacaaagtaatctctggcactactctaggctatttgtcacccaaagatatgaaccaaccttcaagctctttcttcagtatatctcccacatcgaatagttcagctacaattgcca

SEQ ID NO: 27679 - DNA, 120 bp, Artificial Sequence
  ENSG00000040341_13 (sequence is synthesized)
gggaactccttatgaatggaacatcttctacagctgaagccataggtttaaaaggaagttctcctactcccccttgttctccagtacaaccttcaaaacaactggaatatttagcaagga

SEQ ID NO: 27680 - DNA, 120 bp, Artificial Sequence
  ENSG00000040341_14 (sequence is synthesized)
ttcaaggctttcaggcagccttaagtgccttgaaacaattttctgaacaaggactggatccaatcgatggagcaatgaatatcgaaaaaggttctcttgaaaaacaagccaagcatctga

SEQ ID NO: 27681 - DNA, 120 bp, Artificial Sequence
  ENSG00000040341_15 (sequence is synthesized)
gagagaaagcggacaataaccaggcacccccgggctccatcgctcaggactgcaagaaatcaaactcggccgtctagcagctcccagaacccgcggctgccaccgcatccttataaacct

SEQ ID NO: 27682 - DNA, 120 bp, Artificial Sequence
  ENSG00000040341_16 (sequence is synthesized)
gtcagcacgcatgagggtgtctgtgttcagggaaatgaatgactaataccattatttgagtcttatgtgaagacaacactattctaacacgagagataatatacatggtactgtttattc

SEQ ID NO: 27683 - DNA, 120 bp, Artificial Sequence
  ENSG00000040341_17 (sequence is synthesized)
aactggggaaaaataaaactttgagcatttcccttggaactcgagatcagatcataactcatttgcctagaggcagcagaaatctgatcctgctactggagcttaaaataacaagtaaag

SEQ ID NO: 27684 - DNA, 120 bp, Artificial Sequence
  ENSG00000040341_18 (sequence is synthesized)
aaaagtgttagaaacaaagctaaaattttaacatgattaataatagagaagttgggtttggttctgttgttatgattgttttgtcgtggtgcttgtgttcagttatattctctctctctc

SEQ ID NO: 27685 - DNA, 120 bp, Artificial Sequence
  ENSG00000040341_19 (sequence is synthesized)
tcatttcaaatactgcttgacaattcgaaaatgaaccaatgatgtgctgtggaatgtgatggttgtcttcatatagagtcacatggtttctctttttatgcagatatttataatcttcat

SEQ ID NO: 27686 - DNA, 120 bp, Artificial Sequence
  ENSG00000040341_20 (sequence is synthesized)
cctatatcagtaggaataactataaggtgcactacaaaaagatgtatgcaaacaaacatgttttaaatcaggtcagatatctgatgaaaaatacgaactaatgttaagagcaagtagttt

SEQ ID NO: 27687 - DNA, 120 bp, Artificial Sequence
  ENSG00000040341_21 (sequence is synthesized)
caacatactccaggaactgagaaacaaaacaaagcaattgtgggttttgagctccatatactcttagcaagtaagggggcgtcttgcccctatatatcatcttcccggattccactccct

SEQ ID NO: 27688 - DNA, 120 bp, Artificial Sequence
  ENSG00000040341_22 (sequence is synthesized)
gttgtgggaatcgcgcccacccccatccgtgtgttgtagccactcacggtttgcatcaagagtgttttttgtaactgcctctggacttgggacagtgagtaggatcaaaaataaataatg

SEQ ID NO: 27689 - DNA, 120 bp, Artificial Sequence
  ENSG00000040341_23 (sequence is synthesized)
tacatgacggggaagggaaaaacctgttggagttgcttccagccagccacgctccgggccagcatgttggaatccagcgtggagcagatgcagtaaaaatgtggttggtttctgtgtgaa

SEQ ID NO: 27690 - DNA, 120 bp, Artificial Sequence
  ENSG00000040341_24 (sequence is synthesized)
actcttgcctcataaatctaggattcagggcattgttttcaatggttctcatttttggctccaaggattctttttcatgtgactaatattttcggtagaagaggaggtctggccacgccg

SEQ ID NO: 27691 - DNA, 120 bp, Artificial Sequence
  ENSG00000040341_25 (sequence is synthesized)
cgggtcttggcgagcaggtgatcacggatccctggtgtttgctgggcgagacggtgaagcaacctcctccccgccccctcccccgtctagaaaggtgcaagatccgctaaaccgtgcgtt

SEQ ID NO: 27692 - DNA, 120 bp, Artificial Sequence
  ENSG00000040341_26 (sequence is synthesized)
gcacagcggcggccggagcagacgcgggatggtcgcgcgtcccctgcacagcacagaggggcagccggagagcctgggaaagtttttggagccgtgagggatacagcagtttggtcaata

SEQ ID NO: 27693 - DNA, 120 bp, Artificial Sequence
  ENSG00000040341_27 (sequence is synthesized)
aaaagcaaaaacaaaaaacaaaacaattcattagcctcagattcttcatctgtatacatcacaaggctcattcttgcctgctagtatggcctacatgccacttacgttttaagttattta

SEQ ID NO: 27694 - DNA, 120 bp, Artificial Sequence
  ENSG00000040341_28 (sequence is synthesized)
ggaacacaaaggacagacaaaaaagccatatgcacatgcctcattttctcttatttttgatctatctagtaattcttttgctgcctgtctcttctccattttccttcttcttttttaagc

SEQ ID NO: 27695 - DNA, 120 bp, Artificial Sequence
  ENSG00000040341_29 (sequence is synthesized)
atttttcatattcttcactgtcttctatttggtcttgattaggtgcatctatctcttcgctctgtcttccacaaacaaaaattctgccttcagacatttggtgttagtatttcacactca

SEQ ID NO: 27696 - DNA, 120 bp, Artificial Sequence
  ENSG00000040341_30 (sequence is synthesized)
tgatcaccactcagatcgagatacagaatgttcccaatcacctctgagagtttcctcagacctctttgtctttgacacatccttctcccagaaataatcactattttattatcatagact

SEQ ID NO: 27697 - DNA, 120 bp, Artificial Sequence
  ENSG00000040341_31 (sequence is synthesized)
agtttttgcctgttgttgaactttttatatctagactcatacagtatttatgtgcatctggcttcttttactttgtataatgattttcttgtttggggattcatccatgttgcttatatc

SEQ ID NO: 27698 - DNA, 120 bp, Artificial Sequence
  ENSG00000040341_32 (sequence is synthesized)
gcgttgcacagcggcggccggagcagacgcgggatggtcgcgcgtcccctgcacagcacagaggggcagccggagagcctgggaaagaggctgcctaccacaaggactttagcttacttt

SEQ ID NO: 27699 - DNA, 120 bp, Artificial Sequence
  ENSG00000040341_33 (sequence is synthesized)
acagcggcggccggagcagacgcgggatggtcgcgcgtcccctgcacagcacagaggggcagccggagagcctgggaaaggtatcattgcccagtgcctaagatcttttatgttcagctc

SEQ ID NO: 27700 - DNA, 80 bp, Artificial Sequence
  ENSG00000040341_34 (sequence is synthesized)
gtcagttctctgtagtgtttgccaatgttggagccgtctgcaaagtgtccccggcaagaagagacgattttgccgtgttc

SEQ ID NO: 27701 - DNA, 120 bp, Artificial Sequence
  ENSG00000040341_35 (sequence is synthesized)
acaggcgtgagccaccacacccagctgaggaggtggattttatgaaaccaaagaggctgcctaccacaaggactttagcttactttttaaagattgaagaaaaaaaagaagacagaaaaa

SEQ ID NO: 27702 - DNA, 120 bp, Artificial Sequence
  ENSG00000040341_36 (sequence is synthesized)
agcaattttgaattttgcattctattgctagtattgattcaggtacaccattaagatacaacattctagaagtctattaccttaggagttaattaaacatgatatttgaagaataatgaa

SEQ ID NO: 27703 - DNA, 120 bp, Artificial Sequence
  ENSG00000040341_37 (sequence is synthesized)
atgctttatagttgtttgaggcataacaatgtgtatttgttttactggatcatgttttgaactgactagggagggtagcacctgcctcagatagtaccaacaattctgtttcactgggta

SEQ ID NO: 27704 - DNA, 120 bp, Artificial Sequence
  ENSG00000040341_38 (sequence is synthesized)
gtctaaaactagcttatagtttaacttaacttgttgtgtatgtgaatttagggatggaaactttttttcccctatttattctttgtttccttctgggaaaaaaccccacaaaaatcagca

SEQ ID NO: 27705 - DNA, 120 bp, Artificial Sequence
  ENSG00000040341_39 (sequence is synthesized)
ctcctttatggatacattggagcttttgaaagaattgtaaactctaggaaggggaaatatctgtgtcttgatttcttagttgccttgaaaatcatgtactgaactgtaaccgctaacttg

SEQ ID NO: 27706 - DNA, 120 bp, Artificial Sequence
  ENSG00000040341_40 (sequence is synthesized)
actggatgaactagtttgcttgtgtgtagagagtgtattgcttcctcagatttcactgttttcatctccttttccatcttagtctttattccttaagaccaaaaactgtaatatccttta

SEQ ID NO: 27707 - DNA, 120 bp, Artificial Sequence
  ENSG00000040341_41 (sequence is synthesized)
gaaatgctctagaagatctgtattgtgtagaatgatcatgtatttataaatattttacaagtttagattataaaatgaaaaagaaggtcatgtgttttggggggtattttgcatgttcgg

SEQ ID NO: 27708 - DNA, 120 bp, Artificial Sequence
  ENSG00000040341_42 (sequence is synthesized)
atttttttttcacttcaccgaacccttctgattctttcaaactattgccaggtagttgttagtgtttctaattggactcttaatatgaacttcaagaagctgttaccagttatcggctct

SEQ ID NO: 27709 - DNA, 120 bp, Artificial Sequence
  ENSG00000040341_43 (sequence is synthesized)
gtcatctgaaattttaaccacttaatttaaagttacaattttagaatttgtttttgttgttttaccttaagaaacacaataaatcactgtttaaaaaagatctcaatttatataaagtac

SEQ ID NO: 27710 - DNA, 120 bp, Artificial Sequence
  ENSG00000040341_44 (sequence is synthesized)
tggaaaaaagctaagtaatttttagttctatctataatctccgtaggatgaattagaaataaattgtgatgaaaagaaattaactgcttatttatgaatctaatcatttagaaatgtctg

SEQ ID NO: 27711 - DNA, 120 bp, Artificial Sequence
  ENSG00000040341_45 (sequence is synthesized)
agagtaacactgcattcttatagaaacaaagcacaaattgcattcaagctctgaattgattttttgcttggagctgttgttacagtagctgtaattttgctaccagaatgtcttaatttt

SEQ ID NO: 27712 - DNA, 120 bp, Artificial Sequence
  ENSG00000040341_46 (sequence is synthesized)
ttaaatttgtttttatttctaagctcttggcaatgacaataattataattttaacatatcttcactgtagtcaacatgtagagtctgcttccctcattattgcattgctaaggccttttt

SEQ ID NO: 27713 - DNA, 120 bp, Artificial Sequence
  ENSG00000040341_47 (sequence is synthesized)
aaaaagcttatgcttacataatatactcttttttatggacacgttatatgtttccaaatctgtgtattgtgatttttacatactaatgaatataaacaggtgattttaaaatattactgt

SEQ ID NO: 27714 - DNA, 120 bp, Artificial Sequence
  ENSG00000040341_48 (sequence is synthesized)
gcttctttggttgaatgagctggtattgatgtaaaatactctgtcattgatggaccactacctgcagctaagcagtgagcagaatctccgggaaatgacttagtctggccacatgcatag

SEQ ID NO: 27715 - DNA, 120 bp, Artificial Sequence
  ENSG00000040341_49 (sequence is synthesized)
cccatcttcataatgtcgcagcagaaggttctttgtggttaaaagttttaaagcctatttctttataggtaaccctctcaggtatatttacctggtagaaaaacatgtagattgtttcta

SEQ ID NO: 27716 - DNA, 120 bp, Artificial Sequence
  ENSG00000040341_50 (sequence is synthesized)
ttacttaaatgttttaattggactgtagtttagaaattacaggaccagcttgttacagattatacactattctgttacttttatttctgaaacttaaaaacaataaattctttttctgtg

SEQ ID NO: 27717 - DNA, 120 bp, Artificial Sequence
  ENSG00000040341_51 (sequence is synthesized)
ccattcccaaattatagagctaattacaactttcggggcatgtacaatcagagatgaagagttacctaagtcagtgttataagatgttccatggtaaaagggatttgaagacaaattttg

SEQ ID NO: 27718 - DNA, 120 bp, Artificial Sequence
  ENSG00000040341_52 (sequence is synthesized)
gaaatgctgcatactgtatctctcttgaagactcctaaaggtgtcatgaagaaaactgtttacctaagtggttcctaacactgactgaacatcaggctttcctgggcagctttaaaaatt

SEQ ID NO: 27719 - DNA, 120 bp, Artificial Sequence
  ENSG00000040341_53 (sequence is synthesized)
ctgatgcccagactttatgtggactaattaaatcagaatttctggttgcagagcttgaaccgcactgttttttaaaacttccccaagtaattctatgtccagtcatttaaatactggtcc

SEQ ID NO: 27720 - DNA, 120 bp, Artificial Sequence
  ENSG00000040341_54 (sequence is synthesized)
ccacaacccaaaacacattaccctctattaacatcaaagattatgagatggtttgaatagtcatagaacttttgaaagaagtaaagaagaagggaagaattacagttaaccacactcctt

SEQ ID NO: 27721 - DNA, 120 bp, Artificial Sequence
  ENSG00000040341_55 (sequence is synthesized)
aaggataattgttctggacagctagcttccccacattgctgagggttcacttttttttggaacctaaaactttacttagttcagtaattttggatagaaatatttctaaaagttatggca

SEQ ID NO: 27722 - DNA, 120 bp, Artificial Sequence
  ENSG00000040341_56 (sequence is synthesized)
tccttaaatagaaaatgccacaattcttagcatgaagaatccttgctgttgactcattatcaaccttataaacaataagtattacaagcctcatgagatatgtacatggtttgtccttat

SEQ ID NO: 27723 - DNA, 120 bp, Artificial Sequence
  ENSG00000040341_57 (sequence is synthesized)
accagataatcctagacatctgtttctagagtacccaagtgtgcttttagttactttccaaatcattgttgtcagtcagattgtcatcttatttcttgtttttgtcagtgcacctttgca

SEQ ID NO: 27724 - DNA, 120 bp, Artificial Sequence
  ENSG00000040341_58 (sequence is synthesized)
tattgcttgctcctttctttgatgcttttcaattgctattatcttgaaaaccgatattattgtttgaatttggggcaaagtaagagtagcagggctttaattacgccctaagatgtcccc

SEQ ID NO: 27725 - DNA, 120 bp, Artificial Sequence
  ENSG00000040341_59 (sequence is synthesized)
ttaactgtggaaaacatcgagttttatctagttggtgaatttttttacttcagaatttatttttttctgtcataaattttgctaaggatctgcattttgagtagaatgaagtggccagat

SEQ ID NO: 27726 - DNA, 120 bp, Artificial Sequence
  ENSG00000040341_60 (sequence is synthesized)
agttgaataatggtttggtgaatatctatatgtatatatgtatgtgtatgtgtgttacacatacatatttaatgacatgaagtactttggttgcttggaattggacagaaataacagttt

SEQ ID NO: 27727 - DNA, 83 bp, Artificial Sequence
  ENSG00000040341_61 (sequence is synthesized)
aacagttttaataaatttcatgaaatcactttcttgtatgttaaaggaaacagaaagggttcatttgtgcatggtttagtctt

SEQ ID NO: 27728 - DNA, 120 bp, Artificial Sequence
  ENSG00000040341_62 (sequence is synthesized)
aaggaaacagaaagggttcatttgtgcatggtttagtctttcttttgaatgtggaagtttttcttcttatttgtgtgtctaaaaaaattaaaaagtgaaacattttccaaaatgagaaga

SEQ ID NO: 27729 - DNA, 120 bp, Artificial Sequence
  ENSG00000040341_63 (sequence is synthesized)
atgctattggaagctccattgaagccagccatgatcaggtataatatgccactgccattttgctgtgttatggcccagctcggaaatggaaggccatcaaaatggaagctatgtgcgcac

SEQ ID NO: 27730 - DNA, 120 bp, Artificial Sequence
  ENSG00000040341_64 (sequence is synthesized)
atgcagctttgctttccttaatacattatctgctagcaccatctgctagacttgaaaaatcaaaattgtttgtgttgggaaattgatatcatagtagatttaaattattttagacttctt

SEQ ID NO: 27731 - DNA, 120 bp, Artificial Sequence
  ENSG00000040341_65 (sequence is synthesized)
gtttgcagttcattattattttaaatatggaattattttatatgaaaaatagttgtcccacaggttatttttatctttaatagttatatatgagaggaagggtcaacaaaacaatataga

SEQ ID NO: 27732 - DNA, 120 bp, Artificial Sequence
  ENSG00000040341_66 (sequence is synthesized)
ggggcggggagcccgaggggtggaagccggcggcggccgagcggggtcagttctctgtagtgtttgccaatgttggagccgtctgcaaagtgtccccggcaagaagtttttggagccgtg

SEQ ID NO: 27733 - DNA, 120 bp, Artificial Sequence
  ENSG00000040341_67 (sequence is synthesized)
agggatacagcagtttggtcaatattgtcttaacatgcttcaaataaatcagattgaagaactcccttcaggatttcttgtagaacaagtctggtgttgatgaaatccttcggcttttgt

SEQ ID NO: 27734 - DNA, 120 bp, Artificial Sequence
  ENSG00000040341_68 (sequence is synthesized)
cttgaatggattacagggactctggagccaaagatccaaggagatgtcttttccttgtcagaacccagattaatcattagcttcttaaggcagggaatgaaaggtgaagtccaagaaaca

SEQ ID NO: 27735 - DNA, 120 bp, Artificial Sequence
  ENSG00000040341_69 (sequence is synthesized)
cggggagcccgaggggtggaagccggcggcggccgagcggggtcagttctctgtagtgtttgccaatgttggagccgtctgcaaagtgtccccggcaagaaggtatcattgcccagtgcc

SEQ ID NO: 27736 - DNA, 120 bp, Artificial Sequence
  ENSG00000040341_70 (sequence is synthesized)
tatgtcttttttggttttgttcttaattattattttatccatgttataaaagtttctcacactcaaaagagtattttcattgtaaatctaattgaccttgggcattgtgcatggaattta

SEQ ID NO: 27737 - DNA, 120 bp, Artificial Sequence
  ENSG00000040341_71 (sequence is synthesized)
ctgtattcagagcttggtttataccactttggttccaaatatatctggataaaatgctgatttcctcttttgagaatatacctgacaaggatcagattcatgtaacaagaggcagcctta

SEQ ID NO: 27738 - DNA, 120 bp, Artificial Sequence
  ENSG00000040341_72 (sequence is synthesized)
ttgtgtaaacccttctttggctttccttgcccattgcaatttgatttaagcctactagagccattgtatgtgacagctatattgtattacaaagtaaaaatatatgagtgtattgaaaac

SEQ ID NO: 27739 - DNA, 120 bp, Artificial Sequence
  ENSG00000040487_0 (sequence is synthesized)
agaagctgggccctggcggcggatctggacgtggtgagccggaccgggggcaggtggcaaacttcacggctgggggtcggggctcctgggcttccctgccacatccttccagccctctcc

SEQ ID NO: 27740 - DNA, 120 bp, Artificial Sequence
  ENSG00000040487_1 (sequence is synthesized)
tccggccgctggactgtcccggctcctgcgccctccttgtggcgcgatatcgtgggacgaggctccgggccgggactgggtggccctcgggaatccgcagccagtggccccccacctcaa

SEQ ID NO: 27741 - DNA, 120 bp, Artificial Sequence
  ENSG00000040487_2 (sequence is synthesized)
aggcgaccagcgcggcctctcgagctggcctggccaggagttgccctgccccggccgaccggccccttggcatctgatggcttcgtttttcccgggccggccgggcgaggggccctcgcg

SEQ ID NO: 27742 - DNA, 120 bp, Artificial Sequence
  ENSG00000040487_3 (sequence is synthesized)
gcgctggccccagcagctgtcctatcattatccctccaaacaggcggcccgcgccgggctgagtcaccaggagggagctgtggccgaggacgccgaggcctggagtgggtggtagccccg

SEQ ID NO: 27743 - DNA, 120 bp, Artificial Sequence
  ENSG00000040487_4 (sequence is synthesized)
agctgggacgctcctccctccacaatctccccaggtctgcagggaccgagggcctacactgcctcctcccacgccgtgcttaggaacccttgctggcctcagaacaccagcgccctccct

SEQ ID NO: 27744 - DNA, 120 bp, Artificial Sequence
  ENSG00000040487_5 (sequence is synthesized)
ccggtgcagccctgcctggccgggggcccctcctccacagccatggtctggaagaaactgggctcccgcaacttctccagctgccccagtggctccatccagtggatatgggatgtgttg

SEQ ID NO: 27745 - DNA, 120 bp, Artificial Sequence
  ENSG00000040487_6 (sequence is synthesized)
ggtgaatgtgcccaggacggctgggacgaggccagcgtgggcctgggcttgatctccattctctgctttgctgcatctaccttcccccagttcatcaaagcctacaagacgggcaacatg

SEQ ID NO: 27746 - DNA, 120 bp, Artificial Sequence
  ENSG00000040487_7 (sequence is synthesized)
gaccaggcgctgtccctgtggttcctcctgggctggattggcggagactcctgcaacctcatcggctccttccttgctgaccagctgcccctgcagacctacacggctgtgtattatgtc

SEQ ID NO: 27747 - DNA, 120 bp, Artificial Sequence
  ENSG00000040487_8 (sequence is synthesized)
ttggcagacctggtgatgctgacgctgtacttttactacaagttcaggacgcgcccctctctgttgtctgcccccatcaactccgtgctgttgttcctcatggggatggcgtgcgccaca

SEQ ID NO: 27748 - DNA, 120 bp, Artificial Sequence
  ENSG00000040487_9 (sequence is synthesized)
gctgggcccgtggctgcccctagggaagccttccgggggcgggcgctcctgtccgtggagtcgggcagcaagcccttcacccggcaggaagtcattggcttcgtcatcggctccatctcc

SEQ ID NO: 27749 - DNA, 120 bp, Artificial Sequence
  ENSG00000040487_10 (sequence is synthesized)
agcgtgttgtacctgctttcccggctgcctcagatccgcaccaacttcctccggaagtccacccaggggatctcctactctctgttcgcgctggtgatgctggggaacacgctgtatggg

SEQ ID NO: 27750 - DNA, 120 bp, Artificial Sequence
  ENSG00000040487_11 (sequence is synthesized)
ctgagcgtgctgctcaaaaaccccgaggagggccagagcgagggcagctacctgctgcaccacctgccctggcttgtgggcagcctgggcgtgctgctgctcgacaccatcatctccatc

SEQ ID NO: 27751 - DNA, 120 bp, Artificial Sequence
  ENSG00000040487_12 (sequence is synthesized)
cagttcctggtgtacaggcgcagcaccgccgcctcggagcttgagcccctcctccccagctgaccagaaccaggctgagcgcaggaggacaggcaccaccggatgccacaccaggcagga

SEQ ID NO: 27752 - DNA, 120 bp, Artificial Sequence
  ENSG00000040487_13 (sequence is synthesized)
ggaggtgtggacagtgatggtacggcggccctgcatcagcctgcgggtggcctctggatcctccgtggaccgaaccgtccccccaggaacacaccttcaggtagaccccgaagcctcaag

SEQ ID NO: 27753 - DNA, 120 bp, Artificial Sequence
  ENSG00000040487_14 (sequence is synthesized)
gccggggctggagcggagaccccagggcctctcaggagacagtgaggctgcccctcctaccacctacctcattctgcctactcaccccaggggccacagccacagcctgctggactcagg

SEQ ID NO: 27754 - DNA, 120 bp, Artificial Sequence
  ENSG00000040487_15 (sequence is synthesized)
ctcaccccaggggccacagccacagcctgctggactcaggactgtcctgtcaactccagacaactgaataaacaggccgggtacagtggctcgcacctgtaatcctagcactttgggagg

SEQ ID NO: 27755 - DNA, 120 bp, Artificial Sequence
  ENSG00000040487_16 (sequence is synthesized)
gctggaccctggagccgtgagtgagcaagaacagccatgagtgccccagaagcttacagcccagcggggcgcagagaggacacaacgctatcatcaaagaattacttcattgcagtggca

SEQ ID NO: 27756 - DNA, 120 bp, Artificial Sequence
  ENSG00000040487_17 (sequence is synthesized)
ccaagtgctgcagagaaaaacaacaagagcgtctagccagggaccgtcctggttagaggggcagcaaaggcccctataagtctcattgaacctgtgacttgacagagtaggagaagtcag

SEQ ID NO: 27757 - DNA, 120 bp, Artificial Sequence
  ENSG00000040487_18 (sequence is synthesized)
gcgaaggcaggagaggaatgttctaggctgtgcagacgagagctggagtgtggagagacacatgacttggtcagacaaacctgggttcaaatcctggctcctcccctgcttcctagctgt

SEQ ID NO: 27758 - DNA, 120 bp, Artificial Sequence
  ENSG00000040487_19 (sequence is synthesized)
gtgacgcagggcacacagtcaacctctctgtgctgccgtgtcttcacctcagttaacagccactgtctcgtcaggatgttgtgtaagatgaggtatctggaaacactccccacaggaccc

SEQ ID NO: 27759 - DNA, 120 bp, Artificial Sequence
  ENSG00000040531_0 (sequence is synthesized)
gatttccgcccaatggagggcggtctgagcttcgctcacgaaaggagccgggaggcgctggcggctccaagagtctctgtgtccctggcagcggacctcatcttccctcacgccggagcc

SEQ ID NO: 27760 - DNA, 120 bp, Artificial Sequence
  ENSG00000040531_1 (sequence is synthesized)
ccgatctctgcgccccggcccgacccagctgcgctctgtccgtctaagacgcgcggaaactacaactcccagagctcatctcgccgagatccggccccacgagtcaggtggcggaggtca

SEQ ID NO: 27761 - DNA, 120 bp, Artificial Sequence
  ENSG00000040531_2 (sequence is synthesized)
ggtgacagcggacccgcctctcccaaagtctagccgggcaggggaacgcggtgcattcctgaccggcacctggcgaggctcatgcgtcccgtgagggcggttcctcgagcctgggggcgc

SEQ ID NO: 27762 - DNA, 120 bp, Artificial Sequence
  ENSG00000040531_3 (sequence is synthesized)
tcagattgctttggagacgctgagagaacctttgcgagagcgccggttgacgtgcggagtgcggggctccgggggactgagcagcacgagaccccatcctcccctccgggttttcacact

SEQ ID NO: 27763 - DNA, 120 bp, Artificial Sequence
  ENSG00000040531_4 (sequence is synthesized)
gggcgaagggaggactcctgagctctgcctcttccagtaacattgaggattactgtgttttgtgagagctcgctaggcgccctaagcaacagagttctgagaaatcgagaaacatgataa

SEQ ID NO: 27764 - DNA, 120 bp, Artificial Sequence
  ENSG00000040531_5 (sequence is synthesized)
ggaattggctgactatttttatcctttttcccctgaagctcgtagagaaatgtgagtcaagcgtcagcctcactgttcctcctgtcgtaaagctggagaacggcagctcgaccaacgtca

SEQ ID NO: 27765 - DNA, 120 bp, Artificial Sequence
  ENSG00000040531_6 (sequence is synthesized)
gcctcaccctgcggccaccattaaatgcaaccctggtgatcacttttgaaatcacatttcgttccaaaaatattactatccttgagctccccgatgaagttgtggtgcctcctggagtga

SEQ ID NO: 27766 - DNA, 120 bp, Artificial Sequence
  ENSG00000040531_7 (sequence is synthesized)
caaactcctcttttcaagtgacatctcaaaatgttggacaacttactgtttatctacatggaaatcactccaatcagaccggcccgaggatacgctttcttgtgatccgcagcagcgcca

SEQ ID NO: 27767 - DNA, 120 bp, Artificial Sequence
  ENSG00000040531_8 (sequence is synthesized)
ttagcatcataaaccaggtgattggctggatctactttgtggcctggtccatctccttctaccctcaggtgatcatgaattggaggcggaaaagtgtcattggtctgagcttcgacttcg

SEQ ID NO: 27768 - DNA, 120 bp, Artificial Sequence
  ENSG00000040531_9 (sequence is synthesized)
tggctctgaacctgacgggcttcgtggcctacagtgtattcaacatcggcctcctctgggtgccctacatcaaggagcagtttctcctcaaataccccaacggagtgaaccccgtgaaca

SEQ ID NO: 27769 - DNA, 120 bp, Artificial Sequence
  ENSG00000040531_10 (sequence is synthesized)
gcaacgacgtcttcttcagcctgcacgcggttgtcctcacgctgatcatcatcgtgcagtgctgcctgtatgagcgcggtggccagcgcgtgtcctggcctgccatcggcttcctggtgc

SEQ ID NO: 27770 - DNA, 120 bp, Artificial Sequence
  ENSG00000040531_11 (sequence is synthesized)
ggtcaagtattttccacaggcctacatgaacttttactacaaaagcactgagggctggagcattggcaacgtgctcctggacttcaccgggggcagcttcagcctcctgcagatgttcct

SEQ ID NO: 27771 - DNA, 120 bp, Artificial Sequence
  ENSG00000040531_12 (sequence is synthesized)
ccagtcctacaacaacgaccagtggacgctgatcttcggagacccaaccaagtttggactcggggtcttctccatcgtcttcgacgtcgtcttcttcatccagcacttctgtttgtacag

SEQ ID NO: 27772 - DNA, 120 bp, Artificial Sequence
  ENSG00000040531_13 (sequence is synthesized)
aaagagaccggggtatgaccagctgaactagcacccagggacccagtgtacccagcctctggcctcgtgccctgctggggaaggcctcacccagcgaaggccggagaagcggttgggccc

SEQ ID NO: 27773 - DNA, 120 bp, Artificial Sequence
  ENSG00000040531_14 (sequence is synthesized)
tggcacacagggctggctcagtgtgcggacagaggagaccactctgctcctggggccagaggccattcaatagcctgccttcgtccgggcccctcctgggcctccccggccaggcacgtg

SEQ ID NO: 27774 - DNA, 120 bp, Artificial Sequence
  ENSG00000040531_15 (sequence is synthesized)
gcaccgtcgccttgacaccgccatctcttttctttaaggcttcaggcagcgcgcacaggctctggcagccgtctcaggcaggactgggcaccaagcttgcagccgaaggccttgccccaa

SEQ ID NO: 27775 - DNA, 120 bp, Artificial Sequence
  ENSG00000040531_16 (sequence is synthesized)
actaccagcgtttctgcaagcagcttgaagggctgaccttgcagccgggtgagccaagggcactttgctgccaccgctgcattcccagagatcaagcagcccggtgccgtggccagtgaa

SEQ ID NO: 27776 - DNA, 120 bp, Artificial Sequence
  ENSG00000040531_17 (sequence is synthesized)
ctcagaggtgctggtggacgggctaggactttggggttaggccatggggctctttctctgaaggccactttcctgacgtactctctgtacataactcagcgtccgtgactgcagtaacag

SEQ ID NO: 27777 - DNA, 120 bp, Artificial Sequence
  ENSG00000040531_18 (sequence is synthesized)
ccagccctacccagagtatttctgagccatgaggggcccaccagattggttctgaattggattcatgcccagcgcattagcatagtaactcctttcagattttttggagggacgtttgga

SEQ ID NO: 27778 - DNA, 120 bp, Artificial Sequence
  ENSG00000040531_19 (sequence is synthesized)
agtggcttactctcttctgccctctctcctacctccaccttctcagattagccccatctgagcacatccagctgctccttacccagcatctggagtacaggacatagctctctcctgcta

SEQ ID NO: 27779 - DNA, 120 bp, Artificial Sequence
  ENSG00000040531_20 (sequence is synthesized)
ccagtctgtgccttagaggtctgttaggcctgccaaacggcgaccagctcccctggagcgagggcaggccccttccctctctttccccagacacctacttgagactcaccaatttctggc

SEQ ID NO: 27780 - DNA, 120 bp, Artificial Sequence
  ENSG00000040531_21 (sequence is synthesized)
ctgttcaggagcctcagataagtatttgtacttgagaccacctcacacaatctgtatgggcccaaccctgatctcaaacctccttccctctgcccaaagctgtccttcctatggcaggag

SEQ ID NO: 27781 - DNA, 120 bp, Artificial Sequence
  ENSG00000040531_22 (sequence is synthesized)
gggtgggggtcccaggacgtgcctcatacatgacttgagcttgtcagtccactgagtttccttctacgagatcaacgcgaggggcctgtatcttgaattaaaacctactcgcttcctttc

SEQ ID NO: 27782 - DNA, 120 bp, Artificial Sequence
  ENSG00000040531_23 (sequence is synthesized)
ctctcccaaagtctagccgggcaggggaacgcggtgcattcctgaccggcacctggcgaggctcatgcgtcccgtgagggcggttcctcgagcctgggggcgctcaggtgagagcggacg

SEQ ID NO: 27783 - DNA, 120 bp, Artificial Sequence
  ENSG00000040531_24 (sequence is synthesized)
agctccccgatgaactggtggaagcaggaggagaagaatgcagggatgagatcagtagccatgaggcacatcaagatgggctgcaaatcagctctgagccccctaggaagcaaacaggag

SEQ ID NO: 27784 - DNA, 120 bp, Artificial Sequence
  ENSG00000040531_25 (sequence is synthesized)
agccccctaggaagcaaacaggagtgaaacacgatcagtctccagcatgtgggaacctgtgatctgaaaaatatagcatcgctggctgcagagatgtgcacctgtaatcccagctacttg

SEQ ID NO: 27785 - DNA, 120 bp, Artificial Sequence
  ENSG00000040531_26 (sequence is synthesized)
tgagcccaggaactcaaggctgcagtgagccatgactgtaccactgccctccagcctgagtgttggagcaagactctgtctctaaaaaattaaaaataaaaataaaatgtttaaaaataa

SEQ ID NO: 27786 - DNA, 120 bp, Artificial Sequence
  ENSG00000040608_0 (sequence is synthesized)
ggccgggccgtagcggcggcgcctggatgcggacccggccgcggggagacgggcgcccgccccgaaacgactttcagtccccgacgcgccccgcccaacccctacgatgaagagggcgtc

SEQ ID NO: 27787 - DNA, 120 bp, Artificial Sequence
  ENSG00000040608_1 (sequence is synthesized)
cgctggagggagccggctgctggcatgggtgctgtggctgcaggcctggcaggtggcagccccatgcccaggtgcctgcgtatgctacaatgagcccaaggtgacgacaagctgccccca

SEQ ID NO: 27788 - DNA, 120 bp, Artificial Sequence
  ENSG00000040608_2 (sequence is synthesized)
gcagggcctgcaggctgtgcccgtgggcatccctgctgccagccagcgcatcttcctgcacggcaaccgcatctcgcatgtgccagctgccagcttccgtgcctgccgcaacctcaccat

SEQ ID NO: 27789 - DNA, 120 bp, Artificial Sequence
  ENSG00000040608_3 (sequence is synthesized)
cctgtggctgcactcgaatgtgctggcccgaattgatgcggctgccttcactggcctggccctcctggagcagctggacctcagcgataatgcacagctccggtctgtggaccctgccac

SEQ ID NO: 27790 - DNA, 120 bp, Artificial Sequence
  ENSG00000040608_4 (sequence is synthesized)
attccacggcctgggccgcctacacacgctgcacctggaccgctgcggcctgcaggagctgggcccggggctgttccgcggcctggctgccctgcagtacctctacctgcaggacaacgc

SEQ ID NO: 27791 - DNA, 120 bp, Artificial Sequence
  ENSG00000040608_5 (sequence is synthesized)
gctgcaggcactgcctgatgacaccttccgcgacctgggcaacctcacacacctcttcctgcacggcaaccgcatctccagcgtgcccgagcgcgccttccgtgggctgcacagcctcga

SEQ ID NO: 27792 - DNA, 120 bp, Artificial Sequence
  ENSG00000040608_6 (sequence is synthesized)
ccgtctcctactgcaccagaaccgcgtggcccatgtgcacccgcatgccttccgtgaccttggccgcctcatgacactctatctgtttgccaacaatctatcagcgctgcccactgaggc

SEQ ID NO: 27793 - DNA, 120 bp, Artificial Sequence
  ENSG00000040608_7 (sequence is synthesized)
gtacctgaggctcaacgacaacccctgggtgtgtgactgccgggcacgcccactctgggcctggctgcagaagttccgcggctcctcctccgaggtgccctgcagcctcccgcaacgcct

SEQ ID NO: 27794 - DNA, 120 bp, Artificial Sequence
  ENSG00000040608_8 (sequence is synthesized)
ggctggccgtgacctcaaacgcctagctgccaatgacctgcagggctgcgctgtggccaccggcccttaccatcccatctggaccggcagggccaccgatgaggagccgctggggcttcc

SEQ ID NO: 27795 - DNA, 120 bp, Artificial Sequence
  ENSG00000040608_9 (sequence is synthesized)
caagtgctgccagccagatgccgctgacaaggcctcagtactggagcctggaagaccagcttcggcaggcaatgcgctgaagggacgcgtgccgcccggtgacagcccgccgggcaacgg

SEQ ID NO: 27796 - DNA, 120 bp, Artificial Sequence
  ENSG00000040608_10 (sequence is synthesized)
ctctggcccacggcacatcaatgactcaccctttgggactctgcctggctctgctgagcccccgctcactgcagtgcggcccgagggctccgagccaccagggttccccacctcgggccc

SEQ ID NO: 27797 - DNA, 120 bp, Artificial Sequence
  ENSG00000040608_11 (sequence is synthesized)
tcgccggaggccaggctgttcacgcaagaaccgcacccgcagccactgccgtctgggccaggcaggcagcgggggtggcgggactggtgactcagaaggctcaggtgccctacccagcct

SEQ ID NO: 27798 - DNA, 120 bp, Artificial Sequence
  ENSG00000040608_12 (sequence is synthesized)
cacctgcagcctcacccccctgggcctggcgctggtgctgtggacagtgcttgggccctgctgacccccagcggacacaagagcgtgctcagcagccaggtgtgtgtacatacggggtct

SEQ ID NO: 27799 - DNA, 120 bp, Artificial Sequence
  ENSG00000040608_13 (sequence is synthesized)
ctctccacgccgccaagccagccgggcggccgacccgtggggcaggccaggccaggtcctccctgatggacgcctgccgcccgccacccccatctccaccccatcatgtttacagggttc

SEQ ID NO: 27800 - DNA, 120 bp, Artificial Sequence
  ENSG00000040608_14 (sequence is synthesized)
ggcggcagcgtttgttccagaacgccgcctcccacccagatcgcggtatatagagatatgcattttattttacttgtgtaaaaatatcggacgacgtggaataaagagctcttttcttaa

SEQ ID NO: 27801 - DNA, 120 bp, Artificial Sequence
  ENSG00000040608_15 (sequence is synthesized)
gtgtggaggagggagcaggctgcctgggtggttgtgggacgcgactcctcctaagccctggacacacttgccctccacccccgccctcgggcatccaggcgcccgtttttgagatagacg

SEQ ID NO: 27802 - DNA, 120 bp, Artificial Sequence
  ENSG00000040608_16 (sequence is synthesized)
tgcccagagggaccccagccccattgcagtgtttcctaggccctgtgggtggaacccccactgggaccccccggggactcctgcaatgcgggctctgtgttcactggagtcctgaggagg

SEQ ID NO: 27803 - DNA, 120 bp, Artificial Sequence
  ENSG00000040608_17 (sequence is synthesized)
atgcacaaaagggccccttcgccaagcgcctgtctagcaaatgacagcccaactcagcaaatgcccacacctccccaagggtccccaggacatgggctgcctggtcctgctgactgaagg

SEQ ID NO: 27804 - DNA, 120 bp, Artificial Sequence
  ENSG00000040608_18 (sequence is synthesized)
ccccagcacctgcatgacggtgggactgtctgattctggcacgtgccccaggagcagcccctgcggatgagggctgctggccagaacagttttatctttgctgaaaaattgagaagacag

SEQ ID NO: 27805 - DNA, 120 bp, Artificial Sequence
  ENSG00000040608_19 (sequence is synthesized)
acacttgggcagcaggcatgtgcttgccacatgaccttctagcttccttcttggtctctccttgcattggcctggagtggcccagaatgtgtggagcaaagacccagtttccttgctgcc

SEQ ID NO: 27806 - DNA, 120 bp, Artificial Sequence
  ENSG00000040608_20 (sequence is synthesized)
aaggcaggcaggtcaccggccctgcgccctgctcatctccctcagggccacctccatggccaggggcaggcagagggcacaggggtgcccagtcaccaggtctctctgcttcatatcagt

SEQ ID NO: 27807 - DNA, 120 bp, Artificial Sequence
  ENSG00000040608_21 (sequence is synthesized)
cctcatctgcatggtcctctcatgcagggtgggcctggggaggacccagcccggctgagctgactcccagcacttctccaggtgcaggggcagcctggcagttgtctgaagaccccggga

SEQ ID NO: 27808 - DNA, 120 bp, Artificial Sequence
  ENSG00000040608_22 (sequence is synthesized)
tgcacttaggagctcatcggtgaggcccgggagccggctgctggcatgggtgctgtggctgcaggcctggcaggtggcagccccatgcccaggtgcctgcgtatgctacaatgagcccaa

SEQ ID NO: 27809 - DNA, 120 bp, Artificial Sequence
  ENSG00000040633_0 (sequence is synthesized)
agtgcgggaggcagtggtagagggaggtggcggcagcggctagcggactcgagtctcaaccgggctgaggcggacacttctgtggagcgaagcagtgggagcatcgagcactagaggcgg

SEQ ID NO: 27810 - DNA, 120 bp, Artificial Sequence
  ENSG00000040633_1 (sequence is synthesized)
caccgggatccccggctccggggaggggggcgccggaccgggaggaggggagggggcgatgctggaagccatggcggagcccagtcccgaagatccacctccgacccttaagccagagac

SEQ ID NO: 27811 - DNA, 120 bp, Artificial Sequence
  ENSG00000040633_2 (sequence is synthesized)
tcagccaccagagaaacggcggagaacaattgaggatttcaacaaattctgcagttttgttttggcatatgctggttacattccccctagcaaagaggaaagtgactggccagcctctgg

SEQ ID NO: 27812 - DNA, 120 bp, Artificial Sequence
  ENSG00000040633_3 (sequence is synthesized)
ctccagctctccattgcgaggagagagtgcggccgacagtgatggctgggactcggccccctcagatcttcgaaccatccagacttttgttaagaaagcaaagtcatccaagagaagggc

SEQ ID NO: 27813 - DNA, 120 bp, Artificial Sequence
  ENSG00000040633_4 (sequence is synthesized)
agctcaagcaggtcccacccagccaggacccccaaggtccactttctctcgtctgcaggcccccgacagtgctaccttgcttgagaagatgaagctcaaggactctctctttgatctgga

SEQ ID NO: 27814 - DNA, 120 bp, Artificial Sequence
  ENSG00000040633_5 (sequence is synthesized)
tgggcccaaagtggcatctcctttgtcccccacatccctgacacatacctcccggccccctgctgctcttacccccgtgcccctttcccagggggacctctcccatcctcctcgaaagaa

SEQ ID NO: 27815 - DNA, 120 bp, Artificial Sequence
  ENSG00000040633_6 (sequence is synthesized)
ggaccgaaagaaccgaaagttggggccaggagctggggctggctttggggtgcttcggaggcctcggccaactcctggggatggggaaaagagatctcgaatcaagaagagcaagaagcg

SEQ ID NO: 27816 - DNA, 120 bp, Artificial Sequence
  ENSG00000040633_7 (sequence is synthesized)
gaagttaaaaaaggcagaacggggggatagactcccacctcctgggcctccccaggcaccccccagtgatacagactctgaagaggaggaggaagaggaggaagaggaagaagaagaaga

SEQ ID NO: 27817 - DNA, 120 bp, Artificial Sequence
  ENSG00000040633_8 (sequence is synthesized)
gctcctaggccccctgccacagtgcaccctgaaggagtccctcctgctgacagtgaaagcaaggaggtgggcagcactgaaacaagccaagatggagatgccagctccagtgaaggcgag

SEQ ID NO: 27818 - DNA, 120 bp, Artificial Sequence
  ENSG00000040633_9 (sequence is synthesized)
atgcgggtcatggacgaggacatcatggtagaatcaggtgatgactcatgggatctgatcacatgttactgtcgaaagccctttgcagggcggcccatgattgagtgcagcctgtgtggg

SEQ ID NO: 27819 - DNA, 120 bp, Artificial Sequence
  ENSG00000040633_10 (sequence is synthesized)
acgtggatccacctctcctgtgctaagattaagaagaccaacgtccccgacttcttttattgccagaaatgcaaggaactgaggccagaggcccggcggttaggggggcctcccaaatct

SEQ ID NO: 27820 - DNA, 120 bp, Artificial Sequence
  ENSG00000040633_11 (sequence is synthesized)
ggagagccctgatggcaccaactttagcctggaacttccaaatgacaacatgatttgggaactgagcctcagggtcctcagcctatcccctggagcttggatactgtctgcacttcaagg

SEQ ID NO: 27821 - DNA, 120 bp, Artificial Sequence
  ENSG00000040633_12 (sequence is synthesized)
caggaattctcaagggagacttgtttgaaaatgagtgtctcactttcccaccctatccttcctccccactctgtggacttgaaattgaatccattacggttggggatgggaggctgtctg

SEQ ID NO: 27822 - DNA, 120 bp, Artificial Sequence
  ENSG00000040633_13 (sequence is synthesized)
tgtcccgacacataatctctgtctcttggacctgccaccatcactttctgggtcaggattggaattgggatggaatgggacagttgtctataaaactctagtgtaaatattagcactccc

SEQ ID NO: 27823 - DNA, 120 bp, Artificial Sequence
  ENSG00000040633_14 (sequence is synthesized)
ctccctcatcttttcttctatttcactccccatttattttcttctacaccggttgtatttttaattttggacttcccctattgggcatggcagctcaaaggtggagtactagagcctggc

SEQ ID NO: 27824 - DNA, 120 bp, Artificial Sequence
  ENSG00000040633_15 (sequence is synthesized)
caagtgaggaaggaaagcagaaaggtgacgattctcactcacctcttttgtttttaataatatcggccgctgtttgtacagacagcctgcgtgttgtaaataaagcagagtgggctcttt

SEQ ID NO: 27825 - DNA, 120 bp, Artificial Sequence
  ENSG00000040633_16 (sequence is synthesized)
gagttgctgagggtgaggggggcatcggcggcagcagcggtggctgctgtggagagagagagagagtggctggttggggggaaggggccagagttgaggggtccatagcctagtaactgg

SEQ ID NO: 27826 - DNA, 120 bp, Artificial Sequence
  ENSG00000040633_17 (sequence is synthesized)
gtgctcgagtagaaggggccggagggcggggagcggttcggcgtggtcatcctggaccctgggggctggcgggcggcgtgtgcggtctcggagggcccgaggcggtggagcgcggccgga

SEQ ID NO: 27827 - DNA, 120 bp, Artificial Sequence
  ENSG00000040633_18 (sequence is synthesized)
ctggtctccccgccgctccccgggggaggggagcggcttggtgcgcctgcgccagcctgtggctttctgggaatcaaagttccggaggttcatgcggtcccttttccgctgttcccggac

SEQ ID NO: 27828 - DNA, 120 bp, Artificial Sequence
  ENSG00000040633_19 (sequence is synthesized)
agtggccggagagttgctcaggagggaggacgtagaagaggctgagtgaggggcccggtagttcgccgaggtggggtagtttgtggcggtggtaccggagctccgagtagttgccgccgg

SEQ ID NO: 27829 - DNA, 120 bp, Artificial Sequence
  ENSG00000040633_20 (sequence is synthesized)
acagctgggggcctgctggcctggcagagggacctgggagagcagggggttcacttaggaacaacggggtttagagggggagttttacacagattgttcctagtgtcttgactcagcttt

SEQ ID NO: 27830 - DNA, 120 bp, Artificial Sequence
  ENSG00000040731_0 (sequence is synthesized)
acttgcaaatcgctgtgtgctcgcagaagccagcacttccacagtctctaaccttcccatggcgagtgctgcagctctatcagcagaacctttctctccgtgtgaggaagagcttttttc

SEQ ID NO: 27831 - DNA, 120 bp, Artificial Sequence
  ENSG00000040731_1 (sequence is synthesized)
ccccctttccttttttttttttttcctttccccttaatcagaagcactgaatgaaagccaatcagagagagctcgcccccgttttcttcggttccctgctgtccagagttaaaagtgatg

SEQ ID NO: 27832 - DNA, 120 bp, Artificial Sequence
  ENSG00000040731_2 (sequence is synthesized)
ctgagaaagagcttgagttagattgaagtagaatcagtgatagaaaataacagccgaaaacaaacaaaaaggggacatagtgacaatttctcctgggttattttggctggaaccaacttc

SEQ ID NO: 27833 - DNA, 120 bp, Artificial Sequence
  ENSG00000040731_3 (sequence is synthesized)
cattatccagaagctgataaaaaagctttgggaaacatgaacaaaacattgatgaaatgttggaaaccagttgaaacacagtaaaaccaactgggtaaaataggaccacttctcttcatc

SEQ ID NO: 27834 - DNA, 120 bp, Artificial Sequence
  ENSG00000040731_4 (sequence is synthesized)
tacactgggatttgtcaagaagtgaactatgacaatacatcaatttttgctactgtttctattctgggtatgcctgccacatttctgctctccagaaataatgttcagaaggacgcctgt

SEQ ID NO: 27835 - DNA, 120 bp, Artificial Sequence
  ENSG00000040731_5 (sequence is synthesized)
gccacagcaaagaattttaagttcacgtgtaccaaggagtgatggcaaaattctccatcgtcaaaaacgtggttggatgtggaatcaatttttcttacttgaagaatatacaggatctga

SEQ ID NO: 27836 - DNA, 120 bp, Artificial Sequence
  ENSG00000040731_6 (sequence is synthesized)
ttatcagtacgtaggcaagctacattcagaccaagataaaggagatggatcactcaaatatatcttatctggagatggagctggtactctttttattattgatgaaaaaacaggtgatat

SEQ ID NO: 27837 - DNA, 120 bp, Artificial Sequence
  ENSG00000040731_7 (sequence is synthesized)
tcatgccacaaggcgaattgatagggaggaaaaggccttttatactctacgcgcacaagctattaacagaagaactctgaggccagtagagccagagtcagagtttgtgatcaaaattca

SEQ ID NO: 27838 - DNA, 120 bp, Artificial Sequence
  ENSG00000040731_8 (sequence is synthesized)
tgatatcaatgacaatgagccaacgttcccagaagaaatctatacagctagtgttcccgaaatgtctgttgtaggtacttctgtggtgcaagtcacagctacagatgccgatgacccttc

SEQ ID NO: 27839 - DNA, 120 bp, Artificial Sequence
  ENSG00000040731_9 (sequence is synthesized)
atatgggaacagcgccagagtcatttacagcatacttcaagggcagccctatttctctgtggagcctgaaacaggtatcatcaggactgctttaccgaacatgaacagagaaaacagaga

SEQ ID NO: 27840 - DNA, 120 bp, Artificial Sequence
  ENSG00000040731_10 (sequence is synthesized)
gcaataccaagtggtcatccaggccaaagacatgggcggccagatgggaggcttatcggggacaaccactgtgaacatcacgctgacagatgtcaatgacaacccaccacgtttccccca

SEQ ID NO: 27841 - DNA, 120 bp, Artificial Sequence
  ENSG00000040731_11 (sequence is synthesized)
gaacactattcatcttcgagttcttgaatcctccccagttggcacagccattggaagtgtcaaagcaactgatgctgacactgggaaaaatgctgaagtagaataccgaattattgatgg

SEQ ID NO: 27842 - DNA, 120 bp, Artificial Sequence
  ENSG00000040731_12 (sequence is synthesized)
tgacggtactgatatgtttgacatcgtgactgagaaggacacacaggaaggcatcatcactgtgaaaaagccactcgactatgagagccgaagactttatactctgaaagtcgaagcaga

SEQ ID NO: 27843 - DNA, 120 bp, Artificial Sequence
  ENSG00000040731_13 (sequence is synthesized)
aaacacccatgtagatccccgtttttattacctaggaccatttaaagatactaccatagtgaaaatctctatagaagatgtggatgaacctcctgtttttagtaggtcctcctatctgtt

SEQ ID NO: 27844 - DNA, 120 bp, Artificial Sequence
  ENSG00000040731_14 (sequence is synthesized)
cattagattttccttggatcgccatactgaccttgacagaatctttaacattcattcaggaaatggatctctttatacatcaaaacctcttgaccgtgaactatctcagtggcataatct

SEQ ID NO: 27845 - DNA, 120 bp, Artificial Sequence
  ENSG00000040731_15 (sequence is synthesized)
tactgttattgctgctgaaatcaacaatcccaaagagacaacacgcgtggctgtttttgtgagaattttggatgttaatgacaatgccccacagtttgctgtgttctatgacacttttgt

SEQ ID NO: 27846 - DNA, 120 bp, Artificial Sequence
  ENSG00000040731_16 (sequence is synthesized)
atgtgaaaatgccagaccagggcagctaatacagactataagtgcagtagacaaagatgaccctttaggtggacagaaattttttttcagtttagctgctgtcaatccaaacttcacagt

SEQ ID NO: 27847 - DNA, 120 bp, Artificial Sequence
  ENSG00000040731_17 (sequence is synthesized)
acaggataatgaagataatactgccagaatcttaaccagaaaaaatggattcaatagacatgaaatcagtacctatctcttgcctgtggtgatatcagacaatgattacccaattcagag

SEQ ID NO: 27848 - DNA, 120 bp, Artificial Sequence
  ENSG00000040731_18 (sequence is synthesized)
cagcacaggcacactgaccattcgagtgtgtgcttgtgacagccaaggcaacatgcaatcctgcagtgctgaagccctgctcctccctgccggcctcagcactggggccttgatcgccat

SEQ ID NO: 27849 - DNA, 120 bp, Artificial Sequence
  ENSG00000040731_19 (sequence is synthesized)
cctcctctgcatcatcattctactggttatagtagtactgtttgcagctctgaaaagacagcgaaaaaaagagcctctgatcttgtcaaaagaagatatcagagacaacattgtgagcta

SEQ ID NO: 27850 - DNA, 120 bp, Artificial Sequence
  ENSG00000040731_20 (sequence is synthesized)
taacgatgagggtggtggagaggaggacacccaggcctttgatatcggcaccctgaggaatcctgcagccattgaggaaaaaaagctccggcgagatattattccagaaacgttatttat

SEQ ID NO: 27851 - DNA, 120 bp, Artificial Sequence
  ENSG00000040731_21 (sequence is synthesized)
tcctcggaggactcctacagctccagataacacggacgtccgggatttcattaatgaaaggctaaaagagcatgatcttgaccccaccgcacccccctacgactcacttgcaacctatgc

SEQ ID NO: 27852 - DNA, 120 bp, Artificial Sequence
  ENSG00000040731_22 (sequence is synthesized)
ctatgaaggaaatgattccattgctgaatctctgagttcattagaatcaggtactactgaaggagaccaaaactacgattacctccgagaatggggccctcggtttaataagctagcaga

SEQ ID NO: 27853 - DNA, 120 bp, Artificial Sequence
  ENSG00000040731_23 (sequence is synthesized)
aatgtatggtggtggggaaagtgacaaagactcttaacgtaggatatatgttctgttcaaacaagagaaagtaactctacccatgctgtctccacttcacaatatttgatattcaggagc

SEQ ID NO: 27854 - DNA, 120 bp, Artificial Sequence
  ENSG00000040731_24 (sequence is synthesized)
attttcctgccagtcagcacaattttttttctcatttacttcttaatttgttcattaattacattaattctttcctgtaggatgtctcatggaatatatatgacattttatttaatcact

SEQ ID NO: 27855 - DNA, 120 bp, Artificial Sequence
  ENSG00000040731_25 (sequence is synthesized)
tccaagagccaaagctatggaaatacagtgttgtccatcttagtaaataaaagataatttcagaaacatgaacaggatagttctcccttaagcaacctcacaaacaagccgcttctgtta

SEQ ID NO: 27856 - DNA, 120 bp, Artificial Sequence
  ENSG00000040731_26 (sequence is synthesized)
ggtacatgtcctgcccttgcaaatgaagcttttaaaaaggtgaagaaaaattttacagtatatcctgttctgtacattaaattaaaaaaacaaaaatgtacatgtgatgttagtaggtgt

SEQ ID NO: 27857 - DNA, 120 bp, Artificial Sequence
  ENSG00000040731_27 (sequence is synthesized)
gatatgcaacctggtatacagacatttgtgcaatttcatttcatcaaattctatctgctaatgttttatatttatatttttgtatttatttttaaaaaaataaaccagtttttacaacta

SEQ ID NO: 27858 - DNA, 120 bp, Artificial Sequence
  ENSG00000040731_28 (sequence is synthesized)
tcgaactcctgacctcaagtgatgcacctgccttagtctcccaaaatgctgggattacagccacgagccatcgtgcatgagccagccagaaatgcatctctttatgtgagaactttgatg

SEQ ID NO: 27859 - DNA, 120 bp, Artificial Sequence
  ENSG00000040933_0 (sequence is synthesized)
acttcacagccaggcggcggcgctgctgctgctgcggggctctggcgcgcagcccggcgggacagcggggcggctggcgccgggggccggggagcgccagatgatggatttggacatgct

SEQ ID NO: 27860 - DNA, 120 bp, Artificial Sequence
  ENSG00000040933_1 (sequence is synthesized)
ggccggggagcgccagatgatggatttggacatgcttctatgaagaaatgccacatggtccgagagcaaacatgtccaggctactgccactttagtggactagggctcggtgccagcact

SEQ ID NO: 27861 - DNA, 120 bp, Artificial Sequence
  ENSG00000040933_2 (sequence is synthesized)
tcccgggtaatcaggcgtggtctgaccgaggatcaagaagcacatcatcaccaatgacatcatgacagcaagagagcacagccctcgccatggtgccagggcccgtgcaatgcagcgggc

SEQ ID NO: 27862 - DNA, 120 bp, Artificial Sequence
  ENSG00000040933_3 (sequence is synthesized)
ttccaccatcgacgtggcggccgacatgctgggcctctctctggcaggaaatatacaagacccagatgagcccattttagaatttagcttagcttgcagtgagctgcatactccatcgct

SEQ ID NO: 27863 - DNA, 120 bp, Artificial Sequence
  ENSG00000040933_4 (sequence is synthesized)
agatcgaaagccaaatagttttgttgcggtgagtgtcaccacccctcctcaggcattctggacgaagcatgcacagacggagatcattgagggaaccaacaatcctatatttctaagcag

SEQ ID NO: 27864 - DNA, 120 bp, Artificial Sequence
  ENSG00000040933_5 (sequence is synthesized)
tattgccttctttcaagactctcttatcaatcagatgacacaagtcaaactctccgtgtatgatgtcaaagatagatctcagggaacaatgtatttactgggctctggaacgttcattgt

SEQ ID NO: 27865 - DNA, 120 bp, Artificial Sequence
  ENSG00000040933_6 (sequence is synthesized)
caaagatctgctccaggacaggcatcataggttgcatttaacactaaggtctgcagagagtgaccgtgtaggtaacatcaccgtgattggctggcagatggaggagaagtcagaccaacg

SEQ ID NO: 27866 - DNA, 120 bp, Artificial Sequence
  ENSG00000040933_7 (sequence is synthesized)
gccccctgtgacccggtctgtggacactgtcaatgggaggatggttcttcctgtcgatgagagcttgacggaggcgttaggaatccgatccaaatacgcttcattgcgaaaggacacttt

SEQ ID NO: 27867 - DNA, 120 bp, Artificial Sequence
  ENSG00000040933_8 (sequence is synthesized)
gctgaaatcggtgttcggtggtgccatctgccgcatgtaccggtttccaaccactgatggtaaccatttgcggatcctggagcagatggcagagagcgtgctctccctgcacgtgccccg

SEQ ID NO: 27868 - DNA, 120 bp, Artificial Sequence
  ENSG00000040933_9 (sequence is synthesized)
gcagttcgtgaagctcctactagaggaagatgcagccagagtgtgtgagctggaggagctgggagagctgtccccttgctgggagagcctccggcgccaaattgtcacccagtaccagac

SEQ ID NO: 27869 - DNA, 120 bp, Artificial Sequence
  ENSG00000040933_10 (sequence is synthesized)
catcatcctcacataccaggagaacctgaccgacctccatcagtacagagggccctcgtttaaagcaagcagtttgaaagcagataaaaagttagaatttgttcccacaaacttgcacat

SEQ ID NO: 27870 - DNA, 120 bp, Artificial Sequence
  ENSG00000040933_11 (sequence is synthesized)
acaaaggatgagagttcaagacgatggaggatcagatcagaactacgacatcgtcaccattggggcgccagcagcacactgccaaggttttaagtcaggaggtctccgcaaaaagctgca

SEQ ID NO: 27871 - DNA, 120 bp, Artificial Sequence
  ENSG00000040933_12 (sequence is synthesized)
caaatttgaagagaccaagaaacattttgaggagtgttgtacatcatctggctgccagtccataatctacataccccaggatgttgtcagagccaaggagatcatcgcccagatcaacac

SEQ ID NO: 27872 - DNA, 120 bp, Artificial Sequence
  ENSG00000040933_13 (sequence is synthesized)
gctggtcacggtctgcgactgcaagctcctggccaactccatccatgggctgaacgctgcacggcctgactacattgcctccaaggcctctcccacttcgactgaggaggagcaggtgat

SEQ ID NO: 27873 - DNA, 120 bp, Artificial Sequence
  ENSG00000040933_14 (sequence is synthesized)
gcttagaaatgaccaggacaccctcatggcccggtggacagggagaaacagccgatcttccctgcaggtggactggcacgaggaggagtgggagaaagtgtggctgaacgtggacaagag

SEQ ID NO: 27874 - DNA, 120 bp, Artificial Sequence
  ENSG00000040933_15 (sequence is synthesized)
cctagagtgcatcattcagcgtgtggacaagctgctgcagaaggagcggctgcatggcgagggctgtgaggatgtcttcccctgtgcaggcagctgcaccagcaagaaagattgcagtcc

SEQ ID NO: 27875 - DNA, 120 bp, Artificial Sequence
  ENSG00000040933_16 (sequence is synthesized)
ccctcctgaagagtccagcccaggtgaatggagtgaggccctttacccgctgctgaccactctcaccgactgcgtggccatgatgagtgacaaggccaagaaggccatggtattcctgct

SEQ ID NO: 27876 - DNA, 120 bp, Artificial Sequence
  ENSG00000040933_17 (sequence is synthesized)
catgcaggacagcgcgcccaccatagccacctacctgagcctgcagtaccgccgtgacgtggtcttctgccagacgctgaccgccctcatctgcggcttcatcattaagctgaggaactg

SEQ ID NO: 27877 - DNA, 120 bp, Artificial Sequence
  ENSG00000040933_18 (sequence is synthesized)
cctgcatgacgacggcttcctgcgccagctctacaccatcgggctgctggcccagttcgagagcctgctgagcacctacggggaggagctggcaatgctggaggacatgagccttgggat

SEQ ID NO: 27878 - DNA, 120 bp, Artificial Sequence
  ENSG00000040933_19 (sequence is synthesized)
catggacttgaggaacgtgaccttcaaagtcactcaggccacttccagcgcctccgcagacatgctgcccgtcatcacaggaaatcgcgacgggtttaacgtgcgggtccctctgccggg

SEQ ID NO: 27879 - DNA, 120 bp, Artificial Sequence
  ENSG00000040933_20 (sequence is synthesized)
cccgctgtttgacgccttgccccgggagatccagagtggcatgctgctgcgagtgcagcccgtcctcttcaacgtgggcatcaatgagcagcagacactggccgagaggtttggcgatac

SEQ ID NO: 27880 - DNA, 120 bp, Artificial Sequence
  ENSG00000040933_21 (sequence is synthesized)
gtctttacaagaagtcatcaacgtggagagtttggtgcggttaaattcctactttgagcagtttaaggaagttttgcctgaggattgcctgcctcggtctcgcagtcagacgtgcctgcc

SEQ ID NO: 27881 - DNA, 120 bp, Artificial Sequence
  ENSG00000040933_22 (sequence is synthesized)
agagctgctgcggtttctgggtcagaacgtgcatgcccggaagaataagaacgtcgacattctctggcaagctgctgagatctgccgccgccttaatggggtccggttcaccagctgcaa

SEQ ID NO: 27882 - DNA, 120 bp, Artificial Sequence
  ENSG00000040933_23 (sequence is synthesized)
gagcgctaaggaccgtacagccatgtcggtgacactggagcagtgcctgatcctgcaacacgagcatggcatggccccgcaggtcttcacccaggccctggagtgcatgcgcagcattgg

SEQ ID NO: 27883 - DNA, 120 bp, Artificial Sequence
  ENSG00000040933_24 (sequence is synthesized)
aacacgggaggtagtcacccagaagaacttgagcggcctggtgcccatccgagacttaaggctagaccccagcctcctctgttccatccctttattagctctgagccccaatttactgat

SEQ ID NO: 27884 - DNA, 120 bp, Artificial Sequence
  ENSG00000040933_25 (sequence is synthesized)
tgtgtggctctttctgagcatagcatacctggtgaccaaattgcgttgcaaatgaatatcattatgaaaaattaataagtcacaagaaaaacaaaagtgccagaacatgtccagccaccg

SEQ ID NO: 27885 - DNA, 120 bp, Artificial Sequence
  ENSG00000040933_26 (sequence is synthesized)
aagtcgcaaatatgcatttaattccctgcagctgaaggctttccccaagcattacaggcctcccgaagggacttacggaaaagttgaaacgtgaacacacggtttcctctaattagctgt

SEQ ID NO: 27886 - DNA, 120 bp, Artificial Sequence
  ENSG00000040933_27 (sequence is synthesized)
tacataataaatgtgggtaccctctagtgtcatatatgaattcttcaagaagacctgaaggattggtttttattttttgtggtttttttaaaaaaaacatttcactaaagagtctctgga

SEQ ID NO: 27887 - DNA, 120 bp, Artificial Sequence
  ENSG00000040933_28 (sequence is synthesized)
gcatgttttttgttttttgggtttttttccccattggaatcaataggaggtaatgtttggctcaatagtgtggatagtaacaactgcctatttaaattaaatagcctttggctgtaacta

SEQ ID NO: 27888 - DNA, 120 bp, Artificial Sequence
  ENSG00000040933_29 (sequence is synthesized)
cacagatctcatcaatagttacctacatgaatcaagctaggtttgtctgaaatgctagaagactttttcaaatgcctgcttgctcacttacttttctacagagtaactcaaaagtaacca

SEQ ID NO: 27889 - DNA, 120 bp, Artificial Sequence
  ENSG00000040933_30 (sequence is synthesized)
ttgaattacaatccactttgtaaaaatctgaatgtaaaacagtaaataataaattaaataattggatcctaggcataccaataaatgttatttggggaaagaagctagcactatctcatg

SEQ ID NO: 27890 - DNA, 120 bp, Artificial Sequence
  ENSG00000040933_31 (sequence is synthesized)
cagtgagaataacgggttctagtgaattatcctatctacactaccacctgaagaagttgaaagaaagattgataaatcaacgggagataagactttattagaaggtaacacctgcaaggt

SEQ ID NO: 27891 - DNA, 120 bp, Artificial Sequence
  ENSG00000040933_32 (sequence is synthesized)
accccacatagttggggccactcttttttctgtcccttatgagttacagaacagggagtctgctggagacacaaagccagcagtaaggtccctttagcctgtctcctgttctctgaagct

SEQ ID NO: 27892 - DNA, 120 bp, Artificial Sequence
  ENSG00000040933_33 (sequence is synthesized)
ccctgccgaggctccctcacgcccagaggacacatctccccttcttctctagatgttaatgtagggcctcagatgtggcatgtcaacactcccatggggaatttatgaccatagagatag

SEQ ID NO: 27893 - DNA, 120 bp, Artificial Sequence
  ENSG00000040933_34 (sequence is synthesized)
tagaaacctaaatattttcagaaaaaaaattttttttgcaggatttccaatttatctttgaaaagacagtacaatcatgtttgaatgtctgatgaaagtgtcttatttttaggtttgcaa

SEQ ID NO: 27894 - DNA, 120 bp, Artificial Sequence
  ENSG00000040933_35 (sequence is synthesized)
taattgttactttcttattctcattcttatgtaagatgactattgagaaacagttgaaatttattctcctcaaatgagattttgaaagggatttatgggccataaaacttaggaatttca

SEQ ID NO: 27895 - DNA, 120 bp, Artificial Sequence
  ENSG00000040933_36 (sequence is synthesized)
tagaaaattttgtctggtcatcttttataagatgatgatgagtcttatctgcacatagcagagtttgtttcttaggagtttatatgttttattgattctgtttacgatgtttacatgttc

SEQ ID NO: 27896 - DNA, 120 bp, Artificial Sequence
  ENSG00000040933_37 (sequence is synthesized)
ttgaaaaggttgtaaaagaaatacatatggcacatattaatgatgctgatcctaatgatttgtgaacctcttagaaattcttttgtctaaaagcctagagattcttctggttcctttaga

SEQ ID NO: 27897 - DNA, 120 bp, Artificial Sequence
  ENSG00000040933_38 (sequence is synthesized)
aacatgtaacaaacttgggccaggggtgctgaggcatggggaggactgcttattggcaggaacacagagggggtgggcatcaggtagggtggaactggatgaccttccagaccccctcct

SEQ ID NO: 27898 - DNA, 120 bp, Artificial Sequence
  ENSG00000040933_39 (sequence is synthesized)
actcagaagtcagcatgcaagcagcgcctgctgtctcccgatgcctgcagggaggaaaatgtctgtgaaggacactttaatgaaggacgaagctctctgctgctccctcaaagctgagtt

SEQ ID NO: 27899 - DNA, 120 bp, Artificial Sequence
  ENSG00000040933_40 (sequence is synthesized)
cactgtggcaggcaggaagcagagaagctcctgcccgccaaacccactgcacaggtggctgctgctggtatcagattctcctttttaagtgtcaatttctgttcacagacagtttgtttt

SEQ ID NO: 27900 - DNA, 120 bp, Artificial Sequence
  ENSG00000040933_41 (sequence is synthesized)
ctcatttaatttgtaaatttttagttctgtcttttctcattttaacttttaaaaaatctccttgctttttaaaaataaatattacccacatagttttcagatcttttttgtctggagagc

SEQ ID NO: 27901 - DNA, 120 bp, Artificial Sequence
  ENSG00000040933_42 (sequence is synthesized)
attaaatatctgcactcatcaaagggaatatagcaaatgttgatcatctgtcagcagttttgcatgtgacacctttatatgaattattttcccaatttttgctctatgtaatgggtcacc

SEQ ID NO: 27902 - DNA, 120 bp, Artificial Sequence
  ENSG00000040933_43 (sequence is synthesized)
ataaaactgtaagacttggcaaatgctatagaaaaggttcaggtttcagtattctctctgaaggcatcattcctgggcttccggcagcatcacacgcttccagtgcctgcagggtgaggg

SEQ ID NO: 27903 - DNA, 120 bp, Artificial Sequence
  ENSG00000040933_44 (sequence is synthesized)
tgtgtggcacagaggcaagcagctcctctcttctgtaggagctttgggttttcagaggtgcagggaaggcagttttacaggttaccgtaaaacagaggttccgtccagtgttccttatga

SEQ ID NO: 27904 - DNA, 120 bp, Artificial Sequence
  ENSG00000040933_45 (sequence is synthesized)
tgcctccccatttaaaaagaaaagagatctatggaaaactgggaatgtaatgtggattctgtcagagctcctacagagcacagttgcctttagtttcctttaaagatgtaaaaatattgt

SEQ ID NO: 27905 - DNA, 120 bp, Artificial Sequence
  ENSG00000040933_46 (sequence is synthesized)
ataatacagttttgtccctacacaattgtatttgccaagcttagtgcattatgatacctttatttatttgttttgggcagtattactatatatatataaacatacagttactgttttata

SEQ ID NO: 27906 - DNA, 120 bp, Artificial Sequence
  ENSG00000040933_47 (sequence is synthesized)
tattcttaggtcattcaaagccatgtatgctgtaaatgtgctagtctttagaatgacacataataaataactgacaagatattaaatgtggtcttgcctgattcatcctattaggaggac

SEQ ID NO: 27907 - DNA, 120 bp, Artificial Sequence
  ENSG00000040933_48 (sequence is synthesized)
tagttctatgtgaccagcctgtgactggaccattgttcttgggcattgcattgagtgctcgggtgctgaatacatgtttgtaaacatgggaccatgggagacttccattttataagcttg

SEQ ID NO: 27908 - DNA, 120 bp, Artificial Sequence
  ENSG00000040933_49 (sequence is synthesized)
tttctgcctaatttgaagcagaggggcaacagcgttgaggttaagagcacggactttgggagcacacagaccaggtcccaatcctggttctgcccctgactggctggtgactctgagcaa

SEQ ID NO: 27909 - DNA, 120 bp, Artificial Sequence
  ENSG00000040933_50 (sequence is synthesized)
gttgcttgacctctccaagcctccgtttcctcatgtgcaaagtgtggacaacaacagtaccttcctcataaggaacgtgcgacgcgcctcagaagtacgtgttcataaatggtagccatt

SEQ ID NO: 27910 - DNA, 120 bp, Artificial Sequence
  ENSG00000040933_51 (sequence is synthesized)
gttgttaccttcccgtctgtgaacatggatcacatcatctctgtgggtaacccagtcctcgttgtatgacttgtcaaaatgcagttccacttgtattaatattgaccctgttcatcgtca

SEQ ID NO: 27911 - DNA, 120 bp, Artificial Sequence
  ENSG00000040933_52 (sequence is synthesized)
ccaggactgcatcttgcaccactgtgccgtcttctaggcacacacgacccgttatctcccttggaaaaattcctctcactggaaatgtacaattaaaggatgattgaaatgtttaactct

SEQ ID NO: 27912 - DNA, 120 bp, Artificial Sequence
  ENSG00000040933_53 (sequence is synthesized)
tggagtttttagtattaccaaactcctagaaatttaagctaccaccaaaaataacatgtgccttttccctttattctcattgatggtagcagtgcacctcgtttcagtgtcctgattcct

SEQ ID NO: 27913 - DNA, 120 bp, Artificial Sequence
  ENSG00000040933_54 (sequence is synthesized)
tgattactgtgaacactgaacatcttttatacctttatgatatttctatgtttgtgacttcattggaatgttgatctatttcatatagattgtttttaatatacaatgtattagcccctg

SEQ ID NO: 27914 - DNA, 120 bp, Artificial Sequence
  ENSG00000040933_55 (sequence is synthesized)
tcatatgttgcacactttttaacctatttgtcagctgtcttttggtctgtggtaggagttatacagtattttaaatggtttatgtagtcacatatacctgtctttcattttgatgcttgt

SEQ ID NO: 27915 - DNA, 120 bp, Artificial Sequence
  ENSG00000040933_56 (sequence is synthesized)
tctgaaatggagtcctggcttcaccatggaaggtgggacatatgggacagccatgtccttgtgggcatggtggtgtggctgcgtgcccacgacgaggggctggactaaagtgctcactgg

SEQ ID NO: 27916 - DNA, 120 bp, Artificial Sequence
  ENSG00000040933_57 (sequence is synthesized)
caccttgcttggtgcatgggccatgctcagtttaatattattaacagtttctaccttcactctcatgtctcaggattattttttcagcatttacctgttcttatttctaggatgtttatg

SEQ ID NO: 27917 - DNA, 120 bp, Artificial Sequence
  ENSG00000040933_58 (sequence is synthesized)
gtttcagtcctacatttagatcaatccatctggaatcatcttggtgtaagtcctgtgttgtgcttacagtatgtaaagtcagagggaatccctcaaggtcaggcctaattttgcttctct

SEQ ID NO: 27918 - DNA, 120 bp, Artificial Sequence
  ENSG00000040933_59 (sequence is synthesized)
ttaaagttaagccaagaagaagacatgtcaggacgcccagacatcagctaccgtgagcttcttcctgccctccctccgcatgccattctggtgctgcgcttcagtttcctgttgagtctc

SEQ ID NO: 27919 - DNA, 120 bp, Artificial Sequence
  ENSG00000040933_60 (sequence is synthesized)
tgcttagtagatgacttggcacaatctggctgcccagatctaggggagttgtcccagggaggctttgcgctggaggaaggtaagaggagctggaggttggagcttcccgatttgtgattt

SEQ ID NO: 27920 - DNA, 120 bp, Artificial Sequence
  ENSG00000040933_61 (sequence is synthesized)
ttccaagaacagaaatgattagccatgtggggaggttacttcattgtacattgttctactgcataacctccctctattctttaccagcatcacacagcaggttggcaccatttttgaata

SEQ ID NO: 27921 - DNA, 120 bp, Artificial Sequence
  ENSG00000040933_62 (sequence is synthesized)
gaggtttctcacagtatcctcagcagcattgagtgttcctaatgttgtagtaatgagcagtagatgtctctcagtgggcagtgtgacctctttggtcactctaaagggctgccagcattt

SEQ ID NO: 27922 - DNA, 120 bp, Artificial Sequence
  ENSG00000040933_63 (sequence is synthesized)
ctcttaagctggggggagaagagctgttctgtgtataggggtattgggaacacatggacagaaggaactggcctcacatgccatcgtgttcctgggatggctcttccaagaccagcagtt

SEQ ID NO: 27923 - DNA, 120 bp, Artificial Sequence
  ENSG00000040933_64 (sequence is synthesized)
cctcctggcaggcaggccctcacagaactctgcatttggagatggacaaactctcttcttcttatcactttctccccaaaatgtcctcttctaccagcccctcttaagagccgattttct

SEQ ID NO: 27924 - DNA, 120 bp, Artificial Sequence
  ENSG00000040933_65 (sequence is synthesized)
gtaagttatagtgagggcactgctctgctgtgcacagaaggaaccccagcccagaagcacacgctccctgtggaacctgcaggggtggcagtgatgacagaaccaagggggtcaaggaag

SEQ ID NO: 27925 - DNA, 120 bp, Artificial Sequence
  ENSG00000040933_66 (sequence is synthesized)
attggagaggagtgggcagcaggaaacagctcaggctgcctgacctggcccccggctgcccatgagggcctccagagaggggcagagctggcttatcgggatccatgatggtttttacac

SEQ ID NO: 27926 - DNA, 120 bp, Artificial Sequence
  ENSG00000040933_67 (sequence is synthesized)
ttttaaaagtgccctcttctcagagaccctggttatttccaaaagtaggaagtaatcaaatttacagtggataaaatccagtatttgaaatcaggaagacagaaaaaaaagcaaaatagc

SEQ ID NO: 27927 - DNA, 120 bp, Artificial Sequence
  ENSG00000040933_68 (sequence is synthesized)
atccttttctgagaggtatatgctgaccaaaaagatctttcattcctgtgaacaccaagcagcgcggcctctggcagagagagcgctgggttgtacagatggaaacttgtgtttagcagg

SEQ ID NO: 27928 - DNA, 120 bp, Artificial Sequence
  ENSG00000040933_69 (sequence is synthesized)
ctgtctgctcccaatagtggccctggctgcaactgacctcctgatgccctgctgacgctaactgtgggtaccaaccagcaccgtggacatcggccccaggatcagtctacgatttgtctg

SEQ ID NO: 27929 - DNA, 120 bp, Artificial Sequence
  ENSG00000040933_70 (sequence is synthesized)
gtggccaaatgatgacttttgagtgggaaaagctggtgggggctacaccgtgctctgcagtgtagtgggatcctgtgagctggcctgcacaggcactccctcccctgccaggggccccag

SEQ ID NO: 27930 - DNA, 120 bp, Artificial Sequence
  ENSG00000040933_71 (sequence is synthesized)
ggaggcttctccagcctgaggctgcaccctccatacgattccaccccccatcctgtgccaacagtaggcaaacggagagtagcttggtcttgtttttattagctgttgccctccaggcta

SEQ ID NO: 27931 - DNA, 120 bp, Artificial Sequence
  ENSG00000040933_72 (sequence is synthesized)
cgacagggttcccagggtgtagcctgaaaacacccatactctagattccctccactggaaccctgtctttgccatgatttcttcctgcatcaggcccctgtgggccttgcaggccagtcc

SEQ ID NO: 27932 - DNA, 120 bp, Artificial Sequence
  ENSG00000040933_73 (sequence is synthesized)
aggcaggtctttcacactgttgtcccacataacagaaaaagctgagcagacagggtaggaaacacacttgcatctccatggctccaaagaggatgcctgtgttagatggatgtagacaga

SEQ ID NO: 27933 - DNA, 120 bp, Artificial Sequence
  ENSG00000040933_74 (sequence is synthesized)
cacagcacttcactgcttcctcctcctcgccacccagccctccctcggtgtctgtggcctgactctctcctggtggtcctacgtctctgaccatccctcctcactctcaaattttatgtt

SEQ ID NO: 27934 - DNA, 120 bp, Artificial Sequence
  ENSG00000040933_75 (sequence is synthesized)
gcccaccacctgccactaatggcgtggtgttctcctgggttccctttctcacttaagatgatcttcctgaaaaatcttacacattcctgttgaacaaatggtcacttatatggtagtgac

SEQ ID NO: 27935 - DNA, 120 bp, Artificial Sequence
  ENSG00000040933_76 (sequence is synthesized)
tcctaaatttctaggtccatcccagactctcccccaaggtccagattacctatacatctaagcaccatgcctgtcttgcaggcatctcaaatacagcatgctcatgcctctcctcctcca

SEQ ID NO: 27936 - DNA, 120 bp, Artificial Sequence
  ENSG00000040933_77 (sequence is synthesized)
agctggctgagtctccctctaatagacgaccttgggatcattttctcctccacatcccatcaatcagccactgaacctgtatctcttgagaaccatcccataatttccatccatgcaccc

SEQ ID NO: 27937 - DNA, 120 bp, Artificial Sequence
  ENSG00000040933_78 (sequence is synthesized)
caaggcctggtctgtatcagtcccctcggatctggacctctcctgagcatcctcacccctcctgcaaggctagtctcaggtctgccttcctctatggtgatttctccccacaaatgaagt

SEQ ID NO: 27938 - DNA, 120 bp, Artificial Sequence
  ENSG00000040933_79 (sequence is synthesized)
tggccctttcaaaaaaacttcctctccttcattgttgactatgaagattctttcatgcatgtcctgtccactgtcagtcccctctgtattcacaagagcaagtgtaatgcccgctgtgaa

SEQ ID NO: 27939 - DNA, 120 bp, Artificial Sequence
  ENSG00000040933_80 (sequence is synthesized)
ggagctaaagtttgttgaataaacacatgaacaaatggtggttttgtggtgttcaactgaaatatttcctatttcagcactggaccacgctgtttttctcactacataatcggttacgct

SEQ ID NO: 27940 - DNA, 120 bp, Artificial Sequence
  ENSG00000040933_81 (sequence is synthesized)
aaatgcatcacgagccaaattcaaaaggtcaaaggagaaggcaaatggcagagtgtggtaaaggggcgagtgagagggtctctgaaaaaagtcaggctaaaattacagggggttcaggca

SEQ ID NO: 27941 - DNA, 120 bp, Artificial Sequence
  ENSG00000040933_82 (sequence is synthesized)
atgttatcttgatctggatggccagttacatgacagattactttgttcttaacatacgaacatcctattcactttttggtatactggttgtttaacagtaaaaattaaatgtttaaaacc

SEQ ID NO: 27942 - DNA, 120 bp, Artificial Sequence
  ENSG00000040933_83 (sequence is synthesized)
ctgatgccacctttccatctttctgtctctgccctgtcccctgaccggcgtggtgtggagcactcagcagcaacgtgaagtaattagcacaggacctgtgtacgccagggcgaggctgtg

SEQ ID NO: 27943 - DNA, 120 bp, Artificial Sequence
  ENSG00000040933_84 (sequence is synthesized)
ccctccaccatgccctccactgcatgccatcctcatctgaccacacgtgcgtatgcatccatgcttcccatatgctgcctccatttcaccttgtgctgcttccatttgtctgtgtctctg

SEQ ID NO: 27944 - DNA, 120 bp, Artificial Sequence
  ENSG00000040933_85 (sequence is synthesized)
actccatgccctcctcccccatgcagactgcagggagggctgccaggtggagcgggggcgtcccagtgcatggagcagcaggcagtgagagcggagtctccggttgcctttccatgtaac

SEQ ID NO: 27945 - DNA, 120 bp, Artificial Sequence
  ENSG00000040933_86 (sequence is synthesized)
tggagcccatgtgtgattctgcatctctgccagtcagaatctcagggtcctcttgagatacaccaccatggctataagggttgggctcctgggcttttcaggtttgtaaagcaatctgag

SEQ ID NO: 27946 - DNA, 120 bp, Artificial Sequence
  ENSG00000040933_87 (sequence is synthesized)
cctatgtgacatggctccttcccatgctgtcgtagtcactgacacaagatgtgtttggtggcatgcattgtgcacctcctggtaggacttgggggaatcacagaggcaggacccaccctc

SEQ ID NO: 27947 - DNA, 120 bp, Artificial Sequence
  ENSG00000040933_88 (sequence is synthesized)
tgcagccacagaactaagggaggaaccgagagctgcacagcactgtctacgagaattccctcttgagttcaacccagtgaatattccctgaggacctgctgtgtgtaaagtgctagagga

SEQ ID NO: 27948 - DNA, 120 bp, Artificial Sequence
  ENSG00000040933_89 (sequence is synthesized)
tccgatggcgaatgaggggtggaccctaccttggagggaaagctggtcccagagtgccggcctctctgtgcaggcgctgccacagccactagggggcgccacgcgtcagaaggtcacgga

SEQ ID NO: 27949 - DNA, 120 bp, Artificial Sequence
  ENSG00000040933_90 (sequence is synthesized)
tgtgccagacactgggctgggctctacatacgtttccacgctgaatccacaacagccctatgggtcggtgataggatccatgtccagatgaagaaaggggtgcctggctctgaagcccat

SEQ ID NO: 27950 - DNA, 120 bp, Artificial Sequence
  ENSG00000040933_91 (sequence is synthesized)
gtgcttggattgtggctgaagccgtcctgctaggagagagtgatgcagaacactccggggctgggccaagaagtcgtggcttcagcagggaagcagtgggaaaaaagacgcctcttcaca

SEQ ID NO: 27951 - DNA, 120 bp, Artificial Sequence
  ENSG00000040933_92 (sequence is synthesized)
ttaaactaggcttattgctcagtctaattatcttaacttgtaaaggttggttctttctagagacagcaggagttgtagcatatagggttggaaaaacctgaaacaccttctcgctgctta

SEQ ID NO: 27952 - DNA, 120 bp, Artificial Sequence
  ENSG00000040933_93 (sequence is synthesized)
atctagttctgagagcagagtgtgagctctggagctctgagccatgtgaagcgtgtgactcagcctgtggcagtgttttacccagagccctccctttccatagcacagcaccctccactt

SEQ ID NO: 27953 - DNA, 120 bp, Artificial Sequence
  ENSG00000040933_94 (sequence is synthesized)
cgcttaggcccagattacatgctttgcgggaaggaaagcctgagacccagacacacgtgaagtttatgcagctctgggaagaaagccagcaggttagagttgtgagctttgtctcactag

SEQ ID NO: 27954 - DNA, 120 bp, Artificial Sequence
  ENSG00000040933_95 (sequence is synthesized)
tgttttgccacctgtatgtagcccgtggacagcagactcttctgcagctcttacccttctcacagaggttgtggtgaattgatttaaatatttaaaggttctaagagacttgccaacaga

SEQ ID NO: 27955 - DNA, 120 bp, Artificial Sequence
  ENSG00000040933_96 (sequence is synthesized)
agagcataataaagagaacaagaaaatctcgaaagccatattttataattatatgaaaaccatcattcactgtggcatatctctgctgaagaggacaggacatcctcaagggatcccatg

SEQ ID NO: 27956 - DNA, 120 bp, Artificial Sequence
  ENSG00000040933_97 (sequence is synthesized)
gacaccctgtgttggggagtggggaggaagaagtgaccagaaggggcagggagcagtggacagtccaccccggttcctcacatgctggggaaccctgtcactgtacctcgcccccgggct

SEQ ID NO: 27957 - DNA, 120 bp, Artificial Sequence
  ENSG00000040933_98 (sequence is synthesized)
gcatgggcttgtctcagagagcttgctgctgctgccaccactgctgcagcgtttctgagaagacggagccctcacagttgtgaacttctgtggatgggaaggcaccttggagcctccgtg

SEQ ID NO: 27958 - DNA, 120 bp, Artificial Sequence
  ENSG00000040933_99 (sequence is synthesized)
cccacaggctcctgtctcctcagcatggggcccgcccccttgggggtatgctctccacaggtggctggggacagggaggtgagcccacctagagctgccaacagagaccctccccacccc

SEQ ID NO: 27959 - DNA, 120 bp, Artificial Sequence
  ENSG00000040933_100 (sequence is synthesized)
caccccaatgggggaaagggaaggaggggttggggaaaccgggcatagagttcagctttgttgcccctggctgcaaggccttgtgttggctgagtttcgctctctagccctcagttccct

SEQ ID NO: 27960 - DNA, 120 bp, Artificial Sequence
  ENSG00000040933_101 (sequence is synthesized)
attgtataaaaggcaacattggcacctgcatgctctctttctcaggatcagataagaatatactaaaaagtggatcagaatgtgctgagtctggggtcagcgatacgtggcatcactgtg

SEQ ID NO: 27961 - DNA, 120 bp, Artificial Sequence
  ENSG00000040933_102 (sequence is synthesized)
cttacccaggaggcctgagacgcctctccatcagagcccaatgctacccagcgctcctctccccttttcccattccttggtcaacattagttggtggcctggcaccaatgtccaagaggt

SEQ ID NO: 27962 - DNA, 120 bp, Artificial Sequence
  ENSG00000040933_103 (sequence is synthesized)
ggtgtgacataaaagaggcacctcctggggagtcagatgacctggattccagccctgaccatgccaggctaaccacatggccttgagcctgccactcgaccttgctggaacagtttcctc

SEQ ID NO: 27963 - DNA, 120 bp, Artificial Sequence
  ENSG00000040933_104 (sequence is synthesized)
ctgtgctacgtgaggatgctactgcttgtttgagagacaaagaagatcaaggtggttaagcaccccccagccccaaaagacttggacaaattgcaaaacccataaaagtgtaagtacact

SEQ ID NO: 27964 - DNA, 82 bp, Artificial Sequence
  ENSG00000040933_105 (sequence is synthesized)
cttggacaaattgcaaaacccataaaagtgtaagtacactactggccgggtataagccaggaggattgcttgaggccaggag

SEQ ID NO: 27965 - DNA, 120 bp, Artificial Sequence
  ENSG00000041353_0 (sequence is synthesized)
actcgcagtcctgacgggcaggggctgcggaccgcccggccttggacccatccggagccacaggttggaggagataagtagctgtccccgtgctcatcgccctgtggagcagatcctgtc

SEQ ID NO: 27966 - DNA, 120 bp, Artificial Sequence
  ENSG00000041353_1 (sequence is synthesized)
tccttgctgacggtggagcccgggagttccagggcttgggaaggggaaggaaacctctctgaaatctgacacctgctctcccggcaaggaaacttcgcaggctgaccgaccaagaccatc

SEQ ID NO: 27967 - DNA, 120 bp, Artificial Sequence
  ENSG00000041353_2 (sequence is synthesized)
actatgaccgatggagactatgattatctgatcaaactcctggccctcggggattcaggggtggggaagacaacatttctttatagatacacagataataaattcaatcccaaattcatc

SEQ ID NO: 27968 - DNA, 120 bp, Artificial Sequence
  ENSG00000041353_3 (sequence is synthesized)
actacagtaggaatagactttcgggaaaaacgtgtggtttataatgcacaaggaccgaatggatcttcagggaaagcatttaaagtgcatcttcagctttgggacactgcgggacaagag

SEQ ID NO: 27969 - DNA, 120 bp, Artificial Sequence
  ENSG00000041353_4 (sequence is synthesized)
cggttccggagtctcaccactgcatttttcagagacgccatgggcttcttattaatgtttgacctcaccagtcaacagagcttcttaaatgtcagaaactggatgagccaactgcaagca

SEQ ID NO: 27970 - DNA, 120 bp, Artificial Sequence
  ENSG00000041353_5 (sequence is synthesized)
aatgcttattgtgaaaatccagatatagtattaattggcaacaaggcagacctaccagatcagagggaagtcaatgaacggcaagctcgggaactggctgacaaatatggcataccatat

SEQ ID NO: 27971 - DNA, 120 bp, Artificial Sequence
  ENSG00000041353_6 (sequence is synthesized)
tttgaaacaagtgcagcaactggacagaatgtggagaaagctgtagaaacccttttggacttaatcatgaagcgaatggaacagtgtgtggagaagacacaaatccctgatactgtcaat

SEQ ID NO: 27972 - DNA, 120 bp, Artificial Sequence
  ENSG00000041353_7 (sequence is synthesized)
ggtggaaattctggaaacttggatggggaaaagccaccagagaagaaatgtatctgctagactctacatagaaactgaacatcaagaaccccaccaaaatattacttttaaaaacaatga

SEQ ID NO: 27973 - DNA, 120 bp, Artificial Sequence
  ENSG00000041353_8 (sequence is synthesized)
caaaccacacaattgttgttgagtaaaccacgcacaatggcatgtctttctttttctgccagaaaatctattttaagaaaccagaatagtcaacagtgttcaaaagaattgactagttat

SEQ ID NO: 27974 - DNA, 120 bp, Artificial Sequence
  ENSG00000041353_9 (sequence is synthesized)
ccctgaggccctttcaaacatgatcaaagatttcccaatgtgatctcatcatcatggatactcaatttgttttttcttatagagaaaatgagtatataagacaatatacaagaagaaata

SEQ ID NO: 27975 - DNA, 120 bp, Artificial Sequence
  ENSG00000041353_10 (sequence is synthesized)
tcagtgagttttaaatcagaacaagttacctgtcacattgaagaaaagggtaggcactaaagggagaacacagaaagaagaatttctaaaatattggatttacttcttatattgagtcag

SEQ ID NO: 27976 - DNA, 120 bp, Artificial Sequence
  ENSG00000041353_11 (sequence is synthesized)
atgcatacttttagatttgcattggggaaaatgtactagctaaaaatggatacacaatgaagaattctatttggctaattaagaatgatatactatgtacacccaataagctgtactaga

SEQ ID NO: 27977 - DNA, 120 bp, Artificial Sequence
  ENSG00000041353_12 (sequence is synthesized)
atgaataaattactgataaggttacaaataggtaaatgtcacacttctgttaaaatgcaggaggtagtgtcataatgccgtctttatattcttaataaatagcactttgacaagaacagg

SEQ ID NO: 27978 - DNA, 120 bp, Artificial Sequence
  ENSG00000041353_13 (sequence is synthesized)
actgtaaatgatgaagtacaagacaaataccctgggaaaaaaaatgaaagtatgagaaattggcatttctacagctgaaattcaatgtatctgttagagatgtctggaagggttacttag

SEQ ID NO: 27979 - DNA, 120 bp, Artificial Sequence
  ENSG00000041353_14 (sequence is synthesized)
ccaaattttactcaagccaattaggagctgatattatcagttggaattaagagaactccagaggtttccatttcaaacaaaattttagaaattggtttggtgttcagcttcacatttcat

SEQ ID NO: 27980 - DNA, 120 bp, Artificial Sequence
  ENSG00000041353_15 (sequence is synthesized)
tttttcttagcacatgttgataaaatagtcacaaggagaaattaccagttacggtttattaaatctcttttaaaatgcagtcaaggaaaactagccttgaattttttttagataaaataa

SEQ ID NO: 27981 - DNA, 120 bp, Artificial Sequence
  ENSG00000041353_16 (sequence is synthesized)
gatggtgatatgaaacaaaaagtggcaattattgcaggtttccttttagtttacaaaagtactggaaactaaatcatatttcttccctccaaatttcacccattcctgactttgaatcaa

SEQ ID NO: 27982 - DNA, 120 bp, Artificial Sequence
  ENSG00000041353_17 (sequence is synthesized)
ttgcagaaatgcaggtgtgttactttgttgatcaataactttggaacaattatggatcaattctatggtcactctgaattttcatgtcattaatcacataaaaattgataatacctcatt

SEQ ID NO: 27983 - DNA, 120 bp, Artificial Sequence
  ENSG00000041353_18 (sequence is synthesized)
ctgtattacaatatgattttattttgccaaaggcaagacacctatagttgagctgtattttgggggattgggtgaggaaggacttctgatcttatctcaacaaaaaactggccagtattt

SEQ ID NO: 27984 - DNA, 120 bp, Artificial Sequence
  ENSG00000041353_19 (sequence is synthesized)
ttgttaatgtaaagcttccttttctttctaaaaaatagtaacaaaattatttttcattggcctattctgttcttgtgtctaaactaacattacattaatttttaatcttagtttctgata

SEQ ID NO: 27985 - DNA, 120 bp, Artificial Sequence
  ENSG00000041353_20 (sequence is synthesized)
aacacaagccattcctatcaaaatattatttatttcagtcaattttaccaaataacaaagacaatatattttcgtttttttttattatgagcatatgattttttgacaggctgtttcctc

SEQ ID NO: 27986 - DNA, 120 bp, Artificial Sequence
  ENSG00000041353_21 (sequence is synthesized)
gtcgtatagattttttccaatcaaacctactttttccatactctgtgcatattttttgtgaagttatacacattgaagaccctaaaaatcccagtccatcattcagcttacctctgcgaa

SEQ ID NO: 27987 - DNA, 120 bp, Artificial Sequence
  ENSG00000041353_22 (sequence is synthesized)
cttctatctggtattgaatcagtttcagaaacacagacagatccaaggaaatgtctctttataatgttcttaggatggactagacccataaatgtgccatgaatcaaaatattaataatt
